United States Patent Application Publication US 2005/0255487 A1 - sequence listing, part 7

SEQ ID NO: 166206 - RNA, 19 nt, Homo sapiens
  misc_RNA (1)...(19): siRNA sense strand
ccacauagcugaucugaaa

SEQ ID NO: 166207 - RNA, 19 nt, Homo sapiens
  misc_RNA (1)...(19): siRNA sense strand
ugaaaucacucacauugua

SEQ ID NO: 166208 - RNA, 19 nt, Homo sapiens
  misc_RNA (1)...(19): siRNA sense strand
uaaggaaccucuaucauga

SEQ ID NO: 166209 - RNA, 19 nt, Homo sapiens
  misc_RNA (1)...(19): siRNA sense strand
gcagguggcuguuaaaucu

SEQ ID NO: 166210 - RNA, 19 nt, Homo sapiens
  misc_RNA (1)...(19): siRNA sense strand
ugcaugagcugcugacuua

SEQ ID NO: 166211 - RNA, 19 nt, Homo sapiens
  misc_RNA (1)...(19): siRNA sense strand
uuacggugcugaaauauuu

SEQ ID NO: 166212 - RNA, 19 nt, Homo sapiens
  misc_RNA (1)...(19): siRNA sense strand
guauuaagcucaucaugga

SEQ ID NO: 166213 - RNA, 19 nt, Homo sapiens
  misc_RNA (1)...(19): siRNA sense strand
ccagaaacauugaauaagu

SEQ ID NO: 166214 - RNA, 19 nt, Homo sapiens
  misc_RNA (1)...(19): siRNA sense strand
ggaaauguguguacuaaaa

SEQ ID NO: 166215 - RNA, 19 nt, Homo sapiens
  misc_RNA (1)...(19): siRNA sense strand
cagaauacgccaucaauaa

SEQ ID NO: 166216 - RNA, 19 nt, Homo sapiens
  misc_RNA (1)...(19): siRNA sense strand
gaaugacgguggaaacguu

SEQ ID NO: 166217 - RNA, 19 nt, Homo sapiens
  misc_RNA (1)...(19): siRNA sense strand
caagaaggaugaggagaaa

SEQ ID NO: 166218 - RNA, 19 nt, Homo sapiens
  misc_RNA (1)...(19): siRNA sense strand
gaaccacgcucugggaaau

SEQ ID NO: 166219 - RNA, 19 nt, Homo sapiens
  misc_RNA (1)...(19): siRNA sense strand
gcacaggcaugccguaucu

SEQ ID NO: 166220 - RNA, 19 nt, Homo sapiens
  misc_RNA (1)...(19): siRNA sense strand
acaagacgcugauugagaa

SEQ ID NO: 166221 - RNA, 19 nt, Homo sapiens
  misc_RNA (1)...(19): siRNA sense strand
gggaagaguggaacaauuu

SEQ ID NO: 166222 - RNA, 19 nt, Homo sapiens
  misc_RNA (1)...(19): siRNA sense strand
gaugagguuuaucagcuua

SEQ ID NO: 166223 - RNA, 19 nt, Homo sapiens
  misc_RNA (1)...(19): siRNA sense strand
cgggaagccuuaaggaaua

SEQ ID NO: 166224 - RNA, 19 nt, Homo sapiens
  misc_RNA (1)...(19): siRNA sense strand
ugaaaugccuggcuccuau

SEQ ID NO: 166225 - RNA, 19 nt, Homo sapiens
  misc_RNA (1)...(19): siRNA sense strand
gaaacguucucuacuacga

SEQ ID NO: 166226 - RNA, 19 nt, Homo sapiens
  misc_RNA (1)...(19): siRNA sense strand
guggaaacguucucuacua

SEQ ID NO: 166227 - RNA, 19 nt, Homo sapiens
  misc_RNA (1)...(19): siRNA sense strand
gaaaucacucacauuguaa

SEQ ID NO: 166228 - RNA, 19 nt, Homo sapiens
  misc_RNA (1)...(19): siRNA sense strand
ccaccuaacuguccagaug

SEQ ID NO: 166229 - RNA, 19 nt, Homo sapiens
  misc_RNA (1)...(19): siRNA sense strand
gaaaugguauuaagcucau

SEQ ID NO: 166230 - RNA, 19 nt, Homo sapiens
  misc_RNA (1)...(19): siRNA sense strand
ggagcuggcugaccucaug

SEQ ID NO: 166231 - RNA, 19 nt, Homo sapiens
  misc_RNA (1)...(19): siRNA sense strand
acauuacggugcugaaaua

SEQ ID NO: 166232 - RNA, 19 nt, Homo sapiens
  misc_RNA (1)...(19): siRNA sense strand
gggagcagguggcuguuaa

SEQ ID NO: 166233 - RNA, 19 nt, Homo sapiens
  misc_RNA (1)...(19): siRNA sense strand
caaauguuguuucuguuga

SEQ ID NO: 166234 - RNA, 19 nt, Homo sapiens
  misc_RNA (1)...(19): siRNA sense strand
aaaccgauaaggaguauua

SEQ ID NO: 166235 - RNA, 19 nt, Homo sapiens
  misc_RNA (1)...(19): siRNA sense strand
gaagacggaggaaauggua

SEQ ID NO: 166236 - RNA, 19 nt, Homo sapiens
  misc_RNA (1)...(19): siRNA sense strand
gcugguggcuacuaagaaa

SEQ ID NO: 166237 - RNA, 19 nt, Homo sapiens
  misc_RNA (1)...(19): siRNA sense strand
gacaugauauugagaacga

SEQ ID NO: 166238 - RNA, 19 nt, Homo sapiens
  misc_RNA (1)...(19): siRNA sense strand
guaaggggauggacuauuu

SEQ ID NO: 166239 - RNA, 19 nt, Homo sapiens
  misc_RNA (1)...(19): siRNA sense strand
gaagagcagaauccagaua

SEQ ID NO: 166240 - RNA, 19 nt, Homo sapiens
  misc_RNA (1)...(19): siRNA sense strand
gaaauucaaaguugccaaa

SEQ ID NO: 166241 - RNA, 19 nt, Homo sapiens
  misc_RNA (1)...(19): siRNA sense strand
ccauggaaauucaaaguug

SEQ ID NO: 166242 - RNA, 19 nt, Homo sapiens
  misc_RNA (1)...(19): siRNA sense strand
gaaagagagauucuaugaa

SEQ ID NO: 166243 - RNA, 19 nt, Homo sapiens
  misc_RNA (1)...(19): siRNA sense strand
uuacaaggaugacgaagga

SEQ ID NO: 166244 - RNA, 19 nt, Homo sapiens
  misc_RNA (1)...(19): siRNA sense strand
cggaugagguucuauuuca

SEQ ID NO: 166245 - RNA, 19 nt, Homo sapiens
  misc_RNA (1)...(19): siRNA sense strand
ugaaauacuuggcuaccuu

SEQ ID NO: 166246 - RNA, 19 nt, Homo sapiens
  misc_RNA (1)...(19): siRNA sense strand
aacaucagcuucaugcuaa

SEQ ID NO: 166247 - RNA, 19 nt, Homo sapiens
  misc_RNA (1)...(19): siRNA sense strand
uaacaucagcuucaugcua

SEQ ID NO: 166248 - RNA, 19 nt, Homo sapiens
  misc_RNA (1)...(19): siRNA sense strand
ugccguaucucuccucuuu

SEQ ID NO: 166249 - RNA, 19 nt, Homo sapiens
  misc_RNA (1)...(19): siRNA sense strand
gaaccucuaucaugagaac

SEQ ID NO: 166250 - RNA, 19 nt, Homo sapiens
  misc_RNA (1)...(19): siRNA sense strand
ugggaaaucugcuacaaug

SEQ ID NO: 166251 - RNA, 19 nt, Homo sapiens
  misc_RNA (1)...(19): siRNA sense strand
caagcgauauauuccagaa

SEQ ID NO: 166252 - RNA, 19 nt, Homo sapiens
  misc_RNA (1)...(19): siRNA sense strand
gagcagaauccagauauug

SEQ ID NO: 166253 - RNA, 19 nt, Homo sapiens
  misc_RNA (1)...(19): siRNA sense strand
gaauacgccaucaauaaau

SEQ ID NO: 166254 - RNA, 19 nt, Homo sapiens
  misc_RNA (1)...(19): siRNA sense strand
ccaaggacaucagcuacaa

SEQ ID NO: 166255 - RNA, 19 nt, Homo sapiens
  misc_RNA (1)...(19): siRNA sense strand
aaaucgagaucuuaaggaa

SEQ ID NO: 166256 - RNA, 19 nt, Homo sapiens
  misc_RNA (1)...(19): siRNA sense strand
gcauaaaccaaauguuguu

SEQ ID NO: 166257 - RNA, 19 nt, Homo sapiens
  misc_RNA (1)...(19): siRNA sense strand
ccaggaugcggauaaauaa

SEQ ID NO: 166258 - RNA, 19 nt, Homo sapiens
  misc_RNA (1)...(19): siRNA sense strand
ggaugcggauaaauaaugu

SEQ ID NO: 166259 - RNA, 19 nt, Homo sapiens
  misc_RNA (1)...(19): siRNA sense strand
gguaugcuccagaauguuu

SEQ ID NO: 166260 - RNA, 19 nt, Homo sapiens
  misc_RNA (1)...(19): siRNA sense strand
ucaaacagcagcuaaaaua

SEQ ID NO: 166261 - RNA, 19 nt, Homo sapiens
  misc_RNA (1)...(19): siRNA sense strand
gacaagacgcugauugaga

SEQ ID NO: 166262 - RNA, 19 nt, Homo sapiens
  misc_RNA (1)...(19): siRNA sense strand
cugggacccugauggauua

SEQ ID NO: 166263 - RNA, 19 nt, Homo sapiens
  misc_RNA (1)...(19): siRNA sense strand
gcaccgacuuugacaacau

SEQ ID NO: 166264 - RNA, 19 nt, Homo sapiens
  misc_RNA (1)...(19): siRNA sense strand
gcugaaauauuugagacuu

SEQ ID NO: 166265 - RNA, 19 nt, Homo sapiens
  misc_RNA (1)...(19): siRNA sense strand
gagcaggauggacaugaua

SEQ ID NO: 166266 - RNA, 19 nt, Homo sapiens
  misc_RNA (1)...(19): siRNA sense strand
augagaacauugugaagua

SEQ ID NO: 166267 - RNA, 19 nt, Homo sapiens
  misc_RNA (1)...(19): siRNA sense strand
gcugacaaguggagcuuug

SEQ ID NO: 166268 - RNA, 19 nt, Homo sapiens
  misc_RNA (1)...(19): siRNA sense strand
ccaagaagacugaggugaa

SEQ ID NO: 166269 - RNA, 19 nt, Homo sapiens
  misc_RNA (1)...(19): siRNA sense strand
gagguucuauuucaccaau

SEQ ID NO: 166270 - RNA, 19 nt, Homo sapiens
  misc_RNA (1)...(19): siRNA sense strand
ugaaggauuugaagcacuu

SEQ ID NO: 166271 - RNA, 19 nt, Homo sapiens
  misc_RNA (1)...(19): siRNA sense strand
ugagagacauuaauaagcu

SEQ ID NO: 166272 - RNA, 19 nt, Homo sapiens
  misc_RNA (1)...(19): siRNA sense strand
ccagugacaccaucaugua

SEQ ID NO: 166273 - RNA, 19 nt, Homo sapiens
  misc_RNA (1)...(19): siRNA sense strand
gcaagaaugcauugaacga

SEQ ID NO: 166274 - RNA, 19 nt, Homo sapiens
  misc_RNA (1)...(19): siRNA sense strand
ugagcuacuuggaggauaa

SEQ ID NO: 166275 - RNA, 19 nt, Homo sapiens
  misc_RNA (1)...(19): siRNA sense strand
gcucugguaugcuccaaau

SEQ ID NO: 166276 - RNA, 19 nt, Homo sapiens
  misc_RNA (1)...(19): siRNA sense strand
agaauacgccaucaauaaa

SEQ ID NO: 166277 - RNA, 19 nt, Homo sapiens
  misc_RNA (1)...(19): siRNA sense strand
ggauggacaugauauugag

SEQ ID NO: 166278 - RNA, 19 nt, Homo sapiens
  misc_RNA (1)...(19): siRNA sense strand
caacgacaaugagcaguca

SEQ ID NO: 166279 - RNA, 19 nt, Homo sapiens
  misc_RNA (1)...(19): siRNA sense strand
gcagaggaacugugcauca

SEQ ID NO: 166280 - RNA, 19 nt, Homo sapiens
  misc_RNA (1)...(19): siRNA sense strand
gaaaucgagaucuuaagga

SEQ ID NO: 166281 - RNA, 19 nt, Homo sapiens
  misc_RNA (1)...(19): siRNA sense strand
uaaagaggauccgugacuu

SEQ ID NO: 166282 - RNA, 19 nt, Homo sapiens
  misc_RNA (1)...(19): siRNA sense strand
caaccucuuugcccuguau

SEQ ID NO: 166283 - RNA, 19 nt, Homo sapiens
  misc_RNA (1)...(19): siRNA sense strand
ggacccugauggauuacaa

SEQ ID NO: 166284 - RNA, 19 nt, Homo sapiens
  misc_RNA (1)...(19): siRNA sense strand
cgagaacacacaucuauuc

SEQ ID NO: 166285 - RNA, 19 nt, Homo sapiens
  misc_RNA (1)...(19): siRNA sense strand
gcucagggacaguaugauu

SEQ ID NO: 166286 - RNA, 19 nt, Homo sapiens
  misc_RNA (1)...(19): siRNA sense strand
gcagaauccagauauuguu

SEQ ID NO: 166287 - RNA, 19 nt, Homo sapiens
  misc_RNA (1)...(19): siRNA sense strand
gaguguggcugcugacaag

SEQ ID NO: 166288 - RNA, 19 nt, Homo sapiens
  misc_RNA (1)...(19): siRNA sense strand
gugagggaaucgacaguga

SEQ ID NO: 166289 - RNA, 19 nt, Homo sapiens
  misc_RNA (1)...(19): siRNA sense strand
aaccaaauguuguuucugu

SEQ ID NO: 166290 - RNA, 19 nt, Homo sapiens
  misc_RNA (1)...(19): siRNA sense strand
cagaaacauugaauaaguc

SEQ ID NO: 166291 - RNA, 19 nt, Homo sapiens
  misc_RNA (1)...(19): siRNA sense strand
auacuuggcuaccuuggaa

SEQ ID NO: 166292 - RNA, 19 nt, Homo sapiens
  misc_RNA (1)...(19): siRNA sense strand
uuaaggaaccucuaucaug

SEQ ID NO: 166293 - RNA, 19 nt, Homo sapiens
  misc_RNA (1)...(19): siRNA sense strand
gcacggauaacaucagcuu

SEQ ID NO: 166294 - RNA, 19 nt, Homo sapiens
  misc_RNA (1)...(19): siRNA sense strand
ugccagaacugcccaagga

SEQ ID NO: 166295 - RNA, 19 nt, Homo sapiens
  misc_RNA (1)...(19): siRNA sense strand
aauaugccguucagauuug

SEQ ID NO: 166296 - RNA, 19 nt, Homo sapiens
  misc_RNA (1)...(19): siRNA sense strand
gcacagaagacggaggaaa

SEQ ID NO: 166297 - RNA, 19 nt, Homo sapiens
  misc_RNA (1)...(19): siRNA sense strand
gguucuauuucaccaauug

SEQ ID NO: 166298 - RNA, 19 nt, Homo sapiens
  misc_RNA (1)...(19): siRNA sense strand
augaggagcuccaagaaga

SEQ ID NO: 166299 - RNA, 19 nt, Homo sapiens
  misc_RNA (1)...(19): siRNA sense strand
gcacgagaacacacaucua

SEQ ID NO: 166300 - RNA, 19 nt, Homo sapiens
  misc_RNA (1)...(19): siRNA sense strand
aaaggaaaucgagaucuua

SEQ ID NO: 166301 - RNA, 19 nt, Homo sapiens
  misc_RNA (1)...(19): siRNA sense strand
ggacaagcuuucagaaccu

SEQ ID NO: 166302 - RNA, 19 nt, Homo sapiens
  misc_RNA (1)...(19): siRNA sense strand
ccucugacgucuggucuuu

SEQ ID NO: 166303 - RNA, 19 nt, Homo sapiens
  misc_RNA (1)...(19): siRNA sense strand
caauugaaaccgauaagga

SEQ ID NO: 166304 - RNA, 19 nt, Homo sapiens
  misc_RNA (1)...(19): siRNA sense strand
gagugaacaccaagugaaa

SEQ ID NO: 166305 - RNA, 19 nt, Homo sapiens
  misc_RNA (1)...(19): siRNA sense strand
ggaaaucgagaucuuaagg

SEQ ID NO: 166306 - RNA, 19 nt, Homo sapiens
  misc_RNA (1)...(19): siRNA sense strand
gaacagguggcacagcuua

SEQ ID NO: 166307 - RNA, 19 nt, Homo sapiens
  misc_RNA (1)...(19): siRNA sense strand
ccaagaacgugacagauga

SEQ ID NO: 166308 - RNA, 19 nt, Homo sapiens
  misc_RNA (1)...(19): siRNA sense strand
aaaggaagcuggagagaau

SEQ ID NO: 166309 - RNA, 19 nt, Homo sapiens
  misc_RNA (1)...(19): siRNA sense strand
uggcacagcuuaaacagaa

SEQ ID NO: 166310 - RNA, 19 nt, Homo sapiens
  misc_RNA (1)...(19): siRNA sense strand
gaccuuauggcuacaguaa

SEQ ID NO: 166311 - RNA, 19 nt, Homo sapiens
  misc_RNA (1)...(19): siRNA sense strand
gaacugcacagccagaaca

SEQ ID NO: 166312 - RNA, 19 nt, Homo sapiens
  misc_RNA (1)...(19): siRNA sense strand
gagcuggagcgccugauaa

SEQ ID NO: 166313 - RNA, 19 nt, Homo sapiens
  misc_RNA (1)...(19): siRNA sense strand
uggaaacgaccuucuauga

SEQ ID NO: 166314 - RNA, 19 nt, Homo sapiens
  misc_RNA (1)...(19): siRNA sense strand
gauggaaacgaccuucuau

SEQ ID NO: 166315 - RNA, 19 nt, Homo sapiens
  misc_RNA (1)...(19): siRNA sense strand
cccaagauccugaaacaga

SEQ ID NO: 166316 - RNA, 19 nt, Homo sapiens
  misc_RNA (1)...(19): siRNA sense strand
ggaucaaggcggagaggaa

SEQ ID NO: 166317 - RNA, 19 nt, Homo sapiens
  misc_RNA (1)...(19): siRNA sense strand
ggaaacgaccuucuaugac

SEQ ID NO: 166318 - RNA, 19 nt, Homo sapiens
  misc_RNA (1)...(19): siRNA sense strand
agaggaagcgcaugaggaa

SEQ ID NO: 166319 - RNA, 19 nt, Homo sapiens
  misc_RNA (1)...(19): siRNA sense strand
gaaagucaugaaccacguu

SEQ ID NO: 166320 - RNA, 19 nt, Homo sapiens
  misc_RNA (1)...(19): siRNA sense strand
cgcagcaguugcaaacauu

SEQ ID NO: 166321 - RNA, 19 nt, Homo sapiens
  misc_RNA (1)...(19): siRNA sense strand
gcggagaggaagcgcauga

SEQ ID NO: 166322 - RNA, 19 nt, Homo sapiens
  misc_RNA (1)...(19): siRNA sense strand
gcagcaguugcaaacauuu

SEQ ID NO: 166323 - RNA, 19 nt, Homo sapiens
  misc_RNA (1)...(19): siRNA sense strand
cagcuuaaacagaaaguca

SEQ ID NO: 166324 - RNA, 19 nt, Homo sapiens
  misc_RNA (1)...(19): siRNA sense strand
uaacgcagcaguugcaaac

SEQ ID NO: 166325 - RNA, 19 nt, Homo sapiens
  misc_RNA (1)...(19): siRNA sense strand
ccaacaugcucagggaaca

SEQ ID NO: 166326 - RNA, 19 nt, Homo sapiens
  misc_RNA (1)...(19): siRNA sense strand
aaagucaugaaccacguua

SEQ ID NO: 166327 - RNA, 19 nt, Homo sapiens
  misc_RNA (1)...(19): siRNA sense strand
cgagcuggagcgccugaua

SEQ ID NO: 166328 - RNA, 19 nt, Homo sapiens
  misc_RNA (1)...(19): siRNA sense strand
aacagugggugccaacuca

SEQ ID NO: 166329 - RNA, 19 nt, Homo sapiens
  misc_RNA (1)...(19): siRNA sense strand
cccaagaacgugacagaug

SEQ ID NO: 166330 - RNA, 19 nt, Homo sapiens
  misc_RNA (1)...(19): siRNA sense strand
gcacagcuuaaacagaaag

SEQ ID NO: 166331 - RNA, 19 nt, Homo sapiens
  misc_RNA (1)...(19): siRNA sense strand
ggaccuuauggcuacagua

SEQ ID NO: 166332 - RNA, 19 nt, Homo sapiens
  misc_RNA (1)...(19): siRNA sense strand
aacagaaagucaugaacca

SEQ ID NO: 166333 - RNA, 19 nt, Homo sapiens
  misc_RNA (1)...(19): siRNA sense strand
ggcacagcuuaaacagaaa

SEQ ID NO: 166334 - RNA, 19 nt, Homo sapiens
  misc_RNA (1)...(19): siRNA sense strand
agauggaaacgaccuucua

SEQ ID NO: 166335 - RNA, 19 nt, Homo sapiens
  misc_RNA (1)...(19): siRNA sense strand
acgcagcaguugcaaacau

SEQ ID NO: 166336 - RNA, 19 nt, Homo sapiens
  misc_RNA (1)...(19): siRNA sense strand
gcuuaaacagaaagucaug

SEQ ID NO: 166337 - RNA, 19 nt, Homo sapiens
  misc_RNA (1)...(19): siRNA sense strand
ggaacagguggcacagcuu

SEQ ID NO: 166338 - RNA, 19 nt, Homo sapiens
  misc_RNA (1)...(19): siRNA sense strand
caugaaccacguuaacagu

SEQ ID NO: 166339 - RNA, 19 nt, Homo sapiens
  misc_RNA (1)...(19): siRNA sense strand
ggacauggauggagacuac

SEQ ID NO: 166340 - RNA, 19 nt, Homo sapiens
  misc_RNA (1)...(19): siRNA sense strand
gcaagcaccugaccagcaa

SEQ ID NO: 166341 - RNA, 19 nt, Homo sapiens
  misc_RNA (1)...(19): siRNA sense strand
ugaaccagcugucgaagaa

SEQ ID NO: 166342 - RNA, 19 nt, Homo sapiens
  misc_RNA (1)...(19): siRNA sense strand
ucaccaaacugcucaacga

SEQ ID NO: 166343 - RNA, 19 nt, Homo sapiens
  misc_RNA (1)...(19): siRNA sense strand
gugcguaccaugcagaaua

SEQ ID NO: 166344 - RNA, 19 nt, Homo sapiens
  misc_RNA (1)...(19): siRNA sense strand
acaagacgcuggugacaca

SEQ ID NO: 166345 - RNA, 19 nt, Homo sapiens
  misc_RNA (1)...(19): siRNA sense strand
gaucaugcguaacuacagu

SEQ ID NO: 166346 - RNA, 19 nt, Homo sapiens
  misc_RNA (1)...(19): siRNA sense strand
gcaacaacagcaagaacaa

SEQ ID NO: 166347 - RNA, 19 nt, Homo sapiens
  misc_RNA (1)...(19): siRNA sense strand
ggacaagaacccagacuac

SEQ ID NO: 166348 - RNA, 19 nt, Homo sapiens
  misc_RNA (1)...(19): siRNA sense strand
gaacaagacgcuggugaca

SEQ ID NO: 166349 - RNA, 19 nt, Homo sapiens
  misc_RNA (1)...(19): siRNA sense strand
ccaacucccucuucaagca

SEQ ID NO: 166350 - RNA, 19 nt, Homo sapiens
  misc_RNA (1)...(19): siRNA sense strand
caugugcccugguguguca

SEQ ID NO: 166351 - RNA, 19 nt, Homo sapiens
  misc_RNA (1)...(19): siRNA sense strand
gagagugugcugaagauuc

SEQ ID NO: 166352 - RNA, 19 nt, Homo sapiens
  misc_RNA (1)...(19): siRNA sense strand
gcaaccaucggcuugauca

SEQ ID NO: 166353 - RNA, 19 nt, Homo sapiens
  misc_RNA (1)...(19): siRNA sense strand
ucaagaaaaccaccacuua

SEQ ID NO: 166354 - RNA, 19 nt, Homo sapiens
  misc_RNA (1)...(19): siRNA sense strand
ucucagauguggccaccaa

SEQ ID NO: 166355 - RNA, 19 nt, Homo sapiens
  misc_RNA (1)...(19): siRNA sense strand
uggagucgguccuguucua

SEQ ID NO: 166356 - RNA, 19 nt, Homo sapiens
  misc_RNA (1)...(19): siRNA sense strand
ccaguacacgcucaagaaa

SEQ ID NO: 166357 - RNA, 19 nt, Homo sapiens
  misc_RNA (1)...(19): siRNA sense strand
gcucugcgccaccucacua

SEQ ID NO: 166358 - RNA, 19 nt, Homo sapiens
  misc_RNA (1)...(19): siRNA sense strand
gccaguacacgcucaagaa

SEQ ID NO: 166359 - RNA, 19 nt, Homo sapiens
  misc_RNA (1)...(19): siRNA sense strand
gcacacagcagcccuacac

SEQ ID NO: 166360 - RNA, 19 nt, Homo sapiens
  misc_RNA (1)...(19): siRNA sense strand
ucuccaaccugacaugcaa

SEQ ID NO: 166361 - RNA, 19 nt, Homo sapiens
  misc_RNA (1)...(19): siRNA sense strand
ccaccagcauccugcacaa

SEQ ID NO: 166362 - RNA, 19 nt, Homo sapiens
  misc_RNA (1)...(19): siRNA sense strand
caggagagcaagcugauca

SEQ ID NO: 166363 - RNA, 19 nt, Homo sapiens
  misc_RNA (1)...(19): siRNA sense strand
gcagcaagggcaucaugga

SEQ ID NO: 166364 - RNA, 19 nt, Homo sapiens
  misc_RNA (1)...(19): siRNA sense strand
cugaguggcagcagacaua

SEQ ID NO: 166365 - RNA, 19 nt, Homo sapiens
  misc_RNA (1)...(19): siRNA sense strand
agagugugcugaagauucu

SEQ ID NO: 166366 - RNA, 19 nt, Homo sapiens
  misc_RNA (1)...(19): siRNA sense strand
ugcacaaccugcuccugua

SEQ ID NO: 166367 - RNA, 19 nt, Homo sapiens
  misc_RNA (1)...(19): siRNA sense strand
cgucccagcugcucaaguc

SEQ ID NO: 166368 - RNA, 19 nt, Homo sapiens
  misc_RNA (1)...(19): siRNA sense strand
gaguguggaugacgucaac

SEQ ID NO: 166369 - RNA, 19 nt, Homo sapiens
  misc_RNA (1)...(19): siRNA sense strand
gcucaagucggccauugug

SEQ ID NO: 166370 - RNA, 19 nt, Homo sapiens
  misc_RNA (1)...(19): siRNA sense strand
uaccagauguccacaacag

SEQ ID NO: 166371 - RNA, 19 nt, Homo sapiens
  misc_RNA (1)...(19): siRNA sense strand
gugcagaucaugcguaacu

SEQ ID NO: 166372 - RNA, 19 nt, Homo sapiens
  misc_RNA (1)...(19): siRNA sense strand
ucgugcagaucaugcguaa

SEQ ID NO: 166373 - RNA, 19 nt, Homo sapiens
  misc_RNA (1)...(19): siRNA sense strand
uugugcaucucaucaacua

SEQ ID NO: 166374 - RNA, 19 nt, Homo sapiens
  misc_RNA (1)...(19): siRNA sense strand
aaccugacaugcaacaaca

SEQ ID NO: 166375 - RNA, 19 nt, Homo sapiens
  misc_RNA (1)...(19): siRNA sense strand
caaugagcccuauggagau

SEQ ID NO: 166376 - RNA, 19 nt, Homo sapiens
  misc_RNA (1)...(19): siRNA sense strand
agacgcuggugacacagaa

SEQ ID NO: 166377 - RNA, 19 nt, Homo sapiens
  misc_RNA (1)...(19): siRNA sense strand
ucaccacgcugcacaaccu

SEQ ID NO: 166378 - RNA, 19 nt, Homo sapiens
  misc_RNA (1)...(19): siRNA sense strand
ccguggagcucaccaacuc

SEQ ID NO: 166379 - RNA, 19 nt, Homo sapiens
  misc_RNA (1)...(19): siRNA sense strand
uggagagugugcugaagau

SEQ ID NO: 166380 - RNA, 19 nt, Homo sapiens
  misc_RNA (1)...(19): siRNA sense strand
gcacaaccugcuccuguac

SEQ ID NO: 166381 - RNA, 19 nt, Homo sapiens
  misc_RNA (1)...(19): siRNA sense strand
ugacaugcaacaacagcaa

SEQ ID NO: 166382 - RNA, 19 nt, Homo sapiens
  misc_RNA (1)...(19): siRNA sense strand
gcucaccaacucccucuuc

SEQ ID NO: 166383 - RNA, 19 nt, Homo sapiens
  misc_RNA (1)...(19): siRNA sense strand
gcagaucaugcguaacuac

SEQ ID NO: 166384 - RNA, 19 nt, Homo sapiens
  misc_RNA (1)...(19): siRNA sense strand
ucgugaagcugcucaacca

SEQ ID NO: 166385 - RNA, 19 nt, Homo sapiens
  misc_RNA (1)...(19): siRNA sense strand
cgagauggcccagaacucu

SEQ ID NO: 166386 - RNA, 19 nt, Homo sapiens
  misc_RNA (1)...(19): siRNA sense strand
aggagggccuggagagugu

SEQ ID NO: 166387 - RNA, 19 nt, Homo sapiens
  misc_RNA (1)...(19): siRNA sense strand
gaggcugcccagagcauga

SEQ ID NO: 166388 - RNA, 19 nt, Homo sapiens
  misc_RNA (1)...(19): siRNA sense strand
ggcagcagacauacaccua

SEQ ID NO: 166389 - RNA, 19 nt, Homo sapiens
  misc_RNA (1)...(19): siRNA sense strand
ggagagugugcugaagauu

SEQ ID NO: 166390 - RNA, 19 nt, Homo sapiens
  misc_RNA (1)...(19): siRNA sense strand
caccaacucccucuucaag

SEQ ID NO: 166391 - RNA, 19 nt, Homo sapiens
  misc_RNA (1)...(19): siRNA sense strand
ugcccgagcucaccaaacu

SEQ ID NO: 166392 - RNA, 19 nt, Homo sapiens
  misc_RNA (1)...(19): siRNA sense strand
caacaacagcaagaacaag

SEQ ID NO: 166393 - RNA, 19 nt, Homo sapiens
  misc_RNA (1)...(19): siRNA sense strand
ccagucgugugcucaaggu

SEQ ID NO: 166394 - RNA, 19 nt, Homo sapiens
  misc_RNA (1)...(19): siRNA sense strand
agagcaagcugaucauccu

SEQ ID NO: 166395 - RNA, 19 nt, Homo sapiens
  misc_RNA (1)...(19): siRNA sense strand
cagcagcaagggcaucaug

SEQ ID NO: 166396 - RNA, 19 nt, Homo sapiens
  misc_RNA (1)...(19): siRNA sense strand
ugaaccgcauggagaucuu

SEQ ID NO: 166397 - RNA, 19 nt, Homo sapiens
  misc_RNA (1)...(19): siRNA sense strand
gggcugcucgccaucuuca

SEQ ID NO: 166398 - RNA, 19 nt, Homo sapiens
  misc_RNA (1)...(19): siRNA sense strand
aaugagcccuauggagaug

SEQ ID NO: 166399 - RNA, 19 nt, Homo sapiens
  misc_RNA (1)...(19): siRNA sense strand
acucgucgguggagaacau

SEQ ID NO: 166400 - RNA, 19 nt, Homo sapiens
  misc_RNA (1)...(19): siRNA sense strand
gagaucuuccggcucaaca

SEQ ID NO: 166401 - RNA, 19 nt, Homo sapiens
  misc_RNA (1)...(19): siRNA sense strand
gugugaggauggaggagau

SEQ ID NO: 166402 - RNA, 19 nt, Homo sapiens
  misc_RNA (1)...(19): siRNA sense strand
aacaacagcaagaacaaga

SEQ ID NO: 166403 - RNA, 19 nt, Homo sapiens
  misc_RNA (1)...(19): siRNA sense strand
caaccugacaugcaacaac

SEQ ID NO: 166404 - RNA, 19 nt, Homo sapiens
  misc_RNA (1)...(19): siRNA sense strand
gcgcaaccucucagaugug

SEQ ID NO: 166405 - RNA, 19 nt, Homo sapiens
  misc_RNA (1)...(19): siRNA sense strand
ggagagcaagcugaucauc

SEQ ID NO: 166406 - RNA, 19 nt, Homo sapiens
  misc_RNA (1)...(19): siRNA sense strand
ggagucgguccuguucuau

SEQ ID NO: 166407 - RNA, 19 nt, Homo sapiens
  misc_RNA (1)...(19): siRNA sense strand
ggacauggauggagacuac

SEQ ID NO: 166408 - RNA, 19 nt, Homo sapiens
  misc_RNA (1)...(19): siRNA sense strand
gcaagcaccugaccagcaa

SEQ ID NO: 166409 - RNA, 19 nt, Homo sapiens
  misc_RNA (1)...(19): siRNA sense strand
ugaaccagcugucgaagaa

SEQ ID NO: 166410 - RNA, 19 nt, Homo sapiens
  misc_RNA (1)...(19): siRNA sense strand
ucaccaaacugcucaacga

SEQ ID NO: 166411 - RNA, 19 nt, Homo sapiens
  misc_RNA (1)...(19): siRNA sense strand
gugcguaccaugcagaaua

SEQ ID NO: 166412 - RNA, 19 nt, Homo sapiens
  misc_RNA (1)...(19): siRNA sense strand
acaagacgcuggugacaca

SEQ ID NO: 166413 - RNA, 19 nt, Homo sapiens
  misc_RNA (1)...(19): siRNA sense strand
gaucaugcguaacuacagu

SEQ ID NO: 166414 - RNA, 19 nt, Homo sapiens
  misc_RNA (1)...(19): siRNA sense strand
gcaacaacagcaagaacaa

SEQ ID NO: 166415 - RNA, 19 nt, Homo sapiens
  misc_RNA (1)...(19): siRNA sense strand
ggacaagaacccagacuac

SEQ ID NO: 166416 - RNA, 19 nt, Homo sapiens
  misc_RNA (1)...(19): siRNA sense strand
gaacaagacgcuggugaca

SEQ ID NO: 166417 - RNA, 19 nt, Homo sapiens
  misc_RNA (1)...(19): siRNA sense strand
ccaacucccucuucaagca

SEQ ID NO: 166418 - RNA, 19 nt, Homo sapiens
  misc_RNA (1)...(19): siRNA sense strand
caugugcccugguguguca

SEQ ID NO: 166419 - RNA, 19 nt, Homo sapiens
  misc_RNA (1)...(19): siRNA sense strand
gagagugugcugaagauuc

SEQ ID NO: 166420 - RNA, 19 nt, Homo sapiens
  misc_RNA (1)...(19): siRNA sense strand
gcaaccaucggcuugauca

SEQ ID NO: 166421 - RNA, 19 nt, Homo sapiens
  misc_RNA (1)...(19): siRNA sense strand
ucaagaaaaccaccacuua

SEQ ID NO: 166422 - RNA, 19 nt, Homo sapiens
  misc_RNA (1)...(19): siRNA sense strand
ucucagauguggccaccaa

SEQ ID NO: 166423 - RNA, 19 nt, Homo sapiens
  misc_RNA (1)...(19): siRNA sense strand
uggagucgguccuguucua

SEQ ID NO: 166424 - RNA, 19 nt, Homo sapiens
  misc_RNA (1)...(19): siRNA sense strand
ccaguacacgcucaagaaa

SEQ ID NO: 166425 - RNA, 19 nt, Homo sapiens
  misc_RNA (1)...(19): siRNA sense strand
gcucugcgccaccucacua

SEQ ID NO: 166426 - RNA, 19 nt, Homo sapiens
  misc_RNA (1)...(19): siRNA sense strand
gccaguacacgcucaagaa

SEQ ID NO: 166427 - RNA, 19 nt, Homo sapiens
  misc_RNA (1)...(19): siRNA sense strand
gcacacagcagcccuacac

SEQ ID NO: 166428 - RNA, 19 nt, Homo sapiens
  misc_RNA (1)...(19): siRNA sense strand
ucuccaaccugacaugcaa

SEQ ID NO: 166429 - RNA, 19 nt, Homo sapiens
  misc_RNA (1)...(19): siRNA sense strand
ccaccagcauccugcacaa

SEQ ID NO: 166430 - RNA, 19 nt, Homo sapiens
  misc_RNA (1)...(19): siRNA sense strand
caggagagcaagcugauca

SEQ ID NO: 166431 - RNA, 19 nt, Homo sapiens
  misc_RNA (1)...(19): siRNA sense strand
gcagcaagggcaucaugga

SEQ ID NO: 166432 - RNA, 19 nt, Homo sapiens
  misc_RNA (1)...(19): siRNA sense strand
cugaguggcagcagacaua

SEQ ID NO: 166433 - RNA, 19 nt, Homo sapiens
  misc_RNA (1)...(19): siRNA sense strand
agagugugcugaagauucu

SEQ ID NO: 166434 - RNA, 19 nt, Homo sapiens
  misc_RNA (1)...(19): siRNA sense strand
ugcacaaccugcuccugua

SEQ ID NO: 166435 - RNA, 19 nt, Homo sapiens
  misc_RNA (1)...(19): siRNA sense strand
cgucccagcugcucaaguc

SEQ ID NO: 166436 - RNA, 19 nt, Homo sapiens
  misc_RNA (1)...(19): siRNA sense strand
gaguguggaugacgucaac

SEQ ID NO: 166437 - RNA, 19 nt, Homo sapiens
  misc_RNA (1)...(19): siRNA sense strand
gcucaagucggccauugug

SEQ ID NO: 166438 - RNA, 19 nt, Homo sapiens
  misc_RNA (1)...(19): siRNA sense strand
uaccagauguccacaacag

SEQ ID NO: 166439 - RNA, 19 nt, Homo sapiens
  misc_RNA (1)...(19): siRNA sense strand
gugcagaucaugcguaacu

SEQ ID NO: 166440 - RNA, 19 nt, Homo sapiens
  misc_RNA (1)...(19): siRNA sense strand
ucgugcagaucaugcguaa

SEQ ID NO: 166441 - RNA, 19 nt, Homo sapiens
  misc_RNA (1)...(19): siRNA sense strand
uugugcaucucaucaacua

SEQ ID NO: 166442 - RNA, 19 nt, Homo sapiens
  misc_RNA (1)...(19): siRNA sense strand
aaccugacaugcaacaaca

SEQ ID NO: 166443 - RNA, 19 nt, Homo sapiens
  misc_RNA (1)...(19): siRNA sense strand
caaugagcccuauggagau

SEQ ID NO: 166444 - RNA, 19 nt, Homo sapiens
  misc_RNA (1)...(19): siRNA sense strand
agacgcuggugacacagaa

SEQ ID NO: 166445 - RNA, 19 nt, Homo sapiens
  misc_RNA (1)...(19): siRNA sense strand
ucaccacgcugcacaaccu

SEQ ID NO: 166446 - RNA, 19 nt, Homo sapiens
  misc_RNA (1)...(19): siRNA sense strand
ccguggagcucaccaacuc

SEQ ID NO: 166447 - RNA, 19 nt, Homo sapiens
  misc_RNA (1)...(19): siRNA sense strand
uggagagugugcugaagau

SEQ ID NO: 166448 - RNA, 19 nt, Homo sapiens
  misc_RNA (1)...(19): siRNA sense strand
gcacaaccugcuccuguac

SEQ ID NO: 166449 - RNA, 19 nt, Homo sapiens
  misc_RNA (1)...(19): siRNA sense strand
ugacaugcaacaacagcaa

SEQ ID NO: 166450 - RNA, 19 nt, Homo sapiens
  misc_RNA (1)...(19): siRNA sense strand
gcucaccaacucccucuuc

SEQ ID NO: 166451 - RNA, 19 nt, Homo sapiens
  misc_RNA (1)...(19): siRNA sense strand
gcagaucaugcguaacuac

SEQ ID NO: 166452 - RNA, 19 nt, Homo sapiens
  misc_RNA (1)...(19): siRNA sense strand
ucgugaagcugcucaacca

SEQ ID NO: 166453 - RNA, 19 nt, Homo sapiens
  misc_RNA (1)...(19): siRNA sense strand
cgagauggcccagaacucu

SEQ ID NO: 166454 - RNA, 19 nt, Homo sapiens
  misc_RNA (1)...(19): siRNA sense strand
aggagggccuggagagugu

SEQ ID NO: 166455 - RNA, 19 nt, Homo sapiens
  misc_RNA (1)...(19): siRNA sense strand
gaggcugcccagagcauga

SEQ ID NO: 166456 - RNA, 19 nt, Homo sapiens
  misc_RNA (1)...(19): siRNA sense strand
ggcagcagacauacaccua

SEQ ID NO: 166457 - RNA, 19 nt, Homo sapiens
  misc_RNA (1)...(19): siRNA sense strand
ggagagugugcugaagauu

SEQ ID NO: 166458 - RNA, 19 nt, Homo sapiens
  misc_RNA (1)...(19): siRNA sense strand
caccaacucccucuucaag

SEQ ID NO: 166459 - RNA, 19 nt, Homo sapiens
  misc_RNA (1)...(19): siRNA sense strand
ugcccgagcucaccaaacu

SEQ ID NO: 166460 - RNA, 19 nt, Homo sapiens
  misc_RNA (1)...(19): siRNA sense strand
caacaacagcaagaacaag

SEQ ID NO: 166461 - RNA, 19 nt, Homo sapiens
  misc_RNA (1)...(19): siRNA sense strand
ccagucgugugcucaaggu

SEQ ID NO: 166462 - RNA, 19 nt, Homo sapiens
  misc_RNA (1)...(19): siRNA sense strand
agagcaagcugaucauccu

SEQ ID NO: 166463 - RNA, 19 nt, Homo sapiens
  misc_RNA (1)...(19): siRNA sense strand
cagcagcaagggcaucaug

SEQ ID NO: 166464 - RNA, 19 nt, Homo sapiens
  misc_RNA (1)...(19): siRNA sense strand
ugaaccgcauggagaucuu

SEQ ID NO: 166465 - RNA, 19 nt, Homo sapiens
  misc_RNA (1)...(19): siRNA sense strand
gggcugcucgccaucuuca

SEQ ID NO: 166466 - RNA, 19 nt, Homo sapiens
  misc_RNA (1)...(19): siRNA sense strand
aaugagcccuauggagaug

SEQ ID NO: 166467 - RNA, 19 nt, Homo sapiens
  misc_RNA (1)...(19): siRNA sense strand
acucgucgguggagaacau

SEQ ID NO: 166468 - RNA, 19 nt, Homo sapiens
  misc_RNA (1)...(19): siRNA sense strand
gagaucuuccggcucaaca

SEQ ID NO: 166469 - RNA, 19 nt, Homo sapiens
  misc_RNA (1)...(19): siRNA sense strand
gugugaggauggaggagau

SEQ ID NO: 166470 - RNA, 19 nt, Homo sapiens
  misc_RNA (1)...(19): siRNA sense strand
aacaacagcaagaacaaga

SEQ ID NO: 166471 - RNA, 19 nt, Homo sapiens
  misc_RNA (1)...(19): siRNA sense strand
caaccugacaugcaacaac

SEQ ID NO: 166472 - RNA, 19 nt, Homo sapiens
  misc_RNA (1)...(19): siRNA sense strand
gcgcaaccucucagaugug

SEQ ID NO: 166473 - RNA, 19 nt, Homo sapiens
  misc_RNA (1)...(19): siRNA sense strand
ggagagcaagcugaucauc

SEQ ID NO: 166474 - RNA, 19 nt, Homo sapiens
  misc_RNA (1)...(19): siRNA sense strand
ggagucgguccuguucuau

SEQ ID NO: 166475 - RNA, 19 nt, Homo sapiens
  misc_RNA (1)...(19): siRNA sense strand
gugauugucucuaacuuua

SEQ ID NO: 166476 - RNA, 19 nt, Homo sapiens
  misc_RNA (1)...(19): siRNA sense strand
gaacucagggcacacaaua

SEQ ID NO: 166477 - RNA, 19 nt, Homo sapiens
  misc_RNA (1)...(19): siRNA sense strand
ucacaugccuuaugguuau

SEQ ID NO: 166478 - RNA, 19 nt, Homo sapiens
  misc_RNA (1)...(19): siRNA sense strand
cagagcagcuucccucauu

SEQ ID NO: 166479 - RNA, 19 nt, Homo sapiens
  misc_RNA (1)...(19): siRNA sense strand
caaaggcuguggagacuga

SEQ ID NO: 166480 - RNA, 19 nt, Homo sapiens
  misc_RNA (1)...(19): siRNA sense strand
cgacagggaucucgucaug

SEQ ID NO: 166481 - RNA, 19 nt, Homo sapiens
  misc_RNA (1)...(19): siRNA sense strand
ggaagaaggaguuaaggaa

SEQ ID NO: 166482 - RNA, 19 nt, Homo sapiens
  misc_RNA (1)...(19): siRNA sense strand
gaacugggccuucugaucu

SEQ ID NO: 166483 - RNA, 19 nt, Homo sapiens
  misc_RNA (1)...(19): siRNA sense strand
gcaacagucacaugccuua

SEQ ID NO: 166484 - RNA, 19 nt, Homo sapiens
  misc_RNA (1)...(19): siRNA sense strand
agacacagcuaacgcagaa

SEQ ID NO: 166485 - RNA, 19 nt, Homo sapiens
  misc_RNA (1)...(19): siRNA sense strand
gaacguguggugauaaaug

SEQ ID NO: 166486 - RNA, 19 nt, Homo sapiens
  misc_RNA (1)...(19): siRNA sense strand
gcgggugucuuaaccauug

SEQ ID NO: 166487 - RNA, 19 nt, Homo sapiens
  misc_RNA (1)...(19): siRNA sense strand
gagggaagguuuuacuaua

SEQ ID NO: 166488 - RNA, 19 nt, Homo sapiens
  misc_RNA (1)...(19): siRNA sense strand
ggaagaggagggaagguuu

SEQ ID NO: 166489 - RNA, 19 nt, Homo sapiens
  misc_RNA (1)...(19): siRNA sense strand
gaagaaggaguuaaggaau

SEQ ID NO: 166490 - RNA, 19 nt, Homo sapiens
  misc_RNA (1)...(19): siRNA sense strand
gaggugaaguucuaucagu

SEQ ID NO: 166491 - RNA, 19 nt, Homo sapiens
  misc_RNA (1)...(19): siRNA sense strand
ggacgagggcuuugugaga

SEQ ID NO: 166492 - RNA, 19 nt, Homo sapiens
  misc_RNA (1)...(19): siRNA sense strand
agauuuggcuccucuuuga

SEQ ID NO: 166493 - RNA, 19 nt, Homo sapiens
  misc_RNA (1)...(19): siRNA sense strand
gccaagcacucuucuucaa

SEQ ID NO: 166494 - RNA, 19 nt, Homo sapiens
  misc_RNA (1)...(19): siRNA sense strand
cgacagcggucugagaaga

SEQ ID NO: 166495 - RNA, 19 nt, Homo sapiens
  misc_RNA (1)...(19): siRNA sense strand
caaaggaggagaaguguca

SEQ ID NO: 166496 - RNA, 19 nt, Homo sapiens
  misc_RNA (1)...(19): siRNA sense strand
ggacaagucagaguaucua

SEQ ID NO: 166497 - RNA, 19 nt, Homo sapiens
  misc_RNA (1)...(19): siRNA sense strand
gguggguuguugaaugaua

SEQ ID NO: 166498 - RNA, 19 nt, Homo sapiens
  misc_RNA (1)...(19): siRNA sense strand
ccucuaauuugcucaagaa

SEQ ID NO: 166499 - RNA, 19 nt, Homo sapiens
  misc_RNA (1)...(19): siRNA sense strand
gugaacguguggugauaaa

SEQ ID NO: 166500 - RNA, 19 nt, Homo sapiens
  misc_RNA (1)...(19): siRNA sense strand
caacuguucuaaugcaaag

SEQ ID NO: 166501 - RNA, 19 nt, Homo sapiens
  misc_RNA (1)...(19): siRNA sense strand
cugaggaggugaaguucua

SEQ ID NO: 166502 - RNA, 19 nt, Homo sapiens
  misc_RNA (1)...(19): siRNA sense strand
gaagaugaccauggugaug

SEQ ID NO: 166503 - RNA, 19 nt, Homo sapiens
  misc_RNA (1)...(19): siRNA sense strand
caugguggguuguugaaug

SEQ ID NO: 166504 - RNA, 19 nt, Homo sapiens
  misc_RNA (1)...(19): siRNA sense strand
gaagaggccagucaauguc

SEQ ID NO: 166505 - RNA, 19 nt, Homo sapiens
  misc_RNA (1)...(19): siRNA sense strand
uuucggagcucuacuucuu

SEQ ID NO: 166506 - RNA, 19 nt, Homo sapiens
  misc_RNA (1)...(19): siRNA sense strand
gaucuucuuccucuucauu

SEQ ID NO: 166507 - RNA, 19 nt, Homo sapiens
  misc_RNA (1)...(19): siRNA sense strand
gcagauuuggcuccucuuu

SEQ ID NO: 166508 - RNA, 19 nt, Homo sapiens
  misc_RNA (1)...(19): siRNA sense strand
ccuuugauaucuucacuga

SEQ ID NO: 166509 - RNA, 19 nt, Homo sapiens
  misc_RNA (1)...(19): siRNA sense strand
gaugacagugagacagaua

SEQ ID NO: 166510 - RNA, 19 nt, Homo sapiens
  misc_RNA (1)...(19): siRNA sense strand
ggagaagugucagggaaag

SEQ ID NO: 166511 - RNA, 19 nt, Homo sapiens
  misc_RNA (1)...(19): siRNA sense strand
gugguucgcugcuuugcuu

SEQ ID NO: 166512 - RNA, 19 nt, Homo sapiens
  misc_RNA (1)...(19): siRNA sense strand
gggaggaggcccuguugaa

SEQ ID NO: 166513 - RNA, 19 nt, Homo sapiens
  misc_RNA (1)...(19): siRNA sense strand
ugaagaggccagucaaugu

SEQ ID NO: 166514 - RNA, 19 nt, Homo sapiens
  misc_RNA (1)...(19): siRNA sense strand
ugccagugauugucucuaa

SEQ ID NO: 166515 - RNA, 19 nt, Homo sapiens
  misc_RNA (1)...(19): siRNA sense strand
ggcacacaauauucaauga

SEQ ID NO: 166516 - RNA, 19 nt, Homo sapiens
  misc_RNA (1)...(19): siRNA sense strand
ucauugcucugaccugaug

SEQ ID NO: 166517 - RNA, 19 nt, Homo sapiens
  misc_RNA (1)...(19): siRNA sense strand
uguggagacugauguguga

SEQ ID NO: 166518 - RNA, 19 nt, Homo sapiens
  misc_RNA (1)...(19): siRNA sense strand
guccauaccuccccucuaa

SEQ ID NO: 166519 - RNA, 19 nt, Homo sapiens
  misc_RNA (1)...(19): siRNA sense strand
gaagaagaaagcccacuac

SEQ ID NO: 166520 - RNA, 19 nt, Homo sapiens
  misc_RNA (1)...(19): siRNA sense strand
gcagaaugcagucaguugu

SEQ ID NO: 166521 - RNA, 19 nt, Homo sapiens
  misc_RNA (1)...(19): siRNA sense strand
gaggaacagacacagcuaa

SEQ ID NO: 166522 - RNA, 19 nt, Homo sapiens
  misc_RNA (1)...(19): siRNA sense strand
caagcacucuucuucaaaa

SEQ ID NO: 166523 - RNA, 19 nt, Homo sapiens
  misc_RNA (1)...(19): siRNA sense strand
aagaaggaguuaaggaauc

SEQ ID NO: 166524 - RNA, 19 nt, Homo sapiens
  misc_RNA (1)...(19): siRNA sense strand
caugacaacugugggcuau

SEQ ID NO: 166525 - RNA, 19 nt, Homo sapiens
  misc_RNA (1)...(19): siRNA sense strand
aggaggcccuguugaaguu

SEQ ID NO: 166526 - RNA, 19 nt, Homo sapiens
  misc_RNA (1)...(19): siRNA sense strand
gugaggaggaggaagauga

SEQ ID NO: 166527 - RNA, 19 nt, Homo sapiens
  misc_RNA (1)...(19): siRNA sense strand
gugcaaaggaggagaagug

SEQ ID NO: 166528 - RNA, 19 nt, Homo sapiens
  misc_RNA (1)...(19): siRNA sense strand
ggaacugggccuucugauc

SEQ ID NO: 166529 - RNA, 19 nt, Homo sapiens
  misc_RNA (1)...(19): siRNA sense strand
ccaagcacucuucuucaaa

SEQ ID NO: 166530 - RNA, 19 nt, Homo sapiens
  misc_RNA (1)...(19): siRNA sense strand
ggugaugaguguuccuaca

SEQ ID NO: 166531 - RNA, 19 nt, Homo sapiens
  misc_RNA (1)...(19): siRNA sense strand
gaggaggcccuguugaagu

SEQ ID NO: 166532 - RNA, 19 nt, Homo sapiens
  misc_RNA (1)...(19): siRNA sense strand
gagauggaagaaggaguua

SEQ ID NO: 166533 - RNA, 19 nt, Homo sapiens
  misc_RNA (1)...(19): siRNA sense strand
ugacaacugugggcuaugg

SEQ ID NO: 166534 - RNA, 19 nt, Homo sapiens
  misc_RNA (1)...(19): siRNA sense strand
aaucuccauugucaucuuu

SEQ ID NO: 166535 - RNA, 19 nt, Homo sapiens
  misc_RNA (1)...(19): siRNA sense strand
ggaguuaaggaaucucugu

SEQ ID NO: 166536 - RNA, 19 nt, Homo sapiens
  misc_RNA (1)...(19): siRNA sense strand
gauggaagaaggaguuaag

SEQ ID NO: 166537 - RNA, 19 nt, Homo sapiens
  misc_RNA (1)...(19): siRNA sense strand
ccaaaggccugcagauccu

SEQ ID NO: 166538 - RNA, 19 nt, Homo sapiens
  misc_RNA (1)...(19): siRNA sense strand
gggcacacaauauucaaug

SEQ ID NO: 166539 - RNA, 19 nt, Homo sapiens
  misc_RNA (1)...(19): siRNA sense strand
ucaguacuuugacccuuug

SEQ ID NO: 166540 - RNA, 19 nt, Homo sapiens
  misc_RNA (1)...(19): siRNA sense strand
gauugucucuaacuuuaac

SEQ ID NO: 166541 - RNA, 19 nt, Homo sapiens
  misc_RNA (1)...(19): siRNA sense strand
cagccaagcacucuucuuc

SEQ ID NO: 166542 - RNA, 19 nt, Homo sapiens
  misc_RNA (1)...(19): siRNA sense strand
cuggaaaccuugccugagu

SEQ ID NO: 166543 - RNA, 19 nt, Homo sapiens
  misc_RNA (1)...(19): siRNA sense strand
ggugaaguucuaucaguug

SEQ ID NO: 166544 - RNA, 19 nt, Homo sapiens
  misc_RNA (1)...(19): siRNA sense strand
ggagcucuacuucuucuuc

SEQ ID NO: 166545 - RNA, 19 nt, Homo sapiens
  misc_RNA (1)...(19): siRNA sense strand
gggaugacagugagacaga

SEQ ID NO: 166546 - RNA, 19 nt, Homo sapiens
  misc_RNA (1)...(19): siRNA sense strand
aggaaucucugugugcaaa

SEQ ID NO: 166547 - RNA, 19 nt, Homo sapiens
  misc_RNA (1)...(19): siRNA sense strand
ugaccauggugaugagugu

SEQ ID NO: 166548 - RNA, 19 nt, Homo sapiens
  misc_RNA (1)...(19): siRNA sense strand
acagagagacugaaaauga

SEQ ID NO: 166549 - RNA, 19 nt, Homo sapiens
  misc_RNA (1)...(19): siRNA sense strand
acaugaagcccaucacugu

SEQ ID NO: 166550 - RNA, 19 nt, Homo sapiens
  misc_RNA (1)...(19): siRNA sense strand
acucagggcacacaauauu

SEQ ID NO: 166551 - RNA, 19 nt, Homo sapiens
  misc_RNA (1)...(19): siRNA sense strand
acagucacaugccuuaugg

SEQ ID NO: 166552 - RNA, 19 nt, Homo sapiens
  misc_RNA (1)...(19): siRNA sense strand
caugaagcccaucacugua

SEQ ID NO: 166553 - RNA, 19 nt, Homo sapiens
  misc_RNA (1)...(19): siRNA sense strand
ugaacaucauugacauugu

SEQ ID NO: 166554 - RNA, 19 nt, Homo sapiens
  misc_RNA (1)...(19): siRNA sense strand
gucacaugccuuaugguua

SEQ ID NO: 166555 - RNA, 19 nt, Homo sapiens
  misc_RNA (1)...(19): siRNA sense strand
agaagaagaaagcccacua

SEQ ID NO: 166556 - RNA, 19 nt, Homo sapiens
  misc_RNA (1)...(19): siRNA sense strand
caagucagaguaucuagag

SEQ ID NO: 166557 - RNA, 19 nt, Homo sapiens
  misc_RNA (1)...(19): siRNA sense strand
ugccauugcgggugucuua

SEQ ID NO: 166558 - RNA, 19 nt, Homo sapiens
  misc_RNA (1)...(19): siRNA sense strand
cagcaggccauguccuuug

SEQ ID NO: 166559 - RNA, 19 nt, Homo sapiens
  misc_RNA (1)...(19): siRNA sense strand
gcagcaggccauguccuuu

SEQ ID NO: 166560 - RNA, 19 nt, Homo sapiens
  misc_RNA (1)...(19): siRNA sense strand
guuugugguucgcugcuuu

SEQ ID NO: 166561 - RNA, 19 nt, Homo sapiens
  misc_RNA (1)...(19): siRNA sense strand
ggaggaggcccuguugaag

SEQ ID NO: 166562 - RNA, 19 nt, Homo sapiens
  misc_RNA (1)...(19): siRNA sense strand
ugucaggccuacgcuuuga

SEQ ID NO: 166563 - RNA, 19 nt, Homo sapiens
  misc_RNA (1)...(19): siRNA sense strand
ggacaugaagcccaucacu

SEQ ID NO: 166564 - RNA, 19 nt, Homo sapiens
  misc_RNA (1)...(19): siRNA sense strand
uggaaaccuugccugaguu

SEQ ID NO: 166565 - RNA, 19 nt, Homo sapiens
  misc_RNA (1)...(19): siRNA sense strand
uaaucuccauugucaucuu

SEQ ID NO: 166566 - RNA, 19 nt, Homo sapiens
  misc_RNA (1)...(19): siRNA sense strand
ugagugaggaggaggaaga

SEQ ID NO: 166567 - RNA, 19 nt, Homo sapiens
  misc_RNA (1)...(19): siRNA sense strand
ggaggacgagggcuuugug

SEQ ID NO: 166568 - RNA, 19 nt, Homo sapiens
  misc_RNA (1)...(19): siRNA sense strand
ugacagugagacagauaaa

SEQ ID NO: 166569 - RNA, 19 nt, Homo sapiens
  misc_RNA (1)...(19): siRNA sense strand
ggaugacagugagacagau

SEQ ID NO: 166570 - RNA, 19 nt, Homo sapiens
  misc_RNA (1)...(19): siRNA sense strand
agaaggaguuaaggaaucu

SEQ ID NO: 166571 - RNA, 19 nt, Homo sapiens
  misc_RNA (1)...(19): siRNA sense strand
ugucuuaaccauugcuuug

SEQ ID NO: 166572 - RNA, 19 nt, Homo sapiens
  misc_RNA (1)...(19): siRNA sense strand
uuucuagugcuguguauuu

SEQ ID NO: 166573 - RNA, 19 nt, Homo sapiens
  misc_RNA (1)...(19): siRNA sense strand
gggcaugguggguuguuga

SEQ ID NO: 166574 - RNA, 19 nt, Homo sapiens
  misc_RNA (1)...(19): siRNA sense strand
gaagaggagggaagguuuu

SEQ ID NO: 166575 - RNA, 19 nt, Homo sapiens
  misc_RNA (1)...(19): siRNA sense strand
ccacgugcgucaucugguu

SEQ ID NO: 166576 - RNA, 19 nt, Homo sapiens
  misc_RNA (1)...(19): siRNA sense strand
gaagagcagggcacucaga

SEQ ID NO: 166577 - RNA, 19 nt, Homo sapiens
  misc_RNA (1)...(19): siRNA sense strand
gaacccauuucucuagcau

SEQ ID NO: 166578 - RNA, 19 nt, Homo sapiens
  misc_RNA (1)...(19): siRNA sense strand
gaggaacgaguacuucuuc

SEQ ID NO: 166579 - RNA, 19 nt, Homo sapiens
  misc_RNA (1)...(19): siRNA sense strand
caacuucaacuacuucuac

SEQ ID NO: 166580 - RNA, 19 nt, Homo sapiens
  misc_RNA (1)...(19): siRNA sense strand
gagaacggcggugccauga

SEQ ID NO: 166581 - RNA, 19 nt, Homo sapiens
  misc_RNA (1)...(19): siRNA sense strand
ggucuugguuauccucauc

SEQ ID NO: 166582 - RNA, 19 nt, Homo sapiens
  misc_RNA (1)...(19): siRNA sense strand
uggagacccugccugaguu

SEQ ID NO: 166583 - RNA, 19 nt, Homo sapiens
  misc_RNA (1)...(19): siRNA sense strand
ccagggaacccauuucucu

SEQ ID NO: 166584 - RNA, 19 nt, Homo sapiens
  misc_RNA (1)...(19): siRNA sense strand
uugcggaggucccuuuaug

SEQ ID NO: 166585 - RNA, 19 nt, Homo sapiens
  misc_RNA (1)...(19): siRNA sense strand
cguguucgcggacgagaua

SEQ ID NO: 166586 - RNA, 19 nt, Homo sapiens
  misc_RNA (1)...(19): siRNA sense strand
ggaacccauuucucuagca

SEQ ID NO: 166587 - RNA, 19 nt, Homo sapiens
  misc_RNA (1)...(19): siRNA sense strand
gcucaucuucuuccucuuc

SEQ ID NO: 166588 - RNA, 19 nt, Homo sapiens
  misc_RNA (1)...(19): siRNA sense strand
ucgacgguauccucuacua

SEQ ID NO: 166589 - RNA, 19 nt, Homo sapiens
  misc_RNA (1)...(19): siRNA sense strand
ccgggaaacagauuuguga

SEQ ID NO: 166590 - RNA, 19 nt, Homo sapiens
  misc_RNA (1)...(19): siRNA sense strand
cggaacaucaugaacauca

SEQ ID NO: 166591 - RNA, 19 nt, Homo sapiens
  misc_RNA (1)...(19): siRNA sense strand
ggaacgaguacuucuucga

SEQ ID NO: 166592 - RNA, 19 nt, Homo sapiens
  misc_RNA (1)...(19): siRNA sense strand
acgguauccucuacuacua

SEQ ID NO: 166593 - RNA, 19 nt, Homo sapiens
  misc_RNA (1)...(19): siRNA sense strand
ggagaccacgugcgucauc

SEQ ID NO: 166594 - RNA, 19 nt, Homo sapiens
  misc_RNA (1)...(19): siRNA sense strand
uggcuuaucuucgaguauc

SEQ ID NO: 166595 - RNA, 19 nt, Homo sapiens
  misc_RNA (1)...(19): siRNA sense strand
ucuccaacuucaacuacuu

SEQ ID NO: 166596 - RNA, 19 nt, Homo sapiens
  misc_RNA (1)...(19): siRNA sense strand
ggacaugaggcccaucacu

SEQ ID NO: 166597 - RNA, 19 nt, Homo sapiens
  misc_RNA (1)...(19): siRNA sense strand
caccagcgcguccacauca

SEQ ID NO: 166598 - RNA, 19 nt, Homo sapiens
  misc_RNA (1)...(19): siRNA sense strand
cagggaacccauuucucua

SEQ ID NO: 166599 - RNA, 19 nt, Homo sapiens
  misc_RNA (1)...(19): siRNA sense strand
caucgucucggucuugguu

SEQ ID NO: 166600 - RNA, 19 nt, Homo sapiens
  misc_RNA (1)...(19): siRNA sense strand
agagaaguguaacgucaag

SEQ ID NO: 166601 - RNA, 19 nt, Homo sapiens
  misc_RNA (1)...(19): siRNA sense strand
gaucgugggcucgcugugu

SEQ ID NO: 166602 - RNA, 19 nt, Homo sapiens
  misc_RNA (1)...(19): siRNA sense strand
ggacaccagccgggaaaca

SEQ ID NO: 166603 - RNA, 19 nt, Homo sapiens
  misc_RNA (1)...(19): siRNA sense strand
gucaucgucuccaacuuca

SEQ ID NO: 166604 - RNA, 19 nt, Homo sapiens
  misc_RNA (1)...(19): siRNA sense strand
cgucaucgucuccaacuuc

SEQ ID NO: 166605 - RNA, 19 nt, Homo sapiens
  misc_RNA (1)...(19): siRNA sense strand
cggacgagauacgcuucua

SEQ ID NO: 166606 - RNA, 19 nt, Homo sapiens
  misc_RNA (1)...(19): siRNA sense strand
ggacgagauacgcuucuac

SEQ ID NO: 166607 - RNA, 19 nt, Homo sapiens
  misc_RNA (1)...(19): siRNA sense strand
caaccagggaacccauuuc

SEQ ID NO: 166608 - RNA, 19 nt, Homo sapiens
  misc_RNA (1)...(19): siRNA sense strand
acaugaggcccaucacugu

SEQ ID NO: 166609 - RNA, 19 nt, Homo sapiens
  misc_RNA (1)...(19): siRNA sense strand
ugaagacgauuccuacaca

SEQ ID NO: 166610 - RNA, 19 nt, Homo sapiens
  misc_RNA (1)...(19): siRNA sense strand
aaacaaugguggugugagu

SEQ ID NO: 166611 - RNA, 19 nt, Homo sapiens
  misc_RNA (1)...(19): siRNA sense strand
gagcggcuggugaucaaua

SEQ ID NO: 166612 - RNA, 19 nt, Homo sapiens
  misc_RNA (1)...(19): siRNA sense strand
gcgagcggcuggugaucaa

SEQ ID NO: 166613 - RNA, 19 nt, Homo sapiens
  misc_RNA (1)...(19): siRNA sense strand
gaagacgauuccuacacau

SEQ ID NO: 166614 - RNA, 19 nt, Homo sapiens
  misc_RNA (1)...(19): siRNA sense strand
caaugaccacgguagguua

SEQ ID NO: 166615 - RNA, 19 nt, Homo sapiens
  misc_RNA (1)...(19): siRNA sense strand
agacccagcuaccuuccua

SEQ ID NO: 166616 - RNA, 19 nt, Homo sapiens
  misc_RNA (1)...(19): siRNA sense strand
gaggaacgaguacuucuuc

SEQ ID NO: 166617 - RNA, 19 nt, Homo sapiens
  misc_RNA (1)...(19): siRNA sense strand
agacgauuccuacacauuu

SEQ ID NO: 166618 - RNA, 19 nt, Homo sapiens
  misc_RNA (1)...(19): siRNA sense strand
gacgauuccuacacauuuc

SEQ ID NO: 166619 - RNA, 19 nt, Homo sapiens
  misc_RNA (1)...(19): siRNA sense strand
ucgcagaggcugacgauga

SEQ ID NO: 166620 - RNA, 19 nt, Homo sapiens
  misc_RNA (1)...(19): siRNA sense strand
gaggagcaaggccaguaua

SEQ ID NO: 166621 - RNA, 19 nt, Homo sapiens
  misc_RNA (1)...(19): siRNA sense strand
caacuucaacuacuucuac

SEQ ID NO: 166622 - RNA, 19 nt, Homo sapiens
  misc_RNA (1)...(19): siRNA sense strand
ggaggaagaggaggaugaa

SEQ ID NO: 166623 - RNA, 19 nt, Homo sapiens
  misc_RNA (1)...(19): siRNA sense strand
ggugggcagugguuacaau

SEQ ID NO: 166624 - RNA, 19 nt, Homo sapiens
  misc_RNA (1)...(19): siRNA sense strand
ggaaacaauggugguguga

SEQ ID NO: 166625 - RNA, 19 nt, Homo sapiens
  misc_RNA (1)...(19): siRNA sense strand
uggaggagauccgcuucua

SEQ ID NO: 166626 - RNA, 19 nt, Homo sapiens
  misc_RNA (1)...(19): siRNA sense strand
agaggaggaugaagacgau

SEQ ID NO: 166627 - RNA, 19 nt, Homo sapiens
  misc_RNA (1)...(19): siRNA sense strand
guggagacgcugugcauug

SEQ ID NO: 166628 - RNA, 19 nt, Homo sapiens
  misc_RNA (1)...(19): siRNA sense strand
ggaagaggaggaugaagac

SEQ ID NO: 166629 - RNA, 19 nt, Homo sapiens
  misc_RNA (1)...(19): siRNA sense strand
gcucaucuucuuccucuuc

SEQ ID NO: 166630 - RNA, 19 nt, Homo sapiens
  misc_RNA (1)...(19): siRNA sense strand
uguggcugcucuuugagua

SEQ ID NO: 166631 - RNA, 19 nt, Homo sapiens
  misc_RNA (1)...(19): siRNA sense strand
ggaggagcaaggccaguau

SEQ ID NO: 166632 - RNA, 19 nt, Homo sapiens
  misc_RNA (1)...(19): siRNA sense strand
gacgaugacgauucgcuuu

SEQ ID NO: 166633 - RNA, 19 nt, Homo sapiens
  misc_RNA (1)...(19): siRNA sense strand
ucauugacuugguggcuau

SEQ ID NO: 166634 - RNA, 19 nt, Homo sapiens
  misc_RNA (1)...(19): siRNA sense strand
agguguggcugcucuuuga

SEQ ID NO: 166635 - RNA, 19 nt, Homo sapiens
  misc_RNA (1)...(19): siRNA sense strand
gggcagugguuacaaugac

SEQ ID NO: 166636 - RNA, 19 nt, Homo sapiens
  misc_RNA (1)...(19): siRNA sense strand
cggaacaucaugaacauca

SEQ ID NO: 166637 - RNA, 19 nt, Homo sapiens
  misc_RNA (1)...(19): siRNA sense strand
ggaacgaguacuucuucga

SEQ ID NO: 166638 - RNA, 19 nt, Homo sapiens
  misc_RNA (1)...(19): siRNA sense strand
uggagacgcugugcauugu

SEQ ID NO: 166639 - RNA, 19 nt, Homo sapiens
  misc_RNA (1)...(19): siRNA sense strand
auucucaucuccauaguca

SEQ ID NO: 166640 - RNA, 19 nt, Homo sapiens
  misc_RNA (1)...(19): siRNA sense strand
gaccugagggcaacugaca

SEQ ID NO: 166641 - RNA, 19 nt, Homo sapiens
  misc_RNA (1)...(19): siRNA sense strand
ucgacgccauccucuacua

SEQ ID NO: 166642 - RNA, 19 nt, Homo sapiens
  misc_RNA (1)...(19): siRNA sense strand
caucgggccuaugcagaga

SEQ ID NO: 166643 - RNA, 19 nt, Homo sapiens
  misc_RNA (1)...(19): siRNA sense strand
ugcauugucugguucacuu

SEQ ID NO: 166644 - RNA, 19 nt, Homo sapiens
  misc_RNA (1)...(19): siRNA sense strand
ccaguuccguguagauggu

SEQ ID NO: 166645 - RNA, 19 nt, Homo sapiens
  misc_RNA (1)...(19): siRNA sense strand
ucuccaacuucaacuacuu

SEQ ID NO: 166646 - RNA, 19 nt, Homo sapiens
  misc_RNA (1)...(19): siRNA sense strand
gcgcuuugagacacaauug

SEQ ID NO: 166647 - RNA, 19 nt, Homo sapiens
  misc_RNA (1)...(19): siRNA sense strand
ggucauucucaucuccaua

SEQ ID NO: 166648 - RNA, 19 nt, Homo sapiens
  misc_RNA (1)...(19): siRNA sense strand
gucaucgucuccaacuuca

SEQ ID NO: 166649 - RNA, 19 nt, Homo sapiens
  misc_RNA (1)...(19): siRNA sense strand
gaucgugggcucgcugugu

SEQ ID NO: 166650 - RNA, 19 nt, Homo sapiens
  misc_RNA (1)...(19): siRNA sense strand
ucuccgggcugcgcuuuga

SEQ ID NO: 166651 - RNA, 19 nt, Homo sapiens
  misc_RNA (1)...(19): siRNA sense strand
aggaagaggaggaugaaga

SEQ ID NO: 166652 - RNA, 19 nt, Homo sapiens
  misc_RNA (1)...(19): siRNA sense strand
gaucggagaaaucccuuac

SEQ ID NO: 166653 - RNA, 19 nt, Homo sapiens
  misc_RNA (1)...(19): siRNA sense strand
guagauggucgagguggaa

SEQ ID NO: 166654 - RNA, 19 nt, Homo sapiens
  misc_RNA (1)...(19): siRNA sense strand
acgccauccucuacuacua

SEQ ID NO: 166655 - RNA, 19 nt, Homo sapiens
  misc_RNA (1)...(19): siRNA sense strand
gcaacugacaacggacuug

SEQ ID NO: 166656 - RNA, 19 nt, Homo sapiens
  misc_RNA (1)...(19): siRNA sense strand
cgucaucgucuccaacuuc

SEQ ID NO: 166657 - RNA, 19 nt, Homo sapiens
  misc_RNA (1)...(19): siRNA sense strand
ggucgagguggaaacaaug

SEQ ID NO: 166658 - RNA, 19 nt, Homo sapiens
  misc_RNA (1)...(19): siRNA sense strand
gaugaagacgauuccuaca

SEQ ID NO: 166659 - RNA, 19 nt, Homo sapiens
  misc_RNA (1)...(19): siRNA sense strand
ugacuugguggcuaucuuc

SEQ ID NO: 166660 - RNA, 19 nt, Homo sapiens
  misc_RNA (1)...(19): siRNA sense strand
acaaugaccacgguagguu

SEQ ID NO: 166661 - RNA, 19 nt, Homo sapiens
  misc_RNA (1)...(19): siRNA sense strand
gcauugucugguucacuuu

SEQ ID NO: 166662 - RNA, 19 nt, Homo sapiens
  misc_RNA (1)...(19): siRNA sense strand
ucaucacccugggcacuga

SEQ ID NO: 166663 - RNA, 19 nt, Homo sapiens
  misc_RNA (1)...(19): siRNA sense strand
ucagagugcugucuuaugu

SEQ ID NO: 166664 - RNA, 19 nt, Homo sapiens
  misc_RNA (1)...(19): siRNA sense strand
caacuuguuugacgacgaa

SEQ ID NO: 166665 - RNA, 19 nt, Homo sapiens
  misc_RNA (1)...(19): siRNA sense strand
gcucacagcugcucauugc

SEQ ID NO: 166666 - RNA, 19 nt, Homo sapiens
  misc_RNA (1)...(19): siRNA sense strand
gcuccaaggugucacauca

SEQ ID NO: 166667 - RNA, 19 nt, Homo sapiens
  misc_RNA (1)...(19): siRNA sense strand
gcaucgaaccagagaauuu

SEQ ID NO: 166668 - RNA, 19 nt, Homo sapiens
  misc_RNA (1)...(19): siRNA sense strand
ugacagagccugcugauac

SEQ ID NO: 166669 - RNA, 19 nt, Homo sapiens
  misc_RNA (1)...(19): siRNA sense strand
cacccuggcuucaacauga

SEQ ID NO: 166670 - RNA, 19 nt, Homo sapiens
  misc_RNA (1)...(19): siRNA sense strand
aggcggcucuguaccauuu

SEQ ID NO: 166671 - RNA, 19 nt, Homo sapiens
  misc_RNA (1)...(19): siRNA sense strand
agagugcugucuuauguga

SEQ ID NO: 166672 - RNA, 19 nt, Homo sapiens
  misc_RNA (1)...(19): siRNA sense strand
ucaaaauccugccuaauga

SEQ ID NO: 166673 - RNA, 19 nt, Homo sapiens
  misc_RNA (1)...(19): siRNA sense strand
gaaccacacccgccaagca

SEQ ID NO: 166674 - RNA, 19 nt, Homo sapiens
  misc_RNA (1)...(19): siRNA sense strand
gaauuucucauuuccagau

SEQ ID NO: 166675 - RNA, 19 nt, Homo sapiens
  misc_RNA (1)...(19): siRNA sense strand
ccgauucagucccggauug

SEQ ID NO: 166676 - RNA, 19 nt, Homo sapiens
  misc_RNA (1)...(19): siRNA sense strand
ugucuuaugugaaguggau

SEQ ID NO: 166677 - RNA, 19 nt, Homo sapiens
  misc_RNA (1)...(19): siRNA sense strand
cagcccaguuuguucaugu

SEQ ID NO: 166678 - RNA, 19 nt, Homo sapiens
  misc_RNA (1)...(19): siRNA sense strand
gcaggcggcucuguaccau

SEQ ID NO: 166679 - RNA, 19 nt, Homo sapiens
  misc_RNA (1)...(19): siRNA sense strand
guggaucgaggacaccaua

SEQ ID NO: 166680 - RNA, 19 nt, Homo sapiens
  misc_RNA (1)...(19): siRNA sense strand
cagcaucgaaccagagaau

SEQ ID NO: 166681 - RNA, 19 nt, Homo sapiens
  misc_RNA (1)...(19): siRNA sense strand
ccgucagagugcugucuua

SEQ ID NO: 166682 - RNA, 19 nt, Homo sapiens
  misc_RNA (1)...(19): siRNA sense strand
ccaguuuguucaugucagu

SEQ ID NO: 166683 - RNA, 19 nt, Homo sapiens
  misc_RNA (1)...(19): siRNA sense strand
uccaaggugucacaucaug

SEQ ID NO: 166684 - RNA, 19 nt, Homo sapiens
  misc_RNA (1)...(19): siRNA sense strand
cuacagccacgaccucaug

SEQ ID NO: 166685 - RNA, 19 nt, Homo sapiens
  misc_RNA (1)...(19): siRNA sense strand
caucgaaccagagaauuuc

SEQ ID NO: 166686 - RNA, 19 nt, Homo sapiens
  misc_RNA (1)...(19): siRNA sense strand
acacagcccaguuuguuca

SEQ ID NO: 166687 - RNA, 19 nt, Homo sapiens
  misc_RNA (1)...(19): siRNA sense strand
ccuggaagguggcaaagac

SEQ ID NO: 166688 - RNA, 19 nt, Homo sapiens
  misc_RNA (1)...(19): siRNA sense strand
cugugaaggucguggaguu

SEQ ID NO: 166689 - RNA, 19 nt, Homo sapiens
  misc_RNA (1)...(19): siRNA sense strand
gacagagccugcugauacc

SEQ ID NO: 166690 - RNA, 19 nt, Homo sapiens
  misc_RNA (1)...(19): siRNA sense strand
gccaagcagacgaggacua

SEQ ID NO: 166691 - RNA, 19 nt, Homo sapiens
  misc_RNA (1)...(19): siRNA sense strand
cagacuucaugcugugugu

SEQ ID NO: 166692 - RNA, 19 nt, Homo sapiens
  misc_RNA (1)...(19): siRNA sense strand
ucacagcugcucauugcau

SEQ ID NO: 166693 - RNA, 19 nt, Homo sapiens
  misc_RNA (1)...(19): siRNA sense strand
gcggcucuguaccauuuca

SEQ ID NO: 166694 - RNA, 19 nt, Homo sapiens
  misc_RNA (1)...(19): siRNA sense strand
gugcagagcugaacaagga

SEQ ID NO: 166695 - RNA, 19 nt, Homo sapiens
  misc_RNA (1)...(19): siRNA sense strand
aagaggagaugaaggaauu

SEQ ID NO: 166696 - RNA, 19 nt, Homo sapiens
  misc_RNA (1)...(19): siRNA sense strand
gaaccaagaguacaagaug

SEQ ID NO: 166697 - RNA, 19 nt, Homo sapiens
  misc_RNA (1)...(19): siRNA sense strand
gagcuagccuacaugaaga

SEQ ID NO: 166698 - RNA, 19 nt, Homo sapiens
  misc_RNA (1)...(19): siRNA sense strand
gaagagcuagccuacauga

SEQ ID NO: 166699 - RNA, 19 nt, Homo sapiens
  misc_RNA (1)...(19): siRNA sense strand
uaccaacacugccaugauu

SEQ ID NO: 166700 - RNA, 19 nt, Homo sapiens
  misc_RNA (1)...(19): siRNA sense strand
acaaggaggugucuaccaa

SEQ ID NO: 166701 - RNA, 19 nt, Homo sapiens
  misc_RNA (1)...(19): siRNA sense strand
gagccugaaugaagagcua

SEQ ID NO: 166702 - RNA, 19 nt, Homo sapiens
  misc_RNA (1)...(19): siRNA sense strand
gaagaagaaccaugaagag

SEQ ID NO: 166703 - RNA, 19 nt, Homo sapiens
  misc_RNA (1)...(19): siRNA sense strand
gaagagcuccgggacaaga

SEQ ID NO: 166704 - RNA, 19 nt, Homo sapiens
  misc_RNA (1)...(19): siRNA sense strand
uagccuacaugaagaagaa

SEQ ID NO: 166705 - RNA, 19 nt, Homo sapiens
  misc_RNA (1)...(19): siRNA sense strand
gcaaugagaagaucaccau

SEQ ID NO: 166706 - RNA, 19 nt, Homo sapiens
  misc_RNA (1)...(19): siRNA sense strand
gaggagaugaaggaauuua

SEQ ID NO: 166707 - RNA, 19 nt, Homo sapiens
  misc_RNA (1)...(19): siRNA sense strand
ugaagaagaaccaugaaga

SEQ ID NO: 166708 - RNA, 19 nt, Homo sapiens
  misc_RNA (1)...(19): siRNA sense strand
agacugaccuggagaugca

SEQ ID NO: 166709 - RNA, 19 nt, Homo sapiens
  misc_RNA (1)...(19): siRNA sense strand
gaagaggagaugaaggaau

SEQ ID NO: 166710 - RNA, 19 nt, Homo sapiens
  misc_RNA (1)...(19): siRNA sense strand
ucgagagccugaaugaaga

SEQ ID NO: 166711 - RNA, 19 nt, Homo sapiens
  misc_RNA (1)...(19): siRNA sense strand
gaugagcucacucugucua

SEQ ID NO: 166712 - RNA, 19 nt, Homo sapiens
  misc_RNA (1)...(19): siRNA sense strand
gagcucacucugucuaaga

SEQ ID NO: 166713 - RNA, 19 nt, Homo sapiens
  misc_RNA (1)...(19): siRNA sense strand
gauccugaccgccaccauu

SEQ ID NO: 166714 - RNA, 19 nt, Homo sapiens
  misc_RNA (1)...(19): siRNA sense strand
gcagaucgagagccugaau

SEQ ID NO: 166715 - RNA, 19 nt, Homo sapiens
  misc_RNA (1)...(19): siRNA sense strand
uugaagagcuccgggacaa

SEQ ID NO: 166716 - RNA, 19 nt, Homo sapiens
  misc_RNA (1)...(19): siRNA sense strand
gagacggagugccgcuaug

SEQ ID NO: 166717 - RNA, 19 nt, Homo sapiens
  misc_RNA (1)...(19): siRNA sense strand
cuauggagguggccuugga

SEQ ID NO: 166718 - RNA, 19 nt, Homo sapiens
  misc_RNA (1)...(19): siRNA sense strand
acaagaugcugcuggacau

SEQ ID NO: 166719 - RNA, 19 nt, Homo sapiens
  misc_RNA (1)...(19): siRNA sense strand
augaagagcuagccuacau

SEQ ID NO: 166720 - RNA, 19 nt, Homo sapiens
  misc_RNA (1)...(19): siRNA sense strand
cuauggagguggccuugga

SEQ ID NO: 166721 - RNA, 19 nt, Homo sapiens
  misc_RNA (1)...(19): siRNA sense strand
ugacuuuggugcuugugau

SEQ ID NO: 166722 - RNA, 19 nt, Homo sapiens
  misc_RNA (1)...(19): siRNA sense strand
agcaggagaucgccaccua

SEQ ID NO: 166723 - RNA, 19 nt, Homo sapiens
  misc_RNA (1)...(19): siRNA sense strand
gagaugaaggaauuuagca

SEQ ID NO: 166724 - RNA, 19 nt, Homo sapiens
  misc_RNA (1)...(19): siRNA sense strand
cguggugucucuaccuguu

SEQ ID NO: 166725 - RNA, 19 nt, Homo sapiens
  misc_RNA (1)...(19): siRNA sense strand
gcagauccagggacucauc

SEQ ID NO: 166726 - RNA, 19 nt, Homo sapiens
  misc_RNA (1)...(19): siRNA sense strand
gaagaucaccaugcagaac

SEQ ID NO: 166727 - RNA, 19 nt, Homo sapiens
  misc_RNA (1)...(19): siRNA sense strand
gcugguggcuuuguugacu

SEQ ID NO: 166728 - RNA, 19 nt, Homo sapiens
  misc_RNA (1)...(19): siRNA sense strand
cuacaagaccauugaagag

SEQ ID NO: 166729 - RNA, 19 nt, Homo sapiens
  misc_RNA (1)...(19): siRNA sense strand
gaucgagagccugaaugaa

SEQ ID NO: 166730 - RNA, 19 nt, Homo sapiens
  misc_RNA (1)...(19): siRNA sense strand
gggucauccuggagauuga

SEQ ID NO: 166731 - RNA, 19 nt, Homo sapiens
  misc_RNA (1)...(19): siRNA sense strand
ccuuggagguggcuaugga

SEQ ID NO: 166732 - RNA, 19 nt, Homo sapiens
  misc_RNA (1)...(19): siRNA sense strand
ugaaggaauuuagcaacca

SEQ ID NO: 166733 - RNA, 19 nt, Homo sapiens
  misc_RNA (1)...(19): siRNA sense strand
agagcuagccuacaugaag

SEQ ID NO: 166734 - RNA, 19 nt, Homo sapiens
  misc_RNA (1)...(19): siRNA sense strand
gccagaaccaagaguacaa

SEQ ID NO: 166735 - RNA, 19 nt, Homo sapiens
  misc_RNA (1)...(19): siRNA sense strand
aaggaggugucuaccaaca

SEQ ID NO: 166736 - RNA, 19 nt, Homo sapiens
  misc_RNA (1)...(19): siRNA sense strand
cagcagauccagggacuca

SEQ ID NO: 166737 - RNA, 19 nt, Homo sapiens
  misc_RNA (1)...(19): siRNA sense strand
ccaacacugccaugauuca

SEQ ID NO: 166738 - RNA, 19 nt, Homo sapiens
  misc_RNA (1)...(19): siRNA sense strand
gaaccaugaagaggagaug

SEQ ID NO: 166739 - RNA, 19 nt, Homo sapiens
  misc_RNA (1)...(19): siRNA sense strand
cagagaugagggagcagua

SEQ ID NO: 166740 - RNA, 19 nt, Homo sapiens
  misc_RNA (1)...(19): siRNA sense strand
ggagaugaaggaauuuagc

SEQ ID NO: 166741 - RNA, 19 nt, Homo sapiens
  misc_RNA (1)...(19): siRNA sense strand
gagaacacgguggcagaga

SEQ ID NO: 166742 - RNA, 19 nt, Homo sapiens
  misc_RNA (1)...(19): siRNA sense strand
acuacaagaccauugaaga

SEQ ID NO: 166743 - RNA, 19 nt, Homo sapiens
  misc_RNA (1)...(19): siRNA sense strand
gggaugcugaggaaugguu

SEQ ID NO: 166744 - RNA, 19 nt, Homo sapiens
  misc_RNA (1)...(19): siRNA sense strand
augagaagaucaccaugca

SEQ ID NO: 166745 - RNA, 19 nt, Homo sapiens
  misc_RNA (1)...(19): siRNA sense strand
ggcgugagcugugguuuug

SEQ ID NO: 166746 - RNA, 19 nt, Homo sapiens
  misc_RNA (1)...(19): siRNA sense strand
agaucgagagccugaauga

SEQ ID NO: 166747 - RNA, 19 nt, Homo sapiens
  misc_RNA (1)...(19): siRNA sense strand
ugguggcuuuguugacuuu

SEQ ID NO: 166748 - RNA, 19 nt, Homo sapiens
  misc_RNA (1)...(19): siRNA sense strand
ugaacaaggaggugucuac

SEQ ID NO: 166749 - RNA, 19 nt, Homo sapiens
  misc_RNA (1)...(19): siRNA sense strand
ccuacuacaagaccauuga

SEQ ID NO: 166750 - RNA, 19 nt, Homo sapiens
  misc_RNA (1)...(19): siRNA sense strand
ucacuggcaaugagaagau

SEQ ID NO: 166751 - RNA, 19 nt, Homo sapiens
  misc_RNA (1)...(19): siRNA sense strand
gugcagagcugaacaagga

SEQ ID NO: 166752 - RNA, 19 nt, Homo sapiens
  misc_RNA (1)...(19): siRNA sense strand
aagaggagaugaaggaauu

SEQ ID NO: 166753 - RNA, 19 nt, Homo sapiens
  misc_RNA (1)...(19): siRNA sense strand
gaaccaagaguacaagaug

SEQ ID NO: 166754 - RNA, 19 nt, Homo sapiens
  misc_RNA (1)...(19): siRNA sense strand
gagcuagccuacaugaaga

SEQ ID NO: 166755 - RNA, 19 nt, Homo sapiens
  misc_RNA (1)...(19): siRNA sense strand
gaagagcuagccuacauga

SEQ ID NO: 166756 - RNA, 19 nt, Homo sapiens
  misc_RNA (1)...(19): siRNA sense strand
uaccaacacugccaugauu

SEQ ID NO: 166757 - RNA, 19 nt, Homo sapiens
  misc_RNA (1)...(19): siRNA sense strand
acaaggaggugucuaccaa

SEQ ID NO: 166758 - RNA, 19 nt, Homo sapiens
  misc_RNA (1)...(19): siRNA sense strand
gagccugaaugaagagcua

SEQ ID NO: 166759 - RNA, 19 nt, Homo sapiens
  misc_RNA (1)...(19): siRNA sense strand
gaagaagaaccaugaagag

SEQ ID NO: 166760 - RNA, 19 nt, Homo sapiens
  misc_RNA (1)...(19): siRNA sense strand
gaagagcuccgggacaaga

SEQ ID NO: 166761 - RNA, 19 nt, Homo sapiens
  misc_RNA (1)...(19): siRNA sense strand
uagccuacaugaagaagaa

SEQ ID NO: 166762 - RNA, 19 nt, Homo sapiens
  misc_RNA (1)...(19): siRNA sense strand
gcaaugagaagaucaccau

SEQ ID NO: 166763 - RNA, 19 nt, Homo sapiens
  misc_RNA (1)...(19): siRNA sense strand
gaggagaugaaggaauuua

SEQ ID NO: 166764 - RNA, 19 nt, Homo sapiens
  misc_RNA (1)...(19): siRNA sense strand
ugaagaagaaccaugaaga

SEQ ID NO: 166765 - RNA, 19 nt, Homo sapiens
  misc_RNA (1)...(19): siRNA sense strand
agacugaccuggagaugca

SEQ ID NO: 166766 - RNA, 19 nt, Homo sapiens
  misc_RNA (1)...(19): siRNA sense strand
gaagaggagaugaaggaau

SEQ ID NO: 166767 - RNA, 19 nt, Homo sapiens
  misc_RNA (1)...(19): siRNA sense strand
ucgagagccugaaugaaga

SEQ ID NO: 166768 - RNA, 19 nt, Homo sapiens
  misc_RNA (1)...(19): siRNA sense strand
gaugagcucacucugucua

SEQ ID NO: 166769 - RNA, 19 nt, Homo sapiens
  misc_RNA (1)...(19): siRNA sense strand
gagcucacucugucuaaga

SEQ ID NO: 166770 - RNA, 19 nt, Homo sapiens
  misc_RNA (1)...(19): siRNA sense strand
gauccugaccgccaccauu

SEQ ID NO: 166771 - RNA, 19 nt, Homo sapiens
  misc_RNA (1)...(19): siRNA sense strand
gcagaucgagagccugaau

SEQ ID NO: 166772 - RNA, 19 nt, Homo sapiens
  misc_RNA (1)...(19): siRNA sense strand
uugaagagcuccgggacaa

SEQ ID NO: 166773 - RNA, 19 nt, Homo sapiens
  misc_RNA (1)...(19): siRNA sense strand
gagacggagugccgcuaug

SEQ ID NO: 166774 - RNA, 19 nt, Homo sapiens
  misc_RNA (1)...(19): siRNA sense strand
cuauggagguggccuugga

SEQ ID NO: 166775 - RNA, 19 nt, Homo sapiens
  misc_RNA (1)...(19): siRNA sense strand
acaagaugcugcuggacau

SEQ ID NO: 166776 - RNA, 19 nt, Homo sapiens
  misc_RNA (1)...(19): siRNA sense strand
augaagagcuagccuacau

SEQ ID NO: 166777 - RNA, 19 nt, Homo sapiens
  misc_RNA (1)...(19): siRNA sense strand
cuauggagguggccuugga

SEQ ID NO: 166778 - RNA, 19 nt, Homo sapiens
  misc_RNA (1)...(19): siRNA sense strand
ugacuuuggugcuugugau

SEQ ID NO: 166779 - RNA, 19 nt, Homo sapiens
  misc_RNA (1)...(19): siRNA sense strand
agcaggagaucgccaccua

SEQ ID NO: 166780 - RNA, 19 nt, Homo sapiens
  misc_RNA (1)...(19): siRNA sense strand
gagaugaaggaauuuagca

SEQ ID NO: 166781 - RNA, 19 nt, Homo sapiens
  misc_RNA (1)...(19): siRNA sense strand
cguggugucucuaccuguu

SEQ ID NO: 166782 - RNA, 19 nt, Homo sapiens
  misc_RNA (1)...(19): siRNA sense strand
gcagauccagggacucauc

SEQ ID NO: 166783 - RNA, 19 nt, Homo sapiens
  misc_RNA (1)...(19): siRNA sense strand
gaagaucaccaugcagaac

SEQ ID NO: 166784 - RNA, 19 nt, Homo sapiens
  misc_RNA (1)...(19): siRNA sense strand
gcugguggcuuuguugacu

SEQ ID NO: 166785 - RNA, 19 nt, Homo sapiens
  misc_RNA (1)...(19): siRNA sense strand
cuacaagaccauugaagag

SEQ ID NO: 166786 - RNA, 19 nt, Homo sapiens
  misc_RNA (1)...(19): siRNA sense strand
gaucgagagccugaaugaa

SEQ ID NO: 166787 - RNA, 19 nt, Homo sapiens
  misc_RNA (1)...(19): siRNA sense strand
gggucauccuggagauuga

SEQ ID NO: 166788 - RNA, 19 nt, Homo sapiens
  misc_RNA (1)...(19): siRNA sense strand
ccuuggagguggcuaugga

SEQ ID NO: 166789 - RNA, 19 nt, Homo sapiens
  misc_RNA (1)...(19): siRNA sense strand
ugaaggaauuuagcaacca

SEQ ID NO: 166790 - RNA, 19 nt, Homo sapiens
  misc_RNA (1)...(19): siRNA sense strand
agagcuagccuacaugaag

SEQ ID NO: 166791 - RNA, 19 nt, Homo sapiens
  misc_RNA (1)...(19): siRNA sense strand
ggucgccgcacuucugaug

SEQ ID NO: 166792 - RNA, 19 nt, Homo sapiens
  misc_RNA (1)...(19): siRNA sense strand
gccagaaccaagaguacaa

SEQ ID NO: 166793 - RNA, 19 nt, Homo sapiens
  misc_RNA (1)...(19): siRNA sense strand
aaggaggugucuaccaaca

SEQ ID NO: 166794 - RNA, 19 nt, Homo sapiens
  misc_RNA (1)...(19): siRNA sense strand
cagcagauccagggacuca

SEQ ID NO: 166795 - RNA, 19 nt, Homo sapiens
  misc_RNA (1)...(19): siRNA sense strand
ccaacacugccaugauuca

SEQ ID NO: 166796 - RNA, 19 nt, Homo sapiens
  misc_RNA (1)...(19): siRNA sense strand
gaaccaugaagaggagaug

SEQ ID NO: 166797 - RNA, 19 nt, Homo sapiens
  misc_RNA (1)...(19): siRNA sense strand
cagagaugagggagcagua

SEQ ID NO: 166798 - RNA, 19 nt, Homo sapiens
  misc_RNA (1)...(19): siRNA sense strand
ggagaugaaggaauuuagc

SEQ ID NO: 166799 - RNA, 19 nt, Homo sapiens
  misc_RNA (1)...(19): siRNA sense strand
cgacuucuagugccucugu

SEQ ID NO: 166800 - RNA, 19 nt, Homo sapiens
  misc_RNA (1)...(19): siRNA sense strand
gagaacacgguggcagaga

SEQ ID NO: 166801 - RNA, 19 nt, Homo sapiens
  misc_RNA (1)...(19): siRNA sense strand
acuacaagaccauugaaga

SEQ ID NO: 166802 - RNA, 19 nt, Homo sapiens
  misc_RNA (1)...(19): siRNA sense strand
ucuguuaccacgacuucua

SEQ ID NO: 166803 - RNA, 19 nt, Homo sapiens
  misc_RNA (1)...(19): siRNA sense strand
gggaugcugaggaaugguu

SEQ ID NO: 166804 - RNA, 19 nt, Homo sapiens
  misc_RNA (1)...(19): siRNA sense strand
augagaagaucaccaugca

SEQ ID NO: 166805 - RNA, 19 nt, Homo sapiens
  misc_RNA (1)...(19): siRNA sense strand
guuaccaccaccucuaaug

SEQ ID NO: 166806 - RNA, 19 nt, Homo sapiens
  misc_RNA (1)...(19): siRNA sense strand
ggcgugagcugugguuuug

SEQ ID NO: 166807 - RNA, 19 nt, Homo sapiens
  misc_RNA (1)...(19): siRNA sense strand
agaucgagagccugaauga

SEQ ID NO: 166808 - RNA, 19 nt, Homo sapiens
  misc_RNA (1)...(19): siRNA sense strand
ucacuggcaaugagaagau

SEQ ID NO: 166809 - RNA, 19 nt, Homo sapiens
  misc_RNA (1)...(19): siRNA sense strand
ugaacaaggaggugucuac

SEQ ID NO: 166810 - RNA, 19 nt, Homo sapiens
  misc_RNA (1)...(19): siRNA sense strand
ugguggcuuuguugacuuu

SEQ ID NO: 166811 - RNA, 19 nt, Homo sapiens
  misc_RNA (1)...(19): siRNA sense strand
ccuacuacaagaccauuga

SEQ ID NO: 166812 - RNA, 19 nt, Homo sapiens
  misc_RNA (1)...(19): siRNA sense strand
ggacugaccuggagaugca

SEQ ID NO: 166813 - RNA, 19 nt, Homo sapiens
  misc_RNA (1)...(19): siRNA sense strand
ccacauuucugcaaacuuc

SEQ ID NO: 166814 - RNA, 19 nt, Homo sapiens
  misc_RNA (1)...(19): siRNA sense strand
cugaggagcugaacaaaga

SEQ ID NO: 166815 - RNA, 19 nt, Homo sapiens
  misc_RNA (1)...(19): siRNA sense strand
gagcuagccuaccugaaga

SEQ ID NO: 166816 - RNA, 19 nt, Homo sapiens
  misc_RNA (1)...(19): siRNA sense strand
uagccuaccugaagaagaa

SEQ ID NO: 166817 - RNA, 19 nt, Homo sapiens
  misc_RNA (1)...(19): siRNA sense strand
agcaggagaucgcuacuua

SEQ ID NO: 166818 - RNA, 19 nt, Homo sapiens
  misc_RNA (1)...(19): siRNA sense strand
ccacaagagagaaaucuaa

SEQ ID NO: 166819 - RNA, 19 nt, Homo sapiens
  misc_RNA (1)...(19): siRNA sense strand
ggagguggaagccgaagua

SEQ ID NO: 166820 - RNA, 19 nt, Homo sapiens
  misc_RNA (1)...(19): siRNA sense strand
aagaggagaugaaggaguu

SEQ ID NO: 166821 - RNA, 19 nt, Homo sapiens
  misc_RNA (1)...(19): siRNA sense strand
gaagagcuccgggacaaga

SEQ ID NO: 166822 - RNA, 19 nt, Homo sapiens
  misc_RNA (1)...(19): siRNA sense strand
ggagaucacagaccugaga

SEQ ID NO: 166823 - RNA, 19 nt, Homo sapiens
  misc_RNA (1)...(19): siRNA sense strand
gaaccaggaguacaagaug

SEQ ID NO: 166824 - RNA, 19 nt, Homo sapiens
  misc_RNA (1)...(19): siRNA sense strand
gaagaagaaccacgaagag

SEQ ID NO: 166825 - RNA, 19 nt, Homo sapiens
  misc_RNA (1)...(19): siRNA sense strand
gcagcaauuuccacaucaa

SEQ ID NO: 166826 - RNA, 19 nt, Homo sapiens
  misc_RNA (1)...(19): siRNA sense strand
ggugguagcagcagcaauu

SEQ ID NO: 166827 - RNA, 19 nt, Homo sapiens
  misc_RNA (1)...(19): siRNA sense strand
gcaagacggagaucacaga

SEQ ID NO: 166828 - RNA, 19 nt, Homo sapiens
  misc_RNA (1)...(19): siRNA sense strand
ggagcuagccuaccugaag

SEQ ID NO: 166829 - RNA, 19 nt, Homo sapiens
  misc_RNA (1)...(19): siRNA sense strand
gguggaagccgaaguaucu

SEQ ID NO: 166830 - RNA, 19 nt, Homo sapiens
  misc_RNA (1)...(19): siRNA sense strand
cagcagcaauuuccacauc

SEQ ID NO: 166831 - RNA, 19 nt, Homo sapiens
  misc_RNA (1)...(19): siRNA sense strand
ugaagaagaaccacgaaga

SEQ ID NO: 166832 - RNA, 19 nt, Homo sapiens
  misc_RNA (1)...(19): siRNA sense strand
gcagaucgagggccugaau

SEQ ID NO: 166833 - RNA, 19 nt, Homo sapiens
  misc_RNA (1)...(19): siRNA sense strand
gggccaggaugccaagaug

SEQ ID NO: 166834 - RNA, 19 nt, Homo sapiens
  misc_RNA (1)...(19): siRNA sense strand
gaaugcgacuacagccaau

SEQ ID NO: 166835 - RNA, 19 nt, Homo sapiens
  misc_RNA (1)...(19): siRNA sense strand
gccaauacuucaagaccau

SEQ ID NO: 166836 - RNA, 19 nt, Homo sapiens
  misc_RNA (1)...(19): siRNA sense strand
gagacagagugccgcuaug

SEQ ID NO: 166837 - RNA, 19 nt, Homo sapiens
  misc_RNA (1)...(19): siRNA sense strand
cgacuacagccaauacuuc

SEQ ID NO: 166838 - RNA, 19 nt, Homo sapiens
  misc_RNA (1)...(19): siRNA sense strand
uugaagagcuccgggacaa

SEQ ID NO: 166839 - RNA, 19 nt, Homo sapiens
  misc_RNA (1)...(19): siRNA sense strand
agaugcugcuugacauaaa

SEQ ID NO: 166840 - RNA, 19 nt, Homo sapiens
  misc_RNA (1)...(19): siRNA sense strand
ggucuccucucuggcaaug

SEQ ID NO: 166841 - RNA, 19 nt, Homo sapiens
  misc_RNA (1)...(19): siRNA sense strand
agacugaggagcugaacaa

SEQ ID NO: 166842 - RNA, 19 nt, Homo sapiens
  misc_RNA (1)...(19): siRNA sense strand
gcaagacugaggagcugaa

SEQ ID NO: 166843 - RNA, 19 nt, Homo sapiens
  misc_RNA (1)...(19): siRNA sense strand
ugaagauccaugacuggua

SEQ ID NO: 166844 - RNA, 19 nt, Homo sapiens
  misc_RNA (1)...(19): siRNA sense strand
ccaugcagaaccucaauga

SEQ ID NO: 166845 - RNA, 19 nt, Homo sapiens
  misc_RNA (1)...(19): siRNA sense strand
gaugcugcuugacauaaag

SEQ ID NO: 166846 - RNA, 19 nt, Homo sapiens
  misc_RNA (1)...(19): siRNA sense strand
aagcugggcuggagaacuc

SEQ ID NO: 166847 - RNA, 19 nt, Homo sapiens
  misc_RNA (1)...(19): siRNA sense strand
gaaccacgaagaggagaug

SEQ ID NO: 166848 - RNA, 19 nt, Homo sapiens
  misc_RNA (1)...(19): siRNA sense strand
ugcaggagcuggagaucga

SEQ ID NO: 166849 - RNA, 19 nt, Homo sapiens
  misc_RNA (1)...(19): siRNA sense strand
caugagggucuguggcuuu

SEQ ID NO: 166850 - RNA, 19 nt, Homo sapiens
  misc_RNA (1)...(19): siRNA sense strand
ccaggucaauguggagaug

SEQ ID NO: 166851 - RNA, 19 nt, Homo sapiens
  misc_RNA (1)...(19): siRNA sense strand
gagggucuguggcuuuggu

SEQ ID NO: 166852 - RNA, 19 nt, Homo sapiens
  misc_RNA (1)...(19): siRNA sense strand
gucgaggccugguucuuca

SEQ ID NO: 166853 - RNA, 19 nt, Homo sapiens
  misc_RNA (1)...(19): siRNA sense strand
cgagacagagugccgcuau

SEQ ID NO: 166854 - RNA, 19 nt, Homo sapiens
  misc_RNA (1)...(19): siRNA sense strand
gaacucacuggccgagaca

SEQ ID NO: 166855 - RNA, 19 nt, Homo sapiens
  misc_RNA (1)...(19): siRNA sense strand
ugaaagcugggcuggagaa

SEQ ID NO: 166856 - RNA, 19 nt, Homo sapiens
  misc_RNA (1)...(19): siRNA sense strand
gacuacagccaauacuuca

SEQ ID NO: 166857 - RNA, 19 nt, Homo sapiens
  misc_RNA (1)...(19): siRNA sense strand
cugcuagguuugucucuuc

SEQ ID NO: 166858 - RNA, 19 nt, Homo sapiens
  misc_RNA (1)...(19): siRNA sense strand
gggccugaaugaggagcua

SEQ ID NO: 166859 - RNA, 19 nt, Homo sapiens
  misc_RNA (1)...(19): siRNA sense strand
ccaccaccaucgacaacuc

SEQ ID NO: 166860 - RNA, 19 nt, Homo sapiens
  misc_RNA (1)...(19): siRNA sense strand
gaccaccacauuucugcaa

SEQ ID NO: 166861 - RNA, 19 nt, Homo sapiens
  misc_RNA (1)...(19): siRNA sense strand
cgacaacucccgggucauc

SEQ ID NO: 166862 - RNA, 19 nt, Homo sapiens
  misc_RNA (1)...(19): siRNA sense strand
gcgacuacagccaauacuu

SEQ ID NO: 166863 - RNA, 19 nt, Homo sapiens
  misc_RNA (1)...(19): siRNA sense strand
acgaagaggagaugaagga

SEQ ID NO: 166864 - RNA, 19 nt, Homo sapiens
  misc_RNA (1)...(19): siRNA sense strand
cagagaugagggagcagua

SEQ ID NO: 166865 - RNA, 19 nt, Homo sapiens
  misc_RNA (1)...(19): siRNA sense strand
gagcaggagaucgcuacuu

SEQ ID NO: 166866 - RNA, 19 nt, Homo sapiens
  misc_RNA (1)...(19): siRNA sense strand
auggacaggugguuucuuc

SEQ ID NO: 166867 - RNA, 19 nt, Homo sapiens
  misc_RNA (1)...(19): siRNA sense strand
ccacgaagaggagaugaag

SEQ ID NO: 166868 - RNA, 19 nt, Homo sapiens
  misc_RNA (1)...(19): siRNA sense strand
gcucagaaccaggaguaca

SEQ ID NO: 166869 - RNA, 19 nt, Homo sapiens
  misc_RNA (1)...(19): siRNA sense strand
ccaccacauuucugcaaac

SEQ ID NO: 166870 - RNA, 19 nt, Homo sapiens
  misc_RNA (1)...(19): siRNA sense strand
aagaugcugcuugacauaa

SEQ ID NO: 166871 - RNA, 19 nt, Homo sapiens
  misc_RNA (1)...(19): siRNA sense strand
ggaagcagcuagauaccuu

SEQ ID NO: 166872 - RNA, 19 nt, Homo sapiens
  misc_RNA (1)...(19): siRNA sense strand
ggaaguggcuuuggguuug

SEQ ID NO: 166873 - RNA, 19 nt, Homo sapiens
  misc_RNA (1)...(19): siRNA sense strand
gcacagcagccgagaauga

SEQ ID NO: 166874 - RNA, 19 nt, Homo sapiens
  misc_RNA (1)...(19): siRNA sense strand
ggaaguggcuccggguuug

SEQ ID NO: 166875 - RNA, 19 nt, Homo sapiens
  misc_RNA (1)...(19): siRNA sense strand
gggcagagaucgagaacau

SEQ ID NO: 166876 - RNA, 19 nt, Homo sapiens
  misc_RNA (1)...(19): siRNA sense strand
gagaaugcccuuaaagaug

SEQ ID NO: 166877 - RNA, 19 nt, Homo sapiens
  misc_RNA (1)...(19): siRNA sense strand
gagcaaggcugaggcugaa

SEQ ID NO: 166878 - RNA, 19 nt, Homo sapiens
  misc_RNA (1)...(19): siRNA sense strand
gaagagcgcgaacagauca

SEQ ID NO: 166879 - RNA, 19 nt, Homo sapiens
  misc_RNA (1)...(19): siRNA sense strand
gaacaccaagagugaaauu

SEQ ID NO: 166880 - RNA, 19 nt, Homo sapiens
  misc_RNA (1)...(19): siRNA sense strand
guggaggacuucaagacua

SEQ ID NO: 166881 - RNA, 19 nt, Homo sapiens
  misc_RNA (1)...(19): siRNA sense strand
gcagagaucgagaacauca

SEQ ID NO: 166882 - RNA, 19 nt, Homo sapiens
  misc_RNA (1)...(19): siRNA sense strand
gcagaagccucuacaaccu

SEQ ID NO: 166883 - RNA, 19 nt, Homo sapiens
  misc_RNA (1)...(19): siRNA sense strand
cuagauaccuugggcaaug

SEQ ID NO: 166884 - RNA, 19 nt, Homo sapiens
  misc_RNA (1)...(19): siRNA sense strand
ugaacaagguggaguugga

SEQ ID NO: 166885 - RNA, 19 nt, Homo sapiens
  misc_RNA (1)...(19): siRNA sense strand
ugaagaacaccaagaguga

SEQ ID NO: 166886 - RNA, 19 nt, Homo sapiens
  misc_RNA (1)...(19): siRNA sense strand
gaggugagaaugcccuuaa

SEQ ID NO: 166887 - RNA, 19 nt, Homo sapiens
  misc_RNA (1)...(19): siRNA sense strand
gugccagacucuucaggua

SEQ ID NO: 166888 - RNA, 19 nt, Homo sapiens
  misc_RNA (1)...(19): siRNA sense strand
uggaggacuucaagacuaa

SEQ ID NO: 166889 - RNA, 19 nt, Homo sapiens
  misc_RNA (1)...(19): siRNA sense strand
gcagagcucaacaggauga

SEQ ID NO: 166890 - RNA, 19 nt, Homo sapiens
  misc_RNA (1)...(19): siRNA sense strand
agaucaagcuccucaacaa

SEQ ID NO: 166891 - RNA, 19 nt, Homo sapiens
  misc_RNA (1)...(19): siRNA sense strand
uugcagagcucaacaggau

SEQ ID NO: 166892 - RNA, 19 nt, Homo sapiens
  misc_RNA (1)...(19): siRNA sense strand
cgacaaggugcaguucuua

SEQ ID NO: 166893 - RNA, 19 nt, Homo sapiens
  misc_RNA (1)...(19): siRNA sense strand
gaccuggacagcauuauug

SEQ ID NO: 166894 - RNA, 19 nt, Homo sapiens
  misc_RNA (1)...(19): siRNA sense strand
ggaccuggacagcauuauu

SEQ ID NO: 166895 - RNA, 19 nt, Homo sapiens
  misc_RNA (1)...(19): siRNA sense strand
gaaugacuuugugguccua

SEQ ID NO: 166896 - RNA, 19 nt, Homo sapiens
  misc_RNA (1)...(19): siRNA sense strand
gaagaacaccaagagugaa

SEQ ID NO: 166897 - RNA, 19 nt, Homo sapiens
  misc_RNA (1)...(19): siRNA sense strand
gugagaaugcccuuaaaga

SEQ ID NO: 166898 - RNA, 19 nt, Homo sapiens
  misc_RNA (1)...(19): siRNA sense strand
ucuuagagcaacagaauaa

SEQ ID NO: 166899 - RNA, 19 nt, Homo sapiens
  misc_RNA (1)...(19): siRNA sense strand
gugugaagcuggccuugga

SEQ ID NO: 166900 - RNA, 19 nt, Homo sapiens
  misc_RNA (1)...(19): siRNA sense strand
uggcuuuggugguggauuu

SEQ ID NO: 166901 - RNA, 19 nt, Homo sapiens
  misc_RNA (1)...(19): siRNA sense strand
ccaccacccugaacaagag

SEQ ID NO: 166902 - RNA, 19 nt, Homo sapiens
  misc_RNA (1)...(19): siRNA sense strand
ucaagcuccucaacaacaa

SEQ ID NO: 166903 - RNA, 19 nt, Homo sapiens
  misc_RNA (1)...(19): siRNA sense strand
ugagaaugcccuuaaagau

SEQ ID NO: 166904 - RNA, 19 nt, Homo sapiens
  misc_RNA (1)...(19): siRNA sense strand
ggagauugacccugagauc

SEQ ID NO: 166905 - RNA, 19 nt, Homo sapiens
  misc_RNA (1)...(19): siRNA sense strand
accaggagcucaugagugu

SEQ ID NO: 166906 - RNA, 19 nt, Homo sapiens
  misc_RNA (1)...(19): siRNA sense strand
aggaggagcuggcacgaau

SEQ ID NO: 166907 - RNA, 19 nt, Homo sapiens
  misc_RNA (1)...(19): siRNA sense strand
acaacaaguuugccuccuu

SEQ ID NO: 166908 - RNA, 19 nt, Homo sapiens
  misc_RNA (1)...(19): siRNA sense strand
ggaagagcgcgaacagauc

SEQ ID NO: 166909 - RNA, 19 nt, Homo sapiens
  misc_RNA (1)...(19): siRNA sense strand
caaguuugccuccuucauc

SEQ ID NO: 166910 - RNA, 19 nt, Homo sapiens
  misc_RNA (1)...(19): siRNA sense strand
gaucgccaccuaccgcaaa

SEQ ID NO: 166911 - RNA, 19 nt, Homo sapiens
  misc_RNA (1)...(19): siRNA sense strand
acgacaaggugccugcuuu

SEQ ID NO: 166912 - RNA, 19 nt, Homo sapiens
  misc_RNA (1)...(19): siRNA sense strand
gaagaggagaucaacaaac

SEQ ID NO: 166913 - RNA, 19 nt, Homo sapiens
  misc_RNA (1)...(19): siRNA sense strand
gccagacucuucagguauc

SEQ ID NO: 166914 - RNA, 19 nt, Homo sapiens
  misc_RNA (1)...(19): siRNA sense strand
gaaauugcagagcucaaca

SEQ ID NO: 166915 - RNA, 19 nt, Homo sapiens
  misc_RNA (1)...(19): siRNA sense strand
ggugacaaccugaagaaca

SEQ ID NO: 166916 - RNA, 19 nt, Homo sapiens
  misc_RNA (1)...(19): siRNA sense strand
gaccaccaccuccagcaaa

SEQ ID NO: 166917 - RNA, 19 nt, Homo sapiens
  misc_RNA (1)...(19): siRNA sense strand
ucgagaacaucaagaagca

SEQ ID NO: 166918 - RNA, 19 nt, Homo sapiens
  misc_RNA (1)...(19): siRNA sense strand
uccugaagguccucuauga

SEQ ID NO: 166919 - RNA, 19 nt, Homo sapiens
  misc_RNA (1)...(19): siRNA sense strand
aagaggagaucaacaaacg

SEQ ID NO: 166920 - RNA, 19 nt, Homo sapiens
  misc_RNA (1)...(19): siRNA sense strand
gccaagguggacagucuua

SEQ ID NO: 166921 - RNA, 19 nt, Homo sapiens
  misc_RNA (1)...(19): siRNA sense strand
gaaguggcuuuggguuugg

SEQ ID NO: 166922 - RNA, 19 nt, Homo sapiens
  misc_RNA (1)...(19): siRNA sense strand
aggcaucagcggaggauua

SEQ ID NO: 166923 - RNA, 19 nt, Homo sapiens
  misc_RNA (1)...(19): siRNA sense strand
acaucgagaucgccaccua

SEQ ID NO: 166924 - RNA, 19 nt, Homo sapiens
  misc_RNA (1)...(19): siRNA sense strand
gaagcuggccuuggacauc

SEQ ID NO: 166925 - RNA, 19 nt, Homo sapiens
  misc_RNA (1)...(19): siRNA sense strand
uguaggcgguggcaagaga

SEQ ID NO: 166926 - RNA, 19 nt, Homo sapiens
  misc_RNA (1)...(19): siRNA sense strand
uuucggcacugguggcuuu

SEQ ID NO: 166927 - RNA, 19 nt, Homo sapiens
  misc_RNA (1)...(19): siRNA sense strand
ugaagaggagaucaacaaa

SEQ ID NO: 166928 - RNA, 19 nt, Homo sapiens
  misc_RNA (1)...(19): siRNA sense strand
ggcagugucucuggcaguu

SEQ ID NO: 166929 - RNA, 19 nt, Homo sapiens
  misc_RNA (1)...(19): siRNA sense strand
caggagcucaugaguguga

SEQ ID NO: 166930 - RNA, 19 nt, Homo sapiens
  misc_RNA (1)...(19): siRNA sense strand
uuaaagaugcccacagcaa

SEQ ID NO: 166931 - RNA, 19 nt, Homo sapiens
  misc_RNA (1)...(19): siRNA sense strand
caagguggacagucuuaau

SEQ ID NO: 166932 - RNA, 19 nt, Homo sapiens
  misc_RNA (1)...(19): siRNA sense strand
cggaagagcgcgaacagau

SEQ ID NO: 166933 - RNA, 19 nt, Homo sapiens
  misc_RNA (1)...(19): siRNA sense strand
caucagcggaggauuagga

SEQ ID NO: 166934 - RNA, 19 nt, Homo sapiens
  misc_RNA (1)...(19): siRNA sense strand
ggcgaggaguacagaaugu

SEQ ID NO: 166935 - RNA, 19 nt, Homo sapiens
  misc_RNA (1)...(19): siRNA sense strand
gaugcugccuaccugaaca

SEQ ID NO: 166936 - RNA, 19 nt, Homo sapiens
  misc_RNA (1)...(19): siRNA sense strand
uagauaccuugggcaauga

SEQ ID NO: 166937 - RNA, 19 nt, Homo sapiens
  misc_RNA (1)...(19): siRNA sense strand
ugaggaagcagcuagauac

SEQ ID NO: 166938 - RNA, 19 nt, Homo sapiens
  misc_RNA (1)...(19): siRNA sense strand
ucgacaaggugcaguucuu

SEQ ID NO: 166939 - RNA, 19 nt, Homo sapiens
  misc_RNA (1)...(19): siRNA sense strand
caccaagagugaaauugca

SEQ ID NO: 166940 - RNA, 19 nt, Homo sapiens
  misc_RNA (1)...(19): siRNA sense strand
ucaagacuaaguaugaaga

SEQ ID NO: 166941 - RNA, 19 nt, Homo sapiens
  misc_RNA (1)...(19): siRNA sense strand
cgacaaggugccugcuuug

SEQ ID NO: 166942 - RNA, 19 nt, Homo sapiens
  misc_RNA (1)...(19): siRNA sense strand
gagcagcgaggugagaaug

SEQ ID NO: 166943 - RNA, 19 nt, Homo sapiens
  misc_RNA (1)...(19): siRNA sense strand
ccagaucucgguugaccaa

SEQ ID NO: 166944 - RNA, 19 nt, Homo sapiens
  misc_RNA (1)...(19): siRNA sense strand
gcuccucaacaacaaguuu

SEQ ID NO: 166945 - RNA, 19 nt, Homo sapiens
  misc_RNA (1)...(19): siRNA sense strand
ggguuuggccugaguagug

SEQ ID NO: 166946 - RNA, 19 nt, Homo sapiens
  misc_RNA (1)...(19): siRNA sense strand
gcagagcagcgaggugaga

SEQ ID NO: 166947 - RNA, 19 nt, Homo sapiens
  misc_RNA (1)...(19): siRNA sense strand
acccugagauccagaaagu

SEQ ID NO: 166948 - RNA, 19 nt, Homo sapiens
  misc_RNA (1)...(19): siRNA sense strand
ggacagcguggaggacuuc

SEQ ID NO: 166949 - RNA, 19 nt, Homo sapiens
  misc_RNA (1)...(19): siRNA sense strand
gggcgaggaguacagaaug

SEQ ID NO: 166950 - RNA, 19 nt, Homo sapiens
  misc_RNA (1)...(19): siRNA sense strand
gugacaaccugaagaacac

SEQ ID NO: 166951 - RNA, 19 nt, Homo sapiens
  misc_RNA (1)...(19): siRNA sense strand
uuaaugacgagaucaacuu

SEQ ID NO: 166952 - RNA, 19 nt, Homo sapiens
  misc_RNA (1)...(19): siRNA sense strand
augcggagcugucccagau

SEQ ID NO: 166953 - RNA, 19 nt, Homo sapiens
  misc_RNA (1)...(19): siRNA sense strand
cugaagguccucuaugaug

SEQ ID NO: 166954 - RNA, 19 nt, Homo sapiens
  misc_RNA (1)...(19): siRNA sense strand
aagaacaccaagagugaaa

SEQ ID NO: 166955 - RNA, 19 nt, Homo sapiens
  misc_RNA (1)...(19): siRNA sense strand
acaaggugcaguucuuaga

SEQ ID NO: 166956 - RNA, 19 nt, Homo sapiens
  misc_RNA (1)...(19): siRNA sense strand
cugaggaagcagcuagaua

SEQ ID NO: 166957 - RNA, 19 nt, Homo sapiens
  misc_RNA (1)...(19): siRNA sense strand
gaucgagaacaucaagaag

SEQ ID NO: 166958 - RNA, 19 nt, Homo sapiens
  misc_RNA (1)...(19): siRNA sense strand
gaauucaggaggucaccau

SEQ ID NO: 166959 - RNA, 19 nt, Homo sapiens
  misc_RNA (1)...(19): siRNA sense strand
cagcagaagccucuacaac

SEQ ID NO: 166960 - RNA, 19 nt, Homo sapiens
  misc_RNA (1)...(19): siRNA sense strand
cuuuggcacugguggcuuu

SEQ ID NO: 166961 - RNA, 19 nt, Homo sapiens
  misc_RNA (1)...(19): siRNA sense strand
uggaaguggcuuuggguuu

SEQ ID NO: 166962 - RNA, 19 nt, Homo sapiens
  misc_RNA (1)...(19): siRNA sense strand
cagcggaggauuaggaagu

SEQ ID NO: 166963 - RNA, 19 nt, Homo sapiens
  misc_RNA (1)...(19): siRNA sense strand
gaucaagcuccucaacaac

SEQ ID NO: 166964 - RNA, 19 nt, Homo sapiens
  misc_RNA (1)...(19): siRNA sense strand
cagccgagaaugacuuugu

SEQ ID NO: 166965 - RNA, 19 nt, Homo sapiens
  misc_RNA (1)...(19): siRNA sense strand
ggagggcgaggaguacaga

SEQ ID NO: 166966 - RNA, 19 nt, Homo sapiens
  misc_RNA (1)...(19): siRNA sense strand
ggugagaaugcccuuaaag

SEQ ID NO: 166967 - RNA, 19 nt, Homo sapiens
  misc_RNA (1)...(19): siRNA sense strand
gcagcagaagccucuacaa

SEQ ID NO: 166968 - RNA, 19 nt, Homo sapiens
  misc_RNA (1)...(19): siRNA sense strand
uucaggaggucaccaucaa

SEQ ID NO: 166969 - RNA, 19 nt, Homo sapiens
  misc_RNA (1)...(19): siRNA sense strand
ggacggaagagcgcgaaca

SEQ ID NO: 166970 - RNA, 19 nt, Homo sapiens
  misc_RNA (1)...(19): siRNA sense strand
gcuggccgaugcucuucug

SEQ ID NO: 166971 - RNA, 19 nt, Homo sapiens
  misc_RNA (1)...(19): siRNA sense strand
uagaggagcuggagcaaga

SEQ ID NO: 166972 - RNA, 19 nt, Homo sapiens
  misc_RNA (1)...(19): siRNA sense strand
cuacagagauggcuucaac

SEQ ID NO: 166973 - RNA, 19 nt, Homo sapiens
  misc_RNA (1)...(19): siRNA sense strand
caacgucuccaucauguau

SEQ ID NO: 166974 - RNA, 19 nt, Homo sapiens
  misc_RNA (1)...(19): siRNA sense strand
gccuuuggcuuucaccuuu

SEQ ID NO: 166975 - RNA, 19 nt, Homo sapiens
  misc_RNA (1)...(19): siRNA sense strand
ccaacucccuugacagugu

SEQ ID NO: 166976 - RNA, 19 nt, Homo sapiens
  misc_RNA (1)...(19): siRNA sense strand
caacucccuugacagugua

SEQ ID NO: 166977 - RNA, 19 nt, Homo sapiens
  misc_RNA (1)...(19): siRNA sense strand
ugaggugacuccaguaucu

SEQ ID NO: 166978 - RNA, 19 nt, Homo sapiens
  misc_RNA (1)...(19): siRNA sense strand
uggagacaauggcgacuuu

SEQ ID NO: 166979 - RNA, 19 nt, Homo sapiens
  misc_RNA (1)...(19): siRNA sense strand
caucaccacuuagcggaaa

SEQ ID NO: 166980 - RNA, 19 nt, Homo sapiens
  misc_RNA (1)...(19): siRNA sense strand
cgacuuuacccuucgacua

SEQ ID NO: 166981 - RNA, 19 nt, Homo sapiens
  misc_RNA (1)...(19): siRNA sense strand
uguauaaccucacuguucu

SEQ ID NO: 166982 - RNA, 19 nt, Homo sapiens
  misc_RNA (1)...(19): siRNA sense strand
ggagacaauggcgacuuua

SEQ ID NO: 166983 - RNA, 19 nt, Homo sapiens
  misc_RNA (1)...(19): siRNA sense strand
ggaccuacaccugccauau

SEQ ID NO: 166984 - RNA, 19 nt, Homo sapiens
  misc_RNA (1)...(19): siRNA sense strand
gagcagcaguguacuucac

SEQ ID NO: 166985 - RNA, 19 nt, Homo sapiens
  misc_RNA (1)...(19): siRNA sense strand
ccuggugacuggagacaau

SEQ ID NO: 166986 - RNA, 19 nt, Homo sapiens
  misc_RNA (1)...(19): siRNA sense strand
agaagacaguggcgaccaa

SEQ ID NO: 166987 - RNA, 19 nt, Homo sapiens
  misc_RNA (1)...(19): siRNA sense strand
cagccucugugcauugguu

SEQ ID NO: 166988 - RNA, 19 nt, Homo sapiens
  misc_RNA (1)...(19): siRNA sense strand
ccauauccaucugcaggaa

SEQ ID NO: 166989 - RNA, 19 nt, Homo sapiens
  misc_RNA (1)...(19): siRNA sense strand
gacuuuacccuucgacuag

SEQ ID NO: 166990 - RNA, 19 nt, Homo sapiens
  misc_RNA (1)...(19): siRNA sense strand
gaccuacaccugccauauc

SEQ ID NO: 166991 - RNA, 19 nt, Homo sapiens
  misc_RNA (1)...(19): siRNA sense strand
caucauguauaaccucacu

SEQ ID NO: 166992 - RNA, 19 nt, Homo sapiens
  misc_RNA (1)...(19): siRNA sense strand
uuuggugacuggagccuuu

SEQ ID NO: 166993 - RNA, 19 nt, Homo sapiens
  misc_RNA (1)...(19): siRNA sense strand
gcucaaugccacugucaca

SEQ ID NO: 166994 - RNA, 19 nt, Homo sapiens
  misc_RNA (1)...(19): siRNA sense strand
gcaggaacagcagcucaau

SEQ ID NO: 166995 - RNA, 19 nt, Homo sapiens
  misc_RNA (1)...(19): siRNA sense strand
cacagugacucccaaaucc

SEQ ID NO: 166996 - RNA, 19 nt, Homo sapiens
  misc_RNA (1)...(19): siRNA sense strand
gaagagcaggggucacuug

SEQ ID NO: 166997 - RNA, 19 nt, Homo sapiens
  misc_RNA (1)...(19): siRNA sense strand
gagacaauggcgacuuuac

SEQ ID NO: 166998 - RNA, 19 nt, Homo sapiens
  misc_RNA (1)...(19): siRNA sense strand
acgucuccaucauguauaa

SEQ ID NO: 166999 - RNA, 19 nt, Homo sapiens
  misc_RNA (1)...(19): siRNA sense strand
gcuuucaccuuuggagaag

SEQ ID NO: 167000 - RNA, 19 nt, Homo sapiens
  misc_RNA (1)...(19): siRNA sense strand
gcccagccucugugcauug

SEQ ID NO: 167001 - RNA, 19 nt, Homo sapiens
  misc_RNA (1)...(19): siRNA sense strand
uuccugggcuugcuguuuc

SEQ ID NO: 167002 - RNA, 19 nt, Homo sapiens
  misc_RNA (1)...(19): siRNA sense strand
gauagaggagcuggagcaa

SEQ ID NO: 167003 - RNA, 19 nt, Homo sapiens
  misc_RNA (1)...(19): siRNA sense strand
ggacagagcuucauugcuu

SEQ ID NO: 167004 - RNA, 19 nt, Homo sapiens
  misc_RNA (1)...(19): siRNA sense strand
gaacaccacugaccgaauu

SEQ ID NO: 167005 - RNA, 19 nt, Homo sapiens
  misc_RNA (1)...(19): siRNA sense strand
acaacaagaugcucuauua

SEQ ID NO: 167006 - RNA, 19 nt, Homo sapiens
  misc_RNA (1)...(19): siRNA sense strand
caacagcccuagagcaaua

SEQ ID NO: 167007 - RNA, 19 nt, Homo sapiens
  misc_RNA (1)...(19): siRNA sense strand
gaagauacguuaaagaaag

SEQ ID NO: 167008 - RNA, 19 nt, Homo sapiens
  misc_RNA (1)...(19): siRNA sense strand
acaagaagcuaaugaauug

SEQ ID NO: 167009 - RNA, 19 nt, Homo sapiens
  misc_RNA (1)...(19): siRNA sense strand
gauaugaacugauaguaga

SEQ ID NO: 167010 - RNA, 19 nt, Homo sapiens
  misc_RNA (1)...(19): siRNA sense strand
gcacagaauuacaguuauu

SEQ ID NO: 167011 - RNA, 19 nt, Homo sapiens
  misc_RNA (1)...(19): siRNA sense strand
gaaaugcaaugcuggauuc

SEQ ID NO: 167012 - RNA, 19 nt, Homo sapiens
  misc_RNA (1)...(19): siRNA sense strand
ccagaagacucacuuauau

SEQ ID NO: 167013 - RNA, 19 nt, Homo sapiens
  misc_RNA (1)...(19): siRNA sense strand
gaacuggccacuuugaaua

SEQ ID NO: 167014 - RNA, 19 nt, Homo sapiens
  misc_RNA (1)...(19): siRNA sense strand
gaagaugcuugaagagauu

SEQ ID NO: 167015 - RNA, 19 nt, Homo sapiens
  misc_RNA (1)...(19): siRNA sense strand
ggaagcaccuguaagaaau

SEQ ID NO: 167016 - RNA, 19 nt, Homo sapiens
  misc_RNA (1)...(19): siRNA sense strand
cacaagauaugaacugaua

SEQ ID NO: 167017 - RNA, 19 nt, Homo sapiens
  misc_RNA (1)...(19): siRNA sense strand
cacagaaucuucaacauuu

SEQ ID NO: 167018 - RNA, 19 nt, Homo sapiens
  misc_RNA (1)...(19): siRNA sense strand
ccagagaacugcaagcaaa

SEQ ID NO: 167019 - RNA, 19 nt, Homo sapiens
  misc_RNA (1)...(19): siRNA sense strand
agaaauagauggagccaaa

SEQ ID NO: 167020 - RNA, 19 nt, Homo sapiens
  misc_RNA (1)...(19): siRNA sense strand
ccaagaguuugaacacuua

SEQ ID NO: 167021 - RNA, 19 nt, Homo sapiens
  misc_RNA (1)...(19): siRNA sense strand
ccagugagcuucaguaaag

SEQ ID NO: 167022 - RNA, 19 nt, Homo sapiens
  misc_RNA (1)...(19): siRNA sense strand
ggauugaaguuugaaauug

SEQ ID NO: 167023 - RNA, 19 nt, Homo sapiens
  misc_RNA (1)...(19): siRNA sense strand
gcaggaaguugcacaguuc

SEQ ID NO: 167024 - RNA, 19 nt, Homo sapiens
  misc_RNA (1)...(19): siRNA sense strand
ucaagagcauggauaauga

SEQ ID NO: 167025 - RNA, 19 nt, Homo sapiens
  misc_RNA (1)...(19): siRNA sense strand
ggaaacaggaacuuacuuu

SEQ ID NO: 167026 - RNA, 19 nt, Homo sapiens
  misc_RNA (1)...(19): siRNA sense strand
cuacauguguucuaugauu

SEQ ID NO: 167027 - RNA, 19 nt, Homo sapiens
  misc_RNA (1)...(19): siRNA sense strand
gauaucaacuucagaggau

SEQ ID NO: 167028 - RNA, 19 nt, Homo sapiens
  misc_RNA (1)...(19): siRNA sense strand
ggaccuaacugugaaagau

SEQ ID NO: 167029 - RNA, 19 nt, Homo sapiens
  misc_RNA (1)...(19): siRNA sense strand
uaauuucacuggcugcaua

SEQ ID NO: 167030 - RNA, 19 nt, Homo sapiens
  misc_RNA (1)...(19): siRNA sense strand
caaugaaacagcagaauuu

SEQ ID NO: 167031 - RNA, 19 nt, Homo sapiens
  misc_RNA (1)...(19): siRNA sense strand
uaaguaaccucagccauga

SEQ ID NO: 167032 - RNA, 19 nt, Homo sapiens
  misc_RNA (1)...(19): siRNA sense strand
ccaaauggguuacuauucu

SEQ ID NO: 167033 - RNA, 19 nt, Homo sapiens
  misc_RNA (1)...(19): siRNA sense strand
ucaagggucccauuuauuu

SEQ ID NO: 167034 - RNA, 19 nt, Homo sapiens
  misc_RNA (1)...(19): siRNA sense strand
ggauagagauguggagguu

SEQ ID NO: 167035 - RNA, 19 nt, Homo sapiens
  misc_RNA (1)...(19): siRNA sense strand
caaauggguuacuauucua

SEQ ID NO: 167036 - RNA, 19 nt, Homo sapiens
  misc_RNA (1)...(19): siRNA sense strand
gaaccaguauggaugacuu

SEQ ID NO: 167037 - RNA, 19 nt, Homo sapiens
  misc_RNA (1)...(19): siRNA sense strand
gaggauacgugguucuaga

SEQ ID NO: 167038 - RNA, 19 nt, Homo sapiens
  misc_RNA (1)...(19): siRNA sense strand
gaagauuuccaacgguaua

SEQ ID NO: 167039 - RNA, 19 nt, Homo sapiens
  misc_RNA (1)...(19): siRNA sense strand
gauaagcaguacaaugaug

SEQ ID NO: 167040 - RNA, 19 nt, Homo sapiens
  misc_RNA (1)...(19): siRNA sense strand
gcuguucggugcauuugua

SEQ ID NO: 167041 - RNA, 19 nt, Homo sapiens
  misc_RNA (1)...(19): siRNA sense strand
ggcaugaugugauauuuau

SEQ ID NO: 167042 - RNA, 19 nt, Homo sapiens
  misc_RNA (1)...(19): siRNA sense strand
uagauaagcaguacaauga

SEQ ID NO: 167043 - RNA, 19 nt, Homo sapiens
  misc_RNA (1)...(19): siRNA sense strand
gaagugcacucgagaacca

SEQ ID NO: 167044 - RNA, 19 nt, Homo sapiens
  misc_RNA (1)...(19): siRNA sense strand
uagaagccgucaaccauuu

SEQ ID NO: 167045 - RNA, 19 nt, Homo sapiens
  misc_RNA (1)...(19): siRNA sense strand
caacagccgccaagaguuu

SEQ ID NO: 167046 - RNA, 19 nt, Homo sapiens
  misc_RNA (1)...(19): siRNA sense strand
cgacaacgcuuuuccuuuu

SEQ ID NO: 167047 - RNA, 19 nt, Homo sapiens
  misc_RNA (1)...(19): siRNA sense strand
guagaggaauuaguugaaa

SEQ ID NO: 167048 - RNA, 19 nt, Homo sapiens
  misc_RNA (1)...(19): siRNA sense strand
ccaagaagcuauugaccau

SEQ ID NO: 167049 - RNA, 19 nt, Homo sapiens
  misc_RNA (1)...(19): siRNA sense strand
ugacuacaaugcuaaguug

SEQ ID NO: 167050 - RNA, 19 nt, Homo sapiens
  misc_RNA (1)...(19): siRNA sense strand
ggaauuaguugaaaaggaa

SEQ ID NO: 167051 - RNA, 19 nt, Homo sapiens
  misc_RNA (1)...(19): siRNA sense strand
ccagaaaucuuacaaucca

SEQ ID NO: 167052 - RNA, 19 nt, Homo sapiens
  misc_RNA (1)...(19): siRNA sense strand
gaacuuagccccaaggaaa

SEQ ID NO: 167053 - RNA, 19 nt, Homo sapiens
  misc_RNA (1)...(19): siRNA sense strand
gaagcuaccuggaaaauca

SEQ ID NO: 167054 - RNA, 19 nt, Homo sapiens
  misc_RNA (1)...(19): siRNA sense strand
gauggcagauggcacagaa

SEQ ID NO: 167055 - RNA, 19 nt, Homo sapiens
  misc_RNA (1)...(19): siRNA sense strand
gaacuuacuuuucaacaga

SEQ ID NO: 167056 - RNA, 19 nt, Homo sapiens
  misc_RNA (1)...(19): siRNA sense strand
ucucagacauucaguguga

SEQ ID NO: 167057 - RNA, 19 nt, Homo sapiens
  misc_RNA (1)...(19): siRNA sense strand
gguccacacuucucuuuau

SEQ ID NO: 167058 - RNA, 19 nt, Homo sapiens
  misc_RNA (1)...(19): siRNA sense strand
gggaguaccuaaauguuca

SEQ ID NO: 167059 - RNA, 19 nt, Homo sapiens
  misc_RNA (1)...(19): siRNA sense strand
gauacgugguucuagauga

SEQ ID NO: 167060 - RNA, 19 nt, Homo sapiens
  misc_RNA (1)...(19): siRNA sense strand
gcaauuccaacgaguguuu

SEQ ID NO: 167061 - RNA, 19 nt, Homo sapiens
  misc_RNA (1)...(19): siRNA sense strand
gagcacgccuaucaauaug

SEQ ID NO: 167062 - RNA, 19 nt, Homo sapiens
  misc_RNA (1)...(19): siRNA sense strand
agaugaggcuuacgaacua

SEQ ID NO: 167063 - RNA, 19 nt, Homo sapiens
  misc_RNA (1)...(19): siRNA sense strand
gauguggacucugaaguga

SEQ ID NO: 167064 - RNA, 19 nt, Homo sapiens
  misc_RNA (1)...(19): siRNA sense strand
aaucaagggucccauuuau

SEQ ID NO: 167065 - RNA, 19 nt, Homo sapiens
  misc_RNA (1)...(19): siRNA sense strand
gaguaagaauccuaccaaa

SEQ ID NO: 167066 - RNA, 19 nt, Homo sapiens
  misc_RNA (1)...(19): siRNA sense strand
uaaagggaaucaaaguuca

SEQ ID NO: 167067 - RNA, 19 nt, Homo sapiens
  misc_RNA (1)...(19): siRNA sense strand
gcucagaccagaaguguug

SEQ ID NO: 167068 - RNA, 19 nt, Homo sapiens
  misc_RNA (1)...(19): siRNA sense strand
cacaggaccuucaacaaga

SEQ ID NO: 167069 - RNA, 19 nt, Homo sapiens
  misc_RNA (1)...(19): siRNA sense strand
gcacaggaccuucaacaag

SEQ ID NO: 167070 - RNA, 19 nt, Homo sapiens
  misc_RNA (1)...(19): siRNA sense strand
gcagcuggaugacuacaau

SEQ ID NO: 167071 - RNA, 19 nt, Homo sapiens
  misc_RNA (1)...(19): siRNA sense strand
ggaaaccccuuacucauug

SEQ ID NO: 167072 - RNA, 19 nt, Homo sapiens
  misc_RNA (1)...(19): siRNA sense strand
gccaagaguuugaacacuu

SEQ ID NO: 167073 - RNA, 19 nt, Homo sapiens
  misc_RNA (1)...(19): siRNA sense strand
aaucaaaguucagucagua

SEQ ID NO: 167074 - RNA, 19 nt, Homo sapiens
  misc_RNA (1)...(19): siRNA sense strand
gaaucaaaguucagucagu

SEQ ID NO: 167075 - RNA, 19 nt, Homo sapiens
  misc_RNA (1)...(19): siRNA sense strand
gagauaagcuggccuucac

SEQ ID NO: 167076 - RNA, 19 nt, Homo sapiens
  misc_RNA (1)...(19): siRNA sense strand
gaacuaaagauguggagau

SEQ ID NO: 167077 - RNA, 19 nt, Homo sapiens
  misc_RNA (1)...(19): siRNA sense strand
ccacugaccgaauuuauga

SEQ ID NO: 167078 - RNA, 19 nt, Homo sapiens
  misc_RNA (1)...(19): siRNA sense strand
ugaacgggcugguacagaa

SEQ ID NO: 167079 - RNA, 19 nt, Homo sapiens
  misc_RNA (1)...(19): siRNA sense strand
uaaccucagccaugauuua

SEQ ID NO: 167080 - RNA, 19 nt, Homo sapiens
  misc_RNA (1)...(19): siRNA sense strand
gacaacaccucgucuaacu

SEQ ID NO: 167081 - RNA, 19 nt, Homo sapiens
  misc_RNA (1)...(19): siRNA sense strand
gcacgugaaugaaaucaac

SEQ ID NO: 167082 - RNA, 19 nt, Homo sapiens
  misc_RNA (1)...(19): siRNA sense strand
aaaagugucuggaugguua

SEQ ID NO: 167083 - RNA, 19 nt, Homo sapiens
  misc_RNA (1)...(19): siRNA sense strand
cagaucaguuuauccugua

SEQ ID NO: 167084 - RNA, 19 nt, Homo sapiens
  misc_RNA (1)...(19): siRNA sense strand
ggagaaugcuuggaagaag

SEQ ID NO: 167085 - RNA, 19 nt, Homo sapiens
  misc_RNA (1)...(19): siRNA sense strand
ggcaugaucuucuaugucu

SEQ ID NO: 167086 - RNA, 19 nt, Homo sapiens
  misc_RNA (1)...(19): siRNA sense strand
gcacgccuaucaauaugga

SEQ ID NO: 167087 - RNA, 19 nt, Homo sapiens
  misc_RNA (1)...(19): siRNA sense strand
cuaaagcaagucagaauaa

SEQ ID NO: 167088 - RNA, 19 nt, Homo sapiens
  misc_RNA (1)...(19): siRNA sense strand
guaagaauccuaccaaagg

SEQ ID NO: 167089 - RNA, 19 nt, Homo sapiens
  misc_RNA (1)...(19): siRNA sense strand
aaaguucagucaguagaua

SEQ ID NO: 167090 - RNA, 19 nt, Homo sapiens
  misc_RNA (1)...(19): siRNA sense strand
guaaagggaaucaaaguuc

SEQ ID NO: 167091 - RNA, 19 nt, Homo sapiens
  misc_RNA (1)...(19): siRNA sense strand
guauaugggucuugcaauc

SEQ ID NO: 167092 - RNA, 19 nt, Homo sapiens
  misc_RNA (1)...(19): siRNA sense strand
uccaagagaucaacaacaa

SEQ ID NO: 167093 - RNA, 19 nt, Homo sapiens
  misc_RNA (1)...(19): siRNA sense strand
ccgcuugguuuacauguuu

SEQ ID NO: 167094 - RNA, 19 nt, Homo sapiens
  misc_RNA (1)...(19): siRNA sense strand
gaacagacacaagcaagug

SEQ ID NO: 167095 - RNA, 19 nt, Homo sapiens
  misc_RNA (1)...(19): siRNA sense strand
gaaggcaugucaagagcau

SEQ ID NO: 167096 - RNA, 19 nt, Homo sapiens
  misc_RNA (1)...(19): siRNA sense strand
ucacagaaucuucaacauu

SEQ ID NO: 167097 - RNA, 19 nt, Homo sapiens
  misc_RNA (1)...(19): siRNA sense strand
acaagaugcucuauuaugg

SEQ ID NO: 167098 - RNA, 19 nt, Homo sapiens
  misc_RNA (1)...(19): siRNA sense strand
caagagaucaacaacaaga

SEQ ID NO: 167099 - RNA, 19 nt, Homo sapiens
  misc_RNA (1)...(19): siRNA sense strand
ugacguagaggaauuaguu

SEQ ID NO: 167100 - RNA, 19 nt, Homo sapiens
  misc_RNA (1)...(19): siRNA sense strand
gccuggaacuggccacuuu

SEQ ID NO: 167101 - RNA, 19 nt, Homo sapiens
  misc_RNA (1)...(19): siRNA sense strand
ccaacaaucuaaccaacug

SEQ ID NO: 167102 - RNA, 19 nt, Homo sapiens
  misc_RNA (1)...(19): siRNA sense strand
gggaagagcaugaacuuag

SEQ ID NO: 167103 - RNA, 19 nt, Homo sapiens
  misc_RNA (1)...(19): siRNA sense strand
gaaagugugucuguaauua

SEQ ID NO: 167104 - RNA, 19 nt, Homo sapiens
  misc_RNA (1)...(19): siRNA sense strand
gcucaaagauuuagaaaga

SEQ ID NO: 167105 - RNA, 19 nt, Homo sapiens
  misc_RNA (1)...(19): siRNA sense strand
gaaauuaucugacacaacu

SEQ ID NO: 167106 - RNA, 19 nt, Homo sapiens
  misc_RNA (1)...(19): siRNA sense strand
gaacuugacagaagauaua

SEQ ID NO: 167107 - RNA, 19 nt, Homo sapiens
  misc_RNA (1)...(19): siRNA sense strand
gaaagaacuugcugaacaa

SEQ ID NO: 167108 - RNA, 19 nt, Homo sapiens
  misc_RNA (1)...(19): siRNA sense strand
gaagacaaaugcuaccaaa

SEQ ID NO: 167109 - RNA, 19 nt, Homo sapiens
  misc_RNA (1)...(19): siRNA sense strand
gagauaaccuucuggauuc

SEQ ID NO: 167110 - RNA, 19 nt, Homo sapiens
  misc_RNA (1)...(19): siRNA sense strand
ggaaauugcuucugcuaug

SEQ ID NO: 167111 - RNA, 19 nt, Homo sapiens
  misc_RNA (1)...(19): siRNA sense strand
gagcugagauguuguuaga

SEQ ID NO: 167112 - RNA, 19 nt, Homo sapiens
  misc_RNA (1)...(19): siRNA sense strand
cagagaaacugauuaaaga

SEQ ID NO: 167113 - RNA, 19 nt, Homo sapiens
  misc_RNA (1)...(19): siRNA sense strand
gcagaaacaucaucuuuag

SEQ ID NO: 167114 - RNA, 19 nt, Homo sapiens
  misc_RNA (1)...(19): siRNA sense strand
ggaagaaccugcaacagau

SEQ ID NO: 167115 - RNA, 19 nt, Homo sapiens
  misc_RNA (1)...(19): siRNA sense strand
gaagugaaauuaucugaca

SEQ ID NO: 167116 - RNA, 19 nt, Homo sapiens
  misc_RNA (1)...(19): siRNA sense strand
gaagauccauuugguugua

SEQ ID NO: 167117 - RNA, 19 nt, Homo sapiens
  misc_RNA (1)...(19): siRNA sense strand
uaacuucgauugagucuga

SEQ ID NO: 167118 - RNA, 19 nt, Homo sapiens
  misc_RNA (1)...(19): siRNA sense strand
ccaagauccuguuacuuua

SEQ ID NO: 167119 - RNA, 19 nt, Homo sapiens
  misc_RNA (1)...(19): siRNA sense strand
ggugauauuucgugcuuua

SEQ ID NO: 167120 - RNA, 19 nt, Homo sapiens
  misc_RNA (1)...(19): siRNA sense strand
guaaaucacuggacaucuu

SEQ ID NO: 167121 - RNA, 19 nt, Homo sapiens
  misc_RNA (1)...(19): siRNA sense strand
ggagauaaccuucuggauu

SEQ ID NO: 167122 - RNA, 19 nt, Homo sapiens
  misc_RNA (1)...(19): siRNA sense strand
ugaaagaacuugcugaaca

SEQ ID NO: 167123 - RNA, 19 nt, Homo sapiens
  misc_RNA (1)...(19): siRNA sense strand
gcauagugcugcugacauu

SEQ ID NO: 167124 - RNA, 19 nt, Homo sapiens
  misc_RNA (1)...(19): siRNA sense strand
gauauaagccagaaaguug

SEQ ID NO: 167125 - RNA, 19 nt, Homo sapiens
  misc_RNA (1)...(19): siRNA sense strand
gaacuggauucucuacaga

SEQ ID NO: 167126 - RNA, 19 nt, Homo sapiens
  misc_RNA (1)...(19): siRNA sense strand
uagcauuucugcccuguua

SEQ ID NO: 167127 - RNA, 19 nt, Homo sapiens
  misc_RNA (1)...(19): siRNA sense strand
uaaagucacugcagauaug

SEQ ID NO: 167128 - RNA, 19 nt, Homo sapiens
  misc_RNA (1)...(19): siRNA sense strand
gcccaaggauacagaauuu

SEQ ID NO: 167129 - RNA, 19 nt, Homo sapiens
  misc_RNA (1)...(19): siRNA sense strand
ccagaaaguugcuguguau

SEQ ID NO: 167130 - RNA, 19 nt, Homo sapiens
  misc_RNA (1)...(19): siRNA sense strand
ccaaaccgccuuaagauuu

SEQ ID NO: 167131 - RNA, 19 nt, Homo sapiens
  misc_RNA (1)...(19): siRNA sense strand
acaaagugcugaagacauu

SEQ ID NO: 167132 - RNA, 19 nt, Homo sapiens
  misc_RNA (1)...(19): siRNA sense strand
gguuggagcugccucagua

SEQ ID NO: 167133 - RNA, 19 nt, Homo sapiens
  misc_RNA (1)...(19): siRNA sense strand
gaagcaaagugcagaagau

SEQ ID NO: 167134 - RNA, 19 nt, Homo sapiens
  misc_RNA (1)...(19): siRNA sense strand
ggacagcauugaagcaguu

SEQ ID NO: 167135 - RNA, 19 nt, Homo sapiens
  misc_RNA (1)...(19): siRNA sense strand
gacaaaugcuaccaaagaa

SEQ ID NO: 167136 - RNA, 19 nt, Homo sapiens
  misc_RNA (1)...(19): siRNA sense strand
gaaaggugcuuggcugguu

SEQ ID NO: 167137 - RNA, 19 nt, Homo sapiens
  misc_RNA (1)...(19): siRNA sense strand
gcaaugaggagcugagaaa

SEQ ID NO: 167138 - RNA, 19 nt, Homo sapiens
  misc_RNA (1)...(19): siRNA sense strand
gaaguccguucacuccuaa

SEQ ID NO: 167139 - RNA, 19 nt, Homo sapiens
  misc_RNA (1)...(19): siRNA sense strand
aaaggaagcucuggaagaa

SEQ ID NO: 167140 - RNA, 19 nt, Homo sapiens
  misc_RNA (1)...(19): siRNA sense strand
gcagcgaccuggaaggauu

SEQ ID NO: 167141 - RNA, 19 nt, Homo sapiens
  misc_RNA (1)...(19): siRNA sense strand
gaagauaaagcucaagaau

SEQ ID NO: 167142 - RNA, 19 nt, Homo sapiens
  misc_RNA (1)...(19): siRNA sense strand
cauaaugacuuucaagaca

SEQ ID NO: 167143 - RNA, 19 nt, Homo sapiens
  misc_RNA (1)...(19): siRNA sense strand
aaugauggcucaaguagaa

SEQ ID NO: 167144 - RNA, 19 nt, Homo sapiens
  misc_RNA (1)...(19): siRNA sense strand
ggucagugcuugugucuuc

SEQ ID NO: 167145 - RNA, 19 nt, Homo sapiens
  misc_RNA (1)...(19): siRNA sense strand
ugacagauguuugcagaaa

SEQ ID NO: 167146 - RNA, 19 nt, Homo sapiens
  misc_RNA (1)...(19): siRNA sense strand
ggauuucuaccaugauuua

SEQ ID NO: 167147 - RNA, 19 nt, Homo sapiens
  misc_RNA (1)...(19): siRNA sense strand
gcaauucccaagauccuua

SEQ ID NO: 167148 - RNA, 19 nt, Homo sapiens
  misc_RNA (1)...(19): siRNA sense strand
gugcuuggcugguuacuau

SEQ ID NO: 167149 - RNA, 19 nt, Homo sapiens
  misc_RNA (1)...(19): siRNA sense strand
caguacaccuccucugaua

SEQ ID NO: 167150 - RNA, 19 nt, Homo sapiens
  misc_RNA (1)...(19): siRNA sense strand
acaagcagaugaagacauu

SEQ ID NO: 167151 - RNA, 19 nt, Homo sapiens
  misc_RNA (1)...(19): siRNA sense strand
gaacaacuggaauuuauca

SEQ ID NO: 167152 - RNA, 19 nt, Homo sapiens
  misc_RNA (1)...(19): siRNA sense strand
gcagagaaacugauuaaag

SEQ ID NO: 167153 - RNA, 19 nt, Homo sapiens
  misc_RNA (1)...(19): siRNA sense strand
agacaggccuggcuuguga

SEQ ID NO: 167154 - RNA, 19 nt, Homo sapiens
  misc_RNA (1)...(19): siRNA sense strand
gcugaucgauucucuuguu

SEQ ID NO: 167155 - RNA, 19 nt, Homo sapiens
  misc_RNA (1)...(19): siRNA sense strand
gaagcagaauuccauuuua

SEQ ID NO: 167156 - RNA, 19 nt, Homo sapiens
  misc_RNA (1)...(19): siRNA sense strand
uuacagaacuugacagaag

SEQ ID NO: 167157 - RNA, 19 nt, Homo sapiens
  misc_RNA (1)...(19): siRNA sense strand
gaaaugauggcucaaguag

SEQ ID NO: 167158 - RNA, 19 nt, Homo sapiens
  misc_RNA (1)...(19): siRNA sense strand
gcagaaagccauggacuug

SEQ ID NO: 167159 - RNA, 19 nt, Homo sapiens
  misc_RNA (1)...(19): siRNA sense strand
gaaaugaccuguggaacac

SEQ ID NO: 167160 - RNA, 19 nt, Homo sapiens
  misc_RNA (1)...(19): siRNA sense strand
caacagcacagccaaagaa

SEQ ID NO: 167161 - RNA, 19 nt, Homo sapiens
  misc_RNA (1)...(19): siRNA sense strand
gcagugugaucggugcuua

SEQ ID NO: 167162 - RNA, 19 nt, Homo sapiens
  misc_RNA (1)...(19): siRNA sense strand
gcaaagugcagaagauguu

SEQ ID NO: 167163 - RNA, 19 nt, Homo sapiens
  misc_RNA (1)...(19): siRNA sense strand
cagcagagaaggcaauuaa

SEQ ID NO: 167164 - RNA, 19 nt, Homo sapiens
  misc_RNA (1)...(19): siRNA sense strand
ugagaaaucuaaucaagca

SEQ ID NO: 167165 - RNA, 19 nt, Homo sapiens
  misc_RNA (1)...(19): siRNA sense strand
agacaacacugugaaagaa

SEQ ID NO: 167166 - RNA, 19 nt, Homo sapiens
  misc_RNA (1)...(19): siRNA sense strand
ggucauaacugugaaaggu

SEQ ID NO: 167167 - RNA, 19 nt, Homo sapiens
  misc_RNA (1)...(19): siRNA sense strand
ugacagccaucucauugaa

SEQ ID NO: 167168 - RNA, 19 nt, Homo sapiens
  misc_RNA (1)...(19): siRNA sense strand
uaagaagacuuuagauggu

SEQ ID NO: 167169 - RNA, 19 nt, Homo sapiens
  misc_RNA (1)...(19): siRNA sense strand
gacagaagauauacgugaa

SEQ ID NO: 167170 - RNA, 19 nt, Homo sapiens
  misc_RNA (1)...(19): siRNA sense strand
gaggugauauuucgugcuu

SEQ ID NO: 167171 - RNA, 19 nt, Homo sapiens
  misc_RNA (1)...(19): siRNA sense strand
gcugagaaaucuaaucaag

SEQ ID NO: 167172 - RNA, 19 nt, Homo sapiens
  misc_RNA (1)...(19): siRNA sense strand
gcagucagcccucaugaga

SEQ ID NO: 167173 - RNA, 19 nt, Homo sapiens
  misc_RNA (1)...(19): siRNA sense strand
gaggaaagucagcgagaua

SEQ ID NO: 167174 - RNA, 19 nt, Homo sapiens
  misc_RNA (1)...(19): siRNA sense strand
gagaaucaaguuugugaaa

SEQ ID NO: 167175 - RNA, 19 nt, Homo sapiens
  misc_RNA (1)...(19): siRNA sense strand
gaagacauucuguugaaga

SEQ ID NO: 167176 - RNA, 19 nt, Homo sapiens
  misc_RNA (1)...(19): siRNA sense strand
aaacaccgaugacagaugu

SEQ ID NO: 167177 - RNA, 19 nt, Homo sapiens
  misc_RNA (1)...(19): siRNA sense strand
ucaccaggcucaagauaug

SEQ ID NO: 167178 - RNA, 19 nt, Homo sapiens
  misc_RNA (1)...(19): siRNA sense strand
ggaguacgacauccuaauu

SEQ ID NO: 167179 - RNA, 19 nt, Homo sapiens
  misc_RNA (1)...(19): siRNA sense strand
cauccgagauccuaauuuc

SEQ ID NO: 167180 - RNA, 19 nt, Homo sapiens
  misc_RNA (1)...(19): siRNA sense strand
gccagaaaguugcugugua

SEQ ID NO: 167181 - RNA, 19 nt, Homo sapiens
  misc_RNA (1)...(19): siRNA sense strand
gacuuuagauggugaacuu

SEQ ID NO: 167182 - RNA, 19 nt, Homo sapiens
  misc_RNA (1)...(19): siRNA sense strand
cugaacaacuggaauuuau

SEQ ID NO: 167183 - RNA, 19 nt, Homo sapiens
  misc_RNA (1)...(19): siRNA sense strand
gcaggacugucgaaagugu

SEQ ID NO: 167184 - RNA, 19 nt, Homo sapiens
  misc_RNA (1)...(19): siRNA sense strand
gaaauugcuucugcuaugg

SEQ ID NO: 167185 - RNA, 19 nt, Homo sapiens
  misc_RNA (1)...(19): siRNA sense strand
gcugagauguuguuagaag

SEQ ID NO: 167186 - RNA, 19 nt, Homo sapiens
  misc_RNA (1)...(19): siRNA sense strand
cagugucgguguaaauuaa

SEQ ID NO: 167187 - RNA, 19 nt, Homo sapiens
  misc_RNA (1)...(19): siRNA sense strand
caacaggacacacagauuc

SEQ ID NO: 167188 - RNA, 19 nt, Homo sapiens
  misc_RNA (1)...(19): siRNA sense strand
agacaaaugcuaccaaaga

SEQ ID NO: 167189 - RNA, 19 nt, Homo sapiens
  misc_RNA (1)...(19): siRNA sense strand
gauauuucgugcuuuagau

SEQ ID NO: 167190 - RNA, 19 nt, Homo sapiens
  misc_RNA (1)...(19): siRNA sense strand
cugcagaacugacgaagga

SEQ ID NO: 167191 - RNA, 19 nt, Homo sapiens
  misc_RNA (1)...(19): siRNA sense strand
uagaagacgugaugaugga

SEQ ID NO: 167192 - RNA, 19 nt, Homo sapiens
  misc_RNA (1)...(19): siRNA sense strand
uggauagcauuaccaagua

SEQ ID NO: 167193 - RNA, 19 nt, Homo sapiens
  misc_RNA (1)...(19): siRNA sense strand
gcaauccucugggaacaau

SEQ ID NO: 167194 - RNA, 19 nt, Homo sapiens
  misc_RNA (1)...(19): siRNA sense strand
ugugacagcuauacugauu

SEQ ID NO: 167195 - RNA, 19 nt, Homo sapiens
  misc_RNA (1)...(19): siRNA sense strand
uaaaggauauaagccagaa

SEQ ID NO: 167196 - RNA, 19 nt, Homo sapiens
  misc_RNA (1)...(19): siRNA sense strand
cagaagauguuaagaagac

SEQ ID NO: 167197 - RNA, 19 nt, Homo sapiens
  misc_RNA (1)...(19): siRNA sense strand
gagcugagaaaucuaauca

SEQ ID NO: 167198 - RNA, 19 nt, Homo sapiens
  misc_RNA (1)...(19): siRNA sense strand
gagaaucccaguucaagga

SEQ ID NO: 167199 - RNA, 19 nt, Homo sapiens
  misc_RNA (1)...(19): siRNA sense strand
gaagcagagaaacugauua

SEQ ID NO: 167200 - RNA, 19 nt, Homo sapiens
  misc_RNA (1)...(19): siRNA sense strand
gcaauggccacgccgauga

SEQ ID NO: 167201 - RNA, 19 nt, Homo sapiens
  misc_RNA (1)...(19): siRNA sense strand
gcaacugcucaaagauuua

SEQ ID NO: 167202 - RNA, 19 nt, Homo sapiens
  misc_RNA (1)...(19): siRNA sense strand
gaaaguugcuguguauagc

SEQ ID NO: 167203 - RNA, 19 nt, Homo sapiens
  misc_RNA (1)...(19): siRNA sense strand
gcaagcagguguugaguua

SEQ ID NO: 167204 - RNA, 19 nt, Homo sapiens
  misc_RNA (1)...(19): siRNA sense strand
uuacagaucuggauaauga

SEQ ID NO: 167205 - RNA, 19 nt, Homo sapiens
  misc_RNA (1)...(19): siRNA sense strand
gagaagugcuggauauuug

SEQ ID NO: 167206 - RNA, 19 nt, Homo sapiens
  misc_RNA (1)...(19): siRNA sense strand
caaauuagccguuuacaga

SEQ ID NO: 167207 - RNA, 19 nt, Homo sapiens
  misc_RNA (1)...(19): siRNA sense strand
ucaacaaccugaaagauuu

SEQ ID NO: 167208 - RNA, 19 nt, Homo sapiens
  misc_RNA (1)...(19): siRNA sense strand
gcaaagacagccaaugaua

SEQ ID NO: 167209 - RNA, 19 nt, Homo sapiens
  misc_RNA (1)...(19): siRNA sense strand
gagugaagcuccaggaauu

SEQ ID NO: 167210 - RNA, 19 nt, Homo sapiens
  misc_RNA (1)...(19): siRNA sense strand
gaagauguguuugcaaaga

SEQ ID NO: 167211 - RNA, 19 nt, Homo sapiens
  misc_RNA (1)...(19): siRNA sense strand
gaugugagcucugugauga

SEQ ID NO: 167212 - RNA, 19 nt, Homo sapiens
  misc_RNA (1)...(19): siRNA sense strand
gaucaagccuucgaggaua

SEQ ID NO: 167213 - RNA, 19 nt, Homo sapiens
  misc_RNA (1)...(19): siRNA sense strand
ggagcuggcuuaagaguau

SEQ ID NO: 167214 - RNA, 19 nt, Homo sapiens
  misc_RNA (1)...(19): siRNA sense strand
ugagggagcuggcuuaaga

SEQ ID NO: 167215 - RNA, 19 nt, Homo sapiens
  misc_RNA (1)...(19): siRNA sense strand
acaggaagcugaugacauu

SEQ ID NO: 167216 - RNA, 19 nt, Homo sapiens
  misc_RNA (1)...(19): siRNA sense strand
ugaagaagcugcaaagaag

SEQ ID NO: 167217 - RNA, 19 nt, Homo sapiens
  misc_RNA (1)...(19): siRNA sense strand
gagaugaaguguuuaacga

SEQ ID NO: 167218 - RNA, 19 nt, Homo sapiens
  misc_RNA (1)...(19): siRNA sense strand
cagcauagaugaauguaau

SEQ ID NO: 167219 - RNA, 19 nt, Homo sapiens
  misc_RNA (1)...(19): siRNA sense strand
ccaaaguucucaaguccua

SEQ ID NO: 167220 - RNA, 19 nt, Homo sapiens
  misc_RNA (1)...(19): siRNA sense strand
gcaaagaagggacgggaua

SEQ ID NO: 167221 - RNA, 19 nt, Homo sapiens
  misc_RNA (1)...(19): siRNA sense strand
ugaagagacuggaaacuug

SEQ ID NO: 167222 - RNA, 19 nt, Homo sapiens
  misc_RNA (1)...(19): siRNA sense strand
gggaugagauggugacaga

SEQ ID NO: 167223 - RNA, 19 nt, Homo sapiens
  misc_RNA (1)...(19): siRNA sense strand
gaagagaaacuccuaaucu

SEQ ID NO: 167224 - RNA, 19 nt, Homo sapiens
  misc_RNA (1)...(19): siRNA sense strand
uugauaagcugguguguaa

SEQ ID NO: 167225 - RNA, 19 nt, Homo sapiens
  misc_RNA (1)...(19): siRNA sense strand
uaacacugcuggcuucuau

SEQ ID NO: 167226 - RNA, 19 nt, Homo sapiens
  misc_RNA (1)...(19): siRNA sense strand
aaacaaagccaaagaugaa

SEQ ID NO: 167227 - RNA, 19 nt, Homo sapiens
  misc_RNA (1)...(19): siRNA sense strand
gaaccucuccuucuccuuu

SEQ ID NO: 167228 - RNA, 19 nt, Homo sapiens
  misc_RNA (1)...(19): siRNA sense strand
ugaauaagcuaaacgagau

SEQ ID NO: 167229 - RNA, 19 nt, Homo sapiens
  misc_RNA (1)...(19): siRNA sense strand
gauaaugaggugaacaaua

SEQ ID NO: 167230 - RNA, 19 nt, Homo sapiens
  misc_RNA (1)...(19): siRNA sense strand
uugaagagcuuaauaggaa

SEQ ID NO: 167231 - RNA, 19 nt, Homo sapiens
  misc_RNA (1)...(19): siRNA sense strand
gguggcagauguaaaugua

SEQ ID NO: 167232 - RNA, 19 nt, Homo sapiens
  misc_RNA (1)...(19): siRNA sense strand
cuaaacaacuugaccucua

SEQ ID NO: 167233 - RNA, 19 nt, Homo sapiens
  misc_RNA (1)...(19): siRNA sense strand
gccuauaacuuugacaaua

SEQ ID NO: 167234 - RNA, 19 nt, Homo sapiens
  misc_RNA (1)...(19): siRNA sense strand
ugucugaccuggagaauga

SEQ ID NO: 167235 - RNA, 19 nt, Homo sapiens
  misc_RNA (1)...(19): siRNA sense strand
ugacaaagcuguggagauc

SEQ ID NO: 167236 - RNA, 19 nt, Homo sapiens
  misc_RNA (1)...(19): siRNA sense strand
aaacagcauuugagauuga

SEQ ID NO: 167237 - RNA, 19 nt, Homo sapiens
  misc_RNA (1)...(19): siRNA sense strand
ccaaacaacaugacucuuu

SEQ ID NO: 167238 - RNA, 19 nt, Homo sapiens
  misc_RNA (1)...(19): siRNA sense strand
ccgaagaccuugugcuuga

SEQ ID NO: 167239 - RNA, 19 nt, Homo sapiens
  misc_RNA (1)...(19): siRNA sense strand
gcaggcaccuccuccgauu

SEQ ID NO: 167240 - RNA, 19 nt, Homo sapiens
  misc_RNA (1)...(19): siRNA sense strand
ugagagaagugcuggauau

SEQ ID NO: 167241 - RNA, 19 nt, Homo sapiens
  misc_RNA (1)...(19): siRNA sense strand
ccggagagcuuugccauuu

SEQ ID NO: 167242 - RNA, 19 nt, Homo sapiens
  misc_RNA (1)...(19): siRNA sense strand
gugaaugccugcccuguga

SEQ ID NO: 167243 - RNA, 19 nt, Homo sapiens
  misc_RNA (1)...(19): siRNA sense strand
uaagguugcugaucauaga

SEQ ID NO: 167244 - RNA, 19 nt, Homo sapiens
  misc_RNA (1)...(19): siRNA sense strand
gcccagcgccuauaacuuu

SEQ ID NO: 167245 - RNA, 19 nt, Homo sapiens
  misc_RNA (1)...(19): siRNA sense strand
acagagcgguugauugaaa

SEQ ID NO: 167246 - RNA, 19 nt, Homo sapiens
  misc_RNA (1)...(19): siRNA sense strand
gcaagcgaguguaugaaga

SEQ ID NO: 167247 - RNA, 19 nt, Homo sapiens
  misc_RNA (1)...(19): siRNA sense strand
gagaaggcuuugugggaaa

SEQ ID NO: 167248 - RNA, 19 nt, Homo sapiens
  misc_RNA (1)...(19): siRNA sense strand
gaaguuacagaucuggaua

SEQ ID NO: 167249 - RNA, 19 nt, Homo sapiens
  misc_RNA (1)...(19): siRNA sense strand
ccacagaggccaagaacaa

SEQ ID NO: 167250 - RNA, 19 nt, Homo sapiens
  misc_RNA (1)...(19): siRNA sense strand
gaagauuccugccaucaac

SEQ ID NO: 167251 - RNA, 19 nt, Homo sapiens
  misc_RNA (1)...(19): siRNA sense strand
gcauacaaccugcuucuga

SEQ ID NO: 167252 - RNA, 19 nt, Homo sapiens
  misc_RNA (1)...(19): siRNA sense strand
acacagagcgguugauuga

SEQ ID NO: 167253 - RNA, 19 nt, Homo sapiens
  misc_RNA (1)...(19): siRNA sense strand
gaacacagagcgguugauu

SEQ ID NO: 167254 - RNA, 19 nt, Homo sapiens
  misc_RNA (1)...(19): siRNA sense strand
gauaagcugguguguaauu

SEQ ID NO: 167255 - RNA, 19 nt, Homo sapiens
  misc_RNA (1)...(19): siRNA sense strand
gaccaucacugaagccaau

SEQ ID NO: 167256 - RNA, 19 nt, Homo sapiens
  misc_RNA (1)...(19): siRNA sense strand
ggaagcugaugacauuguu

SEQ ID NO: 167257 - RNA, 19 nt, Homo sapiens
  misc_RNA (1)...(19): siRNA sense strand
ccagagaacuugagaaagc

SEQ ID NO: 167258 - RNA, 19 nt, Homo sapiens
  misc_RNA (1)...(19): siRNA sense strand
uaaacaacuugaccucuau

SEQ ID NO: 167259 - RNA, 19 nt, Homo sapiens
  misc_RNA (1)...(19): siRNA sense strand
ccaaggcccucgcugaaga

SEQ ID NO: 167260 - RNA, 19 nt, Homo sapiens
  misc_RNA (1)...(19): siRNA sense strand
uuaaucgccugaacacuuu

SEQ ID NO: 167261 - RNA, 19 nt, Homo sapiens
  misc_RNA (1)...(19): siRNA sense strand
ccaaugauacgucaacuga

SEQ ID NO: 167262 - RNA, 19 nt, Homo sapiens
  misc_RNA (1)...(19): siRNA sense strand
ugagggaucucuuucacuu

SEQ ID NO: 167263 - RNA, 19 nt, Homo sapiens
  misc_RNA (1)...(19): siRNA sense strand
gcaccuguccugugggaua

SEQ ID NO: 167264 - RNA, 19 nt, Homo sapiens
  misc_RNA (1)...(19): siRNA sense strand
gaagaacgaauuugauaag

SEQ ID NO: 167265 - RNA, 19 nt, Homo sapiens
  misc_RNA (1)...(19): siRNA sense strand
gaucucagacagcuacuuu

SEQ ID NO: 167266 - RNA, 19 nt, Homo sapiens
  misc_RNA (1)...(19): siRNA sense strand
acaaagcuguggagaucua

SEQ ID NO: 167267 - RNA, 19 nt, Homo sapiens
  misc_RNA (1)...(19): siRNA sense strand
guucucaaguccuauuauu

SEQ ID NO: 167268 - RNA, 19 nt, Homo sapiens
  misc_RNA (1)...(19): siRNA sense strand
ucagcgaucuugauaggaa

SEQ ID NO: 167269 - RNA, 19 nt, Homo sapiens
  misc_RNA (1)...(19): siRNA sense strand
gagauugaagagcuuaaua

SEQ ID NO: 167270 - RNA, 19 nt, Homo sapiens
  misc_RNA (1)...(19): siRNA sense strand
agaagaggcucgaaagcuu

SEQ ID NO: 167271 - RNA, 19 nt, Homo sapiens
  misc_RNA (1)...(19): siRNA sense strand
gcuacaguguuuauucuau

SEQ ID NO: 167272 - RNA, 19 nt, Homo sapiens
  misc_RNA (1)...(19): siRNA sense strand
uaaacaaagccaaagauga

SEQ ID NO: 167273 - RNA, 19 nt, Homo sapiens
  misc_RNA (1)...(19): siRNA sense strand
gauggaagcugagaaucug

SEQ ID NO: 167274 - RNA, 19 nt, Homo sapiens
  misc_RNA (1)...(19): siRNA sense strand
uaacacauauggaguagac

SEQ ID NO: 167275 - RNA, 19 nt, Homo sapiens
  misc_RNA (1)...(19): siRNA sense strand
ggcagaagcugaaagaacu

SEQ ID NO: 167276 - RNA, 19 nt, Homo sapiens
  misc_RNA (1)...(19): siRNA sense strand
caaagauguugaccagaau

SEQ ID NO: 167277 - RNA, 19 nt, Homo sapiens
  misc_RNA (1)...(19): siRNA sense strand
gcugugaggucaaccacuu

SEQ ID NO: 167278 - RNA, 19 nt, Homo sapiens
  misc_RNA (1)...(19): siRNA sense strand
agaugugccucucagguua

SEQ ID NO: 167279 - RNA, 19 nt, Homo sapiens
  misc_RNA (1)...(19): siRNA sense strand
guuuaacgaucccaaaguu

SEQ ID NO: 167280 - RNA, 19 nt, Homo sapiens
  misc_RNA (1)...(19): siRNA sense strand
gaaggcacccuaaacaaag

SEQ ID NO: 167281 - RNA, 19 nt, Homo sapiens
  misc_RNA (1)...(19): siRNA sense strand
ugaaaucgcauccagagaa

SEQ ID NO: 167282 - RNA, 19 nt, Homo sapiens
  misc_RNA (1)...(19): siRNA sense strand
ggaaauugcaaucgcuuga

SEQ ID NO: 167283 - RNA, 19 nt, Homo sapiens
  misc_RNA (1)...(19): siRNA sense strand
cggagagcuuugccauuua

SEQ ID NO: 167284 - RNA, 19 nt, Homo sapiens
  misc_RNA (1)...(19): siRNA sense strand
cugagacacuggagaauga

SEQ ID NO: 167285 - RNA, 19 nt, Homo sapiens
  misc_RNA (1)...(19): siRNA sense strand
aaaacaagcugcccgagua

SEQ ID NO: 167286 - RNA, 19 nt, Homo sapiens
  misc_RNA (1)...(19): siRNA sense strand
cagcaggccuuguguacug

SEQ ID NO: 167287 - RNA, 19 nt, Homo sapiens
  misc_RNA (1)...(19): siRNA sense strand
gaaaucgcauccagagaac

SEQ ID NO: 167288 - RNA, 19 nt, Homo sapiens
  misc_RNA (1)...(19): siRNA sense strand
ggacauacagugagagaag

SEQ ID NO: 167289 - RNA, 19 nt, Homo sapiens
  misc_RNA (1)...(19): siRNA sense strand
guguguaauugcaaacaua

SEQ ID NO: 167290 - RNA, 19 nt, Homo sapiens
  misc_RNA (1)...(19): siRNA sense strand
ucgaggagaucaugaagga

SEQ ID NO: 167291 - RNA, 19 nt, Homo sapiens
  misc_RNA (1)...(19): siRNA sense strand
ugaaggcacccuaaacaaa

SEQ ID NO: 167292 - RNA, 19 nt, Homo sapiens
  misc_RNA (1)...(19): siRNA sense strand
ggagagcuuugccauuuac

SEQ ID NO: 167293 - RNA, 19 nt, Homo sapiens
  misc_RNA (1)...(19): siRNA sense strand
aggaagauguguuugcaaa

SEQ ID NO: 167294 - RNA, 19 nt, Homo sapiens
  misc_RNA (1)...(19): siRNA sense strand
ggucagcgaucuugauagg

SEQ ID NO: 167295 - RNA, 19 nt, Homo sapiens
  misc_RNA (1)...(19): siRNA sense strand
caagauacgugggacauac

SEQ ID NO: 167296 - RNA, 19 nt, Homo sapiens
  misc_RNA (1)...(19): siRNA sense strand
guagguggcagauguaaau

SEQ ID NO: 167297 - RNA, 19 nt, Homo sapiens
  misc_RNA (1)...(19): siRNA sense strand
cgggauaccuuacaagaag

SEQ ID NO: 167298 - RNA, 19 nt, Homo sapiens
  misc_RNA (1)...(19): siRNA sense strand
gagaaugaagcaaauaaca

SEQ ID NO: 167299 - RNA, 19 nt, Homo sapiens
  misc_RNA (1)...(19): siRNA sense strand
caaacaacaugacucuuuu

SEQ ID NO: 167300 - RNA, 19 nt, Homo sapiens
  misc_RNA (1)...(19): siRNA sense strand
cuacagagagugaauaaca

SEQ ID NO: 167301 - RNA, 19 nt, Homo sapiens
  misc_RNA (1)...(19): siRNA sense strand
gguagaaacggcccuguga

SEQ ID NO: 167302 - RNA, 19 nt, Homo sapiens
  misc_RNA (1)...(19): siRNA sense strand
guaugaagaacgaauuuga

SEQ ID NO: 167303 - RNA, 19 nt, Homo sapiens
  misc_RNA (1)...(19): siRNA sense strand
caaaugaguuccuguguga

SEQ ID NO: 167304 - RNA, 19 nt, Homo sapiens
  misc_RNA (1)...(19): siRNA sense strand
gcuggaaccuauucaguua

SEQ ID NO: 167305 - RNA, 19 nt, Homo sapiens
  misc_RNA (1)...(19): siRNA sense strand
gaacaucacucaggauaag

SEQ ID NO: 167306 - RNA, 19 nt, Homo sapiens
  misc_RNA (1)...(19): siRNA sense strand
uaagguugcuucaguuauu

SEQ ID NO: 167307 - RNA, 19 nt, Homo sapiens
  misc_RNA (1)...(19): siRNA sense strand
cuacugggauguucuugua

SEQ ID NO: 167308 - RNA, 19 nt, Homo sapiens
  misc_RNA (1)...(19): siRNA sense strand
ggauaagguugcuucaguu

SEQ ID NO: 167309 - RNA, 19 nt, Homo sapiens
  misc_RNA (1)...(19): siRNA sense strand
gcacagugagcacaaauga

SEQ ID NO: 167310 - RNA, 19 nt, Homo sapiens
  misc_RNA (1)...(19): siRNA sense strand
gauaagguugcuucaguua

SEQ ID NO: 167311 - RNA, 19 nt, Homo sapiens
  misc_RNA (1)...(19): siRNA sense strand
caaauaacaaucucagcua

SEQ ID NO: 167312 - RNA, 19 nt, Homo sapiens
  misc_RNA (1)...(19): siRNA sense strand
gcauguauuugguuaaugg

SEQ ID NO: 167313 - RNA, 19 nt, Homo sapiens
  misc_RNA (1)...(19): siRNA sense strand
gcaucuacuuauucaauug

SEQ ID NO: 167314 - RNA, 19 nt, Homo sapiens
  misc_RNA (1)...(19): siRNA sense strand
caacacuggugauaacaca

SEQ ID NO: 167315 - RNA, 19 nt, Homo sapiens
  misc_RNA (1)...(19): siRNA sense strand
cucaauagcagcaccauua

SEQ ID NO: 167316 - RNA, 19 nt, Homo sapiens
  misc_RNA (1)...(19): siRNA sense strand
gauaaaggaauucuuacug

SEQ ID NO: 167317 - RNA, 19 nt, Homo sapiens
  misc_RNA (1)...(19): siRNA sense strand
guucagccuuucaauguga

SEQ ID NO: 167318 - RNA, 19 nt, Homo sapiens
  misc_RNA (1)...(19): siRNA sense strand
ccaaggcagcaucuacuua

SEQ ID NO: 167319 - RNA, 19 nt, Homo sapiens
  misc_RNA (1)...(19): siRNA sense strand
aaagaaugauguuguccaa

SEQ ID NO: 167320 - RNA, 19 nt, Homo sapiens
  misc_RNA (1)...(19): siRNA sense strand
ggugauaacacaacauuuc

SEQ ID NO: 167321 - RNA, 19 nt, Homo sapiens
  misc_RNA (1)...(19): siRNA sense strand
gcauuggaacuuaauuuga

SEQ ID NO: 167322 - RNA, 19 nt, Homo sapiens
  misc_RNA (1)...(19): siRNA sense strand
gcagcaccauuaaguaucu

SEQ ID NO: 167323 - RNA, 19 nt, Homo sapiens
  misc_RNA (1)...(19): siRNA sense strand
gaaaaugccacuugccuuu

SEQ ID NO: 167324 - RNA, 19 nt, Homo sapiens
  misc_RNA (1)...(19): siRNA sense strand
cuacaacacuggugauaac

SEQ ID NO: 167325 - RNA, 19 nt, Homo sapiens
  misc_RNA (1)...(19): siRNA sense strand
acaaagagcagacuguuuc

SEQ ID NO: 167326 - RNA, 19 nt, Homo sapiens
  misc_RNA (1)...(19): siRNA sense strand
cuacaacaccuacuccaaa

SEQ ID NO: 167327 - RNA, 19 nt, Homo sapiens
  misc_RNA (1)...(19): siRNA sense strand
caaggcagcaucuacuuau

SEQ ID NO: 167328 - RNA, 19 nt, Homo sapiens
  misc_RNA (1)...(19): siRNA sense strand
guucuuauaugugcaacaa

SEQ ID NO: 167329 - RNA, 19 nt, Homo sapiens
  misc_RNA (1)...(19): siRNA sense strand
ucagaauggucccaaaaua

SEQ ID NO: 167330 - RNA, 19 nt, Homo sapiens
  misc_RNA (1)...(19): siRNA sense strand
ggcagcaucuacuuauuca

SEQ ID NO: 167331 - RNA, 19 nt, Homo sapiens
  misc_RNA (1)...(19): siRNA sense strand
gcaguucggaccuggcuuu

SEQ ID NO: 167332 - RNA, 19 nt, Homo sapiens
  misc_RNA (1)...(19): siRNA sense strand
uuuccuggauugcgaauuu

SEQ ID NO: 167333 - RNA, 19 nt, Homo sapiens
  misc_RNA (1)...(19): siRNA sense strand
cagcauguauuugguuaau

SEQ ID NO: 167334 - RNA, 19 nt, Homo sapiens
  misc_RNA (1)...(19): siRNA sense strand
caacaccuacuccaaagga

SEQ ID NO: 167335 - RNA, 19 nt, Homo sapiens
  misc_RNA (1)...(19): siRNA sense strand
cuacuuagacucaauagca

SEQ ID NO: 167336 - RNA, 19 nt, Homo sapiens
  misc_RNA (1)...(19): siRNA sense strand
aaaugccacuugccuuuau

SEQ ID NO: 167337 - RNA, 19 nt, Homo sapiens
  misc_RNA (1)...(19): siRNA sense strand
ccugggaaguucuuauaug

SEQ ID NO: 167338 - RNA, 19 nt, Homo sapiens
  misc_RNA (1)...(19): siRNA sense strand
aaggaauucuuacuguuga

SEQ ID NO: 167339 - RNA, 19 nt, Homo sapiens
  misc_RNA (1)...(19): siRNA sense strand
aaaggaauucuuacuguug

SEQ ID NO: 167340 - RNA, 19 nt, Homo sapiens
  misc_RNA (1)...(19): siRNA sense strand
gacuuugucuuugcuguga

SEQ ID NO: 167341 - RNA, 19 nt, Homo sapiens
  misc_RNA (1)...(19): siRNA sense strand
ucaauagcagcaccauuaa

SEQ ID NO: 167342 - RNA, 19 nt, Homo sapiens
  misc_RNA (1)...(19): siRNA sense strand
aagguugcuucaguuauua

SEQ ID NO: 167343 - RNA, 19 nt, Homo sapiens
  misc_RNA (1)...(19): siRNA sense strand
ggaaaagaaugauguuguc

SEQ ID NO: 167344 - RNA, 19 nt, Homo sapiens
  misc_RNA (1)...(19): siRNA sense strand
ucuuaugcauuggaacuua

SEQ ID NO: 167345 - RNA, 19 nt, Homo sapiens
  misc_RNA (1)...(19): siRNA sense strand
gcaacaaagagcagacugu

SEQ ID NO: 167346 - RNA, 19 nt, Homo sapiens
  misc_RNA (1)...(19): siRNA sense strand
uaacacaacauuuccugau

SEQ ID NO: 167347 - RNA, 19 nt, Homo sapiens
  misc_RNA (1)...(19): siRNA sense strand
cagcaucuacuuauucaau

SEQ ID NO: 167348 - RNA, 19 nt, Homo sapiens
  misc_RNA (1)...(19): siRNA sense strand
gcacugugacauauaaugg

SEQ ID NO: 167349 - RNA, 19 nt, Homo sapiens
  misc_RNA (1)...(19): siRNA sense strand
ggguucagccuuucaaugu

SEQ ID NO: 167350 - RNA, 19 nt, Homo sapiens
  misc_RNA (1)...(19): siRNA sense strand
caauugacagcgucucauu

SEQ ID NO: 167351 - RNA, 19 nt, Homo sapiens
  misc_RNA (1)...(19): siRNA sense strand
cugggaaguucuuauaugu

SEQ ID NO: 167352 - RNA, 19 nt, Homo sapiens
  misc_RNA (1)...(19): siRNA sense strand
ugaaggaagugaacaucag

SEQ ID NO: 167353 - RNA, 19 nt, Homo sapiens
  misc_RNA (1)...(19): siRNA sense strand
uagcagcaccauuaaguau

SEQ ID NO: 167354 - RNA, 19 nt, Homo sapiens
  misc_RNA (1)...(19): siRNA sense strand
uaauggcaaugauacuugu

SEQ ID NO: 167355 - RNA, 19 nt, Homo sapiens
  misc_RNA (1)...(19): siRNA sense strand
ccauggcacugugacauau

SEQ ID NO: 167356 - RNA, 19 nt, Homo sapiens
  misc_RNA (1)...(19): siRNA sense strand
gaauucuuacuguugauga

SEQ ID NO: 167357 - RNA, 19 nt, Homo sapiens
  misc_RNA (1)...(19): siRNA sense strand
uucagugucuggagcauuu

SEQ ID NO: 167358 - RNA, 19 nt, Homo sapiens
  misc_RNA (1)...(19): siRNA sense strand
gaaguucuuauaugugcaa

SEQ ID NO: 167359 - RNA, 19 nt, Homo sapiens
  misc_RNA (1)...(19): siRNA sense strand
aggauaagguugcuucagu

SEQ ID NO: 167360 - RNA, 19 nt, Homo sapiens
  misc_RNA (1)...(19): siRNA sense strand
aaugaguuccugugugaua

SEQ ID NO: 167361 - RNA, 19 nt, Homo sapiens
  misc_RNA (1)...(19): siRNA sense strand
ugggagcugugcggucuua

SEQ ID NO: 167362 - RNA, 19 nt, Homo sapiens
  misc_RNA (1)...(19): siRNA sense strand
ggaacuuaauuugacagau

SEQ ID NO: 167363 - RNA, 19 nt, Homo sapiens
  misc_RNA (1)...(19): siRNA sense strand
cauuggaacuuaauuugac

SEQ ID NO: 167364 - RNA, 19 nt, Homo sapiens
  misc_RNA (1)...(19): siRNA sense strand
gcugugcggucuuaugcau

SEQ ID NO: 167365 - RNA, 19 nt, Homo sapiens
  misc_RNA (1)...(19): siRNA sense strand
cuuaugcauuggaacuuaa

SEQ ID NO: 167366 - RNA, 19 nt, Homo sapiens
  misc_RNA (1)...(19): siRNA sense strand
ccaucagaauuccauugaa

SEQ ID NO: 167367 - RNA, 19 nt, Homo sapiens
  misc_RNA (1)...(19): siRNA sense strand
gccaucagaauuccauuga

SEQ ID NO: 167368 - RNA, 19 nt, Homo sapiens
  misc_RNA (1)...(19): siRNA sense strand
caaaauagcagugcaguuc

SEQ ID NO: 167369 - RNA, 19 nt, Homo sapiens
  misc_RNA (1)...(19): siRNA sense strand
gauuuuaucugaaggaagu

SEQ ID NO: 167370 - RNA, 19 nt, Homo sapiens
  misc_RNA (1)...(19): siRNA sense strand
uggaaccuauucaguuaau

SEQ ID NO: 167371 - RNA, 19 nt, Homo sapiens
  misc_RNA (1)...(19): siRNA sense strand
uacaacaccuacuccaaag

SEQ ID NO: 167372 - RNA, 19 nt, Homo sapiens
  misc_RNA (1)...(19): siRNA sense strand
ugugcggucuuaugcauug

SEQ ID NO: 167373 - RNA, 19 nt, Homo sapiens
  misc_RNA (1)...(19): siRNA sense strand
aaacuguaaccauuucaga

SEQ ID NO: 167374 - RNA, 19 nt, Homo sapiens
  misc_RNA (1)...(19): siRNA sense strand
cuggagcauuucagauaaa

SEQ ID NO: 167375 - RNA, 19 nt, Homo sapiens
  misc_RNA (1)...(19): siRNA sense strand
ucuuauaugugcaacaaag

SEQ ID NO: 167376 - RNA, 19 nt, Homo sapiens
  misc_RNA (1)...(19): siRNA sense strand
ucucacacugcucuacuua

SEQ ID NO: 167377 - RNA, 19 nt, Homo sapiens
  misc_RNA (1)...(19): siRNA sense strand
ccugugugauaaagacaaa

SEQ ID NO: 167378 - RNA, 19 nt, Homo sapiens
  misc_RNA (1)...(19): siRNA sense strand
acagugagcacaaaugagu

SEQ ID NO: 167379 - RNA, 19 nt, Homo sapiens
  misc_RNA (1)...(19): siRNA sense strand
aacacaacauuuccugaug

SEQ ID NO: 167380 - RNA, 19 nt, Homo sapiens
  misc_RNA (1)...(19): siRNA sense strand
gguucagccuuucaaugug

SEQ ID NO: 167381 - RNA, 19 nt, Homo sapiens
  misc_RNA (1)...(19): siRNA sense strand
gcaaaauggcagaugaauu

SEQ ID NO: 167382 - RNA, 19 nt, Homo sapiens
  misc_RNA (1)...(19): siRNA sense strand
ugaacaucacucaggauaa

SEQ ID NO: 167383 - RNA, 19 nt, Homo sapiens
  misc_RNA (1)...(19): siRNA sense strand
caaagagcagacuguuuca

SEQ ID NO: 167384 - RNA, 19 nt, Homo sapiens
  misc_RNA (1)...(19): siRNA sense strand
auaacaaucucagcuacug

SEQ ID NO: 167385 - RNA, 19 nt, Homo sapiens
  misc_RNA (1)...(19): siRNA sense strand
ugcugaagauaaaggaauu

SEQ ID NO: 167386 - RNA, 19 nt, Homo sapiens
  misc_RNA (1)...(19): siRNA sense strand
guuaauggcuccguuuuca

SEQ ID NO: 167387 - RNA, 19 nt, Homo sapiens
  misc_RNA (1)...(19): siRNA sense strand
aauagcagcaccauuaagu

SEQ ID NO: 167388 - RNA, 19 nt, Homo sapiens
  misc_RNA (1)...(19): siRNA sense strand
ggagcugugcggucuuaug

SEQ ID NO: 167389 - RNA, 19 nt, Homo sapiens
  misc_RNA (1)...(19): siRNA sense strand
gggcugcagcugaacauca

SEQ ID NO: 167390 - RNA, 19 nt, Homo sapiens
  misc_RNA (1)...(19): siRNA sense strand
acugugccaucuccuacua

SEQ ID NO: 167391 - RNA, 19 nt, Homo sapiens
  misc_RNA (1)...(19): siRNA sense strand
acugugacauauaauggaa

SEQ ID NO: 167392 - RNA, 19 nt, Homo sapiens
  misc_RNA (1)...(19): siRNA sense strand
aaggcagcaucuacuuauu

SEQ ID NO: 167393 - RNA, 19 nt, Homo sapiens
  misc_RNA (1)...(19): siRNA sense strand
gagcugugcggucuuaugc

SEQ ID NO: 167394 - RNA, 19 nt, Homo sapiens
  misc_RNA (1)...(19): siRNA sense strand
ggaauucuuacuguugaug

SEQ ID NO: 167395 - RNA, 19 nt, Homo sapiens
  misc_RNA (1)...(19): siRNA sense strand
ugaucagaauggucccaaa

SEQ ID NO: 167396 - RNA, 19 nt, Homo sapiens
  misc_RNA (1)...(19): siRNA sense strand
gcggucuuaugcauuggaa

SEQ ID NO: 167397 - RNA, 19 nt, Homo sapiens
  misc_RNA (1)...(19): siRNA sense strand
caucagcauguauuugguu

SEQ ID NO: 167398 - RNA, 19 nt, Homo sapiens
  misc_RNA (1)...(19): siRNA sense strand
uccugaugcugaagauaaa

SEQ ID NO: 167399 - RNA, 19 nt, Homo sapiens
  misc_RNA (1)...(19): siRNA sense strand
gaucagaauggucccaaaa

SEQ ID NO: 167400 - RNA, 19 nt, Homo sapiens
  misc_RNA (1)...(19): siRNA sense strand
cagaagcuggaaccuauuc

SEQ ID NO: 167401 - RNA, 19 nt, Homo sapiens
  misc_RNA (1)...(19): siRNA sense strand
aacauuuccugaugcugaa

SEQ ID NO: 167402 - RNA, 19 nt, Homo sapiens
  misc_RNA (1)...(19): siRNA sense strand
cgcuaugaaacuacaaaua

SEQ ID NO: 167403 - RNA, 19 nt, Homo sapiens
  misc_RNA (1)...(19): siRNA sense strand
caaaugaguuccuguguga

SEQ ID NO: 167404 - RNA, 19 nt, Homo sapiens
  misc_RNA (1)...(19): siRNA sense strand
gcuggaaccuauucaguua

SEQ ID NO: 167405 - RNA, 19 nt, Homo sapiens
  misc_RNA (1)...(19): siRNA sense strand
gaacaucacucaggauaag

SEQ ID NO: 167406 - RNA, 19 nt, Homo sapiens
  misc_RNA (1)...(19): siRNA sense strand
uaagguugcuucaguuauu

SEQ ID NO: 167407 - RNA, 19 nt, Homo sapiens
  misc_RNA (1)...(19): siRNA sense strand
cuacugggauguucuugua

SEQ ID NO: 167408 - RNA, 19 nt, Homo sapiens
  misc_RNA (1)...(19): siRNA sense strand
ggauaagguugcuucaguu

SEQ ID NO: 167409 - RNA, 19 nt, Homo sapiens
  misc_RNA (1)...(19): siRNA sense strand
gcacagugagcacaaauga

SEQ ID NO: 167410 - RNA, 19 nt, Homo sapiens
  misc_RNA (1)...(19): siRNA sense strand
gauaagguugcuucaguua

SEQ ID NO: 167411 - RNA, 19 nt, Homo sapiens
  misc_RNA (1)...(19): siRNA sense strand
caaauaacaaucucagcua

SEQ ID NO: 167412 - RNA, 19 nt, Homo sapiens
  misc_RNA (1)...(19): siRNA sense strand
gcauguauuugguuaaugg

SEQ ID NO: 167413 - RNA, 19 nt, Homo sapiens
  misc_RNA (1)...(19): siRNA sense strand
gcaucuacuuauucaauug

SEQ ID NO: 167414 - RNA, 19 nt, Homo sapiens
  misc_RNA (1)...(19): siRNA sense strand
caacacuggugauaacaca

SEQ ID NO: 167415 - RNA, 19 nt, Homo sapiens
  misc_RNA (1)...(19): siRNA sense strand
cucaauagcagcaccauua

SEQ ID NO: 167416 - RNA, 19 nt, Homo sapiens
  misc_RNA (1)...(19): siRNA sense strand
gauaaaggaauucuuacug

SEQ ID NO: 167417 - RNA, 19 nt, Homo sapiens
  misc_RNA (1)...(19): siRNA sense strand
guucagccuuucaauguga

SEQ ID NO: 167418 - RNA, 19 nt, Homo sapiens
  misc_RNA (1)...(19): siRNA sense strand
ccaaggcagcaucuacuua

SEQ ID NO: 167419 - RNA, 19 nt, Homo sapiens
  misc_RNA (1)...(19): siRNA sense strand
aaagaaugauguuguccaa

SEQ ID NO: 167420 - RNA, 19 nt, Homo sapiens
  misc_RNA (1)...(19): siRNA sense strand
ggugauaacacaacauuuc

SEQ ID NO: 167421 - RNA, 19 nt, Homo sapiens
  misc_RNA (1)...(19): siRNA sense strand
gcauuggaacuuaauuuga

SEQ ID NO: 167422 - RNA, 19 nt, Homo sapiens
  misc_RNA (1)...(19): siRNA sense strand
gcagcaccauuaaguaucu

SEQ ID NO: 167423 - RNA, 19 nt, Homo sapiens
  misc_RNA (1)...(19): siRNA sense strand
gaaaaugccacuugccuuu

SEQ ID NO: 167424 - RNA, 19 nt, Homo sapiens
  misc_RNA (1)...(19): siRNA sense strand
cuacaacacuggugauaac

SEQ ID NO: 167425 - RNA, 19 nt, Homo sapiens
  misc_RNA (1)...(19): siRNA sense strand
acaaagagcagacuguuuc

SEQ ID NO: 167426 - RNA, 19 nt, Homo sapiens
  misc_RNA (1)...(19): siRNA sense strand
cuacaacaccuacuccaaa

SEQ ID NO: 167427 - RNA, 19 nt, Homo sapiens
  misc_RNA (1)...(19): siRNA sense strand
caaggcagcaucuacuuau

SEQ ID NO: 167428 - RNA, 19 nt, Homo sapiens
  misc_RNA (1)...(19): siRNA sense strand
guucuuauaugugcaacaa

SEQ ID NO: 167429 - RNA, 19 nt, Homo sapiens
  misc_RNA (1)...(19): siRNA sense strand
ucagaauggucccaaaaua

SEQ ID NO: 167430 - RNA, 19 nt, Homo sapiens
  misc_RNA (1)...(19): siRNA sense strand
caaggaaaguauucuacag

SEQ ID NO: 167431 - RNA, 19 nt, Homo sapiens
  misc_RNA (1)...(19): siRNA sense strand
ggcagcaucuacuuauuca

SEQ ID NO: 167432 - RNA, 19 nt, Homo sapiens
  misc_RNA (1)...(19): siRNA sense strand
gcaguucggaccuggcuuu

SEQ ID NO: 167433 - RNA, 19 nt, Homo sapiens
  misc_RNA (1)...(19): siRNA sense strand
uuuccuggauugcgaauuu

SEQ ID NO: 167434 - RNA, 19 nt, Homo sapiens
  misc_RNA (1)...(19): siRNA sense strand
cagcauguauuugguuaau

SEQ ID NO: 167435 - RNA, 19 nt, Homo sapiens
  misc_RNA (1)...(19): siRNA sense strand
caacaccuacuccaaagga

SEQ ID NO: 167436 - RNA, 19 nt, Homo sapiens
  misc_RNA (1)...(19): siRNA sense strand
cuacuuagacucaauagca

SEQ ID NO: 167437 - RNA, 19 nt, Homo sapiens
  misc_RNA (1)...(19): siRNA sense strand
aaggaauucuuacuguuga

SEQ ID NO: 167438 - RNA, 19 nt, Homo sapiens
  misc_RNA (1)...(19): siRNA sense strand
ccugggaaguucuuauaug

SEQ ID NO: 167439 - RNA, 19 nt, Homo sapiens
  misc_RNA (1)...(19): siRNA sense strand
aaaugccacuugccuuuau

SEQ ID NO: 167440 - RNA, 19 nt, Homo sapiens
  misc_RNA (1)...(19): siRNA sense strand
aaaggaauucuuacuguug

SEQ ID NO: 167441 - RNA, 19 nt, Homo sapiens
  misc_RNA (1)...(19): siRNA sense strand
gacuuugucuuugcuguga

SEQ ID NO: 167442 - RNA, 19 nt, Homo sapiens
  misc_RNA (1)...(19): siRNA sense strand
ucaauagcagcaccauuaa

SEQ ID NO: 167443 - RNA, 19 nt, Homo sapiens
  misc_RNA (1)...(19): siRNA sense strand
aagguugcuucaguuauua

SEQ ID NO: 167444 - RNA, 19 nt, Homo sapiens
  misc_RNA (1)...(19): siRNA sense strand
ggaaaagaaugauguuguc

SEQ ID NO: 167445 - RNA, 19 nt, Homo sapiens
  misc_RNA (1)...(19): siRNA sense strand
ucuuaugcauuggaacuua

SEQ ID NO: 167446 - RNA, 19 nt, Homo sapiens
  misc_RNA (1)...(19): siRNA sense strand
gcaacaaagagcagacugu

SEQ ID NO: 167447 - RNA, 19 nt, Homo sapiens
  misc_RNA (1)...(19): siRNA sense strand
uaacacaacauuuccugau

SEQ ID NO: 167448 - RNA, 19 nt, Homo sapiens
  misc_RNA (1)...(19): siRNA sense strand
cagcaucuacuuauucaau

SEQ ID NO: 167449 - RNA, 19 nt, Homo sapiens
  misc_RNA (1)...(19): siRNA sense strand
gcacugugacauauaaugg

SEQ ID NO: 167450 - RNA, 19 nt, Homo sapiens
  misc_RNA (1)...(19): siRNA sense strand
ggguucagccuuucaaugu

SEQ ID NO: 167451 - RNA, 19 nt, Homo sapiens
  misc_RNA (1)...(19): siRNA sense strand
caauugacagcgucucauu

SEQ ID NO: 167452 - RNA, 19 nt, Homo sapiens
  misc_RNA (1)...(19): siRNA sense strand
cugggaaguucuuauaugu

SEQ ID NO: 167453 - RNA, 19 nt, Homo sapiens
  misc_RNA (1)...(19): siRNA sense strand
ugaaggaagugaacaucag

SEQ ID NO: 167454 - RNA, 19 nt, Homo sapiens
  misc_RNA (1)...(19): siRNA sense strand
uagcagcaccauuaaguau

SEQ ID NO: 167455 - RNA, 19 nt, Homo sapiens
  misc_RNA (1)...(19): siRNA sense strand
ccauggcacugugacauau

SEQ ID NO: 167456 - RNA, 19 nt, Homo sapiens
  misc_RNA (1)...(19): siRNA sense strand
uaauggcaaugauacuugu

SEQ ID NO: 167457 - RNA, 19 nt, Homo sapiens
  misc_RNA (1)...(19): siRNA sense strand
gaauucuuacuguugauga

SEQ ID NO: 167458 - RNA, 19 nt, Homo sapiens
  misc_RNA (1)...(19): siRNA sense strand
uucagugucuggagcauuu

SEQ ID NO: 167459 - RNA, 19 nt, Homo sapiens
  misc_RNA (1)...(19): siRNA sense strand
gaaguucuuauaugugcaa

SEQ ID NO: 167460 - RNA, 19 nt, Homo sapiens
  misc_RNA (1)...(19): siRNA sense strand
aggauaagguugcuucagu

SEQ ID NO: 167461 - RNA, 19 nt, Homo sapiens
  misc_RNA (1)...(19): siRNA sense strand
aaugaguuccugugugaua

SEQ ID NO: 167462 - RNA, 19 nt, Homo sapiens
  misc_RNA (1)...(19): siRNA sense strand
ugggagcugugcggucuua

SEQ ID NO: 167463 - RNA, 19 nt, Homo sapiens
  misc_RNA (1)...(19): siRNA sense strand
ggaacuuaauuugacagau

SEQ ID NO: 167464 - RNA, 19 nt, Homo sapiens
  misc_RNA (1)...(19): siRNA sense strand
acacaaggaaaguauucua

SEQ ID NO: 167465 - RNA, 19 nt, Homo sapiens
  misc_RNA (1)...(19): siRNA sense strand
cauuggaacuuaauuugac

SEQ ID NO: 167466 - RNA, 19 nt, Homo sapiens
  misc_RNA (1)...(19): siRNA sense strand
gcugugcggucuuaugcau

SEQ ID NO: 167467 - RNA, 19 nt, Homo sapiens
  misc_RNA (1)...(19): siRNA sense strand
cuuaugcauuggaacuuaa

SEQ ID NO: 167468 - RNA, 19 nt, Homo sapiens
  misc_RNA (1)...(19): siRNA sense strand
ccaucagaauuccauugaa

SEQ ID NO: 167469 - RNA, 19 nt, Homo sapiens
  misc_RNA (1)...(19): siRNA sense strand
gccaucagaauuccauuga

SEQ ID NO: 167470 - RNA, 19 nt, Homo sapiens
  misc_RNA (1)...(19): siRNA sense strand
caaaauagcagugcaguuc

SEQ ID NO: 167471 - RNA, 19 nt, Homo sapiens
  misc_RNA (1)...(19): siRNA sense strand
gauuuuaucugaaggaagu

SEQ ID NO: 167472 - RNA, 19 nt, Homo sapiens
  misc_RNA (1)...(19): siRNA sense strand
uggaaccuauucaguuaau

SEQ ID NO: 167473 - RNA, 19 nt, Homo sapiens
  misc_RNA (1)...(19): siRNA sense strand
ugacacaaggaaaguauuc

SEQ ID NO: 167474 - RNA, 19 nt, Homo sapiens
  misc_RNA (1)...(19): siRNA sense strand
uacaacaccuacuccaaag

SEQ ID NO: 167475 - RNA, 19 nt, Homo sapiens
  misc_RNA (1)...(19): siRNA sense strand
ugugcggucuuaugcauug

SEQ ID NO: 167476 - RNA, 19 nt, Homo sapiens
  misc_RNA (1)...(19): siRNA sense strand
aaacuguaaccauuucaga

SEQ ID NO: 167477 - RNA, 19 nt, Homo sapiens
  misc_RNA (1)...(19): siRNA sense strand
cuggagcauuucagauaaa

SEQ ID NO: 167478 - RNA, 19 nt, Homo sapiens
  misc_RNA (1)...(19): siRNA sense strand
ucuuauaugugcaacaaag

SEQ ID NO: 167479 - RNA, 19 nt, Homo sapiens
  misc_RNA (1)...(19): siRNA sense strand
ucucacacugcucuacuua

SEQ ID NO: 167480 - RNA, 19 nt, Homo sapiens
  misc_RNA (1)...(19): siRNA sense strand
ccugugugauaaagacaaa

SEQ ID NO: 167481 - RNA, 19 nt, Homo sapiens
  misc_RNA (1)...(19): siRNA sense strand
acagugagcacaaaugagu

SEQ ID NO: 167482 - RNA, 19 nt, Homo sapiens
  misc_RNA (1)...(19): siRNA sense strand
aacacaacauuuccugaug

SEQ ID NO: 167483 - RNA, 19 nt, Homo sapiens
  misc_RNA (1)...(19): siRNA sense strand
gguucagccuuucaaugug

SEQ ID NO: 167484 - RNA, 19 nt, Homo sapiens
  misc_RNA (1)...(19): siRNA sense strand
gcaaaauggcagaugaauu

SEQ ID NO: 167485 - RNA, 19 nt, Homo sapiens
  misc_RNA (1)...(19): siRNA sense strand
ugaacaucacucaggauaa

SEQ ID NO: 167486 - RNA, 19 nt, Homo sapiens
  misc_RNA (1)...(19): siRNA sense strand
caaagagcagacuguuuca

SEQ ID NO: 167487 - RNA, 19 nt, Homo sapiens
  misc_RNA (1)...(19): siRNA sense strand
auaacaaucucagcuacug

SEQ ID NO: 167488 - RNA, 19 nt, Homo sapiens
  misc_RNA (1)...(19): siRNA sense strand
ugcugaagauaaaggaauu

SEQ ID NO: 167489 - RNA, 19 nt, Homo sapiens
  misc_RNA (1)...(19): siRNA sense strand
guuaauggcuccguuuuca

SEQ ID NO: 167490 - RNA, 19 nt, Homo sapiens
  misc_RNA (1)...(19): siRNA sense strand
aauagcagcaccauuaagu

SEQ ID NO: 167491 - RNA, 19 nt, Homo sapiens
  misc_RNA (1)...(19): siRNA sense strand
ggagcugugcggucuuaug

SEQ ID NO: 167492 - RNA, 19 nt, Homo sapiens
  misc_RNA (1)...(19): siRNA sense strand
gggcugcagcugaacauca

SEQ ID NO: 167493 - RNA, 19 nt, Homo sapiens
  misc_RNA (1)...(19): siRNA sense strand
acugugccaucuccuacua

SEQ ID NO: 167494 - RNA, 19 nt, Homo sapiens
  misc_RNA (1)...(19): siRNA sense strand
acugugacauauaauggaa

SEQ ID NO: 167495 - RNA, 19 nt, Homo sapiens
  misc_RNA (1)...(19): siRNA sense strand
aaggcagcaucuacuuauu

SEQ ID NO: 167496 - RNA, 19 nt, Homo sapiens
  misc_RNA (1)...(19): siRNA sense strand
gagcugugcggucuuaugc

SEQ ID NO: 167497 - RNA, 19 nt, Homo sapiens
  misc_RNA (1)...(19): siRNA sense strand
ggaauucuuacuguugaug

SEQ ID NO: 167498 - RNA, 19 nt, Homo sapiens
  misc_RNA (1)...(19): siRNA sense strand
ugaucagaauggucccaaa

SEQ ID NO: 167499 - RNA, 19 nt, Homo sapiens
  misc_RNA (1)...(19): siRNA sense strand
gcggucuuaugcauuggaa

SEQ ID NO: 167500 - RNA, 19 nt, Homo sapiens
  misc_RNA (1)...(19): siRNA sense strand
caucagcauguauuugguu

SEQ ID NO: 167501 - RNA, 19 nt, Homo sapiens
  misc_RNA (1)...(19): siRNA sense strand
gaucagaauggucccaaaa

SEQ ID NO: 167502 - RNA, 19 nt, Homo sapiens
  misc_RNA (1)...(19): siRNA sense strand
cagaagcuggaaccuauuc

SEQ ID NO: 167503 - RNA, 19 nt, Homo sapiens
  misc_RNA (1)...(19): siRNA sense strand
gaaggaccacuacaucuuu

SEQ ID NO: 167504 - RNA, 19 nt, Homo sapiens
  misc_RNA (1)...(19): siRNA sense strand
gcaagcacguggcauacau

SEQ ID NO: 167505 - RNA, 19 nt, Homo sapiens
  misc_RNA (1)...(19): siRNA sense strand
ggaguucccugagaugaau

SEQ ID NO: 167506 - RNA, 19 nt, Homo sapiens
  misc_RNA (1)...(19): siRNA sense strand
gcacguggcauacaucauc

SEQ ID NO: 167507 - RNA, 19 nt, Homo sapiens
  misc_RNA (1)...(19): siRNA sense strand
ugaaggccguccuggagaa

SEQ ID NO: 167508 - RNA, 19 nt, Homo sapiens
  misc_RNA (1)...(19): siRNA sense strand
acgaggagauucaggaugu

SEQ ID NO: 167509 - RNA, 19 nt, Homo sapiens
  misc_RNA (1)...(19): siRNA sense strand
caaggucaccaugcugaua

SEQ ID NO: 167510 - RNA, 19 nt, Homo sapiens
  misc_RNA (1)...(19): siRNA sense strand
gcagagaccccaagaacaa

SEQ ID NO: 167511 - RNA, 19 nt, Homo sapiens
  misc_RNA (1)...(19): siRNA sense strand
cgucagccuuggccucauu

SEQ ID NO: 167512 - RNA, 19 nt, Homo sapiens
  misc_RNA (1)...(19): siRNA sense strand
ugaaggaccacuacaucuu

SEQ ID NO: 167513 - RNA, 19 nt, Homo sapiens
  misc_RNA (1)...(19): siRNA sense strand
gcacggagagcauccucau

SEQ ID NO: 167514 - RNA, 19 nt, Homo sapiens
  misc_RNA (1)...(19): siRNA sense strand
aaacugacgagccgggaaa

SEQ ID NO: 167515 - RNA, 19 nt, Homo sapiens
  misc_RNA (1)...(19): siRNA sense strand
ggagauucaggauguguca

SEQ ID NO: 167516 - RNA, 19 nt, Homo sapiens
  misc_RNA (1)...(19): siRNA sense strand
gaaggccguccuggagaaa

SEQ ID NO: 167517 - RNA, 19 nt, Homo sapiens
  misc_RNA (1)...(19): siRNA sense strand
ucaggucgcacgugaagga

SEQ ID NO: 167518 - RNA, 19 nt, Homo sapiens
  misc_RNA (1)...(19): siRNA sense strand
gcacgugaaggaccacuac

SEQ ID NO: 167519 - RNA, 19 nt, Homo sapiens
  misc_RNA (1)...(19): siRNA sense strand
aaggucaccaugcugauaa

SEQ ID NO: 167520 - RNA, 19 nt, Homo sapiens
  misc_RNA (1)...(19): siRNA sense strand
caucaggucgcacgugaag

SEQ ID NO: 167521 - RNA, 19 nt, Homo sapiens
  misc_RNA (1)...(19): siRNA sense strand
ggaagccuuggaggacuuu

SEQ ID NO: 167522 - RNA, 19 nt, Homo sapiens
  misc_RNA (1)...(19): siRNA sense strand
gugaaggaccacuacaucu

SEQ ID NO: 167523 - RNA, 19 nt, Homo sapiens
  misc_RNA (1)...(19): siRNA sense strand
uggaagccuuggaggacuu

SEQ ID NO: 167524 - RNA, 19 nt, Homo sapiens
  misc_RNA (1)...(19): siRNA sense strand
ugaagaagcuugagaauug

SEQ ID NO: 167525 - RNA, 19 nt, Homo sapiens
  misc_RNA (1)...(19): siRNA sense strand
cgaaugaucucuuuaaugc

SEQ ID NO: 167526 - RNA, 19 nt, Homo sapiens
  misc_RNA (1)...(19): siRNA sense strand
gaacuuggcucugaacucu

SEQ ID NO: 167527 - RNA, 19 nt, Homo sapiens
  misc_RNA (1)...(19): siRNA sense strand
aaacacgaaugaucucuuu

SEQ ID NO: 167528 - RNA, 19 nt, Homo sapiens
  misc_RNA (1)...(19): siRNA sense strand
gaagguauacacugaauau

SEQ ID NO: 167529 - RNA, 19 nt, Homo sapiens
  misc_RNA (1)...(19): siRNA sense strand
gccagaaggucaaugauga

SEQ ID NO: 167530 - RNA, 19 nt, Homo sapiens
  misc_RNA (1)...(19): siRNA sense strand
gcacagauguugccaagac

SEQ ID NO: 167531 - RNA, 19 nt, Homo sapiens
  misc_RNA (1)...(19): siRNA sense strand
guucauccaucucuaguuu

SEQ ID NO: 167532 - RNA, 19 nt, Homo sapiens
  misc_RNA (1)...(19): siRNA sense strand
gaaggaaaccgcacucuca

SEQ ID NO: 167533 - RNA, 19 nt, Homo sapiens
  misc_RNA (1)...(19): siRNA sense strand
gagaagagcggacauuuag

SEQ ID NO: 167534 - RNA, 19 nt, Homo sapiens
  misc_RNA (1)...(19): siRNA sense strand
gaggaucaguguccgauga

SEQ ID NO: 167535 - RNA, 19 nt, Homo sapiens
  misc_RNA (1)...(19): siRNA sense strand
cagaagaccugguugaagu

SEQ ID NO: 167536 - RNA, 19 nt, Homo sapiens
  misc_RNA (1)...(19): siRNA sense strand
gaacucagcagaaaugaag

SEQ ID NO: 167537 - RNA, 19 nt, Homo sapiens
  misc_RNA (1)...(19): siRNA sense strand
gugagagccuggaggauuu

SEQ ID NO: 167538 - RNA, 19 nt, Homo sapiens
  misc_RNA (1)...(19): siRNA sense strand
ggaagaaucaagcgaaguu

SEQ ID NO: 167539 - RNA, 19 nt, Homo sapiens
  misc_RNA (1)...(19): siRNA sense strand
gaauauccucgaagaaauu

SEQ ID NO: 167540 - RNA, 19 nt, Homo sapiens
  misc_RNA (1)...(19): siRNA sense strand
gagauggcauuguccuuug

SEQ ID NO: 167541 - RNA, 19 nt, Homo sapiens
  misc_RNA (1)...(19): siRNA sense strand
gagaagguauacacugaau

SEQ ID NO: 167542 - RNA, 19 nt, Homo sapiens
  misc_RNA (1)...(19): siRNA sense strand
gaagagcggacauuuagga

SEQ ID NO: 167543 - RNA, 19 nt, Homo sapiens
  misc_RNA (1)...(19): siRNA sense strand
guacaagucugccuguucu

SEQ ID NO: 167544 - RNA, 19 nt, Homo sapiens
  misc_RNA (1)...(19): siRNA sense strand
agacacaauugaugaaaga

SEQ ID NO: 167545 - RNA, 19 nt, Homo sapiens
  misc_RNA (1)...(19): siRNA sense strand
cagguuccauuaacuauga

SEQ ID NO: 167546 - RNA, 19 nt, Homo sapiens
  misc_RNA (1)...(19): siRNA sense strand
gaagaagcuugagaauugu

SEQ ID NO: 167547 - RNA, 19 nt, Homo sapiens
  misc_RNA (1)...(19): siRNA sense strand
caggugaucuggaccaaga

SEQ ID NO: 167548 - RNA, 19 nt, Homo sapiens
  misc_RNA (1)...(19): siRNA sense strand
ucaaucauuuguacaguga

SEQ ID NO: 167549 - RNA, 19 nt, Homo sapiens
  misc_RNA (1)...(19): siRNA sense strand
ggagauggcauuguccuuu

SEQ ID NO: 167550 - RNA, 19 nt, Homo sapiens
  misc_RNA (1)...(19): siRNA sense strand
gaaaugaagcucugauugc

SEQ ID NO: 167551 - RNA, 19 nt, Homo sapiens
  misc_RNA (1)...(19): siRNA sense strand
guauagaguacgagaaauu

SEQ ID NO: 167552 - RNA, 19 nt, Homo sapiens
  misc_RNA (1)...(19): siRNA sense strand
ugaauauccucgaagaaau

SEQ ID NO: 167553 - RNA, 19 nt, Homo sapiens
  misc_RNA (1)...(19): siRNA sense strand
gaugaaagaacaaucaaca

SEQ ID NO: 167554 - RNA, 19 nt, Homo sapiens
  misc_RNA (1)...(19): siRNA sense strand
gagagaagagcggacauuu

SEQ ID NO: 167555 - RNA, 19 nt, Homo sapiens
  misc_RNA (1)...(19): siRNA sense strand
gagcggacauuuaggaacu

SEQ ID NO: 167556 - RNA, 19 nt, Homo sapiens
  misc_RNA (1)...(19): siRNA sense strand
aaucugaacuuggcucuga

SEQ ID NO: 167557 - RNA, 19 nt, Homo sapiens
  misc_RNA (1)...(19): siRNA sense strand
caucaagauuggguuguuu

SEQ ID NO: 167558 - RNA, 19 nt, Homo sapiens
  misc_RNA (1)...(19): siRNA sense strand
aaacugggaggcaauauga

SEQ ID NO: 167559 - RNA, 19 nt, Homo sapiens
  misc_RNA (1)...(19): siRNA sense strand
agagaagagcggacauuua

SEQ ID NO: 167560 - RNA, 19 nt, Homo sapiens
  misc_RNA (1)...(19): siRNA sense strand
acaaagcccuggaaaauga

SEQ ID NO: 167561 - RNA, 19 nt, Homo sapiens
  misc_RNA (1)...(19): siRNA sense strand
caacaaaauuggcaacuuc

SEQ ID NO: 167562 - RNA, 19 nt, Homo sapiens
  misc_RNA (1)...(19): siRNA sense strand
guacgagaaauuacagaaa

SEQ ID NO: 167563 - RNA, 19 nt, Homo sapiens
  misc_RNA (1)...(19): siRNA sense strand
gcagguggcuccaaaagga

SEQ ID NO: 167564 - RNA, 19 nt, Homo sapiens
  misc_RNA (1)...(19): siRNA sense strand
guuguuugcugacauugaa

SEQ ID NO: 167565 - RNA, 19 nt, Homo sapiens
  misc_RNA (1)...(19): siRNA sense strand
ggaaaaugauccugauugu

SEQ ID NO: 167566 - RNA, 19 nt, Homo sapiens
  misc_RNA (1)...(19): siRNA sense strand
gcacccaacacuccuauuc

SEQ ID NO: 167567 - RNA, 19 nt, Homo sapiens
  misc_RNA (1)...(19): siRNA sense strand
ucaaggacccgaagauuag

SEQ ID NO: 167568 - RNA, 19 nt, Homo sapiens
  misc_RNA (1)...(19): siRNA sense strand
gcaauaugaagaagcuuga

SEQ ID NO: 167569 - RNA, 19 nt, Homo sapiens
  misc_RNA (1)...(19): siRNA sense strand
ggauacaucagcuucaaug

SEQ ID NO: 167570 - RNA, 19 nt, Homo sapiens
  misc_RNA (1)...(19): siRNA sense strand
acacgaaugaucucuuuaa

SEQ ID NO: 167571 - RNA, 19 nt, Homo sapiens
  misc_RNA (1)...(19): siRNA sense strand
ugaguugaaugacuuguuc

SEQ ID NO: 167572 - RNA, 19 nt, Homo sapiens
  misc_RNA (1)...(19): siRNA sense strand
gauguugccaagaccuuua

SEQ ID NO: 167573 - RNA, 19 nt, Homo sapiens
  misc_RNA (1)...(19): siRNA sense strand
uggacaagaucucaaugaa

SEQ ID NO: 167574 - RNA, 19 nt, Homo sapiens
  misc_RNA (1)...(19): siRNA sense strand
uacagugacuuaucagaug

SEQ ID NO: 167575 - RNA, 19 nt, Homo sapiens
  misc_RNA (1)...(19): siRNA sense strand
cagagaaccaggacauuga

SEQ ID NO: 167576 - RNA, 19 nt, Homo sapiens
  misc_RNA (1)...(19): siRNA sense strand
gauaaacaaagcccuggaa

SEQ ID NO: 167577 - RNA, 19 nt, Homo sapiens
  misc_RNA (1)...(19): siRNA sense strand
caaaauaugccaucucuau

SEQ ID NO: 167578 - RNA, 19 nt, Homo sapiens
  misc_RNA (1)...(19): siRNA sense strand
uacaucagcuucaaugagu

SEQ ID NO: 167579 - RNA, 19 nt, Homo sapiens
  misc_RNA (1)...(19): siRNA sense strand
ggguauagaguacgagaaa

SEQ ID NO: 167580 - RNA, 19 nt, Homo sapiens
  misc_RNA (1)...(19): siRNA sense strand
gccaaccucuuuaacagau

SEQ ID NO: 167581 - RNA, 19 nt, Homo sapiens
  misc_RNA (1)...(19): siRNA sense strand
acauugaacucagcagaaa

SEQ ID NO: 167582 - RNA, 19 nt, Homo sapiens
  misc_RNA (1)...(19): siRNA sense strand
gauggaaggaucagcuuug

SEQ ID NO: 167583 - RNA, 19 nt, Homo sapiens
  misc_RNA (1)...(19): siRNA sense strand
ucugaaugaugaugagaaa

SEQ ID NO: 167584 - RNA, 19 nt, Homo sapiens
  misc_RNA (1)...(19): siRNA sense strand
cagcuaaugagaagguaua

SEQ ID NO: 167585 - RNA, 19 nt, Homo sapiens
  misc_RNA (1)...(19): siRNA sense strand
ggacaagaucucaaugaag

SEQ ID NO: 167586 - RNA, 19 nt, Homo sapiens
  misc_RNA (1)...(19): siRNA sense strand
ggugagagccuggaggauu

SEQ ID NO: 167587 - RNA, 19 nt, Homo sapiens
  misc_RNA (1)...(19): siRNA sense strand
ugaacucccuggguguuaa

SEQ ID NO: 167588 - RNA, 19 nt, Homo sapiens
  misc_RNA (1)...(19): siRNA sense strand
gagaaaaguucauccaucu

SEQ ID NO: 167589 - RNA, 19 nt, Homo sapiens
  misc_RNA (1)...(19): siRNA sense strand
gguguuaacccucgaguca

SEQ ID NO: 167590 - RNA, 19 nt, Homo sapiens
  misc_RNA (1)...(19): siRNA sense strand
caaugaacccaaacacgaa

SEQ ID NO: 167591 - RNA, 19 nt, Homo sapiens
  misc_RNA (1)...(19): siRNA sense strand
gagaaacucaacaaugcaa

SEQ ID NO: 167592 - RNA, 19 nt, Homo sapiens
  misc_RNA (1)...(19): siRNA sense strand
guacagugacuuaucagau

SEQ ID NO: 167593 - RNA, 19 nt, Homo sapiens
  misc_RNA (1)...(19): siRNA sense strand
cacaauugaugaaagaaca

SEQ ID NO: 167594 - RNA, 19 nt, Homo sapiens
  misc_RNA (1)...(19): siRNA sense strand
uggcaucgguggacaagau

SEQ ID NO: 167595 - RNA, 19 nt, Homo sapiens
  misc_RNA (1)...(19): siRNA sense strand
uguaugcccugccagaaga

SEQ ID NO: 167596 - RNA, 19 nt, Homo sapiens
  misc_RNA (1)...(19): siRNA sense strand
gaagugaaccccaaaaugg

SEQ ID NO: 167597 - RNA, 19 nt, Homo sapiens
  misc_RNA (1)...(19): siRNA sense strand
ccaaccucuuuaacagaua

SEQ ID NO: 167598 - RNA, 19 nt, Homo sapiens
  misc_RNA (1)...(19): siRNA sense strand
ccagagaaccaggacauug

SEQ ID NO: 167599 - RNA, 19 nt, Homo sapiens
  misc_RNA (1)...(19): siRNA sense strand
cacgaaugaucucuuuaau

SEQ ID NO: 167600 - RNA, 19 nt, Homo sapiens
  misc_RNA (1)...(19): siRNA sense strand
uucaaggacccgaagauua

SEQ ID NO: 167601 - RNA, 19 nt, Homo sapiens
  misc_RNA (1)...(19): siRNA sense strand
gguauacacugaauauccu

SEQ ID NO: 167602 - RNA, 19 nt, Homo sapiens
  misc_RNA (1)...(19): siRNA sense strand
augagaagguauacacuga

SEQ ID NO: 167603 - RNA, 19 nt, Homo sapiens
  misc_RNA (1)...(19): siRNA sense strand
gaggcaauaugaagaagcu

SEQ ID NO: 167604 - RNA, 19 nt, Homo sapiens
  misc_RNA (1)...(19): siRNA sense strand
gaguaaacaaaccgccaua

SEQ ID NO: 167605 - RNA, 19 nt, Homo sapiens
  misc_RNA (1)...(19): siRNA sense strand
uugcugaggugggcuaauu

SEQ ID NO: 167606 - RNA, 19 nt, Homo sapiens
  misc_RNA (1)...(19): siRNA sense strand
agaaaugaagcucugauug

SEQ ID NO: 167607 - RNA, 19 nt, Homo sapiens
  misc_RNA (1)...(19): siRNA sense strand
gggcugaggaccugaagga

SEQ ID NO: 167608 - RNA, 19 nt, Homo sapiens
  misc_RNA (1)...(19): siRNA sense strand
gaagaccugguugaaguga

SEQ ID NO: 167609 - RNA, 19 nt, Homo sapiens
  misc_RNA (1)...(19): siRNA sense strand
gaaugaugaugagaaacuc

SEQ ID NO: 167610 - RNA, 19 nt, Homo sapiens
  misc_RNA (1)...(19): siRNA sense strand
ucauccaucucuaguuuca

SEQ ID NO: 167611 - RNA, 19 nt, Homo sapiens
  misc_RNA (1)...(19): siRNA sense strand
cugaauauccucgaagaaa

SEQ ID NO: 167612 - RNA, 19 nt, Homo sapiens
  misc_RNA (1)...(19): siRNA sense strand
aaaaggagaugaagaaggu

SEQ ID NO: 167613 - RNA, 19 nt, Homo sapiens
  misc_RNA (1)...(19): siRNA sense strand
gacauugaacucagcagaa

SEQ ID NO: 167614 - RNA, 19 nt, Homo sapiens
  misc_RNA (1)...(19): siRNA sense strand
gaagcucugauugcucuuu

SEQ ID NO: 167615 - RNA, 19 nt, Homo sapiens
  misc_RNA (1)...(19): siRNA sense strand
ucauuuguacagugacuua

SEQ ID NO: 167616 - RNA, 19 nt, Homo sapiens
  misc_RNA (1)...(19): siRNA sense strand
gcuaauuaccaccuggaaa

SEQ ID NO: 167617 - RNA, 19 nt, Homo sapiens
  misc_RNA (1)...(19): siRNA sense strand
ccuggaggauuugaugaaa

SEQ ID NO: 167618 - RNA, 19 nt, Homo sapiens
  misc_RNA (1)...(19): siRNA sense strand
aaacaaagcccuggaaaau

SEQ ID NO: 167619 - RNA, 19 nt, Homo sapiens
  misc_RNA (1)...(19): siRNA sense strand
ucaacugggugaaugaaac

SEQ ID NO: 167620 - RNA, 19 nt, Homo sapiens
  misc_RNA (1)...(19): siRNA sense strand
gccuugauuuggcagcuaa

SEQ ID NO: 167621 - RNA, 19 nt, Homo sapiens
  misc_RNA (1)...(19): siRNA sense strand
caaacugggaggcaauaug

SEQ ID NO: 167622 - RNA, 19 nt, Homo sapiens
  misc_RNA (1)...(19): siRNA sense strand
uugccaaaguugauacuga

SEQ ID NO: 167623 - RNA, 19 nt, Homo sapiens
  misc_RNA (1)...(19): siRNA sense strand
ggacauuuaggaacuggau

SEQ ID NO: 167624 - RNA, 19 nt, Homo sapiens
  misc_RNA (1)...(19): siRNA sense strand
ggagugcgauggacaauuu

SEQ ID NO: 167625 - RNA, 19 nt, Homo sapiens
  misc_RNA (1)...(19): siRNA sense strand
caggaaaucugccuacuuu

SEQ ID NO: 167626 - RNA, 19 nt, Homo sapiens
  misc_RNA (1)...(19): siRNA sense strand
ccagucagaucacccauua

SEQ ID NO: 167627 - RNA, 19 nt, Homo sapiens
  misc_RNA (1)...(19): siRNA sense strand
gaucacccauuauaaggua

SEQ ID NO: 167628 - RNA, 19 nt, Homo sapiens
  misc_RNA (1)...(19): siRNA sense strand
ggaggauacugauaggaua

SEQ ID NO: 167629 - RNA, 19 nt, Homo sapiens
  misc_RNA (1)...(19): siRNA sense strand
gaaaggcucugcugauuuu

SEQ ID NO: 167630 - RNA, 19 nt, Homo sapiens
  misc_RNA (1)...(19): siRNA sense strand
ggcagaagcugaguaaauu

SEQ ID NO: 167631 - RNA, 19 nt, Homo sapiens
  misc_RNA (1)...(19): siRNA sense strand
acaaugacccuccaauuua

SEQ ID NO: 167632 - RNA, 19 nt, Homo sapiens
  misc_RNA (1)...(19): siRNA sense strand
ccacuuuccugccagaaua

SEQ ID NO: 167633 - RNA, 19 nt, Homo sapiens
  misc_RNA (1)...(19): siRNA sense strand
ggaagccgcugaccgaaug

SEQ ID NO: 167634 - RNA, 19 nt, Homo sapiens
  misc_RNA (1)...(19): siRNA sense strand
gcucaaggcuaucaaggaa

SEQ ID NO: 167635 - RNA, 19 nt, Homo sapiens
  misc_RNA (1)...(19): siRNA sense strand
gaacuuggcaccacuacaa

SEQ ID NO: 167636 - RNA, 19 nt, Homo sapiens
  misc_RNA (1)...(19): siRNA sense strand
uaaggaggcuguugcaguu

SEQ ID NO: 167637 - RNA, 19 nt, Homo sapiens
  misc_RNA (1)...(19): siRNA sense strand
ccacugccaucucuucuuu

SEQ ID NO: 167638 - RNA, 19 nt, Homo sapiens
  misc_RNA (1)...(19): siRNA sense strand
caacggcaccuaugacuuu

SEQ ID NO: 167639 - RNA, 19 nt, Homo sapiens
  misc_RNA (1)...(19): siRNA sense strand
gaauggagauuacaaugag

SEQ ID NO: 167640 - RNA, 19 nt, Homo sapiens
  misc_RNA (1)...(19): siRNA sense strand
ggagauauguucaguucau

SEQ ID NO: 167641 - RNA, 19 nt, Homo sapiens
  misc_RNA (1)...(19): siRNA sense strand
agaaacagcucuaucaaca

SEQ ID NO: 167642 - RNA, 19 nt, Homo sapiens
  misc_RNA (1)...(19): siRNA sense strand
gagagcagauggcaaagga

SEQ ID NO: 167643 - RNA, 19 nt, Homo sapiens
  misc_RNA (1)...(19): siRNA sense strand
ggaagacucuguggauguu

SEQ ID NO: 167644 - RNA, 19 nt, Homo sapiens
  misc_RNA (1)...(19): siRNA sense strand
acacagaggucauuaccaa

SEQ ID NO: 167645 - RNA, 19 nt, Homo sapiens
  misc_RNA (1)...(19): siRNA sense strand
caauuuaugucacagagaa

SEQ ID NO: 167646 - RNA, 19 nt, Homo sapiens
  misc_RNA (1)...(19): siRNA sense strand
gggcucagguguacaaguu

SEQ ID NO: 167647 - RNA, 19 nt, Homo sapiens
  misc_RNA (1)...(19): siRNA sense strand
caaugacccuccaauuuau

SEQ ID NO: 167648 - RNA, 19 nt, Homo sapiens
  misc_RNA (1)...(19): siRNA sense strand
cgaaagagauuuguucuac

SEQ ID NO: 167649 - RNA, 19 nt, Homo sapiens
  misc_RNA (1)...(19): siRNA sense strand
uuaaugaguuucugaguug

SEQ ID NO: 167650 - RNA, 19 nt, Homo sapiens
  misc_RNA (1)...(19): siRNA sense strand
ggaagaguauggugacauc

SEQ ID NO: 167651 - RNA, 19 nt, Homo sapiens
  misc_RNA (1)...(19): siRNA sense strand
gaugauuccuuaagaguag

SEQ ID NO: 167652 - RNA, 19 nt, Homo sapiens
  misc_RNA (1)...(19): siRNA sense strand
ggaagaaacagaccucaau

SEQ ID NO: 167653 - RNA, 19 nt, Homo sapiens
  misc_RNA (1)...(19): siRNA sense strand
gaagagaagagguucauca

SEQ ID NO: 167654 - RNA, 19 nt, Homo sapiens
  misc_RNA (1)...(19): siRNA sense strand
guaaauugcagaccauuga

SEQ ID NO: 167655 - RNA, 19 nt, Homo sapiens
  misc_RNA (1)...(19): siRNA sense strand
uaaaggaggaauacaauga

SEQ ID NO: 167656 - RNA, 19 nt, Homo sapiens
  misc_RNA (1)...(19): siRNA sense strand
ccauuggguuugauauuaa

SEQ ID NO: 167657 - RNA, 19 nt, Homo sapiens
  misc_RNA (1)...(19): siRNA sense strand
gaacuacagugacccuucu

SEQ ID NO: 167658 - RNA, 19 nt, Homo sapiens
  misc_RNA (1)...(19): siRNA sense strand
ugacaguuaucacaagauu

SEQ ID NO: 167659 - RNA, 19 nt, Homo sapiens
  misc_RNA (1)...(19): siRNA sense strand
ggagcaaugugaaagacaa

SEQ ID NO: 167660 - RNA, 19 nt, Homo sapiens
  misc_RNA (1)...(19): siRNA sense strand
caggagauauguucaguuc

SEQ ID NO: 167661 - RNA, 19 nt, Homo sapiens
  misc_RNA (1)...(19): siRNA sense strand
ggaggauccugaacugguu

SEQ ID NO: 167662 - RNA, 19 nt, Homo sapiens
  misc_RNA (1)...(19): siRNA sense strand
gagaaucugggaagcauuu

SEQ ID NO: 167663 - RNA, 19 nt, Homo sapiens
  misc_RNA (1)...(19): siRNA sense strand
gcuaccaccuaauacagua

SEQ ID NO: 167664 - RNA, 19 nt, Homo sapiens
  misc_RNA (1)...(19): siRNA sense strand
gugaaaaucucuuugauga

SEQ ID NO: 167665 - RNA, 19 nt, Homo sapiens
  misc_RNA (1)...(19): siRNA sense strand
gggaagcauuugccaauca

SEQ ID NO: 167666 - RNA, 19 nt, Homo sapiens
  misc_RNA (1)...(19): siRNA sense strand
ggagcugucuuggcaugua

SEQ ID NO: 167667 - RNA, 19 nt, Homo sapiens
  misc_RNA (1)...(19): siRNA sense strand
ggacccagauccaacagau

SEQ ID NO: 167668 - RNA, 19 nt, Homo sapiens
  misc_RNA (1)...(19): siRNA sense strand
gauuuccucucucuugauu

SEQ ID NO: 167669 - RNA, 19 nt, Homo sapiens
  misc_RNA (1)...(19): siRNA sense strand
gaaacagaccucaaugaca

SEQ ID NO: 167670 - RNA, 19 nt, Homo sapiens
  misc_RNA (1)...(19): siRNA sense strand
gaaggcugcugaacuggau

SEQ ID NO: 167671 - RNA, 19 nt, Homo sapiens
  misc_RNA (1)...(19): siRNA sense strand
aaacagcucuaucaacagu

SEQ ID NO: 167672 - RNA, 19 nt, Homo sapiens
  misc_RNA (1)...(19): siRNA sense strand
ucucuuugaugauuccuua

SEQ ID NO: 167673 - RNA, 19 nt, Homo sapiens
  misc_RNA (1)...(19): siRNA sense strand
caacgaagccaacaggaau

SEQ ID NO: 167674 - RNA, 19 nt, Homo sapiens
  misc_RNA (1)...(19): siRNA sense strand
ucuacuaccuucggacuua

SEQ ID NO: 167675 - RNA, 19 nt, Homo sapiens
  misc_RNA (1)...(19): siRNA sense strand
gaagaaacagaccucaaug

SEQ ID NO: 167676 - RNA, 19 nt, Homo sapiens
  misc_RNA (1)...(19): siRNA sense strand
acacguacgaugagaaaua

SEQ ID NO: 167677 - RNA, 19 nt, Homo sapiens
  misc_RNA (1)...(19): siRNA sense strand
uacaaugacccuccaauuu

SEQ ID NO: 167678 - RNA, 19 nt, Homo sapiens
  misc_RNA (1)...(19): siRNA sense strand
ggcaaaggacucagcauuu

SEQ ID NO: 167679 - RNA, 19 nt, Homo sapiens
  misc_RNA (1)...(19): siRNA sense strand
gaacucagacugggcagaa

SEQ ID NO: 167680 - RNA, 19 nt, Homo sapiens
  misc_RNA (1)...(19): siRNA sense strand
ucaaggcuaucaaggaaga

SEQ ID NO: 167681 - RNA, 19 nt, Homo sapiens
  misc_RNA (1)...(19): siRNA sense strand
gcaggaagcacccagaauc

SEQ ID NO: 167682 - RNA, 19 nt, Homo sapiens
  misc_RNA (1)...(19): siRNA sense strand
acagacagcuuuguacguu

SEQ ID NO: 167683 - RNA, 19 nt, Homo sapiens
  misc_RNA (1)...(19): siRNA sense strand
gcugaggccuggcaucugu

SEQ ID NO: 167684 - RNA, 19 nt, Homo sapiens
  misc_RNA (1)...(19): siRNA sense strand
guaggaggcugggagaaug

SEQ ID NO: 167685 - RNA, 19 nt, Homo sapiens
  misc_RNA (1)...(19): siRNA sense strand
ugagaacgaugccauugga

SEQ ID NO: 167686 - RNA, 19 nt, Homo sapiens
  misc_RNA (1)...(19): siRNA sense strand
ggauacugauaggauauuu

SEQ ID NO: 167687 - RNA, 19 nt, Homo sapiens
  misc_RNA (1)...(19): siRNA sense strand
ugaacuggaucaaggaaga

SEQ ID NO: 167688 - RNA, 19 nt, Homo sapiens
  misc_RNA (1)...(19): siRNA sense strand
gaaaagccuaugagauuua

SEQ ID NO: 167689 - RNA, 19 nt, Homo sapiens
  misc_RNA (1)...(19): siRNA sense strand
gggagaaacagcucuauca

SEQ ID NO: 167690 - RNA, 19 nt, Homo sapiens
  misc_RNA (1)...(19): siRNA sense strand
ucaaagcugugcaggacaa

SEQ ID NO: 167691 - RNA, 19 nt, Homo sapiens
  misc_RNA (1)...(19): siRNA sense strand
ccaaugacuugcugcacaa

SEQ ID NO: 167692 - RNA, 19 nt, Homo sapiens
  misc_RNA (1)...(19): siRNA sense strand
ugacagcuacgcagacuuu

SEQ ID NO: 167693 - RNA, 19 nt, Homo sapiens
  misc_RNA (1)...(19): siRNA sense strand
agaagcagcuccugaaagg

SEQ ID NO: 167694 - RNA, 19 nt, Homo sapiens
  misc_RNA (1)...(19): siRNA sense strand
cacagacgcuccaagaugu

SEQ ID NO: 167695 - RNA, 19 nt, Homo sapiens
  misc_RNA (1)...(19): siRNA sense strand
acaacaggcugaucaaugg

SEQ ID NO: 167696 - RNA, 19 nt, Homo sapiens
  misc_RNA (1)...(19): siRNA sense strand
ggagaaacagcucuaucaa

SEQ ID NO: 167697 - RNA, 19 nt, Homo sapiens
  misc_RNA (1)...(19): siRNA sense strand
agacugcuaccaccuaaua

SEQ ID NO: 167698 - RNA, 19 nt, Homo sapiens
  misc_RNA (1)...(19): siRNA sense strand
aaagacugcuaccaccuaa

SEQ ID NO: 167699 - RNA, 19 nt, Homo sapiens
  misc_RNA (1)...(19): siRNA sense strand
uuauugcccugcuaaguuu

SEQ ID NO: 167700 - RNA, 19 nt, Homo sapiens
  misc_RNA (1)...(19): siRNA sense strand
accauuggguuugauauua

SEQ ID NO: 167701 - RNA, 19 nt, Homo sapiens
  misc_RNA (1)...(19): siRNA sense strand
gcauuucugucauacaagu

SEQ ID NO: 167702 - RNA, 19 nt, Homo sapiens
  misc_RNA (1)...(19): siRNA sense strand
ccacuguccucgccuacaa

SEQ ID NO: 167703 - RNA, 19 nt, Homo sapiens
  misc_RNA (1)...(19): siRNA sense strand
gagacaaggugaaguuuug

SEQ ID NO: 167704 - RNA, 19 nt, Homo sapiens
  misc_RNA (1)...(19): siRNA sense strand
ccacagacgcuccaagaug

SEQ ID NO: 167705 - RNA, 19 nt, Homo sapiens
  misc_RNA (1)...(19): siRNA sense strand
gcuaaagucguuugggaaa

SEQ ID NO: 167706 - RNA, 19 nt, Homo sapiens
  misc_RNA (1)...(19): siRNA sense strand
gucaaggacucccaggaaa

SEQ ID NO: 167707 - RNA, 19 nt, Homo sapiens
  misc_RNA (1)...(19): siRNA sense strand
agucagaucacccauuaua

SEQ ID NO: 167708 - RNA, 19 nt, Homo sapiens
  misc_RNA (1)...(19): siRNA sense strand
ggcugaagaugacgccuuu

SEQ ID NO: 167709 - RNA, 19 nt, Homo sapiens
  misc_RNA (1)...(19): siRNA sense strand
acaaugaggugaugaagac

SEQ ID NO: 167710 - RNA, 19 nt, Homo sapiens
  misc_RNA (1)...(19): siRNA sense strand
cagaaaagccuaugagauu

SEQ ID NO: 167711 - RNA, 19 nt, Homo sapiens
  misc_RNA (1)...(19): siRNA sense strand
gucaugggguugauuauua

SEQ ID NO: 167712 - RNA, 19 nt, Homo sapiens
  misc_RNA (1)...(19): siRNA sense strand
cugaaaggcucugcugauu

SEQ ID NO: 167713 - RNA, 19 nt, Homo sapiens
  misc_RNA (1)...(19): siRNA sense strand
caaggaagacucuguggau

SEQ ID NO: 167714 - RNA, 19 nt, Homo sapiens
  misc_RNA (1)...(19): siRNA sense strand
gcuuggcauuucugucaua

SEQ ID NO: 167715 - RNA, 19 nt, Homo sapiens
  misc_RNA (1)...(19): siRNA sense strand
aaagagauuuguucuacca

SEQ ID NO: 167716 - RNA, 19 nt, Homo sapiens
  misc_RNA (1)...(19): siRNA sense strand
ugaaaggcucugcugauuu

SEQ ID NO: 167717 - RNA, 19 nt, Homo sapiens
  misc_RNA (1)...(19): siRNA sense strand
uaaggaguaugcagaugug

SEQ ID NO: 167718 - RNA, 19 nt, Homo sapiens
  misc_RNA (1)...(19): siRNA sense strand
gacuguaccauguugauuu

SEQ ID NO: 167719 - RNA, 19 nt, Homo sapiens
  misc_RNA (1)...(19): siRNA sense strand
uuccagaccuuuggugaua

SEQ ID NO: 167720 - RNA, 19 nt, Homo sapiens
  misc_RNA (1)...(19): siRNA sense strand
ggagucugauagaaauuuc

SEQ ID NO: 167721 - RNA, 19 nt, Homo sapiens
  misc_RNA (1)...(19): siRNA sense strand
caugguggauggcagaaug

SEQ ID NO: 167722 - RNA, 19 nt, Homo sapiens
  misc_RNA (1)...(19): siRNA sense strand
uggcauuucugucauacaa

SEQ ID NO: 167723 - RNA, 19 nt, Homo sapiens
  misc_RNA (1)...(19): siRNA sense strand
ccucauugauggcuucgaa

SEQ ID NO: 167724 - RNA, 19 nt, Homo sapiens
  misc_RNA (1)...(19): siRNA sense strand
caaagugccuaugaaauua

SEQ ID NO: 167725 - RNA, 19 nt, Homo sapiens
  misc_RNA (1)...(19): siRNA sense strand
gcagaaacacuuuggaaua

SEQ ID NO: 167726 - RNA, 19 nt, Homo sapiens
  misc_RNA (1)...(19): siRNA sense strand
ggauuuggcugaugaacuu

SEQ ID NO: 167727 - RNA, 19 nt, Homo sapiens
  misc_RNA (1)...(19): siRNA sense strand
gaaacacuuuggaauauuc

SEQ ID NO: 167728 - RNA, 19 nt, Homo sapiens
  misc_RNA (1)...(19): siRNA sense strand
ggaagugguuguaaucuag

SEQ ID NO: 167729 - RNA, 19 nt, Homo sapiens
  misc_RNA (1)...(19): siRNA sense strand
guuaagggauuauauggaa

SEQ ID NO: 167730 - RNA, 19 nt, Homo sapiens
  misc_RNA (1)...(19): siRNA sense strand
cagaaacacuuuggaauau

SEQ ID NO: 167731 - RNA, 19 nt, Homo sapiens
  misc_RNA (1)...(19): siRNA sense strand
ugaagacucuggacccuaa

SEQ ID NO: 167732 - RNA, 19 nt, Homo sapiens
  misc_RNA (1)...(19): siRNA sense strand
ggaauggugucucagaugu

SEQ ID NO: 167733 - RNA, 19 nt, Homo sapiens
  misc_RNA (1)...(19): siRNA sense strand
ugacauauauagucuggaa

SEQ ID NO: 167734 - RNA, 19 nt, Homo sapiens
  misc_RNA (1)...(19): siRNA sense strand
ucaaagugccuaugaaauu

SEQ ID NO: 167735 - RNA, 19 nt, Homo sapiens
  misc_RNA (1)...(19): siRNA sense strand
caagaagagugcagaaaca

SEQ ID NO: 167736 - RNA, 19 nt, Homo sapiens
  misc_RNA (1)...(19): siRNA sense strand
gagaaaugauggaucuuca

SEQ ID NO: 167737 - RNA, 19 nt, Homo sapiens
  misc_RNA (1)...(19): siRNA sense strand
ugaaggauuuggcugauga

SEQ ID NO: 167738 - RNA, 19 nt, Homo sapiens
  misc_RNA (1)...(19): siRNA sense strand
gaugaaaacucccagugua

SEQ ID NO: 167739 - RNA, 19 nt, Homo sapiens
  misc_RNA (1)...(19): siRNA sense strand
gaacuugcccuuguugaug

SEQ ID NO: 167740 - RNA, 19 nt, Homo sapiens
  misc_RNA (1)...(19): siRNA sense strand
gaacggauucagauaagga

SEQ ID NO: 167741 - RNA, 19 nt, Homo sapiens
  misc_RNA (1)...(19): siRNA sense strand
caguaucccuugugucuug

SEQ ID NO: 167742 - RNA, 19 nt, Homo sapiens
  misc_RNA (1)...(19): siRNA sense strand
guaucuuacugaaggauuu

SEQ ID NO: 167743 - RNA, 19 nt, Homo sapiens
  misc_RNA (1)...(19): siRNA sense strand
ugucucagauguugugaaa

SEQ ID NO: 167744 - RNA, 19 nt, Homo sapiens
  misc_RNA (1)...(19): siRNA sense strand
gaacauggugauucuagug

SEQ ID NO: 167745 - RNA, 19 nt, Homo sapiens
  misc_RNA (1)...(19): siRNA sense strand
aggcauggcuugugcuauu

SEQ ID NO: 167746 - RNA, 19 nt, Homo sapiens
  misc_RNA (1)...(19): siRNA sense strand
gcuauuggacugucuguga

SEQ ID NO: 167747 - RNA, 19 nt, Homo sapiens
  misc_RNA (1)...(19): siRNA sense strand
ggcauggcuugugcuauua

SEQ ID NO: 167748 - RNA, 19 nt, Homo sapiens
  misc_RNA (1)...(19): siRNA sense strand
caacguaauguggcuauaa

SEQ ID NO: 167749 - RNA, 19 nt, Homo sapiens
  misc_RNA (1)...(19): siRNA sense strand
guaauguggcuauaaugaa

SEQ ID NO: 167750 - RNA, 19 nt, Homo sapiens
  misc_RNA (1)...(19): siRNA sense strand
caccaugguuaagggauua

SEQ ID NO: 167751 - RNA, 19 nt, Homo sapiens
  misc_RNA (1)...(19): siRNA sense strand
gacucuggacccuaaauua

SEQ ID NO: 167752 - RNA, 19 nt, Homo sapiens
  misc_RNA (1)...(19): siRNA sense strand
uggaagugguuguaaucua

SEQ ID NO: 167753 - RNA, 19 nt, Homo sapiens
  misc_RNA (1)...(19): siRNA sense strand
ugccaugguuggauuauug

SEQ ID NO: 167754 - RNA, 19 nt, Homo sapiens
  misc_RNA (1)...(19): siRNA sense strand
caaagauuacuucuggaaa

SEQ ID NO: 167755 - RNA, 19 nt, Homo sapiens
  misc_RNA (1)...(19): siRNA sense strand
gaagcuaauugaggaugau

SEQ ID NO: 167756 - RNA, 19 nt, Homo sapiens
  misc_RNA (1)...(19): siRNA sense strand
ccaccaugguuaagggauu

SEQ ID NO: 167757 - RNA, 19 nt, Homo sapiens
  misc_RNA (1)...(19): siRNA sense strand
gaauguugcugguguugcu

SEQ ID NO: 167758 - RNA, 19 nt, Homo sapiens
  misc_RNA (1)...(19): siRNA sense strand
guaauuggaagugguugua

SEQ ID NO: 167759 - RNA, 19 nt, Homo sapiens
  misc_RNA (1)...(19): siRNA sense strand
ggagaaaugauggaucuuc

SEQ ID NO: 167760 - RNA, 19 nt, Homo sapiens
  misc_RNA (1)...(19): siRNA sense strand
cccacaagcugccaugguu

SEQ ID NO: 167761 - RNA, 19 nt, Homo sapiens
  misc_RNA (1)...(19): siRNA sense strand
guacuucaaagauuacuuc

SEQ ID NO: 167762 - RNA, 19 nt, Homo sapiens
  misc_RNA (1)...(19): siRNA sense strand
aaacugaagggagaaauga

SEQ ID NO: 167763 - RNA, 19 nt, Homo sapiens
  misc_RNA (1)...(19): siRNA sense strand
uaggaacggauucagauaa

SEQ ID NO: 167764 - RNA, 19 nt, Homo sapiens
  misc_RNA (1)...(19): siRNA sense strand
ucaaagauuacuucuggaa

SEQ ID NO: 167765 - RNA, 19 nt, Homo sapiens
  misc_RNA (1)...(19): siRNA sense strand
gcauggcagucuuuucuuu

SEQ ID NO: 167766 - RNA, 19 nt, Homo sapiens
  misc_RNA (1)...(19): siRNA sense strand
aggagcagcuaauugagaa

SEQ ID NO: 167767 - RNA, 19 nt, Homo sapiens
  misc_RNA (1)...(19): siRNA sense strand
guauaccucuugggcuauu

SEQ ID NO: 167768 - RNA, 19 nt, Homo sapiens
  misc_RNA (1)...(19): siRNA sense strand
cguaauguggcuauaauga

SEQ ID NO: 167769 - RNA, 19 nt, Homo sapiens
  misc_RNA (1)...(19): siRNA sense strand
cugaugaacuugcccuugu

SEQ ID NO: 167770 - RNA, 19 nt, Homo sapiens
  misc_RNA (1)...(19): siRNA sense strand
ggagagugcacccaguuuc

SEQ ID NO: 167771 - RNA, 19 nt, Homo sapiens
  misc_RNA (1)...(19): siRNA sense strand
ccuaugaaauuaucaagcu

SEQ ID NO: 167772 - RNA, 19 nt, Homo sapiens
  misc_RNA (1)...(19): siRNA sense strand
ccaguuuccaccaugguua

SEQ ID NO: 167773 - RNA, 19 nt, Homo sapiens
  misc_RNA (1)...(19): siRNA sense strand
gcuaauugaggaugaugaa

SEQ ID NO: 167774 - RNA, 19 nt, Homo sapiens
  misc_RNA (1)...(19): siRNA sense strand
gcggaauggugucucagau

SEQ ID NO: 167775 - RNA, 19 nt, Homo sapiens
  misc_RNA (1)...(19): siRNA sense strand
caaacugaagggagaaaug

SEQ ID NO: 167776 - RNA, 19 nt, Homo sapiens
  misc_RNA (1)...(19): siRNA sense strand
accuguaacucguguaauu

SEQ ID NO: 167777 - RNA, 19 nt, Homo sapiens
  misc_RNA (1)...(19): siRNA sense strand
aaucauuccugccauaguc

SEQ ID NO: 167778 - RNA, 19 nt, Homo sapiens
  misc_RNA (1)...(19): siRNA sense strand
gaaaacucccaguguaaaa

SEQ ID NO: 167779 - RNA, 19 nt, Homo sapiens
  misc_RNA (1)...(19): siRNA sense strand
agaagcuaauugaggauga

SEQ ID NO: 167780 - RNA, 19 nt, Homo sapiens
  misc_RNA (1)...(19): siRNA sense strand
gugcagaaacacuuuggaa

SEQ ID NO: 167781 - RNA, 19 nt, Homo sapiens
  misc_RNA (1)...(19): siRNA sense strand
ccguuuccguuaccuaauu

SEQ ID NO: 167782 - RNA, 19 nt, Homo sapiens
  misc_RNA (1)...(19): siRNA sense strand
gaagugguuguaaucuaga

SEQ ID NO: 167783 - RNA, 19 nt, Homo sapiens
  misc_RNA (1)...(19): siRNA sense strand
ugaugaacuugcccuuguu

SEQ ID NO: 167784 - RNA, 19 nt, Homo sapiens
  misc_RNA (1)...(19): siRNA sense strand
ggugaauguugcugguguu

SEQ ID NO: 167785 - RNA, 19 nt, Homo sapiens
  misc_RNA (1)...(19): siRNA sense strand
caguggauauuuugacaua

SEQ ID NO: 167786 - RNA, 19 nt, Homo sapiens
  misc_RNA (1)...(19): siRNA sense strand
ccaacguaauguggcuaua

SEQ ID NO: 167787 - RNA, 19 nt, Homo sapiens
  misc_RNA (1)...(19): siRNA sense strand
aagcugccaugguuggauu

SEQ ID NO: 167788 - RNA, 19 nt, Homo sapiens
  misc_RNA (1)...(19): siRNA sense strand
gaugaacuugcccuuguug

SEQ ID NO: 167789 - RNA, 19 nt, Homo sapiens
  misc_RNA (1)...(19): siRNA sense strand
aauggugucucagauguug

SEQ ID NO: 167790 - RNA, 19 nt, Homo sapiens
  misc_RNA (1)...(19): siRNA sense strand
gaauggugucucagauguu

SEQ ID NO: 167791 - RNA, 19 nt, Homo sapiens
  misc_RNA (1)...(19): siRNA sense strand
ucuagacucugcccguuuc

SEQ ID NO: 167792 - RNA, 19 nt, Homo sapiens
  misc_RNA (1)...(19): siRNA sense strand
cauuauaguccugauugua

SEQ ID NO: 167793 - RNA, 19 nt, Homo sapiens
  misc_RNA (1)...(19): siRNA sense strand
gaagggagaaaugauggau

SEQ ID NO: 167794 - RNA, 19 nt, Homo sapiens
  misc_RNA (1)...(19): siRNA sense strand
cagauaaggaacacuggaa

SEQ ID NO: 167795 - RNA, 19 nt, Homo sapiens
  misc_RNA (1)...(19): siRNA sense strand
uaaauuaggaacggauuca

SEQ ID NO: 167796 - RNA, 19 nt, Homo sapiens
  misc_RNA (1)...(19): siRNA sense strand
aaugauggaucuucagcau

SEQ ID NO: 167797 - RNA, 19 nt, Homo sapiens
  misc_RNA (1)...(19): siRNA sense strand
ggacaaacugaagggagaa

SEQ ID NO: 167798 - RNA, 19 nt, Homo sapiens
  misc_RNA (1)...(19): siRNA sense strand
ucucagauguugugaaaau

SEQ ID NO: 167799 - RNA, 19 nt, Homo sapiens
  misc_RNA (1)...(19): siRNA sense strand
guaacucguguaauuggaa

SEQ ID NO: 167800 - RNA, 19 nt, Homo sapiens
  misc_RNA (1)...(19): siRNA sense strand
aacguaauguggcuauaau

SEQ ID NO: 167801 - RNA, 19 nt, Homo sapiens
  misc_RNA (1)...(19): siRNA sense strand
ccauuauaguccugauugu

SEQ ID NO: 167802 - RNA, 19 nt, Homo sapiens
  misc_RNA (1)...(19): siRNA sense strand
gguaggauccauuuugaaa

SEQ ID NO: 167803 - RNA, 19 nt, Homo sapiens
  misc_RNA (1)...(19): siRNA sense strand
ggaacggauucagauaagg

SEQ ID NO: 167804 - RNA, 19 nt, Homo sapiens
  misc_RNA (1)...(19): siRNA sense strand
gcccguuuccguuaccuaa

SEQ ID NO: 167805 - RNA, 19 nt, Homo sapiens
  misc_RNA (1)...(19): siRNA sense strand
ggcagucuuuucuuuagua

SEQ ID NO: 167806 - RNA, 19 nt, Homo sapiens
  misc_RNA (1)...(19): siRNA sense strand
ucaagaagagugcagaaac

SEQ ID NO: 167807 - RNA, 19 nt, Homo sapiens
  misc_RNA (1)...(19): siRNA sense strand
ccuuguugauguugcauug

SEQ ID NO: 167808 - RNA, 19 nt, Homo sapiens
  misc_RNA (1)...(19): siRNA sense strand
ugugauggaucugguagga

SEQ ID NO: 167809 - RNA, 19 nt, Homo sapiens
  misc_RNA (1)...(19): siRNA sense strand
uuccugccauaguccauua

SEQ ID NO: 167810 - RNA, 19 nt, Homo sapiens
  misc_RNA (1)...(19): siRNA sense strand
gaaggauuuggcugaugaa

SEQ ID NO: 167811 - RNA, 19 nt, Homo sapiens
  misc_RNA (1)...(19): siRNA sense strand
uuaggaacggauucagaua

SEQ ID NO: 167812 - RNA, 19 nt, Homo sapiens
  misc_RNA (1)...(19): siRNA sense strand
guaggcauggcuugugcua

SEQ ID NO: 167813 - RNA, 19 nt, Homo sapiens
  misc_RNA (1)...(19): siRNA sense strand
acauauauagucuggaaga

SEQ ID NO: 167814 - RNA, 19 nt, Homo sapiens
  misc_RNA (1)...(19): siRNA sense strand
agggagaaaugauggaucu

SEQ ID NO: 167815 - RNA, 19 nt, Homo sapiens
  misc_RNA (1)...(19): siRNA sense strand
gcccugguccaacguaaug

SEQ ID NO: 167816 - RNA, 19 nt, Homo sapiens
  misc_RNA (1)...(19): siRNA sense strand
gauguugcauuggacaaac

SEQ ID NO: 167817 - RNA, 19 nt, Homo sapiens
  misc_RNA (1)...(19): siRNA sense strand
cauauauagucuggaagau

SEQ ID NO: 167818 - RNA, 19 nt, Homo sapiens
  misc_RNA (1)...(19): siRNA sense strand
gucaaggagcagcuaauug

SEQ ID NO: 167819 - RNA, 19 nt, Homo sapiens
  misc_RNA (1)...(19): siRNA sense strand
gguuaagggauuauaugga

SEQ ID NO: 167820 - RNA, 19 nt, Homo sapiens
  misc_RNA (1)...(19): siRNA sense strand
cuauuggacugucugugau

SEQ ID NO: 167821 - RNA, 19 nt, Homo sapiens
  misc_RNA (1)...(19): siRNA sense strand
aggaacggauucagauaag

SEQ ID NO: 167822 - RNA, 19 nt, Homo sapiens
  misc_RNA (1)...(19): siRNA sense strand
acucugcccguuuccguua

SEQ ID NO: 167823 - RNA, 19 nt, Homo sapiens
  misc_RNA (1)...(19): siRNA sense strand
gauaaggaacacuggaaaa

SEQ ID NO: 167824 - RNA, 19 nt, Homo sapiens
  misc_RNA (1)...(19): siRNA sense strand
caaagugccuaugaaauua

SEQ ID NO: 167825 - RNA, 19 nt, Homo sapiens
  misc_RNA (1)...(19): siRNA sense strand
gcagaaacacuuuggaaua

SEQ ID NO: 167826 - RNA, 19 nt, Homo sapiens
  misc_RNA (1)...(19): siRNA sense strand
ggauuuggcugaugaacuu

SEQ ID NO: 167827 - RNA, 19 nt, Homo sapiens
  misc_RNA (1)...(19): siRNA sense strand
gaaacacuuuggaauauuc

SEQ ID NO: 167828 - RNA, 19 nt, Homo sapiens
  misc_RNA (1)...(19): siRNA sense strand
ggaagugguuguaaucuag

SEQ ID NO: 167829 - RNA, 19 nt, Homo sapiens
  misc_RNA (1)...(19): siRNA sense strand
guuaagggauuauauggaa

SEQ ID NO: 167830 - RNA, 19 nt, Homo sapiens
  misc_RNA (1)...(19): siRNA sense strand
cagaaacacuuuggaauau

SEQ ID NO: 167831 - RNA, 19 nt, Homo sapiens
  misc_RNA (1)...(19): siRNA sense strand
ugaagacucuggacccuaa

SEQ ID NO: 167832 - RNA, 19 nt, Homo sapiens
  misc_RNA (1)...(19): siRNA sense strand
ggaauggugucucagaugu

SEQ ID NO: 167833 - RNA, 19 nt, Homo sapiens
  misc_RNA (1)...(19): siRNA sense strand
ugacauauauagucuggaa

SEQ ID NO: 167834 - RNA, 19 nt, Homo sapiens
  misc_RNA (1)...(19): siRNA sense strand
ucaaagugccuaugaaauu

SEQ ID NO: 167835 - RNA, 19 nt, Homo sapiens
  misc_RNA (1)...(19): siRNA sense strand
caagaagagugcagaaaca

SEQ ID NO: 167836 - RNA, 19 nt, Homo sapiens
  misc_RNA (1)...(19): siRNA sense strand
gagaaaugauggaucuuca

SEQ ID NO: 167837 - RNA, 19 nt, Homo sapiens
  misc_RNA (1)...(19): siRNA sense strand
ugaaggauuuggcugauga

SEQ ID NO: 167838 - RNA, 19 nt, Homo sapiens
  misc_RNA (1)...(19): siRNA sense strand
gaugaaaacucccagugua

SEQ ID NO: 167839 - RNA, 19 nt, Homo sapiens
  misc_RNA (1)...(19): siRNA sense strand
gaacuugcccuuguugaug

SEQ ID NO: 167840 - RNA, 19 nt, Homo sapiens
  misc_RNA (1)...(19): siRNA sense strand
gaacggauucagauaagga

SEQ ID NO: 167841 - RNA, 19 nt, Homo sapiens
  misc_RNA (1)...(19): siRNA sense strand
caguaucccuugugucuug

SEQ ID NO: 167842 - RNA, 19 nt, Homo sapiens
  misc_RNA (1)...(19): siRNA sense strand
guaucuuacugaaggauuu

SEQ ID NO: 167843 - RNA, 19 nt, Homo sapiens
  misc_RNA (1)...(19): siRNA sense strand
ugucucagauguugugaaa

SEQ ID NO: 167844 - RNA, 19 nt, Homo sapiens
  misc_RNA (1)...(19): siRNA sense strand
gaacauggugauucuagug

SEQ ID NO: 167845 - RNA, 19 nt, Homo sapiens
  misc_RNA (1)...(19): siRNA sense strand
aggcauggcuugugcuauu

SEQ ID NO: 167846 - RNA, 19 nt, Homo sapiens
  misc_RNA (1)...(19): siRNA sense strand
gcuauuggacugucuguga

SEQ ID NO: 167847 - RNA, 19 nt, Homo sapiens
  misc_RNA (1)...(19): siRNA sense strand
ggcauggcuugugcuauua

SEQ ID NO: 167848 - RNA, 19 nt, Homo sapiens
  misc_RNA (1)...(19): siRNA sense strand
caacguaauguggcuauaa

SEQ ID NO: 167849 - RNA, 19 nt, Homo sapiens
  misc_RNA (1)...(19): siRNA sense strand
guaauguggcuauaaugaa

SEQ ID NO: 167850 - RNA, 19 nt, Homo sapiens
  misc_RNA (1)...(19): siRNA sense strand
caccaugguuaagggauua

SEQ ID NO: 167851 - RNA, 19 nt, Homo sapiens
  misc_RNA (1)...(19): siRNA sense strand
gacucuggacccuaaauua

SEQ ID NO: 167852 - RNA, 19 nt, Homo sapiens
  misc_RNA (1)...(19): siRNA sense strand
uggaagugguuguaaucua

SEQ ID NO: 167853 - RNA, 19 nt, Homo sapiens
  misc_RNA (1)...(19): siRNA sense strand
ugccaugguuggauuauug

SEQ ID NO: 167854 - RNA, 19 nt, Homo sapiens
  misc_RNA (1)...(19): siRNA sense strand
caaagauuacuucuggaaa

SEQ ID NO: 167855 - RNA, 19 nt, Homo sapiens
  misc_RNA (1)...(19): siRNA sense strand
gaagcuaauugaggaugau

SEQ ID NO: 167856 - RNA, 19 nt, Homo sapiens
  misc_RNA (1)...(19): siRNA sense strand
ccaccaugguuaagggauu

SEQ ID NO: 167857 - RNA, 19 nt, Homo sapiens
  misc_RNA (1)...(19): siRNA sense strand
gaauguugcugguguugcu

SEQ ID NO: 167858 - RNA, 19 nt, Homo sapiens
  misc_RNA (1)...(19): siRNA sense strand
guaauuggaagugguugua

SEQ ID NO: 167859 - RNA, 19 nt, Homo sapiens
  misc_RNA (1)...(19): siRNA sense strand
ggagaaaugauggaucuuc

SEQ ID NO: 167860 - RNA, 19 nt, Homo sapiens
  misc_RNA (1)...(19): siRNA sense strand
cccacaagcugccaugguu

SEQ ID NO: 167861 - RNA, 19 nt, Homo sapiens
  misc_RNA (1)...(19): siRNA sense strand
guacuucaaagauuacuuc

SEQ ID NO: 167862 - RNA, 19 nt, Homo sapiens
  misc_RNA (1)...(19): siRNA sense strand
aaacugaagggagaaauga

SEQ ID NO: 167863 - RNA, 19 nt, Homo sapiens
  misc_RNA (1)...(19): siRNA sense strand
uaggaacggauucagauaa

SEQ ID NO: 167864 - RNA, 19 nt, Homo sapiens
  misc_RNA (1)...(19): siRNA sense strand
ucaaagauuacuucuggaa

SEQ ID NO: 167865 - RNA, 19 nt, Homo sapiens
  misc_RNA (1)...(19): siRNA sense strand
gcauggcagucuuuucuuu

SEQ ID NO: 167866 - RNA, 19 nt, Homo sapiens
  misc_RNA (1)...(19): siRNA sense strand
aggagcagcuaauugagaa

SEQ ID NO: 167867 - RNA, 19 nt, Homo sapiens
  misc_RNA (1)...(19): siRNA sense strand
guauaccucuugggcuauu

SEQ ID NO: 167868 - RNA, 19 nt, Homo sapiens
  misc_RNA (1)...(19): siRNA sense strand
cguaauguggcuauaauga

SEQ ID NO: 167869 - RNA, 19 nt, Homo sapiens
  misc_RNA (1)...(19): siRNA sense strand
cugaugaacuugcccuugu

SEQ ID NO: 167870 - RNA, 19 nt, Homo sapiens
  misc_RNA (1)...(19): siRNA sense strand
ggagagugcacccaguuuc

SEQ ID NO: 167871 - RNA, 19 nt, Homo sapiens
  misc_RNA (1)...(19): siRNA sense strand
ccuaugaaauuaucaagcu

SEQ ID NO: 167872 - RNA, 19 nt, Homo sapiens
  misc_RNA (1)...(19): siRNA sense strand
ccaguuuccaccaugguua

SEQ ID NO: 167873 - RNA, 19 nt, Homo sapiens
  misc_RNA (1)...(19): siRNA sense strand
gcuaauugaggaugaugaa

SEQ ID NO: 167874 - RNA, 19 nt, Homo sapiens
  misc_RNA (1)...(19): siRNA sense strand
gcggaauggugucucagau

SEQ ID NO: 167875 - RNA, 19 nt, Homo sapiens
  misc_RNA (1)...(19): siRNA sense strand
caaacugaagggagaaaug

SEQ ID NO: 167876 - RNA, 19 nt, Homo sapiens
  misc_RNA (1)...(19): siRNA sense strand
accuguaacucguguaauu

SEQ ID NO: 167877 - RNA, 19 nt, Homo sapiens
  misc_RNA (1)...(19): siRNA sense strand
aaucauuccugccauaguc

SEQ ID NO: 167878 - RNA, 19 nt, Homo sapiens
  misc_RNA (1)...(19): siRNA sense strand
gaaaacucccaguguaaaa

SEQ ID NO: 167879 - RNA, 19 nt, Homo sapiens
  misc_RNA (1)...(19): siRNA sense strand
agaagcuaauugaggauga

SEQ ID NO: 167880 - RNA, 19 nt, Homo sapiens
  misc_RNA (1)...(19): siRNA sense strand
gugcagaaacacuuuggaa

SEQ ID NO: 167881 - RNA, 19 nt, Homo sapiens
  misc_RNA (1)...(19): siRNA sense strand
ccguuuccguuaccuaauu

SEQ ID NO: 167882 - RNA, 19 nt, Homo sapiens
  misc_RNA (1)...(19): siRNA sense strand
gaagugguuguaaucuaga

SEQ ID NO: 167883 - RNA, 19 nt, Homo sapiens
  misc_RNA (1)...(19): siRNA sense strand
ugaugaacuugcccuuguu

SEQ ID NO: 167884 - RNA, 19 nt, Homo sapiens
  misc_RNA (1)...(19): siRNA sense strand
ggugaauguugcugguguu

SEQ ID NO: 167885 - RNA, 19 nt, Homo sapiens
  misc_RNA (1)...(19): siRNA sense strand
caguggauauuuugacaua

SEQ ID NO: 167886 - RNA, 19 nt, Homo sapiens
  misc_RNA (1)...(19): siRNA sense strand
ccaacguaauguggcuaua

SEQ ID NO: 167887 - RNA, 19 nt, Homo sapiens
  misc_RNA (1)...(19): siRNA sense strand
aagcugccaugguuggauu

SEQ ID NO: 167888 - RNA, 19 nt, Homo sapiens
  misc_RNA (1)...(19): siRNA sense strand
gaugaacuugcccuuguug

SEQ ID NO: 167889 - RNA, 19 nt, Homo sapiens
  misc_RNA (1)...(19): siRNA sense strand
aauggugucucagauguug

SEQ ID NO: 167890 - RNA, 19 nt, Homo sapiens
  misc_RNA (1)...(19): siRNA sense strand
gaauggugucucagauguu

SEQ ID NO: 167891 - RNA, 19 nt, Homo sapiens
  misc_RNA (1)...(19): siRNA sense strand
ucuagacucugcccguuuc

SEQ ID NO: 167892 - RNA, 19 nt, Homo sapiens
  misc_RNA (1)...(19): siRNA sense strand
cauuauaguccugauugua

SEQ ID NO: 167893 - RNA, 19 nt, Homo sapiens
  misc_RNA (1)...(19): siRNA sense strand
gaagggagaaaugauggau

SEQ ID NO: 167894 - RNA, 19 nt, Homo sapiens
  misc_RNA (1)...(19): siRNA sense strand
cagauaaggaacacuggaa

SEQ ID NO: 167895 - RNA, 19 nt, Homo sapiens
  misc_RNA (1)...(19): siRNA sense strand
uaaauuaggaacggauuca

SEQ ID NO: 167896 - RNA, 19 nt, Homo sapiens
  misc_RNA (1)...(19): siRNA sense strand
aaugauggaucuucagcau

SEQ ID NO: 167897 - RNA, 19 nt, Homo sapiens
  misc_RNA (1)...(19): siRNA sense strand
ggacaaacugaagggagaa

SEQ ID NO: 167898 - RNA, 19 nt, Homo sapiens
  misc_RNA (1)...(19): siRNA sense strand
ucucagauguugugaaaau

SEQ ID NO: 167899 - RNA, 19 nt, Homo sapiens
  misc_RNA (1)...(19): siRNA sense strand
guaacucguguaauuggaa

SEQ ID NO: 167900 - RNA, 19 nt, Homo sapiens
  misc_RNA (1)...(19): siRNA sense strand
aacguaauguggcuauaau

SEQ ID NO: 167901 - RNA, 19 nt, Homo sapiens
  misc_RNA (1)...(19): siRNA sense strand
ccauuauaguccugauugu

SEQ ID NO: 167902 - RNA, 19 nt, Homo sapiens
  misc_RNA (1)...(19): siRNA sense strand
gguaggauccauuuugaaa

SEQ ID NO: 167903 - RNA, 19 nt, Homo sapiens
  misc_RNA (1)...(19): siRNA sense strand
ggaacggauucagauaagg

SEQ ID NO: 167904 - RNA, 19 nt, Homo sapiens
  misc_RNA (1)...(19): siRNA sense strand
gcccguuuccguuaccuaa

SEQ ID NO: 167905 - RNA, 19 nt, Homo sapiens
  misc_RNA (1)...(19): siRNA sense strand
ggcagucuuuucuuuagua

SEQ ID NO: 167906 - RNA, 19 nt, Homo sapiens
  misc_RNA (1)...(19): siRNA sense strand
ucaagaagagugcagaaac

SEQ ID NO: 167907 - RNA, 19 nt, Homo sapiens
  misc_RNA (1)...(19): siRNA sense strand
ccuuguugauguugcauug

SEQ ID NO: 167908 - RNA, 19 nt, Homo sapiens
  misc_RNA (1)...(19): siRNA sense strand
ugugauggaucugguagga

SEQ ID NO: 167909 - RNA, 19 nt, Homo sapiens
  misc_RNA (1)...(19): siRNA sense strand
uuccugccauaguccauua

SEQ ID NO: 167910 - RNA, 19 nt, Homo sapiens
  misc_RNA (1)...(19): siRNA sense strand
gaaggauuuggcugaugaa

SEQ ID NO: 167911 - RNA, 19 nt, Homo sapiens
  misc_RNA (1)...(19): siRNA sense strand
uuaggaacggauucagaua

SEQ ID NO: 167912 - RNA, 19 nt, Homo sapiens
  misc_RNA (1)...(19): siRNA sense strand
guaggcauggcuugugcua

SEQ ID NO: 167913 - RNA, 19 nt, Homo sapiens
  misc_RNA (1)...(19): siRNA sense strand
acauauauagucuggaaga

SEQ ID NO: 167914 - RNA, 19 nt, Homo sapiens
  misc_RNA (1)...(19): siRNA sense strand
agggagaaaugauggaucu

SEQ ID NO: 167915 - RNA, 19 nt, Homo sapiens
  misc_RNA (1)...(19): siRNA sense strand
gcccugguccaacguaaug

SEQ ID NO: 167916 - RNA, 19 nt, Homo sapiens
  misc_RNA (1)...(19): siRNA sense strand
gauguugcauuggacaaac

SEQ ID NO: 167917 - RNA, 19 nt, Homo sapiens
  misc_RNA (1)...(19): siRNA sense strand
cauauauagucuggaagau

SEQ ID NO: 167918 - RNA, 19 nt, Homo sapiens
  misc_RNA (1)...(19): siRNA sense strand
gucaaggagcagcuaauug

SEQ ID NO: 167919 - RNA, 19 nt, Homo sapiens
  misc_RNA (1)...(19): siRNA sense strand
gguuaagggauuauaugga

SEQ ID NO: 167920 - RNA, 19 nt, Homo sapiens
  misc_RNA (1)...(19): siRNA sense strand
cuauuggacugucugugau

SEQ ID NO: 167921 - RNA, 19 nt, Homo sapiens
  misc_RNA (1)...(19): siRNA sense strand
aggaacggauucagauaag

SEQ ID NO: 167922 - RNA, 19 nt, Homo sapiens
  misc_RNA (1)...(19): siRNA sense strand
acucugcccguuuccguua

SEQ ID NO: 167923 - RNA, 19 nt, Homo sapiens
  misc_RNA (1)...(19): siRNA sense strand
gauaaggaacacuggaaaa

SEQ ID NO: 167924 - RNA, 19 nt, Homo sapiens
  misc_RNA (1)...(19): siRNA sense strand
gaucaaauguguggccuuu

SEQ ID NO: 167925 - RNA, 19 nt, Homo sapiens
  misc_RNA (1)...(19): siRNA sense strand
gacggugacuucaagauca

SEQ ID NO: 167926 - RNA, 19 nt, Homo sapiens
  misc_RNA (1)...(19): siRNA sense strand
ccagcaaccugaaucucaa

SEQ ID NO: 167927 - RNA, 19 nt, Homo sapiens
  misc_RNA (1)...(19): siRNA sense strand
gcugccagauggauacgaa

SEQ ID NO: 167928 - RNA, 19 nt, Homo sapiens
  misc_RNA (1)...(19): siRNA sense strand
ccagauggauacgaauuca

SEQ ID NO: 167929 - RNA, 19 nt, Homo sapiens
  misc_RNA (1)...(19): siRNA sense strand
gcaaagacagcaacaaccu

SEQ ID NO: 167930 - RNA, 19 nt, Homo sapiens
  misc_RNA (1)...(19): siRNA sense strand
caaccugaaucucaaaccu

SEQ ID NO: 167931 - RNA, 19 nt, Homo sapiens
  misc_RNA (1)...(19): siRNA sense strand
gccagcaaccugaaucuca

SEQ ID NO: 167932 - RNA, 19 nt, Homo sapiens
  misc_RNA (1)...(19): siRNA sense strand
gggcaaagacagcaacaac

SEQ ID NO: 167933 - RNA, 19 nt, Homo sapiens
  misc_RNA (1)...(19): siRNA sense strand
cuaagagcuucgugcugaa

SEQ ID NO: 167934 - RNA, 19 nt, Homo sapiens
  misc_RNA (1)...(19): siRNA sense strand
ucaagcugccagauggaua

SEQ ID NO: 167935 - RNA, 19 nt, Homo sapiens
  misc_RNA (1)...(19): siRNA sense strand
cuucaacccucgcuucaac

SEQ ID NO: 167936 - RNA, 19 nt, Homo sapiens
  misc_RNA (1)...(19): siRNA sense strand
ugacuucaagaucaaaugu

SEQ ID NO: 167937 - RNA, 19 nt, Homo sapiens
  misc_RNA (1)...(19): siRNA sense strand
acuucaagaucaaaugugu

SEQ ID NO: 167938 - RNA, 19 nt, Homo sapiens
  misc_RNA (1)...(19): siRNA sense strand
uggaggccaucaacuacau

SEQ ID NO: 167939 - RNA, 19 nt, Homo sapiens
  misc_RNA (1)...(19): siRNA sense strand
ugacggugacuucaagauc

SEQ ID NO: 167940 - RNA, 19 nt, Homo sapiens
  misc_RNA (1)...(19): siRNA sense strand
gccagcagguuccauguaa

SEQ ID NO: 167941 - RNA, 19 nt, Homo sapiens
  misc_RNA (1)...(19): siRNA sense strand
cgucggagguggucuucaa

SEQ ID NO: 167942 - RNA, 19 nt, Homo sapiens
  misc_RNA (1)...(19): siRNA sense strand
ccagcagguuccauguaaa

SEQ ID NO: 167943 - RNA, 19 nt, Homo sapiens
  misc_RNA (1)...(19): siRNA sense strand
gagaauucgcggcuugguu

SEQ ID NO: 167944 - RNA, 19 nt, Homo sapiens
  misc_RNA (1)...(19): siRNA sense strand
guaaggaugucuuccagaa

SEQ ID NO: 167945 - RNA, 19 nt, Homo sapiens
  misc_RNA (1)...(19): siRNA sense strand
ccaaugcccucuuuauucu

SEQ ID NO: 167946 - RNA, 19 nt, Homo sapiens
  misc_RNA (1)...(19): siRNA sense strand
agaagaagcugggcuguca

SEQ ID NO: 167947 - RNA, 19 nt, Homo sapiens
  misc_RNA (1)...(19): siRNA sense strand
guucugcacuggaaacaug

SEQ ID NO: 167948 - RNA, 19 nt, Homo sapiens
  misc_RNA (1)...(19): siRNA sense strand
caacgccaccugugccaua

SEQ ID NO: 167949 - RNA, 19 nt, Homo sapiens
  misc_RNA (1)...(19): siRNA sense strand
gccaaugcccucuuuauuc

SEQ ID NO: 167950 - RNA, 19 nt, Homo sapiens
  misc_RNA (1)...(19): siRNA sense strand
ccaacaaccuggacaagcu

SEQ ID NO: 167951 - RNA, 19 nt, Homo sapiens
  misc_RNA (1)...(19): siRNA sense strand
gcagaucaucgccguguug

SEQ ID NO: 167952 - RNA, 19 nt, Homo sapiens
  misc_RNA (1)...(19): siRNA sense strand
acaacaaccucaugaacca

SEQ ID NO: 167953 - RNA, 19 nt, Homo sapiens
  misc_RNA (1)...(19): siRNA sense strand
ggaaguauaagcagaucau

SEQ ID NO: 167954 - RNA, 19 nt, Homo sapiens
  misc_RNA (1)...(19): siRNA sense strand
caacaaccuggacaagcua

SEQ ID NO: 167955 - RNA, 19 nt, Homo sapiens
  misc_RNA (1)...(19): siRNA sense strand
gcaccucccugggcaacau

SEQ ID NO: 167956 - RNA, 19 nt, Homo sapiens
  misc_RNA (1)...(19): siRNA sense strand
ggucuuggcggcaggaguu

SEQ ID NO: 167957 - RNA, 19 nt, Homo sapiens
  misc_RNA (1)...(19): siRNA sense strand
gcacggagaaggccaagcu

SEQ ID NO: 167958 - RNA, 19 nt, Homo sapiens
  misc_RNA (1)...(19): siRNA sense strand
gcccugacaccucggguaa

SEQ ID NO: 167959 - RNA, 19 nt, Homo sapiens
  misc_RNA (1)...(19): siRNA sense strand
caacuggcacagcucaaug

SEQ ID NO: 167960 - RNA, 19 nt, Homo sapiens
  misc_RNA (1)...(19): siRNA sense strand
gaagcugggcugucaacuc

SEQ ID NO: 167961 - RNA, 19 nt, Homo sapiens
  misc_RNA (1)...(19): siRNA sense strand
cagugccaaugcccucuuu

SEQ ID NO: 167962 - RNA, 19 nt, Homo sapiens
  misc_RNA (1)...(19): siRNA sense strand
cccucuuuauucucuauua

SEQ ID NO: 167963 - RNA, 19 nt, Homo sapiens
  misc_RNA (1)...(19): siRNA sense strand
gaagaagcugggcugucaa

SEQ ID NO: 167964 - RNA, 19 nt, Homo sapiens
  misc_RNA (1)...(19): siRNA sense strand
ccacccaugucacaacaac

SEQ ID NO: 167965 - RNA, 19 nt, Homo sapiens
  misc_RNA (1)...(19): siRNA sense strand
ugccaaugcccucuuuauu

SEQ ID NO: 167966 - RNA, 19 nt, Homo sapiens
  misc_RNA (1)...(19): siRNA sense strand
gugccaaugcccucuuuau

SEQ ID NO: 167967 - RNA, 19 nt, Homo sapiens
  misc_RNA (1)...(19): siRNA sense strand
ucacaacaaccucaugaac

SEQ ID NO: 167968 - RNA, 19 nt, Homo sapiens
  misc_RNA (1)...(19): siRNA sense strand
ugucacaacaaccucauga

SEQ ID NO: 167969 - RNA, 19 nt, Homo sapiens
  misc_RNA (1)...(19): siRNA sense strand
guggagcuguaccgcauag

SEQ ID NO: 167970 - RNA, 19 nt, Homo sapiens
  misc_RNA (1)...(19): siRNA sense strand
caaccuggacaagcuaugu

SEQ ID NO: 167971 - RNA, 19 nt, Homo sapiens
  misc_RNA (1)...(19): siRNA sense strand
ggagcuguaccgcauaguc

SEQ ID NO: 167972 - RNA, 19 nt, Homo sapiens
  misc_RNA (1)...(19): siRNA sense strand
ugcgaggccuccuuagcaa

SEQ ID NO: 167973 - RNA, 19 nt, Homo sapiens
  misc_RNA (1)...(19): siRNA sense strand
gaaauuagaugcuacauug

SEQ ID NO: 167974 - RNA, 19 nt, Homo sapiens
  misc_RNA (1)...(19): siRNA sense strand
ccacaccgcucaaauguua

SEQ ID NO: 167975 - RNA, 19 nt, Homo sapiens
  misc_RNA (1)...(19): siRNA sense strand
ggaaguccaugcuccauua

SEQ ID NO: 167976 - RNA, 19 nt, Homo sapiens
  misc_RNA (1)...(19): siRNA sense strand
gcagagauacgacuugaua

SEQ ID NO: 167977 - RNA, 19 nt, Homo sapiens
  misc_RNA (1)...(19): siRNA sense strand
ggacugcacagguuauuua

SEQ ID NO: 167978 - RNA, 19 nt, Homo sapiens
  misc_RNA (1)...(19): siRNA sense strand
gaugaagacucuccuaaau

SEQ ID NO: 167979 - RNA, 19 nt, Homo sapiens
  misc_RNA (1)...(19): siRNA sense strand
ccagagaucuugaauuugu

SEQ ID NO: 167980 - RNA, 19 nt, Homo sapiens
  misc_RNA (1)...(19): siRNA sense strand
gaauuugucugcugauuuc

SEQ ID NO: 167981 - RNA, 19 nt, Homo sapiens
  misc_RNA (1)...(19): siRNA sense strand
gagaauugcugaucuucaa

SEQ ID NO: 167982 - RNA, 19 nt, Homo sapiens
  misc_RNA (1)...(19): siRNA sense strand
gaaagagacacaucuaaga

SEQ ID NO: 167983 - RNA, 19 nt, Homo sapiens
  misc_RNA (1)...(19): siRNA sense strand
caacaugacuugcgacuac

SEQ ID NO: 167984 - RNA, 19 nt, Homo sapiens
  misc_RNA (1)...(19): siRNA sense strand
ggaagaacuuagaggcuuu

SEQ ID NO: 167985 - RNA, 19 nt, Homo sapiens
  misc_RNA (1)...(19): siRNA sense strand
gagaauggauuaaagaaac

SEQ ID NO: 167986 - RNA, 19 nt, Homo sapiens
  misc_RNA (1)...(19): siRNA sense strand
cuccagagaucuugaauuu

SEQ ID NO: 167987 - RNA, 19 nt, Homo sapiens
  misc_RNA (1)...(19): siRNA sense strand
gcacugaaacuguaauaga

SEQ ID NO: 167988 - RNA, 19 nt, Homo sapiens
  misc_RNA (1)...(19): siRNA sense strand
gaagaggacuuagauaaaa

SEQ ID NO: 167989 - RNA, 19 nt, Homo sapiens
  misc_RNA (1)...(19): siRNA sense strand
gaaaccuucuacccugaua

SEQ ID NO: 167990 - RNA, 19 nt, Homo sapiens
  misc_RNA (1)...(19): siRNA sense strand
gaacaaaacguuuccuuaa

SEQ ID NO: 167991 - RNA, 19 nt, Homo sapiens
  misc_RNA (1)...(19): siRNA sense strand
ugacaaguauccuuugcua

SEQ ID NO: 167992 - RNA, 19 nt, Homo sapiens
  misc_RNA (1)...(19): siRNA sense strand
ucaaguaaauagccagaaa

SEQ ID NO: 167993 - RNA, 19 nt, Homo sapiens
  misc_RNA (1)...(19): siRNA sense strand
cagaagaggacuuagauaa

SEQ ID NO: 167994 - RNA, 19 nt, Homo sapiens
  misc_RNA (1)...(19): siRNA sense strand
guauguauguggugacaaa

SEQ ID NO: 167995 - RNA, 19 nt, Homo sapiens
  misc_RNA (1)...(19): siRNA sense strand
agaauuggcucccauuguu

SEQ ID NO: 167996 - RNA, 19 nt, Homo sapiens
  misc_RNA (1)...(19): siRNA sense strand
gcaaagauacacuucauca

SEQ ID NO: 167997 - RNA, 19 nt, Homo sapiens
  misc_RNA (1)...(19): siRNA sense strand
ggaaaauucugugggauua

SEQ ID NO: 167998 - RNA, 19 nt, Homo sapiens
  misc_RNA (1)...(19): siRNA sense strand
caaauaauguugagguucu

SEQ ID NO: 167999 - RNA, 19 nt, Homo sapiens
  misc_RNA (1)...(19): siRNA sense strand
gcaaguaguggaacaaaug

SEQ ID NO: 168000 - RNA, 19 nt, Homo sapiens
  misc_RNA (1)...(19): siRNA sense strand
gcuacaagcuacacuuuag

SEQ ID NO: 168001 - RNA, 19 nt, Homo sapiens
  misc_RNA (1)...(19): siRNA sense strand
gcauuuaccaggcaacuuu

SEQ ID NO: 168002 - RNA, 19 nt, Homo sapiens
  misc_RNA (1)...(19): siRNA sense strand
gcacaaagcagagauacga

SEQ ID NO: 168003 - RNA, 19 nt, Homo sapiens
  misc_RNA (1)...(19): siRNA sense strand
gaaacgagaauggauuaaa

SEQ ID NO: 168004 - RNA, 19 nt, Homo sapiens
  misc_RNA (1)...(19): siRNA sense strand
gaggacugcuucaaauuuc

SEQ ID NO: 168005 - RNA, 19 nt, Homo sapiens
  misc_RNA (1)...(19): siRNA sense strand
cagaagacacugagaauug

SEQ ID NO: 168006 - RNA, 19 nt, Homo sapiens
  misc_RNA (1)...(19): siRNA sense strand
gagaaagagacacaucuaa

SEQ ID NO: 168007 - RNA, 19 nt, Homo sapiens
  misc_RNA (1)...(19): siRNA sense strand
gaaugaggacugcuucaaa

SEQ ID NO: 168008 - RNA, 19 nt, Homo sapiens
  misc_RNA (1)...(19): siRNA sense strand
ggagaaaaguucccucaaa

SEQ ID NO: 168009 - RNA, 19 nt, Homo sapiens
  misc_RNA (1)...(19): siRNA sense strand
gaaagcacccucuggaaca

SEQ ID NO: 168010 - RNA, 19 nt, Homo sapiens
  misc_RNA (1)...(19): siRNA sense strand
ugaagacucuccuaaaucu

SEQ ID NO: 168011 - RNA, 19 nt, Homo sapiens
  misc_RNA (1)...(19): siRNA sense strand
guauggagcucguaaaauu

SEQ ID NO: 168012 - RNA, 19 nt, Homo sapiens
  misc_RNA (1)...(19): siRNA sense strand
gaacaggccgugguacuga

SEQ ID NO: 168013 - RNA, 19 nt, Homo sapiens
  misc_RNA (1)...(19): siRNA sense strand
ggcaguggcugucauuguu

SEQ ID NO: 168014 - RNA, 19 nt, Homo sapiens
  misc_RNA (1)...(19): siRNA sense strand
ggagaaagagacacaucua

SEQ ID NO: 168015 - RNA, 19 nt, Homo sapiens
  misc_RNA (1)...(19): siRNA sense strand
gauuugaaguguguaacua

SEQ ID NO: 168016 - RNA, 19 nt, Homo sapiens
  misc_RNA (1)...(19): siRNA sense strand
ggaagccuuuacccauuaa

SEQ ID NO: 168017 - RNA, 19 nt, Homo sapiens
  misc_RNA (1)...(19): siRNA sense strand
gaaaacaggucccguucuu

SEQ ID NO: 168018 - RNA, 19 nt, Homo sapiens
  misc_RNA (1)...(19): siRNA sense strand
cauuauaccuaaaguggaa

SEQ ID NO: 168019 - RNA, 19 nt, Homo sapiens
  misc_RNA (1)...(19): siRNA sense strand
ggagggugguccuuuacaa

SEQ ID NO: 168020 - RNA, 19 nt, Homo sapiens
  misc_RNA (1)...(19): siRNA sense strand
gaggauacuucugcagauu

SEQ ID NO: 168021 - RNA, 19 nt, Homo sapiens
  misc_RNA (1)...(19): siRNA sense strand
gauacgacuugauaagaau

SEQ ID NO: 168022 - RNA, 19 nt, Homo sapiens
  misc_RNA (1)...(19): siRNA sense strand
uggaagccuuuacccauua

SEQ ID NO: 168023 - RNA, 19 nt, Homo sapiens
  misc_RNA (1)...(19): siRNA sense strand
gcuuccaaaucaagaaaua

SEQ ID NO: 168024 - RNA, 19 nt, Homo sapiens
  misc_RNA (1)...(19): siRNA sense strand
cgaucacaaucaacaauuu

SEQ ID NO: 168025 - RNA, 19 nt, Homo sapiens
  misc_RNA (1)...(19): siRNA sense strand
agauauagcugcagaagag

SEQ ID NO: 168026 - RNA, 19 nt, Homo sapiens
  misc_RNA (1)...(19): siRNA sense strand
caucauugaggaagaaaua

SEQ ID NO: 168027 - RNA, 19 nt, Homo sapiens
  misc_RNA (1)...(19): siRNA sense strand
gcagugcucuuaaaacauu

SEQ ID NO: 168028 - RNA, 19 nt, Homo sapiens
  misc_RNA (1)...(19): siRNA sense strand
aaacgagaauggauuaaag

SEQ ID NO: 168029 - RNA, 19 nt, Homo sapiens
  misc_RNA (1)...(19): siRNA sense strand
caaguuaaauccauacacu

SEQ ID NO: 168030 - RNA, 19 nt, Homo sapiens
  misc_RNA (1)...(19): siRNA sense strand
cacugaaacuguaauagaa

SEQ ID NO: 168031 - RNA, 19 nt, Homo sapiens
  misc_RNA (1)...(19): siRNA sense strand
gcacagguuauuuacauug

SEQ ID NO: 168032 - RNA, 19 nt, Homo sapiens
  misc_RNA (1)...(19): siRNA sense strand
uugcugaucuucaagguaa

SEQ ID NO: 168033 - RNA, 19 nt, Homo sapiens
  misc_RNA (1)...(19): siRNA sense strand
ggaaauuagaugcuacauu

SEQ ID NO: 168034 - RNA, 19 nt, Homo sapiens
  misc_RNA (1)...(19): siRNA sense strand
gcagaagaggacuuagaua

SEQ ID NO: 168035 - RNA, 19 nt, Homo sapiens
  misc_RNA (1)...(19): siRNA sense strand
ucugugggauuaauuauug

SEQ ID NO: 168036 - RNA, 19 nt, Homo sapiens
  misc_RNA (1)...(19): siRNA sense strand
gcagauucgauauuaguaa

SEQ ID NO: 168037 - RNA, 19 nt, Homo sapiens
  misc_RNA (1)...(19): siRNA sense strand
gagcaaauggagcaauaaa

SEQ ID NO: 168038 - RNA, 19 nt, Homo sapiens
  misc_RNA (1)...(19): siRNA sense strand
ugaagcaccuacaaacgaa

SEQ ID NO: 168039 - RNA, 19 nt, Homo sapiens
  misc_RNA (1)...(19): siRNA sense strand
ggaguugggccucagauau

SEQ ID NO: 168040 - RNA, 19 nt, Homo sapiens
  misc_RNA (1)...(19): siRNA sense strand
gggauuaauuauugccauu

SEQ ID NO: 168041 - RNA, 19 nt, Homo sapiens
  misc_RNA (1)...(19): siRNA sense strand
uuauuacgcuccaugauug

SEQ ID NO: 168042 - RNA, 19 nt, Homo sapiens
  misc_RNA (1)...(19): siRNA sense strand
gcgacuacgucauuaagug

SEQ ID NO: 168043 - RNA, 19 nt, Homo sapiens
  misc_RNA (1)...(19): siRNA sense strand
aagcuacacuuuaguugaa

SEQ ID NO: 168044 - RNA, 19 nt, Homo sapiens
  misc_RNA (1)...(19): siRNA sense strand
gcugauuucucaaccucua

SEQ ID NO: 168045 - RNA, 19 nt, Homo sapiens
  misc_RNA (1)...(19): siRNA sense strand
caaacgaaagcuaucaauu

SEQ ID NO: 168046 - RNA, 19 nt, Homo sapiens
  misc_RNA (1)...(19): siRNA sense strand
gaacauuucuuggauaccu

SEQ ID NO: 168047 - RNA, 19 nt, Homo sapiens
  misc_RNA (1)...(19): siRNA sense strand
gauaugcccuuggaaugug

SEQ ID NO: 168048 - RNA, 19 nt, Homo sapiens
  misc_RNA (1)...(19): siRNA sense strand
gcagaaaucaaggauauca

SEQ ID NO: 168049 - RNA, 19 nt, Homo sapiens
  misc_RNA (1)...(19): siRNA sense strand
aaacacagucccuuucuga

SEQ ID NO: 168050 - RNA, 19 nt, Homo sapiens
  misc_RNA (1)...(19): siRNA sense strand
uggagcaaauggagcaaua

SEQ ID NO: 168051 - RNA, 19 nt, Homo sapiens
  misc_RNA (1)...(19): siRNA sense strand
caaccgaagauaacauauu

SEQ ID NO: 168052 - RNA, 19 nt, Homo sapiens
  misc_RNA (1)...(19): siRNA sense strand
agauacgacuugauaagaa

SEQ ID NO: 168053 - RNA, 19 nt, Homo sapiens
  misc_RNA (1)...(19): siRNA sense strand
gagauacgacuugauaaga

SEQ ID NO: 168054 - RNA, 19 nt, Homo sapiens
  misc_RNA (1)...(19): siRNA sense strand
guuaaacuuucuuggcauu

SEQ ID NO: 168055 - RNA, 19 nt, Homo sapiens
  misc_RNA (1)...(19): siRNA sense strand
guguguaacuaacaauuug

SEQ ID NO: 168056 - RNA, 19 nt, Homo sapiens
  misc_RNA (1)...(19): siRNA sense strand
ucaaaugcuuccaaaucaa

SEQ ID NO: 168057 - RNA, 19 nt, Homo sapiens
  misc_RNA (1)...(19): siRNA sense strand
gagcugaagcaccuacaaa

SEQ ID NO: 168058 - RNA, 19 nt, Homo sapiens
  misc_RNA (1)...(19): siRNA sense strand
ggagggacugcacagguua

SEQ ID NO: 168059 - RNA, 19 nt, Homo sapiens
  misc_RNA (1)...(19): siRNA sense strand
gaggaaacacagucccuuu

SEQ ID NO: 168060 - RNA, 19 nt, Homo sapiens
  misc_RNA (1)...(19): siRNA sense strand
ggagaaaaccaguauuaaa

SEQ ID NO: 168061 - RNA, 19 nt, Homo sapiens
  misc_RNA (1)...(19): siRNA sense strand
agaagaggacuuagauaaa

SEQ ID NO: 168062 - RNA, 19 nt, Homo sapiens
  misc_RNA (1)...(19): siRNA sense strand
ugaaguguguaacuaacaa

SEQ ID NO: 168063 - RNA, 19 nt, Homo sapiens
  misc_RNA (1)...(19): siRNA sense strand
uuuggaaguucuacaagua

SEQ ID NO: 168064 - RNA, 19 nt, Homo sapiens
  misc_RNA (1)...(19): siRNA sense strand
ccucagauaugcccuugga

SEQ ID NO: 168065 - RNA, 19 nt, Homo sapiens
  misc_RNA (1)...(19): siRNA sense strand
ugaggacugcuucaaauuu

SEQ ID NO: 168066 - RNA, 19 nt, Homo sapiens
  misc_RNA (1)...(19): siRNA sense strand
gaagaauuggcucccauug

SEQ ID NO: 168067 - RNA, 19 nt, Homo sapiens
  misc_RNA (1)...(19): siRNA sense strand
ccuggaugguggacaauaa

SEQ ID NO: 168068 - RNA, 19 nt, Homo sapiens
  misc_RNA (1)...(19): siRNA sense strand
aaugaggacugcuucaaau

SEQ ID NO: 168069 - RNA, 19 nt, Homo sapiens
  misc_RNA (1)...(19): siRNA sense strand
gcaccaaauuuuacuguug

SEQ ID NO: 168070 - RNA, 19 nt, Homo sapiens
  misc_RNA (1)...(19): siRNA sense strand
ggaaacucgaucagcauuu

SEQ ID NO: 168071 - RNA, 19 nt, Homo sapiens
  misc_RNA (1)...(19): siRNA sense strand
cggaaacgagaauggauua

SEQ ID NO: 168072 - RNA, 19 nt, Homo sapiens
  misc_RNA (1)...(19): siRNA sense strand
uuacugacauaucccagaa

SEQ ID NO: 168073 - RNA, 19 nt, Homo sapiens
  misc_RNA (1)...(19): siRNA sense strand
ggacuuggcugacaugaua

SEQ ID NO: 168074 - RNA, 19 nt, Homo sapiens
  misc_RNA (1)...(19): siRNA sense strand
gggaagagcuggaagauaa

SEQ ID NO: 168075 - RNA, 19 nt, Homo sapiens
  misc_RNA (1)...(19): siRNA sense strand
gggagaagcuggccacaaa

SEQ ID NO: 168076 - RNA, 19 nt, Homo sapiens
  misc_RNA (1)...(19): siRNA sense strand
gaucuuggauucugaagug

SEQ ID NO: 168077 - RNA, 19 nt, Homo sapiens
  misc_RNA (1)...(19): siRNA sense strand
cagcaaagauggcaacaug

SEQ ID NO: 168078 - RNA, 19 nt, Homo sapiens
  misc_RNA (1)...(19): siRNA sense strand
gcuaaugucugccuguuug

SEQ ID NO: 168079 - RNA, 19 nt, Homo sapiens
  misc_RNA (1)...(19): siRNA sense strand
uugcagaucugucuucuaa

SEQ ID NO: 168080 - RNA, 19 nt, Homo sapiens
  misc_RNA (1)...(19): siRNA sense strand
gauaaggacuggaaaucug

SEQ ID NO: 168081 - RNA, 19 nt, Homo sapiens
  misc_RNA (1)...(19): siRNA sense strand
gaaagcagccuuccaggau

SEQ ID NO: 168082 - RNA, 19 nt, Homo sapiens
  misc_RNA (1)...(19): siRNA sense strand
gcaaagccuuccgcuauga

SEQ ID NO: 168083 - RNA, 19 nt, Homo sapiens
  misc_RNA (1)...(19): siRNA sense strand
ccaaugaccuuaaaugcau

SEQ ID NO: 168084 - RNA, 19 nt, Homo sapiens
  misc_RNA (1)...(19): siRNA sense strand
gaccuuaaaugcaucauca

SEQ ID NO: 168085 - RNA, 19 nt, Homo sapiens
  misc_RNA (1)...(19): siRNA sense strand
ccaauggcauguucucuga

SEQ ID NO: 168086 - RNA, 19 nt, Homo sapiens
  misc_RNA (1)...(19): siRNA sense strand
gaucuacuauccugacuuc

SEQ ID NO: 168087 - RNA, 19 nt, Homo sapiens
  misc_RNA (1)...(19): siRNA sense strand
gaaaggcgccucauuuguc

SEQ ID NO: 168088 - RNA, 19 nt, Homo sapiens
  misc_RNA (1)...(19): siRNA sense strand
gagcaaaggcggcaugaug

SEQ ID NO: 168089 - RNA, 19 nt, Homo sapiens
  misc_RNA (1)...(19): siRNA sense strand
gacauugccuccaggugua

SEQ ID NO: 168090 - RNA, 19 nt, Homo sapiens
  misc_RNA (1)...(19): siRNA sense strand
guuuacaacuugaacgaua

SEQ ID NO: 168091 - RNA, 19 nt, Homo sapiens
  misc_RNA (1)...(19): siRNA sense strand
gcagaucugucuucuaagg

SEQ ID NO: 168092 - RNA, 19 nt, Homo sapiens
  misc_RNA (1)...(19): siRNA sense strand
gcggaaagcugcugaugag

SEQ ID NO: 168093 - RNA, 19 nt, Homo sapiens
  misc_RNA (1)...(19): siRNA sense strand
gcaaguccguugaguaugc

SEQ ID NO: 168094 - RNA, 19 nt, Homo sapiens
  misc_RNA (1)...(19): siRNA sense strand
gcagguacaccaaagaaga

SEQ ID NO: 168095 - RNA, 19 nt, Homo sapiens
  misc_RNA (1)...(19): siRNA sense strand
uuaaaugcaucaucagguu

SEQ ID NO: 168096 - RNA, 19 nt, Homo sapiens
  misc_RNA (1)...(19): siRNA sense strand
gcauaaggacugucugcua

SEQ ID NO: 168097 - RNA, 19 nt, Homo sapiens
  misc_RNA (1)...(19): siRNA sense strand
gaaaugaagcgagucacaa

SEQ ID NO: 168098 - RNA, 19 nt, Homo sapiens
  misc_RNA (1)...(19): siRNA sense strand
gggcugaauucuccaaauc

SEQ ID NO: 168099 - RNA, 19 nt, Homo sapiens
  misc_RNA (1)...(19): siRNA sense strand
ggaagauaaugagaaggaa

SEQ ID NO: 168100 - RNA, 19 nt, Homo sapiens
  misc_RNA (1)...(19): siRNA sense strand
gaacuagacauggugaaga

SEQ ID NO: 168101 - RNA, 19 nt, Homo sapiens
  misc_RNA (1)...(19): siRNA sense strand
ucagguugaucaaacauga

SEQ ID NO: 168102 - RNA, 19 nt, Homo sapiens
  misc_RNA (1)...(19): siRNA sense strand
uaagacuguuuacaacuug

SEQ ID NO: 168103 - RNA, 19 nt, Homo sapiens
  misc_RNA (1)...(19): siRNA sense strand
gcaaaguggugcccaaucc

SEQ ID NO: 168104 - RNA, 19 nt, Homo sapiens
  misc_RNA (1)...(19): siRNA sense strand
gacaaucagagucuucuuu

SEQ ID NO: 168105 - RNA, 19 nt, Homo sapiens
  misc_RNA (1)...(19): siRNA sense strand
gaugagacgcugugccaaa

SEQ ID NO: 168106 - RNA, 19 nt, Homo sapiens
  misc_RNA (1)...(19): siRNA sense strand
gcagaagggaagcugagua

SEQ ID NO: 168107 - RNA, 19 nt, Homo sapiens
  misc_RNA (1)...(19): siRNA sense strand
guccaggccucgcugauga

SEQ ID NO: 168108 - RNA, 19 nt, Homo sapiens
  misc_RNA (1)...(19): siRNA sense strand
gaacucaggugcaaaacau

SEQ ID NO: 168109 - RNA, 19 nt, Homo sapiens
  misc_RNA (1)...(19): siRNA sense strand
guacagccaaugaccuuaa

SEQ ID NO: 168110 - RNA, 19 nt, Homo sapiens
  misc_RNA (1)...(19): siRNA sense strand
ggugacuucuccagugaaa

SEQ ID NO: 168111 - RNA, 19 nt, Homo sapiens
  misc_RNA (1)...(19): siRNA sense strand
gaagggaagcugaguaacu

SEQ ID NO: 168112 - RNA, 19 nt, Homo sapiens
  misc_RNA (1)...(19): siRNA sense strand
cagaagggaagcugaguaa

SEQ ID NO: 168113 - RNA, 19 nt, Homo sapiens
  misc_RNA (1)...(19): siRNA sense strand
gaguccaggugcauaagaa

SEQ ID NO: 168114 - RNA, 19 nt, Homo sapiens
  misc_RNA (1)...(19): siRNA sense strand
uguccaagcucaccaagga

SEQ ID NO: 168115 - RNA, 19 nt, Homo sapiens
  misc_RNA (1)...(19): siRNA sense strand
caaucagagucuucuuuga

SEQ ID NO: 168116 - RNA, 19 nt, Homo sapiens
  misc_RNA (1)...(19): siRNA sense strand
gaaaggcucagcaggagau

SEQ ID NO: 168117 - RNA, 19 nt, Homo sapiens
  misc_RNA (1)...(19): siRNA sense strand
gagacgcugugccaaacaa

SEQ ID NO: 168118 - RNA, 19 nt, Homo sapiens
  misc_RNA (1)...(19): siRNA sense strand
gcacauugcagaucugucu

SEQ ID NO: 168119 - RNA, 19 nt, Homo sapiens
  misc_RNA (1)...(19): siRNA sense strand
gcaaagauggcaacaugca

SEQ ID NO: 168120 - RNA, 19 nt, Homo sapiens
  misc_RNA (1)...(19): siRNA sense strand
gagaugauaaggacuggaa

SEQ ID NO: 168121 - RNA, 19 nt, Homo sapiens
  misc_RNA (1)...(19): siRNA sense strand
cagaaguggugcacaguca

SEQ ID NO: 168122 - RNA, 19 nt, Homo sapiens
  misc_RNA (1)...(19): siRNA sense strand
ccaagagccuccuuaccau

SEQ ID NO: 168123 - RNA, 19 nt, Homo sapiens
  misc_RNA (1)...(19): siRNA sense strand
gcuggaagauaaugagaag

SEQ ID NO: 168124 - RNA, 19 nt, Homo sapiens
  misc_RNA (1)...(19): siRNA sense strand
gugaaaggcgccucauuug

SEQ ID NO: 168125 - RNA, 19 nt, Homo sapiens
  misc_RNA (1)...(19): siRNA sense strand
gaagggcguaugccgaauu

SEQ ID NO: 168126 - RNA, 19 nt, Homo sapiens
  misc_RNA (1)...(19): siRNA sense strand
cagauaacccagcacauug

SEQ ID NO: 168127 - RNA, 19 nt, Homo sapiens
  misc_RNA (1)...(19): siRNA sense strand
aaagucuucuccagugaaa

SEQ ID NO: 168128 - RNA, 19 nt, Homo sapiens
  misc_RNA (1)...(19): siRNA sense strand
ucaacaagaucuacuaucc

SEQ ID NO: 168129 - RNA, 19 nt, Homo sapiens
  misc_RNA (1)...(19): siRNA sense strand
caggugacuucuccaguga

SEQ ID NO: 168130 - RNA, 19 nt, Homo sapiens
  misc_RNA (1)...(19): siRNA sense strand
gaaaucugccacuaaccuu

SEQ ID NO: 168131 - RNA, 19 nt, Homo sapiens
  misc_RNA (1)...(19): siRNA sense strand
gauguguaccuaacaguga

SEQ ID NO: 168132 - RNA, 19 nt, Homo sapiens
  misc_RNA (1)...(19): siRNA sense strand
aaaggcgccucauuuguca

SEQ ID NO: 168133 - RNA, 19 nt, Homo sapiens
  misc_RNA (1)...(19): siRNA sense strand
agaaugaacuagacauggu

SEQ ID NO: 168134 - RNA, 19 nt, Homo sapiens
  misc_RNA (1)...(19): siRNA sense strand
gcagaaugaacuagacaug

SEQ ID NO: 168135 - RNA, 19 nt, Homo sapiens
  misc_RNA (1)...(19): siRNA sense strand
gaaauuccaaaccggauca

SEQ ID NO: 168136 - RNA, 19 nt, Homo sapiens
  misc_RNA (1)...(19): siRNA sense strand
gcaugaucuuggauucuga

SEQ ID NO: 168137 - RNA, 19 nt, Homo sapiens
  misc_RNA (1)...(19): siRNA sense strand
ggagaccacuucagcuacu

SEQ ID NO: 168138 - RNA, 19 nt, Homo sapiens
  misc_RNA (1)...(19): siRNA sense strand
caaggaggaugagcagcaa

SEQ ID NO: 168139 - RNA, 19 nt, Homo sapiens
  misc_RNA (1)...(19): siRNA sense strand
caaagaagaaagcuguugu

SEQ ID NO: 168140 - RNA, 19 nt, Homo sapiens
  misc_RNA (1)...(19): siRNA sense strand
acaaagucuucuccaguga

SEQ ID NO: 168141 - RNA, 19 nt, Homo sapiens
  misc_RNA (1)...(19): siRNA sense strand
gccaagagccuccuuacca

SEQ ID NO: 168142 - RNA, 19 nt, Homo sapiens
  misc_RNA (1)...(19): siRNA sense strand
cuacgggaguuucgaaagu

SEQ ID NO: 168143 - RNA, 19 nt, Homo sapiens
  misc_RNA (1)...(19): siRNA sense strand
ccacggugauguguaccua

SEQ ID NO: 168144 - RNA, 19 nt, Homo sapiens
  misc_RNA (1)...(19): siRNA sense strand
cugcaaagccuuccgcuau

SEQ ID NO: 168145 - RNA, 19 nt, Homo sapiens
  misc_RNA (1)...(19): siRNA sense strand
cuacuauccugacuucauc

SEQ ID NO: 168146 - RNA, 19 nt, Homo sapiens
  misc_RNA (1)...(19): siRNA sense strand
acagauaacccagcacauu

SEQ ID NO: 168147 - RNA, 19 nt, Homo sapiens
  misc_RNA (1)...(19): siRNA sense strand
caacaagacaggcaaacca

SEQ ID NO: 168148 - RNA, 19 nt, Homo sapiens
  misc_RNA (1)...(19): siRNA sense strand
aguaugcaaugaagaaaug

SEQ ID NO: 168149 - RNA, 19 nt, Homo sapiens
  misc_RNA (1)...(19): siRNA sense strand
cauuaagacuguuuacaac

SEQ ID NO: 168150 - RNA, 19 nt, Homo sapiens
  misc_RNA (1)...(19): siRNA sense strand
ggguagcagugaagagaau

SEQ ID NO: 168151 - RNA, 19 nt, Homo sapiens
  misc_RNA (1)...(19): siRNA sense strand
gcacccgaauccgagauga

SEQ ID NO: 168152 - RNA, 19 nt, Homo sapiens
  misc_RNA (1)...(19): siRNA sense strand
aaaugaagcgagucacaaa

SEQ ID NO: 168153 - RNA, 19 nt, Homo sapiens
  misc_RNA (1)...(19): siRNA sense strand
cgcaggagguggagaagga

SEQ ID NO: 168154 - RNA, 19 nt, Homo sapiens
  misc_RNA (1)...(19): siRNA sense strand
agugaaaggcgccucauuu

SEQ ID NO: 168155 - RNA, 19 nt, Homo sapiens
  misc_RNA (1)...(19): siRNA sense strand
augaagaaaugucccaaug

SEQ ID NO: 168156 - RNA, 19 nt, Homo sapiens
  misc_RNA (1)...(19): siRNA sense strand
uaaugagaaggaacagaua

SEQ ID NO: 168157 - RNA, 19 nt, Homo sapiens
  misc_RNA (1)...(19): siRNA sense strand
aagaugaacucaggugcaa

SEQ ID NO: 168158 - RNA, 19 nt, Homo sapiens
  misc_RNA (1)...(19): siRNA sense strand
gaagcuggccacaaagucu

SEQ ID NO: 168159 - RNA, 19 nt, Homo sapiens
  misc_RNA (1)...(19): siRNA sense strand
gaagagcuggaagauaaug

SEQ ID NO: 168160 - RNA, 19 nt, Homo sapiens
  misc_RNA (1)...(19): siRNA sense strand
ccaaggagaaggcagacuu

SEQ ID NO: 168161 - RNA, 19 nt, Homo sapiens
  misc_RNA (1)...(19): siRNA sense strand
gaugauaaggacuggaaau

SEQ ID NO: 168162 - RNA, 19 nt, Homo sapiens
  misc_RNA (1)...(19): siRNA sense strand
acgggaguuucgaaaguua

SEQ ID NO: 168163 - RNA, 19 nt, Homo sapiens
  misc_RNA (1)...(19): siRNA sense strand
gagaagcuggccacaaagu

SEQ ID NO: 168164 - RNA, 19 nt, Homo sapiens
  misc_RNA (1)...(19): siRNA sense strand
ugaaaggcgccucauuugu

SEQ ID NO: 168165 - RNA, 19 nt, Homo sapiens
  misc_RNA (1)...(19): siRNA sense strand
ggaaaucugccacuaaccu

SEQ ID NO: 168166 - RNA, 19 nt, Homo sapiens
  misc_RNA (1)...(19): siRNA sense strand
cccaaucccuucucagagu

SEQ ID NO: 168167 - RNA, 19 nt, Homo sapiens
  misc_RNA (1)...(19): siRNA sense strand
gcaggaggccaugaugaug

SEQ ID NO: 168168 - RNA, 19 nt, Homo sapiens
  misc_RNA (1)...(19): siRNA sense strand
gagcgaguccaggugcaua

SEQ ID NO: 168169 - RNA, 19 nt, Homo sapiens
  misc_RNA (1)...(19): siRNA sense strand
ggaagagcuggaagauaau

SEQ ID NO: 168170 - RNA, 19 nt, Homo sapiens
  misc_RNA (1)...(19): siRNA sense strand
caaagucuucuccagugaa

SEQ ID NO: 168171 - RNA, 19 nt, Homo sapiens
  misc_RNA (1)...(19): siRNA sense strand
gacuggaaaucugccacua

SEQ ID NO: 168172 - RNA, 19 nt, Homo sapiens
  misc_RNA (1)...(19): siRNA sense strand
ggucaacaagaucuacuau

SEQ ID NO: 168173 - RNA, 19 nt, Homo sapiens
  misc_RNA (1)...(19): siRNA sense strand
ggacuuggcugacaugaua

SEQ ID NO: 168174 - RNA, 19 nt, Homo sapiens
  misc_RNA (1)...(19): siRNA sense strand
gggaagagcuggaagauaa

SEQ ID NO: 168175 - RNA, 19 nt, Homo sapiens
  misc_RNA (1)...(19): siRNA sense strand
gggagaagcuggccacaaa

SEQ ID NO: 168176 - RNA, 19 nt, Homo sapiens
  misc_RNA (1)...(19): siRNA sense strand
gaucuuggauucugaagug

SEQ ID NO: 168177 - RNA, 19 nt, Homo sapiens
  misc_RNA (1)...(19): siRNA sense strand
cagcaaagauggcaacaug

SEQ ID NO: 168178 - RNA, 19 nt, Homo sapiens
  misc_RNA (1)...(19): siRNA sense strand
gcuaaugucugccuguuug

SEQ ID NO: 168179 - RNA, 19 nt, Homo sapiens
  misc_RNA (1)...(19): siRNA sense strand
uugcagaucugucuucuaa

SEQ ID NO: 168180 - RNA, 19 nt, Homo sapiens
  misc_RNA (1)...(19): siRNA sense strand
gauaaggacuggaaaucug

SEQ ID NO: 168181 - RNA, 19 nt, Homo sapiens
  misc_RNA (1)...(19): siRNA sense strand
gaaagcagccuuccaggau

SEQ ID NO: 168182 - RNA, 19 nt, Homo sapiens
  misc_RNA (1)...(19): siRNA sense strand
gcaaagccuuccgcuauga

SEQ ID NO: 168183 - RNA, 19 nt, Homo sapiens
  misc_RNA (1)...(19): siRNA sense strand
ccaaugaccuuaaaugcau

SEQ ID NO: 168184 - RNA, 19 nt, Homo sapiens
  misc_RNA (1)...(19): siRNA sense strand
gaccuuaaaugcaucauca

SEQ ID NO: 168185 - RNA, 19 nt, Homo sapiens
  misc_RNA (1)...(19): siRNA sense strand
ccaauggcauguucucuga

SEQ ID NO: 168186 - RNA, 19 nt, Homo sapiens
  misc_RNA (1)...(19): siRNA sense strand
gaucuacuauccugacuuc

SEQ ID NO: 168187 - RNA, 19 nt, Homo sapiens
  misc_RNA (1)...(19): siRNA sense strand
gaaaggcgccucauuuguc

SEQ ID NO: 168188 - RNA, 19 nt, Homo sapiens
  misc_RNA (1)...(19): siRNA sense strand
gagcaaaggcggcaugaug

SEQ ID NO: 168189 - RNA, 19 nt, Homo sapiens
  misc_RNA (1)...(19): siRNA sense strand
gacauugccuccaggugua

SEQ ID NO: 168190 - RNA, 19 nt, Homo sapiens
  misc_RNA (1)...(19): siRNA sense strand
guuuacaacuugaacgaua

SEQ ID NO: 168191 - RNA, 19 nt, Homo sapiens
  misc_RNA (1)...(19): siRNA sense strand
gcagaucugucuucuaagg

SEQ ID NO: 168192 - RNA, 19 nt, Homo sapiens
  misc_RNA (1)...(19): siRNA sense strand
gcggaaagcugcugaugag

SEQ ID NO: 168193 - RNA, 19 nt, Homo sapiens
  misc_RNA (1)...(19): siRNA sense strand
gcaaguccguugaguaugc

SEQ ID NO: 168194 - RNA, 19 nt, Homo sapiens
  misc_RNA (1)...(19): siRNA sense strand
gcagguacaccaaagaaga

SEQ ID NO: 168195 - RNA, 19 nt, Homo sapiens
  misc_RNA (1)...(19): siRNA sense strand
uuaaaugcaucaucagguu

SEQ ID NO: 168196 - RNA, 19 nt, Homo sapiens
  misc_RNA (1)...(19): siRNA sense strand
gcauaaggacugucugcua

SEQ ID NO: 168197 - RNA, 19 nt, Homo sapiens
  misc_RNA (1)...(19): siRNA sense strand
gaaaugaagcgagucacaa

SEQ ID NO: 168198 - RNA, 19 nt, Homo sapiens
  misc_RNA (1)...(19): siRNA sense strand
gggcugaauucuccaaauc

SEQ ID NO: 168199 - RNA, 19 nt, Homo sapiens
  misc_RNA (1)...(19): siRNA sense strand
ggaagauaaugagaaggaa

SEQ ID NO: 168200 - RNA, 19 nt, Homo sapiens
  misc_RNA (1)...(19): siRNA sense strand
gaacuagacauggugaaga

SEQ ID NO: 168201 - RNA, 19 nt, Homo sapiens
  misc_RNA (1)...(19): siRNA sense strand
ucagguugaucaaacauga

SEQ ID NO: 168202 - RNA, 19 nt, Homo sapiens
  misc_RNA (1)...(19): siRNA sense strand
uaagacuguuuacaacuug

SEQ ID NO: 168203 - RNA, 19 nt, Homo sapiens
  misc_RNA (1)...(19): siRNA sense strand
gcaaaguggugcccaaucc

SEQ ID NO: 168204 - RNA, 19 nt, Homo sapiens
  misc_RNA (1)...(19): siRNA sense strand
gacaaucagagucuucuuu

SEQ ID NO: 168205 - RNA, 19 nt, Homo sapiens
  misc_RNA (1)...(19): siRNA sense strand
gaugagacgcugugccaaa

SEQ ID NO: 168206 - RNA, 19 nt, Homo sapiens
  misc_RNA (1)...(19): siRNA sense strand
gcagaagggaagcugagua

SEQ ID NO: 168207 - RNA, 19 nt, Homo sapiens
  misc_RNA (1)...(19): siRNA sense strand
guccaggccucgcugauga

SEQ ID NO: 168208 - RNA, 19 nt, Homo sapiens
  misc_RNA (1)...(19): siRNA sense strand
gaacucaggugcaaaacau

SEQ ID NO: 168209 - RNA, 19 nt, Homo sapiens
  misc_RNA (1)...(19): siRNA sense strand
guacagccaaugaccuuaa

SEQ ID NO: 168210 - RNA, 19 nt, Homo sapiens
  misc_RNA (1)...(19): siRNA sense strand
ggugacuucuccagugaaa

SEQ ID NO: 168211 - RNA, 19 nt, Homo sapiens
  misc_RNA (1)...(19): siRNA sense strand
gaagggaagcugaguaacu

SEQ ID NO: 168212 - RNA, 19 nt, Homo sapiens
  misc_RNA (1)...(19): siRNA sense strand
cagaagggaagcugaguaa

SEQ ID NO: 168213 - RNA, 19 nt, Homo sapiens
  misc_RNA (1)...(19): siRNA sense strand
gaguccaggugcauaagaa

SEQ ID NO: 168214 - RNA, 19 nt, Homo sapiens
  misc_RNA (1)...(19): siRNA sense strand
uguccaagcucaccaagga

SEQ ID NO: 168215 - RNA, 19 nt, Homo sapiens
  misc_RNA (1)...(19): siRNA sense strand
caaucagagucuucuuuga

SEQ ID NO: 168216 - RNA, 19 nt, Homo sapiens
  misc_RNA (1)...(19): siRNA sense strand
gaaaggcucagcaggagau

SEQ ID NO: 168217 - RNA, 19 nt, Homo sapiens
  misc_RNA (1)...(19): siRNA sense strand
gagacgcugugccaaacaa

SEQ ID NO: 168218 - RNA, 19 nt, Homo sapiens
  misc_RNA (1)...(19): siRNA sense strand
gcacauugcagaucugucu

SEQ ID NO: 168219 - RNA, 19 nt, Homo sapiens
  misc_RNA (1)...(19): siRNA sense strand
gcaaagauggcaacaugca

SEQ ID NO: 168220 - RNA, 19 nt, Homo sapiens
  misc_RNA (1)...(19): siRNA sense strand
gagaugauaaggacuggaa

SEQ ID NO: 168221 - RNA, 19 nt, Homo sapiens
  misc_RNA (1)...(19): siRNA sense strand
cagaaguggugcacaguca

SEQ ID NO: 168222 - RNA, 19 nt, Homo sapiens
  misc_RNA (1)...(19): siRNA sense strand
ccaagagccuccuuaccau

SEQ ID NO: 168223 - RNA, 19 nt, Homo sapiens
  misc_RNA (1)...(19): siRNA sense strand
gcuggaagauaaugagaag

SEQ ID NO: 168224 - RNA, 19 nt, Homo sapiens
  misc_RNA (1)...(19): siRNA sense strand
gugaaaggcgccucauuug

SEQ ID NO: 168225 - RNA, 19 nt, Homo sapiens
  misc_RNA (1)...(19): siRNA sense strand
gaagggcguaugccgaauu

SEQ ID NO: 168226 - RNA, 19 nt, Homo sapiens
  misc_RNA (1)...(19): siRNA sense strand
cagauaacccagcacauug

SEQ ID NO: 168227 - RNA, 19 nt, Homo sapiens
  misc_RNA (1)...(19): siRNA sense strand
aaagucuucuccagugaaa

SEQ ID NO: 168228 - RNA, 19 nt, Homo sapiens
  misc_RNA (1)...(19): siRNA sense strand
ucaacaagaucuacuaucc

SEQ ID NO: 168229 - RNA, 19 nt, Homo sapiens
  misc_RNA (1)...(19): siRNA sense strand
caggugacuucuccaguga

SEQ ID NO: 168230 - RNA, 19 nt, Homo sapiens
  misc_RNA (1)...(19): siRNA sense strand
gaaaucugccacuaaccuu

SEQ ID NO: 168231 - RNA, 19 nt, Homo sapiens
  misc_RNA (1)...(19): siRNA sense strand
gauguguaccuaacaguga

SEQ ID NO: 168232 - RNA, 19 nt, Homo sapiens
  misc_RNA (1)...(19): siRNA sense strand
aaaggcgccucauuuguca

SEQ ID NO: 168233 - RNA, 19 nt, Homo sapiens
  misc_RNA (1)...(19): siRNA sense strand
agaaugaacuagacauggu

SEQ ID NO: 168234 - RNA, 19 nt, Homo sapiens
  misc_RNA (1)...(19): siRNA sense strand
gcagaaugaacuagacaug

SEQ ID NO: 168235 - RNA, 19 nt, Homo sapiens
  misc_RNA (1)...(19): siRNA sense strand
gaaauuccaaaccggauca

SEQ ID NO: 168236 - RNA, 19 nt, Homo sapiens
  misc_RNA (1)...(19): siRNA sense strand
gcaugaucuuggauucuga

SEQ ID NO: 168237 - RNA, 19 nt, Homo sapiens
  misc_RNA (1)...(19): siRNA sense strand
ggagaccacuucagcuacu

SEQ ID NO: 168238 - RNA, 19 nt, Homo sapiens
  misc_RNA (1)...(19): siRNA sense strand
caaggaggaugagcagcaa

SEQ ID NO: 168239 - RNA, 19 nt, Homo sapiens
  misc_RNA (1)...(19): siRNA sense strand
caaagaagaaagcuguugu

SEQ ID NO: 168240 - RNA, 19 nt, Homo sapiens
  misc_RNA (1)...(19): siRNA sense strand
acaaagucuucuccaguga

SEQ ID NO: 168241 - RNA, 19 nt, Homo sapiens
  misc_RNA (1)...(19): siRNA sense strand
gccaagagccuccuuacca

SEQ ID NO: 168242 - RNA, 19 nt, Homo sapiens
  misc_RNA (1)...(19): siRNA sense strand
cuacgggaguuucgaaagu

SEQ ID NO: 168243 - RNA, 19 nt, Homo sapiens
  misc_RNA (1)...(19): siRNA sense strand
ccacggugauguguaccua

SEQ ID NO: 168244 - RNA, 19 nt, Homo sapiens
  misc_RNA (1)...(19): siRNA sense strand
cugcaaagccuuccgcuau

SEQ ID NO: 168245 - RNA, 19 nt, Homo sapiens
  misc_RNA (1)...(19): siRNA sense strand
cuacuauccugacuucauc

SEQ ID NO: 168246 - RNA, 19 nt, Homo sapiens
  misc_RNA (1)...(19): siRNA sense strand
acagauaacccagcacauu

SEQ ID NO: 168247 - RNA, 19 nt, Homo sapiens
  misc_RNA (1)...(19): siRNA sense strand
caacaagacaggcaaacca

SEQ ID NO: 168248 - RNA, 19 nt, Homo sapiens
  misc_RNA (1)...(19): siRNA sense strand
aguaugcaaugaagaaaug

SEQ ID NO: 168249 - RNA, 19 nt, Homo sapiens
  misc_RNA (1)...(19): siRNA sense strand
cauuaagacuguuuacaac

SEQ ID NO: 168250 - RNA, 19 nt, Homo sapiens
  misc_RNA (1)...(19): siRNA sense strand
ggguagcagugaagagaau

SEQ ID NO: 168251 - RNA, 19 nt, Homo sapiens
  misc_RNA (1)...(19): siRNA sense strand
gcacccgaauccgagauga

SEQ ID NO: 168252 - RNA, 19 nt, Homo sapiens
  misc_RNA (1)...(19): siRNA sense strand
aaaugaagcgagucacaaa

SEQ ID NO: 168253 - RNA, 19 nt, Homo sapiens
  misc_RNA (1)...(19): siRNA sense strand
cgcaggagguggagaagga

SEQ ID NO: 168254 - RNA, 19 nt, Homo sapiens
  misc_RNA (1)...(19): siRNA sense strand
agugaaaggcgccucauuu

SEQ ID NO: 168255 - RNA, 19 nt, Homo sapiens
  misc_RNA (1)...(19): siRNA sense strand
augaagaaaugucccaaug

SEQ ID NO: 168256 - RNA, 19 nt, Homo sapiens
  misc_RNA (1)...(19): siRNA sense strand
uaaugagaaggaacagaua

SEQ ID NO: 168257 - RNA, 19 nt, Homo sapiens
  misc_RNA (1)...(19): siRNA sense strand
aagaugaacucaggugcaa

SEQ ID NO: 168258 - RNA, 19 nt, Homo sapiens
  misc_RNA (1)...(19): siRNA sense strand
gaagcuggccacaaagucu

SEQ ID NO: 168259 - RNA, 19 nt, Homo sapiens
  misc_RNA (1)...(19): siRNA sense strand
gaagagcuggaagauaaug

SEQ ID NO: 168260 - RNA, 19 nt, Homo sapiens
  misc_RNA (1)...(19): siRNA sense strand
ccaaggagaaggcagacuu

SEQ ID NO: 168261 - RNA, 19 nt, Homo sapiens
  misc_RNA (1)...(19): siRNA sense strand
gaugauaaggacuggaaau

SEQ ID NO: 168262 - RNA, 19 nt, Homo sapiens
  misc_RNA (1)...(19): siRNA sense strand
acgggaguuucgaaaguua

SEQ ID NO: 168263 - RNA, 19 nt, Homo sapiens
  misc_RNA (1)...(19): siRNA sense strand
gagaagcuggccacaaagu

SEQ ID NO: 168264 - RNA, 19 nt, Homo sapiens
  misc_RNA (1)...(19): siRNA sense strand
ugaaaggcgccucauuugu

SEQ ID NO: 168265 - RNA, 19 nt, Homo sapiens
  misc_RNA (1)...(19): siRNA sense strand
ggaaaucugccacuaaccu

SEQ ID NO: 168266 - RNA, 19 nt, Homo sapiens
  misc_RNA (1)...(19): siRNA sense strand
cccaaucccuucucagagu

SEQ ID NO: 168267 - RNA, 19 nt, Homo sapiens
  misc_RNA (1)...(19): siRNA sense strand
gcaggaggccaugaugaug

SEQ ID NO: 168268 - RNA, 19 nt, Homo sapiens
  misc_RNA (1)...(19): siRNA sense strand
gagcgaguccaggugcaua

SEQ ID NO: 168269 - RNA, 19 nt, Homo sapiens
  misc_RNA (1)...(19): siRNA sense strand
ggaagagcuggaagauaau

SEQ ID NO: 168270 - RNA, 19 nt, Homo sapiens
  misc_RNA (1)...(19): siRNA sense strand
caaagucuucuccagugaa

SEQ ID NO: 168271 - RNA, 19 nt, Homo sapiens
  misc_RNA (1)...(19): siRNA sense strand
gacuggaaaucugccacua

SEQ ID NO: 168272 - RNA, 19 nt, Homo sapiens
  misc_RNA (1)...(19): siRNA sense strand
ggucaacaagaucuacuau

SEQ ID NO: 168273 - RNA, 19 nt, Homo sapiens
  misc_RNA (1)...(19): siRNA sense strand
gcacaaagauggagaugua

SEQ ID NO: 168274 - RNA, 19 nt, Homo sapiens
  misc_RNA (1)...(19): siRNA sense strand
gaaaggaaguuuaaccaua

SEQ ID NO: 168275 - RNA, 19 nt, Homo sapiens
  misc_RNA (1)...(19): siRNA sense strand
gggagugucucauguaaua

SEQ ID NO: 168276 - RNA, 19 nt, Homo sapiens
  misc_RNA (1)...(19): siRNA sense strand
ggacaagguuagcuauuaa

SEQ ID NO: 168277 - RNA, 19 nt, Homo sapiens
  misc_RNA (1)...(19): siRNA sense strand
gggacaagguuagcuauua

SEQ ID NO: 168278 - RNA, 19 nt, Homo sapiens
  misc_RNA (1)...(19): siRNA sense strand
gaaauggcuucucugauug

SEQ ID NO: 168279 - RNA, 19 nt, Homo sapiens
  misc_RNA (1)...(19): siRNA sense strand
gagaauggccuauggaauu

SEQ ID NO: 168280 - RNA, 19 nt, Homo sapiens
  misc_RNA (1)...(19): siRNA sense strand
gaauagaaauagugcagaa

SEQ ID NO: 168281 - RNA, 19 nt, Homo sapiens
  misc_RNA (1)...(19): siRNA sense strand
gcaaugagacuaauucuuc

SEQ ID NO: 168282 - RNA, 19 nt, Homo sapiens
  misc_RNA (1)...(19): siRNA sense strand
gguaugagauucuuaguag

SEQ ID NO: 168283 - RNA, 19 nt, Homo sapiens
  misc_RNA (1)...(19): siRNA sense strand
ugaaagaacuguaugaucu

SEQ ID NO: 168284 - RNA, 19 nt, Homo sapiens
  misc_RNA (1)...(19): siRNA sense strand
gccaagauguuuacagaaa

SEQ ID NO: 168285 - RNA, 19 nt, Homo sapiens
  misc_RNA (1)...(19): siRNA sense strand
gaagagggaauuaugguaa

SEQ ID NO: 168286 - RNA, 19 nt, Homo sapiens
  misc_RNA (1)...(19): siRNA sense strand
ggauauaacuacacugauc

SEQ ID NO: 168287 - RNA, 19 nt, Homo sapiens
  misc_RNA (1)...(19): siRNA sense strand
gaacagauagccagccaaa

SEQ ID NO: 168288 - RNA, 19 nt, Homo sapiens
  misc_RNA (1)...(19): siRNA sense strand
caaagcagauauacaaauc

SEQ ID NO: 168289 - RNA, 19 nt, Homo sapiens
  misc_RNA (1)...(19): siRNA sense strand
ccaaagaugaagaaaguua

SEQ ID NO: 168290 - RNA, 19 nt, Homo sapiens
  misc_RNA (1)...(19): siRNA sense strand
ggacucguaugcuguuauu

SEQ ID NO: 168291 - RNA, 19 nt, Homo sapiens
  misc_RNA (1)...(19): siRNA sense strand
ggugauaguuauuucauug

SEQ ID NO: 168292 - RNA, 19 nt, Homo sapiens
  misc_RNA (1)...(19): siRNA sense strand
gaacagagaagccagaagu

SEQ ID NO: 168293 - RNA, 19 nt, Homo sapiens
  misc_RNA (1)...(19): siRNA sense strand
gagggagugucucauguaa

SEQ ID NO: 168294 - RNA, 19 nt, Homo sapiens
  misc_RNA (1)...(19): siRNA sense strand
agaauggccuauggaauua

SEQ ID NO: 168295 - RNA, 19 nt, Homo sapiens
  misc_RNA (1)...(19): siRNA sense strand
gcagacuccugaagaaaug

SEQ ID NO: 168296 - RNA, 19 nt, Homo sapiens
  misc_RNA (1)...(19): siRNA sense strand
ugaaguaauugaugcauug

SEQ ID NO: 168297 - RNA, 19 nt, Homo sapiens
  misc_RNA (1)...(19): siRNA sense strand
gcagauuuguguucaacuu

SEQ ID NO: 168298 - RNA, 19 nt, Homo sapiens
  misc_RNA (1)...(19): siRNA sense strand
aaacacaagcucauacuaa

SEQ ID NO: 168299 - RNA, 19 nt, Homo sapiens
  misc_RNA (1)...(19): siRNA sense strand
cugguaagcucgcaucuaa

SEQ ID NO: 168300 - RNA, 19 nt, Homo sapiens
  misc_RNA (1)...(19): siRNA sense strand
gugagaugauggccuauaa

SEQ ID NO: 168301 - RNA, 19 nt, Homo sapiens
  misc_RNA (1)...(19): siRNA sense strand
acacaaacuuucaugcaaa

SEQ ID NO: 168302 - RNA, 19 nt, Homo sapiens
  misc_RNA (1)...(19): siRNA sense strand
agaaggauaugaaacauca

SEQ ID NO: 168303 - RNA, 19 nt, Homo sapiens
  misc_RNA (1)...(19): siRNA sense strand
cguaugcuguuauuaauga

SEQ ID NO: 168304 - RNA, 19 nt, Homo sapiens
  misc_RNA (1)...(19): siRNA sense strand
guaauucugucauuguuca

SEQ ID NO: 168305 - RNA, 19 nt, Homo sapiens
  misc_RNA (1)...(19): siRNA sense strand
cagagaagccagaaguaua

SEQ ID NO: 168306 - RNA, 19 nt, Homo sapiens
  misc_RNA (1)...(19): siRNA sense strand
agacaagugugaauuacaa

SEQ ID NO: 168307 - RNA, 19 nt, Homo sapiens
  misc_RNA (1)...(19): siRNA sense strand
gcaaacuuguuauuguguu

SEQ ID NO: 168308 - RNA, 19 nt, Homo sapiens
  misc_RNA (1)...(19): siRNA sense strand
uuggguaacugauucaaua

SEQ ID NO: 168309 - RNA, 19 nt, Homo sapiens
  misc_RNA (1)...(19): siRNA sense strand
aagaaacuaugcuugcuaa

SEQ ID NO: 168310 - RNA, 19 nt, Homo sapiens
  misc_RNA (1)...(19): siRNA sense strand
ucacaaacuucacaaacug

SEQ ID NO: 168311 - RNA, 19 nt, Homo sapiens
  misc_RNA (1)...(19): siRNA sense strand
gaagaaaaccaguauuuga

SEQ ID NO: 168312 - RNA, 19 nt, Homo sapiens
  misc_RNA (1)...(19): siRNA sense strand
cgaaauggauauaacuaca

SEQ ID NO: 168313 - RNA, 19 nt, Homo sapiens
  misc_RNA (1)...(19): siRNA sense strand
uaaugaugcugcugaguug

SEQ ID NO: 168314 - RNA, 19 nt, Homo sapiens
  misc_RNA (1)...(19): siRNA sense strand
gaacgaauacagaaaagua

SEQ ID NO: 168315 - RNA, 19 nt, Homo sapiens
  misc_RNA (1)...(19): siRNA sense strand
cagccucgcuuuaugauuc

SEQ ID NO: 168316 - RNA, 19 nt, Homo sapiens
  misc_RNA (1)...(19): siRNA sense strand
gauguagaguuuuguguua

SEQ ID NO: 168317 - RNA, 19 nt, Homo sapiens
  misc_RNA (1)...(19): siRNA sense strand
gcuggagacuuugcaauga

SEQ ID NO: 168318 - RNA, 19 nt, Homo sapiens
  misc_RNA (1)...(19): siRNA sense strand
gagagagaauggccuaugg

SEQ ID NO: 168319 - RNA, 19 nt, Homo sapiens
  misc_RNA (1)...(19): siRNA sense strand
ucugauugcugauuuagaa

SEQ ID NO: 168320 - RNA, 19 nt, Homo sapiens
  misc_RNA (1)...(19): siRNA sense strand
gaugaugaaccacaagaaa

SEQ ID NO: 168321 - RNA, 19 nt, Homo sapiens
  misc_RNA (1)...(19): siRNA sense strand
gagaaagagguaugagauu

SEQ ID NO: 168322 - RNA, 19 nt, Homo sapiens
  misc_RNA (1)...(19): siRNA sense strand
gaagccagaaguauacauu

SEQ ID NO: 168323 - RNA, 19 nt, Homo sapiens
  misc_RNA (1)...(19): siRNA sense strand
ugaaauuggccaaguauug

SEQ ID NO: 168324 - RNA, 19 nt, Homo sapiens
  misc_RNA (1)...(19): siRNA sense strand
gaucuggguuugaaauugg

SEQ ID NO: 168325 - RNA, 19 nt, Homo sapiens
  misc_RNA (1)...(19): siRNA sense strand
cauacucucucucguguug

SEQ ID NO: 168326 - RNA, 19 nt, Homo sapiens
  misc_RNA (1)...(19): siRNA sense strand
uaauuuaccuagagaugga

SEQ ID NO: 168327 - RNA, 19 nt, Homo sapiens
  misc_RNA (1)...(19): siRNA sense strand
cgagcagacuccugaagaa

SEQ ID NO: 168328 - RNA, 19 nt, Homo sapiens
  misc_RNA (1)...(19): siRNA sense strand
gauuuaaagcuugguguua

SEQ ID NO: 168329 - RNA, 19 nt, Homo sapiens
  misc_RNA (1)...(19): siRNA sense strand
ggaugaucauaaaggauuu

SEQ ID NO: 168330 - RNA, 19 nt, Homo sapiens
  misc_RNA (1)...(19): siRNA sense strand
cauaagaaccacaaagaug

SEQ ID NO: 168331 - RNA, 19 nt, Homo sapiens
  misc_RNA (1)...(19): siRNA sense strand
gaagaucauagucguguug

SEQ ID NO: 168332 - RNA, 19 nt, Homo sapiens
  misc_RNA (1)...(19): siRNA sense strand
gagcaaaaguaguuucuug

SEQ ID NO: 168333 - RNA, 19 nt, Homo sapiens
  misc_RNA (1)...(19): siRNA sense strand
agaaagagguaugagauuc

SEQ ID NO: 168334 - RNA, 19 nt, Homo sapiens
  misc_RNA (1)...(19): siRNA sense strand
aaaggaaguuuaaccauac

SEQ ID NO: 168335 - RNA, 19 nt, Homo sapiens
  misc_RNA (1)...(19): siRNA sense strand
uggagaugcuggagacuuu

SEQ ID NO: 168336 - RNA, 19 nt, Homo sapiens
  misc_RNA (1)...(19): siRNA sense strand
gauaugaaacaucagaguu

SEQ ID NO: 168337 - RNA, 19 nt, Homo sapiens
  misc_RNA (1)...(19): siRNA sense strand
ggauugcucuccucucagu

SEQ ID NO: 168338 - RNA, 19 nt, Homo sapiens
  misc_RNA (1)...(19): siRNA sense strand
ggaauuauugagcacuuaa

SEQ ID NO: 168339 - RNA, 19 nt, Homo sapiens
  misc_RNA (1)...(19): siRNA sense strand
guaugucaguggacuaaug

SEQ ID NO: 168340 - RNA, 19 nt, Homo sapiens
  misc_RNA (1)...(19): siRNA sense strand
caaagauggagauguauau

SEQ ID NO: 168341 - RNA, 19 nt, Homo sapiens
  misc_RNA (1)...(19): siRNA sense strand
ggcaugagacucugagaaa

SEQ ID NO: 168342 - RNA, 19 nt, Homo sapiens
  misc_RNA (1)...(19): siRNA sense strand
aagccaagauguuuacaga

SEQ ID NO: 168343 - RNA, 19 nt, Homo sapiens
  misc_RNA (1)...(19): siRNA sense strand
uaugauugcuauggugaua

SEQ ID NO: 168344 - RNA, 19 nt, Homo sapiens
  misc_RNA (1)...(19): siRNA sense strand
uaaagcagcagagaucgua

SEQ ID NO: 168345 - RNA, 19 nt, Homo sapiens
  misc_RNA (1)...(19): siRNA sense strand
gauuaaagcagcagagauc

SEQ ID NO: 168346 - RNA, 19 nt, Homo sapiens
  misc_RNA (1)...(19): siRNA sense strand
gagcaaaaguggcuuauac

SEQ ID NO: 168347 - RNA, 19 nt, Homo sapiens
  misc_RNA (1)...(19): siRNA sense strand
guuaugaguggaacagaua

SEQ ID NO: 168348 - RNA, 19 nt, Homo sapiens
  misc_RNA (1)...(19): siRNA sense strand
guuugaaauuggccaagua

SEQ ID NO: 168349 - RNA, 19 nt, Homo sapiens
  misc_RNA (1)...(19): siRNA sense strand
gagaagccaucuguguuuc

SEQ ID NO: 168350 - RNA, 19 nt, Homo sapiens
  misc_RNA (1)...(19): siRNA sense strand
ugagaagccaucuguguuu

SEQ ID NO: 168351 - RNA, 19 nt, Homo sapiens
  misc_RNA (1)...(19): siRNA sense strand
auucugaucugcaaacuug

SEQ ID NO: 168352 - RNA, 19 nt, Homo sapiens
  misc_RNA (1)...(19): siRNA sense strand
gguagaggauucugaucug

SEQ ID NO: 168353 - RNA, 19 nt, Homo sapiens
  misc_RNA (1)...(19): siRNA sense strand
caagcuagauggugaacgu

SEQ ID NO: 168354 - RNA, 19 nt, Homo sapiens
  misc_RNA (1)...(19): siRNA sense strand
gcaaaugcacaaagaugga

SEQ ID NO: 168355 - RNA, 19 nt, Homo sapiens
  misc_RNA (1)...(19): siRNA sense strand
gcucgcaucuaaacaccuu

SEQ ID NO: 168356 - RNA, 19 nt, Homo sapiens
  misc_RNA (1)...(19): siRNA sense strand
gaucugcaaacuuguuauu

SEQ ID NO: 168357 - RNA, 19 nt, Homo sapiens
  misc_RNA (1)...(19): siRNA sense strand
guaggacucagugauauuu

SEQ ID NO: 168358 - RNA, 19 nt, Homo sapiens
  misc_RNA (1)...(19): siRNA sense strand
gaauuuggugguuauauag

SEQ ID NO: 168359 - RNA, 19 nt, Homo sapiens
  misc_RNA (1)...(19): siRNA sense strand
gacaaggaguggcaugagu

SEQ ID NO: 168360 - RNA, 19 nt, Homo sapiens
  misc_RNA (1)...(19): siRNA sense strand
gagaugauggccuauaauc

SEQ ID NO: 168361 - RNA, 19 nt, Homo sapiens
  misc_RNA (1)...(19): siRNA sense strand
cacaaacuguugcaucuca

SEQ ID NO: 168362 - RNA, 19 nt, Homo sapiens
  misc_RNA (1)...(19): siRNA sense strand
gagagaauggccuauggaa

SEQ ID NO: 168363 - RNA, 19 nt, Homo sapiens
  misc_RNA (1)...(19): siRNA sense strand
ggaagaucauagucguguu

SEQ ID NO: 168364 - RNA, 19 nt, Homo sapiens
  misc_RNA (1)...(19): siRNA sense strand
uuaaugaccugaguaccaa

SEQ ID NO: 168365 - RNA, 19 nt, Homo sapiens
  misc_RNA (1)...(19): siRNA sense strand
uuauauagguggugaugau

SEQ ID NO: 168366 - RNA, 19 nt, Homo sapiens
  misc_RNA (1)...(19): siRNA sense strand
cauugaaccuuguaauucu

SEQ ID NO: 168367 - RNA, 19 nt, Homo sapiens
  misc_RNA (1)...(19): siRNA sense strand
gaaagaacuguaugaucug

SEQ ID NO: 168368 - RNA, 19 nt, Homo sapiens
  misc_RNA (1)...(19): siRNA sense strand
aaauacuucucucgaaaug

SEQ ID NO: 168369 - RNA, 19 nt, Homo sapiens
  misc_RNA (1)...(19): siRNA sense strand
gcagauauugagcacauug

SEQ ID NO: 168370 - RNA, 19 nt, Homo sapiens
  misc_RNA (1)...(19): siRNA sense strand
uguaugaucuggguuugaa

SEQ ID NO: 168371 - RNA, 19 nt, Homo sapiens
  misc_RNA (1)...(19): siRNA sense strand
gagcagacuccugaagaaa

SEQ ID NO: 168372 - RNA, 19 nt, Homo sapiens
  misc_RNA (1)...(19): siRNA sense strand
gcaccuaaccuuacuaacg

SEQ ID NO: 168373 - RNA, 19 nt, Homo sapiens
  misc_RNA (1)...(19): siRNA sense strand
gagcaugacccucacgaua

SEQ ID NO: 168374 - RNA, 19 nt, Homo sapiens
  misc_RNA (1)...(19): siRNA sense strand
gcccagaugugaagaauuc

SEQ ID NO: 168375 - RNA, 19 nt, Homo sapiens
  misc_RNA (1)...(19): siRNA sense strand
gagaagaggccauccuuug

SEQ ID NO: 168376 - RNA, 19 nt, Homo sapiens
  misc_RNA (1)...(19): siRNA sense strand
gaccggaucuuggaaauca

SEQ ID NO: 168377 - RNA, 19 nt, Homo sapiens
  misc_RNA (1)...(19): siRNA sense strand
gagauugaccugcugauuc

SEQ ID NO: 168378 - RNA, 19 nt, Homo sapiens
  misc_RNA (1)...(19): siRNA sense strand
gaacgcagacccugacuac

SEQ ID NO: 168379 - RNA, 19 nt, Homo sapiens
  misc_RNA (1)...(19): siRNA sense strand
gcaugacccucacgauaca

SEQ ID NO: 168380 - RNA, 19 nt, Homo sapiens
  misc_RNA (1)...(19): siRNA sense strand
gaagaggccauccuuugug

SEQ ID NO: 168381 - RNA, 19 nt, Homo sapiens
  misc_RNA (1)...(19): siRNA sense strand
gguugacgcuacuuuguug

SEQ ID NO: 168382 - RNA, 19 nt, Homo sapiens
  misc_RNA (1)...(19): siRNA sense strand
gacaagaggcucaacuuca

SEQ ID NO: 168383 - RNA, 19 nt, Homo sapiens
  misc_RNA (1)...(19): siRNA sense strand
ggacaagaggcucaacuuc

SEQ ID NO: 168384 - RNA, 19 nt, Homo sapiens
  misc_RNA (1)...(19): siRNA sense strand
gaucuaugauggccaguac

SEQ ID NO: 168385 - RNA, 19 nt, Homo sapiens
  misc_RNA (1)...(19): siRNA sense strand
acaagaggcucaacuucau

SEQ ID NO: 168386 - RNA, 19 nt, Homo sapiens
  misc_RNA (1)...(19): siRNA sense strand
ccaagggacugguuauggu

SEQ ID NO: 168387 - RNA, 19 nt, Homo sapiens
  misc_RNA (1)...(19): siRNA sense strand
agauugaccugcugauuca

SEQ ID NO: 168388 - RNA, 19 nt, Homo sapiens
  misc_RNA (1)...(19): siRNA sense strand
gagaccggaucuuggaaau

SEQ ID NO: 168389 - RNA, 19 nt, Homo sapiens
  misc_RNA (1)...(19): siRNA sense strand
gcacgcccauccgaaaugu

SEQ ID NO: 168390 - RNA, 19 nt, Homo sapiens
  misc_RNA (1)...(19): siRNA sense strand
ucaacuucaucacugagua

SEQ ID NO: 168391 - RNA, 19 nt, Homo sapiens
  misc_RNA (1)...(19): siRNA sense strand
ucaaggaggugaaggucau

SEQ ID NO: 168392 - RNA, 19 nt, Homo sapiens
  misc_RNA (1)...(19): siRNA sense strand
gagcccagaugugaagaau

SEQ ID NO: 168393 - RNA, 19 nt, Homo sapiens
  misc_RNA (1)...(19): siRNA sense strand
guggauguguucuccuuug

SEQ ID NO: 168394 - RNA, 19 nt, Homo sapiens
  misc_RNA (1)...(19): siRNA sense strand
ugagacaggugaggugaug

SEQ ID NO: 168395 - RNA, 19 nt, Homo sapiens
  misc_RNA (1)...(19): siRNA sense strand
aagaggccauccuuuguga

SEQ ID NO: 168396 - RNA, 19 nt, Homo sapiens
  misc_RNA (1)...(19): siRNA sense strand
ccauggagccagagaguga

SEQ ID NO: 168397 - RNA, 19 nt, Homo sapiens
  misc_RNA (1)...(19): siRNA sense strand
ggagaccggaucuuggaaa

SEQ ID NO: 168398 - RNA, 19 nt, Homo sapiens
  misc_RNA (1)...(19): siRNA sense strand
gauggcaccugagaugauc

SEQ ID NO: 168399 - RNA, 19 nt, Homo sapiens
  misc_RNA (1)...(19): siRNA sense strand
gaccucaacucccacaacu

SEQ ID NO: 168400 - RNA, 19 nt, Homo sapiens
  misc_RNA (1)...(19): siRNA sense strand
gugaggugauggugaugaa

SEQ ID NO: 168401 - RNA, 19 nt, Homo sapiens
  misc_RNA (1)...(19): siRNA sense strand
ggccagaggaucuaugaug

SEQ ID NO: 168402 - RNA, 19 nt, Homo sapiens
  misc_RNA (1)...(19): siRNA sense strand
caggugaggugauggugau

SEQ ID NO: 168403 - RNA, 19 nt, Homo sapiens
  misc_RNA (1)...(19): siRNA sense strand
ccaacgugcucaaguucau

SEQ ID NO: 168404 - RNA, 19 nt, Homo sapiens
  misc_RNA (1)...(19): siRNA sense strand
gaagccagaccgcaagaag

SEQ ID NO: 168405 - RNA, 19 nt, Homo sapiens
  misc_RNA (1)...(19): siRNA sense strand
uggcaagcguggacuuuca

SEQ ID NO: 168406 - RNA, 19 nt, Homo sapiens
  misc_RNA (1)...(19): siRNA sense strand
ggccgcagcuaugaugaga

SEQ ID NO: 168407 - RNA, 19 nt, Homo sapiens
  misc_RNA (1)...(19): siRNA sense strand
gagguugacgcuacuuugu

SEQ ID NO: 168408 - RNA, 19 nt, Homo sapiens
  misc_RNA (1)...(19): siRNA sense strand
cgagaagaggccauccuuu

SEQ ID NO: 168409 - RNA, 19 nt, Homo sapiens
  misc_RNA (1)...(19): siRNA sense strand
ccgcagcuaugaugagaag

SEQ ID NO: 168410 - RNA, 19 nt, Homo sapiens
  misc_RNA (1)...(19): siRNA sense strand
gagcauggacagccaguac

SEQ ID NO: 168411 - RNA, 19 nt, Homo sapiens
  misc_RNA (1)...(19): siRNA sense strand
gcaccaguacuaugagaag

SEQ ID NO: 168412 - RNA, 19 nt, Homo sapiens
  misc_RNA (1)...(19): siRNA sense strand
gagugagcuuugccaagga

SEQ ID NO: 168413 - RNA, 19 nt, Homo sapiens
  misc_RNA (1)...(19): siRNA sense strand
ggauggcaccugagaugau

SEQ ID NO: 168414 - RNA, 19 nt, Homo sapiens
  misc_RNA (1)...(19): siRNA sense strand
gcacugcuacuaccagacu

SEQ ID NO: 168415 - RNA, 19 nt, Homo sapiens
  misc_RNA (1)...(19): siRNA sense strand
agaagaggccauccuuugu

SEQ ID NO: 168416 - RNA, 19 nt, Homo sapiens
  misc_RNA (1)...(19): siRNA sense strand
augagaagguggauguguu

SEQ ID NO: 168417 - RNA, 19 nt, Homo sapiens
  misc_RNA (1)...(19): siRNA sense strand
ggucaugcgaugccuggaa

SEQ ID NO: 168418 - RNA, 19 nt, Homo sapiens
  misc_RNA (1)...(19): siRNA sense strand
ugucgcaccaguacuauga

SEQ ID NO: 168419 - RNA, 19 nt, Homo sapiens
  misc_RNA (1)...(19): siRNA sense strand
cuucaucacugaguacauc

SEQ ID NO: 168420 - RNA, 19 nt, Homo sapiens
  misc_RNA (1)...(19): siRNA sense strand
ccaguacuaugagaaggau

SEQ ID NO: 168421 - RNA, 19 nt, Homo sapiens
  misc_RNA (1)...(19): siRNA sense strand
gaugagaagguggaugugu

SEQ ID NO: 168422 - RNA, 19 nt, Homo sapiens
  misc_RNA (1)...(19): siRNA sense strand
gcaugagcccagaugugaa

SEQ ID NO: 168423 - RNA, 19 nt, Homo sapiens
  misc_RNA (1)...(19): siRNA sense strand
gagcagcuggacagagguu

SEQ ID NO: 168424 - RNA, 19 nt, Homo sapiens
  misc_RNA (1)...(19): siRNA sense strand
cgagauugaccugcugauu

SEQ ID NO: 168425 - RNA, 19 nt, Homo sapiens
  misc_RNA (1)...(19): siRNA sense strand
ccugagcucuccggcuuau

SEQ ID NO: 168426 - RNA, 19 nt, Homo sapiens
  misc_RNA (1)...(19): siRNA sense strand
gcagcuaugaugagaaggu

SEQ ID NO: 168427 - RNA, 19 nt, Homo sapiens
  misc_RNA (1)...(19): siRNA sense strand
gcggccagaggaucuauga

SEQ ID NO: 168428 - RNA, 19 nt, Homo sapiens
  misc_RNA (1)...(19): siRNA sense strand
ucacgugugggaccuuuau

SEQ ID NO: 168429 - RNA, 19 nt, Homo sapiens
  misc_RNA (1)...(19): siRNA sense strand
ggcucaacuucaucacuga

SEQ ID NO: 168430 - RNA, 19 nt, Homo sapiens
  misc_RNA (1)...(19): siRNA sense strand
ccucacgugugggaccuuu

SEQ ID NO: 168431 - RNA, 19 nt, Homo sapiens
  misc_RNA (1)...(19): siRNA sense strand
ugcaugagcccagauguga

SEQ ID NO: 168432 - RNA, 19 nt, Homo sapiens
  misc_RNA (1)...(19): siRNA sense strand
cgucggagaccggaucuug

SEQ ID NO: 168433 - RNA, 19 nt, Homo sapiens
  misc_RNA (1)...(19): siRNA sense strand
gaggccauccuuugugaag

SEQ ID NO: 168434 - RNA, 19 nt, Homo sapiens
  misc_RNA (1)...(19): siRNA sense strand
ugagaagguggauguguuc

SEQ ID NO: 168435 - RNA, 19 nt, Homo sapiens
  misc_RNA (1)...(19): siRNA sense strand
uaccuccacuccaugaaca

SEQ ID NO: 168436 - RNA, 19 nt, Homo sapiens
  misc_RNA (1)...(19): siRNA sense strand
ggaucuaugauggccagua

SEQ ID NO: 168437 - RNA, 19 nt, Homo sapiens
  misc_RNA (1)...(19): siRNA sense strand
ucgcaccaguacuaugaga

SEQ ID NO: 168438 - RNA, 19 nt, Homo sapiens
  misc_RNA (1)...(19): siRNA sense strand
gcagcuggacagagguuuc

SEQ ID NO: 168439 - RNA, 19 nt, Homo sapiens
  misc_RNA (1)...(19): siRNA sense strand
ggccauccuuugugaagcu

SEQ ID NO: 168440 - RNA, 19 nt, Homo sapiens
  misc_RNA (1)...(19): siRNA sense strand
agaggaaggaagcgaguug

SEQ ID NO: 168441 - RNA, 19 nt, Homo sapiens
  misc_RNA (1)...(19): siRNA sense strand
gagcaugacccucacgaua

SEQ ID NO: 168442 - RNA, 19 nt, Homo sapiens
  misc_RNA (1)...(19): siRNA sense strand
gcccagaugugaagaauuc

SEQ ID NO: 168443 - RNA, 19 nt, Homo sapiens
  misc_RNA (1)...(19): siRNA sense strand
gaccggaucuuggaaauca

SEQ ID NO: 168444 - RNA, 19 nt, Homo sapiens
  misc_RNA (1)...(19): siRNA sense strand
gagauugaccugcugauuc

SEQ ID NO: 168445 - RNA, 19 nt, Homo sapiens
  misc_RNA (1)...(19): siRNA sense strand
gguugacgcuacuuuguug

SEQ ID NO: 168446 - RNA, 19 nt, Homo sapiens
  misc_RNA (1)...(19): siRNA sense strand
gcaugacccucacgauaca

SEQ ID NO: 168447 - RNA, 19 nt, Homo sapiens
  misc_RNA (1)...(19): siRNA sense strand
gaucuaugauggccaguac

SEQ ID NO: 168448 - RNA, 19 nt, Homo sapiens
  misc_RNA (1)...(19): siRNA sense strand
ccaagggacugguuauggu

SEQ ID NO: 168449 - RNA, 19 nt, Homo sapiens
  misc_RNA (1)...(19): siRNA sense strand
agauugaccugcugauuca

SEQ ID NO: 168450 - RNA, 19 nt, Homo sapiens
  misc_RNA (1)...(19): siRNA sense strand
gagaccggaucuuggaaau

SEQ ID NO: 168451 - RNA, 19 nt, Homo sapiens
  misc_RNA (1)...(19): siRNA sense strand
gcacgcccauccgaaaugu

SEQ ID NO: 168452 - RNA, 19 nt, Homo sapiens
  misc_RNA (1)...(19): siRNA sense strand
gagcccagaugugaagaau

SEQ ID NO: 168453 - RNA, 19 nt, Homo sapiens
  misc_RNA (1)...(19): siRNA sense strand
ggagaccggaucuuggaaa

SEQ ID NO: 168454 - RNA, 19 nt, Homo sapiens
  misc_RNA (1)...(19): siRNA sense strand
ggccagaggaucuaugaug

SEQ ID NO: 168455 - RNA, 19 nt, Homo sapiens
  misc_RNA (1)...(19): siRNA sense strand
uggcaagcguggacuuuca

SEQ ID NO: 168456 - RNA, 19 nt, Homo sapiens
  misc_RNA (1)...(19): siRNA sense strand
gagguugacgcuacuuugu

SEQ ID NO: 168457 - RNA, 19 nt, Homo sapiens
  misc_RNA (1)...(19): siRNA sense strand
gcaccaguacuaugagaag

SEQ ID NO: 168458 - RNA, 19 nt, Homo sapiens
  misc_RNA (1)...(19): siRNA sense strand
gcacugcuacuaccagacu

SEQ ID NO: 168459 - RNA, 19 nt, Homo sapiens
  misc_RNA (1)...(19): siRNA sense strand
ugucgcaccaguacuauga

SEQ ID NO: 168460 - RNA, 19 nt, Homo sapiens
  misc_RNA (1)...(19): siRNA sense strand
ccaguacuaugagaaggau

SEQ ID NO: 168461 - RNA, 19 nt, Homo sapiens
  misc_RNA (1)...(19): siRNA sense strand
gcaugagcccagaugugaa

SEQ ID NO: 168462 - RNA, 19 nt, Homo sapiens
  misc_RNA (1)...(19): siRNA sense strand
cgagauugaccugcugauu

SEQ ID NO: 168463 - RNA, 19 nt, Homo sapiens
  misc_RNA (1)...(19): siRNA sense strand
gcggccagaggaucuauga

SEQ ID NO: 168464 - RNA, 19 nt, Homo sapiens
  misc_RNA (1)...(19): siRNA sense strand
ccugagcucuccggcuuau

SEQ ID NO: 168465 - RNA, 19 nt, Homo sapiens
  misc_RNA (1)...(19): siRNA sense strand
ucacgugugggaccuuuau

SEQ ID NO: 168466 - RNA, 19 nt, Homo sapiens
  misc_RNA (1)...(19): siRNA sense strand
ccucacgugugggaccuuu

SEQ ID NO: 168467 - RNA, 19 nt, Homo sapiens
  misc_RNA (1)...(19): siRNA sense strand
ugcaugagcccagauguga

SEQ ID NO: 168468 - RNA, 19 nt, Homo sapiens
  misc_RNA (1)...(19): siRNA sense strand
ggaucuaugauggccagua

SEQ ID NO: 168469 - RNA, 19 nt, Homo sapiens
  misc_RNA (1)...(19): siRNA sense strand
cgucggagaccggaucuug

SEQ ID NO: 168470 - RNA, 19 nt, Homo sapiens
  misc_RNA (1)...(19): siRNA sense strand
ucgcaccaguacuaugaga

SEQ ID NO: 168471 - RNA, 19 nt, Homo sapiens
  misc_RNA (1)...(19): siRNA sense strand
agaggaaggaagcgaguug

SEQ ID NO: 168472 - RNA, 19 nt, Homo sapiens
  misc_RNA (1)...(19): siRNA sense strand
ugaaggcauuggacaagua

SEQ ID NO: 168473 - RNA, 19 nt, Homo sapiens
  misc_RNA (1)...(19): siRNA sense strand
gcacgaagacugccucaag

SEQ ID NO: 168474 - RNA, 19 nt, Homo sapiens
  misc_RNA (1)...(19): siRNA sense strand
gagacaaauucuuccugaa

SEQ ID NO: 168475 - RNA, 19 nt, Homo sapiens
  misc_RNA (1)...(19): siRNA sense strand
gcuaucugcugaaggcauu

SEQ ID NO: 168476 - RNA, 19 nt, Homo sapiens
  misc_RNA (1)...(19): siRNA sense strand
aacaugaucuugugucaga

SEQ ID NO: 168477 - RNA, 19 nt, Homo sapiens
  misc_RNA (1)...(19): siRNA sense strand
ugugucagauggacuauga

SEQ ID NO: 168478 - RNA, 19 nt, Homo sapiens
  misc_RNA (1)...(19): siRNA sense strand
gaucccagccuucgagaug

SEQ ID NO: 168479 - RNA, 19 nt, Homo sapiens
  misc_RNA (1)...(19): siRNA sense strand
ggacaaguacuggcacgaa

SEQ ID NO: 168480 - RNA, 19 nt, Homo sapiens
  misc_RNA (1)...(19): siRNA sense strand
ucagauggacuaugaggaa

SEQ ID NO: 168481 - RNA, 19 nt, Homo sapiens
  misc_RNA (1)...(19): siRNA sense strand
gaucaaggaccgcuaucug

SEQ ID NO: 168482 - RNA, 19 nt, Homo sapiens
  misc_RNA (1)...(19): siRNA sense strand
gcuccacccucuacaccaa

SEQ ID NO: 168483 - RNA, 19 nt, Homo sapiens
  misc_RNA (1)...(19): siRNA sense strand
uguaucaccucgacugcuu

SEQ ID NO: 168484 - RNA, 19 nt, Homo sapiens
  misc_RNA (1)...(19): siRNA sense strand
gaggaagggcagcucaaug

SEQ ID NO: 168485 - RNA, 19 nt, Homo sapiens
  misc_RNA (1)...(19): siRNA sense strand
caagaucaaggaccgcuau

SEQ ID NO: 168486 - RNA, 19 nt, Homo sapiens
  misc_RNA (1)...(19): siRNA sense strand
cacgaagacugccucaagu

SEQ ID NO: 168487 - RNA, 19 nt, Homo sapiens
  misc_RNA (1)...(19): siRNA sense strand
gcuguaaccgcaagaucaa

SEQ ID NO: 168488 - RNA, 19 nt, Homo sapiens
  misc_RNA (1)...(19): siRNA sense strand
ggaccgcuaucugcugaag

SEQ ID NO: 168489 - RNA, 19 nt, Homo sapiens
  misc_RNA (1)...(19): siRNA sense strand
cgaagacugccucaagugu

SEQ ID NO: 168490 - RNA, 19 nt, Homo sapiens
  misc_RNA (1)...(19): siRNA sense strand
gcgacuaccugaggcucuu

SEQ ID NO: 168491 - RNA, 19 nt, Homo sapiens
  misc_RNA (1)...(19): siRNA sense strand
gaaggcauuggacaaguac

SEQ ID NO: 168492 - RNA, 19 nt, Homo sapiens
  misc_RNA (1)...(19): siRNA sense strand
ggcuguaaccgcaagauca

SEQ ID NO: 168493 - RNA, 19 nt, Homo sapiens
  misc_RNA (1)...(19): siRNA sense strand
caccaaggccaaccucauc

SEQ ID NO: 168494 - RNA, 19 nt, Homo sapiens
  misc_RNA (1)...(19): siRNA sense strand
agaaagggaugaccauuua

SEQ ID NO: 168495 - RNA, 19 nt, Homo sapiens
  misc_RNA (1)...(19): siRNA sense strand
gaaaugugccugcagcaua

SEQ ID NO: 168496 - RNA, 19 nt, Homo sapiens
  misc_RNA (1)...(19): siRNA sense strand
caacgagacucacaucuuc

SEQ ID NO: 168497 - RNA, 19 nt, Homo sapiens
  misc_RNA (1)...(19): siRNA sense strand
gcagauggcugugacuuug

SEQ ID NO: 168498 - RNA, 19 nt, Homo sapiens
  misc_RNA (1)...(19): siRNA sense strand
ccaaaggaauggagcaguu

SEQ ID NO: 168499 - RNA, 19 nt, Homo sapiens
  misc_RNA (1)...(19): siRNA sense strand
guaaagagucagagaaaga

SEQ ID NO: 168500 - RNA, 19 nt, Homo sapiens
  misc_RNA (1)...(19): siRNA sense strand
acacauacaucuacaucuu

SEQ ID NO: 168501 - RNA, 19 nt, Homo sapiens
  misc_RNA (1)...(19): siRNA sense strand
caguguggguuccaucuua

SEQ ID NO: 168502 - RNA, 19 nt, Homo sapiens
  misc_RNA (1)...(19): siRNA sense strand
caucacugguugcuguuua

SEQ ID NO: 168503 - RNA, 19 nt, Homo sapiens
  misc_RNA (1)...(19): siRNA sense strand
caucuuacuugucacguuu

SEQ ID NO: 168504 - RNA, 19 nt, Homo sapiens
  misc_RNA (1)...(19): siRNA sense strand
gggcaggccuggugcaaau

SEQ ID NO: 168505 - RNA, 19 nt, Homo sapiens
  misc_RNA (1)...(19): siRNA sense strand
gcaaaguccaagauuguuu

SEQ ID NO: 168506 - RNA, 19 nt, Homo sapiens
  misc_RNA (1)...(19): siRNA sense strand
gugaugaucuccugcaauc

SEQ ID NO: 168507 - RNA, 19 nt, Homo sapiens
  misc_RNA (1)...(19): siRNA sense strand
ggacuggacugcuacuacu

SEQ ID NO: 168508 - RNA, 19 nt, Homo sapiens
  misc_RNA (1)...(19): siRNA sense strand
aaaugugccugcagcauau

SEQ ID NO: 168509 - RNA, 19 nt, Homo sapiens
  misc_RNA (1)...(19): siRNA sense strand
gaagaaagggaugaccauu

SEQ ID NO: 168510 - RNA, 19 nt, Homo sapiens
  misc_RNA (1)...(19): siRNA sense strand
gacuuugucugccguucua

SEQ ID NO: 168511 - RNA, 19 nt, Homo sapiens
  misc_RNA (1)...(19): siRNA sense strand
ggguaaagagucagagaaa

SEQ ID NO: 168512 - RNA, 19 nt, Homo sapiens
  misc_RNA (1)...(19): siRNA sense strand
gaugaccauuuauuaccaa

SEQ ID NO: 168513 - RNA, 19 nt, Homo sapiens
  misc_RNA (1)...(19): siRNA sense strand
ggaugaccauuuauuacca

SEQ ID NO: 168514 - RNA, 19 nt, Homo sapiens
  misc_RNA (1)...(19): siRNA sense strand
aagggaugaccauuuauua

SEQ ID NO: 168515 - RNA, 19 nt, Homo sapiens
  misc_RNA (1)...(19): siRNA sense strand
guggcaaaguccaagauug

SEQ ID NO: 168516 - RNA, 19 nt, Homo sapiens
  misc_RNA (1)...(19): siRNA sense strand
gaaagggaugaccauuuau

SEQ ID NO: 168517 - RNA, 19 nt, Homo sapiens
  misc_RNA (1)...(19): siRNA sense strand
aagaaagggaugaccauuu

SEQ ID NO: 168518 - RNA, 19 nt, Homo sapiens
  misc_RNA (1)...(19): siRNA sense strand
gguaaagagucagagaaag

SEQ ID NO: 168519 - RNA, 19 nt, Homo sapiens
  misc_RNA (1)...(19): siRNA sense strand
caaaggaauggagcaguuu

SEQ ID NO: 168520 - RNA, 19 nt, Homo sapiens
  misc_RNA (1)...(19): siRNA sense strand
gaugaucuccugcaaucga

SEQ ID NO: 168521 - RNA, 19 nt, Homo sapiens
  misc_RNA (1)...(19): siRNA sense strand
guucagacacauacaucua

SEQ ID NO: 168522 - RNA, 19 nt, Homo sapiens
  misc_RNA (1)...(19): siRNA sense strand
guucuaaaccucgaaaugu

SEQ ID NO: 168523 - RNA, 19 nt, Homo sapiens
  misc_RNA (1)...(19): siRNA sense strand
aaagggaugaccauuuauu

SEQ ID NO: 168524 - RNA, 19 nt, Homo sapiens
  misc_RNA (1)...(19): siRNA sense strand
gauuguuucuaccucuuug

SEQ ID NO: 168525 - RNA, 19 nt, Homo sapiens
  misc_RNA (1)...(19): siRNA sense strand
gagagaauccuggcagaca

SEQ ID NO: 168526 - RNA, 19 nt, Homo sapiens
  misc_RNA (1)...(19): siRNA sense strand
gguuccaucuuacuuguca

SEQ ID NO: 168527 - RNA, 19 nt, Homo sapiens
  misc_RNA (1)...(19): siRNA sense strand
cuggaggacuggacugcua

SEQ ID NO: 168528 - RNA, 19 nt, Homo sapiens
  misc_RNA (1)...(19): siRNA sense strand
gggccaggguucagacaca

SEQ ID NO: 168529 - RNA, 19 nt, Homo sapiens
  misc_RNA (1)...(19): siRNA sense strand
ggagcaguuuccccacuua

SEQ ID NO: 168530 - RNA, 19 nt, Homo sapiens
  misc_RNA (1)...(19): siRNA sense strand
gauagcagccuggccuguu

SEQ ID NO: 168531 - RNA, 19 nt, Homo sapiens
  misc_RNA (1)...(19): siRNA sense strand
caaaguccaagauuguuuc

SEQ ID NO: 168532 - RNA, 19 nt, Homo sapiens
  misc_RNA (1)...(19): siRNA sense strand
acauacaucuacaucuuca

SEQ ID NO: 168533 - RNA, 19 nt, Homo sapiens
  misc_RNA (1)...(19): siRNA sense strand
ucaacgagacucacaucuu

SEQ ID NO: 168534 - RNA, 19 nt, Homo sapiens
  misc_RNA (1)...(19): siRNA sense strand
gaagcuggcaaccacacuu

SEQ ID NO: 168535 - RNA, 19 nt, Homo sapiens
  misc_RNA (1)...(19): siRNA sense strand
ggaggagucagaagaaagg

SEQ ID NO: 168536 - RNA, 19 nt, Homo sapiens
  misc_RNA (1)...(19): siRNA sense strand
guagugggagccaaaggaa

SEQ ID NO: 168537 - RNA, 19 nt, Homo sapiens
  misc_RNA (1)...(19): siRNA sense strand
gagaauccuggcagacaga

SEQ ID NO: 168538 - RNA, 19 nt, Homo sapiens
  misc_RNA (1)...(19): siRNA sense strand
guuucuaccucuuugagau

SEQ ID NO: 168539 - RNA, 19 nt, Homo sapiens
  misc_RNA (1)...(19): siRNA sense strand
guaaugggaaggagacagu

SEQ ID NO: 168540 - RNA, 19 nt, Homo sapiens
  misc_RNA (1)...(19): siRNA sense strand
ucagacacauacaucuaca

SEQ ID NO: 168541 - RNA, 19 nt, Homo sapiens
  misc_RNA (1)...(19): siRNA sense strand
acugguugcuguuuauguu

SEQ ID NO: 168542 - RNA, 19 nt, Homo sapiens
  misc_RNA (1)...(19): siRNA sense strand
ccaucuuacuugucacguu

SEQ ID NO: 168543 - RNA, 19 nt, Homo sapiens
  misc_RNA (1)...(19): siRNA sense strand
aguccaagauuguuucuac

SEQ ID NO: 168544 - RNA, 19 nt, Homo sapiens
  misc_RNA (1)...(19): siRNA sense strand
gacacacccuagcggacaa

SEQ ID NO: 168545 - RNA, 19 nt, Homo sapiens
  misc_RNA (1)...(19): siRNA sense strand
gugcaaaucaacaaaagua

SEQ ID NO: 168546 - RNA, 19 nt, Homo sapiens
  misc_RNA (1)...(19): siRNA sense strand
gguagugggagccaaagga

SEQ ID NO: 168547 - RNA, 19 nt, Homo sapiens
  misc_RNA (1)...(19): siRNA sense strand
uggcaaaguccaagauugu

SEQ ID NO: 168548 - RNA, 19 nt, Homo sapiens
  misc_RNA (1)...(19): siRNA sense strand
ugaggagcguggcaaaguc

SEQ ID NO: 168549 - RNA, 19 nt, Homo sapiens
  misc_RNA (1)...(19): siRNA sense strand
agaaaaggguaaagaguca

SEQ ID NO: 168550 - RNA, 19 nt, Homo sapiens
  misc_RNA (1)...(19): siRNA sense strand
gaaguaauuggaucaugcu

SEQ ID NO: 168551 - RNA, 19 nt, Homo sapiens
  misc_RNA (1)...(19): siRNA sense strand
gcaggccuggugcaaauca

SEQ ID NO: 168552 - RNA, 19 nt, Homo sapiens
  misc_RNA (1)...(19): siRNA sense strand
cggaaguaauuggaucaug

SEQ ID NO: 168553 - RNA, 19 nt, Homo sapiens
  misc_RNA (1)...(19): siRNA sense strand
gugcaguggugaugaucuc

SEQ ID NO: 168554 - RNA, 19 nt, Homo sapiens
  misc_RNA (1)...(19): siRNA sense strand
uaaagagucagagaaagag

SEQ ID NO: 168555 - RNA, 19 nt, Homo sapiens
  misc_RNA (1)...(19): siRNA sense strand
agagaucucccaccucagu

SEQ ID NO: 168556 - RNA, 19 nt, Homo sapiens
  misc_RNA (1)...(19): siRNA sense strand
agacacauacaucuacauc

SEQ ID NO: 168557 - RNA, 19 nt, Homo sapiens
  misc_RNA (1)...(19): siRNA sense strand
gggaggagucagaagaaag

SEQ ID NO: 168558 - RNA, 19 nt, Homo sapiens
  misc_RNA (1)...(19): siRNA sense strand
ggcaaaguccaagauuguu

SEQ ID NO: 168559 - RNA, 19 nt, Homo sapiens
  misc_RNA (1)...(19): siRNA sense strand
ugaauaugacaaccacugu

SEQ ID NO: 168560 - RNA, 19 nt, Homo sapiens
  misc_RNA (1)...(19): siRNA sense strand
uucuaaaccucgaaaugug

SEQ ID NO: 168561 - RNA, 19 nt, Homo sapiens
  misc_RNA (1)...(19): siRNA sense strand
ggacagagaugccuuaaaa

SEQ ID NO: 168562 - RNA, 19 nt, Homo sapiens
  misc_RNA (1)...(19): siRNA sense strand
gagagaagcugaacauggu

SEQ ID NO: 168563 - RNA, 19 nt, Homo sapiens
  misc_RNA (1)...(19): siRNA sense strand
gggaagaaaucgacguuga

SEQ ID NO: 168564 - RNA, 19 nt, Homo sapiens
  misc_RNA (1)...(19): siRNA sense strand
gcagaucaacucacaauga

SEQ ID NO: 168565 - RNA, 19 nt, Homo sapiens
  misc_RNA (1)...(19): siRNA sense strand
acaaugaaauggagaagaa

SEQ ID NO: 168566 - RNA, 19 nt, Homo sapiens
  misc_RNA (1)...(19): siRNA sense strand
cagaucaacucacaaugaa

SEQ ID NO: 168567 - RNA, 19 nt, Homo sapiens
  misc_RNA (1)...(19): siRNA sense strand
gcacauaaagaaacuugaa

SEQ ID NO: 168568 - RNA, 19 nt, Homo sapiens
  misc_RNA (1)...(19): siRNA sense strand
ccaaauugcacauaaagaa

SEQ ID NO: 168569 - RNA, 19 nt, Homo sapiens
  misc_RNA (1)...(19): siRNA sense strand
uaacagcaguagcagauca

SEQ ID NO: 168570 - RNA, 19 nt, Homo sapiens
  misc_RNA (1)...(19): siRNA sense strand
gcaccagcaucaagagaau

SEQ ID NO: 168571 - RNA, 19 nt, Homo sapiens
  misc_RNA (1)...(19): siRNA sense strand
gaucaacucacaaugaaau

SEQ ID NO: 168572 - RNA, 19 nt, Homo sapiens
  misc_RNA (1)...(19): siRNA sense strand
aaagccaaauugcacauaa

SEQ ID NO: 168573 - RNA, 19 nt, Homo sapiens
  misc_RNA (1)...(19): siRNA sense strand
gaaaagccguucaccaaau

SEQ ID NO: 168574 - RNA, 19 nt, Homo sapiens
  misc_RNA (1)...(19): siRNA sense strand
gagaagcugaacaugguua

SEQ ID NO: 168575 - RNA, 19 nt, Homo sapiens
  misc_RNA (1)...(19): siRNA sense strand
ggagagagaagcugaacau

SEQ ID NO: 168576 - RNA, 19 nt, Homo sapiens
  misc_RNA (1)...(19): siRNA sense strand
uggagaagcugggcauuga

SEQ ID NO: 168577 - RNA, 19 nt, Homo sapiens
  misc_RNA (1)...(19): siRNA sense strand
gcuugugccuggagaaguu

SEQ ID NO: 168578 - RNA, 19 nt, Homo sapiens
  misc_RNA (1)...(19): siRNA sense strand
gaaucaagucgacacacua

SEQ ID NO: 168579 - RNA, 19 nt, Homo sapiens
  misc_RNA (1)...(19): siRNA sense strand
gaauagacgggcucaucuu

SEQ ID NO: 168580 - RNA, 19 nt, Homo sapiens
  misc_RNA (1)...(19): siRNA sense strand
gagcagcgacaccugaaga

SEQ ID NO: 168581 - RNA, 19 nt, Homo sapiens
  misc_RNA (1)...(19): siRNA sense strand
cacacuacguugaguuuau

SEQ ID NO: 168582 - RNA, 19 nt, Homo sapiens
  misc_RNA (1)...(19): siRNA sense strand
acacuacguugaguuuauu

SEQ ID NO: 168583 - RNA, 19 nt, Homo sapiens
  misc_RNA (1)...(19): siRNA sense strand
gagaagcugggcauugaga

SEQ ID NO: 168584 - RNA, 19 nt, Homo sapiens
  misc_RNA (1)...(19): siRNA sense strand
aagccaaauugcacauaaa

SEQ ID NO: 168585 - RNA, 19 nt, Homo sapiens
  misc_RNA (1)...(19): siRNA sense strand
ugaagaggcagcuggagaa

SEQ ID NO: 168586 - RNA, 19 nt, Homo sapiens
  misc_RNA (1)...(19): siRNA sense strand
gacacacuacguugaguuu

SEQ ID NO: 168587 - RNA, 19 nt, Homo sapiens
  misc_RNA (1)...(19): siRNA sense strand
gagcacggacuaucucaca

SEQ ID NO: 168588 - RNA, 19 nt, Homo sapiens
  misc_RNA (1)...(19): siRNA sense strand
gggcucaucuucgcuugug

SEQ ID NO: 168589 - RNA, 19 nt, Homo sapiens
  misc_RNA (1)...(19): siRNA sense strand
ccauguuaccauacaauaa

SEQ ID NO: 168590 - RNA, 19 nt, Homo sapiens
  misc_RNA (1)...(19): siRNA sense strand
gguuaugccuccauguuac

SEQ ID NO: 168591 - RNA, 19 nt, Homo sapiens
  misc_RNA (1)...(19): siRNA sense strand
cgaaucaagucgacacacu

SEQ ID NO: 168592 - RNA, 19 nt, Homo sapiens
  misc_RNA (1)...(19): siRNA sense strand
caacucacaaugaaaugga

SEQ ID NO: 168593 - RNA, 19 nt, Homo sapiens
  misc_RNA (1)...(19): siRNA sense strand
gcagugugagcgacucuga

SEQ ID NO: 168594 - RNA, 19 nt, Homo sapiens
  misc_RNA (1)...(19): siRNA sense strand
gcagugaugagggcuauuc

SEQ ID NO: 168595 - RNA, 19 nt, Homo sapiens
  misc_RNA (1)...(19): siRNA sense strand
acuugaagauugugacaga

SEQ ID NO: 168596 - RNA, 19 nt, Homo sapiens
  misc_RNA (1)...(19): siRNA sense strand
aagaauaacagcaguagca

SEQ ID NO: 168597 - RNA, 19 nt, Homo sapiens
  misc_RNA (1)...(19): siRNA sense strand
acaauaacaaggacagaga

SEQ ID NO: 168598 - RNA, 19 nt, Homo sapiens
  misc_RNA (1)...(19): siRNA sense strand
gagagcagcgacaccugaa

SEQ ID NO: 168599 - RNA, 19 nt, Homo sapiens
  misc_RNA (1)...(19): siRNA sense strand
uagcagaucaacucacaau

SEQ ID NO: 168600 - RNA, 19 nt, Homo sapiens
  misc_RNA (1)...(19): siRNA sense strand
gaaauggagaagaauagac

SEQ ID NO: 168601 - RNA, 19 nt, Homo sapiens
  misc_RNA (1)...(19): siRNA sense strand
aauaacagcaguagcagau

SEQ ID NO: 168602 - RNA, 19 nt, Homo sapiens
  misc_RNA (1)...(19): siRNA sense strand
ggaagaaaucgacguugac

SEQ ID NO: 168603 - RNA, 19 nt, Homo sapiens
  misc_RNA (1)...(19): siRNA sense strand
uaccauacaauaacaagga

SEQ ID NO: 168604 - RNA, 19 nt, Homo sapiens
  misc_RNA (1)...(19): siRNA sense strand
ugguuaugccuccauguua

SEQ ID NO: 168605 - RNA, 19 nt, Homo sapiens
  misc_RNA (1)...(19): siRNA sense strand
cagaaaagccguucaccaa

SEQ ID NO: 168606 - RNA, 19 nt, Homo sapiens
  misc_RNA (1)...(19): siRNA sense strand
caagucgacacacuacguu

SEQ ID NO: 168607 - RNA, 19 nt, Homo sapiens
  misc_RNA (1)...(19): siRNA sense strand
aguagcagaucaacucaca

SEQ ID NO: 168608 - RNA, 19 nt, Homo sapiens
  misc_RNA (1)...(19): siRNA sense strand
cgacacacuacguugaguu

SEQ ID NO: 168609 - RNA, 19 nt, Homo sapiens
  misc_RNA (1)...(19): siRNA sense strand
uaaagcugcaggacaguca

SEQ ID NO: 168610 - RNA, 19 nt, Homo sapiens
  misc_RNA (1)...(19): siRNA sense strand
gcaguagcagaucaacuca

SEQ ID NO: 168611 - RNA, 19 nt, Homo sapiens
  misc_RNA (1)...(19): siRNA sense strand
ggcgugucuuggucucuaa

SEQ ID NO: 168612 - RNA, 19 nt, Homo sapiens
  misc_RNA (1)...(19): siRNA sense strand
uggagcagcagcaguguga

SEQ ID NO: 168613 - RNA, 19 nt, Homo sapiens
  misc_RNA (1)...(19): siRNA sense strand
ugaaauggagaagaauaga

SEQ ID NO: 168614 - RNA, 19 nt, Homo sapiens
  misc_RNA (1)...(19): siRNA sense strand
caauaacaaggacagagau

SEQ ID NO: 168615 - RNA, 19 nt, Homo sapiens
  misc_RNA (1)...(19): siRNA sense strand
ugaagauugugacagaaaa

SEQ ID NO: 168616 - RNA, 19 nt, Homo sapiens
  misc_RNA (1)...(19): siRNA sense strand
gccaaauugcacauaaaga

SEQ ID NO: 168617 - RNA, 19 nt, Homo sapiens
  misc_RNA (1)...(19): siRNA sense strand
acacacuacguugaguuua

SEQ ID NO: 168618 - RNA, 19 nt, Homo sapiens
  misc_RNA (1)...(19): siRNA sense strand
gaagaggcagcuggagaag

SEQ ID NO: 168619 - RNA, 19 nt, Homo sapiens
  misc_RNA (1)...(19): siRNA sense strand
aagaauagacgggcucauc

SEQ ID NO: 168620 - RNA, 19 nt, Homo sapiens
  misc_RNA (1)...(19): siRNA sense strand
cggcagugaugagggcuau

SEQ ID NO: 168621 - RNA, 19 nt, Homo sapiens
  misc_RNA (1)...(19): siRNA sense strand
uaacaaaagccaaauugca

SEQ ID NO: 168622 - RNA, 19 nt, Homo sapiens
  misc_RNA (1)...(19): siRNA sense strand
gagagagaagcugaacaug

SEQ ID NO: 168623 - RNA, 19 nt, Homo sapiens
  misc_RNA (1)...(19): siRNA sense strand
gaagcugaacaugguuaug

SEQ ID NO: 168624 - RNA, 19 nt, Homo sapiens
  misc_RNA (1)...(19): siRNA sense strand
gccaucgucugcuacauua

SEQ ID NO: 168625 - RNA, 19 nt, Homo sapiens
  misc_RNA (1)...(19): siRNA sense strand
gagcacagcguccuggaua

SEQ ID NO: 168626 - RNA, 19 nt, Homo sapiens
  misc_RNA (1)...(19): siRNA sense strand
ggacaaugguggccguaga

SEQ ID NO: 168627 - RNA, 19 nt, Homo sapiens
  misc_RNA (1)...(19): siRNA sense strand
cggaggagcuagcugagua

SEQ ID NO: 168628 - RNA, 19 nt, Homo sapiens
  misc_RNA (1)...(19): siRNA sense strand
ggaaacggcccaccaagga

SEQ ID NO: 168629 - RNA, 19 nt, Homo sapiens
  misc_RNA (1)...(19): siRNA sense strand
ccucuguucuggauuauga

SEQ ID NO: 168630 - RNA, 19 nt, Homo sapiens
  misc_RNA (1)...(19): siRNA sense strand
gagcugccaucgcgcaaug

SEQ ID NO: 168631 - RNA, 19 nt, Homo sapiens
  misc_RNA (1)...(19): siRNA sense strand
caaccugucuguggaguuc

SEQ ID NO: 168632 - RNA, 19 nt, Homo sapiens
  misc_RNA (1)...(19): siRNA sense strand
cgacugaugugggccaaga

SEQ ID NO: 168633 - RNA, 19 nt, Homo sapiens
  misc_RNA (1)...(19): siRNA sense strand
gagcaacccggacccuauu

SEQ ID NO: 168634 - RNA, 19 nt, Homo sapiens
  misc_RNA (1)...(19): siRNA sense strand
ggugucugguacuucaaua

SEQ ID NO: 168635 - RNA, 19 nt, Homo sapiens
  misc_RNA (1)...(19): siRNA sense strand
gcuuugacuucccggauga

SEQ ID NO: 168636 - RNA, 19 nt, Homo sapiens
  misc_RNA (1)...(19): siRNA sense strand
cugccucuguucuggauua

SEQ ID NO: 168637 - RNA, 19 nt, Homo sapiens
  misc_RNA (1)...(19): siRNA sense strand
cauggugucugguacuuca

SEQ ID NO: 168638 - RNA, 19 nt, Homo sapiens
  misc_RNA (1)...(19): siRNA sense strand
gcaaugugaccgugaacga

SEQ ID NO: 168639 - RNA, 19 nt, Homo sapiens
  misc_RNA (1)...(19): siRNA sense strand
ggagcuagcugaguaugcu

SEQ ID NO: 168640 - RNA, 19 nt, Homo sapiens
  misc_RNA (1)...(19): siRNA sense strand
ugaaauccgggucaaguga

SEQ ID NO: 168641 - RNA, 19 nt, Homo sapiens
  misc_RNA (1)...(19): siRNA sense strand
ugauugccaucgucugcua

SEQ ID NO: 168642 - RNA, 19 nt, Homo sapiens
  misc_RNA (1)...(19): siRNA sense strand
caacaccacccugcaguuc

SEQ ID NO: 168643 - RNA, 19 nt, Homo sapiens
  misc_RNA (1)...(19): siRNA sense strand
gcacagcguccuggauauc

SEQ ID NO: 168644 - RNA, 19 nt, Homo sapiens
  misc_RNA (1)...(19): siRNA sense strand
cgaggaugauggagaguac

SEQ ID NO: 168645 - RNA, 19 nt, Homo sapiens
  misc_RNA (1)...(19): siRNA sense strand
cagcauggacgucaaguac

SEQ ID NO: 168646 - RNA, 19 nt, Homo sapiens
  misc_RNA (1)...(19): siRNA sense strand
gaccugggccugcgaaacu

SEQ ID NO: 168647 - RNA, 19 nt, Homo sapiens
  misc_RNA (1)...(19): siRNA sense strand
gcuacaaccaguacaccuu

SEQ ID NO: 168648 - RNA, 19 nt, Homo sapiens
  misc_RNA (1)...(19): siRNA sense strand
caagucgcgcacccaagua

SEQ ID NO: 168649 - RNA, 19 nt, Homo sapiens
  misc_RNA (1)...(19): siRNA sense strand
gcugaaauccgggucaagu

SEQ ID NO: 168650 - RNA, 19 nt, Homo sapiens
  misc_RNA (1)...(19): siRNA sense strand
ucaagucgcgcacccaagu

SEQ ID NO: 168651 - RNA, 19 nt, Homo sapiens
  misc_RNA (1)...(19): siRNA sense strand
ggaggagcuagcugaguau

SEQ ID NO: 168652 - RNA, 19 nt, Homo sapiens
  misc_RNA (1)...(19): siRNA sense strand
gcauggugccggacaacug

SEQ ID NO: 168653 - RNA, 19 nt, Homo sapiens
  misc_RNA (1)...(19): siRNA sense strand
acaccacccugcaguucga

SEQ ID NO: 168654 - RNA, 19 nt, Homo sapiens
  misc_RNA (1)...(19): siRNA sense strand
caaccaguacaccuucuca

SEQ ID NO: 168655 - RNA, 19 nt, Homo sapiens
  misc_RNA (1)...(19): siRNA sense strand
caacagugaacgggacaau

SEQ ID NO: 168656 - RNA, 19 nt, Homo sapiens
  misc_RNA (1)...(19): siRNA sense strand
uagcugaguaugcugaaau

SEQ ID NO: 168657 - RNA, 19 nt, Homo sapiens
  misc_RNA (1)...(19): siRNA sense strand
acagugaacgggacaaugg

SEQ ID NO: 168658 - RNA, 19 nt, Homo sapiens
  misc_RNA (1)...(19): siRNA sense strand
ccuggaagccaacagugaa

SEQ ID NO: 168659 - RNA, 19 nt, Homo sapiens
  misc_RNA (1)...(19): siRNA sense strand
ucaccaucuucaaggagaa

SEQ ID NO: 168660 - RNA, 19 nt, Homo sapiens
  misc_RNA (1)...(19): siRNA sense strand
ccaacaccacccugcaguu

SEQ ID NO: 168661 - RNA, 19 nt, Homo sapiens
  misc_RNA (1)...(19): siRNA sense strand
agaggcgccugggaucuga

SEQ ID NO: 168662 - RNA, 19 nt, Homo sapiens
  misc_RNA (1)...(19): siRNA sense strand
uguccacggucaucuacga

SEQ ID NO: 168663 - RNA, 19 nt, Homo sapiens
  misc_RNA (1)...(19): siRNA sense strand
ccagcauggacgucaagua

SEQ ID NO: 168664 - RNA, 19 nt, Homo sapiens
  misc_RNA (1)...(19): siRNA sense strand
uguucuggauuaugauuuc

SEQ ID NO: 168665 - RNA, 19 nt, Homo sapiens
  misc_RNA (1)...(19): siRNA sense strand
gccaucgucugcuacauua

SEQ ID NO: 168666 - RNA, 19 nt, Homo sapiens
  misc_RNA (1)...(19): siRNA sense strand
gagcacagcguccuggaua

SEQ ID NO: 168667 - RNA, 19 nt, Homo sapiens
  misc_RNA (1)...(19): siRNA sense strand
ggacaaugguggccguaga

SEQ ID NO: 168668 - RNA, 19 nt, Homo sapiens
  misc_RNA (1)...(19): siRNA sense strand
ccucuguucuggauuauga

SEQ ID NO: 168669 - RNA, 19 nt, Homo sapiens
  misc_RNA (1)...(19): siRNA sense strand
gagcugccaucgcgcaaug

SEQ ID NO: 168670 - RNA, 19 nt, Homo sapiens
  misc_RNA (1)...(19): siRNA sense strand
caaccugucuguggaguuc

SEQ ID NO: 168671 - RNA, 19 nt, Homo sapiens
  misc_RNA (1)...(19): siRNA sense strand
cgacugaugugggccaaga

SEQ ID NO: 168672 - RNA, 19 nt, Homo sapiens
  misc_RNA (1)...(19): siRNA sense strand
gagcaacccggacccuauu

SEQ ID NO: 168673 - RNA, 19 nt, Homo sapiens
  misc_RNA (1)...(19): siRNA sense strand
ggugucugguacuucaaua

SEQ ID NO: 168674 - RNA, 19 nt, Homo sapiens
  misc_RNA (1)...(19): siRNA sense strand
gcuuugacuucccggauga

SEQ ID NO: 168675 - RNA, 19 nt, Homo sapiens
  misc_RNA (1)...(19): siRNA sense strand
cugccucuguucuggauua

SEQ ID NO: 168676 - RNA, 19 nt, Homo sapiens
  misc_RNA (1)...(19): siRNA sense strand
cauggugucugguacuuca

SEQ ID NO: 168677 - RNA, 19 nt, Homo sapiens
  misc_RNA (1)...(19): siRNA sense strand
gcaaugugaccgugaacga

SEQ ID NO: 168678 - RNA, 19 nt, Homo sapiens
  misc_RNA (1)...(19): siRNA sense strand
ugauugccaucgucugcua

SEQ ID NO: 168679 - RNA, 19 nt, Homo sapiens
  misc_RNA (1)...(19): siRNA sense strand
caacaccacccugcaguuc

SEQ ID NO: 168680 - RNA, 19 nt, Homo sapiens
  misc_RNA (1)...(19): siRNA sense strand
gcacagcguccuggauauc

SEQ ID NO: 168681 - RNA, 19 nt, Homo sapiens
  misc_RNA (1)...(19): siRNA sense strand
cgaggaugauggagaguac

SEQ ID NO: 168682 - RNA, 19 nt, Homo sapiens
  misc_RNA (1)...(19): siRNA sense strand
cagcauggacgucaaguac

SEQ ID NO: 168683 - RNA, 19 nt, Homo sapiens
  misc_RNA (1)...(19): siRNA sense strand
gaccugggccugcgaaacu

SEQ ID NO: 168684 - RNA, 19 nt, Homo sapiens
  misc_RNA (1)...(19): siRNA sense strand
gcuacaaccaguacaccuu

SEQ ID NO: 168685 - RNA, 19 nt, Homo sapiens
  misc_RNA (1)...(19): siRNA sense strand
caagucgcgcacccaagua

SEQ ID NO: 168686 - RNA, 19 nt, Homo sapiens
  misc_RNA (1)...(19): siRNA sense strand
ucaagucgcgcacccaagu

SEQ ID NO: 168687 - RNA, 19 nt, Homo sapiens
  misc_RNA (1)...(19): siRNA sense strand
gcauggugccggacaacug

SEQ ID NO: 168688 - RNA, 19 nt, Homo sapiens
  misc_RNA (1)...(19): siRNA sense strand
acaccacccugcaguucga

SEQ ID NO: 168689 - RNA, 19 nt, Homo sapiens
  misc_RNA (1)...(19): siRNA sense strand
caaccaguacaccuucuca

SEQ ID NO: 168690 - RNA, 19 nt, Homo sapiens
  misc_RNA (1)...(19): siRNA sense strand
caacagugaacgggacaau

SEQ ID NO: 168691 - RNA, 19 nt, Homo sapiens
  misc_RNA (1)...(19): siRNA sense strand
acagugaacgggacaaugg

SEQ ID NO: 168692 - RNA, 19 nt, Homo sapiens
  misc_RNA (1)...(19): siRNA sense strand
ccuggaagccaacagugaa

SEQ ID NO: 168693 - RNA, 19 nt, Homo sapiens
  misc_RNA (1)...(19): siRNA sense strand
ucaccaucuucaaggagaa

SEQ ID NO: 168694 - RNA, 19 nt, Homo sapiens
  misc_RNA (1)...(19): siRNA sense strand
ccaacaccacccugcaguu

SEQ ID NO: 168695 - RNA, 19 nt, Homo sapiens
  misc_RNA (1)...(19): siRNA sense strand
uguccacggucaucuacga

SEQ ID NO: 168696 - RNA, 19 nt, Homo sapiens
  misc_RNA (1)...(19): siRNA sense strand
ccagcauggacgucaagua

SEQ ID NO: 168697 - RNA, 19 nt, Homo sapiens
  misc_RNA (1)...(19): siRNA sense strand
uguucuggauuaugauuuc

SEQ ID NO: 168698 - RNA, 19 nt, Homo sapiens
  misc_RNA (1)...(19): siRNA sense strand
gguguucucuuuaaucaga

SEQ ID NO: 168699 - RNA, 19 nt, Homo sapiens
  misc_RNA (1)...(19): siRNA sense strand
gcgguguucucuuuaauca

SEQ ID NO: 168700 - RNA, 19 nt, Homo sapiens
  misc_RNA (1)...(19): siRNA sense strand
gacuugcucuucaucuuug

SEQ ID NO: 168701 - RNA, 19 nt, Homo sapiens
  misc_RNA (1)...(19): siRNA sense strand
cgacuugcucuucaucuuu

SEQ ID NO: 168702 - RNA, 19 nt, Homo sapiens
  misc_RNA (1)...(19): siRNA sense strand
caugcgguguucucuuuaa

SEQ ID NO: 168703 - RNA, 19 nt, Homo sapiens
  misc_RNA (1)...(19): siRNA sense strand
gcucuucaucuuugaguuu

SEQ ID NO: 168704 - RNA, 19 nt, Homo sapiens
  misc_RNA (1)...(19): siRNA sense strand
uccaugcgguguucucuuu

SEQ ID NO: 168705 - RNA, 19 nt, Homo sapiens
  misc_RNA (1)...(19): siRNA sense strand
uuaaucagauggaagucuu

SEQ ID NO: 168706 - RNA, 19 nt, Homo sapiens
  misc_RNA (1)...(19): siRNA sense strand
ccgacuugcucuucaucuu

SEQ ID NO: 168707 - RNA, 19 nt, Homo sapiens
  misc_RNA (1)...(19): siRNA sense strand
cauagccacucugcucuac

SEQ ID NO: 168708 - RNA, 19 nt, Homo sapiens
  misc_RNA (1)...(19): siRNA sense strand
uagccacucugcucuacgu

SEQ ID NO: 168709 - RNA, 19 nt, Homo sapiens
  misc_RNA (1)...(19): siRNA sense strand
gguguucucuuuaaucaga

SEQ ID NO: 168710 - RNA, 19 nt, Homo sapiens
  misc_RNA (1)...(19): siRNA sense strand
gcgguguucucuuuaauca

SEQ ID NO: 168711 - RNA, 19 nt, Homo sapiens
  misc_RNA (1)...(19): siRNA sense strand
gacuugcucuucaucuuug

SEQ ID NO: 168712 - RNA, 19 nt, Homo sapiens
  misc_RNA (1)...(19): siRNA sense strand
cgacuugcucuucaucuuu

SEQ ID NO: 168713 - RNA, 19 nt, Homo sapiens
  misc_RNA (1)...(19): siRNA sense strand
caugcgguguucucuuuaa

SEQ ID NO: 168714 - RNA, 19 nt, Homo sapiens
  misc_RNA (1)...(19): siRNA sense strand
gcucuucaucuuugaguuu

SEQ ID NO: 168715 - RNA, 19 nt, Homo sapiens
  misc_RNA (1)...(19): siRNA sense strand
uccaugcgguguucucuuu

SEQ ID NO: 168716 - RNA, 19 nt, Homo sapiens
  misc_RNA (1)...(19): siRNA sense strand
uuaaucagauggaagucuu

SEQ ID NO: 168717 - RNA, 19 nt, Homo sapiens
  misc_RNA (1)...(19): siRNA sense strand
ccgacuugcucuucaucuu

SEQ ID NO: 168718 - RNA, 19 nt, Homo sapiens
  misc_RNA (1)...(19): siRNA sense strand
cauagccacucugcucuac

SEQ ID NO: 168719 - RNA, 19 nt, Homo sapiens
  misc_RNA (1)...(19): siRNA sense strand
uagccacucugcucuacgu

SEQ ID NO: 168720 - RNA, 19 nt, Homo sapiens
  misc_RNA (1)...(19): siRNA sense strand
gguguucucuuuaaucaga

SEQ ID NO: 168721 - RNA, 19 nt, Homo sapiens
  misc_RNA (1)...(19): siRNA sense strand
gcgguguucucuuuaauca

SEQ ID NO: 168722 - RNA, 19 nt, Homo sapiens
  misc_RNA (1)...(19): siRNA sense strand
gacuugcucuucaucuuug

SEQ ID NO: 168723 - RNA, 19 nt, Homo sapiens
  misc_RNA (1)...(19): siRNA sense strand
cgacuugcucuucaucuuu

SEQ ID NO: 168724 - RNA, 19 nt, Homo sapiens
  misc_RNA (1)...(19): siRNA sense strand
caugcgguguucucuuuaa

SEQ ID NO: 168725 - RNA, 19 nt, Homo sapiens
  misc_RNA (1)...(19): siRNA sense strand
gcucuucaucuuugaguuu

SEQ ID NO: 168726 - RNA, 19 nt, Homo sapiens
  misc_RNA (1)...(19): siRNA sense strand
uccaugcgguguucucuuu

SEQ ID NO: 168727 - RNA, 19 nt, Homo sapiens
  misc_RNA (1)...(19): siRNA sense strand
uuaaucagauggaagucuu

SEQ ID NO: 168728 - RNA, 19 nt, Homo sapiens
  misc_RNA (1)...(19): siRNA sense strand
ccgacuugcucuucaucuu

SEQ ID NO: 168729 - RNA, 19 nt, Homo sapiens
  misc_RNA (1)...(19): siRNA sense strand
cauagccacucugcucuac

SEQ ID NO: 168730 - RNA, 19 nt, Homo sapiens
  misc_RNA (1)...(19): siRNA sense strand
uagccacucugcucuacgu

SEQ ID NO: 168731 - RNA, 19 nt, Homo sapiens
  misc_RNA (1)...(19): siRNA sense strand
gguguucucuuuaaucaga

SEQ ID NO: 168732 - RNA, 19 nt, Homo sapiens
  misc_RNA (1)...(19): siRNA sense strand
gcgguguucucuuuaauca

SEQ ID NO: 168733 - RNA, 19 nt, Homo sapiens
  misc_RNA (1)...(19): siRNA sense strand
gacuugcucuucaucuuug

SEQ ID NO: 168734 - RNA, 19 nt, Homo sapiens
  misc_RNA (1)...(19): siRNA sense strand
cgacuugcucuucaucuuu

SEQ ID NO: 168735 - RNA, 19 nt, Homo sapiens
  misc_RNA (1)...(19): siRNA sense strand
caugcgguguucucuuuaa

SEQ ID NO: 168736 - RNA, 19 nt, Homo sapiens
  misc_RNA (1)...(19): siRNA sense strand
gcucuucaucuuugaguuu

SEQ ID NO: 168737 - RNA, 19 nt, Homo sapiens
  misc_RNA (1)...(19): siRNA sense strand
uccaugcgguguucucuuu

SEQ ID NO: 168738 - RNA, 19 nt, Homo sapiens
  misc_RNA (1)...(19): siRNA sense strand
uuaaucagauggaagucuu

SEQ ID NO: 168739 - RNA, 19 nt, Homo sapiens
  misc_RNA (1)...(19): siRNA sense strand
ccgacuugcucuucaucuu

SEQ ID NO: 168740 - RNA, 19 nt, Homo sapiens
  misc_RNA (1)...(19): siRNA sense strand
cauagccacucugcucuac

SEQ ID NO: 168741 - RNA, 19 nt, Homo sapiens
  misc_RNA (1)...(19): siRNA sense strand
uagccacucugcucuacgu

SEQ ID NO: 168742 - RNA, 19 nt, Homo sapiens
  misc_RNA (1)...(19): siRNA sense strand
gaaagaagcucaacauaaa

SEQ ID NO: 168743 - RNA, 19 nt, Homo sapiens
  misc_RNA (1)...(19): siRNA sense strand
caaagucucugacggagua

SEQ ID NO: 168744 - RNA, 19 nt, Homo sapiens
  misc_RNA (1)...(19): siRNA sense strand
caacagacaacaucaaaua

SEQ ID NO: 168745 - RNA, 19 nt, Homo sapiens
  misc_RNA (1)...(19): siRNA sense strand
ggaggugucugcaaggaua

SEQ ID NO: 168746 - RNA, 19 nt, Homo sapiens
  misc_RNA (1)...(19): siRNA sense strand
gaagaaggucgccaucaua

SEQ ID NO: 168747 - RNA, 19 nt, Homo sapiens
  misc_RNA (1)...(19): siRNA sense strand
gaccucagcugacagagaa

SEQ ID NO: 168748 - RNA, 19 nt, Homo sapiens
  misc_RNA (1)...(19): siRNA sense strand
aaaguugguucucuugaua

SEQ ID NO: 168749 - RNA, 19 nt, Homo sapiens
  misc_RNA (1)...(19): siRNA sense strand
gagaaagaagcucaacaua

SEQ ID NO: 168750 - RNA, 19 nt, Homo sapiens
  misc_RNA (1)...(19): siRNA sense strand
agaaagaagcucaacauaa

SEQ ID NO: 168751 - RNA, 19 nt, Homo sapiens
  misc_RNA (1)...(19): siRNA sense strand
gggcugagaucauuacaca

SEQ ID NO: 168752 - RNA, 19 nt, Homo sapiens
  misc_RNA (1)...(19): siRNA sense strand
gcucgaaucuccucagcuu

SEQ ID NO: 168753 - RNA, 19 nt, Homo sapiens
  misc_RNA (1)...(19): siRNA sense strand
ugaagaaugucaaauccaa

SEQ ID NO: 168754 - RNA, 19 nt, Homo sapiens
  misc_RNA (1)...(19): siRNA sense strand
gaaaggugaacaagagaaa

SEQ ID NO: 168755 - RNA, 19 nt, Homo sapiens
  misc_RNA (1)...(19): siRNA sense strand
gaagagugguaccucaaca

SEQ ID NO: 168756 - RNA, 19 nt, Homo sapiens
  misc_RNA (1)...(19): siRNA sense strand
caccugagauuaaggauca

SEQ ID NO: 168757 - RNA, 19 nt, Homo sapiens
  misc_RNA (1)...(19): siRNA sense strand
aaauguggcucucugaaga

SEQ ID NO: 168758 - RNA, 19 nt, Homo sapiens
  misc_RNA (1)...(19): siRNA sense strand
gcaaggauaguucaaguag

SEQ ID NO: 168759 - RNA, 19 nt, Homo sapiens
  misc_RNA (1)...(19): siRNA sense strand
gcaucaaccugcucgaauc

SEQ ID NO: 168760 - RNA, 19 nt, Homo sapiens
  misc_RNA (1)...(19): siRNA sense strand
cccaagaccuuccuccauu

SEQ ID NO: 168761 - RNA, 19 nt, Homo sapiens
  misc_RNA (1)...(19): siRNA sense strand
ugccagaccugaagaaugu

SEQ ID NO: 168762 - RNA, 19 nt, Homo sapiens
  misc_RNA (1)...(19): siRNA sense strand
uaaaguugguucucuugau

SEQ ID NO: 168763 - RNA, 19 nt, Homo sapiens
  misc_RNA (1)...(19): siRNA sense strand
ucacauccaccugagauua

SEQ ID NO: 168764 - RNA, 19 nt, Homo sapiens
  misc_RNA (1)...(19): siRNA sense strand
ggaugaagagggugccuuu

SEQ ID NO: 168765 - RNA, 19 nt, Homo sapiens
  misc_RNA (1)...(19): siRNA sense strand
ugaagagggugccuuugga

SEQ ID NO: 168766 - RNA, 19 nt, Homo sapiens
  misc_RNA (1)...(19): siRNA sense strand
caacaguucuaucucuucu

SEQ ID NO: 168767 - RNA, 19 nt, Homo sapiens
  misc_RNA (1)...(19): siRNA sense strand
gaagaaugucaaauccaaa

SEQ ID NO: 168768 - RNA, 19 nt, Homo sapiens
  misc_RNA (1)...(19): siRNA sense strand
ccugaaaggugaacaagag

SEQ ID NO: 168769 - RNA, 19 nt, Homo sapiens
  misc_RNA (1)...(19): siRNA sense strand
cuccucagcuugccacuuu

SEQ ID NO: 168770 - RNA, 19 nt, Homo sapiens
  misc_RNA (1)...(19): siRNA sense strand
caaaggacaaagucucuga

SEQ ID NO: 168771 - RNA, 19 nt, Homo sapiens
  misc_RNA (1)...(19): siRNA sense strand
uuuagcagcugaagaaaca

SEQ ID NO: 168772 - RNA, 19 nt, Homo sapiens
  misc_RNA (1)...(19): siRNA sense strand
agaagaaggucgccaucau

SEQ ID NO: 168773 - RNA, 19 nt, Homo sapiens
  misc_RNA (1)...(19): siRNA sense strand
ccaagaccuuccuccauuc

SEQ ID NO: 168774 - RNA, 19 nt, Homo sapiens
  misc_RNA (1)...(19): siRNA sense strand
ggucacagggcaccuauuc

SEQ ID NO: 168775 - RNA, 19 nt, Homo sapiens
  misc_RNA (1)...(19): siRNA sense strand
ucaaauaccagccuaaagg

SEQ ID NO: 168776 - RNA, 19 nt, Homo sapiens
  misc_RNA (1)...(19): siRNA sense strand
ucacagggcaccuauucaa

SEQ ID NO: 168777 - RNA, 19 nt, Homo sapiens
  misc_RNA (1)...(19): siRNA sense strand
agaggcaucugcacacuca

SEQ ID NO: 168778 - RNA, 19 nt, Homo sapiens
  misc_RNA (1)...(19): siRNA sense strand
gaaggucgccaucauacgu

SEQ ID NO: 168779 - RNA, 19 nt, Homo sapiens
  misc_RNA (1)...(19): siRNA sense strand
aaggauaguucaaguaguc

SEQ ID NO: 168780 - RNA, 19 nt, Homo sapiens
  misc_RNA (1)...(19): siRNA sense strand
gaggaggugucugcaagga

SEQ ID NO: 168781 - RNA, 19 nt, Homo sapiens
  misc_RNA (1)...(19): siRNA sense strand
acaguucuaucucuucuuc

SEQ ID NO: 168782 - RNA, 19 nt, Homo sapiens
  misc_RNA (1)...(19): siRNA sense strand
aaauagaccuaagccaugu

SEQ ID NO: 168783 - RNA, 19 nt, Homo sapiens
  misc_RNA (1)...(19): siRNA sense strand
gaucaacagacaacaucaa

SEQ ID NO: 168784 - RNA, 19 nt, Homo sapiens
  misc_RNA (1)...(19): siRNA sense strand
gcugagaucauuacacagu

SEQ ID NO: 168785 - RNA, 19 nt, Homo sapiens
  misc_RNA (1)...(19): siRNA sense strand
ggagacagagaugagaauu

SEQ ID NO: 168786 - RNA, 19 nt, Homo sapiens
  misc_RNA (1)...(19): siRNA sense strand
ccaaagagaaugggaucaa

SEQ ID NO: 168787 - RNA, 19 nt, Homo sapiens
  misc_RNA (1)...(19): siRNA sense strand
caucaaauaccagccuaaa

SEQ ID NO: 168788 - RNA, 19 nt, Homo sapiens
  misc_RNA (1)...(19): siRNA sense strand
cagacaacaucaaauacca

SEQ ID NO: 168789 - RNA, 19 nt, Homo sapiens
  misc_RNA (1)...(19): siRNA sense strand
caaagagaaugggaucaac

SEQ ID NO: 168790 - RNA, 19 nt, Homo sapiens
  misc_RNA (1)...(19): siRNA sense strand
ucaaauaccaaagagaaug

SEQ ID NO: 168791 - RNA, 19 nt, Homo sapiens
  misc_RNA (1)...(19): siRNA sense strand
gcuaaaguugguucucuug

SEQ ID NO: 168792 - RNA, 19 nt, Homo sapiens
  misc_RNA (1)...(19): siRNA sense strand
gccuuuagcagcugaagaa

SEQ ID NO: 168793 - RNA, 19 nt, Homo sapiens
  misc_RNA (1)...(19): siRNA sense strand
ucagagagcaugcuaaagc

SEQ ID NO: 168794 - RNA, 19 nt, Homo sapiens
  misc_RNA (1)...(19): siRNA sense strand
cacauccaccugagauuaa

SEQ ID NO: 168795 - RNA, 19 nt, Homo sapiens
  misc_RNA (1)...(19): siRNA sense strand
gagaagaaggucgccauca

SEQ ID NO: 168796 - RNA, 19 nt, Homo sapiens
  misc_RNA (1)...(19): siRNA sense strand
ucaccugccucagaacaga

SEQ ID NO: 168797 - RNA, 19 nt, Homo sapiens
  misc_RNA (1)...(19): siRNA sense strand
cccaucaccugccucagaa

SEQ ID NO: 168798 - RNA, 19 nt, Homo sapiens
  misc_RNA (1)...(19): siRNA sense strand
ugaagaaacagcuaaucug

SEQ ID NO: 168799 - RNA, 19 nt, Homo sapiens
  misc_RNA (1)...(19): siRNA sense strand
caaggauaguucaaguagu

SEQ ID NO: 168800 - RNA, 19 nt, Homo sapiens
  misc_RNA (1)...(19): siRNA sense strand
ucucaacaguucuaucucu

SEQ ID NO: 168801 - RNA, 19 nt, Homo sapiens
  misc_RNA (1)...(19): siRNA sense strand
agacagagaugagaauucc

SEQ ID NO: 168802 - RNA, 19 nt, Homo sapiens
  misc_RNA (1)...(19): siRNA sense strand
ccucagcaccgcuaacaga

SEQ ID NO: 168803 - RNA, 19 nt, Homo sapiens
  misc_RNA (1)...(19): siRNA sense strand
gaacggaaagacgaagcaa

SEQ ID NO: 168804 - RNA, 19 nt, Homo sapiens
  misc_RNA (1)...(19): siRNA sense strand
caaauguggcucucugaag

SEQ ID NO: 168805 - RNA, 19 nt, Homo sapiens
  misc_RNA (1)...(19): siRNA sense strand
gagacagagaugagaauuc

SEQ ID NO: 168806 - RNA, 19 nt, Homo sapiens
  misc_RNA (1)...(19): siRNA sense strand
ggcuguagcaguccugaaa

SEQ ID NO: 168807 - RNA, 19 nt, Homo sapiens
  misc_RNA (1)...(19): siRNA sense strand
ccaaauguggcucucugaa

SEQ ID NO: 168808 - RNA, 19 nt, Homo sapiens
  misc_RNA (1)...(19): siRNA sense strand
ccgaagcgccaauggauuc

SEQ ID NO: 168809 - RNA, 19 nt, Homo sapiens
  misc_RNA (1)...(19): siRNA sense strand
aagaagcucaacauaaaga

SEQ ID NO: 168810 - RNA, 19 nt, Homo sapiens
  misc_RNA (1)...(19): siRNA sense strand
cuucagagagcaugcuaaa

SEQ ID NO: 168811 - RNA, 19 nt, Homo sapiens
  misc_RNA (1)...(19): siRNA sense strand
caaauaccaaagagaaugg

SEQ ID NO: 168812 - RNA, 19 nt, Homo sapiens
  misc_RNA (1)...(19): siRNA sense strand
ggugguaaugucaagauug

SEQ ID NO: 168813 - RNA, 19 nt, Homo sapiens
  misc_RNA (1)...(19): siRNA sense strand
guaaccaagagcccagaaa

SEQ ID NO: 168814 - RNA, 19 nt, Homo sapiens
  misc_RNA (1)...(19): siRNA sense strand
agagaaagaagcucaacau

SEQ ID NO: 168815 - RNA, 19 nt, Homo sapiens
  misc_RNA (1)...(19): siRNA sense strand
uaaacaggcaaaggacaaa

SEQ ID NO: 168816 - RNA, 19 nt, Homo sapiens
  misc_RNA (1)...(19): siRNA sense strand
ccacuuuggcugaggaugu

SEQ ID NO: 168817 - RNA, 19 nt, Homo sapiens
  misc_RNA (1)...(19): siRNA sense strand
gggaagagugguaccucaa

SEQ ID NO: 168818 - RNA, 19 nt, Homo sapiens
  misc_RNA (1)...(19): siRNA sense strand
cugcaaggauaguucaagu

SEQ ID NO: 168819 - RNA, 19 nt, Homo sapiens
  misc_RNA (1)...(19): siRNA sense strand
gauaaugcucaucauguac

SEQ ID NO: 168820 - RNA, 19 nt, Homo sapiens
  misc_RNA (1)...(19): siRNA sense strand
ccaucuuggugccgaguga

SEQ ID NO: 168821 - RNA, 19 nt, Homo sapiens
  misc_RNA (1)...(19): siRNA sense strand
ugaaaggugaacaagagaa

SEQ ID NO: 168822 - RNA, 19 nt, Homo sapiens
  misc_RNA (1)...(19): siRNA sense strand
acagggcaccuauucaaau

SEQ ID NO: 168823 - RNA, 19 nt, Homo sapiens
  misc_RNA (1)...(19): siRNA sense strand
uuaaacaggcaaaggacaa

SEQ ID NO: 168824 - RNA, 19 nt, Homo sapiens
  misc_RNA (1)...(19): siRNA sense strand
agaaaaggcccaagcuaaa

SEQ ID NO: 168825 - RNA, 19 nt, Homo sapiens
  misc_RNA (1)...(19): siRNA sense strand
ucacugcugcacucgcuaa

SEQ ID NO: 168826 - RNA, 19 nt, Homo sapiens
  misc_RNA (1)...(19): siRNA sense strand
cacagggcaccuauucaaa

SEQ ID NO: 168827 - RNA, 19 nt, Homo sapiens
  misc_RNA (1)...(19): siRNA sense strand
cgacgacucagcaaugucu

SEQ ID NO: 168828 - RNA, 19 nt, Homo sapiens
  misc_RNA (1)...(19): siRNA sense strand
gaggugguaaugucaagau

SEQ ID NO: 168829 - RNA, 19 nt, Homo sapiens
  misc_RNA (1)...(19): siRNA sense strand
guggcucucugaagaacau

SEQ ID NO: 168830 - RNA, 19 nt, Homo sapiens
  misc_RNA (1)...(19): siRNA sense strand
ggaagagugguaccucaac

SEQ ID NO: 168831 - RNA, 19 nt, Homo sapiens
  misc_RNA (1)...(19): siRNA sense strand
acagagaugagaauuccuu

SEQ ID NO: 168832 - RNA, 19 nt, Homo sapiens
  misc_RNA (1)...(19): siRNA sense strand
uauuuaaacaggcaaagga

SEQ ID NO: 168833 - RNA, 19 nt, Homo sapiens
  misc_RNA (1)...(19): siRNA sense strand
aagcuaaaguugguucucu

SEQ ID NO: 168834 - RNA, 19 nt, Homo sapiens
  misc_RNA (1)...(19): siRNA sense strand
gaagcaaaggcaccucacu

SEQ ID NO: 168835 - RNA, 19 nt, Homo sapiens
  misc_RNA (1)...(19): siRNA sense strand
aagaaaaggcccaagcuaa

SEQ ID NO: 168836 - RNA, 19 nt, Homo sapiens
  misc_RNA (1)...(19): siRNA sense strand
ccugaagaaugucaaaucc

SEQ ID NO: 168837 - RNA, 19 nt, Homo sapiens
  misc_RNA (1)...(19): siRNA sense strand
aaggugaacaagagaaaga

SEQ ID NO: 168838 - RNA, 19 nt, Homo sapiens
  misc_RNA (1)...(19): siRNA sense strand
gaccucagcaccgcuaaca

SEQ ID NO: 168839 - RNA, 19 nt, Homo sapiens
  misc_RNA (1)...(19): siRNA sense strand
cuaaaguugguucucuuga

SEQ ID NO: 168840 - RNA, 19 nt, Homo sapiens
  misc_RNA (1)...(19): siRNA sense strand
gaaaaggcccaagcuaaag

SEQ ID NO: 168841 - RNA, 19 nt, Homo sapiens
  misc_RNA (1)...(19): siRNA sense strand
ccuucucucucaacaguuc

SEQ ID NO: 168842 - RNA, 19 nt, Homo sapiens
  misc_RNA (1)...(19): siRNA sense strand
gaaagaagcucaacauaaa

SEQ ID NO: 168843 - RNA, 19 nt, Homo sapiens
  misc_RNA (1)...(19): siRNA sense strand
caaagucucugacggagua

SEQ ID NO: 168844 - RNA, 19 nt, Homo sapiens
  misc_RNA (1)...(19): siRNA sense strand
caacagacaacaucaaaua

SEQ ID NO: 168845 - RNA, 19 nt, Homo sapiens
  misc_RNA (1)...(19): siRNA sense strand
ggaggugucugcaaggaua

SEQ ID NO: 168846 - RNA, 19 nt, Homo sapiens
  misc_RNA (1)...(19): siRNA sense strand
gaagaaggucgccaucaua

SEQ ID NO: 168847 - RNA, 19 nt, Homo sapiens
  misc_RNA (1)...(19): siRNA sense strand
gaccucagcugacagagaa

SEQ ID NO: 168848 - RNA, 19 nt, Homo sapiens
  misc_RNA (1)...(19): siRNA sense strand
aaaguugguucucuugaua

SEQ ID NO: 168849 - RNA, 19 nt, Homo sapiens
  misc_RNA (1)...(19): siRNA sense strand
gagaaagaagcucaacaua

SEQ ID NO: 168850 - RNA, 19 nt, Homo sapiens
  misc_RNA (1)...(19): siRNA sense strand
agaaagaagcucaacauaa

SEQ ID NO: 168851 - RNA, 19 nt, Homo sapiens
  misc_RNA (1)...(19): siRNA sense strand
gggcugagaucauuacaca

SEQ ID NO: 168852 - RNA, 19 nt, Homo sapiens
  misc_RNA (1)...(19): siRNA sense strand
gcucgaaucuccucagcuu

SEQ ID NO: 168853 - RNA, 19 nt, Homo sapiens
  misc_RNA (1)...(19): siRNA sense strand
ugaagaaugucaaauccaa

SEQ ID NO: 168854 - RNA, 19 nt, Homo sapiens
  misc_RNA (1)...(19): siRNA sense strand
gaaaggugaacaagagaaa

SEQ ID NO: 168855 - RNA, 19 nt, Homo sapiens
  misc_RNA (1)...(19): siRNA sense strand
gaagagugguaccucaaca

SEQ ID NO: 168856 - RNA, 19 nt, Homo sapiens
  misc_RNA (1)...(19): siRNA sense strand
caccugagauuaaggauca

SEQ ID NO: 168857 - RNA, 19 nt, Homo sapiens
  misc_RNA (1)...(19): siRNA sense strand
aaauguggcucucugaaga

SEQ ID NO: 168858 - RNA, 19 nt, Homo sapiens
  misc_RNA (1)...(19): siRNA sense strand
gcaaggauaguucaaguag

SEQ ID NO: 168859 - RNA, 19 nt, Homo sapiens
  misc_RNA (1)...(19): siRNA sense strand
gcaucaaccugcucgaauc

SEQ ID NO: 168860 - RNA, 19 nt, Homo sapiens
  misc_RNA (1)...(19): siRNA sense strand
cccaagaccuuccuccauu

SEQ ID NO: 168861 - RNA, 19 nt, Homo sapiens
  misc_RNA (1)...(19): siRNA sense strand
ugccagaccugaagaaugu

SEQ ID NO: 168862 - RNA, 19 nt, Homo sapiens
  misc_RNA (1)...(19): siRNA sense strand
uaaaguugguucucuugau

SEQ ID NO: 168863 - RNA, 19 nt, Homo sapiens
  misc_RNA (1)...(19): siRNA sense strand
ucacauccaccugagauua

SEQ ID NO: 168864 - RNA, 19 nt, Homo sapiens
  misc_RNA (1)...(19): siRNA sense strand
ggaugaagagggugccuuu

SEQ ID NO: 168865 - RNA, 19 nt, Homo sapiens
  misc_RNA (1)...(19): siRNA sense strand
ugaagagggugccuuugga

SEQ ID NO: 168866 - RNA, 19 nt, Homo sapiens
  misc_RNA (1)...(19): siRNA sense strand
caacaguucuaucucuucu

SEQ ID NO: 168867 - RNA, 19 nt, Homo sapiens
  misc_RNA (1)...(19): siRNA sense strand
gaagaaugucaaauccaaa

SEQ ID NO: 168868 - RNA, 19 nt, Homo sapiens
  misc_RNA (1)...(19): siRNA sense strand
ccugaaaggugaacaagag

SEQ ID NO: 168869 - RNA, 19 nt, Homo sapiens
  misc_RNA (1)...(19): siRNA sense strand
cuccucagcuugccacuuu

SEQ ID NO: 168870 - RNA, 19 nt, Homo sapiens
  misc_RNA (1)...(19): siRNA sense strand
caaaggacaaagucucuga

SEQ ID NO: 168871 - RNA, 19 nt, Homo sapiens
  misc_RNA (1)...(19): siRNA sense strand
uuuagcagcugaagaaaca

SEQ ID NO: 168872 - RNA, 19 nt, Homo sapiens
  misc_RNA (1)...(19): siRNA sense strand
agaagaaggucgccaucau

SEQ ID NO: 168873 - RNA, 19 nt, Homo sapiens
  misc_RNA (1)...(19): siRNA sense strand
ccaagaccuuccuccauuc

SEQ ID NO: 168874 - RNA, 19 nt, Homo sapiens
  misc_RNA (1)...(19): siRNA sense strand
ggucacagggcaccuauuc

SEQ ID NO: 168875 - RNA, 19 nt, Homo sapiens
  misc_RNA (1)...(19): siRNA sense strand
ucaaauaccagccuaaagg

SEQ ID NO: 168876 - RNA, 19 nt, Homo sapiens
  misc_RNA (1)...(19): siRNA sense strand
ucacagggcaccuauucaa

SEQ ID NO: 168877 - RNA, 19 nt, Homo sapiens
  misc_RNA (1)...(19): siRNA sense strand
agaggcaucugcacacuca

SEQ ID NO: 168878 - RNA, 19 nt, Homo sapiens
  misc_RNA (1)...(19): siRNA sense strand
gaaggucgccaucauacgu

SEQ ID NO: 168879 - RNA, 19 nt, Homo sapiens
  misc_RNA (1)...(19): siRNA sense strand
aaggauaguucaaguaguc

SEQ ID NO: 168880 - RNA, 19 nt, Homo sapiens
  misc_RNA (1)...(19): siRNA sense strand
gaggaggugucugcaagga

SEQ ID NO: 168881 - RNA, 19 nt, Homo sapiens
  misc_RNA (1)...(19): siRNA sense strand
acaguucuaucucuucuuc

SEQ ID NO: 168882 - RNA, 19 nt, Homo sapiens
  misc_RNA (1)...(19): siRNA sense strand
aaauagaccuaagccaugu

SEQ ID NO: 168883 - RNA, 19 nt, Homo sapiens
  misc_RNA (1)...(19): siRNA sense strand
gaucaacagacaacaucaa

SEQ ID NO: 168884 - RNA, 19 nt, Homo sapiens
  misc_RNA (1)...(19): siRNA sense strand
gcugagaucauuacacagu

SEQ ID NO: 168885 - RNA, 19 nt, Homo sapiens
  misc_RNA (1)...(19): siRNA sense strand
ggagacagagaugagaauu

SEQ ID NO: 168886 - RNA, 19 nt, Homo sapiens
  misc_RNA (1)...(19): siRNA sense strand
ccaaagagaaugggaucaa

SEQ ID NO: 168887 - RNA, 19 nt, Homo sapiens
  misc_RNA (1)...(19): siRNA sense strand
caucaaauaccagccuaaa

SEQ ID NO: 168888 - RNA, 19 nt, Homo sapiens
  misc_RNA (1)...(19): siRNA sense strand
cagacaacaucaaauacca

SEQ ID NO: 168889 - RNA, 19 nt, Homo sapiens
  misc_RNA (1)...(19): siRNA sense strand
caaagagaaugggaucaac

SEQ ID NO: 168890 - RNA, 19 nt, Homo sapiens
  misc_RNA (1)...(19): siRNA sense strand
ucaaauaccaaagagaaug

SEQ ID NO: 168891 - RNA, 19 nt, Homo sapiens
  misc_RNA (1)...(19): siRNA sense strand
gcuaaaguugguucucuug

SEQ ID NO: 168892 - RNA, 19 nt, Homo sapiens
  misc_RNA (1)...(19): siRNA sense strand
gccuuuagcagcugaagaa

SEQ ID NO: 168893 - RNA, 19 nt, Homo sapiens
  misc_RNA (1)...(19): siRNA sense strand
ucagagagcaugcuaaagc

SEQ ID NO: 168894 - RNA, 19 nt, Homo sapiens
  misc_RNA (1)...(19): siRNA sense strand
cacauccaccugagauuaa

SEQ ID NO: 168895 - RNA, 19 nt, Homo sapiens
  misc_RNA (1)...(19): siRNA sense strand
gagaagaaggucgccauca

SEQ ID NO: 168896 - RNA, 19 nt, Homo sapiens
  misc_RNA (1)...(19): siRNA sense strand
ucaccugccucagaacaga

SEQ ID NO: 168897 - RNA, 19 nt, Homo sapiens
  misc_RNA (1)...(19): siRNA sense strand
cccaucaccugccucagaa

SEQ ID NO: 168898 - RNA, 19 nt, Homo sapiens
  misc_RNA (1)...(19): siRNA sense strand
ugaagaaacagcuaaucug

SEQ ID NO: 168899 - RNA, 19 nt, Homo sapiens
  misc_RNA (1)...(19): siRNA sense strand
caaggauaguucaaguagu

SEQ ID NO: 168900 - RNA, 19 nt, Homo sapiens
  misc_RNA (1)...(19): siRNA sense strand
ucucaacaguucuaucucu

SEQ ID NO: 168901 - RNA, 19 nt, Homo sapiens
  misc_RNA (1)...(19): siRNA sense strand
agacagagaugagaauucc

SEQ ID NO: 168902 - RNA, 19 nt, Homo sapiens
  misc_RNA (1)...(19): siRNA sense strand
ccucagcaccgcuaacaga

SEQ ID NO: 168903 - RNA, 19 nt, Homo sapiens
  misc_RNA (1)...(19): siRNA sense strand
gaacggaaagacgaagcaa

SEQ ID NO: 168904 - RNA, 19 nt, Homo sapiens
  misc_RNA (1)...(19): siRNA sense strand
caaauguggcucucugaag

SEQ ID NO: 168905 - RNA, 19 nt, Homo sapiens
  misc_RNA (1)...(19): siRNA sense strand
gagacagagaugagaauuc

SEQ ID NO: 168906 - RNA, 19 nt, Homo sapiens
  misc_RNA (1)...(19): siRNA sense strand
ggcuguagcaguccugaaa

SEQ ID NO: 168907 - RNA, 19 nt, Homo sapiens
  misc_RNA (1)...(19): siRNA sense strand
ccaaauguggcucucugaa

SEQ ID NO: 168908 - RNA, 19 nt, Homo sapiens
  misc_RNA (1)...(19): siRNA sense strand
ccgaagcgccaauggauuc

SEQ ID NO: 168909 - RNA, 19 nt, Homo sapiens
  misc_RNA (1)...(19): siRNA sense strand
aagaagcucaacauaaaga

SEQ ID NO: 168910 - RNA, 19 nt, Homo sapiens
  misc_RNA (1)...(19): siRNA sense strand
cuucagagagcaugcuaaa

SEQ ID NO: 168911 - RNA, 19 nt, Homo sapiens
  misc_RNA (1)...(19): siRNA sense strand
caaauaccaaagagaaugg

SEQ ID NO: 168912 - RNA, 19 nt, Homo sapiens
  misc_RNA (1)...(19): siRNA sense strand
ggugguaaugucaagauug

SEQ ID NO: 168913 - RNA, 19 nt, Homo sapiens
  misc_RNA (1)...(19): siRNA sense strand
guaaccaagagcccagaaa

SEQ ID NO: 168914 - RNA, 19 nt, Homo sapiens
  misc_RNA (1)...(19): siRNA sense strand
agagaaagaagcucaacau

SEQ ID NO: 168915 - RNA, 19 nt, Homo sapiens
  misc_RNA (1)...(19): siRNA sense strand
uaaacaggcaaaggacaaa

SEQ ID NO: 168916 - RNA, 19 nt, Homo sapiens
  misc_RNA (1)...(19): siRNA sense strand
ccacuuuggcugaggaugu

SEQ ID NO: 168917 - RNA, 19 nt, Homo sapiens
  misc_RNA (1)...(19): siRNA sense strand
gggaagagugguaccucaa

SEQ ID NO: 168918 - RNA, 19 nt, Homo sapiens
  misc_RNA (1)...(19): siRNA sense strand
cugcaaggauaguucaagu

SEQ ID NO: 168919 - RNA, 19 nt, Homo sapiens
  misc_RNA (1)...(19): siRNA sense strand
gauaaugcucaucauguac

SEQ ID NO: 168920 - RNA, 19 nt, Homo sapiens
  misc_RNA (1)...(19): siRNA sense strand
ccaucuuggugccgaguga

SEQ ID NO: 168921 - RNA, 19 nt, Homo sapiens
  misc_RNA (1)...(19): siRNA sense strand
ugaaaggugaacaagagaa

SEQ ID NO: 168922 - RNA, 19 nt, Homo sapiens
  misc_RNA (1)...(19): siRNA sense strand
acagggcaccuauucaaau

SEQ ID NO: 168923 - RNA, 19 nt, Homo sapiens
  misc_RNA (1)...(19): siRNA sense strand
uuaaacaggcaaaggacaa

SEQ ID NO: 168924 - RNA, 19 nt, Homo sapiens
  misc_RNA (1)...(19): siRNA sense strand
agaaaaggcccaagcuaaa

SEQ ID NO: 168925 - RNA, 19 nt, Homo sapiens
  misc_RNA (1)...(19): siRNA sense strand
ucacugcugcacucgcuaa

SEQ ID NO: 168926 - RNA, 19 nt, Homo sapiens
  misc_RNA (1)...(19): siRNA sense strand
cacagggcaccuauucaaa

SEQ ID NO: 168927 - RNA, 19 nt, Homo sapiens
  misc_RNA (1)...(19): siRNA sense strand
cgacgacucagcaaugucu

SEQ ID NO: 168928 - RNA, 19 nt, Homo sapiens
  misc_RNA (1)...(19): siRNA sense strand
gaggugguaaugucaagau

SEQ ID NO: 168929 - RNA, 19 nt, Homo sapiens
  misc_RNA (1)...(19): siRNA sense strand
guggcucucugaagaacau

SEQ ID NO: 168930 - RNA, 19 nt, Homo sapiens
  misc_RNA (1)...(19): siRNA sense strand
ggaagagugguaccucaac

SEQ ID NO: 168931 - RNA, 19 nt, Homo sapiens
  misc_RNA (1)...(19): siRNA sense strand
acagagaugagaauuccuu

SEQ ID NO: 168932 - RNA, 19 nt, Homo sapiens
  misc_RNA (1)...(19): siRNA sense strand
uauuuaaacaggcaaagga

SEQ ID NO: 168933 - RNA, 19 nt, Homo sapiens
  misc_RNA (1)...(19): siRNA sense strand
aagcuaaaguugguucucu

SEQ ID NO: 168934 - RNA, 19 nt, Homo sapiens
  misc_RNA (1)...(19): siRNA sense strand
gaagcaaaggcaccucacu

SEQ ID NO: 168935 - RNA, 19 nt, Homo sapiens
  misc_RNA (1)...(19): siRNA sense strand
aagaaaaggcccaagcuaa

SEQ ID NO: 168936 - RNA, 19 nt, Homo sapiens
  misc_RNA (1)...(19): siRNA sense strand
ccugaagaaugucaaaucc

SEQ ID NO: 168937 - RNA, 19 nt, Homo sapiens
  misc_RNA (1)...(19): siRNA sense strand
aaggugaacaagagaaaga

SEQ ID NO: 168938 - RNA, 19 nt, Homo sapiens
  misc_RNA (1)...(19): siRNA sense strand
gaccucagcaccgcuaaca

SEQ ID NO: 168939 - RNA, 19 nt, Homo sapiens
  misc_RNA (1)...(19): siRNA sense strand
cuaaaguugguucucuuga

SEQ ID NO: 168940 - RNA, 19 nt, Homo sapiens
  misc_RNA (1)...(19): siRNA sense strand
gaaaaggcccaagcuaaag

SEQ ID NO: 168941 - RNA, 19 nt, Homo sapiens
  misc_RNA (1)...(19): siRNA sense strand
ccuucucucucaacaguuc

SEQ ID NO: 168942 - RNA, 19 nt, Homo sapiens
  misc_RNA (1)...(19): siRNA sense strand
gaaagaagcucaacauaaa

SEQ ID NO: 168943 - RNA, 19 nt, Homo sapiens
  misc_RNA (1)...(19): siRNA sense strand
caaagucucugacggagua

SEQ ID NO: 168944 - RNA, 19 nt, Homo sapiens
  misc_RNA (1)...(19): siRNA sense strand
caacagacaacaucaaaua

SEQ ID NO: 168945 - RNA, 19 nt, Homo sapiens
  misc_RNA (1)...(19): siRNA sense strand
ggaggugucugcaaggaua

SEQ ID NO: 168946 - RNA, 19 nt, Homo sapiens
  misc_RNA (1)...(19): siRNA sense strand
gaagaaggucgccaucaua

SEQ ID NO: 168947 - RNA, 19 nt, Homo sapiens
  misc_RNA (1)...(19): siRNA sense strand
gaccucagcugacagagaa

SEQ ID NO: 168948 - RNA, 19 nt, Homo sapiens
  misc_RNA (1)...(19): siRNA sense strand
aaaguugguucucuugaua

SEQ ID NO: 168949 - RNA, 19 nt, Homo sapiens
  misc_RNA (1)...(19): siRNA sense strand
gagaaagaagcucaacaua

SEQ ID NO: 168950 - RNA, 19 nt, Homo sapiens
  misc_RNA (1)...(19): siRNA sense strand
agaaagaagcucaacauaa

SEQ ID NO: 168951 - RNA, 19 nt, Homo sapiens
  misc_RNA (1)...(19): siRNA sense strand
gggcugagaucauuacaca

SEQ ID NO: 168952 - RNA, 19 nt, Homo sapiens
  misc_RNA (1)...(19): siRNA sense strand
gcucgaaucuccucagcuu

SEQ ID NO: 168953 - RNA, 19 nt, Homo sapiens
  misc_RNA (1)...(19): siRNA sense strand
ugaagaaugucaaauccaa

SEQ ID NO: 168954 - RNA, 19 nt, Homo sapiens
  misc_RNA (1)...(19): siRNA sense strand
gaaaggugaacaagagaaa

SEQ ID NO: 168955 - RNA, 19 nt, Homo sapiens
  misc_RNA (1)...(19): siRNA sense strand
gaagagugguaccucaaca

SEQ ID NO: 168956 - RNA, 19 nt, Homo sapiens
  misc_RNA (1)...(19): siRNA sense strand
caccugagauuaaggauca

SEQ ID NO: 168957 - RNA, 19 nt, Homo sapiens
  misc_RNA (1)...(19): siRNA sense strand
aaauguggcucucugaaga

SEQ ID NO: 168958 - RNA, 19 nt, Homo sapiens
  misc_RNA (1)...(19): siRNA sense strand
gcaaggauaguucaaguag

SEQ ID NO: 168959 - RNA, 19 nt, Homo sapiens
  misc_RNA (1)...(19): siRNA sense strand
gcaucaaccugcucgaauc

SEQ ID NO: 168960 - RNA, 19 nt, Homo sapiens
  misc_RNA (1)...(19): siRNA sense strand
cccaagaccuuccuccauu

SEQ ID NO: 168961 - RNA, 19 nt, Homo sapiens
  misc_RNA (1)...(19): siRNA sense strand
ugccagaccugaagaaugu

SEQ ID NO: 168962 - RNA, 19 nt, Homo sapiens
  misc_RNA (1)...(19): siRNA sense strand
uaaaguugguucucuugau

SEQ ID NO: 168963 - RNA, 19 nt, Homo sapiens
  misc_RNA (1)...(19): siRNA sense strand
ucacauccaccugagauua

SEQ ID NO: 168964 - RNA, 19 nt, Homo sapiens
  misc_RNA (1)...(19): siRNA sense strand
ggaugaagagggugccuuu

SEQ ID NO: 168965 - RNA, 19 nt, Homo sapiens
  misc_RNA (1)...(19): siRNA sense strand
ugaagagggugccuuugga

SEQ ID NO: 168966 - RNA, 19 nt, Homo sapiens
  misc_RNA (1)...(19): siRNA sense strand
caacaguucuaucucuucu

SEQ ID NO: 168967 - RNA, 19 nt, Homo sapiens
  misc_RNA (1)...(19): siRNA sense strand
gaagaaugucaaauccaaa

SEQ ID NO: 168968 - RNA, 19 nt, Homo sapiens
  misc_RNA (1)...(19): siRNA sense strand
ccugaaaggugaacaagag

SEQ ID NO: 168969 - RNA, 19 nt, Homo sapiens
  misc_RNA (1)...(19): siRNA sense strand
cuccucagcuugccacuuu

SEQ ID NO: 168970 - RNA, 19 nt, Homo sapiens
  misc_RNA (1)...(19): siRNA sense strand
caaaggacaaagucucuga

SEQ ID NO: 168971 - RNA, 19 nt, Homo sapiens
  misc_RNA (1)...(19): siRNA sense strand
uuuagcagcugaagaaaca

SEQ ID NO: 168972 - RNA, 19 nt, Homo sapiens
  misc_RNA (1)...(19): siRNA sense strand
agaagaaggucgccaucau

SEQ ID NO: 168973 - RNA, 19 nt, Homo sapiens
  misc_RNA (1)...(19): siRNA sense strand
ccaagaccuuccuccauuc

SEQ ID NO: 168974 - RNA, 19 nt, Homo sapiens
  misc_RNA (1)...(19): siRNA sense strand
ggucacagggcaccuauuc

SEQ ID NO: 168975 - RNA, 19 nt, Homo sapiens
  misc_RNA (1)...(19): siRNA sense strand
ucaaauaccagccuaaagg

SEQ ID NO: 168976 - RNA, 19 nt, Homo sapiens
  misc_RNA (1)...(19): siRNA sense strand
ucacagggcaccuauucaa

SEQ ID NO: 168977 - RNA, 19 nt, Homo sapiens
  misc_RNA (1)...(19): siRNA sense strand
agaggcaucugcacacuca

SEQ ID NO: 168978 - RNA, 19 nt, Homo sapiens
  misc_RNA (1)...(19): siRNA sense strand
gaaggucgccaucauacgu

SEQ ID NO: 168979 - RNA, 19 nt, Homo sapiens
  misc_RNA (1)...(19): siRNA sense strand
aaggauaguucaaguaguc

SEQ ID NO: 168980 - RNA, 19 nt, Homo sapiens
  misc_RNA (1)...(19): siRNA sense strand
gaggaggugucugcaagga

SEQ ID NO: 168981 - RNA, 19 nt, Homo sapiens
  misc_RNA (1)...(19): siRNA sense strand
acaguucuaucucuucuuc

SEQ ID NO: 168982 - RNA, 19 nt, Homo sapiens
  misc_RNA (1)...(19): siRNA sense strand
aaauagaccuaagccaugu

SEQ ID NO: 168983 - RNA, 19 nt, Homo sapiens
  misc_RNA (1)...(19): siRNA sense strand
gaucaacagacaacaucaa

SEQ ID NO: 168984 - RNA, 19 nt, Homo sapiens
  misc_RNA (1)...(19): siRNA sense strand
gcugagaucauuacacagu

SEQ ID NO: 168985 - RNA, 19 nt, Homo sapiens
  misc_RNA (1)...(19): siRNA sense strand
ggagacagagaugagaauu

SEQ ID NO: 168986 - RNA, 19 nt, Homo sapiens
  misc_RNA (1)...(19): siRNA sense strand
ccaaagagaaugggaucaa

SEQ ID NO: 168987 - RNA, 19 nt, Homo sapiens
  misc_RNA (1)...(19): siRNA sense strand
caucaaauaccagccuaaa

SEQ ID NO: 168988 - RNA, 19 nt, Homo sapiens
  misc_RNA (1)...(19): siRNA sense strand
cagacaacaucaaauacca

SEQ ID NO: 168989 - RNA, 19 nt, Homo sapiens
  misc_RNA (1)...(19): siRNA sense strand
caaagagaaugggaucaac

SEQ ID NO: 168990 - RNA, 19 nt, Homo sapiens
  misc_RNA (1)...(19): siRNA sense strand
ucaaauaccaaagagaaug

SEQ ID NO: 168991 - RNA, 19 nt, Homo sapiens
  misc_RNA (1)...(19): siRNA sense strand
gcuaaaguugguucucuug

SEQ ID NO: 168992 - RNA, 19 nt, Homo sapiens
  misc_RNA (1)...(19): siRNA sense strand
gccuuuagcagcugaagaa

SEQ ID NO: 168993 - RNA, 19 nt, Homo sapiens
  misc_RNA (1)...(19): siRNA sense strand
ucagagagcaugcuaaagc

SEQ ID NO: 168994 - RNA, 19 nt, Homo sapiens
  misc_RNA (1)...(19): siRNA sense strand
cacauccaccugagauuaa

SEQ ID NO: 168995 - RNA, 19 nt, Homo sapiens
  misc_RNA (1)...(19): siRNA sense strand
gagaagaaggucgccauca

SEQ ID NO: 168996 - RNA, 19 nt, Homo sapiens
  misc_RNA (1)...(19): siRNA sense strand
ucaccugccucagaacaga

SEQ ID NO: 168997 - RNA, 19 nt, Homo sapiens
  misc_RNA (1)...(19): siRNA sense strand
cccaucaccugccucagaa

SEQ ID NO: 168998 - RNA, 19 nt, Homo sapiens
  misc_RNA (1)...(19): siRNA sense strand
ugaagaaacagcuaaucug

SEQ ID NO: 168999 - RNA, 19 nt, Homo sapiens
  misc_RNA (1)...(19): siRNA sense strand
caaggauaguucaaguagu

SEQ ID NO: 169000 - RNA, 19 nt, Homo sapiens
  misc_RNA (1)...(19): siRNA sense strand
ucucaacaguucuaucucu

SEQ ID NO: 169001 - RNA, 19 nt, Homo sapiens
  misc_RNA (1)...(19): siRNA sense strand
agacagagaugagaauucc

SEQ ID NO: 169002 - RNA, 19 nt, Homo sapiens
  misc_RNA (1)...(19): siRNA sense strand
ccucagcaccgcuaacaga

SEQ ID NO: 169003 - RNA, 19 nt, Homo sapiens
  misc_RNA (1)...(19): siRNA sense strand
gaacggaaagacgaagcaa

SEQ ID NO: 169004 - RNA, 19 nt, Homo sapiens
  misc_RNA (1)...(19): siRNA sense strand
caaauguggcucucugaag

SEQ ID NO: 169005 - RNA, 19 nt, Homo sapiens
  misc_RNA (1)...(19): siRNA sense strand
gagacagagaugagaauuc

SEQ ID NO: 169006 - RNA, 19 nt, Homo sapiens
  misc_RNA (1)...(19): siRNA sense strand
ggcuguagcaguccugaaa

SEQ ID NO: 169007 - RNA, 19 nt, Homo sapiens
  misc_RNA (1)...(19): siRNA sense strand
ccaaauguggcucucugaa

SEQ ID NO: 169008 - RNA, 19 nt, Homo sapiens
  misc_RNA (1)...(19): siRNA sense strand
ccgaagcgccaauggauuc

SEQ ID NO: 169009 - RNA, 19 nt, Homo sapiens
  misc_RNA (1)...(19): siRNA sense strand
aagaagcucaacauaaaga

SEQ ID NO: 169010 - RNA, 19 nt, Homo sapiens
  misc_RNA (1)...(19): siRNA sense strand
cuucagagagcaugcuaaa

SEQ ID NO: 169011 - RNA, 19 nt, Homo sapiens
  misc_RNA (1)...(19): siRNA sense strand
caaauaccaaagagaaugg

SEQ ID NO: 169012 - RNA, 19 nt, Homo sapiens
  misc_RNA (1)...(19): siRNA sense strand
ggugguaaugucaagauug

SEQ ID NO: 169013 - RNA, 19 nt, Homo sapiens
  misc_RNA (1)...(19): siRNA sense strand
guaaccaagagcccagaaa

SEQ ID NO: 169014 - RNA, 19 nt, Homo sapiens
  misc_RNA (1)...(19): siRNA sense strand
agagaaagaagcucaacau

SEQ ID NO: 169015 - RNA, 19 nt, Homo sapiens
  misc_RNA (1)...(19): siRNA sense strand
uaaacaggcaaaggacaaa

SEQ ID NO: 169016 - RNA, 19 nt, Homo sapiens
  misc_RNA (1)...(19): siRNA sense strand
ccacuuuggcugaggaugu

SEQ ID NO: 169017 - RNA, 19 nt, Homo sapiens
  misc_RNA (1)...(19): siRNA sense strand
gggaagagugguaccucaa

SEQ ID NO: 169018 - RNA, 19 nt, Homo sapiens
  misc_RNA (1)...(19): siRNA sense strand
cugcaaggauaguucaagu

SEQ ID NO: 169019 - RNA, 19 nt, Homo sapiens
  misc_RNA (1)...(19): siRNA sense strand
gauaaugcucaucauguac

SEQ ID NO: 169020 - RNA, 19 nt, Homo sapiens
  misc_RNA (1)...(19): siRNA sense strand
ccaucuuggugccgaguga

SEQ ID NO: 169021 - RNA, 19 nt, Homo sapiens
  misc_RNA (1)...(19): siRNA sense strand
ugaaaggugaacaagagaa

SEQ ID NO: 169022 - RNA, 19 nt, Homo sapiens
  misc_RNA (1)...(19): siRNA sense strand
acagggcaccuauucaaau

SEQ ID NO: 169023 - RNA, 19 nt, Homo sapiens
  misc_RNA (1)...(19): siRNA sense strand
uuaaacaggcaaaggacaa

SEQ ID NO: 169024 - RNA, 19 nt, Homo sapiens
  misc_RNA (1)...(19): siRNA sense strand
agaaaaggcccaagcuaaa

SEQ ID NO: 169025 - RNA, 19 nt, Homo sapiens
  misc_RNA (1)...(19): siRNA sense strand
ucacugcugcacucgcuaa

SEQ ID NO: 169026 - RNA, 19 nt, Homo sapiens
  misc_RNA (1)...(19): siRNA sense strand
cacagggcaccuauucaaa

SEQ ID NO: 169027 - RNA, 19 nt, Homo sapiens
  misc_RNA (1)...(19): siRNA sense strand
cgacgacucagcaaugucu

SEQ ID NO: 169028 - RNA, 19 nt, Homo sapiens
  misc_RNA (1)...(19): siRNA sense strand
gaggugguaaugucaagau

SEQ ID NO: 169029 - RNA, 19 nt, Homo sapiens
  misc_RNA (1)...(19): siRNA sense strand
guggcucucugaagaacau

SEQ ID NO: 169030 - RNA, 19 nt, Homo sapiens
  misc_RNA (1)...(19): siRNA sense strand
ggaagagugguaccucaac

SEQ ID NO: 169031 - RNA, 19 nt, Homo sapiens
  misc_RNA (1)...(19): siRNA sense strand
acagagaugagaauuccuu

SEQ ID NO: 169032 - RNA, 19 nt, Homo sapiens
  misc_RNA (1)...(19): siRNA sense strand
uauuuaaacaggcaaagga

SEQ ID NO: 169033 - RNA, 19 nt, Homo sapiens
  misc_RNA (1)...(19): siRNA sense strand
aagcuaaaguugguucucu

SEQ ID NO: 169034 - RNA, 19 nt, Homo sapiens
  misc_RNA (1)...(19): siRNA sense strand
gaagcaaaggcaccucacu

SEQ ID NO: 169035 - RNA, 19 nt, Homo sapiens
  misc_RNA (1)...(19): siRNA sense strand
aagaaaaggcccaagcuaa

SEQ ID NO: 169036 - RNA, 19 nt, Homo sapiens
  misc_RNA (1)...(19): siRNA sense strand
ccugaagaaugucaaaucc

SEQ ID NO: 169037 - RNA, 19 nt, Homo sapiens
  misc_RNA (1)...(19): siRNA sense strand
aaggugaacaagagaaaga

SEQ ID NO: 169038 - RNA, 19 nt, Homo sapiens
  misc_RNA (1)...(19): siRNA sense strand
gaccucagcaccgcuaaca

SEQ ID NO: 169039 - RNA, 19 nt, Homo sapiens
  misc_RNA (1)...(19): siRNA sense strand
cuaaaguugguucucuuga

SEQ ID NO: 169040 - RNA, 19 nt, Homo sapiens
  misc_RNA (1)...(19): siRNA sense strand
gaaaaggcccaagcuaaag

SEQ ID NO: 169041 - RNA, 19 nt, Homo sapiens
  misc_RNA (1)...(19): siRNA sense strand
ccuucucucucaacaguuc

SEQ ID NO: 169042 - RNA, 19 nt, Homo sapiens
  misc_RNA (1)...(19): siRNA sense strand
gaaagaagcucaacauaaa

SEQ ID NO: 169043 - RNA, 19 nt, Homo sapiens
  misc_RNA (1)...(19): siRNA sense strand
caaagucucugacggagua

SEQ ID NO: 169044 - RNA, 19 nt, Homo sapiens
  misc_RNA (1)...(19): siRNA sense strand
caacagacaacaucaaaua

SEQ ID NO: 169045 - RNA, 19 nt, Homo sapiens
  misc_RNA (1)...(19): siRNA sense strand
ggaggugucugcaaggaua

SEQ ID NO: 169046 - RNA, 19 nt, Homo sapiens
  misc_RNA (1)...(19): siRNA sense strand
gaagaaggucgccaucaua

SEQ ID NO: 169047 - RNA, 19 nt, Homo sapiens
  misc_RNA (1)...(19): siRNA sense strand
gaccucagcugacagagaa

SEQ ID NO: 169048 - RNA, 19 nt, Homo sapiens
  misc_RNA (1)...(19): siRNA sense strand
aaaguugguucucuugaua

SEQ ID NO: 169049 - RNA, 19 nt, Homo sapiens
  misc_RNA (1)...(19): siRNA sense strand
gagaaagaagcucaacaua

SEQ ID NO: 169050 - RNA, 19 nt, Homo sapiens
  misc_RNA (1)...(19): siRNA sense strand
agaaagaagcucaacauaa

SEQ ID NO: 169051 - RNA, 19 nt, Homo sapiens
  misc_RNA (1)...(19): siRNA sense strand
gggcugagaucauuacaca

SEQ ID NO: 169052 - RNA, 19 nt, Homo sapiens
  misc_RNA (1)...(19): siRNA sense strand
gcucgaaucuccucagcuu

SEQ ID NO: 169053 - RNA, 19 nt, Homo sapiens
  misc_RNA (1)...(19): siRNA sense strand
ugaagaaugucaaauccaa

SEQ ID NO: 169054 - RNA, 19 nt, Homo sapiens
  misc_RNA (1)...(19): siRNA sense strand
gaaaggugaacaagagaaa

SEQ ID NO: 169055 - RNA, 19 nt, Homo sapiens
  misc_RNA (1)...(19): siRNA sense strand
gaagagugguaccucaaca

SEQ ID NO: 169056 - RNA, 19 nt, Homo sapiens
  misc_RNA (1)...(19): siRNA sense strand
caccugagauuaaggauca

SEQ ID NO: 169057 - RNA, 19 nt, Homo sapiens
  misc_RNA (1)...(19): siRNA sense strand
aaauguggcucucugaaga

SEQ ID NO: 169058 - RNA, 19 nt, Homo sapiens
  misc_RNA (1)...(19): siRNA sense strand
gcaaggauaguucaaguag

SEQ ID NO: 169059 - RNA, 19 nt, Homo sapiens
  misc_RNA (1)...(19): siRNA sense strand
gcaucaaccugcucgaauc

SEQ ID NO: 169060 - RNA, 19 nt, Homo sapiens
  misc_RNA (1)...(19): siRNA sense strand
cccaagaccuuccuccauu

SEQ ID NO: 169061 - RNA, 19 nt, Homo sapiens
  misc_RNA (1)...(19): siRNA sense strand
ugccagaccugaagaaugu

SEQ ID NO: 169062 - RNA, 19 nt, Homo sapiens
  misc_RNA (1)...(19): siRNA sense strand
uaaaguugguucucuugau

SEQ ID NO: 169063 - RNA, 19 nt, Homo sapiens
  misc_RNA (1)...(19): siRNA sense strand
ucacauccaccugagauua

SEQ ID NO: 169064 - RNA, 19 nt, Homo sapiens
  misc_RNA (1)...(19): siRNA sense strand
ggaugaagagggugccuuu

SEQ ID NO: 169065 - RNA, 19 nt, Homo sapiens
  misc_RNA (1)...(19): siRNA sense strand
ugaagagggugccuuugga

SEQ ID NO: 169066 - RNA, 19 nt, Homo sapiens
  misc_RNA (1)...(19): siRNA sense strand
caacaguucuaucucuucu

SEQ ID NO: 169067 - RNA, 19 nt, Homo sapiens
  misc_RNA (1)...(19): siRNA sense strand
gaagaaugucaaauccaaa

SEQ ID NO: 169068 - RNA, 19 nt, Homo sapiens
  misc_RNA (1)...(19): siRNA sense strand
ccugaaaggugaacaagag

SEQ ID NO: 169069 - RNA, 19 nt, Homo sapiens
  misc_RNA (1)...(19): siRNA sense strand
cuccucagcuugccacuuu

SEQ ID NO: 169070 - RNA, 19 nt, Homo sapiens
  misc_RNA (1)...(19): siRNA sense strand
caaaggacaaagucucuga

SEQ ID NO: 169071 - RNA, 19 nt, Homo sapiens
  misc_RNA (1)...(19): siRNA sense strand
uuuagcagcugaagaaaca

SEQ ID NO: 169072 - RNA, 19 nt, Homo sapiens
  misc_RNA (1)...(19): siRNA sense strand
agaagaaggucgccaucau

SEQ ID NO: 169073 - RNA, 19 nt, Homo sapiens
  misc_RNA (1)...(19): siRNA sense strand
ccaagaccuuccuccauuc

SEQ ID NO: 169074 - RNA, 19 nt, Homo sapiens
  misc_RNA (1)...(19): siRNA sense strand
ggucacagggcaccuauuc

SEQ ID NO: 169075 - RNA, 19 nt, Homo sapiens
  misc_RNA (1)...(19): siRNA sense strand
ucaaauaccagccuaaagg

SEQ ID NO: 169076 - RNA, 19 nt, Homo sapiens
  misc_RNA (1)...(19): siRNA sense strand
ucacagggcaccuauucaa

SEQ ID NO: 169077 - RNA, 19 nt, Homo sapiens
  misc_RNA (1)...(19): siRNA sense strand
agaggcaucugcacacuca

SEQ ID NO: 169078 - RNA, 19 nt, Homo sapiens
  misc_RNA (1)...(19): siRNA sense strand
gaaggucgccaucauacgu

SEQ ID NO: 169079 - RNA, 19 nt, Homo sapiens
  misc_RNA (1)...(19): siRNA sense strand
aaggauaguucaaguaguc

SEQ ID NO: 169080 - RNA, 19 nt, Homo sapiens
  misc_RNA (1)...(19): siRNA sense strand
gaggaggugucugcaagga

SEQ ID NO: 169081 - RNA, 19 nt, Homo sapiens
  misc_RNA (1)...(19): siRNA sense strand
acaguucuaucucuucuuc

SEQ ID NO: 169082 - RNA, 19 nt, Homo sapiens
  misc_RNA (1)...(19): siRNA sense strand
aaauagaccuaagccaugu

SEQ ID NO: 169083 - RNA, 19 nt, Homo sapiens
  misc_RNA (1)...(19): siRNA sense strand
gaucaacagacaacaucaa

SEQ ID NO: 169084 - RNA, 19 nt, Homo sapiens
  misc_RNA (1)...(19): siRNA sense strand
gcugagaucauuacacagu

SEQ ID NO: 169085 - RNA, 19 nt, Homo sapiens
  misc_RNA (1)...(19): siRNA sense strand
ggagacagagaugagaauu

SEQ ID NO: 169086 - RNA, 19 nt, Homo sapiens
  misc_RNA (1)...(19): siRNA sense strand
ccaaagagaaugggaucaa

SEQ ID NO: 169087 - RNA, 19 nt, Homo sapiens
  misc_RNA (1)...(19): siRNA sense strand
caucaaauaccagccuaaa

SEQ ID NO: 169088 - RNA, 19 nt, Homo sapiens
  misc_RNA (1)...(19): siRNA sense strand
cagacaacaucaaauacca

SEQ ID NO: 169089 - RNA, 19 nt, Homo sapiens
  misc_RNA (1)...(19): siRNA sense strand
caaagagaaugggaucaac

SEQ ID NO: 169090 - RNA, 19 nt, Homo sapiens
  misc_RNA (1)...(19): siRNA sense strand
ucaaauaccaaagagaaug

SEQ ID NO: 169091 - RNA, 19 nt, Homo sapiens
  misc_RNA (1)...(19): siRNA sense strand
gcuaaaguugguucucuug

SEQ ID NO: 169092 - RNA, 19 nt, Homo sapiens
  misc_RNA (1)...(19): siRNA sense strand
gccuuuagcagcugaagaa

SEQ ID NO: 169093 - RNA, 19 nt, Homo sapiens
  misc_RNA (1)...(19): siRNA sense strand
ucagagagcaugcuaaagc

SEQ ID NO: 169094 - RNA, 19 nt, Homo sapiens
  misc_RNA (1)...(19): siRNA sense strand
cacauccaccugagauuaa

SEQ ID NO: 169095 - RNA, 19 nt, Homo sapiens
  misc_RNA (1)...(19): siRNA sense strand
gagaagaaggucgccauca

SEQ ID NO: 169096 - RNA, 19 nt, Homo sapiens
  misc_RNA (1)...(19): siRNA sense strand
ucaccugccucagaacaga

SEQ ID NO: 169097 - RNA, 19 nt, Homo sapiens
  misc_RNA (1)...(19): siRNA sense strand
cccaucaccugccucagaa

SEQ ID NO: 169098 - RNA, 19 nt, Homo sapiens
  misc_RNA (1)...(19): siRNA sense strand
ugaagaaacagcuaaucug

SEQ ID NO: 169099 - RNA, 19 nt, Homo sapiens
  misc_RNA (1)...(19): siRNA sense strand
caaggauaguucaaguagu

SEQ ID NO: 169100 - RNA, 19 nt, Homo sapiens
  misc_RNA (1)...(19): siRNA sense strand
ucucaacaguucuaucucu

SEQ ID NO: 169101 - RNA, 19 nt, Homo sapiens
  misc_RNA (1)...(19): siRNA sense strand
agacagagaugagaauucc

SEQ ID NO: 169102 - RNA, 19 nt, Homo sapiens
  misc_RNA (1)...(19): siRNA sense strand
ccucagcaccgcuaacaga

SEQ ID NO: 169103 - RNA, 19 nt, Homo sapiens
  misc_RNA (1)...(19): siRNA sense strand
gaacggaaagacgaagcaa

SEQ ID NO: 169104 - RNA, 19 nt, Homo sapiens
  misc_RNA (1)...(19): siRNA sense strand
caaauguggcucucugaag

SEQ ID NO: 169105 - RNA, 19 nt, Homo sapiens
  misc_RNA (1)...(19): siRNA sense strand
gagacagagaugagaauuc

SEQ ID NO: 169106 - RNA, 19 nt, Homo sapiens
  misc_RNA (1)...(19): siRNA sense strand
ggcuguagcaguccugaaa

SEQ ID NO: 169107 - RNA, 19 nt, Homo sapiens
  misc_RNA (1)...(19): siRNA sense strand
ccaaauguggcucucugaa

SEQ ID NO: 169108 - RNA, 19 nt, Homo sapiens
  misc_RNA (1)...(19): siRNA sense strand
ccgaagcgccaauggauuc

SEQ ID NO: 169109 - RNA, 19 nt, Homo sapiens
  misc_RNA (1)...(19): siRNA sense strand
aagaagcucaacauaaaga

SEQ ID NO: 169110 - RNA, 19 nt, Homo sapiens
  misc_RNA (1)...(19): siRNA sense strand
cuucagagagcaugcuaaa

SEQ ID NO: 169111 - RNA, 19 nt, Homo sapiens
  misc_RNA (1)...(19): siRNA sense strand
caaauaccaaagagaaugg

SEQ ID NO: 169112 - RNA, 19 nt, Homo sapiens
  misc_RNA (1)...(19): siRNA sense strand
ggugguaaugucaagauug

SEQ ID NO: 169113 - RNA, 19 nt, Homo sapiens
  misc_RNA (1)...(19): siRNA sense strand
guaaccaagagcccagaaa

SEQ ID NO: 169114 - RNA, 19 nt, Homo sapiens
  misc_RNA (1)...(19): siRNA sense strand
agagaaagaagcucaacau

SEQ ID NO: 169115 - RNA, 19 nt, Homo sapiens
  misc_RNA (1)...(19): siRNA sense strand
uaaacaggcaaaggacaaa

SEQ ID NO: 169116 - RNA, 19 nt, Homo sapiens
  misc_RNA (1)...(19): siRNA sense strand
ccacuuuggcugaggaugu

SEQ ID NO: 169117 - RNA, 19 nt, Homo sapiens
  misc_RNA (1)...(19): siRNA sense strand
gggaagagugguaccucaa

SEQ ID NO: 169118 - RNA, 19 nt, Homo sapiens
  misc_RNA (1)...(19): siRNA sense strand
cugcaaggauaguucaagu

SEQ ID NO: 169119 - RNA, 19 nt, Homo sapiens
  misc_RNA (1)...(19): siRNA sense strand
gauaaugcucaucauguac

SEQ ID NO: 169120 - RNA, 19 nt, Homo sapiens
  misc_RNA (1)...(19): siRNA sense strand
ccaucuuggugccgaguga

SEQ ID NO: 169121 - RNA, 19 nt, Homo sapiens
  misc_RNA (1)...(19): siRNA sense strand
ugaaaggugaacaagagaa

SEQ ID NO: 169122 - RNA, 19 nt, Homo sapiens
  misc_RNA (1)...(19): siRNA sense strand
acagggcaccuauucaaau

SEQ ID NO: 169123 - RNA, 19 nt, Homo sapiens
  misc_RNA (1)...(19): siRNA sense strand
uuaaacaggcaaaggacaa

SEQ ID NO: 169124 - RNA, 19 nt, Homo sapiens
  misc_RNA (1)...(19): siRNA sense strand
agaaaaggcccaagcuaaa

SEQ ID NO: 169125 - RNA, 19 nt, Homo sapiens
  misc_RNA (1)...(19): siRNA sense strand
ucacugcugcacucgcuaa

SEQ ID NO: 169126 - RNA, 19 nt, Homo sapiens
  misc_RNA (1)...(19): siRNA sense strand
cacagggcaccuauucaaa

SEQ ID NO: 169127 - RNA, 19 nt, Homo sapiens
  misc_RNA (1)...(19): siRNA sense strand
cgacgacucagcaaugucu

SEQ ID NO: 169128 - RNA, 19 nt, Homo sapiens
  misc_RNA (1)...(19): siRNA sense strand
gaggugguaaugucaagau

SEQ ID NO: 169129 - RNA, 19 nt, Homo sapiens
  misc_RNA (1)...(19): siRNA sense strand
guggcucucugaagaacau

SEQ ID NO: 169130 - RNA, 19 nt, Homo sapiens
  misc_RNA (1)...(19): siRNA sense strand
ggaagagugguaccucaac

SEQ ID NO: 169131 - RNA, 19 nt, Homo sapiens
  misc_RNA (1)...(19): siRNA sense strand
acagagaugagaauuccuu

SEQ ID NO: 169132 - RNA, 19 nt, Homo sapiens
  misc_RNA (1)...(19): siRNA sense strand
uauuuaaacaggcaaagga

SEQ ID NO: 169133 - RNA, 19 nt, Homo sapiens
  misc_RNA (1)...(19): siRNA sense strand
aagcuaaaguugguucucu

SEQ ID NO: 169134 - RNA, 19 nt, Homo sapiens
  misc_RNA (1)...(19): siRNA sense strand
gaagcaaaggcaccucacu

SEQ ID NO: 169135 - RNA, 19 nt, Homo sapiens
  misc_RNA (1)...(19): siRNA sense strand
aagaaaaggcccaagcuaa

SEQ ID NO: 169136 - RNA, 19 nt, Homo sapiens
  misc_RNA (1)...(19): siRNA sense strand
ccugaagaaugucaaaucc

SEQ ID NO: 169137 - RNA, 19 nt, Homo sapiens
  misc_RNA (1)...(19): siRNA sense strand
aaggugaacaagagaaaga

SEQ ID NO: 169138 - RNA, 19 nt, Homo sapiens
  misc_RNA (1)...(19): siRNA sense strand
gaccucagcaccgcuaaca

SEQ ID NO: 169139 - RNA, 19 nt, Homo sapiens
  misc_RNA (1)...(19): siRNA sense strand
cuaaaguugguucucuuga

SEQ ID NO: 169140 - RNA, 19 nt, Homo sapiens
  misc_RNA (1)...(19): siRNA sense strand
gaaaaggcccaagcuaaag

SEQ ID NO: 169141 - RNA, 19 nt, Homo sapiens
  misc_RNA (1)...(19): siRNA sense strand
ccuucucucucaacaguuc

SEQ ID NO: 169142 - RNA, 19 nt, Homo sapiens
  misc_RNA (1)...(19): siRNA sense strand
ggacaugucuccacuauca

SEQ ID NO: 169143 - RNA, 19 nt, Homo sapiens
  misc_RNA (1)...(19): siRNA sense strand
gcacaagcauuggaaauaa

SEQ ID NO: 169144 - RNA, 19 nt, Homo sapiens
  misc_RNA (1)...(19): siRNA sense strand
ggaaucacccaccaaauua

SEQ ID NO: 169145 - RNA, 19 nt, Homo sapiens
  misc_RNA (1)...(19): siRNA sense strand
caacaccaguuccaauuaa

SEQ ID NO: 169146 - RNA, 19 nt, Homo sapiens
  misc_RNA (1)...(19): siRNA sense strand
cgaggaggauucuguguua

SEQ ID NO: 169147 - RNA, 19 nt, Homo sapiens
  misc_RNA (1)...(19): siRNA sense strand
gcaccuacuuucaugauuu

SEQ ID NO: 169148 - RNA, 19 nt, Homo sapiens
  misc_RNA (1)...(19): siRNA sense strand
ucaagaagaugacugcaaa

SEQ ID NO: 169149 - RNA, 19 nt, Homo sapiens
  misc_RNA (1)...(19): siRNA sense strand
gaagaaaccgugcucagaa

SEQ ID NO: 169150 - RNA, 19 nt, Homo sapiens
  misc_RNA (1)...(19): siRNA sense strand
caacugaauuccuugaaga

SEQ ID NO: 169151 - RNA, 19 nt, Homo sapiens
  misc_RNA (1)...(19): siRNA sense strand
gcaaagacuucaacaucga

SEQ ID NO: 169152 - RNA, 19 nt, Homo sapiens
  misc_RNA (1)...(19): siRNA sense strand
gcugauacuucaauauuug

SEQ ID NO: 169153 - RNA, 19 nt, Homo sapiens
  misc_RNA (1)...(19): siRNA sense strand
gaaauggcaucagaagaga

SEQ ID NO: 169154 - RNA, 19 nt, Homo sapiens
  misc_RNA (1)...(19): siRNA sense strand
gccagaagauaccaacuuu

SEQ ID NO: 169155 - RNA, 19 nt, Homo sapiens
  misc_RNA (1)...(19): siRNA sense strand
gaaauauccucugcugaga

SEQ ID NO: 169156 - RNA, 19 nt, Homo sapiens
  misc_RNA (1)...(19): siRNA sense strand
gcaacaccaguuccaauua

SEQ ID NO: 169157 - RNA, 19 nt, Homo sapiens
  misc_RNA (1)...(19): siRNA sense strand
ggacuucauugccacacua

SEQ ID NO: 169158 - RNA, 19 nt, Homo sapiens
  misc_RNA (1)...(19): siRNA sense strand
gaaauugcacaaacacaaa

SEQ ID NO: 169159 - RNA, 19 nt, Homo sapiens
  misc_RNA (1)...(19): siRNA sense strand
gcagaggccuuugaugaug

SEQ ID NO: 169160 - RNA, 19 nt, Homo sapiens
  misc_RNA (1)...(19): siRNA sense strand
gaaaggaaaccaugcaaca

SEQ ID NO: 169161 - RNA, 19 nt, Homo sapiens
  misc_RNA (1)...(19): siRNA sense strand
gaccaaggauaaagcacua

SEQ ID NO: 169162 - RNA, 19 nt, Homo sapiens
  misc_RNA (1)...(19): siRNA sense strand
ccacugccauuaagacuga

SEQ ID NO: 169163 - RNA, 19 nt, Homo sapiens
  misc_RNA (1)...(19): siRNA sense strand
gaaacuagccagauugaag

SEQ ID NO: 169164 - RNA, 19 nt, Homo sapiens
  misc_RNA (1)...(19): siRNA sense strand
gcacucagacuguugcaaa

SEQ ID NO: 169165 - RNA, 19 nt, Homo sapiens
  misc_RNA (1)...(19): siRNA sense strand
gaaauaaugaugggacuga

SEQ ID NO: 169166 - RNA, 19 nt, Homo sapiens
  misc_RNA (1)...(19): siRNA sense strand
ugccaggccuuccaucuua

SEQ ID NO: 169167 - RNA, 19 nt, Homo sapiens
  misc_RNA (1)...(19): siRNA sense strand
gaaaauggccuaccaggaa

SEQ ID NO: 169168 - RNA, 19 nt, Homo sapiens
  misc_RNA (1)...(19): siRNA sense strand
uggaggagaugucaagauu

SEQ ID NO: 169169 - RNA, 19 nt, Homo sapiens
  misc_RNA (1)...(19): siRNA sense strand
ccacaacuccuuucauaga

SEQ ID NO: 169170 - RNA, 19 nt, Homo sapiens
  misc_RNA (1)...(19): siRNA sense strand
ucagagaccucaggaauag

SEQ ID NO: 169171 - RNA, 19 nt, Homo sapiens
  misc_RNA (1)...(19): siRNA sense strand
uaagugaggauucccauuu

SEQ ID NO: 169172 - RNA, 19 nt, Homo sapiens
  misc_RNA (1)...(19): siRNA sense strand
ggaaauugcacaaacacaa

SEQ ID NO: 169173 - RNA, 19 nt, Homo sapiens
  misc_RNA (1)...(19): siRNA sense strand
ccaaggaugugacacuguu

SEQ ID NO: 169174 - RNA, 19 nt, Homo sapiens
  misc_RNA (1)...(19): siRNA sense strand
caaugugacuccagccaaa

SEQ ID NO: 169175 - RNA, 19 nt, Homo sapiens
  misc_RNA (1)...(19): siRNA sense strand
gaggugcugugaagacuga

SEQ ID NO: 169176 - RNA, 19 nt, Homo sapiens
  misc_RNA (1)...(19): siRNA sense strand
uagaaucucugcaggaugu

SEQ ID NO: 169177 - RNA, 19 nt, Homo sapiens
  misc_RNA (1)...(19): siRNA sense strand
gcagaugcauuaacagaac

SEQ ID NO: 169178 - RNA, 19 nt, Homo sapiens
  misc_RNA (1)...(19): siRNA sense strand
gaaaccaacgugaucuuga

SEQ ID NO: 169179 - RNA, 19 nt, Homo sapiens
  misc_RNA (1)...(19): siRNA sense strand
ugaauuccuugaagagaaa

SEQ ID NO: 169180 - RNA, 19 nt, Homo sapiens
  misc_RNA (1)...(19): siRNA sense strand
cuccacaacuccuuucaua

SEQ ID NO: 169181 - RNA, 19 nt, Homo sapiens
  misc_RNA (1)...(19): siRNA sense strand
caaaagacgugaagccaaa

SEQ ID NO: 169182 - RNA, 19 nt, Homo sapiens
  misc_RNA (1)...(19): siRNA sense strand
ccacuucucucccuaagca

SEQ ID NO: 169183 - RNA, 19 nt, Homo sapiens
  misc_RNA (1)...(19): siRNA sense strand
uaccaggaauacccaaaua

SEQ ID NO: 169184 - RNA, 19 nt, Homo sapiens
  misc_RNA (1)...(19): siRNA sense strand
ggcauuggcuaaagauaug

SEQ ID NO: 169185 - RNA, 19 nt, Homo sapiens
  misc_RNA (1)...(19): siRNA sense strand
gcagaagucaagaagauga

SEQ ID NO: 169186 - RNA, 19 nt, Homo sapiens
  misc_RNA (1)...(19): siRNA sense strand
gggagaaacuguuggaaaa

SEQ ID NO: 169187 - RNA, 19 nt, Homo sapiens
  misc_RNA (1)...(19): siRNA sense strand
caagagcacucagacuguu

SEQ ID NO: 169188 - RNA, 19 nt, Homo sapiens
  misc_RNA (1)...(19): siRNA sense strand
caaugguggucauggagua

SEQ ID NO: 169189 - RNA, 19 nt, Homo sapiens
  misc_RNA (1)...(19): siRNA sense strand
ccuuuaagauguaccauga

SEQ ID NO: 169190 - RNA, 19 nt, Homo sapiens
  misc_RNA (1)...(19): siRNA sense strand
agaaccaucuccagacauu

SEQ ID NO: 169191 - RNA, 19 nt, Homo sapiens
  misc_RNA (1)...(19): siRNA sense strand
aagugaggauucccauuua

SEQ ID NO: 169192 - RNA, 19 nt, Homo sapiens
  misc_RNA (1)...(19): siRNA sense strand
ggacauggcacuagcuaca

SEQ ID NO: 169193 - RNA, 19 nt, Homo sapiens
  misc_RNA (1)...(19): siRNA sense strand
gauugaaagucagaaguug

SEQ ID NO: 169194 - RNA, 19 nt, Homo sapiens
  misc_RNA (1)...(19): siRNA sense strand
aagaaaccgugcucagaaa

SEQ ID NO: 169195 - RNA, 19 nt, Homo sapiens
  misc_RNA (1)...(19): siRNA sense strand
gauaaagcgggacuucauu

SEQ ID NO: 169196 - RNA, 19 nt, Homo sapiens
  misc_RNA (1)...(19): siRNA sense strand
cagcugauacuucaauauu

SEQ ID NO: 169197 - RNA, 19 nt, Homo sapiens
  misc_RNA (1)...(19): siRNA sense strand
gacagcugauacuucaaua

SEQ ID NO: 169198 - RNA, 19 nt, Homo sapiens
  misc_RNA (1)...(19): siRNA sense strand
augaugaccuggcagauuu

SEQ ID NO: 169199 - RNA, 19 nt, Homo sapiens
  misc_RNA (1)...(19): siRNA sense strand
uauccagacugaucccuuu

SEQ ID NO: 169200 - RNA, 19 nt, Homo sapiens
  misc_RNA (1)...(19): siRNA sense strand
gaaguaguucucaucaaga

SEQ ID NO: 169201 - RNA, 19 nt, Homo sapiens
  misc_RNA (1)...(19): siRNA sense strand
gagggcaucuccuauaaaa

SEQ ID NO: 169202 - RNA, 19 nt, Homo sapiens
  misc_RNA (1)...(19): siRNA sense strand
gagggcaucuccuauaaaa

SEQ ID NO: 169203 - RNA, 19 nt, Homo sapiens
  misc_RNA (1)...(19): siRNA sense strand
agauagaaauggcaucaga

SEQ ID NO: 169204 - RNA, 19 nt, Homo sapiens
  misc_RNA (1)...(19): siRNA sense strand
ggucuaaggcuaacaucaa

SEQ ID NO: 169205 - RNA, 19 nt, Homo sapiens
  misc_RNA (1)...(19): siRNA sense strand
aaaccgugcucagaaacua

SEQ ID NO: 169206 - RNA, 19 nt, Homo sapiens
  misc_RNA (1)...(19): siRNA sense strand
gaagcccacugccauuaag

SEQ ID NO: 169207 - RNA, 19 nt, Homo sapiens
  misc_RNA (1)...(19): siRNA sense strand
aaacacagcccacuucucu

SEQ ID NO: 169208 - RNA, 19 nt, Homo sapiens
  misc_RNA (1)...(19): siRNA sense strand
uuaaagacauggaaauugc

SEQ ID NO: 169209 - RNA, 19 nt, Homo sapiens
  misc_RNA (1)...(19): siRNA sense strand
agacugaucccuuuaagau

SEQ ID NO: 169210 - RNA, 19 nt, Homo sapiens
  misc_RNA (1)...(19): siRNA sense strand
gauacuccaucuucuaaac

SEQ ID NO: 169211 - RNA, 19 nt, Homo sapiens
  misc_RNA (1)...(19): siRNA sense strand
uggaaucacccaccaaauu

SEQ ID NO: 169212 - RNA, 19 nt, Homo sapiens
  misc_RNA (1)...(19): siRNA sense strand
caacacuccuagccaaugg

SEQ ID NO: 169213 - RNA, 19 nt, Homo sapiens
  misc_RNA (1)...(19): siRNA sense strand
ugggaucccucgauaaugu

SEQ ID NO: 169214 - RNA, 19 nt, Homo sapiens
  misc_RNA (1)...(19): siRNA sense strand
gaaaguggacaucucuaag

SEQ ID NO: 169215 - RNA, 19 nt, Homo sapiens
  misc_RNA (1)...(19): siRNA sense strand
caacuccuuucauagacaa

SEQ ID NO: 169216 - RNA, 19 nt, Homo sapiens
  misc_RNA (1)...(19): siRNA sense strand
gugacacuguugaaagaaa

SEQ ID NO: 169217 - RNA, 19 nt, Homo sapiens
  misc_RNA (1)...(19): siRNA sense strand
ggacugaagacuacugaca

SEQ ID NO: 169218 - RNA, 19 nt, Homo sapiens
  misc_RNA (1)...(19): siRNA sense strand
gaugaugaccuggcagauu

SEQ ID NO: 169219 - RNA, 19 nt, Homo sapiens
  misc_RNA (1)...(19): siRNA sense strand
ggaguagaagggagcgaua

SEQ ID NO: 169220 - RNA, 19 nt, Homo sapiens
  misc_RNA (1)...(19): siRNA sense strand
ucucuaaggucuccuccaa

SEQ ID NO: 169221 - RNA, 19 nt, Homo sapiens
  misc_RNA (1)...(19): siRNA sense strand
cuccugaucugaagaaugu

SEQ ID NO: 169222 - RNA, 19 nt, Homo sapiens
  misc_RNA (1)...(19): siRNA sense strand
cugcagaagucaagaagau

SEQ ID NO: 169223 - RNA, 19 nt, Homo sapiens
  misc_RNA (1)...(19): siRNA sense strand
gaagggagcgauacuacag

SEQ ID NO: 169224 - RNA, 19 nt, Homo sapiens
  misc_RNA (1)...(19): siRNA sense strand
ggaaaccaacgugaucuug

SEQ ID NO: 169225 - RNA, 19 nt, Homo sapiens
  misc_RNA (1)...(19): siRNA sense strand
aagguuggcuccacggaaa

SEQ ID NO: 169226 - RNA, 19 nt, Homo sapiens
  misc_RNA (1)...(19): siRNA sense strand
caagaagcccacugccauu

SEQ ID NO: 169227 - RNA, 19 nt, Homo sapiens
  misc_RNA (1)...(19): siRNA sense strand
ccacgcuccugcccaagaa

SEQ ID NO: 169228 - RNA, 19 nt, Homo sapiens
  misc_RNA (1)...(19): siRNA sense strand
cauggaaauugcacaaaca

SEQ ID NO: 169229 - RNA, 19 nt, Homo sapiens
  misc_RNA (1)...(19): siRNA sense strand
aaugaucccuugaaagaca

SEQ ID NO: 169230 - RNA, 19 nt, Homo sapiens
  misc_RNA (1)...(19): siRNA sense strand
aaggugggaucccucgaua

SEQ ID NO: 169231 - RNA, 19 nt, Homo sapiens
  misc_RNA (1)...(19): siRNA sense strand
gggaaaaccugcagaaguc

SEQ ID NO: 169232 - RNA, 19 nt, Homo sapiens
  misc_RNA (1)...(19): siRNA sense strand
ccauuaagacugagggaaa

SEQ ID NO: 169233 - RNA, 19 nt, Homo sapiens
  misc_RNA (1)...(19): siRNA sense strand
gcaacagucaaccuucuga

SEQ ID NO: 169234 - RNA, 19 nt, Homo sapiens
  misc_RNA (1)...(19): siRNA sense strand
aaagaaguggcccugguua

SEQ ID NO: 169235 - RNA, 19 nt, Homo sapiens
  misc_RNA (1)...(19): siRNA sense strand
gauagaaauggcaucagaa

SEQ ID NO: 169236 - RNA, 19 nt, Homo sapiens
  misc_RNA (1)...(19): siRNA sense strand
cugaauuccuugaagagaa

SEQ ID NO: 169237 - RNA, 19 nt, Homo sapiens
  misc_RNA (1)...(19): siRNA sense strand
gaacaagaaaguggacauc

SEQ ID NO: 169238 - RNA, 19 nt, Homo sapiens
  misc_RNA (1)...(19): siRNA sense strand
aagagcaccuccaccaguu

SEQ ID NO: 169239 - RNA, 19 nt, Homo sapiens
  misc_RNA (1)...(19): siRNA sense strand
agacauugagggagagaua

SEQ ID NO: 169240 - RNA, 19 nt, Homo sapiens
  misc_RNA (1)...(19): siRNA sense strand
aaacuagccagauugaaga

SEQ ID NO: 169241 - RNA, 19 nt, Homo sapiens
  misc_RNA (1)...(19): siRNA sense strand
ucuaaggucuccuccaagu

SEQ ID NO: 169242 - RNA, 19 nt, Homo sapiens
  misc_RNA (1)...(19): siRNA sense strand
ggacaugucuccacuauca

SEQ ID NO: 169243 - RNA, 19 nt, Homo sapiens
  misc_RNA (1)...(19): siRNA sense strand
gcacaagcauuggaaauaa

SEQ ID NO: 169244 - RNA, 19 nt, Homo sapiens
  misc_RNA (1)...(19): siRNA sense strand
ggaaucacccaccaaauua

SEQ ID NO: 169245 - RNA, 19 nt, Homo sapiens
  misc_RNA (1)...(19): siRNA sense strand
caacaccaguuccaauuaa

SEQ ID NO: 169246 - RNA, 19 nt, Homo sapiens
  misc_RNA (1)...(19): siRNA sense strand
cgaggaggauucuguguua

SEQ ID NO: 169247 - RNA, 19 nt, Homo sapiens
  misc_RNA (1)...(19): siRNA sense strand
gcaccuacuuucaugauuu

SEQ ID NO: 169248 - RNA, 19 nt, Homo sapiens
  misc_RNA (1)...(19): siRNA sense strand
ucaagaagaugacugcaaa

SEQ ID NO: 169249 - RNA, 19 nt, Homo sapiens
  misc_RNA (1)...(19): siRNA sense strand
gaagaaaccgugcucagaa

SEQ ID NO: 169250 - RNA, 19 nt, Homo sapiens
  misc_RNA (1)...(19): siRNA sense strand
caacugaauuccuugaaga

SEQ ID NO: 169251 - RNA, 19 nt, Homo sapiens
  misc_RNA (1)...(19): siRNA sense strand
gcaaagacuucaacaucga

SEQ ID NO: 169252 - RNA, 19 nt, Homo sapiens
  misc_RNA (1)...(19): siRNA sense strand
gcugauacuucaauauuug

SEQ ID NO: 169253 - RNA, 19 nt, Homo sapiens
  misc_RNA (1)...(19): siRNA sense strand
gaaauggcaucagaagaga

SEQ ID NO: 169254 - RNA, 19 nt, Homo sapiens
  misc_RNA (1)...(19): siRNA sense strand
gccagaagauaccaacuuu

SEQ ID NO: 169255 - RNA, 19 nt, Homo sapiens
  misc_RNA (1)...(19): siRNA sense strand
gaaauauccucugcugaga

SEQ ID NO: 169256 - RNA, 19 nt, Homo sapiens
  misc_RNA (1)...(19): siRNA sense strand
gcaacaccaguuccaauua

SEQ ID NO: 169257 - RNA, 19 nt, Homo sapiens
  misc_RNA (1)...(19): siRNA sense strand
ggacuucauugccacacua

SEQ ID NO: 169258 - RNA, 19 nt, Homo sapiens
  misc_RNA (1)...(19): siRNA sense strand
gaaauugcacaaacacaaa

SEQ ID NO: 169259 - RNA, 19 nt, Homo sapiens
  misc_RNA (1)...(19): siRNA sense strand
gcagaggccuuugaugaug

SEQ ID NO: 169260 - RNA, 19 nt, Homo sapiens
  misc_RNA (1)...(19): siRNA sense strand
gaaaggaaaccaugcaaca

SEQ ID NO: 169261 - RNA, 19 nt, Homo sapiens
  misc_RNA (1)...(19): siRNA sense strand
gaccaaggauaaagcacua

SEQ ID NO: 169262 - RNA, 19 nt, Homo sapiens
  misc_RNA (1)...(19): siRNA sense strand
ccacugccauuaagacuga

SEQ ID NO: 169263 - RNA, 19 nt, Homo sapiens
  misc_RNA (1)...(19): siRNA sense strand
gaaacuagccagauugaag

SEQ ID NO: 169264 - RNA, 19 nt, Homo sapiens
  misc_RNA (1)...(19): siRNA sense strand
gcacucagacuguugcaaa

SEQ ID NO: 169265 - RNA, 19 nt, Homo sapiens
  misc_RNA (1)...(19): siRNA sense strand
gaaauaaugaugggacuga

SEQ ID NO: 169266 - RNA, 19 nt, Homo sapiens
  misc_RNA (1)...(19): siRNA sense strand
ugccaggccuuccaucuua

SEQ ID NO: 169267 - RNA, 19 nt, Homo sapiens
  misc_RNA (1)...(19): siRNA sense strand
gaaaauggccuaccaggaa

SEQ ID NO: 169268 - RNA, 19 nt, Homo sapiens
  misc_RNA (1)...(19): siRNA sense strand
uggaggagaugucaagauu

SEQ ID NO: 169269 - RNA, 19 nt, Homo sapiens
  misc_RNA (1)...(19): siRNA sense strand
ccacaacuccuuucauaga

SEQ ID NO: 169270 - RNA, 19 nt, Homo sapiens
  misc_RNA (1)...(19): siRNA sense strand
ucagagaccucaggaauag

SEQ ID NO: 169271 - RNA, 19 nt, Homo sapiens
  misc_RNA (1)...(19): siRNA sense strand
uaagugaggauucccauuu

SEQ ID NO: 169272 - RNA, 19 nt, Homo sapiens
  misc_RNA (1)...(19): siRNA sense strand
ggaaauugcacaaacacaa

SEQ ID NO: 169273 - RNA, 19 nt, Homo sapiens
  misc_RNA (1)...(19): siRNA sense strand
ccaaggaugugacacuguu

SEQ ID NO: 169274 - RNA, 19 nt, Homo sapiens
  misc_RNA (1)...(19): siRNA sense strand
caaugugacuccagccaaa

SEQ ID NO: 169275 - RNA, 19 nt, Homo sapiens
  misc_RNA (1)...(19): siRNA sense strand
gaggugcugugaagacuga

SEQ ID NO: 169276 - RNA, 19 nt, Homo sapiens
  misc_RNA (1)...(19): siRNA sense strand
uagaaucucugcaggaugu

SEQ ID NO: 169277 - RNA, 19 nt, Homo sapiens
  misc_RNA (1)...(19): siRNA sense strand
gcagaugcauuaacagaac

SEQ ID NO: 169278 - RNA, 19 nt, Homo sapiens
  misc_RNA (1)...(19): siRNA sense strand
gaaaccaacgugaucuuga

SEQ ID NO: 169279 - RNA, 19 nt, Homo sapiens
  misc_RNA (1)...(19): siRNA sense strand
ugaauuccuugaagagaaa

SEQ ID NO: 169280 - RNA, 19 nt, Homo sapiens
  misc_RNA (1)...(19): siRNA sense strand
cuccacaacuccuuucaua

SEQ ID NO: 169281 - RNA, 19 nt, Homo sapiens
  misc_RNA (1)...(19): siRNA sense strand
caaaagacgugaagccaaa

SEQ ID NO: 169282 - RNA, 19 nt, Homo sapiens
  misc_RNA (1)...(19): siRNA sense strand
ccacuucucucccuaagca

SEQ ID NO: 169283 - RNA, 19 nt, Homo sapiens
  misc_RNA (1)...(19): siRNA sense strand
uaccaggaauacccaaaua

SEQ ID NO: 169284 - RNA, 19 nt, Homo sapiens
  misc_RNA (1)...(19): siRNA sense strand
ggcauuggcuaaagauaug

SEQ ID NO: 169285 - RNA, 19 nt, Homo sapiens
  misc_RNA (1)...(19): siRNA sense strand
gcagaagucaagaagauga

SEQ ID NO: 169286 - RNA, 19 nt, Homo sapiens
  misc_RNA (1)...(19): siRNA sense strand
gggagaaacuguuggaaaa

SEQ ID NO: 169287 - RNA, 19 nt, Homo sapiens
  misc_RNA (1)...(19): siRNA sense strand
caagagcacucagacuguu

SEQ ID NO: 169288 - RNA, 19 nt, Homo sapiens
  misc_RNA (1)...(19): siRNA sense strand
caaugguggucauggagua

SEQ ID NO: 169289 - RNA, 19 nt, Homo sapiens
  misc_RNA (1)...(19): siRNA sense strand
ccuuuaagauguaccauga

SEQ ID NO: 169290 - RNA, 19 nt, Homo sapiens
  misc_RNA (1)...(19): siRNA sense strand
agaaccaucuccagacauu

SEQ ID NO: 169291 - RNA, 19 nt, Homo sapiens
  misc_RNA (1)...(19): siRNA sense strand
aagugaggauucccauuua

SEQ ID NO: 169292 - RNA, 19 nt, Homo sapiens
  misc_RNA (1)...(19): siRNA sense strand
ggacauggcacuagcuaca

SEQ ID NO: 169293 - RNA, 19 nt, Homo sapiens
  misc_RNA (1)...(19): siRNA sense strand
gauugaaagucagaaguug

SEQ ID NO: 169294 - RNA, 19 nt, Homo sapiens
  misc_RNA (1)...(19): siRNA sense strand
aagaaaccgugcucagaaa

SEQ ID NO: 169295 - RNA, 19 nt, Homo sapiens
  misc_RNA (1)...(19): siRNA sense strand
gauaaagcgggacuucauu

SEQ ID NO: 169296 - RNA, 19 nt, Homo sapiens
  misc_RNA (1)...(19): siRNA sense strand
cagcugauacuucaauauu

SEQ ID NO: 169297 - RNA, 19 nt, Homo sapiens
  misc_RNA (1)...(19): siRNA sense strand
gacagcugauacuucaaua

SEQ ID NO: 169298 - RNA, 19 nt, Homo sapiens
  misc_RNA (1)...(19): siRNA sense strand
augaugaccuggcagauuu

SEQ ID NO: 169299 - RNA, 19 nt, Homo sapiens
  misc_RNA (1)...(19): siRNA sense strand
uauccagacugaucccuuu

SEQ ID NO: 169300 - RNA, 19 nt, Homo sapiens
  misc_RNA (1)...(19): siRNA sense strand
gaaguaguucucaucaaga

SEQ ID NO: 169301 - RNA, 19 nt, Homo sapiens
  misc_RNA (1)...(19): siRNA sense strand
gagggcaucuccuauaaaa

SEQ ID NO: 169302 - RNA, 19 nt, Homo sapiens
  misc_RNA (1)...(19): siRNA sense strand
gagggcaucuccuauaaaa

SEQ ID NO: 169303 - RNA, 19 nt, Homo sapiens
  misc_RNA (1)...(19): siRNA sense strand
agauagaaauggcaucaga

SEQ ID NO: 169304 - RNA, 19 nt, Homo sapiens
  misc_RNA (1)...(19): siRNA sense strand
ggucuaaggcuaacaucaa

SEQ ID NO: 169305 - RNA, 19 nt, Homo sapiens
  misc_RNA (1)...(19): siRNA sense strand
aaaccgugcucagaaacua

SEQ ID NO: 169306 - RNA, 19 nt, Homo sapiens
  misc_RNA (1)...(19): siRNA sense strand
gaagcccacugccauuaag

SEQ ID NO: 169307 - RNA, 19 nt, Homo sapiens
  misc_RNA (1)...(19): siRNA sense strand
aaacacagcccacuucucu

SEQ ID NO: 169308 - RNA, 19 nt, Homo sapiens
  misc_RNA (1)...(19): siRNA sense strand
uuaaagacauggaaauugc

SEQ ID NO: 169309 - RNA, 19 nt, Homo sapiens
  misc_RNA (1)...(19): siRNA sense strand
agacugaucccuuuaagau

SEQ ID NO: 169310 - RNA, 19 nt, Homo sapiens
  misc_RNA (1)...(19): siRNA sense strand
gauacuccaucuucuaaac

SEQ ID NO: 169311 - RNA, 19 nt, Homo sapiens
  misc_RNA (1)...(19): siRNA sense strand
uggaaucacccaccaaauu

SEQ ID NO: 169312 - RNA, 19 nt, Homo sapiens
  misc_RNA (1)...(19): siRNA sense strand
caacacuccuagccaaugg

SEQ ID NO: 169313 - RNA, 19 nt, Homo sapiens
  misc_RNA (1)...(19): siRNA sense strand
ugggaucccucgauaaugu

SEQ ID NO: 169314 - RNA, 19 nt, Homo sapiens
  misc_RNA (1)...(19): siRNA sense strand
gaaaguggacaucucuaag

SEQ ID NO: 169315 - RNA, 19 nt, Homo sapiens
  misc_RNA (1)...(19): siRNA sense strand
caacuccuuucauagacaa

SEQ ID NO: 169316 - RNA, 19 nt, Homo sapiens
  misc_RNA (1)...(19): siRNA sense strand
gugacacuguugaaagaaa

SEQ ID NO: 169317 - RNA, 19 nt, Homo sapiens
  misc_RNA (1)...(19): siRNA sense strand
ggacugaagacuacugaca

SEQ ID NO: 169318 - RNA, 19 nt, Homo sapiens
  misc_RNA (1)...(19): siRNA sense strand
gaugaugaccuggcagauu

SEQ ID NO: 169319 - RNA, 19 nt, Homo sapiens
  misc_RNA (1)...(19): siRNA sense strand
ggaguagaagggagcgaua

SEQ ID NO: 169320 - RNA, 19 nt, Homo sapiens
  misc_RNA (1)...(19): siRNA sense strand
ucucuaaggucuccuccaa

SEQ ID NO: 169321 - RNA, 19 nt, Homo sapiens
  misc_RNA (1)...(19): siRNA sense strand
cuccugaucugaagaaugu

SEQ ID NO: 169322 - RNA, 19 nt, Homo sapiens
  misc_RNA (1)...(19): siRNA sense strand
cugcagaagucaagaagau

SEQ ID NO: 169323 - RNA, 19 nt, Homo sapiens
  misc_RNA (1)...(19): siRNA sense strand
gaagggagcgauacuacag

SEQ ID NO: 169324 - RNA, 19 nt, Homo sapiens
  misc_RNA (1)...(19): siRNA sense strand
ggaaaccaacgugaucuug

SEQ ID NO: 169325 - RNA, 19 nt, Homo sapiens
  misc_RNA (1)...(19): siRNA sense strand
aagguuggcuccacggaaa

SEQ ID NO: 169326 - RNA, 19 nt, Homo sapiens
  misc_RNA (1)...(19): siRNA sense strand
caagaagcccacugccauu

SEQ ID NO: 169327 - RNA, 19 nt, Homo sapiens
  misc_RNA (1)...(19): siRNA sense strand
ccacgcuccugcccaagaa

SEQ ID NO: 169328 - RNA, 19 nt, Homo sapiens
  misc_RNA (1)...(19): siRNA sense strand
cauggaaauugcacaaaca

SEQ ID NO: 169329 - RNA, 19 nt, Homo sapiens
  misc_RNA (1)...(19): siRNA sense strand
aaugaucccuugaaagaca

SEQ ID NO: 169330 - RNA, 19 nt, Homo sapiens
  misc_RNA (1)...(19): siRNA sense strand
aaggugggaucccucgaua

SEQ ID NO: 169331 - RNA, 19 nt, Homo sapiens
  misc_RNA (1)...(19): siRNA sense strand
gggaaaaccugcagaaguc

SEQ ID NO: 169332 - RNA, 19 nt, Homo sapiens
  misc_RNA (1)...(19): siRNA sense strand
ccauuaagacugagggaaa

SEQ ID NO: 169333 - RNA, 19 nt, Homo sapiens
  misc_RNA (1)...(19): siRNA sense strand
gcaacagucaaccuucuga

SEQ ID NO: 169334 - RNA, 19 nt, Homo sapiens
  misc_RNA (1)...(19): siRNA sense strand
aaagaaguggcccugguua

SEQ ID NO: 169335 - RNA, 19 nt, Homo sapiens
  misc_RNA (1)...(19): siRNA sense strand
gauagaaauggcaucagaa

SEQ ID NO: 169336 - RNA, 19 nt, Homo sapiens
  misc_RNA (1)...(19): siRNA sense strand
cugaauuccuugaagagaa

SEQ ID NO: 169337 - RNA, 19 nt, Homo sapiens
  misc_RNA (1)...(19): siRNA sense strand
gaacaagaaaguggacauc

SEQ ID NO: 169338 - RNA, 19 nt, Homo sapiens
  misc_RNA (1)...(19): siRNA sense strand
aagagcaccuccaccaguu

SEQ ID NO: 169339 - RNA, 19 nt, Homo sapiens
  misc_RNA (1)...(19): siRNA sense strand
agacauugagggagagaua

SEQ ID NO: 169340 - RNA, 19 nt, Homo sapiens
  misc_RNA (1)...(19): siRNA sense strand
aaacuagccagauugaaga

SEQ ID NO: 169341 - RNA, 19 nt, Homo sapiens
  misc_RNA (1)...(19): siRNA sense strand
ucuaaggucuccuccaagu

SEQ ID NO: 169342 - RNA, 19 nt, Homo sapiens
  misc_RNA (1)...(19): siRNA sense strand
ggacaugucuccacuauca

SEQ ID NO: 169343 - RNA, 19 nt, Homo sapiens
  misc_RNA (1)...(19): siRNA sense strand
gcacaagcauuggaaauaa

SEQ ID NO: 169344 - RNA, 19 nt, Homo sapiens
  misc_RNA (1)...(19): siRNA sense strand
ggaaucacccaccaaauua

SEQ ID NO: 169345 - RNA, 19 nt, Homo sapiens
  misc_RNA (1)...(19): siRNA sense strand
caacaccaguuccaauuaa

SEQ ID NO: 169346 - RNA, 19 nt, Homo sapiens
  misc_RNA (1)...(19): siRNA sense strand
cgaggaggauucuguguua

SEQ ID NO: 169347 - RNA, 19 nt, Homo sapiens
  misc_RNA (1)...(19): siRNA sense strand
gcaccuacuuucaugauuu

SEQ ID NO: 169348 - RNA, 19 nt, Homo sapiens
  misc_RNA (1)...(19): siRNA sense strand
ucaagaagaugacugcaaa

SEQ ID NO: 169349 - RNA, 19 nt, Homo sapiens
  misc_RNA (1)...(19): siRNA sense strand
gaagaaaccgugcucagaa

SEQ ID NO: 169350 - RNA, 19 nt, Homo sapiens
  misc_RNA (1)...(19): siRNA sense strand
caacugaauuccuugaaga

SEQ ID NO: 169351 - RNA, 19 nt, Homo sapiens
  misc_RNA (1)...(19): siRNA sense strand
gcaaagacuucaacaucga

SEQ ID NO: 169352 - RNA, 19 nt, Homo sapiens
  misc_RNA (1)...(19): siRNA sense strand
gcugauacuucaauauuug

SEQ ID NO: 169353 - RNA, 19 nt, Homo sapiens
  misc_RNA (1)...(19): siRNA sense strand
gaaauggcaucagaagaga

SEQ ID NO: 169354 - RNA, 19 nt, Homo sapiens
  misc_RNA (1)...(19): siRNA sense strand
gccagaagauaccaacuuu

SEQ ID NO: 169355 - RNA, 19 nt, Homo sapiens
  misc_RNA (1)...(19): siRNA sense strand
gaaauauccucugcugaga

SEQ ID NO: 169356 - RNA, 19 nt, Homo sapiens
  misc_RNA (1)...(19): siRNA sense strand
gcaacaccaguuccaauua

SEQ ID NO: 169357 - RNA, 19 nt, Homo sapiens
  misc_RNA (1)...(19): siRNA sense strand
ggacuucauugccacacua

SEQ ID NO: 169358 - RNA, 19 nt, Homo sapiens
  misc_RNA (1)...(19): siRNA sense strand
gaaauugcacaaacacaaa

SEQ ID NO: 169359 - RNA, 19 nt, Homo sapiens
  misc_RNA (1)...(19): siRNA sense strand
gcagaggccuuugaugaug

SEQ ID NO: 169360 - RNA, 19 nt, Homo sapiens
  misc_RNA (1)...(19): siRNA sense strand
gaaaggaaaccaugcaaca

SEQ ID NO: 169361 - RNA, 19 nt, Homo sapiens
  misc_RNA (1)...(19): siRNA sense strand
gaccaaggauaaagcacua

SEQ ID NO: 169362 - RNA, 19 nt, Homo sapiens
  misc_RNA (1)...(19): siRNA sense strand
ccacugccauuaagacuga

SEQ ID NO: 169363 - RNA, 19 nt, Homo sapiens
  misc_RNA (1)...(19): siRNA sense strand
gaaacuagccagauugaag

SEQ ID NO: 169364 - RNA, 19 nt, Homo sapiens
  misc_RNA (1)...(19): siRNA sense strand
gcacucagacuguugcaaa

SEQ ID NO: 169365 - RNA, 19 nt, Homo sapiens
  misc_RNA (1)...(19): siRNA sense strand
gaaauaaugaugggacuga

SEQ ID NO: 169366 - RNA, 19 nt, Homo sapiens
  misc_RNA (1)...(19): siRNA sense strand
ugccaggccuuccaucuua

SEQ ID NO: 169367 - RNA, 19 nt, Homo sapiens
  misc_RNA (1)...(19): siRNA sense strand
gaaaauggccuaccaggaa

SEQ ID NO: 169368 - RNA, 19 nt, Homo sapiens
  misc_RNA (1)...(19): siRNA sense strand
uggaggagaugucaagauu

SEQ ID NO: 169369 - RNA, 19 nt, Homo sapiens
  misc_RNA (1)...(19): siRNA sense strand
ccacaacuccuuucauaga

SEQ ID NO: 169370 - RNA, 19 nt, Homo sapiens
  misc_RNA (1)...(19): siRNA sense strand
ucagagaccucaggaauag

SEQ ID NO: 169371 - RNA, 19 nt, Homo sapiens
  misc_RNA (1)...(19): siRNA sense strand
uaagugaggauucccauuu

SEQ ID NO: 169372 - RNA, 19 nt, Homo sapiens
  misc_RNA (1)...(19): siRNA sense strand
ggaaauugcacaaacacaa

SEQ ID NO: 169373 - RNA, 19 nt, Homo sapiens
  misc_RNA (1)...(19): siRNA sense strand
ccaaggaugugacacuguu

SEQ ID NO: 169374 - RNA, 19 nt, Homo sapiens
  misc_RNA (1)...(19): siRNA sense strand
caaugugacuccagccaaa

SEQ ID NO: 169375 - RNA, 19 nt, Homo sapiens
  misc_RNA (1)...(19): siRNA sense strand
gaggugcugugaagacuga

SEQ ID NO: 169376 - RNA, 19 nt, Homo sapiens
  misc_RNA (1)...(19): siRNA sense strand
uagaaucucugcaggaugu

SEQ ID NO: 169377 - RNA, 19 nt, Homo sapiens
  misc_RNA (1)...(19): siRNA sense strand
gcagaugcauuaacagaac

SEQ ID NO: 169378 - RNA, 19 nt, Homo sapiens
  misc_RNA (1)...(19): siRNA sense strand
gaaaccaacgugaucuuga

SEQ ID NO: 169379 - RNA, 19 nt, Homo sapiens
  misc_RNA (1)...(19): siRNA sense strand
ugaauuccuugaagagaaa

SEQ ID NO: 169380 - RNA, 19 nt, Homo sapiens
  misc_RNA (1)...(19): siRNA sense strand
cuccacaacuccuuucaua

SEQ ID NO: 169381 - RNA, 19 nt, Homo sapiens
  misc_RNA (1)...(19): siRNA sense strand
caaaagacgugaagccaaa

SEQ ID NO: 169382 - RNA, 19 nt, Homo sapiens
  misc_RNA (1)...(19): siRNA sense strand
ccacuucucucccuaagca

SEQ ID NO: 169383 - RNA, 19 nt, Homo sapiens
  misc_RNA (1)...(19): siRNA sense strand
uaccaggaauacccaaaua

SEQ ID NO: 169384 - RNA, 19 nt, Homo sapiens
  misc_RNA (1)...(19): siRNA sense strand
ggcauuggcuaaagauaug

SEQ ID NO: 169385 - RNA, 19 nt, Homo sapiens
  misc_RNA (1)...(19): siRNA sense strand
gcagaagucaagaagauga

SEQ ID NO: 169386 - RNA, 19 nt, Homo sapiens
  misc_RNA (1)...(19): siRNA sense strand
gggagaaacuguuggaaaa

SEQ ID NO: 169387 - RNA, 19 nt, Homo sapiens
  misc_RNA (1)...(19): siRNA sense strand
caagagcacucagacuguu

SEQ ID NO: 169388 - RNA, 19 nt, Homo sapiens
  misc_RNA (1)...(19): siRNA sense strand
caaugguggucauggagua

SEQ ID NO: 169389 - RNA, 19 nt, Homo sapiens
  misc_RNA (1)...(19): siRNA sense strand
ccuuuaagauguaccauga

SEQ ID NO: 169390 - RNA, 19 nt, Homo sapiens
  misc_RNA (1)...(19): siRNA sense strand
agaaccaucuccagacauu

SEQ ID NO: 169391 - RNA, 19 nt, Homo sapiens
  misc_RNA (1)...(19): siRNA sense strand
aagugaggauucccauuua

SEQ ID NO: 169392 - RNA, 19 nt, Homo sapiens
  misc_RNA (1)...(19): siRNA sense strand
ggacauggcacuagcuaca

SEQ ID NO: 169393 - RNA, 19 nt, Homo sapiens
  misc_RNA (1)...(19): siRNA sense strand
gauugaaagucagaaguug

SEQ ID NO: 169394 - RNA, 19 nt, Homo sapiens
  misc_RNA (1)...(19): siRNA sense strand
aagaaaccgugcucagaaa

SEQ ID NO: 169395 - RNA, 19 nt, Homo sapiens
  misc_RNA (1)...(19): siRNA sense strand
gauaaagcgggacuucauu

SEQ ID NO: 169396 - RNA, 19 nt, Homo sapiens
  misc_RNA (1)...(19): siRNA sense strand
cagcugauacuucaauauu

SEQ ID NO: 169397 - RNA, 19 nt, Homo sapiens
  misc_RNA (1)...(19): siRNA sense strand
gacagcugauacuucaaua

SEQ ID NO: 169398 - RNA, 19 nt, Homo sapiens
  misc_RNA (1)...(19): siRNA sense strand
augaugaccuggcagauuu

SEQ ID NO: 169399 - RNA, 19 nt, Homo sapiens
  misc_RNA (1)...(19): siRNA sense strand
uauccagacugaucccuuu

SEQ ID NO: 169400 - RNA, 19 nt, Homo sapiens
  misc_RNA (1)...(19): siRNA sense strand
gaaguaguucucaucaaga

SEQ ID NO: 169401 - RNA, 19 nt, Homo sapiens
  misc_RNA (1)...(19): siRNA sense strand
gagggcaucuccuauaaaa

SEQ ID NO: 169402 - RNA, 19 nt, Homo sapiens
  misc_RNA (1)...(19): siRNA sense strand
gagggcaucuccuauaaaa

SEQ ID NO: 169403 - RNA, 19 nt, Homo sapiens
  misc_RNA (1)...(19): siRNA sense strand
agauagaaauggcaucaga

SEQ ID NO: 169404 - RNA, 19 nt, Homo sapiens
  misc_RNA (1)...(19): siRNA sense strand
ggucuaaggcuaacaucaa

SEQ ID NO: 169405 - RNA, 19 nt, Homo sapiens
  misc_RNA (1)...(19): siRNA sense strand
aaaccgugcucagaaacua

SEQ ID NO: 169406 - RNA, 19 nt, Homo sapiens
  misc_RNA (1)...(19): siRNA sense strand
gaagcccacugccauuaag

SEQ ID NO: 169407 - RNA, 19 nt, Homo sapiens
  misc_RNA (1)...(19): siRNA sense strand
aaacacagcccacuucucu

SEQ ID NO: 169408 - RNA, 19 nt, Homo sapiens
  misc_RNA (1)...(19): siRNA sense strand
uuaaagacauggaaauugc

SEQ ID NO: 169409 - RNA, 19 nt, Homo sapiens
  misc_RNA (1)...(19): siRNA sense strand
agacugaucccuuuaagau

SEQ ID NO: 169410 - RNA, 19 nt, Homo sapiens
  misc_RNA (1)...(19): siRNA sense strand
gauacuccaucuucuaaac

SEQ ID NO: 169411 - RNA, 19 nt, Homo sapiens
  misc_RNA (1)...(19): siRNA sense strand
uggaaucacccaccaaauu

SEQ ID NO: 169412 - RNA, 19 nt, Homo sapiens
  misc_RNA (1)...(19): siRNA sense strand
caacacuccuagccaaugg

SEQ ID NO: 169413 - RNA, 19 nt, Homo sapiens
  misc_RNA (1)...(19): siRNA sense strand
ugggaucccucgauaaugu

SEQ ID NO: 169414 - RNA, 19 nt, Homo sapiens
  misc_RNA (1)...(19): siRNA sense strand
gaaaguggacaucucuaag

SEQ ID NO: 169415 - RNA, 19 nt, Homo sapiens
  misc_RNA (1)...(19): siRNA sense strand
caacuccuuucauagacaa

SEQ ID NO: 169416 - RNA, 19 nt, Homo sapiens
  misc_RNA (1)...(19): siRNA sense strand
gugacacuguugaaagaaa

SEQ ID NO: 169417 - RNA, 19 nt, Homo sapiens
  misc_RNA (1)...(19): siRNA sense strand
ggacugaagacuacugaca

SEQ ID NO: 169418 - RNA, 19 nt, Homo sapiens
  misc_RNA (1)...(19): siRNA sense strand
gaugaugaccuggcagauu

SEQ ID NO: 169419 - RNA, 19 nt, Homo sapiens
  misc_RNA (1)...(19): siRNA sense strand
ggaguagaagggagcgaua

SEQ ID NO: 169420 - RNA, 19 nt, Homo sapiens
  misc_RNA (1)...(19): siRNA sense strand
ucucuaaggucuccuccaa

SEQ ID NO: 169421 - RNA, 19 nt, Homo sapiens
  misc_RNA (1)...(19): siRNA sense strand
cuccugaucugaagaaugu

SEQ ID NO: 169422 - RNA, 19 nt, Homo sapiens
  misc_RNA (1)...(19): siRNA sense strand
cugcagaagucaagaagau

SEQ ID NO: 169423 - RNA, 19 nt, Homo sapiens
  misc_RNA (1)...(19): siRNA sense strand
gaagggagcgauacuacag

SEQ ID NO: 169424 - RNA, 19 nt, Homo sapiens
  misc_RNA (1)...(19): siRNA sense strand
ggaaaccaacgugaucuug

SEQ ID NO: 169425 - RNA, 19 nt, Homo sapiens
  misc_RNA (1)...(19): siRNA sense strand
aagguuggcuccacggaaa

SEQ ID NO: 169426 - RNA, 19 nt, Homo sapiens
  misc_RNA (1)...(19): siRNA sense strand
caagaagcccacugccauu

SEQ ID NO: 169427 - RNA, 19 nt, Homo sapiens
  misc_RNA (1)...(19): siRNA sense strand
ccacgcuccugcccaagaa

SEQ ID NO: 169428 - RNA, 19 nt, Homo sapiens
  misc_RNA (1)...(19): siRNA sense strand
cauggaaauugcacaaaca

SEQ ID NO: 169429 - RNA, 19 nt, Homo sapiens
  misc_RNA (1)...(19): siRNA sense strand
aaugaucccuugaaagaca

SEQ ID NO: 169430 - RNA, 19 nt, Homo sapiens
  misc_RNA (1)...(19): siRNA sense strand
aaggugggaucccucgaua

SEQ ID NO: 169431 - RNA, 19 nt, Homo sapiens
  misc_RNA (1)...(19): siRNA sense strand
gggaaaaccugcagaaguc

SEQ ID NO: 169432 - RNA, 19 nt, Homo sapiens
  misc_RNA (1)...(19): siRNA sense strand
ccauuaagacugagggaaa

SEQ ID NO: 169433 - RNA, 19 nt, Homo sapiens
  misc_RNA (1)...(19): siRNA sense strand
gcaacagucaaccuucuga

SEQ ID NO: 169434 - RNA, 19 nt, Homo sapiens
  misc_RNA (1)...(19): siRNA sense strand
aaagaaguggcccugguua

SEQ ID NO: 169435 - RNA, 19 nt, Homo sapiens
  misc_RNA (1)...(19): siRNA sense strand
gauagaaauggcaucagaa

SEQ ID NO: 169436 - RNA, 19 nt, Homo sapiens
  misc_RNA (1)...(19): siRNA sense strand
cugaauuccuugaagagaa

SEQ ID NO: 169437 - RNA, 19 nt, Homo sapiens
  misc_RNA (1)...(19): siRNA sense strand
gaacaagaaaguggacauc

SEQ ID NO: 169438 - RNA, 19 nt, Homo sapiens
  misc_RNA (1)...(19): siRNA sense strand
aagagcaccuccaccaguu

SEQ ID NO: 169439 - RNA, 19 nt, Homo sapiens
  misc_RNA (1)...(19): siRNA sense strand
agacauugagggagagaua

SEQ ID NO: 169440 - RNA, 19 nt, Homo sapiens
  misc_RNA (1)...(19): siRNA sense strand
aaacuagccagauugaaga

SEQ ID NO: 169441 - RNA, 19 nt, Homo sapiens
  misc_RNA (1)...(19): siRNA sense strand
ucuaaggucuccuccaagu

SEQ ID NO: 169442 - RNA, 19 nt, Homo sapiens
  misc_RNA (1)...(19): siRNA sense strand
ggacaugucuccacuauca

SEQ ID NO: 169443 - RNA, 19 nt, Homo sapiens
  misc_RNA (1)...(19): siRNA sense strand
gcacaagcauuggaaauaa

SEQ ID NO: 169444 - RNA, 19 nt, Homo sapiens
  misc_RNA (1)...(19): siRNA sense strand
ggaaucacccaccaaauua

SEQ ID NO: 169445 - RNA, 19 nt, Homo sapiens
  misc_RNA (1)...(19): siRNA sense strand
caacaccaguuccaauuaa

SEQ ID NO: 169446 - RNA, 19 nt, Homo sapiens
  misc_RNA (1)...(19): siRNA sense strand
cgaggaggauucuguguua

SEQ ID NO: 169447 - RNA, 19 nt, Homo sapiens
  misc_RNA (1)...(19): siRNA sense strand
gcaccuacuuucaugauuu

SEQ ID NO: 169448 - RNA, 19 nt, Homo sapiens
  misc_RNA (1)...(19): siRNA sense strand
ucaagaagaugacugcaaa

SEQ ID NO: 169449 - RNA, 19 nt, Homo sapiens
  misc_RNA (1)...(19): siRNA sense strand
gaagaaaccgugcucagaa

SEQ ID NO: 169450 - RNA, 19 nt, Homo sapiens
  misc_RNA (1)...(19): siRNA sense strand
caacugaauuccuugaaga

SEQ ID NO: 169451 - RNA, 19 nt, Homo sapiens
  misc_RNA (1)...(19): siRNA sense strand
gcaaagacuucaacaucga

SEQ ID NO: 169452 - RNA, 19 nt, Homo sapiens
  misc_RNA (1)...(19): siRNA sense strand
gcugauacuucaauauuug

SEQ ID NO: 169453 - RNA, 19 nt, Homo sapiens
  misc_RNA (1)...(19): siRNA sense strand
gaaauggcaucagaagaga

SEQ ID NO: 169454 - RNA, 19 nt, Homo sapiens
  misc_RNA (1)...(19): siRNA sense strand
gccagaagauaccaacuuu

SEQ ID NO: 169455 - RNA, 19 nt, Homo sapiens
  misc_RNA (1)...(19): siRNA sense strand
gaaauauccucugcugaga

SEQ ID NO: 169456 - RNA, 19 nt, Homo sapiens
  misc_RNA (1)...(19): siRNA sense strand
gcaacaccaguuccaauua

SEQ ID NO: 169457 - RNA, 19 nt, Homo sapiens
  misc_RNA (1)...(19): siRNA sense strand
ggacuucauugccacacua

SEQ ID NO: 169458 - RNA, 19 nt, Homo sapiens
  misc_RNA (1)...(19): siRNA sense strand
gaaauugcacaaacacaaa

SEQ ID NO: 169459 - RNA, 19 nt, Homo sapiens
  misc_RNA (1)...(19): siRNA sense strand
gcagaggccuuugaugaug

SEQ ID NO: 169460 - RNA, 19 nt, Homo sapiens
  misc_RNA (1)...(19): siRNA sense strand
gaaaggaaaccaugcaaca

SEQ ID NO: 169461 - RNA, 19 nt, Homo sapiens
  misc_RNA (1)...(19): siRNA sense strand
gaccaaggauaaagcacua

SEQ ID NO: 169462 - RNA, 19 nt, Homo sapiens
  misc_RNA (1)...(19): siRNA sense strand
ccacugccauuaagacuga

SEQ ID NO: 169463 - RNA, 19 nt, Homo sapiens
  misc_RNA (1)...(19): siRNA sense strand
gaaacuagccagauugaag

SEQ ID NO: 169464 - RNA, 19 nt, Homo sapiens
  misc_RNA (1)...(19): siRNA sense strand
gcacucagacuguugcaaa

SEQ ID NO: 169465 - RNA, 19 nt, Homo sapiens
  misc_RNA (1)...(19): siRNA sense strand
gaaauaaugaugggacuga

SEQ ID NO: 169466 - RNA, 19 nt, Homo sapiens
  misc_RNA (1)...(19): siRNA sense strand
ugccaggccuuccaucuua

SEQ ID NO: 169467 - RNA, 19 nt, Homo sapiens
  misc_RNA (1)...(19): siRNA sense strand
gaaaauggccuaccaggaa

SEQ ID NO: 169468 - RNA, 19 nt, Homo sapiens
  misc_RNA (1)...(19): siRNA sense strand
uggaggagaugucaagauu

SEQ ID NO: 169469 - RNA, 19 nt, Homo sapiens
  misc_RNA (1)...(19): siRNA sense strand
ccacaacuccuuucauaga

SEQ ID NO: 169470 - RNA, 19 nt, Homo sapiens
  misc_RNA (1)...(19): siRNA sense strand
ucagagaccucaggaauag

SEQ ID NO: 169471 - RNA, 19 nt, Homo sapiens
  misc_RNA (1)...(19): siRNA sense strand
uaagugaggauucccauuu

SEQ ID NO: 169472 - RNA, 19 nt, Homo sapiens
  misc_RNA (1)...(19): siRNA sense strand
ggaaauugcacaaacacaa

SEQ ID NO: 169473 - RNA, 19 nt, Homo sapiens
  misc_RNA (1)...(19): siRNA sense strand
ccaaggaugugacacuguu

SEQ ID NO: 169474 - RNA, 19 nt, Homo sapiens
  misc_RNA (1)...(19): siRNA sense strand
caaugugacuccagccaaa

SEQ ID NO: 169475 - RNA, 19 nt, Homo sapiens
  misc_RNA (1)...(19): siRNA sense strand
gaggugcugugaagacuga

SEQ ID NO: 169476 - RNA, 19 nt, Homo sapiens
  misc_RNA (1)...(19): siRNA sense strand
uagaaucucugcaggaugu

SEQ ID NO: 169477 - RNA, 19 nt, Homo sapiens
  misc_RNA (1)...(19): siRNA sense strand
gcagaugcauuaacagaac

SEQ ID NO: 169478 - RNA, 19 nt, Homo sapiens
  misc_RNA (1)...(19): siRNA sense strand
gaaaccaacgugaucuuga

SEQ ID NO: 169479 - RNA, 19 nt, Homo sapiens
  misc_RNA (1)...(19): siRNA sense strand
ugaauuccuugaagagaaa

SEQ ID NO: 169480 - RNA, 19 nt, Homo sapiens
  misc_RNA (1)...(19): siRNA sense strand
cuccacaacuccuuucaua

SEQ ID NO: 169481 - RNA, 19 nt, Homo sapiens
  misc_RNA (1)...(19): siRNA sense strand
caaaagacgugaagccaaa

SEQ ID NO: 169482 - RNA, 19 nt, Homo sapiens
  misc_RNA (1)...(19): siRNA sense strand
ccacuucucucccuaagca

SEQ ID NO: 169483 - RNA, 19 nt, Homo sapiens
  misc_RNA (1)...(19): siRNA sense strand
uaccaggaauacccaaaua

SEQ ID NO: 169484 - RNA, 19 nt, Homo sapiens
  misc_RNA (1)...(19): siRNA sense strand
ggcauuggcuaaagauaug

SEQ ID NO: 169485 - RNA, 19 nt, Homo sapiens
  misc_RNA (1)...(19): siRNA sense strand
gcagaagucaagaagauga

SEQ ID NO: 169486 - RNA, 19 nt, Homo sapiens
  misc_RNA (1)...(19): siRNA sense strand
gggagaaacuguuggaaaa

SEQ ID NO: 169487 - RNA, 19 nt, Homo sapiens
  misc_RNA (1)...(19): siRNA sense strand
caagagcacucagacuguu

SEQ ID NO: 169488 - RNA, 19 nt, Homo sapiens
  misc_RNA (1)...(19): siRNA sense strand
caaugguggucauggagua

SEQ ID NO: 169489 - RNA, 19 nt, Homo sapiens
  misc_RNA (1)...(19): siRNA sense strand
ccuuuaagauguaccauga

SEQ ID NO: 169490 - RNA, 19 nt, Homo sapiens
  misc_RNA (1)...(19): siRNA sense strand
agaaccaucuccagacauu

SEQ ID NO: 169491 - RNA, 19 nt, Homo sapiens
  misc_RNA (1)...(19): siRNA sense strand
aagugaggauucccauuua

SEQ ID NO: 169492 - RNA, 19 nt, Homo sapiens
  misc_RNA (1)...(19): siRNA sense strand
ggacauggcacuagcuaca

SEQ ID NO: 169493 - RNA, 19 nt, Homo sapiens
  misc_RNA (1)...(19): siRNA sense strand
gauugaaagucagaaguug

SEQ ID NO: 169494 - RNA, 19 nt, Homo sapiens
  misc_RNA (1)...(19): siRNA sense strand
aagaaaccgugcucagaaa

SEQ ID NO: 169495 - RNA, 19 nt, Homo sapiens
  misc_RNA (1)...(19): siRNA sense strand
gauaaagcgggacuucauu

SEQ ID NO: 169496 - RNA, 19 nt, Homo sapiens
  misc_RNA (1)...(19): siRNA sense strand
cagcugauacuucaauauu

SEQ ID NO: 169497 - RNA, 19 nt, Homo sapiens
  misc_RNA (1)...(19): siRNA sense strand
gacagcugauacuucaaua

SEQ ID NO: 169498 - RNA, 19 nt, Homo sapiens
  misc_RNA (1)...(19): siRNA sense strand
augaugaccuggcagauuu

SEQ ID NO: 169499 - RNA, 19 nt, Homo sapiens
  misc_RNA (1)...(19): siRNA sense strand
uauccagacugaucccuuu

SEQ ID NO: 169500 - RNA, 19 nt, Homo sapiens
  misc_RNA (1)...(19): siRNA sense strand
gaaguaguucucaucaaga

SEQ ID NO: 169501 - RNA, 19 nt, Homo sapiens
  misc_RNA (1)...(19): siRNA sense strand
gagggcaucuccuauaaaa

SEQ ID NO: 169502 - RNA, 19 nt, Homo sapiens
  misc_RNA (1)...(19): siRNA sense strand
gagggcaucuccuauaaaa

SEQ ID NO: 169503 - RNA, 19 nt, Homo sapiens
  misc_RNA (1)...(19): siRNA sense strand
agauagaaauggcaucaga

SEQ ID NO: 169504 - RNA, 19 nt, Homo sapiens
  misc_RNA (1)...(19): siRNA sense strand
ggucuaaggcuaacaucaa

SEQ ID NO: 169505 - RNA, 19 nt, Homo sapiens
  misc_RNA (1)...(19): siRNA sense strand
aaaccgugcucagaaacua

SEQ ID NO: 169506 - RNA, 19 nt, Homo sapiens
  misc_RNA (1)...(19): siRNA sense strand
gaagcccacugccauuaag

SEQ ID NO: 169507 - RNA, 19 nt, Homo sapiens
  misc_RNA (1)...(19): siRNA sense strand
aaacacagcccacuucucu

SEQ ID NO: 169508 - RNA, 19 nt, Homo sapiens
  misc_RNA (1)...(19): siRNA sense strand
uuaaagacauggaaauugc

SEQ ID NO: 169509 - RNA, 19 nt, Homo sapiens
  misc_RNA (1)...(19): siRNA sense strand
agacugaucccuuuaagau

SEQ ID NO: 169510 - RNA, 19 nt, Homo sapiens
  misc_RNA (1)...(19): siRNA sense strand
gauacuccaucuucuaaac

SEQ ID NO: 169511 - RNA, 19 nt, Homo sapiens
  misc_RNA (1)...(19): siRNA sense strand
uggaaucacccaccaaauu

SEQ ID NO: 169512 - RNA, 19 nt, Homo sapiens
  misc_RNA (1)...(19): siRNA sense strand
caacacuccuagccaaugg

SEQ ID NO: 169513 - RNA, 19 nt, Homo sapiens
  misc_RNA (1)...(19): siRNA sense strand
ugggaucccucgauaaugu

SEQ ID NO: 169514 - RNA, 19 nt, Homo sapiens
  misc_RNA (1)...(19): siRNA sense strand
gaaaguggacaucucuaag

SEQ ID NO: 169515 - RNA, 19 nt, Homo sapiens
  misc_RNA (1)...(19): siRNA sense strand
caacuccuuucauagacaa

SEQ ID NO: 169516 - RNA, 19 nt, Homo sapiens
  misc_RNA (1)...(19): siRNA sense strand
gugacacuguugaaagaaa

SEQ ID NO: 169517 - RNA, 19 nt, Homo sapiens
  misc_RNA (1)...(19): siRNA sense strand
ggacugaagacuacugaca

SEQ ID NO: 169518 - RNA, 19 nt, Homo sapiens
  misc_RNA (1)...(19): siRNA sense strand
gaugaugaccuggcagauu

SEQ ID NO: 169519 - RNA, 19 nt, Homo sapiens
  misc_RNA (1)...(19): siRNA sense strand
ggaguagaagggagcgaua

SEQ ID NO: 169520 - RNA, 19 nt, Homo sapiens
  misc_RNA (1)...(19): siRNA sense strand
ucucuaaggucuccuccaa

SEQ ID NO: 169521 - RNA, 19 nt, Homo sapiens
  misc_RNA (1)...(19): siRNA sense strand
cuccugaucugaagaaugu

SEQ ID NO: 169522 - RNA, 19 nt, Homo sapiens
  misc_RNA (1)...(19): siRNA sense strand
cugcagaagucaagaagau

SEQ ID NO: 169523 - RNA, 19 nt, Homo sapiens
  misc_RNA (1)...(19): siRNA sense strand
gaagggagcgauacuacag

SEQ ID NO: 169524 - RNA, 19 nt, Homo sapiens
  misc_RNA (1)...(19): siRNA sense strand
ggaaaccaacgugaucuug

SEQ ID NO: 169525 - RNA, 19 nt, Homo sapiens
  misc_RNA (1)...(19): siRNA sense strand
aagguuggcuccacggaaa

SEQ ID NO: 169526 - RNA, 19 nt, Homo sapiens
  misc_RNA (1)...(19): siRNA sense strand
caagaagcccacugccauu

SEQ ID NO: 169527 - RNA, 19 nt, Homo sapiens
  misc_RNA (1)...(19): siRNA sense strand
ccacgcuccugcccaagaa

SEQ ID NO: 169528 - RNA, 19 nt, Homo sapiens
  misc_RNA (1)...(19): siRNA sense strand
cauggaaauugcacaaaca

SEQ ID NO: 169529 - RNA, 19 nt, Homo sapiens
  misc_RNA (1)...(19): siRNA sense strand
aaugaucccuugaaagaca

SEQ ID NO: 169530 - RNA, 19 nt, Homo sapiens
  misc_RNA (1)...(19): siRNA sense strand
aaggugggaucccucgaua

SEQ ID NO: 169531 - RNA, 19 nt, Homo sapiens
  misc_RNA (1)...(19): siRNA sense strand
gggaaaaccugcagaaguc

SEQ ID NO: 169532 - RNA, 19 nt, Homo sapiens
  misc_RNA (1)...(19): siRNA sense strand
ccauuaagacugagggaaa

SEQ ID NO: 169533 - RNA, 19 nt, Homo sapiens
  misc_RNA (1)...(19): siRNA sense strand
gcaacagucaaccuucuga

SEQ ID NO: 169534 - RNA, 19 nt, Homo sapiens
  misc_RNA (1)...(19): siRNA sense strand
aaagaaguggcccugguua

SEQ ID NO: 169535 - RNA, 19 nt, Homo sapiens
  misc_RNA (1)...(19): siRNA sense strand
gauagaaauggcaucagaa

SEQ ID NO: 169536 - RNA, 19 nt, Homo sapiens
  misc_RNA (1)...(19): siRNA sense strand
cugaauuccuugaagagaa

SEQ ID NO: 169537 - RNA, 19 nt, Homo sapiens
  misc_RNA (1)...(19): siRNA sense strand
gaacaagaaaguggacauc

SEQ ID NO: 169538 - RNA, 19 nt, Homo sapiens
  misc_RNA (1)...(19): siRNA sense strand
aagagcaccuccaccaguu

SEQ ID NO: 169539 - RNA, 19 nt, Homo sapiens
  misc_RNA (1)...(19): siRNA sense strand
agacauugagggagagaua

SEQ ID NO: 169540 - RNA, 19 nt, Homo sapiens
  misc_RNA (1)...(19): siRNA sense strand
aaacuagccagauugaaga

SEQ ID NO: 169541 - RNA, 19 nt, Homo sapiens
  misc_RNA (1)...(19): siRNA sense strand
ucuaaggucuccuccaagu

SEQ ID NO: 169542 - RNA, 19 nt, Homo sapiens
  misc_RNA (1)...(19): siRNA sense strand
ucacugcucuucuguauuu

SEQ ID NO: 169543 - RNA, 19 nt, Homo sapiens
  misc_RNA (1)...(19): siRNA sense strand
cuacacaauugucacauua

SEQ ID NO: 169544 - RNA, 19 nt, Homo sapiens
  misc_RNA (1)...(19): siRNA sense strand
cgacuaugcuuuagauuau

SEQ ID NO: 169545 - RNA, 19 nt, Homo sapiens
  misc_RNA (1)...(19): siRNA sense strand
guaauacggucacaguuga

SEQ ID NO: 169546 - RNA, 19 nt, Homo sapiens
  misc_RNA (1)...(19): siRNA sense strand
gcgccaacccuuucauuua

SEQ ID NO: 169547 - RNA, 19 nt, Homo sapiens
  misc_RNA (1)...(19): siRNA sense strand
gcaguaagaagaagagauu

SEQ ID NO: 169548 - RNA, 19 nt, Homo sapiens
  misc_RNA (1)...(19): siRNA sense strand
gagcagucaucaucuuuau

SEQ ID NO: 169549 - RNA, 19 nt, Homo sapiens
  misc_RNA (1)...(19): siRNA sense strand
gaaagacaauuguaauacg

SEQ ID NO: 169550 - RNA, 19 nt, Homo sapiens
  misc_RNA (1)...(19): siRNA sense strand
gaaaucccuucacugucua

SEQ ID NO: 169551 - RNA, 19 nt, Homo sapiens
  misc_RNA (1)...(19): siRNA sense strand
ugacaucauuuguuguuga

SEQ ID NO: 169552 - RNA, 19 nt, Homo sapiens
  misc_RNA (1)...(19): siRNA sense strand
caucuugucuaucgacuau

SEQ ID NO: 169553 - RNA, 19 nt, Homo sapiens
  misc_RNA (1)...(19): siRNA sense strand
ggccauuacuacacaauug

SEQ ID NO: 169554 - RNA, 19 nt, Homo sapiens
  misc_RNA (1)...(19): siRNA sense strand
gcagucaucaucuuuauag

SEQ ID NO: 169555 - RNA, 19 nt, Homo sapiens
  misc_RNA (1)...(19): siRNA sense strand
agaaaucccuucacugucu

SEQ ID NO: 169556 - RNA, 19 nt, Homo sapiens
  misc_RNA (1)...(19): siRNA sense strand
ccuccaagcuuuacauagu

SEQ ID NO: 169557 - RNA, 19 nt, Homo sapiens
  misc_RNA (1)...(19): siRNA sense strand
gaguauuggucgaccuuug

SEQ ID NO: 169558 - RNA, 19 nt, Homo sapiens
  misc_RNA (1)...(19): siRNA sense strand
gaaugcacaucggcaaauc

SEQ ID NO: 169559 - RNA, 19 nt, Homo sapiens
  misc_RNA (1)...(19): siRNA sense strand
ccaaguaccagucggcauu

SEQ ID NO: 169560 - RNA, 19 nt, Homo sapiens
  misc_RNA (1)...(19): siRNA sense strand
ucgacuaugcuuuagauua

SEQ ID NO: 169561 - RNA, 19 nt, Homo sapiens
  misc_RNA (1)...(19): siRNA sense strand
gccagaaagacaauuguaa

SEQ ID NO: 169562 - RNA, 19 nt, Homo sapiens
  misc_RNA (1)...(19): siRNA sense strand
cgacagagaagaagagagu

SEQ ID NO: 169563 - RNA, 19 nt, Homo sapiens
  misc_RNA (1)...(19): siRNA sense strand
uaucgacuaugcuuuagau

SEQ ID NO: 169564 - RNA, 19 nt, Homo sapiens
  misc_RNA (1)...(19): siRNA sense strand
ccagaaagacaauuguaau

SEQ ID NO: 169565 - RNA, 19 nt, Homo sapiens
  misc_RNA (1)...(19): siRNA sense strand
gugaagauccggaagaaca

SEQ ID NO: 169566 - RNA, 19 nt, Homo sapiens
  misc_RNA (1)...(19): siRNA sense strand
ucucacugcucuucuguau

SEQ ID NO: 169567 - RNA, 19 nt, Homo sapiens
  misc_RNA (1)...(19): siRNA sense strand
aaacgugacaucauuuguu

SEQ ID NO: 169568 - RNA, 19 nt, Homo sapiens
  misc_RNA (1)...(19): siRNA sense strand
ugaccaccauggaguaugu

SEQ ID NO: 169569 - RNA, 19 nt, Homo sapiens
  misc_RNA (1)...(19): siRNA sense strand
cgagcagucaucaucuuua

SEQ ID NO: 169570 - RNA, 19 nt, Homo sapiens
  misc_RNA (1)...(19): siRNA sense strand
acacaauugucacauuauc

SEQ ID NO: 169571 - RNA, 19 nt, Homo sapiens
  misc_RNA (1)...(19): siRNA sense strand
guaagaagaagagauucaa

SEQ ID NO: 169572 - RNA, 19 nt, Homo sapiens
  misc_RNA (1)...(19): siRNA sense strand
aacgugacaucauuuguug

SEQ ID NO: 169573 - RNA, 19 nt, Homo sapiens
  misc_RNA (1)...(19): siRNA sense strand
cuacaacacgggccucuau

SEQ ID NO: 169574 - RNA, 19 nt, Homo sapiens
  misc_RNA (1)...(19): siRNA sense strand
ggaagcaguaagaagaaga

SEQ ID NO: 169575 - RNA, 19 nt, Homo sapiens
  misc_RNA (1)...(19): siRNA sense strand
gugggaagcaguaagaaga

SEQ ID NO: 169576 - RNA, 19 nt, Homo sapiens
  misc_RNA (1)...(19): siRNA sense strand
uccuuuaccugcuguacua

SEQ ID NO: 169577 - RNA, 19 nt, Homo sapiens
  misc_RNA (1)...(19): siRNA sense strand
gugcaucgacagagaagaa

SEQ ID NO: 169578 - RNA, 19 nt, Homo sapiens
  misc_RNA (1)...(19): siRNA sense strand
ggaaugcacaucggcaaau

SEQ ID NO: 169579 - RNA, 19 nt, Homo sapiens
  misc_RNA (1)...(19): siRNA sense strand
gaacgccucagucgggaau

SEQ ID NO: 169580 - RNA, 19 nt, Homo sapiens
  misc_RNA (1)...(19): siRNA sense strand
cgccaacccuuucauuuac

SEQ ID NO: 169581 - RNA, 19 nt, Homo sapiens
  misc_RNA (1)...(19): siRNA sense strand
gucuaucgacuaugcuuua

SEQ ID NO: 169582 - RNA, 19 nt, Homo sapiens
  misc_RNA (1)...(19): siRNA sense strand
gggaaccuacaccacauuu

SEQ ID NO: 169583 - RNA, 19 nt, Homo sapiens
  misc_RNA (1)...(19): siRNA sense strand
ucccauuccuccaagcuuu

SEQ ID NO: 169584 - RNA, 19 nt, Homo sapiens
  misc_RNA (1)...(19): siRNA sense strand
gaaccuacaccacauuucc

SEQ ID NO: 169585 - RNA, 19 nt, Homo sapiens
  misc_RNA (1)...(19): siRNA sense strand
caacacgggccucuaucug

SEQ ID NO: 169586 - RNA, 19 nt, Homo sapiens
  misc_RNA (1)...(19): siRNA sense strand
uguaauacggucacaguug

SEQ ID NO: 169587 - RNA, 19 nt, Homo sapiens
  misc_RNA (1)...(19): siRNA sense strand
agaagaagagauucaagga

SEQ ID NO: 169588 - RNA, 19 nt, Homo sapiens
  misc_RNA (1)...(19): siRNA sense strand
ccaacccuuucauuuacuu

SEQ ID NO: 169589 - RNA, 19 nt, Homo sapiens
  misc_RNA (1)...(19): siRNA sense strand
gccgagcagucaucaucuu

SEQ ID NO: 169590 - RNA, 19 nt, Homo sapiens
  misc_RNA (1)...(19): siRNA sense strand
ucaugugcaucgacagaga

SEQ ID NO: 169591 - RNA, 19 nt, Homo sapiens
  misc_RNA (1)...(19): siRNA sense strand
gacaucauuuguuguugag

SEQ ID NO: 169592 - RNA, 19 nt, Homo sapiens
  misc_RNA (1)...(19): siRNA sense strand
cuacaucacccaccugucu

SEQ ID NO: 169593 - RNA, 19 nt, Homo sapiens
  misc_RNA (1)...(19): siRNA sense strand
gggaaugcacaucggcaaa

SEQ ID NO: 169594 - RNA, 19 nt, Homo sapiens
  misc_RNA (1)...(19): siRNA sense strand
acuacacaauugucacauu

SEQ ID NO: 169595 - RNA, 19 nt, Homo sapiens
  misc_RNA (1)...(19): siRNA sense strand
uagauuaugagcuuucuuc

SEQ ID NO: 169596 - RNA, 19 nt, Homo sapiens
  misc_RNA (1)...(19): siRNA sense strand
gaggaacccacgaacaucu

SEQ ID NO: 169597 - RNA, 19 nt, Homo sapiens
  misc_RNA (1)...(19): siRNA sense strand
uuuaccugcuguacuauga

SEQ ID NO: 169598 - RNA, 19 nt, Homo sapiens
  misc_RNA (1)...(19): siRNA sense strand
ugugggcucuuucuugcuu

SEQ ID NO: 169599 - RNA, 19 nt, Homo sapiens
  misc_RNA (1)...(19): siRNA sense strand
gggaagcaguaagaagaag

SEQ ID NO: 169600 - RNA, 19 nt, Homo sapiens
  misc_RNA (1)...(19): siRNA sense strand
ccacauuucccugcucuuc

SEQ ID NO: 169601 - RNA, 19 nt, Homo sapiens
  misc_RNA (1)...(19): siRNA sense strand
cauuauauuccucaucuuc

SEQ ID NO: 169602 - RNA, 19 nt, Homo sapiens
  misc_RNA (1)...(19): siRNA sense strand
uggaguaugucaugugcau

SEQ ID NO: 169603 - RNA, 19 nt, Homo sapiens
  misc_RNA (1)...(19): siRNA sense strand
gacuaugcuuuagauuaug

SEQ ID NO: 169604 - RNA, 19 nt, Homo sapiens
  misc_RNA (1)...(19): siRNA sense strand
cgugacaucauuuguuguu

SEQ ID NO: 169605 - RNA, 19 nt, Homo sapiens
  misc_RNA (1)...(19): siRNA sense strand
gaagcaguaagaagaagag

SEQ ID NO: 169606 - RNA, 19 nt, Homo sapiens
  misc_RNA (1)...(19): siRNA sense strand
gagcuuucuucuggccauu

SEQ ID NO: 169607 - RNA, 19 nt, Homo sapiens
  misc_RNA (1)...(19): siRNA sense strand
ucgugaagauccggaagaa

SEQ ID NO: 169608 - RNA, 19 nt, Homo sapiens
  misc_RNA (1)...(19): siRNA sense strand
ucccuucacugucuacauc

SEQ ID NO: 169609 - RNA, 19 nt, Homo sapiens
  misc_RNA (1)...(19): siRNA sense strand
ggucaccaucauuauauuc

SEQ ID NO: 169610 - RNA, 19 nt, Homo sapiens
  misc_RNA (1)...(19): siRNA sense strand
ugcuuuagauuaugagcuu

SEQ ID NO: 169611 - RNA, 19 nt, Homo sapiens
  misc_RNA (1)...(19): siRNA sense strand
gggcuucccauuccuccaa

SEQ ID NO: 169612 - RNA, 19 nt, Homo sapiens
  misc_RNA (1)...(19): siRNA sense strand
uuauagccauccugagcuu

SEQ ID NO: 169613 - RNA, 19 nt, Homo sapiens
  misc_RNA (1)...(19): siRNA sense strand
gauuaugagcuuucuucug

SEQ ID NO: 169614 - RNA, 19 nt, Homo sapiens
  misc_RNA (1)...(19): siRNA sense strand
uuccugugcuuccggauga

SEQ ID NO: 169615 - RNA, 19 nt, Homo sapiens
  misc_RNA (1)...(19): siRNA sense strand
cccuuucauuuacuucuuu

SEQ ID NO: 169616 - RNA, 19 nt, Homo sapiens
  misc_RNA (1)...(19): siRNA sense strand
ucccugcucuucuccacaa

SEQ ID NO: 169617 - RNA, 19 nt, Homo sapiens
  misc_RNA (1)...(19): siRNA sense strand
ccaugagacuccuuuaccu

SEQ ID NO: 169618 - RNA, 19 nt, Homo sapiens
  misc_RNA (1)...(19): siRNA sense strand
ccgagcagucaucaucuuu

SEQ ID NO: 169619 - RNA, 19 nt, Homo sapiens
  misc_RNA (1)...(19): siRNA sense strand
cgccagaaagacaauugua

SEQ ID NO: 169620 - RNA, 19 nt, Homo sapiens
  misc_RNA (1)...(19): siRNA sense strand
uaucugcugacggccauua

SEQ ID NO: 169621 - RNA, 19 nt, Homo sapiens
  misc_RNA (1)...(19): siRNA sense strand
ucuccacaaucaacaguag

SEQ ID NO: 169622 - RNA, 19 nt, Homo sapiens
  misc_RNA (1)...(19): siRNA sense strand
cugcucuucuccacaauca

SEQ ID NO: 169623 - RNA, 19 nt, Homo sapiens
  misc_RNA (1)...(19): siRNA sense strand
ggaaccuacaccacauuuc

SEQ ID NO: 169624 - RNA, 19 nt, Homo sapiens
  misc_RNA (1)...(19): siRNA sense strand
ggaacccacgaacaucuca

SEQ ID NO: 169625 - RNA, 19 nt, Homo sapiens
  misc_RNA (1)...(19): siRNA sense strand
agacaucucacugcucuuc

SEQ ID NO: 169626 - RNA, 19 nt, Homo sapiens
  misc_RNA (1)...(19): siRNA sense strand
acaguagcgccaacccuuu

SEQ ID NO: 169627 - RNA, 19 nt, Homo sapiens
  misc_RNA (1)...(19): siRNA sense strand
ugacagggcuggagaaugu

SEQ ID NO: 169628 - RNA, 19 nt, Homo sapiens
  misc_RNA (1)...(19): siRNA sense strand
caaugaaacuucgcuuuaa

SEQ ID NO: 169629 - RNA, 19 nt, Homo sapiens
  misc_RNA (1)...(19): siRNA sense strand
gaacugcgaucagaacuca

SEQ ID NO: 169630 - RNA, 19 nt, Homo sapiens
  misc_RNA (1)...(19): siRNA sense strand
ggagauauaguggaacuua

SEQ ID NO: 169631 - RNA, 19 nt, Homo sapiens
  misc_RNA (1)...(19): siRNA sense strand
ccaaugaaacuucgcuuua

SEQ ID NO: 169632 - RNA, 19 nt, Homo sapiens
  misc_RNA (1)...(19): siRNA sense strand
gaaacagaacggcugaaua

SEQ ID NO: 169633 - RNA, 19 nt, Homo sapiens
  misc_RNA (1)...(19): siRNA sense strand
gaacgggaccuucuggaaa

SEQ ID NO: 169634 - RNA, 19 nt, Homo sapiens
  misc_RNA (1)...(19): siRNA sense strand
gaacugaaccggacuaagg

SEQ ID NO: 169635 - RNA, 19 nt, Homo sapiens
  misc_RNA (1)...(19): siRNA sense strand
ggacuaaggccaccaugaa

SEQ ID NO: 169636 - RNA, 19 nt, Homo sapiens
  misc_RNA (1)...(19): siRNA sense strand
gcucaugacugccggaaga

SEQ ID NO: 169637 - RNA, 19 nt, Homo sapiens
  misc_RNA (1)...(19): siRNA sense strand
gagcagaggcugaaggauu

SEQ ID NO: 169638 - RNA, 19 nt, Homo sapiens
  misc_RNA (1)...(19): siRNA sense strand
gagauauaguggaacuuaa

SEQ ID NO: 169639 - RNA, 19 nt, Homo sapiens
  misc_RNA (1)...(19): siRNA sense strand
cuucaggacugcuccaaua

SEQ ID NO: 169640 - RNA, 19 nt, Homo sapiens
  misc_RNA (1)...(19): siRNA sense strand
ccaaggcccugcucaugaa

SEQ ID NO: 169641 - RNA, 19 nt, Homo sapiens
  misc_RNA (1)...(19): siRNA sense strand
acacggaucugccaucuca

SEQ ID NO: 169642 - RNA, 19 nt, Homo sapiens
  misc_RNA (1)...(19): siRNA sense strand
aaagggagauauaguggaa

SEQ ID NO: 169643 - RNA, 19 nt, Homo sapiens
  misc_RNA (1)...(19): siRNA sense strand
cugcagaguucgugaauga

SEQ ID NO: 169644 - RNA, 19 nt, Homo sapiens
  misc_RNA (1)...(19): siRNA sense strand
agcagaggcugaaggauua

SEQ ID NO: 169645 - RNA, 19 nt, Homo sapiens
  misc_RNA (1)...(19): siRNA sense strand
aaacagaacggcugaauag

SEQ ID NO: 169646 - RNA, 19 nt, Homo sapiens
  misc_RNA (1)...(19): siRNA sense strand
gcagugaaauccgacauca

SEQ ID NO: 169647 - RNA, 19 nt, Homo sapiens
  misc_RNA (1)...(19): siRNA sense strand
uaauaaacgucuccagcaa

SEQ ID NO: 169648 - RNA, 19 nt, Homo sapiens
  misc_RNA (1)...(19): siRNA sense strand
gcaaagaggaagaacugaa

SEQ ID NO: 169649 - RNA, 19 nt, Homo sapiens
  misc_RNA (1)...(19): siRNA sense strand
uugcggagcucaacaagaa

SEQ ID NO: 169650 - RNA, 19 nt, Homo sapiens
  misc_RNA (1)...(19): siRNA sense strand
uccagcagcucaagaauga

SEQ ID NO: 169651 - RNA, 19 nt, Homo sapiens
  misc_RNA (1)...(19): siRNA sense strand
acugugaccuggcuauuaa

SEQ ID NO: 169652 - RNA, 19 nt, Homo sapiens
  misc_RNA (1)...(19): siRNA sense strand
acaccgaguucacuaaaga

SEQ ID NO: 169653 - RNA, 19 nt, Homo sapiens
  misc_RNA (1)...(19): siRNA sense strand
ucagcaaucugcagaguuc

SEQ ID NO: 169654 - RNA, 19 nt, Homo sapiens
  misc_RNA (1)...(19): siRNA sense strand
gugaagcuaucaaagacaa

SEQ ID NO: 169655 - RNA, 19 nt, Homo sapiens
  misc_RNA (1)...(19): siRNA sense strand
gaaguuagagucgcagaug

SEQ ID NO: 169656 - RNA, 19 nt, Homo sapiens
  misc_RNA (1)...(19): siRNA sense strand
ggaguugccaugaaauaug

SEQ ID NO: 169657 - RNA, 19 nt, Homo sapiens
  misc_RNA (1)...(19): siRNA sense strand
caacgugcagcgagaauga

SEQ ID NO: 169658 - RNA, 19 nt, Homo sapiens
  misc_RNA (1)...(19): siRNA sense strand
gaccauaaccuuggaggaa

SEQ ID NO: 169659 - RNA, 19 nt, Homo sapiens
  misc_RNA (1)...(19): siRNA sense strand
ugagagagcaugaggaugu

SEQ ID NO: 169660 - RNA, 19 nt, Homo sapiens
  misc_RNA (1)...(19): siRNA sense strand
ggacugcuccaauauccaa

SEQ ID NO: 169661 - RNA, 19 nt, Homo sapiens
  misc_RNA (1)...(19): siRNA sense strand
aaagcaagauuagagaguu

SEQ ID NO: 169662 - RNA, 19 nt, Homo sapiens
  misc_RNA (1)...(19): siRNA sense strand
gaaagcaagauuagagagu

SEQ ID NO: 169663 - RNA, 19 nt, Homo sapiens
  misc_RNA (1)...(19): siRNA sense strand
ggaacgggaccuucuggaa

SEQ ID NO: 169664 - RNA, 19 nt, Homo sapiens
  misc_RNA (1)...(19): siRNA sense strand
gcuccaauauccaagagau

SEQ ID NO: 169665 - RNA, 19 nt, Homo sapiens
  misc_RNA (1)...(19): siRNA sense strand
gaagaacugaaccggacua

SEQ ID NO: 169666 - RNA, 19 nt, Homo sapiens
  misc_RNA (1)...(19): siRNA sense strand
ucagaaaucaguagcauag

SEQ ID NO: 169667 - RNA, 19 nt, Homo sapiens
  misc_RNA (1)...(19): siRNA sense strand
caacugcagugaccugaac

SEQ ID NO: 169668 - RNA, 19 nt, Homo sapiens
  misc_RNA (1)...(19): siRNA sense strand
guucgugaaugaucuaaag

SEQ ID NO: 169669 - RNA, 19 nt, Homo sapiens
  misc_RNA (1)...(19): siRNA sense strand
gaaguugaaggccagaguu

SEQ ID NO: 169670 - RNA, 19 nt, Homo sapiens
  misc_RNA (1)...(19): siRNA sense strand
aagcaagauuagagaguuu

SEQ ID NO: 169671 - RNA, 19 nt, Homo sapiens
  misc_RNA (1)...(19): siRNA sense strand
ugaccuggcuauuaagaca

SEQ ID NO: 169672 - RNA, 19 nt, Homo sapiens
  misc_RNA (1)...(19): siRNA sense strand
gcucagaaaucaguagcau

SEQ ID NO: 169673 - RNA, 19 nt, Homo sapiens
  misc_RNA (1)...(19): siRNA sense strand
caacgccauucgucgagaa

SEQ ID NO: 169674 - RNA, 19 nt, Homo sapiens
  misc_RNA (1)...(19): siRNA sense strand
ggaaacagaacggcugaau

SEQ ID NO: 169675 - RNA, 19 nt, Homo sapiens
  misc_RNA (1)...(19): siRNA sense strand
gaaauccgacaucagcaau

SEQ ID NO: 169676 - RNA, 19 nt, Homo sapiens
  misc_RNA (1)...(19): siRNA sense strand
ggaguucaccaacgccauu

SEQ ID NO: 169677 - RNA, 19 nt, Homo sapiens
  misc_RNA (1)...(19): siRNA sense strand
agaaggcccuggagcugaa

SEQ ID NO: 169678 - RNA, 19 nt, Homo sapiens
  misc_RNA (1)...(19): siRNA sense strand
ggagauggccgaguugaag

SEQ ID NO: 169679 - RNA, 19 nt, Homo sapiens
  misc_RNA (1)...(19): siRNA sense strand
caucgauccucucagcuau

SEQ ID NO: 169680 - RNA, 19 nt, Homo sapiens
  misc_RNA (1)...(19): siRNA sense strand
gccaaggcccugcucauga

SEQ ID NO: 169681 - RNA, 19 nt, Homo sapiens
  misc_RNA (1)...(19): siRNA sense strand
acucagaacugcgaucaga

SEQ ID NO: 169682 - RNA, 19 nt, Homo sapiens
  misc_RNA (1)...(19): siRNA sense strand
gagcagucccaccucauga

SEQ ID NO: 169683 - RNA, 19 nt, Homo sapiens
  misc_RNA (1)...(19): siRNA sense strand
ggaaagcauccacaucgau

SEQ ID NO: 169684 - RNA, 19 nt, Homo sapiens
  misc_RNA (1)...(19): siRNA sense strand
ggucagagagcuucaaacu

SEQ ID NO: 169685 - RNA, 19 nt, Homo sapiens
  misc_RNA (1)...(19): siRNA sense strand
caucgaagccuacgaacuc

SEQ ID NO: 169686 - RNA, 19 nt, Homo sapiens
  misc_RNA (1)...(19): siRNA sense strand
guccugggcucagaaauca

SEQ ID NO: 169687 - RNA, 19 nt, Homo sapiens
  misc_RNA (1)...(19): siRNA sense strand
cagcaaagaggaagaacug

SEQ ID NO: 169688 - RNA, 19 nt, Homo sapiens
  misc_RNA (1)...(19): siRNA sense strand
gcugagagggugaagcuau

SEQ ID NO: 169689 - RNA, 19 nt, Homo sapiens
  misc_RNA (1)...(19): siRNA sense strand
gggugaagcuaucaaagac

SEQ ID NO: 169690 - RNA, 19 nt, Homo sapiens
  misc_RNA (1)...(19): siRNA sense strand
aggaggagauggccgaguu

SEQ ID NO: 169691 - RNA, 19 nt, Homo sapiens
  misc_RNA (1)...(19): siRNA sense strand
gagguggacaggcacauug

SEQ ID NO: 169692 - RNA, 19 nt, Homo sapiens
  misc_RNA (1)...(19): siRNA sense strand
gcagcggcagcaaagauaa

SEQ ID NO: 169693 - RNA, 19 nt, Homo sapiens
  misc_RNA (1)...(19): siRNA sense strand
cagcagcccuggcaucacu

SEQ ID NO: 169694 - RNA, 19 nt, Homo sapiens
  misc_RNA (1)...(19): siRNA sense strand
ugagcaugcuggugggaaa

SEQ ID NO: 169695 - RNA, 19 nt, Homo sapiens
  misc_RNA (1)...(19): siRNA sense strand
ccauaaccuuggaggaaug

SEQ ID NO: 169696 - RNA, 19 nt, Homo sapiens
  misc_RNA (1)...(19): siRNA sense strand
ucagaaagcaagauuagag

SEQ ID NO: 169697 - RNA, 19 nt, Homo sapiens
  misc_RNA (1)...(19): siRNA sense strand
uaaccuuggaggaauguaa

SEQ ID NO: 169698 - RNA, 19 nt, Homo sapiens
  misc_RNA (1)...(19): siRNA sense strand
gcagaguucgugaaugauc

SEQ ID NO: 169699 - RNA, 19 nt, Homo sapiens
  misc_RNA (1)...(19): siRNA sense strand
gcacauugagcaccugaag

SEQ ID NO: 169700 - RNA, 19 nt, Homo sapiens
  misc_RNA (1)...(19): siRNA sense strand
cgacaccgaguucacuaaa

SEQ ID NO: 169701 - RNA, 19 nt, Homo sapiens
  misc_RNA (1)...(19): siRNA sense strand
uccaaacacucuacucaca

SEQ ID NO: 169702 - RNA, 19 nt, Homo sapiens
  misc_RNA (1)...(19): siRNA sense strand
cgaguucacuaaagaagac

SEQ ID NO: 169703 - RNA, 19 nt, Homo sapiens
  misc_RNA (1)...(19): siRNA sense strand
gcaagauuagagaguuuga

SEQ ID NO: 169704 - RNA, 19 nt, Homo sapiens
  misc_RNA (1)...(19): siRNA sense strand
gagcucaacaagaagauag

SEQ ID NO: 169705 - RNA, 19 nt, Homo sapiens
  misc_RNA (1)...(19): siRNA sense strand
ucagggaggaagaugagua

SEQ ID NO: 169706 - RNA, 19 nt, Homo sapiens
  misc_RNA (1)...(19): siRNA sense strand
ggacaacgugcagcgagaa

SEQ ID NO: 169707 - RNA, 19 nt, Homo sapiens
  misc_RNA (1)...(19): siRNA sense strand
gagcaccucaaaucccaaa

SEQ ID NO: 169708 - RNA, 19 nt, Homo sapiens
  misc_RNA (1)...(19): siRNA sense strand
cagaaagcaagauuagaga

SEQ ID NO: 169709 - RNA, 19 nt, Homo sapiens
  misc_RNA (1)...(19): siRNA sense strand
ugaaugccauccgggaaga

SEQ ID NO: 169710 - RNA, 19 nt, Homo sapiens
  misc_RNA (1)...(19): siRNA sense strand
uaagacagucgaggagauu

SEQ ID NO: 169711 - RNA, 19 nt, Homo sapiens
  misc_RNA (1)...(19): siRNA sense strand
acaagcagcagcagcaaug

SEQ ID NO: 169712 - RNA, 19 nt, Homo sapiens
  misc_RNA (1)...(19): siRNA sense strand
ccuaugagaaagcaaagaa

SEQ ID NO: 169713 - RNA, 19 nt, Homo sapiens
  misc_RNA (1)...(19): siRNA sense strand
uaguggaacuuaauaaacg

SEQ ID NO: 169714 - RNA, 19 nt, Homo sapiens
  misc_RNA (1)...(19): siRNA sense strand
gaaggcccagcucuaccua

SEQ ID NO: 169715 - RNA, 19 nt, Homo sapiens
  misc_RNA (1)...(19): siRNA sense strand
ucgauccucucagcuauga

SEQ ID NO: 169716 - RNA, 19 nt, Homo sapiens
  misc_RNA (1)...(19): siRNA sense strand
aaugaccuccugaccauaa

SEQ ID NO: 169717 - RNA, 19 nt, Homo sapiens
  misc_RNA (1)...(19): siRNA sense strand
ucaaagacaagguccgaau

SEQ ID NO: 169718 - RNA, 19 nt, Homo sapiens
  misc_RNA (1)...(19): siRNA sense strand
gcacugugaccuggcuauu

SEQ ID NO: 169719 - RNA, 19 nt, Homo sapiens
  misc_RNA (1)...(19): siRNA sense strand
agacaugagacccaaguga

SEQ ID NO: 169720 - RNA, 19 nt, Homo sapiens
  misc_RNA (1)...(19): siRNA sense strand
ggcaaggagugugcugaug

SEQ ID NO: 169721 - RNA, 19 nt, Homo sapiens
  misc_RNA (1)...(19): siRNA sense strand
gagagccuuuccuccaaca

SEQ ID NO: 169722 - RNA, 19 nt, Homo sapiens
  misc_RNA (1)...(19): siRNA sense strand
caaagaggaagaacugaac

SEQ ID NO: 169723 - RNA, 19 nt, Homo sapiens
  misc_RNA (1)...(19): siRNA sense strand
uuaagacagucgaggagau

SEQ ID NO: 169724 - RNA, 19 nt, Homo sapiens
  misc_RNA (1)...(19): siRNA sense strand
gagagagcaugaggauguc

SEQ ID NO: 169725 - RNA, 19 nt, Homo sapiens
  misc_RNA (1)...(19): siRNA sense strand
caucagcaaucugcagagu

SEQ ID NO: 169726 - RNA, 19 nt, Homo sapiens
  misc_RNA (1)...(19): siRNA sense strand
ggagcucaacaagaagaua

SEQ ID NO: 169727 - RNA, 19 nt, Homo sapiens
  misc_RNA (1)...(19): siRNA sense strand
guaaccaccucacagauuc

SEQ ID NO: 169728 - RNA, 19 nt, Homo sapiens
  misc_RNA (1)...(19): siRNA sense strand
uguaaccaccucacagauu

SEQ ID NO: 169729 - RNA, 19 nt, Homo sapiens
  misc_RNA (1)...(19): siRNA sense strand
guaaccaccucacagauuc

SEQ ID NO: 169730 - RNA, 19 nt, Homo sapiens
  misc_RNA (1)...(19): siRNA sense strand
uguaaccaccucacagauu

SEQ ID NO: 169731 - RNA, 19 nt, Homo sapiens
  misc_RNA (1)...(19): siRNA sense strand
guaaccaccucacagauuc

SEQ ID NO: 169732 - RNA, 19 nt, Homo sapiens
  misc_RNA (1)...(19): siRNA sense strand
uguaaccaccucacagauu

SEQ ID NO: 169733 - RNA, 19 nt, Homo sapiens
  misc_RNA (1)...(19): siRNA sense strand
guaaccaccucacagauuc

SEQ ID NO: 169734 - RNA, 19 nt, Homo sapiens
  misc_RNA (1)...(19): siRNA sense strand
uguaaccaccucacagauu

SEQ ID NO: 169735 - RNA, 19 nt, Homo sapiens
  misc_RNA (1)...(19): siRNA sense strand
guaaccaccucacagauuc

SEQ ID NO: 169736 - RNA, 19 nt, Homo sapiens
  misc_RNA (1)...(19): siRNA sense strand
uguaaccaccucacagauu

SEQ ID NO: 169737 - RNA, 19 nt, Homo sapiens
  misc_RNA (1)...(19): siRNA sense strand
guaaccaccucacagauuc

SEQ ID NO: 169738 - RNA, 19 nt, Homo sapiens
  misc_RNA (1)...(19): siRNA sense strand
cuaguugaccugucuauaa

SEQ ID NO: 169739 - RNA, 19 nt, Homo sapiens
  misc_RNA (1)...(19): siRNA sense strand
cuauauaacccuaggaauu

SEQ ID NO: 169740 - RNA, 19 nt, Homo sapiens
  misc_RNA (1)...(19): siRNA sense strand
ugaccugucuauaagagaa

SEQ ID NO: 169741 - RNA, 19 nt, Homo sapiens
  misc_RNA (1)...(19): siRNA sense strand
uaguugaccugucuauaag

SEQ ID NO: 169742 - RNA, 19 nt, Homo sapiens
  misc_RNA (1)...(19): siRNA sense strand
uguaaccaccucacagauu

SEQ ID NO: 169743 - RNA, 19 nt, Homo sapiens
  misc_RNA (1)...(19): siRNA sense strand
guugaccugucuauaagag

SEQ ID NO: 169744 - RNA, 19 nt, Homo sapiens
  misc_RNA (1)...(19): siRNA sense strand
ugacagguaucuucucuua

SEQ ID NO: 169745 - RNA, 19 nt, Homo sapiens
  misc_RNA (1)...(19): siRNA sense strand
gaagagagacagcaauuga

SEQ ID NO: 169746 - RNA, 19 nt, Homo sapiens
  misc_RNA (1)...(19): siRNA sense strand
caucugacauugagaaauu

SEQ ID NO: 169747 - RNA, 19 nt, Homo sapiens
  misc_RNA (1)...(19): siRNA sense strand
gaccuuggcuguaauggaa

SEQ ID NO: 169748 - RNA, 19 nt, Homo sapiens
  misc_RNA (1)...(19): siRNA sense strand
gaaagaugcauaccaagaa

SEQ ID NO: 169749 - RNA, 19 nt, Homo sapiens
  misc_RNA (1)...(19): siRNA sense strand
aguaagagguucugaauau

SEQ ID NO: 169750 - RNA, 19 nt, Homo sapiens
  misc_RNA (1)...(19): siRNA sense strand
gaugaauccucaagaaugu

SEQ ID NO: 169751 - RNA, 19 nt, Homo sapiens
  misc_RNA (1)...(19): siRNA sense strand
gcagaucacagauaauauu

SEQ ID NO: 169752 - RNA, 19 nt, Homo sapiens
  misc_RNA (1)...(19): siRNA sense strand
ugaggcagaucacagauaa

SEQ ID NO: 169753 - RNA, 19 nt, Homo sapiens
  misc_RNA (1)...(19): siRNA sense strand
gaccaaaguugaccaguag

SEQ ID NO: 169754 - RNA, 19 nt, Homo sapiens
  misc_RNA (1)...(19): siRNA sense strand
gauccagguucuuagagua

SEQ ID NO: 169755 - RNA, 19 nt, Homo sapiens
  misc_RNA (1)...(19): siRNA sense strand
ggaagagggucggcuuuau

SEQ ID NO: 169756 - RNA, 19 nt, Homo sapiens
  misc_RNA (1)...(19): siRNA sense strand
gaaccuagaagccauuguu

SEQ ID NO: 169757 - RNA, 19 nt, Homo sapiens
  misc_RNA (1)...(19): siRNA sense strand
acagguaucuucucuuaau

SEQ ID NO: 169758 - RNA, 19 nt, Homo sapiens
  misc_RNA (1)...(19): siRNA sense strand
caaauggacagacccuaua

SEQ ID NO: 169759 - RNA, 19 nt, Homo sapiens
  misc_RNA (1)...(19): siRNA sense strand
gagaaauucaugccuauug

SEQ ID NO: 169760 - RNA, 19 nt, Homo sapiens
  misc_RNA (1)...(19): siRNA sense strand
gauucuaccugauuguuau

SEQ ID NO: 169761 - RNA, 19 nt, Homo sapiens
  misc_RNA (1)...(19): siRNA sense strand
cagaaaagauugugaaaga

SEQ ID NO: 169762 - RNA, 19 nt, Homo sapiens
  misc_RNA (1)...(19): siRNA sense strand
gguuauagcucagcaagug

SEQ ID NO: 169763 - RNA, 19 nt, Homo sapiens
  misc_RNA (1)...(19): siRNA sense strand
agaacaaacugucugauca

SEQ ID NO: 169764 - RNA, 19 nt, Homo sapiens
  misc_RNA (1)...(19): siRNA sense strand
agacagcaauugaacauuc

SEQ ID NO: 169765 - RNA, 19 nt, Homo sapiens
  misc_RNA (1)...(19): siRNA sense strand
agaccaaaguugaccagua

SEQ ID NO: 169766 - RNA, 19 nt, Homo sapiens
  misc_RNA (1)...(19): siRNA sense strand
aaagaugcauaccaagaaa

SEQ ID NO: 169767 - RNA, 19 nt, Homo sapiens
  misc_RNA (1)...(19): siRNA sense strand
ccuugcagcucuucgaaua

SEQ ID NO: 169768 - RNA, 19 nt, Homo sapiens
  misc_RNA (1)...(19): siRNA sense strand
caucugaacucugacuuug

SEQ ID NO: 169769 - RNA, 19 nt, Homo sapiens
  misc_RNA (1)...(19): siRNA sense strand
gaaaagacagccacaguuu

SEQ ID NO: 169770 - RNA, 19 nt, Homo sapiens
  misc_RNA (1)...(19): siRNA sense strand
agauauggcugguugauuc

SEQ ID NO: 169771 - RNA, 19 nt, Homo sapiens
  misc_RNA (1)...(19): siRNA sense strand
ccaaguauggcaugaauug

SEQ ID NO: 169772 - RNA, 19 nt, Homo sapiens
  misc_RNA (1)...(19): siRNA sense strand
aagagaaguuugcccauga

SEQ ID NO: 169773 - RNA, 19 nt, Homo sapiens
  misc_RNA (1)...(19): siRNA sense strand
uagaagccauuguucaaga

SEQ ID NO: 169774 - RNA, 19 nt, Homo sapiens
  misc_RNA (1)...(19): siRNA sense strand
gaaaaugaggaguuacuua

SEQ ID NO: 169775 - RNA, 19 nt, Homo sapiens
  misc_RNA (1)...(19): siRNA sense strand
caauauaguuugguguuuc

SEQ ID NO: 169776 - RNA, 19 nt, Homo sapiens
  misc_RNA (1)...(19): siRNA sense strand
uaagagguucugaauauga

SEQ ID NO: 169777 - RNA, 19 nt, Homo sapiens
  misc_RNA (1)...(19): siRNA sense strand
gggcaucccuguggguaaa

SEQ ID NO: 169778 - RNA, 19 nt, Homo sapiens
  misc_RNA (1)...(19): siRNA sense strand
auagagugcugacaucuga

SEQ ID NO: 169779 - RNA, 19 nt, Homo sapiens
  misc_RNA (1)...(19): siRNA sense strand
gcucagcaagugucagaua

SEQ ID NO: 169780 - RNA, 19 nt, Homo sapiens
  misc_RNA (1)...(19): siRNA sense strand
aaugaacggccuauuauuu

SEQ ID NO: 169781 - RNA, 19 nt, Homo sapiens
  misc_RNA (1)...(19): siRNA sense strand
ucaaugaacggccuauuau

SEQ ID NO: 169782 - RNA, 19 nt, Homo sapiens
  misc_RNA (1)...(19): siRNA sense strand
guaagagguucugaauaug

SEQ ID NO: 169783 - RNA, 19 nt, Homo sapiens
  misc_RNA (1)...(19): siRNA sense strand
guaaauuggcucuauauac

SEQ ID NO: 169784 - RNA, 19 nt, Homo sapiens
  misc_RNA (1)...(19): siRNA sense strand
gcauauugcuucaguucuc

SEQ ID NO: 169785 - RNA, 19 nt, Homo sapiens
  misc_RNA (1)...(19): siRNA sense strand
gaaauucaugccuauuguu

SEQ ID NO: 169786 - RNA, 19 nt, Homo sapiens
  misc_RNA (1)...(19): siRNA sense strand
ucgagcaucugaacucuga

SEQ ID NO: 169787 - RNA, 19 nt, Homo sapiens
  misc_RNA (1)...(19): siRNA sense strand
gaccagauucuaccugauu

SEQ ID NO: 169788 - RNA, 19 nt, Homo sapiens
  misc_RNA (1)...(19): siRNA sense strand
aaagacagccacaguuuau

SEQ ID NO: 169789 - RNA, 19 nt, Homo sapiens
  misc_RNA (1)...(19): siRNA sense strand
ugugaaagaugcauaccaa

SEQ ID NO: 169790 - RNA, 19 nt, Homo sapiens
  misc_RNA (1)...(19): siRNA sense strand
ugggagaccuuggcuguaa

SEQ ID NO: 169791 - RNA, 19 nt, Homo sapiens
  misc_RNA (1)...(19): siRNA sense strand
gaagagggucggcuuuauc

SEQ ID NO: 169792 - RNA, 19 nt, Homo sapiens
  misc_RNA (1)...(19): siRNA sense strand
caggagauccagguucuua

SEQ ID NO: 169793 - RNA, 19 nt, Homo sapiens
  misc_RNA (1)...(19): siRNA sense strand
gaauaccauuagagauguu

SEQ ID NO: 169794 - RNA, 19 nt, Homo sapiens
  misc_RNA (1)...(19): siRNA sense strand
ggcaguuucuuccaaguau

SEQ ID NO: 169795 - RNA, 19 nt, Homo sapiens
  misc_RNA (1)...(19): siRNA sense strand
gcugacaucugacauugag

SEQ ID NO: 169796 - RNA, 19 nt, Homo sapiens
  misc_RNA (1)...(19): siRNA sense strand
gaaaugaagaaccuagaag

SEQ ID NO: 169797 - RNA, 19 nt, Homo sapiens
  misc_RNA (1)...(19): siRNA sense strand
uaacacaagagaaagagaa

SEQ ID NO: 169798 - RNA, 19 nt, Homo sapiens
  misc_RNA (1)...(19): siRNA sense strand
aaaccaguauugcacauuc

SEQ ID NO: 169799 - RNA, 19 nt, Homo sapiens
  misc_RNA (1)...(19): siRNA sense strand
gaguaagagguucugaaua

SEQ ID NO: 169800 - RNA, 19 nt, Homo sapiens
  misc_RNA (1)...(19): siRNA sense strand
gguaaauuggcucuauaua

SEQ ID NO: 169801 - RNA, 19 nt, Homo sapiens
  misc_RNA (1)...(19): siRNA sense strand
gggacgugcuuccuuaaca

SEQ ID NO: 169802 - RNA, 19 nt, Homo sapiens
  misc_RNA (1)...(19): siRNA sense strand
cagauaaacacuuggaaga

SEQ ID NO: 169803 - RNA, 19 nt, Homo sapiens
  misc_RNA (1)...(19): siRNA sense strand
gugcugacaucugacauug

SEQ ID NO: 169804 - RNA, 19 nt, Homo sapiens
  misc_RNA (1)...(19): siRNA sense strand
gaaaauacagaccaaaguu

SEQ ID NO: 169805 - RNA, 19 nt, Homo sapiens
  misc_RNA (1)...(19): siRNA sense strand
ugaaagaugcauaccaaga

SEQ ID NO: 169806 - RNA, 19 nt, Homo sapiens
  misc_RNA (1)...(19): siRNA sense strand
gaagaaccuagaagccauu

SEQ ID NO: 169807 - RNA, 19 nt, Homo sapiens
  misc_RNA (1)...(19): siRNA sense strand
aaagauccacucuacauug

SEQ ID NO: 169808 - RNA, 19 nt, Homo sapiens
  misc_RNA (1)...(19): siRNA sense strand
ggagauccagguucuuaga

SEQ ID NO: 169809 - RNA, 19 nt, Homo sapiens
  misc_RNA (1)...(19): siRNA sense strand
acaaguaucgaaaccagua

SEQ ID NO: 169810 - RNA, 19 nt, Homo sapiens
  misc_RNA (1)...(19): siRNA sense strand
agaaauucaugccuauugu

SEQ ID NO: 169811 - RNA, 19 nt, Homo sapiens
  misc_RNA (1)...(19): siRNA sense strand
gagggcauauugcuucagu

SEQ ID NO: 169812 - RNA, 19 nt, Homo sapiens
  misc_RNA (1)...(19): siRNA sense strand
gcaaaacaaagaagcauuu

SEQ ID NO: 169813 - RNA, 19 nt, Homo sapiens
  misc_RNA (1)...(19): siRNA sense strand
agccauuguucaagaaaua

SEQ ID NO: 169814 - RNA, 19 nt, Homo sapiens
  misc_RNA (1)...(19): siRNA sense strand
caagagaaagagaaguuug

SEQ ID NO: 169815 - RNA, 19 nt, Homo sapiens
  misc_RNA (1)...(19): siRNA sense strand
caaugaugauauucaagga

SEQ ID NO: 169816 - RNA, 19 nt, Homo sapiens
  misc_RNA (1)...(19): siRNA sense strand
uaaagauccacucuacauu

SEQ ID NO: 169817 - RNA, 19 nt, Homo sapiens
  misc_RNA (1)...(19): siRNA sense strand
gguaucuucucuuaaugga

SEQ ID NO: 169818 - RNA, 19 nt, Homo sapiens
  misc_RNA (1)...(19): siRNA sense strand
gcucccagauguauaguac

SEQ ID NO: 169819 - RNA, 19 nt, Homo sapiens
  misc_RNA (1)...(19): siRNA sense strand
ggaagagagacagcaauug

SEQ ID NO: 169820 - RNA, 19 nt, Homo sapiens
  misc_RNA (1)...(19): siRNA sense strand
aaaaccaacugcccucaua

SEQ ID NO: 169821 - RNA, 19 nt, Homo sapiens
  misc_RNA (1)...(19): siRNA sense strand
gauggagagcguauucuug

SEQ ID NO: 169822 - RNA, 19 nt, Homo sapiens
  misc_RNA (1)...(19): siRNA sense strand
aaauacagaccaaaguuga

SEQ ID NO: 169823 - RNA, 19 nt, Homo sapiens
  misc_RNA (1)...(19): siRNA sense strand
ugaauaccauuagagaugu

SEQ ID NO: 169824 - RNA, 19 nt, Homo sapiens
  misc_RNA (1)...(19): siRNA sense strand
aggcagaucacagauaaua

SEQ ID NO: 169825 - RNA, 19 nt, Homo sapiens
  misc_RNA (1)...(19): siRNA sense strand
ccaaauggacagacccuau

SEQ ID NO: 169826 - RNA, 19 nt, Homo sapiens
  misc_RNA (1)...(19): siRNA sense strand
cagagaagaguaagagguu

SEQ ID NO: 169827 - RNA, 19 nt, Homo sapiens
  misc_RNA (1)...(19): siRNA sense strand
uggguaaauuggcucuaua

SEQ ID NO: 169828 - RNA, 19 nt, Homo sapiens
  misc_RNA (1)...(19): siRNA sense strand
gcaucugaacucugacuuu

SEQ ID NO: 169829 - RNA, 19 nt, Homo sapiens
  misc_RNA (1)...(19): siRNA sense strand
gaaaagauugugaaagaug

SEQ ID NO: 169830 - RNA, 19 nt, Homo sapiens
  misc_RNA (1)...(19): siRNA sense strand
caaugaacggccuauuauu

SEQ ID NO: 169831 - RNA, 19 nt, Homo sapiens
  misc_RNA (1)...(19): siRNA sense strand
acucugacuuugacaggua

SEQ ID NO: 169832 - RNA, 19 nt, Homo sapiens
  misc_RNA (1)...(19): siRNA sense strand
gaaaccaguauugcacauu

SEQ ID NO: 169833 - RNA, 19 nt, Homo sapiens
  misc_RNA (1)...(19): siRNA sense strand
ucuccaagauagaaaugaa

SEQ ID NO: 169834 - RNA, 19 nt, Homo sapiens
  misc_RNA (1)...(19): siRNA sense strand
ccaagaacaaacugucuga

SEQ ID NO: 169835 - RNA, 19 nt, Homo sapiens
  misc_RNA (1)...(19): siRNA sense strand
aaugaggaguuacuuaaag

SEQ ID NO: 169836 - RNA, 19 nt, Homo sapiens
  misc_RNA (1)...(19): siRNA sense strand
gaagccauuguucaagaaa

SEQ ID NO: 169837 - RNA, 19 nt, Homo sapiens
  misc_RNA (1)...(19): siRNA sense strand
gcaguuucuuccaaguaug

SEQ ID NO: 169838 - RNA, 19 nt, Homo sapiens
  misc_RNA (1)...(19): siRNA sense strand
ggaguuacuuaaagaucca

SEQ ID NO: 169839 - RNA, 19 nt, Homo sapiens
  misc_RNA (1)...(19): siRNA sense strand
ccagguucuuagaguagua

SEQ ID NO: 169840 - RNA, 19 nt, Homo sapiens
  misc_RNA (1)...(19): siRNA sense strand
agaagccauuguucaagaa

SEQ ID NO: 169841 - RNA, 19 nt, Homo sapiens
  misc_RNA (1)...(19): siRNA sense strand
agagaaguuugcccaugaa

SEQ ID NO: 169842 - RNA, 19 nt, Homo sapiens
  misc_RNA (1)...(19): siRNA sense strand
cacaagagaaagagaaguu

SEQ ID NO: 169843 - RNA, 19 nt, Homo sapiens
  misc_RNA (1)...(19): siRNA sense strand
gaauaaccaagaacaaacu

SEQ ID NO: 169844 - RNA, 19 nt, Homo sapiens
  misc_RNA (1)...(19): siRNA sense strand
gaagaagcauauacacuua

SEQ ID NO: 169845 - RNA, 19 nt, Homo sapiens
  misc_RNA (1)...(19): siRNA sense strand
ugaaaggccuguaauauuu

SEQ ID NO: 169846 - RNA, 19 nt, Homo sapiens
  misc_RNA (1)...(19): siRNA sense strand
gaacauggcggagugaaua

SEQ ID NO: 169847 - RNA, 19 nt, Homo sapiens
  misc_RNA (1)...(19): siRNA sense strand
gaaacgagaucgcacacaa

SEQ ID NO: 169848 - RNA, 19 nt, Homo sapiens
  misc_RNA (1)...(19): siRNA sense strand
cagaauaccuauaugcuaa

SEQ ID NO: 169849 - RNA, 19 nt, Homo sapiens
  misc_RNA (1)...(19): siRNA sense strand
ggccaaauauguuaaagaa

SEQ ID NO: 169850 - RNA, 19 nt, Homo sapiens
  misc_RNA (1)...(19): siRNA sense strand
ggaacacacucauucaguu

SEQ ID NO: 169851 - RNA, 19 nt, Homo sapiens
  misc_RNA (1)...(19): siRNA sense strand
ccagagagcauaccugaua

SEQ ID NO: 169852 - RNA, 19 nt, Homo sapiens
  misc_RNA (1)...(19): siRNA sense strand
uagaagaccuaagggauua

SEQ ID NO: 169853 - RNA, 19 nt, Homo sapiens
  misc_RNA (1)...(19): siRNA sense strand
agacagaggucauguuaga

SEQ ID NO: 169854 - RNA, 19 nt, Homo sapiens
  misc_RNA (1)...(19): siRNA sense strand
gcacacaacaguaugauga

SEQ ID NO: 169855 - RNA, 19 nt, Homo sapiens
  misc_RNA (1)...(19): siRNA sense strand
gagcauaccugauacuuuu

SEQ ID NO: 169856 - RNA, 19 nt, Homo sapiens
  misc_RNA (1)...(19): siRNA sense strand
guggauaacuggccagaaa

SEQ ID NO: 169857 - RNA, 19 nt, Homo sapiens
  misc_RNA (1)...(19): siRNA sense strand
gcaagccacuuaugcugaa

SEQ ID NO: 169858 - RNA, 19 nt, Homo sapiens
  misc_RNA (1)...(19): siRNA sense strand
aagaugacauugagaguuu

SEQ ID NO: 169859 - RNA, 19 nt, Homo sapiens
  misc_RNA (1)...(19): siRNA sense strand
uguaacacccggcauauua

SEQ ID NO: 169860 - RNA, 19 nt, Homo sapiens
  misc_RNA (1)...(19): siRNA sense strand
gacaaggccaaauauguua

SEQ ID NO: 169861 - RNA, 19 nt, Homo sapiens
  misc_RNA (1)...(19): siRNA sense strand
gaaaaugacuagcccuuug

SEQ ID NO: 169862 - RNA, 19 nt, Homo sapiens
  misc_RNA (1)...(19): siRNA sense strand
gaauacggccugauagaug

SEQ ID NO: 169863 - RNA, 19 nt, Homo sapiens
  misc_RNA (1)...(19): siRNA sense strand
gagggcagguguuuguuug

SEQ ID NO: 169864 - RNA, 19 nt, Homo sapiens
  misc_RNA (1)...(19): siRNA sense strand
ggcauuuacuuuacaagaa

SEQ ID NO: 169865 - RNA, 19 nt, Homo sapiens
  misc_RNA (1)...(19): siRNA sense strand
caaugaaaggccuguaaua

SEQ ID NO: 169866 - RNA, 19 nt, Homo sapiens
  misc_RNA (1)...(19): siRNA sense strand
ucagacagaggucauguua

SEQ ID NO: 169867 - RNA, 19 nt, Homo sapiens
  misc_RNA (1)...(19): siRNA sense strand
gaucaauuguggauaacug

SEQ ID NO: 169868 - RNA, 19 nt, Homo sapiens
  misc_RNA (1)...(19): siRNA sense strand
gcaucaagcccuccuguga

SEQ ID NO: 169869 - RNA, 19 nt, Homo sapiens
  misc_RNA (1)...(19): siRNA sense strand
gaaaggccuguaauauuug

SEQ ID NO: 169870 - RNA, 19 nt, Homo sapiens
  misc_RNA (1)...(19): siRNA sense strand
gaagaugcagugaauauac

SEQ ID NO: 169871 - RNA, 19 nt, Homo sapiens
  misc_RNA (1)...(19): siRNA sense strand
gaagacaaggccaaauaug

SEQ ID NO: 169872 - RNA, 19 nt, Homo sapiens
  misc_RNA (1)...(19): siRNA sense strand
guaaaccaaucuccgaaca

SEQ ID NO: 169873 - RNA, 19 nt, Homo sapiens
  misc_RNA (1)...(19): siRNA sense strand
ugaagaagcauauacacuu

SEQ ID NO: 169874 - RNA, 19 nt, Homo sapiens
  misc_RNA (1)...(19): siRNA sense strand
gccauggccucuaucaaug

SEQ ID NO: 169875 - RNA, 19 nt, Homo sapiens
  misc_RNA (1)...(19): siRNA sense strand
uaaaauggcuuuccgauac

SEQ ID NO: 169876 - RNA, 19 nt, Homo sapiens
  misc_RNA (1)...(19): siRNA sense strand
uagcuguuauucucuguaa

SEQ ID NO: 169877 - RNA, 19 nt, Homo sapiens
  misc_RNA (1)...(19): siRNA sense strand
acaagauauucaagccuua

SEQ ID NO: 169878 - RNA, 19 nt, Homo sapiens
  misc_RNA (1)...(19): siRNA sense strand
ugaccugauugaugaguuu

SEQ ID NO: 169879 - RNA, 19 nt, Homo sapiens
  misc_RNA (1)...(19): siRNA sense strand
augaugaccugauugauga

SEQ ID NO: 169880 - RNA, 19 nt, Homo sapiens
  misc_RNA (1)...(19): siRNA sense strand
gaugugggaacugauaaua

SEQ ID NO: 169881 - RNA, 19 nt, Homo sapiens
  misc_RNA (1)...(19): siRNA sense strand
guauugaugugggaacuga

SEQ ID NO: 169882 - RNA, 19 nt, Homo sapiens
  misc_RNA (1)...(19): siRNA sense strand
ggaauacaagaaagaaaug

SEQ ID NO: 169883 - RNA, 19 nt, Homo sapiens
  misc_RNA (1)...(19): siRNA sense strand
gacaaaugcuuggucuuca

SEQ ID NO: 169884 - RNA, 19 nt, Homo sapiens
  misc_RNA (1)...(19): siRNA sense strand
caagccaauugacagauga

SEQ ID NO: 169885 - RNA, 19 nt, Homo sapiens
  misc_RNA (1)...(19): siRNA sense strand
gcauauuagugacaguguu

SEQ ID NO: 169886 - RNA, 19 nt, Homo sapiens
  misc_RNA (1)...(19): siRNA sense strand
agaccuaagggauuauuua

SEQ ID NO: 169887 - RNA, 19 nt, Homo sapiens
  misc_RNA (1)...(19): siRNA sense strand
auagaauacugcaagauga

SEQ ID NO: 169888 - RNA, 19 nt, Homo sapiens
  misc_RNA (1)...(19): siRNA sense strand
gggaauacaagaaagaaau

SEQ ID NO: 169889 - RNA, 19 nt, Homo sapiens
  misc_RNA (1)...(19): siRNA sense strand
gccuuacgauuucauagaa

SEQ ID NO: 169890 - RNA, 19 nt, Homo sapiens
  misc_RNA (1)...(19): siRNA sense strand
agacaaggccaaauauguu

SEQ ID NO: 169891 - RNA, 19 nt, Homo sapiens
  misc_RNA (1)...(19): siRNA sense strand
gaagacuuuggaaaucaua

SEQ ID NO: 169892 - RNA, 19 nt, Homo sapiens
  misc_RNA (1)...(19): siRNA sense strand
gcauuuacuuuacaagaac

SEQ ID NO: 169893 - RNA, 19 nt, Homo sapiens
  misc_RNA (1)...(19): siRNA sense strand
gguguggcuuuagcuguua

SEQ ID NO: 169894 - RNA, 19 nt, Homo sapiens
  misc_RNA (1)...(19): siRNA sense strand
gugcacggcugaagaagca

SEQ ID NO: 169895 - RNA, 19 nt, Homo sapiens
  misc_RNA (1)...(19): siRNA sense strand
gaaagcuauuacugacaga

SEQ ID NO: 169896 - RNA, 19 nt, Homo sapiens
  misc_RNA (1)...(19): siRNA sense strand
ggaauugcaaaucuuauag

SEQ ID NO: 169897 - RNA, 19 nt, Homo sapiens
  misc_RNA (1)...(19): siRNA sense strand
uauucaagccuuacgauuu

SEQ ID NO: 169898 - RNA, 19 nt, Homo sapiens
  misc_RNA (1)...(19): siRNA sense strand
caggaaguuucuauuaaca

SEQ ID NO: 169899 - RNA, 19 nt, Homo sapiens
  misc_RNA (1)...(19): siRNA sense strand
ggaaccauuuacucacuca

SEQ ID NO: 169900 - RNA, 19 nt, Homo sapiens
  misc_RNA (1)...(19): siRNA sense strand
guucgaagacuuuggaaau

SEQ ID NO: 169901 - RNA, 19 nt, Homo sapiens
  misc_RNA (1)...(19): siRNA sense strand
acaguaugaugaccugauu

SEQ ID NO: 169902 - RNA, 19 nt, Homo sapiens
  misc_RNA (1)...(19): siRNA sense strand
gauagaugccugccagugu

SEQ ID NO: 169903 - RNA, 19 nt, Homo sapiens
  misc_RNA (1)...(19): siRNA sense strand
uguuaaggcuguuguagug

SEQ ID NO: 169904 - RNA, 19 nt, Homo sapiens
  misc_RNA (1)...(19): siRNA sense strand
gaccuaagggauuauuuau

SEQ ID NO: 169905 - RNA, 19 nt, Homo sapiens
  misc_RNA (1)...(19): siRNA sense strand
ggucauguuagaucaauug

SEQ ID NO: 169906 - RNA, 19 nt, Homo sapiens
  misc_RNA (1)...(19): siRNA sense strand
cugaagacaaggccaaaua

SEQ ID NO: 169907 - RNA, 19 nt, Homo sapiens
  misc_RNA (1)...(19): siRNA sense strand
aaaccaaucuccgaacaca

SEQ ID NO: 169908 - RNA, 19 nt, Homo sapiens
  misc_RNA (1)...(19): siRNA sense strand
ggaauacggccugauagau

SEQ ID NO: 169909 - RNA, 19 nt, Homo sapiens
  misc_RNA (1)...(19): siRNA sense strand
ugucgacauuugcacauaa

SEQ ID NO: 169910 - RNA, 19 nt, Homo sapiens
  misc_RNA (1)...(19): siRNA sense strand
ugccagauguguaugaaug

SEQ ID NO: 169911 - RNA, 19 nt, Homo sapiens
  misc_RNA (1)...(19): siRNA sense strand
ucaggaaguuucuauuaac

SEQ ID NO: 169912 - RNA, 19 nt, Homo sapiens
  misc_RNA (1)...(19): siRNA sense strand
acccaccgcuugcuaauau

SEQ ID NO: 169913 - RNA, 19 nt, Homo sapiens
  misc_RNA (1)...(19): siRNA sense strand
ccagugaaacuuacagaug

SEQ ID NO: 169914 - RNA, 19 nt, Homo sapiens
  misc_RNA (1)...(19): siRNA sense strand
cauaaugggaauacaagaa

SEQ ID NO: 169915 - RNA, 19 nt, Homo sapiens
  misc_RNA (1)...(19): siRNA sense strand
gcuaauauucaggaaguuu

SEQ ID NO: 169916 - RNA, 19 nt, Homo sapiens
  misc_RNA (1)...(19): siRNA sense strand
cauauuagugacaguguuu

SEQ ID NO: 169917 - RNA, 19 nt, Homo sapiens
  misc_RNA (1)...(19): siRNA sense strand
gcacggcugaagaagcaua

SEQ ID NO: 169918 - RNA, 19 nt, Homo sapiens
  misc_RNA (1)...(19): siRNA sense strand
aagaaaaucuggauguuug

SEQ ID NO: 169919 - RNA, 19 nt, Homo sapiens
  misc_RNA (1)...(19): siRNA sense strand
gaaaauggccugucagaac

SEQ ID NO: 169920 - RNA, 19 nt, Homo sapiens
  misc_RNA (1)...(19): siRNA sense strand
cauaaugcauucagguucu

SEQ ID NO: 169921 - RNA, 19 nt, Homo sapiens
  misc_RNA (1)...(19): siRNA sense strand
cgacaaaugcuuggucuuc

SEQ ID NO: 169922 - RNA, 19 nt, Homo sapiens
  misc_RNA (1)...(19): siRNA sense strand
acaaaugcuuggucuucaa

SEQ ID NO: 169923 - RNA, 19 nt, Homo sapiens
  misc_RNA (1)...(19): siRNA sense strand
gaggucauguuagaucaau

SEQ ID NO: 169924 - RNA, 19 nt, Homo sapiens
  misc_RNA (1)...(19): siRNA sense strand
gagaguuuaaugccaauug

SEQ ID NO: 169925 - RNA, 19 nt, Homo sapiens
  misc_RNA (1)...(19): siRNA sense strand
ugaagaugcagugaauaua

SEQ ID NO: 169926 - RNA, 19 nt, Homo sapiens
  misc_RNA (1)...(19): siRNA sense strand
gaacaagaggcacaaaaga

SEQ ID NO: 169927 - RNA, 19 nt, Homo sapiens
  misc_RNA (1)...(19): siRNA sense strand
ucaagggacagcugcagua

SEQ ID NO: 169928 - RNA, 19 nt, Homo sapiens
  misc_RNA (1)...(19): siRNA sense strand
uauagaauacugcaagaug

SEQ ID NO: 169929 - RNA, 19 nt, Homo sapiens
  misc_RNA (1)...(19): siRNA sense strand
caguauggacacaucuuua

SEQ ID NO: 169930 - RNA, 19 nt, Homo sapiens
  misc_RNA (1)...(19): siRNA sense strand
caagaugacauugagaguu

SEQ ID NO: 169931 - RNA, 19 nt, Homo sapiens
  misc_RNA (1)...(19): siRNA sense strand
auucaagccuuacgauuuc

SEQ ID NO: 169932 - RNA, 19 nt, Homo sapiens
  misc_RNA (1)...(19): siRNA sense strand
gaagaccuaagggauuauu

SEQ ID NO: 169933 - RNA, 19 nt, Homo sapiens
  misc_RNA (1)...(19): siRNA sense strand
gaugacauugagaguuuaa

SEQ ID NO: 169934 - RNA, 19 nt, Homo sapiens
  misc_RNA (1)...(19): siRNA sense strand
ugaagacaaggccaaauau

SEQ ID NO: 169935 - RNA, 19 nt, Homo sapiens
  misc_RNA (1)...(19): siRNA sense strand
ggcuuuagcuguuauucuc

SEQ ID NO: 169936 - RNA, 19 nt, Homo sapiens
  misc_RNA (1)...(19): siRNA sense strand
uuacagagggcagguguuu

SEQ ID NO: 169937 - RNA, 19 nt, Homo sapiens
  misc_RNA (1)...(19): siRNA sense strand
augaaaggccuguaauauu

SEQ ID NO: 169938 - RNA, 19 nt, Homo sapiens
  misc_RNA (1)...(19): siRNA sense strand
aaugaaaggccuguaauau

SEQ ID NO: 169939 - RNA, 19 nt, Homo sapiens
  misc_RNA (1)...(19): siRNA sense strand
ucgaagacuuuggaaauca

SEQ ID NO: 169940 - RNA, 19 nt, Homo sapiens
  misc_RNA (1)...(19): siRNA sense strand
uaugaugaccugauugaug

SEQ ID NO: 169941 - RNA, 19 nt, Homo sapiens
  misc_RNA (1)...(19): siRNA sense strand
acaagccaauugacagaug

SEQ ID NO: 169942 - RNA, 19 nt, Homo sapiens
  misc_RNA (1)...(19): siRNA sense strand
cccagaaccugaagacaag

SEQ ID NO: 169943 - RNA, 19 nt, Homo sapiens
  misc_RNA (1)...(19): siRNA sense strand
acagaauaccuauaugcua

SEQ ID NO: 169944 - RNA, 19 nt, Homo sapiens
  misc_RNA (1)...(19): siRNA sense strand
caaugacgcuuuaaagaga

SEQ ID NO: 169945 - RNA, 19 nt, Homo sapiens
  misc_RNA (1)...(19): siRNA sense strand
gaagguacacgaauuaugu

SEQ ID NO: 169946 - RNA, 19 nt, Homo sapiens
  misc_RNA (1)...(19): siRNA sense strand
caagugaacaauugguuua

SEQ ID NO: 169947 - RNA, 19 nt, Homo sapiens
  misc_RNA (1)...(19): siRNA sense strand
gauagacgauagagaagga

SEQ ID NO: 169948 - RNA, 19 nt, Homo sapiens
  misc_RNA (1)...(19): siRNA sense strand
caaaguagccacaaauauc

SEQ ID NO: 169949 - RNA, 19 nt, Homo sapiens
  misc_RNA (1)...(19): siRNA sense strand
caugggagguuucguaaug

SEQ ID NO: 169950 - RNA, 19 nt, Homo sapiens
  misc_RNA (1)...(19): siRNA sense strand
gcaaagguacgacgaucua

SEQ ID NO: 169951 - RNA, 19 nt, Homo sapiens
  misc_RNA (1)...(19): siRNA sense strand
uagagaagguacacgaauu

SEQ ID NO: 169952 - RNA, 19 nt, Homo sapiens
  misc_RNA (1)...(19): siRNA sense strand
ggaaugggcaugaauaugg

SEQ ID NO: 169953 - RNA, 19 nt, Homo sapiens
  misc_RNA (1)...(19): siRNA sense strand
gauucaagccauacaagua

SEQ ID NO: 169954 - RNA, 19 nt, Homo sapiens
  misc_RNA (1)...(19): siRNA sense strand
ggugauagacgauagagaa

SEQ ID NO: 169955 - RNA, 19 nt, Homo sapiens
  misc_RNA (1)...(19): siRNA sense strand
guacacgaauuaugugaca

SEQ ID NO: 169956 - RNA, 19 nt, Homo sapiens
  misc_RNA (1)...(19): siRNA sense strand
gcacaggugacgaugauga

SEQ ID NO: 169957 - RNA, 19 nt, Homo sapiens
  misc_RNA (1)...(19): siRNA sense strand
gaccagcccucuuggaaca

SEQ ID NO: 169958 - RNA, 19 nt, Homo sapiens
  misc_RNA (1)...(19): siRNA sense strand
cuggauaacuugaugauuc

SEQ ID NO: 169959 - RNA, 19 nt, Homo sapiens
  misc_RNA (1)...(19): siRNA sense strand
uaacugaccagcccucuug

SEQ ID NO: 169960 - RNA, 19 nt, Homo sapiens
  misc_RNA (1)...(19): siRNA sense strand
gugaagauauaacaagauc

SEQ ID NO: 169961 - RNA, 19 nt, Homo sapiens
  misc_RNA (1)...(19): siRNA sense strand
gguuucaucuauuggaauu

SEQ ID NO: 169962 - RNA, 19 nt, Homo sapiens
  misc_RNA (1)...(19): siRNA sense strand
caacauaugggaauuagag

SEQ ID NO: 169963 - RNA, 19 nt, Homo sapiens
  misc_RNA (1)...(19): siRNA sense strand
agagaagguacacgaauua

SEQ ID NO: 169964 - RNA, 19 nt, Homo sapiens
  misc_RNA (1)...(19): siRNA sense strand
ugagaaaugugaauuagcu

SEQ ID NO: 169965 - RNA, 19 nt, Homo sapiens
  misc_RNA (1)...(19): siRNA sense strand
cagcacaggugacgaugau

SEQ ID NO: 169966 - RNA, 19 nt, Homo sapiens
  misc_RNA (1)...(19): siRNA sense strand
ggugauggcuuggacaaca

SEQ ID NO: 169967 - RNA, 19 nt, Homo sapiens
  misc_RNA (1)...(19): siRNA sense strand
ccaaaguagccacaaauau

SEQ ID NO: 169968 - RNA, 19 nt, Homo sapiens
  misc_RNA (1)...(19): siRNA sense strand
cagugaagauauaacaaga

SEQ ID NO: 169969 - RNA, 19 nt, Homo sapiens
  misc_RNA (1)...(19): siRNA sense strand
caaacagauucgcgcagaa

SEQ ID NO: 169970 - RNA, 19 nt, Homo sapiens
  misc_RNA (1)...(19): siRNA sense strand
gauauaacaagaucagcaa

SEQ ID NO: 169971 - RNA, 19 nt, Homo sapiens
  misc_RNA (1)...(19): siRNA sense strand
gaagauauaacaagaucag

SEQ ID NO: 169972 - RNA, 19 nt, Homo sapiens
  misc_RNA (1)...(19): siRNA sense strand
gaacuggauaacuugauga

SEQ ID NO: 169973 - RNA, 19 nt, Homo sapiens
  misc_RNA (1)...(19): siRNA sense strand
caaccgagcaguaagucaa

SEQ ID NO: 169974 - RNA, 19 nt, Homo sapiens
  misc_RNA (1)...(19): siRNA sense strand
gcacaagacacgggacuca

SEQ ID NO: 169975 - RNA, 19 nt, Homo sapiens
  misc_RNA (1)...(19): siRNA sense strand
ggacucaccauccuucaag

SEQ ID NO: 169976 - RNA, 19 nt, Homo sapiens
  misc_RNA (1)...(19): siRNA sense strand
aaaguagccacaaauauca

SEQ ID NO: 169977 - RNA, 19 nt, Homo sapiens
  misc_RNA (1)...(19): siRNA sense strand
uggauaacuugaugauuca

SEQ ID NO: 169978 - RNA, 19 nt, Homo sapiens
  misc_RNA (1)...(19): siRNA sense strand
cagcaacauaugggaauua

SEQ ID NO: 169979 - RNA, 19 nt, Homo sapiens
  misc_RNA (1)...(19): siRNA sense strand
ggacagcccaugggagguu

SEQ ID NO: 169980 - RNA, 19 nt, Homo sapiens
  misc_RNA (1)...(19): siRNA sense strand
ccucuucccucucuuagca

SEQ ID NO: 169981 - RNA, 19 nt, Homo sapiens
  misc_RNA (1)...(19): siRNA sense strand
gaauagugcagcccaugau

SEQ ID NO: 169982 - RNA, 19 nt, Homo sapiens
  misc_RNA (1)...(19): siRNA sense strand
gacacggcaucuacucguu

SEQ ID NO: 169983 - RNA, 19 nt, Homo sapiens
  misc_RNA (1)...(19): siRNA sense strand
agaacuggauaacuugaug

SEQ ID NO: 169984 - RNA, 19 nt, Homo sapiens
  misc_RNA (1)...(19): siRNA sense strand
aaacagauucgcgcagaaa

SEQ ID NO: 169985 - RNA, 19 nt, Homo sapiens
  misc_RNA (1)...(19): siRNA sense strand
gcccaugggagguuucgua

SEQ ID NO: 169986 - RNA, 19 nt, Homo sapiens
  misc_RNA (1)...(19): siRNA sense strand
cgauagagaaggaggauca

SEQ ID NO: 169987 - RNA, 19 nt, Homo sapiens
  misc_RNA (1)...(19): siRNA sense strand
ucaaugacgcuuuaaagag

SEQ ID NO: 169988 - RNA, 19 nt, Homo sapiens
  misc_RNA (1)...(19): siRNA sense strand
ucaagugaacaauugguuu

SEQ ID NO: 169989 - RNA, 19 nt, Homo sapiens
  misc_RNA (1)...(19): siRNA sense strand
aaucagacagugaagauau

SEQ ID NO: 169990 - RNA, 19 nt, Homo sapiens
  misc_RNA (1)...(19): siRNA sense strand
auaacaagaucagcaaauc

SEQ ID NO: 169991 - RNA, 19 nt, Homo sapiens
  misc_RNA (1)...(19): siRNA sense strand
cccaaaguagccacaaaua

SEQ ID NO: 169992 - RNA, 19 nt, Homo sapiens
  misc_RNA (1)...(19): siRNA sense strand
gagaagguacacgaauuau

SEQ ID NO: 169993 - RNA, 19 nt, Homo sapiens
  misc_RNA (1)...(19): siRNA sense strand
gagaaaugugaauuagcua

SEQ ID NO: 169994 - RNA, 19 nt, Homo sapiens
  misc_RNA (1)...(19): siRNA sense strand
ccucugcacucgcaucagu

SEQ ID NO: 169995 - RNA, 19 nt, Homo sapiens
  misc_RNA (1)...(19): siRNA sense strand
aaugugaauuagcuacuug

SEQ ID NO: 169996 - RNA, 19 nt, Homo sapiens
  misc_RNA (1)...(19): siRNA sense strand
gaaaugugaauuagcuacu

SEQ ID NO: 169997 - RNA, 19 nt, Homo sapiens
  misc_RNA (1)...(19): siRNA sense strand
gaaggaggaucaaaaucag

SEQ ID NO: 169998 - RNA, 19 nt, Homo sapiens
  misc_RNA (1)...(19): siRNA sense strand
ucagcaacauaugggaauu

SEQ ID NO: 169999 - RNA, 19 nt, Homo sapiens
  misc_RNA (1)...(19): siRNA sense strand
gaugaugacccugauaagg

SEQ ID NO: 170000 - RNA, 19 nt, Homo sapiens
  misc_RNA (1)...(19): siRNA sense strand
ugacgaugaugacccugau

SEQ ID NO: 170001 - RNA, 19 nt, Homo sapiens
  misc_RNA (1)...(19): siRNA sense strand
aucagacagugaagauaua

SEQ ID NO: 170002 - RNA, 19 nt, Homo sapiens
  misc_RNA (1)...(19): siRNA sense strand
agcaugggcuccucuguca

SEQ ID NO: 170003 - RNA, 19 nt, Homo sapiens
  misc_RNA (1)...(19): siRNA sense strand
ggacggucagcaacauaug

SEQ ID NO: 170004 - RNA, 19 nt, Homo sapiens
  misc_RNA (1)...(19): siRNA sense strand
gacagcccaugggagguuu

SEQ ID NO: 170005 - RNA, 19 nt, Homo sapiens
  misc_RNA (1)...(19): siRNA sense strand
gaugauucaagccauacaa

SEQ ID NO: 170006 - RNA, 19 nt, Homo sapiens
  misc_RNA (1)...(19): siRNA sense strand
ugaguggaaugggcaugaa

SEQ ID NO: 170007 - RNA, 19 nt, Homo sapiens
  misc_RNA (1)...(19): siRNA sense strand
cguaauggacggucagcaa

SEQ ID NO: 170008 - RNA, 19 nt, Homo sapiens
  misc_RNA (1)...(19): siRNA sense strand
gagagauaaagaugccauu

SEQ ID NO: 170009 - RNA, 19 nt, Homo sapiens
  misc_RNA (1)...(19): siRNA sense strand
agacagugaagauauaaca

SEQ ID NO: 170010 - RNA, 19 nt, Homo sapiens
  misc_RNA (1)...(19): siRNA sense strand
ucagacagugaagauauaa

SEQ ID NO: 170011 - RNA, 19 nt, Homo sapiens
  misc_RNA (1)...(19): siRNA sense strand
aauagugcagcccaugaua

SEQ ID NO: 170012 - RNA, 19 nt, Homo sapiens
  misc_RNA (1)...(19): siRNA sense strand
gggaaaaugccuaucgauu

SEQ ID NO: 170013 - RNA, 19 nt, Homo sapiens
  misc_RNA (1)...(19): siRNA sense strand
aaaagcaguuggcacaaga

SEQ ID NO: 170014 - RNA, 19 nt, Homo sapiens
  misc_RNA (1)...(19): siRNA sense strand
gaucaaaaucagacaguga

SEQ ID NO: 170015 - RNA, 19 nt, Homo sapiens
  misc_RNA (1)...(19): siRNA sense strand
caauuucugccaccgguau

SEQ ID NO: 170016 - RNA, 19 nt, Homo sapiens
  misc_RNA (1)...(19): siRNA sense strand
guggaaugggcaugaauau

SEQ ID NO: 170017 - RNA, 19 nt, Homo sapiens
  misc_RNA (1)...(19): siRNA sense strand
agagauaaagaugccauuu

SEQ ID NO: 170018 - RNA, 19 nt, Homo sapiens
  misc_RNA (1)...(19): siRNA sense strand
ccaguccaaccgagcagua

SEQ ID NO: 170019 - RNA, 19 nt, Homo sapiens
  misc_RNA (1)...(19): siRNA sense strand
auuaaugcccggagaagaa

SEQ ID NO: 170020 - RNA, 19 nt, Homo sapiens
  misc_RNA (1)...(19): siRNA sense strand
acgaugaugacccugauaa

SEQ ID NO: 170021 - RNA, 19 nt, Homo sapiens
  misc_RNA (1)...(19): siRNA sense strand
uaagguuucaucuauugga

SEQ ID NO: 170022 - RNA, 19 nt, Homo sapiens
  misc_RNA (1)...(19): siRNA sense strand
ggaccuaugaguggaaugg

SEQ ID NO: 170023 - RNA, 19 nt, Homo sapiens
  misc_RNA (1)...(19): siRNA sense strand
caugggcuccucugucaau

SEQ ID NO: 170024 - RNA, 19 nt, Homo sapiens
  misc_RNA (1)...(19): siRNA sense strand
gacagugaagauauaacaa

SEQ ID NO: 170025 - RNA, 19 nt, Homo sapiens
  misc_RNA (1)...(19): siRNA sense strand
aagguuucaucuauuggaa

SEQ ID NO: 170026 - RNA, 19 nt, Homo sapiens
  misc_RNA (1)...(19): siRNA sense strand
accgguauauuagcuguuu

SEQ ID NO: 170027 - RNA, 19 nt, Homo sapiens
  misc_RNA (1)...(19): siRNA sense strand
uagugcagcccaugauaga

SEQ ID NO: 170028 - RNA, 19 nt, Homo sapiens
  misc_RNA (1)...(19): siRNA sense strand
agaauagugcagcccauga

SEQ ID NO: 170029 - RNA, 19 nt, Homo sapiens
  misc_RNA (1)...(19): siRNA sense strand
gacgaugaugacccugaua

SEQ ID NO: 170030 - RNA, 19 nt, Homo sapiens
  misc_RNA (1)...(19): siRNA sense strand
acacgaauuaugugacaau

SEQ ID NO: 170031 - RNA, 19 nt, Homo sapiens
  misc_RNA (1)...(19): siRNA sense strand
augaagauauagccguguu

SEQ ID NO: 170032 - RNA, 19 nt, Homo sapiens
  misc_RNA (1)...(19): siRNA sense strand
ccagcccucuuggaacaga

SEQ ID NO: 170033 - RNA, 19 nt, Homo sapiens
  misc_RNA (1)...(19): siRNA sense strand
aguggaaugggcaugaaua

SEQ ID NO: 170034 - RNA, 19 nt, Homo sapiens
  misc_RNA (1)...(19): siRNA sense strand
agcaguaagucaaggaaca

SEQ ID NO: 170035 - RNA, 19 nt, Homo sapiens
  misc_RNA (1)...(19): siRNA sense strand
acgacgaucuaccccauua

SEQ ID NO: 170036 - RNA, 19 nt, Homo sapiens
  misc_RNA (1)...(19): siRNA sense strand
augaugacccugauaagga

SEQ ID NO: 170037 - RNA, 19 nt, Homo sapiens
  misc_RNA (1)...(19): siRNA sense strand
gggacaaguucuccaaaug

SEQ ID NO: 170038 - RNA, 19 nt, Homo sapiens
  misc_RNA (1)...(19): siRNA sense strand
ggacaaguucuccaaaugu

SEQ ID NO: 170039 - RNA, 19 nt, Homo sapiens
  misc_RNA (1)...(19): siRNA sense strand
ggagaucuguguucguaca

SEQ ID NO: 170040 - RNA, 19 nt, Homo sapiens
  misc_RNA (1)...(19): siRNA sense strand
aaggagaucuguguucgua

SEQ ID NO: 170041 - RNA, 19 nt, Homo sapiens
  misc_RNA (1)...(19): siRNA sense strand
gacaaguucuccaaaugug

SEQ ID NO: 170042 - RNA, 19 nt, Homo sapiens
  misc_RNA (1)...(19): siRNA sense strand
cgacaacccagacuacuau

SEQ ID NO: 170043 - RNA, 19 nt, Homo sapiens
  misc_RNA (1)...(19): siRNA sense strand
ucaacgaggucugcuucua

SEQ ID NO: 170044 - RNA, 19 nt, Homo sapiens
  misc_RNA (1)...(19): siRNA sense strand
gcaaacagugucucaacga

SEQ ID NO: 170045 - RNA, 19 nt, Homo sapiens
  misc_RNA (1)...(19): siRNA sense strand
ccuccgagcugaccucugu

SEQ ID NO: 170046 - RNA, 19 nt, Homo sapiens
  misc_RNA (1)...(19): siRNA sense strand
gcagcaaguccaacaggaa

SEQ ID NO: 170047 - RNA, 19 nt, Homo sapiens
  misc_RNA (1)...(19): siRNA sense strand
acacaggccuugcaaacag

SEQ ID NO: 170048 - RNA, 19 nt, Homo sapiens
  misc_RNA (1)...(19): siRNA sense strand
guguguacgucauuaacaa

SEQ ID NO: 170049 - RNA, 19 nt, Homo sapiens
  misc_RNA (1)...(19): siRNA sense strand
caacccagacuacuaugau

SEQ ID NO: 170050 - RNA, 19 nt, Homo sapiens
  misc_RNA (1)...(19): siRNA sense strand
gcacccgccucuacuccau

SEQ ID NO: 170051 - RNA, 19 nt, Homo sapiens
  misc_RNA (1)...(19): siRNA sense strand
cgggacaaguucuccaaau

SEQ ID NO: 170052 - RNA, 19 nt, Homo sapiens
  misc_RNA (1)...(19): siRNA sense strand
caacgaggucugcuucuac

SEQ ID NO: 170053 - RNA, 19 nt, Homo sapiens
  misc_RNA (1)...(19): siRNA sense strand
cuccaaauguggcgugaug

SEQ ID NO: 170054 - RNA, 19 nt, Homo sapiens
  misc_RNA (1)...(19): siRNA sense strand
gaucgacaacccagacuac

SEQ ID NO: 170055 - RNA, 19 nt, Homo sapiens
  misc_RNA (1)...(19): siRNA sense strand
gccuaccucuuccugcuau

SEQ ID NO: 170056 - RNA, 19 nt, Homo sapiens
  misc_RNA (1)...(19): siRNA sense strand
aacccagacuacuaugauu

SEQ ID NO: 170057 - RNA, 19 nt, Homo sapiens
  misc_RNA (1)...(19): siRNA sense strand
acccagacuacuaugauua

SEQ ID NO: 170058 - RNA, 19 nt, Homo sapiens
  misc_RNA (1)...(19): siRNA sense strand
cgccguguguacgucauua

SEQ ID NO: 170059 - RNA, 19 nt, Homo sapiens
  misc_RNA (1)...(19): siRNA sense strand
ucgacaacccagacuacua

SEQ ID NO: 170060 - RNA, 19 nt, Homo sapiens
  misc_RNA (1)...(19): siRNA sense strand
uuaacaaggagaucugugu

SEQ ID NO: 170061 - RNA, 19 nt, Homo sapiens
  misc_RNA (1)...(19): siRNA sense strand
guccaguacacccacuaua

SEQ ID NO: 170062 - RNA, 19 nt, Homo sapiens
  misc_RNA (1)...(19): siRNA sense strand
gggacaaguucuccaaaug

SEQ ID NO: 170063 - RNA, 19 nt, Homo sapiens
  misc_RNA (1)...(19): siRNA sense strand
ggacaaguucuccaaaugu

SEQ ID NO: 170064 - RNA, 19 nt, Homo sapiens
  misc_RNA (1)...(19): siRNA sense strand
ggagaucuguguucguaca

SEQ ID NO: 170065 - RNA, 19 nt, Homo sapiens
  misc_RNA (1)...(19): siRNA sense strand
aaggagaucuguguucgua

SEQ ID NO: 170066 - RNA, 19 nt, Homo sapiens
  misc_RNA (1)...(19): siRNA sense strand
gacaaguucuccaaaugug

SEQ ID NO: 170067 - RNA, 19 nt, Homo sapiens
  misc_RNA (1)...(19): siRNA sense strand
cgacaacccagacuacuau

SEQ ID NO: 170068 - RNA, 19 nt, Homo sapiens
  misc_RNA (1)...(19): siRNA sense strand
ucaacgaggucugcuucua

SEQ ID NO: 170069 - RNA, 19 nt, Homo sapiens
  misc_RNA (1)...(19): siRNA sense strand
gcaaacagugucucaacga

SEQ ID NO: 170070 - RNA, 19 nt, Homo sapiens
  misc_RNA (1)...(19): siRNA sense strand
ccuccgagcugaccucugu

SEQ ID NO: 170071 - RNA, 19 nt, Homo sapiens
  misc_RNA (1)...(19): siRNA sense strand
gcagcaaguccaacaggaa

SEQ ID NO: 170072 - RNA, 19 nt, Homo sapiens
  misc_RNA (1)...(19): siRNA sense strand
acacaggccuugcaaacag

SEQ ID NO: 170073 - RNA, 19 nt, Homo sapiens
  misc_RNA (1)...(19): siRNA sense strand
guguguacgucauuaacaa

SEQ ID NO: 170074 - RNA, 19 nt, Homo sapiens
  misc_RNA (1)...(19): siRNA sense strand
caacccagacuacuaugau

SEQ ID NO: 170075 - RNA, 19 nt, Homo sapiens
  misc_RNA (1)...(19): siRNA sense strand
gcacccgccucuacuccau

SEQ ID NO: 170076 - RNA, 19 nt, Homo sapiens
  misc_RNA (1)...(19): siRNA sense strand
cgggacaaguucuccaaau

SEQ ID NO: 170077 - RNA, 19 nt, Homo sapiens
  misc_RNA (1)...(19): siRNA sense strand
caacgaggucugcuucuac

SEQ ID NO: 170078 - RNA, 19 nt, Homo sapiens
  misc_RNA (1)...(19): siRNA sense strand
cuccaaauguggcgugaug

SEQ ID NO: 170079 - RNA, 19 nt, Homo sapiens
  misc_RNA (1)...(19): siRNA sense strand
gaucgacaacccagacuac

SEQ ID NO: 170080 - RNA, 19 nt, Homo sapiens
  misc_RNA (1)...(19): siRNA sense strand
gccuaccucuuccugcuau

SEQ ID NO: 170081 - RNA, 19 nt, Homo sapiens
  misc_RNA (1)...(19): siRNA sense strand
aacccagacuacuaugauu

SEQ ID NO: 170082 - RNA, 19 nt, Homo sapiens
  misc_RNA (1)...(19): siRNA sense strand
acccagacuacuaugauua

SEQ ID NO: 170083 - RNA, 19 nt, Homo sapiens
  misc_RNA (1)...(19): siRNA sense strand
cgccguguguacgucauua

SEQ ID NO: 170084 - RNA, 19 nt, Homo sapiens
  misc_RNA (1)...(19): siRNA sense strand
ucgacaacccagacuacua

SEQ ID NO: 170085 - RNA, 19 nt, Homo sapiens
  misc_RNA (1)...(19): siRNA sense strand
uuaacaaggagaucugugu

SEQ ID NO: 170086 - RNA, 19 nt, Homo sapiens
  misc_RNA (1)...(19): siRNA sense strand
guccaguacacccacuaua

SEQ ID NO: 170087 - RNA, 19 nt, Homo sapiens
  misc_RNA (1)...(19): siRNA sense strand
gaagugauguucuuuaaag

SEQ ID NO: 170088 - RNA, 19 nt, Homo sapiens
  misc_RNA (1)...(19): siRNA sense strand
ccacaaaguugaugcaguu

SEQ ID NO: 170089 - RNA, 19 nt, Homo sapiens
  misc_RNA (1)...(19): siRNA sense strand
ggagguaugaugaauauaa

SEQ ID NO: 170090 - RNA, 19 nt, Homo sapiens
  misc_RNA (1)...(19): siRNA sense strand
gaugaaagguggaccaaca

SEQ ID NO: 170091 - RNA, 19 nt, Homo sapiens
  misc_RNA (1)...(19): siRNA sense strand
gcaaaugcaggaauucuuu

SEQ ID NO: 170092 - RNA, 19 nt, Homo sapiens
  misc_RNA (1)...(19): siRNA sense strand
ggaauuggccacaaaguug

SEQ ID NO: 170093 - RNA, 19 nt, Homo sapiens
  misc_RNA (1)...(19): siRNA sense strand
gagaaagccuuccaacucu

SEQ ID NO: 170094 - RNA, 19 nt, Homo sapiens
  misc_RNA (1)...(19): siRNA sense strand
acaguaagcuaaccuuuga

SEQ ID NO: 170095 - RNA, 19 nt, Homo sapiens
  misc_RNA (1)...(19): siRNA sense strand
gaauauaaacgaucuaugg

SEQ ID NO: 170096 - RNA, 19 nt, Homo sapiens
  misc_RNA (1)...(19): siRNA sense strand
caucugaccuacaggauug

SEQ ID NO: 170097 - RNA, 19 nt, Homo sapiens
  misc_RNA (1)...(19): siRNA sense strand
gaacucggccauucucuug

SEQ ID NO: 170098 - RNA, 19 nt, Homo sapiens
  misc_RNA (1)...(19): siRNA sense strand
ugaagcaaaugcaggaauu

SEQ ID NO: 170099 - RNA, 19 nt, Homo sapiens
  misc_RNA (1)...(19): siRNA sense strand
gaaagugacugggaaacca

SEQ ID NO: 170100 - RNA, 19 nt, Homo sapiens
  misc_RNA (1)...(19): siRNA sense strand
ggaauucuuugggcugaaa

SEQ ID NO: 170101 - RNA, 19 nt, Homo sapiens
  misc_RNA (1)...(19): siRNA sense strand
gcuaaccuuugaugcuaua

SEQ ID NO: 170102 - RNA, 19 nt, Homo sapiens
  misc_RNA (1)...(19): siRNA sense strand
aaagguggaccaacaauuu

SEQ ID NO: 170103 - RNA, 19 nt, Homo sapiens
  misc_RNA (1)...(19): siRNA sense strand
agagcaagauguggacuua

SEQ ID NO: 170104 - RNA, 19 nt, Homo sapiens
  misc_RNA (1)...(19): siRNA sense strand
aaugauagcacaugacuuu

SEQ ID NO: 170105 - RNA, 19 nt, Homo sapiens
  misc_RNA (1)...(19): siRNA sense strand
ggacaucuacagcuccuuu

SEQ ID NO: 170106 - RNA, 19 nt, Homo sapiens
  misc_RNA (1)...(19): siRNA sense strand
gaaagguggaccaacaauu

SEQ ID NO: 170107 - RNA, 19 nt, Homo sapiens
  misc_RNA (1)...(19): siRNA sense strand
acuacaaccugaagaauga

SEQ ID NO: 170108 - RNA, 19 nt, Homo sapiens
  misc_RNA (1)...(19): siRNA sense strand
ggaacaagacaauacaaau

SEQ ID NO: 170109 - RNA, 19 nt, Homo sapiens
  misc_RNA (1)...(19): siRNA sense strand
aaacacaucugaccuacag

SEQ ID NO: 170110 - RNA, 19 nt, Homo sapiens
  misc_RNA (1)...(19): siRNA sense strand
agaaugugcuacacggaua

SEQ ID NO: 170111 - RNA, 19 nt, Homo sapiens
  misc_RNA (1)...(19): siRNA sense strand
cuagaacugugaagcauau

SEQ ID NO: 170112 - RNA, 19 nt, Homo sapiens
  misc_RNA (1)...(19): siRNA sense strand
uuucagagaguacaacuua

SEQ ID NO: 170113 - RNA, 19 nt, Homo sapiens
  misc_RNA (1)...(19): siRNA sense strand
ggccacaacugccaaaugg

SEQ ID NO: 170114 - RNA, 19 nt, Homo sapiens
  misc_RNA (1)...(19): siRNA sense strand
gaaaccagaugcugaaacc

SEQ ID NO: 170115 - RNA, 19 nt, Homo sapiens
  misc_RNA (1)...(19): siRNA sense strand
ggacaacucuccuuuugau

SEQ ID NO: 170116 - RNA, 19 nt, Homo sapiens
  misc_RNA (1)...(19): siRNA sense strand
gcagacaucaugauaucuu

SEQ ID NO: 170117 - RNA, 19 nt, Homo sapiens
  misc_RNA (1)...(19): siRNA sense strand
ucaagcagacaucaugaua

SEQ ID NO: 170118 - RNA, 19 nt, Homo sapiens
  misc_RNA (1)...(19): siRNA sense strand
gaaaucuugcucaugcuuu

SEQ ID NO: 170119 - RNA, 19 nt, Homo sapiens
  misc_RNA (1)...(19): siRNA sense strand
ccaacaauuucagagagua

SEQ ID NO: 170120 - RNA, 19 nt, Homo sapiens
  misc_RNA (1)...(19): siRNA sense strand
aagcuaaccuuugaugcua

SEQ ID NO: 170121 - RNA, 19 nt, Homo sapiens
  misc_RNA (1)...(19): siRNA sense strand
aagcagacaucaugauauc

SEQ ID NO: 170122 - RNA, 19 nt, Homo sapiens
  misc_RNA (1)...(19): siRNA sense strand
ugauggaccuggaggaaau

SEQ ID NO: 170123 - RNA, 19 nt, Homo sapiens
  misc_RNA (1)...(19): siRNA sense strand
gaauuggccacaaaguuga

SEQ ID NO: 170124 - RNA, 19 nt, Homo sapiens
  misc_RNA (1)...(19): siRNA sense strand
gcgcacaaaucccuucuac

SEQ ID NO: 170125 - RNA, 19 nt, Homo sapiens
  misc_RNA (1)...(19): siRNA sense strand
caaccaggcccagguauug

SEQ ID NO: 170126 - RNA, 19 nt, Homo sapiens
  misc_RNA (1)...(19): siRNA sense strand
gauguggagugccugaugu

SEQ ID NO: 170127 - RNA, 19 nt, Homo sapiens
  misc_RNA (1)...(19): siRNA sense strand
ggaccaacaauuucagaga

SEQ ID NO: 170128 - RNA, 19 nt, Homo sapiens
  misc_RNA (1)...(19): siRNA sense strand
ggaccuggaggaaaucuug

SEQ ID NO: 170129 - RNA, 19 nt, Homo sapiens
  misc_RNA (1)...(19): siRNA sense strand
ggaccaugccauugagaaa

SEQ ID NO: 170130 - RNA, 19 nt, Homo sapiens
  misc_RNA (1)...(19): siRNA sense strand
ccuacaggauugaaaauua

SEQ ID NO: 170131 - RNA, 19 nt, Homo sapiens
  misc_RNA (1)...(19): siRNA sense strand
cagacaucaugauaucuuu

SEQ ID NO: 170132 - RNA, 19 nt, Homo sapiens
  misc_RNA (1)...(19): siRNA sense strand
ugagaaagccuuccaacuc

SEQ ID NO: 170133 - RNA, 19 nt, Homo sapiens
  misc_RNA (1)...(19): siRNA sense strand
gacaguaagcuaaccuuug

SEQ ID NO: 170134 - RNA, 19 nt, Homo sapiens
  misc_RNA (1)...(19): siRNA sense strand
gagcucaauuucauuucug

SEQ ID NO: 170135 - RNA, 19 nt, Homo sapiens
  misc_RNA (1)...(19): siRNA sense strand
uuacgaauuugccgacaga

SEQ ID NO: 170136 - RNA, 19 nt, Homo sapiens
  misc_RNA (1)...(19): siRNA sense strand
cuggagguaugaugaauau

SEQ ID NO: 170137 - RNA, 19 nt, Homo sapiens
  misc_RNA (1)...(19): siRNA sense strand
gaaaagcggagaaauagug

SEQ ID NO: 170138 - RNA, 19 nt, Homo sapiens
  misc_RNA (1)...(19): siRNA sense strand
gaaaauuacacgccagauu

SEQ ID NO: 170139 - RNA, 19 nt, Homo sapiens
  misc_RNA (1)...(19): siRNA sense strand
cagcgacucuagaaacaca

SEQ ID NO: 170140 - RNA, 19 nt, Homo sapiens
  misc_RNA (1)...(19): siRNA sense strand
gauucuacaugcgcacaaa

SEQ ID NO: 170141 - RNA, 19 nt, Homo sapiens
  misc_RNA (1)...(19): siRNA sense strand
ggaaaucuugcucaugcuu

SEQ ID NO: 170142 - RNA, 19 nt, Homo sapiens
  misc_RNA (1)...(19): siRNA sense strand
caagcagacaucaugauau

SEQ ID NO: 170143 - RNA, 19 nt, Homo sapiens
  misc_RNA (1)...(19): siRNA sense strand
gaacugugaagcauaucga

SEQ ID NO: 170144 - RNA, 19 nt, Homo sapiens
  misc_RNA (1)...(19): siRNA sense strand
uaaagacagauucuacaug

SEQ ID NO: 170145 - RNA, 19 nt, Homo sapiens
  misc_RNA (1)...(19): siRNA sense strand
caaggucucugagggucaa

SEQ ID NO: 170146 - RNA, 19 nt, Homo sapiens
  misc_RNA (1)...(19): siRNA sense strand
uaucgaugcugcucuuucu

SEQ ID NO: 170147 - RNA, 19 nt, Homo sapiens
  misc_RNA (1)...(19): siRNA sense strand
ucaaagggaauaaguacug

SEQ ID NO: 170148 - RNA, 19 nt, Homo sapiens
  misc_RNA (1)...(19): siRNA sense strand
gaugggaggcaaguugaaa

SEQ ID NO: 170149 - RNA, 19 nt, Homo sapiens
  misc_RNA (1)...(19): siRNA sense strand
caaaguugaugcaguuuuc

SEQ ID NO: 170150 - RNA, 19 nt, Homo sapiens
  misc_RNA (1)...(19): siRNA sense strand
gaaacacaagagcaagaug

SEQ ID NO: 170151 - RNA, 19 nt, Homo sapiens
  misc_RNA (1)...(19): siRNA sense strand
ccaaaaugauagcacauga

SEQ ID NO: 170152 - RNA, 19 nt, Homo sapiens
  misc_RNA (1)...(19): siRNA sense strand
gaauuugccgacagagaug

SEQ ID NO: 170153 - RNA, 19 nt, Homo sapiens
  misc_RNA (1)...(19): siRNA sense strand
cgaauuugccgacagagau

SEQ ID NO: 170154 - RNA, 19 nt, Homo sapiens
  misc_RNA (1)...(19): siRNA sense strand
aaacacaagagcaagaugu

SEQ ID NO: 170155 - RNA, 19 nt, Homo sapiens
  misc_RNA (1)...(19): siRNA sense strand
cuuggacucucccauucua

SEQ ID NO: 170156 - RNA, 19 nt, Homo sapiens
  misc_RNA (1)...(19): siRNA sense strand
ggucaagcagacaucauga

SEQ ID NO: 170157 - RNA, 19 nt, Homo sapiens
  misc_RNA (1)...(19): siRNA sense strand
guugaaaagcggagaaaua

SEQ ID NO: 170158 - RNA, 19 nt, Homo sapiens
  misc_RNA (1)...(19): siRNA sense strand
gaauaaguacugggcuguu

SEQ ID NO: 170159 - RNA, 19 nt, Homo sapiens
  misc_RNA (1)...(19): siRNA sense strand
caaaagcgugugacaguaa

SEQ ID NO: 170160 - RNA, 19 nt, Homo sapiens
  misc_RNA (1)...(19): siRNA sense strand
ggaggaaaucuugcucaug

SEQ ID NO: 170161 - RNA, 19 nt, Homo sapiens
  misc_RNA (1)...(19): siRNA sense strand
gauagcacaugacuuuccu

SEQ ID NO: 170162 - RNA, 19 nt, Homo sapiens
  misc_RNA (1)...(19): siRNA sense strand
gaugcuauaacuacgauuc

SEQ ID NO: 170163 - RNA, 19 nt, Homo sapiens
  misc_RNA (1)...(19): siRNA sense strand
ugacaguaagcuaaccuuu

SEQ ID NO: 170164 - RNA, 19 nt, Homo sapiens
  misc_RNA (1)...(19): siRNA sense strand
ccaaaagcgugugacagua

SEQ ID NO: 170165 - RNA, 19 nt, Homo sapiens
  misc_RNA (1)...(19): siRNA sense strand
uacccuagcuacaccuuca

SEQ ID NO: 170166 - RNA, 19 nt, Homo sapiens
  misc_RNA (1)...(19): siRNA sense strand
ugaugaagcagcccagaug

SEQ ID NO: 170167 - RNA, 19 nt, Homo sapiens
  misc_RNA (1)...(19): siRNA sense strand
gaagcaaaugcaggaauuc

SEQ ID NO: 170168 - RNA, 19 nt, Homo sapiens
  misc_RNA (1)...(19): siRNA sense strand
uccuuuggcuucccuagaa

SEQ ID NO: 170169 - RNA, 19 nt, Homo sapiens
  misc_RNA (1)...(19): siRNA sense strand
uagcucaggaugacauuga

SEQ ID NO: 170170 - RNA, 19 nt, Homo sapiens
  misc_RNA (1)...(19): siRNA sense strand
guacaacuuacaucguguu

SEQ ID NO: 170171 - RNA, 19 nt, Homo sapiens
  misc_RNA (1)...(19): siRNA sense strand
caguggugauguucagcua

SEQ ID NO: 170172 - RNA, 19 nt, Homo sapiens
  misc_RNA (1)...(19): siRNA sense strand
cugaaacccugaaggugau

SEQ ID NO: 170173 - RNA, 19 nt, Homo sapiens
  misc_RNA (1)...(19): siRNA sense strand
aauaaguacugggcuguuc

SEQ ID NO: 170174 - RNA, 19 nt, Homo sapiens
  misc_RNA (1)...(19): siRNA sense strand
gagaucaucgggacaacuc

SEQ ID NO: 170175 - RNA, 19 nt, Homo sapiens
  misc_RNA (1)...(19): siRNA sense strand
ucagagaguacaacuuaca

SEQ ID NO: 170176 - RNA, 19 nt, Homo sapiens
  misc_RNA (1)...(19): siRNA sense strand
gaugaagcagcccagaugu

SEQ ID NO: 170177 - RNA, 19 nt, Homo sapiens
  misc_RNA (1)...(19): siRNA sense strand
aguaaugucacaccucuga

SEQ ID NO: 170178 - RNA, 19 nt, Homo sapiens
  misc_RNA (1)...(19): siRNA sense strand
uagaaacacaagagcaaga

SEQ ID NO: 170179 - RNA, 19 nt, Homo sapiens
  misc_RNA (1)...(19): siRNA sense strand
uggaacaagacaauacaaa

SEQ ID NO: 170180 - RNA, 19 nt, Homo sapiens
  misc_RNA (1)...(19): siRNA sense strand
ugagcucaauuucauuucu

SEQ ID NO: 170181 - RNA, 19 nt, Homo sapiens
  misc_RNA (1)...(19): siRNA sense strand
gcugaaagugacugggaaa

SEQ ID NO: 170182 - RNA, 19 nt, Homo sapiens
  misc_RNA (1)...(19): siRNA sense strand
ucacaccucugacauucac

SEQ ID NO: 170183 - RNA, 19 nt, Homo sapiens
  misc_RNA (1)...(19): siRNA sense strand
gcgugugacaguaagcuaa

SEQ ID NO: 170184 - RNA, 19 nt, Homo sapiens
  misc_RNA (1)...(19): siRNA sense strand
uggaauuggccacaaaguu

SEQ ID NO: 170185 - RNA, 19 nt, Homo sapiens
  misc_RNA (1)...(19): siRNA sense strand
ccuagaacugugaagcaua

SEQ ID NO: 170186 - RNA, 19 nt, Homo sapiens
  misc_RNA (1)...(19): siRNA sense strand
gcucaugaacucggccauu

SEQ ID NO: 170187 - RNA, 19 nt, Homo sapiens
  misc_RNA (1)...(19): siRNA sense strand
acuaauagcugaugacuuu

SEQ ID NO: 170188 - RNA, 19 nt, Homo sapiens
  misc_RNA (1)...(19): siRNA sense strand
uaagguugaugcuguauua

SEQ ID NO: 170189 - RNA, 19 nt, Homo sapiens
  misc_RNA (1)...(19): siRNA sense strand
cauacaggauugugaauua

SEQ ID NO: 170190 - RNA, 19 nt, Homo sapiens
  misc_RNA (1)...(19): siRNA sense strand
ucacagagcucgcccaguu

SEQ ID NO: 170191 - RNA, 19 nt, Homo sapiens
  misc_RNA (1)...(19): siRNA sense strand
ggacaguaaucucauuguu

SEQ ID NO: 170192 - RNA, 19 nt, Homo sapiens
  misc_RNA (1)...(19): siRNA sense strand
gauggugacacacauauua

SEQ ID NO: 170193 - RNA, 19 nt, Homo sapiens
  misc_RNA (1)...(19): siRNA sense strand
gauauucacuuugaugaug

SEQ ID NO: 170194 - RNA, 19 nt, Homo sapiens
  misc_RNA (1)...(19): siRNA sense strand
caucacaguuugaguuuga

SEQ ID NO: 170195 - RNA, 19 nt, Homo sapiens
  misc_RNA (1)...(19): siRNA sense strand
gacaguaaucucauuguua

SEQ ID NO: 170196 - RNA, 19 nt, Homo sapiens
  misc_RNA (1)...(19): siRNA sense strand
gagcaaggcuucccuagac

SEQ ID NO: 170197 - RNA, 19 nt, Homo sapiens
  misc_RNA (1)...(19): siRNA sense strand
cagggaagcuagacacuga

SEQ ID NO: 170198 - RNA, 19 nt, Homo sapiens
  misc_RNA (1)...(19): siRNA sense strand
ggacacaguuuggcucaug

SEQ ID NO: 170199 - RNA, 19 nt, Homo sapiens
  misc_RNA (1)...(19): siRNA sense strand
ugagaaagcucugaaaguc

SEQ ID NO: 170200 - RNA, 19 nt, Homo sapiens
  misc_RNA (1)...(19): siRNA sense strand
ugaaggagaggcugauaua

SEQ ID NO: 170201 - RNA, 19 nt, Homo sapiens
  misc_RNA (1)...(19): siRNA sense strand
gccaagagaugcuguugau

SEQ ID NO: 170202 - RNA, 19 nt, Homo sapiens
  misc_RNA (1)...(19): siRNA sense strand
caagagaugcuguugauuc

SEQ ID NO: 170203 - RNA, 19 nt, Homo sapiens
  misc_RNA (1)...(19): siRNA sense strand
gaucaucacaguuugaguu

SEQ ID NO: 170204 - RNA, 19 nt, Homo sapiens
  misc_RNA (1)...(19): siRNA sense strand
ggcccucucuuccaucaua

SEQ ID NO: 170205 - RNA, 19 nt, Homo sapiens
  misc_RNA (1)...(19): siRNA sense strand
gaagaaaggacaguaaucu

SEQ ID NO: 170206 - RNA, 19 nt, Homo sapiens
  misc_RNA (1)...(19): siRNA sense strand
acaagcagguuauccaaga

SEQ ID NO: 170207 - RNA, 19 nt, Homo sapiens
  misc_RNA (1)...(19): siRNA sense strand
ucacuuugaugaugaugaa

SEQ ID NO: 170208 - RNA, 19 nt, Homo sapiens
  misc_RNA (1)...(19): siRNA sense strand
gaguugagccuaagguuga

SEQ ID NO: 170209 - RNA, 19 nt, Homo sapiens
  misc_RNA (1)...(19): siRNA sense strand
aggagaggcugauauaaug

SEQ ID NO: 170210 - RNA, 19 nt, Homo sapiens
  misc_RNA (1)...(19): siRNA sense strand
gaaggagaggcugauauaa

SEQ ID NO: 170211 - RNA, 19 nt, Homo sapiens
  misc_RNA (1)...(19): siRNA sense strand
gaaaauugaugcagcuguu

SEQ ID NO: 170212 - RNA, 19 nt, Homo sapiens
  misc_RNA (1)...(19): siRNA sense strand
caagugugauccugcuuug

SEQ ID NO: 170213 - RNA, 19 nt, Homo sapiens
  misc_RNA (1)...(19): siRNA sense strand
ggaaaacccaccuuacaua

SEQ ID NO: 170214 - RNA, 19 nt, Homo sapiens
  misc_RNA (1)...(19): siRNA sense strand
aggcuucccuagacuaaua

SEQ ID NO: 170215 - RNA, 19 nt, Homo sapiens
  misc_RNA (1)...(19): siRNA sense strand
aaugaucucuuucgcaguu

SEQ ID NO: 170216 - RNA, 19 nt, Homo sapiens
  misc_RNA (1)...(19): siRNA sense strand
gaacccugaaccugaauuu

SEQ ID NO: 170217 - RNA, 19 nt, Homo sapiens
  misc_RNA (1)...(19): siRNA sense strand
acacugaagcuuugaugua

SEQ ID NO: 170218 - RNA, 19 nt, Homo sapiens
  misc_RNA (1)...(19): siRNA sense strand
ggagauauucacuuugaug

SEQ ID NO: 170219 - RNA, 19 nt, Homo sapiens
  misc_RNA (1)...(19): siRNA sense strand
caucagaggaaaugaggua

SEQ ID NO: 170220 - RNA, 19 nt, Homo sapiens
  misc_RNA (1)...(19): siRNA sense strand
gagauauucacuuugauga

SEQ ID NO: 170221 - RNA, 19 nt, Homo sapiens
  misc_RNA (1)...(19): siRNA sense strand
aaaggacaguaaucucauu

SEQ ID NO: 170222 - RNA, 19 nt, Homo sapiens
  misc_RNA (1)...(19): siRNA sense strand
gcccagcaauaccuagaaa

SEQ ID NO: 170223 - RNA, 19 nt, Homo sapiens
  misc_RNA (1)...(19): siRNA sense strand
gaauuauacaccagauuug

SEQ ID NO: 170224 - RNA, 19 nt, Homo sapiens
  misc_RNA (1)...(19): siRNA sense strand
gaagaggugacuccacuca

SEQ ID NO: 170225 - RNA, 19 nt, Homo sapiens
  misc_RNA (1)...(19): siRNA sense strand
caccuuacauacaggauug

SEQ ID NO: 170226 - RNA, 19 nt, Homo sapiens
  misc_RNA (1)...(19): siRNA sense strand
ugacacacauauuaaagag

SEQ ID NO: 170227 - RNA, 19 nt, Homo sapiens
  misc_RNA (1)...(19): siRNA sense strand
caucaggcaccaauuuauu

SEQ ID NO: 170228 - RNA, 19 nt, Homo sapiens
  misc_RNA (1)...(19): siRNA sense strand
caccagauuugccaagaga

SEQ ID NO: 170229 - RNA, 19 nt, Homo sapiens
  misc_RNA (1)...(19): siRNA sense strand
cagaggaaaugagguacaa

SEQ ID NO: 170230 - RNA, 19 nt, Homo sapiens
  misc_RNA (1)...(19): siRNA sense strand
gaaaggacaguaaucucau

SEQ ID NO: 170231 - RNA, 19 nt, Homo sapiens
  misc_RNA (1)...(19): siRNA sense strand
gcaaggcuucccuagacua

SEQ ID NO: 170232 - RNA, 19 nt, Homo sapiens
  misc_RNA (1)...(19): siRNA sense strand
ccucguugcugcucaugaa

SEQ ID NO: 170233 - RNA, 19 nt, Homo sapiens
  misc_RNA (1)...(19): siRNA sense strand
ggagaggcugauauaauga

SEQ ID NO: 170234 - RNA, 19 nt, Homo sapiens
  misc_RNA (1)...(19): siRNA sense strand
ggagcaaggcuucccuaga

SEQ ID NO: 170235 - RNA, 19 nt, Homo sapiens
  misc_RNA (1)...(19): siRNA sense strand
aaaaggaugugaaacaguu

SEQ ID NO: 170236 - RNA, 19 nt, Homo sapiens
  misc_RNA (1)...(19): siRNA sense strand
caaggcuucccuagacuaa

SEQ ID NO: 170237 - RNA, 19 nt, Homo sapiens
  misc_RNA (1)...(19): siRNA sense strand
gcaucaggcaccaauuuau

SEQ ID NO: 170238 - RNA, 19 nt, Homo sapiens
  misc_RNA (1)...(19): siRNA sense strand
auggagauauucacuuuga

SEQ ID NO: 170239 - RNA, 19 nt, Homo sapiens
  misc_RNA (1)...(19): siRNA sense strand
agaaaggacaguaaucuca

SEQ ID NO: 170240 - RNA, 19 nt, Homo sapiens
  misc_RNA (1)...(19): siRNA sense strand
uccaaggaaugcagaaguu

SEQ ID NO: 170241 - RNA, 19 nt, Homo sapiens
  misc_RNA (1)...(19): siRNA sense strand
guacaagcagguuauccaa

SEQ ID NO: 170242 - RNA, 19 nt, Homo sapiens
  misc_RNA (1)...(19): siRNA sense strand
aaacccaccuuacauacag

SEQ ID NO: 170243 - RNA, 19 nt, Homo sapiens
  misc_RNA (1)...(19): siRNA sense strand
gccuaagguugaugcugua

SEQ ID NO: 170244 - RNA, 19 nt, Homo sapiens
  misc_RNA (1)...(19): siRNA sense strand
caguggaucaucacaguuu

SEQ ID NO: 170245 - RNA, 19 nt, Homo sapiens
  misc_RNA (1)...(19): siRNA sense strand
ccaagugugauccugcuuu

SEQ ID NO: 170246 - RNA, 19 nt, Homo sapiens
  misc_RNA (1)...(19): siRNA sense strand
uauccaagaggcauccaua

SEQ ID NO: 170247 - RNA, 19 nt, Homo sapiens
  misc_RNA (1)...(19): siRNA sense strand
aagagaugcuguugauucu

SEQ ID NO: 170248 - RNA, 19 nt, Homo sapiens
  misc_RNA (1)...(19): siRNA sense strand
caacacugaagcuuugaug

SEQ ID NO: 170249 - RNA, 19 nt, Homo sapiens
  misc_RNA (1)...(19): siRNA sense strand
agccaacacugaagcuuug

SEQ ID NO: 170250 - RNA, 19 nt, Homo sapiens
  misc_RNA (1)...(19): siRNA sense strand
cagccaacacugaagcuuu

SEQ ID NO: 170251 - RNA, 19 nt, Homo sapiens
  misc_RNA (1)...(19): siRNA sense strand
aaggagaggcugauauaau

SEQ ID NO: 170252 - RNA, 19 nt, Homo sapiens
  misc_RNA (1)...(19): siRNA sense strand
uuagaagaaaggacaguaa

SEQ ID NO: 170253 - RNA, 19 nt, Homo sapiens
  misc_RNA (1)...(19): siRNA sense strand
gcggacaaauacuggagau

SEQ ID NO: 170254 - RNA, 19 nt, Homo sapiens
  misc_RNA (1)...(19): siRNA sense strand
gauauaaugaucucuuucg

SEQ ID NO: 170255 - RNA, 19 nt, Homo sapiens
  misc_RNA (1)...(19): siRNA sense strand
gaagcuagacacugacacu

SEQ ID NO: 170256 - RNA, 19 nt, Homo sapiens
  misc_RNA (1)...(19): siRNA sense strand
uacuggagauuugaugaaa

SEQ ID NO: 170257 - RNA, 19 nt, Homo sapiens
  misc_RNA (1)...(19): siRNA sense strand
gaaaacauacuucuuugca

SEQ ID NO: 170258 - RNA, 19 nt, Homo sapiens
  misc_RNA (1)...(19): siRNA sense strand
gagaaagcucugaaagucu

SEQ ID NO: 170259 - RNA, 19 nt, Homo sapiens
  misc_RNA (1)...(19): siRNA sense strand
uuacauacaggauugugaa

SEQ ID NO: 170260 - RNA, 19 nt, Homo sapiens
  misc_RNA (1)...(19): siRNA sense strand
guguggaguuccugacguu

SEQ ID NO: 170261 - RNA, 19 nt, Homo sapiens
  misc_RNA (1)...(19): siRNA sense strand
gugacacacauauuaaaga

SEQ ID NO: 170262 - RNA, 19 nt, Homo sapiens
  misc_RNA (1)...(19): siRNA sense strand
agcaauaccuagaaaagua

SEQ ID NO: 170263 - RNA, 19 nt, Homo sapiens
  misc_RNA (1)...(19): siRNA sense strand
gcugauauaaugaucucuu

SEQ ID NO: 170264 - RNA, 19 nt, Homo sapiens
  misc_RNA (1)...(19): siRNA sense strand
ggaggugacagggaagcua

SEQ ID NO: 170265 - RNA, 19 nt, Homo sapiens
  misc_RNA (1)...(19): siRNA sense strand
gcuguugauucugccauug

SEQ ID NO: 170266 - RNA, 19 nt, Homo sapiens
  misc_RNA (1)...(19): siRNA sense strand
ggauggugacacacauauu

SEQ ID NO: 170267 - RNA, 19 nt, Homo sapiens
  misc_RNA (1)...(19): siRNA sense strand
cuucuucaguggaucauca

SEQ ID NO: 170268 - RNA, 19 nt, Homo sapiens
  misc_RNA (1)...(19): siRNA sense strand
cuggaacccugaaccugaa

SEQ ID NO: 170269 - RNA, 19 nt, Homo sapiens
  misc_RNA (1)...(19): siRNA sense strand
ugacuccacucacauucuc

SEQ ID NO: 170270 - RNA, 19 nt, Homo sapiens
  misc_RNA (1)...(19): siRNA sense strand
acaggauugugaauuauac

SEQ ID NO: 170271 - RNA, 19 nt, Homo sapiens
  misc_RNA (1)...(19): siRNA sense strand
uagaagaaaggacaguaau

SEQ ID NO: 170272 - RNA, 19 nt, Homo sapiens
  misc_RNA (1)...(19): siRNA sense strand
gagaggcugauauaaugau

SEQ ID NO: 170273 - RNA, 19 nt, Homo sapiens
  misc_RNA (1)...(19): siRNA sense strand
uuaaagaacauggagacuu

SEQ ID NO: 170274 - RNA, 19 nt, Homo sapiens
  misc_RNA (1)...(19): siRNA sense strand
cuagacuaauagcugauga

SEQ ID NO: 170275 - RNA, 19 nt, Homo sapiens
  misc_RNA (1)...(19): siRNA sense strand
ucucuuccaucauauuugg

SEQ ID NO: 170276 - RNA, 19 nt, Homo sapiens
  misc_RNA (1)...(19): siRNA sense strand
cacugaagcuuugauguac

SEQ ID NO: 170277 - RNA, 19 nt, Homo sapiens
  misc_RNA (1)...(19): siRNA sense strand
ugcaucaggcaccaauuua

SEQ ID NO: 170278 - RNA, 19 nt, Homo sapiens
  misc_RNA (1)...(19): siRNA sense strand
ugagaugccagccaagugu

SEQ ID NO: 170279 - RNA, 19 nt, Homo sapiens
  misc_RNA (1)...(19): siRNA sense strand
ggugacacacauauuaaag

SEQ ID NO: 170280 - RNA, 19 nt, Homo sapiens
  misc_RNA (1)...(19): siRNA sense strand
caggauggugacacacaua

SEQ ID NO: 170281 - RNA, 19 nt, Homo sapiens
  misc_RNA (1)...(19): siRNA sense strand
uuccaggaguugagccuaa

SEQ ID NO: 170282 - RNA, 19 nt, Homo sapiens
  misc_RNA (1)...(19): siRNA sense strand
caagcagguuauccaagag

SEQ ID NO: 170283 - RNA, 19 nt, Homo sapiens
  misc_RNA (1)...(19): siRNA sense strand
ugaucucuuucgcaguuaa

SEQ ID NO: 170284 - RNA, 19 nt, Homo sapiens
  misc_RNA (1)...(19): siRNA sense strand
ccaggauggugacacacau

SEQ ID NO: 170285 - RNA, 19 nt, Homo sapiens
  misc_RNA (1)...(19): siRNA sense strand
ugaugacuuuccaggaguu

SEQ ID NO: 170286 - RNA, 19 nt, Homo sapiens
  misc_RNA (1)...(19): siRNA sense strand
caccuggaccugggcuuua

SEQ ID NO: 170287 - RNA, 19 nt, Homo sapiens
  misc_RNA (1)...(19): siRNA sense strand
ccaaggaucuaaccaauuu

SEQ ID NO: 170288 - RNA, 19 nt, Homo sapiens
  misc_RNA (1)...(19): siRNA sense strand
ggugagagauacuuagaaa

SEQ ID NO: 170289 - RNA, 19 nt, Homo sapiens
  misc_RNA (1)...(19): siRNA sense strand
gaugacaaauacugguuaa

SEQ ID NO: 170290 - RNA, 19 nt, Homo sapiens
  misc_RNA (1)...(19): siRNA sense strand
caaagaccaguguuaauuu

SEQ ID NO: 170291 - RNA, 19 nt, Homo sapiens
  misc_RNA (1)...(19): siRNA sense strand
ccaaacugauuaccaagaa

SEQ ID NO: 170292 - RNA, 19 nt, Homo sapiens
  misc_RNA (1)...(19): siRNA sense strand
gaugaaaggagacagauga

SEQ ID NO: 170293 - RNA, 19 nt, Homo sapiens
  misc_RNA (1)...(19): siRNA sense strand
gaugcagucuucuauucua

SEQ ID NO: 170294 - RNA, 19 nt, Homo sapiens
  misc_RNA (1)...(19): siRNA sense strand
uggcaaagguggaauccua

SEQ ID NO: 170295 - RNA, 19 nt, Homo sapiens
  misc_RNA (1)...(19): siRNA sense strand
ccaaagaccaguguuaauu

SEQ ID NO: 170296 - RNA, 19 nt, Homo sapiens
  misc_RNA (1)...(19): siRNA sense strand
gaaaagcaauagcugguuu

SEQ ID NO: 170297 - RNA, 19 nt, Homo sapiens
  misc_RNA (1)...(19): siRNA sense strand
aaacaaacuuccagugaca

SEQ ID NO: 170298 - RNA, 19 nt, Homo sapiens
  misc_RNA (1)...(19): siRNA sense strand
ucacuaccgugggaaauaa

SEQ ID NO: 170299 - RNA, 19 nt, Homo sapiens
  misc_RNA (1)...(19): siRNA sense strand
caaguauggaguaauguua

SEQ ID NO: 170300 - RNA, 19 nt, Homo sapiens
  misc_RNA (1)...(19): siRNA sense strand
ggaccuggaucuggcauug

SEQ ID NO: 170301 - RNA, 19 nt, Homo sapiens
  misc_RNA (1)...(19): siRNA sense strand
gaaauugaagccagaaauc

SEQ ID NO: 170302 - RNA, 19 nt, Homo sapiens
  misc_RNA (1)...(19): siRNA sense strand
agcaauagcugguuugguu

SEQ ID NO: 170303 - RNA, 19 nt, Homo sapiens
  misc_RNA (1)...(19): siRNA sense strand
ggaaacauuauaucaccua

SEQ ID NO: 170304 - RNA, 19 nt, Homo sapiens
  misc_RNA (1)...(19): siRNA sense strand
caaauuaucccaagagcau

SEQ ID NO: 170305 - RNA, 19 nt, Homo sapiens
  misc_RNA (1)...(19): siRNA sense strand
uaagaccagagccaaauua

SEQ ID NO: 170306 - RNA, 19 nt, Homo sapiens
  misc_RNA (1)...(19): siRNA sense strand
gaccaaagaccaguguuaa

SEQ ID NO: 170307 - RNA, 19 nt, Homo sapiens
  misc_RNA (1)...(19): siRNA sense strand
gaggacgaauucuggacua

SEQ ID NO: 170308 - RNA, 19 nt, Homo sapiens
  misc_RNA (1)...(19): siRNA sense strand
uauaucaccuacagaauca

SEQ ID NO: 170309 - RNA, 19 nt, Homo sapiens
  misc_RNA (1)...(19): siRNA sense strand
gcugaagguuucugagaga

SEQ ID NO: 170310 - RNA, 19 nt, Homo sapiens
  misc_RNA (1)...(19): siRNA sense strand
ccucucugcugaugacaua

SEQ ID NO: 170311 - RNA, 19 nt, Homo sapiens
  misc_RNA (1)...(19): siRNA sense strand
cgagauuggccauuccuua

SEQ ID NO: 170312 - RNA, 19 nt, Homo sapiens
  misc_RNA (1)...(19): siRNA sense strand
guagauaaccaguauugga

SEQ ID NO: 170313 - RNA, 19 nt, Homo sapiens
  misc_RNA (1)...(19): siRNA sense strand
uccaaaggcuguaauguuc

SEQ ID NO: 170314 - RNA, 19 nt, Homo sapiens
  misc_RNA (1)...(19): siRNA sense strand
caacacauuucgccucucu

SEQ ID NO: 170315 - RNA, 19 nt, Homo sapiens
  misc_RNA (1)...(19): siRNA sense strand
gaagccagaaaucaaguuu

SEQ ID NO: 170316 - RNA, 19 nt, Homo sapiens
  misc_RNA (1)...(19): siRNA sense strand
gccaaauccugacaauuca

SEQ ID NO: 170317 - RNA, 19 nt, Homo sapiens
  misc_RNA (1)...(19): siRNA sense strand
aaccaacgcuugccaaauc

SEQ ID NO: 170318 - RNA, 19 nt, Homo sapiens
  misc_RNA (1)...(19): siRNA sense strand
guauggaggaaacauuaua

SEQ ID NO: 170319 - RNA, 19 nt, Homo sapiens
  misc_RNA (1)...(19): siRNA sense strand
gaugauggacccugguuau

SEQ ID NO: 170320 - RNA, 19 nt, Homo sapiens
  misc_RNA (1)...(19): siRNA sense strand
gagccaaauuaucccaaga

SEQ ID NO: 170321 - RNA, 19 nt, Homo sapiens
  misc_RNA (1)...(19): siRNA sense strand
gguuaucccaaacugauua

SEQ ID NO: 170322 - RNA, 19 nt, Homo sapiens
  misc_RNA (1)...(19): siRNA sense strand
ggacccugguuaucccaaa

SEQ ID NO: 170323 - RNA, 19 nt, Homo sapiens
  misc_RNA (1)...(19): siRNA sense strand
ccaaaacacugaaaagcaa

SEQ ID NO: 170324 - RNA, 19 nt, Homo sapiens
  misc_RNA (1)...(19): siRNA sense strand
gaaagugaccgggcaacug

SEQ ID NO: 170325 - RNA, 19 nt, Homo sapiens
  misc_RNA (1)...(19): siRNA sense strand
gggaugcacauuucgauga

SEQ ID NO: 170326 - RNA, 19 nt, Homo sapiens
  misc_RNA (1)...(19): siRNA sense strand
uuacacaccugacaugaac

SEQ ID NO: 170327 - RNA, 19 nt, Homo sapiens
  misc_RNA (1)...(19): siRNA sense strand
ugacauacguggcauucag

SEQ ID NO: 170328 - RNA, 19 nt, Homo sapiens
  misc_RNA (1)...(19): siRNA sense strand
gcacuucuugggucugaaa

SEQ ID NO: 170329 - RNA, 19 nt, Homo sapiens
  misc_RNA (1)...(19): siRNA sense strand
agaccaaagaccaguguua

SEQ ID NO: 170330 - RNA, 19 nt, Homo sapiens
  misc_RNA (1)...(19): siRNA sense strand
gaaccaacgcuugccaaau

SEQ ID NO: 170331 - RNA, 19 nt, Homo sapiens
  misc_RNA (1)...(19): siRNA sense strand
gagauuggccauuccuuag

SEQ ID NO: 170332 - RNA, 19 nt, Homo sapiens
  misc_RNA (1)...(19): siRNA sense strand
ucaccuacagaaucaauaa

SEQ ID NO: 170333 - RNA, 19 nt, Homo sapiens
  misc_RNA (1)...(19): siRNA sense strand
uaaaauugaugcagucuuc

SEQ ID NO: 170334 - RNA, 19 nt, Homo sapiens
  misc_RNA (1)...(19): siRNA sense strand
gaccagagccaaauuaucc

SEQ ID NO: 170335 - RNA, 19 nt, Homo sapiens
  misc_RNA (1)...(19): siRNA sense strand
ggucuuggccauucuagug

SEQ ID NO: 170336 - RNA, 19 nt, Homo sapiens
  misc_RNA (1)...(19): siRNA sense strand
ggccauuccuuaggucuug

SEQ ID NO: 170337 - RNA, 19 nt, Homo sapiens
  misc_RNA (1)...(19): siRNA sense strand
ggaucuaaccaauuugaau

SEQ ID NO: 170338 - RNA, 19 nt, Homo sapiens
  misc_RNA (1)...(19): siRNA sense strand
guggaaacuuaaugaagga

SEQ ID NO: 170339 - RNA, 19 nt, Homo sapiens
  misc_RNA (1)...(19): siRNA sense strand
ugccaaauccugacaauuc

SEQ ID NO: 170340 - RNA, 19 nt, Homo sapiens
  misc_RNA (1)...(19): siRNA sense strand
cauuauaucaccuacagaa

SEQ ID NO: 170341 - RNA, 19 nt, Homo sapiens
  misc_RNA (1)...(19): siRNA sense strand
ggaaacuuaaugaaggaaa

SEQ ID NO: 170342 - RNA, 19 nt, Homo sapiens
  misc_RNA (1)...(19): siRNA sense strand
ucacugcuguucacgagau

SEQ ID NO: 170343 - RNA, 19 nt, Homo sapiens
  misc_RNA (1)...(19): siRNA sense strand
auaaacaaacuuccaguga

SEQ ID NO: 170344 - RNA, 19 nt, Homo sapiens
  misc_RNA (1)...(19): siRNA sense strand
gagcauacauucuuuuggu

SEQ ID NO: 170345 - RNA, 19 nt, Homo sapiens
  misc_RNA (1)...(19): siRNA sense strand
ccguauggaggaaacauua

SEQ ID NO: 170346 - RNA, 19 nt, Homo sapiens
  misc_RNA (1)...(19): siRNA sense strand
ggaugcacauuucgaugag

SEQ ID NO: 170347 - RNA, 19 nt, Homo sapiens
  misc_RNA (1)...(19): siRNA sense strand
uaaccaguauuggagguau

SEQ ID NO: 170348 - RNA, 19 nt, Homo sapiens
  misc_RNA (1)...(19): siRNA sense strand
uccaagaaaugcagcacuu

SEQ ID NO: 170349 - RNA, 19 nt, Homo sapiens
  misc_RNA (1)...(19): siRNA sense strand
cgugggaaauaagaucuuu

SEQ ID NO: 170350 - RNA, 19 nt, Homo sapiens
  misc_RNA (1)...(19): siRNA sense strand
ccaaguauggaguaauguu

SEQ ID NO: 170351 - RNA, 19 nt, Homo sapiens
  misc_RNA (1)...(19): siRNA sense strand
ccaauuugaauaugacuuc

SEQ ID NO: 170352 - RNA, 19 nt, Homo sapiens
  misc_RNA (1)...(19): siRNA sense strand
gcagucuucuauucuaaaa

SEQ ID NO: 170353 - RNA, 19 nt, Homo sapiens
  misc_RNA (1)...(19): siRNA sense strand
cagcacuucuugggucuga

SEQ ID NO: 170354 - RNA, 19 nt, Homo sapiens
  misc_RNA (1)...(19): siRNA sense strand
ggaaucgggccuaaaauug

SEQ ID NO: 170355 - RNA, 19 nt, Homo sapiens
  misc_RNA (1)...(19): siRNA sense strand
gauuggccauuccuuaggu

SEQ ID NO: 170356 - RNA, 19 nt, Homo sapiens
  misc_RNA (1)...(19): siRNA sense strand
caaggaaucgggccuaaaa

SEQ ID NO: 170357 - RNA, 19 nt, Homo sapiens
  misc_RNA (1)...(19): siRNA sense strand
ggcauucagucccuguaug

SEQ ID NO: 170358 - RNA, 19 nt, Homo sapiens
  misc_RNA (1)...(19): siRNA sense strand
ugacuacgcaauccggaaa

SEQ ID NO: 170359 - RNA, 19 nt, Homo sapiens
  misc_RNA (1)...(19): siRNA sense strand
uugaugcagucuucuauuc

SEQ ID NO: 170360 - RNA, 19 nt, Homo sapiens
  misc_RNA (1)...(19): siRNA sense strand
gaaucgggccuaaaauuga

SEQ ID NO: 170361 - RNA, 19 nt, Homo sapiens
  misc_RNA (1)...(19): siRNA sense strand
uauuggagguaugaugaaa

SEQ ID NO: 170362 - RNA, 19 nt, Homo sapiens
  misc_RNA (1)...(19): siRNA sense strand
gaauucuggacuacacauu

SEQ ID NO: 170363 - RNA, 19 nt, Homo sapiens
  misc_RNA (1)...(19): siRNA sense strand
ggaggaaacauuauaucac

SEQ ID NO: 170364 - RNA, 19 nt, Homo sapiens
  misc_RNA (1)...(19): siRNA sense strand
ugaaauugaagccagaaau

SEQ ID NO: 170365 - RNA, 19 nt, Homo sapiens
  misc_RNA (1)...(19): siRNA sense strand
acacaggcauggcugacau

SEQ ID NO: 170366 - RNA, 19 nt, Homo sapiens
  misc_RNA (1)...(19): siRNA sense strand
caugaaccgugaggauguu

SEQ ID NO: 170367 - RNA, 19 nt, Homo sapiens
  misc_RNA (1)...(19): siRNA sense strand
cuuuguagauaaccaguau

SEQ ID NO: 170368 - RNA, 19 nt, Homo sapiens
  misc_RNA (1)...(19): siRNA sense strand
auagcugguuugguuguua

SEQ ID NO: 170369 - RNA, 19 nt, Homo sapiens
  misc_RNA (1)...(19): siRNA sense strand
aggcauggcugacauuuug

SEQ ID NO: 170370 - RNA, 19 nt, Homo sapiens
  misc_RNA (1)...(19): siRNA sense strand
gcuauuuggugagagauac

SEQ ID NO: 170371 - RNA, 19 nt, Homo sapiens
  misc_RNA (1)...(19): siRNA sense strand
uaauuacacaccugacaug

SEQ ID NO: 170372 - RNA, 19 nt, Homo sapiens
  misc_RNA (1)...(19): siRNA sense strand
gcauucagucccuguaugg

SEQ ID NO: 170373 - RNA, 19 nt, Homo sapiens
  misc_RNA (1)...(19): siRNA sense strand
gaugacauacguggcauuc

SEQ ID NO: 170374 - RNA, 19 nt, Homo sapiens
  misc_RNA (1)...(19): siRNA sense strand
ugacaugaaccgugaggau

SEQ ID NO: 170375 - RNA, 19 nt, Homo sapiens
  misc_RNA (1)...(19): siRNA sense strand
gaaauucagcaagauuaac

SEQ ID NO: 170376 - RNA, 19 nt, Homo sapiens
  misc_RNA (1)...(19): siRNA sense strand
gccuugagauaaacaaacu

SEQ ID NO: 170377 - RNA, 19 nt, Homo sapiens
  misc_RNA (1)...(19): siRNA sense strand
gacgaauucuggacuacac

SEQ ID NO: 170378 - RNA, 19 nt, Homo sapiens
  misc_RNA (1)...(19): siRNA sense strand
aaauugaugcagucuucua

SEQ ID NO: 170379 - RNA, 19 nt, Homo sapiens
  misc_RNA (1)...(19): siRNA sense strand
gaugcacgcaccucgaugu

SEQ ID NO: 170380 - RNA, 19 nt, Homo sapiens
  misc_RNA (1)...(19): siRNA sense strand
uggaggaaacauuauauca

SEQ ID NO: 170381 - RNA, 19 nt, Homo sapiens
  misc_RNA (1)...(19): siRNA sense strand
gauccaaaggcuguaaugu

SEQ ID NO: 170382 - RNA, 19 nt, Homo sapiens
  misc_RNA (1)...(19): siRNA sense strand
aacauuauaucaccuacag

SEQ ID NO: 170383 - RNA, 19 nt, Homo sapiens
  misc_RNA (1)...(19): siRNA sense strand
gucacuaccgugggaaaua

SEQ ID NO: 170384 - RNA, 19 nt, Homo sapiens
  misc_RNA (1)...(19): siRNA sense strand
ccgggcaacuggacacauc

SEQ ID NO: 170385 - RNA, 19 nt, Homo sapiens
  misc_RNA (1)...(19): siRNA sense strand
caaacugauuaccaagaac

SEQ ID NO: 170386 - RNA, 19 nt, Homo sapiens
  misc_RNA (1)...(19): siRNA sense strand
augcagucuucuauucuaa

SEQ ID NO: 170387 - RNA, 19 nt, Homo sapiens
  misc_RNA (1)...(19): siRNA sense strand
gaugaaaccuggacaagua

SEQ ID NO: 170388 - RNA, 19 nt, Homo sapiens
  misc_RNA (1)...(19): siRNA sense strand
gaagauaagugcagcuguu

SEQ ID NO: 170389 - RNA, 19 nt, Homo sapiens
  misc_RNA (1)...(19): siRNA sense strand
ggagaaacaaugaucuuua

SEQ ID NO: 170390 - RNA, 19 nt, Homo sapiens
  misc_RNA (1)...(19): siRNA sense strand
ggagauaugaugauacuaa

SEQ ID NO: 170391 - RNA, 19 nt, Homo sapiens
  misc_RNA (1)...(19): siRNA sense strand
gaauacagcaucuggagua

SEQ ID NO: 170392 - RNA, 19 nt, Homo sapiens
  misc_RNA (1)...(19): siRNA sense strand
gauaacaccuuagauguca

SEQ ID NO: 170393 - RNA, 19 nt, Homo sapiens
  misc_RNA (1)...(19): siRNA sense strand
caacggacccauacaguuu

SEQ ID NO: 170394 - RNA, 19 nt, Homo sapiens
  misc_RNA (1)...(19): siRNA sense strand
caccuuagaugucaugaaa

SEQ ID NO: 170395 - RNA, 19 nt, Homo sapiens
  misc_RNA (1)...(19): siRNA sense strand
gcacucauguuuccuaucu

SEQ ID NO: 170396 - RNA, 19 nt, Homo sapiens
  misc_RNA (1)...(19): siRNA sense strand
gcagagcgcuaccugagau

SEQ ID NO: 170397 - RNA, 19 nt, Homo sapiens
  misc_RNA (1)...(19): siRNA sense strand
gaacuucccaaccguauug

SEQ ID NO: 170398 - RNA, 19 nt, Homo sapiens
  misc_RNA (1)...(19): siRNA sense strand
cuacaaaucucgcgggaau

SEQ ID NO: 170399 - RNA, 19 nt, Homo sapiens
  misc_RNA (1)...(19): siRNA sense strand
caaaugugacccuuccuua

SEQ ID NO: 170400 - RNA, 19 nt, Homo sapiens
  misc_RNA (1)...(19): siRNA sense strand
cgauguaacuccucugaau

SEQ ID NO: 170401 - RNA, 19 nt, Homo sapiens
  misc_RNA (1)...(19): siRNA sense strand
gcaagacucuccuguucuc

SEQ ID NO: 170402 - RNA, 19 nt, Homo sapiens
  misc_RNA (1)...(19): siRNA sense strand
gaccucaucuucaucuuca

SEQ ID NO: 170403 - RNA, 19 nt, Homo sapiens
  misc_RNA (1)...(19): siRNA sense strand
gugcagcuguucacuuuga

SEQ ID NO: 170404 - RNA, 19 nt, Homo sapiens
  misc_RNA (1)...(19): siRNA sense strand
gcuguucacuuugaggaua

SEQ ID NO: 170405 - RNA, 19 nt, Homo sapiens
  misc_RNA (1)...(19): siRNA sense strand
aggaauuggugauaaagua

SEQ ID NO: 170406 - RNA, 19 nt, Homo sapiens
  misc_RNA (1)...(19): siRNA sense strand
uaaagacuauccgagacua

SEQ ID NO: 170407 - RNA, 19 nt, Homo sapiens
  misc_RNA (1)...(19): siRNA sense strand
gaaguuaagaagauaagug

SEQ ID NO: 170408 - RNA, 19 nt, Homo sapiens
  misc_RNA (1)...(19): siRNA sense strand
uccgagaaaugcagucuuu

SEQ ID NO: 170409 - RNA, 19 nt, Homo sapiens
  misc_RNA (1)...(19): siRNA sense strand
ugaugaagaugauuugucu

SEQ ID NO: 170410 - RNA, 19 nt, Homo sapiens
  misc_RNA (1)...(19): siRNA sense strand
uuugggcucuuaaugguua

SEQ ID NO: 170411 - RNA, 19 nt, Homo sapiens
  misc_RNA (1)...(19): siRNA sense strand
gagcacucauguuuccuau

SEQ ID NO: 170412 - RNA, 19 nt, Homo sapiens
  misc_RNA (1)...(19): siRNA sense strand
uggcauugcugacaucaug

SEQ ID NO: 170413 - RNA, 19 nt, Homo sapiens
  misc_RNA (1)...(19): siRNA sense strand
gauguaacuccucugaauu

SEQ ID NO: 170414 - RNA, 19 nt, Homo sapiens
  misc_RNA (1)...(19): siRNA sense strand
gacgauaacaccuuagaug

SEQ ID NO: 170415 - RNA, 19 nt, Homo sapiens
  misc_RNA (1)...(19): siRNA sense strand
cuggcaaacuugacgauaa

SEQ ID NO: 170416 - RNA, 19 nt, Homo sapiens
  misc_RNA (1)...(19): siRNA sense strand
aaaguuugguccgauguaa

SEQ ID NO: 170417 - RNA, 19 nt, Homo sapiens
  misc_RNA (1)...(19): siRNA sense strand
ucuggaagguuaucccaaa

SEQ ID NO: 170418 - RNA, 19 nt, Homo sapiens
  misc_RNA (1)...(19): siRNA sense strand
uaaggagcauggcgacuuc

SEQ ID NO: 170419 - RNA, 19 nt, Homo sapiens
  misc_RNA (1)...(19): siRNA sense strand
agaggugacuggcaaacuu

SEQ ID NO: 170420 - RNA, 19 nt, Homo sapiens
  misc_RNA (1)...(19): siRNA sense strand
gauccagucucucuauggu

SEQ ID NO: 170421 - RNA, 19 nt, Homo sapiens
  misc_RNA (1)...(19): siRNA sense strand
gugggugaauacaauguuu

SEQ ID NO: 170422 - RNA, 19 nt, Homo sapiens
  misc_RNA (1)...(19): siRNA sense strand
gagauaugaugauacuaac

SEQ ID NO: 170423 - RNA, 19 nt, Homo sapiens
  misc_RNA (1)...(19): siRNA sense strand
ugaugugggugaauacaau

SEQ ID NO: 170424 - RNA, 19 nt, Homo sapiens
  misc_RNA (1)...(19): siRNA sense strand
cuucagagguagaaaauuu

SEQ ID NO: 170425 - RNA, 19 nt, Homo sapiens
  misc_RNA (1)...(19): siRNA sense strand
ggacaaguaguuccaaagg

SEQ ID NO: 170426 - RNA, 19 nt, Homo sapiens
  misc_RNA (1)...(19): siRNA sense strand
caugaucucuuuuggaauu

SEQ ID NO: 170427 - RNA, 19 nt, Homo sapiens
  misc_RNA (1)...(19): siRNA sense strand
cauacuaccauccuacaaa

SEQ ID NO: 170428 - RNA, 19 nt, Homo sapiens
  misc_RNA (1)...(19): siRNA sense strand
aggcaagacucuccuguuc

SEQ ID NO: 170429 - RNA, 19 nt, Homo sapiens
  misc_RNA (1)...(19): siRNA sense strand
ggagcacucauguuuccua

SEQ ID NO: 170430 - RNA, 19 nt, Homo sapiens
  misc_RNA (1)...(19): siRNA sense strand
gaggagaaacaaugaucuu

SEQ ID NO: 170431 - RNA, 19 nt, Homo sapiens
  misc_RNA (1)...(19): siRNA sense strand
cccaggaauuggugauaaa

SEQ ID NO: 170432 - RNA, 19 nt, Homo sapiens
  misc_RNA (1)...(19): siRNA sense strand
caucuggaguaaccguauu

SEQ ID NO: 170433 - RNA, 19 nt, Homo sapiens
  misc_RNA (1)...(19): siRNA sense strand
auacuaccauccuacaaau

SEQ ID NO: 170434 - RNA, 19 nt, Homo sapiens
  misc_RNA (1)...(19): siRNA sense strand
ggaauuggugauaaaguag

SEQ ID NO: 170435 - RNA, 19 nt, Homo sapiens
  misc_RNA (1)...(19): siRNA sense strand
gauaugaugauacuaacca

SEQ ID NO: 170436 - RNA, 19 nt, Homo sapiens
  misc_RNA (1)...(19): siRNA sense strand
gaaaccuggacaaguaguu

SEQ ID NO: 170437 - RNA, 19 nt, Homo sapiens
  misc_RNA (1)...(19): siRNA sense strand
gaauuggugauaaaguaga

SEQ ID NO: 170438 - RNA, 19 nt, Homo sapiens
  misc_RNA (1)...(19): siRNA sense strand
uggaguaaccguauuguuc

SEQ ID NO: 170439 - RNA, 19 nt, Homo sapiens
  misc_RNA (1)...(19): siRNA sense strand
gacccauacaguuugaaua

SEQ ID NO: 170440 - RNA, 19 nt, Homo sapiens
  misc_RNA (1)...(19): siRNA sense strand
ccauacaguuugaauacag

SEQ ID NO: 170441 - RNA, 19 nt, Homo sapiens
  misc_RNA (1)...(19): siRNA sense strand
uacaagggauccagucucu

SEQ ID NO: 170442 - RNA, 19 nt, Homo sapiens
  misc_RNA (1)...(19): siRNA sense strand
agacuauccgagacuaaua

SEQ ID NO: 170443 - RNA, 19 nt, Homo sapiens
  misc_RNA (1)...(19): siRNA sense strand
aggaagaccuccaguuugc

SEQ ID NO: 170444 - RNA, 19 nt, Homo sapiens
  misc_RNA (1)...(19): siRNA sense strand
caagggauccagucucucu

SEQ ID NO: 170445 - RNA, 19 nt, Homo sapiens
  misc_RNA (1)...(19): siRNA sense strand
gggauccagucucucuaug

SEQ ID NO: 170446 - RNA, 19 nt, Homo sapiens
  misc_RNA (1)...(19): siRNA sense strand
gccaaauuauggaggagau

SEQ ID NO: 170447 - RNA, 19 nt, Homo sapiens
  misc_RNA (1)...(19): siRNA sense strand
ucccaggaauuggugauaa

SEQ ID NO: 170448 - RNA, 19 nt, Homo sapiens
  misc_RNA (1)...(19): siRNA sense strand
gucuggagauaugaugaua

SEQ ID NO: 170449 - RNA, 19 nt, Homo sapiens
  misc_RNA (1)...(19): siRNA sense strand
uggaggagaugcccauuuu

SEQ ID NO: 170450 - RNA, 19 nt, Homo sapiens
  misc_RNA (1)...(19): siRNA sense strand
gaggugacuggcaaacuug

SEQ ID NO: 170451 - RNA, 19 nt, Homo sapiens
  misc_RNA (1)...(19): siRNA sense strand
ggacccauacaguuugaau

SEQ ID NO: 170452 - RNA, 19 nt, Homo sapiens
  misc_RNA (1)...(19): siRNA sense strand
ucaacggacccauacaguu

SEQ ID NO: 170453 - RNA, 19 nt, Homo sapiens
  misc_RNA (1)...(19): siRNA sense strand
cgagacuaauagaagaaga

SEQ ID NO: 170454 - RNA, 19 nt, Homo sapiens
  misc_RNA (1)...(19): siRNA sense strand
cagcaagcuccaugacuga

SEQ ID NO: 170455 - RNA, 19 nt, Homo sapiens
  misc_RNA (1)...(19): siRNA sense strand
gcagucuuucuucggcuua

SEQ ID NO: 170456 - RNA, 19 nt, Homo sapiens
  misc_RNA (1)...(19): siRNA sense strand
acuugacgauaacaccuua

SEQ ID NO: 170457 - RNA, 19 nt, Homo sapiens
  misc_RNA (1)...(19): siRNA sense strand
gcaagcuccaugacugaga

SEQ ID NO: 170458 - RNA, 19 nt, Homo sapiens
  misc_RNA (1)...(19): siRNA sense strand
gaugaugaaaccuggacaa

SEQ ID NO: 170459 - RNA, 19 nt, Homo sapiens
  misc_RNA (1)...(19): siRNA sense strand
cgacuucuacccauuugau

SEQ ID NO: 170460 - RNA, 19 nt, Homo sapiens
  misc_RNA (1)...(19): siRNA sense strand
aauacagcaucuggaguaa

SEQ ID NO: 170461 - RNA, 19 nt, Homo sapiens
  misc_RNA (1)...(19): siRNA sense strand
acugagaggcuccgagaaa

SEQ ID NO: 170462 - RNA, 19 nt, Homo sapiens
  misc_RNA (1)...(19): siRNA sense strand
acuuuaugcuuccugauga

SEQ ID NO: 170463 - RNA, 19 nt, Homo sapiens
  misc_RNA (1)...(19): siRNA sense strand
gaggagaugcccauuuuga

SEQ ID NO: 170464 - RNA, 19 nt, Homo sapiens
  misc_RNA (1)...(19): siRNA sense strand
uuccaaaggcuacaacuug

SEQ ID NO: 170465 - RNA, 19 nt, Homo sapiens
  misc_RNA (1)...(19): siRNA sense strand
ugaacugggucuuccaaaa

SEQ ID NO: 170466 - RNA, 19 nt, Homo sapiens
  misc_RNA (1)...(19): siRNA sense strand
cgauaacaccuuagauguc

SEQ ID NO: 170467 - RNA, 19 nt, Homo sapiens
  misc_RNA (1)...(19): siRNA sense strand
augacauucuggaagguua

SEQ ID NO: 170468 - RNA, 19 nt, Homo sapiens
  misc_RNA (1)...(19): siRNA sense strand
aaaugugacccuuccuuau

SEQ ID NO: 170469 - RNA, 19 nt, Homo sapiens
  misc_RNA (1)...(19): siRNA sense strand
ggccacuccuuaggucuug

SEQ ID NO: 170470 - RNA, 19 nt, Homo sapiens
  misc_RNA (1)...(19): siRNA sense strand
uuccugaugugggugaaua

SEQ ID NO: 170471 - RNA, 19 nt, Homo sapiens
  misc_RNA (1)...(19): siRNA sense strand
cugagaggcuccgagaaau

SEQ ID NO: 170472 - RNA, 19 nt, Homo sapiens
  misc_RNA (1)...(19): siRNA sense strand
gaacugggucuuccaaaag

SEQ ID NO: 170473 - RNA, 19 nt, Homo sapiens
  misc_RNA (1)...(19): siRNA sense strand
uaacuccucugaauuuuac

SEQ ID NO: 170474 - RNA, 19 nt, Homo sapiens
  misc_RNA (1)...(19): siRNA sense strand
cuuaaaugguccaaaauga

SEQ ID NO: 170475 - RNA, 19 nt, Homo sapiens
  misc_RNA (1)...(19): siRNA sense strand
uauccgagacuaauagaag

SEQ ID NO: 170476 - RNA, 19 nt, Homo sapiens
  misc_RNA (1)...(19): siRNA sense strand
gcucuuaaugguuaugaca

SEQ ID NO: 170477 - RNA, 19 nt, Homo sapiens
  misc_RNA (1)...(19): siRNA sense strand
gaaaauuuugggcucuuaa

SEQ ID NO: 170478 - RNA, 19 nt, Homo sapiens
  misc_RNA (1)...(19): siRNA sense strand
guggugaugaagaugauuu

SEQ ID NO: 170479 - RNA, 19 nt, Homo sapiens
  misc_RNA (1)...(19): siRNA sense strand
uggcaaacuugacgauaac

SEQ ID NO: 170480 - RNA, 19 nt, Homo sapiens
  misc_RNA (1)...(19): siRNA sense strand
gagaugcccauuuugauga

SEQ ID NO: 170481 - RNA, 19 nt, Homo sapiens
  misc_RNA (1)...(19): siRNA sense strand
ggcgacuucuacccauuug

SEQ ID NO: 170482 - RNA, 19 nt, Homo sapiens
  misc_RNA (1)...(19): siRNA sense strand
gcugacaucaugaucucuu

SEQ ID NO: 170483 - RNA, 19 nt, Homo sapiens
  misc_RNA (1)...(19): siRNA sense strand
gaauuacaccccugauaug

SEQ ID NO: 170484 - RNA, 19 nt, Homo sapiens
  misc_RNA (1)...(19): siRNA sense strand
cugacaucaugaucucuuu

SEQ ID NO: 170485 - RNA, 19 nt, Homo sapiens
  misc_RNA (1)...(19): siRNA sense strand
ugagaggcuccgagaaaug

SEQ ID NO: 170486 - RNA, 19 nt, Homo sapiens
  misc_RNA (1)...(19): siRNA sense strand
aaacgccagacaaauguga

SEQ ID NO: 170487 - RNA, 19 nt, Homo sapiens
  misc_RNA (1)...(19): siRNA sense strand
gcaaauagcugaagacuuu

SEQ ID NO: 170488 - RNA, 19 nt, Homo sapiens
  misc_RNA (1)...(19): siRNA sense strand
ggagaaauccugaucuuua

SEQ ID NO: 170489 - RNA, 19 nt, Homo sapiens
  misc_RNA (1)...(19): siRNA sense strand
gagaaauccugaucuuuaa

SEQ ID NO: 170490 - RNA, 19 nt, Homo sapiens
  misc_RNA (1)...(19): siRNA sense strand
cauacaggauugugaauua

SEQ ID NO: 170491 - RNA, 19 nt, Homo sapiens
  misc_RNA (1)...(19): siRNA sense strand
gaaccugaauugcauuuga

SEQ ID NO: 170492 - RNA, 19 nt, Homo sapiens
  misc_RNA (1)...(19): siRNA sense strand
uaauggagaugcccacuuu

SEQ ID NO: 170493 - RNA, 19 nt, Homo sapiens
  misc_RNA (1)...(19): siRNA sense strand
gaacaauggacaaaggaua

SEQ ID NO: 170494 - RNA, 19 nt, Homo sapiens
  misc_RNA (1)...(19): siRNA sense strand
caacagggaccaauuuauu

SEQ ID NO: 170495 - RNA, 19 nt, Homo sapiens
  misc_RNA (1)...(19): siRNA sense strand
aguaacagcuggcuuaauu

SEQ ID NO: 170496 - RNA, 19 nt, Homo sapiens
  misc_RNA (1)...(19): siRNA sense strand
gaaaaucgaugcagccauu

SEQ ID NO: 170497 - RNA, 19 nt, Homo sapiens
  misc_RNA (1)...(19): siRNA sense strand
uagagaacauggagacuuu

SEQ ID NO: 170498 - RNA, 19 nt, Homo sapiens
  misc_RNA (1)...(19): siRNA sense strand
ugagaaagcucugaaaguc

SEQ ID NO: 170499 - RNA, 19 nt, Homo sapiens
  misc_RNA (1)...(19): siRNA sense strand
caacugugauccugcuuug

SEQ ID NO: 170500 - RNA, 19 nt, Homo sapiens
  misc_RNA (1)...(19): siRNA sense strand
ugaaggagaggcugauaua

SEQ ID NO: 170501 - RNA, 19 nt, Homo sapiens
  misc_RNA (1)...(19): siRNA sense strand
ccacuuugaugaugaugaa

SEQ ID NO: 170502 - RNA, 19 nt, Homo sapiens
  misc_RNA (1)...(19): siRNA sense strand
acacacacuuugaagagua

SEQ ID NO: 170503 - RNA, 19 nt, Homo sapiens
  misc_RNA (1)...(19): siRNA sense strand
cauaugaaguuacuagcaa

SEQ ID NO: 170504 - RNA, 19 nt, Homo sapiens
  misc_RNA (1)...(19): siRNA sense strand
gcaaagaaagugacacaca

SEQ ID NO: 170505 - RNA, 19 nt, Homo sapiens
  misc_RNA (1)...(19): siRNA sense strand
acagcuggcuuaauuguug

SEQ ID NO: 170506 - RNA, 19 nt, Homo sapiens
  misc_RNA (1)...(19): siRNA sense strand
aggagaggcugauauaaug

SEQ ID NO: 170507 - RNA, 19 nt, Homo sapiens
  misc_RNA (1)...(19): siRNA sense strand
gcaaaucccucaggaagcu

SEQ ID NO: 170508 - RNA, 19 nt, Homo sapiens
  misc_RNA (1)...(19): siRNA sense strand
gaugaacaauggacaaagg

SEQ ID NO: 170509 - RNA, 19 nt, Homo sapiens
  misc_RNA (1)...(19): siRNA sense strand
ugauggaccuggaaauguu

SEQ ID NO: 170510 - RNA, 19 nt, Homo sapiens
  misc_RNA (1)...(19): siRNA sense strand
gaaggagaggcugauauaa

SEQ ID NO: 170511 - RNA, 19 nt, Homo sapiens
  misc_RNA (1)...(19): siRNA sense strand
ggaaaacccaccuuacaua

SEQ ID NO: 170512 - RNA, 19 nt, Homo sapiens
  misc_RNA (1)...(19): siRNA sense strand
ugacccaaaugcaaagaaa

SEQ ID NO: 170513 - RNA, 19 nt, Homo sapiens
  misc_RNA (1)...(19): siRNA sense strand
gagaugcccacuuugauga

SEQ ID NO: 170514 - RNA, 19 nt, Homo sapiens
  misc_RNA (1)...(19): siRNA sense strand
gagauuugaugagaagaga

SEQ ID NO: 170515 - RNA, 19 nt, Homo sapiens
  misc_RNA (1)...(19): siRNA sense strand
gcagaaguuccuuggauug

SEQ ID NO: 170516 - RNA, 19 nt, Homo sapiens
  misc_RNA (1)...(19): siRNA sense strand
ccaagcaaauagcugaaga

SEQ ID NO: 170517 - RNA, 19 nt, Homo sapiens
  misc_RNA (1)...(19): siRNA sense strand
acacugaagcuuugaugua

SEQ ID NO: 170518 - RNA, 19 nt, Homo sapiens
  misc_RNA (1)...(19): siRNA sense strand
ggagaugcccacuuugaug

SEQ ID NO: 170519 - RNA, 19 nt, Homo sapiens
  misc_RNA (1)...(19): siRNA sense strand
caucagaggaaaugaggua

SEQ ID NO: 170520 - RNA, 19 nt, Homo sapiens
  misc_RNA (1)...(19): siRNA sense strand
gaauuauacaccagauuug

SEQ ID NO: 170521 - RNA, 19 nt, Homo sapiens
  misc_RNA (1)...(19): siRNA sense strand
aagaguaacagcuggcuua

SEQ ID NO: 170522 - RNA, 19 nt, Homo sapiens
  misc_RNA (1)...(19): siRNA sense strand
gaucuucacaguuggaguu

SEQ ID NO: 170523 - RNA, 19 nt, Homo sapiens
  misc_RNA (1)...(19): siRNA sense strand
gcauuugaucucuucauuu

SEQ ID NO: 170524 - RNA, 19 nt, Homo sapiens
  misc_RNA (1)...(19): siRNA sense strand
gaauugcauuugaucucuu

SEQ ID NO: 170525 - RNA, 19 nt, Homo sapiens
  misc_RNA (1)...(19): siRNA sense strand
gaagaggugacuccacuca

SEQ ID NO: 170526 - RNA, 19 nt, Homo sapiens
  misc_RNA (1)...(19): siRNA sense strand
caccuuacauacaggauug

SEQ ID NO: 170527 - RNA, 19 nt, Homo sapiens
  misc_RNA (1)...(19): siRNA sense strand
gaugcagccauuucugaua

SEQ ID NO: 170528 - RNA, 19 nt, Homo sapiens
  misc_RNA (1)...(19): siRNA sense strand
gaagcuugaaccugaauug

SEQ ID NO: 170529 - RNA, 19 nt, Homo sapiens
  misc_RNA (1)...(19): siRNA sense strand
gaaauccugaucuuuaaag

SEQ ID NO: 170530 - RNA, 19 nt, Homo sapiens
  misc_RNA (1)...(19): siRNA sense strand
cuucacaguuggaguuuga

SEQ ID NO: 170531 - RNA, 19 nt, Homo sapiens
  misc_RNA (1)...(19): siRNA sense strand
gcaaggaccucguuuucau

SEQ ID NO: 170532 - RNA, 19 nt, Homo sapiens
  misc_RNA (1)...(19): siRNA sense strand
gaggacaaauacuggagau

SEQ ID NO: 170533 - RNA, 19 nt, Homo sapiens
  misc_RNA (1)...(19): siRNA sense strand
gauacaacagggaccaauu

SEQ ID NO: 170534 - RNA, 19 nt, Homo sapiens
  misc_RNA (1)...(19): siRNA sense strand
ugaagacuuuccagggauu

SEQ ID NO: 170535 - RNA, 19 nt, Homo sapiens
  misc_RNA (1)...(19): siRNA sense strand
ggagaggcugauauaauga

SEQ ID NO: 170536 - RNA, 19 nt, Homo sapiens
  misc_RNA (1)...(19): siRNA sense strand
augcagccauuucugauaa

SEQ ID NO: 170537 - RNA, 19 nt, Homo sapiens
  misc_RNA (1)...(19): siRNA sense strand
gcuugaaccugaauugcau

SEQ ID NO: 170538 - RNA, 19 nt, Homo sapiens
  misc_RNA (1)...(19): siRNA sense strand
gauccugcuuuguccuuug

SEQ ID NO: 170539 - RNA, 19 nt, Homo sapiens
  misc_RNA (1)...(19): siRNA sense strand
ggacgccagccaacuguga

SEQ ID NO: 170540 - RNA, 19 nt, Homo sapiens
  misc_RNA (1)...(19): siRNA sense strand
gauuugaugagaagagaaa

SEQ ID NO: 170541 - RNA, 19 nt, Homo sapiens
  misc_RNA (1)...(19): siRNA sense strand
gcaguuugcucagccuauc

SEQ ID NO: 170542 - RNA, 19 nt, Homo sapiens
  misc_RNA (1)...(19): siRNA sense strand
uaacagcuggcuuaauugu

SEQ ID NO: 170543 - RNA, 19 nt, Homo sapiens
  misc_RNA (1)...(19): siRNA sense strand
ccaaaugcaaagaaaguga

SEQ ID NO: 170544 - RNA, 19 nt, Homo sapiens
  misc_RNA (1)...(19): siRNA sense strand
uccgagaaaugcagaaguu

SEQ ID NO: 170545 - RNA, 19 nt, Homo sapiens
  misc_RNA (1)...(19): siRNA sense strand
caaaagaugcuguugauuc

SEQ ID NO: 170546 - RNA, 19 nt, Homo sapiens
  misc_RNA (1)...(19): siRNA sense strand
ucucguugcugcucaugaa

SEQ ID NO: 170547 - RNA, 19 nt, Homo sapiens
  misc_RNA (1)...(19): siRNA sense strand
aaacccaccuuacauacag

SEQ ID NO: 170548 - RNA, 19 nt, Homo sapiens
  misc_RNA (1)...(19): siRNA sense strand
gaaccugucccuccagaac

SEQ ID NO: 170549 - RNA, 19 nt, Homo sapiens
  misc_RNA (1)...(19): siRNA sense strand
uacaacagggaccaauuua

SEQ ID NO: 170550 - RNA, 19 nt, Homo sapiens
  misc_RNA (1)...(19): siRNA sense strand
auacaacagggaccaauuu

SEQ ID NO: 170551 - RNA, 19 nt, Homo sapiens
  misc_RNA (1)...(19): siRNA sense strand
gggagaaauccugaucuuu

SEQ ID NO: 170552 - RNA, 19 nt, Homo sapiens
  misc_RNA (1)...(19): siRNA sense strand
cacacacuuugaagaguaa

SEQ ID NO: 170553 - RNA, 19 nt, Homo sapiens
  misc_RNA (1)...(19): siRNA sense strand
cagaggaaaugagguacga

SEQ ID NO: 170554 - RNA, 19 nt, Homo sapiens
  misc_RNA (1)...(19): siRNA sense strand
cagugguccuguuguuaaa

SEQ ID NO: 170555 - RNA, 19 nt, Homo sapiens
  misc_RNA (1)...(19): siRNA sense strand
aaggagaggcugauauaau

SEQ ID NO: 170556 - RNA, 19 nt, Homo sapiens
  misc_RNA (1)...(19): siRNA sense strand
ugcagaaguuccuuggauu

SEQ ID NO: 170557 - RNA, 19 nt, Homo sapiens
  misc_RNA (1)...(19): siRNA sense strand
caacacugaagcuuugaug

SEQ ID NO: 170558 - RNA, 19 nt, Homo sapiens
  misc_RNA (1)...(19): siRNA sense strand
agccaacacugaagcuuug

SEQ ID NO: 170559 - RNA, 19 nt, Homo sapiens
  misc_RNA (1)...(19): siRNA sense strand
cagccaacacugaagcuuu

SEQ ID NO: 170560 - RNA, 19 nt, Homo sapiens
  misc_RNA (1)...(19): siRNA sense strand
gauggaccuggaaauguuu

SEQ ID NO: 170561 - RNA, 19 nt, Homo sapiens
  misc_RNA (1)...(19): siRNA sense strand
ugcauuugaucucuucauu

SEQ ID NO: 170562 - RNA, 19 nt, Homo sapiens
  misc_RNA (1)...(19): siRNA sense strand
ggcauucagucccucuaug

SEQ ID NO: 170563 - RNA, 19 nt, Homo sapiens
  misc_RNA (1)...(19): siRNA sense strand
cguugcugcucaugaaauu

SEQ ID NO: 170564 - RNA, 19 nt, Homo sapiens
  misc_RNA (1)...(19): siRNA sense strand
aacagggaccaauuuauuu

SEQ ID NO: 170565 - RNA, 19 nt, Homo sapiens
  misc_RNA (1)...(19): siRNA sense strand
uuacauacaggauugugaa

SEQ ID NO: 170566 - RNA, 19 nt, Homo sapiens
  misc_RNA (1)...(19): siRNA sense strand
gcauaugaaguuacuagca

SEQ ID NO: 170567 - RNA, 19 nt, Homo sapiens
  misc_RNA (1)...(19): siRNA sense strand
ugaauugcauuugaucucu

SEQ ID NO: 170568 - RNA, 19 nt, Homo sapiens
  misc_RNA (1)...(19): siRNA sense strand
gaugaugaacaauggacaa

SEQ ID NO: 170569 - RNA, 19 nt, Homo sapiens
  misc_RNA (1)...(19): siRNA sense strand
gagaaagcucugaaagucu

SEQ ID NO: 170570 - RNA, 19 nt, Homo sapiens
  misc_RNA (1)...(19): siRNA sense strand
gccaaaagaugcuguugau

SEQ ID NO: 170571 - RNA, 19 nt, Homo sapiens
  misc_RNA (1)...(19): siRNA sense strand
gagaacauggagacuuuua

SEQ ID NO: 170572 - RNA, 19 nt, Homo sapiens
  misc_RNA (1)...(19): siRNA sense strand
cagcuggcuuaauuguuga

SEQ ID NO: 170573 - RNA, 19 nt, Homo sapiens
  misc_RNA (1)...(19): siRNA sense strand
gacacacacuuugaagagu

SEQ ID NO: 170574 - RNA, 19 nt, Homo sapiens
  misc_RNA (1)...(19): siRNA sense strand
ugacacacacuuugaagag

SEQ ID NO: 170575 - RNA, 19 nt, Homo sapiens
  misc_RNA (1)...(19): siRNA sense strand
ugaugaugaugaacaaugg

SEQ ID NO: 170576 - RNA, 19 nt, Homo sapiens
  misc_RNA (1)...(19): siRNA sense strand
gcugauauaaugaucucuu

SEQ ID NO: 170577 - RNA, 19 nt, Homo sapiens
  misc_RNA (1)...(19): siRNA sense strand
guaacagcuggcuuaauug

SEQ ID NO: 170578 - RNA, 19 nt, Homo sapiens
  misc_RNA (1)...(19): siRNA sense strand
caauuuauuucucguugcu

SEQ ID NO: 170579 - RNA, 19 nt, Homo sapiens
  misc_RNA (1)...(19): siRNA sense strand
gaugcccacuuugaugaug

SEQ ID NO: 170580 - RNA, 19 nt, Homo sapiens
  misc_RNA (1)...(19): siRNA sense strand
gcuguugauucugcuguug

SEQ ID NO: 170581 - RNA, 19 nt, Homo sapiens
  misc_RNA (1)...(19): siRNA sense strand
agccauuucugauaaggaa

SEQ ID NO: 170582 - RNA, 19 nt, Homo sapiens
  misc_RNA (1)...(19): siRNA sense strand
ugacuccacucacauucuc

SEQ ID NO: 170583 - RNA, 19 nt, Homo sapiens
  misc_RNA (1)...(19): siRNA sense strand
gcauucagucccucuaugg

SEQ ID NO: 170584 - RNA, 19 nt, Homo sapiens
  misc_RNA (1)...(19): siRNA sense strand
uugcucagccuauccauug

SEQ ID NO: 170585 - RNA, 19 nt, Homo sapiens
  misc_RNA (1)...(19): siRNA sense strand
gcauccacacccuagguuu

SEQ ID NO: 170586 - RNA, 19 nt, Homo sapiens
  misc_RNA (1)...(19): siRNA sense strand
aaucaauucugggccauca

SEQ ID NO: 170587 - RNA, 19 nt, Homo sapiens
  misc_RNA (1)...(19): siRNA sense strand
gaaacuauauggaaagaga

SEQ ID NO: 170588 - RNA, 19 nt, Homo sapiens
  misc_RNA (1)...(19): siRNA sense strand
ggaaagagaaguaauucaa

SEQ ID NO: 170589 - RNA, 19 nt, Homo sapiens
  misc_RNA (1)...(19): siRNA sense strand
gggauuaacuuccuguaug

SEQ ID NO: 170590 - RNA, 19 nt, Homo sapiens
  misc_RNA (1)...(19): siRNA sense strand
ggacauuccucugauccua

SEQ ID NO: 170591 - RNA, 19 nt, Homo sapiens
  misc_RNA (1)...(19): siRNA sense strand
ggaacaggcucaggacuau

SEQ ID NO: 170592 - RNA, 19 nt, Homo sapiens
  misc_RNA (1)...(19): siRNA sense strand
gcucaggacuaucucaaga

SEQ ID NO: 170593 - RNA, 19 nt, Homo sapiens
  misc_RNA (1)...(19): siRNA sense strand
gaacuuggccauucuuugg

SEQ ID NO: 170594 - RNA, 19 nt, Homo sapiens
  misc_RNA (1)...(19): siRNA sense strand
guuaaacucccgcgucaua

SEQ ID NO: 170595 - RNA, 19 nt, Homo sapiens
  misc_RNA (1)...(19): siRNA sense strand
ugccagauguugcagaaua

SEQ ID NO: 170596 - RNA, 19 nt, Homo sapiens
  misc_RNA (1)...(19): siRNA sense strand
ccuacaggaucguaucaua

SEQ ID NO: 170597 - RNA, 19 nt, Homo sapiens
  misc_RNA (1)...(19): siRNA sense strand
gggaacugcugacaucaug

SEQ ID NO: 170598 - RNA, 19 nt, Homo sapiens
  misc_RNA (1)...(19): siRNA sense strand
gagaaguaauucaagaaag

SEQ ID NO: 170599 - RNA, 19 nt, Homo sapiens
  misc_RNA (1)...(19): siRNA sense strand
gauauuaaaggcauucaga

SEQ ID NO: 170600 - RNA, 19 nt, Homo sapiens
  misc_RNA (1)...(19): siRNA sense strand
uaaaggcauucagaaacua

SEQ ID NO: 170601 - RNA, 19 nt, Homo sapiens
  misc_RNA (1)...(19): siRNA sense strand
gagaugcucacuucgauga

SEQ ID NO: 170602 - RNA, 19 nt, Homo sapiens
  misc_RNA (1)...(19): siRNA sense strand
ggagauccccaaaauuuua

SEQ ID NO: 170603 - RNA, 19 nt, Homo sapiens
  misc_RNA (1)...(19): siRNA sense strand
cggaggagaugcucacuuc

SEQ ID NO: 170604 - RNA, 19 nt, Homo sapiens
  misc_RNA (1)...(19): siRNA sense strand
gaaagagaaguaauucaag

SEQ ID NO: 170605 - RNA, 19 nt, Homo sapiens
  misc_RNA (1)...(19): siRNA sense strand
gggaacaggcucaggacua

SEQ ID NO: 170606 - RNA, 19 nt, Homo sapiens
  misc_RNA (1)...(19): siRNA sense strand
uacaggaucguaucauaua

SEQ ID NO: 170607 - RNA, 19 nt, Homo sapiens
  misc_RNA (1)...(19): siRNA sense strand
cgagacuuaccgcauauua

SEQ ID NO: 170608 - RNA, 19 nt, Homo sapiens
  misc_RNA (1)...(19): siRNA sense strand
gauguggagugccagaugu

SEQ ID NO: 170609 - RNA, 19 nt, Homo sapiens
  misc_RNA (1)...(19): siRNA sense strand
ggauuaacuuccuguaugc

SEQ ID NO: 170610 - RNA, 19 nt, Homo sapiens
  misc_RNA (1)...(19): siRNA sense strand
ucacuucgaugaggaugaa

SEQ ID NO: 170611 - RNA, 19 nt, Homo sapiens
  misc_RNA (1)...(19): siRNA sense strand
acucgagacuuaccgcaua

SEQ ID NO: 170612 - RNA, 19 nt, Homo sapiens
  misc_RNA (1)...(19): siRNA sense strand
cagaaacuauauggaaaga

SEQ ID NO: 170613 - RNA, 19 nt, Homo sapiens
  misc_RNA (1)...(19): siRNA sense strand
guagcagucuagggauuaa

SEQ ID NO: 170614 - RNA, 19 nt, Homo sapiens
  misc_RNA (1)...(19): siRNA sense strand
gguagcagucuagggauua

SEQ ID NO: 170615 - RNA, 19 nt, Homo sapiens
  misc_RNA (1)...(19): siRNA sense strand
gaacugcugacaucaugau

SEQ ID NO: 170616 - RNA, 19 nt, Homo sapiens
  misc_RNA (1)...(19): siRNA sense strand
ccaaauagcccaaaaugga

SEQ ID NO: 170617 - RNA, 19 nt, Homo sapiens
  misc_RNA (1)...(19): siRNA sense strand
uuaaaggcauucagaaacu

SEQ ID NO: 170618 - RNA, 19 nt, Homo sapiens
  misc_RNA (1)...(19): siRNA sense strand
ccaaaguggucaccuacag

SEQ ID NO: 170619 - RNA, 19 nt, Homo sapiens
  misc_RNA (1)...(19): siRNA sense strand
uacaguggaucgauuagug

SEQ ID NO: 170620 - RNA, 19 nt, Homo sapiens
  misc_RNA (1)...(19): siRNA sense strand
ggaaacacgcuggcucaug

SEQ ID NO: 170621 - RNA, 19 nt, Homo sapiens
  misc_RNA (1)...(19): siRNA sense strand
cacgcuggcucaugccuuu

SEQ ID NO: 170622 - RNA, 19 nt, Homo sapiens
  misc_RNA (1)...(19): siRNA sense strand
aagccaaacucaaggagau

SEQ ID NO: 170623 - RNA, 19 nt, Homo sapiens
  misc_RNA (1)...(19): siRNA sense strand
gcagugauguauccaaccu

SEQ ID NO: 170624 - RNA, 19 nt, Homo sapiens
  misc_RNA (1)...(19): siRNA sense strand
aucauauacucgagacuua

SEQ ID NO: 170625 - RNA, 19 nt, Homo sapiens
  misc_RNA (1)...(19): siRNA sense strand
gaggagaugcucacuucga

SEQ ID NO: 170626 - RNA, 19 nt, Homo sapiens
  misc_RNA (1)...(19): siRNA sense strand
uauuacaguggaucgauua

SEQ ID NO: 170627 - RNA, 19 nt, Homo sapiens
  misc_RNA (1)...(19): siRNA sense strand
cuacaggaucguaucauau

SEQ ID NO: 170628 - RNA, 19 nt, Homo sapiens
  misc_RNA (1)...(19): siRNA sense strand
gacauuccucugauccuaa

SEQ ID NO: 170629 - RNA, 19 nt, Homo sapiens
  misc_RNA (1)...(19): siRNA sense strand
agacuuaccgcauauuaca

SEQ ID NO: 170630 - RNA, 19 nt, Homo sapiens
  misc_RNA (1)...(19): siRNA sense strand
guaugggacauuccucuga

SEQ ID NO: 170631 - RNA, 19 nt, Homo sapiens
  misc_RNA (1)...(19): siRNA sense strand
cuauauggaaagagaagua

SEQ ID NO: 170632 - RNA, 19 nt, Homo sapiens
  misc_RNA (1)...(19): siRNA sense strand
uaaacucccgcgucauaga

SEQ ID NO: 170633 - RNA, 19 nt, Homo sapiens
  misc_RNA (1)...(19): siRNA sense strand
ggaugauauuaaaggcauu

SEQ ID NO: 170634 - RNA, 19 nt, Homo sapiens
  misc_RNA (1)...(19): siRNA sense strand
gaaauggagauccccaaaa

SEQ ID NO: 170635 - RNA, 19 nt, Homo sapiens
  misc_RNA (1)...(19): siRNA sense strand
ggacuccuacccauuugau

SEQ ID NO: 170636 - RNA, 19 nt, Homo sapiens
  misc_RNA (1)...(19): siRNA sense strand
cuuccaaaguggucaccua

SEQ ID NO: 170637 - RNA, 19 nt, Homo sapiens
  misc_RNA (1)...(19): siRNA sense strand
caacaguuuagaagccaaa

SEQ ID NO: 170638 - RNA, 19 nt, Homo sapiens
  misc_RNA (1)...(19): siRNA sense strand
aaacuuucccaggaugaua

SEQ ID NO: 170639 - RNA, 19 nt, Homo sapiens
  misc_RNA (1)...(19): siRNA sense strand
aaauggagauccccaaaau

SEQ ID NO: 170640 - RNA, 19 nt, Homo sapiens
  misc_RNA (1)...(19): siRNA sense strand
aaacucccgcgucauagaa

SEQ ID NO: 170641 - RNA, 19 nt, Homo sapiens
  misc_RNA (1)...(19): siRNA sense strand
cuaaugcagugauguaucc

SEQ ID NO: 170642 - RNA, 19 nt, Homo sapiens
  misc_RNA (1)...(19): siRNA sense strand
gaacgcuggacggauggua

SEQ ID NO: 170643 - RNA, 19 nt, Homo sapiens
  misc_RNA (1)...(19): siRNA sense strand
agugauguauccaaccuau

SEQ ID NO: 170644 - RNA, 19 nt, Homo sapiens
  misc_RNA (1)...(19): siRNA sense strand
gccagauguugcagaauac

SEQ ID NO: 170645 - RNA, 19 nt, Homo sapiens
  misc_RNA (1)...(19): siRNA sense strand
gcauucagaaacuauaugg

SEQ ID NO: 170646 - RNA, 19 nt, Homo sapiens
  misc_RNA (1)...(19): siRNA sense strand
uaugggacauuccucugau

SEQ ID NO: 170647 - RNA, 19 nt, Homo sapiens
  misc_RNA (1)...(19): siRNA sense strand
cugcugacaucaugauugg

SEQ ID NO: 170648 - RNA, 19 nt, Homo sapiens
  misc_RNA (1)...(19): siRNA sense strand
guggaucgauuagugucaa

SEQ ID NO: 170649 - RNA, 19 nt, Homo sapiens
  misc_RNA (1)...(19): siRNA sense strand
uaucauauacucgagacuu

SEQ ID NO: 170650 - RNA, 19 nt, Homo sapiens
  misc_RNA (1)...(19): siRNA sense strand
ugacaucaugauuggcuuu

SEQ ID NO: 170651 - RNA, 19 nt, Homo sapiens
  misc_RNA (1)...(19): siRNA sense strand
uucccaggaugauauuaaa

SEQ ID NO: 170652 - RNA, 19 nt, Homo sapiens
  misc_RNA (1)...(19): siRNA sense strand
cucaugaacuuggccauuc

SEQ ID NO: 170653 - RNA, 19 nt, Homo sapiens
  misc_RNA (1)...(19): siRNA sense strand
gacggaugguagcagucua

SEQ ID NO: 170654 - RNA, 19 nt, Homo sapiens
  misc_RNA (1)...(19): siRNA sense strand
guugcagaauacucacuau

SEQ ID NO: 170655 - RNA, 19 nt, Homo sapiens
  misc_RNA (1)...(19): siRNA sense strand
ugauguauccaaccuaugg

SEQ ID NO: 170656 - RNA, 19 nt, Homo sapiens
  misc_RNA (1)...(19): siRNA sense strand
aggagaugcucacuucgau

SEQ ID NO: 170657 - RNA, 19 nt, Homo sapiens
  misc_RNA (1)...(19): siRNA sense strand
ggaacugcugacaucauga

SEQ ID NO: 170658 - RNA, 19 nt, Homo sapiens
  misc_RNA (1)...(19): siRNA sense strand
auauuacaguggaucgauu

SEQ ID NO: 170659 - RNA, 19 nt, Homo sapiens
  misc_RNA (1)...(19): siRNA sense strand
gagacuuaccgcauauuac

SEQ ID NO: 170660 - RNA, 19 nt, Homo sapiens
  misc_RNA (1)...(19): siRNA sense strand
ggacggaugguagcagucu

SEQ ID NO: 170661 - RNA, 19 nt, Homo sapiens
  misc_RNA (1)...(19): siRNA sense strand
ggaaauggagauccccaaa

SEQ ID NO: 170662 - RNA, 19 nt, Homo sapiens
  misc_RNA (1)...(19): siRNA sense strand
ucaugaacuuggccauucu

SEQ ID NO: 170663 - RNA, 19 nt, Homo sapiens
  misc_RNA (1)...(19): siRNA sense strand
aaacucaaggagaugcaaa

SEQ ID NO: 170664 - RNA, 19 nt, Homo sapiens
  misc_RNA (1)...(19): siRNA sense strand
ucagaaacuauauggaaag

SEQ ID NO: 170665 - RNA, 19 nt, Homo sapiens
  misc_RNA (1)...(19): siRNA sense strand
acauuccucugauccuaau

SEQ ID NO: 170666 - RNA, 19 nt, Homo sapiens
  misc_RNA (1)...(19): siRNA sense strand
ugguagcagucuagggauu

SEQ ID NO: 170667 - RNA, 19 nt, Homo sapiens
  misc_RNA (1)...(19): siRNA sense strand
uuaucucuaugacucagaa

SEQ ID NO: 170668 - RNA, 19 nt, Homo sapiens
  misc_RNA (1)...(19): siRNA sense strand
uaaugcagaagcccagaug

SEQ ID NO: 170669 - RNA, 19 nt, Homo sapiens
  misc_RNA (1)...(19): siRNA sense strand
ugaacuuggccauucuuug

SEQ ID NO: 170670 - RNA, 19 nt, Homo sapiens
  misc_RNA (1)...(19): siRNA sense strand
gcacuaaugugaucguuga

SEQ ID NO: 170671 - RNA, 19 nt, Homo sapiens
  misc_RNA (1)...(19): siRNA sense strand
gaagaaacauggaccaaca

SEQ ID NO: 170672 - RNA, 19 nt, Homo sapiens
  misc_RNA (1)...(19): siRNA sense strand
ccaaggauauaucaaacua

SEQ ID NO: 170673 - RNA, 19 nt, Homo sapiens
  misc_RNA (1)...(19): siRNA sense strand
gaauagagaguaaaguuga

SEQ ID NO: 170674 - RNA, 19 nt, Homo sapiens
  misc_RNA (1)...(19): siRNA sense strand
gagaaggcauccucagcua

SEQ ID NO: 170675 - RNA, 19 nt, Homo sapiens
  misc_RNA (1)...(19): siRNA sense strand
agaaagagcuaucaaggau

SEQ ID NO: 170676 - RNA, 19 nt, Homo sapiens
  misc_RNA (1)...(19): siRNA sense strand
gaguaaaguugaugcaguu

SEQ ID NO: 170677 - RNA, 19 nt, Homo sapiens
  misc_RNA (1)...(19): siRNA sense strand
auaaauggcuuaacuguag

SEQ ID NO: 170678 - RNA, 19 nt, Homo sapiens
  misc_RNA (1)...(19): siRNA sense strand
uuaaagaaaugcagcgauu

SEQ ID NO: 170679 - RNA, 19 nt, Homo sapiens
  misc_RNA (1)...(19): siRNA sense strand
gagauaugauaaccaaaga

SEQ ID NO: 170680 - RNA, 19 nt, Homo sapiens
  misc_RNA (1)...(19): siRNA sense strand
ggaaaaguucuaccaauua

SEQ ID NO: 170681 - RNA, 19 nt, Homo sapiens
  misc_RNA (1)...(19): siRNA sense strand
ggagccagguuaucccaaa

SEQ ID NO: 170682 - RNA, 19 nt, Homo sapiens
  misc_RNA (1)...(19): siRNA sense strand
gaccaauucuggagauaug

SEQ ID NO: 170683 - RNA, 19 nt, Homo sapiens
  misc_RNA (1)...(19): siRNA sense strand
ggaagaauggcacuaaugu

SEQ ID NO: 170684 - RNA, 19 nt, Homo sapiens
  misc_RNA (1)...(19): siRNA sense strand
gaauggcacuaaugugauc

SEQ ID NO: 170685 - RNA, 19 nt, Homo sapiens
  misc_RNA (1)...(19): siRNA sense strand
guauacaggcugcuuauga

SEQ ID NO: 170686 - RNA, 19 nt, Homo sapiens
  misc_RNA (1)...(19): siRNA sense strand
uggcuuaacuguagauaug

SEQ ID NO: 170687 - RNA, 19 nt, Homo sapiens
  misc_RNA (1)...(19): siRNA sense strand
ggaauagagaguaaaguug

SEQ ID NO: 170688 - RNA, 19 nt, Homo sapiens
  misc_RNA (1)...(19): siRNA sense strand
gcacuaacuugaccuacag

SEQ ID NO: 170689 - RNA, 19 nt, Homo sapiens
  misc_RNA (1)...(19): siRNA sense strand
accaagauauuacgcauuu

SEQ ID NO: 170690 - RNA, 19 nt, Homo sapiens
  misc_RNA (1)...(19): siRNA sense strand
uauacaggcugcuuaugaa

SEQ ID NO: 170691 - RNA, 19 nt, Homo sapiens
  misc_RNA (1)...(19): siRNA sense strand
uaacuugaccuacaggauu

SEQ ID NO: 170692 - RNA, 19 nt, Homo sapiens
  misc_RNA (1)...(19): siRNA sense strand
ugacaauucuccauuugau

SEQ ID NO: 170693 - RNA, 19 nt, Homo sapiens
  misc_RNA (1)...(19): siRNA sense strand
ggcaauaaauggcuuaacu

SEQ ID NO: 170694 - RNA, 19 nt, Homo sapiens
  misc_RNA (1)...(19): siRNA sense strand
gcaauugacgcagcuguuu

SEQ ID NO: 170695 - RNA, 19 nt, Homo sapiens
  misc_RNA (1)...(19): siRNA sense strand
cuacaggauucgaaacuau

SEQ ID NO: 170696 - RNA, 19 nt, Homo sapiens
  misc_RNA (1)...(19): siRNA sense strand
caagauauuacgcauuuga

SEQ ID NO: 170697 - RNA, 19 nt, Homo sapiens
  misc_RNA (1)...(19): siRNA sense strand
gcucugaguggcuaugaua

SEQ ID NO: 170698 - RNA, 19 nt, Homo sapiens
  misc_RNA (1)...(19): siRNA sense strand
caaagagucgaaaugaauu

SEQ ID NO: 170699 - RNA, 19 nt, Homo sapiens
  misc_RNA (1)...(19): siRNA sense strand
ggugacaauucuccauuug

SEQ ID NO: 170700 - RNA, 19 nt, Homo sapiens
  misc_RNA (1)...(19): siRNA sense strand
gcagauaucaacauugcuu

SEQ ID NO: 170701 - RNA, 19 nt, Homo sapiens
  misc_RNA (1)...(19): siRNA sense strand
ucagagaguuaccagaguu

SEQ ID NO: 170702 - RNA, 19 nt, Homo sapiens
  misc_RNA (1)...(19): siRNA sense strand
cuacaaagagucgaaauga

SEQ ID NO: 170703 - RNA, 19 nt, Homo sapiens
  misc_RNA (1)...(19): siRNA sense strand
caaggaagaauggcacuaa

SEQ ID NO: 170704 - RNA, 19 nt, Homo sapiens
  misc_RNA (1)...(19): siRNA sense strand
gcucaugaauuuggccauu

SEQ ID NO: 170705 - RNA, 19 nt, Homo sapiens
  misc_RNA (1)...(19): siRNA sense strand
ggagauaugauaaccaaag

SEQ ID NO: 170706 - RNA, 19 nt, Homo sapiens
  misc_RNA (1)...(19): siRNA sense strand
ugaggaaacucuggacaug

SEQ ID NO: 170707 - RNA, 19 nt, Homo sapiens
  misc_RNA (1)...(19): siRNA sense strand
ccaacaccuccgcaaauua

SEQ ID NO: 170708 - RNA, 19 nt, Homo sapiens
  misc_RNA (1)...(19): siRNA sense strand
aagaauggcacuaauguga

SEQ ID NO: 170709 - RNA, 19 nt, Homo sapiens
  misc_RNA (1)...(19): siRNA sense strand
acaaagagucgaaaugaau

SEQ ID NO: 170710 - RNA, 19 nt, Homo sapiens
  misc_RNA (1)...(19): siRNA sense strand
ggaccaacaccuccgcaaa

SEQ ID NO: 170711 - RNA, 19 nt, Homo sapiens
  misc_RNA (1)...(19): siRNA sense strand
agaggcagauaucaacauu

SEQ ID NO: 170712 - RNA, 19 nt, Homo sapiens
  misc_RNA (1)...(19): siRNA sense strand
uacaaagagucgaaaugaa

SEQ ID NO: 170713 - RNA, 19 nt, Homo sapiens
  misc_RNA (1)...(19): siRNA sense strand
gaaggcauccucagcuaca

SEQ ID NO: 170714 - RNA, 19 nt, Homo sapiens
  misc_RNA (1)...(19): siRNA sense strand
ucaguggaccaagauauua

SEQ ID NO: 170715 - RNA, 19 nt, Homo sapiens
  misc_RNA (1)...(19): siRNA sense strand
gaccaacaccuccgcaaau

SEQ ID NO: 170716 - RNA, 19 nt, Homo sapiens
  misc_RNA (1)...(19): siRNA sense strand
gcaauaaauggcuuaacug

SEQ ID NO: 170717 - RNA, 19 nt, Homo sapiens
  misc_RNA (1)...(19): siRNA sense strand
aagcauaucaggugccuuu

SEQ ID NO: 170718 - RNA, 19 nt, Homo sapiens
  misc_RNA (1)...(19): siRNA sense strand
gauaugauaaccaaagaca

SEQ ID NO: 170719 - RNA, 19 nt, Homo sapiens
  misc_RNA (1)...(19): siRNA sense strand
gaccucauuuuccuauuua

SEQ ID NO: 170720 - RNA, 19 nt, Homo sapiens
  misc_RNA (1)...(19): siRNA sense strand
gaaaaguucuaccaauuac

SEQ ID NO: 170721 - RNA, 19 nt, Homo sapiens
  misc_RNA (1)...(19): siRNA sense strand
gaagaauggcacuaaugug

SEQ ID NO: 170722 - RNA, 19 nt, Homo sapiens
  misc_RNA (1)...(19): siRNA sense strand
caauaaauggcuuaacugu

SEQ ID NO: 170723 - RNA, 19 nt, Homo sapiens
  misc_RNA (1)...(19): siRNA sense strand
caacaccuccgcaaauuac

SEQ ID NO: 170724 - RNA, 19 nt, Homo sapiens
  misc_RNA (1)...(19): siRNA sense strand
uccaaggccuuuccuguau

SEQ ID NO: 170725 - RNA, 19 nt, Homo sapiens
  misc_RNA (1)...(19): siRNA sense strand
gaaacucuggacaugauga

SEQ ID NO: 170726 - RNA, 19 nt, Homo sapiens
  misc_RNA (1)...(19): siRNA sense strand
ugacaucgauggcauucag

SEQ ID NO: 170727 - RNA, 19 nt, Homo sapiens
  misc_RNA (1)...(19): siRNA sense strand
ucuauggacuuucaagcaa

SEQ ID NO: 170728 - RNA, 19 nt, Homo sapiens
  misc_RNA (1)...(19): siRNA sense strand
aauccuugcucaugccuuu

SEQ ID NO: 170729 - RNA, 19 nt, Homo sapiens
  misc_RNA (1)...(19): siRNA sense strand
uaaauggcuuaacuguaga

SEQ ID NO: 170730 - RNA, 19 nt, Homo sapiens
  misc_RNA (1)...(19): siRNA sense strand
ggaccaagcacacccaaac

SEQ ID NO: 170731 - RNA, 19 nt, Homo sapiens
  misc_RNA (1)...(19): siRNA sense strand
augauauucugcaagguua

SEQ ID NO: 170732 - RNA, 19 nt, Homo sapiens
  misc_RNA (1)...(19): siRNA sense strand
caguaucagucuacaagga

SEQ ID NO: 170733 - RNA, 19 nt, Homo sapiens
  misc_RNA (1)...(19): siRNA sense strand
ggaaaccagcaacuacuca

SEQ ID NO: 170734 - RNA, 19 nt, Homo sapiens
  misc_RNA (1)...(19): siRNA sense strand
gauauuacgcauuugaucu

SEQ ID NO: 170735 - RNA, 19 nt, Homo sapiens
  misc_RNA (1)...(19): siRNA sense strand
cagcagcguccaagcaauu

SEQ ID NO: 170736 - RNA, 19 nt, Homo sapiens
  misc_RNA (1)...(19): siRNA sense strand
uaaccaaagacaauucaug

SEQ ID NO: 170737 - RNA, 19 nt, Homo sapiens
  misc_RNA (1)...(19): siRNA sense strand
gauaaccaaagacaauuca

SEQ ID NO: 170738 - RNA, 19 nt, Homo sapiens
  misc_RNA (1)...(19): siRNA sense strand
gaagccaaaugaggaaacu

SEQ ID NO: 170739 - RNA, 19 nt, Homo sapiens
  misc_RNA (1)...(19): siRNA sense strand
cuggagauaugauaaccaa

SEQ ID NO: 170740 - RNA, 19 nt, Homo sapiens
  misc_RNA (1)...(19): siRNA sense strand
gaggaaacucuggacauga

SEQ ID NO: 170741 - RNA, 19 nt, Homo sapiens
  misc_RNA (1)...(19): siRNA sense strand
aggaaacucuggacaugau

SEQ ID NO: 170742 - RNA, 19 nt, Homo sapiens
  misc_RNA (1)...(19): siRNA sense strand
cuugauguaucccaacuau

SEQ ID NO: 170743 - RNA, 19 nt, Homo sapiens
  misc_RNA (1)...(19): siRNA sense strand
uguugcugcucaugaauuu

SEQ ID NO: 170744 - RNA, 19 nt, Homo sapiens
  misc_RNA (1)...(19): siRNA sense strand
cggugacaauucuccauuu

SEQ ID NO: 170745 - RNA, 19 nt, Homo sapiens
  misc_RNA (1)...(19): siRNA sense strand
ccuacaggauucgaaacua

SEQ ID NO: 170746 - RNA, 19 nt, Homo sapiens
  misc_RNA (1)...(19): siRNA sense strand
uagaaagagcuaucaagga

SEQ ID NO: 170747 - RNA, 19 nt, Homo sapiens
  misc_RNA (1)...(19): siRNA sense strand
uggaggagaugcucauuuu

SEQ ID NO: 170748 - RNA, 19 nt, Homo sapiens
  misc_RNA (1)...(19): siRNA sense strand
uggaaaaguucuaccaauu

SEQ ID NO: 170749 - RNA, 19 nt, Homo sapiens
  misc_RNA (1)...(19): siRNA sense strand
gcagauuuccaaggccuuu

SEQ ID NO: 170750 - RNA, 19 nt, Homo sapiens
  misc_RNA (1)...(19): siRNA sense strand
cuuuguaaaugaccaauuc

SEQ ID NO: 170751 - RNA, 19 nt, Homo sapiens
  misc_RNA (1)...(19): siRNA sense strand
gcuacaaagagucgaaaug

SEQ ID NO: 170752 - RNA, 19 nt, Homo sapiens
  misc_RNA (1)...(19): siRNA sense strand
caacuacucacucccucaa

SEQ ID NO: 170753 - RNA, 19 nt, Homo sapiens
  misc_RNA (1)...(19): siRNA sense strand
cauaucaggugccuuucca

SEQ ID NO: 170754 - RNA, 19 nt, Homo sapiens
  misc_RNA (1)...(19): siRNA sense strand
ugcaucaccucucaucuuc

SEQ ID NO: 170755 - RNA, 19 nt, Homo sapiens
  misc_RNA (1)...(19): siRNA sense strand
uaaaguugaugcaguuuuc

SEQ ID NO: 170756 - RNA, 19 nt, Homo sapiens
  misc_RNA (1)...(19): siRNA sense strand
gaguggcuaugauauucug

SEQ ID NO: 170757 - RNA, 19 nt, Homo sapiens
  misc_RNA (1)...(19): siRNA sense strand
cugaguggcuaugauauuc

SEQ ID NO: 170758 - RNA, 19 nt, Homo sapiens
  misc_RNA (1)...(19): siRNA sense strand
acaggcugcuuaugaagau

SEQ ID NO: 170759 - RNA, 19 nt, Homo sapiens
  misc_RNA (1)...(19): siRNA sense strand
accaacaccuccgcaaauu

SEQ ID NO: 170760 - RNA, 19 nt, Homo sapiens
  misc_RNA (1)...(19): siRNA sense strand
gaggagaugcucauuuuga

SEQ ID NO: 170761 - RNA, 19 nt, Homo sapiens
  misc_RNA (1)...(19): siRNA sense strand
caauucuggagauaugaua

SEQ ID NO: 170762 - RNA, 19 nt, Homo sapiens
  misc_RNA (1)...(19): siRNA sense strand
caaggccuuuccuguaucu

SEQ ID NO: 170763 - RNA, 19 nt, Homo sapiens
  misc_RNA (1)...(19): siRNA sense strand
ccaaggccuuuccuguauc

SEQ ID NO: 170764 - RNA, 19 nt, Homo sapiens
  misc_RNA (1)...(19): siRNA sense strand
aggaauagagaguaaaguu

SEQ ID NO: 170765 - RNA, 19 nt, Homo sapiens
  misc_RNA (1)...(19): siRNA sense strand
uaugauauucugcaagguu

SEQ ID NO: 170766 - RNA, 19 nt, Homo sapiens
  misc_RNA (1)...(19): siRNA sense strand
uacaggauucgaaacuaua

SEQ ID NO: 170767 - RNA, 19 nt, Homo sapiens
  misc_RNA (1)...(19): siRNA sense strand
gcuuccauuucugcucuua

SEQ ID NO: 170768 - RNA, 19 nt, Homo sapiens
  misc_RNA (1)...(19): siRNA sense strand
ugacgcagcuguuuucuac

SEQ ID NO: 170769 - RNA, 19 nt, Homo sapiens
  misc_RNA (1)...(19): siRNA sense strand
ugacagagaccucauuuuc

SEQ ID NO: 170770 - RNA, 19 nt, Homo sapiens
  misc_RNA (1)...(19): siRNA sense strand
caacagcgccauuuaaaua

SEQ ID NO: 170771 - RNA, 19 nt, Homo sapiens
  misc_RNA (1)...(19): siRNA sense strand
ggaauaaggugucccaaga

SEQ ID NO: 170772 - RNA, 19 nt, Homo sapiens
  misc_RNA (1)...(19): siRNA sense strand
uaauagaacuugccaaaga

SEQ ID NO: 170773 - RNA, 19 nt, Homo sapiens
  misc_RNA (1)...(19): siRNA sense strand
gcaagcaucuggaacaaug

SEQ ID NO: 170774 - RNA, 19 nt, Homo sapiens
  misc_RNA (1)...(19): siRNA sense strand
gaaaggagauaaacuucga

SEQ ID NO: 170775 - RNA, 19 nt, Homo sapiens
  misc_RNA (1)...(19): siRNA sense strand
ccaguaagacucaauauuu

SEQ ID NO: 170776 - RNA, 19 nt, Homo sapiens
  misc_RNA (1)...(19): siRNA sense strand
ggaagaaggucauuaccau

SEQ ID NO: 170777 - RNA, 19 nt, Homo sapiens
  misc_RNA (1)...(19): siRNA sense strand
aaagauaugccaucacuua

SEQ ID NO: 170778 - RNA, 19 nt, Homo sapiens
  misc_RNA (1)...(19): siRNA sense strand
gaaggaccaaugaauguua

SEQ ID NO: 170779 - RNA, 19 nt, Homo sapiens
  misc_RNA (1)...(19): siRNA sense strand
gaagaaauguuccccaaaa

SEQ ID NO: 170780 - RNA, 19 nt, Homo sapiens
  misc_RNA (1)...(19): siRNA sense strand
gcagguggaugcaagaaga

SEQ ID NO: 170781 - RNA, 19 nt, Homo sapiens
  misc_RNA (1)...(19): siRNA sense strand
gaaaggauuugagcucaug

SEQ ID NO: 170782 - RNA, 19 nt, Homo sapiens
  misc_RNA (1)...(19): siRNA sense strand
gaagaaggucauuaccaua

SEQ ID NO: 170783 - RNA, 19 nt, Homo sapiens
  misc_RNA (1)...(19): siRNA sense strand
ggaaauaaaggaagcauca

SEQ ID NO: 170784 - RNA, 19 nt, Homo sapiens
  misc_RNA (1)...(19): siRNA sense strand
guaaaggaguaauggaaau

SEQ ID NO: 170785 - RNA, 19 nt, Homo sapiens
  misc_RNA (1)...(19): siRNA sense strand
caagaggaauacaacagaa

SEQ ID NO: 170786 - RNA, 19 nt, Homo sapiens
  misc_RNA (1)...(19): siRNA sense strand
gaaagcaacagcgccauuu

SEQ ID NO: 170787 - RNA, 19 nt, Homo sapiens
  misc_RNA (1)...(19): siRNA sense strand
gaggaauacaacagaauua

SEQ ID NO: 170788 - RNA, 19 nt, Homo sapiens
  misc_RNA (1)...(19): siRNA sense strand
gagauaaacuucgacucuu

SEQ ID NO: 170789 - RNA, 19 nt, Homo sapiens
  misc_RNA (1)...(19): siRNA sense strand
caagaucagucaacuuuac

SEQ ID NO: 170790 - RNA, 19 nt, Homo sapiens
  misc_RNA (1)...(19): siRNA sense strand
ccaaagauaugccaucacu

SEQ ID NO: 170791 - RNA, 19 nt, Homo sapiens
  misc_RNA (1)...(19): siRNA sense strand
gauuacagauuugauggaa

SEQ ID NO: 170792 - RNA, 19 nt, Homo sapiens
  misc_RNA (1)...(19): siRNA sense strand
gcaagaggaauacaacaga

SEQ ID NO: 170793 - RNA, 19 nt, Homo sapiens
  misc_RNA (1)...(19): siRNA sense strand
caguaagacucaauauuuc

SEQ ID NO: 170794 - RNA, 19 nt, Homo sapiens
  misc_RNA (1)...(19): siRNA sense strand
ccaaacagaauuaucgaaa

SEQ ID NO: 170795 - RNA, 19 nt, Homo sapiens
  misc_RNA (1)...(19): siRNA sense strand
uaccauaucugauuacucu

SEQ ID NO: 170796 - RNA, 19 nt, Homo sapiens
  misc_RNA (1)...(19): siRNA sense strand
gauaugccaucacuuaaaa

SEQ ID NO: 170797 - RNA, 19 nt, Homo sapiens
  misc_RNA (1)...(19): siRNA sense strand
ggagauaaacuucgacucu

SEQ ID NO: 170798 - RNA, 19 nt, Homo sapiens
  misc_RNA (1)...(19): siRNA sense strand
gaaaagagaagucaaaagu

SEQ ID NO: 170799 - RNA, 19 nt, Homo sapiens
  misc_RNA (1)...(19): siRNA sense strand
gaaggucauuaccauaucu

SEQ ID NO: 170800 - RNA, 19 nt, Homo sapiens
  misc_RNA (1)...(19): siRNA sense strand
gaagcaagagggaggauuc

SEQ ID NO: 170801 - RNA, 19 nt, Homo sapiens
  misc_RNA (1)...(19): siRNA sense strand
guguauggguuguuuaugu

SEQ ID NO: 170802 - RNA, 19 nt, Homo sapiens
  misc_RNA (1)...(19): siRNA sense strand
ucagucaacuuuacaagca

SEQ ID NO: 170803 - RNA, 19 nt, Homo sapiens
  misc_RNA (1)...(19): siRNA sense strand
gaaagagaaauuuguaagg

SEQ ID NO: 170804 - RNA, 19 nt, Homo sapiens
  misc_RNA (1)...(19): siRNA sense strand
gugaaagucuucgacauca

SEQ ID NO: 170805 - RNA, 19 nt, Homo sapiens
  misc_RNA (1)...(19): siRNA sense strand
guaaggaagaaggucauua

SEQ ID NO: 170806 - RNA, 19 nt, Homo sapiens
  misc_RNA (1)...(19): siRNA sense strand
ugagaaaggagauaaacuu

SEQ ID NO: 170807 - RNA, 19 nt, Homo sapiens
  misc_RNA (1)...(19): siRNA sense strand
aaagagaagucaaaaguug

SEQ ID NO: 170808 - RNA, 19 nt, Homo sapiens
  misc_RNA (1)...(19): siRNA sense strand
gagaaaggagauaaacuuc

SEQ ID NO: 170809 - RNA, 19 nt, Homo sapiens
  misc_RNA (1)...(19): siRNA sense strand
cuuacuggccuaugauuua

SEQ ID NO: 170810 - RNA, 19 nt, Homo sapiens
  misc_RNA (1)...(19): siRNA sense strand
gcaacagcgccauuuaaau

SEQ ID NO: 170811 - RNA, 19 nt, Homo sapiens
  misc_RNA (1)...(19): siRNA sense strand
caaggaaggaccaaugaau

SEQ ID NO: 170812 - RNA, 19 nt, Homo sapiens
  misc_RNA (1)...(19): siRNA sense strand
cccaagaucagucaacuuu

SEQ ID NO: 170813 - RNA, 19 nt, Homo sapiens
  misc_RNA (1)...(19): siRNA sense strand
aaacugacaucggaagcaa

SEQ ID NO: 170814 - RNA, 19 nt, Homo sapiens
  misc_RNA (1)...(19): siRNA sense strand
cacaagaagaacacaauuu

SEQ ID NO: 170815 - RNA, 19 nt, Homo sapiens
  misc_RNA (1)...(19): siRNA sense strand
gcaagaaacaaacugacau

SEQ ID NO: 170816 - RNA, 19 nt, Homo sapiens
  misc_RNA (1)...(19): siRNA sense strand
aaacaaggaaggaccaaug

SEQ ID NO: 170817 - RNA, 19 nt, Homo sapiens
  misc_RNA (1)...(19): siRNA sense strand
caauaucaagugugagaaa

SEQ ID NO: 170818 - RNA, 19 nt, Homo sapiens
  misc_RNA (1)...(19): siRNA sense strand
aaagcaacagcgccauuua

SEQ ID NO: 170819 - RNA, 19 nt, Homo sapiens
  misc_RNA (1)...(19): siRNA sense strand
ggaaggaccaaugaauguu

SEQ ID NO: 170820 - RNA, 19 nt, Homo sapiens
  misc_RNA (1)...(19): siRNA sense strand
ggucaucaaggccaagaaa

SEQ ID NO: 170821 - RNA, 19 nt, Homo sapiens
  misc_RNA (1)...(19): siRNA sense strand
gaugcaagaagaaauguuc

SEQ ID NO: 170822 - RNA, 19 nt, Homo sapiens
  misc_RNA (1)...(19): siRNA sense strand
ggaccaaugaauguuaauu

SEQ ID NO: 170823 - RNA, 19 nt, Homo sapiens
  misc_RNA (1)...(19): siRNA sense strand
agauaaacuucgacucuuc

SEQ ID NO: 170824 - RNA, 19 nt, Homo sapiens
  misc_RNA (1)...(19): siRNA sense strand
uaucaagugugagaaagga

SEQ ID NO: 170825 - RNA, 19 nt, Homo sapiens
  misc_RNA (1)...(19): siRNA sense strand
caagcaagcaucuggaaca

SEQ ID NO: 170826 - RNA, 19 nt, Homo sapiens
  misc_RNA (1)...(19): siRNA sense strand
ccaagaucagucaacuuua

SEQ ID NO: 170827 - RNA, 19 nt, Homo sapiens
  misc_RNA (1)...(19): siRNA sense strand
ggaauacaacagaauuaag

SEQ ID NO: 170828 - RNA, 19 nt, Homo sapiens
  misc_RNA (1)...(19): siRNA sense strand
gucauuaccauaucugauu

SEQ ID NO: 170829 - RNA, 19 nt, Homo sapiens
  misc_RNA (1)...(19): siRNA sense strand
agaaaagacugaagccaaa

SEQ ID NO: 170830 - RNA, 19 nt, Homo sapiens
  misc_RNA (1)...(19): siRNA sense strand
aaggaccaaugaauguuaa

SEQ ID NO: 170831 - RNA, 19 nt, Homo sapiens
  misc_RNA (1)...(19): siRNA sense strand
guauggguuguuuauguua

SEQ ID NO: 170832 - RNA, 19 nt, Homo sapiens
  misc_RNA (1)...(19): siRNA sense strand
uguauggguuguuuauguu

SEQ ID NO: 170833 - RNA, 19 nt, Homo sapiens
  misc_RNA (1)...(19): siRNA sense strand
aauagaacuugccaaagau

SEQ ID NO: 170834 - RNA, 19 nt, Homo sapiens
  misc_RNA (1)...(19): siRNA sense strand
aagcaacagcgccauuuaa

SEQ ID NO: 170835 - RNA, 19 nt, Homo sapiens
  misc_RNA (1)...(19): siRNA sense strand
gcaaauaaaacucccaaga

SEQ ID NO: 170836 - RNA, 19 nt, Homo sapiens
  misc_RNA (1)...(19): siRNA sense strand
gaggucccaaacagaauua

SEQ ID NO: 170837 - RNA, 19 nt, Homo sapiens
  misc_RNA (1)...(19): siRNA sense strand
ggugaaugaauacaagaaa

SEQ ID NO: 170838 - RNA, 19 nt, Homo sapiens
  misc_RNA (1)...(19): siRNA sense strand
gaaagucuucgacaucaac

SEQ ID NO: 170839 - RNA, 19 nt, Homo sapiens
  misc_RNA (1)...(19): siRNA sense strand
gcacccaccgcaagaaaca

SEQ ID NO: 170840 - RNA, 19 nt, Homo sapiens
  misc_RNA (1)...(19): siRNA sense strand
gccaguaagacucaauauu

SEQ ID NO: 170841 - RNA, 19 nt, Homo sapiens
  misc_RNA (1)...(19): siRNA sense strand
cauaucugauuacucugaa

SEQ ID NO: 170842 - RNA, 19 nt, Homo sapiens
  misc_RNA (1)...(19): siRNA sense strand
gucaaaaguugcuaagaaa

SEQ ID NO: 170843 - RNA, 19 nt, Homo sapiens
  misc_RNA (1)...(19): siRNA sense strand
aagaaggucauuaccauau

SEQ ID NO: 170844 - RNA, 19 nt, Homo sapiens
  misc_RNA (1)...(19): siRNA sense strand
ucaacuccauccaacacuu

SEQ ID NO: 170845 - RNA, 19 nt, Homo sapiens
  misc_RNA (1)...(19): siRNA sense strand
ucugauuacucugaaugua

SEQ ID NO: 170846 - RNA, 19 nt, Homo sapiens
  misc_RNA (1)...(19): siRNA sense strand
caagaaacaaacugacauc

SEQ ID NO: 170847 - RNA, 19 nt, Homo sapiens
  misc_RNA (1)...(19): siRNA sense strand
uaaggaagaaggucauuac

SEQ ID NO: 170848 - RNA, 19 nt, Homo sapiens
  misc_RNA (1)...(19): siRNA sense strand
ugaaagucuucgacaucaa

SEQ ID NO: 170849 - RNA, 19 nt, Homo sapiens
  misc_RNA (1)...(19): siRNA sense strand
ggauuccuguagcucagaa

SEQ ID NO: 170850 - RNA, 19 nt, Homo sapiens
  misc_RNA (1)...(19): siRNA sense strand
gaaauacaggauaauacag

SEQ ID NO: 170851 - RNA, 19 nt, Homo sapiens
  misc_RNA (1)...(19): siRNA sense strand
aaauaaaacucccaagauc

SEQ ID NO: 170852 - RNA, 19 nt, Homo sapiens
  misc_RNA (1)...(19): siRNA sense strand
acuaauagaacuugccaaa

SEQ ID NO: 170853 - RNA, 19 nt, Homo sapiens
  misc_RNA (1)...(19): siRNA sense strand
gacaaacuaauagaacuug

SEQ ID NO: 170854 - RNA, 19 nt, Homo sapiens
  misc_RNA (1)...(19): siRNA sense strand
aaauaaaccaggaagaagu

SEQ ID NO: 170855 - RNA, 19 nt, Homo sapiens
  misc_RNA (1)...(19): siRNA sense strand
gaauguaaaggaguaaugg

SEQ ID NO: 170856 - RNA, 19 nt, Homo sapiens
  misc_RNA (1)...(19): siRNA sense strand
gaauaaggugucccaagag

SEQ ID NO: 170857 - RNA, 19 nt, Homo sapiens
  misc_RNA (1)...(19): siRNA sense strand
gaaacugguguguggaagu

SEQ ID NO: 170858 - RNA, 19 nt, Homo sapiens
  misc_RNA (1)...(19): siRNA sense strand
ggaguaauggaaauaaagg

SEQ ID NO: 170859 - RNA, 19 nt, Homo sapiens
  misc_RNA (1)...(19): siRNA sense strand
ccauaucugauuacucuga

SEQ ID NO: 170860 - RNA, 19 nt, Homo sapiens
  misc_RNA (1)...(19): siRNA sense strand
gacucaauauuuccaugug

SEQ ID NO: 170861 - RNA, 19 nt, Homo sapiens
  misc_RNA (1)...(19): siRNA sense strand
caucaucaacuccauccaa

SEQ ID NO: 170862 - RNA, 19 nt, Homo sapiens
  misc_RNA (1)...(19): siRNA sense strand
ccauccaacacuucguuua

SEQ ID NO: 170863 - RNA, 19 nt, Homo sapiens
  misc_RNA (1)...(19): siRNA sense strand
agaggaauacaacagaauu

SEQ ID NO: 170864 - RNA, 19 nt, Homo sapiens
  misc_RNA (1)...(19): siRNA sense strand
agauaugccaucacuuaaa

SEQ ID NO: 170865 - RNA, 19 nt, Homo sapiens
  misc_RNA (1)...(19): siRNA sense strand
uguaaaggaguaauggaaa

SEQ ID NO: 170866 - RNA, 19 nt, Homo sapiens
  misc_RNA (1)...(19): siRNA sense strand
gaacuugccaaagauaugc

SEQ ID NO: 170867 - RNA, 19 nt, Homo sapiens
  misc_RNA (1)...(19): siRNA sense strand
gagaaauuuguaaggaaga

SEQ ID NO: 170868 - RNA, 19 nt, Homo sapiens
  misc_RNA (1)...(19): siRNA sense strand
guacacaagaagaacacaa

SEQ ID NO: 170869 - RNA, 19 nt, Homo sapiens
  misc_RNA (1)...(19): siRNA sense strand
aaacugguguguggaaguc

SEQ ID NO: 170870 - RNA, 19 nt, Homo sapiens
  misc_RNA (1)...(19): siRNA sense strand
guaccagacuucaccauua

SEQ ID NO: 170871 - RNA, 19 nt, Homo sapiens
  misc_RNA (1)...(19): siRNA sense strand
cgaaggaccugcugauauu

SEQ ID NO: 170872 - RNA, 19 nt, Homo sapiens
  misc_RNA (1)...(19): siRNA sense strand
uaaagaaggugccugaguu

SEQ ID NO: 170873 - RNA, 19 nt, Homo sapiens
  misc_RNA (1)...(19): siRNA sense strand
acaaggagcuggcagagaa

SEQ ID NO: 170874 - RNA, 19 nt, Homo sapiens
  misc_RNA (1)...(19): siRNA sense strand
caacauggaggacaucuuu

SEQ ID NO: 170875 - RNA, 19 nt, Homo sapiens
  misc_RNA (1)...(19): siRNA sense strand
gaaacaacauggaggacau

SEQ ID NO: 170876 - RNA, 19 nt, Homo sapiens
  misc_RNA (1)...(19): siRNA sense strand
gagauuguaaccuuucuaa

SEQ ID NO: 170877 - RNA, 19 nt, Homo sapiens
  misc_RNA (1)...(19): siRNA sense strand
aaagugcucucaguugaaa

SEQ ID NO: 170878 - RNA, 19 nt, Homo sapiens
  misc_RNA (1)...(19): siRNA sense strand
gccaguggauugcugagaa

SEQ ID NO: 170879 - RNA, 19 nt, Homo sapiens
  misc_RNA (1)...(19): siRNA sense strand
ccgcgaguauucccacuuu

SEQ ID NO: 170880 - RNA, 19 nt, Homo sapiens
  misc_RNA (1)...(19): siRNA sense strand
uaccagacuucaccauuau

SEQ ID NO: 170881 - RNA, 19 nt, Homo sapiens
  misc_RNA (1)...(19): siRNA sense strand
ucgcagaggacaagccuua

SEQ ID NO: 170882 - RNA, 19 nt, Homo sapiens
  misc_RNA (1)...(19): siRNA sense strand
ugaggagauuguaaccuuu

SEQ ID NO: 170883 - RNA, 19 nt, Homo sapiens
  misc_RNA (1)...(19): siRNA sense strand
ggugauaucggcugcuuug

SEQ ID NO: 170884 - RNA, 19 nt, Homo sapiens
  misc_RNA (1)...(19): siRNA sense strand
gugaaaugcucagcuauac

SEQ ID NO: 170885 - RNA, 19 nt, Homo sapiens
  misc_RNA (1)...(19): siRNA sense strand
caacacggagucaggaaga

SEQ ID NO: 170886 - RNA, 19 nt, Homo sapiens
  misc_RNA (1)...(19): siRNA sense strand
ccugugcggugcagcagua

SEQ ID NO: 170887 - RNA, 19 nt, Homo sapiens
  misc_RNA (1)...(19): siRNA sense strand
caaccugcccuuccucuuc

SEQ ID NO: 170888 - RNA, 19 nt, Homo sapiens
  misc_RNA (1)...(19): siRNA sense strand
ugugugaaaugcucagcua

SEQ ID NO: 170889 - RNA, 19 nt, Homo sapiens
  misc_RNA (1)...(19): siRNA sense strand
gcagaggacaagccuuaug

SEQ ID NO: 170890 - RNA, 19 nt, Homo sapiens
  misc_RNA (1)...(19): siRNA sense strand
gaugaagagugagaagaag

SEQ ID NO: 170891 - RNA, 19 nt, Homo sapiens
  misc_RNA (1)...(19): siRNA sense strand
gagaugaggcagcaacaca

SEQ ID NO: 170892 - RNA, 19 nt, Homo sapiens
  misc_RNA (1)...(19): siRNA sense strand
aaagaaggugccugaguuu

SEQ ID NO: 170893 - RNA, 19 nt, Homo sapiens
  misc_RNA (1)...(19): siRNA sense strand
gacaaccgcaucucacaga

SEQ ID NO: 170894 - RNA, 19 nt, Homo sapiens
  misc_RNA (1)...(19): siRNA sense strand
caaagugcucucaguugaa

SEQ ID NO: 170895 - RNA, 19 nt, Homo sapiens
  misc_RNA (1)...(19): siRNA sense strand
uugaggagauuguaaccuu

SEQ ID NO: 170896 - RNA, 19 nt, Homo sapiens
  misc_RNA (1)...(19): siRNA sense strand
ccgaaggaccugcugauau

SEQ ID NO: 170897 - RNA, 19 nt, Homo sapiens
  misc_RNA (1)...(19): siRNA sense strand
gcaaggacaggcucuuucu

SEQ ID NO: 170898 - RNA, 19 nt, Homo sapiens
  misc_RNA (1)...(19): siRNA sense strand
ugugaaaugcucagcuaua

SEQ ID NO: 170899 - RNA, 19 nt, Homo sapiens
  misc_RNA (1)...(19): siRNA sense strand
gugccaacccugugugaaa

SEQ ID NO: 170900 - RNA, 19 nt, Homo sapiens
  misc_RNA (1)...(19): siRNA sense strand
gaaccugcuuacccugaag

SEQ ID NO: 170901 - RNA, 19 nt, Homo sapiens
  misc_RNA (1)...(19): siRNA sense strand
ugaugaagagugagaagaa

SEQ ID NO: 170902 - RNA, 19 nt, Homo sapiens
  misc_RNA (1)...(19): siRNA sense strand
cacccaaguucauugaugu

SEQ ID NO: 170903 - RNA, 19 nt, Homo sapiens
  misc_RNA (1)...(19): siRNA sense strand
acacccaaguucauugaug

SEQ ID NO: 170904 - RNA, 19 nt, Homo sapiens
  misc_RNA (1)...(19): siRNA sense strand
gaagaagguggugguggaa

SEQ ID NO: 170905 - RNA, 19 nt, Homo sapiens
  misc_RNA (1)...(19): siRNA sense strand
aaccgcaucucacagaaga

SEQ ID NO: 170906 - RNA, 19 nt, Homo sapiens
  misc_RNA (1)...(19): siRNA sense strand
gcaguacccaggugauauc

SEQ ID NO: 170907 - RNA, 19 nt, Homo sapiens
  misc_RNA (1)...(19): siRNA sense strand
cagcaguacccaggugaua

SEQ ID NO: 170908 - RNA, 19 nt, Homo sapiens
  misc_RNA (1)...(19): siRNA sense strand
ccacaacccagacaccaau

SEQ ID NO: 170909 - RNA, 19 nt, Homo sapiens
  misc_RNA (1)...(19): siRNA sense strand
ccagacuucaccauuauga

SEQ ID NO: 170910 - RNA, 19 nt, Homo sapiens
  misc_RNA (1)...(19): siRNA sense strand
caggacagcuugggcucaa

SEQ ID NO: 170911 - RNA, 19 nt, Homo sapiens
  misc_RNA (1)...(19): siRNA sense strand
caagccuuaugcagaguug

SEQ ID NO: 170912 - RNA, 19 nt, Homo sapiens
  misc_RNA (1)...(19): siRNA sense strand
ugaaccugcuuacccugaa

SEQ ID NO: 170913 - RNA, 19 nt, Homo sapiens
  misc_RNA (1)...(19): siRNA sense strand
gaggagauuguaaccuuuc

SEQ ID NO: 170914 - RNA, 19 nt, Homo sapiens
  misc_RNA (1)...(19): siRNA sense strand
ggagauuguaaccuuucua

SEQ ID NO: 170915 - RNA, 19 nt, Homo sapiens
  misc_RNA (1)...(19): siRNA sense strand
gccgaaggaccugcugaua

SEQ ID NO: 170916 - RNA, 19 nt, Homo sapiens
  misc_RNA (1)...(19): siRNA sense strand
cagcaaggacaggcucuuu

SEQ ID NO: 170917 - RNA, 19 nt, Homo sapiens
  misc_RNA (1)...(19): siRNA sense strand
agaaggugccugaguuuca

SEQ ID NO: 170918 - RNA, 19 nt, Homo sapiens
  misc_RNA (1)...(19): siRNA sense strand
agaagguggugguggaaca

SEQ ID NO: 170919 - RNA, 19 nt, Homo sapiens
  misc_RNA (1)...(19): siRNA sense strand
ugacacccaaguucauuga

SEQ ID NO: 170920 - RNA, 19 nt, Homo sapiens
  misc_RNA (1)...(19): siRNA sense strand
ccaguugaggagauuguaa

SEQ ID NO: 170921 - RNA, 19 nt, Homo sapiens
  misc_RNA (1)...(19): siRNA sense strand
gagacugcguggagugcau

SEQ ID NO: 170922 - RNA, 19 nt, Homo sapiens
  misc_RNA (1)...(19): siRNA sense strand
ggacagcuugggcucaaag

SEQ ID NO: 170923 - RNA, 19 nt, Homo sapiens
  misc_RNA (1)...(19): siRNA sense strand
gaaggaccugcugauauuc

SEQ ID NO: 170924 - RNA, 19 nt, Homo sapiens
  misc_RNA (1)...(19): siRNA sense strand
cuaaagaaggugccugagu

SEQ ID NO: 170925 - RNA, 19 nt, Homo sapiens
  misc_RNA (1)...(19): siRNA sense strand
cuggcucugucacugaaua

SEQ ID NO: 170926 - RNA, 19 nt, Homo sapiens
  misc_RNA (1)...(19): siRNA sense strand
ggaagaccccuaccucuca

SEQ ID NO: 170927 - RNA, 19 nt, Homo sapiens
  misc_RNA (1)...(19): siRNA sense strand
cagcaacacaccugaagca

SEQ ID NO: 170928 - RNA, 19 nt, Homo sapiens
  misc_RNA (1)...(19): siRNA sense strand
uggagugcauggcguguuc

SEQ ID NO: 170929 - RNA, 19 nt, Homo sapiens
  misc_RNA (1)...(19): siRNA sense strand
gcucugucacugaauacaa

SEQ ID NO: 170930 - RNA, 19 nt, Homo sapiens
  misc_RNA (1)...(19): siRNA sense strand
caaccacaagccagagaug

SEQ ID NO: 170931 - RNA, 19 nt, Homo sapiens
  misc_RNA (1)...(19): siRNA sense strand
gaagaccccuaccucucaa

SEQ ID NO: 170932 - RNA, 19 nt, Homo sapiens
  misc_RNA (1)...(19): siRNA sense strand
caggugauaucggcugcuu

SEQ ID NO: 170933 - RNA, 19 nt, Homo sapiens
  misc_RNA (1)...(19): siRNA sense strand
acaaccgcaucucacagaa

SEQ ID NO: 170934 - RNA, 19 nt, Homo sapiens
  misc_RNA (1)...(19): siRNA sense strand
aggcacacccuaacaagga

SEQ ID NO: 170935 - RNA, 19 nt, Homo sapiens
  misc_RNA (1)...(19): siRNA sense strand
aaccugcccuuccucuuca

SEQ ID NO: 170936 - RNA, 19 nt, Homo sapiens
  misc_RNA (1)...(19): siRNA sense strand
caccugaagcagaccauga

SEQ ID NO: 170937 - RNA, 19 nt, Homo sapiens
  misc_RNA (1)...(19): siRNA sense strand
ugccaacccugugugaaau

SEQ ID NO: 170938 - RNA, 19 nt, Homo sapiens
  misc_RNA (1)...(19): siRNA sense strand
cuucaaagugcucucaguu

SEQ ID NO: 170939 - RNA, 19 nt, Homo sapiens
  misc_RNA (1)...(19): siRNA sense strand
gaagcggaucucccagcaa

SEQ ID NO: 170940 - RNA, 19 nt, Homo sapiens
  misc_RNA (1)...(19): siRNA sense strand
gcaaccugcccuuccucuu

SEQ ID NO: 170941 - RNA, 19 nt, Homo sapiens
  misc_RNA (1)...(19): siRNA sense strand
acccuaagccaguggauug

SEQ ID NO: 170942 - RNA, 19 nt, Homo sapiens
  misc_RNA (1)...(19): siRNA sense strand
ggccugacacccaaguuca

SEQ ID NO: 170943 - RNA, 19 nt, Homo sapiens
  misc_RNA (1)...(19): siRNA sense strand
cagcagaacuuucgccuuu

SEQ ID NO: 170944 - RNA, 19 nt, Homo sapiens
  misc_RNA (1)...(19): siRNA sense strand
gaacaucucugccaaugag

SEQ ID NO: 170945 - RNA, 19 nt, Homo sapiens
  misc_RNA (1)...(19): siRNA sense strand
gaaagaaaccaaaggaaug

SEQ ID NO: 170946 - RNA, 19 nt, Homo sapiens
  misc_RNA (1)...(19): siRNA sense strand
gagcgcaguuugacuauga

SEQ ID NO: 170947 - RNA, 19 nt, Homo sapiens
  misc_RNA (1)...(19): siRNA sense strand
caacaaggaugacagcaau

SEQ ID NO: 170948 - RNA, 19 nt, Homo sapiens
  misc_RNA (1)...(19): siRNA sense strand
gaacaagauugccauccuu

SEQ ID NO: 170949 - RNA, 19 nt, Homo sapiens
  misc_RNA (1)...(19): siRNA sense strand
ggaagaagaagaaguacaa

SEQ ID NO: 170950 - RNA, 19 nt, Homo sapiens
  misc_RNA (1)...(19): siRNA sense strand
gaugaaacccuuaagaaau

SEQ ID NO: 170951 - RNA, 19 nt, Homo sapiens
  misc_RNA (1)...(19): siRNA sense strand
gggaaggaguaccacuuua

SEQ ID NO: 170952 - RNA, 19 nt, Homo sapiens
  misc_RNA (1)...(19): siRNA sense strand
acaaauaucuggccaagca

SEQ ID NO: 170953 - RNA, 19 nt, Homo sapiens
  misc_RNA (1)...(19): siRNA sense strand
gaagaaguacaaagacaaa

SEQ ID NO: 170954 - RNA, 19 nt, Homo sapiens
  misc_RNA (1)...(19): siRNA sense strand
gaugagauccuagaaauca

SEQ ID NO: 170955 - RNA, 19 nt, Homo sapiens
  misc_RNA (1)...(19): siRNA sense strand
caauaaugguguugaugaa

SEQ ID NO: 170956 - RNA, 19 nt, Homo sapiens
  misc_RNA (1)...(19): siRNA sense strand
gcagaacuuucgccuuuca

SEQ ID NO: 170957 - RNA, 19 nt, Homo sapiens
  misc_RNA (1)...(19): siRNA sense strand
ggacugaaguuugcuacug

SEQ ID NO: 170958 - RNA, 19 nt, Homo sapiens
  misc_RNA (1)...(19): siRNA sense strand
ggaagacccuggugcugau

SEQ ID NO: 170959 - RNA, 19 nt, Homo sapiens
  misc_RNA (1)...(19): siRNA sense strand
ggaaggaguaccacuuuau

SEQ ID NO: 170960 - RNA, 19 nt, Homo sapiens
  misc_RNA (1)...(19): siRNA sense strand
gaacuuucgccuuucauug

SEQ ID NO: 170961 - RNA, 19 nt, Homo sapiens
  misc_RNA (1)...(19): siRNA sense strand
gcaccaaauuugaaacagu

SEQ ID NO: 170962 - RNA, 19 nt, Homo sapiens
  misc_RNA (1)...(19): siRNA sense strand
gacauuauccagauuauca

SEQ ID NO: 170963 - RNA, 19 nt, Homo sapiens
  misc_RNA (1)...(19): siRNA sense strand
agaaaucaauggcacaaau

SEQ ID NO: 170964 - RNA, 19 nt, Homo sapiens
  misc_RNA (1)...(19): siRNA sense strand
gaaaucaauggcacaaaug

SEQ ID NO: 170965 - RNA, 19 nt, Homo sapiens
  misc_RNA (1)...(19): siRNA sense strand
gcacuacagauguucauga

SEQ ID NO: 170966 - RNA, 19 nt, Homo sapiens
  misc_RNA (1)...(19): siRNA sense strand
guacaaagacaaauaucug

SEQ ID NO: 170967 - RNA, 19 nt, Homo sapiens
  misc_RNA (1)...(19): siRNA sense strand
cagaagagcccaugggaau

SEQ ID NO: 170968 - RNA, 19 nt, Homo sapiens
  misc_RNA (1)...(19): siRNA sense strand
cggaggagaugacgaggaa

SEQ ID NO: 170969 - RNA, 19 nt, Homo sapiens
  misc_RNA (1)...(19): siRNA sense strand
gcggaaagugcgacucaua

SEQ ID NO: 170970 - RNA, 19 nt, Homo sapiens
  misc_RNA (1)...(19): siRNA sense strand
agaagaagaaguacaaaga

SEQ ID NO: 170971 - RNA, 19 nt, Homo sapiens
  misc_RNA (1)...(19): siRNA sense strand
gaagagcccaugggaauca

SEQ ID NO: 170972 - RNA, 19 nt, Homo sapiens
  misc_RNA (1)...(19): siRNA sense strand
gaugaaagaaaccaaagga

SEQ ID NO: 170973 - RNA, 19 nt, Homo sapiens
  misc_RNA (1)...(19): siRNA sense strand
ugaugaaacccuuaagaaa

SEQ ID NO: 170974 - RNA, 19 nt, Homo sapiens
  misc_RNA (1)...(19): siRNA sense strand
caaggaagagugaggaaga

SEQ ID NO: 170975 - RNA, 19 nt, Homo sapiens
  misc_RNA (1)...(19): siRNA sense strand
ggucgcagccacauuaaga

SEQ ID NO: 170976 - RNA, 19 nt, Homo sapiens
  misc_RNA (1)...(19): siRNA sense strand
gccagaauccggagaaguu

SEQ ID NO: 170977 - RNA, 19 nt, Homo sapiens
  misc_RNA (1)...(19): siRNA sense strand
gcagaaggcgaugaaagaa

SEQ ID NO: 170978 - RNA, 19 nt, Homo sapiens
  misc_RNA (1)...(19): siRNA sense strand
gaaggaguaccacuuuauc

SEQ ID NO: 170979 - RNA, 19 nt, Homo sapiens
  misc_RNA (1)...(19): siRNA sense strand
ugaaagaaaccaaaggaau

SEQ ID NO: 170980 - RNA, 19 nt, Homo sapiens
  misc_RNA (1)...(19): siRNA sense strand
gacaggaggugcggaaagu

SEQ ID NO: 170981 - RNA, 19 nt, Homo sapiens
  misc_RNA (1)...(19): siRNA sense strand
ggaguaccacuuuaucuca

SEQ ID NO: 170982 - RNA, 19 nt, Homo sapiens
  misc_RNA (1)...(19): siRNA sense strand
ugagagcgcaguuugacua

SEQ ID NO: 170983 - RNA, 19 nt, Homo sapiens
  misc_RNA (1)...(19): siRNA sense strand
gaguaccacuuuaucucaa

SEQ ID NO: 170984 - RNA, 19 nt, Homo sapiens
  misc_RNA (1)...(19): siRNA sense strand
ggagucagcaggauugauc

SEQ ID NO: 170985 - RNA, 19 nt, Homo sapiens
  misc_RNA (1)...(19): siRNA sense strand
gaagaagaagaaguacaaa

SEQ ID NO: 170986 - RNA, 19 nt, Homo sapiens
  misc_RNA (1)...(19): siRNA sense strand
gugccugucuccuggguuu

SEQ ID NO: 170987 - RNA, 19 nt, Homo sapiens
  misc_RNA (1)...(19): siRNA sense strand
gccaagcacagcucgauuu

SEQ ID NO: 170988 - RNA, 19 nt, Homo sapiens
  misc_RNA (1)...(19): siRNA sense strand
uugagaaggucacagaaga

SEQ ID NO: 170989 - RNA, 19 nt, Homo sapiens
  misc_RNA (1)...(19): siRNA sense strand
gaauggcgaguggcaagua

SEQ ID NO: 170990 - RNA, 19 nt, Homo sapiens
  misc_RNA (1)...(19): siRNA sense strand
caaggagucagcaggauug

SEQ ID NO: 170991 - RNA, 19 nt, Homo sapiens
  misc_RNA (1)...(19): siRNA sense strand
aaagaaaccaaaggaauga

SEQ ID NO: 170992 - RNA, 19 nt, Homo sapiens
  misc_RNA (1)...(19): siRNA sense strand
gacaaaucauucaguggau

SEQ ID NO: 170993 - RNA, 19 nt, Homo sapiens
  misc_RNA (1)...(19): siRNA sense strand
gcaaggaggcgggacugaa

SEQ ID NO: 170994 - RNA, 19 nt, Homo sapiens
  misc_RNA (1)...(19): siRNA sense strand
ucacuacuuugaccucuca

SEQ ID NO: 170995 - RNA, 19 nt, Homo sapiens
  misc_RNA (1)...(19): siRNA sense strand
aagaagaaguacaaagaca

SEQ ID NO: 170996 - RNA, 19 nt, Homo sapiens
  misc_RNA (1)...(19): siRNA sense strand
ggaaagugcgacucauaca

SEQ ID NO: 170997 - RNA, 19 nt, Homo sapiens
  misc_RNA (1)...(19): siRNA sense strand
cuaccaaggcaacauguuu

SEQ ID NO: 170998 - RNA, 19 nt, Homo sapiens
  misc_RNA (1)...(19): siRNA sense strand
gaagaagaaguacaaagac

SEQ ID NO: 170999 - RNA, 19 nt, Homo sapiens
  misc_RNA (1)...(19): siRNA sense strand
gggacauuauccagauuau

SEQ ID NO: 171000 - RNA, 19 nt, Homo sapiens
  misc_RNA (1)...(19): siRNA sense strand
ccgaggacauguacaccaa

SEQ ID NO: 171001 - RNA, 19 nt, Homo sapiens
  misc_RNA (1)...(19): siRNA sense strand
agaaggcgaugaaagaaac

SEQ ID NO: 171002 - RNA, 19 nt, Homo sapiens
  misc_RNA (1)...(19): siRNA sense strand
guaauucccaaccagcaaa

SEQ ID NO: 171003 - RNA, 19 nt, Homo sapiens
  misc_RNA (1)...(19): siRNA sense strand
uguguacccugucccauau

SEQ ID NO: 171004 - RNA, 19 nt, Homo sapiens
  misc_RNA (1)...(19): siRNA sense strand
cagaaggcgaugaaagaaa

SEQ ID NO: 171005 - RNA, 19 nt, Homo sapiens
  misc_RNA (1)...(19): siRNA sense strand
gaaaccaaaggaaugaucu

SEQ ID NO: 171006 - RNA, 19 nt, Homo sapiens
  misc_RNA (1)...(19): siRNA sense strand
ggccagaauucuucauggu

SEQ ID NO: 171007 - RNA, 19 nt, Homo sapiens
  misc_RNA (1)...(19): siRNA sense strand
ggaacaucucugccaauga

SEQ ID NO: 171008 - RNA, 19 nt, Homo sapiens
  misc_RNA (1)...(19): siRNA sense strand
ucgcauccauugaauacug

SEQ ID NO: 171009 - RNA, 19 nt, Homo sapiens
  misc_RNA (1)...(19): siRNA sense strand
ucauacaguuugagaaggu

SEQ ID NO: 171010 - RNA, 19 nt, Homo sapiens
  misc_RNA (1)...(19): siRNA sense strand
ccaaggagucagcaggauu

SEQ ID NO: 171011 - RNA, 19 nt, Homo sapiens
  misc_RNA (1)...(19): siRNA sense strand
gaaagugcgacucauacag

SEQ ID NO: 171012 - RNA, 19 nt, Homo sapiens
  misc_RNA (1)...(19): siRNA sense strand
ggacaggaggugcggaaag

SEQ ID NO: 171013 - RNA, 19 nt, Homo sapiens
  misc_RNA (1)...(19): siRNA sense strand
gaggagaugacgaggaaca

SEQ ID NO: 171014 - RNA, 19 nt, Homo sapiens
  misc_RNA (1)...(19): siRNA sense strand
gaccaagcgugcaguucuc

SEQ ID NO: 171015 - RNA, 19 nt, Homo sapiens
  misc_RNA (1)...(19): siRNA sense strand
caaaucauucaguggauca

SEQ ID NO: 171016 - RNA, 19 nt, Homo sapiens
  misc_RNA (1)...(19): siRNA sense strand
caaggaggcgggacugaag

SEQ ID NO: 171017 - RNA, 19 nt, Homo sapiens
  misc_RNA (1)...(19): siRNA sense strand
aggaacaucucugccaaug

SEQ ID NO: 171018 - RNA, 19 nt, Homo sapiens
  misc_RNA (1)...(19): siRNA sense strand
ccuguacgguggccagaau

SEQ ID NO: 171019 - RNA, 19 nt, Homo sapiens
  misc_RNA (1)...(19): siRNA sense strand
cauaagcagaacaagauug

SEQ ID NO: 171020 - RNA, 19 nt, Homo sapiens
  misc_RNA (1)...(19): siRNA sense strand
ugcagaaggcgaugaaaga

SEQ ID NO: 171021 - RNA, 19 nt, Homo sapiens
  misc_RNA (1)...(19): siRNA sense strand
acagugcaccagauccaua

SEQ ID NO: 171022 - RNA, 19 nt, Homo sapiens
  misc_RNA (1)...(19): siRNA sense strand
agaagaaguacaaagacaa

SEQ ID NO: 171023 - RNA, 19 nt, Homo sapiens
  misc_RNA (1)...(19): siRNA sense strand
gagagcgcaguuugacuau

SEQ ID NO: 171024 - RNA, 19 nt, Homo sapiens
  misc_RNA (1)...(19): siRNA sense strand
uugaugaaacccuuaagaa

SEQ ID NO: 171025 - RNA, 19 nt, Homo sapiens
  misc_RNA (1)...(19): siRNA sense strand
guugaugaaacccuuaaga

SEQ ID NO: 171026 - RNA, 19 nt, Homo sapiens
  misc_RNA (1)...(19): siRNA sense strand
aggaagaugggaaggagua

SEQ ID NO: 171027 - RNA, 19 nt, Homo sapiens
  misc_RNA (1)...(19): siRNA sense strand
ccagaauccggagaaguuu

SEQ ID NO: 171028 - RNA, 19 nt, Homo sapiens
  misc_RNA (1)...(19): siRNA sense strand
aguuggauguuguuuccua

SEQ ID NO: 171029 - RNA, 19 nt, Homo sapiens
  misc_RNA (1)...(19): siRNA sense strand
ucaguuggauguuguuucc

SEQ ID NO: 171030 - RNA, 19 nt, Homo sapiens
  misc_RNA (1)...(19): siRNA sense strand
acaaggaugacagcaauug

SEQ ID NO: 171031 - RNA, 19 nt, Homo sapiens
  misc_RNA (1)...(19): siRNA sense strand
ucaacaaggaugacagcaa

SEQ ID NO: 171032 - RNA, 19 nt, Homo sapiens
  misc_RNA (1)...(19): siRNA sense strand
guaucgcauccauugaaua

SEQ ID NO: 171033 - RNA, 19 nt, Homo sapiens
  misc_RNA (1)...(19): siRNA sense strand
gaggcgggacugaaguuug

SEQ ID NO: 171034 - RNA, 19 nt, Homo sapiens
  misc_RNA (1)...(19): siRNA sense strand
ggaggcgggacugaaguuu

SEQ ID NO: 171035 - RNA, 19 nt, Homo sapiens
  misc_RNA (1)...(19): siRNA sense strand
acaaucugaucccuugcaa

SEQ ID NO: 171036 - RNA, 19 nt, Homo sapiens
  misc_RNA (1)...(19): siRNA sense strand
uugggaagaagaagaagua

SEQ ID NO: 171037 - RNA, 19 nt, Homo sapiens
  misc_RNA (1)...(19): siRNA sense strand
ucucacuggucaauaaugg

SEQ ID NO: 171038 - RNA, 19 nt, Homo sapiens
  misc_RNA (1)...(19): siRNA sense strand
ugggaaggaguaccacuuu

SEQ ID NO: 171039 - RNA, 19 nt, Homo sapiens
  misc_RNA (1)...(19): siRNA sense strand
aaagugcgacucauacagu

SEQ ID NO: 171040 - RNA, 19 nt, Homo sapiens
  misc_RNA (1)...(19): siRNA sense strand
gaucaguuggauguuguuu

SEQ ID NO: 171041 - RNA, 19 nt, Homo sapiens
  misc_RNA (1)...(19): siRNA sense strand
uccauaagcagaacaagau

SEQ ID NO: 171042 - RNA, 19 nt, Homo sapiens
  misc_RNA (1)...(19): siRNA sense strand
cagugcaccagauccauaa

SEQ ID NO: 171043 - RNA, 19 nt, Homo sapiens
  misc_RNA (1)...(19): siRNA sense strand
gaacaagccuuccugacua

SEQ ID NO: 171044 - RNA, 19 nt, Homo sapiens
  misc_RNA (1)...(19): siRNA sense strand
ggacaggacuuucagauau

SEQ ID NO: 171045 - RNA, 19 nt, Homo sapiens
  misc_RNA (1)...(19): siRNA sense strand
gaagauggguggguuauuu

SEQ ID NO: 171046 - RNA, 19 nt, Homo sapiens
  misc_RNA (1)...(19): siRNA sense strand
gaucaaaggagaagauuua

SEQ ID NO: 171047 - RNA, 19 nt, Homo sapiens
  misc_RNA (1)...(19): siRNA sense strand
gaagcagucuuucuuauga

SEQ ID NO: 171048 - RNA, 19 nt, Homo sapiens
  misc_RNA (1)...(19): siRNA sense strand
caaacaauauggcgauuaa

SEQ ID NO: 171049 - RNA, 19 nt, Homo sapiens
  misc_RNA (1)...(19): siRNA sense strand
ggacugggcugaaugaugu

SEQ ID NO: 171050 - RNA, 19 nt, Homo sapiens
  misc_RNA (1)...(19): siRNA sense strand
gacauacgcuuucaacauu

SEQ ID NO: 171051 - RNA, 19 nt, Homo sapiens
  misc_RNA (1)...(19): siRNA sense strand
gaaaucagcauguguuuau

SEQ ID NO: 171052 - RNA, 19 nt, Homo sapiens
  misc_RNA (1)...(19): siRNA sense strand
agugaaagcuuauggaaua

SEQ ID NO: 171053 - RNA, 19 nt, Homo sapiens
  misc_RNA (1)...(19): siRNA sense strand
ggacguggcuguggauaaa

SEQ ID NO: 171054 - RNA, 19 nt, Homo sapiens
  misc_RNA (1)...(19): siRNA sense strand
gaugauaccugcgacagua

SEQ ID NO: 171055 - RNA, 19 nt, Homo sapiens
  misc_RNA (1)...(19): siRNA sense strand
ggaguaauauucacuguuc

SEQ ID NO: 171056 - RNA, 19 nt, Homo sapiens
  misc_RNA (1)...(19): siRNA sense strand
aaacugggcuuauggagaa

SEQ ID NO: 171057 - RNA, 19 nt, Homo sapiens
  misc_RNA (1)...(19): siRNA sense strand
gaaugauuguguagcuuua

SEQ ID NO: 171058 - RNA, 19 nt, Homo sapiens
  misc_RNA (1)...(19): siRNA sense strand
gacaggacuuucagauaua

SEQ ID NO: 171059 - RNA, 19 nt, Homo sapiens
  misc_RNA (1)...(19): siRNA sense strand
gauuaugaguguugcauuu

SEQ ID NO: 171060 - RNA, 19 nt, Homo sapiens
  misc_RNA (1)...(19): siRNA sense strand
cagacaagcuauuuggaua

SEQ ID NO: 171061 - RNA, 19 nt, Homo sapiens
  misc_RNA (1)...(19): siRNA sense strand
gcaaaccaaaccuguaaua

SEQ ID NO: 171062 - RNA, 19 nt, Homo sapiens
  misc_RNA (1)...(19): siRNA sense strand
caacaccacuuuaaauucu

SEQ ID NO: 171063 - RNA, 19 nt, Homo sapiens
  misc_RNA (1)...(19): siRNA sense strand
ggaaacaucuaaugaacgu

SEQ ID NO: 171064 - RNA, 19 nt, Homo sapiens
  misc_RNA (1)...(19): siRNA sense strand
cagauggcuuuguuaaaua

SEQ ID NO: 171065 - RNA, 19 nt, Homo sapiens
  misc_RNA (1)...(19): siRNA sense strand
aagccaagguccagaaaua

SEQ ID NO: 171066 - RNA, 19 nt, Homo sapiens
  misc_RNA (1)...(19): siRNA sense strand
gggccaagcuucucuggaa

SEQ ID NO: 171067 - RNA, 19 nt, Homo sapiens
  misc_RNA (1)...(19): siRNA sense strand
caauacacuuggacugaua

SEQ ID NO: 171068 - RNA, 19 nt, Homo sapiens
  misc_RNA (1)...(19): siRNA sense strand
cgacauaacaguaguauca

SEQ ID NO: 171069 - RNA, 19 nt, Homo sapiens
  misc_RNA (1)...(19): siRNA sense strand
gcacugggcagaaggagua

SEQ ID NO: 171070 - RNA, 19 nt, Homo sapiens
  misc_RNA (1)...(19): siRNA sense strand
gaaccacuacugacuauga

SEQ ID NO: 171071 - RNA, 19 nt, Homo sapiens
  misc_RNA (1)...(19): siRNA sense strand
gaacuagugauaugaaaga

SEQ ID NO: 171072 - RNA, 19 nt, Homo sapiens
  misc_RNA (1)...(19): siRNA sense strand
cagcaacgauucaaacaga

SEQ ID NO: 171073 - RNA, 19 nt, Homo sapiens
  misc_RNA (1)...(19): siRNA sense strand
gaugcugacuguguuguua

SEQ ID NO: 171074 - RNA, 19 nt, Homo sapiens
  misc_RNA (1)...(19): siRNA sense strand
aaccaaaccuguaauaaug

SEQ ID NO: 171075 - RNA, 19 nt, Homo sapiens
  misc_RNA (1)...(19): siRNA sense strand
gaccauguauucaaauuca

SEQ ID NO: 171076 - RNA, 19 nt, Homo sapiens
  misc_RNA (1)...(19): siRNA sense strand
agacuuagcuagcaucaau

SEQ ID NO: 171077 - RNA, 19 nt, Homo sapiens
  misc_RNA (1)...(19): siRNA sense strand
ggauaggauuguucagaaa

SEQ ID NO: 171078 - RNA, 19 nt, Homo sapiens
  misc_RNA (1)...(19): siRNA sense strand
cauggucacuguuacuaua

SEQ ID NO: 171079 - RNA, 19 nt, Homo sapiens
  misc_RNA (1)...(19): siRNA sense strand
ugaaaucccugcuacugaa

SEQ ID NO: 171080 - RNA, 19 nt, Homo sapiens
  misc_RNA (1)...(19): siRNA sense strand
ggaucgcccugaacaguaa

SEQ ID NO: 171081 - RNA, 19 nt, Homo sapiens
  misc_RNA (1)...(19): siRNA sense strand
gcaagcauuucuuaccuau

SEQ ID NO: 171082 - RNA, 19 nt, Homo sapiens
  misc_RNA (1)...(19): siRNA sense strand
caaccaggaugccgaauca

SEQ ID NO: 171083 - RNA, 19 nt, Homo sapiens
  misc_RNA (1)...(19): siRNA sense strand
caaaguggauuacgugucu

SEQ ID NO: 171084 - RNA, 19 nt, Homo sapiens
  misc_RNA (1)...(19): siRNA sense strand
gaagacagcacauugcaau

SEQ ID NO: 171085 - RNA, 19 nt, Homo sapiens
  misc_RNA (1)...(19): siRNA sense strand
caagacaauccaccaguua

SEQ ID NO: 171086 - RNA, 19 nt, Homo sapiens
  misc_RNA (1)...(19): siRNA sense strand
caaggaagguuggaauuuc

SEQ ID NO: 171087 - RNA, 19 nt, Homo sapiens
  misc_RNA (1)...(19): siRNA sense strand
acaaagacuaccaguauua

SEQ ID NO: 171088 - RNA, 19 nt, Homo sapiens
  misc_RNA (1)...(19): siRNA sense strand
ggaauuggacuuuauuauc

SEQ ID NO: 171089 - RNA, 19 nt, Homo sapiens
  misc_RNA (1)...(19): siRNA sense strand
gauaaucaauacacuugga

SEQ ID NO: 171090 - RNA, 19 nt, Homo sapiens
  misc_RNA (1)...(19): siRNA sense strand
gaaaauggauggaugauac

SEQ ID NO: 171091 - RNA, 19 nt, Homo sapiens
  misc_RNA (1)...(19): siRNA sense strand
gcaaggaagguuggaauuu

SEQ ID NO: 171092 - RNA, 19 nt, Homo sapiens
  misc_RNA (1)...(19): siRNA sense strand
ggacauacgcuuucaacau

SEQ ID NO: 171093 - RNA, 19 nt, Homo sapiens
  misc_RNA (1)...(19): siRNA sense strand
ggacaaugcgcgagcguuu

SEQ ID NO: 171094 - RNA, 19 nt, Homo sapiens
  misc_RNA (1)...(19): siRNA sense strand
gaagcaaaccaaaccugua

SEQ ID NO: 171095 - RNA, 19 nt, Homo sapiens
  misc_RNA (1)...(19): siRNA sense strand
acagauggcuuuguuaaau

SEQ ID NO: 171096 - RNA, 19 nt, Homo sapiens
  misc_RNA (1)...(19): siRNA sense strand
ccaaauguccggaggauug

SEQ ID NO: 171097 - RNA, 19 nt, Homo sapiens
  misc_RNA (1)...(19): siRNA sense strand
gaagacagauaugaacaag

SEQ ID NO: 171098 - RNA, 19 nt, Homo sapiens
  misc_RNA (1)...(19): siRNA sense strand
gacaagcuauuuggauauu

SEQ ID NO: 171099 - RNA, 19 nt, Homo sapiens
  misc_RNA (1)...(19): siRNA sense strand
gcuauucacucaugagaca

SEQ ID NO: 171100 - RNA, 19 nt, Homo sapiens
  misc_RNA (1)...(19): siRNA sense strand
ugagggcagugaaagcuua

SEQ ID NO: 171101 - RNA, 19 nt, Homo sapiens
  misc_RNA (1)...(19): siRNA sense strand
guuacaagauucacagaga

SEQ ID NO: 171102 - RNA, 19 nt, Homo sapiens
  misc_RNA (1)...(19): siRNA sense strand
ggaaugauuguguagcuuu

SEQ ID NO: 171103 - RNA, 19 nt, Homo sapiens
  misc_RNA (1)...(19): siRNA sense strand
guauucaaauucaggguuu

SEQ ID NO: 171104 - RNA, 19 nt, Homo sapiens
  misc_RNA (1)...(19): siRNA sense strand
uuacaaagacuaccaguau

SEQ ID NO: 171105 - RNA, 19 nt, Homo sapiens
  misc_RNA (1)...(19): siRNA sense strand
gcaaacaauauggcgauua

SEQ ID NO: 171106 - RNA, 19 nt, Homo sapiens
  misc_RNA (1)...(19): siRNA sense strand
ccacuggaauucagauaug

SEQ ID NO: 171107 - RNA, 19 nt, Homo sapiens
  misc_RNA (1)...(19): siRNA sense strand
uaacaaagaggaacagcaa

SEQ ID NO: 171108 - RNA, 19 nt, Homo sapiens
  misc_RNA (1)...(19): siRNA sense strand
gaaaagacgugugcaccua

SEQ ID NO: 171109 - RNA, 19 nt, Homo sapiens
  misc_RNA (1)...(19): siRNA sense strand
ggaguagucaucauuguga

SEQ ID NO: 171110 - RNA, 19 nt, Homo sapiens
  misc_RNA (1)...(19): siRNA sense strand
uaacugggcugcugaugag

SEQ ID NO: 171111 - RNA, 19 nt, Homo sapiens
  misc_RNA (1)...(19): siRNA sense strand
aaucuggucuccauacaaa

SEQ ID NO: 171112 - RNA, 19 nt, Homo sapiens
  misc_RNA (1)...(19): siRNA sense strand
gaagcaaaguggauuacgu

SEQ ID NO: 171113 - RNA, 19 nt, Homo sapiens
  misc_RNA (1)...(19): siRNA sense strand
gugaacaccuuaacaacug

SEQ ID NO: 171114 - RNA, 19 nt, Homo sapiens
  misc_RNA (1)...(19): siRNA sense strand
caaauggcuucguggagaa

SEQ ID NO: 171115 - RNA, 19 nt, Homo sapiens
  misc_RNA (1)...(19): siRNA sense strand
gcaaagagaaggaaaccau

SEQ ID NO: 171116 - RNA, 19 nt, Homo sapiens
  misc_RNA (1)...(19): siRNA sense strand
aaagugaugugccuacuca

SEQ ID NO: 171117 - RNA, 19 nt, Homo sapiens
  misc_RNA (1)...(19): siRNA sense strand
gcagaugcccggagucaga

SEQ ID NO: 171118 - RNA, 19 nt, Homo sapiens
  misc_RNA (1)...(19): siRNA sense strand
gcaacaccacuuuaaauuc

SEQ ID NO: 171119 - RNA, 19 nt, Homo sapiens
  misc_RNA (1)...(19): siRNA sense strand
aagcauuucuuaccuauca

SEQ ID NO: 171120 - RNA, 19 nt, Homo sapiens
  misc_RNA (1)...(19): siRNA sense strand
gagggaaucuggucuccau

SEQ ID NO: 171121 - RNA, 19 nt, Homo sapiens
  misc_RNA (1)...(19): siRNA sense strand
ugaagaugcugacuguguu

SEQ ID NO: 171122 - RNA, 19 nt, Homo sapiens
  misc_RNA (1)...(19): siRNA sense strand
ggaggugcaucaaaugaag

SEQ ID NO: 171123 - RNA, 19 nt, Homo sapiens
  misc_RNA (1)...(19): siRNA sense strand
caagcuauuuggauauugu

SEQ ID NO: 171124 - RNA, 19 nt, Homo sapiens
  misc_RNA (1)...(19): siRNA sense strand
guguuuaucuggaucuuga

SEQ ID NO: 171125 - RNA, 19 nt, Homo sapiens
  misc_RNA (1)...(19): siRNA sense strand
ucaagacaauccaccaguu

SEQ ID NO: 171126 - RNA, 19 nt, Homo sapiens
  misc_RNA (1)...(19): siRNA sense strand
guucuccuguuucauauga

SEQ ID NO: 171127 - RNA, 19 nt, Homo sapiens
  misc_RNA (1)...(19): siRNA sense strand
ggcaacaccacuuuaaauu

SEQ ID NO: 171128 - RNA, 19 nt, Homo sapiens
  misc_RNA (1)...(19): siRNA sense strand
aaacugggcuauauuugca

SEQ ID NO: 171129 - RNA, 19 nt, Homo sapiens
  misc_RNA (1)...(19): siRNA sense strand
cagaaacugggcuauauuu

SEQ ID NO: 171130 - RNA, 19 nt, Homo sapiens
  misc_RNA (1)...(19): siRNA sense strand
gggaaaaucuggaaugugu

SEQ ID NO: 171131 - RNA, 19 nt, Homo sapiens
  misc_RNA (1)...(19): siRNA sense strand
gcaguccuuuccgauauuu

SEQ ID NO: 171132 - RNA, 19 nt, Homo sapiens
  misc_RNA (1)...(19): siRNA sense strand
gaggaauuggacuuuauua

SEQ ID NO: 171133 - RNA, 19 nt, Homo sapiens
  misc_RNA (1)...(19): siRNA sense strand
uaucaaugcuaccacaguu

SEQ ID NO: 171134 - RNA, 19 nt, Homo sapiens
  misc_RNA (1)...(19): siRNA sense strand
guuucaagcuguaugcaaa

SEQ ID NO: 171135 - RNA, 19 nt, Homo sapiens
  misc_RNA (1)...(19): siRNA sense strand
gcagugaaagcuuauggaa

SEQ ID NO: 171136 - RNA, 19 nt, Homo sapiens
  misc_RNA (1)...(19): siRNA sense strand
gaaaggugacccuacuaug

SEQ ID NO: 171137 - RNA, 19 nt, Homo sapiens
  misc_RNA (1)...(19): siRNA sense strand
gaagcuaccacaaacuguu

SEQ ID NO: 171138 - RNA, 19 nt, Homo sapiens
  misc_RNA (1)...(19): siRNA sense strand
caaaccaaaccuguaauaa

SEQ ID NO: 171139 - RNA, 19 nt, Homo sapiens
  misc_RNA (1)...(19): siRNA sense strand
ggagaaccaagccaugaaa

SEQ ID NO: 171140 - RNA, 19 nt, Homo sapiens
  misc_RNA (1)...(19): siRNA sense strand
ggauuaaccaguuccuuga

SEQ ID NO: 171141 - RNA, 19 nt, Homo sapiens
  misc_RNA (1)...(19): siRNA sense strand
ugaacggaaugauugugua

SEQ ID NO: 171142 - RNA, 19 nt, Homo sapiens
  misc_RNA (1)...(19): siRNA sense strand
caacguggccggaguaguc

SEQ ID NO: 171143 - RNA, 19 nt, Homo sapiens
  misc_RNA (1)...(19): siRNA sense strand
gggcagcguugugaucuuu

SEQ ID NO: 171144 - RNA, 19 nt, Homo sapiens
  misc_RNA (1)...(19): siRNA sense strand
gaccuguucugucagugaa

SEQ ID NO: 171145 - RNA, 19 nt, Homo sapiens
  misc_RNA (1)...(19): siRNA sense strand
aaagaccuguucugucagu

SEQ ID NO: 171146 - RNA, 19 nt, Homo sapiens
  misc_RNA (1)...(19): siRNA sense strand
uggagaagaaggacccaaa

SEQ ID NO: 171147 - RNA, 19 nt, Homo sapiens
  misc_RNA (1)...(19): siRNA sense strand
gcagcguugugaucuuugc

SEQ ID NO: 171148 - RNA, 19 nt, Homo sapiens
  misc_RNA (1)...(19): siRNA sense strand
ggagaagaaggacccaaaa

SEQ ID NO: 171149 - RNA, 19 nt, Homo sapiens
  misc_RNA (1)...(19): siRNA sense strand
gggcagcguugugaucuuu

SEQ ID NO: 171150 - RNA, 19 nt, Homo sapiens
  misc_RNA (1)...(19): siRNA sense strand
gaccuguucugucagugaa

SEQ ID NO: 171151 - RNA, 19 nt, Homo sapiens
  misc_RNA (1)...(19): siRNA sense strand
aaagaccuguucugucagu

SEQ ID NO: 171152 - RNA, 19 nt, Homo sapiens
  misc_RNA (1)...(19): siRNA sense strand
uuucuacaccuguggguua

SEQ ID NO: 171153 - RNA, 19 nt, Homo sapiens
  misc_RNA (1)...(19): siRNA sense strand
uggagaagaaggacccaaa

SEQ ID NO: 171154 - RNA, 19 nt, Homo sapiens
  misc_RNA (1)...(19): siRNA sense strand
gcagcguugugaucuuugc

SEQ ID NO: 171155 - RNA, 19 nt, Homo sapiens
  misc_RNA (1)...(19): siRNA sense strand
ggagaagaaggacccaaaa

SEQ ID NO: 171156 - RNA, 19 nt, Homo sapiens
  misc_RNA (1)...(19): siRNA sense strand
gaacaucucuuucaaugau

SEQ ID NO: 171157 - RNA, 19 nt, Homo sapiens
  misc_RNA (1)...(19): siRNA sense strand
cagacuaacucccaagaua

SEQ ID NO: 171158 - RNA, 19 nt, Homo sapiens
  misc_RNA (1)...(19): siRNA sense strand
uaagaaggcucagcaagaa

SEQ ID NO: 171159 - RNA, 19 nt, Homo sapiens
  misc_RNA (1)...(19): siRNA sense strand
ccaagaagacugccaauga

SEQ ID NO: 171160 - RNA, 19 nt, Homo sapiens
  misc_RNA (1)...(19): siRNA sense strand
gaaggugacugcccaggau

SEQ ID NO: 171161 - RNA, 19 nt, Homo sapiens
  misc_RNA (1)...(19): siRNA sense strand
gagggaaguuugguucuuu

SEQ ID NO: 171162 - RNA, 19 nt, Homo sapiens
  misc_RNA (1)...(19): siRNA sense strand
gcagaaggcccagauggua

SEQ ID NO: 171163 - RNA, 19 nt, Homo sapiens
  misc_RNA (1)...(19): siRNA sense strand
gcagcgcauugacgaauuu

SEQ ID NO: 171164 - RNA, 19 nt, Homo sapiens
  misc_RNA (1)...(19): siRNA sense strand
gaagaagaagcgugaaaug

SEQ ID NO: 171165 - RNA, 19 nt, Homo sapiens
  misc_RNA (1)...(19): siRNA sense strand
guagggcucuggaacuuga

SEQ ID NO: 171166 - RNA, 19 nt, Homo sapiens
  misc_RNA (1)...(19): siRNA sense strand
caacaucuaugagcagaau

SEQ ID NO: 171167 - RNA, 19 nt, Homo sapiens
  misc_RNA (1)...(19): siRNA sense strand
ggcugaaacucaauaagaa

SEQ ID NO: 171168 - RNA, 19 nt, Homo sapiens
  misc_RNA (1)...(19): siRNA sense strand
gaaagagggcauucucaau

SEQ ID NO: 171169 - RNA, 19 nt, Homo sapiens
  misc_RNA (1)...(19): siRNA sense strand
gaacagcuggccuuggaaa

SEQ ID NO: 171170 - RNA, 19 nt, Homo sapiens
  misc_RNA (1)...(19): siRNA sense strand
gaacagcacaaacucaaca

SEQ ID NO: 171171 - RNA, 19 nt, Homo sapiens
  misc_RNA (1)...(19): siRNA sense strand
ggagauguauggugugaac

SEQ ID NO: 171172 - RNA, 19 nt, Homo sapiens
  misc_RNA (1)...(19): siRNA sense strand
ucaauaaggaagugcauaa

SEQ ID NO: 171173 - RNA, 19 nt, Homo sapiens
  misc_RNA (1)...(19): siRNA sense strand
ggagauggcccgacagaag

SEQ ID NO: 171174 - RNA, 19 nt, Homo sapiens
  misc_RNA (1)...(19): siRNA sense strand
cguaugcuguccagucuaa

SEQ ID NO: 171175 - RNA, 19 nt, Homo sapiens
  misc_RNA (1)...(19): siRNA sense strand
ggagugaaaucaggaacau

SEQ ID NO: 171176 - RNA, 19 nt, Homo sapiens
  misc_RNA (1)...(19): siRNA sense strand
caagaagacugccaaugac

SEQ ID NO: 171177 - RNA, 19 nt, Homo sapiens
  misc_RNA (1)...(19): siRNA sense strand
gcugaagacugccaugagu

SEQ ID NO: 171178 - RNA, 19 nt, Homo sapiens
  misc_RNA (1)...(19): siRNA sense strand
gagaagaagaagcgugaaa

SEQ ID NO: 171179 - RNA, 19 nt, Homo sapiens
  misc_RNA (1)...(19): siRNA sense strand
ccaccuggcugaaacucaa

SEQ ID NO: 171180 - RNA, 19 nt, Homo sapiens
  misc_RNA (1)...(19): siRNA sense strand
ccacugaggcagagaagaa

SEQ ID NO: 171181 - RNA, 19 nt, Homo sapiens
  misc_RNA (1)...(19): siRNA sense strand
gacagaagaaggagaguga

SEQ ID NO: 171182 - RNA, 19 nt, Homo sapiens
  misc_RNA (1)...(19): siRNA sense strand
ugaagcagaucgaggaaca

SEQ ID NO: 171183 - RNA, 19 nt, Homo sapiens
  misc_RNA (1)...(19): siRNA sense strand
ucgcaagccugauaccauu

SEQ ID NO: 171184 - RNA, 19 nt, Homo sapiens
  misc_RNA (1)...(19): siRNA sense strand
aggaacaucucuuucaaug

SEQ ID NO: 171185 - RNA, 19 nt, Homo sapiens
  misc_RNA (1)...(19): siRNA sense strand
ucaggaacaucucuuucaa

SEQ ID NO: 171186 - RNA, 19 nt, Homo sapiens
  misc_RNA (1)...(19): siRNA sense strand
gagcagaaugacagacuaa

SEQ ID NO: 171187 - RNA, 19 nt, Homo sapiens
  misc_RNA (1)...(19): siRNA sense strand
uaaguuccgugccaaguuc

SEQ ID NO: 171188 - RNA, 19 nt, Homo sapiens
  misc_RNA (1)...(19): siRNA sense strand
cgaauuugagucuauguaa

SEQ ID NO: 171189 - RNA, 19 nt, Homo sapiens
  misc_RNA (1)...(19): siRNA sense strand
gagauggcccgacagaaga

SEQ ID NO: 171190 - RNA, 19 nt, Homo sapiens
  misc_RNA (1)...(19): siRNA sense strand
gaagacugccaaugacaug

SEQ ID NO: 171191 - RNA, 19 nt, Homo sapiens
  misc_RNA (1)...(19): siRNA sense strand
agaaugagcgugugcagaa

SEQ ID NO: 171192 - RNA, 19 nt, Homo sapiens
  misc_RNA (1)...(19): siRNA sense strand
agagaugaguccaagaaga

SEQ ID NO: 171193 - RNA, 19 nt, Homo sapiens
  misc_RNA (1)...(19): siRNA sense strand
cuaagaaggcucagcaaga

SEQ ID NO: 171194 - RNA, 19 nt, Homo sapiens
  misc_RNA (1)...(19): siRNA sense strand
ggaaauggcagagcugaca

SEQ ID NO: 171195 - RNA, 19 nt, Homo sapiens
  misc_RNA (1)...(19): siRNA sense strand
gcagagaaggagaaagaga

SEQ ID NO: 171196 - RNA, 19 nt, Homo sapiens
  misc_RNA (1)...(19): siRNA sense strand
ccagagaugaguccaagaa

SEQ ID NO: 171197 - RNA, 19 nt, Homo sapiens
  misc_RNA (1)...(19): siRNA sense strand
ggagaaagagaagauugaa

SEQ ID NO: 171198 - RNA, 19 nt, Homo sapiens
  misc_RNA (1)...(19): siRNA sense strand
ccauugaggugcagcagau

SEQ ID NO: 171199 - RNA, 19 nt, Homo sapiens
  misc_RNA (1)...(19): siRNA sense strand
caggaagacuuggagaaga

SEQ ID NO: 171200 - RNA, 19 nt, Homo sapiens
  misc_RNA (1)...(19): siRNA sense strand
gaugguacaggaagacuug

SEQ ID NO: 171201 - RNA, 19 nt, Homo sapiens
  misc_RNA (1)...(19): siRNA sense strand
ccaggacacuaaagguuuc

SEQ ID NO: 171202 - RNA, 19 nt, Homo sapiens
  misc_RNA (1)...(19): siRNA sense strand
gaaaucaggaacaucucuu

SEQ ID NO: 171203 - RNA, 19 nt, Homo sapiens
  misc_RNA (1)...(19): siRNA sense strand
ggauguguccgaggaauug

SEQ ID NO: 171204 - RNA, 19 nt, Homo sapiens
  misc_RNA (1)...(19): siRNA sense strand
aggaacagcuggccuugga

SEQ ID NO: 171205 - RNA, 19 nt, Homo sapiens
  misc_RNA (1)...(19): siRNA sense strand
gaaggagaaagagaagauu

SEQ ID NO: 171206 - RNA, 19 nt, Homo sapiens
  misc_RNA (1)...(19): siRNA sense strand
cagagaaggagaaagagaa

SEQ ID NO: 171207 - RNA, 19 nt, Homo sapiens
  misc_RNA (1)...(19): siRNA sense strand
ggaacaucucuuucaauga

SEQ ID NO: 171208 - RNA, 19 nt, Homo sapiens
  misc_RNA (1)...(19): siRNA sense strand
auaaggaagugcauaaguc

SEQ ID NO: 171209 - RNA, 19 nt, Homo sapiens
  misc_RNA (1)...(19): siRNA sense strand
ggauccagguguggcauga

SEQ ID NO: 171210 - RNA, 19 nt, Homo sapiens
  misc_RNA (1)...(19): siRNA sense strand
gcagauggagcgugcuaug

SEQ ID NO: 171211 - RNA, 19 nt, Homo sapiens
  misc_RNA (1)...(19): siRNA sense strand
gcaagccugauaccauuga

SEQ ID NO: 171212 - RNA, 19 nt, Homo sapiens
  misc_RNA (1)...(19): siRNA sense strand
ugaaagagggcauucucaa

SEQ ID NO: 171213 - RNA, 19 nt, Homo sapiens
  misc_RNA (1)...(19): siRNA sense strand
ggaccgcagugaggaggaa

SEQ ID NO: 171214 - RNA, 19 nt, Homo sapiens
  misc_RNA (1)...(19): siRNA sense strand
agcaagaacuggaagaaca

SEQ ID NO: 171215 - RNA, 19 nt, Homo sapiens
  misc_RNA (1)...(19): siRNA sense strand
gggaggagaagcaccagaa

SEQ ID NO: 171216 - RNA, 19 nt, Homo sapiens
  misc_RNA (1)...(19): siRNA sense strand
ugagcagaaugacagacua

SEQ ID NO: 171217 - RNA, 19 nt, Homo sapiens
  misc_RNA (1)...(19): siRNA sense strand
cuucggagcuggccaaugc

SEQ ID NO: 171218 - RNA, 19 nt, Homo sapiens
  misc_RNA (1)...(19): siRNA sense strand
uggagaggcugaagcagau

SEQ ID NO: 171219 - RNA, 19 nt, Homo sapiens
  misc_RNA (1)...(19): siRNA sense strand
gugcuaugcuggaaaauga

SEQ ID NO: 171220 - RNA, 19 nt, Homo sapiens
  misc_RNA (1)...(19): siRNA sense strand
uggcagagaaggagaaaga

SEQ ID NO: 171221 - RNA, 19 nt, Homo sapiens
  misc_RNA (1)...(19): siRNA sense strand
ccgggaagcagcuauuuga

SEQ ID NO: 171222 - RNA, 19 nt, Homo sapiens
  misc_RNA (1)...(19): siRNA sense strand
gcaguaccaggacacuaaa

SEQ ID NO: 171223 - RNA, 19 nt, Homo sapiens
  misc_RNA (1)...(19): siRNA sense strand
uguauggugugaacuacuu

SEQ ID NO: 171224 - RNA, 19 nt, Homo sapiens
  misc_RNA (1)...(19): siRNA sense strand
uggcugaaacucaauaaga

SEQ ID NO: 171225 - RNA, 19 nt, Homo sapiens
  misc_RNA (1)...(19): siRNA sense strand
ugacgaauuugagucuaug

SEQ ID NO: 171226 - RNA, 19 nt, Homo sapiens
  misc_RNA (1)...(19): siRNA sense strand
gagaugaguccaagaagac

SEQ ID NO: 171227 - RNA, 19 nt, Homo sapiens
  misc_RNA (1)...(19): siRNA sense strand
ccuacgggcugaugcuaug

SEQ ID NO: 171228 - RNA, 19 nt, Homo sapiens
  misc_RNA (1)...(19): siRNA sense strand
gaggauguguccgaggaau

SEQ ID NO: 171229 - RNA, 19 nt, Homo sapiens
  misc_RNA (1)...(19): siRNA sense strand
gaaugagcgugugcagaag

SEQ ID NO: 171230 - RNA, 19 nt, Homo sapiens
  misc_RNA (1)...(19): siRNA sense strand
gagcugaagacugccauga

SEQ ID NO: 171231 - RNA, 19 nt, Homo sapiens
  misc_RNA (1)...(19): siRNA sense strand
cagcuggccuuggaaaugg

SEQ ID NO: 171232 - RNA, 19 nt, Homo sapiens
  misc_RNA (1)...(19): siRNA sense strand
caaggagcgucaagaagcu

SEQ ID NO: 171233 - RNA, 19 nt, Homo sapiens
  misc_RNA (1)...(19): siRNA sense strand
ggccaaggagcgucaagaa

SEQ ID NO: 171234 - RNA, 19 nt, Homo sapiens
  misc_RNA (1)...(19): siRNA sense strand
ucgaggaacagacuaagaa

SEQ ID NO: 171235 - RNA, 19 nt, Homo sapiens
  misc_RNA (1)...(19): siRNA sense strand
gaacuacuucagcaucaag

SEQ ID NO: 171236 - RNA, 19 nt, Homo sapiens
  misc_RNA (1)...(19): siRNA sense strand
ggagaaggaggagcugaug

SEQ ID NO: 171237 - RNA, 19 nt, Homo sapiens
  misc_RNA (1)...(19): siRNA sense strand
cgacugggccgagacaaau

SEQ ID NO: 171238 - RNA, 19 nt, Homo sapiens
  misc_RNA (1)...(19): siRNA sense strand
cugaaaagcuggccaagga

SEQ ID NO: 171239 - RNA, 19 nt, Homo sapiens
  misc_RNA (1)...(19): siRNA sense strand
ggagcgugcuaugcuggaa

SEQ ID NO: 171240 - RNA, 19 nt, Homo sapiens
  misc_RNA (1)...(19): siRNA sense strand
ugagggaaguuugguucuu

SEQ ID NO: 171241 - RNA, 19 nt, Homo sapiens
  misc_RNA (1)...(19): siRNA sense strand
augcagagcuggaguuugc

SEQ ID NO: 171242 - RNA, 19 nt, Homo sapiens
  misc_RNA (1)...(19): siRNA sense strand
ucacucagcgccuguucuu

SEQ ID NO: 171243 - RNA, 19 nt, Homo sapiens
  misc_RNA (1)...(19): siRNA sense strand
ggaugcagagcuggaguuu

SEQ ID NO: 171244 - RNA, 19 nt, Homo sapiens
  misc_RNA (1)...(19): siRNA sense strand
gcgacugggccgagacaaa

SEQ ID NO: 171245 - RNA, 19 nt, Homo sapiens
  misc_RNA (1)...(19): siRNA sense strand
gcagaucgaggaacagacu

SEQ ID NO: 171246 - RNA, 19 nt, Homo sapiens
  misc_RNA (1)...(19): siRNA sense strand
agcacaaacucaacaagga

SEQ ID NO: 171247 - RNA, 19 nt, Homo sapiens
  misc_RNA (1)...(19): siRNA sense strand
cagcaucaagaacaagaaa

SEQ ID NO: 171248 - RNA, 19 nt, Homo sapiens
  misc_RNA (1)...(19): siRNA sense strand
gcaagugaaagagggcauu

SEQ ID NO: 171249 - RNA, 19 nt, Homo sapiens
  misc_RNA (1)...(19): siRNA sense strand
guucuacccugaggaugug

SEQ ID NO: 171250 - RNA, 19 nt, Homo sapiens
  misc_RNA (1)...(19): siRNA sense strand
gcagaaugacagacuaacu

SEQ ID NO: 171251 - RNA, 19 nt, Homo sapiens
  misc_RNA (1)...(19): siRNA sense strand
gauguauggugugaacuac

SEQ ID NO: 171252 - RNA, 19 nt, Homo sapiens
  misc_RNA (1)...(19): siRNA sense strand
gcaagaacuggaagaacag

SEQ ID NO: 171253 - RNA, 19 nt, Homo sapiens
  misc_RNA (1)...(19): siRNA sense strand
aggaugagcaggaugagaa

SEQ ID NO: 171254 - RNA, 19 nt, Homo sapiens
  misc_RNA (1)...(19): siRNA sense strand
cagagccugcugagaauga

SEQ ID NO: 171255 - RNA, 19 nt, Homo sapiens
  misc_RNA (1)...(19): siRNA sense strand
gcccagagcgaggcugaaa

SEQ ID NO: 171256 - RNA, 19 nt, Homo sapiens
  misc_RNA (1)...(19): siRNA sense strand
gaagugaaaguacugaaua

SEQ ID NO: 171257 - RNA, 19 nt, Homo sapiens
  misc_RNA (1)...(19): siRNA sense strand
gagaauaccuucaaacaac

SEQ ID NO: 171258 - RNA, 19 nt, Homo sapiens
  misc_RNA (1)...(19): siRNA sense strand
cuucaaagcugcacugauu

SEQ ID NO: 171259 - RNA, 19 nt, Homo sapiens
  misc_RNA (1)...(19): siRNA sense strand
gagaagagaauccagcaua

SEQ ID NO: 171260 - RNA, 19 nt, Homo sapiens
  misc_RNA (1)...(19): siRNA sense strand
caugacaacugaucaaaga

SEQ ID NO: 171261 - RNA, 19 nt, Homo sapiens
  misc_RNA (1)...(19): siRNA sense strand
gcagcuaaguaccuuguuu

SEQ ID NO: 171262 - RNA, 19 nt, Homo sapiens
  misc_RNA (1)...(19): siRNA sense strand
gacaacugaucaaagauuu

SEQ ID NO: 171263 - RNA, 19 nt, Homo sapiens
  misc_RNA (1)...(19): siRNA sense strand
ggaaaucaguaaauuagag

SEQ ID NO: 171264 - RNA, 19 nt, Homo sapiens
  misc_RNA (1)...(19): siRNA sense strand
cagcagaaauuauggcuau

SEQ ID NO: 171265 - RNA, 19 nt, Homo sapiens
  misc_RNA (1)...(19): siRNA sense strand
ggaaugcaauagaugaaau

SEQ ID NO: 171266 - RNA, 19 nt, Homo sapiens
  misc_RNA (1)...(19): siRNA sense strand
acgaagaauugcucaguua

SEQ ID NO: 171267 - RNA, 19 nt, Homo sapiens
  misc_RNA (1)...(19): siRNA sense strand
aaacagcccuucccuucaa

SEQ ID NO: 171268 - RNA, 19 nt, Homo sapiens
  misc_RNA (1)...(19): siRNA sense strand
gaaauuauggcuaugaaag

SEQ ID NO: 171269 - RNA, 19 nt, Homo sapiens
  misc_RNA (1)...(19): siRNA sense strand
ccacauugcuugauuugca

SEQ ID NO: 171270 - RNA, 19 nt, Homo sapiens
  misc_RNA (1)...(19): siRNA sense strand
caauguaucagcagaaauu

SEQ ID NO: 171271 - RNA, 19 nt, Homo sapiens
  misc_RNA (1)...(19): siRNA sense strand
ccgaaucugugaaauuuga

SEQ ID NO: 171272 - RNA, 19 nt, Homo sapiens
  misc_RNA (1)...(19): siRNA sense strand
gaaagaagaacaagugcau

SEQ ID NO: 171273 - RNA, 19 nt, Homo sapiens
  misc_RNA (1)...(19): siRNA sense strand
gaggaaaucaguaaauuag

SEQ ID NO: 171274 - RNA, 19 nt, Homo sapiens
  misc_RNA (1)...(19): siRNA sense strand
ccaagagaauaccuucaaa

SEQ ID NO: 171275 - RNA, 19 nt, Homo sapiens
  misc_RNA (1)...(19): siRNA sense strand
gaagagaauccagcauauu

SEQ ID NO: 171276 - RNA, 19 nt, Homo sapiens
  misc_RNA (1)...(19): siRNA sense strand
ggacacagagcauuuccaa

SEQ ID NO: 171277 - RNA, 19 nt, Homo sapiens
  misc_RNA (1)...(19): siRNA sense strand
cagcucaacuccugaagug

SEQ ID NO: 171278 - RNA, 19 nt, Homo sapiens
  misc_RNA (1)...(19): siRNA sense strand
aagagaaacugaaguccuu

SEQ ID NO: 171279 - RNA, 19 nt, Homo sapiens
  misc_RNA (1)...(19): siRNA sense strand
aagagaauccagcauauuu

SEQ ID NO: 171280 - RNA, 19 nt, Homo sapiens
  misc_RNA (1)...(19): siRNA sense strand
gcccuucccuucaagagaa

SEQ ID NO: 171281 - RNA, 19 nt, Homo sapiens
  misc_RNA (1)...(19): siRNA sense strand
caacaagaggaaaucagua

SEQ ID NO: 171282 - RNA, 19 nt, Homo sapiens
  misc_RNA (1)...(19): siRNA sense strand
agaagagaauccagcauau

SEQ ID NO: 171283 - RNA, 19 nt, Homo sapiens
  misc_RNA (1)...(19): siRNA sense strand
gggaucacuuucacaauca

SEQ ID NO: 171284 - RNA, 19 nt, Homo sapiens
  misc_RNA (1)...(19): siRNA sense strand
caacaggaggacacugaua

SEQ ID NO: 171285 - RNA, 19 nt, Homo sapiens
  misc_RNA (1)...(19): siRNA sense strand
gcgaagaggaaaugagauu

SEQ ID NO: 171286 - RNA, 19 nt, Homo sapiens
  misc_RNA (1)...(19): siRNA sense strand
cagaaauuauggcuaugaa

SEQ ID NO: 171287 - RNA, 19 nt, Homo sapiens
  misc_RNA (1)...(19): siRNA sense strand
aagaauugcucaguuaguu

SEQ ID NO: 171288 - RNA, 19 nt, Homo sapiens
  misc_RNA (1)...(19): siRNA sense strand
gcagaaauuauggcuauga

SEQ ID NO: 171289 - RNA, 19 nt, Homo sapiens
  misc_RNA (1)...(19): siRNA sense strand
ugaaaucuccaaguccuua

SEQ ID NO: 171290 - RNA, 19 nt, Homo sapiens
  misc_RNA (1)...(19): siRNA sense strand
cuccgaaucugugaaauuu

SEQ ID NO: 171291 - RNA, 19 nt, Homo sapiens
  misc_RNA (1)...(19): siRNA sense strand
gucgaggacucccaggaua

SEQ ID NO: 171292 - RNA, 19 nt, Homo sapiens
  misc_RNA (1)...(19): siRNA sense strand
caagaggaaaucaguaaau

SEQ ID NO: 171293 - RNA, 19 nt, Homo sapiens
  misc_RNA (1)...(19): siRNA sense strand
aagaagaacaagugcauuu

SEQ ID NO: 171294 - RNA, 19 nt, Homo sapiens
  misc_RNA (1)...(19): siRNA sense strand
guucaacuaaugcaaauga

SEQ ID NO: 171295 - RNA, 19 nt, Homo sapiens
  misc_RNA (1)...(19): siRNA sense strand
gaaaguacugaauaacauc

SEQ ID NO: 171296 - RNA, 19 nt, Homo sapiens
  misc_RNA (1)...(19): siRNA sense strand
gaagaacaagugcauuugg

SEQ ID NO: 171297 - RNA, 19 nt, Homo sapiens
  misc_RNA (1)...(19): siRNA sense strand
uagaggagcguguuuacaa

SEQ ID NO: 171298 - RNA, 19 nt, Homo sapiens
  misc_RNA (1)...(19): siRNA sense strand
acugauagcugcuccgaau

SEQ ID NO: 171299 - RNA, 19 nt, Homo sapiens
  misc_RNA (1)...(19): siRNA sense strand
ucucaucccucucauugga

SEQ ID NO: 171300 - RNA, 19 nt, Homo sapiens
  misc_RNA (1)...(19): siRNA sense strand
ugacaacugaucaaagauu

SEQ ID NO: 171301 - RNA, 19 nt, Homo sapiens
  misc_RNA (1)...(19): siRNA sense strand
gagaauccagcauauuuua

SEQ ID NO: 171302 - RNA, 19 nt, Homo sapiens
  misc_RNA (1)...(19): siRNA sense strand
gaagaauugcucaguuagu

SEQ ID NO: 171303 - RNA, 19 nt, Homo sapiens
  misc_RNA (1)...(19): siRNA sense strand
cugaauaacaucacuaaug

SEQ ID NO: 171304 - RNA, 19 nt, Homo sapiens
  misc_RNA (1)...(19): siRNA sense strand
gaaaucuccaaguccuuaa

SEQ ID NO: 171305 - RNA, 19 nt, Homo sapiens
  misc_RNA (1)...(19): siRNA sense strand
gcaguucucaucccucuca

SEQ ID NO: 171306 - RNA, 19 nt, Homo sapiens
  misc_RNA (1)...(19): siRNA sense strand
gaauugcucaguuaguuca

SEQ ID NO: 171307 - RNA, 19 nt, Homo sapiens
  misc_RNA (1)...(19): siRNA sense strand
guucucaucccucucauug

SEQ ID NO: 171308 - RNA, 19 nt, Homo sapiens
  misc_RNA (1)...(19): siRNA sense strand
gaacauucucagaccuuga

SEQ ID NO: 171309 - RNA, 19 nt, Homo sapiens
  misc_RNA (1)...(19): siRNA sense strand
aagaacaagugcauuugga

SEQ ID NO: 171310 - RNA, 19 nt, Homo sapiens
  misc_RNA (1)...(19): siRNA sense strand
gauauaacucaaagucuca

SEQ ID NO: 171311 - RNA, 19 nt, Homo sapiens
  misc_RNA (1)...(19): siRNA sense strand
gcuccgaaucugugaaauu

SEQ ID NO: 171312 - RNA, 19 nt, Homo sapiens
  misc_RNA (1)...(19): siRNA sense strand
gggaguggaaacacauuaa

SEQ ID NO: 171313 - RNA, 19 nt, Homo sapiens
  misc_RNA (1)...(19): siRNA sense strand
cugcacugauugcccuuua

SEQ ID NO: 171314 - RNA, 19 nt, Homo sapiens
  misc_RNA (1)...(19): siRNA sense strand
uaugaaagaagaacaagug

SEQ ID NO: 171315 - RNA, 19 nt, Homo sapiens
  misc_RNA (1)...(19): siRNA sense strand
ggacaugggaaugcaauag

SEQ ID NO: 171316 - RNA, 19 nt, Homo sapiens
  misc_RNA (1)...(19): siRNA sense strand
cagcgaagaggaaaugaga

SEQ ID NO: 171317 - RNA, 19 nt, Homo sapiens
  misc_RNA (1)...(19): siRNA sense strand
aauaccacauugcuugauu

SEQ ID NO: 171318 - RNA, 19 nt, Homo sapiens
  misc_RNA (1)...(19): siRNA sense strand
gugaaaguacugaauaaca

SEQ ID NO: 171319 - RNA, 19 nt, Homo sapiens
  misc_RNA (1)...(19): siRNA sense strand
ugggaucacuuucacaauc

SEQ ID NO: 171320 - RNA, 19 nt, Homo sapiens
  misc_RNA (1)...(19): siRNA sense strand
cucaaagucucacgggaaa

SEQ ID NO: 171321 - RNA, 19 nt, Homo sapiens
  misc_RNA (1)...(19): siRNA sense strand
ugaaagauugggaacauuc

SEQ ID NO: 171322 - RNA, 19 nt, Homo sapiens
  misc_RNA (1)...(19): siRNA sense strand
ggaaauaaaaggagaagug

SEQ ID NO: 171323 - RNA, 19 nt, Homo sapiens
  misc_RNA (1)...(19): siRNA sense strand
aaugagauuucaagaaguc

SEQ ID NO: 171324 - RNA, 19 nt, Homo sapiens
  misc_RNA (1)...(19): siRNA sense strand
guacugaauaacaucacua

SEQ ID NO: 171325 - RNA, 19 nt, Homo sapiens
  misc_RNA (1)...(19): siRNA sense strand
acacagagcauuuccaaaa

SEQ ID NO: 171326 - RNA, 19 nt, Homo sapiens
  misc_RNA (1)...(19): siRNA sense strand
gacaugggaaugcaauaga

SEQ ID NO: 171327 - RNA, 19 nt, Homo sapiens
  misc_RNA (1)...(19): siRNA sense strand
gaaauaaaaggagaaguga

SEQ ID NO: 171328 - RNA, 19 nt, Homo sapiens
  misc_RNA (1)...(19): siRNA sense strand
aacaagaggaaaucaguaa

SEQ ID NO: 171329 - RNA, 19 nt, Homo sapiens
  misc_RNA (1)...(19): siRNA sense strand
ucaaacaacaagaggaaau

SEQ ID NO: 171330 - RNA, 19 nt, Homo sapiens
  misc_RNA (1)...(19): siRNA sense strand
agaauaccuucaaacaaca

SEQ ID NO: 171331 - RNA, 19 nt, Homo sapiens
  misc_RNA (1)...(19): siRNA sense strand
auaccacauugcuugauuu

SEQ ID NO: 171332 - RNA, 19 nt, Homo sapiens
  misc_RNA (1)...(19): siRNA sense strand
gacauucuucugcagcuaa

SEQ ID NO: 171333 - RNA, 19 nt, Homo sapiens
  misc_RNA (1)...(19): siRNA sense strand
gaggagcguguuuacaaug

SEQ ID NO: 171334 - RNA, 19 nt, Homo sapiens
  misc_RNA (1)...(19): siRNA sense strand
agaggagcguguuuacaau

SEQ ID NO: 171335 - RNA, 19 nt, Homo sapiens
  misc_RNA (1)...(19): siRNA sense strand
uaaauuagaggagcguguu

SEQ ID NO: 171336 - RNA, 19 nt, Homo sapiens
  misc_RNA (1)...(19): siRNA sense strand
ggaucacuuucacaaucaa

SEQ ID NO: 171337 - RNA, 19 nt, Homo sapiens
  misc_RNA (1)...(19): siRNA sense strand
gaaagauugggaacauucu

SEQ ID NO: 171338 - RNA, 19 nt, Homo sapiens
  misc_RNA (1)...(19): siRNA sense strand
gggaaugcaauagaugaaa

SEQ ID NO: 171339 - RNA, 19 nt, Homo sapiens
  misc_RNA (1)...(19): siRNA sense strand
agagaauaccuucaaacaa

SEQ ID NO: 171340 - RNA, 19 nt, Homo sapiens
  misc_RNA (1)...(19): siRNA sense strand
gaaugcaauagaugaaauc

SEQ ID NO: 171341 - RNA, 19 nt, Homo sapiens
  misc_RNA (1)...(19): siRNA sense strand
ugagcaacauggagaagag

SEQ ID NO: 171342 - RNA, 19 nt, Homo sapiens
  misc_RNA (1)...(19): siRNA sense strand
uguaucagcagaaauuaug

SEQ ID NO: 171343 - RNA, 19 nt, Homo sapiens
  misc_RNA (1)...(19): siRNA sense strand
aagagaauaccuucaaaca

SEQ ID NO: 171344 - RNA, 19 nt, Homo sapiens
  misc_RNA (1)...(19): siRNA sense strand
ugaagugggaaacgaagaa

SEQ ID NO: 171345 - RNA, 19 nt, Homo sapiens
  misc_RNA (1)...(19): siRNA sense strand
ggagaagugaaaguacuga

SEQ ID NO: 171346 - RNA, 19 nt, Homo sapiens
  misc_RNA (1)...(19): siRNA sense strand
uuauggcuaugaaagaaga

SEQ ID NO: 171347 - RNA, 19 nt, Homo sapiens
  misc_RNA (1)...(19): siRNA sense strand
gaauaccuucaaacaacaa

SEQ ID NO: 171348 - RNA, 19 nt, Homo sapiens
  misc_RNA (1)...(19): siRNA sense strand
ugacagcgaagaggaaaug

SEQ ID NO: 171349 - RNA, 19 nt, Homo sapiens
  misc_RNA (1)...(19): siRNA sense strand
aacgaagaauugcucaguu

SEQ ID NO: 171350 - RNA, 19 nt, Homo sapiens
  misc_RNA (1)...(19): siRNA sense strand
ggauuuccagguccaauag

SEQ ID NO: 171351 - RNA, 19 nt, Homo sapiens
  misc_RNA (1)...(19): siRNA sense strand
ugacauucuucugcagcua

SEQ ID NO: 171352 - RNA, 19 nt, Homo sapiens
  misc_RNA (1)...(19): siRNA sense strand
gcaacauggagaagagaau

SEQ ID NO: 171353 - RNA, 19 nt, Homo sapiens
  misc_RNA (1)...(19): siRNA sense strand
aaucuccaaguccuuaaua

SEQ ID NO: 171354 - RNA, 19 nt, Homo sapiens
  misc_RNA (1)...(19): siRNA sense strand
gagaagugaaaguacugaa

SEQ ID NO: 171355 - RNA, 19 nt, Homo sapiens
  misc_RNA (1)...(19): siRNA sense strand
gauagcugcuccgaaucug

SEQ ID NO: 171356 - RNA, 19 nt, Homo sapiens
  misc_RNA (1)...(19): siRNA sense strand
gaagugaaaguacugaaua

SEQ ID NO: 171357 - RNA, 19 nt, Homo sapiens
  misc_RNA (1)...(19): siRNA sense strand
gagaauaccuucaaacaac

SEQ ID NO: 171358 - RNA, 19 nt, Homo sapiens
  misc_RNA (1)...(19): siRNA sense strand
cuucaaagcugcacugauu

SEQ ID NO: 171359 - RNA, 19 nt, Homo sapiens
  misc_RNA (1)...(19): siRNA sense strand
gagaagagaauccagcaua

SEQ ID NO: 171360 - RNA, 19 nt, Homo sapiens
  misc_RNA (1)...(19): siRNA sense strand
caugacaacugaucaaaga

SEQ ID NO: 171361 - RNA, 19 nt, Homo sapiens
  misc_RNA (1)...(19): siRNA sense strand
gcagcuaaguaccuuguuu

SEQ ID NO: 171362 - RNA, 19 nt, Homo sapiens
  misc_RNA (1)...(19): siRNA sense strand
gacaacugaucaaagauuu

SEQ ID NO: 171363 - RNA, 19 nt, Homo sapiens
  misc_RNA (1)...(19): siRNA sense strand
ggaaaucaguaaauuagag

SEQ ID NO: 171364 - RNA, 19 nt, Homo sapiens
  misc_RNA (1)...(19): siRNA sense strand
cagcagaaauuauggcuau

SEQ ID NO: 171365 - RNA, 19 nt, Homo sapiens
  misc_RNA (1)...(19): siRNA sense strand
ggaaugcaauagaugaaau

SEQ ID NO: 171366 - RNA, 19 nt, Homo sapiens
  misc_RNA (1)...(19): siRNA sense strand
acgaagaauugcucaguua

SEQ ID NO: 171367 - RNA, 19 nt, Homo sapiens
  misc_RNA (1)...(19): siRNA sense strand
aaacagcccuucccuucaa

SEQ ID NO: 171368 - RNA, 19 nt, Homo sapiens
  misc_RNA (1)...(19): siRNA sense strand
gaaauuauggcuaugaaag

SEQ ID NO: 171369 - RNA, 19 nt, Homo sapiens
  misc_RNA (1)...(19): siRNA sense strand
ccacauugcuugauuugca

SEQ ID NO: 171370 - RNA, 19 nt, Homo sapiens
  misc_RNA (1)...(19): siRNA sense strand
caauguaucagcagaaauu

SEQ ID NO: 171371 - RNA, 19 nt, Homo sapiens
  misc_RNA (1)...(19): siRNA sense strand
ccgaaucugugaaauuuga

SEQ ID NO: 171372 - RNA, 19 nt, Homo sapiens
  misc_RNA (1)...(19): siRNA sense strand
gaaagaagaacaagugcau

SEQ ID NO: 171373 - RNA, 19 nt, Homo sapiens
  misc_RNA (1)...(19): siRNA sense strand
gaggaaaucaguaaauuag

SEQ ID NO: 171374 - RNA, 19 nt, Homo sapiens
  misc_RNA (1)...(19): siRNA sense strand
ccaagagaauaccuucaaa

SEQ ID NO: 171375 - RNA, 19 nt, Homo sapiens
  misc_RNA (1)...(19): siRNA sense strand
gaagagaauccagcauauu

SEQ ID NO: 171376 - RNA, 19 nt, Homo sapiens
  misc_RNA (1)...(19): siRNA sense strand
ggacacagagcauuuccaa

SEQ ID NO: 171377 - RNA, 19 nt, Homo sapiens
  misc_RNA (1)...(19): siRNA sense strand
cagcucaacuccugaagug

SEQ ID NO: 171378 - RNA, 19 nt, Homo sapiens
  misc_RNA (1)...(19): siRNA sense strand
aagagaaacugaaguccuu

SEQ ID NO: 171379 - RNA, 19 nt, Homo sapiens
  misc_RNA (1)...(19): siRNA sense strand
aagagaauccagcauauuu

SEQ ID NO: 171380 - RNA, 19 nt, Homo sapiens
  misc_RNA (1)...(19): siRNA sense strand
gcccuucccuucaagagaa

SEQ ID NO: 171381 - RNA, 19 nt, Homo sapiens
  misc_RNA (1)...(19): siRNA sense strand
caacaagaggaaaucagua

SEQ ID NO: 171382 - RNA, 19 nt, Homo sapiens
  misc_RNA (1)...(19): siRNA sense strand
agaagagaauccagcauau

SEQ ID NO: 171383 - RNA, 19 nt, Homo sapiens
  misc_RNA (1)...(19): siRNA sense strand
gggaucacuuucacaauca

SEQ ID NO: 171384 - RNA, 19 nt, Homo sapiens
  misc_RNA (1)...(19): siRNA sense strand
caacaggaggacacugaua

SEQ ID NO: 171385 - RNA, 19 nt, Homo sapiens
  misc_RNA (1)...(19): siRNA sense strand
gcgaagaggaaaugagauu

SEQ ID NO: 171386 - RNA, 19 nt, Homo sapiens
  misc_RNA (1)...(19): siRNA sense strand
cagaaauuauggcuaugaa

SEQ ID NO: 171387 - RNA, 19 nt, Homo sapiens
  misc_RNA (1)...(19): siRNA sense strand
aagaauugcucaguuaguu

SEQ ID NO: 171388 - RNA, 19 nt, Homo sapiens
  misc_RNA (1)...(19): siRNA sense strand
gcagaaauuauggcuauga

SEQ ID NO: 171389 - RNA, 19 nt, Homo sapiens
  misc_RNA (1)...(19): siRNA sense strand
ugaaaucuccaaguccuua

SEQ ID NO: 171390 - RNA, 19 nt, Homo sapiens
  misc_RNA (1)...(19): siRNA sense strand
cuccgaaucugugaaauuu

SEQ ID NO: 171391 - RNA, 19 nt, Homo sapiens
  misc_RNA (1)...(19): siRNA sense strand
gucgaggacucccaggaua

SEQ ID NO: 171392 - RNA, 19 nt, Homo sapiens
  misc_RNA (1)...(19): siRNA sense strand
caagaggaaaucaguaaau

SEQ ID NO: 171393 - RNA, 19 nt, Homo sapiens
  misc_RNA (1)...(19): siRNA sense strand
aagaagaacaagugcauuu

SEQ ID NO: 171394 - RNA, 19 nt, Homo sapiens
  misc_RNA (1)...(19): siRNA sense strand
guucaacuaaugcaaauga

SEQ ID NO: 171395 - RNA, 19 nt, Homo sapiens
  misc_RNA (1)...(19): siRNA sense strand
gaaaguacugaauaacauc

SEQ ID NO: 171396 - RNA, 19 nt, Homo sapiens
  misc_RNA (1)...(19): siRNA sense strand
gaagaacaagugcauuugg

SEQ ID NO: 171397 - RNA, 19 nt, Homo sapiens
  misc_RNA (1)...(19): siRNA sense strand
uagaggagcguguuuacaa

SEQ ID NO: 171398 - RNA, 19 nt, Homo sapiens
  misc_RNA (1)...(19): siRNA sense strand
acugauagcugcuccgaau

SEQ ID NO: 171399 - RNA, 19 nt, Homo sapiens
  misc_RNA (1)...(19): siRNA sense strand
ucucaucccucucauugga

SEQ ID NO: 171400 - RNA, 19 nt, Homo sapiens
  misc_RNA (1)...(19): siRNA sense strand
ugacaacugaucaaagauu

SEQ ID NO: 171401 - RNA, 19 nt, Homo sapiens
  misc_RNA (1)...(19): siRNA sense strand
gagaauccagcauauuuua

SEQ ID NO: 171402 - RNA, 19 nt, Homo sapiens
  misc_RNA (1)...(19): siRNA sense strand
gaagaauugcucaguuagu

SEQ ID NO: 171403 - RNA, 19 nt, Homo sapiens
  misc_RNA (1)...(19): siRNA sense strand
cugaauaacaucacuaaug

SEQ ID NO: 171404 - RNA, 19 nt, Homo sapiens
  misc_RNA (1)...(19): siRNA sense strand
gaaaucuccaaguccuuaa

SEQ ID NO: 171405 - RNA, 19 nt, Homo sapiens
  misc_RNA (1)...(19): siRNA sense strand
gcaguucucaucccucuca

SEQ ID NO: 171406 - RNA, 19 nt, Homo sapiens
  misc_RNA (1)...(19): siRNA sense strand
gaauugcucaguuaguuca

SEQ ID NO: 171407 - RNA, 19 nt, Homo sapiens
  misc_RNA (1)...(19): siRNA sense strand
guucucaucccucucauug

SEQ ID NO: 171408 - RNA, 19 nt, Homo sapiens
  misc_RNA (1)...(19): siRNA sense strand
gaacauucucagaccuuga

SEQ ID NO: 171409 - RNA, 19 nt, Homo sapiens
  misc_RNA (1)...(19): siRNA sense strand
aagaacaagugcauuugga

SEQ ID NO: 171410 - RNA, 19 nt, Homo sapiens
  misc_RNA (1)...(19): siRNA sense strand
gauauaacucaaagucuca

SEQ ID NO: 171411 - RNA, 19 nt, Homo sapiens
  misc_RNA (1)...(19): siRNA sense strand
gcuccgaaucugugaaauu

SEQ ID NO: 171412 - RNA, 19 nt, Homo sapiens
  misc_RNA (1)...(19): siRNA sense strand
gggaguggaaacacauuaa

SEQ ID NO: 171413 - RNA, 19 nt, Homo sapiens
  misc_RNA (1)...(19): siRNA sense strand
cugcacugauugcccuuua

SEQ ID NO: 171414 - RNA, 19 nt, Homo sapiens
  misc_RNA (1)...(19): siRNA sense strand
uaugaaagaagaacaagug

SEQ ID NO: 171415 - RNA, 19 nt, Homo sapiens
  misc_RNA (1)...(19): siRNA sense strand
ggacaugggaaugcaauag

SEQ ID NO: 171416 - RNA, 19 nt, Homo sapiens
  misc_RNA (1)...(19): siRNA sense strand
cagcgaagaggaaaugaga

SEQ ID NO: 171417 - RNA, 19 nt, Homo sapiens
  misc_RNA (1)...(19): siRNA sense strand
aauaccacauugcuugauu

SEQ ID NO: 171418 - RNA, 19 nt, Homo sapiens
  misc_RNA (1)...(19): siRNA sense strand
gugaaaguacugaauaaca

SEQ ID NO: 171419 - RNA, 19 nt, Homo sapiens
  misc_RNA (1)...(19): siRNA sense strand
ugggaucacuuucacaauc

SEQ ID NO: 171420 - RNA, 19 nt, Homo sapiens
  misc_RNA (1)...(19): siRNA sense strand
cucaaagucucacgggaaa

SEQ ID NO: 171421 - RNA, 19 nt, Homo sapiens
  misc_RNA (1)...(19): siRNA sense strand
ugaaagauugggaacauuc

SEQ ID NO: 171422 - RNA, 19 nt, Homo sapiens
  misc_RNA (1)...(19): siRNA sense strand
ggaaauaaaaggagaagug

SEQ ID NO: 171423 - RNA, 19 nt, Homo sapiens
  misc_RNA (1)...(19): siRNA sense strand
aaugagauuucaagaaguc

SEQ ID NO: 171424 - RNA, 19 nt, Homo sapiens
  misc_RNA (1)...(19): siRNA sense strand
guacugaauaacaucacua

SEQ ID NO: 171425 - RNA, 19 nt, Homo sapiens
  misc_RNA (1)...(19): siRNA sense strand
acacagagcauuuccaaaa

SEQ ID NO: 171426 - RNA, 19 nt, Homo sapiens
  misc_RNA (1)...(19): siRNA sense strand
gacaugggaaugcaauaga

SEQ ID NO: 171427 - RNA, 19 nt, Homo sapiens
  misc_RNA (1)...(19): siRNA sense strand
gaaauaaaaggagaaguga

SEQ ID NO: 171428 - RNA, 19 nt, Homo sapiens
  misc_RNA (1)...(19): siRNA sense strand
aacaagaggaaaucaguaa

SEQ ID NO: 171429 - RNA, 19 nt, Homo sapiens
  misc_RNA (1)...(19): siRNA sense strand
ucaaacaacaagaggaaau

SEQ ID NO: 171430 - RNA, 19 nt, Homo sapiens
  misc_RNA (1)...(19): siRNA sense strand
agaauaccuucaaacaaca

SEQ ID NO: 171431 - RNA, 19 nt, Homo sapiens
  misc_RNA (1)...(19): siRNA sense strand
auaccacauugcuugauuu

SEQ ID NO: 171432 - RNA, 19 nt, Homo sapiens
  misc_RNA (1)...(19): siRNA sense strand
gacauucuucugcagcuaa

SEQ ID NO: 171433 - RNA, 19 nt, Homo sapiens
  misc_RNA (1)...(19): siRNA sense strand
gaggagcguguuuacaaug

SEQ ID NO: 171434 - RNA, 19 nt, Homo sapiens
  misc_RNA (1)...(19): siRNA sense strand
agaggagcguguuuacaau

SEQ ID NO: 171435 - RNA, 19 nt, Homo sapiens
  misc_RNA (1)...(19): siRNA sense strand
uaaauuagaggagcguguu

SEQ ID NO: 171436 - RNA, 19 nt, Homo sapiens
  misc_RNA (1)...(19): siRNA sense strand
ggaucacuuucacaaucaa

SEQ ID NO: 171437 - RNA, 19 nt, Homo sapiens
  misc_RNA (1)...(19): siRNA sense strand
gaaagauugggaacauucu

SEQ ID NO: 171438 - RNA, 19 nt, Homo sapiens
  misc_RNA (1)...(19): siRNA sense strand
gggaaugcaauagaugaaa

SEQ ID NO: 171439 - RNA, 19 nt, Homo sapiens
  misc_RNA (1)...(19): siRNA sense strand
agagaauaccuucaaacaa

SEQ ID NO: 171440 - RNA, 19 nt, Homo sapiens
  misc_RNA (1)...(19): siRNA sense strand
gaaugcaauagaugaaauc

SEQ ID NO: 171441 - RNA, 19 nt, Homo sapiens
  misc_RNA (1)...(19): siRNA sense strand
ugagcaacauggagaagag

SEQ ID NO: 171442 - RNA, 19 nt, Homo sapiens
  misc_RNA (1)...(19): siRNA sense strand
uguaucagcagaaauuaug

SEQ ID NO: 171443 - RNA, 19 nt, Homo sapiens
  misc_RNA (1)...(19): siRNA sense strand
aagagaauaccuucaaaca

SEQ ID NO: 171444 - RNA, 19 nt, Homo sapiens
  misc_RNA (1)...(19): siRNA sense strand
ugaagugggaaacgaagaa

SEQ ID NO: 171445 - RNA, 19 nt, Homo sapiens
  misc_RNA (1)...(19): siRNA sense strand
ggagaagugaaaguacuga

SEQ ID NO: 171446 - RNA, 19 nt, Homo sapiens
  misc_RNA (1)...(19): siRNA sense strand
uuauggcuaugaaagaaga

SEQ ID NO: 171447 - RNA, 19 nt, Homo sapiens
  misc_RNA (1)...(19): siRNA sense strand
gaauaccuucaaacaacaa

SEQ ID NO: 171448 - RNA, 19 nt, Homo sapiens
  misc_RNA (1)...(19): siRNA sense strand
ugacagcgaagaggaaaug

SEQ ID NO: 171449 - RNA, 19 nt, Homo sapiens
  misc_RNA (1)...(19): siRNA sense strand
aacgaagaauugcucaguu

SEQ ID NO: 171450 - RNA, 19 nt, Homo sapiens
  misc_RNA (1)...(19): siRNA sense strand
ggauuuccagguccaauag

SEQ ID NO: 171451 - RNA, 19 nt, Homo sapiens
  misc_RNA (1)...(19): siRNA sense strand
ugacauucuucugcagcua

SEQ ID NO: 171452 - RNA, 19 nt, Homo sapiens
  misc_RNA (1)...(19): siRNA sense strand
gcaacauggagaagagaau

SEQ ID NO: 171453 - RNA, 19 nt, Homo sapiens
  misc_RNA (1)...(19): siRNA sense strand
aaucuccaaguccuuaaua

SEQ ID NO: 171454 - RNA, 19 nt, Homo sapiens
  misc_RNA (1)...(19): siRNA sense strand
gagaagugaaaguacugaa

SEQ ID NO: 171455 - RNA, 19 nt, Homo sapiens
  misc_RNA (1)...(19): siRNA sense strand
gauagcugcuccgaaucug

SEQ ID NO: 171456 - RNA, 19 nt, Homo sapiens
  misc_RNA (1)...(19): siRNA sense strand
gaagugaaaguacugaaua

SEQ ID NO: 171457 - RNA, 19 nt, Homo sapiens
  misc_RNA (1)...(19): siRNA sense strand
gagaauaccuucaaacaac

SEQ ID NO: 171458 - RNA, 19 nt, Homo sapiens
  misc_RNA (1)...(19): siRNA sense strand
cuucaaagcugcacugauu

SEQ ID NO: 171459 - RNA, 19 nt, Homo sapiens
  misc_RNA (1)...(19): siRNA sense strand
gagaagagaauccagcaua

SEQ ID NO: 171460 - RNA, 19 nt, Homo sapiens
  misc_RNA (1)...(19): siRNA sense strand
caugacaacugaucaaaga

SEQ ID NO: 171461 - RNA, 19 nt, Homo sapiens
  misc_RNA (1)...(19): siRNA sense strand
gcagcuaaguaccuuguuu

SEQ ID NO: 171462 - RNA, 19 nt, Homo sapiens
  misc_RNA (1)...(19): siRNA sense strand
gacaacugaucaaagauuu

SEQ ID NO: 171463 - RNA, 19 nt, Homo sapiens
  misc_RNA (1)...(19): siRNA sense strand
ggaaaucaguaaauuagag

SEQ ID NO: 171464 - RNA, 19 nt, Homo sapiens
  misc_RNA (1)...(19): siRNA sense strand
cagcagaaauuauggcuau

SEQ ID NO: 171465 - RNA, 19 nt, Homo sapiens
  misc_RNA (1)...(19): siRNA sense strand
ggaaugcaauagaugaaau

SEQ ID NO: 171466 - RNA, 19 nt, Homo sapiens
  misc_RNA (1)...(19): siRNA sense strand
acgaagaauugcucaguua

SEQ ID NO: 171467 - RNA, 19 nt, Homo sapiens
  misc_RNA (1)...(19): siRNA sense strand
aaacagcccuucccuucaa

SEQ ID NO: 171468 - RNA, 19 nt, Homo sapiens
  misc_RNA (1)...(19): siRNA sense strand
gaaauuauggcuaugaaag

SEQ ID NO: 171469 - RNA, 19 nt, Homo sapiens
  misc_RNA (1)...(19): siRNA sense strand
ccacauugcuugauuugca

SEQ ID NO: 171470 - RNA, 19 nt, Homo sapiens
  misc_RNA (1)...(19): siRNA sense strand
caauguaucagcagaaauu

SEQ ID NO: 171471 - RNA, 19 nt, Homo sapiens
  misc_RNA (1)...(19): siRNA sense strand
ccgaaucugugaaauuuga

SEQ ID NO: 171472 - RNA, 19 nt, Homo sapiens
  misc_RNA (1)...(19): siRNA sense strand
gaaagaagaacaagugcau

SEQ ID NO: 171473 - RNA, 19 nt, Homo sapiens
  misc_RNA (1)...(19): siRNA sense strand
gaggaaaucaguaaauuag

SEQ ID NO: 171474 - RNA, 19 nt, Homo sapiens
  misc_RNA (1)...(19): siRNA sense strand
ccaagagaauaccuucaaa

SEQ ID NO: 171475 - RNA, 19 nt, Homo sapiens
  misc_RNA (1)...(19): siRNA sense strand
gaagagaauccagcauauu

SEQ ID NO: 171476 - RNA, 19 nt, Homo sapiens
  misc_RNA (1)...(19): siRNA sense strand
ggacacagagcauuuccaa

SEQ ID NO: 171477 - RNA, 19 nt, Homo sapiens
  misc_RNA (1)...(19): siRNA sense strand
cagcucaacuccugaagug

SEQ ID NO: 171478 - RNA, 19 nt, Homo sapiens
  misc_RNA (1)...(19): siRNA sense strand
aagagaaacugaaguccuu

SEQ ID NO: 171479 - RNA, 19 nt, Homo sapiens
  misc_RNA (1)...(19): siRNA sense strand
aagagaauccagcauauuu

SEQ ID NO: 171480 - RNA, 19 nt, Homo sapiens
  misc_RNA (1)...(19): siRNA sense strand
gcccuucccuucaagagaa

SEQ ID NO: 171481 - RNA, 19 nt, Homo sapiens
  misc_RNA (1)...(19): siRNA sense strand
caacaagaggaaaucagua

SEQ ID NO: 171482 - RNA, 19 nt, Homo sapiens
  misc_RNA (1)...(19): siRNA sense strand
agaagagaauccagcauau

SEQ ID NO: 171483 - RNA, 19 nt, Homo sapiens
  misc_RNA (1)...(19): siRNA sense strand
gggaucacuuucacaauca

SEQ ID NO: 171484 - RNA, 19 nt, Homo sapiens
  misc_RNA (1)...(19): siRNA sense strand
caacaggaggacacugaua

SEQ ID NO: 171485 - RNA, 19 nt, Homo sapiens
  misc_RNA (1)...(19): siRNA sense strand
gcgaagaggaaaugagauu

SEQ ID NO: 171486 - RNA, 19 nt, Homo sapiens
  misc_RNA (1)...(19): siRNA sense strand
cagaaauuauggcuaugaa

SEQ ID NO: 171487 - RNA, 19 nt, Homo sapiens
  misc_RNA (1)...(19): siRNA sense strand
aagaauugcucaguuaguu

SEQ ID NO: 171488 - RNA, 19 nt, Homo sapiens
  misc_RNA (1)...(19): siRNA sense strand
gcagaaauuauggcuauga

SEQ ID NO: 171489 - RNA, 19 nt, Homo sapiens
  misc_RNA (1)...(19): siRNA sense strand
ugaaaucuccaaguccuua

SEQ ID NO: 171490 - RNA, 19 nt, Homo sapiens
  misc_RNA (1)...(19): siRNA sense strand
cuccgaaucugugaaauuu

SEQ ID NO: 171491 - RNA, 19 nt, Homo sapiens
  misc_RNA (1)...(19): siRNA sense strand
gucgaggacucccaggaua

SEQ ID NO: 171492 - RNA, 19 nt, Homo sapiens
  misc_RNA (1)...(19): siRNA sense strand
caagaggaaaucaguaaau

SEQ ID NO: 171493 - RNA, 19 nt, Homo sapiens
  misc_RNA (1)...(19): siRNA sense strand
aagaagaacaagugcauuu

SEQ ID NO: 171494 - RNA, 19 nt, Homo sapiens
  misc_RNA (1)...(19): siRNA sense strand
guucaacuaaugcaaauga

SEQ ID NO: 171495 - RNA, 19 nt, Homo sapiens
  misc_RNA (1)...(19): siRNA sense strand
gaaaguacugaauaacauc

SEQ ID NO: 171496 - RNA, 19 nt, Homo sapiens
  misc_RNA (1)...(19): siRNA sense strand
gaagaacaagugcauuugg

SEQ ID NO: 171497 - RNA, 19 nt, Homo sapiens
  misc_RNA (1)...(19): siRNA sense strand
uagaggagcguguuuacaa

SEQ ID NO: 171498 - RNA, 19 nt, Homo sapiens
  misc_RNA (1)...(19): siRNA sense strand
acugauagcugcuccgaau

SEQ ID NO: 171499 - RNA, 19 nt, Homo sapiens
  misc_RNA (1)...(19): siRNA sense strand
ucucaucccucucauugga

SEQ ID NO: 171500 - RNA, 19 nt, Homo sapiens
  misc_RNA (1)...(19): siRNA sense strand
ugacaacugaucaaagauu

SEQ ID NO: 171501 - RNA, 19 nt, Homo sapiens
  misc_RNA (1)...(19): siRNA sense strand
gagaauccagcauauuuua

SEQ ID NO: 171502 - RNA, 19 nt, Homo sapiens
  misc_RNA (1)...(19): siRNA sense strand
gaagaauugcucaguuagu

SEQ ID NO: 171503 - RNA, 19 nt, Homo sapiens
  misc_RNA (1)...(19): siRNA sense strand
cugaauaacaucacuaaug

SEQ ID NO: 171504 - RNA, 19 nt, Homo sapiens
  misc_RNA (1)...(19): siRNA sense strand
gaaaucuccaaguccuuaa

SEQ ID NO: 171505 - RNA, 19 nt, Homo sapiens
  misc_RNA (1)...(19): siRNA sense strand
gcaguucucaucccucuca

SEQ ID NO: 171506 - RNA, 19 nt, Homo sapiens
  misc_RNA (1)...(19): siRNA sense strand
gaauugcucaguuaguuca

SEQ ID NO: 171507 - RNA, 19 nt, Homo sapiens
  misc_RNA (1)...(19): siRNA sense strand
guucucaucccucucauug

SEQ ID NO: 171508 - RNA, 19 nt, Homo sapiens
  misc_RNA (1)...(19): siRNA sense strand
gaacauucucagaccuuga

SEQ ID NO: 171509 - RNA, 19 nt, Homo sapiens
  misc_RNA (1)...(19): siRNA sense strand
aagaacaagugcauuugga

SEQ ID NO: 171510 - RNA, 19 nt, Homo sapiens
  misc_RNA (1)...(19): siRNA sense strand
gauauaacucaaagucuca

SEQ ID NO: 171511 - RNA, 19 nt, Homo sapiens
  misc_RNA (1)...(19): siRNA sense strand
gcuccgaaucugugaaauu

SEQ ID NO: 171512 - RNA, 19 nt, Homo sapiens
  misc_RNA (1)...(19): siRNA sense strand
gggaguggaaacacauuaa

SEQ ID NO: 171513 - RNA, 19 nt, Homo sapiens
  misc_RNA (1)...(19): siRNA sense strand
cugcacugauugcccuuua

SEQ ID NO: 171514 - RNA, 19 nt, Homo sapiens
  misc_RNA (1)...(19): siRNA sense strand
uaugaaagaagaacaagug

SEQ ID NO: 171515 - RNA, 19 nt, Homo sapiens
  misc_RNA (1)...(19): siRNA sense strand
ggacaugggaaugcaauag

SEQ ID NO: 171516 - RNA, 19 nt, Homo sapiens
  misc_RNA (1)...(19): siRNA sense strand
cagcgaagaggaaaugaga

SEQ ID NO: 171517 - RNA, 19 nt, Homo sapiens
  misc_RNA (1)...(19): siRNA sense strand
aauaccacauugcuugauu

SEQ ID NO: 171518 - RNA, 19 nt, Homo sapiens
  misc_RNA (1)...(19): siRNA sense strand
gugaaaguacugaauaaca

SEQ ID NO: 171519 - RNA, 19 nt, Homo sapiens
  misc_RNA (1)...(19): siRNA sense strand
ugggaucacuuucacaauc

SEQ ID NO: 171520 - RNA, 19 nt, Homo sapiens
  misc_RNA (1)...(19): siRNA sense strand
cucaaagucucacgggaaa

SEQ ID NO: 171521 - RNA, 19 nt, Homo sapiens
  misc_RNA (1)...(19): siRNA sense strand
ugaaagauugggaacauuc

SEQ ID NO: 171522 - RNA, 19 nt, Homo sapiens
  misc_RNA (1)...(19): siRNA sense strand
ggaaauaaaaggagaagug

SEQ ID NO: 171523 - RNA, 19 nt, Homo sapiens
  misc_RNA (1)...(19): siRNA sense strand
aaugagauuucaagaaguc

SEQ ID NO: 171524 - RNA, 19 nt, Homo sapiens
  misc_RNA (1)...(19): siRNA sense strand
guacugaauaacaucacua

SEQ ID NO: 171525 - RNA, 19 nt, Homo sapiens
  misc_RNA (1)...(19): siRNA sense strand
acacagagcauuuccaaaa

SEQ ID NO: 171526 - RNA, 19 nt, Homo sapiens
  misc_RNA (1)...(19): siRNA sense strand
gacaugggaaugcaauaga

SEQ ID NO: 171527 - RNA, 19 nt, Homo sapiens
  misc_RNA (1)...(19): siRNA sense strand
gaaauaaaaggagaaguga

SEQ ID NO: 171528 - RNA, 19 nt, Homo sapiens
  misc_RNA (1)...(19): siRNA sense strand
aacaagaggaaaucaguaa

SEQ ID NO: 171529 - RNA, 19 nt, Homo sapiens
  misc_RNA (1)...(19): siRNA sense strand
ucaaacaacaagaggaaau

SEQ ID NO: 171530 - RNA, 19 nt, Homo sapiens
  misc_RNA (1)...(19): siRNA sense strand
agaauaccuucaaacaaca

SEQ ID NO: 171531 - RNA, 19 nt, Homo sapiens
  misc_RNA (1)...(19): siRNA sense strand
auaccacauugcuugauuu

SEQ ID NO: 171532 - RNA, 19 nt, Homo sapiens
  misc_RNA (1)...(19): siRNA sense strand
gacauucuucugcagcuaa

SEQ ID NO: 171533 - RNA, 19 nt, Homo sapiens
  misc_RNA (1)...(19): siRNA sense strand
gaggagcguguuuacaaug

SEQ ID NO: 171534 - RNA, 19 nt, Homo sapiens
  misc_RNA (1)...(19): siRNA sense strand
agaggagcguguuuacaau

SEQ ID NO: 171535 - RNA, 19 nt, Homo sapiens
  misc_RNA (1)...(19): siRNA sense strand
uaaauuagaggagcguguu

SEQ ID NO: 171536 - RNA, 19 nt, Homo sapiens
  misc_RNA (1)...(19): siRNA sense strand
ggaucacuuucacaaucaa

SEQ ID NO: 171537 - RNA, 19 nt, Homo sapiens
  misc_RNA (1)...(19): siRNA sense strand
gaaagauugggaacauucu

SEQ ID NO: 171538 - RNA, 19 nt, Homo sapiens
  misc_RNA (1)...(19): siRNA sense strand
gggaaugcaauagaugaaa

SEQ ID NO: 171539 - RNA, 19 nt, Homo sapiens
  misc_RNA (1)...(19): siRNA sense strand
agagaauaccuucaaacaa

SEQ ID NO: 171540 - RNA, 19 nt, Homo sapiens
  misc_RNA (1)...(19): siRNA sense strand
gaaugcaauagaugaaauc

SEQ ID NO: 171541 - RNA, 19 nt, Homo sapiens
  misc_RNA (1)...(19): siRNA sense strand
ugagcaacauggagaagag

SEQ ID NO: 171542 - RNA, 19 nt, Homo sapiens
  misc_RNA (1)...(19): siRNA sense strand
uguaucagcagaaauuaug

SEQ ID NO: 171543 - RNA, 19 nt, Homo sapiens
  misc_RNA (1)...(19): siRNA sense strand
aagagaauaccuucaaaca

SEQ ID NO: 171544 - RNA, 19 nt, Homo sapiens
  misc_RNA (1)...(19): siRNA sense strand
ugaagugggaaacgaagaa

SEQ ID NO: 171545 - RNA, 19 nt, Homo sapiens
  misc_RNA (1)...(19): siRNA sense strand
ggagaagugaaaguacuga

SEQ ID NO: 171546 - RNA, 19 nt, Homo sapiens
  misc_RNA (1)...(19): siRNA sense strand
uuauggcuaugaaagaaga

SEQ ID NO: 171547 - RNA, 19 nt, Homo sapiens
  misc_RNA (1)...(19): siRNA sense strand
gaauaccuucaaacaacaa

SEQ ID NO: 171548 - RNA, 19 nt, Homo sapiens
  misc_RNA (1)...(19): siRNA sense strand
ugacagcgaagaggaaaug

SEQ ID NO: 171549 - RNA, 19 nt, Homo sapiens
  misc_RNA (1)...(19): siRNA sense strand
aacgaagaauugcucaguu

SEQ ID NO: 171550 - RNA, 19 nt, Homo sapiens
  misc_RNA (1)...(19): siRNA sense strand
ggauuuccagguccaauag

SEQ ID NO: 171551 - RNA, 19 nt, Homo sapiens
  misc_RNA (1)...(19): siRNA sense strand
ugacauucuucugcagcua

SEQ ID NO: 171552 - RNA, 19 nt, Homo sapiens
  misc_RNA (1)...(19): siRNA sense strand
gcaacauggagaagagaau

SEQ ID NO: 171553 - RNA, 19 nt, Homo sapiens
  misc_RNA (1)...(19): siRNA sense strand
aaucuccaaguccuuaaua

SEQ ID NO: 171554 - RNA, 19 nt, Homo sapiens
  misc_RNA (1)...(19): siRNA sense strand
gagaagugaaaguacugaa

SEQ ID NO: 171555 - RNA, 19 nt, Homo sapiens
  misc_RNA (1)...(19): siRNA sense strand
gauagcugcuccgaaucug

SEQ ID NO: 171556 - RNA, 19 nt, Homo sapiens
  misc_RNA (1)...(19): siRNA sense strand
agacgcaggugaagauaug

SEQ ID NO: 171557 - RNA, 19 nt, Homo sapiens
  misc_RNA (1)...(19): siRNA sense strand
gaagaugcgcucgucaaag

SEQ ID NO: 171558 - RNA, 19 nt, Homo sapiens
  misc_RNA (1)...(19): siRNA sense strand
aagaugcgcucgucaaagc

SEQ ID NO: 171559 - RNA, 19 nt, Homo sapiens
  misc_RNA (1)...(19): siRNA sense strand
agaagaugcgcucgucaaa

SEQ ID NO: 171560 - RNA, 19 nt, Homo sapiens
  misc_RNA (1)...(19): siRNA sense strand
cagaagaugcgcucgucaa

SEQ ID NO: 171561 - RNA, 19 nt, Homo sapiens
  misc_RNA (1)...(19): siRNA sense strand
gcaaguuccgccagaagca

SEQ ID NO: 171562 - RNA, 19 nt, Homo sapiens
  misc_RNA (1)...(19): siRNA sense strand
gagacgcaggugaagauau

SEQ ID NO: 171563 - RNA, 19 nt, Homo sapiens
  misc_RNA (1)...(19): siRNA sense strand
aacacaagacgaaccguaa

SEQ ID NO: 171564 - RNA, 19 nt, Homo sapiens
  misc_RNA (1)...(19): siRNA sense strand
cagcauguaccaccugaca

SEQ ID NO: 171565 - RNA, 19 nt, Homo sapiens
  misc_RNA (1)...(19): siRNA sense strand
caaggcaaagagacuacaa

SEQ ID NO: 171566 - RNA, 19 nt, Homo sapiens
  misc_RNA (1)...(19): siRNA sense strand
uccucaagcugccagaaga

SEQ ID NO: 171567 - RNA, 19 nt, Homo sapiens
  misc_RNA (1)...(19): siRNA sense strand
caaaggcaaugacuuguuu

SEQ ID NO: 171568 - RNA, 19 nt, Homo sapiens
  misc_RNA (1)...(19): siRNA sense strand
gcaggcagcguccauauau

SEQ ID NO: 171569 - RNA, 19 nt, Homo sapiens
  misc_RNA (1)...(19): siRNA sense strand
gagcgcaaguuccgucaga

SEQ ID NO: 171570 - RNA, 19 nt, Homo sapiens
  misc_RNA (1)...(19): siRNA sense strand
gaaaauggcugcaaaaccu

SEQ ID NO: 171571 - RNA, 19 nt, Homo sapiens
  misc_RNA (1)...(19): siRNA sense strand
gaaacaguaccucuccauu

SEQ ID NO: 171572 - RNA, 19 nt, Homo sapiens
  misc_RNA (1)...(19): siRNA sense strand
gcaggaggcagaacuggaa

SEQ ID NO: 171573 - RNA, 19 nt, Homo sapiens
  misc_RNA (1)...(19): siRNA sense strand
aaacaguaccucuccauug

SEQ ID NO: 171574 - RNA, 19 nt, Homo sapiens
  misc_RNA (1)...(19): siRNA sense strand
gcauguaccaccuguccua

SEQ ID NO: 171575 - RNA, 19 nt, Homo sapiens
  misc_RNA (1)...(19): siRNA sense strand
gcaaguuccgucagaaaca

SEQ ID NO: 171576 - RNA, 19 nt, Homo sapiens
  misc_RNA (1)...(19): siRNA sense strand
ggaaacacaagaccaaucg

SEQ ID NO: 171577 - RNA, 19 nt, Homo sapiens
  misc_RNA (1)...(19): siRNA sense strand
gcacgcccuuuaccacauc

SEQ ID NO: 171578 - RNA, 19 nt, Homo sapiens
  misc_RNA (1)...(19): siRNA sense strand
ccaaaggcaaugacuuguu

SEQ ID NO: 171579 - RNA, 19 nt, Homo sapiens
  misc_RNA (1)...(19): siRNA sense strand
gcgcaaguuccgucagaaa

SEQ ID NO: 171580 - RNA, 19 nt, Homo sapiens
  misc_RNA (1)...(19): siRNA sense strand
guccaaaggcaaugacuug

SEQ ID NO: 171581 - RNA, 19 nt, Homo sapiens
  misc_RNA (1)...(19): siRNA sense strand
cagcuucagucucccuuuc

SEQ ID NO: 171582 - RNA, 19 nt, Homo sapiens
  misc_RNA (1)...(19): siRNA sense strand
cauccuacccguuccauag

SEQ ID NO: 171583 - RNA, 19 nt, Homo sapiens
  misc_RNA (1)...(19): siRNA sense strand
ugaggaaacacaagaccaa

SEQ ID NO: 171584 - RNA, 19 nt, Homo sapiens
  misc_RNA (1)...(19): siRNA sense strand
aacaguaccucuccauugc

SEQ ID NO: 171585 - RNA, 19 nt, Homo sapiens
  misc_RNA (1)...(19): siRNA sense strand
ccagugggauauggcaugu

SEQ ID NO: 171586 - RNA, 19 nt, Homo sapiens
  misc_RNA (1)...(19): siRNA sense strand
caaguuccgucagaaacag

SEQ ID NO: 171587 - RNA, 19 nt, Homo sapiens
  misc_RNA (1)...(19): siRNA sense strand
gaacuggaaaagcugaaaa

SEQ ID NO: 171588 - RNA, 19 nt, Homo sapiens
  misc_RNA (1)...(19): siRNA sense strand
caggcagcguccauauaug

SEQ ID NO: 171589 - RNA, 19 nt, Homo sapiens
  misc_RNA (1)...(19): siRNA sense strand
gaggaaacacaagaccaau

SEQ ID NO: 171590 - RNA, 19 nt, Homo sapiens
  misc_RNA (1)...(19): siRNA sense strand
gcauccuacccguuccaua

SEQ ID NO: 171591 - RNA, 19 nt, Homo sapiens
  misc_RNA (1)...(19): siRNA sense strand
ggaaaauucagaagaugga

SEQ ID NO: 171592 - RNA, 19 nt, Homo sapiens
  misc_RNA (1)...(19): siRNA sense strand
gaagagggcuguacacaug

SEQ ID NO: 171593 - RNA, 19 nt, Homo sapiens
  misc_RNA (1)...(19): siRNA sense strand
cgagagagguucuuauaga

SEQ ID NO: 171594 - RNA, 19 nt, Homo sapiens
  misc_RNA (1)...(19): siRNA sense strand
uaaggaggcuggaauuugu

SEQ ID NO: 171595 - RNA, 19 nt, Homo sapiens
  misc_RNA (1)...(19): siRNA sense strand
ggucagaaacccuccauaa

SEQ ID NO: 171596 - RNA, 19 nt, Homo sapiens
  misc_RNA (1)...(19): siRNA sense strand
uuaaagacccugaaagaaa

SEQ ID NO: 171597 - RNA, 19 nt, Homo sapiens
  misc_RNA (1)...(19): siRNA sense strand
ggacaauggucacaaucga

SEQ ID NO: 171598 - RNA, 19 nt, Homo sapiens
  misc_RNA (1)...(19): siRNA sense strand
gcgaacaucugggcuuuga

SEQ ID NO: 171599 - RNA, 19 nt, Homo sapiens
  misc_RNA (1)...(19): siRNA sense strand
ugaagaauauggcccaguu

SEQ ID NO: 171600 - RNA, 19 nt, Homo sapiens
  misc_RNA (1)...(19): siRNA sense strand
uccauaaccugaagaauau

SEQ ID NO: 171601 - RNA, 19 nt, Homo sapiens
  misc_RNA (1)...(19): siRNA sense strand
ggaauuuguuacgcaagua

SEQ ID NO: 171602 - RNA, 19 nt, Homo sapiens
  misc_RNA (1)...(19): siRNA sense strand
gcgauauugucauuauuga

SEQ ID NO: 171603 - RNA, 19 nt, Homo sapiens
  misc_RNA (1)...(19): siRNA sense strand
gagagagguucuuauagag

SEQ ID NO: 171604 - RNA, 19 nt, Homo sapiens
  misc_RNA (1)...(19): siRNA sense strand
uaaagacccugaaagaaaa

SEQ ID NO: 171605 - RNA, 19 nt, Homo sapiens
  misc_RNA (1)...(19): siRNA sense strand
caucugggcuuugaaggaa

SEQ ID NO: 171606 - RNA, 19 nt, Homo sapiens
  misc_RNA (1)...(19): siRNA sense strand
cagaggugguucuugcuaa

SEQ ID NO: 171607 - RNA, 19 nt, Homo sapiens
  misc_RNA (1)...(19): siRNA sense strand
cagauaggguccacagaau

SEQ ID NO: 171608 - RNA, 19 nt, Homo sapiens
  misc_RNA (1)...(19): siRNA sense strand
gaacaucugggcuuugaag

SEQ ID NO: 171609 - RNA, 19 nt, Homo sapiens
  misc_RNA (1)...(19): siRNA sense strand
cuccauaaccugaagaaua

SEQ ID NO: 171610 - RNA, 19 nt, Homo sapiens
  misc_RNA (1)...(19): siRNA sense strand
cgugaagauuggaauaauu

SEQ ID NO: 171611 - RNA, 19 nt, Homo sapiens
  misc_RNA (1)...(19): siRNA sense strand
ggacuccggugccacucaa

SEQ ID NO: 171612 - RNA, 19 nt, Homo sapiens
  misc_RNA (1)...(19): siRNA sense strand
gaagaauauggcccaguuu

SEQ ID NO: 171613 - RNA, 19 nt, Homo sapiens
  misc_RNA (1)...(19): siRNA sense strand
gaccucaguccuucuauga

SEQ ID NO: 171614 - RNA, 19 nt, Homo sapiens
  misc_RNA (1)...(19): siRNA sense strand
uauagagacugcuaagaag

SEQ ID NO: 171615 - RNA, 19 nt, Homo sapiens
  misc_RNA (1)...(19): siRNA sense strand
gugaagauuggaauaauug

SEQ ID NO: 171616 - RNA, 19 nt, Homo sapiens
  misc_RNA (1)...(19): siRNA sense strand
gaaggaagagggcuguaca

SEQ ID NO: 171617 - RNA, 19 nt, Homo sapiens
  misc_RNA (1)...(19): siRNA sense strand
ccucaguccuucuaugaug

SEQ ID NO: 171618 - RNA, 19 nt, Homo sapiens
  misc_RNA (1)...(19): siRNA sense strand
uuauagagacugcuaagaa

SEQ ID NO: 171619 - RNA, 19 nt, Homo sapiens
  misc_RNA (1)...(19): siRNA sense strand
gggcagaaagcuucauguu

SEQ ID NO: 171620 - RNA, 19 nt, Homo sapiens
  misc_RNA (1)...(19): siRNA sense strand
gaaggcagcacaccaucau

SEQ ID NO: 171621 - RNA, 19 nt, Homo sapiens
  misc_RNA (1)...(19): siRNA sense strand
ucagauaggguccacagaa

SEQ ID NO: 171622 - RNA, 19 nt, Homo sapiens
  misc_RNA (1)...(19): siRNA sense strand
ccagaggagugugccauau

SEQ ID NO: 171623 - RNA, 19 nt, Homo sapiens
  misc_RNA (1)...(19): siRNA sense strand
cuucaaaggucaacuacca

SEQ ID NO: 171624 - RNA, 19 nt, Homo sapiens
  misc_RNA (1)...(19): siRNA sense strand
ggaagagggcuguacacau

SEQ ID NO: 171625 - RNA, 19 nt, Homo sapiens
  misc_RNA (1)...(19): siRNA sense strand
agaggagugugccauauuc

SEQ ID NO: 171626 - RNA, 19 nt, Homo sapiens
  misc_RNA (1)...(19): siRNA sense strand
gggcuguacacaugucaua

SEQ ID NO: 171627 - RNA, 19 nt, Homo sapiens
  misc_RNA (1)...(19): siRNA sense strand
ugacaggaccacuaugaga

SEQ ID NO: 171628 - RNA, 19 nt, Homo sapiens
  misc_RNA (1)...(19): siRNA sense strand
gcuaaggaggcuggaauuu

SEQ ID NO: 171629 - RNA, 19 nt, Homo sapiens
  misc_RNA (1)...(19): siRNA sense strand
cagaaacccuccauaaccu

SEQ ID NO: 171630 - RNA, 19 nt, Homo sapiens
  misc_RNA (1)...(19): siRNA sense strand
uggaauaauugguggaaca

SEQ ID NO: 171631 - RNA, 19 nt, Homo sapiens
  misc_RNA (1)...(19): siRNA sense strand
ugauggaagucauucuugu

SEQ ID NO: 171632 - RNA, 19 nt, Homo sapiens
  misc_RNA (1)...(19): siRNA sense strand
gauaggguccacagaaugg

SEQ ID NO: 171633 - RNA, 19 nt, Homo sapiens
  misc_RNA (1)...(19): siRNA sense strand
cuaaggaggcuggaauuug

SEQ ID NO: 171634 - RNA, 19 nt, Homo sapiens
  misc_RNA (1)...(19): siRNA sense strand
aacgagagagguucuuaua

SEQ ID NO: 171635 - RNA, 19 nt, Homo sapiens
  misc_RNA (1)...(19): siRNA sense strand
ggcgauauugucauuauug

SEQ ID NO: 171636 - RNA, 19 nt, Homo sapiens
  misc_RNA (1)...(19): siRNA sense strand
gaauuuguuacgcaaguau

SEQ ID NO: 171637 - RNA, 19 nt, Homo sapiens
  misc_RNA (1)...(19): siRNA sense strand
ggagugugccauauuccaa

SEQ ID NO: 171638 - RNA, 19 nt, Homo sapiens
  misc_RNA (1)...(19): siRNA sense strand
ccggcgauauugucauuau

SEQ ID NO: 171639 - RNA, 19 nt, Homo sapiens
  misc_RNA (1)...(19): siRNA sense strand
ggaaggcagcacaccauca

SEQ ID NO: 171640 - RNA, 19 nt, Homo sapiens
  misc_RNA (1)...(19): siRNA sense strand
ggaacaggccuggaugauc

SEQ ID NO: 171641 - RNA, 19 nt, Homo sapiens
  misc_RNA (1)...(19): siRNA sense strand
uuagaaggaagaacugaaa

SEQ ID NO: 171642 - RNA, 19 nt, Homo sapiens
  misc_RNA (1)...(19): siRNA sense strand
cagaggagugugccauauu

SEQ ID NO: 171643 - RNA, 19 nt, Homo sapiens
  misc_RNA (1)...(19): siRNA sense strand
ggcagaaagcuucauguuc

SEQ ID NO: 171644 - RNA, 19 nt, Homo sapiens
  misc_RNA (1)...(19): siRNA sense strand
caacaugaccacaguucca

SEQ ID NO: 171645 - RNA, 19 nt, Homo sapiens
  misc_RNA (1)...(19): siRNA sense strand
ucacuaccauaccucagau

SEQ ID NO: 171646 - RNA, 19 nt, Homo sapiens
  misc_RNA (1)...(19): siRNA sense strand
ccauggcgacagauuauga

SEQ ID NO: 171647 - RNA, 19 nt, Homo sapiens
  misc_RNA (1)...(19): siRNA sense strand
acaccaucaugccuucaaa

SEQ ID NO: 171648 - RNA, 19 nt, Homo sapiens
  misc_RNA (1)...(19): siRNA sense strand
gauggaagucauucuugug

SEQ ID NO: 171649 - RNA, 19 nt, Homo sapiens
  misc_RNA (1)...(19): siRNA sense strand
gaagauuggaauaauuggu

SEQ ID NO: 171650 - RNA, 19 nt, Homo sapiens
  misc_RNA (1)...(19): siRNA sense strand
ccagaggugguucuugcua

SEQ ID NO: 171651 - RNA, 19 nt, Homo sapiens
  misc_RNA (1)...(19): siRNA sense strand
gccagaggagugugccaua

SEQ ID NO: 171652 - RNA, 19 nt, Homo sapiens
  misc_RNA (1)...(19): siRNA sense strand
ggagcacgaggaagcaguu

SEQ ID NO: 171653 - RNA, 19 nt, Homo sapiens
  misc_RNA (1)...(19): siRNA sense strand
aaacgcuaauaaagccaaa

SEQ ID NO: 171654 - RNA, 19 nt, Homo sapiens
  misc_RNA (1)...(19): siRNA sense strand
cggcgauauugucauuauu

SEQ ID NO: 171655 - RNA, 19 nt, Homo sapiens
  misc_RNA (1)...(19): siRNA sense strand
ugucauuauugaucaguuc

SEQ ID NO: 171656 - RNA, 19 nt, Homo sapiens
  misc_RNA (1)...(19): siRNA sense strand
ccaccgccgugaagauugg

SEQ ID NO: 171657 - RNA, 19 nt, Homo sapiens
  misc_RNA (1)...(19): siRNA sense strand
gcacgaggaagcaguuucg

SEQ ID NO: 171658 - RNA, 19 nt, Homo sapiens
  misc_RNA (1)...(19): siRNA sense strand
ccgugaagauuggaauaau

SEQ ID NO: 171659 - RNA, 19 nt, Homo sapiens
  misc_RNA (1)...(19): siRNA sense strand
cuuaaagacccugaaagaa

SEQ ID NO: 171660 - RNA, 19 nt, Homo sapiens
  misc_RNA (1)...(19): siRNA sense strand
gccgugaagauuggaauaa

SEQ ID NO: 171661 - RNA, 19 nt, Homo sapiens
  misc_RNA (1)...(19): siRNA sense strand
agaccucaguccuucuaug

SEQ ID NO: 171662 - RNA, 19 nt, Homo sapiens
  misc_RNA (1)...(19): siRNA sense strand
aggcgaacaucugggcuuu

SEQ ID NO: 171663 - RNA, 19 nt, Homo sapiens
  misc_RNA (1)...(19): siRNA sense strand
ucagaaacccuccauaacc

SEQ ID NO: 171664 - RNA, 19 nt, Homo sapiens
  misc_RNA (1)...(19): siRNA sense strand
aaagcuuacugcucacuac

SEQ ID NO: 171665 - RNA, 19 nt, Homo sapiens
  misc_RNA (1)...(19): siRNA sense strand
guucuuauagagacugcua

SEQ ID NO: 171666 - RNA, 19 nt, Homo sapiens
  misc_RNA (1)...(19): siRNA sense strand
aaacgagagagguucuuau

SEQ ID NO: 171667 - RNA, 19 nt, Homo sapiens
  misc_RNA (1)...(19): siRNA sense strand
agagacugcuaagaagcua

SEQ ID NO: 171668 - RNA, 19 nt, Homo sapiens
  misc_RNA (1)...(19): siRNA sense strand
gcuuacugcucacuaccau

SEQ ID NO: 171669 - RNA, 19 nt, Homo sapiens
  misc_RNA (1)...(19): siRNA sense strand
gaaggagcacgaggaagca

SEQ ID NO: 171670 - RNA, 19 nt, Homo sapiens
  misc_RNA (1)...(19): siRNA sense strand
ccagaaauuuuagaaggaa

SEQ ID NO: 171671 - RNA, 19 nt, Homo sapiens
  misc_RNA (1)...(19): siRNA sense strand
uggaauuuguuacgcaagu

SEQ ID NO: 171672 - RNA, 19 nt, Homo sapiens
  misc_RNA (1)...(19): siRNA sense strand
agagagguucuuauagaga

SEQ ID NO: 171673 - RNA, 19 nt, Homo sapiens
  misc_RNA (1)...(19): siRNA sense strand
ucaacuaccaggcgaacau

SEQ ID NO: 171674 - RNA, 19 nt, Homo sapiens
  misc_RNA (1)...(19): siRNA sense strand
ccacagaauggucagaaac

SEQ ID NO: 171675 - RNA, 19 nt, Homo sapiens
  misc_RNA (1)...(19): siRNA sense strand
uccacagaauggucagaaa

SEQ ID NO: 171676 - RNA, 19 nt, Homo sapiens
  misc_RNA (1)...(19): siRNA sense strand
caccaccgccgugaagauu

SEQ ID NO: 171677 - RNA, 19 nt, Homo sapiens
  misc_RNA (1)...(19): siRNA sense strand
ucauugacaggaccacuau

SEQ ID NO: 171678 - RNA, 19 nt, Homo sapiens
  misc_RNA (1)...(19): siRNA sense strand
ggcccaguuuucuguuuua

SEQ ID NO: 171679 - RNA, 19 nt, Homo sapiens
  misc_RNA (1)...(19): siRNA sense strand
gcuguacacaugucauagu

SEQ ID NO: 171680 - RNA, 19 nt, Homo sapiens
  misc_RNA (1)...(19): siRNA sense strand
cuguacacaugucauagug

SEQ ID NO: 171681 - RNA, 19 nt, Homo sapiens
  misc_RNA (1)...(19): siRNA sense strand
caacagccgucaucagcaa

SEQ ID NO: 171682 - RNA, 19 nt, Homo sapiens
  misc_RNA (1)...(19): siRNA sense strand
gcccaucucuuaccucaau

SEQ ID NO: 171683 - RNA, 19 nt, Homo sapiens
  misc_RNA (1)...(19): siRNA sense strand
caacaucgcggucaucaag

SEQ ID NO: 171684 - RNA, 19 nt, Homo sapiens
  misc_RNA (1)...(19): siRNA sense strand
cagcaucgcucggcaagug

SEQ ID NO: 171685 - RNA, 19 nt, Homo sapiens
  misc_RNA (1)...(19): siRNA sense strand
gaccggauuuggcugaaug

SEQ ID NO: 171686 - RNA, 19 nt, Homo sapiens
  misc_RNA (1)...(19): siRNA sense strand
uggcaucggugaacaacuu

SEQ ID NO: 171687 - RNA, 19 nt, Homo sapiens
  misc_RNA (1)...(19): siRNA sense strand
ggugagcgcugagaagaag

SEQ ID NO: 171688 - RNA, 19 nt, Homo sapiens
  misc_RNA (1)...(19): siRNA sense strand
acaucgcggucaucaagua

SEQ ID NO: 171689 - RNA, 19 nt, Homo sapiens
  misc_RNA (1)...(19): siRNA sense strand
ccaccugccucgacaccuu

SEQ ID NO: 171690 - RNA, 19 nt, Homo sapiens
  misc_RNA (1)...(19): siRNA sense strand
gaaggacagcaaccaguuc

SEQ ID NO: 171691 - RNA, 19 nt, Homo sapiens
  misc_RNA (1)...(19): siRNA sense strand
ucgcccagcugaccaugaa

SEQ ID NO: 171692 - RNA, 19 nt, Homo sapiens
  misc_RNA (1)...(19): siRNA sense strand
ggucaaauacaucauuguc

SEQ ID NO: 171693 - RNA, 19 nt, Homo sapiens
  misc_RNA (1)...(19): siRNA sense strand
ugaaggacagcaaccaguu

SEQ ID NO: 171694 - RNA, 19 nt, Homo sapiens
  misc_RNA (1)...(19): siRNA sense strand
ggaccggauuuggcugaau

SEQ ID NO: 171695 - RNA, 19 nt, Homo sapiens
  misc_RNA (1)...(19): siRNA sense strand
gagcugguucugcccauca

SEQ ID NO: 171696 - RNA, 19 nt, Homo sapiens
  misc_RNA (1)...(19): siRNA sense strand
cgacacuguggcugaguuu

SEQ ID NO: 171697 - RNA, 19 nt, Homo sapiens
  misc_RNA (1)...(19): siRNA sense strand
gggcaagcgcgaugaagag

SEQ ID NO: 171698 - RNA, 19 nt, Homo sapiens
  misc_RNA (1)...(19): siRNA sense strand
gaauggagacacguuucug

SEQ ID NO: 171699 - RNA, 19 nt, Homo sapiens
  misc_RNA (1)...(19): siRNA sense strand
gcucgaauggagacacguu

SEQ ID NO: 171700 - RNA, 19 nt, Homo sapiens
  misc_RNA (1)...(19): siRNA sense strand
ucuacggcguggagaguga

SEQ ID NO: 171701 - RNA, 19 nt, Homo sapiens
  misc_RNA (1)...(19): siRNA sense strand
gcacguggcaucggugaac

SEQ ID NO: 171702 - RNA, 19 nt, Homo sapiens
  misc_RNA (1)...(19): siRNA sense strand
gagucacacuggccugaac

SEQ ID NO: 171703 - RNA, 19 nt, Homo sapiens
  misc_RNA (1)...(19): siRNA sense strand
gcaccaggaccaguuaaaa

SEQ ID NO: 171704 - RNA, 19 nt, Homo sapiens
  misc_RNA (1)...(19): siRNA sense strand
gaagaaggguuacaugauu

SEQ ID NO: 171705 - RNA, 19 nt, Homo sapiens
  misc_RNA (1)...(19): siRNA sense strand
ggacaucacugcucucaug

SEQ ID NO: 171706 - RNA, 19 nt, Homo sapiens
  misc_RNA (1)...(19): siRNA sense strand
ucacagauguuucgauaaa

SEQ ID NO: 171707 - RNA, 19 nt, Homo sapiens
  misc_RNA (1)...(19): siRNA sense strand
caaaggaacugaagacaag

SEQ ID NO: 171708 - RNA, 19 nt, Homo sapiens
  misc_RNA (1)...(19): siRNA sense strand
gagaucagcucccgagaug

SEQ ID NO: 171709 - RNA, 19 nt, Homo sapiens
  misc_RNA (1)...(19): siRNA sense strand
agaaggagcuggaagaaga

SEQ ID NO: 171710 - RNA, 19 nt, Homo sapiens
  misc_RNA (1)...(19): siRNA sense strand
gaagaaacuugugaacgaa

SEQ ID NO: 171711 - RNA, 19 nt, Homo sapiens
  misc_RNA (1)...(19): siRNA sense strand
ucaagacacucaucaagaa

SEQ ID NO: 171712 - RNA, 19 nt, Homo sapiens
  misc_RNA (1)...(19): siRNA sense strand
gaagacauucggcuguuua

SEQ ID NO: 171713 - RNA, 19 nt, Homo sapiens
  misc_RNA (1)...(19): siRNA sense strand
ugaagaaacuugugaacga

SEQ ID NO: 171714 - RNA, 19 nt, Homo sapiens
  misc_RNA (1)...(19): siRNA sense strand
gaccagagcucgggcaaga

SEQ ID NO: 171715 - RNA, 19 nt, Homo sapiens
  misc_RNA (1)...(19): siRNA sense strand
gcaaggagaggaaacugua

SEQ ID NO: 171716 - RNA, 19 nt, Homo sapiens
  misc_RNA (1)...(19): siRNA sense strand
gggaaucagucaugagcua

SEQ ID NO: 171717 - RNA, 19 nt, Homo sapiens
  misc_RNA (1)...(19): siRNA sense strand
caaggagacucaccagaga

SEQ ID NO: 171718 - RNA, 19 nt, Homo sapiens
  misc_RNA (1)...(19): siRNA sense strand
ggagaggcaaggucaguua

SEQ ID NO: 171719 - RNA, 19 nt, Homo sapiens
  misc_RNA (1)...(19): siRNA sense strand
gaaaaucaguaucguggua

SEQ ID NO: 171720 - RNA, 19 nt, Homo sapiens
  misc_RNA (1)...(19): siRNA sense strand
ggaagacauucggcuguuu

SEQ ID NO: 171721 - RNA, 19 nt, Homo sapiens
  misc_RNA (1)...(19): siRNA sense strand
acacauaucuguaaaucuc

SEQ ID NO: 171722 - RNA, 19 nt, Homo sapiens
  misc_RNA (1)...(19): siRNA sense strand
ccacaaauggaguacaaua

SEQ ID NO: 171723 - RNA, 19 nt, Homo sapiens
  misc_RNA (1)...(19): siRNA sense strand
gguauaagaucaagacacu

SEQ ID NO: 171724 - RNA, 19 nt, Homo sapiens
  misc_RNA (1)...(19): siRNA sense strand
gaaugggaaucagucauga

SEQ ID NO: 171725 - RNA, 19 nt, Homo sapiens
  misc_RNA (1)...(19): siRNA sense strand
gacacgaguuccacaaaug

SEQ ID NO: 171726 - RNA, 19 nt, Homo sapiens
  misc_RNA (1)...(19): siRNA sense strand
uuucacagauguuucgaua

SEQ ID NO: 171727 - RNA, 19 nt, Homo sapiens
  misc_RNA (1)...(19): siRNA sense strand
gagacucaccagagaauaa

SEQ ID NO: 171728 - RNA, 19 nt, Homo sapiens
  misc_RNA (1)...(19): siRNA sense strand
cgacauaccggaagacgaa

SEQ ID NO: 171729 - RNA, 19 nt, Homo sapiens
  misc_RNA (1)...(19): siRNA sense strand
cagaggagcuacaaaagua

SEQ ID NO: 171730 - RNA, 19 nt, Homo sapiens
  misc_RNA (1)...(19): siRNA sense strand
gacauuggguauaagauca

SEQ ID NO: 171731 - RNA, 19 nt, Homo sapiens
  misc_RNA (1)...(19): siRNA sense strand
gagaauaacagaggagcua

SEQ ID NO: 171732 - RNA, 19 nt, Homo sapiens
  misc_RNA (1)...(19): siRNA sense strand
ccagcgagcucaucacaca

SEQ ID NO: 171733 - RNA, 19 nt, Homo sapiens
  misc_RNA (1)...(19): siRNA sense strand
caucacacauaucuguaaa

SEQ ID NO: 171734 - RNA, 19 nt, Homo sapiens
  misc_RNA (1)...(19): siRNA sense strand
gagcagaacaagagagaga

SEQ ID NO: 171735 - RNA, 19 nt, Homo sapiens
  misc_RNA (1)...(19): siRNA sense strand
gcaaaucaaggcacuggaa

SEQ ID NO: 171736 - RNA, 19 nt, Homo sapiens
  misc_RNA (1)...(19): siRNA sense strand
ugccaggcuuugugaauua

SEQ ID NO: 171737 - RNA, 19 nt, Homo sapiens
  misc_RNA (1)...(19): siRNA sense strand
caagaaggccauaaaauuu

SEQ ID NO: 171738 - RNA, 19 nt, Homo sapiens
  misc_RNA (1)...(19): siRNA sense strand
ggacuacgagauugagauu

SEQ ID NO: 171739 - RNA, 19 nt, Homo sapiens
  misc_RNA (1)...(19): siRNA sense strand
gagaaccacccauauuuca

SEQ ID NO: 171740 - RNA, 19 nt, Homo sapiens
  misc_RNA (1)...(19): siRNA sense strand
agacacucaucaagaagua

SEQ ID NO: 171741 - RNA, 19 nt, Homo sapiens
  misc_RNA (1)...(19): siRNA sense strand
ggaaugggaaucagucaug

SEQ ID NO: 171742 - RNA, 19 nt, Homo sapiens
  misc_RNA (1)...(19): siRNA sense strand
ucacacauaucuguaaauc

SEQ ID NO: 171743 - RNA, 19 nt, Homo sapiens
  misc_RNA (1)...(19): siRNA sense strand
cgacacgaguuccacaaau

SEQ ID NO: 171744 - RNA, 19 nt, Homo sapiens
  misc_RNA (1)...(19): siRNA sense strand
gagagaaggagcuggaaga

SEQ ID NO: 171745 - RNA, 19 nt, Homo sapiens
  misc_RNA (1)...(19): siRNA sense strand
ccgaagcccugcagagaga

SEQ ID NO: 171746 - RNA, 19 nt, Homo sapiens
  misc_RNA (1)...(19): siRNA sense strand
ugaauuacaggacauuuga

SEQ ID NO: 171747 - RNA, 19 nt, Homo sapiens
  misc_RNA (1)...(19): siRNA sense strand
caacagacucuuccaugga

SEQ ID NO: 171748 - RNA, 19 nt, Homo sapiens
  misc_RNA (1)...(19): siRNA sense strand
cugcugacauuggguauaa

SEQ ID NO: 171749 - RNA, 19 nt, Homo sapiens
  misc_RNA (1)...(19): siRNA sense strand
caucacugcucucaugcaa

SEQ ID NO: 171750 - RNA, 19 nt, Homo sapiens
  misc_RNA (1)...(19): siRNA sense strand
gaucaagacacucaucaag

SEQ ID NO: 171751 - RNA, 19 nt, Homo sapiens
  misc_RNA (1)...(19): siRNA sense strand
gaucauccaguucuucaug

SEQ ID NO: 171752 - RNA, 19 nt, Homo sapiens
  misc_RNA (1)...(19): siRNA sense strand
aagaaggguuacaugauug

SEQ ID NO: 171753 - RNA, 19 nt, Homo sapiens
  misc_RNA (1)...(19): siRNA sense strand
gcucaucacacauaucugu

SEQ ID NO: 171754 - RNA, 19 nt, Homo sapiens
  misc_RNA (1)...(19): siRNA sense strand
ggacaaaggaacugaagac

SEQ ID NO: 171755 - RNA, 19 nt, Homo sapiens
  misc_RNA (1)...(19): siRNA sense strand
gauaugguccggcuugcuu

SEQ ID NO: 171756 - RNA, 19 nt, Homo sapiens
  misc_RNA (1)...(19): siRNA sense strand
gaagagccggcuguggaua

SEQ ID NO: 171757 - RNA, 19 nt, Homo sapiens
  misc_RNA (1)...(19): siRNA sense strand
guaaaucucugccccuguu

SEQ ID NO: 171758 - RNA, 19 nt, Homo sapiens
  misc_RNA (1)...(19): siRNA sense strand
gaaggagcuggaagaagaa

SEQ ID NO: 171759 - RNA, 19 nt, Homo sapiens
  misc_RNA (1)...(19): siRNA sense strand
cacaaauggaguacaauaa

SEQ ID NO: 171760 - RNA, 19 nt, Homo sapiens
  misc_RNA (1)...(19): siRNA sense strand
gaucagcucccgagauguc

SEQ ID NO: 171761 - RNA, 19 nt, Homo sapiens
  misc_RNA (1)...(19): siRNA sense strand
gagcucaucacacauaucu

SEQ ID NO: 171762 - RNA, 19 nt, Homo sapiens
  misc_RNA (1)...(19): siRNA sense strand
aaacugaagaaacuuguga

SEQ ID NO: 171763 - RNA, 19 nt, Homo sapiens
  misc_RNA (1)...(19): siRNA sense strand
ucaagaaggccauaaaauu

SEQ ID NO: 171764 - RNA, 19 nt, Homo sapiens
  misc_RNA (1)...(19): siRNA sense strand
gggcaagagcuccguguug

SEQ ID NO: 171765 - RNA, 19 nt, Homo sapiens
  misc_RNA (1)...(19): siRNA sense strand
acuacgagauugagauuuc

SEQ ID NO: 171766 - RNA, 19 nt, Homo sapiens
  misc_RNA (1)...(19): siRNA sense strand
uaacagaggagcuacaaaa

SEQ ID NO: 171767 - RNA, 19 nt, Homo sapiens
  misc_RNA (1)...(19): siRNA sense strand
ggaaucagucaugagcuaa

SEQ ID NO: 171768 - RNA, 19 nt, Homo sapiens
  misc_RNA (1)...(19): siRNA sense strand
gaugcccgcuggugcugaa

SEQ ID NO: 171769 - RNA, 19 nt, Homo sapiens
  misc_RNA (1)...(19): siRNA sense strand
uugagaaccacccauauuu

SEQ ID NO: 171770 - RNA, 19 nt, Homo sapiens
  misc_RNA (1)...(19): siRNA sense strand
uauaagaucaagacacuca

SEQ ID NO: 171771 - RNA, 19 nt, Homo sapiens
  misc_RNA (1)...(19): siRNA sense strand
aauagaccuuccuggcaua

SEQ ID NO: 171772 - RNA, 19 nt, Homo sapiens
  misc_RNA (1)...(19): siRNA sense strand
ugaagacauuagagcagaa

SEQ ID NO: 171773 - RNA, 19 nt, Homo sapiens
  misc_RNA (1)...(19): siRNA sense strand
agaaacuugugaacgaaga

SEQ ID NO: 171774 - RNA, 19 nt, Homo sapiens
  misc_RNA (1)...(19): siRNA sense strand
ggaagagccggcuguggau

SEQ ID NO: 171775 - RNA, 19 nt, Homo sapiens
  misc_RNA (1)...(19): siRNA sense strand
gagcugccaggcuuuguga

SEQ ID NO: 171776 - RNA, 19 nt, Homo sapiens
  misc_RNA (1)...(19): siRNA sense strand
ugaagaaggguuacaugau

SEQ ID NO: 171777 - RNA, 19 nt, Homo sapiens
  misc_RNA (1)...(19): siRNA sense strand
cagaguggcugugggcaau

SEQ ID NO: 171778 - RNA, 19 nt, Homo sapiens
  misc_RNA (1)...(19): siRNA sense strand
ggaaggaaugggaaucagu

SEQ ID NO: 171779 - RNA, 19 nt, Homo sapiens
  misc_RNA (1)...(19): siRNA sense strand
guuacaugauugucaagug

SEQ ID NO: 171780 - RNA, 19 nt, Homo sapiens
  misc_RNA (1)...(19): siRNA sense strand
gcgagcucaucacacauau

SEQ ID NO: 171781 - RNA, 19 nt, Homo sapiens
  misc_RNA (1)...(19): siRNA sense strand
ggagacucaccagagaaua

SEQ ID NO: 171782 - RNA, 19 nt, Homo sapiens
  misc_RNA (1)...(19): siRNA sense strand
caagagagagaaggugaga

SEQ ID NO: 171783 - RNA, 19 nt, Homo sapiens
  misc_RNA (1)...(19): siRNA sense strand
gugaauuacaggacauuug

SEQ ID NO: 171784 - RNA, 19 nt, Homo sapiens
  misc_RNA (1)...(19): siRNA sense strand
acaaaggaacugaagacaa

SEQ ID NO: 171785 - RNA, 19 nt, Homo sapiens
  misc_RNA (1)...(19): siRNA sense strand
ugagaaccacccauauuuc

SEQ ID NO: 171786 - RNA, 19 nt, Homo sapiens
  misc_RNA (1)...(19): siRNA sense strand
uaccaggacuacgagauug

SEQ ID NO: 171787 - RNA, 19 nt, Homo sapiens
  misc_RNA (1)...(19): siRNA sense strand
cauuagagcagaacaagag

SEQ ID NO: 171788 - RNA, 19 nt, Homo sapiens
  misc_RNA (1)...(19): siRNA sense strand
gaaacugaagaaacuugug

SEQ ID NO: 171789 - RNA, 19 nt, Homo sapiens
  misc_RNA (1)...(19): siRNA sense strand
gcaagagcuccguguugga

SEQ ID NO: 171790 - RNA, 19 nt, Homo sapiens
  misc_RNA (1)...(19): siRNA sense strand
ucccggaucugacucuaau

SEQ ID NO: 171791 - RNA, 19 nt, Homo sapiens
  misc_RNA (1)...(19): siRNA sense strand
gaggcaaggucaguuacca

SEQ ID NO: 171792 - RNA, 19 nt, Homo sapiens
  misc_RNA (1)...(19): siRNA sense strand
gaggcacugucaggaguug

SEQ ID NO: 171793 - RNA, 19 nt, Homo sapiens
  misc_RNA (1)...(19): siRNA sense strand
cacccucuauuacugaaug

SEQ ID NO: 171794 - RNA, 19 nt, Homo sapiens
  misc_RNA (1)...(19): siRNA sense strand
gcagaaggucagagagaag

SEQ ID NO: 171795 - RNA, 19 nt, Homo sapiens
  misc_RNA (1)...(19): siRNA sense strand
cugccaggcuuugugaauu

SEQ ID NO: 171796 - RNA, 19 nt, Homo sapiens
  misc_RNA (1)...(19): siRNA sense strand
gccauaaaauuuugaguag

SEQ ID NO: 171797 - RNA, 19 nt, Homo sapiens
  misc_RNA (1)...(19): siRNA sense strand
gaauaacagaggagcuaca

SEQ ID NO: 171798 - RNA, 19 nt, Homo sapiens
  misc_RNA (1)...(19): siRNA sense strand
caggcucgguggcugagaa

SEQ ID NO: 171799 - RNA, 19 nt, Homo sapiens
  misc_RNA (1)...(19): siRNA sense strand
cugaagaaggguuacauga

SEQ ID NO: 171800 - RNA, 19 nt, Homo sapiens
  misc_RNA (1)...(19): siRNA sense strand
ccaucggaaucuugacgaa

SEQ ID NO: 171801 - RNA, 19 nt, Homo sapiens
  misc_RNA (1)...(19): siRNA sense strand
gcuaaucacccuggagauc

SEQ ID NO: 171802 - RNA, 19 nt, Homo sapiens
  misc_RNA (1)...(19): siRNA sense strand
gaaucagucaugagcuaau

SEQ ID NO: 171803 - RNA, 19 nt, Homo sapiens
  misc_RNA (1)...(19): siRNA sense strand
acaggacauuugagacaau

SEQ ID NO: 171804 - RNA, 19 nt, Homo sapiens
  misc_RNA (1)...(19): siRNA sense strand
gcaaggagcuucugggauu

SEQ ID NO: 171805 - RNA, 19 nt, Homo sapiens
  misc_RNA (1)...(19): siRNA sense strand
gaucaaggcucucaucaag

SEQ ID NO: 171806 - RNA, 19 nt, Homo sapiens
  misc_RNA (1)...(19): siRNA sense strand
cagaaagacuuaccacuga

SEQ ID NO: 171807 - RNA, 19 nt, Homo sapiens
  misc_RNA (1)...(19): siRNA sense strand
caaaugauguuuccuccaa

SEQ ID NO: 171808 - RNA, 19 nt, Homo sapiens
  misc_RNA (1)...(19): siRNA sense strand
gaucagauuuacaguguug

SEQ ID NO: 171809 - RNA, 19 nt, Homo sapiens
  misc_RNA (1)...(19): siRNA sense strand
ucaaggcucucaucaagaa

SEQ ID NO: 171810 - RNA, 19 nt, Homo sapiens
  misc_RNA (1)...(19): siRNA sense strand
gagcacgauugaagacaua

SEQ ID NO: 171811 - RNA, 19 nt, Homo sapiens
  misc_RNA (1)...(19): siRNA sense strand
gaaauuauccagcaagcuu

SEQ ID NO: 171812 - RNA, 19 nt, Homo sapiens
  misc_RNA (1)...(19): siRNA sense strand
gaccagagcucgggcaaga

SEQ ID NO: 171813 - RNA, 19 nt, Homo sapiens
  misc_RNA (1)...(19): siRNA sense strand
ggagaaagagauacacaaa

SEQ ID NO: 171814 - RNA, 19 nt, Homo sapiens
  misc_RNA (1)...(19): siRNA sense strand
ucaaacacauccauauuuc

SEQ ID NO: 171815 - RNA, 19 nt, Homo sapiens
  misc_RNA (1)...(19): siRNA sense strand
caagaagggcuacaugauu

SEQ ID NO: 171816 - RNA, 19 nt, Homo sapiens
  misc_RNA (1)...(19): siRNA sense strand
ccacugaacucaucaugca

SEQ ID NO: 171817 - RNA, 19 nt, Homo sapiens
  misc_RNA (1)...(19): siRNA sense strand
aaccagaucccauuuauaa

SEQ ID NO: 171818 - RNA, 19 nt, Homo sapiens
  misc_RNA (1)...(19): siRNA sense strand
agaaagccauggaaauuau

SEQ ID NO: 171819 - RNA, 19 nt, Homo sapiens
  misc_RNA (1)...(19): siRNA sense strand
gaccaaaccagaucuaaug

SEQ ID NO: 171820 - RNA, 19 nt, Homo sapiens
  misc_RNA (1)...(19): siRNA sense strand
aagaagggcuacaugauug

SEQ ID NO: 171821 - RNA, 19 nt, Homo sapiens
  misc_RNA (1)...(19): siRNA sense strand
gaagaaaguccgagaagag

SEQ ID NO: 171822 - RNA, 19 nt, Homo sapiens
  misc_RNA (1)...(19): siRNA sense strand
ccagaucccauuuauaauu

SEQ ID NO: 171823 - RNA, 19 nt, Homo sapiens
  misc_RNA (1)...(19): siRNA sense strand
ccaaccagaucccauuuau

SEQ ID NO: 171824 - RNA, 19 nt, Homo sapiens
  misc_RNA (1)...(19): siRNA sense strand
gaaaguccgagaagagauu

SEQ ID NO: 171825 - RNA, 19 nt, Homo sapiens
  misc_RNA (1)...(19): siRNA sense strand
cagaaagccauggaaauua

SEQ ID NO: 171826 - RNA, 19 nt, Homo sapiens
  misc_RNA (1)...(19): siRNA sense strand
gcaaacgucucgccaacca

SEQ ID NO: 171827 - RNA, 19 nt, Homo sapiens
  misc_RNA (1)...(19): siRNA sense strand
ccagaaagccauggaaauu

SEQ ID NO: 171828 - RNA, 19 nt, Homo sapiens
  misc_RNA (1)...(19): siRNA sense strand
gccaaggacuucaacuuuc

SEQ ID NO: 171829 - RNA, 19 nt, Homo sapiens
  misc_RNA (1)...(19): siRNA sense strand
cacagaauaugaaguugaa

SEQ ID NO: 171830 - RNA, 19 nt, Homo sapiens
  misc_RNA (1)...(19): siRNA sense strand
gaauuuaccggcucacuca

SEQ ID NO: 171831 - RNA, 19 nt, Homo sapiens
  misc_RNA (1)...(19): siRNA sense strand
ccagcaagcuuucauuaac

SEQ ID NO: 171832 - RNA, 19 nt, Homo sapiens
  misc_RNA (1)...(19): siRNA sense strand
gaaugagacccguuuauac

SEQ ID NO: 171833 - RNA, 19 nt, Homo sapiens
  misc_RNA (1)...(19): siRNA sense strand
ggaaacaggagccaaccaa

SEQ ID NO: 171834 - RNA, 19 nt, Homo sapiens
  misc_RNA (1)...(19): siRNA sense strand
cagaucccauuuauaauuc

SEQ ID NO: 171835 - RNA, 19 nt, Homo sapiens
  misc_RNA (1)...(19): siRNA sense strand
agaaugagacccguuuaua

SEQ ID NO: 171836 - RNA, 19 nt, Homo sapiens
  misc_RNA (1)...(19): siRNA sense strand
agaaggagaagaaguugua

SEQ ID NO: 171837 - RNA, 19 nt, Homo sapiens
  misc_RNA (1)...(19): siRNA sense strand
agaaagagauacacaaagc

SEQ ID NO: 171838 - RNA, 19 nt, Homo sapiens
  misc_RNA (1)...(19): siRNA sense strand
ugaagaaaguccgagaaga

SEQ ID NO: 171839 - RNA, 19 nt, Homo sapiens
  misc_RNA (1)...(19): siRNA sense strand
gcaaccaagaaagaaauua

SEQ ID NO: 171840 - RNA, 19 nt, Homo sapiens
  misc_RNA (1)...(19): siRNA sense strand
caaccagaucccauuuaua

SEQ ID NO: 171841 - RNA, 19 nt, Homo sapiens
  misc_RNA (1)...(19): siRNA sense strand
gggacgccuucacagaaua

SEQ ID NO: 171842 - RNA, 19 nt, Homo sapiens
  misc_RNA (1)...(19): siRNA sense strand
aagaucagauuuacagugu

SEQ ID NO: 171843 - RNA, 19 nt, Homo sapiens
  misc_RNA (1)...(19): siRNA sense strand
ggagaaugagacccguuua

SEQ ID NO: 171844 - RNA, 19 nt, Homo sapiens
  misc_RNA (1)...(19): siRNA sense strand
ccaaggacuucaacuuucu

SEQ ID NO: 171845 - RNA, 19 nt, Homo sapiens
  misc_RNA (1)...(19): siRNA sense strand
ugagaccgcuaccaagaga

SEQ ID NO: 171846 - RNA, 19 nt, Homo sapiens
  misc_RNA (1)...(19): siRNA sense strand
guaaugagucuucgguuuc

SEQ ID NO: 171847 - RNA, 19 nt, Homo sapiens
  misc_RNA (1)...(19): siRNA sense strand
gaacucaucaugcauaucc

SEQ ID NO: 171848 - RNA, 19 nt, Homo sapiens
  misc_RNA (1)...(19): siRNA sense strand
aguaaugagucuucgguuu

SEQ ID NO: 171849 - RNA, 19 nt, Homo sapiens
  misc_RNA (1)...(19): siRNA sense strand
caaggagcuucugggauuu

SEQ ID NO: 171850 - RNA, 19 nt, Homo sapiens
  misc_RNA (1)...(19): siRNA sense strand
gagaaugagacccguuuau

SEQ ID NO: 171851 - RNA, 19 nt, Homo sapiens
  misc_RNA (1)...(19): siRNA sense strand
guuaguagaaggagaagaa

SEQ ID NO: 171852 - RNA, 19 nt, Homo sapiens
  misc_RNA (1)...(19): siRNA sense strand
gagaaaagcgucaugaaug

SEQ ID NO: 171853 - RNA, 19 nt, Homo sapiens
  misc_RNA (1)...(19): siRNA sense strand
agaaagccaugaugcagau

SEQ ID NO: 171854 - RNA, 19 nt, Homo sapiens
  misc_RNA (1)...(19): siRNA sense strand
cagcaaagagauccacuga

SEQ ID NO: 171855 - RNA, 19 nt, Homo sapiens
  misc_RNA (1)...(19): siRNA sense strand
gcuacaugauugugaagug

SEQ ID NO: 171856 - RNA, 19 nt, Homo sapiens
  misc_RNA (1)...(19): siRNA sense strand
ccaccugaaugccuacuuc

SEQ ID NO: 171857 - RNA, 19 nt, Homo sapiens
  misc_RNA (1)...(19): siRNA sense strand
gacuucaacuuucucacuu

SEQ ID NO: 171858 - RNA, 19 nt, Homo sapiens
  misc_RNA (1)...(19): siRNA sense strand
cgacuggcagaaagacuua

SEQ ID NO: 171859 - RNA, 19 nt, Homo sapiens
  misc_RNA (1)...(19): siRNA sense strand
agaaagacuuaccacugaa

SEQ ID NO: 171860 - RNA, 19 nt, Homo sapiens
  misc_RNA (1)...(19): siRNA sense strand
gaauggagcagaugguuuu

SEQ ID NO: 171861 - RNA, 19 nt, Homo sapiens
  misc_RNA (1)...(19): siRNA sense strand
cagagaaggacgcugcuuu

SEQ ID NO: 171862 - RNA, 19 nt, Homo sapiens
  misc_RNA (1)...(19): siRNA sense strand
uacaagacauuugagauca

SEQ ID NO: 171863 - RNA, 19 nt, Homo sapiens
  misc_RNA (1)...(19): siRNA sense strand
ggacaggaccaucgguauc

SEQ ID NO: 171864 - RNA, 19 nt, Homo sapiens
  misc_RNA (1)...(19): siRNA sense strand
gguguccgcuggugcugaa

SEQ ID NO: 171865 - RNA, 19 nt, Homo sapiens
  misc_RNA (1)...(19): siRNA sense strand
ucacagaauaugaaguuga

SEQ ID NO: 171866 - RNA, 19 nt, Homo sapiens
  misc_RNA (1)...(19): siRNA sense strand
caagacauuugagaucauc

SEQ ID NO: 171867 - RNA, 19 nt, Homo sapiens
  misc_RNA (1)...(19): siRNA sense strand
uaggcauacuugcaacuaa

SEQ ID NO: 171868 - RNA, 19 nt, Homo sapiens
  misc_RNA (1)...(19): siRNA sense strand
gaaggagaagaaguuguaa

SEQ ID NO: 171869 - RNA, 19 nt, Homo sapiens
  misc_RNA (1)...(19): siRNA sense strand
ccaggaggccgacaagaug

SEQ ID NO: 171870 - RNA, 19 nt, Homo sapiens
  misc_RNA (1)...(19): siRNA sense strand
uaagggagagccaccagaa

SEQ ID NO: 171871 - RNA, 19 nt, Homo sapiens
  misc_RNA (1)...(19): siRNA sense strand
cgccaaggacuucaacuuu

SEQ ID NO: 171872 - RNA, 19 nt, Homo sapiens
  misc_RNA (1)...(19): siRNA sense strand
gggagaaugagacccguuu

SEQ ID NO: 171873 - RNA, 19 nt, Homo sapiens
  misc_RNA (1)...(19): siRNA sense strand
aaauaggcauccaccugaa

SEQ ID NO: 171874 - RNA, 19 nt, Homo sapiens
  misc_RNA (1)...(19): siRNA sense strand
accaagagaagaauccuua

SEQ ID NO: 171875 - RNA, 19 nt, Homo sapiens
  misc_RNA (1)...(19): siRNA sense strand
ccagguggagaaagagaua

SEQ ID NO: 171876 - RNA, 19 nt, Homo sapiens
  misc_RNA (1)...(19): siRNA sense strand
gagagaauggugacuccuu

SEQ ID NO: 171877 - RNA, 19 nt, Homo sapiens
  misc_RNA (1)...(19): siRNA sense strand
gagaaagagauacacaaag

SEQ ID NO: 171878 - RNA, 19 nt, Homo sapiens
  misc_RNA (1)...(19): siRNA sense strand
gaggcaaccaagaaagaaa

SEQ ID NO: 171879 - RNA, 19 nt, Homo sapiens
  misc_RNA (1)...(19): siRNA sense strand
gccaaccagaucccauuua

SEQ ID NO: 171880 - RNA, 19 nt, Homo sapiens
  misc_RNA (1)...(19): siRNA sense strand
gaaugccuacuucuuggaa

SEQ ID NO: 171881 - RNA, 19 nt, Homo sapiens
  misc_RNA (1)...(19): siRNA sense strand
ggcauacuugcaacuaaua

SEQ ID NO: 171882 - RNA, 19 nt, Homo sapiens
  misc_RNA (1)...(19): siRNA sense strand
gagacccguuuauacaaca

SEQ ID NO: 171883 - RNA, 19 nt, Homo sapiens
  misc_RNA (1)...(19): siRNA sense strand
ggacuucaacuuucucacu

SEQ ID NO: 171884 - RNA, 19 nt, Homo sapiens
  misc_RNA (1)...(19): siRNA sense strand
gauguucuuucuaauugag

SEQ ID NO: 171885 - RNA, 19 nt, Homo sapiens
  misc_RNA (1)...(19): siRNA sense strand
ugaauuccuuccagcaaca

SEQ ID NO: 171886 - RNA, 19 nt, Homo sapiens
  misc_RNA (1)...(19): siRNA sense strand
gauuuacaguguuguucug

SEQ ID NO: 171887 - RNA, 19 nt, Homo sapiens
  misc_RNA (1)...(19): siRNA sense strand
gaaaacaugauccaacuuc

SEQ ID NO: 171888 - RNA, 19 nt, Homo sapiens
  misc_RNA (1)...(19): siRNA sense strand
gagaucaucgugcaucagu

SEQ ID NO: 171889 - RNA, 19 nt, Homo sapiens
  misc_RNA (1)...(19): siRNA sense strand
cuacaagacauuugagauc

SEQ ID NO: 171890 - RNA, 19 nt, Homo sapiens
  misc_RNA (1)...(19): siRNA sense strand
aaaguuaguagaaggagaa

SEQ ID NO: 171891 - RNA, 19 nt, Homo sapiens
  misc_RNA (1)...(19): siRNA sense strand
gcagaucaaggcucucauc

SEQ ID NO: 171892 - RNA, 19 nt, Homo sapiens
  misc_RNA (1)...(19): siRNA sense strand
ccugaaugccuacuucuug

SEQ ID NO: 171893 - RNA, 19 nt, Homo sapiens
  misc_RNA (1)...(19): siRNA sense strand
cagaggcaaccaagaaaga

SEQ ID NO: 171894 - RNA, 19 nt, Homo sapiens
  misc_RNA (1)...(19): siRNA sense strand
ucaagaagggcuacaugau

SEQ ID NO: 171895 - RNA, 19 nt, Homo sapiens
  misc_RNA (1)...(19): siRNA sense strand
gcacgauugaagacauaaa

SEQ ID NO: 171896 - RNA, 19 nt, Homo sapiens
  misc_RNA (1)...(19): siRNA sense strand
agaggcagcggaaucguaa

SEQ ID NO: 171897 - RNA, 19 nt, Homo sapiens
  misc_RNA (1)...(19): siRNA sense strand
gagcuucugggauuuguca

SEQ ID NO: 171898 - RNA, 19 nt, Homo sapiens
  misc_RNA (1)...(19): siRNA sense strand
caaacacauccauauuuca

SEQ ID NO: 171899 - RNA, 19 nt, Homo sapiens
  misc_RNA (1)...(19): siRNA sense strand
caaccaagaaagaaauuac

SEQ ID NO: 171900 - RNA, 19 nt, Homo sapiens
  misc_RNA (1)...(19): siRNA sense strand
uggcagaggcaaccaagaa

SEQ ID NO: 171901 - RNA, 19 nt, Homo sapiens
  misc_RNA (1)...(19): siRNA sense strand
ucacaaacaggcugagcuu

SEQ ID NO: 171902 - RNA, 19 nt, Homo sapiens
  misc_RNA (1)...(19): siRNA sense strand
ggacgccuucacagaauau

SEQ ID NO: 171903 - RNA, 19 nt, Homo sapiens
  misc_RNA (1)...(19): siRNA sense strand
ccaagagaagaauccuuaa

SEQ ID NO: 171904 - RNA, 19 nt, Homo sapiens
  misc_RNA (1)...(19): siRNA sense strand
uaacacagcugcucagaaa

SEQ ID NO: 171905 - RNA, 19 nt, Homo sapiens
  misc_RNA (1)...(19): siRNA sense strand
ggacagagcugaggcagaa

SEQ ID NO: 171906 - RNA, 19 nt, Homo sapiens
  misc_RNA (1)...(19): siRNA sense strand
ccaagaaggucauucagua

SEQ ID NO: 171907 - RNA, 19 nt, Homo sapiens
  misc_RNA (1)...(19): siRNA sense strand
gcaacgagcuggccacaga

SEQ ID NO: 171908 - RNA, 19 nt, Homo sapiens
  misc_RNA (1)...(19): siRNA sense strand
ucaagaaacuggaggauga

SEQ ID NO: 171909 - RNA, 19 nt, Homo sapiens
  misc_RNA (1)...(19): siRNA sense strand
gagcagcuauccauauuga

SEQ ID NO: 171910 - RNA, 19 nt, Homo sapiens
  misc_RNA (1)...(19): siRNA sense strand
ggagaggauuagugacuua

SEQ ID NO: 171911 - RNA, 19 nt, Homo sapiens
  misc_RNA (1)...(19): siRNA sense strand
ggauauagcuggauuugag

SEQ ID NO: 171912 - RNA, 19 nt, Homo sapiens
  misc_RNA (1)...(19): siRNA sense strand
ggacguagaguuauugaaa

SEQ ID NO: 171913 - RNA, 19 nt, Homo sapiens
  misc_RNA (1)...(19): siRNA sense strand
gaggaaauuugaucaguug

SEQ ID NO: 171914 - RNA, 19 nt, Homo sapiens
  misc_RNA (1)...(19): siRNA sense strand
acaagaagcugaaggaaau

SEQ ID NO: 171915 - RNA, 19 nt, Homo sapiens
  misc_RNA (1)...(19): siRNA sense strand
aaacaucucuuccaaauac

SEQ ID NO: 171916 - RNA, 19 nt, Homo sapiens
  misc_RNA (1)...(19): siRNA sense strand
gaugagaaguuccucuuug

SEQ ID NO: 171917 - RNA, 19 nt, Homo sapiens
  misc_RNA (1)...(19): siRNA sense strand
ccaagucgcugaagcagaa

SEQ ID NO: 171918 - RNA, 19 nt, Homo sapiens
  misc_RNA (1)...(19): siRNA sense strand
agagacagcuucacgagua

SEQ ID NO: 171919 - RNA, 19 nt, Homo sapiens
  misc_RNA (1)...(19): siRNA sense strand
caacgaagccuccgugcua

SEQ ID NO: 171920 - RNA, 19 nt, Homo sapiens
  misc_RNA (1)...(19): siRNA sense strand
gcucaaagccgaaauggaa

SEQ ID NO: 171921 - RNA, 19 nt, Homo sapiens
  misc_RNA (1)...(19): siRNA sense strand
uuaaggagcuggaacagaa

SEQ ID NO: 171922 - RNA, 19 nt, Homo sapiens
  misc_RNA (1)...(19): siRNA sense strand
gaaccaaggccagugaaua

SEQ ID NO: 171923 - RNA, 19 nt, Homo sapiens
  misc_RNA (1)...(19): siRNA sense strand
gaacaaagcccuggacaag

SEQ ID NO: 171924 - RNA, 19 nt, Homo sapiens
  misc_RNA (1)...(19): siRNA sense strand
gggcggagcucaaugacaa

SEQ ID NO: 171925 - RNA, 19 nt, Homo sapiens
  misc_RNA (1)...(19): siRNA sense strand
gaagaacaaugcccugaag

SEQ ID NO: 171926 - RNA, 19 nt, Homo sapiens
  misc_RNA (1)...(19): siRNA sense strand
ccaaagagaaugagaagaa

SEQ ID NO: 171927 - RNA, 19 nt, Homo sapiens
  misc_RNA (1)...(19): siRNA sense strand
ccaagcagcucaaggacaa

SEQ ID NO: 171928 - RNA, 19 nt, Homo sapiens
  misc_RNA (1)...(19): siRNA sense strand
ccauuaagcuggccaagga

SEQ ID NO: 171929 - RNA, 19 nt, Homo sapiens
  misc_RNA (1)...(19): siRNA sense strand
ugagagggcucgcaaacaa

SEQ ID NO: 171930 - RNA, 19 nt, Homo sapiens
  misc_RNA (1)...(19): siRNA sense strand
caaagagaaugagaagaaa

SEQ ID NO: 171931 - RNA, 19 nt, Homo sapiens
  misc_RNA (1)...(19): siRNA sense strand
agaagaagcugcaggacuu

SEQ ID NO: 171932 - RNA, 19 nt, Homo sapiens
  misc_RNA (1)...(19): siRNA sense strand
gagccaacauugagaccua

SEQ ID NO: 171933 - RNA, 19 nt, Homo sapiens
  misc_RNA (1)...(19): siRNA sense strand
gaucaaagcccuggaacuu

SEQ ID NO: 171934 - RNA, 19 nt, Homo sapiens
  misc_RNA (1)...(19): siRNA sense strand
cagaggagcuggccaguag

SEQ ID NO: 171935 - RNA, 19 nt, Homo sapiens
  misc_RNA (1)...(19): siRNA sense strand
gaagaaggcccuggaugaa

SEQ ID NO: 171936 - RNA, 19 nt, Homo sapiens
  misc_RNA (1)...(19): siRNA sense strand
cagagcagcuugagcaguu

SEQ ID NO: 171937 - RNA, 19 nt, Homo sapiens
  misc_RNA (1)...(19): siRNA sense strand
gcaagaaagacacaaguau

SEQ ID NO: 171938 - RNA, 19 nt, Homo sapiens
  misc_RNA (1)...(19): siRNA sense strand
gcacggcccagaagaauga

SEQ ID NO: 171939 - RNA, 19 nt, Homo sapiens
  misc_RNA (1)...(19): siRNA sense strand
aaacaagcaugaaucuaug

SEQ ID NO: 171940 - RNA, 19 nt, Homo sapiens
  misc_RNA (1)...(19): siRNA sense strand
ggaauuaaugugacagauu

SEQ ID NO: 171941 - RNA, 19 nt, Homo sapiens
  misc_RNA (1)...(19): siRNA sense strand
ggaggcaacugcagagaca

SEQ ID NO: 171942 - RNA, 19 nt, Homo sapiens
  misc_RNA (1)...(19): siRNA sense strand
ucacagggaugcuuaacga

SEQ ID NO: 171943 - RNA, 19 nt, Homo sapiens
  misc_RNA (1)...(19): siRNA sense strand
gaagauggcccagcagaug

SEQ ID NO: 171944 - RNA, 19 nt, Homo sapiens
  misc_RNA (1)...(19): siRNA sense strand
gagaggacauuccacaucu

SEQ ID NO: 171945 - RNA, 19 nt, Homo sapiens
  misc_RNA (1)...(19): siRNA sense strand
gaugaaaucgcucagaaga

SEQ ID NO: 171946 - RNA, 19 nt, Homo sapiens
  misc_RNA (1)...(19): siRNA sense strand
cugggaagguggacuauaa

SEQ ID NO: 171947 - RNA, 19 nt, Homo sapiens
  misc_RNA (1)...(19): siRNA sense strand
auaaacaccugcccaucua

SEQ ID NO: 171948 - RNA, 19 nt, Homo sapiens
  misc_RNA (1)...(19): siRNA sense strand
gaacuggaagugcggcuaa

SEQ ID NO: 171949 - RNA, 19 nt, Homo sapiens
  misc_RNA (1)...(19): siRNA sense strand
guacuucucagggcuaaua

SEQ ID NO: 171950 - RNA, 19 nt, Homo sapiens
  misc_RNA (1)...(19): siRNA sense strand
gcaggaggccagagagaaa

SEQ ID NO: 171951 - RNA, 19 nt, Homo sapiens
  misc_RNA (1)...(19): siRNA sense strand
uccacaagcugcagaauga

SEQ ID NO: 171952 - RNA, 19 nt, Homo sapiens
  misc_RNA (1)...(19): siRNA sense strand
ugacagauuucaccagauc

SEQ ID NO: 171953 - RNA, 19 nt, Homo sapiens
  misc_RNA (1)...(19): siRNA sense strand
gcaagauggccgagcagua

SEQ ID NO: 171954 - RNA, 19 nt, Homo sapiens
  misc_RNA (1)...(19): siRNA sense strand
gacaagaagcugaaggaaa

SEQ ID NO: 171955 - RNA, 19 nt, Homo sapiens
  misc_RNA (1)...(19): siRNA sense strand
ugaagaaggcccuggauga

SEQ ID NO: 171956 - RNA, 19 nt, Homo sapiens
  misc_RNA (1)...(19): siRNA sense strand
gagcgagauuugaagauca

SEQ ID NO: 171957 - RNA, 19 nt, Homo sapiens
  misc_RNA (1)...(19): siRNA sense strand
cgacaacuccucacgauuc

SEQ ID NO: 171958 - RNA, 19 nt, Homo sapiens
  misc_RNA (1)...(19): siRNA sense strand
gaaggucacgguugggaaa

SEQ ID NO: 171959 - RNA, 19 nt, Homo sapiens
  misc_RNA (1)...(19): siRNA sense strand
acaaugcccugaagaagau

SEQ ID NO: 171960 - RNA, 19 nt, Homo sapiens
  misc_RNA (1)...(19): siRNA sense strand
uggaugaucagaacaauaa

SEQ ID NO: 171961 - RNA, 19 nt, Homo sapiens
  misc_RNA (1)...(19): siRNA sense strand
gaggagauacugcaugaga

SEQ ID NO: 171962 - RNA, 19 nt, Homo sapiens
  misc_RNA (1)...(19): siRNA sense strand
gugccuggcugaccaagaa

SEQ ID NO: 171963 - RNA, 19 nt, Homo sapiens
  misc_RNA (1)...(19): siRNA sense strand
gaacaaugcccugaagaag

SEQ ID NO: 171964 - RNA, 19 nt, Homo sapiens
  misc_RNA (1)...(19): siRNA sense strand
cgaccugguuguugauuug

SEQ ID NO: 171965 - RNA, 19 nt, Homo sapiens
  misc_RNA (1)...(19): siRNA sense strand
agaaggcccuggaugaaga

SEQ ID NO: 171966 - RNA, 19 nt, Homo sapiens
  misc_RNA (1)...(19): siRNA sense strand
ucucagggcuaauauauac

SEQ ID NO: 171967 - RNA, 19 nt, Homo sapiens
  misc_RNA (1)...(19): siRNA sense strand
ucgcagagcucaagaugca

SEQ ID NO: 171968 - RNA, 19 nt, Homo sapiens
  misc_RNA (1)...(19): siRNA sense strand
ccaaggagcggcagcagaa

SEQ ID NO: 171969 - RNA, 19 nt, Homo sapiens
  misc_RNA (1)...(19): siRNA sense strand
ggagcgagauuugaagauc

SEQ ID NO: 171970 - RNA, 19 nt, Homo sapiens
  misc_RNA (1)...(19): siRNA sense strand
ggcgagaugugguacagaa

SEQ ID NO: 171971 - RNA, 19 nt, Homo sapiens
  misc_RNA (1)...(19): siRNA sense strand
gcaagaagaggcacgagau

SEQ ID NO: 171972 - RNA, 19 nt, Homo sapiens
  misc_RNA (1)...(19): siRNA sense strand
gcaaauucauccgcaucaa

SEQ ID NO: 171973 - RNA, 19 nt, Homo sapiens
  misc_RNA (1)...(19): siRNA sense strand
aagcggaccucgagaagga

SEQ ID NO: 171974 - RNA, 19 nt, Homo sapiens
  misc_RNA (1)...(19): siRNA sense strand
ugaaaucgcucagaagaac

SEQ ID NO: 171975 - RNA, 19 nt, Homo sapiens
  misc_RNA (1)...(19): siRNA sense strand
agaugcagcuggccaagaa

SEQ ID NO: 171976 - RNA, 19 nt, Homo sapiens
  misc_RNA (1)...(19): siRNA sense strand
ggacauuccacaucuuuua

SEQ ID NO: 171977 - RNA, 19 nt, Homo sapiens
  misc_RNA (1)...(19): siRNA sense strand
gaggacauuccacaucuuu

SEQ ID NO: 171978 - RNA, 19 nt, Homo sapiens
  misc_RNA (1)...(19): siRNA sense strand
gaaaguuugccaccucaug

SEQ ID NO: 171979 - RNA, 19 nt, Homo sapiens
  misc_RNA (1)...(19): siRNA sense strand
agcaggagguggaacauaa

SEQ ID NO: 171980 - RNA, 19 nt, Homo sapiens
  misc_RNA (1)...(19): siRNA sense strand
uggaggagauacugcauga

SEQ ID NO: 171981 - RNA, 19 nt, Homo sapiens
  misc_RNA (1)...(19): siRNA sense strand
guacagaaagcucagacaa

SEQ ID NO: 171982 - RNA, 19 nt, Homo sapiens
  misc_RNA (1)...(19): siRNA sense strand
gagcagcugugcaucaacu

SEQ ID NO: 171983 - RNA, 19 nt, Homo sapiens
  misc_RNA (1)...(19): siRNA sense strand
ggaaauuugaucaguuguu

SEQ ID NO: 171984 - RNA, 19 nt, Homo sapiens
  misc_RNA (1)...(19): siRNA sense strand
gaccagauggccaagauga

SEQ ID NO: 171985 - RNA, 19 nt, Homo sapiens
  misc_RNA (1)...(19): siRNA sense strand
ugacuucccugcucaaugc

SEQ ID NO: 171986 - RNA, 19 nt, Homo sapiens
  misc_RNA (1)...(19): siRNA sense strand
caagaaagacacaaguauc

SEQ ID NO: 171987 - RNA, 19 nt, Homo sapiens
  misc_RNA (1)...(19): siRNA sense strand
ggagcucaaugacaaaguc

SEQ ID NO: 171988 - RNA, 19 nt, Homo sapiens
  misc_RNA (1)...(19): siRNA sense strand
gaggagcagcuauccauau

SEQ ID NO: 171989 - RNA, 19 nt, Homo sapiens
  misc_RNA (1)...(19): siRNA sense strand
aaccaaggccagugaauaa

SEQ ID NO: 171990 - RNA, 19 nt, Homo sapiens
  misc_RNA (1)...(19): siRNA sense strand
gacgcagacuucaauggaa

SEQ ID NO: 171991 - RNA, 19 nt, Homo sapiens
  misc_RNA (1)...(19): siRNA sense strand
gaggugaacgcacucaaga

SEQ ID NO: 171992 - RNA, 19 nt, Homo sapiens
  misc_RNA (1)...(19): siRNA sense strand
gagacagcuucacgaguau

SEQ ID NO: 171993 - RNA, 19 nt, Homo sapiens
  misc_RNA (1)...(19): siRNA sense strand
gcagaagggccaacucagu

SEQ ID NO: 171994 - RNA, 19 nt, Homo sapiens
  misc_RNA (1)...(19): siRNA sense strand
agaggaaauuugaucaguu

SEQ ID NO: 171995 - RNA, 19 nt, Homo sapiens
  misc_RNA (1)...(19): siRNA sense strand
ggagauacugcaugagaug

SEQ ID NO: 171996 - RNA, 19 nt, Homo sapiens
  misc_RNA (1)...(19): siRNA sense strand
gaugugucguggcuacuug

SEQ ID NO: 171997 - RNA, 19 nt, Homo sapiens
  misc_RNA (1)...(19): siRNA sense strand
gcgagggcaucgaguggaa

SEQ ID NO: 171998 - RNA, 19 nt, Homo sapiens
  misc_RNA (1)...(19): siRNA sense strand
gaaacuggaggaugagauc

SEQ ID NO: 171999 - RNA, 19 nt, Homo sapiens
  misc_RNA (1)...(19): siRNA sense strand
ugaacgcacucaagagcaa

SEQ ID NO: 172000 - RNA, 19 nt, Homo sapiens
  misc_RNA (1)...(19): siRNA sense strand
gaagcugaaggaaaucuug

SEQ ID NO: 172001 - RNA, 19 nt, Homo sapiens
  misc_RNA (1)...(19): siRNA sense strand
ggaagacgagcgaaagcaa

SEQ ID NO: 172002 - RNA, 19 nt, Homo sapiens
  misc_RNA (1)...(19): siRNA sense strand
agaagagguuccagaagga

SEQ ID NO: 172003 - RNA, 19 nt, Homo sapiens
  misc_RNA (1)...(19): siRNA sense strand
gcuaauauauacguacucu

SEQ ID NO: 172004 - RNA, 19 nt, Homo sapiens
  misc_RNA (1)...(19): siRNA sense strand
uaacacagcugcucagaaa

SEQ ID NO: 172005 - RNA, 19 nt, Homo sapiens
  misc_RNA (1)...(19): siRNA sense strand
ggacagagcugaggcagaa

SEQ ID NO: 172006 - RNA, 19 nt, Homo sapiens
  misc_RNA (1)...(19): siRNA sense strand
ccaagaaggucauucagua

SEQ ID NO: 172007 - RNA, 19 nt, Homo sapiens
  misc_RNA (1)...(19): siRNA sense strand
gcaacgagcuggccacaga

SEQ ID NO: 172008 - RNA, 19 nt, Homo sapiens
  misc_RNA (1)...(19): siRNA sense strand
ucaagaaacuggaggauga

SEQ ID NO: 172009 - RNA, 19 nt, Homo sapiens
  misc_RNA (1)...(19): siRNA sense strand
gagcagcuauccauauuga

SEQ ID NO: 172010 - RNA, 19 nt, Homo sapiens
  misc_RNA (1)...(19): siRNA sense strand
ggagaggauuagugacuua

SEQ ID NO: 172011 - RNA, 19 nt, Homo sapiens
  misc_RNA (1)...(19): siRNA sense strand
ggauauagcuggauuugag

SEQ ID NO: 172012 - RNA, 19 nt, Homo sapiens
  misc_RNA (1)...(19): siRNA sense strand
gaggaaauuugaucaguug

SEQ ID NO: 172013 - RNA, 19 nt, Homo sapiens
  misc_RNA (1)...(19): siRNA sense strand
acaagaagcugaaggaaau

SEQ ID NO: 172014 - RNA, 19 nt, Homo sapiens
  misc_RNA (1)...(19): siRNA sense strand
aaacaucucuuccaaauac

SEQ ID NO: 172015 - RNA, 19 nt, Homo sapiens
  misc_RNA (1)...(19): siRNA sense strand
gaugagaaguuccucuuug

SEQ ID NO: 172016 - RNA, 19 nt, Homo sapiens
  misc_RNA (1)...(19): siRNA sense strand
ccaagucgcugaagcagaa

SEQ ID NO: 172017 - RNA, 19 nt, Homo sapiens
  misc_RNA (1)...(19): siRNA sense strand
agagacagcuucacgagua

SEQ ID NO: 172018 - RNA, 19 nt, Homo sapiens
  misc_RNA (1)...(19): siRNA sense strand
caacgaagccuccgugcua

SEQ ID NO: 172019 - RNA, 19 nt, Homo sapiens
  misc_RNA (1)...(19): siRNA sense strand
gcucaaagccgaaauggaa

SEQ ID NO: 172020 - RNA, 19 nt, Homo sapiens
  misc_RNA (1)...(19): siRNA sense strand
uuaaggagcuggaacagaa

SEQ ID NO: 172021 - RNA, 19 nt, Homo sapiens
  misc_RNA (1)...(19): siRNA sense strand
gaacaaagcccuggacaag

SEQ ID NO: 172022 - RNA, 19 nt, Homo sapiens
  misc_RNA (1)...(19): siRNA sense strand
gggcggagcucaaugacaa

SEQ ID NO: 172023 - RNA, 19 nt, Homo sapiens
  misc_RNA (1)...(19): siRNA sense strand
gaagaacaaugcccugaag

SEQ ID NO: 172024 - RNA, 19 nt, Homo sapiens
  misc_RNA (1)...(19): siRNA sense strand
ccaaagagaaugagaagaa

SEQ ID NO: 172025 - RNA, 19 nt, Homo sapiens
  misc_RNA (1)...(19): siRNA sense strand
ccaagcagcucaaggacaa

SEQ ID NO: 172026 - RNA, 19 nt, Homo sapiens
  misc_RNA (1)...(19): siRNA sense strand
ccauuaagcuggccaagga

SEQ ID NO: 172027 - RNA, 19 nt, Homo sapiens
  misc_RNA (1)...(19): siRNA sense strand
ugagagggcucgcaaacaa

SEQ ID NO: 172028 - RNA, 19 nt, Homo sapiens
  misc_RNA (1)...(19): siRNA sense strand
caaagagaaugagaagaaa

SEQ ID NO: 172029 - RNA, 19 nt, Homo sapiens
  misc_RNA (1)...(19): siRNA sense strand
agaagaagcugcaggacuu

SEQ ID NO: 172030 - RNA, 19 nt, Homo sapiens
  misc_RNA (1)...(19): siRNA sense strand
gagccaacauugagaccua

SEQ ID NO: 172031 - RNA, 19 nt, Homo sapiens
  misc_RNA (1)...(19): siRNA sense strand
gaucaaagcccuggaacuu

SEQ ID NO: 172032 - RNA, 19 nt, Homo sapiens
  misc_RNA (1)...(19): siRNA sense strand
cagaggagcuggccaguag

SEQ ID NO: 172033 - RNA, 19 nt, Homo sapiens
  misc_RNA (1)...(19): siRNA sense strand
gaagaaggcccuggaugaa

SEQ ID NO: 172034 - RNA, 19 nt, Homo sapiens
  misc_RNA (1)...(19): siRNA sense strand
cagagcagcuugagcaguu

SEQ ID NO: 172035 - RNA, 19 nt, Homo sapiens
  misc_RNA (1)...(19): siRNA sense strand
gcaagaaagacacaaguau

SEQ ID NO: 172036 - RNA, 19 nt, Homo sapiens
  misc_RNA (1)...(19): siRNA sense strand
gcacggcccagaagaauga

SEQ ID NO: 172037 - RNA, 19 nt, Homo sapiens
  misc_RNA (1)...(19): siRNA sense strand
aaacaagcaugaaucuaug

SEQ ID NO: 172038 - RNA, 19 nt, Homo sapiens
  misc_RNA (1)...(19): siRNA sense strand
ggaauuaaugugacagauu

SEQ ID NO: 172039 - RNA, 19 nt, Homo sapiens
  misc_RNA (1)...(19): siRNA sense strand
ggaggcaacugcagagaca

SEQ ID NO: 172040 - RNA, 19 nt, Homo sapiens
  misc_RNA (1)...(19): siRNA sense strand
ucacagggaugcuuaacga

SEQ ID NO: 172041 - RNA, 19 nt, Homo sapiens
  misc_RNA (1)...(19): siRNA sense strand
gaagauggcccagcagaug

SEQ ID NO: 172042 - RNA, 19 nt, Homo sapiens
  misc_RNA (1)...(19): siRNA sense strand
gagaggacauuccacaucu

SEQ ID NO: 172043 - RNA, 19 nt, Homo sapiens
  misc_RNA (1)...(19): siRNA sense strand
gaugaaaucgcucagaaga

SEQ ID NO: 172044 - RNA, 19 nt, Homo sapiens
  misc_RNA (1)...(19): siRNA sense strand
cugggaagguggacuauaa

SEQ ID NO: 172045 - RNA, 19 nt, Homo sapiens
  misc_RNA (1)...(19): siRNA sense strand
auaaacaccugcccaucua

SEQ ID NO: 172046 - RNA, 19 nt, Homo sapiens
  misc_RNA (1)...(19): siRNA sense strand
gaacuggaagugcggcuaa

SEQ ID NO: 172047 - RNA, 19 nt, Homo sapiens
  misc_RNA (1)...(19): siRNA sense strand
guacuucucagggcuaaua

SEQ ID NO: 172048 - RNA, 19 nt, Homo sapiens
  misc_RNA (1)...(19): siRNA sense strand
gcaggaggccagagagaaa

SEQ ID NO: 172049 - RNA, 19 nt, Homo sapiens
  misc_RNA (1)...(19): siRNA sense strand
uccacaagcugcagaauga

SEQ ID NO: 172050 - RNA, 19 nt, Homo sapiens
  misc_RNA (1)...(19): siRNA sense strand
ugacagauuucaccagauc

SEQ ID NO: 172051 - RNA, 19 nt, Homo sapiens
  misc_RNA (1)...(19): siRNA sense strand
gcaagauggccgagcagua

SEQ ID NO: 172052 - RNA, 19 nt, Homo sapiens
  misc_RNA (1)...(19): siRNA sense strand
gacaagaagcugaaggaaa

SEQ ID NO: 172053 - RNA, 19 nt, Homo sapiens
  misc_RNA (1)...(19): siRNA sense strand
ugaagaaggcccuggauga

SEQ ID NO: 172054 - RNA, 19 nt, Homo sapiens
  misc_RNA (1)...(19): siRNA sense strand
gagcgagauuugaagauca

SEQ ID NO: 172055 - RNA, 19 nt, Homo sapiens
  misc_RNA (1)...(19): siRNA sense strand
cgacaacuccucacgauuc

SEQ ID NO: 172056 - RNA, 19 nt, Homo sapiens
  misc_RNA (1)...(19): siRNA sense strand
gaaggucacgguugggaaa

SEQ ID NO: 172057 - RNA, 19 nt, Homo sapiens
  misc_RNA (1)...(19): siRNA sense strand
acaaugcccugaagaagau

SEQ ID NO: 172058 - RNA, 19 nt, Homo sapiens
  misc_RNA (1)...(19): siRNA sense strand
uggaugaucagaacaauaa

SEQ ID NO: 172059 - RNA, 19 nt, Homo sapiens
  misc_RNA (1)...(19): siRNA sense strand
gaggagauacugcaugaga

SEQ ID NO: 172060 - RNA, 19 nt, Homo sapiens
  misc_RNA (1)...(19): siRNA sense strand
gugccuggcugaccaagaa

SEQ ID NO: 172061 - RNA, 19 nt, Homo sapiens
  misc_RNA (1)...(19): siRNA sense strand
gaacaaugcccugaagaag

SEQ ID NO: 172062 - RNA, 19 nt, Homo sapiens
  misc_RNA (1)...(19): siRNA sense strand
cgaccugguuguugauuug

SEQ ID NO: 172063 - RNA, 19 nt, Homo sapiens
  misc_RNA (1)...(19): siRNA sense strand
agaaggcccuggaugaaga

SEQ ID NO: 172064 - RNA, 19 nt, Homo sapiens
  misc_RNA (1)...(19): siRNA sense strand
ucucagggcuaauauauac

SEQ ID NO: 172065 - RNA, 19 nt, Homo sapiens
  misc_RNA (1)...(19): siRNA sense strand
ucgcagagcucaagaugca

SEQ ID NO: 172066 - RNA, 19 nt, Homo sapiens
  misc_RNA (1)...(19): siRNA sense strand
ccaaggagcggcagcagaa

SEQ ID NO: 172067 - RNA, 19 nt, Homo sapiens
  misc_RNA (1)...(19): siRNA sense strand
ggagcgagauuugaagauc

SEQ ID NO: 172068 - RNA, 19 nt, Homo sapiens
  misc_RNA (1)...(19): siRNA sense strand
ggcgagaugugguacagaa

SEQ ID NO: 172069 - RNA, 19 nt, Homo sapiens
  misc_RNA (1)...(19): siRNA sense strand
gcaagaagaggcacgagau

SEQ ID NO: 172070 - RNA, 19 nt, Homo sapiens
  misc_RNA (1)...(19): siRNA sense strand
gcaaauucauccgcaucaa

SEQ ID NO: 172071 - RNA, 19 nt, Homo sapiens
  misc_RNA (1)...(19): siRNA sense strand
aagcggaccucgagaagga

SEQ ID NO: 172072 - RNA, 19 nt, Homo sapiens
  misc_RNA (1)...(19): siRNA sense strand
ugaaaucgcucagaagaac

SEQ ID NO: 172073 - RNA, 19 nt, Homo sapiens
  misc_RNA (1)...(19): siRNA sense strand
agaugcagcuggccaagaa

SEQ ID NO: 172074 - RNA, 19 nt, Homo sapiens
  misc_RNA (1)...(19): siRNA sense strand
ggacauuccacaucuuuua

SEQ ID NO: 172075 - RNA, 19 nt, Homo sapiens
  misc_RNA (1)...(19): siRNA sense strand
gaggacauuccacaucuuu

SEQ ID NO: 172076 - RNA, 19 nt, Homo sapiens
  misc_RNA (1)...(19): siRNA sense strand
gaaaguuugccaccucaug

SEQ ID NO: 172077 - RNA, 19 nt, Homo sapiens
  misc_RNA (1)...(19): siRNA sense strand
agcaggagguggaacauaa

SEQ ID NO: 172078 - RNA, 19 nt, Homo sapiens
  misc_RNA (1)...(19): siRNA sense strand
uggaggagauacugcauga

SEQ ID NO: 172079 - RNA, 19 nt, Homo sapiens
  misc_RNA (1)...(19): siRNA sense strand
guacagaaagcucagacaa

SEQ ID NO: 172080 - RNA, 19 nt, Homo sapiens
  misc_RNA (1)...(19): siRNA sense strand
gagcagcugugcaucaacu

SEQ ID NO: 172081 - RNA, 19 nt, Homo sapiens
  misc_RNA (1)...(19): siRNA sense strand
ggaaauuugaucaguuguu

SEQ ID NO: 172082 - RNA, 19 nt, Homo sapiens
  misc_RNA (1)...(19): siRNA sense strand
gaccagauggccaagauga

SEQ ID NO: 172083 - RNA, 19 nt, Homo sapiens
  misc_RNA (1)...(19): siRNA sense strand
ugacuucccugcucaaugc

SEQ ID NO: 172084 - RNA, 19 nt, Homo sapiens
  misc_RNA (1)...(19): siRNA sense strand
caagaaagacacaaguauc

SEQ ID NO: 172085 - RNA, 19 nt, Homo sapiens
  misc_RNA (1)...(19): siRNA sense strand
ggagcucaaugacaaaguc

SEQ ID NO: 172086 - RNA, 19 nt, Homo sapiens
  misc_RNA (1)...(19): siRNA sense strand
gaggagcagcuauccauau

SEQ ID NO: 172087 - RNA, 19 nt, Homo sapiens
  misc_RNA (1)...(19): siRNA sense strand
gaggugaacgcacucaaga

SEQ ID NO: 172088 - RNA, 19 nt, Homo sapiens
  misc_RNA (1)...(19): siRNA sense strand
gagacagcuucacgaguau

SEQ ID NO: 172089 - RNA, 19 nt, Homo sapiens
  misc_RNA (1)...(19): siRNA sense strand
gcagaagggccaacucagu

SEQ ID NO: 172090 - RNA, 19 nt, Homo sapiens
  misc_RNA (1)...(19): siRNA sense strand
agaggaaauuugaucaguu

SEQ ID NO: 172091 - RNA, 19 nt, Homo sapiens
  misc_RNA (1)...(19): siRNA sense strand
ggagauacugcaugagaug

SEQ ID NO: 172092 - RNA, 19 nt, Homo sapiens
  misc_RNA (1)...(19): siRNA sense strand
gaugugucguggcuacuug

SEQ ID NO: 172093 - RNA, 19 nt, Homo sapiens
  misc_RNA (1)...(19): siRNA sense strand
gcgagggcaucgaguggaa

SEQ ID NO: 172094 - RNA, 19 nt, Homo sapiens
  misc_RNA (1)...(19): siRNA sense strand
ggcaagaaagacacaagua

SEQ ID NO: 172095 - RNA, 19 nt, Homo sapiens
  misc_RNA (1)...(19): siRNA sense strand
ugaacgcacucaagagcaa

SEQ ID NO: 172096 - RNA, 19 nt, Homo sapiens
  misc_RNA (1)...(19): siRNA sense strand
gaagcugaaggaaaucuug

SEQ ID NO: 172097 - RNA, 19 nt, Homo sapiens
  misc_RNA (1)...(19): siRNA sense strand
ggaagacgagcgaaagcaa

SEQ ID NO: 172098 - RNA, 19 nt, Homo sapiens
  misc_RNA (1)...(19): siRNA sense strand
agaagagguuccagaagga

SEQ ID NO: 172099 - RNA, 19 nt, Homo sapiens
  misc_RNA (1)...(19): siRNA sense strand
gaaacuggaggaugagauc

SEQ ID NO: 172100 - RNA, 19 nt, Homo sapiens
  misc_RNA (1)...(19): siRNA sense strand
gcuaauauauacguacucu

SEQ ID NO: 172101 - RNA, 19 nt, Homo sapiens
  misc_RNA (1)...(19): siRNA sense strand
ggaggagcagcuauccaua

SEQ ID NO: 172102 - RNA, 19 nt, Homo sapiens
  misc_RNA (1)...(19): siRNA sense strand
aggcgaaccuagacaagaa

SEQ ID NO: 172103 - RNA, 19 nt, Homo sapiens
  misc_RNA (1)...(19): siRNA sense strand
acaaggagcaggcagagaa

SEQ ID NO: 172104 - RNA, 19 nt, Homo sapiens
  misc_RNA (1)...(19): siRNA sense strand
ccaagaagccugagccuaa

SEQ ID NO: 172105 - RNA, 19 nt, Homo sapiens
  misc_RNA (1)...(19): siRNA sense strand
gaagaugacugaggcugaa

SEQ ID NO: 172106 - RNA, 19 nt, Homo sapiens
  misc_RNA (1)...(19): siRNA sense strand
caucaauuaugaagccuuu

SEQ ID NO: 172107 - RNA, 19 nt, Homo sapiens
  misc_RNA (1)...(19): siRNA sense strand
ggucaugggugcugagcuu

SEQ ID NO: 172108 - RNA, 19 nt, Homo sapiens
  misc_RNA (1)...(19): siRNA sense strand
gcccaagccugaagagaug

SEQ ID NO: 172109 - RNA, 19 nt, Homo sapiens
  misc_RNA (1)...(19): siRNA sense strand
ccaagaguguaaagauaga

SEQ ID NO: 172110 - RNA, 19 nt, Homo sapiens
  misc_RNA (1)...(19): siRNA sense strand
agagaugaaugucaagaug

SEQ ID NO: 172111 - RNA, 19 nt, Homo sapiens
  misc_RNA (1)...(19): siRNA sense strand
ggccagaacccuaccaaug

SEQ ID NO: 172112 - RNA, 19 nt, Homo sapiens
  misc_RNA (1)...(19): siRNA sense strand
cugaagagaugaaugucaa

SEQ ID NO: 172113 - RNA, 19 nt, Homo sapiens
  misc_RNA (1)...(19): siRNA sense strand
gcacauuucccgcaacaag

SEQ ID NO: 172114 - RNA, 19 nt, Homo sapiens
  misc_RNA (1)...(19): siRNA sense strand
gcuguuagcugggcaagag

SEQ ID NO: 172115 - RNA, 19 nt, Homo sapiens
  misc_RNA (1)...(19): siRNA sense strand
gaagagaugaaugucaaga

SEQ ID NO: 172116 - RNA, 19 nt, Homo sapiens
  misc_RNA (1)...(19): siRNA sense strand
caagaagccugagccuaag

SEQ ID NO: 172117 - RNA, 19 nt, Homo sapiens
  misc_RNA (1)...(19): siRNA sense strand
ugaaguggagcagcuguua

SEQ ID NO: 172118 - RNA, 19 nt, Homo sapiens
  misc_RNA (1)...(19): siRNA sense strand
gagagaugaagaucaccua

SEQ ID NO: 172119 - RNA, 19 nt, Homo sapiens
  misc_RNA (1)...(19): siRNA sense strand
cagcacauuucccgcaaca

SEQ ID NO: 172120 - RNA, 19 nt, Homo sapiens
  misc_RNA (1)...(19): siRNA sense strand
gggcaccuaugaggacuuc

SEQ ID NO: 172121 - RNA, 19 nt, Homo sapiens
  misc_RNA (1)...(19): siRNA sense strand
ugggagagaagaugacuga

SEQ ID NO: 172122 - RNA, 19 nt, Homo sapiens
  misc_RNA (1)...(19): siRNA sense strand
gccagaacccuaccaaugc

SEQ ID NO: 172123 - RNA, 19 nt, Homo sapiens
  misc_RNA (1)...(19): siRNA sense strand
gaaguggagcagcuguuag

SEQ ID NO: 172124 - RNA, 19 nt, Homo sapiens
  misc_RNA (1)...(19): siRNA sense strand
acaaggagcagggcaccua

SEQ ID NO: 172125 - RNA, 19 nt, Homo sapiens
  misc_RNA (1)...(19): siRNA sense strand
gcaagcccaagccugaaga

SEQ ID NO: 172126 - RNA, 19 nt, Homo sapiens
  misc_RNA (1)...(19): siRNA sense strand
uuaugaagccuuugucaag

SEQ ID NO: 172127 - RNA, 19 nt, Homo sapiens
  misc_RNA (1)...(19): siRNA sense strand
ccccaagaguguaaagaua

SEQ ID NO: 172128 - RNA, 19 nt, Homo sapiens
  misc_RNA (1)...(19): siRNA sense strand
ucaauuaugaagccuuugu

SEQ ID NO: 172129 - RNA, 19 nt, Homo sapiens
  misc_RNA (1)...(19): siRNA sense strand
ucacugccgaccagauuga

SEQ ID NO: 172130 - RNA, 19 nt, Homo sapiens
  misc_RNA (1)...(19): siRNA sense strand
cgacuggagagaugaagau

SEQ ID NO: 172131 - RNA, 19 nt, Homo sapiens
  misc_RNA (1)...(19): siRNA sense strand
agccugagccuaagaagga

SEQ ID NO: 172132 - RNA, 19 nt, Homo sapiens
  misc_RNA (1)...(19): siRNA sense strand
ggacuuugagacguucuug

SEQ ID NO: 172133 - RNA, 19 nt, Homo sapiens
  misc_RNA (1)...(19): siRNA sense strand
gaguguaaagauagacuuc

SEQ ID NO: 172134 - RNA, 19 nt, Homo sapiens
  misc_RNA (1)...(19): siRNA sense strand
caaggagcagggcaccuau

SEQ ID NO: 172135 - RNA, 19 nt, Homo sapiens
  misc_RNA (1)...(19): siRNA sense strand
gaaccgagauggcuucauu

SEQ ID NO: 172136 - RNA, 19 nt, Homo sapiens
  misc_RNA (1)...(19): siRNA sense strand
gcaggaagaccaagaagaa

SEQ ID NO: 172137 - RNA, 19 nt, Homo sapiens
  misc_RNA (1)...(19): siRNA sense strand
cgagauggcuucauugaca

SEQ ID NO: 172138 - RNA, 19 nt, Homo sapiens
  misc_RNA (1)...(19): siRNA sense strand
ccagagagccucauccaau

SEQ ID NO: 172139 - RNA, 19 nt, Homo sapiens
  misc_RNA (1)...(19): siRNA sense strand
cagagagccucauccaaug

SEQ ID NO: 172140 - RNA, 19 nt, Homo sapiens
  misc_RNA (1)...(19): siRNA sense strand
gagauggcuucauugacaa

SEQ ID NO: 172141 - RNA, 19 nt, Homo sapiens
  misc_RNA (1)...(19): siRNA sense strand
cggaagagguggaccagau

SEQ ID NO: 172142 - RNA, 19 nt, Homo sapiens
  misc_RNA (1)...(19): siRNA sense strand
caacaaggaguacaucaag

SEQ ID NO: 172143 - RNA, 19 nt, Homo sapiens
  misc_RNA (1)...(19): siRNA sense strand
ccgaggagaccauucuuaa

SEQ ID NO: 172144 - RNA, 19 nt, Homo sapiens
  misc_RNA (1)...(19): siRNA sense strand
ggaagaccaagaagaagga

SEQ ID NO: 172145 - RNA, 19 nt, Homo sapiens
  misc_RNA (1)...(19): siRNA sense strand
cauccaaugucuucuccaa

SEQ ID NO: 172146 - RNA, 19 nt, Homo sapiens
  misc_RNA (1)...(19): siRNA sense strand
gcgcucagcuacgugauca

SEQ ID NO: 172147 - RNA, 19 nt, Homo sapiens
  misc_RNA (1)...(19): siRNA sense strand
gcaagaccaacgucaagga

SEQ ID NO: 172148 - RNA, 19 nt, Homo sapiens
  misc_RNA (1)...(19): siRNA sense strand
ucacacucauggaucagaa

SEQ ID NO: 172149 - RNA, 19 nt, Homo sapiens
  misc_RNA (1)...(19): siRNA sense strand
ggaagagguggaccagaug

SEQ ID NO: 172150 - RNA, 19 nt, Homo sapiens
  misc_RNA (1)...(19): siRNA sense strand
ccaaugucuucuccaacuu

SEQ ID NO: 172151 - RNA, 19 nt, Homo sapiens
  misc_RNA (1)...(19): siRNA sense strand
caaugucuucuccaacuuu

SEQ ID NO: 172152 - RNA, 19 nt, Homo sapiens
  misc_RNA (1)...(19): siRNA sense strand
cccaucaacuucaccaugu

SEQ ID NO: 172153 - RNA, 19 nt, Homo sapiens
  misc_RNA (1)...(19): siRNA sense strand
gaagagguggaccagaugu

SEQ ID NO: 172154 - RNA, 19 nt, Homo sapiens
  misc_RNA (1)...(19): siRNA sense strand
gucccaggcugacaagaug

SEQ ID NO: 172155 - RNA, 19 nt, Homo sapiens
  misc_RNA (1)...(19): siRNA sense strand
gccgaggagaccauucuua

SEQ ID NO: 172156 - RNA, 19 nt, Homo sapiens
  misc_RNA (1)...(19): siRNA sense strand
gaggagaccauucuuaacg

SEQ ID NO: 172157 - RNA, 19 nt, Homo sapiens
  misc_RNA (1)...(19): siRNA sense strand
ucaagcgucugcugauguc

SEQ ID NO: 172158 - RNA, 19 nt, Homo sapiens
  misc_RNA (1)...(19): siRNA sense strand
ccaguucgccuccaucgau

SEQ ID NO: 172159 - RNA, 19 nt, Homo sapiens
  misc_RNA (1)...(19): siRNA sense strand
aaggaggcauucacacuca

SEQ ID NO: 172160 - RNA, 19 nt, Homo sapiens
  misc_RNA (1)...(19): siRNA sense strand
acaaggaggaccugaagga

SEQ ID NO: 172161 - RNA, 19 nt, Homo sapiens
  misc_RNA (1)...(19): siRNA sense strand
cauucacacucauggauca

SEQ ID NO: 172162 - RNA, 19 nt, Homo sapiens
  misc_RNA (1)...(19): siRNA sense strand
ucaacaaggaguacaucaa

SEQ ID NO: 172163 - RNA, 19 nt, Homo sapiens
  misc_RNA (1)...(19): siRNA sense strand
ggaccugaaggacaccuau

SEQ ID NO: 172164 - RNA, 19 nt, Homo sapiens
  misc_RNA (1)...(19): siRNA sense strand
gggcaagaccaacgucaag

SEQ ID NO: 172165 - RNA, 19 nt, Homo sapiens
  misc_RNA (1)...(19): siRNA sense strand
ugacaaggaggaccugaag

SEQ ID NO: 172166 - RNA, 19 nt, Homo sapiens
  misc_RNA (1)...(19): siRNA sense strand
ggaaaaucaacaaggagua

SEQ ID NO: 172167 - RNA, 19 nt, Homo sapiens
  misc_RNA (1)...(19): siRNA sense strand
ggaaagggaaaaucaacaa

SEQ ID NO: 172168 - RNA, 19 nt, Homo sapiens
  misc_RNA (1)...(19): siRNA sense strand
uggacgccaugcucaaaga

SEQ ID NO: 172169 - RNA, 19 nt, Homo sapiens
  misc_RNA (1)...(19): siRNA sense strand
uccaaugucuucuccaacu

SEQ ID NO: 172170 - RNA, 19 nt, Homo sapiens
  misc_RNA (1)...(19): siRNA sense strand
ggaggagaaggaggaguga

SEQ ID NO: 172171 - RNA, 19 nt, Homo sapiens
  misc_RNA (1)...(19): siRNA sense strand
guucaaggaggcauucaca

SEQ ID NO: 172172 - RNA, 19 nt, Homo sapiens
  misc_RNA (1)...(19): siRNA sense strand
gcuggacgccaugcucaaa

SEQ ID NO: 172173 - RNA, 19 nt, Homo sapiens
  misc_RNA (1)...(19): siRNA sense strand
ccagcaggaagaccaagaa

SEQ ID NO: 172174 - RNA, 19 nt, Homo sapiens
  misc_RNA (1)...(19): siRNA sense strand
ggaggcauucacacucaug

SEQ ID NO: 172175 - RNA, 19 nt, Homo sapiens
  misc_RNA (1)...(19): siRNA sense strand
ggaccagauguuccaguuc

SEQ ID NO: 172176 - RNA, 19 nt, Homo sapiens
  misc_RNA (1)...(19): siRNA sense strand
gaagaccaagaagaaggaa

SEQ ID NO: 172177 - RNA, 19 nt, Homo sapiens
  misc_RNA (1)...(19): siRNA sense strand
aaugucuucuccaacuuug

SEQ ID NO: 172178 - RNA, 19 nt, Homo sapiens
  misc_RNA (1)...(19): siRNA sense strand
ucaaggaggcauucacacu

SEQ ID NO: 172179 - RNA, 19 nt, Homo sapiens
  misc_RNA (1)...(19): siRNA sense strand
caacggacgacuucuauga

SEQ ID NO: 172180 - RNA, 19 nt, Homo sapiens
  misc_RNA (1)...(19): siRNA sense strand
gcaacgccauccgcuauau

SEQ ID NO: 172181 - RNA, 19 nt, Homo sapiens
  misc_RNA (1)...(19): siRNA sense strand
gcacgucgagcaauccaaa

SEQ ID NO: 172182 - RNA, 19 nt, Homo sapiens
  misc_RNA (1)...(19): siRNA sense strand
ccacaacggacgacuucua

SEQ ID NO: 172183 - RNA, 19 nt, Homo sapiens
  misc_RNA (1)...(19): siRNA sense strand
guaaaugaggccuuugaga

SEQ ID NO: 172184 - RNA, 19 nt, Homo sapiens
  misc_RNA (1)...(19): siRNA sense strand
gcgcaacgccauccgcuau

SEQ ID NO: 172185 - RNA, 19 nt, Homo sapiens
  misc_RNA (1)...(19): siRNA sense strand
uggcggacgugccuucuga

SEQ ID NO: 172186 - RNA, 19 nt, Homo sapiens
  misc_RNA (1)...(19): siRNA sense strand
ggaccugcgcuucuucgaa

SEQ ID NO: 172187 - RNA, 19 nt, Homo sapiens
  misc_RNA (1)...(19): siRNA sense strand
ccgaagagcacucgcacuu

SEQ ID NO: 172188 - RNA, 19 nt, Homo sapiens
  misc_RNA (1)...(19): siRNA sense strand
cgaaggcgccuacuacaac

SEQ ID NO: 172189 - RNA, 19 nt, Homo sapiens
  misc_RNA (1)...(19): siRNA sense strand
gcuacgaaggcgccuacua

SEQ ID NO: 172190 - RNA, 19 nt, Homo sapiens
  misc_RNA (1)...(19): siRNA sense strand
aaaugaggccuuugagaca

SEQ ID NO: 172191 - RNA, 19 nt, Homo sapiens
  misc_RNA (1)...(19): siRNA sense strand
cuacgaaggcgccuacuac

SEQ ID NO: 172192 - RNA, 19 nt, Homo sapiens
  misc_RNA (1)...(19): siRNA sense strand
gauauaccaggugcucuga

SEQ ID NO: 172193 - RNA, 19 nt, Homo sapiens
  misc_RNA (1)...(19): siRNA sense strand
cacaacggacgacuucuau

SEQ ID NO: 172194 - RNA, 19 nt, Homo sapiens
  misc_RNA (1)...(19): siRNA sense strand
ucuaugacgacccguguuu

SEQ ID NO: 172195 - RNA, 19 nt, Homo sapiens
  misc_RNA (1)...(19): siRNA sense strand
ccgacggcaugauggacua

SEQ ID NO: 172196 - RNA, 19 nt, Homo sapiens
  misc_RNA (1)...(19): siRNA sense strand
gcaagcgcaagaccaccaa

SEQ ID NO: 172197 - RNA, 19 nt, Homo sapiens
  misc_RNA (1)...(19): siRNA sense strand
ggcucucucugcuccuuug

SEQ ID NO: 172198 - RNA, 19 nt, Homo sapiens
  misc_RNA (1)...(19): siRNA sense strand
uagacugccuguccagcau

SEQ ID NO: 172199 - RNA, 19 nt, Homo sapiens
  misc_RNA (1)...(19): siRNA sense strand
gagaagcgcaggcucaaga

SEQ ID NO: 172200 - RNA, 19 nt, Homo sapiens
  misc_RNA (1)...(19): siRNA sense strand
gcagugccauccaguacau

SEQ ID NO: 172201 - RNA, 19 nt, Homo sapiens
  misc_RNA (1)...(19): siRNA sense strand
gcucacggcugacccuaca

SEQ ID NO: 172202 - RNA, 19 nt, Homo sapiens
  misc_RNA (1)...(19): siRNA sense strand
gaaccccgcuucuaugaug

SEQ ID NO: 172203 - RNA, 19 nt, Homo sapiens
  misc_RNA (1)...(19): siRNA sense strand
ggacagcaucacaguggaa

SEQ ID NO: 172204 - RNA, 19 nt, Homo sapiens
  misc_RNA (1)...(19): siRNA sense strand
gggcguguaagguguguaa

SEQ ID NO: 172205 - RNA, 19 nt, Homo sapiens
  misc_RNA (1)...(19): siRNA sense strand
gaugaaaccaugcccaacu

SEQ ID NO: 172206 - RNA, 19 nt, Homo sapiens
  misc_RNA (1)...(19): siRNA sense strand
ucgaggcccugaagagaag

SEQ ID NO: 172207 - RNA, 19 nt, Homo sapiens
  misc_RNA (1)...(19): siRNA sense strand
gcguguaagguguguaaga

SEQ ID NO: 172208 - RNA, 19 nt, Homo sapiens
  misc_RNA (1)...(19): siRNA sense strand
guaagguguguaagaggaa

SEQ ID NO: 172209 - RNA, 19 nt, Homo sapiens
  misc_RNA (1)...(19): siRNA sense strand
cguguaagguguguaagag

SEQ ID NO: 172210 - RNA, 19 nt, Homo sapiens
  misc_RNA (1)...(19): siRNA sense strand
gcgcagugccauccaguac

SEQ ID NO: 172211 - RNA, 19 nt, Homo sapiens
  misc_RNA (1)...(19): siRNA sense strand
gggagaagcgcaggcucaa

SEQ ID NO: 172212 - RNA, 19 nt, Homo sapiens
  misc_RNA (1)...(19): siRNA sense strand
ggcucaagaaggugaauga

SEQ ID NO: 172213 - RNA, 19 nt, Homo sapiens
  misc_RNA (1)...(19): siRNA sense strand
ggaaaucacuucuggaguu

SEQ ID NO: 172214 - RNA, 19 nt, Homo sapiens
  misc_RNA (1)...(19): siRNA sense strand
gaaagaugaugcaaagaaa

SEQ ID NO: 172215 - RNA, 19 nt, Homo sapiens
  misc_RNA (1)...(19): siRNA sense strand
gaagaaaugccaaaugauu

SEQ ID NO: 172216 - RNA, 19 nt, Homo sapiens
  misc_RNA (1)...(19): siRNA sense strand
gaaagaaauugaggaacua

SEQ ID NO: 172217 - RNA, 19 nt, Homo sapiens
  misc_RNA (1)...(19): siRNA sense strand
ugaaagcacugcauguuaa

SEQ ID NO: 172218 - RNA, 19 nt, Homo sapiens
  misc_RNA (1)...(19): siRNA sense strand
gaacugcuacccgaaauua

SEQ ID NO: 172219 - RNA, 19 nt, Homo sapiens
  misc_RNA (1)...(19): siRNA sense strand
ggaagcagcuagucuuuua

SEQ ID NO: 172220 - RNA, 19 nt, Homo sapiens
  misc_RNA (1)...(19): siRNA sense strand
caaauugugugacugauau

SEQ ID NO: 172221 - RNA, 19 nt, Homo sapiens
  misc_RNA (1)...(19): siRNA sense strand
ggaaagaugaugcaaagaa

SEQ ID NO: 172222 - RNA, 19 nt, Homo sapiens
  misc_RNA (1)...(19): siRNA sense strand
ccgaagaaaugccaaauga

SEQ ID NO: 172223 - RNA, 19 nt, Homo sapiens
  misc_RNA (1)...(19): siRNA sense strand
agaagaggaugauaaagaa

SEQ ID NO: 172224 - RNA, 19 nt, Homo sapiens
  misc_RNA (1)...(19): siRNA sense strand
gaaauuagagagaagauag

SEQ ID NO: 172225 - RNA, 19 nt, Homo sapiens
  misc_RNA (1)...(19): siRNA sense strand
gaaaucacuucuggaguug

SEQ ID NO: 172226 - RNA, 19 nt, Homo sapiens
  misc_RNA (1)...(19): siRNA sense strand
gaagauagaagaugcaaag

SEQ ID NO: 172227 - RNA, 19 nt, Homo sapiens
  misc_RNA (1)...(19): siRNA sense strand
cagaauggcuguacuaaac

SEQ ID NO: 172228 - RNA, 19 nt, Homo sapiens
  misc_RNA (1)...(19): siRNA sense strand
ggaggaggcucuucagucu

SEQ ID NO: 172229 - RNA, 19 nt, Homo sapiens
  misc_RNA (1)...(19): siRNA sense strand
cagcaaaucuauugaaguc

SEQ ID NO: 172230 - RNA, 19 nt, Homo sapiens
  misc_RNA (1)...(19): siRNA sense strand
gcaaaucuauugaagucau

SEQ ID NO: 172231 - RNA, 19 nt, Homo sapiens
  misc_RNA (1)...(19): siRNA sense strand
caaagaaagccaaacaaga

SEQ ID NO: 172232 - RNA, 19 nt, Homo sapiens
  misc_RNA (1)...(19): siRNA sense strand
gcucagaagaggaugauaa

SEQ ID NO: 172233 - RNA, 19 nt, Homo sapiens
  misc_RNA (1)...(19): siRNA sense strand
guacaacucucaguaugau

SEQ ID NO: 172234 - RNA, 19 nt, Homo sapiens
  misc_RNA (1)...(19): siRNA sense strand
cagaagaggaugauaaaga

SEQ ID NO: 172235 - RNA, 19 nt, Homo sapiens
  misc_RNA (1)...(19): siRNA sense strand
gcacaguucagcaaaucua

SEQ ID NO: 172236 - RNA, 19 nt, Homo sapiens
  misc_RNA (1)...(19): siRNA sense strand
uaagaaguauggagagaca

SEQ ID NO: 172237 - RNA, 19 nt, Homo sapiens
  misc_RNA (1)...(19): siRNA sense strand
gcaaagaaagccaaacaag

SEQ ID NO: 172238 - RNA, 19 nt, Homo sapiens
  misc_RNA (1)...(19): siRNA sense strand
gaacuggcucugaaagcua

SEQ ID NO: 172239 - RNA, 19 nt, Homo sapiens
  misc_RNA (1)...(19): siRNA sense strand
caagaaagaaauugaggaa

SEQ ID NO: 172240 - RNA, 19 nt, Homo sapiens
  misc_RNA (1)...(19): siRNA sense strand
uagcugaacuggcucugaa

SEQ ID NO: 172241 - RNA, 19 nt, Homo sapiens
  misc_RNA (1)...(19): siRNA sense strand
agagacagcuaaugagugu

SEQ ID NO: 172242 - RNA, 19 nt, Homo sapiens
  misc_RNA (1)...(19): siRNA sense strand
ccugggauaugcuggauuu

SEQ ID NO: 172243 - RNA, 19 nt, Homo sapiens
  misc_RNA (1)...(19): siRNA sense strand
gaaaacaagucucuucaag

SEQ ID NO: 172244 - RNA, 19 nt, Homo sapiens
  misc_RNA (1)...(19): siRNA sense strand
ggaagaggaagaaggagaa

SEQ ID NO: 172245 - RNA, 19 nt, Homo sapiens
  misc_RNA (1)...(19): siRNA sense strand
gaagaggaaaccagaggaa

SEQ ID NO: 172246 - RNA, 19 nt, Homo sapiens
  misc_RNA (1)...(19): siRNA sense strand
gguaagaaguauggagaga

SEQ ID NO: 172247 - RNA, 19 nt, Homo sapiens
  misc_RNA (1)...(19): siRNA sense strand
ggaacuaaaggaacugcua

SEQ ID NO: 172248 - RNA, 19 nt, Homo sapiens
  misc_RNA (1)...(19): siRNA sense strand
agaaagaaauugaggaacu

SEQ ID NO: 172249 - RNA, 19 nt, Homo sapiens
  misc_RNA (1)...(19): siRNA sense strand
uaaacgagcaggugaagga

SEQ ID NO: 172250 - RNA, 19 nt, Homo sapiens
  misc_RNA (1)...(19): siRNA sense strand
gaagaggaugauaaagaaa

SEQ ID NO: 172251 - RNA, 19 nt, Homo sapiens
  misc_RNA (1)...(19): siRNA sense strand
ggugcuuccucaucaaauu

SEQ ID NO: 172252 - RNA, 19 nt, Homo sapiens
  misc_RNA (1)...(19): siRNA sense strand
gaguuccaguccugccuua

SEQ ID NO: 172253 - RNA, 19 nt, Homo sapiens
  misc_RNA (1)...(19): siRNA sense strand
aaagaaagccaaacaagag

SEQ ID NO: 172254 - RNA, 19 nt, Homo sapiens
  misc_RNA (1)...(19): siRNA sense strand
gcugguuucugccgacaaa

SEQ ID NO: 172255 - RNA, 19 nt, Homo sapiens
  misc_RNA (1)...(19): siRNA sense strand
gaauggcuguacuaaacga

SEQ ID NO: 172256 - RNA, 19 nt, Homo sapiens
  misc_RNA (1)...(19): siRNA sense strand
agaaugguguguugggaaa

SEQ ID NO: 172257 - RNA, 19 nt, Homo sapiens
  misc_RNA (1)...(19): siRNA sense strand
ccggaaagaugaugcaaag

SEQ ID NO: 172258 - RNA, 19 nt, Homo sapiens
  misc_RNA (1)...(19): siRNA sense strand
agacggugcuuccucauca

SEQ ID NO: 172259 - RNA, 19 nt, Homo sapiens
  misc_RNA (1)...(19): siRNA sense strand
cuauugaagucauugagaa

SEQ ID NO: 172260 - RNA, 19 nt, Homo sapiens
  misc_RNA (1)...(19): siRNA sense strand
ggguacaacucucaguaug

SEQ ID NO: 172261 - RNA, 19 nt, Homo sapiens
  misc_RNA (1)...(19): siRNA sense strand
ggauuuagcaaagaucauu

SEQ ID NO: 172262 - RNA, 19 nt, Homo sapiens
  misc_RNA (1)...(19): siRNA sense strand
cagcugggcuuggcuuaug

SEQ ID NO: 172263 - RNA, 19 nt, Homo sapiens
  misc_RNA (1)...(19): siRNA sense strand
gaucgucugcugaauacaa

SEQ ID NO: 172264 - RNA, 19 nt, Homo sapiens
  misc_RNA (1)...(19): siRNA sense strand
ggagagacagcuaaugagu

SEQ ID NO: 172265 - RNA, 19 nt, Homo sapiens
  misc_RNA (1)...(19): siRNA sense strand
ucaaauugugugacugaua

SEQ ID NO: 172266 - RNA, 19 nt, Homo sapiens
  misc_RNA (1)...(19): siRNA sense strand
gccaaaugauucaguccuu

SEQ ID NO: 172267 - RNA, 19 nt, Homo sapiens
  misc_RNA (1)...(19): siRNA sense strand
ugauaagaccgaagaaaug

SEQ ID NO: 172268 - RNA, 19 nt, Homo sapiens
  misc_RNA (1)...(19): siRNA sense strand
ggauagugaagcuaagaaa

SEQ ID NO: 172269 - RNA, 19 nt, Homo sapiens
  misc_RNA (1)...(19): siRNA sense strand
caaaugauucaguccuuga

SEQ ID NO: 172270 - RNA, 19 nt, Homo sapiens
  misc_RNA (1)...(19): siRNA sense strand
gagcuugccugggauaugc

SEQ ID NO: 172271 - RNA, 19 nt, Homo sapiens
  misc_RNA (1)...(19): siRNA sense strand
ggcuggagcuacaguugaa

SEQ ID NO: 172272 - RNA, 19 nt, Homo sapiens
  misc_RNA (1)...(19): siRNA sense strand
caucaaauugugugacuga

SEQ ID NO: 172273 - RNA, 19 nt, Homo sapiens
  misc_RNA (1)...(19): siRNA sense strand
gcucuucagucuccaugau

SEQ ID NO: 172274 - RNA, 19 nt, Homo sapiens
  misc_RNA (1)...(19): siRNA sense strand
gguacaacucucaguauga

SEQ ID NO: 172275 - RNA, 19 nt, Homo sapiens
  misc_RNA (1)...(19): siRNA sense strand
ggaggagauugggaaccua

SEQ ID NO: 172276 - RNA, 19 nt, Homo sapiens
  misc_RNA (1)...(19): siRNA sense strand
gaaaccagaggaagagagu

SEQ ID NO: 172277 - RNA, 19 nt, Homo sapiens
  misc_RNA (1)...(19): siRNA sense strand
cagcuagucuuuuagguaa

SEQ ID NO: 172278 - RNA, 19 nt, Homo sapiens
  misc_RNA (1)...(19): siRNA sense strand
gaaggaucgucugcugaau

SEQ ID NO: 172279 - RNA, 19 nt, Homo sapiens
  misc_RNA (1)...(19): siRNA sense strand
cggagaaguuaguguugaa

SEQ ID NO: 172280 - RNA, 19 nt, Homo sapiens
  misc_RNA (1)...(19): siRNA sense strand
uuagagagaagauagaaga

SEQ ID NO: 172281 - RNA, 19 nt, Homo sapiens
  misc_RNA (1)...(19): siRNA sense strand
uugaaagcacugcauguua

SEQ ID NO: 172282 - RNA, 19 nt, Homo sapiens
  misc_RNA (1)...(19): siRNA sense strand
gaagaggaagaaggagaaa

SEQ ID NO: 172283 - RNA, 19 nt, Homo sapiens
  misc_RNA (1)...(19): siRNA sense strand
gaaauugaggaacuaaagg

SEQ ID NO: 172284 - RNA, 19 nt, Homo sapiens
  misc_RNA (1)...(19): siRNA sense strand
gggauaugcuggauuuagc

SEQ ID NO: 172285 - RNA, 19 nt, Homo sapiens
  misc_RNA (1)...(19): siRNA sense strand
gguggagaguucuacuuca

SEQ ID NO: 172286 - RNA, 19 nt, Homo sapiens
  misc_RNA (1)...(19): siRNA sense strand
ugaaggaucgucugcugaa

SEQ ID NO: 172287 - RNA, 19 nt, Homo sapiens
  misc_RNA (1)...(19): siRNA sense strand
gcuaaugaguguggagaag

SEQ ID NO: 172288 - RNA, 19 nt, Homo sapiens
  misc_RNA (1)...(19): siRNA sense strand
uggcaagaauggagaaugg

SEQ ID NO: 172289 - RNA, 19 nt, Homo sapiens
  misc_RNA (1)...(19): siRNA sense strand
ggaagagaguccccggaaa

SEQ ID NO: 172290 - RNA, 19 nt, Homo sapiens
  misc_RNA (1)...(19): siRNA sense strand
cgaaauuagagagaagaua

SEQ ID NO: 172291 - RNA, 19 nt, Homo sapiens
  misc_RNA (1)...(19): siRNA sense strand
ggaacugcuacccgaaauu

SEQ ID NO: 172292 - RNA, 19 nt, Homo sapiens
  misc_RNA (1)...(19): siRNA sense strand
gccuuaaccugcaggaaca

SEQ ID NO: 172293 - RNA, 19 nt, Homo sapiens
  misc_RNA (1)...(19): siRNA sense strand
ggaggaggaggcugagaau

SEQ ID NO: 172294 - RNA, 19 nt, Homo sapiens
  misc_RNA (1)...(19): siRNA sense strand
aauggagaaugguguguug

SEQ ID NO: 172295 - RNA, 19 nt, Homo sapiens
  misc_RNA (1)...(19): siRNA sense strand
ccaggcacaucuuaaacuc

SEQ ID NO: 172296 - RNA, 19 nt, Homo sapiens
  misc_RNA (1)...(19): siRNA sense strand
gaauggagaaugguguguu

SEQ ID NO: 172297 - RNA, 19 nt, Homo sapiens
  misc_RNA (1)...(19): siRNA sense strand
aaggaucgucugcugaaua

SEQ ID NO: 172298 - RNA, 19 nt, Homo sapiens
  misc_RNA (1)...(19): siRNA sense strand
agaaguuaguguugaaucu

SEQ ID NO: 172299 - RNA, 19 nt, Homo sapiens
  misc_RNA (1)...(19): siRNA sense strand
ggauguggauagugaagcu

SEQ ID NO: 172300 - RNA, 19 nt, Homo sapiens
  misc_RNA (1)...(19): siRNA sense strand
aacaagagccggaggugaa

SEQ ID NO: 172301 - RNA, 19 nt, Homo sapiens
  misc_RNA (1)...(19): siRNA sense strand
gauauuucccaccuuguca

SEQ ID NO: 172302 - RNA, 19 nt, Homo sapiens
  misc_RNA (1)...(19): siRNA sense strand
ccaggaagcagcuagucuu

SEQ ID NO: 172303 - RNA, 19 nt, Homo sapiens
  misc_RNA (1)...(19): siRNA sense strand
ugaagucauugagaacaga

SEQ ID NO: 172304 - RNA, 19 nt, Homo sapiens
  misc_RNA (1)...(19): siRNA sense strand
gauaagaccgaagaaaugc

SEQ ID NO: 172305 - RNA, 19 nt, Homo sapiens
  misc_RNA (1)...(19): siRNA sense strand
guugaaagcacugcauguu

SEQ ID NO: 172306 - RNA, 19 nt, Homo sapiens
  misc_RNA (1)...(19): siRNA sense strand
caggaagcagcuagucuuu

SEQ ID NO: 172307 - RNA, 19 nt, Homo sapiens
  misc_RNA (1)...(19): siRNA sense strand
gaagucauugagaacagaa

SEQ ID NO: 172308 - RNA, 19 nt, Homo sapiens
  misc_RNA (1)...(19): siRNA sense strand
ccacgaccgucuccuugca

SEQ ID NO: 172309 - RNA, 19 nt, Homo sapiens
  misc_RNA (1)...(19): siRNA sense strand
aaguuaguguugaaucuga

SEQ ID NO: 172310 - RNA, 19 nt, Homo sapiens
  misc_RNA (1)...(19): siRNA sense strand
gaaguuaguguugaaucug

SEQ ID NO: 172311 - RNA, 19 nt, Homo sapiens
  misc_RNA (1)...(19): siRNA sense strand
agaaaugccaaaugauuca

SEQ ID NO: 172312 - RNA, 19 nt, Homo sapiens
  misc_RNA (1)...(19): siRNA sense strand
ucggagaaguuaguguuga

SEQ ID NO: 172313 - RNA, 19 nt, Homo sapiens
  misc_RNA (1)...(19): siRNA sense strand
ggaaaucacuucuggaguu

SEQ ID NO: 172314 - RNA, 19 nt, Homo sapiens
  misc_RNA (1)...(19): siRNA sense strand
gaaagaugaugcaaagaaa

SEQ ID NO: 172315 - RNA, 19 nt, Homo sapiens
  misc_RNA (1)...(19): siRNA sense strand
gaagaaaugccaaaugauu

SEQ ID NO: 172316 - RNA, 19 nt, Homo sapiens
  misc_RNA (1)...(19): siRNA sense strand
gaaagaaauugaggaacua

SEQ ID NO: 172317 - RNA, 19 nt, Homo sapiens
  misc_RNA (1)...(19): siRNA sense strand
ugaaagcacugcauguuaa

SEQ ID NO: 172318 - RNA, 19 nt, Homo sapiens
  misc_RNA (1)...(19): siRNA sense strand
gaacugcuacccgaaauua

SEQ ID NO: 172319 - RNA, 19 nt, Homo sapiens
  misc_RNA (1)...(19): siRNA sense strand
ggaagcagcuagucuuuua

SEQ ID NO: 172320 - RNA, 19 nt, Homo sapiens
  misc_RNA (1)...(19): siRNA sense strand
caaauugugugacugauau

SEQ ID NO: 172321 - RNA, 19 nt, Homo sapiens
  misc_RNA (1)...(19): siRNA sense strand
ggaaagaugaugcaaagaa

SEQ ID NO: 172322 - RNA, 19 nt, Homo sapiens
  misc_RNA (1)...(19): siRNA sense strand
ccgaagaaaugccaaauga

SEQ ID NO: 172323 - RNA, 19 nt, Homo sapiens
  misc_RNA (1)...(19): siRNA sense strand
agaagaggaugauaaagaa

SEQ ID NO: 172324 - RNA, 19 nt, Homo sapiens
  misc_RNA (1)...(19): siRNA sense strand
gaaauuagagagaagauag

SEQ ID NO: 172325 - RNA, 19 nt, Homo sapiens
  misc_RNA (1)...(19): siRNA sense strand
gaaaucacuucuggaguug

SEQ ID NO: 172326 - RNA, 19 nt, Homo sapiens
  misc_RNA (1)...(19): siRNA sense strand
gaagauagaagaugcaaag

SEQ ID NO: 172327 - RNA, 19 nt, Homo sapiens
  misc_RNA (1)...(19): siRNA sense strand
cagaauggcuguacuaaac

SEQ ID NO: 172328 - RNA, 19 nt, Homo sapiens
  misc_RNA (1)...(19): siRNA sense strand
ggaggaggcucuucagucu

SEQ ID NO: 172329 - RNA, 19 nt, Homo sapiens
  misc_RNA (1)...(19): siRNA sense strand
cagcaaaucuauugaaguc

SEQ ID NO: 172330 - RNA, 19 nt, Homo sapiens
  misc_RNA (1)...(19): siRNA sense strand
gcaaaucuauugaagucau

SEQ ID NO: 172331 - RNA, 19 nt, Homo sapiens
  misc_RNA (1)...(19): siRNA sense strand
caaagaaagccaaacaaga

SEQ ID NO: 172332 - RNA, 19 nt, Homo sapiens
  misc_RNA (1)...(19): siRNA sense strand
gcucagaagaggaugauaa

SEQ ID NO: 172333 - RNA, 19 nt, Homo sapiens
  misc_RNA (1)...(19): siRNA sense strand
guacaacucucaguaugau

SEQ ID NO: 172334 - RNA, 19 nt, Homo sapiens
  misc_RNA (1)...(19): siRNA sense strand
cagaagaggaugauaaaga

SEQ ID NO: 172335 - RNA, 19 nt, Homo sapiens
  misc_RNA (1)...(19): siRNA sense strand
gcacaguucagcaaaucua

SEQ ID NO: 172336 - RNA, 19 nt, Homo sapiens
  misc_RNA (1)...(19): siRNA sense strand
uaagaaguauggagagaca

SEQ ID NO: 172337 - RNA, 19 nt, Homo sapiens
  misc_RNA (1)...(19): siRNA sense strand
gcaaagaaagccaaacaag

SEQ ID NO: 172338 - RNA, 19 nt, Homo sapiens
  misc_RNA (1)...(19): siRNA sense strand
gaacuggcucugaaagcua

SEQ ID NO: 172339 - RNA, 19 nt, Homo sapiens
  misc_RNA (1)...(19): siRNA sense strand
caagaaagaaauugaggaa

SEQ ID NO: 172340 - RNA, 19 nt, Homo sapiens
  misc_RNA (1)...(19): siRNA sense strand
uagcugaacuggcucugaa

SEQ ID NO: 172341 - RNA, 19 nt, Homo sapiens
  misc_RNA (1)...(19): siRNA sense strand
agagacagcuaaugagugu

SEQ ID NO: 172342 - RNA, 19 nt, Homo sapiens
  misc_RNA (1)...(19): siRNA sense strand
ccugggauaugcuggauuu

SEQ ID NO: 172343 - RNA, 19 nt, Homo sapiens
  misc_RNA (1)...(19): siRNA sense strand
gaaaacaagucucuucaag

SEQ ID NO: 172344 - RNA, 19 nt, Homo sapiens
  misc_RNA (1)...(19): siRNA sense strand
ggaagaggaagaaggagaa

SEQ ID NO: 172345 - RNA, 19 nt, Homo sapiens
  misc_RNA (1)...(19): siRNA sense strand
gaagaggaaaccagaggaa

SEQ ID NO: 172346 - RNA, 19 nt, Homo sapiens
  misc_RNA (1)...(19): siRNA sense strand
gguaagaaguauggagaga

SEQ ID NO: 172347 - RNA, 19 nt, Homo sapiens
  misc_RNA (1)...(19): siRNA sense strand
ggaacuaaaggaacugcua

SEQ ID NO: 172348 - RNA, 19 nt, Homo sapiens
  misc_RNA (1)...(19): siRNA sense strand
agaaagaaauugaggaacu

SEQ ID NO: 172349 - RNA, 19 nt, Homo sapiens
  misc_RNA (1)...(19): siRNA sense strand
uaaacgagcaggugaagga

SEQ ID NO: 172350 - RNA, 19 nt, Homo sapiens
  misc_RNA (1)...(19): siRNA sense strand
gaagaggaugauaaagaaa

SEQ ID NO: 172351 - RNA, 19 nt, Homo sapiens
  misc_RNA (1)...(19): siRNA sense strand
ggugcuuccucaucaaauu

SEQ ID NO: 172352 - RNA, 19 nt, Homo sapiens
  misc_RNA (1)...(19): siRNA sense strand
gaguuccaguccugccuua

SEQ ID NO: 172353 - RNA, 19 nt, Homo sapiens
  misc_RNA (1)...(19): siRNA sense strand
aaagaaagccaaacaagag

SEQ ID NO: 172354 - RNA, 19 nt, Homo sapiens
  misc_RNA (1)...(19): siRNA sense strand
gcugguuucugccgacaaa

SEQ ID NO: 172355 - RNA, 19 nt, Homo sapiens
  misc_RNA (1)...(19): siRNA sense strand
gaauggcuguacuaaacga

SEQ ID NO: 172356 - RNA, 19 nt, Homo sapiens
  misc_RNA (1)...(19): siRNA sense strand
agaaugguguguugggaaa

SEQ ID NO: 172357 - RNA, 19 nt, Homo sapiens
  misc_RNA (1)...(19): siRNA sense strand
ccggaaagaugaugcaaag

SEQ ID NO: 172358 - RNA, 19 nt, Homo sapiens
  misc_RNA (1)...(19): siRNA sense strand
agacggugcuuccucauca

SEQ ID NO: 172359 - RNA, 19 nt, Homo sapiens
  misc_RNA (1)...(19): siRNA sense strand
cuauugaagucauugagaa

SEQ ID NO: 172360 - RNA, 19 nt, Homo sapiens
  misc_RNA (1)...(19): siRNA sense strand
ggguacaacucucaguaug

SEQ ID NO: 172361 - RNA, 19 nt, Homo sapiens
  misc_RNA (1)...(19): siRNA sense strand
ggauuuagcaaagaucauu

SEQ ID NO: 172362 - RNA, 19 nt, Homo sapiens
  misc_RNA (1)...(19): siRNA sense strand
cagcugggcuuggcuuaug

SEQ ID NO: 172363 - RNA, 19 nt, Homo sapiens
  misc_RNA (1)...(19): siRNA sense strand
gaucgucugcugaauacaa

SEQ ID NO: 172364 - RNA, 19 nt, Homo sapiens
  misc_RNA (1)...(19): siRNA sense strand
ggagagacagcuaaugagu

SEQ ID NO: 172365 - RNA, 19 nt, Homo sapiens
  misc_RNA (1)...(19): siRNA sense strand
ucaaauugugugacugaua

SEQ ID NO: 172366 - RNA, 19 nt, Homo sapiens
  misc_RNA (1)...(19): siRNA sense strand
gccaaaugauucaguccuu

SEQ ID NO: 172367 - RNA, 19 nt, Homo sapiens
  misc_RNA (1)...(19): siRNA sense strand
ugauaagaccgaagaaaug

SEQ ID NO: 172368 - RNA, 19 nt, Homo sapiens
  misc_RNA (1)...(19): siRNA sense strand
ggauagugaagcuaagaaa

SEQ ID NO: 172369 - RNA, 19 nt, Homo sapiens
  misc_RNA (1)...(19): siRNA sense strand
caaaugauucaguccuuga

SEQ ID NO: 172370 - RNA, 19 nt, Homo sapiens
  misc_RNA (1)...(19): siRNA sense strand
gagcuugccugggauaugc

SEQ ID NO: 172371 - RNA, 19 nt, Homo sapiens
  misc_RNA (1)...(19): siRNA sense strand
ggcuggagcuacaguugaa

SEQ ID NO: 172372 - RNA, 19 nt, Homo sapiens
  misc_RNA (1)...(19): siRNA sense strand
caucaaauugugugacuga

SEQ ID NO: 172373 - RNA, 19 nt, Homo sapiens
  misc_RNA (1)...(19): siRNA sense strand
gcucuucagucuccaugau

SEQ ID NO: 172374 - RNA, 19 nt, Homo sapiens
  misc_RNA (1)...(19): siRNA sense strand
gguacaacucucaguauga

SEQ ID NO: 172375 - RNA, 19 nt, Homo sapiens
  misc_RNA (1)...(19): siRNA sense strand
ggaggagauugggaaccua

SEQ ID NO: 172376 - RNA, 19 nt, Homo sapiens
  misc_RNA (1)...(19): siRNA sense strand
gaaaccagaggaagagagu

SEQ ID NO: 172377 - RNA, 19 nt, Homo sapiens
  misc_RNA (1)...(19): siRNA sense strand
cagcuagucuuuuagguaa

SEQ ID NO: 172378 - RNA, 19 nt, Homo sapiens
  misc_RNA (1)...(19): siRNA sense strand
gaaggaucgucugcugaau

SEQ ID NO: 172379 - RNA, 19 nt, Homo sapiens
  misc_RNA (1)...(19): siRNA sense strand
cggagaaguuaguguugaa

SEQ ID NO: 172380 - RNA, 19 nt, Homo sapiens
  misc_RNA (1)...(19): siRNA sense strand
uuagagagaagauagaaga

SEQ ID NO: 172381 - RNA, 19 nt, Homo sapiens
  misc_RNA (1)...(19): siRNA sense strand
uugaaagcacugcauguua

SEQ ID NO: 172382 - RNA, 19 nt, Homo sapiens
  misc_RNA (1)...(19): siRNA sense strand
gaagaggaagaaggagaaa

SEQ ID NO: 172383 - RNA, 19 nt, Homo sapiens
  misc_RNA (1)...(19): siRNA sense strand
gaaauugaggaacuaaagg

SEQ ID NO: 172384 - RNA, 19 nt, Homo sapiens
  misc_RNA (1)...(19): siRNA sense strand
gggauaugcuggauuuagc

SEQ ID NO: 172385 - RNA, 19 nt, Homo sapiens
  misc_RNA (1)...(19): siRNA sense strand
gguggagaguucuacuuca

SEQ ID NO: 172386 - RNA, 19 nt, Homo sapiens
  misc_RNA (1)...(19): siRNA sense strand
ugaaggaucgucugcugaa

SEQ ID NO: 172387 - RNA, 19 nt, Homo sapiens
  misc_RNA (1)...(19): siRNA sense strand
gcuaaugaguguggagaag

SEQ ID NO: 172388 - RNA, 19 nt, Homo sapiens
  misc_RNA (1)...(19): siRNA sense strand
uggcaagaauggagaaugg

SEQ ID NO: 172389 - RNA, 19 nt, Homo sapiens
  misc_RNA (1)...(19): siRNA sense strand
ggaagagaguccccggaaa

SEQ ID NO: 172390 - RNA, 19 nt, Homo sapiens
  misc_RNA (1)...(19): siRNA sense strand
cgaaauuagagagaagaua

SEQ ID NO: 172391 - RNA, 19 nt, Homo sapiens
  misc_RNA (1)...(19): siRNA sense strand
ggaacugcuacccgaaauu

SEQ ID NO: 172392 - RNA, 19 nt, Homo sapiens
  misc_RNA (1)...(19): siRNA sense strand
gccuuaaccugcaggaaca

SEQ ID NO: 172393 - RNA, 19 nt, Homo sapiens
  misc_RNA (1)...(19): siRNA sense strand
ggaggaggaggcugagaau

SEQ ID NO: 172394 - RNA, 19 nt, Homo sapiens
  misc_RNA (1)...(19): siRNA sense strand
aauggagaaugguguguug

SEQ ID NO: 172395 - RNA, 19 nt, Homo sapiens
  misc_RNA (1)...(19): siRNA sense strand
ccaggcacaucuuaaacuc

SEQ ID NO: 172396 - RNA, 19 nt, Homo sapiens
  misc_RNA (1)...(19): siRNA sense strand
gaauggagaaugguguguu

SEQ ID NO: 172397 - RNA, 19 nt, Homo sapiens
  misc_RNA (1)...(19): siRNA sense strand
aaggaucgucugcugaaua

SEQ ID NO: 172398 - RNA, 19 nt, Homo sapiens
  misc_RNA (1)...(19): siRNA sense strand
agaaguuaguguugaaucu

SEQ ID NO: 172399 - RNA, 19 nt, Homo sapiens
  misc_RNA (1)...(19): siRNA sense strand
ggauguggauagugaagcu

SEQ ID NO: 172400 - RNA, 19 nt, Homo sapiens
  misc_RNA (1)...(19): siRNA sense strand
aacaagagccggaggugaa

SEQ ID NO: 172401 - RNA, 19 nt, Homo sapiens
  misc_RNA (1)...(19): siRNA sense strand
gauauuucccaccuuguca

SEQ ID NO: 172402 - RNA, 19 nt, Homo sapiens
  misc_RNA (1)...(19): siRNA sense strand
ccaggaagcagcuagucuu

SEQ ID NO: 172403 - RNA, 19 nt, Homo sapiens
  misc_RNA (1)...(19): siRNA sense strand
ugaagucauugagaacaga

SEQ ID NO: 172404 - RNA, 19 nt, Homo sapiens
  misc_RNA (1)...(19): siRNA sense strand
gauaagaccgaagaaaugc

SEQ ID NO: 172405 - RNA, 19 nt, Homo sapiens
  misc_RNA (1)...(19): siRNA sense strand
guugaaagcacugcauguu

SEQ ID NO: 172406 - RNA, 19 nt, Homo sapiens
  misc_RNA (1)...(19): siRNA sense strand
caggaagcagcuagucuuu

SEQ ID NO: 172407 - RNA, 19 nt, Homo sapiens
  misc_RNA (1)...(19): siRNA sense strand
gaagucauugagaacagaa

SEQ ID NO: 172408 - RNA, 19 nt, Homo sapiens
  misc_RNA (1)...(19): siRNA sense strand
ccacgaccgucuccuugca

SEQ ID NO: 172409 - RNA, 19 nt, Homo sapiens
  misc_RNA (1)...(19): siRNA sense strand
aaguuaguguugaaucuga

SEQ ID NO: 172410 - RNA, 19 nt, Homo sapiens
  misc_RNA (1)...(19): siRNA sense strand
gaaguuaguguugaaucug

SEQ ID NO: 172411 - RNA, 19 nt, Homo sapiens
  misc_RNA (1)...(19): siRNA sense strand
agaaaugccaaaugauuca

SEQ ID NO: 172412 - RNA, 19 nt, Homo sapiens
  misc_RNA (1)...(19): siRNA sense strand
ucggagaaguuaguguuga

SEQ ID NO: 172413 - RNA, 19 nt, Homo sapiens
  misc_RNA (1)...(19): siRNA sense strand
ggaaaucacuucuggaguu

SEQ ID NO: 172414 - RNA, 19 nt, Homo sapiens
  misc_RNA (1)...(19): siRNA sense strand
gaaagaugaugcaaagaaa

SEQ ID NO: 172415 - RNA, 19 nt, Homo sapiens
  misc_RNA (1)...(19): siRNA sense strand
gaagaaaugccaaaugauu

SEQ ID NO: 172416 - RNA, 19 nt, Homo sapiens
  misc_RNA (1)...(19): siRNA sense strand
gaaagaaauugaggaacua

SEQ ID NO: 172417 - RNA, 19 nt, Homo sapiens
  misc_RNA (1)...(19): siRNA sense strand
ugaaagcacugcauguuaa

SEQ ID NO: 172418 - RNA, 19 nt, Homo sapiens
  misc_RNA (1)...(19): siRNA sense strand
gaacugcuacccgaaauua

SEQ ID NO: 172419 - RNA, 19 nt, Homo sapiens
  misc_RNA (1)...(19): siRNA sense strand
ggaagcagcuagucuuuua

SEQ ID NO: 172420 - RNA, 19 nt, Homo sapiens
  misc_RNA (1)...(19): siRNA sense strand
caaauugugugacugauau

SEQ ID NO: 172421 - RNA, 19 nt, Homo sapiens
  misc_RNA (1)...(19): siRNA sense strand
ggaaagaugaugcaaagaa

SEQ ID NO: 172422 - RNA, 19 nt, Homo sapiens
  misc_RNA (1)...(19): siRNA sense strand
ccgaagaaaugccaaauga

SEQ ID NO: 172423 - RNA, 19 nt, Homo sapiens
  misc_RNA (1)...(19): siRNA sense strand
agaagaggaugauaaagaa

SEQ ID NO: 172424 - RNA, 19 nt, Homo sapiens
  misc_RNA (1)...(19): siRNA sense strand
gaaauuagagagaagauag

SEQ ID NO: 172425 - RNA, 19 nt, Homo sapiens
  misc_RNA (1)...(19): siRNA sense strand
gaaaucacuucuggaguug

SEQ ID NO: 172426 - RNA, 19 nt, Homo sapiens
  misc_RNA (1)...(19): siRNA sense strand
gaagauagaagaugcaaag

SEQ ID NO: 172427 - RNA, 19 nt, Homo sapiens
  misc_RNA (1)...(19): siRNA sense strand
cagaauggcuguacuaaac

SEQ ID NO: 172428 - RNA, 19 nt, Homo sapiens
  misc_RNA (1)...(19): siRNA sense strand
ggaggaggcucuucagucu

SEQ ID NO: 172429 - RNA, 19 nt, Homo sapiens
  misc_RNA (1)...(19): siRNA sense strand
cagcaaaucuauugaaguc

SEQ ID NO: 172430 - RNA, 19 nt, Homo sapiens
  misc_RNA (1)...(19): siRNA sense strand
gcaaaucuauugaagucau

SEQ ID NO: 172431 - RNA, 19 nt, Homo sapiens
  misc_RNA (1)...(19): siRNA sense strand
caaagaaagccaaacaaga

SEQ ID NO: 172432 - RNA, 19 nt, Homo sapiens
  misc_RNA (1)...(19): siRNA sense strand
gcucagaagaggaugauaa

SEQ ID NO: 172433 - RNA, 19 nt, Homo sapiens
  misc_RNA (1)...(19): siRNA sense strand
guacaacucucaguaugau

SEQ ID NO: 172434 - RNA, 19 nt, Homo sapiens
  misc_RNA (1)...(19): siRNA sense strand
cagaagaggaugauaaaga

SEQ ID NO: 172435 - RNA, 19 nt, Homo sapiens
  misc_RNA (1)...(19): siRNA sense strand
gcacaguucagcaaaucua

SEQ ID NO: 172436 - RNA, 19 nt, Homo sapiens
  misc_RNA (1)...(19): siRNA sense strand
uaagaaguauggagagaca

SEQ ID NO: 172437 - RNA, 19 nt, Homo sapiens
  misc_RNA (1)...(19): siRNA sense strand
gcaaagaaagccaaacaag

SEQ ID NO: 172438 - RNA, 19 nt, Homo sapiens
  misc_RNA (1)...(19): siRNA sense strand
gaacuggcucugaaagcua

SEQ ID NO: 172439 - RNA, 19 nt, Homo sapiens
  misc_RNA (1)...(19): siRNA sense strand
caagaaagaaauugaggaa

SEQ ID NO: 172440 - RNA, 19 nt, Homo sapiens
  misc_RNA (1)...(19): siRNA sense strand
uagcugaacuggcucugaa

SEQ ID NO: 172441 - RNA, 19 nt, Homo sapiens
  misc_RNA (1)...(19): siRNA sense strand
agagacagcuaaugagugu

SEQ ID NO: 172442 - RNA, 19 nt, Homo sapiens
  misc_RNA (1)...(19): siRNA sense strand
ccugggauaugcuggauuu

SEQ ID NO: 172443 - RNA, 19 nt, Homo sapiens
  misc_RNA (1)...(19): siRNA sense strand
gaaaacaagucucuucaag

SEQ ID NO: 172444 - RNA, 19 nt, Homo sapiens
  misc_RNA (1)...(19): siRNA sense strand
ggaagaggaagaaggagaa

SEQ ID NO: 172445 - RNA, 19 nt, Homo sapiens
  misc_RNA (1)...(19): siRNA sense strand
gaagaggaaaccagaggaa

SEQ ID NO: 172446 - RNA, 19 nt, Homo sapiens
  misc_RNA (1)...(19): siRNA sense strand
gguaagaaguauggagaga

SEQ ID NO: 172447 - RNA, 19 nt, Homo sapiens
  misc_RNA (1)...(19): siRNA sense strand
ggaacuaaaggaacugcua

SEQ ID NO: 172448 - RNA, 19 nt, Homo sapiens
  misc_RNA (1)...(19): siRNA sense strand
agaaagaaauugaggaacu

SEQ ID NO: 172449 - RNA, 19 nt, Homo sapiens
  misc_RNA (1)...(19): siRNA sense strand
uaaacgagcaggugaagga

SEQ ID NO: 172450 - RNA, 19 nt, Homo sapiens
  misc_RNA (1)...(19): siRNA sense strand
gaagaggaugauaaagaaa

SEQ ID NO: 172451 - RNA, 19 nt, Homo sapiens
  misc_RNA (1)...(19): siRNA sense strand
ggugcuuccucaucaaauu

SEQ ID NO: 172452 - RNA, 19 nt, Homo sapiens
  misc_RNA (1)...(19): siRNA sense strand
gaguuccaguccugccuua

SEQ ID NO: 172453 - RNA, 19 nt, Homo sapiens
  misc_RNA (1)...(19): siRNA sense strand
aaagaaagccaaacaagag

SEQ ID NO: 172454 - RNA, 19 nt, Homo sapiens
  misc_RNA (1)...(19): siRNA sense strand
gaauggcuguacuaaacga

SEQ ID NO: 172455 - RNA, 19 nt, Homo sapiens
  misc_RNA (1)...(19): siRNA sense strand
agaaugguguguugggaaa

SEQ ID NO: 172456 - RNA, 19 nt, Homo sapiens
  misc_RNA (1)...(19): siRNA sense strand
ccggaaagaugaugcaaag

SEQ ID NO: 172457 - RNA, 19 nt, Homo sapiens
  misc_RNA (1)...(19): siRNA sense strand
agacggugcuuccucauca

SEQ ID NO: 172458 - RNA, 19 nt, Homo sapiens
  misc_RNA (1)...(19): siRNA sense strand
cuauugaagucauugagaa

SEQ ID NO: 172459 - RNA, 19 nt, Homo sapiens
  misc_RNA (1)...(19): siRNA sense strand
ggguacaacucucaguaug

SEQ ID NO: 172460 - RNA, 19 nt, Homo sapiens
  misc_RNA (1)...(19): siRNA sense strand
ggauuuagcaaagaucauu

SEQ ID NO: 172461 - RNA, 19 nt, Homo sapiens
  misc_RNA (1)...(19): siRNA sense strand
cagcugggcuuggcuuaug

SEQ ID NO: 172462 - RNA, 19 nt, Homo sapiens
  misc_RNA (1)...(19): siRNA sense strand
gaucgucugcugaauacaa

SEQ ID NO: 172463 - RNA, 19 nt, Homo sapiens
  misc_RNA (1)...(19): siRNA sense strand
gccaaaugauucaguccuu

SEQ ID NO: 172464 - RNA, 19 nt, Homo sapiens
  misc_RNA (1)...(19): siRNA sense strand
ucaaauugugugacugaua

SEQ ID NO: 172465 - RNA, 19 nt, Homo sapiens
  misc_RNA (1)...(19): siRNA sense strand
ggagagacagcuaaugagu

SEQ ID NO: 172466 - RNA, 19 nt, Homo sapiens
  misc_RNA (1)...(19): siRNA sense strand
ugauaagaccgaagaaaug

SEQ ID NO: 172467 - RNA, 19 nt, Homo sapiens
  misc_RNA (1)...(19): siRNA sense strand
caaaugauucaguccuuga

SEQ ID NO: 172468 - RNA, 19 nt, Homo sapiens
  misc_RNA (1)...(19): siRNA sense strand
ggauagugaagcuaagaaa

SEQ ID NO: 172469 - RNA, 19 nt, Homo sapiens
  misc_RNA (1)...(19): siRNA sense strand
gagcuugccugggauaugc

SEQ ID NO: 172470 - RNA, 19 nt, Homo sapiens
  misc_RNA (1)...(19): siRNA sense strand
ggcuggagcuacaguugaa

SEQ ID NO: 172471 - RNA, 19 nt, Homo sapiens
  misc_RNA (1)...(19): siRNA sense strand
caucaaauugugugacuga

SEQ ID NO: 172472 - RNA, 19 nt, Homo sapiens
  misc_RNA (1)...(19): siRNA sense strand
gcucuucagucuccaugau

SEQ ID NO: 172473 - RNA, 19 nt, Homo sapiens
  misc_RNA (1)...(19): siRNA sense strand
gguacaacucucaguauga

SEQ ID NO: 172474 - RNA, 19 nt, Homo sapiens
  misc_RNA (1)...(19): siRNA sense strand
ggaggagauugggaaccua

SEQ ID NO: 172475 - RNA, 19 nt, Homo sapiens
  misc_RNA (1)...(19): siRNA sense strand
gaaaccagaggaagagagu

SEQ ID NO: 172476 - RNA, 19 nt, Homo sapiens
  misc_RNA (1)...(19): siRNA sense strand
gaaggaucgucugcugaau

SEQ ID NO: 172477 - RNA, 19 nt, Homo sapiens
  misc_RNA (1)...(19): siRNA sense strand
cagcuagucuuuuagguaa

SEQ ID NO: 172478 - RNA, 19 nt, Homo sapiens
  misc_RNA (1)...(19): siRNA sense strand
cggagaaguuaguguugaa

SEQ ID NO: 172479 - RNA, 19 nt, Homo sapiens
  misc_RNA (1)...(19): siRNA sense strand
uuagagagaagauagaaga

SEQ ID NO: 172480 - RNA, 19 nt, Homo sapiens
  misc_RNA (1)...(19): siRNA sense strand
uugaaagcacugcauguua

SEQ ID NO: 172481 - RNA, 19 nt, Homo sapiens
  misc_RNA (1)...(19): siRNA sense strand
gaagaggaagaaggagaaa

SEQ ID NO: 172482 - RNA, 19 nt, Homo sapiens
  misc_RNA (1)...(19): siRNA sense strand
gaaauugaggaacuaaagg

SEQ ID NO: 172483 - RNA, 19 nt, Homo sapiens
  misc_RNA (1)...(19): siRNA sense strand
gggauaugcuggauuuagc

SEQ ID NO: 172484 - RNA, 19 nt, Homo sapiens
  misc_RNA (1)...(19): siRNA sense strand
gguggagaguucuacuuca

SEQ ID NO: 172485 - RNA, 19 nt, Homo sapiens
  misc_RNA (1)...(19): siRNA sense strand
ugaaggaucgucugcugaa

SEQ ID NO: 172486 - RNA, 19 nt, Homo sapiens
  misc_RNA (1)...(19): siRNA sense strand
gcuaaugaguguggagaag

SEQ ID NO: 172487 - RNA, 19 nt, Homo sapiens
  misc_RNA (1)...(19): siRNA sense strand
uggcaagaauggagaaugg

SEQ ID NO: 172488 - RNA, 19 nt, Homo sapiens
  misc_RNA (1)...(19): siRNA sense strand
ggaagagaguccccggaaa

SEQ ID NO: 172489 - RNA, 19 nt, Homo sapiens
  misc_RNA (1)...(19): siRNA sense strand
cgaaauuagagagaagaua

SEQ ID NO: 172490 - RNA, 19 nt, Homo sapiens
  misc_RNA (1)...(19): siRNA sense strand
ggaacugcuacccgaaauu

SEQ ID NO: 172491 - RNA, 19 nt, Homo sapiens
  misc_RNA (1)...(19): siRNA sense strand
aauggagaaugguguguug

SEQ ID NO: 172492 - RNA, 19 nt, Homo sapiens
  misc_RNA (1)...(19): siRNA sense strand
ggaggaggaggcugagaau

SEQ ID NO: 172493 - RNA, 19 nt, Homo sapiens
  misc_RNA (1)...(19): siRNA sense strand
gccuuaaccugcaggaaca

SEQ ID NO: 172494 - RNA, 19 nt, Homo sapiens
  misc_RNA (1)...(19): siRNA sense strand
ccaggcacaucuuaaacuc

SEQ ID NO: 172495 - RNA, 19 nt, Homo sapiens
  misc_RNA (1)...(19): siRNA sense strand
aaggaucgucugcugaaua

SEQ ID NO: 172496 - RNA, 19 nt, Homo sapiens
  misc_RNA (1)...(19): siRNA sense strand
gaauggagaaugguguguu

SEQ ID NO: 172497 - RNA, 19 nt, Homo sapiens
  misc_RNA (1)...(19): siRNA sense strand
agaaguuaguguugaaucu

SEQ ID NO: 172498 - RNA, 19 nt, Homo sapiens
  misc_RNA (1)...(19): siRNA sense strand
ggauguggauagugaagcu

SEQ ID NO: 172499 - RNA, 19 nt, Homo sapiens
  misc_RNA (1)...(19): siRNA sense strand
aacaagagccggaggugaa

SEQ ID NO: 172500 - RNA, 19 nt, Homo sapiens
  misc_RNA (1)...(19): siRNA sense strand
ccaggaagcagcuagucuu

SEQ ID NO: 172501 - RNA, 19 nt, Homo sapiens
  misc_RNA (1)...(19): siRNA sense strand
gauauuucccaccuuguca

SEQ ID NO: 172502 - RNA, 19 nt, Homo sapiens
  misc_RNA (1)...(19): siRNA sense strand
ugaagucauugagaacaga

SEQ ID NO: 172503 - RNA, 19 nt, Homo sapiens
  misc_RNA (1)...(19): siRNA sense strand
gauaagaccgaagaaaugc

SEQ ID NO: 172504 - RNA, 19 nt, Homo sapiens
  misc_RNA (1)...(19): siRNA sense strand
guugaaagcacugcauguu

SEQ ID NO: 172505 - RNA, 19 nt, Homo sapiens
  misc_RNA (1)...(19): siRNA sense strand
caggaagcagcuagucuuu

SEQ ID NO: 172506 - RNA, 19 nt, Homo sapiens
  misc_RNA (1)...(19): siRNA sense strand
gaagucauugagaacagaa

SEQ ID NO: 172507 - RNA, 19 nt, Homo sapiens
  misc_RNA (1)...(19): siRNA sense strand
ccacgaccgucuccuugca

SEQ ID NO: 172508 - RNA, 19 nt, Homo sapiens
  misc_RNA (1)...(19): siRNA sense strand
aaguuaguguugaaucuga

SEQ ID NO: 172509 - RNA, 19 nt, Homo sapiens
  misc_RNA (1)...(19): siRNA sense strand
gaaguuaguguugaaucug

SEQ ID NO: 172510 - RNA, 19 nt, Homo sapiens
  misc_RNA (1)...(19): siRNA sense strand
agaaaugccaaaugauuca

SEQ ID NO: 172511 - RNA, 19 nt, Homo sapiens
  misc_RNA (1)...(19): siRNA sense strand
ucggagaaguuaguguuga

SEQ ID NO: 172512 - RNA, 19 nt, Homo sapiens
  misc_RNA (1)...(19): siRNA sense strand
gcugaauacaagaaagaaa

SEQ ID NO: 172513 - RNA, 19 nt, Homo sapiens
  misc_RNA (1)...(19): siRNA sense strand
gagcacagauuguucaaac

SEQ ID NO: 172514 - RNA, 19 nt, Homo sapiens
  misc_RNA (1)...(19): siRNA sense strand
aaaccaagccgaugaagaa

SEQ ID NO: 172515 - RNA, 19 nt, Homo sapiens
  misc_RNA (1)...(19): siRNA sense strand
caaaggagagaaggaaaua

SEQ ID NO: 172516 - RNA, 19 nt, Homo sapiens
  misc_RNA (1)...(19): siRNA sense strand
cagagaugcuugaagaaga

SEQ ID NO: 172517 - RNA, 19 nt, Homo sapiens
  misc_RNA (1)...(19): siRNA sense strand
cgacagagcagauuguugu

SEQ ID NO: 172518 - RNA, 19 nt, Homo sapiens
  misc_RNA (1)...(19): siRNA sense strand
gaaggaaauaccugcauga

SEQ ID NO: 172519 - RNA, 19 nt, Homo sapiens
  misc_RNA (1)...(19): siRNA sense strand
gaagaagcaaugacacaga

SEQ ID NO: 172520 - RNA, 19 nt, Homo sapiens
  misc_RNA (1)...(19): siRNA sense strand
gcaaacagcaauaguucga

SEQ ID NO: 172521 - RNA, 19 nt, Homo sapiens
  misc_RNA (1)...(19): siRNA sense strand
ggacaaggucaaaccauca

SEQ ID NO: 172522 - RNA, 19 nt, Homo sapiens
  misc_RNA (1)...(19): siRNA sense strand
caucgucuaucaaccaguu

SEQ ID NO: 172523 - RNA, 19 nt, Homo sapiens
  misc_RNA (1)...(19): siRNA sense strand
cuacgugaaugccaaacaa

SEQ ID NO: 172524 - RNA, 19 nt, Homo sapiens
  misc_RNA (1)...(19): siRNA sense strand
gaggcaagcccgagcuaaa

SEQ ID NO: 172525 - RNA, 19 nt, Homo sapiens
  misc_RNA (1)...(19): siRNA sense strand
gcaccauucuccagcaagu

SEQ ID NO: 172526 - RNA, 19 nt, Homo sapiens
  misc_RNA (1)...(19): siRNA sense strand
uggugaagguggacgauuu

SEQ ID NO: 172527 - RNA, 19 nt, Homo sapiens
  misc_RNA (1)...(19): siRNA sense strand
gaagcaaugacacagauca

SEQ ID NO: 172528 - RNA, 19 nt, Homo sapiens
  misc_RNA (1)...(19): siRNA sense strand
caggcaauguggucaauuc

SEQ ID NO: 172529 - RNA, 19 nt, Homo sapiens
  misc_RNA (1)...(19): siRNA sense strand
ccaagccgaugaagaagca

SEQ ID NO: 172530 - RNA, 19 nt, Homo sapiens
  misc_RNA (1)...(19): siRNA sense strand
gaggccagcuaaucacauc

SEQ ID NO: 172531 - RNA, 19 nt, Homo sapiens
  misc_RNA (1)...(19): siRNA sense strand
caggagggauggucaugau

SEQ ID NO: 172532 - RNA, 19 nt, Homo sapiens
  misc_RNA (1)...(19): siRNA sense strand
cagcaaacagcaauaguuc

SEQ ID NO: 172533 - RNA, 19 nt, Homo sapiens
  misc_RNA (1)...(19): siRNA sense strand
gcaagcccgagcuaaacua

SEQ ID NO: 172534 - RNA, 19 nt, Homo sapiens
  misc_RNA (1)...(19): siRNA sense strand
guucaaacaggagccaaua

SEQ ID NO: 172535 - RNA, 19 nt, Homo sapiens
  misc_RNA (1)...(19): siRNA sense strand
gcagagaugcuugaagaag

SEQ ID NO: 172536 - RNA, 19 nt, Homo sapiens
  misc_RNA (1)...(19): siRNA sense strand
uuucaggcaugaucacuau

SEQ ID NO: 172537 - RNA, 19 nt, Homo sapiens
  misc_RNA (1)...(19): siRNA sense strand
aagaagcaaugacacagau

SEQ ID NO: 172538 - RNA, 19 nt, Homo sapiens
  misc_RNA (1)...(19): siRNA sense strand
aaacaggagccaauaccaa

SEQ ID NO: 172539 - RNA, 19 nt, Homo sapiens
  misc_RNA (1)...(19): siRNA sense strand
caaaccaagccgaugaaga

SEQ ID NO: 172540 - RNA, 19 nt, Homo sapiens
  misc_RNA (1)...(19): siRNA sense strand
cagcuaaucacaucaacug

SEQ ID NO: 172541 - RNA, 19 nt, Homo sapiens
  misc_RNA (1)...(19): siRNA sense strand
gaucauccgaguguccuaa

SEQ ID NO: 172542 - RNA, 19 nt, Homo sapiens
  misc_RNA (1)...(19): siRNA sense strand
ccaaaggagagaaggaaau

SEQ ID NO: 172543 - RNA, 19 nt, Homo sapiens
  misc_RNA (1)...(19): siRNA sense strand
gagccucucuacgugaaug

SEQ ID NO: 172544 - RNA, 19 nt, Homo sapiens
  misc_RNA (1)...(19): siRNA sense strand
gaaauaccugcaugagucu

SEQ ID NO: 172545 - RNA, 19 nt, Homo sapiens
  misc_RNA (1)...(19): siRNA sense strand
gaaaaggauaguccccaua

SEQ ID NO: 172546 - RNA, 19 nt, Homo sapiens
  misc_RNA (1)...(19): siRNA sense strand
gucaaaccaucaugcaagu

SEQ ID NO: 172547 - RNA, 19 nt, Homo sapiens
  misc_RNA (1)...(19): siRNA sense strand
ggacagcaaguggcacaga

SEQ ID NO: 172548 - RNA, 19 nt, Homo sapiens
  misc_RNA (1)...(19): siRNA sense strand
ggccagacccagcagauca

SEQ ID NO: 172549 - RNA, 19 nt, Homo sapiens
  misc_RNA (1)...(19): siRNA sense strand
ggcaagggacugucacugu

SEQ ID NO: 172550 - RNA, 19 nt, Homo sapiens
  misc_RNA (1)...(19): siRNA sense strand
ccaagggcagccauuaaug

SEQ ID NO: 172551 - RNA, 19 nt, Homo sapiens
  misc_RNA (1)...(19): siRNA sense strand
gcaggagcacagauuguuc

SEQ ID NO: 172552 - RNA, 19 nt, Homo sapiens
  misc_RNA (1)...(19): siRNA sense strand
caaaccaucaugcaaguac

SEQ ID NO: 172553 - RNA, 19 nt, Homo sapiens
  misc_RNA (1)...(19): siRNA sense strand
gagggauggucaugauggu

SEQ ID NO: 172554 - RNA, 19 nt, Homo sapiens
  misc_RNA (1)...(19): siRNA sense strand
guccaagggcagccauuaa

SEQ ID NO: 172555 - RNA, 19 nt, Homo sapiens
  misc_RNA (1)...(19): siRNA sense strand
acagcaaacagcaauaguu

SEQ ID NO: 172556 - RNA, 19 nt, Homo sapiens
  misc_RNA (1)...(19): siRNA sense strand
ggaggcaagcccgagcuaa

SEQ ID NO: 172557 - RNA, 19 nt, Homo sapiens
  misc_RNA (1)...(19): siRNA sense strand
guauacagcaaacagcaau

SEQ ID NO: 172558 - RNA, 19 nt, Homo sapiens
  misc_RNA (1)...(19): siRNA sense strand
ggcaggagcacagauuguu

SEQ ID NO: 172559 - RNA, 19 nt, Homo sapiens
  misc_RNA (1)...(19): siRNA sense strand
uaugcaggauccaaaccaa

SEQ ID NO: 172560 - RNA, 19 nt, Homo sapiens
  misc_RNA (1)...(19): siRNA sense strand
gagaaggaaauaccugcau

SEQ ID NO: 172561 - RNA, 19 nt, Homo sapiens
  misc_RNA (1)...(19): siRNA sense strand
agagaugcuugaagaagag

SEQ ID NO: 172562 - RNA, 19 nt, Homo sapiens
  misc_RNA (1)...(19): siRNA sense strand
ggagcaguauacagcaaac

SEQ ID NO: 172563 - RNA, 19 nt, Homo sapiens
  misc_RNA (1)...(19): siRNA sense strand
ucaacuggccaacccauca

SEQ ID NO: 172564 - RNA, 19 nt, Homo sapiens
  misc_RNA (1)...(19): siRNA sense strand
gaccaucgucuaucaacca

SEQ ID NO: 172565 - RNA, 19 nt, Homo sapiens
  misc_RNA (1)...(19): siRNA sense strand
gagccaauaccaacacaac

SEQ ID NO: 172566 - RNA, 19 nt, Homo sapiens
  misc_RNA (1)...(19): siRNA sense strand
ggucaguggaggccagcua

SEQ ID NO: 172567 - RNA, 19 nt, Homo sapiens
  misc_RNA (1)...(19): siRNA sense strand
ucaaccaguuaaugcagau

SEQ ID NO: 172568 - RNA, 19 nt, Homo sapiens
  misc_RNA (1)...(19): siRNA sense strand
caaguaccuguuucuggaa

SEQ ID NO: 172569 - RNA, 19 nt, Homo sapiens
  misc_RNA (1)...(19): siRNA sense strand
cgaugaagaagcaaugaca

SEQ ID NO: 172570 - RNA, 19 nt, Homo sapiens
  misc_RNA (1)...(19): siRNA sense strand
accauucuccagcaaguua

SEQ ID NO: 172571 - RNA, 19 nt, Homo sapiens
  misc_RNA (1)...(19): siRNA sense strand
agacacagcagcagauugc

SEQ ID NO: 172572 - RNA, 19 nt, Homo sapiens
  misc_RNA (1)...(19): siRNA sense strand
caucaugcaaguaccuguu

SEQ ID NO: 172573 - RNA, 19 nt, Homo sapiens
  misc_RNA (1)...(19): siRNA sense strand
ggcaggcaauguggucaau

SEQ ID NO: 172574 - RNA, 19 nt, Homo sapiens
  misc_RNA (1)...(19): siRNA sense strand
caggagcacagauuguuca

SEQ ID NO: 172575 - RNA, 19 nt, Homo sapiens
  misc_RNA (1)...(19): siRNA sense strand
acgugaaugccaaacaaua

SEQ ID NO: 172576 - RNA, 19 nt, Homo sapiens
  misc_RNA (1)...(19): siRNA sense strand
caaacaggagccaauacca

SEQ ID NO: 172577 - RNA, 19 nt, Homo sapiens
  misc_RNA (1)...(19): siRNA sense strand
ggagcacagauuguucaaa

SEQ ID NO: 172578 - RNA, 19 nt, Homo sapiens
  misc_RNA (1)...(19): siRNA sense strand
ugccugcuauccaaagaau

SEQ ID NO: 172579 - RNA, 19 nt, Homo sapiens
  misc_RNA (1)...(19): siRNA sense strand
ccaaagaaucccucuaccu

SEQ ID NO: 172580 - RNA, 19 nt, Homo sapiens
  misc_RNA (1)...(19): siRNA sense strand
gagcacagauuguucaaac

SEQ ID NO: 172581 - RNA, 19 nt, Homo sapiens
  misc_RNA (1)...(19): siRNA sense strand
aaaccaagccgaugaagaa

SEQ ID NO: 172582 - RNA, 19 nt, Homo sapiens
  misc_RNA (1)...(19): siRNA sense strand
caaaggagagaaggaaaua

SEQ ID NO: 172583 - RNA, 19 nt, Homo sapiens
  misc_RNA (1)...(19): siRNA sense strand
cagagaugcuugaagaaga

SEQ ID NO: 172584 - RNA, 19 nt, Homo sapiens
  misc_RNA (1)...(19): siRNA sense strand
cgacagagcagauuguugu

SEQ ID NO: 172585 - RNA, 19 nt, Homo sapiens
  misc_RNA (1)...(19): siRNA sense strand
gaaggaaauaccugcauga

SEQ ID NO: 172586 - RNA, 19 nt, Homo sapiens
  misc_RNA (1)...(19): siRNA sense strand
gaagaagcaaugacacaga

SEQ ID NO: 172587 - RNA, 19 nt, Homo sapiens
  misc_RNA (1)...(19): siRNA sense strand
gcaaacagcaauaguucga

SEQ ID NO: 172588 - RNA, 19 nt, Homo sapiens
  misc_RNA (1)...(19): siRNA sense strand
ggacaaggucaaaccauca

SEQ ID NO: 172589 - RNA, 19 nt, Homo sapiens
  misc_RNA (1)...(19): siRNA sense strand
caucgucuaucaaccaguu

SEQ ID NO: 172590 - RNA, 19 nt, Homo sapiens
  misc_RNA (1)...(19): siRNA sense strand
cuacgugaaugccaaacaa

SEQ ID NO: 172591 - RNA, 19 nt, Homo sapiens
  misc_RNA (1)...(19): siRNA sense strand
gaggcaagcccgagcuaaa

SEQ ID NO: 172592 - RNA, 19 nt, Homo sapiens
  misc_RNA (1)...(19): siRNA sense strand
gcaccauucuccagcaagu

SEQ ID NO: 172593 - RNA, 19 nt, Homo sapiens
  misc_RNA (1)...(19): siRNA sense strand
uggugaagguggacgauuu

SEQ ID NO: 172594 - RNA, 19 nt, Homo sapiens
  misc_RNA (1)...(19): siRNA sense strand
gaagcaaugacacagauca

SEQ ID NO: 172595 - RNA, 19 nt, Homo sapiens
  misc_RNA (1)...(19): siRNA sense strand
caggcaauguggucaauuc

SEQ ID NO: 172596 - RNA, 19 nt, Homo sapiens
  misc_RNA (1)...(19): siRNA sense strand
ccaagccgaugaagaagca

SEQ ID NO: 172597 - RNA, 19 nt, Homo sapiens
  misc_RNA (1)...(19): siRNA sense strand
gaggccagcuaaucacauc

SEQ ID NO: 172598 - RNA, 19 nt, Homo sapiens
  misc_RNA (1)...(19): siRNA sense strand
caggagggauggucaugau

SEQ ID NO: 172599 - RNA, 19 nt, Homo sapiens
  misc_RNA (1)...(19): siRNA sense strand
cagcaaacagcaauaguuc

SEQ ID NO: 172600 - RNA, 19 nt, Homo sapiens
  misc_RNA (1)...(19): siRNA sense strand
gcaagcccgagcuaaacua

SEQ ID NO: 172601 - RNA, 19 nt, Homo sapiens
  misc_RNA (1)...(19): siRNA sense strand
guucaaacaggagccaaua

SEQ ID NO: 172602 - RNA, 19 nt, Homo sapiens
  misc_RNA (1)...(19): siRNA sense strand
gcagagaugcuugaagaag

SEQ ID NO: 172603 - RNA, 19 nt, Homo sapiens
  misc_RNA (1)...(19): siRNA sense strand
uuucaggcaugaucacuau

SEQ ID NO: 172604 - RNA, 19 nt, Homo sapiens
  misc_RNA (1)...(19): siRNA sense strand
aagaagcaaugacacagau

SEQ ID NO: 172605 - RNA, 19 nt, Homo sapiens
  misc_RNA (1)...(19): siRNA sense strand
aaacaggagccaauaccaa

SEQ ID NO: 172606 - RNA, 19 nt, Homo sapiens
  misc_RNA (1)...(19): siRNA sense strand
caaaccaagccgaugaaga

SEQ ID NO: 172607 - RNA, 19 nt, Homo sapiens
  misc_RNA (1)...(19): siRNA sense strand
cagcuaaucacaucaacug

SEQ ID NO: 172608 - RNA, 19 nt, Homo sapiens
  misc_RNA (1)...(19): siRNA sense strand
gaucauccgaguguccuaa

SEQ ID NO: 172609 - RNA, 19 nt, Homo sapiens
  misc_RNA (1)...(19): siRNA sense strand
ccaaaggagagaaggaaau

SEQ ID NO: 172610 - RNA, 19 nt, Homo sapiens
  misc_RNA (1)...(19): siRNA sense strand
gagccucucuacgugaaug

SEQ ID NO: 172611 - RNA, 19 nt, Homo sapiens
  misc_RNA (1)...(19): siRNA sense strand
gaaauaccugcaugagucu

SEQ ID NO: 172612 - RNA, 19 nt, Homo sapiens
  misc_RNA (1)...(19): siRNA sense strand
gaaaaggauaguccccaua

SEQ ID NO: 172613 - RNA, 19 nt, Homo sapiens
  misc_RNA (1)...(19): siRNA sense strand
gucaaaccaucaugcaagu

SEQ ID NO: 172614 - RNA, 19 nt, Homo sapiens
  misc_RNA (1)...(19): siRNA sense strand
ggacagcaaguggcacaga

SEQ ID NO: 172615 - RNA, 19 nt, Homo sapiens
  misc_RNA (1)...(19): siRNA sense strand
ggccagacccagcagauca

SEQ ID NO: 172616 - RNA, 19 nt, Homo sapiens
  misc_RNA (1)...(19): siRNA sense strand
ggcaagggacugucacugu

SEQ ID NO: 172617 - RNA, 19 nt, Homo sapiens
  misc_RNA (1)...(19): siRNA sense strand
ccaagggcagccauuaaug

SEQ ID NO: 172618 - RNA, 19 nt, Homo sapiens
  misc_RNA (1)...(19): siRNA sense strand
gcaggagcacagauuguuc

SEQ ID NO: 172619 - RNA, 19 nt, Homo sapiens
  misc_RNA (1)...(19): siRNA sense strand
caaaccaucaugcaaguac

SEQ ID NO: 172620 - RNA, 19 nt, Homo sapiens
  misc_RNA (1)...(19): siRNA sense strand
gagggauggucaugauggu

SEQ ID NO: 172621 - RNA, 19 nt, Homo sapiens
  misc_RNA (1)...(19): siRNA sense strand
guccaagggcagccauuaa

SEQ ID NO: 172622 - RNA, 19 nt, Homo sapiens
  misc_RNA (1)...(19): siRNA sense strand
acagcaaacagcaauaguu

SEQ ID NO: 172623 - RNA, 19 nt, Homo sapiens
  misc_RNA (1)...(19): siRNA sense strand
ggaggcaagcccgagcuaa

SEQ ID NO: 172624 - RNA, 19 nt, Homo sapiens
  misc_RNA (1)...(19): siRNA sense strand
guauacagcaaacagcaau

SEQ ID NO: 172625 - RNA, 19 nt, Homo sapiens
  misc_RNA (1)...(19): siRNA sense strand
ggcaggagcacagauuguu

SEQ ID NO: 172626 - RNA, 19 nt, Homo sapiens
  misc_RNA (1)...(19): siRNA sense strand
uaugcaggauccaaaccaa

SEQ ID NO: 172627 - RNA, 19 nt, Homo sapiens
  misc_RNA (1)...(19): siRNA sense strand
gagaaggaaauaccugcau

SEQ ID NO: 172628 - RNA, 19 nt, Homo sapiens
  misc_RNA (1)...(19): siRNA sense strand
agagaugcuugaagaagag

SEQ ID NO: 172629 - RNA, 19 nt, Homo sapiens
  misc_RNA (1)...(19): siRNA sense strand
ggagcaguauacagcaaac

SEQ ID NO: 172630 - RNA, 19 nt, Homo sapiens
  misc_RNA (1)...(19): siRNA sense strand
ucaacuggccaacccauca

SEQ ID NO: 172631 - RNA, 19 nt, Homo sapiens
  misc_RNA (1)...(19): siRNA sense strand
gaccaucgucuaucaacca

SEQ ID NO: 172632 - RNA, 19 nt, Homo sapiens
  misc_RNA (1)...(19): siRNA sense strand
gagccaauaccaacacaac

SEQ ID NO: 172633 - RNA, 19 nt, Homo sapiens
  misc_RNA (1)...(19): siRNA sense strand
ggucaguggaggccagcua

SEQ ID NO: 172634 - RNA, 19 nt, Homo sapiens
  misc_RNA (1)...(19): siRNA sense strand
ucaaccaguuaaugcagau

SEQ ID NO: 172635 - RNA, 19 nt, Homo sapiens
  misc_RNA (1)...(19): siRNA sense strand
caaguaccuguuucuggaa

SEQ ID NO: 172636 - RNA, 19 nt, Homo sapiens
  misc_RNA (1)...(19): siRNA sense strand
cgaugaagaagcaaugaca

SEQ ID NO: 172637 - RNA, 19 nt, Homo sapiens
  misc_RNA (1)...(19): siRNA sense strand
accauucuccagcaaguua

SEQ ID NO: 172638 - RNA, 19 nt, Homo sapiens
  misc_RNA (1)...(19): siRNA sense strand
agacacagcagcagauugc

SEQ ID NO: 172639 - RNA, 19 nt, Homo sapiens
  misc_RNA (1)...(19): siRNA sense strand
caucaugcaaguaccuguu

SEQ ID NO: 172640 - RNA, 19 nt, Homo sapiens
  misc_RNA (1)...(19): siRNA sense strand
ggcaggcaauguggucaau

SEQ ID NO: 172641 - RNA, 19 nt, Homo sapiens
  misc_RNA (1)...(19): siRNA sense strand
caggagcacagauuguuca

SEQ ID NO: 172642 - RNA, 19 nt, Homo sapiens
  misc_RNA (1)...(19): siRNA sense strand
acgugaaugccaaacaaua

SEQ ID NO: 172643 - RNA, 19 nt, Homo sapiens
  misc_RNA (1)...(19): siRNA sense strand
caaacaggagccaauacca

SEQ ID NO: 172644 - RNA, 19 nt, Homo sapiens
  misc_RNA (1)...(19): siRNA sense strand
ggagcacagauuguucaaa

SEQ ID NO: 172645 - RNA, 19 nt, Homo sapiens
  misc_RNA (1)...(19): siRNA sense strand
ugccugcuauccaaagaau

SEQ ID NO: 172646 - RNA, 19 nt, Homo sapiens
  misc_RNA (1)...(19): siRNA sense strand
ccaaagaaucccucuaccu

SEQ ID NO: 172647 - RNA, 19 nt, Homo sapiens
  misc_RNA (1)...(19): siRNA sense strand
gagaagaacugcagaaaug

SEQ ID NO: 172648 - RNA, 19 nt, Homo sapiens
  misc_RNA (1)...(19): siRNA sense strand
uaacagauauggccacuuu

SEQ ID NO: 172649 - RNA, 19 nt, Homo sapiens
  misc_RNA (1)...(19): siRNA sense strand
gaagaacgaucgaaauuca

SEQ ID NO: 172650 - RNA, 19 nt, Homo sapiens
  misc_RNA (1)...(19): siRNA sense strand
gaaaaugacuggaaugaaa

SEQ ID NO: 172651 - RNA, 19 nt, Homo sapiens
  misc_RNA (1)...(19): siRNA sense strand
gaugaaaacugccagauua

SEQ ID NO: 172652 - RNA, 19 nt, Homo sapiens
  misc_RNA (1)...(19): siRNA sense strand
gagggaaucuuagagguua

SEQ ID NO: 172653 - RNA, 19 nt, Homo sapiens
  misc_RNA (1)...(19): siRNA sense strand
gaauacaacccaauagaaa

SEQ ID NO: 172654 - RNA, 19 nt, Homo sapiens
  misc_RNA (1)...(19): siRNA sense strand
ggauaauacuggccuguuu

SEQ ID NO: 172655 - RNA, 19 nt, Homo sapiens
  misc_RNA (1)...(19): siRNA sense strand
ccugaaagcucccuaauag

SEQ ID NO: 172656 - RNA, 19 nt, Homo sapiens
  misc_RNA (1)...(19): siRNA sense strand
aauggaaccuucagccuua

SEQ ID NO: 172657 - RNA, 19 nt, Homo sapiens
  misc_RNA (1)...(19): siRNA sense strand
cgacgaaaccuuccucaaa

SEQ ID NO: 172658 - RNA, 19 nt, Homo sapiens
  misc_RNA (1)...(19): siRNA sense strand
ggaauacaacccaauagaa

SEQ ID NO: 172659 - RNA, 19 nt, Homo sapiens
  misc_RNA (1)...(19): siRNA sense strand
ugaaagaccuucugcuuac

SEQ ID NO: 172660 - RNA, 19 nt, Homo sapiens
  misc_RNA (1)...(19): siRNA sense strand
ggagcacaaucaauuaaau

SEQ ID NO: 172661 - RNA, 19 nt, Homo sapiens
  misc_RNA (1)...(19): siRNA sense strand
gcuccuggcugcaagauug

SEQ ID NO: 172662 - RNA, 19 nt, Homo sapiens
  misc_RNA (1)...(19): siRNA sense strand
gccaaacgauuucaugaug

SEQ ID NO: 172663 - RNA, 19 nt, Homo sapiens
  misc_RNA (1)...(19): siRNA sense strand
gacgaaaccuuccucaaag

SEQ ID NO: 172664 - RNA, 19 nt, Homo sapiens
  misc_RNA (1)...(19): siRNA sense strand
gcagaaaugaggcugguuu

SEQ ID NO: 172665 - RNA, 19 nt, Homo sapiens
  misc_RNA (1)...(19): siRNA sense strand
caaggaauacaacccaaua

SEQ ID NO: 172666 - RNA, 19 nt, Homo sapiens
  misc_RNA (1)...(19): siRNA sense strand
gaaaugaggcugguuuauc

SEQ ID NO: 172667 - RNA, 19 nt, Homo sapiens
  misc_RNA (1)...(19): siRNA sense strand
ggaggucuguaccaucauu

SEQ ID NO: 172668 - RNA, 19 nt, Homo sapiens
  misc_RNA (1)...(19): siRNA sense strand
gcaaaggccugagugucuu

SEQ ID NO: 172669 - RNA, 19 nt, Homo sapiens
  misc_RNA (1)...(19): siRNA sense strand
gacccagccucgccuuuaa

SEQ ID NO: 172670 - RNA, 19 nt, Homo sapiens
  misc_RNA (1)...(19): siRNA sense strand
ccacacacuuggucaguau

SEQ ID NO: 172671 - RNA, 19 nt, Homo sapiens
  misc_RNA (1)...(19): siRNA sense strand
gagggagcacaaucaauua

SEQ ID NO: 172672 - RNA, 19 nt, Homo sapiens
  misc_RNA (1)...(19): siRNA sense strand
cagaagaacgaucgaaauu

SEQ ID NO: 172673 - RNA, 19 nt, Homo sapiens
  misc_RNA (1)...(19): siRNA sense strand
ccaagaauuuaaaggaguu

SEQ ID NO: 172674 - RNA, 19 nt, Homo sapiens
  misc_RNA (1)...(19): siRNA sense strand
ucaaagaucuccccauuau

SEQ ID NO: 172675 - RNA, 19 nt, Homo sapiens
  misc_RNA (1)...(19): siRNA sense strand
uuaaauggcuggucuucug

SEQ ID NO: 172676 - RNA, 19 nt, Homo sapiens
  misc_RNA (1)...(19): siRNA sense strand
gaaauugggacgauguuca

SEQ ID NO: 172677 - RNA, 19 nt, Homo sapiens
  misc_RNA (1)...(19): siRNA sense strand
cauaacgucuucccugaug

SEQ ID NO: 172678 - RNA, 19 nt, Homo sapiens
  misc_RNA (1)...(19): siRNA sense strand
uggagaagauggaauuuca

SEQ ID NO: 172679 - RNA, 19 nt, Homo sapiens
  misc_RNA (1)...(19): siRNA sense strand
gaaagauguguacguggua

SEQ ID NO: 172680 - RNA, 19 nt, Homo sapiens
  misc_RNA (1)...(19): siRNA sense strand
caaacgauuucaugaugug

SEQ ID NO: 172681 - RNA, 19 nt, Homo sapiens
  misc_RNA (1)...(19): siRNA sense strand
aaaugaggcugguuuaucu

SEQ ID NO: 172682 - RNA, 19 nt, Homo sapiens
  misc_RNA (1)...(19): siRNA sense strand
ggauggagaagauggaauu

SEQ ID NO: 172683 - RNA, 19 nt, Homo sapiens
  misc_RNA (1)...(19): siRNA sense strand
ugagggagcacaaucaauu

SEQ ID NO: 172684 - RNA, 19 nt, Homo sapiens
  misc_RNA (1)...(19): siRNA sense strand
cucgugggcucaaauauaa

SEQ ID NO: 172685 - RNA, 19 nt, Homo sapiens
  misc_RNA (1)...(19): siRNA sense strand
ggaauuucaucuacgucuu

SEQ ID NO: 172686 - RNA, 19 nt, Homo sapiens
  misc_RNA (1)...(19): siRNA sense strand
cuagccacuuccucaauua

SEQ ID NO: 172687 - RNA, 19 nt, Homo sapiens
  misc_RNA (1)...(19): siRNA sense strand
cagaucagauuccuguguu

SEQ ID NO: 172688 - RNA, 19 nt, Homo sapiens
  misc_RNA (1)...(19): siRNA sense strand
gggacgauguucagugaga

SEQ ID NO: 172689 - RNA, 19 nt, Homo sapiens
  misc_RNA (1)...(19): siRNA sense strand
gaaagaccuucugcuuaca

SEQ ID NO: 172690 - RNA, 19 nt, Homo sapiens
  misc_RNA (1)...(19): siRNA sense strand
acacguaugugcucaaugg

SEQ ID NO: 172691 - RNA, 19 nt, Homo sapiens
  misc_RNA (1)...(19): siRNA sense strand
ugacuauguuccagaagaa

SEQ ID NO: 172692 - RNA, 19 nt, Homo sapiens
  misc_RNA (1)...(19): siRNA sense strand
ccaaacgauuucaugaugu

SEQ ID NO: 172693 - RNA, 19 nt, Homo sapiens
  misc_RNA (1)...(19): siRNA sense strand
ggaauguggucagaagcaa

SEQ ID NO: 172694 - RNA, 19 nt, Homo sapiens
  misc_RNA (1)...(19): siRNA sense strand
gaugacagacguccugaug

SEQ ID NO: 172695 - RNA, 19 nt, Homo sapiens
  misc_RNA (1)...(19): siRNA sense strand
ccaaucauacugugaauca

SEQ ID NO: 172696 - RNA, 19 nt, Homo sapiens
  misc_RNA (1)...(19): siRNA sense strand
gagcacaaucaauuaaaug

SEQ ID NO: 172697 - RNA, 19 nt, Homo sapiens
  misc_RNA (1)...(19): siRNA sense strand
gauaauacuggccuguuug

SEQ ID NO: 172698 - RNA, 19 nt, Homo sapiens
  misc_RNA (1)...(19): siRNA sense strand
gugacuauguuccagaaga

SEQ ID NO: 172699 - RNA, 19 nt, Homo sapiens
  misc_RNA (1)...(19): siRNA sense strand
ccuagccacuuccucaauu

SEQ ID NO: 172700 - RNA, 19 nt, Homo sapiens
  misc_RNA (1)...(19): siRNA sense strand
ggauguggaugagaugugu

SEQ ID NO: 172701 - RNA, 19 nt, Homo sapiens
  misc_RNA (1)...(19): siRNA sense strand
ccucgugggcucaaauaua

SEQ ID NO: 172702 - RNA, 19 nt, Homo sapiens
  misc_RNA (1)...(19): siRNA sense strand
ucagugagaguuucuguga

SEQ ID NO: 172703 - RNA, 19 nt, Homo sapiens
  misc_RNA (1)...(19): siRNA sense strand
cagaaaugaggcugguuua

SEQ ID NO: 172704 - RNA, 19 nt, Homo sapiens
  misc_RNA (1)...(19): siRNA sense strand
uauguuugauguccugauu

SEQ ID NO: 172705 - RNA, 19 nt, Homo sapiens
  misc_RNA (1)...(19): siRNA sense strand
cgagcacccugauuucugu

SEQ ID NO: 172706 - RNA, 19 nt, Homo sapiens
  misc_RNA (1)...(19): siRNA sense strand
aauacuggccuguuuguuu

SEQ ID NO: 172707 - RNA, 19 nt, Homo sapiens
  misc_RNA (1)...(19): siRNA sense strand
ccucaauuauucuaccauu

SEQ ID NO: 172708 - RNA, 19 nt, Homo sapiens
  misc_RNA (1)...(19): siRNA sense strand
uggcuggucuucugaugaa

SEQ ID NO: 172709 - RNA, 19 nt, Homo sapiens
  misc_RNA (1)...(19): siRNA sense strand
caagccaccaucacaauug

SEQ ID NO: 172710 - RNA, 19 nt, Homo sapiens
  misc_RNA (1)...(19): siRNA sense strand
gaaugucucuacuauuucc

SEQ ID NO: 172711 - RNA, 19 nt, Homo sapiens
  misc_RNA (1)...(19): siRNA sense strand
cgaaauucauccgacgaaa

SEQ ID NO: 172712 - RNA, 19 nt, Homo sapiens
  misc_RNA (1)...(19): siRNA sense strand
ggccucaacucauggaagu

SEQ ID NO: 172713 - RNA, 19 nt, Homo sapiens
  misc_RNA (1)...(19): siRNA sense strand
gccacuuccucaauuauuc

SEQ ID NO: 172714 - RNA, 19 nt, Homo sapiens
  misc_RNA (1)...(19): siRNA sense strand
aaagauguguacgugguaa

SEQ ID NO: 172715 - RNA, 19 nt, Homo sapiens
  misc_RNA (1)...(19): siRNA sense strand
ucauggaagugacugucua

SEQ ID NO: 172716 - RNA, 19 nt, Homo sapiens
  misc_RNA (1)...(19): siRNA sense strand
gaucagauuccuguguuug

SEQ ID NO: 172717 - RNA, 19 nt, Homo sapiens
  misc_RNA (1)...(19): siRNA sense strand
aauuguagagggaaucuua

SEQ ID NO: 172718 - RNA, 19 nt, Homo sapiens
  misc_RNA (1)...(19): siRNA sense strand
gaauuucaucuacgucuuc

SEQ ID NO: 172719 - RNA, 19 nt, Homo sapiens
  misc_RNA (1)...(19): siRNA sense strand
gccugaaagcucccuaaua

SEQ ID NO: 172720 - RNA, 19 nt, Homo sapiens
  misc_RNA (1)...(19): siRNA sense strand
acugccagauuaacagaua

SEQ ID NO: 172721 - RNA, 19 nt, Homo sapiens
  misc_RNA (1)...(19): siRNA sense strand
auacuggccuguuuguuuc

SEQ ID NO: 172722 - RNA, 19 nt, Homo sapiens
  misc_RNA (1)...(19): siRNA sense strand
ucgcacaagugaaagaugu

SEQ ID NO: 172723 - RNA, 19 nt, Homo sapiens
  misc_RNA (1)...(19): siRNA sense strand
augaaagaccuucugcuua

SEQ ID NO: 172724 - RNA, 19 nt, Homo sapiens
  misc_RNA (1)...(19): siRNA sense strand
gaagcaaaggccugagugu

SEQ ID NO: 172725 - RNA, 19 nt, Homo sapiens
  misc_RNA (1)...(19): siRNA sense strand
ccacggaggucuguaccau

SEQ ID NO: 172726 - RNA, 19 nt, Homo sapiens
  misc_RNA (1)...(19): siRNA sense strand
gaaauucauccgacgaaac

SEQ ID NO: 172727 - RNA, 19 nt, Homo sapiens
  misc_RNA (1)...(19): siRNA sense strand
gaaaauaguccugggaaug

SEQ ID NO: 172728 - RNA, 19 nt, Homo sapiens
  misc_RNA (1)...(19): siRNA sense strand
gcaaacagugcccugaucu

SEQ ID NO: 172729 - RNA, 19 nt, Homo sapiens
  misc_RNA (1)...(19): siRNA sense strand
gggagcacaaucaauuaaa

SEQ ID NO: 172730 - RNA, 19 nt, Homo sapiens
  misc_RNA (1)...(19): siRNA sense strand
ucuguaccaucauuucuga

SEQ ID NO: 172731 - RNA, 19 nt, Homo sapiens
  misc_RNA (1)...(19): siRNA sense strand
ggaaugucucuacuauuuc

SEQ ID NO: 172732 - RNA, 19 nt, Homo sapiens
  misc_RNA (1)...(19): siRNA sense strand
gaauguggucagaagcaaa

SEQ ID NO: 172733 - RNA, 19 nt, Homo sapiens
  misc_RNA (1)...(19): siRNA sense strand
ugaucucccucuuggugua

SEQ ID NO: 172734 - RNA, 19 nt, Homo sapiens
  misc_RNA (1)...(19): siRNA sense strand
ccaccaaucauacugugaa

SEQ ID NO: 172735 - RNA, 19 nt, Homo sapiens
  misc_RNA (1)...(19): siRNA sense strand
ccagaagaacgaucgaaau

SEQ ID NO: 172736 - RNA, 19 nt, Homo sapiens
  misc_RNA (1)...(19): siRNA sense strand
gaagacauggacgggcaua

SEQ ID NO: 172737 - RNA, 19 nt, Homo sapiens
  misc_RNA (1)...(19): siRNA sense strand
gaagaacugcagaaaugag

SEQ ID NO: 172738 - RNA, 19 nt, Homo sapiens
  misc_RNA (1)...(19): siRNA sense strand
aaccugauauucccuagau

SEQ ID NO: 172739 - RNA, 19 nt, Homo sapiens
  misc_RNA (1)...(19): siRNA sense strand
ugaaagcucccuaauagac

SEQ ID NO: 172740 - RNA, 19 nt, Homo sapiens
  misc_RNA (1)...(19): siRNA sense strand
ccucaaagaucuccccauu

SEQ ID NO: 172741 - RNA, 19 nt, Homo sapiens
  misc_RNA (1)...(19): siRNA sense strand
gaaaccuuccucaaagauc

SEQ ID NO: 172742 - RNA, 19 nt, Homo sapiens
  misc_RNA (1)...(19): siRNA sense strand
gauguucagugagaguuuc

SEQ ID NO: 172743 - RNA, 19 nt, Homo sapiens
  misc_RNA (1)...(19): siRNA sense strand
acgaaaccuuccucaaaga

SEQ ID NO: 172744 - RNA, 19 nt, Homo sapiens
  misc_RNA (1)...(19): siRNA sense strand
ggucugggacguacugugu

SEQ ID NO: 172745 - RNA, 19 nt, Homo sapiens
  misc_RNA (1)...(19): siRNA sense strand
ccugcgagaucacccagaa

SEQ ID NO: 172746 - RNA, 19 nt, Homo sapiens
  misc_RNA (1)...(19): siRNA sense strand
aaaccuuccucaaagaucu

SEQ ID NO: 172747 - RNA, 19 nt, Homo sapiens
  misc_RNA (1)...(19): siRNA sense strand
ccacaugauugucaccuua

SEQ ID NO: 172748 - RNA, 19 nt, Homo sapiens
  misc_RNA (1)...(19): siRNA sense strand
ggaaccagcuaccuacuca

SEQ ID NO: 172749 - RNA, 19 nt, Homo sapiens
  misc_RNA (1)...(19): siRNA sense strand
gaaguccuaucaagagaga

SEQ ID NO: 172750 - RNA, 19 nt, Homo sapiens
  misc_RNA (1)...(19): siRNA sense strand
gagaggaaccagcuaccua

SEQ ID NO: 172751 - RNA, 19 nt, Homo sapiens
  misc_RNA (1)...(19): siRNA sense strand
aucaguagcuuggauaaua

SEQ ID NO: 172752 - RNA, 19 nt, Homo sapiens
  misc_RNA (1)...(19): siRNA sense strand
guaucggucuuucaacuau

SEQ ID NO: 172753 - RNA, 19 nt, Homo sapiens
  misc_RNA (1)...(19): siRNA sense strand
ggaaacgccuggcuaaaau

SEQ ID NO: 172754 - RNA, 19 nt, Homo sapiens
  misc_RNA (1)...(19): siRNA sense strand
guacagagccaucguuaac

SEQ ID NO: 172755 - RNA, 19 nt, Homo sapiens
  misc_RNA (1)...(19): siRNA sense strand
ucauaccacuugcuauuau

SEQ ID NO: 172756 - RNA, 19 nt, Homo sapiens
  misc_RNA (1)...(19): siRNA sense strand
gaaguggcucgcaucagua

SEQ ID NO: 172757 - RNA, 19 nt, Homo sapiens
  misc_RNA (1)...(19): siRNA sense strand
aaggugggcugcaaacuga

SEQ ID NO: 172758 - RNA, 19 nt, Homo sapiens
  misc_RNA (1)...(19): siRNA sense strand
gagaauacaaugaacauac

SEQ ID NO: 172759 - RNA, 19 nt, Homo sapiens
  misc_RNA (1)...(19): siRNA sense strand
agaaguggcucgcaucagu

SEQ ID NO: 172760 - RNA, 19 nt, Homo sapiens
  misc_RNA (1)...(19): siRNA sense strand
caaaccacauccuuuacau

SEQ ID NO: 172761 - RNA, 19 nt, Homo sapiens
  misc_RNA (1)...(19): siRNA sense strand
cccaacaucuucaucucua

SEQ ID NO: 172762 - RNA, 19 nt, Homo sapiens
  misc_RNA (1)...(19): siRNA sense strand
gaccaauucuguuuuacua

SEQ ID NO: 172763 - RNA, 19 nt, Homo sapiens
  misc_RNA (1)...(19): siRNA sense strand
aaauugugcuugucuuugu

SEQ ID NO: 172764 - RNA, 19 nt, Homo sapiens
  misc_RNA (1)...(19): siRNA sense strand
ccaacaucuucaucucuaa

SEQ ID NO: 172765 - RNA, 19 nt, Homo sapiens
  misc_RNA (1)...(19): siRNA sense strand
gcaggaaauggcaauguga

SEQ ID NO: 172766 - RNA, 19 nt, Homo sapiens
  misc_RNA (1)...(19): siRNA sense strand
ggagaauacaaugaacaua

SEQ ID NO: 172767 - RNA, 19 nt, Homo sapiens
  misc_RNA (1)...(19): siRNA sense strand
gcaacaucaugcuggugaa

SEQ ID NO: 172768 - RNA, 19 nt, Homo sapiens
  misc_RNA (1)...(19): siRNA sense strand
cccauuugcucuuuaccua

SEQ ID NO: 172769 - RNA, 19 nt, Homo sapiens
  misc_RNA (1)...(19): siRNA sense strand
ucaacccauuugcucuuua

SEQ ID NO: 172770 - RNA, 19 nt, Homo sapiens
  misc_RNA (1)...(19): siRNA sense strand
gcuguuucaucuucuguug

SEQ ID NO: 172771 - RNA, 19 nt, Homo sapiens
  misc_RNA (1)...(19): siRNA sense strand
gcaaacugaucccugucau

SEQ ID NO: 172772 - RNA, 19 nt, Homo sapiens
  misc_RNA (1)...(19): siRNA sense strand
ggugaccaauucuguuuua

SEQ ID NO: 172773 - RNA, 19 nt, Homo sapiens
  misc_RNA (1)...(19): siRNA sense strand
cuuggucuauuuccucaua

SEQ ID NO: 172774 - RNA, 19 nt, Homo sapiens
  misc_RNA (1)...(19): siRNA sense strand
ucaguagcuuggauaauag

SEQ ID NO: 172775 - RNA, 19 nt, Homo sapiens
  misc_RNA (1)...(19): siRNA sense strand
cuaaaugggcacagcauga

SEQ ID NO: 172776 - RNA, 19 nt, Homo sapiens
  misc_RNA (1)...(19): siRNA sense strand
cauaccacuugcuauuauu

SEQ ID NO: 172777 - RNA, 19 nt, Homo sapiens
  misc_RNA (1)...(19): siRNA sense strand
ccucauaccacuugcuauu

SEQ ID NO: 172778 - RNA, 19 nt, Homo sapiens
  misc_RNA (1)...(19): siRNA sense strand
gaaagcuucaggaggcauu

SEQ ID NO: 172779 - RNA, 19 nt, Homo sapiens
  misc_RNA (1)...(19): siRNA sense strand
aauagcagcuucacagcau

SEQ ID NO: 172780 - RNA, 19 nt, Homo sapiens
  misc_RNA (1)...(19): siRNA sense strand
ugacaucucugaaaagcaa

SEQ ID NO: 172781 - RNA, 19 nt, Homo sapiens
  misc_RNA (1)...(19): siRNA sense strand
uaaaugggcacagcaugaa

SEQ ID NO: 172782 - RNA, 19 nt, Homo sapiens
  misc_RNA (1)...(19): siRNA sense strand
uaucggucuuucaacuaua

SEQ ID NO: 172783 - RNA, 19 nt, Homo sapiens
  misc_RNA (1)...(19): siRNA sense strand
caacccauuugcucuuuac

SEQ ID NO: 172784 - RNA, 19 nt, Homo sapiens
  misc_RNA (1)...(19): siRNA sense strand
ggucuuucaacuauaauga

SEQ ID NO: 172785 - RNA, 19 nt, Homo sapiens
  misc_RNA (1)...(19): siRNA sense strand
gcguaugacaucucugaaa

SEQ ID NO: 172786 - RNA, 19 nt, Homo sapiens
  misc_RNA (1)...(19): siRNA sense strand
ucacagcauguaucccaua

SEQ ID NO: 172787 - RNA, 19 nt, Homo sapiens
  misc_RNA (1)...(19): siRNA sense strand
acacaaucuuccuggagaa

SEQ ID NO: 172788 - RNA, 19 nt, Homo sapiens
  misc_RNA (1)...(19): siRNA sense strand
uuccaaaccacauccuuua

SEQ ID NO: 172789 - RNA, 19 nt, Homo sapiens
  misc_RNA (1)...(19): siRNA sense strand
caaucuuccuggagaauac

SEQ ID NO: 172790 - RNA, 19 nt, Homo sapiens
  misc_RNA (1)...(19): siRNA sense strand
caaggugggcugcaaacug

SEQ ID NO: 172791 - RNA, 19 nt, Homo sapiens
  misc_RNA (1)...(19): siRNA sense strand
cuaagucucuuuccaaccu

SEQ ID NO: 172792 - RNA, 19 nt, Homo sapiens
  misc_RNA (1)...(19): siRNA sense strand
gcaucaguagcuuggauaa

SEQ ID NO: 172793 - RNA, 19 nt, Homo sapiens
  misc_RNA (1)...(19): siRNA sense strand
ucccauacccucaaacaga

SEQ ID NO: 172794 - RNA, 19 nt, Homo sapiens
  misc_RNA (1)...(19): siRNA sense strand
gugcguaugacaucucuga

SEQ ID NO: 172795 - RNA, 19 nt, Homo sapiens
  misc_RNA (1)...(19): siRNA sense strand
gucaacccauuugcucuuu

SEQ ID NO: 172796 - RNA, 19 nt, Homo sapiens
  misc_RNA (1)...(19): siRNA sense strand
gguacagagccaucguuaa

SEQ ID NO: 172797 - RNA, 19 nt, Homo sapiens
  misc_RNA (1)...(19): siRNA sense strand
cguaugacaucucugaaaa

SEQ ID NO: 172798 - RNA, 19 nt, Homo sapiens
  misc_RNA (1)...(19): siRNA sense strand
uuacauguaucggucuuuc

SEQ ID NO: 172799 - RNA, 19 nt, Homo sapiens
  misc_RNA (1)...(19): siRNA sense strand
ccaaaccacauccuuuaca

SEQ ID NO: 172800 - RNA, 19 nt, Homo sapiens
  misc_RNA (1)...(19): siRNA sense strand
auccaaagauucauucagu

SEQ ID NO: 172801 - RNA, 19 nt, Homo sapiens
  misc_RNA (1)...(19): siRNA sense strand
cccauacccucaaacagau

SEQ ID NO: 172802 - RNA, 19 nt, Homo sapiens
  misc_RNA (1)...(19): siRNA sense strand
gcaaugcuaagaacauggu

SEQ ID NO: 172803 - RNA, 19 nt, Homo sapiens
  misc_RNA (1)...(19): siRNA sense strand
ucucuaggccacaugauug

SEQ ID NO: 172804 - RNA, 19 nt, Homo sapiens
  misc_RNA (1)...(19): siRNA sense strand
cccucaaacagaugaauua

SEQ ID NO: 172805 - RNA, 19 nt, Homo sapiens
  misc_RNA (1)...(19): siRNA sense strand
ccucuaagucucuuuccaa

SEQ ID NO: 172806 - RNA, 19 nt, Homo sapiens
  misc_RNA (1)...(19): siRNA sense strand
uaaaagcgcacacaaucuu

SEQ ID NO: 172807 - RNA, 19 nt, Homo sapiens
  misc_RNA (1)...(19): siRNA sense strand
gcucuucagcggugcguau

SEQ ID NO: 172808 - RNA, 19 nt, Homo sapiens
  misc_RNA (1)...(19): siRNA sense strand
cauauugcaaagaccuuaa

SEQ ID NO: 172809 - RNA, 19 nt, Homo sapiens
  misc_RNA (1)...(19): siRNA sense strand
uggcaauucuugugucaac

SEQ ID NO: 172810 - RNA, 19 nt, Homo sapiens
  misc_RNA (1)...(19): siRNA sense strand
cacggaaacgccuggcuaa

SEQ ID NO: 172811 - RNA, 19 nt, Homo sapiens
  misc_RNA (1)...(19): siRNA sense strand
ccgaagcgguguuuucaga

SEQ ID NO: 172812 - RNA, 19 nt, Homo sapiens
  misc_RNA (1)...(19): siRNA sense strand
gccacaugauugucaccuu

SEQ ID NO: 172813 - RNA, 19 nt, Homo sapiens
  misc_RNA (1)...(19): siRNA sense strand
ugugggcuguuucaucuuc

SEQ ID NO: 172814 - RNA, 19 nt, Homo sapiens
  misc_RNA (1)...(19): siRNA sense strand
uuugugggcuguuucaucu

SEQ ID NO: 172815 - RNA, 19 nt, Homo sapiens
  misc_RNA (1)...(19): siRNA sense strand
acaucaugcuggugaagau

SEQ ID NO: 172816 - RNA, 19 nt, Homo sapiens
  misc_RNA (1)...(19): siRNA sense strand
acaaucuuccuggagaaua

SEQ ID NO: 172817 - RNA, 19 nt, Homo sapiens
  misc_RNA (1)...(19): siRNA sense strand
ucauauugcaaagaccuua

SEQ ID NO: 172818 - RNA, 19 nt, Homo sapiens
  misc_RNA (1)...(19): siRNA sense strand
gaagcgguguuuucagaag

SEQ ID NO: 172819 - RNA, 19 nt, Homo sapiens
  misc_RNA (1)...(19): siRNA sense strand
cucuuuaccuacucaguga

SEQ ID NO: 172820 - RNA, 19 nt, Homo sapiens
  misc_RNA (1)...(19): siRNA sense strand
ggguuuccguguucacucu

SEQ ID NO: 172821 - RNA, 19 nt, Homo sapiens
  misc_RNA (1)...(19): siRNA sense strand
auucuugugucaacccauu

SEQ ID NO: 172822 - RNA, 19 nt, Homo sapiens
  misc_RNA (1)...(19): siRNA sense strand
cucauaccacuugcuauua

SEQ ID NO: 172823 - RNA, 19 nt, Homo sapiens
  misc_RNA (1)...(19): siRNA sense strand
ggauacagcuggacaagaa

SEQ ID NO: 172824 - RNA, 19 nt, Homo sapiens
  misc_RNA (1)...(19): siRNA sense strand
caaggacaguugauacaaa

SEQ ID NO: 172825 - RNA, 19 nt, Homo sapiens
  misc_RNA (1)...(19): siRNA sense strand
gaaccacuuuguagaugaa

SEQ ID NO: 172826 - RNA, 19 nt, Homo sapiens
  misc_RNA (1)...(19): siRNA sense strand
gaaaacaagugguuauaga

SEQ ID NO: 172827 - RNA, 19 nt, Homo sapiens
  misc_RNA (1)...(19): siRNA sense strand
cauagaggauucuuacaga

SEQ ID NO: 172828 - RNA, 19 nt, Homo sapiens
  misc_RNA (1)...(19): siRNA sense strand
gcacugacaauccagcuaa

SEQ ID NO: 172829 - RNA, 19 nt, Homo sapiens
  misc_RNA (1)...(19): siRNA sense strand
uaagagaaauacgccagua

SEQ ID NO: 172830 - RNA, 19 nt, Homo sapiens
  misc_RNA (1)...(19): siRNA sense strand
ggaaacaagugugauuugc

SEQ ID NO: 172831 - RNA, 19 nt, Homo sapiens
  misc_RNA (1)...(19): siRNA sense strand
caauccagcuaauccagaa

SEQ ID NO: 172832 - RNA, 19 nt, Homo sapiens
  misc_RNA (1)...(19): siRNA sense strand
gagcagauuaagcgaguaa

SEQ ID NO: 172833 - RNA, 19 nt, Homo sapiens
  misc_RNA (1)...(19): siRNA sense strand
ggccaagaguuacgggauu

SEQ ID NO: 172834 - RNA, 19 nt, Homo sapiens
  misc_RNA (1)...(19): siRNA sense strand
cagaaccacuuuguagaug

SEQ ID NO: 172835 - RNA, 19 nt, Homo sapiens
  misc_RNA (1)...(19): siRNA sense strand
caagucauuugcggauauu

SEQ ID NO: 172836 - RNA, 19 nt, Homo sapiens
  misc_RNA (1)...(19): siRNA sense strand
gaagaguacagugccauga

SEQ ID NO: 172837 - RNA, 19 nt, Homo sapiens
  misc_RNA (1)...(19): siRNA sense strand
gggaaacaagugugauuug

SEQ ID NO: 172838 - RNA, 19 nt, Homo sapiens
  misc_RNA (1)...(19): siRNA sense strand
aaacaagugguuauagaug

SEQ ID NO: 172839 - RNA, 19 nt, Homo sapiens
  misc_RNA (1)...(19): siRNA sense strand
cagacaggguguugaagau

SEQ ID NO: 172840 - RNA, 19 nt, Homo sapiens
  misc_RNA (1)...(19): siRNA sense strand
uuacgggauuccauucauu

SEQ ID NO: 172841 - RNA, 19 nt, Homo sapiens
  misc_RNA (1)...(19): siRNA sense strand
gcuaauccagaaccacuuu

SEQ ID NO: 172842 - RNA, 19 nt, Homo sapiens
  misc_RNA (1)...(19): siRNA sense strand
caucaauaauagcaaguca

SEQ ID NO: 172843 - RNA, 19 nt, Homo sapiens
  misc_RNA (1)...(19): siRNA sense strand
gaccagacaggguguugaa

SEQ ID NO: 172844 - RNA, 19 nt, Homo sapiens
  misc_RNA (1)...(19): siRNA sense strand
ugccauguguggugaugua

SEQ ID NO: 172845 - RNA, 19 nt, Homo sapiens
  misc_RNA (1)...(19): siRNA sense strand
agaaccacuuuguagauga

SEQ ID NO: 172846 - RNA, 19 nt, Homo sapiens
  misc_RNA (1)...(19): siRNA sense strand
guaaaagacucggaugaug

SEQ ID NO: 172847 - RNA, 19 nt, Homo sapiens
  misc_RNA (1)...(19): siRNA sense strand
aaacucaacagcagugaug

SEQ ID NO: 172848 - RNA, 19 nt, Homo sapiens
  misc_RNA (1)...(19): siRNA sense strand
ccagaaccacuuuguagau

SEQ ID NO: 172849 - RNA, 19 nt, Homo sapiens
  misc_RNA (1)...(19): siRNA sense strand
ccagacaggguguugaaga

SEQ ID NO: 172850 - RNA, 19 nt, Homo sapiens
  misc_RNA (1)...(19): siRNA sense strand
agaguacagugccaugaga

SEQ ID NO: 172851 - RNA, 19 nt, Homo sapiens
  misc_RNA (1)...(19): siRNA sense strand
ugauguaccuauggugcua

SEQ ID NO: 172852 - RNA, 19 nt, Homo sapiens
  misc_RNA (1)...(19): siRNA sense strand
ccacuuuguagaugaauau

SEQ ID NO: 172853 - RNA, 19 nt, Homo sapiens
  misc_RNA (1)...(19): siRNA sense strand
gccaagaguuacgggauuc

SEQ ID NO: 172854 - RNA, 19 nt, Homo sapiens
  misc_RNA (1)...(19): siRNA sense strand
caagugugauuugccaaca

SEQ ID NO: 172855 - RNA, 19 nt, Homo sapiens
  misc_RNA (1)...(19): siRNA sense strand
ccaccauagaggauucuua

SEQ ID NO: 172856 - RNA, 19 nt, Homo sapiens
  misc_RNA (1)...(19): siRNA sense strand
uugcggauauuaaccucua

SEQ ID NO: 172857 - RNA, 19 nt, Homo sapiens
  misc_RNA (1)...(19): siRNA sense strand
ggagcagauuaagcgagua

SEQ ID NO: 172858 - RNA, 19 nt, Homo sapiens
  misc_RNA (1)...(19): siRNA sense strand
cagcuggacaagaagagua

SEQ ID NO: 172859 - RNA, 19 nt, Homo sapiens
  misc_RNA (1)...(19): siRNA sense strand
guacaaacugguggugguu

SEQ ID NO: 172860 - RNA, 19 nt, Homo sapiens
  misc_RNA (1)...(19): siRNA sense strand
gaaaagcgcacugacaauc

SEQ ID NO: 172861 - RNA, 19 nt, Homo sapiens
  misc_RNA (1)...(19): siRNA sense strand
gcagugaugaugggacuca

SEQ ID NO: 172862 - RNA, 19 nt, Homo sapiens
  misc_RNA (1)...(19): siRNA sense strand
cuauggugcuagugggaaa

SEQ ID NO: 172863 - RNA, 19 nt, Homo sapiens
  misc_RNA (1)...(19): siRNA sense strand
auacgccaguaccgaauga

SEQ ID NO: 172864 - RNA, 19 nt, Homo sapiens
  misc_RNA (1)...(19): siRNA sense strand
guuacgggauuccauucau

SEQ ID NO: 172865 - RNA, 19 nt, Homo sapiens
  misc_RNA (1)...(19): siRNA sense strand
gugggaaacaagugugauu

SEQ ID NO: 172866 - RNA, 19 nt, Homo sapiens
  misc_RNA (1)...(19): siRNA sense strand
gggaaaagcgcacugacaa

SEQ ID NO: 172867 - RNA, 19 nt, Homo sapiens
  misc_RNA (1)...(19): siRNA sense strand
auugaaaccucagccaaga

SEQ ID NO: 172868 - RNA, 19 nt, Homo sapiens
  misc_RNA (1)...(19): siRNA sense strand
gguuggagcaggugguguu

SEQ ID NO: 172869 - RNA, 19 nt, Homo sapiens
  misc_RNA (1)...(19): siRNA sense strand
agucauuugcggauauuaa

SEQ ID NO: 172870 - RNA, 19 nt, Homo sapiens
  misc_RNA (1)...(19): siRNA sense strand
ccauagaggauucuuacag

SEQ ID NO: 172871 - RNA, 19 nt, Homo sapiens
  misc_RNA (1)...(19): siRNA sense strand
acaagugguuauagauggu

SEQ ID NO: 172872 - RNA, 19 nt, Homo sapiens
  misc_RNA (1)...(19): siRNA sense strand
caccauagaggauucuuac

SEQ ID NO: 172873 - RNA, 19 nt, Homo sapiens
  misc_RNA (1)...(19): siRNA sense strand
aaagcgcacugacaaucca

SEQ ID NO: 172874 - RNA, 19 nt, Homo sapiens
  misc_RNA (1)...(19): siRNA sense strand
gcagauuaagcgaguaaaa

SEQ ID NO: 172875 - RNA, 19 nt, Homo sapiens
  misc_RNA (1)...(19): siRNA sense strand
agaguuacgggauuccauu

SEQ ID NO: 172876 - RNA, 19 nt, Homo sapiens
  misc_RNA (1)...(19): siRNA sense strand
gcuagugggaaacaagugu

SEQ ID NO: 172877 - RNA, 19 nt, Homo sapiens
  misc_RNA (1)...(19): siRNA sense strand
cggaugauguaccuauggu

SEQ ID NO: 172878 - RNA, 19 nt, Homo sapiens
  misc_RNA (1)...(19): siRNA sense strand
aaaagacucggaugaugua

SEQ ID NO: 172879 - RNA, 19 nt, Homo sapiens
  misc_RNA (1)...(19): siRNA sense strand
uaaaagacucggaugaugu

SEQ ID NO: 172880 - RNA, 19 nt, Homo sapiens
  misc_RNA (1)...(19): siRNA sense strand
cccacgaacuggccaagag

SEQ ID NO: 172881 - RNA, 19 nt, Homo sapiens
  misc_RNA (1)...(19): siRNA sense strand
aauccagaaccacuuugua

SEQ ID NO: 172882 - RNA, 19 nt, Homo sapiens
  misc_RNA (1)...(19): siRNA sense strand
gagcaaagaaggauuguua

SEQ ID NO: 172883 - RNA, 19 nt, Homo sapiens
  misc_RNA (1)...(19): siRNA sense strand
gaugugauguucaugguuu

SEQ ID NO: 172884 - RNA, 19 nt, Homo sapiens
  misc_RNA (1)...(19): siRNA sense strand
gaagagaagaugaaaguga

SEQ ID NO: 172885 - RNA, 19 nt, Homo sapiens
  misc_RNA (1)...(19): siRNA sense strand
gaagaggaauauauagcaa

SEQ ID NO: 172886 - RNA, 19 nt, Homo sapiens
  misc_RNA (1)...(19): siRNA sense strand
ucucucagcucuaauauau

SEQ ID NO: 172887 - RNA, 19 nt, Homo sapiens
  misc_RNA (1)...(19): siRNA sense strand
gccaaacucuaauuaauuc

SEQ ID NO: 172888 - RNA, 19 nt, Homo sapiens
  misc_RNA (1)...(19): siRNA sense strand
ggacuuagcccgcagagau

SEQ ID NO: 172889 - RNA, 19 nt, Homo sapiens
  misc_RNA (1)...(19): siRNA sense strand
gaaagugaacuaugucuuc

SEQ ID NO: 172890 - RNA, 19 nt, Homo sapiens
  misc_RNA (1)...(19): siRNA sense strand
gcaguaaggaagaggaaua

SEQ ID NO: 172891 - RNA, 19 nt, Homo sapiens
  misc_RNA (1)...(19): siRNA sense strand
ggccugcccuuaacuguuu

SEQ ID NO: 172892 - RNA, 19 nt, Homo sapiens
  misc_RNA (1)...(19): siRNA sense strand
gaacuggcauuagaagcuu

SEQ ID NO: 172893 - RNA, 19 nt, Homo sapiens
  misc_RNA (1)...(19): siRNA sense strand
gcaguguccuugaguuguu

SEQ ID NO: 172894 - RNA, 19 nt, Homo sapiens
  misc_RNA (1)...(19): siRNA sense strand
guaaggaagaggaauauau

SEQ ID NO: 172895 - RNA, 19 nt, Homo sapiens
  misc_RNA (1)...(19): siRNA sense strand
aggcaaguguguuguguua

SEQ ID NO: 172896 - RNA, 19 nt, Homo sapiens
  misc_RNA (1)...(19): siRNA sense strand
cauguaaucaccaauagua

SEQ ID NO: 172897 - RNA, 19 nt, Homo sapiens
  misc_RNA (1)...(19): siRNA sense strand
aagagaagaugaaagugaa

SEQ ID NO: 172898 - RNA, 19 nt, Homo sapiens
  misc_RNA (1)...(19): siRNA sense strand
ucacauguaaucaccaaua

SEQ ID NO: 172899 - RNA, 19 nt, Homo sapiens
  misc_RNA (1)...(19): siRNA sense strand
aaacugcgcugugugaugu

SEQ ID NO: 172900 - RNA, 19 nt, Homo sapiens
  misc_RNA (1)...(19): siRNA sense strand
gcaaguguguuguguuacu

SEQ ID NO: 172901 - RNA, 19 nt, Homo sapiens
  misc_RNA (1)...(19): siRNA sense strand
gaggaugcuuuacccaaga

SEQ ID NO: 172902 - RNA, 19 nt, Homo sapiens
  misc_RNA (1)...(19): siRNA sense strand
gggugaggguugccuauug

SEQ ID NO: 172903 - RNA, 19 nt, Homo sapiens
  misc_RNA (1)...(19): siRNA sense strand
uuuaugaacuggcauuaga

SEQ ID NO: 172904 - RNA, 19 nt, Homo sapiens
  misc_RNA (1)...(19): siRNA sense strand
ggaagaggaauauauagca

SEQ ID NO: 172905 - RNA, 19 nt, Homo sapiens
  misc_RNA (1)...(19): siRNA sense strand
gaagaugaaagugaacuau

SEQ ID NO: 172906 - RNA, 19 nt, Homo sapiens
  misc_RNA (1)...(19): siRNA sense strand
agucauagaggaugcuuua

SEQ ID NO: 172907 - RNA, 19 nt, Homo sapiens
  misc_RNA (1)...(19): siRNA sense strand
agaugaaagugaacuaugu

SEQ ID NO: 172908 - RNA, 19 nt, Homo sapiens
  misc_RNA (1)...(19): siRNA sense strand
gggcuucucugugugcauu

SEQ ID NO: 172909 - RNA, 19 nt, Homo sapiens
  misc_RNA (1)...(19): siRNA sense strand
gggaggacauugccuagag

SEQ ID NO: 172910 - RNA, 19 nt, Homo sapiens
  misc_RNA (1)...(19): siRNA sense strand
ggugaggguugccuauugu

SEQ ID NO: 172911 - RNA, 19 nt, Homo sapiens
  misc_RNA (1)...(19): siRNA sense strand
gccagagccuguuuguaga

SEQ ID NO: 172912 - RNA, 19 nt, Homo sapiens
  misc_RNA (1)...(19): siRNA sense strand
gagccuguuuguagaaauc

SEQ ID NO: 172913 - RNA, 19 nt, Homo sapiens
  misc_RNA (1)...(19): siRNA sense strand
ggguagcgcugggagugua

SEQ ID NO: 172914 - RNA, 19 nt, Homo sapiens
  misc_RNA (1)...(19): siRNA sense strand
gcuguuggcuuucuguuuu

SEQ ID NO: 172915 - RNA, 19 nt, Homo sapiens
  misc_RNA (1)...(19): siRNA sense strand
ggccagaugugauguucau

SEQ ID NO: 172916 - RNA, 19 nt, Homo sapiens
  misc_RNA (1)...(19): siRNA sense strand
ggaggcaaguguguugugu

SEQ ID NO: 172917 - RNA, 19 nt, Homo sapiens
  misc_RNA (1)...(19): siRNA sense strand
uaccugggcuucucugugu

SEQ ID NO: 172918 - RNA, 19 nt, Homo sapiens
  misc_RNA (1)...(19): siRNA sense strand
aggaauauauagcaacuca

SEQ ID NO: 172919 - RNA, 19 nt, Homo sapiens
  misc_RNA (1)...(19): siRNA sense strand
gcuccugaguauaggcuuu

SEQ ID NO: 172920 - RNA, 19 nt, Homo sapiens
  misc_RNA (1)...(19): siRNA sense strand
caaagaaggauuguuagca

SEQ ID NO: 172921 - RNA, 19 nt, Homo sapiens
  misc_RNA (1)...(19): siRNA sense strand
guguuacugugucaauaaa

SEQ ID NO: 172922 - RNA, 19 nt, Homo sapiens
  misc_RNA (1)...(19): siRNA sense strand
ugaagauguuuaugaacug

SEQ ID NO: 172923 - RNA, 19 nt, Homo sapiens
  misc_RNA (1)...(19): siRNA sense strand
gagcuccacuccugaagac

SEQ ID NO: 172924 - RNA, 19 nt, Homo sapiens
  misc_RNA (1)...(19): siRNA sense strand
gaagggccgagaagacaga

SEQ ID NO: 172925 - RNA, 19 nt, Homo sapiens
  misc_RNA (1)...(19): siRNA sense strand
cuuagggacuggauacuuc

SEQ ID NO: 172926 - RNA, 19 nt, Homo sapiens
  misc_RNA (1)...(19): siRNA sense strand
ccucguucuuuacagcuua

SEQ ID NO: 172927 - RNA, 19 nt, Homo sapiens
  misc_RNA (1)...(19): siRNA sense strand
gauaaacacccaggacagu

SEQ ID NO: 172928 - RNA, 19 nt, Homo sapiens
  misc_RNA (1)...(19): siRNA sense strand
agaguuugcugaagagaag

SEQ ID NO: 172929 - RNA, 19 nt, Homo sapiens
  misc_RNA (1)...(19): siRNA sense strand
gaggguugccuauuguguu

SEQ ID NO: 172930 - RNA, 19 nt, Homo sapiens
  misc_RNA (1)...(19): siRNA sense strand
gcuagaguuugcugaagag

SEQ ID NO: 172931 - RNA, 19 nt, Homo sapiens
  misc_RNA (1)...(19): siRNA sense strand
aacacuagccaaacucuaa

SEQ ID NO: 172932 - RNA, 19 nt, Homo sapiens
  misc_RNA (1)...(19): siRNA sense strand
ugugauguguucuaucuag

SEQ ID NO: 172933 - RNA, 19 nt, Homo sapiens
  misc_RNA (1)...(19): siRNA sense strand
gcugugugauguguucuau

SEQ ID NO: 172934 - RNA, 19 nt, Homo sapiens
  misc_RNA (1)...(19): siRNA sense strand
cagggauccuucucucuca

SEQ ID NO: 172935 - RNA, 19 nt, Homo sapiens
  misc_RNA (1)...(19): siRNA sense strand
ugugugauguguucuaucu

SEQ ID NO: 172936 - RNA, 19 nt, Homo sapiens
  misc_RNA (1)...(19): siRNA sense strand
cacauguaaucaccaauag

SEQ ID NO: 172937 - RNA, 19 nt, Homo sapiens
  misc_RNA (1)...(19): siRNA sense strand
gauggauuauuagcugaug

SEQ ID NO: 172938 - RNA, 19 nt, Homo sapiens
  misc_RNA (1)...(19): siRNA sense strand
cagagccuguuuguagaaa

SEQ ID NO: 172939 - RNA, 19 nt, Homo sapiens
  misc_RNA (1)...(19): siRNA sense strand
caccaauaguaaaugaaga

SEQ ID NO: 172940 - RNA, 19 nt, Homo sapiens
  misc_RNA (1)...(19): siRNA sense strand
gcaaagaaggauuguuagc

SEQ ID NO: 172941 - RNA, 19 nt, Homo sapiens
  misc_RNA (1)...(19): siRNA sense strand
caaacagcaguaaggaaga

SEQ ID NO: 172942 - RNA, 19 nt, Homo sapiens
  misc_RNA (1)...(19): siRNA sense strand
gggcaguguccuugaguug

SEQ ID NO: 172943 - RNA, 19 nt, Homo sapiens
  misc_RNA (1)...(19): siRNA sense strand
caucguccacuuccaguau

SEQ ID NO: 172944 - RNA, 19 nt, Homo sapiens
  misc_RNA (1)...(19): siRNA sense strand
ucacaaacagcaguaagga

SEQ ID NO: 172945 - RNA, 19 nt, Homo sapiens
  misc_RNA (1)...(19): siRNA sense strand
cuagccaaacucuaauuaa

SEQ ID NO: 172946 - RNA, 19 nt, Homo sapiens
  misc_RNA (1)...(19): siRNA sense strand
cagaugugauguucauggu

SEQ ID NO: 172947 - RNA, 19 nt, Homo sapiens
  misc_RNA (1)...(19): siRNA sense strand
ggggagagaucuagauugg

SEQ ID NO: 172948 - RNA, 19 nt, Homo sapiens
  misc_RNA (1)...(19): siRNA sense strand
agccagagccuguuuguag

SEQ ID NO: 172949 - RNA, 19 nt, Homo sapiens
  misc_RNA (1)...(19): siRNA sense strand
guuacugugucaauaaacu

SEQ ID NO: 172950 - RNA, 19 nt, Homo sapiens
  misc_RNA (1)...(19): siRNA sense strand
aaacagcaguaaggaagag

SEQ ID NO: 172951 - RNA, 19 nt, Homo sapiens
  misc_RNA (1)...(19): siRNA sense strand
caaaucacugccaggaguu

SEQ ID NO: 172952 - RNA, 19 nt, Homo sapiens
  misc_RNA (1)...(19): siRNA sense strand
ggggaugccugggccuuua

SEQ ID NO: 172953 - RNA, 19 nt, Homo sapiens
  misc_RNA (1)...(19): siRNA sense strand
cuuuacagcuuaguguuau

SEQ ID NO: 172954 - RNA, 19 nt, Homo sapiens
  misc_RNA (1)...(19): siRNA sense strand
uaaacugcgcugugugaug

SEQ ID NO: 172955 - RNA, 19 nt, Homo sapiens
  misc_RNA (1)...(19): siRNA sense strand
ucuaaacugcgcuguguga

SEQ ID NO: 172956 - RNA, 19 nt, Homo sapiens
  misc_RNA (1)...(19): siRNA sense strand
cugaagagaagaugaaagu

SEQ ID NO: 172957 - RNA, 19 nt, Homo sapiens
  misc_RNA (1)...(19): siRNA sense strand
acccaggacaguaguauuu

SEQ ID NO: 172958 - RNA, 19 nt, Homo sapiens
  misc_RNA (1)...(19): siRNA sense strand
ccagagccuguuuguagaa

SEQ ID NO: 172959 - RNA, 19 nt, Homo sapiens
  misc_RNA (1)...(19): siRNA sense strand
uuaguguuauucuggcauu

SEQ ID NO: 172960 - RNA, 19 nt, Homo sapiens
  misc_RNA (1)...(19): siRNA sense strand
ucuuuacagcuuaguguua

SEQ ID NO: 172961 - RNA, 19 nt, Homo sapiens
  misc_RNA (1)...(19): siRNA sense strand
uuucuaaacugcgcugugu

SEQ ID NO: 172962 - RNA, 19 nt, Homo sapiens
  misc_RNA (1)...(19): siRNA sense strand
uaaacacccaggacaguag

SEQ ID NO: 172963 - RNA, 19 nt, Homo sapiens
  misc_RNA (1)...(19): siRNA sense strand
gaugaaagugaacuauguc

SEQ ID NO: 172964 - RNA, 19 nt, Homo sapiens
  misc_RNA (1)...(19): siRNA sense strand
uguguuacugugucaauaa

SEQ ID NO: 172965 - RNA, 19 nt, Homo sapiens
  misc_RNA (1)...(19): siRNA sense strand
caaguguguuguguuacug

SEQ ID NO: 172966 - RNA, 19 nt, Homo sapiens
  misc_RNA (1)...(19): siRNA sense strand
acuagccaaacucuaauua

SEQ ID NO: 172967 - RNA, 19 nt, Homo sapiens
  misc_RNA (1)...(19): siRNA sense strand
auaggggcauugaaauuua

SEQ ID NO: 172968 - RNA, 19 nt, Homo sapiens
  misc_RNA (1)...(19): siRNA sense strand
gcacugucaggcucagguu

SEQ ID NO: 172969 - RNA, 19 nt, Homo sapiens
  misc_RNA (1)...(19): siRNA sense strand
cuucuugggcuuugagauu

SEQ ID NO: 172970 - RNA, 19 nt, Homo sapiens
  misc_RNA (1)...(19): siRNA sense strand
ugcuagaguuugcugaaga

SEQ ID NO: 172971 - RNA, 19 nt, Homo sapiens
  misc_RNA (1)...(19): siRNA sense strand
acuucuggcuggcugagua

SEQ ID NO: 172972 - RNA, 19 nt, Homo sapiens
  misc_RNA (1)...(19): siRNA sense strand
agaggaauauauagcaacu

SEQ ID NO: 172973 - RNA, 19 nt, Homo sapiens
  misc_RNA (1)...(19): siRNA sense strand
gagggacugucuggguuca

SEQ ID NO: 172974 - RNA, 19 nt, Homo sapiens
  misc_RNA (1)...(19): siRNA sense strand
accagaacuuguccgauga

SEQ ID NO: 172975 - RNA, 19 nt, Homo sapiens
  misc_RNA (1)...(19): siRNA sense strand
cagcucuaauauauaagga

SEQ ID NO: 172976 - RNA, 19 nt, Homo sapiens
  misc_RNA (1)...(19): siRNA sense strand
gggaugccugggccuuuaa

SEQ ID NO: 172977 - RNA, 19 nt, Homo sapiens
  misc_RNA (1)...(19): siRNA sense strand
uuaaauaggggcauugaaa

SEQ ID NO: 172978 - RNA, 19 nt, Homo sapiens
  misc_RNA (1)...(19): siRNA sense strand
guauuuugccuuugaguaa

SEQ ID NO: 172979 - RNA, 19 nt, Homo sapiens
  misc_RNA (1)...(19): siRNA sense strand
cgucuggccuggaguaagc

SEQ ID NO: 172980 - RNA, 19 nt, Homo sapiens
  misc_RNA (1)...(19): siRNA sense strand
auaaacacccaggacagua

SEQ ID NO: 172981 - RNA, 19 nt, Homo sapiens
  misc_RNA (1)...(19): siRNA sense strand
guugacucguugaaauugu

SEQ ID NO: 172982 - RNA, 19 nt, Homo sapiens
  misc_RNA (1)...(19): siRNA sense strand
gagcagaccuuuauguauu

SEQ ID NO: 172983 - RNA, 19 nt, Homo sapiens
  misc_RNA (1)...(19): siRNA sense strand
gcagucaaauguaaugaua

SEQ ID NO: 172984 - RNA, 19 nt, Homo sapiens
  misc_RNA (1)...(19): siRNA sense strand
gaacaacuuugguaaugaa

SEQ ID NO: 172985 - RNA, 19 nt, Homo sapiens
  misc_RNA (1)...(19): siRNA sense strand
cgaaagagcuaaauaucga

SEQ ID NO: 172986 - RNA, 19 nt, Homo sapiens
  misc_RNA (1)...(19): siRNA sense strand
gaaguugaguugaugaaag

SEQ ID NO: 172987 - RNA, 19 nt, Homo sapiens
  misc_RNA (1)...(19): siRNA sense strand
caaauuaaguaugcugcua

SEQ ID NO: 172988 - RNA, 19 nt, Homo sapiens
  misc_RNA (1)...(19): siRNA sense strand
gaagagaucaccggcguaa

SEQ ID NO: 172989 - RNA, 19 nt, Homo sapiens
  misc_RNA (1)...(19): siRNA sense strand
gagcacaucccaaagcaaa

SEQ ID NO: 172990 - RNA, 19 nt, Homo sapiens
  misc_RNA (1)...(19): siRNA sense strand
gugauuggaugcucuuuga

SEQ ID NO: 172991 - RNA, 19 nt, Homo sapiens
  misc_RNA (1)...(19): siRNA sense strand
gcaaagccaucgugaagac

SEQ ID NO: 172992 - RNA, 19 nt, Homo sapiens
  misc_RNA (1)...(19): siRNA sense strand
acaaauacuuuccgucaga

SEQ ID NO: 172993 - RNA, 19 nt, Homo sapiens
  misc_RNA (1)...(19): siRNA sense strand
ggugucagcuuccauguag

SEQ ID NO: 172994 - RNA, 19 nt, Homo sapiens
  misc_RNA (1)...(19): siRNA sense strand
aaagagaccuaaaccagau

SEQ ID NO: 172995 - RNA, 19 nt, Homo sapiens
  misc_RNA (1)...(19): siRNA sense strand
uaaaccagaugagaaguau

SEQ ID NO: 172996 - RNA, 19 nt, Homo sapiens
  misc_RNA (1)...(19): siRNA sense strand
cgagugagcagaccuuuau

SEQ ID NO: 172997 - RNA, 19 nt, Homo sapiens
  misc_RNA (1)...(19): siRNA sense strand
gaucuacuaugugauguca

SEQ ID NO: 172998 - RNA, 19 nt, Homo sapiens
  misc_RNA (1)...(19): siRNA sense strand
ggccgacgaucuacuaugu

SEQ ID NO: 172999 - RNA, 19 nt, Homo sapiens
  misc_RNA (1)...(19): siRNA sense strand
cagaugagaaguauuauuc

SEQ ID NO: 173000 - RNA, 19 nt, Homo sapiens
  misc_RNA (1)...(19): siRNA sense strand
aaccagaugagaaguauua

SEQ ID NO: 173001 - RNA, 19 nt, Homo sapiens
  misc_RNA (1)...(19): siRNA sense strand
agaaacaucugaggugguu

SEQ ID NO: 173002 - RNA, 19 nt, Homo sapiens
  misc_RNA (1)...(19): siRNA sense strand
cagauacuauguugcauca

SEQ ID NO: 173003 - RNA, 19 nt, Homo sapiens
  misc_RNA (1)...(19): siRNA sense strand
gagguugguuucagcaugu

SEQ ID NO: 173004 - RNA, 19 nt, Homo sapiens
  misc_RNA (1)...(19): siRNA sense strand
cugaggaugugaaacuuaa

SEQ ID NO: 173005 - RNA, 19 nt, Homo sapiens
  misc_RNA (1)...(19): siRNA sense strand
gacgggcucugaugacgaa

SEQ ID NO: 173006 - RNA, 19 nt, Homo sapiens
  misc_RNA (1)...(19): siRNA sense strand
cagagaggauuaucuaugc

SEQ ID NO: 173007 - RNA, 19 nt, Homo sapiens
  misc_RNA (1)...(19): siRNA sense strand
cggcuaguauuaaugugua

SEQ ID NO: 173008 - RNA, 19 nt, Homo sapiens
  misc_RNA (1)...(19): siRNA sense strand
caugggcgcuuacacuguu

SEQ ID NO: 173009 - RNA, 19 nt, Homo sapiens
  misc_RNA (1)...(19): siRNA sense strand
uagcaagacugaaauacag

SEQ ID NO: 173010 - RNA, 19 nt, Homo sapiens
  misc_RNA (1)...(19): siRNA sense strand
ccgacgaucuacuauguga

SEQ ID NO: 173011 - RNA, 19 nt, Homo sapiens
  misc_RNA (1)...(19): siRNA sense strand
gauuggaugcucuuugaaa

SEQ ID NO: 173012 - RNA, 19 nt, Homo sapiens
  misc_RNA (1)...(19): siRNA sense strand
gaccuaaaccagaugagaa

SEQ ID NO: 173013 - RNA, 19 nt, Homo sapiens
  misc_RNA (1)...(19): siRNA sense strand
uggcgucuauggaucauuu

SEQ ID NO: 173014 - RNA, 19 nt, Homo sapiens
  misc_RNA (1)...(19): siRNA sense strand
caacuuugguaaugaagag

SEQ ID NO: 173015 - RNA, 19 nt, Homo sapiens
  misc_RNA (1)...(19): siRNA sense strand
gggcgaaagagcuaaauau

SEQ ID NO: 173016 - RNA, 19 nt, Homo sapiens
  misc_RNA (1)...(19): siRNA sense strand
acccagcguuggacaaaua

SEQ ID NO: 173017 - RNA, 19 nt, Homo sapiens
  misc_RNA (1)...(19): siRNA sense strand
gugagcagaccuuuaugua

SEQ ID NO: 173018 - RNA, 19 nt, Homo sapiens
  misc_RNA (1)...(19): siRNA sense strand
agcagaccuuuauguauua

SEQ ID NO: 173019 - RNA, 19 nt, Homo sapiens
  misc_RNA (1)...(19): siRNA sense strand
aaacaucugaggugguuaa

SEQ ID NO: 173020 - RNA, 19 nt, Homo sapiens
  misc_RNA (1)...(19): siRNA sense strand
ccagagaggauuaucuaug

SEQ ID NO: 173021 - RNA, 19 nt, Homo sapiens
  misc_RNA (1)...(19): siRNA sense strand
gcucugaugacgaagauga

SEQ ID NO: 173022 - RNA, 19 nt, Homo sapiens
  misc_RNA (1)...(19): siRNA sense strand
aaagcagucugucgucuca

SEQ ID NO: 173023 - RNA, 19 nt, Homo sapiens
  misc_RNA (1)...(19): siRNA sense strand
ggauuugacugugcuagca

SEQ ID NO: 173024 - RNA, 19 nt, Homo sapiens
  misc_RNA (1)...(19): siRNA sense strand
gaucugaggaugugaaacu

SEQ ID NO: 173025 - RNA, 19 nt, Homo sapiens
  misc_RNA (1)...(19): siRNA sense strand
guaccgauccugagaccuu

SEQ ID NO: 173026 - RNA, 19 nt, Homo sapiens
  misc_RNA (1)...(19): siRNA sense strand
aaauaucgauguuguuggu

SEQ ID NO: 173027 - RNA, 19 nt, Homo sapiens
  misc_RNA (1)...(19): siRNA sense strand
ggaacgggcgaaagagcua

SEQ ID NO: 173028 - RNA, 19 nt, Homo sapiens
  misc_RNA (1)...(19): siRNA sense strand
gaaaguugccagagcacau

SEQ ID NO: 173029 - RNA, 19 nt, Homo sapiens
  misc_RNA (1)...(19): siRNA sense strand
gaugaugacuuuugauagu

SEQ ID NO: 173030 - RNA, 19 nt, Homo sapiens
  misc_RNA (1)...(19): siRNA sense strand
gcuugcaguuaauaucauu

SEQ ID NO: 173031 - RNA, 19 nt, Homo sapiens
  misc_RNA (1)...(19): siRNA sense strand
gugaagacccuugcugcua

SEQ ID NO: 173032 - RNA, 19 nt, Homo sapiens
  misc_RNA (1)...(19): siRNA sense strand
gcagaccuuuauguauuau

SEQ ID NO: 173033 - RNA, 19 nt, Homo sapiens
  misc_RNA (1)...(19): siRNA sense strand
guuaauaucauugccaaga

SEQ ID NO: 173034 - RNA, 19 nt, Homo sapiens
  misc_RNA (1)...(19): siRNA sense strand
cuaaauaucgauguuguug

SEQ ID NO: 173035 - RNA, 19 nt, Homo sapiens
  misc_RNA (1)...(19): siRNA sense strand
uagcaaagccaucgugaag

SEQ ID NO: 173036 - RNA, 19 nt, Homo sapiens
  misc_RNA (1)...(19): siRNA sense strand
gcacccugccugugucuug

SEQ ID NO: 173037 - RNA, 19 nt, Homo sapiens
  misc_RNA (1)...(19): siRNA sense strand
cgaaguagaggaacaggau

SEQ ID NO: 173038 - RNA, 19 nt, Homo sapiens
  misc_RNA (1)...(19): siRNA sense strand
gaaaugcaugugggugauu

SEQ ID NO: 173039 - RNA, 19 nt, Homo sapiens
  misc_RNA (1)...(19): siRNA sense strand
cuaaaccagaugagaagua

SEQ ID NO: 173040 - RNA, 19 nt, Homo sapiens
  misc_RNA (1)...(19): siRNA sense strand
uaaagccccuucugcaaaa

SEQ ID NO: 173041 - RNA, 19 nt, Homo sapiens
  misc_RNA (1)...(19): siRNA sense strand
gaccugggagacauucuaa

SEQ ID NO: 173042 - RNA, 19 nt, Homo sapiens
  misc_RNA (1)...(19): siRNA sense strand
cuaugcaaauccuuguaaa

SEQ ID NO: 173043 - RNA, 19 nt, Homo sapiens
  misc_RNA (1)...(19): siRNA sense strand
ggcgguggcuuuccuggau

SEQ ID NO: 173044 - RNA, 19 nt, Homo sapiens
  misc_RNA (1)...(19): siRNA sense strand
cagagcacaucccaaagca

SEQ ID NO: 173045 - RNA, 19 nt, Homo sapiens
  misc_RNA (1)...(19): siRNA sense strand
ggcaacucaugcagcaauu

SEQ ID NO: 173046 - RNA, 19 nt, Homo sapiens
  misc_RNA (1)...(19): siRNA sense strand
gacgaucuacuaugugaug

SEQ ID NO: 173047 - RNA, 19 nt, Homo sapiens
  misc_RNA (1)...(19): siRNA sense strand
caucugaggugguuaaaag

SEQ ID NO: 173048 - RNA, 19 nt, Homo sapiens
  misc_RNA (1)...(19): siRNA sense strand
gugcuucggcuaguauuaa

SEQ ID NO: 173049 - RNA, 19 nt, Homo sapiens
  misc_RNA (1)...(19): siRNA sense strand
ugugaaugauggcgucuau

SEQ ID NO: 173050 - RNA, 19 nt, Homo sapiens
  misc_RNA (1)...(19): siRNA sense strand
gaggaugugaaacuuaaau

SEQ ID NO: 173051 - RNA, 19 nt, Homo sapiens
  misc_RNA (1)...(19): siRNA sense strand
ggauugccacugaugauuc

SEQ ID NO: 173052 - RNA, 19 nt, Homo sapiens
  misc_RNA (1)...(19): siRNA sense strand
gcacaucccaaagcaaagu

SEQ ID NO: 173053 - RNA, 19 nt, Homo sapiens
  misc_RNA (1)...(19): siRNA sense strand
gagaggauuaucuaugcaa

SEQ ID NO: 173054 - RNA, 19 nt, Homo sapiens
  misc_RNA (1)...(19): siRNA sense strand
agaggauuaucuaugcaaa

SEQ ID NO: 173055 - RNA, 19 nt, Homo sapiens
  misc_RNA (1)...(19): siRNA sense strand
guauuauucauccagcaua

SEQ ID NO: 173056 - RNA, 19 nt, Homo sapiens
  misc_RNA (1)...(19): siRNA sense strand
gaaugauggcgucuaugga

SEQ ID NO: 173057 - RNA, 19 nt, Homo sapiens
  misc_RNA (1)...(19): siRNA sense strand
gggcucugaugacgaagau

SEQ ID NO: 173058 - RNA, 19 nt, Homo sapiens
  misc_RNA (1)...(19): siRNA sense strand
gagaucaccggcguaauca

SEQ ID NO: 173059 - RNA, 19 nt, Homo sapiens
  misc_RNA (1)...(19): siRNA sense strand
ucugaugcccgcuguguuu

SEQ ID NO: 173060 - RNA, 19 nt, Homo sapiens
  misc_RNA (1)...(19): siRNA sense strand
gagcuaaauaucgauguug

SEQ ID NO: 173061 - RNA, 19 nt, Homo sapiens
  misc_RNA (1)...(19): siRNA sense strand
agagcuaaauaucgauguu

SEQ ID NO: 173062 - RNA, 19 nt, Homo sapiens
  misc_RNA (1)...(19): siRNA sense strand
gcgaaagagcuaaauaucg

SEQ ID NO: 173063 - RNA, 19 nt, Homo sapiens
  misc_RNA (1)...(19): siRNA sense strand
auagugaaguugaguugau

SEQ ID NO: 173064 - RNA, 19 nt, Homo sapiens
  misc_RNA (1)...(19): siRNA sense strand
gcugcugccucuacguuca

SEQ ID NO: 173065 - RNA, 19 nt, Homo sapiens
  misc_RNA (1)...(19): siRNA sense strand
ccagaugagaaguauuauu

SEQ ID NO: 173066 - RNA, 19 nt, Homo sapiens
  misc_RNA (1)...(19): siRNA sense strand
ugagcagaccuuuauguau

SEQ ID NO: 173067 - RNA, 19 nt, Homo sapiens
  misc_RNA (1)...(19): siRNA sense strand
gaacgggcgaaagagcuaa

SEQ ID NO: 173068 - RNA, 19 nt, Homo sapiens
  misc_RNA (1)...(19): siRNA sense strand
gaaagagcuaaauaucgau

SEQ ID NO: 173069 - RNA, 19 nt, Homo sapiens
  misc_RNA (1)...(19): siRNA sense strand
guaaagccccuucugcaaa

SEQ ID NO: 173070 - RNA, 19 nt, Homo sapiens
  misc_RNA (1)...(19): siRNA sense strand
agagaucaccggcguaauc

SEQ ID NO: 173071 - RNA, 19 nt, Homo sapiens
  misc_RNA (1)...(19): siRNA sense strand
guaugcugcuaauaaugga

SEQ ID NO: 173072 - RNA, 19 nt, Homo sapiens
  misc_RNA (1)...(19): siRNA sense strand
aaacaugggcgcuuacacu

SEQ ID NO: 173073 - RNA, 19 nt, Homo sapiens
  misc_RNA (1)...(19): siRNA sense strand
uaugaccacgcacauguaa

SEQ ID NO: 173074 - RNA, 19 nt, Homo sapiens
  misc_RNA (1)...(19): siRNA sense strand
gauauuggcgguggcuuuc

SEQ ID NO: 173075 - RNA, 19 nt, Homo sapiens
  misc_RNA (1)...(19): siRNA sense strand
ggcgaaagagcuaaauauc

SEQ ID NO: 173076 - RNA, 19 nt, Homo sapiens
  misc_RNA (1)...(19): siRNA sense strand
aaguugaguugaugaaagu

SEQ ID NO: 173077 - RNA, 19 nt, Homo sapiens
  misc_RNA (1)...(19): siRNA sense strand
gcuaaauaucgauguuguu

SEQ ID NO: 173078 - RNA, 19 nt, Homo sapiens
  misc_RNA (1)...(19): siRNA sense strand
aaaugcaugugggugauug

SEQ ID NO: 173079 - RNA, 19 nt, Homo sapiens
  misc_RNA (1)...(19): siRNA sense strand
ugaaugauggcgucuaugg

SEQ ID NO: 173080 - RNA, 19 nt, Homo sapiens
  misc_RNA (1)...(19): siRNA sense strand
cuuucacgcuugcaguuaa

SEQ ID NO: 173081 - RNA, 19 nt, Homo sapiens
  misc_RNA (1)...(19): siRNA sense strand
gaucaccggcguaaucaac

SEQ ID NO: 173082 - RNA, 19 nt, Homo sapiens
  misc_RNA (1)...(19): siRNA sense strand
ggagaucucugacaucaag

SEQ ID NO: 173083 - RNA, 19 nt, Homo sapiens
  misc_RNA (1)...(19): siRNA sense strand
uaaacuauccucccuauau

SEQ ID NO: 173084 - RNA, 19 nt, Homo sapiens
  misc_RNA (1)...(19): siRNA sense strand
gcaaguuccuccucagauc

SEQ ID NO: 173085 - RNA, 19 nt, Homo sapiens
  misc_RNA (1)...(19): siRNA sense strand
gaauaucuccucagacauc

SEQ ID NO: 173086 - RNA, 19 nt, Homo sapiens
  misc_RNA (1)...(19): siRNA sense strand
gacagacaaucaucccaaa

SEQ ID NO: 173087 - RNA, 19 nt, Homo sapiens
  misc_RNA (1)...(19): siRNA sense strand
ccacuggucuggauggaau

SEQ ID NO: 173088 - RNA, 19 nt, Homo sapiens
  misc_RNA (1)...(19): siRNA sense strand
ggccagggcuuuguaagug

SEQ ID NO: 173089 - RNA, 19 nt, Homo sapiens
  misc_RNA (1)...(19): siRNA sense strand
gaaugaggauugaaaacaa

SEQ ID NO: 173090 - RNA, 19 nt, Homo sapiens
  misc_RNA (1)...(19): siRNA sense strand
ucaugaauaucuccucaga

SEQ ID NO: 173091 - RNA, 19 nt, Homo sapiens
  misc_RNA (1)...(19): siRNA sense strand
gauggaaugaggauugaaa

SEQ ID NO: 173092 - RNA, 19 nt, Homo sapiens
  misc_RNA (1)...(19): siRNA sense strand
aaacuauccucccuauauc

SEQ ID NO: 173093 - RNA, 19 nt, Homo sapiens
  misc_RNA (1)...(19): siRNA sense strand
ggaaggccagggcuuugua

SEQ ID NO: 173094 - RNA, 19 nt, Homo sapiens
  misc_RNA (1)...(19): siRNA sense strand
ccaaagcuauggacaacgu

SEQ ID NO: 173095 - RNA, 19 nt, Homo sapiens
  misc_RNA (1)...(19): siRNA sense strand
gcauguccacucugacuuu

SEQ ID NO: 173096 - RNA, 19 nt, Homo sapiens
  misc_RNA (1)...(19): siRNA sense strand
cauagacccucgugugauc

SEQ ID NO: 173097 - RNA, 19 nt, Homo sapiens
  misc_RNA (1)...(19): siRNA sense strand
ccucuuagcccacuucuuc

SEQ ID NO: 173098 - RNA, 19 nt, Homo sapiens
  misc_RNA (1)...(19): siRNA sense strand
ucaauacaccaacccagua

SEQ ID NO: 173099 - RNA, 19 nt, Homo sapiens
  misc_RNA (1)...(19): siRNA sense strand
gaaggccagggcuuuguaa

SEQ ID NO: 173100 - RNA, 19 nt, Homo sapiens
  misc_RNA (1)...(19): siRNA sense strand
ggauguguaugacgaaggu

SEQ ID NO: 173101 - RNA, 19 nt, Homo sapiens
  misc_RNA (1)...(19): siRNA sense strand
caaggaaggccagggcuuu

SEQ ID NO: 173102 - RNA, 19 nt, Homo sapiens
  misc_RNA (1)...(19): siRNA sense strand
gucccggguucaccuaaua

SEQ ID NO: 173103 - RNA, 19 nt, Homo sapiens
  misc_RNA (1)...(19): siRNA sense strand
ggccgcauguccacucuga

SEQ ID NO: 173104 - RNA, 19 nt, Homo sapiens
  misc_RNA (1)...(19): siRNA sense strand
uguaaacuauccucccuau

SEQ ID NO: 173105 - RNA, 19 nt, Homo sapiens
  misc_RNA (1)...(19): siRNA sense strand
cuccucagaucaugaauau

SEQ ID NO: 173106 - RNA, 19 nt, Homo sapiens
  misc_RNA (1)...(19): siRNA sense strand
uaugggaacuauacuugug

SEQ ID NO: 173107 - RNA, 19 nt, Homo sapiens
  misc_RNA (1)...(19): siRNA sense strand
augaauaucuccucagaca

SEQ ID NO: 173108 - RNA, 19 nt, Homo sapiens
  misc_RNA (1)...(19): siRNA sense strand
gugaucauccuggucaaua

SEQ ID NO: 173109 - RNA, 19 nt, Homo sapiens
  misc_RNA (1)...(19): siRNA sense strand
gccagggcuuuguaaguga

SEQ ID NO: 173110 - RNA, 19 nt, Homo sapiens
  misc_RNA (1)...(19): siRNA sense strand
cugacuuucuucaauguuu

SEQ ID NO: 173111 - RNA, 19 nt, Homo sapiens
  misc_RNA (1)...(19): siRNA sense strand
cgaacaagcuugggaacac

SEQ ID NO: 173112 - RNA, 19 nt, Homo sapiens
  misc_RNA (1)...(19): siRNA sense strand
gaaugacaagugguccaua

SEQ ID NO: 173113 - RNA, 19 nt, Homo sapiens
  misc_RNA (1)...(19): siRNA sense strand
guaaacuauccucccuaua

SEQ ID NO: 173114 - RNA, 19 nt, Homo sapiens
  misc_RNA (1)...(19): siRNA sense strand
aaugacaagugguccauag

SEQ ID NO: 173115 - RNA, 19 nt, Homo sapiens
  misc_RNA (1)...(19): siRNA sense strand
auacuuguguggccacgaa

SEQ ID NO: 173116 - RNA, 19 nt, Homo sapiens
  misc_RNA (1)...(19): siRNA sense strand
ucagguguaccauagauga

SEQ ID NO: 173117 - RNA, 19 nt, Homo sapiens
  misc_RNA (1)...(19): siRNA sense strand
cuggagaucucugacauca

SEQ ID NO: 173118 - RNA, 19 nt, Homo sapiens
  misc_RNA (1)...(19): siRNA sense strand
uggcugaauuccagugguu

SEQ ID NO: 173119 - RNA, 19 nt, Homo sapiens
  misc_RNA (1)...(19): siRNA sense strand
ccucagguguaccauagau

SEQ ID NO: 173120 - RNA, 19 nt, Homo sapiens
  misc_RNA (1)...(19): siRNA sense strand
acucugacuuucuucaaug

SEQ ID NO: 173121 - RNA, 19 nt, Homo sapiens
  misc_RNA (1)...(19): siRNA sense strand
guuagccacuggucuggau

SEQ ID NO: 173122 - RNA, 19 nt, Homo sapiens
  misc_RNA (1)...(19): siRNA sense strand
gauuaugggaacuauacuu

SEQ ID NO: 173123 - RNA, 19 nt, Homo sapiens
  misc_RNA (1)...(19): siRNA sense strand
ugacuuucuucaauguuuc

SEQ ID NO: 173124 - RNA, 19 nt, Homo sapiens
  misc_RNA (1)...(19): siRNA sense strand
aaaggauuaugggaacuau

SEQ ID NO: 173125 - RNA, 19 nt, Homo sapiens
  misc_RNA (1)...(19): siRNA sense strand
gaucauccuggucaauaca

SEQ ID NO: 173126 - RNA, 19 nt, Homo sapiens
  misc_RNA (1)...(19): siRNA sense strand
uguccacucugacuuucuu

SEQ ID NO: 173127 - RNA, 19 nt, Homo sapiens
  misc_RNA (1)...(19): siRNA sense strand
gaaaacaaaggccgcaugu

SEQ ID NO: 173128 - RNA, 19 nt, Homo sapiens
  misc_RNA (1)...(19): siRNA sense strand
uggauggaaugaggauuga

SEQ ID NO: 173129 - RNA, 19 nt, Homo sapiens
  misc_RNA (1)...(19): siRNA sense strand
caaguuccuccucagauca

SEQ ID NO: 173130 - RNA, 19 nt, Homo sapiens
  misc_RNA (1)...(19): siRNA sense strand
ucaggcugcuguuccuugu

SEQ ID NO: 173131 - RNA, 19 nt, Homo sapiens
  misc_RNA (1)...(19): siRNA sense strand
agucauugaugguguaaac

SEQ ID NO: 173132 - RNA, 19 nt, Homo sapiens
  misc_RNA (1)...(19): siRNA sense strand
gcagaccagagccaacugu

SEQ ID NO: 173133 - RNA, 19 nt, Homo sapiens
  misc_RNA (1)...(19): siRNA sense strand
uauccucccuauaucucaa

SEQ ID NO: 173134 - RNA, 19 nt, Homo sapiens
  misc_RNA (1)...(19): siRNA sense strand
uuagcccacuucuucauca

SEQ ID NO: 173135 - RNA, 19 nt, Homo sapiens
  misc_RNA (1)...(19): siRNA sense strand
ccaacccaguacagcauca

SEQ ID NO: 173136 - RNA, 19 nt, Homo sapiens
  misc_RNA (1)...(19): siRNA sense strand
ggaaugaggauugaaaaca

SEQ ID NO: 173137 - RNA, 19 nt, Homo sapiens
  misc_RNA (1)...(19): siRNA sense strand
uccagugguucaaggaaga

SEQ ID NO: 173138 - RNA, 19 nt, Homo sapiens
  misc_RNA (1)...(19): siRNA sense strand
ggaaugacaagugguccau

SEQ ID NO: 173139 - RNA, 19 nt, Homo sapiens
  misc_RNA (1)...(19): siRNA sense strand
aaugagggaagcaguguga

SEQ ID NO: 173140 - RNA, 19 nt, Homo sapiens
  misc_RNA (1)...(19): siRNA sense strand
caccuaauagugcaaguuc

SEQ ID NO: 173141 - RNA, 19 nt, Homo sapiens
  misc_RNA (1)...(19): siRNA sense strand
cacucugacuuucuucaau

SEQ ID NO: 173142 - RNA, 19 nt, Homo sapiens
  misc_RNA (1)...(19): siRNA sense strand
gugcaaguuccuccucaga

SEQ ID NO: 173143 - RNA, 19 nt, Homo sapiens
  misc_RNA (1)...(19): siRNA sense strand
gcagucauugaugguguaa

SEQ ID NO: 173144 - RNA, 19 nt, Homo sapiens
  misc_RNA (1)...(19): siRNA sense strand
ccacucugacuuucuucaa

SEQ ID NO: 173145 - RNA, 19 nt, Homo sapiens
  misc_RNA (1)...(19): siRNA sense strand
cccgaugugcggaaaguaa

SEQ ID NO: 173146 - RNA, 19 nt, Homo sapiens
  misc_RNA (1)...(19): siRNA sense strand
ccuccucagaucaugaaua

SEQ ID NO: 173147 - RNA, 19 nt, Homo sapiens
  misc_RNA (1)...(19): siRNA sense strand
gcaaauaccucuccauuau

SEQ ID NO: 173148 - RNA, 19 nt, Homo sapiens
  misc_RNA (1)...(19): siRNA sense strand
ggagacaaguguaaucuua

SEQ ID NO: 173149 - RNA, 19 nt, Homo sapiens
  misc_RNA (1)...(19): siRNA sense strand
gcaaugacuugauagcuaa

SEQ ID NO: 173150 - RNA, 19 nt, Homo sapiens
  misc_RNA (1)...(19): siRNA sense strand
ggaauaccaugagcuguua

SEQ ID NO: 173151 - RNA, 19 nt, Homo sapiens
  misc_RNA (1)...(19): siRNA sense strand
gaaaagaacucucuaagau

SEQ ID NO: 173152 - RNA, 19 nt, Homo sapiens
  misc_RNA (1)...(19): siRNA sense strand
gaacgagccacacucuuua

SEQ ID NO: 173153 - RNA, 19 nt, Homo sapiens
  misc_RNA (1)...(19): siRNA sense strand
ggaguuaacccauauuuau

SEQ ID NO: 173154 - RNA, 19 nt, Homo sapiens
  misc_RNA (1)...(19): siRNA sense strand
gcagagauuuccucauguu

SEQ ID NO: 173155 - RNA, 19 nt, Homo sapiens
  misc_RNA (1)...(19): siRNA sense strand
gaaagcuaguucagaaguu

SEQ ID NO: 173156 - RNA, 19 nt, Homo sapiens
  misc_RNA (1)...(19): siRNA sense strand
agacugagcugcagaauac

SEQ ID NO: 173157 - RNA, 19 nt, Homo sapiens
  misc_RNA (1)...(19): siRNA sense strand
ggaagaaaguuaccacaac

SEQ ID NO: 173158 - RNA, 19 nt, Homo sapiens
  misc_RNA (1)...(19): siRNA sense strand
caaacuauagccucaauuu

SEQ ID NO: 173159 - RNA, 19 nt, Homo sapiens
  misc_RNA (1)...(19): siRNA sense strand
ggccaaagcugugaagaug

SEQ ID NO: 173160 - RNA, 19 nt, Homo sapiens
  misc_RNA (1)...(19): siRNA sense strand
ccacuacacuuggaagaaa

SEQ ID NO: 173161 - RNA, 19 nt, Homo sapiens
  misc_RNA (1)...(19): siRNA sense strand
ccaaggaguuaacccauau

SEQ ID NO: 173162 - RNA, 19 nt, Homo sapiens
  misc_RNA (1)...(19): siRNA sense strand
gccacacucuuuaggauaa

SEQ ID NO: 173163 - RNA, 19 nt, Homo sapiens
  misc_RNA (1)...(19): siRNA sense strand
gaccagagacugauggaaa

SEQ ID NO: 173164 - RNA, 19 nt, Homo sapiens
  misc_RNA (1)...(19): siRNA sense strand
gagaauacugggaguguaa

SEQ ID NO: 173165 - RNA, 19 nt, Homo sapiens
  misc_RNA (1)...(19): siRNA sense strand
ggagaauacugggagugua

SEQ ID NO: 173166 - RNA, 19 nt, Homo sapiens
  misc_RNA (1)...(19): siRNA sense strand
gacccucucuagcaaagua

SEQ ID NO: 173167 - RNA, 19 nt, Homo sapiens
  misc_RNA (1)...(19): siRNA sense strand
cgaugaagaugaugagaau

SEQ ID NO: 173168 - RNA, 19 nt, Homo sapiens
  misc_RNA (1)...(19): siRNA sense strand
caauguggguucugguaaa

SEQ ID NO: 173169 - RNA, 19 nt, Homo sapiens
  misc_RNA (1)...(19): siRNA sense strand
ggcaaauaccucuccauua

SEQ ID NO: 173170 - RNA, 19 nt, Homo sapiens
  misc_RNA (1)...(19): siRNA sense strand
ugaagagucugucucacaa

SEQ ID NO: 173171 - RNA, 19 nt, Homo sapiens
  misc_RNA (1)...(19): siRNA sense strand
gcagugacaucagccuuga

SEQ ID NO: 173172 - RNA, 19 nt, Homo sapiens
  misc_RNA (1)...(19): siRNA sense strand
gaucaacgccugcagagau

SEQ ID NO: 173173 - RNA, 19 nt, Homo sapiens
  misc_RNA (1)...(19): siRNA sense strand
cgaacgagccacacucuuu

SEQ ID NO: 173174 - RNA, 19 nt, Homo sapiens
  misc_RNA (1)...(19): siRNA sense strand
gaucaaacaggucaacgaa

SEQ ID NO: 173175 - RNA, 19 nt, Homo sapiens
  misc_RNA (1)...(19): siRNA sense strand
caaaguacagccagucauu

SEQ ID NO: 173176 - RNA, 19 nt, Homo sapiens
  misc_RNA (1)...(19): siRNA sense strand
ggacauugcgucaggaaau

SEQ ID NO: 173177 - RNA, 19 nt, Homo sapiens
  misc_RNA (1)...(19): siRNA sense strand
ggacaugagcgaugaagau

SEQ ID NO: 173178 - RNA, 19 nt, Homo sapiens
  misc_RNA (1)...(19): siRNA sense strand
cugcagagauuuccucaug

SEQ ID NO: 173179 - RNA, 19 nt, Homo sapiens
  misc_RNA (1)...(19): siRNA sense strand
gagagaagcggaagcuaug

SEQ ID NO: 173180 - RNA, 19 nt, Homo sapiens
  misc_RNA (1)...(19): siRNA sense strand
gaacugcauuggaaaagaa

SEQ ID NO: 173181 - RNA, 19 nt, Homo sapiens
  misc_RNA (1)...(19): siRNA sense strand
ugacagauccaucaggaaa

SEQ ID NO: 173182 - RNA, 19 nt, Homo sapiens
  misc_RNA (1)...(19): siRNA sense strand
ggaagugacagauccauca

SEQ ID NO: 173183 - RNA, 19 nt, Homo sapiens
  misc_RNA (1)...(19): siRNA sense strand
gcaccaugcugaguccaaa

SEQ ID NO: 173184 - RNA, 19 nt, Homo sapiens
  misc_RNA (1)...(19): siRNA sense strand
gagccacacucuuuaggau

SEQ ID NO: 173185 - RNA, 19 nt, Homo sapiens
  misc_RNA (1)...(19): siRNA sense strand
caccauaugaucccuauaa

SEQ ID NO: 173186 - RNA, 19 nt, Homo sapiens
  misc_RNA (1)...(19): siRNA sense strand
ggaauccuuuaccgaagaa

SEQ ID NO: 173187 - RNA, 19 nt, Homo sapiens
  misc_RNA (1)...(19): siRNA sense strand
cuacuucucucgggaugua

SEQ ID NO: 173188 - RNA, 19 nt, Homo sapiens
  misc_RNA (1)...(19): siRNA sense strand
gaacaggugagucaucauc

SEQ ID NO: 173189 - RNA, 19 nt, Homo sapiens
  misc_RNA (1)...(19): siRNA sense strand
guuacgaccugaccagaga

SEQ ID NO: 173190 - RNA, 19 nt, Homo sapiens
  misc_RNA (1)...(19): siRNA sense strand
ugcaaugacuugauagcua

SEQ ID NO: 173191 - RNA, 19 nt, Homo sapiens
  misc_RNA (1)...(19): siRNA sense strand
gagacaaguguaaucuuaa

SEQ ID NO: 173192 - RNA, 19 nt, Homo sapiens
  misc_RNA (1)...(19): siRNA sense strand
augaagaacugcauuggaa

SEQ ID NO: 173193 - RNA, 19 nt, Homo sapiens
  misc_RNA (1)...(19): siRNA sense strand
gaaaagagaaccagaauac

SEQ ID NO: 173194 - RNA, 19 nt, Homo sapiens
  misc_RNA (1)...(19): siRNA sense strand
gcaacuucaucauuuccaa

SEQ ID NO: 173195 - RNA, 19 nt, Homo sapiens
  misc_RNA (1)...(19): siRNA sense strand
gcaauguggguucugguaa

SEQ ID NO: 173196 - RNA, 19 nt, Homo sapiens
  misc_RNA (1)...(19): siRNA sense strand
ggcaaacacuccuggcaau

SEQ ID NO: 173197 - RNA, 19 nt, Homo sapiens
  misc_RNA (1)...(19): siRNA sense strand
cacgugcaaugacuugaua

SEQ ID NO: 173198 - RNA, 19 nt, Homo sapiens
  misc_RNA (1)...(19): siRNA sense strand
aaacauguacuacuucuca

SEQ ID NO: 173199 - RNA, 19 nt, Homo sapiens
  misc_RNA (1)...(19): siRNA sense strand
caugagcgaugaagaugau

SEQ ID NO: 173200 - RNA, 19 nt, Homo sapiens
  misc_RNA (1)...(19): siRNA sense strand
ccuuugagcuggaccgauu

SEQ ID NO: 173201 - RNA, 19 nt, Homo sapiens
  misc_RNA (1)...(19): siRNA sense strand
caaauggaccaauuauauc

SEQ ID NO: 173202 - RNA, 19 nt, Homo sapiens
  misc_RNA (1)...(19): siRNA sense strand
uuacugaagaucuggaaua

SEQ ID NO: 173203 - RNA, 19 nt, Homo sapiens
  misc_RNA (1)...(19): siRNA sense strand
aaacaggacuggagcucau

SEQ ID NO: 173204 - RNA, 19 nt, Homo sapiens
  misc_RNA (1)...(19): siRNA sense strand
gcagggucaugcuguggaa

SEQ ID NO: 173205 - RNA, 19 nt, Homo sapiens
  misc_RNA (1)...(19): siRNA sense strand
caacuguacacaacauuau

SEQ ID NO: 173206 - RNA, 19 nt, Homo sapiens
  misc_RNA (1)...(19): siRNA sense strand
ccacaacuguacacaacau

SEQ ID NO: 173207 - RNA, 19 nt, Homo sapiens
  misc_RNA (1)...(19): siRNA sense strand
cagcaaguuucgaggcaaa

SEQ ID NO: 173208 - RNA, 19 nt, Homo sapiens
  misc_RNA (1)...(19): siRNA sense strand
ucuguuauguugcagcuuu

SEQ ID NO: 173209 - RNA, 19 nt, Homo sapiens
  misc_RNA (1)...(19): siRNA sense strand
gagcuggagucccugaagu

SEQ ID NO: 173210 - RNA, 19 nt, Homo sapiens
  misc_RNA (1)...(19): siRNA sense strand
gaucaaaggcagaaaugag

SEQ ID NO: 173211 - RNA, 19 nt, Homo sapiens
  misc_RNA (1)...(19): siRNA sense strand
gcaaguuucgaggcaaaua

SEQ ID NO: 173212 - RNA, 19 nt, Homo sapiens
  misc_RNA (1)...(19): siRNA sense strand
aaacguacuggcagcaaua

SEQ ID NO: 173213 - RNA, 19 nt, Homo sapiens
  misc_RNA (1)...(19): siRNA sense strand
aaaagucacuacaguauga

SEQ ID NO: 173214 - RNA, 19 nt, Homo sapiens
  misc_RNA (1)...(19): siRNA sense strand
acuauagccucaauuuaug

SEQ ID NO: 173215 - RNA, 19 nt, Homo sapiens
  misc_RNA (1)...(19): siRNA sense strand
gugaacaggugagucauca

SEQ ID NO: 173216 - RNA, 19 nt, Homo sapiens
  misc_RNA (1)...(19): siRNA sense strand
cugaagaucuggaauacca

SEQ ID NO: 173217 - RNA, 19 nt, Homo sapiens
  misc_RNA (1)...(19): siRNA sense strand
uauggagcaucaugaagaa

SEQ ID NO: 173218 - RNA, 19 nt, Homo sapiens
  misc_RNA (1)...(19): siRNA sense strand
caaacguacuggcagcaau

SEQ ID NO: 173219 - RNA, 19 nt, Homo sapiens
  misc_RNA (1)...(19): siRNA sense strand
caaaaucaccagcaaguuu

SEQ ID NO: 173220 - RNA, 19 nt, Homo sapiens
  misc_RNA (1)...(19): siRNA sense strand
guaccgaucccucugugaa

SEQ ID NO: 173221 - RNA, 19 nt, Homo sapiens
  misc_RNA (1)...(19): siRNA sense strand
ggaaaagaacucucuaaga

SEQ ID NO: 173222 - RNA, 19 nt, Homo sapiens
  misc_RNA (1)...(19): siRNA sense strand
aaagcuaguucagaaguug

SEQ ID NO: 173223 - RNA, 19 nt, Homo sapiens
  misc_RNA (1)...(19): siRNA sense strand
ggaagaaggacccuguuac

SEQ ID NO: 173224 - RNA, 19 nt, Homo sapiens
  misc_RNA (1)...(19): siRNA sense strand
cagaaaacauguacuacuu

SEQ ID NO: 173225 - RNA, 19 nt, Homo sapiens
  misc_RNA (1)...(19): siRNA sense strand
caagacaggagacaagugu

SEQ ID NO: 173226 - RNA, 19 nt, Homo sapiens
  misc_RNA (1)...(19): siRNA sense strand
gaagagucugucucacaaa

SEQ ID NO: 173227 - RNA, 19 nt, Homo sapiens
  misc_RNA (1)...(19): siRNA sense strand
agaucagucuggcgaaauu

SEQ ID NO: 173228 - RNA, 19 nt, Homo sapiens
  misc_RNA (1)...(19): siRNA sense strand
caaauaccucuccauuaug

SEQ ID NO: 173229 - RNA, 19 nt, Homo sapiens
  misc_RNA (1)...(19): siRNA sense strand
ugaagaugaugagaaugaa

SEQ ID NO: 173230 - RNA, 19 nt, Homo sapiens
  misc_RNA (1)...(19): siRNA sense strand
aaacacuccuggcaaugug

SEQ ID NO: 173231 - RNA, 19 nt, Homo sapiens
  misc_RNA (1)...(19): siRNA sense strand
gcaaaagucacuacaguau

SEQ ID NO: 173232 - RNA, 19 nt, Homo sapiens
  misc_RNA (1)...(19): siRNA sense strand
gccaaacuauagccucaau

SEQ ID NO: 173233 - RNA, 19 nt, Homo sapiens
  misc_RNA (1)...(19): siRNA sense strand
cggaagaaggacccuguua

SEQ ID NO: 173234 - RNA, 19 nt, Homo sapiens
  misc_RNA (1)...(19): siRNA sense strand
gagaagcggaagcuaugaa

SEQ ID NO: 173235 - RNA, 19 nt, Homo sapiens
  misc_RNA (1)...(19): siRNA sense strand
cgacagagaggccaugaag

SEQ ID NO: 173236 - RNA, 19 nt, Homo sapiens
  misc_RNA (1)...(19): siRNA sense strand
agacaggagacaaguguaa

SEQ ID NO: 173237 - RNA, 19 nt, Homo sapiens
  misc_RNA (1)...(19): siRNA sense strand
gggcaccacuacacuugga

SEQ ID NO: 173238 - RNA, 19 nt, Homo sapiens
  misc_RNA (1)...(19): siRNA sense strand
gagauuuccucauguuagc

SEQ ID NO: 173239 - RNA, 19 nt, Homo sapiens
  misc_RNA (1)...(19): siRNA sense strand
agaaggacccuguuaccaa

SEQ ID NO: 173240 - RNA, 19 nt, Homo sapiens
  misc_RNA (1)...(19): siRNA sense strand
auaaggcacugugguuuga

SEQ ID NO: 173241 - RNA, 19 nt, Homo sapiens
  misc_RNA (1)...(19): siRNA sense strand
gcgaugaagaugaugagaa

SEQ ID NO: 173242 - RNA, 19 nt, Homo sapiens
  misc_RNA (1)...(19): siRNA sense strand
gaaagagaccagcguaucc

SEQ ID NO: 173243 - RNA, 19 nt, Homo sapiens
  misc_RNA (1)...(19): siRNA sense strand
ucagaugaaucaggagaug

SEQ ID NO: 173244 - RNA, 19 nt, Homo sapiens
  misc_RNA (1)...(19): siRNA sense strand
gggugaugcucgacagaga

SEQ ID NO: 173245 - RNA, 19 nt, Homo sapiens
  misc_RNA (1)...(19): siRNA sense strand
aaauaccucuccauuaugc

SEQ ID NO: 173246 - RNA, 19 nt, Homo sapiens
  misc_RNA (1)...(19): siRNA sense strand
ccaaagcugugaagaugcu

SEQ ID NO: 173247 - RNA, 19 nt, Homo sapiens
  misc_RNA (1)...(19): siRNA sense strand
ggacuaaacgggacgugua

SEQ ID NO: 173248 - RNA, 19 nt, Homo sapiens
  misc_RNA (1)...(19): siRNA sense strand
ggacuuggcaggcaauuau

SEQ ID NO: 173249 - RNA, 19 nt, Homo sapiens
  misc_RNA (1)...(19): siRNA sense strand
gggcugggcuccaucuuug

SEQ ID NO: 173250 - RNA, 19 nt, Homo sapiens
  misc_RNA (1)...(19): siRNA sense strand
gcagauggguuuaaugacu

SEQ ID NO: 173251 - RNA, 19 nt, Homo sapiens
  misc_RNA (1)...(19): siRNA sense strand
cagcugcgcucuggcuuua

SEQ ID NO: 173252 - RNA, 19 nt, Homo sapiens
  misc_RNA (1)...(19): siRNA sense strand
acacacagaugaaugacaa

SEQ ID NO: 173253 - RNA, 19 nt, Homo sapiens
  misc_RNA (1)...(19): siRNA sense strand
gaggaccgccuuuaucaaa

SEQ ID NO: 173254 - RNA, 19 nt, Homo sapiens
  misc_RNA (1)...(19): siRNA sense strand
gagaggaccgccuuuauca

SEQ ID NO: 173255 - RNA, 19 nt, Homo sapiens
  misc_RNA (1)...(19): siRNA sense strand
gcaaagcgacggacuaaac

SEQ ID NO: 173256 - RNA, 19 nt, Homo sapiens
  misc_RNA (1)...(19): siRNA sense strand
ggaagugcaucaucgacau

SEQ ID NO: 173257 - RNA, 19 nt, Homo sapiens
  misc_RNA (1)...(19): siRNA sense strand
gaagccagcccaccucaau

SEQ ID NO: 173258 - RNA, 19 nt, Homo sapiens
  misc_RNA (1)...(19): siRNA sense strand
gaacaugacagcugcaacu

SEQ ID NO: 173259 - RNA, 19 nt, Homo sapiens
  misc_RNA (1)...(19): siRNA sense strand
ccaauaagaaccucacaug

SEQ ID NO: 173260 - RNA, 19 nt, Homo sapiens
  misc_RNA (1)...(19): siRNA sense strand
cagcgaagccaacaacuau

SEQ ID NO: 173261 - RNA, 19 nt, Homo sapiens
  misc_RNA (1)...(19): siRNA sense strand
ccaaccacauccacaucua

SEQ ID NO: 173262 - RNA, 19 nt, Homo sapiens
  misc_RNA (1)...(19): siRNA sense strand
gaagaaccacccggacuug

SEQ ID NO: 173263 - RNA, 19 nt, Homo sapiens
  misc_RNA (1)...(19): siRNA sense strand
gcaguggcaaccagaauga

SEQ ID NO: 173264 - RNA, 19 nt, Homo sapiens
  misc_RNA (1)...(19): siRNA sense strand
gcgaguggguccuagagau

SEQ ID NO: 173265 - RNA, 19 nt, Homo sapiens
  misc_RNA (1)...(19): siRNA sense strand
gguacacacagaugaauga

SEQ ID NO: 173266 - RNA, 19 nt, Homo sapiens
  misc_RNA (1)...(19): siRNA sense strand
ccgcagauggguuuaauga

SEQ ID NO: 173267 - RNA, 19 nt, Homo sapiens
  misc_RNA (1)...(19): siRNA sense strand
ggcucacccuguccuauaa

SEQ ID NO: 173268 - RNA, 19 nt, Homo sapiens
  misc_RNA (1)...(19): siRNA sense strand
ucauauggcuacgggcuuu

SEQ ID NO: 173269 - RNA, 19 nt, Homo sapiens
  misc_RNA (1)...(19): siRNA sense strand
cagcgggaccugaauguga

SEQ ID NO: 173270 - RNA, 19 nt, Homo sapiens
  misc_RNA (1)...(19): siRNA sense strand
guaccugucuggugucacu

SEQ ID NO: 173271 - RNA, 19 nt, Homo sapiens
  misc_RNA (1)...(19): siRNA sense strand
gcgagaggaccgccuuuau

SEQ ID NO: 173272 - RNA, 19 nt, Homo sapiens
  misc_RNA (1)...(19): siRNA sense strand
ugacugggccuucaugaca

SEQ ID NO: 173273 - RNA, 19 nt, Homo sapiens
  misc_RNA (1)...(19): siRNA sense strand
gcccaaagacaucgggaaa

SEQ ID NO: 173274 - RNA, 19 nt, Homo sapiens
  misc_RNA (1)...(19): siRNA sense strand
cgacugacuugcggcagaa

SEQ ID NO: 173275 - RNA, 19 nt, Homo sapiens
  misc_RNA (1)...(19): siRNA sense strand
gcccguaccuccagaaagc

SEQ ID NO: 173276 - RNA, 19 nt, Homo sapiens
  misc_RNA (1)...(19): siRNA sense strand
ccaaagacaucgggaaacg

SEQ ID NO: 173277 - RNA, 19 nt, Homo sapiens
  misc_RNA (1)...(19): siRNA sense strand
gcauuguggucuccauucu

SEQ ID NO: 173278 - RNA, 19 nt, Homo sapiens
  misc_RNA (1)...(19): siRNA sense strand
ccagcgaagccaacaacua

SEQ ID NO: 173279 - RNA, 19 nt, Homo sapiens
  misc_RNA (1)...(19): siRNA sense strand
agaaugacguggagaccau

SEQ ID NO: 173280 - RNA, 19 nt, Homo sapiens
  misc_RNA (1)...(19): siRNA sense strand
cagcagcgccacgcaguuu

SEQ ID NO: 173281 - RNA, 19 nt, Homo sapiens
  misc_RNA (1)...(19): siRNA sense strand
gacugggccuucaugacaa

SEQ ID NO: 173282 - RNA, 19 nt, Homo sapiens
  misc_RNA (1)...(19): siRNA sense strand
caacggugucuguggugua

SEQ ID NO: 173283 - RNA, 19 nt, Homo sapiens
  misc_RNA (1)...(19): siRNA sense strand
cgagaggaccgccuuuauc

SEQ ID NO: 173284 - RNA, 19 nt, Homo sapiens
  misc_RNA (1)...(19): siRNA sense strand
cggcucacccuguccuaua

SEQ ID NO: 173285 - RNA, 19 nt, Homo sapiens
  misc_RNA (1)...(19): siRNA sense strand
gcaaccagaaugagaagca

SEQ ID NO: 173286 - RNA, 19 nt, Homo sapiens
  misc_RNA (1)...(19): siRNA sense strand
cgaguggguccuagagauu

SEQ ID NO: 173287 - RNA, 19 nt, Homo sapiens
  misc_RNA (1)...(19): siRNA sense strand
gcagcugcgcucuggcuuu

SEQ ID NO: 173288 - RNA, 19 nt, Homo sapiens
  misc_RNA (1)...(19): siRNA sense strand
cuuagcagccggcaucauu

SEQ ID NO: 173289 - RNA, 19 nt, Homo sapiens
  misc_RNA (1)...(19): siRNA sense strand
caaguucacccucguacuc

SEQ ID NO: 173290 - RNA, 19 nt, Homo sapiens
  misc_RNA (1)...(19): siRNA sense strand
cuacuccgcagauggguuu

SEQ ID NO: 173291 - RNA, 19 nt, Homo sapiens
  misc_RNA (1)...(19): siRNA sense strand
cagccucgguacacacaga

SEQ ID NO: 173292 - RNA, 19 nt, Homo sapiens
  misc_RNA (1)...(19): siRNA sense strand
ucaccgagcccaaagacau

SEQ ID NO: 173293 - RNA, 19 nt, Homo sapiens
  misc_RNA (1)...(19): siRNA sense strand
cuacacagggcacggcauu

SEQ ID NO: 173294 - RNA, 19 nt, Homo sapiens
  misc_RNA (1)...(19): siRNA sense strand
gcugcgcucuggcuuuagu

SEQ ID NO: 173295 - RNA, 19 nt, Homo sapiens
  misc_RNA (1)...(19): siRNA sense strand
uggaacagcagguggcaaa

SEQ ID NO: 173296 - RNA, 19 nt, Homo sapiens
  misc_RNA (1)...(19): siRNA sense strand
gaccaaguucacccucgua

SEQ ID NO: 173297 - RNA, 19 nt, Homo sapiens
  misc_RNA (1)...(19): siRNA sense strand
augggacgcugaccaaguu

SEQ ID NO: 173298 - RNA, 19 nt, Homo sapiens
  misc_RNA (1)...(19): siRNA sense strand
cugaggcccugguugcuau

SEQ ID NO: 173299 - RNA, 19 nt, Homo sapiens
  misc_RNA (1)...(19): siRNA sense strand
uggcaaagcgacggacuaa

SEQ ID NO: 173300 - RNA, 19 nt, Homo sapiens
  misc_RNA (1)...(19): siRNA sense strand
ccacacuggccacgaccua

SEQ ID NO: 173301 - RNA, 19 nt, Homo sapiens
  misc_RNA (1)...(19): siRNA sense strand
gcgaagccaacaacuaugg

SEQ ID NO: 173302 - RNA, 19 nt, Homo sapiens
  misc_RNA (1)...(19): siRNA sense strand
gggccuucaugacaacuca

SEQ ID NO: 173303 - RNA, 19 nt, Homo sapiens
  misc_RNA (1)...(19): siRNA sense strand
agaagaaccacccggacuu

SEQ ID NO: 173304 - RNA, 19 nt, Homo sapiens
  misc_RNA (1)...(19): siRNA sense strand
gcacuauagcaccgagaau

SEQ ID NO: 173305 - RNA, 19 nt, Homo sapiens
  misc_RNA (1)...(19): siRNA sense strand
gaagugcaucaucgacauc

SEQ ID NO: 173306 - RNA, 19 nt, Homo sapiens
  misc_RNA (1)...(19): siRNA sense strand
gcugaggcccugguugcua

SEQ ID NO: 173307 - RNA, 19 nt, Homo sapiens
  misc_RNA (1)...(19): siRNA sense strand
ccacauccacaucuacagu

SEQ ID NO: 173308 - RNA, 19 nt, Homo sapiens
  misc_RNA (1)...(19): siRNA sense strand
gaguggguccuagagauug

SEQ ID NO: 173309 - RNA, 19 nt, Homo sapiens
  misc_RNA (1)...(19): siRNA sense strand
cagccaggccacaugacua

SEQ ID NO: 173310 - RNA, 19 nt, Homo sapiens
  misc_RNA (1)...(19): siRNA sense strand
ggccaacaacggugucugu

SEQ ID NO: 173311 - RNA, 19 nt, Homo sapiens
  misc_RNA (1)...(19): siRNA sense strand
acuauagcaccgagaauga

SEQ ID NO: 173312 - RNA, 19 nt, Homo sapiens
  misc_RNA (1)...(19): siRNA sense strand
gaacagcagguggcaaagc

SEQ ID NO: 173313 - RNA, 19 nt, Homo sapiens
  misc_RNA (1)...(19): siRNA sense strand
cauggaccguggccucauc

SEQ ID NO: 173314 - RNA, 19 nt, Homo sapiens
  misc_RNA (1)...(19): siRNA sense strand
gaggagugcccgucugacu

SEQ ID NO: 173315 - RNA, 19 nt, Homo sapiens
  misc_RNA (1)...(19): siRNA sense strand
caacgacugggccaccaau

SEQ ID NO: 173316 - RNA, 19 nt, Homo sapiens
  misc_RNA (1)...(19): siRNA sense strand
ggucuucgucacugucuuc

SEQ ID NO: 173317 - RNA, 19 nt, Homo sapiens
  misc_RNA (1)...(19): siRNA sense strand
agaagugcacggagucuca

SEQ ID NO: 173318 - RNA, 19 nt, Homo sapiens
  misc_RNA (1)...(19): siRNA sense strand
uuuaaugacugggccuuca

SEQ ID NO: 173319 - RNA, 19 nt, Homo sapiens
  misc_RNA (1)...(19): siRNA sense strand
gaacauuccuuugguauca

SEQ ID NO: 173320 - RNA, 19 nt, Homo sapiens
  misc_RNA (1)...(19): siRNA sense strand
ccacggagaucauugcuuu

SEQ ID NO: 173321 - RNA, 19 nt, Homo sapiens
  misc_RNA (1)...(19): siRNA sense strand
gauggucaguuuaaagaua

SEQ ID NO: 173322 - RNA, 19 nt, Homo sapiens
  misc_RNA (1)...(19): siRNA sense strand
aaacucaacugccaaguga

SEQ ID NO: 173323 - RNA, 19 nt, Homo sapiens
  misc_RNA (1)...(19): siRNA sense strand
guaaaugaccucccuguug

SEQ ID NO: 173324 - RNA, 19 nt, Homo sapiens
  misc_RNA (1)...(19): siRNA sense strand
gcagaagaauuuaagaaac

SEQ ID NO: 173325 - RNA, 19 nt, Homo sapiens
  misc_RNA (1)...(19): siRNA sense strand
gaugagacuuugagacuag

SEQ ID NO: 173326 - RNA, 19 nt, Homo sapiens
  misc_RNA (1)...(19): siRNA sense strand
gcagaucacuguaaaugac

SEQ ID NO: 173327 - RNA, 19 nt, Homo sapiens
  misc_RNA (1)...(19): siRNA sense strand
ggaugagacuuugagacua

SEQ ID NO: 173328 - RNA, 19 nt, Homo sapiens
  misc_RNA (1)...(19): siRNA sense strand
ugauagggcagaagaauuu

SEQ ID NO: 173329 - RNA, 19 nt, Homo sapiens
  misc_RNA (1)...(19): siRNA sense strand
ggagaucauugcuuucagu

SEQ ID NO: 173330 - RNA, 19 nt, Homo sapiens
  misc_RNA (1)...(19): siRNA sense strand
cagccugucugacuacaaa

SEQ ID NO: 173331 - RNA, 19 nt, Homo sapiens
  misc_RNA (1)...(19): siRNA sense strand
gcaccauugcucaggauua

SEQ ID NO: 173332 - RNA, 19 nt, Homo sapiens
  misc_RNA (1)...(19): siRNA sense strand
caugaacauuccuuuggua

SEQ ID NO: 173333 - RNA, 19 nt, Homo sapiens
  misc_RNA (1)...(19): siRNA sense strand
caucuagcaugggucaaua

SEQ ID NO: 173334 - RNA, 19 nt, Homo sapiens
  misc_RNA (1)...(19): siRNA sense strand
ggcagaagaauuuaagaaa

SEQ ID NO: 173335 - RNA, 19 nt, Homo sapiens
  misc_RNA (1)...(19): siRNA sense strand
guucaggccuuccaguuca

SEQ ID NO: 173336 - RNA, 19 nt, Homo sapiens
  misc_RNA (1)...(19): siRNA sense strand
gaugauaaggguauucuuc

SEQ ID NO: 173337 - RNA, 19 nt, Homo sapiens
  misc_RNA (1)...(19): siRNA sense strand
caauacaccuaagaaacaa

SEQ ID NO: 173338 - RNA, 19 nt, Homo sapiens
  misc_RNA (1)...(19): siRNA sense strand
gaaacucaacugccaagug

SEQ ID NO: 173339 - RNA, 19 nt, Homo sapiens
  misc_RNA (1)...(19): siRNA sense strand
ccucuugacuucaccuuug

SEQ ID NO: 173340 - RNA, 19 nt, Homo sapiens
  misc_RNA (1)...(19): siRNA sense strand
ucaauacaccuaagaaaca

SEQ ID NO: 173341 - RNA, 19 nt, Homo sapiens
  misc_RNA (1)...(19): siRNA sense strand
gggcagaagaauuuaagaa

SEQ ID NO: 173342 - RNA, 19 nt, Homo sapiens
  misc_RNA (1)...(19): siRNA sense strand
uaugccagauggucaguuu

SEQ ID NO: 173343 - RNA, 19 nt, Homo sapiens
  misc_RNA (1)...(19): siRNA sense strand
ggucaauacaccuaagaaa

SEQ ID NO: 173344 - RNA, 19 nt, Homo sapiens
  misc_RNA (1)...(19): siRNA sense strand
ucacuucugucaucuagca

SEQ ID NO: 173345 - RNA, 19 nt, Homo sapiens
  misc_RNA (1)...(19): siRNA sense strand
caccauugcucaggauuau

SEQ ID NO: 173346 - RNA, 19 nt, Homo sapiens
  misc_RNA (1)...(19): siRNA sense strand
cagauggucaguuuaaaga

SEQ ID NO: 173347 - RNA, 19 nt, Homo sapiens
  misc_RNA (1)...(19): siRNA sense strand
gauuggugcuucuguggau

SEQ ID NO: 173348 - RNA, 19 nt, Homo sapiens
  misc_RNA (1)...(19): siRNA sense strand
gugcuucuguggauucuca

SEQ ID NO: 173349 - RNA, 19 nt, Homo sapiens
  misc_RNA (1)...(19): siRNA sense strand
gauucucacuucugucauc

SEQ ID NO: 173350 - RNA, 19 nt, Homo sapiens
  misc_RNA (1)...(19): siRNA sense strand
gauagggcagaagaauuua

SEQ ID NO: 173351 - RNA, 19 nt, Homo sapiens
  misc_RNA (1)...(19): siRNA sense strand
ggucuuaaaggcugaugaa

SEQ ID NO: 173352 - RNA, 19 nt, Homo sapiens
  misc_RNA (1)...(19): siRNA sense strand
caaagccacagcuguuaug

SEQ ID NO: 173353 - RNA, 19 nt, Homo sapiens
  misc_RNA (1)...(19): siRNA sense strand
gccagauggucaguuuaaa

SEQ ID NO: 173354 - RNA, 19 nt, Homo sapiens
  misc_RNA (1)...(19): siRNA sense strand
gcuggaaaccuggcaguga

SEQ ID NO: 173355 - RNA, 19 nt, Homo sapiens
  misc_RNA (1)...(19): siRNA sense strand
gcucuguggaugagacuuu

SEQ ID NO: 173356 - RNA, 19 nt, Homo sapiens
  misc_RNA (1)...(19): siRNA sense strand
ccaugaacauuccuuuggu

SEQ ID NO: 173357 - RNA, 19 nt, Homo sapiens
  misc_RNA (1)...(19): siRNA sense strand
gugauagggcagaagaauu

SEQ ID NO: 173358 - RNA, 19 nt, Homo sapiens
  misc_RNA (1)...(19): siRNA sense strand
cggcagaucacuguaaaug

SEQ ID NO: 173359 - RNA, 19 nt, Homo sapiens
  misc_RNA (1)...(19): siRNA sense strand
gcaugggucaauacaccua

SEQ ID NO: 173360 - RNA, 19 nt, Homo sapiens
  misc_RNA (1)...(19): siRNA sense strand
gacccgaagcgcaccauug

SEQ ID NO: 173361 - RNA, 19 nt, Homo sapiens
  misc_RNA (1)...(19): siRNA sense strand
cuucaaagccacagcuguu

SEQ ID NO: 173362 - RNA, 19 nt, Homo sapiens
  misc_RNA (1)...(19): siRNA sense strand
ggcagaucacuguaaauga

SEQ ID NO: 173363 - RNA, 19 nt, Homo sapiens
  misc_RNA (1)...(19): siRNA sense strand
ucucacuucugucaucuag

SEQ ID NO: 173364 - RNA, 19 nt, Homo sapiens
  misc_RNA (1)...(19): siRNA sense strand
cuggaaaccuggcagugau

SEQ ID NO: 173365 - RNA, 19 nt, Homo sapiens
  misc_RNA (1)...(19): siRNA sense strand
ugccagauggucaguuuaa

SEQ ID NO: 173366 - RNA, 19 nt, Homo sapiens
  misc_RNA (1)...(19): siRNA sense strand
ucaaagccacagcuguuau

SEQ ID NO: 173367 - RNA, 19 nt, Homo sapiens
  misc_RNA (1)...(19): siRNA sense strand
ccagauggucaguuuaaag

SEQ ID NO: 173368 - RNA, 19 nt, Homo sapiens
  misc_RNA (1)...(19): siRNA sense strand
gcgcaccauugcucaggau

SEQ ID NO: 173369 - RNA, 19 nt, Homo sapiens
  misc_RNA (1)...(19): siRNA sense strand
ucagugauagggcagaaga

SEQ ID NO: 173370 - RNA, 19 nt, Homo sapiens
  misc_RNA (1)...(19): siRNA sense strand
gguauucuucggcagauca

SEQ ID NO: 173371 - RNA, 19 nt, Homo sapiens
  misc_RNA (1)...(19): siRNA sense strand
acucaacugccaagugauu

SEQ ID NO: 173372 - RNA, 19 nt, Homo sapiens
  misc_RNA (1)...(19): siRNA sense strand
ccaaaagagcaaagaauau

SEQ ID NO: 173373 - RNA, 19 nt, Homo sapiens
  misc_RNA (1)...(19): siRNA sense strand
ugacaaacauggggaagug

SEQ ID NO: 173374 - RNA, 19 nt, Homo sapiens
  misc_RNA (1)...(19): siRNA sense strand
uguggauucucacuucugu

SEQ ID NO: 173375 - RNA, 19 nt, Homo sapiens
  misc_RNA (1)...(19): siRNA sense strand
aggaaaauauguuguguuc

SEQ ID NO: 173376 - RNA, 19 nt, Homo sapiens
  misc_RNA (1)...(19): siRNA sense strand
gucaauacaccuaagaaac

SEQ ID NO: 173377 - RNA, 19 nt, Homo sapiens
  misc_RNA (1)...(19): siRNA sense strand
uggaaaccuggcagugaua

SEQ ID NO: 173378 - RNA, 19 nt, Homo sapiens
  misc_RNA (1)...(19): siRNA sense strand
gacccaugaacauuccuuu

SEQ ID NO: 173379 - RNA, 19 nt, Homo sapiens
  misc_RNA (1)...(19): siRNA sense strand
gaacauuccuuugguauca

SEQ ID NO: 173380 - RNA, 19 nt, Homo sapiens
  misc_RNA (1)...(19): siRNA sense strand
ccacggagaucauugcuuu

SEQ ID NO: 173381 - RNA, 19 nt, Homo sapiens
  misc_RNA (1)...(19): siRNA sense strand
gauggucaguuuaaagaua

SEQ ID NO: 173382 - RNA, 19 nt, Homo sapiens
  misc_RNA (1)...(19): siRNA sense strand
aaacucaacugccaaguga

SEQ ID NO: 173383 - RNA, 19 nt, Homo sapiens
  misc_RNA (1)...(19): siRNA sense strand
guaaaugaccucccuguug

SEQ ID NO: 173384 - RNA, 19 nt, Homo sapiens
  misc_RNA (1)...(19): siRNA sense strand
gcagaagaauuuaagaaac

SEQ ID NO: 173385 - RNA, 19 nt, Homo sapiens
  misc_RNA (1)...(19): siRNA sense strand
gaugagacuuugagacuag

SEQ ID NO: 173386 - RNA, 19 nt, Homo sapiens
  misc_RNA (1)...(19): siRNA sense strand
gcagaucacuguaaaugac

SEQ ID NO: 173387 - RNA, 19 nt, Homo sapiens
  misc_RNA (1)...(19): siRNA sense strand
ggaugagacuuugagacua

SEQ ID NO: 173388 - RNA, 19 nt, Homo sapiens
  misc_RNA (1)...(19): siRNA sense strand
ugauagggcagaagaauuu

SEQ ID NO: 173389 - RNA, 19 nt, Homo sapiens
  misc_RNA (1)...(19): siRNA sense strand
ggagaucauugcuuucagu

SEQ ID NO: 173390 - RNA, 19 nt, Homo sapiens
  misc_RNA (1)...(19): siRNA sense strand
cagccugucugacuacaaa

SEQ ID NO: 173391 - RNA, 19 nt, Homo sapiens
  misc_RNA (1)...(19): siRNA sense strand
gcaccauugcucaggauua

SEQ ID NO: 173392 - RNA, 19 nt, Homo sapiens
  misc_RNA (1)...(19): siRNA sense strand
caugaacauuccuuuggua

SEQ ID NO: 173393 - RNA, 19 nt, Homo sapiens
  misc_RNA (1)...(19): siRNA sense strand
caucuagcaugggucaaua

SEQ ID NO: 173394 - RNA, 19 nt, Homo sapiens
  misc_RNA (1)...(19): siRNA sense strand
ggcagaagaauuuaagaaa

SEQ ID NO: 173395 - RNA, 19 nt, Homo sapiens
  misc_RNA (1)...(19): siRNA sense strand
guucaggccuuccaguuca

SEQ ID NO: 173396 - RNA, 19 nt, Homo sapiens
  misc_RNA (1)...(19): siRNA sense strand
gaugauaaggguauucuuc

SEQ ID NO: 173397 - RNA, 19 nt, Homo sapiens
  misc_RNA (1)...(19): siRNA sense strand
caauacaccuaagaaacaa

SEQ ID NO: 173398 - RNA, 19 nt, Homo sapiens
  misc_RNA (1)...(19): siRNA sense strand
gaaacucaacugccaagug

SEQ ID NO: 173399 - RNA, 19 nt, Homo sapiens
  misc_RNA (1)...(19): siRNA sense strand
ccucuugacuucaccuuug

SEQ ID NO: 173400 - RNA, 19 nt, Homo sapiens
  misc_RNA (1)...(19): siRNA sense strand
ucaauacaccuaagaaaca

SEQ ID NO: 173401 - RNA, 19 nt, Homo sapiens
  misc_RNA (1)...(19): siRNA sense strand
gggcagaagaauuuaagaa

SEQ ID NO: 173402 - RNA, 19 nt, Homo sapiens
  misc_RNA (1)...(19): siRNA sense strand
uaugccagauggucaguuu

SEQ ID NO: 173403 - RNA, 19 nt, Homo sapiens
  misc_RNA (1)...(19): siRNA sense strand
ggucaauacaccuaagaaa

SEQ ID NO: 173404 - RNA, 19 nt, Homo sapiens
  misc_RNA (1)...(19): siRNA sense strand
ucacuucugucaucuagca

SEQ ID NO: 173405 - RNA, 19 nt, Homo sapiens
  misc_RNA (1)...(19): siRNA sense strand
caccauugcucaggauuau

SEQ ID NO: 173406 - RNA, 19 nt, Homo sapiens
  misc_RNA (1)...(19): siRNA sense strand
cagauggucaguuuaaaga

SEQ ID NO: 173407 - RNA, 19 nt, Homo sapiens
  misc_RNA (1)...(19): siRNA sense strand
gauuggugcuucuguggau

SEQ ID NO: 173408 - RNA, 19 nt, Homo sapiens
  misc_RNA (1)...(19): siRNA sense strand
gugcuucuguggauucuca

SEQ ID NO: 173409 - RNA, 19 nt, Homo sapiens
  misc_RNA (1)...(19): siRNA sense strand
gauucucacuucugucauc

SEQ ID NO: 173410 - RNA, 19 nt, Homo sapiens
  misc_RNA (1)...(19): siRNA sense strand
gauagggcagaagaauuua

SEQ ID NO: 173411 - RNA, 19 nt, Homo sapiens
  misc_RNA (1)...(19): siRNA sense strand
ggucuuaaaggcugaugaa

SEQ ID NO: 173412 - RNA, 19 nt, Homo sapiens
  misc_RNA (1)...(19): siRNA sense strand
caaagccacagcuguuaug

SEQ ID NO: 173413 - RNA, 19 nt, Homo sapiens
  misc_RNA (1)...(19): siRNA sense strand
gccagauggucaguuuaaa

SEQ ID NO: 173414 - RNA, 19 nt, Homo sapiens
  misc_RNA (1)...(19): siRNA sense strand
gcuggaaaccuggcaguga

SEQ ID NO: 173415 - RNA, 19 nt, Homo sapiens
  misc_RNA (1)...(19): siRNA sense strand
gcucuguggaugagacuuu

SEQ ID NO: 173416 - RNA, 19 nt, Homo sapiens
  misc_RNA (1)...(19): siRNA sense strand
ccaugaacauuccuuuggu

SEQ ID NO: 173417 - RNA, 19 nt, Homo sapiens
  misc_RNA (1)...(19): siRNA sense strand
gugauagggcagaagaauu

SEQ ID NO: 173418 - RNA, 19 nt, Homo sapiens
  misc_RNA (1)...(19): siRNA sense strand
cggcagaucacuguaaaug

SEQ ID NO: 173419 - RNA, 19 nt, Homo sapiens
  misc_RNA (1)...(19): siRNA sense strand
gcaugggucaauacaccua

SEQ ID NO: 173420 - RNA, 19 nt, Homo sapiens
  misc_RNA (1)...(19): siRNA sense strand
gacccgaagcgcaccauug

SEQ ID NO: 173421 - RNA, 19 nt, Homo sapiens
  misc_RNA (1)...(19): siRNA sense strand
cuucaaagccacagcuguu

SEQ ID NO: 173422 - RNA, 19 nt, Homo sapiens
  misc_RNA (1)...(19): siRNA sense strand
ggcagaucacuguaaauga

SEQ ID NO: 173423 - RNA, 19 nt, Homo sapiens
  misc_RNA (1)...(19): siRNA sense strand
ucucacuucugucaucuag

SEQ ID NO: 173424 - RNA, 19 nt, Homo sapiens
  misc_RNA (1)...(19): siRNA sense strand
cuggaaaccuggcagugau

SEQ ID NO: 173425 - RNA, 19 nt, Homo sapiens
  misc_RNA (1)...(19): siRNA sense strand
ugccagauggucaguuuaa

SEQ ID NO: 173426 - RNA, 19 nt, Homo sapiens
  misc_RNA (1)...(19): siRNA sense strand
ucaaagccacagcuguuau

SEQ ID NO: 173427 - RNA, 19 nt, Homo sapiens
  misc_RNA (1)...(19): siRNA sense strand
ccagauggucaguuuaaag

SEQ ID NO: 173428 - RNA, 19 nt, Homo sapiens
  misc_RNA (1)...(19): siRNA sense strand
gcgcaccauugcucaggau

SEQ ID NO: 173429 - RNA, 19 nt, Homo sapiens
  misc_RNA (1)...(19): siRNA sense strand
ucagugauagggcagaaga

SEQ ID NO: 173430 - RNA, 19 nt, Homo sapiens
  misc_RNA (1)...(19): siRNA sense strand
gguauucuucggcagauca

SEQ ID NO: 173431 - RNA, 19 nt, Homo sapiens
  misc_RNA (1)...(19): siRNA sense strand
acucaacugccaagugauu

SEQ ID NO: 173432 - RNA, 19 nt, Homo sapiens
  misc_RNA (1)...(19): siRNA sense strand
ccaaaagagcaaagaauau

SEQ ID NO: 173433 - RNA, 19 nt, Homo sapiens
  misc_RNA (1)...(19): siRNA sense strand
ugacaaacauggggaagug

SEQ ID NO: 173434 - RNA, 19 nt, Homo sapiens
  misc_RNA (1)...(19): siRNA sense strand
uguggauucucacuucugu

SEQ ID NO: 173435 - RNA, 19 nt, Homo sapiens
  misc_RNA (1)...(19): siRNA sense strand
aggaaaauauguuguguuc

SEQ ID NO: 173436 - RNA, 19 nt, Homo sapiens
  misc_RNA (1)...(19): siRNA sense strand
gucaauacaccuaagaaac

SEQ ID NO: 173437 - RNA, 19 nt, Homo sapiens
  misc_RNA (1)...(19): siRNA sense strand
uggaaaccuggcagugaua

SEQ ID NO: 173438 - RNA, 19 nt, Homo sapiens
  misc_RNA (1)...(19): siRNA sense strand
gacccaugaacauuccuuu

SEQ ID NO: 173439 - RNA, 19 nt, Homo sapiens
  misc_RNA (1)...(19): siRNA sense strand
gaacauuccuuugguauca

SEQ ID NO: 173440 - RNA, 19 nt, Homo sapiens
  misc_RNA (1)...(19): siRNA sense strand
ccacggagaucauugcuuu

SEQ ID NO: 173441 - RNA, 19 nt, Homo sapiens
  misc_RNA (1)...(19): siRNA sense strand
gauggucaguuuaaagaua

SEQ ID NO: 173442 - RNA, 19 nt, Homo sapiens
  misc_RNA (1)...(19): siRNA sense strand
aaacucaacugccaaguga

SEQ ID NO: 173443 - RNA, 19 nt, Homo sapiens
  misc_RNA (1)...(19): siRNA sense strand
guaaaugaccucccuguug

SEQ ID NO: 173444 - RNA, 19 nt, Homo sapiens
  misc_RNA (1)...(19): siRNA sense strand
gcagaagaauuuaagaaac

SEQ ID NO: 173445 - RNA, 19 nt, Homo sapiens
  misc_RNA (1)...(19): siRNA sense strand
gaugagacuuugagacuag

SEQ ID NO: 173446 - RNA, 19 nt, Homo sapiens
  misc_RNA (1)...(19): siRNA sense strand
gcagaucacuguaaaugac

SEQ ID NO: 173447 - RNA, 19 nt, Homo sapiens
  misc_RNA (1)...(19): siRNA sense strand
ggaugagacuuugagacua

SEQ ID NO: 173448 - RNA, 19 nt, Homo sapiens
  misc_RNA (1)...(19): siRNA sense strand
ugauagggcagaagaauuu

SEQ ID NO: 173449 - RNA, 19 nt, Homo sapiens
  misc_RNA (1)...(19): siRNA sense strand
ggagaucauugcuuucagu

SEQ ID NO: 173450 - RNA, 19 nt, Homo sapiens
  misc_RNA (1)...(19): siRNA sense strand
cagccugucugacuacaaa

SEQ ID NO: 173451 - RNA, 19 nt, Homo sapiens
  misc_RNA (1)...(19): siRNA sense strand
gcaccauugcucaggauua

SEQ ID NO: 173452 - RNA, 19 nt, Homo sapiens
  misc_RNA (1)...(19): siRNA sense strand
caugaacauuccuuuggua

SEQ ID NO: 173453 - RNA, 19 nt, Homo sapiens
  misc_RNA (1)...(19): siRNA sense strand
caucuagcaugggucaaua

SEQ ID NO: 173454 - RNA, 19 nt, Homo sapiens
  misc_RNA (1)...(19): siRNA sense strand
ggcagaagaauuuaagaaa

SEQ ID NO: 173455 - RNA, 19 nt, Homo sapiens
  misc_RNA (1)...(19): siRNA sense strand
guucaggccuuccaguuca

SEQ ID NO: 173456 - RNA, 19 nt, Homo sapiens
  misc_RNA (1)...(19): siRNA sense strand
gaugauaaggguauucuuc

SEQ ID NO: 173457 - RNA, 19 nt, Homo sapiens
  misc_RNA (1)...(19): siRNA sense strand
caauacaccuaagaaacaa

SEQ ID NO: 173458 - RNA, 19 nt, Homo sapiens
  misc_RNA (1)...(19): siRNA sense strand
gaaacucaacugccaagug

SEQ ID NO: 173459 - RNA, 19 nt, Homo sapiens
  misc_RNA (1)...(19): siRNA sense strand
ccucuugacuucaccuuug

SEQ ID NO: 173460 - RNA, 19 nt, Homo sapiens
  misc_RNA (1)...(19): siRNA sense strand
ucaauacaccuaagaaaca

SEQ ID NO: 173461 - RNA, 19 nt, Homo sapiens
  misc_RNA (1)...(19): siRNA sense strand
gggcagaagaauuuaagaa

SEQ ID NO: 173462 - RNA, 19 nt, Homo sapiens
  misc_RNA (1)...(19): siRNA sense strand
uaugccagauggucaguuu

SEQ ID NO: 173463 - RNA, 19 nt, Homo sapiens
  misc_RNA (1)...(19): siRNA sense strand
ggucaauacaccuaagaaa

SEQ ID NO: 173464 - RNA, 19 nt, Homo sapiens
  misc_RNA (1)...(19): siRNA sense strand
ucacuucugucaucuagca

SEQ ID NO: 173465 - RNA, 19 nt, Homo sapiens
  misc_RNA (1)...(19): siRNA sense strand
caccauugcucaggauuau

SEQ ID NO: 173466 - RNA, 19 nt, Homo sapiens
  misc_RNA (1)...(19): siRNA sense strand
cagauggucaguuuaaaga

SEQ ID NO: 173467 - RNA, 19 nt, Homo sapiens
  misc_RNA (1)...(19): siRNA sense strand
gauuggugcuucuguggau

SEQ ID NO: 173468 - RNA, 19 nt, Homo sapiens
  misc_RNA (1)...(19): siRNA sense strand
gugcuucuguggauucuca

SEQ ID NO: 173469 - RNA, 19 nt, Homo sapiens
  misc_RNA (1)...(19): siRNA sense strand
gauucucacuucugucauc

SEQ ID NO: 173470 - RNA, 19 nt, Homo sapiens
  misc_RNA (1)...(19): siRNA sense strand
gauagggcagaagaauuua

SEQ ID NO: 173471 - RNA, 19 nt, Homo sapiens
  misc_RNA (1)...(19): siRNA sense strand
ggucuuaaaggcugaugaa

SEQ ID NO: 173472 - RNA, 19 nt, Homo sapiens
  misc_RNA (1)...(19): siRNA sense strand
caaagccacagcuguuaug

SEQ ID NO: 173473 - RNA, 19 nt, Homo sapiens
  misc_RNA (1)...(19): siRNA sense strand
gccagauggucaguuuaaa

SEQ ID NO: 173474 - RNA, 19 nt, Homo sapiens
  misc_RNA (1)...(19): siRNA sense strand
gcuggaaaccuggcaguga

SEQ ID NO: 173475 - RNA, 19 nt, Homo sapiens
  misc_RNA (1)...(19): siRNA sense strand
gcucuguggaugagacuuu

SEQ ID NO: 173476 - RNA, 19 nt, Homo sapiens
  misc_RNA (1)...(19): siRNA sense strand
ccaugaacauuccuuuggu

SEQ ID NO: 173477 - RNA, 19 nt, Homo sapiens
  misc_RNA (1)...(19): siRNA sense strand
gugauagggcagaagaauu

SEQ ID NO: 173478 - RNA, 19 nt, Homo sapiens
  misc_RNA (1)...(19): siRNA sense strand
cggcagaucacuguaaaug

SEQ ID NO: 173479 - RNA, 19 nt, Homo sapiens
  misc_RNA (1)...(19): siRNA sense strand
gcaugggucaauacaccua

SEQ ID NO: 173480 - RNA, 19 nt, Homo sapiens
  misc_RNA (1)...(19): siRNA sense strand
gacccgaagcgcaccauug

SEQ ID NO: 173481 - RNA, 19 nt, Homo sapiens
  misc_RNA (1)...(19): siRNA sense strand
cuucaaagccacagcuguu

SEQ ID NO: 173482 - RNA, 19 nt, Homo sapiens
  misc_RNA (1)...(19): siRNA sense strand
ggcagaucacuguaaauga

SEQ ID NO: 173483 - RNA, 19 nt, Homo sapiens
  misc_RNA (1)...(19): siRNA sense strand
ucucacuucugucaucuag

SEQ ID NO: 173484 - RNA, 19 nt, Homo sapiens
  misc_RNA (1)...(19): siRNA sense strand
cuggaaaccuggcagugau

SEQ ID NO: 173485 - RNA, 19 nt, Homo sapiens
  misc_RNA (1)...(19): siRNA sense strand
ugccagauggucaguuuaa

SEQ ID NO: 173486 - RNA, 19 nt, Homo sapiens
  misc_RNA (1)...(19): siRNA sense strand
ucaaagccacagcuguuau

SEQ ID NO: 173487 - RNA, 19 nt, Homo sapiens
  misc_RNA (1)...(19): siRNA sense strand
ccagauggucaguuuaaag

SEQ ID NO: 173488 - RNA, 19 nt, Homo sapiens
  misc_RNA (1)...(19): siRNA sense strand
gcgcaccauugcucaggau

SEQ ID NO: 173489 - RNA, 19 nt, Homo sapiens
  misc_RNA (1)...(19): siRNA sense strand
ucagugauagggcagaaga

SEQ ID NO: 173490 - RNA, 19 nt, Homo sapiens
  misc_RNA (1)...(19): siRNA sense strand
gguauucuucggcagauca

SEQ ID NO: 173491 - RNA, 19 nt, Homo sapiens
  misc_RNA (1)...(19): siRNA sense strand
acucaacugccaagugauu

SEQ ID NO: 173492 - RNA, 19 nt, Homo sapiens
  misc_RNA (1)...(19): siRNA sense strand
ccaaaagagcaaagaauau

SEQ ID NO: 173493 - RNA, 19 nt, Homo sapiens
  misc_RNA (1)...(19): siRNA sense strand
ugacaaacauggggaagug

SEQ ID NO: 173494 - RNA, 19 nt, Homo sapiens
  misc_RNA (1)...(19): siRNA sense strand
uguggauucucacuucugu

SEQ ID NO: 173495 - RNA, 19 nt, Homo sapiens
  misc_RNA (1)...(19): siRNA sense strand
aggaaaauauguuguguuc

SEQ ID NO: 173496 - RNA, 19 nt, Homo sapiens
  misc_RNA (1)...(19): siRNA sense strand
gucaauacaccuaagaaac

SEQ ID NO: 173497 - RNA, 19 nt, Homo sapiens
  misc_RNA (1)...(19): siRNA sense strand
uggaaaccuggcagugaua

SEQ ID NO: 173498 - RNA, 19 nt, Homo sapiens
  misc_RNA (1)...(19): siRNA sense strand
gacccaugaacauuccuuu

SEQ ID NO: 173499 - RNA, 19 nt, Homo sapiens
  misc_RNA (1)...(19): siRNA sense strand
gcagugaugugaugaauua

SEQ ID NO: 173500 - RNA, 19 nt, Homo sapiens
  misc_RNA (1)...(19): siRNA sense strand
ccacugcuaugccuuguuu

SEQ ID NO: 173501 - RNA, 19 nt, Homo sapiens
  misc_RNA (1)...(19): siRNA sense strand
guggaaagauuauaacugu

SEQ ID NO: 173502 - RNA, 19 nt, Homo sapiens
  misc_RNA (1)...(19): siRNA sense strand
gaguagcagugaugugaug

SEQ ID NO: 173503 - RNA, 19 nt, Homo sapiens
  misc_RNA (1)...(19): siRNA sense strand
agaaaucccuccaccaucu

SEQ ID NO: 173504 - RNA, 19 nt, Homo sapiens
  misc_RNA (1)...(19): siRNA sense strand
gugaugugaugaauuacuu

SEQ ID NO: 173505 - RNA, 19 nt, Homo sapiens
  misc_RNA (1)...(19): siRNA sense strand
gguaacagcuacucauacg

SEQ ID NO: 173506 - RNA, 19 nt, Homo sapiens
  misc_RNA (1)...(19): siRNA sense strand
uaucuuggaugcugcuuuc

SEQ ID NO: 173507 - RNA, 19 nt, Homo sapiens
  misc_RNA (1)...(19): siRNA sense strand
cuggaaaccuggugucugu

SEQ ID NO: 173508 - RNA, 19 nt, Homo sapiens
  misc_RNA (1)...(19): siRNA sense strand
ugagguggaaagauuauaa

SEQ ID NO: 173509 - RNA, 19 nt, Homo sapiens
  misc_RNA (1)...(19): siRNA sense strand
cagcauuucugagguggaa

SEQ ID NO: 173510 - RNA, 19 nt, Homo sapiens
  misc_RNA (1)...(19): siRNA sense strand
aaugugagguuacccuaug

SEQ ID NO: 173511 - RNA, 19 nt, Homo sapiens
  misc_RNA (1)...(19): siRNA sense strand
gugaagagcauugguaaca

SEQ ID NO: 173512 - RNA, 19 nt, Homo sapiens
  misc_RNA (1)...(19): siRNA sense strand
gaagguugggaguggagua

SEQ ID NO: 173513 - RNA, 19 nt, Homo sapiens
  misc_RNA (1)...(19): siRNA sense strand
gaugugaugaauuacuuug

SEQ ID NO: 173514 - RNA, 19 nt, Homo sapiens
  misc_RNA (1)...(19): siRNA sense strand
gugcgagccugucgagaag

SEQ ID NO: 173515 - RNA, 19 nt, Homo sapiens
  misc_RNA (1)...(19): siRNA sense strand
ccaaaauccuggacagaug

SEQ ID NO: 173516 - RNA, 19 nt, Homo sapiens
  misc_RNA (1)...(19): siRNA sense strand
ggaguggaguagcagugau

SEQ ID NO: 173517 - RNA, 19 nt, Homo sapiens
  misc_RNA (1)...(19): siRNA sense strand
uagcagugaugugaugaau

SEQ ID NO: 173518 - RNA, 19 nt, Homo sapiens
  misc_RNA (1)...(19): siRNA sense strand
ucugcaaguucacugacua

SEQ ID NO: 173519 - RNA, 19 nt, Homo sapiens
  misc_RNA (1)...(19): siRNA sense strand
cggauccgcugucccaaag

SEQ ID NO: 173520 - RNA, 19 nt, Homo sapiens
  misc_RNA (1)...(19): siRNA sense strand
cuacucauacgucuggauu

SEQ ID NO: 173521 - RNA, 19 nt, Homo sapiens
  misc_RNA (1)...(19): siRNA sense strand
agagaaaucccuccaccau

SEQ ID NO: 173522 - RNA, 19 nt, Homo sapiens
  misc_RNA (1)...(19): siRNA sense strand
uggaguagcagugauguga

SEQ ID NO: 173523 - RNA, 19 nt, Homo sapiens
  misc_RNA (1)...(19): siRNA sense strand
gcgagccugucgagaagca

SEQ ID NO: 173524 - RNA, 19 nt, Homo sapiens
  misc_RNA (1)...(19): siRNA sense strand
gguggaaagauuauaacug

SEQ ID NO: 173525 - RNA, 19 nt, Homo sapiens
  misc_RNA (1)...(19): siRNA sense strand
gucgagaagcacagcauuu

SEQ ID NO: 173526 - RNA, 19 nt, Homo sapiens
  misc_RNA (1)...(19): siRNA sense strand
ugugaugaauuacuuugca

SEQ ID NO: 173527 - RNA, 19 nt, Homo sapiens
  misc_RNA (1)...(19): siRNA sense strand
gugaugaauuacuuugcau

SEQ ID NO: 173528 - RNA, 19 nt, Homo sapiens
  misc_RNA (1)...(19): siRNA sense strand
uacccuaugucugcaaguu

SEQ ID NO: 173529 - RNA, 19 nt, Homo sapiens
  misc_RNA (1)...(19): siRNA sense strand
gggaguggaguagcaguga

SEQ ID NO: 173530 - RNA, 19 nt, Homo sapiens
  misc_RNA (1)...(19): siRNA sense strand
gaguggaguagcagugaug

SEQ ID NO: 173531 - RNA, 19 nt, Homo sapiens
  misc_RNA (1)...(19): siRNA sense strand
gcugcugucucagguucaa

SEQ ID NO: 173532 - RNA, 19 nt, Homo sapiens
  misc_RNA (1)...(19): siRNA sense strand
ugaagagcauugguaacag

SEQ ID NO: 173533 - RNA, 19 nt, Homo sapiens
  misc_RNA (1)...(19): siRNA sense strand
cccuaugucugcaaguuca

SEQ ID NO: 173534 - RNA, 19 nt, Homo sapiens
  misc_RNA (1)...(19): siRNA sense strand
gguugggaguggaguagca

SEQ ID NO: 173535 - RNA, 19 nt, Homo sapiens
  misc_RNA (1)...(19): siRNA sense strand
gcagugaugugaugaauua

SEQ ID NO: 173536 - RNA, 19 nt, Homo sapiens
  misc_RNA (1)...(19): siRNA sense strand
ccacugcuaugccuuguuu

SEQ ID NO: 173537 - RNA, 19 nt, Homo sapiens
  misc_RNA (1)...(19): siRNA sense strand
guggaaagauuauaacugu

SEQ ID NO: 173538 - RNA, 19 nt, Homo sapiens
  misc_RNA (1)...(19): siRNA sense strand
gaguagcagugaugugaug

SEQ ID NO: 173539 - RNA, 19 nt, Homo sapiens
  misc_RNA (1)...(19): siRNA sense strand
agaaaucccuccaccaucu

SEQ ID NO: 173540 - RNA, 19 nt, Homo sapiens
  misc_RNA (1)...(19): siRNA sense strand
gugaugugaugaauuacuu

SEQ ID NO: 173541 - RNA, 19 nt, Homo sapiens
  misc_RNA (1)...(19): siRNA sense strand
gguaacagcuacucauacg

SEQ ID NO: 173542 - RNA, 19 nt, Homo sapiens
  misc_RNA (1)...(19): siRNA sense strand
uaucuuggaugcugcuuuc

SEQ ID NO: 173543 - RNA, 19 nt, Homo sapiens
  misc_RNA (1)...(19): siRNA sense strand
cuggaaaccuggugucugu

SEQ ID NO: 173544 - RNA, 19 nt, Homo sapiens
  misc_RNA (1)...(19): siRNA sense strand
ugagguggaaagauuauaa

SEQ ID NO: 173545 - RNA, 19 nt, Homo sapiens
  misc_RNA (1)...(19): siRNA sense strand
cagcauuucugagguggaa

SEQ ID NO: 173546 - RNA, 19 nt, Homo sapiens
  misc_RNA (1)...(19): siRNA sense strand
aaugugagguuacccuaug

SEQ ID NO: 173547 - RNA, 19 nt, Homo sapiens
  misc_RNA (1)...(19): siRNA sense strand
gugaagagcauugguaaca

SEQ ID NO: 173548 - RNA, 19 nt, Homo sapiens
  misc_RNA (1)...(19): siRNA sense strand
gaagguugggaguggagua

SEQ ID NO: 173549 - RNA, 19 nt, Homo sapiens
  misc_RNA (1)...(19): siRNA sense strand
gaugugaugaauuacuuug

SEQ ID NO: 173550 - RNA, 19 nt, Homo sapiens
  misc_RNA (1)...(19): siRNA sense strand
gugcgagccugucgagaag

SEQ ID NO: 173551 - RNA, 19 nt, Homo sapiens
  misc_RNA (1)...(19): siRNA sense strand
ccaaaauccuggacagaug

SEQ ID NO: 173552 - RNA, 19 nt, Homo sapiens
  misc_RNA (1)...(19): siRNA sense strand
ggaguggaguagcagugau

SEQ ID NO: 173553 - RNA, 19 nt, Homo sapiens
  misc_RNA (1)...(19): siRNA sense strand
uagcagugaugugaugaau

SEQ ID NO: 173554 - RNA, 19 nt, Homo sapiens
  misc_RNA (1)...(19): siRNA sense strand
ucugcaaguucacugacua

SEQ ID NO: 173555 - RNA, 19 nt, Homo sapiens
  misc_RNA (1)...(19): siRNA sense strand
cggauccgcugucccaaag

SEQ ID NO: 173556 - RNA, 19 nt, Homo sapiens
  misc_RNA (1)...(19): siRNA sense strand
cuacucauacgucuggauu

SEQ ID NO: 173557 - RNA, 19 nt, Homo sapiens
  misc_RNA (1)...(19): siRNA sense strand
agagaaaucccuccaccau

SEQ ID NO: 173558 - RNA, 19 nt, Homo sapiens
  misc_RNA (1)...(19): siRNA sense strand
uggaguagcagugauguga

SEQ ID NO: 173559 - RNA, 19 nt, Homo sapiens
  misc_RNA (1)...(19): siRNA sense strand
gcgagccugucgagaagca

SEQ ID NO: 173560 - RNA, 19 nt, Homo sapiens
  misc_RNA (1)...(19): siRNA sense strand
gguggaaagauuauaacug

SEQ ID NO: 173561 - RNA, 19 nt, Homo sapiens
  misc_RNA (1)...(19): siRNA sense strand
gucgagaagcacagcauuu

SEQ ID NO: 173562 - RNA, 19 nt, Homo sapiens
  misc_RNA (1)...(19): siRNA sense strand
ugugaugaauuacuuugca

SEQ ID NO: 173563 - RNA, 19 nt, Homo sapiens
  misc_RNA (1)...(19): siRNA sense strand
gugaugaauuacuuugcau

SEQ ID NO: 173564 - RNA, 19 nt, Homo sapiens
  misc_RNA (1)...(19): siRNA sense strand
uacccuaugucugcaaguu

SEQ ID NO: 173565 - RNA, 19 nt, Homo sapiens
  misc_RNA (1)...(19): siRNA sense strand
gggaguggaguagcaguga

SEQ ID NO: 173566 - RNA, 19 nt, Homo sapiens
  misc_RNA (1)...(19): siRNA sense strand
gaguggaguagcagugaug

SEQ ID NO: 173567 - RNA, 19 nt, Homo sapiens
  misc_RNA (1)...(19): siRNA sense strand
gcugcugucucagguucaa

SEQ ID NO: 173568 - RNA, 19 nt, Homo sapiens
  misc_RNA (1)...(19): siRNA sense strand
ugaagagcauugguaacag

SEQ ID NO: 173569 - RNA, 19 nt, Homo sapiens
  misc_RNA (1)...(19): siRNA sense strand
cccuaugucugcaaguuca

SEQ ID NO: 173570 - RNA, 19 nt, Homo sapiens
  misc_RNA (1)...(19): siRNA sense strand
gguugggaguggaguagca

SEQ ID NO: 173571 - RNA, 19 nt, Homo sapiens
  misc_RNA (1)...(19): siRNA sense strand
gcagugaugugaugaauua

SEQ ID NO: 173572 - RNA, 19 nt, Homo sapiens
  misc_RNA (1)...(19): siRNA sense strand
ccacugcuaugccuuguuu

SEQ ID NO: 173573 - RNA, 19 nt, Homo sapiens
  misc_RNA (1)...(19): siRNA sense strand
guggaaagauuauaacugu

SEQ ID NO: 173574 - RNA, 19 nt, Homo sapiens
  misc_RNA (1)...(19): siRNA sense strand
gaguagcagugaugugaug

SEQ ID NO: 173575 - RNA, 19 nt, Homo sapiens
  misc_RNA (1)...(19): siRNA sense strand
agaaaucccuccaccaucu

SEQ ID NO: 173576 - RNA, 19 nt, Homo sapiens
  misc_RNA (1)...(19): siRNA sense strand
gugaugugaugaauuacuu

SEQ ID NO: 173577 - RNA, 19 nt, Homo sapiens
  misc_RNA (1)...(19): siRNA sense strand
gguaacagcuacucauacg

SEQ ID NO: 173578 - RNA, 19 nt, Homo sapiens
  misc_RNA (1)...(19): siRNA sense strand
uaucuuggaugcugcuuuc

SEQ ID NO: 173579 - RNA, 19 nt, Homo sapiens
  misc_RNA (1)...(19): siRNA sense strand
cuggaaaccuggugucugu

SEQ ID NO: 173580 - RNA, 19 nt, Homo sapiens
  misc_RNA (1)...(19): siRNA sense strand
ugagguggaaagauuauaa

SEQ ID NO: 173581 - RNA, 19 nt, Homo sapiens
  misc_RNA (1)...(19): siRNA sense strand
cagcauuucugagguggaa

SEQ ID NO: 173582 - RNA, 19 nt, Homo sapiens
  misc_RNA (1)...(19): siRNA sense strand
aaugugagguuacccuaug

SEQ ID NO: 173583 - RNA, 19 nt, Homo sapiens
  misc_RNA (1)...(19): siRNA sense strand
gugaagagcauugguaaca

SEQ ID NO: 173584 - RNA, 19 nt, Homo sapiens
  misc_RNA (1)...(19): siRNA sense strand
gaagguugggaguggagua

SEQ ID NO: 173585 - RNA, 19 nt, Homo sapiens
  misc_RNA (1)...(19): siRNA sense strand
gaugugaugaauuacuuug

SEQ ID NO: 173586 - RNA, 19 nt, Homo sapiens
  misc_RNA (1)...(19): siRNA sense strand
gugcgagccugucgagaag

SEQ ID NO: 173587 - RNA, 19 nt, Homo sapiens
  misc_RNA (1)...(19): siRNA sense strand
ccaaaauccuggacagaug

SEQ ID NO: 173588 - RNA, 19 nt, Homo sapiens
  misc_RNA (1)...(19): siRNA sense strand
ggaguggaguagcagugau

SEQ ID NO: 173589 - RNA, 19 nt, Homo sapiens
  misc_RNA (1)...(19): siRNA sense strand
uagcagugaugugaugaau

SEQ ID NO: 173590 - RNA, 19 nt, Homo sapiens
  misc_RNA (1)...(19): siRNA sense strand
ucugcaaguucacugacua

SEQ ID NO: 173591 - RNA, 19 nt, Homo sapiens
  misc_RNA (1)...(19): siRNA sense strand
cggauccgcugucccaaag

SEQ ID NO: 173592 - RNA, 19 nt, Homo sapiens
  misc_RNA (1)...(19): siRNA sense strand
cuacucauacgucuggauu

SEQ ID NO: 173593 - RNA, 19 nt, Homo sapiens
  misc_RNA (1)...(19): siRNA sense strand
agagaaaucccuccaccau

SEQ ID NO: 173594 - RNA, 19 nt, Homo sapiens
  misc_RNA (1)...(19): siRNA sense strand
uggaguagcagugauguga

SEQ ID NO: 173595 - RNA, 19 nt, Homo sapiens
  misc_RNA (1)...(19): siRNA sense strand
gcgagccugucgagaagca

SEQ ID NO: 173596 - RNA, 19 nt, Homo sapiens
  misc_RNA (1)...(19): siRNA sense strand
gguggaaagauuauaacug

SEQ ID NO: 173597 - RNA, 19 nt, Homo sapiens
  misc_RNA (1)...(19): siRNA sense strand
gucgagaagcacagcauuu

SEQ ID NO: 173598 - RNA, 19 nt, Homo sapiens
  misc_RNA (1)...(19): siRNA sense strand
ugugaugaauuacuuugca

SEQ ID NO: 173599 - RNA, 19 nt, Homo sapiens
  misc_RNA (1)...(19): siRNA sense strand
gugaugaauuacuuugcau

SEQ ID NO: 173600 - RNA, 19 nt, Homo sapiens
  misc_RNA (1)...(19): siRNA sense strand
uacccuaugucugcaaguu

SEQ ID NO: 173601 - RNA, 19 nt, Homo sapiens
  misc_RNA (1)...(19): siRNA sense strand
gggaguggaguagcaguga

SEQ ID NO: 173602 - RNA, 19 nt, Homo sapiens
  misc_RNA (1)...(19): siRNA sense strand
gaguggaguagcagugaug

SEQ ID NO: 173603 - RNA, 19 nt, Homo sapiens
  misc_RNA (1)...(19): siRNA sense strand
gcugcugucucagguucaa

SEQ ID NO: 173604 - RNA, 19 nt, Homo sapiens
  misc_RNA (1)...(19): siRNA sense strand
ugaagagcauugguaacag

SEQ ID NO: 173605 - RNA, 19 nt, Homo sapiens
  misc_RNA (1)...(19): siRNA sense strand
cccuaugucugcaaguuca

SEQ ID NO: 173606 - RNA, 19 nt, Homo sapiens
  misc_RNA (1)...(19): siRNA sense strand
gguugggaguggaguagca

SEQ ID NO: 173607 - RNA, 19 nt, Homo sapiens
  misc_RNA (1)...(19): siRNA sense strand
ggagaccucugcaaugaua

SEQ ID NO: 173608 - RNA, 19 nt, Homo sapiens
  misc_RNA (1)...(19): siRNA sense strand
acaaucagcucucaaguuu

SEQ ID NO: 173609 - RNA, 19 nt, Homo sapiens
  misc_RNA (1)...(19): siRNA sense strand
ggacagacauugugugaca

SEQ ID NO: 173610 - RNA, 19 nt, Homo sapiens
  misc_RNA (1)...(19): siRNA sense strand
gaaccaaggugauagaucu

SEQ ID NO: 173611 - RNA, 19 nt, Homo sapiens
  misc_RNA (1)...(19): siRNA sense strand
ggagaauccuggugcagua

SEQ ID NO: 173612 - RNA, 19 nt, Homo sapiens
  misc_RNA (1)...(19): siRNA sense strand
caaacgagcucaacagcaa

SEQ ID NO: 173613 - RNA, 19 nt, Homo sapiens
  misc_RNA (1)...(19): siRNA sense strand
ggugauggcugcucccuuu

SEQ ID NO: 173614 - RNA, 19 nt, Homo sapiens
  misc_RNA (1)...(19): siRNA sense strand
gcacuuagguggcauuguc

SEQ ID NO: 173615 - RNA, 19 nt, Homo sapiens
  misc_RNA (1)...(19): siRNA sense strand
gaucgaugcugccauguug

SEQ ID NO: 173616 - RNA, 19 nt, Homo sapiens
  misc_RNA (1)...(19): siRNA sense strand
gcaaagugcucauguuagg

SEQ ID NO: 173617 - RNA, 19 nt, Homo sapiens
  misc_RNA (1)...(19): siRNA sense strand
gcacuucgcaugugagaaa

SEQ ID NO: 173618 - RNA, 19 nt, Homo sapiens
  misc_RNA (1)...(19): siRNA sense strand
gaucaacacaucucaauau

SEQ ID NO: 173619 - RNA, 19 nt, Homo sapiens
  misc_RNA (1)...(19): siRNA sense strand
ggugauagaucucagugaa

SEQ ID NO: 173620 - RNA, 19 nt, Homo sapiens
  misc_RNA (1)...(19): siRNA sense strand
uaaauuggauggaucaaca

SEQ ID NO: 173621 - RNA, 19 nt, Homo sapiens
  misc_RNA (1)...(19): siRNA sense strand
uuaaugagcugaagaacau

SEQ ID NO: 173622 - RNA, 19 nt, Homo sapiens
  misc_RNA (1)...(19): siRNA sense strand
gcagugcccugaaucacaa

SEQ ID NO: 173623 - RNA, 19 nt, Homo sapiens
  misc_RNA (1)...(19): siRNA sense strand
gcagugcccugauggcuau

SEQ ID NO: 173624 - RNA, 19 nt, Homo sapiens
  misc_RNA (1)...(19): siRNA sense strand
ugacggaugggacauauua

SEQ ID NO: 173625 - RNA, 19 nt, Homo sapiens
  misc_RNA (1)...(19): siRNA sense strand
gaacccagccggugcuauu

SEQ ID NO: 173626 - RNA, 19 nt, Homo sapiens
  misc_RNA (1)...(19): siRNA sense strand
gagccuacuuggauguuaa

SEQ ID NO: 173627 - RNA, 19 nt, Homo sapiens
  misc_RNA (1)...(19): siRNA sense strand
gaucaagugugaagacagu

SEQ ID NO: 173628 - RNA, 19 nt, Homo sapiens
  misc_RNA (1)...(19): siRNA sense strand
ucaugaagcucuaugugaa

SEQ ID NO: 173629 - RNA, 19 nt, Homo sapiens
  misc_RNA (1)...(19): siRNA sense strand
ggaaagaccuccggggaua

SEQ ID NO: 173630 - RNA, 19 nt, Homo sapiens
  misc_RNA (1)...(19): siRNA sense strand
agacauggaucuaaaucuu

SEQ ID NO: 173631 - RNA, 19 nt, Homo sapiens
  misc_RNA (1)...(19): siRNA sense strand
ucaaugacaucaaacuguu

SEQ ID NO: 173632 - RNA, 19 nt, Homo sapiens
  misc_RNA (1)...(19): siRNA sense strand
gugcaaagugcucauguua

SEQ ID NO: 173633 - RNA, 19 nt, Homo sapiens
  misc_RNA (1)...(19): siRNA sense strand
ggaaagauggcaccuggaa

SEQ ID NO: 173634 - RNA, 19 nt, Homo sapiens
  misc_RNA (1)...(19): siRNA sense strand
uuucauagcuucuucaaca

SEQ ID NO: 173635 - RNA, 19 nt, Homo sapiens
  misc_RNA (1)...(19): siRNA sense strand
ggaucagcaugucaucuuu

SEQ ID NO: 173636 - RNA, 19 nt, Homo sapiens
  misc_RNA (1)...(19): siRNA sense strand
acaaguggguggcauauuc

SEQ ID NO: 173637 - RNA, 19 nt, Homo sapiens
  misc_RNA (1)...(19): siRNA sense strand
guacagagggcaaguggaa

SEQ ID NO: 173638 - RNA, 19 nt, Homo sapiens
  misc_RNA (1)...(19): siRNA sense strand
guaccaguauugggucaua

SEQ ID NO: 173639 - RNA, 19 nt, Homo sapiens
  misc_RNA (1)...(19): siRNA sense strand
gacauggacugcaacuaug

SEQ ID NO: 173640 - RNA, 19 nt, Homo sapiens
  misc_RNA (1)...(19): siRNA sense strand
ggagguguauggcauccaa

SEQ ID NO: 173641 - RNA, 19 nt, Homo sapiens
  misc_RNA (1)...(19): siRNA sense strand
ggagggagcuuguguuccu

SEQ ID NO: 173642 - RNA, 19 nt, Homo sapiens
  misc_RNA (1)...(19): siRNA sense strand
ggaaauucguagacaugga

SEQ ID NO: 173643 - RNA, 19 nt, Homo sapiens
  misc_RNA (1)...(19): siRNA sense strand
guaagccccugaaguauaa

SEQ ID NO: 173644 - RNA, 19 nt, Homo sapiens
  misc_RNA (1)...(19): siRNA sense strand
ugacauggacugcaacuau

SEQ ID NO: 173645 - RNA, 19 nt, Homo sapiens
  misc_RNA (1)...(19): siRNA sense strand
ggaacaaguggguggcaua

SEQ ID NO: 173646 - RNA, 19 nt, Homo sapiens
  misc_RNA (1)...(19): siRNA sense strand
gcgacgacaugaauaagau

SEQ ID NO: 173647 - RNA, 19 nt, Homo sapiens
  misc_RNA (1)...(19): siRNA sense strand
gaacaaugcgacgacauga

SEQ ID NO: 173648 - RNA, 19 nt, Homo sapiens
  misc_RNA (1)...(19): siRNA sense strand
ccaaucaagucgccagaau

SEQ ID NO: 173649 - RNA, 19 nt, Homo sapiens
  misc_RNA (1)...(19): siRNA sense strand
ggacaaggaggcccugaug

SEQ ID NO: 173650 - RNA, 19 nt, Homo sapiens
  misc_RNA (1)...(19): siRNA sense strand
acacagagccuacuuggau

SEQ ID NO: 173651 - RNA, 19 nt, Homo sapiens
  misc_RNA (1)...(19): siRNA sense strand
gcugaggccuucaagcaau

SEQ ID NO: 173652 - RNA, 19 nt, Homo sapiens
  misc_RNA (1)...(19): siRNA sense strand
gaacggcuccuuccauguc

SEQ ID NO: 173653 - RNA, 19 nt, Homo sapiens
  misc_RNA (1)...(19): siRNA sense strand
caaagaaacgggccuucaa

SEQ ID NO: 173654 - RNA, 19 nt, Homo sapiens
  misc_RNA (1)...(19): siRNA sense strand
caggagaacugggacaaug

SEQ ID NO: 173655 - RNA, 19 nt, Homo sapiens
  misc_RNA (1)...(19): siRNA sense strand
gaacaaguggguggcauau

SEQ ID NO: 173656 - RNA, 19 nt, Homo sapiens
  misc_RNA (1)...(19): siRNA sense strand
gcaagugaccaccaucaau

SEQ ID NO: 173657 - RNA, 19 nt, Homo sapiens
  misc_RNA (1)...(19): siRNA sense strand
caagugaccaccaucaaug

SEQ ID NO: 173658 - RNA, 19 nt, Homo sapiens
  misc_RNA (1)...(19): siRNA sense strand
auaccuagcugccaccuau

SEQ ID NO: 173659 - RNA, 19 nt, Homo sapiens
  misc_RNA (1)...(19): siRNA sense strand
caaccucuaugaagaugau

SEQ ID NO: 173660 - RNA, 19 nt, Homo sapiens
  misc_RNA (1)...(19): siRNA sense strand
aaaguggaauucagcaaug

SEQ ID NO: 173661 - RNA, 19 nt, Homo sapiens
  misc_RNA (1)...(19): siRNA sense strand
gaacugggacaaugugaag

SEQ ID NO: 173662 - RNA, 19 nt, Homo sapiens
  misc_RNA (1)...(19): siRNA sense strand
gaaacgggccuucaagacu

SEQ ID NO: 173663 - RNA, 19 nt, Homo sapiens
  misc_RNA (1)...(19): siRNA sense strand
aaacugcagugcccugaug

SEQ ID NO: 173664 - RNA, 19 nt, Homo sapiens
  misc_RNA (1)...(19): siRNA sense strand
ggacuugggagcaauguca

SEQ ID NO: 173665 - RNA, 19 nt, Homo sapiens
  misc_RNA (1)...(19): siRNA sense strand
acuaauggcuuccaguuca

SEQ ID NO: 173666 - RNA, 19 nt, Homo sapiens
  misc_RNA (1)...(19): siRNA sense strand
ggaucaacacaucucaaua

SEQ ID NO: 173667 - RNA, 19 nt, Homo sapiens
  misc_RNA (1)...(19): siRNA sense strand
gaaauucguagacauggau

SEQ ID NO: 173668 - RNA, 19 nt, Homo sapiens
  misc_RNA (1)...(19): siRNA sense strand
caacacuccuuacaacaac

SEQ ID NO: 173669 - RNA, 19 nt, Homo sapiens
  misc_RNA (1)...(19): siRNA sense strand
aguauugggucauaacuau

SEQ ID NO: 173670 - RNA, 19 nt, Homo sapiens
  misc_RNA (1)...(19): siRNA sense strand
cugcuggucucaaguggua

SEQ ID NO: 173671 - RNA, 19 nt, Homo sapiens
  misc_RNA (1)...(19): siRNA sense strand
caacagcaaccucaaacug

SEQ ID NO: 173672 - RNA, 19 nt, Homo sapiens
  misc_RNA (1)...(19): siRNA sense strand
guacuaauggcuuccaguu

SEQ ID NO: 173673 - RNA, 19 nt, Homo sapiens
  misc_RNA (1)...(19): siRNA sense strand
cuggagaccucugcaauga

SEQ ID NO: 173674 - RNA, 19 nt, Homo sapiens
  misc_RNA (1)...(19): siRNA sense strand
gcagcugcuugauaccaaa

SEQ ID NO: 173675 - RNA, 19 nt, Homo sapiens
  misc_RNA (1)...(19): siRNA sense strand
cgacaugaauaagaucaau

SEQ ID NO: 173676 - RNA, 19 nt, Homo sapiens
  misc_RNA (1)...(19): siRNA sense strand
ggcgauggcauuauacaaa

SEQ ID NO: 173677 - RNA, 19 nt, Homo sapiens
  misc_RNA (1)...(19): siRNA sense strand
ucgccagaaugcacuguua

SEQ ID NO: 173678 - RNA, 19 nt, Homo sapiens
  misc_RNA (1)...(19): siRNA sense strand
cagcaaugcccacggcuuu

SEQ ID NO: 173679 - RNA, 19 nt, Homo sapiens
  misc_RNA (1)...(19): siRNA sense strand
caacagcgaguccaucauc

SEQ ID NO: 173680 - RNA, 19 nt, Homo sapiens
  misc_RNA (1)...(19): siRNA sense strand
cugagucucugaccauuug

SEQ ID NO: 173681 - RNA, 19 nt, Homo sapiens
  misc_RNA (1)...(19): siRNA sense strand
gaaagagaauugggaucag

SEQ ID NO: 173682 - RNA, 19 nt, Homo sapiens
  misc_RNA (1)...(19): siRNA sense strand
acaacaacuucaugagcua

SEQ ID NO: 173683 - RNA, 19 nt, Homo sapiens
  misc_RNA (1)...(19): siRNA sense strand
cuacuuggauguuaaugag

SEQ ID NO: 173684 - RNA, 19 nt, Homo sapiens
  misc_RNA (1)...(19): siRNA sense strand
ccauuugggugaccuuugu

SEQ ID NO: 173685 - RNA, 19 nt, Homo sapiens
  misc_RNA (1)...(19): siRNA sense strand
gcaccuggagcccaaauuc

SEQ ID NO: 173686 - RNA, 19 nt, Homo sapiens
  misc_RNA (1)...(19): siRNA sense strand
agacagagcccuccuucga

SEQ ID NO: 173687 - RNA, 19 nt, Homo sapiens
  misc_RNA (1)...(19): siRNA sense strand
gggcacacccacaccauga

SEQ ID NO: 173688 - RNA, 19 nt, Homo sapiens
  misc_RNA (1)...(19): siRNA sense strand
caucaacaaccgagccuuu

SEQ ID NO: 173689 - RNA, 19 nt, Homo sapiens
  misc_RNA (1)...(19): siRNA sense strand
gauccucucggaagucaaa

SEQ ID NO: 173690 - RNA, 19 nt, Homo sapiens
  misc_RNA (1)...(19): siRNA sense strand
acagagggcaaguggaaua

SEQ ID NO: 173691 - RNA, 19 nt, Homo sapiens
  misc_RNA (1)...(19): siRNA sense strand
agaccaaggugaacaaugc

SEQ ID NO: 173692 - RNA, 19 nt, Homo sapiens
  misc_RNA (1)...(19): siRNA sense strand
caucaccugcugucacaua

SEQ ID NO: 173693 - RNA, 19 nt, Homo sapiens
  misc_RNA (1)...(19): siRNA sense strand
gaauugggaucagcauguc

SEQ ID NO: 173694 - RNA, 19 nt, Homo sapiens
  misc_RNA (1)...(19): siRNA sense strand
caaaguggaauucagcaau

SEQ ID NO: 173695 - RNA, 19 nt, Homo sapiens
  misc_RNA (1)...(19): siRNA sense strand
ggacccuccucuccagaug

SEQ ID NO: 173696 - RNA, 19 nt, Homo sapiens
  misc_RNA (1)...(19): siRNA sense strand
ggaguuggcaggaguagca

SEQ ID NO: 173697 - RNA, 19 nt, Homo sapiens
  misc_RNA (1)...(19): siRNA sense strand
uguauggcauccaaaucua

SEQ ID NO: 173698 - RNA, 19 nt, Homo sapiens
  misc_RNA (1)...(19): siRNA sense strand
caugggcucuaccagugua

SEQ ID NO: 173699 - RNA, 19 nt, Homo sapiens
  misc_RNA (1)...(19): siRNA sense strand
gccaucaccugcugucaca

SEQ ID NO: 173700 - RNA, 19 nt, Homo sapiens
  misc_RNA (1)...(19): siRNA sense strand
uauagauggccauuucuuu

SEQ ID NO: 173701 - RNA, 19 nt, Homo sapiens
  misc_RNA (1)...(19): siRNA sense strand
gcucaacagcaaccucaaa

SEQ ID NO: 173702 - RNA, 19 nt, Homo sapiens
  misc_RNA (1)...(19): siRNA sense strand
gcgugcagcugcuugauac

SEQ ID NO: 173703 - RNA, 19 nt, Homo sapiens
  misc_RNA (1)...(19): siRNA sense strand
uaaggacuguggugucuac

SEQ ID NO: 173704 - RNA, 19 nt, Homo sapiens
  misc_RNA (1)...(19): siRNA sense strand
ugaaagagaauugggauca

SEQ ID NO: 173705 - RNA, 19 nt, Homo sapiens
  misc_RNA (1)...(19): siRNA sense strand
ggugacggaugggacauau

SEQ ID NO: 173706 - RNA, 19 nt, Homo sapiens
  misc_RNA (1)...(19): siRNA sense strand
caucccagaucaccaucaa

SEQ ID NO: 173707 - RNA, 19 nt, Homo sapiens
  misc_RNA (1)...(19): siRNA sense strand
gugcaggucugguucagua

SEQ ID NO: 173708 - RNA, 19 nt, Homo sapiens
  misc_RNA (1)...(19): siRNA sense strand
gaaccugaccucccacuga

SEQ ID NO: 173709 - RNA, 19 nt, Homo sapiens
  misc_RNA (1)...(19): siRNA sense strand
ccacauccgccacaagaua

SEQ ID NO: 173710 - RNA, 19 nt, Homo sapiens
  misc_RNA (1)...(19): siRNA sense strand
gaaucaaguucgggaagaa

SEQ ID NO: 173711 - RNA, 19 nt, Homo sapiens
  misc_RNA (1)...(19): siRNA sense strand
gggacaggcugcugaagga

SEQ ID NO: 173712 - RNA, 19 nt, Homo sapiens
  misc_RNA (1)...(19): siRNA sense strand
agaaagaggaggaggauga

SEQ ID NO: 173713 - RNA, 19 nt, Homo sapiens
  misc_RNA (1)...(19): siRNA sense strand
gaagaaagaggaggaggau

SEQ ID NO: 173714 - RNA, 19 nt, Homo sapiens
  misc_RNA (1)...(19): siRNA sense strand
ucugacagcuucaugaauc

SEQ ID NO: 173715 - RNA, 19 nt, Homo sapiens
  misc_RNA (1)...(19): siRNA sense strand
gaaagaggaggaggaugaa

SEQ ID NO: 173716 - RNA, 19 nt, Homo sapiens
  misc_RNA (1)...(19): siRNA sense strand
ccagccagauggaacaguu

SEQ ID NO: 173717 - RNA, 19 nt, Homo sapiens
  misc_RNA (1)...(19): siRNA sense strand
ggaugaagcggacaagaag

SEQ ID NO: 173718 - RNA, 19 nt, Homo sapiens
  misc_RNA (1)...(19): siRNA sense strand
ggaggggucuucaucaaug

SEQ ID NO: 173719 - RNA, 19 nt, Homo sapiens
  misc_RNA (1)...(19): siRNA sense strand
ccaccaccaucucccaaga

SEQ ID NO: 173720 - RNA, 19 nt, Homo sapiens
  misc_RNA (1)...(19): siRNA sense strand
gcugaaggaugggcacugu

SEQ ID NO: 173721 - RNA, 19 nt, Homo sapiens
  misc_RNA (1)...(19): siRNA sense strand
ugaaggaugggcacuguga

SEQ ID NO: 173722 - RNA, 19 nt, Homo sapiens
  misc_RNA (1)...(19): siRNA sense strand
gacccacuacccagacaua

SEQ ID NO: 173723 - RNA, 19 nt, Homo sapiens
  misc_RNA (1)...(19): siRNA sense strand
gaaaagaaggccaaacaca

SEQ ID NO: 173724 - RNA, 19 nt, Homo sapiens
  misc_RNA (1)...(19): siRNA sense strand
ccacuacccagacauauac

SEQ ID NO: 173725 - RNA, 19 nt, Homo sapiens
  misc_RNA (1)...(19): siRNA sense strand
aaccugaccucccacugaa

SEQ ID NO: 173726 - RNA, 19 nt, Homo sapiens
  misc_RNA (1)...(19): siRNA sense strand
gguggcgacuccggaugua

SEQ ID NO: 173727 - RNA, 19 nt, Homo sapiens
  misc_RNA (1)...(19): siRNA sense strand
agaaucaaguucgggaaga

SEQ ID NO: 173728 - RNA, 19 nt, Homo sapiens
  misc_RNA (1)...(19): siRNA sense strand
gcuuguuuauggagagcua

SEQ ID NO: 173729 - RNA, 19 nt, Homo sapiens
  misc_RNA (1)...(19): siRNA sense strand
gacuccggauguagagaaa

SEQ ID NO: 173730 - RNA, 19 nt, Homo sapiens
  misc_RNA (1)...(19): siRNA sense strand
ggaaaacccaggcauguuc

SEQ ID NO: 173731 - RNA, 19 nt, Homo sapiens
  misc_RNA (1)...(19): siRNA sense strand
cccacuacccagacauaua

SEQ ID NO: 173732 - RNA, 19 nt, Homo sapiens
  misc_RNA (1)...(19): siRNA sense strand
cgacuccggauguagagaa

SEQ ID NO: 173733 - RNA, 19 nt, Homo sapiens
  misc_RNA (1)...(19): siRNA sense strand
gccaguacggccagaguga

SEQ ID NO: 173734 - RNA, 19 nt, Homo sapiens
  misc_RNA (1)...(19): siRNA sense strand
gcagaggaccaagcugaca

SEQ ID NO: 173735 - RNA, 19 nt, Homo sapiens
  misc_RNA (1)...(19): siRNA sense strand
caggcugacuucuccaucu

SEQ ID NO: 173736 - RNA, 19 nt, Homo sapiens
  misc_RNA (1)...(19): siRNA sense strand
gaggaguacaagagggaaa

SEQ ID NO: 173737 - RNA, 19 nt, Homo sapiens
  misc_RNA (1)...(19): siRNA sense strand
aggaugaagcggacaagaa

SEQ ID NO: 173738 - RNA, 19 nt, Homo sapiens
  misc_RNA (1)...(19): siRNA sense strand
gcacgguaccgagaaugau

SEQ ID NO: 173739 - RNA, 19 nt, Homo sapiens
  misc_RNA (1)...(19): siRNA sense strand
ggcacgguaccgagaauga

SEQ ID NO: 173740 - RNA, 19 nt, Homo sapiens
  misc_RNA (1)...(19): siRNA sense strand
aaccacauccgccacaaga

SEQ ID NO: 173741 - RNA, 19 nt, Homo sapiens
  misc_RNA (1)...(19): siRNA sense strand
ggucagcaacggccugucu

SEQ ID NO: 173742 - RNA, 19 nt, Homo sapiens
  misc_RNA (1)...(19): siRNA sense strand
ucaaguucgggaagaaaga

SEQ ID NO: 173743 - RNA, 19 nt, Homo sapiens
  misc_RNA (1)...(19): siRNA sense strand
gcgaaaagaaggccaaaca

SEQ ID NO: 173744 - RNA, 19 nt, Homo sapiens
  misc_RNA (1)...(19): siRNA sense strand
ggcugcgucuccaagauuc

SEQ ID NO: 173745 - RNA, 19 nt, Homo sapiens
  misc_RNA (1)...(19): siRNA sense strand
gugcaggucugguucagua

SEQ ID NO: 173746 - RNA, 19 nt, Homo sapiens
  misc_RNA (1)...(19): siRNA sense strand
gaaccugaccucccacuga

SEQ ID NO: 173747 - RNA, 19 nt, Homo sapiens
  misc_RNA (1)...(19): siRNA sense strand
ccacauccgccacaagaua

SEQ ID NO: 173748 - RNA, 19 nt, Homo sapiens
  misc_RNA (1)...(19): siRNA sense strand
gaaucaaguucgggaagaa

SEQ ID NO: 173749 - RNA, 19 nt, Homo sapiens
  misc_RNA (1)...(19): siRNA sense strand
gggacaggcugcugaagga

SEQ ID NO: 173750 - RNA, 19 nt, Homo sapiens
  misc_RNA (1)...(19): siRNA sense strand
agaaagaggaggaggauga

SEQ ID NO: 173751 - RNA, 19 nt, Homo sapiens
  misc_RNA (1)...(19): siRNA sense strand
gaagaaagaggaggaggau

SEQ ID NO: 173752 - RNA, 19 nt, Homo sapiens
  misc_RNA (1)...(19): siRNA sense strand
ucugacagcuucaugaauc

SEQ ID NO: 173753 - RNA, 19 nt, Homo sapiens
  misc_RNA (1)...(19): siRNA sense strand
gaaagaggaggaggaugaa

SEQ ID NO: 173754 - RNA, 19 nt, Homo sapiens
  misc_RNA (1)...(19): siRNA sense strand
ccagccagauggaacaguu

SEQ ID NO: 173755 - RNA, 19 nt, Homo sapiens
  misc_RNA (1)...(19): siRNA sense strand
ggaugaagcggacaagaag

SEQ ID NO: 173756 - RNA, 19 nt, Homo sapiens
  misc_RNA (1)...(19): siRNA sense strand
ggaggggucuucaucaaug

SEQ ID NO: 173757 - RNA, 19 nt, Homo sapiens
  misc_RNA (1)...(19): siRNA sense strand
ccaccaccaucucccaaga

SEQ ID NO: 173758 - RNA, 19 nt, Homo sapiens
  misc_RNA (1)...(19): siRNA sense strand
gcugaaggaugggcacugu

SEQ ID NO: 173759 - RNA, 19 nt, Homo sapiens
  misc_RNA (1)...(19): siRNA sense strand
ugaaggaugggcacuguga

SEQ ID NO: 173760 - RNA, 19 nt, Homo sapiens
  misc_RNA (1)...(19): siRNA sense strand
gacccacuacccagacaua

SEQ ID NO: 173761 - RNA, 19 nt, Homo sapiens
  misc_RNA (1)...(19): siRNA sense strand
gaaaagaaggccaaacaca

SEQ ID NO: 173762 - RNA, 19 nt, Homo sapiens
  misc_RNA (1)...(19): siRNA sense strand
ccacuacccagacauauac

SEQ ID NO: 173763 - RNA, 19 nt, Homo sapiens
  misc_RNA (1)...(19): siRNA sense strand
aaccugaccucccacugaa

SEQ ID NO: 173764 - RNA, 19 nt, Homo sapiens
  misc_RNA (1)...(19): siRNA sense strand
gguggcgacuccggaugua

SEQ ID NO: 173765 - RNA, 19 nt, Homo sapiens
  misc_RNA (1)...(19): siRNA sense strand
agaaucaaguucgggaaga

SEQ ID NO: 173766 - RNA, 19 nt, Homo sapiens
  misc_RNA (1)...(19): siRNA sense strand
gcuuguuuauggagagcua

SEQ ID NO: 173767 - RNA, 19 nt, Homo sapiens
  misc_RNA (1)...(19): siRNA sense strand
gacuccggauguagagaaa

SEQ ID NO: 173768 - RNA, 19 nt, Homo sapiens
  misc_RNA (1)...(19): siRNA sense strand
ggaaaacccaggcauguuc

SEQ ID NO: 173769 - RNA, 19 nt, Homo sapiens
  misc_RNA (1)...(19): siRNA sense strand
cccacuacccagacauaua

SEQ ID NO: 173770 - RNA, 19 nt, Homo sapiens
  misc_RNA (1)...(19): siRNA sense strand
cgacuccggauguagagaa

SEQ ID NO: 173771 - RNA, 19 nt, Homo sapiens
  misc_RNA (1)...(19): siRNA sense strand
gccaguacggccagaguga

SEQ ID NO: 173772 - RNA, 19 nt, Homo sapiens
  misc_RNA (1)...(19): siRNA sense strand
gcagaggaccaagcugaca

SEQ ID NO: 173773 - RNA, 19 nt, Homo sapiens
  misc_RNA (1)...(19): siRNA sense strand
caggcugacuucuccaucu

SEQ ID NO: 173774 - RNA, 19 nt, Homo sapiens
  misc_RNA (1)...(19): siRNA sense strand
gaggaguacaagagggaaa

SEQ ID NO: 173775 - RNA, 19 nt, Homo sapiens
  misc_RNA (1)...(19): siRNA sense strand
aggaugaagcggacaagaa

SEQ ID NO: 173776 - RNA, 19 nt, Homo sapiens
  misc_RNA (1)...(19): siRNA sense strand
gcacgguaccgagaaugau

SEQ ID NO: 173777 - RNA, 19 nt, Homo sapiens
  misc_RNA (1)...(19): siRNA sense strand
ggcacgguaccgagaauga

SEQ ID NO: 173778 - RNA, 19 nt, Homo sapiens
  misc_RNA (1)...(19): siRNA sense strand
aaccacauccgccacaaga

SEQ ID NO: 173779 - RNA, 19 nt, Homo sapiens
  misc_RNA (1)...(19): siRNA sense strand
ggucagcaacggccugucu

SEQ ID NO: 173780 - RNA, 19 nt, Homo sapiens
  misc_RNA (1)...(19): siRNA sense strand
ucaaguucgggaagaaaga

SEQ ID NO: 173781 - RNA, 19 nt, Homo sapiens
  misc_RNA (1)...(19): siRNA sense strand
gcgaaaagaaggccaaaca

SEQ ID NO: 173782 - RNA, 19 nt, Homo sapiens
  misc_RNA (1)...(19): siRNA sense strand
ggcugcgucuccaagauuc

SEQ ID NO: 173783 - RNA, 19 nt, Homo sapiens
  misc_RNA (1)...(19): siRNA sense strand
ccacugagguccuaaauga

SEQ ID NO: 173784 - RNA, 19 nt, Homo sapiens
  misc_RNA (1)...(19): siRNA sense strand
caacggagauuccuauucu

SEQ ID NO: 173785 - RNA, 19 nt, Homo sapiens
  misc_RNA (1)...(19): siRNA sense strand
acucggagcuggagaagua

SEQ ID NO: 173786 - RNA, 19 nt, Homo sapiens
  misc_RNA (1)...(19): siRNA sense strand
gcaaacaucuaugcuguca

SEQ ID NO: 173787 - RNA, 19 nt, Homo sapiens
  misc_RNA (1)...(19): siRNA sense strand
aaugaagccugcucucuuu

SEQ ID NO: 173788 - RNA, 19 nt, Homo sapiens
  misc_RNA (1)...(19): siRNA sense strand
gagcaggcauguaaugagu

SEQ ID NO: 173789 - RNA, 19 nt, Homo sapiens
  misc_RNA (1)...(19): siRNA sense strand
gaaugaagccugcucucuu

SEQ ID NO: 173790 - RNA, 19 nt, Homo sapiens
  misc_RNA (1)...(19): siRNA sense strand
caucauccaucgaaaguuc

SEQ ID NO: 173791 - RNA, 19 nt, Homo sapiens
  misc_RNA (1)...(19): siRNA sense strand
aaacaucuaugcugucaag

SEQ ID NO: 173792 - RNA, 19 nt, Homo sapiens
  misc_RNA (1)...(19): siRNA sense strand
cgaaagcgccguaacuuca

SEQ ID NO: 173793 - RNA, 19 nt, Homo sapiens
  misc_RNA (1)...(19): siRNA sense strand
gcccagauccgucacauau

SEQ ID NO: 173794 - RNA, 19 nt, Homo sapiens
  misc_RNA (1)...(19): siRNA sense strand
gcaggcauguaaugaguuc

SEQ ID NO: 173795 - RNA, 19 nt, Homo sapiens
  misc_RNA (1)...(19): siRNA sense strand
ccagauccgucacauauac

SEQ ID NO: 173796 - RNA, 19 nt, Homo sapiens
  misc_RNA (1)...(19): siRNA sense strand
ccaagaaacacgcccuaaa

SEQ ID NO: 173797 - RNA, 19 nt, Homo sapiens
  misc_RNA (1)...(19): siRNA sense strand
gaacgcauggugagcauca

SEQ ID NO: 173798 - RNA, 19 nt, Homo sapiens
  misc_RNA (1)...(19): siRNA sense strand
caagaaacacgcccuaaac

SEQ ID NO: 173799 - RNA, 19 nt, Homo sapiens
  misc_RNA (1)...(19): siRNA sense strand
aguaugagcaggcauguaa

SEQ ID NO: 173800 - RNA, 19 nt, Homo sapiens
  misc_RNA (1)...(19): siRNA sense strand
ugugugaaaucaaggagaa

SEQ ID NO: 173801 - RNA, 19 nt, Homo sapiens
  misc_RNA (1)...(19): siRNA sense strand
gacuaucgcagcaaacuug

SEQ ID NO: 173802 - RNA, 19 nt, Homo sapiens
  misc_RNA (1)...(19): siRNA sense strand
ccaccugaguaacccauau

SEQ ID NO: 173803 - RNA, 19 nt, Homo sapiens
  misc_RNA (1)...(19): siRNA sense strand
gcucaacggagauuccuau

SEQ ID NO: 173804 - RNA, 19 nt, Homo sapiens
  misc_RNA (1)...(19): siRNA sense strand
cagcagauaaugaccauca

SEQ ID NO: 173805 - RNA, 19 nt, Homo sapiens
  misc_RNA (1)...(19): siRNA sense strand
gacgaaagcgccguaacuu

SEQ ID NO: 173806 - RNA, 19 nt, Homo sapiens
  misc_RNA (1)...(19): siRNA sense strand
cugaguaacccauauccua

SEQ ID NO: 173807 - RNA, 19 nt, Homo sapiens
  misc_RNA (1)...(19): siRNA sense strand
cuaaacugccaccgaauga

SEQ ID NO: 173808 - RNA, 19 nt, Homo sapiens
  misc_RNA (1)...(19): siRNA sense strand
cucaggaucuggagacaug

SEQ ID NO: 173809 - RNA, 19 nt, Homo sapiens
  misc_RNA (1)...(19): siRNA sense strand
gaagccugcucucuuuagc

SEQ ID NO: 173810 - RNA, 19 nt, Homo sapiens
  misc_RNA (1)...(19): siRNA sense strand
gagcaucauccaucgaaag

SEQ ID NO: 173811 - RNA, 19 nt, Homo sapiens
  misc_RNA (1)...(19): siRNA sense strand
cugagguccuaaaugagua

SEQ ID NO: 173812 - RNA, 19 nt, Homo sapiens
  misc_RNA (1)...(19): siRNA sense strand
ggacuaucgcagcaaacuu

SEQ ID NO: 173813 - RNA, 19 nt, Homo sapiens
  misc_RNA (1)...(19): siRNA sense strand
aagaggaggcaaacaucua

SEQ ID NO: 173814 - RNA, 19 nt, Homo sapiens
  misc_RNA (1)...(19): siRNA sense strand
cgccguaacuucagcaaac

SEQ ID NO: 173815 - RNA, 19 nt, Homo sapiens
  misc_RNA (1)...(19): siRNA sense strand
ccaagaggaggcaaacauc

SEQ ID NO: 173816 - RNA, 19 nt, Homo sapiens
  misc_RNA (1)...(19): siRNA sense strand
aaacuggccucagcauucg

SEQ ID NO: 173817 - RNA, 19 nt, Homo sapiens
  misc_RNA (1)...(19): siRNA sense strand
ggagggaccagggaguguu

SEQ ID NO: 173818 - RNA, 19 nt, Homo sapiens
  misc_RNA (1)...(19): siRNA sense strand
gaaagcgccguaacuucag

SEQ ID NO: 173819 - RNA, 19 nt, Homo sapiens
  misc_RNA (1)...(19): siRNA sense strand
gugagcaucauccaucgaa

SEQ ID NO: 173820 - RNA, 19 nt, Homo sapiens
  misc_RNA (1)...(19): siRNA sense strand
caucgaacacucggacuau

SEQ ID NO: 173821 - RNA, 19 nt, Homo sapiens
  misc_RNA (1)...(19): siRNA sense strand
gaaaacuggccucagcauu

SEQ ID NO: 173822 - RNA, 19 nt, Homo sapiens
  misc_RNA (1)...(19): siRNA sense strand
gggaaaugagggcaaaugg

SEQ ID NO: 173823 - RNA, 19 nt, Homo sapiens
  misc_RNA (1)...(19): siRNA sense strand
caagaggaggcaaacaucu

SEQ ID NO: 173824 - RNA, 19 nt, Homo sapiens
  misc_RNA (1)...(19): siRNA sense strand
agaaacacgcccuaaacug

SEQ ID NO: 173825 - RNA, 19 nt, Homo sapiens
  misc_RNA (1)...(19): siRNA sense strand
gaaguaugagcaggcaugu

SEQ ID NO: 173826 - RNA, 19 nt, Homo sapiens
  misc_RNA (1)...(19): siRNA sense strand
ccuaaacugccaccgaaug

SEQ ID NO: 173827 - RNA, 19 nt, Homo sapiens
  misc_RNA (1)...(19): siRNA sense strand
gcgcucccguuuccuggau

SEQ ID NO: 173828 - RNA, 19 nt, Homo sapiens
  misc_RNA (1)...(19): siRNA sense strand
gcgcuuggacaacaugcuu

SEQ ID NO: 173829 - RNA, 19 nt, Homo sapiens
  misc_RNA (1)...(19): siRNA sense strand
gaucuggagacauguuucu

SEQ ID NO: 173830 - RNA, 19 nt, Homo sapiens
  misc_RNA (1)...(19): siRNA sense strand
ucuggcggcucuuucaauc

SEQ ID NO: 173831 - RNA, 19 nt, Homo sapiens
  misc_RNA (1)...(19): siRNA sense strand
agaggaggcaaacaucuau

SEQ ID NO: 173832 - RNA, 19 nt, Homo sapiens
  misc_RNA (1)...(19): siRNA sense strand
cuagugaggaggccaagga

SEQ ID NO: 173833 - RNA, 19 nt, Homo sapiens
  misc_RNA (1)...(19): siRNA sense strand
ugagcaucauccaucgaaa

SEQ ID NO: 173834 - RNA, 19 nt, Homo sapiens
  misc_RNA (1)...(19): siRNA sense strand
gccaagaaacacgcccuaa

SEQ ID NO: 173835 - RNA, 19 nt, Homo sapiens
  misc_RNA (1)...(19): siRNA sense strand
ccaucgaacacucggacua

SEQ ID NO: 173836 - RNA, 19 nt, Homo sapiens
  misc_RNA (1)...(19): siRNA sense strand
cacgggaaaugagggcaaa

SEQ ID NO: 173837 - RNA, 19 nt, Homo sapiens
  misc_RNA (1)...(19): siRNA sense strand
aaacugccaccgaaugaag

SEQ ID NO: 173838 - RNA, 19 nt, Homo sapiens
  misc_RNA (1)...(19): siRNA sense strand
uaugagcaggcauguaaug

SEQ ID NO: 173839 - RNA, 19 nt, Homo sapiens
  misc_RNA (1)...(19): siRNA sense strand
caaauggcagcuggcaaga

SEQ ID NO: 173840 - RNA, 19 nt, Homo sapiens
  misc_RNA (1)...(19): siRNA sense strand
ucuuuagcguccuguguga

SEQ ID NO: 173841 - RNA, 19 nt, Homo sapiens
  misc_RNA (1)...(19): siRNA sense strand
cugcgaggcugugaugauc

SEQ ID NO: 173842 - RNA, 19 nt, Homo sapiens
  misc_RNA (1)...(19): siRNA sense strand
ucaacggagauuccuauuc

SEQ ID NO: 173843 - RNA, 19 nt, Homo sapiens
  misc_RNA (1)...(19): siRNA sense strand
gaguaacccauauccuagu

SEQ ID NO: 173844 - RNA, 19 nt, Homo sapiens
  misc_RNA (1)...(19): siRNA sense strand
acaggccacugagguccua

SEQ ID NO: 173845 - RNA, 19 nt, Homo sapiens
  misc_RNA (1)...(19): siRNA sense strand
gccguaacuucagcaaaca

SEQ ID NO: 173846 - RNA, 19 nt, Homo sapiens
  misc_RNA (1)...(19): siRNA sense strand
gaacugagccuaaagucaa

SEQ ID NO: 173847 - RNA, 19 nt, Homo sapiens
  misc_RNA (1)...(19): siRNA sense strand
gaagaaaggagucaguuau

SEQ ID NO: 173848 - RNA, 19 nt, Homo sapiens
  misc_RNA (1)...(19): siRNA sense strand
gagugcaucuggaccauaa

SEQ ID NO: 173849 - RNA, 19 nt, Homo sapiens
  misc_RNA (1)...(19): siRNA sense strand
cagguuacguggcaaguga

SEQ ID NO: 173850 - RNA, 19 nt, Homo sapiens
  misc_RNA (1)...(19): siRNA sense strand
ugaagaaaggagucaguua

SEQ ID NO: 173851 - RNA, 19 nt, Homo sapiens
  misc_RNA (1)...(19): siRNA sense strand
gaaaggagucaguuaucug

SEQ ID NO: 173852 - RNA, 19 nt, Homo sapiens
  misc_RNA (1)...(19): siRNA sense strand
gaggcuuccugcucuggua

SEQ ID NO: 173853 - RNA, 19 nt, Homo sapiens
  misc_RNA (1)...(19): siRNA sense strand
ggacaccuacugccgcuau

SEQ ID NO: 173854 - RNA, 19 nt, Homo sapiens
  misc_RNA (1)...(19): siRNA sense strand
ggaacugagccuaaaguca

SEQ ID NO: 173855 - RNA, 19 nt, Homo sapiens
  misc_RNA (1)...(19): siRNA sense strand
ggacuggaccugccaacuc

SEQ ID NO: 173856 - RNA, 19 nt, Homo sapiens
  misc_RNA (1)...(19): siRNA sense strand
agaaaggagucaguuaucu

SEQ ID NO: 173857 - RNA, 19 nt, Homo sapiens
  misc_RNA (1)...(19): siRNA sense strand
gugccucccugaaguuuua

SEQ ID NO: 173858 - RNA, 19 nt, Homo sapiens
  misc_RNA (1)...(19): siRNA sense strand
gucccaaccuccggagaaa

SEQ ID NO: 173859 - RNA, 19 nt, Homo sapiens
  misc_RNA (1)...(19): siRNA sense strand
gcugaugggccagguagaa

SEQ ID NO: 173860 - RNA, 19 nt, Homo sapiens
  misc_RNA (1)...(19): siRNA sense strand
ggagugcaucuggaccaua

SEQ ID NO: 173861 - RNA, 19 nt, Homo sapiens
  misc_RNA (1)...(19): siRNA sense strand
ucagucuuauuggugcuua

SEQ ID NO: 173862 - RNA, 19 nt, Homo sapiens
  misc_RNA (1)...(19): siRNA sense strand
cagauccucaccaaccuaa

SEQ ID NO: 173863 - RNA, 19 nt, Homo sapiens
  misc_RNA (1)...(19): siRNA sense strand
ccagguagaagagaacaga

SEQ ID NO: 173864 - RNA, 19 nt, Homo sapiens
  misc_RNA (1)...(19): siRNA sense strand
ucaccaaccuaagcaagag

SEQ ID NO: 173865 - RNA, 19 nt, Homo sapiens
  misc_RNA (1)...(19): siRNA sense strand
ugaggaugacgacggauga

SEQ ID NO: 173866 - RNA, 19 nt, Homo sapiens
  misc_RNA (1)...(19): siRNA sense strand
gacagugaaguccaugguu

SEQ ID NO: 173867 - RNA, 19 nt, Homo sapiens
  misc_RNA (1)...(19): siRNA sense strand
gacugugucccucucauuc

SEQ ID NO: 173868 - RNA, 19 nt, Homo sapiens
  misc_RNA (1)...(19): siRNA sense strand
ccacuggugccucccugaa

SEQ ID NO: 173869 - RNA, 19 nt, Homo sapiens
  misc_RNA (1)...(19): siRNA sense strand
ucaucgcgcugaccuucga

SEQ ID NO: 173870 - RNA, 19 nt, Homo sapiens
  misc_RNA (1)...(19): siRNA sense strand
aagaaaggagucaguuauc

SEQ ID NO: 173871 - RNA, 19 nt, Homo sapiens
  misc_RNA (1)...(19): siRNA sense strand
gcggauaccucgcccaugu

SEQ ID NO: 173872 - RNA, 19 nt, Homo sapiens
  misc_RNA (1)...(19): siRNA sense strand
gaagagaagcaucgaggaa

SEQ ID NO: 173873 - RNA, 19 nt, Homo sapiens
  misc_RNA (1)...(19): siRNA sense strand
ggaagaagccaaaauuaaa

SEQ ID NO: 173874 - RNA, 19 nt, Homo sapiens
  misc_RNA (1)...(19): siRNA sense strand
gcagucagauccacagcau

SEQ ID NO: 173875 - RNA, 19 nt, Homo sapiens
  misc_RNA (1)...(19): siRNA sense strand
ggacggucauuuacgagau

SEQ ID NO: 173876 - RNA, 19 nt, Homo sapiens
  misc_RNA (1)...(19): siRNA sense strand
ggagugaggauucuuugga

SEQ ID NO: 173877 - RNA, 19 nt, Homo sapiens
  misc_RNA (1)...(19): siRNA sense strand
ccaggacggucauuuacga

SEQ ID NO: 173878 - RNA, 19 nt, Homo sapiens
  misc_RNA (1)...(19): siRNA sense strand
uggaauacgucaggaagaa

SEQ ID NO: 173879 - RNA, 19 nt, Homo sapiens
  misc_RNA (1)...(19): siRNA sense strand
cuaagcaugugcccgagaa

SEQ ID NO: 173880 - RNA, 19 nt, Homo sapiens
  misc_RNA (1)...(19): siRNA sense strand
gacggucauuuacgagauu

SEQ ID NO: 173881 - RNA, 19 nt, Homo sapiens
  misc_RNA (1)...(19): siRNA sense strand
gagguuagaggagcauuug

SEQ ID NO: 173882 - RNA, 19 nt, Homo sapiens
  misc_RNA (1)...(19): siRNA sense strand
ggauaccucgcccauguuc

SEQ ID NO: 173883 - RNA, 19 nt, Homo sapiens
  misc_RNA (1)...(19): siRNA sense strand
caagguggccaagguggaa

SEQ ID NO: 173884 - RNA, 19 nt, Homo sapiens
  misc_RNA (1)...(19): siRNA sense strand
gguuagaggagcauuugga

SEQ ID NO: 173885 - RNA, 19 nt, Homo sapiens
  misc_RNA (1)...(19): siRNA sense strand
gcgucaagguggccaaggu

SEQ ID NO: 173886 - RNA, 19 nt, Homo sapiens
  misc_RNA (1)...(19): siRNA sense strand
caggaagaagccaaaauua

SEQ ID NO: 173887 - RNA, 19 nt, Homo sapiens
  misc_RNA (1)...(19): siRNA sense strand
gaaguccaggugagguuag

SEQ ID NO: 173888 - RNA, 19 nt, Homo sapiens
  misc_RNA (1)...(19): siRNA sense strand
ccacgccacuaagcaugug

SEQ ID NO: 173889 - RNA, 19 nt, Homo sapiens
  misc_RNA (1)...(19): siRNA sense strand
agaaguccaggugagguua

SEQ ID NO: 173890 - RNA, 19 nt, Homo sapiens
  misc_RNA (1)...(19): siRNA sense strand
ucaggaagaagccaaaauu

SEQ ID NO: 173891 - RNA, 19 nt, Homo sapiens
  misc_RNA (1)...(19): siRNA sense strand
uggccaagguggaauacgu

SEQ ID NO: 173892 - RNA, 19 nt, Homo sapiens
  misc_RNA (1)...(19): siRNA sense strand
gcggauaccucgcccaugu

SEQ ID NO: 173893 - RNA, 19 nt, Homo sapiens
  misc_RNA (1)...(19): siRNA sense strand
gaagagaagcaucgaggaa

SEQ ID NO: 173894 - RNA, 19 nt, Homo sapiens
  misc_RNA (1)...(19): siRNA sense strand
ggaagaagccaaaauuaaa

SEQ ID NO: 173895 - RNA, 19 nt, Homo sapiens
  misc_RNA (1)...(19): siRNA sense strand
gcagucagauccacagcau

SEQ ID NO: 173896 - RNA, 19 nt, Homo sapiens
  misc_RNA (1)...(19): siRNA sense strand
ggacggucauuuacgagau

SEQ ID NO: 173897 - RNA, 19 nt, Homo sapiens
  misc_RNA (1)...(19): siRNA sense strand
ggagugaggauucuuugga

SEQ ID NO: 173898 - RNA, 19 nt, Homo sapiens
  misc_RNA (1)...(19): siRNA sense strand
ccaggacggucauuuacga

SEQ ID NO: 173899 - RNA, 19 nt, Homo sapiens
  misc_RNA (1)...(19): siRNA sense strand
uggaauacgucaggaagaa

SEQ ID NO: 173900 - RNA, 19 nt, Homo sapiens
  misc_RNA (1)...(19): siRNA sense strand
cuaagcaugugcccgagaa

SEQ ID NO: 173901 - RNA, 19 nt, Homo sapiens
  misc_RNA (1)...(19): siRNA sense strand
gacggucauuuacgagauu

SEQ ID NO: 173902 - RNA, 19 nt, Homo sapiens
  misc_RNA (1)...(19): siRNA sense strand
gagguuagaggagcauuug

SEQ ID NO: 173903 - RNA, 19 nt, Homo sapiens
  misc_RNA (1)...(19): siRNA sense strand
ggauaccucgcccauguuc

SEQ ID NO: 173904 - RNA, 19 nt, Homo sapiens
  misc_RNA (1)...(19): siRNA sense strand
caagguggccaagguggaa

SEQ ID NO: 173905 - RNA, 19 nt, Homo sapiens
  misc_RNA (1)...(19): siRNA sense strand
gguuagaggagcauuugga

SEQ ID NO: 173906 - RNA, 19 nt, Homo sapiens
  misc_RNA (1)...(19): siRNA sense strand
gcgucaagguggccaaggu

SEQ ID NO: 173907 - RNA, 19 nt, Homo sapiens
  misc_RNA (1)...(19): siRNA sense strand
caggaagaagccaaaauua

SEQ ID NO: 173908 - RNA, 19 nt, Homo sapiens
  misc_RNA (1)...(19): siRNA sense strand
gaaguccaggugagguuag

SEQ ID NO: 173909 - RNA, 19 nt, Homo sapiens
  misc_RNA (1)...(19): siRNA sense strand
ccacgccacuaagcaugug

SEQ ID NO: 173910 - RNA, 19 nt, Homo sapiens
  misc_RNA (1)...(19): siRNA sense strand
agaaguccaggugagguua

SEQ ID NO: 173911 - RNA, 19 nt, Homo sapiens
  misc_RNA (1)...(19): siRNA sense strand
ucaggaagaagccaaaauu

SEQ ID NO: 173912 - RNA, 19 nt, Homo sapiens
  misc_RNA (1)...(19): siRNA sense strand
uggccaagguggaauacgu

SEQ ID NO: 173913 - RNA, 19 nt, Homo sapiens
  misc_RNA (1)...(19): siRNA sense strand
ugagaaagaucgagauugu

SEQ ID NO: 173914 - RNA, 19 nt, Homo sapiens
  misc_RNA (1)...(19): siRNA sense strand
ccgaggagcuuuaugagau

SEQ ID NO: 173915 - RNA, 19 nt, Homo sapiens
  misc_RNA (1)...(19): siRNA sense strand
uuuaugagaugcugaguga

SEQ ID NO: 173916 - RNA, 19 nt, Homo sapiens
  misc_RNA (1)...(19): siRNA sense strand
gcaagcaccggaaauucaa

SEQ ID NO: 173917 - RNA, 19 nt, Homo sapiens
  misc_RNA (1)...(19): siRNA sense strand
gaguuggaccugaacauga

SEQ ID NO: 173918 - RNA, 19 nt, Homo sapiens
  misc_RNA (1)...(19): siRNA sense strand
cgaggagcuuuaugagaug

SEQ ID NO: 173919 - RNA, 19 nt, Homo sapiens
  misc_RNA (1)...(19): siRNA sense strand
ucgauccgcuccuuugaug

SEQ ID NO: 173920 - RNA, 19 nt, Homo sapiens
  misc_RNA (1)...(19): siRNA sense strand
ggcaagcaccggaaauuca

SEQ ID NO: 173921 - RNA, 19 nt, Homo sapiens
  misc_RNA (1)...(19): siRNA sense strand
gggccgaguuggaccugaa

SEQ ID NO: 173922 - RNA, 19 nt, Homo sapiens
  misc_RNA (1)...(19): siRNA sense strand
ggugagaaagaucgagauu

SEQ ID NO: 173923 - RNA, 19 nt, Homo sapiens
  misc_RNA (1)...(19): siRNA sense strand
caaacucgggugaccauuc

SEQ ID NO: 173924 - RNA, 19 nt, Homo sapiens
  misc_RNA (1)...(19): siRNA sense strand
gauccgcuccuuugaugau

SEQ ID NO: 173925 - RNA, 19 nt, Homo sapiens
  misc_RNA (1)...(19): siRNA sense strand
ccaccuggcaugcaagugu

SEQ ID NO: 173926 - RNA, 19 nt, Homo sapiens
  misc_RNA (1)...(19): siRNA sense strand
aaacucgggugaccauucg

SEQ ID NO: 173927 - RNA, 19 nt, Homo sapiens
  misc_RNA (1)...(19): siRNA sense strand
ugacaagacggcacugaag

SEQ ID NO: 173928 - RNA, 19 nt, Homo sapiens
  misc_RNA (1)...(19): siRNA sense strand
gggcaagcaccggaaauuc

SEQ ID NO: 173929 - RNA, 19 nt, Homo sapiens
  misc_RNA (1)...(19): siRNA sense strand
ccacggugacgcuggaaga

SEQ ID NO: 173930 - RNA, 19 nt, Homo sapiens
  misc_RNA (1)...(19): siRNA sense strand
gaagaccaccuggcaugca

SEQ ID NO: 173931 - RNA, 19 nt, Homo sapiens
  misc_RNA (1)...(19): siRNA sense strand
aagaccaccuggcaugcaa

SEQ ID NO: 173932 - RNA, 19 nt, Homo sapiens
  misc_RNA (1)...(19): siRNA sense strand
caagggcaagcaccggaaa

SEQ ID NO: 173933 - RNA, 19 nt, Homo sapiens
  misc_RNA (1)...(19): siRNA sense strand
ucaagcacacgcaugacaa

SEQ ID NO: 173934 - RNA, 19 nt, Homo sapiens
  misc_RNA (1)...(19): siRNA sense strand
gagaaagaucgagauugug

SEQ ID NO: 173935 - RNA, 19 nt, Homo sapiens
  misc_RNA (1)...(19): siRNA sense strand
cgaguuggaccugaacaug

SEQ ID NO: 173936 - RNA, 19 nt, Homo sapiens
  misc_RNA (1)...(19): siRNA sense strand
acaagacggcacugaagga

SEQ ID NO: 173937 - RNA, 19 nt, Homo sapiens
  misc_RNA (1)...(19): siRNA sense strand
gugagaaagaucgagauug

SEQ ID NO: 173938 - RNA, 19 nt, Homo sapiens
  misc_RNA (1)...(19): siRNA sense strand
ugagaaagaucgagauugu

SEQ ID NO: 173939 - RNA, 19 nt, Homo sapiens
  misc_RNA (1)...(19): siRNA sense strand
ccgaggagcuuuaugagau

SEQ ID NO: 173940 - RNA, 19 nt, Homo sapiens
  misc_RNA (1)...(19): siRNA sense strand
uuuaugagaugcugaguga

SEQ ID NO: 173941 - RNA, 19 nt, Homo sapiens
  misc_RNA (1)...(19): siRNA sense strand
gcaagcaccggaaauucaa

SEQ ID NO: 173942 - RNA, 19 nt, Homo sapiens
  misc_RNA (1)...(19): siRNA sense strand
gaguuggaccugaacauga

SEQ ID NO: 173943 - RNA, 19 nt, Homo sapiens
  misc_RNA (1)...(19): siRNA sense strand
cgaggagcuuuaugagaug

SEQ ID NO: 173944 - RNA, 19 nt, Homo sapiens
  misc_RNA (1)...(19): siRNA sense strand
ucgauccgcuccuuugaug

SEQ ID NO: 173945 - RNA, 19 nt, Homo sapiens
  misc_RNA (1)...(19): siRNA sense strand
ggcaagcaccggaaauuca

SEQ ID NO: 173946 - RNA, 19 nt, Homo sapiens
  misc_RNA (1)...(19): siRNA sense strand
gggccgaguuggaccugaa

SEQ ID NO: 173947 - RNA, 19 nt, Homo sapiens
  misc_RNA (1)...(19): siRNA sense strand
ggugagaaagaucgagauu

SEQ ID NO: 173948 - RNA, 19 nt, Homo sapiens
  misc_RNA (1)...(19): siRNA sense strand
caaacucgggugaccauuc

SEQ ID NO: 173949 - RNA, 19 nt, Homo sapiens
  misc_RNA (1)...(19): siRNA sense strand
gauccgcuccuuugaugau

SEQ ID NO: 173950 - RNA, 19 nt, Homo sapiens
  misc_RNA (1)...(19): siRNA sense strand
ccaccuggcaugcaagugu

SEQ ID NO: 173951 - RNA, 19 nt, Homo sapiens
  misc_RNA (1)...(19): siRNA sense strand
aaacucgggugaccauucg

SEQ ID NO: 173952 - RNA, 19 nt, Homo sapiens
  misc_RNA (1)...(19): siRNA sense strand
ugacaagacggcacugaag

SEQ ID NO: 173953 - RNA, 19 nt, Homo sapiens
  misc_RNA (1)...(19): siRNA sense strand
gggcaagcaccggaaauuc

SEQ ID NO: 173954 - RNA, 19 nt, Homo sapiens
  misc_RNA (1)...(19): siRNA sense strand
ccacggugacgcuggaaga

SEQ ID NO: 173955 - RNA, 19 nt, Homo sapiens
  misc_RNA (1)...(19): siRNA sense strand
gaagaccaccuggcaugca

SEQ ID NO: 173956 - RNA, 19 nt, Homo sapiens
  misc_RNA (1)...(19): siRNA sense strand
aagaccaccuggcaugcaa

SEQ ID NO: 173957 - RNA, 19 nt, Homo sapiens
  misc_RNA (1)...(19): siRNA sense strand
caagggcaagcaccggaaa

SEQ ID NO: 173958 - RNA, 19 nt, Homo sapiens
  misc_RNA (1)...(19): siRNA sense strand
ucaagcacacgcaugacaa

SEQ ID NO: 173959 - RNA, 19 nt, Homo sapiens
  misc_RNA (1)...(19): siRNA sense strand
gagaaagaucgagauugug

SEQ ID NO: 173960 - RNA, 19 nt, Homo sapiens
  misc_RNA (1)...(19): siRNA sense strand
cgaguuggaccugaacaug

SEQ ID NO: 173961 - RNA, 19 nt, Homo sapiens
  misc_RNA (1)...(19): siRNA sense strand
acaagacggcacugaagga

SEQ ID NO: 173962 - RNA, 19 nt, Homo sapiens
  misc_RNA (1)...(19): siRNA sense strand
gugagaaagaucgagauug

SEQ ID NO: 173963 - RNA, 19 nt, Homo sapiens
  misc_RNA (1)...(19): siRNA sense strand
gaaaggagacgucaaauau

SEQ ID NO: 173964 - RNA, 19 nt, Homo sapiens
  misc_RNA (1)...(19): siRNA sense strand
ggaaugagguggucaacuu

SEQ ID NO: 173965 - RNA, 19 nt, Homo sapiens
  misc_RNA (1)...(19): siRNA sense strand
ggaaacggcucuacaucuu

SEQ ID NO: 173966 - RNA, 19 nt, Homo sapiens
  misc_RNA (1)...(19): siRNA sense strand
gaagagaaguuugagauuc

SEQ ID NO: 173967 - RNA, 19 nt, Homo sapiens
  misc_RNA (1)...(19): siRNA sense strand
gaaaguggccgucaagaug

SEQ ID NO: 173968 - RNA, 19 nt, Homo sapiens
  misc_RNA (1)...(19): siRNA sense strand
caacgagucuccagugcua

SEQ ID NO: 173969 - RNA, 19 nt, Homo sapiens
  misc_RNA (1)...(19): siRNA sense strand
ggaacgugcucaucuguga

SEQ ID NO: 173970 - RNA, 19 nt, Homo sapiens
  misc_RNA (1)...(19): siRNA sense strand
gcgcggagcucuacagcaa

SEQ ID NO: 173971 - RNA, 19 nt, Homo sapiens
  misc_RNA (1)...(19): siRNA sense strand
gcagguggaugaggaguuu

SEQ ID NO: 173972 - RNA, 19 nt, Homo sapiens
  misc_RNA (1)...(19): siRNA sense strand
ccacacuccuugcccuuua

SEQ ID NO: 173973 - RNA, 19 nt, Homo sapiens
  misc_RNA (1)...(19): siRNA sense strand
gagaggaccugccgagcaa

SEQ ID NO: 173974 - RNA, 19 nt, Homo sapiens
  misc_RNA (1)...(19): siRNA sense strand
ccaugcagcugcccuauga

SEQ ID NO: 173975 - RNA, 19 nt, Homo sapiens
  misc_RNA (1)...(19): siRNA sense strand
caacguggcuuuucuggua

SEQ ID NO: 173976 - RNA, 19 nt, Homo sapiens
  misc_RNA (1)...(19): siRNA sense strand
ggaaggugauugagucugu

SEQ ID NO: 173977 - RNA, 19 nt, Homo sapiens
  misc_RNA (1)...(19): siRNA sense strand
ggauaugccuuaccacauc

SEQ ID NO: 173978 - RNA, 19 nt, Homo sapiens
  misc_RNA (1)...(19): siRNA sense strand
ggacccaucuauaucauca

SEQ ID NO: 173979 - RNA, 19 nt, Homo sapiens
  misc_RNA (1)...(19): siRNA sense strand
ggccagagcuuguccucaa

SEQ ID NO: 173980 - RNA, 19 nt, Homo sapiens
  misc_RNA (1)...(19): siRNA sense strand
gagcgacgguggcuacaug

SEQ ID NO: 173981 - RNA, 19 nt, Homo sapiens
  misc_RNA (1)...(19): siRNA sense strand
gaggaacuauucaucuuuc

SEQ ID NO: 173982 - RNA, 19 nt, Homo sapiens
  misc_RNA (1)...(19): siRNA sense strand
acagggagguggauucuga

SEQ ID NO: 173983 - RNA, 19 nt, Homo sapiens
  misc_RNA (1)...(19): siRNA sense strand
guugcugucucuccuguua

SEQ ID NO: 173984 - RNA, 19 nt, Homo sapiens
  misc_RNA (1)...(19): siRNA sense strand
cgaauuacaucuccaaagg

SEQ ID NO: 173985 - RNA, 19 nt, Homo sapiens
  misc_RNA (1)...(19): siRNA sense strand
gaacuauucaucuuucuca

SEQ ID NO: 173986 - RNA, 19 nt, Homo sapiens
  misc_RNA (1)...(19): siRNA sense strand
ugaaaggagacgucaaaua

SEQ ID NO: 173987 - RNA, 19 nt, Homo sapiens
  misc_RNA (1)...(19): siRNA sense strand
caaaggaggacccaucuau

SEQ ID NO: 173988 - RNA, 19 nt, Homo sapiens
  misc_RNA (1)...(19): siRNA sense strand
gaaacggcucuacaucuuu

SEQ ID NO: 173989 - RNA, 19 nt, Homo sapiens
  misc_RNA (1)...(19): siRNA sense strand
gagcaacuuugaucaacga

SEQ ID NO: 173990 - RNA, 19 nt, Homo sapiens
  misc_RNA (1)...(19): siRNA sense strand
agagccagcuggagacuaa

SEQ ID NO: 173991 - RNA, 19 nt, Homo sapiens
  misc_RNA (1)...(19): siRNA sense strand
ggaagagaaguuugagauu

SEQ ID NO: 173992 - RNA, 19 nt, Homo sapiens
  misc_RNA (1)...(19): siRNA sense strand
aaacggcucuacaucuuug

SEQ ID NO: 173993 - RNA, 19 nt, Homo sapiens
  misc_RNA (1)...(19): siRNA sense strand
guucuacaaugccaucaaa

SEQ ID NO: 173994 - RNA, 19 nt, Homo sapiens
  misc_RNA (1)...(19): siRNA sense strand
ugacggagagugugaauga

SEQ ID NO: 173995 - RNA, 19 nt, Homo sapiens
  misc_RNA (1)...(19): siRNA sense strand
uaacugagaucaccauucc

SEQ ID NO: 173996 - RNA, 19 nt, Homo sapiens
  misc_RNA (1)...(19): siRNA sense strand
ccaucuauaucaucacuga

SEQ ID NO: 173997 - RNA, 19 nt, Homo sapiens
  misc_RNA (1)...(19): siRNA sense strand
cgucaaauaugcagacauc

SEQ ID NO: 173998 - RNA, 19 nt, Homo sapiens
  misc_RNA (1)...(19): siRNA sense strand
ggagaccgaugagcggaaa

SEQ ID NO: 173999 - RNA, 19 nt, Homo sapiens
  misc_RNA (1)...(19): siRNA sense strand
ccucaaccaucuccuguga

SEQ ID NO: 174000 - RNA, 19 nt, Homo sapiens
  misc_RNA (1)...(19): siRNA sense strand
ggaggacccaucuauauca

SEQ ID NO: 174001 - RNA, 19 nt, Homo sapiens
  misc_RNA (1)...(19): siRNA sense strand
gaagccacguuacgagauc

SEQ ID NO: 174002 - RNA, 19 nt, Homo sapiens
  misc_RNA (1)...(19): siRNA sense strand
ggcagaagaagccacguua

SEQ ID NO: 174003 - RNA, 19 nt, Homo sapiens
  misc_RNA (1)...(19): siRNA sense strand
gcggagcucuacagcaaug

SEQ ID NO: 174004 - RNA, 19 nt, Homo sapiens
  misc_RNA (1)...(19): siRNA sense strand
ggugggcacacuacaauuu

SEQ ID NO: 174005 - RNA, 19 nt, Homo sapiens
  misc_RNA (1)...(19): siRNA sense strand
acccagagcugcccaugaa

SEQ ID NO: 174006 - RNA, 19 nt, Homo sapiens
  misc_RNA (1)...(19): siRNA sense strand
caugaaaggagacgucaaa

SEQ ID NO: 174007 - RNA, 19 nt, Homo sapiens
  misc_RNA (1)...(19): siRNA sense strand
ggauucugaugccuacuau

SEQ ID NO: 174008 - RNA, 19 nt, Homo sapiens
  misc_RNA (1)...(19): siRNA sense strand
ugacaacgacuauaucauc

SEQ ID NO: 174009 - RNA, 19 nt, Homo sapiens
  misc_RNA (1)...(19): siRNA sense strand
cagaagugcugggaagaga

SEQ ID NO: 174010 - RNA, 19 nt, Homo sapiens
  misc_RNA (1)...(19): siRNA sense strand
aaaggaggacccaucuaua

SEQ ID NO: 174011 - RNA, 19 nt, Homo sapiens
  misc_RNA (1)...(19): siRNA sense strand
ucacggaaauaacugagau

SEQ ID NO: 174012 - RNA, 19 nt, Homo sapiens
  misc_RNA (1)...(19): siRNA sense strand
gggaagagaaguuugagau

SEQ ID NO: 174013 - RNA, 19 nt, Homo sapiens
  misc_RNA (1)...(19): siRNA sense strand
gagaagcaagcccuuaugu

SEQ ID NO: 174014 - RNA, 19 nt, Homo sapiens
  misc_RNA (1)...(19): siRNA sense strand
ccgaggaacuauucaucuu

SEQ ID NO: 174015 - RNA, 19 nt, Homo sapiens
  misc_RNA (1)...(19): siRNA sense strand
acggagaccugguggacua

SEQ ID NO: 174016 - RNA, 19 nt, Homo sapiens
  misc_RNA (1)...(19): siRNA sense strand
ugacugacuuccucuugga

SEQ ID NO: 174017 - RNA, 19 nt, Homo sapiens
  misc_RNA (1)...(19): siRNA sense strand
gcaaugugacggagagugu

SEQ ID NO: 174018 - RNA, 19 nt, Homo sapiens
  misc_RNA (1)...(19): siRNA sense strand
caagaacugcguccacaga

SEQ ID NO: 174019 - RNA, 19 nt, Homo sapiens
  misc_RNA (1)...(19): siRNA sense strand
ccaauggcauggaguuucu

SEQ ID NO: 174020 - RNA, 19 nt, Homo sapiens
  misc_RNA (1)...(19): siRNA sense strand
ugucggagcugaagaucau

SEQ ID NO: 174021 - RNA, 19 nt, Homo sapiens
  misc_RNA (1)...(19): siRNA sense strand
gaaaaggccaucaacauca

SEQ ID NO: 174022 - RNA, 19 nt, Homo sapiens
  misc_RNA (1)...(19): siRNA sense strand
ucaaccaucuccugugaca

SEQ ID NO: 174023 - RNA, 19 nt, Homo sapiens
  misc_RNA (1)...(19): siRNA sense strand
ggaccugccgagcaacuuu

SEQ ID NO: 174024 - RNA, 19 nt, Homo sapiens
  misc_RNA (1)...(19): siRNA sense strand
caucaucucccuuaucauc

SEQ ID NO: 174025 - RNA, 19 nt, Homo sapiens
  misc_RNA (1)...(19): siRNA sense strand
gcucugacggccaugagua

SEQ ID NO: 174026 - RNA, 19 nt, Homo sapiens
  misc_RNA (1)...(19): siRNA sense strand
gaagucaacaccuccucaa

SEQ ID NO: 174027 - RNA, 19 nt, Homo sapiens
  misc_RNA (1)...(19): siRNA sense strand
gcuccacccugaaugaagu

SEQ ID NO: 174028 - RNA, 19 nt, Homo sapiens
  misc_RNA (1)...(19): siRNA sense strand
gcaagcuggucaagaucug

SEQ ID NO: 174029 - RNA, 19 nt, Homo sapiens
  misc_RNA (1)...(19): siRNA sense strand
aaggcaagcuggucaagau

SEQ ID NO: 174030 - RNA, 19 nt, Homo sapiens
  misc_RNA (1)...(19): siRNA sense strand
ccaacuacauggccccuua

SEQ ID NO: 174031 - RNA, 19 nt, Homo sapiens
  misc_RNA (1)...(19): siRNA sense strand
gagcuuguccucaaugucu

SEQ ID NO: 174032 - RNA, 19 nt, Homo sapiens
  misc_RNA (1)...(19): siRNA sense strand
cgaggaacuauucaucuuu

SEQ ID NO: 174033 - RNA, 19 nt, Homo sapiens
  misc_RNA (1)...(19): siRNA sense strand
gcuaccagguggccaaugg

SEQ ID NO: 174034 - RNA, 19 nt, Homo sapiens
  misc_RNA (1)...(19): siRNA sense strand
ucuauaucaucacugagua

SEQ ID NO: 174035 - RNA, 19 nt, Homo sapiens
  misc_RNA (1)...(19): siRNA sense strand
ccaaugagggugacaacga

SEQ ID NO: 174036 - RNA, 19 nt, Homo sapiens
  misc_RNA (1)...(19): siRNA sense strand
agacacgggagaauacuuu

SEQ ID NO: 174037 - RNA, 19 nt, Homo sapiens
  misc_RNA (1)...(19): siRNA sense strand
guuacgagauccgauggaa

SEQ ID NO: 174038 - RNA, 19 nt, Homo sapiens
  misc_RNA (1)...(19): siRNA sense strand
ggaggaggagcaggaguuu

SEQ ID NO: 174039 - RNA, 19 nt, Homo sapiens
  misc_RNA (1)...(19): siRNA sense strand
gaggugggcacacuacaau

SEQ ID NO: 174040 - RNA, 19 nt, Homo sapiens
  misc_RNA (1)...(19): siRNA sense strand
ggaccuacaccugcaaugu

SEQ ID NO: 174041 - RNA, 19 nt, Homo sapiens
  misc_RNA (1)...(19): siRNA sense strand
aaggaggacccaucuauau

SEQ ID NO: 174042 - RNA, 19 nt, Homo sapiens
  misc_RNA (1)...(19): siRNA sense strand
gaggacccaucuauaucau

SEQ ID NO: 174043 - RNA, 19 nt, Homo sapiens
  misc_RNA (1)...(19): siRNA sense strand
uggaacaguugccggauuc

SEQ ID NO: 174044 - RNA, 19 nt, Homo sapiens
  misc_RNA (1)...(19): siRNA sense strand
gaaggcaagcuggucaaga

SEQ ID NO: 174045 - RNA, 19 nt, Homo sapiens
  misc_RNA (1)...(19): siRNA sense strand
aaggagacgucaaauaugc

SEQ ID NO: 174046 - RNA, 19 nt, Homo sapiens
  misc_RNA (1)...(19): siRNA sense strand
gggaggaggagcaggaguu

SEQ ID NO: 174047 - RNA, 19 nt, Homo sapiens
  misc_RNA (1)...(19): siRNA sense strand
ggugacaacgacuauauca

SEQ ID NO: 174048 - RNA, 19 nt, Homo sapiens
  misc_RNA (1)...(19): siRNA sense strand
ucugggagaucuucaccuu

SEQ ID NO: 174049 - RNA, 19 nt, Homo sapiens
  misc_RNA (1)...(19): siRNA sense strand
gaacgugcucaucugugaa

SEQ ID NO: 174050 - RNA, 19 nt, Homo sapiens
  misc_RNA (1)...(19): siRNA sense strand
ugacacugcacgagaagaa

SEQ ID NO: 174051 - RNA, 19 nt, Homo sapiens
  misc_RNA (1)...(19): siRNA sense strand
gcugggaagagaaguuuga

SEQ ID NO: 174052 - RNA, 19 nt, Homo sapiens
  misc_RNA (1)...(19): siRNA sense strand
accaucaucucccuuauca

SEQ ID NO: 174053 - RNA, 19 nt, Homo sapiens
  misc_RNA (1)...(19): siRNA sense strand
gaaugagguggucaacuuc

SEQ ID NO: 174054 - RNA, 19 nt, Homo sapiens
  misc_RNA (1)...(19): siRNA sense strand
gaccuacaccugcaaugug

SEQ ID NO: 174055 - RNA, 19 nt, Homo sapiens
  misc_RNA (1)...(19): siRNA sense strand
gucaacaccuccucaacca

SEQ ID NO: 174056 - RNA, 19 nt, Homo sapiens
  misc_RNA (1)...(19): siRNA sense strand
caaaggcgagcugcuguug

SEQ ID NO: 174057 - RNA, 19 nt, Homo sapiens
  misc_RNA (1)...(19): siRNA sense strand
ccaucaacgucucugugaa

SEQ ID NO: 174058 - RNA, 19 nt, Homo sapiens
  misc_RNA (1)...(19): siRNA sense strand
ucaugcgggacucgaauua

SEQ ID NO: 174059 - RNA, 19 nt, Homo sapiens
  misc_RNA (1)...(19): siRNA sense strand
gcuaggaacgugcucaucu

SEQ ID NO: 174060 - RNA, 19 nt, Homo sapiens
  misc_RNA (1)...(19): siRNA sense strand
aaaggagacgucaaauaug

SEQ ID NO: 174061 - RNA, 19 nt, Homo sapiens
  misc_RNA (1)...(19): siRNA sense strand
cgaugaaaguggccgucaa

SEQ ID NO: 174062 - RNA, 19 nt, Homo sapiens
  misc_RNA (1)...(19): siRNA sense strand
gaagugcugggaagagaag

SEQ ID NO: 174063 - RNA, 19 nt, Homo sapiens
  misc_RNA (1)...(19): siRNA sense strand
cauaugaacucgcuuuaua

SEQ ID NO: 174064 - RNA, 19 nt, Homo sapiens
  misc_RNA (1)...(19): siRNA sense strand
gaggaggucugauguguaa

SEQ ID NO: 174065 - RNA, 19 nt, Homo sapiens
  misc_RNA (1)...(19): siRNA sense strand
gcgaagaaaugcucaguga

SEQ ID NO: 174066 - RNA, 19 nt, Homo sapiens
  misc_RNA (1)...(19): siRNA sense strand
gaagaaaugcucagugauc

SEQ ID NO: 174067 - RNA, 19 nt, Homo sapiens
  misc_RNA (1)...(19): siRNA sense strand
gaggcacacuuaacaagaa

SEQ ID NO: 174068 - RNA, 19 nt, Homo sapiens
  misc_RNA (1)...(19): siRNA sense strand
gaaaagaccgggaagguuu

SEQ ID NO: 174069 - RNA, 19 nt, Homo sapiens
  misc_RNA (1)...(19): siRNA sense strand
caagaaagcauaugaacuc

SEQ ID NO: 174070 - RNA, 19 nt, Homo sapiens
  misc_RNA (1)...(19): siRNA sense strand
gauggugacugcacaaugg

SEQ ID NO: 174071 - RNA, 19 nt, Homo sapiens
  misc_RNA (1)...(19): siRNA sense strand
uggcagagcuacguggaua

SEQ ID NO: 174072 - RNA, 19 nt, Homo sapiens
  misc_RNA (1)...(19): siRNA sense strand
gaaaugcucagugaucaga

SEQ ID NO: 174073 - RNA, 19 nt, Homo sapiens
  misc_RNA (1)...(19): siRNA sense strand
gagcauuacgccaauagaa

SEQ ID NO: 174074 - RNA, 19 nt, Homo sapiens
  misc_RNA (1)...(19): siRNA sense strand
gggaagguuucuuuaccaa

SEQ ID NO: 174075 - RNA, 19 nt, Homo sapiens
  misc_RNA (1)...(19): siRNA sense strand
caauggacauccggacaaa

SEQ ID NO: 174076 - RNA, 19 nt, Homo sapiens
  misc_RNA (1)...(19): siRNA sense strand
gcauuacgccaauagaaau

SEQ ID NO: 174077 - RNA, 19 nt, Homo sapiens
  misc_RNA (1)...(19): siRNA sense strand
ggaggcacacuuaacaaga

SEQ ID NO: 174078 - RNA, 19 nt, Homo sapiens
  misc_RNA (1)...(19): siRNA sense strand
cuacguggauaaccugaug

SEQ ID NO: 174079 - RNA, 19 nt, Homo sapiens
  misc_RNA (1)...(19): siRNA sense strand
gaccgggaagguuucuuua

SEQ ID NO: 174080 - RNA, 19 nt, Homo sapiens
  misc_RNA (1)...(19): siRNA sense strand
gcucagugaucagagauag

SEQ ID NO: 174081 - RNA, 19 nt, Homo sapiens
  misc_RNA (1)...(19): siRNA sense strand
gccaauagaaauagauaug

SEQ ID NO: 174082 - RNA, 19 nt, Homo sapiens
  misc_RNA (1)...(19): siRNA sense strand
aagaaaugcucagugauca

SEQ ID NO: 174083 - RNA, 19 nt, Homo sapiens
  misc_RNA (1)...(19): siRNA sense strand
ucagagcauuacgccaaua

SEQ ID NO: 174084 - RNA, 19 nt, Homo sapiens
  misc_RNA (1)...(19): siRNA sense strand
gcauaugaacucgcuuuau

SEQ ID NO: 174085 - RNA, 19 nt, Homo sapiens
  misc_RNA (1)...(19): siRNA sense strand
gcuacugcgacgccaaaua

SEQ ID NO: 174086 - RNA, 19 nt, Homo sapiens
  misc_RNA (1)...(19): siRNA sense strand
cauuacgccaauagaaaua

SEQ ID NO: 174087 - RNA, 19 nt, Homo sapiens
  misc_RNA (1)...(19): siRNA sense strand
guccacggaggcacacuua

SEQ ID NO: 174088 - RNA, 19 nt, Homo sapiens
  misc_RNA (1)...(19): siRNA sense strand
ggacauccggacaaagagu

SEQ ID NO: 174089 - RNA, 19 nt, Homo sapiens
  misc_RNA (1)...(19): siRNA sense strand
cuacugcgacgccaaauac

SEQ ID NO: 174090 - RNA, 19 nt, Homo sapiens
  misc_RNA (1)...(19): siRNA sense strand
uuacgccaauagaaauaga

SEQ ID NO: 174091 - RNA, 19 nt, Homo sapiens
  misc_RNA (1)...(19): siRNA sense strand
aggcacacuuaacaagaaa

SEQ ID NO: 174092 - RNA, 19 nt, Homo sapiens
  misc_RNA (1)...(19): siRNA sense strand
agaccgggaagguuucuuu

SEQ ID NO: 174093 - RNA, 19 nt, Homo sapiens
  misc_RNA (1)...(19): siRNA sense strand
gggcgucuuucagagcauu

SEQ ID NO: 174094 - RNA, 19 nt, Homo sapiens
  misc_RNA (1)...(19): siRNA sense strand
cugaggaggucugaugugu

SEQ ID NO: 174095 - RNA, 19 nt, Homo sapiens
  misc_RNA (1)...(19): siRNA sense strand
ugaggaggucugaugugua

SEQ ID NO: 174096 - RNA, 19 nt, Homo sapiens
  misc_RNA (1)...(19): siRNA sense strand
ggaaaagaccgggaagguu

SEQ ID NO: 174097 - RNA, 19 nt, Homo sapiens
  misc_RNA (1)...(19): siRNA sense strand
cgggaagguuucuuuacca

SEQ ID NO: 174098 - RNA, 19 nt, Homo sapiens
  misc_RNA (1)...(19): siRNA sense strand
ccacggaggcacacuuaac

SEQ ID NO: 174099 - RNA, 19 nt, Homo sapiens
  misc_RNA (1)...(19): siRNA sense strand
uaccaacgguuugacucuu

SEQ ID NO: 174100 - RNA, 19 nt, Homo sapiens
  misc_RNA (1)...(19): siRNA sense strand
accaacgguuugacucuug

SEQ ID NO: 174101 - RNA, 19 nt, Homo sapiens
  misc_RNA (1)...(19): siRNA sense strand
cacuuaacaagaaagcaua

SEQ ID NO: 174102 - RNA, 19 nt, Homo sapiens
  misc_RNA (1)...(19): siRNA sense strand
acaauggacauccggacaa

SEQ ID NO: 174103 - RNA, 19 nt, Homo sapiens
  misc_RNA (1)...(19): siRNA sense strand
gcgaagaaaugcucaguga

SEQ ID NO: 174104 - RNA, 19 nt, Homo sapiens
  misc_RNA (1)...(19): siRNA sense strand
gaagaaaugcucagugauc

SEQ ID NO: 174105 - RNA, 19 nt, Homo sapiens
  misc_RNA (1)...(19): siRNA sense strand
gaaaagaccgggaagguuu

SEQ ID NO: 174106 - RNA, 19 nt, Homo sapiens
  misc_RNA (1)...(19): siRNA sense strand
gauggugacugcacaaugg

SEQ ID NO: 174107 - RNA, 19 nt, Homo sapiens
  misc_RNA (1)...(19): siRNA sense strand
uggcagagcuacguggaua

SEQ ID NO: 174108 - RNA, 19 nt, Homo sapiens
  misc_RNA (1)...(19): siRNA sense strand
gaaaugcucagugaucaga

SEQ ID NO: 174109 - RNA, 19 nt, Homo sapiens
  misc_RNA (1)...(19): siRNA sense strand
gagcauuacgccaauagaa

SEQ ID NO: 174110 - RNA, 19 nt, Homo sapiens
  misc_RNA (1)...(19): siRNA sense strand
gggaagguuucuuuaccaa

SEQ ID NO: 174111 - RNA, 19 nt, Homo sapiens
  misc_RNA (1)...(19): siRNA sense strand
caauggacauccggacaaa

SEQ ID NO: 174112 - RNA, 19 nt, Homo sapiens
  misc_RNA (1)...(19): siRNA sense strand
gcauuacgccaauagaaau

SEQ ID NO: 174113 - RNA, 19 nt, Homo sapiens
  misc_RNA (1)...(19): siRNA sense strand
cuacguggauaaccugaug

SEQ ID NO: 174114 - RNA, 19 nt, Homo sapiens
  misc_RNA (1)...(19): siRNA sense strand
gaccgggaagguuucuuua

SEQ ID NO: 174115 - RNA, 19 nt, Homo sapiens
  misc_RNA (1)...(19): siRNA sense strand
gcucagugaucagagauag

SEQ ID NO: 174116 - RNA, 19 nt, Homo sapiens
  misc_RNA (1)...(19): siRNA sense strand
gccaauagaaauagauaug

SEQ ID NO: 174117 - RNA, 19 nt, Homo sapiens
  misc_RNA (1)...(19): siRNA sense strand
aagaaaugcucagugauca

SEQ ID NO: 174118 - RNA, 19 nt, Homo sapiens
  misc_RNA (1)...(19): siRNA sense strand
ucagagcauuacgccaaua

SEQ ID NO: 174119 - RNA, 19 nt, Homo sapiens
  misc_RNA (1)...(19): siRNA sense strand
gcuacugcgacgccaaaua

SEQ ID NO: 174120 - RNA, 19 nt, Homo sapiens
  misc_RNA (1)...(19): siRNA sense strand
cauuacgccaauagaaaua

SEQ ID NO: 174121 - RNA, 19 nt, Homo sapiens
  misc_RNA (1)...(19): siRNA sense strand
ggacauccggacaaagagu

SEQ ID NO: 174122 - RNA, 19 nt, Homo sapiens
  misc_RNA (1)...(19): siRNA sense strand
cuacugcgacgccaaauac

SEQ ID NO: 174123 - RNA, 19 nt, Homo sapiens
  misc_RNA (1)...(19): siRNA sense strand
gggcgucuuucagagcauu

SEQ ID NO: 174124 - RNA, 19 nt, Homo sapiens
  misc_RNA (1)...(19): siRNA sense strand
agaccgggaagguuucuuu

SEQ ID NO: 174125 - RNA, 19 nt, Homo sapiens
  misc_RNA (1)...(19): siRNA sense strand
uuacgccaauagaaauaga

SEQ ID NO: 174126 - RNA, 19 nt, Homo sapiens
  misc_RNA (1)...(19): siRNA sense strand
ggaaaagaccgggaagguu

SEQ ID NO: 174127 - RNA, 19 nt, Homo sapiens
  misc_RNA (1)...(19): siRNA sense strand
cgggaagguuucuuuacca

SEQ ID NO: 174128 - RNA, 19 nt, Homo sapiens
  misc_RNA (1)...(19): siRNA sense strand
uaccaacgguuugacucuu

SEQ ID NO: 174129 - RNA, 19 nt, Homo sapiens
  misc_RNA (1)...(19): siRNA sense strand
accaacgguuugacucuug

SEQ ID NO: 174130 - RNA, 19 nt, Homo sapiens
  misc_RNA (1)...(19): siRNA sense strand
acaauggacauccggacaa

SEQ ID NO: 174131 - RNA, 19 nt, Homo sapiens
  misc_RNA (1)...(19): siRNA sense strand
gcaaacaccugcugccaaa

SEQ ID NO: 174132 - RNA, 19 nt, Homo sapiens
  misc_RNA (1)...(19): siRNA sense strand
agacagagcuagacucauu

SEQ ID NO: 174133 - RNA, 19 nt, Homo sapiens
  misc_RNA (1)...(19): siRNA sense strand
caaaguugaugauuucuug

SEQ ID NO: 174134 - RNA, 19 nt, Homo sapiens
  misc_RNA (1)...(19): siRNA sense strand
gauaaaggaugcauuugau

SEQ ID NO: 174135 - RNA, 19 nt, Homo sapiens
  misc_RNA (1)...(19): siRNA sense strand
gaacuuaauucugaacaug

SEQ ID NO: 174136 - RNA, 19 nt, Homo sapiens
  misc_RNA (1)...(19): siRNA sense strand
gaucaucucuuacgcucaa

SEQ ID NO: 174137 - RNA, 19 nt, Homo sapiens
  misc_RNA (1)...(19): siRNA sense strand
uaauaggacugucuccaaa

SEQ ID NO: 174138 - RNA, 19 nt, Homo sapiens
  misc_RNA (1)...(19): siRNA sense strand
ggcaagcuguggaugauuu

SEQ ID NO: 174139 - RNA, 19 nt, Homo sapiens
  misc_RNA (1)...(19): siRNA sense strand
ccacugcccucuccuucua

SEQ ID NO: 174140 - RNA, 19 nt, Homo sapiens
  misc_RNA (1)...(19): siRNA sense strand
gaaaucacagccaauauuc

SEQ ID NO: 174141 - RNA, 19 nt, Homo sapiens
  misc_RNA (1)...(19): siRNA sense strand
gaaauugguaccauuguug

SEQ ID NO: 174142 - RNA, 19 nt, Homo sapiens
  misc_RNA (1)...(19): siRNA sense strand
gaugagagaauucaagcua

SEQ ID NO: 174143 - RNA, 19 nt, Homo sapiens
  misc_RNA (1)...(19): siRNA sense strand
guacagacaugagaugcuu

SEQ ID NO: 174144 - RNA, 19 nt, Homo sapiens
  misc_RNA (1)...(19): siRNA sense strand
cauuagaaguguauuccua

SEQ ID NO: 174145 - RNA, 19 nt, Homo sapiens
  misc_RNA (1)...(19): siRNA sense strand
ggaauaagacagagcuaga

SEQ ID NO: 174146 - RNA, 19 nt, Homo sapiens
  misc_RNA (1)...(19): siRNA sense strand
gcaggcagccaccgaguuu

SEQ ID NO: 174147 - RNA, 19 nt, Homo sapiens
  misc_RNA (1)...(19): siRNA sense strand
cagccaauauucucaaguu

SEQ ID NO: 174148 - RNA, 19 nt, Homo sapiens
  misc_RNA (1)...(19): siRNA sense strand
ggagaacccugcugugacu

SEQ ID NO: 174149 - RNA, 19 nt, Homo sapiens
  misc_RNA (1)...(19): siRNA sense strand
ucacaccuaugaacucuug

SEQ ID NO: 174150 - RNA, 19 nt, Homo sapiens
  misc_RNA (1)...(19): siRNA sense strand
cauaccaccugaugaaaga

SEQ ID NO: 174151 - RNA, 19 nt, Homo sapiens
  misc_RNA (1)...(19): siRNA sense strand
gcacaacgggauagaguau

SEQ ID NO: 174152 - RNA, 19 nt, Homo sapiens
  misc_RNA (1)...(19): siRNA sense strand
ugaaaucacagccaauauu

SEQ ID NO: 174153 - RNA, 19 nt, Homo sapiens
  misc_RNA (1)...(19): siRNA sense strand
ucuccaaaguugaugauuu

SEQ ID NO: 174154 - RNA, 19 nt, Homo sapiens
  misc_RNA (1)...(19): siRNA sense strand
gcuggacucucaauuaugg

SEQ ID NO: 174155 - RNA, 19 nt, Homo sapiens
  misc_RNA (1)...(19): siRNA sense strand
acaugcagcugaucuguga

SEQ ID NO: 174156 - RNA, 19 nt, Homo sapiens
  misc_RNA (1)...(19): siRNA sense strand
gaugauuucuuggccaaug

SEQ ID NO: 174157 - RNA, 19 nt, Homo sapiens
  misc_RNA (1)...(19): siRNA sense strand
gaauauagggacaccacaa

SEQ ID NO: 174158 - RNA, 19 nt, Homo sapiens
  misc_RNA (1)...(19): siRNA sense strand
gaaagauaaaggaugcauu

SEQ ID NO: 174159 - RNA, 19 nt, Homo sapiens
  misc_RNA (1)...(19): siRNA sense strand
uggcuggacucucaauuau

SEQ ID NO: 174160 - RNA, 19 nt, Homo sapiens
  misc_RNA (1)...(19): siRNA sense strand
agaaauugguaccauuguu

SEQ ID NO: 174161 - RNA, 19 nt, Homo sapiens
  misc_RNA (1)...(19): siRNA sense strand
gaucgaaacccggaacuuc

SEQ ID NO: 174162 - RNA, 19 nt, Homo sapiens
  misc_RNA (1)...(19): siRNA sense strand
ccaagacaccgauggcaaa

SEQ ID NO: 174163 - RNA, 19 nt, Homo sapiens
  misc_RNA (1)...(19): siRNA sense strand
gcuagacucauuccugauu

SEQ ID NO: 174164 - RNA, 19 nt, Homo sapiens
  misc_RNA (1)...(19): siRNA sense strand
cccagaaguuccaguuuga

SEQ ID NO: 174165 - RNA, 19 nt, Homo sapiens
  misc_RNA (1)...(19): siRNA sense strand
cgucaugggccagaacuua

SEQ ID NO: 174166 - RNA, 19 nt, Homo sapiens
  misc_RNA (1)...(19): siRNA sense strand
ugucuuugcucggugcuua

SEQ ID NO: 174167 - RNA, 19 nt, Homo sapiens
  misc_RNA (1)...(19): siRNA sense strand
gcccaggccuuugaggauu

SEQ ID NO: 174168 - RNA, 19 nt, Homo sapiens
  misc_RNA (1)...(19): siRNA sense strand
ggauacuggugacaucauc

SEQ ID NO: 174169 - RNA, 19 nt, Homo sapiens
  misc_RNA (1)...(19): siRNA sense strand
uaagacagagcuagacuca

SEQ ID NO: 174170 - RNA, 19 nt, Homo sapiens
  misc_RNA (1)...(19): siRNA sense strand
cuccaaaguugaugauuuc

SEQ ID NO: 174171 - RNA, 19 nt, Homo sapiens
  misc_RNA (1)...(19): siRNA sense strand
agauaaaggaugcauuuga

SEQ ID NO: 174172 - RNA, 19 nt, Homo sapiens
  misc_RNA (1)...(19): siRNA sense strand
gagcaggccacuucgugaa

SEQ ID NO: 174173 - RNA, 19 nt, Homo sapiens
  misc_RNA (1)...(19): siRNA sense strand
cgagaaauugguaccauug

SEQ ID NO: 174174 - RNA, 19 nt, Homo sapiens
  misc_RNA (1)...(19): siRNA sense strand
cuggugacaucaucauuga

SEQ ID NO: 174175 - RNA, 19 nt, Homo sapiens
  misc_RNA (1)...(19): siRNA sense strand
cuacuggacgacuucuuua

SEQ ID NO: 174176 - RNA, 19 nt, Homo sapiens
  misc_RNA (1)...(19): siRNA sense strand
ccaauauucucaaguucca

SEQ ID NO: 174177 - RNA, 19 nt, Homo sapiens
  misc_RNA (1)...(19): siRNA sense strand
ucgagaaauugguaccauu

SEQ ID NO: 174178 - RNA, 19 nt, Homo sapiens
  misc_RNA (1)...(19): siRNA sense strand
acucuacgcuuccaagauc

SEQ ID NO: 174179 - RNA, 19 nt, Homo sapiens
  misc_RNA (1)...(19): siRNA sense strand
ucugaaggaugagagaauu

SEQ ID NO: 174180 - RNA, 19 nt, Homo sapiens
  misc_RNA (1)...(19): siRNA sense strand
acucauuccugauugaaau

SEQ ID NO: 174181 - RNA, 19 nt, Homo sapiens
  misc_RNA (1)...(19): siRNA sense strand
guuugauggugauaagaaa

SEQ ID NO: 174182 - RNA, 19 nt, Homo sapiens
  misc_RNA (1)...(19): siRNA sense strand
ccaguuugauggugauaag

SEQ ID NO: 174183 - RNA, 19 nt, Homo sapiens
  misc_RNA (1)...(19): siRNA sense strand
gcucggugcuuaucaucuc

SEQ ID NO: 174184 - RNA, 19 nt, Homo sapiens
  misc_RNA (1)...(19): siRNA sense strand
aaacaccugcugccaaaga

SEQ ID NO: 174185 - RNA, 19 nt, Homo sapiens
  misc_RNA (1)...(19): siRNA sense strand
gagaauucaagcuagcaaa

SEQ ID NO: 174186 - RNA, 19 nt, Homo sapiens
  misc_RNA (1)...(19): siRNA sense strand
gcucacaccuaugaacucu

SEQ ID NO: 174187 - RNA, 19 nt, Homo sapiens
  misc_RNA (1)...(19): siRNA sense strand
cauuggagaagcugucuuu

SEQ ID NO: 174188 - RNA, 19 nt, Homo sapiens
  misc_RNA (1)...(19): siRNA sense strand
uggagaagcugucuuugcu

SEQ ID NO: 174189 - RNA, 19 nt, Homo sapiens
  misc_RNA (1)...(19): siRNA sense strand
ugagggagcaggccacuuc

SEQ ID NO: 174190 - RNA, 19 nt, Homo sapiens
  misc_RNA (1)...(19): siRNA sense strand
uaagucagcuguugaaaac

SEQ ID NO: 174191 - RNA, 19 nt, Homo sapiens
  misc_RNA (1)...(19): siRNA sense strand
gcauaccaccugaugaaag

SEQ ID NO: 174192 - RNA, 19 nt, Homo sapiens
  misc_RNA (1)...(19): siRNA sense strand
uagacucauuccugauuga

SEQ ID NO: 174193 - RNA, 19 nt, Homo sapiens
  misc_RNA (1)...(19): siRNA sense strand
cuagacucauuccugauug

SEQ ID NO: 174194 - RNA, 19 nt, Homo sapiens
  misc_RNA (1)...(19): siRNA sense strand
aggacugucuccaaaguug

SEQ ID NO: 174195 - RNA, 19 nt, Homo sapiens
  misc_RNA (1)...(19): siRNA sense strand
gagaaauugguaccauugu

SEQ ID NO: 174196 - RNA, 19 nt, Homo sapiens
  misc_RNA (1)...(19): siRNA sense strand
acaucgcgcugaucggauu

SEQ ID NO: 174197 - RNA, 19 nt, Homo sapiens
  misc_RNA (1)...(19): siRNA sense strand
ggacugucuccaaaguuga

SEQ ID NO: 174198 - RNA, 19 nt, Homo sapiens
  misc_RNA (1)...(19): siRNA sense strand
gaaugaccacggcuuugug

SEQ ID NO: 174199 - RNA, 19 nt, Homo sapiens
  misc_RNA (1)...(19): siRNA sense strand
ggacaugcagcugaucugu

SEQ ID NO: 174200 - RNA, 19 nt, Homo sapiens
  misc_RNA (1)...(19): siRNA sense strand
gauggugcacaacgggaua

SEQ ID NO: 174201 - RNA, 19 nt, Homo sapiens
  misc_RNA (1)...(19): siRNA sense strand
caucauugacggaggaaau

SEQ ID NO: 174202 - RNA, 19 nt, Homo sapiens
  misc_RNA (1)...(19): siRNA sense strand
ccuacuggacgacuucuuu

SEQ ID NO: 174203 - RNA, 19 nt, Homo sapiens
  misc_RNA (1)...(19): siRNA sense strand
gaaacccggaacuucagaa

SEQ ID NO: 174204 - RNA, 19 nt, Homo sapiens
  misc_RNA (1)...(19): siRNA sense strand
gcacucuacgcuuccaaga

SEQ ID NO: 174205 - RNA, 19 nt, Homo sapiens
  misc_RNA (1)...(19): siRNA sense strand
ggaaguggaccgccaucuc

SEQ ID NO: 174206 - RNA, 19 nt, Homo sapiens
  misc_RNA (1)...(19): siRNA sense strand
caugaaugaccacggcuuu

SEQ ID NO: 174207 - RNA, 19 nt, Homo sapiens
  misc_RNA (1)...(19): siRNA sense strand
gaccaucuuccaaggcauu

SEQ ID NO: 174208 - RNA, 19 nt, Homo sapiens
  misc_RNA (1)...(19): siRNA sense strand
ggugaaggcugggcaagcu

SEQ ID NO: 174209 - RNA, 19 nt, Homo sapiens
  misc_RNA (1)...(19): siRNA sense strand
ccaagggaauuuuauuugu

SEQ ID NO: 174210 - RNA, 19 nt, Homo sapiens
  misc_RNA (1)...(19): siRNA sense strand
gaaggaugagagaauucaa

SEQ ID NO: 174211 - RNA, 19 nt, Homo sapiens
  misc_RNA (1)...(19): siRNA sense strand
ggaugcauuugaucgaaac

SEQ ID NO: 174212 - RNA, 19 nt, Homo sapiens
  misc_RNA (1)...(19): siRNA sense strand
gaaguuccaguuugauggu

SEQ ID NO: 174213 - RNA, 19 nt, Homo sapiens
  misc_RNA (1)...(19): siRNA sense strand
gucaugggccagaacuuaa

SEQ ID NO: 174214 - RNA, 19 nt, Homo sapiens
  misc_RNA (1)...(19): siRNA sense strand
uugguaccauuguuggaua

SEQ ID NO: 174215 - RNA, 19 nt, Homo sapiens
  misc_RNA (1)...(19): siRNA sense strand
gaucggauuggccgucaug

SEQ ID NO: 174216 - RNA, 19 nt, Homo sapiens
  misc_RNA (1)...(19): siRNA sense strand
acaacgggauagaguaugg

SEQ ID NO: 174217 - RNA, 19 nt, Homo sapiens
  misc_RNA (1)...(19): siRNA sense strand
gugacugggugggagauga

SEQ ID NO: 174218 - RNA, 19 nt, Homo sapiens
  misc_RNA (1)...(19): siRNA sense strand
gccaggagggaacaaagaa

SEQ ID NO: 174219 - RNA, 19 nt, Homo sapiens
  misc_RNA (1)...(19): siRNA sense strand
caagggaauuuuauuugug

SEQ ID NO: 174220 - RNA, 19 nt, Homo sapiens
  misc_RNA (1)...(19): siRNA sense strand
uuaauaggacugucuccaa

SEQ ID NO: 174221 - RNA, 19 nt, Homo sapiens
  misc_RNA (1)...(19): siRNA sense strand
uaugacggguacagacaug

SEQ ID NO: 174222 - RNA, 19 nt, Homo sapiens
  misc_RNA (1)...(19): siRNA sense strand
gugcuuaucaucucugaag

SEQ ID NO: 174223 - RNA, 19 nt, Homo sapiens
  misc_RNA (1)...(19): siRNA sense strand
agucagugguggagaggaa

SEQ ID NO: 174224 - RNA, 19 nt, Homo sapiens
  misc_RNA (1)...(19): siRNA sense strand
ugacggaggaaauucugaa

SEQ ID NO: 174225 - RNA, 19 nt, Homo sapiens
  misc_RNA (1)...(19): siRNA sense strand
cagaaguuccaguuugaug

SEQ ID NO: 174226 - RNA, 19 nt, Homo sapiens
  misc_RNA (1)...(19): siRNA sense strand
uuugaggauuggaauaaga

SEQ ID NO: 174227 - RNA, 19 nt, Homo sapiens
  misc_RNA (1)...(19): siRNA sense strand
guuggauacuggugacauc

SEQ ID NO: 174228 - RNA, 19 nt, Homo sapiens
  misc_RNA (1)...(19): siRNA sense strand
aaggaugcauuugaucgaa

SEQ ID NO: 174229 - RNA, 19 nt, Homo sapiens
  misc_RNA (1)...(19): siRNA sense strand
ggaaagauaaaggaugcau

SEQ ID NO: 174230 - RNA, 19 nt, Homo sapiens
  misc_RNA (1)...(19): siRNA sense strand
cugcaucauuagaagugua

SEQ ID NO: 174231 - RNA, 19 nt, Homo sapiens
  misc_RNA (1)...(19): siRNA sense strand
gcaaagauuuacagaaugu

SEQ ID NO: 174232 - RNA, 19 nt, Homo sapiens
  misc_RNA (1)...(19): siRNA sense strand
ggugaacucugccuuauau

SEQ ID NO: 174233 - RNA, 19 nt, Homo sapiens
  misc_RNA (1)...(19): siRNA sense strand
gcagagagggccagauuug

SEQ ID NO: 174234 - RNA, 19 nt, Homo sapiens
  misc_RNA (1)...(19): siRNA sense strand
gaacucugccuuauauaau

SEQ ID NO: 174235 - RNA, 19 nt, Homo sapiens
  misc_RNA (1)...(19): siRNA sense strand
guacagaaaccaauuaucu

SEQ ID NO: 174236 - RNA, 19 nt, Homo sapiens
  misc_RNA (1)...(19): siRNA sense strand
ugaacucugccuuauauaa

SEQ ID NO: 174237 - RNA, 19 nt, Homo sapiens
  misc_RNA (1)...(19): siRNA sense strand
agucaucacugguagcaaa

SEQ ID NO: 174238 - RNA, 19 nt, Homo sapiens
  misc_RNA (1)...(19): siRNA sense strand
gggaaggaguucacagaag

SEQ ID NO: 174239 - RNA, 19 nt, Homo sapiens
  misc_RNA (1)...(19): siRNA sense strand
ucacugguagcaaagauuu

SEQ ID NO: 174240 - RNA, 19 nt, Homo sapiens
  misc_RNA (1)...(19): siRNA sense strand
ugaguccauuggcaaguuu

SEQ ID NO: 174241 - RNA, 19 nt, Homo sapiens
  misc_RNA (1)...(19): siRNA sense strand
guggugaacucugccuuau

SEQ ID NO: 174242 - RNA, 19 nt, Homo sapiens
  misc_RNA (1)...(19): siRNA sense strand
acagguggcucagcaggaa

SEQ ID NO: 174243 - RNA, 19 nt, Homo sapiens
  misc_RNA (1)...(19): siRNA sense strand
ggccagauuugugguggaa

SEQ ID NO: 174244 - RNA, 19 nt, Homo sapiens
  misc_RNA (1)...(19): siRNA sense strand
aagcagagagggccagauu

SEQ ID NO: 174245 - RNA, 19 nt, Homo sapiens
  misc_RNA (1)...(19): siRNA sense strand
cagaaaccaauuaucuuug

SEQ ID NO: 174246 - RNA, 19 nt, Homo sapiens
  misc_RNA (1)...(19): siRNA sense strand
cagaggacaucgcguacca

SEQ ID NO: 174247 - RNA, 19 nt, Homo sapiens
  misc_RNA (1)...(19): siRNA sense strand
ggaaaaggcugagcaacag

SEQ ID NO: 174248 - RNA, 19 nt, Homo sapiens
  misc_RNA (1)...(19): siRNA sense strand
gaaaccaauuaucuuugac

SEQ ID NO: 174249 - RNA, 19 nt, Homo sapiens
  misc_RNA (1)...(19): siRNA sense strand
guagcaaagauuuacagaa

SEQ ID NO: 174250 - RNA, 19 nt, Homo sapiens
  misc_RNA (1)...(19): siRNA sense strand
agagcgagccgccaccuuu

SEQ ID NO: 174251 - RNA, 19 nt, Homo sapiens
  misc_RNA (1)...(19): siRNA sense strand
ggaagggacucauuuucuc

SEQ ID NO: 174252 - RNA, 19 nt, Homo sapiens
  misc_RNA (1)...(19): siRNA sense strand
ccagcuuccucgcaucuuc

SEQ ID NO: 174253 - RNA, 19 nt, Homo sapiens
  misc_RNA (1)...(19): siRNA sense strand
caucacugguagcaaagau

SEQ ID NO: 174254 - RNA, 19 nt, Homo sapiens
  misc_RNA (1)...(19): siRNA sense strand
cuuugaugcuggagaacua

SEQ ID NO: 174255 - RNA, 19 nt, Homo sapiens
  misc_RNA (1)...(19): siRNA sense strand
gugcugccguccaucacaa

SEQ ID NO: 174256 - RNA, 19 nt, Homo sapiens
  misc_RNA (1)...(19): siRNA sense strand
ucgcuuugaugcuggagaa

SEQ ID NO: 174257 - RNA, 19 nt, Homo sapiens
  misc_RNA (1)...(19): siRNA sense strand
ggugagcgacgaccuuaca

SEQ ID NO: 174258 - RNA, 19 nt, Homo sapiens
  misc_RNA (1)...(19): siRNA sense strand
ccacguaaugugccaguca

SEQ ID NO: 174259 - RNA, 19 nt, Homo sapiens
  misc_RNA (1)...(19): siRNA sense strand
cguggugaacucugccuua

SEQ ID NO: 174260 - RNA, 19 nt, Homo sapiens
  misc_RNA (1)...(19): siRNA sense strand
ugccguccaucacaacuga

SEQ ID NO: 174261 - RNA, 19 nt, Homo sapiens
  misc_RNA (1)...(19): siRNA sense strand
gcucucggaacaucaccua

SEQ ID NO: 174262 - RNA, 19 nt, Homo sapiens
  misc_RNA (1)...(19): siRNA sense strand
agagagggccagauuugug

SEQ ID NO: 174263 - RNA, 19 nt, Homo sapiens
  misc_RNA (1)...(19): siRNA sense strand
ccagauuugugguggaaaa

SEQ ID NO: 174264 - RNA, 19 nt, Homo sapiens
  misc_RNA (1)...(19): siRNA sense strand
gguagcaaagauuuacaga

SEQ ID NO: 174265 - RNA, 19 nt, Homo sapiens
  misc_RNA (1)...(19): siRNA sense strand
caggaggcguggugaacuc

SEQ ID NO: 174266 - RNA, 19 nt, Homo sapiens
  misc_RNA (1)...(19): siRNA sense strand
gaugcuggagaacuaauca

SEQ ID NO: 174267 - RNA, 19 nt, Homo sapiens
  misc_RNA (1)...(19): siRNA sense strand
agugguggcucgcuuugau

SEQ ID NO: 174268 - RNA, 19 nt, Homo sapiens
  misc_RNA (1)...(19): siRNA sense strand
agcaaagauuuacagaaug

SEQ ID NO: 174269 - RNA, 19 nt, Homo sapiens
  misc_RNA (1)...(19): siRNA sense strand
ggguacagaaaccaauuau

SEQ ID NO: 174270 - RNA, 19 nt, Homo sapiens
  misc_RNA (1)...(19): siRNA sense strand
uggguacagaaaccaauua

SEQ ID NO: 174271 - RNA, 19 nt, Homo sapiens
  misc_RNA (1)...(19): siRNA sense strand
aacucugccuuauauaaug

SEQ ID NO: 174272 - RNA, 19 nt, Homo sapiens
  misc_RNA (1)...(19): siRNA sense strand
ugccuuauauaauguggau

SEQ ID NO: 174273 - RNA, 19 nt, Homo sapiens
  misc_RNA (1)...(19): siRNA sense strand
uuacauagcuggagucuuu

SEQ ID NO: 174274 - RNA, 19 nt, Homo sapiens
  misc_RNA (1)...(19): siRNA sense strand
gaaguucgccugcuuugaa

SEQ ID NO: 174275 - RNA, 19 nt, Homo sapiens
  misc_RNA (1)...(19): siRNA sense strand
gcagcugguuguaacauuu

SEQ ID NO: 174276 - RNA, 19 nt, Homo sapiens
  misc_RNA (1)...(19): siRNA sense strand
uauggaagcugcuaagguu

SEQ ID NO: 174277 - RNA, 19 nt, Homo sapiens
  misc_RNA (1)...(19): siRNA sense strand
gggcauauuuaacggauuc

SEQ ID NO: 174278 - RNA, 19 nt, Homo sapiens
  misc_RNA (1)...(19): siRNA sense strand
ugaauucuuugcugacauu

SEQ ID NO: 174279 - RNA, 19 nt, Homo sapiens
  misc_RNA (1)...(19): siRNA sense strand
gaagcacuguacaaguuug

SEQ ID NO: 174280 - RNA, 19 nt, Homo sapiens
  misc_RNA (1)...(19): siRNA sense strand
gcgcacaucacuauauuug

SEQ ID NO: 174281 - RNA, 19 nt, Homo sapiens
  misc_RNA (1)...(19): siRNA sense strand
ugccagugcugaauucuuu

SEQ ID NO: 174282 - RNA, 19 nt, Homo sapiens
  misc_RNA (1)...(19): siRNA sense strand
gagaggagaauacuuaucu

SEQ ID NO: 174283 - RNA, 19 nt, Homo sapiens
  misc_RNA (1)...(19): siRNA sense strand
uacagugguuuaucuauga

SEQ ID NO: 174284 - RNA, 19 nt, Homo sapiens
  misc_RNA (1)...(19): siRNA sense strand
uugaagcacuguacaaguu

SEQ ID NO: 174285 - RNA, 19 nt, Homo sapiens
  misc_RNA (1)...(19): siRNA sense strand
ggaugagacagauaccaua

SEQ ID NO: 174286 - RNA, 19 nt, Homo sapiens
  misc_RNA (1)...(19): siRNA sense strand
ugguaucuguguugaauaa

SEQ ID NO: 174287 - RNA, 19 nt, Homo sapiens
  misc_RNA (1)...(19): siRNA sense strand
gauucucaguuacacuuaa

SEQ ID NO: 174288 - RNA, 19 nt, Homo sapiens
  misc_RNA (1)...(19): siRNA sense strand
cuacagugguuuaucuaug

SEQ ID NO: 174289 - RNA, 19 nt, Homo sapiens
  misc_RNA (1)...(19): siRNA sense strand
cauacaccaugaugaaguu

SEQ ID NO: 174290 - RNA, 19 nt, Homo sapiens
  misc_RNA (1)...(19): siRNA sense strand
cagauaccauacaccauga

SEQ ID NO: 174291 - RNA, 19 nt, Homo sapiens
  misc_RNA (1)...(19): siRNA sense strand
cagggacucugcaaguuug

SEQ ID NO: 174292 - RNA, 19 nt, Homo sapiens
  misc_RNA (1)...(19): siRNA sense strand
ggaugcagcucccaaaaug

SEQ ID NO: 174293 - RNA, 19 nt, Homo sapiens
  misc_RNA (1)...(19): siRNA sense strand
gcuaagguucgaauucaaa

SEQ ID NO: 174294 - RNA, 19 nt, Homo sapiens
  misc_RNA (1)...(19): siRNA sense strand
ugaagucuuuaaagucuug

SEQ ID NO: 174295 - RNA, 19 nt, Homo sapiens
  misc_RNA (1)...(19): siRNA sense strand
uaaagaggaugguguucgu

SEQ ID NO: 174296 - RNA, 19 nt, Homo sapiens
  misc_RNA (1)...(19): siRNA sense strand
cagguuaugccaacacuuu

SEQ ID NO: 174297 - RNA, 19 nt, Homo sapiens
  misc_RNA (1)...(19): siRNA sense strand
aaaguacaagggcauauuu

SEQ ID NO: 174298 - RNA, 19 nt, Homo sapiens
  misc_RNA (1)...(19): siRNA sense strand
uuggagaggagaauacuua

SEQ ID NO: 174299 - RNA, 19 nt, Homo sapiens
  misc_RNA (1)...(19): siRNA sense strand
gaugaaguucgccugcuuu

SEQ ID NO: 174300 - RNA, 19 nt, Homo sapiens
  misc_RNA (1)...(19): siRNA sense strand
uggcgcacaucacuauauu

SEQ ID NO: 174301 - RNA, 19 nt, Homo sapiens
  misc_RNA (1)...(19): siRNA sense strand
cagagcagcugguuguaac

SEQ ID NO: 174302 - RNA, 19 nt, Homo sapiens
  misc_RNA (1)...(19): siRNA sense strand
ggaugguguucgugguuug

SEQ ID NO: 174303 - RNA, 19 nt, Homo sapiens
  misc_RNA (1)...(19): siRNA sense strand
guaucuguguugaauaaag

SEQ ID NO: 174304 - RNA, 19 nt, Homo sapiens
  misc_RNA (1)...(19): siRNA sense strand
gugcuucucugguccucaa

SEQ ID NO: 174305 - RNA, 19 nt, Homo sapiens
  misc_RNA (1)...(19): siRNA sense strand
gaagaaggccuaaaagcau

SEQ ID NO: 174306 - RNA, 19 nt, Homo sapiens
  misc_RNA (1)...(19): siRNA sense strand
gauuuaaagguguauggaa

SEQ ID NO: 174307 - RNA, 19 nt, Homo sapiens
  misc_RNA (1)...(19): siRNA sense strand
guacaagggcauauuuaac

SEQ ID NO: 174308 - RNA, 19 nt, Homo sapiens
  misc_RNA (1)...(19): siRNA sense strand
aagcuuggguuaacucagu

SEQ ID NO: 174309 - RNA, 19 nt, Homo sapiens
  misc_RNA (1)...(19): siRNA sense strand
ggauucucaguuacacuua

SEQ ID NO: 174310 - RNA, 19 nt, Homo sapiens
  misc_RNA (1)...(19): siRNA sense strand
ugaugaaguucgccugcuu

SEQ ID NO: 174311 - RNA, 19 nt, Homo sapiens
  misc_RNA (1)...(19): siRNA sense strand
uaccauacaccaugaugaa

SEQ ID NO: 174312 - RNA, 19 nt, Homo sapiens
  misc_RNA (1)...(19): siRNA sense strand
aaggaugggcuccgacuuu

SEQ ID NO: 174313 - RNA, 19 nt, Homo sapiens
  misc_RNA (1)...(19): siRNA sense strand
ugaacguacuguugaagca

SEQ ID NO: 174314 - RNA, 19 nt, Homo sapiens
  misc_RNA (1)...(19): siRNA sense strand
gcuuugaacguacuguuga

SEQ ID NO: 174315 - RNA, 19 nt, Homo sapiens
  misc_RNA (1)...(19): siRNA sense strand
ggaagaaggccuaaaagca

SEQ ID NO: 174316 - RNA, 19 nt, Homo sapiens
  misc_RNA (1)...(19): siRNA sense strand
cugcuaagguucgaauuca

SEQ ID NO: 174317 - RNA, 19 nt, Homo sapiens
  misc_RNA (1)...(19): siRNA sense strand
gcugaauucuuugcugaca

SEQ ID NO: 174318 - RNA, 19 nt, Homo sapiens
  misc_RNA (1)...(19): siRNA sense strand
ugaagcacuguacaaguuu

SEQ ID NO: 174319 - RNA, 19 nt, Homo sapiens
  misc_RNA (1)...(19): siRNA sense strand
ugugguaucuguguugaau

SEQ ID NO: 174320 - RNA, 19 nt, Homo sapiens
  misc_RNA (1)...(19): siRNA sense strand
gaggaugguguucgugguu

SEQ ID NO: 174321 - RNA, 19 nt, Homo sapiens
  misc_RNA (1)...(19): siRNA sense strand
acauugcccuggcuccuau

SEQ ID NO: 174322 - RNA, 19 nt, Homo sapiens
  misc_RNA (1)...(19): siRNA sense strand
ggaagcugcuaagguucga

SEQ ID NO: 174323 - RNA, 19 nt, Homo sapiens
  misc_RNA (1)...(19): siRNA sense strand
aguacaagggcauauuuaa

SEQ ID NO: 174324 - RNA, 19 nt, Homo sapiens
  misc_RNA (1)...(19): siRNA sense strand
uaaggaagaaggccuaaaa

SEQ ID NO: 174325 - RNA, 19 nt, Homo sapiens
  misc_RNA (1)...(19): siRNA sense strand
ggagaggagaauacuuauc

SEQ ID NO: 174326 - RNA, 19 nt, Homo sapiens
  misc_RNA (1)...(19): siRNA sense strand
aaguacaagggcauauuua

SEQ ID NO: 174327 - RNA, 19 nt, Homo sapiens
  misc_RNA (1)...(19): siRNA sense strand
gacauugcccuggcuccua

SEQ ID NO: 174328 - RNA, 19 nt, Homo sapiens
  misc_RNA (1)...(19): siRNA sense strand
cugauucugugguaucugu

SEQ ID NO: 174329 - RNA, 19 nt, Homo sapiens
  misc_RNA (1)...(19): siRNA sense strand
ugagacagauaccauacac

SEQ ID NO: 174330 - RNA, 19 nt, Homo sapiens
  misc_RNA (1)...(19): siRNA sense strand
gaugagacagauaccauac

SEQ ID NO: 174331 - RNA, 19 nt, Homo sapiens
  misc_RNA (1)...(19): siRNA sense strand
ugcccuggcuccuauggaa

SEQ ID NO: 174332 - RNA, 19 nt, Homo sapiens
  misc_RNA (1)...(19): siRNA sense strand
gguuguaacauuuguagca

SEQ ID NO: 174333 - RNA, 19 nt, Homo sapiens
  misc_RNA (1)...(19): siRNA sense strand
gguuaugccaacacuuuga

SEQ ID NO: 174334 - RNA, 19 nt, Homo sapiens
  misc_RNA (1)...(19): siRNA sense strand
gauaccauacaccaugaug

SEQ ID NO: 174335 - RNA, 19 nt, Homo sapiens
  misc_RNA (1)...(19): siRNA sense strand
ggacuguuugcccguauca

SEQ ID NO: 174336 - RNA, 19 nt, Homo sapiens
  misc_RNA (1)...(19): siRNA sense strand
guauggaagggacuguuug

SEQ ID NO: 174337 - RNA, 19 nt, Homo sapiens
  misc_RNA (1)...(19): siRNA sense strand
gcugcuaagguucgaauuc

SEQ ID NO: 174338 - RNA, 19 nt, Homo sapiens
  misc_RNA (1)...(19): siRNA sense strand
cgacuuuccuuggcuacuc

SEQ ID NO: 174339 - RNA, 19 nt, Homo sapiens
  misc_RNA (1)...(19): siRNA sense strand
guucgugguuuggcuaaag

SEQ ID NO: 174340 - RNA, 19 nt, Homo sapiens
  misc_RNA (1)...(19): siRNA sense strand
agucuuguauagcaauaug

SEQ ID NO: 174341 - RNA, 19 nt, Homo sapiens
  misc_RNA (1)...(19): siRNA sense strand
cauauuuaacggauucuca

SEQ ID NO: 174342 - RNA, 19 nt, Homo sapiens
  misc_RNA (1)...(19): siRNA sense strand
gcaaguuuggcuuuuauga

SEQ ID NO: 174343 - RNA, 19 nt, Homo sapiens
  misc_RNA (1)...(19): siRNA sense strand
ggauuuaaagguguaugga

SEQ ID NO: 174344 - RNA, 19 nt, Homo sapiens
  misc_RNA (1)...(19): siRNA sense strand
ccauacaccaugaugaagu

SEQ ID NO: 174345 - RNA, 19 nt, Homo sapiens
  misc_RNA (1)...(19): siRNA sense strand
gcuggagucuuuugugcaa

SEQ ID NO: 174346 - RNA, 19 nt, Homo sapiens
  misc_RNA (1)...(19): siRNA sense strand
uguauggaagggacuguuu

SEQ ID NO: 174347 - RNA, 19 nt, Homo sapiens
  misc_RNA (1)...(19): siRNA sense strand
uuugugcaauuguuucuca

SEQ ID NO: 174348 - RNA, 19 nt, Homo sapiens
  misc_RNA (1)...(19): siRNA sense strand
uuacauagcuggagucuuu

SEQ ID NO: 174349 - RNA, 19 nt, Homo sapiens
  misc_RNA (1)...(19): siRNA sense strand
gaaguucgccugcuuugaa

SEQ ID NO: 174350 - RNA, 19 nt, Homo sapiens
  misc_RNA (1)...(19): siRNA sense strand
gcagcugguuguaacauuu

SEQ ID NO: 174351 - RNA, 19 nt, Homo sapiens
  misc_RNA (1)...(19): siRNA sense strand
uauggaagcugcuaagguu

SEQ ID NO: 174352 - RNA, 19 nt, Homo sapiens
  misc_RNA (1)...(19): siRNA sense strand
gggcauauuuaacggauuc

SEQ ID NO: 174353 - RNA, 19 nt, Homo sapiens
  misc_RNA (1)...(19): siRNA sense strand
ugaauucuuugcugacauu

SEQ ID NO: 174354 - RNA, 19 nt, Homo sapiens
  misc_RNA (1)...(19): siRNA sense strand
gaagcacuguacaaguuug

SEQ ID NO: 174355 - RNA, 19 nt, Homo sapiens
  misc_RNA (1)...(19): siRNA sense strand
gcgcacaucacuauauuug

SEQ ID NO: 174356 - RNA, 19 nt, Homo sapiens
  misc_RNA (1)...(19): siRNA sense strand
ugccagugcugaauucuuu

SEQ ID NO: 174357 - RNA, 19 nt, Homo sapiens
  misc_RNA (1)...(19): siRNA sense strand
gagaggagaauacuuaucu

SEQ ID NO: 174358 - RNA, 19 nt, Homo sapiens
  misc_RNA (1)...(19): siRNA sense strand
uacagugguuuaucuauga

SEQ ID NO: 174359 - RNA, 19 nt, Homo sapiens
  misc_RNA (1)...(19): siRNA sense strand
uugaagcacuguacaaguu

SEQ ID NO: 174360 - RNA, 19 nt, Homo sapiens
  misc_RNA (1)...(19): siRNA sense strand
ggaugagacagauaccaua

SEQ ID NO: 174361 - RNA, 19 nt, Homo sapiens
  misc_RNA (1)...(19): siRNA sense strand
ugguaucuguguugaauaa

SEQ ID NO: 174362 - RNA, 19 nt, Homo sapiens
  misc_RNA (1)...(19): siRNA sense strand
gauucucaguuacacuuaa

SEQ ID NO: 174363 - RNA, 19 nt, Homo sapiens
  misc_RNA (1)...(19): siRNA sense strand
cuacagugguuuaucuaug

SEQ ID NO: 174364 - RNA, 19 nt, Homo sapiens
  misc_RNA (1)...(19): siRNA sense strand
cauacaccaugaugaaguu

SEQ ID NO: 174365 - RNA, 19 nt, Homo sapiens
  misc_RNA (1)...(19): siRNA sense strand
cagauaccauacaccauga

SEQ ID NO: 174366 - RNA, 19 nt, Homo sapiens
  misc_RNA (1)...(19): siRNA sense strand
cagggacucugcaaguuug

SEQ ID NO: 174367 - RNA, 19 nt, Homo sapiens
  misc_RNA (1)...(19): siRNA sense strand
ggaugcagcucccaaaaug

SEQ ID NO: 174368 - RNA, 19 nt, Homo sapiens
  misc_RNA (1)...(19): siRNA sense strand
gcuaagguucgaauucaaa

SEQ ID NO: 174369 - RNA, 19 nt, Homo sapiens
  misc_RNA (1)...(19): siRNA sense strand
ugaagucuuuaaagucuug

SEQ ID NO: 174370 - RNA, 19 nt, Homo sapiens
  misc_RNA (1)...(19): siRNA sense strand
uaaagaggaugguguucgu

SEQ ID NO: 174371 - RNA, 19 nt, Homo sapiens
  misc_RNA (1)...(19): siRNA sense strand
cagguuaugccaacacuuu

SEQ ID NO: 174372 - RNA, 19 nt, Homo sapiens
  misc_RNA (1)...(19): siRNA sense strand
aaaguacaagggcauauuu

SEQ ID NO: 174373 - RNA, 19 nt, Homo sapiens
  misc_RNA (1)...(19): siRNA sense strand
uuggagaggagaauacuua

SEQ ID NO: 174374 - RNA, 19 nt, Homo sapiens
  misc_RNA (1)...(19): siRNA sense strand
gaugaaguucgccugcuuu

SEQ ID NO: 174375 - RNA, 19 nt, Homo sapiens
  misc_RNA (1)...(19): siRNA sense strand
uggcgcacaucacuauauu

SEQ ID NO: 174376 - RNA, 19 nt, Homo sapiens
  misc_RNA (1)...(19): siRNA sense strand
cagagcagcugguuguaac

SEQ ID NO: 174377 - RNA, 19 nt, Homo sapiens
  misc_RNA (1)...(19): siRNA sense strand
ggaugguguucgugguuug

SEQ ID NO: 174378 - RNA, 19 nt, Homo sapiens
  misc_RNA (1)...(19): siRNA sense strand
guaucuguguugaauaaag

SEQ ID NO: 174379 - RNA, 19 nt, Homo sapiens
  misc_RNA (1)...(19): siRNA sense strand
gugcuucucugguccucaa

SEQ ID NO: 174380 - RNA, 19 nt, Homo sapiens
  misc_RNA (1)...(19): siRNA sense strand
gaagaaggccuaaaagcau

SEQ ID NO: 174381 - RNA, 19 nt, Homo sapiens
  misc_RNA (1)...(19): siRNA sense strand
gauuuaaagguguauggaa

SEQ ID NO: 174382 - RNA, 19 nt, Homo sapiens
  misc_RNA (1)...(19): siRNA sense strand
guacaagggcauauuuaac

SEQ ID NO: 174383 - RNA, 19 nt, Homo sapiens
  misc_RNA (1)...(19): siRNA sense strand
aagcuuggguuaacucagu

SEQ ID NO: 174384 - RNA, 19 nt, Homo sapiens
  misc_RNA (1)...(19): siRNA sense strand
ggauucucaguuacacuua

SEQ ID NO: 174385 - RNA, 19 nt, Homo sapiens
  misc_RNA (1)...(19): siRNA sense strand
ugaugaaguucgccugcuu

SEQ ID NO: 174386 - RNA, 19 nt, Homo sapiens
  misc_RNA (1)...(19): siRNA sense strand
uaccauacaccaugaugaa

SEQ ID NO: 174387 - RNA, 19 nt, Homo sapiens
  misc_RNA (1)...(19): siRNA sense strand
aaggaugggcuccgacuuu

SEQ ID NO: 174388 - RNA, 19 nt, Homo sapiens
  misc_RNA (1)...(19): siRNA sense strand
ugaacguacuguugaagca

SEQ ID NO: 174389 - RNA, 19 nt, Homo sapiens
  misc_RNA (1)...(19): siRNA sense strand
gcuuugaacguacuguuga

SEQ ID NO: 174390 - RNA, 19 nt, Homo sapiens
  misc_RNA (1)...(19): siRNA sense strand
ggaagaaggccuaaaagca

SEQ ID NO: 174391 - RNA, 19 nt, Homo sapiens
  misc_RNA (1)...(19): siRNA sense strand
cugcuaagguucgaauuca

SEQ ID NO: 174392 - RNA, 19 nt, Homo sapiens
  misc_RNA (1)...(19): siRNA sense strand
gcugaauucuuugcugaca

SEQ ID NO: 174393 - RNA, 19 nt, Homo sapiens
  misc_RNA (1)...(19): siRNA sense strand
ugaagcacuguacaaguuu

SEQ ID NO: 174394 - RNA, 19 nt, Homo sapiens
  misc_RNA (1)...(19): siRNA sense strand
ugugguaucuguguugaau

SEQ ID NO: 174395 - RNA, 19 nt, Homo sapiens
  misc_RNA (1)...(19): siRNA sense strand
gaggaugguguucgugguu

SEQ ID NO: 174396 - RNA, 19 nt, Homo sapiens
  misc_RNA (1)...(19): siRNA sense strand
acauugcccuggcuccuau

SEQ ID NO: 174397 - RNA, 19 nt, Homo sapiens
  misc_RNA (1)...(19): siRNA sense strand
ggaagcugcuaagguucga

SEQ ID NO: 174398 - RNA, 19 nt, Homo sapiens
  misc_RNA (1)...(19): siRNA sense strand
aguacaagggcauauuuaa

SEQ ID NO: 174399 - RNA, 19 nt, Homo sapiens
  misc_RNA (1)...(19): siRNA sense strand
uaaggaagaaggccuaaaa

SEQ ID NO: 174400 - RNA, 19 nt, Homo sapiens
  misc_RNA (1)...(19): siRNA sense strand
ggagaggagaauacuuauc

SEQ ID NO: 174401 - RNA, 19 nt, Homo sapiens
  misc_RNA (1)...(19): siRNA sense strand
aaguacaagggcauauuua

SEQ ID NO: 174402 - RNA, 19 nt, Homo sapiens
  misc_RNA (1)...(19): siRNA sense strand
gacauugcccuggcuccua

SEQ ID NO: 174403 - RNA, 19 nt, Homo sapiens
  misc_RNA (1)...(19): siRNA sense strand
cugauucugugguaucugu

SEQ ID NO: 174404 - RNA, 19 nt, Homo sapiens
  misc_RNA (1)...(19): siRNA sense strand
ugagacagauaccauacac

SEQ ID NO: 174405 - RNA, 19 nt, Homo sapiens
  misc_RNA (1)...(19): siRNA sense strand
gaugagacagauaccauac

SEQ ID NO: 174406 - RNA, 19 nt, Homo sapiens
  misc_RNA (1)...(19): siRNA sense strand
ugcccuggcuccuauggaa

SEQ ID NO: 174407 - RNA, 19 nt, Homo sapiens
  misc_RNA (1)...(19): siRNA sense strand
gguuguaacauuuguagca

SEQ ID NO: 174408 - RNA, 19 nt, Homo sapiens
  misc_RNA (1)...(19): siRNA sense strand
gguuaugccaacacuuuga

SEQ ID NO: 174409 - RNA, 19 nt, Homo sapiens
  misc_RNA (1)...(19): siRNA sense strand
gauaccauacaccaugaug

SEQ ID NO: 174410 - RNA, 19 nt, Homo sapiens
  misc_RNA (1)...(19): siRNA sense strand
ggacuguuugcccguauca

SEQ ID NO: 174411 - RNA, 19 nt, Homo sapiens
  misc_RNA (1)...(19): siRNA sense strand
guauggaagggacuguuug

SEQ ID NO: 174412 - RNA, 19 nt, Homo sapiens
  misc_RNA (1)...(19): siRNA sense strand
gcugcuaagguucgaauuc

SEQ ID NO: 174413 - RNA, 19 nt, Homo sapiens
  misc_RNA (1)...(19): siRNA sense strand
cgacuuuccuuggcuacuc

SEQ ID NO: 174414 - RNA, 19 nt, Homo sapiens
  misc_RNA (1)...(19): siRNA sense strand
guucgugguuuggcuaaag

SEQ ID NO: 174415 - RNA, 19 nt, Homo sapiens
  misc_RNA (1)...(19): siRNA sense strand
agucuuguauagcaauaug

SEQ ID NO: 174416 - RNA, 19 nt, Homo sapiens
  misc_RNA (1)...(19): siRNA sense strand
cauauuuaacggauucuca

SEQ ID NO: 174417 - RNA, 19 nt, Homo sapiens
  misc_RNA (1)...(19): siRNA sense strand
gcaaguuuggcuuuuauga

SEQ ID NO: 174418 - RNA, 19 nt, Homo sapiens
  misc_RNA (1)...(19): siRNA sense strand
ggauuuaaagguguaugga

SEQ ID NO: 174419 - RNA, 19 nt, Homo sapiens
  misc_RNA (1)...(19): siRNA sense strand
ccauacaccaugaugaagu

SEQ ID NO: 174420 - RNA, 19 nt, Homo sapiens
  misc_RNA (1)...(19): siRNA sense strand
gcuggagucuuuugugcaa

SEQ ID NO: 174421 - RNA, 19 nt, Homo sapiens
  misc_RNA (1)...(19): siRNA sense strand
uguauggaagggacuguuu

SEQ ID NO: 174422 - RNA, 19 nt, Homo sapiens
  misc_RNA (1)...(19): siRNA sense strand
uuugugcaauuguuucuca

SEQ ID NO: 174423 - RNA, 19 nt, Homo sapiens
  misc_RNA (1)...(19): siRNA sense strand
uauaauaccugaacucugu

SEQ ID NO: 174424 - RNA, 19 nt, Homo sapiens
  misc_RNA (1)...(19): siRNA sense strand
ggaagaaguucgggaaaga

SEQ ID NO: 174425 - RNA, 19 nt, Homo sapiens
  misc_RNA (1)...(19): siRNA sense strand
acacaaggauguuagaaau

SEQ ID NO: 174426 - RNA, 19 nt, Homo sapiens
  misc_RNA (1)...(19): siRNA sense strand
ggaggaauguugcagaaag

SEQ ID NO: 174427 - RNA, 19 nt, Homo sapiens
  misc_RNA (1)...(19): siRNA sense strand
guaacaggcuacaucuuug

SEQ ID NO: 174428 - RNA, 19 nt, Homo sapiens
  misc_RNA (1)...(19): siRNA sense strand
ggaccaaagagaaucauuu

SEQ ID NO: 174429 - RNA, 19 nt, Homo sapiens
  misc_RNA (1)...(19): siRNA sense strand
agaaagaacugaaaaggua

SEQ ID NO: 174430 - RNA, 19 nt, Homo sapiens
  misc_RNA (1)...(19): siRNA sense strand
cgacuggacagacuuauuu

SEQ ID NO: 174431 - RNA, 19 nt, Homo sapiens
  misc_RNA (1)...(19): siRNA sense strand
ggagagggaccaaagagaa

SEQ ID NO: 174432 - RNA, 19 nt, Homo sapiens
  misc_RNA (1)...(19): siRNA sense strand
gaggaauguugcagaaaga

SEQ ID NO: 174433 - RNA, 19 nt, Homo sapiens
  misc_RNA (1)...(19): siRNA sense strand
cuacaucuuugcuuuguug

SEQ ID NO: 174434 - RNA, 19 nt, Homo sapiens
  misc_RNA (1)...(19): siRNA sense strand
aaagauaccagcugcauga

SEQ ID NO: 174435 - RNA, 19 nt, Homo sapiens
  misc_RNA (1)...(19): siRNA sense strand
gaagcuguguugccaaugg

SEQ ID NO: 174436 - RNA, 19 nt, Homo sapiens
  misc_RNA (1)...(19): siRNA sense strand
ugucagaaauauccagauu

SEQ ID NO: 174437 - RNA, 19 nt, Homo sapiens
  misc_RNA (1)...(19): siRNA sense strand
gaacugaaaagguauauga

SEQ ID NO: 174438 - RNA, 19 nt, Homo sapiens
  misc_RNA (1)...(19): siRNA sense strand
acaaggauguuagaaaugu

SEQ ID NO: 174439 - RNA, 19 nt, Homo sapiens
  misc_RNA (1)...(19): siRNA sense strand
cugaauaccucccuuacug

SEQ ID NO: 174440 - RNA, 19 nt, Homo sapiens
  misc_RNA (1)...(19): siRNA sense strand
gaauaccucccuuacugaa

SEQ ID NO: 174441 - RNA, 19 nt, Homo sapiens
  misc_RNA (1)...(19): siRNA sense strand
gggugagaauaaugagaua

SEQ ID NO: 174442 - RNA, 19 nt, Homo sapiens
  misc_RNA (1)...(19): siRNA sense strand
caggcuacaucuuugcuuu

SEQ ID NO: 174443 - RNA, 19 nt, Homo sapiens
  misc_RNA (1)...(19): siRNA sense strand
uaugugagccuucaguaaa

SEQ ID NO: 174444 - RNA, 19 nt, Homo sapiens
  misc_RNA (1)...(19): siRNA sense strand
agaaaugucuuaguucaag

SEQ ID NO: 174445 - RNA, 19 nt, Homo sapiens
  misc_RNA (1)...(19): siRNA sense strand
gaaaacauccauaacauag

SEQ ID NO: 174446 - RNA, 19 nt, Homo sapiens
  misc_RNA (1)...(19): siRNA sense strand
caacuuccucuuccucauu

SEQ ID NO: 174447 - RNA, 19 nt, Homo sapiens
  misc_RNA (1)...(19): siRNA sense strand
ggacaaacgacuggacaga

SEQ ID NO: 174448 - RNA, 19 nt, Homo sapiens
  misc_RNA (1)...(19): siRNA sense strand
gacuccagauucuaucauu

SEQ ID NO: 174449 - RNA, 19 nt, Homo sapiens
  misc_RNA (1)...(19): siRNA sense strand
aguaacaggcuacaucuuu

SEQ ID NO: 174450 - RNA, 19 nt, Homo sapiens
  misc_RNA (1)...(19): siRNA sense strand
gaagcagccaguugugguu

SEQ ID NO: 174451 - RNA, 19 nt, Homo sapiens
  misc_RNA (1)...(19): siRNA sense strand
ggaugacuccagauucuau

SEQ ID NO: 174452 - RNA, 19 nt, Homo sapiens
  misc_RNA (1)...(19): siRNA sense strand
aaacgacuggacagacuua

SEQ ID NO: 174453 - RNA, 19 nt, Homo sapiens
  misc_RNA (1)...(19): siRNA sense strand
ggaaagauaccagcugcau

SEQ ID NO: 174454 - RNA, 19 nt, Homo sapiens
  misc_RNA (1)...(19): siRNA sense strand
gagagggaccaaagagaau

SEQ ID NO: 174455 - RNA, 19 nt, Homo sapiens
  misc_RNA (1)...(19): siRNA sense strand
caugacagggugcgucuuu

SEQ ID NO: 174456 - RNA, 19 nt, Homo sapiens
  misc_RNA (1)...(19): siRNA sense strand
gguuguaaguaccagaguu

SEQ ID NO: 174457 - RNA, 19 nt, Homo sapiens
  misc_RNA (1)...(19): siRNA sense strand
uggacagacuuauuucuca

SEQ ID NO: 174458 - RNA, 19 nt, Homo sapiens
  misc_RNA (1)...(19): siRNA sense strand
ggaggagagggaccaaaga

SEQ ID NO: 174459 - RNA, 19 nt, Homo sapiens
  misc_RNA (1)...(19): siRNA sense strand
gaagaaguucgggaaagau

SEQ ID NO: 174460 - RNA, 19 nt, Homo sapiens
  misc_RNA (1)...(19): siRNA sense strand
ggauguuagaaaugucuua

SEQ ID NO: 174461 - RNA, 19 nt, Homo sapiens
  misc_RNA (1)...(19): siRNA sense strand
aagaaguucgggaaagaua

SEQ ID NO: 174462 - RNA, 19 nt, Homo sapiens
  misc_RNA (1)...(19): siRNA sense strand
cgauuugcuuagugguaua

SEQ ID NO: 174463 - RNA, 19 nt, Homo sapiens
  misc_RNA (1)...(19): siRNA sense strand
gugccuggacuaauaacua

SEQ ID NO: 174464 - RNA, 19 nt, Homo sapiens
  misc_RNA (1)...(19): siRNA sense strand
gggaucgauuugcuuagug

SEQ ID NO: 174465 - RNA, 19 nt, Homo sapiens
  misc_RNA (1)...(19): siRNA sense strand
acaaacgacuggacagacu

SEQ ID NO: 174466 - RNA, 19 nt, Homo sapiens
  misc_RNA (1)...(19): siRNA sense strand
ugaauaccucccuuacuga

SEQ ID NO: 174467 - RNA, 19 nt, Homo sapiens
  misc_RNA (1)...(19): siRNA sense strand
gagaaucauuuuggaagaa

SEQ ID NO: 174468 - RNA, 19 nt, Homo sapiens
  misc_RNA (1)...(19): siRNA sense strand
gaccaaagagaaucauuuu

SEQ ID NO: 174469 - RNA, 19 nt, Homo sapiens
  misc_RNA (1)...(19): siRNA sense strand
cagaaaacauccauaacau

SEQ ID NO: 174470 - RNA, 19 nt, Homo sapiens
  misc_RNA (1)...(19): siRNA sense strand
gacauugccagcuccagaa

SEQ ID NO: 174471 - RNA, 19 nt, Homo sapiens
  misc_RNA (1)...(19): siRNA sense strand
ugccuggacuaauaacuau

SEQ ID NO: 174472 - RNA, 19 nt, Homo sapiens
  misc_RNA (1)...(19): siRNA sense strand
uggaagcuguguugccaau

SEQ ID NO: 174473 - RNA, 19 nt, Homo sapiens
  misc_RNA (1)...(19): siRNA sense strand
ggcuacaucuuugcuuugu

SEQ ID NO: 174474 - RNA, 19 nt, Homo sapiens
  misc_RNA (1)...(19): siRNA sense strand
caguugugguuuacagguu

SEQ ID NO: 174475 - RNA, 19 nt, Homo sapiens
  misc_RNA (1)...(19): siRNA sense strand
gagaauaaugagauaucug

SEQ ID NO: 174476 - RNA, 19 nt, Homo sapiens
  misc_RNA (1)...(19): siRNA sense strand
cggggugccuggacuaaua

SEQ ID NO: 174477 - RNA, 19 nt, Homo sapiens
  misc_RNA (1)...(19): siRNA sense strand
ucgauuugcuuagugguau

SEQ ID NO: 174478 - RNA, 19 nt, Homo sapiens
  misc_RNA (1)...(19): siRNA sense strand
gaauguugcagaaagaacu

SEQ ID NO: 174479 - RNA, 19 nt, Homo sapiens
  misc_RNA (1)...(19): siRNA sense strand
cuggaggaauguugcagaa

SEQ ID NO: 174480 - RNA, 19 nt, Homo sapiens
  misc_RNA (1)...(19): siRNA sense strand
gaggagagggaccaaagag

SEQ ID NO: 174481 - RNA, 19 nt, Homo sapiens
  misc_RNA (1)...(19): siRNA sense strand
gcuacaucuuugcuuuguu

SEQ ID NO: 174482 - RNA, 19 nt, Homo sapiens
  misc_RNA (1)...(19): siRNA sense strand
caaggauguuagaaauguc

SEQ ID NO: 174483 - RNA, 19 nt, Homo sapiens
  misc_RNA (1)...(19): siRNA sense strand
uauaugaccggguaucagu

SEQ ID NO: 174484 - RNA, 19 nt, Homo sapiens
  misc_RNA (1)...(19): siRNA sense strand
guuguaaguaccagaguug

SEQ ID NO: 174485 - RNA, 19 nt, Homo sapiens
  misc_RNA (1)...(19): siRNA sense strand
guuagaaaugucuuaguuc

SEQ ID NO: 174486 - RNA, 19 nt, Homo sapiens
  misc_RNA (1)...(19): siRNA sense strand
gugagaauaaugagauauc

SEQ ID NO: 174487 - RNA, 19 nt, Homo sapiens
  misc_RNA (1)...(19): siRNA sense strand
aacuuccucuuccucauuu

SEQ ID NO: 174488 - RNA, 19 nt, Homo sapiens
  misc_RNA (1)...(19): siRNA sense strand
uggaagaaguucgggaaag

SEQ ID NO: 174489 - RNA, 19 nt, Homo sapiens
  misc_RNA (1)...(19): siRNA sense strand
gcagccaguugugguuuac

SEQ ID NO: 174490 - RNA, 19 nt, Homo sapiens
  misc_RNA (1)...(19): siRNA sense strand
ccugaggugcuuccagaaa

SEQ ID NO: 174491 - RNA, 19 nt, Homo sapiens
  misc_RNA (1)...(19): siRNA sense strand
aaugagauaucugaaacca

SEQ ID NO: 174492 - RNA, 19 nt, Homo sapiens
  misc_RNA (1)...(19): siRNA sense strand
ccagaaaacauccauaaca

SEQ ID NO: 174493 - RNA, 19 nt, Homo sapiens
  misc_RNA (1)...(19): siRNA sense strand
agcagccaguugugguuua

SEQ ID NO: 174494 - RNA, 19 nt, Homo sapiens
  misc_RNA (1)...(19): siRNA sense strand
gguauaugaccggguauca

SEQ ID NO: 174495 - RNA, 19 nt, Homo sapiens
  misc_RNA (1)...(19): siRNA sense strand
uuaugugagccuucaguaa

SEQ ID NO: 174496 - RNA, 19 nt, Homo sapiens
  misc_RNA (1)...(19): siRNA sense strand
gauuugcuuagugguauaa

SEQ ID NO: 174497 - RNA, 19 nt, Homo sapiens
  misc_RNA (1)...(19): siRNA sense strand
caaacgacuggacagacuu

SEQ ID NO: 174498 - RNA, 19 nt, Homo sapiens
  misc_RNA (1)...(19): siRNA sense strand
uuugggagcuuuagaacac

SEQ ID NO: 174499 - RNA, 19 nt, Homo sapiens
  misc_RNA (1)...(19): siRNA sense strand
gagggaccaaagagaauca

SEQ ID NO: 174500 - RNA, 19 nt, Homo sapiens
  misc_RNA (1)...(19): siRNA sense strand
cacaaggauguuagaaaug

SEQ ID NO: 174501 - RNA, 19 nt, Homo sapiens
  misc_RNA (1)...(19): siRNA sense strand
cuccagauucuaucauuga

SEQ ID NO: 174502 - RNA, 19 nt, Homo sapiens
  misc_RNA (1)...(19): siRNA sense strand
cgauuugcuuagugguaua

SEQ ID NO: 174503 - RNA, 19 nt, Homo sapiens
  misc_RNA (1)...(19): siRNA sense strand
gggaucgauuugcuuagug

SEQ ID NO: 174504 - RNA, 19 nt, Homo sapiens
  misc_RNA (1)...(19): siRNA sense strand
ucgauuugcuuagugguau

SEQ ID NO: 174505 - RNA, 19 nt, Homo sapiens
  misc_RNA (1)...(19): siRNA sense strand
gauuugcuuagugguauaa

SEQ ID NO: 174506 - RNA, 19 nt, Homo sapiens
  misc_RNA (1)...(19): siRNA sense strand
gaaagcaacuuacauacaa

SEQ ID NO: 174507 - RNA, 19 nt, Homo sapiens
  misc_RNA (1)...(19): siRNA sense strand
gaaaugcuguaucuacuuu

SEQ ID NO: 174508 - RNA, 19 nt, Homo sapiens
  misc_RNA (1)...(19): siRNA sense strand
gagcaccacugauagaguu

SEQ ID NO: 174509 - RNA, 19 nt, Homo sapiens
  misc_RNA (1)...(19): siRNA sense strand
gaaacacacuugacauggu

SEQ ID NO: 174510 - RNA, 19 nt, Homo sapiens
  misc_RNA (1)...(19): siRNA sense strand
ccaaauacauccucuaaaa

SEQ ID NO: 174511 - RNA, 19 nt, Homo sapiens
  misc_RNA (1)...(19): siRNA sense strand
caacuuacauacaagaaca

SEQ ID NO: 174512 - RNA, 19 nt, Homo sapiens
  misc_RNA (1)...(19): siRNA sense strand
gaacuucucaauauuggaa

SEQ ID NO: 174513 - RNA, 19 nt, Homo sapiens
  misc_RNA (1)...(19): siRNA sense strand
guauggagcaccacugaua

SEQ ID NO: 174514 - RNA, 19 nt, Homo sapiens
  misc_RNA (1)...(19): siRNA sense strand
cuaagaguguucaguagaa

SEQ ID NO: 174515 - RNA, 19 nt, Homo sapiens
  misc_RNA (1)...(19): siRNA sense strand
cuacguggcuggccuuguu

SEQ ID NO: 174516 - RNA, 19 nt, Homo sapiens
  misc_RNA (1)...(19): siRNA sense strand
aaacacacuugacaugguu

SEQ ID NO: 174517 - RNA, 19 nt, Homo sapiens
  misc_RNA (1)...(19): siRNA sense strand
gaaguucauuaucacacaa

SEQ ID NO: 174518 - RNA, 19 nt, Homo sapiens
  misc_RNA (1)...(19): siRNA sense strand
uauccuaagugucuucauu

SEQ ID NO: 174519 - RNA, 19 nt, Homo sapiens
  misc_RNA (1)...(19): siRNA sense strand
uggaauagaaagcaacuua

SEQ ID NO: 174520 - RNA, 19 nt, Homo sapiens
  misc_RNA (1)...(19): siRNA sense strand
ucaagagacuacuguauac

SEQ ID NO: 174521 - RNA, 19 nt, Homo sapiens
  misc_RNA (1)...(19): siRNA sense strand
gaauagaaagcaacuuaca

SEQ ID NO: 174522 - RNA, 19 nt, Homo sapiens
  misc_RNA (1)...(19): siRNA sense strand
ucacuacaauuucuagcuu

SEQ ID NO: 174523 - RNA, 19 nt, Homo sapiens
  misc_RNA (1)...(19): siRNA sense strand
ggauauacuggaauagaaa

SEQ ID NO: 174524 - RNA, 19 nt, Homo sapiens
  misc_RNA (1)...(19): siRNA sense strand
ccagaucacuacaauuucu

SEQ ID NO: 174525 - RNA, 19 nt, Homo sapiens
  misc_RNA (1)...(19): siRNA sense strand
ucaauuauccuaagugucu

SEQ ID NO: 174526 - RNA, 19 nt, Homo sapiens
  misc_RNA (1)...(19): siRNA sense strand
ugcuguaucuacuuucuua

SEQ ID NO: 174527 - RNA, 19 nt, Homo sapiens
  misc_RNA (1)...(19): siRNA sense strand
uaagaguguucaguagaaa

SEQ ID NO: 174528 - RNA, 19 nt, Homo sapiens
  misc_RNA (1)...(19): siRNA sense strand
uguaacugcugucaaucua

SEQ ID NO: 174529 - RNA, 19 nt, Homo sapiens
  misc_RNA (1)...(19): siRNA sense strand
uggauauacuggaauagaa

SEQ ID NO: 174530 - RNA, 19 nt, Homo sapiens
  misc_RNA (1)...(19): siRNA sense strand
ggaccaaaccucaaagcau

SEQ ID NO: 174531 - RNA, 19 nt, Homo sapiens
  misc_RNA (1)...(19): siRNA sense strand
uaacugcugucaaucuagu

SEQ ID NO: 174532 - RNA, 19 nt, Homo sapiens
  misc_RNA (1)...(19): siRNA sense strand
cuaagugucuucauuccau

SEQ ID NO: 174533 - RNA, 19 nt, Homo sapiens
  misc_RNA (1)...(19): siRNA sense strand
caguagaaauggaguuaca

SEQ ID NO: 174534 - RNA, 19 nt, Homo sapiens
  misc_RNA (1)...(19): siRNA sense strand
cuccagaucacuacaauuu

SEQ ID NO: 174535 - RNA, 19 nt, Homo sapiens
  misc_RNA (1)...(19): siRNA sense strand
gcaguuauuuugucuacuu

SEQ ID NO: 174536 - RNA, 19 nt, Homo sapiens
  misc_RNA (1)...(19): siRNA sense strand
guagugaaaccaaauacau

SEQ ID NO: 174537 - RNA, 19 nt, Homo sapiens
  misc_RNA (1)...(19): siRNA sense strand
uggcuggccuuguuauuuc

SEQ ID NO: 174538 - RNA, 19 nt, Homo sapiens
  misc_RNA (1)...(19): siRNA sense strand
gcuaagaguguucaguaga

SEQ ID NO: 174539 - RNA, 19 nt, Homo sapiens
  misc_RNA (1)...(19): siRNA sense strand
ccucaaagcauggcuaaga

SEQ ID NO: 174540 - RNA, 19 nt, Homo sapiens
  misc_RNA (1)...(19): siRNA sense strand
gugccuugcuuauguuugu

SEQ ID NO: 174541 - RNA, 19 nt, Homo sapiens
  misc_RNA (1)...(19): siRNA sense strand
cacacaagguaacuggauu

SEQ ID NO: 174542 - RNA, 19 nt, Homo sapiens
  misc_RNA (1)...(19): siRNA sense strand
uggcuaagaguguucagua

SEQ ID NO: 174543 - RNA, 19 nt, Homo sapiens
  misc_RNA (1)...(19): siRNA sense strand
uuucaccacucuggauaua

SEQ ID NO: 174544 - RNA, 19 nt, Homo sapiens
  misc_RNA (1)...(19): siRNA sense strand
ucuacuuucuuaugucuug

SEQ ID NO: 174545 - RNA, 19 nt, Homo sapiens
  misc_RNA (1)...(19): siRNA sense strand
gauaucaagagacuacugu

SEQ ID NO: 174546 - RNA, 19 nt, Homo sapiens
  misc_RNA (1)...(19): siRNA sense strand
gcuuggagcacuuccuauu

SEQ ID NO: 174547 - RNA, 19 nt, Homo sapiens
  misc_RNA (1)...(19): siRNA sense strand
aaccaaauacauccucuaa

SEQ ID NO: 174548 - RNA, 19 nt, Homo sapiens
  misc_RNA (1)...(19): siRNA sense strand
guuaggaccaaaccucaaa

SEQ ID NO: 174549 - RNA, 19 nt, Homo sapiens
  misc_RNA (1)...(19): siRNA sense strand
uuacuacugugccuugcuu

SEQ ID NO: 174550 - RNA, 19 nt, Homo sapiens
  misc_RNA (1)...(19): siRNA sense strand
aagcauggcuaagaguguu

SEQ ID NO: 174551 - RNA, 19 nt, Homo sapiens
  misc_RNA (1)...(19): siRNA sense strand
ucaccacucuggauauacu

SEQ ID NO: 174552 - RNA, 19 nt, Homo sapiens
  misc_RNA (1)...(19): siRNA sense strand
cacuacaauuucuagcuuu

SEQ ID NO: 174553 - RNA, 19 nt, Homo sapiens
  misc_RNA (1)...(19): siRNA sense strand
agaaguucauuaucacaca

SEQ ID NO: 174554 - RNA, 19 nt, Homo sapiens
  misc_RNA (1)...(19): siRNA sense strand
agaaagcaacuuacauaca

SEQ ID NO: 174555 - RNA, 19 nt, Homo sapiens
  misc_RNA (1)...(19): siRNA sense strand
ggaauagaaagcaacuuac

SEQ ID NO: 174556 - RNA, 19 nt, Homo sapiens
  misc_RNA (1)...(19): siRNA sense strand
guagaaauggaguuacauc

SEQ ID NO: 174557 - RNA, 19 nt, Homo sapiens
  misc_RNA (1)...(19): siRNA sense strand
acacaagguaacuggauuu

SEQ ID NO: 174558 - RNA, 19 nt, Homo sapiens
  misc_RNA (1)...(19): siRNA sense strand
caucuguucugguuuugua

SEQ ID NO: 174559 - RNA, 19 nt, Homo sapiens
  misc_RNA (1)...(19): siRNA sense strand
aucaagagacuacuguaua

SEQ ID NO: 174560 - RNA, 19 nt, Homo sapiens
  misc_RNA (1)...(19): siRNA sense strand
uaucaagagacuacuguau

SEQ ID NO: 174561 - RNA, 19 nt, Homo sapiens
  misc_RNA (1)...(19): siRNA sense strand
ggcuaagaguguucaguag

SEQ ID NO: 174562 - RNA, 19 nt, Homo sapiens
  misc_RNA (1)...(19): siRNA sense strand
guggcuggccuuguuauuu

SEQ ID NO: 174563 - RNA, 19 nt, Homo sapiens
  misc_RNA (1)...(19): siRNA sense strand
ugacaugguugugcaucug

SEQ ID NO: 174564 - RNA, 19 nt, Homo sapiens
  misc_RNA (1)...(19): siRNA sense strand
uuacauccauaugggagaa

SEQ ID NO: 174565 - RNA, 19 nt, Homo sapiens
  misc_RNA (1)...(19): siRNA sense strand
ugaaaugcuguaucuacuu

SEQ ID NO: 174566 - RNA, 19 nt, Homo sapiens
  misc_RNA (1)...(19): siRNA sense strand
cugucaaucuaguacuaua

SEQ ID NO: 174567 - RNA, 19 nt, Homo sapiens
  misc_RNA (1)...(19): siRNA sense strand
gugcaucuguucugguuuu

SEQ ID NO: 174568 - RNA, 19 nt, Homo sapiens
  misc_RNA (1)...(19): siRNA sense strand
guaucuacuuucuuauguc

SEQ ID NO: 174569 - RNA, 19 nt, Homo sapiens
  misc_RNA (1)...(19): siRNA sense strand
uacugugccuugcuuaugu

SEQ ID NO: 174570 - RNA, 19 nt, Homo sapiens
  misc_RNA (1)...(19): siRNA sense strand
ugucuuguuucuccuuuca

SEQ ID NO: 174571 - RNA, 19 nt, Homo sapiens
  misc_RNA (1)...(19): siRNA sense strand
agaauagucuccagaucac

SEQ ID NO: 174572 - RNA, 19 nt, Homo sapiens
  misc_RNA (1)...(19): siRNA sense strand
uugcuuauguuuguuagga

SEQ ID NO: 174573 - RNA, 19 nt, Homo sapiens
  misc_RNA (1)...(19): siRNA sense strand
uaugucuuguuucuccuuu

SEQ ID NO: 174574 - RNA, 19 nt, Homo sapiens
  misc_RNA (1)...(19): siRNA sense strand
auacuggaauagaaagcaa

SEQ ID NO: 174575 - RNA, 19 nt, Homo sapiens
  misc_RNA (1)...(19): siRNA sense strand
uggaaacacacuugacaug

SEQ ID NO: 174576 - RNA, 19 nt, Homo sapiens
  misc_RNA (1)...(19): siRNA sense strand
acuacaauuucuagcuuug

SEQ ID NO: 174577 - RNA, 19 nt, Homo sapiens
  misc_RNA (1)...(19): siRNA sense strand
uguuucuccuuucauguaa

SEQ ID NO: 174578 - RNA, 19 nt, Homo sapiens
  misc_RNA (1)...(19): siRNA sense strand
acauccauaugggagaaua

SEQ ID NO: 174579 - RNA, 19 nt, Homo sapiens
  misc_RNA (1)...(19): siRNA sense strand
uucauuaucacacaaggua

SEQ ID NO: 174580 - RNA, 19 nt, Homo sapiens
  misc_RNA (1)...(19): siRNA sense strand
aaagcaacuuacauacaag

SEQ ID NO: 174581 - RNA, 19 nt, Homo sapiens
  misc_RNA (1)...(19): siRNA sense strand
gauauacuggaauagaaag

SEQ ID NO: 174582 - RNA, 19 nt, Homo sapiens
  misc_RNA (1)...(19): siRNA sense strand
ucacacaagguaacuggau

SEQ ID NO: 174583 - RNA, 19 nt, Homo sapiens
  misc_RNA (1)...(19): siRNA sense strand
cucuggauauacuggaaua

SEQ ID NO: 174584 - RNA, 19 nt, Homo sapiens
  misc_RNA (1)...(19): siRNA sense strand
auaacgauaucaagagacu

SEQ ID NO: 174585 - RNA, 19 nt, Homo sapiens
  misc_RNA (1)...(19): siRNA sense strand
ggagcaccacugauagagu

SEQ ID NO: 174586 - RNA, 19 nt, Homo sapiens
  misc_RNA (1)...(19): siRNA sense strand
gcaacuuacauacaagaac

SEQ ID NO: 174587 - RNA, 19 nt, Homo sapiens
  misc_RNA (1)...(19): siRNA sense strand
uauuucaccacucuggaua

SEQ ID NO: 174588 - RNA, 19 nt, Homo sapiens
  misc_RNA (1)...(19): siRNA sense strand
cagaucacuacaauuucua

SEQ ID NO: 174589 - RNA, 19 nt, Homo sapiens
  misc_RNA (1)...(19): siRNA sense strand
aaaccaaauacauccucua

SEQ ID NO: 174590 - RNA, 19 nt, Homo sapiens
  misc_RNA (1)...(19): siRNA sense strand
aauauuggaaacacacuug

SEQ ID NO: 174591 - RNA, 19 nt, Homo sapiens
  misc_RNA (1)...(19): siRNA sense strand
gaaaugcuguaucuacuuu

SEQ ID NO: 174592 - RNA, 19 nt, Homo sapiens
  misc_RNA (1)...(19): siRNA sense strand
gagcaccacugauagaguu

SEQ ID NO: 174593 - RNA, 19 nt, Homo sapiens
  misc_RNA (1)...(19): siRNA sense strand
gaaacacacuugacauggu

SEQ ID NO: 174594 - RNA, 19 nt, Homo sapiens
  misc_RNA (1)...(19): siRNA sense strand
ccaaauacauccucuaaaa

SEQ ID NO: 174595 - RNA, 19 nt, Homo sapiens
  misc_RNA (1)...(19): siRNA sense strand
gaacuucucaauauuggaa

SEQ ID NO: 174596 - RNA, 19 nt, Homo sapiens
  misc_RNA (1)...(19): siRNA sense strand
guauggagcaccacugaua

SEQ ID NO: 174597 - RNA, 19 nt, Homo sapiens
  misc_RNA (1)...(19): siRNA sense strand
cuaagaguguucaguagaa

SEQ ID NO: 174598 - RNA, 19 nt, Homo sapiens
  misc_RNA (1)...(19): siRNA sense strand
aaacacacuugacaugguu

SEQ ID NO: 174599 - RNA, 19 nt, Homo sapiens
  misc_RNA (1)...(19): siRNA sense strand
gaaguucauuaucacacaa

SEQ ID NO: 174600 - RNA, 19 nt, Homo sapiens
  misc_RNA (1)...(19): siRNA sense strand
uauccuaagugucuucauu

SEQ ID NO: 174601 - RNA, 19 nt, Homo sapiens
  misc_RNA (1)...(19): siRNA sense strand
ucaagagacuacuguauac

SEQ ID NO: 174602 - RNA, 19 nt, Homo sapiens
  misc_RNA (1)...(19): siRNA sense strand
ucacuacaauuucuagcuu

SEQ ID NO: 174603 - RNA, 19 nt, Homo sapiens
  misc_RNA (1)...(19): siRNA sense strand
ccagaucacuacaauuucu

SEQ ID NO: 174604 - RNA, 19 nt, Homo sapiens
  misc_RNA (1)...(19): siRNA sense strand
ucaauuauccuaagugucu

SEQ ID NO: 174605 - RNA, 19 nt, Homo sapiens
  misc_RNA (1)...(19): siRNA sense strand
ugcuguaucuacuuucuua

SEQ ID NO: 174606 - RNA, 19 nt, Homo sapiens
  misc_RNA (1)...(19): siRNA sense strand
uaagaguguucaguagaaa

SEQ ID NO: 174607 - RNA, 19 nt, Homo sapiens
  misc_RNA (1)...(19): siRNA sense strand
uguaacugcugucaaucua

SEQ ID NO: 174608 - RNA, 19 nt, Homo sapiens
  misc_RNA (1)...(19): siRNA sense strand
ggaccaaaccucaaagcau

SEQ ID NO: 174609 - RNA, 19 nt, Homo sapiens
  misc_RNA (1)...(19): siRNA sense strand
uaacugcugucaaucuagu

SEQ ID NO: 174610 - RNA, 19 nt, Homo sapiens
  misc_RNA (1)...(19): siRNA sense strand
cuaagugucuucauuccau

SEQ ID NO: 174611 - RNA, 19 nt, Homo sapiens
  misc_RNA (1)...(19): siRNA sense strand
caguagaaauggaguuaca

SEQ ID NO: 174612 - RNA, 19 nt, Homo sapiens
  misc_RNA (1)...(19): siRNA sense strand
cuccagaucacuacaauuu

SEQ ID NO: 174613 - RNA, 19 nt, Homo sapiens
  misc_RNA (1)...(19): siRNA sense strand
gcaguuauuuugucuacuu

SEQ ID NO: 174614 - RNA, 19 nt, Homo sapiens
  misc_RNA (1)...(19): siRNA sense strand
guagugaaaccaaauacau

SEQ ID NO: 174615 - RNA, 19 nt, Homo sapiens
  misc_RNA (1)...(19): siRNA sense strand
gcuaagaguguucaguaga

SEQ ID NO: 174616 - RNA, 19 nt, Homo sapiens
  misc_RNA (1)...(19): siRNA sense strand
ccucaaagcauggcuaaga

SEQ ID NO: 174617 - RNA, 19 nt, Homo sapiens
  misc_RNA (1)...(19): siRNA sense strand
gugccuugcuuauguuugu

SEQ ID NO: 174618 - RNA, 19 nt, Homo sapiens
  misc_RNA (1)...(19): siRNA sense strand
cacacaagguaacuggauu

SEQ ID NO: 174619 - RNA, 19 nt, Homo sapiens
  misc_RNA (1)...(19): siRNA sense strand
uggcuaagaguguucagua

SEQ ID NO: 174620 - RNA, 19 nt, Homo sapiens
  misc_RNA (1)...(19): siRNA sense strand
ucuacuuucuuaugucuug

SEQ ID NO: 174621 - RNA, 19 nt, Homo sapiens
  misc_RNA (1)...(19): siRNA sense strand
gcuuggagcacuuccuauu

SEQ ID NO: 174622 - RNA, 19 nt, Homo sapiens
  misc_RNA (1)...(19): siRNA sense strand
gauaucaagagacuacugu

SEQ ID NO: 174623 - RNA, 19 nt, Homo sapiens
  misc_RNA (1)...(19): siRNA sense strand
aaccaaauacauccucuaa

SEQ ID NO: 174624 - RNA, 19 nt, Homo sapiens
  misc_RNA (1)...(19): siRNA sense strand
guuaggaccaaaccucaaa

SEQ ID NO: 174625 - RNA, 19 nt, Homo sapiens
  misc_RNA (1)...(19): siRNA sense strand
uuacuacugugccuugcuu

SEQ ID NO: 174626 - RNA, 19 nt, Homo sapiens
  misc_RNA (1)...(19): siRNA sense strand
aagcauggcuaagaguguu

SEQ ID NO: 174627 - RNA, 19 nt, Homo sapiens
  misc_RNA (1)...(19): siRNA sense strand
cacuacaauuucuagcuuu

SEQ ID NO: 174628 - RNA, 19 nt, Homo sapiens
  misc_RNA (1)...(19): siRNA sense strand
agaaguucauuaucacaca

SEQ ID NO: 174629 - RNA, 19 nt, Homo sapiens
  misc_RNA (1)...(19): siRNA sense strand
guagaaauggaguuacauc

SEQ ID NO: 174630 - RNA, 19 nt, Homo sapiens
  misc_RNA (1)...(19): siRNA sense strand
acacaagguaacuggauuu

SEQ ID NO: 174631 - RNA, 19 nt, Homo sapiens
  misc_RNA (1)...(19): siRNA sense strand
uaucaagagacuacuguau

SEQ ID NO: 174632 - RNA, 19 nt, Homo sapiens
  misc_RNA (1)...(19): siRNA sense strand
aucaagagacuacuguaua

SEQ ID NO: 174633 - RNA, 19 nt, Homo sapiens
  misc_RNA (1)...(19): siRNA sense strand
caucuguucugguuuugua

SEQ ID NO: 174634 - RNA, 19 nt, Homo sapiens
  misc_RNA (1)...(19): siRNA sense strand
ggcuaagaguguucaguag

SEQ ID NO: 174635 - RNA, 19 nt, Homo sapiens
  misc_RNA (1)...(19): siRNA sense strand
ugacaugguugugcaucug

SEQ ID NO: 174636 - RNA, 19 nt, Homo sapiens
  misc_RNA (1)...(19): siRNA sense strand
uuacauccauaugggagaa

SEQ ID NO: 174637 - RNA, 19 nt, Homo sapiens
  misc_RNA (1)...(19): siRNA sense strand
ugaaaugcuguaucuacuu

SEQ ID NO: 174638 - RNA, 19 nt, Homo sapiens
  misc_RNA (1)...(19): siRNA sense strand
cugucaaucuaguacuaua

SEQ ID NO: 174639 - RNA, 19 nt, Homo sapiens
  misc_RNA (1)...(19): siRNA sense strand
gugcaucuguucugguuuu

SEQ ID NO: 174640 - RNA, 19 nt, Homo sapiens
  misc_RNA (1)...(19): siRNA sense strand
guaucuacuuucuuauguc

SEQ ID NO: 174641 - RNA, 19 nt, Homo sapiens
  misc_RNA (1)...(19): siRNA sense strand
uacugugccuugcuuaugu

SEQ ID NO: 174642 - RNA, 19 nt, Homo sapiens
  misc_RNA (1)...(19): siRNA sense strand
ugucuuguuucuccuuuca

SEQ ID NO: 174643 - RNA, 19 nt, Homo sapiens
  misc_RNA (1)...(19): siRNA sense strand
agaauagucuccagaucac

SEQ ID NO: 174644 - RNA, 19 nt, Homo sapiens
  misc_RNA (1)...(19): siRNA sense strand
uugcuuauguuuguuagga

SEQ ID NO: 174645 - RNA, 19 nt, Homo sapiens
  misc_RNA (1)...(19): siRNA sense strand
uaugucuuguuucuccuuu

SEQ ID NO: 174646 - RNA, 19 nt, Homo sapiens
  misc_RNA (1)...(19): siRNA sense strand
acuacaauuucuagcuuug

SEQ ID NO: 174647 - RNA, 19 nt, Homo sapiens
  misc_RNA (1)...(19): siRNA sense strand
uguuucuccuuucauguaa

SEQ ID NO: 174648 - RNA, 19 nt, Homo sapiens
  misc_RNA (1)...(19): siRNA sense strand
uggaaacacacuugacaug

SEQ ID NO: 174649 - RNA, 19 nt, Homo sapiens
  misc_RNA (1)...(19): siRNA sense strand
acauccauaugggagaaua

SEQ ID NO: 174650 - RNA, 19 nt, Homo sapiens
  misc_RNA (1)...(19): siRNA sense strand
uucauuaucacacaaggua

SEQ ID NO: 174651 - RNA, 19 nt, Homo sapiens
  misc_RNA (1)...(19): siRNA sense strand
ucacacaagguaacuggau

SEQ ID NO: 174652 - RNA, 19 nt, Homo sapiens
  misc_RNA (1)...(19): siRNA sense strand
auaacgauaucaagagacu

SEQ ID NO: 174653 - RNA, 19 nt, Homo sapiens
  misc_RNA (1)...(19): siRNA sense strand
ggagcaccacugauagagu

SEQ ID NO: 174654 - RNA, 19 nt, Homo sapiens
  misc_RNA (1)...(19): siRNA sense strand
cagaucacuacaauuucua

SEQ ID NO: 174655 - RNA, 19 nt, Homo sapiens
  misc_RNA (1)...(19): siRNA sense strand
aaaccaaauacauccucua

SEQ ID NO: 174656 - RNA, 19 nt, Homo sapiens
  misc_RNA (1)...(19): siRNA sense strand
aauauuggaaacacacuug

SEQ ID NO: 174657 - RNA, 19 nt, Homo sapiens
  misc_RNA (1)...(19): siRNA sense strand
ggaagaagauugccaacaa

SEQ ID NO: 174658 - RNA, 19 nt, Homo sapiens
  misc_RNA (1)...(19): siRNA sense strand
gcaaagaagacauugaaua

SEQ ID NO: 174659 - RNA, 19 nt, Homo sapiens
  misc_RNA (1)...(19): siRNA sense strand
gaagaaaucucugauggau

SEQ ID NO: 174660 - RNA, 19 nt, Homo sapiens
  misc_RNA (1)...(19): siRNA sense strand
agaaaucucugauggauau

SEQ ID NO: 174661 - RNA, 19 nt, Homo sapiens
  misc_RNA (1)...(19): siRNA sense strand
aaguucagcuucucuauua

SEQ ID NO: 174662 - RNA, 19 nt, Homo sapiens
  misc_RNA (1)...(19): siRNA sense strand
gaauugcucuggcauuuua

SEQ ID NO: 174663 - RNA, 19 nt, Homo sapiens
  misc_RNA (1)...(19): siRNA sense strand
cuacagcccuaucaaauga

SEQ ID NO: 174664 - RNA, 19 nt, Homo sapiens
  misc_RNA (1)...(19): siRNA sense strand
gguccaggcugugaaauuu

SEQ ID NO: 174665 - RNA, 19 nt, Homo sapiens
  misc_RNA (1)...(19): siRNA sense strand
gacgucaguucccaaguua

SEQ ID NO: 174666 - RNA, 19 nt, Homo sapiens
  misc_RNA (1)...(19): siRNA sense strand
agagaaacauucagccuaa

SEQ ID NO: 174667 - RNA, 19 nt, Homo sapiens
  misc_RNA (1)...(19): siRNA sense strand
caggagcgcuggcaauuga

SEQ ID NO: 174668 - RNA, 19 nt, Homo sapiens
  misc_RNA (1)...(19): siRNA sense strand
ggaaugaucgagauuguga

SEQ ID NO: 174669 - RNA, 19 nt, Homo sapiens
  misc_RNA (1)...(19): siRNA sense strand
ucaccaagauggccaagaa

SEQ ID NO: 174670 - RNA, 19 nt, Homo sapiens
  misc_RNA (1)...(19): siRNA sense strand
cacuauggcuugaguuuaa

SEQ ID NO: 174671 - RNA, 19 nt, Homo sapiens
  misc_RNA (1)...(19): siRNA sense strand
acgaugauguucugcauua

SEQ ID NO: 174672 - RNA, 19 nt, Homo sapiens
  misc_RNA (1)...(19): siRNA sense strand
gaacaccgaccucacaguu

SEQ ID NO: 174673 - RNA, 19 nt, Homo sapiens
  misc_RNA (1)...(19): siRNA sense strand
gaugggaacuucuggaaag

SEQ ID NO: 174674 - RNA, 19 nt, Homo sapiens
  misc_RNA (1)...(19): siRNA sense strand
ccauucuucuggacaauua

SEQ ID NO: 174675 - RNA, 19 nt, Homo sapiens
  misc_RNA (1)...(19): siRNA sense strand
gcauuaccuucuacaauug

SEQ ID NO: 174676 - RNA, 19 nt, Homo sapiens
  misc_RNA (1)...(19): siRNA sense strand
gaagggaagucugggauca

SEQ ID NO: 174677 - RNA, 19 nt, Homo sapiens
  misc_RNA (1)...(19): siRNA sense strand
gagaauacguccuccacau

SEQ ID NO: 174678 - RNA, 19 nt, Homo sapiens
  misc_RNA (1)...(19): siRNA sense strand
gaaagacgccacgacaauu

SEQ ID NO: 174679 - RNA, 19 nt, Homo sapiens
  misc_RNA (1)...(19): siRNA sense strand
gcaagaaauuguggccaaa

SEQ ID NO: 174680 - RNA, 19 nt, Homo sapiens
  misc_RNA (1)...(19): siRNA sense strand
cagcuucucuauuauguga

SEQ ID NO: 174681 - RNA, 19 nt, Homo sapiens
  misc_RNA (1)...(19): siRNA sense strand
guggagagauuuguuuauu

SEQ ID NO: 174682 - RNA, 19 nt, Homo sapiens
  misc_RNA (1)...(19): siRNA sense strand
gagcagaaaugcccaacca

SEQ ID NO: 174683 - RNA, 19 nt, Homo sapiens
  misc_RNA (1)...(19): siRNA sense strand
cagaggaggugcuguggaa

SEQ ID NO: 174684 - RNA, 19 nt, Homo sapiens
  misc_RNA (1)...(19): siRNA sense strand
aaagucacccuugauauua

SEQ ID NO: 174685 - RNA, 19 nt, Homo sapiens
  misc_RNA (1)...(19): siRNA sense strand
gcugaagcgugguuuaaga

SEQ ID NO: 174686 - RNA, 19 nt, Homo sapiens
  misc_RNA (1)...(19): siRNA sense strand
gaagggagaagaccaagga

SEQ ID NO: 174687 - RNA, 19 nt, Homo sapiens
  misc_RNA (1)...(19): siRNA sense strand
cccgaaagcuuuagaguuc

SEQ ID NO: 174688 - RNA, 19 nt, Homo sapiens
  misc_RNA (1)...(19): siRNA sense strand
caacuaacccagacaagga

SEQ ID NO: 174689 - RNA, 19 nt, Homo sapiens
  misc_RNA (1)...(19): siRNA sense strand
ugcauuaccuucuacaauu

SEQ ID NO: 174690 - RNA, 19 nt, Homo sapiens
  misc_RNA (1)...(19): siRNA sense strand
gguacgagaucuacgacaa

SEQ ID NO: 174691 - RNA, 19 nt, Homo sapiens
  misc_RNA (1)...(19): siRNA sense strand
gcaauuggaggcgaucaua

SEQ ID NO: 174692 - RNA, 19 nt, Homo sapiens
  misc_RNA (1)...(19): siRNA sense strand
gaagaagauugccaacaac

SEQ ID NO: 174693 - RNA, 19 nt, Homo sapiens
  misc_RNA (1)...(19): siRNA sense strand
gcaaggaccacgagagugu

SEQ ID NO: 174694 - RNA, 19 nt, Homo sapiens
  misc_RNA (1)...(19): siRNA sense strand
gcuuuagaguuccauauga

SEQ ID NO: 174695 - RNA, 19 nt, Homo sapiens
  misc_RNA (1)...(19): siRNA sense strand
ugacgucaguucccaaguu

SEQ ID NO: 174696 - RNA, 19 nt, Homo sapiens
  misc_RNA (1)...(19): siRNA sense strand
ggaggacgaugauguucug

SEQ ID NO: 174697 - RNA, 19 nt, Homo sapiens
  misc_RNA (1)...(19): siRNA sense strand
gccaacaacugcaucuuca

SEQ ID NO: 174698 - RNA, 19 nt, Homo sapiens
  misc_RNA (1)...(19): siRNA sense strand
gcccacacuuccagaaauu

SEQ ID NO: 174699 - RNA, 19 nt, Homo sapiens
  misc_RNA (1)...(19): siRNA sense strand
aagaugaaguccugaauca

SEQ ID NO: 174700 - RNA, 19 nt, Homo sapiens
  misc_RNA (1)...(19): siRNA sense strand
ccaaguaaucgagauguua

SEQ ID NO: 174701 - RNA, 19 nt, Homo sapiens
  misc_RNA (1)...(19): siRNA sense strand
aagaauugcucuggcauuu

SEQ ID NO: 174702 - RNA, 19 nt, Homo sapiens
  misc_RNA (1)...(19): siRNA sense strand
cagcagaggacaaagaauu

SEQ ID NO: 174703 - RNA, 19 nt, Homo sapiens
  misc_RNA (1)...(19): siRNA sense strand
caagaacggagaagagauu

SEQ ID NO: 174704 - RNA, 19 nt, Homo sapiens
  misc_RNA (1)...(19): siRNA sense strand
ggaccggguucgagcagaa

SEQ ID NO: 174705 - RNA, 19 nt, Homo sapiens
  misc_RNA (1)...(19): siRNA sense strand
ugaucgagauugugaaaga

SEQ ID NO: 174706 - RNA, 19 nt, Homo sapiens
  misc_RNA (1)...(19): siRNA sense strand
guaaaguaauggccuccaa

SEQ ID NO: 174707 - RNA, 19 nt, Homo sapiens
  misc_RNA (1)...(19): siRNA sense strand
uaagagccauugcaguuca

SEQ ID NO: 174708 - RNA, 19 nt, Homo sapiens
  misc_RNA (1)...(19): siRNA sense strand
aaagagagagugccauuug

SEQ ID NO: 174709 - RNA, 19 nt, Homo sapiens
  misc_RNA (1)...(19): siRNA sense strand
ggagagauuuguuuauucc

SEQ ID NO: 174710 - RNA, 19 nt, Homo sapiens
  misc_RNA (1)...(19): siRNA sense strand
caacacgggagcauuuaaa

SEQ ID NO: 174711 - RNA, 19 nt, Homo sapiens
  misc_RNA (1)...(19): siRNA sense strand
gggcaacacgggagcauuu

SEQ ID NO: 174712 - RNA, 19 nt, Homo sapiens
  misc_RNA (1)...(19): siRNA sense strand
cauuucaacuggugacaaa

SEQ ID NO: 174713 - RNA, 19 nt, Homo sapiens
  misc_RNA (1)...(19): siRNA sense strand
gcacgacuuuacccaacaa

SEQ ID NO: 174714 - RNA, 19 nt, Homo sapiens
  misc_RNA (1)...(19): siRNA sense strand
caagauggccaagaagaaa

SEQ ID NO: 174715 - RNA, 19 nt, Homo sapiens
  misc_RNA (1)...(19): siRNA sense strand
gcaguggagagauuuguuu

SEQ ID NO: 174716 - RNA, 19 nt, Homo sapiens
  misc_RNA (1)...(19): siRNA sense strand
guaauggccuccaagaaaa

SEQ ID NO: 174717 - RNA, 19 nt, Homo sapiens
  misc_RNA (1)...(19): siRNA sense strand
ggacgaugauguucugcau

SEQ ID NO: 174718 - RNA, 19 nt, Homo sapiens
  misc_RNA (1)...(19): siRNA sense strand
aagcauauccuaagcuauu

SEQ ID NO: 174719 - RNA, 19 nt, Homo sapiens
  misc_RNA (1)...(19): siRNA sense strand
gcaaaguucagcuucucua

SEQ ID NO: 174720 - RNA, 19 nt, Homo sapiens
  misc_RNA (1)...(19): siRNA sense strand
acacaaaccuacugaucau

SEQ ID NO: 174721 - RNA, 19 nt, Homo sapiens
  misc_RNA (1)...(19): siRNA sense strand
aaacucacgucugcaacua

SEQ ID NO: 174722 - RNA, 19 nt, Homo sapiens
  misc_RNA (1)...(19): siRNA sense strand
cggaguaccuguggaagaa

SEQ ID NO: 174723 - RNA, 19 nt, Homo sapiens
  misc_RNA (1)...(19): siRNA sense strand
caucaaacaaggagagaaa

SEQ ID NO: 174724 - RNA, 19 nt, Homo sapiens
  misc_RNA (1)...(19): siRNA sense strand
gcaguuuaauugguuucua

SEQ ID NO: 174725 - RNA, 19 nt, Homo sapiens
  misc_RNA (1)...(19): siRNA sense strand
cgagacaggaaaccuauuu

SEQ ID NO: 174726 - RNA, 19 nt, Homo sapiens
  misc_RNA (1)...(19): siRNA sense strand
gacugaaucuuuggaucua

SEQ ID NO: 174727 - RNA, 19 nt, Homo sapiens
  misc_RNA (1)...(19): siRNA sense strand
gccaagacaugcuuauuuu

SEQ ID NO: 174728 - RNA, 19 nt, Homo sapiens
  misc_RNA (1)...(19): siRNA sense strand
agaagagauucacguggua

SEQ ID NO: 174729 - RNA, 19 nt, Homo sapiens
  misc_RNA (1)...(19): siRNA sense strand
gagagugccauuugugcua

SEQ ID NO: 174730 - RNA, 19 nt, Homo sapiens
  misc_RNA (1)...(19): siRNA sense strand
gaauacguccuccacaugu

SEQ ID NO: 174731 - RNA, 19 nt, Homo sapiens
  misc_RNA (1)...(19): siRNA sense strand
ucaaagacuugcccaaagg

SEQ ID NO: 174732 - RNA, 19 nt, Homo sapiens
  misc_RNA (1)...(19): siRNA sense strand
gaggugcuguggaaugugu

SEQ ID NO: 174733 - RNA, 19 nt, Homo sapiens
  misc_RNA (1)...(19): siRNA sense strand
aaaguuuccugggcauuaa

SEQ ID NO: 174734 - RNA, 19 nt, Homo sapiens
  misc_RNA (1)...(19): siRNA sense strand
gugaugaucugcgccaaga

SEQ ID NO: 174735 - RNA, 19 nt, Homo sapiens
  misc_RNA (1)...(19): siRNA sense strand
aagcuucaaugcugacaaa

SEQ ID NO: 174736 - RNA, 19 nt, Homo sapiens
  misc_RNA (1)...(19): siRNA sense strand
aaacaaggagagaaacauu

SEQ ID NO: 174737 - RNA, 19 nt, Homo sapiens
  misc_RNA (1)...(19): siRNA sense strand
gggcauuaauaaagagaga

SEQ ID NO: 174738 - RNA, 19 nt, Homo sapiens
  misc_RNA (1)...(19): siRNA sense strand
gcaacacgggagcauuuaa

SEQ ID NO: 174739 - RNA, 19 nt, Homo sapiens
  misc_RNA (1)...(19): siRNA sense strand
gcagagguucgcugugauu

SEQ ID NO: 174740 - RNA, 19 nt, Homo sapiens
  misc_RNA (1)...(19): siRNA sense strand
gcauauccuaagcuauuua

SEQ ID NO: 174741 - RNA, 19 nt, Homo sapiens
  misc_RNA (1)...(19): siRNA sense strand
ccauaugguugcauuucaa

SEQ ID NO: 174742 - RNA, 19 nt, Homo sapiens
  misc_RNA (1)...(19): siRNA sense strand
gacugcaacuucucagaug

SEQ ID NO: 174743 - RNA, 19 nt, Homo sapiens
  misc_RNA (1)...(19): siRNA sense strand
ccaguuaacaagcaaagaa

SEQ ID NO: 174744 - RNA, 19 nt, Homo sapiens
  misc_RNA (1)...(19): siRNA sense strand
ugaaagacgccacgacaau

SEQ ID NO: 174745 - RNA, 19 nt, Homo sapiens
  misc_RNA (1)...(19): siRNA sense strand
cgaaucauggagucuauuu

SEQ ID NO: 174746 - RNA, 19 nt, Homo sapiens
  misc_RNA (1)...(19): siRNA sense strand
aguaauggccuccaagaaa

SEQ ID NO: 174747 - RNA, 19 nt, Homo sapiens
  misc_RNA (1)...(19): siRNA sense strand
gcugauagaccaccguuuc

SEQ ID NO: 174748 - RNA, 19 nt, Homo sapiens
  misc_RNA (1)...(19): siRNA sense strand
gaaauuucaggacaucugu

SEQ ID NO: 174749 - RNA, 19 nt, Homo sapiens
  misc_RNA (1)...(19): siRNA sense strand
ggaauaggcgacagacaca

SEQ ID NO: 174750 - RNA, 19 nt, Homo sapiens
  misc_RNA (1)...(19): siRNA sense strand
gcaacgugcacgacgauga

SEQ ID NO: 174751 - RNA, 19 nt, Homo sapiens
  misc_RNA (1)...(19): siRNA sense strand
uguaagagccauugcaguu

SEQ ID NO: 174752 - RNA, 19 nt, Homo sapiens
  misc_RNA (1)...(19): siRNA sense strand
cgauagcccugccuaagca

SEQ ID NO: 174753 - RNA, 19 nt, Homo sapiens
  misc_RNA (1)...(19): siRNA sense strand
caagaagaaaucucugaug

SEQ ID NO: 174754 - RNA, 19 nt, Homo sapiens
  misc_RNA (1)...(19): siRNA sense strand
gaguaccuguggaagaaga

SEQ ID NO: 174755 - RNA, 19 nt, Homo sapiens
  misc_RNA (1)...(19): siRNA sense strand
gagguucgcugugauucug

SEQ ID NO: 174756 - RNA, 19 nt, Homo sapiens
  misc_RNA (1)...(19): siRNA sense strand
ggacugcaacuucucagau

SEQ ID NO: 174757 - RNA, 19 nt, Homo sapiens
  misc_RNA (1)...(19): siRNA sense strand
gcacagagcugcacuccaa

SEQ ID NO: 174758 - RNA, 19 nt, Homo sapiens
  misc_RNA (1)...(19): siRNA sense strand
gagcugaccuucaucaaga

SEQ ID NO: 174759 - RNA, 19 nt, Homo sapiens
  misc_RNA (1)...(19): siRNA sense strand
agagaaacauggcccaaua

SEQ ID NO: 174760 - RNA, 19 nt, Homo sapiens
  misc_RNA (1)...(19): siRNA sense strand
gagcugcacuccaaugaga

SEQ ID NO: 174761 - RNA, 19 nt, Homo sapiens
  misc_RNA (1)...(19): siRNA sense strand
aaaccaaggcugagaaaua

SEQ ID NO: 174762 - RNA, 19 nt, Homo sapiens
  misc_RNA (1)...(19): siRNA sense strand
ggaagaagcagcugugguu

SEQ ID NO: 174763 - RNA, 19 nt, Homo sapiens
  misc_RNA (1)...(19): siRNA sense strand
ccaaccagcuuaagaggaa

SEQ ID NO: 174764 - RNA, 19 nt, Homo sapiens
  misc_RNA (1)...(19): siRNA sense strand
gaagugaacauguggauca

SEQ ID NO: 174765 - RNA, 19 nt, Homo sapiens
  misc_RNA (1)...(19): siRNA sense strand
ccaaggaccugaagaacau

SEQ ID NO: 174766 - RNA, 19 nt, Homo sapiens
  misc_RNA (1)...(19): siRNA sense strand
gagcagugccuuugaagaa

SEQ ID NO: 174767 - RNA, 19 nt, Homo sapiens
  misc_RNA (1)...(19): siRNA sense strand
gaaccaggcccucuucaug

SEQ ID NO: 174768 - RNA, 19 nt, Homo sapiens
  misc_RNA (1)...(19): siRNA sense strand
gaggaccacugcagcauug

SEQ ID NO: 174769 - RNA, 19 nt, Homo sapiens
  misc_RNA (1)...(19): siRNA sense strand
aaacauggcccaauacuuc

SEQ ID NO: 174770 - RNA, 19 nt, Homo sapiens
  misc_RNA (1)...(19): siRNA sense strand
ggaagauccucaucaagca

SEQ ID NO: 174771 - RNA, 19 nt, Homo sapiens
  misc_RNA (1)...(19): siRNA sense strand
gcaacucuaucaagaaugg

SEQ ID NO: 174772 - RNA, 19 nt, Homo sapiens
  misc_RNA (1)...(19): siRNA sense strand
gcaccaagcagaagacaga

SEQ ID NO: 174773 - RNA, 19 nt, Homo sapiens
  misc_RNA (1)...(19): siRNA sense strand
caaacccuaugccaacuuu

SEQ ID NO: 174774 - RNA, 19 nt, Homo sapiens
  misc_RNA (1)...(19): siRNA sense strand
gcagcaagaucuacuacuc

SEQ ID NO: 174775 - RNA, 19 nt, Homo sapiens
  misc_RNA (1)...(19): siRNA sense strand
ucacauugcuuugucauuc

SEQ ID NO: 174776 - RNA, 19 nt, Homo sapiens
  misc_RNA (1)...(19): siRNA sense strand
aggaagacauguuuaguga

SEQ ID NO: 174777 - RNA, 19 nt, Homo sapiens
  misc_RNA (1)...(19): siRNA sense strand
caaacuacguggaagagau

SEQ ID NO: 174778 - RNA, 19 nt, Homo sapiens
  misc_RNA (1)...(19): siRNA sense strand
caagagggccagacaguga

SEQ ID NO: 174779 - RNA, 19 nt, Homo sapiens
  misc_RNA (1)...(19): siRNA sense strand
cagcaacucuaucaagaau

SEQ ID NO: 174780 - RNA, 19 nt, Homo sapiens
  misc_RNA (1)...(19): siRNA sense strand
gggcuuaacuuggcugaug

SEQ ID NO: 174781 - RNA, 19 nt, Homo sapiens
  misc_RNA (1)...(19): siRNA sense strand
caacucauaugccaucucu

SEQ ID NO: 174782 - RNA, 19 nt, Homo sapiens
  misc_RNA (1)...(19): siRNA sense strand
ggagaauggugaccucagu

SEQ ID NO: 174783 - RNA, 19 nt, Homo sapiens
  misc_RNA (1)...(19): siRNA sense strand
ggauguugcugccgacuca

SEQ ID NO: 174784 - RNA, 19 nt, Homo sapiens
  misc_RNA (1)...(19): siRNA sense strand
gaugggaugccaguuauuu

SEQ ID NO: 174785 - RNA, 19 nt, Homo sapiens
  misc_RNA (1)...(19): siRNA sense strand
ucucugaacuugucgucua

SEQ ID NO: 174786 - RNA, 19 nt, Homo sapiens
  misc_RNA (1)...(19): siRNA sense strand
ggaccagucacauugcuuu

SEQ ID NO: 174787 - RNA, 19 nt, Homo sapiens
  misc_RNA (1)...(19): siRNA sense strand
gagugucccuuccugaguu

SEQ ID NO: 174788 - RNA, 19 nt, Homo sapiens
  misc_RNA (1)...(19): siRNA sense strand
gaaacauggcccaauacuu

SEQ ID NO: 174789 - RNA, 19 nt, Homo sapiens
  misc_RNA (1)...(19): siRNA sense strand
ggaaaccaaggcugagaaa

SEQ ID NO: 174790 - RNA, 19 nt, Homo sapiens
  misc_RNA (1)...(19): siRNA sense strand
gcacagcugagccugacua

SEQ ID NO: 174791 - RNA, 19 nt, Homo sapiens
  misc_RNA (1)...(19): siRNA sense strand
caucagcuacuaugagaaa

SEQ ID NO: 174792 - RNA, 19 nt, Homo sapiens
  misc_RNA (1)...(19): siRNA sense strand
caugugccaucucuauuga

SEQ ID NO: 174793 - RNA, 19 nt, Homo sapiens
  misc_RNA (1)...(19): siRNA sense strand
gaagaccucacgggacuuu

SEQ ID NO: 174794 - RNA, 19 nt, Homo sapiens
  misc_RNA (1)...(19): siRNA sense strand
gcaccgucaugacuuuguu

SEQ ID NO: 174795 - RNA, 19 nt, Homo sapiens
  misc_RNA (1)...(19): siRNA sense strand
gaugggcugucgcugcauu

SEQ ID NO: 174796 - RNA, 19 nt, Homo sapiens
  misc_RNA (1)...(19): siRNA sense strand
gaggaagacauguuuagug

SEQ ID NO: 174797 - RNA, 19 nt, Homo sapiens
  misc_RNA (1)...(19): siRNA sense strand
ggagcucucugaacuuguc

SEQ ID NO: 174798 - RNA, 19 nt, Homo sapiens
  misc_RNA (1)...(19): siRNA sense strand
gcagcuggaugcaguaugc

SEQ ID NO: 174799 - RNA, 19 nt, Homo sapiens
  misc_RNA (1)...(19): siRNA sense strand
gaaggacucgggucaaugg

SEQ ID NO: 174800 - RNA, 19 nt, Homo sapiens
  misc_RNA (1)...(19): siRNA sense strand
gcagugccuuugaagaaca

SEQ ID NO: 174801 - RNA, 19 nt, Homo sapiens
  misc_RNA (1)...(19): siRNA sense strand
gaauggaauuucgccugaa

SEQ ID NO: 174802 - RNA, 19 nt, Homo sapiens
  misc_RNA (1)...(19): siRNA sense strand
ugaagaacaacuacaguga

SEQ ID NO: 174803 - RNA, 19 nt, Homo sapiens
  misc_RNA (1)...(19): siRNA sense strand
cgacaucugccaaagaaug

SEQ ID NO: 174804 - RNA, 19 nt, Homo sapiens
  misc_RNA (1)...(19): siRNA sense strand
gaccaguucuccagugagu

SEQ ID NO: 174805 - RNA, 19 nt, Homo sapiens
  misc_RNA (1)...(19): siRNA sense strand
gggaccaguucuccaguga

SEQ ID NO: 174806 - RNA, 19 nt, Homo sapiens
  misc_RNA (1)...(19): siRNA sense strand
gcaguuugcucagcuguac

SEQ ID NO: 174807 - RNA, 19 nt, Homo sapiens
  misc_RNA (1)...(19): siRNA sense strand
ugacaagccuaugcagaug

SEQ ID NO: 174808 - RNA, 19 nt, Homo sapiens
  misc_RNA (1)...(19): siRNA sense strand
acgcaacccuggcuucuau

SEQ ID NO: 174809 - RNA, 19 nt, Homo sapiens
  misc_RNA (1)...(19): siRNA sense strand
gcgacuacacgcucucuuu

SEQ ID NO: 174810 - RNA, 19 nt, Homo sapiens
  misc_RNA (1)...(19): siRNA sense strand
ccagucauccuguccauug

SEQ ID NO: 174811 - RNA, 19 nt, Homo sapiens
  misc_RNA (1)...(19): siRNA sense strand
ccaccaagaucaaguucuc

SEQ ID NO: 174812 - RNA, 19 nt, Homo sapiens
  misc_RNA (1)...(19): siRNA sense strand
gcaguuccuucuugacuac

SEQ ID NO: 174813 - RNA, 19 nt, Homo sapiens
  misc_RNA (1)...(19): siRNA sense strand
acucauaugccaucucuuu

SEQ ID NO: 174814 - RNA, 19 nt, Homo sapiens
  misc_RNA (1)...(19): siRNA sense strand
acagagcagugccuuugaa

SEQ ID NO: 174815 - RNA, 19 nt, Homo sapiens
  misc_RNA (1)...(19): siRNA sense strand
cccgacaucugccaaagaa

SEQ ID NO: 174816 - RNA, 19 nt, Homo sapiens
  misc_RNA (1)...(19): siRNA sense strand
ugacauucgugaaauuaag

SEQ ID NO: 174817 - RNA, 19 nt, Homo sapiens
  misc_RNA (1)...(19): siRNA sense strand
gcugauggaggauacauug

SEQ ID NO: 174818 - RNA, 19 nt, Homo sapiens
  misc_RNA (1)...(19): siRNA sense strand
guaugaggaagacauguuu

SEQ ID NO: 174819 - RNA, 19 nt, Homo sapiens
  misc_RNA (1)...(19): siRNA sense strand
aagagaagauuggcacaga

SEQ ID NO: 174820 - RNA, 19 nt, Homo sapiens
  misc_RNA (1)...(19): siRNA sense strand
gggacacacuccucaccaa

SEQ ID NO: 174821 - RNA, 19 nt, Homo sapiens
  misc_RNA (1)...(19): siRNA sense strand
gacaucagcaacucuauca

SEQ ID NO: 174822 - RNA, 19 nt, Homo sapiens
  misc_RNA (1)...(19): siRNA sense strand
uuucaagugugcagucaaa

SEQ ID NO: 174823 - RNA, 19 nt, Homo sapiens
  misc_RNA (1)...(19): siRNA sense strand
gaucgaggagccauacuuc

SEQ ID NO: 174824 - RNA, 19 nt, Homo sapiens
  misc_RNA (1)...(19): siRNA sense strand
cauugacauucgugaaauu

SEQ ID NO: 174825 - RNA, 19 nt, Homo sapiens
  misc_RNA (1)...(19): siRNA sense strand
gcauugcccagcagagaaa

SEQ ID NO: 174826 - RNA, 19 nt, Homo sapiens
  misc_RNA (1)...(19): siRNA sense strand
cggaugggaugccaguuau

SEQ ID NO: 174827 - RNA, 19 nt, Homo sapiens
  misc_RNA (1)...(19): siRNA sense strand
aagaucaaguucucagaug

SEQ ID NO: 174828 - RNA, 19 nt, Homo sapiens
  misc_RNA (1)...(19): siRNA sense strand
gggagcacuuggacgagaa

SEQ ID NO: 174829 - RNA, 19 nt, Homo sapiens
  misc_RNA (1)...(19): siRNA sense strand
aagcugcgcuaucccauca

SEQ ID NO: 174830 - RNA, 19 nt, Homo sapiens
  misc_RNA (1)...(19): siRNA sense strand
ggaguucgacagccuuguu

SEQ ID NO: 174831 - RNA, 19 nt, Homo sapiens
  misc_RNA (1)...(19): siRNA sense strand
acaacccucuuucccacua

SEQ ID NO: 174832 - RNA, 19 nt, Homo sapiens
  misc_RNA (1)...(19): siRNA sense strand
agagaagauuggcacagaa

SEQ ID NO: 174833 - RNA, 19 nt, Homo sapiens
  misc_RNA (1)...(19): siRNA sense strand
gcugagcgccugcuuacug

SEQ ID NO: 174834 - RNA, 19 nt, Homo sapiens
  misc_RNA (1)...(19): siRNA sense strand
uggaugaguuugucaccuu

SEQ ID NO: 174835 - RNA, 19 nt, Homo sapiens
  misc_RNA (1)...(19): siRNA sense strand
ccaagcagaagacagaguu

SEQ ID NO: 174836 - RNA, 19 nt, Homo sapiens
  misc_RNA (1)...(19): siRNA sense strand
ugacuuuguucuacuccaa

SEQ ID NO: 174837 - RNA, 19 nt, Homo sapiens
  misc_RNA (1)...(19): siRNA sense strand
ccggaugggaugccaguua

SEQ ID NO: 174838 - RNA, 19 nt, Homo sapiens
  misc_RNA (1)...(19): siRNA sense strand
ccacaccccugcagauuga

SEQ ID NO: 174839 - RNA, 19 nt, Homo sapiens
  misc_RNA (1)...(19): siRNA sense strand
gagcaucucgcagaccauu

SEQ ID NO: 174840 - RNA, 19 nt, Homo sapiens
  misc_RNA (1)...(19): siRNA sense strand
gcuaccagcagccguuuga

SEQ ID NO: 174841 - RNA, 19 nt, Homo sapiens
  misc_RNA (1)...(19): siRNA sense strand
cucagucccuucaguggua

SEQ ID NO: 174842 - RNA, 19 nt, Homo sapiens
  misc_RNA (1)...(19): siRNA sense strand
acaagccuaugcagaugaa

SEQ ID NO: 174843 - RNA, 19 nt, Homo sapiens
  misc_RNA (1)...(19): siRNA sense strand
aaccaaggcugagaaauac

SEQ ID NO: 174844 - RNA, 19 nt, Homo sapiens
  misc_RNA (1)...(19): siRNA sense strand
gccauugacauucgugaaa

SEQ ID NO: 174845 - RNA, 19 nt, Homo sapiens
  misc_RNA (1)...(19): siRNA sense strand
gagcacaggcugagcacau

SEQ ID NO: 174846 - RNA, 19 nt, Homo sapiens
  misc_RNA (1)...(19): siRNA sense strand
ccauugacauucgugaaau

SEQ ID NO: 174847 - RNA, 19 nt, Homo sapiens
  misc_RNA (1)...(19): siRNA sense strand
cgucaugacuuuguucuac

SEQ ID NO: 174848 - RNA, 19 nt, Homo sapiens
  misc_RNA (1)...(19): siRNA sense strand
ggagccaugugccaucucu

SEQ ID NO: 174849 - RNA, 19 nt, Homo sapiens
  misc_RNA (1)...(19): siRNA sense strand
gaggaugaagugaacaugu

SEQ ID NO: 174850 - RNA, 19 nt, Homo sapiens
  misc_RNA (1)...(19): siRNA sense strand
aagaaggacucgggucaau

SEQ ID NO: 174851 - RNA, 19 nt, Homo sapiens
  misc_RNA (1)...(19): siRNA sense strand
ggccggaccagucacauug

SEQ ID NO: 174852 - RNA, 19 nt, Homo sapiens
  misc_RNA (1)...(19): siRNA sense strand
cagccaagcccuuccacuu

SEQ ID NO: 174853 - RNA, 19 nt, Homo sapiens
  misc_RNA (1)...(19): siRNA sense strand
ccagucacauugcuuuguc

SEQ ID NO: 174854 - RNA, 19 nt, Homo sapiens
  misc_RNA (1)...(19): siRNA sense strand
ccaugugccaucucuauug

SEQ ID NO: 174855 - RNA, 19 nt, Homo sapiens
  misc_RNA (1)...(19): siRNA sense strand
caagcaccaugcgggauga

SEQ ID NO: 174856 - RNA, 19 nt, Homo sapiens
  misc_RNA (1)...(19): siRNA sense strand
gcugagaaauacgugaaca

SEQ ID NO: 174857 - RNA, 19 nt, Homo sapiens
  misc_RNA (1)...(19): siRNA sense strand
gcacagagcugcacuccaa

SEQ ID NO: 174858 - RNA, 19 nt, Homo sapiens
  misc_RNA (1)...(19): siRNA sense strand
gagcugaccuucaucaaga

SEQ ID NO: 174859 - RNA, 19 nt, Homo sapiens
  misc_RNA (1)...(19): siRNA sense strand
agagaaacauggcccaaua

SEQ ID NO: 174860 - RNA, 19 nt, Homo sapiens
  misc_RNA (1)...(19): siRNA sense strand
gagcugcacuccaaugaga

SEQ ID NO: 174861 - RNA, 19 nt, Homo sapiens
  misc_RNA (1)...(19): siRNA sense strand
aaaccaaggcugagaaaua

SEQ ID NO: 174862 - RNA, 19 nt, Homo sapiens
  misc_RNA (1)...(19): siRNA sense strand
ggaagaagcagcugugguu

SEQ ID NO: 174863 - RNA, 19 nt, Homo sapiens
  misc_RNA (1)...(19): siRNA sense strand
ccaaccagcuuaagaggaa

SEQ ID NO: 174864 - RNA, 19 nt, Homo sapiens
  misc_RNA (1)...(19): siRNA sense strand
gaagugaacauguggauca

SEQ ID NO: 174865 - RNA, 19 nt, Homo sapiens
  misc_RNA (1)...(19): siRNA sense strand
ccaaggaccugaagaacau

SEQ ID NO: 174866 - RNA, 19 nt, Homo sapiens
  misc_RNA (1)...(19): siRNA sense strand
gagcagugccuuugaagaa

SEQ ID NO: 174867 - RNA, 19 nt, Homo sapiens
  misc_RNA (1)...(19): siRNA sense strand
gaaccaggcccucuucaug

SEQ ID NO: 174868 - RNA, 19 nt, Homo sapiens
  misc_RNA (1)...(19): siRNA sense strand
gaggaccacugcagcauug

SEQ ID NO: 174869 - RNA, 19 nt, Homo sapiens
  misc_RNA (1)...(19): siRNA sense strand
aaacauggcccaauacuuc

SEQ ID NO: 174870 - RNA, 19 nt, Homo sapiens
  misc_RNA (1)...(19): siRNA sense strand
ggaagauccucaucaagca

SEQ ID NO: 174871 - RNA, 19 nt, Homo sapiens
  misc_RNA (1)...(19): siRNA sense strand
gcaacucuaucaagaaugg

SEQ ID NO: 174872 - RNA, 19 nt, Homo sapiens
  misc_RNA (1)...(19): siRNA sense strand
gcaccaagcagaagacaga

SEQ ID NO: 174873 - RNA, 19 nt, Homo sapiens
  misc_RNA (1)...(19): siRNA sense strand
caaacccuaugccaacuuu

SEQ ID NO: 174874 - RNA, 19 nt, Homo sapiens
  misc_RNA (1)...(19): siRNA sense strand
gcagcaagaucuacuacuc

SEQ ID NO: 174875 - RNA, 19 nt, Homo sapiens
  misc_RNA (1)...(19): siRNA sense strand
ucacauugcuuugucauuc

SEQ ID NO: 174876 - RNA, 19 nt, Homo sapiens
  misc_RNA (1)...(19): siRNA sense strand
aggaagacauguuuaguga

SEQ ID NO: 174877 - RNA, 19 nt, Homo sapiens
  misc_RNA (1)...(19): siRNA sense strand
caaacuacguggaagagau

SEQ ID NO: 174878 - RNA, 19 nt, Homo sapiens
  misc_RNA (1)...(19): siRNA sense strand
caagagggccagacaguga

SEQ ID NO: 174879 - RNA, 19 nt, Homo sapiens
  misc_RNA (1)...(19): siRNA sense strand
cagcaacucuaucaagaau

SEQ ID NO: 174880 - RNA, 19 nt, Homo sapiens
  misc_RNA (1)...(19): siRNA sense strand
gggcuuaacuuggcugaug

SEQ ID NO: 174881 - RNA, 19 nt, Homo sapiens
  misc_RNA (1)...(19): siRNA sense strand
caacucauaugccaucucu

SEQ ID NO: 174882 - RNA, 19 nt, Homo sapiens
  misc_RNA (1)...(19): siRNA sense strand
ggagaauggugaccucagu

SEQ ID NO: 174883 - RNA, 19 nt, Homo sapiens
  misc_RNA (1)...(19): siRNA sense strand
ggauguugcugccgacuca

SEQ ID NO: 174884 - RNA, 19 nt, Homo sapiens
  misc_RNA (1)...(19): siRNA sense strand
gaugggaugccaguuauuu

SEQ ID NO: 174885 - RNA, 19 nt, Homo sapiens
  misc_RNA (1)...(19): siRNA sense strand
ucucugaacuugucgucua

SEQ ID NO: 174886 - RNA, 19 nt, Homo sapiens
  misc_RNA (1)...(19): siRNA sense strand
ggaccagucacauugcuuu

SEQ ID NO: 174887 - RNA, 19 nt, Homo sapiens
  misc_RNA (1)...(19): siRNA sense strand
gagugucccuuccugaguu

SEQ ID NO: 174888 - RNA, 19 nt, Homo sapiens
  misc_RNA (1)...(19): siRNA sense strand
gaaacauggcccaauacuu

SEQ ID NO: 174889 - RNA, 19 nt, Homo sapiens
  misc_RNA (1)...(19): siRNA sense strand
ggaaaccaaggcugagaaa

SEQ ID NO: 174890 - RNA, 19 nt, Homo sapiens
  misc_RNA (1)...(19): siRNA sense strand
gcacagcugagccugacua

SEQ ID NO: 174891 - RNA, 19 nt, Homo sapiens
  misc_RNA (1)...(19): siRNA sense strand
caucagcuacuaugagaaa

SEQ ID NO: 174892 - RNA, 19 nt, Homo sapiens
  misc_RNA (1)...(19): siRNA sense strand
caugugccaucucuauuga

SEQ ID NO: 174893 - RNA, 19 nt, Homo sapiens
  misc_RNA (1)...(19): siRNA sense strand
gaagaccucacgggacuuu

SEQ ID NO: 174894 - RNA, 19 nt, Homo sapiens
  misc_RNA (1)...(19): siRNA sense strand
gcaccgucaugacuuuguu

SEQ ID NO: 174895 - RNA, 19 nt, Homo sapiens
  misc_RNA (1)...(19): siRNA sense strand
gaugggcugucgcugcauu

SEQ ID NO: 174896 - RNA, 19 nt, Homo sapiens
  misc_RNA (1)...(19): siRNA sense strand
gaggaagacauguuuagug

SEQ ID NO: 174897 - RNA, 19 nt, Homo sapiens
  misc_RNA (1)...(19): siRNA sense strand
ggagcucucugaacuuguc

SEQ ID NO: 174898 - RNA, 19 nt, Homo sapiens
  misc_RNA (1)...(19): siRNA sense strand
gcagcuggaugcaguaugc

SEQ ID NO: 174899 - RNA, 19 nt, Homo sapiens
  misc_RNA (1)...(19): siRNA sense strand
gaaggacucgggucaaugg

SEQ ID NO: 174900 - RNA, 19 nt, Homo sapiens
  misc_RNA (1)...(19): siRNA sense strand
gcagugccuuugaagaaca

SEQ ID NO: 174901 - RNA, 19 nt, Homo sapiens
  misc_RNA (1)...(19): siRNA sense strand
gaauggaauuucgccugaa

SEQ ID NO: 174902 - RNA, 19 nt, Homo sapiens
  misc_RNA (1)...(19): siRNA sense strand
ugaagaacaacuacaguga

SEQ ID NO: 174903 - RNA, 19 nt, Homo sapiens
  misc_RNA (1)...(19): siRNA sense strand
cgacaucugccaaagaaug

SEQ ID NO: 174904 - RNA, 19 nt, Homo sapiens
  misc_RNA (1)...(19): siRNA sense strand
gaccaguucuccagugagu

SEQ ID NO: 174905 - RNA, 19 nt, Homo sapiens
  misc_RNA (1)...(19): siRNA sense strand
gggaccaguucuccaguga

SEQ ID NO: 174906 - RNA, 19 nt, Homo sapiens
  misc_RNA (1)...(19): siRNA sense strand
gcaguuugcucagcuguac

SEQ ID NO: 174907 - RNA, 19 nt, Homo sapiens
  misc_RNA (1)...(19): siRNA sense strand
ugacaagccuaugcagaug

SEQ ID NO: 174908 - RNA, 19 nt, Homo sapiens
  misc_RNA (1)...(19): siRNA sense strand
acgcaacccuggcuucuau

SEQ ID NO: 174909 - RNA, 19 nt, Homo sapiens
  misc_RNA (1)...(19): siRNA sense strand
gcgacuacacgcucucuuu

SEQ ID NO: 174910 - RNA, 19 nt, Homo sapiens
  misc_RNA (1)...(19): siRNA sense strand
ccagucauccuguccauug

SEQ ID NO: 174911 - RNA, 19 nt, Homo sapiens
  misc_RNA (1)...(19): siRNA sense strand
ccaccaagaucaaguucuc

SEQ ID NO: 174912 - RNA, 19 nt, Homo sapiens
  misc_RNA (1)...(19): siRNA sense strand
gcaguuccuucuugacuac

SEQ ID NO: 174913 - RNA, 19 nt, Homo sapiens
  misc_RNA (1)...(19): siRNA sense strand
acucauaugccaucucuuu

SEQ ID NO: 174914 - RNA, 19 nt, Homo sapiens
  misc_RNA (1)...(19): siRNA sense strand
acagagcagugccuuugaa

SEQ ID NO: 174915 - RNA, 19 nt, Homo sapiens
  misc_RNA (1)...(19): siRNA sense strand
cccgacaucugccaaagaa

SEQ ID NO: 174916 - RNA, 19 nt, Homo sapiens
  misc_RNA (1)...(19): siRNA sense strand
ugacauucgugaaauuaag

SEQ ID NO: 174917 - RNA, 19 nt, Homo sapiens
  misc_RNA (1)...(19): siRNA sense strand
gcugauggaggauacauug

SEQ ID NO: 174918 - RNA, 19 nt, Homo sapiens
  misc_RNA (1)...(19): siRNA sense strand
guaugaggaagacauguuu

SEQ ID NO: 174919 - RNA, 19 nt, Homo sapiens
  misc_RNA (1)...(19): siRNA sense strand
aagagaagauuggcacaga

SEQ ID NO: 174920 - RNA, 19 nt, Homo sapiens
  misc_RNA (1)...(19): siRNA sense strand
gggacacacuccucaccaa

SEQ ID NO: 174921 - RNA, 19 nt, Homo sapiens
  misc_RNA (1)...(19): siRNA sense strand
gacaucagcaacucuauca

SEQ ID NO: 174922 - RNA, 19 nt, Homo sapiens
  misc_RNA (1)...(19): siRNA sense strand
uuucaagugugcagucaaa

SEQ ID NO: 174923 - RNA, 19 nt, Homo sapiens
  misc_RNA (1)...(19): siRNA sense strand
gaucgaggagccauacuuc

SEQ ID NO: 174924 - RNA, 19 nt, Homo sapiens
  misc_RNA (1)...(19): siRNA sense strand
cauugacauucgugaaauu

SEQ ID NO: 174925 - RNA, 19 nt, Homo sapiens
  misc_RNA (1)...(19): siRNA sense strand
gcauugcccagcagagaaa

SEQ ID NO: 174926 - RNA, 19 nt, Homo sapiens
  misc_RNA (1)...(19): siRNA sense strand
cggaugggaugccaguuau

SEQ ID NO: 174927 - RNA, 19 nt, Homo sapiens
  misc_RNA (1)...(19): siRNA sense strand
aagaucaaguucucagaug

SEQ ID NO: 174928 - RNA, 19 nt, Homo sapiens
  misc_RNA (1)...(19): siRNA sense strand
gggagcacuuggacgagaa

SEQ ID NO: 174929 - RNA, 19 nt, Homo sapiens
  misc_RNA (1)...(19): siRNA sense strand
aagcugcgcuaucccauca

SEQ ID NO: 174930 - RNA, 19 nt, Homo sapiens
  misc_RNA (1)...(19): siRNA sense strand
ggaguucgacagccuuguu

SEQ ID NO: 174931 - RNA, 19 nt, Homo sapiens
  misc_RNA (1)...(19): siRNA sense strand
acaacccucuuucccacua

SEQ ID NO: 174932 - RNA, 19 nt, Homo sapiens
  misc_RNA (1)...(19): siRNA sense strand
agagaagauuggcacagaa

SEQ ID NO: 174933 - RNA, 19 nt, Homo sapiens
  misc_RNA (1)...(19): siRNA sense strand
gcugagcgccugcuuacug

SEQ ID NO: 174934 - RNA, 19 nt, Homo sapiens
  misc_RNA (1)...(19): siRNA sense strand
uggaugaguuugucaccuu

SEQ ID NO: 174935 - RNA, 19 nt, Homo sapiens
  misc_RNA (1)...(19): siRNA sense strand
ccaagcagaagacagaguu

SEQ ID NO: 174936 - RNA, 19 nt, Homo sapiens
  misc_RNA (1)...(19): siRNA sense strand
ugacuuuguucuacuccaa

SEQ ID NO: 174937 - RNA, 19 nt, Homo sapiens
  misc_RNA (1)...(19): siRNA sense strand
ccggaugggaugccaguua

SEQ ID NO: 174938 - RNA, 19 nt, Homo sapiens
  misc_RNA (1)...(19): siRNA sense strand
ccacaccccugcagauuga

SEQ ID NO: 174939 - RNA, 19 nt, Homo sapiens
  misc_RNA (1)...(19): siRNA sense strand
gagcaucucgcagaccauu

SEQ ID NO: 174940 - RNA, 19 nt, Homo sapiens
  misc_RNA (1)...(19): siRNA sense strand
gcuaccagcagccguuuga

SEQ ID NO: 174941 - RNA, 19 nt, Homo sapiens
  misc_RNA (1)...(19): siRNA sense strand
cucagucccuucaguggua

SEQ ID NO: 174942 - RNA, 19 nt, Homo sapiens
  misc_RNA (1)...(19): siRNA sense strand
acaagccuaugcagaugaa

SEQ ID NO: 174943 - RNA, 19 nt, Homo sapiens
  misc_RNA (1)...(19): siRNA sense strand
aaccaaggcugagaaauac

SEQ ID NO: 174944 - RNA, 19 nt, Homo sapiens
  misc_RNA (1)...(19): siRNA sense strand
gccauugacauucgugaaa

SEQ ID NO: 174945 - RNA, 19 nt, Homo sapiens
  misc_RNA (1)...(19): siRNA sense strand
gagcacaggcugagcacau

SEQ ID NO: 174946 - RNA, 19 nt, Homo sapiens
  misc_RNA (1)...(19): siRNA sense strand
ccauugacauucgugaaau

SEQ ID NO: 174947 - RNA, 19 nt, Homo sapiens
  misc_RNA (1)...(19): siRNA sense strand
cgucaugacuuuguucuac

SEQ ID NO: 174948 - RNA, 19 nt, Homo sapiens
  misc_RNA (1)...(19): siRNA sense strand
ggagccaugugccaucucu

SEQ ID NO: 174949 - RNA, 19 nt, Homo sapiens
  misc_RNA (1)...(19): siRNA sense strand
gaggaugaagugaacaugu

SEQ ID NO: 174950 - RNA, 19 nt, Homo sapiens
  misc_RNA (1)...(19): siRNA sense strand
aagaaggacucgggucaau

SEQ ID NO: 174951 - RNA, 19 nt, Homo sapiens
  misc_RNA (1)...(19): siRNA sense strand
ggccggaccagucacauug

SEQ ID NO: 174952 - RNA, 19 nt, Homo sapiens
  misc_RNA (1)...(19): siRNA sense strand
cagccaagcccuuccacuu

SEQ ID NO: 174953 - RNA, 19 nt, Homo sapiens
  misc_RNA (1)...(19): siRNA sense strand
ccagucacauugcuuuguc

SEQ ID NO: 174954 - RNA, 19 nt, Homo sapiens
  misc_RNA (1)...(19): siRNA sense strand
ccaugugccaucucuauug

SEQ ID NO: 174955 - RNA, 19 nt, Homo sapiens
  misc_RNA (1)...(19): siRNA sense strand
caagcaccaugcgggauga

SEQ ID NO: 174956 - RNA, 19 nt, Homo sapiens
  misc_RNA (1)...(19): siRNA sense strand
gcugagaaauacgugaaca

SEQ ID NO: 174957 - RNA, 19 nt, Homo sapiens
  misc_RNA (1)...(19): siRNA sense strand
caauuucugucucaucuua

SEQ ID NO: 174958 - RNA, 19 nt, Homo sapiens
  misc_RNA (1)...(19): siRNA sense strand
ugaaaugccucaacaagca

SEQ ID NO: 174959 - RNA, 19 nt, Homo sapiens
  misc_RNA (1)...(19): siRNA sense strand
agaagagccucaaccauug

SEQ ID NO: 174960 - RNA, 19 nt, Homo sapiens
  misc_RNA (1)...(19): siRNA sense strand
aagaagagccucaaccauu

SEQ ID NO: 174961 - RNA, 19 nt, Homo sapiens
  misc_RNA (1)...(19): siRNA sense strand
uaauaugucucuugcugau

SEQ ID NO: 174962 - RNA, 19 nt, Homo sapiens
  misc_RNA (1)...(19): siRNA sense strand
ucgcucagcuauaagaaga

SEQ ID NO: 174963 - RNA, 19 nt, Homo sapiens
  misc_RNA (1)...(19): siRNA sense strand
gcuacagaaucuauuuauc

SEQ ID NO: 174964 - RNA, 19 nt, Homo sapiens
  misc_RNA (1)...(19): siRNA sense strand
ugucucaucuuaauauguc

SEQ ID NO: 174965 - RNA, 19 nt, Homo sapiens
  misc_RNA (1)...(19): siRNA sense strand
gaaaguccaauaccucacu

SEQ ID NO: 174966 - RNA, 19 nt, Homo sapiens
  misc_RNA (1)...(19): siRNA sense strand
caucuuaauaugucucuug

SEQ ID NO: 174967 - RNA, 19 nt, Homo sapiens
  misc_RNA (1)...(19): siRNA sense strand
cucacucgcucagcuauaa

SEQ ID NO: 174968 - RNA, 19 nt, Homo sapiens
  misc_RNA (1)...(19): siRNA sense strand
gucaaaagcuacagaaucu

SEQ ID NO: 174969 - RNA, 19 nt, Homo sapiens
  misc_RNA (1)...(19): siRNA sense strand
ccucaacaagcacgucaaa

SEQ ID NO: 174970 - RNA, 19 nt, Homo sapiens
  misc_RNA (1)...(19): siRNA sense strand
caaaagcuacagaaucuau

SEQ ID NO: 174971 - RNA, 19 nt, Homo sapiens
  misc_RNA (1)...(19): siRNA sense strand
uaagaagagccucaaccau

SEQ ID NO: 174972 - RNA, 19 nt, Homo sapiens
  misc_RNA (1)...(19): siRNA sense strand
acaagcacgucaaaagcua

SEQ ID NO: 174973 - RNA, 19 nt, Homo sapiens
  misc_RNA (1)...(19): siRNA sense strand
gcuauaagaagagccucaa

SEQ ID NO: 174974 - RNA, 19 nt, Homo sapiens
  misc_RNA (1)...(19): siRNA sense strand
gaccucagcucuugcauca

SEQ ID NO: 174975 - RNA, 19 nt, Homo sapiens
  misc_RNA (1)...(19): siRNA sense strand
ggagcaggauagugccuuu

SEQ ID NO: 174976 - RNA, 19 nt, Homo sapiens
  misc_RNA (1)...(19): siRNA sense strand
ggaggaggaguuccaguuu

SEQ ID NO: 174977 - RNA, 19 nt, Homo sapiens
  misc_RNA (1)...(19): siRNA sense strand
gaggaggaguuccaguuuc

SEQ ID NO: 174978 - RNA, 19 nt, Homo sapiens
  misc_RNA (1)...(19): siRNA sense strand
ggaaagaugcagcuguauc

SEQ ID NO: 174979 - RNA, 19 nt, Homo sapiens
  misc_RNA (1)...(19): siRNA sense strand
gagcucaagugcgacauca

SEQ ID NO: 174980 - RNA, 19 nt, Homo sapiens
  misc_RNA (1)...(19): siRNA sense strand
gcagcuguauccaagaaag

SEQ ID NO: 174981 - RNA, 19 nt, Homo sapiens
  misc_RNA (1)...(19): siRNA sense strand
ggggaaagaugcagcugua

SEQ ID NO: 174982 - RNA, 19 nt, Homo sapiens
  misc_RNA (1)...(19): siRNA sense strand
gaaagaugcagcuguaucc

SEQ ID NO: 174983 - RNA, 19 nt, Homo sapiens
  misc_RNA (1)...(19): siRNA sense strand
cgaagcugcugccuugucu

SEQ ID NO: 174984 - RNA, 19 nt, Homo sapiens
  misc_RNA (1)...(19): siRNA sense strand
ugcagaggaugaagugcua

SEQ ID NO: 174985 - RNA, 19 nt, Homo sapiens
  misc_RNA (1)...(19): siRNA sense strand
cgacaucagcgcagagauc

SEQ ID NO: 174986 - RNA, 19 nt, Homo sapiens
  misc_RNA (1)...(19): siRNA sense strand
gggacccuauugacguuga

SEQ ID NO: 174987 - RNA, 19 nt, Homo sapiens
  misc_RNA (1)...(19): siRNA sense strand
ugcaggaccucagcucuug

SEQ ID NO: 174988 - RNA, 19 nt, Homo sapiens
  misc_RNA (1)...(19): siRNA sense strand
cgcccuggauaacgucuuu

SEQ ID NO: 174989 - RNA, 19 nt, Homo sapiens
  misc_RNA (1)...(19): siRNA sense strand
gccgacuucuggugcuuug

SEQ ID NO: 174990 - RNA, 19 nt, Homo sapiens
  misc_RNA (1)...(19): siRNA sense strand
gcgcuggugcagaggauga

SEQ ID NO: 174991 - RNA, 19 nt, Homo sapiens
  misc_RNA (1)...(19): siRNA sense strand
cggaggaggaguuccaguu

SEQ ID NO: 174992 - RNA, 19 nt, Homo sapiens
  misc_RNA (1)...(19): siRNA sense strand
ccgauggcuucgacgaguu

SEQ ID NO: 174993 - RNA, 19 nt, Homo sapiens
  misc_RNA (1)...(19): siRNA sense strand
aggaggaguuccaguuucu

SEQ ID NO: 174994 - RNA, 19 nt, Homo sapiens
  misc_RNA (1)...(19): siRNA sense strand
augcagcuguauccaagaa

SEQ ID NO: 174995 - RNA, 19 nt, Homo sapiens
  misc_RNA (1)...(19): siRNA sense strand
gguaccagcgcgacuacga

SEQ ID NO: 174996 - RNA, 19 nt, Homo sapiens
  misc_RNA (1)...(19): siRNA sense strand
gaccucagcucuugcauca

SEQ ID NO: 174997 - RNA, 19 nt, Homo sapiens
  misc_RNA (1)...(19): siRNA sense strand
ggagcaggauagugccuuu

SEQ ID NO: 174998 - RNA, 19 nt, Homo sapiens
  misc_RNA (1)...(19): siRNA sense strand
ggaggaggaguuccaguuu

SEQ ID NO: 174999 - RNA, 19 nt, Homo sapiens
  misc_RNA (1)...(19): siRNA sense strand
gaggaggaguuccaguuuc

SEQ ID NO: 175000 - RNA, 19 nt, Homo sapiens
  misc_RNA (1)...(19): siRNA sense strand
ggaaagaugcagcuguauc

SEQ ID NO: 175001 - RNA, 19 nt, Homo sapiens
  misc_RNA (1)...(19): siRNA sense strand
gagcucaagugcgacauca

SEQ ID NO: 175002 - RNA, 19 nt, Homo sapiens
  misc_RNA (1)...(19): siRNA sense strand
gcagcuguauccaagaaag

SEQ ID NO: 175003 - RNA, 19 nt, Homo sapiens
  misc_RNA (1)...(19): siRNA sense strand
ggggaaagaugcagcugua

SEQ ID NO: 175004 - RNA, 19 nt, Homo sapiens
  misc_RNA (1)...(19): siRNA sense strand
gaaagaugcagcuguaucc

SEQ ID NO: 175005 - RNA, 19 nt, Homo sapiens
  misc_RNA (1)...(19): siRNA sense strand
cgaagcugcugccuugucu

SEQ ID NO: 175006 - RNA, 19 nt, Homo sapiens
  misc_RNA (1)...(19): siRNA sense strand
ugcagaggaugaagugcua

SEQ ID NO: 175007 - RNA, 19 nt, Homo sapiens
  misc_RNA (1)...(19): siRNA sense strand
cgacaucagcgcagagauc

SEQ ID NO: 175008 - RNA, 19 nt, Homo sapiens
  misc_RNA (1)...(19): siRNA sense strand
gggacccuauugacguuga

SEQ ID NO: 175009 - RNA, 19 nt, Homo sapiens
  misc_RNA (1)...(19): siRNA sense strand
ugcaggaccucagcucuug

SEQ ID NO: 175010 - RNA, 19 nt, Homo sapiens
  misc_RNA (1)...(19): siRNA sense strand
cgcccuggauaacgucuuu

SEQ ID NO: 175011 - RNA, 19 nt, Homo sapiens
  misc_RNA (1)...(19): siRNA sense strand
gccgacuucuggugcuuug

SEQ ID NO: 175012 - RNA, 19 nt, Homo sapiens
  misc_RNA (1)...(19): siRNA sense strand
gcgcuggugcagaggauga

SEQ ID NO: 175013 - RNA, 19 nt, Homo sapiens
  misc_RNA (1)...(19): siRNA sense strand
cggaggaggaguuccaguu

SEQ ID NO: 175014 - RNA, 19 nt, Homo sapiens
  misc_RNA (1)...(19): siRNA sense strand
ccgauggcuucgacgaguu

SEQ ID NO: 175015 - RNA, 19 nt, Homo sapiens
  misc_RNA (1)...(19): siRNA sense strand
aggaggaguuccaguuucu

SEQ ID NO: 175016 - RNA, 19 nt, Homo sapiens
  misc_RNA (1)...(19): siRNA sense strand
augcagcuguauccaagaa

SEQ ID NO: 175017 - RNA, 19 nt, Homo sapiens
  misc_RNA (1)...(19): siRNA sense strand
gguaccagcgcgacuacga

SEQ ID NO: 175018 - RNA, 19 nt, Homo sapiens
  misc_RNA (1)...(19): siRNA sense strand
gaccucagcucuugcauca

SEQ ID NO: 175019 - RNA, 19 nt, Homo sapiens
  misc_RNA (1)...(19): siRNA sense strand
ggagcaggauagugccuuu

SEQ ID NO: 175020 - RNA, 19 nt, Homo sapiens
  misc_RNA (1)...(19): siRNA sense strand
ggaggaggaguuccaguuu

SEQ ID NO: 175021 - RNA, 19 nt, Homo sapiens
  misc_RNA (1)...(19): siRNA sense strand
gaggaggaguuccaguuuc

SEQ ID NO: 175022 - RNA, 19 nt, Homo sapiens
  misc_RNA (1)...(19): siRNA sense strand
ggaaagaugcagcuguauc

SEQ ID NO: 175023 - RNA, 19 nt, Homo sapiens
  misc_RNA (1)...(19): siRNA sense strand
gagcucaagugcgacauca

SEQ ID NO: 175024 - RNA, 19 nt, Homo sapiens
  misc_RNA (1)...(19): siRNA sense strand
gcagcuguauccaagaaag

SEQ ID NO: 175025 - RNA, 19 nt, Homo sapiens
  misc_RNA (1)...(19): siRNA sense strand
ggggaaagaugcagcugua

SEQ ID NO: 175026 - RNA, 19 nt, Homo sapiens
  misc_RNA (1)...(19): siRNA sense strand
gaaagaugcagcuguaucc

SEQ ID NO: 175027 - RNA, 19 nt, Homo sapiens
  misc_RNA (1)...(19): siRNA sense strand
cgaagcugcugccuugucu

SEQ ID NO: 175028 - RNA, 19 nt, Homo sapiens
  misc_RNA (1)...(19): siRNA sense strand
ugcagaggaugaagugcua

SEQ ID NO: 175029 - RNA, 19 nt, Homo sapiens
  misc_RNA (1)...(19): siRNA sense strand
cgacaucagcgcagagauc

SEQ ID NO: 175030 - RNA, 19 nt, Homo sapiens
  misc_RNA (1)...(19): siRNA sense strand
gggacccuauugacguuga

SEQ ID NO: 175031 - RNA, 19 nt, Homo sapiens
  misc_RNA (1)...(19): siRNA sense strand
ugcaggaccucagcucuug

SEQ ID NO: 175032 - RNA, 19 nt, Homo sapiens
  misc_RNA (1)...(19): siRNA sense strand
cgcccuggauaacgucuuu

SEQ ID NO: 175033 - RNA, 19 nt, Homo sapiens
  misc_RNA (1)...(19): siRNA sense strand
gccgacuucuggugcuuug

SEQ ID NO: 175034 - RNA, 19 nt, Homo sapiens
  misc_RNA (1)...(19): siRNA sense strand
gcgcuggugcagaggauga

SEQ ID NO: 175035 - RNA, 19 nt, Homo sapiens
  misc_RNA (1)...(19): siRNA sense strand
cggaggaggaguuccaguu

SEQ ID NO: 175036 - RNA, 19 nt, Homo sapiens
  misc_RNA (1)...(19): siRNA sense strand
ccgauggcuucgacgaguu

SEQ ID NO: 175037 - RNA, 19 nt, Homo sapiens
  misc_RNA (1)...(19): siRNA sense strand
aggaggaguuccaguuucu

SEQ ID NO: 175038 - RNA, 19 nt, Homo sapiens
  misc_RNA (1)...(19): siRNA sense strand
augcagcuguauccaagaa

SEQ ID NO: 175039 - RNA, 19 nt, Homo sapiens
  misc_RNA (1)...(19): siRNA sense strand
gguaccagcgcgacuacga

SEQ ID NO: 175040 - RNA, 19 nt, Homo sapiens
  misc_RNA (1)...(19): siRNA sense strand
gaccucagcucuugcauca

SEQ ID NO: 175041 - RNA, 19 nt, Homo sapiens
  misc_RNA (1)...(19): siRNA sense strand
ggagcaggauagugccuuu

SEQ ID NO: 175042 - RNA, 19 nt, Homo sapiens
  misc_RNA (1)...(19): siRNA sense strand
ggaggaggaguuccaguuu

SEQ ID NO: 175043 - RNA, 19 nt, Homo sapiens
  misc_RNA (1)...(19): siRNA sense strand
gaggaggaguuccaguuuc

SEQ ID NO: 175044 - RNA, 19 nt, Homo sapiens
  misc_RNA (1)...(19): siRNA sense strand
ggaaagaugcagcuguauc

SEQ ID NO: 175045 - RNA, 19 nt, Homo sapiens
  misc_RNA (1)...(19): siRNA sense strand
gagcucaagugcgacauca

SEQ ID NO: 175046 - RNA, 19 nt, Homo sapiens
  misc_RNA (1)...(19): siRNA sense strand
gcagcuguauccaagaaag

SEQ ID NO: 175047 - RNA, 19 nt, Homo sapiens
  misc_RNA (1)...(19): siRNA sense strand
ggggaaagaugcagcugua

SEQ ID NO: 175048 - RNA, 19 nt, Homo sapiens
  misc_RNA (1)...(19): siRNA sense strand
gaaagaugcagcuguaucc

SEQ ID NO: 175049 - RNA, 19 nt, Homo sapiens
  misc_RNA (1)...(19): siRNA sense strand
cgaagcugcugccuugucu

SEQ ID NO: 175050 - RNA, 19 nt, Homo sapiens
  misc_RNA (1)...(19): siRNA sense strand
ugcagaggaugaagugcua

SEQ ID NO: 175051 - RNA, 19 nt, Homo sapiens
  misc_RNA (1)...(19): siRNA sense strand
cgacaucagcgcagagauc

SEQ ID NO: 175052 - RNA, 19 nt, Homo sapiens
  misc_RNA (1)...(19): siRNA sense strand
gggacccuauugacguuga

SEQ ID NO: 175053 - RNA, 19 nt, Homo sapiens
  misc_RNA (1)...(19): siRNA sense strand
ugcaggaccucagcucuug

SEQ ID NO: 175054 - RNA, 19 nt, Homo sapiens
  misc_RNA (1)...(19): siRNA sense strand
cgcccuggauaacgucuuu

SEQ ID NO: 175055 - RNA, 19 nt, Homo sapiens
  misc_RNA (1)...(19): siRNA sense strand
gccgacuucuggugcuuug

SEQ ID NO: 175056 - RNA, 19 nt, Homo sapiens
  misc_RNA (1)...(19): siRNA sense strand
gcgcuggugcagaggauga

SEQ ID NO: 175057 - RNA, 19 nt, Homo sapiens
  misc_RNA (1)...(19): siRNA sense strand
cggaggaggaguuccaguu

SEQ ID NO: 175058 - RNA, 19 nt, Homo sapiens
  misc_RNA (1)...(19): siRNA sense strand
ccgauggcuucgacgaguu

SEQ ID NO: 175059 - RNA, 19 nt, Homo sapiens
  misc_RNA (1)...(19): siRNA sense strand
aggaggaguuccaguuucu

SEQ ID NO: 175060 - RNA, 19 nt, Homo sapiens
  misc_RNA (1)...(19): siRNA sense strand
augcagcuguauccaagaa

SEQ ID NO: 175061 - RNA, 19 nt, Homo sapiens
  misc_RNA (1)...(19): siRNA sense strand
gguaccagcgcgacuacga

SEQ ID NO: 175062 - RNA, 19 nt, Homo sapiens
  misc_RNA (1)...(19): siRNA sense strand
gaccucagcucuugcauca

SEQ ID NO: 175063 - RNA, 19 nt, Homo sapiens
  misc_RNA (1)...(19): siRNA sense strand
ggagcaggauagugccuuu

SEQ ID NO: 175064 - RNA, 19 nt, Homo sapiens
  misc_RNA (1)...(19): siRNA sense strand
ggaggaggaguuccaguuu

SEQ ID NO: 175065 - RNA, 19 nt, Homo sapiens
  misc_RNA (1)...(19): siRNA sense strand
gaggaggaguuccaguuuc

SEQ ID NO: 175066 - RNA, 19 nt, Homo sapiens
  misc_RNA (1)...(19): siRNA sense strand
ggaaagaugcagcuguauc

SEQ ID NO: 175067 - RNA, 19 nt, Homo sapiens
  misc_RNA (1)...(19): siRNA sense strand
gagcucaagugcgacauca

SEQ ID NO: 175068 - RNA, 19 nt, Homo sapiens
  misc_RNA (1)...(19): siRNA sense strand
gcagcuguauccaagaaag

SEQ ID NO: 175069 - RNA, 19 nt, Homo sapiens
  misc_RNA (1)...(19): siRNA sense strand
ggggaaagaugcagcugua

SEQ ID NO: 175070 - RNA, 19 nt, Homo sapiens
  misc_RNA (1)...(19): siRNA sense strand
gaaagaugcagcuguaucc

SEQ ID NO: 175071 - RNA, 19 nt, Homo sapiens
  misc_RNA (1)...(19): siRNA sense strand
cgaagcugcugccuugucu

SEQ ID NO: 175072 - RNA, 19 nt, Homo sapiens
  misc_RNA (1)...(19): siRNA sense strand
ugcagaggaugaagugcua

SEQ ID NO: 175073 - RNA, 19 nt, Homo sapiens
  misc_RNA (1)...(19): siRNA sense strand
cgacaucagcgcagagauc

SEQ ID NO: 175074 - RNA, 19 nt, Homo sapiens
  misc_RNA (1)...(19): siRNA sense strand
gggacccuauugacguuga

SEQ ID NO: 175075 - RNA, 19 nt, Homo sapiens
  misc_RNA (1)...(19): siRNA sense strand
ugcaggaccucagcucuug

SEQ ID NO: 175076 - RNA, 19 nt, Homo sapiens
  misc_RNA (1)...(19): siRNA sense strand
cgcccuggauaacgucuuu

SEQ ID NO: 175077 - RNA, 19 nt, Homo sapiens
  misc_RNA (1)...(19): siRNA sense strand
gccgacuucuggugcuuug

SEQ ID NO: 175078 - RNA, 19 nt, Homo sapiens
  misc_RNA (1)...(19): siRNA sense strand
gcgcuggugcagaggauga

SEQ ID NO: 175079 - RNA, 19 nt, Homo sapiens
  misc_RNA (1)...(19): siRNA sense strand
cggaggaggaguuccaguu

SEQ ID NO: 175080 - RNA, 19 nt, Homo sapiens
  misc_RNA (1)...(19): siRNA sense strand
ccgauggcuucgacgaguu

SEQ ID NO: 175081 - RNA, 19 nt, Homo sapiens
  misc_RNA (1)...(19): siRNA sense strand
aggaggaguuccaguuucu

SEQ ID NO: 175082 - RNA, 19 nt, Homo sapiens
  misc_RNA (1)...(19): siRNA sense strand
augcagcuguauccaagaa

SEQ ID NO: 175083 - RNA, 19 nt, Homo sapiens
  misc_RNA (1)...(19): siRNA sense strand
gguaccagcgcgacuacga

SEQ ID NO: 175084 - RNA, 19 nt, Homo sapiens
  misc_RNA (1)...(19): siRNA sense strand
gaccucagcucuugcauca

SEQ ID NO: 175085 - RNA, 19 nt, Homo sapiens
  misc_RNA (1)...(19): siRNA sense strand
ggagcaggauagugccuuu

SEQ ID NO: 175086 - RNA, 19 nt, Homo sapiens
  misc_RNA (1)...(19): siRNA sense strand
ggaggaggaguuccaguuu

SEQ ID NO: 175087 - RNA, 19 nt, Homo sapiens
  misc_RNA (1)...(19): siRNA sense strand
gaggaggaguuccaguuuc

SEQ ID NO: 175088 - RNA, 19 nt, Homo sapiens
  misc_RNA (1)...(19): siRNA sense strand
ggaaagaugcagcuguauc

SEQ ID NO: 175089 - RNA, 19 nt, Homo sapiens
  misc_RNA (1)...(19): siRNA sense strand
gagcucaagugcgacauca

SEQ ID NO: 175090 - RNA, 19 nt, Homo sapiens
  misc_RNA (1)...(19): siRNA sense strand
gcagcuguauccaagaaag

SEQ ID NO: 175091 - RNA, 19 nt, Homo sapiens
  misc_RNA (1)...(19): siRNA sense strand
ggggaaagaugcagcugua

SEQ ID NO: 175092 - RNA, 19 nt, Homo sapiens
  misc_RNA (1)...(19): siRNA sense strand
gaaagaugcagcuguaucc

SEQ ID NO: 175093 - RNA, 19 nt, Homo sapiens
  misc_RNA (1)...(19): siRNA sense strand
cgaagcugcugccuugucu

SEQ ID NO: 175094 - RNA, 19 nt, Homo sapiens
  misc_RNA (1)...(19): siRNA sense strand
ugcagaggaugaagugcua

SEQ ID NO: 175095 - RNA, 19 nt, Homo sapiens
  misc_RNA (1)...(19): siRNA sense strand
cgacaucagcgcagagauc

SEQ ID NO: 175096 - RNA, 19 nt, Homo sapiens
  misc_RNA (1)...(19): siRNA sense strand
gggacccuauugacguuga

SEQ ID NO: 175097 - RNA, 19 nt, Homo sapiens
  misc_RNA (1)...(19): siRNA sense strand
ugcaggaccucagcucuug

SEQ ID NO: 175098 - RNA, 19 nt, Homo sapiens
  misc_RNA (1)...(19): siRNA sense strand
cgcccuggauaacgucuuu

SEQ ID NO: 175099 - RNA, 19 nt, Homo sapiens
  misc_RNA (1)...(19): siRNA sense strand
gccgacuucuggugcuuug

SEQ ID NO: 175100 - RNA, 19 nt, Homo sapiens
  misc_RNA (1)...(19): siRNA sense strand
gcgcuggugcagaggauga

SEQ ID NO: 175101 - RNA, 19 nt, Homo sapiens
  misc_RNA (1)...(19): siRNA sense strand
cggaggaggaguuccaguu

SEQ ID NO: 175102 - RNA, 19 nt, Homo sapiens
  misc_RNA (1)...(19): siRNA sense strand
ccgauggcuucgacgaguu

SEQ ID NO: 175103 - RNA, 19 nt, Homo sapiens
  misc_RNA (1)...(19): siRNA sense strand
aggaggaguuccaguuucu

SEQ ID NO: 175104 - RNA, 19 nt, Homo sapiens
  misc_RNA (1)...(19): siRNA sense strand
augcagcuguauccaagaa

SEQ ID NO: 175105 - RNA, 19 nt, Homo sapiens
  misc_RNA (1)...(19): siRNA sense strand
gguaccagcgcgacuacga

SEQ ID NO: 175106 - RNA, 19 nt, Homo sapiens
  misc_RNA (1)...(19): siRNA sense strand
gaccucagcucuugcauca

SEQ ID NO: 175107 - RNA, 19 nt, Homo sapiens
  misc_RNA (1)...(19): siRNA sense strand
ggagcaggauagugccuuu

SEQ ID NO: 175108 - RNA, 19 nt, Homo sapiens
  misc_RNA (1)...(19): siRNA sense strand
ggaggaggaguuccaguuu

SEQ ID NO: 175109 - RNA, 19 nt, Homo sapiens
  misc_RNA (1)...(19): siRNA sense strand
gaggaggaguuccaguuuc

SEQ ID NO: 175110 - RNA, 19 nt, Homo sapiens
  misc_RNA (1)...(19): siRNA sense strand
ggaaagaugcagcuguauc

SEQ ID NO: 175111 - RNA, 19 nt, Homo sapiens
  misc_RNA (1)...(19): siRNA sense strand
gagcucaagugcgacauca

SEQ ID NO: 175112 - RNA, 19 nt, Homo sapiens
  misc_RNA (1)...(19): siRNA sense strand
gcagcuguauccaagaaag

SEQ ID NO: 175113 - RNA, 19 nt, Homo sapiens
  misc_RNA (1)...(19): siRNA sense strand
ggggaaagaugcagcugua

SEQ ID NO: 175114 - RNA, 19 nt, Homo sapiens
  misc_RNA (1)...(19): siRNA sense strand
gaaagaugcagcuguaucc

SEQ ID NO: 175115 - RNA, 19 nt, Homo sapiens
  misc_RNA (1)...(19): siRNA sense strand
cgaagcugcugccuugucu

SEQ ID NO: 175116 - RNA, 19 nt, Homo sapiens
  misc_RNA (1)...(19): siRNA sense strand
ugcagaggaugaagugcua

SEQ ID NO: 175117 - RNA, 19 nt, Homo sapiens
  misc_RNA (1)...(19): siRNA sense strand
cgacaucagcgcagagauc

SEQ ID NO: 175118 - RNA, 19 nt, Homo sapiens
  misc_RNA (1)...(19): siRNA sense strand
gggacccuauugacguuga

SEQ ID NO: 175119 - RNA, 19 nt, Homo sapiens
  misc_RNA (1)...(19): siRNA sense strand
ugcaggaccucagcucuug

SEQ ID NO: 175120 - RNA, 19 nt, Homo sapiens
  misc_RNA (1)...(19): siRNA sense strand
cgcccuggauaacgucuuu

SEQ ID NO: 175121 - RNA, 19 nt, Homo sapiens
  misc_RNA (1)...(19): siRNA sense strand
gccgacuucuggugcuuug

SEQ ID NO: 175122 - RNA, 19 nt, Homo sapiens
  misc_RNA (1)...(19): siRNA sense strand
gcgcuggugcagaggauga

SEQ ID NO: 175123 - RNA, 19 nt, Homo sapiens
  misc_RNA (1)...(19): siRNA sense strand
cggaggaggaguuccaguu

SEQ ID NO: 175124 - RNA, 19 nt, Homo sapiens
  misc_RNA (1)...(19): siRNA sense strand
ccgauggcuucgacgaguu

SEQ ID NO: 175125 - RNA, 19 nt, Homo sapiens
  misc_RNA (1)...(19): siRNA sense strand
aggaggaguuccaguuucu

SEQ ID NO: 175126 - RNA, 19 nt, Homo sapiens
  misc_RNA (1)...(19): siRNA sense strand
augcagcuguauccaagaa

SEQ ID NO: 175127 - RNA, 19 nt, Homo sapiens
  misc_RNA (1)...(19): siRNA sense strand
gguaccagcgcgacuacga

SEQ ID NO: 175128 - RNA, 19 nt, Homo sapiens
  misc_RNA (1)...(19): siRNA sense strand
gaccucagcucuugcauca

SEQ ID NO: 175129 - RNA, 19 nt, Homo sapiens
  misc_RNA (1)...(19): siRNA sense strand
ggagcaggauagugccuuu

SEQ ID NO: 175130 - RNA, 19 nt, Homo sapiens
  misc_RNA (1)...(19): siRNA sense strand
ggaggaggaguuccaguuu

SEQ ID NO: 175131 - RNA, 19 nt, Homo sapiens
  misc_RNA (1)...(19): siRNA sense strand
gaggaggaguuccaguuuc

SEQ ID NO: 175132 - RNA, 19 nt, Homo sapiens
  misc_RNA (1)...(19): siRNA sense strand
ggaaagaugcagcuguauc

SEQ ID NO: 175133 - RNA, 19 nt, Homo sapiens
  misc_RNA (1)...(19): siRNA sense strand
gagcucaagugcgacauca

SEQ ID NO: 175134 - RNA, 19 nt, Homo sapiens
  misc_RNA (1)...(19): siRNA sense strand
gcagcuguauccaagaaag

SEQ ID NO: 175135 - RNA, 19 nt, Homo sapiens
  misc_RNA (1)...(19): siRNA sense strand
ggggaaagaugcagcugua

SEQ ID NO: 175136 - RNA, 19 nt, Homo sapiens
  misc_RNA (1)...(19): siRNA sense strand
gaaagaugcagcuguaucc

SEQ ID NO: 175137 - RNA, 19 nt, Homo sapiens
  misc_RNA (1)...(19): siRNA sense strand
cgaagcugcugccuugucu

SEQ ID NO: 175138 - RNA, 19 nt, Homo sapiens
  misc_RNA (1)...(19): siRNA sense strand
ugcagaggaugaagugcua

SEQ ID NO: 175139 - RNA, 19 nt, Homo sapiens
  misc_RNA (1)...(19): siRNA sense strand
cgacaucagcgcagagauc

SEQ ID NO: 175140 - RNA, 19 nt, Homo sapiens
  misc_RNA (1)...(19): siRNA sense strand
gggacccuauugacguuga

SEQ ID NO: 175141 - RNA, 19 nt, Homo sapiens
  misc_RNA (1)...(19): siRNA sense strand
ugcaggaccucagcucuug

SEQ ID NO: 175142 - RNA, 19 nt, Homo sapiens
  misc_RNA (1)...(19): siRNA sense strand
cgcccuggauaacgucuuu

SEQ ID NO: 175143 - RNA, 19 nt, Homo sapiens
  misc_RNA (1)...(19): siRNA sense strand
gccgacuucuggugcuuug

SEQ ID NO: 175144 - RNA, 19 nt, Homo sapiens
  misc_RNA (1)...(19): siRNA sense strand
gcgcuggugcagaggauga

SEQ ID NO: 175145 - RNA, 19 nt, Homo sapiens
  misc_RNA (1)...(19): siRNA sense strand
cggaggaggaguuccaguu

SEQ ID NO: 175146 - RNA, 19 nt, Homo sapiens
  misc_RNA (1)...(19): siRNA sense strand
ccgauggcuucgacgaguu

SEQ ID NO: 175147 - RNA, 19 nt, Homo sapiens
  misc_RNA (1)...(19): siRNA sense strand
aggaggaguuccaguuucu

SEQ ID NO: 175148 - RNA, 19 nt, Homo sapiens
  misc_RNA (1)...(19): siRNA sense strand
augcagcuguauccaagaa

SEQ ID NO: 175149 - RNA, 19 nt, Homo sapiens
  misc_RNA (1)...(19): siRNA sense strand
gguaccagcgcgacuacga

SEQ ID NO: 175150 - RNA, 19 nt, Homo sapiens
  misc_RNA (1)...(19): siRNA sense strand
gaccucagcucuugcauca

SEQ ID NO: 175151 - RNA, 19 nt, Homo sapiens
  misc_RNA (1)...(19): siRNA sense strand
ggagcaggauagugccuuu

SEQ ID NO: 175152 - RNA, 19 nt, Homo sapiens
  misc_RNA (1)...(19): siRNA sense strand
ggaggaggaguuccaguuu

SEQ ID NO: 175153 - RNA, 19 nt, Homo sapiens
  misc_RNA (1)...(19): siRNA sense strand
gaggaggaguuccaguuuc

SEQ ID NO: 175154 - RNA, 19 nt, Homo sapiens
  misc_RNA (1)...(19): siRNA sense strand
ggaaagaugcagcuguauc

SEQ ID NO: 175155 - RNA, 19 nt, Homo sapiens
  misc_RNA (1)...(19): siRNA sense strand
gagcucaagugcgacauca

SEQ ID NO: 175156 - RNA, 19 nt, Homo sapiens
  misc_RNA (1)...(19): siRNA sense strand
gcagcuguauccaagaaag

SEQ ID NO: 175157 - RNA, 19 nt, Homo sapiens
  misc_RNA (1)...(19): siRNA sense strand
ggggaaagaugcagcugua

SEQ ID NO: 175158 - RNA, 19 nt, Homo sapiens
  misc_RNA (1)...(19): siRNA sense strand
gaaagaugcagcuguaucc

SEQ ID NO: 175159 - RNA, 19 nt, Homo sapiens
  misc_RNA (1)...(19): siRNA sense strand
cgaagcugcugccuugucu

SEQ ID NO: 175160 - RNA, 19 nt, Homo sapiens
  misc_RNA (1)...(19): siRNA sense strand
ugcagaggaugaagugcua

SEQ ID NO: 175161 - RNA, 19 nt, Homo sapiens
  misc_RNA (1)...(19): siRNA sense strand
cgacaucagcgcagagauc

SEQ ID NO: 175162 - RNA, 19 nt, Homo sapiens
  misc_RNA (1)...(19): siRNA sense strand
gggacccuauugacguuga

SEQ ID NO: 175163 - RNA, 19 nt, Homo sapiens
  misc_RNA (1)...(19): siRNA sense strand
ugcaggaccucagcucuug

SEQ ID NO: 175164 - RNA, 19 nt, Homo sapiens
  misc_RNA (1)...(19): siRNA sense strand
cgcccuggauaacgucuuu

SEQ ID NO: 175165 - RNA, 19 nt, Homo sapiens
  misc_RNA (1)...(19): siRNA sense strand
gccgacuucuggugcuuug

SEQ ID NO: 175166 - RNA, 19 nt, Homo sapiens
  misc_RNA (1)...(19): siRNA sense strand
gcgcuggugcagaggauga

SEQ ID NO: 175167 - RNA, 19 nt, Homo sapiens
  misc_RNA (1)...(19): siRNA sense strand
cggaggaggaguuccaguu

SEQ ID NO: 175168 - RNA, 19 nt, Homo sapiens
  misc_RNA (1)...(19): siRNA sense strand
ccgauggcuucgacgaguu

SEQ ID NO: 175169 - RNA, 19 nt, Homo sapiens
  misc_RNA (1)...(19): siRNA sense strand
aggaggaguuccaguuucu

SEQ ID NO: 175170 - RNA, 19 nt, Homo sapiens
  misc_RNA (1)...(19): siRNA sense strand
augcagcuguauccaagaa

SEQ ID NO: 175171 - RNA, 19 nt, Homo sapiens
  misc_RNA (1)...(19): siRNA sense strand
gguaccagcgcgacuacga

SEQ ID NO: 175172 - RNA, 19 nt, Homo sapiens
  misc_RNA (1)...(19): siRNA sense strand
gaccucagcucuugcauca

SEQ ID NO: 175173 - RNA, 19 nt, Homo sapiens
  misc_RNA (1)...(19): siRNA sense strand
ggagcaggauagugccuuu

SEQ ID NO: 175174 - RNA, 19 nt, Homo sapiens
  misc_RNA (1)...(19): siRNA sense strand
ggaggaggaguuccaguuu

SEQ ID NO: 175175 - RNA, 19 nt, Homo sapiens
  misc_RNA (1)...(19): siRNA sense strand
gaggaggaguuccaguuuc

SEQ ID NO: 175176 - RNA, 19 nt, Homo sapiens
  misc_RNA (1)...(19): siRNA sense strand
ggaaagaugcagcuguauc

SEQ ID NO: 175177 - RNA, 19 nt, Homo sapiens
  misc_RNA (1)...(19): siRNA sense strand
gagcucaagugcgacauca

SEQ ID NO: 175178 - RNA, 19 nt, Homo sapiens
  misc_RNA (1)...(19): siRNA sense strand
gcagcuguauccaagaaag

SEQ ID NO: 175179 - RNA, 19 nt, Homo sapiens
  misc_RNA (1)...(19): siRNA sense strand
ggggaaagaugcagcugua

SEQ ID NO: 175180 - RNA, 19 nt, Homo sapiens
  misc_RNA (1)...(19): siRNA sense strand
gaaagaugcagcuguaucc

SEQ ID NO: 175181 - RNA, 19 nt, Homo sapiens
  misc_RNA (1)...(19): siRNA sense strand
cgaagcugcugccuugucu

SEQ ID NO: 175182 - RNA, 19 nt, Homo sapiens
  misc_RNA (1)...(19): siRNA sense strand
ugcagaggaugaagugcua

SEQ ID NO: 175183 - RNA, 19 nt, Homo sapiens
  misc_RNA (1)...(19): siRNA sense strand
cgacaucagcgcagagauc

SEQ ID NO: 175184 - RNA, 19 nt, Homo sapiens
  misc_RNA (1)...(19): siRNA sense strand
gggacccuauugacguuga

SEQ ID NO: 175185 - RNA, 19 nt, Homo sapiens
  misc_RNA (1)...(19): siRNA sense strand
ugcaggaccucagcucuug

SEQ ID NO: 175186 - RNA, 19 nt, Homo sapiens
  misc_RNA (1)...(19): siRNA sense strand
cgcccuggauaacgucuuu

SEQ ID NO: 175187 - RNA, 19 nt, Homo sapiens
  misc_RNA (1)...(19): siRNA sense strand
gccgacuucuggugcuuug

SEQ ID NO: 175188 - RNA, 19 nt, Homo sapiens
  misc_RNA (1)...(19): siRNA sense strand
gcgcuggugcagaggauga

SEQ ID NO: 175189 - RNA, 19 nt, Homo sapiens
  misc_RNA (1)...(19): siRNA sense strand
cggaggaggaguuccaguu

SEQ ID NO: 175190 - RNA, 19 nt, Homo sapiens
  misc_RNA (1)...(19): siRNA sense strand
ccgauggcuucgacgaguu

SEQ ID NO: 175191 - RNA, 19 nt, Homo sapiens
  misc_RNA (1)...(19): siRNA sense strand
aggaggaguuccaguuucu

SEQ ID NO: 175192 - RNA, 19 nt, Homo sapiens
  misc_RNA (1)...(19): siRNA sense strand
augcagcuguauccaagaa

SEQ ID NO: 175193 - RNA, 19 nt, Homo sapiens
  misc_RNA (1)...(19): siRNA sense strand
gguaccagcgcgacuacga

SEQ ID NO: 175194 - RNA, 19 nt, Homo sapiens
  misc_RNA (1)...(19): siRNA sense strand
gaccucagcucuugcauca

SEQ ID NO: 175195 - RNA, 19 nt, Homo sapiens
  misc_RNA (1)...(19): siRNA sense strand
ggagcaggauagugccuuu

SEQ ID NO: 175196 - RNA, 19 nt, Homo sapiens
  misc_RNA (1)...(19): siRNA sense strand
ggaggaggaguuccaguuu

SEQ ID NO: 175197 - RNA, 19 nt, Homo sapiens
  misc_RNA (1)...(19): siRNA sense strand
gaggaggaguuccaguuuc

SEQ ID NO: 175198 - RNA, 19 nt, Homo sapiens
  misc_RNA (1)...(19): siRNA sense strand
ggaaagaugcagcuguauc

SEQ ID NO: 175199 - RNA, 19 nt, Homo sapiens
  misc_RNA (1)...(19): siRNA sense strand
gagcucaagugcgacauca

SEQ ID NO: 175200 - RNA, 19 nt, Homo sapiens
  misc_RNA (1)...(19): siRNA sense strand
gcagcuguauccaagaaag

SEQ ID NO: 175201 - RNA, 19 nt, Homo sapiens
  misc_RNA (1)...(19): siRNA sense strand
ggggaaagaugcagcugua

SEQ ID NO: 175202 - RNA, 19 nt, Homo sapiens
  misc_RNA (1)...(19): siRNA sense strand
gaaagaugcagcuguaucc

SEQ ID NO: 175203 - RNA, 19 nt, Homo sapiens
  misc_RNA (1)...(19): siRNA sense strand
cgaagcugcugccuugucu

SEQ ID NO: 175204 - RNA, 19 nt, Homo sapiens
  misc_RNA (1)...(19): siRNA sense strand
ugcagaggaugaagugcua

SEQ ID NO: 175205 - RNA, 19 nt, Homo sapiens
  misc_RNA (1)...(19): siRNA sense strand
cgacaucagcgcagagauc

SEQ ID NO: 175206 - RNA, 19 nt, Homo sapiens
  misc_RNA (1)...(19): siRNA sense strand
gggacccuauugacguuga

SEQ ID NO: 175207 - RNA, 19 nt, Homo sapiens
  misc_RNA (1)...(19): siRNA sense strand
ugcaggaccucagcucuug

SEQ ID NO: 175208 - RNA, 19 nt, Homo sapiens
  misc_RNA (1)...(19): siRNA sense strand
cgcccuggauaacgucuuu

SEQ ID NO: 175209 - RNA, 19 nt, Homo sapiens
  misc_RNA (1)...(19): siRNA sense strand
gccgacuucuggugcuuug

SEQ ID NO: 175210 - RNA, 19 nt, Homo sapiens
  misc_RNA (1)...(19): siRNA sense strand
gcgcuggugcagaggauga

SEQ ID NO: 175211 - RNA, 19 nt, Homo sapiens
  misc_RNA (1)...(19): siRNA sense strand
cggaggaggaguuccaguu

SEQ ID NO: 175212 - RNA, 19 nt, Homo sapiens
  misc_RNA (1)...(19): siRNA sense strand
ccgauggcuucgacgaguu

SEQ ID NO: 175213 - RNA, 19 nt, Homo sapiens
  misc_RNA (1)...(19): siRNA sense strand
aggaggaguuccaguuucu

SEQ ID NO: 175214 - RNA, 19 nt, Homo sapiens
  misc_RNA (1)...(19): siRNA sense strand
augcagcuguauccaagaa

SEQ ID NO: 175215 - RNA, 19 nt, Homo sapiens
  misc_RNA (1)...(19): siRNA sense strand
gguaccagcgcgacuacga

SEQ ID NO: 175216 - RNA, 19 nt, Homo sapiens
  misc_RNA (1)...(19): siRNA sense strand
gaacgacuuugagaucuuu

SEQ ID NO: 175217 - RNA, 19 nt, Homo sapiens
  misc_RNA (1)...(19): siRNA sense strand
gggagaaguucguggaaga

SEQ ID NO: 175218 - RNA, 19 nt, Homo sapiens
  misc_RNA (1)...(19): siRNA sense strand
ggaauggcaugcugaacau

SEQ ID NO: 175219 - RNA, 19 nt, Homo sapiens
  misc_RNA (1)...(19): siRNA sense strand
gaucagcuuugacgucuuc

SEQ ID NO: 175220 - RNA, 19 nt, Homo sapiens
  misc_RNA (1)...(19): siRNA sense strand
gcaaagggcugagguucuc

SEQ ID NO: 175221 - RNA, 19 nt, Homo sapiens
  misc_RNA (1)...(19): siRNA sense strand
ggaacgacuuugagaucuu

SEQ ID NO: 175222 - RNA, 19 nt, Homo sapiens
  misc_RNA (1)...(19): siRNA sense strand
gaacuggacaagaaagaga

SEQ ID NO: 175223 - RNA, 19 nt, Homo sapiens
  misc_RNA (1)...(19): siRNA sense strand
gaggaggcaugaucagcuu

SEQ ID NO: 175224 - RNA, 19 nt, Homo sapiens
  misc_RNA (1)...(19): siRNA sense strand
ucuccgaacuggacaagaa

SEQ ID NO: 175225 - RNA, 19 nt, Homo sapiens
  misc_RNA (1)...(19): siRNA sense strand
ugaagucauugagaaguuu

SEQ ID NO: 175226 - RNA, 19 nt, Homo sapiens
  misc_RNA (1)...(19): siRNA sense strand
gaacgggacggugcaguau

SEQ ID NO: 175227 - RNA, 19 nt, Homo sapiens
  misc_RNA (1)...(19): siRNA sense strand
ccaagcagaccauccagaa

SEQ ID NO: 175228 - RNA, 19 nt, Homo sapiens
  misc_RNA (1)...(19): siRNA sense strand
gagaagauccgggagaagu

SEQ ID NO: 175229 - RNA, 19 nt, Homo sapiens
  misc_RNA (1)...(19): siRNA sense strand
acgggacggugcaguauaa

SEQ ID NO: 175230 - RNA, 19 nt, Homo sapiens
  misc_RNA (1)...(19): siRNA sense strand
cugcagaagcuacgaagua

SEQ ID NO: 175231 - RNA, 19 nt, Homo sapiens
  misc_RNA (1)...(19): siRNA sense strand
ugagaaguuugauuaugug

SEQ ID NO: 175232 - RNA, 19 nt, Homo sapiens
  misc_RNA (1)...(19): siRNA sense strand
ggacggugcaguauaagca

SEQ ID NO: 175233 - RNA, 19 nt, Homo sapiens
  misc_RNA (1)...(19): siRNA sense strand
aagagaagauccgggagaa

SEQ ID NO: 175234 - RNA, 19 nt, Homo sapiens
  misc_RNA (1)...(19): siRNA sense strand
cgacaccauccacuucuuu

SEQ ID NO: 175235 - RNA, 19 nt, Homo sapiens
  misc_RNA (1)...(19): siRNA sense strand
gggaacgacuuugagaucu

SEQ ID NO: 175236 - RNA, 19 nt, Homo sapiens
  misc_RNA (1)...(19): siRNA sense strand
ccaagaagcguggaaccuu

SEQ ID NO: 175237 - RNA, 19 nt, Homo sapiens
  misc_RNA (1)...(19): siRNA sense strand
gaagauccgggagaaguuc

SEQ ID NO: 175238 - RNA, 19 nt, Homo sapiens
  misc_RNA (1)...(19): siRNA sense strand
uggaagaccugaaaacaga

SEQ ID NO: 175239 - RNA, 19 nt, Homo sapiens
  misc_RNA (1)...(19): siRNA sense strand
gagauuuucuucccagaga

SEQ ID NO: 175240 - RNA, 19 nt, Homo sapiens
  misc_RNA (1)...(19): siRNA sense strand
guggaaccuucaucgaguu

SEQ ID NO: 175241 - RNA, 19 nt, Homo sapiens
  misc_RNA (1)...(19): siRNA sense strand
gaggcaugaucagcuuuga

SEQ ID NO: 175242 - RNA, 19 nt, Homo sapiens
  misc_RNA (1)...(19): siRNA sense strand
ggacaagaaagagaagauc

SEQ ID NO: 175243 - RNA, 19 nt, Homo sapiens
  misc_RNA (1)...(19): siRNA sense strand
ggaggcaugaucagcuuug

SEQ ID NO: 175244 - RNA, 19 nt, Homo sapiens
  misc_RNA (1)...(19): siRNA sense strand
gaagucauugagaaguuug

SEQ ID NO: 175245 - RNA, 19 nt, Homo sapiens
  misc_RNA (1)...(19): siRNA sense strand
guucguggaagaccugaaa

SEQ ID NO: 175246 - RNA, 19 nt, Homo sapiens
  misc_RNA (1)...(19): siRNA sense strand
aagcgcuacugccuggaua

SEQ ID NO: 175247 - RNA, 19 nt, Homo sapiens
  misc_RNA (1)...(19): siRNA sense strand
gcgcguccucugccuguuu

SEQ ID NO: 175248 - RNA, 19 nt, Homo sapiens
  misc_RNA (1)...(19): siRNA sense strand
agaacgggacggugcagua

SEQ ID NO: 175249 - RNA, 19 nt, Homo sapiens
  misc_RNA (1)...(19): siRNA sense strand
cagcgaugccgggagauuu

SEQ ID NO: 175250 - RNA, 19 nt, Homo sapiens
  misc_RNA (1)...(19): siRNA sense strand
cugcaggacuugaucaacu

SEQ ID NO: 175251 - RNA, 19 nt, Homo sapiens
  misc_RNA (1)...(19): siRNA sense strand
gcagcgaugccgggagauu

SEQ ID NO: 175252 - RNA, 19 nt, Homo sapiens
  misc_RNA (1)...(19): siRNA sense strand
ggugggaacgacuuugaga

SEQ ID NO: 175253 - RNA, 19 nt, Homo sapiens
  misc_RNA (1)...(19): siRNA sense strand
cggaauggcaugcugaaca

SEQ ID NO: 175254 - RNA, 19 nt, Homo sapiens
  misc_RNA (1)...(19): siRNA sense strand
ugcaggacuugaucaacuu

SEQ ID NO: 175255 - RNA, 19 nt, Homo sapiens
  misc_RNA (1)...(19): siRNA sense strand
ucccagagacagcucauga

SEQ ID NO: 175256 - RNA, 19 nt, Homo sapiens
  misc_RNA (1)...(19): siRNA sense strand
ggcucugacuacuguaaga

SEQ ID NO: 175257 - RNA, 19 nt, Homo sapiens
  misc_RNA (1)...(19): siRNA sense strand
gacaccauccacuucuuug

SEQ ID NO: 175258 - RNA, 19 nt, Homo sapiens
  misc_RNA (1)...(19): siRNA sense strand
agaagauccgggagaaguu

SEQ ID NO: 175259 - RNA, 19 nt, Homo sapiens
  misc_RNA (1)...(19): siRNA sense strand
uggaggagaggaucgaguu

SEQ ID NO: 175260 - RNA, 19 nt, Homo sapiens
  misc_RNA (1)...(19): siRNA sense strand
ggaggagaggaucgaguuc

SEQ ID NO: 175261 - RNA, 19 nt, Homo sapiens
  misc_RNA (1)...(19): siRNA sense strand
gagacaagcuccagugugu

SEQ ID NO: 175262 - RNA, 19 nt, Homo sapiens
  misc_RNA (1)...(19): siRNA sense strand
gcaagcaaguauucaagaa

SEQ ID NO: 175263 - RNA, 19 nt, Homo sapiens
  misc_RNA (1)...(19): siRNA sense strand
ggaacuacaucauggacuu

SEQ ID NO: 175264 - RNA, 19 nt, Homo sapiens
  misc_RNA (1)...(19): siRNA sense strand
gcaggacggugaccauaug

SEQ ID NO: 175265 - RNA, 19 nt, Homo sapiens
  misc_RNA (1)...(19): siRNA sense strand
gugaugagcugcaccuaga

SEQ ID NO: 175266 - RNA, 19 nt, Homo sapiens
  misc_RNA (1)...(19): siRNA sense strand
gcaagugcaugacaacagu

SEQ ID NO: 175267 - RNA, 19 nt, Homo sapiens
  misc_RNA (1)...(19): siRNA sense strand
gagcugcaccuagagauga

SEQ ID NO: 175268 - RNA, 19 nt, Homo sapiens
  misc_RNA (1)...(19): siRNA sense strand
gaccgcaagugcaugacaa

SEQ ID NO: 175269 - RNA, 19 nt, Homo sapiens
  misc_RNA (1)...(19): siRNA sense strand
acgagaauuucgaggagua

SEQ ID NO: 175270 - RNA, 19 nt, Homo sapiens
  misc_RNA (1)...(19): siRNA sense strand
ggacggugaccauaugauc

SEQ ID NO: 175271 - RNA, 19 nt, Homo sapiens
  misc_RNA (1)...(19): siRNA sense strand
gaaggaguuugaggaggau

SEQ ID NO: 175272 - RNA, 19 nt, Homo sapiens
  misc_RNA (1)...(19): siRNA sense strand
gaugaccgcaagugcauga

SEQ ID NO: 175273 - RNA, 19 nt, Homo sapiens
  misc_RNA (1)...(19): siRNA sense strand
gaagccagacaaagagauc

SEQ ID NO: 175274 - RNA, 19 nt, Homo sapiens
  misc_RNA (1)...(19): siRNA sense strand
gagcugggacggagacaag

SEQ ID NO: 175275 - RNA, 19 nt, Homo sapiens
  misc_RNA (1)...(19): siRNA sense strand
ggucugcaagcaaguauuc

SEQ ID NO: 175276 - RNA, 19 nt, Homo sapiens
  misc_RNA (1)...(19): siRNA sense strand
caauguggccuugcgcaaa

SEQ ID NO: 175277 - RNA, 19 nt, Homo sapiens
  misc_RNA (1)...(19): siRNA sense strand
gaacuacaucauggacuuc

SEQ ID NO: 175278 - RNA, 19 nt, Homo sapiens
  misc_RNA (1)...(19): siRNA sense strand
uggaagguguggucugcaa

SEQ ID NO: 175279 - RNA, 19 nt, Homo sapiens
  misc_RNA (1)...(19): siRNA sense strand
gaugagcugcaccuagaga

SEQ ID NO: 175280 - RNA, 19 nt, Homo sapiens
  misc_RNA (1)...(19): siRNA sense strand
gcauagaugaccgcaagug

SEQ ID NO: 175281 - RNA, 19 nt, Homo sapiens
  misc_RNA (1)...(19): siRNA sense strand
acuggaagauguuggucaa

SEQ ID NO: 175282 - RNA, 19 nt, Homo sapiens
  misc_RNA (1)...(19): siRNA sense strand
gugcaggacggugaccaua

SEQ ID NO: 175283 - RNA, 19 nt, Homo sapiens
  misc_RNA (1)...(19): siRNA sense strand
gacggugaccauaugauca

SEQ ID NO: 175284 - RNA, 19 nt, Homo sapiens
  misc_RNA (1)...(19): siRNA sense strand
caagcaaguauucaagaag

SEQ ID NO: 175285 - RNA, 19 nt, Homo sapiens
  misc_RNA (1)...(19): siRNA sense strand
gcugaagccagacaaagag

SEQ ID NO: 175286 - RNA, 19 nt, Homo sapiens
  misc_RNA (1)...(19): siRNA sense strand
gaaacugagugauuuacaa

SEQ ID NO: 175287 - RNA, 19 nt, Homo sapiens
  misc_RNA (1)...(19): siRNA sense strand
gaagaaacugagugauuua

SEQ ID NO: 175288 - RNA, 19 nt, Homo sapiens
  misc_RNA (1)...(19): siRNA sense strand
agaagaaacugagugauuu

SEQ ID NO: 175289 - RNA, 19 nt, Homo sapiens
  misc_RNA (1)...(19): siRNA sense strand
gcaaggagcaugccaagug

SEQ ID NO: 175290 - RNA, 19 nt, Homo sapiens
  misc_RNA (1)...(19): siRNA sense strand
ucacaggcuuggauuaauu

SEQ ID NO: 175291 - RNA, 19 nt, Homo sapiens
  misc_RNA (1)...(19): siRNA sense strand
ugaauacgauccagacaau

SEQ ID NO: 175292 - RNA, 19 nt, Homo sapiens
  misc_RNA (1)...(19): siRNA sense strand
ggagcucacugacgagaau

SEQ ID NO: 175293 - RNA, 19 nt, Homo sapiens
  misc_RNA (1)...(19): siRNA sense strand
gauccagagugaugugcua

SEQ ID NO: 175294 - RNA, 19 nt, Homo sapiens
  misc_RNA (1)...(19): siRNA sense strand
gccacgagauccagaguga

SEQ ID NO: 175295 - RNA, 19 nt, Homo sapiens
  misc_RNA (1)...(19): siRNA sense strand
gugaugugcuaaccauaaa

SEQ ID NO: 175296 - RNA, 19 nt, Homo sapiens
  misc_RNA (1)...(19): siRNA sense strand
gcucacaggcuuggauuaa

SEQ ID NO: 175297 - RNA, 19 nt, Homo sapiens
  misc_RNA (1)...(19): siRNA sense strand
gaugugcggugcaaugaag

SEQ ID NO: 175298 - RNA, 19 nt, Homo sapiens
  misc_RNA (1)...(19): siRNA sense strand
gcugagacuucgagccuau

SEQ ID NO: 175299 - RNA, 19 nt, Homo sapiens
  misc_RNA (1)...(19): siRNA sense strand
gagaaugucaaguucauca

SEQ ID NO: 175300 - RNA, 19 nt, Homo sapiens
  misc_RNA (1)...(19): siRNA sense strand
aagaagaaacugagugauu

SEQ ID NO: 175301 - RNA, 19 nt, Homo sapiens
  misc_RNA (1)...(19): siRNA sense strand
ugucagcccucucaggauu

SEQ ID NO: 175302 - RNA, 19 nt, Homo sapiens
  misc_RNA (1)...(19): siRNA sense strand
gaugugcuaaccauaaauu

SEQ ID NO: 175303 - RNA, 19 nt, Homo sapiens
  misc_RNA (1)...(19): siRNA sense strand
ucgcugagguucccauaau

SEQ ID NO: 175304 - RNA, 19 nt, Homo sapiens
  misc_RNA (1)...(19): siRNA sense strand
ugaagaagaaacugaguga

SEQ ID NO: 175305 - RNA, 19 nt, Homo sapiens
  misc_RNA (1)...(19): siRNA sense strand
ucaaguucaucaucgagaa

SEQ ID NO: 175306 - RNA, 19 nt, Homo sapiens
  misc_RNA (1)...(19): siRNA sense strand
gaccagacgcgacauguca

SEQ ID NO: 175307 - RNA, 19 nt, Homo sapiens
  misc_RNA (1)...(19): siRNA sense strand
ucucaggauugaagaagaa

SEQ ID NO: 175308 - RNA, 19 nt, Homo sapiens
  misc_RNA (1)...(19): siRNA sense strand
ggaguucacccucgaugug

SEQ ID NO: 175309 - RNA, 19 nt, Homo sapiens
  misc_RNA (1)...(19): siRNA sense strand
ugaaaccauuguccuguca

SEQ ID NO: 175310 - RNA, 19 nt, Homo sapiens
  misc_RNA (1)...(19): siRNA sense strand
ggauugaagaagaaacuga

SEQ ID NO: 175311 - RNA, 19 nt, Homo sapiens
  misc_RNA (1)...(19): siRNA sense strand
gccauugacuggguucaga

SEQ ID NO: 175312 - RNA, 19 nt, Homo sapiens
  misc_RNA (1)...(19): siRNA sense strand
ccagaaagguuuuacuaca

SEQ ID NO: 175313 - RNA, 19 nt, Homo sapiens
  misc_RNA (1)...(19): siRNA sense strand
ucaauuaagccacgagauc

SEQ ID NO: 175314 - RNA, 19 nt, Homo sapiens
  misc_RNA (1)...(19): siRNA sense strand
gaagaccagacgcgacaug

SEQ ID NO: 175315 - RNA, 19 nt, Homo sapiens
  misc_RNA (1)...(19): siRNA sense strand
uggacaagcugcaguacuc

SEQ ID NO: 175316 - RNA, 19 nt, Homo sapiens
  misc_RNA (1)...(19): siRNA sense strand
gcacaugugaggaguucug

SEQ ID NO: 175317 - RNA, 19 nt, Homo sapiens
  misc_RNA (1)...(19): siRNA sense strand
cgcugagguucccauaaua

SEQ ID NO: 175318 - RNA, 19 nt, Homo sapiens
  misc_RNA (1)...(19): siRNA sense strand
gaaugucaaguucaucauc

SEQ ID NO: 175319 - RNA, 19 nt, Homo sapiens
  misc_RNA (1)...(19): siRNA sense strand
cagaaagguuuuacuacaa

SEQ ID NO: 175320 - RNA, 19 nt, Homo sapiens
  misc_RNA (1)...(19): siRNA sense strand
cggcaagccagaaagguuu

SEQ ID NO: 175321 - RNA, 19 nt, Homo sapiens
  misc_RNA (1)...(19): siRNA sense strand
cauuagugaugacauugug

SEQ ID NO: 175322 - RNA, 19 nt, Homo sapiens
  misc_RNA (1)...(19): siRNA sense strand
aggaauggccaaagaguga

SEQ ID NO: 175323 - RNA, 19 nt, Homo sapiens
  misc_RNA (1)...(19): siRNA sense strand
agagugaugugcuaaccau

SEQ ID NO: 175324 - RNA, 19 nt, Homo sapiens
  misc_RNA (1)...(19): siRNA sense strand
gagauaaugaccccaauga

SEQ ID NO: 175325 - RNA, 19 nt, Homo sapiens
  misc_RNA (1)...(19): siRNA sense strand
uugacuggguucagauuga

SEQ ID NO: 175326 - RNA, 19 nt, Homo sapiens
  misc_RNA (1)...(19): siRNA sense strand
cccgaggaauggccaaaga

SEQ ID NO: 175327 - RNA, 19 nt, Homo sapiens
  misc_RNA (1)...(19): siRNA sense strand
ucucgggacugcacaugug

SEQ ID NO: 175328 - RNA, 19 nt, Homo sapiens
  misc_RNA (1)...(19): siRNA sense strand
gcugagguucccauaauag

SEQ ID NO: 175329 - RNA, 19 nt, Homo sapiens
  misc_RNA (1)...(19): siRNA sense strand
ugacuggguucagauugau

SEQ ID NO: 175330 - RNA, 19 nt, Homo sapiens
  misc_RNA (1)...(19): siRNA sense strand
gaaagguuuuacuacaaug

SEQ ID NO: 175331 - RNA, 19 nt, Homo sapiens
  misc_RNA (1)...(19): siRNA sense strand
ggaucacggagcucacuga

SEQ ID NO: 175332 - RNA, 19 nt, Homo sapiens
  misc_RNA (1)...(19): siRNA sense strand
agugaugugcuaaccauaa

SEQ ID NO: 175333 - RNA, 19 nt, Homo sapiens
  misc_RNA (1)...(19): siRNA sense strand
gaagaagaaacugagugau

SEQ ID NO: 175334 - RNA, 19 nt, Homo sapiens
  misc_RNA (1)...(19): siRNA sense strand
ggagcuggaugaggaugag

SEQ ID NO: 175335 - RNA, 19 nt, Homo sapiens
  misc_RNA (1)...(19): siRNA sense strand
cacgagauccagagugaug

SEQ ID NO: 175336 - RNA, 19 nt, Homo sapiens
  misc_RNA (1)...(19): siRNA sense strand
acgagaaugucaaguucau

SEQ ID NO: 175337 - RNA, 19 nt, Homo sapiens
  misc_RNA (1)...(19): siRNA sense strand
agucgcaggcucccuauga

SEQ ID NO: 175338 - RNA, 19 nt, Homo sapiens
  misc_RNA (1)...(19): siRNA sense strand
ggccaggagcugagacuuc

SEQ ID NO: 175339 - RNA, 19 nt, Homo sapiens
  misc_RNA (1)...(19): siRNA sense strand
ggucuucaucgcugagguu

SEQ ID NO: 175340 - RNA, 19 nt, Homo sapiens
  misc_RNA (1)...(19): siRNA sense strand
ucagcccucucaggauuga

SEQ ID NO: 175341 - RNA, 19 nt, Homo sapiens
  misc_RNA (1)...(19): siRNA sense strand
caacggcaagccagaaagg

SEQ ID NO: 175342 - RNA, 19 nt, Homo sapiens
  misc_RNA (1)...(19): siRNA sense strand
ggcgguggccaauucgauu

SEQ ID NO: 175343 - RNA, 19 nt, Homo sapiens
  misc_RNA (1)...(19): siRNA sense strand
gacgagaaugucaaguuca

SEQ ID NO: 175344 - RNA, 19 nt, Homo sapiens
  misc_RNA (1)...(19): siRNA sense strand
cagccuaccgugcggauca

SEQ ID NO: 175345 - RNA, 19 nt, Homo sapiens
  misc_RNA (1)...(19): siRNA sense strand
gaauacgauccagacaaug

SEQ ID NO: 175346 - RNA, 19 nt, Homo sapiens
  misc_RNA (1)...(19): siRNA sense strand
gaaacugagugauuuacaa

SEQ ID NO: 175347 - RNA, 19 nt, Homo sapiens
  misc_RNA (1)...(19): siRNA sense strand
gaagaaacugagugauuua

SEQ ID NO: 175348 - RNA, 19 nt, Homo sapiens
  misc_RNA (1)...(19): siRNA sense strand
agaagaaacugagugauuu

SEQ ID NO: 175349 - RNA, 19 nt, Homo sapiens
  misc_RNA (1)...(19): siRNA sense strand
gcaaggagcaugccaagug

SEQ ID NO: 175350 - RNA, 19 nt, Homo sapiens
  misc_RNA (1)...(19): siRNA sense strand
ucacaggcuuggauuaauu

SEQ ID NO: 175351 - RNA, 19 nt, Homo sapiens
  misc_RNA (1)...(19): siRNA sense strand
ugaauacgauccagacaau

SEQ ID NO: 175352 - RNA, 19 nt, Homo sapiens
  misc_RNA (1)...(19): siRNA sense strand
ggagcucacugacgagaau

SEQ ID NO: 175353 - RNA, 19 nt, Homo sapiens
  misc_RNA (1)...(19): siRNA sense strand
gauccagagugaugugcua

SEQ ID NO: 175354 - RNA, 19 nt, Homo sapiens
  misc_RNA (1)...(19): siRNA sense strand
gccacgagauccagaguga

SEQ ID NO: 175355 - RNA, 19 nt, Homo sapiens
  misc_RNA (1)...(19): siRNA sense strand
gugaugugcuaaccauaaa

SEQ ID NO: 175356 - RNA, 19 nt, Homo sapiens
  misc_RNA (1)...(19): siRNA sense strand
gcucacaggcuuggauuaa

SEQ ID NO: 175357 - RNA, 19 nt, Homo sapiens
  misc_RNA (1)...(19): siRNA sense strand
gaugugcggugcaaugaag

SEQ ID NO: 175358 - RNA, 19 nt, Homo sapiens
  misc_RNA (1)...(19): siRNA sense strand
gcugagacuucgagccuau

SEQ ID NO: 175359 - RNA, 19 nt, Homo sapiens
  misc_RNA (1)...(19): siRNA sense strand
gagaaugucaaguucauca

SEQ ID NO: 175360 - RNA, 19 nt, Homo sapiens
  misc_RNA (1)...(19): siRNA sense strand
aagaagaaacugagugauu

SEQ ID NO: 175361 - RNA, 19 nt, Homo sapiens
  misc_RNA (1)...(19): siRNA sense strand
ugucagcccucucaggauu

SEQ ID NO: 175362 - RNA, 19 nt, Homo sapiens
  misc_RNA (1)...(19): siRNA sense strand
gaugugcuaaccauaaauu

SEQ ID NO: 175363 - RNA, 19 nt, Homo sapiens
  misc_RNA (1)...(19): siRNA sense strand
ucgcugagguucccauaau

SEQ ID NO: 175364 - RNA, 19 nt, Homo sapiens
  misc_RNA (1)...(19): siRNA sense strand
ugaagaagaaacugaguga

SEQ ID NO: 175365 - RNA, 19 nt, Homo sapiens
  misc_RNA (1)...(19): siRNA sense strand
ucaaguucaucaucgagaa

SEQ ID NO: 175366 - RNA, 19 nt, Homo sapiens
  misc_RNA (1)...(19): siRNA sense strand
gaccagacgcgacauguca

SEQ ID NO: 175367 - RNA, 19 nt, Homo sapiens
  misc_RNA (1)...(19): siRNA sense strand
ucucaggauugaagaagaa

SEQ ID NO: 175368 - RNA, 19 nt, Homo sapiens
  misc_RNA (1)...(19): siRNA sense strand
ggaguucacccucgaugug

SEQ ID NO: 175369 - RNA, 19 nt, Homo sapiens
  misc_RNA (1)...(19): siRNA sense strand
ugaaaccauuguccuguca

SEQ ID NO: 175370 - RNA, 19 nt, Homo sapiens
  misc_RNA (1)...(19): siRNA sense strand
ggauugaagaagaaacuga

SEQ ID NO: 175371 - RNA, 19 nt, Homo sapiens
  misc_RNA (1)...(19): siRNA sense strand
gccauugacuggguucaga

SEQ ID NO: 175372 - RNA, 19 nt, Homo sapiens
  misc_RNA (1)...(19): siRNA sense strand
ccagaaagguuuuacuaca

SEQ ID NO: 175373 - RNA, 19 nt, Homo sapiens
  misc_RNA (1)...(19): siRNA sense strand
ucaauuaagccacgagauc

SEQ ID NO: 175374 - RNA, 19 nt, Homo sapiens
  misc_RNA (1)...(19): siRNA sense strand
gaagaccagacgcgacaug

SEQ ID NO: 175375 - RNA, 19 nt, Homo sapiens
  misc_RNA (1)...(19): siRNA sense strand
uggacaagcugcaguacuc

SEQ ID NO: 175376 - RNA, 19 nt, Homo sapiens
  misc_RNA (1)...(19): siRNA sense strand
gcacaugugaggaguucug

SEQ ID NO: 175377 - RNA, 19 nt, Homo sapiens
  misc_RNA (1)...(19): siRNA sense strand
cgcugagguucccauaaua

SEQ ID NO: 175378 - RNA, 19 nt, Homo sapiens
  misc_RNA (1)...(19): siRNA sense strand
gaaugucaaguucaucauc

SEQ ID NO: 175379 - RNA, 19 nt, Homo sapiens
  misc_RNA (1)...(19): siRNA sense strand
cagaaagguuuuacuacaa

SEQ ID NO: 175380 - RNA, 19 nt, Homo sapiens
  misc_RNA (1)...(19): siRNA sense strand
cggcaagccagaaagguuu

SEQ ID NO: 175381 - RNA, 19 nt, Homo sapiens
  misc_RNA (1)...(19): siRNA sense strand
cauuagugaugacauugug

SEQ ID NO: 175382 - RNA, 19 nt, Homo sapiens
  misc_RNA (1)...(19): siRNA sense strand
aggaauggccaaagaguga

SEQ ID NO: 175383 - RNA, 19 nt, Homo sapiens
  misc_RNA (1)...(19): siRNA sense strand
agagugaugugcuaaccau

SEQ ID NO: 175384 - RNA, 19 nt, Homo sapiens
  misc_RNA (1)...(19): siRNA sense strand
gagauaaugaccccaauga

SEQ ID NO: 175385 - RNA, 19 nt, Homo sapiens
  misc_RNA (1)...(19): siRNA sense strand
uugacuggguucagauuga

SEQ ID NO: 175386 - RNA, 19 nt, Homo sapiens
  misc_RNA (1)...(19): siRNA sense strand
cccgaggaauggccaaaga

SEQ ID NO: 175387 - RNA, 19 nt, Homo sapiens
  misc_RNA (1)...(19): siRNA sense strand
ucucgggacugcacaugug

SEQ ID NO: 175388 - RNA, 19 nt, Homo sapiens
  misc_RNA (1)...(19): siRNA sense strand
gcugagguucccauaauag

SEQ ID NO: 175389 - RNA, 19 nt, Homo sapiens
  misc_RNA (1)...(19): siRNA sense strand
ugacuggguucagauugau

SEQ ID NO: 175390 - RNA, 19 nt, Homo sapiens
  misc_RNA (1)...(19): siRNA sense strand
gaaagguuuuacuacaaug

SEQ ID NO: 175391 - RNA, 19 nt, Homo sapiens
  misc_RNA (1)...(19): siRNA sense strand
ggaucacggagcucacuga

SEQ ID NO: 175392 - RNA, 19 nt, Homo sapiens
  misc_RNA (1)...(19): siRNA sense strand
agugaugugcuaaccauaa

SEQ ID NO: 175393 - RNA, 19 nt, Homo sapiens
  misc_RNA (1)...(19): siRNA sense strand
gaagaagaaacugagugau

SEQ ID NO: 175394 - RNA, 19 nt, Homo sapiens
  misc_RNA (1)...(19): siRNA sense strand
ggagcuggaugaggaugag

SEQ ID NO: 175395 - RNA, 19 nt, Homo sapiens
  misc_RNA (1)...(19): siRNA sense strand
cacgagauccagagugaug

SEQ ID NO: 175396 - RNA, 19 nt, Homo sapiens
  misc_RNA (1)...(19): siRNA sense strand
acgagaaugucaaguucau

SEQ ID NO: 175397 - RNA, 19 nt, Homo sapiens
  misc_RNA (1)...(19): siRNA sense strand
agucgcaggcucccuauga

SEQ ID NO: 175398 - RNA, 19 nt, Homo sapiens
  misc_RNA (1)...(19): siRNA sense strand
ggccaggagcugagacuuc

SEQ ID NO: 175399 - RNA, 19 nt, Homo sapiens
  misc_RNA (1)...(19): siRNA sense strand
ggucuucaucgcugagguu

SEQ ID NO: 175400 - RNA, 19 nt, Homo sapiens
  misc_RNA (1)...(19): siRNA sense strand
ucagcccucucaggauuga

SEQ ID NO: 175401 - RNA, 19 nt, Homo sapiens
  misc_RNA (1)...(19): siRNA sense strand
caacggcaagccagaaagg

SEQ ID NO: 175402 - RNA, 19 nt, Homo sapiens
  misc_RNA (1)...(19): siRNA sense strand
ggcgguggccaauucgauu

SEQ ID NO: 175403 - RNA, 19 nt, Homo sapiens
  misc_RNA (1)...(19): siRNA sense strand
gacgagaaugucaaguuca

SEQ ID NO: 175404 - RNA, 19 nt, Homo sapiens
  misc_RNA (1)...(19): siRNA sense strand
cagccuaccgugcggauca

SEQ ID NO: 175405 - RNA, 19 nt, Homo sapiens
  misc_RNA (1)...(19): siRNA sense strand
gaauacgauccagacaaug

SEQ ID NO: 175406 - RNA, 19 nt, Homo sapiens
  misc_RNA (1)...(19): siRNA sense strand
ggagagagauuuucuuaaa

SEQ ID NO: 175407 - RNA, 19 nt, Homo sapiens
  misc_RNA (1)...(19): siRNA sense strand
ggaaauauugggaaguaua

SEQ ID NO: 175408 - RNA, 19 nt, Homo sapiens
  misc_RNA (1)...(19): siRNA sense strand
ugauggcacuucucaaaua

SEQ ID NO: 175409 - RNA, 19 nt, Homo sapiens
  misc_RNA (1)...(19): siRNA sense strand
gaaguaauguucuuaaacg

SEQ ID NO: 175410 - RNA, 19 nt, Homo sapiens
  misc_RNA (1)...(19): siRNA sense strand
gaauauaucacccauaauc

SEQ ID NO: 175411 - RNA, 19 nt, Homo sapiens
  misc_RNA (1)...(19): siRNA sense strand
uaagugaccuaaaguggaa

SEQ ID NO: 175412 - RNA, 19 nt, Homo sapiens
  misc_RNA (1)...(19): siRNA sense strand
guccauauguuugcaguua

SEQ ID NO: 175413 - RNA, 19 nt, Homo sapiens
  misc_RNA (1)...(19): siRNA sense strand
aaacagagcaucauaaugg

SEQ ID NO: 175414 - RNA, 19 nt, Homo sapiens
  misc_RNA (1)...(19): siRNA sense strand
gcaguuaacauguuucgaa

SEQ ID NO: 175415 - RNA, 19 nt, Homo sapiens
  misc_RNA (1)...(19): siRNA sense strand
gcgaagaaauauauugauc

SEQ ID NO: 175416 - RNA, 19 nt, Homo sapiens
  misc_RNA (1)...(19): siRNA sense strand
ggaagaugaaccaacguua

SEQ ID NO: 175417 - RNA, 19 nt, Homo sapiens
  misc_RNA (1)...(19): siRNA sense strand
cuugagagcuuacaucaga

SEQ ID NO: 175418 - RNA, 19 nt, Homo sapiens
  misc_RNA (1)...(19): siRNA sense strand
caucagaauuugugaagau

SEQ ID NO: 175419 - RNA, 19 nt, Homo sapiens
  misc_RNA (1)...(19): siRNA sense strand
gaaguaguccauauguuug

SEQ ID NO: 175420 - RNA, 19 nt, Homo sapiens
  misc_RNA (1)...(19): siRNA sense strand
cagaguuacuggaaauauu

SEQ ID NO: 175421 - RNA, 19 nt, Homo sapiens
  misc_RNA (1)...(19): siRNA sense strand
ugaaaucucugagugucua

SEQ ID NO: 175422 - RNA, 19 nt, Homo sapiens
  misc_RNA (1)...(19): siRNA sense strand
agaaguaguccauauguuu

SEQ ID NO: 175423 - RNA, 19 nt, Homo sapiens
  misc_RNA (1)...(19): siRNA sense strand
gaagcagccuggccucauc

SEQ ID NO: 175424 - RNA, 19 nt, Homo sapiens
  misc_RNA (1)...(19): siRNA sense strand
ccagauuuccaaccuaaua

SEQ ID NO: 175425 - RNA, 19 nt, Homo sapiens
  misc_RNA (1)...(19): siRNA sense strand
gaucagaaguuuguauugc

SEQ ID NO: 175426 - RNA, 19 nt, Homo sapiens
  misc_RNA (1)...(19): siRNA sense strand
gaagaugaaccaacguuag

SEQ ID NO: 175427 - RNA, 19 nt, Homo sapiens
  misc_RNA (1)...(19): siRNA sense strand
caucaugaguuuaaucagu

SEQ ID NO: 175428 - RNA, 19 nt, Homo sapiens
  misc_RNA (1)...(19): siRNA sense strand
gaaacagagcaucauaaug

SEQ ID NO: 175429 - RNA, 19 nt, Homo sapiens
  misc_RNA (1)...(19): siRNA sense strand
ggugauggcacuucucaaa

SEQ ID NO: 175430 - RNA, 19 nt, Homo sapiens
  misc_RNA (1)...(19): siRNA sense strand
aaaccacccuucacagaau

SEQ ID NO: 175431 - RNA, 19 nt, Homo sapiens
  misc_RNA (1)...(19): siRNA sense strand
uagcagaguuacuggaaau

SEQ ID NO: 175432 - RNA, 19 nt, Homo sapiens
  misc_RNA (1)...(19): siRNA sense strand
cauugaaccaucagaauuu

SEQ ID NO: 175433 - RNA, 19 nt, Homo sapiens
  misc_RNA (1)...(19): siRNA sense strand
uaaaguggaaggaaguaaa

SEQ ID NO: 175434 - RNA, 19 nt, Homo sapiens
  misc_RNA (1)...(19): siRNA sense strand
cagaaguaguccauauguu

SEQ ID NO: 175435 - RNA, 19 nt, Homo sapiens
  misc_RNA (1)...(19): siRNA sense strand
ccaccuuccuccaauccua

SEQ ID NO: 175436 - RNA, 19 nt, Homo sapiens
  misc_RNA (1)...(19): siRNA sense strand
cuggaaauauugggaagua

SEQ ID NO: 175437 - RNA, 19 nt, Homo sapiens
  misc_RNA (1)...(19): siRNA sense strand
gaaauuccuaggcuugaga

SEQ ID NO: 175438 - RNA, 19 nt, Homo sapiens
  misc_RNA (1)...(19): siRNA sense strand
ucacagaaucuaugggaaa

SEQ ID NO: 175439 - RNA, 19 nt, Homo sapiens
  misc_RNA (1)...(19): siRNA sense strand
aaagaagagcacaagauuu

SEQ ID NO: 175440 - RNA, 19 nt, Homo sapiens
  misc_RNA (1)...(19): siRNA sense strand
ucaaagacccauuggaaca

SEQ ID NO: 175441 - RNA, 19 nt, Homo sapiens
  misc_RNA (1)...(19): siRNA sense strand
gaagagauuuuagauguca

SEQ ID NO: 175442 - RNA, 19 nt, Homo sapiens
  misc_RNA (1)...(19): siRNA sense strand
aaaacgagcugcuuuaagu

SEQ ID NO: 175443 - RNA, 19 nt, Homo sapiens
  misc_RNA (1)...(19): siRNA sense strand
gauggcacuucucaaauac

SEQ ID NO: 175444 - RNA, 19 nt, Homo sapiens
  misc_RNA (1)...(19): siRNA sense strand
ugaaacagagcaucauaau

SEQ ID NO: 175445 - RNA, 19 nt, Homo sapiens
  misc_RNA (1)...(19): siRNA sense strand
gaucacagagccuauuuac

SEQ ID NO: 175446 - RNA, 19 nt, Homo sapiens
  misc_RNA (1)...(19): siRNA sense strand
gcagaguuacuggaaauau

SEQ ID NO: 175447 - RNA, 19 nt, Homo sapiens
  misc_RNA (1)...(19): siRNA sense strand
ugacaacgcagcgaagauu

SEQ ID NO: 175448 - RNA, 19 nt, Homo sapiens
  misc_RNA (1)...(19): siRNA sense strand
gcaacucaaagacccauug

SEQ ID NO: 175449 - RNA, 19 nt, Homo sapiens
  misc_RNA (1)...(19): siRNA sense strand
cgagcugcuuuaagugaaa

SEQ ID NO: 175450 - RNA, 19 nt, Homo sapiens
  misc_RNA (1)...(19): siRNA sense strand
gcgaagauucugcccauca

SEQ ID NO: 175451 - RNA, 19 nt, Homo sapiens
  misc_RNA (1)...(19): siRNA sense strand
aaccuaauauagcgaagaa

SEQ ID NO: 175452 - RNA, 19 nt, Homo sapiens
  misc_RNA (1)...(19): siRNA sense strand
ucauugaaccaucagaauu

SEQ ID NO: 175453 - RNA, 19 nt, Homo sapiens
  misc_RNA (1)...(19): siRNA sense strand
aucuacagcuuguuuauga

SEQ ID NO: 175454 - RNA, 19 nt, Homo sapiens
  misc_RNA (1)...(19): siRNA sense strand
acucaaagacccauuggaa

SEQ ID NO: 175455 - RNA, 19 nt, Homo sapiens
  misc_RNA (1)...(19): siRNA sense strand
cgaagauucugcccaucau

SEQ ID NO: 175456 - RNA, 19 nt, Homo sapiens
  misc_RNA (1)...(19): siRNA sense strand
cuccagauuuccaaccuaa

SEQ ID NO: 175457 - RNA, 19 nt, Homo sapiens
  misc_RNA (1)...(19): siRNA sense strand
guuugcaguuaacauguuu

SEQ ID NO: 175458 - RNA, 19 nt, Homo sapiens
  misc_RNA (1)...(19): siRNA sense strand
caaagacccauuggaacaa

SEQ ID NO: 175459 - RNA, 19 nt, Homo sapiens
  misc_RNA (1)...(19): siRNA sense strand
uuuagagucuccagauuuc

SEQ ID NO: 175460 - RNA, 19 nt, Homo sapiens
  misc_RNA (1)...(19): siRNA sense strand
ccagaaguaguccauaugu

SEQ ID NO: 175461 - RNA, 19 nt, Homo sapiens
  misc_RNA (1)...(19): siRNA sense strand
cacagaaucuaugggaaau

SEQ ID NO: 175462 - RNA, 19 nt, Homo sapiens
  misc_RNA (1)...(19): siRNA sense strand
ccuaauauagcgaagaaau

SEQ ID NO: 175463 - RNA, 19 nt, Homo sapiens
  misc_RNA (1)...(19): siRNA sense strand
gaaccaucagaauuuguga

SEQ ID NO: 175464 - RNA, 19 nt, Homo sapiens
  misc_RNA (1)...(19): siRNA sense strand
cucaaauacuggccaaaga

SEQ ID NO: 175465 - RNA, 19 nt, Homo sapiens
  misc_RNA (1)...(19): siRNA sense strand
aagaagagcacaagauuuu

SEQ ID NO: 175466 - RNA, 19 nt, Homo sapiens
  misc_RNA (1)...(19): siRNA sense strand
ugcuuuaagugaaauggua

SEQ ID NO: 175467 - RNA, 19 nt, Homo sapiens
  misc_RNA (1)...(19): siRNA sense strand
cagaauuugugaagaucau

SEQ ID NO: 175468 - RNA, 19 nt, Homo sapiens
  misc_RNA (1)...(19): siRNA sense strand
ccucaucuacagcuuguuu

SEQ ID NO: 175469 - RNA, 19 nt, Homo sapiens
  misc_RNA (1)...(19): siRNA sense strand
ggaauuugacccggaggaa

SEQ ID NO: 175470 - RNA, 19 nt, Homo sapiens
  misc_RNA (1)...(19): siRNA sense strand
gagccuauuuacccagaag

SEQ ID NO: 175471 - RNA, 19 nt, Homo sapiens
  misc_RNA (1)...(19): siRNA sense strand
caaagugaaaucucugagu

SEQ ID NO: 175472 - RNA, 19 nt, Homo sapiens
  misc_RNA (1)...(19): siRNA sense strand
cauagcagaguuacuggaa

SEQ ID NO: 175473 - RNA, 19 nt, Homo sapiens
  misc_RNA (1)...(19): siRNA sense strand
uaauggcauagcagaguua

SEQ ID NO: 175474 - RNA, 19 nt, Homo sapiens
  misc_RNA (1)...(19): siRNA sense strand
ugaagauccucgggagaga

SEQ ID NO: 175475 - RNA, 19 nt, Homo sapiens
  misc_RNA (1)...(19): siRNA sense strand
guagaauauaucacccaua

SEQ ID NO: 175476 - RNA, 19 nt, Homo sapiens
  misc_RNA (1)...(19): siRNA sense strand
gauucugcccaucauguuu

SEQ ID NO: 175477 - RNA, 19 nt, Homo sapiens
  misc_RNA (1)...(19): siRNA sense strand
gaagauucugcccaucaug

SEQ ID NO: 175478 - RNA, 19 nt, Homo sapiens
  misc_RNA (1)...(19): siRNA sense strand
ucuuugacuuuguuucuga

SEQ ID NO: 175479 - RNA, 19 nt, Homo sapiens
  misc_RNA (1)...(19): siRNA sense strand
ccagcuggcauacugugua

SEQ ID NO: 175480 - RNA, 19 nt, Homo sapiens
  misc_RNA (1)...(19): siRNA sense strand
agaguuacuggaaauauug

SEQ ID NO: 175481 - RNA, 19 nt, Homo sapiens
  misc_RNA (1)...(19): siRNA sense strand
gagcuuacaucagaaaaca

SEQ ID NO: 175482 - RNA, 19 nt, Homo sapiens
  misc_RNA (1)...(19): siRNA sense strand
aaguuuguauugcagcuuu

SEQ ID NO: 175483 - RNA, 19 nt, Homo sapiens
  misc_RNA (1)...(19): siRNA sense strand
ggccucaucuacagcuugu

SEQ ID NO: 175484 - RNA, 19 nt, Homo sapiens
  misc_RNA (1)...(19): siRNA sense strand
aagaugaaccaacguuaga

SEQ ID NO: 175485 - RNA, 19 nt, Homo sapiens
  misc_RNA (1)...(19): siRNA sense strand
gagcugcuuuaagugaaau

SEQ ID NO: 175486 - RNA, 19 nt, Homo sapiens
  misc_RNA (1)...(19): siRNA sense strand
cauguuuccuuccuuguac

SEQ ID NO: 175487 - RNA, 19 nt, Homo sapiens
  misc_RNA (1)...(19): siRNA sense strand
cagcuggcauacuguguag

SEQ ID NO: 175488 - RNA, 19 nt, Homo sapiens
  misc_RNA (1)...(19): siRNA sense strand
cuacgggagcggaauuuga

SEQ ID NO: 175489 - RNA, 19 nt, Homo sapiens
  misc_RNA (1)...(19): siRNA sense strand
caacuccaaugggccuuuc

SEQ ID NO: 175490 - RNA, 19 nt, Homo sapiens
  misc_RNA (1)...(19): siRNA sense strand
acccagaaguaguccauau

SEQ ID NO: 175491 - RNA, 19 nt, Homo sapiens
  misc_RNA (1)...(19): siRNA sense strand
ucaugaguuuaaucaguga

SEQ ID NO: 175492 - RNA, 19 nt, Homo sapiens
  misc_RNA (1)...(19): siRNA sense strand
uuucgaacauuaccaccuu

SEQ ID NO: 175493 - RNA, 19 nt, Homo sapiens
  misc_RNA (1)...(19): siRNA sense strand
auaauggcauagcagaguu

SEQ ID NO: 175494 - RNA, 19 nt, Homo sapiens
  misc_RNA (1)...(19): siRNA sense strand
aaaagaagagcacaagauu

SEQ ID NO: 175495 - RNA, 19 nt, Homo sapiens
  misc_RNA (1)...(19): siRNA sense strand
gugaucacagagccuauuu

SEQ ID NO: 175496 - RNA, 19 nt, Homo sapiens
  misc_RNA (1)...(19): siRNA sense strand
ucauguuuccuuccuugua

SEQ ID NO: 175497 - RNA, 19 nt, Homo sapiens
  misc_RNA (1)...(19): siRNA sense strand
ugggaaguauaauuaaugg

SEQ ID NO: 175498 - RNA, 19 nt, Homo sapiens
  misc_RNA (1)...(19): siRNA sense strand
cgugguccuucuccauauu

SEQ ID NO: 175499 - RNA, 19 nt, Homo sapiens
  misc_RNA (1)...(19): siRNA sense strand
gcugaucaagagaagcuuu

SEQ ID NO: 175500 - RNA, 19 nt, Homo sapiens
  misc_RNA (1)...(19): siRNA sense strand
gcaucauaauggcauagca

SEQ ID NO: 175501 - RNA, 19 nt, Homo sapiens
  misc_RNA (1)...(19): siRNA sense strand
gauccucgggagagagauu

SEQ ID NO: 175502 - RNA, 19 nt, Homo sapiens
  misc_RNA (1)...(19): siRNA sense strand
gauuuccaaccuaauauag

SEQ ID NO: 175503 - RNA, 19 nt, Homo sapiens
  misc_RNA (1)...(19): siRNA sense strand
gaugaaccaacguuagaag

SEQ ID NO: 175504 - RNA, 19 nt, Homo sapiens
  misc_RNA (1)...(19): siRNA sense strand
cauaauggcauagcagagu

SEQ ID NO: 175505 - RNA, 19 nt, Homo sapiens
  misc_RNA (1)...(19): siRNA sense strand
agaaguuacgucaguguug

SEQ ID NO: 175506 - RNA, 19 nt, Homo sapiens
  misc_RNA (1)...(19): siRNA sense strand
ggagagagauuuucuuaaa

SEQ ID NO: 175507 - RNA, 19 nt, Homo sapiens
  misc_RNA (1)...(19): siRNA sense strand
ggaaauauugggaaguaua

SEQ ID NO: 175508 - RNA, 19 nt, Homo sapiens
  misc_RNA (1)...(19): siRNA sense strand
ugauggcacuucucaaaua

SEQ ID NO: 175509 - RNA, 19 nt, Homo sapiens
  misc_RNA (1)...(19): siRNA sense strand
gaaguaauguucuuaaacg

SEQ ID NO: 175510 - RNA, 19 nt, Homo sapiens
  misc_RNA (1)...(19): siRNA sense strand
gaauauaucacccauaauc

SEQ ID NO: 175511 - RNA, 19 nt, Homo sapiens
  misc_RNA (1)...(19): siRNA sense strand
uaagugaccuaaaguggaa

SEQ ID NO: 175512 - RNA, 19 nt, Homo sapiens
  misc_RNA (1)...(19): siRNA sense strand
guccauauguuugcaguua

SEQ ID NO: 175513 - RNA, 19 nt, Homo sapiens
  misc_RNA (1)...(19): siRNA sense strand
aaacagagcaucauaaugg

SEQ ID NO: 175514 - RNA, 19 nt, Homo sapiens
  misc_RNA (1)...(19): siRNA sense strand
gcaguuaacauguuucgaa

SEQ ID NO: 175515 - RNA, 19 nt, Homo sapiens
  misc_RNA (1)...(19): siRNA sense strand
gcgaagaaauauauugauc

SEQ ID NO: 175516 - RNA, 19 nt, Homo sapiens
  misc_RNA (1)...(19): siRNA sense strand
ggaagaugaaccaacguua

SEQ ID NO: 175517 - RNA, 19 nt, Homo sapiens
  misc_RNA (1)...(19): siRNA sense strand
cuugagagcuuacaucaga

SEQ ID NO: 175518 - RNA, 19 nt, Homo sapiens
  misc_RNA (1)...(19): siRNA sense strand
caucagaauuugugaagau

SEQ ID NO: 175519 - RNA, 19 nt, Homo sapiens
  misc_RNA (1)...(19): siRNA sense strand
gaaguaguccauauguuug

SEQ ID NO: 175520 - RNA, 19 nt, Homo sapiens
  misc_RNA (1)...(19): siRNA sense strand
cagaguuacuggaaauauu

SEQ ID NO: 175521 - RNA, 19 nt, Homo sapiens
  misc_RNA (1)...(19): siRNA sense strand
ugaaaucucugagugucua

SEQ ID NO: 175522 - RNA, 19 nt, Homo sapiens
  misc_RNA (1)...(19): siRNA sense strand
agaaguaguccauauguuu

SEQ ID NO: 175523 - RNA, 19 nt, Homo sapiens
  misc_RNA (1)...(19): siRNA sense strand
gaagcagccuggccucauc

SEQ ID NO: 175524 - RNA, 19 nt, Homo sapiens
  misc_RNA (1)...(19): siRNA sense strand
ccagauuuccaaccuaaua

SEQ ID NO: 175525 - RNA, 19 nt, Homo sapiens
  misc_RNA (1)...(19): siRNA sense strand
gaucagaaguuuguauugc

SEQ ID NO: 175526 - RNA, 19 nt, Homo sapiens
  misc_RNA (1)...(19): siRNA sense strand
gaagaugaaccaacguuag

SEQ ID NO: 175527 - RNA, 19 nt, Homo sapiens
  misc_RNA (1)...(19): siRNA sense strand
caucaugaguuuaaucagu

SEQ ID NO: 175528 - RNA, 19 nt, Homo sapiens
  misc_RNA (1)...(19): siRNA sense strand
gaaacagagcaucauaaug

SEQ ID NO: 175529 - RNA, 19 nt, Homo sapiens
  misc_RNA (1)...(19): siRNA sense strand
ggugauggcacuucucaaa

SEQ ID NO: 175530 - RNA, 19 nt, Homo sapiens
  misc_RNA (1)...(19): siRNA sense strand
aaaccacccuucacagaau

SEQ ID NO: 175531 - RNA, 19 nt, Homo sapiens
  misc_RNA (1)...(19): siRNA sense strand
uagcagaguuacuggaaau

SEQ ID NO: 175532 - RNA, 19 nt, Homo sapiens
  misc_RNA (1)...(19): siRNA sense strand
cauugaaccaucagaauuu

SEQ ID NO: 175533 - RNA, 19 nt, Homo sapiens
  misc_RNA (1)...(19): siRNA sense strand
uaaaguggaaggaaguaaa

SEQ ID NO: 175534 - RNA, 19 nt, Homo sapiens
  misc_RNA (1)...(19): siRNA sense strand
cagaaguaguccauauguu

SEQ ID NO: 175535 - RNA, 19 nt, Homo sapiens
  misc_RNA (1)...(19): siRNA sense strand
ccaccuuccuccaauccua

SEQ ID NO: 175536 - RNA, 19 nt, Homo sapiens
  misc_RNA (1)...(19): siRNA sense strand
cuggaaauauugggaagua

SEQ ID NO: 175537 - RNA, 19 nt, Homo sapiens
  misc_RNA (1)...(19): siRNA sense strand
gaaauuccuaggcuugaga

SEQ ID NO: 175538 - RNA, 19 nt, Homo sapiens
  misc_RNA (1)...(19): siRNA sense strand
ucacagaaucuaugggaaa

SEQ ID NO: 175539 - RNA, 19 nt, Homo sapiens
  misc_RNA (1)...(19): siRNA sense strand
aaagaagagcacaagauuu

SEQ ID NO: 175540 - RNA, 19 nt, Homo sapiens
  misc_RNA (1)...(19): siRNA sense strand
ucaaagacccauuggaaca

SEQ ID NO: 175541 - RNA, 19 nt, Homo sapiens
  misc_RNA (1)...(19): siRNA sense strand
gaagagauuuuagauguca

SEQ ID NO: 175542 - RNA, 19 nt, Homo sapiens
  misc_RNA (1)...(19): siRNA sense strand
aaaacgagcugcuuuaagu

SEQ ID NO: 175543 - RNA, 19 nt, Homo sapiens
  misc_RNA (1)...(19): siRNA sense strand
gauggcacuucucaaauac

SEQ ID NO: 175544 - RNA, 19 nt, Homo sapiens
  misc_RNA (1)...(19): siRNA sense strand
ugaaacagagcaucauaau

SEQ ID NO: 175545 - RNA, 19 nt, Homo sapiens
  misc_RNA (1)...(19): siRNA sense strand
gaucacagagccuauuuac

SEQ ID NO: 175546 - RNA, 19 nt, Homo sapiens
  misc_RNA (1)...(19): siRNA sense strand
gcagaguuacuggaaauau

SEQ ID NO: 175547 - RNA, 19 nt, Homo sapiens
  misc_RNA (1)...(19): siRNA sense strand
ugacaacgcagcgaagauu

SEQ ID NO: 175548 - RNA, 19 nt, Homo sapiens
  misc_RNA (1)...(19): siRNA sense strand
gcaacucaaagacccauug

SEQ ID NO: 175549 - RNA, 19 nt, Homo sapiens
  misc_RNA (1)...(19): siRNA sense strand
cgagcugcuuuaagugaaa

SEQ ID NO: 175550 - RNA, 19 nt, Homo sapiens
  misc_RNA (1)...(19): siRNA sense strand
gcgaagauucugcccauca

SEQ ID NO: 175551 - RNA, 19 nt, Homo sapiens
  misc_RNA (1)...(19): siRNA sense strand
aaccuaauauagcgaagaa

SEQ ID NO: 175552 - RNA, 19 nt, Homo sapiens
  misc_RNA (1)...(19): siRNA sense strand
ucauugaaccaucagaauu

SEQ ID NO: 175553 - RNA, 19 nt, Homo sapiens
  misc_RNA (1)...(19): siRNA sense strand
aucuacagcuuguuuauga

SEQ ID NO: 175554 - RNA, 19 nt, Homo sapiens
  misc_RNA (1)...(19): siRNA sense strand
acucaaagacccauuggaa

SEQ ID NO: 175555 - RNA, 19 nt, Homo sapiens
  misc_RNA (1)...(19): siRNA sense strand
cgaagauucugcccaucau

SEQ ID NO: 175556 - RNA, 19 nt, Homo sapiens
  misc_RNA (1)...(19): siRNA sense strand
cuccagauuuccaaccuaa

SEQ ID NO: 175557 - RNA, 19 nt, Homo sapiens
  misc_RNA (1)...(19): siRNA sense strand
guuugcaguuaacauguuu

SEQ ID NO: 175558 - RNA, 19 nt, Homo sapiens
  misc_RNA (1)...(19): siRNA sense strand
caaagacccauuggaacaa

SEQ ID NO: 175559 - RNA, 19 nt, Homo sapiens
  misc_RNA (1)...(19): siRNA sense strand
uuuagagucuccagauuuc

SEQ ID NO: 175560 - RNA, 19 nt, Homo sapiens
  misc_RNA (1)...(19): siRNA sense strand
ccagaaguaguccauaugu

SEQ ID NO: 175561 - RNA, 19 nt, Homo sapiens
  misc_RNA (1)...(19): siRNA sense strand
cacagaaucuaugggaaau

SEQ ID NO: 175562 - RNA, 19 nt, Homo sapiens
  misc_RNA (1)...(19): siRNA sense strand
ccuaauauagcgaagaaau

SEQ ID NO: 175563 - RNA, 19 nt, Homo sapiens
  misc_RNA (1)...(19): siRNA sense strand
gaaccaucagaauuuguga

SEQ ID NO: 175564 - RNA, 19 nt, Homo sapiens
  misc_RNA (1)...(19): siRNA sense strand
cucaaauacuggccaaaga

SEQ ID NO: 175565 - RNA, 19 nt, Homo sapiens
  misc_RNA (1)...(19): siRNA sense strand
aagaagagcacaagauuuu

SEQ ID NO: 175566 - RNA, 19 nt, Homo sapiens
  misc_RNA (1)...(19): siRNA sense strand
ugcuuuaagugaaauggua

SEQ ID NO: 175567 - RNA, 19 nt, Homo sapiens
  misc_RNA (1)...(19): siRNA sense strand
cagaauuugugaagaucau

SEQ ID NO: 175568 - RNA, 19 nt, Homo sapiens
  misc_RNA (1)...(19): siRNA sense strand
ccucaucuacagcuuguuu

SEQ ID NO: 175569 - RNA, 19 nt, Homo sapiens
  misc_RNA (1)...(19): siRNA sense strand
ggaauuugacccggaggaa

SEQ ID NO: 175570 - RNA, 19 nt, Homo sapiens
  misc_RNA (1)...(19): siRNA sense strand
gagccuauuuacccagaag

SEQ ID NO: 175571 - RNA, 19 nt, Homo sapiens
  misc_RNA (1)...(19): siRNA sense strand
caaagugaaaucucugagu

SEQ ID NO: 175572 - RNA, 19 nt, Homo sapiens
  misc_RNA (1)...(19): siRNA sense strand
cauagcagaguuacuggaa

SEQ ID NO: 175573 - RNA, 19 nt, Homo sapiens
  misc_RNA (1)...(19): siRNA sense strand
uaauggcauagcagaguua

SEQ ID NO: 175574 - RNA, 19 nt, Homo sapiens
  misc_RNA (1)...(19): siRNA sense strand
ugaagauccucgggagaga

SEQ ID NO: 175575 - RNA, 19 nt, Homo sapiens
  misc_RNA (1)...(19): siRNA sense strand
guagaauauaucacccaua

SEQ ID NO: 175576 - RNA, 19 nt, Homo sapiens
  misc_RNA (1)...(19): siRNA sense strand
gauucugcccaucauguuu

SEQ ID NO: 175577 - RNA, 19 nt, Homo sapiens
  misc_RNA (1)...(19): siRNA sense strand
gaagauucugcccaucaug

SEQ ID NO: 175578 - RNA, 19 nt, Homo sapiens
  misc_RNA (1)...(19): siRNA sense strand
ucuuugacuuuguuucuga

SEQ ID NO: 175579 - RNA, 19 nt, Homo sapiens
  misc_RNA (1)...(19): siRNA sense strand
ccagcuggcauacugugua

SEQ ID NO: 175580 - RNA, 19 nt, Homo sapiens
  misc_RNA (1)...(19): siRNA sense strand
agaguuacuggaaauauug

SEQ ID NO: 175581 - RNA, 19 nt, Homo sapiens
  misc_RNA (1)...(19): siRNA sense strand
gagcuuacaucagaaaaca

SEQ ID NO: 175582 - RNA, 19 nt, Homo sapiens
  misc_RNA (1)...(19): siRNA sense strand
aaguuuguauugcagcuuu

SEQ ID NO: 175583 - RNA, 19 nt, Homo sapiens
  misc_RNA (1)...(19): siRNA sense strand
ggccucaucuacagcuugu

SEQ ID NO: 175584 - RNA, 19 nt, Homo sapiens
  misc_RNA (1)...(19): siRNA sense strand
aagaugaaccaacguuaga

SEQ ID NO: 175585 - RNA, 19 nt, Homo sapiens
  misc_RNA (1)...(19): siRNA sense strand
gagcugcuuuaagugaaau

SEQ ID NO: 175586 - RNA, 19 nt, Homo sapiens
  misc_RNA (1)...(19): siRNA sense strand
cauguuuccuuccuuguac

SEQ ID NO: 175587 - RNA, 19 nt, Homo sapiens
  misc_RNA (1)...(19): siRNA sense strand
cagcuggcauacuguguag

SEQ ID NO: 175588 - RNA, 19 nt, Homo sapiens
  misc_RNA (1)...(19): siRNA sense strand
cuacgggagcggaauuuga

SEQ ID NO: 175589 - RNA, 19 nt, Homo sapiens
  misc_RNA (1)...(19): siRNA sense strand
caacuccaaugggccuuuc

SEQ ID NO: 175590 - RNA, 19 nt, Homo sapiens
  misc_RNA (1)...(19): siRNA sense strand
acccagaaguaguccauau

SEQ ID NO: 175591 - RNA, 19 nt, Homo sapiens
  misc_RNA (1)...(19): siRNA sense strand
ucaugaguuuaaucaguga

SEQ ID NO: 175592 - RNA, 19 nt, Homo sapiens
  misc_RNA (1)...(19): siRNA sense strand
uuucgaacauuaccaccuu

SEQ ID NO: 175593 - RNA, 19 nt, Homo sapiens
  misc_RNA (1)...(19): siRNA sense strand
auaauggcauagcagaguu

SEQ ID NO: 175594 - RNA, 19 nt, Homo sapiens
  misc_RNA (1)...(19): siRNA sense strand
aaaagaagagcacaagauu

SEQ ID NO: 175595 - RNA, 19 nt, Homo sapiens
  misc_RNA (1)...(19): siRNA sense strand
gugaucacagagccuauuu

SEQ ID NO: 175596 - RNA, 19 nt, Homo sapiens
  misc_RNA (1)...(19): siRNA sense strand
ucauguuuccuuccuugua

SEQ ID NO: 175597 - RNA, 19 nt, Homo sapiens
  misc_RNA (1)...(19): siRNA sense strand
ugggaaguauaauuaaugg

SEQ ID NO: 175598 - RNA, 19 nt, Homo sapiens
  misc_RNA (1)...(19): siRNA sense strand
cgugguccuucuccauauu

SEQ ID NO: 175599 - RNA, 19 nt, Homo sapiens
  misc_RNA (1)...(19): siRNA sense strand
gcugaucaagagaagcuuu

SEQ ID NO: 175600 - RNA, 19 nt, Homo sapiens
  misc_RNA (1)...(19): siRNA sense strand
gcaucauaauggcauagca

SEQ ID NO: 175601 - RNA, 19 nt, Homo sapiens
  misc_RNA (1)...(19): siRNA sense strand
gauccucgggagagagauu

SEQ ID NO: 175602 - RNA, 19 nt, Homo sapiens
  misc_RNA (1)...(19): siRNA sense strand
gauuuccaaccuaauauag

SEQ ID NO: 175603 - RNA, 19 nt, Homo sapiens
  misc_RNA (1)...(19): siRNA sense strand
gaugaaccaacguuagaag

SEQ ID NO: 175604 - RNA, 19 nt, Homo sapiens
  misc_RNA (1)...(19): siRNA sense strand
cauaauggcauagcagagu

SEQ ID NO: 175605 - RNA, 19 nt, Homo sapiens
  misc_RNA (1)...(19): siRNA sense strand
agaaguuacgucaguguug

SEQ ID NO: 175606 - RNA, 19 nt, Homo sapiens
  misc_RNA (1)...(19): siRNA sense strand
ggagagagauuuucuuaaa

SEQ ID NO: 175607 - RNA, 19 nt, Homo sapiens
  misc_RNA (1)...(19): siRNA sense strand
ggaaauauugggaaguaua

SEQ ID NO: 175608 - RNA, 19 nt, Homo sapiens
  misc_RNA (1)...(19): siRNA sense strand
ugauggcacuucucaaaua

SEQ ID NO: 175609 - RNA, 19 nt, Homo sapiens
  misc_RNA (1)...(19): siRNA sense strand
gaaguaauguucuuaaacg

SEQ ID NO: 175610 - RNA, 19 nt, Homo sapiens
  misc_RNA (1)...(19): siRNA sense strand
gaauauaucacccauaauc

SEQ ID NO: 175611 - RNA, 19 nt, Homo sapiens
  misc_RNA (1)...(19): siRNA sense strand
uaagugaccuaaaguggaa

SEQ ID NO: 175612 - RNA, 19 nt, Homo sapiens
  misc_RNA (1)...(19): siRNA sense strand
guccauauguuugcaguua

SEQ ID NO: 175613 - RNA, 19 nt, Homo sapiens
  misc_RNA (1)...(19): siRNA sense strand
aaacagagcaucauaaugg

SEQ ID NO: 175614 - RNA, 19 nt, Homo sapiens
  misc_RNA (1)...(19): siRNA sense strand
gcaguuaacauguuucgaa

SEQ ID NO: 175615 - RNA, 19 nt, Homo sapiens
  misc_RNA (1)...(19): siRNA sense strand
gcgaagaaauauauugauc

SEQ ID NO: 175616 - RNA, 19 nt, Homo sapiens
  misc_RNA (1)...(19): siRNA sense strand
ggaagaugaaccaacguua

SEQ ID NO: 175617 - RNA, 19 nt, Homo sapiens
  misc_RNA (1)...(19): siRNA sense strand
cuugagagcuuacaucaga

SEQ ID NO: 175618 - RNA, 19 nt, Homo sapiens
  misc_RNA (1)...(19): siRNA sense strand
caucagaauuugugaagau

SEQ ID NO: 175619 - RNA, 19 nt, Homo sapiens
  misc_RNA (1)...(19): siRNA sense strand
gaaguaguccauauguuug

SEQ ID NO: 175620 - RNA, 19 nt, Homo sapiens
  misc_RNA (1)...(19): siRNA sense strand
cagaguuacuggaaauauu

SEQ ID NO: 175621 - RNA, 19 nt, Homo sapiens
  misc_RNA (1)...(19): siRNA sense strand
ugaaaucucugagugucua

SEQ ID NO: 175622 - RNA, 19 nt, Homo sapiens
  misc_RNA (1)...(19): siRNA sense strand
agaaguaguccauauguuu

SEQ ID NO: 175623 - RNA, 19 nt, Homo sapiens
  misc_RNA (1)...(19): siRNA sense strand
gaagcagccuggccucauc

SEQ ID NO: 175624 - RNA, 19 nt, Homo sapiens
  misc_RNA (1)...(19): siRNA sense strand
ccagauuuccaaccuaaua

SEQ ID NO: 175625 - RNA, 19 nt, Homo sapiens
  misc_RNA (1)...(19): siRNA sense strand
gaucagaaguuuguauugc

SEQ ID NO: 175626 - RNA, 19 nt, Homo sapiens
  misc_RNA (1)...(19): siRNA sense strand
gaagaugaaccaacguuag

SEQ ID NO: 175627 - RNA, 19 nt, Homo sapiens
  misc_RNA (1)...(19): siRNA sense strand
caucaugaguuuaaucagu

SEQ ID NO: 175628 - RNA, 19 nt, Homo sapiens
  misc_RNA (1)...(19): siRNA sense strand
gaaacagagcaucauaaug

SEQ ID NO: 175629 - RNA, 19 nt, Homo sapiens
  misc_RNA (1)...(19): siRNA sense strand
ggugauggcacuucucaaa

SEQ ID NO: 175630 - RNA, 19 nt, Homo sapiens
  misc_RNA (1)...(19): siRNA sense strand
aaaccacccuucacagaau

SEQ ID NO: 175631 - RNA, 19 nt, Homo sapiens
  misc_RNA (1)...(19): siRNA sense strand
uagcagaguuacuggaaau

SEQ ID NO: 175632 - RNA, 19 nt, Homo sapiens
  misc_RNA (1)...(19): siRNA sense strand
cauugaaccaucagaauuu

SEQ ID NO: 175633 - RNA, 19 nt, Homo sapiens
  misc_RNA (1)...(19): siRNA sense strand
uaaaguggaaggaaguaaa

SEQ ID NO: 175634 - RNA, 19 nt, Homo sapiens
  misc_RNA (1)...(19): siRNA sense strand
cagaaguaguccauauguu

SEQ ID NO: 175635 - RNA, 19 nt, Homo sapiens
  misc_RNA (1)...(19): siRNA sense strand
ccaccuuccuccaauccua

SEQ ID NO: 175636 - RNA, 19 nt, Homo sapiens
  misc_RNA (1)...(19): siRNA sense strand
cuggaaauauugggaagua

SEQ ID NO: 175637 - RNA, 19 nt, Homo sapiens
  misc_RNA (1)...(19): siRNA sense strand
gaaauuccuaggcuugaga

SEQ ID NO: 175638 - RNA, 19 nt, Homo sapiens
  misc_RNA (1)...(19): siRNA sense strand
ucacagaaucuaugggaaa

SEQ ID NO: 175639 - RNA, 19 nt, Homo sapiens
  misc_RNA (1)...(19): siRNA sense strand
aaagaagagcacaagauuu

SEQ ID NO: 175640 - RNA, 19 nt, Homo sapiens
  misc_RNA (1)...(19): siRNA sense strand
ucaaagacccauuggaaca

SEQ ID NO: 175641 - RNA, 19 nt, Homo sapiens
  misc_RNA (1)...(19): siRNA sense strand
gaagagauuuuagauguca

SEQ ID NO: 175642 - RNA, 19 nt, Homo sapiens
  misc_RNA (1)...(19): siRNA sense strand
aaaacgagcugcuuuaagu

SEQ ID NO: 175643 - RNA, 19 nt, Homo sapiens
  misc_RNA (1)...(19): siRNA sense strand
gauggcacuucucaaauac

SEQ ID NO: 175644 - RNA, 19 nt, Homo sapiens
  misc_RNA (1)...(19): siRNA sense strand
ugaaacagagcaucauaau

SEQ ID NO: 175645 - RNA, 19 nt, Homo sapiens
  misc_RNA (1)...(19): siRNA sense strand
gaucacagagccuauuuac

SEQ ID NO: 175646 - RNA, 19 nt, Homo sapiens
  misc_RNA (1)...(19): siRNA sense strand
gcagaguuacuggaaauau

SEQ ID NO: 175647 - RNA, 19 nt, Homo sapiens
  misc_RNA (1)...(19): siRNA sense strand
ugacaacgcagcgaagauu

SEQ ID NO: 175648 - RNA, 19 nt, Homo sapiens
  misc_RNA (1)...(19): siRNA sense strand
gcaacucaaagacccauug

SEQ ID NO: 175649 - RNA, 19 nt, Homo sapiens
  misc_RNA (1)...(19): siRNA sense strand
cgagcugcuuuaagugaaa

SEQ ID NO: 175650 - RNA, 19 nt, Homo sapiens
  misc_RNA (1)...(19): siRNA sense strand
gcgaagauucugcccauca

SEQ ID NO: 175651 - RNA, 19 nt, Homo sapiens
  misc_RNA (1)...(19): siRNA sense strand
aaccuaauauagcgaagaa

SEQ ID NO: 175652 - RNA, 19 nt, Homo sapiens
  misc_RNA (1)...(19): siRNA sense strand
ucauugaaccaucagaauu

SEQ ID NO: 175653 - RNA, 19 nt, Homo sapiens
  misc_RNA (1)...(19): siRNA sense strand
aucuacagcuuguuuauga

SEQ ID NO: 175654 - RNA, 19 nt, Homo sapiens
  misc_RNA (1)...(19): siRNA sense strand
acucaaagacccauuggaa

SEQ ID NO: 175655 - RNA, 19 nt, Homo sapiens
  misc_RNA (1)...(19): siRNA sense strand
cgaagauucugcccaucau

SEQ ID NO: 175656 - RNA, 19 nt, Homo sapiens
  misc_RNA (1)...(19): siRNA sense strand
cuccagauuuccaaccuaa

SEQ ID NO: 175657 - RNA, 19 nt, Homo sapiens
  misc_RNA (1)...(19): siRNA sense strand
guuugcaguuaacauguuu

SEQ ID NO: 175658 - RNA, 19 nt, Homo sapiens
  misc_RNA (1)...(19): siRNA sense strand
caaagacccauuggaacaa

SEQ ID NO: 175659 - RNA, 19 nt, Homo sapiens
  misc_RNA (1)...(19): siRNA sense strand
uuuagagucuccagauuuc

SEQ ID NO: 175660 - RNA, 19 nt, Homo sapiens
  misc_RNA (1)...(19): siRNA sense strand
ccagaaguaguccauaugu

SEQ ID NO: 175661 - RNA, 19 nt, Homo sapiens
  misc_RNA (1)...(19): siRNA sense strand
cacagaaucuaugggaaau

SEQ ID NO: 175662 - RNA, 19 nt, Homo sapiens
  misc_RNA (1)...(19): siRNA sense strand
ccuaauauagcgaagaaau

SEQ ID NO: 175663 - RNA, 19 nt, Homo sapiens
  misc_RNA (1)...(19): siRNA sense strand
gaaccaucagaauuuguga

SEQ ID NO: 175664 - RNA, 19 nt, Homo sapiens
  misc_RNA (1)...(19): siRNA sense strand
cucaaauacuggccaaaga

SEQ ID NO: 175665 - RNA, 19 nt, Homo sapiens
  misc_RNA (1)...(19): siRNA sense strand
aagaagagcacaagauuuu

SEQ ID NO: 175666 - RNA, 19 nt, Homo sapiens
  misc_RNA (1)...(19): siRNA sense strand
ugcuuuaagugaaauggua

SEQ ID NO: 175667 - RNA, 19 nt, Homo sapiens
  misc_RNA (1)...(19): siRNA sense strand
cagaauuugugaagaucau

SEQ ID NO: 175668 - RNA, 19 nt, Homo sapiens
  misc_RNA (1)...(19): siRNA sense strand
ccucaucuacagcuuguuu

SEQ ID NO: 175669 - RNA, 19 nt, Homo sapiens
  misc_RNA (1)...(19): siRNA sense strand
ggaauuugacccggaggaa

SEQ ID NO: 175670 - RNA, 19 nt, Homo sapiens
  misc_RNA (1)...(19): siRNA sense strand
gagccuauuuacccagaag

SEQ ID NO: 175671 - RNA, 19 nt, Homo sapiens
  misc_RNA (1)...(19): siRNA sense strand
caaagugaaaucucugagu

SEQ ID NO: 175672 - RNA, 19 nt, Homo sapiens
  misc_RNA (1)...(19): siRNA sense strand
cauagcagaguuacuggaa

SEQ ID NO: 175673 - RNA, 19 nt, Homo sapiens
  misc_RNA (1)...(19): siRNA sense strand
uaauggcauagcagaguua

SEQ ID NO: 175674 - RNA, 19 nt, Homo sapiens
  misc_RNA (1)...(19): siRNA sense strand
ugaagauccucgggagaga

SEQ ID NO: 175675 - RNA, 19 nt, Homo sapiens
  misc_RNA (1)...(19): siRNA sense strand
guagaauauaucacccaua

SEQ ID NO: 175676 - RNA, 19 nt, Homo sapiens
  misc_RNA (1)...(19): siRNA sense strand
gauucugcccaucauguuu

SEQ ID NO: 175677 - RNA, 19 nt, Homo sapiens
  misc_RNA (1)...(19): siRNA sense strand
gaagauucugcccaucaug

SEQ ID NO: 175678 - RNA, 19 nt, Homo sapiens
  misc_RNA (1)...(19): siRNA sense strand
ucuuugacuuuguuucuga

SEQ ID NO: 175679 - RNA, 19 nt, Homo sapiens
  misc_RNA (1)...(19): siRNA sense strand
ccagcuggcauacugugua

SEQ ID NO: 175680 - RNA, 19 nt, Homo sapiens
  misc_RNA (1)...(19): siRNA sense strand
agaguuacuggaaauauug

SEQ ID NO: 175681 - RNA, 19 nt, Homo sapiens
  misc_RNA (1)...(19): siRNA sense strand
gagcuuacaucagaaaaca

SEQ ID NO: 175682 - RNA, 19 nt, Homo sapiens
  misc_RNA (1)...(19): siRNA sense strand
aaguuuguauugcagcuuu

SEQ ID NO: 175683 - RNA, 19 nt, Homo sapiens
  misc_RNA (1)...(19): siRNA sense strand
ggccucaucuacagcuugu

SEQ ID NO: 175684 - RNA, 19 nt, Homo sapiens
  misc_RNA (1)...(19): siRNA sense strand
aagaugaaccaacguuaga

SEQ ID NO: 175685 - RNA, 19 nt, Homo sapiens
  misc_RNA (1)...(19): siRNA sense strand
gagcugcuuuaagugaaau

SEQ ID NO: 175686 - RNA, 19 nt, Homo sapiens
  misc_RNA (1)...(19): siRNA sense strand
cauguuuccuuccuuguac

SEQ ID NO: 175687 - RNA, 19 nt, Homo sapiens
  misc_RNA (1)...(19): siRNA sense strand
cagcuggcauacuguguag

SEQ ID NO: 175688 - RNA, 19 nt, Homo sapiens
  misc_RNA (1)...(19): siRNA sense strand
cuacgggagcggaauuuga

SEQ ID NO: 175689 - RNA, 19 nt, Homo sapiens
  misc_RNA (1)...(19): siRNA sense strand
caacuccaaugggccuuuc

SEQ ID NO: 175690 - RNA, 19 nt, Homo sapiens
  misc_RNA (1)...(19): siRNA sense strand
acccagaaguaguccauau

SEQ ID NO: 175691 - RNA, 19 nt, Homo sapiens
  misc_RNA (1)...(19): siRNA sense strand
ucaugaguuuaaucaguga

SEQ ID NO: 175692 - RNA, 19 nt, Homo sapiens
  misc_RNA (1)...(19): siRNA sense strand
uuucgaacauuaccaccuu

SEQ ID NO: 175693 - RNA, 19 nt, Homo sapiens
  misc_RNA (1)...(19): siRNA sense strand
auaauggcauagcagaguu

SEQ ID NO: 175694 - RNA, 19 nt, Homo sapiens
  misc_RNA (1)...(19): siRNA sense strand
aaaagaagagcacaagauu

SEQ ID NO: 175695 - RNA, 19 nt, Homo sapiens
  misc_RNA (1)...(19): siRNA sense strand
gugaucacagagccuauuu

SEQ ID NO: 175696 - RNA, 19 nt, Homo sapiens
  misc_RNA (1)...(19): siRNA sense strand
ucauguuuccuuccuugua

SEQ ID NO: 175697 - RNA, 19 nt, Homo sapiens
  misc_RNA (1)...(19): siRNA sense strand
ugggaaguauaauuaaugg

SEQ ID NO: 175698 - RNA, 19 nt, Homo sapiens
  misc_RNA (1)...(19): siRNA sense strand
cgugguccuucuccauauu

SEQ ID NO: 175699 - RNA, 19 nt, Homo sapiens
  misc_RNA (1)...(19): siRNA sense strand
gcugaucaagagaagcuuu

SEQ ID NO: 175700 - RNA, 19 nt, Homo sapiens
  misc_RNA (1)...(19): siRNA sense strand
gcaucauaauggcauagca

SEQ ID NO: 175701 - RNA, 19 nt, Homo sapiens
  misc_RNA (1)...(19): siRNA sense strand
gauccucgggagagagauu

SEQ ID NO: 175702 - RNA, 19 nt, Homo sapiens
  misc_RNA (1)...(19): siRNA sense strand
gauuuccaaccuaauauag

SEQ ID NO: 175703 - RNA, 19 nt, Homo sapiens
  misc_RNA (1)...(19): siRNA sense strand
gaugaaccaacguuagaag

SEQ ID NO: 175704 - RNA, 19 nt, Homo sapiens
  misc_RNA (1)...(19): siRNA sense strand
cauaauggcauagcagagu

SEQ ID NO: 175705 - RNA, 19 nt, Homo sapiens
  misc_RNA (1)...(19): siRNA sense strand
agaaguuacgucaguguug

SEQ ID NO: 175706 - RNA, 19 nt, Homo sapiens
  misc_RNA (1)...(19): siRNA sense strand
ggagagagauuuucuuaaa

SEQ ID NO: 175707 - RNA, 19 nt, Homo sapiens
  misc_RNA (1)...(19): siRNA sense strand
ggaaauauugggaaguaua

SEQ ID NO: 175708 - RNA, 19 nt, Homo sapiens
  misc_RNA (1)...(19): siRNA sense strand
ugauggcacuucucaaaua

SEQ ID NO: 175709 - RNA, 19 nt, Homo sapiens
  misc_RNA (1)...(19): siRNA sense strand
gaaguaauguucuuaaacg

SEQ ID NO: 175710 - RNA, 19 nt, Homo sapiens
  misc_RNA (1)...(19): siRNA sense strand
gaauauaucacccauaauc

SEQ ID NO: 175711 - RNA, 19 nt, Homo sapiens
  misc_RNA (1)...(19): siRNA sense strand
uaagugaccuaaaguggaa

SEQ ID NO: 175712 - RNA, 19 nt, Homo sapiens
  misc_RNA (1)...(19): siRNA sense strand
guccauauguuugcaguua

SEQ ID NO: 175713 - RNA, 19 nt, Homo sapiens
  misc_RNA (1)...(19): siRNA sense strand
aaacagagcaucauaaugg

SEQ ID NO: 175714 - RNA, 19 nt, Homo sapiens
  misc_RNA (1)...(19): siRNA sense strand
gcaguuaacauguuucgaa

SEQ ID NO: 175715 - RNA, 19 nt, Homo sapiens
  misc_RNA (1)...(19): siRNA sense strand
gcgaagaaauauauugauc

SEQ ID NO: 175716 - RNA, 19 nt, Homo sapiens
  misc_RNA (1)...(19): siRNA sense strand
ggaagaugaaccaacguua

SEQ ID NO: 175717 - RNA, 19 nt, Homo sapiens
  misc_RNA (1)...(19): siRNA sense strand
cuugagagcuuacaucaga

SEQ ID NO: 175718 - RNA, 19 nt, Homo sapiens
  misc_RNA (1)...(19): siRNA sense strand
caucagaauuugugaagau

SEQ ID NO: 175719 - RNA, 19 nt, Homo sapiens
  misc_RNA (1)...(19): siRNA sense strand
gaaguaguccauauguuug

SEQ ID NO: 175720 - RNA, 19 nt, Homo sapiens
  misc_RNA (1)...(19): siRNA sense strand
cagaguuacuggaaauauu

SEQ ID NO: 175721 - RNA, 19 nt, Homo sapiens
  misc_RNA (1)...(19): siRNA sense strand
ugaaaucucugagugucua

SEQ ID NO: 175722 - RNA, 19 nt, Homo sapiens
  misc_RNA (1)...(19): siRNA sense strand
agaaguaguccauauguuu

SEQ ID NO: 175723 - RNA, 19 nt, Homo sapiens
  misc_RNA (1)...(19): siRNA sense strand
gaagcagccuggccucauc

SEQ ID NO: 175724 - RNA, 19 nt, Homo sapiens
  misc_RNA (1)...(19): siRNA sense strand
ccagauuuccaaccuaaua

SEQ ID NO: 175725 - RNA, 19 nt, Homo sapiens
  misc_RNA (1)...(19): siRNA sense strand
gaucagaaguuuguauugc

SEQ ID NO: 175726 - RNA, 19 nt, Homo sapiens
  misc_RNA (1)...(19): siRNA sense strand
gaagaugaaccaacguuag

SEQ ID NO: 175727 - RNA, 19 nt, Homo sapiens
  misc_RNA (1)...(19): siRNA sense strand
caucaugaguuuaaucagu

SEQ ID NO: 175728 - RNA, 19 nt, Homo sapiens
  misc_RNA (1)...(19): siRNA sense strand
gaaacagagcaucauaaug

SEQ ID NO: 175729 - RNA, 19 nt, Homo sapiens
  misc_RNA (1)...(19): siRNA sense strand
ggugauggcacuucucaaa

SEQ ID NO: 175730 - RNA, 19 nt, Homo sapiens
  misc_RNA (1)...(19): siRNA sense strand
aaaccacccuucacagaau

SEQ ID NO: 175731 - RNA, 19 nt, Homo sapiens
  misc_RNA (1)...(19): siRNA sense strand
uagcagaguuacuggaaau

SEQ ID NO: 175732 - RNA, 19 nt, Homo sapiens
  misc_RNA (1)...(19): siRNA sense strand
cauugaaccaucagaauuu

SEQ ID NO: 175733 - RNA, 19 nt, Homo sapiens
  misc_RNA (1)...(19): siRNA sense strand
uaaaguggaaggaaguaaa

SEQ ID NO: 175734 - RNA, 19 nt, Homo sapiens
  misc_RNA (1)...(19): siRNA sense strand
cagaaguaguccauauguu

SEQ ID NO: 175735 - RNA, 19 nt, Homo sapiens
  misc_RNA (1)...(19): siRNA sense strand
ccaccuuccuccaauccua

SEQ ID NO: 175736 - RNA, 19 nt, Homo sapiens
  misc_RNA (1)...(19): siRNA sense strand
cuggaaauauugggaagua

SEQ ID NO: 175737 - RNA, 19 nt, Homo sapiens
  misc_RNA (1)...(19): siRNA sense strand
gaaauuccuaggcuugaga

SEQ ID NO: 175738 - RNA, 19 nt, Homo sapiens
  misc_RNA (1)...(19): siRNA sense strand
ucacagaaucuaugggaaa

SEQ ID NO: 175739 - RNA, 19 nt, Homo sapiens
  misc_RNA (1)...(19): siRNA sense strand
aaagaagagcacaagauuu

SEQ ID NO: 175740 - RNA, 19 nt, Homo sapiens
  misc_RNA (1)...(19): siRNA sense strand
ucaaagacccauuggaaca

SEQ ID NO: 175741 - RNA, 19 nt, Homo sapiens
  misc_RNA (1)...(19): siRNA sense strand
gaagagauuuuagauguca

SEQ ID NO: 175742 - RNA, 19 nt, Homo sapiens
  misc_RNA (1)...(19): siRNA sense strand
aaaacgagcugcuuuaagu

SEQ ID NO: 175743 - RNA, 19 nt, Homo sapiens
  misc_RNA (1)...(19): siRNA sense strand
gauggcacuucucaaauac

SEQ ID NO: 175744 - RNA, 19 nt, Homo sapiens
  misc_RNA (1)...(19): siRNA sense strand
ugaaacagagcaucauaau

SEQ ID NO: 175745 - RNA, 19 nt, Homo sapiens
  misc_RNA (1)...(19): siRNA sense strand
gaucacagagccuauuuac

SEQ ID NO: 175746 - RNA, 19 nt, Homo sapiens
  misc_RNA (1)...(19): siRNA sense strand
gcagaguuacuggaaauau

SEQ ID NO: 175747 - RNA, 19 nt, Homo sapiens
  misc_RNA (1)...(19): siRNA sense strand
ugacaacgcagcgaagauu

SEQ ID NO: 175748 - RNA, 19 nt, Homo sapiens
  misc_RNA (1)...(19): siRNA sense strand
gcaacucaaagacccauug

SEQ ID NO: 175749 - RNA, 19 nt, Homo sapiens
  misc_RNA (1)...(19): siRNA sense strand
cgagcugcuuuaagugaaa

SEQ ID NO: 175750 - RNA, 19 nt, Homo sapiens
  misc_RNA (1)...(19): siRNA sense strand
gcgaagauucugcccauca

SEQ ID NO: 175751 - RNA, 19 nt, Homo sapiens
  misc_RNA (1)...(19): siRNA sense strand
aaccuaauauagcgaagaa

SEQ ID NO: 175752 - RNA, 19 nt, Homo sapiens
  misc_RNA (1)...(19): siRNA sense strand
ucauugaaccaucagaauu

SEQ ID NO: 175753 - RNA, 19 nt, Homo sapiens
  misc_RNA (1)...(19): siRNA sense strand
aucuacagcuuguuuauga

SEQ ID NO: 175754 - RNA, 19 nt, Homo sapiens
  misc_RNA (1)...(19): siRNA sense strand
acucaaagacccauuggaa

SEQ ID NO: 175755 - RNA, 19 nt, Homo sapiens
  misc_RNA (1)...(19): siRNA sense strand
cgaagauucugcccaucau

SEQ ID NO: 175756 - RNA, 19 nt, Homo sapiens
  misc_RNA (1)...(19): siRNA sense strand
cuccagauuuccaaccuaa

SEQ ID NO: 175757 - RNA, 19 nt, Homo sapiens
  misc_RNA (1)...(19): siRNA sense strand
guuugcaguuaacauguuu

SEQ ID NO: 175758 - RNA, 19 nt, Homo sapiens
  misc_RNA (1)...(19): siRNA sense strand
caaagacccauuggaacaa

SEQ ID NO: 175759 - RNA, 19 nt, Homo sapiens
  misc_RNA (1)...(19): siRNA sense strand
uuuagagucuccagauuuc

SEQ ID NO: 175760 - RNA, 19 nt, Homo sapiens
  misc_RNA (1)...(19): siRNA sense strand
ccagaaguaguccauaugu

SEQ ID NO: 175761 - RNA, 19 nt, Homo sapiens
  misc_RNA (1)...(19): siRNA sense strand
cacagaaucuaugggaaau

SEQ ID NO: 175762 - RNA, 19 nt, Homo sapiens
  misc_RNA (1)...(19): siRNA sense strand
ccuaauauagcgaagaaau

SEQ ID NO: 175763 - RNA, 19 nt, Homo sapiens
  misc_RNA (1)...(19): siRNA sense strand
gaaccaucagaauuuguga

SEQ ID NO: 175764 - RNA, 19 nt, Homo sapiens
  misc_RNA (1)...(19): siRNA sense strand
cucaaauacuggccaaaga

SEQ ID NO: 175765 - RNA, 19 nt, Homo sapiens
  misc_RNA (1)...(19): siRNA sense strand
aagaagagcacaagauuuu

SEQ ID NO: 175766 - RNA, 19 nt, Homo sapiens
  misc_RNA (1)...(19): siRNA sense strand
ugcuuuaagugaaauggua

SEQ ID NO: 175767 - RNA, 19 nt, Homo sapiens
  misc_RNA (1)...(19): siRNA sense strand
cagaauuugugaagaucau

SEQ ID NO: 175768 - RNA, 19 nt, Homo sapiens
  misc_RNA (1)...(19): siRNA sense strand
ccucaucuacagcuuguuu

SEQ ID NO: 175769 - RNA, 19 nt, Homo sapiens
  misc_RNA (1)...(19): siRNA sense strand
ggaauuugacccggaggaa

SEQ ID NO: 175770 - RNA, 19 nt, Homo sapiens
  misc_RNA (1)...(19): siRNA sense strand
gagccuauuuacccagaag

SEQ ID NO: 175771 - RNA, 19 nt, Homo sapiens
  misc_RNA (1)...(19): siRNA sense strand
caaagugaaaucucugagu

SEQ ID NO: 175772 - RNA, 19 nt, Homo sapiens
  misc_RNA (1)...(19): siRNA sense strand
cauagcagaguuacuggaa

SEQ ID NO: 175773 - RNA, 19 nt, Homo sapiens
  misc_RNA (1)...(19): siRNA sense strand
uaauggcauagcagaguua

SEQ ID NO: 175774 - RNA, 19 nt, Homo sapiens
  misc_RNA (1)...(19): siRNA sense strand
ugaagauccucgggagaga

SEQ ID NO: 175775 - RNA, 19 nt, Homo sapiens
  misc_RNA (1)...(19): siRNA sense strand
guagaauauaucacccaua

SEQ ID NO: 175776 - RNA, 19 nt, Homo sapiens
  misc_RNA (1)...(19): siRNA sense strand
gauucugcccaucauguuu

SEQ ID NO: 175777 - RNA, 19 nt, Homo sapiens
  misc_RNA (1)...(19): siRNA sense strand
gaagauucugcccaucaug

SEQ ID NO: 175778 - RNA, 19 nt, Homo sapiens
  misc_RNA (1)...(19): siRNA sense strand
ucuuugacuuuguuucuga

SEQ ID NO: 175779 - RNA, 19 nt, Homo sapiens
  misc_RNA (1)...(19): siRNA sense strand
ccagcuggcauacugugua

SEQ ID NO: 175780 - RNA, 19 nt, Homo sapiens
  misc_RNA (1)...(19): siRNA sense strand
agaguuacuggaaauauug

SEQ ID NO: 175781 - RNA, 19 nt, Homo sapiens
  misc_RNA (1)...(19): siRNA sense strand
gagcuuacaucagaaaaca

SEQ ID NO: 175782 - RNA, 19 nt, Homo sapiens
  misc_RNA (1)...(19): siRNA sense strand
aaguuuguauugcagcuuu

SEQ ID NO: 175783 - RNA, 19 nt, Homo sapiens
  misc_RNA (1)...(19): siRNA sense strand
ggccucaucuacagcuugu

SEQ ID NO: 175784 - RNA, 19 nt, Homo sapiens
  misc_RNA (1)...(19): siRNA sense strand
aagaugaaccaacguuaga

SEQ ID NO: 175785 - RNA, 19 nt, Homo sapiens
  misc_RNA (1)...(19): siRNA sense strand
gagcugcuuuaagugaaau

SEQ ID NO: 175786 - RNA, 19 nt, Homo sapiens
  misc_RNA (1)...(19): siRNA sense strand
cauguuuccuuccuuguac

SEQ ID NO: 175787 - RNA, 19 nt, Homo sapiens
  misc_RNA (1)...(19): siRNA sense strand
cagcuggcauacuguguag

SEQ ID NO: 175788 - RNA, 19 nt, Homo sapiens
  misc_RNA (1)...(19): siRNA sense strand
cuacgggagcggaauuuga

SEQ ID NO: 175789 - RNA, 19 nt, Homo sapiens
  misc_RNA (1)...(19): siRNA sense strand
caacuccaaugggccuuuc

SEQ ID NO: 175790 - RNA, 19 nt, Homo sapiens
  misc_RNA (1)...(19): siRNA sense strand
acccagaaguaguccauau

SEQ ID NO: 175791 - RNA, 19 nt, Homo sapiens
  misc_RNA (1)...(19): siRNA sense strand
ucaugaguuuaaucaguga

SEQ ID NO: 175792 - RNA, 19 nt, Homo sapiens
  misc_RNA (1)...(19): siRNA sense strand
uuucgaacauuaccaccuu

SEQ ID NO: 175793 - RNA, 19 nt, Homo sapiens
  misc_RNA (1)...(19): siRNA sense strand
auaauggcauagcagaguu

SEQ ID NO: 175794 - RNA, 19 nt, Homo sapiens
  misc_RNA (1)...(19): siRNA sense strand
aaaagaagagcacaagauu

SEQ ID NO: 175795 - RNA, 19 nt, Homo sapiens
  misc_RNA (1)...(19): siRNA sense strand
gugaucacagagccuauuu

SEQ ID NO: 175796 - RNA, 19 nt, Homo sapiens
  misc_RNA (1)...(19): siRNA sense strand
ucauguuuccuuccuugua

SEQ ID NO: 175797 - RNA, 19 nt, Homo sapiens
  misc_RNA (1)...(19): siRNA sense strand
ugggaaguauaauuaaugg

SEQ ID NO: 175798 - RNA, 19 nt, Homo sapiens
  misc_RNA (1)...(19): siRNA sense strand
cgugguccuucuccauauu

SEQ ID NO: 175799 - RNA, 19 nt, Homo sapiens
  misc_RNA (1)...(19): siRNA sense strand
gcugaucaagagaagcuuu

SEQ ID NO: 175800 - RNA, 19 nt, Homo sapiens
  misc_RNA (1)...(19): siRNA sense strand
gcaucauaauggcauagca

SEQ ID NO: 175801 - RNA, 19 nt, Homo sapiens
  misc_RNA (1)...(19): siRNA sense strand
gauccucgggagagagauu

SEQ ID NO: 175802 - RNA, 19 nt, Homo sapiens
  misc_RNA (1)...(19): siRNA sense strand
gauuuccaaccuaauauag

SEQ ID NO: 175803 - RNA, 19 nt, Homo sapiens
  misc_RNA (1)...(19): siRNA sense strand
gaugaaccaacguuagaag

SEQ ID NO: 175804 - RNA, 19 nt, Homo sapiens
  misc_RNA (1)...(19): siRNA sense strand
cauaauggcauagcagagu

SEQ ID NO: 175805 - RNA, 19 nt, Homo sapiens
  misc_RNA (1)...(19): siRNA sense strand
agaaguuacgucaguguug

SEQ ID NO: 175806 - RNA, 19 nt, Homo sapiens
  misc_RNA (1)...(19): siRNA sense strand
ggagaacccucaaagcaau

SEQ ID NO: 175807 - RNA, 19 nt, Homo sapiens
  misc_RNA (1)...(19): siRNA sense strand
ccaucgagcuggagaagaa

SEQ ID NO: 175808 - RNA, 19 nt, Homo sapiens
  misc_RNA (1)...(19): siRNA sense strand
ggaagcgucuggccaagau

SEQ ID NO: 175809 - RNA, 19 nt, Homo sapiens
  misc_RNA (1)...(19): siRNA sense strand
aggaagaccuugaaucaga

SEQ ID NO: 175810 - RNA, 19 nt, Homo sapiens
  misc_RNA (1)...(19): siRNA sense strand
uuggauagcucucaauguu

SEQ ID NO: 175811 - RNA, 19 nt, Homo sapiens
  misc_RNA (1)...(19): siRNA sense strand
ggacauugagggcgauaaa

SEQ ID NO: 175812 - RNA, 19 nt, Homo sapiens
  misc_RNA (1)...(19): siRNA sense strand
ccaggaagaccuugaauca

SEQ ID NO: 175813 - RNA, 19 nt, Homo sapiens
  misc_RNA (1)...(19): siRNA sense strand
gaaauucgagacgcagaaa

SEQ ID NO: 175814 - RNA, 19 nt, Homo sapiens
  misc_RNA (1)...(19): siRNA sense strand
gcuaaauggaggagacuaa

SEQ ID NO: 175815 - RNA, 19 nt, Homo sapiens
  misc_RNA (1)...(19): siRNA sense strand
ucagagauuucagaggauu

SEQ ID NO: 175816 - RNA, 19 nt, Homo sapiens
  misc_RNA (1)...(19): siRNA sense strand
gagaacccucaaagcaaua

SEQ ID NO: 175817 - RNA, 19 nt, Homo sapiens
  misc_RNA (1)...(19): siRNA sense strand
gugaucagaggcaagauuu

SEQ ID NO: 175818 - RNA, 19 nt, Homo sapiens
  misc_RNA (1)...(19): siRNA sense strand
agaggauucugaucaggaa

SEQ ID NO: 175819 - RNA, 19 nt, Homo sapiens
  misc_RNA (1)...(19): siRNA sense strand
caggagaacccucaaagca

SEQ ID NO: 175820 - RNA, 19 nt, Homo sapiens
  misc_RNA (1)...(19): siRNA sense strand
gaaucgacgcgcuaaaugg

SEQ ID NO: 175821 - RNA, 19 nt, Homo sapiens
  misc_RNA (1)...(19): siRNA sense strand
gaacagaauaaaggugcuu

SEQ ID NO: 175822 - RNA, 19 nt, Homo sapiens
  misc_RNA (1)...(19): siRNA sense strand
gaucaggaaguggacauug

SEQ ID NO: 175823 - RNA, 19 nt, Homo sapiens
  misc_RNA (1)...(19): siRNA sense strand
aauucgagacgcagaaaua

SEQ ID NO: 175824 - RNA, 19 nt, Homo sapiens
  misc_RNA (1)...(19): siRNA sense strand
ccagugaacagaauaaagg

SEQ ID NO: 175825 - RNA, 19 nt, Homo sapiens
  misc_RNA (1)...(19): siRNA sense strand
uggaaaguuuggacaguuc

SEQ ID NO: 175826 - RNA, 19 nt, Homo sapiens
  misc_RNA (1)...(19): siRNA sense strand
cagaaucgacgcgcuaaau

SEQ ID NO: 175827 - RNA, 19 nt, Homo sapiens
  misc_RNA (1)...(19): siRNA sense strand
aaacaggagaacccucaaa

SEQ ID NO: 175828 - RNA, 19 nt, Homo sapiens
  misc_RNA (1)...(19): siRNA sense strand
cuaaauggaggagacuaaa

SEQ ID NO: 175829 - RNA, 19 nt, Homo sapiens
  misc_RNA (1)...(19): siRNA sense strand
gaagaccuugaaucagaga

SEQ ID NO: 175830 - RNA, 19 nt, Homo sapiens
  misc_RNA (1)...(19): siRNA sense strand
cuggaaaguuuggacaguu

SEQ ID NO: 175831 - RNA, 19 nt, Homo sapiens
  misc_RNA (1)...(19): siRNA sense strand
ggauucugaucaggaagug

SEQ ID NO: 175832 - RNA, 19 nt, Homo sapiens
  misc_RNA (1)...(19): siRNA sense strand
cgcggacggugaacgacua

SEQ ID NO: 175833 - RNA, 19 nt, Homo sapiens
  misc_RNA (1)...(19): siRNA sense strand
aucaggaaguggacauuga

SEQ ID NO: 175834 - RNA, 19 nt, Homo sapiens
  misc_RNA (1)...(19): siRNA sense strand
agaaucgacgcgcuaaaug

SEQ ID NO: 175835 - RNA, 19 nt, Homo sapiens
  misc_RNA (1)...(19): siRNA sense strand
aggagaacccucaaagcaa

SEQ ID NO: 175836 - RNA, 19 nt, Homo sapiens
  misc_RNA (1)...(19): siRNA sense strand
gaacccucaaagcaauaaa

SEQ ID NO: 175837 - RNA, 19 nt, Homo sapiens
  misc_RNA (1)...(19): siRNA sense strand
ucgagacgcagaaauaucu

SEQ ID NO: 175838 - RNA, 19 nt, Homo sapiens
  misc_RNA (1)...(19): siRNA sense strand
ccaacgaccagaccaucga

SEQ ID NO: 175839 - RNA, 19 nt, Homo sapiens
  misc_RNA (1)...(19): siRNA sense strand
aaucgacgcgcuaaaugga

SEQ ID NO: 175840 - RNA, 19 nt, Homo sapiens
  misc_RNA (1)...(19): siRNA sense strand
gaagaagaaugaccaaauu

SEQ ID NO: 175841 - RNA, 19 nt, Homo sapiens
  misc_RNA (1)...(19): siRNA sense strand
gcaaacugcugguccauaa

SEQ ID NO: 175842 - RNA, 19 nt, Homo sapiens
  misc_RNA (1)...(19): siRNA sense strand
agaaagagcuggugcauga

SEQ ID NO: 175843 - RNA, 19 nt, Homo sapiens
  misc_RNA (1)...(19): siRNA sense strand
gcauauggauucugucaug

SEQ ID NO: 175844 - RNA, 19 nt, Homo sapiens
  misc_RNA (1)...(19): siRNA sense strand
ggaagcauauggauucugu

SEQ ID NO: 175845 - RNA, 19 nt, Homo sapiens
  misc_RNA (1)...(19): siRNA sense strand
ugaaaguggugaagaaaga

SEQ ID NO: 175846 - RNA, 19 nt, Homo sapiens
  misc_RNA (1)...(19): siRNA sense strand
gaagauggaggaagcugua

SEQ ID NO: 175847 - RNA, 19 nt, Homo sapiens
  misc_RNA (1)...(19): siRNA sense strand
gcaggaagcauauggauuc

SEQ ID NO: 175848 - RNA, 19 nt, Homo sapiens
  misc_RNA (1)...(19): siRNA sense strand
gucaaagccucccauguuu

SEQ ID NO: 175849 - RNA, 19 nt, Homo sapiens
  misc_RNA (1)...(19): siRNA sense strand
gauauugacuggguacaga

SEQ ID NO: 175850 - RNA, 19 nt, Homo sapiens
  misc_RNA (1)...(19): siRNA sense strand
gaacacagaggacuaccuu

SEQ ID NO: 175851 - RNA, 19 nt, Homo sapiens
  misc_RNA (1)...(19): siRNA sense strand
ccaugaaaguggugaagaa

SEQ ID NO: 175852 - RNA, 19 nt, Homo sapiens
  misc_RNA (1)...(19): siRNA sense strand
gaagaaugaccaaauuuac

SEQ ID NO: 175853 - RNA, 19 nt, Homo sapiens
  misc_RNA (1)...(19): siRNA sense strand
gggacuugcuggagaagaa

SEQ ID NO: 175854 - RNA, 19 nt, Homo sapiens
  misc_RNA (1)...(19): siRNA sense strand
cagagaagcacguguuuga

SEQ ID NO: 175855 - RNA, 19 nt, Homo sapiens
  misc_RNA (1)...(19): siRNA sense strand
ggagacagauggaauugcu

SEQ ID NO: 175856 - RNA, 19 nt, Homo sapiens
  misc_RNA (1)...(19): siRNA sense strand
gagaagacaaaucuaucua

SEQ ID NO: 175857 - RNA, 19 nt, Homo sapiens
  misc_RNA (1)...(19): siRNA sense strand
guauaucaacccauuauug

SEQ ID NO: 175858 - RNA, 19 nt, Homo sapiens
  misc_RNA (1)...(19): siRNA sense strand
cgucaaagccucccauguu

SEQ ID NO: 175859 - RNA, 19 nt, Homo sapiens
  misc_RNA (1)...(19): siRNA sense strand
ggacuuugaccuaaucaga

SEQ ID NO: 175860 - RNA, 19 nt, Homo sapiens
  misc_RNA (1)...(19): siRNA sense strand
gcaggacuuugaccuaauc

SEQ ID NO: 175861 - RNA, 19 nt, Homo sapiens
  misc_RNA (1)...(19): siRNA sense strand
gaacgaggacgccgaccuu

SEQ ID NO: 175862 - RNA, 19 nt, Homo sapiens
  misc_RNA (1)...(19): siRNA sense strand
acaucaagcucacagacua

SEQ ID NO: 175863 - RNA, 19 nt, Homo sapiens
  misc_RNA (1)...(19): siRNA sense strand
ugggauggauggaaucaaa

SEQ ID NO: 175864 - RNA, 19 nt, Homo sapiens
  misc_RNA (1)...(19): siRNA sense strand
gauggaauugcuuacauuu

SEQ ID NO: 175865 - RNA, 19 nt, Homo sapiens
  misc_RNA (1)...(19): siRNA sense strand
agacagauggaauugcuua

SEQ ID NO: 175866 - RNA, 19 nt, Homo sapiens
  misc_RNA (1)...(19): siRNA sense strand
guucgaaggcuuugaguau

SEQ ID NO: 175867 - RNA, 19 nt, Homo sapiens
  misc_RNA (1)...(19): siRNA sense strand
gaccaaauuuacgccauga

SEQ ID NO: 175868 - RNA, 19 nt, Homo sapiens
  misc_RNA (1)...(19): siRNA sense strand
ccaaauuuacgccaugaaa

SEQ ID NO: 175869 - RNA, 19 nt, Homo sapiens
  misc_RNA (1)...(19): siRNA sense strand
gcugggaguccucauguuu

SEQ ID NO: 175870 - RNA, 19 nt, Homo sapiens
  misc_RNA (1)...(19): siRNA sense strand
ggaagcaugacagcauuaa

SEQ ID NO: 175871 - RNA, 19 nt, Homo sapiens
  misc_RNA (1)...(19): siRNA sense strand
gaguauaucaacccauuau

SEQ ID NO: 175872 - RNA, 19 nt, Homo sapiens
  misc_RNA (1)...(19): siRNA sense strand
ucgaaggcuuugaguauau

SEQ ID NO: 175873 - RNA, 19 nt, Homo sapiens
  misc_RNA (1)...(19): siRNA sense strand
ugaagaagaaugaccaaau

SEQ ID NO: 175874 - RNA, 19 nt, Homo sapiens
  misc_RNA (1)...(19): siRNA sense strand
ggagaagacaaaucuaucu

SEQ ID NO: 175875 - RNA, 19 nt, Homo sapiens
  misc_RNA (1)...(19): siRNA sense strand
gaaggccucaucauucaug

SEQ ID NO: 175876 - RNA, 19 nt, Homo sapiens
  misc_RNA (1)...(19): siRNA sense strand
cagcauagacugggacuug

SEQ ID NO: 175877 - RNA, 19 nt, Homo sapiens
  misc_RNA (1)...(19): siRNA sense strand
ccaagagccuccaguagac

SEQ ID NO: 175878 - RNA, 19 nt, Homo sapiens
  misc_RNA (1)...(19): siRNA sense strand
cgaugaggaugccauaaag

SEQ ID NO: 175879 - RNA, 19 nt, Homo sapiens
  misc_RNA (1)...(19): siRNA sense strand
caaagccucccauguuuua

SEQ ID NO: 175880 - RNA, 19 nt, Homo sapiens
  misc_RNA (1)...(19): siRNA sense strand
ggccucaucauucauguuu

SEQ ID NO: 175881 - RNA, 19 nt, Homo sapiens
  misc_RNA (1)...(19): siRNA sense strand
cagauggaauugcuuacau

SEQ ID NO: 175882 - RNA, 19 nt, Homo sapiens
  misc_RNA (1)...(19): siRNA sense strand
gguuguuccuggucauuga

SEQ ID NO: 175883 - RNA, 19 nt, Homo sapiens
  misc_RNA (1)...(19): siRNA sense strand
gaagcaugacagcauuaaa

SEQ ID NO: 175884 - RNA, 19 nt, Homo sapiens
  misc_RNA (1)...(19): siRNA sense strand
agauggaauugcuuacauu

SEQ ID NO: 175885 - RNA, 19 nt, Homo sapiens
  misc_RNA (1)...(19): siRNA sense strand
cugcaggacuuugaccuaa

SEQ ID NO: 175886 - RNA, 19 nt, Homo sapiens
  misc_RNA (1)...(19): siRNA sense strand
gaagaaagagcuggugcau

SEQ ID NO: 175887 - RNA, 19 nt, Homo sapiens
  misc_RNA (1)...(19): siRNA sense strand
ggaagugagagacaugugu

SEQ ID NO: 175888 - RNA, 19 nt, Homo sapiens
  misc_RNA (1)...(19): siRNA sense strand
ugucaugccuucccaagag

SEQ ID NO: 175889 - RNA, 19 nt, Homo sapiens
  misc_RNA (1)...(19): siRNA sense strand
ugggaguccucauguuuga

SEQ ID NO: 175890 - RNA, 19 nt, Homo sapiens
  misc_RNA (1)...(19): siRNA sense strand
gacagagaagcacguguuu

SEQ ID NO: 175891 - RNA, 19 nt, Homo sapiens
  misc_RNA (1)...(19): siRNA sense strand
cgaggagacagauggaauu

SEQ ID NO: 175892 - RNA, 19 nt, Homo sapiens
  misc_RNA (1)...(19): siRNA sense strand
cccaagagccuccaguaga

SEQ ID NO: 175893 - RNA, 19 nt, Homo sapiens
  misc_RNA (1)...(19): siRNA sense strand
gaugaggaugccauaaaga

SEQ ID NO: 175894 - RNA, 19 nt, Homo sapiens
  misc_RNA (1)...(19): siRNA sense strand
agacagagaagcacguguu

SEQ ID NO: 175895 - RNA, 19 nt, Homo sapiens
  misc_RNA (1)...(19): siRNA sense strand
ccggaagcaugacagcauu

SEQ ID NO: 175896 - RNA, 19 nt, Homo sapiens
  misc_RNA (1)...(19): siRNA sense strand
gaggagacagauggaauug

SEQ ID NO: 175897 - RNA, 19 nt, Homo sapiens
  misc_RNA (1)...(19): siRNA sense strand
ggaucgaccagucagaguu

SEQ ID NO: 175898 - RNA, 19 nt, Homo sapiens
  misc_RNA (1)...(19): siRNA sense strand
ggagcucugugaggaagug

SEQ ID NO: 175899 - RNA, 19 nt, Homo sapiens
  misc_RNA (1)...(19): siRNA sense strand
ggagaggaguacggguuca

SEQ ID NO: 175900 - RNA, 19 nt, Homo sapiens
  misc_RNA (1)...(19): siRNA sense strand
caacggccaccucuuccaa

SEQ ID NO: 175901 - RNA, 19 nt, Homo sapiens
  misc_RNA (1)...(19): siRNA sense strand
gggagaagacaaaucuauc

SEQ ID NO: 175902 - RNA, 19 nt, Homo sapiens
  misc_RNA (1)...(19): siRNA sense strand
uucgaaggcuuugaguaua

SEQ ID NO: 175903 - RNA, 19 nt, Homo sapiens
  misc_RNA (1)...(19): siRNA sense strand
ggacuaccuuuuccaagug

SEQ ID NO: 175904 - RNA, 19 nt, Homo sapiens
  misc_RNA (1)...(19): siRNA sense strand
caaauuuacgccaugaaag

SEQ ID NO: 175905 - RNA, 19 nt, Homo sapiens
  misc_RNA (1)...(19): siRNA sense strand
uaaauaaggaccccaaaga

SEQ ID NO: 175906 - RNA, 19 nt, Homo sapiens
  misc_RNA (1)...(19): siRNA sense strand
gaucgaccagucagaguuc

SEQ ID NO: 175907 - RNA, 19 nt, Homo sapiens
  misc_RNA (1)...(19): siRNA sense strand
ucgaugggauggauggaau

SEQ ID NO: 175908 - RNA, 19 nt, Homo sapiens
  misc_RNA (1)...(19): siRNA sense strand
cugcaucgcccucaacuuc

SEQ ID NO: 175909 - RNA, 19 nt, Homo sapiens
  misc_RNA (1)...(19): siRNA sense strand
uugcuuacauuuccucauc

SEQ ID NO: 175910 - RNA, 19 nt, Homo sapiens
  misc_RNA (1)...(19): siRNA sense strand
aaauuuacgccaugaaagu

SEQ ID NO: 175911 - RNA, 19 nt, Homo sapiens
  misc_RNA (1)...(19): siRNA sense strand
ggcuugggcugcaggacuu

SEQ ID NO: 175912 - RNA, 19 nt, Homo sapiens
  misc_RNA (1)...(19): siRNA sense strand
gaggaccuuaagccaguua

SEQ ID NO: 175913 - RNA, 19 nt, Homo sapiens
  misc_RNA (1)...(19): siRNA sense strand
cgaaggcuuugaguauauc

SEQ ID NO: 175914 - RNA, 19 nt, Homo sapiens
  misc_RNA (1)...(19): siRNA sense strand
cgacuacggucuggacaac

SEQ ID NO: 175915 - RNA, 19 nt, Homo sapiens
  misc_RNA (1)...(19): siRNA sense strand
aagagcuggugcaugauga

SEQ ID NO: 175916 - RNA, 19 nt, Homo sapiens
  misc_RNA (1)...(19): siRNA sense strand
caugaaaguggugaagaaa

SEQ ID NO: 175917 - RNA, 19 nt, Homo sapiens
  misc_RNA (1)...(19): siRNA sense strand
ggaggaccuuaagccaguu

SEQ ID NO: 175918 - RNA, 19 nt, Homo sapiens
  misc_RNA (1)...(19): siRNA sense strand
aagcaugacagcauuaaag

SEQ ID NO: 175919 - RNA, 19 nt, Homo sapiens
  misc_RNA (1)...(19): siRNA sense strand
agcaggcgcucccuccauu

SEQ ID NO: 175920 - RNA, 19 nt, Homo sapiens
  misc_RNA (1)...(19): siRNA sense strand
cgggagaagacaaaucuau

SEQ ID NO: 175921 - RNA, 19 nt, Homo sapiens
  misc_RNA (1)...(19): siRNA sense strand
cuggugcgguugaagaaga

SEQ ID NO: 175922 - RNA, 19 nt, Homo sapiens
  misc_RNA (1)...(19): siRNA sense strand
gcugcaggacuuugaccua

SEQ ID NO: 175923 - RNA, 19 nt, Homo sapiens
  misc_RNA (1)...(19): siRNA sense strand
gcaugaugacgaggauauu

SEQ ID NO: 175924 - RNA, 19 nt, Homo sapiens
  misc_RNA (1)...(19): siRNA sense strand
acgaugaggaugccauaaa

SEQ ID NO: 175925 - RNA, 19 nt, Homo sapiens
  misc_RNA (1)...(19): siRNA sense strand
acuacggucuggacaacuu

SEQ ID NO: 175926 - RNA, 19 nt, Homo sapiens
  misc_RNA (1)...(19): siRNA sense strand
cgacaacccggacaugaac

SEQ ID NO: 175927 - RNA, 19 nt, Homo sapiens
  misc_RNA (1)...(19): siRNA sense strand
cggaagcaugacagcauua

SEQ ID NO: 175928 - RNA, 19 nt, Homo sapiens
  misc_RNA (1)...(19): siRNA sense strand
ugaguauaucaacccauua

SEQ ID NO: 175929 - RNA, 19 nt, Homo sapiens
  misc_RNA (1)...(19): siRNA sense strand
agacgaugaggaugccaua

SEQ ID NO: 175930 - RNA, 19 nt, Homo sapiens
  misc_RNA (1)...(19): siRNA sense strand
ccgacaacccggacaugaa

SEQ ID NO: 175931 - RNA, 19 nt, Homo sapiens
  misc_RNA (1)...(19): siRNA sense strand
ugacacaacgagcacuuuc

SEQ ID NO: 175932 - RNA, 19 nt, Homo sapiens
  misc_RNA (1)...(19): siRNA sense strand
aaagagcuggugcaugaug

SEQ ID NO: 175933 - RNA, 19 nt, Homo sapiens
  misc_RNA (1)...(19): siRNA sense strand
gcgcugggaguccucaugu

SEQ ID NO: 175934 - RNA, 19 nt, Homo sapiens
  misc_RNA (1)...(19): siRNA sense strand
uauaucaacccauuauugc

SEQ ID NO: 175935 - RNA, 19 nt, Homo sapiens
  misc_RNA (1)...(19): siRNA sense strand
acccggacaugaacacaga

SEQ ID NO: 175936 - RNA, 19 nt, Homo sapiens
  misc_RNA (1)...(19): siRNA sense strand
caugaugacgaggauauug

SEQ ID NO: 175937 - RNA, 19 nt, Homo sapiens
  misc_RNA (1)...(19): siRNA sense strand
aaagaggaucgaccaguca

SEQ ID NO: 175938 - RNA, 19 nt, Homo sapiens
  misc_RNA (1)...(19): siRNA sense strand
acacagaggacuaccuuuu

SEQ ID NO: 175939 - RNA, 19 nt, Homo sapiens
  misc_RNA (1)...(19): siRNA sense strand
ucaagucccacgcguucuu

SEQ ID NO: 175940 - RNA, 19 nt, Homo sapiens
  misc_RNA (1)...(19): siRNA sense strand
gaagacagccaagcauuuc

SEQ ID NO: 175941 - RNA, 19 nt, Homo sapiens
  misc_RNA (1)...(19): siRNA sense strand
ccaaggagaucgucuacag

SEQ ID NO: 175942 - RNA, 19 nt, Homo sapiens
  misc_RNA (1)...(19): siRNA sense strand
gagaagacagccaagcauu

SEQ ID NO: 175943 - RNA, 19 nt, Homo sapiens
  misc_RNA (1)...(19): siRNA sense strand
gagaucgucuacagggauu

SEQ ID NO: 175944 - RNA, 19 nt, Homo sapiens
  misc_RNA (1)...(19): siRNA sense strand
gaucaucugugccauugag

SEQ ID NO: 175945 - RNA, 19 nt, Homo sapiens
  misc_RNA (1)...(19): siRNA sense strand
ugagaagucuguccugaag

SEQ ID NO: 175946 - RNA, 19 nt, Homo sapiens
  misc_RNA (1)...(19): siRNA sense strand
gacaacccguuuggcauuu

SEQ ID NO: 175947 - RNA, 19 nt, Homo sapiens
  misc_RNA (1)...(19): siRNA sense strand
gagcagcacgugcacaaug

SEQ ID NO: 175948 - RNA, 19 nt, Homo sapiens
  misc_RNA (1)...(19): siRNA sense strand
gcucacggacuuuggguuu

SEQ ID NO: 175949 - RNA, 19 nt, Homo sapiens
  misc_RNA (1)...(19): siRNA sense strand
ugacaacccguuuggcauu

SEQ ID NO: 175950 - RNA, 19 nt, Homo sapiens
  misc_RNA (1)...(19): siRNA sense strand
agaagacagccaagcauuu

SEQ ID NO: 175951 - RNA, 19 nt, Homo sapiens
  misc_RNA (1)...(19): siRNA sense strand
caacccguuuggcauuuau

SEQ ID NO: 175952 - RNA, 19 nt, Homo sapiens
  misc_RNA (1)...(19): siRNA sense strand
acaucaagcucacggacuu

SEQ ID NO: 175953 - RNA, 19 nt, Homo sapiens
  misc_RNA (1)...(19): siRNA sense strand
gagcauucccgacgucauc

SEQ ID NO: 175954 - RNA, 19 nt, Homo sapiens
  misc_RNA (1)...(19): siRNA sense strand
acaacccguuuggcauuua

SEQ ID NO: 175955 - RNA, 19 nt, Homo sapiens
  misc_RNA (1)...(19): siRNA sense strand
ggagaagacagccaagcau

SEQ ID NO: 175956 - RNA, 19 nt, Homo sapiens
  misc_RNA (1)...(19): siRNA sense strand
guuuggcauuuaucagaaa

SEQ ID NO: 175957 - RNA, 19 nt, Homo sapiens
  misc_RNA (1)...(19): siRNA sense strand
gcacgugcacaaugagaag

SEQ ID NO: 175958 - RNA, 19 nt, Homo sapiens
  misc_RNA (1)...(19): siRNA sense strand
ccgaagucauucagagcaa

SEQ ID NO: 175959 - RNA, 19 nt, Homo sapiens
  misc_RNA (1)...(19): siRNA sense strand
cguuuggcauuuaucagaa

SEQ ID NO: 175960 - RNA, 19 nt, Homo sapiens
  misc_RNA (1)...(19): siRNA sense strand
agcagcacgugcacaauga

SEQ ID NO: 175961 - RNA, 19 nt, Homo sapiens
  misc_RNA (1)...(19): siRNA sense strand
gaucgucuacagggauuug

SEQ ID NO: 175962 - RNA, 19 nt, Homo sapiens
  misc_RNA (1)...(19): siRNA sense strand
ccacggggcucuucuacuc

SEQ ID NO: 175963 - RNA, 19 nt, Homo sapiens
  misc_RNA (1)...(19): siRNA sense strand
gcccucggcauccugauau

SEQ ID NO: 175964 - RNA, 19 nt, Homo sapiens
  misc_RNA (1)...(19): siRNA sense strand
ggcccucggcauccugaua

SEQ ID NO: 175965 - RNA, 19 nt, Homo sapiens
  misc_RNA (1)...(19): siRNA sense strand
gcaggcaaacuauauuucc

SEQ ID NO: 175966 - RNA, 19 nt, Homo sapiens
  misc_RNA (1)...(19): siRNA sense strand
gggauuugaagccggagaa

SEQ ID NO: 175967 - RNA, 19 nt, Homo sapiens
  misc_RNA (1)...(19): siRNA sense strand
ggaagacucugaacaauga

SEQ ID NO: 175968 - RNA, 19 nt, Homo sapiens
  misc_RNA (1)...(19): siRNA sense strand
gaacaagccuggagucuac

SEQ ID NO: 175969 - RNA, 19 nt, Homo sapiens
  misc_RNA (1)...(19): siRNA sense strand
acaccaaggucuacaacua

SEQ ID NO: 175970 - RNA, 19 nt, Homo sapiens
  misc_RNA (1)...(19): siRNA sense strand
ugaaauggauuaagaacac

SEQ ID NO: 175971 - RNA, 19 nt, Homo sapiens
  misc_RNA (1)...(19): siRNA sense strand
ggaaagauuaccagcaaca

SEQ ID NO: 175972 - RNA, 19 nt, Homo sapiens
  misc_RNA (1)...(19): siRNA sense strand
caccauagcugccaauagc

SEQ ID NO: 175973 - RNA, 19 nt, Homo sapiens
  misc_RNA (1)...(19): siRNA sense strand
ccagcaacauguucugugu

SEQ ID NO: 175974 - RNA, 19 nt, Homo sapiens
  misc_RNA (1)...(19): siRNA sense strand
caggaagacucugaacaau

SEQ ID NO: 175975 - RNA, 19 nt, Homo sapiens
  misc_RNA (1)...(19): siRNA sense strand
caacgaacaguggguggua

SEQ ID NO: 175976 - RNA, 19 nt, Homo sapiens
  misc_RNA (1)...(19): siRNA sense strand
acaggaagacucugaacaa

SEQ ID NO: 175977 - RNA, 19 nt, Homo sapiens
  misc_RNA (1)...(19): siRNA sense strand
ugugguggcucccucauca

SEQ ID NO: 175978 - RNA, 19 nt, Homo sapiens
  misc_RNA (1)...(19): siRNA sense strand
aauccacuccugauccuua

SEQ ID NO: 175979 - RNA, 19 nt, Homo sapiens
  misc_RNA (1)...(19): siRNA sense strand
gaagccuccuacccuggaa

SEQ ID NO: 175980 - RNA, 19 nt, Homo sapiens
  misc_RNA (1)...(19): siRNA sense strand
cuccuacccuggaaagauu

SEQ ID NO: 175981 - RNA, 19 nt, Homo sapiens
  misc_RNA (1)...(19): siRNA sense strand
gaggcaaggauucauguca

SEQ ID NO: 175982 - RNA, 19 nt, Homo sapiens
  misc_RNA (1)...(19): siRNA sense strand
gcucuccucacgugcagua

SEQ ID NO: 175983 - RNA, 19 nt, Homo sapiens
  misc_RNA (1)...(19): siRNA sense strand
gaacaccauagcugccaau

SEQ ID NO: 175984 - RNA, 19 nt, Homo sapiens
  misc_RNA (1)...(19): siRNA sense strand
gaauucuggcuaccacuuc

SEQ ID NO: 175985 - RNA, 19 nt, Homo sapiens
  misc_RNA (1)...(19): siRNA sense strand
aagauuaccagcaacaugu

SEQ ID NO: 175986 - RNA, 19 nt, Homo sapiens
  misc_RNA (1)...(19): siRNA sense strand
gaaagauuaccagcaacau

SEQ ID NO: 175987 - RNA, 19 nt, Homo sapiens
  misc_RNA (1)...(19): siRNA sense strand
ugaugaugaugacaagauc

SEQ ID NO: 175988 - RNA, 19 nt, Homo sapiens
  misc_RNA (1)...(19): siRNA sense strand
agaacaagccuggagucua

SEQ ID NO: 175989 - RNA, 19 nt, Homo sapiens
  misc_RNA (1)...(19): siRNA sense strand
aaagauuaccagcaacaug

SEQ ID NO: 175990 - RNA, 19 nt, Homo sapiens
  misc_RNA (1)...(19): siRNA sense strand
caucaaugcagccaagauc

SEQ ID NO: 175991 - RNA, 19 nt, Homo sapiens
  misc_RNA (1)...(19): siRNA sense strand
gacaggaagacucugaaca

SEQ ID NO: 175992 - RNA, 19 nt, Homo sapiens
  misc_RNA (1)...(19): siRNA sense strand
gcugugcccagaagaacaa

SEQ ID NO: 175993 - RNA, 19 nt, Homo sapiens
  misc_RNA (1)...(19): siRNA sense strand
guggcucccucaucaacga

SEQ ID NO: 175994 - RNA, 19 nt, Homo sapiens
  misc_RNA (1)...(19): siRNA sense strand
ggauuaagaacaccauagc

SEQ ID NO: 175995 - RNA, 19 nt, Homo sapiens
  misc_RNA (1)...(19): siRNA sense strand
gagagcacaacaucgaagu

SEQ ID NO: 175996 - RNA, 19 nt, Homo sapiens
  misc_RNA (1)...(19): siRNA sense strand
gggagagcacaacaucgaa

SEQ ID NO: 175997 - RNA, 19 nt, Homo sapiens
  misc_RNA (1)...(19): siRNA sense strand
ggauucaugucagggugau

SEQ ID NO: 175998 - RNA, 19 nt, Homo sapiens
  misc_RNA (1)...(19): siRNA sense strand
gagucuacaccaaggucua

SEQ ID NO: 175999 - RNA, 19 nt, Homo sapiens
  misc_RNA (1)...(19): siRNA sense strand
gggaggcaaggauucaugu

SEQ ID NO: 176000 - RNA, 19 nt, Homo sapiens
  misc_RNA (1)...(19): siRNA sense strand
gugaaauggauuaagaaca

SEQ ID NO: 176001 - RNA, 19 nt, Homo sapiens
  misc_RNA (1)...(19): siRNA sense strand
gaacaggccuggagucuac

SEQ ID NO: 176002 - RNA, 19 nt, Homo sapiens
  misc_RNA (1)...(19): siRNA sense strand
acaccaaggucuacaacua

SEQ ID NO: 176003 - RNA, 19 nt, Homo sapiens
  misc_RNA (1)...(19): siRNA sense strand
gccggacucuggacaauga

SEQ ID NO: 176004 - RNA, 19 nt, Homo sapiens
  misc_RNA (1)...(19): siRNA sense strand
ggaaagauuaccaacaaca

SEQ ID NO: 176005 - RNA, 19 nt, Homo sapiens
  misc_RNA (1)...(19): siRNA sense strand
uaccagguguccuugaauu

SEQ ID NO: 176006 - RNA, 19 nt, Homo sapiens
  misc_RNA (1)...(19): siRNA sense strand
gaaagauuaccaacaacau

SEQ ID NO: 176007 - RNA, 19 nt, Homo sapiens
  misc_RNA (1)...(19): siRNA sense strand
acaaugacauccugcugau

SEQ ID NO: 176008 - RNA, 19 nt, Homo sapiens
  misc_RNA (1)...(19): siRNA sense strand
caccugccgucaucaauuc

SEQ ID NO: 176009 - RNA, 19 nt, Homo sapiens
  misc_RNA (1)...(19): siRNA sense strand
gaaucuacuucugauccuu

SEQ ID NO: 176010 - RNA, 19 nt, Homo sapiens
  misc_RNA (1)...(19): siRNA sense strand
acaacuauguggacuggau

SEQ ID NO: 176011 - RNA, 19 nt, Homo sapiens
  misc_RNA (1)...(19): siRNA sense strand
uauguggacuggauuaagg

SEQ ID NO: 176012 - RNA, 19 nt, Homo sapiens
  misc_RNA (1)...(19): siRNA sense strand
ccuaccagguguccuugaa

SEQ ID NO: 176013 - RNA, 19 nt, Homo sapiens
  misc_RNA (1)...(19): siRNA sense strand
cuucugauccuuaccuuug

SEQ ID NO: 176014 - RNA, 19 nt, Homo sapiens
  misc_RNA (1)...(19): siRNA sense strand
aaucuacuucugauccuua

SEQ ID NO: 176015 - RNA, 19 nt, Homo sapiens
  misc_RNA (1)...(19): siRNA sense strand
ggccuggagucuacaccaa

SEQ ID NO: 176016 - RNA, 19 nt, Homo sapiens
  misc_RNA (1)...(19): siRNA sense strand
caccaaggucuacaacuau

SEQ ID NO: 176017 - RNA, 19 nt, Homo sapiens
  misc_RNA (1)...(19): siRNA sense strand
aaagauuaccaacaacaug

SEQ ID NO: 176018 - RNA, 19 nt, Homo sapiens
  misc_RNA (1)...(19): siRNA sense strand
gaauucuggcuaccacuuc

SEQ ID NO: 176019 - RNA, 19 nt, Homo sapiens
  misc_RNA (1)...(19): siRNA sense strand
ucaccugccgucaucaauu

SEQ ID NO: 176020 - RNA, 19 nt, Homo sapiens
  misc_RNA (1)...(19): siRNA sense strand
gcccuguggucuccaaugg

SEQ ID NO: 176021 - RNA, 19 nt, Homo sapiens
  misc_RNA (1)...(19): siRNA sense strand
caacuauguggacuggauu

SEQ ID NO: 176022 - RNA, 19 nt, Homo sapiens
  misc_RNA (1)...(19): siRNA sense strand
ugaugaugaugacaagauc

SEQ ID NO: 176023 - RNA, 19 nt, Homo sapiens
  misc_RNA (1)...(19): siRNA sense strand
aaugacauccugcugauca

SEQ ID NO: 176024 - RNA, 19 nt, Homo sapiens
  misc_RNA (1)...(19): siRNA sense strand
cagguguccuugaauucug

SEQ ID NO: 176025 - RNA, 19 nt, Homo sapiens
  misc_RNA (1)...(19): siRNA sense strand
caaggucuacaacuaugug

SEQ ID NO: 176026 - RNA, 19 nt, Homo sapiens
  misc_RNA (1)...(19): siRNA sense strand
cagccggacucuggacaau

SEQ ID NO: 176027 - RNA, 19 nt, Homo sapiens
  misc_RNA (1)...(19): siRNA sense strand
gagagcacaacaucgaagu

SEQ ID NO: 176028 - RNA, 19 nt, Homo sapiens
  misc_RNA (1)...(19): siRNA sense strand
ugcgguggcucccucauca

SEQ ID NO: 176029 - RNA, 19 nt, Homo sapiens
  misc_RNA (1)...(19): siRNA sense strand
gggagagcacaacaucgaa

SEQ ID NO: 176030 - RNA, 19 nt, Homo sapiens
  misc_RNA (1)...(19): siRNA sense strand
aagauuaccaacaacaugu

SEQ ID NO: 176031 - RNA, 19 nt, Homo sapiens
  misc_RNA (1)...(19): siRNA sense strand
gagucuacaccaaggucua

SEQ ID NO: 176032 - RNA, 19 nt, Homo sapiens
  misc_RNA (1)...(19): siRNA sense strand
accaaggucuacaacuaug

SEQ ID NO: 176033 - RNA, 19 nt, Homo sapiens
  misc_RNA (1)...(19): siRNA sense strand
ggauuaaggacaccauagc

SEQ ID NO: 176034 - RNA, 19 nt, Homo sapiens
  misc_RNA (1)...(19): siRNA sense strand
gaacaggccuggagucuac

SEQ ID NO: 176035 - RNA, 19 nt, Homo sapiens
  misc_RNA (1)...(19): siRNA sense strand
gggacacucuggacaauga

SEQ ID NO: 176036 - RNA, 19 nt, Homo sapiens
  misc_RNA (1)...(19): siRNA sense strand
acaccaaggucuacaacua

SEQ ID NO: 176037 - RNA, 19 nt, Homo sapiens
  misc_RNA (1)...(19): siRNA sense strand
gggcaacacucugagcuuu

SEQ ID NO: 176038 - RNA, 19 nt, Homo sapiens
  misc_RNA (1)...(19): siRNA sense strand
ugacgaugaugacaagauu

SEQ ID NO: 176039 - RNA, 19 nt, Homo sapiens
  misc_RNA (1)...(19): siRNA sense strand
gaucauccgccacccuaaa

SEQ ID NO: 176040 - RNA, 19 nt, Homo sapiens
  misc_RNA (1)...(19): siRNA sense strand
gcaacacucugagcuuugg

SEQ ID NO: 176041 - RNA, 19 nt, Homo sapiens
  misc_RNA (1)...(19): siRNA sense strand
gagcuuuggugcugacuac

SEQ ID NO: 176042 - RNA, 19 nt, Homo sapiens
  misc_RNA (1)...(19): siRNA sense strand
caacggacagcuccaagga

SEQ ID NO: 176043 - RNA, 19 nt, Homo sapiens
  misc_RNA (1)...(19): siRNA sense strand
gaaagauuaccaacagcau

SEQ ID NO: 176044 - RNA, 19 nt, Homo sapiens
  misc_RNA (1)...(19): siRNA sense strand
acaacuauguggacuggau

SEQ ID NO: 176045 - RNA, 19 nt, Homo sapiens
  misc_RNA (1)...(19): siRNA sense strand
uauguggacuggauuaagg

SEQ ID NO: 176046 - RNA, 19 nt, Homo sapiens
  misc_RNA (1)...(19): siRNA sense strand
ggagagcacaacaucaaag

SEQ ID NO: 176047 - RNA, 19 nt, Homo sapiens
  misc_RNA (1)...(19): siRNA sense strand
gagagcacaacaucaaagu

SEQ ID NO: 176048 - RNA, 19 nt, Homo sapiens
  misc_RNA (1)...(19): siRNA sense strand
cuggaaagauuaccaacag

SEQ ID NO: 176049 - RNA, 19 nt, Homo sapiens
  misc_RNA (1)...(19): siRNA sense strand
gggagagcacaacaucaaa

SEQ ID NO: 176050 - RNA, 19 nt, Homo sapiens
  misc_RNA (1)...(19): siRNA sense strand
caccaaggucuacaacuau

SEQ ID NO: 176051 - RNA, 19 nt, Homo sapiens
  misc_RNA (1)...(19): siRNA sense strand
ggccuggagucuacaccaa

SEQ ID NO: 176052 - RNA, 19 nt, Homo sapiens
  misc_RNA (1)...(19): siRNA sense strand
cagggacacucuggacaau

SEQ ID NO: 176053 - RNA, 19 nt, Homo sapiens
  misc_RNA (1)...(19): siRNA sense strand
caacuauguggacuggauu

SEQ ID NO: 176054 - RNA, 19 nt, Homo sapiens
  misc_RNA (1)...(19): siRNA sense strand
gaauucuggcucccacuuc

SEQ ID NO: 176055 - RNA, 19 nt, Homo sapiens
  misc_RNA (1)...(19): siRNA sense strand
ugggagagcacaacaucaa

SEQ ID NO: 176056 - RNA, 19 nt, Homo sapiens
  misc_RNA (1)...(19): siRNA sense strand
caucaaugcggccaagauc

SEQ ID NO: 176057 - RNA, 19 nt, Homo sapiens
  misc_RNA (1)...(19): siRNA sense strand
ugcgguggcucccucauca

SEQ ID NO: 176058 - RNA, 19 nt, Homo sapiens
  misc_RNA (1)...(19): siRNA sense strand
caaggucuacaacuaugug

SEQ ID NO: 176059 - RNA, 19 nt, Homo sapiens
  misc_RNA (1)...(19): siRNA sense strand
ggcugugccuggaagaaca

SEQ ID NO: 176060 - RNA, 19 nt, Homo sapiens
  misc_RNA (1)...(19): siRNA sense strand
ucaaugcggccaagaucau

SEQ ID NO: 176061 - RNA, 19 nt, Homo sapiens
  misc_RNA (1)...(19): siRNA sense strand
gagucuacaccaaggucua

SEQ ID NO: 176062 - RNA, 19 nt, Homo sapiens
  misc_RNA (1)...(19): siRNA sense strand
ugugggagcugcuguugcu

SEQ ID NO: 176063 - RNA, 19 nt, Homo sapiens
  misc_RNA (1)...(19): siRNA sense strand
cagcgaacaguggguggua

SEQ ID NO: 176064 - RNA, 19 nt, Homo sapiens
  misc_RNA (1)...(19): siRNA sense strand
accaaggucuacaacuaug

SEQ ID NO: 176065 - RNA, 19 nt, Homo sapiens
  misc_RNA (1)...(19): siRNA sense strand
ggcaacacucugagcuuug

SEQ ID NO: 176066 - RNA, 19 nt, Homo sapiens
  misc_RNA (1)...(19): siRNA sense strand
caccugccgucaucaaugc

SEQ ID NO: 176067 - RNA, 19 nt, Homo sapiens
  misc_RNA (1)...(19): siRNA sense strand
ucaccugccgucaucaaug

SEQ ID NO: 176068 - RNA, 19 nt, Homo sapiens
  misc_RNA (1)...(19): siRNA sense strand
gaaguaaacuguccagaug

SEQ ID NO: 176069 - RNA, 19 nt, Homo sapiens
  misc_RNA (1)...(19): siRNA sense strand
gaacagcguugauauccua

SEQ ID NO: 176070 - RNA, 19 nt, Homo sapiens
  misc_RNA (1)...(19): siRNA sense strand
gaacaacaaugguuuagug

SEQ ID NO: 176071 - RNA, 19 nt, Homo sapiens
  misc_RNA (1)...(19): siRNA sense strand
caagcaaucugaagaauga

SEQ ID NO: 176072 - RNA, 19 nt, Homo sapiens
  misc_RNA (1)...(19): siRNA sense strand
ggaaaugucucaauagagu

SEQ ID NO: 176073 - RNA, 19 nt, Homo sapiens
  misc_RNA (1)...(19): siRNA sense strand
gaugagaucuuucuaucaa

SEQ ID NO: 176074 - RNA, 19 nt, Homo sapiens
  misc_RNA (1)...(19): siRNA sense strand
gaucauacguguaaaccaa

SEQ ID NO: 176075 - RNA, 19 nt, Homo sapiens
  misc_RNA (1)...(19): siRNA sense strand
aaacugagcuucgaugauu

SEQ ID NO: 176076 - RNA, 19 nt, Homo sapiens
  misc_RNA (1)...(19): siRNA sense strand
gcucugugcuggauuaauu

SEQ ID NO: 176077 - RNA, 19 nt, Homo sapiens
  misc_RNA (1)...(19): siRNA sense strand
aauaagagauggugaagaa

SEQ ID NO: 176078 - RNA, 19 nt, Homo sapiens
  misc_RNA (1)...(19): siRNA sense strand
ggaguuacauauaauccua

SEQ ID NO: 176079 - RNA, 19 nt, Homo sapiens
  misc_RNA (1)...(19): siRNA sense strand
caaguaacccuaaaugaaa

SEQ ID NO: 176080 - RNA, 19 nt, Homo sapiens
  misc_RNA (1)...(19): siRNA sense strand
gauggccacuuaauacuaa

SEQ ID NO: 176081 - RNA, 19 nt, Homo sapiens
  misc_RNA (1)...(19): siRNA sense strand
ccaaacagcuacccuaauc

SEQ ID NO: 176082 - RNA, 19 nt, Homo sapiens
  misc_RNA (1)...(19): siRNA sense strand
gaagaaggaggaauagauu

SEQ ID NO: 176083 - RNA, 19 nt, Homo sapiens
  misc_RNA (1)...(19): siRNA sense strand
cauaaacccucauuacaau

SEQ ID NO: 176084 - RNA, 19 nt, Homo sapiens
  misc_RNA (1)...(19): siRNA sense strand
ccaaggacuuuccauuaaa

SEQ ID NO: 176085 - RNA, 19 nt, Homo sapiens
  misc_RNA (1)...(19): siRNA sense strand
gcaagaagcugauguuccu

SEQ ID NO: 176086 - RNA, 19 nt, Homo sapiens
  misc_RNA (1)...(19): siRNA sense strand
gccagggucucaagguuua

SEQ ID NO: 176087 - RNA, 19 nt, Homo sapiens
  misc_RNA (1)...(19): siRNA sense strand
gaagccagagcgacauuua

SEQ ID NO: 176088 - RNA, 19 nt, Homo sapiens
  misc_RNA (1)...(19): siRNA sense strand
gaggaggguuuaaagcaaa

SEQ ID NO: 176089 - RNA, 19 nt, Homo sapiens
  misc_RNA (1)...(19): siRNA sense strand
ucaaacagucccucgauua

SEQ ID NO: 176090 - RNA, 19 nt, Homo sapiens
  misc_RNA (1)...(19): siRNA sense strand
cgauguaguugaaauaaga

SEQ ID NO: 176091 - RNA, 19 nt, Homo sapiens
  misc_RNA (1)...(19): siRNA sense strand
ccgaauggauacaaaguuu

SEQ ID NO: 176092 - RNA, 19 nt, Homo sapiens
  misc_RNA (1)...(19): siRNA sense strand
ugaugcaucuggaauuuaa

SEQ ID NO: 176093 - RNA, 19 nt, Homo sapiens
  misc_RNA (1)...(19): siRNA sense strand
aaucugaccucuccucaaa

SEQ ID NO: 176094 - RNA, 19 nt, Homo sapiens
  misc_RNA (1)...(19): siRNA sense strand
uggcaaugcuucaggauuu

SEQ ID NO: 176095 - RNA, 19 nt, Homo sapiens
  misc_RNA (1)...(19): siRNA sense strand
caucuggaauuuaaaguga

SEQ ID NO: 176096 - RNA, 19 nt, Homo sapiens
  misc_RNA (1)...(19): siRNA sense strand
aacagucccucgauuaaua

SEQ ID NO: 176097 - RNA, 19 nt, Homo sapiens
  misc_RNA (1)...(19): siRNA sense strand
uaaaggauguguucucuac

SEQ ID NO: 176098 - RNA, 19 nt, Homo sapiens
  misc_RNA (1)...(19): siRNA sense strand
cauccggaguuacauauaa

SEQ ID NO: 176099 - RNA, 19 nt, Homo sapiens
  misc_RNA (1)...(19): siRNA sense strand
caaacagucccucgauuaa

SEQ ID NO: 176100 - RNA, 19 nt, Homo sapiens
  misc_RNA (1)...(19): siRNA sense strand
gauaaugaaugggaaagga

SEQ ID NO: 176101 - RNA, 19 nt, Homo sapiens
  misc_RNA (1)...(19): siRNA sense strand
ccaaguuacugccaccuuu

SEQ ID NO: 176102 - RNA, 19 nt, Homo sapiens
  misc_RNA (1)...(19): siRNA sense strand
caggaaaugucucaauaga

SEQ ID NO: 176103 - RNA, 19 nt, Homo sapiens
  misc_RNA (1)...(19): siRNA sense strand
caacuggucacuuuccaua

SEQ ID NO: 176104 - RNA, 19 nt, Homo sapiens
  misc_RNA (1)...(19): siRNA sense strand
ucucucagcuccuaugaaa

SEQ ID NO: 176105 - RNA, 19 nt, Homo sapiens
  misc_RNA (1)...(19): siRNA sense strand
ccauuaaugugccaagaaa

SEQ ID NO: 176106 - RNA, 19 nt, Homo sapiens
  misc_RNA (1)...(19): siRNA sense strand
ggaaagaauauacaacuuc

SEQ ID NO: 176107 - RNA, 19 nt, Homo sapiens
  misc_RNA (1)...(19): siRNA sense strand
gugauuauguuggcuuuaa

SEQ ID NO: 176108 - RNA, 19 nt, Homo sapiens
  misc_RNA (1)...(19): siRNA sense strand
ggacaaguaacccuaaaug

SEQ ID NO: 176109 - RNA, 19 nt, Homo sapiens
  misc_RNA (1)...(19): siRNA sense strand
gacaaacucucaguggauu

SEQ ID NO: 176110 - RNA, 19 nt, Homo sapiens
  misc_RNA (1)...(19): siRNA sense strand
caacgaacaacaaugguuu

SEQ ID NO: 176111 - RNA, 19 nt, Homo sapiens
  misc_RNA (1)...(19): siRNA sense strand
ggauucaggaggaccauua

SEQ ID NO: 176112 - RNA, 19 nt, Homo sapiens
  misc_RNA (1)...(19): siRNA sense strand
gcauuauagucguauuuga

SEQ ID NO: 176113 - RNA, 19 nt, Homo sapiens
  misc_RNA (1)...(19): siRNA sense strand
caugaugcaucuggaauuu

SEQ ID NO: 176114 - RNA, 19 nt, Homo sapiens
  misc_RNA (1)...(19): siRNA sense strand
gcacaacgaacaacaaugg

SEQ ID NO: 176115 - RNA, 19 nt, Homo sapiens
  misc_RNA (1)...(19): siRNA sense strand
uuuaagagcuucuauuugg

SEQ ID NO: 176116 - RNA, 19 nt, Homo sapiens
  misc_RNA (1)...(19): siRNA sense strand
gcaaucugaagaaugaaua

SEQ ID NO: 176117 - RNA, 19 nt, Homo sapiens
  misc_RNA (1)...(19): siRNA sense strand
ggugugaccucauuuggau

SEQ ID NO: 176118 - RNA, 19 nt, Homo sapiens
  misc_RNA (1)...(19): siRNA sense strand
gaagaaaggacaacgacau

SEQ ID NO: 176119 - RNA, 19 nt, Homo sapiens
  misc_RNA (1)...(19): siRNA sense strand
aacaagauccugagugaua

SEQ ID NO: 176120 - RNA, 19 nt, Homo sapiens
  misc_RNA (1)...(19): siRNA sense strand
ggagccagcuugccuuagu

SEQ ID NO: 176121 - RNA, 19 nt, Homo sapiens
  misc_RNA (1)...(19): siRNA sense strand
ggacuuuccauuaaacuga

SEQ ID NO: 176122 - RNA, 19 nt, Homo sapiens
  misc_RNA (1)...(19): siRNA sense strand
gguguaggaucaagcaaga

SEQ ID NO: 176123 - RNA, 19 nt, Homo sapiens
  misc_RNA (1)...(19): siRNA sense strand
caacgacauugccaugaug

SEQ ID NO: 176124 - RNA, 19 nt, Homo sapiens
  misc_RNA (1)...(19): siRNA sense strand
ccaaauacaacauucaguu

SEQ ID NO: 176125 - RNA, 19 nt, Homo sapiens
  misc_RNA (1)...(19): siRNA sense strand
uccaggaaaugucucaaua

SEQ ID NO: 176126 - RNA, 19 nt, Homo sapiens
  misc_RNA (1)...(19): siRNA sense strand
gaggauggcucagaugaag

SEQ ID NO: 176127 - RNA, 19 nt, Homo sapiens
  misc_RNA (1)...(19): siRNA sense strand
acaaguaacccuaaaugaa

SEQ ID NO: 176128 - RNA, 19 nt, Homo sapiens
  misc_RNA (1)...(19): siRNA sense strand
uauguuggcuuuaaugcaa

SEQ ID NO: 176129 - RNA, 19 nt, Homo sapiens
  misc_RNA (1)...(19): siRNA sense strand
accaaggacuuuccauuaa

SEQ ID NO: 176130 - RNA, 19 nt, Homo sapiens
  misc_RNA (1)...(19): siRNA sense strand
gcagcucucuuugccauau

SEQ ID NO: 176131 - RNA, 19 nt, Homo sapiens
  misc_RNA (1)...(19): siRNA sense strand
ccauaaaucuuguggaaaa

SEQ ID NO: 176132 - RNA, 19 nt, Homo sapiens
  misc_RNA (1)...(19): siRNA sense strand
uaacagcagugagcuuaau

SEQ ID NO: 176133 - RNA, 19 nt, Homo sapiens
  misc_RNA (1)...(19): siRNA sense strand
uaugauaugugcaggcuau

SEQ ID NO: 176134 - RNA, 19 nt, Homo sapiens
  misc_RNA (1)...(19): siRNA sense strand
aacagcagaugccagaaua

SEQ ID NO: 176135 - RNA, 19 nt, Homo sapiens
  misc_RNA (1)...(19): siRNA sense strand
cagauuacauacaaccuau

SEQ ID NO: 176136 - RNA, 19 nt, Homo sapiens
  misc_RNA (1)...(19): siRNA sense strand
cuuaguuucugguaucaua

SEQ ID NO: 176137 - RNA, 19 nt, Homo sapiens
  misc_RNA (1)...(19): siRNA sense strand
aaccaaggacuuuccauua

SEQ ID NO: 176138 - RNA, 19 nt, Homo sapiens
  misc_RNA (1)...(19): siRNA sense strand
aaccauaaaucuuguggaa

SEQ ID NO: 176139 - RNA, 19 nt, Homo sapiens
  misc_RNA (1)...(19): siRNA sense strand
ggaccacccagauuucaaa

SEQ ID NO: 176140 - RNA, 19 nt, Homo sapiens
  misc_RNA (1)...(19): siRNA sense strand
uaacauaugggauuugcaa

SEQ ID NO: 176141 - RNA, 19 nt, Homo sapiens
  misc_RNA (1)...(19): siRNA sense strand
gaugaaagugauuauguug

SEQ ID NO: 176142 - RNA, 19 nt, Homo sapiens
  misc_RNA (1)...(19): siRNA sense strand
cagcagaugccagaauaua

SEQ ID NO: 176143 - RNA, 19 nt, Homo sapiens
  misc_RNA (1)...(19): siRNA sense strand
ucauaaacccucauuacaa

SEQ ID NO: 176144 - RNA, 19 nt, Homo sapiens
  misc_RNA (1)...(19): siRNA sense strand
gcaagaggaggguuuaaag

SEQ ID NO: 176145 - RNA, 19 nt, Homo sapiens
  misc_RNA (1)...(19): siRNA sense strand
gacaaguaacccuaaauga

SEQ ID NO: 176146 - RNA, 19 nt, Homo sapiens
  misc_RNA (1)...(19): siRNA sense strand
gcacuuggacagagucaug

SEQ ID NO: 176147 - RNA, 19 nt, Homo sapiens
  misc_RNA (1)...(19): siRNA sense strand
uaaucuggcuuucuguguu

SEQ ID NO: 176148 - RNA, 19 nt, Homo sapiens
  misc_RNA (1)...(19): siRNA sense strand
ugagugauauugcguugga

SEQ ID NO: 176149 - RNA, 19 nt, Homo sapiens
  misc_RNA (1)...(19): siRNA sense strand
caaagccaaucuucucuac

SEQ ID NO: 176150 - RNA, 19 nt, Homo sapiens
  misc_RNA (1)...(19): siRNA sense strand
uccaggaucuaaaugauga

SEQ ID NO: 176151 - RNA, 19 nt, Homo sapiens
  misc_RNA (1)...(19): siRNA sense strand
aaacuuuacuacuggcuau

SEQ ID NO: 176152 - RNA, 19 nt, Homo sapiens
  misc_RNA (1)...(19): siRNA sense strand
ucuacgaacuuuccaaaca

SEQ ID NO: 176153 - RNA, 19 nt, Homo sapiens
  misc_RNA (1)...(19): siRNA sense strand
ggagccaaauacaacauuc

SEQ ID NO: 176154 - RNA, 19 nt, Homo sapiens
  misc_RNA (1)...(19): siRNA sense strand
gaaggaaauuauggagaca

SEQ ID NO: 176155 - RNA, 19 nt, Homo sapiens
  misc_RNA (1)...(19): siRNA sense strand
gauuugaacagcguugaua

SEQ ID NO: 176156 - RNA, 19 nt, Homo sapiens
  misc_RNA (1)...(19): siRNA sense strand
ccucuucuaucaaaugaga

SEQ ID NO: 176157 - RNA, 19 nt, Homo sapiens
  misc_RNA (1)...(19): siRNA sense strand
guacuacugcaaacauauu

SEQ ID NO: 176158 - RNA, 19 nt, Homo sapiens
  misc_RNA (1)...(19): siRNA sense strand
gagccagcuugccuuaguu

SEQ ID NO: 176159 - RNA, 19 nt, Homo sapiens
  misc_RNA (1)...(19): siRNA sense strand
ggaagcaccuuuucuccuu

SEQ ID NO: 176160 - RNA, 19 nt, Homo sapiens
  misc_RNA (1)...(19): siRNA sense strand
gagcuucgaugauuuuaau

SEQ ID NO: 176161 - RNA, 19 nt, Homo sapiens
  misc_RNA (1)...(19): siRNA sense strand
gauaugugcaggcuaugaa

SEQ ID NO: 176162 - RNA, 19 nt, Homo sapiens
  misc_RNA (1)...(19): siRNA sense strand
gaaaggacaacgacauugc

SEQ ID NO: 176163 - RNA, 19 nt, Homo sapiens
  misc_RNA (1)...(19): siRNA sense strand
caaauacaacauucaguuc

SEQ ID NO: 176164 - RNA, 19 nt, Homo sapiens
  misc_RNA (1)...(19): siRNA sense strand
aaaacaagauccugaguga

SEQ ID NO: 176165 - RNA, 19 nt, Homo sapiens
  misc_RNA (1)...(19): siRNA sense strand
gguccaggaucuaaaugau

SEQ ID NO: 176166 - RNA, 19 nt, Homo sapiens
  misc_RNA (1)...(19): siRNA sense strand
uuaugaagguguaggauca

SEQ ID NO: 176167 - RNA, 19 nt, Homo sapiens
  misc_RNA (1)...(19): siRNA sense strand
caaguggacagcaauccua

SEQ ID NO: 176168 - RNA, 19 nt, Homo sapiens
  misc_RNA (1)...(19): siRNA sense strand
gagaguagcuucugugaug

SEQ ID NO: 176169 - RNA, 19 nt, Homo sapiens
  misc_RNA (1)...(19): siRNA sense strand
gcacagagcucgaaaacua

SEQ ID NO: 176170 - RNA, 19 nt, Homo sapiens
  misc_RNA (1)...(19): siRNA sense strand
ggaaagaacuaugugaaug

SEQ ID NO: 176171 - RNA, 19 nt, Homo sapiens
  misc_RNA (1)...(19): siRNA sense strand
gcaagaauauacucaguca

SEQ ID NO: 176172 - RNA, 19 nt, Homo sapiens
  misc_RNA (1)...(19): siRNA sense strand
ggacgaccauauuuauuuc

SEQ ID NO: 176173 - RNA, 19 nt, Homo sapiens
  misc_RNA (1)...(19): siRNA sense strand
gcucaacaauacuaucuug

SEQ ID NO: 176174 - RNA, 19 nt, Homo sapiens
  misc_RNA (1)...(19): siRNA sense strand
gagcuuacuuugccuggaa

SEQ ID NO: 176175 - RNA, 19 nt, Homo sapiens
  misc_RNA (1)...(19): siRNA sense strand
gacagaggauaacauagaa

SEQ ID NO: 176176 - RNA, 19 nt, Homo sapiens
  misc_RNA (1)...(19): siRNA sense strand
caaugaagcuggauuuagg

SEQ ID NO: 176177 - RNA, 19 nt, Homo sapiens
  misc_RNA (1)...(19): siRNA sense strand
gggacgaccauauuuauuu

SEQ ID NO: 176178 - RNA, 19 nt, Homo sapiens
  misc_RNA (1)...(19): siRNA sense strand
guaaacuuguccagauuga

SEQ ID NO: 176179 - RNA, 19 nt, Homo sapiens
  misc_RNA (1)...(19): siRNA sense strand
gcauauagguuugguguac

SEQ ID NO: 176180 - RNA, 19 nt, Homo sapiens
  misc_RNA (1)...(19): siRNA sense strand
gaaccaauuaccaagcaua

SEQ ID NO: 176181 - RNA, 19 nt, Homo sapiens
  misc_RNA (1)...(19): siRNA sense strand
gguauuagcaacugagaaa

SEQ ID NO: 176182 - RNA, 19 nt, Homo sapiens
  misc_RNA (1)...(19): siRNA sense strand
uaacauagaaguuggaauc

SEQ ID NO: 176183 - RNA, 19 nt, Homo sapiens
  misc_RNA (1)...(19): siRNA sense strand
gaauuaaagcugcaaaugg

SEQ ID NO: 176184 - RNA, 19 nt, Homo sapiens
  misc_RNA (1)...(19): siRNA sense strand
gaaguuggaaucugcaaug

SEQ ID NO: 176185 - RNA, 19 nt, Homo sapiens
  misc_RNA (1)...(19): siRNA sense strand
caucuuaacccuaaaggaa

SEQ ID NO: 176186 - RNA, 19 nt, Homo sapiens
  misc_RNA (1)...(19): siRNA sense strand
gaaagaacuaugugaaugg

SEQ ID NO: 176187 - RNA, 19 nt, Homo sapiens
  misc_RNA (1)...(19): siRNA sense strand
ugacagaggauaacauaga

SEQ ID NO: 176188 - RNA, 19 nt, Homo sapiens
  misc_RNA (1)...(19): siRNA sense strand
gaggauaacauagaaguug

SEQ ID NO: 176189 - RNA, 19 nt, Homo sapiens
  misc_RNA (1)...(19): siRNA sense strand
ggaauuaaagcugcaaaug

SEQ ID NO: 176190 - RNA, 19 nt, Homo sapiens
  misc_RNA (1)...(19): siRNA sense strand
uaaugaagaucuggaacuu

SEQ ID NO: 176191 - RNA, 19 nt, Homo sapiens
  misc_RNA (1)...(19): siRNA sense strand
ugagcgaaguguacacaaa

SEQ ID NO: 176192 - RNA, 19 nt, Homo sapiens
  misc_RNA (1)...(19): siRNA sense strand
augaagaucuggaacuuga

SEQ ID NO: 176193 - RNA, 19 nt, Homo sapiens
  misc_RNA (1)...(19): siRNA sense strand
ugagggacgaccauauuua

SEQ ID NO: 176194 - RNA, 19 nt, Homo sapiens
  misc_RNA (1)...(19): siRNA sense strand
cuacagcaaugggaaagaa

SEQ ID NO: 176195 - RNA, 19 nt, Homo sapiens
  misc_RNA (1)...(19): siRNA sense strand
ugcaaauggugugguauua

SEQ ID NO: 176196 - RNA, 19 nt, Homo sapiens
  misc_RNA (1)...(19): siRNA sense strand
guuggaaucugcaaugaag

SEQ ID NO: 176197 - RNA, 19 nt, Homo sapiens
  misc_RNA (1)...(19): siRNA sense strand
gaagaugccauucauacag

SEQ ID NO: 176198 - RNA, 19 nt, Homo sapiens
  misc_RNA (1)...(19): siRNA sense strand
gagggacgaccauauuuau

SEQ ID NO: 176199 - RNA, 19 nt, Homo sapiens
  misc_RNA (1)...(19): siRNA sense strand
ccaauuaccaagcauauag

SEQ ID NO: 176200 - RNA, 19 nt, Homo sapiens
  misc_RNA (1)...(19): siRNA sense strand
acacaaaguagaaccaauu

SEQ ID NO: 176201 - RNA, 19 nt, Homo sapiens
  misc_RNA (1)...(19): siRNA sense strand
ggaaugagggacgaccaua

SEQ ID NO: 176202 - RNA, 19 nt, Homo sapiens
  misc_RNA (1)...(19): siRNA sense strand
gcaaugaagcuggauuuag

SEQ ID NO: 176203 - RNA, 19 nt, Homo sapiens
  misc_RNA (1)...(19): siRNA sense strand
acagccaucuuaacccuaa

SEQ ID NO: 176204 - RNA, 19 nt, Homo sapiens
  misc_RNA (1)...(19): siRNA sense strand
cuggaaagcuacagcaaug

SEQ ID NO: 176205 - RNA, 19 nt, Homo sapiens
  misc_RNA (1)...(19): siRNA sense strand
cacaaaguagaaccaauua

SEQ ID NO: 176206 - RNA, 19 nt, Homo sapiens
  misc_RNA (1)...(19): siRNA sense strand
aaaacuagcucaacaauac

SEQ ID NO: 176207 - RNA, 19 nt, Homo sapiens
  misc_RNA (1)...(19): siRNA sense strand
uuaccaagcauauagguuu

SEQ ID NO: 176208 - RNA, 19 nt, Homo sapiens
  misc_RNA (1)...(19): siRNA sense strand
aauuaaagcugcaaauggu

SEQ ID NO: 176209 - RNA, 19 nt, Homo sapiens
  misc_RNA (1)...(19): siRNA sense strand
gaaugagggacgaccauau

SEQ ID NO: 176210 - RNA, 19 nt, Homo sapiens
  misc_RNA (1)...(19): siRNA sense strand
gaaauccauucuguaugau

SEQ ID NO: 176211 - RNA, 19 nt, Homo sapiens
  misc_RNA (1)...(19): siRNA sense strand
gggaaagaacuaugugaau

SEQ ID NO: 176212 - RNA, 19 nt, Homo sapiens
  misc_RNA (1)...(19): siRNA sense strand
caaauggugugguauuagc

SEQ ID NO: 176213 - RNA, 19 nt, Homo sapiens
  misc_RNA (1)...(19): siRNA sense strand
uagcuucugugaugcaaga

SEQ ID NO: 176214 - RNA, 19 nt, Homo sapiens
  misc_RNA (1)...(19): siRNA sense strand
gaaguguacacaaaguaga

SEQ ID NO: 176215 - RNA, 19 nt, Homo sapiens
  misc_RNA (1)...(19): siRNA sense strand
gaaaacuagcucaacaaua

SEQ ID NO: 176216 - RNA, 19 nt, Homo sapiens
  misc_RNA (1)...(19): siRNA sense strand
gcgaaguguacacaaagua

SEQ ID NO: 176217 - RNA, 19 nt, Homo sapiens
  misc_RNA (1)...(19): siRNA sense strand
aaugacagaggauaacaua

SEQ ID NO: 176218 - RNA, 19 nt, Homo sapiens
  misc_RNA (1)...(19): siRNA sense strand
gggcaaaugacagaggaua

SEQ ID NO: 176219 - RNA, 19 nt, Homo sapiens
  misc_RNA (1)...(19): siRNA sense strand
aauccauucuguaugauga

SEQ ID NO: 176220 - RNA, 19 nt, Homo sapiens
  misc_RNA (1)...(19): siRNA sense strand
aauacuaucuuguguacca

SEQ ID NO: 176221 - RNA, 19 nt, Homo sapiens
  misc_RNA (1)...(19): siRNA sense strand
aaacuuguccagauugaau

SEQ ID NO: 176222 - RNA, 19 nt, Homo sapiens
  misc_RNA (1)...(19): siRNA sense strand
gcaaugggaaagaacuaug

SEQ ID NO: 176223 - RNA, 19 nt, Homo sapiens
  misc_RNA (1)...(19): siRNA sense strand
gcaaauggugugguauuag

SEQ ID NO: 176224 - RNA, 19 nt, Homo sapiens
  misc_RNA (1)...(19): siRNA sense strand
ggcaaaugacagaggauaa

SEQ ID NO: 176225 - RNA, 19 nt, Homo sapiens
  misc_RNA (1)...(19): siRNA sense strand
gaggcuuacuccaacugaa

SEQ ID NO: 176226 - RNA, 19 nt, Homo sapiens
  misc_RNA (1)...(19): siRNA sense strand
uagaaccaauuaccaagca

SEQ ID NO: 176227 - RNA, 19 nt, Homo sapiens
  misc_RNA (1)...(19): siRNA sense strand
gguaaacuuguccagauug

SEQ ID NO: 176228 - RNA, 19 nt, Homo sapiens
  misc_RNA (1)...(19): siRNA sense strand
gaagaucuggaacuugaag

SEQ ID NO: 176229 - RNA, 19 nt, Homo sapiens
  misc_RNA (1)...(19): siRNA sense strand
gagcgaaguguacacaaag

SEQ ID NO: 176230 - RNA, 19 nt, Homo sapiens
  misc_RNA (1)...(19): siRNA sense strand
ugguaaacuuguccagauu

SEQ ID NO: 176231 - RNA, 19 nt, Homo sapiens
  misc_RNA (1)...(19): siRNA sense strand
acauucagcccgucuggua

SEQ ID NO: 176232 - RNA, 19 nt, Homo sapiens
  misc_RNA (1)...(19): siRNA sense strand
gcuuuucgcugacuacauu

SEQ ID NO: 176233 - RNA, 19 nt, Homo sapiens
  misc_RNA (1)...(19): siRNA sense strand
uaccaagcauauagguuug

SEQ ID NO: 176234 - RNA, 19 nt, Homo sapiens
  misc_RNA (1)...(19): siRNA sense strand
gcaaaugacagaggauaac

SEQ ID NO: 176235 - RNA, 19 nt, Homo sapiens
  misc_RNA (1)...(19): siRNA sense strand
ggaacuugaagaugccauu

SEQ ID NO: 176236 - RNA, 19 nt, Homo sapiens
  misc_RNA (1)...(19): siRNA sense strand
cagcccgucugguaaacuu

SEQ ID NO: 176237 - RNA, 19 nt, Homo sapiens
  misc_RNA (1)...(19): siRNA sense strand
ccaagaacccauuccuaca

SEQ ID NO: 176238 - RNA, 19 nt, Homo sapiens
  misc_RNA (1)...(19): siRNA sense strand
aaugagggacgaccauauu

SEQ ID NO: 176239 - RNA, 19 nt, Homo sapiens
  misc_RNA (1)...(19): siRNA sense strand
gaacuugaagaugccauuc

SEQ ID NO: 176240 - RNA, 19 nt, Homo sapiens
  misc_RNA (1)...(19): siRNA sense strand
ccagauugaauaugcuuug

SEQ ID NO: 176241 - RNA, 19 nt, Homo sapiens
  misc_RNA (1)...(19): siRNA sense strand
caagaacccauuccuacag

SEQ ID NO: 176242 - RNA, 19 nt, Homo sapiens
  misc_RNA (1)...(19): siRNA sense strand
ggauuuaggaggcuuacuc

SEQ ID NO: 176243 - RNA, 19 nt, Homo sapiens
  misc_RNA (1)...(19): siRNA sense strand
caaaguagaaccaauuacc

SEQ ID NO: 176244 - RNA, 19 nt, Homo sapiens
  misc_RNA (1)...(19): siRNA sense strand
gauaacauagaaguuggaa

SEQ ID NO: 176245 - RNA, 19 nt, Homo sapiens
  misc_RNA (1)...(19): siRNA sense strand
uuacuuauuugugguugga

SEQ ID NO: 176246 - RNA, 19 nt, Homo sapiens
  misc_RNA (1)...(19): siRNA sense strand
cagcaaugggaaagaacua

SEQ ID NO: 176247 - RNA, 19 nt, Homo sapiens
  misc_RNA (1)...(19): siRNA sense strand
cgaaguguacacaaaguag

SEQ ID NO: 176248 - RNA, 19 nt, Homo sapiens
  misc_RNA (1)...(19): siRNA sense strand
caaaugacagaggauaaca

SEQ ID NO: 176249 - RNA, 19 nt, Homo sapiens
  misc_RNA (1)...(19): siRNA sense strand
caaugggaaagaacuaugu

SEQ ID NO: 176250 - RNA, 19 nt, Homo sapiens
  misc_RNA (1)...(19): siRNA sense strand
guacacaaaguagaaccaa

SEQ ID NO: 176251 - RNA, 19 nt, Homo sapiens
  misc_RNA (1)...(19): siRNA sense strand
uaccaagaacccauuccua

SEQ ID NO: 176252 - RNA, 19 nt, Homo sapiens
  misc_RNA (1)...(19): siRNA sense strand
cgaccauauuuauuucagu

SEQ ID NO: 176253 - RNA, 19 nt, Homo sapiens
  misc_RNA (1)...(19): siRNA sense strand
ggauaacauagaaguugga

SEQ ID NO: 176254 - RNA, 19 nt, Homo sapiens
  misc_RNA (1)...(19): siRNA sense strand
cagaggauaacauagaagu

SEQ ID NO: 176255 - RNA, 19 nt, Homo sapiens
  misc_RNA (1)...(19): siRNA sense strand
ggugugguauuagcaacug

SEQ ID NO: 176256 - RNA, 19 nt, Homo sapiens
  misc_RNA (1)...(19): siRNA sense strand
cauauagguuugguguaca

SEQ ID NO: 176257 - RNA, 19 nt, Homo sapiens
  misc_RNA (1)...(19): siRNA sense strand
ucagucaggugguguucgu

SEQ ID NO: 176258 - RNA, 19 nt, Homo sapiens
  misc_RNA (1)...(19): siRNA sense strand
gggaauuaaagcugcaaau

SEQ ID NO: 176259 - RNA, 19 nt, Homo sapiens
  misc_RNA (1)...(19): siRNA sense strand
ugggaaagaacuaugugaa

SEQ ID NO: 176260 - RNA, 19 nt, Homo sapiens
  misc_RNA (1)...(19): siRNA sense strand
caggugguguucguccauu

SEQ ID NO: 176261 - RNA, 19 nt, Homo sapiens
  misc_RNA (1)...(19): siRNA sense strand
aaguuggaaucugcaauga

SEQ ID NO: 176262 - RNA, 19 nt, Homo sapiens
  misc_RNA (1)...(19): siRNA sense strand
acauagaaguuggaaucug

SEQ ID NO: 176263 - RNA, 19 nt, Homo sapiens
  misc_RNA (1)...(19): siRNA sense strand
auucauacagccaucuuaa

SEQ ID NO: 176264 - RNA, 19 nt, Homo sapiens
  misc_RNA (1)...(19): siRNA sense strand
gaugagcgaaguguacaca

SEQ ID NO: 176265 - RNA, 19 nt, Homo sapiens
  misc_RNA (1)...(19): siRNA sense strand
cugcaaugaagcuggauuu

SEQ ID NO: 176266 - RNA, 19 nt, Homo sapiens
  misc_RNA (1)...(19): siRNA sense strand
cugcaaauggugugguauu

SEQ ID NO: 176267 - RNA, 19 nt, Homo sapiens
  misc_RNA (1)...(19): siRNA sense strand
ggugguguucguccauuug

SEQ ID NO: 176268 - RNA, 19 nt, Homo sapiens
  misc_RNA (1)...(19): siRNA sense strand
gaaaugaccugccgugaua

SEQ ID NO: 176269 - RNA, 19 nt, Homo sapiens
  misc_RNA (1)...(19): siRNA sense strand
ggaagaagaugaaucagau

SEQ ID NO: 176270 - RNA, 19 nt, Homo sapiens
  misc_RNA (1)...(19): siRNA sense strand
ggaaucagaugcaaagaug

SEQ ID NO: 176271 - RNA, 19 nt, Homo sapiens
  misc_RNA (1)...(19): siRNA sense strand
ugaagaagguuccaacaaa

SEQ ID NO: 176272 - RNA, 19 nt, Homo sapiens
  misc_RNA (1)...(19): siRNA sense strand
gagaagaagcagagaaaua

SEQ ID NO: 176273 - RNA, 19 nt, Homo sapiens
  misc_RNA (1)...(19): siRNA sense strand
cagcuggguuggugaauua

SEQ ID NO: 176274 - RNA, 19 nt, Homo sapiens
  misc_RNA (1)...(19): siRNA sense strand
gaaggaagaagaugaauca

SEQ ID NO: 176275 - RNA, 19 nt, Homo sapiens
  misc_RNA (1)...(19): siRNA sense strand
gacaugaaauuguuccaaa

SEQ ID NO: 176276 - RNA, 19 nt, Homo sapiens
  misc_RNA (1)...(19): siRNA sense strand
gcgcaacucuacaugauug

SEQ ID NO: 176277 - RNA, 19 nt, Homo sapiens
  misc_RNA (1)...(19): siRNA sense strand
ggcagaugcucguucuuua

SEQ ID NO: 176278 - RNA, 19 nt, Homo sapiens
  misc_RNA (1)...(19): siRNA sense strand
cauaguacaugacgaaguu

SEQ ID NO: 176279 - RNA, 19 nt, Homo sapiens
  misc_RNA (1)...(19): siRNA sense strand
uaaggaaucucugaaggaa

SEQ ID NO: 176280 - RNA, 19 nt, Homo sapiens
  misc_RNA (1)...(19): siRNA sense strand
gaagaagguuccaacaaaa

SEQ ID NO: 176281 - RNA, 19 nt, Homo sapiens
  misc_RNA (1)...(19): siRNA sense strand
gcuacaacauuccacuaaa

SEQ ID NO: 176282 - RNA, 19 nt, Homo sapiens
  misc_RNA (1)...(19): siRNA sense strand
gaauggcaguagcagguuu

SEQ ID NO: 176283 - RNA, 19 nt, Homo sapiens
  misc_RNA (1)...(19): siRNA sense strand
caacuucagaucuaacuuu

SEQ ID NO: 176284 - RNA, 19 nt, Homo sapiens
  misc_RNA (1)...(19): siRNA sense strand
uggaagacaugaaauuguu

SEQ ID NO: 176285 - RNA, 19 nt, Homo sapiens
  misc_RNA (1)...(19): siRNA sense strand
agacauagcaagagaagaa

SEQ ID NO: 176286 - RNA, 19 nt, Homo sapiens
  misc_RNA (1)...(19): siRNA sense strand
gcaaagacggaaauagaga

SEQ ID NO: 176287 - RNA, 19 nt, Homo sapiens
  misc_RNA (1)...(19): siRNA sense strand
caaguugaauaugcuauga

SEQ ID NO: 176288 - RNA, 19 nt, Homo sapiens
  misc_RNA (1)...(19): siRNA sense strand
gccgugauaucguuaaaga

SEQ ID NO: 176289 - RNA, 19 nt, Homo sapiens
  misc_RNA (1)...(19): siRNA sense strand
gaucuaacuuuggcuacaa

SEQ ID NO: 176290 - RNA, 19 nt, Homo sapiens
  misc_RNA (1)...(19): siRNA sense strand
gaaaauaguaguacagcua

SEQ ID NO: 176291 - RNA, 19 nt, Homo sapiens
  misc_RNA (1)...(19): siRNA sense strand
uagcagacauagcaagaga

SEQ ID NO: 176292 - RNA, 19 nt, Homo sapiens
  misc_RNA (1)...(19): siRNA sense strand
uaacuuuggcuacaacauu

SEQ ID NO: 176293 - RNA, 19 nt, Homo sapiens
  misc_RNA (1)...(19): siRNA sense strand
ugacgaaguuaaggauaaa

SEQ ID NO: 176294 - RNA, 19 nt, Homo sapiens
  misc_RNA (1)...(19): siRNA sense strand
ggcaguagcagguuuguug

SEQ ID NO: 176295 - RNA, 19 nt, Homo sapiens
  misc_RNA (1)...(19): siRNA sense strand
agaagaagcagagaaauau

SEQ ID NO: 176296 - RNA, 19 nt, Homo sapiens
  misc_RNA (1)...(19): siRNA sense strand
gaaauagagaagcuucaga

SEQ ID NO: 176297 - RNA, 19 nt, Homo sapiens
  misc_RNA (1)...(19): siRNA sense strand
aggaaucucugaaggaaga

SEQ ID NO: 176298 - RNA, 19 nt, Homo sapiens
  misc_RNA (1)...(19): siRNA sense strand
gaccugccgugauaucguu

SEQ ID NO: 176299 - RNA, 19 nt, Homo sapiens
  misc_RNA (1)...(19): siRNA sense strand
cagacagaguggccaugua

SEQ ID NO: 176300 - RNA, 19 nt, Homo sapiens
  misc_RNA (1)...(19): siRNA sense strand
gcuuccaacuucagaucua

SEQ ID NO: 176301 - RNA, 19 nt, Homo sapiens
  misc_RNA (1)...(19): siRNA sense strand
caaagacggaaauagagaa

SEQ ID NO: 176302 - RNA, 19 nt, Homo sapiens
  misc_RNA (1)...(19): siRNA sense strand
gugcgcaacucuacaugau

SEQ ID NO: 176303 - RNA, 19 nt, Homo sapiens
  misc_RNA (1)...(19): siRNA sense strand
gcagaugcucguucuuuag

SEQ ID NO: 176304 - RNA, 19 nt, Homo sapiens
  misc_RNA (1)...(19): siRNA sense strand
gaagaagaugaaucagaug

SEQ ID NO: 176305 - RNA, 19 nt, Homo sapiens
  misc_RNA (1)...(19): siRNA sense strand
uaguacagcuauuggaauc

SEQ ID NO: 176306 - RNA, 19 nt, Homo sapiens
  misc_RNA (1)...(19): siRNA sense strand
uuacauaguacaugacgaa

SEQ ID NO: 176307 - RNA, 19 nt, Homo sapiens
  misc_RNA (1)...(19): siRNA sense strand
cugcaaagacggaaauaga

SEQ ID NO: 176308 - RNA, 19 nt, Homo sapiens
  misc_RNA (1)...(19): siRNA sense strand
agacagaguggccauguau

SEQ ID NO: 176309 - RNA, 19 nt, Homo sapiens
  misc_RNA (1)...(19): siRNA sense strand
aagagaagaagcagagaaa

SEQ ID NO: 176310 - RNA, 19 nt, Homo sapiens
  misc_RNA (1)...(19): siRNA sense strand
augacgaaguuaaggauaa

SEQ ID NO: 176311 - RNA, 19 nt, Homo sapiens
  misc_RNA (1)...(19): siRNA sense strand
auagagaagcuucagauga

SEQ ID NO: 176312 - RNA, 19 nt, Homo sapiens
  misc_RNA (1)...(19): siRNA sense strand
cuacaacauuccacuaaaa

SEQ ID NO: 176313 - RNA, 19 nt, Homo sapiens
  misc_RNA (1)...(19): siRNA sense strand
uaagagaagaagcagagaa

SEQ ID NO: 176314 - RNA, 19 nt, Homo sapiens
  misc_RNA (1)...(19): siRNA sense strand
gaaugacggugcgcaacuc

SEQ ID NO: 176315 - RNA, 19 nt, Homo sapiens
  misc_RNA (1)...(19): siRNA sense strand
gcaugcauauacacucuac

SEQ ID NO: 176316 - RNA, 19 nt, Homo sapiens
  misc_RNA (1)...(19): siRNA sense strand
gcagguuuguuggcagaug

SEQ ID NO: 176317 - RNA, 19 nt, Homo sapiens
  misc_RNA (1)...(19): siRNA sense strand
gcagacauagcaagagaag

SEQ ID NO: 176318 - RNA, 19 nt, Homo sapiens
  misc_RNA (1)...(19): siRNA sense strand
ggcuacaacauuccacuaa

SEQ ID NO: 176319 - RNA, 19 nt, Homo sapiens
  misc_RNA (1)...(19): siRNA sense strand
guacagcuauuggaaucag

SEQ ID NO: 176320 - RNA, 19 nt, Homo sapiens
  misc_RNA (1)...(19): siRNA sense strand
uaacuaauggaagacauga

SEQ ID NO: 176321 - RNA, 19 nt, Homo sapiens
  misc_RNA (1)...(19): siRNA sense strand
ucagcuggguuggugaauu

SEQ ID NO: 176322 - RNA, 19 nt, Homo sapiens
  misc_RNA (1)...(19): siRNA sense strand
gugcaugcauauacacucu

SEQ ID NO: 176323 - RNA, 19 nt, Homo sapiens
  misc_RNA (1)...(19): siRNA sense strand
ggaagacaugaaauuguuc

SEQ ID NO: 176324 - RNA, 19 nt, Homo sapiens
  misc_RNA (1)...(19): siRNA sense strand
aaauagagaagcuucagau

SEQ ID NO: 176325 - RNA, 19 nt, Homo sapiens
  misc_RNA (1)...(19): siRNA sense strand
gcagacagaguggccaugu

SEQ ID NO: 176326 - RNA, 19 nt, Homo sapiens
  misc_RNA (1)...(19): siRNA sense strand
aagaagaugaaucagauga

SEQ ID NO: 176327 - RNA, 19 nt, Homo sapiens
  misc_RNA (1)...(19): siRNA sense strand
augcaaagaugguguuguc

SEQ ID NO: 176328 - RNA, 19 nt, Homo sapiens
  misc_RNA (1)...(19): siRNA sense strand
acuaauggaagacaugaaa

SEQ ID NO: 176329 - RNA, 19 nt, Homo sapiens
  misc_RNA (1)...(19): siRNA sense strand
uggcagaugcucguucuuu

SEQ ID NO: 176330 - RNA, 19 nt, Homo sapiens
  misc_RNA (1)...(19): siRNA sense strand
gugauaucguuaaagaagu

SEQ ID NO: 176331 - RNA, 19 nt, Homo sapiens
  misc_RNA (1)...(19): siRNA sense strand
guaguacagcuauuggaau

SEQ ID NO: 176332 - RNA, 19 nt, Homo sapiens
  misc_RNA (1)...(19): siRNA sense strand
cgugauaucguuaaagaag

SEQ ID NO: 176333 - RNA, 19 nt, Homo sapiens
  misc_RNA (1)...(19): siRNA sense strand
ccugucagccucuacauuc

SEQ ID NO: 176334 - RNA, 19 nt, Homo sapiens
  misc_RNA (1)...(19): siRNA sense strand
uaauguugaucggcauguu

SEQ ID NO: 176335 - RNA, 19 nt, Homo sapiens
  misc_RNA (1)...(19): siRNA sense strand
agacggaaauagagaagcu

SEQ ID NO: 176336 - RNA, 19 nt, Homo sapiens
  misc_RNA (1)...(19): siRNA sense strand
cccaucagguguuucauac

SEQ ID NO: 176337 - RNA, 19 nt, Homo sapiens
  misc_RNA (1)...(19): siRNA sense strand
ggaauggcaguagcagguu

SEQ ID NO: 176338 - RNA, 19 nt, Homo sapiens
  misc_RNA (1)...(19): siRNA sense strand
ggaaauagagaagcuucag

SEQ ID NO: 176339 - RNA, 19 nt, Homo sapiens
  misc_RNA (1)...(19): siRNA sense strand
caugacgaaguuaaggaua

SEQ ID NO: 176340 - RNA, 19 nt, Homo sapiens
  misc_RNA (1)...(19): siRNA sense strand
agaaaugaccugccgugau

SEQ ID NO: 176341 - RNA, 19 nt, Homo sapiens
  misc_RNA (1)...(19): siRNA sense strand
ugaaggcuguggaaaauag

SEQ ID NO: 176342 - RNA, 19 nt, Homo sapiens
  misc_RNA (1)...(19): siRNA sense strand
cuuccaacuucagaucuaa

SEQ ID NO: 176343 - RNA, 19 nt, Homo sapiens
  misc_RNA (1)...(19): siRNA sense strand
acagaguggccauguaugu

SEQ ID NO: 176344 - RNA, 19 nt, Homo sapiens
  misc_RNA (1)...(19): siRNA sense strand
uaugaaggcuguggaaaau

SEQ ID NO: 176345 - RNA, 19 nt, Homo sapiens
  misc_RNA (1)...(19): siRNA sense strand
gcuaugaaggcuguggaaa

SEQ ID NO: 176346 - RNA, 19 nt, Homo sapiens
  misc_RNA (1)...(19): siRNA sense strand
aauggaagacaugaaauug

SEQ ID NO: 176347 - RNA, 19 nt, Homo sapiens
  misc_RNA (1)...(19): siRNA sense strand
aacuucagaucuaacuuug

SEQ ID NO: 176348 - RNA, 19 nt, Homo sapiens
  misc_RNA (1)...(19): siRNA sense strand
gcuauuggaaucagaugca

SEQ ID NO: 176349 - RNA, 19 nt, Homo sapiens
  misc_RNA (1)...(19): siRNA sense strand
aggaagaagaugaaucaga

SEQ ID NO: 176350 - RNA, 19 nt, Homo sapiens
  misc_RNA (1)...(19): siRNA sense strand
guuggcagaugcucguucu

SEQ ID NO: 176351 - RNA, 19 nt, Homo sapiens
  misc_RNA (1)...(19): siRNA sense strand
guacaugacgaaguuaagg

SEQ ID NO: 176352 - RNA, 19 nt, Homo sapiens
  misc_RNA (1)...(19): siRNA sense strand
ggugcgcaacucuacauga

SEQ ID NO: 176353 - RNA, 19 nt, Homo sapiens
  misc_RNA (1)...(19): siRNA sense strand
ugaucggcauguuggaaug

SEQ ID NO: 176354 - RNA, 19 nt, Homo sapiens
  misc_RNA (1)...(19): siRNA sense strand
aacuuuggcuacaacauuc

SEQ ID NO: 176355 - RNA, 19 nt, Homo sapiens
  misc_RNA (1)...(19): siRNA sense strand
ugacccaucagguguuuca

SEQ ID NO: 176356 - RNA, 19 nt, Homo sapiens
  misc_RNA (1)...(19): siRNA sense strand
ugaaggaagaagaugaauc

SEQ ID NO: 176357 - RNA, 19 nt, Homo sapiens
  misc_RNA (1)...(19): siRNA sense strand
gguguuucauacgguuauu

SEQ ID NO: 176358 - RNA, 19 nt, Homo sapiens
  misc_RNA (1)...(19): siRNA sense strand
gaaaugaccugccgugaua

SEQ ID NO: 176359 - RNA, 19 nt, Homo sapiens
  misc_RNA (1)...(19): siRNA sense strand
ggaagaagaugaaucagau

SEQ ID NO: 176360 - RNA, 19 nt, Homo sapiens
  misc_RNA (1)...(19): siRNA sense strand
ggaaucagaugcaaagaug

SEQ ID NO: 176361 - RNA, 19 nt, Homo sapiens
  misc_RNA (1)...(19): siRNA sense strand
ugaagaagguuccaacaaa

SEQ ID NO: 176362 - RNA, 19 nt, Homo sapiens
  misc_RNA (1)...(19): siRNA sense strand
gagaagaagcagagaaaua

SEQ ID NO: 176363 - RNA, 19 nt, Homo sapiens
  misc_RNA (1)...(19): siRNA sense strand
cagcuggguuggugaauua

SEQ ID NO: 176364 - RNA, 19 nt, Homo sapiens
  misc_RNA (1)...(19): siRNA sense strand
gaaggaagaagaugaauca

SEQ ID NO: 176365 - RNA, 19 nt, Homo sapiens
  misc_RNA (1)...(19): siRNA sense strand
gacaugaaauuguuccaaa

SEQ ID NO: 176366 - RNA, 19 nt, Homo sapiens
  misc_RNA (1)...(19): siRNA sense strand
gcgcaacucuacaugauug

SEQ ID NO: 176367 - RNA, 19 nt, Homo sapiens
  misc_RNA (1)...(19): siRNA sense strand
ggcagaugcucguucuuua

SEQ ID NO: 176368 - RNA, 19 nt, Homo sapiens
  misc_RNA (1)...(19): siRNA sense strand
cauaguacaugacgaaguu

SEQ ID NO: 176369 - RNA, 19 nt, Homo sapiens
  misc_RNA (1)...(19): siRNA sense strand
uaaggaaucucugaaggaa

SEQ ID NO: 176370 - RNA, 19 nt, Homo sapiens
  misc_RNA (1)...(19): siRNA sense strand
gaagaagguuccaacaaaa

SEQ ID NO: 176371 - RNA, 19 nt, Homo sapiens
  misc_RNA (1)...(19): siRNA sense strand
gcuacaacauuccacuaaa

SEQ ID NO: 176372 - RNA, 19 nt, Homo sapiens
  misc_RNA (1)...(19): siRNA sense strand
gaauggcaguagcagguuu

SEQ ID NO: 176373 - RNA, 19 nt, Homo sapiens
  misc_RNA (1)...(19): siRNA sense strand
caacuucagaucuaacuuu

SEQ ID NO: 176374 - RNA, 19 nt, Homo sapiens
  misc_RNA (1)...(19): siRNA sense strand
uggaagacaugaaauuguu

SEQ ID NO: 176375 - RNA, 19 nt, Homo sapiens
  misc_RNA (1)...(19): siRNA sense strand
agacauagcaagagaagaa

SEQ ID NO: 176376 - RNA, 19 nt, Homo sapiens
  misc_RNA (1)...(19): siRNA sense strand
gcaaagacggaaauagaga

SEQ ID NO: 176377 - RNA, 19 nt, Homo sapiens
  misc_RNA (1)...(19): siRNA sense strand
caaguugaauaugcuauga

SEQ ID NO: 176378 - RNA, 19 nt, Homo sapiens
  misc_RNA (1)...(19): siRNA sense strand
gccgugauaucguuaaaga

SEQ ID NO: 176379 - RNA, 19 nt, Homo sapiens
  misc_RNA (1)...(19): siRNA sense strand
gaucuaacuuuggcuacaa

SEQ ID NO: 176380 - RNA, 19 nt, Homo sapiens
  misc_RNA (1)...(19): siRNA sense strand
gaaaauaguaguacagcua

SEQ ID NO: 176381 - RNA, 19 nt, Homo sapiens
  misc_RNA (1)...(19): siRNA sense strand
uagcagacauagcaagaga

SEQ ID NO: 176382 - RNA, 19 nt, Homo sapiens
  misc_RNA (1)...(19): siRNA sense strand
uaacuuuggcuacaacauu

SEQ ID NO: 176383 - RNA, 19 nt, Homo sapiens
  misc_RNA (1)...(19): siRNA sense strand
ugacgaaguuaaggauaaa

SEQ ID NO: 176384 - RNA, 19 nt, Homo sapiens
  misc_RNA (1)...(19): siRNA sense strand
ggcaguagcagguuuguug

SEQ ID NO: 176385 - RNA, 19 nt, Homo sapiens
  misc_RNA (1)...(19): siRNA sense strand
agaagaagcagagaaauau

SEQ ID NO: 176386 - RNA, 19 nt, Homo sapiens
  misc_RNA (1)...(19): siRNA sense strand
gaaauagagaagcuucaga

SEQ ID NO: 176387 - RNA, 19 nt, Homo sapiens
  misc_RNA (1)...(19): siRNA sense strand
aggaaucucugaaggaaga

SEQ ID NO: 176388 - RNA, 19 nt, Homo sapiens
  misc_RNA (1)...(19): siRNA sense strand
gaccugccgugauaucguu

SEQ ID NO: 176389 - RNA, 19 nt, Homo sapiens
  misc_RNA (1)...(19): siRNA sense strand
cagacagaguggccaugua

SEQ ID NO: 176390 - RNA, 19 nt, Homo sapiens
  misc_RNA (1)...(19): siRNA sense strand
gcuuccaacuucagaucua

SEQ ID NO: 176391 - RNA, 19 nt, Homo sapiens
  misc_RNA (1)...(19): siRNA sense strand
caaagacggaaauagagaa

SEQ ID NO: 176392 - RNA, 19 nt, Homo sapiens
  misc_RNA (1)...(19): siRNA sense strand
gugcgcaacucuacaugau

SEQ ID NO: 176393 - RNA, 19 nt, Homo sapiens
  misc_RNA (1)...(19): siRNA sense strand
gcagaugcucguucuuuag

SEQ ID NO: 176394 - RNA, 19 nt, Homo sapiens
  misc_RNA (1)...(19): siRNA sense strand
gaagaagaugaaucagaug

SEQ ID NO: 176395 - RNA, 19 nt, Homo sapiens
  misc_RNA (1)...(19): siRNA sense strand
uaguacagcuauuggaauc

SEQ ID NO: 176396 - RNA, 19 nt, Homo sapiens
  misc_RNA (1)...(19): siRNA sense strand
uuacauaguacaugacgaa

SEQ ID NO: 176397 - RNA, 19 nt, Homo sapiens
  misc_RNA (1)...(19): siRNA sense strand
cugcaaagacggaaauaga

SEQ ID NO: 176398 - RNA, 19 nt, Homo sapiens
  misc_RNA (1)...(19): siRNA sense strand
agacagaguggccauguau

SEQ ID NO: 176399 - RNA, 19 nt, Homo sapiens
  misc_RNA (1)...(19): siRNA sense strand
aagagaagaagcagagaaa

SEQ ID NO: 176400 - RNA, 19 nt, Homo sapiens
  misc_RNA (1)...(19): siRNA sense strand
augacgaaguuaaggauaa

SEQ ID NO: 176401 - RNA, 19 nt, Homo sapiens
  misc_RNA (1)...(19): siRNA sense strand
auagagaagcuucagauga

SEQ ID NO: 176402 - RNA, 19 nt, Homo sapiens
  misc_RNA (1)...(19): siRNA sense strand
cuacaacauuccacuaaaa

SEQ ID NO: 176403 - RNA, 19 nt, Homo sapiens
  misc_RNA (1)...(19): siRNA sense strand
uaagagaagaagcagagaa

SEQ ID NO: 176404 - RNA, 19 nt, Homo sapiens
  misc_RNA (1)...(19): siRNA sense strand
gaaugacggugcgcaacuc

SEQ ID NO: 176405 - RNA, 19 nt, Homo sapiens
  misc_RNA (1)...(19): siRNA sense strand
gcaugcauauacacucuac

SEQ ID NO: 176406 - RNA, 19 nt, Homo sapiens
  misc_RNA (1)...(19): siRNA sense strand
gcagguuuguuggcagaug

SEQ ID NO: 176407 - RNA, 19 nt, Homo sapiens
  misc_RNA (1)...(19): siRNA sense strand
gcagacauagcaagagaag

SEQ ID NO: 176408 - RNA, 19 nt, Homo sapiens
  misc_RNA (1)...(19): siRNA sense strand
ggcuacaacauuccacuaa

SEQ ID NO: 176409 - RNA, 19 nt, Homo sapiens
  misc_RNA (1)...(19): siRNA sense strand
guacagcuauuggaaucag

SEQ ID NO: 176410 - RNA, 19 nt, Homo sapiens
  misc_RNA (1)...(19): siRNA sense strand
uaacuaauggaagacauga

SEQ ID NO: 176411 - RNA, 19 nt, Homo sapiens
  misc_RNA (1)...(19): siRNA sense strand
ucagcuggguuggugaauu

SEQ ID NO: 176412 - RNA, 19 nt, Homo sapiens
  misc_RNA (1)...(19): siRNA sense strand
gugcaugcauauacacucu

SEQ ID NO: 176413 - RNA, 19 nt, Homo sapiens
  misc_RNA (1)...(19): siRNA sense strand
ggaagacaugaaauuguuc

SEQ ID NO: 176414 - RNA, 19 nt, Homo sapiens
  misc_RNA (1)...(19): siRNA sense strand
aaauagagaagcuucagau

SEQ ID NO: 176415 - RNA, 19 nt, Homo sapiens
  misc_RNA (1)...(19): siRNA sense strand
gcagacagaguggccaugu

SEQ ID NO: 176416 - RNA, 19 nt, Homo sapiens
  misc_RNA (1)...(19): siRNA sense strand
aagaagaugaaucagauga

SEQ ID NO: 176417 - RNA, 19 nt, Homo sapiens
  misc_RNA (1)...(19): siRNA sense strand
augcaaagaugguguuguc

SEQ ID NO: 176418 - RNA, 19 nt, Homo sapiens
  misc_RNA (1)...(19): siRNA sense strand
acuaauggaagacaugaaa

SEQ ID NO: 176419 - RNA, 19 nt, Homo sapiens
  misc_RNA (1)...(19): siRNA sense strand
uggcagaugcucguucuuu

SEQ ID NO: 176420 - RNA, 19 nt, Homo sapiens
  misc_RNA (1)...(19): siRNA sense strand
gugauaucguuaaagaagu

SEQ ID NO: 176421 - RNA, 19 nt, Homo sapiens
  misc_RNA (1)...(19): siRNA sense strand
guaguacagcuauuggaau

SEQ ID NO: 176422 - RNA, 19 nt, Homo sapiens
  misc_RNA (1)...(19): siRNA sense strand
cgugauaucguuaaagaag

SEQ ID NO: 176423 - RNA, 19 nt, Homo sapiens
  misc_RNA (1)...(19): siRNA sense strand
ccugucagccucuacauuc

SEQ ID NO: 176424 - RNA, 19 nt, Homo sapiens
  misc_RNA (1)...(19): siRNA sense strand
uaauguugaucggcauguu

SEQ ID NO: 176425 - RNA, 19 nt, Homo sapiens
  misc_RNA (1)...(19): siRNA sense strand
agacggaaauagagaagcu

SEQ ID NO: 176426 - RNA, 19 nt, Homo sapiens
  misc_RNA (1)...(19): siRNA sense strand
cccaucagguguuucauac

SEQ ID NO: 176427 - RNA, 19 nt, Homo sapiens
  misc_RNA (1)...(19): siRNA sense strand
ggaauggcaguagcagguu

SEQ ID NO: 176428 - RNA, 19 nt, Homo sapiens
  misc_RNA (1)...(19): siRNA sense strand
ggaaauagagaagcuucag

SEQ ID NO: 176429 - RNA, 19 nt, Homo sapiens
  misc_RNA (1)...(19): siRNA sense strand
caugacgaaguuaaggaua

SEQ ID NO: 176430 - RNA, 19 nt, Homo sapiens
  misc_RNA (1)...(19): siRNA sense strand
agaaaugaccugccgugau

SEQ ID NO: 176431 - RNA, 19 nt, Homo sapiens
  misc_RNA (1)...(19): siRNA sense strand
ugaaggcuguggaaaauag

SEQ ID NO: 176432 - RNA, 19 nt, Homo sapiens
  misc_RNA (1)...(19): siRNA sense strand
cuuccaacuucagaucuaa

SEQ ID NO: 176433 - RNA, 19 nt, Homo sapiens
  misc_RNA (1)...(19): siRNA sense strand
acagaguggccauguaugu

SEQ ID NO: 176434 - RNA, 19 nt, Homo sapiens
  misc_RNA (1)...(19): siRNA sense strand
uaugaaggcuguggaaaau

SEQ ID NO: 176435 - RNA, 19 nt, Homo sapiens
  misc_RNA (1)...(19): siRNA sense strand
gcuaugaaggcuguggaaa

SEQ ID NO: 176436 - RNA, 19 nt, Homo sapiens
  misc_RNA (1)...(19): siRNA sense strand
aauggaagacaugaaauug

SEQ ID NO: 176437 - RNA, 19 nt, Homo sapiens
  misc_RNA (1)...(19): siRNA sense strand
aacuucagaucuaacuuug

SEQ ID NO: 176438 - RNA, 19 nt, Homo sapiens
  misc_RNA (1)...(19): siRNA sense strand
gcuauuggaaucagaugca

SEQ ID NO: 176439 - RNA, 19 nt, Homo sapiens
  misc_RNA (1)...(19): siRNA sense strand
aggaagaagaugaaucaga

SEQ ID NO: 176440 - RNA, 19 nt, Homo sapiens
  misc_RNA (1)...(19): siRNA sense strand
guuggcagaugcucguucu

SEQ ID NO: 176441 - RNA, 19 nt, Homo sapiens
  misc_RNA (1)...(19): siRNA sense strand
guacaugacgaaguuaagg

SEQ ID NO: 176442 - RNA, 19 nt, Homo sapiens
  misc_RNA (1)...(19): siRNA sense strand
ggugcgcaacucuacauga

SEQ ID NO: 176443 - RNA, 19 nt, Homo sapiens
  misc_RNA (1)...(19): siRNA sense strand
ugaucggcauguuggaaug

SEQ ID NO: 176444 - RNA, 19 nt, Homo sapiens
  misc_RNA (1)...(19): siRNA sense strand
aacuuuggcuacaacauuc

SEQ ID NO: 176445 - RNA, 19 nt, Homo sapiens
  misc_RNA (1)...(19): siRNA sense strand
ugacccaucagguguuuca

SEQ ID NO: 176446 - RNA, 19 nt, Homo sapiens
  misc_RNA (1)...(19): siRNA sense strand
ugaaggaagaagaugaauc

SEQ ID NO: 176447 - RNA, 19 nt, Homo sapiens
  misc_RNA (1)...(19): siRNA sense strand
gguguuucauacgguuauu

SEQ ID NO: 176448 - RNA, 19 nt, Homo sapiens
  misc_RNA (1)...(19): siRNA sense strand
caaaggaguuacauucuua

SEQ ID NO: 176449 - RNA, 19 nt, Homo sapiens
  misc_RNA (1)...(19): siRNA sense strand
gaucgaaggugccaaauuc

SEQ ID NO: 176450 - RNA, 19 nt, Homo sapiens
  misc_RNA (1)...(19): siRNA sense strand
gcacaauacuggccacaaa

SEQ ID NO: 176451 - RNA, 19 nt, Homo sapiens
  misc_RNA (1)...(19): siRNA sense strand
gaucuuacauuuccacuau

SEQ ID NO: 176452 - RNA, 19 nt, Homo sapiens
  misc_RNA (1)...(19): siRNA sense strand
ggauuaaacuacaucaaga

SEQ ID NO: 176453 - RNA, 19 nt, Homo sapiens
  misc_RNA (1)...(19): siRNA sense strand
uaacauugaucucugaaga

SEQ ID NO: 176454 - RNA, 19 nt, Homo sapiens
  misc_RNA (1)...(19): siRNA sense strand
cugaagauaucaagucaua

SEQ ID NO: 176455 - RNA, 19 nt, Homo sapiens
  misc_RNA (1)...(19): siRNA sense strand
ccaagaaacucgagagauc

SEQ ID NO: 176456 - RNA, 19 nt, Homo sapiens
  misc_RNA (1)...(19): siRNA sense strand
ucaagacacugaaguuaga

SEQ ID NO: 176457 - RNA, 19 nt, Homo sapiens
  misc_RNA (1)...(19): siRNA sense strand
ggagaaagguucguuaaaa

SEQ ID NO: 176458 - RNA, 19 nt, Homo sapiens
  misc_RNA (1)...(19): siRNA sense strand
gaagagacccaggaggaua

SEQ ID NO: 176459 - RNA, 19 nt, Homo sapiens
  misc_RNA (1)...(19): siRNA sense strand
ucaagaaagugcuguuaga

SEQ ID NO: 176460 - RNA, 19 nt, Homo sapiens
  misc_RNA (1)...(19): siRNA sense strand
agaaagugcuguuagaaau

SEQ ID NO: 176461 - RNA, 19 nt, Homo sapiens
  misc_RNA (1)...(19): siRNA sense strand
ccaaaggaguuacauucuu

SEQ ID NO: 176462 - RNA, 19 nt, Homo sapiens
  misc_RNA (1)...(19): siRNA sense strand
uaacacaugcggucacuuu

SEQ ID NO: 176463 - RNA, 19 nt, Homo sapiens
  misc_RNA (1)...(19): siRNA sense strand
gccagugacuucccaugua

SEQ ID NO: 176464 - RNA, 19 nt, Homo sapiens
  misc_RNA (1)...(19): siRNA sense strand
gaagaagcccaaaggaguu

SEQ ID NO: 176465 - RNA, 19 nt, Homo sapiens
  misc_RNA (1)...(19): siRNA sense strand
uggccaagcuuccuaagaa

SEQ ID NO: 176466 - RNA, 19 nt, Homo sapiens
  misc_RNA (1)...(19): siRNA sense strand
cucgagagaucuuacauuu

SEQ ID NO: 176467 - RNA, 19 nt, Homo sapiens
  misc_RNA (1)...(19): siRNA sense strand
gaaagugcuguuagaaaug

SEQ ID NO: 176468 - RNA, 19 nt, Homo sapiens
  misc_RNA (1)...(19): siRNA sense strand
cgagagaucuuacauuucc

SEQ ID NO: 176469 - RNA, 19 nt, Homo sapiens
  misc_RNA (1)...(19): siRNA sense strand
aaagugcuguuagaaauga

SEQ ID NO: 176470 - RNA, 19 nt, Homo sapiens
  misc_RNA (1)...(19): siRNA sense strand
ucaccagccucauucuuga

SEQ ID NO: 176471 - RNA, 19 nt, Homo sapiens
  misc_RNA (1)...(19): siRNA sense strand
gagaaagguucguuaaaau

SEQ ID NO: 176472 - RNA, 19 nt, Homo sapiens
  misc_RNA (1)...(19): siRNA sense strand
ccacauggccugacuuugg

SEQ ID NO: 176473 - RNA, 19 nt, Homo sapiens
  misc_RNA (1)...(19): siRNA sense strand
gauaaagacugccccauca

SEQ ID NO: 176474 - RNA, 19 nt, Homo sapiens
  misc_RNA (1)...(19): siRNA sense strand
gauggagaaagguucguua

SEQ ID NO: 176475 - RNA, 19 nt, Homo sapiens
  misc_RNA (1)...(19): siRNA sense strand
gaaagcaugagucaagaca

SEQ ID NO: 176476 - RNA, 19 nt, Homo sapiens
  misc_RNA (1)...(19): siRNA sense strand
gaaggugccaaauucauca

SEQ ID NO: 176477 - RNA, 19 nt, Homo sapiens
  misc_RNA (1)...(19): siRNA sense strand
caagaaagugcuguuagaa

SEQ ID NO: 176478 - RNA, 19 nt, Homo sapiens
  misc_RNA (1)...(19): siRNA sense strand
ggaaaugcagggaguucuu

SEQ ID NO: 176479 - RNA, 19 nt, Homo sapiens
  misc_RNA (1)...(19): siRNA sense strand
ucaacagagugauggagaa

SEQ ID NO: 176480 - RNA, 19 nt, Homo sapiens
  misc_RNA (1)...(19): siRNA sense strand
ccagugacuucccauguag

SEQ ID NO: 176481 - RNA, 19 nt, Homo sapiens
  misc_RNA (1)...(19): siRNA sense strand
gaccauagucggauuaaac

SEQ ID NO: 176482 - RNA, 19 nt, Homo sapiens
  misc_RNA (1)...(19): siRNA sense strand
gcccaaaggaguuacauuc

SEQ ID NO: 176483 - RNA, 19 nt, Homo sapiens
  misc_RNA (1)...(19): siRNA sense strand
caacagagugauggagaaa

SEQ ID NO: 176484 - RNA, 19 nt, Homo sapiens
  misc_RNA (1)...(19): siRNA sense strand
cuaccuggcugugaucgaa

SEQ ID NO: 176485 - RNA, 19 nt, Homo sapiens
  misc_RNA (1)...(19): siRNA sense strand
cacauggccugacuuugga

SEQ ID NO: 176486 - RNA, 19 nt, Homo sapiens
  misc_RNA (1)...(19): siRNA sense strand
gaaaugcagggaguucuuc

SEQ ID NO: 176487 - RNA, 19 nt, Homo sapiens
  misc_RNA (1)...(19): siRNA sense strand
caggauauccgacaugaag

SEQ ID NO: 176488 - RNA, 19 nt, Homo sapiens
  misc_RNA (1)...(19): siRNA sense strand
aagaaagugcuguuagaaa

SEQ ID NO: 176489 - RNA, 19 nt, Homo sapiens
  misc_RNA (1)...(19): siRNA sense strand
uaucaagaaagugcuguua

SEQ ID NO: 176490 - RNA, 19 nt, Homo sapiens
  misc_RNA (1)...(19): siRNA sense strand
gcgcuuaccucugcuacag

SEQ ID NO: 176491 - RNA, 19 nt, Homo sapiens
  misc_RNA (1)...(19): siRNA sense strand
caagcuuccuaagaacaaa

SEQ ID NO: 176492 - RNA, 19 nt, Homo sapiens
  misc_RNA (1)...(19): siRNA sense strand
gcaugagucaagacacuga

SEQ ID NO: 176493 - RNA, 19 nt, Homo sapiens
  misc_RNA (1)...(19): siRNA sense strand
aaaccgaaauagguacaga

SEQ ID NO: 176494 - RNA, 19 nt, Homo sapiens
  misc_RNA (1)...(19): siRNA sense strand
ggaagagacccaggaggau

SEQ ID NO: 176495 - RNA, 19 nt, Homo sapiens
  misc_RNA (1)...(19): siRNA sense strand
uguuagaaaugaggaaguu

SEQ ID NO: 176496 - RNA, 19 nt, Homo sapiens
  misc_RNA (1)...(19): siRNA sense strand
cgaggaccaugcacugagu

SEQ ID NO: 176497 - RNA, 19 nt, Homo sapiens
  misc_RNA (1)...(19): siRNA sense strand
gaaggacgaggaccaugca

SEQ ID NO: 176498 - RNA, 19 nt, Homo sapiens
  misc_RNA (1)...(19): siRNA sense strand
agucaagacacugaaguua

SEQ ID NO: 176499 - RNA, 19 nt, Homo sapiens
  misc_RNA (1)...(19): siRNA sense strand
gagucaagacacugaaguu

SEQ ID NO: 176500 - RNA, 19 nt, Homo sapiens
  misc_RNA (1)...(19): siRNA sense strand
cgacagcuagaauuggaaa

SEQ ID NO: 176501 - RNA, 19 nt, Homo sapiens
  misc_RNA (1)...(19): siRNA sense strand
acagagugauggagaaagg

SEQ ID NO: 176502 - RNA, 19 nt, Homo sapiens
  misc_RNA (1)...(19): siRNA sense strand
aagagacccaggaggauaa

SEQ ID NO: 176503 - RNA, 19 nt, Homo sapiens
  misc_RNA (1)...(19): siRNA sense strand
gcccuuugccuaacacaug

SEQ ID NO: 176504 - RNA, 19 nt, Homo sapiens
  misc_RNA (1)...(19): siRNA sense strand
ucgaaagcaugagucaaga

SEQ ID NO: 176505 - RNA, 19 nt, Homo sapiens
  misc_RNA (1)...(19): siRNA sense strand
cagccucauucuugaacuu

SEQ ID NO: 176506 - RNA, 19 nt, Homo sapiens
  misc_RNA (1)...(19): siRNA sense strand
ccaagcuuccuaagaacaa

SEQ ID NO: 176507 - RNA, 19 nt, Homo sapiens
  misc_RNA (1)...(19): siRNA sense strand
cgaaggugccaaauucauc

SEQ ID NO: 176508 - RNA, 19 nt, Homo sapiens
  misc_RNA (1)...(19): siRNA sense strand
aagaagcccaaaggaguua

SEQ ID NO: 176509 - RNA, 19 nt, Homo sapiens
  misc_RNA (1)...(19): siRNA sense strand
gaaacucgagagaucuuac

SEQ ID NO: 176510 - RNA, 19 nt, Homo sapiens
  misc_RNA (1)...(19): siRNA sense strand
uggagaaagguucguuaaa

SEQ ID NO: 176511 - RNA, 19 nt, Homo sapiens
  misc_RNA (1)...(19): siRNA sense strand
cggauuaaacuacaucaag

SEQ ID NO: 176512 - RNA, 19 nt, Homo sapiens
  misc_RNA (1)...(19): siRNA sense strand
ugaccauagucggauuaaa

SEQ ID NO: 176513 - RNA, 19 nt, Homo sapiens
  misc_RNA (1)...(19): siRNA sense strand
aagcaugagucaagacacu

SEQ ID NO: 176514 - RNA, 19 nt, Homo sapiens
  misc_RNA (1)...(19): siRNA sense strand
gcaucgaaagcaugaguca

SEQ ID NO: 176515 - RNA, 19 nt, Homo sapiens
  misc_RNA (1)...(19): siRNA sense strand
ugcgacagcuagaauugga

SEQ ID NO: 176516 - RNA, 19 nt, Homo sapiens
  misc_RNA (1)...(19): siRNA sense strand
aaaaggaguucgagcagau

SEQ ID NO: 176517 - RNA, 19 nt, Homo sapiens
  misc_RNA (1)...(19): siRNA sense strand
gucaagacacugaaguuag

SEQ ID NO: 176518 - RNA, 19 nt, Homo sapiens
  misc_RNA (1)...(19): siRNA sense strand
gcggccauuuaccaggaua

SEQ ID NO: 176519 - RNA, 19 nt, Homo sapiens
  misc_RNA (1)...(19): siRNA sense strand
caagaaacucgagagaucu

SEQ ID NO: 176520 - RNA, 19 nt, Homo sapiens
  misc_RNA (1)...(19): siRNA sense strand
gacccuucuuccguugaua

SEQ ID NO: 176521 - RNA, 19 nt, Homo sapiens
  misc_RNA (1)...(19): siRNA sense strand
cugaaucaccagccucauu

SEQ ID NO: 176522 - RNA, 19 nt, Homo sapiens
  misc_RNA (1)...(19): siRNA sense strand
uaccacauggccugacuuu

SEQ ID NO: 176523 - RNA, 19 nt, Homo sapiens
  misc_RNA (1)...(19): siRNA sense strand
ucuccuaccuggcugugau

SEQ ID NO: 176524 - RNA, 19 nt, Homo sapiens
  misc_RNA (1)...(19): siRNA sense strand
accagugggugaaggaaga

SEQ ID NO: 176525 - RNA, 19 nt, Homo sapiens
  misc_RNA (1)...(19): siRNA sense strand
ggccaagcuuccuaagaac

SEQ ID NO: 176526 - RNA, 19 nt, Homo sapiens
  misc_RNA (1)...(19): siRNA sense strand
ggagccacacaaugggaaa

SEQ ID NO: 176527 - RNA, 19 nt, Homo sapiens
  misc_RNA (1)...(19): siRNA sense strand
cuauaucaacgcuaguuug

SEQ ID NO: 176528 - RNA, 19 nt, Homo sapiens
  misc_RNA (1)...(19): siRNA sense strand
cagagacgucagucccuuu

SEQ ID NO: 176529 - RNA, 19 nt, Homo sapiens
  misc_RNA (1)...(19): siRNA sense strand
guucaacagcaacacauag

SEQ ID NO: 176530 - RNA, 19 nt, Homo sapiens
  misc_RNA (1)...(19): siRNA sense strand
gacgaggaccaugcacuga

SEQ ID NO: 176531 - RNA, 19 nt, Homo sapiens
  misc_RNA (1)...(19): siRNA sense strand
gacaugaagccagugacuu

SEQ ID NO: 176532 - RNA, 19 nt, Homo sapiens
  misc_RNA (1)...(19): siRNA sense strand
agacccaggaggauaaaga

SEQ ID NO: 176533 - RNA, 19 nt, Homo sapiens
  misc_RNA (1)...(19): siRNA sense strand
gaucaguggaaggagcuuu

SEQ ID NO: 176534 - RNA, 19 nt, Homo sapiens
  misc_RNA (1)...(19): siRNA sense strand
acucuuccgugcaggauca

SEQ ID NO: 176535 - RNA, 19 nt, Homo sapiens
  misc_RNA (1)...(19): siRNA sense strand
caacgcuaguuugauaaaa

SEQ ID NO: 176536 - RNA, 19 nt, Homo sapiens
  misc_RNA (1)...(19): siRNA sense strand
gaccaugcacugaguuacu

SEQ ID NO: 176537 - RNA, 19 nt, Homo sapiens
  misc_RNA (1)...(19): siRNA sense strand
gaguggccaagcuuccuaa

SEQ ID NO: 176538 - RNA, 19 nt, Homo sapiens
  misc_RNA (1)...(19): siRNA sense strand
gcugauggacaagaggaaa

SEQ ID NO: 176539 - RNA, 19 nt, Homo sapiens
  misc_RNA (1)...(19): siRNA sense strand
gaaagaagcagagaaauua

SEQ ID NO: 176540 - RNA, 19 nt, Homo sapiens
  misc_RNA (1)...(19): siRNA sense strand
gaacaucacgggcaauuaa

SEQ ID NO: 176541 - RNA, 19 nt, Homo sapiens
  misc_RNA (1)...(19): siRNA sense strand
gaacacuggugauuacuau

SEQ ID NO: 176542 - RNA, 19 nt, Homo sapiens
  misc_RNA (1)...(19): siRNA sense strand
gcagagaaauuauuaacug

SEQ ID NO: 176543 - RNA, 19 nt, Homo sapiens
  misc_RNA (1)...(19): siRNA sense strand
gaaaccaagugcaacaauu

SEQ ID NO: 176544 - RNA, 19 nt, Homo sapiens
  misc_RNA (1)...(19): siRNA sense strand
ggaaagaagcagagaaauu

SEQ ID NO: 176545 - RNA, 19 nt, Homo sapiens
  misc_RNA (1)...(19): siRNA sense strand
gaagcacaguaccgauuua

SEQ ID NO: 176546 - RNA, 19 nt, Homo sapiens
  misc_RNA (1)...(19): siRNA sense strand
ggagaaauuugccacuuug

SEQ ID NO: 176547 - RNA, 19 nt, Homo sapiens
  misc_RNA (1)...(19): siRNA sense strand
gagcuuaaauauccucuga

SEQ ID NO: 176548 - RNA, 19 nt, Homo sapiens
  misc_RNA (1)...(19): siRNA sense strand
ugacagaucuuguggaaca

SEQ ID NO: 176549 - RNA, 19 nt, Homo sapiens
  misc_RNA (1)...(19): siRNA sense strand
gcucaugacuauacgcuaa

SEQ ID NO: 176550 - RNA, 19 nt, Homo sapiens
  misc_RNA (1)...(19): siRNA sense strand
ggagaugguuucacccaaa

SEQ ID NO: 176551 - RNA, 19 nt, Homo sapiens
  misc_RNA (1)...(19): siRNA sense strand
caacaggagugcaaacuuc

SEQ ID NO: 176552 - RNA, 19 nt, Homo sapiens
  misc_RNA (1)...(19): siRNA sense strand
gaccacagauaaagucaaa

SEQ ID NO: 176553 - RNA, 19 nt, Homo sapiens
  misc_RNA (1)...(19): siRNA sense strand
caucaugccugaauuugaa

SEQ ID NO: 176554 - RNA, 19 nt, Homo sapiens
  misc_RNA (1)...(19): siRNA sense strand
gggagaaauuugccacuuu

SEQ ID NO: 176555 - RNA, 19 nt, Homo sapiens
  misc_RNA (1)...(19): siRNA sense strand
gggcacgaauauacaaaua

SEQ ID NO: 176556 - RNA, 19 nt, Homo sapiens
  misc_RNA (1)...(19): siRNA sense strand
guaaaugugucaaauacug

SEQ ID NO: 176557 - RNA, 19 nt, Homo sapiens
  misc_RNA (1)...(19): siRNA sense strand
ggacguucauugugauuga

SEQ ID NO: 176558 - RNA, 19 nt, Homo sapiens
  misc_RNA (1)...(19): siRNA sense strand
gcaaugacggcaagucuaa

SEQ ID NO: 176559 - RNA, 19 nt, Homo sapiens
  misc_RNA (1)...(19): siRNA sense strand
ccaaugagccuguuucaga

SEQ ID NO: 176560 - RNA, 19 nt, Homo sapiens
  misc_RNA (1)...(19): siRNA sense strand
ggaagaauuugagacacua

SEQ ID NO: 176561 - RNA, 19 nt, Homo sapiens
  misc_RNA (1)...(19): siRNA sense strand
ggaaagggcacgaauauac

SEQ ID NO: 176562 - RNA, 19 nt, Homo sapiens
  misc_RNA (1)...(19): siRNA sense strand
cagauuacaucaaugcaaa

SEQ ID NO: 176563 - RNA, 19 nt, Homo sapiens
  misc_RNA (1)...(19): siRNA sense strand
gaguaaaugugucaaauac

SEQ ID NO: 176564 - RNA, 19 nt, Homo sapiens
  misc_RNA (1)...(19): siRNA sense strand
ggacaucucucugggaaag

SEQ ID NO: 176565 - RNA, 19 nt, Homo sapiens
  misc_RNA (1)...(19): siRNA sense strand
gagaugucauugagcuuaa

SEQ ID NO: 176566 - RNA, 19 nt, Homo sapiens
  misc_RNA (1)...(19): siRNA sense strand
gaggaaagggcacgaauau

SEQ ID NO: 176567 - RNA, 19 nt, Homo sapiens
  misc_RNA (1)...(19): siRNA sense strand
ggacagggacguucauugu

SEQ ID NO: 176568 - RNA, 19 nt, Homo sapiens
  misc_RNA (1)...(19): siRNA sense strand
ggagaugucauugagcuua

SEQ ID NO: 176569 - RNA, 19 nt, Homo sapiens
  misc_RNA (1)...(19): siRNA sense strand
uggaggaggugcaccauaa

SEQ ID NO: 176570 - RNA, 19 nt, Homo sapiens
  misc_RNA (1)...(19): siRNA sense strand
gaagaauccuaugguggaa

SEQ ID NO: 176571 - RNA, 19 nt, Homo sapiens
  misc_RNA (1)...(19): siRNA sense strand
cugaguugguccaguauua

SEQ ID NO: 176572 - RNA, 19 nt, Homo sapiens
  misc_RNA (1)...(19): siRNA sense strand
gaaauagaaagcagaguuc

SEQ ID NO: 176573 - RNA, 19 nt, Homo sapiens
  misc_RNA (1)...(19): siRNA sense strand
ggaaacauuggguacagua

SEQ ID NO: 176574 - RNA, 19 nt, Homo sapiens
  misc_RNA (1)...(19): siRNA sense strand
uagcugagaccacagauaa

SEQ ID NO: 176575 - RNA, 19 nt, Homo sapiens
  misc_RNA (1)...(19): siRNA sense strand
gcacaguaccgauuuaucu

SEQ ID NO: 176576 - RNA, 19 nt, Homo sapiens
  misc_RNA (1)...(19): siRNA sense strand
ggaaagaguaaauguguca

SEQ ID NO: 176577 - RNA, 19 nt, Homo sapiens
  misc_RNA (1)...(19): siRNA sense strand
gaggaaagaguaaaugugu

SEQ ID NO: 176578 - RNA, 19 nt, Homo sapiens
  misc_RNA (1)...(19): siRNA sense strand
gaggagaacgguuugauuc

SEQ ID NO: 176579 - RNA, 19 nt, Homo sapiens
  misc_RNA (1)...(19): siRNA sense strand
gguguugacugcgauauug

SEQ ID NO: 176580 - RNA, 19 nt, Homo sapiens
  misc_RNA (1)...(19): siRNA sense strand
agagaacggucuggcaaua

SEQ ID NO: 176581 - RNA, 19 nt, Homo sapiens
  misc_RNA (1)...(19): siRNA sense strand
ccuggagacuucacacuuu

SEQ ID NO: 176582 - RNA, 19 nt, Homo sapiens
  misc_RNA (1)...(19): siRNA sense strand
gaaagggcacgaauauaca

SEQ ID NO: 176583 - RNA, 19 nt, Homo sapiens
  misc_RNA (1)...(19): siRNA sense strand
caguaccgauuuaucuaua

SEQ ID NO: 176584 - RNA, 19 nt, Homo sapiens
  misc_RNA (1)...(19): siRNA sense strand
cagaucuuguggaacauua

SEQ ID NO: 176585 - RNA, 19 nt, Homo sapiens
  misc_RNA (1)...(19): siRNA sense strand
uaaagugacccauguuaug

SEQ ID NO: 176586 - RNA, 19 nt, Homo sapiens
  misc_RNA (1)...(19): siRNA sense strand
acagggacguucauuguga

SEQ ID NO: 176587 - RNA, 19 nt, Homo sapiens
  misc_RNA (1)...(19): siRNA sense strand
ucagaacacuggugauuac

SEQ ID NO: 176588 - RNA, 19 nt, Homo sapiens
  misc_RNA (1)...(19): siRNA sense strand
gcgcacuggugaugacaaa

SEQ ID NO: 176589 - RNA, 19 nt, Homo sapiens
  misc_RNA (1)...(19): siRNA sense strand
ucauugagcuuaaauaucc

SEQ ID NO: 176590 - RNA, 19 nt, Homo sapiens
  misc_RNA (1)...(19): siRNA sense strand
ugacugcgauauugacguu

SEQ ID NO: 176591 - RNA, 19 nt, Homo sapiens
  misc_RNA (1)...(19): siRNA sense strand
gacggcaagucuaaaguga

SEQ ID NO: 176592 - RNA, 19 nt, Homo sapiens
  misc_RNA (1)...(19): siRNA sense strand
gagaugguuucacccaaau

SEQ ID NO: 176593 - RNA, 19 nt, Homo sapiens
  misc_RNA (1)...(19): siRNA sense strand
uuaaauauccucugaacug

SEQ ID NO: 176594 - RNA, 19 nt, Homo sapiens
  misc_RNA (1)...(19): siRNA sense strand
gugcagaaaugagagaaga

SEQ ID NO: 176595 - RNA, 19 nt, Homo sapiens
  misc_RNA (1)...(19): siRNA sense strand
caaugagccuguuucagau

SEQ ID NO: 176596 - RNA, 19 nt, Homo sapiens
  misc_RNA (1)...(19): siRNA sense strand
ggaggagaacgguuugauu

SEQ ID NO: 176597 - RNA, 19 nt, Homo sapiens
  misc_RNA (1)...(19): siRNA sense strand
uggcugaguugguccagua

SEQ ID NO: 176598 - RNA, 19 nt, Homo sapiens
  misc_RNA (1)...(19): siRNA sense strand
gguccagcauuauauugaa

SEQ ID NO: 176599 - RNA, 19 nt, Homo sapiens
  misc_RNA (1)...(19): siRNA sense strand
guaccgauuuaucuauaug

SEQ ID NO: 176600 - RNA, 19 nt, Homo sapiens
  misc_RNA (1)...(19): siRNA sense strand
guuaggaacgucaaagaaa

SEQ ID NO: 176601 - RNA, 19 nt, Homo sapiens
  misc_RNA (1)...(19): siRNA sense strand
gaucuuguggaacauuaua

SEQ ID NO: 176602 - RNA, 19 nt, Homo sapiens
  misc_RNA (1)...(19): siRNA sense strand
uaaauauccucugaacugu

SEQ ID NO: 176603 - RNA, 19 nt, Homo sapiens
  misc_RNA (1)...(19): siRNA sense strand
cgacguugguggaggagaa

SEQ ID NO: 176604 - RNA, 19 nt, Homo sapiens
  misc_RNA (1)...(19): siRNA sense strand
gcagaaaaccuacuguuga

SEQ ID NO: 176605 - RNA, 19 nt, Homo sapiens
  misc_RNA (1)...(19): siRNA sense strand
auauggcgguccagcauua

SEQ ID NO: 176606 - RNA, 19 nt, Homo sapiens
  misc_RNA (1)...(19): siRNA sense strand
ugaaauagaaagcagaguu

SEQ ID NO: 176607 - RNA, 19 nt, Homo sapiens
  misc_RNA (1)...(19): siRNA sense strand
aaaugcugcugaaauagaa

SEQ ID NO: 176608 - RNA, 19 nt, Homo sapiens
  misc_RNA (1)...(19): siRNA sense strand
uaaaugcugcugaaauaga

SEQ ID NO: 176609 - RNA, 19 nt, Homo sapiens
  misc_RNA (1)...(19): siRNA sense strand
ggaacaucacgggcaauua

SEQ ID NO: 176610 - RNA, 19 nt, Homo sapiens
  misc_RNA (1)...(19): siRNA sense strand
gggaagaauuugagacacu

SEQ ID NO: 176611 - RNA, 19 nt, Homo sapiens
  misc_RNA (1)...(19): siRNA sense strand
guauaaaugcugcugaaau

SEQ ID NO: 176612 - RNA, 19 nt, Homo sapiens
  misc_RNA (1)...(19): siRNA sense strand
caaugcaaauaucaucaug

SEQ ID NO: 176613 - RNA, 19 nt, Homo sapiens
  misc_RNA (1)...(19): siRNA sense strand
gagagaagacagugcuaga

SEQ ID NO: 176614 - RNA, 19 nt, Homo sapiens
  misc_RNA (1)...(19): siRNA sense strand
guggagagaggaaagagua

SEQ ID NO: 176615 - RNA, 19 nt, Homo sapiens
  misc_RNA (1)...(19): siRNA sense strand
cggaugguguuccaagaaa

SEQ ID NO: 176616 - RNA, 19 nt, Homo sapiens
  misc_RNA (1)...(19): siRNA sense strand
ugauuacuaugaccuguau

SEQ ID NO: 176617 - RNA, 19 nt, Homo sapiens
  misc_RNA (1)...(19): siRNA sense strand
gagaggaaagaguaaaugu

SEQ ID NO: 176618 - RNA, 19 nt, Homo sapiens
  misc_RNA (1)...(19): siRNA sense strand
aguauuacauggaacauca

SEQ ID NO: 176619 - RNA, 19 nt, Homo sapiens
  misc_RNA (1)...(19): siRNA sense strand
gcuuaaauauccucugaac

SEQ ID NO: 176620 - RNA, 19 nt, Homo sapiens
  misc_RNA (1)...(19): siRNA sense strand
gagaagacagugcuagagu

SEQ ID NO: 176621 - RNA, 19 nt, Homo sapiens
  misc_RNA (1)...(19): siRNA sense strand
ucaaauacuggccugauga

SEQ ID NO: 176622 - RNA, 19 nt, Homo sapiens
  misc_RNA (1)...(19): siRNA sense strand
gagccacccuggagauuuu

SEQ ID NO: 176623 - RNA, 19 nt, Homo sapiens
  misc_RNA (1)...(19): siRNA sense strand
ggagagaggaaagaguaaa

SEQ ID NO: 176624 - RNA, 19 nt, Homo sapiens
  misc_RNA (1)...(19): siRNA sense strand
ccaagugcaacaauucaaa

SEQ ID NO: 176625 - RNA, 19 nt, Homo sapiens
  misc_RNA (1)...(19): siRNA sense strand
aaagugacccauguuauga

SEQ ID NO: 176626 - RNA, 19 nt, Homo sapiens
  misc_RNA (1)...(19): siRNA sense strand
ucuaaagugacccauguua

SEQ ID NO: 176627 - RNA, 19 nt, Homo sapiens
  misc_RNA (1)...(19): siRNA sense strand
ucacccacaucaagauuca

SEQ ID NO: 176628 - RNA, 19 nt, Homo sapiens
  misc_RNA (1)...(19): siRNA sense strand
uuauugacaucaucagaga

SEQ ID NO: 176629 - RNA, 19 nt, Homo sapiens
  misc_RNA (1)...(19): siRNA sense strand
gagagaggaaagaguaaau

SEQ ID NO: 176630 - RNA, 19 nt, Homo sapiens
  misc_RNA (1)...(19): siRNA sense strand
agaguuacauugccacaca

SEQ ID NO: 176631 - RNA, 19 nt, Homo sapiens
  misc_RNA (1)...(19): siRNA sense strand
ccacagauaaagucaaaca

SEQ ID NO: 176632 - RNA, 19 nt, Homo sapiens
  misc_RNA (1)...(19): siRNA sense strand
uaucaucaugccugaauuu

SEQ ID NO: 176633 - RNA, 19 nt, Homo sapiens
  misc_RNA (1)...(19): siRNA sense strand
gcgcaggauugaagaagag

SEQ ID NO: 176634 - RNA, 19 nt, Homo sapiens
  misc_RNA (1)...(19): siRNA sense strand
gucaaauacuggccugaug

SEQ ID NO: 176635 - RNA, 19 nt, Homo sapiens
  misc_RNA (1)...(19): siRNA sense strand
gaugguuucacccaaauau

SEQ ID NO: 176636 - RNA, 19 nt, Homo sapiens
  misc_RNA (1)...(19): siRNA sense strand
ggucuggcaauaccacuuu

SEQ ID NO: 176637 - RNA, 19 nt, Homo sapiens
  misc_RNA (1)...(19): siRNA sense strand
cagaagcacaguaccgauu

SEQ ID NO: 176638 - RNA, 19 nt, Homo sapiens
  misc_RNA (1)...(19): siRNA sense strand
guccagcauuauauugaaa

SEQ ID NO: 176639 - RNA, 19 nt, Homo sapiens
  misc_RNA (1)...(19): siRNA sense strand
gaaacaggauucaguguga

SEQ ID NO: 176640 - RNA, 19 nt, Homo sapiens
  misc_RNA (1)...(19): siRNA sense strand
gaugugaagucguauuaua

SEQ ID NO: 176641 - RNA, 19 nt, Homo sapiens
  misc_RNA (1)...(19): siRNA sense strand
cagaauaggucuagaagaa

SEQ ID NO: 176642 - RNA, 19 nt, Homo sapiens
  misc_RNA (1)...(19): siRNA sense strand
gaaagaaucgguuaaaugu

SEQ ID NO: 176643 - RNA, 19 nt, Homo sapiens
  misc_RNA (1)...(19): siRNA sense strand
acaaaggaguuacaucuua

SEQ ID NO: 176644 - RNA, 19 nt, Homo sapiens
  misc_RNA (1)...(19): siRNA sense strand
aaagggagauucuaguaua

SEQ ID NO: 176645 - RNA, 19 nt, Homo sapiens
  misc_RNA (1)...(19): siRNA sense strand
caaaggaguuacaucuuaa

SEQ ID NO: 176646 - RNA, 19 nt, Homo sapiens
  misc_RNA (1)...(19): siRNA sense strand
aaacagaaaucgaaacaga

SEQ ID NO: 176647 - RNA, 19 nt, Homo sapiens
  misc_RNA (1)...(19): siRNA sense strand
cagaagaugugaagucgua

SEQ ID NO: 176648 - RNA, 19 nt, Homo sapiens
  misc_RNA (1)...(19): siRNA sense strand
gagaugcuguuuaaagaaa

SEQ ID NO: 176649 - RNA, 19 nt, Homo sapiens
  misc_RNA (1)...(19): siRNA sense strand
gaauaggucuagaagaaga

SEQ ID NO: 176650 - RNA, 19 nt, Homo sapiens
  misc_RNA (1)...(19): siRNA sense strand
agacuuaucuccugccuuu

SEQ ID NO: 176651 - RNA, 19 nt, Homo sapiens
  misc_RNA (1)...(19): siRNA sense strand
gaacagaauaggucuagaa

SEQ ID NO: 176652 - RNA, 19 nt, Homo sapiens
  misc_RNA (1)...(19): siRNA sense strand
cgaaacagauacagagaug

SEQ ID NO: 176653 - RNA, 19 nt, Homo sapiens
  misc_RNA (1)...(19): siRNA sense strand
gagaaagaaucgguuaaau

SEQ ID NO: 176654 - RNA, 19 nt, Homo sapiens
  misc_RNA (1)...(19): siRNA sense strand
cagcuucauuucucaauuu

SEQ ID NO: 176655 - RNA, 19 nt, Homo sapiens
  misc_RNA (1)...(19): siRNA sense strand
gcacaaaggaguuacaucu

SEQ ID NO: 176656 - RNA, 19 nt, Homo sapiens
  misc_RNA (1)...(19): siRNA sense strand
ggugaaaccagaacaauau

SEQ ID NO: 176657 - RNA, 19 nt, Homo sapiens
  misc_RNA (1)...(19): siRNA sense strand
accaagagaugcuguuuaa

SEQ ID NO: 176658 - RNA, 19 nt, Homo sapiens
  misc_RNA (1)...(19): siRNA sense strand
gaccaaagcaguugucaug

SEQ ID NO: 176659 - RNA, 19 nt, Homo sapiens
  misc_RNA (1)...(19): siRNA sense strand
gauguaagcccauaugauc

SEQ ID NO: 176660 - RNA, 19 nt, Homo sapiens
  misc_RNA (1)...(19): siRNA sense strand
ggagaaagaaucgguuaaa

SEQ ID NO: 176661 - RNA, 19 nt, Homo sapiens
  misc_RNA (1)...(19): siRNA sense strand
uauacuaccuggccagauu

SEQ ID NO: 176662 - RNA, 19 nt, Homo sapiens
  misc_RNA (1)...(19): siRNA sense strand
caagagaugcuguuuaaag

SEQ ID NO: 176663 - RNA, 19 nt, Homo sapiens
  misc_RNA (1)...(19): siRNA sense strand
aagagaugcuguuuaaaga

SEQ ID NO: 176664 - RNA, 19 nt, Homo sapiens
  misc_RNA (1)...(19): siRNA sense strand
gcacaguacuggccaacag

SEQ ID NO: 176665 - RNA, 19 nt, Homo sapiens
  misc_RNA (1)...(19): siRNA sense strand
gugugaagcucuugucaga

SEQ ID NO: 176666 - RNA, 19 nt, Homo sapiens
  misc_RNA (1)...(19): siRNA sense strand
caguuuaguugacauagaa

SEQ ID NO: 176667 - RNA, 19 nt, Homo sapiens
  misc_RNA (1)...(19): siRNA sense strand
gaacaauaucucacuuuca

SEQ ID NO: 176668 - RNA, 19 nt, Homo sapiens
  misc_RNA (1)...(19): siRNA sense strand
guacaucuacuacaauuag

SEQ ID NO: 176669 - RNA, 19 nt, Homo sapiens
  misc_RNA (1)...(19): siRNA sense strand
acagaaaucgaaacagaua

SEQ ID NO: 176670 - RNA, 19 nt, Homo sapiens
  misc_RNA (1)...(19): siRNA sense strand
ucucauacauggcuauaau

SEQ ID NO: 176671 - RNA, 19 nt, Homo sapiens
  misc_RNA (1)...(19): siRNA sense strand
gaaccgcauuguggagaaa

SEQ ID NO: 176672 - RNA, 19 nt, Homo sapiens
  misc_RNA (1)...(19): siRNA sense strand
gcagaagaccaaagcaguu

SEQ ID NO: 176673 - RNA, 19 nt, Homo sapiens
  misc_RNA (1)...(19): siRNA sense strand
uaugaucacagucguguua

SEQ ID NO: 176674 - RNA, 19 nt, Homo sapiens
  misc_RNA (1)...(19): siRNA sense strand
gaccaagagaugcuguuua

SEQ ID NO: 176675 - RNA, 19 nt, Homo sapiens
  misc_RNA (1)...(19): siRNA sense strand
gugaagcucuugucagaag

SEQ ID NO: 176676 - RNA, 19 nt, Homo sapiens
  misc_RNA (1)...(19): siRNA sense strand
gaagaggcacaaaggaguu

SEQ ID NO: 176677 - RNA, 19 nt, Homo sapiens
  misc_RNA (1)...(19): siRNA sense strand
uaaagaaacaggauucagu

SEQ ID NO: 176678 - RNA, 19 nt, Homo sapiens
  misc_RNA (1)...(19): siRNA sense strand
cagaaacgauggaaagaac

SEQ ID NO: 176679 - RNA, 19 nt, Homo sapiens
  misc_RNA (1)...(19): siRNA sense strand
uaacacaugcugccauuuc

SEQ ID NO: 176680 - RNA, 19 nt, Homo sapiens
  misc_RNA (1)...(19): siRNA sense strand
agaaagaaucgguuaaaug

SEQ ID NO: 176681 - RNA, 19 nt, Homo sapiens
  misc_RNA (1)...(19): siRNA sense strand
gccaacagaugaccaagag

SEQ ID NO: 176682 - RNA, 19 nt, Homo sapiens
  misc_RNA (1)...(19): siRNA sense strand
gaaacgauggaaagaacuu

SEQ ID NO: 176683 - RNA, 19 nt, Homo sapiens
  misc_RNA (1)...(19): siRNA sense strand
caacagaugaccaagagau

SEQ ID NO: 176684 - RNA, 19 nt, Homo sapiens
  misc_RNA (1)...(19): siRNA sense strand
ccuaacacaugcugccauu

SEQ ID NO: 176685 - RNA, 19 nt, Homo sapiens
  misc_RNA (1)...(19): siRNA sense strand
gaagaugugaagucguauu

SEQ ID NO: 176686 - RNA, 19 nt, Homo sapiens
  misc_RNA (1)...(19): siRNA sense strand
gguuaaaugugcacaguac

SEQ ID NO: 176687 - RNA, 19 nt, Homo sapiens
  misc_RNA (1)...(19): siRNA sense strand
ccagaacaauaucucacuu

SEQ ID NO: 176688 - RNA, 19 nt, Homo sapiens
  misc_RNA (1)...(19): siRNA sense strand
caauggaggagaacaguga

SEQ ID NO: 176689 - RNA, 19 nt, Homo sapiens
  misc_RNA (1)...(19): siRNA sense strand
agaacaauaucucacuuuc

SEQ ID NO: 176690 - RNA, 19 nt, Homo sapiens
  misc_RNA (1)...(19): siRNA sense strand
acagagauguaagcccaua

SEQ ID NO: 176691 - RNA, 19 nt, Homo sapiens
  misc_RNA (1)...(19): siRNA sense strand
ccaguuuaguugacauaga

SEQ ID NO: 176692 - RNA, 19 nt, Homo sapiens
  misc_RNA (1)...(19): siRNA sense strand
gagaaucuggcuccuugaa

SEQ ID NO: 176693 - RNA, 19 nt, Homo sapiens
  misc_RNA (1)...(19): siRNA sense strand
aagaugugaagucguauua

SEQ ID NO: 176694 - RNA, 19 nt, Homo sapiens
  misc_RNA (1)...(19): siRNA sense strand
uaaagggagauucuaguau

SEQ ID NO: 176695 - RNA, 19 nt, Homo sapiens
  misc_RNA (1)...(19): siRNA sense strand
aagauacaauggaggagaa

SEQ ID NO: 176696 - RNA, 19 nt, Homo sapiens
  misc_RNA (1)...(19): siRNA sense strand
gagauguaagcccauauga

SEQ ID NO: 176697 - RNA, 19 nt, Homo sapiens
  misc_RNA (1)...(19): siRNA sense strand
cagaacaauaucucacuuu

SEQ ID NO: 176698 - RNA, 19 nt, Homo sapiens
  misc_RNA (1)...(19): siRNA sense strand
gcaaaaugcugagaaugau

SEQ ID NO: 176699 - RNA, 19 nt, Homo sapiens
  misc_RNA (1)...(19): siRNA sense strand
auaaagggagauucuagua

SEQ ID NO: 176700 - RNA, 19 nt, Homo sapiens
  misc_RNA (1)...(19): siRNA sense strand
ccagcuucauuucucaauu

SEQ ID NO: 176701 - RNA, 19 nt, Homo sapiens
  misc_RNA (1)...(19): siRNA sense strand
ucauagaguggccaaguuu

SEQ ID NO: 176702 - RNA, 19 nt, Homo sapiens
  misc_RNA (1)...(19): siRNA sense strand
guacuuggaaauucgaaau

SEQ ID NO: 176703 - RNA, 19 nt, Homo sapiens
  misc_RNA (1)...(19): siRNA sense strand
guggagaaagaaucgguua

SEQ ID NO: 176704 - RNA, 19 nt, Homo sapiens
  misc_RNA (1)...(19): siRNA sense strand
gaaaacagaaaucgaaaca

SEQ ID NO: 176705 - RNA, 19 nt, Homo sapiens
  misc_RNA (1)...(19): siRNA sense strand
guauaaagggagauucuag

SEQ ID NO: 176706 - RNA, 19 nt, Homo sapiens
  misc_RNA (1)...(19): siRNA sense strand
gaaaccagaacaauaucuc

SEQ ID NO: 176707 - RNA, 19 nt, Homo sapiens
  misc_RNA (1)...(19): siRNA sense strand
ggaacagaauaggucuaga

SEQ ID NO: 176708 - RNA, 19 nt, Homo sapiens
  misc_RNA (1)...(19): siRNA sense strand
acacaggguccacuuccua

SEQ ID NO: 176709 - RNA, 19 nt, Homo sapiens
  misc_RNA (1)...(19): siRNA sense strand
ggacuuuccucuaaaaugc

SEQ ID NO: 176710 - RNA, 19 nt, Homo sapiens
  misc_RNA (1)...(19): siRNA sense strand
ugaucacagucguguuaaa

SEQ ID NO: 176711 - RNA, 19 nt, Homo sapiens
  misc_RNA (1)...(19): siRNA sense strand
ucaccagcuucauuucuca

SEQ ID NO: 176712 - RNA, 19 nt, Homo sapiens
  misc_RNA (1)...(19): siRNA sense strand
ugaccgauguacaggacuu

SEQ ID NO: 176713 - RNA, 19 nt, Homo sapiens
  misc_RNA (1)...(19): siRNA sense strand
gaaggagcaaaauguauaa

SEQ ID NO: 176714 - RNA, 19 nt, Homo sapiens
  misc_RNA (1)...(19): siRNA sense strand
ugacauagaagaggcacaa

SEQ ID NO: 176715 - RNA, 19 nt, Homo sapiens
  misc_RNA (1)...(19): siRNA sense strand
gagcgggaguucgaagagu

SEQ ID NO: 176716 - RNA, 19 nt, Homo sapiens
  misc_RNA (1)...(19): siRNA sense strand
cagaagaccaaagcaguug

SEQ ID NO: 176717 - RNA, 19 nt, Homo sapiens
  misc_RNA (1)...(19): siRNA sense strand
ugaaccgcauuguggagaa

SEQ ID NO: 176718 - RNA, 19 nt, Homo sapiens
  misc_RNA (1)...(19): siRNA sense strand
ccgcuguacuuggaaauuc

SEQ ID NO: 176719 - RNA, 19 nt, Homo sapiens
  misc_RNA (1)...(19): siRNA sense strand
ggagauucuaguauacaga

SEQ ID NO: 176720 - RNA, 19 nt, Homo sapiens
  misc_RNA (1)...(19): siRNA sense strand
ggagcaaaauguauaaagg

SEQ ID NO: 176721 - RNA, 19 nt, Homo sapiens
  misc_RNA (1)...(19): siRNA sense strand
cauagaagaggcacaaagg

SEQ ID NO: 176722 - RNA, 19 nt, Homo sapiens
  misc_RNA (1)...(19): siRNA sense strand
acugacaggugaccgaugu

SEQ ID NO: 176723 - RNA, 19 nt, Homo sapiens
  misc_RNA (1)...(19): siRNA sense strand
gggagauucuaguauacag

SEQ ID NO: 176724 - RNA, 19 nt, Homo sapiens
  misc_RNA (1)...(19): siRNA sense strand
aaauaccgaaugggucuua

SEQ ID NO: 176725 - RNA, 19 nt, Homo sapiens
  misc_RNA (1)...(19): siRNA sense strand
gaucacagucguguuaaac

SEQ ID NO: 176726 - RNA, 19 nt, Homo sapiens
  misc_RNA (1)...(19): siRNA sense strand
gaagaccaaagcaguuguc

SEQ ID NO: 176727 - RNA, 19 nt, Homo sapiens
  misc_RNA (1)...(19): siRNA sense strand
ucuccugccuuugaucauu

SEQ ID NO: 176728 - RNA, 19 nt, Homo sapiens
  misc_RNA (1)...(19): siRNA sense strand
auacagaaacgauggaaag

SEQ ID NO: 176729 - RNA, 19 nt, Homo sapiens
  misc_RNA (1)...(19): siRNA sense strand
ccagaucaacugagauucu

SEQ ID NO: 176730 - RNA, 19 nt, Homo sapiens
  misc_RNA (1)...(19): siRNA sense strand
acuuggaaauucgaaauga

SEQ ID NO: 176731 - RNA, 19 nt, Homo sapiens
  misc_RNA (1)...(19): siRNA sense strand
auacaaugggaacagaaua

SEQ ID NO: 176732 - RNA, 19 nt, Homo sapiens
  misc_RNA (1)...(19): siRNA sense strand
gaaucaccagcuucauuuc

SEQ ID NO: 176733 - RNA, 19 nt, Homo sapiens
  misc_RNA (1)...(19): siRNA sense strand
ccagaaaacagaaaucgaa

SEQ ID NO: 176734 - RNA, 19 nt, Homo sapiens
  misc_RNA (1)...(19): siRNA sense strand
gggaacagaauaggucuag

SEQ ID NO: 176735 - RNA, 19 nt, Homo sapiens
  misc_RNA (1)...(19): siRNA sense strand
cacaaaggaguuacaucuu

SEQ ID NO: 176736 - RNA, 19 nt, Homo sapiens
  misc_RNA (1)...(19): siRNA sense strand
gaucauucaccaaacaaaa

SEQ ID NO: 176737 - RNA, 19 nt, Homo sapiens
  misc_RNA (1)...(19): siRNA sense strand
acagaaacgauggaaagaa

SEQ ID NO: 176738 - RNA, 19 nt, Homo sapiens
  misc_RNA (1)...(19): siRNA sense strand
agaaggagcaaaauguaua

SEQ ID NO: 176739 - RNA, 19 nt, Homo sapiens
  misc_RNA (1)...(19): siRNA sense strand
gaaacaggauucaguguga

SEQ ID NO: 176740 - RNA, 19 nt, Homo sapiens
  misc_RNA (1)...(19): siRNA sense strand
gaugugaagucguauuaua

SEQ ID NO: 176741 - RNA, 19 nt, Homo sapiens
  misc_RNA (1)...(19): siRNA sense strand
cagaauaggucuagaagaa

SEQ ID NO: 176742 - RNA, 19 nt, Homo sapiens
  misc_RNA (1)...(19): siRNA sense strand
gaaagaaucgguuaaaugu

SEQ ID NO: 176743 - RNA, 19 nt, Homo sapiens
  misc_RNA (1)...(19): siRNA sense strand
acaaaggaguuacaucuua

SEQ ID NO: 176744 - RNA, 19 nt, Homo sapiens
  misc_RNA (1)...(19): siRNA sense strand
aaagggagauucuaguaua

SEQ ID NO: 176745 - RNA, 19 nt, Homo sapiens
  misc_RNA (1)...(19): siRNA sense strand
caaaggaguuacaucuuaa

SEQ ID NO: 176746 - RNA, 19 nt, Homo sapiens
  misc_RNA (1)...(19): siRNA sense strand
aaacagaaaucgaaacaga

SEQ ID NO: 176747 - RNA, 19 nt, Homo sapiens
  misc_RNA (1)...(19): siRNA sense strand
cagaagaugugaagucgua

SEQ ID NO: 176748 - RNA, 19 nt, Homo sapiens
  misc_RNA (1)...(19): siRNA sense strand
gagaugcuguuuaaagaaa

SEQ ID NO: 176749 - RNA, 19 nt, Homo sapiens
  misc_RNA (1)...(19): siRNA sense strand
gaauaggucuagaagaaga

SEQ ID NO: 176750 - RNA, 19 nt, Homo sapiens
  misc_RNA (1)...(19): siRNA sense strand
agacuuaucuccugccuuu

SEQ ID NO: 176751 - RNA, 19 nt, Homo sapiens
  misc_RNA (1)...(19): siRNA sense strand
gaacagaauaggucuagaa

SEQ ID NO: 176752 - RNA, 19 nt, Homo sapiens
  misc_RNA (1)...(19): siRNA sense strand
cgaaacagauacagagaug

SEQ ID NO: 176753 - RNA, 19 nt, Homo sapiens
  misc_RNA (1)...(19): siRNA sense strand
gagaaagaaucgguuaaau

SEQ ID NO: 176754 - RNA, 19 nt, Homo sapiens
  misc_RNA (1)...(19): siRNA sense strand
cagcuucauuucucaauuu

SEQ ID NO: 176755 - RNA, 19 nt, Homo sapiens
  misc_RNA (1)...(19): siRNA sense strand
gcacaaaggaguuacaucu

SEQ ID NO: 176756 - RNA, 19 nt, Homo sapiens
  misc_RNA (1)...(19): siRNA sense strand
ggugaaaccagaacaauau

SEQ ID NO: 176757 - RNA, 19 nt, Homo sapiens
  misc_RNA (1)...(19): siRNA sense strand
accaagagaugcuguuuaa

SEQ ID NO: 176758 - RNA, 19 nt, Homo sapiens
  misc_RNA (1)...(19): siRNA sense strand
gaccaaagcaguugucaug

SEQ ID NO: 176759 - RNA, 19 nt, Homo sapiens
  misc_RNA (1)...(19): siRNA sense strand
gauguaagcccauaugauc

SEQ ID NO: 176760 - RNA, 19 nt, Homo sapiens
  misc_RNA (1)...(19): siRNA sense strand
ggagaaagaaucgguuaaa

SEQ ID NO: 176761 - RNA, 19 nt, Homo sapiens
  misc_RNA (1)...(19): siRNA sense strand
uauacuaccuggccagauu

SEQ ID NO: 176762 - RNA, 19 nt, Homo sapiens
  misc_RNA (1)...(19): siRNA sense strand
caagagaugcuguuuaaag

SEQ ID NO: 176763 - RNA, 19 nt, Homo sapiens
  misc_RNA (1)...(19): siRNA sense strand
aagagaugcuguuuaaaga

SEQ ID NO: 176764 - RNA, 19 nt, Homo sapiens
  misc_RNA (1)...(19): siRNA sense strand
gcacaguacuggccaacag

SEQ ID NO: 176765 - RNA, 19 nt, Homo sapiens
  misc_RNA (1)...(19): siRNA sense strand
gugugaagcucuugucaga

SEQ ID NO: 176766 - RNA, 19 nt, Homo sapiens
  misc_RNA (1)...(19): siRNA sense strand
caguuuaguugacauagaa

SEQ ID NO: 176767 - RNA, 19 nt, Homo sapiens
  misc_RNA (1)...(19): siRNA sense strand
gaacaauaucucacuuuca

SEQ ID NO: 176768 - RNA, 19 nt, Homo sapiens
  misc_RNA (1)...(19): siRNA sense strand
guacaucuacuacaauuag

SEQ ID NO: 176769 - RNA, 19 nt, Homo sapiens
  misc_RNA (1)...(19): siRNA sense strand
acagaaaucgaaacagaua

SEQ ID NO: 176770 - RNA, 19 nt, Homo sapiens
  misc_RNA (1)...(19): siRNA sense strand
ucucauacauggcuauaau

SEQ ID NO: 176771 - RNA, 19 nt, Homo sapiens
  misc_RNA (1)...(19): siRNA sense strand
gaaccgcauuguggagaaa

SEQ ID NO: 176772 - RNA, 19 nt, Homo sapiens
  misc_RNA (1)...(19): siRNA sense strand
gcagaagaccaaagcaguu

SEQ ID NO: 176773 - RNA, 19 nt, Homo sapiens
  misc_RNA (1)...(19): siRNA sense strand
uaugaucacagucguguua

SEQ ID NO: 176774 - RNA, 19 nt, Homo sapiens
  misc_RNA (1)...(19): siRNA sense strand
gaccaagagaugcuguuua

SEQ ID NO: 176775 - RNA, 19 nt, Homo sapiens
  misc_RNA (1)...(19): siRNA sense strand
gugaagcucuugucagaag

SEQ ID NO: 176776 - RNA, 19 nt, Homo sapiens
  misc_RNA (1)...(19): siRNA sense strand
gaagaggcacaaaggaguu

SEQ ID NO: 176777 - RNA, 19 nt, Homo sapiens
  misc_RNA (1)...(19): siRNA sense strand
uaaagaaacaggauucagu

SEQ ID NO: 176778 - RNA, 19 nt, Homo sapiens
  misc_RNA (1)...(19): siRNA sense strand
cagaaacgauggaaagaac

SEQ ID NO: 176779 - RNA, 19 nt, Homo sapiens
  misc_RNA (1)...(19): siRNA sense strand
uaacacaugcugccauuuc

SEQ ID NO: 176780 - RNA, 19 nt, Homo sapiens
  misc_RNA (1)...(19): siRNA sense strand
agaaagaaucgguuaaaug

SEQ ID NO: 176781 - RNA, 19 nt, Homo sapiens
  misc_RNA (1)...(19): siRNA sense strand
gccaacagaugaccaagag

SEQ ID NO: 176782 - RNA, 19 nt, Homo sapiens
  misc_RNA (1)...(19): siRNA sense strand
gaaacgauggaaagaacuu

SEQ ID NO: 176783 - RNA, 19 nt, Homo sapiens
  misc_RNA (1)...(19): siRNA sense strand
caacagaugaccaagagau

SEQ ID NO: 176784 - RNA, 19 nt, Homo sapiens
  misc_RNA (1)...(19): siRNA sense strand
ccuaacacaugcugccauu

SEQ ID NO: 176785 - RNA, 19 nt, Homo sapiens
  misc_RNA (1)...(19): siRNA sense strand
gaagaugugaagucguauu

SEQ ID NO: 176786 - RNA, 19 nt, Homo sapiens
  misc_RNA (1)...(19): siRNA sense strand
gguuaaaugugcacaguac

SEQ ID NO: 176787 - RNA, 19 nt, Homo sapiens
  misc_RNA (1)...(19): siRNA sense strand
ccagaacaauaucucacuu

SEQ ID NO: 176788 - RNA, 19 nt, Homo sapiens
  misc_RNA (1)...(19): siRNA sense strand
caauggaggagaacaguga

SEQ ID NO: 176789 - RNA, 19 nt, Homo sapiens
  misc_RNA (1)...(19): siRNA sense strand
agaacaauaucucacuuuc

SEQ ID NO: 176790 - RNA, 19 nt, Homo sapiens
  misc_RNA (1)...(19): siRNA sense strand
acagagauguaagcccaua

SEQ ID NO: 176791 - RNA, 19 nt, Homo sapiens
  misc_RNA (1)...(19): siRNA sense strand
ccaguuuaguugacauaga

SEQ ID NO: 176792 - RNA, 19 nt, Homo sapiens
  misc_RNA (1)...(19): siRNA sense strand
gagaaucuggcuccuugaa

SEQ ID NO: 176793 - RNA, 19 nt, Homo sapiens
  misc_RNA (1)...(19): siRNA sense strand
aagaugugaagucguauua

SEQ ID NO: 176794 - RNA, 19 nt, Homo sapiens
  misc_RNA (1)...(19): siRNA sense strand
uaaagggagauucuaguau

SEQ ID NO: 176795 - RNA, 19 nt, Homo sapiens
  misc_RNA (1)...(19): siRNA sense strand
aagauacaauggaggagaa

SEQ ID NO: 176796 - RNA, 19 nt, Homo sapiens
  misc_RNA (1)...(19): siRNA sense strand
gagauguaagcccauauga

SEQ ID NO: 176797 - RNA, 19 nt, Homo sapiens
  misc_RNA (1)...(19): siRNA sense strand
cagaacaauaucucacuuu

SEQ ID NO: 176798 - RNA, 19 nt, Homo sapiens
  misc_RNA (1)...(19): siRNA sense strand
gcaaaaugcugagaaugau

SEQ ID NO: 176799 - RNA, 19 nt, Homo sapiens
  misc_RNA (1)...(19): siRNA sense strand
auaaagggagauucuagua

SEQ ID NO: 176800 - RNA, 19 nt, Homo sapiens
  misc_RNA (1)...(19): siRNA sense strand
ccagcuucauuucucaauu

SEQ ID NO: 176801 - RNA, 19 nt, Homo sapiens
  misc_RNA (1)...(19): siRNA sense strand
ucauagaguggccaaguuu

SEQ ID NO: 176802 - RNA, 19 nt, Homo sapiens
  misc_RNA (1)...(19): siRNA sense strand
guacuuggaaauucgaaau

SEQ ID NO: 176803 - RNA, 19 nt, Homo sapiens
  misc_RNA (1)...(19): siRNA sense strand
guggagaaagaaucgguua

SEQ ID NO: 176804 - RNA, 19 nt, Homo sapiens
  misc_RNA (1)...(19): siRNA sense strand
gaaaacagaaaucgaaaca

SEQ ID NO: 176805 - RNA, 19 nt, Homo sapiens
  misc_RNA (1)...(19): siRNA sense strand
guauaaagggagauucuag

SEQ ID NO: 176806 - RNA, 19 nt, Homo sapiens
  misc_RNA (1)...(19): siRNA sense strand
gaaaccagaacaauaucuc

SEQ ID NO: 176807 - RNA, 19 nt, Homo sapiens
  misc_RNA (1)...(19): siRNA sense strand
ggaacagaauaggucuaga

SEQ ID NO: 176808 - RNA, 19 nt, Homo sapiens
  misc_RNA (1)...(19): siRNA sense strand
acacaggguccacuuccua

SEQ ID NO: 176809 - RNA, 19 nt, Homo sapiens
  misc_RNA (1)...(19): siRNA sense strand
ggacuuuccucuaaaaugc

SEQ ID NO: 176810 - RNA, 19 nt, Homo sapiens
  misc_RNA (1)...(19): siRNA sense strand
ugaucacagucguguuaaa

SEQ ID NO: 176811 - RNA, 19 nt, Homo sapiens
  misc_RNA (1)...(19): siRNA sense strand
ucaccagcuucauuucuca

SEQ ID NO: 176812 - RNA, 19 nt, Homo sapiens
  misc_RNA (1)...(19): siRNA sense strand
ugaccgauguacaggacuu

SEQ ID NO: 176813 - RNA, 19 nt, Homo sapiens
  misc_RNA (1)...(19): siRNA sense strand
gaaggagcaaaauguauaa

SEQ ID NO: 176814 - RNA, 19 nt, Homo sapiens
  misc_RNA (1)...(19): siRNA sense strand
ugacauagaagaggcacaa

SEQ ID NO: 176815 - RNA, 19 nt, Homo sapiens
  misc_RNA (1)...(19): siRNA sense strand
gagcgggaguucgaagagu

SEQ ID NO: 176816 - RNA, 19 nt, Homo sapiens
  misc_RNA (1)...(19): siRNA sense strand
cagaagaccaaagcaguug

SEQ ID NO: 176817 - RNA, 19 nt, Homo sapiens
  misc_RNA (1)...(19): siRNA sense strand
ugaaccgcauuguggagaa

SEQ ID NO: 176818 - RNA, 19 nt, Homo sapiens
  misc_RNA (1)...(19): siRNA sense strand
ccgcuguacuuggaaauuc

SEQ ID NO: 176819 - RNA, 19 nt, Homo sapiens
  misc_RNA (1)...(19): siRNA sense strand
ggagauucuaguauacaga

SEQ ID NO: 176820 - RNA, 19 nt, Homo sapiens
  misc_RNA (1)...(19): siRNA sense strand
ggagcaaaauguauaaagg

SEQ ID NO: 176821 - RNA, 19 nt, Homo sapiens
  misc_RNA (1)...(19): siRNA sense strand
cauagaagaggcacaaagg

SEQ ID NO: 176822 - RNA, 19 nt, Homo sapiens
  misc_RNA (1)...(19): siRNA sense strand
acugacaggugaccgaugu

SEQ ID NO: 176823 - RNA, 19 nt, Homo sapiens
  misc_RNA (1)...(19): siRNA sense strand
gggagauucuaguauacag

SEQ ID NO: 176824 - RNA, 19 nt, Homo sapiens
  misc_RNA (1)...(19): siRNA sense strand
aaauaccgaaugggucuua

SEQ ID NO: 176825 - RNA, 19 nt, Homo sapiens
  misc_RNA (1)...(19): siRNA sense strand
gaucacagucguguuaaac

SEQ ID NO: 176826 - RNA, 19 nt, Homo sapiens
  misc_RNA (1)...(19): siRNA sense strand
gaagaccaaagcaguuguc

SEQ ID NO: 176827 - RNA, 19 nt, Homo sapiens
  misc_RNA (1)...(19): siRNA sense strand
ucuccugccuuugaucauu

SEQ ID NO: 176828 - RNA, 19 nt, Homo sapiens
  misc_RNA (1)...(19): siRNA sense strand
auacagaaacgauggaaag

SEQ ID NO: 176829 - RNA, 19 nt, Homo sapiens
  misc_RNA (1)...(19): siRNA sense strand
ccagaucaacugagauucu

SEQ ID NO: 176830 - RNA, 19 nt, Homo sapiens
  misc_RNA (1)...(19): siRNA sense strand
acuuggaaauucgaaauga

SEQ ID NO: 176831 - RNA, 19 nt, Homo sapiens
  misc_RNA (1)...(19): siRNA sense strand
auacaaugggaacagaaua

SEQ ID NO: 176832 - RNA, 19 nt, Homo sapiens
  misc_RNA (1)...(19): siRNA sense strand
gaaucaccagcuucauuuc

SEQ ID NO: 176833 - RNA, 19 nt, Homo sapiens
  misc_RNA (1)...(19): siRNA sense strand
ccagaaaacagaaaucgaa

SEQ ID NO: 176834 - RNA, 19 nt, Homo sapiens
  misc_RNA (1)...(19): siRNA sense strand
gggaacagaauaggucuag

SEQ ID NO: 176835 - RNA, 19 nt, Homo sapiens
  misc_RNA (1)...(19): siRNA sense strand
cacaaaggaguuacaucuu

SEQ ID NO: 176836 - RNA, 19 nt, Homo sapiens
  misc_RNA (1)...(19): siRNA sense strand
gaucauucaccaaacaaaa

SEQ ID NO: 176837 - RNA, 19 nt, Homo sapiens
  misc_RNA (1)...(19): siRNA sense strand
acagaaacgauggaaagaa

SEQ ID NO: 176838 - RNA, 19 nt, Homo sapiens
  misc_RNA (1)...(19): siRNA sense strand
agaaggagcaaaauguaua

SEQ ID NO: 176839 - RNA, 19 nt, Homo sapiens
  misc_RNA (1)...(19): siRNA sense strand
gaaacaggauucaguguga

SEQ ID NO: 176840 - RNA, 19 nt, Homo sapiens
  misc_RNA (1)...(19): siRNA sense strand
gaugugaagucguauuaua

SEQ ID NO: 176841 - RNA, 19 nt, Homo sapiens
  misc_RNA (1)...(19): siRNA sense strand
cagaauaggucuagaagaa

SEQ ID NO: 176842 - RNA, 19 nt, Homo sapiens
  misc_RNA (1)...(19): siRNA sense strand
gaaagaaucgguuaaaugu

SEQ ID NO: 176843 - RNA, 19 nt, Homo sapiens
  misc_RNA (1)...(19): siRNA sense strand
acaaaggaguuacaucuua

SEQ ID NO: 176844 - RNA, 19 nt, Homo sapiens
  misc_RNA (1)...(19): siRNA sense strand
aaagggagauucuaguaua

SEQ ID NO: 176845 - RNA, 19 nt, Homo sapiens
  misc_RNA (1)...(19): siRNA sense strand
caaaggaguuacaucuuaa

SEQ ID NO: 176846 - RNA, 19 nt, Homo sapiens
  misc_RNA (1)...(19): siRNA sense strand
aaacagaaaucgaaacaga

SEQ ID NO: 176847 - RNA, 19 nt, Homo sapiens
  misc_RNA (1)...(19): siRNA sense strand
cagaagaugugaagucgua

SEQ ID NO: 176848 - RNA, 19 nt, Homo sapiens
  misc_RNA (1)...(19): siRNA sense strand
gagaugcuguuuaaagaaa

SEQ ID NO: 176849 - RNA, 19 nt, Homo sapiens
  misc_RNA (1)...(19): siRNA sense strand
gaauaggucuagaagaaga

SEQ ID NO: 176850 - RNA, 19 nt, Homo sapiens
  misc_RNA (1)...(19): siRNA sense strand
agacuuaucuccugccuuu

SEQ ID NO: 176851 - RNA, 19 nt, Homo sapiens
  misc_RNA (1)...(19): siRNA sense strand
gaacagaauaggucuagaa

SEQ ID NO: 176852 - RNA, 19 nt, Homo sapiens
  misc_RNA (1)...(19): siRNA sense strand
cgaaacagauacagagaug

SEQ ID NO: 176853 - RNA, 19 nt, Homo sapiens
  misc_RNA (1)...(19): siRNA sense strand
gagaaagaaucgguuaaau

SEQ ID NO: 176854 - RNA, 19 nt, Homo sapiens
  misc_RNA (1)...(19): siRNA sense strand
cagcuucauuucucaauuu

SEQ ID NO: 176855 - RNA, 19 nt, Homo sapiens
  misc_RNA (1)...(19): siRNA sense strand
gcacaaaggaguuacaucu

SEQ ID NO: 176856 - RNA, 19 nt, Homo sapiens
  misc_RNA (1)...(19): siRNA sense strand
ggugaaaccagaacaauau

SEQ ID NO: 176857 - RNA, 19 nt, Homo sapiens
  misc_RNA (1)...(19): siRNA sense strand
accaagagaugcuguuuaa

SEQ ID NO: 176858 - RNA, 19 nt, Homo sapiens
  misc_RNA (1)...(19): siRNA sense strand
gaccaaagcaguugucaug

SEQ ID NO: 176859 - RNA, 19 nt, Homo sapiens
  misc_RNA (1)...(19): siRNA sense strand
gauguaagcccauaugauc

SEQ ID NO: 176860 - RNA, 19 nt, Homo sapiens
  misc_RNA (1)...(19): siRNA sense strand
ggagaaagaaucgguuaaa

SEQ ID NO: 176861 - RNA, 19 nt, Homo sapiens
  misc_RNA (1)...(19): siRNA sense strand
uauacuaccuggccagauu

SEQ ID NO: 176862 - RNA, 19 nt, Homo sapiens
  misc_RNA (1)...(19): siRNA sense strand
caagagaugcuguuuaaag

SEQ ID NO: 176863 - RNA, 19 nt, Homo sapiens
  misc_RNA (1)...(19): siRNA sense strand
aagagaugcuguuuaaaga

SEQ ID NO: 176864 - RNA, 19 nt, Homo sapiens
  misc_RNA (1)...(19): siRNA sense strand
gcacaguacuggccaacag

SEQ ID NO: 176865 - RNA, 19 nt, Homo sapiens
  misc_RNA (1)...(19): siRNA sense strand
gugugaagcucuugucaga

SEQ ID NO: 176866 - RNA, 19 nt, Homo sapiens
  misc_RNA (1)...(19): siRNA sense strand
caguuuaguugacauagaa

SEQ ID NO: 176867 - RNA, 19 nt, Homo sapiens
  misc_RNA (1)...(19): siRNA sense strand
gaacaauaucucacuuuca

SEQ ID NO: 176868 - RNA, 19 nt, Homo sapiens
  misc_RNA (1)...(19): siRNA sense strand
guacaucuacuacaauuag

SEQ ID NO: 176869 - RNA, 19 nt, Homo sapiens
  misc_RNA (1)...(19): siRNA sense strand
acagaaaucgaaacagaua

SEQ ID NO: 176870 - RNA, 19 nt, Homo sapiens
  misc_RNA (1)...(19): siRNA sense strand
ucucauacauggcuauaau

SEQ ID NO: 176871 - RNA, 19 nt, Homo sapiens
  misc_RNA (1)...(19): siRNA sense strand
gaaccgcauuguggagaaa

SEQ ID NO: 176872 - RNA, 19 nt, Homo sapiens
  misc_RNA (1)...(19): siRNA sense strand
gcagaagaccaaagcaguu

SEQ ID NO: 176873 - RNA, 19 nt, Homo sapiens
  misc_RNA (1)...(19): siRNA sense strand
uaugaucacagucguguua

SEQ ID NO: 176874 - RNA, 19 nt, Homo sapiens
  misc_RNA (1)...(19): siRNA sense strand
gaccaagagaugcuguuua

SEQ ID NO: 176875 - RNA, 19 nt, Homo sapiens
  misc_RNA (1)...(19): siRNA sense strand
gugaagcucuugucagaag

SEQ ID NO: 176876 - RNA, 19 nt, Homo sapiens
  misc_RNA (1)...(19): siRNA sense strand
gaagaggcacaaaggaguu

SEQ ID NO: 176877 - RNA, 19 nt, Homo sapiens
  misc_RNA (1)...(19): siRNA sense strand
uaaagaaacaggauucagu

SEQ ID NO: 176878 - RNA, 19 nt, Homo sapiens
  misc_RNA (1)...(19): siRNA sense strand
cagaaacgauggaaagaac

SEQ ID NO: 176879 - RNA, 19 nt, Homo sapiens
  misc_RNA (1)...(19): siRNA sense strand
uaacacaugcugccauuuc

SEQ ID NO: 176880 - RNA, 19 nt, Homo sapiens
  misc_RNA (1)...(19): siRNA sense strand
agaaagaaucgguuaaaug

SEQ ID NO: 176881 - RNA, 19 nt, Homo sapiens
  misc_RNA (1)...(19): siRNA sense strand
gccaacagaugaccaagag

SEQ ID NO: 176882 - RNA, 19 nt, Homo sapiens
  misc_RNA (1)...(19): siRNA sense strand
gaaacgauggaaagaacuu

SEQ ID NO: 176883 - RNA, 19 nt, Homo sapiens
  misc_RNA (1)...(19): siRNA sense strand
caacagaugaccaagagau

SEQ ID NO: 176884 - RNA, 19 nt, Homo sapiens
  misc_RNA (1)...(19): siRNA sense strand
ccuaacacaugcugccauu

SEQ ID NO: 176885 - RNA, 19 nt, Homo sapiens
  misc_RNA (1)...(19): siRNA sense strand
gaagaugugaagucguauu

SEQ ID NO: 176886 - RNA, 19 nt, Homo sapiens
  misc_RNA (1)...(19): siRNA sense strand
gguuaaaugugcacaguac

SEQ ID NO: 176887 - RNA, 19 nt, Homo sapiens
  misc_RNA (1)...(19): siRNA sense strand
ccagaacaauaucucacuu

SEQ ID NO: 176888 - RNA, 19 nt, Homo sapiens
  misc_RNA (1)...(19): siRNA sense strand
caauggaggagaacaguga

SEQ ID NO: 176889 - RNA, 19 nt, Homo sapiens
  misc_RNA (1)...(19): siRNA sense strand
agaacaauaucucacuuuc

SEQ ID NO: 176890 - RNA, 19 nt, Homo sapiens
  misc_RNA (1)...(19): siRNA sense strand
acagagauguaagcccaua

SEQ ID NO: 176891 - RNA, 19 nt, Homo sapiens
  misc_RNA (1)...(19): siRNA sense strand
ccaguuuaguugacauaga

SEQ ID NO: 176892 - RNA, 19 nt, Homo sapiens
  misc_RNA (1)...(19): siRNA sense strand
gagaaucuggcuccuugaa

SEQ ID NO: 176893 - RNA, 19 nt, Homo sapiens
  misc_RNA (1)...(19): siRNA sense strand
aagaugugaagucguauua

SEQ ID NO: 176894 - RNA, 19 nt, Homo sapiens
  misc_RNA (1)...(19): siRNA sense strand
uaaagggagauucuaguau

SEQ ID NO: 176895 - RNA, 19 nt, Homo sapiens
  misc_RNA (1)...(19): siRNA sense strand
aagauacaauggaggagaa

SEQ ID NO: 176896 - RNA, 19 nt, Homo sapiens
  misc_RNA (1)...(19): siRNA sense strand
gagauguaagcccauauga

SEQ ID NO: 176897 - RNA, 19 nt, Homo sapiens
  misc_RNA (1)...(19): siRNA sense strand
cagaacaauaucucacuuu

SEQ ID NO: 176898 - RNA, 19 nt, Homo sapiens
  misc_RNA (1)...(19): siRNA sense strand
gcaaaaugcugagaaugau

SEQ ID NO: 176899 - RNA, 19 nt, Homo sapiens
  misc_RNA (1)...(19): siRNA sense strand
auaaagggagauucuagua

SEQ ID NO: 176900 - RNA, 19 nt, Homo sapiens
  misc_RNA (1)...(19): siRNA sense strand
ccagcuucauuucucaauu

SEQ ID NO: 176901 - RNA, 19 nt, Homo sapiens
  misc_RNA (1)...(19): siRNA sense strand
ucauagaguggccaaguuu

SEQ ID NO: 176902 - RNA, 19 nt, Homo sapiens
  misc_RNA (1)...(19): siRNA sense strand
guacuuggaaauucgaaau

SEQ ID NO: 176903 - RNA, 19 nt, Homo sapiens
  misc_RNA (1)...(19): siRNA sense strand
guggagaaagaaucgguua

SEQ ID NO: 176904 - RNA, 19 nt, Homo sapiens
  misc_RNA (1)...(19): siRNA sense strand
gaaaacagaaaucgaaaca

SEQ ID NO: 176905 - RNA, 19 nt, Homo sapiens
  misc_RNA (1)...(19): siRNA sense strand
guauaaagggagauucuag

SEQ ID NO: 176906 - RNA, 19 nt, Homo sapiens
  misc_RNA (1)...(19): siRNA sense strand
gaaaccagaacaauaucuc

SEQ ID NO: 176907 - RNA, 19 nt, Homo sapiens
  misc_RNA (1)...(19): siRNA sense strand
ggaacagaauaggucuaga

SEQ ID NO: 176908 - RNA, 19 nt, Homo sapiens
  misc_RNA (1)...(19): siRNA sense strand
acacaggguccacuuccua

SEQ ID NO: 176909 - RNA, 19 nt, Homo sapiens
  misc_RNA (1)...(19): siRNA sense strand
ggacuuuccucuaaaaugc

SEQ ID NO: 176910 - RNA, 19 nt, Homo sapiens
  misc_RNA (1)...(19): siRNA sense strand
ugaucacagucguguuaaa

SEQ ID NO: 176911 - RNA, 19 nt, Homo sapiens
  misc_RNA (1)...(19): siRNA sense strand
ucaccagcuucauuucuca

SEQ ID NO: 176912 - RNA, 19 nt, Homo sapiens
  misc_RNA (1)...(19): siRNA sense strand
ugaccgauguacaggacuu

SEQ ID NO: 176913 - RNA, 19 nt, Homo sapiens
  misc_RNA (1)...(19): siRNA sense strand
gaaggagcaaaauguauaa

SEQ ID NO: 176914 - RNA, 19 nt, Homo sapiens
  misc_RNA (1)...(19): siRNA sense strand
ugacauagaagaggcacaa

SEQ ID NO: 176915 - RNA, 19 nt, Homo sapiens
  misc_RNA (1)...(19): siRNA sense strand
gagcgggaguucgaagagu

SEQ ID NO: 176916 - RNA, 19 nt, Homo sapiens
  misc_RNA (1)...(19): siRNA sense strand
cagaagaccaaagcaguug

SEQ ID NO: 176917 - RNA, 19 nt, Homo sapiens
  misc_RNA (1)...(19): siRNA sense strand
ugaaccgcauuguggagaa

SEQ ID NO: 176918 - RNA, 19 nt, Homo sapiens
  misc_RNA (1)...(19): siRNA sense strand
ccgcuguacuuggaaauuc

SEQ ID NO: 176919 - RNA, 19 nt, Homo sapiens
  misc_RNA (1)...(19): siRNA sense strand
ggagauucuaguauacaga

SEQ ID NO: 176920 - RNA, 19 nt, Homo sapiens
  misc_RNA (1)...(19): siRNA sense strand
ggagcaaaauguauaaagg

SEQ ID NO: 176921 - RNA, 19 nt, Homo sapiens
  misc_RNA (1)...(19): siRNA sense strand
cauagaagaggcacaaagg

SEQ ID NO: 176922 - RNA, 19 nt, Homo sapiens
  misc_RNA (1)...(19): siRNA sense strand
acugacaggugaccgaugu

SEQ ID NO: 176923 - RNA, 19 nt, Homo sapiens
  misc_RNA (1)...(19): siRNA sense strand
gggagauucuaguauacag

SEQ ID NO: 176924 - RNA, 19 nt, Homo sapiens
  misc_RNA (1)...(19): siRNA sense strand
aaauaccgaaugggucuua

SEQ ID NO: 176925 - RNA, 19 nt, Homo sapiens
  misc_RNA (1)...(19): siRNA sense strand
gaucacagucguguuaaac

SEQ ID NO: 176926 - RNA, 19 nt, Homo sapiens
  misc_RNA (1)...(19): siRNA sense strand
gaagaccaaagcaguuguc

SEQ ID NO: 176927 - RNA, 19 nt, Homo sapiens
  misc_RNA (1)...(19): siRNA sense strand
ucuccugccuuugaucauu

SEQ ID NO: 176928 - RNA, 19 nt, Homo sapiens
  misc_RNA (1)...(19): siRNA sense strand
auacagaaacgauggaaag

SEQ ID NO: 176929 - RNA, 19 nt, Homo sapiens
  misc_RNA (1)...(19): siRNA sense strand
ccagaucaacugagauucu

SEQ ID NO: 176930 - RNA, 19 nt, Homo sapiens
  misc_RNA (1)...(19): siRNA sense strand
acuuggaaauucgaaauga

SEQ ID NO: 176931 - RNA, 19 nt, Homo sapiens
  misc_RNA (1)...(19): siRNA sense strand
auacaaugggaacagaaua

SEQ ID NO: 176932 - RNA, 19 nt, Homo sapiens
  misc_RNA (1)...(19): siRNA sense strand
gaaucaccagcuucauuuc

SEQ ID NO: 176933 - RNA, 19 nt, Homo sapiens
  misc_RNA (1)...(19): siRNA sense strand
ccagaaaacagaaaucgaa

SEQ ID NO: 176934 - RNA, 19 nt, Homo sapiens
  misc_RNA (1)...(19): siRNA sense strand
gggaacagaauaggucuag

SEQ ID NO: 176935 - RNA, 19 nt, Homo sapiens
  misc_RNA (1)...(19): siRNA sense strand
cacaaaggaguuacaucuu

SEQ ID NO: 176936 - RNA, 19 nt, Homo sapiens
  misc_RNA (1)...(19): siRNA sense strand
gaucauucaccaaacaaaa

SEQ ID NO: 176937 - RNA, 19 nt, Homo sapiens
  misc_RNA (1)...(19): siRNA sense strand
acagaaacgauggaaagaa

SEQ ID NO: 176938 - RNA, 19 nt, Homo sapiens
  misc_RNA (1)...(19): siRNA sense strand
agaaggagcaaaauguaua

SEQ ID NO: 176939 - RNA, 19 nt, Homo sapiens
  misc_RNA (1)...(19): siRNA sense strand
guacagaccuuuaaaguua

SEQ ID NO: 176940 - RNA, 19 nt, Homo sapiens
  misc_RNA (1)...(19): siRNA sense strand
guagggaucugcacaauuu

SEQ ID NO: 176941 - RNA, 19 nt, Homo sapiens
  misc_RNA (1)...(19): siRNA sense strand
cagauaaccuugcaaauga

SEQ ID NO: 176942 - RNA, 19 nt, Homo sapiens
  misc_RNA (1)...(19): siRNA sense strand
gagaaaugcuggucacaaa

SEQ ID NO: 176943 - RNA, 19 nt, Homo sapiens
  misc_RNA (1)...(19): siRNA sense strand
gcagggaaaugaagauuau

SEQ ID NO: 176944 - RNA, 19 nt, Homo sapiens
  misc_RNA (1)...(19): siRNA sense strand
gaucagaaguugucacuca

SEQ ID NO: 176945 - RNA, 19 nt, Homo sapiens
  misc_RNA (1)...(19): siRNA sense strand
agaggaaccugcccauuua

SEQ ID NO: 176946 - RNA, 19 nt, Homo sapiens
  misc_RNA (1)...(19): siRNA sense strand
gaucaaaucguguuaauca

SEQ ID NO: 176947 - RNA, 19 nt, Homo sapiens
  misc_RNA (1)...(19): siRNA sense strand
ggaaacggaagauguauuu

SEQ ID NO: 176948 - RNA, 19 nt, Homo sapiens
  misc_RNA (1)...(19): siRNA sense strand
auaaagaugugcugccuua

SEQ ID NO: 176949 - RNA, 19 nt, Homo sapiens
  misc_RNA (1)...(19): siRNA sense strand
ggacggugcugauccaguu

SEQ ID NO: 176950 - RNA, 19 nt, Homo sapiens
  misc_RNA (1)...(19): siRNA sense strand
gagaggaaccugcccauuu

SEQ ID NO: 176951 - RNA, 19 nt, Homo sapiens
  misc_RNA (1)...(19): siRNA sense strand
caaaugaaaugaccuacau

SEQ ID NO: 176952 - RNA, 19 nt, Homo sapiens
  misc_RNA (1)...(19): siRNA sense strand
gaagaagguuuaguccaaa

SEQ ID NO: 176953 - RNA, 19 nt, Homo sapiens
  misc_RNA (1)...(19): siRNA sense strand
agacagcgauucugaaguu

SEQ ID NO: 176954 - RNA, 19 nt, Homo sapiens
  misc_RNA (1)...(19): siRNA sense strand
gcagauaaccuugcaaaug

SEQ ID NO: 176955 - RNA, 19 nt, Homo sapiens
  misc_RNA (1)...(19): siRNA sense strand
ugaagaagguuuaguccaa

SEQ ID NO: 176956 - RNA, 19 nt, Homo sapiens
  misc_RNA (1)...(19): siRNA sense strand
ggaguuacccaaagagaaa

SEQ ID NO: 176957 - RNA, 19 nt, Homo sapiens
  misc_RNA (1)...(19): siRNA sense strand
caaaucguguuaaucaaug

SEQ ID NO: 176958 - RNA, 19 nt, Homo sapiens
  misc_RNA (1)...(19): siRNA sense strand
caaguuacgugaacaugga

SEQ ID NO: 176959 - RNA, 19 nt, Homo sapiens
  misc_RNA (1)...(19): siRNA sense strand
guacuacugugacaagaau

SEQ ID NO: 176960 - RNA, 19 nt, Homo sapiens
  misc_RNA (1)...(19): siRNA sense strand
gcggacaccugcauuccua

SEQ ID NO: 176961 - RNA, 19 nt, Homo sapiens
  misc_RNA (1)...(19): siRNA sense strand
caacugaagauggauauuu

SEQ ID NO: 176962 - RNA, 19 nt, Homo sapiens
  misc_RNA (1)...(19): siRNA sense strand
gaaacagccaugugccuaa

SEQ ID NO: 176963 - RNA, 19 nt, Homo sapiens
  misc_RNA (1)...(19): siRNA sense strand
gaacgagggcggaccaaau

SEQ ID NO: 176964 - RNA, 19 nt, Homo sapiens
  misc_RNA (1)...(19): siRNA sense strand
gaccaaaugucaccaguac

SEQ ID NO: 176965 - RNA, 19 nt, Homo sapiens
  misc_RNA (1)...(19): siRNA sense strand
aaaccaggcacuuguauuu

SEQ ID NO: 176966 - RNA, 19 nt, Homo sapiens
  misc_RNA (1)...(19): siRNA sense strand
aagaugugcugccuuauga

SEQ ID NO: 176967 - RNA, 19 nt, Homo sapiens
  misc_RNA (1)...(19): siRNA sense strand
cagcgagccucuccuaguu

SEQ ID NO: 176968 - RNA, 19 nt, Homo sapiens
  misc_RNA (1)...(19): siRNA sense strand
ggacagcgagccucuccua

SEQ ID NO: 176969 - RNA, 19 nt, Homo sapiens
  misc_RNA (1)...(19): siRNA sense strand
ccaacacacugcagcaaga

SEQ ID NO: 176970 - RNA, 19 nt, Homo sapiens
  misc_RNA (1)...(19): siRNA sense strand
aaagcuaccugacccagaa

SEQ ID NO: 176971 - RNA, 19 nt, Homo sapiens
  misc_RNA (1)...(19): siRNA sense strand
gcaaagccaucaggaagca

SEQ ID NO: 176972 - RNA, 19 nt, Homo sapiens
  misc_RNA (1)...(19): siRNA sense strand
gggaucaaaucguguuaau

SEQ ID NO: 176973 - RNA, 19 nt, Homo sapiens
  misc_RNA (1)...(19): siRNA sense strand
gaaaugcuggucacaaaca

SEQ ID NO: 176974 - RNA, 19 nt, Homo sapiens
  misc_RNA (1)...(19): siRNA sense strand
gaacacacagugacacauc

SEQ ID NO: 176975 - RNA, 19 nt, Homo sapiens
  misc_RNA (1)...(19): siRNA sense strand
ugacaccacccggguauua

SEQ ID NO: 176976 - RNA, 19 nt, Homo sapiens
  misc_RNA (1)...(19): siRNA sense strand
cagaaguugucacucauug

SEQ ID NO: 176977 - RNA, 19 nt, Homo sapiens
  misc_RNA (1)...(19): siRNA sense strand
acaaguacaucgccacuca

SEQ ID NO: 176978 - RNA, 19 nt, Homo sapiens
  misc_RNA (1)...(19): siRNA sense strand
acaagacacuggccagguu

SEQ ID NO: 176979 - RNA, 19 nt, Homo sapiens
  misc_RNA (1)...(19): siRNA sense strand
ugacacaucuccaguacgu

SEQ ID NO: 176980 - RNA, 19 nt, Homo sapiens
  misc_RNA (1)...(19): siRNA sense strand
ggugacagcuacuuagucu

SEQ ID NO: 176981 - RNA, 19 nt, Homo sapiens
  misc_RNA (1)...(19): siRNA sense strand
gaucagcagcucuuagaug

SEQ ID NO: 176982 - RNA, 19 nt, Homo sapiens
  misc_RNA (1)...(19): siRNA sense strand
ugacaagaaugauaauggu

SEQ ID NO: 176983 - RNA, 19 nt, Homo sapiens
  misc_RNA (1)...(19): siRNA sense strand
ugacagcuacuuagucuug

SEQ ID NO: 176984 - RNA, 19 nt, Homo sapiens
  misc_RNA (1)...(19): siRNA sense strand
gguacagaccuuuaaaguu

SEQ ID NO: 176985 - RNA, 19 nt, Homo sapiens
  misc_RNA (1)...(19): siRNA sense strand
gaaagccacgccacucuuc

SEQ ID NO: 176986 - RNA, 19 nt, Homo sapiens
  misc_RNA (1)...(19): siRNA sense strand
ggaccaaaugucaccagua

SEQ ID NO: 176987 - RNA, 19 nt, Homo sapiens
  misc_RNA (1)...(19): siRNA sense strand
caucaagccaguacaaguu

SEQ ID NO: 176988 - RNA, 19 nt, Homo sapiens
  misc_RNA (1)...(19): siRNA sense strand
gcacuuagaaaccaagagu

SEQ ID NO: 176989 - RNA, 19 nt, Homo sapiens
  misc_RNA (1)...(19): siRNA sense strand
gcaaagcugccucaaaauu

SEQ ID NO: 176990 - RNA, 19 nt, Homo sapiens
  misc_RNA (1)...(19): siRNA sense strand
uugagcaacucuacagaaa

SEQ ID NO: 176991 - RNA, 19 nt, Homo sapiens
  misc_RNA (1)...(19): siRNA sense strand
ggaagaacacacagugaca

SEQ ID NO: 176992 - RNA, 19 nt, Homo sapiens
  misc_RNA (1)...(19): siRNA sense strand
ggacugcaccaucgccuau

SEQ ID NO: 176993 - RNA, 19 nt, Homo sapiens
  misc_RNA (1)...(19): siRNA sense strand
guugacgacucucacagaa

SEQ ID NO: 176994 - RNA, 19 nt, Homo sapiens
  misc_RNA (1)...(19): siRNA sense strand
caucauccaggcuaucuuu

SEQ ID NO: 176995 - RNA, 19 nt, Homo sapiens
  misc_RNA (1)...(19): siRNA sense strand
gaaguugucacucauuguc

SEQ ID NO: 176996 - RNA, 19 nt, Homo sapiens
  misc_RNA (1)...(19): siRNA sense strand
aaaccgauauaaagaugug

SEQ ID NO: 176997 - RNA, 19 nt, Homo sapiens
  misc_RNA (1)...(19): siRNA sense strand
uaacaaaagucgaaucucu

SEQ ID NO: 176998 - RNA, 19 nt, Homo sapiens
  misc_RNA (1)...(19): siRNA sense strand
gcaaaugaaaugaccuaca

SEQ ID NO: 176999 - RNA, 19 nt, Homo sapiens
  misc_RNA (1)...(19): siRNA sense strand
ccucggaguuacccaaaga

SEQ ID NO: 177000 - RNA, 19 nt, Homo sapiens
  misc_RNA (1)...(19): siRNA sense strand
gucgguaaauaaccaauau

SEQ ID NO: 177001 - RNA, 19 nt, Homo sapiens
  misc_RNA (1)...(19): siRNA sense strand
gaacauauuguggccuuca

SEQ ID NO: 177002 - RNA, 19 nt, Homo sapiens
  misc_RNA (1)...(19): siRNA sense strand
uaacucagcagugguucua

SEQ ID NO: 177003 - RNA, 19 nt, Homo sapiens
  misc_RNA (1)...(19): siRNA sense strand
agagaaaacucgaucagaa

SEQ ID NO: 177004 - RNA, 19 nt, Homo sapiens
  misc_RNA (1)...(19): siRNA sense strand
gacuauaauucuuccauac

SEQ ID NO: 177005 - RNA, 19 nt, Homo sapiens
  misc_RNA (1)...(19): siRNA sense strand
gagcagcacagugggcuaa

SEQ ID NO: 177006 - RNA, 19 nt, Homo sapiens
  misc_RNA (1)...(19): siRNA sense strand
gcgagccucuccuaguuca

SEQ ID NO: 177007 - RNA, 19 nt, Homo sapiens
  misc_RNA (1)...(19): siRNA sense strand
cgaugacuccuccgacuuu

SEQ ID NO: 177008 - RNA, 19 nt, Homo sapiens
  misc_RNA (1)...(19): siRNA sense strand
ccaaaugucaccaguacug

SEQ ID NO: 177009 - RNA, 19 nt, Homo sapiens
  misc_RNA (1)...(19): siRNA sense strand
ucucagaacacacgcauga

SEQ ID NO: 177010 - RNA, 19 nt, Homo sapiens
  misc_RNA (1)...(19): siRNA sense strand
gaacgaaggggaucaaauc

SEQ ID NO: 177011 - RNA, 19 nt, Homo sapiens
  misc_RNA (1)...(19): siRNA sense strand
gaauuaccgaucuugcaaa

SEQ ID NO: 177012 - RNA, 19 nt, Homo sapiens
  misc_RNA (1)...(19): siRNA sense strand
aacugaagauggauauuug

SEQ ID NO: 177013 - RNA, 19 nt, Homo sapiens
  misc_RNA (1)...(19): siRNA sense strand
uaaagaagggccucgaaag

SEQ ID NO: 177014 - RNA, 19 nt, Homo sapiens
  misc_RNA (1)...(19): siRNA sense strand
gaacaauccggcacaaagc

SEQ ID NO: 177015 - RNA, 19 nt, Homo sapiens
  misc_RNA (1)...(19): siRNA sense strand
gauaaccuugcaaaugaaa

SEQ ID NO: 177016 - RNA, 19 nt, Homo sapiens
  misc_RNA (1)...(19): siRNA sense strand
gaauccagggaacauauug

SEQ ID NO: 177017 - RNA, 19 nt, Homo sapiens
  misc_RNA (1)...(19): siRNA sense strand
gaagcaagcaaagccauca

SEQ ID NO: 177018 - RNA, 19 nt, Homo sapiens
  misc_RNA (1)...(19): siRNA sense strand
gcguuggguggaagaauua

SEQ ID NO: 177019 - RNA, 19 nt, Homo sapiens
  misc_RNA (1)...(19): siRNA sense strand
caaagcugccucaaaauuu

SEQ ID NO: 177020 - RNA, 19 nt, Homo sapiens
  misc_RNA (1)...(19): siRNA sense strand
uugcaaagcugccucaaaa

SEQ ID NO: 177021 - RNA, 19 nt, Homo sapiens
  misc_RNA (1)...(19): siRNA sense strand
acacacgcaugaccaagug

SEQ ID NO: 177022 - RNA, 19 nt, Homo sapiens
  misc_RNA (1)...(19): siRNA sense strand
gaccuaaugauuggaauug

SEQ ID NO: 177023 - RNA, 19 nt, Homo sapiens
  misc_RNA (1)...(19): siRNA sense strand
caagcaaagccaucaggaa

SEQ ID NO: 177024 - RNA, 19 nt, Homo sapiens
  misc_RNA (1)...(19): siRNA sense strand
gaauccugcuauaucaaca

SEQ ID NO: 177025 - RNA, 19 nt, Homo sapiens
  misc_RNA (1)...(19): siRNA sense strand
aaugcuggauccuaguuaa

SEQ ID NO: 177026 - RNA, 19 nt, Homo sapiens
  misc_RNA (1)...(19): siRNA sense strand
uaaacuaugugaggucucu

SEQ ID NO: 177027 - RNA, 19 nt, Homo sapiens
  misc_RNA (1)...(19): siRNA sense strand
gccuaugugucccgagaaa

SEQ ID NO: 177028 - RNA, 19 nt, Homo sapiens
  misc_RNA (1)...(19): siRNA sense strand
cuaaagaagggccucgaaa

SEQ ID NO: 177029 - RNA, 19 nt, Homo sapiens
  misc_RNA (1)...(19): siRNA sense strand
uaauggugacagcuacuua

SEQ ID NO: 177030 - RNA, 19 nt, Homo sapiens
  misc_RNA (1)...(19): siRNA sense strand
caagacagcgauucugaag

SEQ ID NO: 177031 - RNA, 19 nt, Homo sapiens
  misc_RNA (1)...(19): siRNA sense strand
ucacggaaacggaagaugu

SEQ ID NO: 177032 - RNA, 19 nt, Homo sapiens
  misc_RNA (1)...(19): siRNA sense strand
gacagaaacaggcugaauc

SEQ ID NO: 177033 - RNA, 19 nt, Homo sapiens
  misc_RNA (1)...(19): siRNA sense strand
caaaccaggcacuuguauu

SEQ ID NO: 177034 - RNA, 19 nt, Homo sapiens
  misc_RNA (1)...(19): siRNA sense strand
caaaugcuggauccuaguu

SEQ ID NO: 177035 - RNA, 19 nt, Homo sapiens
  misc_RNA (1)...(19): siRNA sense strand
ccauuuacccacuggauau

SEQ ID NO: 177036 - RNA, 19 nt, Homo sapiens
  misc_RNA (1)...(19): siRNA sense strand
gauggauauuugcgaagga

SEQ ID NO: 177037 - RNA, 19 nt, Homo sapiens
  misc_RNA (1)...(19): siRNA sense strand
aucagcagcucuuagauga

SEQ ID NO: 177038 - RNA, 19 nt, Homo sapiens
  misc_RNA (1)...(19): siRNA sense strand
ccuccgacuuucuggaauu

SEQ ID NO: 177039 - RNA, 19 nt, Homo sapiens
  misc_RNA (1)...(19): siRNA sense strand
gaacaaggcuccucuaugg

SEQ ID NO: 177040 - RNA, 19 nt, Homo sapiens
  misc_RNA (1)...(19): siRNA sense strand
gcacggaaauuaauggauu

SEQ ID NO: 177041 - RNA, 19 nt, Homo sapiens
  misc_RNA (1)...(19): siRNA sense strand
gaacaguccugacacaguu

SEQ ID NO: 177042 - RNA, 19 nt, Homo sapiens
  misc_RNA (1)...(19): siRNA sense strand
gcaacaagaucuagaaagu

SEQ ID NO: 177043 - RNA, 19 nt, Homo sapiens
  misc_RNA (1)...(19): siRNA sense strand
gaagaaggcuuuguuaaac

SEQ ID NO: 177044 - RNA, 19 nt, Homo sapiens
  misc_RNA (1)...(19): siRNA sense strand
caagagggcuggcaaggaa

SEQ ID NO: 177045 - RNA, 19 nt, Homo sapiens
  misc_RNA (1)...(19): siRNA sense strand
acagagauauuucgccuua

SEQ ID NO: 177046 - RNA, 19 nt, Homo sapiens
  misc_RNA (1)...(19): siRNA sense strand
ggaaccaaauucauuauuc

SEQ ID NO: 177047 - RNA, 19 nt, Homo sapiens
  misc_RNA (1)...(19): siRNA sense strand
caggaggaauucugauuua

SEQ ID NO: 177048 - RNA, 19 nt, Homo sapiens
  misc_RNA (1)...(19): siRNA sense strand
caagguggcuggauccaaa

SEQ ID NO: 177049 - RNA, 19 nt, Homo sapiens
  misc_RNA (1)...(19): siRNA sense strand
ugacugagcaggacuauuu

SEQ ID NO: 177050 - RNA, 19 nt, Homo sapiens
  misc_RNA (1)...(19): siRNA sense strand
caggcuaccucucagauua

SEQ ID NO: 177051 - RNA, 19 nt, Homo sapiens
  misc_RNA (1)...(19): siRNA sense strand
aaacacagcacguaccuua

SEQ ID NO: 177052 - RNA, 19 nt, Homo sapiens
  misc_RNA (1)...(19): siRNA sense strand
ggaggaauucugauuuaua

SEQ ID NO: 177053 - RNA, 19 nt, Homo sapiens
  misc_RNA (1)...(19): siRNA sense strand
gaagaugccugugauugug

SEQ ID NO: 177054 - RNA, 19 nt, Homo sapiens
  misc_RNA (1)...(19): siRNA sense strand
gcaugaaucuagagaaaca

SEQ ID NO: 177055 - RNA, 19 nt, Homo sapiens
  misc_RNA (1)...(19): siRNA sense strand
cgagugacuuucuagauuu

SEQ ID NO: 177056 - RNA, 19 nt, Homo sapiens
  misc_RNA (1)...(19): siRNA sense strand
ggaagaugacccuauuuaa

SEQ ID NO: 177057 - RNA, 19 nt, Homo sapiens
  misc_RNA (1)...(19): siRNA sense strand
gcagaugacuugggaacaa

SEQ ID NO: 177058 - RNA, 19 nt, Homo sapiens
  misc_RNA (1)...(19): siRNA sense strand
gcacguaccuuagaacucu

SEQ ID NO: 177059 - RNA, 19 nt, Homo sapiens
  misc_RNA (1)...(19): siRNA sense strand
gcugaugauuccacagaua

SEQ ID NO: 177060 - RNA, 19 nt, Homo sapiens
  misc_RNA (1)...(19): siRNA sense strand
ugaagaaggcuuuguuaaa

SEQ ID NO: 177061 - RNA, 19 nt, Homo sapiens
  misc_RNA (1)...(19): siRNA sense strand
ccaaacaccuagucaauac

SEQ ID NO: 177062 - RNA, 19 nt, Homo sapiens
  misc_RNA (1)...(19): siRNA sense strand
ccacacacuuguacagauu

SEQ ID NO: 177063 - RNA, 19 nt, Homo sapiens
  misc_RNA (1)...(19): siRNA sense strand
ggaccaaguuguacugauc

SEQ ID NO: 177064 - RNA, 19 nt, Homo sapiens
  misc_RNA (1)...(19): siRNA sense strand
gaaguaguaagcagaaauu

SEQ ID NO: 177065 - RNA, 19 nt, Homo sapiens
  misc_RNA (1)...(19): siRNA sense strand
gaaauuaugauuggaguga

SEQ ID NO: 177066 - RNA, 19 nt, Homo sapiens
  misc_RNA (1)...(19): siRNA sense strand
gauccaaacaaaccaauaa

SEQ ID NO: 177067 - RNA, 19 nt, Homo sapiens
  misc_RNA (1)...(19): siRNA sense strand
gaaggaaacacugccuaua

SEQ ID NO: 177068 - RNA, 19 nt, Homo sapiens
  misc_RNA (1)...(19): siRNA sense strand
caagcgaaguguuuguaaa

SEQ ID NO: 177069 - RNA, 19 nt, Homo sapiens
  misc_RNA (1)...(19): siRNA sense strand
ucaggaagaugacccuauu

SEQ ID NO: 177070 - RNA, 19 nt, Homo sapiens
  misc_RNA (1)...(19): siRNA sense strand
gaacguggcagaguuaaau

SEQ ID NO: 177071 - RNA, 19 nt, Homo sapiens
  misc_RNA (1)...(19): siRNA sense strand
ccaaauuaccucagaauau

SEQ ID NO: 177072 - RNA, 19 nt, Homo sapiens
  misc_RNA (1)...(19): siRNA sense strand
gaccuaaugcuguauauga

SEQ ID NO: 177073 - RNA, 19 nt, Homo sapiens
  misc_RNA (1)...(19): siRNA sense strand
ccacaggcaguucaucuua

SEQ ID NO: 177074 - RNA, 19 nt, Homo sapiens
  misc_RNA (1)...(19): siRNA sense strand
gaaaagaauugcaugaauc

SEQ ID NO: 177075 - RNA, 19 nt, Homo sapiens
  misc_RNA (1)...(19): siRNA sense strand
gcgaaguguuuguaaauca

SEQ ID NO: 177076 - RNA, 19 nt, Homo sapiens
  misc_RNA (1)...(19): siRNA sense strand
gcaaagaaaaggcaaauaa

SEQ ID NO: 177077 - RNA, 19 nt, Homo sapiens
  misc_RNA (1)...(19): siRNA sense strand
ggaguugaauuccacuaug

SEQ ID NO: 177078 - RNA, 19 nt, Homo sapiens
  misc_RNA (1)...(19): siRNA sense strand
gaagaugacccuauuuaac

SEQ ID NO: 177079 - RNA, 19 nt, Homo sapiens
  misc_RNA (1)...(19): siRNA sense strand
uauggaugcuaccaaguua

SEQ ID NO: 177080 - RNA, 19 nt, Homo sapiens
  misc_RNA (1)...(19): siRNA sense strand
gaucagaagaugccuguga

SEQ ID NO: 177081 - RNA, 19 nt, Homo sapiens
  misc_RNA (1)...(19): siRNA sense strand
gagaaacauuauugggauu

SEQ ID NO: 177082 - RNA, 19 nt, Homo sapiens
  misc_RNA (1)...(19): siRNA sense strand
gaacaggguacgaaugaau

SEQ ID NO: 177083 - RNA, 19 nt, Homo sapiens
  misc_RNA (1)...(19): siRNA sense strand
gaucagaguaacaaugaaa

SEQ ID NO: 177084 - RNA, 19 nt, Homo sapiens
  misc_RNA (1)...(19): siRNA sense strand
ggagugaugucaggaggaa

SEQ ID NO: 177085 - RNA, 19 nt, Homo sapiens
  misc_RNA (1)...(19): siRNA sense strand
gcaggacuauuuugguuua

SEQ ID NO: 177086 - RNA, 19 nt, Homo sapiens
  misc_RNA (1)...(19): siRNA sense strand
ggaagaacccguuguuguc

SEQ ID NO: 177087 - RNA, 19 nt, Homo sapiens
  misc_RNA (1)...(19): siRNA sense strand
ggauaacacuguacaagcu

SEQ ID NO: 177088 - RNA, 19 nt, Homo sapiens
  misc_RNA (1)...(19): siRNA sense strand
guaguaagcagaaauucaa

SEQ ID NO: 177089 - RNA, 19 nt, Homo sapiens
  misc_RNA (1)...(19): siRNA sense strand
caaacaaaccaauaaggaa

SEQ ID NO: 177090 - RNA, 19 nt, Homo sapiens
  misc_RNA (1)...(19): siRNA sense strand
gcaaauaaagacaggguau

SEQ ID NO: 177091 - RNA, 19 nt, Homo sapiens
  misc_RNA (1)...(19): siRNA sense strand
gaccucacguuuccgauug

SEQ ID NO: 177092 - RNA, 19 nt, Homo sapiens
  misc_RNA (1)...(19): siRNA sense strand
gagccagauuuccaguaua

SEQ ID NO: 177093 - RNA, 19 nt, Homo sapiens
  misc_RNA (1)...(19): siRNA sense strand
cagguugugcuguuuauua

SEQ ID NO: 177094 - RNA, 19 nt, Homo sapiens
  misc_RNA (1)...(19): siRNA sense strand
ucagagaucuccgucauca

SEQ ID NO: 177095 - RNA, 19 nt, Homo sapiens
  misc_RNA (1)...(19): siRNA sense strand
guggaaagcauguguagaa

SEQ ID NO: 177096 - RNA, 19 nt, Homo sapiens
  misc_RNA (1)...(19): siRNA sense strand
ucgagugacuuucuagauu

SEQ ID NO: 177097 - RNA, 19 nt, Homo sapiens
  misc_RNA (1)...(19): siRNA sense strand
caucgaaauucuacauuca

SEQ ID NO: 177098 - RNA, 19 nt, Homo sapiens
  misc_RNA (1)...(19): siRNA sense strand
ccaacaaguuacaagaaga

SEQ ID NO: 177099 - RNA, 19 nt, Homo sapiens
  misc_RNA (1)...(19): siRNA sense strand
gaucagguugugcuguuua

SEQ ID NO: 177100 - RNA, 19 nt, Homo sapiens
  misc_RNA (1)...(19): siRNA sense strand
gggaggauaugaucagaag

SEQ ID NO: 177101 - RNA, 19 nt, Homo sapiens
  misc_RNA (1)...(19): siRNA sense strand
caagaucuagaaagucaua

SEQ ID NO: 177102 - RNA, 19 nt, Homo sapiens
  misc_RNA (1)...(19): siRNA sense strand
caagaagaauauacaaggu

SEQ ID NO: 177103 - RNA, 19 nt, Homo sapiens
  misc_RNA (1)...(19): siRNA sense strand
ccaaacaaaccaauaagga

SEQ ID NO: 177104 - RNA, 19 nt, Homo sapiens
  misc_RNA (1)...(19): siRNA sense strand
gggaucagaguaacaauga

SEQ ID NO: 177105 - RNA, 19 nt, Homo sapiens
  misc_RNA (1)...(19): siRNA sense strand
caacaaguuacaagaagaa

SEQ ID NO: 177106 - RNA, 19 nt, Homo sapiens
  misc_RNA (1)...(19): siRNA sense strand
uaagaacaaugagagauca

SEQ ID NO: 177107 - RNA, 19 nt, Homo sapiens
  misc_RNA (1)...(19): siRNA sense strand
gaaacagccaugugucuca

SEQ ID NO: 177108 - RNA, 19 nt, Homo sapiens
  misc_RNA (1)...(19): siRNA sense strand
ggaacaaggcuccucuaug

SEQ ID NO: 177109 - RNA, 19 nt, Homo sapiens
  misc_RNA (1)...(19): siRNA sense strand
aauguccugugccaaauua

SEQ ID NO: 177110 - RNA, 19 nt, Homo sapiens
  misc_RNA (1)...(19): siRNA sense strand
ggaaucaucaccaucacaa

SEQ ID NO: 177111 - RNA, 19 nt, Homo sapiens
  misc_RNA (1)...(19): siRNA sense strand
caucuucaguuggucauuu

SEQ ID NO: 177112 - RNA, 19 nt, Homo sapiens
  misc_RNA (1)...(19): siRNA sense strand
aacaagaucuagaaaguca

SEQ ID NO: 177113 - RNA, 19 nt, Homo sapiens
  misc_RNA (1)...(19): siRNA sense strand
ucacucagauccaguacau

SEQ ID NO: 177114 - RNA, 19 nt, Homo sapiens
  misc_RNA (1)...(19): siRNA sense strand
caucaaugcgaacuauaua

SEQ ID NO: 177115 - RNA, 19 nt, Homo sapiens
  misc_RNA (1)...(19): siRNA sense strand
gaaugaaaccugaugaaaa

SEQ ID NO: 177116 - RNA, 19 nt, Homo sapiens
  misc_RNA (1)...(19): siRNA sense strand
agagauauuucgccuuaug

SEQ ID NO: 177117 - RNA, 19 nt, Homo sapiens
  misc_RNA (1)...(19): siRNA sense strand
uauaugauguaguggaaga

SEQ ID NO: 177118 - RNA, 19 nt, Homo sapiens
  misc_RNA (1)...(19): siRNA sense strand
ccaauaaggaagcagcuaa

SEQ ID NO: 177119 - RNA, 19 nt, Homo sapiens
  misc_RNA (1)...(19): siRNA sense strand
gaaacacugccuauaucuu

SEQ ID NO: 177120 - RNA, 19 nt, Homo sapiens
  misc_RNA (1)...(19): siRNA sense strand
cuacaucaaugcgaacuau

SEQ ID NO: 177121 - RNA, 19 nt, Homo sapiens
  misc_RNA (1)...(19): siRNA sense strand
gagaaagccccacuagaua

SEQ ID NO: 177122 - RNA, 19 nt, Homo sapiens
  misc_RNA (1)...(19): siRNA sense strand
gcauuguucuggaaucauc

SEQ ID NO: 177123 - RNA, 19 nt, Homo sapiens
  misc_RNA (1)...(19): siRNA sense strand
uaauagcauuguucuggaa

SEQ ID NO: 177124 - RNA, 19 nt, Homo sapiens
  misc_RNA (1)...(19): siRNA sense strand
uuacgaccaucuucaguug

SEQ ID NO: 177125 - RNA, 19 nt, Homo sapiens
  misc_RNA (1)...(19): siRNA sense strand
gaacuccuaaucaucgaaa

SEQ ID NO: 177126 - RNA, 19 nt, Homo sapiens
  misc_RNA (1)...(19): siRNA sense strand
gcccuuggcacggaaauua

SEQ ID NO: 177127 - RNA, 19 nt, Homo sapiens
  misc_RNA (1)...(19): siRNA sense strand
cuucaagcaucuagauuug

SEQ ID NO: 177128 - RNA, 19 nt, Homo sapiens
  misc_RNA (1)...(19): siRNA sense strand
gcagaacacacucaugauc

SEQ ID NO: 177129 - RNA, 19 nt, Homo sapiens
  misc_RNA (1)...(19): siRNA sense strand
gauaaucuuguccuaauca

SEQ ID NO: 177130 - RNA, 19 nt, Homo sapiens
  misc_RNA (1)...(19): siRNA sense strand
cauuugauauuccaucuuc

SEQ ID NO: 177131 - RNA, 19 nt, Homo sapiens
  misc_RNA (1)...(19): siRNA sense strand
aauaucugaugacagguua

SEQ ID NO: 177132 - RNA, 19 nt, Homo sapiens
  misc_RNA (1)...(19): siRNA sense strand
uguagaacaucacacauuc

SEQ ID NO: 177133 - RNA, 19 nt, Homo sapiens
  misc_RNA (1)...(19): siRNA sense strand
aggcuuaucuccugcagaa

SEQ ID NO: 177134 - RNA, 19 nt, Homo sapiens
  misc_RNA (1)...(19): siRNA sense strand
ugggagaacugaaguccaa

SEQ ID NO: 177135 - RNA, 19 nt, Homo sapiens
  misc_RNA (1)...(19): siRNA sense strand
caaggaagaacccguuguu

SEQ ID NO: 177136 - RNA, 19 nt, Homo sapiens
  misc_RNA (1)...(19): siRNA sense strand
ugagccagauuuccaguau

SEQ ID NO: 177137 - RNA, 19 nt, Homo sapiens
  misc_RNA (1)...(19): siRNA sense strand
gauugugucucgaguagca

SEQ ID NO: 177138 - RNA, 19 nt, Homo sapiens
  misc_RNA (1)...(19): siRNA sense strand
guaaagggaggauaugauc

SEQ ID NO: 177139 - RNA, 19 nt, Homo sapiens
  misc_RNA (1)...(19): siRNA sense strand
ugacagagcugguggagua

SEQ ID NO: 177140 - RNA, 19 nt, Homo sapiens
  misc_RNA (1)...(19): siRNA sense strand
gggaggaguuugagaguuu

SEQ ID NO: 177141 - RNA, 19 nt, Homo sapiens
  misc_RNA (1)...(19): siRNA sense strand
gcaagaaccgcuacaagaa

SEQ ID NO: 177142 - RNA, 19 nt, Homo sapiens
  misc_RNA (1)...(19): siRNA sense strand
gaacaaaugcgucccauac

SEQ ID NO: 177143 - RNA, 19 nt, Homo sapiens
  misc_RNA (1)...(19): siRNA sense strand
gagaaaggccggaacaaau

SEQ ID NO: 177144 - RNA, 19 nt, Homo sapiens
  misc_RNA (1)...(19): siRNA sense strand
ccaagggccuggacuguga

SEQ ID NO: 177145 - RNA, 19 nt, Homo sapiens
  misc_RNA (1)...(19): siRNA sense strand
gggaucaggugacccauau

SEQ ID NO: 177146 - RNA, 19 nt, Homo sapiens
  misc_RNA (1)...(19): siRNA sense strand
ugacacaaccgaauacaaa

SEQ ID NO: 177147 - RNA, 19 nt, Homo sapiens
  misc_RNA (1)...(19): siRNA sense strand
ggauuucuaugaccuguau

SEQ ID NO: 177148 - RNA, 19 nt, Homo sapiens
  misc_RNA (1)...(19): siRNA sense strand
ggagaaaggccggaacaaa

SEQ ID NO: 177149 - RNA, 19 nt, Homo sapiens
  misc_RNA (1)...(19): siRNA sense strand
ggacaauggagaccugauu

SEQ ID NO: 177150 - RNA, 19 nt, Homo sapiens
  misc_RNA (1)...(19): siRNA sense strand
gcacaggcaccaucauugu

SEQ ID NO: 177151 - RNA, 19 nt, Homo sapiens
  misc_RNA (1)...(19): siRNA sense strand
gaacaagagggaggagaaa

SEQ ID NO: 177152 - RNA, 19 nt, Homo sapiens
  misc_RNA (1)...(19): siRNA sense strand
augagaaccugcacacuaa

SEQ ID NO: 177153 - RNA, 19 nt, Homo sapiens
  misc_RNA (1)...(19): siRNA sense strand
ggcaagaaccgcuacaaga

SEQ ID NO: 177154 - RNA, 19 nt, Homo sapiens
  misc_RNA (1)...(19): siRNA sense strand
acaaggaggauguguauga

SEQ ID NO: 177155 - RNA, 19 nt, Homo sapiens
  misc_RNA (1)...(19): siRNA sense strand
gggagaaguuugcgacucu

SEQ ID NO: 177156 - RNA, 19 nt, Homo sapiens
  misc_RNA (1)...(19): siRNA sense strand
uaugagaaccugcacacua

SEQ ID NO: 177157 - RNA, 19 nt, Homo sapiens
  misc_RNA (1)...(19): siRNA sense strand
gcuccgaucccacuaguga

SEQ ID NO: 177158 - RNA, 19 nt, Homo sapiens
  misc_RNA (1)...(19): siRNA sense strand
gaucaggugacccauauuc

SEQ ID NO: 177159 - RNA, 19 nt, Homo sapiens
  misc_RNA (1)...(19): siRNA sense strand
cuacaucaaugccaacuac

SEQ ID NO: 177160 - RNA, 19 nt, Homo sapiens
  misc_RNA (1)...(19): siRNA sense strand
auacaaacuccguaccuua

SEQ ID NO: 177161 - RNA, 19 nt, Homo sapiens
  misc_RNA (1)...(19): siRNA sense strand
ggaacaaaugcgucccaua

SEQ ID NO: 177162 - RNA, 19 nt, Homo sapiens
  misc_RNA (1)...(19): siRNA sense strand
ccaacuacaucaagaacca

SEQ ID NO: 177163 - RNA, 19 nt, Homo sapiens
  misc_RNA (1)...(19): siRNA sense strand
acaaaugcgucccauacug

SEQ ID NO: 177164 - RNA, 19 nt, Homo sapiens
  misc_RNA (1)...(19): siRNA sense strand
gagcaugacacaaccgaau

SEQ ID NO: 177165 - RNA, 19 nt, Homo sapiens
  misc_RNA (1)...(19): siRNA sense strand
ucaaguacccgcugaacug

SEQ ID NO: 177166 - RNA, 19 nt, Homo sapiens
  misc_RNA (1)...(19): siRNA sense strand
gggaggagaaagugaagaa

SEQ ID NO: 177167 - RNA, 19 nt, Homo sapiens
  misc_RNA (1)...(19): siRNA sense strand
ggccuggacugugacauug

SEQ ID NO: 177168 - RNA, 19 nt, Homo sapiens
  misc_RNA (1)...(19): siRNA sense strand
agaaaggccggaacaaaug

SEQ ID NO: 177169 - RNA, 19 nt, Homo sapiens
  misc_RNA (1)...(19): siRNA sense strand
gcuaggcccugaugagaac

SEQ ID NO: 177170 - RNA, 19 nt, Homo sapiens
  misc_RNA (1)...(19): siRNA sense strand
cagagcugguggaguacua

SEQ ID NO: 177171 - RNA, 19 nt, Homo sapiens
  misc_RNA (1)...(19): siRNA sense strand
gcaagaaccagggugacuu

SEQ ID NO: 177172 - RNA, 19 nt, Homo sapiens
  misc_RNA (1)...(19): siRNA sense strand
ggaggaguuugagaguuug

SEQ ID NO: 177173 - RNA, 19 nt, Homo sapiens
  misc_RNA (1)...(19): siRNA sense strand
ggagaacagccgugucauc

SEQ ID NO: 177174 - RNA, 19 nt, Homo sapiens
  misc_RNA (1)...(19): siRNA sense strand
aggaggauguguaugagaa

SEQ ID NO: 177175 - RNA, 19 nt, Homo sapiens
  misc_RNA (1)...(19): siRNA sense strand
gacauugacauccagaaga

SEQ ID NO: 177176 - RNA, 19 nt, Homo sapiens
  misc_RNA (1)...(19): siRNA sense strand
ucauugaaaccacuaagaa

SEQ ID NO: 177177 - RNA, 19 nt, Homo sapiens
  misc_RNA (1)...(19): siRNA sense strand
ggccaucgcccaguucauu

SEQ ID NO: 177178 - RNA, 19 nt, Homo sapiens
  misc_RNA (1)...(19): siRNA sense strand
gcaugcagcgugcuuaugg

SEQ ID NO: 177179 - RNA, 19 nt, Homo sapiens
  misc_RNA (1)...(19): siRNA sense strand
gaacucaggggauuucuau

SEQ ID NO: 177180 - RNA, 19 nt, Homo sapiens
  misc_RNA (1)...(19): siRNA sense strand
gagaaccugcacacuaaga

SEQ ID NO: 177181 - RNA, 19 nt, Homo sapiens
  misc_RNA (1)...(19): siRNA sense strand
agacggaggcgcaguacaa

SEQ ID NO: 177182 - RNA, 19 nt, Homo sapiens
  misc_RNA (1)...(19): siRNA sense strand
uaugggcccuacucuguga

SEQ ID NO: 177183 - RNA, 19 nt, Homo sapiens
  misc_RNA (1)...(19): siRNA sense strand
aagaaccgcuacaagaaca

SEQ ID NO: 177184 - RNA, 19 nt, Homo sapiens
  misc_RNA (1)...(19): siRNA sense strand
gcaccaucauugucaucga

SEQ ID NO: 177185 - RNA, 19 nt, Homo sapiens
  misc_RNA (1)...(19): siRNA sense strand
aagcaggaguccgaggaua

SEQ ID NO: 177186 - RNA, 19 nt, Homo sapiens
  misc_RNA (1)...(19): siRNA sense strand
gaaccgcuacaagaacauu

SEQ ID NO: 177187 - RNA, 19 nt, Homo sapiens
  misc_RNA (1)...(19): siRNA sense strand
caagaaccagggugacuuc

SEQ ID NO: 177188 - RNA, 19 nt, Homo sapiens
  misc_RNA (1)...(19): siRNA sense strand
caaggaggauguguaugag

SEQ ID NO: 177189 - RNA, 19 nt, Homo sapiens
  misc_RNA (1)...(19): siRNA sense strand
gaaguuugcgacucugaca

SEQ ID NO: 177190 - RNA, 19 nt, Homo sapiens
  misc_RNA (1)...(19): siRNA sense strand
gcaccaucauccaccucaa

SEQ ID NO: 177191 - RNA, 19 nt, Homo sapiens
  misc_RNA (1)...(19): siRNA sense strand
gggccuggacugugacauu

SEQ ID NO: 177192 - RNA, 19 nt, Homo sapiens
  misc_RNA (1)...(19): siRNA sense strand
agcaggaggugaagaacuu

SEQ ID NO: 177193 - RNA, 19 nt, Homo sapiens
  misc_RNA (1)...(19): siRNA sense strand
gcuacacagugggugguuu

SEQ ID NO: 177194 - RNA, 19 nt, Homo sapiens
  misc_RNA (1)...(19): siRNA sense strand
caggagaacagccguguca

SEQ ID NO: 177195 - RNA, 19 nt, Homo sapiens
  misc_RNA (1)...(19): siRNA sense strand
ggacugugacauugacauc

SEQ ID NO: 177196 - RNA, 19 nt, Homo sapiens
  misc_RNA (1)...(19): siRNA sense strand
agaagcaggaggugaagaa

SEQ ID NO: 177197 - RNA, 19 nt, Homo sapiens
  misc_RNA (1)...(19): siRNA sense strand
ggucagcagacaaggagaa

SEQ ID NO: 177198 - RNA, 19 nt, Homo sapiens
  misc_RNA (1)...(19): siRNA sense strand
uucgggagaucuggcauua

SEQ ID NO: 177199 - RNA, 19 nt, Homo sapiens
  misc_RNA (1)...(19): siRNA sense strand
gacaauggagaccugauuc

SEQ ID NO: 177200 - RNA, 19 nt, Homo sapiens
  misc_RNA (1)...(19): siRNA sense strand
gcccugaugagaacgcuaa

SEQ ID NO: 177201 - RNA, 19 nt, Homo sapiens
  misc_RNA (1)...(19): siRNA sense strand
aggagaaagugaagaagca

SEQ ID NO: 177202 - RNA, 19 nt, Homo sapiens
  misc_RNA (1)...(19): siRNA sense strand
ugaaaccacuaagaagaag

SEQ ID NO: 177203 - RNA, 19 nt, Homo sapiens
  misc_RNA (1)...(19): siRNA sense strand
cggaggcgcaguacaaguu

SEQ ID NO: 177204 - RNA, 19 nt, Homo sapiens
  misc_RNA (1)...(19): siRNA sense strand
caucaaugccaacuacauc

SEQ ID NO: 177205 - RNA, 19 nt, Homo sapiens
  misc_RNA (1)...(19): siRNA sense strand
caagagggaggagaaagug

SEQ ID NO: 177206 - RNA, 19 nt, Homo sapiens
  misc_RNA (1)...(19): siRNA sense strand
gcaguacaaguucaucuac

SEQ ID NO: 177207 - RNA, 19 nt, Homo sapiens
  misc_RNA (1)...(19): siRNA sense strand
aauacaaacuccguaccuu

SEQ ID NO: 177208 - RNA, 19 nt, Homo sapiens
  misc_RNA (1)...(19): siRNA sense strand
gagaaguuugcgacucuga

SEQ ID NO: 177209 - RNA, 19 nt, Homo sapiens
  misc_RNA (1)...(19): siRNA sense strand
gaaaggccggaacaaaugc

SEQ ID NO: 177210 - RNA, 19 nt, Homo sapiens
  misc_RNA (1)...(19): siRNA sense strand
gaaccgaguguuggaacug

SEQ ID NO: 177211 - RNA, 19 nt, Homo sapiens
  misc_RNA (1)...(19): siRNA sense strand
guacgggaacaucaccuau

SEQ ID NO: 177212 - RNA, 19 nt, Homo sapiens
  misc_RNA (1)...(19): siRNA sense strand
cccgagagguggagaaagg

SEQ ID NO: 177213 - RNA, 19 nt, Homo sapiens
  misc_RNA (1)...(19): siRNA sense strand
caagaaccgcuacaagaac

SEQ ID NO: 177214 - RNA, 19 nt, Homo sapiens
  misc_RNA (1)...(19): siRNA sense strand
gaagcaggaguccgaggau

SEQ ID NO: 177215 - RNA, 19 nt, Homo sapiens
  misc_RNA (1)...(19): siRNA sense strand
caaacuccguaccuuacag

SEQ ID NO: 177216 - RNA, 19 nt, Homo sapiens
  misc_RNA (1)...(19): siRNA sense strand
gaauacaaacuccguaccu

SEQ ID NO: 177217 - RNA, 19 nt, Homo sapiens
  misc_RNA (1)...(19): siRNA sense strand
gcaggaguccgaggauaca

SEQ ID NO: 177218 - RNA, 19 nt, Homo sapiens
  misc_RNA (1)...(19): siRNA sense strand
agaacaagagggaggagaa

SEQ ID NO: 177219 - RNA, 19 nt, Homo sapiens
  misc_RNA (1)...(19): siRNA sense strand
ccgcacaggcaccaucauu

SEQ ID NO: 177220 - RNA, 19 nt, Homo sapiens
  misc_RNA (1)...(19): siRNA sense strand
gggcaagaaccgcuacaag

SEQ ID NO: 177221 - RNA, 19 nt, Homo sapiens
  misc_RNA (1)...(19): siRNA sense strand
caucaagaaccagcugcua

SEQ ID NO: 177222 - RNA, 19 nt, Homo sapiens
  misc_RNA (1)...(19): siRNA sense strand
uugaaaccacuaagaagaa

SEQ ID NO: 177223 - RNA, 19 nt, Homo sapiens
  misc_RNA (1)...(19): siRNA sense strand
caucauccaccucaaguac

SEQ ID NO: 177224 - RNA, 19 nt, Homo sapiens
  misc_RNA (1)...(19): siRNA sense strand
gggcaugcagcgugcuuau

SEQ ID NO: 177225 - RNA, 19 nt, Homo sapiens
  misc_RNA (1)...(19): siRNA sense strand
ccagagaacaagggcaaga

SEQ ID NO: 177226 - RNA, 19 nt, Homo sapiens
  misc_RNA (1)...(19): siRNA sense strand
cagcagacaaggagaagag

SEQ ID NO: 177227 - RNA, 19 nt, Homo sapiens
  misc_RNA (1)...(19): siRNA sense strand
gaaccugcacacuaagaac

SEQ ID NO: 177228 - RNA, 19 nt, Homo sapiens
  misc_RNA (1)...(19): siRNA sense strand
gaucaaccagcggcaggaa

SEQ ID NO: 177229 - RNA, 19 nt, Homo sapiens
  misc_RNA (1)...(19): siRNA sense strand
cuacacagugggugguuug

SEQ ID NO: 177230 - RNA, 19 nt, Homo sapiens
  misc_RNA (1)...(19): siRNA sense strand
aaugccaacuacaucaaga

SEQ ID NO: 177231 - RNA, 19 nt, Homo sapiens
  misc_RNA (1)...(19): siRNA sense strand
cuuaugggcccuacucugu

SEQ ID NO: 177232 - RNA, 19 nt, Homo sapiens
  misc_RNA (1)...(19): siRNA sense strand
aagcagcggucagcagaca

SEQ ID NO: 177233 - RNA, 19 nt, Homo sapiens
  misc_RNA (1)...(19): siRNA sense strand
gaggcgcaguacaaguuca

SEQ ID NO: 177234 - RNA, 19 nt, Homo sapiens
  misc_RNA (1)...(19): siRNA sense strand
gcaugacacaaccgaauac

SEQ ID NO: 177235 - RNA, 19 nt, Homo sapiens
  misc_RNA (1)...(19): siRNA sense strand
cagagaacaagggcaagaa

SEQ ID NO: 177236 - RNA, 19 nt, Homo sapiens
  misc_RNA (1)...(19): siRNA sense strand
cagacaaggagaagagcaa

SEQ ID NO: 177237 - RNA, 19 nt, Homo sapiens
  misc_RNA (1)...(19): siRNA sense strand
acauugacauccagaagac

SEQ ID NO: 177238 - RNA, 19 nt, Homo sapiens
  misc_RNA (1)...(19): siRNA sense strand
agagggaggagaaagugaa

SEQ ID NO: 177239 - RNA, 19 nt, Homo sapiens
  misc_RNA (1)...(19): siRNA sense strand
ugacagagcugguggagua

SEQ ID NO: 177240 - RNA, 19 nt, Homo sapiens
  misc_RNA (1)...(19): siRNA sense strand
gggaggaguuugagaguuu

SEQ ID NO: 177241 - RNA, 19 nt, Homo sapiens
  misc_RNA (1)...(19): siRNA sense strand
gcaagaaccgcuacaagaa

SEQ ID NO: 177242 - RNA, 19 nt, Homo sapiens
  misc_RNA (1)...(19): siRNA sense strand
gaacaaaugcgucccauac

SEQ ID NO: 177243 - RNA, 19 nt, Homo sapiens
  misc_RNA (1)...(19): siRNA sense strand
gagaaaggccggaacaaau

SEQ ID NO: 177244 - RNA, 19 nt, Homo sapiens
  misc_RNA (1)...(19): siRNA sense strand
ccaagggccuggacuguga

SEQ ID NO: 177245 - RNA, 19 nt, Homo sapiens
  misc_RNA (1)...(19): siRNA sense strand
gggaucaggugacccauau

SEQ ID NO: 177246 - RNA, 19 nt, Homo sapiens
  misc_RNA (1)...(19): siRNA sense strand
ugacacaaccgaauacaaa

SEQ ID NO: 177247 - RNA, 19 nt, Homo sapiens
  misc_RNA (1)...(19): siRNA sense strand
ggauuucuaugaccuguau

SEQ ID NO: 177248 - RNA, 19 nt, Homo sapiens
  misc_RNA (1)...(19): siRNA sense strand
ggagaaaggccggaacaaa

SEQ ID NO: 177249 - RNA, 19 nt, Homo sapiens
  misc_RNA (1)...(19): siRNA sense strand
ggacaauggagaccugauu

SEQ ID NO: 177250 - RNA, 19 nt, Homo sapiens
  misc_RNA (1)...(19): siRNA sense strand
gcacaggcaccaucauugu

SEQ ID NO: 177251 - RNA, 19 nt, Homo sapiens
  misc_RNA (1)...(19): siRNA sense strand
gaacaagagggaggagaaa

SEQ ID NO: 177252 - RNA, 19 nt, Homo sapiens
  misc_RNA (1)...(19): siRNA sense strand
augagaaccugcacacuaa

SEQ ID NO: 177253 - RNA, 19 nt, Homo sapiens
  misc_RNA (1)...(19): siRNA sense strand
ggcaagaaccgcuacaaga

SEQ ID NO: 177254 - RNA, 19 nt, Homo sapiens
  misc_RNA (1)...(19): siRNA sense strand
acaaggaggauguguauga

SEQ ID NO: 177255 - RNA, 19 nt, Homo sapiens
  misc_RNA (1)...(19): siRNA sense strand
gggagaaguuugcgacucu

SEQ ID NO: 177256 - RNA, 19 nt, Homo sapiens
  misc_RNA (1)...(19): siRNA sense strand
uaugagaaccugcacacua

SEQ ID NO: 177257 - RNA, 19 nt, Homo sapiens
  misc_RNA (1)...(19): siRNA sense strand
gcuccgaucccacuaguga

SEQ ID NO: 177258 - RNA, 19 nt, Homo sapiens
  misc_RNA (1)...(19): siRNA sense strand
gaucaggugacccauauuc

SEQ ID NO: 177259 - RNA, 19 nt, Homo sapiens
  misc_RNA (1)...(19): siRNA sense strand
cuacaucaaugccaacuac

SEQ ID NO: 177260 - RNA, 19 nt, Homo sapiens
  misc_RNA (1)...(19): siRNA sense strand
auacaaacuccguaccuua

SEQ ID NO: 177261 - RNA, 19 nt, Homo sapiens
  misc_RNA (1)...(19): siRNA sense strand
ggaacaaaugcgucccaua

SEQ ID NO: 177262 - RNA, 19 nt, Homo sapiens
  misc_RNA (1)...(19): siRNA sense strand
ccaacuacaucaagaacca

SEQ ID NO: 177263 - RNA, 19 nt, Homo sapiens
  misc_RNA (1)...(19): siRNA sense strand
acaaaugcgucccauacug

SEQ ID NO: 177264 - RNA, 19 nt, Homo sapiens
  misc_RNA (1)...(19): siRNA sense strand
gagcaugacacaaccgaau

SEQ ID NO: 177265 - RNA, 19 nt, Homo sapiens
  misc_RNA (1)...(19): siRNA sense strand
ucaaguacccgcugaacug

SEQ ID NO: 177266 - RNA, 19 nt, Homo sapiens
  misc_RNA (1)...(19): siRNA sense strand
gggaggagaaagugaagaa

SEQ ID NO: 177267 - RNA, 19 nt, Homo sapiens
  misc_RNA (1)...(19): siRNA sense strand
ggccuggacugugacauug

SEQ ID NO: 177268 - RNA, 19 nt, Homo sapiens
  misc_RNA (1)...(19): siRNA sense strand
agaaaggccggaacaaaug

SEQ ID NO: 177269 - RNA, 19 nt, Homo sapiens
  misc_RNA (1)...(19): siRNA sense strand
gcuaggcccugaugagaac

SEQ ID NO: 177270 - RNA, 19 nt, Homo sapiens
  misc_RNA (1)...(19): siRNA sense strand
cagagcugguggaguacua

SEQ ID NO: 177271 - RNA, 19 nt, Homo sapiens
  misc_RNA (1)...(19): siRNA sense strand
gcaagaaccagggugacuu

SEQ ID NO: 177272 - RNA, 19 nt, Homo sapiens
  misc_RNA (1)...(19): siRNA sense strand
ggaggaguuugagaguuug

SEQ ID NO: 177273 - RNA, 19 nt, Homo sapiens
  misc_RNA (1)...(19): siRNA sense strand
ggagaacagccgugucauc

SEQ ID NO: 177274 - RNA, 19 nt, Homo sapiens
  misc_RNA (1)...(19): siRNA sense strand
aggaggauguguaugagaa

SEQ ID NO: 177275 - RNA, 19 nt, Homo sapiens
  misc_RNA (1)...(19): siRNA sense strand
gacauugacauccagaaga

SEQ ID NO: 177276 - RNA, 19 nt, Homo sapiens
  misc_RNA (1)...(19): siRNA sense strand
ucauugaaaccacuaagaa

SEQ ID NO: 177277 - RNA, 19 nt, Homo sapiens
  misc_RNA (1)...(19): siRNA sense strand
ggccaucgcccaguucauu

SEQ ID NO: 177278 - RNA, 19 nt, Homo sapiens
  misc_RNA (1)...(19): siRNA sense strand
gcaugcagcgugcuuaugg

SEQ ID NO: 177279 - RNA, 19 nt, Homo sapiens
  misc_RNA (1)...(19): siRNA sense strand
gaacucaggggauuucuau

SEQ ID NO: 177280 - RNA, 19 nt, Homo sapiens
  misc_RNA (1)...(19): siRNA sense strand
gagaaccugcacacuaaga

SEQ ID NO: 177281 - RNA, 19 nt, Homo sapiens
  misc_RNA (1)...(19): siRNA sense strand
agacggaggcgcaguacaa

SEQ ID NO: 177282 - RNA, 19 nt, Homo sapiens
  misc_RNA (1)...(19): siRNA sense strand
uaugggcccuacucuguga

SEQ ID NO: 177283 - RNA, 19 nt, Homo sapiens
  misc_RNA (1)...(19): siRNA sense strand
aagaaccgcuacaagaaca

SEQ ID NO: 177284 - RNA, 19 nt, Homo sapiens
  misc_RNA (1)...(19): siRNA sense strand
gcaccaucauugucaucga

SEQ ID NO: 177285 - RNA, 19 nt, Homo sapiens
  misc_RNA (1)...(19): siRNA sense strand
aagcaggaguccgaggaua

SEQ ID NO: 177286 - RNA, 19 nt, Homo sapiens
  misc_RNA (1)...(19): siRNA sense strand
gaaccgcuacaagaacauu

SEQ ID NO: 177287 - RNA, 19 nt, Homo sapiens
  misc_RNA (1)...(19): siRNA sense strand
caagaaccagggugacuuc

SEQ ID NO: 177288 - RNA, 19 nt, Homo sapiens
  misc_RNA (1)...(19): siRNA sense strand
caaggaggauguguaugag

SEQ ID NO: 177289 - RNA, 19 nt, Homo sapiens
  misc_RNA (1)...(19): siRNA sense strand
gaaguuugcgacucugaca

SEQ ID NO: 177290 - RNA, 19 nt, Homo sapiens
  misc_RNA (1)...(19): siRNA sense strand
gcaccaucauccaccucaa

SEQ ID NO: 177291 - RNA, 19 nt, Homo sapiens
  misc_RNA (1)...(19): siRNA sense strand
gggccuggacugugacauu

SEQ ID NO: 177292 - RNA, 19 nt, Homo sapiens
  misc_RNA (1)...(19): siRNA sense strand
agcaggaggugaagaacuu

SEQ ID NO: 177293 - RNA, 19 nt, Homo sapiens
  misc_RNA (1)...(19): siRNA sense strand
gcuacacagugggugguuu

SEQ ID NO: 177294 - RNA, 19 nt, Homo sapiens
  misc_RNA (1)...(19): siRNA sense strand
caggagaacagccguguca

SEQ ID NO: 177295 - RNA, 19 nt, Homo sapiens
  misc_RNA (1)...(19): siRNA sense strand
ggacugugacauugacauc

SEQ ID NO: 177296 - RNA, 19 nt, Homo sapiens
  misc_RNA (1)...(19): siRNA sense strand
agaagcaggaggugaagaa

SEQ ID NO: 177297 - RNA, 19 nt, Homo sapiens
  misc_RNA (1)...(19): siRNA sense strand
ggucagcagacaaggagaa

SEQ ID NO: 177298 - RNA, 19 nt, Homo sapiens
  misc_RNA (1)...(19): siRNA sense strand
uucgggagaucuggcauua

SEQ ID NO: 177299 - RNA, 19 nt, Homo sapiens
  misc_RNA (1)...(19): siRNA sense strand
gacaauggagaccugauuc

SEQ ID NO: 177300 - RNA, 19 nt, Homo sapiens
  misc_RNA (1)...(19): siRNA sense strand
gcccugaugagaacgcuaa

SEQ ID NO: 177301 - RNA, 19 nt, Homo sapiens
  misc_RNA (1)...(19): siRNA sense strand
aggagaaagugaagaagca

SEQ ID NO: 177302 - RNA, 19 nt, Homo sapiens
  misc_RNA (1)...(19): siRNA sense strand
ugaaaccacuaagaagaag

SEQ ID NO: 177303 - RNA, 19 nt, Homo sapiens
  misc_RNA (1)...(19): siRNA sense strand
cggaggcgcaguacaaguu

SEQ ID NO: 177304 - RNA, 19 nt, Homo sapiens
  misc_RNA (1)...(19): siRNA sense strand
caucaaugccaacuacauc

SEQ ID NO: 177305 - RNA, 19 nt, Homo sapiens
  misc_RNA (1)...(19): siRNA sense strand
caagagggaggagaaagug

SEQ ID NO: 177306 - RNA, 19 nt, Homo sapiens
  misc_RNA (1)...(19): siRNA sense strand
gcaguacaaguucaucuac

SEQ ID NO: 177307 - RNA, 19 nt, Homo sapiens
  misc_RNA (1)...(19): siRNA sense strand
aauacaaacuccguaccuu

SEQ ID NO: 177308 - RNA, 19 nt, Homo sapiens
  misc_RNA (1)...(19): siRNA sense strand
gagaaguuugcgacucuga

SEQ ID NO: 177309 - RNA, 19 nt, Homo sapiens
  misc_RNA (1)...(19): siRNA sense strand
gaaaggccggaacaaaugc

SEQ ID NO: 177310 - RNA, 19 nt, Homo sapiens
  misc_RNA (1)...(19): siRNA sense strand
gaaccgaguguuggaacug

SEQ ID NO: 177311 - RNA, 19 nt, Homo sapiens
  misc_RNA (1)...(19): siRNA sense strand
guacgggaacaucaccuau

SEQ ID NO: 177312 - RNA, 19 nt, Homo sapiens
  misc_RNA (1)...(19): siRNA sense strand
cccgagagguggagaaagg

SEQ ID NO: 177313 - RNA, 19 nt, Homo sapiens
  misc_RNA (1)...(19): siRNA sense strand
caagaaccgcuacaagaac

SEQ ID NO: 177314 - RNA, 19 nt, Homo sapiens
  misc_RNA (1)...(19): siRNA sense strand
gaagcaggaguccgaggau

SEQ ID NO: 177315 - RNA, 19 nt, Homo sapiens
  misc_RNA (1)...(19): siRNA sense strand
caaacuccguaccuuacag

SEQ ID NO: 177316 - RNA, 19 nt, Homo sapiens
  misc_RNA (1)...(19): siRNA sense strand
gaauacaaacuccguaccu

SEQ ID NO: 177317 - RNA, 19 nt, Homo sapiens
  misc_RNA (1)...(19): siRNA sense strand
gcaggaguccgaggauaca

SEQ ID NO: 177318 - RNA, 19 nt, Homo sapiens
  misc_RNA (1)...(19): siRNA sense strand
agaacaagagggaggagaa

SEQ ID NO: 177319 - RNA, 19 nt, Homo sapiens
  misc_RNA (1)...(19): siRNA sense strand
ccgcacaggcaccaucauu

SEQ ID NO: 177320 - RNA, 19 nt, Homo sapiens
  misc_RNA (1)...(19): siRNA sense strand
gggcaagaaccgcuacaag

SEQ ID NO: 177321 - RNA, 19 nt, Homo sapiens
  misc_RNA (1)...(19): siRNA sense strand
caucaagaaccagcugcua

SEQ ID NO: 177322 - RNA, 19 nt, Homo sapiens
  misc_RNA (1)...(19): siRNA sense strand
uugaaaccacuaagaagaa

SEQ ID NO: 177323 - RNA, 19 nt, Homo sapiens
  misc_RNA (1)...(19): siRNA sense strand
caucauccaccucaaguac

SEQ ID NO: 177324 - RNA, 19 nt, Homo sapiens
  misc_RNA (1)...(19): siRNA sense strand
gggcaugcagcgugcuuau

SEQ ID NO: 177325 - RNA, 19 nt, Homo sapiens
  misc_RNA (1)...(19): siRNA sense strand
ccagagaacaagggcaaga

SEQ ID NO: 177326 - RNA, 19 nt, Homo sapiens
  misc_RNA (1)...(19): siRNA sense strand
cagcagacaaggagaagag

SEQ ID NO: 177327 - RNA, 19 nt, Homo sapiens
  misc_RNA (1)...(19): siRNA sense strand
gaaccugcacacuaagaac

SEQ ID NO: 177328 - RNA, 19 nt, Homo sapiens
  misc_RNA (1)...(19): siRNA sense strand
gaucaaccagcggcaggaa

SEQ ID NO: 177329 - RNA, 19 nt, Homo sapiens
  misc_RNA (1)...(19): siRNA sense strand
cuacacagugggugguuug

SEQ ID NO: 177330 - RNA, 19 nt, Homo sapiens
  misc_RNA (1)...(19): siRNA sense strand
aaugccaacuacaucaaga

SEQ ID NO: 177331 - RNA, 19 nt, Homo sapiens
  misc_RNA (1)...(19): siRNA sense strand
cuuaugggcccuacucugu

SEQ ID NO: 177332 - RNA, 19 nt, Homo sapiens
  misc_RNA (1)...(19): siRNA sense strand
aagcagcggucagcagaca

SEQ ID NO: 177333 - RNA, 19 nt, Homo sapiens
  misc_RNA (1)...(19): siRNA sense strand
gaggcgcaguacaaguuca

SEQ ID NO: 177334 - RNA, 19 nt, Homo sapiens
  misc_RNA (1)...(19): siRNA sense strand
gcaugacacaaccgaauac

SEQ ID NO: 177335 - RNA, 19 nt, Homo sapiens
  misc_RNA (1)...(19): siRNA sense strand
cagagaacaagggcaagaa

SEQ ID NO: 177336 - RNA, 19 nt, Homo sapiens
  misc_RNA (1)...(19): siRNA sense strand
cagacaaggagaagagcaa

SEQ ID NO: 177337 - RNA, 19 nt, Homo sapiens
  misc_RNA (1)...(19): siRNA sense strand
acauugacauccagaagac

SEQ ID NO: 177338 - RNA, 19 nt, Homo sapiens
  misc_RNA (1)...(19): siRNA sense strand
agagggaggagaaagugaa

SEQ ID NO: 177339 - RNA, 19 nt, Homo sapiens
  misc_RNA (1)...(19): siRNA sense strand
ugacagagcugguggagua

SEQ ID NO: 177340 - RNA, 19 nt, Homo sapiens
  misc_RNA (1)...(19): siRNA sense strand
gggaggaguuugagaguuu

SEQ ID NO: 177341 - RNA, 19 nt, Homo sapiens
  misc_RNA (1)...(19): siRNA sense strand
gcaagaaccgcuacaagaa

SEQ ID NO: 177342 - RNA, 19 nt, Homo sapiens
  misc_RNA (1)...(19): siRNA sense strand
gaacaaaugcgucccauac

SEQ ID NO: 177343 - RNA, 19 nt, Homo sapiens
  misc_RNA (1)...(19): siRNA sense strand
gagaaaggccggaacaaau

SEQ ID NO: 177344 - RNA, 19 nt, Homo sapiens
  misc_RNA (1)...(19): siRNA sense strand
ccaagggccuggacuguga

SEQ ID NO: 177345 - RNA, 19 nt, Homo sapiens
  misc_RNA (1)...(19): siRNA sense strand
gggaucaggugacccauau

SEQ ID NO: 177346 - RNA, 19 nt, Homo sapiens
  misc_RNA (1)...(19): siRNA sense strand
ugacacaaccgaauacaaa

SEQ ID NO: 177347 - RNA, 19 nt, Homo sapiens
  misc_RNA (1)...(19): siRNA sense strand
ggauuucuaugaccuguau

SEQ ID NO: 177348 - RNA, 19 nt, Homo sapiens
  misc_RNA (1)...(19): siRNA sense strand
ggagaaaggccggaacaaa

SEQ ID NO: 177349 - RNA, 19 nt, Homo sapiens
  misc_RNA (1)...(19): siRNA sense strand
ggacaauggagaccugauu

SEQ ID NO: 177350 - RNA, 19 nt, Homo sapiens
  misc_RNA (1)...(19): siRNA sense strand
gcacaggcaccaucauugu

SEQ ID NO: 177351 - RNA, 19 nt, Homo sapiens
  misc_RNA (1)...(19): siRNA sense strand
gaacaagagggaggagaaa

SEQ ID NO: 177352 - RNA, 19 nt, Homo sapiens
  misc_RNA (1)...(19): siRNA sense strand
augagaaccugcacacuaa

SEQ ID NO: 177353 - RNA, 19 nt, Homo sapiens
  misc_RNA (1)...(19): siRNA sense strand
ggcaagaaccgcuacaaga

SEQ ID NO: 177354 - RNA, 19 nt, Homo sapiens
  misc_RNA (1)...(19): siRNA sense strand
acaaggaggauguguauga

SEQ ID NO: 177355 - RNA, 19 nt, Homo sapiens
  misc_RNA (1)...(19): siRNA sense strand
gggagaaguuugcgacucu

SEQ ID NO: 177356 - RNA, 19 nt, Homo sapiens
  misc_RNA (1)...(19): siRNA sense strand
uaugagaaccugcacacua

SEQ ID NO: 177357 - RNA, 19 nt, Homo sapiens
  misc_RNA (1)...(19): siRNA sense strand
gcuccgaucccacuaguga

SEQ ID NO: 177358 - RNA, 19 nt, Homo sapiens
  misc_RNA (1)...(19): siRNA sense strand
gaucaggugacccauauuc

SEQ ID NO: 177359 - RNA, 19 nt, Homo sapiens
  misc_RNA (1)...(19): siRNA sense strand
cuacaucaaugccaacuac

SEQ ID NO: 177360 - RNA, 19 nt, Homo sapiens
  misc_RNA (1)...(19): siRNA sense strand
auacaaacuccguaccuua

SEQ ID NO: 177361 - RNA, 19 nt, Homo sapiens
  misc_RNA (1)...(19): siRNA sense strand
ggaacaaaugcgucccaua

SEQ ID NO: 177362 - RNA, 19 nt, Homo sapiens
  misc_RNA (1)...(19): siRNA sense strand
ccaacuacaucaagaacca

SEQ ID NO: 177363 - RNA, 19 nt, Homo sapiens
  misc_RNA (1)...(19): siRNA sense strand
acaaaugcgucccauacug

SEQ ID NO: 177364 - RNA, 19 nt, Homo sapiens
  misc_RNA (1)...(19): siRNA sense strand
gagcaugacacaaccgaau

SEQ ID NO: 177365 - RNA, 19 nt, Homo sapiens
  misc_RNA (1)...(19): siRNA sense strand
ucaaguacccgcugaacug

SEQ ID NO: 177366 - RNA, 19 nt, Homo sapiens
  misc_RNA (1)...(19): siRNA sense strand
ggccuggacugugacauug

SEQ ID NO: 177367 - RNA, 19 nt, Homo sapiens
  misc_RNA (1)...(19): siRNA sense strand
agaaaggccggaacaaaug

SEQ ID NO: 177368 - RNA, 19 nt, Homo sapiens
  misc_RNA (1)...(19): siRNA sense strand
gcuaggcccugaugagaac

SEQ ID NO: 177369 - RNA, 19 nt, Homo sapiens
  misc_RNA (1)...(19): siRNA sense strand
cagagcugguggaguacua

SEQ ID NO: 177370 - RNA, 19 nt, Homo sapiens
  misc_RNA (1)...(19): siRNA sense strand
gcaagaaccagggugacuu

SEQ ID NO: 177371 - RNA, 19 nt, Homo sapiens
  misc_RNA (1)...(19): siRNA sense strand
ggaggaguuugagaguuug

SEQ ID NO: 177372 - RNA, 19 nt, Homo sapiens
  misc_RNA (1)...(19): siRNA sense strand
ggagaacagccgugucauc

SEQ ID NO: 177373 - RNA, 19 nt, Homo sapiens
  misc_RNA (1)...(19): siRNA sense strand
aggaggauguguaugagaa

SEQ ID NO: 177374 - RNA, 19 nt, Homo sapiens
  misc_RNA (1)...(19): siRNA sense strand
gacauugacauccagaaga

SEQ ID NO: 177375 - RNA, 19 nt, Homo sapiens
  misc_RNA (1)...(19): siRNA sense strand
ucauugaaaccacuaagaa

SEQ ID NO: 177376 - RNA, 19 nt, Homo sapiens
  misc_RNA (1)...(19): siRNA sense strand
ggccaucgcccaguucauu

SEQ ID NO: 177377 - RNA, 19 nt, Homo sapiens
  misc_RNA (1)...(19): siRNA sense strand
gcaugcagcgugcuuaugg

SEQ ID NO: 177378 - RNA, 19 nt, Homo sapiens
  misc_RNA (1)...(19): siRNA sense strand
gagaaccugcacacuaaga

SEQ ID NO: 177379 - RNA, 19 nt, Homo sapiens
  misc_RNA (1)...(19): siRNA sense strand
agacggaggcgcaguacaa

SEQ ID NO: 177380 - RNA, 19 nt, Homo sapiens
  misc_RNA (1)...(19): siRNA sense strand
gaacucaggggauuucuau

SEQ ID NO: 177381 - RNA, 19 nt, Homo sapiens
  misc_RNA (1)...(19): siRNA sense strand
uaugggcccuacucuguga

SEQ ID NO: 177382 - RNA, 19 nt, Homo sapiens
  misc_RNA (1)...(19): siRNA sense strand
aagaaccgcuacaagaaca

SEQ ID NO: 177383 - RNA, 19 nt, Homo sapiens
  misc_RNA (1)...(19): siRNA sense strand
gcaccaucauugucaucga

SEQ ID NO: 177384 - RNA, 19 nt, Homo sapiens
  misc_RNA (1)...(19): siRNA sense strand
aagcaggaguccgaggaua

SEQ ID NO: 177385 - RNA, 19 nt, Homo sapiens
  misc_RNA (1)...(19): siRNA sense strand
gaaccgcuacaagaacauu

SEQ ID NO: 177386 - RNA, 19 nt, Homo sapiens
  misc_RNA (1)...(19): siRNA sense strand
gaaguuugcgacucugaca

SEQ ID NO: 177387 - RNA, 19 nt, Homo sapiens
  misc_RNA (1)...(19): siRNA sense strand
caaggaggauguguaugag

SEQ ID NO: 177388 - RNA, 19 nt, Homo sapiens
  misc_RNA (1)...(19): siRNA sense strand
caagaaccagggugacuuc

SEQ ID NO: 177389 - RNA, 19 nt, Homo sapiens
  misc_RNA (1)...(19): siRNA sense strand
gcaccaucauccaccucaa

SEQ ID NO: 177390 - RNA, 19 nt, Homo sapiens
  misc_RNA (1)...(19): siRNA sense strand
gggccuggacugugacauu

SEQ ID NO: 177391 - RNA, 19 nt, Homo sapiens
  misc_RNA (1)...(19): siRNA sense strand
agcaggaggugaagaacuu

SEQ ID NO: 177392 - RNA, 19 nt, Homo sapiens
  misc_RNA (1)...(19): siRNA sense strand
gcuacacagugggugguuu

SEQ ID NO: 177393 - RNA, 19 nt, Homo sapiens
  misc_RNA (1)...(19): siRNA sense strand
caggagaacagccguguca

SEQ ID NO: 177394 - RNA, 19 nt, Homo sapiens
  misc_RNA (1)...(19): siRNA sense strand
ggacugugacauugacauc

SEQ ID NO: 177395 - RNA, 19 nt, Homo sapiens
  misc_RNA (1)...(19): siRNA sense strand
agaagcaggaggugaagaa

SEQ ID NO: 177396 - RNA, 19 nt, Homo sapiens
  misc_RNA (1)...(19): siRNA sense strand
uucgggagaucuggcauua

SEQ ID NO: 177397 - RNA, 19 nt, Homo sapiens
  misc_RNA (1)...(19): siRNA sense strand
gacaauggagaccugauuc

SEQ ID NO: 177398 - RNA, 19 nt, Homo sapiens
  misc_RNA (1)...(19): siRNA sense strand
gcccugaugagaacgcuaa

SEQ ID NO: 177399 - RNA, 19 nt, Homo sapiens
  misc_RNA (1)...(19): siRNA sense strand
ugaaaccacuaagaagaag

SEQ ID NO: 177400 - RNA, 19 nt, Homo sapiens
  misc_RNA (1)...(19): siRNA sense strand
cggaggcgcaguacaaguu

SEQ ID NO: 177401 - RNA, 19 nt, Homo sapiens
  misc_RNA (1)...(19): siRNA sense strand
caucaaugccaacuacauc

SEQ ID NO: 177402 - RNA, 19 nt, Homo sapiens
  misc_RNA (1)...(19): siRNA sense strand
caagagggaggagaaagug

SEQ ID NO: 177403 - RNA, 19 nt, Homo sapiens
  misc_RNA (1)...(19): siRNA sense strand
gcaguacaaguucaucuac

SEQ ID NO: 177404 - RNA, 19 nt, Homo sapiens
  misc_RNA (1)...(19): siRNA sense strand
gagaaguuugcgacucuga

SEQ ID NO: 177405 - RNA, 19 nt, Homo sapiens
  misc_RNA (1)...(19): siRNA sense strand
aauacaaacuccguaccuu

SEQ ID NO: 177406 - RNA, 19 nt, Homo sapiens
  misc_RNA (1)...(19): siRNA sense strand
gaaaggccggaacaaaugc

SEQ ID NO: 177407 - RNA, 19 nt, Homo sapiens
  misc_RNA (1)...(19): siRNA sense strand
gaaccgaguguuggaacug

SEQ ID NO: 177408 - RNA, 19 nt, Homo sapiens
  misc_RNA (1)...(19): siRNA sense strand
guacgggaacaucaccuau

SEQ ID NO: 177409 - RNA, 19 nt, Homo sapiens
  misc_RNA (1)...(19): siRNA sense strand
cccgagagguggagaaagg

SEQ ID NO: 177410 - RNA, 19 nt, Homo sapiens
  misc_RNA (1)...(19): siRNA sense strand
caagaaccgcuacaagaac

SEQ ID NO: 177411 - RNA, 19 nt, Homo sapiens
  misc_RNA (1)...(19): siRNA sense strand
gaagcaggaguccgaggau

SEQ ID NO: 177412 - RNA, 19 nt, Homo sapiens
  misc_RNA (1)...(19): siRNA sense strand
caaacuccguaccuuacag

SEQ ID NO: 177413 - RNA, 19 nt, Homo sapiens
  misc_RNA (1)...(19): siRNA sense strand
gaauacaaacuccguaccu

SEQ ID NO: 177414 - RNA, 19 nt, Homo sapiens
  misc_RNA (1)...(19): siRNA sense strand
gcaggaguccgaggauaca

SEQ ID NO: 177415 - RNA, 19 nt, Homo sapiens
  misc_RNA (1)...(19): siRNA sense strand
agaacaagagggaggagaa

SEQ ID NO: 177416 - RNA, 19 nt, Homo sapiens
  misc_RNA (1)...(19): siRNA sense strand
ccgcacaggcaccaucauu

SEQ ID NO: 177417 - RNA, 19 nt, Homo sapiens
  misc_RNA (1)...(19): siRNA sense strand
gggcaagaaccgcuacaag

SEQ ID NO: 177418 - RNA, 19 nt, Homo sapiens
  misc_RNA (1)...(19): siRNA sense strand
caucaagaaccagcugcua

SEQ ID NO: 177419 - RNA, 19 nt, Homo sapiens
  misc_RNA (1)...(19): siRNA sense strand
caucauccaccucaaguac

SEQ ID NO: 177420 - RNA, 19 nt, Homo sapiens
  misc_RNA (1)...(19): siRNA sense strand
uugaaaccacuaagaagaa

SEQ ID NO: 177421 - RNA, 19 nt, Homo sapiens
  misc_RNA (1)...(19): siRNA sense strand
gggcaugcagcgugcuuau

SEQ ID NO: 177422 - RNA, 19 nt, Homo sapiens
  misc_RNA (1)...(19): siRNA sense strand
ccagagaacaagggcaaga

SEQ ID NO: 177423 - RNA, 19 nt, Homo sapiens
  misc_RNA (1)...(19): siRNA sense strand
gaaccugcacacuaagaac

SEQ ID NO: 177424 - RNA, 19 nt, Homo sapiens
  misc_RNA (1)...(19): siRNA sense strand
gaucaaccagcggcaggaa

SEQ ID NO: 177425 - RNA, 19 nt, Homo sapiens
  misc_RNA (1)...(19): siRNA sense strand
aaugccaacuacaucaaga

SEQ ID NO: 177426 - RNA, 19 nt, Homo sapiens
  misc_RNA (1)...(19): siRNA sense strand
cuacacagugggugguuug

SEQ ID NO: 177427 - RNA, 19 nt, Homo sapiens
  misc_RNA (1)...(19): siRNA sense strand
cuuaugggcccuacucugu

SEQ ID NO: 177428 - RNA, 19 nt, Homo sapiens
  misc_RNA (1)...(19): siRNA sense strand
gaggcgcaguacaaguuca

SEQ ID NO: 177429 - RNA, 19 nt, Homo sapiens
  misc_RNA (1)...(19): siRNA sense strand
gcaugacacaaccgaauac

SEQ ID NO: 177430 - RNA, 19 nt, Homo sapiens
  misc_RNA (1)...(19): siRNA sense strand
cagagaacaagggcaagaa

SEQ ID NO: 177431 - RNA, 19 nt, Homo sapiens
  misc_RNA (1)...(19): siRNA sense strand
acauugacauccagaagac

SEQ ID NO: 177432 - RNA, 19 nt, Homo sapiens
  misc_RNA (1)...(19): siRNA sense strand
ucaaugccaacuacaucaa

SEQ ID NO: 177433 - RNA, 19 nt, Homo sapiens
  misc_RNA (1)...(19): siRNA sense strand
acaagagggaggagaaagu

SEQ ID NO: 177434 - RNA, 19 nt, Homo sapiens
  misc_RNA (1)...(19): siRNA sense strand
ggaggcgcaguacaaguuc

SEQ ID NO: 177435 - RNA, 19 nt, Homo sapiens
  misc_RNA (1)...(19): siRNA sense strand
cgggagaucuggcauuacc

SEQ ID NO: 177436 - RNA, 19 nt, Homo sapiens
  misc_RNA (1)...(19): siRNA sense strand
uggaggccacggucaauga

SEQ ID NO: 177437 - RNA, 19 nt, Homo sapiens
  misc_RNA (1)...(19): siRNA sense strand
ggagaggauucaaauauua

SEQ ID NO: 177438 - RNA, 19 nt, Homo sapiens
  misc_RNA (1)...(19): siRNA sense strand
gagaauaccuaucgugauu

SEQ ID NO: 177439 - RNA, 19 nt, Homo sapiens
  misc_RNA (1)...(19): siRNA sense strand
ggaauggacugguguuuau

SEQ ID NO: 177440 - RNA, 19 nt, Homo sapiens
  misc_RNA (1)...(19): siRNA sense strand
gaauguggcugucaaguuc

SEQ ID NO: 177441 - RNA, 19 nt, Homo sapiens
  misc_RNA (1)...(19): siRNA sense strand
aaacaacgcuagaaauuca

SEQ ID NO: 177442 - RNA, 19 nt, Homo sapiens
  misc_RNA (1)...(19): siRNA sense strand
gggagaggauucaaauauu

SEQ ID NO: 177443 - RNA, 19 nt, Homo sapiens
  misc_RNA (1)...(19): siRNA sense strand
ggacugguguuuaucuaug

SEQ ID NO: 177444 - RNA, 19 nt, Homo sapiens
  misc_RNA (1)...(19): siRNA sense strand
ugaagaaggugcugauugu

SEQ ID NO: 177445 - RNA, 19 nt, Homo sapiens
  misc_RNA (1)...(19): siRNA sense strand
ugaggaauaugaagacauu

SEQ ID NO: 177446 - RNA, 19 nt, Homo sapiens
  misc_RNA (1)...(19): siRNA sense strand
ucgaagagauuaacaagug

SEQ ID NO: 177447 - RNA, 19 nt, Homo sapiens
  misc_RNA (1)...(19): siRNA sense strand
gaauaccuaucgugauuuc

SEQ ID NO: 177448 - RNA, 19 nt, Homo sapiens
  misc_RNA (1)...(19): siRNA sense strand
aaauugaucucgccacuug

SEQ ID NO: 177449 - RNA, 19 nt, Homo sapiens
  misc_RNA (1)...(19): siRNA sense strand
ucagacagauuacaucaau

SEQ ID NO: 177450 - RNA, 19 nt, Homo sapiens
  misc_RNA (1)...(19): siRNA sense strand
ggaccaaacuagagugaag

SEQ ID NO: 177451 - RNA, 19 nt, Homo sapiens
  misc_RNA (1)...(19): siRNA sense strand
gaaaacaacgcuagaaauu

SEQ ID NO: 177452 - RNA, 19 nt, Homo sapiens
  misc_RNA (1)...(19): siRNA sense strand
gaaggaaggcauuguaaag

SEQ ID NO: 177453 - RNA, 19 nt, Homo sapiens
  misc_RNA (1)...(19): siRNA sense strand
caaacuagagugaagcuaa

SEQ ID NO: 177454 - RNA, 19 nt, Homo sapiens
  misc_RNA (1)...(19): siRNA sense strand
gcaagaaaguccuaaaccu

SEQ ID NO: 177455 - RNA, 19 nt, Homo sapiens
  misc_RNA (1)...(19): siRNA sense strand
ggaaggaaggcauuguaaa

SEQ ID NO: 177456 - RNA, 19 nt, Homo sapiens
  misc_RNA (1)...(19): siRNA sense strand
ccaagcaguuucucgaaga

SEQ ID NO: 177457 - RNA, 19 nt, Homo sapiens
  misc_RNA (1)...(19): siRNA sense strand
gcaaggaaucuaugaggaa

SEQ ID NO: 177458 - RNA, 19 nt, Homo sapiens
  misc_RNA (1)...(19): siRNA sense strand
ggacaguucaguacaaugu

SEQ ID NO: 177459 - RNA, 19 nt, Homo sapiens
  misc_RNA (1)...(19): siRNA sense strand
gagcuuggcacccuuaaug

SEQ ID NO: 177460 - RNA, 19 nt, Homo sapiens
  misc_RNA (1)...(19): siRNA sense strand
gagaaaguguggccaguac

SEQ ID NO: 177461 - RNA, 19 nt, Homo sapiens
  misc_RNA (1)...(19): siRNA sense strand
gaaucuaugaggaauauga

SEQ ID NO: 177462 - RNA, 19 nt, Homo sapiens
  misc_RNA (1)...(19): siRNA sense strand
ggaauguggcugucaaguu

SEQ ID NO: 177463 - RNA, 19 nt, Homo sapiens
  misc_RNA (1)...(19): siRNA sense strand
gccauacucagacagauua

SEQ ID NO: 177464 - RNA, 19 nt, Homo sapiens
  misc_RNA (1)...(19): siRNA sense strand
ugacaugugugguucuaau

SEQ ID NO: 177465 - RNA, 19 nt, Homo sapiens
  misc_RNA (1)...(19): siRNA sense strand
gcuagaaauucacaacaca

SEQ ID NO: 177466 - RNA, 19 nt, Homo sapiens
  misc_RNA (1)...(19): siRNA sense strand
gaagacauucgucgugaga

SEQ ID NO: 177467 - RNA, 19 nt, Homo sapiens
  misc_RNA (1)...(19): siRNA sense strand
cuaauuaugccaacuuuga

SEQ ID NO: 177468 - RNA, 19 nt, Homo sapiens
  misc_RNA (1)...(19): siRNA sense strand
ccagaucccuucgaugaga

SEQ ID NO: 177469 - RNA, 19 nt, Homo sapiens
  misc_RNA (1)...(19): siRNA sense strand
cagcuucccucauugacuu

SEQ ID NO: 177470 - RNA, 19 nt, Homo sapiens
  misc_RNA (1)...(19): siRNA sense strand
caaggaaucuaugaggaau

SEQ ID NO: 177471 - RNA, 19 nt, Homo sapiens
  misc_RNA (1)...(19): siRNA sense strand
ggagaaaguguggccagua

SEQ ID NO: 177472 - RNA, 19 nt, Homo sapiens
  misc_RNA (1)...(19): siRNA sense strand
guggauagcuuugaaacuc

SEQ ID NO: 177473 - RNA, 19 nt, Homo sapiens
  misc_RNA (1)...(19): siRNA sense strand
acaguucaguacaauguuu

SEQ ID NO: 177474 - RNA, 19 nt, Homo sapiens
  misc_RNA (1)...(19): siRNA sense strand
caugugugguucuaauuau

SEQ ID NO: 177475 - RNA, 19 nt, Homo sapiens
  misc_RNA (1)...(19): siRNA sense strand
gaggaaggcggcaggagaa

SEQ ID NO: 177476 - RNA, 19 nt, Homo sapiens
  misc_RNA (1)...(19): siRNA sense strand
uagaauuguuccacuccua

SEQ ID NO: 177477 - RNA, 19 nt, Homo sapiens
  misc_RNA (1)...(19): siRNA sense strand
uuacaucaaugccaguuuc

SEQ ID NO: 177478 - RNA, 19 nt, Homo sapiens
  misc_RNA (1)...(19): siRNA sense strand
cgaaguggccauacucaga

SEQ ID NO: 177479 - RNA, 19 nt, Homo sapiens
  misc_RNA (1)...(19): siRNA sense strand
cgagugcccuauuccauca

SEQ ID NO: 177480 - RNA, 19 nt, Homo sapiens
  misc_RNA (1)...(19): siRNA sense strand
acaagucaguccaacaugu

SEQ ID NO: 177481 - RNA, 19 nt, Homo sapiens
  misc_RNA (1)...(19): siRNA sense strand
gaaggcggcaggagaaagu

SEQ ID NO: 177482 - RNA, 19 nt, Homo sapiens
  misc_RNA (1)...(19): siRNA sense strand
gaaaguguggccaguacug

SEQ ID NO: 177483 - RNA, 19 nt, Homo sapiens
  misc_RNA (1)...(19): siRNA sense strand
gacugguguuuaucuauga

SEQ ID NO: 177484 - RNA, 19 nt, Homo sapiens
  misc_RNA (1)...(19): siRNA sense strand
gggagugucuuccagaaaa

SEQ ID NO: 177485 - RNA, 19 nt, Homo sapiens
  misc_RNA (1)...(19): siRNA sense strand
cgggagaggauucaaauau

SEQ ID NO: 177486 - RNA, 19 nt, Homo sapiens
  misc_RNA (1)...(19): siRNA sense strand
gaucucgccacuuggaauu

SEQ ID NO: 177487 - RNA, 19 nt, Homo sapiens
  misc_RNA (1)...(19): siRNA sense strand
acaaggccauccuggaguu

SEQ ID NO: 177488 - RNA, 19 nt, Homo sapiens
  misc_RNA (1)...(19): siRNA sense strand
ggcauuggcaggacaggua

SEQ ID NO: 177489 - RNA, 19 nt, Homo sapiens
  misc_RNA (1)...(19): siRNA sense strand
cucagcagcuucccucauu

SEQ ID NO: 177490 - RNA, 19 nt, Homo sapiens
  misc_RNA (1)...(19): siRNA sense strand
ccacccagaucccuucgau

SEQ ID NO: 177491 - RNA, 19 nt, Homo sapiens
  misc_RNA (1)...(19): siRNA sense strand
guuuaucuaugacaugugu

SEQ ID NO: 177492 - RNA, 19 nt, Homo sapiens
  misc_RNA (1)...(19): siRNA sense strand
cagacggugucacgcauga

SEQ ID NO: 177493 - RNA, 19 nt, Homo sapiens
  misc_RNA (1)...(19): siRNA sense strand
acaugugugguucuaauua

SEQ ID NO: 177494 - RNA, 19 nt, Homo sapiens
  misc_RNA (1)...(19): siRNA sense strand
gaggagcuuggcacccuua

SEQ ID NO: 177495 - RNA, 19 nt, Homo sapiens
  misc_RNA (1)...(19): siRNA sense strand
ggagaauaccuaucgugau

SEQ ID NO: 177496 - RNA, 19 nt, Homo sapiens
  misc_RNA (1)...(19): siRNA sense strand
gaacccuguuggcacuuuc

SEQ ID NO: 177497 - RNA, 19 nt, Homo sapiens
  misc_RNA (1)...(19): siRNA sense strand
aggaaucuaugaggaauau

SEQ ID NO: 177498 - RNA, 19 nt, Homo sapiens
  misc_RNA (1)...(19): siRNA sense strand
acaaguggacaguucagua

SEQ ID NO: 177499 - RNA, 19 nt, Homo sapiens
  misc_RNA (1)...(19): siRNA sense strand
ggaaaauucaccaucuuaa

SEQ ID NO: 177500 - RNA, 19 nt, Homo sapiens
  misc_RNA (1)...(19): siRNA sense strand
gagaaggagggcaugguau

SEQ ID NO: 177501 - RNA, 19 nt, Homo sapiens
  misc_RNA (1)...(19): siRNA sense strand
caucaaugccaguuucaug

SEQ ID NO: 177502 - RNA, 19 nt, Homo sapiens
  misc_RNA (1)...(19): siRNA sense strand
aagaguugguggacuaugu

SEQ ID NO: 177503 - RNA, 19 nt, Homo sapiens
  misc_RNA (1)...(19): siRNA sense strand
gcuaugaccauccaagagu

SEQ ID NO: 177504 - RNA, 19 nt, Homo sapiens
  misc_RNA (1)...(19): siRNA sense strand
cagggagugucuuccagaa

SEQ ID NO: 177505 - RNA, 19 nt, Homo sapiens
  misc_RNA (1)...(19): siRNA sense strand
ccacaagucaguccaacau

SEQ ID NO: 177506 - RNA, 19 nt, Homo sapiens
  misc_RNA (1)...(19): siRNA sense strand
gcuacaagcagaagaaugc

SEQ ID NO: 177507 - RNA, 19 nt, Homo sapiens
  misc_RNA (1)...(19): siRNA sense strand
gaaggaaggaaggcauugu

SEQ ID NO: 177508 - RNA, 19 nt, Homo sapiens
  misc_RNA (1)...(19): siRNA sense strand
uaugacaugugugguucua

SEQ ID NO: 177509 - RNA, 19 nt, Homo sapiens
  misc_RNA (1)...(19): siRNA sense strand
guaaagcugaaaccucaug

SEQ ID NO: 177510 - RNA, 19 nt, Homo sapiens
  misc_RNA (1)...(19): siRNA sense strand
agagaaggagggcauggua

SEQ ID NO: 177511 - RNA, 19 nt, Homo sapiens
  misc_RNA (1)...(19): siRNA sense strand
aaacuagagugaagcuaac

SEQ ID NO: 177512 - RNA, 19 nt, Homo sapiens
  misc_RNA (1)...(19): siRNA sense strand
gaguugguggacuauguua

SEQ ID NO: 177513 - RNA, 19 nt, Homo sapiens
  misc_RNA (1)...(19): siRNA sense strand
gcauuuccagcucguuuga

SEQ ID NO: 177514 - RNA, 19 nt, Homo sapiens
  misc_RNA (1)...(19): siRNA sense strand
gcuccgugccauagaauug

SEQ ID NO: 177515 - RNA, 19 nt, Homo sapiens
  misc_RNA (1)...(19): siRNA sense strand
gagccuccauugcccucuu

SEQ ID NO: 177516 - RNA, 19 nt, Homo sapiens
  misc_RNA (1)...(19): siRNA sense strand
gcccugagccacccauugu

SEQ ID NO: 177517 - RNA, 19 nt, Homo sapiens
  misc_RNA (1)...(19): siRNA sense strand
gcguggagaacaugaauca

SEQ ID NO: 177518 - RNA, 19 nt, Homo sapiens
  misc_RNA (1)...(19): siRNA sense strand
gaagaaggugcugauugug

SEQ ID NO: 177519 - RNA, 19 nt, Homo sapiens
  misc_RNA (1)...(19): siRNA sense strand
gauccucaguggaaaauuc

SEQ ID NO: 177520 - RNA, 19 nt, Homo sapiens
  misc_RNA (1)...(19): siRNA sense strand
ucagaaaccagcagagucu

SEQ ID NO: 177521 - RNA, 19 nt, Homo sapiens
  misc_RNA (1)...(19): siRNA sense strand
cagcagcuucccucauuga

SEQ ID NO: 177522 - RNA, 19 nt, Homo sapiens
  misc_RNA (1)...(19): siRNA sense strand
uuucauggauggcuacaag

SEQ ID NO: 177523 - RNA, 19 nt, Homo sapiens
  misc_RNA (1)...(19): siRNA sense strand
gagaaacucgaaggaagga

SEQ ID NO: 177524 - RNA, 19 nt, Homo sapiens
  misc_RNA (1)...(19): siRNA sense strand
gcaaaagcaaggaaucuau

SEQ ID NO: 177525 - RNA, 19 nt, Homo sapiens
  misc_RNA (1)...(19): siRNA sense strand
cuaugaccauccaagaguu

SEQ ID NO: 177526 - RNA, 19 nt, Homo sapiens
  misc_RNA (1)...(19): siRNA sense strand
acccagaucccuucgauga

SEQ ID NO: 177527 - RNA, 19 nt, Homo sapiens
  misc_RNA (1)...(19): siRNA sense strand
gacaugugugguucuaauu

SEQ ID NO: 177528 - RNA, 19 nt, Homo sapiens
  misc_RNA (1)...(19): siRNA sense strand
gcuuugaaacucagaggaa

SEQ ID NO: 177529 - RNA, 19 nt, Homo sapiens
  misc_RNA (1)...(19): siRNA sense strand
caagucaguccaacaugug

SEQ ID NO: 177530 - RNA, 19 nt, Homo sapiens
  misc_RNA (1)...(19): siRNA sense strand
gaggaauggacugguguuu

SEQ ID NO: 177531 - RNA, 19 nt, Homo sapiens
  misc_RNA (1)...(19): siRNA sense strand
caaguggacaguucaguac

SEQ ID NO: 177532 - RNA, 19 nt, Homo sapiens
  misc_RNA (1)...(19): siRNA sense strand
caaugccaguuucauggau

SEQ ID NO: 177533 - RNA, 19 nt, Homo sapiens
  misc_RNA (1)...(19): siRNA sense strand
ggccauacucagacagauu

SEQ ID NO: 177534 - RNA, 19 nt, Homo sapiens
  misc_RNA (1)...(19): siRNA sense strand
acaaagcgaaguggccaua

SEQ ID NO: 177535 - RNA, 19 nt, Homo sapiens
  misc_RNA (1)...(19): siRNA sense strand
ccuauuccaucaucagucu

SEQ ID NO: 177536 - RNA, 19 nt, Homo sapiens
  misc_RNA (1)...(19): siRNA sense strand
aggaauggacugguguuua

SEQ ID NO: 177537 - RNA, 19 nt, Homo sapiens
  misc_RNA (1)...(19): siRNA sense strand
gaacguggcuuccagauaa

SEQ ID NO: 177538 - RNA, 19 nt, Homo sapiens
  misc_RNA (1)...(19): siRNA sense strand
gaagugaccucucuagaaa

SEQ ID NO: 177539 - RNA, 19 nt, Homo sapiens
  misc_RNA (1)...(19): siRNA sense strand
guaaacaucuugccuuaug

SEQ ID NO: 177540 - RNA, 19 nt, Homo sapiens
  misc_RNA (1)...(19): siRNA sense strand
gaaauuaaccggagaaugg

SEQ ID NO: 177541 - RNA, 19 nt, Homo sapiens
  misc_RNA (1)...(19): siRNA sense strand
gaagaaacggugaaugauu

SEQ ID NO: 177542 - RNA, 19 nt, Homo sapiens
  misc_RNA (1)...(19): siRNA sense strand
caacaaugcuaccacaguu

SEQ ID NO: 177543 - RNA, 19 nt, Homo sapiens
  misc_RNA (1)...(19): siRNA sense strand
caucaacgguuaccaagaa

SEQ ID NO: 177544 - RNA, 19 nt, Homo sapiens
  misc_RNA (1)...(19): siRNA sense strand
aagaaacggugaaugauuu

SEQ ID NO: 177545 - RNA, 19 nt, Homo sapiens
  misc_RNA (1)...(19): siRNA sense strand
gcaguggucugauaugugu

SEQ ID NO: 177546 - RNA, 19 nt, Homo sapiens
  misc_RNA (1)...(19): siRNA sense strand
cuagugaucguguuuauua

SEQ ID NO: 177547 - RNA, 19 nt, Homo sapiens
  misc_RNA (1)...(19): siRNA sense strand
ggaagugaccucucuagaa

SEQ ID NO: 177548 - RNA, 19 nt, Homo sapiens
  misc_RNA (1)...(19): siRNA sense strand
gaacagcaagcaccaauuc

SEQ ID NO: 177549 - RNA, 19 nt, Homo sapiens
  misc_RNA (1)...(19): siRNA sense strand
gaacgcauccuuuauugau

SEQ ID NO: 177550 - RNA, 19 nt, Homo sapiens
  misc_RNA (1)...(19): siRNA sense strand
gcucggcaguggucugaua

SEQ ID NO: 177551 - RNA, 19 nt, Homo sapiens
  misc_RNA (1)...(19): siRNA sense strand
gcauuacaauuucaccaaa

SEQ ID NO: 177552 - RNA, 19 nt, Homo sapiens
  misc_RNA (1)...(19): siRNA sense strand
gaaagggcaugaucagcau

SEQ ID NO: 177553 - RNA, 19 nt, Homo sapiens
  misc_RNA (1)...(19): siRNA sense strand
ggacguguauggcuuugug

SEQ ID NO: 177554 - RNA, 19 nt, Homo sapiens
  misc_RNA (1)...(19): siRNA sense strand
gaggacuucuggcgaauga

SEQ ID NO: 177555 - RNA, 19 nt, Homo sapiens
  misc_RNA (1)...(19): siRNA sense strand
gauuagaggaggaguuuaa

SEQ ID NO: 177556 - RNA, 19 nt, Homo sapiens
  misc_RNA (1)...(19): siRNA sense strand
gcaaaccgauaugcaguau

SEQ ID NO: 177557 - RNA, 19 nt, Homo sapiens
  misc_RNA (1)...(19): siRNA sense strand
ggaggaguuuaagaaguua

SEQ ID NO: 177558 - RNA, 19 nt, Homo sapiens
  misc_RNA (1)...(19): siRNA sense strand
aaaccgauaugcaguaugu

SEQ ID NO: 177559 - RNA, 19 nt, Homo sapiens
  misc_RNA (1)...(19): siRNA sense strand
gaagaagaaccguguuuua

SEQ ID NO: 177560 - RNA, 19 nt, Homo sapiens
  misc_RNA (1)...(19): siRNA sense strand
gcgaagagaauacagacua

SEQ ID NO: 177561 - RNA, 19 nt, Homo sapiens
  misc_RNA (1)...(19): siRNA sense strand
agagugaucauuccaguua

SEQ ID NO: 177562 - RNA, 19 nt, Homo sapiens
  misc_RNA (1)...(19): siRNA sense strand
gagaauggcagacgacaau

SEQ ID NO: 177563 - RNA, 19 nt, Homo sapiens
  misc_RNA (1)...(19): siRNA sense strand
gaccagcaacaauggauua

SEQ ID NO: 177564 - RNA, 19 nt, Homo sapiens
  misc_RNA (1)...(19): siRNA sense strand
gaauggcagacgacaauaa

SEQ ID NO: 177565 - RNA, 19 nt, Homo sapiens
  misc_RNA (1)...(19): siRNA sense strand
gugaacgcauccuuuauug

SEQ ID NO: 177566 - RNA, 19 nt, Homo sapiens
  misc_RNA (1)...(19): siRNA sense strand
gagaauacagacuauguga

SEQ ID NO: 177567 - RNA, 19 nt, Homo sapiens
  misc_RNA (1)...(19): siRNA sense strand
cagccaacaugaagaagaa

SEQ ID NO: 177568 - RNA, 19 nt, Homo sapiens
  misc_RNA (1)...(19): siRNA sense strand
acauucagcccaaauauaa

SEQ ID NO: 177569 - RNA, 19 nt, Homo sapiens
  misc_RNA (1)...(19): siRNA sense strand
guauauugaugcauucuca

SEQ ID NO: 177570 - RNA, 19 nt, Homo sapiens
  misc_RNA (1)...(19): siRNA sense strand
ggagaagugugcccaguac

SEQ ID NO: 177571 - RNA, 19 nt, Homo sapiens
  misc_RNA (1)...(19): siRNA sense strand
cgaagagaauacagacuau

SEQ ID NO: 177572 - RNA, 19 nt, Homo sapiens
  misc_RNA (1)...(19): siRNA sense strand
caaauucauugcugcacaa

SEQ ID NO: 177573 - RNA, 19 nt, Homo sapiens
  misc_RNA (1)...(19): siRNA sense strand
gaggaggaguuuaagaagu

SEQ ID NO: 177574 - RNA, 19 nt, Homo sapiens
  misc_RNA (1)...(19): siRNA sense strand
uaaccacugucaauucuuc

SEQ ID NO: 177575 - RNA, 19 nt, Homo sapiens
  misc_RNA (1)...(19): siRNA sense strand
caaccacuccagaaacuuu

SEQ ID NO: 177576 - RNA, 19 nt, Homo sapiens
  misc_RNA (1)...(19): siRNA sense strand
cggaugaucugggaacaaa

SEQ ID NO: 177577 - RNA, 19 nt, Homo sapiens
  misc_RNA (1)...(19): siRNA sense strand
aagaagaaacggugaauga

SEQ ID NO: 177578 - RNA, 19 nt, Homo sapiens
  misc_RNA (1)...(19): siRNA sense strand
cagaaccaguuaaagaaga

SEQ ID NO: 177579 - RNA, 19 nt, Homo sapiens
  misc_RNA (1)...(19): siRNA sense strand
gcaagcaccaauucuauag

SEQ ID NO: 177580 - RNA, 19 nt, Homo sapiens
  misc_RNA (1)...(19): siRNA sense strand
gaagaaggaggaggaaugu

SEQ ID NO: 177581 - RNA, 19 nt, Homo sapiens
  misc_RNA (1)...(19): siRNA sense strand
gaguggaaauccugcucua

SEQ ID NO: 177582 - RNA, 19 nt, Homo sapiens
  misc_RNA (1)...(19): siRNA sense strand
gcagcaaccacuccagaaa

SEQ ID NO: 177583 - RNA, 19 nt, Homo sapiens
  misc_RNA (1)...(19): siRNA sense strand
gcugggagccauuccaauu

SEQ ID NO: 177584 - RNA, 19 nt, Homo sapiens
  misc_RNA (1)...(19): siRNA sense strand
uaaacaucuugccuuauga

SEQ ID NO: 177585 - RNA, 19 nt, Homo sapiens
  misc_RNA (1)...(19): siRNA sense strand
caacauucagcccaaauau

SEQ ID NO: 177586 - RNA, 19 nt, Homo sapiens
  misc_RNA (1)...(19): siRNA sense strand
ggaguauauugaugcauuc

SEQ ID NO: 177587 - RNA, 19 nt, Homo sapiens
  misc_RNA (1)...(19): siRNA sense strand
acaagguggugcaggagua

SEQ ID NO: 177588 - RNA, 19 nt, Homo sapiens
  misc_RNA (1)...(19): siRNA sense strand
uaugugaacgcauccuuua

SEQ ID NO: 177589 - RNA, 19 nt, Homo sapiens
  misc_RNA (1)...(19): siRNA sense strand
gaauacagacuaugugaac

SEQ ID NO: 177590 - RNA, 19 nt, Homo sapiens
  misc_RNA (1)...(19): siRNA sense strand
gacaagaugcggacuggaa

SEQ ID NO: 177591 - RNA, 19 nt, Homo sapiens
  misc_RNA (1)...(19): siRNA sense strand
guaccuuugucgucauuga

SEQ ID NO: 177592 - RNA, 19 nt, Homo sapiens
  misc_RNA (1)...(19): siRNA sense strand
aaauccaacuucuucacua

SEQ ID NO: 177593 - RNA, 19 nt, Homo sapiens
  misc_RNA (1)...(19): siRNA sense strand
uuacagaucauuccauaug

SEQ ID NO: 177594 - RNA, 19 nt, Homo sapiens
  misc_RNA (1)...(19): siRNA sense strand
aggaggaguuuaagaaguu

SEQ ID NO: 177595 - RNA, 19 nt, Homo sapiens
  misc_RNA (1)...(19): siRNA sense strand
cagcaacaauggauuagag

SEQ ID NO: 177596 - RNA, 19 nt, Homo sapiens
  misc_RNA (1)...(19): siRNA sense strand
ggacaugaugcauacagaa

SEQ ID NO: 177597 - RNA, 19 nt, Homo sapiens
  misc_RNA (1)...(19): siRNA sense strand
cuucauucaucaacgguua

SEQ ID NO: 177598 - RNA, 19 nt, Homo sapiens
  misc_RNA (1)...(19): siRNA sense strand
gacaaugggaccacaagaa

SEQ ID NO: 177599 - RNA, 19 nt, Homo sapiens
  misc_RNA (1)...(19): siRNA sense strand
ggacccaccuauuuaacca

SEQ ID NO: 177600 - RNA, 19 nt, Homo sapiens
  misc_RNA (1)...(19): siRNA sense strand
aauccaacuucuucacuaa

SEQ ID NO: 177601 - RNA, 19 nt, Homo sapiens
  misc_RNA (1)...(19): siRNA sense strand
ggcagaaccaguuaaagaa

SEQ ID NO: 177602 - RNA, 19 nt, Homo sapiens
  misc_RNA (1)...(19): siRNA sense strand
cauaugaauucaacagagu

SEQ ID NO: 177603 - RNA, 19 nt, Homo sapiens
  misc_RNA (1)...(19): siRNA sense strand
cggcagaaccaguuaaaga

SEQ ID NO: 177604 - RNA, 19 nt, Homo sapiens
  misc_RNA (1)...(19): siRNA sense strand
gaugcggacuggaaaccuu

SEQ ID NO: 177605 - RNA, 19 nt, Homo sapiens
  misc_RNA (1)...(19): siRNA sense strand
uugaugcauucucagauua

SEQ ID NO: 177606 - RNA, 19 nt, Homo sapiens
  misc_RNA (1)...(19): siRNA sense strand
aggaguauauugaugcauu

SEQ ID NO: 177607 - RNA, 19 nt, Homo sapiens
  misc_RNA (1)...(19): siRNA sense strand
gagugaucauuccaguuaa

SEQ ID NO: 177608 - RNA, 19 nt, Homo sapiens
  misc_RNA (1)...(19): siRNA sense strand
ccaacauucagcccaaaua

SEQ ID NO: 177609 - RNA, 19 nt, Homo sapiens
  misc_RNA (1)...(19): siRNA sense strand
gugcaggaguauauugaug

SEQ ID NO: 177610 - RNA, 19 nt, Homo sapiens
  misc_RNA (1)...(19): siRNA sense strand
gguguccuauggagauauu

SEQ ID NO: 177611 - RNA, 19 nt, Homo sapiens
  misc_RNA (1)...(19): siRNA sense strand
uagaggaggaguuuaagaa

SEQ ID NO: 177612 - RNA, 19 nt, Homo sapiens
  misc_RNA (1)...(19): siRNA sense strand
aaugauuucuggcggauga

SEQ ID NO: 177613 - RNA, 19 nt, Homo sapiens
  misc_RNA (1)...(19): siRNA sense strand
cuauaggcauuacaauuuc

SEQ ID NO: 177614 - RNA, 19 nt, Homo sapiens
  misc_RNA (1)...(19): siRNA sense strand
ucacuaacuucucuuucug

SEQ ID NO: 177615 - RNA, 19 nt, Homo sapiens
  misc_RNA (1)...(19): siRNA sense strand
agaaggaggaggaauguga

SEQ ID NO: 177616 - RNA, 19 nt, Homo sapiens
  misc_RNA (1)...(19): siRNA sense strand
cagcaagcaccaauucuau

SEQ ID NO: 177617 - RNA, 19 nt, Homo sapiens
  misc_RNA (1)...(19): siRNA sense strand
gcaggaguauauugaugca

SEQ ID NO: 177618 - RNA, 19 nt, Homo sapiens
  misc_RNA (1)...(19): siRNA sense strand
ccacacaauugaggacuuc

SEQ ID NO: 177619 - RNA, 19 nt, Homo sapiens
  misc_RNA (1)...(19): siRNA sense strand
ucaaguuccucaagaaggu

SEQ ID NO: 177620 - RNA, 19 nt, Homo sapiens
  misc_RNA (1)...(19): siRNA sense strand
ucacucaguuccacuuuac

SEQ ID NO: 177621 - RNA, 19 nt, Homo sapiens
  misc_RNA (1)...(19): siRNA sense strand
caaggcugcuggaccuaug

SEQ ID NO: 177622 - RNA, 19 nt, Homo sapiens
  misc_RNA (1)...(19): siRNA sense strand
ggacaagcuggaagaggaa

SEQ ID NO: 177623 - RNA, 19 nt, Homo sapiens
  misc_RNA (1)...(19): siRNA sense strand
uuccaauucuuuccgcuua

SEQ ID NO: 177624 - RNA, 19 nt, Homo sapiens
  misc_RNA (1)...(19): siRNA sense strand
ggagccauuccaauucuuu

SEQ ID NO: 177625 - RNA, 19 nt, Homo sapiens
  misc_RNA (1)...(19): siRNA sense strand
ugaagaaggaggaggaaug

SEQ ID NO: 177626 - RNA, 19 nt, Homo sapiens
  misc_RNA (1)...(19): siRNA sense strand
caccaauucuauaggcauu

SEQ ID NO: 177627 - RNA, 19 nt, Homo sapiens
  misc_RNA (1)...(19): siRNA sense strand
ccaacaccagggagaauaa

SEQ ID NO: 177628 - RNA, 19 nt, Homo sapiens
  misc_RNA (1)...(19): siRNA sense strand
caaucaaaauccagaauga

SEQ ID NO: 177629 - RNA, 19 nt, Homo sapiens
  misc_RNA (1)...(19): siRNA sense strand
ggagcauuaucucuaugga

SEQ ID NO: 177630 - RNA, 19 nt, Homo sapiens
  misc_RNA (1)...(19): siRNA sense strand
ggagagaggccaggagaag

SEQ ID NO: 177631 - RNA, 19 nt, Homo sapiens
  misc_RNA (1)...(19): siRNA sense strand
ccaccuauuuaaccacugu

SEQ ID NO: 177632 - RNA, 19 nt, Homo sapiens
  misc_RNA (1)...(19): siRNA sense strand
gaagagaauacagacuaug

SEQ ID NO: 177633 - RNA, 19 nt, Homo sapiens
  misc_RNA (1)...(19): siRNA sense strand
gcagaaccaguuaaagaag

SEQ ID NO: 177634 - RNA, 19 nt, Homo sapiens
  misc_RNA (1)...(19): siRNA sense strand
ggaaauuaaccggagaaug

SEQ ID NO: 177635 - RNA, 19 nt, Homo sapiens
  misc_RNA (1)...(19): siRNA sense strand
aagcccuucuggagcauua

SEQ ID NO: 177636 - RNA, 19 nt, Homo sapiens
  misc_RNA (1)...(19): siRNA sense strand
cagauuaugccaacuucaa

SEQ ID NO: 177637 - RNA, 19 nt, Homo sapiens
  misc_RNA (1)...(19): siRNA sense strand
gaacguggcuuccagauaa

SEQ ID NO: 177638 - RNA, 19 nt, Homo sapiens
  misc_RNA (1)...(19): siRNA sense strand
gaagugaccucucuagaaa

SEQ ID NO: 177639 - RNA, 19 nt, Homo sapiens
  misc_RNA (1)...(19): siRNA sense strand
guaaacaucuugccuuaug

SEQ ID NO: 177640 - RNA, 19 nt, Homo sapiens
  misc_RNA (1)...(19): siRNA sense strand
gaaauuaaccggagaaugg

SEQ ID NO: 177641 - RNA, 19 nt, Homo sapiens
  misc_RNA (1)...(19): siRNA sense strand
gaagaaacggugaaugauu

SEQ ID NO: 177642 - RNA, 19 nt, Homo sapiens
  misc_RNA (1)...(19): siRNA sense strand
caacaaugcuaccacaguu

SEQ ID NO: 177643 - RNA, 19 nt, Homo sapiens
  misc_RNA (1)...(19): siRNA sense strand
caucaacgguuaccaagaa

SEQ ID NO: 177644 - RNA, 19 nt, Homo sapiens
  misc_RNA (1)...(19): siRNA sense strand
aagaaacggugaaugauuu

SEQ ID NO: 177645 - RNA, 19 nt, Homo sapiens
  misc_RNA (1)...(19): siRNA sense strand
gcaguggucugauaugugu

SEQ ID NO: 177646 - RNA, 19 nt, Homo sapiens
  misc_RNA (1)...(19): siRNA sense strand
cuagugaucguguuuauua

SEQ ID NO: 177647 - RNA, 19 nt, Homo sapiens
  misc_RNA (1)...(19): siRNA sense strand
ggaagugaccucucuagaa

SEQ ID NO: 177648 - RNA, 19 nt, Homo sapiens
  misc_RNA (1)...(19): siRNA sense strand
gaacagcaagcaccaauuc

SEQ ID NO: 177649 - RNA, 19 nt, Homo sapiens
  misc_RNA (1)...(19): siRNA sense strand
gaacgcauccuuuauugau

SEQ ID NO: 177650 - RNA, 19 nt, Homo sapiens
  misc_RNA (1)...(19): siRNA sense strand
gcucggcaguggucugaua

SEQ ID NO: 177651 - RNA, 19 nt, Homo sapiens
  misc_RNA (1)...(19): siRNA sense strand
gcauuacaauuucaccaaa

SEQ ID NO: 177652 - RNA, 19 nt, Homo sapiens
  misc_RNA (1)...(19): siRNA sense strand
gaaagggcaugaucagcau

SEQ ID NO: 177653 - RNA, 19 nt, Homo sapiens
  misc_RNA (1)...(19): siRNA sense strand
ggacguguauggcuuugug

SEQ ID NO: 177654 - RNA, 19 nt, Homo sapiens
  misc_RNA (1)...(19): siRNA sense strand
gaggacuucuggcgaauga

SEQ ID NO: 177655 - RNA, 19 nt, Homo sapiens
  misc_RNA (1)...(19): siRNA sense strand
gauuagaggaggaguuuaa

SEQ ID NO: 177656 - RNA, 19 nt, Homo sapiens
  misc_RNA (1)...(19): siRNA sense strand
gcaaaccgauaugcaguau

SEQ ID NO: 177657 - RNA, 19 nt, Homo sapiens
  misc_RNA (1)...(19): siRNA sense strand
ggaggaguuuaagaaguua

SEQ ID NO: 177658 - RNA, 19 nt, Homo sapiens
  misc_RNA (1)...(19): siRNA sense strand
aaaccgauaugcaguaugu

SEQ ID NO: 177659 - RNA, 19 nt, Homo sapiens
  misc_RNA (1)...(19): siRNA sense strand
gaagaagaaccguguuuua

SEQ ID NO: 177660 - RNA, 19 nt, Homo sapiens
  misc_RNA (1)...(19): siRNA sense strand
gcgaagagaauacagacua

SEQ ID NO: 177661 - RNA, 19 nt, Homo sapiens
  misc_RNA (1)...(19): siRNA sense strand
agagugaucauuccaguua

SEQ ID NO: 177662 - RNA, 19 nt, Homo sapiens
  misc_RNA (1)...(19): siRNA sense strand
gagaauggcagacgacaau

SEQ ID NO: 177663 - RNA, 19 nt, Homo sapiens
  misc_RNA (1)...(19): siRNA sense strand
gaccagcaacaauggauua

SEQ ID NO: 177664 - RNA, 19 nt, Homo sapiens
  misc_RNA (1)...(19): siRNA sense strand
gaauggcagacgacaauaa

SEQ ID NO: 177665 - RNA, 19 nt, Homo sapiens
  misc_RNA (1)...(19): siRNA sense strand
gugaacgcauccuuuauug

SEQ ID NO: 177666 - RNA, 19 nt, Homo sapiens
  misc_RNA (1)...(19): siRNA sense strand
gagaauacagacuauguga

SEQ ID NO: 177667 - RNA, 19 nt, Homo sapiens
  misc_RNA (1)...(19): siRNA sense strand
cagccaacaugaagaagaa

SEQ ID NO: 177668 - RNA, 19 nt, Homo sapiens
  misc_RNA (1)...(19): siRNA sense strand
acauucagcccaaauauaa

SEQ ID NO: 177669 - RNA, 19 nt, Homo sapiens
  misc_RNA (1)...(19): siRNA sense strand
guauauugaugcauucuca

SEQ ID NO: 177670 - RNA, 19 nt, Homo sapiens
  misc_RNA (1)...(19): siRNA sense strand
ggagaagugugcccaguac

SEQ ID NO: 177671 - RNA, 19 nt, Homo sapiens
  misc_RNA (1)...(19): siRNA sense strand
cgaagagaauacagacuau

SEQ ID NO: 177672 - RNA, 19 nt, Homo sapiens
  misc_RNA (1)...(19): siRNA sense strand
caaauucauugcugcacaa

SEQ ID NO: 177673 - RNA, 19 nt, Homo sapiens
  misc_RNA (1)...(19): siRNA sense strand
gaggaggaguuuaagaagu

SEQ ID NO: 177674 - RNA, 19 nt, Homo sapiens
  misc_RNA (1)...(19): siRNA sense strand
uaaccacugucaauucuuc

SEQ ID NO: 177675 - RNA, 19 nt, Homo sapiens
  misc_RNA (1)...(19): siRNA sense strand
caaccacuccagaaacuuu

SEQ ID NO: 177676 - RNA, 19 nt, Homo sapiens
  misc_RNA (1)...(19): siRNA sense strand
cggaugaucugggaacaaa

SEQ ID NO: 177677 - RNA, 19 nt, Homo sapiens
  misc_RNA (1)...(19): siRNA sense strand
aagaagaaacggugaauga

SEQ ID NO: 177678 - RNA, 19 nt, Homo sapiens
  misc_RNA (1)...(19): siRNA sense strand
cagaaccaguuaaagaaga

SEQ ID NO: 177679 - RNA, 19 nt, Homo sapiens
  misc_RNA (1)...(19): siRNA sense strand
gcaagcaccaauucuauag

SEQ ID NO: 177680 - RNA, 19 nt, Homo sapiens
  misc_RNA (1)...(19): siRNA sense strand
gaagaaggaggaggaaugu

SEQ ID NO: 177681 - RNA, 19 nt, Homo sapiens
  misc_RNA (1)...(19): siRNA sense strand
gaguggaaauccugcucua

SEQ ID NO: 177682 - RNA, 19 nt, Homo sapiens
  misc_RNA (1)...(19): siRNA sense strand
gcagcaaccacuccagaaa

SEQ ID NO: 177683 - RNA, 19 nt, Homo sapiens
  misc_RNA (1)...(19): siRNA sense strand
gcugggagccauuccaauu

SEQ ID NO: 177684 - RNA, 19 nt, Homo sapiens
  misc_RNA (1)...(19): siRNA sense strand
uaaacaucuugccuuauga

SEQ ID NO: 177685 - RNA, 19 nt, Homo sapiens
  misc_RNA (1)...(19): siRNA sense strand
caacauucagcccaaauau

SEQ ID NO: 177686 - RNA, 19 nt, Homo sapiens
  misc_RNA (1)...(19): siRNA sense strand
ggaguauauugaugcauuc

SEQ ID NO: 177687 - RNA, 19 nt, Homo sapiens
  misc_RNA (1)...(19): siRNA sense strand
acaagguggugcaggagua

SEQ ID NO: 177688 - RNA, 19 nt, Homo sapiens
  misc_RNA (1)...(19): siRNA sense strand
uaugugaacgcauccuuua

SEQ ID NO: 177689 - RNA, 19 nt, Homo sapiens
  misc_RNA (1)...(19): siRNA sense strand
gaauacagacuaugugaac

SEQ ID NO: 177690 - RNA, 19 nt, Homo sapiens
  misc_RNA (1)...(19): siRNA sense strand
gacaagaugcggacuggaa

SEQ ID NO: 177691 - RNA, 19 nt, Homo sapiens
  misc_RNA (1)...(19): siRNA sense strand
guaccuuugucgucauuga

SEQ ID NO: 177692 - RNA, 19 nt, Homo sapiens
  misc_RNA (1)...(19): siRNA sense strand
aaauccaacuucuucacua

SEQ ID NO: 177693 - RNA, 19 nt, Homo sapiens
  misc_RNA (1)...(19): siRNA sense strand
uuacagaucauuccauaug

SEQ ID NO: 177694 - RNA, 19 nt, Homo sapiens
  misc_RNA (1)...(19): siRNA sense strand
aggaggaguuuaagaaguu

SEQ ID NO: 177695 - RNA, 19 nt, Homo sapiens
  misc_RNA (1)...(19): siRNA sense strand
cagcaacaauggauuagag

SEQ ID NO: 177696 - RNA, 19 nt, Homo sapiens
  misc_RNA (1)...(19): siRNA sense strand
ggacaugaugcauacagaa

SEQ ID NO: 177697 - RNA, 19 nt, Homo sapiens
  misc_RNA (1)...(19): siRNA sense strand
cuucauucaucaacgguua

SEQ ID NO: 177698 - RNA, 19 nt, Homo sapiens
  misc_RNA (1)...(19): siRNA sense strand
gacaaugggaccacaagaa

SEQ ID NO: 177699 - RNA, 19 nt, Homo sapiens
  misc_RNA (1)...(19): siRNA sense strand
ggacccaccuauuuaacca

SEQ ID NO: 177700 - RNA, 19 nt, Homo sapiens
  misc_RNA (1)...(19): siRNA sense strand
aauccaacuucuucacuaa

SEQ ID NO: 177701 - RNA, 19 nt, Homo sapiens
  misc_RNA (1)...(19): siRNA sense strand
ggcagaaccaguuaaagaa

SEQ ID NO: 177702 - RNA, 19 nt, Homo sapiens
  misc_RNA (1)...(19): siRNA sense strand
cauaugaauucaacagagu

SEQ ID NO: 177703 - RNA, 19 nt, Homo sapiens
  misc_RNA (1)...(19): siRNA sense strand
cggcagaaccaguuaaaga

SEQ ID NO: 177704 - RNA, 19 nt, Homo sapiens
  misc_RNA (1)...(19): siRNA sense strand
gaugcggacuggaaaccuu

SEQ ID NO: 177705 - RNA, 19 nt, Homo sapiens
  misc_RNA (1)...(19): siRNA sense strand
uugaugcauucucagauua

SEQ ID NO: 177706 - RNA, 19 nt, Homo sapiens
  misc_RNA (1)...(19): siRNA sense strand
aggaguauauugaugcauu

SEQ ID NO: 177707 - RNA, 19 nt, Homo sapiens
  misc_RNA (1)...(19): siRNA sense strand
gagugaucauuccaguuaa

SEQ ID NO: 177708 - RNA, 19 nt, Homo sapiens
  misc_RNA (1)...(19): siRNA sense strand
ccaacauucagcccaaaua

SEQ ID NO: 177709 - RNA, 19 nt, Homo sapiens
  misc_RNA (1)...(19): siRNA sense strand
gugcaggaguauauugaug

SEQ ID NO: 177710 - RNA, 19 nt, Homo sapiens
  misc_RNA (1)...(19): siRNA sense strand
gguguccuauggagauauu

SEQ ID NO: 177711 - RNA, 19 nt, Homo sapiens
  misc_RNA (1)...(19): siRNA sense strand
uagaggaggaguuuaagaa

SEQ ID NO: 177712 - RNA, 19 nt, Homo sapiens
  misc_RNA (1)...(19): siRNA sense strand
aaugauuucuggcggauga

SEQ ID NO: 177713 - RNA, 19 nt, Homo sapiens
  misc_RNA (1)...(19): siRNA sense strand
cuauaggcauuacaauuuc

SEQ ID NO: 177714 - RNA, 19 nt, Homo sapiens
  misc_RNA (1)...(19): siRNA sense strand
ucacuaacuucucuuucug

SEQ ID NO: 177715 - RNA, 19 nt, Homo sapiens
  misc_RNA (1)...(19): siRNA sense strand
agaaggaggaggaauguga

SEQ ID NO: 177716 - RNA, 19 nt, Homo sapiens
  misc_RNA (1)...(19): siRNA sense strand
cagcaagcaccaauucuau

SEQ ID NO: 177717 - RNA, 19 nt, Homo sapiens
  misc_RNA (1)...(19): siRNA sense strand
gcaggaguauauugaugca

SEQ ID NO: 177718 - RNA, 19 nt, Homo sapiens
  misc_RNA (1)...(19): siRNA sense strand
ccacacaauugaggacuuc

SEQ ID NO: 177719 - RNA, 19 nt, Homo sapiens
  misc_RNA (1)...(19): siRNA sense strand
ucaaguuccucaagaaggu

SEQ ID NO: 177720 - RNA, 19 nt, Homo sapiens
  misc_RNA (1)...(19): siRNA sense strand
ucacucaguuccacuuuac

SEQ ID NO: 177721 - RNA, 19 nt, Homo sapiens
  misc_RNA (1)...(19): siRNA sense strand
caaggcugcuggaccuaug

SEQ ID NO: 177722 - RNA, 19 nt, Homo sapiens
  misc_RNA (1)...(19): siRNA sense strand
ggacaagcuggaagaggaa

SEQ ID NO: 177723 - RNA, 19 nt, Homo sapiens
  misc_RNA (1)...(19): siRNA sense strand
uuccaauucuuuccgcuua

SEQ ID NO: 177724 - RNA, 19 nt, Homo sapiens
  misc_RNA (1)...(19): siRNA sense strand
ggagccauuccaauucuuu

SEQ ID NO: 177725 - RNA, 19 nt, Homo sapiens
  misc_RNA (1)...(19): siRNA sense strand
ugaagaaggaggaggaaug

SEQ ID NO: 177726 - RNA, 19 nt, Homo sapiens
  misc_RNA (1)...(19): siRNA sense strand
caccaauucuauaggcauu

SEQ ID NO: 177727 - RNA, 19 nt, Homo sapiens
  misc_RNA (1)...(19): siRNA sense strand
ccaacaccagggagaauaa

SEQ ID NO: 177728 - RNA, 19 nt, Homo sapiens
  misc_RNA (1)...(19): siRNA sense strand
caaucaaaauccagaauga

SEQ ID NO: 177729 - RNA, 19 nt, Homo sapiens
  misc_RNA (1)...(19): siRNA sense strand
ggagcauuaucucuaugga

SEQ ID NO: 177730 - RNA, 19 nt, Homo sapiens
  misc_RNA (1)...(19): siRNA sense strand
ggagagaggccaggagaag

SEQ ID NO: 177731 - RNA, 19 nt, Homo sapiens
  misc_RNA (1)...(19): siRNA sense strand
ccaccuauuuaaccacugu

SEQ ID NO: 177732 - RNA, 19 nt, Homo sapiens
  misc_RNA (1)...(19): siRNA sense strand
gaagagaauacagacuaug

SEQ ID NO: 177733 - RNA, 19 nt, Homo sapiens
  misc_RNA (1)...(19): siRNA sense strand
gcagaaccaguuaaagaag

SEQ ID NO: 177734 - RNA, 19 nt, Homo sapiens
  misc_RNA (1)...(19): siRNA sense strand
ggaaauuaaccggagaaug

SEQ ID NO: 177735 - RNA, 19 nt, Homo sapiens
  misc_RNA (1)...(19): siRNA sense strand
aagcccuucuggagcauua

SEQ ID NO: 177736 - RNA, 19 nt, Homo sapiens
  misc_RNA (1)...(19): siRNA sense strand
cagauuaugccaacuucaa

SEQ ID NO: 177737 - RNA, 19 nt, Homo sapiens
  misc_RNA (1)...(19): siRNA sense strand
gaacguggcuuccagauaa

SEQ ID NO: 177738 - RNA, 19 nt, Homo sapiens
  misc_RNA (1)...(19): siRNA sense strand
gaagugaccucucuagaaa

SEQ ID NO: 177739 - RNA, 19 nt, Homo sapiens
  misc_RNA (1)...(19): siRNA sense strand
guaaacaucuugccuuaug

SEQ ID NO: 177740 - RNA, 19 nt, Homo sapiens
  misc_RNA (1)...(19): siRNA sense strand
gaaauuaaccggagaaugg

SEQ ID NO: 177741 - RNA, 19 nt, Homo sapiens
  misc_RNA (1)...(19): siRNA sense strand
gaagaaacggugaaugauu

SEQ ID NO: 177742 - RNA, 19 nt, Homo sapiens
  misc_RNA (1)...(19): siRNA sense strand
caacaaugcuaccacaguu

SEQ ID NO: 177743 - RNA, 19 nt, Homo sapiens
  misc_RNA (1)...(19): siRNA sense strand
caucaacgguuaccaagaa

SEQ ID NO: 177744 - RNA, 19 nt, Homo sapiens
  misc_RNA (1)...(19): siRNA sense strand
aagaaacggugaaugauuu

SEQ ID NO: 177745 - RNA, 19 nt, Homo sapiens
  misc_RNA (1)...(19): siRNA sense strand
gcaguggucugauaugugu

SEQ ID NO: 177746 - RNA, 19 nt, Homo sapiens
  misc_RNA (1)...(19): siRNA sense strand
cuagugaucguguuuauua

SEQ ID NO: 177747 - RNA, 19 nt, Homo sapiens
  misc_RNA (1)...(19): siRNA sense strand
ggaagugaccucucuagaa

SEQ ID NO: 177748 - RNA, 19 nt, Homo sapiens
  misc_RNA (1)...(19): siRNA sense strand
gaacagcaagcaccaauuc

SEQ ID NO: 177749 - RNA, 19 nt, Homo sapiens
  misc_RNA (1)...(19): siRNA sense strand
gaacgcauccuuuauugau

SEQ ID NO: 177750 - RNA, 19 nt, Homo sapiens
  misc_RNA (1)...(19): siRNA sense strand
gcucggcaguggucugaua

SEQ ID NO: 177751 - RNA, 19 nt, Homo sapiens
  misc_RNA (1)...(19): siRNA sense strand
gcauuacaauuucaccaaa

SEQ ID NO: 177752 - RNA, 19 nt, Homo sapiens
  misc_RNA (1)...(19): siRNA sense strand
gaaagggcaugaucagcau

SEQ ID NO: 177753 - RNA, 19 nt, Homo sapiens
  misc_RNA (1)...(19): siRNA sense strand
ggacguguauggcuuugug

SEQ ID NO: 177754 - RNA, 19 nt, Homo sapiens
  misc_RNA (1)...(19): siRNA sense strand
gaggacuucuggcgaauga

SEQ ID NO: 177755 - RNA, 19 nt, Homo sapiens
  misc_RNA (1)...(19): siRNA sense strand
gauuagaggaggaguuuaa

SEQ ID NO: 177756 - RNA, 19 nt, Homo sapiens
  misc_RNA (1)...(19): siRNA sense strand
gcaaaccgauaugcaguau

SEQ ID NO: 177757 - RNA, 19 nt, Homo sapiens
  misc_RNA (1)...(19): siRNA sense strand
ggaggaguuuaagaaguua

SEQ ID NO: 177758 - RNA, 19 nt, Homo sapiens
  misc_RNA (1)...(19): siRNA sense strand
aaaccgauaugcaguaugu

SEQ ID NO: 177759 - RNA, 19 nt, Homo sapiens
  misc_RNA (1)...(19): siRNA sense strand
gaagaagaaccguguuuua

SEQ ID NO: 177760 - RNA, 19 nt, Homo sapiens
  misc_RNA (1)...(19): siRNA sense strand
gcgaagagaauacagacua

SEQ ID NO: 177761 - RNA, 19 nt, Homo sapiens
  misc_RNA (1)...(19): siRNA sense strand
agagugaucauuccaguua

SEQ ID NO: 177762 - RNA, 19 nt, Homo sapiens
  misc_RNA (1)...(19): siRNA sense strand
gagaauggcagacgacaau

SEQ ID NO: 177763 - RNA, 19 nt, Homo sapiens
  misc_RNA (1)...(19): siRNA sense strand
gaccagcaacaauggauua

SEQ ID NO: 177764 - RNA, 19 nt, Homo sapiens
  misc_RNA (1)...(19): siRNA sense strand
gaauggcagacgacaauaa

SEQ ID NO: 177765 - RNA, 19 nt, Homo sapiens
  misc_RNA (1)...(19): siRNA sense strand
gugaacgcauccuuuauug

SEQ ID NO: 177766 - RNA, 19 nt, Homo sapiens
  misc_RNA (1)...(19): siRNA sense strand
gagaauacagacuauguga

SEQ ID NO: 177767 - RNA, 19 nt, Homo sapiens
  misc_RNA (1)...(19): siRNA sense strand
cagccaacaugaagaagaa

SEQ ID NO: 177768 - RNA, 19 nt, Homo sapiens
  misc_RNA (1)...(19): siRNA sense strand
acauucagcccaaauauaa

SEQ ID NO: 177769 - RNA, 19 nt, Homo sapiens
  misc_RNA (1)...(19): siRNA sense strand
guauauugaugcauucuca

SEQ ID NO: 177770 - RNA, 19 nt, Homo sapiens
  misc_RNA (1)...(19): siRNA sense strand
ggagaagugugcccaguac

SEQ ID NO: 177771 - RNA, 19 nt, Homo sapiens
  misc_RNA (1)...(19): siRNA sense strand
cgaagagaauacagacuau

SEQ ID NO: 177772 - RNA, 19 nt, Homo sapiens
  misc_RNA (1)...(19): siRNA sense strand
caaauucauugcugcacaa

SEQ ID NO: 177773 - RNA, 19 nt, Homo sapiens
  misc_RNA (1)...(19): siRNA sense strand
gaggaggaguuuaagaagu

SEQ ID NO: 177774 - RNA, 19 nt, Homo sapiens
  misc_RNA (1)...(19): siRNA sense strand
uaaccacugucaauucuuc

SEQ ID NO: 177775 - RNA, 19 nt, Homo sapiens
  misc_RNA (1)...(19): siRNA sense strand
caaccacuccagaaacuuu

SEQ ID NO: 177776 - RNA, 19 nt, Homo sapiens
  misc_RNA (1)...(19): siRNA sense strand
cggaugaucugggaacaaa

SEQ ID NO: 177777 - RNA, 19 nt, Homo sapiens
  misc_RNA (1)...(19): siRNA sense strand
aagaagaaacggugaauga

SEQ ID NO: 177778 - RNA, 19 nt, Homo sapiens
  misc_RNA (1)...(19): siRNA sense strand
cagaaccaguuaaagaaga

SEQ ID NO: 177779 - RNA, 19 nt, Homo sapiens
  misc_RNA (1)...(19): siRNA sense strand
gcaagcaccaauucuauag

SEQ ID NO: 177780 - RNA, 19 nt, Homo sapiens
  misc_RNA (1)...(19): siRNA sense strand
gaagaaggaggaggaaugu

SEQ ID NO: 177781 - RNA, 19 nt, Homo sapiens
  misc_RNA (1)...(19): siRNA sense strand
gaguggaaauccugcucua

SEQ ID NO: 177782 - RNA, 19 nt, Homo sapiens
  misc_RNA (1)...(19): siRNA sense strand
gcagcaaccacuccagaaa

SEQ ID NO: 177783 - RNA, 19 nt, Homo sapiens
  misc_RNA (1)...(19): siRNA sense strand
gcugggagccauuccaauu

SEQ ID NO: 177784 - RNA, 19 nt, Homo sapiens
  misc_RNA (1)...(19): siRNA sense strand
uaaacaucuugccuuauga

SEQ ID NO: 177785 - RNA, 19 nt, Homo sapiens
  misc_RNA (1)...(19): siRNA sense strand
caacauucagcccaaauau

SEQ ID NO: 177786 - RNA, 19 nt, Homo sapiens
  misc_RNA (1)...(19): siRNA sense strand
ggaguauauugaugcauuc

SEQ ID NO: 177787 - RNA, 19 nt, Homo sapiens
  misc_RNA (1)...(19): siRNA sense strand
acaagguggugcaggagua

SEQ ID NO: 177788 - RNA, 19 nt, Homo sapiens
  misc_RNA (1)...(19): siRNA sense strand
uaugugaacgcauccuuua

SEQ ID NO: 177789 - RNA, 19 nt, Homo sapiens
  misc_RNA (1)...(19): siRNA sense strand
gaauacagacuaugugaac

SEQ ID NO: 177790 - RNA, 19 nt, Homo sapiens
  misc_RNA (1)...(19): siRNA sense strand
gacaagaugcggacuggaa

SEQ ID NO: 177791 - RNA, 19 nt, Homo sapiens
  misc_RNA (1)...(19): siRNA sense strand
guaccuuugucgucauuga

SEQ ID NO: 177792 - RNA, 19 nt, Homo sapiens
  misc_RNA (1)...(19): siRNA sense strand
aaauccaacuucuucacua

SEQ ID NO: 177793 - RNA, 19 nt, Homo sapiens
  misc_RNA (1)...(19): siRNA sense strand
uuacagaucauuccauaug

SEQ ID NO: 177794 - RNA, 19 nt, Homo sapiens
  misc_RNA (1)...(19): siRNA sense strand
aggaggaguuuaagaaguu

SEQ ID NO: 177795 - RNA, 19 nt, Homo sapiens
  misc_RNA (1)...(19): siRNA sense strand
cagcaacaauggauuagag

SEQ ID NO: 177796 - RNA, 19 nt, Homo sapiens
  misc_RNA (1)...(19): siRNA sense strand
ggacaugaugcauacagaa

SEQ ID NO: 177797 - RNA, 19 nt, Homo sapiens
  misc_RNA (1)...(19): siRNA sense strand
cuucauucaucaacgguua

SEQ ID NO: 177798 - RNA, 19 nt, Homo sapiens
  misc_RNA (1)...(19): siRNA sense strand
gacaaugggaccacaagaa

SEQ ID NO: 177799 - RNA, 19 nt, Homo sapiens
  misc_RNA (1)...(19): siRNA sense strand
ggacccaccuauuuaacca

SEQ ID NO: 177800 - RNA, 19 nt, Homo sapiens
  misc_RNA (1)...(19): siRNA sense strand
aauccaacuucuucacuaa

SEQ ID NO: 177801 - RNA, 19 nt, Homo sapiens
  misc_RNA (1)...(19): siRNA sense strand
ggcagaaccaguuaaagaa

SEQ ID NO: 177802 - RNA, 19 nt, Homo sapiens
  misc_RNA (1)...(19): siRNA sense strand
cauaugaauucaacagagu

SEQ ID NO: 177803 - RNA, 19 nt, Homo sapiens
  misc_RNA (1)...(19): siRNA sense strand
cggcagaaccaguuaaaga

SEQ ID NO: 177804 - RNA, 19 nt, Homo sapiens
  misc_RNA (1)...(19): siRNA sense strand
gaugcggacuggaaaccuu

SEQ ID NO: 177805 - RNA, 19 nt, Homo sapiens
  misc_RNA (1)...(19): siRNA sense strand
uugaugcauucucagauua

SEQ ID NO: 177806 - RNA, 19 nt, Homo sapiens
  misc_RNA (1)...(19): siRNA sense strand
aggaguauauugaugcauu

SEQ ID NO: 177807 - RNA, 19 nt, Homo sapiens
  misc_RNA (1)...(19): siRNA sense strand
gagugaucauuccaguuaa

SEQ ID NO: 177808 - RNA, 19 nt, Homo sapiens
  misc_RNA (1)...(19): siRNA sense strand
ccaacauucagcccaaaua

SEQ ID NO: 177809 - RNA, 19 nt, Homo sapiens
  misc_RNA (1)...(19): siRNA sense strand
gugcaggaguauauugaug

SEQ ID NO: 177810 - RNA, 19 nt, Homo sapiens
  misc_RNA (1)...(19): siRNA sense strand
gguguccuauggagauauu

SEQ ID NO: 177811 - RNA, 19 nt, Homo sapiens
  misc_RNA (1)...(19): siRNA sense strand
uagaggaggaguuuaagaa

SEQ ID NO: 177812 - RNA, 19 nt, Homo sapiens
  misc_RNA (1)...(19): siRNA sense strand
aaugauuucuggcggauga

SEQ ID NO: 177813 - RNA, 19 nt, Homo sapiens
  misc_RNA (1)...(19): siRNA sense strand
cuauaggcauuacaauuuc

SEQ ID NO: 177814 - RNA, 19 nt, Homo sapiens
  misc_RNA (1)...(19): siRNA sense strand
ucacuaacuucucuuucug

SEQ ID NO: 177815 - RNA, 19 nt, Homo sapiens
  misc_RNA (1)...(19): siRNA sense strand
agaaggaggaggaauguga

SEQ ID NO: 177816 - RNA, 19 nt, Homo sapiens
  misc_RNA (1)...(19): siRNA sense strand
cagcaagcaccaauucuau

SEQ ID NO: 177817 - RNA, 19 nt, Homo sapiens
  misc_RNA (1)...(19): siRNA sense strand
gcaggaguauauugaugca

SEQ ID NO: 177818 - RNA, 19 nt, Homo sapiens
  misc_RNA (1)...(19): siRNA sense strand
ccacacaauugaggacuuc

SEQ ID NO: 177819 - RNA, 19 nt, Homo sapiens
  misc_RNA (1)...(19): siRNA sense strand
ucaaguuccucaagaaggu

SEQ ID NO: 177820 - RNA, 19 nt, Homo sapiens
  misc_RNA (1)...(19): siRNA sense strand
ucacucaguuccacuuuac

SEQ ID NO: 177821 - RNA, 19 nt, Homo sapiens
  misc_RNA (1)...(19): siRNA sense strand
caaggcugcuggaccuaug

SEQ ID NO: 177822 - RNA, 19 nt, Homo sapiens
  misc_RNA (1)...(19): siRNA sense strand
ggacaagcuggaagaggaa

SEQ ID NO: 177823 - RNA, 19 nt, Homo sapiens
  misc_RNA (1)...(19): siRNA sense strand
uuccaauucuuuccgcuua

SEQ ID NO: 177824 - RNA, 19 nt, Homo sapiens
  misc_RNA (1)...(19): siRNA sense strand
ggagccauuccaauucuuu

SEQ ID NO: 177825 - RNA, 19 nt, Homo sapiens
  misc_RNA (1)...(19): siRNA sense strand
ugaagaaggaggaggaaug

SEQ ID NO: 177826 - RNA, 19 nt, Homo sapiens
  misc_RNA (1)...(19): siRNA sense strand
caccaauucuauaggcauu

SEQ ID NO: 177827 - RNA, 19 nt, Homo sapiens
  misc_RNA (1)...(19): siRNA sense strand
ccaacaccagggagaauaa

SEQ ID NO: 177828 - RNA, 19 nt, Homo sapiens
  misc_RNA (1)...(19): siRNA sense strand
caaucaaaauccagaauga

SEQ ID NO: 177829 - RNA, 19 nt, Homo sapiens
  misc_RNA (1)...(19): siRNA sense strand
ggagcauuaucucuaugga

SEQ ID NO: 177830 - RNA, 19 nt, Homo sapiens
  misc_RNA (1)...(19): siRNA sense strand
ggagagaggccaggagaag

SEQ ID NO: 177831 - RNA, 19 nt, Homo sapiens
  misc_RNA (1)...(19): siRNA sense strand
ccaccuauuuaaccacugu

SEQ ID NO: 177832 - RNA, 19 nt, Homo sapiens
  misc_RNA (1)...(19): siRNA sense strand
gaagagaauacagacuaug

SEQ ID NO: 177833 - RNA, 19 nt, Homo sapiens
  misc_RNA (1)...(19): siRNA sense strand
gcagaaccaguuaaagaag

SEQ ID NO: 177834 - RNA, 19 nt, Homo sapiens
  misc_RNA (1)...(19): siRNA sense strand
ggaaauuaaccggagaaug

SEQ ID NO: 177835 - RNA, 19 nt, Homo sapiens
  misc_RNA (1)...(19): siRNA sense strand
aagcccuucuggagcauua

SEQ ID NO: 177836 - RNA, 19 nt, Homo sapiens
  misc_RNA (1)...(19): siRNA sense strand
cagauuaugccaacuucaa

SEQ ID NO: 177837 - RNA, 19 nt, Homo sapiens
  misc_RNA (1)...(19): siRNA sense strand
gauguaaccuucaagauuu

SEQ ID NO: 177838 - RNA, 19 nt, Homo sapiens
  misc_RNA (1)...(19): siRNA sense strand
gcaaagaccuccuggaaau

SEQ ID NO: 177839 - RNA, 19 nt, Homo sapiens
  misc_RNA (1)...(19): siRNA sense strand
gacaaagccugacaagaua

SEQ ID NO: 177840 - RNA, 19 nt, Homo sapiens
  misc_RNA (1)...(19): siRNA sense strand
gaaaguacuucauggaaug

SEQ ID NO: 177841 - RNA, 19 nt, Homo sapiens
  misc_RNA (1)...(19): siRNA sense strand
ggacaaagccugacaagau

SEQ ID NO: 177842 - RNA, 19 nt, Homo sapiens
  misc_RNA (1)...(19): siRNA sense strand
caaggaauccagaguauua

SEQ ID NO: 177843 - RNA, 19 nt, Homo sapiens
  misc_RNA (1)...(19): siRNA sense strand
gagaauacauugucacuca

SEQ ID NO: 177844 - RNA, 19 nt, Homo sapiens
  misc_RNA (1)...(19): siRNA sense strand
ucacagagauccagucuau

SEQ ID NO: 177845 - RNA, 19 nt, Homo sapiens
  misc_RNA (1)...(19): siRNA sense strand
uuacacagcucuuugauga

SEQ ID NO: 177846 - RNA, 19 nt, Homo sapiens
  misc_RNA (1)...(19): siRNA sense strand
cauaugaggugcaauuauu

SEQ ID NO: 177847 - RNA, 19 nt, Homo sapiens
  misc_RNA (1)...(19): siRNA sense strand
gagcagagauggagagcuu

SEQ ID NO: 177848 - RNA, 19 nt, Homo sapiens
  misc_RNA (1)...(19): siRNA sense strand
caagaaagcuacggaguga

SEQ ID NO: 177849 - RNA, 19 nt, Homo sapiens
  misc_RNA (1)...(19): siRNA sense strand
gagugaagcucuccaaugu

SEQ ID NO: 177850 - RNA, 19 nt, Homo sapiens
  misc_RNA (1)...(19): siRNA sense strand
gaugaggucucuuguagug

SEQ ID NO: 177851 - RNA, 19 nt, Homo sapiens
  misc_RNA (1)...(19): siRNA sense strand
gaaaacuucuuguccaaua

SEQ ID NO: 177852 - RNA, 19 nt, Homo sapiens
  misc_RNA (1)...(19): siRNA sense strand
guggagaucucagcaauaa

SEQ ID NO: 177853 - RNA, 19 nt, Homo sapiens
  misc_RNA (1)...(19): siRNA sense strand
caaagacucuguggacauu

SEQ ID NO: 177854 - RNA, 19 nt, Homo sapiens
  misc_RNA (1)...(19): siRNA sense strand
ccagagagauguaacuuca

SEQ ID NO: 177855 - RNA, 19 nt, Homo sapiens
  misc_RNA (1)...(19): siRNA sense strand
ccaauucucuccugauuuc

SEQ ID NO: 177856 - RNA, 19 nt, Homo sapiens
  misc_RNA (1)...(19): siRNA sense strand
caaagccacucuauucaga

SEQ ID NO: 177857 - RNA, 19 nt, Homo sapiens
  misc_RNA (1)...(19): siRNA sense strand
gaguaacggugaacaauuc

SEQ ID NO: 177858 - RNA, 19 nt, Homo sapiens
  misc_RNA (1)...(19): siRNA sense strand
gaaaggaagaaacacagua

SEQ ID NO: 177859 - RNA, 19 nt, Homo sapiens
  misc_RNA (1)...(19): siRNA sense strand
gaagacagcacuaucacaa

SEQ ID NO: 177860 - RNA, 19 nt, Homo sapiens
  misc_RNA (1)...(19): siRNA sense strand
acaaggagacguagaauuu

SEQ ID NO: 177861 - RNA, 19 nt, Homo sapiens
  misc_RNA (1)...(19): siRNA sense strand
ggauguaaccuucaagauu

SEQ ID NO: 177862 - RNA, 19 nt, Homo sapiens
  misc_RNA (1)...(19): siRNA sense strand
ucacaaagccacucuauuc

SEQ ID NO: 177863 - RNA, 19 nt, Homo sapiens
  misc_RNA (1)...(19): siRNA sense strand
auacagcaguuauuccuua

SEQ ID NO: 177864 - RNA, 19 nt, Homo sapiens
  misc_RNA (1)...(19): siRNA sense strand
gcaaccgaguaucgauuua

SEQ ID NO: 177865 - RNA, 19 nt, Homo sapiens
  misc_RNA (1)...(19): siRNA sense strand
ccaaagaugccaaagaauu

SEQ ID NO: 177866 - RNA, 19 nt, Homo sapiens
  misc_RNA (1)...(19): siRNA sense strand
cuggaaauguggauucuua

SEQ ID NO: 177867 - RNA, 19 nt, Homo sapiens
  misc_RNA (1)...(19): siRNA sense strand
gagguaacauugucucaug

SEQ ID NO: 177868 - RNA, 19 nt, Homo sapiens
  misc_RNA (1)...(19): siRNA sense strand
ccagaaagguaaccggaaa

SEQ ID NO: 177869 - RNA, 19 nt, Homo sapiens
  misc_RNA (1)...(19): siRNA sense strand
accauuaucuguccacuua

SEQ ID NO: 177870 - RNA, 19 nt, Homo sapiens
  misc_RNA (1)...(19): siRNA sense strand
ccacuaagcaacacaaauu

SEQ ID NO: 177871 - RNA, 19 nt, Homo sapiens
  misc_RNA (1)...(19): siRNA sense strand
gaucuaacauugcgcaaca

SEQ ID NO: 177872 - RNA, 19 nt, Homo sapiens
  misc_RNA (1)...(19): siRNA sense strand
gcaaacagauccuuuaccu

SEQ ID NO: 177873 - RNA, 19 nt, Homo sapiens
  misc_RNA (1)...(19): siRNA sense strand
gaagaaacacaguauguca

SEQ ID NO: 177874 - RNA, 19 nt, Homo sapiens
  misc_RNA (1)...(19): siRNA sense strand
acaagucacucuccaaaga

SEQ ID NO: 177875 - RNA, 19 nt, Homo sapiens
  misc_RNA (1)...(19): siRNA sense strand
gaguaaagugugaccauua

SEQ ID NO: 177876 - RNA, 19 nt, Homo sapiens
  misc_RNA (1)...(19): siRNA sense strand
ccaacuaccuucuauccaa

SEQ ID NO: 177877 - RNA, 19 nt, Homo sapiens
  misc_RNA (1)...(19): siRNA sense strand
ggguguaucagacuaauua

SEQ ID NO: 177878 - RNA, 19 nt, Homo sapiens
  misc_RNA (1)...(19): siRNA sense strand
gcaaggaagcccagacuga

SEQ ID NO: 177879 - RNA, 19 nt, Homo sapiens
  misc_RNA (1)...(19): siRNA sense strand
uaugauauccugcuucuaa

SEQ ID NO: 177880 - RNA, 19 nt, Homo sapiens
  misc_RNA (1)...(19): siRNA sense strand
gcaugccacuggagacuuu

SEQ ID NO: 177881 - RNA, 19 nt, Homo sapiens
  misc_RNA (1)...(19): siRNA sense strand
ggauagacaacaccacaua

SEQ ID NO: 177882 - RNA, 19 nt, Homo sapiens
  misc_RNA (1)...(19): siRNA sense strand
ccaauggagcugugaaaua

SEQ ID NO: 177883 - RNA, 19 nt, Homo sapiens
  misc_RNA (1)...(19): siRNA sense strand
ccagggagauccuaucaau

SEQ ID NO: 177884 - RNA, 19 nt, Homo sapiens
  misc_RNA (1)...(19): siRNA sense strand
gaaaauacauggcuacagu

SEQ ID NO: 177885 - RNA, 19 nt, Homo sapiens
  misc_RNA (1)...(19): siRNA sense strand
ucaaccggcuugcauguuu

SEQ ID NO: 177886 - RNA, 19 nt, Homo sapiens
  misc_RNA (1)...(19): siRNA sense strand
uguaagagauguccucaga

SEQ ID NO: 177887 - RNA, 19 nt, Homo sapiens
  misc_RNA (1)...(19): siRNA sense strand
ggaaugaccaguagucugu

SEQ ID NO: 177888 - RNA, 19 nt, Homo sapiens
  misc_RNA (1)...(19): siRNA sense strand
caauggagcugugaaauac

SEQ ID NO: 177889 - RNA, 19 nt, Homo sapiens
  misc_RNA (1)...(19): siRNA sense strand
ggacagugccugacaaagu

SEQ ID NO: 177890 - RNA, 19 nt, Homo sapiens
  misc_RNA (1)...(19): siRNA sense strand
gaacagucccuuccagugu

SEQ ID NO: 177891 - RNA, 19 nt, Homo sapiens
  misc_RNA (1)...(19): siRNA sense strand
ggaaccaucuauaacuuca

SEQ ID NO: 177892 - RNA, 19 nt, Homo sapiens
  misc_RNA (1)...(19): siRNA sense strand
caaggaauacgaggaguua

SEQ ID NO: 177893 - RNA, 19 nt, Homo sapiens
  misc_RNA (1)...(19): siRNA sense strand
gaaaaggaugugcuaauua

SEQ ID NO: 177894 - RNA, 19 nt, Homo sapiens
  misc_RNA (1)...(19): siRNA sense strand
caacacaaauuugaagauc

SEQ ID NO: 177895 - RNA, 19 nt, Homo sapiens
  misc_RNA (1)...(19): siRNA sense strand
gaacagugccugcccaagu

SEQ ID NO: 177896 - RNA, 19 nt, Homo sapiens
  misc_RNA (1)...(19): siRNA sense strand
gaacuguggucuugcaaac

SEQ ID NO: 177897 - RNA, 19 nt, Homo sapiens
  misc_RNA (1)...(19): siRNA sense strand
gaacaauuccggucguaau

SEQ ID NO: 177898 - RNA, 19 nt, Homo sapiens
  misc_RNA (1)...(19): siRNA sense strand
gcuacagucaccaguauua

SEQ ID NO: 177899 - RNA, 19 nt, Homo sapiens
  misc_RNA (1)...(19): siRNA sense strand
caacaucacugugggaaag

SEQ ID NO: 177900 - RNA, 19 nt, Homo sapiens
  misc_RNA (1)...(19): siRNA sense strand
gaacauuuccagacaaagu

SEQ ID NO: 177901 - RNA, 19 nt, Homo sapiens
  misc_RNA (1)...(19): siRNA sense strand
gcagaacauuuccagacaa

SEQ ID NO: 177902 - RNA, 19 nt, Homo sapiens
  misc_RNA (1)...(19): siRNA sense strand
gaggugcaauuauuugaug

SEQ ID NO: 177903 - RNA, 19 nt, Homo sapiens
  misc_RNA (1)...(19): siRNA sense strand
cagaacauuuccagacaaa

SEQ ID NO: 177904 - RNA, 19 nt, Homo sapiens
  misc_RNA (1)...(19): siRNA sense strand
ggguaggacuggaaccuuu

SEQ ID NO: 177905 - RNA, 19 nt, Homo sapiens
  misc_RNA (1)...(19): siRNA sense strand
gugaagcucuccaauguag

SEQ ID NO: 177906 - RNA, 19 nt, Homo sapiens
  misc_RNA (1)...(19): siRNA sense strand
auucuugucuugacgauua

SEQ ID NO: 177907 - RNA, 19 nt, Homo sapiens
  misc_RNA (1)...(19): siRNA sense strand
ccggagauguggauaacua

SEQ ID NO: 177908 - RNA, 19 nt, Homo sapiens
  misc_RNA (1)...(19): siRNA sense strand
agagagaacuguggucuug

SEQ ID NO: 177909 - RNA, 19 nt, Homo sapiens
  misc_RNA (1)...(19): siRNA sense strand
gaaccuuuauugcauugga

SEQ ID NO: 177910 - RNA, 19 nt, Homo sapiens
  misc_RNA (1)...(19): siRNA sense strand
uaacaccaggcaagaaaua

SEQ ID NO: 177911 - RNA, 19 nt, Homo sapiens
  misc_RNA (1)...(19): siRNA sense strand
acuaugaagucaccauuaa

SEQ ID NO: 177912 - RNA, 19 nt, Homo sapiens
  misc_RNA (1)...(19): siRNA sense strand
gaaauguggauucuuacaa

SEQ ID NO: 177913 - RNA, 19 nt, Homo sapiens
  misc_RNA (1)...(19): siRNA sense strand
gcacugaggacuugcaugu

SEQ ID NO: 177914 - RNA, 19 nt, Homo sapiens
  misc_RNA (1)...(19): siRNA sense strand
gaaaccacccagucucuga

SEQ ID NO: 177915 - RNA, 19 nt, Homo sapiens
  misc_RNA (1)...(19): siRNA sense strand
uuuaugagcugauucucua

SEQ ID NO: 177916 - RNA, 19 nt, Homo sapiens
  misc_RNA (1)...(19): siRNA sense strand
caaacaugcuacuuccuau

SEQ ID NO: 177917 - RNA, 19 nt, Homo sapiens
  misc_RNA (1)...(19): siRNA sense strand
gggcucacccuguaacuuu

SEQ ID NO: 177918 - RNA, 19 nt, Homo sapiens
  misc_RNA (1)...(19): siRNA sense strand
agacagcacuaucacaaug

SEQ ID NO: 177919 - RNA, 19 nt, Homo sapiens
  misc_RNA (1)...(19): siRNA sense strand
gcgggucccugaagaauca

SEQ ID NO: 177920 - RNA, 19 nt, Homo sapiens
  misc_RNA (1)...(19): siRNA sense strand
ggaguaacggugaacaauu

SEQ ID NO: 177921 - RNA, 19 nt, Homo sapiens
  misc_RNA (1)...(19): siRNA sense strand
caaagaugccaaagaauuc

SEQ ID NO: 177922 - RNA, 19 nt, Homo sapiens
  misc_RNA (1)...(19): siRNA sense strand
ugucaaacaugccaaugaa

SEQ ID NO: 177923 - RNA, 19 nt, Homo sapiens
  misc_RNA (1)...(19): siRNA sense strand
ggaagucauuguugagagu

SEQ ID NO: 177924 - RNA, 19 nt, Homo sapiens
  misc_RNA (1)...(19): siRNA sense strand
cuccaaagaugccaaagaa

SEQ ID NO: 177925 - RNA, 19 nt, Homo sapiens
  misc_RNA (1)...(19): siRNA sense strand
ggaccaggauucccucuac

SEQ ID NO: 177926 - RNA, 19 nt, Homo sapiens
  misc_RNA (1)...(19): siRNA sense strand
ucguagggaucgaccauua

SEQ ID NO: 177927 - RNA, 19 nt, Homo sapiens
  misc_RNA (1)...(19): siRNA sense strand
caguauuaguggagacuua

SEQ ID NO: 177928 - RNA, 19 nt, Homo sapiens
  misc_RNA (1)...(19): siRNA sense strand
gauaaagggauccuaguuc

SEQ ID NO: 177929 - RNA, 19 nt, Homo sapiens
  misc_RNA (1)...(19): siRNA sense strand
ggagaucucagcaauaaag

SEQ ID NO: 177930 - RNA, 19 nt, Homo sapiens
  misc_RNA (1)...(19): siRNA sense strand
guggauaacuaugagguaa

SEQ ID NO: 177931 - RNA, 19 nt, Homo sapiens
  misc_RNA (1)...(19): siRNA sense strand
guauuagcaccuuggauua

SEQ ID NO: 177932 - RNA, 19 nt, Homo sapiens
  misc_RNA (1)...(19): siRNA sense strand
ccagcgaggugguugaaga

SEQ ID NO: 177933 - RNA, 19 nt, Homo sapiens
  misc_RNA (1)...(19): siRNA sense strand
aagacucuguggacauuua

SEQ ID NO: 177934 - RNA, 19 nt, Homo sapiens
  misc_RNA (1)...(19): siRNA sense strand
uaagauaugcggugaggaa

SEQ ID NO: 177935 - RNA, 19 nt, Homo sapiens
  misc_RNA (1)...(19): siRNA sense strand
gagccauggucgagaaaga

SEQ ID NO: 177936 - RNA, 19 nt, Homo sapiens
  misc_RNA (1)...(19): siRNA sense strand
ugugagugcuggucuguuu

SEQ ID NO: 177937 - RNA, 19 nt, Homo sapiens
  misc_RNA (1)...(19): siRNA sense strand
gcauuuggcuuugccuuuc

SEQ ID NO: 177938 - RNA, 19 nt, Homo sapiens
  misc_RNA (1)...(19): siRNA sense strand
ggcuuaaacucuuggcauu

SEQ ID NO: 177939 - RNA, 19 nt, Homo sapiens
  misc_RNA (1)...(19): siRNA sense strand
cuuaaacucuuggcauuug

SEQ ID NO: 177940 - RNA, 19 nt, Homo sapiens
  misc_RNA (1)...(19): siRNA sense strand
gcuuaaacucuuggcauuu

SEQ ID NO: 177941 - RNA, 19 nt, Homo sapiens
  misc_RNA (1)...(19): siRNA sense strand
acucuuggcauuuggcuuu

SEQ ID NO: 177942 - RNA, 19 nt, Homo sapiens
  misc_RNA (1)...(19): siRNA sense strand
gcauuuggcuuugccuuuc

SEQ ID NO: 177943 - RNA, 19 nt, Homo sapiens
  misc_RNA (1)...(19): siRNA sense strand
ggcuuaaacucuuggcauu

SEQ ID NO: 177944 - RNA, 19 nt, Homo sapiens
  misc_RNA (1)...(19): siRNA sense strand
cuuaaacucuuggcauuug

SEQ ID NO: 177945 - RNA, 19 nt, Homo sapiens
  misc_RNA (1)...(19): siRNA sense strand
gcuuaaacucuuggcauuu

SEQ ID NO: 177946 - RNA, 19 nt, Homo sapiens
  misc_RNA (1)...(19): siRNA sense strand
acucuuggcauuuggcuuu

SEQ ID NO: 177947 - RNA, 19 nt, Homo sapiens
  misc_RNA (1)...(19): siRNA sense strand
gcauuuggcuuugccuuuc

SEQ ID NO: 177948 - RNA, 19 nt, Homo sapiens
  misc_RNA (1)...(19): siRNA sense strand
ggcuuaaacucuuggcauu

SEQ ID NO: 177949 - RNA, 19 nt, Homo sapiens
  misc_RNA (1)...(19): siRNA sense strand
cuuaaacucuuggcauuug

SEQ ID NO: 177950 - RNA, 19 nt, Homo sapiens
  misc_RNA (1)...(19): siRNA sense strand
gcuuaaacucuuggcauuu

SEQ ID NO: 177951 - RNA, 19 nt, Homo sapiens
  misc_RNA (1)...(19): siRNA sense strand
acucuuggcauuuggcuuu

SEQ ID NO: 177952 - RNA, 19 nt, Homo sapiens
  misc_RNA (1)...(19): siRNA sense strand
gcauuuggcuuugccuuuc

SEQ ID NO: 177953 - RNA, 19 nt, Homo sapiens
  misc_RNA (1)...(19): siRNA sense strand
ggcuuaaacucuuggcauu

SEQ ID NO: 177954 - RNA, 19 nt, Homo sapiens
  misc_RNA (1)...(19): siRNA sense strand
cuuaaacucuuggcauuug

SEQ ID NO: 177955 - RNA, 19 nt, Homo sapiens
  misc_RNA (1)...(19): siRNA sense strand
gcuuaaacucuuggcauuu

SEQ ID NO: 177956 - RNA, 19 nt, Homo sapiens
  misc_RNA (1)...(19): siRNA sense strand
acucuuggcauuuggcuuu

SEQ ID NO: 177957 - RNA, 19 nt, Homo sapiens
  misc_RNA (1)...(19): siRNA sense strand
gaaaugugcugcccuauga

SEQ ID NO: 177958 - RNA, 19 nt, Homo sapiens
  misc_RNA (1)...(19): siRNA sense strand
ucacagaucuccagaauga

SEQ ID NO: 177959 - RNA, 19 nt, Homo sapiens
  misc_RNA (1)...(19): siRNA sense strand
gaaugaaggucgugucuca

SEQ ID NO: 177960 - RNA, 19 nt, Homo sapiens
  misc_RNA (1)...(19): siRNA sense strand
ggagaaagacggaguaaau

SEQ ID NO: 177961 - RNA, 19 nt, Homo sapiens
  misc_RNA (1)...(19): siRNA sense strand
ggagaaagacggaguaaau

SEQ ID NO: 177962 - RNA, 19 nt, Homo sapiens
  misc_RNA (1)...(19): siRNA sense strand
guacugacaucacccuaaa

SEQ ID NO: 177963 - RNA, 19 nt, Homo sapiens
  misc_RNA (1)...(19): siRNA sense strand
gagaaagacggaguaaaua

SEQ ID NO: 177964 - RNA, 19 nt, Homo sapiens
  misc_RNA (1)...(19): siRNA sense strand
ggaaugacguagccaguuc

SEQ ID NO: 177965 - RNA, 19 nt, Homo sapiens
  misc_RNA (1)...(19): siRNA sense strand
gagaaagacggaguaaaua

SEQ ID NO: 177966 - RNA, 19 nt, Homo sapiens
  misc_RNA (1)...(19): siRNA sense strand
agaaggaagucccguauga

SEQ ID NO: 177967 - RNA, 19 nt, Homo sapiens
  misc_RNA (1)...(19): siRNA sense strand
ggucacagaucuccagaau

SEQ ID NO: 177968 - RNA, 19 nt, Homo sapiens
  misc_RNA (1)...(19): siRNA sense strand
ccaaugaggucacagaucu

SEQ ID NO: 177969 - RNA, 19 nt, Homo sapiens
  misc_RNA (1)...(19): siRNA sense strand
gaacccggguguuuguaug

SEQ ID NO: 177970 - RNA, 19 nt, Homo sapiens
  misc_RNA (1)...(19): siRNA sense strand
ucagggaucuggucuuuag

SEQ ID NO: 177971 - RNA, 19 nt, Homo sapiens
  misc_RNA (1)...(19): siRNA sense strand
gaacccggguguuuguaug

SEQ ID NO: 177972 - RNA, 19 nt, Homo sapiens
  misc_RNA (1)...(19): siRNA sense strand
agaaugaaacucagacuaa

SEQ ID NO: 177973 - RNA, 19 nt, Homo sapiens
  misc_RNA (1)...(19): siRNA sense strand
ccaagaaccgcuacagaaa

SEQ ID NO: 177974 - RNA, 19 nt, Homo sapiens
  misc_RNA (1)...(19): siRNA sense strand
gaaugaaacucagacuaag

SEQ ID NO: 177975 - RNA, 19 nt, Homo sapiens
  misc_RNA (1)...(19): siRNA sense strand
ccacagaacucgaccuacu

SEQ ID NO: 177976 - RNA, 19 nt, Homo sapiens
  misc_RNA (1)...(19): siRNA sense strand
ucacagaacuccaacuacu

SEQ ID NO: 177977 - RNA, 19 nt, Homo sapiens
  misc_RNA (1)...(19): siRNA sense strand
ugacaucacccuaaaggaa

SEQ ID NO: 177978 - RNA, 19 nt, Homo sapiens
  misc_RNA (1)...(19): siRNA sense strand
gugaggaagugauggagaa

SEQ ID NO: 177979 - RNA, 19 nt, Homo sapiens
  misc_RNA (1)...(19): siRNA sense strand
gcacaacagagacucgaaa

SEQ ID NO: 177980 - RNA, 19 nt, Homo sapiens
  misc_RNA (1)...(19): siRNA sense strand
ggaaagaauggaaucaaca

SEQ ID NO: 177981 - RNA, 19 nt, Homo sapiens
  misc_RNA (1)...(19): siRNA sense strand
gccaagaaccgcuacagaa

SEQ ID NO: 177982 - RNA, 19 nt, Homo sapiens
  misc_RNA (1)...(19): siRNA sense strand
ggucauugccggagccuuu

SEQ ID NO: 177983 - RNA, 19 nt, Homo sapiens
  misc_RNA (1)...(19): siRNA sense strand
gcccauacccucaggacua

SEQ ID NO: 177984 - RNA, 19 nt, Homo sapiens
  misc_RNA (1)...(19): siRNA sense strand
ggagauugguaacuaguac

SEQ ID NO: 177985 - RNA, 19 nt, Homo sapiens
  misc_RNA (1)...(19): siRNA sense strand
gcacagacccacagaacuc

SEQ ID NO: 177986 - RNA, 19 nt, Homo sapiens
  misc_RNA (1)...(19): siRNA sense strand
caacaucaccguggauaga

SEQ ID NO: 177987 - RNA, 19 nt, Homo sapiens
  misc_RNA (1)...(19): siRNA sense strand
aagaaccgcuacagaaaug

SEQ ID NO: 177988 - RNA, 19 nt, Homo sapiens
  misc_RNA (1)...(19): siRNA sense strand
cuacgaggccuuugaguug

SEQ ID NO: 177989 - RNA, 19 nt, Homo sapiens
  misc_RNA (1)...(19): siRNA sense strand
gaacagagacucgaaacac

SEQ ID NO: 177990 - RNA, 19 nt, Homo sapiens
  misc_RNA (1)...(19): siRNA sense strand
caggacagaucuucaugug

SEQ ID NO: 177991 - RNA, 19 nt, Homo sapiens
  misc_RNA (1)...(19): siRNA sense strand
gggaaagaauggaaucaac

SEQ ID NO: 177992 - RNA, 19 nt, Homo sapiens
  misc_RNA (1)...(19): siRNA sense strand
guaaggaagaugagagaga

SEQ ID NO: 177993 - RNA, 19 nt, Homo sapiens
  misc_RNA (1)...(19): siRNA sense strand
gaugguggcuucggcuuca

SEQ ID NO: 177994 - RNA, 19 nt, Homo sapiens
  misc_RNA (1)...(19): siRNA sense strand
gcagaacagagacucgaaa

SEQ ID NO: 177995 - RNA, 19 nt, Homo sapiens
  misc_RNA (1)...(19): siRNA sense strand
caagaaccgcuacagaaau

SEQ ID NO: 177996 - RNA, 19 nt, Homo sapiens
  misc_RNA (1)...(19): siRNA sense strand
ugaagaggaggaauaagaa

SEQ ID NO: 177997 - RNA, 19 nt, Homo sapiens
  misc_RNA (1)...(19): siRNA sense strand
gaugguggcagaacagaga

SEQ ID NO: 177998 - RNA, 19 nt, Homo sapiens
  misc_RNA (1)...(19): siRNA sense strand
ccacauacccagacacagu

SEQ ID NO: 177999 - RNA, 19 nt, Homo sapiens
  misc_RNA (1)...(19): siRNA sense strand
ugacaagccucagcaagca

SEQ ID NO: 178000 - RNA, 19 nt, Homo sapiens
  misc_RNA (1)...(19): siRNA sense strand
caccguggauggacuugaa

SEQ ID NO: 178001 - RNA, 19 nt, Homo sapiens
  misc_RNA (1)...(19): siRNA sense strand
ggaagucccguaugaggau

SEQ ID NO: 178002 - RNA, 19 nt, Homo sapiens
  misc_RNA (1)...(19): siRNA sense strand
gggugaagugugagcauua

SEQ ID NO: 178003 - RNA, 19 nt, Homo sapiens
  misc_RNA (1)...(19): siRNA sense strand
ccaaugagacgugguacaa

SEQ ID NO: 178004 - RNA, 19 nt, Homo sapiens
  misc_RNA (1)...(19): siRNA sense strand
gaaagaauggaaucaacag

SEQ ID NO: 178005 - RNA, 19 nt, Homo sapiens
  misc_RNA (1)...(19): siRNA sense strand
gccaggcucugacuacauc

SEQ ID NO: 178006 - RNA, 19 nt, Homo sapiens
  misc_RNA (1)...(19): siRNA sense strand
acucagggaucuggucuuu

SEQ ID NO: 178007 - RNA, 19 nt, Homo sapiens
  misc_RNA (1)...(19): siRNA sense strand
acucucaguuguacguaua

SEQ ID NO: 178008 - RNA, 19 nt, Homo sapiens
  misc_RNA (1)...(19): siRNA sense strand
aagcaggacuggaccaaca

SEQ ID NO: 178009 - RNA, 19 nt, Homo sapiens
  misc_RNA (1)...(19): siRNA sense strand
gugagaaaccuccauaugg

SEQ ID NO: 178010 - RNA, 19 nt, Homo sapiens
  misc_RNA (1)...(19): siRNA sense strand
ccagugagaaaccuccaua

SEQ ID NO: 178011 - RNA, 19 nt, Homo sapiens
  misc_RNA (1)...(19): siRNA sense strand
ggaggaauaagaagaagca

SEQ ID NO: 178012 - RNA, 19 nt, Homo sapiens
  misc_RNA (1)...(19): siRNA sense strand
gggaggcugugucuguguu

SEQ ID NO: 178013 - RNA, 19 nt, Homo sapiens
  misc_RNA (1)...(19): siRNA sense strand
gcuacgaggccuuugaguu

SEQ ID NO: 178014 - RNA, 19 nt, Homo sapiens
  misc_RNA (1)...(19): siRNA sense strand
cgagaggaaugaggucaga

SEQ ID NO: 178015 - RNA, 19 nt, Homo sapiens
  misc_RNA (1)...(19): siRNA sense strand
gaaagacggaguaaauagc

SEQ ID NO: 178016 - RNA, 19 nt, Homo sapiens
  misc_RNA (1)...(19): siRNA sense strand
ggacaucccagcugaagac

SEQ ID NO: 178017 - RNA, 19 nt, Homo sapiens
  misc_RNA (1)...(19): siRNA sense strand
gaaagacggaguaaauagc

SEQ ID NO: 178018 - RNA, 19 nt, Homo sapiens
  misc_RNA (1)...(19): siRNA sense strand
acagagacccgaaacacaa

SEQ ID NO: 178019 - RNA, 19 nt, Homo sapiens
  misc_RNA (1)...(19): siRNA sense strand
acagaucuccagaaugaaa

SEQ ID NO: 178020 - RNA, 19 nt, Homo sapiens
  misc_RNA (1)...(19): siRNA sense strand
cauccaggcccacaaguug

SEQ ID NO: 178021 - RNA, 19 nt, Homo sapiens
  misc_RNA (1)...(19): siRNA sense strand
ccaugugggugggaaagaa

SEQ ID NO: 178022 - RNA, 19 nt, Homo sapiens
  misc_RNA (1)...(19): siRNA sense strand
gcacaggaacccucauugc

SEQ ID NO: 178023 - RNA, 19 nt, Homo sapiens
  misc_RNA (1)...(19): siRNA sense strand
acccgaaacacaacaaaua

SEQ ID NO: 178024 - RNA, 19 nt, Homo sapiens
  misc_RNA (1)...(19): siRNA sense strand
cgagugcacuggagauggu

SEQ ID NO: 178025 - RNA, 19 nt, Homo sapiens
  misc_RNA (1)...(19): siRNA sense strand
cugaagaggaggaauaaga

SEQ ID NO: 178026 - RNA, 19 nt, Homo sapiens
  misc_RNA (1)...(19): siRNA sense strand
aaugagacgugguacaaag

SEQ ID NO: 178027 - RNA, 19 nt, Homo sapiens
  misc_RNA (1)...(19): siRNA sense strand
cagaaugaaacucagacua

SEQ ID NO: 178028 - RNA, 19 nt, Homo sapiens
  misc_RNA (1)...(19): siRNA sense strand
ugaguacacuggagauggu

SEQ ID NO: 178029 - RNA, 19 nt, Homo sapiens
  misc_RNA (1)...(19): siRNA sense strand
cagagaacaacgccaagaa

SEQ ID NO: 178030 - RNA, 19 nt, Homo sapiens
  misc_RNA (1)...(19): siRNA sense strand
gaagaggaggaauaagaag

SEQ ID NO: 178031 - RNA, 19 nt, Homo sapiens
  misc_RNA (1)...(19): siRNA sense strand
ccggaaccuuguacacauu

SEQ ID NO: 178032 - RNA, 19 nt, Homo sapiens
  misc_RNA (1)...(19): siRNA sense strand
gcacagagacccgaaacac

SEQ ID NO: 178033 - RNA, 19 nt, Homo sapiens
  misc_RNA (1)...(19): siRNA sense strand
caccguggauagacuugaa

SEQ ID NO: 178034 - RNA, 19 nt, Homo sapiens
  misc_RNA (1)...(19): siRNA sense strand
ugaguacacuggagauggu

SEQ ID NO: 178035 - RNA, 19 nt, Homo sapiens
  misc_RNA (1)...(19): siRNA sense strand
caacagagacucgaaacac

SEQ ID NO: 178036 - RNA, 19 nt, Homo sapiens
  misc_RNA (1)...(19): siRNA sense strand
ggccacagccagucucaga

SEQ ID NO: 178037 - RNA, 19 nt, Homo sapiens
  misc_RNA (1)...(19): siRNA sense strand
gaaacacaacagccaccaa

SEQ ID NO: 178038 - RNA, 19 nt, Homo sapiens
  misc_RNA (1)...(19): siRNA sense strand
gguacugacaucacccuaa

SEQ ID NO: 178039 - RNA, 19 nt, Homo sapiens
  misc_RNA (1)...(19): siRNA sense strand
agaaagacggaguaaauag

SEQ ID NO: 178040 - RNA, 19 nt, Homo sapiens
  misc_RNA (1)...(19): siRNA sense strand
caucaaugccagcuucaug

SEQ ID NO: 178041 - RNA, 19 nt, Homo sapiens
  misc_RNA (1)...(19): siRNA sense strand
gaaccgcuacagaaaugug

SEQ ID NO: 178042 - RNA, 19 nt, Homo sapiens
  misc_RNA (1)...(19): siRNA sense strand
agaaagacggaguaaauag

SEQ ID NO: 178043 - RNA, 19 nt, Homo sapiens
  misc_RNA (1)...(19): siRNA sense strand
aaacucagacuaagaacuc

SEQ ID NO: 178044 - RNA, 19 nt, Homo sapiens
  misc_RNA (1)...(19): siRNA sense strand
gaggucagaggcuauaaca

SEQ ID NO: 178045 - RNA, 19 nt, Homo sapiens
  misc_RNA (1)...(19): siRNA sense strand
ggccuagacucacagaacu

SEQ ID NO: 178046 - RNA, 19 nt, Homo sapiens
  misc_RNA (1)...(19): siRNA sense strand
gagaaggaagucccguaug

SEQ ID NO: 178047 - RNA, 19 nt, Homo sapiens
  misc_RNA (1)...(19): siRNA sense strand
gacuugaacccggguguuu

SEQ ID NO: 178048 - RNA, 19 nt, Homo sapiens
  misc_RNA (1)...(19): siRNA sense strand
cgagaaggaagucccguau

SEQ ID NO: 178049 - RNA, 19 nt, Homo sapiens
  misc_RNA (1)...(19): siRNA sense strand
cagacaccuugcuggcuuu

SEQ ID NO: 178050 - RNA, 19 nt, Homo sapiens
  misc_RNA (1)...(19): siRNA sense strand
ccacagccagucucagaug

SEQ ID NO: 178051 - RNA, 19 nt, Homo sapiens
  misc_RNA (1)...(19): siRNA sense strand
gaguggaggcucagaccaa

SEQ ID NO: 178052 - RNA, 19 nt, Homo sapiens
  misc_RNA (1)...(19): siRNA sense strand
gacuugaacccggguguuu

SEQ ID NO: 178053 - RNA, 19 nt, Homo sapiens
  misc_RNA (1)...(19): siRNA sense strand
ucguggagauugguaacua

SEQ ID NO: 178054 - RNA, 19 nt, Homo sapiens
  misc_RNA (1)...(19): siRNA sense strand
auaagaagaagcagcagaa

SEQ ID NO: 178055 - RNA, 19 nt, Homo sapiens
  misc_RNA (1)...(19): siRNA sense strand
caccguggauggccuugga

SEQ ID NO: 178056 - RNA, 19 nt, Homo sapiens
  misc_RNA (1)...(19): siRNA sense strand
cagcagaaaccagaacuca

SEQ ID NO: 178057 - RNA, 19 nt, Homo sapiens
  misc_RNA (1)...(19): siRNA sense strand
gagauugacucggugaaau

SEQ ID NO: 178058 - RNA, 19 nt, Homo sapiens
  misc_RNA (1)...(19): siRNA sense strand
ucgagaaacugaaggagaa

SEQ ID NO: 178059 - RNA, 19 nt, Homo sapiens
  misc_RNA (1)...(19): siRNA sense strand
ugacaacuauucagccaau

SEQ ID NO: 178060 - RNA, 19 nt, Homo sapiens
  misc_RNA (1)...(19): siRNA sense strand
caaggacaccaucgagaaa

SEQ ID NO: 178061 - RNA, 19 nt, Homo sapiens
  misc_RNA (1)...(19): siRNA sense strand
ccaccguguuugacaacua

SEQ ID NO: 178062 - RNA, 19 nt, Homo sapiens
  misc_RNA (1)...(19): siRNA sense strand
ccaagugguucccagaagu

SEQ ID NO: 178063 - RNA, 19 nt, Homo sapiens
  misc_RNA (1)...(19): siRNA sense strand
ggagauugacucggugaaa

SEQ ID NO: 178064 - RNA, 19 nt, Homo sapiens
  misc_RNA (1)...(19): siRNA sense strand
agauugacucggugaaaua

SEQ ID NO: 178065 - RNA, 19 nt, Homo sapiens
  misc_RNA (1)...(19): siRNA sense strand
acaaggacaccaucgagaa

SEQ ID NO: 178066 - RNA, 19 nt, Homo sapiens
  misc_RNA (1)...(19): siRNA sense strand
caccguguuugacaacuau

SEQ ID NO: 178067 - RNA, 19 nt, Homo sapiens
  misc_RNA (1)...(19): siRNA sense strand
gccaagugguucccagaag

SEQ ID NO: 178068 - RNA, 19 nt, Homo sapiens
  misc_RNA (1)...(19): siRNA sense strand
caacuauucagccaaugug

SEQ ID NO: 178069 - RNA, 19 nt, Homo sapiens
  misc_RNA (1)...(19): siRNA sense strand
gcacuggccaaggagauug

SEQ ID NO: 178070 - RNA, 19 nt, Homo sapiens
  misc_RNA (1)...(19): siRNA sense strand
guacauccccaccguguuu

SEQ ID NO: 178071 - RNA, 19 nt, Homo sapiens
  misc_RNA (1)...(19): siRNA sense strand
ggacagcaagccagugaac

SEQ ID NO: 178072 - RNA, 19 nt, Homo sapiens
  misc_RNA (1)...(19): siRNA sense strand
cuacaccaccaacgccuuu

SEQ ID NO: 178073 - RNA, 19 nt, Homo sapiens
  misc_RNA (1)...(19): siRNA sense strand
guggacagcaagccaguga

SEQ ID NO: 178074 - RNA, 19 nt, Homo sapiens
  misc_RNA (1)...(19): siRNA sense strand
caagugguucccagaagug

SEQ ID NO: 178075 - RNA, 19 nt, Homo sapiens
  misc_RNA (1)...(19): siRNA sense strand
caagaccugccuucucauc

SEQ ID NO: 178076 - RNA, 19 nt, Homo sapiens
  misc_RNA (1)...(19): siRNA sense strand
gacaccaucgagaaacuga

SEQ ID NO: 178077 - RNA, 19 nt, Homo sapiens
  misc_RNA (1)...(19): siRNA sense strand
agaaacugaaggagaagaa

SEQ ID NO: 178078 - RNA, 19 nt, Homo sapiens
  misc_RNA (1)...(19): siRNA sense strand
cuauucagccaaugugaug

SEQ ID NO: 178079 - RNA, 19 nt, Homo sapiens
  misc_RNA (1)...(19): siRNA sense strand
gaaacugaaggagaagaag

SEQ ID NO: 178080 - RNA, 19 nt, Homo sapiens
  misc_RNA (1)...(19): siRNA sense strand
gagaaacugaaggagaaga

SEQ ID NO: 178081 - RNA, 19 nt, Homo sapiens
  misc_RNA (1)...(19): siRNA sense strand
gcccagccucuuaugagaa

SEQ ID NO: 178082 - RNA, 19 nt, Homo sapiens
  misc_RNA (1)...(19): siRNA sense strand
caacagaugagacaaauua

SEQ ID NO: 178083 - RNA, 19 nt, Homo sapiens
  misc_RNA (1)...(19): siRNA sense strand
gaacuuugaugaagauuga

SEQ ID NO: 178084 - RNA, 19 nt, Homo sapiens
  misc_RNA (1)...(19): siRNA sense strand
gcagauaggucgagagaau

SEQ ID NO: 178085 - RNA, 19 nt, Homo sapiens
  misc_RNA (1)...(19): siRNA sense strand
uaacugagaucaugucaau

SEQ ID NO: 178086 - RNA, 19 nt, Homo sapiens
  misc_RNA (1)...(19): siRNA sense strand
gaacuacauucaaguaaca

SEQ ID NO: 178087 - RNA, 19 nt, Homo sapiens
  misc_RNA (1)...(19): siRNA sense strand
ugaaagcacugaaagagaa

SEQ ID NO: 178088 - RNA, 19 nt, Homo sapiens
  misc_RNA (1)...(19): siRNA sense strand
cagcagaccuucaagauag

SEQ ID NO: 178089 - RNA, 19 nt, Homo sapiens
  misc_RNA (1)...(19): siRNA sense strand
gauguuaaaugaaccaguu

SEQ ID NO: 178090 - RNA, 19 nt, Homo sapiens
  misc_RNA (1)...(19): siRNA sense strand
ggaaucagccucaguuuca

SEQ ID NO: 178091 - RNA, 19 nt, Homo sapiens
  misc_RNA (1)...(19): siRNA sense strand
gaaguggucauaugaacua

SEQ ID NO: 178092 - RNA, 19 nt, Homo sapiens
  misc_RNA (1)...(19): siRNA sense strand
auacugcucucaaagaaua

SEQ ID NO: 178093 - RNA, 19 nt, Homo sapiens
  misc_RNA (1)...(19): siRNA sense strand
ucgagagaauccucaauua

SEQ ID NO: 178094 - RNA, 19 nt, Homo sapiens
  misc_RNA (1)...(19): siRNA sense strand
ucaagaagcugguggucaa

SEQ ID NO: 178095 - RNA, 19 nt, Homo sapiens
  misc_RNA (1)...(19): siRNA sense strand
guuaaaggcauuaggauuu

SEQ ID NO: 178096 - RNA, 19 nt, Homo sapiens
  misc_RNA (1)...(19): siRNA sense strand
gcagaacuuugaugaagau

SEQ ID NO: 178097 - RNA, 19 nt, Homo sapiens
  misc_RNA (1)...(19): siRNA sense strand
gcagaauccuuccuugcuu

SEQ ID NO: 178098 - RNA, 19 nt, Homo sapiens
  misc_RNA (1)...(19): siRNA sense strand
gcaaaauccucaaugauga

SEQ ID NO: 178099 - RNA, 19 nt, Homo sapiens
  misc_RNA (1)...(19): siRNA sense strand
gcagcagaccuucaagaua

SEQ ID NO: 178100 - RNA, 19 nt, Homo sapiens
  misc_RNA (1)...(19): siRNA sense strand
gugagaagaaugagaauuu

SEQ ID NO: 178101 - RNA, 19 nt, Homo sapiens
  misc_RNA (1)...(19): siRNA sense strand
gagaauaugguaacugaga

SEQ ID NO: 178102 - RNA, 19 nt, Homo sapiens
  misc_RNA (1)...(19): siRNA sense strand
gacaaauuauucagcagaa

SEQ ID NO: 178103 - RNA, 19 nt, Homo sapiens
  misc_RNA (1)...(19): siRNA sense strand
gcacugaaagagaagauug

SEQ ID NO: 178104 - RNA, 19 nt, Homo sapiens
  misc_RNA (1)...(19): siRNA sense strand
cagcagaacuuugaugaag

SEQ ID NO: 178105 - RNA, 19 nt, Homo sapiens
  misc_RNA (1)...(19): siRNA sense strand
gacaguacaucgggugauu

SEQ ID NO: 178106 - RNA, 19 nt, Homo sapiens
  misc_RNA (1)...(19): siRNA sense strand
gaacgagagcaaguaauug

SEQ ID NO: 178107 - RNA, 19 nt, Homo sapiens
  misc_RNA (1)...(19): siRNA sense strand
cagaugagacaaauuauuc

SEQ ID NO: 178108 - RNA, 19 nt, Homo sapiens
  misc_RNA (1)...(19): siRNA sense strand
caaguaacaccucaggaaa

SEQ ID NO: 178109 - RNA, 19 nt, Homo sapiens
  misc_RNA (1)...(19): siRNA sense strand
ugauacugcucucaaagaa

SEQ ID NO: 178110 - RNA, 19 nt, Homo sapiens
  misc_RNA (1)...(19): siRNA sense strand
ugagaagaaugagaauuug

SEQ ID NO: 178111 - RNA, 19 nt, Homo sapiens
  misc_RNA (1)...(19): siRNA sense strand
gaagcuauagaaagguuaa

SEQ ID NO: 178112 - RNA, 19 nt, Homo sapiens
  misc_RNA (1)...(19): siRNA sense strand
agagaauccucaauuacuu

SEQ ID NO: 178113 - RNA, 19 nt, Homo sapiens
  misc_RNA (1)...(19): siRNA sense strand
guacaucgggugauucuuc

SEQ ID NO: 178114 - RNA, 19 nt, Homo sapiens
  misc_RNA (1)...(19): siRNA sense strand
gcaacgagugcacuuguga

SEQ ID NO: 178115 - RNA, 19 nt, Homo sapiens
  misc_RNA (1)...(19): siRNA sense strand
gagagaauccucaauuacu

SEQ ID NO: 178116 - RNA, 19 nt, Homo sapiens
  misc_RNA (1)...(19): siRNA sense strand
ugaacgagagcaaguaauu

SEQ ID NO: 178117 - RNA, 19 nt, Homo sapiens
  misc_RNA (1)...(19): siRNA sense strand
acgagaauaugguaacuga

SEQ ID NO: 178118 - RNA, 19 nt, Homo sapiens
  misc_RNA (1)...(19): siRNA sense strand
caagagaagccugcagaaa

SEQ ID NO: 178119 - RNA, 19 nt, Homo sapiens
  misc_RNA (1)...(19): siRNA sense strand
ugacagagcaguggaguau

SEQ ID NO: 178120 - RNA, 19 nt, Homo sapiens
  misc_RNA (1)...(19): siRNA sense strand
ucaaguaacaccucaggaa

SEQ ID NO: 178121 - RNA, 19 nt, Homo sapiens
  misc_RNA (1)...(19): siRNA sense strand
uagaaagguuaaaggcauu

SEQ ID NO: 178122 - RNA, 19 nt, Homo sapiens
  misc_RNA (1)...(19): siRNA sense strand
gaagcuggaaguggucaua

SEQ ID NO: 178123 - RNA, 19 nt, Homo sapiens
  misc_RNA (1)...(19): siRNA sense strand
uaugguaacugagaucaug

SEQ ID NO: 178124 - RNA, 19 nt, Homo sapiens
  misc_RNA (1)...(19): siRNA sense strand
gccaacaccaggagcauuu

SEQ ID NO: 178125 - RNA, 19 nt, Homo sapiens
  misc_RNA (1)...(19): siRNA sense strand
gaaucagccucaguuucaa

SEQ ID NO: 178126 - RNA, 19 nt, Homo sapiens
  misc_RNA (1)...(19): siRNA sense strand
ugaugauacugcucucaaa

SEQ ID NO: 178127 - RNA, 19 nt, Homo sapiens
  misc_RNA (1)...(19): siRNA sense strand
gcacuacagcaguuacuuc

SEQ ID NO: 178128 - RNA, 19 nt, Homo sapiens
  misc_RNA (1)...(19): siRNA sense strand
gcuggaaguggucauauga

SEQ ID NO: 178129 - RNA, 19 nt, Homo sapiens
  misc_RNA (1)...(19): siRNA sense strand
ggacauccccuugaauuuu

SEQ ID NO: 178130 - RNA, 19 nt, Homo sapiens
  misc_RNA (1)...(19): siRNA sense strand
gcaguggaguaucuuuuaa

SEQ ID NO: 178131 - RNA, 19 nt, Homo sapiens
  misc_RNA (1)...(19): siRNA sense strand
gcaacaacuacaacaacaa

SEQ ID NO: 178132 - RNA, 19 nt, Homo sapiens
  misc_RNA (1)...(19): siRNA sense strand
cugaaggacuugugauaca

SEQ ID NO: 178133 - RNA, 19 nt, Homo sapiens
  misc_RNA (1)...(19): siRNA sense strand
uuaaaggcauuaggauuuc

SEQ ID NO: 178134 - RNA, 19 nt, Homo sapiens
  misc_RNA (1)...(19): siRNA sense strand
aagaagcuauagaaagguu

SEQ ID NO: 178135 - RNA, 19 nt, Homo sapiens
  misc_RNA (1)...(19): siRNA sense strand
aaaagaagcuauagaaagg

SEQ ID NO: 178136 - RNA, 19 nt, Homo sapiens
  misc_RNA (1)...(19): siRNA sense strand
caacaacuacaacaacaag

SEQ ID NO: 178137 - RNA, 19 nt, Homo sapiens
  misc_RNA (1)...(19): siRNA sense strand
gguuaaaggcauuaggauu

SEQ ID NO: 178138 - RNA, 19 nt, Homo sapiens
  misc_RNA (1)...(19): siRNA sense strand
ggucauaugaacuacauuc

SEQ ID NO: 178139 - RNA, 19 nt, Homo sapiens
  misc_RNA (1)...(19): siRNA sense strand
acagagcaguggaguaucu

SEQ ID NO: 178140 - RNA, 19 nt, Homo sapiens
  misc_RNA (1)...(19): siRNA sense strand
gagaauccucaauuacuuc

SEQ ID NO: 178141 - RNA, 19 nt, Homo sapiens
  misc_RNA (1)...(19): siRNA sense strand
cagccucaguuucaacaga

SEQ ID NO: 178142 - RNA, 19 nt, Homo sapiens
  misc_RNA (1)...(19): siRNA sense strand
gacagcaucuucugaaccu

SEQ ID NO: 178143 - RNA, 19 nt, Homo sapiens
  misc_RNA (1)...(19): siRNA sense strand
ggucagucuuacgagaaua

SEQ ID NO: 178144 - RNA, 19 nt, Homo sapiens
  misc_RNA (1)...(19): siRNA sense strand
agacaccaguggcuacuag

SEQ ID NO: 178145 - RNA, 19 nt, Homo sapiens
  misc_RNA (1)...(19): siRNA sense strand
gugaaagcacugaaagaga

SEQ ID NO: 178146 - RNA, 19 nt, Homo sapiens
  misc_RNA (1)...(19): siRNA sense strand
cagcagauaggucgagaga

SEQ ID NO: 178147 - RNA, 19 nt, Homo sapiens
  misc_RNA (1)...(19): siRNA sense strand
gagagccaguuucaacaac

SEQ ID NO: 178148 - RNA, 19 nt, Homo sapiens
  misc_RNA (1)...(19): siRNA sense strand
aaagucaggcugugguuga

SEQ ID NO: 178149 - RNA, 19 nt, Homo sapiens
  misc_RNA (1)...(19): siRNA sense strand
ggagguggcaguggaggaa

SEQ ID NO: 178150 - RNA, 19 nt, Homo sapiens
  misc_RNA (1)...(19): siRNA sense strand
gggucagucuuacgagaau

SEQ ID NO: 178151 - RNA, 19 nt, Homo sapiens
  misc_RNA (1)...(19): siRNA sense strand
gucgagagaauccucaauu

SEQ ID NO: 178152 - RNA, 19 nt, Homo sapiens
  misc_RNA (1)...(19): siRNA sense strand
caucagcgacagcaucuuc

SEQ ID NO: 178153 - RNA, 19 nt, Homo sapiens
  misc_RNA (1)...(19): siRNA sense strand
ggugaaagcacugaaagag

SEQ ID NO: 178154 - RNA, 19 nt, Homo sapiens
  misc_RNA (1)...(19): siRNA sense strand
uaugaacgagagcaaguaa

SEQ ID NO: 178155 - RNA, 19 nt, Homo sapiens
  misc_RNA (1)...(19): siRNA sense strand
gaaccugcaccugcuagug

SEQ ID NO: 178156 - RNA, 19 nt, Homo sapiens
  misc_RNA (1)...(19): siRNA sense strand
cgagagaauccucaauuac

SEQ ID NO: 178157 - RNA, 19 nt, Homo sapiens
  misc_RNA (1)...(19): siRNA sense strand
gaauaugguaacugagauc

SEQ ID NO: 178158 - RNA, 19 nt, Homo sapiens
  misc_RNA (1)...(19): siRNA sense strand
agaauaugguaacugagau

SEQ ID NO: 178159 - RNA, 19 nt, Homo sapiens
  misc_RNA (1)...(19): siRNA sense strand
gagaagaaugagaauuugg

SEQ ID NO: 178160 - RNA, 19 nt, Homo sapiens
  misc_RNA (1)...(19): siRNA sense strand
guggucauaugaacuacau

SEQ ID NO: 178161 - RNA, 19 nt, Homo sapiens
  misc_RNA (1)...(19): siRNA sense strand
cucaauuacuucagcaaau

SEQ ID NO: 178162 - RNA, 19 nt, Homo sapiens
  misc_RNA (1)...(19): siRNA sense strand
gaggacauccccuugaauu

SEQ ID NO: 178163 - RNA, 19 nt, Homo sapiens
  misc_RNA (1)...(19): siRNA sense strand
gcaacuacgacagcaacaa

SEQ ID NO: 178164 - RNA, 19 nt, Homo sapiens
  misc_RNA (1)...(19): siRNA sense strand
gaucaugucaaugggcuau

SEQ ID NO: 178165 - RNA, 19 nt, Homo sapiens
  misc_RNA (1)...(19): siRNA sense strand
agaagcugguggucaagga

SEQ ID NO: 178166 - RNA, 19 nt, Homo sapiens
  misc_RNA (1)...(19): siRNA sense strand
gaugauacugcucucaaag

SEQ ID NO: 178167 - RNA, 19 nt, Homo sapiens
  misc_RNA (1)...(19): siRNA sense strand
ugccagcacuacagcaguu

SEQ ID NO: 178168 - RNA, 19 nt, Homo sapiens
  misc_RNA (1)...(19): siRNA sense strand
caacuacgacagcaacaac

SEQ ID NO: 178169 - RNA, 19 nt, Homo sapiens
  misc_RNA (1)...(19): siRNA sense strand
gcccugagagccaguuuca

SEQ ID NO: 178170 - RNA, 19 nt, Homo sapiens
  misc_RNA (1)...(19): siRNA sense strand
gcuaugaacgagagcaagu

SEQ ID NO: 178171 - RNA, 19 nt, Homo sapiens
  misc_RNA (1)...(19): siRNA sense strand
gaccuucaagauagacauu

SEQ ID NO: 178172 - RNA, 19 nt, Homo sapiens
  misc_RNA (1)...(19): siRNA sense strand
gaaagcacugaaagagaag

SEQ ID NO: 178173 - RNA, 19 nt, Homo sapiens
  misc_RNA (1)...(19): siRNA sense strand
ggcaaaauccucaaugaug

SEQ ID NO: 178174 - RNA, 19 nt, Homo sapiens
  misc_RNA (1)...(19): siRNA sense strand
ggaaguggucauaugaacu

SEQ ID NO: 178175 - RNA, 19 nt, Homo sapiens
  misc_RNA (1)...(19): siRNA sense strand
gauacugcucucaaagaau

SEQ ID NO: 178176 - RNA, 19 nt, Homo sapiens
  misc_RNA (1)...(19): siRNA sense strand
cagcguuacuacagcagau

SEQ ID NO: 178177 - RNA, 19 nt, Homo sapiens
  misc_RNA (1)...(19): siRNA sense strand
caggcaaaauccucaauga

SEQ ID NO: 178178 - RNA, 19 nt, Homo sapiens
  misc_RNA (1)...(19): siRNA sense strand
ugagagccaguuucaacaa

SEQ ID NO: 178179 - RNA, 19 nt, Homo sapiens
  misc_RNA (1)...(19): siRNA sense strand
gucaaugggcuaugaacga

SEQ ID NO: 178180 - RNA, 19 nt, Homo sapiens
  misc_RNA (1)...(19): siRNA sense strand
uacagcagaacuuugauga

SEQ ID NO: 178181 - RNA, 19 nt, Homo sapiens
  misc_RNA (1)...(19): siRNA sense strand
cagcagcagaccuucaaga

SEQ ID NO: 178182 - RNA, 19 nt, Homo sapiens
  misc_RNA (1)...(19): siRNA sense strand
ggaaauaugauccaucuua

SEQ ID NO: 178183 - RNA, 19 nt, Homo sapiens
  misc_RNA (1)...(19): siRNA sense strand
uaauuaaucuggccaauga

SEQ ID NO: 178184 - RNA, 19 nt, Homo sapiens
  misc_RNA (1)...(19): siRNA sense strand
ggacaaagacuaccugaga

SEQ ID NO: 178185 - RNA, 19 nt, Homo sapiens
  misc_RNA (1)...(19): siRNA sense strand
uaccugagaucacuaaaua

SEQ ID NO: 178186 - RNA, 19 nt, Homo sapiens
  misc_RNA (1)...(19): siRNA sense strand
gaaacuguauucuggacaa

SEQ ID NO: 178187 - RNA, 19 nt, Homo sapiens
  misc_RNA (1)...(19): siRNA sense strand
guccaaggcuuuaucuuug

SEQ ID NO: 178188 - RNA, 19 nt, Homo sapiens
  misc_RNA (1)...(19): siRNA sense strand
ggaaggaggcggugacaga

SEQ ID NO: 178189 - RNA, 19 nt, Homo sapiens
  misc_RNA (1)...(19): siRNA sense strand
cagaaggugugcuacauug

SEQ ID NO: 178190 - RNA, 19 nt, Homo sapiens
  misc_RNA (1)...(19): siRNA sense strand
ggaaugcacuuggaaacug

SEQ ID NO: 178191 - RNA, 19 nt, Homo sapiens
  misc_RNA (1)...(19): siRNA sense strand
gauguugguuaugguguua

SEQ ID NO: 178192 - RNA, 19 nt, Homo sapiens
  misc_RNA (1)...(19): siRNA sense strand
gaaggaugguucauaucau

SEQ ID NO: 178193 - RNA, 19 nt, Homo sapiens
  misc_RNA (1)...(19): siRNA sense strand
ggagaaagacuuccuugca

SEQ ID NO: 178194 - RNA, 19 nt, Homo sapiens
  misc_RNA (1)...(19): siRNA sense strand
ccaguugccucuugaagug

SEQ ID NO: 178195 - RNA, 19 nt, Homo sapiens
  misc_RNA (1)...(19): siRNA sense strand
ucaugaagauguugguuau

SEQ ID NO: 178196 - RNA, 19 nt, Homo sapiens
  misc_RNA (1)...(19): siRNA sense strand
gacaaagacuaccugagau

SEQ ID NO: 178197 - RNA, 19 nt, Homo sapiens
  misc_RNA (1)...(19): siRNA sense strand
gaaugcacuuggaaacugu

SEQ ID NO: 178198 - RNA, 19 nt, Homo sapiens
  misc_RNA (1)...(19): siRNA sense strand
gcacuuggaaacuguauuc

SEQ ID NO: 178199 - RNA, 19 nt, Homo sapiens
  misc_RNA (1)...(19): siRNA sense strand
ggaagagccaggacaugaa

SEQ ID NO: 178200 - RNA, 19 nt, Homo sapiens
  misc_RNA (1)...(19): siRNA sense strand
gaccaacgcacaacaggaa

SEQ ID NO: 178201 - RNA, 19 nt, Homo sapiens
  misc_RNA (1)...(19): siRNA sense strand
ggaaacugggaaucucaua

SEQ ID NO: 178202 - RNA, 19 nt, Homo sapiens
  misc_RNA (1)...(19): siRNA sense strand
gaagacaacucugaaaagu

SEQ ID NO: 178203 - RNA, 19 nt, Homo sapiens
  misc_RNA (1)...(19): siRNA sense strand
uaacuaaagcgaagagaca

SEQ ID NO: 178204 - RNA, 19 nt, Homo sapiens
  misc_RNA (1)...(19): siRNA sense strand
ggucaucggguaauuaauc

SEQ ID NO: 178205 - RNA, 19 nt, Homo sapiens
  misc_RNA (1)...(19): siRNA sense strand
ugagauguuugguuacaau

SEQ ID NO: 178206 - RNA, 19 nt, Homo sapiens
  misc_RNA (1)...(19): siRNA sense strand
ccacgccaguugccucuug

SEQ ID NO: 178207 - RNA, 19 nt, Homo sapiens
  misc_RNA (1)...(19): siRNA sense strand
ggcccagaauacauaagua

SEQ ID NO: 178208 - RNA, 19 nt, Homo sapiens
  misc_RNA (1)...(19): siRNA sense strand
gggagucugugcauuugug

SEQ ID NO: 178209 - RNA, 19 nt, Homo sapiens
  misc_RNA (1)...(19): siRNA sense strand
gagggucaucggguaauua

SEQ ID NO: 178210 - RNA, 19 nt, Homo sapiens
  misc_RNA (1)...(19): siRNA sense strand
ugagaucacuaaauaagcu

SEQ ID NO: 178211 - RNA, 19 nt, Homo sapiens
  misc_RNA (1)...(19): siRNA sense strand
aaggaaauaugauccaucu

SEQ ID NO: 178212 - RNA, 19 nt, Homo sapiens
  misc_RNA (1)...(19): siRNA sense strand
gaaacugggaaucucauag

SEQ ID NO: 178213 - RNA, 19 nt, Homo sapiens
  misc_RNA (1)...(19): siRNA sense strand
aaggaugguucauaucaug

SEQ ID NO: 178214 - RNA, 19 nt, Homo sapiens
  misc_RNA (1)...(19): siRNA sense strand
gaagagccaggacaugaag

SEQ ID NO: 178215 - RNA, 19 nt, Homo sapiens
  misc_RNA (1)...(19): siRNA sense strand
ggacugaggaagcaauucu

SEQ ID NO: 178216 - RNA, 19 nt, Homo sapiens
  misc_RNA (1)...(19): siRNA sense strand
ccagaaggugugcuacauu

SEQ ID NO: 178217 - RNA, 19 nt, Homo sapiens
  misc_RNA (1)...(19): siRNA sense strand
gucaagcccucgucuagag

SEQ ID NO: 178218 - RNA, 19 nt, Homo sapiens
  misc_RNA (1)...(19): siRNA sense strand
gggagcggauggagaagca

SEQ ID NO: 178219 - RNA, 19 nt, Homo sapiens
  misc_RNA (1)...(19): siRNA sense strand
gaaggugugcuacauugag

SEQ ID NO: 178220 - RNA, 19 nt, Homo sapiens
  misc_RNA (1)...(19): siRNA sense strand
guaauuaaucuggccaaug

SEQ ID NO: 178221 - RNA, 19 nt, Homo sapiens
  misc_RNA (1)...(19): siRNA sense strand
aguccaaggcuuuaucuuu

SEQ ID NO: 178222 - RNA, 19 nt, Homo sapiens
  misc_RNA (1)...(19): siRNA sense strand
gccagaaggugugcuacau

SEQ ID NO: 178223 - RNA, 19 nt, Homo sapiens
  misc_RNA (1)...(19): siRNA sense strand
gugggagucugugcauuug

SEQ ID NO: 178224 - RNA, 19 nt, Homo sapiens
  misc_RNA (1)...(19): siRNA sense strand
caaagacuaccugagauca

SEQ ID NO: 178225 - RNA, 19 nt, Homo sapiens
  misc_RNA (1)...(19): siRNA sense strand
aaacuguauucuggacaaa

SEQ ID NO: 178226 - RNA, 19 nt, Homo sapiens
  misc_RNA (1)...(19): siRNA sense strand
gguaauuaaucuggccaau

SEQ ID NO: 178227 - RNA, 19 nt, Homo sapiens
  misc_RNA (1)...(19): siRNA sense strand
ccucaaguccaaggcuuua

SEQ ID NO: 178228 - RNA, 19 nt, Homo sapiens
  misc_RNA (1)...(19): siRNA sense strand
cgugggagucugugcauuu

SEQ ID NO: 178229 - RNA, 19 nt, Homo sapiens
  misc_RNA (1)...(19): siRNA sense strand
ugaggaagcaauucuugga

SEQ ID NO: 178230 - RNA, 19 nt, Homo sapiens
  misc_RNA (1)...(19): siRNA sense strand
aaugagauguuugguuaca

SEQ ID NO: 178231 - RNA, 19 nt, Homo sapiens
  misc_RNA (1)...(19): siRNA sense strand
ccagaaaccacaagcaaaa

SEQ ID NO: 178232 - RNA, 19 nt, Homo sapiens
  misc_RNA (1)...(19): siRNA sense strand
caccagaaaccacaagcaa

SEQ ID NO: 178233 - RNA, 19 nt, Homo sapiens
  misc_RNA (1)...(19): siRNA sense strand
acuguauucuggacaaaga

SEQ ID NO: 178234 - RNA, 19 nt, Homo sapiens
  misc_RNA (1)...(19): siRNA sense strand
uccuguaacugucucagaa

SEQ ID NO: 178235 - RNA, 19 nt, Homo sapiens
  misc_RNA (1)...(19): siRNA sense strand
ugagggucaucggguaauu

SEQ ID NO: 178236 - RNA, 19 nt, Homo sapiens
  misc_RNA (1)...(19): siRNA sense strand
ggucaagcccucgucuaga

SEQ ID NO: 178237 - RNA, 19 nt, Homo sapiens
  misc_RNA (1)...(19): siRNA sense strand
ugaagauguugguuauggu

SEQ ID NO: 178238 - RNA, 19 nt, Homo sapiens
  misc_RNA (1)...(19): siRNA sense strand
acacauuagccuugaacaa

SEQ ID NO: 178239 - RNA, 19 nt, Homo sapiens
  misc_RNA (1)...(19): siRNA sense strand
ccugagaucacuaaauaag

SEQ ID NO: 178240 - RNA, 19 nt, Homo sapiens
  misc_RNA (1)...(19): siRNA sense strand
ggcuuuaucuuuggagaag

SEQ ID NO: 178241 - RNA, 19 nt, Homo sapiens
  misc_RNA (1)...(19): siRNA sense strand
guaccaggccauccagaag

SEQ ID NO: 178242 - RNA, 19 nt, Homo sapiens
  misc_RNA (1)...(19): siRNA sense strand
aggaagagccaggacauga

SEQ ID NO: 178243 - RNA, 19 nt, Homo sapiens
  misc_RNA (1)...(19): siRNA sense strand
gccgucagcugagaagagu

SEQ ID NO: 178244 - RNA, 19 nt, Homo sapiens
  misc_RNA (1)...(19): siRNA sense strand
gaggaggcaagauacaaca

SEQ ID NO: 178245 - RNA, 19 nt, Homo sapiens
  misc_RNA (1)...(19): siRNA sense strand
ggaggaggcaagauacaac

SEQ ID NO: 178246 - RNA, 19 nt, Homo sapiens
  misc_RNA (1)...(19): siRNA sense strand
gcggcucaguguuaugcuu

SEQ ID NO: 178247 - RNA, 19 nt, Homo sapiens
  misc_RNA (1)...(19): siRNA sense strand
cuaaagcgaagagacaaga

SEQ ID NO: 178248 - RNA, 19 nt, Homo sapiens
  misc_RNA (1)...(19): siRNA sense strand
gagccaggacaugaagaaa

SEQ ID NO: 178249 - RNA, 19 nt, Homo sapiens
  misc_RNA (1)...(19): siRNA sense strand
ggacuccacacagcguuug

SEQ ID NO: 178250 - RNA, 19 nt, Homo sapiens
  misc_RNA (1)...(19): siRNA sense strand
cagaacaggacuccacaca

SEQ ID NO: 178251 - RNA, 19 nt, Homo sapiens
  misc_RNA (1)...(19): siRNA sense strand
gcccagaauacauaaguag

SEQ ID NO: 178252 - RNA, 19 nt, Homo sapiens
  misc_RNA (1)...(19): siRNA sense strand
cgucagcugagaagaguga

SEQ ID NO: 178253 - RNA, 19 nt, Homo sapiens
  misc_RNA (1)...(19): siRNA sense strand
caacaggaaacugggaauc

SEQ ID NO: 178254 - RNA, 19 nt, Homo sapiens
  misc_RNA (1)...(19): siRNA sense strand
ggagucugugcauuuguga

SEQ ID NO: 178255 - RNA, 19 nt, Homo sapiens
  misc_RNA (1)...(19): siRNA sense strand
ugggaccuccaaacuuaua

SEQ ID NO: 178256 - RNA, 19 nt, Homo sapiens
  misc_RNA (1)...(19): siRNA sense strand
gccaguacacagcagaaga

SEQ ID NO: 178257 - RNA, 19 nt, Homo sapiens
  misc_RNA (1)...(19): siRNA sense strand
gaggccagaaggugugcua

SEQ ID NO: 178258 - RNA, 19 nt, Homo sapiens
  misc_RNA (1)...(19): siRNA sense strand
augaagauguugguuaugg

SEQ ID NO: 178259 - RNA, 19 nt, Homo sapiens
  misc_RNA (1)...(19): siRNA sense strand
acaggaaacugggaaucuc

SEQ ID NO: 178260 - RNA, 19 nt, Homo sapiens
  misc_RNA (1)...(19): siRNA sense strand
uacaauggcugggcacacu

SEQ ID NO: 178261 - RNA, 19 nt, Homo sapiens
  misc_RNA (1)...(19): siRNA sense strand
ucugacacauuagccuuga

SEQ ID NO: 178262 - RNA, 19 nt, Homo sapiens
  misc_RNA (1)...(19): siRNA sense strand
gucaucggguaauuaaucu

SEQ ID NO: 178263 - RNA, 19 nt, Homo sapiens
  misc_RNA (1)...(19): siRNA sense strand
agauguugguuaugguguu

SEQ ID NO: 178264 - RNA, 19 nt, Homo sapiens
  misc_RNA (1)...(19): siRNA sense strand
gggcccagaauacauaagu

SEQ ID NO: 178265 - RNA, 19 nt, Homo sapiens
  misc_RNA (1)...(19): siRNA sense strand
gggaaucucauaggaagag

SEQ ID NO: 178266 - RNA, 19 nt, Homo sapiens
  misc_RNA (1)...(19): siRNA sense strand
ccaucacgcagcagaaugu

SEQ ID NO: 178267 - RNA, 19 nt, Homo sapiens
  misc_RNA (1)...(19): siRNA sense strand
gacuaccugagaucacuaa

SEQ ID NO: 178268 - RNA, 19 nt, Homo sapiens
  misc_RNA (1)...(19): siRNA sense strand
acaaagacuaccugagauc

SEQ ID NO: 178269 - RNA, 19 nt, Homo sapiens
  misc_RNA (1)...(19): siRNA sense strand
uaauuaaucuggccaauga

SEQ ID NO: 178270 - RNA, 19 nt, Homo sapiens
  misc_RNA (1)...(19): siRNA sense strand
cagaaggugugcuacauug

SEQ ID NO: 178271 - RNA, 19 nt, Homo sapiens
  misc_RNA (1)...(19): siRNA sense strand
ggucaucggguaauuaauc

SEQ ID NO: 178272 - RNA, 19 nt, Homo sapiens
  misc_RNA (1)...(19): siRNA sense strand
ugagauguuugguuacaau

SEQ ID NO: 178273 - RNA, 19 nt, Homo sapiens
  misc_RNA (1)...(19): siRNA sense strand
ggcccagaauacauaagua

SEQ ID NO: 178274 - RNA, 19 nt, Homo sapiens
  misc_RNA (1)...(19): siRNA sense strand
gagggucaucggguaauua

SEQ ID NO: 178275 - RNA, 19 nt, Homo sapiens
  misc_RNA (1)...(19): siRNA sense strand
ggacugaggaagcaauucu

SEQ ID NO: 178276 - RNA, 19 nt, Homo sapiens
  misc_RNA (1)...(19): siRNA sense strand
ccagaaggugugcuacauu

SEQ ID NO: 178277 - RNA, 19 nt, Homo sapiens
  misc_RNA (1)...(19): siRNA sense strand
gaaggugugcuacauugag

SEQ ID NO: 178278 - RNA, 19 nt, Homo sapiens
  misc_RNA (1)...(19): siRNA sense strand
gccagaaggugugcuacau

SEQ ID NO: 178279 - RNA, 19 nt, Homo sapiens
  misc_RNA (1)...(19): siRNA sense strand
guaauuaaucuggccaaug

SEQ ID NO: 178280 - RNA, 19 nt, Homo sapiens
  misc_RNA (1)...(19): siRNA sense strand
gguaauuaaucuggccaau

SEQ ID NO: 178281 - RNA, 19 nt, Homo sapiens
  misc_RNA (1)...(19): siRNA sense strand
ugaggaagcaauucuugga

SEQ ID NO: 178282 - RNA, 19 nt, Homo sapiens
  misc_RNA (1)...(19): siRNA sense strand
aaugagauguuugguuaca

SEQ ID NO: 178283 - RNA, 19 nt, Homo sapiens
  misc_RNA (1)...(19): siRNA sense strand
ugagggucaucggguaauu

SEQ ID NO: 178284 - RNA, 19 nt, Homo sapiens
  misc_RNA (1)...(19): siRNA sense strand
guaccaggccauccagaag

SEQ ID NO: 178285 - RNA, 19 nt, Homo sapiens
  misc_RNA (1)...(19): siRNA sense strand
gcggcucaguguuaugcuu

SEQ ID NO: 178286 - RNA, 19 nt, Homo sapiens
  misc_RNA (1)...(19): siRNA sense strand
gcccagaauacauaaguag

SEQ ID NO: 178287 - RNA, 19 nt, Homo sapiens
  misc_RNA (1)...(19): siRNA sense strand
gccaguacacagcagaaga

SEQ ID NO: 178288 - RNA, 19 nt, Homo sapiens
  misc_RNA (1)...(19): siRNA sense strand
gaggccagaaggugugcua

SEQ ID NO: 178289 - RNA, 19 nt, Homo sapiens
  misc_RNA (1)...(19): siRNA sense strand
gucaucggguaauuaaucu

SEQ ID NO: 178290 - RNA, 19 nt, Homo sapiens
  misc_RNA (1)...(19): siRNA sense strand
uacaauggcugggcacacu

SEQ ID NO: 178291 - RNA, 19 nt, Homo sapiens
  misc_RNA (1)...(19): siRNA sense strand
gggcccagaauacauaagu

SEQ ID NO: 178292 - RNA, 19 nt, Homo sapiens
  misc_RNA (1)...(19): siRNA sense strand
ccaucacgcagcagaaugu

SEQ ID NO: 178293 - RNA, 19 nt, Homo sapiens
  misc_RNA (1)...(19): siRNA sense strand
uaauuaaucuggccaauga

SEQ ID NO: 178294 - RNA, 19 nt, Homo sapiens
  misc_RNA (1)...(19): siRNA sense strand
cagaaggugugcuacauug

SEQ ID NO: 178295 - RNA, 19 nt, Homo sapiens
  misc_RNA (1)...(19): siRNA sense strand
gaaggaugguucauaucau

SEQ ID NO: 178296 - RNA, 19 nt, Homo sapiens
  misc_RNA (1)...(19): siRNA sense strand
ggucaucggguaauuaauc

SEQ ID NO: 178297 - RNA, 19 nt, Homo sapiens
  misc_RNA (1)...(19): siRNA sense strand
ugagauguuugguuacaau

SEQ ID NO: 178298 - RNA, 19 nt, Homo sapiens
  misc_RNA (1)...(19): siRNA sense strand
ggcccagaauacauaagua

SEQ ID NO: 178299 - RNA, 19 nt, Homo sapiens
  misc_RNA (1)...(19): siRNA sense strand
gggagucugugcauuugug

SEQ ID NO: 178300 - RNA, 19 nt, Homo sapiens
  misc_RNA (1)...(19): siRNA sense strand
gagggucaucggguaauua

SEQ ID NO: 178301 - RNA, 19 nt, Homo sapiens
  misc_RNA (1)...(19): siRNA sense strand
ggacugaggaagcaauucu

SEQ ID NO: 178302 - RNA, 19 nt, Homo sapiens
  misc_RNA (1)...(19): siRNA sense strand
aaggaugguucauaucaug

SEQ ID NO: 178303 - RNA, 19 nt, Homo sapiens
  misc_RNA (1)...(19): siRNA sense strand
ccagaaggugugcuacauu

SEQ ID NO: 178304 - RNA, 19 nt, Homo sapiens
  misc_RNA (1)...(19): siRNA sense strand
gaaggugugcuacauugag

SEQ ID NO: 178305 - RNA, 19 nt, Homo sapiens
  misc_RNA (1)...(19): siRNA sense strand
gccagaaggugugcuacau

SEQ ID NO: 178306 - RNA, 19 nt, Homo sapiens
  misc_RNA (1)...(19): siRNA sense strand
gugggagucugugcauuug

SEQ ID NO: 178307 - RNA, 19 nt, Homo sapiens
  misc_RNA (1)...(19): siRNA sense strand
guaauuaaucuggccaaug

SEQ ID NO: 178308 - RNA, 19 nt, Homo sapiens
  misc_RNA (1)...(19): siRNA sense strand
gguaauuaaucuggccaau

SEQ ID NO: 178309 - RNA, 19 nt, Homo sapiens
  misc_RNA (1)...(19): siRNA sense strand
cgugggagucugugcauuu

SEQ ID NO: 178310 - RNA, 19 nt, Homo sapiens
  misc_RNA (1)...(19): siRNA sense strand
ugaggaagcaauucuugga

SEQ ID NO: 178311 - RNA, 19 nt, Homo sapiens
  misc_RNA (1)...(19): siRNA sense strand
aaugagauguuugguuaca

SEQ ID NO: 178312 - RNA, 19 nt, Homo sapiens
  misc_RNA (1)...(19): siRNA sense strand
ugagggucaucggguaauu

SEQ ID NO: 178313 - RNA, 19 nt, Homo sapiens
  misc_RNA (1)...(19): siRNA sense strand
guaccaggccauccagaag

SEQ ID NO: 178314 - RNA, 19 nt, Homo sapiens
  misc_RNA (1)...(19): siRNA sense strand
gcggcucaguguuaugcuu

SEQ ID NO: 178315 - RNA, 19 nt, Homo sapiens
  misc_RNA (1)...(19): siRNA sense strand
gcccagaauacauaaguag

SEQ ID NO: 178316 - RNA, 19 nt, Homo sapiens
  misc_RNA (1)...(19): siRNA sense strand
gccaguacacagcagaaga

SEQ ID NO: 178317 - RNA, 19 nt, Homo sapiens
  misc_RNA (1)...(19): siRNA sense strand
ggagucugugcauuuguga

SEQ ID NO: 178318 - RNA, 19 nt, Homo sapiens
  misc_RNA (1)...(19): siRNA sense strand
gaggccagaaggugugcua

SEQ ID NO: 178319 - RNA, 19 nt, Homo sapiens
  misc_RNA (1)...(19): siRNA sense strand
gucaucggguaauuaaucu

SEQ ID NO: 178320 - RNA, 19 nt, Homo sapiens
  misc_RNA (1)...(19): siRNA sense strand
uacaauggcugggcacacu

SEQ ID NO: 178321 - RNA, 19 nt, Homo sapiens
  misc_RNA (1)...(19): siRNA sense strand
gggcccagaauacauaagu

SEQ ID NO: 178322 - RNA, 19 nt, Homo sapiens
  misc_RNA (1)...(19): siRNA sense strand
ccaucacgcagcagaaugu

SEQ ID NO: 178323 - RNA, 19 nt, Homo sapiens
  misc_RNA (1)...(19): siRNA sense strand
uaauuaaucuggccaauga

SEQ ID NO: 178324 - RNA, 19 nt, Homo sapiens
  misc_RNA (1)...(19): siRNA sense strand
ggacaaagacuaccugaga

SEQ ID NO: 178325 - RNA, 19 nt, Homo sapiens
  misc_RNA (1)...(19): siRNA sense strand
uaccugagaucacuaaaua

SEQ ID NO: 178326 - RNA, 19 nt, Homo sapiens
  misc_RNA (1)...(19): siRNA sense strand
gaaacuguauucuggacaa

SEQ ID NO: 178327 - RNA, 19 nt, Homo sapiens
  misc_RNA (1)...(19): siRNA sense strand
guccaaggcuuuaucuuug

SEQ ID NO: 178328 - RNA, 19 nt, Homo sapiens
  misc_RNA (1)...(19): siRNA sense strand
ggaaggaggcggugacaga

SEQ ID NO: 178329 - RNA, 19 nt, Homo sapiens
  misc_RNA (1)...(19): siRNA sense strand
cagaaggugugcuacauug

SEQ ID NO: 178330 - RNA, 19 nt, Homo sapiens
  misc_RNA (1)...(19): siRNA sense strand
ggaaugcacuuggaaacug

SEQ ID NO: 178331 - RNA, 19 nt, Homo sapiens
  misc_RNA (1)...(19): siRNA sense strand
gauguugguuaugguguua

SEQ ID NO: 178332 - RNA, 19 nt, Homo sapiens
  misc_RNA (1)...(19): siRNA sense strand
gaaggaugguucauaucau

SEQ ID NO: 178333 - RNA, 19 nt, Homo sapiens
  misc_RNA (1)...(19): siRNA sense strand
ucaugaagauguugguuau

SEQ ID NO: 178334 - RNA, 19 nt, Homo sapiens
  misc_RNA (1)...(19): siRNA sense strand
gacaaagacuaccugagau

SEQ ID NO: 178335 - RNA, 19 nt, Homo sapiens
  misc_RNA (1)...(19): siRNA sense strand
gaaugcacuuggaaacugu

SEQ ID NO: 178336 - RNA, 19 nt, Homo sapiens
  misc_RNA (1)...(19): siRNA sense strand
gcacuuggaaacuguauuc

SEQ ID NO: 178337 - RNA, 19 nt, Homo sapiens
  misc_RNA (1)...(19): siRNA sense strand
ggucaucggguaauuaauc

SEQ ID NO: 178338 - RNA, 19 nt, Homo sapiens
  misc_RNA (1)...(19): siRNA sense strand
ugagauguuugguuacaau

SEQ ID NO: 178339 - RNA, 19 nt, Homo sapiens
  misc_RNA (1)...(19): siRNA sense strand
ggcccagaauacauaagua

SEQ ID NO: 178340 - RNA, 19 nt, Homo sapiens
  misc_RNA (1)...(19): siRNA sense strand
gggagucugugcauuugug

SEQ ID NO: 178341 - RNA, 19 nt, Homo sapiens
  misc_RNA (1)...(19): siRNA sense strand
gagggucaucggguaauua

SEQ ID NO: 178342 - RNA, 19 nt, Homo sapiens
  misc_RNA (1)...(19): siRNA sense strand
aaggaugguucauaucaug

SEQ ID NO: 178343 - RNA, 19 nt, Homo sapiens
  misc_RNA (1)...(19): siRNA sense strand
ggacugaggaagcaauucu

SEQ ID NO: 178344 - RNA, 19 nt, Homo sapiens
  misc_RNA (1)...(19): siRNA sense strand
ccagaaggugugcuacauu

SEQ ID NO: 178345 - RNA, 19 nt, Homo sapiens
  misc_RNA (1)...(19): siRNA sense strand
gaaggugugcuacauugag

SEQ ID NO: 178346 - RNA, 19 nt, Homo sapiens
  misc_RNA (1)...(19): siRNA sense strand
gccagaaggugugcuacau

SEQ ID NO: 178347 - RNA, 19 nt, Homo sapiens
  misc_RNA (1)...(19): siRNA sense strand
aguccaaggcuuuaucuuu

SEQ ID NO: 178348 - RNA, 19 nt, Homo sapiens
  misc_RNA (1)...(19): siRNA sense strand
gugggagucugugcauuug

SEQ ID NO: 178349 - RNA, 19 nt, Homo sapiens
  misc_RNA (1)...(19): siRNA sense strand
guaauuaaucuggccaaug

SEQ ID NO: 178350 - RNA, 19 nt, Homo sapiens
  misc_RNA (1)...(19): siRNA sense strand
caaagacuaccugagauca

SEQ ID NO: 178351 - RNA, 19 nt, Homo sapiens
  misc_RNA (1)...(19): siRNA sense strand
aaacuguauucuggacaaa

SEQ ID NO: 178352 - RNA, 19 nt, Homo sapiens
  misc_RNA (1)...(19): siRNA sense strand
gguaauuaaucuggccaau

SEQ ID NO: 178353 - RNA, 19 nt, Homo sapiens
  misc_RNA (1)...(19): siRNA sense strand
ccucaaguccaaggcuuua

SEQ ID NO: 178354 - RNA, 19 nt, Homo sapiens
  misc_RNA (1)...(19): siRNA sense strand
cgugggagucugugcauuu

SEQ ID NO: 178355 - RNA, 19 nt, Homo sapiens
  misc_RNA (1)...(19): siRNA sense strand
ugaggaagcaauucuugga

SEQ ID NO: 178356 - RNA, 19 nt, Homo sapiens
  misc_RNA (1)...(19): siRNA sense strand
aaugagauguuugguuaca

SEQ ID NO: 178357 - RNA, 19 nt, Homo sapiens
  misc_RNA (1)...(19): siRNA sense strand
acuguauucuggacaaaga

SEQ ID NO: 178358 - RNA, 19 nt, Homo sapiens
  misc_RNA (1)...(19): siRNA sense strand
ugagggucaucggguaauu

SEQ ID NO: 178359 - RNA, 19 nt, Homo sapiens
  misc_RNA (1)...(19): siRNA sense strand
ugaagauguugguuauggu

SEQ ID NO: 178360 - RNA, 19 nt, Homo sapiens
  misc_RNA (1)...(19): siRNA sense strand
guaccaggccauccagaag

SEQ ID NO: 178361 - RNA, 19 nt, Homo sapiens
  misc_RNA (1)...(19): siRNA sense strand
gcggcucaguguuaugcuu

SEQ ID NO: 178362 - RNA, 19 nt, Homo sapiens
  misc_RNA (1)...(19): siRNA sense strand
ggcuuuaucuuuggagaag

SEQ ID NO: 178363 - RNA, 19 nt, Homo sapiens
  misc_RNA (1)...(19): siRNA sense strand
gcccagaauacauaaguag

SEQ ID NO: 178364 - RNA, 19 nt, Homo sapiens
  misc_RNA (1)...(19): siRNA sense strand
gccaguacacagcagaaga

SEQ ID NO: 178365 - RNA, 19 nt, Homo sapiens
  misc_RNA (1)...(19): siRNA sense strand
gaggccagaaggugugcua

SEQ ID NO: 178366 - RNA, 19 nt, Homo sapiens
  misc_RNA (1)...(19): siRNA sense strand
ggagucugugcauuuguga

SEQ ID NO: 178367 - RNA, 19 nt, Homo sapiens
  misc_RNA (1)...(19): siRNA sense strand
gucaucggguaauuaaucu

SEQ ID NO: 178368 - RNA, 19 nt, Homo sapiens
  misc_RNA (1)...(19): siRNA sense strand
agauguugguuaugguguu

SEQ ID NO: 178369 - RNA, 19 nt, Homo sapiens
  misc_RNA (1)...(19): siRNA sense strand
augaagauguugguuaugg

SEQ ID NO: 178370 - RNA, 19 nt, Homo sapiens
  misc_RNA (1)...(19): siRNA sense strand
uacaauggcugggcacacu

SEQ ID NO: 178371 - RNA, 19 nt, Homo sapiens
  misc_RNA (1)...(19): siRNA sense strand
ccaucacgcagcagaaugu

SEQ ID NO: 178372 - RNA, 19 nt, Homo sapiens
  misc_RNA (1)...(19): siRNA sense strand
gacuaccugagaucacuaa

SEQ ID NO: 178373 - RNA, 19 nt, Homo sapiens
  misc_RNA (1)...(19): siRNA sense strand
acaaagacuaccugagauc

SEQ ID NO: 178374 - RNA, 19 nt, Homo sapiens
  misc_RNA (1)...(19): siRNA sense strand
gggcccagaauacauaagu

SEQ ID NO: 178375 - RNA, 19 nt, Homo sapiens
  misc_RNA (1)...(19): siRNA sense strand
gcacggagauguugcagua

SEQ ID NO: 178376 - RNA, 19 nt, Homo sapiens
  misc_RNA (1)...(19): siRNA sense strand
gcaaagaacaucauccaua

SEQ ID NO: 178377 - RNA, 19 nt, Homo sapiens
  misc_RNA (1)...(19): siRNA sense strand
gacaugaaauccaacaaua

SEQ ID NO: 178378 - RNA, 19 nt, Homo sapiens
  misc_RNA (1)...(19): siRNA sense strand
ggaaugagcuugcaugacu

SEQ ID NO: 178379 - RNA, 19 nt, Homo sapiens
  misc_RNA (1)...(19): siRNA sense strand
caaagaacaucauccauag

SEQ ID NO: 178380 - RNA, 19 nt, Homo sapiens
  misc_RNA (1)...(19): siRNA sense strand
caugaaggcuuaacaguga

SEQ ID NO: 178381 - RNA, 19 nt, Homo sapiens
  misc_RNA (1)...(19): siRNA sense strand
uaacaucagacaacucuua

SEQ ID NO: 178382 - RNA, 19 nt, Homo sapiens
  misc_RNA (1)...(19): siRNA sense strand
gcacuaccuucuuugacua

SEQ ID NO: 178383 - RNA, 19 nt, Homo sapiens
  misc_RNA (1)...(19): siRNA sense strand
ggaaugagguggcuguucu

SEQ ID NO: 178384 - RNA, 19 nt, Homo sapiens
  misc_RNA (1)...(19): siRNA sense strand
ggaaauagaagccagugaa

SEQ ID NO: 178385 - RNA, 19 nt, Homo sapiens
  misc_RNA (1)...(19): siRNA sense strand
gauaacaacccauucaguu

SEQ ID NO: 178386 - RNA, 19 nt, Homo sapiens
  misc_RNA (1)...(19): siRNA sense strand
cugcaucucuccuacaaua

SEQ ID NO: 178387 - RNA, 19 nt, Homo sapiens
  misc_RNA (1)...(19): siRNA sense strand
acagagagauucaagcuau

SEQ ID NO: 178388 - RNA, 19 nt, Homo sapiens
  misc_RNA (1)...(19): siRNA sense strand
ucaaguagauuuccuggau

SEQ ID NO: 178389 - RNA, 19 nt, Homo sapiens
  misc_RNA (1)...(19): siRNA sense strand
ggacuggaguaacaucaga

SEQ ID NO: 178390 - RNA, 19 nt, Homo sapiens
  misc_RNA (1)...(19): siRNA sense strand
ccucacgccuucaccuuua

SEQ ID NO: 178391 - RNA, 19 nt, Homo sapiens
  misc_RNA (1)...(19): siRNA sense strand
auucaaagaugccguguuu

SEQ ID NO: 178392 - RNA, 19 nt, Homo sapiens
  misc_RNA (1)...(19): siRNA sense strand
aaagaacaguggucaaugu

SEQ ID NO: 178393 - RNA, 19 nt, Homo sapiens
  misc_RNA (1)...(19): siRNA sense strand
ggaagacgaucagcaaugg

SEQ ID NO: 178394 - RNA, 19 nt, Homo sapiens
  misc_RNA (1)...(19): siRNA sense strand
gcagcagccucuacaaaca

SEQ ID NO: 178395 - RNA, 19 nt, Homo sapiens
  misc_RNA (1)...(19): siRNA sense strand
ugaagaaaguaaaggaaga

SEQ ID NO: 178396 - RNA, 19 nt, Homo sapiens
  misc_RNA (1)...(19): siRNA sense strand
ggauuucgaugucagacuu

SEQ ID NO: 178397 - RNA, 19 nt, Homo sapiens
  misc_RNA (1)...(19): siRNA sense strand
gcagacggcucagggaaug

SEQ ID NO: 178398 - RNA, 19 nt, Homo sapiens
  misc_RNA (1)...(19): siRNA sense strand
gcaaagaacaguggucaau

SEQ ID NO: 178399 - RNA, 19 nt, Homo sapiens
  misc_RNA (1)...(19): siRNA sense strand
uugcaugacugccuuauga

SEQ ID NO: 178400 - RNA, 19 nt, Homo sapiens
  misc_RNA (1)...(19): siRNA sense strand
gagauucaagcuauuauug

SEQ ID NO: 178401 - RNA, 19 nt, Homo sapiens
  misc_RNA (1)...(19): siRNA sense strand
uacaauaguucagcaguuu

SEQ ID NO: 178402 - RNA, 19 nt, Homo sapiens
  misc_RNA (1)...(19): siRNA sense strand
caucagacaacucuuauug

SEQ ID NO: 178403 - RNA, 19 nt, Homo sapiens
  misc_RNA (1)...(19): siRNA sense strand
gaaauggaaugagcuugca

SEQ ID NO: 178404 - RNA, 19 nt, Homo sapiens
  misc_RNA (1)...(19): siRNA sense strand
guucagacuucuccacgaa

SEQ ID NO: 178405 - RNA, 19 nt, Homo sapiens
  misc_RNA (1)...(19): siRNA sense strand
uuucagauguuccagcuaa

SEQ ID NO: 178406 - RNA, 19 nt, Homo sapiens
  misc_RNA (1)...(19): siRNA sense strand
gagagucuguuuccaggau

SEQ ID NO: 178407 - RNA, 19 nt, Homo sapiens
  misc_RNA (1)...(19): siRNA sense strand
ccuauggcaucguauugua

SEQ ID NO: 178408 - RNA, 19 nt, Homo sapiens
  misc_RNA (1)...(19): siRNA sense strand
gagaccaaguuucagaugu

SEQ ID NO: 178409 - RNA, 19 nt, Homo sapiens
  misc_RNA (1)...(19): siRNA sense strand
caguaaagauccuaaaggu

SEQ ID NO: 178410 - RNA, 19 nt, Homo sapiens
  misc_RNA (1)...(19): siRNA sense strand
gaugcugcgucuuugauug

SEQ ID NO: 178411 - RNA, 19 nt, Homo sapiens
  misc_RNA (1)...(19): siRNA sense strand
agaaauuccugcucaaugg

SEQ ID NO: 178412 - RNA, 19 nt, Homo sapiens
  misc_RNA (1)...(19): siRNA sense strand
agaccaaguuucagauguu

SEQ ID NO: 178413 - RNA, 19 nt, Homo sapiens
  misc_RNA (1)...(19): siRNA sense strand
cuacaauaguucagcaguu

SEQ ID NO: 178414 - RNA, 19 nt, Homo sapiens
  misc_RNA (1)...(19): siRNA sense strand
uaacaacccauucaguuuc

SEQ ID NO: 178415 - RNA, 19 nt, Homo sapiens
  misc_RNA (1)...(19): siRNA sense strand
caucauccauagagacaug

SEQ ID NO: 178416 - RNA, 19 nt, Homo sapiens
  misc_RNA (1)...(19): siRNA sense strand
gaacuguuuauaaggguaa

SEQ ID NO: 178417 - RNA, 19 nt, Homo sapiens
  misc_RNA (1)...(19): siRNA sense strand
gcacuguagcaccaaagua

SEQ ID NO: 178418 - RNA, 19 nt, Homo sapiens
  misc_RNA (1)...(19): siRNA sense strand
cgaaucagccucaccuuca

SEQ ID NO: 178419 - RNA, 19 nt, Homo sapiens
  misc_RNA (1)...(19): siRNA sense strand
cuacuccuauggcaucgua

SEQ ID NO: 178420 - RNA, 19 nt, Homo sapiens
  misc_RNA (1)...(19): siRNA sense strand
ucacagauccuucuaagac

SEQ ID NO: 178421 - RNA, 19 nt, Homo sapiens
  misc_RNA (1)...(19): siRNA sense strand
gauccugucuuccauugag

SEQ ID NO: 178422 - RNA, 19 nt, Homo sapiens
  misc_RNA (1)...(19): siRNA sense strand
auagagacaugaaauccaa

SEQ ID NO: 178423 - RNA, 19 nt, Homo sapiens
  misc_RNA (1)...(19): siRNA sense strand
uaaagauccuaaagguugu

SEQ ID NO: 178424 - RNA, 19 nt, Homo sapiens
  misc_RNA (1)...(19): siRNA sense strand
gaaauagaagccagugaag

SEQ ID NO: 178425 - RNA, 19 nt, Homo sapiens
  misc_RNA (1)...(19): siRNA sense strand
caacucuuauuguuuccaa

SEQ ID NO: 178426 - RNA, 19 nt, Homo sapiens
  misc_RNA (1)...(19): siRNA sense strand
ccucacaacacacaacuuu

SEQ ID NO: 178427 - RNA, 19 nt, Homo sapiens
  misc_RNA (1)...(19): siRNA sense strand
gcaugacugccuuaugaaa

SEQ ID NO: 178428 - RNA, 19 nt, Homo sapiens
  misc_RNA (1)...(19): siRNA sense strand
cguauuguaugaacugaug

SEQ ID NO: 178429 - RNA, 19 nt, Homo sapiens
  misc_RNA (1)...(19): siRNA sense strand
ggaguaacaucagacaacu

SEQ ID NO: 178430 - RNA, 19 nt, Homo sapiens
  misc_RNA (1)...(19): siRNA sense strand
cagauccugucuuccauug

SEQ ID NO: 178431 - RNA, 19 nt, Homo sapiens
  misc_RNA (1)...(19): siRNA sense strand
gggcagcagccucuacaaa

SEQ ID NO: 178432 - RNA, 19 nt, Homo sapiens
  misc_RNA (1)...(19): siRNA sense strand
guaaauggcacggagaugu

SEQ ID NO: 178433 - RNA, 19 nt, Homo sapiens
  misc_RNA (1)...(19): siRNA sense strand
ucccagcacuaccuucuuu

SEQ ID NO: 178434 - RNA, 19 nt, Homo sapiens
  misc_RNA (1)...(19): siRNA sense strand
ggacagagagauucaagcu

SEQ ID NO: 178435 - RNA, 19 nt, Homo sapiens
  misc_RNA (1)...(19): siRNA sense strand
cagagagauucaagcuauu

SEQ ID NO: 178436 - RNA, 19 nt, Homo sapiens
  misc_RNA (1)...(19): siRNA sense strand
ccagagugcugugcagugu

SEQ ID NO: 178437 - RNA, 19 nt, Homo sapiens
  misc_RNA (1)...(19): siRNA sense strand
caaauuucaugagcacugu

SEQ ID NO: 178438 - RNA, 19 nt, Homo sapiens
  misc_RNA (1)...(19): siRNA sense strand
uagauuuccuggaucaugu

SEQ ID NO: 178439 - RNA, 19 nt, Homo sapiens
  misc_RNA (1)...(19): siRNA sense strand
ccacgaacacaaagguaaa

SEQ ID NO: 178440 - RNA, 19 nt, Homo sapiens
  misc_RNA (1)...(19): siRNA sense strand
guagcugacugugugaaga

SEQ ID NO: 178441 - RNA, 19 nt, Homo sapiens
  misc_RNA (1)...(19): siRNA sense strand
uaaauggcacggagauguu

SEQ ID NO: 178442 - RNA, 19 nt, Homo sapiens
  misc_RNA (1)...(19): siRNA sense strand
agagagauucaagcuauua

SEQ ID NO: 178443 - RNA, 19 nt, Homo sapiens
  misc_RNA (1)...(19): siRNA sense strand
gaaauuccugcucaaugga

SEQ ID NO: 178444 - RNA, 19 nt, Homo sapiens
  misc_RNA (1)...(19): siRNA sense strand
auacugaugcugcgucuuu

SEQ ID NO: 178445 - RNA, 19 nt, Homo sapiens
  misc_RNA (1)...(19): siRNA sense strand
agucggaugucuacuccua

SEQ ID NO: 178446 - RNA, 19 nt, Homo sapiens
  misc_RNA (1)...(19): siRNA sense strand
cucagggaauggacuauuu

SEQ ID NO: 178447 - RNA, 19 nt, Homo sapiens
  misc_RNA (1)...(19): siRNA sense strand
gaccaaguuucagauguuc

SEQ ID NO: 178448 - RNA, 19 nt, Homo sapiens
  misc_RNA (1)...(19): siRNA sense strand
aaagaugccguguuugaug

SEQ ID NO: 178449 - RNA, 19 nt, Homo sapiens
  misc_RNA (1)...(19): siRNA sense strand
gcaguaaagauccuaaagg

SEQ ID NO: 178450 - RNA, 19 nt, Homo sapiens
  misc_RNA (1)...(19): siRNA sense strand
acggagauguugcaguaaa

SEQ ID NO: 178451 - RNA, 19 nt, Homo sapiens
  misc_RNA (1)...(19): siRNA sense strand
guggacagcaggaugauug

SEQ ID NO: 178452 - RNA, 19 nt, Homo sapiens
  misc_RNA (1)...(19): siRNA sense strand
cagaaauuccugcucaaug

SEQ ID NO: 178453 - RNA, 19 nt, Homo sapiens
  misc_RNA (1)...(19): siRNA sense strand
gagcuuccuuauucucaca

SEQ ID NO: 178454 - RNA, 19 nt, Homo sapiens
  misc_RNA (1)...(19): siRNA sense strand
gggaauggacuauuugcau

SEQ ID NO: 178455 - RNA, 19 nt, Homo sapiens
  misc_RNA (1)...(19): siRNA sense strand
caucucuccuacaauaguu

SEQ ID NO: 178456 - RNA, 19 nt, Homo sapiens
  misc_RNA (1)...(19): siRNA sense strand
aauagaagccagugaagug

SEQ ID NO: 178457 - RNA, 19 nt, Homo sapiens
  misc_RNA (1)...(19): siRNA sense strand
cuucagcccuguccaguag

SEQ ID NO: 178458 - RNA, 19 nt, Homo sapiens
  misc_RNA (1)...(19): siRNA sense strand
gaucagcaaugguuuugga

SEQ ID NO: 178459 - RNA, 19 nt, Homo sapiens
  misc_RNA (1)...(19): siRNA sense strand
auaacaacccauucaguuu

SEQ ID NO: 178460 - RNA, 19 nt, Homo sapiens
  misc_RNA (1)...(19): siRNA sense strand
caaaggacaaccuggcaau

SEQ ID NO: 178461 - RNA, 19 nt, Homo sapiens
  misc_RNA (1)...(19): siRNA sense strand
caaagaacaguggucaaug

SEQ ID NO: 178462 - RNA, 19 nt, Homo sapiens
  misc_RNA (1)...(19): siRNA sense strand
uuaguucucagcacagaua

SEQ ID NO: 178463 - RNA, 19 nt, Homo sapiens
  misc_RNA (1)...(19): siRNA sense strand
aagcuugccuucugugaca

SEQ ID NO: 178464 - RNA, 19 nt, Homo sapiens
  misc_RNA (1)...(19): siRNA sense strand
gaaucagccucaccuucag

SEQ ID NO: 178465 - RNA, 19 nt, Homo sapiens
  misc_RNA (1)...(19): siRNA sense strand
ggauaacaacccauucagu

SEQ ID NO: 178466 - RNA, 19 nt, Homo sapiens
  misc_RNA (1)...(19): siRNA sense strand
acagauccuucuaagacaa

SEQ ID NO: 178467 - RNA, 19 nt, Homo sapiens
  misc_RNA (1)...(19): siRNA sense strand
ggagaccaaguuucagaug

SEQ ID NO: 178468 - RNA, 19 nt, Homo sapiens
  misc_RNA (1)...(19): siRNA sense strand
uuuccaaauuccacuauug

SEQ ID NO: 178469 - RNA, 19 nt, Homo sapiens
  misc_RNA (1)...(19): siRNA sense strand
gaagaaaguaaaggaagag

SEQ ID NO: 178470 - RNA, 19 nt, Homo sapiens
  misc_RNA (1)...(19): siRNA sense strand
agaagccagugaagugaug

SEQ ID NO: 178471 - RNA, 19 nt, Homo sapiens
  misc_RNA (1)...(19): siRNA sense strand
gagagauucaagcuauuau

SEQ ID NO: 178472 - RNA, 19 nt, Homo sapiens
  misc_RNA (1)...(19): siRNA sense strand
uguguggacuggaguaaca

SEQ ID NO: 178473 - RNA, 19 nt, Homo sapiens
  misc_RNA (1)...(19): siRNA sense strand
cagauguuccagcuaauug

SEQ ID NO: 178474 - RNA, 19 nt, Homo sapiens
  misc_RNA (1)...(19): siRNA sense strand
cagcacagauauucuacac

SEQ ID NO: 178475 - RNA, 19 nt, Homo sapiens
  misc_RNA (1)...(19): siRNA sense strand
gaacaaagaagaugucaga

SEQ ID NO: 178476 - RNA, 19 nt, Homo sapiens
  misc_RNA (1)...(19): siRNA sense strand
agaaagauguugcuuacua

SEQ ID NO: 178477 - RNA, 19 nt, Homo sapiens
  misc_RNA (1)...(19): siRNA sense strand
gaaagauguugcuuacuau

SEQ ID NO: 178478 - RNA, 19 nt, Homo sapiens
  misc_RNA (1)...(19): siRNA sense strand
gaacaugaauccuuuacag

SEQ ID NO: 178479 - RNA, 19 nt, Homo sapiens
  misc_RNA (1)...(19): siRNA sense strand
gggaagaaguucagauaga

SEQ ID NO: 178480 - RNA, 19 nt, Homo sapiens
  misc_RNA (1)...(19): siRNA sense strand
gaaaucagaacaaagaaga

SEQ ID NO: 178481 - RNA, 19 nt, Homo sapiens
  misc_RNA (1)...(19): siRNA sense strand
uaccaaagcugacaguuau

SEQ ID NO: 178482 - RNA, 19 nt, Homo sapiens
  misc_RNA (1)...(19): siRNA sense strand
caaagaagaugucagaaaa

SEQ ID NO: 178483 - RNA, 19 nt, Homo sapiens
  misc_RNA (1)...(19): siRNA sense strand
ggaagaaguucagauagau

SEQ ID NO: 178484 - RNA, 19 nt, Homo sapiens
  misc_RNA (1)...(19): siRNA sense strand
gaagaaguucagauagaua

SEQ ID NO: 178485 - RNA, 19 nt, Homo sapiens
  misc_RNA (1)...(19): siRNA sense strand
agacaagaauggcaagaaa

SEQ ID NO: 178486 - RNA, 19 nt, Homo sapiens
  misc_RNA (1)...(19): siRNA sense strand
aaacaagucugaccuagag

SEQ ID NO: 178487 - RNA, 19 nt, Homo sapiens
  misc_RNA (1)...(19): siRNA sense strand
aaagaaagauguugcuuac

SEQ ID NO: 178488 - RNA, 19 nt, Homo sapiens
  misc_RNA (1)...(19): siRNA sense strand
ugagagaaaucagaacaaa

SEQ ID NO: 178489 - RNA, 19 nt, Homo sapiens
  misc_RNA (1)...(19): siRNA sense strand
cacagaacaugaauccuuu

SEQ ID NO: 178490 - RNA, 19 nt, Homo sapiens
  misc_RNA (1)...(19): siRNA sense strand
guagaagacuaugaaccua

SEQ ID NO: 178491 - RNA, 19 nt, Homo sapiens
  misc_RNA (1)...(19): siRNA sense strand
gaaacaagucugaccuaga

SEQ ID NO: 178492 - RNA, 19 nt, Homo sapiens
  misc_RNA (1)...(19): siRNA sense strand
gcugacaguuauagaaaga

SEQ ID NO: 178493 - RNA, 19 nt, Homo sapiens
  misc_RNA (1)...(19): siRNA sense strand
cuaccaaagcugacaguua

SEQ ID NO: 178494 - RNA, 19 nt, Homo sapiens
  misc_RNA (1)...(19): siRNA sense strand
agagaaaucagaacaaaga

SEQ ID NO: 178495 - RNA, 19 nt, Homo sapiens
  misc_RNA (1)...(19): siRNA sense strand
ugugaaggcugaagaagau

SEQ ID NO: 178496 - RNA, 19 nt, Homo sapiens
  misc_RNA (1)...(19): siRNA sense strand
uggacaagguguucuuuga

SEQ ID NO: 178497 - RNA, 19 nt, Homo sapiens
  misc_RNA (1)...(19): siRNA sense strand
cauucgagauaacuacuuu

SEQ ID NO: 178498 - RNA, 19 nt, Homo sapiens
  misc_RNA (1)...(19): siRNA sense strand
acaaagaagaugucagaaa

SEQ ID NO: 178499 - RNA, 19 nt, Homo sapiens
  misc_RNA (1)...(19): siRNA sense strand
ucacagaacaugaauccuu

SEQ ID NO: 178500 - RNA, 19 nt, Homo sapiens
  misc_RNA (1)...(19): siRNA sense strand
gaagaugucagaaaacaaa

SEQ ID NO: 178501 - RNA, 19 nt, Homo sapiens
  misc_RNA (1)...(19): siRNA sense strand
uacagcaacugccgaauuc

SEQ ID NO: 178502 - RNA, 19 nt, Homo sapiens
  misc_RNA (1)...(19): siRNA sense strand
caugaauccuuuacagcaa

SEQ ID NO: 178503 - RNA, 19 nt, Homo sapiens
  misc_RNA (1)...(19): siRNA sense strand
gcaagaacaagaaaaguuu

SEQ ID NO: 178504 - RNA, 19 nt, Homo sapiens
  misc_RNA (1)...(19): siRNA sense strand
gguguucuuugaccuaaug

SEQ ID NO: 178505 - RNA, 19 nt, Homo sapiens
  misc_RNA (1)...(19): siRNA sense strand
gaaguucagauagauauuc

SEQ ID NO: 178506 - RNA, 19 nt, Homo sapiens
  misc_RNA (1)...(19): siRNA sense strand
ggacuacgcagccauucga

SEQ ID NO: 178507 - RNA, 19 nt, Homo sapiens
  misc_RNA (1)...(19): siRNA sense strand
gaaggcugaagaagauaaa

SEQ ID NO: 178508 - RNA, 19 nt, Homo sapiens
  misc_RNA (1)...(19): siRNA sense strand
cuucuuguguucucaauca

SEQ ID NO: 178509 - RNA, 19 nt, Homo sapiens
  misc_RNA (1)...(19): siRNA sense strand
gggaaacaagucugaccua

SEQ ID NO: 178510 - RNA, 19 nt, Homo sapiens
  misc_RNA (1)...(19): siRNA sense strand
cgaauucagggaacagauu

SEQ ID NO: 178511 - RNA, 19 nt, Homo sapiens
  misc_RNA (1)...(19): siRNA sense strand
guaugacgaguuuguagaa

SEQ ID NO: 178512 - RNA, 19 nt, Homo sapiens
  misc_RNA (1)...(19): siRNA sense strand
cuaaugagagaaaucagaa

SEQ ID NO: 178513 - RNA, 19 nt, Homo sapiens
  misc_RNA (1)...(19): siRNA sense strand
uuacagcaacugccgaauu

SEQ ID NO: 178514 - RNA, 19 nt, Homo sapiens
  misc_RNA (1)...(19): siRNA sense strand
gagaaaucagaacaaagaa

SEQ ID NO: 178515 - RNA, 19 nt, Homo sapiens
  misc_RNA (1)...(19): siRNA sense strand
ggaggaggccaggaguaaa

SEQ ID NO: 178516 - RNA, 19 nt, Homo sapiens
  misc_RNA (1)...(19): siRNA sense strand
gggccaacguggacaaggu

SEQ ID NO: 178517 - RNA, 19 nt, Homo sapiens
  misc_RNA (1)...(19): siRNA sense strand
gaggaggccaggaguaaag

SEQ ID NO: 178518 - RNA, 19 nt, Homo sapiens
  misc_RNA (1)...(19): siRNA sense strand
acgcagccauucgagauaa

SEQ ID NO: 178519 - RNA, 19 nt, Homo sapiens
  misc_RNA (1)...(19): siRNA sense strand
guggagacgucagcgaaga

SEQ ID NO: 178520 - RNA, 19 nt, Homo sapiens
  misc_RNA (1)...(19): siRNA sense strand
aaagcugacaguuauagaa

SEQ ID NO: 178521 - RNA, 19 nt, Homo sapiens
  misc_RNA (1)...(19): siRNA sense strand
aagcugacaguuauagaaa

SEQ ID NO: 178522 - RNA, 19 nt, Homo sapiens
  misc_RNA (1)...(19): siRNA sense strand
ugaaggcugaagaagauaa

SEQ ID NO: 178523 - RNA, 19 nt, Homo sapiens
  misc_RNA (1)...(19): siRNA sense strand
ucuuugaccuaaugagaga

SEQ ID NO: 178524 - RNA, 19 nt, Homo sapiens
  misc_RNA (1)...(19): siRNA sense strand
gaaccuaccaaagcugaca

SEQ ID NO: 178525 - RNA, 19 nt, Homo sapiens
  misc_RNA (1)...(19): siRNA sense strand
gaccuaaugagagaaauca

SEQ ID NO: 178526 - RNA, 19 nt, Homo sapiens
  misc_RNA (1)...(19): siRNA sense strand
gagagaaaucagaacaaag

SEQ ID NO: 178527 - RNA, 19 nt, Homo sapiens
  misc_RNA (1)...(19): siRNA sense strand
gaaaacaaagacaagaaug

SEQ ID NO: 178528 - RNA, 19 nt, Homo sapiens
  misc_RNA (1)...(19): siRNA sense strand
caaagcugacaguuauaga

SEQ ID NO: 178529 - RNA, 19 nt, Homo sapiens
  misc_RNA (1)...(19): siRNA sense strand
ggacaagguguucuuugac

SEQ ID NO: 178530 - RNA, 19 nt, Homo sapiens
  misc_RNA (1)...(19): siRNA sense strand
ccaaagcugacaguuauag

SEQ ID NO: 178531 - RNA, 19 nt, Homo sapiens
  misc_RNA (1)...(19): siRNA sense strand
cggaggcguuggcaaguca

SEQ ID NO: 178532 - RNA, 19 nt, Homo sapiens
  misc_RNA (1)...(19): siRNA sense strand
ccacaaggugaucaugguu

SEQ ID NO: 178533 - RNA, 19 nt, Homo sapiens
  misc_RNA (1)...(19): siRNA sense strand
guucuuugaccuaaugaga

SEQ ID NO: 178534 - RNA, 19 nt, Homo sapiens
  misc_RNA (1)...(19): siRNA sense strand
caacguggacaagguguuc

SEQ ID NO: 178535 - RNA, 19 nt, Homo sapiens
  misc_RNA (1)...(19): siRNA sense strand
ugacgaguuuguagaagac

SEQ ID NO: 178536 - RNA, 19 nt, Homo sapiens
  misc_RNA (1)...(19): siRNA sense strand
gugugaaggcugaagaaga

SEQ ID NO: 178537 - RNA, 19 nt, Homo sapiens
  misc_RNA (1)...(19): siRNA sense strand
aagauguugcuuacuauga

SEQ ID NO: 178538 - RNA, 19 nt, Homo sapiens
  misc_RNA (1)...(19): siRNA sense strand
ccuaaugagagaaaucaga

SEQ ID NO: 178539 - RNA, 19 nt, Homo sapiens
  misc_RNA (1)...(19): siRNA sense strand
uggaggaggccaggaguaa

SEQ ID NO: 178540 - RNA, 19 nt, Homo sapiens
  misc_RNA (1)...(19): siRNA sense strand
guuuguagaagacuaugaa

SEQ ID NO: 178541 - RNA, 19 nt, Homo sapiens
  misc_RNA (1)...(19): siRNA sense strand
cuacgcagccauucgagau

SEQ ID NO: 178542 - RNA, 19 nt, Homo sapiens
  misc_RNA (1)...(19): siRNA sense strand
ugacgcuucaguucaugua

SEQ ID NO: 178543 - RNA, 19 nt, Homo sapiens
  misc_RNA (1)...(19): siRNA sense strand
acagaacaugaauccuuua

SEQ ID NO: 178544 - RNA, 19 nt, Homo sapiens
  misc_RNA (1)...(19): siRNA sense strand
aaggguuucuucuuguguu

SEQ ID NO: 178545 - RNA, 19 nt, Homo sapiens
  misc_RNA (1)...(19): siRNA sense strand
cuaugaaccuaccaaagcu

SEQ ID NO: 178546 - RNA, 19 nt, Homo sapiens
  misc_RNA (1)...(19): siRNA sense strand
acgcuucaguucauguaug

SEQ ID NO: 178547 - RNA, 19 nt, Homo sapiens
  misc_RNA (1)...(19): siRNA sense strand
augacgaguuuguagaaga

SEQ ID NO: 178548 - RNA, 19 nt, Homo sapiens
  misc_RNA (1)...(19): siRNA sense strand
gcaagaaaagcagcaagaa

SEQ ID NO: 178549 - RNA, 19 nt, Homo sapiens
  misc_RNA (1)...(19): siRNA sense strand
ggaagaagaugaagaggaa

SEQ ID NO: 178550 - RNA, 19 nt, Homo sapiens
  misc_RNA (1)...(19): siRNA sense strand
gcacagaaauucaaaacaa

SEQ ID NO: 178551 - RNA, 19 nt, Homo sapiens
  misc_RNA (1)...(19): siRNA sense strand
gaagaaugcaggaaagaga

SEQ ID NO: 178552 - RNA, 19 nt, Homo sapiens
  misc_RNA (1)...(19): siRNA sense strand
gaaagcaggaucaggcaaa

SEQ ID NO: 178553 - RNA, 19 nt, Homo sapiens
  misc_RNA (1)...(19): siRNA sense strand
gaaagagaucgaagagaga

SEQ ID NO: 178554 - RNA, 19 nt, Homo sapiens
  misc_RNA (1)...(19): siRNA sense strand
agaacgaucucccagaaug

SEQ ID NO: 178555 - RNA, 19 nt, Homo sapiens
  misc_RNA (1)...(19): siRNA sense strand
gggcaaaacuguuccgauu

SEQ ID NO: 178556 - RNA, 19 nt, Homo sapiens
  misc_RNA (1)...(19): siRNA sense strand
uagaagcucucucggugaa

SEQ ID NO: 178557 - RNA, 19 nt, Homo sapiens
  misc_RNA (1)...(19): siRNA sense strand
gaacacccacgcugacuuc

SEQ ID NO: 178558 - RNA, 19 nt, Homo sapiens
  misc_RNA (1)...(19): siRNA sense strand
caugauacuuccacugaga

SEQ ID NO: 178559 - RNA, 19 nt, Homo sapiens
  misc_RNA (1)...(19): siRNA sense strand
gaagaugaagaggaacuuu

SEQ ID NO: 178560 - RNA, 19 nt, Homo sapiens
  misc_RNA (1)...(19): siRNA sense strand
gccauccgcuuccugaaug

SEQ ID NO: 178561 - RNA, 19 nt, Homo sapiens
  misc_RNA (1)...(19): siRNA sense strand
gcaggaaagagaucgaaga

SEQ ID NO: 178562 - RNA, 19 nt, Homo sapiens
  misc_RNA (1)...(19): siRNA sense strand
caaccaugacccucaguuu

SEQ ID NO: 178563 - RNA, 19 nt, Homo sapiens
  misc_RNA (1)...(19): siRNA sense strand
ggaggaugcugaggagaag

SEQ ID NO: 178564 - RNA, 19 nt, Homo sapiens
  misc_RNA (1)...(19): siRNA sense strand
ugaaggaggagaccaagga

SEQ ID NO: 178565 - RNA, 19 nt, Homo sapiens
  misc_RNA (1)...(19): siRNA sense strand
gagccaauaguuucucuuc

SEQ ID NO: 178566 - RNA, 19 nt, Homo sapiens
  misc_RNA (1)...(19): siRNA sense strand
uuaaaacacuggaagaaga

SEQ ID NO: 178567 - RNA, 19 nt, Homo sapiens
  misc_RNA (1)...(19): siRNA sense strand
gaacgaucucccagaaugg

SEQ ID NO: 178568 - RNA, 19 nt, Homo sapiens
  misc_RNA (1)...(19): siRNA sense strand
cagacgaguccaaccauga

SEQ ID NO: 178569 - RNA, 19 nt, Homo sapiens
  misc_RNA (1)...(19): siRNA sense strand
ucaagcuccugaagcacaa

SEQ ID NO: 178570 - RNA, 19 nt, Homo sapiens
  misc_RNA (1)...(19): siRNA sense strand
gccaauaguuucucuuccu

SEQ ID NO: 178571 - RNA, 19 nt, Homo sapiens
  misc_RNA (1)...(19): siRNA sense strand
gauacuuccacugagaaua

SEQ ID NO: 178572 - RNA, 19 nt, Homo sapiens
  misc_RNA (1)...(19): siRNA sense strand
ggaacacccacgcugacuu

SEQ ID NO: 178573 - RNA, 19 nt, Homo sapiens
  misc_RNA (1)...(19): siRNA sense strand
aaaaugaucaugccgaaaa

SEQ ID NO: 178574 - RNA, 19 nt, Homo sapiens
  misc_RNA (1)...(19): siRNA sense strand
caguuugagccaauaguuu

SEQ ID NO: 178575 - RNA, 19 nt, Homo sapiens
  misc_RNA (1)...(19): siRNA sense strand
gaucugugccaaccacuac

SEQ ID NO: 178576 - RNA, 19 nt, Homo sapiens
  misc_RNA (1)...(19): siRNA sense strand
gaagagagagaaaagaaag

SEQ ID NO: 178577 - RNA, 19 nt, Homo sapiens
  misc_RNA (1)...(19): siRNA sense strand
gcugagaaugcacagaaau

SEQ ID NO: 178578 - RNA, 19 nt, Homo sapiens
  misc_RNA (1)...(19): siRNA sense strand
cugagaaugcacagaaauu

SEQ ID NO: 178579 - RNA, 19 nt, Homo sapiens
  misc_RNA (1)...(19): siRNA sense strand
uuccugagcaagaaauuaa

SEQ ID NO: 178580 - RNA, 19 nt, Homo sapiens
  misc_RNA (1)...(19): siRNA sense strand
accaugacccucaguuuga

SEQ ID NO: 178581 - RNA, 19 nt, Homo sapiens
  misc_RNA (1)...(19): siRNA sense strand
gagaucgaagagagagaaa

SEQ ID NO: 178582 - RNA, 19 nt, Homo sapiens
  misc_RNA (1)...(19): siRNA sense strand
ucaguuugagccaauaguu

SEQ ID NO: 178583 - RNA, 19 nt, Homo sapiens
  misc_RNA (1)...(19): siRNA sense strand
ggacacucaugaggaccau

SEQ ID NO: 178584 - RNA, 19 nt, Homo sapiens
  misc_RNA (1)...(19): siRNA sense strand
aaccaugacccucaguuug

SEQ ID NO: 178585 - RNA, 19 nt, Homo sapiens
  misc_RNA (1)...(19): siRNA sense strand
aaacacuggaagaagauga

SEQ ID NO: 178586 - RNA, 19 nt, Homo sapiens
  misc_RNA (1)...(19): siRNA sense strand
guuugaagaaugcaggaaa

SEQ ID NO: 178587 - RNA, 19 nt, Homo sapiens
  misc_RNA (1)...(19): siRNA sense strand
ggccauccgcuuccugaau

SEQ ID NO: 178588 - RNA, 19 nt, Homo sapiens
  misc_RNA (1)...(19): siRNA sense strand
ccgccaaggacacucauga

SEQ ID NO: 178589 - RNA, 19 nt, Homo sapiens
  misc_RNA (1)...(19): siRNA sense strand
aaaaguggcggaaaagcua

SEQ ID NO: 178590 - RNA, 19 nt, Homo sapiens
  misc_RNA (1)...(19): siRNA sense strand
gauagaagauuccuacaga

SEQ ID NO: 178591 - RNA, 19 nt, Homo sapiens
  misc_RNA (1)...(19): siRNA sense strand
gaacagauuuuacggguua

SEQ ID NO: 178592 - RNA, 19 nt, Homo sapiens
  misc_RNA (1)...(19): siRNA sense strand
gaagauguuccaaugauuu

SEQ ID NO: 178593 - RNA, 19 nt, Homo sapiens
  misc_RNA (1)...(19): siRNA sense strand
caauaaaugugaccuggaa

SEQ ID NO: 178594 - RNA, 19 nt, Homo sapiens
  misc_RNA (1)...(19): siRNA sense strand
gcaaugagggauuuguaua

SEQ ID NO: 178595 - RNA, 19 nt, Homo sapiens
  misc_RNA (1)...(19): siRNA sense strand
gcaaagagcagggccagaa

SEQ ID NO: 178596 - RNA, 19 nt, Homo sapiens
  misc_RNA (1)...(19): siRNA sense strand
gcagggacagagcaauuua

SEQ ID NO: 178597 - RNA, 19 nt, Homo sapiens
  misc_RNA (1)...(19): siRNA sense strand
gcaagacagugguguaacu

SEQ ID NO: 178598 - RNA, 19 nt, Homo sapiens
  misc_RNA (1)...(19): siRNA sense strand
ucagacagauaaauaggaa

SEQ ID NO: 178599 - RNA, 19 nt, Homo sapiens
  misc_RNA (1)...(19): siRNA sense strand
aaugugaccuggaagauga

SEQ ID NO: 178600 - RNA, 19 nt, Homo sapiens
  misc_RNA (1)...(19): siRNA sense strand
gaagucugcucugacaguu

SEQ ID NO: 178601 - RNA, 19 nt, Homo sapiens
  misc_RNA (1)...(19): siRNA sense strand
gaagauuccuacagaaagc

SEQ ID NO: 178602 - RNA, 19 nt, Homo sapiens
  misc_RNA (1)...(19): siRNA sense strand
gaagaugagcgaguaguug

SEQ ID NO: 178603 - RNA, 19 nt, Homo sapiens
  misc_RNA (1)...(19): siRNA sense strand
gagcagggccagaauuuag

SEQ ID NO: 178604 - RNA, 19 nt, Homo sapiens
  misc_RNA (1)...(19): siRNA sense strand
aaucaugucugcugcucua

SEQ ID NO: 178605 - RNA, 19 nt, Homo sapiens
  misc_RNA (1)...(19): siRNA sense strand
uuacagcaaugagggauuu

SEQ ID NO: 178606 - RNA, 19 nt, Homo sapiens
  misc_RNA (1)...(19): siRNA sense strand
gaaaagaagaagccuaaaa

SEQ ID NO: 178607 - RNA, 19 nt, Homo sapiens
  misc_RNA (1)...(19): siRNA sense strand
ugagggauuuguauaugaa

SEQ ID NO: 178608 - RNA, 19 nt, Homo sapiens
  misc_RNA (1)...(19): siRNA sense strand
gcgaguaguuggcaaagag

SEQ ID NO: 178609 - RNA, 19 nt, Homo sapiens
  misc_RNA (1)...(19): siRNA sense strand
caaagucaaagaucaaugu

SEQ ID NO: 178610 - RNA, 19 nt, Homo sapiens
  misc_RNA (1)...(19): siRNA sense strand
ggaagaugagcgaguaguu

SEQ ID NO: 178611 - RNA, 19 nt, Homo sapiens
  misc_RNA (1)...(19): siRNA sense strand
gaccugagggaacagauuu

SEQ ID NO: 178612 - RNA, 19 nt, Homo sapiens
  misc_RNA (1)...(19): siRNA sense strand
uagaagauuccuacagaaa

SEQ ID NO: 178613 - RNA, 19 nt, Homo sapiens
  misc_RNA (1)...(19): siRNA sense strand
gaagaacggccaagguuuu

SEQ ID NO: 178614 - RNA, 19 nt, Homo sapiens
  misc_RNA (1)...(19): siRNA sense strand
caaugagggauuuguauau

SEQ ID NO: 178615 - RNA, 19 nt, Homo sapiens
  misc_RNA (1)...(19): siRNA sense strand
gggccagaauuuagcaaga

SEQ ID NO: 178616 - RNA, 19 nt, Homo sapiens
  misc_RNA (1)...(19): siRNA sense strand
acagagcaauuuacagcaa

SEQ ID NO: 178617 - RNA, 19 nt, Homo sapiens
  misc_RNA (1)...(19): siRNA sense strand
ccuggaagaugagcgagua

SEQ ID NO: 178618 - RNA, 19 nt, Homo sapiens
  misc_RNA (1)...(19): siRNA sense strand
cuacagaaagcaaguugaa

SEQ ID NO: 178619 - RNA, 19 nt, Homo sapiens
  misc_RNA (1)...(19): siRNA sense strand
acagcucaguccacguuua

SEQ ID NO: 178620 - RNA, 19 nt, Homo sapiens
  misc_RNA (1)...(19): siRNA sense strand
gaagucgauugccaacagu

SEQ ID NO: 178621 - RNA, 19 nt, Homo sapiens
  misc_RNA (1)...(19): siRNA sense strand
ugaagucgauugccaacag

SEQ ID NO: 178622 - RNA, 19 nt, Homo sapiens
  misc_RNA (1)...(19): siRNA sense strand
ggaaaacaccaguggaaaa

SEQ ID NO: 178623 - RNA, 19 nt, Homo sapiens
  misc_RNA (1)...(19): siRNA sense strand
cagcucaguccacguuuaa

SEQ ID NO: 178624 - RNA, 19 nt, Homo sapiens
  misc_RNA (1)...(19): siRNA sense strand
ggaagucugcucugacagu

SEQ ID NO: 178625 - RNA, 19 nt, Homo sapiens
  misc_RNA (1)...(19): siRNA sense strand
ugaagaacggccaagguuu

SEQ ID NO: 178626 - RNA, 19 nt, Homo sapiens
  misc_RNA (1)...(19): siRNA sense strand
aaagcaaguugaagucgau

SEQ ID NO: 178627 - RNA, 19 nt, Homo sapiens
  misc_RNA (1)...(19): siRNA sense strand
cagcaaugagggauuugua

SEQ ID NO: 178628 - RNA, 19 nt, Homo sapiens
  misc_RNA (1)...(19): siRNA sense strand
ggaccugagggaacagauu

SEQ ID NO: 178629 - RNA, 19 nt, Homo sapiens
  misc_RNA (1)...(19): siRNA sense strand
caacaguguaugcucgaaa

SEQ ID NO: 178630 - RNA, 19 nt, Homo sapiens
  misc_RNA (1)...(19): siRNA sense strand
aaauaugacccaacgauag

SEQ ID NO: 178631 - RNA, 19 nt, Homo sapiens
  misc_RNA (1)...(19): siRNA sense strand
aaugagggauuuguauaug

SEQ ID NO: 178632 - RNA, 19 nt, Homo sapiens
  misc_RNA (1)...(19): siRNA sense strand
uaaggacacggaagauguu

SEQ ID NO: 178633 - RNA, 19 nt, Homo sapiens
  misc_RNA (1)...(19): siRNA sense strand
gcaaagucaaagaucaaug

SEQ ID NO: 178634 - RNA, 19 nt, Homo sapiens
  misc_RNA (1)...(19): siRNA sense strand
guugggaagucugcucuga

SEQ ID NO: 178635 - RNA, 19 nt, Homo sapiens
  misc_RNA (1)...(19): siRNA sense strand
aagagcagggccagaauuu

SEQ ID NO: 178636 - RNA, 19 nt, Homo sapiens
  misc_RNA (1)...(19): siRNA sense strand
auagaagauuccuacagaa

SEQ ID NO: 178637 - RNA, 19 nt, Homo sapiens
  misc_RNA (1)...(19): siRNA sense strand
uagcaagacagugguguaa

SEQ ID NO: 178638 - RNA, 19 nt, Homo sapiens
  misc_RNA (1)...(19): siRNA sense strand
cagagcaauuuacagcaau

SEQ ID NO: 178639 - RNA, 19 nt, Homo sapiens
  misc_RNA (1)...(19): siRNA sense strand
aaacaccaguggaaaagaa

SEQ ID NO: 178640 - RNA, 19 nt, Homo sapiens
  misc_RNA (1)...(19): siRNA sense strand
acagaaagcaaguugaagu

SEQ ID NO: 178641 - RNA, 19 nt, Homo sapiens
  misc_RNA (1)...(19): siRNA sense strand
ugggaagucugcucugaca

SEQ ID NO: 178642 - RNA, 19 nt, Homo sapiens
  misc_RNA (1)...(19): siRNA sense strand
aauaugacccaacgauaga

SEQ ID NO: 178643 - RNA, 19 nt, Homo sapiens
  misc_RNA (1)...(19): siRNA sense strand
caaagagcagggccagaau

SEQ ID NO: 178644 - RNA, 19 nt, Homo sapiens
  misc_RNA (1)...(19): siRNA sense strand
aaagagcagggccagaauu

SEQ ID NO: 178645 - RNA, 19 nt, Homo sapiens
  misc_RNA (1)...(19): siRNA sense strand
gggauuuguauaugaagaa

SEQ ID NO: 178646 - RNA, 19 nt, Homo sapiens
  misc_RNA (1)...(19): siRNA sense strand
gccagaauuuagcaagaca

SEQ ID NO: 178647 - RNA, 19 nt, Homo sapiens
  misc_RNA (1)...(19): siRNA sense strand
uuaaggacacggaagaugu

SEQ ID NO: 178648 - RNA, 19 nt, Homo sapiens
  misc_RNA (1)...(19): siRNA sense strand
uuacagcucaguccacguu

SEQ ID NO: 178649 - RNA, 19 nt, Homo sapiens
  misc_RNA (1)...(19): siRNA sense strand
augagggauuuguauauga

SEQ ID NO: 178650 - RNA, 19 nt, Homo sapiens
  misc_RNA (1)...(19): siRNA sense strand
cuggucagacagauaaaua

SEQ ID NO: 178651 - RNA, 19 nt, Homo sapiens
  misc_RNA (1)...(19): siRNA sense strand
ucugcaaagucaaagauca

SEQ ID NO: 178652 - RNA, 19 nt, Homo sapiens
  misc_RNA (1)...(19): siRNA sense strand
agucugcucugacaguuca

SEQ ID NO: 178653 - RNA, 19 nt, Homo sapiens
  misc_RNA (1)...(19): siRNA sense strand
gauuuugguuggcaauaaa

SEQ ID NO: 178654 - RNA, 19 nt, Homo sapiens
  misc_RNA (1)...(19): siRNA sense strand
ucaguuuguucagggaauu

SEQ ID NO: 178655 - RNA, 19 nt, Homo sapiens
  misc_RNA (1)...(19): siRNA sense strand
gagcaauuuacagcaauga

SEQ ID NO: 178656 - RNA, 19 nt, Homo sapiens
  misc_RNA (1)...(19): siRNA sense strand
ugacaguucaguuuguuca

SEQ ID NO: 178657 - RNA, 19 nt, Homo sapiens
  misc_RNA (1)...(19): siRNA sense strand
aacaguguaugcucgaaau

SEQ ID NO: 178658 - RNA, 19 nt, Homo sapiens
  misc_RNA (1)...(19): siRNA sense strand
gaaaacaccaguggaaaag

SEQ ID NO: 178659 - RNA, 19 nt, Homo sapiens
  misc_RNA (1)...(19): siRNA sense strand
acccaacgauagaagauuc

SEQ ID NO: 178660 - RNA, 19 nt, Homo sapiens
  misc_RNA (1)...(19): siRNA sense strand
ccaagguuuugcacuagua

SEQ ID NO: 178661 - RNA, 19 nt, Homo sapiens
  misc_RNA (1)...(19): siRNA sense strand
ggguuaaggacacggaaga

SEQ ID NO: 178662 - RNA, 19 nt, Homo sapiens
  misc_RNA (1)...(19): siRNA sense strand
caacgauagaagauuccua

SEQ ID NO: 178663 - RNA, 19 nt, Homo sapiens
  misc_RNA (1)...(19): siRNA sense strand
agagcagggccagaauuua

SEQ ID NO: 178664 - RNA, 19 nt, Homo sapiens
  misc_RNA (1)...(19): siRNA sense strand
gcuagugguccuugguuca

SEQ ID NO: 178665 - RNA, 19 nt, Homo sapiens
  misc_RNA (1)...(19): siRNA sense strand
ccaacaguguaugcucgaa

SEQ ID NO: 178666 - RNA, 19 nt, Homo sapiens
  misc_RNA (1)...(19): siRNA sense strand
uaaaugugaccuggaagau

SEQ ID NO: 178667 - RNA, 19 nt, Homo sapiens
  misc_RNA (1)...(19): siRNA sense strand
agagcaauuuacagcaaug

SEQ ID NO: 178668 - RNA, 19 nt, Homo sapiens
  misc_RNA (1)...(19): siRNA sense strand
cagaaagcaaguugaaguc

SEQ ID NO: 178669 - RNA, 19 nt, Homo sapiens
  misc_RNA (1)...(19): siRNA sense strand
ggauuuguauaugaagaac

SEQ ID NO: 178670 - RNA, 19 nt, Homo sapiens
  misc_RNA (1)...(19): siRNA sense strand
ggccagaauuuagcaagac

SEQ ID NO: 178671 - RNA, 19 nt, Homo sapiens
  misc_RNA (1)...(19): siRNA sense strand
aaucuucugcaaagucaaa

SEQ ID NO: 178672 - RNA, 19 nt, Homo sapiens
  misc_RNA (1)...(19): siRNA sense strand
ggucagacagauaaauagg

SEQ ID NO: 178673 - RNA, 19 nt, Homo sapiens
  misc_RNA (1)...(19): siRNA sense strand
gcagaaagauuguauuugu

SEQ ID NO: 178674 - RNA, 19 nt, Homo sapiens
  misc_RNA (1)...(19): siRNA sense strand
uaaaguaacucgagucuuc

SEQ ID NO: 178675 - RNA, 19 nt, Homo sapiens
  misc_RNA (1)...(19): siRNA sense strand
caagauaggaugaaugaua

SEQ ID NO: 178676 - RNA, 19 nt, Homo sapiens
  misc_RNA (1)...(19): siRNA sense strand
caagacaaauuuccagauu

SEQ ID NO: 178677 - RNA, 19 nt, Homo sapiens
  misc_RNA (1)...(19): siRNA sense strand
gaaaggaacaaaccaacua

SEQ ID NO: 178678 - RNA, 19 nt, Homo sapiens
  misc_RNA (1)...(19): siRNA sense strand
gaaaguuaauccaagagaa

SEQ ID NO: 178679 - RNA, 19 nt, Homo sapiens
  misc_RNA (1)...(19): siRNA sense strand
ggucuuaacugcagaggaa

SEQ ID NO: 178680 - RNA, 19 nt, Homo sapiens
  misc_RNA (1)...(19): siRNA sense strand
aaauacagcugcuuacuug

SEQ ID NO: 178681 - RNA, 19 nt, Homo sapiens
  misc_RNA (1)...(19): siRNA sense strand
gaacagaaaguuaauccaa

SEQ ID NO: 178682 - RNA, 19 nt, Homo sapiens
  misc_RNA (1)...(19): siRNA sense strand
gcucaucgcucaccugcaa

SEQ ID NO: 178683 - RNA, 19 nt, Homo sapiens
  misc_RNA (1)...(19): siRNA sense strand
gagaaggaauggaaacuag

SEQ ID NO: 178684 - RNA, 19 nt, Homo sapiens
  misc_RNA (1)...(19): siRNA sense strand
ugaccuggcugcuauuaaa

SEQ ID NO: 178685 - RNA, 19 nt, Homo sapiens
  misc_RNA (1)...(19): siRNA sense strand
ccaaacaccucccagacaa

SEQ ID NO: 178686 - RNA, 19 nt, Homo sapiens
  misc_RNA (1)...(19): siRNA sense strand
gaaauacagcugcuuacuu

SEQ ID NO: 178687 - RNA, 19 nt, Homo sapiens
  misc_RNA (1)...(19): siRNA sense strand
aaacuaggccggugcauuu

SEQ ID NO: 178688 - RNA, 19 nt, Homo sapiens
  misc_RNA (1)...(19): siRNA sense strand
ggagaaagauagacagacu

SEQ ID NO: 178689 - RNA, 19 nt, Homo sapiens
  misc_RNA (1)...(19): siRNA sense strand
gaugauggcagaaagauug

SEQ ID NO: 178690 - RNA, 19 nt, Homo sapiens
  misc_RNA (1)...(19): siRNA sense strand
gaggaaauacagcugcuua

SEQ ID NO: 178691 - RNA, 19 nt, Homo sapiens
  misc_RNA (1)...(19): siRNA sense strand
caucaaauaugcugaccuu

SEQ ID NO: 178692 - RNA, 19 nt, Homo sapiens
  misc_RNA (1)...(19): siRNA sense strand
ccaaggaacagaaaguuaa

SEQ ID NO: 178693 - RNA, 19 nt, Homo sapiens
  misc_RNA (1)...(19): siRNA sense strand
caucugaccuggcugcuau

SEQ ID NO: 178694 - RNA, 19 nt, Homo sapiens
  misc_RNA (1)...(19): siRNA sense strand
caagagaaauugcugaaaa

SEQ ID NO: 178695 - RNA, 19 nt, Homo sapiens
  misc_RNA (1)...(19): siRNA sense strand
cuuggaagcuuaucuguga

SEQ ID NO: 178696 - RNA, 19 nt, Homo sapiens
  misc_RNA (1)...(19): siRNA sense strand
gaagcgagcauaucagugu

SEQ ID NO: 178697 - RNA, 19 nt, Homo sapiens
  misc_RNA (1)...(19): siRNA sense strand
gguaugacgugcucagguu

SEQ ID NO: 178698 - RNA, 19 nt, Homo sapiens
  misc_RNA (1)...(19): siRNA sense strand
gaaaggauuuuguaucaga

SEQ ID NO: 178699 - RNA, 19 nt, Homo sapiens
  misc_RNA (1)...(19): siRNA sense strand
ggucuuuggucaugcaauu

SEQ ID NO: 178700 - RNA, 19 nt, Homo sapiens
  misc_RNA (1)...(19): siRNA sense strand
gcguauggcugcaucaaau

SEQ ID NO: 178701 - RNA, 19 nt, Homo sapiens
  misc_RNA (1)...(19): siRNA sense strand
gcacuuccagacaauauuu

SEQ ID NO: 178702 - RNA, 19 nt, Homo sapiens
  misc_RNA (1)...(19): siRNA sense strand
agaagagguuugauacuga

SEQ ID NO: 178703 - RNA, 19 nt, Homo sapiens
  misc_RNA (1)...(19): siRNA sense strand
gggaauccuucuaucaaga

SEQ ID NO: 178704 - RNA, 19 nt, Homo sapiens
  misc_RNA (1)...(19): siRNA sense strand
gaguauaagccgccucuuu

SEQ ID NO: 178705 - RNA, 19 nt, Homo sapiens
  misc_RNA (1)...(19): siRNA sense strand
gacuacaucuucuccuuug

SEQ ID NO: 178706 - RNA, 19 nt, Homo sapiens
  misc_RNA (1)...(19): siRNA sense strand
cagguuaaaucauguagga

SEQ ID NO: 178707 - RNA, 19 nt, Homo sapiens
  misc_RNA (1)...(19): siRNA sense strand
gugcucagguuaaaucaug

SEQ ID NO: 178708 - RNA, 19 nt, Homo sapiens
  misc_RNA (1)...(19): siRNA sense strand
gcacgucuggccaauauug

SEQ ID NO: 178709 - RNA, 19 nt, Homo sapiens
  misc_RNA (1)...(19): siRNA sense strand
gaaauugaccgguugaaaa

SEQ ID NO: 178710 - RNA, 19 nt, Homo sapiens
  misc_RNA (1)...(19): siRNA sense strand
ucaaaugauugguugguau

SEQ ID NO: 178711 - RNA, 19 nt, Homo sapiens
  misc_RNA (1)...(19): siRNA sense strand
acagaaaguuaauccaaga

SEQ ID NO: 178712 - RNA, 19 nt, Homo sapiens
  misc_RNA (1)...(19): siRNA sense strand
gcauuggacgucucuuuaa

SEQ ID NO: 178713 - RNA, 19 nt, Homo sapiens
  misc_RNA (1)...(19): siRNA sense strand
gacugaauauucuucgaaa

SEQ ID NO: 178714 - RNA, 19 nt, Homo sapiens
  misc_RNA (1)...(19): siRNA sense strand
ggaaaauccuccucugcua

SEQ ID NO: 178715 - RNA, 19 nt, Homo sapiens
  misc_RNA (1)...(19): siRNA sense strand
gaaacuaggccggugcauu

SEQ ID NO: 178716 - RNA, 19 nt, Homo sapiens
  misc_RNA (1)...(19): siRNA sense strand
augcugaccuuucccauaa

SEQ ID NO: 178717 - RNA, 19 nt, Homo sapiens
  misc_RNA (1)...(19): siRNA sense strand
gcaggaagaagagauuaaa

SEQ ID NO: 178718 - RNA, 19 nt, Homo sapiens
  misc_RNA (1)...(19): siRNA sense strand
caagucagcaggccaaguu

SEQ ID NO: 178719 - RNA, 19 nt, Homo sapiens
  misc_RNA (1)...(19): siRNA sense strand
gaacaauugaccagucuuc

SEQ ID NO: 178720 - RNA, 19 nt, Homo sapiens
  misc_RNA (1)...(19): siRNA sense strand
gcuacuguguggagaaaga

SEQ ID NO: 178721 - RNA, 19 nt, Homo sapiens
  misc_RNA (1)...(19): siRNA sense strand
gcauaucaguguguaguuc

SEQ ID NO: 178722 - RNA, 19 nt, Homo sapiens
  misc_RNA (1)...(19): siRNA sense strand
uaagccgccucuuugaauu

SEQ ID NO: 178723 - RNA, 19 nt, Homo sapiens
  misc_RNA (1)...(19): siRNA sense strand
caaauaugcugaccuuucc

SEQ ID NO: 178724 - RNA, 19 nt, Homo sapiens
  misc_RNA (1)...(19): siRNA sense strand
gcagaaaggaacaaaccaa

SEQ ID NO: 178725 - RNA, 19 nt, Homo sapiens
  misc_RNA (1)...(19): siRNA sense strand
aaagauagacagacuggaa

SEQ ID NO: 178726 - RNA, 19 nt, Homo sapiens
  misc_RNA (1)...(19): siRNA sense strand
ggcguaugcugcuauguga

SEQ ID NO: 178727 - RNA, 19 nt, Homo sapiens
  misc_RNA (1)...(19): siRNA sense strand
ugaccagucuucuagugaa

SEQ ID NO: 178728 - RNA, 19 nt, Homo sapiens
  misc_RNA (1)...(19): siRNA sense strand
ucaaauaugcugaccuuuc

SEQ ID NO: 178729 - RNA, 19 nt, Homo sapiens
  misc_RNA (1)...(19): siRNA sense strand
ucuaagaagagguuugaua

SEQ ID NO: 178730 - RNA, 19 nt, Homo sapiens
  misc_RNA (1)...(19): siRNA sense strand
aagaagagguuugauacug

SEQ ID NO: 178731 - RNA, 19 nt, Homo sapiens
  misc_RNA (1)...(19): siRNA sense strand
gcuggcaacugcuuucaca

SEQ ID NO: 178732 - RNA, 19 nt, Homo sapiens
  misc_RNA (1)...(19): siRNA sense strand
agacauccguugcguaugg

SEQ ID NO: 178733 - RNA, 19 nt, Homo sapiens
  misc_RNA (1)...(19): siRNA sense strand
auacugaggaggaauuuaa

SEQ ID NO: 178734 - RNA, 19 nt, Homo sapiens
  misc_RNA (1)...(19): siRNA sense strand
gaaauugcugguccugguu

SEQ ID NO: 178735 - RNA, 19 nt, Homo sapiens
  misc_RNA (1)...(19): siRNA sense strand
ggccaauauugaugaagaa

SEQ ID NO: 178736 - RNA, 19 nt, Homo sapiens
  misc_RNA (1)...(19): siRNA sense strand
cuagaugacagaggaaaua

SEQ ID NO: 178737 - RNA, 19 nt, Homo sapiens
  misc_RNA (1)...(19): siRNA sense strand
gcgagcauaucagugugua

SEQ ID NO: 178738 - RNA, 19 nt, Homo sapiens
  misc_RNA (1)...(19): siRNA sense strand
uaucauaggagagaguaua

SEQ ID NO: 178739 - RNA, 19 nt, Homo sapiens
  misc_RNA (1)...(19): siRNA sense strand
uuaagaagcgagcauauca

SEQ ID NO: 178740 - RNA, 19 nt, Homo sapiens
  misc_RNA (1)...(19): siRNA sense strand
gcaacugcuuucacagagu

SEQ ID NO: 178741 - RNA, 19 nt, Homo sapiens
  misc_RNA (1)...(19): siRNA sense strand
guauaagccgccucuuuga

SEQ ID NO: 178742 - RNA, 19 nt, Homo sapiens
  misc_RNA (1)...(19): siRNA sense strand
gauaggaugaaugauauug

SEQ ID NO: 178743 - RNA, 19 nt, Homo sapiens
  misc_RNA (1)...(19): siRNA sense strand
gcagcaggaagaagagauu

SEQ ID NO: 178744 - RNA, 19 nt, Homo sapiens
  misc_RNA (1)...(19): siRNA sense strand
gaugaagaaaugcuccaaa

SEQ ID NO: 178745 - RNA, 19 nt, Homo sapiens
  misc_RNA (1)...(19): siRNA sense strand
cagaaagauuguauuuguc

SEQ ID NO: 178746 - RNA, 19 nt, Homo sapiens
  misc_RNA (1)...(19): siRNA sense strand
uggcagaaagauuguauuu

SEQ ID NO: 178747 - RNA, 19 nt, Homo sapiens
  misc_RNA (1)...(19): siRNA sense strand
caauugaccagucuucuag

SEQ ID NO: 178748 - RNA, 19 nt, Homo sapiens
  misc_RNA (1)...(19): siRNA sense strand
uauugaaggugaacaugug

SEQ ID NO: 178749 - RNA, 19 nt, Homo sapiens
  misc_RNA (1)...(19): siRNA sense strand
cauuggacgucucuuuaau

SEQ ID NO: 178750 - RNA, 19 nt, Homo sapiens
  misc_RNA (1)...(19): siRNA sense strand
gcaagacaaauuuccagau

SEQ ID NO: 178751 - RNA, 19 nt, Homo sapiens
  misc_RNA (1)...(19): siRNA sense strand
ccuaauauagcuaaagaga

SEQ ID NO: 178752 - RNA, 19 nt, Homo sapiens
  misc_RNA (1)...(19): siRNA sense strand
gguuauaccuaugauacau

SEQ ID NO: 178753 - RNA, 19 nt, Homo sapiens
  misc_RNA (1)...(19): siRNA sense strand
gguuugauauccugggaau

SEQ ID NO: 178754 - RNA, 19 nt, Homo sapiens
  misc_RNA (1)...(19): siRNA sense strand
aaaggaacaaaccaacuaa

SEQ ID NO: 178755 - RNA, 19 nt, Homo sapiens
  misc_RNA (1)...(19): siRNA sense strand
uggccaauauugaugaaga

SEQ ID NO: 178756 - RNA, 19 nt, Homo sapiens
  misc_RNA (1)...(19): siRNA sense strand
uugcacgucuggccaauau

SEQ ID NO: 178757 - RNA, 19 nt, Homo sapiens
  misc_RNA (1)...(19): siRNA sense strand
ucagacauccguugcguau

SEQ ID NO: 178758 - RNA, 19 nt, Homo sapiens
  misc_RNA (1)...(19): siRNA sense strand
gaccagucuucuagugaau

SEQ ID NO: 178759 - RNA, 19 nt, Homo sapiens
  misc_RNA (1)...(19): siRNA sense strand
gaauaaaaccuguccaaag

SEQ ID NO: 178760 - RNA, 19 nt, Homo sapiens
  misc_RNA (1)...(19): siRNA sense strand
uuugauauccugggaauaa

SEQ ID NO: 178761 - RNA, 19 nt, Homo sapiens
  misc_RNA (1)...(19): siRNA sense strand
gugaacauguggcguaugc

SEQ ID NO: 178762 - RNA, 19 nt, Homo sapiens
  misc_RNA (1)...(19): siRNA sense strand
ugacuuauuucuccacacu

SEQ ID NO: 178763 - RNA, 19 nt, Homo sapiens
  misc_RNA (1)...(19): siRNA sense strand
uacagcugcuuacuuguug

SEQ ID NO: 178764 - RNA, 19 nt, Homo sapiens
  misc_RNA (1)...(19): siRNA sense strand
cauaaccgguugaaugacu

SEQ ID NO: 178765 - RNA, 19 nt, Homo sapiens
  misc_RNA (1)...(19): siRNA sense strand
caaaugauugguugguaug

SEQ ID NO: 178766 - RNA, 19 nt, Homo sapiens
  misc_RNA (1)...(19): siRNA sense strand
gacaaucugugcacuucca

SEQ ID NO: 178767 - RNA, 19 nt, Homo sapiens
  misc_RNA (1)...(19): siRNA sense strand
cagaacaauugaccagucu

SEQ ID NO: 178768 - RNA, 19 nt, Homo sapiens
  misc_RNA (1)...(19): siRNA sense strand
cccauaaccgguugaauga

SEQ ID NO: 178769 - RNA, 19 nt, Homo sapiens
  misc_RNA (1)...(19): siRNA sense strand
guaugacccuaaaguaacu

SEQ ID NO: 178770 - RNA, 19 nt, Homo sapiens
  misc_RNA (1)...(19): siRNA sense strand
cgacugaauauucuucgaa

SEQ ID NO: 178771 - RNA, 19 nt, Homo sapiens
  misc_RNA (1)...(19): siRNA sense strand
ucaccugcaagacaaauuu

SEQ ID NO: 178772 - RNA, 19 nt, Homo sapiens
  misc_RNA (1)...(19): siRNA sense strand
aguauaagccgccucuuug

SEQ ID NO: 178773 - RNA, 19 nt, Homo sapiens
  misc_RNA (1)...(19): siRNA sense strand
ggaagaagauccacaugaa

SEQ ID NO: 178774 - RNA, 19 nt, Homo sapiens
  misc_RNA (1)...(19): siRNA sense strand
ggagauauguucauuguuc

SEQ ID NO: 178775 - RNA, 19 nt, Homo sapiens
  misc_RNA (1)...(19): siRNA sense strand
gaacauacuuucagagcuu

SEQ ID NO: 178776 - RNA, 19 nt, Homo sapiens
  misc_RNA (1)...(19): siRNA sense strand
ggauguggguuacaaauuu

SEQ ID NO: 178777 - RNA, 19 nt, Homo sapiens
  misc_RNA (1)...(19): siRNA sense strand
gcaaggaaaucuauaauac

SEQ ID NO: 178778 - RNA, 19 nt, Homo sapiens
  misc_RNA (1)...(19): siRNA sense strand
uaacagaacugcuucaaca

SEQ ID NO: 178779 - RNA, 19 nt, Homo sapiens
  misc_RNA (1)...(19): siRNA sense strand
gaaagguuaucuucugaaa

SEQ ID NO: 178780 - RNA, 19 nt, Homo sapiens
  misc_RNA (1)...(19): siRNA sense strand
uagcaaaucuuguggaauu

SEQ ID NO: 178781 - RNA, 19 nt, Homo sapiens
  misc_RNA (1)...(19): siRNA sense strand
caacaaacaucguaugauc

SEQ ID NO: 178782 - RNA, 19 nt, Homo sapiens
  misc_RNA (1)...(19): siRNA sense strand
gauaguaguucagcacuuu

SEQ ID NO: 178783 - RNA, 19 nt, Homo sapiens
  misc_RNA (1)...(19): siRNA sense strand
gauguggguuacaaauuua

SEQ ID NO: 178784 - RNA, 19 nt, Homo sapiens
  misc_RNA (1)...(19): siRNA sense strand
ccaccgacauugagauaua

SEQ ID NO: 178785 - RNA, 19 nt, Homo sapiens
  misc_RNA (1)...(19): siRNA sense strand
gcacgauacucuauggaaa

SEQ ID NO: 178786 - RNA, 19 nt, Homo sapiens
  misc_RNA (1)...(19): siRNA sense strand
ccacggauguucaauauca

SEQ ID NO: 178787 - RNA, 19 nt, Homo sapiens
  misc_RNA (1)...(19): siRNA sense strand
agaaaucuguucagcauaa

SEQ ID NO: 178788 - RNA, 19 nt, Homo sapiens
  misc_RNA (1)...(19): siRNA sense strand
auucauggcuucagaaaua

SEQ ID NO: 178789 - RNA, 19 nt, Homo sapiens
  misc_RNA (1)...(19): siRNA sense strand
uaaggaaccuguaccaaug

SEQ ID NO: 178790 - RNA, 19 nt, Homo sapiens
  misc_RNA (1)...(19): siRNA sense strand
caagaacacugauauuagu

SEQ ID NO: 178791 - RNA, 19 nt, Homo sapiens
  misc_RNA (1)...(19): siRNA sense strand
gaaauaagcauggaagaug

SEQ ID NO: 178792 - RNA, 19 nt, Homo sapiens
  misc_RNA (1)...(19): siRNA sense strand
gaagaagaguacagugaau

SEQ ID NO: 178793 - RNA, 19 nt, Homo sapiens
  misc_RNA (1)...(19): siRNA sense strand
gaacuucgaacgcucagua

SEQ ID NO: 178794 - RNA, 19 nt, Homo sapiens
  misc_RNA (1)...(19): siRNA sense strand
gaacuuagcaaaucuugug

SEQ ID NO: 178795 - RNA, 19 nt, Homo sapiens
  misc_RNA (1)...(19): siRNA sense strand
ugaaaggucugcaggcauu

SEQ ID NO: 178796 - RNA, 19 nt, Homo sapiens
  misc_RNA (1)...(19): siRNA sense strand
gaagaguacagugaauuua

SEQ ID NO: 178797 - RNA, 19 nt, Homo sapiens
  misc_RNA (1)...(19): siRNA sense strand
gaacaaguacucaaugaca

SEQ ID NO: 178798 - RNA, 19 nt, Homo sapiens
  misc_RNA (1)...(19): siRNA sense strand
gcaccuugauggagcagua

SEQ ID NO: 178799 - RNA, 19 nt, Homo sapiens
  misc_RNA (1)...(19): siRNA sense strand
gaaagggcaugccacagau

SEQ ID NO: 178800 - RNA, 19 nt, Homo sapiens
  misc_RNA (1)...(19): siRNA sense strand
uguaacaucuaccugaaua

SEQ ID NO: 178801 - RNA, 19 nt, Homo sapiens
  misc_RNA (1)...(19): siRNA sense strand
uaacacaccuauugaacau

SEQ ID NO: 178802 - RNA, 19 nt, Homo sapiens
  misc_RNA (1)...(19): siRNA sense strand
gcaagaacacugauauuag

SEQ ID NO: 178803 - RNA, 19 nt, Homo sapiens
  misc_RNA (1)...(19): siRNA sense strand
cagcauaaguggccuacaa

SEQ ID NO: 178804 - RNA, 19 nt, Homo sapiens
  misc_RNA (1)...(19): siRNA sense strand
ugaagccacuacccuauuu

SEQ ID NO: 178805 - RNA, 19 nt, Homo sapiens
  misc_RNA (1)...(19): siRNA sense strand
uuucagagcuuguggagaa

SEQ ID NO: 178806 - RNA, 19 nt, Homo sapiens
  misc_RNA (1)...(19): siRNA sense strand
gaagaugugaacacuaauu

SEQ ID NO: 178807 - RNA, 19 nt, Homo sapiens
  misc_RNA (1)...(19): siRNA sense strand
ccaaacaggaagcuuauaa

SEQ ID NO: 178808 - RNA, 19 nt, Homo sapiens
  misc_RNA (1)...(19): siRNA sense strand
cauaaguggccuacaaaua

SEQ ID NO: 178809 - RNA, 19 nt, Homo sapiens
  misc_RNA (1)...(19): siRNA sense strand
gaagauagaaggcguguac

SEQ ID NO: 178810 - RNA, 19 nt, Homo sapiens
  misc_RNA (1)...(19): siRNA sense strand
gugcagaacuuagcaaauc

SEQ ID NO: 178811 - RNA, 19 nt, Homo sapiens
  misc_RNA (1)...(19): siRNA sense strand
aagcaaagauccugauauc

SEQ ID NO: 178812 - RNA, 19 nt, Homo sapiens
  misc_RNA (1)...(19): siRNA sense strand
cuacacaguuuguucauca

SEQ ID NO: 178813 - RNA, 19 nt, Homo sapiens
  misc_RNA (1)...(19): siRNA sense strand
aaauaagcauggaagauga

SEQ ID NO: 178814 - RNA, 19 nt, Homo sapiens
  misc_RNA (1)...(19): siRNA sense strand
ggacaagaccgaacacuac

SEQ ID NO: 178815 - RNA, 19 nt, Homo sapiens
  misc_RNA (1)...(19): siRNA sense strand
ggaacuucauguagucuau

SEQ ID NO: 178816 - RNA, 19 nt, Homo sapiens
  misc_RNA (1)...(19): siRNA sense strand
ccugauaucuuauuuaugc

SEQ ID NO: 178817 - RNA, 19 nt, Homo sapiens
  misc_RNA (1)...(19): siRNA sense strand
acagucauguuucuuguuu

SEQ ID NO: 178818 - RNA, 19 nt, Homo sapiens
  misc_RNA (1)...(19): siRNA sense strand
uauaauaccauccgucgua

SEQ ID NO: 178819 - RNA, 19 nt, Homo sapiens
  misc_RNA (1)...(19): siRNA sense strand
uaauagaucucaguguaug

SEQ ID NO: 178820 - RNA, 19 nt, Homo sapiens
  misc_RNA (1)...(19): siRNA sense strand
gaacacuacuggccagcau

SEQ ID NO: 178821 - RNA, 19 nt, Homo sapiens
  misc_RNA (1)...(19): siRNA sense strand
gcccauaaacucccaguaa

SEQ ID NO: 178822 - RNA, 19 nt, Homo sapiens
  misc_RNA (1)...(19): siRNA sense strand
guguggagauuacuacauu

SEQ ID NO: 178823 - RNA, 19 nt, Homo sapiens
  misc_RNA (1)...(19): siRNA sense strand
uagaugaacuugggaaugu

SEQ ID NO: 178824 - RNA, 19 nt, Homo sapiens
  misc_RNA (1)...(19): siRNA sense strand
augaagaugugaacacuaa

SEQ ID NO: 178825 - RNA, 19 nt, Homo sapiens
  misc_RNA (1)...(19): siRNA sense strand
ggcaaggaaaucuauaaua

SEQ ID NO: 178826 - RNA, 19 nt, Homo sapiens
  misc_RNA (1)...(19): siRNA sense strand
accagacacugaugaaaua

SEQ ID NO: 178827 - RNA, 19 nt, Homo sapiens
  misc_RNA (1)...(19): siRNA sense strand
aagaacaaguacucaauga

SEQ ID NO: 178828 - RNA, 19 nt, Homo sapiens
  misc_RNA (1)...(19): siRNA sense strand
guuaaguccaucaaaguua

SEQ ID NO: 178829 - RNA, 19 nt, Homo sapiens
  misc_RNA (1)...(19): siRNA sense strand
uacgagcuauucuaccuua

SEQ ID NO: 178830 - RNA, 19 nt, Homo sapiens
  misc_RNA (1)...(19): siRNA sense strand
gcagggaagucuggcaguu

SEQ ID NO: 178831 - RNA, 19 nt, Homo sapiens
  misc_RNA (1)...(19): siRNA sense strand
cagcucccauauaccauua

SEQ ID NO: 178832 - RNA, 19 nt, Homo sapiens
  misc_RNA (1)...(19): siRNA sense strand
gcaggcauuuugcaauuua

SEQ ID NO: 178833 - RNA, 19 nt, Homo sapiens
  misc_RNA (1)...(19): siRNA sense strand
gcagaggauuggaugaaag

SEQ ID NO: 178834 - RNA, 19 nt, Homo sapiens
  misc_RNA (1)...(19): siRNA sense strand
cccauaaacucccaguaaa

SEQ ID NO: 178835 - RNA, 19 nt, Homo sapiens
  misc_RNA (1)...(19): siRNA sense strand
gggaagaagauccacauga

SEQ ID NO: 178836 - RNA, 19 nt, Homo sapiens
  misc_RNA (1)...(19): siRNA sense strand
caagaguuguuagugguuu

SEQ ID NO: 178837 - RNA, 19 nt, Homo sapiens
  misc_RNA (1)...(19): siRNA sense strand
acaaauaccaccaugagaa

SEQ ID NO: 178838 - RNA, 19 nt, Homo sapiens
  misc_RNA (1)...(19): siRNA sense strand
gagauauguucauuguuca

SEQ ID NO: 178839 - RNA, 19 nt, Homo sapiens
  misc_RNA (1)...(19): siRNA sense strand
ggaggccgguauuauaaca

SEQ ID NO: 178840 - RNA, 19 nt, Homo sapiens
  misc_RNA (1)...(19): siRNA sense strand
gaugaacaaggccuuauug

SEQ ID NO: 178841 - RNA, 19 nt, Homo sapiens
  misc_RNA (1)...(19): siRNA sense strand
ggauggauguggguuacaa

SEQ ID NO: 178842 - RNA, 19 nt, Homo sapiens
  misc_RNA (1)...(19): siRNA sense strand
gauucuccaucuccuauug

SEQ ID NO: 178843 - RNA, 19 nt, Homo sapiens
  misc_RNA (1)...(19): siRNA sense strand
ugaagaagcccauaaacuc

SEQ ID NO: 178844 - RNA, 19 nt, Homo sapiens
  misc_RNA (1)...(19): siRNA sense strand
aaggagauauguucauugu

SEQ ID NO: 178845 - RNA, 19 nt, Homo sapiens
  misc_RNA (1)...(19): siRNA sense strand
ucauguagucuaugcuuua

SEQ ID NO: 178846 - RNA, 19 nt, Homo sapiens
  misc_RNA (1)...(19): siRNA sense strand
ugccacagaugaaugguuu

SEQ ID NO: 178847 - RNA, 19 nt, Homo sapiens
  misc_RNA (1)...(19): siRNA sense strand
caguguauguucugucuau

SEQ ID NO: 178848 - RNA, 19 nt, Homo sapiens
  misc_RNA (1)...(19): siRNA sense strand
cuaaggagcccuacaugga

SEQ ID NO: 178849 - RNA, 19 nt, Homo sapiens
  misc_RNA (1)...(19): siRNA sense strand
ugcaagaacacugauauua

SEQ ID NO: 178850 - RNA, 19 nt, Homo sapiens
  misc_RNA (1)...(19): siRNA sense strand
ugaguuaaguccaucaaag

SEQ ID NO: 178851 - RNA, 19 nt, Homo sapiens
  misc_RNA (1)...(19): siRNA sense strand
cagaagaagaguacaguga

SEQ ID NO: 178852 - RNA, 19 nt, Homo sapiens
  misc_RNA (1)...(19): siRNA sense strand
ccagggacauccaauaaac

SEQ ID NO: 178853 - RNA, 19 nt, Homo sapiens
  misc_RNA (1)...(19): siRNA sense strand
uugaagaccuaguagaaga

SEQ ID NO: 178854 - RNA, 19 nt, Homo sapiens
  misc_RNA (1)...(19): siRNA sense strand
acagaacgauagcagaaga

SEQ ID NO: 178855 - RNA, 19 nt, Homo sapiens
  misc_RNA (1)...(19): siRNA sense strand
gcaaaaggaacuucaugua

SEQ ID NO: 178856 - RNA, 19 nt, Homo sapiens
  misc_RNA (1)...(19): siRNA sense strand
ccugaauaguguccaagua

SEQ ID NO: 178857 - RNA, 19 nt, Homo sapiens
  misc_RNA (1)...(19): siRNA sense strand
ccaggguccuuuguacuuu

SEQ ID NO: 178858 - RNA, 19 nt, Homo sapiens
  misc_RNA (1)...(19): siRNA sense strand
ccaaaaggauuaauagauc

SEQ ID NO: 178859 - RNA, 19 nt, Homo sapiens
  misc_RNA (1)...(19): siRNA sense strand
gaaggugucaauccauuca

SEQ ID NO: 178860 - RNA, 19 nt, Homo sapiens
  misc_RNA (1)...(19): siRNA sense strand
gcuugaaucguuguuguua

SEQ ID NO: 178861 - RNA, 19 nt, Homo sapiens
  misc_RNA (1)...(19): siRNA sense strand
uguagucuaugcuuuauca

SEQ ID NO: 178862 - RNA, 19 nt, Homo sapiens
  misc_RNA (1)...(19): siRNA sense strand
ugacagaacgauagcagaa

SEQ ID NO: 178863 - RNA, 19 nt, Homo sapiens
  misc_RNA (1)...(19): siRNA sense strand
gcucccauauaccauuaaa

SEQ ID NO: 178864 - RNA, 19 nt, Homo sapiens
  misc_RNA (1)...(19): siRNA sense strand
cauguuucuuguuugcuua

SEQ ID NO: 178865 - RNA, 19 nt, Homo sapiens
  misc_RNA (1)...(19): siRNA sense strand
gugaugcccaacuuauuua

SEQ ID NO: 178866 - RNA, 19 nt, Homo sapiens
  misc_RNA (1)...(19): siRNA sense strand
gaagaagauccacaugaag

SEQ ID NO: 178867 - RNA, 19 nt, Homo sapiens
  misc_RNA (1)...(19): siRNA sense strand
gcaggaucaagaacaagua

SEQ ID NO: 178868 - RNA, 19 nt, Homo sapiens
  misc_RNA (1)...(19): siRNA sense strand
cagcauugcaugagauuug

SEQ ID NO: 178869 - RNA, 19 nt, Homo sapiens
  misc_RNA (1)...(19): siRNA sense strand
cacacuaaaugacagagaa

SEQ ID NO: 178870 - RNA, 19 nt, Homo sapiens
  misc_RNA (1)...(19): siRNA sense strand
aaaggaacuucauguaguc

SEQ ID NO: 178871 - RNA, 19 nt, Homo sapiens
  misc_RNA (1)...(19): siRNA sense strand
cacaguggauggcaaggaa

SEQ ID NO: 178872 - RNA, 19 nt, Homo sapiens
  misc_RNA (1)...(19): siRNA sense strand
caagaacaaguacucaaug

SEQ ID NO: 178873 - RNA, 19 nt, Homo sapiens
  misc_RNA (1)...(19): siRNA sense strand
ggaagaagauccacaugaa

SEQ ID NO: 178874 - RNA, 19 nt, Homo sapiens
  misc_RNA (1)...(19): siRNA sense strand
ggagauauguucauuguuc

SEQ ID NO: 178875 - RNA, 19 nt, Homo sapiens
  misc_RNA (1)...(19): siRNA sense strand
gaacauacuuucagagcuu

SEQ ID NO: 178876 - RNA, 19 nt, Homo sapiens
  misc_RNA (1)...(19): siRNA sense strand
ggauguggguuacaaauuu

SEQ ID NO: 178877 - RNA, 19 nt, Homo sapiens
  misc_RNA (1)...(19): siRNA sense strand
gcaaggaaaucuauaauac

SEQ ID NO: 178878 - RNA, 19 nt, Homo sapiens
  misc_RNA (1)...(19): siRNA sense strand
uaacagaacugcuucaaca

SEQ ID NO: 178879 - RNA, 19 nt, Homo sapiens
  misc_RNA (1)...(19): siRNA sense strand
gaaagguuaucuucugaaa

SEQ ID NO: 178880 - RNA, 19 nt, Homo sapiens
  misc_RNA (1)...(19): siRNA sense strand
uagcaaaucuuguggaauu

SEQ ID NO: 178881 - RNA, 19 nt, Homo sapiens
  misc_RNA (1)...(19): siRNA sense strand
caacaaacaucguaugauc

SEQ ID NO: 178882 - RNA, 19 nt, Homo sapiens
  misc_RNA (1)...(19): siRNA sense strand
gauaguaguucagcacuuu

SEQ ID NO: 178883 - RNA, 19 nt, Homo sapiens
  misc_RNA (1)...(19): siRNA sense strand
gauguggguuacaaauuua

SEQ ID NO: 178884 - RNA, 19 nt, Homo sapiens
  misc_RNA (1)...(19): siRNA sense strand
ccaccgacauugagauaua

SEQ ID NO: 178885 - RNA, 19 nt, Homo sapiens
  misc_RNA (1)...(19): siRNA sense strand
gcacgauacucuauggaaa

SEQ ID NO: 178886 - RNA, 19 nt, Homo sapiens
  misc_RNA (1)...(19): siRNA sense strand
ccacggauguucaauauca

SEQ ID NO: 178887 - RNA, 19 nt, Homo sapiens
  misc_RNA (1)...(19): siRNA sense strand
agaaaucuguucagcauaa

SEQ ID NO: 178888 - RNA, 19 nt, Homo sapiens
  misc_RNA (1)...(19): siRNA sense strand
auucauggcuucagaaaua

SEQ ID NO: 178889 - RNA, 19 nt, Homo sapiens
  misc_RNA (1)...(19): siRNA sense strand
uaaggaaccuguaccaaug

SEQ ID NO: 178890 - RNA, 19 nt, Homo sapiens
  misc_RNA (1)...(19): siRNA sense strand
caagaacacugauauuagu

SEQ ID NO: 178891 - RNA, 19 nt, Homo sapiens
  misc_RNA (1)...(19): siRNA sense strand
gaaauaagcauggaagaug

SEQ ID NO: 178892 - RNA, 19 nt, Homo sapiens
  misc_RNA (1)...(19): siRNA sense strand
gaagaagaguacagugaau

SEQ ID NO: 178893 - RNA, 19 nt, Homo sapiens
  misc_RNA (1)...(19): siRNA sense strand
gaacuucgaacgcucagua

SEQ ID NO: 178894 - RNA, 19 nt, Homo sapiens
  misc_RNA (1)...(19): siRNA sense strand
gaacuuagcaaaucuugug

SEQ ID NO: 178895 - RNA, 19 nt, Homo sapiens
  misc_RNA (1)...(19): siRNA sense strand
ugaaaggucugcaggcauu

SEQ ID NO: 178896 - RNA, 19 nt, Homo sapiens
  misc_RNA (1)...(19): siRNA sense strand
gaagaguacagugaauuua

SEQ ID NO: 178897 - RNA, 19 nt, Homo sapiens
  misc_RNA (1)...(19): siRNA sense strand
gaacaaguacucaaugaca

SEQ ID NO: 178898 - RNA, 19 nt, Homo sapiens
  misc_RNA (1)...(19): siRNA sense strand
gcaccuugauggagcagua

SEQ ID NO: 178899 - RNA, 19 nt, Homo sapiens
  misc_RNA (1)...(19): siRNA sense strand
gaaagggcaugccacagau

SEQ ID NO: 178900 - RNA, 19 nt, Homo sapiens
  misc_RNA (1)...(19): siRNA sense strand
uguaacaucuaccugaaua

SEQ ID NO: 178901 - RNA, 19 nt, Homo sapiens
  misc_RNA (1)...(19): siRNA sense strand
uaacacaccuauugaacau

SEQ ID NO: 178902 - RNA, 19 nt, Homo sapiens
  misc_RNA (1)...(19): siRNA sense strand
gcaagaacacugauauuag

SEQ ID NO: 178903 - RNA, 19 nt, Homo sapiens
  misc_RNA (1)...(19): siRNA sense strand
cagcauaaguggccuacaa

SEQ ID NO: 178904 - RNA, 19 nt, Homo sapiens
  misc_RNA (1)...(19): siRNA sense strand
ugaagccacuacccuauuu

SEQ ID NO: 178905 - RNA, 19 nt, Homo sapiens
  misc_RNA (1)...(19): siRNA sense strand
uuucagagcuuguggagaa

SEQ ID NO: 178906 - RNA, 19 nt, Homo sapiens
  misc_RNA (1)...(19): siRNA sense strand
gaagaugugaacacuaauu

SEQ ID NO: 178907 - RNA, 19 nt, Homo sapiens
  misc_RNA (1)...(19): siRNA sense strand
ccaaacaggaagcuuauaa

SEQ ID NO: 178908 - RNA, 19 nt, Homo sapiens
  misc_RNA (1)...(19): siRNA sense strand
cauaaguggccuacaaaua

SEQ ID NO: 178909 - RNA, 19 nt, Homo sapiens
  misc_RNA (1)...(19): siRNA sense strand
gaagauagaaggcguguac

SEQ ID NO: 178910 - RNA, 19 nt, Homo sapiens
  misc_RNA (1)...(19): siRNA sense strand
gugcagaacuuagcaaauc

SEQ ID NO: 178911 - RNA, 19 nt, Homo sapiens
  misc_RNA (1)...(19): siRNA sense strand
aagcaaagauccugauauc

SEQ ID NO: 178912 - RNA, 19 nt, Homo sapiens
  misc_RNA (1)...(19): siRNA sense strand
cuacacaguuuguucauca

SEQ ID NO: 178913 - RNA, 19 nt, Homo sapiens
  misc_RNA (1)...(19): siRNA sense strand
aaauaagcauggaagauga

SEQ ID NO: 178914 - RNA, 19 nt, Homo sapiens
  misc_RNA (1)...(19): siRNA sense strand
ggacaagaccgaacacuac

SEQ ID NO: 178915 - RNA, 19 nt, Homo sapiens
  misc_RNA (1)...(19): siRNA sense strand
ggaacuucauguagucuau

SEQ ID NO: 178916 - RNA, 19 nt, Homo sapiens
  misc_RNA (1)...(19): siRNA sense strand
ccugauaucuuauuuaugc

SEQ ID NO: 178917 - RNA, 19 nt, Homo sapiens
  misc_RNA (1)...(19): siRNA sense strand
acagucauguuucuuguuu

SEQ ID NO: 178918 - RNA, 19 nt, Homo sapiens
  misc_RNA (1)...(19): siRNA sense strand
uauaauaccauccgucgua

SEQ ID NO: 178919 - RNA, 19 nt, Homo sapiens
  misc_RNA (1)...(19): siRNA sense strand
uaauagaucucaguguaug

SEQ ID NO: 178920 - RNA, 19 nt, Homo sapiens
  misc_RNA (1)...(19): siRNA sense strand
gaacacuacuggccagcau

SEQ ID NO: 178921 - RNA, 19 nt, Homo sapiens
  misc_RNA (1)...(19): siRNA sense strand
gcccauaaacucccaguaa

SEQ ID NO: 178922 - RNA, 19 nt, Homo sapiens
  misc_RNA (1)...(19): siRNA sense strand
guguggagauuacuacauu

SEQ ID NO: 178923 - RNA, 19 nt, Homo sapiens
  misc_RNA (1)...(19): siRNA sense strand
uagaugaacuugggaaugu

SEQ ID NO: 178924 - RNA, 19 nt, Homo sapiens
  misc_RNA (1)...(19): siRNA sense strand
augaagaugugaacacuaa

SEQ ID NO: 178925 - RNA, 19 nt, Homo sapiens
  misc_RNA (1)...(19): siRNA sense strand
ggcaaggaaaucuauaaua

SEQ ID NO: 178926 - RNA, 19 nt, Homo sapiens
  misc_RNA (1)...(19): siRNA sense strand
accagacacugaugaaaua

SEQ ID NO: 178927 - RNA, 19 nt, Homo sapiens
  misc_RNA (1)...(19): siRNA sense strand
aagaacaaguacucaauga

SEQ ID NO: 178928 - RNA, 19 nt, Homo sapiens
  misc_RNA (1)...(19): siRNA sense strand
guuaaguccaucaaaguua

SEQ ID NO: 178929 - RNA, 19 nt, Homo sapiens
  misc_RNA (1)...(19): siRNA sense strand
uacgagcuauucuaccuua

SEQ ID NO: 178930 - RNA, 19 nt, Homo sapiens
  misc_RNA (1)...(19): siRNA sense strand
gcagggaagucuggcaguu

SEQ ID NO: 178931 - RNA, 19 nt, Homo sapiens
  misc_RNA (1)...(19): siRNA sense strand
cagcucccauauaccauua

SEQ ID NO: 178932 - RNA, 19 nt, Homo sapiens
  misc_RNA (1)...(19): siRNA sense strand
gcaggcauuuugcaauuua

SEQ ID NO: 178933 - RNA, 19 nt, Homo sapiens
  misc_RNA (1)...(19): siRNA sense strand
gcagaggauuggaugaaag

SEQ ID NO: 178934 - RNA, 19 nt, Homo sapiens
  misc_RNA (1)...(19): siRNA sense strand
cccauaaacucccaguaaa

SEQ ID NO: 178935 - RNA, 19 nt, Homo sapiens
  misc_RNA (1)...(19): siRNA sense strand
gggaagaagauccacauga

SEQ ID NO: 178936 - RNA, 19 nt, Homo sapiens
  misc_RNA (1)...(19): siRNA sense strand
caagaguuguuagugguuu

SEQ ID NO: 178937 - RNA, 19 nt, Homo sapiens
  misc_RNA (1)...(19): siRNA sense strand
acaaauaccaccaugagaa

SEQ ID NO: 178938 - RNA, 19 nt, Homo sapiens
  misc_RNA (1)...(19): siRNA sense strand
gagauauguucauuguuca

SEQ ID NO: 178939 - RNA, 19 nt, Homo sapiens
  misc_RNA (1)...(19): siRNA sense strand
ggaggccgguauuauaaca

SEQ ID NO: 178940 - RNA, 19 nt, Homo sapiens
  misc_RNA (1)...(19): siRNA sense strand
gaugaacaaggccuuauug

SEQ ID NO: 178941 - RNA, 19 nt, Homo sapiens
  misc_RNA (1)...(19): siRNA sense strand
ggauggauguggguuacaa

SEQ ID NO: 178942 - RNA, 19 nt, Homo sapiens
  misc_RNA (1)...(19): siRNA sense strand
gauucuccaucuccuauug

SEQ ID NO: 178943 - RNA, 19 nt, Homo sapiens
  misc_RNA (1)...(19): siRNA sense strand
ugaagaagcccauaaacuc

SEQ ID NO: 178944 - RNA, 19 nt, Homo sapiens
  misc_RNA (1)...(19): siRNA sense strand
aaggagauauguucauugu

SEQ ID NO: 178945 - RNA, 19 nt, Homo sapiens
  misc_RNA (1)...(19): siRNA sense strand
ucauguagucuaugcuuua

SEQ ID NO: 178946 - RNA, 19 nt, Homo sapiens
  misc_RNA (1)...(19): siRNA sense strand
ugccacagaugaaugguuu

SEQ ID NO: 178947 - RNA, 19 nt, Homo sapiens
  misc_RNA (1)...(19): siRNA sense strand
caguguauguucugucuau

SEQ ID NO: 178948 - RNA, 19 nt, Homo sapiens
  misc_RNA (1)...(19): siRNA sense strand
cuaaggagcccuacaugga

SEQ ID NO: 178949 - RNA, 19 nt, Homo sapiens
  misc_RNA (1)...(19): siRNA sense strand
ugcaagaacacugauauua

SEQ ID NO: 178950 - RNA, 19 nt, Homo sapiens
  misc_RNA (1)...(19): siRNA sense strand
ugaguuaaguccaucaaag

SEQ ID NO: 178951 - RNA, 19 nt, Homo sapiens
  misc_RNA (1)...(19): siRNA sense strand
cagaagaagaguacaguga

SEQ ID NO: 178952 - RNA, 19 nt, Homo sapiens
  misc_RNA (1)...(19): siRNA sense strand
ccagggacauccaauaaac

SEQ ID NO: 178953 - RNA, 19 nt, Homo sapiens
  misc_RNA (1)...(19): siRNA sense strand
uugaagaccuaguagaaga

SEQ ID NO: 178954 - RNA, 19 nt, Homo sapiens
  misc_RNA (1)...(19): siRNA sense strand
acagaacgauagcagaaga

SEQ ID NO: 178955 - RNA, 19 nt, Homo sapiens
  misc_RNA (1)...(19): siRNA sense strand
ccaggguccuuuguacuuu

SEQ ID NO: 178956 - RNA, 19 nt, Homo sapiens
  misc_RNA (1)...(19): siRNA sense strand
gcaaaaggaacuucaugua

SEQ ID NO: 178957 - RNA, 19 nt, Homo sapiens
  misc_RNA (1)...(19): siRNA sense strand
ccugaauaguguccaagua

SEQ ID NO: 178958 - RNA, 19 nt, Homo sapiens
  misc_RNA (1)...(19): siRNA sense strand
ccaaaaggauuaauagauc

SEQ ID NO: 178959 - RNA, 19 nt, Homo sapiens
  misc_RNA (1)...(19): siRNA sense strand
gaaggugucaauccauuca

SEQ ID NO: 178960 - RNA, 19 nt, Homo sapiens
  misc_RNA (1)...(19): siRNA sense strand
ugacagaacgauagcagaa

SEQ ID NO: 178961 - RNA, 19 nt, Homo sapiens
  misc_RNA (1)...(19): siRNA sense strand
gcuugaaucguuguuguua

SEQ ID NO: 178962 - RNA, 19 nt, Homo sapiens
  misc_RNA (1)...(19): siRNA sense strand
uguagucuaugcuuuauca

SEQ ID NO: 178963 - RNA, 19 nt, Homo sapiens
  misc_RNA (1)...(19): siRNA sense strand
gcucccauauaccauuaaa

SEQ ID NO: 178964 - RNA, 19 nt, Homo sapiens
  misc_RNA (1)...(19): siRNA sense strand
cauguuucuuguuugcuua

SEQ ID NO: 178965 - RNA, 19 nt, Homo sapiens
  misc_RNA (1)...(19): siRNA sense strand
gugaugcccaacuuauuua

SEQ ID NO: 178966 - RNA, 19 nt, Homo sapiens
  misc_RNA (1)...(19): siRNA sense strand
gaagaagauccacaugaag

SEQ ID NO: 178967 - RNA, 19 nt, Homo sapiens
  misc_RNA (1)...(19): siRNA sense strand
gcaggaucaagaacaagua

SEQ ID NO: 178968 - RNA, 19 nt, Homo sapiens
  misc_RNA (1)...(19): siRNA sense strand
cagcauugcaugagauuug

SEQ ID NO: 178969 - RNA, 19 nt, Homo sapiens
  misc_RNA (1)...(19): siRNA sense strand
cacacuaaaugacagagaa

SEQ ID NO: 178970 - RNA, 19 nt, Homo sapiens
  misc_RNA (1)...(19): siRNA sense strand
aaaggaacuucauguaguc

SEQ ID NO: 178971 - RNA, 19 nt, Homo sapiens
  misc_RNA (1)...(19): siRNA sense strand
cacaguggauggcaaggaa

SEQ ID NO: 178972 - RNA, 19 nt, Homo sapiens
  misc_RNA (1)...(19): siRNA sense strand
caagaacaaguacucaaug

SEQ ID NO: 178973 - RNA, 19 nt, Homo sapiens
  misc_RNA (1)...(19): siRNA sense strand
gaagagauaugcaaccauu

SEQ ID NO: 178974 - RNA, 19 nt, Homo sapiens
  misc_RNA (1)...(19): siRNA sense strand
gcgauuaugugcccaaaua

SEQ ID NO: 178975 - RNA, 19 nt, Homo sapiens
  misc_RNA (1)...(19): siRNA sense strand
caagagaaguuguggcaua

SEQ ID NO: 178976 - RNA, 19 nt, Homo sapiens
  misc_RNA (1)...(19): siRNA sense strand
acagaaaggucuaucauuu

SEQ ID NO: 178977 - RNA, 19 nt, Homo sapiens
  misc_RNA (1)...(19): siRNA sense strand
cagcagcacuccauuuaua

SEQ ID NO: 178978 - RNA, 19 nt, Homo sapiens
  misc_RNA (1)...(19): siRNA sense strand
gcaaagcagugaauaagga

SEQ ID NO: 178979 - RNA, 19 nt, Homo sapiens
  misc_RNA (1)...(19): siRNA sense strand
gagaaguuguggcauauaa

SEQ ID NO: 178980 - RNA, 19 nt, Homo sapiens
  misc_RNA (1)...(19): siRNA sense strand
aaagagaacuggguccuua

SEQ ID NO: 178981 - RNA, 19 nt, Homo sapiens
  misc_RNA (1)...(19): siRNA sense strand
ggacauaaaguuacaauuc

SEQ ID NO: 178982 - RNA, 19 nt, Homo sapiens
  misc_RNA (1)...(19): siRNA sense strand
gaaguuguggcauauaaua

SEQ ID NO: 178983 - RNA, 19 nt, Homo sapiens
  misc_RNA (1)...(19): siRNA sense strand
gaagucauuugcacugaaa

SEQ ID NO: 178984 - RNA, 19 nt, Homo sapiens
  misc_RNA (1)...(19): siRNA sense strand
caaaggaaaugcuuaugga

SEQ ID NO: 178985 - RNA, 19 nt, Homo sapiens
  misc_RNA (1)...(19): siRNA sense strand
ggaauaaacaggccaaaga

SEQ ID NO: 178986 - RNA, 19 nt, Homo sapiens
  misc_RNA (1)...(19): siRNA sense strand
ugaagaaccaccaaaguua

SEQ ID NO: 178987 - RNA, 19 nt, Homo sapiens
  misc_RNA (1)...(19): siRNA sense strand
gaaaaucgcuccuucuuca

SEQ ID NO: 178988 - RNA, 19 nt, Homo sapiens
  misc_RNA (1)...(19): siRNA sense strand
ugaggugucuacuguaaua

SEQ ID NO: 178989 - RNA, 19 nt, Homo sapiens
  misc_RNA (1)...(19): siRNA sense strand
gccuauagcucaccucgua

SEQ ID NO: 178990 - RNA, 19 nt, Homo sapiens
  misc_RNA (1)...(19): siRNA sense strand
uagaaaggcuagagagaaa

SEQ ID NO: 178991 - RNA, 19 nt, Homo sapiens
  misc_RNA (1)...(19): siRNA sense strand
gacuaaagcuggcagaaau

SEQ ID NO: 178992 - RNA, 19 nt, Homo sapiens
  misc_RNA (1)...(19): siRNA sense strand
gaagcgcucugcuguacaa

SEQ ID NO: 178993 - RNA, 19 nt, Homo sapiens
  misc_RNA (1)...(19): siRNA sense strand
gccaaugucuccucuaaug

SEQ ID NO: 178994 - RNA, 19 nt, Homo sapiens
  misc_RNA (1)...(19): siRNA sense strand
ucacauagacuuugcugua

SEQ ID NO: 178995 - RNA, 19 nt, Homo sapiens
  misc_RNA (1)...(19): siRNA sense strand
gaauaaaggagcacuacuu

SEQ ID NO: 178996 - RNA, 19 nt, Homo sapiens
  misc_RNA (1)...(19): siRNA sense strand
gauagauugugacuuagaa

SEQ ID NO: 178997 - RNA, 19 nt, Homo sapiens
  misc_RNA (1)...(19): siRNA sense strand
gaaauuggaacaccucgaa

SEQ ID NO: 178998 - RNA, 19 nt, Homo sapiens
  misc_RNA (1)...(19): siRNA sense strand
ucaaaugaguuacgaagga

SEQ ID NO: 178999 - RNA, 19 nt, Homo sapiens
  misc_RNA (1)...(19): siRNA sense strand
caagggacauggugaaaca

SEQ ID NO: 179000 - RNA, 19 nt, Homo sapiens
  misc_RNA (1)...(19): siRNA sense strand
gagccacccugcaucauug

SEQ ID NO: 179001 - RNA, 19 nt, Homo sapiens
  misc_RNA (1)...(19): siRNA sense strand
caucauugcuguacugugu

SEQ ID NO: 179002 - RNA, 19 nt, Homo sapiens
  misc_RNA (1)...(19): siRNA sense strand
gauaauagcaaagcaguga

SEQ ID NO: 179003 - RNA, 19 nt, Homo sapiens
  misc_RNA (1)...(19): siRNA sense strand
ggacaugucaguucuuuua

SEQ ID NO: 179004 - RNA, 19 nt, Homo sapiens
  misc_RNA (1)...(19): siRNA sense strand
aggcuaauguggaguauaa

SEQ ID NO: 179005 - RNA, 19 nt, Homo sapiens
  misc_RNA (1)...(19): siRNA sense strand
uaaggaguaugaagaguau

SEQ ID NO: 179006 - RNA, 19 nt, Homo sapiens
  misc_RNA (1)...(19): siRNA sense strand
ggauggacaugucaaaucu

SEQ ID NO: 179007 - RNA, 19 nt, Homo sapiens
  misc_RNA (1)...(19): siRNA sense strand
gaucauaacagaaggaaca

SEQ ID NO: 179008 - RNA, 19 nt, Homo sapiens
  misc_RNA (1)...(19): siRNA sense strand
gaaaggcuagagagaaauu

SEQ ID NO: 179009 - RNA, 19 nt, Homo sapiens
  misc_RNA (1)...(19): siRNA sense strand
caagaguccuguaucacuu

SEQ ID NO: 179010 - RNA, 19 nt, Homo sapiens
  misc_RNA (1)...(19): siRNA sense strand
ugucaaaucuaccacaaga

SEQ ID NO: 179011 - RNA, 19 nt, Homo sapiens
  misc_RNA (1)...(19): siRNA sense strand
ucacuguccugaucuaaug

SEQ ID NO: 179012 - RNA, 19 nt, Homo sapiens
  misc_RNA (1)...(19): siRNA sense strand
caaaugaguuacgaaggaa

SEQ ID NO: 179013 - RNA, 19 nt, Homo sapiens
  misc_RNA (1)...(19): siRNA sense strand
gacuaaagcacaagaggua

SEQ ID NO: 179014 - RNA, 19 nt, Homo sapiens
  misc_RNA (1)...(19): siRNA sense strand
gcauguucauuauauguug

SEQ ID NO: 179015 - RNA, 19 nt, Homo sapiens
  misc_RNA (1)...(19): siRNA sense strand
ccaccaaaguuaccacgaa

SEQ ID NO: 179016 - RNA, 19 nt, Homo sapiens
  misc_RNA (1)...(19): siRNA sense strand
gucaaacucuucuaacaau

SEQ ID NO: 179017 - RNA, 19 nt, Homo sapiens
  misc_RNA (1)...(19): siRNA sense strand
guccugaucuaaugaaaga

SEQ ID NO: 179018 - RNA, 19 nt, Homo sapiens
  misc_RNA (1)...(19): siRNA sense strand
ggagagacuuucugucaac

SEQ ID NO: 179019 - RNA, 19 nt, Homo sapiens
  misc_RNA (1)...(19): siRNA sense strand
gaauggacaugucaguucu

SEQ ID NO: 179020 - RNA, 19 nt, Homo sapiens
  misc_RNA (1)...(19): siRNA sense strand
ggaauggacaugucaguuc

SEQ ID NO: 179021 - RNA, 19 nt, Homo sapiens
  misc_RNA (1)...(19): siRNA sense strand
gcgcucugcuguacaaguu

SEQ ID NO: 179022 - RNA, 19 nt, Homo sapiens
  misc_RNA (1)...(19): siRNA sense strand
aagaaugggucaggccuua

SEQ ID NO: 179023 - RNA, 19 nt, Homo sapiens
  misc_RNA (1)...(19): siRNA sense strand
gaagagccacccugcauca

SEQ ID NO: 179024 - RNA, 19 nt, Homo sapiens
  misc_RNA (1)...(19): siRNA sense strand
gcuaauagucacguauaua

SEQ ID NO: 179025 - RNA, 19 nt, Homo sapiens
  misc_RNA (1)...(19): siRNA sense strand
cacauagacuuugcuguaa

SEQ ID NO: 179026 - RNA, 19 nt, Homo sapiens
  misc_RNA (1)...(19): siRNA sense strand
guuggcauguucauuauau

SEQ ID NO: 179027 - RNA, 19 nt, Homo sapiens
  misc_RNA (1)...(19): siRNA sense strand
gaacaacaggacauaaagu

SEQ ID NO: 179028 - RNA, 19 nt, Homo sapiens
  misc_RNA (1)...(19): siRNA sense strand
uauuguggcuggucugaaa

SEQ ID NO: 179029 - RNA, 19 nt, Homo sapiens
  misc_RNA (1)...(19): siRNA sense strand
uaggaagagugaagucauu

SEQ ID NO: 179030 - RNA, 19 nt, Homo sapiens
  misc_RNA (1)...(19): siRNA sense strand
ucacguauauagaaguguu

SEQ ID NO: 179031 - RNA, 19 nt, Homo sapiens
  misc_RNA (1)...(19): siRNA sense strand
gaucagcuccuccuuugug

SEQ ID NO: 179032 - RNA, 19 nt, Homo sapiens
  misc_RNA (1)...(19): siRNA sense strand
ccacaagaauuucgugaac

SEQ ID NO: 179033 - RNA, 19 nt, Homo sapiens
  misc_RNA (1)...(19): siRNA sense strand
caaaguuccuaccugugaa

SEQ ID NO: 179034 - RNA, 19 nt, Homo sapiens
  misc_RNA (1)...(19): siRNA sense strand
gaacagauuuuggagaguu

SEQ ID NO: 179035 - RNA, 19 nt, Homo sapiens
  misc_RNA (1)...(19): siRNA sense strand
cuugauggcuuguuguuug

SEQ ID NO: 179036 - RNA, 19 nt, Homo sapiens
  misc_RNA (1)...(19): siRNA sense strand
ggaaggcaacuguguuuca

SEQ ID NO: 179037 - RNA, 19 nt, Homo sapiens
  misc_RNA (1)...(19): siRNA sense strand
ugaauaaggaguaugaaga

SEQ ID NO: 179038 - RNA, 19 nt, Homo sapiens
  misc_RNA (1)...(19): siRNA sense strand
agaauuucgugaacguaua

SEQ ID NO: 179039 - RNA, 19 nt, Homo sapiens
  misc_RNA (1)...(19): siRNA sense strand
agaaauggauggacauguc

SEQ ID NO: 179040 - RNA, 19 nt, Homo sapiens
  misc_RNA (1)...(19): siRNA sense strand
ggucaaacucuucuaacaa

SEQ ID NO: 179041 - RNA, 19 nt, Homo sapiens
  misc_RNA (1)...(19): siRNA sense strand
gcuccuucuucaagcauua

SEQ ID NO: 179042 - RNA, 19 nt, Homo sapiens
  misc_RNA (1)...(19): siRNA sense strand
gaacagccaggaucucaca

SEQ ID NO: 179043 - RNA, 19 nt, Homo sapiens
  misc_RNA (1)...(19): siRNA sense strand
gugagccgguuacagagua

SEQ ID NO: 179044 - RNA, 19 nt, Homo sapiens
  misc_RNA (1)...(19): siRNA sense strand
aagaguauguucuaacugu

SEQ ID NO: 179045 - RNA, 19 nt, Homo sapiens
  misc_RNA (1)...(19): siRNA sense strand
uaaacagcauugaagaaca

SEQ ID NO: 179046 - RNA, 19 nt, Homo sapiens
  misc_RNA (1)...(19): siRNA sense strand
gaaauacgacuuggcgaau

SEQ ID NO: 179047 - RNA, 19 nt, Homo sapiens
  misc_RNA (1)...(19): siRNA sense strand
uggaucagcuccuccuuug

SEQ ID NO: 179048 - RNA, 19 nt, Homo sapiens
  misc_RNA (1)...(19): siRNA sense strand
agaaaggucuaucauuugg

SEQ ID NO: 179049 - RNA, 19 nt, Homo sapiens
  misc_RNA (1)...(19): siRNA sense strand
gagguacauucaacuggaa

SEQ ID NO: 179050 - RNA, 19 nt, Homo sapiens
  misc_RNA (1)...(19): siRNA sense strand
gcacaagagguacauucaa

SEQ ID NO: 179051 - RNA, 19 nt, Homo sapiens
  misc_RNA (1)...(19): siRNA sense strand
gacaagaucauaacagaag

SEQ ID NO: 179052 - RNA, 19 nt, Homo sapiens
  misc_RNA (1)...(19): siRNA sense strand
ggacaagaucauaacagaa

SEQ ID NO: 179053 - RNA, 19 nt, Homo sapiens
  misc_RNA (1)...(19): siRNA sense strand
gcacuacuuuaagccauau

SEQ ID NO: 179054 - RNA, 19 nt, Homo sapiens
  misc_RNA (1)...(19): siRNA sense strand
gcaacuguguuucacuuac

SEQ ID NO: 179055 - RNA, 19 nt, Homo sapiens
  misc_RNA (1)...(19): siRNA sense strand
ggaaucagccccaagcuaa

SEQ ID NO: 179056 - RNA, 19 nt, Homo sapiens
  misc_RNA (1)...(19): siRNA sense strand
ggauguuucaaaugaguua

SEQ ID NO: 179057 - RNA, 19 nt, Homo sapiens
  misc_RNA (1)...(19): siRNA sense strand
cagaaaggucuaucauuug

SEQ ID NO: 179058 - RNA, 19 nt, Homo sapiens
  misc_RNA (1)...(19): siRNA sense strand
uggacaagaucauaacaga

SEQ ID NO: 179059 - RNA, 19 nt, Homo sapiens
  misc_RNA (1)...(19): siRNA sense strand
ugaaacaccuaaacagcau

SEQ ID NO: 179060 - RNA, 19 nt, Homo sapiens
  misc_RNA (1)...(19): siRNA sense strand
gaccggacggagauauuua

SEQ ID NO: 179061 - RNA, 19 nt, Homo sapiens
  misc_RNA (1)...(19): siRNA sense strand
gaauaaggaguaugaagag

SEQ ID NO: 179062 - RNA, 19 nt, Homo sapiens
  misc_RNA (1)...(19): siRNA sense strand
ggugucuacuguaauauuc

SEQ ID NO: 179063 - RNA, 19 nt, Homo sapiens
  misc_RNA (1)...(19): siRNA sense strand
caagaagcgcucugcugua

SEQ ID NO: 179064 - RNA, 19 nt, Homo sapiens
  misc_RNA (1)...(19): siRNA sense strand
gcagcacuccauuuauauu

SEQ ID NO: 179065 - RNA, 19 nt, Homo sapiens
  misc_RNA (1)...(19): siRNA sense strand
gauugugacuuagaagaug

SEQ ID NO: 179066 - RNA, 19 nt, Homo sapiens
  misc_RNA (1)...(19): siRNA sense strand
gaaaaguauuccaagagaa

SEQ ID NO: 179067 - RNA, 19 nt, Homo sapiens
  misc_RNA (1)...(19): siRNA sense strand
acuuacugcucauucauua

SEQ ID NO: 179068 - RNA, 19 nt, Homo sapiens
  misc_RNA (1)...(19): siRNA sense strand
ugauaccucuuuccaugaa

SEQ ID NO: 179069 - RNA, 19 nt, Homo sapiens
  misc_RNA (1)...(19): siRNA sense strand
uacauggugucgcaaauga

SEQ ID NO: 179070 - RNA, 19 nt, Homo sapiens
  misc_RNA (1)...(19): siRNA sense strand
acaacaggacauaaaguua

SEQ ID NO: 179071 - RNA, 19 nt, Homo sapiens
  misc_RNA (1)...(19): siRNA sense strand
guaugaagaguauguucua

SEQ ID NO: 179072 - RNA, 19 nt, Homo sapiens
  misc_RNA (1)...(19): siRNA sense strand
gaagaaccaccaaaguuac

SEQ ID NO: 179073 - RNA, 19 nt, Homo sapiens
  misc_RNA (1)...(19): siRNA sense strand
gaagagauaugcaaccauu

SEQ ID NO: 179074 - RNA, 19 nt, Homo sapiens
  misc_RNA (1)...(19): siRNA sense strand
gcgauuaugugcccaaaua

SEQ ID NO: 179075 - RNA, 19 nt, Homo sapiens
  misc_RNA (1)...(19): siRNA sense strand
caagagaaguuguggcaua

SEQ ID NO: 179076 - RNA, 19 nt, Homo sapiens
  misc_RNA (1)...(19): siRNA sense strand
acagaaaggucuaucauuu

SEQ ID NO: 179077 - RNA, 19 nt, Homo sapiens
  misc_RNA (1)...(19): siRNA sense strand
cagcagcacuccauuuaua

SEQ ID NO: 179078 - RNA, 19 nt, Homo sapiens
  misc_RNA (1)...(19): siRNA sense strand
gcaaagcagugaauaagga

SEQ ID NO: 179079 - RNA, 19 nt, Homo sapiens
  misc_RNA (1)...(19): siRNA sense strand
gagaaguuguggcauauaa

SEQ ID NO: 179080 - RNA, 19 nt, Homo sapiens
  misc_RNA (1)...(19): siRNA sense strand
aaagagaacuggguccuua

SEQ ID NO: 179081 - RNA, 19 nt, Homo sapiens
  misc_RNA (1)...(19): siRNA sense strand
ggacauaaaguuacaauuc

SEQ ID NO: 179082 - RNA, 19 nt, Homo sapiens
  misc_RNA (1)...(19): siRNA sense strand
gaaguuguggcauauaaua

SEQ ID NO: 179083 - RNA, 19 nt, Homo sapiens
  misc_RNA (1)...(19): siRNA sense strand
gaagucauuugcacugaaa

SEQ ID NO: 179084 - RNA, 19 nt, Homo sapiens
  misc_RNA (1)...(19): siRNA sense strand
caaaggaaaugcuuaugga

SEQ ID NO: 179085 - RNA, 19 nt, Homo sapiens
  misc_RNA (1)...(19): siRNA sense strand
ggaauaaacaggccaaaga

SEQ ID NO: 179086 - RNA, 19 nt, Homo sapiens
  misc_RNA (1)...(19): siRNA sense strand
ugaagaaccaccaaaguua

SEQ ID NO: 179087 - RNA, 19 nt, Homo sapiens
  misc_RNA (1)...(19): siRNA sense strand
gaaaaucgcuccuucuuca

SEQ ID NO: 179088 - RNA, 19 nt, Homo sapiens
  misc_RNA (1)...(19): siRNA sense strand
ugaggugucuacuguaaua

SEQ ID NO: 179089 - RNA, 19 nt, Homo sapiens
  misc_RNA (1)...(19): siRNA sense strand
gccuauagcucaccucgua

SEQ ID NO: 179090 - RNA, 19 nt, Homo sapiens
  misc_RNA (1)...(19): siRNA sense strand
uagaaaggcuagagagaaa

SEQ ID NO: 179091 - RNA, 19 nt, Homo sapiens
  misc_RNA (1)...(19): siRNA sense strand
gacuaaagcuggcagaaau

SEQ ID NO: 179092 - RNA, 19 nt, Homo sapiens
  misc_RNA (1)...(19): siRNA sense strand
gaagcgcucugcuguacaa

SEQ ID NO: 179093 - RNA, 19 nt, Homo sapiens
  misc_RNA (1)...(19): siRNA sense strand
gccaaugucuccucuaaug

SEQ ID NO: 179094 - RNA, 19 nt, Homo sapiens
  misc_RNA (1)...(19): siRNA sense strand
ucacauagacuuugcugua

SEQ ID NO: 179095 - RNA, 19 nt, Homo sapiens
  misc_RNA (1)...(19): siRNA sense strand
gaauaaaggagcacuacuu

SEQ ID NO: 179096 - RNA, 19 nt, Homo sapiens
  misc_RNA (1)...(19): siRNA sense strand
gauagauugugacuuagaa

SEQ ID NO: 179097 - RNA, 19 nt, Homo sapiens
  misc_RNA (1)...(19): siRNA sense strand
gaaauuggaacaccucgaa

SEQ ID NO: 179098 - RNA, 19 nt, Homo sapiens
  misc_RNA (1)...(19): siRNA sense strand
ucaaaugaguuacgaagga

SEQ ID NO: 179099 - RNA, 19 nt, Homo sapiens
  misc_RNA (1)...(19): siRNA sense strand
caagggacauggugaaaca

SEQ ID NO: 179100 - RNA, 19 nt, Homo sapiens
  misc_RNA (1)...(19): siRNA sense strand
gagccacccugcaucauug

SEQ ID NO: 179101 - RNA, 19 nt, Homo sapiens
  misc_RNA (1)...(19): siRNA sense strand
caucauugcuguacugugu

SEQ ID NO: 179102 - RNA, 19 nt, Homo sapiens
  misc_RNA (1)...(19): siRNA sense strand
gauaauagcaaagcaguga

SEQ ID NO: 179103 - RNA, 19 nt, Homo sapiens
  misc_RNA (1)...(19): siRNA sense strand
ggacaugucaguucuuuua

SEQ ID NO: 179104 - RNA, 19 nt, Homo sapiens
  misc_RNA (1)...(19): siRNA sense strand
aggcuaauguggaguauaa

SEQ ID NO: 179105 - RNA, 19 nt, Homo sapiens
  misc_RNA (1)...(19): siRNA sense strand
uaaggaguaugaagaguau

SEQ ID NO: 179106 - RNA, 19 nt, Homo sapiens
  misc_RNA (1)...(19): siRNA sense strand
ggauggacaugucaaaucu

SEQ ID NO: 179107 - RNA, 19 nt, Homo sapiens
  misc_RNA (1)...(19): siRNA sense strand
gaucauaacagaaggaaca

SEQ ID NO: 179108 - RNA, 19 nt, Homo sapiens
  misc_RNA (1)...(19): siRNA sense strand
gaaaggcuagagagaaauu

SEQ ID NO: 179109 - RNA, 19 nt, Homo sapiens
  misc_RNA (1)...(19): siRNA sense strand
caagaguccuguaucacuu

SEQ ID NO: 179110 - RNA, 19 nt, Homo sapiens
  misc_RNA (1)...(19): siRNA sense strand
ugucaaaucuaccacaaga

SEQ ID NO: 179111 - RNA, 19 nt, Homo sapiens
  misc_RNA (1)...(19): siRNA sense strand
ucacuguccugaucuaaug

SEQ ID NO: 179112 - RNA, 19 nt, Homo sapiens
  misc_RNA (1)...(19): siRNA sense strand
caaaugaguuacgaaggaa

SEQ ID NO: 179113 - RNA, 19 nt, Homo sapiens
  misc_RNA (1)...(19): siRNA sense strand
gacuaaagcacaagaggua

SEQ ID NO: 179114 - RNA, 19 nt, Homo sapiens
  misc_RNA (1)...(19): siRNA sense strand
gcauguucauuauauguug

SEQ ID NO: 179115 - RNA, 19 nt, Homo sapiens
  misc_RNA (1)...(19): siRNA sense strand
ccaccaaaguuaccacgaa

SEQ ID NO: 179116 - RNA, 19 nt, Homo sapiens
  misc_RNA (1)...(19): siRNA sense strand
gucaaacucuucuaacaau

SEQ ID NO: 179117 - RNA, 19 nt, Homo sapiens
  misc_RNA (1)...(19): siRNA sense strand
guccugaucuaaugaaaga

SEQ ID NO: 179118 - RNA, 19 nt, Homo sapiens
  misc_RNA (1)...(19): siRNA sense strand
ggagagacuuucugucaac

SEQ ID NO: 179119 - RNA, 19 nt, Homo sapiens
  misc_RNA (1)...(19): siRNA sense strand
gaauggacaugucaguucu

SEQ ID NO: 179120 - RNA, 19 nt, Homo sapiens
  misc_RNA (1)...(19): siRNA sense strand
ggaauggacaugucaguuc

SEQ ID NO: 179121 - RNA, 19 nt, Homo sapiens
  misc_RNA (1)...(19): siRNA sense strand
gcgcucugcuguacaaguu

SEQ ID NO: 179122 - RNA, 19 nt, Homo sapiens
  misc_RNA (1)...(19): siRNA sense strand
aagaaugggucaggccuua

SEQ ID NO: 179123 - RNA, 19 nt, Homo sapiens
  misc_RNA (1)...(19): siRNA sense strand
gaagagccacccugcauca

SEQ ID NO: 179124 - RNA, 19 nt, Homo sapiens
  misc_RNA (1)...(19): siRNA sense strand
gcuaauagucacguauaua

SEQ ID NO: 179125 - RNA, 19 nt, Homo sapiens
  misc_RNA (1)...(19): siRNA sense strand
cacauagacuuugcuguaa

SEQ ID NO: 179126 - RNA, 19 nt, Homo sapiens
  misc_RNA (1)...(19): siRNA sense strand
guuggcauguucauuauau

SEQ ID NO: 179127 - RNA, 19 nt, Homo sapiens
  misc_RNA (1)...(19): siRNA sense strand
gaacaacaggacauaaagu

SEQ ID NO: 179128 - RNA, 19 nt, Homo sapiens
  misc_RNA (1)...(19): siRNA sense strand
uauuguggcuggucugaaa

SEQ ID NO: 179129 - RNA, 19 nt, Homo sapiens
  misc_RNA (1)...(19): siRNA sense strand
uaggaagagugaagucauu

SEQ ID NO: 179130 - RNA, 19 nt, Homo sapiens
  misc_RNA (1)...(19): siRNA sense strand
ucacguauauagaaguguu

SEQ ID NO: 179131 - RNA, 19 nt, Homo sapiens
  misc_RNA (1)...(19): siRNA sense strand
gaucagcuccuccuuugug

SEQ ID NO: 179132 - RNA, 19 nt, Homo sapiens
  misc_RNA (1)...(19): siRNA sense strand
ccacaagaauuucgugaac

SEQ ID NO: 179133 - RNA, 19 nt, Homo sapiens
  misc_RNA (1)...(19): siRNA sense strand
caaaguuccuaccugugaa

SEQ ID NO: 179134 - RNA, 19 nt, Homo sapiens
  misc_RNA (1)...(19): siRNA sense strand
gaacagauuuuggagaguu

SEQ ID NO: 179135 - RNA, 19 nt, Homo sapiens
  misc_RNA (1)...(19): siRNA sense strand
cuugauggcuuguuguuug

SEQ ID NO: 179136 - RNA, 19 nt, Homo sapiens
  misc_RNA (1)...(19): siRNA sense strand
ggaaggcaacuguguuuca

SEQ ID NO: 179137 - RNA, 19 nt, Homo sapiens
  misc_RNA (1)...(19): siRNA sense strand
ugaauaaggaguaugaaga

SEQ ID NO: 179138 - RNA, 19 nt, Homo sapiens
  misc_RNA (1)...(19): siRNA sense strand
agaauuucgugaacguaua

SEQ ID NO: 179139 - RNA, 19 nt, Homo sapiens
  misc_RNA (1)...(19): siRNA sense strand
agaaauggauggacauguc

SEQ ID NO: 179140 - RNA, 19 nt, Homo sapiens
  misc_RNA (1)...(19): siRNA sense strand
ggucaaacucuucuaacaa

SEQ ID NO: 179141 - RNA, 19 nt, Homo sapiens
  misc_RNA (1)...(19): siRNA sense strand
gcuccuucuucaagcauua

SEQ ID NO: 179142 - RNA, 19 nt, Homo sapiens
  misc_RNA (1)...(19): siRNA sense strand
gaacagccaggaucucaca

SEQ ID NO: 179143 - RNA, 19 nt, Homo sapiens
  misc_RNA (1)...(19): siRNA sense strand
gugagccgguuacagagua

SEQ ID NO: 179144 - RNA, 19 nt, Homo sapiens
  misc_RNA (1)...(19): siRNA sense strand
aagaguauguucuaacugu

SEQ ID NO: 179145 - RNA, 19 nt, Homo sapiens
  misc_RNA (1)...(19): siRNA sense strand
uaaacagcauugaagaaca

SEQ ID NO: 179146 - RNA, 19 nt, Homo sapiens
  misc_RNA (1)...(19): siRNA sense strand
gaaauacgacuuggcgaau

SEQ ID NO: 179147 - RNA, 19 nt, Homo sapiens
  misc_RNA (1)...(19): siRNA sense strand
uggaucagcuccuccuuug

SEQ ID NO: 179148 - RNA, 19 nt, Homo sapiens
  misc_RNA (1)...(19): siRNA sense strand
agaaaggucuaucauuugg

SEQ ID NO: 179149 - RNA, 19 nt, Homo sapiens
  misc_RNA (1)...(19): siRNA sense strand
gagguacauucaacuggaa

SEQ ID NO: 179150 - RNA, 19 nt, Homo sapiens
  misc_RNA (1)...(19): siRNA sense strand
gcacaagagguacauucaa

SEQ ID NO: 179151 - RNA, 19 nt, Homo sapiens
  misc_RNA (1)...(19): siRNA sense strand
gacaagaucauaacagaag

SEQ ID NO: 179152 - RNA, 19 nt, Homo sapiens
  misc_RNA (1)...(19): siRNA sense strand
ggacaagaucauaacagaa

SEQ ID NO: 179153 - RNA, 19 nt, Homo sapiens
  misc_RNA (1)...(19): siRNA sense strand
gcacuacuuuaagccauau

SEQ ID NO: 179154 - RNA, 19 nt, Homo sapiens
  misc_RNA (1)...(19): siRNA sense strand
gcaacuguguuucacuuac

SEQ ID NO: 179155 - RNA, 19 nt, Homo sapiens
  misc_RNA (1)...(19): siRNA sense strand
ggaaucagccccaagcuaa

SEQ ID NO: 179156 - RNA, 19 nt, Homo sapiens
  misc_RNA (1)...(19): siRNA sense strand
ggauguuucaaaugaguua

SEQ ID NO: 179157 - RNA, 19 nt, Homo sapiens
  misc_RNA (1)...(19): siRNA sense strand
cagaaaggucuaucauuug

SEQ ID NO: 179158 - RNA, 19 nt, Homo sapiens
  misc_RNA (1)...(19): siRNA sense strand
uggacaagaucauaacaga

SEQ ID NO: 179159 - RNA, 19 nt, Homo sapiens
  misc_RNA (1)...(19): siRNA sense strand
ugaaacaccuaaacagcau

SEQ ID NO: 179160 - RNA, 19 nt, Homo sapiens
  misc_RNA (1)...(19): siRNA sense strand
gaccggacggagauauuua

SEQ ID NO: 179161 - RNA, 19 nt, Homo sapiens
  misc_RNA (1)...(19): siRNA sense strand
gaauaaggaguaugaagag

SEQ ID NO: 179162 - RNA, 19 nt, Homo sapiens
  misc_RNA (1)...(19): siRNA sense strand
ggugucuacuguaauauuc

SEQ ID NO: 179163 - RNA, 19 nt, Homo sapiens
  misc_RNA (1)...(19): siRNA sense strand
caagaagcgcucugcugua

SEQ ID NO: 179164 - RNA, 19 nt, Homo sapiens
  misc_RNA (1)...(19): siRNA sense strand
gcagcacuccauuuauauu

SEQ ID NO: 179165 - RNA, 19 nt, Homo sapiens
  misc_RNA (1)...(19): siRNA sense strand
gauugugacuuagaagaug

SEQ ID NO: 179166 - RNA, 19 nt, Homo sapiens
  misc_RNA (1)...(19): siRNA sense strand
gaaaaguauuccaagagaa

SEQ ID NO: 179167 - RNA, 19 nt, Homo sapiens
  misc_RNA (1)...(19): siRNA sense strand
acuuacugcucauucauua

SEQ ID NO: 179168 - RNA, 19 nt, Homo sapiens
  misc_RNA (1)...(19): siRNA sense strand
ugauaccucuuuccaugaa

SEQ ID NO: 179169 - RNA, 19 nt, Homo sapiens
  misc_RNA (1)...(19): siRNA sense strand
uacauggugucgcaaauga

SEQ ID NO: 179170 - RNA, 19 nt, Homo sapiens
  misc_RNA (1)...(19): siRNA sense strand
acaacaggacauaaaguua

SEQ ID NO: 179171 - RNA, 19 nt, Homo sapiens
  misc_RNA (1)...(19): siRNA sense strand
guaugaagaguauguucua

SEQ ID NO: 179172 - RNA, 19 nt, Homo sapiens
  misc_RNA (1)...(19): siRNA sense strand
gaagaaccaccaaaguuac

SEQ ID NO: 179173 - RNA, 19 nt, Homo sapiens
  misc_RNA (1)...(19): siRNA sense strand
gagcacaucuggaagaaga

SEQ ID NO: 179174 - RNA, 19 nt, Homo sapiens
  misc_RNA (1)...(19): siRNA sense strand
gagcgaagcccuuuccaua

SEQ ID NO: 179175 - RNA, 19 nt, Homo sapiens
  misc_RNA (1)...(19): siRNA sense strand
gcaccuguauucugucuuu

SEQ ID NO: 179176 - RNA, 19 nt, Homo sapiens
  misc_RNA (1)...(19): siRNA sense strand
ggacaacauuggcuacuug

SEQ ID NO: 179177 - RNA, 19 nt, Homo sapiens
  misc_RNA (1)...(19): siRNA sense strand
gagcucaccuaccuuauug

SEQ ID NO: 179178 - RNA, 19 nt, Homo sapiens
  misc_RNA (1)...(19): siRNA sense strand
ggacaaagcccaggaagug

SEQ ID NO: 179179 - RNA, 19 nt, Homo sapiens
  misc_RNA (1)...(19): siRNA sense strand
ggaagcugguggcugauaa

SEQ ID NO: 179180 - RNA, 19 nt, Homo sapiens
  misc_RNA (1)...(19): siRNA sense strand
gcugguggcugauaacuau

SEQ ID NO: 179181 - RNA, 19 nt, Homo sapiens
  misc_RNA (1)...(19): siRNA sense strand
gcacacggaugccaugauc

SEQ ID NO: 179182 - RNA, 19 nt, Homo sapiens
  misc_RNA (1)...(19): siRNA sense strand
ggaguucgccuuccuuaug

SEQ ID NO: 179183 - RNA, 19 nt, Homo sapiens
  misc_RNA (1)...(19): siRNA sense strand
gcggaggaguucaccuaua

SEQ ID NO: 179184 - RNA, 19 nt, Homo sapiens
  misc_RNA (1)...(19): siRNA sense strand
gaccaccgcuugcuagugu

SEQ ID NO: 179185 - RNA, 19 nt, Homo sapiens
  misc_RNA (1)...(19): siRNA sense strand
ggacaucgcgcacauccuu

SEQ ID NO: 179186 - RNA, 19 nt, Homo sapiens
  misc_RNA (1)...(19): siRNA sense strand
gaggagcucaccuaccuua

SEQ ID NO: 179187 - RNA, 19 nt, Homo sapiens
  misc_RNA (1)...(19): siRNA sense strand
gcucugcuccuacuucuuu

SEQ ID NO: 179188 - RNA, 19 nt, Homo sapiens
  misc_RNA (1)...(19): siRNA sense strand
gaguucaccuauaucauga

SEQ ID NO: 179189 - RNA, 19 nt, Homo sapiens
  misc_RNA (1)...(19): siRNA sense strand
ggaguucaccuauaucaug

SEQ ID NO: 179190 - RNA, 19 nt, Homo sapiens
  misc_RNA (1)...(19): siRNA sense strand
cggaggaguucaccuauau

SEQ ID NO: 179191 - RNA, 19 nt, Homo sapiens
  misc_RNA (1)...(19): siRNA sense strand
gaugaaggcccuccaguuc

SEQ ID NO: 179192 - RNA, 19 nt, Homo sapiens
  misc_RNA (1)...(19): siRNA sense strand
gcuccuacuucuuugauga

SEQ ID NO: 179193 - RNA, 19 nt, Homo sapiens
  misc_RNA (1)...(19): siRNA sense strand
gguuguaggugaacgcuau

SEQ ID NO: 179194 - RNA, 19 nt, Homo sapiens
  misc_RNA (1)...(19): siRNA sense strand
ggagcucaccuaccuuauu

SEQ ID NO: 179195 - RNA, 19 nt, Homo sapiens
  misc_RNA (1)...(19): siRNA sense strand
ucaccagccucucagaaga

SEQ ID NO: 179196 - RNA, 19 nt, Homo sapiens
  misc_RNA (1)...(19): siRNA sense strand
gccagcaccuguauucugu

SEQ ID NO: 179197 - RNA, 19 nt, Homo sapiens
  misc_RNA (1)...(19): siRNA sense strand
ccacggagaucuggaccuu

SEQ ID NO: 179198 - RNA, 19 nt, Homo sapiens
  misc_RNA (1)...(19): siRNA sense strand
gccaugagauucugagcau

SEQ ID NO: 179199 - RNA, 19 nt, Homo sapiens
  misc_RNA (1)...(19): siRNA sense strand
ucaccuauaucaugaagag

SEQ ID NO: 179200 - RNA, 19 nt, Homo sapiens
  misc_RNA (1)...(19): siRNA sense strand
caagauggccaccaaacug

SEQ ID NO: 179201 - RNA, 19 nt, Homo sapiens
  misc_RNA (1)...(19): siRNA sense strand
caucaagagccaugagauu

SEQ ID NO: 179202 - RNA, 19 nt, Homo sapiens
  misc_RNA (1)...(19): siRNA sense strand
cagaggagcucaccuaccu

SEQ ID NO: 179203 - RNA, 19 nt, Homo sapiens
  misc_RNA (1)...(19): siRNA sense strand
gcgaagcccuuuccauagc

SEQ ID NO: 179204 - RNA, 19 nt, Homo sapiens
  misc_RNA (1)...(19): siRNA sense strand
uaccugcgcuucgauaguu

SEQ ID NO: 179205 - RNA, 19 nt, Homo sapiens
  misc_RNA (1)...(19): siRNA sense strand
ggacacacgcccagguugu

SEQ ID NO: 179206 - RNA, 19 nt, Homo sapiens
  misc_RNA (1)...(19): siRNA sense strand
gaauugugcccaugcagau

SEQ ID NO: 179207 - RNA, 19 nt, Homo sapiens
  misc_RNA (1)...(19): siRNA sense strand
gaggaguucaccuauauca

SEQ ID NO: 179208 - RNA, 19 nt, Homo sapiens
  misc_RNA (1)...(19): siRNA sense strand
ucagugaacucuggacaca

SEQ ID NO: 179209 - RNA, 19 nt, Homo sapiens
  misc_RNA (1)...(19): siRNA sense strand
ugaaggcccuccaguucug

SEQ ID NO: 179210 - RNA, 19 nt, Homo sapiens
  misc_RNA (1)...(19): siRNA sense strand
gcagaucccuuccccugaa

SEQ ID NO: 179211 - RNA, 19 nt, Homo sapiens
  misc_RNA (1)...(19): siRNA sense strand
caugggcaccuccgccuua

SEQ ID NO: 179212 - RNA, 19 nt, Homo sapiens
  misc_RNA (1)...(19): siRNA sense strand
gggcugaccugcagaugcu

SEQ ID NO: 179213 - RNA, 19 nt, Homo sapiens
  misc_RNA (1)...(19): siRNA sense strand
gcacguggacacuaucuac

SEQ ID NO: 179214 - RNA, 19 nt, Homo sapiens
  misc_RNA (1)...(19): siRNA sense strand
cggagcaccucaucaugga

SEQ ID NO: 179215 - RNA, 19 nt, Homo sapiens
  misc_RNA (1)...(19): siRNA sense strand
cuugagguuugacauguuu

SEQ ID NO: 179216 - RNA, 19 nt, Homo sapiens
  misc_RNA (1)...(19): siRNA sense strand
cuaacgugcuugaggacaa

SEQ ID NO: 179217 - RNA, 19 nt, Homo sapiens
  misc_RNA (1)...(19): siRNA sense strand
gaucgccgcaccaacauca

SEQ ID NO: 179218 - RNA, 19 nt, Homo sapiens
  misc_RNA (1)...(19): siRNA sense strand
caagagccaugagauucug

SEQ ID NO: 179219 - RNA, 19 nt, Homo sapiens
  misc_RNA (1)...(19): siRNA sense strand
cgcuauggcuccaagaaga

SEQ ID NO: 179220 - RNA, 19 nt, Homo sapiens
  misc_RNA (1)...(19): siRNA sense strand
gcccauaucccugagaaug

SEQ ID NO: 179221 - RNA, 19 nt, Homo sapiens
  misc_RNA (1)...(19): siRNA sense strand
ggacacggagcaccucauc

SEQ ID NO: 179222 - RNA, 19 nt, Homo sapiens
  misc_RNA (1)...(19): siRNA sense strand
uggagucucuggccucuca

SEQ ID NO: 179223 - RNA, 19 nt, Homo sapiens
  misc_RNA (1)...(19): siRNA sense strand
ucaccuucaucgacaauca

SEQ ID NO: 179224 - RNA, 19 nt, Homo sapiens
  misc_RNA (1)...(19): siRNA sense strand
ccacaagucccagcacuca

SEQ ID NO: 179225 - RNA, 19 nt, Homo sapiens
  misc_RNA (1)...(19): siRNA sense strand
acacaaggaccucuacauc

SEQ ID NO: 179226 - RNA, 19 nt, Homo sapiens
  misc_RNA (1)...(19): siRNA sense strand
cagcccauaucccugagaa

SEQ ID NO: 179227 - RNA, 19 nt, Homo sapiens
  misc_RNA (1)...(19): siRNA sense strand
gcagagcucccugaacgau

SEQ ID NO: 179228 - RNA, 19 nt, Homo sapiens
  misc_RNA (1)...(19): siRNA sense strand
gaagagcugaucaaguuuu

SEQ ID NO: 179229 - RNA, 19 nt, Homo sapiens
  misc_RNA (1)...(19): siRNA sense strand
cgaggaggcccuggacaaa

SEQ ID NO: 179230 - RNA, 19 nt, Homo sapiens
  misc_RNA (1)...(19): siRNA sense strand
guacggugccgacaaggau

SEQ ID NO: 179231 - RNA, 19 nt, Homo sapiens
  misc_RNA (1)...(19): siRNA sense strand
ggcauucccuacaucaucu

SEQ ID NO: 179232 - RNA, 19 nt, Homo sapiens
  misc_RNA (1)...(19): siRNA sense strand
aagaagagcauggucauuc

SEQ ID NO: 179233 - RNA, 19 nt, Homo sapiens
  misc_RNA (1)...(19): siRNA sense strand
gacacacgcccagguugua

SEQ ID NO: 179234 - RNA, 19 nt, Homo sapiens
  misc_RNA (1)...(19): siRNA sense strand
uuccauagcccaggacaua

SEQ ID NO: 179235 - RNA, 19 nt, Homo sapiens
  misc_RNA (1)...(19): siRNA sense strand
gaguucgccuuccuuaugc

SEQ ID NO: 179236 - RNA, 19 nt, Homo sapiens
  misc_RNA (1)...(19): siRNA sense strand
agaccuaccacguggauga

SEQ ID NO: 179237 - RNA, 19 nt, Homo sapiens
  misc_RNA (1)...(19): siRNA sense strand
gggaagcugguggcugaua

SEQ ID NO: 179238 - RNA, 19 nt, Homo sapiens
  misc_RNA (1)...(19): siRNA sense strand
gaauggguucugcucaugu

SEQ ID NO: 179239 - RNA, 19 nt, Homo sapiens
  misc_RNA (1)...(19): siRNA sense strand
acaaccagcugagggugaa

SEQ ID NO: 179240 - RNA, 19 nt, Homo sapiens
  misc_RNA (1)...(19): siRNA sense strand
gguugucccugcagaagag

SEQ ID NO: 179241 - RNA, 19 nt, Homo sapiens
  misc_RNA (1)...(19): siRNA sense strand
caagaagagcauggucauu

SEQ ID NO: 179242 - RNA, 19 nt, Homo sapiens
  misc_RNA (1)...(19): siRNA sense strand
cgacaugagguucaacauc

SEQ ID NO: 179243 - RNA, 19 nt, Homo sapiens
  misc_RNA (1)...(19): siRNA sense strand
uaugaucgccgcaccaaca

SEQ ID NO: 179244 - RNA, 19 nt, Homo sapiens
  misc_RNA (1)...(19): siRNA sense strand
gaagagcauggucauucug

SEQ ID NO: 179245 - RNA, 19 nt, Homo sapiens
  misc_RNA (1)...(19): siRNA sense strand
ccacccagauggccaugag

SEQ ID NO: 179246 - RNA, 19 nt, Homo sapiens
  misc_RNA (1)...(19): siRNA sense strand
gcuacaacccuggcagcua

SEQ ID NO: 179247 - RNA, 19 nt, Homo sapiens
  misc_RNA (1)...(19): siRNA sense strand
cauccuccauucccaucuu

SEQ ID NO: 179248 - RNA, 19 nt, Homo sapiens
  misc_RNA (1)...(19): siRNA sense strand
ugaugaaggcccuccaguu

SEQ ID NO: 179249 - RNA, 19 nt, Homo sapiens
  misc_RNA (1)...(19): siRNA sense strand
gacaucgcgcacauccuua

SEQ ID NO: 179250 - RNA, 19 nt, Homo sapiens
  misc_RNA (1)...(19): siRNA sense strand
cuugugcuccuacuucuuu

SEQ ID NO: 179251 - RNA, 19 nt, Homo sapiens
  misc_RNA (1)...(19): siRNA sense strand
caucuugugcuccuacuuc

SEQ ID NO: 179252 - RNA, 19 nt, Homo sapiens
  misc_RNA (1)...(19): siRNA sense strand
gacaacauuggcuacuuga

SEQ ID NO: 179253 - RNA, 19 nt, Homo sapiens
  misc_RNA (1)...(19): siRNA sense strand
gcucacacaaggaccucua

SEQ ID NO: 179254 - RNA, 19 nt, Homo sapiens
  misc_RNA (1)...(19): siRNA sense strand
ucauggaccugcgccacaa

SEQ ID NO: 179255 - RNA, 19 nt, Homo sapiens
  misc_RNA (1)...(19): siRNA sense strand
gcacugguggacucugugu

SEQ ID NO: 179256 - RNA, 19 nt, Homo sapiens
  misc_RNA (1)...(19): siRNA sense strand
ugaucgaccugcgcuacaa

SEQ ID NO: 179257 - RNA, 19 nt, Homo sapiens
  misc_RNA (1)...(19): siRNA sense strand
acacggagcaccucaucau

SEQ ID NO: 179258 - RNA, 19 nt, Homo sapiens
  misc_RNA (1)...(19): siRNA sense strand
ccgcggaggaguucaccua

SEQ ID NO: 179259 - RNA, 19 nt, Homo sapiens
  misc_RNA (1)...(19): siRNA sense strand
ccaagaagagcauggucau

SEQ ID NO: 179260 - RNA, 19 nt, Homo sapiens
  misc_RNA (1)...(19): siRNA sense strand
uggagcacaucuggaagaa

SEQ ID NO: 179261 - RNA, 19 nt, Homo sapiens
  misc_RNA (1)...(19): siRNA sense strand
cagggugaccucagaagug

SEQ ID NO: 179262 - RNA, 19 nt, Homo sapiens
  misc_RNA (1)...(19): siRNA sense strand
aagauggccaccaaacuga

SEQ ID NO: 179263 - RNA, 19 nt, Homo sapiens
  misc_RNA (1)...(19): siRNA sense strand
gcgcuacggcucacacaag

SEQ ID NO: 179264 - RNA, 19 nt, Homo sapiens
  misc_RNA (1)...(19): siRNA sense strand
cuggcgagcuggugguaga

SEQ ID NO: 179265 - RNA, 19 nt, Homo sapiens
  misc_RNA (1)...(19): siRNA sense strand
agaaagcccuggccauccu

SEQ ID NO: 179266 - RNA, 19 nt, Homo sapiens
  misc_RNA (1)...(19): siRNA sense strand
guggagcacaucuggaaga

SEQ ID NO: 179267 - RNA, 19 nt, Homo sapiens
  misc_RNA (1)...(19): siRNA sense strand
gccgaggccuuugcacaca

SEQ ID NO: 179268 - RNA, 19 nt, Homo sapiens
  misc_RNA (1)...(19): siRNA sense strand
cagcaccuguauucugucu

SEQ ID NO: 179269 - RNA, 19 nt, Homo sapiens
  misc_RNA (1)...(19): siRNA sense strand
ggaugacaccaaccucuac

SEQ ID NO: 179270 - RNA, 19 nt, Homo sapiens
  misc_RNA (1)...(19): siRNA sense strand
caguucugcuggacaagau

SEQ ID NO: 179271 - RNA, 19 nt, Homo sapiens
  misc_RNA (1)...(19): siRNA sense strand
ugaagagcugaucaaguuu

SEQ ID NO: 179272 - RNA, 19 nt, Homo sapiens
  misc_RNA (1)...(19): siRNA sense strand
ugacagggccaccucaaaa

SEQ ID NO: 179273 - RNA, 19 nt, Homo sapiens
  misc_RNA (1)...(19): siRNA sense strand
gaaagggaauacucucuau

SEQ ID NO: 179274 - RNA, 19 nt, Homo sapiens
  misc_RNA (1)...(19): siRNA sense strand
caaagcagcuggugaaguc

SEQ ID NO: 179275 - RNA, 19 nt, Homo sapiens
  misc_RNA (1)...(19): siRNA sense strand
caacagagcaggcaaagca

SEQ ID NO: 179276 - RNA, 19 nt, Homo sapiens
  misc_RNA (1)...(19): siRNA sense strand
caaaguagcagcagcacaa

SEQ ID NO: 179277 - RNA, 19 nt, Homo sapiens
  misc_RNA (1)...(19): siRNA sense strand
ggaaagggaauacucucua

SEQ ID NO: 179278 - RNA, 19 nt, Homo sapiens
  misc_RNA (1)...(19): siRNA sense strand
cagccaagguggugucaaa

SEQ ID NO: 179279 - RNA, 19 nt, Homo sapiens
  misc_RNA (1)...(19): siRNA sense strand
ggacccagguggagucugu

SEQ ID NO: 179280 - RNA, 19 nt, Homo sapiens
  misc_RNA (1)...(19): siRNA sense strand
ggacacagccacagcaaca

SEQ ID NO: 179281 - RNA, 19 nt, Homo sapiens
  misc_RNA (1)...(19): siRNA sense strand
gaugacgucuacaaggaaa

SEQ ID NO: 179282 - RNA, 19 nt, Homo sapiens
  misc_RNA (1)...(19): siRNA sense strand
gaggaaaucucuguaugag

SEQ ID NO: 179283 - RNA, 19 nt, Homo sapiens
  misc_RNA (1)...(19): siRNA sense strand
gacaagaggacccagauug

SEQ ID NO: 179284 - RNA, 19 nt, Homo sapiens
  misc_RNA (1)...(19): siRNA sense strand
gcauaucugcugaugauga

SEQ ID NO: 179285 - RNA, 19 nt, Homo sapiens
  misc_RNA (1)...(19): siRNA sense strand
gugaugacgucuacaagga

SEQ ID NO: 179286 - RNA, 19 nt, Homo sapiens
  misc_RNA (1)...(19): siRNA sense strand
ggacccagauugucuacag

SEQ ID NO: 179287 - RNA, 19 nt, Homo sapiens
  misc_RNA (1)...(19): siRNA sense strand
cagauugucuacagugaug

SEQ ID NO: 179288 - RNA, 19 nt, Homo sapiens
  misc_RNA (1)...(19): siRNA sense strand
uaugagagcuuugugucuu

SEQ ID NO: 179289 - RNA, 19 nt, Homo sapiens
  misc_RNA (1)...(19): siRNA sense strand
ucauugaccucuccaugga

SEQ ID NO: 179290 - RNA, 19 nt, Homo sapiens
  misc_RNA (1)...(19): siRNA sense strand
gcucugaagaagcaaagua

SEQ ID NO: 179291 - RNA, 19 nt, Homo sapiens
  misc_RNA (1)...(19): siRNA sense strand
ggacaagaggacccagauu

SEQ ID NO: 179292 - RNA, 19 nt, Homo sapiens
  misc_RNA (1)...(19): siRNA sense strand
gaugaugaccugcaagagu

SEQ ID NO: 179293 - RNA, 19 nt, Homo sapiens
  misc_RNA (1)...(19): siRNA sense strand
aggaggcucugcagaagaa

SEQ ID NO: 179294 - RNA, 19 nt, Homo sapiens
  misc_RNA (1)...(19): siRNA sense strand
cuacagugaugacgucuac

SEQ ID NO: 179295 - RNA, 19 nt, Homo sapiens
  misc_RNA (1)...(19): siRNA sense strand
agggaauacucucuaugua

SEQ ID NO: 179296 - RNA, 19 nt, Homo sapiens
  misc_RNA (1)...(19): siRNA sense strand
gaagucaggagccaucagu

SEQ ID NO: 179297 - RNA, 19 nt, Homo sapiens
  misc_RNA (1)...(19): siRNA sense strand
gcagaagaaauucaacaag

SEQ ID NO: 179298 - RNA, 19 nt, Homo sapiens
  misc_RNA (1)...(19): siRNA sense strand
ugucaaacgcucacuauca

SEQ ID NO: 179299 - RNA, 19 nt, Homo sapiens
  misc_RNA (1)...(19): siRNA sense strand
caagaacucaggcuucaag

SEQ ID NO: 179300 - RNA, 19 nt, Homo sapiens
  misc_RNA (1)...(19): siRNA sense strand
agaccgggaucgagacaga

SEQ ID NO: 179301 - RNA, 19 nt, Homo sapiens
  misc_RNA (1)...(19): siRNA sense strand
gucaaacgcucacuaucag

SEQ ID NO: 179302 - RNA, 19 nt, Homo sapiens
  misc_RNA (1)...(19): siRNA sense strand
caacauagcccgaaaacag

SEQ ID NO: 179303 - RNA, 19 nt, Homo sapiens
  misc_RNA (1)...(19): siRNA sense strand
cagagcagccugucaugga

SEQ ID NO: 179304 - RNA, 19 nt, Homo sapiens
  misc_RNA (1)...(19): siRNA sense strand
ggacccacccagaaacugu

SEQ ID NO: 179305 - RNA, 19 nt, Homo sapiens
  misc_RNA (1)...(19): siRNA sense strand
agaagaaauucaacaagcu

SEQ ID NO: 179306 - RNA, 19 nt, Homo sapiens
  misc_RNA (1)...(19): siRNA sense strand
gcaaagcagcuggugaagu

SEQ ID NO: 179307 - RNA, 19 nt, Homo sapiens
  misc_RNA (1)...(19): siRNA sense strand
aggcauugcuggcucugaa

SEQ ID NO: 179308 - RNA, 19 nt, Homo sapiens
  misc_RNA (1)...(19): siRNA sense strand
gaaauucaacaagcucaag

SEQ ID NO: 179309 - RNA, 19 nt, Homo sapiens
  misc_RNA (1)...(19): siRNA sense strand
ggaucgagacagagacaga

SEQ ID NO: 179310 - RNA, 19 nt, Homo sapiens
  misc_RNA (1)...(19): siRNA sense strand
gugccuucgucaccuauga

SEQ ID NO: 179311 - RNA, 19 nt, Homo sapiens
  misc_RNA (1)...(19): siRNA sense strand
ccauggacccacccagaaa

SEQ ID NO: 179312 - RNA, 19 nt, Homo sapiens
  misc_RNA (1)...(19): siRNA sense strand
ggugucaaacgcucacuau

SEQ ID NO: 179313 - RNA, 19 nt, Homo sapiens
  misc_RNA (1)...(19): siRNA sense strand
gaggaggcucugcagaaga

SEQ ID NO: 179314 - RNA, 19 nt, Homo sapiens
  misc_RNA (1)...(19): siRNA sense strand
ucaaggcugagaccaagaa

SEQ ID NO: 179315 - RNA, 19 nt, Homo sapiens
  misc_RNA (1)...(19): siRNA sense strand
cuguacagcucaaagucaa

SEQ ID NO: 179316 - RNA, 19 nt, Homo sapiens
  misc_RNA (1)...(19): siRNA sense strand
aggcaaagcagcuggugaa

SEQ ID NO: 179317 - RNA, 19 nt, Homo sapiens
  misc_RNA (1)...(19): siRNA sense strand
aaagauggagucagcagau

SEQ ID NO: 179318 - RNA, 19 nt, Homo sapiens
  misc_RNA (1)...(19): siRNA sense strand
cgagaacuaggaccagaug

SEQ ID NO: 179319 - RNA, 19 nt, Homo sapiens
  misc_RNA (1)...(19): siRNA sense strand
uaucagagcagccugucau

SEQ ID NO: 179320 - RNA, 19 nt, Homo sapiens
  misc_RNA (1)...(19): siRNA sense strand
caagaggacccagauuguc

SEQ ID NO: 179321 - RNA, 19 nt, Homo sapiens
  misc_RNA (1)...(19): siRNA sense strand
aagggaauacucucuaugu

SEQ ID NO: 179322 - RNA, 19 nt, Homo sapiens
  misc_RNA (1)...(19): siRNA sense strand
cagcaacagagcaggcaaa

SEQ ID NO: 179323 - RNA, 19 nt, Homo sapiens
  misc_RNA (1)...(19): siRNA sense strand
cccagauugucuacaguga

SEQ ID NO: 179324 - RNA, 19 nt, Homo sapiens
  misc_RNA (1)...(19): siRNA sense strand
ccgcaggucggauucauuc

SEQ ID NO: 179325 - RNA, 19 nt, Homo sapiens
  misc_RNA (1)...(19): siRNA sense strand
agaggaaccgggacagaga

SEQ ID NO: 179326 - RNA, 19 nt, Homo sapiens
  misc_RNA (1)...(19): siRNA sense strand
gcauugcuggcucugaaga

SEQ ID NO: 179327 - RNA, 19 nt, Homo sapiens
  misc_RNA (1)...(19): siRNA sense strand
cauaucugcugaugaugac

SEQ ID NO: 179328 - RNA, 19 nt, Homo sapiens
  misc_RNA (1)...(19): siRNA sense strand
ccuuguggauggcuucuag

SEQ ID NO: 179329 - RNA, 19 nt, Homo sapiens
  misc_RNA (1)...(19): siRNA sense strand
accaagaacucaggcuuca

SEQ ID NO: 179330 - RNA, 19 nt, Homo sapiens
  misc_RNA (1)...(19): siRNA sense strand
gacccagauugucuacagu

SEQ ID NO: 179331 - RNA, 19 nt, Homo sapiens
  misc_RNA (1)...(19): siRNA sense strand
guacagcucaaagucaaca

SEQ ID NO: 179332 - RNA, 19 nt, Homo sapiens
  misc_RNA (1)...(19): siRNA sense strand
cagcacaaccagccaaggu

SEQ ID NO: 179333 - RNA, 19 nt, Homo sapiens
  misc_RNA (1)...(19): siRNA sense strand
acagugaugacgucuacaa

SEQ ID NO: 179334 - RNA, 19 nt, Homo sapiens
  misc_RNA (1)...(19): siRNA sense strand
acacagccacagcaacaga

SEQ ID NO: 179335 - RNA, 19 nt, Homo sapiens
  misc_RNA (1)...(19): siRNA sense strand
acagcucaaagucaacaua

SEQ ID NO: 179336 - RNA, 19 nt, Homo sapiens
  misc_RNA (1)...(19): siRNA sense strand
ggcauuaaguucagaauua

SEQ ID NO: 179337 - RNA, 19 nt, Homo sapiens
  misc_RNA (1)...(19): siRNA sense strand
gaaggaagccugauacuau

SEQ ID NO: 179338 - RNA, 19 nt, Homo sapiens
  misc_RNA (1)...(19): siRNA sense strand
cuacauggcuuaaacuaaa

SEQ ID NO: 179339 - RNA, 19 nt, Homo sapiens
  misc_RNA (1)...(19): siRNA sense strand
ggagugaaaucagaaauau

SEQ ID NO: 179340 - RNA, 19 nt, Homo sapiens
  misc_RNA (1)...(19): siRNA sense strand
cacaagaucuagaaaugua

SEQ ID NO: 179341 - RNA, 19 nt, Homo sapiens
  misc_RNA (1)...(19): siRNA sense strand
ugaauucacugccaagauu

SEQ ID NO: 179342 - RNA, 19 nt, Homo sapiens
  misc_RNA (1)...(19): siRNA sense strand
caauacaacuggcaaacaa

SEQ ID NO: 179343 - RNA, 19 nt, Homo sapiens
  misc_RNA (1)...(19): siRNA sense strand
gaacuggcaugaagaacau

SEQ ID NO: 179344 - RNA, 19 nt, Homo sapiens
  misc_RNA (1)...(19): siRNA sense strand
gaacaacacaaacuaacaa

SEQ ID NO: 179345 - RNA, 19 nt, Homo sapiens
  misc_RNA (1)...(19): siRNA sense strand
gaaagaauagaacgugaaa

SEQ ID NO: 179346 - RNA, 19 nt, Homo sapiens
  misc_RNA (1)...(19): siRNA sense strand
gaauaaugcugaagcuagu

SEQ ID NO: 179347 - RNA, 19 nt, Homo sapiens
  misc_RNA (1)...(19): siRNA sense strand
caaagcagcguaucgauga

SEQ ID NO: 179348 - RNA, 19 nt, Homo sapiens
  misc_RNA (1)...(19): siRNA sense strand
cagcaaagguuauucuaca

SEQ ID NO: 179349 - RNA, 19 nt, Homo sapiens
  misc_RNA (1)...(19): siRNA sense strand
gaacuauacaugcgaagaa

SEQ ID NO: 179350 - RNA, 19 nt, Homo sapiens
  misc_RNA (1)...(19): siRNA sense strand
ugaagcuagugcugaauua

SEQ ID NO: 179351 - RNA, 19 nt, Homo sapiens
  misc_RNA (1)...(19): siRNA sense strand
agaaagaacuagaagaaca

SEQ ID NO: 179352 - RNA, 19 nt, Homo sapiens
  misc_RNA (1)...(19): siRNA sense strand
ggaaagggcacaauuagag

SEQ ID NO: 179353 - RNA, 19 nt, Homo sapiens
  misc_RNA (1)...(19): siRNA sense strand
ccaaucaacguaagaguaa

SEQ ID NO: 179354 - RNA, 19 nt, Homo sapiens
  misc_RNA (1)...(19): siRNA sense strand
gggaaaccaugaacuauac

SEQ ID NO: 179355 - RNA, 19 nt, Homo sapiens
  misc_RNA (1)...(19): siRNA sense strand
gaagaaagaauacagaacu

SEQ ID NO: 179356 - RNA, 19 nt, Homo sapiens
  misc_RNA (1)...(19): siRNA sense strand
uguauggagucaacuauuu

SEQ ID NO: 179357 - RNA, 19 nt, Homo sapiens
  misc_RNA (1)...(19): siRNA sense strand
gggcacaauuagagaauga

SEQ ID NO: 179358 - RNA, 19 nt, Homo sapiens
  misc_RNA (1)...(19): siRNA sense strand
gagaauccuuuacaguuca

SEQ ID NO: 179359 - RNA, 19 nt, Homo sapiens
  misc_RNA (1)...(19): siRNA sense strand
gacgacaaguuaacaccua

SEQ ID NO: 179360 - RNA, 19 nt, Homo sapiens
  misc_RNA (1)...(19): siRNA sense strand
gcuaaauucuuuccugaag

SEQ ID NO: 179361 - RNA, 19 nt, Homo sapiens
  misc_RNA (1)...(19): siRNA sense strand
gaagaacguguaaccgaaa

SEQ ID NO: 179362 - RNA, 19 nt, Homo sapiens
  misc_RNA (1)...(19): siRNA sense strand
gugcugaauuaucaaauga

SEQ ID NO: 179363 - RNA, 19 nt, Homo sapiens
  misc_RNA (1)...(19): siRNA sense strand
ucagaaagaacuagaagaa

SEQ ID NO: 179364 - RNA, 19 nt, Homo sapiens
  misc_RNA (1)...(19): siRNA sense strand
ugaagaacauagaggaaug

SEQ ID NO: 179365 - RNA, 19 nt, Homo sapiens
  misc_RNA (1)...(19): siRNA sense strand
auacagaacuggcaugaag

SEQ ID NO: 179366 - RNA, 19 nt, Homo sapiens
  misc_RNA (1)...(19): siRNA sense strand
gcauuaaguucagaauuag

SEQ ID NO: 179367 - RNA, 19 nt, Homo sapiens
  misc_RNA (1)...(19): siRNA sense strand
gaaagggcacaauuagaga

SEQ ID NO: 179368 - RNA, 19 nt, Homo sapiens
  misc_RNA (1)...(19): siRNA sense strand
cgaagaaggaagccugaua

SEQ ID NO: 179369 - RNA, 19 nt, Homo sapiens
  misc_RNA (1)...(19): siRNA sense strand
gagcaugacgacaaguuaa

SEQ ID NO: 179370 - RNA, 19 nt, Homo sapiens
  misc_RNA (1)...(19): siRNA sense strand
caauuaaagcucagaaaga

SEQ ID NO: 179371 - RNA, 19 nt, Homo sapiens
  misc_RNA (1)...(19): siRNA sense strand
gaagagcagacaauuaaag

SEQ ID NO: 179372 - RNA, 19 nt, Homo sapiens
  misc_RNA (1)...(19): siRNA sense strand
gaagauguuucugaggaau

SEQ ID NO: 179373 - RNA, 19 nt, Homo sapiens
  misc_RNA (1)...(19): siRNA sense strand
gaagcagaacgacuugaaa

SEQ ID NO: 179374 - RNA, 19 nt, Homo sapiens
  misc_RNA (1)...(19): siRNA sense strand
uugaagagcagacaauuaa

SEQ ID NO: 179375 - RNA, 19 nt, Homo sapiens
  misc_RNA (1)...(19): siRNA sense strand
ggaaagaauagaacgugaa

SEQ ID NO: 179376 - RNA, 19 nt, Homo sapiens
  misc_RNA (1)...(19): siRNA sense strand
cuuugggucugaauauuua

SEQ ID NO: 179377 - RNA, 19 nt, Homo sapiens
  misc_RNA (1)...(19): siRNA sense strand
gagcuaauggaacgucuaa

SEQ ID NO: 179378 - RNA, 19 nt, Homo sapiens
  misc_RNA (1)...(19): siRNA sense strand
gcagcuagcagcagaacuu

SEQ ID NO: 179379 - RNA, 19 nt, Homo sapiens
  misc_RNA (1)...(19): siRNA sense strand
aaagaacagugggaagaaa

SEQ ID NO: 179380 - RNA, 19 nt, Homo sapiens
  misc_RNA (1)...(19): siRNA sense strand
guuggaaagggcacaauua

SEQ ID NO: 179381 - RNA, 19 nt, Homo sapiens
  misc_RNA (1)...(19): siRNA sense strand
gaagaaggaagccugauac

SEQ ID NO: 179382 - RNA, 19 nt, Homo sapiens
  misc_RNA (1)...(19): siRNA sense strand
agauguuucugaggaauua

SEQ ID NO: 179383 - RNA, 19 nt, Homo sapiens
  misc_RNA (1)...(19): siRNA sense strand
caaagucugccauagcaaa

SEQ ID NO: 179384 - RNA, 19 nt, Homo sapiens
  misc_RNA (1)...(19): siRNA sense strand
gaagaagcagaacgacuug

SEQ ID NO: 179385 - RNA, 19 nt, Homo sapiens
  misc_RNA (1)...(19): siRNA sense strand
aaggaagccugauacuauu

SEQ ID NO: 179386 - RNA, 19 nt, Homo sapiens
  misc_RNA (1)...(19): siRNA sense strand
gcaaagguuauucuacaug

SEQ ID NO: 179387 - RNA, 19 nt, Homo sapiens
  misc_RNA (1)...(19): siRNA sense strand
gaaaagagaaauagcagaa

SEQ ID NO: 179388 - RNA, 19 nt, Homo sapiens
  misc_RNA (1)...(19): siRNA sense strand
cuaccuggcuaaugauaga

SEQ ID NO: 179389 - RNA, 19 nt, Homo sapiens
  misc_RNA (1)...(19): siRNA sense strand
agagaauccuuuacaguuc

SEQ ID NO: 179390 - RNA, 19 nt, Homo sapiens
  misc_RNA (1)...(19): siRNA sense strand
gaauacagaacuggcauga

SEQ ID NO: 179391 - RNA, 19 nt, Homo sapiens
  misc_RNA (1)...(19): siRNA sense strand
uagaagaacagacucgaaa

SEQ ID NO: 179392 - RNA, 19 nt, Homo sapiens
  misc_RNA (1)...(19): siRNA sense strand
ccuuuacaguucaaguuua

SEQ ID NO: 179393 - RNA, 19 nt, Homo sapiens
  misc_RNA (1)...(19): siRNA sense strand
aaagaccaaagaagaguua

SEQ ID NO: 179394 - RNA, 19 nt, Homo sapiens
  misc_RNA (1)...(19): siRNA sense strand
gcacaauuagagaaugaaa

SEQ ID NO: 179395 - RNA, 19 nt, Homo sapiens
  misc_RNA (1)...(19): siRNA sense strand
gcacaagaucuagaaaugu

SEQ ID NO: 179396 - RNA, 19 nt, Homo sapiens
  misc_RNA (1)...(19): siRNA sense strand
uggaauaccugaagauugc

SEQ ID NO: 179397 - RNA, 19 nt, Homo sapiens
  misc_RNA (1)...(19): siRNA sense strand
ggaacaacacaaacuaaca

SEQ ID NO: 179398 - RNA, 19 nt, Homo sapiens
  misc_RNA (1)...(19): siRNA sense strand
aagagaauccuuuacaguu

SEQ ID NO: 179399 - RNA, 19 nt, Homo sapiens
  misc_RNA (1)...(19): siRNA sense strand
gaugaacacgaugagaaua

SEQ ID NO: 179400 - RNA, 19 nt, Homo sapiens
  misc_RNA (1)...(19): siRNA sense strand
gaagccugauacuauugaa

SEQ ID NO: 179401 - RNA, 19 nt, Homo sapiens
  misc_RNA (1)...(19): siRNA sense strand
gcaccucgucugagaauca

SEQ ID NO: 179402 - RNA, 19 nt, Homo sapiens
  misc_RNA (1)...(19): siRNA sense strand
gaaaccaaucaacguaaga

SEQ ID NO: 179403 - RNA, 19 nt, Homo sapiens
  misc_RNA (1)...(19): siRNA sense strand
ugaagauguuucugaggaa

SEQ ID NO: 179404 - RNA, 19 nt, Homo sapiens
  misc_RNA (1)...(19): siRNA sense strand
gaacagugggaagaaagaa

SEQ ID NO: 179405 - RNA, 19 nt, Homo sapiens
  misc_RNA (1)...(19): siRNA sense strand
gaacacgaugagaauaaug

SEQ ID NO: 179406 - RNA, 19 nt, Homo sapiens
  misc_RNA (1)...(19): siRNA sense strand
aaacgaacaugaugaacac

SEQ ID NO: 179407 - RNA, 19 nt, Homo sapiens
  misc_RNA (1)...(19): siRNA sense strand
ggaagccugauacuauuga

SEQ ID NO: 179408 - RNA, 19 nt, Homo sapiens
  misc_RNA (1)...(19): siRNA sense strand
aagaguaacuacaauggau

SEQ ID NO: 179409 - RNA, 19 nt, Homo sapiens
  misc_RNA (1)...(19): siRNA sense strand
ggagauuacaauaaagaga

SEQ ID NO: 179410 - RNA, 19 nt, Homo sapiens
  misc_RNA (1)...(19): siRNA sense strand
aagcaggccgugauaagua

SEQ ID NO: 179411 - RNA, 19 nt, Homo sapiens
  misc_RNA (1)...(19): siRNA sense strand
ccgaccagaugaagaauca

SEQ ID NO: 179412 - RNA, 19 nt, Homo sapiens
  misc_RNA (1)...(19): siRNA sense strand
aaaggaagagcuaauggaa

SEQ ID NO: 179413 - RNA, 19 nt, Homo sapiens
  misc_RNA (1)...(19): siRNA sense strand
ugcacaagaucuagaaaug

SEQ ID NO: 179414 - RNA, 19 nt, Homo sapiens
  misc_RNA (1)...(19): siRNA sense strand
gauggaauaccugaagauu

SEQ ID NO: 179415 - RNA, 19 nt, Homo sapiens
  misc_RNA (1)...(19): siRNA sense strand
ggaggauucuaugauggaa

SEQ ID NO: 179416 - RNA, 19 nt, Homo sapiens
  misc_RNA (1)...(19): siRNA sense strand
gggaagaaagaauacagaa

SEQ ID NO: 179417 - RNA, 19 nt, Homo sapiens
  misc_RNA (1)...(19): siRNA sense strand
gcguaucgaugaguuugaa

SEQ ID NO: 179418 - RNA, 19 nt, Homo sapiens
  misc_RNA (1)...(19): siRNA sense strand
agaagaagcagaacgacuu

SEQ ID NO: 179419 - RNA, 19 nt, Homo sapiens
  misc_RNA (1)...(19): siRNA sense strand
gaaagaacuagaagaacag

SEQ ID NO: 179420 - RNA, 19 nt, Homo sapiens
  misc_RNA (1)...(19): siRNA sense strand
gcuuugggucugaauauuu

SEQ ID NO: 179421 - RNA, 19 nt, Homo sapiens
  misc_RNA (1)...(19): siRNA sense strand
gcuagguguugaugcuuug

SEQ ID NO: 179422 - RNA, 19 nt, Homo sapiens
  misc_RNA (1)...(19): siRNA sense strand
cgaaaccaaucaacguaag

SEQ ID NO: 179423 - RNA, 19 nt, Homo sapiens
  misc_RNA (1)...(19): siRNA sense strand
guuaaagcaggccgugaua

SEQ ID NO: 179424 - RNA, 19 nt, Homo sapiens
  misc_RNA (1)...(19): siRNA sense strand
aaaaugagcguguuaagaa

SEQ ID NO: 179425 - RNA, 19 nt, Homo sapiens
  misc_RNA (1)...(19): siRNA sense strand
gcugaauuaucaaaugaag

SEQ ID NO: 179426 - RNA, 19 nt, Homo sapiens
  misc_RNA (1)...(19): siRNA sense strand
uagaggaagccaagaagaa

SEQ ID NO: 179427 - RNA, 19 nt, Homo sapiens
  misc_RNA (1)...(19): siRNA sense strand
gaauagaacgugaaaagga

SEQ ID NO: 179428 - RNA, 19 nt, Homo sapiens
  misc_RNA (1)...(19): siRNA sense strand
agaaacaucagaagcaguu

SEQ ID NO: 179429 - RNA, 19 nt, Homo sapiens
  misc_RNA (1)...(19): siRNA sense strand
ugggaaaccaugaacuaua

SEQ ID NO: 179430 - RNA, 19 nt, Homo sapiens
  misc_RNA (1)...(19): siRNA sense strand
ggcuagguguugaugcuuu

SEQ ID NO: 179431 - RNA, 19 nt, Homo sapiens
  misc_RNA (1)...(19): siRNA sense strand
agaaauguauggagucaac

SEQ ID NO: 179432 - RNA, 19 nt, Homo sapiens
  misc_RNA (1)...(19): siRNA sense strand
guagacagcaaagguuauu

SEQ ID NO: 179433 - RNA, 19 nt, Homo sapiens
  misc_RNA (1)...(19): siRNA sense strand
gagaauaaugcugaagcua

SEQ ID NO: 179434 - RNA, 19 nt, Homo sapiens
  misc_RNA (1)...(19): siRNA sense strand
agaacuggaucaagaacga

SEQ ID NO: 179435 - RNA, 19 nt, Homo sapiens
  misc_RNA (1)...(19): siRNA sense strand
caucagaagcaguuggaaa

SEQ ID NO: 179436 - RNA, 19 nt, Homo sapiens
  misc_RNA (1)...(19): siRNA sense strand
caaggucccugauaauuau

SEQ ID NO: 179437 - RNA, 19 nt, Homo sapiens
  misc_RNA (1)...(19): siRNA sense strand
agagagagcugcugaugaa

SEQ ID NO: 179438 - RNA, 19 nt, Homo sapiens
  misc_RNA (1)...(19): siRNA sense strand
gcuccuaccuggugcagua

SEQ ID NO: 179439 - RNA, 19 nt, Homo sapiens
  misc_RNA (1)...(19): siRNA sense strand
ucaaggucccugauaauua

SEQ ID NO: 179440 - RNA, 19 nt, Homo sapiens
  misc_RNA (1)...(19): siRNA sense strand
ggaagucgaccuccuuuga

SEQ ID NO: 179441 - RNA, 19 nt, Homo sapiens
  misc_RNA (1)...(19): siRNA sense strand
caagauaacaucacuguca

SEQ ID NO: 179442 - RNA, 19 nt, Homo sapiens
  misc_RNA (1)...(19): siRNA sense strand
gcagccacauuguaaauca

SEQ ID NO: 179443 - RNA, 19 nt, Homo sapiens
  misc_RNA (1)...(19): siRNA sense strand
ggaagcuggucaacacuau

SEQ ID NO: 179444 - RNA, 19 nt, Homo sapiens
  misc_RNA (1)...(19): siRNA sense strand
caaagcagccgcucuggaa

SEQ ID NO: 179445 - RNA, 19 nt, Homo sapiens
  misc_RNA (1)...(19): siRNA sense strand
gaagaagacaccuauuaca

SEQ ID NO: 179446 - RNA, 19 nt, Homo sapiens
  misc_RNA (1)...(19): siRNA sense strand
gaggagcuguggaaggaaa

SEQ ID NO: 179447 - RNA, 19 nt, Homo sapiens
  misc_RNA (1)...(19): siRNA sense strand
caacggacguggaaauacu

SEQ ID NO: 179448 - RNA, 19 nt, Homo sapiens
  misc_RNA (1)...(19): siRNA sense strand
gaagaucaccacgaaguug

SEQ ID NO: 179449 - RNA, 19 nt, Homo sapiens
  misc_RNA (1)...(19): siRNA sense strand
gcucgcagacucucacuuu

SEQ ID NO: 179450 - RNA, 19 nt, Homo sapiens
  misc_RNA (1)...(19): siRNA sense strand
gagccagccuucccagaug

SEQ ID NO: 179451 - RNA, 19 nt, Homo sapiens
  misc_RNA (1)...(19): siRNA sense strand
gagaagaucaccacgaagu

SEQ ID NO: 179452 - RNA, 19 nt, Homo sapiens
  misc_RNA (1)...(19): siRNA sense strand
agacaguccuggagugcua

SEQ ID NO: 179453 - RNA, 19 nt, Homo sapiens
  misc_RNA (1)...(19): siRNA sense strand
uggagaagaucaccacgaa

SEQ ID NO: 179454 - RNA, 19 nt, Homo sapiens
  misc_RNA (1)...(19): siRNA sense strand
auaaaccgauguucuucua

SEQ ID NO: 179455 - RNA, 19 nt, Homo sapiens
  misc_RNA (1)...(19): siRNA sense strand
gagaaucgccuacuucacu

SEQ ID NO: 179456 - RNA, 19 nt, Homo sapiens
  misc_RNA (1)...(19): siRNA sense strand
cgaggaagaugaagaagac

SEQ ID NO: 179457 - RNA, 19 nt, Homo sapiens
  misc_RNA (1)...(19): siRNA sense strand
gaguuuaaaucacaaaucg

SEQ ID NO: 179458 - RNA, 19 nt, Homo sapiens
  misc_RNA (1)...(19): siRNA sense strand
gaccugggccuuaacaaga

SEQ ID NO: 179459 - RNA, 19 nt, Homo sapiens
  misc_RNA (1)...(19): siRNA sense strand
ggugggaccugggccuuaa

SEQ ID NO: 179460 - RNA, 19 nt, Homo sapiens
  misc_RNA (1)...(19): siRNA sense strand
gauccugccugcgugguuu

SEQ ID NO: 179461 - RNA, 19 nt, Homo sapiens
  misc_RNA (1)...(19): siRNA sense strand
ccagacccaugaccagauu

SEQ ID NO: 179462 - RNA, 19 nt, Homo sapiens
  misc_RNA (1)...(19): siRNA sense strand
cgaaggcacuaucaaagca

SEQ ID NO: 179463 - RNA, 19 nt, Homo sapiens
  misc_RNA (1)...(19): siRNA sense strand
gguauggcgucaucauugu

SEQ ID NO: 179464 - RNA, 19 nt, Homo sapiens
  misc_RNA (1)...(19): siRNA sense strand
gagagagagcugcugauga

SEQ ID NO: 179465 - RNA, 19 nt, Homo sapiens
  misc_RNA (1)...(19): siRNA sense strand
ucacuuugcccaagacuga

SEQ ID NO: 179466 - RNA, 19 nt, Homo sapiens
  misc_RNA (1)...(19): siRNA sense strand
agaagagaaucgccuacuu

SEQ ID NO: 179467 - RNA, 19 nt, Homo sapiens
  misc_RNA (1)...(19): siRNA sense strand
gaagcgcaccgcagagaga

SEQ ID NO: 179468 - RNA, 19 nt, Homo sapiens
  misc_RNA (1)...(19): siRNA sense strand
cagcggaucgugugaagaa

SEQ ID NO: 179469 - RNA, 19 nt, Homo sapiens
  misc_RNA (1)...(19): siRNA sense strand
augaagaagacaccuauua

SEQ ID NO: 179470 - RNA, 19 nt, Homo sapiens
  misc_RNA (1)...(19): siRNA sense strand
cauccaacaucuucuacga

SEQ ID NO: 179471 - RNA, 19 nt, Homo sapiens
  misc_RNA (1)...(19): siRNA sense strand
uggaggagcuguggaagga

SEQ ID NO: 179472 - RNA, 19 nt, Homo sapiens
  misc_RNA (1)...(19): siRNA sense strand
caacgagcaccaaggcauu

SEQ ID NO: 179473 - RNA, 19 nt, Homo sapiens
  misc_RNA (1)...(19): siRNA sense strand
ggaccagauuggcaucauc

SEQ ID NO: 179474 - RNA, 19 nt, Homo sapiens
  misc_RNA (1)...(19): siRNA sense strand
ccgaaggcauccugcagaa

SEQ ID NO: 179475 - RNA, 19 nt, Homo sapiens
  misc_RNA (1)...(19): siRNA sense strand
ugacggggcugucccagua

SEQ ID NO: 179476 - RNA, 19 nt, Homo sapiens
  misc_RNA (1)...(19): siRNA sense strand
uuaccuuggugacgaguuu

SEQ ID NO: 179477 - RNA, 19 nt, Homo sapiens
  misc_RNA (1)...(19): siRNA sense strand
cgucacagcccuucucuca

SEQ ID NO: 179478 - RNA, 19 nt, Homo sapiens
  misc_RNA (1)...(19): siRNA sense strand
ugaagacugugcugcaaag

SEQ ID NO: 179479 - RNA, 19 nt, Homo sapiens
  misc_RNA (1)...(19): siRNA sense strand
cauuguaaaucaccuugug

SEQ ID NO: 179480 - RNA, 19 nt, Homo sapiens
  misc_RNA (1)...(19): siRNA sense strand
gcaguuccgcuccauuuua

SEQ ID NO: 179481 - RNA, 19 nt, Homo sapiens
  misc_RNA (1)...(19): siRNA sense strand
guaauaccagcaagaagug

SEQ ID NO: 179482 - RNA, 19 nt, Homo sapiens
  misc_RNA (1)...(19): siRNA sense strand
gcccaguggugaugugcaa

SEQ ID NO: 179483 - RNA, 19 nt, Homo sapiens
  misc_RNA (1)...(19): siRNA sense strand
cggcacagcagaucaacaa

SEQ ID NO: 179484 - RNA, 19 nt, Homo sapiens
  misc_RNA (1)...(19): siRNA sense strand
ccgauaaaccgauguucuu

SEQ ID NO: 179485 - RNA, 19 nt, Homo sapiens
  misc_RNA (1)...(19): siRNA sense strand
ggaccugggccuuaacaag

SEQ ID NO: 179486 - RNA, 19 nt, Homo sapiens
  misc_RNA (1)...(19): siRNA sense strand
ccauacacgccugcaguua

SEQ ID NO: 179487 - RNA, 19 nt, Homo sapiens
  misc_RNA (1)...(19): siRNA sense strand
ugaccacagccauguauga

SEQ ID NO: 179488 - RNA, 19 nt, Homo sapiens
  misc_RNA (1)...(19): siRNA sense strand
ucaggaacauggacagcau

SEQ ID NO: 179489 - RNA, 19 nt, Homo sapiens
  misc_RNA (1)...(19): siRNA sense strand
uguccuggcuggucaagau

SEQ ID NO: 179490 - RNA, 19 nt, Homo sapiens
  misc_RNA (1)...(19): siRNA sense strand
ugaagaagacaccuauuac

SEQ ID NO: 179491 - RNA, 19 nt, Homo sapiens
  misc_RNA (1)...(19): siRNA sense strand
ugacgaguuuaaaucacaa

SEQ ID NO: 179492 - RNA, 19 nt, Homo sapiens
  misc_RNA (1)...(19): siRNA sense strand
cgaaggaccuccccauaca

SEQ ID NO: 179493 - RNA, 19 nt, Homo sapiens
  misc_RNA (1)...(19): siRNA sense strand
gaccagauuggcaugauca

SEQ ID NO: 179494 - RNA, 19 nt, Homo sapiens
  misc_RNA (1)...(19): siRNA sense strand
gaccagauuggcaucauca

SEQ ID NO: 179495 - RNA, 19 nt, Homo sapiens
  misc_RNA (1)...(19): siRNA sense strand
gagauaugccugcgguaca

SEQ ID NO: 179496 - RNA, 19 nt, Homo sapiens
  misc_RNA (1)...(19): siRNA sense strand
caagacugacucugacaug

SEQ ID NO: 179497 - RNA, 19 nt, Homo sapiens
  misc_RNA (1)...(19): siRNA sense strand
cgaggacgccuaccaguac

SEQ ID NO: 179498 - RNA, 19 nt, Homo sapiens
  misc_RNA (1)...(19): siRNA sense strand
cugcgaacguggagaagau

SEQ ID NO: 179499 - RNA, 19 nt, Homo sapiens
  misc_RNA (1)...(19): siRNA sense strand
ugaagaagggauuugacuu

SEQ ID NO: 179500 - RNA, 19 nt, Homo sapiens
  misc_RNA (1)...(19): siRNA sense strand
agauaugccugcgguacaa

SEQ ID NO: 179501 - RNA, 19 nt, Homo sapiens
  misc_RNA (1)...(19): siRNA sense strand
gaaucgccuacuucacuuu

SEQ ID NO: 179502 - RNA, 19 nt, Homo sapiens
  misc_RNA (1)...(19): siRNA sense strand
agaaucgccuacuucacuu

SEQ ID NO: 179503 - RNA, 19 nt, Homo sapiens
  misc_RNA (1)...(19): siRNA sense strand
ggccuuaacaagaagagaa

SEQ ID NO: 179504 - RNA, 19 nt, Homo sapiens
  misc_RNA (1)...(19): siRNA sense strand
gaugaagaagacaccuauu

SEQ ID NO: 179505 - RNA, 19 nt, Homo sapiens
  misc_RNA (1)...(19): siRNA sense strand
uggaccagcuaacggagaa

SEQ ID NO: 179506 - RNA, 19 nt, Homo sapiens
  misc_RNA (1)...(19): siRNA sense strand
ggacguggaaauacuucug

SEQ ID NO: 179507 - RNA, 19 nt, Homo sapiens
  misc_RNA (1)...(19): siRNA sense strand
ucucacaggacuccacgua

SEQ ID NO: 179508 - RNA, 19 nt, Homo sapiens
  misc_RNA (1)...(19): siRNA sense strand
ccaggacaguuaccuuggu

SEQ ID NO: 179509 - RNA, 19 nt, Homo sapiens
  misc_RNA (1)...(19): siRNA sense strand
cacggaagcuggucaacac

SEQ ID NO: 179510 - RNA, 19 nt, Homo sapiens
  misc_RNA (1)...(19): siRNA sense strand
uguaauaccagcaagaagu

SEQ ID NO: 179511 - RNA, 19 nt, Homo sapiens
  misc_RNA (1)...(19): siRNA sense strand
gauaaaccgauguucuucu

SEQ ID NO: 179512 - RNA, 19 nt, Homo sapiens
  misc_RNA (1)...(19): siRNA sense strand
aaacguuugccguggauga

SEQ ID NO: 179513 - RNA, 19 nt, Homo sapiens
  misc_RNA (1)...(19): siRNA sense strand
gaaaacguuugccguggau

SEQ ID NO: 179514 - RNA, 19 nt, Homo sapiens
  misc_RNA (1)...(19): siRNA sense strand
gccaagaccagccaguugu

SEQ ID NO: 179515 - RNA, 19 nt, Homo sapiens
  misc_RNA (1)...(19): siRNA sense strand
acacacagggcuccgaguu

SEQ ID NO: 179516 - RNA, 19 nt, Homo sapiens
  misc_RNA (1)...(19): siRNA sense strand
uggaggacguaaucaucaa

SEQ ID NO: 179517 - RNA, 19 nt, Homo sapiens
  misc_RNA (1)...(19): siRNA sense strand
cacagcagaucaacaagcu

SEQ ID NO: 179518 - RNA, 19 nt, Homo sapiens
  misc_RNA (1)...(19): siRNA sense strand
cgugaagacugugcugcaa

SEQ ID NO: 179519 - RNA, 19 nt, Homo sapiens
  misc_RNA (1)...(19): siRNA sense strand
gaagucgaccuccuuugac

SEQ ID NO: 179520 - RNA, 19 nt, Homo sapiens
  misc_RNA (1)...(19): siRNA sense strand
gaucggccacgucaucaag

SEQ ID NO: 179521 - RNA, 19 nt, Homo sapiens
  misc_RNA (1)...(19): siRNA sense strand
gguggaggacguaaucauc

SEQ ID NO: 179522 - RNA, 19 nt, Homo sapiens
  misc_RNA (1)...(19): siRNA sense strand
gaccacagccauguaugau

SEQ ID NO: 179523 - RNA, 19 nt, Homo sapiens
  misc_RNA (1)...(19): siRNA sense strand
ccaagaccagccaguuguu

SEQ ID NO: 179524 - RNA, 19 nt, Homo sapiens
  misc_RNA (1)...(19): siRNA sense strand
caagaccagccaguuguug

SEQ ID NO: 179525 - RNA, 19 nt, Homo sapiens
  misc_RNA (1)...(19): siRNA sense strand
gugaagacugugcugcaaa

SEQ ID NO: 179526 - RNA, 19 nt, Homo sapiens
  misc_RNA (1)...(19): siRNA sense strand
guggaggacguaaucauca

SEQ ID NO: 179527 - RNA, 19 nt, Homo sapiens
  misc_RNA (1)...(19): siRNA sense strand
acgaggagccgcagcaugu

SEQ ID NO: 179528 - RNA, 19 nt, Homo sapiens
  misc_RNA (1)...(19): siRNA sense strand
caguuccgcuccauuuuaa

SEQ ID NO: 179529 - RNA, 19 nt, Homo sapiens
  misc_RNA (1)...(19): siRNA sense strand
gcaacggacguggaaauac

SEQ ID NO: 179530 - RNA, 19 nt, Homo sapiens
  misc_RNA (1)...(19): siRNA sense strand
ggaggccgacuacgacaag

SEQ ID NO: 179531 - RNA, 19 nt, Homo sapiens
  misc_RNA (1)...(19): siRNA sense strand
ccagguuuaugccgugaag

SEQ ID NO: 179532 - RNA, 19 nt, Homo sapiens
  misc_RNA (1)...(19): siRNA sense strand
ugaccagauuggcaugauc

SEQ ID NO: 179533 - RNA, 19 nt, Homo sapiens
  misc_RNA (1)...(19): siRNA sense strand
caucccaggcuccgucuau

SEQ ID NO: 179534 - RNA, 19 nt, Homo sapiens
  misc_RNA (1)...(19): siRNA sense strand
gagagccucaugcaguuca

SEQ ID NO: 179535 - RNA, 19 nt, Homo sapiens
  misc_RNA (1)...(19): siRNA sense strand
gaagacugugcugcaaaga

SEQ ID NO: 179536 - RNA, 19 nt, Homo sapiens
  misc_RNA (1)...(19): siRNA sense strand
caacacaggcguauacuga

SEQ ID NO: 179537 - RNA, 19 nt, Homo sapiens
  misc_RNA (1)...(19): siRNA sense strand
gcagugccagccagucuua

SEQ ID NO: 179538 - RNA, 19 nt, Homo sapiens
  misc_RNA (1)...(19): siRNA sense strand
gcagaacaccgcacagauc

SEQ ID NO: 179539 - RNA, 19 nt, Homo sapiens
  misc_RNA (1)...(19): siRNA sense strand
gagccucccugacuucaca

SEQ ID NO: 179540 - RNA, 19 nt, Homo sapiens
  misc_RNA (1)...(19): siRNA sense strand
cgacaaagacgaggaggaa

SEQ ID NO: 179541 - RNA, 19 nt, Homo sapiens
  misc_RNA (1)...(19): siRNA sense strand
gauccaaggcggcuacaug

SEQ ID NO: 179542 - RNA, 19 nt, Homo sapiens
  misc_RNA (1)...(19): siRNA sense strand
caagcgauccggaacuuug

SEQ ID NO: 179543 - RNA, 19 nt, Homo sapiens
  misc_RNA (1)...(19): siRNA sense strand
ccagccaggugcaguaugu

SEQ ID NO: 179544 - RNA, 19 nt, Homo sapiens
  misc_RNA (1)...(19): siRNA sense strand
ggaacacugugaggccauu

SEQ ID NO: 179545 - RNA, 19 nt, Homo sapiens
  misc_RNA (1)...(19): siRNA sense strand
ccucuacugccacuacuua

SEQ ID NO: 179546 - RNA, 19 nt, Homo sapiens
  misc_RNA (1)...(19): siRNA sense strand
gagaagcgacugcccaaag

SEQ ID NO: 179547 - RNA, 19 nt, Homo sapiens
  misc_RNA (1)...(19): siRNA sense strand
ccgcacagaucaaccagau

SEQ ID NO: 179548 - RNA, 19 nt, Homo sapiens
  misc_RNA (1)...(19): siRNA sense strand
ggaccaagcacugugacaa

SEQ ID NO: 179549 - RNA, 19 nt, Homo sapiens
  misc_RNA (1)...(19): siRNA sense strand
gcagcaguaccagcaauuu

SEQ ID NO: 179550 - RNA, 19 nt, Homo sapiens
  misc_RNA (1)...(19): siRNA sense strand
caaagacgaggaggaagaa

SEQ ID NO: 179551 - RNA, 19 nt, Homo sapiens
  misc_RNA (1)...(19): siRNA sense strand
gcaacuccaaguaccacua

SEQ ID NO: 179552 - RNA, 19 nt, Homo sapiens
  misc_RNA (1)...(19): siRNA sense strand
ucaagcccauccagaagau

SEQ ID NO: 179553 - RNA, 19 nt, Homo sapiens
  misc_RNA (1)...(19): siRNA sense strand
gaacaccgcacagaucaac

SEQ ID NO: 179554 - RNA, 19 nt, Homo sapiens
  misc_RNA (1)...(19): siRNA sense strand
cagaacaccgcacagauca

SEQ ID NO: 179555 - RNA, 19 nt, Homo sapiens
  misc_RNA (1)...(19): siRNA sense strand
acaaagacgaggaggaaga

SEQ ID NO: 179556 - RNA, 19 nt, Homo sapiens
  misc_RNA (1)...(19): siRNA sense strand
gcucauccgcuccgucuuc

SEQ ID NO: 179557 - RNA, 19 nt, Homo sapiens
  misc_RNA (1)...(19): siRNA sense strand
cguggucacugucucugaa

SEQ ID NO: 179558 - RNA, 19 nt, Homo sapiens
  misc_RNA (1)...(19): siRNA sense strand
guggagacgcuguggaaga

SEQ ID NO: 179559 - RNA, 19 nt, Homo sapiens
  misc_RNA (1)...(19): siRNA sense strand
gcgcugugcugcagaacac

SEQ ID NO: 179560 - RNA, 19 nt, Homo sapiens
  misc_RNA (1)...(19): siRNA sense strand
gagcaggcaccuacgugau

SEQ ID NO: 179561 - RNA, 19 nt, Homo sapiens
  misc_RNA (1)...(19): siRNA sense strand
gugcagcaguaccagcaau

SEQ ID NO: 179562 - RNA, 19 nt, Homo sapiens
  misc_RNA (1)...(19): siRNA sense strand
gcucaagcccauccagaag

SEQ ID NO: 179563 - RNA, 19 nt, Homo sapiens
  misc_RNA (1)...(19): siRNA sense strand
agaccggcguuccuacuca

SEQ ID NO: 179564 - RNA, 19 nt, Homo sapiens
  misc_RNA (1)...(19): siRNA sense strand
gcucuacgacgaguacaug

SEQ ID NO: 179565 - RNA, 19 nt, Homo sapiens
  misc_RNA (1)...(19): siRNA sense strand
gcaacacaggcguauacug

SEQ ID NO: 179566 - RNA, 19 nt, Homo sapiens
  misc_RNA (1)...(19): siRNA sense strand
cccaagcgauccggaacuu

SEQ ID NO: 179567 - RNA, 19 nt, Homo sapiens
  misc_RNA (1)...(19): siRNA sense strand
gugacaacgugcuguacca

SEQ ID NO: 179568 - RNA, 19 nt, Homo sapiens
  misc_RNA (1)...(19): siRNA sense strand
ccacggagcacccucuacu

SEQ ID NO: 179569 - RNA, 19 nt, Homo sapiens
  misc_RNA (1)...(19): siRNA sense strand
cauccgcuccgucuucaug

SEQ ID NO: 179570 - RNA, 19 nt, Homo sapiens
  misc_RNA (1)...(19): siRNA sense strand
cagaagauggaaggcauga

SEQ ID NO: 179571 - RNA, 19 nt, Homo sapiens
  misc_RNA (1)...(19): siRNA sense strand
agaagcgacugcccaaagc

SEQ ID NO: 179572 - RNA, 19 nt, Homo sapiens
  misc_RNA (1)...(19): siRNA sense strand
gaccaagcacugugacaac

SEQ ID NO: 179573 - RNA, 19 nt, Homo sapiens
  misc_RNA (1)...(19): siRNA sense strand
gaaacagacuucaagauga

SEQ ID NO: 179574 - RNA, 19 nt, Homo sapiens
  misc_RNA (1)...(19): siRNA sense strand
gaacaacaacguauccuua

SEQ ID NO: 179575 - RNA, 19 nt, Homo sapiens
  misc_RNA (1)...(19): siRNA sense strand
ggaauuacuuugauacuca

SEQ ID NO: 179576 - RNA, 19 nt, Homo sapiens
  misc_RNA (1)...(19): siRNA sense strand
gaagauacacgucgcuuaa

SEQ ID NO: 179577 - RNA, 19 nt, Homo sapiens
  misc_RNA (1)...(19): siRNA sense strand
ggagggaauuacuuugaua

SEQ ID NO: 179578 - RNA, 19 nt, Homo sapiens
  misc_RNA (1)...(19): siRNA sense strand
caauuuagccugauagaaa

SEQ ID NO: 179579 - RNA, 19 nt, Homo sapiens
  misc_RNA (1)...(19): siRNA sense strand
gaacaauauuccacagaga

SEQ ID NO: 179580 - RNA, 19 nt, Homo sapiens
  misc_RNA (1)...(19): siRNA sense strand
gcagaugguuucacaggaa

SEQ ID NO: 179581 - RNA, 19 nt, Homo sapiens
  misc_RNA (1)...(19): siRNA sense strand
ccaaugccaugaacaauau

SEQ ID NO: 179582 - RNA, 19 nt, Homo sapiens
  misc_RNA (1)...(19): siRNA sense strand
caacguauccuuacacaga

SEQ ID NO: 179583 - RNA, 19 nt, Homo sapiens
  misc_RNA (1)...(19): siRNA sense strand
caaaucaaccagaugcuua

SEQ ID NO: 179584 - RNA, 19 nt, Homo sapiens
  misc_RNA (1)...(19): siRNA sense strand
gcaacucaauggagaauuc

SEQ ID NO: 179585 - RNA, 19 nt, Homo sapiens
  misc_RNA (1)...(19): siRNA sense strand
ggagaauucuggucacuca

SEQ ID NO: 179586 - RNA, 19 nt, Homo sapiens
  misc_RNA (1)...(19): siRNA sense strand
aagaagacaugcaguauau

SEQ ID NO: 179587 - RNA, 19 nt, Homo sapiens
  misc_RNA (1)...(19): siRNA sense strand
ggagugagccuucccagaa

SEQ ID NO: 179588 - RNA, 19 nt, Homo sapiens
  misc_RNA (1)...(19): siRNA sense strand
ccacagagaaugauacaaa

SEQ ID NO: 179589 - RNA, 19 nt, Homo sapiens
  misc_RNA (1)...(19): siRNA sense strand
guacaagccuaugcagaaa

SEQ ID NO: 179590 - RNA, 19 nt, Homo sapiens
  misc_RNA (1)...(19): siRNA sense strand
caacaugguucagagacua

SEQ ID NO: 179591 - RNA, 19 nt, Homo sapiens
  misc_RNA (1)...(19): siRNA sense strand
aagcaaagcugauaacucu

SEQ ID NO: 179592 - RNA, 19 nt, Homo sapiens
  misc_RNA (1)...(19): siRNA sense strand
gcacuaccauuaccgaauc

SEQ ID NO: 179593 - RNA, 19 nt, Homo sapiens
  misc_RNA (1)...(19): siRNA sense strand
gcugauaacucugugcaaa

SEQ ID NO: 179594 - RNA, 19 nt, Homo sapiens
  misc_RNA (1)...(19): siRNA sense strand
caagaagacaugcaguaua

SEQ ID NO: 179595 - RNA, 19 nt, Homo sapiens
  misc_RNA (1)...(19): siRNA sense strand
gaaacccuaugaaggaaga

SEQ ID NO: 179596 - RNA, 19 nt, Homo sapiens
  misc_RNA (1)...(19): siRNA sense strand
gacacaggcucgacaguga

SEQ ID NO: 179597 - RNA, 19 nt, Homo sapiens
  misc_RNA (1)...(19): siRNA sense strand
gcacaucuguugagcaaac

SEQ ID NO: 179598 - RNA, 19 nt, Homo sapiens
  misc_RNA (1)...(19): siRNA sense strand
ucagaacacuucccaaauc

SEQ ID NO: 179599 - RNA, 19 nt, Homo sapiens
  misc_RNA (1)...(19): siRNA sense strand
aaacaucuguggcuaguca

SEQ ID NO: 179600 - RNA, 19 nt, Homo sapiens
  misc_RNA (1)...(19): siRNA sense strand
guacuaccuuugaggauau

SEQ ID NO: 179601 - RNA, 19 nt, Homo sapiens
  misc_RNA (1)...(19): siRNA sense strand
ucaaccagaugcuuaguga

SEQ ID NO: 179602 - RNA, 19 nt, Homo sapiens
  misc_RNA (1)...(19): siRNA sense strand
gauacugucuauaccaaug

SEQ ID NO: 179603 - RNA, 19 nt, Homo sapiens
  misc_RNA (1)...(19): siRNA sense strand
gaagcacucuguacaacca

SEQ ID NO: 179604 - RNA, 19 nt, Homo sapiens
  misc_RNA (1)...(19): siRNA sense strand
ccaaauaccacuacuaugg

SEQ ID NO: 179605 - RNA, 19 nt, Homo sapiens
  misc_RNA (1)...(19): siRNA sense strand
caacaacccaugcaacaga

SEQ ID NO: 179606 - RNA, 19 nt, Homo sapiens
  misc_RNA (1)...(19): siRNA sense strand
ccucaaccgugucgacuuu

SEQ ID NO: 179607 - RNA, 19 nt, Homo sapiens
  misc_RNA (1)...(19): siRNA sense strand
ggagcaauccgaacaacaa

SEQ ID NO: 179608 - RNA, 19 nt, Homo sapiens
  misc_RNA (1)...(19): siRNA sense strand
caaacauucuggcgcuauu

SEQ ID NO: 179609 - RNA, 19 nt, Homo sapiens
  misc_RNA (1)...(19): siRNA sense strand
gguacaagccuaugcagaa

SEQ ID NO: 179610 - RNA, 19 nt, Homo sapiens
  misc_RNA (1)...(19): siRNA sense strand
acacagauguacagccaaa

SEQ ID NO: 179611 - RNA, 19 nt, Homo sapiens
  misc_RNA (1)...(19): siRNA sense strand
acacagagacacagaugua

SEQ ID NO: 179612 - RNA, 19 nt, Homo sapiens
  misc_RNA (1)...(19): siRNA sense strand
gcacugugaggcaauauug

SEQ ID NO: 179613 - RNA, 19 nt, Homo sapiens
  misc_RNA (1)...(19): siRNA sense strand
gcaagaagacaugcaguau

SEQ ID NO: 179614 - RNA, 19 nt, Homo sapiens
  misc_RNA (1)...(19): siRNA sense strand
cagaacacuucccaaauca

SEQ ID NO: 179615 - RNA, 19 nt, Homo sapiens
  misc_RNA (1)...(19): siRNA sense strand
ccaacaucaucaacaguuu

SEQ ID NO: 179616 - RNA, 19 nt, Homo sapiens
  misc_RNA (1)...(19): siRNA sense strand
gaaggaagcgauacugucu

SEQ ID NO: 179617 - RNA, 19 nt, Homo sapiens
  misc_RNA (1)...(19): siRNA sense strand
gcacugaaacccuaugaag

SEQ ID NO: 179618 - RNA, 19 nt, Homo sapiens
  misc_RNA (1)...(19): siRNA sense strand
caaucugagugaaauagaa

SEQ ID NO: 179619 - RNA, 19 nt, Homo sapiens
  misc_RNA (1)...(19): siRNA sense strand
gaagcgauacugucuauac

SEQ ID NO: 179620 - RNA, 19 nt, Homo sapiens
  misc_RNA (1)...(19): siRNA sense strand
gcagguacaacaugucuau

SEQ ID NO: 179621 - RNA, 19 nt, Homo sapiens
  misc_RNA (1)...(19): siRNA sense strand
ugaaauggauguguaacug

SEQ ID NO: 179622 - RNA, 19 nt, Homo sapiens
  misc_RNA (1)...(19): siRNA sense strand
gcaaagcugauaacucugu

SEQ ID NO: 179623 - RNA, 19 nt, Homo sapiens
  misc_RNA (1)...(19): siRNA sense strand
acagugaccuuacaaacau

SEQ ID NO: 179624 - RNA, 19 nt, Homo sapiens
  misc_RNA (1)...(19): siRNA sense strand
gcgauacugucuauaccaa

SEQ ID NO: 179625 - RNA, 19 nt, Homo sapiens
  misc_RNA (1)...(19): siRNA sense strand
gaagacaugcaguauaugg

SEQ ID NO: 179626 - RNA, 19 nt, Homo sapiens
  misc_RNA (1)...(19): siRNA sense strand
ucaagucacugcagagucu

SEQ ID NO: 179627 - RNA, 19 nt, Homo sapiens
  misc_RNA (1)...(19): siRNA sense strand
cuacgacgaauauauguuu

SEQ ID NO: 179628 - RNA, 19 nt, Homo sapiens
  misc_RNA (1)...(19): siRNA sense strand
ggugggcacuggugggauu

SEQ ID NO: 179629 - RNA, 19 nt, Homo sapiens
  misc_RNA (1)...(19): siRNA sense strand
cugcguggcuugacaaugu

SEQ ID NO: 179630 - RNA, 19 nt, Homo sapiens
  misc_RNA (1)...(19): siRNA sense strand
agaaacagacuucaagaug

SEQ ID NO: 179631 - RNA, 19 nt, Homo sapiens
  misc_RNA (1)...(19): siRNA sense strand
cuagaggaaacuccaaaua

SEQ ID NO: 179632 - RNA, 19 nt, Homo sapiens
  misc_RNA (1)...(19): siRNA sense strand
gaaauggauguguaacugu

SEQ ID NO: 179633 - RNA, 19 nt, Homo sapiens
  misc_RNA (1)...(19): siRNA sense strand
guauauggcuaugagacaa

SEQ ID NO: 179634 - RNA, 19 nt, Homo sapiens
  misc_RNA (1)...(19): siRNA sense strand
uuaaucgucugcaagaaga

SEQ ID NO: 179635 - RNA, 19 nt, Homo sapiens
  misc_RNA (1)...(19): siRNA sense strand
cgaagauacacgucgcuua

SEQ ID NO: 179636 - RNA, 19 nt, Homo sapiens
  misc_RNA (1)...(19): siRNA sense strand
ccagugugaugacaacaug

SEQ ID NO: 179637 - RNA, 19 nt, Homo sapiens
  misc_RNA (1)...(19): siRNA sense strand
gacagugaccuuacaaaca

SEQ ID NO: 179638 - RNA, 19 nt, Homo sapiens
  misc_RNA (1)...(19): siRNA sense strand
uucuacagcucaaugguua

SEQ ID NO: 179639 - RNA, 19 nt, Homo sapiens
  misc_RNA (1)...(19): siRNA sense strand
ccgcucaggugcaguaugu

SEQ ID NO: 179640 - RNA, 19 nt, Homo sapiens
  misc_RNA (1)...(19): siRNA sense strand
cccaagccauucgaaauuu

SEQ ID NO: 179641 - RNA, 19 nt, Homo sapiens
  misc_RNA (1)...(19): siRNA sense strand
cgagcaaucugagugaaau

SEQ ID NO: 179642 - RNA, 19 nt, Homo sapiens
  misc_RNA (1)...(19): siRNA sense strand
caacagaaacaaagguaca

SEQ ID NO: 179643 - RNA, 19 nt, Homo sapiens
  misc_RNA (1)...(19): siRNA sense strand
gacaacaacccaugcaaca

SEQ ID NO: 179644 - RNA, 19 nt, Homo sapiens
  misc_RNA (1)...(19): siRNA sense strand
gaugaugcaagcacugaaa

SEQ ID NO: 179645 - RNA, 19 nt, Homo sapiens
  misc_RNA (1)...(19): siRNA sense strand
gaacacuucccaaaucaac

SEQ ID NO: 179646 - RNA, 19 nt, Homo sapiens
  misc_RNA (1)...(19): siRNA sense strand
ucacugcagagucuuuaua

SEQ ID NO: 179647 - RNA, 19 nt, Homo sapiens
  misc_RNA (1)...(19): siRNA sense strand
gcccaaagccaacaucauc

SEQ ID NO: 179648 - RNA, 19 nt, Homo sapiens
  misc_RNA (1)...(19): siRNA sense strand
aaacagacuucaagaugac

SEQ ID NO: 179649 - RNA, 19 nt, Homo sapiens
  misc_RNA (1)...(19): siRNA sense strand
ccacuaccuucgacacugu

SEQ ID NO: 179650 - RNA, 19 nt, Homo sapiens
  misc_RNA (1)...(19): siRNA sense strand
gcucgacagugaccuuaca

SEQ ID NO: 179651 - RNA, 19 nt, Homo sapiens
  misc_RNA (1)...(19): siRNA sense strand
gaaacuccaaauaccacua

SEQ ID NO: 179652 - RNA, 19 nt, Homo sapiens
  misc_RNA (1)...(19): siRNA sense strand
ggacguuguugugaaucuu

SEQ ID NO: 179653 - RNA, 19 nt, Homo sapiens
  misc_RNA (1)...(19): siRNA sense strand
gaaggaagacccaguuuuc

SEQ ID NO: 179654 - RNA, 19 nt, Homo sapiens
  misc_RNA (1)...(19): siRNA sense strand
gauacacgucgcuuaauca

SEQ ID NO: 179655 - RNA, 19 nt, Homo sapiens
  misc_RNA (1)...(19): siRNA sense strand
ugauaacucugugcaaaca

SEQ ID NO: 179656 - RNA, 19 nt, Homo sapiens
  misc_RNA (1)...(19): siRNA sense strand
gagcaaucugagugaaaua

SEQ ID NO: 179657 - RNA, 19 nt, Homo sapiens
  misc_RNA (1)...(19): siRNA sense strand
ugacuaccguggucucauc

SEQ ID NO: 179658 - RNA, 19 nt, Homo sapiens
  misc_RNA (1)...(19): siRNA sense strand
guccuuagaccuauuccua

SEQ ID NO: 179659 - RNA, 19 nt, Homo sapiens
  misc_RNA (1)...(19): siRNA sense strand
acaugagucuauccugaaa

SEQ ID NO: 179660 - RNA, 19 nt, Homo sapiens
  misc_RNA (1)...(19): siRNA sense strand
ugcagagucuuuauagaga

SEQ ID NO: 179661 - RNA, 19 nt, Homo sapiens
  misc_RNA (1)...(19): siRNA sense strand
gggaauuacuuugauacuc

SEQ ID NO: 179662 - RNA, 19 nt, Homo sapiens
  misc_RNA (1)...(19): siRNA sense strand
caagguugccgcuguaagu

SEQ ID NO: 179663 - RNA, 19 nt, Homo sapiens
  misc_RNA (1)...(19): siRNA sense strand
gacccaagccauucgaaau

SEQ ID NO: 179664 - RNA, 19 nt, Homo sapiens
  misc_RNA (1)...(19): siRNA sense strand
aggaagcgauacugucuau

SEQ ID NO: 179665 - RNA, 19 nt, Homo sapiens
  misc_RNA (1)...(19): siRNA sense strand
aggcacaucuguugagcaa

SEQ ID NO: 179666 - RNA, 19 nt, Homo sapiens
  misc_RNA (1)...(19): siRNA sense strand
gccaacaucaucaacaguu

SEQ ID NO: 179667 - RNA, 19 nt, Homo sapiens
  misc_RNA (1)...(19): siRNA sense strand
gcaaucugagugaaauaga

SEQ ID NO: 179668 - RNA, 19 nt, Homo sapiens
  misc_RNA (1)...(19): siRNA sense strand
guacaaccacuaccuucga

SEQ ID NO: 179669 - RNA, 19 nt, Homo sapiens
  misc_RNA (1)...(19): siRNA sense strand
cgacguccuuagaccuauu

SEQ ID NO: 179670 - RNA, 19 nt, Homo sapiens
  misc_RNA (1)...(19): siRNA sense strand
gguugcagaugguuucaca

SEQ ID NO: 179671 - RNA, 19 nt, Homo sapiens
  misc_RNA (1)...(19): siRNA sense strand
agauacacgucgcuuaauc

SEQ ID NO: 179672 - RNA, 19 nt, Homo sapiens
  misc_RNA (1)...(19): siRNA sense strand
gagacuagaaacagacuuc

SEQ ID NO: 179673 - RNA, 19 nt, Homo sapiens
  misc_RNA (1)...(19): siRNA sense strand
gaaacagacuucaagauga

SEQ ID NO: 179674 - RNA, 19 nt, Homo sapiens
  misc_RNA (1)...(19): siRNA sense strand
gaacaacaacguauccuua

SEQ ID NO: 179675 - RNA, 19 nt, Homo sapiens
  misc_RNA (1)...(19): siRNA sense strand
ggaauuacuuugauacuca

SEQ ID NO: 179676 - RNA, 19 nt, Homo sapiens
  misc_RNA (1)...(19): siRNA sense strand
gaagauacacgucgcuuaa

SEQ ID NO: 179677 - RNA, 19 nt, Homo sapiens
  misc_RNA (1)...(19): siRNA sense strand
ggagggaauuacuuugaua

SEQ ID NO: 179678 - RNA, 19 nt, Homo sapiens
  misc_RNA (1)...(19): siRNA sense strand
caauuuagccugauagaaa

SEQ ID NO: 179679 - RNA, 19 nt, Homo sapiens
  misc_RNA (1)...(19): siRNA sense strand
gaacaauauuccacagaga

SEQ ID NO: 179680 - RNA, 19 nt, Homo sapiens
  misc_RNA (1)...(19): siRNA sense strand
gcagaugguuucacaggaa

SEQ ID NO: 179681 - RNA, 19 nt, Homo sapiens
  misc_RNA (1)...(19): siRNA sense strand
ccaaugccaugaacaauau

SEQ ID NO: 179682 - RNA, 19 nt, Homo sapiens
  misc_RNA (1)...(19): siRNA sense strand
caacguauccuuacacaga

SEQ ID NO: 179683 - RNA, 19 nt, Homo sapiens
  misc_RNA (1)...(19): siRNA sense strand
caaaucaaccagaugcuua

SEQ ID NO: 179684 - RNA, 19 nt, Homo sapiens
  misc_RNA (1)...(19): siRNA sense strand
gcaacucaauggagaauuc

SEQ ID NO: 179685 - RNA, 19 nt, Homo sapiens
  misc_RNA (1)...(19): siRNA sense strand
ggagaauucuggucacuca

SEQ ID NO: 179686 - RNA, 19 nt, Homo sapiens
  misc_RNA (1)...(19): siRNA sense strand
aagaagacaugcaguauau

SEQ ID NO: 179687 - RNA, 19 nt, Homo sapiens
  misc_RNA (1)...(19): siRNA sense strand
ggagugagccuucccagaa

SEQ ID NO: 179688 - RNA, 19 nt, Homo sapiens
  misc_RNA (1)...(19): siRNA sense strand
ccacagagaaugauacaaa

SEQ ID NO: 179689 - RNA, 19 nt, Homo sapiens
  misc_RNA (1)...(19): siRNA sense strand
guacaagccuaugcagaaa

SEQ ID NO: 179690 - RNA, 19 nt, Homo sapiens
  misc_RNA (1)...(19): siRNA sense strand
caacaugguucagagacua

SEQ ID NO: 179691 - RNA, 19 nt, Homo sapiens
  misc_RNA (1)...(19): siRNA sense strand
aagcaaagcugauaacucu

SEQ ID NO: 179692 - RNA, 19 nt, Homo sapiens
  misc_RNA (1)...(19): siRNA sense strand
gcacuaccauuaccgaauc

SEQ ID NO: 179693 - RNA, 19 nt, Homo sapiens
  misc_RNA (1)...(19): siRNA sense strand
gcugauaacucugugcaaa

SEQ ID NO: 179694 - RNA, 19 nt, Homo sapiens
  misc_RNA (1)...(19): siRNA sense strand
caagaagacaugcaguaua

SEQ ID NO: 179695 - RNA, 19 nt, Homo sapiens
  misc_RNA (1)...(19): siRNA sense strand
gaaacccuaugaaggaaga

SEQ ID NO: 179696 - RNA, 19 nt, Homo sapiens
  misc_RNA (1)...(19): siRNA sense strand
gacacaggcucgacaguga

SEQ ID NO: 179697 - RNA, 19 nt, Homo sapiens
  misc_RNA (1)...(19): siRNA sense strand
gcacaucuguugagcaaac

SEQ ID NO: 179698 - RNA, 19 nt, Homo sapiens
  misc_RNA (1)...(19): siRNA sense strand
ucagaacacuucccaaauc

SEQ ID NO: 179699 - RNA, 19 nt, Homo sapiens
  misc_RNA (1)...(19): siRNA sense strand
aaacaucuguggcuaguca

SEQ ID NO: 179700 - RNA, 19 nt, Homo sapiens
  misc_RNA (1)...(19): siRNA sense strand
guacuaccuuugaggauau

SEQ ID NO: 179701 - RNA, 19 nt, Homo sapiens
  misc_RNA (1)...(19): siRNA sense strand
ucaaccagaugcuuaguga

SEQ ID NO: 179702 - RNA, 19 nt, Homo sapiens
  misc_RNA (1)...(19): siRNA sense strand
gauacugucuauaccaaug

SEQ ID NO: 179703 - RNA, 19 nt, Homo sapiens
  misc_RNA (1)...(19): siRNA sense strand
gaagcacucuguacaacca

SEQ ID NO: 179704 - RNA, 19 nt, Homo sapiens
  misc_RNA (1)...(19): siRNA sense strand
ccaaauaccacuacuaugg

SEQ ID NO: 179705 - RNA, 19 nt, Homo sapiens
  misc_RNA (1)...(19): siRNA sense strand
caacaacccaugcaacaga

SEQ ID NO: 179706 - RNA, 19 nt, Homo sapiens
  misc_RNA (1)...(19): siRNA sense strand
ccucaaccgugucgacuuu

SEQ ID NO: 179707 - RNA, 19 nt, Homo sapiens
  misc_RNA (1)...(19): siRNA sense strand
ggagcaauccgaacaacaa

SEQ ID NO: 179708 - RNA, 19 nt, Homo sapiens
  misc_RNA (1)...(19): siRNA sense strand
caaacauucuggcgcuauu

SEQ ID NO: 179709 - RNA, 19 nt, Homo sapiens
  misc_RNA (1)...(19): siRNA sense strand
gguacaagccuaugcagaa

SEQ ID NO: 179710 - RNA, 19 nt, Homo sapiens
  misc_RNA (1)...(19): siRNA sense strand
acacagauguacagccaaa

SEQ ID NO: 179711 - RNA, 19 nt, Homo sapiens
  misc_RNA (1)...(19): siRNA sense strand
acacagagacacagaugua

SEQ ID NO: 179712 - RNA, 19 nt, Homo sapiens
  misc_RNA (1)...(19): siRNA sense strand
gcacugugaggcaauauug

SEQ ID NO: 179713 - RNA, 19 nt, Homo sapiens
  misc_RNA (1)...(19): siRNA sense strand
gcaagaagacaugcaguau

SEQ ID NO: 179714 - RNA, 19 nt, Homo sapiens
  misc_RNA (1)...(19): siRNA sense strand
cagaacacuucccaaauca

SEQ ID NO: 179715 - RNA, 19 nt, Homo sapiens
  misc_RNA (1)...(19): siRNA sense strand
ccaacaucaucaacaguuu

SEQ ID NO: 179716 - RNA, 19 nt, Homo sapiens
  misc_RNA (1)...(19): siRNA sense strand
gaaggaagcgauacugucu

SEQ ID NO: 179717 - RNA, 19 nt, Homo sapiens
  misc_RNA (1)...(19): siRNA sense strand
gcacugaaacccuaugaag

SEQ ID NO: 179718 - RNA, 19 nt, Homo sapiens
  misc_RNA (1)...(19): siRNA sense strand
caaucugagugaaauagaa

SEQ ID NO: 179719 - RNA, 19 nt, Homo sapiens
  misc_RNA (1)...(19): siRNA sense strand
gaagcgauacugucuauac

SEQ ID NO: 179720 - RNA, 19 nt, Homo sapiens
  misc_RNA (1)...(19): siRNA sense strand
gcagguacaacaugucuau

SEQ ID NO: 179721 - RNA, 19 nt, Homo sapiens
  misc_RNA (1)...(19): siRNA sense strand
ugaaauggauguguaacug

SEQ ID NO: 179722 - RNA, 19 nt, Homo sapiens
  misc_RNA (1)...(19): siRNA sense strand
gcaaagcugauaacucugu

SEQ ID NO: 179723 - RNA, 19 nt, Homo sapiens
  misc_RNA (1)...(19): siRNA sense strand
acagugaccuuacaaacau

SEQ ID NO: 179724 - RNA, 19 nt, Homo sapiens
  misc_RNA (1)...(19): siRNA sense strand
gcgauacugucuauaccaa

SEQ ID NO: 179725 - RNA, 19 nt, Homo sapiens
  misc_RNA (1)...(19): siRNA sense strand
gaagacaugcaguauaugg

SEQ ID NO: 179726 - RNA, 19 nt, Homo sapiens
  misc_RNA (1)...(19): siRNA sense strand
ucaagucacugcagagucu

SEQ ID NO: 179727 - RNA, 19 nt, Homo sapiens
  misc_RNA (1)...(19): siRNA sense strand
cuacgacgaauauauguuu

SEQ ID NO: 179728 - RNA, 19 nt, Homo sapiens
  misc_RNA (1)...(19): siRNA sense strand
ggugggcacuggugggauu

SEQ ID NO: 179729 - RNA, 19 nt, Homo sapiens
  misc_RNA (1)...(19): siRNA sense strand
cugcguggcuugacaaugu

SEQ ID NO: 179730 - RNA, 19 nt, Homo sapiens
  misc_RNA (1)...(19): siRNA sense strand
agaaacagacuucaagaug

SEQ ID NO: 179731 - RNA, 19 nt, Homo sapiens
  misc_RNA (1)...(19): siRNA sense strand
cuagaggaaacuccaaaua

SEQ ID NO: 179732 - RNA, 19 nt, Homo sapiens
  misc_RNA (1)...(19): siRNA sense strand
gaaauggauguguaacugu

SEQ ID NO: 179733 - RNA, 19 nt, Homo sapiens
  misc_RNA (1)...(19): siRNA sense strand
guauauggcuaugagacaa

SEQ ID NO: 179734 - RNA, 19 nt, Homo sapiens
  misc_RNA (1)...(19): siRNA sense strand
uuaaucgucugcaagaaga

SEQ ID NO: 179735 - RNA, 19 nt, Homo sapiens
  misc_RNA (1)...(19): siRNA sense strand
cgaagauacacgucgcuua

SEQ ID NO: 179736 - RNA, 19 nt, Homo sapiens
  misc_RNA (1)...(19): siRNA sense strand
ccagugugaugacaacaug

SEQ ID NO: 179737 - RNA, 19 nt, Homo sapiens
  misc_RNA (1)...(19): siRNA sense strand
gacagugaccuuacaaaca

SEQ ID NO: 179738 - RNA, 19 nt, Homo sapiens
  misc_RNA (1)...(19): siRNA sense strand
uucuacagcucaaugguua

SEQ ID NO: 179739 - RNA, 19 nt, Homo sapiens
  misc_RNA (1)...(19): siRNA sense strand
ccgcucaggugcaguaugu

SEQ ID NO: 179740 - RNA, 19 nt, Homo sapiens
  misc_RNA (1)...(19): siRNA sense strand
cccaagccauucgaaauuu

SEQ ID NO: 179741 - RNA, 19 nt, Homo sapiens
  misc_RNA (1)...(19): siRNA sense strand
cgagcaaucugagugaaau

SEQ ID NO: 179742 - RNA, 19 nt, Homo sapiens
  misc_RNA (1)...(19): siRNA sense strand
caacagaaacaaagguaca

SEQ ID NO: 179743 - RNA, 19 nt, Homo sapiens
  misc_RNA (1)...(19): siRNA sense strand
gacaacaacccaugcaaca

SEQ ID NO: 179744 - RNA, 19 nt, Homo sapiens
  misc_RNA (1)...(19): siRNA sense strand
gaugaugcaagcacugaaa

SEQ ID NO: 179745 - RNA, 19 nt, Homo sapiens
  misc_RNA (1)...(19): siRNA sense strand
gaacacuucccaaaucaac

SEQ ID NO: 179746 - RNA, 19 nt, Homo sapiens
  misc_RNA (1)...(19): siRNA sense strand
ucacugcagagucuuuaua

SEQ ID NO: 179747 - RNA, 19 nt, Homo sapiens
  misc_RNA (1)...(19): siRNA sense strand
gcccaaagccaacaucauc

SEQ ID NO: 179748 - RNA, 19 nt, Homo sapiens
  misc_RNA (1)...(19): siRNA sense strand
aaacagacuucaagaugac

SEQ ID NO: 179749 - RNA, 19 nt, Homo sapiens
  misc_RNA (1)...(19): siRNA sense strand
ccacuaccuucgacacugu

SEQ ID NO: 179750 - RNA, 19 nt, Homo sapiens
  misc_RNA (1)...(19): siRNA sense strand
gcucgacagugaccuuaca

SEQ ID NO: 179751 - RNA, 19 nt, Homo sapiens
  misc_RNA (1)...(19): siRNA sense strand
gaaacuccaaauaccacua

SEQ ID NO: 179752 - RNA, 19 nt, Homo sapiens
  misc_RNA (1)...(19): siRNA sense strand
ggacguuguugugaaucuu

SEQ ID NO: 179753 - RNA, 19 nt, Homo sapiens
  misc_RNA (1)...(19): siRNA sense strand
gaaggaagacccaguuuuc

SEQ ID NO: 179754 - RNA, 19 nt, Homo sapiens
  misc_RNA (1)...(19): siRNA sense strand
gauacacgucgcuuaauca

SEQ ID NO: 179755 - RNA, 19 nt, Homo sapiens
  misc_RNA (1)...(19): siRNA sense strand
ugauaacucugugcaaaca

SEQ ID NO: 179756 - RNA, 19 nt, Homo sapiens
  misc_RNA (1)...(19): siRNA sense strand
gagcaaucugagugaaaua

SEQ ID NO: 179757 - RNA, 19 nt, Homo sapiens
  misc_RNA (1)...(19): siRNA sense strand
ugacuaccguggucucauc

SEQ ID NO: 179758 - RNA, 19 nt, Homo sapiens
  misc_RNA (1)...(19): siRNA sense strand
guccuuagaccuauuccua

SEQ ID NO: 179759 - RNA, 19 nt, Homo sapiens
  misc_RNA (1)...(19): siRNA sense strand
acaugagucuauccugaaa

SEQ ID NO: 179760 - RNA, 19 nt, Homo sapiens
  misc_RNA (1)...(19): siRNA sense strand
ugcagagucuuuauagaga

SEQ ID NO: 179761 - RNA, 19 nt, Homo sapiens
  misc_RNA (1)...(19): siRNA sense strand
gggaauuacuuugauacuc

SEQ ID NO: 179762 - RNA, 19 nt, Homo sapiens
  misc_RNA (1)...(19): siRNA sense strand
caagguugccgcuguaagu

SEQ ID NO: 179763 - RNA, 19 nt, Homo sapiens
  misc_RNA (1)...(19): siRNA sense strand
gacccaagccauucgaaau

SEQ ID NO: 179764 - RNA, 19 nt, Homo sapiens
  misc_RNA (1)...(19): siRNA sense strand
aggaagcgauacugucuau

SEQ ID NO: 179765 - RNA, 19 nt, Homo sapiens
  misc_RNA (1)...(19): siRNA sense strand
aggcacaucuguugagcaa

SEQ ID NO: 179766 - RNA, 19 nt, Homo sapiens
  misc_RNA (1)...(19): siRNA sense strand
gccaacaucaucaacaguu

SEQ ID NO: 179767 - RNA, 19 nt, Homo sapiens
  misc_RNA (1)...(19): siRNA sense strand
gcaaucugagugaaauaga

SEQ ID NO: 179768 - RNA, 19 nt, Homo sapiens
  misc_RNA (1)...(19): siRNA sense strand
guacaaccacuaccuucga

SEQ ID NO: 179769 - RNA, 19 nt, Homo sapiens
  misc_RNA (1)...(19): siRNA sense strand
cgacguccuuagaccuauu

SEQ ID NO: 179770 - RNA, 19 nt, Homo sapiens
  misc_RNA (1)...(19): siRNA sense strand
gguugcagaugguuucaca

SEQ ID NO: 179771 - RNA, 19 nt, Homo sapiens
  misc_RNA (1)...(19): siRNA sense strand
agauacacgucgcuuaauc

SEQ ID NO: 179772 - RNA, 19 nt, Homo sapiens
  misc_RNA (1)...(19): siRNA sense strand
gagacuagaaacagacuuc

SEQ ID NO: 179773 - RNA, 19 nt, Homo sapiens
  misc_RNA (1)...(19): siRNA sense strand
gaaagaagcugguguccaa

SEQ ID NO: 179774 - RNA, 19 nt, Homo sapiens
  misc_RNA (1)...(19): siRNA sense strand
gcauugagcuccagcauug

SEQ ID NO: 179775 - RNA, 19 nt, Homo sapiens
  misc_RNA (1)...(19): siRNA sense strand
gaacucaugugcccuaucu

SEQ ID NO: 179776 - RNA, 19 nt, Homo sapiens
  misc_RNA (1)...(19): siRNA sense strand
gaucagaccacaacgauga

SEQ ID NO: 179777 - RNA, 19 nt, Homo sapiens
  misc_RNA (1)...(19): siRNA sense strand
gagaagaugugagcucaga

SEQ ID NO: 179778 - RNA, 19 nt, Homo sapiens
  misc_RNA (1)...(19): siRNA sense strand
caccaaggauccaaaguga

SEQ ID NO: 179779 - RNA, 19 nt, Homo sapiens
  misc_RNA (1)...(19): siRNA sense strand
caacuuugaugcccugauc

SEQ ID NO: 179780 - RNA, 19 nt, Homo sapiens
  misc_RNA (1)...(19): siRNA sense strand
caucaagaccgagugcuua

SEQ ID NO: 179781 - RNA, 19 nt, Homo sapiens
  misc_RNA (1)...(19): siRNA sense strand
agaauacgaugaccaccaa

SEQ ID NO: 179782 - RNA, 19 nt, Homo sapiens
  misc_RNA (1)...(19): siRNA sense strand
uugaugcccugaucucuaa

SEQ ID NO: 179783 - RNA, 19 nt, Homo sapiens
  misc_RNA (1)...(19): siRNA sense strand
cccuggagcuggugaauga

SEQ ID NO: 179784 - RNA, 19 nt, Homo sapiens
  misc_RNA (1)...(19): siRNA sense strand
uguccuaccugccgaaaga

SEQ ID NO: 179785 - RNA, 19 nt, Homo sapiens
  misc_RNA (1)...(19): siRNA sense strand
agagccagguggagaaauu

SEQ ID NO: 179786 - RNA, 19 nt, Homo sapiens
  misc_RNA (1)...(19): siRNA sense strand
ggaauacgaggcccaucaa

SEQ ID NO: 179787 - RNA, 19 nt, Homo sapiens
  misc_RNA (1)...(19): siRNA sense strand
cgagguaugugaagacaac

SEQ ID NO: 179788 - RNA, 19 nt, Homo sapiens
  misc_RNA (1)...(19): siRNA sense strand
guacuuggcccugcgcauu

SEQ ID NO: 179789 - RNA, 19 nt, Homo sapiens
  misc_RNA (1)...(19): siRNA sense strand
gcuaugcucccaccaagga

SEQ ID NO: 179790 - RNA, 19 nt, Homo sapiens
  misc_RNA (1)...(19): siRNA sense strand
gccuggacaugcugaagaa

SEQ ID NO: 179791 - RNA, 19 nt, Homo sapiens
  misc_RNA (1)...(19): siRNA sense strand
gcacaaccagcaggcauug

SEQ ID NO: 179792 - RNA, 19 nt, Homo sapiens
  misc_RNA (1)...(19): siRNA sense strand
gaaaagcaguacaccaucu

SEQ ID NO: 179793 - RNA, 19 nt, Homo sapiens
  misc_RNA (1)...(19): siRNA sense strand
gcaguacaccaucuacauc

SEQ ID NO: 179794 - RNA, 19 nt, Homo sapiens
  misc_RNA (1)...(19): siRNA sense strand
ccaccaaggauccaaagug

SEQ ID NO: 179795 - RNA, 19 nt, Homo sapiens
  misc_RNA (1)...(19): siRNA sense strand
gaagaugugagcucagacu

SEQ ID NO: 179796 - RNA, 19 nt, Homo sapiens
  misc_RNA (1)...(19): siRNA sense strand
cagacgagguaugugaaga

SEQ ID NO: 179797 - RNA, 19 nt, Homo sapiens
  misc_RNA (1)...(19): siRNA sense strand
gaccaccucuccaaguacu

SEQ ID NO: 179798 - RNA, 19 nt, Homo sapiens
  misc_RNA (1)...(19): siRNA sense strand
gacgagguaugugaagaca

SEQ ID NO: 179799 - RNA, 19 nt, Homo sapiens
  misc_RNA (1)...(19): siRNA sense strand
cuggacaugcugaagaaua

SEQ ID NO: 179800 - RNA, 19 nt, Homo sapiens
  misc_RNA (1)...(19): siRNA sense strand
ucacugcauucagaacuca

SEQ ID NO: 179801 - RNA, 19 nt, Homo sapiens
  misc_RNA (1)...(19): siRNA sense strand
auucugcucugacugcauu

SEQ ID NO: 179802 - RNA, 19 nt, Homo sapiens
  misc_RNA (1)...(19): siRNA sense strand
uggacaugcugaagaauac

SEQ ID NO: 179803 - RNA, 19 nt, Homo sapiens
  misc_RNA (1)...(19): siRNA sense strand
cagaucagaccacaacgau

SEQ ID NO: 179804 - RNA, 19 nt, Homo sapiens
  misc_RNA (1)...(19): siRNA sense strand
gagaaauugagcucguguu

SEQ ID NO: 179805 - RNA, 19 nt, Homo sapiens
  misc_RNA (1)...(19): siRNA sense strand
ggccagaccccaacuuuga

SEQ ID NO: 179806 - RNA, 19 nt, Homo sapiens
  misc_RNA (1)...(19): siRNA sense strand
ccacuggagcugugcuaug

SEQ ID NO: 179807 - RNA, 19 nt, Homo sapiens
  misc_RNA (1)...(19): siRNA sense strand
agaaauugagcucguguuc

SEQ ID NO: 179808 - RNA, 19 nt, Homo sapiens
  misc_RNA (1)...(19): siRNA sense strand
aauacgaggcccaucaaga

SEQ ID NO: 179809 - RNA, 19 nt, Homo sapiens
  misc_RNA (1)...(19): siRNA sense strand
ggagcuggugaaugagaaa

SEQ ID NO: 179810 - RNA, 19 nt, Homo sapiens
  misc_RNA (1)...(19): siRNA sense strand
ggcauugagcuccagcauu

SEQ ID NO: 179811 - RNA, 19 nt, Homo sapiens
  misc_RNA (1)...(19): siRNA sense strand
cuggagggcgucagugaaa

SEQ ID NO: 179812 - RNA, 19 nt, Homo sapiens
  misc_RNA (1)...(19): siRNA sense strand
gagccagguggagaaauug

SEQ ID NO: 179813 - RNA, 19 nt, Homo sapiens
  misc_RNA (1)...(19): siRNA sense strand
caucaaaccucaauaugua

SEQ ID NO: 179814 - RNA, 19 nt, Homo sapiens
  misc_RNA (1)...(19): siRNA sense strand
gaaauuacauucagaagag

SEQ ID NO: 179815 - RNA, 19 nt, Homo sapiens
  misc_RNA (1)...(19): siRNA sense strand
gaacacaguugcaaacagu

SEQ ID NO: 179816 - RNA, 19 nt, Homo sapiens
  misc_RNA (1)...(19): siRNA sense strand
gaggagaguugcagagauu

SEQ ID NO: 179817 - RNA, 19 nt, Homo sapiens
  misc_RNA (1)...(19): siRNA sense strand
gcugaugucuauuuaauug

SEQ ID NO: 179818 - RNA, 19 nt, Homo sapiens
  misc_RNA (1)...(19): siRNA sense strand
gcagacaaguuaacgagaa

SEQ ID NO: 179819 - RNA, 19 nt, Homo sapiens
  misc_RNA (1)...(19): siRNA sense strand
uaagaaaugucgacaggaa

SEQ ID NO: 179820 - RNA, 19 nt, Homo sapiens
  misc_RNA (1)...(19): siRNA sense strand
caaaucaacuggaaguguu

SEQ ID NO: 179821 - RNA, 19 nt, Homo sapiens
  misc_RNA (1)...(19): siRNA sense strand
gaacuaaugguauuggaaa

SEQ ID NO: 179822 - RNA, 19 nt, Homo sapiens
  misc_RNA (1)...(19): siRNA sense strand
gaacaugaucuaaguguau

SEQ ID NO: 179823 - RNA, 19 nt, Homo sapiens
  misc_RNA (1)...(19): siRNA sense strand
caaagauucuagaagauga

SEQ ID NO: 179824 - RNA, 19 nt, Homo sapiens
  misc_RNA (1)...(19): siRNA sense strand
gaaacucuuuguauugguu

SEQ ID NO: 179825 - RNA, 19 nt, Homo sapiens
  misc_RNA (1)...(19): siRNA sense strand
gacauuaucugguggugaa

SEQ ID NO: 179826 - RNA, 19 nt, Homo sapiens
  misc_RNA (1)...(19): siRNA sense strand
guauaaauauccaggaaug

SEQ ID NO: 179827 - RNA, 19 nt, Homo sapiens
  misc_RNA (1)...(19): siRNA sense strand
ggaacaugaucuaagugua

SEQ ID NO: 179828 - RNA, 19 nt, Homo sapiens
  misc_RNA (1)...(19): siRNA sense strand
gacagcaaaugaagaagaa

SEQ ID NO: 179829 - RNA, 19 nt, Homo sapiens
  misc_RNA (1)...(19): siRNA sense strand
aauuguagcuggagaguuu

SEQ ID NO: 179830 - RNA, 19 nt, Homo sapiens
  misc_RNA (1)...(19): siRNA sense strand
gccaaugccuucaaacuuc

SEQ ID NO: 179831 - RNA, 19 nt, Homo sapiens
  misc_RNA (1)...(19): siRNA sense strand
gggcaaaccugcugauguc

SEQ ID NO: 179832 - RNA, 19 nt, Homo sapiens
  misc_RNA (1)...(19): siRNA sense strand
agagaugcaucacuuguuu

SEQ ID NO: 179833 - RNA, 19 nt, Homo sapiens
  misc_RNA (1)...(19): siRNA sense strand
uaacgagaauugcuauugu

SEQ ID NO: 179834 - RNA, 19 nt, Homo sapiens
  misc_RNA (1)...(19): siRNA sense strand
uugaugagccuucuaguua

SEQ ID NO: 179835 - RNA, 19 nt, Homo sapiens
  misc_RNA (1)...(19): siRNA sense strand
ccacgaauaaacaaacuua

SEQ ID NO: 179836 - RNA, 19 nt, Homo sapiens
  misc_RNA (1)...(19): siRNA sense strand
gcaaaugaagaagaaguua

SEQ ID NO: 179837 - RNA, 19 nt, Homo sapiens
  misc_RNA (1)...(19): siRNA sense strand
ugugguaucuguauuaaga

SEQ ID NO: 179838 - RNA, 19 nt, Homo sapiens
  misc_RNA (1)...(19): siRNA sense strand
ugaagccucugcaaauuga

SEQ ID NO: 179839 - RNA, 19 nt, Homo sapiens
  misc_RNA (1)...(19): siRNA sense strand
ggcaggagauuuugacuua

SEQ ID NO: 179840 - RNA, 19 nt, Homo sapiens
  misc_RNA (1)...(19): siRNA sense strand
gaaaauuagucccaaauca

SEQ ID NO: 179841 - RNA, 19 nt, Homo sapiens
  misc_RNA (1)...(19): siRNA sense strand
caugacaaauguaaaccua

SEQ ID NO: 179842 - RNA, 19 nt, Homo sapiens
  misc_RNA (1)...(19): siRNA sense strand
caaaccugcugaugucuau

SEQ ID NO: 179843 - RNA, 19 nt, Homo sapiens
  misc_RNA (1)...(19): siRNA sense strand
agagaaggcauaaacauuu

SEQ ID NO: 179844 - RNA, 19 nt, Homo sapiens
  misc_RNA (1)...(19): siRNA sense strand
gaagaguggaaacuacuuu

SEQ ID NO: 179845 - RNA, 19 nt, Homo sapiens
  misc_RNA (1)...(19): siRNA sense strand
gagaauugcuauugucaac

SEQ ID NO: 179846 - RNA, 19 nt, Homo sapiens
  misc_RNA (1)...(19): siRNA sense strand
gaaguaccaguucuaaaug

SEQ ID NO: 179847 - RNA, 19 nt, Homo sapiens
  misc_RNA (1)...(19): siRNA sense strand
guaaugaagccucugcaaa

SEQ ID NO: 179848 - RNA, 19 nt, Homo sapiens
  misc_RNA (1)...(19): siRNA sense strand
gguggaacaugaucuaagu

SEQ ID NO: 179849 - RNA, 19 nt, Homo sapiens
  misc_RNA (1)...(19): siRNA sense strand
gcuggagaguuuacagauu

SEQ ID NO: 179850 - RNA, 19 nt, Homo sapiens
  misc_RNA (1)...(19): siRNA sense strand
gauggcagcucgaguuguc

SEQ ID NO: 179851 - RNA, 19 nt, Homo sapiens
  misc_RNA (1)...(19): siRNA sense strand
gacuucaucugcuguuuau

SEQ ID NO: 179852 - RNA, 19 nt, Homo sapiens
  misc_RNA (1)...(19): siRNA sense strand
uaaugaagccucugcaaau

SEQ ID NO: 179853 - RNA, 19 nt, Homo sapiens
  misc_RNA (1)...(19): siRNA sense strand
gaauugcuauugucaacca

SEQ ID NO: 179854 - RNA, 19 nt, Homo sapiens
  misc_RNA (1)...(19): siRNA sense strand
gaaaccacacaucgauauu

SEQ ID NO: 179855 - RNA, 19 nt, Homo sapiens
  misc_RNA (1)...(19): siRNA sense strand
uggaaguguucgccaguua

SEQ ID NO: 179856 - RNA, 19 nt, Homo sapiens
  misc_RNA (1)...(19): siRNA sense strand
aaagaguuguccuguaguu

SEQ ID NO: 179857 - RNA, 19 nt, Homo sapiens
  misc_RNA (1)...(19): siRNA sense strand
ggaggagaguugcagagau

SEQ ID NO: 179858 - RNA, 19 nt, Homo sapiens
  misc_RNA (1)...(19): siRNA sense strand
gagaaggcauaaacauuuu

SEQ ID NO: 179859 - RNA, 19 nt, Homo sapiens
  misc_RNA (1)...(19): siRNA sense strand
aaaggcugcuauuacuaua

SEQ ID NO: 179860 - RNA, 19 nt, Homo sapiens
  misc_RNA (1)...(19): siRNA sense strand
uaaaggcugcuauuacuau

SEQ ID NO: 179861 - RNA, 19 nt, Homo sapiens
  misc_RNA (1)...(19): siRNA sense strand
ugacaaauguaaaccuaag

SEQ ID NO: 179862 - RNA, 19 nt, Homo sapiens
  misc_RNA (1)...(19): siRNA sense strand
uggcuggcaugaauaaauu

SEQ ID NO: 179863 - RNA, 19 nt, Homo sapiens
  misc_RNA (1)...(19): siRNA sense strand
agaacgaaauguugaagau

SEQ ID NO: 179864 - RNA, 19 nt, Homo sapiens
  misc_RNA (1)...(19): siRNA sense strand
caucauggccaccuaucua

SEQ ID NO: 179865 - RNA, 19 nt, Homo sapiens
  misc_RNA (1)...(19): siRNA sense strand
aaugaagccucugcaaauu

SEQ ID NO: 179866 - RNA, 19 nt, Homo sapiens
  misc_RNA (1)...(19): siRNA sense strand
cgacuucaucugcuguuua

SEQ ID NO: 179867 - RNA, 19 nt, Homo sapiens
  misc_RNA (1)...(19): siRNA sense strand
gcaaaccugcugaugucua

SEQ ID NO: 179868 - RNA, 19 nt, Homo sapiens
  misc_RNA (1)...(19): siRNA sense strand
aaagaagaguggaaacuac

SEQ ID NO: 179869 - RNA, 19 nt, Homo sapiens
  misc_RNA (1)...(19): siRNA sense strand
gcggaucgcgucaucguuu

SEQ ID NO: 179870 - RNA, 19 nt, Homo sapiens
  misc_RNA (1)...(19): siRNA sense strand
caaagacacaggcaauugu

SEQ ID NO: 179871 - RNA, 19 nt, Homo sapiens
  misc_RNA (1)...(19): siRNA sense strand
ugucucagcuugaaauuac

SEQ ID NO: 179872 - RNA, 19 nt, Homo sapiens
  misc_RNA (1)...(19): siRNA sense strand
cagaaugcuugcuggaaga

SEQ ID NO: 179873 - RNA, 19 nt, Homo sapiens
  misc_RNA (1)...(19): siRNA sense strand
uagacuaucucuccgacuu

SEQ ID NO: 179874 - RNA, 19 nt, Homo sapiens
  misc_RNA (1)...(19): siRNA sense strand
aaacaaagacacaggcaau

SEQ ID NO: 179875 - RNA, 19 nt, Homo sapiens
  misc_RNA (1)...(19): siRNA sense strand
caacuauaggccacgaaua

SEQ ID NO: 179876 - RNA, 19 nt, Homo sapiens
  misc_RNA (1)...(19): siRNA sense strand
ccguggaucugaauuacaa

SEQ ID NO: 179877 - RNA, 19 nt, Homo sapiens
  misc_RNA (1)...(19): siRNA sense strand
ugagacagcaaaugaagaa

SEQ ID NO: 179878 - RNA, 19 nt, Homo sapiens
  misc_RNA (1)...(19): siRNA sense strand
ccuauggaguugucacuau

SEQ ID NO: 179879 - RNA, 19 nt, Homo sapiens
  misc_RNA (1)...(19): siRNA sense strand
caucaucaaaccucaauau

SEQ ID NO: 179880 - RNA, 19 nt, Homo sapiens
  misc_RNA (1)...(19): siRNA sense strand
gguugugguaucuguauua

SEQ ID NO: 179881 - RNA, 19 nt, Homo sapiens
  misc_RNA (1)...(19): siRNA sense strand
acuuaaaccugaugaagga

SEQ ID NO: 179882 - RNA, 19 nt, Homo sapiens
  misc_RNA (1)...(19): siRNA sense strand
gaaaauggaacggguaaaa

SEQ ID NO: 179883 - RNA, 19 nt, Homo sapiens
  misc_RNA (1)...(19): siRNA sense strand
guugugguaucuguauuaa

SEQ ID NO: 179884 - RNA, 19 nt, Homo sapiens
  misc_RNA (1)...(19): siRNA sense strand
ugaugaaggaggagaagua

SEQ ID NO: 179885 - RNA, 19 nt, Homo sapiens
  misc_RNA (1)...(19): siRNA sense strand
uaugucagcagcuugauuu

SEQ ID NO: 179886 - RNA, 19 nt, Homo sapiens
  misc_RNA (1)...(19): siRNA sense strand
ucuagaagaugaccuaaaa

SEQ ID NO: 179887 - RNA, 19 nt, Homo sapiens
  misc_RNA (1)...(19): siRNA sense strand
ggaacuaaugguauuggaa

SEQ ID NO: 179888 - RNA, 19 nt, Homo sapiens
  misc_RNA (1)...(19): siRNA sense strand
ccaaugccuucaaacuuca

SEQ ID NO: 179889 - RNA, 19 nt, Homo sapiens
  misc_RNA (1)...(19): siRNA sense strand
gcauacagaaagcugauau

SEQ ID NO: 179890 - RNA, 19 nt, Homo sapiens
  misc_RNA (1)...(19): siRNA sense strand
ugucaaacguuucauacuc

SEQ ID NO: 179891 - RNA, 19 nt, Homo sapiens
  misc_RNA (1)...(19): siRNA sense strand
cugcugaugucuauuuaau

SEQ ID NO: 179892 - RNA, 19 nt, Homo sapiens
  misc_RNA (1)...(19): siRNA sense strand
acagaaaacuugagauuca

SEQ ID NO: 179893 - RNA, 19 nt, Homo sapiens
  misc_RNA (1)...(19): siRNA sense strand
aaagaaaccacacaucgau

SEQ ID NO: 179894 - RNA, 19 nt, Homo sapiens
  misc_RNA (1)...(19): siRNA sense strand
caagaggugcagacauuau

SEQ ID NO: 179895 - RNA, 19 nt, Homo sapiens
  misc_RNA (1)...(19): siRNA sense strand
aucaagaggugcagacauu

SEQ ID NO: 179896 - RNA, 19 nt, Homo sapiens
  misc_RNA (1)...(19): siRNA sense strand
cuggagaguuuacagauuc

SEQ ID NO: 179897 - RNA, 19 nt, Homo sapiens
  misc_RNA (1)...(19): siRNA sense strand
auucagagaugcaucacuu

SEQ ID NO: 179898 - RNA, 19 nt, Homo sapiens
  misc_RNA (1)...(19): siRNA sense strand
gaugucaagcagcguuuaa

SEQ ID NO: 179899 - RNA, 19 nt, Homo sapiens
  misc_RNA (1)...(19): siRNA sense strand
aaagacacaggcaauugua

SEQ ID NO: 179900 - RNA, 19 nt, Homo sapiens
  misc_RNA (1)...(19): siRNA sense strand
uuccgaaacucuuuguauu

SEQ ID NO: 179901 - RNA, 19 nt, Homo sapiens
  misc_RNA (1)...(19): siRNA sense strand
aacuauaggccacgaauaa

SEQ ID NO: 179902 - RNA, 19 nt, Homo sapiens
  misc_RNA (1)...(19): siRNA sense strand
caacagaaaacuugagauu

SEQ ID NO: 179903 - RNA, 19 nt, Homo sapiens
  misc_RNA (1)...(19): siRNA sense strand
cacaggcaauuguauguca

SEQ ID NO: 179904 - RNA, 19 nt, Homo sapiens
  misc_RNA (1)...(19): siRNA sense strand
caauuaaggauguagaaca

SEQ ID NO: 179905 - RNA, 19 nt, Homo sapiens
  misc_RNA (1)...(19): siRNA sense strand
cagacaaguuaacgagaau

SEQ ID NO: 179906 - RNA, 19 nt, Homo sapiens
  misc_RNA (1)...(19): siRNA sense strand
aagagaaggcauaaacauu

SEQ ID NO: 179907 - RNA, 19 nt, Homo sapiens
  misc_RNA (1)...(19): siRNA sense strand
uaagagaaggcauaaacau

SEQ ID NO: 179908 - RNA, 19 nt, Homo sapiens
  misc_RNA (1)...(19): siRNA sense strand
gacaaguuaacgagaauug

SEQ ID NO: 179909 - RNA, 19 nt, Homo sapiens
  misc_RNA (1)...(19): siRNA sense strand
gaacgaaauguugaagauc

SEQ ID NO: 179910 - RNA, 19 nt, Homo sapiens
  misc_RNA (1)...(19): siRNA sense strand
gucagcagcuugauuuaac

SEQ ID NO: 179911 - RNA, 19 nt, Homo sapiens
  misc_RNA (1)...(19): siRNA sense strand
guaagagaaggcauaaaca

SEQ ID NO: 179912 - RNA, 19 nt, Homo sapiens
  misc_RNA (1)...(19): siRNA sense strand
uuuaaaggcugcuauuacu

SEQ ID NO: 179913 - RNA, 19 nt, Homo sapiens
  misc_RNA (1)...(19): siRNA sense strand
ggaaagaguuuauguucua

SEQ ID NO: 179914 - RNA, 19 nt, Homo sapiens
  misc_RNA (1)...(19): siRNA sense strand
cagaagaacuguuugauug

SEQ ID NO: 179915 - RNA, 19 nt, Homo sapiens
  misc_RNA (1)...(19): siRNA sense strand
gagaagagcuccagcagau

SEQ ID NO: 179916 - RNA, 19 nt, Homo sapiens
  misc_RNA (1)...(19): siRNA sense strand
gcaauugugugccaucaaa

SEQ ID NO: 179917 - RNA, 19 nt, Homo sapiens
  misc_RNA (1)...(19): siRNA sense strand
ggagacaaaucaucaggaa

SEQ ID NO: 179918 - RNA, 19 nt, Homo sapiens
  misc_RNA (1)...(19): siRNA sense strand
gaagagcuccagcagauaa

SEQ ID NO: 179919 - RNA, 19 nt, Homo sapiens
  misc_RNA (1)...(19): siRNA sense strand
caagaucuguggagacaaa

SEQ ID NO: 179920 - RNA, 19 nt, Homo sapiens
  misc_RNA (1)...(19): siRNA sense strand
guuguucacuucagaauuu

SEQ ID NO: 179921 - RNA, 19 nt, Homo sapiens
  misc_RNA (1)...(19): siRNA sense strand
gcaccugacugaagaugaa

SEQ ID NO: 179922 - RNA, 19 nt, Homo sapiens
  misc_RNA (1)...(19): siRNA sense strand
gaaauuauuccaugcaaga

SEQ ID NO: 179923 - RNA, 19 nt, Homo sapiens
  misc_RNA (1)...(19): siRNA sense strand
ggaagaaauugagaacuau

SEQ ID NO: 179924 - RNA, 19 nt, Homo sapiens
  misc_RNA (1)...(19): siRNA sense strand
caaggugucuacauuaaga

SEQ ID NO: 179925 - RNA, 19 nt, Homo sapiens
  misc_RNA (1)...(19): siRNA sense strand
ccgagaagauggaauacua

SEQ ID NO: 179926 - RNA, 19 nt, Homo sapiens
  misc_RNA (1)...(19): siRNA sense strand
gaagauggaauacuaacaa

SEQ ID NO: 179927 - RNA, 19 nt, Homo sapiens
  misc_RNA (1)...(19): siRNA sense strand
cagcuuguaugcagaagua

SEQ ID NO: 179928 - RNA, 19 nt, Homo sapiens
  misc_RNA (1)...(19): siRNA sense strand
gaucaaauugugcuucuaa

SEQ ID NO: 179929 - RNA, 19 nt, Homo sapiens
  misc_RNA (1)...(19): siRNA sense strand
gcagagagacagcuuguau

SEQ ID NO: 179930 - RNA, 19 nt, Homo sapiens
  misc_RNA (1)...(19): siRNA sense strand
caaacgcauugauggauuu

SEQ ID NO: 179931 - RNA, 19 nt, Homo sapiens
  misc_RNA (1)...(19): siRNA sense strand
gaagaacuguuugauugau

SEQ ID NO: 179932 - RNA, 19 nt, Homo sapiens
  misc_RNA (1)...(19): siRNA sense strand
uagaacaccuugcacagaa

SEQ ID NO: 179933 - RNA, 19 nt, Homo sapiens
  misc_RNA (1)...(19): siRNA sense strand
aggaagaaauugagaacua

SEQ ID NO: 179934 - RNA, 19 nt, Homo sapiens
  misc_RNA (1)...(19): siRNA sense strand
gaacaccuugcacagaaua

SEQ ID NO: 179935 - RNA, 19 nt, Homo sapiens
  misc_RNA (1)...(19): siRNA sense strand
aaucaaaccagaaccaaua

SEQ ID NO: 179936 - RNA, 19 nt, Homo sapiens
  misc_RNA (1)...(19): siRNA sense strand
guagggaugucucgagaug

SEQ ID NO: 179937 - RNA, 19 nt, Homo sapiens
  misc_RNA (1)...(19): siRNA sense strand
gaggugauguggcaauugu

SEQ ID NO: 179938 - RNA, 19 nt, Homo sapiens
  misc_RNA (1)...(19): siRNA sense strand
gcucauggcugcaagaaaa

SEQ ID NO: 179939 - RNA, 19 nt, Homo sapiens
  misc_RNA (1)...(19): siRNA sense strand
ggaaaccugccaauacuug

SEQ ID NO: 179940 - RNA, 19 nt, Homo sapiens
  misc_RNA (1)...(19): siRNA sense strand
gaggugguguuuaucagaa

SEQ ID NO: 179941 - RNA, 19 nt, Homo sapiens
  misc_RNA (1)...(19): siRNA sense strand
ccaaacgcauugauggauu

SEQ ID NO: 179942 - RNA, 19 nt, Homo sapiens
  misc_RNA (1)...(19): siRNA sense strand
uuacagaagcuauacagua

SEQ ID NO: 179943 - RNA, 19 nt, Homo sapiens
  misc_RNA (1)...(19): siRNA sense strand
gaaccaauaugugacuaca

SEQ ID NO: 179944 - RNA, 19 nt, Homo sapiens
  misc_RNA (1)...(19): siRNA sense strand
caacacguccuacagaaga

SEQ ID NO: 179945 - RNA, 19 nt, Homo sapiens
  misc_RNA (1)...(19): siRNA sense strand
gugaagacuuuauuagcuu

SEQ ID NO: 179946 - RNA, 19 nt, Homo sapiens
  misc_RNA (1)...(19): siRNA sense strand
uaugcaaggugucuacauu

SEQ ID NO: 179947 - RNA, 19 nt, Homo sapiens
  misc_RNA (1)...(19): siRNA sense strand
ucaccgagaagauggaaua

SEQ ID NO: 179948 - RNA, 19 nt, Homo sapiens
  misc_RNA (1)...(19): siRNA sense strand
ccagucaggucuugauauc

SEQ ID NO: 179949 - RNA, 19 nt, Homo sapiens
  misc_RNA (1)...(19): siRNA sense strand
gauggaauacuaacaaagu

SEQ ID NO: 179950 - RNA, 19 nt, Homo sapiens
  misc_RNA (1)...(19): siRNA sense strand
gaaugugccgugccuuuga

SEQ ID NO: 179951 - RNA, 19 nt, Homo sapiens
  misc_RNA (1)...(19): siRNA sense strand
ggagaagucagcaaagcaa

SEQ ID NO: 179952 - RNA, 19 nt, Homo sapiens
  misc_RNA (1)...(19): siRNA sense strand
ugcaaggugucuacauuaa

SEQ ID NO: 179953 - RNA, 19 nt, Homo sapiens
  misc_RNA (1)...(19): siRNA sense strand
acagaagaaucaccgagaa

SEQ ID NO: 179954 - RNA, 19 nt, Homo sapiens
  misc_RNA (1)...(19): siRNA sense strand
gaagaaucaccgagaagau

SEQ ID NO: 179955 - RNA, 19 nt, Homo sapiens
  misc_RNA (1)...(19): siRNA sense strand
ucagaagaacuguuugauu

SEQ ID NO: 179956 - RNA, 19 nt, Homo sapiens
  misc_RNA (1)...(19): siRNA sense strand
cgaccucaguaacuacauu

SEQ ID NO: 179957 - RNA, 19 nt, Homo sapiens
  misc_RNA (1)...(19): siRNA sense strand
caaaccagaaccaauaugu

SEQ ID NO: 179958 - RNA, 19 nt, Homo sapiens
  misc_RNA (1)...(19): siRNA sense strand
agacaaaucaucaggaauc

SEQ ID NO: 179959 - RNA, 19 nt, Homo sapiens
  misc_RNA (1)...(19): siRNA sense strand
gacugaagaugaaauugca

SEQ ID NO: 179960 - RNA, 19 nt, Homo sapiens
  misc_RNA (1)...(19): siRNA sense strand
guccauggcagaauuagaa

SEQ ID NO: 179961 - RNA, 19 nt, Homo sapiens
  misc_RNA (1)...(19): siRNA sense strand
uacaguaugugguggaguu

SEQ ID NO: 179962 - RNA, 19 nt, Homo sapiens
  misc_RNA (1)...(19): siRNA sense strand
gccaauacuugagagaaga

SEQ ID NO: 179963 - RNA, 19 nt, Homo sapiens
  misc_RNA (1)...(19): siRNA sense strand
gaaaccugccaauacuuga

SEQ ID NO: 179964 - RNA, 19 nt, Homo sapiens
  misc_RNA (1)...(19): siRNA sense strand
aaauucagcuagcucuuca

SEQ ID NO: 179965 - RNA, 19 nt, Homo sapiens
  misc_RNA (1)...(19): siRNA sense strand
gacauugugcgacuucauu

SEQ ID NO: 179966 - RNA, 19 nt, Homo sapiens
  misc_RNA (1)...(19): siRNA sense strand
cgagaagauggaauacuaa

SEQ ID NO: 179967 - RNA, 19 nt, Homo sapiens
  misc_RNA (1)...(19): siRNA sense strand
agaaaccgcugccaacacu

SEQ ID NO: 179968 - RNA, 19 nt, Homo sapiens
  misc_RNA (1)...(19): siRNA sense strand
cuaugcaccugacugaaga

SEQ ID NO: 179969 - RNA, 19 nt, Homo sapiens
  misc_RNA (1)...(19): siRNA sense strand
cgacgucuucaaauccuua

SEQ ID NO: 179970 - RNA, 19 nt, Homo sapiens
  misc_RNA (1)...(19): siRNA sense strand
cagaaugugccgugccuuu

SEQ ID NO: 179971 - RNA, 19 nt, Homo sapiens
  misc_RNA (1)...(19): siRNA sense strand
gggaggugauguggcaauu

SEQ ID NO: 179972 - RNA, 19 nt, Homo sapiens
  misc_RNA (1)...(19): siRNA sense strand
gaaucaaaccagaaccaau

SEQ ID NO: 179973 - RNA, 19 nt, Homo sapiens
  misc_RNA (1)...(19): siRNA sense strand
ccaacgggcugacggaacu

SEQ ID NO: 179974 - RNA, 19 nt, Homo sapiens
  misc_RNA (1)...(19): siRNA sense strand
gaucuguggagacaaauca

SEQ ID NO: 179975 - RNA, 19 nt, Homo sapiens
  misc_RNA (1)...(19): siRNA sense strand
ucaaauccuuagguuguga

SEQ ID NO: 179976 - RNA, 19 nt, Homo sapiens
  misc_RNA (1)...(19): siRNA sense strand
gaagaaauugagaacuauc

SEQ ID NO: 179977 - RNA, 19 nt, Homo sapiens
  misc_RNA (1)...(19): siRNA sense strand
ucgagaugcuguaaaauuu

SEQ ID NO: 179978 - RNA, 19 nt, Homo sapiens
  misc_RNA (1)...(19): siRNA sense strand
ucagcuagcucuucaacac

SEQ ID NO: 179979 - RNA, 19 nt, Homo sapiens
  misc_RNA (1)...(19): siRNA sense strand
gguugugaagacuuuauua

SEQ ID NO: 179980 - RNA, 19 nt, Homo sapiens
  misc_RNA (1)...(19): siRNA sense strand
aaccagaaccaauauguga

SEQ ID NO: 179981 - RNA, 19 nt, Homo sapiens
  misc_RNA (1)...(19): siRNA sense strand
aaucaucaggaauccauua

SEQ ID NO: 179982 - RNA, 19 nt, Homo sapiens
  misc_RNA (1)...(19): siRNA sense strand
gcuucuaccuggacauaca

SEQ ID NO: 179983 - RNA, 19 nt, Homo sapiens
  misc_RNA (1)...(19): siRNA sense strand
guaugcagaaguacagaaa

SEQ ID NO: 179984 - RNA, 19 nt, Homo sapiens
  misc_RNA (1)...(19): siRNA sense strand
caaaucaucaggaauccau

SEQ ID NO: 179985 - RNA, 19 nt, Homo sapiens
  misc_RNA (1)...(19): siRNA sense strand
ggaaucaaaccagaaccaa

SEQ ID NO: 179986 - RNA, 19 nt, Homo sapiens
  misc_RNA (1)...(19): siRNA sense strand
acgcauugauggauuuaug

SEQ ID NO: 179987 - RNA, 19 nt, Homo sapiens
  misc_RNA (1)...(19): siRNA sense strand
cuuagguugugaagacuuu

SEQ ID NO: 179988 - RNA, 19 nt, Homo sapiens
  misc_RNA (1)...(19): siRNA sense strand
agaagaacuguuugauuga

SEQ ID NO: 179989 - RNA, 19 nt, Homo sapiens
  misc_RNA (1)...(19): siRNA sense strand
aaugcaaauugauggguaa

SEQ ID NO: 179990 - RNA, 19 nt, Homo sapiens
  misc_RNA (1)...(19): siRNA sense strand
cuucaaauccuuagguugu

SEQ ID NO: 179991 - RNA, 19 nt, Homo sapiens
  misc_RNA (1)...(19): siRNA sense strand
cugccaacacugucgauua

SEQ ID NO: 179992 - RNA, 19 nt, Homo sapiens
  misc_RNA (1)...(19): siRNA sense strand
gcaaggugucuacauuaag

SEQ ID NO: 179993 - RNA, 19 nt, Homo sapiens
  misc_RNA (1)...(19): siRNA sense strand
ugugaagacuuuauuagcu

SEQ ID NO: 179994 - RNA, 19 nt, Homo sapiens
  misc_RNA (1)...(19): siRNA sense strand
acgacgaccucaguaacua

SEQ ID NO: 179995 - RNA, 19 nt, Homo sapiens
  misc_RNA (1)...(19): siRNA sense strand
ugacuacacaccagcauca

SEQ ID NO: 179996 - RNA, 19 nt, Homo sapiens
  misc_RNA (1)...(19): siRNA sense strand
aaagcaauauacccagaca

SEQ ID NO: 179997 - RNA, 19 nt, Homo sapiens
  misc_RNA (1)...(19): siRNA sense strand
cucuagaggugguguuuau

SEQ ID NO: 179998 - RNA, 19 nt, Homo sapiens
  misc_RNA (1)...(19): siRNA sense strand
cuaaaucgcaucuggaaac

SEQ ID NO: 179999 - RNA, 19 nt, Homo sapiens
  misc_RNA (1)...(19): siRNA sense strand
cagcuucuaccuggacaua

SEQ ID NO: 180000 - RNA, 19 nt, Homo sapiens
  misc_RNA (1)...(19): siRNA sense strand
guucuaugcaccugacuga

SEQ ID NO: 180001 - RNA, 19 nt, Homo sapiens
  misc_RNA (1)...(19): siRNA sense strand
cagaaccaauaugugacua

SEQ ID NO: 180002 - RNA, 19 nt, Homo sapiens
  misc_RNA (1)...(19): siRNA sense strand
ugccaacacugucgauuac

SEQ ID NO: 180003 - RNA, 19 nt, Homo sapiens
  misc_RNA (1)...(19): siRNA sense strand
ggaguuguucacuucagaa

SEQ ID NO: 180004 - RNA, 19 nt, Homo sapiens
  misc_RNA (1)...(19): siRNA sense strand
uggaaagaguuuauguucu

SEQ ID NO: 180005 - RNA, 19 nt, Homo sapiens
  misc_RNA (1)...(19): siRNA sense strand
gaagacuuuauuagcuuug

SEQ ID NO: 180006 - RNA, 19 nt, Homo sapiens
  misc_RNA (1)...(19): siRNA sense strand
gaagucagcaaagcaaugc

SEQ ID NO: 180007 - RNA, 19 nt, Homo sapiens
  misc_RNA (1)...(19): siRNA sense strand
guagaaaccgcugccaaca

SEQ ID NO: 180008 - RNA, 19 nt, Homo sapiens
  misc_RNA (1)...(19): siRNA sense strand
ggugguguuuaucagaaug

SEQ ID NO: 180009 - RNA, 19 nt, Homo sapiens
  misc_RNA (1)...(19): siRNA sense strand
cuggaaaccugccaauacu

SEQ ID NO: 180010 - RNA, 19 nt, Homo sapiens
  misc_RNA (1)...(19): siRNA sense strand
gaucgaaccaguagaaacc

SEQ ID NO: 180011 - RNA, 19 nt, Homo sapiens
  misc_RNA (1)...(19): siRNA sense strand
cgucagaagaacuguuuga

SEQ ID NO: 180012 - RNA, 19 nt, Homo sapiens
  misc_RNA (1)...(19): siRNA sense strand
gccuuugacucucagaaca

SEQ ID NO: 180013 - RNA, 19 nt, Homo sapiens
  misc_RNA (1)...(19): siRNA sense strand
ggaaagaguuuauguucua

SEQ ID NO: 180014 - RNA, 19 nt, Homo sapiens
  misc_RNA (1)...(19): siRNA sense strand
cagaagaacuguuugauug

SEQ ID NO: 180015 - RNA, 19 nt, Homo sapiens
  misc_RNA (1)...(19): siRNA sense strand
gagaagagcuccagcagau

SEQ ID NO: 180016 - RNA, 19 nt, Homo sapiens
  misc_RNA (1)...(19): siRNA sense strand
gcaauugugugccaucaaa

SEQ ID NO: 180017 - RNA, 19 nt, Homo sapiens
  misc_RNA (1)...(19): siRNA sense strand
ggagacaaaucaucaggaa

SEQ ID NO: 180018 - RNA, 19 nt, Homo sapiens
  misc_RNA (1)...(19): siRNA sense strand
gaagagcuccagcagauaa

SEQ ID NO: 180019 - RNA, 19 nt, Homo sapiens
  misc_RNA (1)...(19): siRNA sense strand
caagaucuguggagacaaa

SEQ ID NO: 180020 - RNA, 19 nt, Homo sapiens
  misc_RNA (1)...(19): siRNA sense strand
guuguucacuucagaauuu

SEQ ID NO: 180021 - RNA, 19 nt, Homo sapiens
  misc_RNA (1)...(19): siRNA sense strand
gcaccugacugaagaugaa

SEQ ID NO: 180022 - RNA, 19 nt, Homo sapiens
  misc_RNA (1)...(19): siRNA sense strand
gaaauuauuccaugcaaga

SEQ ID NO: 180023 - RNA, 19 nt, Homo sapiens
  misc_RNA (1)...(19): siRNA sense strand
ggaagaaauugagaacuau

SEQ ID NO: 180024 - RNA, 19 nt, Homo sapiens
  misc_RNA (1)...(19): siRNA sense strand
caaggugucuacauuaaga

SEQ ID NO: 180025 - RNA, 19 nt, Homo sapiens
  misc_RNA (1)...(19): siRNA sense strand
ccgagaagauggaauacua

SEQ ID NO: 180026 - RNA, 19 nt, Homo sapiens
  misc_RNA (1)...(19): siRNA sense strand
gaagauggaauacuaacaa

SEQ ID NO: 180027 - RNA, 19 nt, Homo sapiens
  misc_RNA (1)...(19): siRNA sense strand
cagcuuguaugcagaagua

SEQ ID NO: 180028 - RNA, 19 nt, Homo sapiens
  misc_RNA (1)...(19): siRNA sense strand
gaucaaauugugcuucuaa

SEQ ID NO: 180029 - RNA, 19 nt, Homo sapiens
  misc_RNA (1)...(19): siRNA sense strand
gcagagagacagcuuguau

SEQ ID NO: 180030 - RNA, 19 nt, Homo sapiens
  misc_RNA (1)...(19): siRNA sense strand
caaacgcauugauggauuu

SEQ ID NO: 180031 - RNA, 19 nt, Homo sapiens
  misc_RNA (1)...(19): siRNA sense strand
gaagaacuguuugauugau

SEQ ID NO: 180032 - RNA, 19 nt, Homo sapiens
  misc_RNA (1)...(19): siRNA sense strand
uagaacaccuugcacagaa

SEQ ID NO: 180033 - RNA, 19 nt, Homo sapiens
  misc_RNA (1)...(19): siRNA sense strand
aggaagaaauugagaacua

SEQ ID NO: 180034 - RNA, 19 nt, Homo sapiens
  misc_RNA (1)...(19): siRNA sense strand
gaacaccuugcacagaaua

SEQ ID NO: 180035 - RNA, 19 nt, Homo sapiens
  misc_RNA (1)...(19): siRNA sense strand
aaucaaaccagaaccaaua

SEQ ID NO: 180036 - RNA, 19 nt, Homo sapiens
  misc_RNA (1)...(19): siRNA sense strand
guagggaugucucgagaug

SEQ ID NO: 180037 - RNA, 19 nt, Homo sapiens
  misc_RNA (1)...(19): siRNA sense strand
gaggugauguggcaauugu

SEQ ID NO: 180038 - RNA, 19 nt, Homo sapiens
  misc_RNA (1)...(19): siRNA sense strand
gcucauggcugcaagaaaa

SEQ ID NO: 180039 - RNA, 19 nt, Homo sapiens
  misc_RNA (1)...(19): siRNA sense strand
ggaaaccugccaauacuug

SEQ ID NO: 180040 - RNA, 19 nt, Homo sapiens
  misc_RNA (1)...(19): siRNA sense strand
gaggugguguuuaucagaa

SEQ ID NO: 180041 - RNA, 19 nt, Homo sapiens
  misc_RNA (1)...(19): siRNA sense strand
ccaaacgcauugauggauu

SEQ ID NO: 180042 - RNA, 19 nt, Homo sapiens
  misc_RNA (1)...(19): siRNA sense strand
uuacagaagcuauacagua

SEQ ID NO: 180043 - RNA, 19 nt, Homo sapiens
  misc_RNA (1)...(19): siRNA sense strand
gaaccaauaugugacuaca

SEQ ID NO: 180044 - RNA, 19 nt, Homo sapiens
  misc_RNA (1)...(19): siRNA sense strand
caacacguccuacagaaga

SEQ ID NO: 180045 - RNA, 19 nt, Homo sapiens
  misc_RNA (1)...(19): siRNA sense strand
gugaagacuuuauuagcuu

SEQ ID NO: 180046 - RNA, 19 nt, Homo sapiens
  misc_RNA (1)...(19): siRNA sense strand
uaugcaaggugucuacauu

SEQ ID NO: 180047 - RNA, 19 nt, Homo sapiens
  misc_RNA (1)...(19): siRNA sense strand
ucaccgagaagauggaaua

SEQ ID NO: 180048 - RNA, 19 nt, Homo sapiens
  misc_RNA (1)...(19): siRNA sense strand
ccagucaggucuugauauc

SEQ ID NO: 180049 - RNA, 19 nt, Homo sapiens
  misc_RNA (1)...(19): siRNA sense strand
gauggaauacuaacaaagu

SEQ ID NO: 180050 - RNA, 19 nt, Homo sapiens
  misc_RNA (1)...(19): siRNA sense strand
gaaugugccgugccuuuga

SEQ ID NO: 180051 - RNA, 19 nt, Homo sapiens
  misc_RNA (1)...(19): siRNA sense strand
ggagaagucagcaaagcaa

SEQ ID NO: 180052 - RNA, 19 nt, Homo sapiens
  misc_RNA (1)...(19): siRNA sense strand
ugcaaggugucuacauuaa

SEQ ID NO: 180053 - RNA, 19 nt, Homo sapiens
  misc_RNA (1)...(19): siRNA sense strand
acagaagaaucaccgagaa

SEQ ID NO: 180054 - RNA, 19 nt, Homo sapiens
  misc_RNA (1)...(19): siRNA sense strand
gaagaaucaccgagaagau

SEQ ID NO: 180055 - RNA, 19 nt, Homo sapiens
  misc_RNA (1)...(19): siRNA sense strand
ucagaagaacuguuugauu

SEQ ID NO: 180056 - RNA, 19 nt, Homo sapiens
  misc_RNA (1)...(19): siRNA sense strand
cgaccucaguaacuacauu

SEQ ID NO: 180057 - RNA, 19 nt, Homo sapiens
  misc_RNA (1)...(19): siRNA sense strand
caaaccagaaccaauaugu

SEQ ID NO: 180058 - RNA, 19 nt, Homo sapiens
  misc_RNA (1)...(19): siRNA sense strand
agacaaaucaucaggaauc

SEQ ID NO: 180059 - RNA, 19 nt, Homo sapiens
  misc_RNA (1)...(19): siRNA sense strand
gacugaagaugaaauugca

SEQ ID NO: 180060 - RNA, 19 nt, Homo sapiens
  misc_RNA (1)...(19): siRNA sense strand
guccauggcagaauuagaa

SEQ ID NO: 180061 - RNA, 19 nt, Homo sapiens
  misc_RNA (1)...(19): siRNA sense strand
uacaguaugugguggaguu

SEQ ID NO: 180062 - RNA, 19 nt, Homo sapiens
  misc_RNA (1)...(19): siRNA sense strand
gccaauacuugagagaaga

SEQ ID NO: 180063 - RNA, 19 nt, Homo sapiens
  misc_RNA (1)...(19): siRNA sense strand
gaaaccugccaauacuuga

SEQ ID NO: 180064 - RNA, 19 nt, Homo sapiens
  misc_RNA (1)...(19): siRNA sense strand
aaauucagcuagcucuuca

SEQ ID NO: 180065 - RNA, 19 nt, Homo sapiens
  misc_RNA (1)...(19): siRNA sense strand
gacauugugcgacuucauu

SEQ ID NO: 180066 - RNA, 19 nt, Homo sapiens
  misc_RNA (1)...(19): siRNA sense strand
cgagaagauggaauacuaa

SEQ ID NO: 180067 - RNA, 19 nt, Homo sapiens
  misc_RNA (1)...(19): siRNA sense strand
agaaaccgcugccaacacu

SEQ ID NO: 180068 - RNA, 19 nt, Homo sapiens
  misc_RNA (1)...(19): siRNA sense strand
cuaugcaccugacugaaga

SEQ ID NO: 180069 - RNA, 19 nt, Homo sapiens
  misc_RNA (1)...(19): siRNA sense strand
cgacgucuucaaauccuua

SEQ ID NO: 180070 - RNA, 19 nt, Homo sapiens
  misc_RNA (1)...(19): siRNA sense strand
cagaaugugccgugccuuu

SEQ ID NO: 180071 - RNA, 19 nt, Homo sapiens
  misc_RNA (1)...(19): siRNA sense strand
gggaggugauguggcaauu

SEQ ID NO: 180072 - RNA, 19 nt, Homo sapiens
  misc_RNA (1)...(19): siRNA sense strand
gaaucaaaccagaaccaau

SEQ ID NO: 180073 - RNA, 19 nt, Homo sapiens
  misc_RNA (1)...(19): siRNA sense strand
ccaacgggcugacggaacu

SEQ ID NO: 180074 - RNA, 19 nt, Homo sapiens
  misc_RNA (1)...(19): siRNA sense strand
gaucuguggagacaaauca

SEQ ID NO: 180075 - RNA, 19 nt, Homo sapiens
  misc_RNA (1)...(19): siRNA sense strand
ucaaauccuuagguuguga

SEQ ID NO: 180076 - RNA, 19 nt, Homo sapiens
  misc_RNA (1)...(19): siRNA sense strand
gaagaaauugagaacuauc

SEQ ID NO: 180077 - RNA, 19 nt, Homo sapiens
  misc_RNA (1)...(19): siRNA sense strand
ucgagaugcuguaaaauuu

SEQ ID NO: 180078 - RNA, 19 nt, Homo sapiens
  misc_RNA (1)...(19): siRNA sense strand
ucagcuagcucuucaacac

SEQ ID NO: 180079 - RNA, 19 nt, Homo sapiens
  misc_RNA (1)...(19): siRNA sense strand
gguugugaagacuuuauua

SEQ ID NO: 180080 - RNA, 19 nt, Homo sapiens
  misc_RNA (1)...(19): siRNA sense strand
aaccagaaccaauauguga

SEQ ID NO: 180081 - RNA, 19 nt, Homo sapiens
  misc_RNA (1)...(19): siRNA sense strand
aaucaucaggaauccauua

SEQ ID NO: 180082 - RNA, 19 nt, Homo sapiens
  misc_RNA (1)...(19): siRNA sense strand
gcuucuaccuggacauaca

SEQ ID NO: 180083 - RNA, 19 nt, Homo sapiens
  misc_RNA (1)...(19): siRNA sense strand
guaugcagaaguacagaaa

SEQ ID NO: 180084 - RNA, 19 nt, Homo sapiens
  misc_RNA (1)...(19): siRNA sense strand
caaaucaucaggaauccau

SEQ ID NO: 180085 - RNA, 19 nt, Homo sapiens
  misc_RNA (1)...(19): siRNA sense strand
ggaaucaaaccagaaccaa

SEQ ID NO: 180086 - RNA, 19 nt, Homo sapiens
  misc_RNA (1)...(19): siRNA sense strand
acgcauugauggauuuaug

SEQ ID NO: 180087 - RNA, 19 nt, Homo sapiens
  misc_RNA (1)...(19): siRNA sense strand
cuuagguugugaagacuuu

SEQ ID NO: 180088 - RNA, 19 nt, Homo sapiens
  misc_RNA (1)...(19): siRNA sense strand
agaagaacuguuugauuga

SEQ ID NO: 180089 - RNA, 19 nt, Homo sapiens
  misc_RNA (1)...(19): siRNA sense strand
aaugcaaauugauggguaa

SEQ ID NO: 180090 - RNA, 19 nt, Homo sapiens
  misc_RNA (1)...(19): siRNA sense strand
cuucaaauccuuagguugu

SEQ ID NO: 180091 - RNA, 19 nt, Homo sapiens
  misc_RNA (1)...(19): siRNA sense strand
cugccaacacugucgauua

SEQ ID NO: 180092 - RNA, 19 nt, Homo sapiens
  misc_RNA (1)...(19): siRNA sense strand
gcaaggugucuacauuaag

SEQ ID NO: 180093 - RNA, 19 nt, Homo sapiens
  misc_RNA (1)...(19): siRNA sense strand
ugugaagacuuuauuagcu

SEQ ID NO: 180094 - RNA, 19 nt, Homo sapiens
  misc_RNA (1)...(19): siRNA sense strand
acgacgaccucaguaacua

SEQ ID NO: 180095 - RNA, 19 nt, Homo sapiens
  misc_RNA (1)...(19): siRNA sense strand
ugacuacacaccagcauca

SEQ ID NO: 180096 - RNA, 19 nt, Homo sapiens
  misc_RNA (1)...(19): siRNA sense strand
aaagcaauauacccagaca

SEQ ID NO: 180097 - RNA, 19 nt, Homo sapiens
  misc_RNA (1)...(19): siRNA sense strand
cucuagaggugguguuuau

SEQ ID NO: 180098 - RNA, 19 nt, Homo sapiens
  misc_RNA (1)...(19): siRNA sense strand
cuaaaucgcaucuggaaac

SEQ ID NO: 180099 - RNA, 19 nt, Homo sapiens
  misc_RNA (1)...(19): siRNA sense strand
cagcuucuaccuggacaua

SEQ ID NO: 180100 - RNA, 19 nt, Homo sapiens
  misc_RNA (1)...(19): siRNA sense strand
guucuaugcaccugacuga

SEQ ID NO: 180101 - RNA, 19 nt, Homo sapiens
  misc_RNA (1)...(19): siRNA sense strand
cagaaccaauaugugacua

SEQ ID NO: 180102 - RNA, 19 nt, Homo sapiens
  misc_RNA (1)...(19): siRNA sense strand
ugccaacacugucgauuac

SEQ ID NO: 180103 - RNA, 19 nt, Homo sapiens
  misc_RNA (1)...(19): siRNA sense strand
ggaguuguucacuucagaa

SEQ ID NO: 180104 - RNA, 19 nt, Homo sapiens
  misc_RNA (1)...(19): siRNA sense strand
uggaaagaguuuauguucu

SEQ ID NO: 180105 - RNA, 19 nt, Homo sapiens
  misc_RNA (1)...(19): siRNA sense strand
gaagacuuuauuagcuuug

SEQ ID NO: 180106 - RNA, 19 nt, Homo sapiens
  misc_RNA (1)...(19): siRNA sense strand
gaagucagcaaagcaaugc

SEQ ID NO: 180107 - RNA, 19 nt, Homo sapiens
  misc_RNA (1)...(19): siRNA sense strand
guagaaaccgcugccaaca

SEQ ID NO: 180108 - RNA, 19 nt, Homo sapiens
  misc_RNA (1)...(19): siRNA sense strand
ggugguguuuaucagaaug

SEQ ID NO: 180109 - RNA, 19 nt, Homo sapiens
  misc_RNA (1)...(19): siRNA sense strand
cuggaaaccugccaauacu

SEQ ID NO: 180110 - RNA, 19 nt, Homo sapiens
  misc_RNA (1)...(19): siRNA sense strand
gaucgaaccaguagaaacc

SEQ ID NO: 180111 - RNA, 19 nt, Homo sapiens
  misc_RNA (1)...(19): siRNA sense strand
cgucagaagaacuguuuga

SEQ ID NO: 180112 - RNA, 19 nt, Homo sapiens
  misc_RNA (1)...(19): siRNA sense strand
gccuuugacucucagaaca

SEQ ID NO: 180113 - RNA, 19 nt, Homo sapiens
  misc_RNA (1)...(19): siRNA sense strand
ggaaagaguuuauguucua

SEQ ID NO: 180114 - RNA, 19 nt, Homo sapiens
  misc_RNA (1)...(19): siRNA sense strand
cagaagaacuguuugauug

SEQ ID NO: 180115 - RNA, 19 nt, Homo sapiens
  misc_RNA (1)...(19): siRNA sense strand
gagaagagcuccagcagau

SEQ ID NO: 180116 - RNA, 19 nt, Homo sapiens
  misc_RNA (1)...(19): siRNA sense strand
gcaauugugugccaucaaa

SEQ ID NO: 180117 - RNA, 19 nt, Homo sapiens
  misc_RNA (1)...(19): siRNA sense strand
ggagacaaaucaucaggaa

SEQ ID NO: 180118 - RNA, 19 nt, Homo sapiens
  misc_RNA (1)...(19): siRNA sense strand
gaagagcuccagcagauaa

SEQ ID NO: 180119 - RNA, 19 nt, Homo sapiens
  misc_RNA (1)...(19): siRNA sense strand
caagaucuguggagacaaa

SEQ ID NO: 180120 - RNA, 19 nt, Homo sapiens
  misc_RNA (1)...(19): siRNA sense strand
guuguucacuucagaauuu

SEQ ID NO: 180121 - RNA, 19 nt, Homo sapiens
  misc_RNA (1)...(19): siRNA sense strand
gcaccugacugaagaugaa

SEQ ID NO: 180122 - RNA, 19 nt, Homo sapiens
  misc_RNA (1)...(19): siRNA sense strand
gaaauuauuccaugcaaga

SEQ ID NO: 180123 - RNA, 19 nt, Homo sapiens
  misc_RNA (1)...(19): siRNA sense strand
ggaagaaauugagaacuau

SEQ ID NO: 180124 - RNA, 19 nt, Homo sapiens
  misc_RNA (1)...(19): siRNA sense strand
caaggugucuacauuaaga

SEQ ID NO: 180125 - RNA, 19 nt, Homo sapiens
  misc_RNA (1)...(19): siRNA sense strand
ccgagaagauggaauacua

SEQ ID NO: 180126 - RNA, 19 nt, Homo sapiens
  misc_RNA (1)...(19): siRNA sense strand
gaagauggaauacuaacaa

SEQ ID NO: 180127 - RNA, 19 nt, Homo sapiens
  misc_RNA (1)...(19): siRNA sense strand
cagcuuguaugcagaagua

SEQ ID NO: 180128 - RNA, 19 nt, Homo sapiens
  misc_RNA (1)...(19): siRNA sense strand
gaucaaauugugcuucuaa

SEQ ID NO: 180129 - RNA, 19 nt, Homo sapiens
  misc_RNA (1)...(19): siRNA sense strand
gcagagagacagcuuguau

SEQ ID NO: 180130 - RNA, 19 nt, Homo sapiens
  misc_RNA (1)...(19): siRNA sense strand
caaacgcauugauggauuu

SEQ ID NO: 180131 - RNA, 19 nt, Homo sapiens
  misc_RNA (1)...(19): siRNA sense strand
gaagaacuguuugauugau

SEQ ID NO: 180132 - RNA, 19 nt, Homo sapiens
  misc_RNA (1)...(19): siRNA sense strand
uagaacaccuugcacagaa

SEQ ID NO: 180133 - RNA, 19 nt, Homo sapiens
  misc_RNA (1)...(19): siRNA sense strand
aggaagaaauugagaacua

SEQ ID NO: 180134 - RNA, 19 nt, Homo sapiens
  misc_RNA (1)...(19): siRNA sense strand
gaacaccuugcacagaaua

SEQ ID NO: 180135 - RNA, 19 nt, Homo sapiens
  misc_RNA (1)...(19): siRNA sense strand
aaucaaaccagaaccaaua

SEQ ID NO: 180136 - RNA, 19 nt, Homo sapiens
  misc_RNA (1)...(19): siRNA sense strand
guagggaugucucgagaug

SEQ ID NO: 180137 - RNA, 19 nt, Homo sapiens
  misc_RNA (1)...(19): siRNA sense strand
gaggugauguggcaauugu

SEQ ID NO: 180138 - RNA, 19 nt, Homo sapiens
  misc_RNA (1)...(19): siRNA sense strand
gcucauggcugcaagaaaa

SEQ ID NO: 180139 - RNA, 19 nt, Homo sapiens
  misc_RNA (1)...(19): siRNA sense strand
ggaaaccugccaauacuug

SEQ ID NO: 180140 - RNA, 19 nt, Homo sapiens
  misc_RNA (1)...(19): siRNA sense strand
gaggugguguuuaucagaa

SEQ ID NO: 180141 - RNA, 19 nt, Homo sapiens
  misc_RNA (1)...(19): siRNA sense strand
ccaaacgcauugauggauu

SEQ ID NO: 180142 - RNA, 19 nt, Homo sapiens
  misc_RNA (1)...(19): siRNA sense strand
uuacagaagcuauacagua

SEQ ID NO: 180143 - RNA, 19 nt, Homo sapiens
  misc_RNA (1)...(19): siRNA sense strand
gaaccaauaugugacuaca

SEQ ID NO: 180144 - RNA, 19 nt, Homo sapiens
  misc_RNA (1)...(19): siRNA sense strand
caacacguccuacagaaga

SEQ ID NO: 180145 - RNA, 19 nt, Homo sapiens
  misc_RNA (1)...(19): siRNA sense strand
gugaagacuuuauuagcuu

SEQ ID NO: 180146 - RNA, 19 nt, Homo sapiens
  misc_RNA (1)...(19): siRNA sense strand
uaugcaaggugucuacauu

SEQ ID NO: 180147 - RNA, 19 nt, Homo sapiens
  misc_RNA (1)...(19): siRNA sense strand
ucaccgagaagauggaaua

SEQ ID NO: 180148 - RNA, 19 nt, Homo sapiens
  misc_RNA (1)...(19): siRNA sense strand
ccagucaggucuugauauc

SEQ ID NO: 180149 - RNA, 19 nt, Homo sapiens
  misc_RNA (1)...(19): siRNA sense strand
gauggaauacuaacaaagu

SEQ ID NO: 180150 - RNA, 19 nt, Homo sapiens
  misc_RNA (1)...(19): siRNA sense strand
gaaugugccgugccuuuga

SEQ ID NO: 180151 - RNA, 19 nt, Homo sapiens
  misc_RNA (1)...(19): siRNA sense strand
ggagaagucagcaaagcaa

SEQ ID NO: 180152 - RNA, 19 nt, Homo sapiens
  misc_RNA (1)...(19): siRNA sense strand
ugcaaggugucuacauuaa

SEQ ID NO: 180153 - RNA, 19 nt, Homo sapiens
  misc_RNA (1)...(19): siRNA sense strand
acagaagaaucaccgagaa

SEQ ID NO: 180154 - RNA, 19 nt, Homo sapiens
  misc_RNA (1)...(19): siRNA sense strand
gaagaaucaccgagaagau

SEQ ID NO: 180155 - RNA, 19 nt, Homo sapiens
  misc_RNA (1)...(19): siRNA sense strand
ucagaagaacuguuugauu

SEQ ID NO: 180156 - RNA, 19 nt, Homo sapiens
  misc_RNA (1)...(19): siRNA sense strand
cgaccucaguaacuacauu

SEQ ID NO: 180157 - RNA, 19 nt, Homo sapiens
  misc_RNA (1)...(19): siRNA sense strand
caaaccagaaccaauaugu

SEQ ID NO: 180158 - RNA, 19 nt, Homo sapiens
  misc_RNA (1)...(19): siRNA sense strand
agacaaaucaucaggaauc

SEQ ID NO: 180159 - RNA, 19 nt, Homo sapiens
  misc_RNA (1)...(19): siRNA sense strand
gacugaagaugaaauugca

SEQ ID NO: 180160 - RNA, 19 nt, Homo sapiens
  misc_RNA (1)...(19): siRNA sense strand
guccauggcagaauuagaa

SEQ ID NO: 180161 - RNA, 19 nt, Homo sapiens
  misc_RNA (1)...(19): siRNA sense strand
uacaguaugugguggaguu

SEQ ID NO: 180162 - RNA, 19 nt, Homo sapiens
  misc_RNA (1)...(19): siRNA sense strand
gccaauacuugagagaaga

SEQ ID NO: 180163 - RNA, 19 nt, Homo sapiens
  misc_RNA (1)...(19): siRNA sense strand
gaaaccugccaauacuuga

SEQ ID NO: 180164 - RNA, 19 nt, Homo sapiens
  misc_RNA (1)...(19): siRNA sense strand
aaauucagcuagcucuuca

SEQ ID NO: 180165 - RNA, 19 nt, Homo sapiens
  misc_RNA (1)...(19): siRNA sense strand
gacauugugcgacuucauu

SEQ ID NO: 180166 - RNA, 19 nt, Homo sapiens
  misc_RNA (1)...(19): siRNA sense strand
cgagaagauggaauacuaa

SEQ ID NO: 180167 - RNA, 19 nt, Homo sapiens
  misc_RNA (1)...(19): siRNA sense strand
agaaaccgcugccaacacu

SEQ ID NO: 180168 - RNA, 19 nt, Homo sapiens
  misc_RNA (1)...(19): siRNA sense strand
cuaugcaccugacugaaga

SEQ ID NO: 180169 - RNA, 19 nt, Homo sapiens
  misc_RNA (1)...(19): siRNA sense strand
cgacgucuucaaauccuua

SEQ ID NO: 180170 - RNA, 19 nt, Homo sapiens
  misc_RNA (1)...(19): siRNA sense strand
cagaaugugccgugccuuu

SEQ ID NO: 180171 - RNA, 19 nt, Homo sapiens
  misc_RNA (1)...(19): siRNA sense strand
gggaggugauguggcaauu

SEQ ID NO: 180172 - RNA, 19 nt, Homo sapiens
  misc_RNA (1)...(19): siRNA sense strand
gaaucaaaccagaaccaau

SEQ ID NO: 180173 - RNA, 19 nt, Homo sapiens
  misc_RNA (1)...(19): siRNA sense strand
ccaacgggcugacggaacu

SEQ ID NO: 180174 - RNA, 19 nt, Homo sapiens
  misc_RNA (1)...(19): siRNA sense strand
gaucuguggagacaaauca

SEQ ID NO: 180175 - RNA, 19 nt, Homo sapiens
  misc_RNA (1)...(19): siRNA sense strand
ucaaauccuuagguuguga

SEQ ID NO: 180176 - RNA, 19 nt, Homo sapiens
  misc_RNA (1)...(19): siRNA sense strand
gaagaaauugagaacuauc

SEQ ID NO: 180177 - RNA, 19 nt, Homo sapiens
  misc_RNA (1)...(19): siRNA sense strand
ucgagaugcuguaaaauuu

SEQ ID NO: 180178 - RNA, 19 nt, Homo sapiens
  misc_RNA (1)...(19): siRNA sense strand
ucagcuagcucuucaacac

SEQ ID NO: 180179 - RNA, 19 nt, Homo sapiens
  misc_RNA (1)...(19): siRNA sense strand
gguugugaagacuuuauua

SEQ ID NO: 180180 - RNA, 19 nt, Homo sapiens
  misc_RNA (1)...(19): siRNA sense strand
aaccagaaccaauauguga

SEQ ID NO: 180181 - RNA, 19 nt, Homo sapiens
  misc_RNA (1)...(19): siRNA sense strand
aaucaucaggaauccauua

SEQ ID NO: 180182 - RNA, 19 nt, Homo sapiens
  misc_RNA (1)...(19): siRNA sense strand
gcuucuaccuggacauaca

SEQ ID NO: 180183 - RNA, 19 nt, Homo sapiens
  misc_RNA (1)...(19): siRNA sense strand
guaugcagaaguacagaaa

SEQ ID NO: 180184 - RNA, 19 nt, Homo sapiens
  misc_RNA (1)...(19): siRNA sense strand
caaaucaucaggaauccau

SEQ ID NO: 180185 - RNA, 19 nt, Homo sapiens
  misc_RNA (1)...(19): siRNA sense strand
ggaaucaaaccagaaccaa

SEQ ID NO: 180186 - RNA, 19 nt, Homo sapiens
  misc_RNA (1)...(19): siRNA sense strand
acgcauugauggauuuaug

SEQ ID NO: 180187 - RNA, 19 nt, Homo sapiens
  misc_RNA (1)...(19): siRNA sense strand
cuuagguugugaagacuuu

SEQ ID NO: 180188 - RNA, 19 nt, Homo sapiens
  misc_RNA (1)...(19): siRNA sense strand
agaagaacuguuugauuga

SEQ ID NO: 180189 - RNA, 19 nt, Homo sapiens
  misc_RNA (1)...(19): siRNA sense strand
aaugcaaauugauggguaa

SEQ ID NO: 180190 - RNA, 19 nt, Homo sapiens
  misc_RNA (1)...(19): siRNA sense strand
cuucaaauccuuagguugu

SEQ ID NO: 180191 - RNA, 19 nt, Homo sapiens
  misc_RNA (1)...(19): siRNA sense strand
cugccaacacugucgauua

SEQ ID NO: 180192 - RNA, 19 nt, Homo sapiens
  misc_RNA (1)...(19): siRNA sense strand
gcaaggugucuacauuaag

SEQ ID NO: 180193 - RNA, 19 nt, Homo sapiens
  misc_RNA (1)...(19): siRNA sense strand
ugugaagacuuuauuagcu

SEQ ID NO: 180194 - RNA, 19 nt, Homo sapiens
  misc_RNA (1)...(19): siRNA sense strand
acgacgaccucaguaacua

SEQ ID NO: 180195 - RNA, 19 nt, Homo sapiens
  misc_RNA (1)...(19): siRNA sense strand
ugacuacacaccagcauca

SEQ ID NO: 180196 - RNA, 19 nt, Homo sapiens
  misc_RNA (1)...(19): siRNA sense strand
aaagcaauauacccagaca

SEQ ID NO: 180197 - RNA, 19 nt, Homo sapiens
  misc_RNA (1)...(19): siRNA sense strand
cucuagaggugguguuuau

SEQ ID NO: 180198 - RNA, 19 nt, Homo sapiens
  misc_RNA (1)...(19): siRNA sense strand
cuaaaucgcaucuggaaac

SEQ ID NO: 180199 - RNA, 19 nt, Homo sapiens
  misc_RNA (1)...(19): siRNA sense strand
cagcuucuaccuggacaua

SEQ ID NO: 180200 - RNA, 19 nt, Homo sapiens
  misc_RNA (1)...(19): siRNA sense strand
guucuaugcaccugacuga

SEQ ID NO: 180201 - RNA, 19 nt, Homo sapiens
  misc_RNA (1)...(19): siRNA sense strand
cagaaccaauaugugacua

SEQ ID NO: 180202 - RNA, 19 nt, Homo sapiens
  misc_RNA (1)...(19): siRNA sense strand
ugccaacacugucgauuac

SEQ ID NO: 180203 - RNA, 19 nt, Homo sapiens
  misc_RNA (1)...(19): siRNA sense strand
ggaguuguucacuucagaa

SEQ ID NO: 180204 - RNA, 19 nt, Homo sapiens
  misc_RNA (1)...(19): siRNA sense strand
uggaaagaguuuauguucu

SEQ ID NO: 180205 - RNA, 19 nt, Homo sapiens
  misc_RNA (1)...(19): siRNA sense strand
gaagacuuuauuagcuuug

SEQ ID NO: 180206 - RNA, 19 nt, Homo sapiens
  misc_RNA (1)...(19): siRNA sense strand
gaagucagcaaagcaaugc

SEQ ID NO: 180207 - RNA, 19 nt, Homo sapiens
  misc_RNA (1)...(19): siRNA sense strand
guagaaaccgcugccaaca

SEQ ID NO: 180208 - RNA, 19 nt, Homo sapiens
  misc_RNA (1)...(19): siRNA sense strand
ggugguguuuaucagaaug

SEQ ID NO: 180209 - RNA, 19 nt, Homo sapiens
  misc_RNA (1)...(19): siRNA sense strand
cuggaaaccugccaauacu

SEQ ID NO: 180210 - RNA, 19 nt, Homo sapiens
  misc_RNA (1)...(19): siRNA sense strand
gaucgaaccaguagaaacc

SEQ ID NO: 180211 - RNA, 19 nt, Homo sapiens
  misc_RNA (1)...(19): siRNA sense strand
cgucagaagaacuguuuga

SEQ ID NO: 180212 - RNA, 19 nt, Homo sapiens
  misc_RNA (1)...(19): siRNA sense strand
gccuuugacucucagaaca

SEQ ID NO: 180213 - RNA, 19 nt, Homo sapiens
  misc_RNA (1)...(19): siRNA sense strand
ggaaagaguuuauguucua

SEQ ID NO: 180214 - RNA, 19 nt, Homo sapiens
  misc_RNA (1)...(19): siRNA sense strand
cagaagaacuguuugauug

SEQ ID NO: 180215 - RNA, 19 nt, Homo sapiens
  misc_RNA (1)...(19): siRNA sense strand
gagaagagcuccagcagau

SEQ ID NO: 180216 - RNA, 19 nt, Homo sapiens
  misc_RNA (1)...(19): siRNA sense strand
gcaauugugugccaucaaa

SEQ ID NO: 180217 - RNA, 19 nt, Homo sapiens
  misc_RNA (1)...(19): siRNA sense strand
ggagacaaaucaucaggaa

SEQ ID NO: 180218 - RNA, 19 nt, Homo sapiens
  misc_RNA (1)...(19): siRNA sense strand
gaagagcuccagcagauaa

SEQ ID NO: 180219 - RNA, 19 nt, Homo sapiens
  misc_RNA (1)...(19): siRNA sense strand
caagaucuguggagacaaa

SEQ ID NO: 180220 - RNA, 19 nt, Homo sapiens
  misc_RNA (1)...(19): siRNA sense strand
guuguucacuucagaauuu

SEQ ID NO: 180221 - RNA, 19 nt, Homo sapiens
  misc_RNA (1)...(19): siRNA sense strand
gcaccugacugaagaugaa

SEQ ID NO: 180222 - RNA, 19 nt, Homo sapiens
  misc_RNA (1)...(19): siRNA sense strand
gaaauuauuccaugcaaga

SEQ ID NO: 180223 - RNA, 19 nt, Homo sapiens
  misc_RNA (1)...(19): siRNA sense strand
ggaagaaauugagaacuau

SEQ ID NO: 180224 - RNA, 19 nt, Homo sapiens
  misc_RNA (1)...(19): siRNA sense strand
caaggugucuacauuaaga

SEQ ID NO: 180225 - RNA, 19 nt, Homo sapiens
  misc_RNA (1)...(19): siRNA sense strand
ccgagaagauggaauacua

SEQ ID NO: 180226 - RNA, 19 nt, Homo sapiens
  misc_RNA (1)...(19): siRNA sense strand
gaagauggaauacuaacaa

SEQ ID NO: 180227 - RNA, 19 nt, Homo sapiens
  misc_RNA (1)...(19): siRNA sense strand
cagcuuguaugcagaagua

SEQ ID NO: 180228 - RNA, 19 nt, Homo sapiens
  misc_RNA (1)...(19): siRNA sense strand
gaucaaauugugcuucuaa

SEQ ID NO: 180229 - RNA, 19 nt, Homo sapiens
  misc_RNA (1)...(19): siRNA sense strand
gcagagagacagcuuguau

SEQ ID NO: 180230 - RNA, 19 nt, Homo sapiens
  misc_RNA (1)...(19): siRNA sense strand
caaacgcauugauggauuu

SEQ ID NO: 180231 - RNA, 19 nt, Homo sapiens
  misc_RNA (1)...(19): siRNA sense strand
gaagaacuguuugauugau

SEQ ID NO: 180232 - RNA, 19 nt, Homo sapiens
  misc_RNA (1)...(19): siRNA sense strand
uagaacaccuugcacagaa

SEQ ID NO: 180233 - RNA, 19 nt, Homo sapiens
  misc_RNA (1)...(19): siRNA sense strand
aggaagaaauugagaacua

SEQ ID NO: 180234 - RNA, 19 nt, Homo sapiens
  misc_RNA (1)...(19): siRNA sense strand
gaacaccuugcacagaaua

SEQ ID NO: 180235 - RNA, 19 nt, Homo sapiens
  misc_RNA (1)...(19): siRNA sense strand
aaucaaaccagaaccaaua

SEQ ID NO: 180236 - RNA, 19 nt, Homo sapiens
  misc_RNA (1)...(19): siRNA sense strand
guagggaugucucgagaug

SEQ ID NO: 180237 - RNA, 19 nt, Homo sapiens
  misc_RNA (1)...(19): siRNA sense strand
gaggugauguggcaauugu

SEQ ID NO: 180238 - RNA, 19 nt, Homo sapiens
  misc_RNA (1)...(19): siRNA sense strand
gcucauggcugcaagaaaa

SEQ ID NO: 180239 - RNA, 19 nt, Homo sapiens
  misc_RNA (1)...(19): siRNA sense strand
ggaaaccugccaauacuug

SEQ ID NO: 180240 - RNA, 19 nt, Homo sapiens
  misc_RNA (1)...(19): siRNA sense strand
gaggugguguuuaucagaa

SEQ ID NO: 180241 - RNA, 19 nt, Homo sapiens
  misc_RNA (1)...(19): siRNA sense strand
ccaaacgcauugauggauu

SEQ ID NO: 180242 - RNA, 19 nt, Homo sapiens
  misc_RNA (1)...(19): siRNA sense strand
uuacagaagcuauacagua

SEQ ID NO: 180243 - RNA, 19 nt, Homo sapiens
  misc_RNA (1)...(19): siRNA sense strand
gaaccaauaugugacuaca

SEQ ID NO: 180244 - RNA, 19 nt, Homo sapiens
  misc_RNA (1)...(19): siRNA sense strand
caacacguccuacagaaga

SEQ ID NO: 180245 - RNA, 19 nt, Homo sapiens
  misc_RNA (1)...(19): siRNA sense strand
gugaagacuuuauuagcuu

SEQ ID NO: 180246 - RNA, 19 nt, Homo sapiens
  misc_RNA (1)...(19): siRNA sense strand
uaugcaaggugucuacauu

SEQ ID NO: 180247 - RNA, 19 nt, Homo sapiens
  misc_RNA (1)...(19): siRNA sense strand
ucaccgagaagauggaaua

SEQ ID NO: 180248 - RNA, 19 nt, Homo sapiens
  misc_RNA (1)...(19): siRNA sense strand
ccagucaggucuugauauc

SEQ ID NO: 180249 - RNA, 19 nt, Homo sapiens
  misc_RNA (1)...(19): siRNA sense strand
gauggaauacuaacaaagu

SEQ ID NO: 180250 - RNA, 19 nt, Homo sapiens
  misc_RNA (1)...(19): siRNA sense strand
gaaugugccgugccuuuga

SEQ ID NO: 180251 - RNA, 19 nt, Homo sapiens
  misc_RNA (1)...(19): siRNA sense strand
ggagaagucagcaaagcaa

SEQ ID NO: 180252 - RNA, 19 nt, Homo sapiens
  misc_RNA (1)...(19): siRNA sense strand
ugcaaggugucuacauuaa

SEQ ID NO: 180253 - RNA, 19 nt, Homo sapiens
  misc_RNA (1)...(19): siRNA sense strand
acagaagaaucaccgagaa

SEQ ID NO: 180254 - RNA, 19 nt, Homo sapiens
  misc_RNA (1)...(19): siRNA sense strand
gaagaaucaccgagaagau

SEQ ID NO: 180255 - RNA, 19 nt, Homo sapiens
  misc_RNA (1)...(19): siRNA sense strand
ucagaagaacuguuugauu

SEQ ID NO: 180256 - RNA, 19 nt, Homo sapiens
  misc_RNA (1)...(19): siRNA sense strand
cgaccucaguaacuacauu

SEQ ID NO: 180257 - RNA, 19 nt, Homo sapiens
  misc_RNA (1)...(19): siRNA sense strand
caaaccagaaccaauaugu

SEQ ID NO: 180258 - RNA, 19 nt, Homo sapiens
  misc_RNA (1)...(19): siRNA sense strand
agacaaaucaucaggaauc

SEQ ID NO: 180259 - RNA, 19 nt, Homo sapiens
  misc_RNA (1)...(19): siRNA sense strand
gacugaagaugaaauugca

SEQ ID NO: 180260 - RNA, 19 nt, Homo sapiens
  misc_RNA (1)...(19): siRNA sense strand
guccauggcagaauuagaa

SEQ ID NO: 180261 - RNA, 19 nt, Homo sapiens
  misc_RNA (1)...(19): siRNA sense strand
uacaguaugugguggaguu

SEQ ID NO: 180262 - RNA, 19 nt, Homo sapiens
  misc_RNA (1)...(19): siRNA sense strand
gccaauacuugagagaaga

SEQ ID NO: 180263 - RNA, 19 nt, Homo sapiens
  misc_RNA (1)...(19): siRNA sense strand
gaaaccugccaauacuuga

SEQ ID NO: 180264 - RNA, 19 nt, Homo sapiens
  misc_RNA (1)...(19): siRNA sense strand
aaauucagcuagcucuuca

SEQ ID NO: 180265 - RNA, 19 nt, Homo sapiens
  misc_RNA (1)...(19): siRNA sense strand
gacauugugcgacuucauu

SEQ ID NO: 180266 - RNA, 19 nt, Homo sapiens
  misc_RNA (1)...(19): siRNA sense strand
cgagaagauggaauacuaa

SEQ ID NO: 180267 - RNA, 19 nt, Homo sapiens
  misc_RNA (1)...(19): siRNA sense strand
agaaaccgcugccaacacu

SEQ ID NO: 180268 - RNA, 19 nt, Homo sapiens
  misc_RNA (1)...(19): siRNA sense strand
cuaugcaccugacugaaga

SEQ ID NO: 180269 - RNA, 19 nt, Homo sapiens
  misc_RNA (1)...(19): siRNA sense strand
cgacgucuucaaauccuua

SEQ ID NO: 180270 - RNA, 19 nt, Homo sapiens
  misc_RNA (1)...(19): siRNA sense strand
cagaaugugccgugccuuu

SEQ ID NO: 180271 - RNA, 19 nt, Homo sapiens
  misc_RNA (1)...(19): siRNA sense strand
gggaggugauguggcaauu

SEQ ID NO: 180272 - RNA, 19 nt, Homo sapiens
  misc_RNA (1)...(19): siRNA sense strand
gaaucaaaccagaaccaau

SEQ ID NO: 180273 - RNA, 19 nt, Homo sapiens
  misc_RNA (1)...(19): siRNA sense strand
ccaacgggcugacggaacu

SEQ ID NO: 180274 - RNA, 19 nt, Homo sapiens
  misc_RNA (1)...(19): siRNA sense strand
gaucuguggagacaaauca

SEQ ID NO: 180275 - RNA, 19 nt, Homo sapiens
  misc_RNA (1)...(19): siRNA sense strand
ucaaauccuuagguuguga

SEQ ID NO: 180276 - RNA, 19 nt, Homo sapiens
  misc_RNA (1)...(19): siRNA sense strand
gaagaaauugagaacuauc

SEQ ID NO: 180277 - RNA, 19 nt, Homo sapiens
  misc_RNA (1)...(19): siRNA sense strand
ucgagaugcuguaaaauuu

SEQ ID NO: 180278 - RNA, 19 nt, Homo sapiens
  misc_RNA (1)...(19): siRNA sense strand
ucagcuagcucuucaacac

SEQ ID NO: 180279 - RNA, 19 nt, Homo sapiens
  misc_RNA (1)...(19): siRNA sense strand
gguugugaagacuuuauua

SEQ ID NO: 180280 - RNA, 19 nt, Homo sapiens
  misc_RNA (1)...(19): siRNA sense strand
aaccagaaccaauauguga

SEQ ID NO: 180281 - RNA, 19 nt, Homo sapiens
  misc_RNA (1)...(19): siRNA sense strand
aaucaucaggaauccauua

SEQ ID NO: 180282 - RNA, 19 nt, Homo sapiens
  misc_RNA (1)...(19): siRNA sense strand
gcuucuaccuggacauaca

SEQ ID NO: 180283 - RNA, 19 nt, Homo sapiens
  misc_RNA (1)...(19): siRNA sense strand
guaugcagaaguacagaaa

SEQ ID NO: 180284 - RNA, 19 nt, Homo sapiens
  misc_RNA (1)...(19): siRNA sense strand
caaaucaucaggaauccau

SEQ ID NO: 180285 - RNA, 19 nt, Homo sapiens
  misc_RNA (1)...(19): siRNA sense strand
ggaaucaaaccagaaccaa

SEQ ID NO: 180286 - RNA, 19 nt, Homo sapiens
  misc_RNA (1)...(19): siRNA sense strand
acgcauugauggauuuaug

SEQ ID NO: 180287 - RNA, 19 nt, Homo sapiens
  misc_RNA (1)...(19): siRNA sense strand
cuuagguugugaagacuuu

SEQ ID NO: 180288 - RNA, 19 nt, Homo sapiens
  misc_RNA (1)...(19): siRNA sense strand
agaagaacuguuugauuga

SEQ ID NO: 180289 - RNA, 19 nt, Homo sapiens
  misc_RNA (1)...(19): siRNA sense strand
aaugcaaauugauggguaa

SEQ ID NO: 180290 - RNA, 19 nt, Homo sapiens
  misc_RNA (1)...(19): siRNA sense strand
cuucaaauccuuagguugu

SEQ ID NO: 180291 - RNA, 19 nt, Homo sapiens
  misc_RNA (1)...(19): siRNA sense strand
cugccaacacugucgauua

SEQ ID NO: 180292 - RNA, 19 nt, Homo sapiens
  misc_RNA (1)...(19): siRNA sense strand
gcaaggugucuacauuaag

SEQ ID NO: 180293 - RNA, 19 nt, Homo sapiens
  misc_RNA (1)...(19): siRNA sense strand
ugugaagacuuuauuagcu

SEQ ID NO: 180294 - RNA, 19 nt, Homo sapiens
  misc_RNA (1)...(19): siRNA sense strand
acgacgaccucaguaacua

SEQ ID NO: 180295 - RNA, 19 nt, Homo sapiens
  misc_RNA (1)...(19): siRNA sense strand
ugacuacacaccagcauca

SEQ ID NO: 180296 - RNA, 19 nt, Homo sapiens
  misc_RNA (1)...(19): siRNA sense strand
aaagcaauauacccagaca

SEQ ID NO: 180297 - RNA, 19 nt, Homo sapiens
  misc_RNA (1)...(19): siRNA sense strand
cucuagaggugguguuuau

SEQ ID NO: 180298 - RNA, 19 nt, Homo sapiens
  misc_RNA (1)...(19): siRNA sense strand
cuaaaucgcaucuggaaac

SEQ ID NO: 180299 - RNA, 19 nt, Homo sapiens
  misc_RNA (1)...(19): siRNA sense strand
cagcuucuaccuggacaua

SEQ ID NO: 180300 - RNA, 19 nt, Homo sapiens
  misc_RNA (1)...(19): siRNA sense strand
guucuaugcaccugacuga

SEQ ID NO: 180301 - RNA, 19 nt, Homo sapiens
  misc_RNA (1)...(19): siRNA sense strand
cagaaccaauaugugacua

SEQ ID NO: 180302 - RNA, 19 nt, Homo sapiens
  misc_RNA (1)...(19): siRNA sense strand
ugccaacacugucgauuac

SEQ ID NO: 180303 - RNA, 19 nt, Homo sapiens
  misc_RNA (1)...(19): siRNA sense strand
ggaguuguucacuucagaa

SEQ ID NO: 180304 - RNA, 19 nt, Homo sapiens
  misc_RNA (1)...(19): siRNA sense strand
uggaaagaguuuauguucu

SEQ ID NO: 180305 - RNA, 19 nt, Homo sapiens
  misc_RNA (1)...(19): siRNA sense strand
gaagacuuuauuagcuuug

SEQ ID NO: 180306 - RNA, 19 nt, Homo sapiens
  misc_RNA (1)...(19): siRNA sense strand
gaagucagcaaagcaaugc

SEQ ID NO: 180307 - RNA, 19 nt, Homo sapiens
  misc_RNA (1)...(19): siRNA sense strand
guagaaaccgcugccaaca

SEQ ID NO: 180308 - RNA, 19 nt, Homo sapiens
  misc_RNA (1)...(19): siRNA sense strand
ggugguguuuaucagaaug

SEQ ID NO: 180309 - RNA, 19 nt, Homo sapiens
  misc_RNA (1)...(19): siRNA sense strand
cuggaaaccugccaauacu

SEQ ID NO: 180310 - RNA, 19 nt, Homo sapiens
  misc_RNA (1)...(19): siRNA sense strand
gaucgaaccaguagaaacc

SEQ ID NO: 180311 - RNA, 19 nt, Homo sapiens
  misc_RNA (1)...(19): siRNA sense strand
cgucagaagaacuguuuga

SEQ ID NO: 180312 - RNA, 19 nt, Homo sapiens
  misc_RNA (1)...(19): siRNA sense strand
gccuuugacucucagaaca

SEQ ID NO: 180313 - RNA, 19 nt, Homo sapiens
  misc_RNA (1)...(19): siRNA sense strand
caacauaccugguuuauua

SEQ ID NO: 180314 - RNA, 19 nt, Homo sapiens
  misc_RNA (1)...(19): siRNA sense strand
ggacagaaguuuccaauuu

SEQ ID NO: 180315 - RNA, 19 nt, Homo sapiens
  misc_RNA (1)...(19): siRNA sense strand
gaggagaccuucuuacuua

SEQ ID NO: 180316 - RNA, 19 nt, Homo sapiens
  misc_RNA (1)...(19): siRNA sense strand
ggagaaagcugaagauaau

SEQ ID NO: 180317 - RNA, 19 nt, Homo sapiens
  misc_RNA (1)...(19): siRNA sense strand
gaagcagaaucuaguauua

SEQ ID NO: 180318 - RNA, 19 nt, Homo sapiens
  misc_RNA (1)...(19): siRNA sense strand
gaagaaggcugccaacaug

SEQ ID NO: 180319 - RNA, 19 nt, Homo sapiens
  misc_RNA (1)...(19): siRNA sense strand
uuacagagguucaggauua

SEQ ID NO: 180320 - RNA, 19 nt, Homo sapiens
  misc_RNA (1)...(19): siRNA sense strand
ucacaaaucuacaaccuua

SEQ ID NO: 180321 - RNA, 19 nt, Homo sapiens
  misc_RNA (1)...(19): siRNA sense strand
gguaauugcucuaacuuua

SEQ ID NO: 180322 - RNA, 19 nt, Homo sapiens
  misc_RNA (1)...(19): siRNA sense strand
gaacaaaccuaagcaugaa

SEQ ID NO: 180323 - RNA, 19 nt, Homo sapiens
  misc_RNA (1)...(19): siRNA sense strand
gaaagagcacuucaaauaa

SEQ ID NO: 180324 - RNA, 19 nt, Homo sapiens
  misc_RNA (1)...(19): siRNA sense strand
agacaaaccucacauggua

SEQ ID NO: 180325 - RNA, 19 nt, Homo sapiens
  misc_RNA (1)...(19): siRNA sense strand
ccagaaagcuuuaagacaa

SEQ ID NO: 180326 - RNA, 19 nt, Homo sapiens
  misc_RNA (1)...(19): siRNA sense strand
agaaagagcacuucaaaua

SEQ ID NO: 180327 - RNA, 19 nt, Homo sapiens
  misc_RNA (1)...(19): siRNA sense strand
aaacagcucugacuugaaa

SEQ ID NO: 180328 - RNA, 19 nt, Homo sapiens
  misc_RNA (1)...(19): siRNA sense strand
gaugaucuguggaauuuaa

SEQ ID NO: 180329 - RNA, 19 nt, Homo sapiens
  misc_RNA (1)...(19): siRNA sense strand
gguggaagaugacauuuaa

SEQ ID NO: 180330 - RNA, 19 nt, Homo sapiens
  misc_RNA (1)...(19): siRNA sense strand
aaacaacaguggagucaua

SEQ ID NO: 180331 - RNA, 19 nt, Homo sapiens
  misc_RNA (1)...(19): siRNA sense strand
uuaaauagcugccuaaagu

SEQ ID NO: 180332 - RNA, 19 nt, Homo sapiens
  misc_RNA (1)...(19): siRNA sense strand
cgagaaggguuaaacuaua

SEQ ID NO: 180333 - RNA, 19 nt, Homo sapiens
  misc_RNA (1)...(19): siRNA sense strand
caacauacaugauacagau

SEQ ID NO: 180334 - RNA, 19 nt, Homo sapiens
  misc_RNA (1)...(19): siRNA sense strand
gaaacugcaccuuugauua

SEQ ID NO: 180335 - RNA, 19 nt, Homo sapiens
  misc_RNA (1)...(19): siRNA sense strand
gaaaugugguguacagaga

SEQ ID NO: 180336 - RNA, 19 nt, Homo sapiens
  misc_RNA (1)...(19): siRNA sense strand
gaagaugggcuuuggagua

SEQ ID NO: 180337 - RNA, 19 nt, Homo sapiens
  misc_RNA (1)...(19): siRNA sense strand
gaacacuaguuugcaauuu

SEQ ID NO: 180338 - RNA, 19 nt, Homo sapiens
  misc_RNA (1)...(19): siRNA sense strand
gaacagcaguggacaucuu

SEQ ID NO: 180339 - RNA, 19 nt, Homo sapiens
  misc_RNA (1)...(19): siRNA sense strand
gaauucagaugacauuaug

SEQ ID NO: 180340 - RNA, 19 nt, Homo sapiens
  misc_RNA (1)...(19): siRNA sense strand
gagaaggguuaaacuauau

SEQ ID NO: 180341 - RNA, 19 nt, Homo sapiens
  misc_RNA (1)...(19): siRNA sense strand
gagaaccaguuuccaguuu

SEQ ID NO: 180342 - RNA, 19 nt, Homo sapiens
  misc_RNA (1)...(19): siRNA sense strand
caguauagcucuuauugaa

SEQ ID NO: 180343 - RNA, 19 nt, Homo sapiens
  misc_RNA (1)...(19): siRNA sense strand
ggaacaaaccuaagcauga

SEQ ID NO: 180344 - RNA, 19 nt, Homo sapiens
  misc_RNA (1)...(19): siRNA sense strand
gaguaguggugguuuauaa

SEQ ID NO: 180345 - RNA, 19 nt, Homo sapiens
  misc_RNA (1)...(19): siRNA sense strand
ggauggagaucuuauauac

SEQ ID NO: 180346 - RNA, 19 nt, Homo sapiens
  misc_RNA (1)...(19): siRNA sense strand
caaauacuaucuacagguu

SEQ ID NO: 180347 - RNA, 19 nt, Homo sapiens
  misc_RNA (1)...(19): siRNA sense strand
ggaaucagugagaauauua

SEQ ID NO: 180348 - RNA, 19 nt, Homo sapiens
  misc_RNA (1)...(19): siRNA sense strand
guaggcauaucuuggcuua

SEQ ID NO: 180349 - RNA, 19 nt, Homo sapiens
  misc_RNA (1)...(19): siRNA sense strand
gugaugggcuccuguauug

SEQ ID NO: 180350 - RNA, 19 nt, Homo sapiens
  misc_RNA (1)...(19): siRNA sense strand
gcaaacuucucuggaguaa

SEQ ID NO: 180351 - RNA, 19 nt, Homo sapiens
  misc_RNA (1)...(19): siRNA sense strand
gaguuugucugcugaauga

SEQ ID NO: 180352 - RNA, 19 nt, Homo sapiens
  misc_RNA (1)...(19): siRNA sense strand
gaaagcaccagacuaaaug

SEQ ID NO: 180353 - RNA, 19 nt, Homo sapiens
  misc_RNA (1)...(19): siRNA sense strand
gaagcuggacuuauacuaa

SEQ ID NO: 180354 - RNA, 19 nt, Homo sapiens
  misc_RNA (1)...(19): siRNA sense strand
ugaaggaacucucauaugg

SEQ ID NO: 180355 - RNA, 19 nt, Homo sapiens
  misc_RNA (1)...(19): siRNA sense strand
gcagugcagcucauuaaua

SEQ ID NO: 180356 - RNA, 19 nt, Homo sapiens
  misc_RNA (1)...(19): siRNA sense strand
gcaaguauuugauguugau

SEQ ID NO: 180357 - RNA, 19 nt, Homo sapiens
  misc_RNA (1)...(19): siRNA sense strand
caucagaaaucaacccauu

SEQ ID NO: 180358 - RNA, 19 nt, Homo sapiens
  misc_RNA (1)...(19): siRNA sense strand
agaaugcacugauguacua

SEQ ID NO: 180359 - RNA, 19 nt, Homo sapiens
  misc_RNA (1)...(19): siRNA sense strand
gcucaaacaucgaggaaau

SEQ ID NO: 180360 - RNA, 19 nt, Homo sapiens
  misc_RNA (1)...(19): siRNA sense strand
gcuaugaaauacaagguuu

SEQ ID NO: 180361 - RNA, 19 nt, Homo sapiens
  misc_RNA (1)...(19): siRNA sense strand
gaagauaauggauguagaa

SEQ ID NO: 180362 - RNA, 19 nt, Homo sapiens
  misc_RNA (1)...(19): siRNA sense strand
gaaaagagauuuggggaaa

SEQ ID NO: 180363 - RNA, 19 nt, Homo sapiens
  misc_RNA (1)...(19): siRNA sense strand
gaauuuagguggaacaaac

SEQ ID NO: 180364 - RNA, 19 nt, Homo sapiens
  misc_RNA (1)...(19): siRNA sense strand
ggacacacagacauuguua

SEQ ID NO: 180365 - RNA, 19 nt, Homo sapiens
  misc_RNA (1)...(19): siRNA sense strand
gcuuaugucuguaauauca

SEQ ID NO: 180366 - RNA, 19 nt, Homo sapiens
  misc_RNA (1)...(19): siRNA sense strand
ggaaccacaugcagacaaa

SEQ ID NO: 180367 - RNA, 19 nt, Homo sapiens
  misc_RNA (1)...(19): siRNA sense strand
gagaccuucuuacuuauuu

SEQ ID NO: 180368 - RNA, 19 nt, Homo sapiens
  misc_RNA (1)...(19): siRNA sense strand
ggaguaaaccauuaaauag

SEQ ID NO: 180369 - RNA, 19 nt, Homo sapiens
  misc_RNA (1)...(19): siRNA sense strand
ucauaacucuucuugguaa

SEQ ID NO: 180370 - RNA, 19 nt, Homo sapiens
  misc_RNA (1)...(19): siRNA sense strand
uaucauggcugugaaagaa

SEQ ID NO: 180371 - RNA, 19 nt, Homo sapiens
  misc_RNA (1)...(19): siRNA sense strand
gcuaaugccugcuaugcaa

SEQ ID NO: 180372 - RNA, 19 nt, Homo sapiens
  misc_RNA (1)...(19): siRNA sense strand
ggaaccaacuauacuuaau

SEQ ID NO: 180373 - RNA, 19 nt, Homo sapiens
  misc_RNA (1)...(19): siRNA sense strand
ggaaagcaccagacuaaau

SEQ ID NO: 180374 - RNA, 19 nt, Homo sapiens
  misc_RNA (1)...(19): siRNA sense strand
aaacugugcuuuaaagugu

SEQ ID NO: 180375 - RNA, 19 nt, Homo sapiens
  misc_RNA (1)...(19): siRNA sense strand
gaaauuguccugaugaucu

SEQ ID NO: 180376 - RNA, 19 nt, Homo sapiens
  misc_RNA (1)...(19): siRNA sense strand
ugacagugcuuauaaacga

SEQ ID NO: 180377 - RNA, 19 nt, Homo sapiens
  misc_RNA (1)...(19): siRNA sense strand
uaagaaagagcacuucaaa

SEQ ID NO: 180378 - RNA, 19 nt, Homo sapiens
  misc_RNA (1)...(19): siRNA sense strand
caagagaucugggcaaugg

SEQ ID NO: 180379 - RNA, 19 nt, Homo sapiens
  misc_RNA (1)...(19): siRNA sense strand
gcuaccagauguucuacua

SEQ ID NO: 180380 - RNA, 19 nt, Homo sapiens
  misc_RNA (1)...(19): siRNA sense strand
uuccgaagcuugucaauuu

SEQ ID NO: 180381 - RNA, 19 nt, Homo sapiens
  misc_RNA (1)...(19): siRNA sense strand
aucaauggcuuuaggauua

SEQ ID NO: 180382 - RNA, 19 nt, Homo sapiens
  misc_RNA (1)...(19): siRNA sense strand
gaauguauuucaucaugga

SEQ ID NO: 180383 - RNA, 19 nt, Homo sapiens
  misc_RNA (1)...(19): siRNA sense strand
cugggaagcuggacuuaua

SEQ ID NO: 180384 - RNA, 19 nt, Homo sapiens
  misc_RNA (1)...(19): siRNA sense strand
ggacacagagaaccaguuu

SEQ ID NO: 180385 - RNA, 19 nt, Homo sapiens
  misc_RNA (1)...(19): siRNA sense strand
gaagauggcgaugugauuu

SEQ ID NO: 180386 - RNA, 19 nt, Homo sapiens
  misc_RNA (1)...(19): siRNA sense strand
ggaaccuuaugccuuauuu

SEQ ID NO: 180387 - RNA, 19 nt, Homo sapiens
  misc_RNA (1)...(19): siRNA sense strand
uuagagaacugcucaaaca

SEQ ID NO: 180388 - RNA, 19 nt, Homo sapiens
  misc_RNA (1)...(19): siRNA sense strand
gauggaaucuucacuacuc

SEQ ID NO: 180389 - RNA, 19 nt, Homo sapiens
  misc_RNA (1)...(19): siRNA sense strand
gaacggaugcauuucauuc

SEQ ID NO: 180390 - RNA, 19 nt, Homo sapiens
  misc_RNA (1)...(19): siRNA sense strand
gcucugacuugaaauauag

SEQ ID NO: 180391 - RNA, 19 nt, Homo sapiens
  misc_RNA (1)...(19): siRNA sense strand
gaugggauauuaugcugaa

SEQ ID NO: 180392 - RNA, 19 nt, Homo sapiens
  misc_RNA (1)...(19): siRNA sense strand
ccugagagauggcauuuau

SEQ ID NO: 180393 - RNA, 19 nt, Homo sapiens
  misc_RNA (1)...(19): siRNA sense strand
ccaggaaucugaaucuugu

SEQ ID NO: 180394 - RNA, 19 nt, Homo sapiens
  misc_RNA (1)...(19): siRNA sense strand
gaaaauagcaccucacuuc

SEQ ID NO: 180395 - RNA, 19 nt, Homo sapiens
  misc_RNA (1)...(19): siRNA sense strand
ggaccacacucuauucagu

SEQ ID NO: 180396 - RNA, 19 nt, Homo sapiens
  misc_RNA (1)...(19): siRNA sense strand
gaaauuacuccacccucua

SEQ ID NO: 180397 - RNA, 19 nt, Homo sapiens
  misc_RNA (1)...(19): siRNA sense strand
gggagaaagcugaagauaa

SEQ ID NO: 180398 - RNA, 19 nt, Homo sapiens
  misc_RNA (1)...(19): siRNA sense strand
cagaaagcuuuaagacaaa

SEQ ID NO: 180399 - RNA, 19 nt, Homo sapiens
  misc_RNA (1)...(19): siRNA sense strand
gaaugaaguugugguggaa

SEQ ID NO: 180400 - RNA, 19 nt, Homo sapiens
  misc_RNA (1)...(19): siRNA sense strand
ggaaaaugcugcaacaaga

SEQ ID NO: 180401 - RNA, 19 nt, Homo sapiens
  misc_RNA (1)...(19): siRNA sense strand
ggaaagacauaugugauac

SEQ ID NO: 180402 - RNA, 19 nt, Homo sapiens
  misc_RNA (1)...(19): siRNA sense strand
gcuagugaaccaccauuua

SEQ ID NO: 180403 - RNA, 19 nt, Homo sapiens
  misc_RNA (1)...(19): siRNA sense strand
ccaagaaauuguccugaug

SEQ ID NO: 180404 - RNA, 19 nt, Homo sapiens
  misc_RNA (1)...(19): siRNA sense strand
gaauauuucugguuguuac

SEQ ID NO: 180405 - RNA, 19 nt, Homo sapiens
  misc_RNA (1)...(19): siRNA sense strand
cuacagaaguggaaauaca

SEQ ID NO: 180406 - RNA, 19 nt, Homo sapiens
  misc_RNA (1)...(19): siRNA sense strand
gaacauuuaccaccaggaa

SEQ ID NO: 180407 - RNA, 19 nt, Homo sapiens
  misc_RNA (1)...(19): siRNA sense strand
gcaaaggacagcacacaga

SEQ ID NO: 180408 - RNA, 19 nt, Homo sapiens
  misc_RNA (1)...(19): siRNA sense strand
agacauaugugauacaaag

SEQ ID NO: 180409 - RNA, 19 nt, Homo sapiens
  misc_RNA (1)...(19): siRNA sense strand
cuacacagcugauaaugag

SEQ ID NO: 180410 - RNA, 19 nt, Homo sapiens
  misc_RNA (1)...(19): siRNA sense strand
cugaugaucuguggaauuu

SEQ ID NO: 180411 - RNA, 19 nt, Homo sapiens
  misc_RNA (1)...(19): siRNA sense strand
aguaguagcugcaaauaau

SEQ ID NO: 180412 - RNA, 19 nt, Homo sapiens
  misc_RNA (1)...(19): siRNA sense strand
gcaccucacuuccagaaag

SEQ ID NO: 180413 - RNA, 19 nt, Homo sapiens
  misc_RNA (1)...(19): siRNA sense strand
ggacucagcucaacauguu

SEQ ID NO: 180414 - RNA, 19 nt, Homo sapiens
  misc_RNA (1)...(19): siRNA sense strand
ggacugagccauccauuaa

SEQ ID NO: 180415 - RNA, 19 nt, Homo sapiens
  misc_RNA (1)...(19): siRNA sense strand
gaugugagaucucuauuuc

SEQ ID NO: 180416 - RNA, 19 nt, Homo sapiens
  misc_RNA (1)...(19): siRNA sense strand
caccuacacucucuacuua

SEQ ID NO: 180417 - RNA, 19 nt, Homo sapiens
  misc_RNA (1)...(19): siRNA sense strand
ggaaacaacagcguuauuu

SEQ ID NO: 180418 - RNA, 19 nt, Homo sapiens
  misc_RNA (1)...(19): siRNA sense strand
gaaguuggcaucacaaaug

SEQ ID NO: 180419 - RNA, 19 nt, Homo sapiens
  misc_RNA (1)...(19): siRNA sense strand
ucacaaauguugaucuuuc

SEQ ID NO: 180420 - RNA, 19 nt, Homo sapiens
  misc_RNA (1)...(19): siRNA sense strand
guaccuacaucagaucuaa

SEQ ID NO: 180421 - RNA, 19 nt, Homo sapiens
  misc_RNA (1)...(19): siRNA sense strand
acaagaacguguacaaguu

SEQ ID NO: 180422 - RNA, 19 nt, Homo sapiens
  misc_RNA (1)...(19): siRNA sense strand
gaaacaacagcguuauuug

SEQ ID NO: 180423 - RNA, 19 nt, Homo sapiens
  misc_RNA (1)...(19): siRNA sense strand
gggcguguaucuccaguuu

SEQ ID NO: 180424 - RNA, 19 nt, Homo sapiens
  misc_RNA (1)...(19): siRNA sense strand
gcguguaucuccaguuuga

SEQ ID NO: 180425 - RNA, 19 nt, Homo sapiens
  misc_RNA (1)...(19): siRNA sense strand
gagucaagaucuccacuga

SEQ ID NO: 180426 - RNA, 19 nt, Homo sapiens
  misc_RNA (1)...(19): siRNA sense strand
ggauaaggaucagagcauu

SEQ ID NO: 180427 - RNA, 19 nt, Homo sapiens
  misc_RNA (1)...(19): siRNA sense strand
caaaugagaccaaagaucu

SEQ ID NO: 180428 - RNA, 19 nt, Homo sapiens
  misc_RNA (1)...(19): siRNA sense strand
ggugacaaccgguauauug

SEQ ID NO: 180429 - RNA, 19 nt, Homo sapiens
  misc_RNA (1)...(19): siRNA sense strand
gaagaaggacuggaaacaa

SEQ ID NO: 180430 - RNA, 19 nt, Homo sapiens
  misc_RNA (1)...(19): siRNA sense strand
gaucgcccuuucacaaauu

SEQ ID NO: 180431 - RNA, 19 nt, Homo sapiens
  misc_RNA (1)...(19): siRNA sense strand
gcuccuagcacgauuauau

SEQ ID NO: 180432 - RNA, 19 nt, Homo sapiens
  misc_RNA (1)...(19): siRNA sense strand
gaacacuggugcugaacuc

SEQ ID NO: 180433 - RNA, 19 nt, Homo sapiens
  misc_RNA (1)...(19): siRNA sense strand
ccuacaagcucauggauca

SEQ ID NO: 180434 - RNA, 19 nt, Homo sapiens
  misc_RNA (1)...(19): siRNA sense strand
caagaacguguacaaguuu

SEQ ID NO: 180435 - RNA, 19 nt, Homo sapiens
  misc_RNA (1)...(19): siRNA sense strand
caagagaacagcacauuag

SEQ ID NO: 180436 - RNA, 19 nt, Homo sapiens
  misc_RNA (1)...(19): siRNA sense strand
caauguggauucccucuuc

SEQ ID NO: 180437 - RNA, 19 nt, Homo sapiens
  misc_RNA (1)...(19): siRNA sense strand
ggagaugccacuuugaaga

SEQ ID NO: 180438 - RNA, 19 nt, Homo sapiens
  misc_RNA (1)...(19): siRNA sense strand
ggauaccucugaaagaaag

SEQ ID NO: 180439 - RNA, 19 nt, Homo sapiens
  misc_RNA (1)...(19): siRNA sense strand
caagaucuccacugaaguu

SEQ ID NO: 180440 - RNA, 19 nt, Homo sapiens
  misc_RNA (1)...(19): siRNA sense strand
ucaggccacuguuaaacua

SEQ ID NO: 180441 - RNA, 19 nt, Homo sapiens
  misc_RNA (1)...(19): siRNA sense strand
ugugagaucucuauuucaa

SEQ ID NO: 180442 - RNA, 19 nt, Homo sapiens
  misc_RNA (1)...(19): siRNA sense strand
gccaaugucuccaacuuca

SEQ ID NO: 180443 - RNA, 19 nt, Homo sapiens
  misc_RNA (1)...(19): siRNA sense strand
gaagcucccucgacugucu

SEQ ID NO: 180444 - RNA, 19 nt, Homo sapiens
  misc_RNA (1)...(19): siRNA sense strand
gaaggugacaaccgguaua

SEQ ID NO: 180445 - RNA, 19 nt, Homo sapiens
  misc_RNA (1)...(19): siRNA sense strand
gcugugcucucgcauaauc

SEQ ID NO: 180446 - RNA, 19 nt, Homo sapiens
  misc_RNA (1)...(19): siRNA sense strand
gagaugccacuuugaagaa

SEQ ID NO: 180447 - RNA, 19 nt, Homo sapiens
  misc_RNA (1)...(19): siRNA sense strand
gaacuggauaccucugaaa

SEQ ID NO: 180448 - RNA, 19 nt, Homo sapiens
  misc_RNA (1)...(19): siRNA sense strand
aaacuacccgggugacaua

SEQ ID NO: 180449 - RNA, 19 nt, Homo sapiens
  misc_RNA (1)...(19): siRNA sense strand
ggugccagaugcaaagaaa

SEQ ID NO: 180450 - RNA, 19 nt, Homo sapiens
  misc_RNA (1)...(19): siRNA sense strand
gcaccuacacucucuacuu

SEQ ID NO: 180451 - RNA, 19 nt, Homo sapiens
  misc_RNA (1)...(19): siRNA sense strand
gucaagaucuccacugaag

SEQ ID NO: 180452 - RNA, 19 nt, Homo sapiens
  misc_RNA (1)...(19): siRNA sense strand
ucaccaauguucugucuca

SEQ ID NO: 180453 - RNA, 19 nt, Homo sapiens
  misc_RNA (1)...(19): siRNA sense strand
ggaugugagaucucuauuu

SEQ ID NO: 180454 - RNA, 19 nt, Homo sapiens
  misc_RNA (1)...(19): siRNA sense strand
ucaagagaacagcacauua

SEQ ID NO: 180455 - RNA, 19 nt, Homo sapiens
  misc_RNA (1)...(19): siRNA sense strand
ggaucgcccuuucacaaau

SEQ ID NO: 180456 - RNA, 19 nt, Homo sapiens
  misc_RNA (1)...(19): siRNA sense strand
gaccaaagaucugcuucug

SEQ ID NO: 180457 - RNA, 19 nt, Homo sapiens
  misc_RNA (1)...(19): siRNA sense strand
cauuggagaugccacuuug

SEQ ID NO: 180458 - RNA, 19 nt, Homo sapiens
  misc_RNA (1)...(19): siRNA sense strand
cugcugugcucucgcauaa

SEQ ID NO: 180459 - RNA, 19 nt, Homo sapiens
  misc_RNA (1)...(19): siRNA sense strand
gccaggaagugguguuugu

SEQ ID NO: 180460 - RNA, 19 nt, Homo sapiens
  misc_RNA (1)...(19): siRNA sense strand
caaccgguauauugcaaau

SEQ ID NO: 180461 - RNA, 19 nt, Homo sapiens
  misc_RNA (1)...(19): siRNA sense strand
gagccacuguccuccagaa

SEQ ID NO: 180462 - RNA, 19 nt, Homo sapiens
  misc_RNA (1)...(19): siRNA sense strand
ugacucaggccacuguuaa

SEQ ID NO: 180463 - RNA, 19 nt, Homo sapiens
  misc_RNA (1)...(19): siRNA sense strand
gggacugagccauccauua

SEQ ID NO: 180464 - RNA, 19 nt, Homo sapiens
  misc_RNA (1)...(19): siRNA sense strand
gacaaccgguauauugcaa

SEQ ID NO: 180465 - RNA, 19 nt, Homo sapiens
  misc_RNA (1)...(19): siRNA sense strand
cuggauaccucugaaagaa

SEQ ID NO: 180466 - RNA, 19 nt, Homo sapiens
  misc_RNA (1)...(19): siRNA sense strand
cuagcacgauuauauuuca

SEQ ID NO: 180467 - RNA, 19 nt, Homo sapiens
  misc_RNA (1)...(19): siRNA sense strand
gaacguguacaaguuugaa

SEQ ID NO: 180468 - RNA, 19 nt, Homo sapiens
  misc_RNA (1)...(19): siRNA sense strand
caaagaaagcauguaccua

SEQ ID NO: 180469 - RNA, 19 nt, Homo sapiens
  misc_RNA (1)...(19): siRNA sense strand
gugccaaugucuccaacuu

SEQ ID NO: 180470 - RNA, 19 nt, Homo sapiens
  misc_RNA (1)...(19): siRNA sense strand
ucagagcauugcacccaaa

SEQ ID NO: 180471 - RNA, 19 nt, Homo sapiens
  misc_RNA (1)...(19): siRNA sense strand
gauaaggaucagagcauug

SEQ ID NO: 180472 - RNA, 19 nt, Homo sapiens
  misc_RNA (1)...(19): siRNA sense strand
ggagauugaggaccuuguu

SEQ ID NO: 180473 - RNA, 19 nt, Homo sapiens
  misc_RNA (1)...(19): siRNA sense strand
ggaaauucagcaccuguuc

SEQ ID NO: 180474 - RNA, 19 nt, Homo sapiens
  misc_RNA (1)...(19): siRNA sense strand
ccuacacucucuacuuaau

SEQ ID NO: 180475 - RNA, 19 nt, Homo sapiens
  misc_RNA (1)...(19): siRNA sense strand
gcaaagaaagcauguaccu

SEQ ID NO: 180476 - RNA, 19 nt, Homo sapiens
  misc_RNA (1)...(19): siRNA sense strand
gcaagucaccaauguucug

SEQ ID NO: 180477 - RNA, 19 nt, Homo sapiens
  misc_RNA (1)...(19): siRNA sense strand
caagcacugucuuccuguu

SEQ ID NO: 180478 - RNA, 19 nt, Homo sapiens
  misc_RNA (1)...(19): siRNA sense strand
aagaaggacuggaaacaac

SEQ ID NO: 180479 - RNA, 19 nt, Homo sapiens
  misc_RNA (1)...(19): siRNA sense strand
caccagaacuucgccuugu

SEQ ID NO: 180480 - RNA, 19 nt, Homo sapiens
  misc_RNA (1)...(19): siRNA sense strand
acuagaacaugcuaaaucu

SEQ ID NO: 180481 - RNA, 19 nt, Homo sapiens
  misc_RNA (1)...(19): siRNA sense strand
gguugcaagucaccaaugu

SEQ ID NO: 180482 - RNA, 19 nt, Homo sapiens
  misc_RNA (1)...(19): siRNA sense strand
uaaccuugaucccagcaau

SEQ ID NO: 180483 - RNA, 19 nt, Homo sapiens
  misc_RNA (1)...(19): siRNA sense strand
gcagacagccaccagaacu

SEQ ID NO: 180484 - RNA, 19 nt, Homo sapiens
  misc_RNA (1)...(19): siRNA sense strand
uaaggaggaucaggucauc

SEQ ID NO: 180485 - RNA, 19 nt, Homo sapiens
  misc_RNA (1)...(19): siRNA sense strand
ccagaucuaccaugcaguu

SEQ ID NO: 180486 - RNA, 19 nt, Homo sapiens
  misc_RNA (1)...(19): siRNA sense strand
ugugaacacuggugcugaa

SEQ ID NO: 180487 - RNA, 19 nt, Homo sapiens
  misc_RNA (1)...(19): siRNA sense strand
ucagcaagaagaacuuuga

SEQ ID NO: 180488 - RNA, 19 nt, Homo sapiens
  misc_RNA (1)...(19): siRNA sense strand
ugaacuggauaccucugaa

SEQ ID NO: 180489 - RNA, 19 nt, Homo sapiens
  misc_RNA (1)...(19): siRNA sense strand
uagaacaugcuaaaucugu

SEQ ID NO: 180490 - RNA, 19 nt, Homo sapiens
  misc_RNA (1)...(19): siRNA sense strand
uacacucucuacuuaauca

SEQ ID NO: 180491 - RNA, 19 nt, Homo sapiens
  misc_RNA (1)...(19): siRNA sense strand
gcaguugcagcucuaagug

SEQ ID NO: 180492 - RNA, 19 nt, Homo sapiens
  misc_RNA (1)...(19): siRNA sense strand
uacauucacugcccugauc

SEQ ID NO: 180493 - RNA, 19 nt, Homo sapiens
  misc_RNA (1)...(19): siRNA sense strand
cgacugucuugucccagaa

SEQ ID NO: 180494 - RNA, 19 nt, Homo sapiens
  misc_RNA (1)...(19): siRNA sense strand
ccacuguccuccagaagac

SEQ ID NO: 180495 - RNA, 19 nt, Homo sapiens
  misc_RNA (1)...(19): siRNA sense strand
caacaagaacguguacaag

SEQ ID NO: 180496 - RNA, 19 nt, Homo sapiens
  misc_RNA (1)...(19): siRNA sense strand
ggugacauacccagccaaa

SEQ ID NO: 180497 - RNA, 19 nt, Homo sapiens
  misc_RNA (1)...(19): siRNA sense strand
gagcaucguggaggagauu

SEQ ID NO: 180498 - RNA, 19 nt, Homo sapiens
  misc_RNA (1)...(19): siRNA sense strand
gaacccaauccucuggaau

SEQ ID NO: 180499 - RNA, 19 nt, Homo sapiens
  misc_RNA (1)...(19): siRNA sense strand
acauuuguccgacuccaua

SEQ ID NO: 180500 - RNA, 19 nt, Homo sapiens
  misc_RNA (1)...(19): siRNA sense strand
gcugguagaugugaacacu

SEQ ID NO: 180501 - RNA, 19 nt, Homo sapiens
  misc_RNA (1)...(19): siRNA sense strand
gagcucagagucaagaucu

SEQ ID NO: 180502 - RNA, 19 nt, Homo sapiens
  misc_RNA (1)...(19): siRNA sense strand
gagauugaggaccuuguug

SEQ ID NO: 180503 - RNA, 19 nt, Homo sapiens
  misc_RNA (1)...(19): siRNA sense strand
ggaggagauugaggaccuu

SEQ ID NO: 180504 - RNA, 19 nt, Homo sapiens
  misc_RNA (1)...(19): siRNA sense strand
ucuggaauguggcugaugu

SEQ ID NO: 180505 - RNA, 19 nt, Homo sapiens
  misc_RNA (1)...(19): siRNA sense strand
acucucuacuuaaucauug

SEQ ID NO: 180506 - RNA, 19 nt, Homo sapiens
  misc_RNA (1)...(19): siRNA sense strand
acaacaagaacguguacaa

SEQ ID NO: 180507 - RNA, 19 nt, Homo sapiens
  misc_RNA (1)...(19): siRNA sense strand
guagagcucagagucaaga

SEQ ID NO: 180508 - RNA, 19 nt, Homo sapiens
  misc_RNA (1)...(19): siRNA sense strand
ggccacuguuaaacuagaa

SEQ ID NO: 180509 - RNA, 19 nt, Homo sapiens
  misc_RNA (1)...(19): siRNA sense strand
ugacauacccagccaaagc

SEQ ID NO: 180510 - RNA, 19 nt, Homo sapiens
  misc_RNA (1)...(19): siRNA sense strand
ucaaaugagaccaaagauc

SEQ ID NO: 180511 - RNA, 19 nt, Homo sapiens
  misc_RNA (1)...(19): siRNA sense strand
ucacuccucaccagacauu

SEQ ID NO: 180512 - RNA, 19 nt, Homo sapiens
  misc_RNA (1)...(19): siRNA sense strand
ccguagagcucagagucaa

SEQ ID NO: 180513 - RNA, 19 nt, Homo sapiens
  misc_RNA (1)...(19): siRNA sense strand
gaacaucucuucuucuuca

SEQ ID NO: 180514 - RNA, 19 nt, Homo sapiens
  misc_RNA (1)...(19): siRNA sense strand
ugacggagcuuguguccaa

SEQ ID NO: 180515 - RNA, 19 nt, Homo sapiens
  misc_RNA (1)...(19): siRNA sense strand
caacaaggacugccugauu

SEQ ID NO: 180516 - RNA, 19 nt, Homo sapiens
  misc_RNA (1)...(19): siRNA sense strand
gcaaggaccugaccuacac

SEQ ID NO: 180517 - RNA, 19 nt, Homo sapiens
  misc_RNA (1)...(19): siRNA sense strand
gcaaggaccggaacgagaa

SEQ ID NO: 180518 - RNA, 19 nt, Homo sapiens
  misc_RNA (1)...(19): siRNA sense strand
ucaaaugccuggaacaucu

SEQ ID NO: 180519 - RNA, 19 nt, Homo sapiens
  misc_RNA (1)...(19): siRNA sense strand
aacaaggacugccugauug

SEQ ID NO: 180520 - RNA, 19 nt, Homo sapiens
  misc_RNA (1)...(19): siRNA sense strand
uggaacaucucuucuucuu

SEQ ID NO: 180521 - RNA, 19 nt, Homo sapiens
  misc_RNA (1)...(19): siRNA sense strand
ccaagcggaucccacacuu

SEQ ID NO: 180522 - RNA, 19 nt, Homo sapiens
  misc_RNA (1)...(19): siRNA sense strand
agaccuacguggaggcaaa

SEQ ID NO: 180523 - RNA, 19 nt, Homo sapiens
  misc_RNA (1)...(19): siRNA sense strand
gcgccaucguccucuuuaa

SEQ ID NO: 180524 - RNA, 19 nt, Homo sapiens
  misc_RNA (1)...(19): siRNA sense strand
ccuggaacaucucuucuuc

SEQ ID NO: 180525 - RNA, 19 nt, Homo sapiens
  misc_RNA (1)...(19): siRNA sense strand
gacccugucaccaacauuu

SEQ ID NO: 180526 - RNA, 19 nt, Homo sapiens
  misc_RNA (1)...(19): siRNA sense strand
ucaauggcguccucaaggu

SEQ ID NO: 180527 - RNA, 19 nt, Homo sapiens
  misc_RNA (1)...(19): siRNA sense strand
cgaacgacccugucaccaa

SEQ ID NO: 180528 - RNA, 19 nt, Homo sapiens
  misc_RNA (1)...(19): siRNA sense strand
ccaagcagccgacaaacag

SEQ ID NO: 180529 - RNA, 19 nt, Homo sapiens
  misc_RNA (1)...(19): siRNA sense strand
acacacccauugacaccuu

SEQ ID NO: 180530 - RNA, 19 nt, Homo sapiens
  misc_RNA (1)...(19): siRNA sense strand
cagcugcauucucccauca

SEQ ID NO: 180531 - RNA, 19 nt, Homo sapiens
  misc_RNA (1)...(19): siRNA sense strand
gcggaucccacacuucuca

SEQ ID NO: 180532 - RNA, 19 nt, Homo sapiens
  misc_RNA (1)...(19): siRNA sense strand
cccauugacaccuuccuua

SEQ ID NO: 180533 - RNA, 19 nt, Homo sapiens
  misc_RNA (1)...(19): siRNA sense strand
uggaggcgcugagggagaa

SEQ ID NO: 180534 - RNA, 19 nt, Homo sapiens
  misc_RNA (1)...(19): siRNA sense strand
aagguucgcuaagcucuug

SEQ ID NO: 180535 - RNA, 19 nt, Homo sapiens
  misc_RNA (1)...(19): siRNA sense strand
ccauugacaccuuccuuau

SEQ ID NO: 180536 - RNA, 19 nt, Homo sapiens
  misc_RNA (1)...(19): siRNA sense strand
gugcaagggcuucuucaag

SEQ ID NO: 180537 - RNA, 19 nt, Homo sapiens
  misc_RNA (1)...(19): siRNA sense strand
gcucaaaugccuggaacau

SEQ ID NO: 180538 - RNA, 19 nt, Homo sapiens
  misc_RNA (1)...(19): siRNA sense strand
caccaacauuugccaagca

SEQ ID NO: 180539 - RNA, 19 nt, Homo sapiens
  misc_RNA (1)...(19): siRNA sense strand
gaagguucgcuaagcucuu

SEQ ID NO: 180540 - RNA, 19 nt, Homo sapiens
  misc_RNA (1)...(19): siRNA sense strand
guacugccgcuaccagaag

SEQ ID NO: 180541 - RNA, 19 nt, Homo sapiens
  misc_RNA (1)...(19): siRNA sense strand
acaccuuccuuauggagau

SEQ ID NO: 180542 - RNA, 19 nt, Homo sapiens
  misc_RNA (1)...(19): siRNA sense strand
auugacaccuuccuuaugg

SEQ ID NO: 180543 - RNA, 19 nt, Homo sapiens
  misc_RNA (1)...(19): siRNA sense strand
acaaggacugccugauuga

SEQ ID NO: 180544 - RNA, 19 nt, Homo sapiens
  misc_RNA (1)...(19): siRNA sense strand
ggaacaucucuucuucuuc

SEQ ID NO: 180545 - RNA, 19 nt, Homo sapiens
  misc_RNA (1)...(19): siRNA sense strand
cagagcagccgggaagguu

SEQ ID NO: 180546 - RNA, 19 nt, Homo sapiens
  misc_RNA (1)...(19): siRNA sense strand
gccaagcagccgacaaaca

SEQ ID NO: 180547 - RNA, 19 nt, Homo sapiens
  misc_RNA (1)...(19): siRNA sense strand
gcucagcucaccuaugaac

SEQ ID NO: 180548 - RNA, 19 nt, Homo sapiens
  misc_RNA (1)...(19): siRNA sense strand
cuacguggaggcaaacaug

SEQ ID NO: 180549 - RNA, 19 nt, Homo sapiens
  misc_RNA (1)...(19): siRNA sense strand
aagcacaucugcgccaucu

SEQ ID NO: 180550 - RNA, 19 nt, Homo sapiens
  misc_RNA (1)...(19): siRNA sense strand
cauugacaccuuccuuaug

SEQ ID NO: 180551 - RNA, 19 nt, Homo sapiens
  misc_RNA (1)...(19): siRNA sense strand
aggacugccugauugacaa

SEQ ID NO: 180552 - RNA, 19 nt, Homo sapiens
  misc_RNA (1)...(19): siRNA sense strand
cagcagcgaggacaucaag

SEQ ID NO: 180553 - RNA, 19 nt, Homo sapiens
  misc_RNA (1)...(19): siRNA sense strand
gcagccgacaaacagcuuu

SEQ ID NO: 180554 - RNA, 19 nt, Homo sapiens
  misc_RNA (1)...(19): siRNA sense strand
gaaagaugguuaccgaaua

SEQ ID NO: 180555 - RNA, 19 nt, Homo sapiens
  misc_RNA (1)...(19): siRNA sense strand
caacuguccugaugaauua

SEQ ID NO: 180556 - RNA, 19 nt, Homo sapiens
  misc_RNA (1)...(19): siRNA sense strand
caaaguagauucugaaguu

SEQ ID NO: 180557 - RNA, 19 nt, Homo sapiens
  misc_RNA (1)...(19): siRNA sense strand
ucacuacgcucuauccuuu

SEQ ID NO: 180558 - RNA, 19 nt, Homo sapiens
  misc_RNA (1)...(19): siRNA sense strand
gauauugccuuacaugaau

SEQ ID NO: 180559 - RNA, 19 nt, Homo sapiens
  misc_RNA (1)...(19): siRNA sense strand
ggugaaggauauagcaaua

SEQ ID NO: 180560 - RNA, 19 nt, Homo sapiens
  misc_RNA (1)...(19): siRNA sense strand
gaagggaagucauccacaa

SEQ ID NO: 180561 - RNA, 19 nt, Homo sapiens
  misc_RNA (1)...(19): siRNA sense strand
acacauggcuauucagauu

SEQ ID NO: 180562 - RNA, 19 nt, Homo sapiens
  misc_RNA (1)...(19): siRNA sense strand
gaaauucaggugacaauga

SEQ ID NO: 180563 - RNA, 19 nt, Homo sapiens
  misc_RNA (1)...(19): siRNA sense strand
gcagaacuuuauuauguga

SEQ ID NO: 180564 - RNA, 19 nt, Homo sapiens
  misc_RNA (1)...(19): siRNA sense strand
agaucaagcuucugaaauu

SEQ ID NO: 180565 - RNA, 19 nt, Homo sapiens
  misc_RNA (1)...(19): siRNA sense strand
gaaaucuucuuccuauuac

SEQ ID NO: 180566 - RNA, 19 nt, Homo sapiens
  misc_RNA (1)...(19): siRNA sense strand
ugacaaugaugcucacuga

SEQ ID NO: 180567 - RNA, 19 nt, Homo sapiens
  misc_RNA (1)...(19): siRNA sense strand
aguccaagguugaauauaa

SEQ ID NO: 180568 - RNA, 19 nt, Homo sapiens
  misc_RNA (1)...(19): siRNA sense strand
ggguagagcuuuccuguac

SEQ ID NO: 180569 - RNA, 19 nt, Homo sapiens
  misc_RNA (1)...(19): siRNA sense strand
gaacuggaugacagcauua

SEQ ID NO: 180570 - RNA, 19 nt, Homo sapiens
  misc_RNA (1)...(19): siRNA sense strand
ugaauuauuugcugugaug

SEQ ID NO: 180571 - RNA, 19 nt, Homo sapiens
  misc_RNA (1)...(19): siRNA sense strand
gaucaagcuucugaaauuc

SEQ ID NO: 180572 - RNA, 19 nt, Homo sapiens
  misc_RNA (1)...(19): siRNA sense strand
gagaagaacgacuugagaa

SEQ ID NO: 180573 - RNA, 19 nt, Homo sapiens
  misc_RNA (1)...(19): siRNA sense strand
cagauugccuguggaauga

SEQ ID NO: 180574 - RNA, 19 nt, Homo sapiens
  misc_RNA (1)...(19): siRNA sense strand
gaggauaacucuaaaagau

SEQ ID NO: 180575 - RNA, 19 nt, Homo sapiens
  misc_RNA (1)...(19): siRNA sense strand
gggaagucauccacaaaga

SEQ ID NO: 180576 - RNA, 19 nt, Homo sapiens
  misc_RNA (1)...(19): siRNA sense strand
ugugagaaaugaccuuauu

SEQ ID NO: 180577 - RNA, 19 nt, Homo sapiens
  misc_RNA (1)...(19): siRNA sense strand
gcucuauccuuuaaucugu

SEQ ID NO: 180578 - RNA, 19 nt, Homo sapiens
  misc_RNA (1)...(19): siRNA sense strand
gagcagacacgcccaacaa

SEQ ID NO: 180579 - RNA, 19 nt, Homo sapiens
  misc_RNA (1)...(19): siRNA sense strand
gccaggaacugugucauug

SEQ ID NO: 180580 - RNA, 19 nt, Homo sapiens
  misc_RNA (1)...(19): siRNA sense strand
gaaguuaugauacuaaugc

SEQ ID NO: 180581 - RNA, 19 nt, Homo sapiens
  misc_RNA (1)...(19): siRNA sense strand
gaugaauuauuugcuguga

SEQ ID NO: 180582 - RNA, 19 nt, Homo sapiens
  misc_RNA (1)...(19): siRNA sense strand
ggauggcucuugaaagucu

SEQ ID NO: 180583 - RNA, 19 nt, Homo sapiens
  misc_RNA (1)...(19): siRNA sense strand
gguuuguugugcaguaaua

SEQ ID NO: 180584 - RNA, 19 nt, Homo sapiens
  misc_RNA (1)...(19): siRNA sense strand
agacaaauuuccugcacuu

SEQ ID NO: 180585 - RNA, 19 nt, Homo sapiens
  misc_RNA (1)...(19): siRNA sense strand
ugaacuggaugacagcauu

SEQ ID NO: 180586 - RNA, 19 nt, Homo sapiens
  misc_RNA (1)...(19): siRNA sense strand
aaagaugguuaccgaauag

SEQ ID NO: 180587 - RNA, 19 nt, Homo sapiens
  misc_RNA (1)...(19): siRNA sense strand
gaaguccaagguugaauau

SEQ ID NO: 180588 - RNA, 19 nt, Homo sapiens
  misc_RNA (1)...(19): siRNA sense strand
cgaaguccaagguugaaua

SEQ ID NO: 180589 - RNA, 19 nt, Homo sapiens
  misc_RNA (1)...(19): siRNA sense strand
gaggagaggcccaaguuuc

SEQ ID NO: 180590 - RNA, 19 nt, Homo sapiens
  misc_RNA (1)...(19): siRNA sense strand
ggauagagaagaacgacuu

SEQ ID NO: 180591 - RNA, 19 nt, Homo sapiens
  misc_RNA (1)...(19): siRNA sense strand
acaaugaugcucacugaaa

SEQ ID NO: 180592 - RNA, 19 nt, Homo sapiens
  misc_RNA (1)...(19): siRNA sense strand
guacagugccuaacagagu

SEQ ID NO: 180593 - RNA, 19 nt, Homo sapiens
  misc_RNA (1)...(19): siRNA sense strand
gaugcucacugaaaguugu

SEQ ID NO: 180594 - RNA, 19 nt, Homo sapiens
  misc_RNA (1)...(19): siRNA sense strand
caaugaugcucacugaaag

SEQ ID NO: 180595 - RNA, 19 nt, Homo sapiens
  misc_RNA (1)...(19): siRNA sense strand
gcagacacgcccaacaaug

SEQ ID NO: 180596 - RNA, 19 nt, Homo sapiens
  misc_RNA (1)...(19): siRNA sense strand
gcucuugaaagucugguua

SEQ ID NO: 180597 - RNA, 19 nt, Homo sapiens
  misc_RNA (1)...(19): siRNA sense strand
ccauggugauauugccuua

SEQ ID NO: 180598 - RNA, 19 nt, Homo sapiens
  misc_RNA (1)...(19): siRNA sense strand
uuaaagaucaagcuucuga

SEQ ID NO: 180599 - RNA, 19 nt, Homo sapiens
  misc_RNA (1)...(19): siRNA sense strand
agaaaugaccuuauuaguc

SEQ ID NO: 180600 - RNA, 19 nt, Homo sapiens
  misc_RNA (1)...(19): siRNA sense strand
gaauagcccagccaaucaa

SEQ ID NO: 180601 - RNA, 19 nt, Homo sapiens
  misc_RNA (1)...(19): siRNA sense strand
gagaaaugaccuuauuagu

SEQ ID NO: 180602 - RNA, 19 nt, Homo sapiens
  misc_RNA (1)...(19): siRNA sense strand
guacacauggcuauucaga

SEQ ID NO: 180603 - RNA, 19 nt, Homo sapiens
  misc_RNA (1)...(19): siRNA sense strand
uaaaagauguacuccaaga

SEQ ID NO: 180604 - RNA, 19 nt, Homo sapiens
  misc_RNA (1)...(19): siRNA sense strand
gugagaaaugaccuuauua

SEQ ID NO: 180605 - RNA, 19 nt, Homo sapiens
  misc_RNA (1)...(19): siRNA sense strand
guagagcuuuccuguacug

SEQ ID NO: 180606 - RNA, 19 nt, Homo sapiens
  misc_RNA (1)...(19): siRNA sense strand
gcugaucggucuugaugca

SEQ ID NO: 180607 - RNA, 19 nt, Homo sapiens
  misc_RNA (1)...(19): siRNA sense strand
gaaaaggauugaacuggau

SEQ ID NO: 180608 - RNA, 19 nt, Homo sapiens
  misc_RNA (1)...(19): siRNA sense strand
caacuugacaguaaauucu

SEQ ID NO: 180609 - RNA, 19 nt, Homo sapiens
  misc_RNA (1)...(19): siRNA sense strand
ucaacuguccugaugaauu

SEQ ID NO: 180610 - RNA, 19 nt, Homo sapiens
  misc_RNA (1)...(19): siRNA sense strand
aacacuagcagaacuauuu

SEQ ID NO: 180611 - RNA, 19 nt, Homo sapiens
  misc_RNA (1)...(19): siRNA sense strand
gaaggaaaaugugcuacaa

SEQ ID NO: 180612 - RNA, 19 nt, Homo sapiens
  misc_RNA (1)...(19): siRNA sense strand
ccacccagacgacucagua

SEQ ID NO: 180613 - RNA, 19 nt, Homo sapiens
  misc_RNA (1)...(19): siRNA sense strand
ccaauaauccacaggcaau

SEQ ID NO: 180614 - RNA, 19 nt, Homo sapiens
  misc_RNA (1)...(19): siRNA sense strand
gaucggucuugaugcagaa

SEQ ID NO: 180615 - RNA, 19 nt, Homo sapiens
  misc_RNA (1)...(19): siRNA sense strand
aaggcaaggugaaggauau

SEQ ID NO: 180616 - RNA, 19 nt, Homo sapiens
  misc_RNA (1)...(19): siRNA sense strand
cgaauagcccagccaauca

SEQ ID NO: 180617 - RNA, 19 nt, Homo sapiens
  misc_RNA (1)...(19): siRNA sense strand
aaauucaggugacaaugau

SEQ ID NO: 180618 - RNA, 19 nt, Homo sapiens
  misc_RNA (1)...(19): siRNA sense strand
aaagaucaagcuucugaaa

SEQ ID NO: 180619 - RNA, 19 nt, Homo sapiens
  misc_RNA (1)...(19): siRNA sense strand
uuggauggcucuugaaagu

SEQ ID NO: 180620 - RNA, 19 nt, Homo sapiens
  misc_RNA (1)...(19): siRNA sense strand
gauggccgcauaccugaaa

SEQ ID NO: 180621 - RNA, 19 nt, Homo sapiens
  misc_RNA (1)...(19): siRNA sense strand
acacuagcagaacuauuua

SEQ ID NO: 180622 - RNA, 19 nt, Homo sapiens
  misc_RNA (1)...(19): siRNA sense strand
cagaggagaggcccaaguu

SEQ ID NO: 180623 - RNA, 19 nt, Homo sapiens
  misc_RNA (1)...(19): siRNA sense strand
caggaacugugucauugau

SEQ ID NO: 180624 - RNA, 19 nt, Homo sapiens
  misc_RNA (1)...(19): siRNA sense strand
ucagauugccuguggaaug

SEQ ID NO: 180625 - RNA, 19 nt, Homo sapiens
  misc_RNA (1)...(19): siRNA sense strand
ggauaacucuaaaagaugu

SEQ ID NO: 180626 - RNA, 19 nt, Homo sapiens
  misc_RNA (1)...(19): siRNA sense strand
ucauguguguauagaagaa

SEQ ID NO: 180627 - RNA, 19 nt, Homo sapiens
  misc_RNA (1)...(19): siRNA sense strand
aaguuaagaucacagacaa

SEQ ID NO: 180628 - RNA, 19 nt, Homo sapiens
  misc_RNA (1)...(19): siRNA sense strand
ugauauugccuuacaugaa

SEQ ID NO: 180629 - RNA, 19 nt, Homo sapiens
  misc_RNA (1)...(19): siRNA sense strand
ugagcuaccuggccagaag

SEQ ID NO: 180630 - RNA, 19 nt, Homo sapiens
  misc_RNA (1)...(19): siRNA sense strand
ugagaaaugaccuuauuag

SEQ ID NO: 180631 - RNA, 19 nt, Homo sapiens
  misc_RNA (1)...(19): siRNA sense strand
ugaaagaugguuaccgaau

SEQ ID NO: 180632 - RNA, 19 nt, Homo sapiens
  misc_RNA (1)...(19): siRNA sense strand
cuugaaagucugguuaaua

SEQ ID NO: 180633 - RNA, 19 nt, Homo sapiens
  misc_RNA (1)...(19): siRNA sense strand
caaguuaagaucacagaca

SEQ ID NO: 180634 - RNA, 19 nt, Homo sapiens
  misc_RNA (1)...(19): siRNA sense strand
gcaaaguagauucugaagu

SEQ ID NO: 180635 - RNA, 19 nt, Homo sapiens
  misc_RNA (1)...(19): siRNA sense strand
acuacgcucuauccuuuaa

SEQ ID NO: 180636 - RNA, 19 nt, Homo sapiens
  misc_RNA (1)...(19): siRNA sense strand
guuaagaucacagacaaug

SEQ ID NO: 180637 - RNA, 19 nt, Homo sapiens
  misc_RNA (1)...(19): siRNA sense strand
guccaagguugaauauaag

SEQ ID NO: 180638 - RNA, 19 nt, Homo sapiens
  misc_RNA (1)...(19): siRNA sense strand
guuaguagaggccaauaau

SEQ ID NO: 180639 - RNA, 19 nt, Homo sapiens
  misc_RNA (1)...(19): siRNA sense strand
gauguacuccaagaaggua

SEQ ID NO: 180640 - RNA, 19 nt, Homo sapiens
  misc_RNA (1)...(19): siRNA sense strand
aguaauauuucucguagca

SEQ ID NO: 180641 - RNA, 19 nt, Homo sapiens
  misc_RNA (1)...(19): siRNA sense strand
caaauuuccugcacuucac

SEQ ID NO: 180642 - RNA, 19 nt, Homo sapiens
  misc_RNA (1)...(19): siRNA sense strand
acgcguguguuuuauauua

SEQ ID NO: 180643 - RNA, 19 nt, Homo sapiens
  misc_RNA (1)...(19): siRNA sense strand
ccuucgagauggccgcaua

SEQ ID NO: 180644 - RNA, 19 nt, Homo sapiens
  misc_RNA (1)...(19): siRNA sense strand
ccaaaggcaaggugaagga

SEQ ID NO: 180645 - RNA, 19 nt, Homo sapiens
  misc_RNA (1)...(19): siRNA sense strand
gauagagaagaacgacuug

SEQ ID NO: 180646 - RNA, 19 nt, Homo sapiens
  misc_RNA (1)...(19): siRNA sense strand
uuacucauguguguauaga

SEQ ID NO: 180647 - RNA, 19 nt, Homo sapiens
  misc_RNA (1)...(19): siRNA sense strand
uacagugccuaacagaguu

SEQ ID NO: 180648 - RNA, 19 nt, Homo sapiens
  misc_RNA (1)...(19): siRNA sense strand
gaaaacaggccaguucguu

SEQ ID NO: 180649 - RNA, 19 nt, Homo sapiens
  misc_RNA (1)...(19): siRNA sense strand
aauauaagcugggauucca

SEQ ID NO: 180650 - RNA, 19 nt, Homo sapiens
  misc_RNA (1)...(19): siRNA sense strand
gagaaaagcccauggugau

SEQ ID NO: 180651 - RNA, 19 nt, Homo sapiens
  misc_RNA (1)...(19): siRNA sense strand
gcaagaccugguacacaug

SEQ ID NO: 180652 - RNA, 19 nt, Homo sapiens
  misc_RNA (1)...(19): siRNA sense strand
ugugggaacucaugacucu

SEQ ID NO: 180653 - RNA, 19 nt, Homo sapiens
  misc_RNA (1)...(19): siRNA sense strand
gaugcagaacuuuauuaug

SEQ ID NO: 180654 - RNA, 19 nt, Homo sapiens
  misc_RNA (1)...(19): siRNA sense strand
gauaaaggcuacuuaacaa

SEQ ID NO: 180655 - RNA, 19 nt, Homo sapiens
  misc_RNA (1)...(19): siRNA sense strand
ggauaaaggcuacuuaaca

SEQ ID NO: 180656 - RNA, 19 nt, Homo sapiens
  misc_RNA (1)...(19): siRNA sense strand
guguagagauggcaaagug

SEQ ID NO: 180657 - RNA, 19 nt, Homo sapiens
  misc_RNA (1)...(19): siRNA sense strand
caaauucgcuggggauaaa

SEQ ID NO: 180658 - RNA, 19 nt, Homo sapiens
  misc_RNA (1)...(19): siRNA sense strand
gaaaaggaguucccuggau

SEQ ID NO: 180659 - RNA, 19 nt, Homo sapiens
  misc_RNA (1)...(19): siRNA sense strand
caaaggaggaccugagagu

SEQ ID NO: 180660 - RNA, 19 nt, Homo sapiens
  misc_RNA (1)...(19): siRNA sense strand
gagcuucuuuucccuaauu

SEQ ID NO: 180661 - RNA, 19 nt, Homo sapiens
  misc_RNA (1)...(19): siRNA sense strand
uaaaggcuacuuaacaaag

SEQ ID NO: 180662 - RNA, 19 nt, Homo sapiens
  misc_RNA (1)...(19): siRNA sense strand
uaguacacaugaagcagaa

SEQ ID NO: 180663 - RNA, 19 nt, Homo sapiens
  misc_RNA (1)...(19): siRNA sense strand
aaaaggaguucccuggauu

SEQ ID NO: 180664 - RNA, 19 nt, Homo sapiens
  misc_RNA (1)...(19): siRNA sense strand
aaaggaguucccuggauuu

SEQ ID NO: 180665 - RNA, 19 nt, Homo sapiens
  misc_RNA (1)...(19): siRNA sense strand
acaugaagcagaagggaaa

SEQ ID NO: 180666 - RNA, 19 nt, Homo sapiens
  misc_RNA (1)...(19): siRNA sense strand
aaaggaggaccugagagua

SEQ ID NO: 180667 - RNA, 19 nt, Homo sapiens
  misc_RNA (1)...(19): siRNA sense strand
aaaggcuacuuaacaaagg

SEQ ID NO: 180668 - RNA, 19 nt, Homo sapiens
  misc_RNA (1)...(19): siRNA sense strand
gaacacgccauggaaacca

SEQ ID NO: 180669 - RNA, 19 nt, Homo sapiens
  misc_RNA (1)...(19): siRNA sense strand
gggcuuccagagcuucuuu

SEQ ID NO: 180670 - RNA, 19 nt, Homo sapiens
  misc_RNA (1)...(19): siRNA sense strand
ugaagcagaagggaaagaa

SEQ ID NO: 180671 - RNA, 19 nt, Homo sapiens
  misc_RNA (1)...(19): siRNA sense strand
gaagcagaagggaaagaag

SEQ ID NO: 180672 - RNA, 19 nt, Homo sapiens
  misc_RNA (1)...(19): siRNA sense strand
gggauaaaggcuacuuaac

SEQ ID NO: 180673 - RNA, 19 nt, Homo sapiens
  misc_RNA (1)...(19): siRNA sense strand
gaaugugacuacaacaaau

SEQ ID NO: 180674 - RNA, 19 nt, Homo sapiens
  misc_RNA (1)...(19): siRNA sense strand
ggaaugugacuacaacaaa

SEQ ID NO: 180675 - RNA, 19 nt, Homo sapiens
  misc_RNA (1)...(19): siRNA sense strand
cgacugaguuucgggaaug

SEQ ID NO: 180676 - RNA, 19 nt, Homo sapiens
  misc_RNA (1)...(19): siRNA sense strand
ggacugcgagguggacuuu

SEQ ID NO: 180677 - RNA, 19 nt, Homo sapiens
  misc_RNA (1)...(19): siRNA sense strand
acaacaaauucaugagugu

SEQ ID NO: 180678 - RNA, 19 nt, Homo sapiens
  misc_RNA (1)...(19): siRNA sense strand
gggaaugugacuacaacaa

SEQ ID NO: 180679 - RNA, 19 nt, Homo sapiens
  misc_RNA (1)...(19): siRNA sense strand
gaguaugugcgcucacuug

SEQ ID NO: 180680 - RNA, 19 nt, Homo sapiens
  misc_RNA (1)...(19): siRNA sense strand
gacuacaacaaauucauga

SEQ ID NO: 180681 - RNA, 19 nt, Homo sapiens
  misc_RNA (1)...(19): siRNA sense strand
ugacuacaacaaauucaug

SEQ ID NO: 180682 - RNA, 19 nt, Homo sapiens
  misc_RNA (1)...(19): siRNA sense strand
gguggacuuuguggaguau

SEQ ID NO: 180683 - RNA, 19 nt, Homo sapiens
  misc_RNA (1)...(19): siRNA sense strand
cuacaacaaauucaugagu

SEQ ID NO: 180684 - RNA, 19 nt, Homo sapiens
  misc_RNA (1)...(19): siRNA sense strand
ucaaggagcugaucaagaa

SEQ ID NO: 180685 - RNA, 19 nt, Homo sapiens
  misc_RNA (1)...(19): siRNA sense strand
ugaagagccuggacaagaa

SEQ ID NO: 180686 - RNA, 19 nt, Homo sapiens
  misc_RNA (1)...(19): siRNA sense strand
gagaaggcccugaccacua

SEQ ID NO: 180687 - RNA, 19 nt, Homo sapiens
  misc_RNA (1)...(19): siRNA sense strand
agaaggcccugaccacuau

SEQ ID NO: 180688 - RNA, 19 nt, Homo sapiens
  misc_RNA (1)...(19): siRNA sense strand
aaacugacccugaguagga

SEQ ID NO: 180689 - RNA, 19 nt, Homo sapiens
  misc_RNA (1)...(19): siRNA sense strand
cuacaacgacuucuuucua

SEQ ID NO: 180690 - RNA, 19 nt, Homo sapiens
  misc_RNA (1)...(19): siRNA sense strand
gagagaggguagcaaacug

SEQ ID NO: 180691 - RNA, 19 nt, Homo sapiens
  misc_RNA (1)...(19): siRNA sense strand
gaacagcgaccaggagauc

SEQ ID NO: 180692 - RNA, 19 nt, Homo sapiens
  misc_RNA (1)...(19): siRNA sense strand
gagcagcaucgaugacuug

SEQ ID NO: 180693 - RNA, 19 nt, Homo sapiens
  misc_RNA (1)...(19): siRNA sense strand
gcaaacugacccugaguag

SEQ ID NO: 180694 - RNA, 19 nt, Homo sapiens
  misc_RNA (1)...(19): siRNA sense strand
uacaacgacuucuuucuag

SEQ ID NO: 180695 - RNA, 19 nt, Homo sapiens
  misc_RNA (1)...(19): siRNA sense strand
gaacucaaggagcugauca

SEQ ID NO: 180696 - RNA, 19 nt, Homo sapiens
  misc_RNA (1)...(19): siRNA sense strand
ggccuacaacgacuucuuu

SEQ ID NO: 180697 - RNA, 19 nt, Homo sapiens
  misc_RNA (1)...(19): siRNA sense strand
guaggaaggaacucaagga

SEQ ID NO: 180698 - RNA, 19 nt, Homo sapiens
  misc_RNA (1)...(19): siRNA sense strand
acaacgacuucuuucuaga

SEQ ID NO: 180699 - RNA, 19 nt, Homo sapiens
  misc_RNA (1)...(19): siRNA sense strand
ggagagaggguagcaaacu

SEQ ID NO: 180700 - RNA, 19 nt, Homo sapiens
  misc_RNA (1)...(19): siRNA sense strand
agaucgacuucaaggagua

SEQ ID NO: 180701 - RNA, 19 nt, Homo sapiens
  misc_RNA (1)...(19): siRNA sense strand
gaaggagagcagcaucgau

SEQ ID NO: 180702 - RNA, 19 nt, Homo sapiens
  misc_RNA (1)...(19): siRNA sense strand
caacgacuucuuucuagag

SEQ ID NO: 180703 - RNA, 19 nt, Homo sapiens
  misc_RNA (1)...(19): siRNA sense strand
gaucaagaaagagcugugu

SEQ ID NO: 180704 - RNA, 19 nt, Homo sapiens
  misc_RNA (1)...(19): siRNA sense strand
accaggagaucgacuucaa

SEQ ID NO: 180705 - RNA, 19 nt, Homo sapiens
  misc_RNA (1)...(19): siRNA sense strand
ucgaugacuugaugaagag

SEQ ID NO: 180706 - RNA, 19 nt, Homo sapiens
  misc_RNA (1)...(19): siRNA sense strand
ucaaggaguacucgguguu

SEQ ID NO: 180707 - RNA, 19 nt, Homo sapiens
  misc_RNA (1)...(19): siRNA sense strand
gaagagccuggacaagaac

SEQ ID NO: 180708 - RNA, 19 nt, Homo sapiens
  misc_RNA (1)...(19): siRNA sense strand
agagaggguagcaaacuga

SEQ ID NO: 180709 - RNA, 19 nt, Homo sapiens
  misc_RNA (1)...(19): siRNA sense strand
aggagcugaucaagaaaga

SEQ ID NO: 180710 - RNA, 19 nt, Homo sapiens
  misc_RNA (1)...(19): siRNA sense strand
ucuagaggacaacaaguga

SEQ ID NO: 180711 - RNA, 19 nt, Homo sapiens
  misc_RNA (1)...(19): siRNA sense strand
aucgaugacuugaugaaga

SEQ ID NO: 180712 - RNA, 19 nt, Homo sapiens
  misc_RNA (1)...(19): siRNA sense strand
ucaagaaagagcugugucu

SEQ ID NO: 180713 - RNA, 19 nt, Homo sapiens
  misc_RNA (1)...(19): siRNA sense strand
caaggagcugaucaagaaa

SEQ ID NO: 180714 - RNA, 19 nt, Homo sapiens
  misc_RNA (1)...(19): siRNA sense strand
caaggaguacucgguguuc

SEQ ID NO: 180715 - RNA, 19 nt, Homo sapiens
  misc_RNA (1)...(19): siRNA sense strand
augaagagccuggacaaga

SEQ ID NO: 180716 - RNA, 19 nt, Homo sapiens
  misc_RNA (1)...(19): siRNA sense strand
gcugagagguccauaauag

SEQ ID NO: 180717 - RNA, 19 nt, Homo sapiens
  misc_RNA (1)...(19): siRNA sense strand
gaaugaggauaagaagauu

SEQ ID NO: 180718 - RNA, 19 nt, Homo sapiens
  misc_RNA (1)...(19): siRNA sense strand
cgacauguuucacaaauac

SEQ ID NO: 180719 - RNA, 19 nt, Homo sapiens
  misc_RNA (1)...(19): siRNA sense strand
ggacaagaaugaggauaag

SEQ ID NO: 180720 - RNA, 19 nt, Homo sapiens
  misc_RNA (1)...(19): siRNA sense strand
ugacgaugaugaaggagaa

SEQ ID NO: 180721 - RNA, 19 nt, Homo sapiens
  misc_RNA (1)...(19): siRNA sense strand
gaggauaagaagauugauu

SEQ ID NO: 180722 - RNA, 19 nt, Homo sapiens
  misc_RNA (1)...(19): siRNA sense strand
cagacgugaugacaagauu

SEQ ID NO: 180723 - RNA, 19 nt, Homo sapiens
  misc_RNA (1)...(19): siRNA sense strand
agacauagccacagacuac

SEQ ID NO: 180724 - RNA, 19 nt, Homo sapiens
  misc_RNA (1)...(19): siRNA sense strand
ucgacauguuucacaaaua

SEQ ID NO: 180725 - RNA, 19 nt, Homo sapiens
  misc_RNA (1)...(19): siRNA sense strand
acaagaaugaggauaagaa

SEQ ID NO: 180726 - RNA, 19 nt, Homo sapiens
  misc_RNA (1)...(19): siRNA sense strand
caccagacgugaugacaag

SEQ ID NO: 180727 - RNA, 19 nt, Homo sapiens
  misc_RNA (1)...(19): siRNA sense strand
agaaugaggauaagaagau

SEQ ID NO: 180728 - RNA, 19 nt, Homo sapiens
  misc_RNA (1)...(19): siRNA sense strand
gaucgacauguuucacaaa

SEQ ID NO: 180729 - RNA, 19 nt, Homo sapiens
  misc_RNA (1)...(19): siRNA sense strand
uaauaggcaugaucgacau

SEQ ID NO: 180730 - RNA, 19 nt, Homo sapiens
  misc_RNA (1)...(19): siRNA sense strand
gacgugaugacaagauuga

SEQ ID NO: 180731 - RNA, 19 nt, Homo sapiens
  misc_RNA (1)...(19): siRNA sense strand
caaauacaccagacgugau

SEQ ID NO: 180732 - RNA, 19 nt, Homo sapiens
  misc_RNA (1)...(19): siRNA sense strand
caagcugagagguccauaa

SEQ ID NO: 180733 - RNA, 19 nt, Homo sapiens
  misc_RNA (1)...(19): siRNA sense strand
ugaucgacauguuucacaa

SEQ ID NO: 180734 - RNA, 19 nt, Homo sapiens
  misc_RNA (1)...(19): siRNA sense strand
caagccugcugacgaugau

SEQ ID NO: 180735 - RNA, 19 nt, Homo sapiens
  misc_RNA (1)...(19): siRNA sense strand
caagaaugaggauaagaag

SEQ ID NO: 180736 - RNA, 19 nt, Homo sapiens
  misc_RNA (1)...(19): siRNA sense strand
ccaagccugcugacgauga

SEQ ID NO: 180737 - RNA, 19 nt, Homo sapiens
  misc_RNA (1)...(19): siRNA sense strand
ugggagacauagccacaga

SEQ ID NO: 180738 - RNA, 19 nt, Homo sapiens
  misc_RNA (1)...(19): siRNA sense strand
uuucugaguuucuguccuu

SEQ ID NO: 180739 - RNA, 19 nt, Homo sapiens
  misc_RNA (1)...(19): siRNA sense strand
aaauacaccagacgugaug

SEQ ID NO: 180740 - RNA, 19 nt, Homo sapiens
  misc_RNA (1)...(19): siRNA sense strand
aggacaagaaugaggauaa

SEQ ID NO: 180741 - RNA, 19 nt, Homo sapiens
  misc_RNA (1)...(19): siRNA sense strand
ccacagacuaccacaagca

SEQ ID NO: 180742 - RNA, 19 nt, Homo sapiens
  misc_RNA (1)...(19): siRNA sense strand
gugaugacaagauugacaa

SEQ ID NO: 180743 - RNA, 19 nt, Homo sapiens
  misc_RNA (1)...(19): siRNA sense strand
gagacauagccacagacua

SEQ ID NO: 180744 - RNA, 19 nt, Homo sapiens
  misc_RNA (1)...(19): siRNA sense strand
ccuuagugccugugacaaa

SEQ ID NO: 180745 - RNA, 19 nt, Homo sapiens
  misc_RNA (1)...(19): siRNA sense strand
gaacuuccccaacuuccuu

SEQ ID NO: 180746 - RNA, 19 nt, Homo sapiens
  misc_RNA (1)...(19): siRNA sense strand
aagcugagagguccauaau

SEQ ID NO: 180747 - RNA, 19 nt, Homo sapiens
  misc_RNA (1)...(19): siRNA sense strand
gacaagaaugaggauaaga

SEQ ID NO: 180748 - RNA, 19 nt, Homo sapiens
  misc_RNA (1)...(19): siRNA sense strand
ggagacauagccacagacu

SEQ ID NO: 180749 - RNA, 19 nt, Homo sapiens
  misc_RNA (1)...(19): siRNA sense strand
gggaugaccugaagaaauu

SEQ ID NO: 180750 - RNA, 19 nt, Homo sapiens
  misc_RNA (1)...(19): siRNA sense strand
gagaaagccuugaacucua

SEQ ID NO: 180751 - RNA, 19 nt, Homo sapiens
  misc_RNA (1)...(19): siRNA sense strand
gaagaaagccacaaagagu

SEQ ID NO: 180752 - RNA, 19 nt, Homo sapiens
  misc_RNA (1)...(19): siRNA sense strand
ucaaagaguuggauaucaa

SEQ ID NO: 180753 - RNA, 19 nt, Homo sapiens
  misc_RNA (1)...(19): siRNA sense strand
ccacaaguacucccugaua

SEQ ID NO: 180754 - RNA, 19 nt, Homo sapiens
  misc_RNA (1)...(19): siRNA sense strand
cacaaguacucccugauaa

SEQ ID NO: 180755 - RNA, 19 nt, Homo sapiens
  misc_RNA (1)...(19): siRNA sense strand
ggagaaagccuugaacucu

SEQ ID NO: 180756 - RNA, 19 nt, Homo sapiens
  misc_RNA (1)...(19): siRNA sense strand
cugaagaaauugcuagaga

SEQ ID NO: 180757 - RNA, 19 nt, Homo sapiens
  misc_RNA (1)...(19): siRNA sense strand
agaaagccuugaacucuau

SEQ ID NO: 180758 - RNA, 19 nt, Homo sapiens
  misc_RNA (1)...(19): siRNA sense strand
gaccgaguguccucaguau

SEQ ID NO: 180759 - RNA, 19 nt, Homo sapiens
  misc_RNA (1)...(19): siRNA sense strand
gaauuuccaugccgucuac

SEQ ID NO: 180760 - RNA, 19 nt, Homo sapiens
  misc_RNA (1)...(19): siRNA sense strand
ugaccgagcuggagaaagc

SEQ ID NO: 180761 - RNA, 19 nt, Homo sapiens
  misc_RNA (1)...(19): siRNA sense strand
aagaaagccacaaagagua

SEQ ID NO: 180762 - RNA, 19 nt, Homo sapiens
  misc_RNA (1)...(19): siRNA sense strand
ccgaguguccucaguauau

SEQ ID NO: 180763 - RNA, 19 nt, Homo sapiens
  misc_RNA (1)...(19): siRNA sense strand
acaaguacucccugauaaa

SEQ ID NO: 180764 - RNA, 19 nt, Homo sapiens
  misc_RNA (1)...(19): siRNA sense strand
caaguacucccugauaaag

SEQ ID NO: 180765 - RNA, 19 nt, Homo sapiens
  misc_RNA (1)...(19): siRNA sense strand
ugaagaaagccacaaagag

SEQ ID NO: 180766 - RNA, 19 nt, Homo sapiens
  misc_RNA (1)...(19): siRNA sense strand
guuccucauucuggugaua

SEQ ID NO: 180767 - RNA, 19 nt, Homo sapiens
  misc_RNA (1)...(19): siRNA sense strand
ccaugaagaaagccacaaa

SEQ ID NO: 180768 - RNA, 19 nt, Homo sapiens
  misc_RNA (1)...(19): siRNA sense strand
guucaaagaguuggauauc

SEQ ID NO: 180769 - RNA, 19 nt, Homo sapiens
  misc_RNA (1)...(19): siRNA sense strand
gagaccgaguguccucagu

SEQ ID NO: 180770 - RNA, 19 nt, Homo sapiens
  misc_RNA (1)...(19): siRNA sense strand
ucaucgacgucuaccacaa

SEQ ID NO: 180771 - RNA, 19 nt, Homo sapiens
  misc_RNA (1)...(19): siRNA sense strand
cgaguguccucaguauauc

SEQ ID NO: 180772 - RNA, 19 nt, Homo sapiens
  misc_RNA (1)...(19): siRNA sense strand
cgacgucuaccacaaguac

SEQ ID NO: 180773 - RNA, 19 nt, Homo sapiens
  misc_RNA (1)...(19): siRNA sense strand
agaccgaguguccucagua

SEQ ID NO: 180774 - RNA, 19 nt, Homo sapiens
  misc_RNA (1)...(19): siRNA sense strand
ucauucuggugauaaagau

SEQ ID NO: 180775 - RNA, 19 nt, Homo sapiens
  misc_RNA (1)...(19): siRNA sense strand
agaaagccacaaagaguag

SEQ ID NO: 180776 - RNA, 19 nt, Homo sapiens
  misc_RNA (1)...(19): siRNA sense strand
gacgucugguucaaagagu

SEQ ID NO: 180777 - RNA, 19 nt, Homo sapiens
  misc_RNA (1)...(19): siRNA sense strand
gaaggacaauuccgguuua

SEQ ID NO: 180778 - RNA, 19 nt, Homo sapiens
  misc_RNA (1)...(19): siRNA sense strand
ggaggagcaugcagaauuu

SEQ ID NO: 180779 - RNA, 19 nt, Homo sapiens
  misc_RNA (1)...(19): siRNA sense strand
gaagagaguguccaagaua

SEQ ID NO: 180780 - RNA, 19 nt, Homo sapiens
  misc_RNA (1)...(19): siRNA sense strand
gaaggaaacacagacauua

SEQ ID NO: 180781 - RNA, 19 nt, Homo sapiens
  misc_RNA (1)...(19): siRNA sense strand
acacagacauuaauacuga

SEQ ID NO: 180782 - RNA, 19 nt, Homo sapiens
  misc_RNA (1)...(19): siRNA sense strand
ggaaagaacauucagaaau

SEQ ID NO: 180783 - RNA, 19 nt, Homo sapiens
  misc_RNA (1)...(19): siRNA sense strand
gucaguagaucuaugaaua

SEQ ID NO: 180784 - RNA, 19 nt, Homo sapiens
  misc_RNA (1)...(19): siRNA sense strand
guacaaacauuucaagaag

SEQ ID NO: 180785 - RNA, 19 nt, Homo sapiens
  misc_RNA (1)...(19): siRNA sense strand
ggaaugcucugaaggacuu

SEQ ID NO: 180786 - RNA, 19 nt, Homo sapiens
  misc_RNA (1)...(19): siRNA sense strand
ggaaacacagacauuaaua

SEQ ID NO: 180787 - RNA, 19 nt, Homo sapiens
  misc_RNA (1)...(19): siRNA sense strand
gcaaaugucucagcagcaa

SEQ ID NO: 180788 - RNA, 19 nt, Homo sapiens
  misc_RNA (1)...(19): siRNA sense strand
ucagaaaugucuaacaaug

SEQ ID NO: 180789 - RNA, 19 nt, Homo sapiens
  misc_RNA (1)...(19): siRNA sense strand
ggaaggugguacaaacauu

SEQ ID NO: 180790 - RNA, 19 nt, Homo sapiens
  misc_RNA (1)...(19): siRNA sense strand
ggaagagaguguccaagau

SEQ ID NO: 180791 - RNA, 19 nt, Homo sapiens
  misc_RNA (1)...(19): siRNA sense strand
gcagauaugcuucaagaug

SEQ ID NO: 180792 - RNA, 19 nt, Homo sapiens
  misc_RNA (1)...(19): siRNA sense strand
gaauaagccuuuggagcaa

SEQ ID NO: 180793 - RNA, 19 nt, Homo sapiens
  misc_RNA (1)...(19): siRNA sense strand
gaaggugguacaaacauuu

SEQ ID NO: 180794 - RNA, 19 nt, Homo sapiens
  misc_RNA (1)...(19): siRNA sense strand
caaaagauaugaugguuga

SEQ ID NO: 180795 - RNA, 19 nt, Homo sapiens
  misc_RNA (1)...(19): siRNA sense strand
aagaggagcugcugaagga

SEQ ID NO: 180796 - RNA, 19 nt, Homo sapiens
  misc_RNA (1)...(19): siRNA sense strand
ggaaggaaacacagacauu

SEQ ID NO: 180797 - RNA, 19 nt, Homo sapiens
  misc_RNA (1)...(19): siRNA sense strand
gguacgcgaugaacugaaa

SEQ ID NO: 180798 - RNA, 19 nt, Homo sapiens
  misc_RNA (1)...(19): siRNA sense strand
ugaaagagaccgaauauac

SEQ ID NO: 180799 - RNA, 19 nt, Homo sapiens
  misc_RNA (1)...(19): siRNA sense strand
ucaaccagcugaucgaaau

SEQ ID NO: 180800 - RNA, 19 nt, Homo sapiens
  misc_RNA (1)...(19): siRNA sense strand
gaacaauaccaugaacauu

SEQ ID NO: 180801 - RNA, 19 nt, Homo sapiens
  misc_RNA (1)...(19): siRNA sense strand
gcgccaaucaugucaauuu

SEQ ID NO: 180802 - RNA, 19 nt, Homo sapiens
  misc_RNA (1)...(19): siRNA sense strand
cagauaugcuucaagaugu

SEQ ID NO: 180803 - RNA, 19 nt, Homo sapiens
  misc_RNA (1)...(19): siRNA sense strand
gaacugaaacgagcaggaa

SEQ ID NO: 180804 - RNA, 19 nt, Homo sapiens
  misc_RNA (1)...(19): siRNA sense strand
caacagguuucgaccaaca

SEQ ID NO: 180805 - RNA, 19 nt, Homo sapiens
  misc_RNA (1)...(19): siRNA sense strand
gaaaugaagcgugcuaaag

SEQ ID NO: 180806 - RNA, 19 nt, Homo sapiens
  misc_RNA (1)...(19): siRNA sense strand
ggaaaugaagcgugcuaaa

SEQ ID NO: 180807 - RNA, 19 nt, Homo sapiens
  misc_RNA (1)...(19): siRNA sense strand
gaauauaccaggacgaaag

SEQ ID NO: 180808 - RNA, 19 nt, Homo sapiens
  misc_RNA (1)...(19): siRNA sense strand
agaaaugucuaacaaugug

SEQ ID NO: 180809 - RNA, 19 nt, Homo sapiens
  misc_RNA (1)...(19): siRNA sense strand
cagcuacuauugccacuga

SEQ ID NO: 180810 - RNA, 19 nt, Homo sapiens
  misc_RNA (1)...(19): siRNA sense strand
gaaccaugcugccaguuuu

SEQ ID NO: 180811 - RNA, 19 nt, Homo sapiens
  misc_RNA (1)...(19): siRNA sense strand
aagagaguguccaagauaa

SEQ ID NO: 180812 - RNA, 19 nt, Homo sapiens
  misc_RNA (1)...(19): siRNA sense strand
ugaaggacuuacugaaaga

SEQ ID NO: 180813 - RNA, 19 nt, Homo sapiens
  misc_RNA (1)...(19): siRNA sense strand
gcauugcugucucuagguu

SEQ ID NO: 180814 - RNA, 19 nt, Homo sapiens
  misc_RNA (1)...(19): siRNA sense strand
ggaaccaugcugccaguuu

SEQ ID NO: 180815 - RNA, 19 nt, Homo sapiens
  misc_RNA (1)...(19): siRNA sense strand
gaaagggaaaggagcuuga

SEQ ID NO: 180816 - RNA, 19 nt, Homo sapiens
  misc_RNA (1)...(19): siRNA sense strand
gguacaaacauuucaagaa

SEQ ID NO: 180817 - RNA, 19 nt, Homo sapiens
  misc_RNA (1)...(19): siRNA sense strand
agacuugccucccgaacaa

SEQ ID NO: 180818 - RNA, 19 nt, Homo sapiens
  misc_RNA (1)...(19): siRNA sense strand
gaggaaggcuugggaguac

SEQ ID NO: 180819 - RNA, 19 nt, Homo sapiens
  misc_RNA (1)...(19): siRNA sense strand
gaacucagggcuugcuuuc

SEQ ID NO: 180820 - RNA, 19 nt, Homo sapiens
  misc_RNA (1)...(19): siRNA sense strand
ggacaccucuuccaaaccu

SEQ ID NO: 180821 - RNA, 19 nt, Homo sapiens
  misc_RNA (1)...(19): siRNA sense strand
gaguaugauuucuuccauu

SEQ ID NO: 180822 - RNA, 19 nt, Homo sapiens
  misc_RNA (1)...(19): siRNA sense strand
ccagagaacaauaccauga

SEQ ID NO: 180823 - RNA, 19 nt, Homo sapiens
  misc_RNA (1)...(19): siRNA sense strand
gccagaacgugaugccauu

SEQ ID NO: 180824 - RNA, 19 nt, Homo sapiens
  misc_RNA (1)...(19): siRNA sense strand
ggacaauuccgguuuagag

SEQ ID NO: 180825 - RNA, 19 nt, Homo sapiens
  misc_RNA (1)...(19): siRNA sense strand
gcaguuaccggaagcugaa

SEQ ID NO: 180826 - RNA, 19 nt, Homo sapiens
  misc_RNA (1)...(19): siRNA sense strand
ucugugugguggaacauua

SEQ ID NO: 180827 - RNA, 19 nt, Homo sapiens
  misc_RNA (1)...(19): siRNA sense strand
gcaaacugaaggacaauuc

SEQ ID NO: 180828 - RNA, 19 nt, Homo sapiens
  misc_RNA (1)...(19): siRNA sense strand
cagagcagauucagcaaca

SEQ ID NO: 180829 - RNA, 19 nt, Homo sapiens
  misc_RNA (1)...(19): siRNA sense strand
gaagcgugcuaaagugucu

SEQ ID NO: 180830 - RNA, 19 nt, Homo sapiens
  misc_RNA (1)...(19): siRNA sense strand
gcugaaagagaccgaauau

SEQ ID NO: 180831 - RNA, 19 nt, Homo sapiens
  misc_RNA (1)...(19): siRNA sense strand
ggauagucuuucugagcua

SEQ ID NO: 180832 - RNA, 19 nt, Homo sapiens
  misc_RNA (1)...(19): siRNA sense strand
ucucuagguuauucacaua

SEQ ID NO: 180833 - RNA, 19 nt, Homo sapiens
  misc_RNA (1)...(19): siRNA sense strand
gaucuaugaauaagccuuu

SEQ ID NO: 180834 - RNA, 19 nt, Homo sapiens
  misc_RNA (1)...(19): siRNA sense strand
gaaacacagacauuaauac

SEQ ID NO: 180835 - RNA, 19 nt, Homo sapiens
  misc_RNA (1)...(19): siRNA sense strand
cagugaaacuagaagaaga

SEQ ID NO: 180836 - RNA, 19 nt, Homo sapiens
  misc_RNA (1)...(19): siRNA sense strand
guacuuacuaugcaaaugu

SEQ ID NO: 180837 - RNA, 19 nt, Homo sapiens
  misc_RNA (1)...(19): siRNA sense strand
gaacgugaugccauuuaug

SEQ ID NO: 180838 - RNA, 19 nt, Homo sapiens
  misc_RNA (1)...(19): siRNA sense strand
agaggugucuuccgaaauc

SEQ ID NO: 180839 - RNA, 19 nt, Homo sapiens
  misc_RNA (1)...(19): siRNA sense strand
gggaaagaacauucagaaa

SEQ ID NO: 180840 - RNA, 19 nt, Homo sapiens
  misc_RNA (1)...(19): siRNA sense strand
gggcucguaucaacaccua

SEQ ID NO: 180841 - RNA, 19 nt, Homo sapiens
  misc_RNA (1)...(19): siRNA sense strand
gggaaaccagagaacaaua

SEQ ID NO: 180842 - RNA, 19 nt, Homo sapiens
  misc_RNA (1)...(19): siRNA sense strand
acagaggugucuuccgaaa

SEQ ID NO: 180843 - RNA, 19 nt, Homo sapiens
  misc_RNA (1)...(19): siRNA sense strand
ggaaugggaaaccagagaa

SEQ ID NO: 180844 - RNA, 19 nt, Homo sapiens
  misc_RNA (1)...(19): siRNA sense strand
ccaaguacaccaucaucaa

SEQ ID NO: 180845 - RNA, 19 nt, Homo sapiens
  misc_RNA (1)...(19): siRNA sense strand
ugggaauccuccagaguuu

SEQ ID NO: 180846 - RNA, 19 nt, Homo sapiens
  misc_RNA (1)...(19): siRNA sense strand
cacagaguaugauuucuuc

SEQ ID NO: 180847 - RNA, 19 nt, Homo sapiens
  misc_RNA (1)...(19): siRNA sense strand
cgauguggcagaauauaaa

SEQ ID NO: 180848 - RNA, 19 nt, Homo sapiens
  misc_RNA (1)...(19): siRNA sense strand
cagaacgugaugccauuua

SEQ ID NO: 180849 - RNA, 19 nt, Homo sapiens
  misc_RNA (1)...(19): siRNA sense strand
gcaaggcgccaaucauguc

SEQ ID NO: 180850 - RNA, 19 nt, Homo sapiens
  misc_RNA (1)...(19): siRNA sense strand
aguaugauuucuuccauug

SEQ ID NO: 180851 - RNA, 19 nt, Homo sapiens
  misc_RNA (1)...(19): siRNA sense strand
cagcaaggcgccaaucaug

SEQ ID NO: 180852 - RNA, 19 nt, Homo sapiens
  misc_RNA (1)...(19): siRNA sense strand
ugaaggacaauuccgguuu

SEQ ID NO: 180853 - RNA, 19 nt, Homo sapiens
  misc_RNA (1)...(19): siRNA sense strand
ggaauccuccagaguuuca

SEQ ID NO: 180854 - RNA, 19 nt, Homo sapiens
  misc_RNA (1)...(19): siRNA sense strand
gaaagagaccgaauauacc

SEQ ID NO: 180855 - RNA, 19 nt, Homo sapiens
  misc_RNA (1)...(19): siRNA sense strand
ucagaaauccuccgaaagg

SEQ ID NO: 180856 - RNA, 19 nt, Homo sapiens
  misc_RNA (1)...(19): siRNA sense strand
ggacuuacugaaagauaug

SEQ ID NO: 180857 - RNA, 19 nt, Homo sapiens
  misc_RNA (1)...(19): siRNA sense strand
gugaugccauuuaugaaca

SEQ ID NO: 180858 - RNA, 19 nt, Homo sapiens
  misc_RNA (1)...(19): siRNA sense strand
cucaagcacuguuugcaaa

SEQ ID NO: 180859 - RNA, 19 nt, Homo sapiens
  misc_RNA (1)...(19): siRNA sense strand
ggaaaccagagaacaauac

SEQ ID NO: 180860 - RNA, 19 nt, Homo sapiens
  misc_RNA (1)...(19): siRNA sense strand
uaugauuucuuccauugug

SEQ ID NO: 180861 - RNA, 19 nt, Homo sapiens
  misc_RNA (1)...(19): siRNA sense strand
ucacagaguaugauuucuu

SEQ ID NO: 180862 - RNA, 19 nt, Homo sapiens
  misc_RNA (1)...(19): siRNA sense strand
aaauucaguuacacaguug

SEQ ID NO: 180863 - RNA, 19 nt, Homo sapiens
  misc_RNA (1)...(19): siRNA sense strand
gaggagcugcugaaggauu

SEQ ID NO: 180864 - RNA, 19 nt, Homo sapiens
  misc_RNA (1)...(19): siRNA sense strand
ggcagaauauaaagaagag

SEQ ID NO: 180865 - RNA, 19 nt, Homo sapiens
  misc_RNA (1)...(19): siRNA sense strand
cugaaggacuuacugaaag

SEQ ID NO: 180866 - RNA, 19 nt, Homo sapiens
  misc_RNA (1)...(19): siRNA sense strand
uaugaugguugaaauggau

SEQ ID NO: 180867 - RNA, 19 nt, Homo sapiens
  misc_RNA (1)...(19): siRNA sense strand
gcugaaggauuuggaagag

SEQ ID NO: 180868 - RNA, 19 nt, Homo sapiens
  misc_RNA (1)...(19): siRNA sense strand
agaacgugaugccauuuau

SEQ ID NO: 180869 - RNA, 19 nt, Homo sapiens
  misc_RNA (1)...(19): siRNA sense strand
aaaugaagcgugcuaaagu

SEQ ID NO: 180870 - RNA, 19 nt, Homo sapiens
  misc_RNA (1)...(19): siRNA sense strand
guugaaauggauagucuuu

SEQ ID NO: 180871 - RNA, 19 nt, Homo sapiens
  misc_RNA (1)...(19): siRNA sense strand
gaugagauucagcaggaaa

SEQ ID NO: 180872 - RNA, 19 nt, Homo sapiens
  misc_RNA (1)...(19): siRNA sense strand
gaaaugucuaacaauguga

SEQ ID NO: 180873 - RNA, 19 nt, Homo sapiens
  misc_RNA (1)...(19): siRNA sense strand
ugaaaacgccauugaauau

SEQ ID NO: 180874 - RNA, 19 nt, Homo sapiens
  misc_RNA (1)...(19): siRNA sense strand
aaggaaacacagacauuaa

SEQ ID NO: 180875 - RNA, 19 nt, Homo sapiens
  misc_RNA (1)...(19): siRNA sense strand
aggagcugcugaaggauuu

SEQ ID NO: 180876 - RNA, 19 nt, Homo sapiens
  misc_RNA (1)...(19): siRNA sense strand
aaugaagcgugcuaaagug

SEQ ID NO: 180877 - RNA, 19 nt, Homo sapiens
  misc_RNA (1)...(19): siRNA sense strand
ccaaugauauguuucgaua

SEQ ID NO: 180878 - RNA, 19 nt, Homo sapiens
  misc_RNA (1)...(19): siRNA sense strand
gauggaaucuaugcaaaua

SEQ ID NO: 180879 - RNA, 19 nt, Homo sapiens
  misc_RNA (1)...(19): siRNA sense strand
guucaaauguucagacuuu

SEQ ID NO: 180880 - RNA, 19 nt, Homo sapiens
  misc_RNA (1)...(19): siRNA sense strand
gccgaaacgugaagaaaua

SEQ ID NO: 180881 - RNA, 19 nt, Homo sapiens
  misc_RNA (1)...(19): siRNA sense strand
guaugcaugucccaaauua

SEQ ID NO: 180882 - RNA, 19 nt, Homo sapiens
  misc_RNA (1)...(19): siRNA sense strand
caagacauauagagcagua

SEQ ID NO: 180883 - RNA, 19 nt, Homo sapiens
  misc_RNA (1)...(19): siRNA sense strand
agaaagagauaacucagaa

SEQ ID NO: 180884 - RNA, 19 nt, Homo sapiens
  misc_RNA (1)...(19): siRNA sense strand
ccaguuagcagaagaaauu

SEQ ID NO: 180885 - RNA, 19 nt, Homo sapiens
  misc_RNA (1)...(19): siRNA sense strand
gaagaaauaauggagagua

SEQ ID NO: 180886 - RNA, 19 nt, Homo sapiens
  misc_RNA (1)...(19): siRNA sense strand
gaggaugguucauauacuu

SEQ ID NO: 180887 - RNA, 19 nt, Homo sapiens
  misc_RNA (1)...(19): siRNA sense strand
aaagguauaucaccaguug

SEQ ID NO: 180888 - RNA, 19 nt, Homo sapiens
  misc_RNA (1)...(19): siRNA sense strand
gcuaaggauucuuucauug

SEQ ID NO: 180889 - RNA, 19 nt, Homo sapiens
  misc_RNA (1)...(19): siRNA sense strand
gggcagaggucgaaacagu

SEQ ID NO: 180890 - RNA, 19 nt, Homo sapiens
  misc_RNA (1)...(19): siRNA sense strand
gaaagacgcagcugagcaa

SEQ ID NO: 180891 - RNA, 19 nt, Homo sapiens
  misc_RNA (1)...(19): siRNA sense strand
acacagcaguucagagaaa

SEQ ID NO: 180892 - RNA, 19 nt, Homo sapiens
  misc_RNA (1)...(19): siRNA sense strand
gugguacaguuuaaagaua

SEQ ID NO: 180893 - RNA, 19 nt, Homo sapiens
  misc_RNA (1)...(19): siRNA sense strand
gacaagcccuucuuucuac

SEQ ID NO: 180894 - RNA, 19 nt, Homo sapiens
  misc_RNA (1)...(19): siRNA sense strand
gcagaggucgaaacaguaa

SEQ ID NO: 180895 - RNA, 19 nt, Homo sapiens
  misc_RNA (1)...(19): siRNA sense strand
ucagagaaauuccagugaa

SEQ ID NO: 180896 - RNA, 19 nt, Homo sapiens
  misc_RNA (1)...(19): siRNA sense strand
ggaagugggagacagaauu

SEQ ID NO: 180897 - RNA, 19 nt, Homo sapiens
  misc_RNA (1)...(19): siRNA sense strand
gggcacagcauaaacacua

SEQ ID NO: 180898 - RNA, 19 nt, Homo sapiens
  misc_RNA (1)...(19): siRNA sense strand
gaaagacgauaaggaagag

SEQ ID NO: 180899 - RNA, 19 nt, Homo sapiens
  misc_RNA (1)...(19): siRNA sense strand
gaacuugaggcuuuggaaa

SEQ ID NO: 180900 - RNA, 19 nt, Homo sapiens
  misc_RNA (1)...(19): siRNA sense strand
caaauuaccauacaacaag

SEQ ID NO: 180901 - RNA, 19 nt, Homo sapiens
  misc_RNA (1)...(19): siRNA sense strand
ggacaaagaaauagagaag

SEQ ID NO: 180902 - RNA, 19 nt, Homo sapiens
  misc_RNA (1)...(19): siRNA sense strand
gaaaaugacguaucuaaug

SEQ ID NO: 180903 - RNA, 19 nt, Homo sapiens
  misc_RNA (1)...(19): siRNA sense strand
agagauaacucagaagaau

SEQ ID NO: 180904 - RNA, 19 nt, Homo sapiens
  misc_RNA (1)...(19): siRNA sense strand
gaaccaagugcuaaggauu

SEQ ID NO: 180905 - RNA, 19 nt, Homo sapiens
  misc_RNA (1)...(19): siRNA sense strand
gaacucuccugcagggaau

SEQ ID NO: 180906 - RNA, 19 nt, Homo sapiens
  misc_RNA (1)...(19): siRNA sense strand
gaacauagaaaacagauug

SEQ ID NO: 180907 - RNA, 19 nt, Homo sapiens
  misc_RNA (1)...(19): siRNA sense strand
gaaacgugaagaaauaaug

SEQ ID NO: 180908 - RNA, 19 nt, Homo sapiens
  misc_RNA (1)...(19): siRNA sense strand
ugaaucaagccaagacaua

SEQ ID NO: 180909 - RNA, 19 nt, Homo sapiens
  misc_RNA (1)...(19): siRNA sense strand
acaaagaaauagagaaguc

SEQ ID NO: 180910 - RNA, 19 nt, Homo sapiens
  misc_RNA (1)...(19): siRNA sense strand
ggaucccaaugauauguuu

SEQ ID NO: 180911 - RNA, 19 nt, Homo sapiens
  misc_RNA (1)...(19): siRNA sense strand
auacucagccuguuuguuu

SEQ ID NO: 180912 - RNA, 19 nt, Homo sapiens
  misc_RNA (1)...(19): siRNA sense strand
agacgcagcugagcaaguu

SEQ ID NO: 180913 - RNA, 19 nt, Homo sapiens
  misc_RNA (1)...(19): siRNA sense strand
agacagaacaguauuggaa

SEQ ID NO: 180914 - RNA, 19 nt, Homo sapiens
  misc_RNA (1)...(19): siRNA sense strand
ugucuauaguccuguaaua

SEQ ID NO: 180915 - RNA, 19 nt, Homo sapiens
  misc_RNA (1)...(19): siRNA sense strand
uaucaccaguuguuucuga

SEQ ID NO: 180916 - RNA, 19 nt, Homo sapiens
  misc_RNA (1)...(19): siRNA sense strand
uaucagugcuaaagugaau

SEQ ID NO: 180917 - RNA, 19 nt, Homo sapiens
  misc_RNA (1)...(19): siRNA sense strand
gauccauccuucucacguu

SEQ ID NO: 180918 - RNA, 19 nt, Homo sapiens
  misc_RNA (1)...(19): siRNA sense strand
cagcagcagucagccauuu

SEQ ID NO: 180919 - RNA, 19 nt, Homo sapiens
  misc_RNA (1)...(19): siRNA sense strand
agagaaagacgauaaggaa

SEQ ID NO: 180920 - RNA, 19 nt, Homo sapiens
  misc_RNA (1)...(19): siRNA sense strand
gaagugggagacagaauuc

SEQ ID NO: 180921 - RNA, 19 nt, Homo sapiens
  misc_RNA (1)...(19): siRNA sense strand
agacaagcccuucuuucua

SEQ ID NO: 180922 - RNA, 19 nt, Homo sapiens
  misc_RNA (1)...(19): siRNA sense strand
gagacaagcccuucuuucu

SEQ ID NO: 180923 - RNA, 19 nt, Homo sapiens
  misc_RNA (1)...(19): siRNA sense strand
gcccaggcgugcaaccuuu

SEQ ID NO: 180924 - RNA, 19 nt, Homo sapiens
  misc_RNA (1)...(19): siRNA sense strand
gaccaaagaguaguuaaug

SEQ ID NO: 180925 - RNA, 19 nt, Homo sapiens
  misc_RNA (1)...(19): siRNA sense strand
gagauaacucagaagaauu

SEQ ID NO: 180926 - RNA, 19 nt, Homo sapiens
  misc_RNA (1)...(19): siRNA sense strand
caaaccaguuagcagaaga

SEQ ID NO: 180927 - RNA, 19 nt, Homo sapiens
  misc_RNA (1)...(19): siRNA sense strand
cuaaacgcaugucuucaga

SEQ ID NO: 180928 - RNA, 19 nt, Homo sapiens
  misc_RNA (1)...(19): siRNA sense strand
gcagacgcaugcgauguau

SEQ ID NO: 180929 - RNA, 19 nt, Homo sapiens
  misc_RNA (1)...(19): siRNA sense strand
gaaucaagccaagacauau

SEQ ID NO: 180930 - RNA, 19 nt, Homo sapiens
  misc_RNA (1)...(19): siRNA sense strand
caagugcuaaggauucuuu

SEQ ID NO: 180931 - RNA, 19 nt, Homo sapiens
  misc_RNA (1)...(19): siRNA sense strand
uggaaucuaugcaaauaug

SEQ ID NO: 180932 - RNA, 19 nt, Homo sapiens
  misc_RNA (1)...(19): siRNA sense strand
ccaaagaguaguuaaugga

SEQ ID NO: 180933 - RNA, 19 nt, Homo sapiens
  misc_RNA (1)...(19): siRNA sense strand
augaggaacuugaggcuuu

SEQ ID NO: 180934 - RNA, 19 nt, Homo sapiens
  misc_RNA (1)...(19): siRNA sense strand
cagcuuacuccacgcaaua

SEQ ID NO: 180935 - RNA, 19 nt, Homo sapiens
  misc_RNA (1)...(19): siRNA sense strand
uaaacccaaugaaacauca

SEQ ID NO: 180936 - RNA, 19 nt, Homo sapiens
  misc_RNA (1)...(19): siRNA sense strand
ccaguggccuagaauuugu

SEQ ID NO: 180937 - RNA, 19 nt, Homo sapiens
  misc_RNA (1)...(19): siRNA sense strand
gcaaaccaguuagcagaag

SEQ ID NO: 180938 - RNA, 19 nt, Homo sapiens
  misc_RNA (1)...(19): siRNA sense strand
auacuuacaucaguuguug

SEQ ID NO: 180939 - RNA, 19 nt, Homo sapiens
  misc_RNA (1)...(19): siRNA sense strand
ggguaaugcuagaaugaug

SEQ ID NO: 180940 - RNA, 19 nt, Homo sapiens
  misc_RNA (1)...(19): siRNA sense strand
uauagagcaguaccaaaua

SEQ ID NO: 180941 - RNA, 19 nt, Homo sapiens
  misc_RNA (1)...(19): siRNA sense strand
aaagagauaacucagaaga

SEQ ID NO: 180942 - RNA, 19 nt, Homo sapiens
  misc_RNA (1)...(19): siRNA sense strand
ccaaauuaccauacaacaa

SEQ ID NO: 180943 - RNA, 19 nt, Homo sapiens
  misc_RNA (1)...(19): siRNA sense strand
guaauacaggguaaugcua

SEQ ID NO: 180944 - RNA, 19 nt, Homo sapiens
  misc_RNA (1)...(19): siRNA sense strand
gaaaauagcagcagcaacu

SEQ ID NO: 180945 - RNA, 19 nt, Homo sapiens
  misc_RNA (1)...(19): siRNA sense strand
cuaaggauucuuucauuga

SEQ ID NO: 180946 - RNA, 19 nt, Homo sapiens
  misc_RNA (1)...(19): siRNA sense strand
cauauccaguggccuagaa

SEQ ID NO: 180947 - RNA, 19 nt, Homo sapiens
  misc_RNA (1)...(19): siRNA sense strand
gaaauagagaagucauauc

SEQ ID NO: 180948 - RNA, 19 nt, Homo sapiens
  misc_RNA (1)...(19): siRNA sense strand
ggagacaagcccuucuuuc

SEQ ID NO: 180949 - RNA, 19 nt, Homo sapiens
  misc_RNA (1)...(19): siRNA sense strand
ccucagcaguucccaaauc

SEQ ID NO: 180950 - RNA, 19 nt, Homo sapiens
  misc_RNA (1)...(19): siRNA sense strand
gcacaaccuagcccaucua

SEQ ID NO: 180951 - RNA, 19 nt, Homo sapiens
  misc_RNA (1)...(19): siRNA sense strand
ggacuccaguuaugcaaaa

SEQ ID NO: 180952 - RNA, 19 nt, Homo sapiens
  misc_RNA (1)...(19): siRNA sense strand
gacgcacccuucaguacaa

SEQ ID NO: 180953 - RNA, 19 nt, Homo sapiens
  misc_RNA (1)...(19): siRNA sense strand
caccaaauaugauguaucc

SEQ ID NO: 180954 - RNA, 19 nt, Homo sapiens
  misc_RNA (1)...(19): siRNA sense strand
cuccaaaugugaaguacaa

SEQ ID NO: 180955 - RNA, 19 nt, Homo sapiens
  misc_RNA (1)...(19): siRNA sense strand
uggaucaacuacuaaacaa

SEQ ID NO: 180956 - RNA, 19 nt, Homo sapiens
  misc_RNA (1)...(19): siRNA sense strand
cucaaaagcugaaaacaaa

SEQ ID NO: 180957 - RNA, 19 nt, Homo sapiens
  misc_RNA (1)...(19): siRNA sense strand
gacagaacaguauuggaaa

SEQ ID NO: 180958 - RNA, 19 nt, Homo sapiens
  misc_RNA (1)...(19): siRNA sense strand
ccagcgacauccucgaaau

SEQ ID NO: 180959 - RNA, 19 nt, Homo sapiens
  misc_RNA (1)...(19): siRNA sense strand
gcuccugucucuacuaugc

SEQ ID NO: 180960 - RNA, 19 nt, Homo sapiens
  misc_RNA (1)...(19): siRNA sense strand
ccacuucucacacuucaga

SEQ ID NO: 180961 - RNA, 19 nt, Homo sapiens
  misc_RNA (1)...(19): siRNA sense strand
ggcaagaccagcaucauca

SEQ ID NO: 180962 - RNA, 19 nt, Homo sapiens
  misc_RNA (1)...(19): siRNA sense strand
auagagcaguaccaaauau

SEQ ID NO: 180963 - RNA, 19 nt, Homo sapiens
  misc_RNA (1)...(19): siRNA sense strand
agaaagacgauaaggaaga

SEQ ID NO: 180964 - RNA, 19 nt, Homo sapiens
  misc_RNA (1)...(19): siRNA sense strand
cuagugaggcuaaagauuc

SEQ ID NO: 180965 - RNA, 19 nt, Homo sapiens
  misc_RNA (1)...(19): siRNA sense strand
ccagucaggucccaacucu

SEQ ID NO: 180966 - RNA, 19 nt, Homo sapiens
  misc_RNA (1)...(19): siRNA sense strand
gcgccaaugaugcuaauga

SEQ ID NO: 180967 - RNA, 19 nt, Homo sapiens
  misc_RNA (1)...(19): siRNA sense strand
aaucaagccaagacauaua

SEQ ID NO: 180968 - RNA, 19 nt, Homo sapiens
  misc_RNA (1)...(19): siRNA sense strand
caaaugugaaguacaagug

SEQ ID NO: 180969 - RNA, 19 nt, Homo sapiens
  misc_RNA (1)...(19): siRNA sense strand
caacccacguuccuucucu

SEQ ID NO: 180970 - RNA, 19 nt, Homo sapiens
  misc_RNA (1)...(19): siRNA sense strand
cagcugagcaaguuaggaa

SEQ ID NO: 180971 - RNA, 19 nt, Homo sapiens
  misc_RNA (1)...(19): siRNA sense strand
ggucgaaacaguaacaaag

SEQ ID NO: 180972 - RNA, 19 nt, Homo sapiens
  misc_RNA (1)...(19): siRNA sense strand
cagaagggccuccaaggau

SEQ ID NO: 180973 - RNA, 19 nt, Homo sapiens
  misc_RNA (1)...(19): siRNA sense strand
cagcuccugucucuacuau

SEQ ID NO: 180974 - RNA, 19 nt, Homo sapiens
  misc_RNA (1)...(19): siRNA sense strand
acagaacaguauuggaaau

SEQ ID NO: 180975 - RNA, 19 nt, Homo sapiens
  misc_RNA (1)...(19): siRNA sense strand
caacaugguggaagucauc

SEQ ID NO: 180976 - RNA, 19 nt, Homo sapiens
  misc_RNA (1)...(19): siRNA sense strand
ucaccuagcuucucaaaag

SEQ ID NO: 180977 - RNA, 19 nt, Homo sapiens
  misc_RNA (1)...(19): siRNA sense strand
gaaaguaccuccagggauu

SEQ ID NO: 180978 - RNA, 19 nt, Homo sapiens
  misc_RNA (1)...(19): siRNA sense strand
uaagaauccugaugagaaa

SEQ ID NO: 180979 - RNA, 19 nt, Homo sapiens
  misc_RNA (1)...(19): siRNA sense strand
caggauggcuggucagaaa

SEQ ID NO: 180980 - RNA, 19 nt, Homo sapiens
  misc_RNA (1)...(19): siRNA sense strand
aaacuuagaacccaagaaa

SEQ ID NO: 180981 - RNA, 19 nt, Homo sapiens
  misc_RNA (1)...(19): siRNA sense strand
gaaacaagaggaaaugaag

SEQ ID NO: 180982 - RNA, 19 nt, Homo sapiens
  misc_RNA (1)...(19): siRNA sense strand
gcagaaaugguuccuuguu

SEQ ID NO: 180983 - RNA, 19 nt, Homo sapiens
  misc_RNA (1)...(19): siRNA sense strand
gcaacuacauccacaugca

SEQ ID NO: 180984 - RNA, 19 nt, Homo sapiens
  misc_RNA (1)...(19): siRNA sense strand
cagaaaugguuccuuguuc

SEQ ID NO: 180985 - RNA, 19 nt, Homo sapiens
  misc_RNA (1)...(19): siRNA sense strand
cagaagaaguggcagcaau

SEQ ID NO: 180986 - RNA, 19 nt, Homo sapiens
  misc_RNA (1)...(19): siRNA sense strand
cuaagaauccugaugagaa

SEQ ID NO: 180987 - RNA, 19 nt, Homo sapiens
  misc_RNA (1)...(19): siRNA sense strand
ccacugcacucgcaacuac

SEQ ID NO: 180988 - RNA, 19 nt, Homo sapiens
  misc_RNA (1)...(19): siRNA sense strand
ucauggugcuguuccagua

SEQ ID NO: 180989 - RNA, 19 nt, Homo sapiens
  misc_RNA (1)...(19): siRNA sense strand
cagaugaugucaccuacug

SEQ ID NO: 180990 - RNA, 19 nt, Homo sapiens
  misc_RNA (1)...(19): siRNA sense strand
ucuccauccugauuaauuu

SEQ ID NO: 180991 - RNA, 19 nt, Homo sapiens
  misc_RNA (1)...(19): siRNA sense strand
gaagucagccauuauaagc

SEQ ID NO: 180992 - RNA, 19 nt, Homo sapiens
  misc_RNA (1)...(19): siRNA sense strand
caagaaacaagaggaaaug

SEQ ID NO: 180993 - RNA, 19 nt, Homo sapiens
  misc_RNA (1)...(19): siRNA sense strand
gcugcaagcuggucauggu

SEQ ID NO: 180994 - RNA, 19 nt, Homo sapiens
  misc_RNA (1)...(19): siRNA sense strand
ccaagaaacaagaggaaau

SEQ ID NO: 180995 - RNA, 19 nt, Homo sapiens
  misc_RNA (1)...(19): siRNA sense strand
gacacuuucuggaagaugu

SEQ ID NO: 180996 - RNA, 19 nt, Homo sapiens
  misc_RNA (1)...(19): siRNA sense strand
ccgacuaugugacgugcua

SEQ ID NO: 180997 - RNA, 19 nt, Homo sapiens
  misc_RNA (1)...(19): siRNA sense strand
gauccucuccauccugauu

SEQ ID NO: 180998 - RNA, 19 nt, Homo sapiens
  misc_RNA (1)...(19): siRNA sense strand
gagguggaaugcccgagau

SEQ ID NO: 180999 - RNA, 19 nt, Homo sapiens
  misc_RNA (1)...(19): siRNA sense strand
uaugugacgugcuacaagu

SEQ ID NO: 181000 - RNA, 19 nt, Homo sapiens
  misc_RNA (1)...(19): siRNA sense strand
gcucuucuccucagaugau

SEQ ID NO: 181001 - RNA, 19 nt, Homo sapiens
  misc_RNA (1)...(19): siRNA sense strand
caaggacgccgugcucuuc

SEQ ID NO: 181002 - RNA, 19 nt, Homo sapiens
  misc_RNA (1)...(19): siRNA sense strand
gagcagccagugccagguu

SEQ ID NO: 181003 - RNA, 19 nt, Homo sapiens
  misc_RNA (1)...(19): siRNA sense strand
ccucagaugaugucaccua

SEQ ID NO: 181004 - RNA, 19 nt, Homo sapiens
  misc_RNA (1)...(19): siRNA sense strand
gaagaaguggcagcaaugg

SEQ ID NO: 181005 - RNA, 19 nt, Homo sapiens
  misc_RNA (1)...(19): siRNA sense strand
agaaacaagaggaaaugaa

SEQ ID NO: 181006 - RNA, 19 nt, Homo sapiens
  misc_RNA (1)...(19): siRNA sense strand
ccagggauuuguggcauuc

SEQ ID NO: 181007 - RNA, 19 nt, Homo sapiens
  misc_RNA (1)...(19): siRNA sense strand
uacaagugcugugggaaga

SEQ ID NO: 181008 - RNA, 19 nt, Homo sapiens
  misc_RNA (1)...(19): siRNA sense strand
gguccacucuccugcugau

SEQ ID NO: 181009 - RNA, 19 nt, Homo sapiens
  misc_RNA (1)...(19): siRNA sense strand
gcaccaaggccagccacuu

SEQ ID NO: 181010 - RNA, 19 nt, Homo sapiens
  misc_RNA (1)...(19): siRNA sense strand
gcuauugccagacacuuuc

SEQ ID NO: 181011 - RNA, 19 nt, Homo sapiens
  misc_RNA (1)...(19): siRNA sense strand
gugcucuucuccucagaug

SEQ ID NO: 181012 - RNA, 19 nt, Homo sapiens
  misc_RNA (1)...(19): siRNA sense strand
ccugauuaauuucauccuu

SEQ ID NO: 181013 - RNA, 19 nt, Homo sapiens
  misc_RNA (1)...(19): siRNA sense strand
guucguguccuucauccuu

SEQ ID NO: 181014 - RNA, 19 nt, Homo sapiens
  misc_RNA (1)...(19): siRNA sense strand
ccaucuccuucuucucuga

SEQ ID NO: 181015 - RNA, 19 nt, Homo sapiens
  misc_RNA (1)...(19): siRNA sense strand
acgagaagcggcacuccua

SEQ ID NO: 181016 - RNA, 19 nt, Homo sapiens
  misc_RNA (1)...(19): siRNA sense strand
agaagaaguggcagcaaug

SEQ ID NO: 181017 - RNA, 19 nt, Homo sapiens
  misc_RNA (1)...(19): siRNA sense strand
uguccaacuucaucaagga

SEQ ID NO: 181018 - RNA, 19 nt, Homo sapiens
  misc_RNA (1)...(19): siRNA sense strand
gaagcugaaagucauguac

SEQ ID NO: 181019 - RNA, 19 nt, Homo sapiens
  misc_RNA (1)...(19): siRNA sense strand
ggcuauugccagacacuuu

SEQ ID NO: 181020 - RNA, 19 nt, Homo sapiens
  misc_RNA (1)...(19): siRNA sense strand
ugaagucagccauuauaag

SEQ ID NO: 181021 - RNA, 19 nt, Homo sapiens
  misc_RNA (1)...(19): siRNA sense strand
ccuguggcguuaaugugaa

SEQ ID NO: 181022 - RNA, 19 nt, Homo sapiens
  misc_RNA (1)...(19): siRNA sense strand
cagaggacgcuauggagau

SEQ ID NO: 181023 - RNA, 19 nt, Homo sapiens
  misc_RNA (1)...(19): siRNA sense strand
gcugcuggcccucuucugu

SEQ ID NO: 181024 - RNA, 19 nt, Homo sapiens
  misc_RNA (1)...(19): siRNA sense strand
agcuggagguucagaagaa

SEQ ID NO: 181025 - RNA, 19 nt, Homo sapiens
  misc_RNA (1)...(19): siRNA sense strand
caauggcaccuccgugagu

SEQ ID NO: 181026 - RNA, 19 nt, Homo sapiens
  misc_RNA (1)...(19): siRNA sense strand
guugggugcugggacauca

SEQ ID NO: 181027 - RNA, 19 nt, Homo sapiens
  misc_RNA (1)...(19): siRNA sense strand
agaggacgcuauggagauc

SEQ ID NO: 181028 - RNA, 19 nt, Homo sapiens
  misc_RNA (1)...(19): siRNA sense strand
aaacaagaggaaaugaagu

SEQ ID NO: 181029 - RNA, 19 nt, Homo sapiens
  misc_RNA (1)...(19): siRNA sense strand
acuuagaacccaagaaaca

SEQ ID NO: 181030 - RNA, 19 nt, Homo sapiens
  misc_RNA (1)...(19): siRNA sense strand
ucaaggacgccgugcucuu

SEQ ID NO: 181031 - RNA, 19 nt, Homo sapiens
  misc_RNA (1)...(19): siRNA sense strand
ccagaaagcugugaucuuc

SEQ ID NO: 181032 - RNA, 19 nt, Homo sapiens
  misc_RNA (1)...(19): siRNA sense strand
ccaaccaccugcugcuuua

SEQ ID NO: 181033 - RNA, 19 nt, Homo sapiens
  misc_RNA (1)...(19): siRNA sense strand
cuagagagcuacaggagaa

SEQ ID NO: 181034 - RNA, 19 nt, Homo sapiens
  misc_RNA (1)...(19): siRNA sense strand
gcuuuaaccuggccaauag

SEQ ID NO: 181035 - RNA, 19 nt, Homo sapiens
  misc_RNA (1)...(19): siRNA sense strand
ugaaguaucuggaccaaaa

SEQ ID NO: 181036 - RNA, 19 nt, Homo sapiens
  misc_RNA (1)...(19): siRNA sense strand
gagaaucaccaguggcaaa

SEQ ID NO: 181037 - RNA, 19 nt, Homo sapiens
  misc_RNA (1)...(19): siRNA sense strand
agaccaaacuggccaagga

SEQ ID NO: 181038 - RNA, 19 nt, Homo sapiens
  misc_RNA (1)...(19): siRNA sense strand
gaaggucuccgcagcacuu

SEQ ID NO: 181039 - RNA, 19 nt, Homo sapiens
  misc_RNA (1)...(19): siRNA sense strand
agaaagcugugaucuucaa

SEQ ID NO: 181040 - RNA, 19 nt, Homo sapiens
  misc_RNA (1)...(19): siRNA sense strand
agaagugggugcaggauuc

SEQ ID NO: 181041 - RNA, 19 nt, Homo sapiens
  misc_RNA (1)...(19): siRNA sense strand
aaucaccaguggcaaaugu

SEQ ID NO: 181042 - RNA, 19 nt, Homo sapiens
  misc_RNA (1)...(19): siRNA sense strand
ccaaacuggccaaggauau

SEQ ID NO: 181043 - RNA, 19 nt, Homo sapiens
  misc_RNA (1)...(19): siRNA sense strand
ggugcaggauuccaugaag

SEQ ID NO: 181044 - RNA, 19 nt, Homo sapiens
  misc_RNA (1)...(19): siRNA sense strand
gugcaggauuccaugaagu

SEQ ID NO: 181045 - RNA, 19 nt, Homo sapiens
  misc_RNA (1)...(19): siRNA sense strand
caugaaguaucuggaccaa

SEQ ID NO: 181046 - RNA, 19 nt, Homo sapiens
  misc_RNA (1)...(19): siRNA sense strand
gagagcuacaggagaauca

SEQ ID NO: 181047 - RNA, 19 nt, Homo sapiens
  misc_RNA (1)...(19): siRNA sense strand
uggcaaauguccccagaaa

SEQ ID NO: 181048 - RNA, 19 nt, Homo sapiens
  misc_RNA (1)...(19): siRNA sense strand
gaagaagugggugcaggau

SEQ ID NO: 181049 - RNA, 19 nt, Homo sapiens
  misc_RNA (1)...(19): siRNA sense strand
aggauuccaugaaguaucu

SEQ ID NO: 181050 - RNA, 19 nt, Homo sapiens
  misc_RNA (1)...(19): siRNA sense strand
gcaggauuccaugaaguau

SEQ ID NO: 181051 - RNA, 19 nt, Homo sapiens
  misc_RNA (1)...(19): siRNA sense strand
caaacuggccaaggauauc

SEQ ID NO: 181052 - RNA, 19 nt, Homo sapiens
  misc_RNA (1)...(19): siRNA sense strand
ugcaggauuccaugaagua

SEQ ID NO: 181053 - RNA, 19 nt, Homo sapiens
  misc_RNA (1)...(19): siRNA sense strand
gcaaauguccccagaaagc

SEQ ID NO: 181054 - RNA, 19 nt, Homo sapiens
  misc_RNA (1)...(19): siRNA sense strand
gaccaaacuggccaaggau

SEQ ID NO: 181055 - RNA, 19 nt, Homo sapiens
  misc_RNA (1)...(19): siRNA sense strand
cagcaagugucccaaagaa

SEQ ID NO: 181056 - RNA, 19 nt, Homo sapiens
  misc_RNA (1)...(19): siRNA sense strand
agaaguggguucaggauuc

SEQ ID NO: 181057 - RNA, 19 nt, Homo sapiens
  misc_RNA (1)...(19): siRNA sense strand
cauagcagccaccuucauu

SEQ ID NO: 181058 - RNA, 19 nt, Homo sapiens
  misc_RNA (1)...(19): siRNA sense strand
gcagcaagugucccaaaga

SEQ ID NO: 181059 - RNA, 19 nt, Homo sapiens
  misc_RNA (1)...(19): siRNA sense strand
ucagccagaugcaaucaau

SEQ ID NO: 181060 - RNA, 19 nt, Homo sapiens
  misc_RNA (1)...(19): siRNA sense strand
cccaaacuccgaagacuug

SEQ ID NO: 181061 - RNA, 19 nt, Homo sapiens
  misc_RNA (1)...(19): siRNA sense strand
gcagaaguggguucaggau

SEQ ID NO: 181062 - RNA, 19 nt, Homo sapiens
  misc_RNA (1)...(19): siRNA sense strand
ccaauaggaagaucucagu

SEQ ID NO: 181063 - RNA, 19 nt, Homo sapiens
  misc_RNA (1)...(19): siRNA sense strand
gaagaaucaccagcagcaa

SEQ ID NO: 181064 - RNA, 19 nt, Homo sapiens
  misc_RNA (1)...(19): siRNA sense strand
ggacaagcaaacccaaacu

SEQ ID NO: 181065 - RNA, 19 nt, Homo sapiens
  misc_RNA (1)...(19): siRNA sense strand
gaaguggguucaggauucc

SEQ ID NO: 181066 - RNA, 19 nt, Homo sapiens
  misc_RNA (1)...(19): siRNA sense strand
cucgcgagcuauagaagaa

SEQ ID NO: 181067 - RNA, 19 nt, Homo sapiens
  misc_RNA (1)...(19): siRNA sense strand
cagcagcaagugucccaaa

SEQ ID NO: 181068 - RNA, 19 nt, Homo sapiens
  misc_RNA (1)...(19): siRNA sense strand
cagaaguggguucaggauu

SEQ ID NO: 181069 - RNA, 19 nt, Homo sapiens
  misc_RNA (1)...(19): siRNA sense strand
agacaaggcuggagacaaa

SEQ ID NO: 181070 - RNA, 19 nt, Homo sapiens
  misc_RNA (1)...(19): siRNA sense strand
caagaaauuugccaucuau

SEQ ID NO: 181071 - RNA, 19 nt, Homo sapiens
  misc_RNA (1)...(19): siRNA sense strand
acaaauccauugagccuua

SEQ ID NO: 181072 - RNA, 19 nt, Homo sapiens
  misc_RNA (1)...(19): siRNA sense strand
ggaaagcuauugcagagau

SEQ ID NO: 181073 - RNA, 19 nt, Homo sapiens
  misc_RNA (1)...(19): siRNA sense strand
gguauuggaugcuuuaauc

SEQ ID NO: 181074 - RNA, 19 nt, Homo sapiens
  misc_RNA (1)...(19): siRNA sense strand
ucaagaaauuugccaucua

SEQ ID NO: 181075 - RNA, 19 nt, Homo sapiens
  misc_RNA (1)...(19): siRNA sense strand
gaacggagacaaauaucug

SEQ ID NO: 181076 - RNA, 19 nt, Homo sapiens
  misc_RNA (1)...(19): siRNA sense strand
caacuucuaugcacaguac

SEQ ID NO: 181077 - RNA, 19 nt, Homo sapiens
  misc_RNA (1)...(19): siRNA sense strand
gccuaucgcuggaugauug

SEQ ID NO: 181078 - RNA, 19 nt, Homo sapiens
  misc_RNA (1)...(19): siRNA sense strand
ccauugagccuuauuugaa

SEQ ID NO: 181079 - RNA, 19 nt, Homo sapiens
  misc_RNA (1)...(19): siRNA sense strand
aaccucauaugcagacuua

SEQ ID NO: 181080 - RNA, 19 nt, Homo sapiens
  misc_RNA (1)...(19): siRNA sense strand
gaagaagaaggaugaaucu

SEQ ID NO: 181081 - RNA, 19 nt, Homo sapiens
  misc_RNA (1)...(19): siRNA sense strand
gaaauuugccaucuaucga

SEQ ID NO: 181082 - RNA, 19 nt, Homo sapiens
  misc_RNA (1)...(19): siRNA sense strand
gaaggcaucuguggcucuu

SEQ ID NO: 181083 - RNA, 19 nt, Homo sapiens
  misc_RNA (1)...(19): siRNA sense strand
gaaugaaguugacucuacu

SEQ ID NO: 181084 - RNA, 19 nt, Homo sapiens
  misc_RNA (1)...(19): siRNA sense strand
gcacaguacaaauccauug

SEQ ID NO: 181085 - RNA, 19 nt, Homo sapiens
  misc_RNA (1)...(19): siRNA sense strand
ccucauaugcagacuuaua

SEQ ID NO: 181086 - RNA, 19 nt, Homo sapiens
  misc_RNA (1)...(19): siRNA sense strand
caaccuauaaggagaagaa

SEQ ID NO: 181087 - RNA, 19 nt, Homo sapiens
  misc_RNA (1)...(19): siRNA sense strand
agaaugaaguugacucuac

SEQ ID NO: 181088 - RNA, 19 nt, Homo sapiens
  misc_RNA (1)...(19): siRNA sense strand
cauagaagagcgugagaaa

SEQ ID NO: 181089 - RNA, 19 nt, Homo sapiens
  misc_RNA (1)...(19): siRNA sense strand
gaaggaugaaucucaggaa

SEQ ID NO: 181090 - RNA, 19 nt, Homo sapiens
  misc_RNA (1)...(19): siRNA sense strand
gcagagaucaagaaaauga

SEQ ID NO: 181091 - RNA, 19 nt, Homo sapiens
  misc_RNA (1)...(19): siRNA sense strand
gaaagcuauugcagagauc

SEQ ID NO: 181092 - RNA, 19 nt, Homo sapiens
  misc_RNA (1)...(19): siRNA sense strand
ggagacaaaccucauaugc

SEQ ID NO: 181093 - RNA, 19 nt, Homo sapiens
  misc_RNA (1)...(19): siRNA sense strand
gagacaaaccucauaugca

SEQ ID NO: 181094 - RNA, 19 nt, Homo sapiens
  misc_RNA (1)...(19): siRNA sense strand
gguggaacggagacaaaua

SEQ ID NO: 181095 - RNA, 19 nt, Homo sapiens
  misc_RNA (1)...(19): siRNA sense strand
uaugcagacuuauaagguu

SEQ ID NO: 181096 - RNA, 19 nt, Homo sapiens
  misc_RNA (1)...(19): siRNA sense strand
ccgaagaucaugcagagaa

SEQ ID NO: 181097 - RNA, 19 nt, Homo sapiens
  misc_RNA (1)...(19): siRNA sense strand
gcaggacccauucucucua

SEQ ID NO: 181098 - RNA, 19 nt, Homo sapiens
  misc_RNA (1)...(19): siRNA sense strand
uagaagagcgugagaaacu

SEQ ID NO: 181099 - RNA, 19 nt, Homo sapiens
  misc_RNA (1)...(19): siRNA sense strand
ugaagaagaaggaugaauc

SEQ ID NO: 181100 - RNA, 19 nt, Homo sapiens
  misc_RNA (1)...(19): siRNA sense strand
caggacccauucucucuau

SEQ ID NO: 181101 - RNA, 19 nt, Homo sapiens
  misc_RNA (1)...(19): siRNA sense strand
ccagagaugacuucacaga

SEQ ID NO: 181102 - RNA, 19 nt, Homo sapiens
  misc_RNA (1)...(19): siRNA sense strand
agaagaaggaugaaucuca

SEQ ID NO: 181103 - RNA, 19 nt, Homo sapiens
  misc_RNA (1)...(19): siRNA sense strand
ggaucuuguucccgauuug

SEQ ID NO: 181104 - RNA, 19 nt, Homo sapiens
  misc_RNA (1)...(19): siRNA sense strand
gagccuuauuugaagaaga

SEQ ID NO: 181105 - RNA, 19 nt, Homo sapiens
  misc_RNA (1)...(19): siRNA sense strand
gauuaagaaugaaguugac

SEQ ID NO: 181106 - RNA, 19 nt, Homo sapiens
  misc_RNA (1)...(19): siRNA sense strand
cuccagagaugacuucaca

SEQ ID NO: 181107 - RNA, 19 nt, Homo sapiens
  misc_RNA (1)...(19): siRNA sense strand
ggaggcaacacucuagcuu

SEQ ID NO: 181108 - RNA, 19 nt, Homo sapiens
  misc_RNA (1)...(19): siRNA sense strand
caugguauuggaugcuuua

SEQ ID NO: 181109 - RNA, 19 nt, Homo sapiens
  misc_RNA (1)...(19): siRNA sense strand
guggaacggagacaaauau

SEQ ID NO: 181110 - RNA, 19 nt, Homo sapiens
  misc_RNA (1)...(19): siRNA sense strand
cauugagccuuauuugaag

SEQ ID NO: 181111 - RNA, 19 nt, Homo sapiens
  misc_RNA (1)...(19): siRNA sense strand
gcuggagacaaaccucaua

SEQ ID NO: 181112 - RNA, 19 nt, Homo sapiens
  misc_RNA (1)...(19): siRNA sense strand
cgaagaucaugcagagaag

SEQ ID NO: 181113 - RNA, 19 nt, Homo sapiens
  misc_RNA (1)...(19): siRNA sense strand
gauuugagcaacuucuaug

SEQ ID NO: 181114 - RNA, 19 nt, Homo sapiens
  misc_RNA (1)...(19): siRNA sense strand
caauggaggcaacacucua

SEQ ID NO: 181115 - RNA, 19 nt, Homo sapiens
  misc_RNA (1)...(19): siRNA sense strand
caaauccauugagccuuau

SEQ ID NO: 181116 - RNA, 19 nt, Homo sapiens
  misc_RNA (1)...(19): siRNA sense strand
agccuuauuugaagaagaa

SEQ ID NO: 181117 - RNA, 19 nt, Homo sapiens
  misc_RNA (1)...(19): siRNA sense strand
gaugauugacuccagagau

SEQ ID NO: 181118 - RNA, 19 nt, Homo sapiens
  misc_RNA (1)...(19): siRNA sense strand
uaucugcaguccauagaag

SEQ ID NO: 181119 - RNA, 19 nt, Homo sapiens
  misc_RNA (1)...(19): siRNA sense strand
ggaaggcaagcagcaguau

SEQ ID NO: 181120 - RNA, 19 nt, Homo sapiens
  misc_RNA (1)...(19): siRNA sense strand
aaaugauggcaaccuauaa

SEQ ID NO: 181121 - RNA, 19 nt, Homo sapiens
  misc_RNA (1)...(19): siRNA sense strand
ggaacggagacaaauaucu

SEQ ID NO: 181122 - RNA, 19 nt, Homo sapiens
  misc_RNA (1)...(19): siRNA sense strand
gaucuuguucccgauuuga

SEQ ID NO: 181123 - RNA, 19 nt, Homo sapiens
  misc_RNA (1)...(19): siRNA sense strand
aucaugaacugcacaagga

SEQ ID NO: 181124 - RNA, 19 nt, Homo sapiens
  misc_RNA (1)...(19): siRNA sense strand
ggacccauucucucuauac

SEQ ID NO: 181125 - RNA, 19 nt, Homo sapiens
  misc_RNA (1)...(19): siRNA sense strand
gaaacuggacgggcucuac

SEQ ID NO: 181126 - RNA, 19 nt, Homo sapiens
  misc_RNA (1)...(19): siRNA sense strand
gguugaccuuaauaaaugu

SEQ ID NO: 181127 - RNA, 19 nt, Homo sapiens
  misc_RNA (1)...(19): siRNA sense strand
agaaaaugauggcaaccua

SEQ ID NO: 181128 - RNA, 19 nt, Homo sapiens
  misc_RNA (1)...(19): siRNA sense strand
uugcagagaucaagaaaau

SEQ ID NO: 181129 - RNA, 19 nt, Homo sapiens
  misc_RNA (1)...(19): siRNA sense strand
augauugacuccagagaug

SEQ ID NO: 181130 - RNA, 19 nt, Homo sapiens
  misc_RNA (1)...(19): siRNA sense strand
cccgaaggauugacaccaa

SEQ ID NO: 181131 - RNA, 19 nt, Homo sapiens
  misc_RNA (1)...(19): siRNA sense strand
gcuugcacccgaaggauug

SEQ ID NO: 181132 - RNA, 19 nt, Homo sapiens
  misc_RNA (1)...(19): siRNA sense strand
ccaugguauuggaugcuuu

SEQ ID NO: 181133 - RNA, 19 nt, Homo sapiens
  misc_RNA (1)...(19): siRNA sense strand
gcaacuucuaugcacagua

SEQ ID NO: 181134 - RNA, 19 nt, Homo sapiens
  misc_RNA (1)...(19): siRNA sense strand
cucauaugcagacuuauaa

SEQ ID NO: 181135 - RNA, 19 nt, Homo sapiens
  misc_RNA (1)...(19): siRNA sense strand
gaaggcaagcagcaguauc

SEQ ID NO: 181136 - RNA, 19 nt, Homo sapiens
  misc_RNA (1)...(19): siRNA sense strand
gaauccagggaaagcuauu

SEQ ID NO: 181137 - RNA, 19 nt, Homo sapiens
  misc_RNA (1)...(19): siRNA sense strand
gaaaaugauggcaaccuau

SEQ ID NO: 181138 - RNA, 19 nt, Homo sapiens
  misc_RNA (1)...(19): siRNA sense strand
gacaccaaccucaauaagg

SEQ ID NO: 181139 - RNA, 19 nt, Homo sapiens
  misc_RNA (1)...(19): siRNA sense strand
aaaaugauggcaaccuaua

SEQ ID NO: 181140 - RNA, 19 nt, Homo sapiens
  misc_RNA (1)...(19): siRNA sense strand
uaagaaugaaguugacucu

SEQ ID NO: 181141 - RNA, 19 nt, Homo sapiens
  misc_RNA (1)...(19): siRNA sense strand
gggucugaauccagggaaa

SEQ ID NO: 181142 - RNA, 19 nt, Homo sapiens
  misc_RNA (1)...(19): siRNA sense strand
gccacaccaucaugaacug

SEQ ID NO: 181143 - RNA, 19 nt, Homo sapiens
  misc_RNA (1)...(19): siRNA sense strand
ugugauaaaggaucuuguu

SEQ ID NO: 181144 - RNA, 19 nt, Homo sapiens
  misc_RNA (1)...(19): siRNA sense strand
agaagagcgugagaaacug

SEQ ID NO: 181145 - RNA, 19 nt, Homo sapiens
  misc_RNA (1)...(19): siRNA sense strand
gugauaaaggaucuuguuc

SEQ ID NO: 181146 - RNA, 19 nt, Homo sapiens
  misc_RNA (1)...(19): siRNA sense strand
cacaguacaaauccauuga

SEQ ID NO: 181147 - RNA, 19 nt, Homo sapiens
  misc_RNA (1)...(19): siRNA sense strand
uuggaugcuuuaaucaaga

SEQ ID NO: 181148 - RNA, 19 nt, Homo sapiens
  misc_RNA (1)...(19): siRNA sense strand
ugacaccaaccucaauaag

SEQ ID NO: 181149 - RNA, 19 nt, Homo sapiens
  misc_RNA (1)...(19): siRNA sense strand
guauuggaugcuuuaauca

SEQ ID NO: 181150 - RNA, 19 nt, Homo sapiens
  misc_RNA (1)...(19): siRNA sense strand
gcuauugcagagaucaaga

SEQ ID NO: 181151 - RNA, 19 nt, Homo sapiens
  misc_RNA (1)...(19): siRNA sense strand
ccaagcugcaggacccauu

SEQ ID NO: 181152 - RNA, 19 nt, Homo sapiens
  misc_RNA (1)...(19): siRNA sense strand
aggcaucuguggcucuugu

SEQ ID NO: 181153 - RNA, 19 nt, Homo sapiens
  misc_RNA (1)...(19): siRNA sense strand
gaacugggcugauaaugaa

SEQ ID NO: 181154 - RNA, 19 nt, Homo sapiens
  misc_RNA (1)...(19): siRNA sense strand
gcucagaacuacauguuaa

SEQ ID NO: 181155 - RNA, 19 nt, Homo sapiens
  misc_RNA (1)...(19): siRNA sense strand
gagaggagccgauauaguu

SEQ ID NO: 181156 - RNA, 19 nt, Homo sapiens
  misc_RNA (1)...(19): siRNA sense strand
ccagaaagauuggauugua

SEQ ID NO: 181157 - RNA, 19 nt, Homo sapiens
  misc_RNA (1)...(19): siRNA sense strand
cagcauggacuuaucauua

SEQ ID NO: 181158 - RNA, 19 nt, Homo sapiens
  misc_RNA (1)...(19): siRNA sense strand
gcugagaacugggcugaua

SEQ ID NO: 181159 - RNA, 19 nt, Homo sapiens
  misc_RNA (1)...(19): siRNA sense strand
ucuggaaucuggacaaaua

SEQ ID NO: 181160 - RNA, 19 nt, Homo sapiens
  misc_RNA (1)...(19): siRNA sense strand
gaagagggauuugcauuag

SEQ ID NO: 181161 - RNA, 19 nt, Homo sapiens
  misc_RNA (1)...(19): siRNA sense strand
gaaagaacaauaagacaug

SEQ ID NO: 181162 - RNA, 19 nt, Homo sapiens
  misc_RNA (1)...(19): siRNA sense strand
gcauacucauggaauauuu

SEQ ID NO: 181163 - RNA, 19 nt, Homo sapiens
  misc_RNA (1)...(19): siRNA sense strand
guaaagcugugcaguguca

SEQ ID NO: 181164 - RNA, 19 nt, Homo sapiens
  misc_RNA (1)...(19): siRNA sense strand
ugagagcguuucaguauga

SEQ ID NO: 181165 - RNA, 19 nt, Homo sapiens
  misc_RNA (1)...(19): siRNA sense strand
gcccugaucucugaacuaa

SEQ ID NO: 181166 - RNA, 19 nt, Homo sapiens
  misc_RNA (1)...(19): siRNA sense strand
ggacaugggugggaaccaa

SEQ ID NO: 181167 - RNA, 19 nt, Homo sapiens
  misc_RNA (1)...(19): siRNA sense strand
gagagaguguggagaacuu

SEQ ID NO: 181168 - RNA, 19 nt, Homo sapiens
  misc_RNA (1)...(19): siRNA sense strand
cuagagggccaguuacuua

SEQ ID NO: 181169 - RNA, 19 nt, Homo sapiens
  misc_RNA (1)...(19): siRNA sense strand
ugaagagggauuugcauua

SEQ ID NO: 181170 - RNA, 19 nt, Homo sapiens
  misc_RNA (1)...(19): siRNA sense strand
ccaaauagccaucuuguac

SEQ ID NO: 181171 - RNA, 19 nt, Homo sapiens
  misc_RNA (1)...(19): siRNA sense strand
aaagcauacucauggaaua

SEQ ID NO: 181172 - RNA, 19 nt, Homo sapiens
  misc_RNA (1)...(19): siRNA sense strand
uaacaaaccagaaagaagu

SEQ ID NO: 181173 - RNA, 19 nt, Homo sapiens
  misc_RNA (1)...(19): siRNA sense strand
uacaauaggucugauaaug

SEQ ID NO: 181174 - RNA, 19 nt, Homo sapiens
  misc_RNA (1)...(19): siRNA sense strand
agaguggucuuuggaauuu

SEQ ID NO: 181175 - RNA, 19 nt, Homo sapiens
  misc_RNA (1)...(19): siRNA sense strand
gaaaugcucagaacuacau

SEQ ID NO: 181176 - RNA, 19 nt, Homo sapiens
  misc_RNA (1)...(19): siRNA sense strand
gcugagaggagccgauaua

SEQ ID NO: 181177 - RNA, 19 nt, Homo sapiens
  misc_RNA (1)...(19): siRNA sense strand
gauauaguucggugugaua

SEQ ID NO: 181178 - RNA, 19 nt, Homo sapiens
  misc_RNA (1)...(19): siRNA sense strand
caaacagcaugccaagaga

SEQ ID NO: 181179 - RNA, 19 nt, Homo sapiens
  misc_RNA (1)...(19): siRNA sense strand
ucaaucugcucuuuccauu

SEQ ID NO: 181180 - RNA, 19 nt, Homo sapiens
  misc_RNA (1)...(19): siRNA sense strand
gcuccuggcuuugcuaaga

SEQ ID NO: 181181 - RNA, 19 nt, Homo sapiens
  misc_RNA (1)...(19): siRNA sense strand
aaauaagccuccacagugu

SEQ ID NO: 181182 - RNA, 19 nt, Homo sapiens
  misc_RNA (1)...(19): siRNA sense strand
gugggacgcuccuggcuuu

SEQ ID NO: 181183 - RNA, 19 nt, Homo sapiens
  misc_RNA (1)...(19): siRNA sense strand
caagugcccagaacucuuu

SEQ ID NO: 181184 - RNA, 19 nt, Homo sapiens
  misc_RNA (1)...(19): siRNA sense strand
gaaguuccaguuauaaauc

SEQ ID NO: 181185 - RNA, 19 nt, Homo sapiens
  misc_RNA (1)...(19): siRNA sense strand
gagaguggucuuuggaauu

SEQ ID NO: 181186 - RNA, 19 nt, Homo sapiens
  misc_RNA (1)...(19): siRNA sense strand
uaauggcucugcacaaaca

SEQ ID NO: 181187 - RNA, 19 nt, Homo sapiens
  misc_RNA (1)...(19): siRNA sense strand
cuuaauggcucugcacaaa

SEQ ID NO: 181188 - RNA, 19 nt, Homo sapiens
  misc_RNA (1)...(19): siRNA sense strand
gauaaugaaccuaacaaca

SEQ ID NO: 181189 - RNA, 19 nt, Homo sapiens
  misc_RNA (1)...(19): siRNA sense strand
ccugaucucugaacuaaca

SEQ ID NO: 181190 - RNA, 19 nt, Homo sapiens
  misc_RNA (1)...(19): siRNA sense strand
gcaaaggcauagcaucacu

SEQ ID NO: 181191 - RNA, 19 nt, Homo sapiens
  misc_RNA (1)...(19): siRNA sense strand
gugaggcuauuucguguga

SEQ ID NO: 181192 - RNA, 19 nt, Homo sapiens
  misc_RNA (1)...(19): siRNA sense strand
gaaucgcuacacagacuua

SEQ ID NO: 181193 - RNA, 19 nt, Homo sapiens
  misc_RNA (1)...(19): siRNA sense strand
gagggccaguuacuuaaug

SEQ ID NO: 181194 - RNA, 19 nt, Homo sapiens
  misc_RNA (1)...(19): siRNA sense strand
cgagggauauucuuugucu

SEQ ID NO: 181195 - RNA, 19 nt, Homo sapiens
  misc_RNA (1)...(19): siRNA sense strand
gacgagggauauucuuugu

SEQ ID NO: 181196 - RNA, 19 nt, Homo sapiens
  misc_RNA (1)...(19): siRNA sense strand
gcuaagcccucagaaugga

SEQ ID NO: 181197 - RNA, 19 nt, Homo sapiens
  misc_RNA (1)...(19): siRNA sense strand
gagagugccucgagaccau

SEQ ID NO: 181198 - RNA, 19 nt, Homo sapiens
  misc_RNA (1)...(19): siRNA sense strand
guggagauauacaucaaga

SEQ ID NO: 181199 - RNA, 19 nt, Homo sapiens
  misc_RNA (1)...(19): siRNA sense strand
ggagauauacaucaagagu

SEQ ID NO: 181200 - RNA, 19 nt, Homo sapiens
  misc_RNA (1)...(19): siRNA sense strand
ggacaauggacagcaguaa

SEQ ID NO: 181201 - RNA, 19 nt, Homo sapiens
  misc_RNA (1)...(19): siRNA sense strand
agagggauuugcauuaguu

SEQ ID NO: 181202 - RNA, 19 nt, Homo sapiens
  misc_RNA (1)...(19): siRNA sense strand
gaaacaugaucugccuuca

SEQ ID NO: 181203 - RNA, 19 nt, Homo sapiens
  misc_RNA (1)...(19): siRNA sense strand
cugcagaccuucaggacaa

SEQ ID NO: 181204 - RNA, 19 nt, Homo sapiens
  misc_RNA (1)...(19): siRNA sense strand
ggcauagcaucacuuccua

SEQ ID NO: 181205 - RNA, 19 nt, Homo sapiens
  misc_RNA (1)...(19): siRNA sense strand
gaacuaacaaaccagaaag

SEQ ID NO: 181206 - RNA, 19 nt, Homo sapiens
  misc_RNA (1)...(19): siRNA sense strand
caagugugcuacagugcuu

SEQ ID NO: 181207 - RNA, 19 nt, Homo sapiens
  misc_RNA (1)...(19): siRNA sense strand
gggcugauaaugaaccuaa

SEQ ID NO: 181208 - RNA, 19 nt, Homo sapiens
  misc_RNA (1)...(19): siRNA sense strand
aaucugcucuuuccauugu

SEQ ID NO: 181209 - RNA, 19 nt, Homo sapiens
  misc_RNA (1)...(19): siRNA sense strand
ucuggaagauggucagcua

SEQ ID NO: 181210 - RNA, 19 nt, Homo sapiens
  misc_RNA (1)...(19): siRNA sense strand
cagaaucgcuacacagacu

SEQ ID NO: 181211 - RNA, 19 nt, Homo sapiens
  misc_RNA (1)...(19): siRNA sense strand
ugucauuucucuuguaaca

SEQ ID NO: 181212 - RNA, 19 nt, Homo sapiens
  misc_RNA (1)...(19): siRNA sense strand
uaaauccacaugucaauuc

SEQ ID NO: 181213 - RNA, 19 nt, Homo sapiens
  misc_RNA (1)...(19): siRNA sense strand
guguaaagcugugcagugu

SEQ ID NO: 181214 - RNA, 19 nt, Homo sapiens
  misc_RNA (1)...(19): siRNA sense strand
uaguggccauccagaauaa

SEQ ID NO: 181215 - RNA, 19 nt, Homo sapiens
  misc_RNA (1)...(19): siRNA sense strand
agcgguggcuucuacaaua

SEQ ID NO: 181216 - RNA, 19 nt, Homo sapiens
  misc_RNA (1)...(19): siRNA sense strand
gagaauggccacuggucaa

SEQ ID NO: 181217 - RNA, 19 nt, Homo sapiens
  misc_RNA (1)...(19): siRNA sense strand
cugcaacgcuggauucaca

SEQ ID NO: 181218 - RNA, 19 nt, Homo sapiens
  misc_RNA (1)...(19): siRNA sense strand
caugucaauucaucuguga

SEQ ID NO: 181219 - RNA, 19 nt, Homo sapiens
  misc_RNA (1)...(19): siRNA sense strand
aggaagcccugacuuacuu

SEQ ID NO: 181220 - RNA, 19 nt, Homo sapiens
  misc_RNA (1)...(19): siRNA sense strand
gaccagaaagauuggauug

SEQ ID NO: 181221 - RNA, 19 nt, Homo sapiens
  misc_RNA (1)...(19): siRNA sense strand
cuaggaacauauggaguuu

SEQ ID NO: 181222 - RNA, 19 nt, Homo sapiens
  misc_RNA (1)...(19): siRNA sense strand
cguaaauacugccagaauc

SEQ ID NO: 181223 - RNA, 19 nt, Homo sapiens
  misc_RNA (1)...(19): siRNA sense strand
gcaggaccauugacuaucc

SEQ ID NO: 181224 - RNA, 19 nt, Homo sapiens
  misc_RNA (1)...(19): siRNA sense strand
gcauggacuuaucauuaca

SEQ ID NO: 181225 - RNA, 19 nt, Homo sapiens
  misc_RNA (1)...(19): siRNA sense strand
ccugucauuucucuuguaa

SEQ ID NO: 181226 - RNA, 19 nt, Homo sapiens
  misc_RNA (1)...(19): siRNA sense strand
cagaaagauuggauuguac

SEQ ID NO: 181227 - RNA, 19 nt, Homo sapiens
  misc_RNA (1)...(19): siRNA sense strand
gccauucccugcacaccuu

SEQ ID NO: 181228 - RNA, 19 nt, Homo sapiens
  misc_RNA (1)...(19): siRNA sense strand
gaacgaggaaacaugaucu

SEQ ID NO: 181229 - RNA, 19 nt, Homo sapiens
  misc_RNA (1)...(19): siRNA sense strand
agaacugggcugauaauga

SEQ ID NO: 181230 - RNA, 19 nt, Homo sapiens
  misc_RNA (1)...(19): siRNA sense strand
caagcaggaccauugacua

SEQ ID NO: 181231 - RNA, 19 nt, Homo sapiens
  misc_RNA (1)...(19): siRNA sense strand
cguggagaauucaauguug

SEQ ID NO: 181232 - RNA, 19 nt, Homo sapiens
  misc_RNA (1)...(19): siRNA sense strand
gcguggagauauacaucaa

SEQ ID NO: 181233 - RNA, 19 nt, Homo sapiens
  misc_RNA (1)...(19): siRNA sense strand
cgaaagaacaauaagacau

SEQ ID NO: 181234 - RNA, 19 nt, Homo sapiens
  misc_RNA (1)...(19): siRNA sense strand
cugggaaacuucucuuuua

SEQ ID NO: 181235 - RNA, 19 nt, Homo sapiens
  misc_RNA (1)...(19): siRNA sense strand
gcacugacggguaccaagu

SEQ ID NO: 181236 - RNA, 19 nt, Homo sapiens
  misc_RNA (1)...(19): siRNA sense strand
ggaucaaucugcucuuucc

SEQ ID NO: 181237 - RNA, 19 nt, Homo sapiens
  misc_RNA (1)...(19): siRNA sense strand
ugugaaaugcucagaacua

SEQ ID NO: 181238 - RNA, 19 nt, Homo sapiens
  misc_RNA (1)...(19): siRNA sense strand
gcugugaaaugcucagaac

SEQ ID NO: 181239 - RNA, 19 nt, Homo sapiens
  misc_RNA (1)...(19): siRNA sense strand
ugaacuaacaaaccagaaa

SEQ ID NO: 181240 - RNA, 19 nt, Homo sapiens
  misc_RNA (1)...(19): siRNA sense strand
ggcuccagcugcaaauuug

SEQ ID NO: 181241 - RNA, 19 nt, Homo sapiens
  misc_RNA (1)...(19): siRNA sense strand
gcagccacccucugggaaa

SEQ ID NO: 181242 - RNA, 19 nt, Homo sapiens
  misc_RNA (1)...(19): siRNA sense strand
gaauuucccaacuccuuug

SEQ ID NO: 181243 - RNA, 19 nt, Homo sapiens
  misc_RNA (1)...(19): siRNA sense strand
gugaaaugcucagaacuac

SEQ ID NO: 181244 - RNA, 19 nt, Homo sapiens
  misc_RNA (1)...(19): siRNA sense strand
ggaagauggucagcuacuc

SEQ ID NO: 181245 - RNA, 19 nt, Homo sapiens
  misc_RNA (1)...(19): siRNA sense strand
gaaugcacaacuucuggaa

SEQ ID NO: 181246 - RNA, 19 nt, Homo sapiens
  misc_RNA (1)...(19): siRNA sense strand
ccucagaauggaacaauga

SEQ ID NO: 181247 - RNA, 19 nt, Homo sapiens
  misc_RNA (1)...(19): siRNA sense strand
cuugagagcguuucaguau

SEQ ID NO: 181248 - RNA, 19 nt, Homo sapiens
  misc_RNA (1)...(19): siRNA sense strand
gcgguggcuucuacaauag

SEQ ID NO: 181249 - RNA, 19 nt, Homo sapiens
  misc_RNA (1)...(19): siRNA sense strand
aauggccacuggucaacua

SEQ ID NO: 181250 - RNA, 19 nt, Homo sapiens
  misc_RNA (1)...(19): siRNA sense strand
ccaccugucauuucucuug

SEQ ID NO: 181251 - RNA, 19 nt, Homo sapiens
  misc_RNA (1)...(19): siRNA sense strand
ggaccagaaagauuggauu

SEQ ID NO: 181252 - RNA, 19 nt, Homo sapiens
  misc_RNA (1)...(19): siRNA sense strand
acaaugaccuguguucaac

SEQ ID NO: 181253 - RNA, 19 nt, Homo sapiens
  misc_RNA (1)...(19): siRNA sense strand
guaccuagauuaugauuuc

SEQ ID NO: 181254 - RNA, 19 nt, Homo sapiens
  misc_RNA (1)...(19): siRNA sense strand
gaauaugaguaccuagauu

SEQ ID NO: 181255 - RNA, 19 nt, Homo sapiens
  misc_RNA (1)...(19): siRNA sense strand
ggagacaggccaccgaaua

SEQ ID NO: 181256 - RNA, 19 nt, Homo sapiens
  misc_RNA (1)...(19): siRNA sense strand
caaaagaggucuguucaua

SEQ ID NO: 181257 - RNA, 19 nt, Homo sapiens
  misc_RNA (1)...(19): siRNA sense strand
ccacggagcuggccaacau

SEQ ID NO: 181258 - RNA, 19 nt, Homo sapiens
  misc_RNA (1)...(19): siRNA sense strand
gcacagacaacucgacuga

SEQ ID NO: 181259 - RNA, 19 nt, Homo sapiens
  misc_RNA (1)...(19): siRNA sense strand
gcacagaccacucaaacca

SEQ ID NO: 181260 - RNA, 19 nt, Homo sapiens
  misc_RNA (1)...(19): siRNA sense strand
cauggaaccuacuaccaaa

SEQ ID NO: 181261 - RNA, 19 nt, Homo sapiens
  misc_RNA (1)...(19): siRNA sense strand
gcaauuuguccgucaacua

SEQ ID NO: 181262 - RNA, 19 nt, Homo sapiens
  misc_RNA (1)...(19): siRNA sense strand
gagacaggccaccgaauau

SEQ ID NO: 181263 - RNA, 19 nt, Homo sapiens
  misc_RNA (1)...(19): siRNA sense strand
augaguaccuagauuauga

SEQ ID NO: 181264 - RNA, 19 nt, Homo sapiens
  misc_RNA (1)...(19): siRNA sense strand
gggaaccuguccacggauu

SEQ ID NO: 181265 - RNA, 19 nt, Homo sapiens
  misc_RNA (1)...(19): siRNA sense strand
cagcagcuauggagauaca

SEQ ID NO: 181266 - RNA, 19 nt, Homo sapiens
  misc_RNA (1)...(19): siRNA sense strand
gacaggccaccgaauauga

SEQ ID NO: 181267 - RNA, 19 nt, Homo sapiens
  misc_RNA (1)...(19): siRNA sense strand
acagaccacugcaccagaa

SEQ ID NO: 181268 - RNA, 19 nt, Homo sapiens
  misc_RNA (1)...(19): siRNA sense strand
ccaccgagauggucugcau

SEQ ID NO: 181269 - RNA, 19 nt, Homo sapiens
  misc_RNA (1)...(19): siRNA sense strand
cagaggcccuguccaugga

SEQ ID NO: 181270 - RNA, 19 nt, Homo sapiens
  misc_RNA (1)...(19): siRNA sense strand
caccgaauaugaguaccua

SEQ ID NO: 181271 - RNA, 19 nt, Homo sapiens
  misc_RNA (1)...(19): siRNA sense strand
ggacaccugggcagaugaa

SEQ ID NO: 181272 - RNA, 19 nt, Homo sapiens
  misc_RNA (1)...(19): siRNA sense strand
ugacaccacuccucugacu

SEQ ID NO: 181273 - RNA, 19 nt, Homo sapiens
  misc_RNA (1)...(19): siRNA sense strand
gcacagcuuccucccuuag

SEQ ID NO: 181274 - RNA, 19 nt, Homo sapiens
  misc_RNA (1)...(19): siRNA sense strand
ccauggaaccuacuaccaa

SEQ ID NO: 181275 - RNA, 19 nt, Homo sapiens
  misc_RNA (1)...(19): siRNA sense strand
gguggccacuaucuucuuc

SEQ ID NO: 181276 - RNA, 19 nt, Homo sapiens
  misc_RNA (1)...(19): siRNA sense strand
gaaccuguccacggauuca

SEQ ID NO: 181277 - RNA, 19 nt, Homo sapiens
  misc_RNA (1)...(19): siRNA sense strand
aaagaggucuguucauacc

SEQ ID NO: 181278 - RNA, 19 nt, Homo sapiens
  misc_RNA (1)...(19): siRNA sense strand
ggagauacagaccacucaa

SEQ ID NO: 181279 - RNA, 19 nt, Homo sapiens
  misc_RNA (1)...(19): siRNA sense strand
caauuuguccgucaacuac

SEQ ID NO: 181280 - RNA, 19 nt, Homo sapiens
  misc_RNA (1)...(19): siRNA sense strand
ccacagaggcacagacaac

SEQ ID NO: 181281 - RNA, 19 nt, Homo sapiens
  misc_RNA (1)...(19): siRNA sense strand
gcugguggccacuaucuuc

SEQ ID NO: 181282 - RNA, 19 nt, Homo sapiens
  misc_RNA (1)...(19): siRNA sense strand
cgaauaugaguaccuagau

SEQ ID NO: 181283 - RNA, 19 nt, Homo sapiens
  misc_RNA (1)...(19): siRNA sense strand
gggcagaugaagccgagaa

SEQ ID NO: 181284 - RNA, 19 nt, Homo sapiens
  misc_RNA (1)...(19): siRNA sense strand
gcagcuauggagauacaga

SEQ ID NO: 181285 - RNA, 19 nt, Homo sapiens
  misc_RNA (1)...(19): siRNA sense strand
uucagcagcuauggagaua

SEQ ID NO: 181286 - RNA, 19 nt, Homo sapiens
  misc_RNA (1)...(19): siRNA sense strand
ccagcaauuuguccgucaa

SEQ ID NO: 181287 - RNA, 19 nt, Homo sapiens
  misc_RNA (1)...(19): siRNA sense strand
ccgaauaugaguaccuaga

SEQ ID NO: 181288 - RNA, 19 nt, Homo sapiens
  misc_RNA (1)...(19): siRNA sense strand
gcugcaaggcguucuacug

SEQ ID NO: 181289 - RNA, 19 nt, Homo sapiens
  misc_RNA (1)...(19): siRNA sense strand
cugcaucucaucccuguug

SEQ ID NO: 181290 - RNA, 19 nt, Homo sapiens
  misc_RNA (1)...(19): siRNA sense strand
cggaagcacagaccacuca

SEQ ID NO: 181291 - RNA, 19 nt, Homo sapiens
  misc_RNA (1)...(19): siRNA sense strand
ccacggauucagcagcuau

SEQ ID NO: 181292 - RNA, 19 nt, Homo sapiens
  misc_RNA (1)...(19): siRNA sense strand
ggaaccuacuaccaaaaga

SEQ ID NO: 181293 - RNA, 19 nt, Homo sapiens
  misc_RNA (1)...(19): siRNA sense strand
ggaagagcaugugguauga

SEQ ID NO: 181294 - RNA, 19 nt, Homo sapiens
  misc_RNA (1)...(19): siRNA sense strand
ggaaaguucuggaaaagua

SEQ ID NO: 181295 - RNA, 19 nt, Homo sapiens
  misc_RNA (1)...(19): siRNA sense strand
gaacagagccaucuuugag

SEQ ID NO: 181296 - RNA, 19 nt, Homo sapiens
  misc_RNA (1)...(19): siRNA sense strand
gaugcaaucucccuccuuu

SEQ ID NO: 181297 - RNA, 19 nt, Homo sapiens
  misc_RNA (1)...(19): siRNA sense strand
gugaagagguggccaucua

SEQ ID NO: 181298 - RNA, 19 nt, Homo sapiens
  misc_RNA (1)...(19): siRNA sense strand
caacucugguaucuucaua

SEQ ID NO: 181299 - RNA, 19 nt, Homo sapiens
  misc_RNA (1)...(19): siRNA sense strand
gcccaucucuuugcuauga

SEQ ID NO: 181300 - RNA, 19 nt, Homo sapiens
  misc_RNA (1)...(19): siRNA sense strand
ggaaauggugggauucuga

SEQ ID NO: 181301 - RNA, 19 nt, Homo sapiens
  misc_RNA (1)...(19): siRNA sense strand
caucuuugaggguuuauua

SEQ ID NO: 181302 - RNA, 19 nt, Homo sapiens
  misc_RNA (1)...(19): siRNA sense strand
gggaagagcaugugguaug

SEQ ID NO: 181303 - RNA, 19 nt, Homo sapiens
  misc_RNA (1)...(19): siRNA sense strand
gcuaaucccagcauaauuc

SEQ ID NO: 181304 - RNA, 19 nt, Homo sapiens
  misc_RNA (1)...(19): siRNA sense strand
ggugggaaauggugggauu

SEQ ID NO: 181305 - RNA, 19 nt, Homo sapiens
  misc_RNA (1)...(19): siRNA sense strand
ggccagagcguucaggaaa

SEQ ID NO: 181306 - RNA, 19 nt, Homo sapiens
  misc_RNA (1)...(19): siRNA sense strand
ggaacagagccaucuuuga

SEQ ID NO: 181307 - RNA, 19 nt, Homo sapiens
  misc_RNA (1)...(19): siRNA sense strand
gaaauggugggauucugaa

SEQ ID NO: 181308 - RNA, 19 nt, Homo sapiens
  misc_RNA (1)...(19): siRNA sense strand
ugacaacgucuuacccuuu

SEQ ID NO: 181309 - RNA, 19 nt, Homo sapiens
  misc_RNA (1)...(19): siRNA sense strand
uaaaaucggugcacugaga

SEQ ID NO: 181310 - RNA, 19 nt, Homo sapiens
  misc_RNA (1)...(19): siRNA sense strand
caaucucccuccuuuguca

SEQ ID NO: 181311 - RNA, 19 nt, Homo sapiens
  misc_RNA (1)...(19): siRNA sense strand
cagcugccauugaagaaau

SEQ ID NO: 181312 - RNA, 19 nt, Homo sapiens
  misc_RNA (1)...(19): siRNA sense strand
gugaauacacuaaggaugu

SEQ ID NO: 181313 - RNA, 19 nt, Homo sapiens
  misc_RNA (1)...(19): siRNA sense strand
ugaauacacuaaggauguu

SEQ ID NO: 181314 - RNA, 19 nt, Homo sapiens
  misc_RNA (1)...(19): siRNA sense strand
cuacuaugacaacgucuua

SEQ ID NO: 181315 - RNA, 19 nt, Homo sapiens
  misc_RNA (1)...(19): siRNA sense strand
gaagagguggccaucuaug

SEQ ID NO: 181316 - RNA, 19 nt, Homo sapiens
  misc_RNA (1)...(19): siRNA sense strand
gacagcuaaucccagcaua

SEQ ID NO: 181317 - RNA, 19 nt, Homo sapiens
  misc_RNA (1)...(19): siRNA sense strand
acucugguaucuucauaaa

SEQ ID NO: 181318 - RNA, 19 nt, Homo sapiens
  misc_RNA (1)...(19): siRNA sense strand
gcccuucucugugaauaug

SEQ ID NO: 181319 - RNA, 19 nt, Homo sapiens
  misc_RNA (1)...(19): siRNA sense strand
gacaacgucuuacccuuuu

SEQ ID NO: 181320 - RNA, 19 nt, Homo sapiens
  misc_RNA (1)...(19): siRNA sense strand
cauuccagcugccauugaa

SEQ ID NO: 181321 - RNA, 19 nt, Homo sapiens
  misc_RNA (1)...(19): siRNA sense strand
caucagccaccacuacuau

SEQ ID NO: 181322 - RNA, 19 nt, Homo sapiens
  misc_RNA (1)...(19): siRNA sense strand
ucuguuggcucuacaucuu

SEQ ID NO: 181323 - RNA, 19 nt, Homo sapiens
  misc_RNA (1)...(19): siRNA sense strand
ccagagcguucaggaaaca

SEQ ID NO: 181324 - RNA, 19 nt, Homo sapiens
  misc_RNA (1)...(19): siRNA sense strand
gagccaucuuugaggguuu

SEQ ID NO: 181325 - RNA, 19 nt, Homo sapiens
  misc_RNA (1)...(19): siRNA sense strand
uaaaaugaauuccccuaug

SEQ ID NO: 181326 - RNA, 19 nt, Homo sapiens
  misc_RNA (1)...(19): siRNA sense strand
uauacucauucaccauuga

SEQ ID NO: 181327 - RNA, 19 nt, Homo sapiens
  misc_RNA (1)...(19): siRNA sense strand
cuccaacucugguaucuuc

SEQ ID NO: 181328 - RNA, 19 nt, Homo sapiens
  misc_RNA (1)...(19): siRNA sense strand
gcauaauucggcaaagguu

SEQ ID NO: 181329 - RNA, 19 nt, Homo sapiens
  misc_RNA (1)...(19): siRNA sense strand
cgaggaauuucuccaacuc

SEQ ID NO: 181330 - RNA, 19 nt, Homo sapiens
  misc_RNA (1)...(19): siRNA sense strand
gcguagcauuggaaaguuc

SEQ ID NO: 181331 - RNA, 19 nt, Homo sapiens
  misc_RNA (1)...(19): siRNA sense strand
cgacccugcccaucucuuu

SEQ ID NO: 181332 - RNA, 19 nt, Homo sapiens
  misc_RNA (1)...(19): siRNA sense strand
cagcuaaucccagcauaau

SEQ ID NO: 181333 - RNA, 19 nt, Homo sapiens
  misc_RNA (1)...(19): siRNA sense strand
cagcauaauucggcaaagg

SEQ ID NO: 181334 - RNA, 19 nt, Homo sapiens
  misc_RNA (1)...(19): siRNA sense strand
gcagcuggacccaugugaa

SEQ ID NO: 181335 - RNA, 19 nt, Homo sapiens
  misc_RNA (1)...(19): siRNA sense strand
auuauacacugucagaugu

SEQ ID NO: 181336 - RNA, 19 nt, Homo sapiens
  misc_RNA (1)...(19): siRNA sense strand
caggaacagagccaucuuu

SEQ ID NO: 181337 - RNA, 19 nt, Homo sapiens
  misc_RNA (1)...(19): siRNA sense strand
ucaggaaacaaauggaaga

SEQ ID NO: 181338 - RNA, 19 nt, Homo sapiens
  misc_RNA (1)...(19): siRNA sense strand
uggcuguggccgucaaaua

SEQ ID NO: 181339 - RNA, 19 nt, Homo sapiens
  misc_RNA (1)...(19): siRNA sense strand
gcauuggaaaguucuggaa

SEQ ID NO: 181340 - RNA, 19 nt, Homo sapiens
  misc_RNA (1)...(19): siRNA sense strand
guucaggaaacaaauggaa

SEQ ID NO: 181341 - RNA, 19 nt, Homo sapiens
  misc_RNA (1)...(19): siRNA sense strand
uauuauacacugucagaug

SEQ ID NO: 181342 - RNA, 19 nt, Homo sapiens
  misc_RNA (1)...(19): siRNA sense strand
cauaauucggcaaagguuu

SEQ ID NO: 181343 - RNA, 19 nt, Homo sapiens
  misc_RNA (1)...(19): siRNA sense strand
ucagccaccacuacuauga

SEQ ID NO: 181344 - RNA, 19 nt, Homo sapiens
  misc_RNA (1)...(19): siRNA sense strand
uauacacugucagauguug

SEQ ID NO: 181345 - RNA, 19 nt, Homo sapiens
  misc_RNA (1)...(19): siRNA sense strand
gggaaauggugggauucug

SEQ ID NO: 181346 - RNA, 19 nt, Homo sapiens
  misc_RNA (1)...(19): siRNA sense strand
gcuguggccgucaaauaga

SEQ ID NO: 181347 - RNA, 19 nt, Homo sapiens
  misc_RNA (1)...(19): siRNA sense strand
ccacaguuacaucuacaug

SEQ ID NO: 181348 - RNA, 19 nt, Homo sapiens
  misc_RNA (1)...(19): siRNA sense strand
aaaaugaauuccccuaugg

SEQ ID NO: 181349 - RNA, 19 nt, Homo sapiens
  misc_RNA (1)...(19): siRNA sense strand
ggacccaugugaagauacc

SEQ ID NO: 181350 - RNA, 19 nt, Homo sapiens
  misc_RNA (1)...(19): siRNA sense strand
ugaagagguggccaucuau

SEQ ID NO: 181351 - RNA, 19 nt, Homo sapiens
  misc_RNA (1)...(19): siRNA sense strand
uggcuguacuggcguggaa

SEQ ID NO: 181352 - RNA, 19 nt, Homo sapiens
  misc_RNA (1)...(19): siRNA sense strand
cugcccaucucuuugcuau

SEQ ID NO: 181353 - RNA, 19 nt, Homo sapiens
  misc_RNA (1)...(19): siRNA sense strand
ucucuuugcuaugacuaaa

SEQ ID NO: 181354 - RNA, 19 nt, Homo sapiens
  misc_RNA (1)...(19): siRNA sense strand
acagcuaaucccagcauaa

SEQ ID NO: 181355 - RNA, 19 nt, Homo sapiens
  misc_RNA (1)...(19): siRNA sense strand
gcaaucucccuccuuuguc

SEQ ID NO: 181356 - RNA, 19 nt, Homo sapiens
  misc_RNA (1)...(19): siRNA sense strand
ggcuguggccgucaaauag

SEQ ID NO: 181357 - RNA, 19 nt, Homo sapiens
  misc_RNA (1)...(19): siRNA sense strand
ugccaugcccgaggaauuu

SEQ ID NO: 181358 - RNA, 19 nt, Homo sapiens
  misc_RNA (1)...(19): siRNA sense strand
cuuugaggguuuauuauac

SEQ ID NO: 181359 - RNA, 19 nt, Homo sapiens
  misc_RNA (1)...(19): siRNA sense strand
uuauacucauucaccauug

SEQ ID NO: 181360 - RNA, 19 nt, Homo sapiens
  misc_RNA (1)...(19): siRNA sense strand
cagcuggacccaugugaag

SEQ ID NO: 181361 - RNA, 19 nt, Homo sapiens
  misc_RNA (1)...(19): siRNA sense strand
acaauucaacuuacucucu

SEQ ID NO: 181362 - RNA, 19 nt, Homo sapiens
  misc_RNA (1)...(19): siRNA sense strand
gcuggacccaugugaagau

SEQ ID NO: 181363 - RNA, 19 nt, Homo sapiens
  misc_RNA (1)...(19): siRNA sense strand
gagcguucaggaaacaaau

SEQ ID NO: 181364 - RNA, 19 nt, Homo sapiens
  misc_RNA (1)...(19): siRNA sense strand
gguuuauuauacacuguca

SEQ ID NO: 181365 - RNA, 19 nt, Homo sapiens
  misc_RNA (1)...(19): siRNA sense strand
cuacaugccugccuuuucu

SEQ ID NO: 181366 - RNA, 19 nt, Homo sapiens
  misc_RNA (1)...(19): siRNA sense strand
gaauacacuaaggauguug

SEQ ID NO: 181367 - RNA, 19 nt, Homo sapiens
  misc_RNA (1)...(19): siRNA sense strand
gaguggcuguggccgucaa

SEQ ID NO: 181368 - RNA, 19 nt, Homo sapiens
  misc_RNA (1)...(19): siRNA sense strand
agccaucuuugaggguuua

SEQ ID NO: 181369 - RNA, 19 nt, Homo sapiens
  misc_RNA (1)...(19): siRNA sense strand
cuggacccaugugaagaua

SEQ ID NO: 181370 - RNA, 19 nt, Homo sapiens
  misc_RNA (1)...(19): siRNA sense strand
gccagagcguucaggaaac

SEQ ID NO: 181371 - RNA, 19 nt, Homo sapiens
  misc_RNA (1)...(19): siRNA sense strand
ccgaggaauuucuccaacu

SEQ ID NO: 181372 - RNA, 19 nt, Homo sapiens
  misc_RNA (1)...(19): siRNA sense strand
gagccagugcccucugugu

SEQ ID NO: 181373 - RNA, 19 nt, Homo sapiens
  misc_RNA (1)...(19): siRNA sense strand
ucagaaagaucaagccaaa

SEQ ID NO: 181374 - RNA, 19 nt, Homo sapiens
  misc_RNA (1)...(19): siRNA sense strand
ugaauuugauccucuguga

SEQ ID NO: 181375 - RNA, 19 nt, Homo sapiens
  misc_RNA (1)...(19): siRNA sense strand
ugagauguauccugcaaga

SEQ ID NO: 181376 - RNA, 19 nt, Homo sapiens
  misc_RNA (1)...(19): siRNA sense strand
gaaagaucaagccaaagaa

SEQ ID NO: 181377 - RNA, 19 nt, Homo sapiens
  misc_RNA (1)...(19): siRNA sense strand
gacuauagaaugagaugua

SEQ ID NO: 181378 - RNA, 19 nt, Homo sapiens
  misc_RNA (1)...(19): siRNA sense strand
ugacaagcauaugaauuug

SEQ ID NO: 181379 - RNA, 19 nt, Homo sapiens
  misc_RNA (1)...(19): siRNA sense strand
gcagcacauugacuauaga

SEQ ID NO: 181380 - RNA, 19 nt, Homo sapiens
  misc_RNA (1)...(19): siRNA sense strand
gcaaccagagcgugaagaa

SEQ ID NO: 181381 - RNA, 19 nt, Homo sapiens
  misc_RNA (1)...(19): siRNA sense strand
agaaagaucaagccaaaga

SEQ ID NO: 181382 - RNA, 19 nt, Homo sapiens
  misc_RNA (1)...(19): siRNA sense strand
ugugaugaguucagaaaga

SEQ ID NO: 181383 - RNA, 19 nt, Homo sapiens
  misc_RNA (1)...(19): siRNA sense strand
gugaugaguucagaaagau

SEQ ID NO: 181384 - RNA, 19 nt, Homo sapiens
  misc_RNA (1)...(19): siRNA sense strand
caaagauacuggcauugcu

SEQ ID NO: 181385 - RNA, 19 nt, Homo sapiens
  misc_RNA (1)...(19): siRNA sense strand
gacaagcauaugaauuuga

SEQ ID NO: 181386 - RNA, 19 nt, Homo sapiens
  misc_RNA (1)...(19): siRNA sense strand
aaucuucauuggcaccuuu

SEQ ID NO: 181387 - RNA, 19 nt, Homo sapiens
  misc_RNA (1)...(19): siRNA sense strand
gggaagaggcacuguagca

SEQ ID NO: 181388 - RNA, 19 nt, Homo sapiens
  misc_RNA (1)...(19): siRNA sense strand
gggagaacuugguauccau

SEQ ID NO: 181389 - RNA, 19 nt, Homo sapiens
  misc_RNA (1)...(19): siRNA sense strand
gaugaguucagaaagauca

SEQ ID NO: 181390 - RNA, 19 nt, Homo sapiens
  misc_RNA (1)...(19): siRNA sense strand
gauccucugugauugugau

SEQ ID NO: 181391 - RNA, 19 nt, Homo sapiens
  misc_RNA (1)...(19): siRNA sense strand
gaacuugguauccaugacu

SEQ ID NO: 181392 - RNA, 19 nt, Homo sapiens
  misc_RNA (1)...(19): siRNA sense strand
aaugagauguauccugcaa

SEQ ID NO: 181393 - RNA, 19 nt, Homo sapiens
  misc_RNA (1)...(19): siRNA sense strand
cccaugggcccaccaauug

SEQ ID NO: 181394 - RNA, 19 nt, Homo sapiens
  misc_RNA (1)...(19): siRNA sense strand
ggaccaucccagcagguaa

SEQ ID NO: 181395 - RNA, 19 nt, Homo sapiens
  misc_RNA (1)...(19): siRNA sense strand
aauuugauccucugugauu

SEQ ID NO: 181396 - RNA, 19 nt, Homo sapiens
  misc_RNA (1)...(19): siRNA sense strand
gccaaagaaugcgaagcaa

SEQ ID NO: 181397 - RNA, 19 nt, Homo sapiens
  misc_RNA (1)...(19): siRNA sense strand
aggaaugcguccaccaaga

SEQ ID NO: 181398 - RNA, 19 nt, Homo sapiens
  misc_RNA (1)...(19): siRNA sense strand
gauggccgaaucuucauug

SEQ ID NO: 181399 - RNA, 19 nt, Homo sapiens
  misc_RNA (1)...(19): siRNA sense strand
gagaacuugguauccauga

SEQ ID NO: 181400 - RNA, 19 nt, Homo sapiens
  misc_RNA (1)...(19): siRNA sense strand
gaagcaaccagagcgugaa

SEQ ID NO: 181401 - RNA, 19 nt, Homo sapiens
  misc_RNA (1)...(19): siRNA sense strand
agauguauccugcaagaug

SEQ ID NO: 181402 - RNA, 19 nt, Homo sapiens
  misc_RNA (1)...(19): siRNA sense strand
aaagaucaagccaaagaau

SEQ ID NO: 181403 - RNA, 19 nt, Homo sapiens
  misc_RNA (1)...(19): siRNA sense strand
ggaaugcguccaccaagac

SEQ ID NO: 181404 - RNA, 19 nt, Homo sapiens
  misc_RNA (1)...(19): siRNA sense strand
uggcaagaguagcaagaug

SEQ ID NO: 181405 - RNA, 19 nt, Homo sapiens
  misc_RNA (1)...(19): siRNA sense strand
caaccagagcgugaagaaa

SEQ ID NO: 181406 - RNA, 19 nt, Homo sapiens
  misc_RNA (1)...(19): siRNA sense strand
gcucgagggacgccaauag

SEQ ID NO: 181407 - RNA, 19 nt, Homo sapiens
  misc_RNA (1)...(19): siRNA sense strand
gaccaucccagcagguaau

SEQ ID NO: 181408 - RNA, 19 nt, Homo sapiens
  misc_RNA (1)...(19): siRNA sense strand
ugcagcacauugacuauag

SEQ ID NO: 181409 - RNA, 19 nt, Homo sapiens
  misc_RNA (1)...(19): siRNA sense strand
ccaggaaugcguccaccaa

SEQ ID NO: 181410 - RNA, 19 nt, Homo sapiens
  misc_RNA (1)...(19): siRNA sense strand
ccugcaagauggccgaauc

SEQ ID NO: 181411 - RNA, 19 nt, Homo sapiens
  misc_RNA (1)...(19): siRNA sense strand
ggcagcugguagaggagua

SEQ ID NO: 181412 - RNA, 19 nt, Homo sapiens
  misc_RNA (1)...(19): siRNA sense strand
ccaaagauacuggcauugc

SEQ ID NO: 181413 - RNA, 19 nt, Homo sapiens
  misc_RNA (1)...(19): siRNA sense strand
gaauuugauccucugugau

SEQ ID NO: 181414 - RNA, 19 nt, Homo sapiens
  misc_RNA (1)...(19): siRNA sense strand
ugauugugaugaguucaga

SEQ ID NO: 181415 - RNA, 19 nt, Homo sapiens
  misc_RNA (1)...(19): siRNA sense strand
cagggaagaggcacuguag

SEQ ID NO: 181416 - RNA, 19 nt, Homo sapiens
  misc_RNA (1)...(19): siRNA sense strand
gaaucuucauuggcaccuu

SEQ ID NO: 181417 - RNA, 19 nt, Homo sapiens
  misc_RNA (1)...(19): siRNA sense strand
cagcacauugacuauagaa

SEQ ID NO: 181418 - RNA, 19 nt, Homo sapiens
  misc_RNA (1)...(19): siRNA sense strand
aagaucaagccaaagaaug

SEQ ID NO: 181419 - RNA, 19 nt, Homo sapiens
  misc_RNA (1)...(19): siRNA sense strand
ucagaaagaucaagccaaa

SEQ ID NO: 181420 - RNA, 19 nt, Homo sapiens
  misc_RNA (1)...(19): siRNA sense strand
ugaauuugauccucuguga

SEQ ID NO: 181421 - RNA, 19 nt, Homo sapiens
  misc_RNA (1)...(19): siRNA sense strand
ugagauguauccugcaaga

SEQ ID NO: 181422 - RNA, 19 nt, Homo sapiens
  misc_RNA (1)...(19): siRNA sense strand
gaaagaucaagccaaagaa

SEQ ID NO: 181423 - RNA, 19 nt, Homo sapiens
  misc_RNA (1)...(19): siRNA sense strand
gacuauagaaugagaugua

SEQ ID NO: 181424 - RNA, 19 nt, Homo sapiens
  misc_RNA (1)...(19): siRNA sense strand
ugacaagcauaugaauuug

SEQ ID NO: 181425 - RNA, 19 nt, Homo sapiens
  misc_RNA (1)...(19): siRNA sense strand
gcagcacauugacuauaga

SEQ ID NO: 181426 - RNA, 19 nt, Homo sapiens
  misc_RNA (1)...(19): siRNA sense strand
gcaaccagagcgugaagaa

SEQ ID NO: 181427 - RNA, 19 nt, Homo sapiens
  misc_RNA (1)...(19): siRNA sense strand
agaaagaucaagccaaaga

SEQ ID NO: 181428 - RNA, 19 nt, Homo sapiens
  misc_RNA (1)...(19): siRNA sense strand
ugugaugaguucagaaaga

SEQ ID NO: 181429 - RNA, 19 nt, Homo sapiens
  misc_RNA (1)...(19): siRNA sense strand
gugaugaguucagaaagau

SEQ ID NO: 181430 - RNA, 19 nt, Homo sapiens
  misc_RNA (1)...(19): siRNA sense strand
caaagauacuggcauugcu

SEQ ID NO: 181431 - RNA, 19 nt, Homo sapiens
  misc_RNA (1)...(19): siRNA sense strand
gacaagcauaugaauuuga

SEQ ID NO: 181432 - RNA, 19 nt, Homo sapiens
  misc_RNA (1)...(19): siRNA sense strand
aaucuucauuggcaccuuu

SEQ ID NO: 181433 - RNA, 19 nt, Homo sapiens
  misc_RNA (1)...(19): siRNA sense strand
gggaagaggcacuguagca

SEQ ID NO: 181434 - RNA, 19 nt, Homo sapiens
  misc_RNA (1)...(19): siRNA sense strand
gggagaacuugguauccau

SEQ ID NO: 181435 - RNA, 19 nt, Homo sapiens
  misc_RNA (1)...(19): siRNA sense strand
gaugaguucagaaagauca

SEQ ID NO: 181436 - RNA, 19 nt, Homo sapiens
  misc_RNA (1)...(19): siRNA sense strand
gauccucugugauugugau

SEQ ID NO: 181437 - RNA, 19 nt, Homo sapiens
  misc_RNA (1)...(19): siRNA sense strand
gaacuugguauccaugacu

SEQ ID NO: 181438 - RNA, 19 nt, Homo sapiens
  misc_RNA (1)...(19): siRNA sense strand
aaugagauguauccugcaa

SEQ ID NO: 181439 - RNA, 19 nt, Homo sapiens
  misc_RNA (1)...(19): siRNA sense strand
cccaugggcccaccaauug

SEQ ID NO: 181440 - RNA, 19 nt, Homo sapiens
  misc_RNA (1)...(19): siRNA sense strand
ggaccaucccagcagguaa

SEQ ID NO: 181441 - RNA, 19 nt, Homo sapiens
  misc_RNA (1)...(19): siRNA sense strand
aauuugauccucugugauu

SEQ ID NO: 181442 - RNA, 19 nt, Homo sapiens
  misc_RNA (1)...(19): siRNA sense strand
gccaaagaaugcgaagcaa

SEQ ID NO: 181443 - RNA, 19 nt, Homo sapiens
  misc_RNA (1)...(19): siRNA sense strand
aggaaugcguccaccaaga

SEQ ID NO: 181444 - RNA, 19 nt, Homo sapiens
  misc_RNA (1)...(19): siRNA sense strand
gauggccgaaucuucauug

SEQ ID NO: 181445 - RNA, 19 nt, Homo sapiens
  misc_RNA (1)...(19): siRNA sense strand
gagaacuugguauccauga

SEQ ID NO: 181446 - RNA, 19 nt, Homo sapiens
  misc_RNA (1)...(19): siRNA sense strand
gaagcaaccagagcgugaa

SEQ ID NO: 181447 - RNA, 19 nt, Homo sapiens
  misc_RNA (1)...(19): siRNA sense strand
agauguauccugcaagaug

SEQ ID NO: 181448 - RNA, 19 nt, Homo sapiens
  misc_RNA (1)...(19): siRNA sense strand
aaagaucaagccaaagaau

SEQ ID NO: 181449 - RNA, 19 nt, Homo sapiens
  misc_RNA (1)...(19): siRNA sense strand
ggaaugcguccaccaagac

SEQ ID NO: 181450 - RNA, 19 nt, Homo sapiens
  misc_RNA (1)...(19): siRNA sense strand
uggcaagaguagcaagaug

SEQ ID NO: 181451 - RNA, 19 nt, Homo sapiens
  misc_RNA (1)...(19): siRNA sense strand
caaccagagcgugaagaaa

SEQ ID NO: 181452 - RNA, 19 nt, Homo sapiens
  misc_RNA (1)...(19): siRNA sense strand
gcucgagggacgccaauag

SEQ ID NO: 181453 - RNA, 19 nt, Homo sapiens
  misc_RNA (1)...(19): siRNA sense strand
gaccaucccagcagguaau

SEQ ID NO: 181454 - RNA, 19 nt, Homo sapiens
  misc_RNA (1)...(19): siRNA sense strand
ugcagcacauugacuauag

SEQ ID NO: 181455 - RNA, 19 nt, Homo sapiens
  misc_RNA (1)...(19): siRNA sense strand
ccaggaaugcguccaccaa

SEQ ID NO: 181456 - RNA, 19 nt, Homo sapiens
  misc_RNA (1)...(19): siRNA sense strand
ccugcaagauggccgaauc

SEQ ID NO: 181457 - RNA, 19 nt, Homo sapiens
  misc_RNA (1)...(19): siRNA sense strand
ggcagcugguagaggagua

SEQ ID NO: 181458 - RNA, 19 nt, Homo sapiens
  misc_RNA (1)...(19): siRNA sense strand
ccaaagauacuggcauugc

SEQ ID NO: 181459 - RNA, 19 nt, Homo sapiens
  misc_RNA (1)...(19): siRNA sense strand
gaauuugauccucugugau

SEQ ID NO: 181460 - RNA, 19 nt, Homo sapiens
  misc_RNA (1)...(19): siRNA sense strand
ugauugugaugaguucaga

SEQ ID NO: 181461 - RNA, 19 nt, Homo sapiens
  misc_RNA (1)...(19): siRNA sense strand
cagggaagaggcacuguag

SEQ ID NO: 181462 - RNA, 19 nt, Homo sapiens
  misc_RNA (1)...(19): siRNA sense strand
gaaucuucauuggcaccuu

SEQ ID NO: 181463 - RNA, 19 nt, Homo sapiens
  misc_RNA (1)...(19): siRNA sense strand
cagcacauugacuauagaa

SEQ ID NO: 181464 - RNA, 19 nt, Homo sapiens
  misc_RNA (1)...(19): siRNA sense strand
aagaucaagccaaagaaug

SEQ ID NO: 181465 - RNA, 19 nt, Homo sapiens
  misc_RNA (1)...(19): siRNA sense strand
ucagaaagaucaagccaaa

SEQ ID NO: 181466 - RNA, 19 nt, Homo sapiens
  misc_RNA (1)...(19): siRNA sense strand
ugaauuugauccucuguga

SEQ ID NO: 181467 - RNA, 19 nt, Homo sapiens
  misc_RNA (1)...(19): siRNA sense strand
ugagauguauccugcaaga

SEQ ID NO: 181468 - RNA, 19 nt, Homo sapiens
  misc_RNA (1)...(19): siRNA sense strand
gaaagaucaagccaaagaa

SEQ ID NO: 181469 - RNA, 19 nt, Homo sapiens
  misc_RNA (1)...(19): siRNA sense strand
gacuauagaaugagaugua

SEQ ID NO: 181470 - RNA, 19 nt, Homo sapiens
  misc_RNA (1)...(19): siRNA sense strand
ugacaagcauaugaauuug

SEQ ID NO: 181471 - RNA, 19 nt, Homo sapiens
  misc_RNA (1)...(19): siRNA sense strand
gcagcacauugacuauaga

SEQ ID NO: 181472 - RNA, 19 nt, Homo sapiens
  misc_RNA (1)...(19): siRNA sense strand
gcaaccagagcgugaagaa

SEQ ID NO: 181473 - RNA, 19 nt, Homo sapiens
  misc_RNA (1)...(19): siRNA sense strand
agaaagaucaagccaaaga

SEQ ID NO: 181474 - RNA, 19 nt, Homo sapiens
  misc_RNA (1)...(19): siRNA sense strand
ugugaugaguucagaaaga

SEQ ID NO: 181475 - RNA, 19 nt, Homo sapiens
  misc_RNA (1)...(19): siRNA sense strand
gugaugaguucagaaagau

SEQ ID NO: 181476 - RNA, 19 nt, Homo sapiens
  misc_RNA (1)...(19): siRNA sense strand
caaagauacuggcauugcu

SEQ ID NO: 181477 - RNA, 19 nt, Homo sapiens
  misc_RNA (1)...(19): siRNA sense strand
gacaagcauaugaauuuga

SEQ ID NO: 181478 - RNA, 19 nt, Homo sapiens
  misc_RNA (1)...(19): siRNA sense strand
aaucuucauuggcaccuuu

SEQ ID NO: 181479 - RNA, 19 nt, Homo sapiens
  misc_RNA (1)...(19): siRNA sense strand
gggaagaggcacuguagca

SEQ ID NO: 181480 - RNA, 19 nt, Homo sapiens
  misc_RNA (1)...(19): siRNA sense strand
gggagaacuugguauccau

SEQ ID NO: 181481 - RNA, 19 nt, Homo sapiens
  misc_RNA (1)...(19): siRNA sense strand
gaugaguucagaaagauca

SEQ ID NO: 181482 - RNA, 19 nt, Homo sapiens
  misc_RNA (1)...(19): siRNA sense strand
gauccucugugauugugau

SEQ ID NO: 181483 - RNA, 19 nt, Homo sapiens
  misc_RNA (1)...(19): siRNA sense strand
gaacuugguauccaugacu

SEQ ID NO: 181484 - RNA, 19 nt, Homo sapiens
  misc_RNA (1)...(19): siRNA sense strand
aaugagauguauccugcaa

SEQ ID NO: 181485 - RNA, 19 nt, Homo sapiens
  misc_RNA (1)...(19): siRNA sense strand
cccaugggcccaccaauug

SEQ ID NO: 181486 - RNA, 19 nt, Homo sapiens
  misc_RNA (1)...(19): siRNA sense strand
ggaccaucccagcagguaa

SEQ ID NO: 181487 - RNA, 19 nt, Homo sapiens
  misc_RNA (1)...(19): siRNA sense strand
aauuugauccucugugauu

SEQ ID NO: 181488 - RNA, 19 nt, Homo sapiens
  misc_RNA (1)...(19): siRNA sense strand
gccaaagaaugcgaagcaa

SEQ ID NO: 181489 - RNA, 19 nt, Homo sapiens
  misc_RNA (1)...(19): siRNA sense strand
aggaaugcguccaccaaga

SEQ ID NO: 181490 - RNA, 19 nt, Homo sapiens
  misc_RNA (1)...(19): siRNA sense strand
gauggccgaaucuucauug

SEQ ID NO: 181491 - RNA, 19 nt, Homo sapiens
  misc_RNA (1)...(19): siRNA sense strand
gagaacuugguauccauga

SEQ ID NO: 181492 - RNA, 19 nt, Homo sapiens
  misc_RNA (1)...(19): siRNA sense strand
gaagcaaccagagcgugaa

SEQ ID NO: 181493 - RNA, 19 nt, Homo sapiens
  misc_RNA (1)...(19): siRNA sense strand
agauguauccugcaagaug

SEQ ID NO: 181494 - RNA, 19 nt, Homo sapiens
  misc_RNA (1)...(19): siRNA sense strand
aaagaucaagccaaagaau

SEQ ID NO: 181495 - RNA, 19 nt, Homo sapiens
  misc_RNA (1)...(19): siRNA sense strand
ggaaugcguccaccaagac

SEQ ID NO: 181496 - RNA, 19 nt, Homo sapiens
  misc_RNA (1)...(19): siRNA sense strand
uggcaagaguagcaagaug

SEQ ID NO: 181497 - RNA, 19 nt, Homo sapiens
  misc_RNA (1)...(19): siRNA sense strand
caaccagagcgugaagaaa

SEQ ID NO: 181498 - RNA, 19 nt, Homo sapiens
  misc_RNA (1)...(19): siRNA sense strand
gcucgagggacgccaauag

SEQ ID NO: 181499 - RNA, 19 nt, Homo sapiens
  misc_RNA (1)...(19): siRNA sense strand
gaccaucccagcagguaau

SEQ ID NO: 181500 - RNA, 19 nt, Homo sapiens
  misc_RNA (1)...(19): siRNA sense strand
ugcagcacauugacuauag

SEQ ID NO: 181501 - RNA, 19 nt, Homo sapiens
  misc_RNA (1)...(19): siRNA sense strand
ccaggaaugcguccaccaa

SEQ ID NO: 181502 - RNA, 19 nt, Homo sapiens
  misc_RNA (1)...(19): siRNA sense strand
ccugcaagauggccgaauc

SEQ ID NO: 181503 - RNA, 19 nt, Homo sapiens
  misc_RNA (1)...(19): siRNA sense strand
ggcagcugguagaggagua

SEQ ID NO: 181504 - RNA, 19 nt, Homo sapiens
  misc_RNA (1)...(19): siRNA sense strand
ccaaagauacuggcauugc

SEQ ID NO: 181505 - RNA, 19 nt, Homo sapiens
  misc_RNA (1)...(19): siRNA sense strand
gaauuugauccucugugau

SEQ ID NO: 181506 - RNA, 19 nt, Homo sapiens
  misc_RNA (1)...(19): siRNA sense strand
ugauugugaugaguucaga

SEQ ID NO: 181507 - RNA, 19 nt, Homo sapiens
  misc_RNA (1)...(19): siRNA sense strand
cagggaagaggcacuguag

SEQ ID NO: 181508 - RNA, 19 nt, Homo sapiens
  misc_RNA (1)...(19): siRNA sense strand
gaaucuucauuggcaccuu

SEQ ID NO: 181509 - RNA, 19 nt, Homo sapiens
  misc_RNA (1)...(19): siRNA sense strand
cagcacauugacuauagaa

SEQ ID NO: 181510 - RNA, 19 nt, Homo sapiens
  misc_RNA (1)...(19): siRNA sense strand
aagaucaagccaaagaaug

SEQ ID NO: 181511 - RNA, 19 nt, Homo sapiens
  misc_RNA (1)...(19): siRNA sense strand
ucagaaagaucaagccaaa

SEQ ID NO: 181512 - RNA, 19 nt, Homo sapiens
  misc_RNA (1)...(19): siRNA sense strand
ugaauuugauccucuguga

SEQ ID NO: 181513 - RNA, 19 nt, Homo sapiens
  misc_RNA (1)...(19): siRNA sense strand
ugagauguauccugcaaga

SEQ ID NO: 181514 - RNA, 19 nt, Homo sapiens
  misc_RNA (1)...(19): siRNA sense strand
gaaagaucaagccaaagaa

SEQ ID NO: 181515 - RNA, 19 nt, Homo sapiens
  misc_RNA (1)...(19): siRNA sense strand
gacuauagaaugagaugua

SEQ ID NO: 181516 - RNA, 19 nt, Homo sapiens
  misc_RNA (1)...(19): siRNA sense strand
ugacaagcauaugaauuug

SEQ ID NO: 181517 - RNA, 19 nt, Homo sapiens
  misc_RNA (1)...(19): siRNA sense strand
gcagcacauugacuauaga

SEQ ID NO: 181518 - RNA, 19 nt, Homo sapiens
  misc_RNA (1)...(19): siRNA sense strand
gcaaccagagcgugaagaa

SEQ ID NO: 181519 - RNA, 19 nt, Homo sapiens
  misc_RNA (1)...(19): siRNA sense strand
agaaagaucaagccaaaga

SEQ ID NO: 181520 - RNA, 19 nt, Homo sapiens
  misc_RNA (1)...(19): siRNA sense strand
ugugaugaguucagaaaga

SEQ ID NO: 181521 - RNA, 19 nt, Homo sapiens
  misc_RNA (1)...(19): siRNA sense strand
gugaugaguucagaaagau

SEQ ID NO: 181522 - RNA, 19 nt, Homo sapiens
  misc_RNA (1)...(19): siRNA sense strand
caaagauacuggcauugcu

SEQ ID NO: 181523 - RNA, 19 nt, Homo sapiens
  misc_RNA (1)...(19): siRNA sense strand
gacaagcauaugaauuuga

SEQ ID NO: 181524 - RNA, 19 nt, Homo sapiens
  misc_RNA (1)...(19): siRNA sense strand
aaucuucauuggcaccuuu

SEQ ID NO: 181525 - RNA, 19 nt, Homo sapiens
  misc_RNA (1)...(19): siRNA sense strand
gggaagaggcacuguagca

SEQ ID NO: 181526 - RNA, 19 nt, Homo sapiens
  misc_RNA (1)...(19): siRNA sense strand
gggagaacuugguauccau

SEQ ID NO: 181527 - RNA, 19 nt, Homo sapiens
  misc_RNA (1)...(19): siRNA sense strand
gaugaguucagaaagauca

SEQ ID NO: 181528 - RNA, 19 nt, Homo sapiens
  misc_RNA (1)...(19): siRNA sense strand
gauccucugugauugugau

SEQ ID NO: 181529 - RNA, 19 nt, Homo sapiens
  misc_RNA (1)...(19): siRNA sense strand
gaacuugguauccaugacu

SEQ ID NO: 181530 - RNA, 19 nt, Homo sapiens
  misc_RNA (1)...(19): siRNA sense strand
aaugagauguauccugcaa

SEQ ID NO: 181531 - RNA, 19 nt, Homo sapiens
  misc_RNA (1)...(19): siRNA sense strand
cccaugggcccaccaauug

SEQ ID NO: 181532 - RNA, 19 nt, Homo sapiens
  misc_RNA (1)...(19): siRNA sense strand
ggaccaucccagcagguaa

SEQ ID NO: 181533 - RNA, 19 nt, Homo sapiens
  misc_RNA (1)...(19): siRNA sense strand
aauuugauccucugugauu

SEQ ID NO: 181534 - RNA, 19 nt, Homo sapiens
  misc_RNA (1)...(19): siRNA sense strand
gccaaagaaugcgaagcaa

SEQ ID NO: 181535 - RNA, 19 nt, Homo sapiens
  misc_RNA (1)...(19): siRNA sense strand
aggaaugcguccaccaaga

SEQ ID NO: 181536 - RNA, 19 nt, Homo sapiens
  misc_RNA (1)...(19): siRNA sense strand
gauggccgaaucuucauug

SEQ ID NO: 181537 - RNA, 19 nt, Homo sapiens
  misc_RNA (1)...(19): siRNA sense strand
gagaacuugguauccauga

SEQ ID NO: 181538 - RNA, 19 nt, Homo sapiens
  misc_RNA (1)...(19): siRNA sense strand
gaagcaaccagagcgugaa

SEQ ID NO: 181539 - RNA, 19 nt, Homo sapiens
  misc_RNA (1)...(19): siRNA sense strand
agauguauccugcaagaug

SEQ ID NO: 181540 - RNA, 19 nt, Homo sapiens
  misc_RNA (1)...(19): siRNA sense strand
aaagaucaagccaaagaau

SEQ ID NO: 181541 - RNA, 19 nt, Homo sapiens
  misc_RNA (1)...(19): siRNA sense strand
ggaaugcguccaccaagac

SEQ ID NO: 181542 - RNA, 19 nt, Homo sapiens
  misc_RNA (1)...(19): siRNA sense strand
uggcaagaguagcaagaug

SEQ ID NO: 181543 - RNA, 19 nt, Homo sapiens
  misc_RNA (1)...(19): siRNA sense strand
caaccagagcgugaagaaa

SEQ ID NO: 181544 - RNA, 19 nt, Homo sapiens
  misc_RNA (1)...(19): siRNA sense strand
gcucgagggacgccaauag

SEQ ID NO: 181545 - RNA, 19 nt, Homo sapiens
  misc_RNA (1)...(19): siRNA sense strand
gaccaucccagcagguaau

SEQ ID NO: 181546 - RNA, 19 nt, Homo sapiens
  misc_RNA (1)...(19): siRNA sense strand
ugcagcacauugacuauag

SEQ ID NO: 181547 - RNA, 19 nt, Homo sapiens
  misc_RNA (1)...(19): siRNA sense strand
ccaggaaugcguccaccaa

SEQ ID NO: 181548 - RNA, 19 nt, Homo sapiens
  misc_RNA (1)...(19): siRNA sense strand
ccugcaagauggccgaauc

SEQ ID NO: 181549 - RNA, 19 nt, Homo sapiens
  misc_RNA (1)...(19): siRNA sense strand
ggcagcugguagaggagua

SEQ ID NO: 181550 - RNA, 19 nt, Homo sapiens
  misc_RNA (1)...(19): siRNA sense strand
ccaaagauacuggcauugc

SEQ ID NO: 181551 - RNA, 19 nt, Homo sapiens
  misc_RNA (1)...(19): siRNA sense strand
gaauuugauccucugugau

SEQ ID NO: 181552 - RNA, 19 nt, Homo sapiens
  misc_RNA (1)...(19): siRNA sense strand
ugauugugaugaguucaga

SEQ ID NO: 181553 - RNA, 19 nt, Homo sapiens
  misc_RNA (1)...(19): siRNA sense strand
cagggaagaggcacuguag

SEQ ID NO: 181554 - RNA, 19 nt, Homo sapiens
  misc_RNA (1)...(19): siRNA sense strand
gaaucuucauuggcaccuu

SEQ ID NO: 181555 - RNA, 19 nt, Homo sapiens
  misc_RNA (1)...(19): siRNA sense strand
cagcacauugacuauagaa

SEQ ID NO: 181556 - RNA, 19 nt, Homo sapiens
  misc_RNA (1)...(19): siRNA sense strand
aagaucaagccaaagaaug

SEQ ID NO: 181557 - RNA, 19 nt, Homo sapiens
  misc_RNA (1)...(19): siRNA sense strand
ucagaaagaucaagccaaa

SEQ ID NO: 181558 - RNA, 19 nt, Homo sapiens
  misc_RNA (1)...(19): siRNA sense strand
ugaauuugauccucuguga

SEQ ID NO: 181559 - RNA, 19 nt, Homo sapiens
  misc_RNA (1)...(19): siRNA sense strand
ugagauguauccugcaaga

SEQ ID NO: 181560 - RNA, 19 nt, Homo sapiens
  misc_RNA (1)...(19): siRNA sense strand
gaaagaucaagccaaagaa

SEQ ID NO: 181561 - RNA, 19 nt, Homo sapiens
  misc_RNA (1)...(19): siRNA sense strand
gacuauagaaugagaugua

SEQ ID NO: 181562 - RNA, 19 nt, Homo sapiens
  misc_RNA (1)...(19): siRNA sense strand
ugacaagcauaugaauuug

SEQ ID NO: 181563 - RNA, 19 nt, Homo sapiens
  misc_RNA (1)...(19): siRNA sense strand
gcagcacauugacuauaga

SEQ ID NO: 181564 - RNA, 19 nt, Homo sapiens
  misc_RNA (1)...(19): siRNA sense strand
gcaaccagagcgugaagaa

SEQ ID NO: 181565 - RNA, 19 nt, Homo sapiens
  misc_RNA (1)...(19): siRNA sense strand
agaaagaucaagccaaaga

SEQ ID NO: 181566 - RNA, 19 nt, Homo sapiens
  misc_RNA (1)...(19): siRNA sense strand
ugugaugaguucagaaaga

SEQ ID NO: 181567 - RNA, 19 nt, Homo sapiens
  misc_RNA (1)...(19): siRNA sense strand
gugaugaguucagaaagau

SEQ ID NO: 181568 - RNA, 19 nt, Homo sapiens
  misc_RNA (1)...(19): siRNA sense strand
caaagauacuggcauugcu

SEQ ID NO: 181569 - RNA, 19 nt, Homo sapiens
  misc_RNA (1)...(19): siRNA sense strand
gacaagcauaugaauuuga

SEQ ID NO: 181570 - RNA, 19 nt, Homo sapiens
  misc_RNA (1)...(19): siRNA sense strand
aaucuucauuggcaccuuu

SEQ ID NO: 181571 - RNA, 19 nt, Homo sapiens
  misc_RNA (1)...(19): siRNA sense strand
gggaagaggcacuguagca

SEQ ID NO: 181572 - RNA, 19 nt, Homo sapiens
  misc_RNA (1)...(19): siRNA sense strand
gggagaacuugguauccau

SEQ ID NO: 181573 - RNA, 19 nt, Homo sapiens
  misc_RNA (1)...(19): siRNA sense strand
gaugaguucagaaagauca

SEQ ID NO: 181574 - RNA, 19 nt, Homo sapiens
  misc_RNA (1)...(19): siRNA sense strand
gauccucugugauugugau

SEQ ID NO: 181575 - RNA, 19 nt, Homo sapiens
  misc_RNA (1)...(19): siRNA sense strand
gaacuugguauccaugacu

SEQ ID NO: 181576 - RNA, 19 nt, Homo sapiens
  misc_RNA (1)...(19): siRNA sense strand
aaugagauguauccugcaa

SEQ ID NO: 181577 - RNA, 19 nt, Homo sapiens
  misc_RNA (1)...(19): siRNA sense strand
cccaugggcccaccaauug

SEQ ID NO: 181578 - RNA, 19 nt, Homo sapiens
  misc_RNA (1)...(19): siRNA sense strand
ggaccaucccagcagguaa

SEQ ID NO: 181579 - RNA, 19 nt, Homo sapiens
  misc_RNA (1)...(19): siRNA sense strand
aauuugauccucugugauu

SEQ ID NO: 181580 - RNA, 19 nt, Homo sapiens
  misc_RNA (1)...(19): siRNA sense strand
gccaaagaaugcgaagcaa

SEQ ID NO: 181581 - RNA, 19 nt, Homo sapiens
  misc_RNA (1)...(19): siRNA sense strand
aggaaugcguccaccaaga

SEQ ID NO: 181582 - RNA, 19 nt, Homo sapiens
  misc_RNA (1)...(19): siRNA sense strand
gauggccgaaucuucauug

SEQ ID NO: 181583 - RNA, 19 nt, Homo sapiens
  misc_RNA (1)...(19): siRNA sense strand
gagaacuugguauccauga

SEQ ID NO: 181584 - RNA, 19 nt, Homo sapiens
  misc_RNA (1)...(19): siRNA sense strand
gaagcaaccagagcgugaa

SEQ ID NO: 181585 - RNA, 19 nt, Homo sapiens
  misc_RNA (1)...(19): siRNA sense strand
agauguauccugcaagaug

SEQ ID NO: 181586 - RNA, 19 nt, Homo sapiens
  misc_RNA (1)...(19): siRNA sense strand
aaagaucaagccaaagaau

SEQ ID NO: 181587 - RNA, 19 nt, Homo sapiens
  misc_RNA (1)...(19): siRNA sense strand
ggaaugcguccaccaagac

SEQ ID NO: 181588 - RNA, 19 nt, Homo sapiens
  misc_RNA (1)...(19): siRNA sense strand
uggcaagaguagcaagaug

SEQ ID NO: 181589 - RNA, 19 nt, Homo sapiens
  misc_RNA (1)...(19): siRNA sense strand
caaccagagcgugaagaaa

SEQ ID NO: 181590 - RNA, 19 nt, Homo sapiens
  misc_RNA (1)...(19): siRNA sense strand
gcucgagggacgccaauag

SEQ ID NO: 181591 - RNA, 19 nt, Homo sapiens
  misc_RNA (1)...(19): siRNA sense strand
gaccaucccagcagguaau

SEQ ID NO: 181592 - RNA, 19 nt, Homo sapiens
  misc_RNA (1)...(19): siRNA sense strand
ugcagcacauugacuauag

SEQ ID NO: 181593 - RNA, 19 nt, Homo sapiens
  misc_RNA (1)...(19): siRNA sense strand
ccaggaaugcguccaccaa

SEQ ID NO: 181594 - RNA, 19 nt, Homo sapiens
  misc_RNA (1)...(19): siRNA sense strand
ccugcaagauggccgaauc

SEQ ID NO: 181595 - RNA, 19 nt, Homo sapiens
  misc_RNA (1)...(19): siRNA sense strand
ggcagcugguagaggagua

SEQ ID NO: 181596 - RNA, 19 nt, Homo sapiens
  misc_RNA (1)...(19): siRNA sense strand
ccaaagauacuggcauugc

SEQ ID NO: 181597 - RNA, 19 nt, Homo sapiens
  misc_RNA (1)...(19): siRNA sense strand
gaauuugauccucugugau

SEQ ID NO: 181598 - RNA, 19 nt, Homo sapiens
  misc_RNA (1)...(19): siRNA sense strand
ugauugugaugaguucaga

SEQ ID NO: 181599 - RNA, 19 nt, Homo sapiens
  misc_RNA (1)...(19): siRNA sense strand
cagggaagaggcacuguag

SEQ ID NO: 181600 - RNA, 19 nt, Homo sapiens
  misc_RNA (1)...(19): siRNA sense strand
gaaucuucauuggcaccuu

SEQ ID NO: 181601 - RNA, 19 nt, Homo sapiens
  misc_RNA (1)...(19): siRNA sense strand
cagcacauugacuauagaa

SEQ ID NO: 181602 - RNA, 19 nt, Homo sapiens
  misc_RNA (1)...(19): siRNA sense strand
aagaucaagccaaagaaug

SEQ ID NO: 181603 - RNA, 19 nt, Homo sapiens
  misc_RNA (1)...(19): siRNA sense strand
caagaugccuauucucauu

SEQ ID NO: 181604 - RNA, 19 nt, Homo sapiens
  misc_RNA (1)...(19): siRNA sense strand
gacaagggcuucacacugu

SEQ ID NO: 181605 - RNA, 19 nt, Homo sapiens
  misc_RNA (1)...(19): siRNA sense strand
ccaaacacauguccuugaa

SEQ ID NO: 181606 - RNA, 19 nt, Homo sapiens
  misc_RNA (1)...(19): siRNA sense strand
aaacacauguccuugaaga

SEQ ID NO: 181607 - RNA, 19 nt, Homo sapiens
  misc_RNA (1)...(19): siRNA sense strand
gaagacuuguccucugcua

SEQ ID NO: 181608 - RNA, 19 nt, Homo sapiens
  misc_RNA (1)...(19): siRNA sense strand
gaacugcuccucuacuugu

SEQ ID NO: 181609 - RNA, 19 nt, Homo sapiens
  misc_RNA (1)...(19): siRNA sense strand
gcagaugucuucagaugac

SEQ ID NO: 181610 - RNA, 19 nt, Homo sapiens
  misc_RNA (1)...(19): siRNA sense strand
cagauuggcuggcuaacug

SEQ ID NO: 181611 - RNA, 19 nt, Homo sapiens
  misc_RNA (1)...(19): siRNA sense strand
gagaacaagaugccuauuc

SEQ ID NO: 181612 - RNA, 19 nt, Homo sapiens
  misc_RNA (1)...(19): siRNA sense strand
gaaggacgucucaccguau

SEQ ID NO: 181613 - RNA, 19 nt, Homo sapiens
  misc_RNA (1)...(19): siRNA sense strand
ccuugaagauggcauaugu

SEQ ID NO: 181614 - RNA, 19 nt, Homo sapiens
  misc_RNA (1)...(19): siRNA sense strand
cugcagaugucuucagaug

SEQ ID NO: 181615 - RNA, 19 nt, Homo sapiens
  misc_RNA (1)...(19): siRNA sense strand
gaacuucagcgaggccaaa

SEQ ID NO: 181616 - RNA, 19 nt, Homo sapiens
  misc_RNA (1)...(19): siRNA sense strand
ucgagaagcugcagauguc

SEQ ID NO: 181617 - RNA, 19 nt, Homo sapiens
  misc_RNA (1)...(19): siRNA sense strand
gugcagguccucaagaaga

SEQ ID NO: 181618 - RNA, 19 nt, Homo sapiens
  misc_RNA (1)...(19): siRNA sense strand
gccaggacaucaagcagau

SEQ ID NO: 181619 - RNA, 19 nt, Homo sapiens
  misc_RNA (1)...(19): siRNA sense strand
uggcauaugucucgaagag

SEQ ID NO: 181620 - RNA, 19 nt, Homo sapiens
  misc_RNA (1)...(19): siRNA sense strand
ccaagaucuucaagggauu

SEQ ID NO: 181621 - RNA, 19 nt, Homo sapiens
  misc_RNA (1)...(19): siRNA sense strand
ggaacugcuccucuacuug

SEQ ID NO: 181622 - RNA, 19 nt, Homo sapiens
  misc_RNA (1)...(19): siRNA sense strand
ggacgucucaccguauuuc

SEQ ID NO: 181623 - RNA, 19 nt, Homo sapiens
  misc_RNA (1)...(19): siRNA sense strand
gccaaacacauguccuuga

SEQ ID NO: 181624 - RNA, 19 nt, Homo sapiens
  misc_RNA (1)...(19): siRNA sense strand
ugcuggaggucaaguauau

SEQ ID NO: 181625 - RNA, 19 nt, Homo sapiens
  misc_RNA (1)...(19): siRNA sense strand
aaggacgucucaccguauu

SEQ ID NO: 181626 - RNA, 19 nt, Homo sapiens
  misc_RNA (1)...(19): siRNA sense strand
gaacaagaugccuauucuc

SEQ ID NO: 181627 - RNA, 19 nt, Homo sapiens
  misc_RNA (1)...(19): siRNA sense strand
acacauguccuugaagaug

SEQ ID NO: 181628 - RNA, 19 nt, Homo sapiens
  misc_RNA (1)...(19): siRNA sense strand
gggagaacaagaugccuau

SEQ ID NO: 181629 - RNA, 19 nt, Homo sapiens
  misc_RNA (1)...(19): siRNA sense strand
cagcgaggccaaacacaug

SEQ ID NO: 181630 - RNA, 19 nt, Homo sapiens
  misc_RNA (1)...(19): siRNA sense strand
uguggacacucaccuguuc

SEQ ID NO: 181631 - RNA, 19 nt, Homo sapiens
  misc_RNA (1)...(19): siRNA sense strand
cggugcagguccucaagaa

SEQ ID NO: 181632 - RNA, 19 nt, Homo sapiens
  misc_RNA (1)...(19): siRNA sense strand
ggaggucaaguauaugaag

SEQ ID NO: 181633 - RNA, 19 nt, Homo sapiens
  misc_RNA (1)...(19): siRNA sense strand
gcccaggucaauacucuga

SEQ ID NO: 181634 - RNA, 19 nt, Homo sapiens
  misc_RNA (1)...(19): siRNA sense strand
ccuauucucauuuccaaga

SEQ ID NO: 181635 - RNA, 19 nt, Homo sapiens
  misc_RNA (1)...(19): siRNA sense strand
aacaagaugccuauucuca

SEQ ID NO: 181636 - RNA, 19 nt, Homo sapiens
  misc_RNA (1)...(19): siRNA sense strand
gacggugccagucuccuuu

SEQ ID NO: 181637 - RNA, 19 nt, Homo sapiens
  misc_RNA (1)...(19): siRNA sense strand
ucaagaagacaggcaagga

SEQ ID NO: 181638 - RNA, 19 nt, Homo sapiens
  misc_RNA (1)...(19): siRNA sense strand
gagaagcugcagaugucuu

SEQ ID NO: 181639 - RNA, 19 nt, Homo sapiens
  misc_RNA (1)...(19): siRNA sense strand
caggacaucaagcagauug

SEQ ID NO: 181640 - RNA, 19 nt, Homo sapiens
  misc_RNA (1)...(19): siRNA sense strand
cauccaagcccaggucaau

SEQ ID NO: 181641 - RNA, 19 nt, Homo sapiens
  misc_RNA (1)...(19): siRNA sense strand
caccguauuucaagaacuc

SEQ ID NO: 181642 - RNA, 19 nt, Homo sapiens
  misc_RNA (1)...(19): siRNA sense strand
gugcuggaggucaaguaua

SEQ ID NO: 181643 - RNA, 19 nt, Homo sapiens
  misc_RNA (1)...(19): siRNA sense strand
guauaugaaggacgucuca

SEQ ID NO: 181644 - RNA, 19 nt, Homo sapiens
  misc_RNA (1)...(19): siRNA sense strand
ccucugcuacccaugauga

SEQ ID NO: 181645 - RNA, 19 nt, Homo sapiens
  misc_RNA (1)...(19): siRNA sense strand
ggccaaggaugaggcuagu

SEQ ID NO: 181646 - RNA, 19 nt, Homo sapiens
  misc_RNA (1)...(19): siRNA sense strand
aagcagauuggcuggcuaa

SEQ ID NO: 181647 - RNA, 19 nt, Homo sapiens
  misc_RNA (1)...(19): siRNA sense strand
ggagaacaagaugccuauu

SEQ ID NO: 181648 - RNA, 19 nt, Homo sapiens
  misc_RNA (1)...(19): siRNA sense strand
caagaucuucaagggauug

SEQ ID NO: 181649 - RNA, 19 nt, Homo sapiens
  misc_RNA (1)...(19): siRNA sense strand
aaccauagucuucaucauc

SEQ ID NO: 181650 - RNA, 19 nt, Homo sapiens
  misc_RNA (1)...(19): siRNA sense strand
gugggcgacugccauccaa

SEQ ID NO: 181651 - RNA, 19 nt, Homo sapiens
  misc_RNA (1)...(19): siRNA sense strand
aaaccauagucuucaucau

SEQ ID NO: 181652 - RNA, 19 nt, Homo sapiens
  misc_RNA (1)...(19): siRNA sense strand
agaugccuauucucauuuc

SEQ ID NO: 181653 - RNA, 19 nt, Homo sapiens
  misc_RNA (1)...(19): siRNA sense strand
cagccugucugugcacauc

SEQ ID NO: 181654 - RNA, 19 nt, Homo sapiens
  misc_RNA (1)...(19): siRNA sense strand
cccuggcccugcuaacuga

SEQ ID NO: 181655 - RNA, 19 nt, Homo sapiens
  misc_RNA (1)...(19): siRNA sense strand
ggagccaggacaucaagca

SEQ ID NO: 181656 - RNA, 19 nt, Homo sapiens
  misc_RNA (1)...(19): siRNA sense strand
ugccuauucucauuuccaa

SEQ ID NO: 181657 - RNA, 19 nt, Homo sapiens
  misc_RNA (1)...(19): siRNA sense strand
aagcccaggucaauacucu

SEQ ID NO: 181658 - RNA, 19 nt, Homo sapiens
  misc_RNA (1)...(19): siRNA sense strand
ccaagacgcucaugaagaa

SEQ ID NO: 181659 - RNA, 19 nt, Homo sapiens
  misc_RNA (1)...(19): siRNA sense strand
ugaaggagcacccggauua

SEQ ID NO: 181660 - RNA, 19 nt, Homo sapiens
  misc_RNA (1)...(19): siRNA sense strand
gcacccggauuauaaauac

SEQ ID NO: 181661 - RNA, 19 nt, Homo sapiens
  misc_RNA (1)...(19): siRNA sense strand
ucaugaagaaggauaagua

SEQ ID NO: 181662 - RNA, 19 nt, Homo sapiens
  misc_RNA (1)...(19): siRNA sense strand
gcaagauggcccaggagaa

SEQ ID NO: 181663 - RNA, 19 nt, Homo sapiens
  misc_RNA (1)...(19): siRNA sense strand
aaaccaagacgcucaugaa

SEQ ID NO: 181664 - RNA, 19 nt, Homo sapiens
  misc_RNA (1)...(19): siRNA sense strand
ggagcacccggauuauaaa

SEQ ID NO: 181665 - RNA, 19 nt, Homo sapiens
  misc_RNA (1)...(19): siRNA sense strand
gcucgcagaccuacaugaa

SEQ ID NO: 181666 - RNA, 19 nt, Homo sapiens
  misc_RNA (1)...(19): siRNA sense strand
gaaggagcacccggauuau

SEQ ID NO: 181667 - RNA, 19 nt, Homo sapiens
  misc_RNA (1)...(19): siRNA sense strand
aggagcacccggauuauaa

SEQ ID NO: 181668 - RNA, 19 nt, Homo sapiens
  misc_RNA (1)...(19): siRNA sense strand
ugagcgcccugcaguacaa

SEQ ID NO: 181669 - RNA, 19 nt, Homo sapiens
  misc_RNA (1)...(19): siRNA sense strand
ugcgagcgcugcacaugaa

SEQ ID NO: 181670 - RNA, 19 nt, Homo sapiens
  misc_RNA (1)...(19): siRNA sense strand
ccagcagacuucacauguc

SEQ ID NO: 181671 - RNA, 19 nt, Homo sapiens
  misc_RNA (1)...(19): siRNA sense strand
aacggcagcuacagcauga

SEQ ID NO: 181672 - RNA, 19 nt, Homo sapiens
  misc_RNA (1)...(19): siRNA sense strand
ccaccuacagcauguccua

SEQ ID NO: 181673 - RNA, 19 nt, Homo sapiens
  misc_RNA (1)...(19): siRNA sense strand
caagauggcccaggagaac

SEQ ID NO: 181674 - RNA, 19 nt, Homo sapiens
  misc_RNA (1)...(19): siRNA sense strand
gacaguuacgcgcacauga

SEQ ID NO: 181675 - RNA, 19 nt, Homo sapiens
  misc_RNA (1)...(19): siRNA sense strand
ggacaguuacgcgcacaug

SEQ ID NO: 181676 - RNA, 19 nt, Homo sapiens
  misc_RNA (1)...(19): siRNA sense strand
aaggagcacccggauuaua

SEQ ID NO: 181677 - RNA, 19 nt, Homo sapiens
  misc_RNA (1)...(19): siRNA sense strand
gagcacccggauuauaaau

SEQ ID NO: 181678 - RNA, 19 nt, Homo sapiens
  misc_RNA (1)...(19): siRNA sense strand
gagcgcugcacaugaagga

SEQ ID NO: 181679 - RNA, 19 nt, Homo sapiens
  misc_RNA (1)...(19): siRNA sense strand
acaguuacgcgcacaugaa

SEQ ID NO: 181680 - RNA, 19 nt, Homo sapiens
  misc_RNA (1)...(19): siRNA sense strand
accagcgcauggacaguua

SEQ ID NO: 181681 - RNA, 19 nt, Homo sapiens
  misc_RNA (1)...(19): siRNA sense strand
ugauggagacggagcugaa

SEQ ID NO: 181682 - RNA, 19 nt, Homo sapiens
  misc_RNA (1)...(19): siRNA sense strand
ucacaugucccagcacuac

SEQ ID NO: 181683 - RNA, 19 nt, Homo sapiens
  misc_RNA (1)...(19): siRNA sense strand
ugaagaaggauaaguacac

SEQ ID NO: 181684 - RNA, 19 nt, Homo sapiens
  misc_RNA (1)...(19): siRNA sense strand
agacgcucaugaagaagga

SEQ ID NO: 181685 - RNA, 19 nt, Homo sapiens
  misc_RNA (1)...(19): siRNA sense strand
gcuggaagcugcucaaaga

SEQ ID NO: 181686 - RNA, 19 nt, Homo sapiens
  misc_RNA (1)...(19): siRNA sense strand
gcaagcaccuggcggagaa

SEQ ID NO: 181687 - RNA, 19 nt, Homo sapiens
  misc_RNA (1)...(19): siRNA sense strand
caagaucccuuucauucga

SEQ ID NO: 181688 - RNA, 19 nt, Homo sapiens
  misc_RNA (1)...(19): siRNA sense strand
gacaagaucccuuucauuc

SEQ ID NO: 181689 - RNA, 19 nt, Homo sapiens
  misc_RNA (1)...(19): siRNA sense strand
gacccgagcuggugcaaga

SEQ ID NO: 181690 - RNA, 19 nt, Homo sapiens
  misc_RNA (1)...(19): siRNA sense strand
ucaagcacauggcugacua

SEQ ID NO: 181691 - RNA, 19 nt, Homo sapiens
  misc_RNA (1)...(19): siRNA sense strand
cgacaagaucccuuucauu

SEQ ID NO: 181692 - RNA, 19 nt, Homo sapiens
  misc_RNA (1)...(19): siRNA sense strand
gcgacaagaucccuuucau

SEQ ID NO: 181693 - RNA, 19 nt, Homo sapiens
  misc_RNA (1)...(19): siRNA sense strand
ggaccuggauuuuaacuuc

SEQ ID NO: 181694 - RNA, 19 nt, Homo sapiens
  misc_RNA (1)...(19): siRNA sense strand
ucaaagacagcgacaagau

SEQ ID NO: 181695 - RNA, 19 nt, Homo sapiens
  misc_RNA (1)...(19): siRNA sense strand
gaccaccacucgcuguaca

SEQ ID NO: 181696 - RNA, 19 nt, Homo sapiens
  misc_RNA (1)...(19): siRNA sense strand
gcucaaagacagcgacaag

SEQ ID NO: 181697 - RNA, 19 nt, Homo sapiens
  misc_RNA (1)...(19): siRNA sense strand
caaagacagcgacaagauc

SEQ ID NO: 181698 - RNA, 19 nt, Homo sapiens
  misc_RNA (1)...(19): siRNA sense strand
gaagcgcgucuaccuguuc

SEQ ID NO: 181699 - RNA, 19 nt, Homo sapiens
  misc_RNA (1)...(19): siRNA sense strand
gcaugucccugggcagcuu

SEQ ID NO: 181700 - RNA, 19 nt, Homo sapiens
  misc_RNA (1)...(19): siRNA sense strand
gcaaaccgcacgccaagcu

SEQ ID NO: 181701 - RNA, 19 nt, Homo sapiens
  misc_RNA (1)...(19): siRNA sense strand
ccaggaagaaggugaaguc

SEQ ID NO: 181702 - RNA, 19 nt, Homo sapiens
  misc_RNA (1)...(19): siRNA sense strand
ugaagcgcgucuaccuguu

SEQ ID NO: 181703 - RNA, 19 nt, Homo sapiens
  misc_RNA (1)...(19): siRNA sense strand
gaaggugaagcgcgucuac

SEQ ID NO: 181704 - RNA, 19 nt, Homo sapiens
  misc_RNA (1)...(19): siRNA sense strand
aaaccaacaaugccgagaa

SEQ ID NO: 181705 - RNA, 19 nt, Homo sapiens
  misc_RNA (1)...(19): siRNA sense strand
gaaccccagcucaaacuuu

SEQ ID NO: 181706 - RNA, 19 nt, Homo sapiens
  misc_RNA (1)...(19): siRNA sense strand
gugcagcaaaccaacaaug

SEQ ID NO: 181707 - RNA, 19 nt, Homo sapiens
  misc_RNA (1)...(19): siRNA sense strand
cacaucaagcgacccauga

SEQ ID NO: 181708 - RNA, 19 nt, Homo sapiens
  misc_RNA (1)...(19): siRNA sense strand
gcaccuggcggagaagaag

SEQ ID NO: 181709 - RNA, 19 nt, Homo sapiens
  misc_RNA (1)...(19): siRNA sense strand
gaaacaagcuuaauaggaa

SEQ ID NO: 181710 - RNA, 19 nt, Homo sapiens
  misc_RNA (1)...(19): siRNA sense strand
gaaacgagguguucuucuu

SEQ ID NO: 181711 - RNA, 19 nt, Homo sapiens
  misc_RNA (1)...(19): siRNA sense strand
caaagcguguucuguaaua

SEQ ID NO: 181712 - RNA, 19 nt, Homo sapiens
  misc_RNA (1)...(19): siRNA sense strand
gaagaaugcaccacaguuu

SEQ ID NO: 181713 - RNA, 19 nt, Homo sapiens
  misc_RNA (1)...(19): siRNA sense strand
uauugaagguguuguguua

SEQ ID NO: 181714 - RNA, 19 nt, Homo sapiens
  misc_RNA (1)...(19): siRNA sense strand
gaggagaaaugccaaggaa

SEQ ID NO: 181715 - RNA, 19 nt, Homo sapiens
  misc_RNA (1)...(19): siRNA sense strand
ggaagaugauguugugaug

SEQ ID NO: 181716 - RNA, 19 nt, Homo sapiens
  misc_RNA (1)...(19): siRNA sense strand
ggagaaaugccaaggaauu

SEQ ID NO: 181717 - RNA, 19 nt, Homo sapiens
  misc_RNA (1)...(19): siRNA sense strand
ggaguucaguacaaggaua

SEQ ID NO: 181718 - RNA, 19 nt, Homo sapiens
  misc_RNA (1)...(19): siRNA sense strand
uaaagagacuggagauauc

SEQ ID NO: 181719 - RNA, 19 nt, Homo sapiens
  misc_RNA (1)...(19): siRNA sense strand
gagaauacaugguugaaaa

SEQ ID NO: 181720 - RNA, 19 nt, Homo sapiens
  misc_RNA (1)...(19): siRNA sense strand
ccaaggaauuuaagagaau

SEQ ID NO: 181721 - RNA, 19 nt, Homo sapiens
  misc_RNA (1)...(19): siRNA sense strand
ccaauaaaguuucuguauc

SEQ ID NO: 181722 - RNA, 19 nt, Homo sapiens
  misc_RNA (1)...(19): siRNA sense strand
ggacacuucuuugcuguug

SEQ ID NO: 181723 - RNA, 19 nt, Homo sapiens
  misc_RNA (1)...(19): siRNA sense strand
gaaacucgaguacuuguug

SEQ ID NO: 181724 - RNA, 19 nt, Homo sapiens
  misc_RNA (1)...(19): siRNA sense strand
cagaaugacccagaaguua

SEQ ID NO: 181725 - RNA, 19 nt, Homo sapiens
  misc_RNA (1)...(19): siRNA sense strand
guucucaucuaccggauuu

SEQ ID NO: 181726 - RNA, 19 nt, Homo sapiens
  misc_RNA (1)...(19): siRNA sense strand
gcaaaucaugcugaacuua

SEQ ID NO: 181727 - RNA, 19 nt, Homo sapiens
  misc_RNA (1)...(19): siRNA sense strand
guuaucauguucucaaaga

SEQ ID NO: 181728 - RNA, 19 nt, Homo sapiens
  misc_RNA (1)...(19): siRNA sense strand
gccaaggaauuuaagagaa

SEQ ID NO: 181729 - RNA, 19 nt, Homo sapiens
  misc_RNA (1)...(19): siRNA sense strand
gcaccacaguuuaaagcaa

SEQ ID NO: 181730 - RNA, 19 nt, Homo sapiens
  misc_RNA (1)...(19): siRNA sense strand
ggguaucccugaccuuuau

SEQ ID NO: 181731 - RNA, 19 nt, Homo sapiens
  misc_RNA (1)...(19): siRNA sense strand
aaaagagccugacagaaua

SEQ ID NO: 181732 - RNA, 19 nt, Homo sapiens
  misc_RNA (1)...(19): siRNA sense strand
uuuguuggcuuucuuauga

SEQ ID NO: 181733 - RNA, 19 nt, Homo sapiens
  misc_RNA (1)...(19): siRNA sense strand
caucaugagucuccggaaa

SEQ ID NO: 181734 - RNA, 19 nt, Homo sapiens
  misc_RNA (1)...(19): siRNA sense strand
ggaaagcaaaucagagguu

SEQ ID NO: 181735 - RNA, 19 nt, Homo sapiens
  misc_RNA (1)...(19): siRNA sense strand
caaacuugguggcgaaugu

SEQ ID NO: 181736 - RNA, 19 nt, Homo sapiens
  misc_RNA (1)...(19): siRNA sense strand
guacaaggauaaagagacu

SEQ ID NO: 181737 - RNA, 19 nt, Homo sapiens
  misc_RNA (1)...(19): siRNA sense strand
aauaugaggcauccacuua

SEQ ID NO: 181738 - RNA, 19 nt, Homo sapiens
  misc_RNA (1)...(19): siRNA sense strand
ucccugaccuuuaugauga

SEQ ID NO: 181739 - RNA, 19 nt, Homo sapiens
  misc_RNA (1)...(19): siRNA sense strand
gaaugacuguugcuuuuaa

SEQ ID NO: 181740 - RNA, 19 nt, Homo sapiens
  misc_RNA (1)...(19): siRNA sense strand
caaucuaugccguguauuu

SEQ ID NO: 181741 - RNA, 19 nt, Homo sapiens
  misc_RNA (1)...(19): siRNA sense strand
ggaaaagccuggucuccaa

SEQ ID NO: 181742 - RNA, 19 nt, Homo sapiens
  misc_RNA (1)...(19): siRNA sense strand
cagugaaacucgaguacuu

SEQ ID NO: 181743 - RNA, 19 nt, Homo sapiens
  misc_RNA (1)...(19): siRNA sense strand
caccacaguuuaaagcaaa

SEQ ID NO: 181744 - RNA, 19 nt, Homo sapiens
  misc_RNA (1)...(19): siRNA sense strand
agaggaagaugauguugug

SEQ ID NO: 181745 - RNA, 19 nt, Homo sapiens
  misc_RNA (1)...(19): siRNA sense strand
caaaucaugcugaacuuau

SEQ ID NO: 181746 - RNA, 19 nt, Homo sapiens
  misc_RNA (1)...(19): siRNA sense strand
gauaaagagacuggagaua

SEQ ID NO: 181747 - RNA, 19 nt, Homo sapiens
  misc_RNA (1)...(19): siRNA sense strand
gaggaaugacuguugcuuu

SEQ ID NO: 181748 - RNA, 19 nt, Homo sapiens
  misc_RNA (1)...(19): siRNA sense strand
guaguagugcuguauugua

SEQ ID NO: 181749 - RNA, 19 nt, Homo sapiens
  misc_RNA (1)...(19): siRNA sense strand
ucaggcucuuuaugaauua

SEQ ID NO: 181750 - RNA, 19 nt, Homo sapiens
  misc_RNA (1)...(19): siRNA sense strand
uaaaagagccugacagaau

SEQ ID NO: 181751 - RNA, 19 nt, Homo sapiens
  misc_RNA (1)...(19): siRNA sense strand
gaaaacugcuaaaggguau

SEQ ID NO: 181752 - RNA, 19 nt, Homo sapiens
  misc_RNA (1)...(19): siRNA sense strand
uggcagagcccaaugcaaa

SEQ ID NO: 181753 - RNA, 19 nt, Homo sapiens
  misc_RNA (1)...(19): siRNA sense strand
gguguuguguuacaguuau

SEQ ID NO: 181754 - RNA, 19 nt, Homo sapiens
  misc_RNA (1)...(19): siRNA sense strand
aaacaucucauuccuuugu

SEQ ID NO: 181755 - RNA, 19 nt, Homo sapiens
  misc_RNA (1)...(19): siRNA sense strand
gacuggagauaucaaggaa

SEQ ID NO: 181756 - RNA, 19 nt, Homo sapiens
  misc_RNA (1)...(19): siRNA sense strand
ucagaaccuuggauuacaa

SEQ ID NO: 181757 - RNA, 19 nt, Homo sapiens
  misc_RNA (1)...(19): siRNA sense strand
aagaaugcaccacaguuua

SEQ ID NO: 181758 - RNA, 19 nt, Homo sapiens
  misc_RNA (1)...(19): siRNA sense strand
ccucuaauuuacucagaaa

SEQ ID NO: 181759 - RNA, 19 nt, Homo sapiens
  misc_RNA (1)...(19): siRNA sense strand
guacaucaacaucuucuca

SEQ ID NO: 181760 - RNA, 19 nt, Homo sapiens
  misc_RNA (1)...(19): siRNA sense strand
ucgaguacuuguugacauu

SEQ ID NO: 181761 - RNA, 19 nt, Homo sapiens
  misc_RNA (1)...(19): siRNA sense strand
agaaugcaccacaguuuaa

SEQ ID NO: 181762 - RNA, 19 nt, Homo sapiens
  misc_RNA (1)...(19): siRNA sense strand
gcaaaucagagguucagau

SEQ ID NO: 181763 - RNA, 19 nt, Homo sapiens
  misc_RNA (1)...(19): siRNA sense strand
ucagaaacaagcuuaauag

SEQ ID NO: 181764 - RNA, 19 nt, Homo sapiens
  misc_RNA (1)...(19): siRNA sense strand
aaacgagguguucuucuuu

SEQ ID NO: 181765 - RNA, 19 nt, Homo sapiens
  misc_RNA (1)...(19): siRNA sense strand
aaagccuggucuccaauaa

SEQ ID NO: 181766 - RNA, 19 nt, Homo sapiens
  misc_RNA (1)...(19): siRNA sense strand
gaaugcaccacaguuuaaa

SEQ ID NO: 181767 - RNA, 19 nt, Homo sapiens
  misc_RNA (1)...(19): siRNA sense strand
uccuaacccucuagcuuua

SEQ ID NO: 181768 - RNA, 19 nt, Homo sapiens
  misc_RNA (1)...(19): siRNA sense strand
agaaacaagcuuaauagga

SEQ ID NO: 181769 - RNA, 19 nt, Homo sapiens
  misc_RNA (1)...(19): siRNA sense strand
gagccugacagaauaguug

SEQ ID NO: 181770 - RNA, 19 nt, Homo sapiens
  misc_RNA (1)...(19): siRNA sense strand
cgaguccaguucucaucua

SEQ ID NO: 181771 - RNA, 19 nt, Homo sapiens
  misc_RNA (1)...(19): siRNA sense strand
uaagagaauacaugguuga

SEQ ID NO: 181772 - RNA, 19 nt, Homo sapiens
  misc_RNA (1)...(19): siRNA sense strand
caguaguagugcuguauug

SEQ ID NO: 181773 - RNA, 19 nt, Homo sapiens
  misc_RNA (1)...(19): siRNA sense strand
cucaggcucuuuaugaauu

SEQ ID NO: 181774 - RNA, 19 nt, Homo sapiens
  misc_RNA (1)...(19): siRNA sense strand
gaaugacccagaaguuauc

SEQ ID NO: 181775 - RNA, 19 nt, Homo sapiens
  misc_RNA (1)...(19): siRNA sense strand
gaugggaguucaguacaag

SEQ ID NO: 181776 - RNA, 19 nt, Homo sapiens
  misc_RNA (1)...(19): siRNA sense strand
cagagguucagauuccuua

SEQ ID NO: 181777 - RNA, 19 nt, Homo sapiens
  misc_RNA (1)...(19): siRNA sense strand
aaacucgaguacuuguuga

SEQ ID NO: 181778 - RNA, 19 nt, Homo sapiens
  misc_RNA (1)...(19): siRNA sense strand
gcauugccacuuucaccua

SEQ ID NO: 181779 - RNA, 19 nt, Homo sapiens
  misc_RNA (1)...(19): siRNA sense strand
gaacuccaugcuccacuga

SEQ ID NO: 181780 - RNA, 19 nt, Homo sapiens
  misc_RNA (1)...(19): siRNA sense strand
auaaagagacuggagauau

SEQ ID NO: 181781 - RNA, 19 nt, Homo sapiens
  misc_RNA (1)...(19): siRNA sense strand
agaaugacccagaaguuau

SEQ ID NO: 181782 - RNA, 19 nt, Homo sapiens
  misc_RNA (1)...(19): siRNA sense strand
uagaagccacugacaauuc

SEQ ID NO: 181783 - RNA, 19 nt, Homo sapiens
  misc_RNA (1)...(19): siRNA sense strand
ugacagaauaguuggagaa

SEQ ID NO: 181784 - RNA, 19 nt, Homo sapiens
  misc_RNA (1)...(19): siRNA sense strand
ucagaaugacccagaaguu

SEQ ID NO: 181785 - RNA, 19 nt, Homo sapiens
  misc_RNA (1)...(19): siRNA sense strand
uaagucagaaccuuggauu

SEQ ID NO: 181786 - RNA, 19 nt, Homo sapiens
  misc_RNA (1)...(19): siRNA sense strand
ggauaaagagacuggagau

SEQ ID NO: 181787 - RNA, 19 nt, Homo sapiens
  misc_RNA (1)...(19): siRNA sense strand
gagcccaaugcaaaguuua

SEQ ID NO: 181788 - RNA, 19 nt, Homo sapiens
  misc_RNA (1)...(19): siRNA sense strand
ccucgagcccuucucagua

SEQ ID NO: 181789 - RNA, 19 nt, Homo sapiens
  misc_RNA (1)...(19): siRNA sense strand
ugcaaucuaugccguguau

SEQ ID NO: 181790 - RNA, 19 nt, Homo sapiens
  misc_RNA (1)...(19): siRNA sense strand
gaguucaguacaaggauaa

SEQ ID NO: 181791 - RNA, 19 nt, Homo sapiens
  misc_RNA (1)...(19): siRNA sense strand
ucacggaagauucaucaug

SEQ ID NO: 181792 - RNA, 19 nt, Homo sapiens
  misc_RNA (1)...(19): siRNA sense strand
agcguguucuguaauauuu

SEQ ID NO: 181793 - RNA, 19 nt, Homo sapiens
  misc_RNA (1)...(19): siRNA sense strand
ugaugggaguucaguacaa

SEQ ID NO: 181794 - RNA, 19 nt, Homo sapiens
  misc_RNA (1)...(19): siRNA sense strand
ugaagaaugcaccacaguu

SEQ ID NO: 181795 - RNA, 19 nt, Homo sapiens
  misc_RNA (1)...(19): siRNA sense strand
uaguagugcuguauuguac

SEQ ID NO: 181796 - RNA, 19 nt, Homo sapiens
  misc_RNA (1)...(19): siRNA sense strand
gucagaaccuuggauuaca

SEQ ID NO: 181797 - RNA, 19 nt, Homo sapiens
  misc_RNA (1)...(19): siRNA sense strand
gcugugcuuuccagagaug

SEQ ID NO: 181798 - RNA, 19 nt, Homo sapiens
  misc_RNA (1)...(19): siRNA sense strand
acagaauaguuggagaauu

SEQ ID NO: 181799 - RNA, 19 nt, Homo sapiens
  misc_RNA (1)...(19): siRNA sense strand
gcucaggcucuuuaugaau

SEQ ID NO: 181800 - RNA, 19 nt, Homo sapiens
  misc_RNA (1)...(19): siRNA sense strand
uaccugaucaccugaaaga

SEQ ID NO: 181801 - RNA, 19 nt, Homo sapiens
  misc_RNA (1)...(19): siRNA sense strand
guuauuagaggaagaugau

SEQ ID NO: 181802 - RNA, 19 nt, Homo sapiens
  misc_RNA (1)...(19): siRNA sense strand
gugcuuggcucugcuuugg

SEQ ID NO: 181803 - RNA, 19 nt, Homo sapiens
  misc_RNA (1)...(19): siRNA sense strand
acaucaacaucuucucaga

SEQ ID NO: 181804 - RNA, 19 nt, Homo sapiens
  misc_RNA (1)...(19): siRNA sense strand
agagcccaaugcaaaguuu

SEQ ID NO: 181805 - RNA, 19 nt, Homo sapiens
  misc_RNA (1)...(19): siRNA sense strand
gcaagcuuccuuccuccuu

SEQ ID NO: 181806 - RNA, 19 nt, Homo sapiens
  misc_RNA (1)...(19): siRNA sense strand
gguccaugcuagcaagcuu

SEQ ID NO: 181807 - RNA, 19 nt, Homo sapiens
  misc_RNA (1)...(19): siRNA sense strand
gaguacuuguugacauuag

SEQ ID NO: 181808 - RNA, 19 nt, Homo sapiens
  misc_RNA (1)...(19): siRNA sense strand
ggaaugacuguugcuuuua

SEQ ID NO: 181809 - RNA, 19 nt, Homo sapiens
  misc_RNA (1)...(19): siRNA sense strand
caagauggcucuagagaau

SEQ ID NO: 181810 - RNA, 19 nt, Homo sapiens
  misc_RNA (1)...(19): siRNA sense strand
caacagcgaugauuacagu

SEQ ID NO: 181811 - RNA, 19 nt, Homo sapiens
  misc_RNA (1)...(19): siRNA sense strand
gagaaauacccgaauuaua

SEQ ID NO: 181812 - RNA, 19 nt, Homo sapiens
  misc_RNA (1)...(19): siRNA sense strand
gagagaaauacccgaauua

SEQ ID NO: 181813 - RNA, 19 nt, Homo sapiens
  misc_RNA (1)...(19): siRNA sense strand
cgaagaugcugccgaagaa

SEQ ID NO: 181814 - RNA, 19 nt, Homo sapiens
  misc_RNA (1)...(19): siRNA sense strand
acugaaagcuguaacucua

SEQ ID NO: 181815 - RNA, 19 nt, Homo sapiens
  misc_RNA (1)...(19): siRNA sense strand
gcaagcagcugggauacca

SEQ ID NO: 181816 - RNA, 19 nt, Homo sapiens
  misc_RNA (1)...(19): siRNA sense strand
ccaggaggcacagaaauua

SEQ ID NO: 181817 - RNA, 19 nt, Homo sapiens
  misc_RNA (1)...(19): siRNA sense strand
agagagaaauacccgaauu

SEQ ID NO: 181818 - RNA, 19 nt, Homo sapiens
  misc_RNA (1)...(19): siRNA sense strand
gaaagccacacacucaaga

SEQ ID NO: 181819 - RNA, 19 nt, Homo sapiens
  misc_RNA (1)...(19): siRNA sense strand
gaaauacccgaauuauaag

SEQ ID NO: 181820 - RNA, 19 nt, Homo sapiens
  misc_RNA (1)...(19): siRNA sense strand
gcaagauggcucuagagaa

SEQ ID NO: 181821 - RNA, 19 nt, Homo sapiens
  misc_RNA (1)...(19): siRNA sense strand
gcgaagaugcugccgaaga

SEQ ID NO: 181822 - RNA, 19 nt, Homo sapiens
  misc_RNA (1)...(19): siRNA sense strand
gccgaagaauugcaguuug

SEQ ID NO: 181823 - RNA, 19 nt, Homo sapiens
  misc_RNA (1)...(19): siRNA sense strand
gcaccagcuaggccacuua

SEQ ID NO: 181824 - RNA, 19 nt, Homo sapiens
  misc_RNA (1)...(19): siRNA sense strand
guccagcugugcaagagaa

SEQ ID NO: 181825 - RNA, 19 nt, Homo sapiens
  misc_RNA (1)...(19): siRNA sense strand
gccacacacucaagaaugg

SEQ ID NO: 181826 - RNA, 19 nt, Homo sapiens
  misc_RNA (1)...(19): siRNA sense strand
aaucauaugcuucugcuau

SEQ ID NO: 181827 - RNA, 19 nt, Homo sapiens
  misc_RNA (1)...(19): siRNA sense strand
gaaacucagagaucagcaa

SEQ ID NO: 181828 - RNA, 19 nt, Homo sapiens
  misc_RNA (1)...(19): siRNA sense strand
aaaggcaacguccaggaua

SEQ ID NO: 181829 - RNA, 19 nt, Homo sapiens
  misc_RNA (1)...(19): siRNA sense strand
gcuguaacucuaaguauca

SEQ ID NO: 181830 - RNA, 19 nt, Homo sapiens
  misc_RNA (1)...(19): siRNA sense strand
gaagaauugcaguuugcuu

SEQ ID NO: 181831 - RNA, 19 nt, Homo sapiens
  misc_RNA (1)...(19): siRNA sense strand
ugaaagcuguaacucuaag

SEQ ID NO: 181832 - RNA, 19 nt, Homo sapiens
  misc_RNA (1)...(19): siRNA sense strand
auaugcuucugcuauguua

SEQ ID NO: 181833 - RNA, 19 nt, Homo sapiens
  misc_RNA (1)...(19): siRNA sense strand
ucuagagaaucccagaaug

SEQ ID NO: 181834 - RNA, 19 nt, Homo sapiens
  misc_RNA (1)...(19): siRNA sense strand
gagugaagcgacccaugaa

SEQ ID NO: 181835 - RNA, 19 nt, Homo sapiens
  misc_RNA (1)...(19): siRNA sense strand
ggcgcaagauggcucuaga

SEQ ID NO: 181836 - RNA, 19 nt, Homo sapiens
  misc_RNA (1)...(19): siRNA sense strand
aaagcuguaacucuaagua

SEQ ID NO: 181837 - RNA, 19 nt, Homo sapiens
  misc_RNA (1)...(19): siRNA sense strand
agagaaauacccgaauuau

SEQ ID NO: 181838 - RNA, 19 nt, Homo sapiens
  misc_RNA (1)...(19): siRNA sense strand
agagugaagcgacccauga

SEQ ID NO: 181839 - RNA, 19 nt, Homo sapiens
  misc_RNA (1)...(19): siRNA sense strand
acucagagaucagcaagca

SEQ ID NO: 181840 - RNA, 19 nt, Homo sapiens
  misc_RNA (1)...(19): siRNA sense strand
gaagugcaacuggacaaca

SEQ ID NO: 181841 - RNA, 19 nt, Homo sapiens
  misc_RNA (1)...(19): siRNA sense strand
ccgaagaauugcaguuugc

SEQ ID NO: 181842 - RNA, 19 nt, Homo sapiens
  misc_RNA (1)...(19): siRNA sense strand
uacgaaagccacacacuca

SEQ ID NO: 181843 - RNA, 19 nt, Homo sapiens
  misc_RNA (1)...(19): siRNA sense strand
uaaaggcaacguccaggau

SEQ ID NO: 181844 - RNA, 19 nt, Homo sapiens
  misc_RNA (1)...(19): siRNA sense strand
ccagaaugcgaaacucaga

SEQ ID NO: 181845 - RNA, 19 nt, Homo sapiens
  misc_RNA (1)...(19): siRNA sense strand
cagcugugcaagagaauau

SEQ ID NO: 181846 - RNA, 19 nt, Homo sapiens
  misc_RNA (1)...(19): siRNA sense strand
uacaggccaugcacagaga

SEQ ID NO: 181847 - RNA, 19 nt, Homo sapiens
  misc_RNA (1)...(19): siRNA sense strand
ccacuuaccgcccaucaac

SEQ ID NO: 181848 - RNA, 19 nt, Homo sapiens
  misc_RNA (1)...(19): siRNA sense strand
uauucaacagcgaugauua

SEQ ID NO: 181849 - RNA, 19 nt, Homo sapiens
  misc_RNA (1)...(19): siRNA sense strand
aagaauggagcaccagcua

SEQ ID NO: 181850 - RNA, 19 nt, Homo sapiens
  misc_RNA (1)...(19): siRNA sense strand
ccaugcacagagagaaaua

SEQ ID NO: 181851 - RNA, 19 nt, Homo sapiens
  misc_RNA (1)...(19): siRNA sense strand
gcacugaaagcuguaacuc

SEQ ID NO: 181852 - RNA, 19 nt, Homo sapiens
  misc_RNA (1)...(19): siRNA sense strand
ucugcuauguuaagcguau

SEQ ID NO: 181853 - RNA, 19 nt, Homo sapiens
  misc_RNA (1)...(19): siRNA sense strand
agggaugacuguacgaaag

SEQ ID NO: 181854 - RNA, 19 nt, Homo sapiens
  misc_RNA (1)...(19): siRNA sense strand
ggccaugcacagagagaaa

SEQ ID NO: 181855 - RNA, 19 nt, Homo sapiens
  misc_RNA (1)...(19): siRNA sense strand
gaaacgggagaaaacagua

SEQ ID NO: 181856 - RNA, 19 nt, Homo sapiens
  misc_RNA (1)...(19): siRNA sense strand
gaagaugcugccgaagaau

SEQ ID NO: 181857 - RNA, 19 nt, Homo sapiens
  misc_RNA (1)...(19): siRNA sense strand
augcgaaacucagagauca

SEQ ID NO: 181858 - RNA, 19 nt, Homo sapiens
  misc_RNA (1)...(19): siRNA sense strand
guauucaacagcgaugauu

SEQ ID NO: 181859 - RNA, 19 nt, Homo sapiens
  misc_RNA (1)...(19): siRNA sense strand
aagaugcugccgaagaauu

SEQ ID NO: 181860 - RNA, 19 nt, Homo sapiens
  misc_RNA (1)...(19): siRNA sense strand
uccaggaggcacagaaauu

SEQ ID NO: 181861 - RNA, 19 nt, Homo sapiens
  misc_RNA (1)...(19): siRNA sense strand
gcgaagugcaacuggacaa

SEQ ID NO: 181862 - RNA, 19 nt, Homo sapiens
  misc_RNA (1)...(19): siRNA sense strand
cgaaagccacacacucaag

SEQ ID NO: 181863 - RNA, 19 nt, Homo sapiens
  misc_RNA (1)...(19): siRNA sense strand
gaaagcuguaacucuaagu

SEQ ID NO: 181864 - RNA, 19 nt, Homo sapiens
  misc_RNA (1)...(19): siRNA sense strand
acucuaaguaucaguguga

SEQ ID NO: 181865 - RNA, 19 nt, Homo sapiens
  misc_RNA (1)...(19): siRNA sense strand
gaagagagauuugauaguu

SEQ ID NO: 181866 - RNA, 19 nt, Homo sapiens
  misc_RNA (1)...(19): siRNA sense strand
gagcauaccuggaaaugaa

SEQ ID NO: 181867 - RNA, 19 nt, Homo sapiens
  misc_RNA (1)...(19): siRNA sense strand
gcagcacgcuugacaauga

SEQ ID NO: 181868 - RNA, 19 nt, Homo sapiens
  misc_RNA (1)...(19): siRNA sense strand
gaacaaccuuaaagaaauc

SEQ ID NO: 181869 - RNA, 19 nt, Homo sapiens
  misc_RNA (1)...(19): siRNA sense strand
ggaguuggcugagaaguug

SEQ ID NO: 181870 - RNA, 19 nt, Homo sapiens
  misc_RNA (1)...(19): siRNA sense strand
gauauuaccucuccagaac

SEQ ID NO: 181871 - RNA, 19 nt, Homo sapiens
  misc_RNA (1)...(19): siRNA sense strand
gaagaucggagacaaguga

SEQ ID NO: 181872 - RNA, 19 nt, Homo sapiens
  misc_RNA (1)...(19): siRNA sense strand
gagagagacuucaccuguu

SEQ ID NO: 181873 - RNA, 19 nt, Homo sapiens
  misc_RNA (1)...(19): siRNA sense strand
ggaaguggaaauugcaaua

SEQ ID NO: 181874 - RNA, 19 nt, Homo sapiens
  misc_RNA (1)...(19): siRNA sense strand
ugaaggaccuggauauuac

SEQ ID NO: 181875 - RNA, 19 nt, Homo sapiens
  misc_RNA (1)...(19): siRNA sense strand
gaccauggcucccucaucu

SEQ ID NO: 181876 - RNA, 19 nt, Homo sapiens
  misc_RNA (1)...(19): siRNA sense strand
uacaggagcucaucucaga

SEQ ID NO: 181877 - RNA, 19 nt, Homo sapiens
  misc_RNA (1)...(19): siRNA sense strand
ggaaauugcaauaaagaga

SEQ ID NO: 181878 - RNA, 19 nt, Homo sapiens
  misc_RNA (1)...(19): siRNA sense strand
gugaacaaccuuaaagaaa

SEQ ID NO: 181879 - RNA, 19 nt, Homo sapiens
  misc_RNA (1)...(19): siRNA sense strand
ggugauaauuguccuggaa

SEQ ID NO: 181880 - RNA, 19 nt, Homo sapiens
  misc_RNA (1)...(19): siRNA sense strand
gaaguggaaauugcaauaa

SEQ ID NO: 181881 - RNA, 19 nt, Homo sapiens
  misc_RNA (1)...(19): siRNA sense strand
gaaguuggaaguggaaauu

SEQ ID NO: 181882 - RNA, 19 nt, Homo sapiens
  misc_RNA (1)...(19): siRNA sense strand
cagcagagcauaccuggaa

SEQ ID NO: 181883 - RNA, 19 nt, Homo sapiens
  misc_RNA (1)...(19): siRNA sense strand
ggugaacaaccuuaaagaa

SEQ ID NO: 181884 - RNA, 19 nt, Homo sapiens
  misc_RNA (1)...(19): siRNA sense strand
ucacaaggauccacugacu

SEQ ID NO: 181885 - RNA, 19 nt, Homo sapiens
  misc_RNA (1)...(19): siRNA sense strand
aagaguggcuucuggacaa

SEQ ID NO: 181886 - RNA, 19 nt, Homo sapiens
  misc_RNA (1)...(19): siRNA sense strand
ugcaggagcuggagaagga

SEQ ID NO: 181887 - RNA, 19 nt, Homo sapiens
  misc_RNA (1)...(19): siRNA sense strand
cugaaggaccuggauauua

SEQ ID NO: 181888 - RNA, 19 nt, Homo sapiens
  misc_RNA (1)...(19): siRNA sense strand
gagaagaaagcaggaguug

SEQ ID NO: 181889 - RNA, 19 nt, Homo sapiens
  misc_RNA (1)...(19): siRNA sense strand
gaauauuggaucacaagga

SEQ ID NO: 181890 - RNA, 19 nt, Homo sapiens
  misc_RNA (1)...(19): siRNA sense strand
ggauauuaccucuccagaa

SEQ ID NO: 181891 - RNA, 19 nt, Homo sapiens
  misc_RNA (1)...(19): siRNA sense strand
agagagacuucaccuguuc

SEQ ID NO: 181892 - RNA, 19 nt, Homo sapiens
  misc_RNA (1)...(19): siRNA sense strand
gaggucacaugcccuaucu

SEQ ID NO: 181893 - RNA, 19 nt, Homo sapiens
  misc_RNA (1)...(19): siRNA sense strand
gagagcagacuggaagaaa

SEQ ID NO: 181894 - RNA, 19 nt, Homo sapiens
  misc_RNA (1)...(19): siRNA sense strand
ggaaugcaucucucagguu

SEQ ID NO: 181895 - RNA, 19 nt, Homo sapiens
  misc_RNA (1)...(19): siRNA sense strand
uagccaacauggugaacaa

SEQ ID NO: 181896 - RNA, 19 nt, Homo sapiens
  misc_RNA (1)...(19): siRNA sense strand
ugccagggcugaagaagau

SEQ ID NO: 181897 - RNA, 19 nt, Homo sapiens
  misc_RNA (1)...(19): siRNA sense strand
ccacagcucagcacuggaa

SEQ ID NO: 181898 - RNA, 19 nt, Homo sapiens
  misc_RNA (1)...(19): siRNA sense strand
gaagcuccagguggcauua

SEQ ID NO: 181899 - RNA, 19 nt, Homo sapiens
  misc_RNA (1)...(19): siRNA sense strand
acaaggauccacugacuau

SEQ ID NO: 181900 - RNA, 19 nt, Homo sapiens
  misc_RNA (1)...(19): siRNA sense strand
aauauuggaucacaaggau

SEQ ID NO: 181901 - RNA, 19 nt, Homo sapiens
  misc_RNA (1)...(19): siRNA sense strand
cuaacccucuguccacuga

SEQ ID NO: 181902 - RNA, 19 nt, Homo sapiens
  misc_RNA (1)...(19): siRNA sense strand
ugcaggaggugauaauugu

SEQ ID NO: 181903 - RNA, 19 nt, Homo sapiens
  misc_RNA (1)...(19): siRNA sense strand
ggauuuuccuggacuauga

SEQ ID NO: 181904 - RNA, 19 nt, Homo sapiens
  misc_RNA (1)...(19): siRNA sense strand
gaaacacagaaaucuagga

SEQ ID NO: 181905 - RNA, 19 nt, Homo sapiens
  misc_RNA (1)...(19): siRNA sense strand
agaagaugcugaggacaug

SEQ ID NO: 181906 - RNA, 19 nt, Homo sapiens
  misc_RNA (1)...(19): siRNA sense strand
ccacaucacucuggaucca

SEQ ID NO: 181907 - RNA, 19 nt, Homo sapiens
  misc_RNA (1)...(19): siRNA sense strand
aggauccacugacuauuga

SEQ ID NO: 181908 - RNA, 19 nt, Homo sapiens
  misc_RNA (1)...(19): siRNA sense strand
ggcauggucuccuucuaca

SEQ ID NO: 181909 - RNA, 19 nt, Homo sapiens
  misc_RNA (1)...(19): siRNA sense strand
caucuacuccuucucugaa

SEQ ID NO: 181910 - RNA, 19 nt, Homo sapiens
  misc_RNA (1)...(19): siRNA sense strand
gugccuccaugccaaguug

SEQ ID NO: 181911 - RNA, 19 nt, Homo sapiens
  misc_RNA (1)...(19): siRNA sense strand
cuucaguccugguuucaau

SEQ ID NO: 181912 - RNA, 19 nt, Homo sapiens
  misc_RNA (1)...(19): siRNA sense strand
guggaaauugcaauaaaga

SEQ ID NO: 181913 - RNA, 19 nt, Homo sapiens
  misc_RNA (1)...(19): siRNA sense strand
gagacucugugcgcaggaa

SEQ ID NO: 181914 - RNA, 19 nt, Homo sapiens
  misc_RNA (1)...(19): siRNA sense strand
guggaaacacagaaaucua

SEQ ID NO: 181915 - RNA, 19 nt, Homo sapiens
  misc_RNA (1)...(19): siRNA sense strand
gaagaaaacaguggaaaca

SEQ ID NO: 181916 - RNA, 19 nt, Homo sapiens
  misc_RNA (1)...(19): siRNA sense strand
uaaagagagcagacuggaa

SEQ ID NO: 181917 - RNA, 19 nt, Homo sapiens
  misc_RNA (1)...(19): siRNA sense strand
ccacagcuucugccaggaa

SEQ ID NO: 181918 - RNA, 19 nt, Homo sapiens
  misc_RNA (1)...(19): siRNA sense strand
caacauggugaacaaccuu

SEQ ID NO: 181919 - RNA, 19 nt, Homo sapiens
  misc_RNA (1)...(19): siRNA sense strand
cagcagcacgcuugacaau

SEQ ID NO: 181920 - RNA, 19 nt, Homo sapiens
  misc_RNA (1)...(19): siRNA sense strand
agagggagcagcugagaau

SEQ ID NO: 181921 - RNA, 19 nt, Homo sapiens
  misc_RNA (1)...(19): siRNA sense strand
aaggauccacugacuauug

SEQ ID NO: 181922 - RNA, 19 nt, Homo sapiens
  misc_RNA (1)...(19): siRNA sense strand
gcagagcauaccuggaaau

SEQ ID NO: 181923 - RNA, 19 nt, Homo sapiens
  misc_RNA (1)...(19): siRNA sense strand
aaacacagaaaucuaggau

SEQ ID NO: 181924 - RNA, 19 nt, Homo sapiens
  misc_RNA (1)...(19): siRNA sense strand
agguagaugugacaggaaa

SEQ ID NO: 181925 - RNA, 19 nt, Homo sapiens
  misc_RNA (1)...(19): siRNA sense strand
gaaccugaaggaccuggau

SEQ ID NO: 181926 - RNA, 19 nt, Homo sapiens
  misc_RNA (1)...(19): siRNA sense strand
aguggcuucuggacaauuu

SEQ ID NO: 181927 - RNA, 19 nt, Homo sapiens
  misc_RNA (1)...(19): siRNA sense strand
gagagggagcagcugagaa

SEQ ID NO: 181928 - RNA, 19 nt, Homo sapiens
  misc_RNA (1)...(19): siRNA sense strand
ggaggucacaugcccuauc

SEQ ID NO: 181929 - RNA, 19 nt, Homo sapiens
  misc_RNA (1)...(19): siRNA sense strand
aagcaggaguuggcugaga

SEQ ID NO: 181930 - RNA, 19 nt, Homo sapiens
  misc_RNA (1)...(19): siRNA sense strand
uggaaacacagaaaucuag

SEQ ID NO: 181931 - RNA, 19 nt, Homo sapiens
  misc_RNA (1)...(19): siRNA sense strand
aaacaguggaaacacagaa

SEQ ID NO: 181932 - RNA, 19 nt, Homo sapiens
  misc_RNA (1)...(19): siRNA sense strand
gcccuuugcuggguaugug

SEQ ID NO: 181933 - RNA, 19 nt, Homo sapiens
  misc_RNA (1)...(19): siRNA sense strand
cagaagaucggagacaagu

SEQ ID NO: 181934 - RNA, 19 nt, Homo sapiens
  misc_RNA (1)...(19): siRNA sense strand
uaggauucacgcagaguuu

SEQ ID NO: 181935 - RNA, 19 nt, Homo sapiens
  misc_RNA (1)...(19): siRNA sense strand
cagcacgcuugacaaugau

SEQ ID NO: 181936 - RNA, 19 nt, Homo sapiens
  misc_RNA (1)...(19): siRNA sense strand
ugagaagaaagcaggaguu

SEQ ID NO: 181937 - RNA, 19 nt, Homo sapiens
  misc_RNA (1)...(19): siRNA sense strand
agcaggaguuggcugagaa

SEQ ID NO: 181938 - RNA, 19 nt, Homo sapiens
  misc_RNA (1)...(19): siRNA sense strand
aauaugaggcuggcaccua

SEQ ID NO: 181939 - RNA, 19 nt, Homo sapiens
  misc_RNA (1)...(19): siRNA sense strand
ugauaauuguccuggaaag

SEQ ID NO: 181940 - RNA, 19 nt, Homo sapiens
  misc_RNA (1)...(19): siRNA sense strand
gugauaauuguccuggaaa

SEQ ID NO: 181941 - RNA, 19 nt, Homo sapiens
  misc_RNA (1)...(19): siRNA sense strand
gcaauaaagagagcagacu

SEQ ID NO: 181942 - RNA, 19 nt, Homo sapiens
  misc_RNA (1)...(19): siRNA sense strand
aguggaaauugcaauaaag

SEQ ID NO: 181943 - RNA, 19 nt, Homo sapiens
  misc_RNA (1)...(19): siRNA sense strand
cauggugaacaaccuuaaa

SEQ ID NO: 181944 - RNA, 19 nt, Homo sapiens
  misc_RNA (1)...(19): siRNA sense strand
ucaguccugguuucaauga

SEQ ID NO: 181945 - RNA, 19 nt, Homo sapiens
  misc_RNA (1)...(19): siRNA sense strand
ucaggagugugugccaugu

SEQ ID NO: 181946 - RNA, 19 nt, Homo sapiens
  misc_RNA (1)...(19): siRNA sense strand
cugcaggaggugauaauug

SEQ ID NO: 181947 - RNA, 19 nt, Homo sapiens
  misc_RNA (1)...(19): siRNA sense strand
ggauucacgcagaguuugu

SEQ ID NO: 181948 - RNA, 19 nt, Homo sapiens
  misc_RNA (1)...(19): siRNA sense strand
cacaaggauccacugacua

SEQ ID NO: 181949 - RNA, 19 nt, Homo sapiens
  misc_RNA (1)...(19): siRNA sense strand
cuucuucaguccugguuuc

SEQ ID NO: 181950 - RNA, 19 nt, Homo sapiens
  misc_RNA (1)...(19): siRNA sense strand
gggagcagcugagaauccu

SEQ ID NO: 181951 - RNA, 19 nt, Homo sapiens
  misc_RNA (1)...(19): siRNA sense strand
caauaaagcuucaccaaga

SEQ ID NO: 181952 - RNA, 19 nt, Homo sapiens
  misc_RNA (1)...(19): siRNA sense strand
gaacggcaauguauuccaa

SEQ ID NO: 181953 - RNA, 19 nt, Homo sapiens
  misc_RNA (1)...(19): siRNA sense strand
guagaagauuccauaauug

SEQ ID NO: 181954 - RNA, 19 nt, Homo sapiens
  misc_RNA (1)...(19): siRNA sense strand
caacaaggguacagaagau

SEQ ID NO: 181955 - RNA, 19 nt, Homo sapiens
  misc_RNA (1)...(19): siRNA sense strand
ugaaagagaggauggguua

SEQ ID NO: 181956 - RNA, 19 nt, Homo sapiens
  misc_RNA (1)...(19): siRNA sense strand
gaagaugaacccacagauu

SEQ ID NO: 181957 - RNA, 19 nt, Homo sapiens
  misc_RNA (1)...(19): siRNA sense strand
gguagaagauaaagaggaa

SEQ ID NO: 181958 - RNA, 19 nt, Homo sapiens
  misc_RNA (1)...(19): siRNA sense strand
ccacagauuugguagaaga

SEQ ID NO: 181959 - RNA, 19 nt, Homo sapiens
  misc_RNA (1)...(19): siRNA sense strand
gaugcagucuucaaucaaa

SEQ ID NO: 181960 - RNA, 19 nt, Homo sapiens
  misc_RNA (1)...(19): siRNA sense strand
ggagaaacaaucuuuaugu

SEQ ID NO: 181961 - RNA, 19 nt, Homo sapiens
  misc_RNA (1)...(19): siRNA sense strand
gaagaaacaguagaagauu

SEQ ID NO: 181962 - RNA, 19 nt, Homo sapiens
  misc_RNA (1)...(19): siRNA sense strand
ucacagcucuuccucugaa

SEQ ID NO: 181963 - RNA, 19 nt, Homo sapiens
  misc_RNA (1)...(19): siRNA sense strand
caagaagguugcccaggaa

SEQ ID NO: 181964 - RNA, 19 nt, Homo sapiens
  misc_RNA (1)...(19): siRNA sense strand
uaagagacccauacagaaa

SEQ ID NO: 181965 - RNA, 19 nt, Homo sapiens
  misc_RNA (1)...(19): siRNA sense strand
guacaucaagucagaauga

SEQ ID NO: 181966 - RNA, 19 nt, Homo sapiens
  misc_RNA (1)...(19): siRNA sense strand
gagugcagauacaacuaua

SEQ ID NO: 181967 - RNA, 19 nt, Homo sapiens
  misc_RNA (1)...(19): siRNA sense strand
ggucuugggcuucugguua

SEQ ID NO: 181968 - RNA, 19 nt, Homo sapiens
  misc_RNA (1)...(19): siRNA sense strand
gcaaauaacauugugaagu

SEQ ID NO: 181969 - RNA, 19 nt, Homo sapiens
  misc_RNA (1)...(19): siRNA sense strand
cagauuugguagaagauaa

SEQ ID NO: 181970 - RNA, 19 nt, Homo sapiens
  misc_RNA (1)...(19): siRNA sense strand
guaagagacccauacagaa

SEQ ID NO: 181971 - RNA, 19 nt, Homo sapiens
  misc_RNA (1)...(19): siRNA sense strand
gcagauacaacuauacugu

SEQ ID NO: 181972 - RNA, 19 nt, Homo sapiens
  misc_RNA (1)...(19): siRNA sense strand
agugggaucugaugaguaa

SEQ ID NO: 181973 - RNA, 19 nt, Homo sapiens
  misc_RNA (1)...(19): siRNA sense strand
aagaugaacccacagauuu

SEQ ID NO: 181974 - RNA, 19 nt, Homo sapiens
  misc_RNA (1)...(19): siRNA sense strand
ggcaauguauuccaagaug

SEQ ID NO: 181975 - RNA, 19 nt, Homo sapiens
  misc_RNA (1)...(19): siRNA sense strand
ucaucaaucugaacuacaa

SEQ ID NO: 181976 - RNA, 19 nt, Homo sapiens
  misc_RNA (1)...(19): siRNA sense strand
gauggagaaacaaucuuua

SEQ ID NO: 181977 - RNA, 19 nt, Homo sapiens
  misc_RNA (1)...(19): siRNA sense strand
gaagaugugucuggugaac

SEQ ID NO: 181978 - RNA, 19 nt, Homo sapiens
  misc_RNA (1)...(19): siRNA sense strand
aauaaagcuucaccaagaa

SEQ ID NO: 181979 - RNA, 19 nt, Homo sapiens
  misc_RNA (1)...(19): siRNA sense strand
ggaugaagaaacaguagaa

SEQ ID NO: 181980 - RNA, 19 nt, Homo sapiens
  misc_RNA (1)...(19): siRNA sense strand
gaaauggguacaucaaguc

SEQ ID NO: 181981 - RNA, 19 nt, Homo sapiens
  misc_RNA (1)...(19): siRNA sense strand
cguaagagacccauacaga

SEQ ID NO: 181982 - RNA, 19 nt, Homo sapiens
  misc_RNA (1)...(19): siRNA sense strand
gagaagauuuuccagcaaa

SEQ ID NO: 181983 - RNA, 19 nt, Homo sapiens
  misc_RNA (1)...(19): siRNA sense strand
uaauugaggaugaagauga

SEQ ID NO: 181984 - RNA, 19 nt, Homo sapiens
  misc_RNA (1)...(19): siRNA sense strand
ugaagaaacaguagaagau

SEQ ID NO: 181985 - RNA, 19 nt, Homo sapiens
  misc_RNA (1)...(19): siRNA sense strand
gauuugaacggcaauguau

SEQ ID NO: 181986 - RNA, 19 nt, Homo sapiens
  misc_RNA (1)...(19): siRNA sense strand
agaaauggguacaucaagu

SEQ ID NO: 181987 - RNA, 19 nt, Homo sapiens
  misc_RNA (1)...(19): siRNA sense strand
gaaucuagaaagcguaaga

SEQ ID NO: 181988 - RNA, 19 nt, Homo sapiens
  misc_RNA (1)...(19): siRNA sense strand
gaaacgggcacagaagaga

SEQ ID NO: 181989 - RNA, 19 nt, Homo sapiens
  misc_RNA (1)...(19): siRNA sense strand
caagucagaaugauguuga

SEQ ID NO: 181990 - RNA, 19 nt, Homo sapiens
  misc_RNA (1)...(19): siRNA sense strand
gcaguggcacaagaucuua

SEQ ID NO: 181991 - RNA, 19 nt, Homo sapiens
  misc_RNA (1)...(19): siRNA sense strand
uggguuagauggagaaaca

SEQ ID NO: 181992 - RNA, 19 nt, Homo sapiens
  misc_RNA (1)...(19): siRNA sense strand
cgagguagaagaagaugaa

SEQ ID NO: 181993 - RNA, 19 nt, Homo sapiens
  misc_RNA (1)...(19): siRNA sense strand
guagaaauggguacaucaa

SEQ ID NO: 181994 - RNA, 19 nt, Homo sapiens
  misc_RNA (1)...(19): siRNA sense strand
uacagaggaugaagaaaca

SEQ ID NO: 181995 - RNA, 19 nt, Homo sapiens
  misc_RNA (1)...(19): siRNA sense strand
gaaguuccugguaggcuuu

SEQ ID NO: 181996 - RNA, 19 nt, Homo sapiens
  misc_RNA (1)...(19): siRNA sense strand
aagaaacaguagaagauuc

SEQ ID NO: 181997 - RNA, 19 nt, Homo sapiens
  misc_RNA (1)...(19): siRNA sense strand
ggucaucaaucugaacuac

SEQ ID NO: 181998 - RNA, 19 nt, Homo sapiens
  misc_RNA (1)...(19): siRNA sense strand
cagcaaauaacauugugaa

SEQ ID NO: 181999 - RNA, 19 nt, Homo sapiens
  misc_RNA (1)...(19): siRNA sense strand
ccaacaaggguacagaaga

SEQ ID NO: 182000 - RNA, 19 nt, Homo sapiens
  misc_RNA (1)...(19): siRNA sense strand
caaucaaacaguuacaguu

SEQ ID NO: 182001 - RNA, 19 nt, Homo sapiens
  misc_RNA (1)...(19): siRNA sense strand
uaaagaggaagaagaugug

SEQ ID NO: 182002 - RNA, 19 nt, Homo sapiens
  misc_RNA (1)...(19): siRNA sense strand
ccaggaaacgggcacagaa

SEQ ID NO: 182003 - RNA, 19 nt, Homo sapiens
  misc_RNA (1)...(19): siRNA sense strand
gaaaguagaaauggguaca

SEQ ID NO: 182004 - RNA, 19 nt, Homo sapiens
  misc_RNA (1)...(19): siRNA sense strand
ugaugaagccgagguagaa

SEQ ID NO: 182005 - RNA, 19 nt, Homo sapiens
  misc_RNA (1)...(19): siRNA sense strand
gaagauaaagaggaagaag

SEQ ID NO: 182006 - RNA, 19 nt, Homo sapiens
  misc_RNA (1)...(19): siRNA sense strand
agucuucaaucaaacaguu

SEQ ID NO: 182007 - RNA, 19 nt, Homo sapiens
  misc_RNA (1)...(19): siRNA sense strand
aacaguagaagauuccaua

SEQ ID NO: 182008 - RNA, 19 nt, Homo sapiens
  misc_RNA (1)...(19): siRNA sense strand
aagccgagguagaagaaga

SEQ ID NO: 182009 - RNA, 19 nt, Homo sapiens
  misc_RNA (1)...(19): siRNA sense strand
ggaaacgggcacagaagag

SEQ ID NO: 182010 - RNA, 19 nt, Homo sapiens
  misc_RNA (1)...(19): siRNA sense strand
gggcuucugguuauuguug

SEQ ID NO: 182011 - RNA, 19 nt, Homo sapiens
  misc_RNA (1)...(19): siRNA sense strand
acaaggguacagaagauuu

SEQ ID NO: 182012 - RNA, 19 nt, Homo sapiens
  misc_RNA (1)...(19): siRNA sense strand
gauacaacuauacuguuug

SEQ ID NO: 182013 - RNA, 19 nt, Homo sapiens
  misc_RNA (1)...(19): siRNA sense strand
aaagagaggauggguuaga

SEQ ID NO: 182014 - RNA, 19 nt, Homo sapiens
  misc_RNA (1)...(19): siRNA sense strand
agauaaagaggaagaagau

SEQ ID NO: 182015 - RNA, 19 nt, Homo sapiens
  misc_RNA (1)...(19): siRNA sense strand
gucuugggcuucugguuau

SEQ ID NO: 182016 - RNA, 19 nt, Homo sapiens
  misc_RNA (1)...(19): siRNA sense strand
uagaagauaaagaggaaga

SEQ ID NO: 182017 - RNA, 19 nt, Homo sapiens
  misc_RNA (1)...(19): siRNA sense strand
cauaauugaggaugaagau

SEQ ID NO: 182018 - RNA, 19 nt, Homo sapiens
  misc_RNA (1)...(19): siRNA sense strand
gguuuggucaucaaucuga

SEQ ID NO: 182019 - RNA, 19 nt, Homo sapiens
  misc_RNA (1)...(19): siRNA sense strand
ggagaagauuuuccagcaa

SEQ ID NO: 182020 - RNA, 19 nt, Homo sapiens
  misc_RNA (1)...(19): siRNA sense strand
cagauacaacuauacuguu

SEQ ID NO: 182021 - RNA, 19 nt, Homo sapiens
  misc_RNA (1)...(19): siRNA sense strand
acccacagauuugguagaa

SEQ ID NO: 182022 - RNA, 19 nt, Homo sapiens
  misc_RNA (1)...(19): siRNA sense strand
uuugaguacucuuucauuc

SEQ ID NO: 182023 - RNA, 19 nt, Homo sapiens
  misc_RNA (1)...(19): siRNA sense strand
ugaagccgagguagaagaa

SEQ ID NO: 182024 - RNA, 19 nt, Homo sapiens
  misc_RNA (1)...(19): siRNA sense strand
auaaagaggaagaagaugu

SEQ ID NO: 182025 - RNA, 19 nt, Homo sapiens
  misc_RNA (1)...(19): siRNA sense strand
aagagaggauggguuagau

SEQ ID NO: 182026 - RNA, 19 nt, Homo sapiens
  misc_RNA (1)...(19): siRNA sense strand
caguuacaguuauugaaag

SEQ ID NO: 182027 - RNA, 19 nt, Homo sapiens
  misc_RNA (1)...(19): siRNA sense strand
agaugaacccacagauuug

SEQ ID NO: 182028 - RNA, 19 nt, Homo sapiens
  misc_RNA (1)...(19): siRNA sense strand
ccauuugguuuggucauca

SEQ ID NO: 182029 - RNA, 19 nt, Homo sapiens
  misc_RNA (1)...(19): siRNA sense strand
auccuuagaugccucauuc

SEQ ID NO: 182030 - RNA, 19 nt, Homo sapiens
  misc_RNA (1)...(19): siRNA sense strand
uuacagaggaugaagaaac

SEQ ID NO: 182031 - RNA, 19 nt, Homo sapiens
  misc_RNA (1)...(19): siRNA sense strand
cgagugcagauacaacuau

SEQ ID NO: 182032 - RNA, 19 nt, Homo sapiens
  misc_RNA (1)...(19): siRNA sense strand
ugaacccacagauuuggua

SEQ ID NO: 182033 - RNA, 19 nt, Homo sapiens
  misc_RNA (1)...(19): siRNA sense strand
aagauaaagaggaagaaga

SEQ ID NO: 182034 - RNA, 19 nt, Homo sapiens
  misc_RNA (1)...(19): siRNA sense strand
caaacaguuacaguuauug

SEQ ID NO: 182035 - RNA, 19 nt, Homo sapiens
  misc_RNA (1)...(19): siRNA sense strand
ugaguacucuuucauuccu

SEQ ID NO: 182036 - RNA, 19 nt, Homo sapiens
  misc_RNA (1)...(19): siRNA sense strand
gauaaagaggaagaagaug

SEQ ID NO: 182037 - RNA, 19 nt, Homo sapiens
  misc_RNA (1)...(19): siRNA sense strand
gaggaugaagaaacaguag

SEQ ID NO: 182038 - RNA, 19 nt, Homo sapiens
  misc_RNA (1)...(19): siRNA sense strand
ucaaucugaacuacaaaga

SEQ ID NO: 182039 - RNA, 19 nt, Homo sapiens
  misc_RNA (1)...(19): siRNA sense strand
cauacagaaaguagaaaug

SEQ ID NO: 182040 - RNA, 19 nt, Homo sapiens
  misc_RNA (1)...(19): siRNA sense strand
aauugaggaugaagaugau

SEQ ID NO: 182041 - RNA, 19 nt, Homo sapiens
  misc_RNA (1)...(19): siRNA sense strand
ccauacagaaaguagaaau

SEQ ID NO: 182042 - RNA, 19 nt, Homo sapiens
  misc_RNA (1)...(19): siRNA sense strand
agagacccauacagaaagu

SEQ ID NO: 182043 - RNA, 19 nt, Homo sapiens
  misc_RNA (1)...(19): siRNA sense strand
uggagaaacaaucuuuaug

SEQ ID NO: 182044 - RNA, 19 nt, Homo sapiens
  misc_RNA (1)...(19): siRNA sense strand
caguagaagauuccauaau

SEQ ID NO: 182045 - RNA, 19 nt, Homo sapiens
  misc_RNA (1)...(19): siRNA sense strand
agauuugaacggcaaugua

SEQ ID NO: 182046 - RNA, 19 nt, Homo sapiens
  misc_RNA (1)...(19): siRNA sense strand
uagaugccucauuccguua

SEQ ID NO: 182047 - RNA, 19 nt, Homo sapiens
  misc_RNA (1)...(19): siRNA sense strand
acaguagaagauuccauaa

SEQ ID NO: 182048 - RNA, 19 nt, Homo sapiens
  misc_RNA (1)...(19): siRNA sense strand
gaagguugcccaggaaacg

SEQ ID NO: 182049 - RNA, 19 nt, Homo sapiens
  misc_RNA (1)...(19): siRNA sense strand
agaggaugaagaaacagua

SEQ ID NO: 182050 - RNA, 19 nt, Homo sapiens
  misc_RNA (1)...(19): siRNA sense strand
cccagagacaggcaacuuu

SEQ ID NO: 182051 - RNA, 19 nt, Homo sapiens
  misc_RNA (1)...(19): siRNA sense strand
aaucacugcugaacagaua

SEQ ID NO: 182052 - RNA, 19 nt, Homo sapiens
  misc_RNA (1)...(19): siRNA sense strand
ucucaaggcugguuauuuc

SEQ ID NO: 182053 - RNA, 19 nt, Homo sapiens
  misc_RNA (1)...(19): siRNA sense strand
ccagaagacuuuggcauug

SEQ ID NO: 182054 - RNA, 19 nt, Homo sapiens
  misc_RNA (1)...(19): siRNA sense strand
ccaaaucacugcugaacag

SEQ ID NO: 182055 - RNA, 19 nt, Homo sapiens
  misc_RNA (1)...(19): siRNA sense strand
uggcucaagugcugcauua

SEQ ID NO: 182056 - RNA, 19 nt, Homo sapiens
  misc_RNA (1)...(19): siRNA sense strand
gaccugaccuugcaguaca

SEQ ID NO: 182057 - RNA, 19 nt, Homo sapiens
  misc_RNA (1)...(19): siRNA sense strand
gaaauaugacacucccaaa

SEQ ID NO: 182058 - RNA, 19 nt, Homo sapiens
  misc_RNA (1)...(19): siRNA sense strand
gacgagaccugaccuugca

SEQ ID NO: 182059 - RNA, 19 nt, Homo sapiens
  misc_RNA (1)...(19): siRNA sense strand
ccagcaagaggaaauauga

SEQ ID NO: 182060 - RNA, 19 nt, Homo sapiens
  misc_RNA (1)...(19): siRNA sense strand
gcucaagugcugcauuaga

SEQ ID NO: 182061 - RNA, 19 nt, Homo sapiens
  misc_RNA (1)...(19): siRNA sense strand
guggaacuaucugaugauu

SEQ ID NO: 182062 - RNA, 19 nt, Homo sapiens
  misc_RNA (1)...(19): siRNA sense strand
cagaagacuuuggcauugu

SEQ ID NO: 182063 - RNA, 19 nt, Homo sapiens
  misc_RNA (1)...(19): siRNA sense strand
gguguuggcucuauuugcu

SEQ ID NO: 182064 - RNA, 19 nt, Homo sapiens
  misc_RNA (1)...(19): siRNA sense strand
ugucuggaaugcucaaugu

SEQ ID NO: 182065 - RNA, 19 nt, Homo sapiens
  misc_RNA (1)...(19): siRNA sense strand
gcaguacaacaucuacaau

SEQ ID NO: 182066 - RNA, 19 nt, Homo sapiens
  misc_RNA (1)...(19): siRNA sense strand
ccucggcaacaauuacuua

SEQ ID NO: 182067 - RNA, 19 nt, Homo sapiens
  misc_RNA (1)...(19): siRNA sense strand
cauuagacguggaacuauc

SEQ ID NO: 182068 - RNA, 19 nt, Homo sapiens
  misc_RNA (1)...(19): siRNA sense strand
cuacaauguuggcucaagu

SEQ ID NO: 182069 - RNA, 19 nt, Homo sapiens
  misc_RNA (1)...(19): siRNA sense strand
ucuauuugcugucacucaa

SEQ ID NO: 182070 - RNA, 19 nt, Homo sapiens
  misc_RNA (1)...(19): siRNA sense strand
ggaaugcucaaugucaaau

SEQ ID NO: 182071 - RNA, 19 nt, Homo sapiens
  misc_RNA (1)...(19): siRNA sense strand
caacuucaccucggcaaca

SEQ ID NO: 182072 - RNA, 19 nt, Homo sapiens
  misc_RNA (1)...(19): siRNA sense strand
agaagacuuuggcauugug

SEQ ID NO: 182073 - RNA, 19 nt, Homo sapiens
  misc_RNA (1)...(19): siRNA sense strand
gcauuagacguggaacuau

SEQ ID NO: 182074 - RNA, 19 nt, Homo sapiens
  misc_RNA (1)...(19): siRNA sense strand
caaggcugguuauuucaac

SEQ ID NO: 182075 - RNA, 19 nt, Homo sapiens
  misc_RNA (1)...(19): siRNA sense strand
gcugucauuugugguguug

SEQ ID NO: 182076 - RNA, 19 nt, Homo sapiens
  misc_RNA (1)...(19): siRNA sense strand
acguggaacuaucugauga

SEQ ID NO: 182077 - RNA, 19 nt, Homo sapiens
  misc_RNA (1)...(19): siRNA sense strand
gagaccugaccuugcagua

SEQ ID NO: 182078 - RNA, 19 nt, Homo sapiens
  misc_RNA (1)...(19): siRNA sense strand
gcgauucuccccucauuuu

SEQ ID NO: 182079 - RNA, 19 nt, Homo sapiens
  misc_RNA (1)...(19): siRNA sense strand
caguacaacaucuacaaug

SEQ ID NO: 182080 - RNA, 19 nt, Homo sapiens
  misc_RNA (1)...(19): siRNA sense strand
uggcucagcgggaguuuga

SEQ ID NO: 182081 - RNA, 19 nt, Homo sapiens
  misc_RNA (1)...(19): siRNA sense strand
gcaaugucucccacacugu

SEQ ID NO: 182082 - RNA, 19 nt, Homo sapiens
  misc_RNA (1)...(19): siRNA sense strand
cuggaaugcucaaugucaa

SEQ ID NO: 182083 - RNA, 19 nt, Homo sapiens
  misc_RNA (1)...(19): siRNA sense strand
gacguggaacuaucugaug

SEQ ID NO: 182084 - RNA, 19 nt, Homo sapiens
  misc_RNA (1)...(19): siRNA sense strand
uccagaagacuuuggcauu

SEQ ID NO: 182085 - RNA, 19 nt, Homo sapiens
  misc_RNA (1)...(19): siRNA sense strand
gaaugcucaaugucaaaug

SEQ ID NO: 182086 - RNA, 19 nt, Homo sapiens
  misc_RNA (1)...(19): siRNA sense strand
caagaggaaauaugacacu

SEQ ID NO: 182087 - RNA, 19 nt, Homo sapiens
  misc_RNA (1)...(19): siRNA sense strand
cggcaacaauuacuuaccu

SEQ ID NO: 182088 - RNA, 19 nt, Homo sapiens
  misc_RNA (1)...(19): siRNA sense strand
ugucaaaugggaccggauu

SEQ ID NO: 182089 - RNA, 19 nt, Homo sapiens
  misc_RNA (1)...(19): siRNA sense strand
ucaugacccuucccuccau

SEQ ID NO: 182090 - RNA, 19 nt, Homo sapiens
  misc_RNA (1)...(19): siRNA sense strand
gcugguuauuucaacuuca

SEQ ID NO: 182091 - RNA, 19 nt, Homo sapiens
  misc_RNA (1)...(19): siRNA sense strand
gaagacuuuggcauugugu

SEQ ID NO: 182092 - RNA, 19 nt, Homo sapiens
  misc_RNA (1)...(19): siRNA sense strand
ucaaggcugguuauuucaa

SEQ ID NO: 182093 - RNA, 19 nt, Homo sapiens
  misc_RNA (1)...(19): siRNA sense strand
ugcauuagacguggaacua

SEQ ID NO: 182094 - RNA, 19 nt, Homo sapiens
  misc_RNA (1)...(19): siRNA sense strand
gaugagaucuccuuuguca

SEQ ID NO: 182095 - RNA, 19 nt, Homo sapiens
  misc_RNA (1)...(19): siRNA sense strand
gagagaagaucaagucaga

SEQ ID NO: 182096 - RNA, 19 nt, Homo sapiens
  misc_RNA (1)...(19): siRNA sense strand
ggaagggaauguccaaaga

SEQ ID NO: 182097 - RNA, 19 nt, Homo sapiens
  misc_RNA (1)...(19): siRNA sense strand
ggugaaagguuccaugaau

SEQ ID NO: 182098 - RNA, 19 nt, Homo sapiens
  misc_RNA (1)...(19): siRNA sense strand
gaaaguaaagguaaagaug

SEQ ID NO: 182099 - RNA, 19 nt, Homo sapiens
  misc_RNA (1)...(19): siRNA sense strand
gaagaagaaaguaaaggua

SEQ ID NO: 182100 - RNA, 19 nt, Homo sapiens
  misc_RNA (1)...(19): siRNA sense strand
gacuuaaacugcuuacaaa

SEQ ID NO: 182101 - RNA, 19 nt, Homo sapiens
  misc_RNA (1)...(19): siRNA sense strand
ggacuuaaacugcuuacaa

SEQ ID NO: 182102 - RNA, 19 nt, Homo sapiens
  misc_RNA (1)...(19): siRNA sense strand
cgaggacucugaagaagaa

SEQ ID NO: 182103 - RNA, 19 nt, Homo sapiens
  misc_RNA (1)...(19): siRNA sense strand
gcaagaccuuugacuacaa

SEQ ID NO: 182104 - RNA, 19 nt, Homo sapiens
  misc_RNA (1)...(19): siRNA sense strand
gaacaugaacgaggaagaa

SEQ ID NO: 182105 - RNA, 19 nt, Homo sapiens
  misc_RNA (1)...(19): siRNA sense strand
gaucuccuuugucaacuuu

SEQ ID NO: 182106 - RNA, 19 nt, Homo sapiens
  misc_RNA (1)...(19): siRNA sense strand
guaaugagggugacaguga

SEQ ID NO: 182107 - RNA, 19 nt, Homo sapiens
  misc_RNA (1)...(19): siRNA sense strand
gaagaagaacuagccagua

SEQ ID NO: 182108 - RNA, 19 nt, Homo sapiens
  misc_RNA (1)...(19): siRNA sense strand
caaagaagaagaagaaagu

SEQ ID NO: 182109 - RNA, 19 nt, Homo sapiens
  misc_RNA (1)...(19): siRNA sense strand
uaugauggcuuccgagaau

SEQ ID NO: 182110 - RNA, 19 nt, Homo sapiens
  misc_RNA (1)...(19): siRNA sense strand
gggaggagaaugccaauga

SEQ ID NO: 182111 - RNA, 19 nt, Homo sapiens
  misc_RNA (1)...(19): siRNA sense strand
gagcgaggacucugaagaa

SEQ ID NO: 182112 - RNA, 19 nt, Homo sapiens
  misc_RNA (1)...(19): siRNA sense strand
gagaaucggaguuugagaa

SEQ ID NO: 182113 - RNA, 19 nt, Homo sapiens
  misc_RNA (1)...(19): siRNA sense strand
cgccagauguucuuuguga

SEQ ID NO: 182114 - RNA, 19 nt, Homo sapiens
  misc_RNA (1)...(19): siRNA sense strand
gugaaagguuccaugaaug

SEQ ID NO: 182115 - RNA, 19 nt, Homo sapiens
  misc_RNA (1)...(19): siRNA sense strand
gcauugagagggaggagua

SEQ ID NO: 182116 - RNA, 19 nt, Homo sapiens
  misc_RNA (1)...(19): siRNA sense strand
gaauggccaugucuacaag

SEQ ID NO: 182117 - RNA, 19 nt, Homo sapiens
  misc_RNA (1)...(19): siRNA sense strand
gacauuucguugacucuga

SEQ ID NO: 182118 - RNA, 19 nt, Homo sapiens
  misc_RNA (1)...(19): siRNA sense strand
cagagacacuggaguucaa

SEQ ID NO: 182119 - RNA, 19 nt, Homo sapiens
  misc_RNA (1)...(19): siRNA sense strand
cagaggaguuugacagcaa

SEQ ID NO: 182120 - RNA, 19 nt, Homo sapiens
  misc_RNA (1)...(19): siRNA sense strand
gaacccaagcuacgaugaa

SEQ ID NO: 182121 - RNA, 19 nt, Homo sapiens
  misc_RNA (1)...(19): siRNA sense strand
ugaaagguuccaugaauga

SEQ ID NO: 182122 - RNA, 19 nt, Homo sapiens
  misc_RNA (1)...(19): siRNA sense strand
ucgaugagaucuccuuugu

SEQ ID NO: 182123 - RNA, 19 nt, Homo sapiens
  misc_RNA (1)...(19): siRNA sense strand
gcucugggccauggacuua

SEQ ID NO: 182124 - RNA, 19 nt, Homo sapiens
  misc_RNA (1)...(19): siRNA sense strand
cccagaauguguugucaaa

SEQ ID NO: 182125 - RNA, 19 nt, Homo sapiens
  misc_RNA (1)...(19): siRNA sense strand
ggaguucaacgacgucuau

SEQ ID NO: 182126 - RNA, 19 nt, Homo sapiens
  misc_RNA (1)...(19): siRNA sense strand
gaagaagaagaaaguaaag

SEQ ID NO: 182127 - RNA, 19 nt, Homo sapiens
  misc_RNA (1)...(19): siRNA sense strand
agaagaaaccgaugaguca

SEQ ID NO: 182128 - RNA, 19 nt, Homo sapiens
  misc_RNA (1)...(19): siRNA sense strand
caggaucccucuaugagau

SEQ ID NO: 182129 - RNA, 19 nt, Homo sapiens
  misc_RNA (1)...(19): siRNA sense strand
cagaauguguugucaaagg

SEQ ID NO: 182130 - RNA, 19 nt, Homo sapiens
  misc_RNA (1)...(19): siRNA sense strand
caaagaauggccaugucua

SEQ ID NO: 182131 - RNA, 19 nt, Homo sapiens
  misc_RNA (1)...(19): siRNA sense strand
gccuugagcuaauggagaa

SEQ ID NO: 182132 - RNA, 19 nt, Homo sapiens
  misc_RNA (1)...(19): siRNA sense strand
gaguuugugucuagugaug

SEQ ID NO: 182133 - RNA, 19 nt, Homo sapiens
  misc_RNA (1)...(19): siRNA sense strand
ugaauaugcugacucugau

SEQ ID NO: 182134 - RNA, 19 nt, Homo sapiens
  misc_RNA (1)...(19): siRNA sense strand
ggaguuaacagaagguauc

SEQ ID NO: 182135 - RNA, 19 nt, Homo sapiens
  misc_RNA (1)...(19): siRNA sense strand
aagaagaacuagccaguac

SEQ ID NO: 182136 - RNA, 19 nt, Homo sapiens
  misc_RNA (1)...(19): siRNA sense strand
gcaccacaggcaagaauga

SEQ ID NO: 182137 - RNA, 19 nt, Homo sapiens
  misc_RNA (1)...(19): siRNA sense strand
ggcagcugcuuuccuuuga

SEQ ID NO: 182138 - RNA, 19 nt, Homo sapiens
  misc_RNA (1)...(19): siRNA sense strand
ggccaugucuacaaguaug

SEQ ID NO: 182139 - RNA, 19 nt, Homo sapiens
  misc_RNA (1)...(19): siRNA sense strand
gaggugaaagguuccauga

SEQ ID NO: 182140 - RNA, 19 nt, Homo sapiens
  misc_RNA (1)...(19): siRNA sense strand
ggcaagaccuuugacuaca

SEQ ID NO: 182141 - RNA, 19 nt, Homo sapiens
  misc_RNA (1)...(19): siRNA sense strand
caagaaggcaggcgagauc

SEQ ID NO: 182142 - RNA, 19 nt, Homo sapiens
  misc_RNA (1)...(19): siRNA sense strand
aagcagggcacucaguaua

SEQ ID NO: 182143 - RNA, 19 nt, Homo sapiens
  misc_RNA (1)...(19): siRNA sense strand
ccaagcagggcacucagua

SEQ ID NO: 182144 - RNA, 19 nt, Homo sapiens
  misc_RNA (1)...(19): siRNA sense strand
gaaggaggaaggcaagauc

SEQ ID NO: 182145 - RNA, 19 nt, Homo sapiens
  misc_RNA (1)...(19): siRNA sense strand
gaagaaaguaaagguaaag

SEQ ID NO: 182146 - RNA, 19 nt, Homo sapiens
  misc_RNA (1)...(19): siRNA sense strand
gugggcagcugcuuuccuu

SEQ ID NO: 182147 - RNA, 19 nt, Homo sapiens
  misc_RNA (1)...(19): siRNA sense strand
gauggucgacugagguuga

SEQ ID NO: 182148 - RNA, 19 nt, Homo sapiens
  misc_RNA (1)...(19): siRNA sense strand
gaugaggaccagcaugaug

SEQ ID NO: 182149 - RNA, 19 nt, Homo sapiens
  misc_RNA (1)...(19): siRNA sense strand
ggacucugaagaagaagaa

SEQ ID NO: 182150 - RNA, 19 nt, Homo sapiens
  misc_RNA (1)...(19): siRNA sense strand
guaaagguaaagauggaaa

SEQ ID NO: 182151 - RNA, 19 nt, Homo sapiens
  misc_RNA (1)...(19): siRNA sense strand
agucaaagaagaagaagaa

SEQ ID NO: 182152 - RNA, 19 nt, Homo sapiens
  misc_RNA (1)...(19): siRNA sense strand
cuacuacucguuccuuuga

SEQ ID NO: 182153 - RNA, 19 nt, Homo sapiens
  misc_RNA (1)...(19): siRNA sense strand
ggagcgaggacucugaaga

SEQ ID NO: 182154 - RNA, 19 nt, Homo sapiens
  misc_RNA (1)...(19): siRNA sense strand
aagggaauguccaaagaga

SEQ ID NO: 182155 - RNA, 19 nt, Homo sapiens
  misc_RNA (1)...(19): siRNA sense strand
cgaugaauaugcugacucu

SEQ ID NO: 182156 - RNA, 19 nt, Homo sapiens
  misc_RNA (1)...(19): siRNA sense strand
caagaccuuugacuacaag

SEQ ID NO: 182157 - RNA, 19 nt, Homo sapiens
  misc_RNA (1)...(19): siRNA sense strand
gaagaacuagccaguacuc

SEQ ID NO: 182158 - RNA, 19 nt, Homo sapiens
  misc_RNA (1)...(19): siRNA sense strand
gaagaucaagucagaccau

SEQ ID NO: 182159 - RNA, 19 nt, Homo sapiens
  misc_RNA (1)...(19): siRNA sense strand
ucugccagcuccuccagua

SEQ ID NO: 182160 - RNA, 19 nt, Homo sapiens
  misc_RNA (1)...(19): siRNA sense strand
gugaagaggaggaagaugu

SEQ ID NO: 182161 - RNA, 19 nt, Homo sapiens
  misc_RNA (1)...(19): siRNA sense strand
gcaagauccgggaggagaa

SEQ ID NO: 182162 - RNA, 19 nt, Homo sapiens
  misc_RNA (1)...(19): siRNA sense strand
gcagagacacuggaguuca

SEQ ID NO: 182163 - RNA, 19 nt, Homo sapiens
  misc_RNA (1)...(19): siRNA sense strand
ccuuugacuuugaaauuga

SEQ ID NO: 182164 - RNA, 19 nt, Homo sapiens
  misc_RNA (1)...(19): siRNA sense strand
gggcagcugcuuuccuuug

SEQ ID NO: 182165 - RNA, 19 nt, Homo sapiens
  misc_RNA (1)...(19): siRNA sense strand
gaauagcaagacaggcaaa

SEQ ID NO: 182166 - RNA, 19 nt, Homo sapiens
  misc_RNA (1)...(19): siRNA sense strand
cuaagagggacaagucaaa

SEQ ID NO: 182167 - RNA, 19 nt, Homo sapiens
  misc_RNA (1)...(19): siRNA sense strand
gaauguccaaagagaagaa

SEQ ID NO: 182168 - RNA, 19 nt, Homo sapiens
  misc_RNA (1)...(19): siRNA sense strand
ggaggagaaugccaaugac

SEQ ID NO: 182169 - RNA, 19 nt, Homo sapiens
  misc_RNA (1)...(19): siRNA sense strand
cagauguucuuugugauca

SEQ ID NO: 182170 - RNA, 19 nt, Homo sapiens
  misc_RNA (1)...(19): siRNA sense strand
ucauggaggugcgcuucua

SEQ ID NO: 182171 - RNA, 19 nt, Homo sapiens
  misc_RNA (1)...(19): siRNA sense strand
ccagccagucuuugagaua

SEQ ID NO: 182172 - RNA, 19 nt, Homo sapiens
  misc_RNA (1)...(19): siRNA sense strand
gagggucggcucaccaaga

SEQ ID NO: 182173 - RNA, 19 nt, Homo sapiens
  misc_RNA (1)...(19): siRNA sense strand
aagaguuugugucuaguga

SEQ ID NO: 182174 - RNA, 19 nt, Homo sapiens
  misc_RNA (1)...(19): siRNA sense strand
gcgagagcuucaagagcaa

SEQ ID NO: 182175 - RNA, 19 nt, Homo sapiens
  misc_RNA (1)...(19): siRNA sense strand
aaguaaagguaaagaugga

SEQ ID NO: 182176 - RNA, 19 nt, Homo sapiens
  misc_RNA (1)...(19): siRNA sense strand
gaagggaauguccaaagag

SEQ ID NO: 182177 - RNA, 19 nt, Homo sapiens
  misc_RNA (1)...(19): siRNA sense strand
ggucagccgggucaugaaa

SEQ ID NO: 182178 - RNA, 19 nt, Homo sapiens
  misc_RNA (1)...(19): siRNA sense strand
gcaagaaugaggugacacu

SEQ ID NO: 182179 - RNA, 19 nt, Homo sapiens
  misc_RNA (1)...(19): siRNA sense strand
ggaggagcgaggacucuga

SEQ ID NO: 182180 - RNA, 19 nt, Homo sapiens
  misc_RNA (1)...(19): siRNA sense strand
ggagagaacaagagcaaaa

SEQ ID NO: 182181 - RNA, 19 nt, Homo sapiens
  misc_RNA (1)...(19): siRNA sense strand
gggacaagucaaagaagaa

SEQ ID NO: 182182 - RNA, 19 nt, Homo sapiens
  misc_RNA (1)...(19): siRNA sense strand
ugacagcagcgaugacuca

SEQ ID NO: 182183 - RNA, 19 nt, Homo sapiens
  misc_RNA (1)...(19): siRNA sense strand
cguugacucugaacaugaa

SEQ ID NO: 182184 - RNA, 19 nt, Homo sapiens
  misc_RNA (1)...(19): siRNA sense strand
ccaaggacgaggacauuuc

SEQ ID NO: 182185 - RNA, 19 nt, Homo sapiens
  misc_RNA (1)...(19): siRNA sense strand
agaggcccaugucugcaua

SEQ ID NO: 182186 - RNA, 19 nt, Homo sapiens
  misc_RNA (1)...(19): siRNA sense strand
gcgaggacucugaagaaga

SEQ ID NO: 182187 - RNA, 19 nt, Homo sapiens
  misc_RNA (1)...(19): siRNA sense strand
gggaauguccaaagagaag

SEQ ID NO: 182188 - RNA, 19 nt, Homo sapiens
  misc_RNA (1)...(19): siRNA sense strand
gucaaaggcggauguaauc

SEQ ID NO: 182189 - RNA, 19 nt, Homo sapiens
  misc_RNA (1)...(19): siRNA sense strand
cuuaaacugcuuacaaaga

SEQ ID NO: 182190 - RNA, 19 nt, Homo sapiens
  misc_RNA (1)...(19): siRNA sense strand
gccagcuccuccaguaaug

SEQ ID NO: 182191 - RNA, 19 nt, Homo sapiens
  misc_RNA (1)...(19): siRNA sense strand
ggacaagucaaagaagaag

SEQ ID NO: 182192 - RNA, 19 nt, Homo sapiens
  misc_RNA (1)...(19): siRNA sense strand
gaggagcgaggacucugaa

SEQ ID NO: 182193 - RNA, 19 nt, Homo sapiens
  misc_RNA (1)...(19): siRNA sense strand
acaagucaaagaagaagaa

SEQ ID NO: 182194 - RNA, 19 nt, Homo sapiens
  misc_RNA (1)...(19): siRNA sense strand
gcaaagaacucacaugcua

SEQ ID NO: 182195 - RNA, 19 nt, Homo sapiens
  misc_RNA (1)...(19): siRNA sense strand
gaacuaaacuaucagguaa

SEQ ID NO: 182196 - RNA, 19 nt, Homo sapiens
  misc_RNA (1)...(19): siRNA sense strand
gaaaggaggcucucaguaa

SEQ ID NO: 182197 - RNA, 19 nt, Homo sapiens
  misc_RNA (1)...(19): siRNA sense strand
gcaaugaagucuccuuauu

SEQ ID NO: 182198 - RNA, 19 nt, Homo sapiens
  misc_RNA (1)...(19): siRNA sense strand
gagaaauccuuacaaaguu

SEQ ID NO: 182199 - RNA, 19 nt, Homo sapiens
  misc_RNA (1)...(19): siRNA sense strand
gaauuugacuacagguaua

SEQ ID NO: 182200 - RNA, 19 nt, Homo sapiens
  misc_RNA (1)...(19): siRNA sense strand
gaagcaauauuggaucuaa

SEQ ID NO: 182201 - RNA, 19 nt, Homo sapiens
  misc_RNA (1)...(19): siRNA sense strand
ggaggcagcuucuaacaau

SEQ ID NO: 182202 - RNA, 19 nt, Homo sapiens
  misc_RNA (1)...(19): siRNA sense strand
gaacugcuuuacacuauug

SEQ ID NO: 182203 - RNA, 19 nt, Homo sapiens
  misc_RNA (1)...(19): siRNA sense strand
gcagguggaucaauucuau

SEQ ID NO: 182204 - RNA, 19 nt, Homo sapiens
  misc_RNA (1)...(19): siRNA sense strand
gcauguagcugugguuauu

SEQ ID NO: 182205 - RNA, 19 nt, Homo sapiens
  misc_RNA (1)...(19): siRNA sense strand
ggaaucaaguccaacaguu

SEQ ID NO: 182206 - RNA, 19 nt, Homo sapiens
  misc_RNA (1)...(19): siRNA sense strand
gaaucaaguccaacaguua

SEQ ID NO: 182207 - RNA, 19 nt, Homo sapiens
  misc_RNA (1)...(19): siRNA sense strand
guaccuauauccugacauu

SEQ ID NO: 182208 - RNA, 19 nt, Homo sapiens
  misc_RNA (1)...(19): siRNA sense strand
gggcauccaucauuuggua

SEQ ID NO: 182209 - RNA, 19 nt, Homo sapiens
  misc_RNA (1)...(19): siRNA sense strand
gaacucacaugcuagaaag

SEQ ID NO: 182210 - RNA, 19 nt, Homo sapiens
  misc_RNA (1)...(19): siRNA sense strand
cuagagaaauccuuacaaa

SEQ ID NO: 182211 - RNA, 19 nt, Homo sapiens
  misc_RNA (1)...(19): siRNA sense strand
aaaggaggcucucaguaaa

SEQ ID NO: 182212 - RNA, 19 nt, Homo sapiens
  misc_RNA (1)...(19): siRNA sense strand
gaacggcuguugcuaaagg

SEQ ID NO: 182213 - RNA, 19 nt, Homo sapiens
  misc_RNA (1)...(19): siRNA sense strand
gaucagagugacaagaaua

SEQ ID NO: 182214 - RNA, 19 nt, Homo sapiens
  misc_RNA (1)...(19): siRNA sense strand
agacaaagccuucgguaaa

SEQ ID NO: 182215 - RNA, 19 nt, Homo sapiens
  misc_RNA (1)...(19): siRNA sense strand
acacagaucugccucuaug

SEQ ID NO: 182216 - RNA, 19 nt, Homo sapiens
  misc_RNA (1)...(19): siRNA sense strand
gaagagaggagaauauugg

SEQ ID NO: 182217 - RNA, 19 nt, Homo sapiens
  misc_RNA (1)...(19): siRNA sense strand
cagaacugcuuuacacuau

SEQ ID NO: 182218 - RNA, 19 nt, Homo sapiens
  misc_RNA (1)...(19): siRNA sense strand
uaauacaacuggaugaaca

SEQ ID NO: 182219 - RNA, 19 nt, Homo sapiens
  misc_RNA (1)...(19): siRNA sense strand
caaucuagcuacagugaug

SEQ ID NO: 182220 - RNA, 19 nt, Homo sapiens
  misc_RNA (1)...(19): siRNA sense strand
gaacuucauuccauaacgu

SEQ ID NO: 182221 - RNA, 19 nt, Homo sapiens
  misc_RNA (1)...(19): siRNA sense strand
cagaacaagauaccaaaua

SEQ ID NO: 182222 - RNA, 19 nt, Homo sapiens
  misc_RNA (1)...(19): siRNA sense strand
caagaauguuucaacucua

SEQ ID NO: 182223 - RNA, 19 nt, Homo sapiens
  misc_RNA (1)...(19): siRNA sense strand
acaaaguucuucaguuuca

SEQ ID NO: 182224 - RNA, 19 nt, Homo sapiens
  misc_RNA (1)...(19): siRNA sense strand
caaugggagucucucagua

SEQ ID NO: 182225 - RNA, 19 nt, Homo sapiens
  misc_RNA (1)...(19): siRNA sense strand
gcaacgauucuucuucaaa

SEQ ID NO: 182226 - RNA, 19 nt, Homo sapiens
  misc_RNA (1)...(19): siRNA sense strand
ucaguagaauuucgacauu

SEQ ID NO: 182227 - RNA, 19 nt, Homo sapiens
  misc_RNA (1)...(19): siRNA sense strand
uaacucagaucaacuccau

SEQ ID NO: 182228 - RNA, 19 nt, Homo sapiens
  misc_RNA (1)...(19): siRNA sense strand
cugcgagacuacaaaguua

SEQ ID NO: 182229 - RNA, 19 nt, Homo sapiens
  misc_RNA (1)...(19): siRNA sense strand
aaacacagaucugccucua

SEQ ID NO: 182230 - RNA, 19 nt, Homo sapiens
  misc_RNA (1)...(19): siRNA sense strand
gcagaugacagaacaagau

SEQ ID NO: 182231 - RNA, 19 nt, Homo sapiens
  misc_RNA (1)...(19): siRNA sense strand
cagaggccguugguacuua

SEQ ID NO: 182232 - RNA, 19 nt, Homo sapiens
  misc_RNA (1)...(19): siRNA sense strand
caagaacucauuugugguu

SEQ ID NO: 182233 - RNA, 19 nt, Homo sapiens
  misc_RNA (1)...(19): siRNA sense strand
uagcugugguuauuucaaa

SEQ ID NO: 182234 - RNA, 19 nt, Homo sapiens
  misc_RNA (1)...(19): siRNA sense strand
gagauuccacucuguagaa

SEQ ID NO: 182235 - RNA, 19 nt, Homo sapiens
  misc_RNA (1)...(19): siRNA sense strand
gaaggcaauuggagaaacu

SEQ ID NO: 182236 - RNA, 19 nt, Homo sapiens
  misc_RNA (1)...(19): siRNA sense strand
ccaaauacuuagaagaucu

SEQ ID NO: 182237 - RNA, 19 nt, Homo sapiens
  misc_RNA (1)...(19): siRNA sense strand
ggaaauccaaugcauguag

SEQ ID NO: 182238 - RNA, 19 nt, Homo sapiens
  misc_RNA (1)...(19): siRNA sense strand
cauggugacugaagaacuu

SEQ ID NO: 182239 - RNA, 19 nt, Homo sapiens
  misc_RNA (1)...(19): siRNA sense strand
ugccagaacuaaacuauca

SEQ ID NO: 182240 - RNA, 19 nt, Homo sapiens
  misc_RNA (1)...(19): siRNA sense strand
gaacaccaugcucauagaa

SEQ ID NO: 182241 - RNA, 19 nt, Homo sapiens
  misc_RNA (1)...(19): siRNA sense strand
ggaagagaggagaauauug

SEQ ID NO: 182242 - RNA, 19 nt, Homo sapiens
  misc_RNA (1)...(19): siRNA sense strand
aaccgaagauuuguacuuu

SEQ ID NO: 182243 - RNA, 19 nt, Homo sapiens
  misc_RNA (1)...(19): siRNA sense strand
acaagaauguuucaacucu

SEQ ID NO: 182244 - RNA, 19 nt, Homo sapiens
  misc_RNA (1)...(19): siRNA sense strand
agagaaauccuuacaaagu

SEQ ID NO: 182245 - RNA, 19 nt, Homo sapiens
  misc_RNA (1)...(19): siRNA sense strand
caacgauucuucuucaaaa

SEQ ID NO: 182246 - RNA, 19 nt, Homo sapiens
  misc_RNA (1)...(19): siRNA sense strand
caaugaagucuccuuauuc

SEQ ID NO: 182247 - RNA, 19 nt, Homo sapiens
  misc_RNA (1)...(19): siRNA sense strand
ugacaaagguuauguuccu

SEQ ID NO: 182248 - RNA, 19 nt, Homo sapiens
  misc_RNA (1)...(19): siRNA sense strand
ccgaagauuuguacuuugu

SEQ ID NO: 182249 - RNA, 19 nt, Homo sapiens
  misc_RNA (1)...(19): siRNA sense strand
guuaaggcaucaauugaca

SEQ ID NO: 182250 - RNA, 19 nt, Homo sapiens
  misc_RNA (1)...(19): siRNA sense strand
gugaugagcuggcaguuuu

SEQ ID NO: 182251 - RNA, 19 nt, Homo sapiens
  misc_RNA (1)...(19): siRNA sense strand
gcuugggcauccaucauuu

SEQ ID NO: 182252 - RNA, 19 nt, Homo sapiens
  misc_RNA (1)...(19): siRNA sense strand
gugaugauuuccaauguca

SEQ ID NO: 182253 - RNA, 19 nt, Homo sapiens
  misc_RNA (1)...(19): siRNA sense strand
gggaagagaggagaauauu

SEQ ID NO: 182254 - RNA, 19 nt, Homo sapiens
  misc_RNA (1)...(19): siRNA sense strand
gguacaacgugucaaccaa

SEQ ID NO: 182255 - RNA, 19 nt, Homo sapiens
  misc_RNA (1)...(19): siRNA sense strand
ugacaagaauguuucaacu

SEQ ID NO: 182256 - RNA, 19 nt, Homo sapiens
  misc_RNA (1)...(19): siRNA sense strand
agaacaagauaccaaauac

SEQ ID NO: 182257 - RNA, 19 nt, Homo sapiens
  misc_RNA (1)...(19): siRNA sense strand
ggaaauucggcaucuguug

SEQ ID NO: 182258 - RNA, 19 nt, Homo sapiens
  misc_RNA (1)...(19): siRNA sense strand
uggagcagguggaucaauu

SEQ ID NO: 182259 - RNA, 19 nt, Homo sapiens
  misc_RNA (1)...(19): siRNA sense strand
ggucuuaacucagaucaac

SEQ ID NO: 182260 - RNA, 19 nt, Homo sapiens
  misc_RNA (1)...(19): siRNA sense strand
gggagucucucaguagaau

SEQ ID NO: 182261 - RNA, 19 nt, Homo sapiens
  misc_RNA (1)...(19): siRNA sense strand
cuaagcaaccgaagauuug

SEQ ID NO: 182262 - RNA, 19 nt, Homo sapiens
  misc_RNA (1)...(19): siRNA sense strand
aggcaucaauugacaagaa

SEQ ID NO: 182263 - RNA, 19 nt, Homo sapiens
  misc_RNA (1)...(19): siRNA sense strand
cagccucgauuucaagaga

SEQ ID NO: 182264 - RNA, 19 nt, Homo sapiens
  misc_RNA (1)...(19): siRNA sense strand
caagauaccaaauacuuag

SEQ ID NO: 182265 - RNA, 19 nt, Homo sapiens
  misc_RNA (1)...(19): siRNA sense strand
ggucguguuuccaaagaga

SEQ ID NO: 182266 - RNA, 19 nt, Homo sapiens
  misc_RNA (1)...(19): siRNA sense strand
gacaaagccuucgguaaac

SEQ ID NO: 182267 - RNA, 19 nt, Homo sapiens
  misc_RNA (1)...(19): siRNA sense strand
caguagaauuucgacauuu

SEQ ID NO: 182268 - RNA, 19 nt, Homo sapiens
  misc_RNA (1)...(19): siRNA sense strand
caacugagaaggcaauugg

SEQ ID NO: 182269 - RNA, 19 nt, Homo sapiens
  misc_RNA (1)...(19): siRNA sense strand
acaccaugcucauagaaga

SEQ ID NO: 182270 - RNA, 19 nt, Homo sapiens
  misc_RNA (1)...(19): siRNA sense strand
gcaagacgaauuugacuac

SEQ ID NO: 182271 - RNA, 19 nt, Homo sapiens
  misc_RNA (1)...(19): siRNA sense strand
gaaacuagaggagcaaucu

SEQ ID NO: 182272 - RNA, 19 nt, Homo sapiens
  misc_RNA (1)...(19): siRNA sense strand
agaacuaaacuaucaggua

SEQ ID NO: 182273 - RNA, 19 nt, Homo sapiens
  misc_RNA (1)...(19): siRNA sense strand
ggagcaaucuaccaaaaug

SEQ ID NO: 182274 - RNA, 19 nt, Homo sapiens
  misc_RNA (1)...(19): siRNA sense strand
aggaacggcuguugcuaaa

SEQ ID NO: 182275 - RNA, 19 nt, Homo sapiens
  misc_RNA (1)...(19): siRNA sense strand
uggcaacgauucuucuuca

SEQ ID NO: 182276 - RNA, 19 nt, Homo sapiens
  misc_RNA (1)...(19): siRNA sense strand
ucagaaagacagaggaaug

SEQ ID NO: 182277 - RNA, 19 nt, Homo sapiens
  misc_RNA (1)...(19): siRNA sense strand
gaaaccauggcaacgauuc

SEQ ID NO: 182278 - RNA, 19 nt, Homo sapiens
  misc_RNA (1)...(19): siRNA sense strand
ugaacaccaugcucauaga

SEQ ID NO: 182279 - RNA, 19 nt, Homo sapiens
  misc_RNA (1)...(19): siRNA sense strand
ggaucagagugacaagaau

SEQ ID NO: 182280 - RNA, 19 nt, Homo sapiens
  misc_RNA (1)...(19): siRNA sense strand
cagaugacagaacaagaua

SEQ ID NO: 182281 - RNA, 19 nt, Homo sapiens
  misc_RNA (1)...(19): siRNA sense strand
agaaauccuuacaaaguuc

SEQ ID NO: 182282 - RNA, 19 nt, Homo sapiens
  misc_RNA (1)...(19): siRNA sense strand
uguaugcgguguugagaga

SEQ ID NO: 182283 - RNA, 19 nt, Homo sapiens
  misc_RNA (1)...(19): siRNA sense strand
gguggaccauucugaaagu

SEQ ID NO: 182284 - RNA, 19 nt, Homo sapiens
  misc_RNA (1)...(19): siRNA sense strand
gaaggaacggcuguugcua

SEQ ID NO: 182285 - RNA, 19 nt, Homo sapiens
  misc_RNA (1)...(19): siRNA sense strand
gucagucaguuaccuaaug

SEQ ID NO: 182286 - RNA, 19 nt, Homo sapiens
  misc_RNA (1)...(19): siRNA sense strand
ggaaaugagggcugucaca

SEQ ID NO: 182287 - RNA, 19 nt, Homo sapiens
  misc_RNA (1)...(19): siRNA sense strand
aguagaauuucgacauuug

SEQ ID NO: 182288 - RNA, 19 nt, Homo sapiens
  misc_RNA (1)...(19): siRNA sense strand
gagucucucaguagaauuu

SEQ ID NO: 182289 - RNA, 19 nt, Homo sapiens
  misc_RNA (1)...(19): siRNA sense strand
caaccgaagauuuguacuu

SEQ ID NO: 182290 - RNA, 19 nt, Homo sapiens
  misc_RNA (1)...(19): siRNA sense strand
gaggagcaaucuaccaaaa

SEQ ID NO: 182291 - RNA, 19 nt, Homo sapiens
  misc_RNA (1)...(19): siRNA sense strand
ucaauucuaugaugacaac

SEQ ID NO: 182292 - RNA, 19 nt, Homo sapiens
  misc_RNA (1)...(19): siRNA sense strand
ugacauucccaaagacaaa

SEQ ID NO: 182293 - RNA, 19 nt, Homo sapiens
  misc_RNA (1)...(19): siRNA sense strand
aaugaagucuccuuauucu

SEQ ID NO: 182294 - RNA, 19 nt, Homo sapiens
  misc_RNA (1)...(19): siRNA sense strand
ggaagaaagugaugaguuc

SEQ ID NO: 182295 - RNA, 19 nt, Homo sapiens
  misc_RNA (1)...(19): siRNA sense strand
gaagaaguuuccucucaaa

SEQ ID NO: 182296 - RNA, 19 nt, Homo sapiens
  misc_RNA (1)...(19): siRNA sense strand
caucagaaguauacaauug

SEQ ID NO: 182297 - RNA, 19 nt, Homo sapiens
  misc_RNA (1)...(19): siRNA sense strand
ugaagaagaugaugaagga

SEQ ID NO: 182298 - RNA, 19 nt, Homo sapiens
  misc_RNA (1)...(19): siRNA sense strand
uacaguggcugaucacaua

SEQ ID NO: 182299 - RNA, 19 nt, Homo sapiens
  misc_RNA (1)...(19): siRNA sense strand
gggaagaccucaauuacca

SEQ ID NO: 182300 - RNA, 19 nt, Homo sapiens
  misc_RNA (1)...(19): siRNA sense strand
agaagccucuuaagaagua

SEQ ID NO: 182301 - RNA, 19 nt, Homo sapiens
  misc_RNA (1)...(19): siRNA sense strand
ccaaggagcacaugaagaa

SEQ ID NO: 182302 - RNA, 19 nt, Homo sapiens
  misc_RNA (1)...(19): siRNA sense strand
agaaggagcuagaaucuca

SEQ ID NO: 182303 - RNA, 19 nt, Homo sapiens
  misc_RNA (1)...(19): siRNA sense strand
ggccagagccucagccaua

SEQ ID NO: 182304 - RNA, 19 nt, Homo sapiens
  misc_RNA (1)...(19): siRNA sense strand
ugacauggaugaggagauu

SEQ ID NO: 182305 - RNA, 19 nt, Homo sapiens
  misc_RNA (1)...(19): siRNA sense strand
agguggaggugcaauauua

SEQ ID NO: 182306 - RNA, 19 nt, Homo sapiens
  misc_RNA (1)...(19): siRNA sense strand
ccacagcucuucccuggau

SEQ ID NO: 182307 - RNA, 19 nt, Homo sapiens
  misc_RNA (1)...(19): siRNA sense strand
gcucuucccuggaugaugu

SEQ ID NO: 182308 - RNA, 19 nt, Homo sapiens
  misc_RNA (1)...(19): siRNA sense strand
gaagucaucagaaguauac

SEQ ID NO: 182309 - RNA, 19 nt, Homo sapiens
  misc_RNA (1)...(19): siRNA sense strand
gguggugucuaucguuauu

SEQ ID NO: 182310 - RNA, 19 nt, Homo sapiens
  misc_RNA (1)...(19): siRNA sense strand
gcauggaagucaucagaag

SEQ ID NO: 182311 - RNA, 19 nt, Homo sapiens
  misc_RNA (1)...(19): siRNA sense strand
ggaggauaauggcucuauu

SEQ ID NO: 182312 - RNA, 19 nt, Homo sapiens
  misc_RNA (1)...(19): siRNA sense strand
gauggacgaugaugccaau

SEQ ID NO: 182313 - RNA, 19 nt, Homo sapiens
  misc_RNA (1)...(19): siRNA sense strand
cgacguggaugacauggau

SEQ ID NO: 182314 - RNA, 19 nt, Homo sapiens
  misc_RNA (1)...(19): siRNA sense strand
ucucacagcucaugguaug

SEQ ID NO: 182315 - RNA, 19 nt, Homo sapiens
  misc_RNA (1)...(19): siRNA sense strand
ggacugugcugaagaugac

SEQ ID NO: 182316 - RNA, 19 nt, Homo sapiens
  misc_RNA (1)...(19): siRNA sense strand
gaccguggaugagguggua

SEQ ID NO: 182317 - RNA, 19 nt, Homo sapiens
  misc_RNA (1)...(19): siRNA sense strand
gaggauaauggcucuauug

SEQ ID NO: 182318 - RNA, 19 nt, Homo sapiens
  misc_RNA (1)...(19): siRNA sense strand
gaugagaucaaccuugcua

SEQ ID NO: 182319 - RNA, 19 nt, Homo sapiens
  misc_RNA (1)...(19): siRNA sense strand
ugaaggcucuggauacagu

SEQ ID NO: 182320 - RNA, 19 nt, Homo sapiens
  misc_RNA (1)...(19): siRNA sense strand
acaaacugauggacgauga

SEQ ID NO: 182321 - RNA, 19 nt, Homo sapiens
  misc_RNA (1)...(19): siRNA sense strand
ggaagucaucagaaguaua

SEQ ID NO: 182322 - RNA, 19 nt, Homo sapiens
  misc_RNA (1)...(19): siRNA sense strand
ggacgaugaugccaauggu

SEQ ID NO: 182323 - RNA, 19 nt, Homo sapiens
  misc_RNA (1)...(19): siRNA sense strand
gcugaaggcucuggauaca

SEQ ID NO: 182324 - RNA, 19 nt, Homo sapiens
  misc_RNA (1)...(19): siRNA sense strand
ccaccuggcuggcaagaag

SEQ ID NO: 182325 - RNA, 19 nt, Homo sapiens
  misc_RNA (1)...(19): siRNA sense strand
ggcugcagcugacacauga

SEQ ID NO: 182326 - RNA, 19 nt, Homo sapiens
  misc_RNA (1)...(19): siRNA sense strand
ucaaugccaugacuuccaa

SEQ ID NO: 182327 - RNA, 19 nt, Homo sapiens
  misc_RNA (1)...(19): siRNA sense strand
aaaagaagcugcgcgauga

SEQ ID NO: 182328 - RNA, 19 nt, Homo sapiens
  misc_RNA (1)...(19): siRNA sense strand
gaaguuuccucucaaaauc

SEQ ID NO: 182329 - RNA, 19 nt, Homo sapiens
  misc_RNA (1)...(19): siRNA sense strand
gacacaccaucuccaguug

SEQ ID NO: 182330 - RNA, 19 nt, Homo sapiens
  misc_RNA (1)...(19): siRNA sense strand
gggaggguacugagaauga

SEQ ID NO: 182331 - RNA, 19 nt, Homo sapiens
  misc_RNA (1)...(19): siRNA sense strand
gcugcugguuugccuauau

SEQ ID NO: 182332 - RNA, 19 nt, Homo sapiens
  misc_RNA (1)...(19): siRNA sense strand
ggugcaauauuacaacauc

SEQ ID NO: 182333 - RNA, 19 nt, Homo sapiens
  misc_RNA (1)...(19): siRNA sense strand
gcacaguggagguggagaa

SEQ ID NO: 182334 - RNA, 19 nt, Homo sapiens
  misc_RNA (1)...(19): siRNA sense strand
ucagaaguauacaauugga

SEQ ID NO: 182335 - RNA, 19 nt, Homo sapiens
  misc_RNA (1)...(19): siRNA sense strand
caacccugcucacuucauc

SEQ ID NO: 182336 - RNA, 19 nt, Homo sapiens
  misc_RNA (1)...(19): siRNA sense strand
gagcacaugaagaagauga

SEQ ID NO: 182337 - RNA, 19 nt, Homo sapiens
  misc_RNA (1)...(19): siRNA sense strand
auaaucaccucaaggacuu

SEQ ID NO: 182338 - RNA, 19 nt, Homo sapiens
  misc_RNA (1)...(19): siRNA sense strand
caauuaccaugacccaaca

SEQ ID NO: 182339 - RNA, 19 nt, Homo sapiens
  misc_RNA (1)...(19): siRNA sense strand
gaggugcaauauuacaaca

SEQ ID NO: 182340 - RNA, 19 nt, Homo sapiens
  misc_RNA (1)...(19): siRNA sense strand
gaaagcagagaaggagcua

SEQ ID NO: 182341 - RNA, 19 nt, Homo sapiens
  misc_RNA (1)...(19): siRNA sense strand
acaauuggaccguggauga

SEQ ID NO: 182342 - RNA, 19 nt, Homo sapiens
  misc_RNA (1)...(19): siRNA sense strand
ucucuugacucgccauaau

SEQ ID NO: 182343 - RNA, 19 nt, Homo sapiens
  misc_RNA (1)...(19): siRNA sense strand
gcagagaaggagcuagaau

SEQ ID NO: 182344 - RNA, 19 nt, Homo sapiens
  misc_RNA (1)...(19): siRNA sense strand
agaagaugaugaaggacuu

SEQ ID NO: 182345 - RNA, 19 nt, Homo sapiens
  misc_RNA (1)...(19): siRNA sense strand
cguaacauccacaaacuga

SEQ ID NO: 182346 - RNA, 19 nt, Homo sapiens
  misc_RNA (1)...(19): siRNA sense strand
uggcugcccucaacauaga

SEQ ID NO: 182347 - RNA, 19 nt, Homo sapiens
  misc_RNA (1)...(19): siRNA sense strand
gauuugacccauuccgauu

SEQ ID NO: 182348 - RNA, 19 nt, Homo sapiens
  misc_RNA (1)...(19): siRNA sense strand
gauguaugcguccgucuug

SEQ ID NO: 182349 - RNA, 19 nt, Homo sapiens
  misc_RNA (1)...(19): siRNA sense strand
uaccaugacccaacaguga

SEQ ID NO: 182350 - RNA, 19 nt, Homo sapiens
  misc_RNA (1)...(19): siRNA sense strand
cagagggauuugacccauu

SEQ ID NO: 182351 - RNA, 19 nt, Homo sapiens
  misc_RNA (1)...(19): siRNA sense strand
cugcaccgcuggcaacaga

SEQ ID NO: 182352 - RNA, 19 nt, Homo sapiens
  misc_RNA (1)...(19): siRNA sense strand
cugguggugucuaucguua

SEQ ID NO: 182353 - RNA, 19 nt, Homo sapiens
  misc_RNA (1)...(19): siRNA sense strand
gccauaaucaccucaagga

SEQ ID NO: 182354 - RNA, 19 nt, Homo sapiens
  misc_RNA (1)...(19): siRNA sense strand
cagcugaaggcucuggaua

SEQ ID NO: 182355 - RNA, 19 nt, Homo sapiens
  misc_RNA (1)...(19): siRNA sense strand
ugacugacgacguggauga

SEQ ID NO: 182356 - RNA, 19 nt, Homo sapiens
  misc_RNA (1)...(19): siRNA sense strand
ugauguggauguggaagaa

SEQ ID NO: 182357 - RNA, 19 nt, Homo sapiens
  misc_RNA (1)...(19): siRNA sense strand
agagggauuugacccauuc

SEQ ID NO: 182358 - RNA, 19 nt, Homo sapiens
  misc_RNA (1)...(19): siRNA sense strand
gguggcugcccucaacaua

SEQ ID NO: 182359 - RNA, 19 nt, Homo sapiens
  misc_RNA (1)...(19): siRNA sense strand
auguggagcugccucagua

SEQ ID NO: 182360 - RNA, 19 nt, Homo sapiens
  misc_RNA (1)...(19): siRNA sense strand
agacacaccaucuccaguu

SEQ ID NO: 182361 - RNA, 19 nt, Homo sapiens
  misc_RNA (1)...(19): siRNA sense strand
gcgggaggguacugagaau

SEQ ID NO: 182362 - RNA, 19 nt, Homo sapiens
  misc_RNA (1)...(19): siRNA sense strand
acaccgagcugagcagagu

SEQ ID NO: 182363 - RNA, 19 nt, Homo sapiens
  misc_RNA (1)...(19): siRNA sense strand
gcagaguuuugccgaauug

SEQ ID NO: 182364 - RNA, 19 nt, Homo sapiens
  misc_RNA (1)...(19): siRNA sense strand
ugcaugaccuucaggaaag

SEQ ID NO: 182365 - RNA, 19 nt, Homo sapiens
  misc_RNA (1)...(19): siRNA sense strand
gcccaggccggaagaaguu

SEQ ID NO: 182366 - RNA, 19 nt, Homo sapiens
  misc_RNA (1)...(19): siRNA sense strand
cgaggugacagcagcauug

SEQ ID NO: 182367 - RNA, 19 nt, Homo sapiens
  misc_RNA (1)...(19): siRNA sense strand
cagggacugugcugaagau

SEQ ID NO: 182368 - RNA, 19 nt, Homo sapiens
  misc_RNA (1)...(19): siRNA sense strand
gagguggaggugcaauauu

SEQ ID NO: 182369 - RNA, 19 nt, Homo sapiens
  misc_RNA (1)...(19): siRNA sense strand
caguggagguggagaaggu

SEQ ID NO: 182370 - RNA, 19 nt, Homo sapiens
  misc_RNA (1)...(19): siRNA sense strand
gcacaugaagaagaugaug

SEQ ID NO: 182371 - RNA, 19 nt, Homo sapiens
  misc_RNA (1)...(19): siRNA sense strand
gugguacaguggcugauca

SEQ ID NO: 182372 - RNA, 19 nt, Homo sapiens
  misc_RNA (1)...(19): siRNA sense strand
ucuaacagcuaagcaagca

SEQ ID NO: 182373 - RNA, 19 nt, Homo sapiens
  misc_RNA (1)...(19): siRNA sense strand
cagagaaggagcuagaauc

SEQ ID NO: 182374 - RNA, 19 nt, Homo sapiens
  misc_RNA (1)...(19): siRNA sense strand
cgggaggccuugaggaaag

SEQ ID NO: 182375 - RNA, 19 nt, Homo sapiens
  misc_RNA (1)...(19): siRNA sense strand
ccuauauccagaaccguua

SEQ ID NO: 182376 - RNA, 19 nt, Homo sapiens
  misc_RNA (1)...(19): siRNA sense strand
guacaguggcugaucacau

SEQ ID NO: 182377 - RNA, 19 nt, Homo sapiens
  misc_RNA (1)...(19): siRNA sense strand
gcaauauuacaacaucaag

SEQ ID NO: 182378 - RNA, 19 nt, Homo sapiens
  misc_RNA (1)...(19): siRNA sense strand
gaagcugcgcgaugagauc

SEQ ID NO: 182379 - RNA, 19 nt, Homo sapiens
  misc_RNA (1)...(19): siRNA sense strand
gaagaugaugaaggacuug

SEQ ID NO: 182380 - RNA, 19 nt, Homo sapiens
  misc_RNA (1)...(19): siRNA sense strand
gggacugugcugaagauga

SEQ ID NO: 182381 - RNA, 19 nt, Homo sapiens
  misc_RNA (1)...(19): siRNA sense strand
gccagagccucagccauag

SEQ ID NO: 182382 - RNA, 19 nt, Homo sapiens
  misc_RNA (1)...(19): siRNA sense strand
gcaagccagccgaaacaca

SEQ ID NO: 182383 - RNA, 19 nt, Homo sapiens
  misc_RNA (1)...(19): siRNA sense strand
gcagacgaggcucucaaug

SEQ ID NO: 182384 - RNA, 19 nt, Homo sapiens
  misc_RNA (1)...(19): siRNA sense strand
uggaagaaagugaugaguu

SEQ ID NO: 182385 - RNA, 19 nt, Homo sapiens
  misc_RNA (1)...(19): siRNA sense strand
ggaggguacugagaaugag

SEQ ID NO: 182386 - RNA, 19 nt, Homo sapiens
  misc_RNA (1)...(19): siRNA sense strand
cugcaugaccuucaggaaa

SEQ ID NO: 182387 - RNA, 19 nt, Homo sapiens
  misc_RNA (1)...(19): siRNA sense strand
gugcaauauuacaacauca

SEQ ID NO: 182388 - RNA, 19 nt, Homo sapiens
  misc_RNA (1)...(19): siRNA sense strand
ggauguaugcguccgucuu

SEQ ID NO: 182389 - RNA, 19 nt, Homo sapiens
  misc_RNA (1)...(19): siRNA sense strand
aagcagagaaggagcuaga

SEQ ID NO: 182390 - RNA, 19 nt, Homo sapiens
  misc_RNA (1)...(19): siRNA sense strand
ggaaggcauggaagucauc

SEQ ID NO: 182391 - RNA, 19 nt, Homo sapiens
  misc_RNA (1)...(19): siRNA sense strand
acaugaagaagaugaugaa

SEQ ID NO: 182392 - RNA, 19 nt, Homo sapiens
  misc_RNA (1)...(19): siRNA sense strand
ccaauggugauguggaugu

SEQ ID NO: 182393 - RNA, 19 nt, Homo sapiens
  misc_RNA (1)...(19): siRNA sense strand
aggagcacaugaagaagau

SEQ ID NO: 182394 - RNA, 19 nt, Homo sapiens
  misc_RNA (1)...(19): siRNA sense strand
ccaaggagcuguauaugau

SEQ ID NO: 182395 - RNA, 19 nt, Homo sapiens
  misc_RNA (1)...(19): siRNA sense strand
gaaaggaaccacuggcauu

SEQ ID NO: 182396 - RNA, 19 nt, Homo sapiens
  misc_RNA (1)...(19): siRNA sense strand
ggaacgagcaucugcagua

SEQ ID NO: 182397 - RNA, 19 nt, Homo sapiens
  misc_RNA (1)...(19): siRNA sense strand
gaaccugauugcagaguug

SEQ ID NO: 182398 - RNA, 19 nt, Homo sapiens
  misc_RNA (1)...(19): siRNA sense strand
cauccuaccugugguuuaa

SEQ ID NO: 182399 - RNA, 19 nt, Homo sapiens
  misc_RNA (1)...(19): siRNA sense strand
gcagagcccaucuucauug

SEQ ID NO: 182400 - RNA, 19 nt, Homo sapiens
  misc_RNA (1)...(19): siRNA sense strand
gaaagugaauccugaaacc

SEQ ID NO: 182401 - RNA, 19 nt, Homo sapiens
  misc_RNA (1)...(19): siRNA sense strand
ggagggcaaaccagaguua

SEQ ID NO: 182402 - RNA, 19 nt, Homo sapiens
  misc_RNA (1)...(19): siRNA sense strand
gaagaaagugaauccugaa

SEQ ID NO: 182403 - RNA, 19 nt, Homo sapiens
  misc_RNA (1)...(19): siRNA sense strand
gaacgagcaucugcaguac

SEQ ID NO: 182404 - RNA, 19 nt, Homo sapiens
  misc_RNA (1)...(19): siRNA sense strand
aaaggaaccacuggcauua

SEQ ID NO: 182405 - RNA, 19 nt, Homo sapiens
  misc_RNA (1)...(19): siRNA sense strand
gaagcuauggccagaauca

SEQ ID NO: 182406 - RNA, 19 nt, Homo sapiens
  misc_RNA (1)...(19): siRNA sense strand
ccaagcagauguggcaguu

SEQ ID NO: 182407 - RNA, 19 nt, Homo sapiens
  misc_RNA (1)...(19): siRNA sense strand
gcgcagagcccaucuucau

SEQ ID NO: 182408 - RNA, 19 nt, Homo sapiens
  misc_RNA (1)...(19): siRNA sense strand
gaugacuccuuucuucagu

SEQ ID NO: 182409 - RNA, 19 nt, Homo sapiens
  misc_RNA (1)...(19): siRNA sense strand
cagagcccaucuucauuga

SEQ ID NO: 182410 - RNA, 19 nt, Homo sapiens
  misc_RNA (1)...(19): siRNA sense strand
ugagaacaauccagaaagg

SEQ ID NO: 182411 - RNA, 19 nt, Homo sapiens
  misc_RNA (1)...(19): siRNA sense strand
gggagaaguggaccucauu

SEQ ID NO: 182412 - RNA, 19 nt, Homo sapiens
  misc_RNA (1)...(19): siRNA sense strand
ggagaaguggaccucauug

SEQ ID NO: 182413 - RNA, 19 nt, Homo sapiens
  misc_RNA (1)...(19): siRNA sense strand
gcagaaaggccagauugag

SEQ ID NO: 182414 - RNA, 19 nt, Homo sapiens
  misc_RNA (1)...(19): siRNA sense strand
gaccugguauggacucucu

SEQ ID NO: 182415 - RNA, 19 nt, Homo sapiens
  misc_RNA (1)...(19): siRNA sense strand
ggccucaucuccuccucaa

SEQ ID NO: 182416 - RNA, 19 nt, Homo sapiens
  misc_RNA (1)...(19): siRNA sense strand
cuucauugaugccaacuuc

SEQ ID NO: 182417 - RNA, 19 nt, Homo sapiens
  misc_RNA (1)...(19): siRNA sense strand
uggaagcuauggccagaau

SEQ ID NO: 182418 - RNA, 19 nt, Homo sapiens
  misc_RNA (1)...(19): siRNA sense strand
agaagcaucugccacaaaa

SEQ ID NO: 182419 - RNA, 19 nt, Homo sapiens
  misc_RNA (1)...(19): siRNA sense strand
agcggaagaugacuccuuu

SEQ ID NO: 182420 - RNA, 19 nt, Homo sapiens
  misc_RNA (1)...(19): siRNA sense strand
ccacaaaagcggaagauga

SEQ ID NO: 182421 - RNA, 19 nt, Homo sapiens
  misc_RNA (1)...(19): siRNA sense strand
agaacaauccagaaaggaa

SEQ ID NO: 182422 - RNA, 19 nt, Homo sapiens
  misc_RNA (1)...(19): siRNA sense strand
uauggacucucugcagcua

SEQ ID NO: 182423 - RNA, 19 nt, Homo sapiens
  misc_RNA (1)...(19): siRNA sense strand
aagcagauguggcaguucu

SEQ ID NO: 182424 - RNA, 19 nt, Homo sapiens
  misc_RNA (1)...(19): siRNA sense strand
ccugagaacaauccagaaa

SEQ ID NO: 182425 - RNA, 19 nt, Homo sapiens
  misc_RNA (1)...(19): siRNA sense strand
uaccugugguuuaagaaau

SEQ ID NO: 182426 - RNA, 19 nt, Homo sapiens
  misc_RNA (1)...(19): siRNA sense strand
gagaacaauccagaaagga

SEQ ID NO: 182427 - RNA, 19 nt, Homo sapiens
  misc_RNA (1)...(19): siRNA sense strand
aguggaagcugaaccugau

SEQ ID NO: 182428 - RNA, 19 nt, Homo sapiens
  misc_RNA (1)...(19): siRNA sense strand
ggcagaaaggccagauuga

SEQ ID NO: 182429 - RNA, 19 nt, Homo sapiens
  misc_RNA (1)...(19): siRNA sense strand
cggcagaaaggccagauug

SEQ ID NO: 182430 - RNA, 19 nt, Homo sapiens
  misc_RNA (1)...(19): siRNA sense strand
ugaaccugauugcagaguu

SEQ ID NO: 182431 - RNA, 19 nt, Homo sapiens
  misc_RNA (1)...(19): siRNA sense strand
gaaccacuggcauuaucga

SEQ ID NO: 182432 - RNA, 19 nt, Homo sapiens
  misc_RNA (1)...(19): siRNA sense strand
gcuuugaccauuccaagga

SEQ ID NO: 182433 - RNA, 19 nt, Homo sapiens
  misc_RNA (1)...(19): siRNA sense strand
guacaucgugaccugguau

SEQ ID NO: 182434 - RNA, 19 nt, Homo sapiens
  misc_RNA (1)...(19): siRNA sense strand
uccaaggagcuguauauga

SEQ ID NO: 182435 - RNA, 19 nt, Homo sapiens
  misc_RNA (1)...(19): siRNA sense strand
aggaaccacuggcauuauc

SEQ ID NO: 182436 - RNA, 19 nt, Homo sapiens
  misc_RNA (1)...(19): siRNA sense strand
gagaaguggaccucauugg

SEQ ID NO: 182437 - RNA, 19 nt, Homo sapiens
  misc_RNA (1)...(19): siRNA sense strand
acgagcaucugcaguacau

SEQ ID NO: 182438 - RNA, 19 nt, Homo sapiens
  misc_RNA (1)...(19): siRNA sense strand
ccugaaacccggcagaaag

SEQ ID NO: 182439 - RNA, 19 nt, Homo sapiens
  misc_RNA (1)...(19): siRNA sense strand
caaggagcuguauaugaug

SEQ ID NO: 182440 - RNA, 19 nt, Homo sapiens
  misc_RNA (1)...(19): siRNA sense strand
ggaaguggaagcugaaccu

SEQ ID NO: 182441 - RNA, 19 nt, Homo sapiens
  misc_RNA (1)...(19): siRNA sense strand
ccagauugagggagaagug

SEQ ID NO: 182442 - RNA, 19 nt, Homo sapiens
  misc_RNA (1)...(19): siRNA sense strand
aucgagaccuggaagcuau

SEQ ID NO: 182443 - RNA, 19 nt, Homo sapiens
  misc_RNA (1)...(19): siRNA sense strand
uaucgagaccuggaagcua

SEQ ID NO: 182444 - RNA, 19 nt, Homo sapiens
  misc_RNA (1)...(19): siRNA sense strand
cuaccugugguuuaagaaa

SEQ ID NO: 182445 - RNA, 19 nt, Homo sapiens
  misc_RNA (1)...(19): siRNA sense strand
ccacagagcggaacacuua

SEQ ID NO: 182446 - RNA, 19 nt, Homo sapiens
  misc_RNA (1)...(19): siRNA sense strand
gcaaagaugggaaagacua

SEQ ID NO: 182447 - RNA, 19 nt, Homo sapiens
  misc_RNA (1)...(19): siRNA sense strand
gaacuagucaucagcaaga

SEQ ID NO: 182448 - RNA, 19 nt, Homo sapiens
  misc_RNA (1)...(19): siRNA sense strand
aaaguucccucucauugaa

SEQ ID NO: 182449 - RNA, 19 nt, Homo sapiens
  misc_RNA (1)...(19): siRNA sense strand
gauccggacucaagcaaga

SEQ ID NO: 182450 - RNA, 19 nt, Homo sapiens
  misc_RNA (1)...(19): siRNA sense strand
gcaccuaugcuguggauau

SEQ ID NO: 182451 - RNA, 19 nt, Homo sapiens
  misc_RNA (1)...(19): siRNA sense strand
gcaacaacuacaaggcuua

SEQ ID NO: 182452 - RNA, 19 nt, Homo sapiens
  misc_RNA (1)...(19): siRNA sense strand
acaaagagaugcugacacu

SEQ ID NO: 182453 - RNA, 19 nt, Homo sapiens
  misc_RNA (1)...(19): siRNA sense strand
cugcagagccuuucauuga

SEQ ID NO: 182454 - RNA, 19 nt, Homo sapiens
  misc_RNA (1)...(19): siRNA sense strand
gaucauugguaugcaguau

SEQ ID NO: 182455 - RNA, 19 nt, Homo sapiens
  misc_RNA (1)...(19): siRNA sense strand
guggacaccugcucugaga

SEQ ID NO: 182456 - RNA, 19 nt, Homo sapiens
  misc_RNA (1)...(19): siRNA sense strand
gguggaacaggcagaauuu

SEQ ID NO: 182457 - RNA, 19 nt, Homo sapiens
  misc_RNA (1)...(19): siRNA sense strand
gaaaaguucccucucauug

SEQ ID NO: 182458 - RNA, 19 nt, Homo sapiens
  misc_RNA (1)...(19): siRNA sense strand
caccugcucugagauguuu

SEQ ID NO: 182459 - RNA, 19 nt, Homo sapiens
  misc_RNA (1)...(19): siRNA sense strand
gaugggaaagacuacauuu

SEQ ID NO: 182460 - RNA, 19 nt, Homo sapiens
  misc_RNA (1)...(19): siRNA sense strand
gcuggucgcuaucuauaag

SEQ ID NO: 182461 - RNA, 19 nt, Homo sapiens
  misc_RNA (1)...(19): siRNA sense strand
gagcggaacacuuaaggau

SEQ ID NO: 182462 - RNA, 19 nt, Homo sapiens
  misc_RNA (1)...(19): siRNA sense strand
ggacaccugcucugagaug

SEQ ID NO: 182463 - RNA, 19 nt, Homo sapiens
  misc_RNA (1)...(19): siRNA sense strand
ucauugaacagacauacua

SEQ ID NO: 182464 - RNA, 19 nt, Homo sapiens
  misc_RNA (1)...(19): siRNA sense strand
gcagagccuuucauugacu

SEQ ID NO: 182465 - RNA, 19 nt, Homo sapiens
  misc_RNA (1)...(19): siRNA sense strand
gagauuaugauaucaaggu

SEQ ID NO: 182466 - RNA, 19 nt, Homo sapiens
  misc_RNA (1)...(19): siRNA sense strand
gacaagccauggguguuug

SEQ ID NO: 182467 - RNA, 19 nt, Homo sapiens
  misc_RNA (1)...(19): siRNA sense strand
ccauauacaacuucuguga

SEQ ID NO: 182468 - RNA, 19 nt, Homo sapiens
  misc_RNA (1)...(19): siRNA sense strand
cagcuggucgcuaucuaua

SEQ ID NO: 182469 - RNA, 19 nt, Homo sapiens
  misc_RNA (1)...(19): siRNA sense strand
gacuguagcaugccacuga

SEQ ID NO: 182470 - RNA, 19 nt, Homo sapiens
  misc_RNA (1)...(19): siRNA sense strand
ggagcagauugccauguca

SEQ ID NO: 182471 - RNA, 19 nt, Homo sapiens
  misc_RNA (1)...(19): siRNA sense strand
caacuacaaggcuuacaug

SEQ ID NO: 182472 - RNA, 19 nt, Homo sapiens
  misc_RNA (1)...(19): siRNA sense strand
gaagauuggcaacaacuac

SEQ ID NO: 182473 - RNA, 19 nt, Homo sapiens
  misc_RNA (1)...(19): siRNA sense strand
ugacaagccauggguguuu

SEQ ID NO: 182474 - RNA, 19 nt, Homo sapiens
  misc_RNA (1)...(19): siRNA sense strand
ccuuggagauuaugauauc

SEQ ID NO: 182475 - RNA, 19 nt, Homo sapiens
  misc_RNA (1)...(19): siRNA sense strand
gaggacaggcaacucauca

SEQ ID NO: 182476 - RNA, 19 nt, Homo sapiens
  misc_RNA (1)...(19): siRNA sense strand
ggacuuccgccaccugauc

SEQ ID NO: 182477 - RNA, 19 nt, Homo sapiens
  misc_RNA (1)...(19): siRNA sense strand
cagcaucaacucacuggaa

SEQ ID NO: 182478 - RNA, 19 nt, Homo sapiens
  misc_RNA (1)...(19): siRNA sense strand
caucugugcugucaaagcu

SEQ ID NO: 182479 - RNA, 19 nt, Homo sapiens
  misc_RNA (1)...(19): siRNA sense strand
auauacaacuucugugaca

SEQ ID NO: 182480 - RNA, 19 nt, Homo sapiens
  misc_RNA (1)...(19): siRNA sense strand
cgacugggccaagugcuuu

SEQ ID NO: 182481 - RNA, 19 nt, Homo sapiens
  misc_RNA (1)...(19): siRNA sense strand
gcaacucaucaccgaacua

SEQ ID NO: 182482 - RNA, 19 nt, Homo sapiens
  misc_RNA (1)...(19): siRNA sense strand
gaauccauauacaacuucu

SEQ ID NO: 182483 - RNA, 19 nt, Homo sapiens
  misc_RNA (1)...(19): siRNA sense strand
ggaauccauauacaacuuc

SEQ ID NO: 182484 - RNA, 19 nt, Homo sapiens
  misc_RNA (1)...(19): siRNA sense strand
uuaaggauccggacucaag

SEQ ID NO: 182485 - RNA, 19 nt, Homo sapiens
  misc_RNA (1)...(19): siRNA sense strand
caacucaucaccgaacuag

SEQ ID NO: 182486 - RNA, 19 nt, Homo sapiens
  misc_RNA (1)...(19): siRNA sense strand
ccagaagauuggcaacaac

SEQ ID NO: 182487 - RNA, 19 nt, Homo sapiens
  misc_RNA (1)...(19): siRNA sense strand
ggaaaaccacuacgacuuc

SEQ ID NO: 182488 - RNA, 19 nt, Homo sapiens
  misc_RNA (1)...(19): siRNA sense strand
gggcaaggucaaaguggaa

SEQ ID NO: 182489 - RNA, 19 nt, Homo sapiens
  misc_RNA (1)...(19): siRNA sense strand
caccuaugcuguggauaug

SEQ ID NO: 182490 - RNA, 19 nt, Homo sapiens
  misc_RNA (1)...(19): siRNA sense strand
uccagaagauuggcaacaa

SEQ ID NO: 182491 - RNA, 19 nt, Homo sapiens
  misc_RNA (1)...(19): siRNA sense strand
guccuuggagauuaugaua

SEQ ID NO: 182492 - RNA, 19 nt, Homo sapiens
  misc_RNA (1)...(19): siRNA sense strand
uggcaaagaugggaaagac

SEQ ID NO: 182493 - RNA, 19 nt, Homo sapiens
  misc_RNA (1)...(19): siRNA sense strand
cauuuggcauggcggagaa

SEQ ID NO: 182494 - RNA, 19 nt, Homo sapiens
  misc_RNA (1)...(19): siRNA sense strand
ucaccgaacuagucaucag

SEQ ID NO: 182495 - RNA, 19 nt, Homo sapiens
  misc_RNA (1)...(19): siRNA sense strand
ucauugguaugcaguaugc

SEQ ID NO: 182496 - RNA, 19 nt, Homo sapiens
  misc_RNA (1)...(19): siRNA sense strand
ggaacaggcagaauuuuca

SEQ ID NO: 182497 - RNA, 19 nt, Homo sapiens
  misc_RNA (1)...(19): siRNA sense strand
ccacaaagagaugcugaca

SEQ ID NO: 182498 - RNA, 19 nt, Homo sapiens
  misc_RNA (1)...(19): siRNA sense strand
ccuaugcuguggauaugca

SEQ ID NO: 182499 - RNA, 19 nt, Homo sapiens
  misc_RNA (1)...(19): siRNA sense strand
ggaggacaggcaacucauc

SEQ ID NO: 182500 - RNA, 19 nt, Homo sapiens
  misc_RNA (1)...(19): siRNA sense strand
uggagcagauugccauguc

SEQ ID NO: 182501 - RNA, 19 nt, Homo sapiens
  misc_RNA (1)...(19): siRNA sense strand
aaaaguccuuggagauuau

SEQ ID NO: 182502 - RNA, 19 nt, Homo sapiens
  misc_RNA (1)...(19): siRNA sense strand
ggccagacuucgugcucau

SEQ ID NO: 182503 - RNA, 19 nt, Homo sapiens
  misc_RNA (1)...(19): siRNA sense strand
gcucucacccagaccuaug

SEQ ID NO: 182504 - RNA, 19 nt, Homo sapiens
  misc_RNA (1)...(19): siRNA sense strand
uaagacacugggaggagaa

SEQ ID NO: 182505 - RNA, 19 nt, Homo sapiens
  misc_RNA (1)...(19): siRNA sense strand
uugcccagcuggucgcuau

SEQ ID NO: 182506 - RNA, 19 nt, Homo sapiens
  misc_RNA (1)...(19): siRNA sense strand
caagguggaacaggcagaa

SEQ ID NO: 182507 - RNA, 19 nt, Homo sapiens
  misc_RNA (1)...(19): siRNA sense strand
uucauugacuccaaguaug

SEQ ID NO: 182508 - RNA, 19 nt, Homo sapiens
  misc_RNA (1)...(19): siRNA sense strand
agaagauuggcaacaacua

SEQ ID NO: 182509 - RNA, 19 nt, Homo sapiens
  misc_RNA (1)...(19): siRNA sense strand
ccacagagcggaacacuua

SEQ ID NO: 182510 - RNA, 19 nt, Homo sapiens
  misc_RNA (1)...(19): siRNA sense strand
gcaaagaugggaaagacua

SEQ ID NO: 182511 - RNA, 19 nt, Homo sapiens
  misc_RNA (1)...(19): siRNA sense strand
gaacuagucaucagcaaga

SEQ ID NO: 182512 - RNA, 19 nt, Homo sapiens
  misc_RNA (1)...(19): siRNA sense strand
aaaguucccucucauugaa

SEQ ID NO: 182513 - RNA, 19 nt, Homo sapiens
  misc_RNA (1)...(19): siRNA sense strand
gauccggacucaagcaaga

SEQ ID NO: 182514 - RNA, 19 nt, Homo sapiens
  misc_RNA (1)...(19): siRNA sense strand
gcaccuaugcuguggauau

SEQ ID NO: 182515 - RNA, 19 nt, Homo sapiens
  misc_RNA (1)...(19): siRNA sense strand
gcaacaacuacaaggcuua

SEQ ID NO: 182516 - RNA, 19 nt, Homo sapiens
  misc_RNA (1)...(19): siRNA sense strand
acaaagagaugcugacacu

SEQ ID NO: 182517 - RNA, 19 nt, Homo sapiens
  misc_RNA (1)...(19): siRNA sense strand
cugcagagccuuucauuga

SEQ ID NO: 182518 - RNA, 19 nt, Homo sapiens
  misc_RNA (1)...(19): siRNA sense strand
gaucauugguaugcaguau

SEQ ID NO: 182519 - RNA, 19 nt, Homo sapiens
  misc_RNA (1)...(19): siRNA sense strand
guggacaccugcucugaga

SEQ ID NO: 182520 - RNA, 19 nt, Homo sapiens
  misc_RNA (1)...(19): siRNA sense strand
gguggaacaggcagaauuu

SEQ ID NO: 182521 - RNA, 19 nt, Homo sapiens
  misc_RNA (1)...(19): siRNA sense strand
gaaaaguucccucucauug

SEQ ID NO: 182522 - RNA, 19 nt, Homo sapiens
  misc_RNA (1)...(19): siRNA sense strand
caccugcucugagauguuu

SEQ ID NO: 182523 - RNA, 19 nt, Homo sapiens
  misc_RNA (1)...(19): siRNA sense strand
gaugggaaagacuacauuu

SEQ ID NO: 182524 - RNA, 19 nt, Homo sapiens
  misc_RNA (1)...(19): siRNA sense strand
gcuggucgcuaucuauaag

SEQ ID NO: 182525 - RNA, 19 nt, Homo sapiens
  misc_RNA (1)...(19): siRNA sense strand
gagcggaacacuuaaggau

SEQ ID NO: 182526 - RNA, 19 nt, Homo sapiens
  misc_RNA (1)...(19): siRNA sense strand
ggacaccugcucugagaug

SEQ ID NO: 182527 - RNA, 19 nt, Homo sapiens
  misc_RNA (1)...(19): siRNA sense strand
ucauugaacagacauacua

SEQ ID NO: 182528 - RNA, 19 nt, Homo sapiens
  misc_RNA (1)...(19): siRNA sense strand
gcagagccuuucauugacu

SEQ ID NO: 182529 - RNA, 19 nt, Homo sapiens
  misc_RNA (1)...(19): siRNA sense strand
gagauuaugauaucaaggu

SEQ ID NO: 182530 - RNA, 19 nt, Homo sapiens
  misc_RNA (1)...(19): siRNA sense strand
gacaagccauggguguuug

SEQ ID NO: 182531 - RNA, 19 nt, Homo sapiens
  misc_RNA (1)...(19): siRNA sense strand
ccauauacaacuucuguga

SEQ ID NO: 182532 - RNA, 19 nt, Homo sapiens
  misc_RNA (1)...(19): siRNA sense strand
cagcuggucgcuaucuaua

SEQ ID NO: 182533 - RNA, 19 nt, Homo sapiens
  misc_RNA (1)...(19): siRNA sense strand
gacuguagcaugccacuga

SEQ ID NO: 182534 - RNA, 19 nt, Homo sapiens
  misc_RNA (1)...(19): siRNA sense strand
ggagcagauugccauguca

SEQ ID NO: 182535 - RNA, 19 nt, Homo sapiens
  misc_RNA (1)...(19): siRNA sense strand
caacuacaaggcuuacaug

SEQ ID NO: 182536 - RNA, 19 nt, Homo sapiens
  misc_RNA (1)...(19): siRNA sense strand
gaagauuggcaacaacuac

SEQ ID NO: 182537 - RNA, 19 nt, Homo sapiens
  misc_RNA (1)...(19): siRNA sense strand
ugacaagccauggguguuu

SEQ ID NO: 182538 - RNA, 19 nt, Homo sapiens
  misc_RNA (1)...(19): siRNA sense strand
ccuuggagauuaugauauc

SEQ ID NO: 182539 - RNA, 19 nt, Homo sapiens
  misc_RNA (1)...(19): siRNA sense strand
gaggacaggcaacucauca

SEQ ID NO: 182540 - RNA, 19 nt, Homo sapiens
  misc_RNA (1)...(19): siRNA sense strand
ggacuuccgccaccugauc

SEQ ID NO: 182541 - RNA, 19 nt, Homo sapiens
  misc_RNA (1)...(19): siRNA sense strand
cagcaucaacucacuggaa

SEQ ID NO: 182542 - RNA, 19 nt, Homo sapiens
  misc_RNA (1)...(19): siRNA sense strand
caucugugcugucaaagcu

SEQ ID NO: 182543 - RNA, 19 nt, Homo sapiens
  misc_RNA (1)...(19): siRNA sense strand
auauacaacuucugugaca

SEQ ID NO: 182544 - RNA, 19 nt, Homo sapiens
  misc_RNA (1)...(19): siRNA sense strand
cgacugggccaagugcuuu

SEQ ID NO: 182545 - RNA, 19 nt, Homo sapiens
  misc_RNA (1)...(19): siRNA sense strand
gcaacucaucaccgaacua

SEQ ID NO: 182546 - RNA, 19 nt, Homo sapiens
  misc_RNA (1)...(19): siRNA sense strand
gaauccauauacaacuucu

SEQ ID NO: 182547 - RNA, 19 nt, Homo sapiens
  misc_RNA (1)...(19): siRNA sense strand
ggaauccauauacaacuuc

SEQ ID NO: 182548 - RNA, 19 nt, Homo sapiens
  misc_RNA (1)...(19): siRNA sense strand
uuaaggauccggacucaag

SEQ ID NO: 182549 - RNA, 19 nt, Homo sapiens
  misc_RNA (1)...(19): siRNA sense strand
caacucaucaccgaacuag

SEQ ID NO: 182550 - RNA, 19 nt, Homo sapiens
  misc_RNA (1)...(19): siRNA sense strand
ccagaagauuggcaacaac

SEQ ID NO: 182551 - RNA, 19 nt, Homo sapiens
  misc_RNA (1)...(19): siRNA sense strand
ggaaaaccacuacgacuuc

SEQ ID NO: 182552 - RNA, 19 nt, Homo sapiens
  misc_RNA (1)...(19): siRNA sense strand
gggcaaggucaaaguggaa

SEQ ID NO: 182553 - RNA, 19 nt, Homo sapiens
  misc_RNA (1)...(19): siRNA sense strand
caccuaugcuguggauaug

SEQ ID NO: 182554 - RNA, 19 nt, Homo sapiens
  misc_RNA (1)...(19): siRNA sense strand
uccagaagauuggcaacaa

SEQ ID NO: 182555 - RNA, 19 nt, Homo sapiens
  misc_RNA (1)...(19): siRNA sense strand
guccuuggagauuaugaua

SEQ ID NO: 182556 - RNA, 19 nt, Homo sapiens
  misc_RNA (1)...(19): siRNA sense strand
uggcaaagaugggaaagac

SEQ ID NO: 182557 - RNA, 19 nt, Homo sapiens
  misc_RNA (1)...(19): siRNA sense strand
cauuuggcauggcggagaa

SEQ ID NO: 182558 - RNA, 19 nt, Homo sapiens
  misc_RNA (1)...(19): siRNA sense strand
ucaccgaacuagucaucag

SEQ ID NO: 182559 - RNA, 19 nt, Homo sapiens
  misc_RNA (1)...(19): siRNA sense strand
ucauugguaugcaguaugc

SEQ ID NO: 182560 - RNA, 19 nt, Homo sapiens
  misc_RNA (1)...(19): siRNA sense strand
ggaacaggcagaauuuuca

SEQ ID NO: 182561 - RNA, 19 nt, Homo sapiens
  misc_RNA (1)...(19): siRNA sense strand
ccacaaagagaugcugaca

SEQ ID NO: 182562 - RNA, 19 nt, Homo sapiens
  misc_RNA (1)...(19): siRNA sense strand
ccuaugcuguggauaugca

SEQ ID NO: 182563 - RNA, 19 nt, Homo sapiens
  misc_RNA (1)...(19): siRNA sense strand
ggaggacaggcaacucauc

SEQ ID NO: 182564 - RNA, 19 nt, Homo sapiens
  misc_RNA (1)...(19): siRNA sense strand
uggagcagauugccauguc

SEQ ID NO: 182565 - RNA, 19 nt, Homo sapiens
  misc_RNA (1)...(19): siRNA sense strand
aaaaguccuuggagauuau

SEQ ID NO: 182566 - RNA, 19 nt, Homo sapiens
  misc_RNA (1)...(19): siRNA sense strand
ggccagacuucgugcucau

SEQ ID NO: 182567 - RNA, 19 nt, Homo sapiens
  misc_RNA (1)...(19): siRNA sense strand
gcucucacccagaccuaug

SEQ ID NO: 182568 - RNA, 19 nt, Homo sapiens
  misc_RNA (1)...(19): siRNA sense strand
uaagacacugggaggagaa

SEQ ID NO: 182569 - RNA, 19 nt, Homo sapiens
  misc_RNA (1)...(19): siRNA sense strand
uugcccagcuggucgcuau

SEQ ID NO: 182570 - RNA, 19 nt, Homo sapiens
  misc_RNA (1)...(19): siRNA sense strand
caagguggaacaggcagaa

SEQ ID NO: 182571 - RNA, 19 nt, Homo sapiens
  misc_RNA (1)...(19): siRNA sense strand
uucauugacuccaaguaug

SEQ ID NO: 182572 - RNA, 19 nt, Homo sapiens
  misc_RNA (1)...(19): siRNA sense strand
agaagauuggcaacaacua

SEQ ID NO: 182573 - RNA, 19 nt, Homo sapiens
  misc_RNA (1)...(19): siRNA sense strand
ccaaugaugaucugaauua

SEQ ID NO: 182574 - RNA, 19 nt, Homo sapiens
  misc_RNA (1)...(19): siRNA sense strand
gcagaauuaugaaagaaga

SEQ ID NO: 182575 - RNA, 19 nt, Homo sapiens
  misc_RNA (1)...(19): siRNA sense strand
gcaguucuuuggauuaaug

SEQ ID NO: 182576 - RNA, 19 nt, Homo sapiens
  misc_RNA (1)...(19): siRNA sense strand
gaaauaggagccaaugaug

SEQ ID NO: 182577 - RNA, 19 nt, Homo sapiens
  misc_RNA (1)...(19): siRNA sense strand
cagcaguucuuuggauuaa

SEQ ID NO: 182578 - RNA, 19 nt, Homo sapiens
  misc_RNA (1)...(19): siRNA sense strand
gcuguuugcagaagaaaua

SEQ ID NO: 182579 - RNA, 19 nt, Homo sapiens
  misc_RNA (1)...(19): siRNA sense strand
gaagaaauaggagccaaug

SEQ ID NO: 182580 - RNA, 19 nt, Homo sapiens
  misc_RNA (1)...(19): siRNA sense strand
ggccagaucucucacaaaa

SEQ ID NO: 182581 - RNA, 19 nt, Homo sapiens
  misc_RNA (1)...(19): siRNA sense strand
gcaaugcagaauuaugaaa

SEQ ID NO: 182582 - RNA, 19 nt, Homo sapiens
  misc_RNA (1)...(19): siRNA sense strand
gacccaagccucagcaguu

SEQ ID NO: 182583 - RNA, 19 nt, Homo sapiens
  misc_RNA (1)...(19): siRNA sense strand
agaaauaggagccaaugau

SEQ ID NO: 182584 - RNA, 19 nt, Homo sapiens
  misc_RNA (1)...(19): siRNA sense strand
augaugaucugaauuacug

SEQ ID NO: 182585 - RNA, 19 nt, Homo sapiens
  misc_RNA (1)...(19): siRNA sense strand
aaauaggagccaaugauga

SEQ ID NO: 182586 - RNA, 19 nt, Homo sapiens
  misc_RNA (1)...(19): siRNA sense strand
ccucagcaguucuuuggau

SEQ ID NO: 182587 - RNA, 19 nt, Homo sapiens
  misc_RNA (1)...(19): siRNA sense strand
gaacugccggagcccuuug

SEQ ID NO: 182588 - RNA, 19 nt, Homo sapiens
  misc_RNA (1)...(19): siRNA sense strand
ucagcaguucuuuggauua

SEQ ID NO: 182589 - RNA, 19 nt, Homo sapiens
  misc_RNA (1)...(19): siRNA sense strand
ucagcuguuugcagaagaa

SEQ ID NO: 182590 - RNA, 19 nt, Homo sapiens
  misc_RNA (1)...(19): siRNA sense strand
ugucuccacucagcuguuu

SEQ ID NO: 182591 - RNA, 19 nt, Homo sapiens
  misc_RNA (1)...(19): siRNA sense strand
gagccaaugaugaucugaa

SEQ ID NO: 182592 - RNA, 19 nt, Homo sapiens
  misc_RNA (1)...(19): siRNA sense strand
gacauggccagaucucuca

SEQ ID NO: 182593 - RNA, 19 nt, Homo sapiens
  misc_RNA (1)...(19): siRNA sense strand
aauaggagccaaugaugau

SEQ ID NO: 182594 - RNA, 19 nt, Homo sapiens
  misc_RNA (1)...(19): siRNA sense strand
ggaacugccggagcccuuu

SEQ ID NO: 182595 - RNA, 19 nt, Homo sapiens
  misc_RNA (1)...(19): siRNA sense strand
guacgacagcgaccagauc

SEQ ID NO: 182596 - RNA, 19 nt, Homo sapiens
  misc_RNA (1)...(19): siRNA sense strand
caaugaugaucugaauuac

SEQ ID NO: 182597 - RNA, 19 nt, Homo sapiens
  misc_RNA (1)...(19): siRNA sense strand
caaugcagaauuaugaaag

SEQ ID NO: 182598 - RNA, 19 nt, Homo sapiens
  misc_RNA (1)...(19): siRNA sense strand
cgacagcgaccagaucaag

SEQ ID NO: 182599 - RNA, 19 nt, Homo sapiens
  misc_RNA (1)...(19): siRNA sense strand
agccaaugaugaucugaau

SEQ ID NO: 182600 - RNA, 19 nt, Homo sapiens
  misc_RNA (1)...(19): siRNA sense strand
cucagcaguucuuuggauu

SEQ ID NO: 182601 - RNA, 19 nt, Homo sapiens
  misc_RNA (1)...(19): siRNA sense strand
ccaaugaugaucugaauua

SEQ ID NO: 182602 - RNA, 19 nt, Homo sapiens
  misc_RNA (1)...(19): siRNA sense strand
gcagaauuaugaaagaaga

SEQ ID NO: 182603 - RNA, 19 nt, Homo sapiens
  misc_RNA (1)...(19): siRNA sense strand
gcaguucuuuggauuaaug

SEQ ID NO: 182604 - RNA, 19 nt, Homo sapiens
  misc_RNA (1)...(19): siRNA sense strand
gaaauaggagccaaugaug

SEQ ID NO: 182605 - RNA, 19 nt, Homo sapiens
  misc_RNA (1)...(19): siRNA sense strand
cagcaguucuuuggauuaa

SEQ ID NO: 182606 - RNA, 19 nt, Homo sapiens
  misc_RNA (1)...(19): siRNA sense strand
gcuguuugcagaagaaaua

SEQ ID NO: 182607 - RNA, 19 nt, Homo sapiens
  misc_RNA (1)...(19): siRNA sense strand
gaagaaauaggagccaaug

SEQ ID NO: 182608 - RNA, 19 nt, Homo sapiens
  misc_RNA (1)...(19): siRNA sense strand
ggccagaucucucacaaaa

SEQ ID NO: 182609 - RNA, 19 nt, Homo sapiens
  misc_RNA (1)...(19): siRNA sense strand
gcaaugcagaauuaugaaa

SEQ ID NO: 182610 - RNA, 19 nt, Homo sapiens
  misc_RNA (1)...(19): siRNA sense strand
gacccaagccucagcaguu

SEQ ID NO: 182611 - RNA, 19 nt, Homo sapiens
  misc_RNA (1)...(19): siRNA sense strand
agaaauaggagccaaugau

SEQ ID NO: 182612 - RNA, 19 nt, Homo sapiens
  misc_RNA (1)...(19): siRNA sense strand
augaugaucugaauuacug

SEQ ID NO: 182613 - RNA, 19 nt, Homo sapiens
  misc_RNA (1)...(19): siRNA sense strand
aaauaggagccaaugauga

SEQ ID NO: 182614 - RNA, 19 nt, Homo sapiens
  misc_RNA (1)...(19): siRNA sense strand
ccucagcaguucuuuggau

SEQ ID NO: 182615 - RNA, 19 nt, Homo sapiens
  misc_RNA (1)...(19): siRNA sense strand
gaacugccggagcccuuug

SEQ ID NO: 182616 - RNA, 19 nt, Homo sapiens
  misc_RNA (1)...(19): siRNA sense strand
ucagcaguucuuuggauua

SEQ ID NO: 182617 - RNA, 19 nt, Homo sapiens
  misc_RNA (1)...(19): siRNA sense strand
ucagcuguuugcagaagaa

SEQ ID NO: 182618 - RNA, 19 nt, Homo sapiens
  misc_RNA (1)...(19): siRNA sense strand
ugucuccacucagcuguuu

SEQ ID NO: 182619 - RNA, 19 nt, Homo sapiens
  misc_RNA (1)...(19): siRNA sense strand
gagccaaugaugaucugaa

SEQ ID NO: 182620 - RNA, 19 nt, Homo sapiens
  misc_RNA (1)...(19): siRNA sense strand
gacauggccagaucucuca

SEQ ID NO: 182621 - RNA, 19 nt, Homo sapiens
  misc_RNA (1)...(19): siRNA sense strand
aauaggagccaaugaugau

SEQ ID NO: 182622 - RNA, 19 nt, Homo sapiens
  misc_RNA (1)...(19): siRNA sense strand
ggaacugccggagcccuuu

SEQ ID NO: 182623 - RNA, 19 nt, Homo sapiens
  misc_RNA (1)...(19): siRNA sense strand
guacgacagcgaccagauc

SEQ ID NO: 182624 - RNA, 19 nt, Homo sapiens
  misc_RNA (1)...(19): siRNA sense strand
caaugaugaucugaauuac

SEQ ID NO: 182625 - RNA, 19 nt, Homo sapiens
  misc_RNA (1)...(19): siRNA sense strand
caaugcagaauuaugaaag

SEQ ID NO: 182626 - RNA, 19 nt, Homo sapiens
  misc_RNA (1)...(19): siRNA sense strand
cgacagcgaccagaucaag

SEQ ID NO: 182627 - RNA, 19 nt, Homo sapiens
  misc_RNA (1)...(19): siRNA sense strand
agccaaugaugaucugaau

SEQ ID NO: 182628 - RNA, 19 nt, Homo sapiens
  misc_RNA (1)...(19): siRNA sense strand
cucagcaguucuuuggauu

SEQ ID NO: 182629 - RNA, 19 nt, Homo sapiens
  misc_RNA (1)...(19): siRNA sense strand
ccaaugaugaucugaauua

SEQ ID NO: 182630 - RNA, 19 nt, Homo sapiens
  misc_RNA (1)...(19): siRNA sense strand
gcagaauuaugaaagaaga

SEQ ID NO: 182631 - RNA, 19 nt, Homo sapiens
  misc_RNA (1)...(19): siRNA sense strand
gcaguucuuuggauuaaug

SEQ ID NO: 182632 - RNA, 19 nt, Homo sapiens
  misc_RNA (1)...(19): siRNA sense strand
gaaauaggagccaaugaug

SEQ ID NO: 182633 - RNA, 19 nt, Homo sapiens
  misc_RNA (1)...(19): siRNA sense strand
cagcaguucuuuggauuaa

SEQ ID NO: 182634 - RNA, 19 nt, Homo sapiens
  misc_RNA (1)...(19): siRNA sense strand
gcuguuugcagaagaaaua

SEQ ID NO: 182635 - RNA, 19 nt, Homo sapiens
  misc_RNA (1)...(19): siRNA sense strand
gaagaaauaggagccaaug

SEQ ID NO: 182636 - RNA, 19 nt, Homo sapiens
  misc_RNA (1)...(19): siRNA sense strand
ggccagaucucucacaaaa

SEQ ID NO: 182637 - RNA, 19 nt, Homo sapiens
  misc_RNA (1)...(19): siRNA sense strand
gcaaugcagaauuaugaaa

SEQ ID NO: 182638 - RNA, 19 nt, Homo sapiens
  misc_RNA (1)...(19): siRNA sense strand
gacccaagccucagcaguu

SEQ ID NO: 182639 - RNA, 19 nt, Homo sapiens
  misc_RNA (1)...(19): siRNA sense strand
agaaauaggagccaaugau

SEQ ID NO: 182640 - RNA, 19 nt, Homo sapiens
  misc_RNA (1)...(19): siRNA sense strand
augaugaucugaauuacug

SEQ ID NO: 182641 - RNA, 19 nt, Homo sapiens
  misc_RNA (1)...(19): siRNA sense strand
aaauaggagccaaugauga

SEQ ID NO: 182642 - RNA, 19 nt, Homo sapiens
  misc_RNA (1)...(19): siRNA sense strand
ccucagcaguucuuuggau

SEQ ID NO: 182643 - RNA, 19 nt, Homo sapiens
  misc_RNA (1)...(19): siRNA sense strand
gaacugccggagcccuuug

SEQ ID NO: 182644 - RNA, 19 nt, Homo sapiens
  misc_RNA (1)...(19): siRNA sense strand
ucagcaguucuuuggauua

SEQ ID NO: 182645 - RNA, 19 nt, Homo sapiens
  misc_RNA (1)...(19): siRNA sense strand
ucagcuguuugcagaagaa

SEQ ID NO: 182646 - RNA, 19 nt, Homo sapiens
  misc_RNA (1)...(19): siRNA sense strand
ugucuccacucagcuguuu

SEQ ID NO: 182647 - RNA, 19 nt, Homo sapiens
  misc_RNA (1)...(19): siRNA sense strand
gagccaaugaugaucugaa

SEQ ID NO: 182648 - RNA, 19 nt, Homo sapiens
  misc_RNA (1)...(19): siRNA sense strand
gacauggccagaucucuca

SEQ ID NO: 182649 - RNA, 19 nt, Homo sapiens
  misc_RNA (1)...(19): siRNA sense strand
aauaggagccaaugaugau

SEQ ID NO: 182650 - RNA, 19 nt, Homo sapiens
  misc_RNA (1)...(19): siRNA sense strand
ggaacugccggagcccuuu

SEQ ID NO: 182651 - RNA, 19 nt, Homo sapiens
  misc_RNA (1)...(19): siRNA sense strand
guacgacagcgaccagauc

SEQ ID NO: 182652 - RNA, 19 nt, Homo sapiens
  misc_RNA (1)...(19): siRNA sense strand
caaugaugaucugaauuac

SEQ ID NO: 182653 - RNA, 19 nt, Homo sapiens
  misc_RNA (1)...(19): siRNA sense strand
caaugcagaauuaugaaag

SEQ ID NO: 182654 - RNA, 19 nt, Homo sapiens
  misc_RNA (1)...(19): siRNA sense strand
cgacagcgaccagaucaag

SEQ ID NO: 182655 - RNA, 19 nt, Homo sapiens
  misc_RNA (1)...(19): siRNA sense strand
agccaaugaugaucugaau

SEQ ID NO: 182656 - RNA, 19 nt, Homo sapiens
  misc_RNA (1)...(19): siRNA sense strand
cucagcaguucuuuggauu

SEQ ID NO: 182657 - RNA, 19 nt, Homo sapiens
  misc_RNA (1)...(19): siRNA sense strand
ccaaugaugaucugaauua

SEQ ID NO: 182658 - RNA, 19 nt, Homo sapiens
  misc_RNA (1)...(19): siRNA sense strand
gcagaauuaugaaagaaga

SEQ ID NO: 182659 - RNA, 19 nt, Homo sapiens
  misc_RNA (1)...(19): siRNA sense strand
gcaguucuuuggauuaaug

SEQ ID NO: 182660 - RNA, 19 nt, Homo sapiens
  misc_RNA (1)...(19): siRNA sense strand
gaaauaggagccaaugaug

SEQ ID NO: 182661 - RNA, 19 nt, Homo sapiens
  misc_RNA (1)...(19): siRNA sense strand
cagcaguucuuuggauuaa

SEQ ID NO: 182662 - RNA, 19 nt, Homo sapiens
  misc_RNA (1)...(19): siRNA sense strand
gcuguuugcagaagaaaua

SEQ ID NO: 182663 - RNA, 19 nt, Homo sapiens
  misc_RNA (1)...(19): siRNA sense strand
gaagaaauaggagccaaug

SEQ ID NO: 182664 - RNA, 19 nt, Homo sapiens
  misc_RNA (1)...(19): siRNA sense strand
ggccagaucucucacaaaa

SEQ ID NO: 182665 - RNA, 19 nt, Homo sapiens
  misc_RNA (1)...(19): siRNA sense strand
gcaaugcagaauuaugaaa

SEQ ID NO: 182666 - RNA, 19 nt, Homo sapiens
  misc_RNA (1)...(19): siRNA sense strand
gacccaagccucagcaguu

SEQ ID NO: 182667 - RNA, 19 nt, Homo sapiens
  misc_RNA (1)...(19): siRNA sense strand
agaaauaggagccaaugau

SEQ ID NO: 182668 - RNA, 19 nt, Homo sapiens
  misc_RNA (1)...(19): siRNA sense strand
augaugaucugaauuacug

SEQ ID NO: 182669 - RNA, 19 nt, Homo sapiens
  misc_RNA (1)...(19): siRNA sense strand
aaauaggagccaaugauga

SEQ ID NO: 182670 - RNA, 19 nt, Homo sapiens
  misc_RNA (1)...(19): siRNA sense strand
ccucagcaguucuuuggau

SEQ ID NO: 182671 - RNA, 19 nt, Homo sapiens
  misc_RNA (1)...(19): siRNA sense strand
gaacugccggagcccuuug

SEQ ID NO: 182672 - RNA, 19 nt, Homo sapiens
  misc_RNA (1)...(19): siRNA sense strand
ucagcaguucuuuggauua

SEQ ID NO: 182673 - RNA, 19 nt, Homo sapiens
  misc_RNA (1)...(19): siRNA sense strand
ucagcuguuugcagaagaa

SEQ ID NO: 182674 - RNA, 19 nt, Homo sapiens
  misc_RNA (1)...(19): siRNA sense strand
ugucuccacucagcuguuu

SEQ ID NO: 182675 - RNA, 19 nt, Homo sapiens
  misc_RNA (1)...(19): siRNA sense strand
gagccaaugaugaucugaa

SEQ ID NO: 182676 - RNA, 19 nt, Homo sapiens
  misc_RNA (1)...(19): siRNA sense strand
gacauggccagaucucuca

SEQ ID NO: 182677 - RNA, 19 nt, Homo sapiens
  misc_RNA (1)...(19): siRNA sense strand
aauaggagccaaugaugau

SEQ ID NO: 182678 - RNA, 19 nt, Homo sapiens
  misc_RNA (1)...(19): siRNA sense strand
ggaacugccggagcccuuu

SEQ ID NO: 182679 - RNA, 19 nt, Homo sapiens
  misc_RNA (1)...(19): siRNA sense strand
guacgacagcgaccagauc

SEQ ID NO: 182680 - RNA, 19 nt, Homo sapiens
  misc_RNA (1)...(19): siRNA sense strand
caaugaugaucugaauuac

SEQ ID NO: 182681 - RNA, 19 nt, Homo sapiens
  misc_RNA (1)...(19): siRNA sense strand
caaugcagaauuaugaaag

SEQ ID NO: 182682 - RNA, 19 nt, Homo sapiens
  misc_RNA (1)...(19): siRNA sense strand
cgacagcgaccagaucaag

SEQ ID NO: 182683 - RNA, 19 nt, Homo sapiens
  misc_RNA (1)...(19): siRNA sense strand
agccaaugaugaucugaau

SEQ ID NO: 182684 - RNA, 19 nt, Homo sapiens
  misc_RNA (1)...(19): siRNA sense strand
cucagcaguucuuuggauu

SEQ ID NO: 182685 - RNA, 19 nt, Homo sapiens
  misc_RNA (1)...(19): siRNA sense strand
gaugugaaguuuccuauaa

SEQ ID NO: 182686 - RNA, 19 nt, Homo sapiens
  misc_RNA (1)...(19): siRNA sense strand
gaaguuuccuauaagguua

SEQ ID NO: 182687 - RNA, 19 nt, Homo sapiens
  misc_RNA (1)...(19): siRNA sense strand
gaaaacaucuacccuauuc

SEQ ID NO: 182688 - RNA, 19 nt, Homo sapiens
  misc_RNA (1)...(19): siRNA sense strand
gguuuaaucuacagaauga

SEQ ID NO: 182689 - RNA, 19 nt, Homo sapiens
  misc_RNA (1)...(19): siRNA sense strand
ggagaguucugggauugua

SEQ ID NO: 182690 - RNA, 19 nt, Homo sapiens
  misc_RNA (1)...(19): siRNA sense strand
cuaaagggauucaggaaga

SEQ ID NO: 182691 - RNA, 19 nt, Homo sapiens
  misc_RNA (1)...(19): siRNA sense strand
gaucaaacccagaauuguu

SEQ ID NO: 182692 - RNA, 19 nt, Homo sapiens
  misc_RNA (1)...(19): siRNA sense strand
guuguaaacuugaccuaaa

SEQ ID NO: 182693 - RNA, 19 nt, Homo sapiens
  misc_RNA (1)...(19): siRNA sense strand
gcacaggagccaagaguga

SEQ ID NO: 182694 - RNA, 19 nt, Homo sapiens
  misc_RNA (1)...(19): siRNA sense strand
agaguuauuuccugguuua

SEQ ID NO: 182695 - RNA, 19 nt, Homo sapiens
  misc_RNA (1)...(19): siRNA sense strand
gagcugugaugugaaguuu

SEQ ID NO: 182696 - RNA, 19 nt, Homo sapiens
  misc_RNA (1)...(19): siRNA sense strand
gggcaccacuccacuguau

SEQ ID NO: 182697 - RNA, 19 nt, Homo sapiens
  misc_RNA (1)...(19): siRNA sense strand
caccaacaauuuaguaguu

SEQ ID NO: 182698 - RNA, 19 nt, Homo sapiens
  misc_RNA (1)...(19): siRNA sense strand
acaacagccugccaccuua

SEQ ID NO: 182699 - RNA, 19 nt, Homo sapiens
  misc_RNA (1)...(19): siRNA sense strand
gaacaccaauagucugucu

SEQ ID NO: 182700 - RNA, 19 nt, Homo sapiens
  misc_RNA (1)...(19): siRNA sense strand
gaaucuugguuguaaacuu

SEQ ID NO: 182701 - RNA, 19 nt, Homo sapiens
  misc_RNA (1)...(19): siRNA sense strand
cagugaaucuugguuguaa

SEQ ID NO: 182702 - RNA, 19 nt, Homo sapiens
  misc_RNA (1)...(19): siRNA sense strand
gcgguaaucaugaggauaa

SEQ ID NO: 182703 - RNA, 19 nt, Homo sapiens
  misc_RNA (1)...(19): siRNA sense strand
guuaugagccagaguuauu

SEQ ID NO: 182704 - RNA, 19 nt, Homo sapiens
  misc_RNA (1)...(19): siRNA sense strand
aaacaucuacccuauucua

SEQ ID NO: 182705 - RNA, 19 nt, Homo sapiens
  misc_RNA (1)...(19): siRNA sense strand
gcucacccaccaacaauuu

SEQ ID NO: 182706 - RNA, 19 nt, Homo sapiens
  misc_RNA (1)...(19): siRNA sense strand
aauauuguauccacaguga

SEQ ID NO: 182707 - RNA, 19 nt, Homo sapiens
  misc_RNA (1)...(19): siRNA sense strand
uaaagucagagcagaaauu

SEQ ID NO: 182708 - RNA, 19 nt, Homo sapiens
  misc_RNA (1)...(19): siRNA sense strand
aaucuugguuguaaacuug

SEQ ID NO: 182709 - RNA, 19 nt, Homo sapiens
  misc_RNA (1)...(19): siRNA sense strand
caucuacccuauucuaaag

SEQ ID NO: 182710 - RNA, 19 nt, Homo sapiens
  misc_RNA (1)...(19): siRNA sense strand
guuauuuccugguuuaauc

SEQ ID NO: 182711 - RNA, 19 nt, Homo sapiens
  misc_RNA (1)...(19): siRNA sense strand
agucagagcagaaauuuau

SEQ ID NO: 182712 - RNA, 19 nt, Homo sapiens
  misc_RNA (1)...(19): siRNA sense strand
ccgaaacgccgaauauaau

SEQ ID NO: 182713 - RNA, 19 nt, Homo sapiens
  misc_RNA (1)...(19): siRNA sense strand
uuaguccaaugaugccuua

SEQ ID NO: 182714 - RNA, 19 nt, Homo sapiens
  misc_RNA (1)...(19): siRNA sense strand
gcuaaagucagagcagaaa

SEQ ID NO: 182715 - RNA, 19 nt, Homo sapiens
  misc_RNA (1)...(19): siRNA sense strand
gcagaaauuuaugaagcau

SEQ ID NO: 182716 - RNA, 19 nt, Homo sapiens
  misc_RNA (1)...(19): siRNA sense strand
cggaaucccuaucuuuagu

SEQ ID NO: 182717 - RNA, 19 nt, Homo sapiens
  misc_RNA (1)...(19): siRNA sense strand
aaagucagagcagaaauuu

SEQ ID NO: 182718 - RNA, 19 nt, Homo sapiens
  misc_RNA (1)...(19): siRNA sense strand
cccggaaucccuaucuuua

SEQ ID NO: 182719 - RNA, 19 nt, Homo sapiens
  misc_RNA (1)...(19): siRNA sense strand
cccgaaacgccgaauauaa

SEQ ID NO: 182720 - RNA, 19 nt, Homo sapiens
  misc_RNA (1)...(19): siRNA sense strand
ugaaguuuccuauaagguu

SEQ ID NO: 182721 - RNA, 19 nt, Homo sapiens
  misc_RNA (1)...(19): siRNA sense strand
cagaguuauuuccugguuu

SEQ ID NO: 182722 - RNA, 19 nt, Homo sapiens
  misc_RNA (1)...(19): siRNA sense strand
guaguuaugagccagaguu

SEQ ID NO: 182723 - RNA, 19 nt, Homo sapiens
  misc_RNA (1)...(19): siRNA sense strand
gcccgaaacgccgaauaua

SEQ ID NO: 182724 - RNA, 19 nt, Homo sapiens
  misc_RNA (1)...(19): siRNA sense strand
uaucuuuaguccaaugaug

SEQ ID NO: 182725 - RNA, 19 nt, Homo sapiens
  misc_RNA (1)...(19): siRNA sense strand
guacagaaguuggguuuuc

SEQ ID NO: 182726 - RNA, 19 nt, Homo sapiens
  misc_RNA (1)...(19): siRNA sense strand
cuaaagaccauugcacuuc

SEQ ID NO: 182727 - RNA, 19 nt, Homo sapiens
  misc_RNA (1)...(19): siRNA sense strand
cuagaguuguacagaaguu

SEQ ID NO: 182728 - RNA, 19 nt, Homo sapiens
  misc_RNA (1)...(19): siRNA sense strand
gagccaagagugaagaaca

SEQ ID NO: 182729 - RNA, 19 nt, Homo sapiens
  misc_RNA (1)...(19): siRNA sense strand
guccaaugaugccuuaugg

SEQ ID NO: 182730 - RNA, 19 nt, Homo sapiens
  misc_RNA (1)...(19): siRNA sense strand
ucagagcagaaauuuauga

SEQ ID NO: 182731 - RNA, 19 nt, Homo sapiens
  misc_RNA (1)...(19): siRNA sense strand
ccacgaaccacggcacuga

SEQ ID NO: 182732 - RNA, 19 nt, Homo sapiens
  misc_RNA (1)...(19): siRNA sense strand
gaaaauaugcuagaguugu

SEQ ID NO: 182733 - RNA, 19 nt, Homo sapiens
  misc_RNA (1)...(19): siRNA sense strand
uguauuaacaggugcuaaa

SEQ ID NO: 182734 - RNA, 19 nt, Homo sapiens
  misc_RNA (1)...(19): siRNA sense strand
agaaugaucaaacccagaa

SEQ ID NO: 182735 - RNA, 19 nt, Homo sapiens
  misc_RNA (1)...(19): siRNA sense strand
ucacagacucucacaacug

SEQ ID NO: 182736 - RNA, 19 nt, Homo sapiens
  misc_RNA (1)...(19): siRNA sense strand
gcgguuugcugcgguaauc

SEQ ID NO: 182737 - RNA, 19 nt, Homo sapiens
  misc_RNA (1)...(19): siRNA sense strand
ucggagaguucugggauug

SEQ ID NO: 182738 - RNA, 19 nt, Homo sapiens
  misc_RNA (1)...(19): siRNA sense strand
ggagcugugaugugaaguu

SEQ ID NO: 182739 - RNA, 19 nt, Homo sapiens
  misc_RNA (1)...(19): siRNA sense strand
gaaccacggcacugauuuu

SEQ ID NO: 182740 - RNA, 19 nt, Homo sapiens
  misc_RNA (1)...(19): siRNA sense strand
uaccgcagcugcaaaauau

SEQ ID NO: 182741 - RNA, 19 nt, Homo sapiens
  misc_RNA (1)...(19): siRNA sense strand
cgaaacgccgaauauaauc

SEQ ID NO: 182742 - RNA, 19 nt, Homo sapiens
  misc_RNA (1)...(19): siRNA sense strand
auuaacaggugcuaaaguc

SEQ ID NO: 182743 - RNA, 19 nt, Homo sapiens
  misc_RNA (1)...(19): siRNA sense strand
cacagugaaucuugguugu

SEQ ID NO: 182744 - RNA, 19 nt, Homo sapiens
  misc_RNA (1)...(19): siRNA sense strand
gcugugaugugaaguuucc

SEQ ID NO: 182745 - RNA, 19 nt, Homo sapiens
  misc_RNA (1)...(19): siRNA sense strand
cgaaccacggcacugauuu

SEQ ID NO: 182746 - RNA, 19 nt, Homo sapiens
  misc_RNA (1)...(19): siRNA sense strand
guaaucaugaggauaagag

SEQ ID NO: 182747 - RNA, 19 nt, Homo sapiens
  misc_RNA (1)...(19): siRNA sense strand
ugccaugacucccggaauc

SEQ ID NO: 182748 - RNA, 19 nt, Homo sapiens
  misc_RNA (1)...(19): siRNA sense strand
gguuguaaacuugaccuaa

SEQ ID NO: 182749 - RNA, 19 nt, Homo sapiens
  misc_RNA (1)...(19): siRNA sense strand
acaucuacccuauucuaaa

SEQ ID NO: 182750 - RNA, 19 nt, Homo sapiens
  misc_RNA (1)...(19): siRNA sense strand
cagagcagaaauuuaugaa

SEQ ID NO: 182751 - RNA, 19 nt, Homo sapiens
  misc_RNA (1)...(19): siRNA sense strand
aacaggugcuaaagucaga

SEQ ID NO: 182752 - RNA, 19 nt, Homo sapiens
  misc_RNA (1)...(19): siRNA sense strand
gauucaggaagacgacgua

SEQ ID NO: 182753 - RNA, 19 nt, Homo sapiens
  misc_RNA (1)...(19): siRNA sense strand
guaccgcagcugcaaaaua

SEQ ID NO: 182754 - RNA, 19 nt, Homo sapiens
  misc_RNA (1)...(19): siRNA sense strand
aaaggcagcagcagcaaca

SEQ ID NO: 182755 - RNA, 19 nt, Homo sapiens
  misc_RNA (1)...(19): siRNA sense strand
ccuaaagaccauugcacuu

SEQ ID NO: 182756 - RNA, 19 nt, Homo sapiens
  misc_RNA (1)...(19): siRNA sense strand
gcagcagcagcaacaacaa

SEQ ID NO: 182757 - RNA, 19 nt, Homo sapiens
  misc_RNA (1)...(19): siRNA sense strand
ugaugugaaguuuccuaua

SEQ ID NO: 182758 - RNA, 19 nt, Homo sapiens
  misc_RNA (1)...(19): siRNA sense strand
gcaagaaaauaugcuagag

SEQ ID NO: 182759 - RNA, 19 nt, Homo sapiens
  misc_RNA (1)...(19): siRNA sense strand
uauaaucccaagcgguuug

SEQ ID NO: 182760 - RNA, 19 nt, Homo sapiens
  misc_RNA (1)...(19): siRNA sense strand
guggggagcugugauguga

SEQ ID NO: 182761 - RNA, 19 nt, Homo sapiens
  misc_RNA (1)...(19): siRNA sense strand
aacaacagccugccaccuu

SEQ ID NO: 182762 - RNA, 19 nt, Homo sapiens
  misc_RNA (1)...(19): siRNA sense strand
ggcagcagcagcaacaaca

SEQ ID NO: 182763 - RNA, 19 nt, Homo sapiens
  misc_RNA (1)...(19): siRNA sense strand
uaguuaugagccagaguua

SEQ ID NO: 182764 - RNA, 19 nt, Homo sapiens
  misc_RNA (1)...(19): siRNA sense strand
augcuagaguuguacagaa

SEQ ID NO: 182765 - RNA, 19 nt, Homo sapiens
  misc_RNA (1)...(19): siRNA sense strand
ggaaucccuaucuuuaguc

SEQ ID NO: 182766 - RNA, 19 nt, Homo sapiens
  misc_RNA (1)...(19): siRNA sense strand
uaaagggauucaggaagac

SEQ ID NO: 182767 - RNA, 19 nt, Homo sapiens
  misc_RNA (1)...(19): siRNA sense strand
aaugaucaaacccagaauu

SEQ ID NO: 182768 - RNA, 19 nt, Homo sapiens
  misc_RNA (1)...(19): siRNA sense strand
ggacucaguucagaaauua

SEQ ID NO: 182769 - RNA, 19 nt, Homo sapiens
  misc_RNA (1)...(19): siRNA sense strand
gcacaaaucuucccacaag

SEQ ID NO: 182770 - RNA, 19 nt, Homo sapiens
  misc_RNA (1)...(19): siRNA sense strand
gaacaggacuuugagaaga

SEQ ID NO: 182771 - RNA, 19 nt, Homo sapiens
  misc_RNA (1)...(19): siRNA sense strand
gcacagagacccagagaaa

SEQ ID NO: 182772 - RNA, 19 nt, Homo sapiens
  misc_RNA (1)...(19): siRNA sense strand
cgagagaccucacaaagug

SEQ ID NO: 182773 - RNA, 19 nt, Homo sapiens
  misc_RNA (1)...(19): siRNA sense strand
agaaagaggugucacagaa

SEQ ID NO: 182774 - RNA, 19 nt, Homo sapiens
  misc_RNA (1)...(19): siRNA sense strand
agacagauauggaggauga

SEQ ID NO: 182775 - RNA, 19 nt, Homo sapiens
  misc_RNA (1)...(19): siRNA sense strand
ccaagacaauuaaagcuuu

SEQ ID NO: 182776 - RNA, 19 nt, Homo sapiens
  misc_RNA (1)...(19): siRNA sense strand
gaagagcaauucccgaaag

SEQ ID NO: 182777 - RNA, 19 nt, Homo sapiens
  misc_RNA (1)...(19): siRNA sense strand
gcagcagccugaagaagaa

SEQ ID NO: 182778 - RNA, 19 nt, Homo sapiens
  misc_RNA (1)...(19): siRNA sense strand
gaagaagaagcuggauuua

SEQ ID NO: 182779 - RNA, 19 nt, Homo sapiens
  misc_RNA (1)...(19): siRNA sense strand
gcagcacuguuuccuauga

SEQ ID NO: 182780 - RNA, 19 nt, Homo sapiens
  misc_RNA (1)...(19): siRNA sense strand
agaaacagaucaauuaugg

SEQ ID NO: 182781 - RNA, 19 nt, Homo sapiens
  misc_RNA (1)...(19): siRNA sense strand
gaaacccacugugaagaaa

SEQ ID NO: 182782 - RNA, 19 nt, Homo sapiens
  misc_RNA (1)...(19): siRNA sense strand
gaucaauuauggaaaguuc

SEQ ID NO: 182783 - RNA, 19 nt, Homo sapiens
  misc_RNA (1)...(19): siRNA sense strand
ugagaaaggugccugaugu

SEQ ID NO: 182784 - RNA, 19 nt, Homo sapiens
  misc_RNA (1)...(19): siRNA sense strand
ccacggcacuuggagauaa

SEQ ID NO: 182785 - RNA, 19 nt, Homo sapiens
  misc_RNA (1)...(19): siRNA sense strand
gagcagcugucccugagaa

SEQ ID NO: 182786 - RNA, 19 nt, Homo sapiens
  misc_RNA (1)...(19): siRNA sense strand
guaaauagcuugcgaaaac

SEQ ID NO: 182787 - RNA, 19 nt, Homo sapiens
  misc_RNA (1)...(19): siRNA sense strand
cagcagcacuguuuccuau

SEQ ID NO: 182788 - RNA, 19 nt, Homo sapiens
  misc_RNA (1)...(19): siRNA sense strand
gaaaggugccugauguguu

SEQ ID NO: 182789 - RNA, 19 nt, Homo sapiens
  misc_RNA (1)...(19): siRNA sense strand
aaaggugccugauguguug

SEQ ID NO: 182790 - RNA, 19 nt, Homo sapiens
  misc_RNA (1)...(19): siRNA sense strand
gaaaugcugagccugauga

SEQ ID NO: 182791 - RNA, 19 nt, Homo sapiens
  misc_RNA (1)...(19): siRNA sense strand
agaaagacccgaagaguau

SEQ ID NO: 182792 - RNA, 19 nt, Homo sapiens
  misc_RNA (1)...(19): siRNA sense strand
agaagaagcuggauuuacu

SEQ ID NO: 182793 - RNA, 19 nt, Homo sapiens
  misc_RNA (1)...(19): siRNA sense strand
acaaggcccucuccaaaga

SEQ ID NO: 182794 - RNA, 19 nt, Homo sapiens
  misc_RNA (1)...(19): siRNA sense strand
gaagaaacauaggaaacuc

SEQ ID NO: 182795 - RNA, 19 nt, Homo sapiens
  misc_RNA (1)...(19): siRNA sense strand
ggaaacccacugugaagaa

SEQ ID NO: 182796 - RNA, 19 nt, Homo sapiens
  misc_RNA (1)...(19): siRNA sense strand
gggaugcccugcagaagga

SEQ ID NO: 182797 - RNA, 19 nt, Homo sapiens
  misc_RNA (1)...(19): siRNA sense strand
gaucagcuguaucgcauag

SEQ ID NO: 182798 - RNA, 19 nt, Homo sapiens
  misc_RNA (1)...(19): siRNA sense strand
gaggagagaugagagaaag

SEQ ID NO: 182799 - RNA, 19 nt, Homo sapiens
  misc_RNA (1)...(19): siRNA sense strand
gaagaaagacccgaagagu

SEQ ID NO: 182800 - RNA, 19 nt, Homo sapiens
  misc_RNA (1)...(19): siRNA sense strand
aaagaggugucacagaaug

SEQ ID NO: 182801 - RNA, 19 nt, Homo sapiens
  misc_RNA (1)...(19): siRNA sense strand
ggaaagggguugugaguca

SEQ ID NO: 182802 - RNA, 19 nt, Homo sapiens
  misc_RNA (1)...(19): siRNA sense strand
agaagaagaagcuggauuu

SEQ ID NO: 182803 - RNA, 19 nt, Homo sapiens
  misc_RNA (1)...(19): siRNA sense strand
gcauagaggaauacaauca

SEQ ID NO: 182804 - RNA, 19 nt, Homo sapiens
  misc_RNA (1)...(19): siRNA sense strand
cagauucucccgacgauaa

SEQ ID NO: 182805 - RNA, 19 nt, Homo sapiens
  misc_RNA (1)...(19): siRNA sense strand
caaagugucucacggucau

SEQ ID NO: 182806 - RNA, 19 nt, Homo sapiens
  misc_RNA (1)...(19): siRNA sense strand
caaugcauccgaguacuua

SEQ ID NO: 182807 - RNA, 19 nt, Homo sapiens
  misc_RNA (1)...(19): siRNA sense strand
gaaagaggugucacagaau

SEQ ID NO: 182808 - RNA, 19 nt, Homo sapiens
  misc_RNA (1)...(19): siRNA sense strand
gcagaagaaacauaggaaa

SEQ ID NO: 182809 - RNA, 19 nt, Homo sapiens
  misc_RNA (1)...(19): siRNA sense strand
acacaaggcccucuccaaa

SEQ ID NO: 182810 - RNA, 19 nt, Homo sapiens
  misc_RNA (1)...(19): siRNA sense strand
gaccaggagcccauuguuu

SEQ ID NO: 182811 - RNA, 19 nt, Homo sapiens
  misc_RNA (1)...(19): siRNA sense strand
gcagagagaaaucacacaa

SEQ ID NO: 182812 - RNA, 19 nt, Homo sapiens
  misc_RNA (1)...(19): siRNA sense strand
uauggaaaguucauuguca

SEQ ID NO: 182813 - RNA, 19 nt, Homo sapiens
  misc_RNA (1)...(19): siRNA sense strand
cacagaaugucaccaacuu

SEQ ID NO: 182814 - RNA, 19 nt, Homo sapiens
  misc_RNA (1)...(19): siRNA sense strand
acaaggagcacaaaucuuc

SEQ ID NO: 182815 - RNA, 19 nt, Homo sapiens
  misc_RNA (1)...(19): siRNA sense strand
guacgucgaccacuacaga

SEQ ID NO: 182816 - RNA, 19 nt, Homo sapiens
  misc_RNA (1)...(19): siRNA sense strand
gacccugagucuucugauu

SEQ ID NO: 182817 - RNA, 19 nt, Homo sapiens
  misc_RNA (1)...(19): siRNA sense strand
caagacaauuaaagcuuuc

SEQ ID NO: 182818 - RNA, 19 nt, Homo sapiens
  misc_RNA (1)...(19): siRNA sense strand
aagaaagacccgaagagua

SEQ ID NO: 182819 - RNA, 19 nt, Homo sapiens
  misc_RNA (1)...(19): siRNA sense strand
aauccuaccucagcuauga

SEQ ID NO: 182820 - RNA, 19 nt, Homo sapiens
  misc_RNA (1)...(19): siRNA sense strand
gggaaaggccacagcaaug

SEQ ID NO: 182821 - RNA, 19 nt, Homo sapiens
  misc_RNA (1)...(19): siRNA sense strand
cgaguacuaacaaagaaua

SEQ ID NO: 182822 - RNA, 19 nt, Homo sapiens
  misc_RNA (1)...(19): siRNA sense strand
ggagauaaaggacuuaaaa

SEQ ID NO: 182823 - RNA, 19 nt, Homo sapiens
  misc_RNA (1)...(19): siRNA sense strand
ggagacagauauggaggau

SEQ ID NO: 182824 - RNA, 19 nt, Homo sapiens
  misc_RNA (1)...(19): siRNA sense strand
agaaagagaaggacagaga

SEQ ID NO: 182825 - RNA, 19 nt, Homo sapiens
  misc_RNA (1)...(19): siRNA sense strand
gaagccggcuggagcugau

SEQ ID NO: 182826 - RNA, 19 nt, Homo sapiens
  misc_RNA (1)...(19): siRNA sense strand
gagaaaccgcccucuagug

SEQ ID NO: 182827 - RNA, 19 nt, Homo sapiens
  misc_RNA (1)...(19): siRNA sense strand
gagaaagaggugucacaga

SEQ ID NO: 182828 - RNA, 19 nt, Homo sapiens
  misc_RNA (1)...(19): siRNA sense strand
ucaccgagacuuuaaggaa

SEQ ID NO: 182829 - RNA, 19 nt, Homo sapiens
  misc_RNA (1)...(19): siRNA sense strand
gaaauuacccaaggugaac

SEQ ID NO: 182830 - RNA, 19 nt, Homo sapiens
  misc_RNA (1)...(19): siRNA sense strand
gggagaaaccgcccucuag

SEQ ID NO: 182831 - RNA, 19 nt, Homo sapiens
  misc_RNA (1)...(19): siRNA sense strand
ggacaaugcaagggagaaa

SEQ ID NO: 182832 - RNA, 19 nt, Homo sapiens
  misc_RNA (1)...(19): siRNA sense strand
acagaucaauuauggaaag

SEQ ID NO: 182833 - RNA, 19 nt, Homo sapiens
  misc_RNA (1)...(19): siRNA sense strand
ccuaagaagcuauugaaau

SEQ ID NO: 182834 - RNA, 19 nt, Homo sapiens
  misc_RNA (1)...(19): siRNA sense strand
cccauacucuguucuugaa

SEQ ID NO: 182835 - RNA, 19 nt, Homo sapiens
  misc_RNA (1)...(19): siRNA sense strand
gcaaugcauccgaguacuu

SEQ ID NO: 182836 - RNA, 19 nt, Homo sapiens
  misc_RNA (1)...(19): siRNA sense strand
ccaagaugcagguguauuc

SEQ ID NO: 182837 - RNA, 19 nt, Homo sapiens
  misc_RNA (1)...(19): siRNA sense strand
ggagaaaccgcccucuagu

SEQ ID NO: 182838 - RNA, 19 nt, Homo sapiens
  misc_RNA (1)...(19): siRNA sense strand
ggaaaacaguaaauagcuu

SEQ ID NO: 182839 - RNA, 19 nt, Homo sapiens
  misc_RNA (1)...(19): siRNA sense strand
aaacaaggagcacaaaucu

SEQ ID NO: 182840 - RNA, 19 nt, Homo sapiens
  misc_RNA (1)...(19): siRNA sense strand
gaagggaaagucaaaacua

SEQ ID NO: 182841 - RNA, 19 nt, Homo sapiens
  misc_RNA (1)...(19): siRNA sense strand
gagcagcggcuacgaguac

SEQ ID NO: 182842 - RNA, 19 nt, Homo sapiens
  misc_RNA (1)...(19): siRNA sense strand
ggaagaaagacccgaagag

SEQ ID NO: 182843 - RNA, 19 nt, Homo sapiens
  misc_RNA (1)...(19): siRNA sense strand
agauguacgucgaccacua

SEQ ID NO: 182844 - RNA, 19 nt, Homo sapiens
  misc_RNA (1)...(19): siRNA sense strand
cuacgaguacuaacaaaga

SEQ ID NO: 182845 - RNA, 19 nt, Homo sapiens
  misc_RNA (1)...(19): siRNA sense strand
gaagaagcuggauuuacug

SEQ ID NO: 182846 - RNA, 19 nt, Homo sapiens
  misc_RNA (1)...(19): siRNA sense strand
uggacucaguucagaaauu

SEQ ID NO: 182847 - RNA, 19 nt, Homo sapiens
  misc_RNA (1)...(19): siRNA sense strand
ggcagcagccugaagaaga

SEQ ID NO: 182848 - RNA, 19 nt, Homo sapiens
  misc_RNA (1)...(19): siRNA sense strand
cacccugccuauuacagua

SEQ ID NO: 182849 - RNA, 19 nt, Homo sapiens
  misc_RNA (1)...(19): siRNA sense strand
ccacagcaaugccuuucag

SEQ ID NO: 182850 - RNA, 19 nt, Homo sapiens
  misc_RNA (1)...(19): siRNA sense strand
gagggcagcagccugaaga

SEQ ID NO: 182851 - RNA, 19 nt, Homo sapiens
  misc_RNA (1)...(19): siRNA sense strand
ggaccaggagcccauuguu

SEQ ID NO: 182852 - RNA, 19 nt, Homo sapiens
  misc_RNA (1)...(19): siRNA sense strand
guggucagcagcacuguuu

SEQ ID NO: 182853 - RNA, 19 nt, Homo sapiens
  misc_RNA (1)...(19): siRNA sense strand
ccaaaggccgacaagcaaa

SEQ ID NO: 182854 - RNA, 19 nt, Homo sapiens
  misc_RNA (1)...(19): siRNA sense strand
gagagaaagaggugucaca

SEQ ID NO: 182855 - RNA, 19 nt, Homo sapiens
  misc_RNA (1)...(19): siRNA sense strand
uagccaagcugagaaaggu

SEQ ID NO: 182856 - RNA, 19 nt, Homo sapiens
  misc_RNA (1)...(19): siRNA sense strand
uguaucgcauagaggaaua

SEQ ID NO: 182857 - RNA, 19 nt, Homo sapiens
  misc_RNA (1)...(19): siRNA sense strand
ccuaggaaacccacuguga

SEQ ID NO: 182858 - RNA, 19 nt, Homo sapiens
  misc_RNA (1)...(19): siRNA sense strand
gcccaaaggccgacaagca

SEQ ID NO: 182859 - RNA, 19 nt, Homo sapiens
  misc_RNA (1)...(19): siRNA sense strand
uacgaguacuaacaaagaa

SEQ ID NO: 182860 - RNA, 19 nt, Homo sapiens
  misc_RNA (1)...(19): siRNA sense strand
gaaacagaucaauuaugga

SEQ ID NO: 182861 - RNA, 19 nt, Homo sapiens
  misc_RNA (1)...(19): siRNA sense strand
acccugagucuucugauua

SEQ ID NO: 182862 - RNA, 19 nt, Homo sapiens
  misc_RNA (1)...(19): siRNA sense strand
ccaaugauggccaagacaa

SEQ ID NO: 182863 - RNA, 19 nt, Homo sapiens
  misc_RNA (1)...(19): siRNA sense strand
cuaggaaacccacugugaa

SEQ ID NO: 182864 - RNA, 19 nt, Homo sapiens
  misc_RNA (1)...(19): siRNA sense strand
ucgcauagaggaauacaau

SEQ ID NO: 182865 - RNA, 19 nt, Homo sapiens
  misc_RNA (1)...(19): siRNA sense strand
gcagaaggaggaggagaug

SEQ ID NO: 182866 - RNA, 19 nt, Homo sapiens
  misc_RNA (1)...(19): siRNA sense strand
cgagcauguuggaagcuuu

SEQ ID NO: 182867 - RNA, 19 nt, Homo sapiens
  misc_RNA (1)...(19): siRNA sense strand
gagcauguuggaagcuuug

SEQ ID NO: 182868 - RNA, 19 nt, Homo sapiens
  misc_RNA (1)...(19): siRNA sense strand
gcacagaccugaaccauaa

SEQ ID NO: 182869 - RNA, 19 nt, Homo sapiens
  misc_RNA (1)...(19): siRNA sense strand
caacagaaaucaagacuga

SEQ ID NO: 182870 - RNA, 19 nt, Homo sapiens
  misc_RNA (1)...(19): siRNA sense strand
cagcagagauacuggauua

SEQ ID NO: 182871 - RNA, 19 nt, Homo sapiens
  misc_RNA (1)...(19): siRNA sense strand
gaacaagcaguacuaauga

SEQ ID NO: 182872 - RNA, 19 nt, Homo sapiens
  misc_RNA (1)...(19): siRNA sense strand
gaaaggugccuccugguuu

SEQ ID NO: 182873 - RNA, 19 nt, Homo sapiens
  misc_RNA (1)...(19): siRNA sense strand
ggacuucagugcgauguuu

SEQ ID NO: 182874 - RNA, 19 nt, Homo sapiens
  misc_RNA (1)...(19): siRNA sense strand
gaaugacagucgauuagga

SEQ ID NO: 182875 - RNA, 19 nt, Homo sapiens
  misc_RNA (1)...(19): siRNA sense strand
gaugaugaauccucccaaa

SEQ ID NO: 182876 - RNA, 19 nt, Homo sapiens
  misc_RNA (1)...(19): siRNA sense strand
cagcacagcuaucuucuuc

SEQ ID NO: 182877 - RNA, 19 nt, Homo sapiens
  misc_RNA (1)...(19): siRNA sense strand
gaagucagaugaugaaucc

SEQ ID NO: 182878 - RNA, 19 nt, Homo sapiens
  misc_RNA (1)...(19): siRNA sense strand
ucaaagagcuuggccgaau

SEQ ID NO: 182879 - RNA, 19 nt, Homo sapiens
  misc_RNA (1)...(19): siRNA sense strand
acucaaaucugaugggaaa

SEQ ID NO: 182880 - RNA, 19 nt, Homo sapiens
  misc_RNA (1)...(19): siRNA sense strand
gaacagcaagucagagaga

SEQ ID NO: 182881 - RNA, 19 nt, Homo sapiens
  misc_RNA (1)...(19): siRNA sense strand
ccacaauucuucugaccuu

SEQ ID NO: 182882 - RNA, 19 nt, Homo sapiens
  misc_RNA (1)...(19): siRNA sense strand
uaaugaagaugaggauuug

SEQ ID NO: 182883 - RNA, 19 nt, Homo sapiens
  misc_RNA (1)...(19): siRNA sense strand
gaccauaccagcaguaguu

SEQ ID NO: 182884 - RNA, 19 nt, Homo sapiens
  misc_RNA (1)...(19): siRNA sense strand
ccaaguccuuccuaugauu

SEQ ID NO: 182885 - RNA, 19 nt, Homo sapiens
  misc_RNA (1)...(19): siRNA sense strand
uuacagacagcccucauua

SEQ ID NO: 182886 - RNA, 19 nt, Homo sapiens
  misc_RNA (1)...(19): siRNA sense strand
gcacagcuaucuucuucag

SEQ ID NO: 182887 - RNA, 19 nt, Homo sapiens
  misc_RNA (1)...(19): siRNA sense strand
uuaccaggcugucaaucua

SEQ ID NO: 182888 - RNA, 19 nt, Homo sapiens
  misc_RNA (1)...(19): siRNA sense strand
ucgaucagcuucaaugguu

SEQ ID NO: 182889 - RNA, 19 nt, Homo sapiens
  misc_RNA (1)...(19): siRNA sense strand
cacaugaccgcuugaguua

SEQ ID NO: 182890 - RNA, 19 nt, Homo sapiens
  misc_RNA (1)...(19): siRNA sense strand
ggacagcauacuauucauu

SEQ ID NO: 182891 - RNA, 19 nt, Homo sapiens
  misc_RNA (1)...(19): siRNA sense strand
gaaagaggagguacaacau

SEQ ID NO: 182892 - RNA, 19 nt, Homo sapiens
  misc_RNA (1)...(19): siRNA sense strand
uaagagaagggaagaagaa

SEQ ID NO: 182893 - RNA, 19 nt, Homo sapiens
  misc_RNA (1)...(19): siRNA sense strand
agacagcccucauuacagu

SEQ ID NO: 182894 - RNA, 19 nt, Homo sapiens
  misc_RNA (1)...(19): siRNA sense strand
gcagucauccuuagucuag

SEQ ID NO: 182895 - RNA, 19 nt, Homo sapiens
  misc_RNA (1)...(19): siRNA sense strand
caaagagcuuggccgaaug

SEQ ID NO: 182896 - RNA, 19 nt, Homo sapiens
  misc_RNA (1)...(19): siRNA sense strand
ggaggaucguuuagacaga

SEQ ID NO: 182897 - RNA, 19 nt, Homo sapiens
  misc_RNA (1)...(19): siRNA sense strand
gggaagcagucaauucagu

SEQ ID NO: 182898 - RNA, 19 nt, Homo sapiens
  misc_RNA (1)...(19): siRNA sense strand
ucagagagaggaaccuuaa

SEQ ID NO: 182899 - RNA, 19 nt, Homo sapiens
  misc_RNA (1)...(19): siRNA sense strand
aaaggugccuccugguuug

SEQ ID NO: 182900 - RNA, 19 nt, Homo sapiens
  misc_RNA (1)...(19): siRNA sense strand
gacaugaagucagaugaug

SEQ ID NO: 182901 - RNA, 19 nt, Homo sapiens
  misc_RNA (1)...(19): siRNA sense strand
uaucaagguuucaucuaga

SEQ ID NO: 182902 - RNA, 19 nt, Homo sapiens
  misc_RNA (1)...(19): siRNA sense strand
ucacaugaccgcuugaguu

SEQ ID NO: 182903 - RNA, 19 nt, Homo sapiens
  misc_RNA (1)...(19): siRNA sense strand
gaaacuaccaacccuaugg

SEQ ID NO: 182904 - RNA, 19 nt, Homo sapiens
  misc_RNA (1)...(19): siRNA sense strand
cuaaugaagaugaggauuu

SEQ ID NO: 182905 - RNA, 19 nt, Homo sapiens
  misc_RNA (1)...(19): siRNA sense strand
gcaguacuaaugaagauga

SEQ ID NO: 182906 - RNA, 19 nt, Homo sapiens
  misc_RNA (1)...(19): siRNA sense strand
gcuuuggcaucuauuuauu

SEQ ID NO: 182907 - RNA, 19 nt, Homo sapiens
  misc_RNA (1)...(19): siRNA sense strand
uucaugaacucaaaucuga

SEQ ID NO: 182908 - RNA, 19 nt, Homo sapiens
  misc_RNA (1)...(19): siRNA sense strand
caugaccgcuugaguuauc

SEQ ID NO: 182909 - RNA, 19 nt, Homo sapiens
  misc_RNA (1)...(19): siRNA sense strand
gacauaaacacgagucuuc

SEQ ID NO: 182910 - RNA, 19 nt, Homo sapiens
  misc_RNA (1)...(19): siRNA sense strand
agaacaagcaguacuaaug

SEQ ID NO: 182911 - RNA, 19 nt, Homo sapiens
  misc_RNA (1)...(19): siRNA sense strand
gcagaacaagcaguacuaa

SEQ ID NO: 182912 - RNA, 19 nt, Homo sapiens
  misc_RNA (1)...(19): siRNA sense strand
gaccuccacuucccacaug

SEQ ID NO: 182913 - RNA, 19 nt, Homo sapiens
  misc_RNA (1)...(19): siRNA sense strand
gauaucaagguuucaucua

SEQ ID NO: 182914 - RNA, 19 nt, Homo sapiens
  misc_RNA (1)...(19): siRNA sense strand
ccaccaauguccagcuuuc

SEQ ID NO: 182915 - RNA, 19 nt, Homo sapiens
  misc_RNA (1)...(19): siRNA sense strand
ucagacagcauucuaggaa

SEQ ID NO: 182916 - RNA, 19 nt, Homo sapiens
  misc_RNA (1)...(19): siRNA sense strand
agagguggcuugcaaaguc

SEQ ID NO: 182917 - RNA, 19 nt, Homo sapiens
  misc_RNA (1)...(19): siRNA sense strand
acagacaggugaugcacuu

SEQ ID NO: 182918 - RNA, 19 nt, Homo sapiens
  misc_RNA (1)...(19): siRNA sense strand
acacgagucuuccaccaau

SEQ ID NO: 182919 - RNA, 19 nt, Homo sapiens
  misc_RNA (1)...(19): siRNA sense strand
uuauagagguggcuugcaa

SEQ ID NO: 182920 - RNA, 19 nt, Homo sapiens
  misc_RNA (1)...(19): siRNA sense strand
uuggaagccucaauucaaa

SEQ ID NO: 182921 - RNA, 19 nt, Homo sapiens
  misc_RNA (1)...(19): siRNA sense strand
ugaaagaggagguacaaca

SEQ ID NO: 182922 - RNA, 19 nt, Homo sapiens
  misc_RNA (1)...(19): siRNA sense strand
cuaguuauccaucuccuaa

SEQ ID NO: 182923 - RNA, 19 nt, Homo sapiens
  misc_RNA (1)...(19): siRNA sense strand
caacaccuuucaugaacuc

SEQ ID NO: 182924 - RNA, 19 nt, Homo sapiens
  misc_RNA (1)...(19): siRNA sense strand
acagaaaucaagacugaaa

SEQ ID NO: 182925 - RNA, 19 nt, Homo sapiens
  misc_RNA (1)...(19): siRNA sense strand
cauaaugcaccaauuggaa

SEQ ID NO: 182926 - RNA, 19 nt, Homo sapiens
  misc_RNA (1)...(19): siRNA sense strand
gaugaaagaggagguacaa

SEQ ID NO: 182927 - RNA, 19 nt, Homo sapiens
  misc_RNA (1)...(19): siRNA sense strand
ggacccacaauucuucuga

SEQ ID NO: 182928 - RNA, 19 nt, Homo sapiens
  misc_RNA (1)...(19): siRNA sense strand
gaauggaggaucguuuaga

SEQ ID NO: 182929 - RNA, 19 nt, Homo sapiens
  misc_RNA (1)...(19): siRNA sense strand
ucgaauggaggaucguuua

SEQ ID NO: 182930 - RNA, 19 nt, Homo sapiens
  misc_RNA (1)...(19): siRNA sense strand
guaccagcaguucaccuua

SEQ ID NO: 182931 - RNA, 19 nt, Homo sapiens
  misc_RNA (1)...(19): siRNA sense strand
aaccaaguccuuccuauga

SEQ ID NO: 182932 - RNA, 19 nt, Homo sapiens
  misc_RNA (1)...(19): siRNA sense strand
gaaugugucagcuucacuu

SEQ ID NO: 182933 - RNA, 19 nt, Homo sapiens
  misc_RNA (1)...(19): siRNA sense strand
gagguggcuugcaaaguca

SEQ ID NO: 182934 - RNA, 19 nt, Homo sapiens
  misc_RNA (1)...(19): siRNA sense strand
ccgugaaucuccuaguuau

SEQ ID NO: 182935 - RNA, 19 nt, Homo sapiens
  misc_RNA (1)...(19): siRNA sense strand
gaggagguacaacaucuug

SEQ ID NO: 182936 - RNA, 19 nt, Homo sapiens
  misc_RNA (1)...(19): siRNA sense strand
gaagauagaaagggagaag

SEQ ID NO: 182937 - RNA, 19 nt, Homo sapiens
  misc_RNA (1)...(19): siRNA sense strand
gacaggugaugcacuugga

SEQ ID NO: 182938 - RNA, 19 nt, Homo sapiens
  misc_RNA (1)...(19): siRNA sense strand
ucaaccaaguccuuccuau

SEQ ID NO: 182939 - RNA, 19 nt, Homo sapiens
  misc_RNA (1)...(19): siRNA sense strand
gacagcauacuauucauuc

SEQ ID NO: 182940 - RNA, 19 nt, Homo sapiens
  misc_RNA (1)...(19): siRNA sense strand
cagacuggaugaugcaauc

SEQ ID NO: 182941 - RNA, 19 nt, Homo sapiens
  misc_RNA (1)...(19): siRNA sense strand
caaccaaguccuuccuaug

SEQ ID NO: 182942 - RNA, 19 nt, Homo sapiens
  misc_RNA (1)...(19): siRNA sense strand
acacucaguuucaccaaca

SEQ ID NO: 182943 - RNA, 19 nt, Homo sapiens
  misc_RNA (1)...(19): siRNA sense strand
caccuuucaugaacucaaa

SEQ ID NO: 182944 - RNA, 19 nt, Homo sapiens
  misc_RNA (1)...(19): siRNA sense strand
gcuagcacuuucuuuaugc

SEQ ID NO: 182945 - RNA, 19 nt, Homo sapiens
  misc_RNA (1)...(19): siRNA sense strand
uauguucgcuagcacuuuc

SEQ ID NO: 182946 - RNA, 19 nt, Homo sapiens
  misc_RNA (1)...(19): siRNA sense strand
acacacuccucccaucaau

SEQ ID NO: 182947 - RNA, 19 nt, Homo sapiens
  misc_RNA (1)...(19): siRNA sense strand
acagacagcccucauuaca

SEQ ID NO: 182948 - RNA, 19 nt, Homo sapiens
  misc_RNA (1)...(19): siRNA sense strand
gauuugaacccugaacaga

SEQ ID NO: 182949 - RNA, 19 nt, Homo sapiens
  misc_RNA (1)...(19): siRNA sense strand
aagcaguacuaaugaagau

SEQ ID NO: 182950 - RNA, 19 nt, Homo sapiens
  misc_RNA (1)...(19): siRNA sense strand
ggcagaacaagcaguacua

SEQ ID NO: 182951 - RNA, 19 nt, Homo sapiens
  misc_RNA (1)...(19): siRNA sense strand
caugaagucagaugaugaa

SEQ ID NO: 182952 - RNA, 19 nt, Homo sapiens
  misc_RNA (1)...(19): siRNA sense strand
aagccucaauucaaacuau

SEQ ID NO: 182953 - RNA, 19 nt, Homo sapiens
  misc_RNA (1)...(19): siRNA sense strand
ccacuucccacaugucuca

SEQ ID NO: 182954 - RNA, 19 nt, Homo sapiens
  misc_RNA (1)...(19): siRNA sense strand
ccuaagccaccaaccagua

SEQ ID NO: 182955 - RNA, 19 nt, Homo sapiens
  misc_RNA (1)...(19): siRNA sense strand
cuucugaccuuuggaguuc

SEQ ID NO: 182956 - RNA, 19 nt, Homo sapiens
  misc_RNA (1)...(19): siRNA sense strand
cagccugccuuaagagaag

SEQ ID NO: 182957 - RNA, 19 nt, Homo sapiens
  misc_RNA (1)...(19): siRNA sense strand
ggcuaacaaugccagagaa

SEQ ID NO: 182958 - RNA, 19 nt, Homo sapiens
  misc_RNA (1)...(19): siRNA sense strand
gaacccugaacagaagaua

SEQ ID NO: 182959 - RNA, 19 nt, Homo sapiens
  misc_RNA (1)...(19): siRNA sense strand
caagcaguacuaaugaaga

SEQ ID NO: 182960 - RNA, 19 nt, Homo sapiens
  misc_RNA (1)...(19): siRNA sense strand
gcaguaguuuuccgucaaa

SEQ ID NO: 182961 - RNA, 19 nt, Homo sapiens
  misc_RNA (1)...(19): siRNA sense strand
cagagauacuggauuacca

SEQ ID NO: 182962 - RNA, 19 nt, Homo sapiens
  misc_RNA (1)...(19): siRNA sense strand
cauccugggcuuagugaaa

SEQ ID NO: 182963 - RNA, 19 nt, Homo sapiens
  misc_RNA (1)...(19): siRNA sense strand
uagaacagcaagucagaga

SEQ ID NO: 182964 - RNA, 19 nt, Homo sapiens
  misc_RNA (1)...(19): siRNA sense strand
aagaggagguacaacaucu

SEQ ID NO: 182965 - RNA, 19 nt, Homo sapiens
  misc_RNA (1)...(19): siRNA sense strand
caauucaguggaucaggua

SEQ ID NO: 182966 - RNA, 19 nt, Homo sapiens
  misc_RNA (1)...(19): siRNA sense strand
ugagcgaccuacuggacuu

SEQ ID NO: 182967 - RNA, 19 nt, Homo sapiens
  misc_RNA (1)...(19): siRNA sense strand
caaaacuccuuauucuuca

SEQ ID NO: 182968 - RNA, 19 nt, Homo sapiens
  misc_RNA (1)...(19): siRNA sense strand
guucaaaucuguagaagaa

SEQ ID NO: 182969 - RNA, 19 nt, Homo sapiens
  misc_RNA (1)...(19): siRNA sense strand
cuaaagcucuuccgcaaua

SEQ ID NO: 182970 - RNA, 19 nt, Homo sapiens
  misc_RNA (1)...(19): siRNA sense strand
ggaauggacuccuuacaga

SEQ ID NO: 182971 - RNA, 19 nt, Homo sapiens
  misc_RNA (1)...(19): siRNA sense strand
ggaaaguaguucagauaaa

SEQ ID NO: 182972 - RNA, 19 nt, Homo sapiens
  misc_RNA (1)...(19): siRNA sense strand
caacauaccuccuccaucu

SEQ ID NO: 182973 - RNA, 19 nt, Homo sapiens
  misc_RNA (1)...(19): siRNA sense strand
gcaauauucuucuuuggaa

SEQ ID NO: 182974 - RNA, 19 nt, Homo sapiens
  misc_RNA (1)...(19): siRNA sense strand
ggaagcugcuaaaucguua

SEQ ID NO: 182975 - RNA, 19 nt, Homo sapiens
  misc_RNA (1)...(19): siRNA sense strand
ggaugaagucgaagaaaua

SEQ ID NO: 182976 - RNA, 19 nt, Homo sapiens
  misc_RNA (1)...(19): siRNA sense strand
gaacauuccacuugugaaa

SEQ ID NO: 182977 - RNA, 19 nt, Homo sapiens
  misc_RNA (1)...(19): siRNA sense strand
cagcagagaugauugacuu

SEQ ID NO: 182978 - RNA, 19 nt, Homo sapiens
  misc_RNA (1)...(19): siRNA sense strand
gaagugaauucagggauga

SEQ ID NO: 182979 - RNA, 19 nt, Homo sapiens
  misc_RNA (1)...(19): siRNA sense strand
ggaauccucuuaaguugga

SEQ ID NO: 182980 - RNA, 19 nt, Homo sapiens
  misc_RNA (1)...(19): siRNA sense strand
gagaauaccauuuacucua

SEQ ID NO: 182981 - RNA, 19 nt, Homo sapiens
  misc_RNA (1)...(19): siRNA sense strand
gaaaugaagaaacaaguga

SEQ ID NO: 182982 - RNA, 19 nt, Homo sapiens
  misc_RNA (1)...(19): siRNA sense strand
caaaucaagcucuaaauug

SEQ ID NO: 182983 - RNA, 19 nt, Homo sapiens
  misc_RNA (1)...(19): siRNA sense strand
aaacaucaccucauucaaa

SEQ ID NO: 182984 - RNA, 19 nt, Homo sapiens
  misc_RNA (1)...(19): siRNA sense strand
gaaggaaaguaguucagau

SEQ ID NO: 182985 - RNA, 19 nt, Homo sapiens
  misc_RNA (1)...(19): siRNA sense strand
gaagaacauuccacuugug

SEQ ID NO: 182986 - RNA, 19 nt, Homo sapiens
  misc_RNA (1)...(19): siRNA sense strand
gcagacaggauuuacuuaa

SEQ ID NO: 182987 - RNA, 19 nt, Homo sapiens
  misc_RNA (1)...(19): siRNA sense strand
auacaucacuccucagaaa

SEQ ID NO: 182988 - RNA, 19 nt, Homo sapiens
  misc_RNA (1)...(19): siRNA sense strand
caacguauuuacaacaguu

SEQ ID NO: 182989 - RNA, 19 nt, Homo sapiens
  misc_RNA (1)...(19): siRNA sense strand
gaagaaacaagugaagaaa

SEQ ID NO: 182990 - RNA, 19 nt, Homo sapiens
  misc_RNA (1)...(19): siRNA sense strand
gcuaaaucguuaccuuauu

SEQ ID NO: 182991 - RNA, 19 nt, Homo sapiens
  misc_RNA (1)...(19): siRNA sense strand
gcuaugaccuuuaugaaac

SEQ ID NO: 182992 - RNA, 19 nt, Homo sapiens
  misc_RNA (1)...(19): siRNA sense strand
gggaugaagucgaagaaau

SEQ ID NO: 182993 - RNA, 19 nt, Homo sapiens
  misc_RNA (1)...(19): siRNA sense strand
caaaugaggaaagcaguua

SEQ ID NO: 182994 - RNA, 19 nt, Homo sapiens
  misc_RNA (1)...(19): siRNA sense strand
ucacagacaacaaguuuaa

SEQ ID NO: 182995 - RNA, 19 nt, Homo sapiens
  misc_RNA (1)...(19): siRNA sense strand
ggcccaagaugacuauauu

SEQ ID NO: 182996 - RNA, 19 nt, Homo sapiens
  misc_RNA (1)...(19): siRNA sense strand
ggauagcaguguagaagau

SEQ ID NO: 182997 - RNA, 19 nt, Homo sapiens
  misc_RNA (1)...(19): siRNA sense strand
gagaugccaugguucaaau

SEQ ID NO: 182998 - RNA, 19 nt, Homo sapiens
  misc_RNA (1)...(19): siRNA sense strand
uaaaagagaugccaugguu

SEQ ID NO: 182999 - RNA, 19 nt, Homo sapiens
  misc_RNA (1)...(19): siRNA sense strand
cgaguucaguugauugauu

SEQ ID NO: 183000 - RNA, 19 nt, Homo sapiens
  misc_RNA (1)...(19): siRNA sense strand
caacauccaagaaauagaa

SEQ ID NO: 183001 - RNA, 19 nt, Homo sapiens
  misc_RNA (1)...(19): siRNA sense strand
cuagagaguucaucaaauc

SEQ ID NO: 183002 - RNA, 19 nt, Homo sapiens
  misc_RNA (1)...(19): siRNA sense strand
ucuaagaccucaaacacuu

SEQ ID NO: 183003 - RNA, 19 nt, Homo sapiens
  misc_RNA (1)...(19): siRNA sense strand
aagcagaaaugaagaaaca

SEQ ID NO: 183004 - RNA, 19 nt, Homo sapiens
  misc_RNA (1)...(19): siRNA sense strand
gaagagagagagcgaagau

SEQ ID NO: 183005 - RNA, 19 nt, Homo sapiens
  misc_RNA (1)...(19): siRNA sense strand
ggaaacuucucaguagaug

SEQ ID NO: 183006 - RNA, 19 nt, Homo sapiens
  misc_RNA (1)...(19): siRNA sense strand
gucaaaagcucaaagagua

SEQ ID NO: 183007 - RNA, 19 nt, Homo sapiens
  misc_RNA (1)...(19): siRNA sense strand
agaaacaagugaagaaagu

SEQ ID NO: 183008 - RNA, 19 nt, Homo sapiens
  misc_RNA (1)...(19): siRNA sense strand
gaguucaguugauugauug

SEQ ID NO: 183009 - RNA, 19 nt, Homo sapiens
  misc_RNA (1)...(19): siRNA sense strand
gaucaggguuugucuucug

SEQ ID NO: 183010 - RNA, 19 nt, Homo sapiens
  misc_RNA (1)...(19): siRNA sense strand
gaugacaccuugcaagaac

SEQ ID NO: 183011 - RNA, 19 nt, Homo sapiens
  misc_RNA (1)...(19): siRNA sense strand
ugaagaacauuccacuugu

SEQ ID NO: 183012 - RNA, 19 nt, Homo sapiens
  misc_RNA (1)...(19): siRNA sense strand
caacaguuaucacgcaaag

SEQ ID NO: 183013 - RNA, 19 nt, Homo sapiens
  misc_RNA (1)...(19): siRNA sense strand
ucaagcagaauccuucaua

SEQ ID NO: 183014 - RNA, 19 nt, Homo sapiens
  misc_RNA (1)...(19): siRNA sense strand
ccacagaugaagaggauaa

SEQ ID NO: 183015 - RNA, 19 nt, Homo sapiens
  misc_RNA (1)...(19): siRNA sense strand
uugaagaagugcaagauga

SEQ ID NO: 183016 - RNA, 19 nt, Homo sapiens
  misc_RNA (1)...(19): siRNA sense strand
guaaggaugaucaggguuu

SEQ ID NO: 183017 - RNA, 19 nt, Homo sapiens
  misc_RNA (1)...(19): siRNA sense strand
ucaccuagaccaucuuaaa

SEQ ID NO: 183018 - RNA, 19 nt, Homo sapiens
  misc_RNA (1)...(19): siRNA sense strand
ccucaaacacuuagacaaa

SEQ ID NO: 183019 - RNA, 19 nt, Homo sapiens
  misc_RNA (1)...(19): siRNA sense strand
gaugaagucgaagaaauaa

SEQ ID NO: 183020 - RNA, 19 nt, Homo sapiens
  misc_RNA (1)...(19): siRNA sense strand
ggaaggaacaucuagugau

SEQ ID NO: 183021 - RNA, 19 nt, Homo sapiens
  misc_RNA (1)...(19): siRNA sense strand
ucaauaagcagaaaugaag

SEQ ID NO: 183022 - RNA, 19 nt, Homo sapiens
  misc_RNA (1)...(19): siRNA sense strand
caucacuccucagaaagua

SEQ ID NO: 183023 - RNA, 19 nt, Homo sapiens
  misc_RNA (1)...(19): siRNA sense strand
ccuagaccaucuuaaauca

SEQ ID NO: 183024 - RNA, 19 nt, Homo sapiens
  misc_RNA (1)...(19): siRNA sense strand
uagggaagcugcuaaaucg

SEQ ID NO: 183025 - RNA, 19 nt, Homo sapiens
  misc_RNA (1)...(19): siRNA sense strand
uguagaagauucaaagaag

SEQ ID NO: 183026 - RNA, 19 nt, Homo sapiens
  misc_RNA (1)...(19): siRNA sense strand
caaagaguaccauccagaa

SEQ ID NO: 183027 - RNA, 19 nt, Homo sapiens
  misc_RNA (1)...(19): siRNA sense strand
gaagaaagucaggaagaug

SEQ ID NO: 183028 - RNA, 19 nt, Homo sapiens
  misc_RNA (1)...(19): siRNA sense strand
gcugaggaaucaauaagca

SEQ ID NO: 183029 - RNA, 19 nt, Homo sapiens
  misc_RNA (1)...(19): siRNA sense strand
gaagaagugcaagaugauu

SEQ ID NO: 183030 - RNA, 19 nt, Homo sapiens
  misc_RNA (1)...(19): siRNA sense strand
caagcuaugaccuuuauga

SEQ ID NO: 183031 - RNA, 19 nt, Homo sapiens
  misc_RNA (1)...(19): siRNA sense strand
aaacaagcuaugaccuuua

SEQ ID NO: 183032 - RNA, 19 nt, Homo sapiens
  misc_RNA (1)...(19): siRNA sense strand
ugaagaaacaagugaagaa

SEQ ID NO: 183033 - RNA, 19 nt, Homo sapiens
  misc_RNA (1)...(19): siRNA sense strand
gaaucaauaagcagaaaug

SEQ ID NO: 183034 - RNA, 19 nt, Homo sapiens
  misc_RNA (1)...(19): siRNA sense strand
ugaagaaagucaggaagau

SEQ ID NO: 183035 - RNA, 19 nt, Homo sapiens
  misc_RNA (1)...(19): siRNA sense strand
ggacuagggaagcugcuaa

SEQ ID NO: 183036 - RNA, 19 nt, Homo sapiens
  misc_RNA (1)...(19): siRNA sense strand
gcuuuuaaauccccuaaua

SEQ ID NO: 183037 - RNA, 19 nt, Homo sapiens
  misc_RNA (1)...(19): siRNA sense strand
gcaggcaagaugaauuaaa

SEQ ID NO: 183038 - RNA, 19 nt, Homo sapiens
  misc_RNA (1)...(19): siRNA sense strand
uaacauuacuacaggaaac

SEQ ID NO: 183039 - RNA, 19 nt, Homo sapiens
  misc_RNA (1)...(19): siRNA sense strand
caagcagaauccuucauag

SEQ ID NO: 183040 - RNA, 19 nt, Homo sapiens
  misc_RNA (1)...(19): siRNA sense strand
ggacgaaggcucagaaucc

SEQ ID NO: 183041 - RNA, 19 nt, Homo sapiens
  misc_RNA (1)...(19): siRNA sense strand
caucaaaucaagcucuaaa

SEQ ID NO: 183042 - RNA, 19 nt, Homo sapiens
  misc_RNA (1)...(19): siRNA sense strand
gcaaaugaggaaagcaguu

SEQ ID NO: 183043 - RNA, 19 nt, Homo sapiens
  misc_RNA (1)...(19): siRNA sense strand
ggucaggccuaaagcucuu

SEQ ID NO: 183044 - RNA, 19 nt, Homo sapiens
  misc_RNA (1)...(19): siRNA sense strand
ucaaagaaggaaaguaguu

SEQ ID NO: 183045 - RNA, 19 nt, Homo sapiens
  misc_RNA (1)...(19): siRNA sense strand
aaaguuuccugacuccuau

SEQ ID NO: 183046 - RNA, 19 nt, Homo sapiens
  misc_RNA (1)...(19): siRNA sense strand
gagaguucaucaaaucaag

SEQ ID NO: 183047 - RNA, 19 nt, Homo sapiens
  misc_RNA (1)...(19): siRNA sense strand
aaggauggcugaggaauca

SEQ ID NO: 183048 - RNA, 19 nt, Homo sapiens
  misc_RNA (1)...(19): siRNA sense strand
ccagguagcagcaugucua

SEQ ID NO: 183049 - RNA, 19 nt, Homo sapiens
  misc_RNA (1)...(19): siRNA sense strand
cauucaaaguuccaagaaa

SEQ ID NO: 183050 - RNA, 19 nt, Homo sapiens
  misc_RNA (1)...(19): siRNA sense strand
agagagagagcgaagauga

SEQ ID NO: 183051 - RNA, 19 nt, Homo sapiens
  misc_RNA (1)...(19): siRNA sense strand
ccaaagagugcuguagaaa

SEQ ID NO: 183052 - RNA, 19 nt, Homo sapiens
  misc_RNA (1)...(19): siRNA sense strand
aaacuucucaguagaugaa

SEQ ID NO: 183053 - RNA, 19 nt, Homo sapiens
  misc_RNA (1)...(19): siRNA sense strand
gaaucaacguauuuacaac

SEQ ID NO: 183054 - RNA, 19 nt, Homo sapiens
  misc_RNA (1)...(19): siRNA sense strand
aagaugacccugagaguga

SEQ ID NO: 183055 - RNA, 19 nt, Homo sapiens
  misc_RNA (1)...(19): siRNA sense strand
gaauaccauuuacucuaag

SEQ ID NO: 183056 - RNA, 19 nt, Homo sapiens
  misc_RNA (1)...(19): siRNA sense strand
gggaagcugcuaaaucguu

SEQ ID NO: 183057 - RNA, 19 nt, Homo sapiens
  misc_RNA (1)...(19): siRNA sense strand
ccucacagacaacaaguuu

SEQ ID NO: 183058 - RNA, 19 nt, Homo sapiens
  misc_RNA (1)...(19): siRNA sense strand
gaaacgcaggcaagaugaa

SEQ ID NO: 183059 - RNA, 19 nt, Homo sapiens
  misc_RNA (1)...(19): siRNA sense strand
aacaagcuaugaccuuuau

SEQ ID NO: 183060 - RNA, 19 nt, Homo sapiens
  misc_RNA (1)...(19): siRNA sense strand
gaaagucaggaagaugaaa

SEQ ID NO: 183061 - RNA, 19 nt, Homo sapiens
  misc_RNA (1)...(19): siRNA sense strand
gcugcuaaaucguuaccuu

SEQ ID NO: 183062 - RNA, 19 nt, Homo sapiens
  misc_RNA (1)...(19): siRNA sense strand
aaggaaaguaguucagaua

SEQ ID NO: 183063 - RNA, 19 nt, Homo sapiens
  misc_RNA (1)...(19): siRNA sense strand
aagccaaggugacauuuua

SEQ ID NO: 183064 - RNA, 19 nt, Homo sapiens
  misc_RNA (1)...(19): siRNA sense strand
ccucagaaaguaaggauga

SEQ ID NO: 183065 - RNA, 19 nt, Homo sapiens
  misc_RNA (1)...(19): siRNA sense strand
gccaugaggacaucuauuc

SEQ ID NO: 183066 - RNA, 19 nt, Homo sapiens
  misc_RNA (1)...(19): siRNA sense strand
guggaaacuucucaguaga

SEQ ID NO: 183067 - RNA, 19 nt, Homo sapiens
  misc_RNA (1)...(19): siRNA sense strand
ccuagagaguucaucaaau

SEQ ID NO: 183068 - RNA, 19 nt, Homo sapiens
  misc_RNA (1)...(19): siRNA sense strand
gaaauugucuaguaaguga

SEQ ID NO: 183069 - RNA, 19 nt, Homo sapiens
  misc_RNA (1)...(19): siRNA sense strand
caccugaaguguuuaauua

SEQ ID NO: 183070 - RNA, 19 nt, Homo sapiens
  misc_RNA (1)...(19): siRNA sense strand
gcagaaauaugaauagaag

SEQ ID NO: 183071 - RNA, 19 nt, Homo sapiens
  misc_RNA (1)...(19): siRNA sense strand
ggaaagaaaucaaacaacu

SEQ ID NO: 183072 - RNA, 19 nt, Homo sapiens
  misc_RNA (1)...(19): siRNA sense strand
cacaauagaugaacuaguu

SEQ ID NO: 183073 - RNA, 19 nt, Homo sapiens
  misc_RNA (1)...(19): siRNA sense strand
caacaucuccaaagaagua

SEQ ID NO: 183074 - RNA, 19 nt, Homo sapiens
  misc_RNA (1)...(19): siRNA sense strand
uggaggagauucuuauuaa

SEQ ID NO: 183075 - RNA, 19 nt, Homo sapiens
  misc_RNA (1)...(19): siRNA sense strand
guacaaagucgcaaucaaa

SEQ ID NO: 183076 - RNA, 19 nt, Homo sapiens
  misc_RNA (1)...(19): siRNA sense strand
caaaguccaugcuaaccua

SEQ ID NO: 183077 - RNA, 19 nt, Homo sapiens
  misc_RNA (1)...(19): siRNA sense strand
agaagaagcuaaagugaug

SEQ ID NO: 183078 - RNA, 19 nt, Homo sapiens
  misc_RNA (1)...(19): siRNA sense strand
gcagaaaccaauauacauu

SEQ ID NO: 183079 - RNA, 19 nt, Homo sapiens
  misc_RNA (1)...(19): siRNA sense strand
uaugagaaaugggagauua

SEQ ID NO: 183080 - RNA, 19 nt, Homo sapiens
  misc_RNA (1)...(19): siRNA sense strand
guaauuacguaacgggaaa

SEQ ID NO: 183081 - RNA, 19 nt, Homo sapiens
  misc_RNA (1)...(19): siRNA sense strand
gcaaauggcgagcccagua

SEQ ID NO: 183082 - RNA, 19 nt, Homo sapiens
  misc_RNA (1)...(19): siRNA sense strand
agacaucgcccuuaaacua

SEQ ID NO: 183083 - RNA, 19 nt, Homo sapiens
  misc_RNA (1)...(19): siRNA sense strand
gaggaggacuuuauagaag

SEQ ID NO: 183084 - RNA, 19 nt, Homo sapiens
  misc_RNA (1)...(19): siRNA sense strand
gagaagaaauacagaaagg

SEQ ID NO: 183085 - RNA, 19 nt, Homo sapiens
  misc_RNA (1)...(19): siRNA sense strand
gcuaacacacuuuacauuu

SEQ ID NO: 183086 - RNA, 19 nt, Homo sapiens
  misc_RNA (1)...(19): siRNA sense strand
gccagaaauugucuaguaa

SEQ ID NO: 183087 - RNA, 19 nt, Homo sapiens
  misc_RNA (1)...(19): siRNA sense strand
cgaaguuagugcagcuuua

SEQ ID NO: 183088 - RNA, 19 nt, Homo sapiens
  misc_RNA (1)...(19): siRNA sense strand
ggagagcaagagauaaaua

SEQ ID NO: 183089 - RNA, 19 nt, Homo sapiens
  misc_RNA (1)...(19): siRNA sense strand
gaugaucaguacacaaguu

SEQ ID NO: 183090 - RNA, 19 nt, Homo sapiens
  misc_RNA (1)...(19): siRNA sense strand
gagacaaggucauuucagu

SEQ ID NO: 183091 - RNA, 19 nt, Homo sapiens
  misc_RNA (1)...(19): siRNA sense strand
uggaguaucuggagagaaa

SEQ ID NO: 183092 - RNA, 19 nt, Homo sapiens
  misc_RNA (1)...(19): siRNA sense strand
ugccagaaauugucuagua

SEQ ID NO: 183093 - RNA, 19 nt, Homo sapiens
  misc_RNA (1)...(19): siRNA sense strand
aagaagacaucgcccuuaa

SEQ ID NO: 183094 - RNA, 19 nt, Homo sapiens
  misc_RNA (1)...(19): siRNA sense strand
aaucaaguguguggaaaua

SEQ ID NO: 183095 - RNA, 19 nt, Homo sapiens
  misc_RNA (1)...(19): siRNA sense strand
uagaugaacuaguugaaug

SEQ ID NO: 183096 - RNA, 19 nt, Homo sapiens
  misc_RNA (1)...(19): siRNA sense strand
ccaagaguaucucauuuua

SEQ ID NO: 183097 - RNA, 19 nt, Homo sapiens
  misc_RNA (1)...(19): siRNA sense strand
gaagcuaaagugaugauga

SEQ ID NO: 183098 - RNA, 19 nt, Homo sapiens
  misc_RNA (1)...(19): siRNA sense strand
gauuaacccuucagaacug

SEQ ID NO: 183099 - RNA, 19 nt, Homo sapiens
  misc_RNA (1)...(19): siRNA sense strand
agaaggacaugaucucaga

SEQ ID NO: 183100 - RNA, 19 nt, Homo sapiens
  misc_RNA (1)...(19): siRNA sense strand
ggaggacuuuauagaagaa

SEQ ID NO: 183101 - RNA, 19 nt, Homo sapiens
  misc_RNA (1)...(19): siRNA sense strand
caacaacaucuccaaagaa

SEQ ID NO: 183102 - RNA, 19 nt, Homo sapiens
  misc_RNA (1)...(19): siRNA sense strand
gguaagggauuccagucaa

SEQ ID NO: 183103 - RNA, 19 nt, Homo sapiens
  misc_RNA (1)...(19): siRNA sense strand
ggccaagaguaucucauuu

SEQ ID NO: 183104 - RNA, 19 nt, Homo sapiens
  misc_RNA (1)...(19): siRNA sense strand
acaacaacaucuccaaaga

SEQ ID NO: 183105 - RNA, 19 nt, Homo sapiens
  misc_RNA (1)...(19): siRNA sense strand
gaaggugguuuuaugguaa

SEQ ID NO: 183106 - RNA, 19 nt, Homo sapiens
  misc_RNA (1)...(19): siRNA sense strand
ugaaugguauugcagaaau

SEQ ID NO: 183107 - RNA, 19 nt, Homo sapiens
  misc_RNA (1)...(19): siRNA sense strand
guacacagucucccuuuau

SEQ ID NO: 183108 - RNA, 19 nt, Homo sapiens
  misc_RNA (1)...(19): siRNA sense strand
gaaguuaucaguguuguag

SEQ ID NO: 183109 - RNA, 19 nt, Homo sapiens
  misc_RNA (1)...(19): siRNA sense strand
ggugcuaaguuuccuguga

SEQ ID NO: 183110 - RNA, 19 nt, Homo sapiens
  misc_RNA (1)...(19): siRNA sense strand
gugaagggauggaguaucu

SEQ ID NO: 183111 - RNA, 19 nt, Homo sapiens
  misc_RNA (1)...(19): siRNA sense strand
gaaagggguuuauugaugu

SEQ ID NO: 183112 - RNA, 19 nt, Homo sapiens
  misc_RNA (1)...(19): siRNA sense strand
ugaacuaguugaaugugaa

SEQ ID NO: 183113 - RNA, 19 nt, Homo sapiens
  misc_RNA (1)...(19): siRNA sense strand
gaagacaucgcccuuaaac

SEQ ID NO: 183114 - RNA, 19 nt, Homo sapiens
  misc_RNA (1)...(19): siRNA sense strand
aagcuaaagugaugaugaa

SEQ ID NO: 183115 - RNA, 19 nt, Homo sapiens
  misc_RNA (1)...(19): siRNA sense strand
uacacagucucccuuuaua

SEQ ID NO: 183116 - RNA, 19 nt, Homo sapiens
  misc_RNA (1)...(19): siRNA sense strand
gauggaaguuaucaguguu

SEQ ID NO: 183117 - RNA, 19 nt, Homo sapiens
  misc_RNA (1)...(19): siRNA sense strand
cauuucagguuguucauga

SEQ ID NO: 183118 - RNA, 19 nt, Homo sapiens
  misc_RNA (1)...(19): siRNA sense strand
gaagaucugcugcgcacaa

SEQ ID NO: 183119 - RNA, 19 nt, Homo sapiens
  misc_RNA (1)...(19): siRNA sense strand
ggauucagcuaugagaaau

SEQ ID NO: 183120 - RNA, 19 nt, Homo sapiens
  misc_RNA (1)...(19): siRNA sense strand
gaaacaacaacaucuccaa

SEQ ID NO: 183121 - RNA, 19 nt, Homo sapiens
  misc_RNA (1)...(19): siRNA sense strand
gagagcaagagauaaauau

SEQ ID NO: 183122 - RNA, 19 nt, Homo sapiens
  misc_RNA (1)...(19): siRNA sense strand
gaagaagaagauaauagug

SEQ ID NO: 183123 - RNA, 19 nt, Homo sapiens
  misc_RNA (1)...(19): siRNA sense strand
uggaaauagugaagaauga

SEQ ID NO: 183124 - RNA, 19 nt, Homo sapiens
  misc_RNA (1)...(19): siRNA sense strand
ugaagaaacuuuuggaaga

SEQ ID NO: 183125 - RNA, 19 nt, Homo sapiens
  misc_RNA (1)...(19): siRNA sense strand
guacccaguuagugugaaa

SEQ ID NO: 183126 - RNA, 19 nt, Homo sapiens
  misc_RNA (1)...(19): siRNA sense strand
gcagagaagaaauacagaa

SEQ ID NO: 183127 - RNA, 19 nt, Homo sapiens
  misc_RNA (1)...(19): siRNA sense strand
gaaauagugaagaaugaug

SEQ ID NO: 183128 - RNA, 19 nt, Homo sapiens
  misc_RNA (1)...(19): siRNA sense strand
gcacaaugcagcaggacuu

SEQ ID NO: 183129 - RNA, 19 nt, Homo sapiens
  misc_RNA (1)...(19): siRNA sense strand
gugcuaaguuuccugugaa

SEQ ID NO: 183130 - RNA, 19 nt, Homo sapiens
  misc_RNA (1)...(19): siRNA sense strand
gagauuaacccuucagaac

SEQ ID NO: 183131 - RNA, 19 nt, Homo sapiens
  misc_RNA (1)...(19): siRNA sense strand
cgaggaggacuuuauagaa

SEQ ID NO: 183132 - RNA, 19 nt, Homo sapiens
  misc_RNA (1)...(19): siRNA sense strand
gaaguuagugcagcuuuau

SEQ ID NO: 183133 - RNA, 19 nt, Homo sapiens
  misc_RNA (1)...(19): siRNA sense strand
caucuccaaagaaguauua

SEQ ID NO: 183134 - RNA, 19 nt, Homo sapiens
  misc_RNA (1)...(19): siRNA sense strand
cagaaauugucuaguaagu

SEQ ID NO: 183135 - RNA, 19 nt, Homo sapiens
  misc_RNA (1)...(19): siRNA sense strand
ggacagauggaaguuauca

SEQ ID NO: 183136 - RNA, 19 nt, Homo sapiens
  misc_RNA (1)...(19): siRNA sense strand
cgacagagacaaggucauu

SEQ ID NO: 183137 - RNA, 19 nt, Homo sapiens
  misc_RNA (1)...(19): siRNA sense strand
gagcagagaagaaauacag

SEQ ID NO: 183138 - RNA, 19 nt, Homo sapiens
  misc_RNA (1)...(19): siRNA sense strand
agagagaggccaagaguau

SEQ ID NO: 183139 - RNA, 19 nt, Homo sapiens
  misc_RNA (1)...(19): siRNA sense strand
uuacguaacgggaaagaaa

SEQ ID NO: 183140 - RNA, 19 nt, Homo sapiens
  misc_RNA (1)...(19): siRNA sense strand
ggagagaaacagcuucauc

SEQ ID NO: 183141 - RNA, 19 nt, Homo sapiens
  misc_RNA (1)...(19): siRNA sense strand
gagcaugugucaggaugug

SEQ ID NO: 183142 - RNA, 19 nt, Homo sapiens
  misc_RNA (1)...(19): siRNA sense strand
aggcuucgguacccaguua

SEQ ID NO: 183143 - RNA, 19 nt, Homo sapiens
  misc_RNA (1)...(19): siRNA sense strand
uaacgggaaagaaaucaaa

SEQ ID NO: 183144 - RNA, 19 nt, Homo sapiens
  misc_RNA (1)...(19): siRNA sense strand
caauuccacuagaagaaga

SEQ ID NO: 183145 - RNA, 19 nt, Homo sapiens
  misc_RNA (1)...(19): siRNA sense strand
uuacugaguucauggaaag

SEQ ID NO: 183146 - RNA, 19 nt, Homo sapiens
  misc_RNA (1)...(19): siRNA sense strand
gcgaggaggacuuuauaga

SEQ ID NO: 183147 - RNA, 19 nt, Homo sapiens
  misc_RNA (1)...(19): siRNA sense strand
ggagauuaacccuucagaa

SEQ ID NO: 183148 - RNA, 19 nt, Homo sapiens
  misc_RNA (1)...(19): siRNA sense strand
gaagauaaagaaggugguu

SEQ ID NO: 183149 - RNA, 19 nt, Homo sapiens
  misc_RNA (1)...(19): siRNA sense strand
ucaaguguguggaaauagu

SEQ ID NO: 183150 - RNA, 19 nt, Homo sapiens
  misc_RNA (1)...(19): siRNA sense strand
gagcaagagauaaauaugg

SEQ ID NO: 183151 - RNA, 19 nt, Homo sapiens
  misc_RNA (1)...(19): siRNA sense strand
cagagaagaaauacagaaa

SEQ ID NO: 183152 - RNA, 19 nt, Homo sapiens
  misc_RNA (1)...(19): siRNA sense strand
gaggugaugcugagauguu

SEQ ID NO: 183153 - RNA, 19 nt, Homo sapiens
  misc_RNA (1)...(19): siRNA sense strand
gagauaaauaugggaauga

SEQ ID NO: 183154 - RNA, 19 nt, Homo sapiens
  misc_RNA (1)...(19): siRNA sense strand
guggagagcaagagauaaa

SEQ ID NO: 183155 - RNA, 19 nt, Homo sapiens
  misc_RNA (1)...(19): siRNA sense strand
gucauucccugucaaaaua

SEQ ID NO: 183156 - RNA, 19 nt, Homo sapiens
  misc_RNA (1)...(19): siRNA sense strand
gaucugcugcgcacaauag

SEQ ID NO: 183157 - RNA, 19 nt, Homo sapiens
  misc_RNA (1)...(19): siRNA sense strand
gacaaggucauuucaguag

SEQ ID NO: 183158 - RNA, 19 nt, Homo sapiens
  misc_RNA (1)...(19): siRNA sense strand
cagcagaaaccaauauaca

SEQ ID NO: 183159 - RNA, 19 nt, Homo sapiens
  misc_RNA (1)...(19): siRNA sense strand
gcaccuaguccacaaagca

SEQ ID NO: 183160 - RNA, 19 nt, Homo sapiens
  misc_RNA (1)...(19): siRNA sense strand
gaagaaacuuuuggaagau

SEQ ID NO: 183161 - RNA, 19 nt, Homo sapiens
  misc_RNA (1)...(19): siRNA sense strand
gcugacacacccgaaguua

SEQ ID NO: 183162 - RNA, 19 nt, Homo sapiens
  misc_RNA (1)...(19): siRNA sense strand
aaagaaguauuaccuagcu

SEQ ID NO: 183163 - RNA, 19 nt, Homo sapiens
  misc_RNA (1)...(19): siRNA sense strand
gaagguucaucggguuuua

SEQ ID NO: 183164 - RNA, 19 nt, Homo sapiens
  misc_RNA (1)...(19): siRNA sense strand
uguacacagucucccuuua

SEQ ID NO: 183165 - RNA, 19 nt, Homo sapiens
  misc_RNA (1)...(19): siRNA sense strand
aaagaagacaucgcccuua

SEQ ID NO: 183166 - RNA, 19 nt, Homo sapiens
  misc_RNA (1)...(19): siRNA sense strand
cuuacaaaguccaugcuaa

SEQ ID NO: 183167 - RNA, 19 nt, Homo sapiens
  misc_RNA (1)...(19): siRNA sense strand
gauggaguaucuggagaga

SEQ ID NO: 183168 - RNA, 19 nt, Homo sapiens
  misc_RNA (1)...(19): siRNA sense strand
ugaagaagcugauggagaa

SEQ ID NO: 183169 - RNA, 19 nt, Homo sapiens
  misc_RNA (1)...(19): siRNA sense strand
ggacaagacgcaagaagaa

SEQ ID NO: 183170 - RNA, 19 nt, Homo sapiens
  misc_RNA (1)...(19): siRNA sense strand
gcaaggaggugggcaagug

SEQ ID NO: 183171 - RNA, 19 nt, Homo sapiens
  misc_RNA (1)...(19): siRNA sense strand
ccaaguaugagaccaaaua

SEQ ID NO: 183172 - RNA, 19 nt, Homo sapiens
  misc_RNA (1)...(19): siRNA sense strand
ggacaagaccaucccauau

SEQ ID NO: 183173 - RNA, 19 nt, Homo sapiens
  misc_RNA (1)...(19): siRNA sense strand
gcaagaccaucguguccaa

SEQ ID NO: 183174 - RNA, 19 nt, Homo sapiens
  misc_RNA (1)...(19): siRNA sense strand
acaagaccaucccauauga

SEQ ID NO: 183175 - RNA, 19 nt, Homo sapiens
  misc_RNA (1)...(19): siRNA sense strand
gaacaacguggcagcuaaa

SEQ ID NO: 183176 - RNA, 19 nt, Homo sapiens
  misc_RNA (1)...(19): siRNA sense strand
gacaagaccaucccauaug

SEQ ID NO: 183177 - RNA, 19 nt, Homo sapiens
  misc_RNA (1)...(19): siRNA sense strand
agaacaacguggcagcuaa

SEQ ID NO: 183178 - RNA, 19 nt, Homo sapiens
  misc_RNA (1)...(19): siRNA sense strand
cauaugauggcgaaucuuu

SEQ ID NO: 183179 - RNA, 19 nt, Homo sapiens
  misc_RNA (1)...(19): siRNA sense strand
acauggaccuggaugaguu

SEQ ID NO: 183180 - RNA, 19 nt, Homo sapiens
  misc_RNA (1)...(19): siRNA sense strand
gggcagccuuccuggagaa

SEQ ID NO: 183181 - RNA, 19 nt, Homo sapiens
  misc_RNA (1)...(19): siRNA sense strand
gcagaaggaugaaaaguac

SEQ ID NO: 183182 - RNA, 19 nt, Homo sapiens
  misc_RNA (1)...(19): siRNA sense strand
gaaaaguacuggacaagac

SEQ ID NO: 183183 - RNA, 19 nt, Homo sapiens
  misc_RNA (1)...(19): siRNA sense strand
agaccaucguguccaagua

SEQ ID NO: 183184 - RNA, 19 nt, Homo sapiens
  misc_RNA (1)...(19): siRNA sense strand
gaccaucguguccaaguau

SEQ ID NO: 183185 - RNA, 19 nt, Homo sapiens
  misc_RNA (1)...(19): siRNA sense strand
ccgacgagcagaaggauga

SEQ ID NO: 183186 - RNA, 19 nt, Homo sapiens
  misc_RNA (1)...(19): siRNA sense strand
gaugaaaaguacuggacaa

SEQ ID NO: 183187 - RNA, 19 nt, Homo sapiens
  misc_RNA (1)...(19): siRNA sense strand
gaggugggcaagugcaaga

SEQ ID NO: 183188 - RNA, 19 nt, Homo sapiens
  misc_RNA (1)...(19): siRNA sense strand
guccaaguaugagaccaaa

SEQ ID NO: 183189 - RNA, 19 nt, Homo sapiens
  misc_RNA (1)...(19): siRNA sense strand
caagacgcaagaagaacaa

SEQ ID NO: 183190 - RNA, 19 nt, Homo sapiens
  misc_RNA (1)...(19): siRNA sense strand
cuccuccacugccaucuuu

SEQ ID NO: 183191 - RNA, 19 nt, Homo sapiens
  misc_RNA (1)...(19): siRNA sense strand
guguggaaguggaugugaa

SEQ ID NO: 183192 - RNA, 19 nt, Homo sapiens
  misc_RNA (1)...(19): siRNA sense strand
cagaaucuucccuggagaa

SEQ ID NO: 183193 - RNA, 19 nt, Homo sapiens
  misc_RNA (1)...(19): siRNA sense strand
ugucucagccucccucaug

SEQ ID NO: 183194 - RNA, 19 nt, Homo sapiens
  misc_RNA (1)...(19): siRNA sense strand
guacauggaccuggaugag

SEQ ID NO: 183195 - RNA, 19 nt, Homo sapiens
  misc_RNA (1)...(19): siRNA sense strand
ugaaagagaaucagaucac

SEQ ID NO: 183196 - RNA, 19 nt, Homo sapiens
  misc_RNA (1)...(19): siRNA sense strand
uggacaagacgcaagaaga

SEQ ID NO: 183197 - RNA, 19 nt, Homo sapiens
  misc_RNA (1)...(19): siRNA sense strand
acaagacgcaagaagaaca

SEQ ID NO: 183198 - RNA, 19 nt, Homo sapiens
  misc_RNA (1)...(19): siRNA sense strand
ugaccaagauguauaaagg

SEQ ID NO: 183199 - RNA, 19 nt, Homo sapiens
  misc_RNA (1)...(19): siRNA sense strand
ucaaccagaccaccuuaua

SEQ ID NO: 183200 - RNA, 19 nt, Homo sapiens
  misc_RNA (1)...(19): siRNA sense strand
guuaugagaucaagaugac

SEQ ID NO: 183201 - RNA, 19 nt, Homo sapiens
  misc_RNA (1)...(19): siRNA sense strand
gcgaggaguuucucauugc

SEQ ID NO: 183202 - RNA, 19 nt, Homo sapiens
  misc_RNA (1)...(19): siRNA sense strand
ucaagaugaccaagaugua

SEQ ID NO: 183203 - RNA, 19 nt, Homo sapiens
  misc_RNA (1)...(19): siRNA sense strand
caagaugaccaagauguau

SEQ ID NO: 183204 - RNA, 19 nt, Homo sapiens
  misc_RNA (1)...(19): siRNA sense strand
accaagaccuacacuguug

SEQ ID NO: 183205 - RNA, 19 nt, Homo sapiens
  misc_RNA (1)...(19): siRNA sense strand
ugaggaaugcacaguguuu

SEQ ID NO: 183206 - RNA, 19 nt, Homo sapiens
  misc_RNA (1)...(19): siRNA sense strand
gagaucaagaugaccaaga

SEQ ID NO: 183207 - RNA, 19 nt, Homo sapiens
  misc_RNA (1)...(19): siRNA sense strand
agaucaagaugaccaagau

SEQ ID NO: 183208 - RNA, 19 nt, Homo sapiens
  misc_RNA (1)...(19): siRNA sense strand
ucaccaagaccuacacugu

SEQ ID NO: 183209 - RNA, 19 nt, Homo sapiens
  misc_RNA (1)...(19): siRNA sense strand
aagaugaccaagauguaua

SEQ ID NO: 183210 - RNA, 19 nt, Homo sapiens
  misc_RNA (1)...(19): siRNA sense strand
gagagugucugcggauacu

SEQ ID NO: 183211 - RNA, 19 nt, Homo sapiens
  misc_RNA (1)...(19): siRNA sense strand
cagcgaggaguuucucauu

SEQ ID NO: 183212 - RNA, 19 nt, Homo sapiens
  misc_RNA (1)...(19): siRNA sense strand
caaccagaccaccuuauac

SEQ ID NO: 183213 - RNA, 19 nt, Homo sapiens
  misc_RNA (1)...(19): siRNA sense strand
caccaagaccuacacuguu

SEQ ID NO: 183214 - RNA, 19 nt, Homo sapiens
  misc_RNA (1)...(19): siRNA sense strand
caaccgcagcgaggaguuu

SEQ ID NO: 183215 - RNA, 19 nt, Homo sapiens
  misc_RNA (1)...(19): siRNA sense strand
ggaacagccugagcuuagc

SEQ ID NO: 183216 - RNA, 19 nt, Homo sapiens
  misc_RNA (1)...(19): siRNA sense strand
uggaacagccugagcuuag

SEQ ID NO: 183217 - RNA, 19 nt, Homo sapiens
  misc_RNA (1)...(19): siRNA sense strand
cuucuggcauccuguuguu

SEQ ID NO: 183218 - RNA, 19 nt, Homo sapiens
  misc_RNA (1)...(19): siRNA sense strand
agaugaccaagauguauaa

SEQ ID NO: 183219 - RNA, 19 nt, Homo sapiens
  misc_RNA (1)...(19): siRNA sense strand
gaucaagaugaccaagaug

SEQ ID NO: 183220 - RNA, 19 nt, Homo sapiens
  misc_RNA (1)...(19): siRNA sense strand
uggagagugucugcggaua

SEQ ID NO: 183221 - RNA, 19 nt, Homo sapiens
  misc_RNA (1)...(19): siRNA sense strand
ccuuauaccagcguuauga

SEQ ID NO: 183222 - RNA, 19 nt, Homo sapiens
  misc_RNA (1)...(19): siRNA sense strand
ggacucuugcacaucacua

SEQ ID NO: 183223 - RNA, 19 nt, Homo sapiens
  misc_RNA (1)...(19): siRNA sense strand
ggagagugucugcggauac

SEQ ID NO: 183224 - RNA, 19 nt, Homo sapiens
  misc_RNA (1)...(19): siRNA sense strand
agacggccuucugcaauuc

SEQ ID NO: 183225 - RNA, 19 nt, Homo sapiens
  misc_RNA (1)...(19): siRNA sense strand
agcgaggaguuucucauug

SEQ ID NO: 183226 - RNA, 19 nt, Homo sapiens
  misc_RNA (1)...(19): siRNA sense strand
gagugucugcggauacuuc

SEQ ID NO: 183227 - RNA, 19 nt, Homo sapiens
  misc_RNA (1)...(19): siRNA sense strand
acugcaggauggacucuug

SEQ ID NO: 183228 - RNA, 19 nt, Homo sapiens
  misc_RNA (1)...(19): siRNA sense strand
gaggaaugcacaguguuuc

SEQ ID NO: 183229 - RNA, 19 nt, Homo sapiens
  misc_RNA (1)...(19): siRNA sense strand
ucaagaggauccaguauga

SEQ ID NO: 183230 - RNA, 19 nt, Homo sapiens
  misc_RNA (1)...(19): siRNA sense strand
gaaggaauaucucauugca

SEQ ID NO: 183231 - RNA, 19 nt, Homo sapiens
  misc_RNA (1)...(19): siRNA sense strand
ugagaaggauauagaguuu

SEQ ID NO: 183232 - RNA, 19 nt, Homo sapiens
  misc_RNA (1)...(19): siRNA sense strand
ccaaagcggucagugagaa

SEQ ID NO: 183233 - RNA, 19 nt, Homo sapiens
  misc_RNA (1)...(19): siRNA sense strand
cgacaucgaggacccauaa

SEQ ID NO: 183234 - RNA, 19 nt, Homo sapiens
  misc_RNA (1)...(19): siRNA sense strand
ggaaagaaggaauaucuca

SEQ ID NO: 183235 - RNA, 19 nt, Homo sapiens
  misc_RNA (1)...(19): siRNA sense strand
ucaagcagauaaagauguu

SEQ ID NO: 183236 - RNA, 19 nt, Homo sapiens
  misc_RNA (1)...(19): siRNA sense strand
ucaaagggccugagaagga

SEQ ID NO: 183237 - RNA, 19 nt, Homo sapiens
  misc_RNA (1)...(19): siRNA sense strand
gaggaaagaaggaauaucu

SEQ ID NO: 183238 - RNA, 19 nt, Homo sapiens
  misc_RNA (1)...(19): siRNA sense strand
agauaaagauguucaaagg

SEQ ID NO: 183239 - RNA, 19 nt, Homo sapiens
  misc_RNA (1)...(19): siRNA sense strand
caaugcagauguagugauc

SEQ ID NO: 183240 - RNA, 19 nt, Homo sapiens
  misc_RNA (1)...(19): siRNA sense strand
caaagggccugagaaggau

SEQ ID NO: 183241 - RNA, 19 nt, Homo sapiens
  misc_RNA (1)...(19): siRNA sense strand
aagaaggaauaucucauug

SEQ ID NO: 183242 - RNA, 19 nt, Homo sapiens
  misc_RNA (1)...(19): siRNA sense strand
ucacagagaagaacaucaa

SEQ ID NO: 183243 - RNA, 19 nt, Homo sapiens
  misc_RNA (1)...(19): siRNA sense strand
gaaguggacucuggaaacg

SEQ ID NO: 183244 - RNA, 19 nt, Homo sapiens
  misc_RNA (1)...(19): siRNA sense strand
gcagauaaagauguucaaa

SEQ ID NO: 183245 - RNA, 19 nt, Homo sapiens
  misc_RNA (1)...(19): siRNA sense strand
uaugagaucaagcagauaa

SEQ ID NO: 183246 - RNA, 19 nt, Homo sapiens
  misc_RNA (1)...(19): siRNA sense strand
gaauaucucauugcaggaa

SEQ ID NO: 183247 - RNA, 19 nt, Homo sapiens
  misc_RNA (1)...(19): siRNA sense strand
gaaagaaggaauaucucau

SEQ ID NO: 183248 - RNA, 19 nt, Homo sapiens
  misc_RNA (1)...(19): siRNA sense strand
gagaucaagcagauaaaga

SEQ ID NO: 183249 - RNA, 19 nt, Homo sapiens
  misc_RNA (1)...(19): siRNA sense strand
gagaaggauauagaguuua

SEQ ID NO: 183250 - RNA, 19 nt, Homo sapiens
  misc_RNA (1)...(19): siRNA sense strand
gcaggaguuucucgacauc

SEQ ID NO: 183251 - RNA, 19 nt, Homo sapiens
  misc_RNA (1)...(19): siRNA sense strand
caacaggcguuuugcaaug

SEQ ID NO: 183252 - RNA, 19 nt, Homo sapiens
  misc_RNA (1)...(19): siRNA sense strand
ggaaguggacucuggaaac

SEQ ID NO: 183253 - RNA, 19 nt, Homo sapiens
  misc_RNA (1)...(19): siRNA sense strand
gcaacccuaucaagaggau

SEQ ID NO: 183254 - RNA, 19 nt, Homo sapiens
  misc_RNA (1)...(19): siRNA sense strand
aguaugagaucaagcagau

SEQ ID NO: 183255 - RNA, 19 nt, Homo sapiens
  misc_RNA (1)...(19): siRNA sense strand
gaaccacagguaccagaug

SEQ ID NO: 183256 - RNA, 19 nt, Homo sapiens
  misc_RNA (1)...(19): siRNA sense strand
gaucaagcagauaaagaug

SEQ ID NO: 183257 - RNA, 19 nt, Homo sapiens
  misc_RNA (1)...(19): siRNA sense strand
ggccugagaaggauauaga

SEQ ID NO: 183258 - RNA, 19 nt, Homo sapiens
  misc_RNA (1)...(19): siRNA sense strand
gggccaaagcggucaguga

SEQ ID NO: 183259 - RNA, 19 nt, Homo sapiens
  misc_RNA (1)...(19): siRNA sense strand
gcaccaggccaaguucuuc

SEQ ID NO: 183260 - RNA, 19 nt, Homo sapiens
  misc_RNA (1)...(19): siRNA sense strand
guucuucgccugcaucaag

SEQ ID NO: 183261 - RNA, 19 nt, Homo sapiens
  misc_RNA (1)...(19): siRNA sense strand
aagaggauccaguaugaga

SEQ ID NO: 183262 - RNA, 19 nt, Homo sapiens
  misc_RNA (1)...(19): siRNA sense strand
guucaaagggccugagaag

SEQ ID NO: 183263 - RNA, 19 nt, Homo sapiens
  misc_RNA (1)...(19): siRNA sense strand
gcaaugcagauguagugau

SEQ ID NO: 183264 - RNA, 19 nt, Homo sapiens
  misc_RNA (1)...(19): siRNA sense strand
gcaccacccagaagaagag

SEQ ID NO: 183265 - RNA, 19 nt, Homo sapiens
  misc_RNA (1)...(19): siRNA sense strand
uggacugggucacagagaa

SEQ ID NO: 183266 - RNA, 19 nt, Homo sapiens
  misc_RNA (1)...(19): siRNA sense strand
uauggcaacccuaucaaga

SEQ ID NO: 183267 - RNA, 19 nt, Homo sapiens
  misc_RNA (1)...(19): siRNA sense strand
ggacguuggaggaaagaag

SEQ ID NO: 183268 - RNA, 19 nt, Homo sapiens
  misc_RNA (1)...(19): siRNA sense strand
cagauaaagauguucaaag

SEQ ID NO: 183269 - RNA, 19 nt, Homo sapiens
  misc_RNA (1)...(19): siRNA sense strand
ggacucuggaaacgacauu

SEQ ID NO: 183270 - RNA, 19 nt, Homo sapiens
  misc_RNA (1)...(19): siRNA sense strand
acucuggaaacgacauuua

SEQ ID NO: 183271 - RNA, 19 nt, Homo sapiens
  misc_RNA (1)...(19): siRNA sense strand
ggacugggucacagagaag

SEQ ID NO: 183272 - RNA, 19 nt, Homo sapiens
  misc_RNA (1)...(19): siRNA sense strand
cugagaaggauauagaguu

SEQ ID NO: 183273 - RNA, 19 nt, Homo sapiens
  misc_RNA (1)...(19): siRNA sense strand
cuaucaagaggauccagua

SEQ ID NO: 183274 - RNA, 19 nt, Homo sapiens
  misc_RNA (1)...(19): siRNA sense strand
agaucaagcagauaaagau

SEQ ID NO: 183275 - RNA, 19 nt, Homo sapiens
  misc_RNA (1)...(19): siRNA sense strand
ggauggacugggucacaga

SEQ ID NO: 183276 - RNA, 19 nt, Homo sapiens
  misc_RNA (1)...(19): siRNA sense strand
aauaucucauugcaggaaa

SEQ ID NO: 183277 - RNA, 19 nt, Homo sapiens
  misc_RNA (1)...(19): siRNA sense strand
gagcaccacccagaagaag

SEQ ID NO: 183278 - RNA, 19 nt, Homo sapiens
  misc_RNA (1)...(19): siRNA sense strand
agaagaagagccugaacca

SEQ ID NO: 183279 - RNA, 19 nt, Homo sapiens
  misc_RNA (1)...(19): siRNA sense strand
caugaucccgugcuacauc

SEQ ID NO: 183280 - RNA, 19 nt, Homo sapiens
  misc_RNA (1)...(19): siRNA sense strand
gcaaagacauugauagaaa

SEQ ID NO: 183281 - RNA, 19 nt, Homo sapiens
  misc_RNA (1)...(19): siRNA sense strand
caacguagcucuggcauua

SEQ ID NO: 183282 - RNA, 19 nt, Homo sapiens
  misc_RNA (1)...(19): siRNA sense strand
ggaaauacaugauccaaga

SEQ ID NO: 183283 - RNA, 19 nt, Homo sapiens
  misc_RNA (1)...(19): siRNA sense strand
gagaagaaccagauauuua

SEQ ID NO: 183284 - RNA, 19 nt, Homo sapiens
  misc_RNA (1)...(19): siRNA sense strand
gagaagaagugaccauauu

SEQ ID NO: 183285 - RNA, 19 nt, Homo sapiens
  misc_RNA (1)...(19): siRNA sense strand
gaagaacaguggucauauu

SEQ ID NO: 183286 - RNA, 19 nt, Homo sapiens
  misc_RNA (1)...(19): siRNA sense strand
caaaagaucugcauccuua

SEQ ID NO: 183287 - RNA, 19 nt, Homo sapiens
  misc_RNA (1)...(19): siRNA sense strand
ucaagaaggugauguugua

SEQ ID NO: 183288 - RNA, 19 nt, Homo sapiens
  misc_RNA (1)...(19): siRNA sense strand
gaagaaaguucaaauacca

SEQ ID NO: 183289 - RNA, 19 nt, Homo sapiens
  misc_RNA (1)...(19): siRNA sense strand
ggaagaggaugaagaugaa

SEQ ID NO: 183290 - RNA, 19 nt, Homo sapiens
  misc_RNA (1)...(19): siRNA sense strand
gcaaccagauguggauuua

SEQ ID NO: 183291 - RNA, 19 nt, Homo sapiens
  misc_RNA (1)...(19): siRNA sense strand
gaaaacagcugucauacuu

SEQ ID NO: 183292 - RNA, 19 nt, Homo sapiens
  misc_RNA (1)...(19): siRNA sense strand
gaagccaccugaagauauu

SEQ ID NO: 183293 - RNA, 19 nt, Homo sapiens
  misc_RNA (1)...(19): siRNA sense strand
ggaagaaguuacaguugaa

SEQ ID NO: 183294 - RNA, 19 nt, Homo sapiens
  misc_RNA (1)...(19): siRNA sense strand
gaguagagaugaagagaga

SEQ ID NO: 183295 - RNA, 19 nt, Homo sapiens
  misc_RNA (1)...(19): siRNA sense strand
agaggaaggugaucaaauu

SEQ ID NO: 183296 - RNA, 19 nt, Homo sapiens
  misc_RNA (1)...(19): siRNA sense strand
ggagagguguuccguguug

SEQ ID NO: 183297 - RNA, 19 nt, Homo sapiens
  misc_RNA (1)...(19): siRNA sense strand
gaaacugguguuaguauaa

SEQ ID NO: 183298 - RNA, 19 nt, Homo sapiens
  misc_RNA (1)...(19): siRNA sense strand
gaagaaggauguuuaucgu

SEQ ID NO: 183299 - RNA, 19 nt, Homo sapiens
  misc_RNA (1)...(19): siRNA sense strand
gaaguagcaucuaaaccuu

SEQ ID NO: 183300 - RNA, 19 nt, Homo sapiens
  misc_RNA (1)...(19): siRNA sense strand
gagaaaagcuggcaagaga

SEQ ID NO: 183301 - RNA, 19 nt, Homo sapiens
  misc_RNA (1)...(19): siRNA sense strand
ggauagaagugcaaguaga

SEQ ID NO: 183302 - RNA, 19 nt, Homo sapiens
  misc_RNA (1)...(19): siRNA sense strand
cagagaagccuaaauauca

SEQ ID NO: 183303 - RNA, 19 nt, Homo sapiens
  misc_RNA (1)...(19): siRNA sense strand
ggauuuggauuuggaauug

SEQ ID NO: 183304 - RNA, 19 nt, Homo sapiens
  misc_RNA (1)...(19): siRNA sense strand
caagugaaacugcacauaa

SEQ ID NO: 183305 - RNA, 19 nt, Homo sapiens
  misc_RNA (1)...(19): siRNA sense strand
ccaagaaggauguaaauga

SEQ ID NO: 183306 - RNA, 19 nt, Homo sapiens
  misc_RNA (1)...(19): siRNA sense strand
gggcuacgcuauugaaugu

SEQ ID NO: 183307 - RNA, 19 nt, Homo sapiens
  misc_RNA (1)...(19): siRNA sense strand
gaacuagaugaaacucuua

SEQ ID NO: 183308 - RNA, 19 nt, Homo sapiens
  misc_RNA (1)...(19): siRNA sense strand
guggauaccuuguacaaug

SEQ ID NO: 183309 - RNA, 19 nt, Homo sapiens
  misc_RNA (1)...(19): siRNA sense strand
gaucaaauucucaggguaa

SEQ ID NO: 183310 - RNA, 19 nt, Homo sapiens
  misc_RNA (1)...(19): siRNA sense strand
aaacagcugucauacuuug

SEQ ID NO: 183311 - RNA, 19 nt, Homo sapiens
  misc_RNA (1)...(19): siRNA sense strand
gaaucucccuauggacuua

SEQ ID NO: 183312 - RNA, 19 nt, Homo sapiens
  misc_RNA (1)...(19): siRNA sense strand
uaacggaguuucaauggau

SEQ ID NO: 183313 - RNA, 19 nt, Homo sapiens
  misc_RNA (1)...(19): siRNA sense strand
agaauaagccagcaacuuu

SEQ ID NO: 183314 - RNA, 19 nt, Homo sapiens
  misc_RNA (1)...(19): siRNA sense strand
ccaccuccaucucagaaua

SEQ ID NO: 183315 - RNA, 19 nt, Homo sapiens
  misc_RNA (1)...(19): siRNA sense strand
gaagaagaaggauguuuau

SEQ ID NO: 183316 - RNA, 19 nt, Homo sapiens
  misc_RNA (1)...(19): siRNA sense strand
gaaugucccugaucuuucu

SEQ ID NO: 183317 - RNA, 19 nt, Homo sapiens
  misc_RNA (1)...(19): siRNA sense strand
cagcauccuuccaccuuua

SEQ ID NO: 183318 - RNA, 19 nt, Homo sapiens
  misc_RNA (1)...(19): siRNA sense strand
cauagaaacugguguuagu

SEQ ID NO: 183319 - RNA, 19 nt, Homo sapiens
  misc_RNA (1)...(19): siRNA sense strand
gugcugaguuccauagaaa

SEQ ID NO: 183320 - RNA, 19 nt, Homo sapiens
  misc_RNA (1)...(19): siRNA sense strand
guaggagauucuuucuaua

SEQ ID NO: 183321 - RNA, 19 nt, Homo sapiens
  misc_RNA (1)...(19): siRNA sense strand
uguaggagauucuuucuau

SEQ ID NO: 183322 - RNA, 19 nt, Homo sapiens
  misc_RNA (1)...(19): siRNA sense strand
uggaaaugauguuggaaua

SEQ ID NO: 183323 - RNA, 19 nt, Homo sapiens
  misc_RNA (1)...(19): siRNA sense strand
gaaaggaggaccagcugaa

SEQ ID NO: 183324 - RNA, 19 nt, Homo sapiens
  misc_RNA (1)...(19): siRNA sense strand
gaacgcaaguuugaaaguc

SEQ ID NO: 183325 - RNA, 19 nt, Homo sapiens
  misc_RNA (1)...(19): siRNA sense strand
gaggguacuuuccacguuu

SEQ ID NO: 183326 - RNA, 19 nt, Homo sapiens
  misc_RNA (1)...(19): siRNA sense strand
ggccuacacugaucaagaa

SEQ ID NO: 183327 - RNA, 19 nt, Homo sapiens
  misc_RNA (1)...(19): siRNA sense strand
cgagcgaucucauaaacuu

SEQ ID NO: 183328 - RNA, 19 nt, Homo sapiens
  misc_RNA (1)...(19): siRNA sense strand
aaaggaaucucccuaugga

SEQ ID NO: 183329 - RNA, 19 nt, Homo sapiens
  misc_RNA (1)...(19): siRNA sense strand
gaaggaagaagaaaguuca

SEQ ID NO: 183330 - RNA, 19 nt, Homo sapiens
  misc_RNA (1)...(19): siRNA sense strand
guaauucagugucauugga

SEQ ID NO: 183331 - RNA, 19 nt, Homo sapiens
  misc_RNA (1)...(19): siRNA sense strand
gagguuauguccagaaucu

SEQ ID NO: 183332 - RNA, 19 nt, Homo sapiens
  misc_RNA (1)...(19): siRNA sense strand
agaagaagaaggauguuua

SEQ ID NO: 183333 - RNA, 19 nt, Homo sapiens
  misc_RNA (1)...(19): siRNA sense strand
gaugguguccuaccuaauu

SEQ ID NO: 183334 - RNA, 19 nt, Homo sapiens
  misc_RNA (1)...(19): siRNA sense strand
gcacagcaauggaggaaac

SEQ ID NO: 183335 - RNA, 19 nt, Homo sapiens
  misc_RNA (1)...(19): siRNA sense strand
agaaaggucuaaaggcaaa

SEQ ID NO: 183336 - RNA, 19 nt, Homo sapiens
  misc_RNA (1)...(19): siRNA sense strand
agaaggugauguuguauug

SEQ ID NO: 183337 - RNA, 19 nt, Homo sapiens
  misc_RNA (1)...(19): siRNA sense strand
cagcgcgucucuccacaua

SEQ ID NO: 183338 - RNA, 19 nt, Homo sapiens
  misc_RNA (1)...(19): siRNA sense strand
ggaugaagaugaagauggu

SEQ ID NO: 183339 - RNA, 19 nt, Homo sapiens
  misc_RNA (1)...(19): siRNA sense strand
caauagugauuucagaugu

SEQ ID NO: 183340 - RNA, 19 nt, Homo sapiens
  misc_RNA (1)...(19): siRNA sense strand
agaaacugguguuaguaua

SEQ ID NO: 183341 - RNA, 19 nt, Homo sapiens
  misc_RNA (1)...(19): siRNA sense strand
gcagagaagccuaaauauc

SEQ ID NO: 183342 - RNA, 19 nt, Homo sapiens
  misc_RNA (1)...(19): siRNA sense strand
caaggaaggcuuagaggaa

SEQ ID NO: 183343 - RNA, 19 nt, Homo sapiens
  misc_RNA (1)...(19): siRNA sense strand
caagauaguuuggcagcaa

SEQ ID NO: 183344 - RNA, 19 nt, Homo sapiens
  misc_RNA (1)...(19): siRNA sense strand
gcaagccauauauuuguua

SEQ ID NO: 183345 - RNA, 19 nt, Homo sapiens
  misc_RNA (1)...(19): siRNA sense strand
ggaagaagaaaguucaaau

SEQ ID NO: 183346 - RNA, 19 nt, Homo sapiens
  misc_RNA (1)...(19): siRNA sense strand
uggaagaaguuacaguuga

SEQ ID NO: 183347 - RNA, 19 nt, Homo sapiens
  misc_RNA (1)...(19): siRNA sense strand
gagcugcgcuuaccacacu

SEQ ID NO: 183348 - RNA, 19 nt, Homo sapiens
  misc_RNA (1)...(19): siRNA sense strand
cuacacugaucaagaacua

SEQ ID NO: 183349 - RNA, 19 nt, Homo sapiens
  misc_RNA (1)...(19): siRNA sense strand
aaacaaacaccuucucuuc

SEQ ID NO: 183350 - RNA, 19 nt, Homo sapiens
  misc_RNA (1)...(19): siRNA sense strand
gaaguuacaguugaaagaa

SEQ ID NO: 183351 - RNA, 19 nt, Homo sapiens
  misc_RNA (1)...(19): siRNA sense strand
gaguuucaauggauaaugu

SEQ ID NO: 183352 - RNA, 19 nt, Homo sapiens
  misc_RNA (1)...(19): siRNA sense strand
caagaaggauguaaaugac

SEQ ID NO: 183353 - RNA, 19 nt, Homo sapiens
  misc_RNA (1)...(19): siRNA sense strand
gauaaaugguacugugaca

SEQ ID NO: 183354 - RNA, 19 nt, Homo sapiens
  misc_RNA (1)...(19): siRNA sense strand
agaggaagauccagcaaug

SEQ ID NO: 183355 - RNA, 19 nt, Homo sapiens
  misc_RNA (1)...(19): siRNA sense strand
gcagaaccauguuuugaaa

SEQ ID NO: 183356 - RNA, 19 nt, Homo sapiens
  misc_RNA (1)...(19): siRNA sense strand
gcaagagaagaaccagaua

SEQ ID NO: 183357 - RNA, 19 nt, Homo sapiens
  misc_RNA (1)...(19): siRNA sense strand
caaaguuuccagcuuauga

SEQ ID NO: 183358 - RNA, 19 nt, Homo sapiens
  misc_RNA (1)...(19): siRNA sense strand
gaggcaucaucccuaauaa

SEQ ID NO: 183359 - RNA, 19 nt, Homo sapiens
  misc_RNA (1)...(19): siRNA sense strand
cgaggcaucaucccuaaua

SEQ ID NO: 183360 - RNA, 19 nt, Homo sapiens
  misc_RNA (1)...(19): siRNA sense strand
ggaaacgucaauagugauu

SEQ ID NO: 183361 - RNA, 19 nt, Homo sapiens
  misc_RNA (1)...(19): siRNA sense strand
gaaacaaacaccuucucuu

SEQ ID NO: 183362 - RNA, 19 nt, Homo sapiens
  misc_RNA (1)...(19): siRNA sense strand
caaagacauugauagaaag

SEQ ID NO: 183363 - RNA, 19 nt, Homo sapiens
  misc_RNA (1)...(19): siRNA sense strand
agaauauggucuucgauug

SEQ ID NO: 183364 - RNA, 19 nt, Homo sapiens
  misc_RNA (1)...(19): siRNA sense strand
aaacacugcugaguccuuu

SEQ ID NO: 183365 - RNA, 19 nt, Homo sapiens
  misc_RNA (1)...(19): siRNA sense strand
aagaacaguggucauauua

SEQ ID NO: 183366 - RNA, 19 nt, Homo sapiens
  misc_RNA (1)...(19): siRNA sense strand
agccuaaucugaccuauga

SEQ ID NO: 183367 - RNA, 19 nt, Homo sapiens
  misc_RNA (1)...(19): siRNA sense strand
aaacauauccuccuuacuc

SEQ ID NO: 183368 - RNA, 19 nt, Homo sapiens
  misc_RNA (1)...(19): siRNA sense strand
gaaggacagcuacaggaaa

SEQ ID NO: 183369 - RNA, 19 nt, Homo sapiens
  misc_RNA (1)...(19): siRNA sense strand
ggaggaaacagcuauaugg

SEQ ID NO: 183370 - RNA, 19 nt, Homo sapiens
  misc_RNA (1)...(19): siRNA sense strand
gaaaaggaaucucccuaug

SEQ ID NO: 183371 - RNA, 19 nt, Homo sapiens
  misc_RNA (1)...(19): siRNA sense strand
gaacccauuuugaauauga

SEQ ID NO: 183372 - RNA, 19 nt, Homo sapiens
  misc_RNA (1)...(19): siRNA sense strand
agcaagagauggcaauauu

SEQ ID NO: 183373 - RNA, 19 nt, Homo sapiens
  misc_RNA (1)...(19): siRNA sense strand
gaaggagugagaagauuug

SEQ ID NO: 183374 - RNA, 19 nt, Homo sapiens
  misc_RNA (1)...(19): siRNA sense strand
ggacuccucuggaaugcau

SEQ ID NO: 183375 - RNA, 19 nt, Homo sapiens
  misc_RNA (1)...(19): siRNA sense strand
gaugaaacucuuaaugaug

SEQ ID NO: 183376 - RNA, 19 nt, Homo sapiens
  misc_RNA (1)...(19): siRNA sense strand
gaucaagaacuagaugaaa

SEQ ID NO: 183377 - RNA, 19 nt, Homo sapiens
  misc_RNA (1)...(19): siRNA sense strand
gguagugaauacucaaugu

SEQ ID NO: 183378 - RNA, 19 nt, Homo sapiens
  misc_RNA (1)...(19): siRNA sense strand
gacgagauaauccucauuu

SEQ ID NO: 183379 - RNA, 19 nt, Homo sapiens
  misc_RNA (1)...(19): siRNA sense strand
gaguugagcaggaaaucua

SEQ ID NO: 183380 - RNA, 19 nt, Homo sapiens
  misc_RNA (1)...(19): siRNA sense strand
gcaaagacauugauagaaa

SEQ ID NO: 183381 - RNA, 19 nt, Homo sapiens
  misc_RNA (1)...(19): siRNA sense strand
caacguagcucuggcauua

SEQ ID NO: 183382 - RNA, 19 nt, Homo sapiens
  misc_RNA (1)...(19): siRNA sense strand
ggaaauacaugauccaaga

SEQ ID NO: 183383 - RNA, 19 nt, Homo sapiens
  misc_RNA (1)...(19): siRNA sense strand
gagaagaaccagauauuua

SEQ ID NO: 183384 - RNA, 19 nt, Homo sapiens
  misc_RNA (1)...(19): siRNA sense strand
gagaagaagugaccauauu

SEQ ID NO: 183385 - RNA, 19 nt, Homo sapiens
  misc_RNA (1)...(19): siRNA sense strand
gaagaacaguggucauauu

SEQ ID NO: 183386 - RNA, 19 nt, Homo sapiens
  misc_RNA (1)...(19): siRNA sense strand
caaaagaucugcauccuua

SEQ ID NO: 183387 - RNA, 19 nt, Homo sapiens
  misc_RNA (1)...(19): siRNA sense strand
ucaagaaggugauguugua

SEQ ID NO: 183388 - RNA, 19 nt, Homo sapiens
  misc_RNA (1)...(19): siRNA sense strand
gaagaaaguucaaauacca

SEQ ID NO: 183389 - RNA, 19 nt, Homo sapiens
  misc_RNA (1)...(19): siRNA sense strand
ggaagaggaugaagaugaa

SEQ ID NO: 183390 - RNA, 19 nt, Homo sapiens
  misc_RNA (1)...(19): siRNA sense strand
gcaaccagauguggauuua

SEQ ID NO: 183391 - RNA, 19 nt, Homo sapiens
  misc_RNA (1)...(19): siRNA sense strand
gaaaacagcugucauacuu

SEQ ID NO: 183392 - RNA, 19 nt, Homo sapiens
  misc_RNA (1)...(19): siRNA sense strand
gaagccaccugaagauauu

SEQ ID NO: 183393 - RNA, 19 nt, Homo sapiens
  misc_RNA (1)...(19): siRNA sense strand
ggaagaaguuacaguugaa

SEQ ID NO: 183394 - RNA, 19 nt, Homo sapiens
  misc_RNA (1)...(19): siRNA sense strand
gaguagagaugaagagaga

SEQ ID NO: 183395 - RNA, 19 nt, Homo sapiens
  misc_RNA (1)...(19): siRNA sense strand
agaggaaggugaucaaauu

SEQ ID NO: 183396 - RNA, 19 nt, Homo sapiens
  misc_RNA (1)...(19): siRNA sense strand
ggagagguguuccguguug

SEQ ID NO: 183397 - RNA, 19 nt, Homo sapiens
  misc_RNA (1)...(19): siRNA sense strand
gaaacugguguuaguauaa

SEQ ID NO: 183398 - RNA, 19 nt, Homo sapiens
  misc_RNA (1)...(19): siRNA sense strand
gaagaaggauguuuaucgu

SEQ ID NO: 183399 - RNA, 19 nt, Homo sapiens
  misc_RNA (1)...(19): siRNA sense strand
gaaguagcaucuaaaccuu

SEQ ID NO: 183400 - RNA, 19 nt, Homo sapiens
  misc_RNA (1)...(19): siRNA sense strand
gagaaaagcuggcaagaga

SEQ ID NO: 183401 - RNA, 19 nt, Homo sapiens
  misc_RNA (1)...(19): siRNA sense strand
ggauagaagugcaaguaga

SEQ ID NO: 183402 - RNA, 19 nt, Homo sapiens
  misc_RNA (1)...(19): siRNA sense strand
cagagaagccuaaauauca

SEQ ID NO: 183403 - RNA, 19 nt, Homo sapiens
  misc_RNA (1)...(19): siRNA sense strand
ggauuuggauuuggaauug

SEQ ID NO: 183404 - RNA, 19 nt, Homo sapiens
  misc_RNA (1)...(19): siRNA sense strand
caagugaaacugcacauaa

SEQ ID NO: 183405 - RNA, 19 nt, Homo sapiens
  misc_RNA (1)...(19): siRNA sense strand
ccaagaaggauguaaauga

SEQ ID NO: 183406 - RNA, 19 nt, Homo sapiens
  misc_RNA (1)...(19): siRNA sense strand
gggcuacgcuauugaaugu

SEQ ID NO: 183407 - RNA, 19 nt, Homo sapiens
  misc_RNA (1)...(19): siRNA sense strand
gaacuagaugaaacucuua

SEQ ID NO: 183408 - RNA, 19 nt, Homo sapiens
  misc_RNA (1)...(19): siRNA sense strand
guggauaccuuguacaaug

SEQ ID NO: 183409 - RNA, 19 nt, Homo sapiens
  misc_RNA (1)...(19): siRNA sense strand
gaucaaauucucaggguaa

SEQ ID NO: 183410 - RNA, 19 nt, Homo sapiens
  misc_RNA (1)...(19): siRNA sense strand
aaacagcugucauacuuug

SEQ ID NO: 183411 - RNA, 19 nt, Homo sapiens
  misc_RNA (1)...(19): siRNA sense strand
gaaucucccuauggacuua

SEQ ID NO: 183412 - RNA, 19 nt, Homo sapiens
  misc_RNA (1)...(19): siRNA sense strand
uaacggaguuucaauggau

SEQ ID NO: 183413 - RNA, 19 nt, Homo sapiens
  misc_RNA (1)...(19): siRNA sense strand
agaauaagccagcaacuuu

SEQ ID NO: 183414 - RNA, 19 nt, Homo sapiens
  misc_RNA (1)...(19): siRNA sense strand
ccaccuccaucucagaaua

SEQ ID NO: 183415 - RNA, 19 nt, Homo sapiens
  misc_RNA (1)...(19): siRNA sense strand
gaagaagaaggauguuuau

SEQ ID NO: 183416 - RNA, 19 nt, Homo sapiens
  misc_RNA (1)...(19): siRNA sense strand
gaaugucccugaucuuucu

SEQ ID NO: 183417 - RNA, 19 nt, Homo sapiens
  misc_RNA (1)...(19): siRNA sense strand
cagcauccuuccaccuuua

SEQ ID NO: 183418 - RNA, 19 nt, Homo sapiens
  misc_RNA (1)...(19): siRNA sense strand
cauagaaacugguguuagu

SEQ ID NO: 183419 - RNA, 19 nt, Homo sapiens
  misc_RNA (1)...(19): siRNA sense strand
gugcugaguuccauagaaa

SEQ ID NO: 183420 - RNA, 19 nt, Homo sapiens
  misc_RNA (1)...(19): siRNA sense strand
guaggagauucuuucuaua

SEQ ID NO: 183421 - RNA, 19 nt, Homo sapiens
  misc_RNA (1)...(19): siRNA sense strand
uguaggagauucuuucuau

SEQ ID NO: 183422 - RNA, 19 nt, Homo sapiens
  misc_RNA (1)...(19): siRNA sense strand
uggaaaugauguuggaaua

SEQ ID NO: 183423 - RNA, 19 nt, Homo sapiens
  misc_RNA (1)...(19): siRNA sense strand
gaaaggaggaccagcugaa

SEQ ID NO: 183424 - RNA, 19 nt, Homo sapiens
  misc_RNA (1)...(19): siRNA sense strand
gaacgcaaguuugaaaguc

SEQ ID NO: 183425 - RNA, 19 nt, Homo sapiens
  misc_RNA (1)...(19): siRNA sense strand
gaggguacuuuccacguuu

SEQ ID NO: 183426 - RNA, 19 nt, Homo sapiens
  misc_RNA (1)...(19): siRNA sense strand
ggccuacacugaucaagaa

SEQ ID NO: 183427 - RNA, 19 nt, Homo sapiens
  misc_RNA (1)...(19): siRNA sense strand
cgagcgaucucauaaacuu

SEQ ID NO: 183428 - RNA, 19 nt, Homo sapiens
  misc_RNA (1)...(19): siRNA sense strand
aaaggaaucucccuaugga

SEQ ID NO: 183429 - RNA, 19 nt, Homo sapiens
  misc_RNA (1)...(19): siRNA sense strand
gaaggaagaagaaaguuca

SEQ ID NO: 183430 - RNA, 19 nt, Homo sapiens
  misc_RNA (1)...(19): siRNA sense strand
guaauucagugucauugga

SEQ ID NO: 183431 - RNA, 19 nt, Homo sapiens
  misc_RNA (1)...(19): siRNA sense strand
gagguuauguccagaaucu

SEQ ID NO: 183432 - RNA, 19 nt, Homo sapiens
  misc_RNA (1)...(19): siRNA sense strand
agaagaagaaggauguuua

SEQ ID NO: 183433 - RNA, 19 nt, Homo sapiens
  misc_RNA (1)...(19): siRNA sense strand
gaugguguccuaccuaauu

SEQ ID NO: 183434 - RNA, 19 nt, Homo sapiens
  misc_RNA (1)...(19): siRNA sense strand
gcacagcaauggaggaaac

SEQ ID NO: 183435 - RNA, 19 nt, Homo sapiens
  misc_RNA (1)...(19): siRNA sense strand
agaaaggucuaaaggcaaa

SEQ ID NO: 183436 - RNA, 19 nt, Homo sapiens
  misc_RNA (1)...(19): siRNA sense strand
agaaggugauguuguauug

SEQ ID NO: 183437 - RNA, 19 nt, Homo sapiens
  misc_RNA (1)...(19): siRNA sense strand
cagcgcgucucuccacaua

SEQ ID NO: 183438 - RNA, 19 nt, Homo sapiens
  misc_RNA (1)...(19): siRNA sense strand
ggaugaagaugaagauggu

SEQ ID NO: 183439 - RNA, 19 nt, Homo sapiens
  misc_RNA (1)...(19): siRNA sense strand
caauagugauuucagaugu

SEQ ID NO: 183440 - RNA, 19 nt, Homo sapiens
  misc_RNA (1)...(19): siRNA sense strand
agaaacugguguuaguaua

SEQ ID NO: 183441 - RNA, 19 nt, Homo sapiens
  misc_RNA (1)...(19): siRNA sense strand
gcagagaagccuaaauauc

SEQ ID NO: 183442 - RNA, 19 nt, Homo sapiens
  misc_RNA (1)...(19): siRNA sense strand
caaggaaggcuuagaggaa

SEQ ID NO: 183443 - RNA, 19 nt, Homo sapiens
  misc_RNA (1)...(19): siRNA sense strand
caagauaguuuggcagcaa

SEQ ID NO: 183444 - RNA, 19 nt, Homo sapiens
  misc_RNA (1)...(19): siRNA sense strand
gcaagccauauauuuguua

SEQ ID NO: 183445 - RNA, 19 nt, Homo sapiens
  misc_RNA (1)...(19): siRNA sense strand
ggaagaagaaaguucaaau

SEQ ID NO: 183446 - RNA, 19 nt, Homo sapiens
  misc_RNA (1)...(19): siRNA sense strand
uggaagaaguuacaguuga

SEQ ID NO: 183447 - RNA, 19 nt, Homo sapiens
  misc_RNA (1)...(19): siRNA sense strand
gagcugcgcuuaccacacu

SEQ ID NO: 183448 - RNA, 19 nt, Homo sapiens
  misc_RNA (1)...(19): siRNA sense strand
cuacacugaucaagaacua

SEQ ID NO: 183449 - RNA, 19 nt, Homo sapiens
  misc_RNA (1)...(19): siRNA sense strand
aaacaaacaccuucucuuc

SEQ ID NO: 183450 - RNA, 19 nt, Homo sapiens
  misc_RNA (1)...(19): siRNA sense strand
gaaguuacaguugaaagaa

SEQ ID NO: 183451 - RNA, 19 nt, Homo sapiens
  misc_RNA (1)...(19): siRNA sense strand
gaguuucaauggauaaugu

SEQ ID NO: 183452 - RNA, 19 nt, Homo sapiens
  misc_RNA (1)...(19): siRNA sense strand
caagaaggauguaaaugac

SEQ ID NO: 183453 - RNA, 19 nt, Homo sapiens
  misc_RNA (1)...(19): siRNA sense strand
gauaaaugguacugugaca

SEQ ID NO: 183454 - RNA, 19 nt, Homo sapiens
  misc_RNA (1)...(19): siRNA sense strand
agaggaagauccagcaaug

SEQ ID NO: 183455 - RNA, 19 nt, Homo sapiens
  misc_RNA (1)...(19): siRNA sense strand
gcagaaccauguuuugaaa

SEQ ID NO: 183456 - RNA, 19 nt, Homo sapiens
  misc_RNA (1)...(19): siRNA sense strand
gcaagagaagaaccagaua

SEQ ID NO: 183457 - RNA, 19 nt, Homo sapiens
  misc_RNA (1)...(19): siRNA sense strand
caaaguuuccagcuuauga

SEQ ID NO: 183458 - RNA, 19 nt, Homo sapiens
  misc_RNA (1)...(19): siRNA sense strand
gaggcaucaucccuaauaa

SEQ ID NO: 183459 - RNA, 19 nt, Homo sapiens
  misc_RNA (1)...(19): siRNA sense strand
cgaggcaucaucccuaaua

SEQ ID NO: 183460 - RNA, 19 nt, Homo sapiens
  misc_RNA (1)...(19): siRNA sense strand
ggaaacgucaauagugauu

SEQ ID NO: 183461 - RNA, 19 nt, Homo sapiens
  misc_RNA (1)...(19): siRNA sense strand
gaaacaaacaccuucucuu

SEQ ID NO: 183462 - RNA, 19 nt, Homo sapiens
  misc_RNA (1)...(19): siRNA sense strand
caaagacauugauagaaag

SEQ ID NO: 183463 - RNA, 19 nt, Homo sapiens
  misc_RNA (1)...(19): siRNA sense strand
agaauauggucuucgauug

SEQ ID NO: 183464 - RNA, 19 nt, Homo sapiens
  misc_RNA (1)...(19): siRNA sense strand
aaacacugcugaguccuuu

SEQ ID NO: 183465 - RNA, 19 nt, Homo sapiens
  misc_RNA (1)...(19): siRNA sense strand
aagaacaguggucauauua

SEQ ID NO: 183466 - RNA, 19 nt, Homo sapiens
  misc_RNA (1)...(19): siRNA sense strand
agccuaaucugaccuauga

SEQ ID NO: 183467 - RNA, 19 nt, Homo sapiens
  misc_RNA (1)...(19): siRNA sense strand
aaacauauccuccuuacuc

SEQ ID NO: 183468 - RNA, 19 nt, Homo sapiens
  misc_RNA (1)...(19): siRNA sense strand
gaaggacagcuacaggaaa

SEQ ID NO: 183469 - RNA, 19 nt, Homo sapiens
  misc_RNA (1)...(19): siRNA sense strand
ggaggaaacagcuauaugg

SEQ ID NO: 183470 - RNA, 19 nt, Homo sapiens
  misc_RNA (1)...(19): siRNA sense strand
gaaaaggaaucucccuaug

SEQ ID NO: 183471 - RNA, 19 nt, Homo sapiens
  misc_RNA (1)...(19): siRNA sense strand
gaacccauuuugaauauga

SEQ ID NO: 183472 - RNA, 19 nt, Homo sapiens
  misc_RNA (1)...(19): siRNA sense strand
agcaagagauggcaauauu

SEQ ID NO: 183473 - RNA, 19 nt, Homo sapiens
  misc_RNA (1)...(19): siRNA sense strand
gaaggagugagaagauuug

SEQ ID NO: 183474 - RNA, 19 nt, Homo sapiens
  misc_RNA (1)...(19): siRNA sense strand
ggacuccucuggaaugcau

SEQ ID NO: 183475 - RNA, 19 nt, Homo sapiens
  misc_RNA (1)...(19): siRNA sense strand
gaugaaacucuuaaugaug

SEQ ID NO: 183476 - RNA, 19 nt, Homo sapiens
  misc_RNA (1)...(19): siRNA sense strand
gaucaagaacuagaugaaa

SEQ ID NO: 183477 - RNA, 19 nt, Homo sapiens
  misc_RNA (1)...(19): siRNA sense strand
gguagugaauacucaaugu

SEQ ID NO: 183478 - RNA, 19 nt, Homo sapiens
  misc_RNA (1)...(19): siRNA sense strand
gacgagauaauccucauuu

SEQ ID NO: 183479 - RNA, 19 nt, Homo sapiens
  misc_RNA (1)...(19): siRNA sense strand
gaguugagcaggaaaucua

SEQ ID NO: 183480 - RNA, 19 nt, Homo sapiens
  misc_RNA (1)...(19): siRNA sense strand
gaaaggaaaugacuaauga

SEQ ID NO: 183481 - RNA, 19 nt, Homo sapiens
  misc_RNA (1)...(19): siRNA sense strand
gaagaaggcuguucagaga

SEQ ID NO: 183482 - RNA, 19 nt, Homo sapiens
  misc_RNA (1)...(19): siRNA sense strand
ggaaguagcuacguucuuu

SEQ ID NO: 183483 - RNA, 19 nt, Homo sapiens
  misc_RNA (1)...(19): siRNA sense strand
gaacagaaguggaaauggu

SEQ ID NO: 183484 - RNA, 19 nt, Homo sapiens
  misc_RNA (1)...(19): siRNA sense strand
ggacauaaguggaaagaag

SEQ ID NO: 183485 - RNA, 19 nt, Homo sapiens
  misc_RNA (1)...(19): siRNA sense strand
acauaaagguccaguauuu

SEQ ID NO: 183486 - RNA, 19 nt, Homo sapiens
  misc_RNA (1)...(19): siRNA sense strand
ggaaagaaguccggcauga

SEQ ID NO: 183487 - RNA, 19 nt, Homo sapiens
  misc_RNA (1)...(19): siRNA sense strand
gaacauaaagguccaguau

SEQ ID NO: 183488 - RNA, 19 nt, Homo sapiens
  misc_RNA (1)...(19): siRNA sense strand
ggaugaugcugauuauaaa

SEQ ID NO: 183489 - RNA, 19 nt, Homo sapiens
  misc_RNA (1)...(19): siRNA sense strand
gagaaggacuggcagaaau

SEQ ID NO: 183490 - RNA, 19 nt, Homo sapiens
  misc_RNA (1)...(19): siRNA sense strand
ggaaaugacuaaugaagag

SEQ ID NO: 183491 - RNA, 19 nt, Homo sapiens
  misc_RNA (1)...(19): siRNA sense strand
gaagagcgcuauccugaag

SEQ ID NO: 183492 - RNA, 19 nt, Homo sapiens
  misc_RNA (1)...(19): siRNA sense strand
ggaaacagaugagcaagga

SEQ ID NO: 183493 - RNA, 19 nt, Homo sapiens
  misc_RNA (1)...(19): siRNA sense strand
caaucgagcuguugcaauu

SEQ ID NO: 183494 - RNA, 19 nt, Homo sapiens
  misc_RNA (1)...(19): siRNA sense strand
caaggucccuguugagaaa

SEQ ID NO: 183495 - RNA, 19 nt, Homo sapiens
  misc_RNA (1)...(19): siRNA sense strand
gaaaauggcuucucuaguc

SEQ ID NO: 183496 - RNA, 19 nt, Homo sapiens
  misc_RNA (1)...(19): siRNA sense strand
ggagaaaggaaaugacuaa

SEQ ID NO: 183497 - RNA, 19 nt, Homo sapiens
  misc_RNA (1)...(19): siRNA sense strand
agaagaggaugguaaauug

SEQ ID NO: 183498 - RNA, 19 nt, Homo sapiens
  misc_RNA (1)...(19): siRNA sense strand
ggaaggacuccaucagaua

SEQ ID NO: 183499 - RNA, 19 nt, Homo sapiens
  misc_RNA (1)...(19): siRNA sense strand
uagcaaagaugccaagguu

SEQ ID NO: 183500 - RNA, 19 nt, Homo sapiens
  misc_RNA (1)...(19): siRNA sense strand
cauccaagguuccauuaaa

SEQ ID NO: 183501 - RNA, 19 nt, Homo sapiens
  misc_RNA (1)...(19): siRNA sense strand
gaaccuccaaacucaauua

SEQ ID NO: 183502 - RNA, 19 nt, Homo sapiens
  misc_RNA (1)...(19): siRNA sense strand
ccaaggaaauauuuaggaa

SEQ ID NO: 183503 - RNA, 19 nt, Homo sapiens
  misc_RNA (1)...(19): siRNA sense strand
gaauaagcaucuucaggau

SEQ ID NO: 183504 - RNA, 19 nt, Homo sapiens
  misc_RNA (1)...(19): siRNA sense strand
gaaagaagaggaacagaag

SEQ ID NO: 183505 - RNA, 19 nt, Homo sapiens
  misc_RNA (1)...(19): siRNA sense strand
gcacaaagaacacaagaag

SEQ ID NO: 183506 - RNA, 19 nt, Homo sapiens
  misc_RNA (1)...(19): siRNA sense strand
aaagaaguccggcaugaua

SEQ ID NO: 183507 - RNA, 19 nt, Homo sapiens
  misc_RNA (1)...(19): siRNA sense strand
ccacaacgauucccagauc

SEQ ID NO: 183508 - RNA, 19 nt, Homo sapiens
  misc_RNA (1)...(19): siRNA sense strand
ggagaagaccaaacacaaa

SEQ ID NO: 183509 - RNA, 19 nt, Homo sapiens
  misc_RNA (1)...(19): siRNA sense strand
uagcaacagugaacauaaa

SEQ ID NO: 183510 - RNA, 19 nt, Homo sapiens
  misc_RNA (1)...(19): siRNA sense strand
gauagagccuccuggacuu

SEQ ID NO: 183511 - RNA, 19 nt, Homo sapiens
  misc_RNA (1)...(19): siRNA sense strand
agacaaacauaaagacaga

SEQ ID NO: 183512 - RNA, 19 nt, Homo sapiens
  misc_RNA (1)...(19): siRNA sense strand
caccacaaauuaaagauga

SEQ ID NO: 183513 - RNA, 19 nt, Homo sapiens
  misc_RNA (1)...(19): siRNA sense strand
ugacauggcugaugaagac

SEQ ID NO: 183514 - RNA, 19 nt, Homo sapiens
  misc_RNA (1)...(19): siRNA sense strand
gggaaggacuccaucagau

SEQ ID NO: 183515 - RNA, 19 nt, Homo sapiens
  misc_RNA (1)...(19): siRNA sense strand
guaguagagucaaagaaga

SEQ ID NO: 183516 - RNA, 19 nt, Homo sapiens
  misc_RNA (1)...(19): siRNA sense strand
gaaccuacaacuauuuaug

SEQ ID NO: 183517 - RNA, 19 nt, Homo sapiens
  misc_RNA (1)...(19): siRNA sense strand
cagagaaugucaaguuuua

SEQ ID NO: 183518 - RNA, 19 nt, Homo sapiens
  misc_RNA (1)...(19): siRNA sense strand
aaacagaagauaccaagaa

SEQ ID NO: 183519 - RNA, 19 nt, Homo sapiens
  misc_RNA (1)...(19): siRNA sense strand
acaaagagaggauugcuaa

SEQ ID NO: 183520 - RNA, 19 nt, Homo sapiens
  misc_RNA (1)...(19): siRNA sense strand
gauuuccgauugaaugauu

SEQ ID NO: 183521 - RNA, 19 nt, Homo sapiens
  misc_RNA (1)...(19): siRNA sense strand
gagaacaccggcacaaaga

SEQ ID NO: 183522 - RNA, 19 nt, Homo sapiens
  misc_RNA (1)...(19): siRNA sense strand
gaagaggaugguaaauuga

SEQ ID NO: 183523 - RNA, 19 nt, Homo sapiens
  misc_RNA (1)...(19): siRNA sense strand
gaacuugcaaacuaagauu

SEQ ID NO: 183524 - RNA, 19 nt, Homo sapiens
  misc_RNA (1)...(19): siRNA sense strand
gaggauauaaagccauuaa

SEQ ID NO: 183525 - RNA, 19 nt, Homo sapiens
  misc_RNA (1)...(19): siRNA sense strand
ugaugaacuugcaaacuaa

SEQ ID NO: 183526 - RNA, 19 nt, Homo sapiens
  misc_RNA (1)...(19): siRNA sense strand
aaagagaccucgagaugag

SEQ ID NO: 183527 - RNA, 19 nt, Homo sapiens
  misc_RNA (1)...(19): siRNA sense strand
gaagagaaacugaaaauca

SEQ ID NO: 183528 - RNA, 19 nt, Homo sapiens
  misc_RNA (1)...(19): siRNA sense strand
augaugaacuugcaaacua

SEQ ID NO: 183529 - RNA, 19 nt, Homo sapiens
  misc_RNA (1)...(19): siRNA sense strand
ggaaauggugggaagaaga

SEQ ID NO: 183530 - RNA, 19 nt, Homo sapiens
  misc_RNA (1)...(19): siRNA sense strand
ugaugaagacuaugaguuu

SEQ ID NO: 183531 - RNA, 19 nt, Homo sapiens
  misc_RNA (1)...(19): siRNA sense strand
gaagaagguaguagaguca

SEQ ID NO: 183532 - RNA, 19 nt, Homo sapiens
  misc_RNA (1)...(19): siRNA sense strand
cgacaagcuugcucugaga

SEQ ID NO: 183533 - RNA, 19 nt, Homo sapiens
  misc_RNA (1)...(19): siRNA sense strand
gaauauacuaccaaggaaa

SEQ ID NO: 183534 - RNA, 19 nt, Homo sapiens
  misc_RNA (1)...(19): siRNA sense strand
gaaccaguaucgagaagac

SEQ ID NO: 183535 - RNA, 19 nt, Homo sapiens
  misc_RNA (1)...(19): siRNA sense strand
gaggauugcuaacuucaag

SEQ ID NO: 183536 - RNA, 19 nt, Homo sapiens
  misc_RNA (1)...(19): siRNA sense strand
caaggaagagaaacugaaa

SEQ ID NO: 183537 - RNA, 19 nt, Homo sapiens
  misc_RNA (1)...(19): siRNA sense strand
gauagacucaauacuggua

SEQ ID NO: 183538 - RNA, 19 nt, Homo sapiens
  misc_RNA (1)...(19): siRNA sense strand
acaaagaacacaagaagga

SEQ ID NO: 183539 - RNA, 19 nt, Homo sapiens
  misc_RNA (1)...(19): siRNA sense strand
ggaauaugugguagaguuu

SEQ ID NO: 183540 - RNA, 19 nt, Homo sapiens
  misc_RNA (1)...(19): siRNA sense strand
gcaaggaagagaaacugaa

SEQ ID NO: 183541 - RNA, 19 nt, Homo sapiens
  misc_RNA (1)...(19): siRNA sense strand
caaagaagaaggcuguuca

SEQ ID NO: 183542 - RNA, 19 nt, Homo sapiens
  misc_RNA (1)...(19): siRNA sense strand
uaagauugaugccaagaag

SEQ ID NO: 183543 - RNA, 19 nt, Homo sapiens
  misc_RNA (1)...(19): siRNA sense strand
aagaugaaccugaagauga

SEQ ID NO: 183544 - RNA, 19 nt, Homo sapiens
  misc_RNA (1)...(19): siRNA sense strand
ccuccaaacucaauuaucu

SEQ ID NO: 183545 - RNA, 19 nt, Homo sapiens
  misc_RNA (1)...(19): siRNA sense strand
acacaaagaucgagaacac

SEQ ID NO: 183546 - RNA, 19 nt, Homo sapiens
  misc_RNA (1)...(19): siRNA sense strand
aggaauaugugguagaguu

SEQ ID NO: 183547 - RNA, 19 nt, Homo sapiens
  misc_RNA (1)...(19): siRNA sense strand
guagcuacguucuuugcaa

SEQ ID NO: 183548 - RNA, 19 nt, Homo sapiens
  misc_RNA (1)...(19): siRNA sense strand
cagaagauaccaagaagga

SEQ ID NO: 183549 - RNA, 19 nt, Homo sapiens
  misc_RNA (1)...(19): siRNA sense strand
uuaaagagaccucgagaug

SEQ ID NO: 183550 - RNA, 19 nt, Homo sapiens
  misc_RNA (1)...(19): siRNA sense strand
ggauauaaagccauuaaag

SEQ ID NO: 183551 - RNA, 19 nt, Homo sapiens
  misc_RNA (1)...(19): siRNA sense strand
ucuaguccaccacaaauua

SEQ ID NO: 183552 - RNA, 19 nt, Homo sapiens
  misc_RNA (1)...(19): siRNA sense strand
cagaugagccaguauuuca

SEQ ID NO: 183553 - RNA, 19 nt, Homo sapiens
  misc_RNA (1)...(19): siRNA sense strand
ugaauauacuaccaaggaa

SEQ ID NO: 183554 - RNA, 19 nt, Homo sapiens
  misc_RNA (1)...(19): siRNA sense strand
gaaaagaaacacaaagaga

SEQ ID NO: 183555 - RNA, 19 nt, Homo sapiens
  misc_RNA (1)...(19): siRNA sense strand
gaugauggcuauuuuguuc

SEQ ID NO: 183556 - RNA, 19 nt, Homo sapiens
  misc_RNA (1)...(19): siRNA sense strand
uuugagaagucuaugauga

SEQ ID NO: 183557 - RNA, 19 nt, Homo sapiens
  misc_RNA (1)...(19): siRNA sense strand
aagagaggauugcuaacuu

SEQ ID NO: 183558 - RNA, 19 nt, Homo sapiens
  misc_RNA (1)...(19): siRNA sense strand
gaugagccaguauuucaaa

SEQ ID NO: 183559 - RNA, 19 nt, Homo sapiens
  misc_RNA (1)...(19): siRNA sense strand
uaaagagaccucgagauga

SEQ ID NO: 183560 - RNA, 19 nt, Homo sapiens
  misc_RNA (1)...(19): siRNA sense strand
caacagugaacauaaagau

SEQ ID NO: 183561 - RNA, 19 nt, Homo sapiens
  misc_RNA (1)...(19): siRNA sense strand
gaacaucccagcgaagauc

SEQ ID NO: 183562 - RNA, 19 nt, Homo sapiens
  misc_RNA (1)...(19): siRNA sense strand
acaagcagcccgaggauga

SEQ ID NO: 183563 - RNA, 19 nt, Homo sapiens
  misc_RNA (1)...(19): siRNA sense strand
caucaacuguagcaaagau

SEQ ID NO: 183564 - RNA, 19 nt, Homo sapiens
  misc_RNA (1)...(19): siRNA sense strand
uagcuacguucuuugcaaa

SEQ ID NO: 183565 - RNA, 19 nt, Homo sapiens
  misc_RNA (1)...(19): siRNA sense strand
cagaggaaguagcuacguu

SEQ ID NO: 183566 - RNA, 19 nt, Homo sapiens
  misc_RNA (1)...(19): siRNA sense strand
ugaggaugaugcugauuau

SEQ ID NO: 183567 - RNA, 19 nt, Homo sapiens
  misc_RNA (1)...(19): siRNA sense strand
aaagauggaagcucagaaa

SEQ ID NO: 183568 - RNA, 19 nt, Homo sapiens
  misc_RNA (1)...(19): siRNA sense strand
gagaacaucccagcgaaga

SEQ ID NO: 183569 - RNA, 19 nt, Homo sapiens
  misc_RNA (1)...(19): siRNA sense strand
gagaagaccaaacacaaag

SEQ ID NO: 183570 - RNA, 19 nt, Homo sapiens
  misc_RNA (1)...(19): siRNA sense strand
agaguuggauggucaggaa

SEQ ID NO: 183571 - RNA, 19 nt, Homo sapiens
  misc_RNA (1)...(19): siRNA sense strand
gaaagaaguccggcaugau

SEQ ID NO: 183572 - RNA, 19 nt, Homo sapiens
  misc_RNA (1)...(19): siRNA sense strand
ucaccaaccuaagcaaaug

SEQ ID NO: 183573 - RNA, 19 nt, Homo sapiens
  misc_RNA (1)...(19): siRNA sense strand
aaaagaagccgaagaaaga

SEQ ID NO: 183574 - RNA, 19 nt, Homo sapiens
  misc_RNA (1)...(19): siRNA sense strand
aggaugaugcugauuauaa

SEQ ID NO: 183575 - RNA, 19 nt, Homo sapiens
  misc_RNA (1)...(19): siRNA sense strand
gaugagcaaggaagagaaa

SEQ ID NO: 183576 - RNA, 19 nt, Homo sapiens
  misc_RNA (1)...(19): siRNA sense strand
gaaggaacagcuagcagau

SEQ ID NO: 183577 - RNA, 19 nt, Homo sapiens
  misc_RNA (1)...(19): siRNA sense strand
gaacaagcagcccgaggau

SEQ ID NO: 183578 - RNA, 19 nt, Homo sapiens
  misc_RNA (1)...(19): siRNA sense strand
caucagauacuauaacaag

SEQ ID NO: 183579 - RNA, 19 nt, Homo sapiens
  misc_RNA (1)...(19): siRNA sense strand
gaaucaagggugagaagga

SEQ ID NO: 183580 - RNA, 19 nt, Homo sapiens
  misc_RNA (1)...(19): siRNA sense strand
gggagcagcaccucuacua

SEQ ID NO: 183581 - RNA, 19 nt, Homo sapiens
  misc_RNA (1)...(19): siRNA sense strand
gauacuggaugcacuucug

SEQ ID NO: 183582 - RNA, 19 nt, Homo sapiens
  misc_RNA (1)...(19): siRNA sense strand
caaccggccuggcaucuac

SEQ ID NO: 183583 - RNA, 19 nt, Homo sapiens
  misc_RNA (1)...(19): siRNA sense strand
gaccggacgucaaggaucu

SEQ ID NO: 183584 - RNA, 19 nt, Homo sapiens
  misc_RNA (1)...(19): siRNA sense strand
ggacuggauccaccacuau

SEQ ID NO: 183585 - RNA, 19 nt, Homo sapiens
  misc_RNA (1)...(19): siRNA sense strand
gaggagcccgugaacaucu

SEQ ID NO: 183586 - RNA, 19 nt, Homo sapiens
  misc_RNA (1)...(19): siRNA sense strand
ugagaguccgcgaccgaua

SEQ ID NO: 183587 - RNA, 19 nt, Homo sapiens
  misc_RNA (1)...(19): siRNA sense strand
cacccacaguucuacauca

SEQ ID NO: 183588 - RNA, 19 nt, Homo sapiens
  misc_RNA (1)...(19): siRNA sense strand
ggaggagcccgugaacauc

SEQ ID NO: 183589 - RNA, 19 nt, Homo sapiens
  misc_RNA (1)...(19): siRNA sense strand
uggaggagcccgugaacau

SEQ ID NO: 183590 - RNA, 19 nt, Homo sapiens
  misc_RNA (1)...(19): siRNA sense strand
gcacccacaguucuacauc

SEQ ID NO: 183591 - RNA, 19 nt, Homo sapiens
  misc_RNA (1)...(19): siRNA sense strand
gagaguccgcgaccgauac

SEQ ID NO: 183592 - RNA, 19 nt, Homo sapiens
  misc_RNA (1)...(19): siRNA sense strand
caucgugcacccacaguuc

SEQ ID NO: 183593 - RNA, 19 nt, Homo sapiens
  misc_RNA (1)...(19): siRNA sense strand
gaacauggcaucaaguuua

SEQ ID NO: 183594 - RNA, 19 nt, Homo sapiens
  misc_RNA (1)...(19): siRNA sense strand
gauagaagcuguacagaau

SEQ ID NO: 183595 - RNA, 19 nt, Homo sapiens
  misc_RNA (1)...(19): siRNA sense strand
gcaagacucucgaaauuau

SEQ ID NO: 183596 - RNA, 19 nt, Homo sapiens
  misc_RNA (1)...(19): siRNA sense strand
gaacggcccugaagaucuu

SEQ ID NO: 183597 - RNA, 19 nt, Homo sapiens
  misc_RNA (1)...(19): siRNA sense strand
ggaaaucauugaaggagaa

SEQ ID NO: 183598 - RNA, 19 nt, Homo sapiens
  misc_RNA (1)...(19): siRNA sense strand
ggagaaagcuguggagaag

SEQ ID NO: 183599 - RNA, 19 nt, Homo sapiens
  misc_RNA (1)...(19): siRNA sense strand
gggcaucccuggugacaaa

SEQ ID NO: 183600 - RNA, 19 nt, Homo sapiens
  misc_RNA (1)...(19): siRNA sense strand
ggauuaaggcaacaaauaa

SEQ ID NO: 183601 - RNA, 19 nt, Homo sapiens
  misc_RNA (1)...(19): siRNA sense strand
ggagugcgcuggauuucuu

SEQ ID NO: 183602 - RNA, 19 nt, Homo sapiens
  misc_RNA (1)...(19): siRNA sense strand
ggaagaacauggcaucaag

SEQ ID NO: 183603 - RNA, 19 nt, Homo sapiens
  misc_RNA (1)...(19): siRNA sense strand
cacauuggcucuuugaauu

SEQ ID NO: 183604 - RNA, 19 nt, Homo sapiens
  misc_RNA (1)...(19): siRNA sense strand
gucaagagauaacaacaaa

SEQ ID NO: 183605 - RNA, 19 nt, Homo sapiens
  misc_RNA (1)...(19): siRNA sense strand
gcagagguauucacaacau

SEQ ID NO: 183606 - RNA, 19 nt, Homo sapiens
  misc_RNA (1)...(19): siRNA sense strand
cugcaagacucucgaaauu

SEQ ID NO: 183607 - RNA, 19 nt, Homo sapiens
  misc_RNA (1)...(19): siRNA sense strand
caagagauaacaacaaaug

SEQ ID NO: 183608 - RNA, 19 nt, Homo sapiens
  misc_RNA (1)...(19): siRNA sense strand
ugaaagaccacguuacuug

SEQ ID NO: 183609 - RNA, 19 nt, Homo sapiens
  misc_RNA (1)...(19): siRNA sense strand
agaaagcuguggagaaguu

SEQ ID NO: 183610 - RNA, 19 nt, Homo sapiens
  misc_RNA (1)...(19): siRNA sense strand
ggaggaacaugugugaaug

SEQ ID NO: 183611 - RNA, 19 nt, Homo sapiens
  misc_RNA (1)...(19): siRNA sense strand
uaaagacaaugaacguguu

SEQ ID NO: 183612 - RNA, 19 nt, Homo sapiens
  misc_RNA (1)...(19): siRNA sense strand
guagcucaguccaccaaua

SEQ ID NO: 183613 - RNA, 19 nt, Homo sapiens
  misc_RNA (1)...(19): siRNA sense strand
agacaguucguaccaauua

SEQ ID NO: 183614 - RNA, 19 nt, Homo sapiens
  misc_RNA (1)...(19): siRNA sense strand
ggacauggccaacaaaauu

SEQ ID NO: 183615 - RNA, 19 nt, Homo sapiens
  misc_RNA (1)...(19): siRNA sense strand
gacaaagaauacugcauca

SEQ ID NO: 183616 - RNA, 19 nt, Homo sapiens
  misc_RNA (1)...(19): siRNA sense strand
gcaucaaguuuauaagaca

SEQ ID NO: 183617 - RNA, 19 nt, Homo sapiens
  misc_RNA (1)...(19): siRNA sense strand
gguaagacccugguuguug

SEQ ID NO: 183618 - RNA, 19 nt, Homo sapiens
  misc_RNA (1)...(19): siRNA sense strand
ggcgauauauuggaggaua

SEQ ID NO: 183619 - RNA, 19 nt, Homo sapiens
  misc_RNA (1)...(19): siRNA sense strand
uaagacaguucguaccaau

SEQ ID NO: 183620 - RNA, 19 nt, Homo sapiens
  misc_RNA (1)...(19): siRNA sense strand
gcgauauauuggaggauaa

SEQ ID NO: 183621 - RNA, 19 nt, Homo sapiens
  misc_RNA (1)...(19): siRNA sense strand
gaaugcuuaugggcaauuu

SEQ ID NO: 183622 - RNA, 19 nt, Homo sapiens
  misc_RNA (1)...(19): siRNA sense strand
ggaagaaaauauugagguu

SEQ ID NO: 183623 - RNA, 19 nt, Homo sapiens
  misc_RNA (1)...(19): siRNA sense strand
uaaggaggcagcccaauau

SEQ ID NO: 183624 - RNA, 19 nt, Homo sapiens
  misc_RNA (1)...(19): siRNA sense strand
cuaaggaggcagcccaaua

SEQ ID NO: 183625 - RNA, 19 nt, Homo sapiens
  misc_RNA (1)...(19): siRNA sense strand
uagaagcuguacagaauca

SEQ ID NO: 183626 - RNA, 19 nt, Homo sapiens
  misc_RNA (1)...(19): siRNA sense strand
ccacuguauuuacuccuuu

SEQ ID NO: 183627 - RNA, 19 nt, Homo sapiens
  misc_RNA (1)...(19): siRNA sense strand
gacaguucguaccaauuaa

SEQ ID NO: 183628 - RNA, 19 nt, Homo sapiens
  misc_RNA (1)...(19): siRNA sense strand
agaaucacauuggcucuuu

SEQ ID NO: 183629 - RNA, 19 nt, Homo sapiens
  misc_RNA (1)...(19): siRNA sense strand
gaaagucgaggagacaguu

SEQ ID NO: 183630 - RNA, 19 nt, Homo sapiens
  misc_RNA (1)...(19): siRNA sense strand
gguuuaccauaguuacuuu

SEQ ID NO: 183631 - RNA, 19 nt, Homo sapiens
  misc_RNA (1)...(19): siRNA sense strand
ggacaagcccugcaagacu

SEQ ID NO: 183632 - RNA, 19 nt, Homo sapiens
  misc_RNA (1)...(19): siRNA sense strand
gaaucacauuggcucuuug

SEQ ID NO: 183633 - RNA, 19 nt, Homo sapiens
  misc_RNA (1)...(19): siRNA sense strand
ggacagcacaauuggaauc

SEQ ID NO: 183634 - RNA, 19 nt, Homo sapiens
  misc_RNA (1)...(19): siRNA sense strand
acgauuccgucaagagaua

SEQ ID NO: 183635 - RNA, 19 nt, Homo sapiens
  misc_RNA (1)...(19): siRNA sense strand
gugaacacauggaagaaca

SEQ ID NO: 183636 - RNA, 19 nt, Homo sapiens
  misc_RNA (1)...(19): siRNA sense strand
caaaauuggugaacacaug

SEQ ID NO: 183637 - RNA, 19 nt, Homo sapiens
  misc_RNA (1)...(19): siRNA sense strand
gaauguggguugcauaccu

SEQ ID NO: 183638 - RNA, 19 nt, Homo sapiens
  misc_RNA (1)...(19): siRNA sense strand
gcgcucaaauguggacuga

SEQ ID NO: 183639 - RNA, 19 nt, Homo sapiens
  misc_RNA (1)...(19): siRNA sense strand
gaaauuauggauggaaagu

SEQ ID NO: 183640 - RNA, 19 nt, Homo sapiens
  misc_RNA (1)...(19): siRNA sense strand
gagaauauaauacggugau

SEQ ID NO: 183641 - RNA, 19 nt, Homo sapiens
  misc_RNA (1)...(19): siRNA sense strand
guuagguccauucuucuua

SEQ ID NO: 183642 - RNA, 19 nt, Homo sapiens
  misc_RNA (1)...(19): siRNA sense strand
gaguagcucugcgggagaa

SEQ ID NO: 183643 - RNA, 19 nt, Homo sapiens
  misc_RNA (1)...(19): siRNA sense strand
gugcagagguauucacaac

SEQ ID NO: 183644 - RNA, 19 nt, Homo sapiens
  misc_RNA (1)...(19): siRNA sense strand
ccaaaugcuggagaaguua

SEQ ID NO: 183645 - RNA, 19 nt, Homo sapiens
  misc_RNA (1)...(19): siRNA sense strand
gaaguuacacaaggcuuug

SEQ ID NO: 183646 - RNA, 19 nt, Homo sapiens
  misc_RNA (1)...(19): siRNA sense strand
aggauuaaggcaacaaaua

SEQ ID NO: 183647 - RNA, 19 nt, Homo sapiens
  misc_RNA (1)...(19): siRNA sense strand
uguauuuacuccuuuggaa

SEQ ID NO: 183648 - RNA, 19 nt, Homo sapiens
  misc_RNA (1)...(19): siRNA sense strand
guuccaaccacuguauuua

SEQ ID NO: 183649 - RNA, 19 nt, Homo sapiens
  misc_RNA (1)...(19): siRNA sense strand
guucguaccaauuaaaguu

SEQ ID NO: 183650 - RNA, 19 nt, Homo sapiens
  misc_RNA (1)...(19): siRNA sense strand
cauggcaucaaguuuauaa

SEQ ID NO: 183651 - RNA, 19 nt, Homo sapiens
  misc_RNA (1)...(19): siRNA sense strand
cauccuaugucgcuuugga

SEQ ID NO: 183652 - RNA, 19 nt, Homo sapiens
  misc_RNA (1)...(19): siRNA sense strand
ggagacaguuaagcaugau

SEQ ID NO: 183653 - RNA, 19 nt, Homo sapiens
  misc_RNA (1)...(19): siRNA sense strand
caggcuggcugcugagguu

SEQ ID NO: 183654 - RNA, 19 nt, Homo sapiens
  misc_RNA (1)...(19): siRNA sense strand
auauugagguuuaccauag

SEQ ID NO: 183655 - RNA, 19 nt, Homo sapiens
  misc_RNA (1)...(19): siRNA sense strand
caauagugaggaaaucauu

SEQ ID NO: 183656 - RNA, 19 nt, Homo sapiens
  misc_RNA (1)...(19): siRNA sense strand
gagcauccuaugucgcuuu

SEQ ID NO: 183657 - RNA, 19 nt, Homo sapiens
  misc_RNA (1)...(19): siRNA sense strand
caacauugucugugaccaa

SEQ ID NO: 183658 - RNA, 19 nt, Homo sapiens
  misc_RNA (1)...(19): siRNA sense strand
ucgaaauuauggauggaaa

SEQ ID NO: 183659 - RNA, 19 nt, Homo sapiens
  misc_RNA (1)...(19): siRNA sense strand
cagagguauucacaacauu

SEQ ID NO: 183660 - RNA, 19 nt, Homo sapiens
  misc_RNA (1)...(19): siRNA sense strand
ucacauuggcucuuugaau

SEQ ID NO: 183661 - RNA, 19 nt, Homo sapiens
  misc_RNA (1)...(19): siRNA sense strand
ugauagaagcuguacagaa

SEQ ID NO: 183662 - RNA, 19 nt, Homo sapiens
  misc_RNA (1)...(19): siRNA sense strand
aggagacaguuaagcauga

SEQ ID NO: 183663 - RNA, 19 nt, Homo sapiens
  misc_RNA (1)...(19): siRNA sense strand
gaagaacauggcaucaagu

SEQ ID NO: 183664 - RNA, 19 nt, Homo sapiens
  misc_RNA (1)...(19): siRNA sense strand
cauugccacuggugaaaga

SEQ ID NO: 183665 - RNA, 19 nt, Homo sapiens
  misc_RNA (1)...(19): siRNA sense strand
gaugaagaacagaccaaug

SEQ ID NO: 183666 - RNA, 19 nt, Homo sapiens
  misc_RNA (1)...(19): siRNA sense strand
ugauugggacagaaugaua

SEQ ID NO: 183667 - RNA, 19 nt, Homo sapiens
  misc_RNA (1)...(19): siRNA sense strand
ugucacagaugaagaacag

SEQ ID NO: 183668 - RNA, 19 nt, Homo sapiens
  misc_RNA (1)...(19): siRNA sense strand
gcaauaggaagagaugcuu

SEQ ID NO: 183669 - RNA, 19 nt, Homo sapiens
  misc_RNA (1)...(19): siRNA sense strand
aacauggcaucaaguuuau

SEQ ID NO: 183670 - RNA, 19 nt, Homo sapiens
  misc_RNA (1)...(19): siRNA sense strand
ggugaaagaccacguuacu

SEQ ID NO: 183671 - RNA, 19 nt, Homo sapiens
  misc_RNA (1)...(19): siRNA sense strand
ugcaagacucucgaaauua

SEQ ID NO: 183672 - RNA, 19 nt, Homo sapiens
  misc_RNA (1)...(19): siRNA sense strand
gugaugaucuuuucuccuu

SEQ ID NO: 183673 - RNA, 19 nt, Homo sapiens
  misc_RNA (1)...(19): siRNA sense strand
gaaagcuguggagaaguuu

SEQ ID NO: 183674 - RNA, 19 nt, Homo sapiens
  misc_RNA (1)...(19): siRNA sense strand
ggcaucaaguuuauaagac

SEQ ID NO: 183675 - RNA, 19 nt, Homo sapiens
  misc_RNA (1)...(19): siRNA sense strand
aauguggguugcauaccua

SEQ ID NO: 183676 - RNA, 19 nt, Homo sapiens
  misc_RNA (1)...(19): siRNA sense strand
caucccuggugacaaagaa

SEQ ID NO: 183677 - RNA, 19 nt, Homo sapiens
  misc_RNA (1)...(19): siRNA sense strand
gggugaagauaaaugaaaa

SEQ ID NO: 183678 - RNA, 19 nt, Homo sapiens
  misc_RNA (1)...(19): siRNA sense strand
gaauuggggcuaccgagua

SEQ ID NO: 183679 - RNA, 19 nt, Homo sapiens
  misc_RNA (1)...(19): siRNA sense strand
ggaagagaugcuugcacaa

SEQ ID NO: 183680 - RNA, 19 nt, Homo sapiens
  misc_RNA (1)...(19): siRNA sense strand
gcucaguccaccaauagug

SEQ ID NO: 183681 - RNA, 19 nt, Homo sapiens
  misc_RNA (1)...(19): siRNA sense strand
gagaaugcuuaugggcaau

SEQ ID NO: 183682 - RNA, 19 nt, Homo sapiens
  misc_RNA (1)...(19): siRNA sense strand
uggcaucaaguuuauaaga

SEQ ID NO: 183683 - RNA, 19 nt, Homo sapiens
  misc_RNA (1)...(19): siRNA sense strand
ccaccaauagugaggaaau

SEQ ID NO: 183684 - RNA, 19 nt, Homo sapiens
  misc_RNA (1)...(19): siRNA sense strand
ggacagaaugauagaagcu

SEQ ID NO: 183685 - RNA, 19 nt, Homo sapiens
  misc_RNA (1)...(19): siRNA sense strand
agaaguuacacaaggcuuu

SEQ ID NO: 183686 - RNA, 19 nt, Homo sapiens
  misc_RNA (1)...(19): siRNA sense strand
gaucuucccaaguccuaug

SEQ ID NO: 183687 - RNA, 19 nt, Homo sapiens
  misc_RNA (1)...(19): siRNA sense strand
cggaggaacaugugugaau

SEQ ID NO: 183688 - RNA, 19 nt, Homo sapiens
  misc_RNA (1)...(19): siRNA sense strand
gaagcuguacagaaucaca

SEQ ID NO: 183689 - RNA, 19 nt, Homo sapiens
  misc_RNA (1)...(19): siRNA sense strand
cagaaugauagaagcugua

SEQ ID NO: 183690 - RNA, 19 nt, Homo sapiens
  misc_RNA (1)...(19): siRNA sense strand
uuagguccauucuucuuag

SEQ ID NO: 183691 - RNA, 19 nt, Homo sapiens
  misc_RNA (1)...(19): siRNA sense strand
gaugcuggcaauaggaaga

SEQ ID NO: 183692 - RNA, 19 nt, Homo sapiens
  misc_RNA (1)...(19): siRNA sense strand
aagaacauggcaucaaguu

SEQ ID NO: 183693 - RNA, 19 nt, Homo sapiens
  misc_RNA (1)...(19): siRNA sense strand
gaacauggcaucaaguuua

SEQ ID NO: 183694 - RNA, 19 nt, Homo sapiens
  misc_RNA (1)...(19): siRNA sense strand
gauagaagcuguacagaau

SEQ ID NO: 183695 - RNA, 19 nt, Homo sapiens
  misc_RNA (1)...(19): siRNA sense strand
gcaagacucucgaaauuau

SEQ ID NO: 183696 - RNA, 19 nt, Homo sapiens
  misc_RNA (1)...(19): siRNA sense strand
gaacggcccugaagaucuu

SEQ ID NO: 183697 - RNA, 19 nt, Homo sapiens
  misc_RNA (1)...(19): siRNA sense strand
ggaaaucauugaaggagaa

SEQ ID NO: 183698 - RNA, 19 nt, Homo sapiens
  misc_RNA (1)...(19): siRNA sense strand
ggagaaagcuguggagaag

SEQ ID NO: 183699 - RNA, 19 nt, Homo sapiens
  misc_RNA (1)...(19): siRNA sense strand
gggcaucccuggugacaaa

SEQ ID NO: 183700 - RNA, 19 nt, Homo sapiens
  misc_RNA (1)...(19): siRNA sense strand
ggauuaaggcaacaaauaa

SEQ ID NO: 183701 - RNA, 19 nt, Homo sapiens
  misc_RNA (1)...(19): siRNA sense strand
ggagugcgcuggauuucuu

SEQ ID NO: 183702 - RNA, 19 nt, Homo sapiens
  misc_RNA (1)...(19): siRNA sense strand
ggaagaacauggcaucaag

SEQ ID NO: 183703 - RNA, 19 nt, Homo sapiens
  misc_RNA (1)...(19): siRNA sense strand
cacauuggcucuuugaauu

SEQ ID NO: 183704 - RNA, 19 nt, Homo sapiens
  misc_RNA (1)...(19): siRNA sense strand
gucaagagauaacaacaaa

SEQ ID NO: 183705 - RNA, 19 nt, Homo sapiens
  misc_RNA (1)...(19): siRNA sense strand
gcagagguauucacaacau

SEQ ID NO: 183706 - RNA, 19 nt, Homo sapiens
  misc_RNA (1)...(19): siRNA sense strand
cugcaagacucucgaaauu

SEQ ID NO: 183707 - RNA, 19 nt, Homo sapiens
  misc_RNA (1)...(19): siRNA sense strand
caagagauaacaacaaaug

SEQ ID NO: 183708 - RNA, 19 nt, Homo sapiens
  misc_RNA (1)...(19): siRNA sense strand
ugaaagaccacguuacuug

SEQ ID NO: 183709 - RNA, 19 nt, Homo sapiens
  misc_RNA (1)...(19): siRNA sense strand
agaaagcuguggagaaguu

SEQ ID NO: 183710 - RNA, 19 nt, Homo sapiens
  misc_RNA (1)...(19): siRNA sense strand
ggaggaacaugugugaaug

SEQ ID NO: 183711 - RNA, 19 nt, Homo sapiens
  misc_RNA (1)...(19): siRNA sense strand
uaaagacaaugaacguguu

SEQ ID NO: 183712 - RNA, 19 nt, Homo sapiens
  misc_RNA (1)...(19): siRNA sense strand
guagcucaguccaccaaua

SEQ ID NO: 183713 - RNA, 19 nt, Homo sapiens
  misc_RNA (1)...(19): siRNA sense strand
agacaguucguaccaauua

SEQ ID NO: 183714 - RNA, 19 nt, Homo sapiens
  misc_RNA (1)...(19): siRNA sense strand
ggacauggccaacaaaauu

SEQ ID NO: 183715 - RNA, 19 nt, Homo sapiens
  misc_RNA (1)...(19): siRNA sense strand
gacaaagaauacugcauca

SEQ ID NO: 183716 - RNA, 19 nt, Homo sapiens
  misc_RNA (1)...(19): siRNA sense strand
gcaucaaguuuauaagaca

SEQ ID NO: 183717 - RNA, 19 nt, Homo sapiens
  misc_RNA (1)...(19): siRNA sense strand
gguaagacccugguuguug

SEQ ID NO: 183718 - RNA, 19 nt, Homo sapiens
  misc_RNA (1)...(19): siRNA sense strand
ggcgauauauuggaggaua

SEQ ID NO: 183719 - RNA, 19 nt, Homo sapiens
  misc_RNA (1)...(19): siRNA sense strand
uaagacaguucguaccaau

SEQ ID NO: 183720 - RNA, 19 nt, Homo sapiens
  misc_RNA (1)...(19): siRNA sense strand
gcgauauauuggaggauaa

SEQ ID NO: 183721 - RNA, 19 nt, Homo sapiens
  misc_RNA (1)...(19): siRNA sense strand
gaaugcuuaugggcaauuu

SEQ ID NO: 183722 - RNA, 19 nt, Homo sapiens
  misc_RNA (1)...(19): siRNA sense strand
ggaagaaaauauugagguu

SEQ ID NO: 183723 - RNA, 19 nt, Homo sapiens
  misc_RNA (1)...(19): siRNA sense strand
uaaggaggcagcccaauau

SEQ ID NO: 183724 - RNA, 19 nt, Homo sapiens
  misc_RNA (1)...(19): siRNA sense strand
cuaaggaggcagcccaaua

SEQ ID NO: 183725 - RNA, 19 nt, Homo sapiens
  misc_RNA (1)...(19): siRNA sense strand
uagaagcuguacagaauca

SEQ ID NO: 183726 - RNA, 19 nt, Homo sapiens
  misc_RNA (1)...(19): siRNA sense strand
ccacuguauuuacuccuuu

SEQ ID NO: 183727 - RNA, 19 nt, Homo sapiens
  misc_RNA (1)...(19): siRNA sense strand
gacaguucguaccaauuaa

SEQ ID NO: 183728 - RNA, 19 nt, Homo sapiens
  misc_RNA (1)...(19): siRNA sense strand
agaaucacauuggcucuuu

SEQ ID NO: 183729 - RNA, 19 nt, Homo sapiens
  misc_RNA (1)...(19): siRNA sense strand
gaaagucgaggagacaguu

SEQ ID NO: 183730 - RNA, 19 nt, Homo sapiens
  misc_RNA (1)...(19): siRNA sense strand
gguuuaccauaguuacuuu

SEQ ID NO: 183731 - RNA, 19 nt, Homo sapiens
  misc_RNA (1)...(19): siRNA sense strand
ggacaagcccugcaagacu

SEQ ID NO: 183732 - RNA, 19 nt, Homo sapiens
  misc_RNA (1)...(19): siRNA sense strand
gaaucacauuggcucuuug

SEQ ID NO: 183733 - RNA, 19 nt, Homo sapiens
  misc_RNA (1)...(19): siRNA sense strand
ggacagcacaauuggaauc

SEQ ID NO: 183734 - RNA, 19 nt, Homo sapiens
  misc_RNA (1)...(19): siRNA sense strand
acgauuccgucaagagaua

SEQ ID NO: 183735 - RNA, 19 nt, Homo sapiens
  misc_RNA (1)...(19): siRNA sense strand
gugaacacauggaagaaca

SEQ ID NO: 183736 - RNA, 19 nt, Homo sapiens
  misc_RNA (1)...(19): siRNA sense strand
caaaauuggugaacacaug

SEQ ID NO: 183737 - RNA, 19 nt, Homo sapiens
  misc_RNA (1)...(19): siRNA sense strand
gaauguggguugcauaccu

SEQ ID NO: 183738 - RNA, 19 nt, Homo sapiens
  misc_RNA (1)...(19): siRNA sense strand
gcgcucaaauguggacuga

SEQ ID NO: 183739 - RNA, 19 nt, Homo sapiens
  misc_RNA (1)...(19): siRNA sense strand
gaaauuauggauggaaagu

SEQ ID NO: 183740 - RNA, 19 nt, Homo sapiens
  misc_RNA (1)...(19): siRNA sense strand
gagaauauaauacggugau

SEQ ID NO: 183741 - RNA, 19 nt, Homo sapiens
  misc_RNA (1)...(19): siRNA sense strand
guuagguccauucuucuua

SEQ ID NO: 183742 - RNA, 19 nt, Homo sapiens
  misc_RNA (1)...(19): siRNA sense strand
gaguagcucugcgggagaa

SEQ ID NO: 183743 - RNA, 19 nt, Homo sapiens
  misc_RNA (1)...(19): siRNA sense strand
gugcagagguauucacaac

SEQ ID NO: 183744 - RNA, 19 nt, Homo sapiens
  misc_RNA (1)...(19): siRNA sense strand
ccaaaugcuggagaaguua

SEQ ID NO: 183745 - RNA, 19 nt, Homo sapiens
  misc_RNA (1)...(19): siRNA sense strand
gaaguuacacaaggcuuug

SEQ ID NO: 183746 - RNA, 19 nt, Homo sapiens
  misc_RNA (1)...(19): siRNA sense strand
aggauuaaggcaacaaaua

SEQ ID NO: 183747 - RNA, 19 nt, Homo sapiens
  misc_RNA (1)...(19): siRNA sense strand
uguauuuacuccuuuggaa

SEQ ID NO: 183748 - RNA, 19 nt, Homo sapiens
  misc_RNA (1)...(19): siRNA sense strand
guuccaaccacuguauuua

SEQ ID NO: 183749 - RNA, 19 nt, Homo sapiens
  misc_RNA (1)...(19): siRNA sense strand
guucguaccaauuaaaguu

SEQ ID NO: 183750 - RNA, 19 nt, Homo sapiens
  misc_RNA (1)...(19): siRNA sense strand
cauggcaucaaguuuauaa

SEQ ID NO: 183751 - RNA, 19 nt, Homo sapiens
  misc_RNA (1)...(19): siRNA sense strand
cauccuaugucgcuuugga

SEQ ID NO: 183752 - RNA, 19 nt, Homo sapiens
  misc_RNA (1)...(19): siRNA sense strand
ggagacaguuaagcaugau

SEQ ID NO: 183753 - RNA, 19 nt, Homo sapiens
  misc_RNA (1)...(19): siRNA sense strand
caggcuggcugcugagguu

SEQ ID NO: 183754 - RNA, 19 nt, Homo sapiens
  misc_RNA (1)...(19): siRNA sense strand
auauugagguuuaccauag

SEQ ID NO: 183755 - RNA, 19 nt, Homo sapiens
  misc_RNA (1)...(19): siRNA sense strand
caauagugaggaaaucauu

SEQ ID NO: 183756 - RNA, 19 nt, Homo sapiens
  misc_RNA (1)...(19): siRNA sense strand
gagcauccuaugucgcuuu

SEQ ID NO: 183757 - RNA, 19 nt, Homo sapiens
  misc_RNA (1)...(19): siRNA sense strand
caacauugucugugaccaa

SEQ ID NO: 183758 - RNA, 19 nt, Homo sapiens
  misc_RNA (1)...(19): siRNA sense strand
ucgaaauuauggauggaaa

SEQ ID NO: 183759 - RNA, 19 nt, Homo sapiens
  misc_RNA (1)...(19): siRNA sense strand
cagagguauucacaacauu

SEQ ID NO: 183760 - RNA, 19 nt, Homo sapiens
  misc_RNA (1)...(19): siRNA sense strand
ucacauuggcucuuugaau

SEQ ID NO: 183761 - RNA, 19 nt, Homo sapiens
  misc_RNA (1)...(19): siRNA sense strand
ugauagaagcuguacagaa

SEQ ID NO: 183762 - RNA, 19 nt, Homo sapiens
  misc_RNA (1)...(19): siRNA sense strand
aggagacaguuaagcauga

SEQ ID NO: 183763 - RNA, 19 nt, Homo sapiens
  misc_RNA (1)...(19): siRNA sense strand
gaagaacauggcaucaagu

SEQ ID NO: 183764 - RNA, 19 nt, Homo sapiens
  misc_RNA (1)...(19): siRNA sense strand
cauugccacuggugaaaga

SEQ ID NO: 183765 - RNA, 19 nt, Homo sapiens
  misc_RNA (1)...(19): siRNA sense strand
gaugaagaacagaccaaug

SEQ ID NO: 183766 - RNA, 19 nt, Homo sapiens
  misc_RNA (1)...(19): siRNA sense strand
ugauugggacagaaugaua

SEQ ID NO: 183767 - RNA, 19 nt, Homo sapiens
  misc_RNA (1)...(19): siRNA sense strand
ugucacagaugaagaacag

SEQ ID NO: 183768 - RNA, 19 nt, Homo sapiens
  misc_RNA (1)...(19): siRNA sense strand
gcaauaggaagagaugcuu

SEQ ID NO: 183769 - RNA, 19 nt, Homo sapiens
  misc_RNA (1)...(19): siRNA sense strand
aacauggcaucaaguuuau

SEQ ID NO: 183770 - RNA, 19 nt, Homo sapiens
  misc_RNA (1)...(19): siRNA sense strand
ggugaaagaccacguuacu

SEQ ID NO: 183771 - RNA, 19 nt, Homo sapiens
  misc_RNA (1)...(19): siRNA sense strand
ugcaagacucucgaaauua

SEQ ID NO: 183772 - RNA, 19 nt, Homo sapiens
  misc_RNA (1)...(19): siRNA sense strand
gugaugaucuuuucuccuu

SEQ ID NO: 183773 - RNA, 19 nt, Homo sapiens
  misc_RNA (1)...(19): siRNA sense strand
gaaagcuguggagaaguuu

SEQ ID NO: 183774 - RNA, 19 nt, Homo sapiens
  misc_RNA (1)...(19): siRNA sense strand
ggcaucaaguuuauaagac

SEQ ID NO: 183775 - RNA, 19 nt, Homo sapiens
  misc_RNA (1)...(19): siRNA sense strand
aauguggguugcauaccua

SEQ ID NO: 183776 - RNA, 19 nt, Homo sapiens
  misc_RNA (1)...(19): siRNA sense strand
caucccuggugacaaagaa

SEQ ID NO: 183777 - RNA, 19 nt, Homo sapiens
  misc_RNA (1)...(19): siRNA sense strand
gggugaagauaaaugaaaa

SEQ ID NO: 183778 - RNA, 19 nt, Homo sapiens
  misc_RNA (1)...(19): siRNA sense strand
gaauuggggcuaccgagua

SEQ ID NO: 183779 - RNA, 19 nt, Homo sapiens
  misc_RNA (1)...(19): siRNA sense strand
ggaagagaugcuugcacaa

SEQ ID NO: 183780 - RNA, 19 nt, Homo sapiens
  misc_RNA (1)...(19): siRNA sense strand
gcucaguccaccaauagug

SEQ ID NO: 183781 - RNA, 19 nt, Homo sapiens
  misc_RNA (1)...(19): siRNA sense strand
gagaaugcuuaugggcaau

SEQ ID NO: 183782 - RNA, 19 nt, Homo sapiens
  misc_RNA (1)...(19): siRNA sense strand
uggcaucaaguuuauaaga

SEQ ID NO: 183783 - RNA, 19 nt, Homo sapiens
  misc_RNA (1)...(19): siRNA sense strand
ccaccaauagugaggaaau

SEQ ID NO: 183784 - RNA, 19 nt, Homo sapiens
  misc_RNA (1)...(19): siRNA sense strand
ggacagaaugauagaagcu

SEQ ID NO: 183785 - RNA, 19 nt, Homo sapiens
  misc_RNA (1)...(19): siRNA sense strand
agaaguuacacaaggcuuu

SEQ ID NO: 183786 - RNA, 19 nt, Homo sapiens
  misc_RNA (1)...(19): siRNA sense strand
gaucuucccaaguccuaug

SEQ ID NO: 183787 - RNA, 19 nt, Homo sapiens
  misc_RNA (1)...(19): siRNA sense strand
cggaggaacaugugugaau

SEQ ID NO: 183788 - RNA, 19 nt, Homo sapiens
  misc_RNA (1)...(19): siRNA sense strand
gaagcuguacagaaucaca

SEQ ID NO: 183789 - RNA, 19 nt, Homo sapiens
  misc_RNA (1)...(19): siRNA sense strand
cagaaugauagaagcugua

SEQ ID NO: 183790 - RNA, 19 nt, Homo sapiens
  misc_RNA (1)...(19): siRNA sense strand
uuagguccauucuucuuag

SEQ ID NO: 183791 - RNA, 19 nt, Homo sapiens
  misc_RNA (1)...(19): siRNA sense strand
gaugcuggcaauaggaaga

SEQ ID NO: 183792 - RNA, 19 nt, Homo sapiens
  misc_RNA (1)...(19): siRNA sense strand
aagaacauggcaucaaguu

SEQ ID NO: 183793 - RNA, 19 nt, Homo sapiens
  misc_RNA (1)...(19): siRNA sense strand
gaacauggcaucaaguuua

SEQ ID NO: 183794 - RNA, 19 nt, Homo sapiens
  misc_RNA (1)...(19): siRNA sense strand
gauagaagcuguacagaau

SEQ ID NO: 183795 - RNA, 19 nt, Homo sapiens
  misc_RNA (1)...(19): siRNA sense strand
gcaagacucucgaaauuau

SEQ ID NO: 183796 - RNA, 19 nt, Homo sapiens
  misc_RNA (1)...(19): siRNA sense strand
gaacggcccugaagaucuu

SEQ ID NO: 183797 - RNA, 19 nt, Homo sapiens
  misc_RNA (1)...(19): siRNA sense strand
ggaaaucauugaaggagaa

SEQ ID NO: 183798 - RNA, 19 nt, Homo sapiens
  misc_RNA (1)...(19): siRNA sense strand
ggagaaagcuguggagaag

SEQ ID NO: 183799 - RNA, 19 nt, Homo sapiens
  misc_RNA (1)...(19): siRNA sense strand
gggcaucccuggugacaaa

SEQ ID NO: 183800 - RNA, 19 nt, Homo sapiens
  misc_RNA (1)...(19): siRNA sense strand
ggauuaaggcaacaaauaa

SEQ ID NO: 183801 - RNA, 19 nt, Homo sapiens
  misc_RNA (1)...(19): siRNA sense strand
ggagugcgcuggauuucuu

SEQ ID NO: 183802 - RNA, 19 nt, Homo sapiens
  misc_RNA (1)...(19): siRNA sense strand
ggaagaacauggcaucaag

SEQ ID NO: 183803 - RNA, 19 nt, Homo sapiens
  misc_RNA (1)...(19): siRNA sense strand
cacauuggcucuuugaauu

SEQ ID NO: 183804 - RNA, 19 nt, Homo sapiens
  misc_RNA (1)...(19): siRNA sense strand
gucaagagauaacaacaaa

SEQ ID NO: 183805 - RNA, 19 nt, Homo sapiens
  misc_RNA (1)...(19): siRNA sense strand
gcagagguauucacaacau

SEQ ID NO: 183806 - RNA, 19 nt, Homo sapiens
  misc_RNA (1)...(19): siRNA sense strand
cugcaagacucucgaaauu

SEQ ID NO: 183807 - RNA, 19 nt, Homo sapiens
  misc_RNA (1)...(19): siRNA sense strand
caagagauaacaacaaaug

SEQ ID NO: 183808 - RNA, 19 nt, Homo sapiens
  misc_RNA (1)...(19): siRNA sense strand
ugaaagaccacguuacuug

SEQ ID NO: 183809 - RNA, 19 nt, Homo sapiens
  misc_RNA (1)...(19): siRNA sense strand
agaaagcuguggagaaguu

SEQ ID NO: 183810 - RNA, 19 nt, Homo sapiens
  misc_RNA (1)...(19): siRNA sense strand
ggaggaacaugugugaaug

SEQ ID NO: 183811 - RNA, 19 nt, Homo sapiens
  misc_RNA (1)...(19): siRNA sense strand
uaaagacaaugaacguguu

SEQ ID NO: 183812 - RNA, 19 nt, Homo sapiens
  misc_RNA (1)...(19): siRNA sense strand
guagcucaguccaccaaua

SEQ ID NO: 183813 - RNA, 19 nt, Homo sapiens
  misc_RNA (1)...(19): siRNA sense strand
agacaguucguaccaauua

SEQ ID NO: 183814 - RNA, 19 nt, Homo sapiens
  misc_RNA (1)...(19): siRNA sense strand
ggacauggccaacaaaauu

SEQ ID NO: 183815 - RNA, 19 nt, Homo sapiens
  misc_RNA (1)...(19): siRNA sense strand
gacaaagaauacugcauca

SEQ ID NO: 183816 - RNA, 19 nt, Homo sapiens
  misc_RNA (1)...(19): siRNA sense strand
gcaucaaguuuauaagaca

SEQ ID NO: 183817 - RNA, 19 nt, Homo sapiens
  misc_RNA (1)...(19): siRNA sense strand
gguaagacccugguuguug

SEQ ID NO: 183818 - RNA, 19 nt, Homo sapiens
  misc_RNA (1)...(19): siRNA sense strand
ggcgauauauuggaggaua

SEQ ID NO: 183819 - RNA, 19 nt, Homo sapiens
  misc_RNA (1)...(19): siRNA sense strand
uaagacaguucguaccaau

SEQ ID NO: 183820 - RNA, 19 nt, Homo sapiens
  misc_RNA (1)...(19): siRNA sense strand
gcgauauauuggaggauaa

SEQ ID NO: 183821 - RNA, 19 nt, Homo sapiens
  misc_RNA (1)...(19): siRNA sense strand
gaaugcuuaugggcaauuu

SEQ ID NO: 183822 - RNA, 19 nt, Homo sapiens
  misc_RNA (1)...(19): siRNA sense strand
ggaagaaaauauugagguu

SEQ ID NO: 183823 - RNA, 19 nt, Homo sapiens
  misc_RNA (1)...(19): siRNA sense strand
uaaggaggcagcccaauau

SEQ ID NO: 183824 - RNA, 19 nt, Homo sapiens
  misc_RNA (1)...(19): siRNA sense strand
cuaaggaggcagcccaaua

SEQ ID NO: 183825 - RNA, 19 nt, Homo sapiens
  misc_RNA (1)...(19): siRNA sense strand
uagaagcuguacagaauca

SEQ ID NO: 183826 - RNA, 19 nt, Homo sapiens
  misc_RNA (1)...(19): siRNA sense strand
ccacuguauuuacuccuuu

SEQ ID NO: 183827 - RNA, 19 nt, Homo sapiens
  misc_RNA (1)...(19): siRNA sense strand
gacaguucguaccaauuaa

SEQ ID NO: 183828 - RNA, 19 nt, Homo sapiens
  misc_RNA (1)...(19): siRNA sense strand
agaaucacauuggcucuuu

SEQ ID NO: 183829 - RNA, 19 nt, Homo sapiens
  misc_RNA (1)...(19): siRNA sense strand
gaaagucgaggagacaguu

SEQ ID NO: 183830 - RNA, 19 nt, Homo sapiens
  misc_RNA (1)...(19): siRNA sense strand
gguuuaccauaguuacuuu

SEQ ID NO: 183831 - RNA, 19 nt, Homo sapiens
  misc_RNA (1)...(19): siRNA sense strand
ggacaagcccugcaagacu

SEQ ID NO: 183832 - RNA, 19 nt, Homo sapiens
  misc_RNA (1)...(19): siRNA sense strand
gaaucacauuggcucuuug

SEQ ID NO: 183833 - RNA, 19 nt, Homo sapiens
  misc_RNA (1)...(19): siRNA sense strand
ggacagcacaauuggaauc

SEQ ID NO: 183834 - RNA, 19 nt, Homo sapiens
  misc_RNA (1)...(19): siRNA sense strand
acgauuccgucaagagaua

SEQ ID NO: 183835 - RNA, 19 nt, Homo sapiens
  misc_RNA (1)...(19): siRNA sense strand
gugaacacauggaagaaca

SEQ ID NO: 183836 - RNA, 19 nt, Homo sapiens
  misc_RNA (1)...(19): siRNA sense strand
caaaauuggugaacacaug

SEQ ID NO: 183837 - RNA, 19 nt, Homo sapiens
  misc_RNA (1)...(19): siRNA sense strand
gaauguggguugcauaccu

SEQ ID NO: 183838 - RNA, 19 nt, Homo sapiens
  misc_RNA (1)...(19): siRNA sense strand
gcgcucaaauguggacuga

SEQ ID NO: 183839 - RNA, 19 nt, Homo sapiens
  misc_RNA (1)...(19): siRNA sense strand
gaaauuauggauggaaagu

SEQ ID NO: 183840 - RNA, 19 nt, Homo sapiens
  misc_RNA (1)...(19): siRNA sense strand
gagaauauaauacggugau

SEQ ID NO: 183841 - RNA, 19 nt, Homo sapiens
  misc_RNA (1)...(19): siRNA sense strand
guuagguccauucuucuua

SEQ ID NO: 183842 - RNA, 19 nt, Homo sapiens
  misc_RNA (1)...(19): siRNA sense strand
gaguagcucugcgggagaa

SEQ ID NO: 183843 - RNA, 19 nt, Homo sapiens
  misc_RNA (1)...(19): siRNA sense strand
gugcagagguauucacaac

SEQ ID NO: 183844 - RNA, 19 nt, Homo sapiens
  misc_RNA (1)...(19): siRNA sense strand
ccaaaugcuggagaaguua

SEQ ID NO: 183845 - RNA, 19 nt, Homo sapiens
  misc_RNA (1)...(19): siRNA sense strand
gaaguuacacaaggcuuug

SEQ ID NO: 183846 - RNA, 19 nt, Homo sapiens
  misc_RNA (1)...(19): siRNA sense strand
aggauuaaggcaacaaaua

SEQ ID NO: 183847 - RNA, 19 nt, Homo sapiens
  misc_RNA (1)...(19): siRNA sense strand
uguauuuacuccuuuggaa

SEQ ID NO: 183848 - RNA, 19 nt, Homo sapiens
  misc_RNA (1)...(19): siRNA sense strand
guuccaaccacuguauuua

SEQ ID NO: 183849 - RNA, 19 nt, Homo sapiens
  misc_RNA (1)...(19): siRNA sense strand
guucguaccaauuaaaguu

SEQ ID NO: 183850 - RNA, 19 nt, Homo sapiens
  misc_RNA (1)...(19): siRNA sense strand
cauggcaucaaguuuauaa

SEQ ID NO: 183851 - RNA, 19 nt, Homo sapiens
  misc_RNA (1)...(19): siRNA sense strand
cauccuaugucgcuuugga

SEQ ID NO: 183852 - RNA, 19 nt, Homo sapiens
  misc_RNA (1)...(19): siRNA sense strand
ggagacaguuaagcaugau

SEQ ID NO: 183853 - RNA, 19 nt, Homo sapiens
  misc_RNA (1)...(19): siRNA sense strand
caggcuggcugcugagguu

SEQ ID NO: 183854 - RNA, 19 nt, Homo sapiens
  misc_RNA (1)...(19): siRNA sense strand
auauugagguuuaccauag

SEQ ID NO: 183855 - RNA, 19 nt, Homo sapiens
  misc_RNA (1)...(19): siRNA sense strand
caauagugaggaaaucauu

SEQ ID NO: 183856 - RNA, 19 nt, Homo sapiens
  misc_RNA (1)...(19): siRNA sense strand
gagcauccuaugucgcuuu

SEQ ID NO: 183857 - RNA, 19 nt, Homo sapiens
  misc_RNA (1)...(19): siRNA sense strand
caacauugucugugaccaa

SEQ ID NO: 183858 - RNA, 19 nt, Homo sapiens
  misc_RNA (1)...(19): siRNA sense strand
ucgaaauuauggauggaaa

SEQ ID NO: 183859 - RNA, 19 nt, Homo sapiens
  misc_RNA (1)...(19): siRNA sense strand
cagagguauucacaacauu

SEQ ID NO: 183860 - RNA, 19 nt, Homo sapiens
  misc_RNA (1)...(19): siRNA sense strand
ucacauuggcucuuugaau

SEQ ID NO: 183861 - RNA, 19 nt, Homo sapiens
  misc_RNA (1)...(19): siRNA sense strand
ugauagaagcuguacagaa

SEQ ID NO: 183862 - RNA, 19 nt, Homo sapiens
  misc_RNA (1)...(19): siRNA sense strand
aggagacaguuaagcauga

SEQ ID NO: 183863 - RNA, 19 nt, Homo sapiens
  misc_RNA (1)...(19): siRNA sense strand
gaagaacauggcaucaagu

SEQ ID NO: 183864 - RNA, 19 nt, Homo sapiens
  misc_RNA (1)...(19): siRNA sense strand
cauugccacuggugaaaga

SEQ ID NO: 183865 - RNA, 19 nt, Homo sapiens
  misc_RNA (1)...(19): siRNA sense strand
gaugaagaacagaccaaug

SEQ ID NO: 183866 - RNA, 19 nt, Homo sapiens
  misc_RNA (1)...(19): siRNA sense strand
ugauugggacagaaugaua

SEQ ID NO: 183867 - RNA, 19 nt, Homo sapiens
  misc_RNA (1)...(19): siRNA sense strand
ugucacagaugaagaacag

SEQ ID NO: 183868 - RNA, 19 nt, Homo sapiens
  misc_RNA (1)...(19): siRNA sense strand
gcaauaggaagagaugcuu

SEQ ID NO: 183869 - RNA, 19 nt, Homo sapiens
  misc_RNA (1)...(19): siRNA sense strand
aacauggcaucaaguuuau

SEQ ID NO: 183870 - RNA, 19 nt, Homo sapiens
  misc_RNA (1)...(19): siRNA sense strand
ggugaaagaccacguuacu

SEQ ID NO: 183871 - RNA, 19 nt, Homo sapiens
  misc_RNA (1)...(19): siRNA sense strand
ugcaagacucucgaaauua

SEQ ID NO: 183872 - RNA, 19 nt, Homo sapiens
  misc_RNA (1)...(19): siRNA sense strand
gugaugaucuuuucuccuu

SEQ ID NO: 183873 - RNA, 19 nt, Homo sapiens
  misc_RNA (1)...(19): siRNA sense strand
gaaagcuguggagaaguuu

SEQ ID NO: 183874 - RNA, 19 nt, Homo sapiens
  misc_RNA (1)...(19): siRNA sense strand
ggcaucaaguuuauaagac

SEQ ID NO: 183875 - RNA, 19 nt, Homo sapiens
  misc_RNA (1)...(19): siRNA sense strand
aauguggguugcauaccua

SEQ ID NO: 183876 - RNA, 19 nt, Homo sapiens
  misc_RNA (1)...(19): siRNA sense strand
caucccuggugacaaagaa

SEQ ID NO: 183877 - RNA, 19 nt, Homo sapiens
  misc_RNA (1)...(19): siRNA sense strand
gggugaagauaaaugaaaa

SEQ ID NO: 183878 - RNA, 19 nt, Homo sapiens
  misc_RNA (1)...(19): siRNA sense strand
gaauuggggcuaccgagua

SEQ ID NO: 183879 - RNA, 19 nt, Homo sapiens
  misc_RNA (1)...(19): siRNA sense strand
ggaagagaugcuugcacaa

SEQ ID NO: 183880 - RNA, 19 nt, Homo sapiens
  misc_RNA (1)...(19): siRNA sense strand
gcucaguccaccaauagug

SEQ ID NO: 183881 - RNA, 19 nt, Homo sapiens
  misc_RNA (1)...(19): siRNA sense strand
gagaaugcuuaugggcaau

SEQ ID NO: 183882 - RNA, 19 nt, Homo sapiens
  misc_RNA (1)...(19): siRNA sense strand
uggcaucaaguuuauaaga

SEQ ID NO: 183883 - RNA, 19 nt, Homo sapiens
  misc_RNA (1)...(19): siRNA sense strand
ccaccaauagugaggaaau

SEQ ID NO: 183884 - RNA, 19 nt, Homo sapiens
  misc_RNA (1)...(19): siRNA sense strand
ggacagaaugauagaagcu

SEQ ID NO: 183885 - RNA, 19 nt, Homo sapiens
  misc_RNA (1)...(19): siRNA sense strand
agaaguuacacaaggcuuu

SEQ ID NO: 183886 - RNA, 19 nt, Homo sapiens
  misc_RNA (1)...(19): siRNA sense strand
gaucuucccaaguccuaug

SEQ ID NO: 183887 - RNA, 19 nt, Homo sapiens
  misc_RNA (1)...(19): siRNA sense strand
cggaggaacaugugugaau

SEQ ID NO: 183888 - RNA, 19 nt, Homo sapiens
  misc_RNA (1)...(19): siRNA sense strand
gaagcuguacagaaucaca

SEQ ID NO: 183889 - RNA, 19 nt, Homo sapiens
  misc_RNA (1)...(19): siRNA sense strand
cagaaugauagaagcugua

SEQ ID NO: 183890 - RNA, 19 nt, Homo sapiens
  misc_RNA (1)...(19): siRNA sense strand
uuagguccauucuucuuag

SEQ ID NO: 183891 - RNA, 19 nt, Homo sapiens
  misc_RNA (1)...(19): siRNA sense strand
gaugcuggcaauaggaaga

SEQ ID NO: 183892 - RNA, 19 nt, Homo sapiens
  misc_RNA (1)...(19): siRNA sense strand
aagaacauggcaucaaguu

SEQ ID NO: 183893 - RNA, 19 nt, Homo sapiens
  misc_RNA (1)...(19): siRNA sense strand
gaacauggcaucaaguuua

SEQ ID NO: 183894 - RNA, 19 nt, Homo sapiens
  misc_RNA (1)...(19): siRNA sense strand
gauagaagcuguacagaau

SEQ ID NO: 183895 - RNA, 19 nt, Homo sapiens
  misc_RNA (1)...(19): siRNA sense strand
gcaagacucucgaaauuau

SEQ ID NO: 183896 - RNA, 19 nt, Homo sapiens
  misc_RNA (1)...(19): siRNA sense strand
gaacggcccugaagaucuu

SEQ ID NO: 183897 - RNA, 19 nt, Homo sapiens
  misc_RNA (1)...(19): siRNA sense strand
ggaaaucauugaaggagaa

SEQ ID NO: 183898 - RNA, 19 nt, Homo sapiens
  misc_RNA (1)...(19): siRNA sense strand
ggagaaagcuguggagaag

SEQ ID NO: 183899 - RNA, 19 nt, Homo sapiens
  misc_RNA (1)...(19): siRNA sense strand
gggcaucccuggugacaaa

SEQ ID NO: 183900 - RNA, 19 nt, Homo sapiens
  misc_RNA (1)...(19): siRNA sense strand
ggauuaaggcaacaaauaa

SEQ ID NO: 183901 - RNA, 19 nt, Homo sapiens
  misc_RNA (1)...(19): siRNA sense strand
ggagugcgcuggauuucuu

SEQ ID NO: 183902 - RNA, 19 nt, Homo sapiens
  misc_RNA (1)...(19): siRNA sense strand
ggaagaacauggcaucaag

SEQ ID NO: 183903 - RNA, 19 nt, Homo sapiens
  misc_RNA (1)...(19): siRNA sense strand
cacauuggcucuuugaauu

SEQ ID NO: 183904 - RNA, 19 nt, Homo sapiens
  misc_RNA (1)...(19): siRNA sense strand
gucaagagauaacaacaaa

SEQ ID NO: 183905 - RNA, 19 nt, Homo sapiens
  misc_RNA (1)...(19): siRNA sense strand
gcagagguauucacaacau

SEQ ID NO: 183906 - RNA, 19 nt, Homo sapiens
  misc_RNA (1)...(19): siRNA sense strand
cugcaagacucucgaaauu

SEQ ID NO: 183907 - RNA, 19 nt, Homo sapiens
  misc_RNA (1)...(19): siRNA sense strand
caagagauaacaacaaaug

SEQ ID NO: 183908 - RNA, 19 nt, Homo sapiens
  misc_RNA (1)...(19): siRNA sense strand
ugaaagaccacguuacuug

SEQ ID NO: 183909 - RNA, 19 nt, Homo sapiens
  misc_RNA (1)...(19): siRNA sense strand
agaaagcuguggagaaguu

SEQ ID NO: 183910 - RNA, 19 nt, Homo sapiens
  misc_RNA (1)...(19): siRNA sense strand
ggaggaacaugugugaaug

SEQ ID NO: 183911 - RNA, 19 nt, Homo sapiens
  misc_RNA (1)...(19): siRNA sense strand
uaaagacaaugaacguguu

SEQ ID NO: 183912 - RNA, 19 nt, Homo sapiens
  misc_RNA (1)...(19): siRNA sense strand
guagcucaguccaccaaua

SEQ ID NO: 183913 - RNA, 19 nt, Homo sapiens
  misc_RNA (1)...(19): siRNA sense strand
agacaguucguaccaauua

SEQ ID NO: 183914 - RNA, 19 nt, Homo sapiens
  misc_RNA (1)...(19): siRNA sense strand
ggacauggccaacaaaauu

SEQ ID NO: 183915 - RNA, 19 nt, Homo sapiens
  misc_RNA (1)...(19): siRNA sense strand
gacaaagaauacugcauca

SEQ ID NO: 183916 - RNA, 19 nt, Homo sapiens
  misc_RNA (1)...(19): siRNA sense strand
gcaucaaguuuauaagaca

SEQ ID NO: 183917 - RNA, 19 nt, Homo sapiens
  misc_RNA (1)...(19): siRNA sense strand
gguaagacccugguuguug

SEQ ID NO: 183918 - RNA, 19 nt, Homo sapiens
  misc_RNA (1)...(19): siRNA sense strand
ggcgauauauuggaggaua

SEQ ID NO: 183919 - RNA, 19 nt, Homo sapiens
  misc_RNA (1)...(19): siRNA sense strand
uaagacaguucguaccaau

SEQ ID NO: 183920 - RNA, 19 nt, Homo sapiens
  misc_RNA (1)...(19): siRNA sense strand
gcgauauauuggaggauaa

SEQ ID NO: 183921 - RNA, 19 nt, Homo sapiens
  misc_RNA (1)...(19): siRNA sense strand
gaaugcuuaugggcaauuu

SEQ ID NO: 183922 - RNA, 19 nt, Homo sapiens
  misc_RNA (1)...(19): siRNA sense strand
ggaagaaaauauugagguu

SEQ ID NO: 183923 - RNA, 19 nt, Homo sapiens
  misc_RNA (1)...(19): siRNA sense strand
uaaggaggcagcccaauau

SEQ ID NO: 183924 - RNA, 19 nt, Homo sapiens
  misc_RNA (1)...(19): siRNA sense strand
cuaaggaggcagcccaaua

SEQ ID NO: 183925 - RNA, 19 nt, Homo sapiens
  misc_RNA (1)...(19): siRNA sense strand
uagaagcuguacagaauca

SEQ ID NO: 183926 - RNA, 19 nt, Homo sapiens
  misc_RNA (1)...(19): siRNA sense strand
ccacuguauuuacuccuuu

SEQ ID NO: 183927 - RNA, 19 nt, Homo sapiens
  misc_RNA (1)...(19): siRNA sense strand
gacaguucguaccaauuaa

SEQ ID NO: 183928 - RNA, 19 nt, Homo sapiens
  misc_RNA (1)...(19): siRNA sense strand
agaaucacauuggcucuuu

SEQ ID NO: 183929 - RNA, 19 nt, Homo sapiens
  misc_RNA (1)...(19): siRNA sense strand
gaaagucgaggagacaguu

SEQ ID NO: 183930 - RNA, 19 nt, Homo sapiens
  misc_RNA (1)...(19): siRNA sense strand
gguuuaccauaguuacuuu

SEQ ID NO: 183931 - RNA, 19 nt, Homo sapiens
  misc_RNA (1)...(19): siRNA sense strand
ggacaagcccugcaagacu

SEQ ID NO: 183932 - RNA, 19 nt, Homo sapiens
  misc_RNA (1)...(19): siRNA sense strand
gaaucacauuggcucuuug

SEQ ID NO: 183933 - RNA, 19 nt, Homo sapiens
  misc_RNA (1)...(19): siRNA sense strand
ggacagcacaauuggaauc

SEQ ID NO: 183934 - RNA, 19 nt, Homo sapiens
  misc_RNA (1)...(19): siRNA sense strand
acgauuccgucaagagaua

SEQ ID NO: 183935 - RNA, 19 nt, Homo sapiens
  misc_RNA (1)...(19): siRNA sense strand
gugaacacauggaagaaca

SEQ ID NO: 183936 - RNA, 19 nt, Homo sapiens
  misc_RNA (1)...(19): siRNA sense strand
caaaauuggugaacacaug

SEQ ID NO: 183937 - RNA, 19 nt, Homo sapiens
  misc_RNA (1)...(19): siRNA sense strand
gaauguggguugcauaccu

SEQ ID NO: 183938 - RNA, 19 nt, Homo sapiens
  misc_RNA (1)...(19): siRNA sense strand
gcgcucaaauguggacuga

SEQ ID NO: 183939 - RNA, 19 nt, Homo sapiens
  misc_RNA (1)...(19): siRNA sense strand
gaaauuauggauggaaagu

SEQ ID NO: 183940 - RNA, 19 nt, Homo sapiens
  misc_RNA (1)...(19): siRNA sense strand
gagaauauaauacggugau

SEQ ID NO: 183941 - RNA, 19 nt, Homo sapiens
  misc_RNA (1)...(19): siRNA sense strand
guuagguccauucuucuua

SEQ ID NO: 183942 - RNA, 19 nt, Homo sapiens
  misc_RNA (1)...(19): siRNA sense strand
gaguagcucugcgggagaa

SEQ ID NO: 183943 - RNA, 19 nt, Homo sapiens
  misc_RNA (1)...(19): siRNA sense strand
gugcagagguauucacaac

SEQ ID NO: 183944 - RNA, 19 nt, Homo sapiens
  misc_RNA (1)...(19): siRNA sense strand
ccaaaugcuggagaaguua

SEQ ID NO: 183945 - RNA, 19 nt, Homo sapiens
  misc_RNA (1)...(19): siRNA sense strand
gaaguuacacaaggcuuug

SEQ ID NO: 183946 - RNA, 19 nt, Homo sapiens
  misc_RNA (1)...(19): siRNA sense strand
aggauuaaggcaacaaaua

SEQ ID NO: 183947 - RNA, 19 nt, Homo sapiens
  misc_RNA (1)...(19): siRNA sense strand
uguauuuacuccuuuggaa

SEQ ID NO: 183948 - RNA, 19 nt, Homo sapiens
  misc_RNA (1)...(19): siRNA sense strand
guuccaaccacuguauuua

SEQ ID NO: 183949 - RNA, 19 nt, Homo sapiens
  misc_RNA (1)...(19): siRNA sense strand
guucguaccaauuaaaguu

SEQ ID NO: 183950 - RNA, 19 nt, Homo sapiens
  misc_RNA (1)...(19): siRNA sense strand
cauggcaucaaguuuauaa

SEQ ID NO: 183951 - RNA, 19 nt, Homo sapiens
  misc_RNA (1)...(19): siRNA sense strand
cauccuaugucgcuuugga

SEQ ID NO: 183952 - RNA, 19 nt, Homo sapiens
  misc_RNA (1)...(19): siRNA sense strand
ggagacaguuaagcaugau

SEQ ID NO: 183953 - RNA, 19 nt, Homo sapiens
  misc_RNA (1)...(19): siRNA sense strand
caggcuggcugcugagguu

SEQ ID NO: 183954 - RNA, 19 nt, Homo sapiens
  misc_RNA (1)...(19): siRNA sense strand
auauugagguuuaccauag

SEQ ID NO: 183955 - RNA, 19 nt, Homo sapiens
  misc_RNA (1)...(19): siRNA sense strand
caauagugaggaaaucauu

SEQ ID NO: 183956 - RNA, 19 nt, Homo sapiens
  misc_RNA (1)...(19): siRNA sense strand
gagcauccuaugucgcuuu

SEQ ID NO: 183957 - RNA, 19 nt, Homo sapiens
  misc_RNA (1)...(19): siRNA sense strand
caacauugucugugaccaa

SEQ ID NO: 183958 - RNA, 19 nt, Homo sapiens
  misc_RNA (1)...(19): siRNA sense strand
ucgaaauuauggauggaaa

SEQ ID NO: 183959 - RNA, 19 nt, Homo sapiens
  misc_RNA (1)...(19): siRNA sense strand
cagagguauucacaacauu

SEQ ID NO: 183960 - RNA, 19 nt, Homo sapiens
  misc_RNA (1)...(19): siRNA sense strand
ucacauuggcucuuugaau

SEQ ID NO: 183961 - RNA, 19 nt, Homo sapiens
  misc_RNA (1)...(19): siRNA sense strand
ugauagaagcuguacagaa

SEQ ID NO: 183962 - RNA, 19 nt, Homo sapiens
  misc_RNA (1)...(19): siRNA sense strand
aggagacaguuaagcauga

SEQ ID NO: 183963 - RNA, 19 nt, Homo sapiens
  misc_RNA (1)...(19): siRNA sense strand
gaagaacauggcaucaagu

SEQ ID NO: 183964 - RNA, 19 nt, Homo sapiens
  misc_RNA (1)...(19): siRNA sense strand
cauugccacuggugaaaga

SEQ ID NO: 183965 - RNA, 19 nt, Homo sapiens
  misc_RNA (1)...(19): siRNA sense strand
gaugaagaacagaccaaug

SEQ ID NO: 183966 - RNA, 19 nt, Homo sapiens
  misc_RNA (1)...(19): siRNA sense strand
ugauugggacagaaugaua

SEQ ID NO: 183967 - RNA, 19 nt, Homo sapiens
  misc_RNA (1)...(19): siRNA sense strand
ugucacagaugaagaacag

SEQ ID NO: 183968 - RNA, 19 nt, Homo sapiens
  misc_RNA (1)...(19): siRNA sense strand
gcaauaggaagagaugcuu

SEQ ID NO: 183969 - RNA, 19 nt, Homo sapiens
  misc_RNA (1)...(19): siRNA sense strand
aacauggcaucaaguuuau

SEQ ID NO: 183970 - RNA, 19 nt, Homo sapiens
  misc_RNA (1)...(19): siRNA sense strand
ggugaaagaccacguuacu

SEQ ID NO: 183971 - RNA, 19 nt, Homo sapiens
  misc_RNA (1)...(19): siRNA sense strand
ugcaagacucucgaaauua

SEQ ID NO: 183972 - RNA, 19 nt, Homo sapiens
  misc_RNA (1)...(19): siRNA sense strand
gugaugaucuuuucuccuu

SEQ ID NO: 183973 - RNA, 19 nt, Homo sapiens
  misc_RNA (1)...(19): siRNA sense strand
gaaagcuguggagaaguuu

SEQ ID NO: 183974 - RNA, 19 nt, Homo sapiens
  misc_RNA (1)...(19): siRNA sense strand
ggcaucaaguuuauaagac

SEQ ID NO: 183975 - RNA, 19 nt, Homo sapiens
  misc_RNA (1)...(19): siRNA sense strand
aauguggguugcauaccua

SEQ ID NO: 183976 - RNA, 19 nt, Homo sapiens
  misc_RNA (1)...(19): siRNA sense strand
caucccuggugacaaagaa

SEQ ID NO: 183977 - RNA, 19 nt, Homo sapiens
  misc_RNA (1)...(19): siRNA sense strand
gggugaagauaaaugaaaa

SEQ ID NO: 183978 - RNA, 19 nt, Homo sapiens
  misc_RNA (1)...(19): siRNA sense strand
gaauuggggcuaccgagua

SEQ ID NO: 183979 - RNA, 19 nt, Homo sapiens
  misc_RNA (1)...(19): siRNA sense strand
ggaagagaugcuugcacaa

SEQ ID NO: 183980 - RNA, 19 nt, Homo sapiens
  misc_RNA (1)...(19): siRNA sense strand
gcucaguccaccaauagug

SEQ ID NO: 183981 - RNA, 19 nt, Homo sapiens
  misc_RNA (1)...(19): siRNA sense strand
gagaaugcuuaugggcaau

SEQ ID NO: 183982 - RNA, 19 nt, Homo sapiens
  misc_RNA (1)...(19): siRNA sense strand
uggcaucaaguuuauaaga

SEQ ID NO: 183983 - RNA, 19 nt, Homo sapiens
  misc_RNA (1)...(19): siRNA sense strand
ccaccaauagugaggaaau

SEQ ID NO: 183984 - RNA, 19 nt, Homo sapiens
  misc_RNA (1)...(19): siRNA sense strand
ggacagaaugauagaagcu

SEQ ID NO: 183985 - RNA, 19 nt, Homo sapiens
  misc_RNA (1)...(19): siRNA sense strand
agaaguuacacaaggcuuu

SEQ ID NO: 183986 - RNA, 19 nt, Homo sapiens
  misc_RNA (1)...(19): siRNA sense strand
gaucuucccaaguccuaug

SEQ ID NO: 183987 - RNA, 19 nt, Homo sapiens
  misc_RNA (1)...(19): siRNA sense strand
cggaggaacaugugugaau

SEQ ID NO: 183988 - RNA, 19 nt, Homo sapiens
  misc_RNA (1)...(19): siRNA sense strand
gaagcuguacagaaucaca

SEQ ID NO: 183989 - RNA, 19 nt, Homo sapiens
  misc_RNA (1)...(19): siRNA sense strand
cagaaugauagaagcugua

SEQ ID NO: 183990 - RNA, 19 nt, Homo sapiens
  misc_RNA (1)...(19): siRNA sense strand
uuagguccauucuucuuag

SEQ ID NO: 183991 - RNA, 19 nt, Homo sapiens
  misc_RNA (1)...(19): siRNA sense strand
gaugcuggcaauaggaaga

SEQ ID NO: 183992 - RNA, 19 nt, Homo sapiens
  misc_RNA (1)...(19): siRNA sense strand
aagaacauggcaucaaguu

SEQ ID NO: 183993 - RNA, 19 nt, Homo sapiens
  misc_RNA (1)...(19): siRNA sense strand
ccaagaagaaggucaaaua

SEQ ID NO: 183994 - RNA, 19 nt, Homo sapiens
  misc_RNA (1)...(19): siRNA sense strand
caagaagaaggucaaauaa

SEQ ID NO: 183995 - RNA, 19 nt, Homo sapiens
  misc_RNA (1)...(19): siRNA sense strand
gaaauacaacugcgacaag

SEQ ID NO: 183996 - RNA, 19 nt, Homo sapiens
  misc_RNA (1)...(19): siRNA sense strand
gcugucaacugccgcaaga

SEQ ID NO: 183997 - RNA, 19 nt, Homo sapiens
  misc_RNA (1)...(19): siRNA sense strand
gcaaaaccaucacccuuga

SEQ ID NO: 183998 - RNA, 19 nt, Homo sapiens
  misc_RNA (1)...(19): siRNA sense strand
aaauacaacugcgacaaga

SEQ ID NO: 183999 - RNA, 19 nt, Homo sapiens
  misc_RNA (1)...(19): siRNA sense strand
cagcagcgucugauauuug

SEQ ID NO: 184000 - RNA, 19 nt, Homo sapiens
  misc_RNA (1)...(19): siRNA sense strand
ccugcgagguggcauuauu

SEQ ID NO: 184001 - RNA, 19 nt, Homo sapiens
  misc_RNA (1)...(19): siRNA sense strand
gaggauggccgcacucucu

SEQ ID NO: 184002 - RNA, 19 nt, Homo sapiens
  misc_RNA (1)...(19): siRNA sense strand
ccagugacaccauugagaa

SEQ ID NO: 184003 - RNA, 19 nt, Homo sapiens
  misc_RNA (1)...(19): siRNA sense strand
acuacaacauccagaaaga

SEQ ID NO: 184004 - RNA, 19 nt, Homo sapiens
  misc_RNA (1)...(19): siRNA sense strand
caaccugcgucccaagaag

SEQ ID NO: 184005 - RNA, 19 nt, Homo sapiens
  misc_RNA (1)...(19): siRNA sense strand
gccgcacucucucagacua

SEQ ID NO: 184006 - RNA, 19 nt, Homo sapiens
  misc_RNA (1)...(19): siRNA sense strand
ucaacugccgcaagaagaa

SEQ ID NO: 184007 - RNA, 19 nt, Homo sapiens
  misc_RNA (1)...(19): siRNA sense strand
gaagacccucacuggcaaa

SEQ ID NO: 184008 - RNA, 19 nt, Homo sapiens
  misc_RNA (1)...(19): siRNA sense strand
agacuacaacauccagaaa

SEQ ID NO: 184009 - RNA, 19 nt, Homo sapiens
  misc_RNA (1)...(19): siRNA sense strand
gaaugucaaagccaaaauu

SEQ ID NO: 184010 - RNA, 19 nt, Homo sapiens
  misc_RNA (1)...(19): siRNA sense strand
auacaacugcgacaagaug

SEQ ID NO: 184011 - RNA, 19 nt, Homo sapiens
  misc_RNA (1)...(19): siRNA sense strand
caacugcgacaagaugauc

SEQ ID NO: 184012 - RNA, 19 nt, Homo sapiens
  misc_RNA (1)...(19): siRNA sense strand
cagacuacaacauccagaa

SEQ ID NO: 184013 - RNA, 19 nt, Homo sapiens
  misc_RNA (1)...(19): siRNA sense strand
cgagcccagugacaccauu

SEQ ID NO: 184014 - RNA, 19 nt, Homo sapiens
  misc_RNA (1)...(19): siRNA sense strand
gaacaaacgggaauaugaa

SEQ ID NO: 184015 - RNA, 19 nt, Homo sapiens
  misc_RNA (1)...(19): siRNA sense strand
gaugaacccaaucccaaua

SEQ ID NO: 184016 - RNA, 19 nt, Homo sapiens
  misc_RNA (1)...(19): siRNA sense strand
gcguguuucugcaauagua

SEQ ID NO: 184017 - RNA, 19 nt, Homo sapiens
  misc_RNA (1)...(19): siRNA sense strand
cuaugcagaugguaguaua

SEQ ID NO: 184018 - RNA, 19 nt, Homo sapiens
  misc_RNA (1)...(19): siRNA sense strand
gaugugucuuccauucuaa

SEQ ID NO: 184019 - RNA, 19 nt, Homo sapiens
  misc_RNA (1)...(19): siRNA sense strand
ugaugugucuuccauucua

SEQ ID NO: 184020 - RNA, 19 nt, Homo sapiens
  misc_RNA (1)...(19): siRNA sense strand
uaacauccauacagucucu

SEQ ID NO: 184021 - RNA, 19 nt, Homo sapiens
  misc_RNA (1)...(19): siRNA sense strand
agaacaaacgggaauauga

SEQ ID NO: 184022 - RNA, 19 nt, Homo sapiens
  misc_RNA (1)...(19): siRNA sense strand
uaugaugugucuuccauuc

SEQ ID NO: 184023 - RNA, 19 nt, Homo sapiens
  misc_RNA (1)...(19): siRNA sense strand
aaagcguguuucugcaaua

SEQ ID NO: 184024 - RNA, 19 nt, Homo sapiens
  misc_RNA (1)...(19): siRNA sense strand
ggagaacaaacgggaauau

SEQ ID NO: 184025 - RNA, 19 nt, Homo sapiens
  misc_RNA (1)...(19): siRNA sense strand
caaccuaugaugugucuuc

SEQ ID NO: 184026 - RNA, 19 nt, Homo sapiens
  misc_RNA (1)...(19): siRNA sense strand
gagaacaaacgggaauaug

SEQ ID NO: 184027 - RNA, 19 nt, Homo sapiens
  misc_RNA (1)...(19): siRNA sense strand
ccuaugaugugucuuccau

SEQ ID NO: 184028 - RNA, 19 nt, Homo sapiens
  misc_RNA (1)...(19): siRNA sense strand
gaacccaaucccaauaguc

SEQ ID NO: 184029 - RNA, 19 nt, Homo sapiens
  misc_RNA (1)...(19): siRNA sense strand
gcagaugguaguauauguc

SEQ ID NO: 184030 - RNA, 19 nt, Homo sapiens
  misc_RNA (1)...(19): siRNA sense strand
ggaguccaaccuaugaugu

SEQ ID NO: 184031 - RNA, 19 nt, Homo sapiens
  misc_RNA (1)...(19): siRNA sense strand
ugucuuccauucuaacauc

SEQ ID NO: 184032 - RNA, 19 nt, Homo sapiens
  misc_RNA (1)...(19): siRNA sense strand
auucuaacauccauacagu

SEQ ID NO: 184033 - RNA, 19 nt, Homo sapiens
  misc_RNA (1)...(19): siRNA sense strand
gaauaugaaaagcguguuu

SEQ ID NO: 184034 - RNA, 19 nt, Homo sapiens
  misc_RNA (1)...(19): siRNA sense strand
ugaacccaaucccaauagu

SEQ ID NO: 184035 - RNA, 19 nt, Homo sapiens
  misc_RNA (1)...(19): siRNA sense strand
ccaauaguccagcaaacag

SEQ ID NO: 184036 - RNA, 19 nt, Homo sapiens
  misc_RNA (1)...(19): siRNA sense strand
gaacaaacgggaauaugaa

SEQ ID NO: 184037 - RNA, 19 nt, Homo sapiens
  misc_RNA (1)...(19): siRNA sense strand
gaugaacccaaucccaaua

SEQ ID NO: 184038 - RNA, 19 nt, Homo sapiens
  misc_RNA (1)...(19): siRNA sense strand
gcguguuucugcaauagua

SEQ ID NO: 184039 - RNA, 19 nt, Homo sapiens
  misc_RNA (1)...(19): siRNA sense strand
cuaugcagaugguaguaua

SEQ ID NO: 184040 - RNA, 19 nt, Homo sapiens
  misc_RNA (1)...(19): siRNA sense strand
gaugugucuuccauucuaa

SEQ ID NO: 184041 - RNA, 19 nt, Homo sapiens
  misc_RNA (1)...(19): siRNA sense strand
ugaugugucuuccauucua

SEQ ID NO: 184042 - RNA, 19 nt, Homo sapiens
  misc_RNA (1)...(19): siRNA sense strand
uaacauccauacagucucu

SEQ ID NO: 184043 - RNA, 19 nt, Homo sapiens
  misc_RNA (1)...(19): siRNA sense strand
agaacaaacgggaauauga

SEQ ID NO: 184044 - RNA, 19 nt, Homo sapiens
  misc_RNA (1)...(19): siRNA sense strand
uaugaugugucuuccauuc

SEQ ID NO: 184045 - RNA, 19 nt, Homo sapiens
  misc_RNA (1)...(19): siRNA sense strand
aaagcguguuucugcaaua

SEQ ID NO: 184046 - RNA, 19 nt, Homo sapiens
  misc_RNA (1)...(19): siRNA sense strand
ggagaacaaacgggaauau

SEQ ID NO: 184047 - RNA, 19 nt, Homo sapiens
  misc_RNA (1)...(19): siRNA sense strand
caaccuaugaugugucuuc

SEQ ID NO: 184048 - RNA, 19 nt, Homo sapiens
  misc_RNA (1)...(19): siRNA sense strand
gagaacaaacgggaauaug

SEQ ID NO: 184049 - RNA, 19 nt, Homo sapiens
  misc_RNA (1)...(19): siRNA sense strand
ccuaugaugugucuuccau

SEQ ID NO: 184050 - RNA, 19 nt, Homo sapiens
  misc_RNA (1)...(19): siRNA sense strand
gaacccaaucccaauaguc

SEQ ID NO: 184051 - RNA, 19 nt, Homo sapiens
  misc_RNA (1)...(19): siRNA sense strand
gcagaugguaguauauguc

SEQ ID NO: 184052 - RNA, 19 nt, Homo sapiens
  misc_RNA (1)...(19): siRNA sense strand
ggaguccaaccuaugaugu

SEQ ID NO: 184053 - RNA, 19 nt, Homo sapiens
  misc_RNA (1)...(19): siRNA sense strand
ugucuuccauucuaacauc

SEQ ID NO: 184054 - RNA, 19 nt, Homo sapiens
  misc_RNA (1)...(19): siRNA sense strand
auucuaacauccauacagu

SEQ ID NO: 184055 - RNA, 19 nt, Homo sapiens
  misc_RNA (1)...(19): siRNA sense strand
gaauaugaaaagcguguuu

SEQ ID NO: 184056 - RNA, 19 nt, Homo sapiens
  misc_RNA (1)...(19): siRNA sense strand
ugaacccaaucccaauagu

SEQ ID NO: 184057 - RNA, 19 nt, Homo sapiens
  misc_RNA (1)...(19): siRNA sense strand
ccaauaguccagcaaacag

SEQ ID NO: 184058 - RNA, 19 nt, Homo sapiens
  misc_RNA (1)...(19): siRNA sense strand
gaacaaacgggaauaugaa

SEQ ID NO: 184059 - RNA, 19 nt, Homo sapiens
  misc_RNA (1)...(19): siRNA sense strand
gaugaacccaaucccaaua

SEQ ID NO: 184060 - RNA, 19 nt, Homo sapiens
  misc_RNA (1)...(19): siRNA sense strand
gcguguuucugcaauagua

SEQ ID NO: 184061 - RNA, 19 nt, Homo sapiens
  misc_RNA (1)...(19): siRNA sense strand
cuaugcagaugguaguaua

SEQ ID NO: 184062 - RNA, 19 nt, Homo sapiens
  misc_RNA (1)...(19): siRNA sense strand
gaugugucuuccauucuaa

SEQ ID NO: 184063 - RNA, 19 nt, Homo sapiens
  misc_RNA (1)...(19): siRNA sense strand
ugaugugucuuccauucua

SEQ ID NO: 184064 - RNA, 19 nt, Homo sapiens
  misc_RNA (1)...(19): siRNA sense strand
uaacauccauacagucucu

SEQ ID NO: 184065 - RNA, 19 nt, Homo sapiens
  misc_RNA (1)...(19): siRNA sense strand
agaacaaacgggaauauga

SEQ ID NO: 184066 - RNA, 19 nt, Homo sapiens
  misc_RNA (1)...(19): siRNA sense strand
uaugaugugucuuccauuc

SEQ ID NO: 184067 - RNA, 19 nt, Homo sapiens
  misc_RNA (1)...(19): siRNA sense strand
aaagcguguuucugcaaua

SEQ ID NO: 184068 - RNA, 19 nt, Homo sapiens
  misc_RNA (1)...(19): siRNA sense strand
ggagaacaaacgggaauau

SEQ ID NO: 184069 - RNA, 19 nt, Homo sapiens
  misc_RNA (1)...(19): siRNA sense strand
caaccuaugaugugucuuc

SEQ ID NO: 184070 - RNA, 19 nt, Homo sapiens
  misc_RNA (1)...(19): siRNA sense strand
gagaacaaacgggaauaug

SEQ ID NO: 184071 - RNA, 19 nt, Homo sapiens
  misc_RNA (1)...(19): siRNA sense strand
ccuaugaugugucuuccau

SEQ ID NO: 184072 - RNA, 19 nt, Homo sapiens
  misc_RNA (1)...(19): siRNA sense strand
gaacccaaucccaauaguc

SEQ ID NO: 184073 - RNA, 19 nt, Homo sapiens
  misc_RNA (1)...(19): siRNA sense strand
gcagaugguaguauauguc

SEQ ID NO: 184074 - RNA, 19 nt, Homo sapiens
  misc_RNA (1)...(19): siRNA sense strand
ggaguccaaccuaugaugu

SEQ ID NO: 184075 - RNA, 19 nt, Homo sapiens
  misc_RNA (1)...(19): siRNA sense strand
ugucuuccauucuaacauc

SEQ ID NO: 184076 - RNA, 19 nt, Homo sapiens
  misc_RNA (1)...(19): siRNA sense strand
auucuaacauccauacagu

SEQ ID NO: 184077 - RNA, 19 nt, Homo sapiens
  misc_RNA (1)...(19): siRNA sense strand
gaauaugaaaagcguguuu

SEQ ID NO: 184078 - RNA, 19 nt, Homo sapiens
  misc_RNA (1)...(19): siRNA sense strand
ugaacccaaucccaauagu

SEQ ID NO: 184079 - RNA, 19 nt, Homo sapiens
  misc_RNA (1)...(19): siRNA sense strand
ccaauaguccagcaaacag

SEQ ID NO: 184080 - RNA, 19 nt, Homo sapiens
  misc_RNA (1)...(19): siRNA sense strand
gaacaaagcuggaaugauu

SEQ ID NO: 184081 - RNA, 19 nt, Homo sapiens
  misc_RNA (1)...(19): siRNA sense strand
gcaguggaaugcaguuaua

SEQ ID NO: 184082 - RNA, 19 nt, Homo sapiens
  misc_RNA (1)...(19): siRNA sense strand
gguagcauauguuuagaua

SEQ ID NO: 184083 - RNA, 19 nt, Homo sapiens
  misc_RNA (1)...(19): siRNA sense strand
ggaaugcaguuauauuugg

SEQ ID NO: 184084 - RNA, 19 nt, Homo sapiens
  misc_RNA (1)...(19): siRNA sense strand
gcacagcuuuaucaggaaa

SEQ ID NO: 184085 - RNA, 19 nt, Homo sapiens
  misc_RNA (1)...(19): siRNA sense strand
uaacaucaauucagucucu

SEQ ID NO: 184086 - RNA, 19 nt, Homo sapiens
  misc_RNA (1)...(19): siRNA sense strand
caaacgagaauaugagaaa

SEQ ID NO: 184087 - RNA, 19 nt, Homo sapiens
  misc_RNA (1)...(19): siRNA sense strand
caaauaaaccaccaacugu

SEQ ID NO: 184088 - RNA, 19 nt, Homo sapiens
  misc_RNA (1)...(19): siRNA sense strand
gaugguagcauauguuuag

SEQ ID NO: 184089 - RNA, 19 nt, Homo sapiens
  misc_RNA (1)...(19): siRNA sense strand
aauaaaccaccaacuguua

SEQ ID NO: 184090 - RNA, 19 nt, Homo sapiens
  misc_RNA (1)...(19): siRNA sense strand
gaaugcaguuauauuugga

SEQ ID NO: 184091 - RNA, 19 nt, Homo sapiens
  misc_RNA (1)...(19): siRNA sense strand
guuuagauauccuucagaa

SEQ ID NO: 184092 - RNA, 19 nt, Homo sapiens
  misc_RNA (1)...(19): siRNA sense strand
ccaaauaaaccaccaacug

SEQ ID NO: 184093 - RNA, 19 nt, Homo sapiens
  misc_RNA (1)...(19): siRNA sense strand
guggaaugcaguuauauuu

SEQ ID NO: 184094 - RNA, 19 nt, Homo sapiens
  misc_RNA (1)...(19): siRNA sense strand
ccaaauguguaugcugaug

SEQ ID NO: 184095 - RNA, 19 nt, Homo sapiens
  misc_RNA (1)...(19): siRNA sense strand
uuagauauccuucagaauc

SEQ ID NO: 184096 - RNA, 19 nt, Homo sapiens
  misc_RNA (1)...(19): siRNA sense strand
ggaaaacaaacgagaauau

SEQ ID NO: 184097 - RNA, 19 nt, Homo sapiens
  misc_RNA (1)...(19): siRNA sense strand
aaauaaaccaccaacuguu

SEQ ID NO: 184098 - RNA, 19 nt, Homo sapiens
  misc_RNA (1)...(19): siRNA sense strand
ggaggcucaugcgggauuu

SEQ ID NO: 184099 - RNA, 19 nt, Homo sapiens
  misc_RNA (1)...(19): siRNA sense strand
gaguuucggccauuguuga

SEQ ID NO: 184100 - RNA, 19 nt, Homo sapiens
  misc_RNA (1)...(19): siRNA sense strand
aaacaaacgagaauaugag

SEQ ID NO: 184101 - RNA, 19 nt, Homo sapiens
  misc_RNA (1)...(19): siRNA sense strand
uagauauccuucagaaucg

SEQ ID NO: 184102 - RNA, 19 nt, Homo sapiens
  misc_RNA (1)...(19): siRNA sense strand
gaaaacaaacgagaauaug

SEQ ID NO: 184103 - RNA, 19 nt, Homo sapiens
  misc_RNA (1)...(19): siRNA sense strand
gaugguacuuuuaaacuag

SEQ ID NO: 184104 - RNA, 19 nt, Homo sapiens
  misc_RNA (1)...(19): siRNA sense strand
ccuaacaguccagccaaua

SEQ ID NO: 184105 - RNA, 19 nt, Homo sapiens
  misc_RNA (1)...(19): siRNA sense strand
uucagucucugcuggauga

SEQ ID NO: 184106 - RNA, 19 nt, Homo sapiens
  misc_RNA (1)...(19): siRNA sense strand
uggaaugcaguuauauuug

SEQ ID NO: 184107 - RNA, 19 nt, Homo sapiens
  misc_RNA (1)...(19): siRNA sense strand
gcugaugguagcauauguu

SEQ ID NO: 184108 - RNA, 19 nt, Homo sapiens
  misc_RNA (1)...(19): siRNA sense strand
aguuauauuuggaccagaa

SEQ ID NO: 184109 - RNA, 19 nt, Homo sapiens
  misc_RNA (1)...(19): siRNA sense strand
accaccaacuguuagguuu

SEQ ID NO: 184110 - RNA, 19 nt, Homo sapiens
  misc_RNA (1)...(19): siRNA sense strand
acaacaucaugcaguggaa

SEQ ID NO: 184111 - RNA, 19 nt, Homo sapiens
  misc_RNA (1)...(19): siRNA sense strand
ccaggcagcacagcuuuau

SEQ ID NO: 184112 - RNA, 19 nt, Homo sapiens
  misc_RNA (1)...(19): siRNA sense strand
gccaggcagcacagcuuua

SEQ ID NO: 184113 - RNA, 19 nt, Homo sapiens
  misc_RNA (1)...(19): siRNA sense strand
gaugaaccgaauccuaaca

SEQ ID NO: 184114 - RNA, 19 nt, Homo sapiens
  misc_RNA (1)...(19): siRNA sense strand
aaauguguaugcugauggu

SEQ ID NO: 184115 - RNA, 19 nt, Homo sapiens
  misc_RNA (1)...(19): siRNA sense strand
ugaaccgaauccuaacagu

SEQ ID NO: 184116 - RNA, 19 nt, Homo sapiens
  misc_RNA (1)...(19): siRNA sense strand
gcucaugcgggauuucaag

SEQ ID NO: 184117 - RNA, 19 nt, Homo sapiens
  misc_RNA (1)...(19): siRNA sense strand
aggcagcacagcuuuauca

SEQ ID NO: 184118 - RNA, 19 nt, Homo sapiens
  misc_RNA (1)...(19): siRNA sense strand
cuaacaguccagccaauag

SEQ ID NO: 184119 - RNA, 19 nt, Homo sapiens
  misc_RNA (1)...(19): siRNA sense strand
gagaauaugagaaaagagu

SEQ ID NO: 184120 - RNA, 19 nt, Homo sapiens
  misc_RNA (1)...(19): siRNA sense strand
cuacagacauagaggauuu

SEQ ID NO: 184121 - RNA, 19 nt, Homo sapiens
  misc_RNA (1)...(19): siRNA sense strand
gaaagcauuacacuguuua

SEQ ID NO: 184122 - RNA, 19 nt, Homo sapiens
  misc_RNA (1)...(19): siRNA sense strand
gaacucgaauggccuuguu

SEQ ID NO: 184123 - RNA, 19 nt, Homo sapiens
  misc_RNA (1)...(19): siRNA sense strand
gcaguuguguccuggcuaa

SEQ ID NO: 184124 - RNA, 19 nt, Homo sapiens
  misc_RNA (1)...(19): siRNA sense strand
gcagugccauugauaggaa

SEQ ID NO: 184125 - RNA, 19 nt, Homo sapiens
  misc_RNA (1)...(19): siRNA sense strand
ggagaacauuuauaaagag

SEQ ID NO: 184126 - RNA, 19 nt, Homo sapiens
  misc_RNA (1)...(19): siRNA sense strand
cagaagaaagaaagcauua

SEQ ID NO: 184127 - RNA, 19 nt, Homo sapiens
  misc_RNA (1)...(19): siRNA sense strand
auaaagaguugucuacaga

SEQ ID NO: 184128 - RNA, 19 nt, Homo sapiens
  misc_RNA (1)...(19): siRNA sense strand
gaagaaagaaagcauuaca

SEQ ID NO: 184129 - RNA, 19 nt, Homo sapiens
  misc_RNA (1)...(19): siRNA sense strand
aaagaaagcauuacacugu

SEQ ID NO: 184130 - RNA, 19 nt, Homo sapiens
  misc_RNA (1)...(19): siRNA sense strand
agaaagcauuacacuguuu

SEQ ID NO: 184131 - RNA, 19 nt, Homo sapiens
  misc_RNA (1)...(19): siRNA sense strand
gcucacgggcucugcuuua

SEQ ID NO: 184132 - RNA, 19 nt, Homo sapiens
  misc_RNA (1)...(19): siRNA sense strand
gggauuuguugcagaagaa

SEQ ID NO: 184133 - RNA, 19 nt, Homo sapiens
  misc_RNA (1)...(19): siRNA sense strand
ggacaggauccauaucaug

SEQ ID NO: 184134 - RNA, 19 nt, Homo sapiens
  misc_RNA (1)...(19): siRNA sense strand
gcagaagaaagaaagcauu

SEQ ID NO: 184135 - RNA, 19 nt, Homo sapiens
  misc_RNA (1)...(19): siRNA sense strand
gaagcggcaccauguacua

SEQ ID NO: 184136 - RNA, 19 nt, Homo sapiens
  misc_RNA (1)...(19): siRNA sense strand
gcauuacacuguuuaucca

SEQ ID NO: 184137 - RNA, 19 nt, Homo sapiens
  misc_RNA (1)...(19): siRNA sense strand
gggcucugcuuuaguguuc

SEQ ID NO: 184138 - RNA, 19 nt, Homo sapiens
  misc_RNA (1)...(19): siRNA sense strand
caucaagccaacucucaua

SEQ ID NO: 184139 - RNA, 19 nt, Homo sapiens
  misc_RNA (1)...(19): siRNA sense strand
caagccaacucucauaagg

SEQ ID NO: 184140 - RNA, 19 nt, Homo sapiens
  misc_RNA (1)...(19): siRNA sense strand
ccaguuuggagaacauuua

SEQ ID NO: 184141 - RNA, 19 nt, Homo sapiens
  misc_RNA (1)...(19): siRNA sense strand
uaaaagaugugaagguugu

SEQ ID NO: 184142 - RNA, 19 nt, Homo sapiens
  misc_RNA (1)...(19): siRNA sense strand
uauagaggguucuuuggau

SEQ ID NO: 184143 - RNA, 19 nt, Homo sapiens
  misc_RNA (1)...(19): siRNA sense strand
aagaaagcauuacacuguu

SEQ ID NO: 184144 - RNA, 19 nt, Homo sapiens
  misc_RNA (1)...(19): siRNA sense strand
uaaaucagaacucgaaugg

SEQ ID NO: 184145 - RNA, 19 nt, Homo sapiens
  misc_RNA (1)...(19): siRNA sense strand
uuaucaagcuaaugggauu

SEQ ID NO: 184146 - RNA, 19 nt, Homo sapiens
  misc_RNA (1)...(19): siRNA sense strand
guauagaggguucuuugga

SEQ ID NO: 184147 - RNA, 19 nt, Homo sapiens
  misc_RNA (1)...(19): siRNA sense strand
uauaaagaguugucuacag

SEQ ID NO: 184148 - RNA, 19 nt, Homo sapiens
  misc_RNA (1)...(19): siRNA sense strand
cauaaaagaugugaagguu

SEQ ID NO: 184149 - RNA, 19 nt, Homo sapiens
  misc_RNA (1)...(19): siRNA sense strand
uguccuggcuaaaucagaa

SEQ ID NO: 184150 - RNA, 19 nt, Homo sapiens
  misc_RNA (1)...(19): siRNA sense strand
gggacaggauccauaucau

SEQ ID NO: 184151 - RNA, 19 nt, Homo sapiens
  misc_RNA (1)...(19): siRNA sense strand
agaagcccauugacuggaa

SEQ ID NO: 184152 - RNA, 19 nt, Homo sapiens
  misc_RNA (1)...(19): siRNA sense strand
aaugggauuuguugcagaa

SEQ ID NO: 184153 - RNA, 19 nt, Homo sapiens
  misc_RNA (1)...(19): siRNA sense strand
agaggguucuuuggaugua

SEQ ID NO: 184154 - RNA, 19 nt, Homo sapiens
  misc_RNA (1)...(19): siRNA sense strand
cacgggcucugcuuuagug

SEQ ID NO: 184155 - RNA, 19 nt, Homo sapiens
  misc_RNA (1)...(19): siRNA sense strand
uaucauggaccuaaucaag

SEQ ID NO: 184156 - RNA, 19 nt, Homo sapiens
  misc_RNA (1)...(19): siRNA sense strand
gggaaaccguauuuuauca

SEQ ID NO: 184157 - RNA, 19 nt, Homo sapiens
  misc_RNA (1)...(19): siRNA sense strand
gcucaucccuccccuuugu

SEQ ID NO: 184158 - RNA, 19 nt, Homo sapiens
  misc_RNA (1)...(19): siRNA sense strand
gaauggccuuguuuucuug

SEQ ID NO: 184159 - RNA, 19 nt, Homo sapiens
  misc_RNA (1)...(19): siRNA sense strand
cgaauggccuuguuuucuu

SEQ ID NO: 184160 - RNA, 19 nt, Homo sapiens
  misc_RNA (1)...(19): siRNA sense strand
guuguguccuggcuaaauc

SEQ ID NO: 184161 - RNA, 19 nt, Homo sapiens
  misc_RNA (1)...(19): siRNA sense strand
gcucugcuuuaguguucaa

SEQ ID NO: 184162 - RNA, 19 nt, Homo sapiens
  misc_RNA (1)...(19): siRNA sense strand
gcuaaugggauuuguugca

SEQ ID NO: 184163 - RNA, 19 nt, Homo sapiens
  misc_RNA (1)...(19): siRNA sense strand
ggcuaaaucagaacucgaa

SEQ ID NO: 184164 - RNA, 19 nt, Homo sapiens
  misc_RNA (1)...(19): siRNA sense strand
aagcuaaugggauuuguug

SEQ ID NO: 184165 - RNA, 19 nt, Homo sapiens
  misc_RNA (1)...(19): siRNA sense strand
gaccggauccagaggaaca

SEQ ID NO: 184166 - RNA, 19 nt, Homo sapiens
  misc_RNA (1)...(19): siRNA sense strand
ggaguucgggaaaccguau

SEQ ID NO: 184167 - RNA, 19 nt, Homo sapiens
  misc_RNA (1)...(19): siRNA sense strand
gaaaccguauuuuaucaag

SEQ ID NO: 184168 - RNA, 19 nt, Homo sapiens
  misc_RNA (1)...(19): siRNA sense strand
cuuuggauguagacacuuu

SEQ ID NO: 184169 - RNA, 19 nt, Homo sapiens
  misc_RNA (1)...(19): siRNA sense strand
guguauagaggguucuuug

SEQ ID NO: 184170 - RNA, 19 nt, Homo sapiens
  misc_RNA (1)...(19): siRNA sense strand
ucauggaccuaaucaagcu

SEQ ID NO: 184171 - RNA, 19 nt, Homo sapiens
  misc_RNA (1)...(19): siRNA sense strand
gcugagugccgagcaguug

SEQ ID NO: 184172 - RNA, 19 nt, Homo sapiens
  misc_RNA (1)...(19): siRNA sense strand
uccuggccauggagauuua

SEQ ID NO: 184173 - RNA, 19 nt, Homo sapiens
  misc_RNA (1)...(19): siRNA sense strand
caagcuaaugggauuuguu

SEQ ID NO: 184174 - RNA, 19 nt, Homo sapiens
  misc_RNA (1)...(19): siRNA sense strand
agaaagaaagcauuacacu

SEQ ID NO: 184175 - RNA, 19 nt, Homo sapiens
  misc_RNA (1)...(19): siRNA sense strand
ugggauuuguugcagaaga

SEQ ID NO: 184176 - RNA, 19 nt, Homo sapiens
  misc_RNA (1)...(19): siRNA sense strand
gauguagacacuuuucaaa

SEQ ID NO: 184177 - RNA, 19 nt, Homo sapiens
  misc_RNA (1)...(19): siRNA sense strand
agacauagaggauuuuguu

SEQ ID NO: 184178 - RNA, 19 nt, Homo sapiens
  misc_RNA (1)...(19): siRNA sense strand
ggaagcggcaccauguacu

SEQ ID NO: 184179 - RNA, 19 nt, Homo sapiens
  misc_RNA (1)...(19): siRNA sense strand
auaggaagcggcaccaugu

SEQ ID NO: 184180 - RNA, 19 nt, Homo sapiens
  misc_RNA (1)...(19): siRNA sense strand
cuaaaucagaacucgaaug

SEQ ID NO: 184181 - RNA, 19 nt, Homo sapiens
  misc_RNA (1)...(19): siRNA sense strand
cauaucauggaccuaauca

SEQ ID NO: 184182 - RNA, 19 nt, Homo sapiens
  misc_RNA (1)...(19): siRNA sense strand
ggcaagaagcccauugacu

SEQ ID NO: 184183 - RNA, 19 nt, Homo sapiens
  misc_RNA (1)...(19): siRNA sense strand
cuacagacauagaggauuu

SEQ ID NO: 184184 - RNA, 19 nt, Homo sapiens
  misc_RNA (1)...(19): siRNA sense strand
gaaagcauuacacuguuua

SEQ ID NO: 184185 - RNA, 19 nt, Homo sapiens
  misc_RNA (1)...(19): siRNA sense strand
gaacucgaauggccuuguu

SEQ ID NO: 184186 - RNA, 19 nt, Homo sapiens
  misc_RNA (1)...(19): siRNA sense strand
gcaguuguguccuggcuaa

SEQ ID NO: 184187 - RNA, 19 nt, Homo sapiens
  misc_RNA (1)...(19): siRNA sense strand
gcagugccauugauaggaa

SEQ ID NO: 184188 - RNA, 19 nt, Homo sapiens
  misc_RNA (1)...(19): siRNA sense strand
ggagaacauuuauaaagag

SEQ ID NO: 184189 - RNA, 19 nt, Homo sapiens
  misc_RNA (1)...(19): siRNA sense strand
cagaagaaagaaagcauua

SEQ ID NO: 184190 - RNA, 19 nt, Homo sapiens
  misc_RNA (1)...(19): siRNA sense strand
auaaagaguugucuacaga

SEQ ID NO: 184191 - RNA, 19 nt, Homo sapiens
  misc_RNA (1)...(19): siRNA sense strand
gaagaaagaaagcauuaca

SEQ ID NO: 184192 - RNA, 19 nt, Homo sapiens
  misc_RNA (1)...(19): siRNA sense strand
aaagaaagcauuacacugu

SEQ ID NO: 184193 - RNA, 19 nt, Homo sapiens
  misc_RNA (1)...(19): siRNA sense strand
agaaagcauuacacuguuu

SEQ ID NO: 184194 - RNA, 19 nt, Homo sapiens
  misc_RNA (1)...(19): siRNA sense strand
gcucacgggcucugcuuua

SEQ ID NO: 184195 - RNA, 19 nt, Homo sapiens
  misc_RNA (1)...(19): siRNA sense strand
gggauuuguugcagaagaa

SEQ ID NO: 184196 - RNA, 19 nt, Homo sapiens
  misc_RNA (1)...(19): siRNA sense strand
ggacaggauccauaucaug

SEQ ID NO: 184197 - RNA, 19 nt, Homo sapiens
  misc_RNA (1)...(19): siRNA sense strand
gcagaagaaagaaagcauu

SEQ ID NO: 184198 - RNA, 19 nt, Homo sapiens
  misc_RNA (1)...(19): siRNA sense strand
gaagcggcaccauguacua

SEQ ID NO: 184199 - RNA, 19 nt, Homo sapiens
  misc_RNA (1)...(19): siRNA sense strand
gcauuacacuguuuaucca

SEQ ID NO: 184200 - RNA, 19 nt, Homo sapiens
  misc_RNA (1)...(19): siRNA sense strand
gggcucugcuuuaguguuc

SEQ ID NO: 184201 - RNA, 19 nt, Homo sapiens
  misc_RNA (1)...(19): siRNA sense strand
caucaagccaacucucaua

SEQ ID NO: 184202 - RNA, 19 nt, Homo sapiens
  misc_RNA (1)...(19): siRNA sense strand
caagccaacucucauaagg

SEQ ID NO: 184203 - RNA, 19 nt, Homo sapiens
  misc_RNA (1)...(19): siRNA sense strand
ccaguuuggagaacauuua

SEQ ID NO: 184204 - RNA, 19 nt, Homo sapiens
  misc_RNA (1)...(19): siRNA sense strand
uaaaagaugugaagguugu

SEQ ID NO: 184205 - RNA, 19 nt, Homo sapiens
  misc_RNA (1)...(19): siRNA sense strand
uauagaggguucuuuggau

SEQ ID NO: 184206 - RNA, 19 nt, Homo sapiens
  misc_RNA (1)...(19): siRNA sense strand
aagaaagcauuacacuguu

SEQ ID NO: 184207 - RNA, 19 nt, Homo sapiens
  misc_RNA (1)...(19): siRNA sense strand
uaaaucagaacucgaaugg

SEQ ID NO: 184208 - RNA, 19 nt, Homo sapiens
  misc_RNA (1)...(19): siRNA sense strand
uuaucaagcuaaugggauu

SEQ ID NO: 184209 - RNA, 19 nt, Homo sapiens
  misc_RNA (1)...(19): siRNA sense strand
guauagaggguucuuugga

SEQ ID NO: 184210 - RNA, 19 nt, Homo sapiens
  misc_RNA (1)...(19): siRNA sense strand
uauaaagaguugucuacag

SEQ ID NO: 184211 - RNA, 19 nt, Homo sapiens
  misc_RNA (1)...(19): siRNA sense strand
cauaaaagaugugaagguu

SEQ ID NO: 184212 - RNA, 19 nt, Homo sapiens
  misc_RNA (1)...(19): siRNA sense strand
uguccuggcuaaaucagaa

SEQ ID NO: 184213 - RNA, 19 nt, Homo sapiens
  misc_RNA (1)...(19): siRNA sense strand
gggacaggauccauaucau

SEQ ID NO: 184214 - RNA, 19 nt, Homo sapiens
  misc_RNA (1)...(19): siRNA sense strand
agaagcccauugacuggaa

SEQ ID NO: 184215 - RNA, 19 nt, Homo sapiens
  misc_RNA (1)...(19): siRNA sense strand
aaugggauuuguugcagaa

SEQ ID NO: 184216 - RNA, 19 nt, Homo sapiens
  misc_RNA (1)...(19): siRNA sense strand
agaggguucuuuggaugua

SEQ ID NO: 184217 - RNA, 19 nt, Homo sapiens
  misc_RNA (1)...(19): siRNA sense strand
cacgggcucugcuuuagug

SEQ ID NO: 184218 - RNA, 19 nt, Homo sapiens
  misc_RNA (1)...(19): siRNA sense strand
uaucauggaccuaaucaag

SEQ ID NO: 184219 - RNA, 19 nt, Homo sapiens
  misc_RNA (1)...(19): siRNA sense strand
gggaaaccguauuuuauca

SEQ ID NO: 184220 - RNA, 19 nt, Homo sapiens
  misc_RNA (1)...(19): siRNA sense strand
gcucaucccuccccuuugu

SEQ ID NO: 184221 - RNA, 19 nt, Homo sapiens
  misc_RNA (1)...(19): siRNA sense strand
gaauggccuuguuuucuug

SEQ ID NO: 184222 - RNA, 19 nt, Homo sapiens
  misc_RNA (1)...(19): siRNA sense strand
cgaauggccuuguuuucuu

SEQ ID NO: 184223 - RNA, 19 nt, Homo sapiens
  misc_RNA (1)...(19): siRNA sense strand
guuguguccuggcuaaauc

SEQ ID NO: 184224 - RNA, 19 nt, Homo sapiens
  misc_RNA (1)...(19): siRNA sense strand
gcucugcuuuaguguucaa

SEQ ID NO: 184225 - RNA, 19 nt, Homo sapiens
  misc_RNA (1)...(19): siRNA sense strand
gcuaaugggauuuguugca

SEQ ID NO: 184226 - RNA, 19 nt, Homo sapiens
  misc_RNA (1)...(19): siRNA sense strand
ggcuaaaucagaacucgaa

SEQ ID NO: 184227 - RNA, 19 nt, Homo sapiens
  misc_RNA (1)...(19): siRNA sense strand
aagcuaaugggauuuguug

SEQ ID NO: 184228 - RNA, 19 nt, Homo sapiens
  misc_RNA (1)...(19): siRNA sense strand
gaccggauccagaggaaca

SEQ ID NO: 184229 - RNA, 19 nt, Homo sapiens
  misc_RNA (1)...(19): siRNA sense strand
ggaguucgggaaaccguau

SEQ ID NO: 184230 - RNA, 19 nt, Homo sapiens
  misc_RNA (1)...(19): siRNA sense strand
gaaaccguauuuuaucaag

SEQ ID NO: 184231 - RNA, 19 nt, Homo sapiens
  misc_RNA (1)...(19): siRNA sense strand
cuuuggauguagacacuuu

SEQ ID NO: 184232 - RNA, 19 nt, Homo sapiens
  misc_RNA (1)...(19): siRNA sense strand
guguauagaggguucuuug

SEQ ID NO: 184233 - RNA, 19 nt, Homo sapiens
  misc_RNA (1)...(19): siRNA sense strand
ucauggaccuaaucaagcu

SEQ ID NO: 184234 - RNA, 19 nt, Homo sapiens
  misc_RNA (1)...(19): siRNA sense strand
gcugagugccgagcaguug

SEQ ID NO: 184235 - RNA, 19 nt, Homo sapiens
  misc_RNA (1)...(19): siRNA sense strand
uccuggccauggagauuua

SEQ ID NO: 184236 - RNA, 19 nt, Homo sapiens
  misc_RNA (1)...(19): siRNA sense strand
caagcuaaugggauuuguu

SEQ ID NO: 184237 - RNA, 19 nt, Homo sapiens
  misc_RNA (1)...(19): siRNA sense strand
agaaagaaagcauuacacu

SEQ ID NO: 184238 - RNA, 19 nt, Homo sapiens
  misc_RNA (1)...(19): siRNA sense strand
ugggauuuguugcagaaga

SEQ ID NO: 184239 - RNA, 19 nt, Homo sapiens
  misc_RNA (1)...(19): siRNA sense strand
gauguagacacuuuucaaa

SEQ ID NO: 184240 - RNA, 19 nt, Homo sapiens
  misc_RNA (1)...(19): siRNA sense strand
agacauagaggauuuuguu

SEQ ID NO: 184241 - RNA, 19 nt, Homo sapiens
  misc_RNA (1)...(19): siRNA sense strand
ggaagcggcaccauguacu

SEQ ID NO: 184242 - RNA, 19 nt, Homo sapiens
  misc_RNA (1)...(19): siRNA sense strand
auaggaagcggcaccaugu

SEQ ID NO: 184243 - RNA, 19 nt, Homo sapiens
  misc_RNA (1)...(19): siRNA sense strand
cuaaaucagaacucgaaug

SEQ ID NO: 184244 - RNA, 19 nt, Homo sapiens
  misc_RNA (1)...(19): siRNA sense strand
cauaucauggaccuaauca

SEQ ID NO: 184245 - RNA, 19 nt, Homo sapiens
  misc_RNA (1)...(19): siRNA sense strand
ggcaagaagcccauugacu

SEQ ID NO: 184246 - RNA, 19 nt, Homo sapiens
  misc_RNA (1)...(19): siRNA sense strand
gcugagcgcuuugcaauaa

SEQ ID NO: 184247 - RNA, 19 nt, Homo sapiens
  misc_RNA (1)...(19): siRNA sense strand
ggaaguggauggagcaguu

SEQ ID NO: 184248 - RNA, 19 nt, Homo sapiens
  misc_RNA (1)...(19): siRNA sense strand
caagaagucucacgggaaa

SEQ ID NO: 184249 - RNA, 19 nt, Homo sapiens
  misc_RNA (1)...(19): siRNA sense strand
ucacagaggccaagaaauu

SEQ ID NO: 184250 - RNA, 19 nt, Homo sapiens
  misc_RNA (1)...(19): siRNA sense strand
cagaagauaugaagaggaa

SEQ ID NO: 184251 - RNA, 19 nt, Homo sapiens
  misc_RNA (1)...(19): siRNA sense strand
gcaauaagcaucaaguuca

SEQ ID NO: 184252 - RNA, 19 nt, Homo sapiens
  misc_RNA (1)...(19): siRNA sense strand
gaaagucugccacgauaaa

SEQ ID NO: 184253 - RNA, 19 nt, Homo sapiens
  misc_RNA (1)...(19): siRNA sense strand
cauggcagcugucuucauu

SEQ ID NO: 184254 - RNA, 19 nt, Homo sapiens
  misc_RNA (1)...(19): siRNA sense strand
ccacagagaaugacgauga

SEQ ID NO: 184255 - RNA, 19 nt, Homo sapiens
  misc_RNA (1)...(19): siRNA sense strand
gcuacgagcucaaggagau

SEQ ID NO: 184256 - RNA, 19 nt, Homo sapiens
  misc_RNA (1)...(19): siRNA sense strand
gccaaggucuuccucgauu

SEQ ID NO: 184257 - RNA, 19 nt, Homo sapiens
  misc_RNA (1)...(19): siRNA sense strand
gagcugcuguuccacaaga

SEQ ID NO: 184258 - RNA, 19 nt, Homo sapiens
  misc_RNA (1)...(19): siRNA sense strand
cugaaagucugccacgaua

SEQ ID NO: 184259 - RNA, 19 nt, Homo sapiens
  misc_RNA (1)...(19): siRNA sense strand
caauaagcaucaaguucaa

SEQ ID NO: 184260 - RNA, 19 nt, Homo sapiens
  misc_RNA (1)...(19): siRNA sense strand
uggcagcugucuucauuaa

SEQ ID NO: 184261 - RNA, 19 nt, Homo sapiens
  misc_RNA (1)...(19): siRNA sense strand
ugcagagggugcucaaaua

SEQ ID NO: 184262 - RNA, 19 nt, Homo sapiens
  misc_RNA (1)...(19): siRNA sense strand
gcucaaagaagcacuggaa

SEQ ID NO: 184263 - RNA, 19 nt, Homo sapiens
  misc_RNA (1)...(19): siRNA sense strand
gugcagcagcccaugauua

SEQ ID NO: 184264 - RNA, 19 nt, Homo sapiens
  misc_RNA (1)...(19): siRNA sense strand
caacaaggacgucaagaag

SEQ ID NO: 184265 - RNA, 19 nt, Homo sapiens
  misc_RNA (1)...(19): siRNA sense strand
uggaggacauugagaagaa

SEQ ID NO: 184266 - RNA, 19 nt, Homo sapiens
  misc_RNA (1)...(19): siRNA sense strand
gaacaacaaggacgucaag

SEQ ID NO: 184267 - RNA, 19 nt, Homo sapiens
  misc_RNA (1)...(19): siRNA sense strand
ccacgauaaauuuggauua

SEQ ID NO: 184268 - RNA, 19 nt, Homo sapiens
  misc_RNA (1)...(19): siRNA sense strand
ccaaggucuuccucgauuu

SEQ ID NO: 184269 - RNA, 19 nt, Homo sapiens
  misc_RNA (1)...(19): siRNA sense strand
cggauuggcugguuuccuu

SEQ ID NO: 184270 - RNA, 19 nt, Homo sapiens
  misc_RNA (1)...(19): siRNA sense strand
ggaagccugugcugaccuu

SEQ ID NO: 184271 - RNA, 19 nt, Homo sapiens
  misc_RNA (1)...(19): siRNA sense strand
gaaacuggaggaauuugga

SEQ ID NO: 184272 - RNA, 19 nt, Homo sapiens
  misc_RNA (1)...(19): siRNA sense strand
aagugaaacuggaggaauu

SEQ ID NO: 184273 - RNA, 19 nt, Homo sapiens
  misc_RNA (1)...(19): siRNA sense strand
gaagauaugaagaggaagu

SEQ ID NO: 184274 - RNA, 19 nt, Homo sapiens
  misc_RNA (1)...(19): siRNA sense strand
cgauaaauuuggauuaagg

SEQ ID NO: 184275 - RNA, 19 nt, Homo sapiens
  misc_RNA (1)...(19): siRNA sense strand
acaaggacgucaagaaguc

SEQ ID NO: 184276 - RNA, 19 nt, Homo sapiens
  misc_RNA (1)...(19): siRNA sense strand
gggcaugacugaagaugac

SEQ ID NO: 184277 - RNA, 19 nt, Homo sapiens
  misc_RNA (1)...(19): siRNA sense strand
gugggagggucgucuggua

SEQ ID NO: 184278 - RNA, 19 nt, Homo sapiens
  misc_RNA (1)...(19): siRNA sense strand
aaacaucaagccagacaaa

SEQ ID NO: 184279 - RNA, 19 nt, Homo sapiens
  misc_RNA (1)...(19): siRNA sense strand
ggauggagcaguuugagau

SEQ ID NO: 184280 - RNA, 19 nt, Homo sapiens
  misc_RNA (1)...(19): siRNA sense strand
gaauuucagaguucuauag

SEQ ID NO: 184281 - RNA, 19 nt, Homo sapiens
  misc_RNA (1)...(19): siRNA sense strand
cagaggagaccacagagaa

SEQ ID NO: 184282 - RNA, 19 nt, Homo sapiens
  misc_RNA (1)...(19): siRNA sense strand
ucaaggugguggagaagga

SEQ ID NO: 184283 - RNA, 19 nt, Homo sapiens
  misc_RNA (1)...(19): siRNA sense strand
ccgcagaugucccaguuuc

SEQ ID NO: 184284 - RNA, 19 nt, Homo sapiens
  misc_RNA (1)...(19): siRNA sense strand
caucacagaggccaagaaa

SEQ ID NO: 184285 - RNA, 19 nt, Homo sapiens
  misc_RNA (1)...(19): siRNA sense strand
ccaccacaguuuccagaug

SEQ ID NO: 184286 - RNA, 19 nt, Homo sapiens
  misc_RNA (1)...(19): siRNA sense strand
gccgcuggcucaucgauug

SEQ ID NO: 184287 - RNA, 19 nt, Homo sapiens
  misc_RNA (1)...(19): siRNA sense strand
ggccgcagaugucccaguu

SEQ ID NO: 184288 - RNA, 19 nt, Homo sapiens
  misc_RNA (1)...(19): siRNA sense strand
acaccaagcaggacaggua

SEQ ID NO: 184289 - RNA, 19 nt, Homo sapiens
  misc_RNA (1)...(19): siRNA sense strand
gaaaguccgguccauaguc

SEQ ID NO: 184290 - RNA, 19 nt, Homo sapiens
  misc_RNA (1)...(19): siRNA sense strand
gagauggccaugucaaaca

SEQ ID NO: 184291 - RNA, 19 nt, Homo sapiens
  misc_RNA (1)...(19): siRNA sense strand
aaaguccgguccauaguca

SEQ ID NO: 184292 - RNA, 19 nt, Homo sapiens
  misc_RNA (1)...(19): siRNA sense strand
ggagugccuggaagugaua

SEQ ID NO: 184293 - RNA, 19 nt, Homo sapiens
  misc_RNA (1)...(19): siRNA sense strand
caccacaguuuccagaugu

SEQ ID NO: 184294 - RNA, 19 nt, Homo sapiens
  misc_RNA (1)...(19): siRNA sense strand
gguacuuguuccuguuuga

SEQ ID NO: 184295 - RNA, 19 nt, Homo sapiens
  misc_RNA (1)...(19): siRNA sense strand
agaccgaggccaaguacua

SEQ ID NO: 184296 - RNA, 19 nt, Homo sapiens
  misc_RNA (1)...(19): siRNA sense strand
ugguggccgugcagaauua

SEQ ID NO: 184297 - RNA, 19 nt, Homo sapiens
  misc_RNA (1)...(19): siRNA sense strand
aaacagaagauaugaagag

SEQ ID NO: 184298 - RNA, 19 nt, Homo sapiens
  misc_RNA (1)...(19): siRNA sense strand
ucaaauaccaccugcucuu

SEQ ID NO: 184299 - RNA, 19 nt, Homo sapiens
  misc_RNA (1)...(19): siRNA sense strand
ggacaccacacucaaguac

SEQ ID NO: 184300 - RNA, 19 nt, Homo sapiens
  misc_RNA (1)...(19): siRNA sense strand
ccuuugaccucuucgaugu

SEQ ID NO: 184301 - RNA, 19 nt, Homo sapiens
  misc_RNA (1)...(19): siRNA sense strand
ccucagggccucagcuuug

SEQ ID NO: 184302 - RNA, 19 nt, Homo sapiens
  misc_RNA (1)...(19): siRNA sense strand
uggaguugguggaguacua

SEQ ID NO: 184303 - RNA, 19 nt, Homo sapiens
  misc_RNA (1)...(19): siRNA sense strand
caaauaccaccugcucuug

SEQ ID NO: 184304 - RNA, 19 nt, Homo sapiens
  misc_RNA (1)...(19): siRNA sense strand
gcagcugucuucauuaacc

SEQ ID NO: 184305 - RNA, 19 nt, Homo sapiens
  misc_RNA (1)...(19): siRNA sense strand
cagcaucgcgcagaacaaa

SEQ ID NO: 184306 - RNA, 19 nt, Homo sapiens
  misc_RNA (1)...(19): siRNA sense strand
ugucccaguuucuguguuu

SEQ ID NO: 184307 - RNA, 19 nt, Homo sapiens
  misc_RNA (1)...(19): siRNA sense strand
caagaccaccaacugcaaa

SEQ ID NO: 184308 - RNA, 19 nt, Homo sapiens
  misc_RNA (1)...(19): siRNA sense strand
aauaccaccugcucuugaa

SEQ ID NO: 184309 - RNA, 19 nt, Homo sapiens
  misc_RNA (1)...(19): siRNA sense strand
gcagagggugcucaaauac

SEQ ID NO: 184310 - RNA, 19 nt, Homo sapiens
  misc_RNA (1)...(19): siRNA sense strand
aaaugggcaugacugaaga

SEQ ID NO: 184311 - RNA, 19 nt, Homo sapiens
  misc_RNA (1)...(19): siRNA sense strand
gaggagaccacagagaaug

SEQ ID NO: 184312 - RNA, 19 nt, Homo sapiens
  misc_RNA (1)...(19): siRNA sense strand
gaagaugacaagaggaacu

SEQ ID NO: 184313 - RNA, 19 nt, Homo sapiens
  misc_RNA (1)...(19): siRNA sense strand
gcugguuuccuucaacgua

SEQ ID NO: 184314 - RNA, 19 nt, Homo sapiens
  misc_RNA (1)...(19): siRNA sense strand
gagaccaacggacggauug

SEQ ID NO: 184315 - RNA, 19 nt, Homo sapiens
  misc_RNA (1)...(19): siRNA sense strand
cggacaaccugcucaaguc

SEQ ID NO: 184316 - RNA, 19 nt, Homo sapiens
  misc_RNA (1)...(19): siRNA sense strand
gggaggacuucaggcagaa

SEQ ID NO: 184317 - RNA, 19 nt, Homo sapiens
  misc_RNA (1)...(19): siRNA sense strand
acaucaaggugguggagaa

SEQ ID NO: 184318 - RNA, 19 nt, Homo sapiens
  misc_RNA (1)...(19): siRNA sense strand
gagaucgacuacacugcau

SEQ ID NO: 184319 - RNA, 19 nt, Homo sapiens
  misc_RNA (1)...(19): siRNA sense strand
cauacgcaccuuccugaaa

SEQ ID NO: 184320 - RNA, 19 nt, Homo sapiens
  misc_RNA (1)...(19): siRNA sense strand
cuaccuaauucaccuucaa

SEQ ID NO: 184321 - RNA, 19 nt, Homo sapiens
  misc_RNA (1)...(19): siRNA sense strand
caguuucuguguuugaaga

SEQ ID NO: 184322 - RNA, 19 nt, Homo sapiens
  misc_RNA (1)...(19): siRNA sense strand
ucagcgaauuucagaguuc

SEQ ID NO: 184323 - RNA, 19 nt, Homo sapiens
  misc_RNA (1)...(19): siRNA sense strand
gauuagauacaugcagaaa

SEQ ID NO: 184324 - RNA, 19 nt, Homo sapiens
  misc_RNA (1)...(19): siRNA sense strand
ccaggaagucaggguauuu

SEQ ID NO: 184325 - RNA, 19 nt, Homo sapiens
  misc_RNA (1)...(19): siRNA sense strand
gaaguggauggagcaguuu

SEQ ID NO: 184326 - RNA, 19 nt, Homo sapiens
  misc_RNA (1)...(19): siRNA sense strand
acaacaaggacgucaagaa

SEQ ID NO: 184327 - RNA, 19 nt, Homo sapiens
  misc_RNA (1)...(19): siRNA sense strand
gaucaucgagcugcuguuc

SEQ ID NO: 184328 - RNA, 19 nt, Homo sapiens
  misc_RNA (1)...(19): siRNA sense strand
cagcagcccaugauuagau

SEQ ID NO: 184329 - RNA, 19 nt, Homo sapiens
  misc_RNA (1)...(19): siRNA sense strand
gcaggacagguacuuguuc

SEQ ID NO: 184330 - RNA, 19 nt, Homo sapiens
  misc_RNA (1)...(19): siRNA sense strand
auacgcaccuuccugaaag

SEQ ID NO: 184331 - RNA, 19 nt, Homo sapiens
  misc_RNA (1)...(19): siRNA sense strand
cuacggcuucuaccuaauu

SEQ ID NO: 184332 - RNA, 19 nt, Homo sapiens
  misc_RNA (1)...(19): siRNA sense strand
ggacggauuggcugguuuc

SEQ ID NO: 184333 - RNA, 19 nt, Homo sapiens
  misc_RNA (1)...(19): siRNA sense strand
caacuuuucuuuucucagu

SEQ ID NO: 184334 - RNA, 19 nt, Homo sapiens
  misc_RNA (1)...(19): siRNA sense strand
ggacaacuggauccacauc

SEQ ID NO: 184335 - RNA, 19 nt, Homo sapiens
  misc_RNA (1)...(19): siRNA sense strand
agaggcagcagcucaaaga

SEQ ID NO: 184336 - RNA, 19 nt, Homo sapiens
  misc_RNA (1)...(19): siRNA sense strand
cgagauaugagggagcuuu

SEQ ID NO: 184337 - RNA, 19 nt, Homo sapiens
  misc_RNA (1)...(19): siRNA sense strand
ggagggucgucugguacaa

SEQ ID NO: 184338 - RNA, 19 nt, Homo sapiens
  misc_RNA (1)...(19): siRNA sense strand
acacaaggagugccuggaa

SEQ ID NO: 184339 - RNA, 19 nt, Homo sapiens
  misc_RNA (1)...(19): siRNA sense strand
agucugccacgauaaauuu

SEQ ID NO: 184340 - RNA, 19 nt, Homo sapiens
  misc_RNA (1)...(19): siRNA sense strand
ugaagaacauacgcaccuu

SEQ ID NO: 184341 - RNA, 19 nt, Homo sapiens
  misc_RNA (1)...(19): siRNA sense strand
gcaagugaaacuggaggaa

SEQ ID NO: 184342 - RNA, 19 nt, Homo sapiens
  misc_RNA (1)...(19): siRNA sense strand
gaugguggccgugcagaau

SEQ ID NO: 184343 - RNA, 19 nt, Homo sapiens
  misc_RNA (1)...(19): siRNA sense strand
gauguacacguuugacaag

SEQ ID NO: 184344 - RNA, 19 nt, Homo sapiens
  misc_RNA (1)...(19): siRNA sense strand
guucacuucuccugcagau

SEQ ID NO: 184345 - RNA, 19 nt, Homo sapiens
  misc_RNA (1)...(19): siRNA sense strand
ucacuucuccugcagaucu

SEQ ID NO: 184346 - RNA, 19 nt, Homo sapiens
  misc_RNA (1)...(19): siRNA sense strand
gcagaaagcucagcaggua

SEQ ID NO: 184347 - RNA, 19 nt, Homo sapiens
  misc_RNA (1)...(19): siRNA sense strand
ggaaauaucugcucugacu

SEQ ID NO: 184348 - RNA, 19 nt, Homo sapiens
  misc_RNA (1)...(19): siRNA sense strand
ugagauaauucguguguua

SEQ ID NO: 184349 - RNA, 19 nt, Homo sapiens
  misc_RNA (1)...(19): siRNA sense strand
gcagaugacugaucaagug

SEQ ID NO: 184350 - RNA, 19 nt, Homo sapiens
  misc_RNA (1)...(19): siRNA sense strand
gggaagagguauuugauga

SEQ ID NO: 184351 - RNA, 19 nt, Homo sapiens
  misc_RNA (1)...(19): siRNA sense strand
ccagacagcuccaugauga

SEQ ID NO: 184352 - RNA, 19 nt, Homo sapiens
  misc_RNA (1)...(19): siRNA sense strand
gcucguaucuuacuuagga

SEQ ID NO: 184353 - RNA, 19 nt, Homo sapiens
  misc_RNA (1)...(19): siRNA sense strand
caaagcagcuguacaccuu

SEQ ID NO: 184354 - RNA, 19 nt, Homo sapiens
  misc_RNA (1)...(19): siRNA sense strand
gagcgaaucccaaccauaa

SEQ ID NO: 184355 - RNA, 19 nt, Homo sapiens
  misc_RNA (1)...(19): siRNA sense strand
gauuagaaccaaccucuua

SEQ ID NO: 184356 - RNA, 19 nt, Homo sapiens
  misc_RNA (1)...(19): siRNA sense strand
gaagagguauuugaugaga

SEQ ID NO: 184357 - RNA, 19 nt, Homo sapiens
  misc_RNA (1)...(19): siRNA sense strand
ccacagagaugcugguuca

SEQ ID NO: 184358 - RNA, 19 nt, Homo sapiens
  misc_RNA (1)...(19): siRNA sense strand
uggaagauuuggucacuua

SEQ ID NO: 184359 - RNA, 19 nt, Homo sapiens
  misc_RNA (1)...(19): siRNA sense strand
uaucugcucugacuucuaa

SEQ ID NO: 184360 - RNA, 19 nt, Homo sapiens
  misc_RNA (1)...(19): siRNA sense strand
ugacuaagauggccaagau

SEQ ID NO: 184361 - RNA, 19 nt, Homo sapiens
  misc_RNA (1)...(19): siRNA sense strand
gccaagcagugcacagaua

SEQ ID NO: 184362 - RNA, 19 nt, Homo sapiens
  misc_RNA (1)...(19): siRNA sense strand
ucgaacagaugcuggauuu

SEQ ID NO: 184363 - RNA, 19 nt, Homo sapiens
  misc_RNA (1)...(19): siRNA sense strand
gagggcagcuaacuuugaa

SEQ ID NO: 184364 - RNA, 19 nt, Homo sapiens
  misc_RNA (1)...(19): siRNA sense strand
uaaauuagcagaucuacga

SEQ ID NO: 184365 - RNA, 19 nt, Homo sapiens
  misc_RNA (1)...(19): siRNA sense strand
gaacaacuccgacuaacag

SEQ ID NO: 184366 - RNA, 19 nt, Homo sapiens
  misc_RNA (1)...(19): siRNA sense strand
ggaaaaggaugaagaguuc

SEQ ID NO: 184367 - RNA, 19 nt, Homo sapiens
  misc_RNA (1)...(19): siRNA sense strand
ccaaggagguugccaagca

SEQ ID NO: 184368 - RNA, 19 nt, Homo sapiens
  misc_RNA (1)...(19): siRNA sense strand
caagaugauugacgagaga

SEQ ID NO: 184369 - RNA, 19 nt, Homo sapiens
  misc_RNA (1)...(19): siRNA sense strand
gaaagcugccucugaugaa

SEQ ID NO: 184370 - RNA, 19 nt, Homo sapiens
  misc_RNA (1)...(19): siRNA sense strand
gcgcauggcucugcugaug

SEQ ID NO: 184371 - RNA, 19 nt, Homo sapiens
  misc_RNA (1)...(19): siRNA sense strand
ugaugaagcucgcaaaugg

SEQ ID NO: 184372 - RNA, 19 nt, Homo sapiens
  misc_RNA (1)...(19): siRNA sense strand
uaacagggaagagguauuu

SEQ ID NO: 184373 - RNA, 19 nt, Homo sapiens
  misc_RNA (1)...(19): siRNA sense strand
agagggagguggagaauuc

SEQ ID NO: 184374 - RNA, 19 nt, Homo sapiens
  misc_RNA (1)...(19): siRNA sense strand
gaacagaugcuggauuuac

SEQ ID NO: 184375 - RNA, 19 nt, Homo sapiens
  misc_RNA (1)...(19): siRNA sense strand
caucagaccugcuccuuac

SEQ ID NO: 184376 - RNA, 19 nt, Homo sapiens
  misc_RNA (1)...(19): siRNA sense strand
gcauagaggaagcuuuaaa

SEQ ID NO: 184377 - RNA, 19 nt, Homo sapiens
  misc_RNA (1)...(19): siRNA sense strand
ugagagggcagcuaacuuu

SEQ ID NO: 184378 - RNA, 19 nt, Homo sapiens
  misc_RNA (1)...(19): siRNA sense strand
ggaaggagaagagcagauu

SEQ ID NO: 184379 - RNA, 19 nt, Homo sapiens
  misc_RNA (1)...(19): siRNA sense strand
acacugcgcuggguuagaa

SEQ ID NO: 184380 - RNA, 19 nt, Homo sapiens
  misc_RNA (1)...(19): siRNA sense strand
cagcauuuauuaagguuga

SEQ ID NO: 184381 - RNA, 19 nt, Homo sapiens
  misc_RNA (1)...(19): siRNA sense strand
uuagaaagacucccuggua

SEQ ID NO: 184382 - RNA, 19 nt, Homo sapiens
  misc_RNA (1)...(19): siRNA sense strand
gugcacagauaaacggauu

SEQ ID NO: 184383 - RNA, 19 nt, Homo sapiens
  misc_RNA (1)...(19): siRNA sense strand
gcagagcauugcaaagaag

SEQ ID NO: 184384 - RNA, 19 nt, Homo sapiens
  misc_RNA (1)...(19): siRNA sense strand
gauaauucguguguuacaa

SEQ ID NO: 184385 - RNA, 19 nt, Homo sapiens
  misc_RNA (1)...(19): siRNA sense strand
gugcugaaauuaaugagau

SEQ ID NO: 184386 - RNA, 19 nt, Homo sapiens
  misc_RNA (1)...(19): siRNA sense strand
gugauuaaccagccaauga

SEQ ID NO: 184387 - RNA, 19 nt, Homo sapiens
  misc_RNA (1)...(19): siRNA sense strand
uggagacuauggaagauuu

SEQ ID NO: 184388 - RNA, 19 nt, Homo sapiens
  misc_RNA (1)...(19): siRNA sense strand
acagauaaacggauuagaa

SEQ ID NO: 184389 - RNA, 19 nt, Homo sapiens
  misc_RNA (1)...(19): siRNA sense strand
caaagcagagcauugcaaa

SEQ ID NO: 184390 - RNA, 19 nt, Homo sapiens
  misc_RNA (1)...(19): siRNA sense strand
uauuagaguuugcaaagga

SEQ ID NO: 184391 - RNA, 19 nt, Homo sapiens
  misc_RNA (1)...(19): siRNA sense strand
gaucgaugcugcucagaac

SEQ ID NO: 184392 - RNA, 19 nt, Homo sapiens
  misc_RNA (1)...(19): siRNA sense strand
gcugagguccguaaaauua

SEQ ID NO: 184393 - RNA, 19 nt, Homo sapiens
  misc_RNA (1)...(19): siRNA sense strand
cagagaugcugguucacaa

SEQ ID NO: 184394 - RNA, 19 nt, Homo sapiens
  misc_RNA (1)...(19): siRNA sense strand
caggaagugucagauguuu

SEQ ID NO: 184395 - RNA, 19 nt, Homo sapiens
  misc_RNA (1)...(19): siRNA sense strand
ggccaggaaugacuaagau

SEQ ID NO: 184396 - RNA, 19 nt, Homo sapiens
  misc_RNA (1)...(19): siRNA sense strand
guggaucgauaauguugaa

SEQ ID NO: 184397 - RNA, 19 nt, Homo sapiens
  misc_RNA (1)...(19): siRNA sense strand
caacucccaucaagcuguu

SEQ ID NO: 184398 - RNA, 19 nt, Homo sapiens
  misc_RNA (1)...(19): siRNA sense strand
gagcaggccaucagacaga

SEQ ID NO: 184399 - RNA, 19 nt, Homo sapiens
  misc_RNA (1)...(19): siRNA sense strand
gaacaccgugaaagaguug

SEQ ID NO: 184400 - RNA, 19 nt, Homo sapiens
  misc_RNA (1)...(19): siRNA sense strand
cauccucucuggaacauca

SEQ ID NO: 184401 - RNA, 19 nt, Homo sapiens
  misc_RNA (1)...(19): siRNA sense strand
gaaaagagacuguucaaac

SEQ ID NO: 184402 - RNA, 19 nt, Homo sapiens
  misc_RNA (1)...(19): siRNA sense strand
caccagaccuugaacaacu

SEQ ID NO: 184403 - RNA, 19 nt, Homo sapiens
  misc_RNA (1)...(19): siRNA sense strand
ugaaagcugccucugauga

SEQ ID NO: 184404 - RNA, 19 nt, Homo sapiens
  misc_RNA (1)...(19): siRNA sense strand
uaggaacccuggaaaucaa

SEQ ID NO: 184405 - RNA, 19 nt, Homo sapiens
  misc_RNA (1)...(19): siRNA sense strand
gguugguacugcuaauaaa

SEQ ID NO: 184406 - RNA, 19 nt, Homo sapiens
  misc_RNA (1)...(19): siRNA sense strand
caucgucuggcuaauguua

SEQ ID NO: 184407 - RNA, 19 nt, Homo sapiens
  misc_RNA (1)...(19): siRNA sense strand
gcaaagaacgcagggagau

SEQ ID NO: 184408 - RNA, 19 nt, Homo sapiens
  misc_RNA (1)...(19): siRNA sense strand
uaagauggccaagaugauu

SEQ ID NO: 184409 - RNA, 19 nt, Homo sapiens
  misc_RNA (1)...(19): siRNA sense strand
aggcauagaggaagcuuua

SEQ ID NO: 184410 - RNA, 19 nt, Homo sapiens
  misc_RNA (1)...(19): siRNA sense strand
aagaaccaguggaucgaua

SEQ ID NO: 184411 - RNA, 19 nt, Homo sapiens
  misc_RNA (1)...(19): siRNA sense strand
gaacuggcuugcagaucca

SEQ ID NO: 184412 - RNA, 19 nt, Homo sapiens
  misc_RNA (1)...(19): siRNA sense strand
gagcauuggccuccauaga

SEQ ID NO: 184413 - RNA, 19 nt, Homo sapiens
  misc_RNA (1)...(19): siRNA sense strand
gcugauggcugagaugucu

SEQ ID NO: 184414 - RNA, 19 nt, Homo sapiens
  misc_RNA (1)...(19): siRNA sense strand
caacuccgacuaacagaug

SEQ ID NO: 184415 - RNA, 19 nt, Homo sapiens
  misc_RNA (1)...(19): siRNA sense strand
ugugaaagcugccucugau

SEQ ID NO: 184416 - RNA, 19 nt, Homo sapiens
  misc_RNA (1)...(19): siRNA sense strand
ggcaucgucuggcuaaugu

SEQ ID NO: 184417 - RNA, 19 nt, Homo sapiens
  misc_RNA (1)...(19): siRNA sense strand
gcagaauuaugugaugauc

SEQ ID NO: 184418 - RNA, 19 nt, Homo sapiens
  misc_RNA (1)...(19): siRNA sense strand
cagaggugguggagacuau

SEQ ID NO: 184419 - RNA, 19 nt, Homo sapiens
  misc_RNA (1)...(19): siRNA sense strand
ccaagcagugcacagauaa

SEQ ID NO: 184420 - RNA, 19 nt, Homo sapiens
  misc_RNA (1)...(19): siRNA sense strand
caaaagcuguggcuggaaa

SEQ ID NO: 184421 - RNA, 19 nt, Homo sapiens
  misc_RNA (1)...(19): siRNA sense strand
ggauccugcugguggcuaa

SEQ ID NO: 184422 - RNA, 19 nt, Homo sapiens
  misc_RNA (1)...(19): siRNA sense strand
cacgagcacuugcaucuca

SEQ ID NO: 184423 - RNA, 19 nt, Homo sapiens
  misc_RNA (1)...(19): siRNA sense strand
ugcucugacuucuaaauua

SEQ ID NO: 184424 - RNA, 19 nt, Homo sapiens
  misc_RNA (1)...(19): siRNA sense strand
uccauagacuccaaacuga

SEQ ID NO: 184425 - RNA, 19 nt, Homo sapiens
  misc_RNA (1)...(19): siRNA sense strand
ugaacaccgugaaagaguu

SEQ ID NO: 184426 - RNA, 19 nt, Homo sapiens
  misc_RNA (1)...(19): siRNA sense strand
caaaccaccucugccugaa

SEQ ID NO: 184427 - RNA, 19 nt, Homo sapiens
  misc_RNA (1)...(19): siRNA sense strand
ggccaugacucaggaagug

SEQ ID NO: 184428 - RNA, 19 nt, Homo sapiens
  misc_RNA (1)...(19): siRNA sense strand
gggagauucugggaacuug

SEQ ID NO: 184429 - RNA, 19 nt, Homo sapiens
  misc_RNA (1)...(19): siRNA sense strand
gcauuggccuccauagacu

SEQ ID NO: 184430 - RNA, 19 nt, Homo sapiens
  misc_RNA (1)...(19): siRNA sense strand
uguuacaacucaccucuug

SEQ ID NO: 184431 - RNA, 19 nt, Homo sapiens
  misc_RNA (1)...(19): siRNA sense strand
uagcagaauuaugugauga

SEQ ID NO: 184432 - RNA, 19 nt, Homo sapiens
  misc_RNA (1)...(19): siRNA sense strand
gauaaacggauuagaacca

SEQ ID NO: 184433 - RNA, 19 nt, Homo sapiens
  misc_RNA (1)...(19): siRNA sense strand
ccaggcagcucagaugcuu

SEQ ID NO: 184434 - RNA, 19 nt, Homo sapiens
  misc_RNA (1)...(19): siRNA sense strand
cgaagccauugauaccaaa

SEQ ID NO: 184435 - RNA, 19 nt, Homo sapiens
  misc_RNA (1)...(19): siRNA sense strand
ugaacucugugcaggcaaa

SEQ ID NO: 184436 - RNA, 19 nt, Homo sapiens
  misc_RNA (1)...(19): siRNA sense strand
ggucucggcugcucguauc

SEQ ID NO: 184437 - RNA, 19 nt, Homo sapiens
  misc_RNA (1)...(19): siRNA sense strand
gugaugauccuaaagaaag

SEQ ID NO: 184438 - RNA, 19 nt, Homo sapiens
  misc_RNA (1)...(19): siRNA sense strand
uagggcagaugacugauca

SEQ ID NO: 184439 - RNA, 19 nt, Homo sapiens
  misc_RNA (1)...(19): siRNA sense strand
gaaagacucccugguacca

SEQ ID NO: 184440 - RNA, 19 nt, Homo sapiens
  misc_RNA (1)...(19): siRNA sense strand
cauaagcacccagcucaaa

SEQ ID NO: 184441 - RNA, 19 nt, Homo sapiens
  misc_RNA (1)...(19): siRNA sense strand
ccaccagcauuuauuaagg

SEQ ID NO: 184442 - RNA, 19 nt, Homo sapiens
  misc_RNA (1)...(19): siRNA sense strand
gcuccaagacuccuuaaag

SEQ ID NO: 184443 - RNA, 19 nt, Homo sapiens
  misc_RNA (1)...(19): siRNA sense strand
uagcagaucuacgaagaca

SEQ ID NO: 184444 - RNA, 19 nt, Homo sapiens
  misc_RNA (1)...(19): siRNA sense strand
aagcagagcauugcaaaga

SEQ ID NO: 184445 - RNA, 19 nt, Homo sapiens
  misc_RNA (1)...(19): siRNA sense strand
uaccacaacucccaucaag

SEQ ID NO: 184446 - RNA, 19 nt, Homo sapiens
  misc_RNA (1)...(19): siRNA sense strand
gcagaaagcucagcaggua

SEQ ID NO: 184447 - RNA, 19 nt, Homo sapiens
  misc_RNA (1)...(19): siRNA sense strand
ggaaauaucugcucugacu

SEQ ID NO: 184448 - RNA, 19 nt, Homo sapiens
  misc_RNA (1)...(19): siRNA sense strand
ugagauaauucguguguua

SEQ ID NO: 184449 - RNA, 19 nt, Homo sapiens
  misc_RNA (1)...(19): siRNA sense strand
gcagaugacugaucaagug

SEQ ID NO: 184450 - RNA, 19 nt, Homo sapiens
  misc_RNA (1)...(19): siRNA sense strand
gggaagagguauuugauga

SEQ ID NO: 184451 - RNA, 19 nt, Homo sapiens
  misc_RNA (1)...(19): siRNA sense strand
ccagacagcuccaugauga

SEQ ID NO: 184452 - RNA, 19 nt, Homo sapiens
  misc_RNA (1)...(19): siRNA sense strand
gcucguaucuuacuuagga

SEQ ID NO: 184453 - RNA, 19 nt, Homo sapiens
  misc_RNA (1)...(19): siRNA sense strand
caaagcagcuguacaccuu

SEQ ID NO: 184454 - RNA, 19 nt, Homo sapiens
  misc_RNA (1)...(19): siRNA sense strand
gagcgaaucccaaccauaa

SEQ ID NO: 184455 - RNA, 19 nt, Homo sapiens
  misc_RNA (1)...(19): siRNA sense strand
gauuagaaccaaccucuua

SEQ ID NO: 184456 - RNA, 19 nt, Homo sapiens
  misc_RNA (1)...(19): siRNA sense strand
gaagagguauuugaugaga

SEQ ID NO: 184457 - RNA, 19 nt, Homo sapiens
  misc_RNA (1)...(19): siRNA sense strand
ccacagagaugcugguuca

SEQ ID NO: 184458 - RNA, 19 nt, Homo sapiens
  misc_RNA (1)...(19): siRNA sense strand
uggaagauuuggucacuua

SEQ ID NO: 184459 - RNA, 19 nt, Homo sapiens
  misc_RNA (1)...(19): siRNA sense strand
uaucugcucugacuucuaa

SEQ ID NO: 184460 - RNA, 19 nt, Homo sapiens
  misc_RNA (1)...(19): siRNA sense strand
ugacuaagauggccaagau

SEQ ID NO: 184461 - RNA, 19 nt, Homo sapiens
  misc_RNA (1)...(19): siRNA sense strand
gccaagcagugcacagaua

SEQ ID NO: 184462 - RNA, 19 nt, Homo sapiens
  misc_RNA (1)...(19): siRNA sense strand
ucgaacagaugcuggauuu

SEQ ID NO: 184463 - RNA, 19 nt, Homo sapiens
  misc_RNA (1)...(19): siRNA sense strand
gagggcagcuaacuuugaa

SEQ ID NO: 184464 - RNA, 19 nt, Homo sapiens
  misc_RNA (1)...(19): siRNA sense strand
uaaauuagcagaucuacga

SEQ ID NO: 184465 - RNA, 19 nt, Homo sapiens
  misc_RNA (1)...(19): siRNA sense strand
gaacaacuccgacuaacag

SEQ ID NO: 184466 - RNA, 19 nt, Homo sapiens
  misc_RNA (1)...(19): siRNA sense strand
ggaaaaggaugaagaguuc

SEQ ID NO: 184467 - RNA, 19 nt, Homo sapiens
  misc_RNA (1)...(19): siRNA sense strand
ccaaggagguugccaagca

SEQ ID NO: 184468 - RNA, 19 nt, Homo sapiens
  misc_RNA (1)...(19): siRNA sense strand
caagaugauugacgagaga

SEQ ID NO: 184469 - RNA, 19 nt, Homo sapiens
  misc_RNA (1)...(19): siRNA sense strand
gaaagcugccucugaugaa

SEQ ID NO: 184470 - RNA, 19 nt, Homo sapiens
  misc_RNA (1)...(19): siRNA sense strand
gcgcauggcucugcugaug

SEQ ID NO: 184471 - RNA, 19 nt, Homo sapiens
  misc_RNA (1)...(19): siRNA sense strand
ugaugaagcucgcaaaugg

SEQ ID NO: 184472 - RNA, 19 nt, Homo sapiens
  misc_RNA (1)...(19): siRNA sense strand
uaacagggaagagguauuu

SEQ ID NO: 184473 - RNA, 19 nt, Homo sapiens
  misc_RNA (1)...(19): siRNA sense strand
agagggagguggagaauuc

SEQ ID NO: 184474 - RNA, 19 nt, Homo sapiens
  misc_RNA (1)...(19): siRNA sense strand
gaacagaugcuggauuuac

SEQ ID NO: 184475 - RNA, 19 nt, Homo sapiens
  misc_RNA (1)...(19): siRNA sense strand
caucagaccugcuccuuac

SEQ ID NO: 184476 - RNA, 19 nt, Homo sapiens
  misc_RNA (1)...(19): siRNA sense strand
gcauagaggaagcuuuaaa

SEQ ID NO: 184477 - RNA, 19 nt, Homo sapiens
  misc_RNA (1)...(19): siRNA sense strand
ugagagggcagcuaacuuu

SEQ ID NO: 184478 - RNA, 19 nt, Homo sapiens
  misc_RNA (1)...(19): siRNA sense strand
ggaaggagaagagcagauu

SEQ ID NO: 184479 - RNA, 19 nt, Homo sapiens
  misc_RNA (1)...(19): siRNA sense strand
acacugcgcuggguuagaa

SEQ ID NO: 184480 - RNA, 19 nt, Homo sapiens
  misc_RNA (1)...(19): siRNA sense strand
cagcauuuauuaagguuga

SEQ ID NO: 184481 - RNA, 19 nt, Homo sapiens
  misc_RNA (1)...(19): siRNA sense strand
uuagaaagacucccuggua

SEQ ID NO: 184482 - RNA, 19 nt, Homo sapiens
  misc_RNA (1)...(19): siRNA sense strand
gugcacagauaaacggauu

SEQ ID NO: 184483 - RNA, 19 nt, Homo sapiens
  misc_RNA (1)...(19): siRNA sense strand
gcagagcauugcaaagaag

SEQ ID NO: 184484 - RNA, 19 nt, Homo sapiens
  misc_RNA (1)...(19): siRNA sense strand
gauaauucguguguuacaa

SEQ ID NO: 184485 - RNA, 19 nt, Homo sapiens
  misc_RNA (1)...(19): siRNA sense strand
gugcugaaauuaaugagau

SEQ ID NO: 184486 - RNA, 19 nt, Homo sapiens
  misc_RNA (1)...(19): siRNA sense strand
gugauuaaccagccaauga

SEQ ID NO: 184487 - RNA, 19 nt, Homo sapiens
  misc_RNA (1)...(19): siRNA sense strand
uggagacuauggaagauuu

SEQ ID NO: 184488 - RNA, 19 nt, Homo sapiens
  misc_RNA (1)...(19): siRNA sense strand
acagauaaacggauuagaa

SEQ ID NO: 184489 - RNA, 19 nt, Homo sapiens
  misc_RNA (1)...(19): siRNA sense strand
caaagcagagcauugcaaa

SEQ ID NO: 184490 - RNA, 19 nt, Homo sapiens
  misc_RNA (1)...(19): siRNA sense strand
uauuagaguuugcaaagga

SEQ ID NO: 184491 - RNA, 19 nt, Homo sapiens
  misc_RNA (1)...(19): siRNA sense strand
gaucgaugcugcucagaac

SEQ ID NO: 184492 - RNA, 19 nt, Homo sapiens
  misc_RNA (1)...(19): siRNA sense strand
gcugagguccguaaaauua

SEQ ID NO: 184493 - RNA, 19 nt, Homo sapiens
  misc_RNA (1)...(19): siRNA sense strand
cagagaugcugguucacaa

SEQ ID NO: 184494 - RNA, 19 nt, Homo sapiens
  misc_RNA (1)...(19): siRNA sense strand
caggaagugucagauguuu

SEQ ID NO: 184495 - RNA, 19 nt, Homo sapiens
  misc_RNA (1)...(19): siRNA sense strand
ggccaggaaugacuaagau

SEQ ID NO: 184496 - RNA, 19 nt, Homo sapiens
  misc_RNA (1)...(19): siRNA sense strand
guggaucgauaauguugaa

SEQ ID NO: 184497 - RNA, 19 nt, Homo sapiens
  misc_RNA (1)...(19): siRNA sense strand
caacucccaucaagcuguu

SEQ ID NO: 184498 - RNA, 19 nt, Homo sapiens
  misc_RNA (1)...(19): siRNA sense strand
gagcaggccaucagacaga

SEQ ID NO: 184499 - RNA, 19 nt, Homo sapiens
  misc_RNA (1)...(19): siRNA sense strand
gaacaccgugaaagaguug

SEQ ID NO: 184500 - RNA, 19 nt, Homo sapiens
  misc_RNA (1)...(19): siRNA sense strand
cauccucucuggaacauca

SEQ ID NO: 184501 - RNA, 19 nt, Homo sapiens
  misc_RNA (1)...(19): siRNA sense strand
gaaaagagacuguucaaac

SEQ ID NO: 184502 - RNA, 19 nt, Homo sapiens
  misc_RNA (1)...(19): siRNA sense strand
caccagaccuugaacaacu

SEQ ID NO: 184503 - RNA, 19 nt, Homo sapiens
  misc_RNA (1)...(19): siRNA sense strand
ugaaagcugccucugauga

SEQ ID NO: 184504 - RNA, 19 nt, Homo sapiens
  misc_RNA (1)...(19): siRNA sense strand
uaggaacccuggaaaucaa

SEQ ID NO: 184505 - RNA, 19 nt, Homo sapiens
  misc_RNA (1)...(19): siRNA sense strand
gguugguacugcuaauaaa

SEQ ID NO: 184506 - RNA, 19 nt, Homo sapiens
  misc_RNA (1)...(19): siRNA sense strand
caucgucuggcuaauguua

SEQ ID NO: 184507 - RNA, 19 nt, Homo sapiens
  misc_RNA (1)...(19): siRNA sense strand
gcaaagaacgcagggagau

SEQ ID NO: 184508 - RNA, 19 nt, Homo sapiens
  misc_RNA (1)...(19): siRNA sense strand
uaagauggccaagaugauu

SEQ ID NO: 184509 - RNA, 19 nt, Homo sapiens
  misc_RNA (1)...(19): siRNA sense strand
aggcauagaggaagcuuua

SEQ ID NO: 184510 - RNA, 19 nt, Homo sapiens
  misc_RNA (1)...(19): siRNA sense strand
aagaaccaguggaucgaua

SEQ ID NO: 184511 - RNA, 19 nt, Homo sapiens
  misc_RNA (1)...(19): siRNA sense strand
gaacuggcuugcagaucca

SEQ ID NO: 184512 - RNA, 19 nt, Homo sapiens
  misc_RNA (1)...(19): siRNA sense strand
gagcauuggccuccauaga

SEQ ID NO: 184513 - RNA, 19 nt, Homo sapiens
  misc_RNA (1)...(19): siRNA sense strand
gcugauggcugagaugucu

SEQ ID NO: 184514 - RNA, 19 nt, Homo sapiens
  misc_RNA (1)...(19): siRNA sense strand
caacuccgacuaacagaug

SEQ ID NO: 184515 - RNA, 19 nt, Homo sapiens
  misc_RNA (1)...(19): siRNA sense strand
ugugaaagcugccucugau

SEQ ID NO: 184516 - RNA, 19 nt, Homo sapiens
  misc_RNA (1)...(19): siRNA sense strand
ggcaucgucuggcuaaugu

SEQ ID NO: 184517 - RNA, 19 nt, Homo sapiens
  misc_RNA (1)...(19): siRNA sense strand
gcagaauuaugugaugauc

SEQ ID NO: 184518 - RNA, 19 nt, Homo sapiens
  misc_RNA (1)...(19): siRNA sense strand
cagaggugguggagacuau

SEQ ID NO: 184519 - RNA, 19 nt, Homo sapiens
  misc_RNA (1)...(19): siRNA sense strand
ccaagcagugcacagauaa

SEQ ID NO: 184520 - RNA, 19 nt, Homo sapiens
  misc_RNA (1)...(19): siRNA sense strand
caaaagcuguggcuggaaa

SEQ ID NO: 184521 - RNA, 19 nt, Homo sapiens
  misc_RNA (1)...(19): siRNA sense strand
ggauccugcugguggcuaa

SEQ ID NO: 184522 - RNA, 19 nt, Homo sapiens
  misc_RNA (1)...(19): siRNA sense strand
cacgagcacuugcaucuca

SEQ ID NO: 184523 - RNA, 19 nt, Homo sapiens
  misc_RNA (1)...(19): siRNA sense strand
ugcucugacuucuaaauua

SEQ ID NO: 184524 - RNA, 19 nt, Homo sapiens
  misc_RNA (1)...(19): siRNA sense strand
uccauagacuccaaacuga

SEQ ID NO: 184525 - RNA, 19 nt, Homo sapiens
  misc_RNA (1)...(19): siRNA sense strand
ugaacaccgugaaagaguu

SEQ ID NO: 184526 - RNA, 19 nt, Homo sapiens
  misc_RNA (1)...(19): siRNA sense strand
caaaccaccucugccugaa

SEQ ID NO: 184527 - RNA, 19 nt, Homo sapiens
  misc_RNA (1)...(19): siRNA sense strand
ggccaugacucaggaagug

SEQ ID NO: 184528 - RNA, 19 nt, Homo sapiens
  misc_RNA (1)...(19): siRNA sense strand
gggagauucugggaacuug

SEQ ID NO: 184529 - RNA, 19 nt, Homo sapiens
  misc_RNA (1)...(19): siRNA sense strand
gcauuggccuccauagacu

SEQ ID NO: 184530 - RNA, 19 nt, Homo sapiens
  misc_RNA (1)...(19): siRNA sense strand
uguuacaacucaccucuug

SEQ ID NO: 184531 - RNA, 19 nt, Homo sapiens
  misc_RNA (1)...(19): siRNA sense strand
uagcagaauuaugugauga

SEQ ID NO: 184532 - RNA, 19 nt, Homo sapiens
  misc_RNA (1)...(19): siRNA sense strand
gauaaacggauuagaacca

SEQ ID NO: 184533 - RNA, 19 nt, Homo sapiens
  misc_RNA (1)...(19): siRNA sense strand
ccaggcagcucagaugcuu

SEQ ID NO: 184534 - RNA, 19 nt, Homo sapiens
  misc_RNA (1)...(19): siRNA sense strand
cgaagccauugauaccaaa

SEQ ID NO: 184535 - RNA, 19 nt, Homo sapiens
  misc_RNA (1)...(19): siRNA sense strand
ugaacucugugcaggcaaa

SEQ ID NO: 184536 - RNA, 19 nt, Homo sapiens
  misc_RNA (1)...(19): siRNA sense strand
ggucucggcugcucguauc

SEQ ID NO: 184537 - RNA, 19 nt, Homo sapiens
  misc_RNA (1)...(19): siRNA sense strand
gugaugauccuaaagaaag

SEQ ID NO: 184538 - RNA, 19 nt, Homo sapiens
  misc_RNA (1)...(19): siRNA sense strand
uagggcagaugacugauca

SEQ ID NO: 184539 - RNA, 19 nt, Homo sapiens
  misc_RNA (1)...(19): siRNA sense strand
gaaagacucccugguacca

SEQ ID NO: 184540 - RNA, 19 nt, Homo sapiens
  misc_RNA (1)...(19): siRNA sense strand
cauaagcacccagcucaaa

SEQ ID NO: 184541 - RNA, 19 nt, Homo sapiens
  misc_RNA (1)...(19): siRNA sense strand
ccaccagcauuuauuaagg

SEQ ID NO: 184542 - RNA, 19 nt, Homo sapiens
  misc_RNA (1)...(19): siRNA sense strand
gcuccaagacuccuuaaag

SEQ ID NO: 184543 - RNA, 19 nt, Homo sapiens
  misc_RNA (1)...(19): siRNA sense strand
uagcagaucuacgaagaca

SEQ ID NO: 184544 - RNA, 19 nt, Homo sapiens
  misc_RNA (1)...(19): siRNA sense strand
aagcagagcauugcaaaga

SEQ ID NO: 184545 - RNA, 19 nt, Homo sapiens
  misc_RNA (1)...(19): siRNA sense strand
uaccacaacucccaucaag

SEQ ID NO: 184546 - RNA, 19 nt, Homo sapiens
  misc_RNA (1)...(19): siRNA sense strand
ggagaucaauggcaugaaa

SEQ ID NO: 184547 - RNA, 19 nt, Homo sapiens
  misc_RNA (1)...(19): siRNA sense strand
gguaaagcauucaguauug

SEQ ID NO: 184548 - RNA, 19 nt, Homo sapiens
  misc_RNA (1)...(19): siRNA sense strand
gcagaacaauuacgaauag

SEQ ID NO: 184549 - RNA, 19 nt, Homo sapiens
  misc_RNA (1)...(19): siRNA sense strand
gcagaacgcuuugagagaa

SEQ ID NO: 184550 - RNA, 19 nt, Homo sapiens
  misc_RNA (1)...(19): siRNA sense strand
aauagaacaucucgacuua

SEQ ID NO: 184551 - RNA, 19 nt, Homo sapiens
  misc_RNA (1)...(19): siRNA sense strand
uagaacaucucgacuuauu

SEQ ID NO: 184552 - RNA, 19 nt, Homo sapiens
  misc_RNA (1)...(19): siRNA sense strand
gaucauaugcuuauacaga

SEQ ID NO: 184553 - RNA, 19 nt, Homo sapiens
  misc_RNA (1)...(19): siRNA sense strand
aaagagugcagaacaauua

SEQ ID NO: 184554 - RNA, 19 nt, Homo sapiens
  misc_RNA (1)...(19): siRNA sense strand
gaagaugaucauaugcuua

SEQ ID NO: 184555 - RNA, 19 nt, Homo sapiens
  misc_RNA (1)...(19): siRNA sense strand
gaaagagaacguauuggaa

SEQ ID NO: 184556 - RNA, 19 nt, Homo sapiens
  misc_RNA (1)...(19): siRNA sense strand
ggccgaggcuugagguaua

SEQ ID NO: 184557 - RNA, 19 nt, Homo sapiens
  misc_RNA (1)...(19): siRNA sense strand
ggacagcauucucauguag

SEQ ID NO: 184558 - RNA, 19 nt, Homo sapiens
  misc_RNA (1)...(19): siRNA sense strand
aaucggcucuggagaauuu

SEQ ID NO: 184559 - RNA, 19 nt, Homo sapiens
  misc_RNA (1)...(19): siRNA sense strand
gaaacaagaccugcuaaga

SEQ ID NO: 184560 - RNA, 19 nt, Homo sapiens
  misc_RNA (1)...(19): siRNA sense strand
ggcagaagaugaucauaug

SEQ ID NO: 184561 - RNA, 19 nt, Homo sapiens
  misc_RNA (1)...(19): siRNA sense strand
gaaagagugcagaacaauu

SEQ ID NO: 184562 - RNA, 19 nt, Homo sapiens
  misc_RNA (1)...(19): siRNA sense strand
guagaaagagaacguauug

SEQ ID NO: 184563 - RNA, 19 nt, Homo sapiens
  misc_RNA (1)...(19): siRNA sense strand
auuaugagcuugaagauga

SEQ ID NO: 184564 - RNA, 19 nt, Homo sapiens
  misc_RNA (1)...(19): siRNA sense strand
guaguucucucuucaugga

SEQ ID NO: 184565 - RNA, 19 nt, Homo sapiens
  misc_RNA (1)...(19): siRNA sense strand
ccaagaauuuacagaguug

SEQ ID NO: 184566 - RNA, 19 nt, Homo sapiens
  misc_RNA (1)...(19): siRNA sense strand
aauaugaagucccgguaua

SEQ ID NO: 184567 - RNA, 19 nt, Homo sapiens
  misc_RNA (1)...(19): siRNA sense strand
gaagagggcgauagucguu

SEQ ID NO: 184568 - RNA, 19 nt, Homo sapiens
  misc_RNA (1)...(19): siRNA sense strand
gaaccucaaucccaaaugc

SEQ ID NO: 184569 - RNA, 19 nt, Homo sapiens
  misc_RNA (1)...(19): siRNA sense strand
ggagaauuauacccaucua

SEQ ID NO: 184570 - RNA, 19 nt, Homo sapiens
  misc_RNA (1)...(19): siRNA sense strand
gaucuccaguccacaaguu

SEQ ID NO: 184571 - RNA, 19 nt, Homo sapiens
  misc_RNA (1)...(19): siRNA sense strand
aacaagaccugcuaagaga

SEQ ID NO: 184572 - RNA, 19 nt, Homo sapiens
  misc_RNA (1)...(19): siRNA sense strand
ucaauggcaugaaaucaga

SEQ ID NO: 184573 - RNA, 19 nt, Homo sapiens
  misc_RNA (1)...(19): siRNA sense strand
gaacaucucgacuuauugg

SEQ ID NO: 184574 - RNA, 19 nt, Homo sapiens
  misc_RNA (1)...(19): siRNA sense strand
caucucgacuuauuggaaa

SEQ ID NO: 184575 - RNA, 19 nt, Homo sapiens
  misc_RNA (1)...(19): siRNA sense strand
cacaagugcuuucccaaga

SEQ ID NO: 184576 - RNA, 19 nt, Homo sapiens
  misc_RNA (1)...(19): siRNA sense strand
uagaaagagugcagaacaa

SEQ ID NO: 184577 - RNA, 19 nt, Homo sapiens
  misc_RNA (1)...(19): siRNA sense strand
cgacagacuccucaaguga

SEQ ID NO: 184578 - RNA, 19 nt, Homo sapiens
  misc_RNA (1)...(19): siRNA sense strand
gaauuuacagaguugcuaa

SEQ ID NO: 184579 - RNA, 19 nt, Homo sapiens
  misc_RNA (1)...(19): siRNA sense strand
gaugaaacaagaccugcua

SEQ ID NO: 184580 - RNA, 19 nt, Homo sapiens
  misc_RNA (1)...(19): siRNA sense strand
gaggcuggauggaugcauu

SEQ ID NO: 184581 - RNA, 19 nt, Homo sapiens
  misc_RNA (1)...(19): siRNA sense strand
caauggcacugguaaagca

SEQ ID NO: 184582 - RNA, 19 nt, Homo sapiens
  misc_RNA (1)...(19): siRNA sense strand
gggcagaagaugaucauau

SEQ ID NO: 184583 - RNA, 19 nt, Homo sapiens
  misc_RNA (1)...(19): siRNA sense strand
ucauguaguucgauauuuc

SEQ ID NO: 184584 - RNA, 19 nt, Homo sapiens
  misc_RNA (1)...(19): siRNA sense strand
gcgacagacuccucaagug

SEQ ID NO: 184585 - RNA, 19 nt, Homo sapiens
  misc_RNA (1)...(19): siRNA sense strand
acuacagaaucaugaguua

SEQ ID NO: 184586 - RNA, 19 nt, Homo sapiens
  misc_RNA (1)...(19): siRNA sense strand
guauuuaagugugugaaga

SEQ ID NO: 184587 - RNA, 19 nt, Homo sapiens
  misc_RNA (1)...(19): siRNA sense strand
gaaaaucggcucuggagaa

SEQ ID NO: 184588 - RNA, 19 nt, Homo sapiens
  misc_RNA (1)...(19): siRNA sense strand
gaaccucuuccgagaaaug

SEQ ID NO: 184589 - RNA, 19 nt, Homo sapiens
  misc_RNA (1)...(19): siRNA sense strand
ggcuugagguauauucauu

SEQ ID NO: 184590 - RNA, 19 nt, Homo sapiens
  misc_RNA (1)...(19): siRNA sense strand
ggacucggccuuucaagag

SEQ ID NO: 184591 - RNA, 19 nt, Homo sapiens
  misc_RNA (1)...(19): siRNA sense strand
caagugcuuucccaagaau

SEQ ID NO: 184592 - RNA, 19 nt, Homo sapiens
  misc_RNA (1)...(19): siRNA sense strand
caaaugcugccucugaaga

SEQ ID NO: 184593 - RNA, 19 nt, Homo sapiens
  misc_RNA (1)...(19): siRNA sense strand
aaagagaacguauuggaau

SEQ ID NO: 184594 - RNA, 19 nt, Homo sapiens
  misc_RNA (1)...(19): siRNA sense strand
acaagugcuuucccaagaa

SEQ ID NO: 184595 - RNA, 19 nt, Homo sapiens
  misc_RNA (1)...(19): siRNA sense strand
gaaaucagacaggguagau

SEQ ID NO: 184596 - RNA, 19 nt, Homo sapiens
  misc_RNA (1)...(19): siRNA sense strand
agaaguauaugcucaugca

SEQ ID NO: 184597 - RNA, 19 nt, Homo sapiens
  misc_RNA (1)...(19): siRNA sense strand
aaacaagaccugcuaagag

SEQ ID NO: 184598 - RNA, 19 nt, Homo sapiens
  misc_RNA (1)...(19): siRNA sense strand
ggaagccagugauuaugag

SEQ ID NO: 184599 - RNA, 19 nt, Homo sapiens
  misc_RNA (1)...(19): siRNA sense strand
cauggaagccagugauuau

SEQ ID NO: 184600 - RNA, 19 nt, Homo sapiens
  misc_RNA (1)...(19): siRNA sense strand
cugaaccucuuccgagaaa

SEQ ID NO: 184601 - RNA, 19 nt, Homo sapiens
  misc_RNA (1)...(19): siRNA sense strand
cccaagaauuuacagaguu

SEQ ID NO: 184602 - RNA, 19 nt, Homo sapiens
  misc_RNA (1)...(19): siRNA sense strand
agaaagagaacguauugga

SEQ ID NO: 184603 - RNA, 19 nt, Homo sapiens
  misc_RNA (1)...(19): siRNA sense strand
uaauagaacaucucgacuu

SEQ ID NO: 184604 - RNA, 19 nt, Homo sapiens
  misc_RNA (1)...(19): siRNA sense strand
gcuguccgcuucuagaaag

SEQ ID NO: 184605 - RNA, 19 nt, Homo sapiens
  misc_RNA (1)...(19): siRNA sense strand
aagcagaguugaaggaucu

SEQ ID NO: 184606 - RNA, 19 nt, Homo sapiens
  misc_RNA (1)...(19): siRNA sense strand
agaagaugaucauaugcuu

SEQ ID NO: 184607 - RNA, 19 nt, Homo sapiens
  misc_RNA (1)...(19): siRNA sense strand
ggguaguucucucuucaug

SEQ ID NO: 184608 - RNA, 19 nt, Homo sapiens
  misc_RNA (1)...(19): siRNA sense strand
gguggaaguuuagcugaug

SEQ ID NO: 184609 - RNA, 19 nt, Homo sapiens
  misc_RNA (1)...(19): siRNA sense strand
uaaagaagcagaguugaag

SEQ ID NO: 184610 - RNA, 19 nt, Homo sapiens
  misc_RNA (1)...(19): siRNA sense strand
gagaacguauuggaaugau

SEQ ID NO: 184611 - RNA, 19 nt, Homo sapiens
  misc_RNA (1)...(19): siRNA sense strand
gaaggagacgaagaugauu

SEQ ID NO: 184612 - RNA, 19 nt, Homo sapiens
  misc_RNA (1)...(19): siRNA sense strand
cuccucaagugaauauuaa

SEQ ID NO: 184613 - RNA, 19 nt, Homo sapiens
  misc_RNA (1)...(19): siRNA sense strand
cagccuuacuauauacuga

SEQ ID NO: 184614 - RNA, 19 nt, Homo sapiens
  misc_RNA (1)...(19): siRNA sense strand
ucugucagccuuacuauau

SEQ ID NO: 184615 - RNA, 19 nt, Homo sapiens
  misc_RNA (1)...(19): siRNA sense strand
ugaagaaggagacgaagau

SEQ ID NO: 184616 - RNA, 19 nt, Homo sapiens
  misc_RNA (1)...(19): siRNA sense strand
aagagaacguauuggaaug

SEQ ID NO: 184617 - RNA, 19 nt, Homo sapiens
  misc_RNA (1)...(19): siRNA sense strand
cuggauggaugcauuuaug

SEQ ID NO: 184618 - RNA, 19 nt, Homo sapiens
  misc_RNA (1)...(19): siRNA sense strand
agaaagcacagauggcaaa

SEQ ID NO: 184619 - RNA, 19 nt, Homo sapiens
  misc_RNA (1)...(19): siRNA sense strand
gagaaauggagaucaaugg

SEQ ID NO: 184620 - RNA, 19 nt, Homo sapiens
  misc_RNA (1)...(19): siRNA sense strand
gacagacuccucaagugaa

SEQ ID NO: 184621 - RNA, 19 nt, Homo sapiens
  misc_RNA (1)...(19): siRNA sense strand
gaagaaggagacgaagaug

SEQ ID NO: 184622 - RNA, 19 nt, Homo sapiens
  misc_RNA (1)...(19): siRNA sense strand
aacagaauuucaugagcua

SEQ ID NO: 184623 - RNA, 19 nt, Homo sapiens
  misc_RNA (1)...(19): siRNA sense strand
gauucuuuguugcuucauu

SEQ ID NO: 184624 - RNA, 19 nt, Homo sapiens
  misc_RNA (1)...(19): siRNA sense strand
uuaaagaagcagaguugaa

SEQ ID NO: 184625 - RNA, 19 nt, Homo sapiens
  misc_RNA (1)...(19): siRNA sense strand
acagcauucucauguaguu

SEQ ID NO: 184626 - RNA, 19 nt, Homo sapiens
  misc_RNA (1)...(19): siRNA sense strand
gaaaacuacagaaucauga

SEQ ID NO: 184627 - RNA, 19 nt, Homo sapiens
  misc_RNA (1)...(19): siRNA sense strand
uaggugaucuugggcaugu

SEQ ID NO: 184628 - RNA, 19 nt, Homo sapiens
  misc_RNA (1)...(19): siRNA sense strand
agaaggagacgaagaugau

SEQ ID NO: 184629 - RNA, 19 nt, Homo sapiens
  misc_RNA (1)...(19): siRNA sense strand
cccaaaugcugccucugaa

SEQ ID NO: 184630 - RNA, 19 nt, Homo sapiens
  misc_RNA (1)...(19): siRNA sense strand
caagaccugcuaagagaau

SEQ ID NO: 184631 - RNA, 19 nt, Homo sapiens
  misc_RNA (1)...(19): siRNA sense strand
guaaagcauucaguauugc

SEQ ID NO: 184632 - RNA, 19 nt, Homo sapiens
  misc_RNA (1)...(19): siRNA sense strand
uagauuaccucggauacca

SEQ ID NO: 184633 - RNA, 19 nt, Homo sapiens
  misc_RNA (1)...(19): siRNA sense strand
gaucaauggcaugaaauca

SEQ ID NO: 184634 - RNA, 19 nt, Homo sapiens
  misc_RNA (1)...(19): siRNA sense strand
uggacagcauucucaugua

SEQ ID NO: 184635 - RNA, 19 nt, Homo sapiens
  misc_RNA (1)...(19): siRNA sense strand
ggaggacucggccuuucaa

SEQ ID NO: 184636 - RNA, 19 nt, Homo sapiens
  misc_RNA (1)...(19): siRNA sense strand
uuguaaugguggaaguuua

SEQ ID NO: 184637 - RNA, 19 nt, Homo sapiens
  misc_RNA (1)...(19): siRNA sense strand
uugaugagcagaacgcuuu

SEQ ID NO: 184638 - RNA, 19 nt, Homo sapiens
  misc_RNA (1)...(19): siRNA sense strand
cugucagccuuacuauaua

SEQ ID NO: 184639 - RNA, 19 nt, Homo sapiens
  misc_RNA (1)...(19): siRNA sense strand
gguccaccacccagaguaa

SEQ ID NO: 184640 - RNA, 19 nt, Homo sapiens
  misc_RNA (1)...(19): siRNA sense strand
cuagaaagagugcagaaca

SEQ ID NO: 184641 - RNA, 19 nt, Homo sapiens
  misc_RNA (1)...(19): siRNA sense strand
cgagaaauggagaucaaug

SEQ ID NO: 184642 - RNA, 19 nt, Homo sapiens
  misc_RNA (1)...(19): siRNA sense strand
gaauuauacccaucuacca

SEQ ID NO: 184643 - RNA, 19 nt, Homo sapiens
  misc_RNA (1)...(19): siRNA sense strand
gggcauccaacaaaguuau

SEQ ID NO: 184644 - RNA, 19 nt, Homo sapiens
  misc_RNA (1)...(19): siRNA sense strand
gcacacgcccaagaguuug

SEQ ID NO: 184645 - RNA, 19 nt, Homo sapiens
  misc_RNA (1)...(19): siRNA sense strand
gaacucaagaaagcacaga

SEQ ID NO: 184646 - RNA, 19 nt, Homo sapiens
  misc_RNA (1)...(19): siRNA sense strand
ggacagcugugaagucaug

SEQ ID NO: 184647 - RNA, 19 nt, Homo sapiens
  misc_RNA (1)...(19): siRNA sense strand
guaaagcgguucuugaaac

SEQ ID NO: 184648 - RNA, 19 nt, Homo sapiens
  misc_RNA (1)...(19): siRNA sense strand
gggaaucugccuuuguuua

SEQ ID NO: 184649 - RNA, 19 nt, Homo sapiens
  misc_RNA (1)...(19): siRNA sense strand
gcgauuaucucuggaggaa

SEQ ID NO: 184650 - RNA, 19 nt, Homo sapiens
  misc_RNA (1)...(19): siRNA sense strand
ggaaucugccuuuguuuau

SEQ ID NO: 184651 - RNA, 19 nt, Homo sapiens
  misc_RNA (1)...(19): siRNA sense strand
ccagagcccugaugaaucu

SEQ ID NO: 184652 - RNA, 19 nt, Homo sapiens
  misc_RNA (1)...(19): siRNA sense strand
gcagugauaacauugacua

SEQ ID NO: 184653 - RNA, 19 nt, Homo sapiens
  misc_RNA (1)...(19): siRNA sense strand
gauuaucucuggaggaagu

SEQ ID NO: 184654 - RNA, 19 nt, Homo sapiens
  misc_RNA (1)...(19): siRNA sense strand
gcaaaggaaaggaaaggaa

SEQ ID NO: 184655 - RNA, 19 nt, Homo sapiens
  misc_RNA (1)...(19): siRNA sense strand
gugauaacauugacuaugg

SEQ ID NO: 184656 - RNA, 19 nt, Homo sapiens
  misc_RNA (1)...(19): siRNA sense strand
gaugugaugcgugccauua

SEQ ID NO: 184657 - RNA, 19 nt, Homo sapiens
  misc_RNA (1)...(19): siRNA sense strand
caaaggaaaggaaaggaaa

SEQ ID NO: 184658 - RNA, 19 nt, Homo sapiens
  misc_RNA (1)...(19): siRNA sense strand
gaaucugccuuuguuuaug

SEQ ID NO: 184659 - RNA, 19 nt, Homo sapiens
  misc_RNA (1)...(19): siRNA sense strand
ggaguuguauuugccauca

SEQ ID NO: 184660 - RNA, 19 nt, Homo sapiens
  misc_RNA (1)...(19): siRNA sense strand
uaaagcgguucuugaaaca

SEQ ID NO: 184661 - RNA, 19 nt, Homo sapiens
  misc_RNA (1)...(19): siRNA sense strand
gaggucaacucuucauggu

SEQ ID NO: 184662 - RNA, 19 nt, Homo sapiens
  misc_RNA (1)...(19): siRNA sense strand
ggaaaggaaaggaaaggau

SEQ ID NO: 184663 - RNA, 19 nt, Homo sapiens
  misc_RNA (1)...(19): siRNA sense strand
ucgggaaucugccuuuguu

SEQ ID NO: 184664 - RNA, 19 nt, Homo sapiens
  misc_RNA (1)...(19): siRNA sense strand
ccagggugaugugcgauaa

SEQ ID NO: 184665 - RNA, 19 nt, Homo sapiens
  misc_RNA (1)...(19): siRNA sense strand
uggcugcagugauaacauu

SEQ ID NO: 184666 - RNA, 19 nt, Homo sapiens
  misc_RNA (1)...(19): siRNA sense strand
cuaacgagagguuuaagaa

SEQ ID NO: 184667 - RNA, 19 nt, Homo sapiens
  misc_RNA (1)...(19): siRNA sense strand
ugacuaugggaucaaauuu

SEQ ID NO: 184668 - RNA, 19 nt, Homo sapiens
  misc_RNA (1)...(19): siRNA sense strand
gcuguaaagcgguucuuga

SEQ ID NO: 184669 - RNA, 19 nt, Homo sapiens
  misc_RNA (1)...(19): siRNA sense strand
cagaaugccagcaccaguu

SEQ ID NO: 184670 - RNA, 19 nt, Homo sapiens
  misc_RNA (1)...(19): siRNA sense strand
ccauccagguggucaugaa

SEQ ID NO: 184671 - RNA, 19 nt, Homo sapiens
  misc_RNA (1)...(19): siRNA sense strand
gacuaugggaucaaauuug

SEQ ID NO: 184672 - RNA, 19 nt, Homo sapiens
  misc_RNA (1)...(19): siRNA sense strand
gcuaacgagagguuuaaga

SEQ ID NO: 184673 - RNA, 19 nt, Homo sapiens
  misc_RNA (1)...(19): siRNA sense strand
ccuggaagcucuggaugug

SEQ ID NO: 184674 - RNA, 19 nt, Homo sapiens
  misc_RNA (1)...(19): siRNA sense strand
ucacccggaugaccaagug

SEQ ID NO: 184675 - RNA, 19 nt, Homo sapiens
  misc_RNA (1)...(19): siRNA sense strand
ggaugcaaaggaaaggaaa

SEQ ID NO: 184676 - RNA, 19 nt, Homo sapiens
  misc_RNA (1)...(19): siRNA sense strand
ucuccagacuacuguauca

SEQ ID NO: 184677 - RNA, 19 nt, Homo sapiens
  misc_RNA (1)...(19): siRNA sense strand
gguuuaagaagccaacgaa

SEQ ID NO: 184678 - RNA, 19 nt, Homo sapiens
  misc_RNA (1)...(19): siRNA sense strand
cagcuggaguuguauuugc

SEQ ID NO: 184679 - RNA, 19 nt, Homo sapiens
  misc_RNA (1)...(19): siRNA sense strand
gggcauggacagcugugaa

SEQ ID NO: 184680 - RNA, 19 nt, Homo sapiens
  misc_RNA (1)...(19): siRNA sense strand
caaggacagcaaaggcauu

SEQ ID NO: 184681 - RNA, 19 nt, Homo sapiens
  misc_RNA (1)...(19): siRNA sense strand
ggugaugugcgauaaugug

SEQ ID NO: 184682 - RNA, 19 nt, Homo sapiens
  misc_RNA (1)...(19): siRNA sense strand
gaugccagagcccugauga

SEQ ID NO: 184683 - RNA, 19 nt, Homo sapiens
  misc_RNA (1)...(19): siRNA sense strand
uaacgagagguuuaagaag

SEQ ID NO: 184684 - RNA, 19 nt, Homo sapiens
  misc_RNA (1)...(19): siRNA sense strand
caaguguggguguaaguuc

SEQ ID NO: 184685 - RNA, 19 nt, Homo sapiens
  misc_RNA (1)...(19): siRNA sense strand
uguaaagcgguucuugaaa

SEQ ID NO: 184686 - RNA, 19 nt, Homo sapiens
  misc_RNA (1)...(19): siRNA sense strand
gaccaaguguggguguaag

SEQ ID NO: 184687 - RNA, 19 nt, Homo sapiens
  misc_RNA (1)...(19): siRNA sense strand
gcuacgacaccucccaugu

SEQ ID NO: 184688 - RNA, 19 nt, Homo sapiens
  misc_RNA (1)...(19): siRNA sense strand
guggcuaacgagagguuua

SEQ ID NO: 184689 - RNA, 19 nt, Homo sapiens
  misc_RNA (1)...(19): siRNA sense strand
ggaaaacgggcgauuaucu

SEQ ID NO: 184690 - RNA, 19 nt, Homo sapiens
  misc_RNA (1)...(19): siRNA sense strand
gaaguaaaauccuguuccu

SEQ ID NO: 184691 - RNA, 19 nt, Homo sapiens
  misc_RNA (1)...(19): siRNA sense strand
cuggacaaccgcuacauga

SEQ ID NO: 184692 - RNA, 19 nt, Homo sapiens
  misc_RNA (1)...(19): siRNA sense strand
ugggguggcugcagugaua

SEQ ID NO: 184693 - RNA, 19 nt, Homo sapiens
  misc_RNA (1)...(19): siRNA sense strand
acuaugggaucaaauuugc

SEQ ID NO: 184694 - RNA, 19 nt, Homo sapiens
  misc_RNA (1)...(19): siRNA sense strand
cuguaaagcgguucuugaa

SEQ ID NO: 184695 - RNA, 19 nt, Homo sapiens
  misc_RNA (1)...(19): siRNA sense strand
gccagagcccugaugaauc

SEQ ID NO: 184696 - RNA, 19 nt, Homo sapiens
  misc_RNA (1)...(19): siRNA sense strand
ugaccaaguguggguguaa

SEQ ID NO: 184697 - RNA, 19 nt, Homo sapiens
  misc_RNA (1)...(19): siRNA sense strand
gaauucuccagacuacugu

SEQ ID NO: 184698 - RNA, 19 nt, Homo sapiens
  misc_RNA (1)...(19): siRNA sense strand
ccugugauccaaagaagau

SEQ ID NO: 184699 - RNA, 19 nt, Homo sapiens
  misc_RNA (1)...(19): siRNA sense strand
ccaaguguggguguaaguu

SEQ ID NO: 184700 - RNA, 19 nt, Homo sapiens
  misc_RNA (1)...(19): siRNA sense strand
agaauucuccagacuacug

SEQ ID NO: 184701 - RNA, 19 nt, Homo sapiens
  misc_RNA (1)...(19): siRNA sense strand
gaagcgccaaggacagcaa

SEQ ID NO: 184702 - RNA, 19 nt, Homo sapiens
  misc_RNA (1)...(19): siRNA sense strand
aaucugccuuuguuuaugc

SEQ ID NO: 184703 - RNA, 19 nt, Homo sapiens
  misc_RNA (1)...(19): siRNA sense strand
gaauaacccuguucagaug

SEQ ID NO: 184704 - RNA, 19 nt, Homo sapiens
  misc_RNA (1)...(19): siRNA sense strand
gaagacaggcaucaaagaa

SEQ ID NO: 184705 - RNA, 19 nt, Homo sapiens
  misc_RNA (1)...(19): siRNA sense strand
gaagaaacugugccacuug

SEQ ID NO: 184706 - RNA, 19 nt, Homo sapiens
  misc_RNA (1)...(19): siRNA sense strand
gaaacugugccacuuguau

SEQ ID NO: 184707 - RNA, 19 nt, Homo sapiens
  misc_RNA (1)...(19): siRNA sense strand
guucagaugucagaaguau

SEQ ID NO: 184708 - RNA, 19 nt, Homo sapiens
  misc_RNA (1)...(19): siRNA sense strand
ucaugaaccugcacaacaa

SEQ ID NO: 184709 - RNA, 19 nt, Homo sapiens
  misc_RNA (1)...(19): siRNA sense strand
agacaggcaucaaagaaug

SEQ ID NO: 184710 - RNA, 19 nt, Homo sapiens
  misc_RNA (1)...(19): siRNA sense strand
ggagaucguggaccaguuu

SEQ ID NO: 184711 - RNA, 19 nt, Homo sapiens
  misc_RNA (1)...(19): siRNA sense strand
gcgagacggccuucacaua

SEQ ID NO: 184712 - RNA, 19 nt, Homo sapiens
  misc_RNA (1)...(19): siRNA sense strand
caucaaagaaugccaguau

SEQ ID NO: 184713 - RNA, 19 nt, Homo sapiens
  misc_RNA (1)...(19): siRNA sense strand
gugaugcccugaaggagaa

SEQ ID NO: 184714 - RNA, 19 nt, Homo sapiens
  misc_RNA (1)...(19): siRNA sense strand
ucagaugucagaaguauau

SEQ ID NO: 184715 - RNA, 19 nt, Homo sapiens
  misc_RNA (1)...(19): siRNA sense strand
gacuauggcuaccgcuuug

SEQ ID NO: 184716 - RNA, 19 nt, Homo sapiens
  misc_RNA (1)...(19): siRNA sense strand
gcgacaacaucgacuaugg

SEQ ID NO: 184717 - RNA, 19 nt, Homo sapiens
  misc_RNA (1)...(19): siRNA sense strand
agaagaaacugugccacuu

SEQ ID NO: 184718 - RNA, 19 nt, Homo sapiens
  misc_RNA (1)...(19): siRNA sense strand
gcaaguugguacaggucaa

SEQ ID NO: 184719 - RNA, 19 nt, Homo sapiens
  misc_RNA (1)...(19): siRNA sense strand
ugcaaugucuuccaaguuc

SEQ ID NO: 184720 - RNA, 19 nt, Homo sapiens
  misc_RNA (1)...(19): siRNA sense strand
ggcaggacuuucucaagga

SEQ ID NO: 184721 - RNA, 19 nt, Homo sapiens
  misc_RNA (1)...(19): siRNA sense strand
ucaaagaaugccaguauca

SEQ ID NO: 184722 - RNA, 19 nt, Homo sapiens
  misc_RNA (1)...(19): siRNA sense strand
gcaagaagugcacggagau

SEQ ID NO: 184723 - RNA, 19 nt, Homo sapiens
  misc_RNA (1)...(19): siRNA sense strand
caaagaaugccaguaucaa

SEQ ID NO: 184724 - RNA, 19 nt, Homo sapiens
  misc_RNA (1)...(19): siRNA sense strand
gcaggacgguguacaaccu

SEQ ID NO: 184725 - RNA, 19 nt, Homo sapiens
  misc_RNA (1)...(19): siRNA sense strand
aagaaugccaguaucaauu

SEQ ID NO: 184726 - RNA, 19 nt, Homo sapiens
  misc_RNA (1)...(19): siRNA sense strand
uguacaaccuggcugaugu

SEQ ID NO: 184727 - RNA, 19 nt, Homo sapiens
  misc_RNA (1)...(19): siRNA sense strand
gguggucgcuagguaugaa

SEQ ID NO: 184728 - RNA, 19 nt, Homo sapiens
  misc_RNA (1)...(19): siRNA sense strand
cgacuauggcuaccgcuuu

SEQ ID NO: 184729 - RNA, 19 nt, Homo sapiens
  misc_RNA (1)...(19): siRNA sense strand
gaacugcagcacuguggau

SEQ ID NO: 184730 - RNA, 19 nt, Homo sapiens
  misc_RNA (1)...(19): siRNA sense strand
ucgcccagguuguaauuga

SEQ ID NO: 184731 - RNA, 19 nt, Homo sapiens
  misc_RNA (1)...(19): siRNA sense strand
gcagggugaugcagauagg

SEQ ID NO: 184732 - RNA, 19 nt, Homo sapiens
  misc_RNA (1)...(19): siRNA sense strand
cgaagacaggcaucaaaga

SEQ ID NO: 184733 - RNA, 19 nt, Homo sapiens
  misc_RNA (1)...(19): siRNA sense strand
gcugcuacgucaagugcaa

SEQ ID NO: 184734 - RNA, 19 nt, Homo sapiens
  misc_RNA (1)...(19): siRNA sense strand
aaagaaugccaguaucaau

SEQ ID NO: 184735 - RNA, 19 nt, Homo sapiens
  misc_RNA (1)...(19): siRNA sense strand
gcaaugucuuccaaguucu

SEQ ID NO: 184736 - RNA, 19 nt, Homo sapiens
  misc_RNA (1)...(19): siRNA sense strand
aagaaacugugccacuugu

SEQ ID NO: 184737 - RNA, 19 nt, Homo sapiens
  misc_RNA (1)...(19): siRNA sense strand
caguaucaauuccgacauc

SEQ ID NO: 184738 - RNA, 19 nt, Homo sapiens
  misc_RNA (1)...(19): siRNA sense strand
caagggcuccuacgagagu

SEQ ID NO: 184739 - RNA, 19 nt, Homo sapiens
  misc_RNA (1)...(19): siRNA sense strand
gcgaagacaggcaucaaag

SEQ ID NO: 184740 - RNA, 19 nt, Homo sapiens
  misc_RNA (1)...(19): siRNA sense strand
cgagacggccuucacauac

SEQ ID NO: 184741 - RNA, 19 nt, Homo sapiens
  misc_RNA (1)...(19): siRNA sense strand
gagacggccuucacauacg

SEQ ID NO: 184742 - RNA, 19 nt, Homo sapiens
  misc_RNA (1)...(19): siRNA sense strand
cgacaucgacgguggaacu

SEQ ID NO: 184743 - RNA, 19 nt, Homo sapiens
  misc_RNA (1)...(19): siRNA sense strand
uggcugauguggccugcaa

SEQ ID NO: 184744 - RNA, 19 nt, Homo sapiens
  misc_RNA (1)...(19): siRNA sense strand
gugcucgcauccucaugaa

SEQ ID NO: 184745 - RNA, 19 nt, Homo sapiens
  misc_RNA (1)...(19): siRNA sense strand
gugcaaugucuuccaaguu

SEQ ID NO: 184746 - RNA, 19 nt, Homo sapiens
  misc_RNA (1)...(19): siRNA sense strand
ggucgcuagguaugaauaa

SEQ ID NO: 184747 - RNA, 19 nt, Homo sapiens
  misc_RNA (1)...(19): siRNA sense strand
gaucguggaccaguuugug

SEQ ID NO: 184748 - RNA, 19 nt, Homo sapiens
  misc_RNA (1)...(19): siRNA sense strand
gcagcacuguggauaacac

SEQ ID NO: 184749 - RNA, 19 nt, Homo sapiens
  misc_RNA (1)...(19): siRNA sense strand
ucaacucgcccaccacaca

SEQ ID NO: 184750 - RNA, 19 nt, Homo sapiens
  misc_RNA (1)...(19): siRNA sense strand
gcgcugccacugcaaguuc

SEQ ID NO: 184751 - RNA, 19 nt, Homo sapiens
  misc_RNA (1)...(19): siRNA sense strand
caacucgcccaccacacaa

SEQ ID NO: 184752 - RNA, 19 nt, Homo sapiens
  misc_RNA (1)...(19): siRNA sense strand
ggugggugaugcccugaag

SEQ ID NO: 184753 - RNA, 19 nt, Homo sapiens
  misc_RNA (1)...(19): siRNA sense strand
ccaacuggcaggacuuucu

SEQ ID NO: 184754 - RNA, 19 nt, Homo sapiens
  misc_RNA (1)...(19): siRNA sense strand
guacaaccuggcugaugug

SEQ ID NO: 184755 - RNA, 19 nt, Homo sapiens
  misc_RNA (1)...(19): siRNA sense strand
ggcuggaagugcaaugucu

SEQ ID NO: 184756 - RNA, 19 nt, Homo sapiens
  misc_RNA (1)...(19): siRNA sense strand
cggagaucguggaccaguu

SEQ ID NO: 184757 - RNA, 19 nt, Homo sapiens
  misc_RNA (1)...(19): siRNA sense strand
ccaagaagcugaugacaug

SEQ ID NO: 184758 - RNA, 19 nt, Homo sapiens
  misc_RNA (1)...(19): siRNA sense strand
gaauccaccuuguuucuga

SEQ ID NO: 184759 - RNA, 19 nt, Homo sapiens
  misc_RNA (1)...(19): siRNA sense strand
gagcacaucucagcugaaa

SEQ ID NO: 184760 - RNA, 19 nt, Homo sapiens
  misc_RNA (1)...(19): siRNA sense strand
aaacccagcugaagucauu

SEQ ID NO: 184761 - RNA, 19 nt, Homo sapiens
  misc_RNA (1)...(19): siRNA sense strand
gaaauauguuggugaacug

SEQ ID NO: 184762 - RNA, 19 nt, Homo sapiens
  misc_RNA (1)...(19): siRNA sense strand
gcugauguauacacguuua

SEQ ID NO: 184763 - RNA, 19 nt, Homo sapiens
  misc_RNA (1)...(19): siRNA sense strand
gagaaucagcuucaagaaa

SEQ ID NO: 184764 - RNA, 19 nt, Homo sapiens
  misc_RNA (1)...(19): siRNA sense strand
ggaaauauguuggugaacu

SEQ ID NO: 184765 - RNA, 19 nt, Homo sapiens
  misc_RNA (1)...(19): siRNA sense strand
gagauccagucuaugauga

SEQ ID NO: 184766 - RNA, 19 nt, Homo sapiens
  misc_RNA (1)...(19): siRNA sense strand
ugaccgagauccagucuau

SEQ ID NO: 184767 - RNA, 19 nt, Homo sapiens
  misc_RNA (1)...(19): siRNA sense strand
ccugaaagaugucucauuc

SEQ ID NO: 184768 - RNA, 19 nt, Homo sapiens
  misc_RNA (1)...(19): siRNA sense strand
gaaaggcuucugagagauu

SEQ ID NO: 184769 - RNA, 19 nt, Homo sapiens
  misc_RNA (1)...(19): siRNA sense strand
cagcugaagucauuagaga

SEQ ID NO: 184770 - RNA, 19 nt, Homo sapiens
  misc_RNA (1)...(19): siRNA sense strand
aaaccaaacugaucucucu

SEQ ID NO: 184771 - RNA, 19 nt, Homo sapiens
  misc_RNA (1)...(19): siRNA sense strand
gaaagaugucucauucaga

SEQ ID NO: 184772 - RNA, 19 nt, Homo sapiens
  misc_RNA (1)...(19): siRNA sense strand
gauauugcaccaaguagaa

SEQ ID NO: 184773 - RNA, 19 nt, Homo sapiens
  misc_RNA (1)...(19): siRNA sense strand
gcaaucuguucugaaauga

SEQ ID NO: 184774 - RNA, 19 nt, Homo sapiens
  misc_RNA (1)...(19): siRNA sense strand
ggagacugaucuuuauaag

SEQ ID NO: 184775 - RNA, 19 nt, Homo sapiens
  misc_RNA (1)...(19): siRNA sense strand
guacugaugaggaaaguga

SEQ ID NO: 184776 - RNA, 19 nt, Homo sapiens
  misc_RNA (1)...(19): siRNA sense strand
gaacccaguauaacucauu

SEQ ID NO: 184777 - RNA, 19 nt, Homo sapiens
  misc_RNA (1)...(19): siRNA sense strand
ugagaguacugaugaggaa

SEQ ID NO: 184778 - RNA, 19 nt, Homo sapiens
  misc_RNA (1)...(19): siRNA sense strand
aaacugcaaucuguucuga

SEQ ID NO: 184779 - RNA, 19 nt, Homo sapiens
  misc_RNA (1)...(19): siRNA sense strand
gacagcgaaugcaaagaaa

SEQ ID NO: 184780 - RNA, 19 nt, Homo sapiens
  misc_RNA (1)...(19): siRNA sense strand
aaaugcagcucaagaacga

SEQ ID NO: 184781 - RNA, 19 nt, Homo sapiens
  misc_RNA (1)...(19): siRNA sense strand
cagcugauguauacacguu

SEQ ID NO: 184782 - RNA, 19 nt, Homo sapiens
  misc_RNA (1)...(19): siRNA sense strand
agaaucagcuucaagaaaa

SEQ ID NO: 184783 - RNA, 19 nt, Homo sapiens
  misc_RNA (1)...(19): siRNA sense strand
uaaggaagcuuuggagacu

SEQ ID NO: 184784 - RNA, 19 nt, Homo sapiens
  misc_RNA (1)...(19): siRNA sense strand
augaaaggcuucugagaga

SEQ ID NO: 184785 - RNA, 19 nt, Homo sapiens
  misc_RNA (1)...(19): siRNA sense strand
gguguugaaugagaagaaa

SEQ ID NO: 184786 - RNA, 19 nt, Homo sapiens
  misc_RNA (1)...(19): siRNA sense strand
ucagagauuucccaagaag

SEQ ID NO: 184787 - RNA, 19 nt, Homo sapiens
  misc_RNA (1)...(19): siRNA sense strand
ccucuuugaugagauuuaa

SEQ ID NO: 184788 - RNA, 19 nt, Homo sapiens
  misc_RNA (1)...(19): siRNA sense strand
gaaaaugaaaggcuucuga

SEQ ID NO: 184789 - RNA, 19 nt, Homo sapiens
  misc_RNA (1)...(19): siRNA sense strand
ggaaucugguuuuguuauu

SEQ ID NO: 184790 - RNA, 19 nt, Homo sapiens
  misc_RNA (1)...(19): siRNA sense strand
ggagaaucagcuucaagaa

SEQ ID NO: 184791 - RNA, 19 nt, Homo sapiens
  misc_RNA (1)...(19): siRNA sense strand
agacagcgaaugcaaagaa

SEQ ID NO: 184792 - RNA, 19 nt, Homo sapiens
  misc_RNA (1)...(19): siRNA sense strand
gauccagucuaugaugaga

SEQ ID NO: 184793 - RNA, 19 nt, Homo sapiens
  misc_RNA (1)...(19): siRNA sense strand
gagcaggaccagcugaugu

SEQ ID NO: 184794 - RNA, 19 nt, Homo sapiens
  misc_RNA (1)...(19): siRNA sense strand
guuauuacacuuacugaug

SEQ ID NO: 184795 - RNA, 19 nt, Homo sapiens
  misc_RNA (1)...(19): siRNA sense strand
aaaaggacaucaaacaaga

SEQ ID NO: 184796 - RNA, 19 nt, Homo sapiens
  misc_RNA (1)...(19): siRNA sense strand
ggagacagcgaaugcaaag

SEQ ID NO: 184797 - RNA, 19 nt, Homo sapiens
  misc_RNA (1)...(19): siRNA sense strand
ugcaaucuguucugaaaug

SEQ ID NO: 184798 - RNA, 19 nt, Homo sapiens
  misc_RNA (1)...(19): siRNA sense strand
acugcaaucuguucugaaa

SEQ ID NO: 184799 - RNA, 19 nt, Homo sapiens
  misc_RNA (1)...(19): siRNA sense strand
gagauuggaaugauguuca

SEQ ID NO: 184800 - RNA, 19 nt, Homo sapiens
  misc_RNA (1)...(19): siRNA sense strand
gaaacagcagcccagaaga

SEQ ID NO: 184801 - RNA, 19 nt, Homo sapiens
  misc_RNA (1)...(19): siRNA sense strand
gguuuauucugguguugaa

SEQ ID NO: 184802 - RNA, 19 nt, Homo sapiens
  misc_RNA (1)...(19): siRNA sense strand
ugggacaguuucugaauca

SEQ ID NO: 184803 - RNA, 19 nt, Homo sapiens
  misc_RNA (1)...(19): siRNA sense strand
caucucagcugaaaacaug

SEQ ID NO: 184804 - RNA, 19 nt, Homo sapiens
  misc_RNA (1)...(19): siRNA sense strand
gaugacauggcaauggaaa

SEQ ID NO: 184805 - RNA, 19 nt, Homo sapiens
  misc_RNA (1)...(19): siRNA sense strand
gagaaacagcagcccagaa

SEQ ID NO: 184806 - RNA, 19 nt, Homo sapiens
  misc_RNA (1)...(19): siRNA sense strand
gagcaccugcagaaagaaa

SEQ ID NO: 184807 - RNA, 19 nt, Homo sapiens
  misc_RNA (1)...(19): siRNA sense strand
gaaaaggacaucaaacaag

SEQ ID NO: 184808 - RNA, 19 nt, Homo sapiens
  misc_RNA (1)...(19): siRNA sense strand
agaccucuuugaugagauu

SEQ ID NO: 184809 - RNA, 19 nt, Homo sapiens
  misc_RNA (1)...(19): siRNA sense strand
agggaaauauguuggugaa

SEQ ID NO: 184810 - RNA, 19 nt, Homo sapiens
  misc_RNA (1)...(19): siRNA sense strand
gauguucaaggacgauuug

SEQ ID NO: 184811 - RNA, 19 nt, Homo sapiens
  misc_RNA (1)...(19): siRNA sense strand
ggacaccauugcagaaaau

SEQ ID NO: 184812 - RNA, 19 nt, Homo sapiens
  misc_RNA (1)...(19): siRNA sense strand
gcagaauccaccuuguuuc

SEQ ID NO: 184813 - RNA, 19 nt, Homo sapiens
  misc_RNA (1)...(19): siRNA sense strand
uuuggagacugaucuuuau

SEQ ID NO: 184814 - RNA, 19 nt, Homo sapiens
  misc_RNA (1)...(19): siRNA sense strand
gagaaaaggacaucaaaca

SEQ ID NO: 184815 - RNA, 19 nt, Homo sapiens
  misc_RNA (1)...(19): siRNA sense strand
gucuugaugucacugauau

SEQ ID NO: 184816 - RNA, 19 nt, Homo sapiens
  misc_RNA (1)...(19): siRNA sense strand
uagaaacucugagaaacag

SEQ ID NO: 184817 - RNA, 19 nt, Homo sapiens
  misc_RNA (1)...(19): siRNA sense strand
ugaugucacugauauugca

SEQ ID NO: 184818 - RNA, 19 nt, Homo sapiens
  misc_RNA (1)...(19): siRNA sense strand
gagaaaagcauuguuguca

SEQ ID NO: 184819 - RNA, 19 nt, Homo sapiens
  misc_RNA (1)...(19): siRNA sense strand
uaagcagaauccaccuugu

SEQ ID NO: 184820 - RNA, 19 nt, Homo sapiens
  misc_RNA (1)...(19): siRNA sense strand
gggaaacugcaaucuguuc

SEQ ID NO: 184821 - RNA, 19 nt, Homo sapiens
  misc_RNA (1)...(19): siRNA sense strand
uggagacugaucuuuauaa

SEQ ID NO: 184822 - RNA, 19 nt, Homo sapiens
  misc_RNA (1)...(19): siRNA sense strand
cuuuggagacugaucuuua

SEQ ID NO: 184823 - RNA, 19 nt, Homo sapiens
  misc_RNA (1)...(19): siRNA sense strand
aggaagcuuuggagacuga

SEQ ID NO: 184824 - RNA, 19 nt, Homo sapiens
  misc_RNA (1)...(19): siRNA sense strand
augagcaccugcagaaaga

SEQ ID NO: 184825 - RNA, 19 nt, Homo sapiens
  misc_RNA (1)...(19): siRNA sense strand
aggaccagcugauguauac

SEQ ID NO: 184826 - RNA, 19 nt, Homo sapiens
  misc_RNA (1)...(19): siRNA sense strand
cugaugacauggcaaugga

SEQ ID NO: 184827 - RNA, 19 nt, Homo sapiens
  misc_RNA (1)...(19): siRNA sense strand
ucugagagauuggaaugau

SEQ ID NO: 184828 - RNA, 19 nt, Homo sapiens
  misc_RNA (1)...(19): siRNA sense strand
gaaacugcaaucuguucug

SEQ ID NO: 184829 - RNA, 19 nt, Homo sapiens
  misc_RNA (1)...(19): siRNA sense strand
agaaacagcagcccagaag

SEQ ID NO: 184830 - RNA, 19 nt, Homo sapiens
  misc_RNA (1)...(19): siRNA sense strand
cgagauccagucuaugaug

SEQ ID NO: 184831 - RNA, 19 nt, Homo sapiens
  misc_RNA (1)...(19): siRNA sense strand
cagcgaaugcaaagaaauc

SEQ ID NO: 184832 - RNA, 19 nt, Homo sapiens
  misc_RNA (1)...(19): siRNA sense strand
aaaggcuucugagagauug

SEQ ID NO: 184833 - RNA, 19 nt, Homo sapiens
  misc_RNA (1)...(19): siRNA sense strand
gaucuuuauaagcgguuua

SEQ ID NO: 184834 - RNA, 19 nt, Homo sapiens
  misc_RNA (1)...(19): siRNA sense strand
caggaccagcugauguaua

SEQ ID NO: 184835 - RNA, 19 nt, Homo sapiens
  misc_RNA (1)...(19): siRNA sense strand
uuagaaacucugagaaaca

SEQ ID NO: 184836 - RNA, 19 nt, Homo sapiens
  misc_RNA (1)...(19): siRNA sense strand
agauuggaaugauguucaa

SEQ ID NO: 184837 - RNA, 19 nt, Homo sapiens
  misc_RNA (1)...(19): siRNA sense strand
ugaaaggcuucugagagau

SEQ ID NO: 184838 - RNA, 19 nt, Homo sapiens
  misc_RNA (1)...(19): siRNA sense strand
aaaaugagcaccugcagaa

SEQ ID NO: 184839 - RNA, 19 nt, Homo sapiens
  misc_RNA (1)...(19): siRNA sense strand
ugagagauuggaaugaugu

SEQ ID NO: 184840 - RNA, 19 nt, Homo sapiens
  misc_RNA (1)...(19): siRNA sense strand
aagcagaauccaccuuguu

SEQ ID NO: 184841 - RNA, 19 nt, Homo sapiens
  misc_RNA (1)...(19): siRNA sense strand
aacccaguauaacucauuu

SEQ ID NO: 184842 - RNA, 19 nt, Homo sapiens
  misc_RNA (1)...(19): siRNA sense strand
gauggucauucagcaugga

SEQ ID NO: 184843 - RNA, 19 nt, Homo sapiens
  misc_RNA (1)...(19): siRNA sense strand
cuuuagaaacucugagaaa

SEQ ID NO: 184844 - RNA, 19 nt, Homo sapiens
  misc_RNA (1)...(19): siRNA sense strand
cugaaaacaugucuuuaga

SEQ ID NO: 184845 - RNA, 19 nt, Homo sapiens
  misc_RNA (1)...(19): siRNA sense strand
uuggaaugauguucaagga

SEQ ID NO: 184846 - RNA, 19 nt, Homo sapiens
  misc_RNA (1)...(19): siRNA sense strand
agcagaauccaccuuguuu

SEQ ID NO: 184847 - RNA, 19 nt, Homo sapiens
  misc_RNA (1)...(19): siRNA sense strand
ucaggagaaucagcuucaa

SEQ ID NO: 184848 - RNA, 19 nt, Homo sapiens
  misc_RNA (1)...(19): siRNA sense strand
gaguacugaugaggaaagu

SEQ ID NO: 184849 - RNA, 19 nt, Homo sapiens
  misc_RNA (1)...(19): siRNA sense strand
ggaaacugcaaucuguucu

SEQ ID NO: 184850 - RNA, 19 nt, Homo sapiens
  misc_RNA (1)...(19): siRNA sense strand
gcagcucaagaacgagaaa

SEQ ID NO: 184851 - RNA, 19 nt, Homo sapiens
  misc_RNA (1)...(19): siRNA sense strand
ugagugcuaaggaagcuuu

SEQ ID NO: 184852 - RNA, 19 nt, Homo sapiens
  misc_RNA (1)...(19): siRNA sense strand
aaaugaaaggcuucugaga

SEQ ID NO: 184853 - RNA, 19 nt, Homo sapiens
  misc_RNA (1)...(19): siRNA sense strand
gcaggaccagcugauguau

SEQ ID NO: 184854 - RNA, 19 nt, Homo sapiens
  misc_RNA (1)...(19): siRNA sense strand
aggagaaucagcuucaaga

SEQ ID NO: 184855 - RNA, 19 nt, Homo sapiens
  misc_RNA (1)...(19): siRNA sense strand
acugauauugcaccaagua

SEQ ID NO: 184856 - RNA, 19 nt, Homo sapiens
  misc_RNA (1)...(19): siRNA sense strand
aaucuguucugaaaugacu

SEQ ID NO: 184857 - RNA, 19 nt, Homo sapiens
  misc_RNA (1)...(19): siRNA sense strand
ccaagaagcugaugacaug

SEQ ID NO: 184858 - RNA, 19 nt, Homo sapiens
  misc_RNA (1)...(19): siRNA sense strand
gaauccaccuuguuucuga

SEQ ID NO: 184859 - RNA, 19 nt, Homo sapiens
  misc_RNA (1)...(19): siRNA sense strand
gagcacaucucagcugaaa

SEQ ID NO: 184860 - RNA, 19 nt, Homo sapiens
  misc_RNA (1)...(19): siRNA sense strand
aaacccagcugaagucauu

SEQ ID NO: 184861 - RNA, 19 nt, Homo sapiens
  misc_RNA (1)...(19): siRNA sense strand
gaaauauguuggugaacug

SEQ ID NO: 184862 - RNA, 19 nt, Homo sapiens
  misc_RNA (1)...(19): siRNA sense strand
gcugauguauacacguuua

SEQ ID NO: 184863 - RNA, 19 nt, Homo sapiens
  misc_RNA (1)...(19): siRNA sense strand
gagaaucagcuucaagaaa

SEQ ID NO: 184864 - RNA, 19 nt, Homo sapiens
  misc_RNA (1)...(19): siRNA sense strand
ggaaauauguuggugaacu

SEQ ID NO: 184865 - RNA, 19 nt, Homo sapiens
  misc_RNA (1)...(19): siRNA sense strand
gagauccagucuaugauga

SEQ ID NO: 184866 - RNA, 19 nt, Homo sapiens
  misc_RNA (1)...(19): siRNA sense strand
ugaccgagauccagucuau

SEQ ID NO: 184867 - RNA, 19 nt, Homo sapiens
  misc_RNA (1)...(19): siRNA sense strand
ccugaaagaugucucauuc

SEQ ID NO: 184868 - RNA, 19 nt, Homo sapiens
  misc_RNA (1)...(19): siRNA sense strand
gaaaggcuucugagagauu

SEQ ID NO: 184869 - RNA, 19 nt, Homo sapiens
  misc_RNA (1)...(19): siRNA sense strand
cagcugaagucauuagaga

SEQ ID NO: 184870 - RNA, 19 nt, Homo sapiens
  misc_RNA (1)...(19): siRNA sense strand
aaaccaaacugaucucucu

SEQ ID NO: 184871 - RNA, 19 nt, Homo sapiens
  misc_RNA (1)...(19): siRNA sense strand
gaaagaugucucauucaga

SEQ ID NO: 184872 - RNA, 19 nt, Homo sapiens
  misc_RNA (1)...(19): siRNA sense strand
gauauugcaccaaguagaa

SEQ ID NO: 184873 - RNA, 19 nt, Homo sapiens
  misc_RNA (1)...(19): siRNA sense strand
gcaaucuguucugaaauga

SEQ ID NO: 184874 - RNA, 19 nt, Homo sapiens
  misc_RNA (1)...(19): siRNA sense strand
ggagacugaucuuuauaag

SEQ ID NO: 184875 - RNA, 19 nt, Homo sapiens
  misc_RNA (1)...(19): siRNA sense strand
guacugaugaggaaaguga

SEQ ID NO: 184876 - RNA, 19 nt, Homo sapiens
  misc_RNA (1)...(19): siRNA sense strand
gaacccaguauaacucauu

SEQ ID NO: 184877 - RNA, 19 nt, Homo sapiens
  misc_RNA (1)...(19): siRNA sense strand
ugagaguacugaugaggaa

SEQ ID NO: 184878 - RNA, 19 nt, Homo sapiens
  misc_RNA (1)...(19): siRNA sense strand
aaacugcaaucuguucuga

SEQ ID NO: 184879 - RNA, 19 nt, Homo sapiens
  misc_RNA (1)...(19): siRNA sense strand
gacagcgaaugcaaagaaa

SEQ ID NO: 184880 - RNA, 19 nt, Homo sapiens
  misc_RNA (1)...(19): siRNA sense strand
aaaugcagcucaagaacga

SEQ ID NO: 184881 - RNA, 19 nt, Homo sapiens
  misc_RNA (1)...(19): siRNA sense strand
cagcugauguauacacguu

SEQ ID NO: 184882 - RNA, 19 nt, Homo sapiens
  misc_RNA (1)...(19): siRNA sense strand
agaaucagcuucaagaaaa

SEQ ID NO: 184883 - RNA, 19 nt, Homo sapiens
  misc_RNA (1)...(19): siRNA sense strand
uaaggaagcuuuggagacu

SEQ ID NO: 184884 - RNA, 19 nt, Homo sapiens
  misc_RNA (1)...(19): siRNA sense strand
augaaaggcuucugagaga

SEQ ID NO: 184885 - RNA, 19 nt, Homo sapiens
  misc_RNA (1)...(19): siRNA sense strand
gguguugaaugagaagaaa

SEQ ID NO: 184886 - RNA, 19 nt, Homo sapiens
  misc_RNA (1)...(19): siRNA sense strand
ucagagauuucccaagaag

SEQ ID NO: 184887 - RNA, 19 nt, Homo sapiens
  misc_RNA (1)...(19): siRNA sense strand
ccucuuugaugagauuuaa

SEQ ID NO: 184888 - RNA, 19 nt, Homo sapiens
  misc_RNA (1)...(19): siRNA sense strand
gaaaaugaaaggcuucuga

SEQ ID NO: 184889 - RNA, 19 nt, Homo sapiens
  misc_RNA (1)...(19): siRNA sense strand
ggaaucugguuuuguuauu

SEQ ID NO: 184890 - RNA, 19 nt, Homo sapiens
  misc_RNA (1)...(19): siRNA sense strand
ggagaaucagcuucaagaa

SEQ ID NO: 184891 - RNA, 19 nt, Homo sapiens
  misc_RNA (1)...(19): siRNA sense strand
agacagcgaaugcaaagaa

SEQ ID NO: 184892 - RNA, 19 nt, Homo sapiens
  misc_RNA (1)...(19): siRNA sense strand
gauccagucuaugaugaga

SEQ ID NO: 184893 - RNA, 19 nt, Homo sapiens
  misc_RNA (1)...(19): siRNA sense strand
gagcaggaccagcugaugu

SEQ ID NO: 184894 - RNA, 19 nt, Homo sapiens
  misc_RNA (1)...(19): siRNA sense strand
guuauuacacuuacugaug

SEQ ID NO: 184895 - RNA, 19 nt, Homo sapiens
  misc_RNA (1)...(19): siRNA sense strand
aaaaggacaucaaacaaga

SEQ ID NO: 184896 - RNA, 19 nt, Homo sapiens
  misc_RNA (1)...(19): siRNA sense strand
ggagacagcgaaugcaaag

SEQ ID NO: 184897 - RNA, 19 nt, Homo sapiens
  misc_RNA (1)...(19): siRNA sense strand
ugcaaucuguucugaaaug

SEQ ID NO: 184898 - RNA, 19 nt, Homo sapiens
  misc_RNA (1)...(19): siRNA sense strand
acugcaaucuguucugaaa

SEQ ID NO: 184899 - RNA, 19 nt, Homo sapiens
  misc_RNA (1)...(19): siRNA sense strand
gagauuggaaugauguuca

SEQ ID NO: 184900 - RNA, 19 nt, Homo sapiens
  misc_RNA (1)...(19): siRNA sense strand
gaaacagcagcccagaaga

SEQ ID NO: 184901 - RNA, 19 nt, Homo sapiens
  misc_RNA (1)...(19): siRNA sense strand
gguuuauucugguguugaa

SEQ ID NO: 184902 - RNA, 19 nt, Homo sapiens
  misc_RNA (1)...(19): siRNA sense strand
ugggacaguuucugaauca

SEQ ID NO: 184903 - RNA, 19 nt, Homo sapiens
  misc_RNA (1)...(19): siRNA sense strand
caucucagcugaaaacaug

SEQ ID NO: 184904 - RNA, 19 nt, Homo sapiens
  misc_RNA (1)...(19): siRNA sense strand
gaugacauggcaauggaaa

SEQ ID NO: 184905 - RNA, 19 nt, Homo sapiens
  misc_RNA (1)...(19): siRNA sense strand
gagaaacagcagcccagaa

SEQ ID NO: 184906 - RNA, 19 nt, Homo sapiens
  misc_RNA (1)...(19): siRNA sense strand
gagcaccugcagaaagaaa

SEQ ID NO: 184907 - RNA, 19 nt, Homo sapiens
  misc_RNA (1)...(19): siRNA sense strand
gaaaaggacaucaaacaag

SEQ ID NO: 184908 - RNA, 19 nt, Homo sapiens
  misc_RNA (1)...(19): siRNA sense strand
agaccucuuugaugagauu

SEQ ID NO: 184909 - RNA, 19 nt, Homo sapiens
  misc_RNA (1)...(19): siRNA sense strand
agggaaauauguuggugaa

SEQ ID NO: 184910 - RNA, 19 nt, Homo sapiens
  misc_RNA (1)...(19): siRNA sense strand
gauguucaaggacgauuug

SEQ ID NO: 184911 - RNA, 19 nt, Homo sapiens
  misc_RNA (1)...(19): siRNA sense strand
ggacaccauugcagaaaau

SEQ ID NO: 184912 - RNA, 19 nt, Homo sapiens
  misc_RNA (1)...(19): siRNA sense strand
gcagaauccaccuuguuuc

SEQ ID NO: 184913 - RNA, 19 nt, Homo sapiens
  misc_RNA (1)...(19): siRNA sense strand
uuuggagacugaucuuuau

SEQ ID NO: 184914 - RNA, 19 nt, Homo sapiens
  misc_RNA (1)...(19): siRNA sense strand
gagaaaaggacaucaaaca

SEQ ID NO: 184915 - RNA, 19 nt, Homo sapiens
  misc_RNA (1)...(19): siRNA sense strand
gucuugaugucacugauau

SEQ ID NO: 184916 - RNA, 19 nt, Homo sapiens
  misc_RNA (1)...(19): siRNA sense strand
uagaaacucugagaaacag

SEQ ID NO: 184917 - RNA, 19 nt, Homo sapiens
  misc_RNA (1)...(19): siRNA sense strand
ugaugucacugauauugca

SEQ ID NO: 184918 - RNA, 19 nt, Homo sapiens
  misc_RNA (1)...(19): siRNA sense strand
gagaaaagcauuguuguca

SEQ ID NO: 184919 - RNA, 19 nt, Homo sapiens
  misc_RNA (1)...(19): siRNA sense strand
uaagcagaauccaccuugu

SEQ ID NO: 184920 - RNA, 19 nt, Homo sapiens
  misc_RNA (1)...(19): siRNA sense strand
gggaaacugcaaucuguuc

SEQ ID NO: 184921 - RNA, 19 nt, Homo sapiens
  misc_RNA (1)...(19): siRNA sense strand
uggagacugaucuuuauaa

SEQ ID NO: 184922 - RNA, 19 nt, Homo sapiens
  misc_RNA (1)...(19): siRNA sense strand
cuuuggagacugaucuuua

SEQ ID NO: 184923 - RNA, 19 nt, Homo sapiens
  misc_RNA (1)...(19): siRNA sense strand
aggaagcuuuggagacuga

SEQ ID NO: 184924 - RNA, 19 nt, Homo sapiens
  misc_RNA (1)...(19): siRNA sense strand
augagcaccugcagaaaga

SEQ ID NO: 184925 - RNA, 19 nt, Homo sapiens
  misc_RNA (1)...(19): siRNA sense strand
aggaccagcugauguauac

SEQ ID NO: 184926 - RNA, 19 nt, Homo sapiens
  misc_RNA (1)...(19): siRNA sense strand
cugaugacauggcaaugga

SEQ ID NO: 184927 - RNA, 19 nt, Homo sapiens
  misc_RNA (1)...(19): siRNA sense strand
ucugagagauuggaaugau

SEQ ID NO: 184928 - RNA, 19 nt, Homo sapiens
  misc_RNA (1)...(19): siRNA sense strand
gaaacugcaaucuguucug

SEQ ID NO: 184929 - RNA, 19 nt, Homo sapiens
  misc_RNA (1)...(19): siRNA sense strand
agaaacagcagcccagaag

SEQ ID NO: 184930 - RNA, 19 nt, Homo sapiens
  misc_RNA (1)...(19): siRNA sense strand
cgagauccagucuaugaug

SEQ ID NO: 184931 - RNA, 19 nt, Homo sapiens
  misc_RNA (1)...(19): siRNA sense strand
cagcgaaugcaaagaaauc

SEQ ID NO: 184932 - RNA, 19 nt, Homo sapiens
  misc_RNA (1)...(19): siRNA sense strand
aaaggcuucugagagauug

SEQ ID NO: 184933 - RNA, 19 nt, Homo sapiens
  misc_RNA (1)...(19): siRNA sense strand
gaucuuuauaagcgguuua

SEQ ID NO: 184934 - RNA, 19 nt, Homo sapiens
  misc_RNA (1)...(19): siRNA sense strand
caggaccagcugauguaua

SEQ ID NO: 184935 - RNA, 19 nt, Homo sapiens
  misc_RNA (1)...(19): siRNA sense strand
uuagaaacucugagaaaca

SEQ ID NO: 184936 - RNA, 19 nt, Homo sapiens
  misc_RNA (1)...(19): siRNA sense strand
agauuggaaugauguucaa

SEQ ID NO: 184937 - RNA, 19 nt, Homo sapiens
  misc_RNA (1)...(19): siRNA sense strand
ugaaaggcuucugagagau

SEQ ID NO: 184938 - RNA, 19 nt, Homo sapiens
  misc_RNA (1)...(19): siRNA sense strand
aaaaugagcaccugcagaa

SEQ ID NO: 184939 - RNA, 19 nt, Homo sapiens
  misc_RNA (1)...(19): siRNA sense strand
ugagagauuggaaugaugu

SEQ ID NO: 184940 - RNA, 19 nt, Homo sapiens
  misc_RNA (1)...(19): siRNA sense strand
aagcagaauccaccuuguu

SEQ ID NO: 184941 - RNA, 19 nt, Homo sapiens
  misc_RNA (1)...(19): siRNA sense strand
aacccaguauaacucauuu

SEQ ID NO: 184942 - RNA, 19 nt, Homo sapiens
  misc_RNA (1)...(19): siRNA sense strand
gauggucauucagcaugga

SEQ ID NO: 184943 - RNA, 19 nt, Homo sapiens
  misc_RNA (1)...(19): siRNA sense strand
cuuuagaaacucugagaaa

SEQ ID NO: 184944 - RNA, 19 nt, Homo sapiens
  misc_RNA (1)...(19): siRNA sense strand
cugaaaacaugucuuuaga

SEQ ID NO: 184945 - RNA, 19 nt, Homo sapiens
  misc_RNA (1)...(19): siRNA sense strand
uuggaaugauguucaagga

SEQ ID NO: 184946 - RNA, 19 nt, Homo sapiens
  misc_RNA (1)...(19): siRNA sense strand
agcagaauccaccuuguuu

SEQ ID NO: 184947 - RNA, 19 nt, Homo sapiens
  misc_RNA (1)...(19): siRNA sense strand
ucaggagaaucagcuucaa

SEQ ID NO: 184948 - RNA, 19 nt, Homo sapiens
  misc_RNA (1)...(19): siRNA sense strand
gaguacugaugaggaaagu

SEQ ID NO: 184949 - RNA, 19 nt, Homo sapiens
  misc_RNA (1)...(19): siRNA sense strand
ggaaacugcaaucuguucu

SEQ ID NO: 184950 - RNA, 19 nt, Homo sapiens
  misc_RNA (1)...(19): siRNA sense strand
gcagcucaagaacgagaaa

SEQ ID NO: 184951 - RNA, 19 nt, Homo sapiens
  misc_RNA (1)...(19): siRNA sense strand
ugagugcuaaggaagcuuu

SEQ ID NO: 184952 - RNA, 19 nt, Homo sapiens
  misc_RNA (1)...(19): siRNA sense strand
aaaugaaaggcuucugaga

SEQ ID NO: 184953 - RNA, 19 nt, Homo sapiens
  misc_RNA (1)...(19): siRNA sense strand
gcaggaccagcugauguau

SEQ ID NO: 184954 - RNA, 19 nt, Homo sapiens
  misc_RNA (1)...(19): siRNA sense strand
aggagaaucagcuucaaga

SEQ ID NO: 184955 - RNA, 19 nt, Homo sapiens
  misc_RNA (1)...(19): siRNA sense strand
acugauauugcaccaagua

SEQ ID NO: 184956 - RNA, 19 nt, Homo sapiens
  misc_RNA (1)...(19): siRNA sense strand
aaucuguucugaaaugacu

SEQ ID NO: 184957 - RNA, 19 nt, Homo sapiens
  misc_RNA (1)...(19): siRNA sense strand
ccaagaagcugaugacaug

SEQ ID NO: 184958 - RNA, 19 nt, Homo sapiens
  misc_RNA (1)...(19): siRNA sense strand
gaauccaccuuguuucuga

SEQ ID NO: 184959 - RNA, 19 nt, Homo sapiens
  misc_RNA (1)...(19): siRNA sense strand
gagcacaucucagcugaaa

SEQ ID NO: 184960 - RNA, 19 nt, Homo sapiens
  misc_RNA (1)...(19): siRNA sense strand
aaacccagcugaagucauu

SEQ ID NO: 184961 - RNA, 19 nt, Homo sapiens
  misc_RNA (1)...(19): siRNA sense strand
gaaauauguuggugaacug

SEQ ID NO: 184962 - RNA, 19 nt, Homo sapiens
  misc_RNA (1)...(19): siRNA sense strand
gcugauguauacacguuua

SEQ ID NO: 184963 - RNA, 19 nt, Homo sapiens
  misc_RNA (1)...(19): siRNA sense strand
gagaaucagcuucaagaaa

SEQ ID NO: 184964 - RNA, 19 nt, Homo sapiens
  misc_RNA (1)...(19): siRNA sense strand
ggaaauauguuggugaacu

SEQ ID NO: 184965 - RNA, 19 nt, Homo sapiens
  misc_RNA (1)...(19): siRNA sense strand
gagauccagucuaugauga

SEQ ID NO: 184966 - RNA, 19 nt, Homo sapiens
  misc_RNA (1)...(19): siRNA sense strand
ugaccgagauccagucuau

SEQ ID NO: 184967 - RNA, 19 nt, Homo sapiens
  misc_RNA (1)...(19): siRNA sense strand
ccugaaagaugucucauuc

SEQ ID NO: 184968 - RNA, 19 nt, Homo sapiens
  misc_RNA (1)...(19): siRNA sense strand
gaaaggcuucugagagauu

SEQ ID NO: 184969 - RNA, 19 nt, Homo sapiens
  misc_RNA (1)...(19): siRNA sense strand
cagcugaagucauuagaga

SEQ ID NO: 184970 - RNA, 19 nt, Homo sapiens
  misc_RNA (1)...(19): siRNA sense strand
aaaccaaacugaucucucu

SEQ ID NO: 184971 - RNA, 19 nt, Homo sapiens
  misc_RNA (1)...(19): siRNA sense strand
gaaagaugucucauucaga

SEQ ID NO: 184972 - RNA, 19 nt, Homo sapiens
  misc_RNA (1)...(19): siRNA sense strand
gauauugcaccaaguagaa

SEQ ID NO: 184973 - RNA, 19 nt, Homo sapiens
  misc_RNA (1)...(19): siRNA sense strand
gcaaucuguucugaaauga

SEQ ID NO: 184974 - RNA, 19 nt, Homo sapiens
  misc_RNA (1)...(19): siRNA sense strand
ggagacugaucuuuauaag

SEQ ID NO: 184975 - RNA, 19 nt, Homo sapiens
  misc_RNA (1)...(19): siRNA sense strand
guacugaugaggaaaguga

SEQ ID NO: 184976 - RNA, 19 nt, Homo sapiens
  misc_RNA (1)...(19): siRNA sense strand
gaacccaguauaacucauu

SEQ ID NO: 184977 - RNA, 19 nt, Homo sapiens
  misc_RNA (1)...(19): siRNA sense strand
ugagaguacugaugaggaa

SEQ ID NO: 184978 - RNA, 19 nt, Homo sapiens
  misc_RNA (1)...(19): siRNA sense strand
aaacugcaaucuguucuga

SEQ ID NO: 184979 - RNA, 19 nt, Homo sapiens
  misc_RNA (1)...(19): siRNA sense strand
gacagcgaaugcaaagaaa

SEQ ID NO: 184980 - RNA, 19 nt, Homo sapiens
  misc_RNA (1)...(19): siRNA sense strand
aaaugcagcucaagaacga

SEQ ID NO: 184981 - RNA, 19 nt, Homo sapiens
  misc_RNA (1)...(19): siRNA sense strand
cagcugauguauacacguu

SEQ ID NO: 184982 - RNA, 19 nt, Homo sapiens
  misc_RNA (1)...(19): siRNA sense strand
agaaucagcuucaagaaaa

SEQ ID NO: 184983 - RNA, 19 nt, Homo sapiens
  misc_RNA (1)...(19): siRNA sense strand
uaaggaagcuuuggagacu

SEQ ID NO: 184984 - RNA, 19 nt, Homo sapiens
  misc_RNA (1)...(19): siRNA sense strand
augaaaggcuucugagaga

SEQ ID NO: 184985 - RNA, 19 nt, Homo sapiens
  misc_RNA (1)...(19): siRNA sense strand
gguguugaaugagaagaaa

SEQ ID NO: 184986 - RNA, 19 nt, Homo sapiens
  misc_RNA (1)...(19): siRNA sense strand
ucagagauuucccaagaag

SEQ ID NO: 184987 - RNA, 19 nt, Homo sapiens
  misc_RNA (1)...(19): siRNA sense strand
ccucuuugaugagauuuaa

SEQ ID NO: 184988 - RNA, 19 nt, Homo sapiens
  misc_RNA (1)...(19): siRNA sense strand
gaaaaugaaaggcuucuga

SEQ ID NO: 184989 - RNA, 19 nt, Homo sapiens
  misc_RNA (1)...(19): siRNA sense strand
ggaaucugguuuuguuauu

SEQ ID NO: 184990 - RNA, 19 nt, Homo sapiens
  misc_RNA (1)...(19): siRNA sense strand
ggagaaucagcuucaagaa

SEQ ID NO: 184991 - RNA, 19 nt, Homo sapiens
  misc_RNA (1)...(19): siRNA sense strand
agacagcgaaugcaaagaa

SEQ ID NO: 184992 - RNA, 19 nt, Homo sapiens
  misc_RNA (1)...(19): siRNA sense strand
gauccagucuaugaugaga

SEQ ID NO: 184993 - RNA, 19 nt, Homo sapiens
  misc_RNA (1)...(19): siRNA sense strand
gagcaggaccagcugaugu

SEQ ID NO: 184994 - RNA, 19 nt, Homo sapiens
  misc_RNA (1)...(19): siRNA sense strand
guuauuacacuuacugaug

SEQ ID NO: 184995 - RNA, 19 nt, Homo sapiens
  misc_RNA (1)...(19): siRNA sense strand
aaaaggacaucaaacaaga

SEQ ID NO: 184996 - RNA, 19 nt, Homo sapiens
  misc_RNA (1)...(19): siRNA sense strand
ggagacagcgaaugcaaag

SEQ ID NO: 184997 - RNA, 19 nt, Homo sapiens
  misc_RNA (1)...(19): siRNA sense strand
ugcaaucuguucugaaaug

SEQ ID NO: 184998 - RNA, 19 nt, Homo sapiens
  misc_RNA (1)...(19): siRNA sense strand
acugcaaucuguucugaaa

SEQ ID NO: 184999 - RNA, 19 nt, Homo sapiens
  misc_RNA (1)...(19): siRNA sense strand
gagauuggaaugauguuca

SEQ ID NO: 185000 - RNA, 19 nt, Homo sapiens
  misc_RNA (1)...(19): siRNA sense strand
gaaacagcagcccagaaga

SEQ ID NO: 185001 - RNA, 19 nt, Homo sapiens
  misc_RNA (1)...(19): siRNA sense strand
gguuuauucugguguugaa

SEQ ID NO: 185002 - RNA, 19 nt, Homo sapiens
  misc_RNA (1)...(19): siRNA sense strand
ugggacaguuucugaauca

SEQ ID NO: 185003 - RNA, 19 nt, Homo sapiens
  misc_RNA (1)...(19): siRNA sense strand
caucucagcugaaaacaug

SEQ ID NO: 185004 - RNA, 19 nt, Homo sapiens
  misc_RNA (1)...(19): siRNA sense strand
gaugacauggcaauggaaa

SEQ ID NO: 185005 - RNA, 19 nt, Homo sapiens
  misc_RNA (1)...(19): siRNA sense strand
gagaaacagcagcccagaa

SEQ ID NO: 185006 - RNA, 19 nt, Homo sapiens
  misc_RNA (1)...(19): siRNA sense strand
gagcaccugcagaaagaaa

SEQ ID NO: 185007 - RNA, 19 nt, Homo sapiens
  misc_RNA (1)...(19): siRNA sense strand
gaaaaggacaucaaacaag

SEQ ID NO: 185008 - RNA, 19 nt, Homo sapiens
  misc_RNA (1)...(19): siRNA sense strand
agaccucuuugaugagauu

SEQ ID NO: 185009 - RNA, 19 nt, Homo sapiens
  misc_RNA (1)...(19): siRNA sense strand
agggaaauauguuggugaa

SEQ ID NO: 185010 - RNA, 19 nt, Homo sapiens
  misc_RNA (1)...(19): siRNA sense strand
gauguucaaggacgauuug

SEQ ID NO: 185011 - RNA, 19 nt, Homo sapiens
  misc_RNA (1)...(19): siRNA sense strand
ggacaccauugcagaaaau

SEQ ID NO: 185012 - RNA, 19 nt, Homo sapiens
  misc_RNA (1)...(19): siRNA sense strand
gcagaauccaccuuguuuc

SEQ ID NO: 185013 - RNA, 19 nt, Homo sapiens
  misc_RNA (1)...(19): siRNA sense strand
uuuggagacugaucuuuau

SEQ ID NO: 185014 - RNA, 19 nt, Homo sapiens
  misc_RNA (1)...(19): siRNA sense strand
gagaaaaggacaucaaaca

SEQ ID NO: 185015 - RNA, 19 nt, Homo sapiens
  misc_RNA (1)...(19): siRNA sense strand
gucuugaugucacugauau

SEQ ID NO: 185016 - RNA, 19 nt, Homo sapiens
  misc_RNA (1)...(19): siRNA sense strand
uagaaacucugagaaacag

SEQ ID NO: 185017 - RNA, 19 nt, Homo sapiens
  misc_RNA (1)...(19): siRNA sense strand
ugaugucacugauauugca

SEQ ID NO: 185018 - RNA, 19 nt, Homo sapiens
  misc_RNA (1)...(19): siRNA sense strand
gagaaaagcauuguuguca

SEQ ID NO: 185019 - RNA, 19 nt, Homo sapiens
  misc_RNA (1)...(19): siRNA sense strand
uaagcagaauccaccuugu

SEQ ID NO: 185020 - RNA, 19 nt, Homo sapiens
  misc_RNA (1)...(19): siRNA sense strand
gggaaacugcaaucuguuc

SEQ ID NO: 185021 - RNA, 19 nt, Homo sapiens
  misc_RNA (1)...(19): siRNA sense strand
uggagacugaucuuuauaa

SEQ ID NO: 185022 - RNA, 19 nt, Homo sapiens
  misc_RNA (1)...(19): siRNA sense strand
cuuuggagacugaucuuua

SEQ ID NO: 185023 - RNA, 19 nt, Homo sapiens
  misc_RNA (1)...(19): siRNA sense strand
aggaagcuuuggagacuga

SEQ ID NO: 185024 - RNA, 19 nt, Homo sapiens
  misc_RNA (1)...(19): siRNA sense strand
augagcaccugcagaaaga

SEQ ID NO: 185025 - RNA, 19 nt, Homo sapiens
  misc_RNA (1)...(19): siRNA sense strand
aggaccagcugauguauac

SEQ ID NO: 185026 - RNA, 19 nt, Homo sapiens
  misc_RNA (1)...(19): siRNA sense strand
cugaugacauggcaaugga

SEQ ID NO: 185027 - RNA, 19 nt, Homo sapiens
  misc_RNA (1)...(19): siRNA sense strand
ucugagagauuggaaugau

SEQ ID NO: 185028 - RNA, 19 nt, Homo sapiens
  misc_RNA (1)...(19): siRNA sense strand
gaaacugcaaucuguucug

SEQ ID NO: 185029 - RNA, 19 nt, Homo sapiens
  misc_RNA (1)...(19): siRNA sense strand
agaaacagcagcccagaag

SEQ ID NO: 185030 - RNA, 19 nt, Homo sapiens
  misc_RNA (1)...(19): siRNA sense strand
cgagauccagucuaugaug

SEQ ID NO: 185031 - RNA, 19 nt, Homo sapiens
  misc_RNA (1)...(19): siRNA sense strand
cagcgaaugcaaagaaauc

SEQ ID NO: 185032 - RNA, 19 nt, Homo sapiens
  misc_RNA (1)...(19): siRNA sense strand
aaaggcuucugagagauug

SEQ ID NO: 185033 - RNA, 19 nt, Homo sapiens
  misc_RNA (1)...(19): siRNA sense strand
gaucuuuauaagcgguuua

SEQ ID NO: 185034 - RNA, 19 nt, Homo sapiens
  misc_RNA (1)...(19): siRNA sense strand
caggaccagcugauguaua

SEQ ID NO: 185035 - RNA, 19 nt, Homo sapiens
  misc_RNA (1)...(19): siRNA sense strand
uuagaaacucugagaaaca

SEQ ID NO: 185036 - RNA, 19 nt, Homo sapiens
  misc_RNA (1)...(19): siRNA sense strand
agauuggaaugauguucaa

SEQ ID NO: 185037 - RNA, 19 nt, Homo sapiens
  misc_RNA (1)...(19): siRNA sense strand
ugaaaggcuucugagagau

SEQ ID NO: 185038 - RNA, 19 nt, Homo sapiens
  misc_RNA (1)...(19): siRNA sense strand
aaaaugagcaccugcagaa

SEQ ID NO: 185039 - RNA, 19 nt, Homo sapiens
  misc_RNA (1)...(19): siRNA sense strand
ugagagauuggaaugaugu

SEQ ID NO: 185040 - RNA, 19 nt, Homo sapiens
  misc_RNA (1)...(19): siRNA sense strand
aagcagaauccaccuuguu

SEQ ID NO: 185041 - RNA, 19 nt, Homo sapiens
  misc_RNA (1)...(19): siRNA sense strand
aacccaguauaacucauuu

SEQ ID NO: 185042 - RNA, 19 nt, Homo sapiens
  misc_RNA (1)...(19): siRNA sense strand
gauggucauucagcaugga

SEQ ID NO: 185043 - RNA, 19 nt, Homo sapiens
  misc_RNA (1)...(19): siRNA sense strand
cuuuagaaacucugagaaa

SEQ ID NO: 185044 - RNA, 19 nt, Homo sapiens
  misc_RNA (1)...(19): siRNA sense strand
cugaaaacaugucuuuaga

SEQ ID NO: 185045 - RNA, 19 nt, Homo sapiens
  misc_RNA (1)...(19): siRNA sense strand
uuggaaugauguucaagga

SEQ ID NO: 185046 - RNA, 19 nt, Homo sapiens
  misc_RNA (1)...(19): siRNA sense strand
agcagaauccaccuuguuu

SEQ ID NO: 185047 - RNA, 19 nt, Homo sapiens
  misc_RNA (1)...(19): siRNA sense strand
ucaggagaaucagcuucaa

SEQ ID NO: 185048 - RNA, 19 nt, Homo sapiens
  misc_RNA (1)...(19): siRNA sense strand
gaguacugaugaggaaagu

SEQ ID NO: 185049 - RNA, 19 nt, Homo sapiens
  misc_RNA (1)...(19): siRNA sense strand
ggaaacugcaaucuguucu

SEQ ID NO: 185050 - RNA, 19 nt, Homo sapiens
  misc_RNA (1)...(19): siRNA sense strand
gcagcucaagaacgagaaa

SEQ ID NO: 185051 - RNA, 19 nt, Homo sapiens
  misc_RNA (1)...(19): siRNA sense strand
ugagugcuaaggaagcuuu

SEQ ID NO: 185052 - RNA, 19 nt, Homo sapiens
  misc_RNA (1)...(19): siRNA sense strand
aaaugaaaggcuucugaga

SEQ ID NO: 185053 - RNA, 19 nt, Homo sapiens
  misc_RNA (1)...(19): siRNA sense strand
gcaggaccagcugauguau

SEQ ID NO: 185054 - RNA, 19 nt, Homo sapiens
  misc_RNA (1)...(19): siRNA sense strand
aggagaaucagcuucaaga

SEQ ID NO: 185055 - RNA, 19 nt, Homo sapiens
  misc_RNA (1)...(19): siRNA sense strand
acugauauugcaccaagua

SEQ ID NO: 185056 - RNA, 19 nt, Homo sapiens
  misc_RNA (1)...(19): siRNA sense strand
aaucuguucugaaaugacu

SEQ ID NO: 185057 - RNA, 19 nt, Homo sapiens
  misc_RNA (1)...(19): siRNA sense strand
aaagugagcugguacagaa

SEQ ID NO: 185058 - RNA, 19 nt, Homo sapiens
  misc_RNA (1)...(19): siRNA sense strand
gcacuaaauuucucagucu

SEQ ID NO: 185059 - RNA, 19 nt, Homo sapiens
  misc_RNA (1)...(19): siRNA sense strand
gaagauagaggcagaacug

SEQ ID NO: 185060 - RNA, 19 nt, Homo sapiens
  misc_RNA (1)...(19): siRNA sense strand
gaaaggagauuauuuuagg

SEQ ID NO: 185061 - RNA, 19 nt, Homo sapiens
  misc_RNA (1)...(19): siRNA sense strand
aaacagagaggaaugagaa

SEQ ID NO: 185062 - RNA, 19 nt, Homo sapiens
  misc_RNA (1)...(19): siRNA sense strand
gcacucugaucaugcaguu

SEQ ID NO: 185063 - RNA, 19 nt, Homo sapiens
  misc_RNA (1)...(19): siRNA sense strand
ggcaugaacucuccaacga

SEQ ID NO: 185064 - RNA, 19 nt, Homo sapiens
  misc_RNA (1)...(19): siRNA sense strand
uggauacgcugaaugaaga

SEQ ID NO: 185065 - RNA, 19 nt, Homo sapiens
  misc_RNA (1)...(19): siRNA sense strand
cuacacaaccagaaaguaa

SEQ ID NO: 185066 - RNA, 19 nt, Homo sapiens
  misc_RNA (1)...(19): siRNA sense strand
guaagguguucuacuugaa

SEQ ID NO: 185067 - RNA, 19 nt, Homo sapiens
  misc_RNA (1)...(19): siRNA sense strand
ccagcaggcuuaccaggaa

SEQ ID NO: 185068 - RNA, 19 nt, Homo sapiens
  misc_RNA (1)...(19): siRNA sense strand
ggcauuugaugaagcaauu

SEQ ID NO: 185069 - RNA, 19 nt, Homo sapiens
  misc_RNA (1)...(19): siRNA sense strand
auucuaaacucuccugaaa

SEQ ID NO: 185070 - RNA, 19 nt, Homo sapiens
  misc_RNA (1)...(19): siRNA sense strand
uuagguaucuuucugaagu

SEQ ID NO: 185071 - RNA, 19 nt, Homo sapiens
  misc_RNA (1)...(19): siRNA sense strand
gcaaagaguaccgugagaa

SEQ ID NO: 185072 - RNA, 19 nt, Homo sapiens
  misc_RNA (1)...(19): siRNA sense strand
agacagcacucugaucaug

SEQ ID NO: 185073 - RNA, 19 nt, Homo sapiens
  misc_RNA (1)...(19): siRNA sense strand
gaaguggcaucuggagaca

SEQ ID NO: 185074 - RNA, 19 nt, Homo sapiens
  misc_RNA (1)...(19): siRNA sense strand
cgugucaucuccagcauug

SEQ ID NO: 185075 - RNA, 19 nt, Homo sapiens
  misc_RNA (1)...(19): siRNA sense strand
aaagacagcacucugauca

SEQ ID NO: 185076 - RNA, 19 nt, Homo sapiens
  misc_RNA (1)...(19): siRNA sense strand
uauaaagacagcacucuga

SEQ ID NO: 185077 - RNA, 19 nt, Homo sapiens
  misc_RNA (1)...(19): siRNA sense strand
agaaaucugcucucuguug

SEQ ID NO: 185078 - RNA, 19 nt, Homo sapiens
  misc_RNA (1)...(19): siRNA sense strand
agaguaccgugagaagaua

SEQ ID NO: 185079 - RNA, 19 nt, Homo sapiens
  misc_RNA (1)...(19): siRNA sense strand
ggauaaaagugagcuggua

SEQ ID NO: 185080 - RNA, 19 nt, Homo sapiens
  misc_RNA (1)...(19): siRNA sense strand
ugaaggcagucacagaaca

SEQ ID NO: 185081 - RNA, 19 nt, Homo sapiens
  misc_RNA (1)...(19): siRNA sense strand
cgaacucccagcaggcuua

SEQ ID NO: 185082 - RNA, 19 nt, Homo sapiens
  misc_RNA (1)...(19): siRNA sense strand
ggcaaagaguaccgugaga

SEQ ID NO: 185083 - RNA, 19 nt, Homo sapiens
  misc_RNA (1)...(19): siRNA sense strand
gcaguuacuuagggacaau

SEQ ID NO: 185084 - RNA, 19 nt, Homo sapiens
  misc_RNA (1)...(19): siRNA sense strand
acuaugagauucuaaacuc

SEQ ID NO: 185085 - RNA, 19 nt, Homo sapiens
  misc_RNA (1)...(19): siRNA sense strand
caugaaggcagucacagaa

SEQ ID NO: 185086 - RNA, 19 nt, Homo sapiens
  misc_RNA (1)...(19): siRNA sense strand
gcagaugggcaaagaguac

SEQ ID NO: 185087 - RNA, 19 nt, Homo sapiens
  misc_RNA (1)...(19): siRNA sense strand
cagagaggaaugagaagaa

SEQ ID NO: 185088 - RNA, 19 nt, Homo sapiens
  misc_RNA (1)...(19): siRNA sense strand
uaagguguucuacuugaaa

SEQ ID NO: 185089 - RNA, 19 nt, Homo sapiens
  misc_RNA (1)...(19): siRNA sense strand
gcaugaacucuccaacgaa

SEQ ID NO: 185090 - RNA, 19 nt, Homo sapiens
  misc_RNA (1)...(19): siRNA sense strand
ugaauuggauacgcugaau

SEQ ID NO: 185091 - RNA, 19 nt, Homo sapiens
  misc_RNA (1)...(19): siRNA sense strand
caaagaguaccgugagaag

SEQ ID NO: 185092 - RNA, 19 nt, Homo sapiens
  misc_RNA (1)...(19): siRNA sense strand
caacgaagagagaaaucug

SEQ ID NO: 185093 - RNA, 19 nt, Homo sapiens
  misc_RNA (1)...(19): siRNA sense strand
uggagcuguuggacaaaua

SEQ ID NO: 185094 - RNA, 19 nt, Homo sapiens
  misc_RNA (1)...(19): siRNA sense strand
uaucuuauucccaaugcua

SEQ ID NO: 185095 - RNA, 19 nt, Homo sapiens
  misc_RNA (1)...(19): siRNA sense strand
ggagacaacaaacaaacca

SEQ ID NO: 185096 - RNA, 19 nt, Homo sapiens
  misc_RNA (1)...(19): siRNA sense strand
gcuacacaaccagaaagua

SEQ ID NO: 185097 - RNA, 19 nt, Homo sapiens
  misc_RNA (1)...(19): siRNA sense strand
gcauugagcagaaaacaga

SEQ ID NO: 185098 - RNA, 19 nt, Homo sapiens
  misc_RNA (1)...(19): siRNA sense strand
ggagcuguuggacaaauau

SEQ ID NO: 185099 - RNA, 19 nt, Homo sapiens
  misc_RNA (1)...(19): siRNA sense strand
cugaucaugcaguuacuua

SEQ ID NO: 185100 - RNA, 19 nt, Homo sapiens
  misc_RNA (1)...(19): siRNA sense strand
gaucaugcaguuacuuagg

SEQ ID NO: 185101 - RNA, 19 nt, Homo sapiens
  misc_RNA (1)...(19): siRNA sense strand
ucuguugccuacaagaaug

SEQ ID NO: 185102 - RNA, 19 nt, Homo sapiens
  misc_RNA (1)...(19): siRNA sense strand
gaauuggauacgcugaaug

SEQ ID NO: 185103 - RNA, 19 nt, Homo sapiens
  misc_RNA (1)...(19): siRNA sense strand
gaaagaaaugcagccuaca

SEQ ID NO: 185104 - RNA, 19 nt, Homo sapiens
  misc_RNA (1)...(19): siRNA sense strand
aaaccacugugucgaacuc

SEQ ID NO: 185105 - RNA, 19 nt, Homo sapiens
  misc_RNA (1)...(19): siRNA sense strand
aagaguaccgugagaagau

SEQ ID NO: 185106 - RNA, 19 nt, Homo sapiens
  misc_RNA (1)...(19): siRNA sense strand
ccaugaaggcagucacaga

SEQ ID NO: 185107 - RNA, 19 nt, Homo sapiens
  misc_RNA (1)...(19): siRNA sense strand
aauuggauacgcugaauga

SEQ ID NO: 185108 - RNA, 19 nt, Homo sapiens
  misc_RNA (1)...(19): siRNA sense strand
gucuuggucuggcacuaaa

SEQ ID NO: 185109 - RNA, 19 nt, Homo sapiens
  misc_RNA (1)...(19): siRNA sense strand
uuacuuagggacaaucuca

SEQ ID NO: 185110 - RNA, 19 nt, Homo sapiens
  misc_RNA (1)...(19): siRNA sense strand
cagcagaugggcaaagagu

SEQ ID NO: 185111 - RNA, 19 nt, Homo sapiens
  misc_RNA (1)...(19): siRNA sense strand
uaaagacagcacucugauc

SEQ ID NO: 185112 - RNA, 19 nt, Homo sapiens
  misc_RNA (1)...(19): siRNA sense strand
gauucuaaacucuccugaa

SEQ ID NO: 185113 - RNA, 19 nt, Homo sapiens
  misc_RNA (1)...(19): siRNA sense strand
ggucuggcacuaaauuucu

SEQ ID NO: 185114 - RNA, 19 nt, Homo sapiens
  misc_RNA (1)...(19): siRNA sense strand
gcuguuggacaaauaucuu

SEQ ID NO: 185115 - RNA, 19 nt, Homo sapiens
  misc_RNA (1)...(19): siRNA sense strand
uaccaggaagcauuugaaa

SEQ ID NO: 185116 - RNA, 19 nt, Homo sapiens
  misc_RNA (1)...(19): siRNA sense strand
agagaggaaugagaagaag

SEQ ID NO: 185117 - RNA, 19 nt, Homo sapiens
  misc_RNA (1)...(19): siRNA sense strand
gaaggcagucacagaacag

SEQ ID NO: 185118 - RNA, 19 nt, Homo sapiens
  misc_RNA (1)...(19): siRNA sense strand
ucuaaacucuccugaaaag

SEQ ID NO: 185119 - RNA, 19 nt, Homo sapiens
  misc_RNA (1)...(19): siRNA sense strand
ucuccagcauugagcagaa

SEQ ID NO: 185120 - RNA, 19 nt, Homo sapiens
  misc_RNA (1)...(19): siRNA sense strand
cacuaaauuucucagucuu

SEQ ID NO: 185121 - RNA, 19 nt, Homo sapiens
  misc_RNA (1)...(19): siRNA sense strand
aaagaguaccgugagaaga

SEQ ID NO: 185122 - RNA, 19 nt, Homo sapiens
  misc_RNA (1)...(19): siRNA sense strand
acagcacucugaucaugca

SEQ ID NO: 185123 - RNA, 19 nt, Homo sapiens
  misc_RNA (1)...(19): siRNA sense strand
cagccuacacacccaauuc

SEQ ID NO: 185124 - RNA, 19 nt, Homo sapiens
  misc_RNA (1)...(19): siRNA sense strand
aaaccagggagacgaagga

SEQ ID NO: 185125 - RNA, 19 nt, Homo sapiens
  misc_RNA (1)...(19): siRNA sense strand
ggaaaaccagggagacgaa

SEQ ID NO: 185126 - RNA, 19 nt, Homo sapiens
  misc_RNA (1)...(19): siRNA sense strand
acacacccaauucgucuug

SEQ ID NO: 185127 - RNA, 19 nt, Homo sapiens
  misc_RNA (1)...(19): siRNA sense strand
aaagugagcugguacagaa

SEQ ID NO: 185128 - RNA, 19 nt, Homo sapiens
  misc_RNA (1)...(19): siRNA sense strand
gcacuaaauuucucagucu

SEQ ID NO: 185129 - RNA, 19 nt, Homo sapiens
  misc_RNA (1)...(19): siRNA sense strand
gaagauagaggcagaacug

SEQ ID NO: 185130 - RNA, 19 nt, Homo sapiens
  misc_RNA (1)...(19): siRNA sense strand
gaaaggagauuauuuuagg

SEQ ID NO: 185131 - RNA, 19 nt, Homo sapiens
  misc_RNA (1)...(19): siRNA sense strand
aaacagagaggaaugagaa

SEQ ID NO: 185132 - RNA, 19 nt, Homo sapiens
  misc_RNA (1)...(19): siRNA sense strand
gcacucugaucaugcaguu

SEQ ID NO: 185133 - RNA, 19 nt, Homo sapiens
  misc_RNA (1)...(19): siRNA sense strand
ggcaugaacucuccaacga

SEQ ID NO: 185134 - RNA, 19 nt, Homo sapiens
  misc_RNA (1)...(19): siRNA sense strand
uggauacgcugaaugaaga

SEQ ID NO: 185135 - RNA, 19 nt, Homo sapiens
  misc_RNA (1)...(19): siRNA sense strand
cuacacaaccagaaaguaa

SEQ ID NO: 185136 - RNA, 19 nt, Homo sapiens
  misc_RNA (1)...(19): siRNA sense strand
guaagguguucuacuugaa

SEQ ID NO: 185137 - RNA, 19 nt, Homo sapiens
  misc_RNA (1)...(19): siRNA sense strand
ccagcaggcuuaccaggaa

SEQ ID NO: 185138 - RNA, 19 nt, Homo sapiens
  misc_RNA (1)...(19): siRNA sense strand
ggcauuugaugaagcaauu

SEQ ID NO: 185139 - RNA, 19 nt, Homo sapiens
  misc_RNA (1)...(19): siRNA sense strand
auucuaaacucuccugaaa

SEQ ID NO: 185140 - RNA, 19 nt, Homo sapiens
  misc_RNA (1)...(19): siRNA sense strand
uuagguaucuuucugaagu

SEQ ID NO: 185141 - RNA, 19 nt, Homo sapiens
  misc_RNA (1)...(19): siRNA sense strand
gcaaagaguaccgugagaa

SEQ ID NO: 185142 - RNA, 19 nt, Homo sapiens
  misc_RNA (1)...(19): siRNA sense strand
agacagcacucugaucaug

SEQ ID NO: 185143 - RNA, 19 nt, Homo sapiens
  misc_RNA (1)...(19): siRNA sense strand
gaaguggcaucuggagaca

SEQ ID NO: 185144 - RNA, 19 nt, Homo sapiens
  misc_RNA (1)...(19): siRNA sense strand
cgugucaucuccagcauug

SEQ ID NO: 185145 - RNA, 19 nt, Homo sapiens
  misc_RNA (1)...(19): siRNA sense strand
aaagacagcacucugauca

SEQ ID NO: 185146 - RNA, 19 nt, Homo sapiens
  misc_RNA (1)...(19): siRNA sense strand
uauaaagacagcacucuga

SEQ ID NO: 185147 - RNA, 19 nt, Homo sapiens
  misc_RNA (1)...(19): siRNA sense strand
agaaaucugcucucuguug

SEQ ID NO: 185148 - RNA, 19 nt, Homo sapiens
  misc_RNA (1)...(19): siRNA sense strand
agaguaccgugagaagaua

SEQ ID NO: 185149 - RNA, 19 nt, Homo sapiens
  misc_RNA (1)...(19): siRNA sense strand
ggauaaaagugagcuggua

SEQ ID NO: 185150 - RNA, 19 nt, Homo sapiens
  misc_RNA (1)...(19): siRNA sense strand
ugaaggcagucacagaaca

SEQ ID NO: 185151 - RNA, 19 nt, Homo sapiens
  misc_RNA (1)...(19): siRNA sense strand
cgaacucccagcaggcuua

SEQ ID NO: 185152 - RNA, 19 nt, Homo sapiens
  misc_RNA (1)...(19): siRNA sense strand
ggcaaagaguaccgugaga

SEQ ID NO: 185153 - RNA, 19 nt, Homo sapiens
  misc_RNA (1)...(19): siRNA sense strand
gcaguuacuuagggacaau

SEQ ID NO: 185154 - RNA, 19 nt, Homo sapiens
  misc_RNA (1)...(19): siRNA sense strand
acuaugagauucuaaacuc

SEQ ID NO: 185155 - RNA, 19 nt, Homo sapiens
  misc_RNA (1)...(19): siRNA sense strand
caugaaggcagucacagaa

SEQ ID NO: 185156 - RNA, 19 nt, Homo sapiens
  misc_RNA (1)...(19): siRNA sense strand
gcagaugggcaaagaguac

SEQ ID NO: 185157 - RNA, 19 nt, Homo sapiens
  misc_RNA (1)...(19): siRNA sense strand
cagagaggaaugagaagaa

SEQ ID NO: 185158 - RNA, 19 nt, Homo sapiens
  misc_RNA (1)...(19): siRNA sense strand
uaagguguucuacuugaaa

SEQ ID NO: 185159 - RNA, 19 nt, Homo sapiens
  misc_RNA (1)...(19): siRNA sense strand
gcaugaacucuccaacgaa

SEQ ID NO: 185160 - RNA, 19 nt, Homo sapiens
  misc_RNA (1)...(19): siRNA sense strand
ugaauuggauacgcugaau

SEQ ID NO: 185161 - RNA, 19 nt, Homo sapiens
  misc_RNA (1)...(19): siRNA sense strand
caaagaguaccgugagaag

SEQ ID NO: 185162 - RNA, 19 nt, Homo sapiens
  misc_RNA (1)...(19): siRNA sense strand
caacgaagagagaaaucug

SEQ ID NO: 185163 - RNA, 19 nt, Homo sapiens
  misc_RNA (1)...(19): siRNA sense strand
uggagcuguuggacaaaua

SEQ ID NO: 185164 - RNA, 19 nt, Homo sapiens
  misc_RNA (1)...(19): siRNA sense strand
uaucuuauucccaaugcua

SEQ ID NO: 185165 - RNA, 19 nt, Homo sapiens
  misc_RNA (1)...(19): siRNA sense strand
ggagacaacaaacaaacca

SEQ ID NO: 185166 - RNA, 19 nt, Homo sapiens
  misc_RNA (1)...(19): siRNA sense strand
gcuacacaaccagaaagua

SEQ ID NO: 185167 - RNA, 19 nt, Homo sapiens
  misc_RNA (1)...(19): siRNA sense strand
gcauugagcagaaaacaga

SEQ ID NO: 185168 - RNA, 19 nt, Homo sapiens
  misc_RNA (1)...(19): siRNA sense strand
ggagcuguuggacaaauau

SEQ ID NO: 185169 - RNA, 19 nt, Homo sapiens
  misc_RNA (1)...(19): siRNA sense strand
cugaucaugcaguuacuua

SEQ ID NO: 185170 - RNA, 19 nt, Homo sapiens
  misc_RNA (1)...(19): siRNA sense strand
gaucaugcaguuacuuagg

SEQ ID NO: 185171 - RNA, 19 nt, Homo sapiens
  misc_RNA (1)...(19): siRNA sense strand
ucuguugccuacaagaaug

SEQ ID NO: 185172 - RNA, 19 nt, Homo sapiens
  misc_RNA (1)...(19): siRNA sense strand
gaauuggauacgcugaaug

SEQ ID NO: 185173 - RNA, 19 nt, Homo sapiens
  misc_RNA (1)...(19): siRNA sense strand
gaaagaaaugcagccuaca

SEQ ID NO: 185174 - RNA, 19 nt, Homo sapiens
  misc_RNA (1)...(19): siRNA sense strand
aaaccacugugucgaacuc

SEQ ID NO: 185175 - RNA, 19 nt, Homo sapiens
  misc_RNA (1)...(19): siRNA sense strand
aagaguaccgugagaagau

SEQ ID NO: 185176 - RNA, 19 nt, Homo sapiens
  misc_RNA (1)...(19): siRNA sense strand
ccaugaaggcagucacaga

SEQ ID NO: 185177 - RNA, 19 nt, Homo sapiens
  misc_RNA (1)...(19): siRNA sense strand
aauuggauacgcugaauga

SEQ ID NO: 185178 - RNA, 19 nt, Homo sapiens
  misc_RNA (1)...(19): siRNA sense strand
gucuuggucuggcacuaaa

SEQ ID NO: 185179 - RNA, 19 nt, Homo sapiens
  misc_RNA (1)...(19): siRNA sense strand
uuacuuagggacaaucuca

SEQ ID NO: 185180 - RNA, 19 nt, Homo sapiens
  misc_RNA (1)...(19): siRNA sense strand
cagcagaugggcaaagagu

SEQ ID NO: 185181 - RNA, 19 nt, Homo sapiens
  misc_RNA (1)...(19): siRNA sense strand
uaaagacagcacucugauc

SEQ ID NO: 185182 - RNA, 19 nt, Homo sapiens
  misc_RNA (1)...(19): siRNA sense strand
gauucuaaacucuccugaa

SEQ ID NO: 185183 - RNA, 19 nt, Homo sapiens
  misc_RNA (1)...(19): siRNA sense strand
ggucuggcacuaaauuucu

SEQ ID NO: 185184 - RNA, 19 nt, Homo sapiens
  misc_RNA (1)...(19): siRNA sense strand
gcuguuggacaaauaucuu

SEQ ID NO: 185185 - RNA, 19 nt, Homo sapiens
  misc_RNA (1)...(19): siRNA sense strand
uaccaggaagcauuugaaa

SEQ ID NO: 185186 - RNA, 19 nt, Homo sapiens
  misc_RNA (1)...(19): siRNA sense strand
agagaggaaugagaagaag

SEQ ID NO: 185187 - RNA, 19 nt, Homo sapiens
  misc_RNA (1)...(19): siRNA sense strand
gaaggcagucacagaacag

SEQ ID NO: 185188 - RNA, 19 nt, Homo sapiens
  misc_RNA (1)...(19): siRNA sense strand
ucuaaacucuccugaaaag

SEQ ID NO: 185189 - RNA, 19 nt, Homo sapiens
  misc_RNA (1)...(19): siRNA sense strand
ucuccagcauugagcagaa

SEQ ID NO: 185190 - RNA, 19 nt, Homo sapiens
  misc_RNA (1)...(19): siRNA sense strand
cacuaaauuucucagucuu

SEQ ID NO: 185191 - RNA, 19 nt, Homo sapiens
  misc_RNA (1)...(19): siRNA sense strand
aaagaguaccgugagaaga

SEQ ID NO: 185192 - RNA, 19 nt, Homo sapiens
  misc_RNA (1)...(19): siRNA sense strand
acagcacucugaucaugca

SEQ ID NO: 185193 - RNA, 19 nt, Homo sapiens
  misc_RNA (1)...(19): siRNA sense strand
cagccuacacacccaauuc

SEQ ID NO: 185194 - RNA, 19 nt, Homo sapiens
  misc_RNA (1)...(19): siRNA sense strand
aaaccagggagacgaagga

SEQ ID NO: 185195 - RNA, 19 nt, Homo sapiens
  misc_RNA (1)...(19): siRNA sense strand
ggaaaaccagggagacgaa

SEQ ID NO: 185196 - RNA, 19 nt, Homo sapiens
  misc_RNA (1)...(19): siRNA sense strand
acacacccaauucgucuug

SEQ ID NO: 185197 - RNA, 19 nt, Homo sapiens
  misc_RNA (1)...(19): siRNA sense strand
gcagauggcucgagaauac

SEQ ID NO: 185198 - RNA, 19 nt, Homo sapiens
  misc_RNA (1)...(19): siRNA sense strand
gcaaggagcugaauuaucc

SEQ ID NO: 185199 - RNA, 19 nt, Homo sapiens
  misc_RNA (1)...(19): siRNA sense strand
uaagagauaucugcaauga

SEQ ID NO: 185200 - RNA, 19 nt, Homo sapiens
  misc_RNA (1)...(19): siRNA sense strand
gagcugaauuauccaauga

SEQ ID NO: 185201 - RNA, 19 nt, Homo sapiens
  misc_RNA (1)...(19): siRNA sense strand
agagauaucugcaaugaug

SEQ ID NO: 185202 - RNA, 19 nt, Homo sapiens
  misc_RNA (1)...(19): siRNA sense strand
aaagacagcacgcuaauaa

SEQ ID NO: 185203 - RNA, 19 nt, Homo sapiens
  misc_RNA (1)...(19): siRNA sense strand
gacggaaggugcugagaaa

SEQ ID NO: 185204 - RNA, 19 nt, Homo sapiens
  misc_RNA (1)...(19): siRNA sense strand
uaacuucucuguguucuau

SEQ ID NO: 185205 - RNA, 19 nt, Homo sapiens
  misc_RNA (1)...(19): siRNA sense strand
gcuaagagauaucugcaau

SEQ ID NO: 185206 - RNA, 19 nt, Homo sapiens
  misc_RNA (1)...(19): siRNA sense strand
agagcaaagucuucuauuu

SEQ ID NO: 185207 - RNA, 19 nt, Homo sapiens
  misc_RNA (1)...(19): siRNA sense strand
gcaaugauguacugucucu

SEQ ID NO: 185208 - RNA, 19 nt, Homo sapiens
  misc_RNA (1)...(19): siRNA sense strand
agaaagggauugucgauca

SEQ ID NO: 185209 - RNA, 19 nt, Homo sapiens
  misc_RNA (1)...(19): siRNA sense strand
ccaagaagcuuuugaaauc

SEQ ID NO: 185210 - RNA, 19 nt, Homo sapiens
  misc_RNA (1)...(19): siRNA sense strand
gcccuuaacuucucugugu

SEQ ID NO: 185211 - RNA, 19 nt, Homo sapiens
  misc_RNA (1)...(19): siRNA sense strand
aaaaugagcugguucagaa

SEQ ID NO: 185212 - RNA, 19 nt, Homo sapiens
  misc_RNA (1)...(19): siRNA sense strand
ggagcugaauuauccaaug

SEQ ID NO: 185213 - RNA, 19 nt, Homo sapiens
  misc_RNA (1)...(19): siRNA sense strand
uugcugaacuugauacauu

SEQ ID NO: 185214 - RNA, 19 nt, Homo sapiens
  misc_RNA (1)...(19): siRNA sense strand
gaaaugcaaccaacacauc

SEQ ID NO: 185215 - RNA, 19 nt, Homo sapiens
  misc_RNA (1)...(19): siRNA sense strand
gcaugaagucuguaacuga

SEQ ID NO: 185216 - RNA, 19 nt, Homo sapiens
  misc_RNA (1)...(19): siRNA sense strand
gaagagucauacaaagaca

SEQ ID NO: 185217 - RNA, 19 nt, Homo sapiens
  misc_RNA (1)...(19): siRNA sense strand
caacaagcauaccaagaag

SEQ ID NO: 185218 - RNA, 19 nt, Homo sapiens
  misc_RNA (1)...(19): siRNA sense strand
agacggagcuaagagauau

SEQ ID NO: 185219 - RNA, 19 nt, Homo sapiens
  misc_RNA (1)...(19): siRNA sense strand
ugagcaaggagcugaauua

SEQ ID NO: 185220 - RNA, 19 nt, Homo sapiens
  misc_RNA (1)...(19): siRNA sense strand
ggagggucgucucaaguau

SEQ ID NO: 185221 - RNA, 19 nt, Homo sapiens
  misc_RNA (1)...(19): siRNA sense strand
gcacgcuaauaaugcaauu

SEQ ID NO: 185222 - RNA, 19 nt, Homo sapiens
  misc_RNA (1)...(19): siRNA sense strand
gcccguaggucaucuugga

SEQ ID NO: 185223 - RNA, 19 nt, Homo sapiens
  misc_RNA (1)...(19): siRNA sense strand
gagacggagcuaagagaua

SEQ ID NO: 185224 - RNA, 19 nt, Homo sapiens
  misc_RNA (1)...(19): siRNA sense strand
acaacaagcauaccaagaa

SEQ ID NO: 185225 - RNA, 19 nt, Homo sapiens
  misc_RNA (1)...(19): siRNA sense strand
caacacauccuaucagacu

SEQ ID NO: 185226 - RNA, 19 nt, Homo sapiens
  misc_RNA (1)...(19): siRNA sense strand
uacauuaagugaagaguca

SEQ ID NO: 185227 - RNA, 19 nt, Homo sapiens
  misc_RNA (1)...(19): siRNA sense strand
ccaaggagacgaagcugaa

SEQ ID NO: 185228 - RNA, 19 nt, Homo sapiens
  misc_RNA (1)...(19): siRNA sense strand
caaagacagcacgcuaaua

SEQ ID NO: 185229 - RNA, 19 nt, Homo sapiens
  misc_RNA (1)...(19): siRNA sense strand
ucucucaguugcuuauaaa

SEQ ID NO: 185230 - RNA, 19 nt, Homo sapiens
  misc_RNA (1)...(19): siRNA sense strand
gaaagggauugucgaucag

SEQ ID NO: 185231 - RNA, 19 nt, Homo sapiens
  misc_RNA (1)...(19): siRNA sense strand
gacugggucuggcccuuaa

SEQ ID NO: 185232 - RNA, 19 nt, Homo sapiens
  misc_RNA (1)...(19): siRNA sense strand
gagaaggaggggaaaauua

SEQ ID NO: 185233 - RNA, 19 nt, Homo sapiens
  misc_RNA (1)...(19): siRNA sense strand
gcucgagaauacagagaga

SEQ ID NO: 185234 - RNA, 19 nt, Homo sapiens
  misc_RNA (1)...(19): siRNA sense strand
agacagcacgcuaauaaug

SEQ ID NO: 185235 - RNA, 19 nt, Homo sapiens
  misc_RNA (1)...(19): siRNA sense strand
gugaagagucauacaaaga

SEQ ID NO: 185236 - RNA, 19 nt, Homo sapiens
  misc_RNA (1)...(19): siRNA sense strand
ugagcgauaugaugacaug

SEQ ID NO: 185237 - RNA, 19 nt, Homo sapiens
  misc_RNA (1)...(19): siRNA sense strand
gaggaaucuucucucaguu

SEQ ID NO: 185238 - RNA, 19 nt, Homo sapiens
  misc_RNA (1)...(19): siRNA sense strand
ugagagacaacuugacauu

SEQ ID NO: 185239 - RNA, 19 nt, Homo sapiens
  misc_RNA (1)...(19): siRNA sense strand
caaccaacacauccuauca

SEQ ID NO: 185240 - RNA, 19 nt, Homo sapiens
  misc_RNA (1)...(19): siRNA sense strand
ggagauuacuaccguuacu

SEQ ID NO: 185241 - RNA, 19 nt, Homo sapiens
  misc_RNA (1)...(19): siRNA sense strand
ucucuguguucuauuauga

SEQ ID NO: 185242 - RNA, 19 nt, Homo sapiens
  misc_RNA (1)...(19): siRNA sense strand
gagcaaggagcugaauuau

SEQ ID NO: 185243 - RNA, 19 nt, Homo sapiens
  misc_RNA (1)...(19): siRNA sense strand
cgagcaggcugagcgauau

SEQ ID NO: 185244 - RNA, 19 nt, Homo sapiens
  misc_RNA (1)...(19): siRNA sense strand
uaagugaagagucauacaa

SEQ ID NO: 185245 - RNA, 19 nt, Homo sapiens
  misc_RNA (1)...(19): siRNA sense strand
gagagcaaagucuucuauu

SEQ ID NO: 185246 - RNA, 19 nt, Homo sapiens
  misc_RNA (1)...(19): siRNA sense strand
caagaaagggauugucgau

SEQ ID NO: 185247 - RNA, 19 nt, Homo sapiens
  misc_RNA (1)...(19): siRNA sense strand
uaucugcaaugauguacug

SEQ ID NO: 185248 - RNA, 19 nt, Homo sapiens
  misc_RNA (1)...(19): siRNA sense strand
gacaucggauacccaagga

SEQ ID NO: 185249 - RNA, 19 nt, Homo sapiens
  misc_RNA (1)...(19): siRNA sense strand
gagagacaacuugacauug

SEQ ID NO: 185250 - RNA, 19 nt, Homo sapiens
  misc_RNA (1)...(19): siRNA sense strand
ggaaaugcaaccaacacau

SEQ ID NO: 185251 - RNA, 19 nt, Homo sapiens
  misc_RNA (1)...(19): siRNA sense strand
ugcugaacuugauacauua

SEQ ID NO: 185252 - RNA, 19 nt, Homo sapiens
  misc_RNA (1)...(19): siRNA sense strand
aaugauguacugucucuuu

SEQ ID NO: 185253 - RNA, 19 nt, Homo sapiens
  misc_RNA (1)...(19): siRNA sense strand
cuugauacauuaagugaag

SEQ ID NO: 185254 - RNA, 19 nt, Homo sapiens
  misc_RNA (1)...(19): siRNA sense strand
acuucucuguguucuauua

SEQ ID NO: 185255 - RNA, 19 nt, Homo sapiens
  misc_RNA (1)...(19): siRNA sense strand
gagggucgucucaaguauu

SEQ ID NO: 185256 - RNA, 19 nt, Homo sapiens
  misc_RNA (1)...(19): siRNA sense strand
gaauacagagagaaaauug

SEQ ID NO: 185257 - RNA, 19 nt, Homo sapiens
  misc_RNA (1)...(19): siRNA sense strand
gaaagccugcucucuugca

SEQ ID NO: 185258 - RNA, 19 nt, Homo sapiens
  misc_RNA (1)...(19): siRNA sense strand
ugaagccauugcugaacuu

SEQ ID NO: 185259 - RNA, 19 nt, Homo sapiens
  misc_RNA (1)...(19): siRNA sense strand
agggucgucucaaguauug

SEQ ID NO: 185260 - RNA, 19 nt, Homo sapiens
  misc_RNA (1)...(19): siRNA sense strand
uacaaagacagcacgcuaa

SEQ ID NO: 185261 - RNA, 19 nt, Homo sapiens
  misc_RNA (1)...(19): siRNA sense strand
cagcagauggcucgagaau

SEQ ID NO: 185262 - RNA, 19 nt, Homo sapiens
  misc_RNA (1)...(19): siRNA sense strand
cagccugcaugaagucugu

SEQ ID NO: 185263 - RNA, 19 nt, Homo sapiens
  misc_RNA (1)...(19): siRNA sense strand
ccgagcaggcugagcgaua

SEQ ID NO: 185264 - RNA, 19 nt, Homo sapiens
  misc_RNA (1)...(19): siRNA sense strand
gcaaccaacacauccuauc

SEQ ID NO: 185265 - RNA, 19 nt, Homo sapiens
  misc_RNA (1)...(19): siRNA sense strand
aaggagauuacuaccguua

SEQ ID NO: 185266 - RNA, 19 nt, Homo sapiens
  misc_RNA (1)...(19): siRNA sense strand
gcagagagcaaagucuucu

SEQ ID NO: 185267 - RNA, 19 nt, Homo sapiens
  misc_RNA (1)...(19): siRNA sense strand
gcugagcgauaugaugaca

SEQ ID NO: 185268 - RNA, 19 nt, Homo sapiens
  misc_RNA (1)...(19): siRNA sense strand
aaucuucucucaguugcuu

SEQ ID NO: 185269 - RNA, 19 nt, Homo sapiens
  misc_RNA (1)...(19): siRNA sense strand
gcugaacuugauacauuaa

SEQ ID NO: 185270 - RNA, 19 nt, Homo sapiens
  misc_RNA (1)...(19): siRNA sense strand
ugaugaagccauugcugaa

SEQ ID NO: 185271 - RNA, 19 nt, Homo sapiens
  misc_RNA (1)...(19): siRNA sense strand
uggagggucgucucaagua

SEQ ID NO: 185272 - RNA, 19 nt, Homo sapiens
  misc_RNA (1)...(19): siRNA sense strand
auuaugagauucugaacuc

SEQ ID NO: 185273 - RNA, 19 nt, Homo sapiens
  misc_RNA (1)...(19): siRNA sense strand
gaaaaugaaaggagauuac

SEQ ID NO: 185274 - RNA, 19 nt, Homo sapiens
  misc_RNA (1)...(19): siRNA sense strand
uuacugagagacaacuuga

SEQ ID NO: 185275 - RNA, 19 nt, Homo sapiens
  misc_RNA (1)...(19): siRNA sense strand
accaacacauccuaucaga

SEQ ID NO: 185276 - RNA, 19 nt, Homo sapiens
  misc_RNA (1)...(19): siRNA sense strand
ccaaugaggagaggaaucu

SEQ ID NO: 185277 - RNA, 19 nt, Homo sapiens
  misc_RNA (1)...(19): siRNA sense strand
aggcugagcgauaugauga

SEQ ID NO: 185278 - RNA, 19 nt, Homo sapiens
  misc_RNA (1)...(19): siRNA sense strand
acaaagacagcacgcuaau

SEQ ID NO: 185279 - RNA, 19 nt, Homo sapiens
  misc_RNA (1)...(19): siRNA sense strand
ucgagaauacagagagaaa

SEQ ID NO: 185280 - RNA, 19 nt, Homo sapiens
  misc_RNA (1)...(19): siRNA sense strand
aaagccugcucucuugcaa

SEQ ID NO: 185281 - RNA, 19 nt, Homo sapiens
  misc_RNA (1)...(19): siRNA sense strand
caagaagcuuuugaaauca

SEQ ID NO: 185282 - RNA, 19 nt, Homo sapiens
  misc_RNA (1)...(19): siRNA sense strand
gagauuacuaccguuacuu

SEQ ID NO: 185283 - RNA, 19 nt, Homo sapiens
  misc_RNA (1)...(19): siRNA sense strand
agagagcaaagucuucuau

SEQ ID NO: 185284 - RNA, 19 nt, Homo sapiens
  misc_RNA (1)...(19): siRNA sense strand
agaaggaggggaaaauuaa

SEQ ID NO: 185285 - RNA, 19 nt, Homo sapiens
  misc_RNA (1)...(19): siRNA sense strand
cauuaagugaagagucaua

SEQ ID NO: 185286 - RNA, 19 nt, Homo sapiens
  misc_RNA (1)...(19): siRNA sense strand
agacggaaggugcugagaa

SEQ ID NO: 185287 - RNA, 19 nt, Homo sapiens
  misc_RNA (1)...(19): siRNA sense strand
agauaucugcaaugaugua

SEQ ID NO: 185288 - RNA, 19 nt, Homo sapiens
  misc_RNA (1)...(19): siRNA sense strand
acagcacgcuaauaaugca

SEQ ID NO: 185289 - RNA, 19 nt, Homo sapiens
  misc_RNA (1)...(19): siRNA sense strand
aagugaagagucauacaaa

SEQ ID NO: 185290 - RNA, 19 nt, Homo sapiens
  misc_RNA (1)...(19): siRNA sense strand
agccauugcugaacuugau

SEQ ID NO: 185291 - RNA, 19 nt, Homo sapiens
  misc_RNA (1)...(19): siRNA sense strand
ggucuggcccuuaacuucu

SEQ ID NO: 185292 - RNA, 19 nt, Homo sapiens
  misc_RNA (1)...(19): siRNA sense strand
gagaauacagagagaaaau

SEQ ID NO: 185293 - RNA, 19 nt, Homo sapiens
  misc_RNA (1)...(19): siRNA sense strand
aaugaaaggagauuacuac

SEQ ID NO: 185294 - RNA, 19 nt, Homo sapiens
  misc_RNA (1)...(19): siRNA sense strand
cugcaaugauguacugucu

SEQ ID NO: 185295 - RNA, 19 nt, Homo sapiens
  misc_RNA (1)...(19): siRNA sense strand
gucuguaacugagcaagga

SEQ ID NO: 185296 - RNA, 19 nt, Homo sapiens
  misc_RNA (1)...(19): siRNA sense strand
gacagcacgcuaauaaugc

SEQ ID NO: 185297 - RNA, 19 nt, Homo sapiens
  misc_RNA (1)...(19): siRNA sense strand
gcagauggcucgagaauac

SEQ ID NO: 185298 - RNA, 19 nt, Homo sapiens
  misc_RNA (1)...(19): siRNA sense strand
gcaaggagcugaauuaucc

SEQ ID NO: 185299 - RNA, 19 nt, Homo sapiens
  misc_RNA (1)...(19): siRNA sense strand
uaagagauaucugcaauga

SEQ ID NO: 185300 - RNA, 19 nt, Homo sapiens
  misc_RNA (1)...(19): siRNA sense strand
gagcugaauuauccaauga

SEQ ID NO: 185301 - RNA, 19 nt, Homo sapiens
  misc_RNA (1)...(19): siRNA sense strand
agagauaucugcaaugaug

SEQ ID NO: 185302 - RNA, 19 nt, Homo sapiens
  misc_RNA (1)...(19): siRNA sense strand
aaagacagcacgcuaauaa

SEQ ID NO: 185303 - RNA, 19 nt, Homo sapiens
  misc_RNA (1)...(19): siRNA sense strand
gacggaaggugcugagaaa

SEQ ID NO: 185304 - RNA, 19 nt, Homo sapiens
  misc_RNA (1)...(19): siRNA sense strand
uaacuucucuguguucuau

SEQ ID NO: 185305 - RNA, 19 nt, Homo sapiens
  misc_RNA (1)...(19): siRNA sense strand
gcuaagagauaucugcaau

SEQ ID NO: 185306 - RNA, 19 nt, Homo sapiens
  misc_RNA (1)...(19): siRNA sense strand
agagcaaagucuucuauuu

SEQ ID NO: 185307 - RNA, 19 nt, Homo sapiens
  misc_RNA (1)...(19): siRNA sense strand
gcaaugauguacugucucu

SEQ ID NO: 185308 - RNA, 19 nt, Homo sapiens
  misc_RNA (1)...(19): siRNA sense strand
agaaagggauugucgauca

SEQ ID NO: 185309 - RNA, 19 nt, Homo sapiens
  misc_RNA (1)...(19): siRNA sense strand
ccaagaagcuuuugaaauc

SEQ ID NO: 185310 - RNA, 19 nt, Homo sapiens
  misc_RNA (1)...(19): siRNA sense strand
gcccuuaacuucucugugu

SEQ ID NO: 185311 - RNA, 19 nt, Homo sapiens
  misc_RNA (1)...(19): siRNA sense strand
aaaaugagcugguucagaa

SEQ ID NO: 185312 - RNA, 19 nt, Homo sapiens
  misc_RNA (1)...(19): siRNA sense strand
ggagcugaauuauccaaug

SEQ ID NO: 185313 - RNA, 19 nt, Homo sapiens
  misc_RNA (1)...(19): siRNA sense strand
uugcugaacuugauacauu

SEQ ID NO: 185314 - RNA, 19 nt, Homo sapiens
  misc_RNA (1)...(19): siRNA sense strand
gaaaugcaaccaacacauc

SEQ ID NO: 185315 - RNA, 19 nt, Homo sapiens
  misc_RNA (1)...(19): siRNA sense strand
gcaugaagucuguaacuga

SEQ ID NO: 185316 - RNA, 19 nt, Homo sapiens
  misc_RNA (1)...(19): siRNA sense strand
gaagagucauacaaagaca

SEQ ID NO: 185317 - RNA, 19 nt, Homo sapiens
  misc_RNA (1)...(19): siRNA sense strand
caacaagcauaccaagaag

SEQ ID NO: 185318 - RNA, 19 nt, Homo sapiens
  misc_RNA (1)...(19): siRNA sense strand
agacggagcuaagagauau

SEQ ID NO: 185319 - RNA, 19 nt, Homo sapiens
  misc_RNA (1)...(19): siRNA sense strand
ugagcaaggagcugaauua

SEQ ID NO: 185320 - RNA, 19 nt, Homo sapiens
  misc_RNA (1)...(19): siRNA sense strand
ggagggucgucucaaguau

SEQ ID NO: 185321 - RNA, 19 nt, Homo sapiens
  misc_RNA (1)...(19): siRNA sense strand
gcacgcuaauaaugcaauu

SEQ ID NO: 185322 - RNA, 19 nt, Homo sapiens
  misc_RNA (1)...(19): siRNA sense strand
gcccguaggucaucuugga

SEQ ID NO: 185323 - RNA, 19 nt, Homo sapiens
  misc_RNA (1)...(19): siRNA sense strand
gagacggagcuaagagaua

SEQ ID NO: 185324 - RNA, 19 nt, Homo sapiens
  misc_RNA (1)...(19): siRNA sense strand
acaacaagcauaccaagaa

SEQ ID NO: 185325 - RNA, 19 nt, Homo sapiens
  misc_RNA (1)...(19): siRNA sense strand
caacacauccuaucagacu

SEQ ID NO: 185326 - RNA, 19 nt, Homo sapiens
  misc_RNA (1)...(19): siRNA sense strand
uacauuaagugaagaguca

SEQ ID NO: 185327 - RNA, 19 nt, Homo sapiens
  misc_RNA (1)...(19): siRNA sense strand
ccaaggagacgaagcugaa

SEQ ID NO: 185328 - RNA, 19 nt, Homo sapiens
  misc_RNA (1)...(19): siRNA sense strand
caaagacagcacgcuaaua

SEQ ID NO: 185329 - RNA, 19 nt, Homo sapiens
  misc_RNA (1)...(19): siRNA sense strand
ucucucaguugcuuauaaa

SEQ ID NO: 185330 - RNA, 19 nt, Homo sapiens
  misc_RNA (1)...(19): siRNA sense strand
gaaagggauugucgaucag

SEQ ID NO: 185331 - RNA, 19 nt, Homo sapiens
  misc_RNA (1)...(19): siRNA sense strand
gacugggucuggcccuuaa

SEQ ID NO: 185332 - RNA, 19 nt, Homo sapiens
  misc_RNA (1)...(19): siRNA sense strand
gagaaggaggggaaaauua

SEQ ID NO: 185333 - RNA, 19 nt, Homo sapiens
  misc_RNA (1)...(19): siRNA sense strand
gcucgagaauacagagaga

SEQ ID NO: 185334 - RNA, 19 nt, Homo sapiens
  misc_RNA (1)...(19): siRNA sense strand
agacagcacgcuaauaaug

SEQ ID NO: 185335 - RNA, 19 nt, Homo sapiens
  misc_RNA (1)...(19): siRNA sense strand
gugaagagucauacaaaga

SEQ ID NO: 185336 - RNA, 19 nt, Homo sapiens
  misc_RNA (1)...(19): siRNA sense strand
ugagcgauaugaugacaug

SEQ ID NO: 185337 - RNA, 19 nt, Homo sapiens
  misc_RNA (1)...(19): siRNA sense strand
gaggaaucuucucucaguu

SEQ ID NO: 185338 - RNA, 19 nt, Homo sapiens
  misc_RNA (1)...(19): siRNA sense strand
ugagagacaacuugacauu

SEQ ID NO: 185339 - RNA, 19 nt, Homo sapiens
  misc_RNA (1)...(19): siRNA sense strand
caaccaacacauccuauca

SEQ ID NO: 185340 - RNA, 19 nt, Homo sapiens
  misc_RNA (1)...(19): siRNA sense strand
ggagauuacuaccguuacu

SEQ ID NO: 185341 - RNA, 19 nt, Homo sapiens
  misc_RNA (1)...(19): siRNA sense strand
ucucuguguucuauuauga

SEQ ID NO: 185342 - RNA, 19 nt, Homo sapiens
  misc_RNA (1)...(19): siRNA sense strand
gagcaaggagcugaauuau

SEQ ID NO: 185343 - RNA, 19 nt, Homo sapiens
  misc_RNA (1)...(19): siRNA sense strand
cgagcaggcugagcgauau

SEQ ID NO: 185344 - RNA, 19 nt, Homo sapiens
  misc_RNA (1)...(19): siRNA sense strand
uaagugaagagucauacaa

SEQ ID NO: 185345 - RNA, 19 nt, Homo sapiens
  misc_RNA (1)...(19): siRNA sense strand
gagagcaaagucuucuauu

SEQ ID NO: 185346 - RNA, 19 nt, Homo sapiens
  misc_RNA (1)...(19): siRNA sense strand
caagaaagggauugucgau

SEQ ID NO: 185347 - RNA, 19 nt, Homo sapiens
  misc_RNA (1)...(19): siRNA sense strand
uaucugcaaugauguacug

SEQ ID NO: 185348 - RNA, 19 nt, Homo sapiens
  misc_RNA (1)...(19): siRNA sense strand
gacaucggauacccaagga

SEQ ID NO: 185349 - RNA, 19 nt, Homo sapiens
  misc_RNA (1)...(19): siRNA sense strand
gagagacaacuugacauug

SEQ ID NO: 185350 - RNA, 19 nt, Homo sapiens
  misc_RNA (1)...(19): siRNA sense strand
ggaaaugcaaccaacacau

SEQ ID NO: 185351 - RNA, 19 nt, Homo sapiens
  misc_RNA (1)...(19): siRNA sense strand
ugcugaacuugauacauua

SEQ ID NO: 185352 - RNA, 19 nt, Homo sapiens
  misc_RNA (1)...(19): siRNA sense strand
aaugauguacugucucuuu

SEQ ID NO: 185353 - RNA, 19 nt, Homo sapiens
  misc_RNA (1)...(19): siRNA sense strand
cuugauacauuaagugaag

SEQ ID NO: 185354 - RNA, 19 nt, Homo sapiens
  misc_RNA (1)...(19): siRNA sense strand
acuucucuguguucuauua

SEQ ID NO: 185355 - RNA, 19 nt, Homo sapiens
  misc_RNA (1)...(19): siRNA sense strand
gagggucgucucaaguauu

SEQ ID NO: 185356 - RNA, 19 nt, Homo sapiens
  misc_RNA (1)...(19): siRNA sense strand
gaauacagagagaaaauug

SEQ ID NO: 185357 - RNA, 19 nt, Homo sapiens
  misc_RNA (1)...(19): siRNA sense strand
gaaagccugcucucuugca

SEQ ID NO: 185358 - RNA, 19 nt, Homo sapiens
  misc_RNA (1)...(19): siRNA sense strand
ugaagccauugcugaacuu

SEQ ID NO: 185359 - RNA, 19 nt, Homo sapiens
  misc_RNA (1)...(19): siRNA sense strand
agggucgucucaaguauug

SEQ ID NO: 185360 - RNA, 19 nt, Homo sapiens
  misc_RNA (1)...(19): siRNA sense strand
uacaaagacagcacgcuaa

SEQ ID NO: 185361 - RNA, 19 nt, Homo sapiens
  misc_RNA (1)...(19): siRNA sense strand
cagcagauggcucgagaau

SEQ ID NO: 185362 - RNA, 19 nt, Homo sapiens
  misc_RNA (1)...(19): siRNA sense strand
cagccugcaugaagucugu

SEQ ID NO: 185363 - RNA, 19 nt, Homo sapiens
  misc_RNA (1)...(19): siRNA sense strand
ccgagcaggcugagcgaua

SEQ ID NO: 185364 - RNA, 19 nt, Homo sapiens
  misc_RNA (1)...(19): siRNA sense strand
gcaaccaacacauccuauc

SEQ ID NO: 185365 - RNA, 19 nt, Homo sapiens
  misc_RNA (1)...(19): siRNA sense strand
aaggagauuacuaccguua

SEQ ID NO: 185366 - RNA, 19 nt, Homo sapiens
  misc_RNA (1)...(19): siRNA sense strand
gcagagagcaaagucuucu

SEQ ID NO: 185367 - RNA, 19 nt, Homo sapiens
  misc_RNA (1)...(19): siRNA sense strand
gcugagcgauaugaugaca

SEQ ID NO: 185368 - RNA, 19 nt, Homo sapiens
  misc_RNA (1)...(19): siRNA sense strand
aaucuucucucaguugcuu

SEQ ID NO: 185369 - RNA, 19 nt, Homo sapiens
  misc_RNA (1)...(19): siRNA sense strand
gcugaacuugauacauuaa

SEQ ID NO: 185370 - RNA, 19 nt, Homo sapiens
  misc_RNA (1)...(19): siRNA sense strand
ugaugaagccauugcugaa

SEQ ID NO: 185371 - RNA, 19 nt, Homo sapiens
  misc_RNA (1)...(19): siRNA sense strand
uggagggucgucucaagua

SEQ ID NO: 185372 - RNA, 19 nt, Homo sapiens
  misc_RNA (1)...(19): siRNA sense strand
auuaugagauucugaacuc

SEQ ID NO: 185373 - RNA, 19 nt, Homo sapiens
  misc_RNA (1)...(19): siRNA sense strand
gaaaaugaaaggagauuac

SEQ ID NO: 185374 - RNA, 19 nt, Homo sapiens
  misc_RNA (1)...(19): siRNA sense strand
uuacugagagacaacuuga

SEQ ID NO: 185375 - RNA, 19 nt, Homo sapiens
  misc_RNA (1)...(19): siRNA sense strand
accaacacauccuaucaga

SEQ ID NO: 185376 - RNA, 19 nt, Homo sapiens
  misc_RNA (1)...(19): siRNA sense strand
ccaaugaggagaggaaucu

SEQ ID NO: 185377 - RNA, 19 nt, Homo sapiens
  misc_RNA (1)...(19): siRNA sense strand
aggcugagcgauaugauga

SEQ ID NO: 185378 - RNA, 19 nt, Homo sapiens
  misc_RNA (1)...(19): siRNA sense strand
acaaagacagcacgcuaau

SEQ ID NO: 185379 - RNA, 19 nt, Homo sapiens
  misc_RNA (1)...(19): siRNA sense strand
ucgagaauacagagagaaa

SEQ ID NO: 185380 - RNA, 19 nt, Homo sapiens
  misc_RNA (1)...(19): siRNA sense strand
aaagccugcucucuugcaa

SEQ ID NO: 185381 - RNA, 19 nt, Homo sapiens
  misc_RNA (1)...(19): siRNA sense strand
caagaagcuuuugaaauca

SEQ ID NO: 185382 - RNA, 19 nt, Homo sapiens
  misc_RNA (1)...(19): siRNA sense strand
gagauuacuaccguuacuu

SEQ ID NO: 185383 - RNA, 19 nt, Homo sapiens
  misc_RNA (1)...(19): siRNA sense strand
agagagcaaagucuucuau

SEQ ID NO: 185384 - RNA, 19 nt, Homo sapiens
  misc_RNA (1)...(19): siRNA sense strand
agaaggaggggaaaauuaa

SEQ ID NO: 185385 - RNA, 19 nt, Homo sapiens
  misc_RNA (1)...(19): siRNA sense strand
cauuaagugaagagucaua

SEQ ID NO: 185386 - RNA, 19 nt, Homo sapiens
  misc_RNA (1)...(19): siRNA sense strand
agacggaaggugcugagaa

SEQ ID NO: 185387 - RNA, 19 nt, Homo sapiens
  misc_RNA (1)...(19): siRNA sense strand
agauaucugcaaugaugua

SEQ ID NO: 185388 - RNA, 19 nt, Homo sapiens
  misc_RNA (1)...(19): siRNA sense strand
acagcacgcuaauaaugca

SEQ ID NO: 185389 - RNA, 19 nt, Homo sapiens
  misc_RNA (1)...(19): siRNA sense strand
aagugaagagucauacaaa

SEQ ID NO: 185390 - RNA, 19 nt, Homo sapiens
  misc_RNA (1)...(19): siRNA sense strand
agccauugcugaacuugau

SEQ ID NO: 185391 - RNA, 19 nt, Homo sapiens
  misc_RNA (1)...(19): siRNA sense strand
ggucuggcccuuaacuucu

SEQ ID NO: 185392 - RNA, 19 nt, Homo sapiens
  misc_RNA (1)...(19): siRNA sense strand
gagaauacagagagaaaau

SEQ ID NO: 185393 - RNA, 19 nt, Homo sapiens
  misc_RNA (1)...(19): siRNA sense strand
aaugaaaggagauuacuac

SEQ ID NO: 185394 - RNA, 19 nt, Homo sapiens
  misc_RNA (1)...(19): siRNA sense strand
cugcaaugauguacugucu

SEQ ID NO: 185395 - RNA, 19 nt, Homo sapiens
  misc_RNA (1)...(19): siRNA sense strand
gucuguaacugagcaagga

SEQ ID NO: 185396 - RNA, 19 nt, Homo sapiens
  misc_RNA (1)...(19): siRNA sense strand
gacagcacgcuaauaaugc

SEQ ID NO: 185397 - RNA, 19 nt, Homo sapiens
  misc_RNA (1)...(19): siRNA sense strand
gaacucaccuccugauuau

SEQ ID NO: 185398 - RNA, 19 nt, Homo sapiens
  misc_RNA (1)...(19): siRNA sense strand
caacuaaccugaaaucuca

SEQ ID NO: 185399 - RNA, 19 nt, Homo sapiens
  misc_RNA (1)...(19): siRNA sense strand
ccugaaaucucacaucuua

SEQ ID NO: 185400 - RNA, 19 nt, Homo sapiens
  misc_RNA (1)...(19): siRNA sense strand
ccaaacaacuggcagaauu

SEQ ID NO: 185401 - RNA, 19 nt, Homo sapiens
  misc_RNA (1)...(19): siRNA sense strand
cauaaaggcugcacaaaga

SEQ ID NO: 185402 - RNA, 19 nt, Homo sapiens
  misc_RNA (1)...(19): siRNA sense strand
acaaagauguucagggaua

SEQ ID NO: 185403 - RNA, 19 nt, Homo sapiens
  misc_RNA (1)...(19): siRNA sense strand
cagaauauaugacaggaaa

SEQ ID NO: 185404 - RNA, 19 nt, Homo sapiens
  misc_RNA (1)...(19): siRNA sense strand
gaacagaucauuggagaga

SEQ ID NO: 185405 - RNA, 19 nt, Homo sapiens
  misc_RNA (1)...(19): siRNA sense strand
caaagauguucagggauaa

SEQ ID NO: 185406 - RNA, 19 nt, Homo sapiens
  misc_RNA (1)...(19): siRNA sense strand
ucucacaucuuaacacaug

SEQ ID NO: 185407 - RNA, 19 nt, Homo sapiens
  misc_RNA (1)...(19): siRNA sense strand
acaauagcuugcccucaua

SEQ ID NO: 185408 - RNA, 19 nt, Homo sapiens
  misc_RNA (1)...(19): siRNA sense strand
gcaagaagagcggcaagaa

SEQ ID NO: 185409 - RNA, 19 nt, Homo sapiens
  misc_RNA (1)...(19): siRNA sense strand
uaagaaguuugcucaguca

SEQ ID NO: 185410 - RNA, 19 nt, Homo sapiens
  misc_RNA (1)...(19): siRNA sense strand
gaagaugaugcuccaagaa

SEQ ID NO: 185411 - RNA, 19 nt, Homo sapiens
  misc_RNA (1)...(19): siRNA sense strand
caaacaacuggcagaauuu

SEQ ID NO: 185412 - RNA, 19 nt, Homo sapiens
  misc_RNA (1)...(19): siRNA sense strand
gaauauaugacaggaaaga

SEQ ID NO: 185413 - RNA, 19 nt, Homo sapiens
  misc_RNA (1)...(19): siRNA sense strand
agaacucaccuccugauua

SEQ ID NO: 185414 - RNA, 19 nt, Homo sapiens
  misc_RNA (1)...(19): siRNA sense strand
ggagacaggcccuaugugu

SEQ ID NO: 185415 - RNA, 19 nt, Homo sapiens
  misc_RNA (1)...(19): siRNA sense strand
ggagagaagcccuuucagu

SEQ ID NO: 185416 - RNA, 19 nt, Homo sapiens
  misc_RNA (1)...(19): siRNA sense strand
ccucucagaucccaaacaa

SEQ ID NO: 185417 - RNA, 19 nt, Homo sapiens
  misc_RNA (1)...(19): siRNA sense strand
ggcagaauuugcuagaaug

SEQ ID NO: 185418 - RNA, 19 nt, Homo sapiens
  misc_RNA (1)...(19): siRNA sense strand
cgacgacgacuacauugaa

SEQ ID NO: 185419 - RNA, 19 nt, Homo sapiens
  misc_RNA (1)...(19): siRNA sense strand
acacaugugcgaauccaua

SEQ ID NO: 185420 - RNA, 19 nt, Homo sapiens
  misc_RNA (1)...(19): siRNA sense strand
ucacuggacuucaauuugc

SEQ ID NO: 185421 - RNA, 19 nt, Homo sapiens
  misc_RNA (1)...(19): siRNA sense strand
aagaagagcggcaagaaga

SEQ ID NO: 185422 - RNA, 19 nt, Homo sapiens
  misc_RNA (1)...(19): siRNA sense strand
agaagcaggugcagaucaa

SEQ ID NO: 185423 - RNA, 19 nt, Homo sapiens
  misc_RNA (1)...(19): siRNA sense strand
ggaggaauaccuggcauug

SEQ ID NO: 185424 - RNA, 19 nt, Homo sapiens
  misc_RNA (1)...(19): siRNA sense strand
agaagaugaugcuccaaga

SEQ ID NO: 185425 - RNA, 19 nt, Homo sapiens
  misc_RNA (1)...(19): siRNA sense strand
agacagugguugaagaaca

SEQ ID NO: 185426 - RNA, 19 nt, Homo sapiens
  misc_RNA (1)...(19): siRNA sense strand
ggauaacucggccaugaga

SEQ ID NO: 185427 - RNA, 19 nt, Homo sapiens
  misc_RNA (1)...(19): siRNA sense strand
gcagaauuugcuagaauga

SEQ ID NO: 185428 - RNA, 19 nt, Homo sapiens
  misc_RNA (1)...(19): siRNA sense strand
uggcagaauuugcuagaau

SEQ ID NO: 185429 - RNA, 19 nt, Homo sapiens
  misc_RNA (1)...(19): siRNA sense strand
agaauuugcuagaaugaag

SEQ ID NO: 185430 - RNA, 19 nt, Homo sapiens
  misc_RNA (1)...(19): siRNA sense strand
guucgaaggcugugggaaa

SEQ ID NO: 185431 - RNA, 19 nt, Homo sapiens
  misc_RNA (1)...(19): siRNA sense strand
aacaauagcuugcccucau

SEQ ID NO: 185432 - RNA, 19 nt, Homo sapiens
  misc_RNA (1)...(19): siRNA sense strand
agggauaacucggccauga

SEQ ID NO: 185433 - RNA, 19 nt, Homo sapiens
  misc_RNA (1)...(19): siRNA sense strand
cagaauguggcaaagcuuu

SEQ ID NO: 185434 - RNA, 19 nt, Homo sapiens
  misc_RNA (1)...(19): siRNA sense strand
gaugaugcuccaagaacaa

SEQ ID NO: 185435 - RNA, 19 nt, Homo sapiens
  misc_RNA (1)...(19): siRNA sense strand
aauaagaaguuugcucagu

SEQ ID NO: 185436 - RNA, 19 nt, Homo sapiens
  misc_RNA (1)...(19): siRNA sense strand
gcuagaaugaagccaagaa

SEQ ID NO: 185437 - RNA, 19 nt, Homo sapiens
  misc_RNA (1)...(19): siRNA sense strand
gaaaucucacaucuuaaca

SEQ ID NO: 185438 - RNA, 19 nt, Homo sapiens
  misc_RNA (1)...(19): siRNA sense strand
caauagcuugcccucauaa

SEQ ID NO: 185439 - RNA, 19 nt, Homo sapiens
  misc_RNA (1)...(19): siRNA sense strand
gacagugguugaagaacag

SEQ ID NO: 185440 - RNA, 19 nt, Homo sapiens
  misc_RNA (1)...(19): siRNA sense strand
aaucucacaucuuaacaca

SEQ ID NO: 185441 - RNA, 19 nt, Homo sapiens
  misc_RNA (1)...(19): siRNA sense strand
caacuggcagaauuugcua

SEQ ID NO: 185442 - RNA, 19 nt, Homo sapiens
  misc_RNA (1)...(19): siRNA sense strand
gaggaauaccuggcauuga

SEQ ID NO: 185443 - RNA, 19 nt, Homo sapiens
  misc_RNA (1)...(19): siRNA sense strand
gagaacucaccuccugauu

SEQ ID NO: 185444 - RNA, 19 nt, Homo sapiens
  misc_RNA (1)...(19): siRNA sense strand
ugagacagugguugaagaa

SEQ ID NO: 185445 - RNA, 19 nt, Homo sapiens
  misc_RNA (1)...(19): siRNA sense strand
gaagagcggcaagaagagu

SEQ ID NO: 185446 - RNA, 19 nt, Homo sapiens
  misc_RNA (1)...(19): siRNA sense strand
caagaagagcggcaagaag

SEQ ID NO: 185447 - RNA, 19 nt, Homo sapiens
  misc_RNA (1)...(19): siRNA sense strand
ucauaaaggcugcacaaag

SEQ ID NO: 185448 - RNA, 19 nt, Homo sapiens
  misc_RNA (1)...(19): siRNA sense strand
cgacuacauugaacaaacg

SEQ ID NO: 185449 - RNA, 19 nt, Homo sapiens
  misc_RNA (1)...(19): siRNA sense strand
ugaaaucucacaucuuaac

SEQ ID NO: 185450 - RNA, 19 nt, Homo sapiens
  misc_RNA (1)...(19): siRNA sense strand
uaaaggcugcacaaagaug

SEQ ID NO: 185451 - RNA, 19 nt, Homo sapiens
  misc_RNA (1)...(19): siRNA sense strand
cgacgacuacauugaacaa

SEQ ID NO: 185452 - RNA, 19 nt, Homo sapiens
  misc_RNA (1)...(19): siRNA sense strand
ucaauuugcgcacacaugu

SEQ ID NO: 185453 - RNA, 19 nt, Homo sapiens
  misc_RNA (1)...(19): siRNA sense strand
gcuccaagaacaauagcuu

SEQ ID NO: 185454 - RNA, 19 nt, Homo sapiens
  misc_RNA (1)...(19): siRNA sense strand
aaacaacuggcagaauuug

SEQ ID NO: 185455 - RNA, 19 nt, Homo sapiens
  misc_RNA (1)...(19): siRNA sense strand
aggaauaccuggcauugac

SEQ ID NO: 185456 - RNA, 19 nt, Homo sapiens
  misc_RNA (1)...(19): siRNA sense strand
gcgacgacgacuacauuga

SEQ ID NO: 185457 - RNA, 19 nt, Homo sapiens
  misc_RNA (1)...(19): siRNA sense strand
gggcgacacccucuacauc

SEQ ID NO: 185458 - RNA, 19 nt, Homo sapiens
  misc_RNA (1)...(19): siRNA sense strand
agaugaugcuccaagaaca

SEQ ID NO: 185459 - RNA, 19 nt, Homo sapiens
  misc_RNA (1)...(19): siRNA sense strand
cggcgacgacgacuacauu

SEQ ID NO: 185460 - RNA, 19 nt, Homo sapiens
  misc_RNA (1)...(19): siRNA sense strand
acaagaagugggagcagaa

SEQ ID NO: 185461 - RNA, 19 nt, Homo sapiens
  misc_RNA (1)...(19): siRNA sense strand
aaccugaaaucucacaucu

SEQ ID NO: 185462 - RNA, 19 nt, Homo sapiens
  misc_RNA (1)...(19): siRNA sense strand
cuagaaugaagccaagaaa

SEQ ID NO: 185463 - RNA, 19 nt, Homo sapiens
  misc_RNA (1)...(19): siRNA sense strand
guugaagaacagaucauug

SEQ ID NO: 185464 - RNA, 19 nt, Homo sapiens
  misc_RNA (1)...(19): siRNA sense strand
ucaacuaaccugaaaucuc

SEQ ID NO: 185465 - RNA, 19 nt, Homo sapiens
  misc_RNA (1)...(19): siRNA sense strand
uucgaugguuguaauaaga

SEQ ID NO: 185466 - RNA, 19 nt, Homo sapiens
  misc_RNA (1)...(19): siRNA sense strand
gaucauuggagagaacuca

SEQ ID NO: 185467 - RNA, 19 nt, Homo sapiens
  misc_RNA (1)...(19): siRNA sense strand
ggcauugaccucucagauc

SEQ ID NO: 185468 - RNA, 19 nt, Homo sapiens
  misc_RNA (1)...(19): siRNA sense strand
gcagaauguggcaaagcuu

SEQ ID NO: 185469 - RNA, 19 nt, Homo sapiens
  misc_RNA (1)...(19): siRNA sense strand
gacgacgacuacauugaac

SEQ ID NO: 185470 - RNA, 19 nt, Homo sapiens
  misc_RNA (1)...(19): siRNA sense strand
ucucagaucccaaacaacu

SEQ ID NO: 185471 - RNA, 19 nt, Homo sapiens
  misc_RNA (1)...(19): siRNA sense strand
acucaccuccugauuauuc

SEQ ID NO: 185472 - RNA, 19 nt, Homo sapiens
  misc_RNA (1)...(19): siRNA sense strand
gguugaagaacagaucauu

SEQ ID NO: 185473 - RNA, 19 nt, Homo sapiens
  misc_RNA (1)...(19): siRNA sense strand
ugaccucucagaucccaaa

SEQ ID NO: 185474 - RNA, 19 nt, Homo sapiens
  misc_RNA (1)...(19): siRNA sense strand
cggcuucgaggaucagauu

SEQ ID NO: 185475 - RNA, 19 nt, Homo sapiens
  misc_RNA (1)...(19): siRNA sense strand
ccucauaaaggcugcacaa

SEQ ID NO: 185476 - RNA, 19 nt, Homo sapiens
  misc_RNA (1)...(19): siRNA sense strand
cagaagcaggugcagauca

SEQ ID NO: 185477 - RNA, 19 nt, Homo sapiens
  misc_RNA (1)...(19): siRNA sense strand
ugaagaacagaucauugga

SEQ ID NO: 185478 - RNA, 19 nt, Homo sapiens
  misc_RNA (1)...(19): siRNA sense strand
auaacucggccaugagaaa

SEQ ID NO: 185479 - RNA, 19 nt, Homo sapiens
  misc_RNA (1)...(19): siRNA sense strand
agagcggcaagaagaguua

SEQ ID NO: 185480 - RNA, 19 nt, Homo sapiens
  misc_RNA (1)...(19): siRNA sense strand
gauaacucggccaugagaa

SEQ ID NO: 185481 - RNA, 19 nt, Homo sapiens
  misc_RNA (1)...(19): siRNA sense strand
uagcuugcccucauaaagg

SEQ ID NO: 185482 - RNA, 19 nt, Homo sapiens
  misc_RNA (1)...(19): siRNA sense strand
gaugcuccaagaacaauag

SEQ ID NO: 185483 - RNA, 19 nt, Homo sapiens
  misc_RNA (1)...(19): siRNA sense strand
acagaucauuggagagaac

SEQ ID NO: 185484 - RNA, 19 nt, Homo sapiens
  misc_RNA (1)...(19): siRNA sense strand
gaacuucaaugaugaggaa

SEQ ID NO: 185485 - RNA, 19 nt, Homo sapiens
  misc_RNA (1)...(19): siRNA sense strand
gaaacacacucucuucuca

SEQ ID NO: 185486 - RNA, 19 nt, Homo sapiens
  misc_RNA (1)...(19): siRNA sense strand
gugcagcccuccacauuua

SEQ ID NO: 185487 - RNA, 19 nt, Homo sapiens
  misc_RNA (1)...(19): siRNA sense strand
gaacugugcgaucuuaaua

SEQ ID NO: 185488 - RNA, 19 nt, Homo sapiens
  misc_RNA (1)...(19): siRNA sense strand
gaacaaugcucagucuaug

SEQ ID NO: 185489 - RNA, 19 nt, Homo sapiens
  misc_RNA (1)...(19): siRNA sense strand
gaucaagacuguggacgua

SEQ ID NO: 185490 - RNA, 19 nt, Homo sapiens
  misc_RNA (1)...(19): siRNA sense strand
ugacgggaaucaucucuua

SEQ ID NO: 185491 - RNA, 19 nt, Homo sapiens
  misc_RNA (1)...(19): siRNA sense strand
ggaaagauaaggacauuga

SEQ ID NO: 185492 - RNA, 19 nt, Homo sapiens
  misc_RNA (1)...(19): siRNA sense strand
caacagcaauugugucuca

SEQ ID NO: 185493 - RNA, 19 nt, Homo sapiens
  misc_RNA (1)...(19): siRNA sense strand
gugaacaguuggaaagaua

SEQ ID NO: 185494 - RNA, 19 nt, Homo sapiens
  misc_RNA (1)...(19): siRNA sense strand
ccagaaagccagcaucuaa

SEQ ID NO: 185495 - RNA, 19 nt, Homo sapiens
  misc_RNA (1)...(19): siRNA sense strand
caacagcccaugcagcuua

SEQ ID NO: 185496 - RNA, 19 nt, Homo sapiens
  misc_RNA (1)...(19): siRNA sense strand
gaagaggacgaacuaauga

SEQ ID NO: 185497 - RNA, 19 nt, Homo sapiens
  misc_RNA (1)...(19): siRNA sense strand
gcaauugcuucuacaacaa

SEQ ID NO: 185498 - RNA, 19 nt, Homo sapiens
  misc_RNA (1)...(19): siRNA sense strand
gcagacgccuggaacaaga

SEQ ID NO: 185499 - RNA, 19 nt, Homo sapiens
  misc_RNA (1)...(19): siRNA sense strand
ggaagaggacgaacuaaug

SEQ ID NO: 185500 - RNA, 19 nt, Homo sapiens
  misc_RNA (1)...(19): siRNA sense strand
ggaaaggucugcggcaugu

SEQ ID NO: 185501 - RNA, 19 nt, Homo sapiens
  misc_RNA (1)...(19): siRNA sense strand
gaaagcaacaacagaauuc

SEQ ID NO: 185502 - RNA, 19 nt, Homo sapiens
  misc_RNA (1)...(19): siRNA sense strand
caaguggacucagaagaaa

SEQ ID NO: 185503 - RNA, 19 nt, Homo sapiens
  misc_RNA (1)...(19): siRNA sense strand
ccaacaggaugguaucuau

SEQ ID NO: 185504 - RNA, 19 nt, Homo sapiens
  misc_RNA (1)...(19): siRNA sense strand
gacaagaaccgcaagaaug

SEQ ID NO: 185505 - RNA, 19 nt, Homo sapiens
  misc_RNA (1)...(19): siRNA sense strand
gcacacacauguccaccau

SEQ ID NO: 185506 - RNA, 19 nt, Homo sapiens
  misc_RNA (1)...(19): siRNA sense strand
gaacgaggaggaagagaga

SEQ ID NO: 185507 - RNA, 19 nt, Homo sapiens
  misc_RNA (1)...(19): siRNA sense strand
gcgaugaaguagcaaauag

SEQ ID NO: 185508 - RNA, 19 nt, Homo sapiens
  misc_RNA (1)...(19): siRNA sense strand
gcuguaaggucaugcugaa

SEQ ID NO: 185509 - RNA, 19 nt, Homo sapiens
  misc_RNA (1)...(19): siRNA sense strand
gcaaacacccucugugagu

SEQ ID NO: 185510 - RNA, 19 nt, Homo sapiens
  misc_RNA (1)...(19): siRNA sense strand
ccacccggcugauguuuga

SEQ ID NO: 185511 - RNA, 19 nt, Homo sapiens
  misc_RNA (1)...(19): siRNA sense strand
caagacagcuauuuuguug

SEQ ID NO: 185512 - RNA, 19 nt, Homo sapiens
  misc_RNA (1)...(19): siRNA sense strand
gcuauggguuucaucuuga

SEQ ID NO: 185513 - RNA, 19 nt, Homo sapiens
  misc_RNA (1)...(19): siRNA sense strand
caacacggccucugugguu

SEQ ID NO: 185514 - RNA, 19 nt, Homo sapiens
  misc_RNA (1)...(19): siRNA sense strand
gaaaccaccaccucuguug

SEQ ID NO: 185515 - RNA, 19 nt, Homo sapiens
  misc_RNA (1)...(19): siRNA sense strand
ucagaaaggccacaucuug

SEQ ID NO: 185516 - RNA, 19 nt, Homo sapiens
  misc_RNA (1)...(19): siRNA sense strand
gcacuuugcccaccacaug

SEQ ID NO: 185517 - RNA, 19 nt, Homo sapiens
  misc_RNA (1)...(19): siRNA sense strand
acaagaaccgcaagaauga

SEQ ID NO: 185518 - RNA, 19 nt, Homo sapiens
  misc_RNA (1)...(19): siRNA sense strand
gcaaauagugacagugaau

SEQ ID NO: 185519 - RNA, 19 nt, Homo sapiens
  misc_RNA (1)...(19): siRNA sense strand
aagaaagggucaucaggaa

SEQ ID NO: 185520 - RNA, 19 nt, Homo sapiens
  misc_RNA (1)...(19): siRNA sense strand
ccaaguggacucagaagaa

SEQ ID NO: 185521 - RNA, 19 nt, Homo sapiens
  misc_RNA (1)...(19): siRNA sense strand
gcugagggcugcauuuguc

SEQ ID NO: 185522 - RNA, 19 nt, Homo sapiens
  misc_RNA (1)...(19): siRNA sense strand
gauacaguuugccguggua

SEQ ID NO: 185523 - RNA, 19 nt, Homo sapiens
  misc_RNA (1)...(19): siRNA sense strand
gaaagggucaucaggaaag

SEQ ID NO: 185524 - RNA, 19 nt, Homo sapiens
  misc_RNA (1)...(19): siRNA sense strand
gcugagagcugugaauguc

SEQ ID NO: 185525 - RNA, 19 nt, Homo sapiens
  misc_RNA (1)...(19): siRNA sense strand
ggaguucgcauaccacaug

SEQ ID NO: 185526 - RNA, 19 nt, Homo sapiens
  misc_RNA (1)...(19): siRNA sense strand
uacgugagcuuugauggua

SEQ ID NO: 185527 - RNA, 19 nt, Homo sapiens
  misc_RNA (1)...(19): siRNA sense strand
caaacacccucugugaguu

SEQ ID NO: 185528 - RNA, 19 nt, Homo sapiens
  misc_RNA (1)...(19): siRNA sense strand
gugaauuugugaacaguug

SEQ ID NO: 185529 - RNA, 19 nt, Homo sapiens
  misc_RNA (1)...(19): siRNA sense strand
ccuacaaucuccaccaaga

SEQ ID NO: 185530 - RNA, 19 nt, Homo sapiens
  misc_RNA (1)...(19): siRNA sense strand
gacaacagcaacagcaauu

SEQ ID NO: 185531 - RNA, 19 nt, Homo sapiens
  misc_RNA (1)...(19): siRNA sense strand
uguaaucgcgucuguauga

SEQ ID NO: 185532 - RNA, 19 nt, Homo sapiens
  misc_RNA (1)...(19): siRNA sense strand
ggaaggacgcaacaagaug

SEQ ID NO: 185533 - RNA, 19 nt, Homo sapiens
  misc_RNA (1)...(19): siRNA sense strand
gcuuaagaauggccaguau

SEQ ID NO: 185534 - RNA, 19 nt, Homo sapiens
  misc_RNA (1)...(19): siRNA sense strand
acuaucaucuccacagaaa

SEQ ID NO: 185535 - RNA, 19 nt, Homo sapiens
  misc_RNA (1)...(19): siRNA sense strand
cauuuaugcuucagucuug

SEQ ID NO: 185536 - RNA, 19 nt, Homo sapiens
  misc_RNA (1)...(19): siRNA sense strand
acagagcgcugcccuccaa

SEQ ID NO: 185537 - RNA, 19 nt, Homo sapiens
  misc_RNA (1)...(19): siRNA sense strand
ugaccuauguucugaucaa

SEQ ID NO: 185538 - RNA, 19 nt, Homo sapiens
  misc_RNA (1)...(19): siRNA sense strand
cccguuaccucacauuuga

SEQ ID NO: 185539 - RNA, 19 nt, Homo sapiens
  misc_RNA (1)...(19): siRNA sense strand
gcuaugugcugagugaaga

SEQ ID NO: 185540 - RNA, 19 nt, Homo sapiens
  misc_RNA (1)...(19): siRNA sense strand
caacaacgacuacuaugag

SEQ ID NO: 185541 - RNA, 19 nt, Homo sapiens
  misc_RNA (1)...(19): siRNA sense strand
ugaaaccacuggccucaca

SEQ ID NO: 185542 - RNA, 19 nt, Homo sapiens
  misc_RNA (1)...(19): siRNA sense strand
gagagugcauuuacagaac

SEQ ID NO: 185543 - RNA, 19 nt, Homo sapiens
  misc_RNA (1)...(19): siRNA sense strand
ggacauugacccaaguugu

SEQ ID NO: 185544 - RNA, 19 nt, Homo sapiens
  misc_RNA (1)...(19): siRNA sense strand
ugugggaacuucaaugaug

SEQ ID NO: 185545 - RNA, 19 nt, Homo sapiens
  misc_RNA (1)...(19): siRNA sense strand
gaagggccaccgugugcua

SEQ ID NO: 185546 - RNA, 19 nt, Homo sapiens
  misc_RNA (1)...(19): siRNA sense strand
caagaucagugccaagcau

SEQ ID NO: 185547 - RNA, 19 nt, Homo sapiens
  misc_RNA (1)...(19): siRNA sense strand
gaacuaugacggcaacagu

SEQ ID NO: 185548 - RNA, 19 nt, Homo sapiens
  misc_RNA (1)...(19): siRNA sense strand
caacucaacagacccauuc

SEQ ID NO: 185549 - RNA, 19 nt, Homo sapiens
  misc_RNA (1)...(19): siRNA sense strand
cuacggagacccucauuau

SEQ ID NO: 185550 - RNA, 19 nt, Homo sapiens
  misc_RNA (1)...(19): siRNA sense strand
agacuaccaucucuacaga

SEQ ID NO: 185551 - RNA, 19 nt, Homo sapiens
  misc_RNA (1)...(19): siRNA sense strand
gaccaggagugucagaagu

SEQ ID NO: 185552 - RNA, 19 nt, Homo sapiens
  misc_RNA (1)...(19): siRNA sense strand
ccgcaagaaugacaugaug

SEQ ID NO: 185553 - RNA, 19 nt, Homo sapiens
  misc_RNA (1)...(19): siRNA sense strand
gugcaaacacccucuguga

SEQ ID NO: 185554 - RNA, 19 nt, Homo sapiens
  misc_RNA (1)...(19): siRNA sense strand
gcccagcgaugaaguagca

SEQ ID NO: 185555 - RNA, 19 nt, Homo sapiens
  misc_RNA (1)...(19): siRNA sense strand
gugggaacuucaaugauga

SEQ ID NO: 185556 - RNA, 19 nt, Homo sapiens
  misc_RNA (1)...(19): siRNA sense strand
cagaaaggccacaucuuga

SEQ ID NO: 185557 - RNA, 19 nt, Homo sapiens
  misc_RNA (1)...(19): siRNA sense strand
caacgcccaucccuucugu

SEQ ID NO: 185558 - RNA, 19 nt, Homo sapiens
  misc_RNA (1)...(19): siRNA sense strand
gaugugcucuggaaacacu

SEQ ID NO: 185559 - RNA, 19 nt, Homo sapiens
  misc_RNA (1)...(19): siRNA sense strand
guaaggucaugcugaaugg

SEQ ID NO: 185560 - RNA, 19 nt, Homo sapiens
  misc_RNA (1)...(19): siRNA sense strand
acaaugaccaccugaaguu

SEQ ID NO: 185561 - RNA, 19 nt, Homo sapiens
  misc_RNA (1)...(19): siRNA sense strand
gguuucaucuugaucaauc

SEQ ID NO: 185562 - RNA, 19 nt, Homo sapiens
  misc_RNA (1)...(19): siRNA sense strand
gggaguauccggaaacaca

SEQ ID NO: 185563 - RNA, 19 nt, Homo sapiens
  misc_RNA (1)...(19): siRNA sense strand
cagcuuugguggaaggaaa

SEQ ID NO: 185564 - RNA, 19 nt, Homo sapiens
  misc_RNA (1)...(19): siRNA sense strand
uagcaaauagugacaguga

SEQ ID NO: 185565 - RNA, 19 nt, Homo sapiens
  misc_RNA (1)...(19): siRNA sense strand
cugcaaacccaaccagaua

SEQ ID NO: 185566 - RNA, 19 nt, Homo sapiens
  misc_RNA (1)...(19): siRNA sense strand
gcgaagccaugcccugaca

SEQ ID NO: 185567 - RNA, 19 nt, Homo sapiens
  misc_RNA (1)...(19): siRNA sense strand
agacuaccaucuccacaga

SEQ ID NO: 185568 - RNA, 19 nt, Homo sapiens
  misc_RNA (1)...(19): siRNA sense strand
agacuaccaucuccacaga

SEQ ID NO: 185569 - RNA, 19 nt, Homo sapiens
  misc_RNA (1)...(19): siRNA sense strand
gaucaauccugggacuugu

SEQ ID NO: 185570 - RNA, 19 nt, Homo sapiens
  misc_RNA (1)...(19): siRNA sense strand
gaagcaacacggccucugu

SEQ ID NO: 185571 - RNA, 19 nt, Homo sapiens
  misc_RNA (1)...(19): siRNA sense strand
uaacggagagggcagcuau

SEQ ID NO: 185572 - RNA, 19 nt, Homo sapiens
  misc_RNA (1)...(19): siRNA sense strand
caggagaacccgaguggaa

SEQ ID NO: 185573 - RNA, 19 nt, Homo sapiens
  misc_RNA (1)...(19): siRNA sense strand
ugaggaagaggacgaacua

SEQ ID NO: 185574 - RNA, 19 nt, Homo sapiens
  misc_RNA (1)...(19): siRNA sense strand
cuacagcauuguuaacauc

SEQ ID NO: 185575 - RNA, 19 nt, Homo sapiens
  misc_RNA (1)...(19): siRNA sense strand
ccauaaggcucagcagcaa

SEQ ID NO: 185576 - RNA, 19 nt, Homo sapiens
  misc_RNA (1)...(19): siRNA sense strand
ugaaagcaacaacagaauu

SEQ ID NO: 185577 - RNA, 19 nt, Homo sapiens
  misc_RNA (1)...(19): siRNA sense strand
cuacaacaacgacuacuau

SEQ ID NO: 185578 - RNA, 19 nt, Homo sapiens
  misc_RNA (1)...(19): siRNA sense strand
ccaaaugcccgcuacgaau

SEQ ID NO: 185579 - RNA, 19 nt, Homo sapiens
  misc_RNA (1)...(19): siRNA sense strand
uucaugaggucuacauuga

SEQ ID NO: 185580 - RNA, 19 nt, Homo sapiens
  misc_RNA (1)...(19): siRNA sense strand
caacagcaacagcaauugu

SEQ ID NO: 185581 - RNA, 19 nt, Homo sapiens
  misc_RNA (1)...(19): siRNA sense strand
caugaggucuacauugaca

SEQ ID NO: 185582 - RNA, 19 nt, Homo sapiens
  misc_RNA (1)...(19): siRNA sense strand
acugugcgaucuuaauaaa

SEQ ID NO: 185583 - RNA, 19 nt, Homo sapiens
  misc_RNA (1)...(19): siRNA sense strand
cgacaagaaccgcaagaau

SEQ ID NO: 185584 - RNA, 19 nt, Homo sapiens
  misc_RNA (1)...(19): siRNA sense strand
gaacuucaaugaugaggaa

SEQ ID NO: 185585 - RNA, 19 nt, Homo sapiens
  misc_RNA (1)...(19): siRNA sense strand
gaaacacacucucuucuca

SEQ ID NO: 185586 - RNA, 19 nt, Homo sapiens
  misc_RNA (1)...(19): siRNA sense strand
gugcagcccuccacauuua

SEQ ID NO: 185587 - RNA, 19 nt, Homo sapiens
  misc_RNA (1)...(19): siRNA sense strand
gaacugugcgaucuuaaua

SEQ ID NO: 185588 - RNA, 19 nt, Homo sapiens
  misc_RNA (1)...(19): siRNA sense strand
gaacaaugcucagucuaug

SEQ ID NO: 185589 - RNA, 19 nt, Homo sapiens
  misc_RNA (1)...(19): siRNA sense strand
gaucaagacuguggacgua

SEQ ID NO: 185590 - RNA, 19 nt, Homo sapiens
  misc_RNA (1)...(19): siRNA sense strand
ugacgggaaucaucucuua

SEQ ID NO: 185591 - RNA, 19 nt, Homo sapiens
  misc_RNA (1)...(19): siRNA sense strand
ggaaagauaaggacauuga

SEQ ID NO: 185592 - RNA, 19 nt, Homo sapiens
  misc_RNA (1)...(19): siRNA sense strand
caacagcaauugugucuca

SEQ ID NO: 185593 - RNA, 19 nt, Homo sapiens
  misc_RNA (1)...(19): siRNA sense strand
gugaacaguuggaaagaua

SEQ ID NO: 185594 - RNA, 19 nt, Homo sapiens
  misc_RNA (1)...(19): siRNA sense strand
caacagcccaugcagcuua

SEQ ID NO: 185595 - RNA, 19 nt, Homo sapiens
  misc_RNA (1)...(19): siRNA sense strand
gaagaggacgaacuaauga

SEQ ID NO: 185596 - RNA, 19 nt, Homo sapiens
  misc_RNA (1)...(19): siRNA sense strand
gcaauugcuucuacaacaa

SEQ ID NO: 185597 - RNA, 19 nt, Homo sapiens
  misc_RNA (1)...(19): siRNA sense strand
gcagacgccuggaacaaga

SEQ ID NO: 185598 - RNA, 19 nt, Homo sapiens
  misc_RNA (1)...(19): siRNA sense strand
ggaagaggacgaacuaaug

SEQ ID NO: 185599 - RNA, 19 nt, Homo sapiens
  misc_RNA (1)...(19): siRNA sense strand
ggaaaggucugcggcaugu

SEQ ID NO: 185600 - RNA, 19 nt, Homo sapiens
  misc_RNA (1)...(19): siRNA sense strand
gaaagcaacaacagaauuc

SEQ ID NO: 185601 - RNA, 19 nt, Homo sapiens
  misc_RNA (1)...(19): siRNA sense strand
caaguggacucagaagaaa

SEQ ID NO: 185602 - RNA, 19 nt, Homo sapiens
  misc_RNA (1)...(19): siRNA sense strand
ccaacaggaugguaucuau

SEQ ID NO: 185603 - RNA, 19 nt, Homo sapiens
  misc_RNA (1)...(19): siRNA sense strand
gacaagaaccgcaagaaug

SEQ ID NO: 185604 - RNA, 19 nt, Homo sapiens
  misc_RNA (1)...(19): siRNA sense strand
gcacacacauguccaccau

SEQ ID NO: 185605 - RNA, 19 nt, Homo sapiens
  misc_RNA (1)...(19): siRNA sense strand
gcgaugaaguagcaaauag

SEQ ID NO: 185606 - RNA, 19 nt, Homo sapiens
  misc_RNA (1)...(19): siRNA sense strand
gcuguaaggucaugcugaa

SEQ ID NO: 185607 - RNA, 19 nt, Homo sapiens
  misc_RNA (1)...(19): siRNA sense strand
gcaaacacccucugugagu

SEQ ID NO: 185608 - RNA, 19 nt, Homo sapiens
  misc_RNA (1)...(19): siRNA sense strand
ccacccggcugauguuuga

SEQ ID NO: 185609 - RNA, 19 nt, Homo sapiens
  misc_RNA (1)...(19): siRNA sense strand
caagacagcuauuuuguug

SEQ ID NO: 185610 - RNA, 19 nt, Homo sapiens
  misc_RNA (1)...(19): siRNA sense strand
gcuauggguuucaucuuga

SEQ ID NO: 185611 - RNA, 19 nt, Homo sapiens
  misc_RNA (1)...(19): siRNA sense strand
caacacggccucugugguu

SEQ ID NO: 185612 - RNA, 19 nt, Homo sapiens
  misc_RNA (1)...(19): siRNA sense strand
gaaaccaccaccucuguug

SEQ ID NO: 185613 - RNA, 19 nt, Homo sapiens
  misc_RNA (1)...(19): siRNA sense strand
ucagaaaggccacaucuug

SEQ ID NO: 185614 - RNA, 19 nt, Homo sapiens
  misc_RNA (1)...(19): siRNA sense strand
gcacuuugcccaccacaug

SEQ ID NO: 185615 - RNA, 19 nt, Homo sapiens
  misc_RNA (1)...(19): siRNA sense strand
acaagaaccgcaagaauga

SEQ ID NO: 185616 - RNA, 19 nt, Homo sapiens
  misc_RNA (1)...(19): siRNA sense strand
gcaaauagugacagugaau

SEQ ID NO: 185617 - RNA, 19 nt, Homo sapiens
  misc_RNA (1)...(19): siRNA sense strand
aagaaagggucaucaggaa

SEQ ID NO: 185618 - RNA, 19 nt, Homo sapiens
  misc_RNA (1)...(19): siRNA sense strand
ccaaguggacucagaagaa

SEQ ID NO: 185619 - RNA, 19 nt, Homo sapiens
  misc_RNA (1)...(19): siRNA sense strand
gcugagggcugcauuuguc

SEQ ID NO: 185620 - RNA, 19 nt, Homo sapiens
  misc_RNA (1)...(19): siRNA sense strand
gauacaguuugccguggua

SEQ ID NO: 185621 - RNA, 19 nt, Homo sapiens
  misc_RNA (1)...(19): siRNA sense strand
gaaagggucaucaggaaag

SEQ ID NO: 185622 - RNA, 19 nt, Homo sapiens
  misc_RNA (1)...(19): siRNA sense strand
gcugagagcugugaauguc

SEQ ID NO: 185623 - RNA, 19 nt, Homo sapiens
  misc_RNA (1)...(19): siRNA sense strand
ggaguucgcauaccacaug

SEQ ID NO: 185624 - RNA, 19 nt, Homo sapiens
  misc_RNA (1)...(19): siRNA sense strand
uacgugagcuuugauggua

SEQ ID NO: 185625 - RNA, 19 nt, Homo sapiens
  misc_RNA (1)...(19): siRNA sense strand
caaacacccucugugaguu

SEQ ID NO: 185626 - RNA, 19 nt, Homo sapiens
  misc_RNA (1)...(19): siRNA sense strand
gugaauuugugaacaguug

SEQ ID NO: 185627 - RNA, 19 nt, Homo sapiens
  misc_RNA (1)...(19): siRNA sense strand
ccuacaaucuccaccaaga

SEQ ID NO: 185628 - RNA, 19 nt, Homo sapiens
  misc_RNA (1)...(19): siRNA sense strand
gacaacagcaacagcaauu

SEQ ID NO: 185629 - RNA, 19 nt, Homo sapiens
  misc_RNA (1)...(19): siRNA sense strand
uguaaucgcgucuguauga

SEQ ID NO: 185630 - RNA, 19 nt, Homo sapiens
  misc_RNA (1)...(19): siRNA sense strand
ggaaggacgcaacaagaug

SEQ ID NO: 185631 - RNA, 19 nt, Homo sapiens
  misc_RNA (1)...(19): siRNA sense strand
gcuuaagaauggccaguau

SEQ ID NO: 185632 - RNA, 19 nt, Homo sapiens
  misc_RNA (1)...(19): siRNA sense strand
acuaucaucuccacagaaa

SEQ ID NO: 185633 - RNA, 19 nt, Homo sapiens
  misc_RNA (1)...(19): siRNA sense strand
cauuuaugcuucagucuug

SEQ ID NO: 185634 - RNA, 19 nt, Homo sapiens
  misc_RNA (1)...(19): siRNA sense strand
acagagcgcugcccuccaa

SEQ ID NO: 185635 - RNA, 19 nt, Homo sapiens
  misc_RNA (1)...(19): siRNA sense strand
ugaccuauguucugaucaa

SEQ ID NO: 185636 - RNA, 19 nt, Homo sapiens
  misc_RNA (1)...(19): siRNA sense strand
cccguuaccucacauuuga

SEQ ID NO: 185637 - RNA, 19 nt, Homo sapiens
  misc_RNA (1)...(19): siRNA sense strand
gcuaugugcugagugaaga

SEQ ID NO: 185638 - RNA, 19 nt, Homo sapiens
  misc_RNA (1)...(19): siRNA sense strand
caacaacgacuacuaugag

SEQ ID NO: 185639 - RNA, 19 nt, Homo sapiens
  misc_RNA (1)...(19): siRNA sense strand
ugaaaccacuggccucaca

SEQ ID NO: 185640 - RNA, 19 nt, Homo sapiens
  misc_RNA (1)...(19): siRNA sense strand
ggacauugacccaaguugu

SEQ ID NO: 185641 - RNA, 19 nt, Homo sapiens
  misc_RNA (1)...(19): siRNA sense strand
ugugggaacuucaaugaug

SEQ ID NO: 185642 - RNA, 19 nt, Homo sapiens
  misc_RNA (1)...(19): siRNA sense strand
gaagggccaccgugugcua

SEQ ID NO: 185643 - RNA, 19 nt, Homo sapiens
  misc_RNA (1)...(19): siRNA sense strand
caagaucagugccaagcau

SEQ ID NO: 185644 - RNA, 19 nt, Homo sapiens
  misc_RNA (1)...(19): siRNA sense strand
gaacuaugacggcaacagu

SEQ ID NO: 185645 - RNA, 19 nt, Homo sapiens
  misc_RNA (1)...(19): siRNA sense strand
caacucaacagacccauuc

SEQ ID NO: 185646 - RNA, 19 nt, Homo sapiens
  misc_RNA (1)...(19): siRNA sense strand
cuacggagacccucauuau

SEQ ID NO: 185647 - RNA, 19 nt, Homo sapiens
  misc_RNA (1)...(19): siRNA sense strand
agacuaccaucucuacaga

SEQ ID NO: 185648 - RNA, 19 nt, Homo sapiens
  misc_RNA (1)...(19): siRNA sense strand
gaccaggagugucagaagu

SEQ ID NO: 185649 - RNA, 19 nt, Homo sapiens
  misc_RNA (1)...(19): siRNA sense strand
ccgcaagaaugacaugaug

SEQ ID NO: 185650 - RNA, 19 nt, Homo sapiens
  misc_RNA (1)...(19): siRNA sense strand
gugcaaacacccucuguga

SEQ ID NO: 185651 - RNA, 19 nt, Homo sapiens
  misc_RNA (1)...(19): siRNA sense strand
gcccagcgaugaaguagca

SEQ ID NO: 185652 - RNA, 19 nt, Homo sapiens
  misc_RNA (1)...(19): siRNA sense strand
gugggaacuucaaugauga

SEQ ID NO: 185653 - RNA, 19 nt, Homo sapiens
  misc_RNA (1)...(19): siRNA sense strand
cagaaaggccacaucuuga

SEQ ID NO: 185654 - RNA, 19 nt, Homo sapiens
  misc_RNA (1)...(19): siRNA sense strand
caacgcccaucccuucugu

SEQ ID NO: 185655 - RNA, 19 nt, Homo sapiens
  misc_RNA (1)...(19): siRNA sense strand
guaaggucaugcugaaugg

SEQ ID NO: 185656 - RNA, 19 nt, Homo sapiens
  misc_RNA (1)...(19): siRNA sense strand
gaugugcucuggaaacacu

SEQ ID NO: 185657 - RNA, 19 nt, Homo sapiens
  misc_RNA (1)...(19): siRNA sense strand
acaaugaccaccugaaguu

SEQ ID NO: 185658 - RNA, 19 nt, Homo sapiens
  misc_RNA (1)...(19): siRNA sense strand
gguuucaucuugaucaauc

SEQ ID NO: 185659 - RNA, 19 nt, Homo sapiens
  misc_RNA (1)...(19): siRNA sense strand
gggaguauccggaaacaca

SEQ ID NO: 185660 - RNA, 19 nt, Homo sapiens
  misc_RNA (1)...(19): siRNA sense strand
cagcuuugguggaaggaaa

SEQ ID NO: 185661 - RNA, 19 nt, Homo sapiens
  misc_RNA (1)...(19): siRNA sense strand
uagcaaauagugacaguga

SEQ ID NO: 185662 - RNA, 19 nt, Homo sapiens
  misc_RNA (1)...(19): siRNA sense strand
cugcaaacccaaccagaua

SEQ ID NO: 185663 - RNA, 19 nt, Homo sapiens
  misc_RNA (1)...(19): siRNA sense strand
gcgaagccaugcccugaca

SEQ ID NO: 185664 - RNA, 19 nt, Homo sapiens
  misc_RNA (1)...(19): siRNA sense strand
agacuaccaucuccacaga

SEQ ID NO: 185665 - RNA, 19 nt, Homo sapiens
  misc_RNA (1)...(19): siRNA sense strand
agacuaccaucuccacaga

SEQ ID NO: 185666 - RNA, 19 nt, Homo sapiens
  misc_RNA (1)...(19): siRNA sense strand
gaucaauccugggacuugu

SEQ ID NO: 185667 - RNA, 19 nt, Homo sapiens
  misc_RNA (1)...(19): siRNA sense strand
uaacggagagggcagcuau

SEQ ID NO: 185668 - RNA, 19 nt, Homo sapiens
  misc_RNA (1)...(19): siRNA sense strand
caggagaacccgaguggaa

SEQ ID NO: 185669 - RNA, 19 nt, Homo sapiens
  misc_RNA (1)...(19): siRNA sense strand
ugaggaagaggacgaacua

SEQ ID NO: 185670 - RNA, 19 nt, Homo sapiens
  misc_RNA (1)...(19): siRNA sense strand
cuacagcauuguuaacauc

SEQ ID NO: 185671 - RNA, 19 nt, Homo sapiens
  misc_RNA (1)...(19): siRNA sense strand
ccauaaggcucagcagcaa

SEQ ID NO: 185672 - RNA, 19 nt, Homo sapiens
  misc_RNA (1)...(19): siRNA sense strand
ugaaagcaacaacagaauu

SEQ ID NO: 185673 - RNA, 19 nt, Homo sapiens
  misc_RNA (1)...(19): siRNA sense strand
cuacaacaacgacuacuau

SEQ ID NO: 185674 - RNA, 19 nt, Homo sapiens
  misc_RNA (1)...(19): siRNA sense strand
ccaaaugcccgcuacgaau

SEQ ID NO: 185675 - RNA, 19 nt, Homo sapiens
  misc_RNA (1)...(19): siRNA sense strand
gaagcaacacggccucugu

SEQ ID NO: 185676 - RNA, 19 nt, Homo sapiens
  misc_RNA (1)...(19): siRNA sense strand
uucaugaggucuacauuga

SEQ ID NO: 185677 - RNA, 19 nt, Homo sapiens
  misc_RNA (1)...(19): siRNA sense strand
caacagcaacagcaauugu

SEQ ID NO: 185678 - RNA, 19 nt, Homo sapiens
  misc_RNA (1)...(19): siRNA sense strand
caugaggucuacauugaca

SEQ ID NO: 185679 - RNA, 19 nt, Homo sapiens
  misc_RNA (1)...(19): siRNA sense strand
ccacuggccucacagaaaa

SEQ ID NO: 185680 - RNA, 19 nt, Homo sapiens
  misc_RNA (1)...(19): siRNA sense strand
cgacaagaaccgcaagaau

SEQ ID NO: 185681 - RNA, 19 nt, Homo sapiens
  misc_RNA (1)...(19): siRNA sense strand
acugugcgaucuuaauaaa

SEQ ID NO: 185682 - RNA, 19 nt, Homo sapiens
  misc_RNA (1)...(19): siRNA sense strand
gcacucuuguccuggugaa

SEQ ID NO: 185683 - RNA, 19 nt, Homo sapiens
  misc_RNA (1)...(19): siRNA sense strand
gaugaaguagcaaauagug

SEQ ID NO: 185684 - RNA, 19 nt, Homo sapiens
  misc_RNA (1)...(19): siRNA sense strand
gaacuucaaugaugaggaa

SEQ ID NO: 185685 - RNA, 19 nt, Homo sapiens
  misc_RNA (1)...(19): siRNA sense strand
gaaacacacucucuucuca

SEQ ID NO: 185686 - RNA, 19 nt, Homo sapiens
  misc_RNA (1)...(19): siRNA sense strand
gugcagcccuccacauuua

SEQ ID NO: 185687 - RNA, 19 nt, Homo sapiens
  misc_RNA (1)...(19): siRNA sense strand
gaacugugcgaucuuaaua

SEQ ID NO: 185688 - RNA, 19 nt, Homo sapiens
  misc_RNA (1)...(19): siRNA sense strand
gaacaaugcucagucuaug

SEQ ID NO: 185689 - RNA, 19 nt, Homo sapiens
  misc_RNA (1)...(19): siRNA sense strand
gaucaagacuguggacgua

SEQ ID NO: 185690 - RNA, 19 nt, Homo sapiens
  misc_RNA (1)...(19): siRNA sense strand
ugacgggaaucaucucuua

SEQ ID NO: 185691 - RNA, 19 nt, Homo sapiens
  misc_RNA (1)...(19): siRNA sense strand
ggaaagauaaggacauuga

SEQ ID NO: 185692 - RNA, 19 nt, Homo sapiens
  misc_RNA (1)...(19): siRNA sense strand
caacagcaauugugucuca

SEQ ID NO: 185693 - RNA, 19 nt, Homo sapiens
  misc_RNA (1)...(19): siRNA sense strand
gugaacaguuggaaagaua

SEQ ID NO: 185694 - RNA, 19 nt, Homo sapiens
  misc_RNA (1)...(19): siRNA sense strand
caacagcccaugcagcuua

SEQ ID NO: 185695 - RNA, 19 nt, Homo sapiens
  misc_RNA (1)...(19): siRNA sense strand
gaagaggacgaacuaauga

SEQ ID NO: 185696 - RNA, 19 nt, Homo sapiens
  misc_RNA (1)...(19): siRNA sense strand
gcaauugcuucuacaacaa

SEQ ID NO: 185697 - RNA, 19 nt, Homo sapiens
  misc_RNA (1)...(19): siRNA sense strand
gcagacgccuggaacaaga

SEQ ID NO: 185698 - RNA, 19 nt, Homo sapiens
  misc_RNA (1)...(19): siRNA sense strand
ggaagaggacgaacuaaug

SEQ ID NO: 185699 - RNA, 19 nt, Homo sapiens
  misc_RNA (1)...(19): siRNA sense strand
ggaaaggucugcggcaugu

SEQ ID NO: 185700 - RNA, 19 nt, Homo sapiens
  misc_RNA (1)...(19): siRNA sense strand
gaaagcaacaacagaauuc

SEQ ID NO: 185701 - RNA, 19 nt, Homo sapiens
  misc_RNA (1)...(19): siRNA sense strand
caaguggacucagaagaaa

SEQ ID NO: 185702 - RNA, 19 nt, Homo sapiens
  misc_RNA (1)...(19): siRNA sense strand
ccaacaggaugguaucuau

SEQ ID NO: 185703 - RNA, 19 nt, Homo sapiens
  misc_RNA (1)...(19): siRNA sense strand
gacaagaaccgcaagaaug

SEQ ID NO: 185704 - RNA, 19 nt, Homo sapiens
  misc_RNA (1)...(19): siRNA sense strand
gcacacacauguccaccau

SEQ ID NO: 185705 - RNA, 19 nt, Homo sapiens
  misc_RNA (1)...(19): siRNA sense strand
gcgaugaaguagcaaauag

SEQ ID NO: 185706 - RNA, 19 nt, Homo sapiens
  misc_RNA (1)...(19): siRNA sense strand
gcuguaaggucaugcugaa

SEQ ID NO: 185707 - RNA, 19 nt, Homo sapiens
  misc_RNA (1)...(19): siRNA sense strand
gcaaacacccucugugagu

SEQ ID NO: 185708 - RNA, 19 nt, Homo sapiens
  misc_RNA (1)...(19): siRNA sense strand
ccacccggcugauguuuga

SEQ ID NO: 185709 - RNA, 19 nt, Homo sapiens
  misc_RNA (1)...(19): siRNA sense strand
caagacagcuauuuuguug

SEQ ID NO: 185710 - RNA, 19 nt, Homo sapiens
  misc_RNA (1)...(19): siRNA sense strand
gcuauggguuucaucuuga

SEQ ID NO: 185711 - RNA, 19 nt, Homo sapiens
  misc_RNA (1)...(19): siRNA sense strand
caacacggccucugugguu

SEQ ID NO: 185712 - RNA, 19 nt, Homo sapiens
  misc_RNA (1)...(19): siRNA sense strand
gaaaccaccaccucuguug

SEQ ID NO: 185713 - RNA, 19 nt, Homo sapiens
  misc_RNA (1)...(19): siRNA sense strand
ucagaaaggccacaucuug

SEQ ID NO: 185714 - RNA, 19 nt, Homo sapiens
  misc_RNA (1)...(19): siRNA sense strand
gcacuuugcccaccacaug

SEQ ID NO: 185715 - RNA, 19 nt, Homo sapiens
  misc_RNA (1)...(19): siRNA sense strand
acaagaaccgcaagaauga

SEQ ID NO: 185716 - RNA, 19 nt, Homo sapiens
  misc_RNA (1)...(19): siRNA sense strand
gcaaauagugacagugaau

SEQ ID NO: 185717 - RNA, 19 nt, Homo sapiens
  misc_RNA (1)...(19): siRNA sense strand
aagaaagggucaucaggaa

SEQ ID NO: 185718 - RNA, 19 nt, Homo sapiens
  misc_RNA (1)...(19): siRNA sense strand
ccaaguggacucagaagaa

SEQ ID NO: 185719 - RNA, 19 nt, Homo sapiens
  misc_RNA (1)...(19): siRNA sense strand
gcugagggcugcauuuguc

SEQ ID NO: 185720 - RNA, 19 nt, Homo sapiens
  misc_RNA (1)...(19): siRNA sense strand
gauacaguuugccguggua

SEQ ID NO: 185721 - RNA, 19 nt, Homo sapiens
  misc_RNA (1)...(19): siRNA sense strand
gaaagggucaucaggaaag

SEQ ID NO: 185722 - RNA, 19 nt, Homo sapiens
  misc_RNA (1)...(19): siRNA sense strand
gcugagagcugugaauguc

SEQ ID NO: 185723 - RNA, 19 nt, Homo sapiens
  misc_RNA (1)...(19): siRNA sense strand
ggaguucgcauaccacaug

SEQ ID NO: 185724 - RNA, 19 nt, Homo sapiens
  misc_RNA (1)...(19): siRNA sense strand
uacgugagcuuugauggua

SEQ ID NO: 185725 - RNA, 19 nt, Homo sapiens
  misc_RNA (1)...(19): siRNA sense strand
caaacacccucugugaguu

SEQ ID NO: 185726 - RNA, 19 nt, Homo sapiens
  misc_RNA (1)...(19): siRNA sense strand
gugaauuugugaacaguug

SEQ ID NO: 185727 - RNA, 19 nt, Homo sapiens
  misc_RNA (1)...(19): siRNA sense strand
ccuacaaucuccaccaaga

SEQ ID NO: 185728 - RNA, 19 nt, Homo sapiens
  misc_RNA (1)...(19): siRNA sense strand
gacaacagcaacagcaauu

SEQ ID NO: 185729 - RNA, 19 nt, Homo sapiens
  misc_RNA (1)...(19): siRNA sense strand
uguaaucgcgucuguauga

SEQ ID NO: 185730 - RNA, 19 nt, Homo sapiens
  misc_RNA (1)...(19): siRNA sense strand
ggaaggacgcaacaagaug

SEQ ID NO: 185731 - RNA, 19 nt, Homo sapiens
  misc_RNA (1)...(19): siRNA sense strand
gcuuaagaauggccaguau

SEQ ID NO: 185732 - RNA, 19 nt, Homo sapiens
  misc_RNA (1)...(19): siRNA sense strand
acuaucaucuccacagaaa

SEQ ID NO: 185733 - RNA, 19 nt, Homo sapiens
  misc_RNA (1)...(19): siRNA sense strand
cauuuaugcuucagucuug

SEQ ID NO: 185734 - RNA, 19 nt, Homo sapiens
  misc_RNA (1)...(19): siRNA sense strand
acagagcgcugcccuccaa

SEQ ID NO: 185735 - RNA, 19 nt, Homo sapiens
  misc_RNA (1)...(19): siRNA sense strand
ugaccuauguucugaucaa

SEQ ID NO: 185736 - RNA, 19 nt, Homo sapiens
  misc_RNA (1)...(19): siRNA sense strand
cccguuaccucacauuuga

SEQ ID NO: 185737 - RNA, 19 nt, Homo sapiens
  misc_RNA (1)...(19): siRNA sense strand
gcuaugugcugagugaaga

SEQ ID NO: 185738 - RNA, 19 nt, Homo sapiens
  misc_RNA (1)...(19): siRNA sense strand
caacaacgacuacuaugag

SEQ ID NO: 185739 - RNA, 19 nt, Homo sapiens
  misc_RNA (1)...(19): siRNA sense strand
ugaaaccacuggccucaca

SEQ ID NO: 185740 - RNA, 19 nt, Homo sapiens
  misc_RNA (1)...(19): siRNA sense strand
ggacauugacccaaguugu

SEQ ID NO: 185741 - RNA, 19 nt, Homo sapiens
  misc_RNA (1)...(19): siRNA sense strand
ugugggaacuucaaugaug

SEQ ID NO: 185742 - RNA, 19 nt, Homo sapiens
  misc_RNA (1)...(19): siRNA sense strand
gaagggccaccgugugcua

SEQ ID NO: 185743 - RNA, 19 nt, Homo sapiens
  misc_RNA (1)...(19): siRNA sense strand
caagaucagugccaagcau

SEQ ID NO: 185744 - RNA, 19 nt, Homo sapiens
  misc_RNA (1)...(19): siRNA sense strand
gaacuaugacggcaacagu

SEQ ID NO: 185745 - RNA, 19 nt, Homo sapiens
  misc_RNA (1)...(19): siRNA sense strand
caacucaacagacccauuc

SEQ ID NO: 185746 - RNA, 19 nt, Homo sapiens
  misc_RNA (1)...(19): siRNA sense strand
cuacggagacccucauuau

SEQ ID NO: 185747 - RNA, 19 nt, Homo sapiens
  misc_RNA (1)...(19): siRNA sense strand
agacuaccaucucuacaga

SEQ ID NO: 185748 - RNA, 19 nt, Homo sapiens
  misc_RNA (1)...(19): siRNA sense strand
gaccaggagugucagaagu

SEQ ID NO: 185749 - RNA, 19 nt, Homo sapiens
  misc_RNA (1)...(19): siRNA sense strand
ccgcaagaaugacaugaug

SEQ ID NO: 185750 - RNA, 19 nt, Homo sapiens
  misc_RNA (1)...(19): siRNA sense strand
gugcaaacacccucuguga

SEQ ID NO: 185751 - RNA, 19 nt, Homo sapiens
  misc_RNA (1)...(19): siRNA sense strand
gcccagcgaugaaguagca

SEQ ID NO: 185752 - RNA, 19 nt, Homo sapiens
  misc_RNA (1)...(19): siRNA sense strand
gugggaacuucaaugauga

SEQ ID NO: 185753 - RNA, 19 nt, Homo sapiens
  misc_RNA (1)...(19): siRNA sense strand
cagaaaggccacaucuuga

SEQ ID NO: 185754 - RNA, 19 nt, Homo sapiens
  misc_RNA (1)...(19): siRNA sense strand
caacgcccaucccuucugu

SEQ ID NO: 185755 - RNA, 19 nt, Homo sapiens
  misc_RNA (1)...(19): siRNA sense strand
guaaggucaugcugaaugg

SEQ ID NO: 185756 - RNA, 19 nt, Homo sapiens
  misc_RNA (1)...(19): siRNA sense strand
gaugugcucuggaaacacu

SEQ ID NO: 185757 - RNA, 19 nt, Homo sapiens
  misc_RNA (1)...(19): siRNA sense strand
acaaugaccaccugaaguu

SEQ ID NO: 185758 - RNA, 19 nt, Homo sapiens
  misc_RNA (1)...(19): siRNA sense strand
gguuucaucuugaucaauc

SEQ ID NO: 185759 - RNA, 19 nt, Homo sapiens
  misc_RNA (1)...(19): siRNA sense strand
gggaguauccggaaacaca

SEQ ID NO: 185760 - RNA, 19 nt, Homo sapiens
  misc_RNA (1)...(19): siRNA sense strand
cagcuuugguggaaggaaa

SEQ ID NO: 185761 - RNA, 19 nt, Homo sapiens
  misc_RNA (1)...(19): siRNA sense strand
uagcaaauagugacaguga

SEQ ID NO: 185762 - RNA, 19 nt, Homo sapiens
  misc_RNA (1)...(19): siRNA sense strand
cugcaaacccaaccagaua

SEQ ID NO: 185763 - RNA, 19 nt, Homo sapiens
  misc_RNA (1)...(19): siRNA sense strand
gcgaagccaugcccugaca

SEQ ID NO: 185764 - RNA, 19 nt, Homo sapiens
  misc_RNA (1)...(19): siRNA sense strand
agacuaccaucuccacaga

SEQ ID NO: 185765 - RNA, 19 nt, Homo sapiens
  misc_RNA (1)...(19): siRNA sense strand
agacuaccaucuccacaga

SEQ ID NO: 185766 - RNA, 19 nt, Homo sapiens
  misc_RNA (1)...(19): siRNA sense strand
gaucaauccugggacuugu

SEQ ID NO: 185767 - RNA, 19 nt, Homo sapiens
  misc_RNA (1)...(19): siRNA sense strand
uaacggagagggcagcuau

SEQ ID NO: 185768 - RNA, 19 nt, Homo sapiens
  misc_RNA (1)...(19): siRNA sense strand
caggagaacccgaguggaa

SEQ ID NO: 185769 - RNA, 19 nt, Homo sapiens
  misc_RNA (1)...(19): siRNA sense strand
ugaggaagaggacgaacua

SEQ ID NO: 185770 - RNA, 19 nt, Homo sapiens
  misc_RNA (1)...(19): siRNA sense strand
cuacagcauuguuaacauc

SEQ ID NO: 185771 - RNA, 19 nt, Homo sapiens
  misc_RNA (1)...(19): siRNA sense strand
ccauaaggcucagcagcaa

SEQ ID NO: 185772 - RNA, 19 nt, Homo sapiens
  misc_RNA (1)...(19): siRNA sense strand
ugaaagcaacaacagaauu

SEQ ID NO: 185773 - RNA, 19 nt, Homo sapiens
  misc_RNA (1)...(19): siRNA sense strand
cuacaacaacgacuacuau

SEQ ID NO: 185774 - RNA, 19 nt, Homo sapiens
  misc_RNA (1)...(19): siRNA sense strand
ccaaaugcccgcuacgaau

SEQ ID NO: 185775 - RNA, 19 nt, Homo sapiens
  misc_RNA (1)...(19): siRNA sense strand
gaagcaacacggccucugu

SEQ ID NO: 185776 - RNA, 19 nt, Homo sapiens
  misc_RNA (1)...(19): siRNA sense strand
uucaugaggucuacauuga

SEQ ID NO: 185777 - RNA, 19 nt, Homo sapiens
  misc_RNA (1)...(19): siRNA sense strand
caacagcaacagcaauugu

SEQ ID NO: 185778 - RNA, 19 nt, Homo sapiens
  misc_RNA (1)...(19): siRNA sense strand
caugaggucuacauugaca

SEQ ID NO: 185779 - RNA, 19 nt, Homo sapiens
  misc_RNA (1)...(19): siRNA sense strand
ccacuggccucacagaaaa

SEQ ID NO: 185780 - RNA, 19 nt, Homo sapiens
  misc_RNA (1)...(19): siRNA sense strand
cgacaagaaccgcaagaau

SEQ ID NO: 185781 - RNA, 19 nt, Homo sapiens
  misc_RNA (1)...(19): siRNA sense strand
acugugcgaucuuaauaaa

SEQ ID NO: 185782 - RNA, 19 nt, Homo sapiens
  misc_RNA (1)...(19): siRNA sense strand
gcacucuuguccuggugaa

SEQ ID NO: 185783 - RNA, 19 nt, Homo sapiens
  misc_RNA (1)...(19): siRNA sense strand
gaugaaguagcaaauagug

SEQ ID NO: 185784 - RNA, 19 nt, Homo sapiens
  misc_RNA (1)...(19): siRNA sense strand
gaacuucaaugaugaggaa

SEQ ID NO: 185785 - RNA, 19 nt, Homo sapiens
  misc_RNA (1)...(19): siRNA sense strand
gaaacacacucucuucuca

SEQ ID NO: 185786 - RNA, 19 nt, Homo sapiens
  misc_RNA (1)...(19): siRNA sense strand
gugcagcccuccacauuua

SEQ ID NO: 185787 - RNA, 19 nt, Homo sapiens
  misc_RNA (1)...(19): siRNA sense strand
gaacugugcgaucuuaaua

SEQ ID NO: 185788 - RNA, 19 nt, Homo sapiens
  misc_RNA (1)...(19): siRNA sense strand
gaacaaugcucagucuaug

SEQ ID NO: 185789 - RNA, 19 nt, Homo sapiens
  misc_RNA (1)...(19): siRNA sense strand
gaucaagacuguggacgua

SEQ ID NO: 185790 - RNA, 19 nt, Homo sapiens
  misc_RNA (1)...(19): siRNA sense strand
ugacgggaaucaucucuua

SEQ ID NO: 185791 - RNA, 19 nt, Homo sapiens
  misc_RNA (1)...(19): siRNA sense strand
ggaaagauaaggacauuga

SEQ ID NO: 185792 - RNA, 19 nt, Homo sapiens
  misc_RNA (1)...(19): siRNA sense strand
caacagcaauugugucuca

SEQ ID NO: 185793 - RNA, 19 nt, Homo sapiens
  misc_RNA (1)...(19): siRNA sense strand
gugaacaguuggaaagaua

SEQ ID NO: 185794 - RNA, 19 nt, Homo sapiens
  misc_RNA (1)...(19): siRNA sense strand
caacagcccaugcagcuua

SEQ ID NO: 185795 - RNA, 19 nt, Homo sapiens
  misc_RNA (1)...(19): siRNA sense strand
gaagaggacgaacuaauga

SEQ ID NO: 185796 - RNA, 19 nt, Homo sapiens
  misc_RNA (1)...(19): siRNA sense strand
gcaauugcuucuacaacaa

SEQ ID NO: 185797 - RNA, 19 nt, Homo sapiens
  misc_RNA (1)...(19): siRNA sense strand
gcagacgccuggaacaaga

SEQ ID NO: 185798 - RNA, 19 nt, Homo sapiens
  misc_RNA (1)...(19): siRNA sense strand
ggaagaggacgaacuaaug

SEQ ID NO: 185799 - RNA, 19 nt, Homo sapiens
  misc_RNA (1)...(19): siRNA sense strand
ggaaaggucugcggcaugu

SEQ ID NO: 185800 - RNA, 19 nt, Homo sapiens
  misc_RNA (1)...(19): siRNA sense strand
gaaagcaacaacagaauuc

SEQ ID NO: 185801 - RNA, 19 nt, Homo sapiens
  misc_RNA (1)...(19): siRNA sense strand
caaguggacucagaagaaa

SEQ ID NO: 185802 - RNA, 19 nt, Homo sapiens
  misc_RNA (1)...(19): siRNA sense strand
ccaacaggaugguaucuau

SEQ ID NO: 185803 - RNA, 19 nt, Homo sapiens
  misc_RNA (1)...(19): siRNA sense strand
gacaagaaccgcaagaaug

SEQ ID NO: 185804 - RNA, 19 nt, Homo sapiens
  misc_RNA (1)...(19): siRNA sense strand
gcacacacauguccaccau

SEQ ID NO: 185805 - RNA, 19 nt, Homo sapiens
  misc_RNA (1)...(19): siRNA sense strand
gcgaugaaguagcaaauag

SEQ ID NO: 185806 - RNA, 19 nt, Homo sapiens
  misc_RNA (1)...(19): siRNA sense strand
gcuguaaggucaugcugaa

SEQ ID NO: 185807 - RNA, 19 nt, Homo sapiens
  misc_RNA (1)...(19): siRNA sense strand
gcaaacacccucugugagu

SEQ ID NO: 185808 - RNA, 19 nt, Homo sapiens
  misc_RNA (1)...(19): siRNA sense strand
ccacccggcugauguuuga

SEQ ID NO: 185809 - RNA, 19 nt, Homo sapiens
  misc_RNA (1)...(19): siRNA sense strand
caagacagcuauuuuguug

SEQ ID NO: 185810 - RNA, 19 nt, Homo sapiens
  misc_RNA (1)...(19): siRNA sense strand
gcuauggguuucaucuuga

SEQ ID NO: 185811 - RNA, 19 nt, Homo sapiens
  misc_RNA (1)...(19): siRNA sense strand
caacacggccucugugguu

SEQ ID NO: 185812 - RNA, 19 nt, Homo sapiens
  misc_RNA (1)...(19): siRNA sense strand
gaaaccaccaccucuguug

SEQ ID NO: 185813 - RNA, 19 nt, Homo sapiens
  misc_RNA (1)...(19): siRNA sense strand
ucagaaaggccacaucuug

SEQ ID NO: 185814 - RNA, 19 nt, Homo sapiens
  misc_RNA (1)...(19): siRNA sense strand
gcacuuugcccaccacaug

SEQ ID NO: 185815 - RNA, 19 nt, Homo sapiens
  misc_RNA (1)...(19): siRNA sense strand
acaagaaccgcaagaauga

SEQ ID NO: 185816 - RNA, 19 nt, Homo sapiens
  misc_RNA (1)...(19): siRNA sense strand
gcaaauagugacagugaau

SEQ ID NO: 185817 - RNA, 19 nt, Homo sapiens
  misc_RNA (1)...(19): siRNA sense strand
aagaaagggucaucaggaa

SEQ ID NO: 185818 - RNA, 19 nt, Homo sapiens
  misc_RNA (1)...(19): siRNA sense strand
ccaaguggacucagaagaa

SEQ ID NO: 185819 - RNA, 19 nt, Homo sapiens
  misc_RNA (1)...(19): siRNA sense strand
gcugagggcugcauuuguc

SEQ ID NO: 185820 - RNA, 19 nt, Homo sapiens
  misc_RNA (1)...(19): siRNA sense strand
gauacaguuugccguggua

SEQ ID NO: 185821 - RNA, 19 nt, Homo sapiens
  misc_RNA (1)...(19): siRNA sense strand
gaaagggucaucaggaaag

SEQ ID NO: 185822 - RNA, 19 nt, Homo sapiens
  misc_RNA (1)...(19): siRNA sense strand
gcugagagcugugaauguc

SEQ ID NO: 185823 - RNA, 19 nt, Homo sapiens
  misc_RNA (1)...(19): siRNA sense strand
ggaguucgcauaccacaug

SEQ ID NO: 185824 - RNA, 19 nt, Homo sapiens
  misc_RNA (1)...(19): siRNA sense strand
uacgugagcuuugauggua

SEQ ID NO: 185825 - RNA, 19 nt, Homo sapiens
  misc_RNA (1)...(19): siRNA sense strand
caaacacccucugugaguu

SEQ ID NO: 185826 - RNA, 19 nt, Homo sapiens
  misc_RNA (1)...(19): siRNA sense strand
gugaauuugugaacaguug

SEQ ID NO: 185827 - RNA, 19 nt, Homo sapiens
  misc_RNA (1)...(19): siRNA sense strand
ccuacaaucuccaccaaga

SEQ ID NO: 185828 - RNA, 19 nt, Homo sapiens
  misc_RNA (1)...(19): siRNA sense strand
gacaacagcaacagcaauu

SEQ ID NO: 185829 - RNA, 19 nt, Homo sapiens
  misc_RNA (1)...(19): siRNA sense strand
uguaaucgcgucuguauga

SEQ ID NO: 185830 - RNA, 19 nt, Homo sapiens
  misc_RNA (1)...(19): siRNA sense strand
ggaaggacgcaacaagaug

SEQ ID NO: 185831 - RNA, 19 nt, Homo sapiens
  misc_RNA (1)...(19): siRNA sense strand
gcuuaagaauggccaguau

SEQ ID NO: 185832 - RNA, 19 nt, Homo sapiens
  misc_RNA (1)...(19): siRNA sense strand
acuaucaucuccacagaaa

SEQ ID NO: 185833 - RNA, 19 nt, Homo sapiens
  misc_RNA (1)...(19): siRNA sense strand
cauuuaugcuucagucuug

SEQ ID NO: 185834 - RNA, 19 nt, Homo sapiens
  misc_RNA (1)...(19): siRNA sense strand
acagagcgcugcccuccaa

SEQ ID NO: 185835 - RNA, 19 nt, Homo sapiens
  misc_RNA (1)...(19): siRNA sense strand
ugaccuauguucugaucaa

SEQ ID NO: 185836 - RNA, 19 nt, Homo sapiens
  misc_RNA (1)...(19): siRNA sense strand
cccguuaccucacauuuga

SEQ ID NO: 185837 - RNA, 19 nt, Homo sapiens
  misc_RNA (1)...(19): siRNA sense strand
gcuaugugcugagugaaga

SEQ ID NO: 185838 - RNA, 19 nt, Homo sapiens
  misc_RNA (1)...(19): siRNA sense strand
caacaacgacuacuaugag

SEQ ID NO: 185839 - RNA, 19 nt, Homo sapiens
  misc_RNA (1)...(19): siRNA sense strand
ugaaaccacuggccucaca

SEQ ID NO: 185840 - RNA, 19 nt, Homo sapiens
  misc_RNA (1)...(19): siRNA sense strand
ggacauugacccaaguugu

SEQ ID NO: 185841 - RNA, 19 nt, Homo sapiens
  misc_RNA (1)...(19): siRNA sense strand
ugugggaacuucaaugaug

SEQ ID NO: 185842 - RNA, 19 nt, Homo sapiens
  misc_RNA (1)...(19): siRNA sense strand
gaagggccaccgugugcua

SEQ ID NO: 185843 - RNA, 19 nt, Homo sapiens
  misc_RNA (1)...(19): siRNA sense strand
caagaucagugccaagcau

SEQ ID NO: 185844 - RNA, 19 nt, Homo sapiens
  misc_RNA (1)...(19): siRNA sense strand
gaacuaugacggcaacagu

SEQ ID NO: 185845 - RNA, 19 nt, Homo sapiens
  misc_RNA (1)...(19): siRNA sense strand
caacucaacagacccauuc

SEQ ID NO: 185846 - RNA, 19 nt, Homo sapiens
  misc_RNA (1)...(19): siRNA sense strand
cuacggagacccucauuau

SEQ ID NO: 185847 - RNA, 19 nt, Homo sapiens
  misc_RNA (1)...(19): siRNA sense strand
agacuaccaucucuacaga

SEQ ID NO: 185848 - RNA, 19 nt, Homo sapiens
  misc_RNA (1)...(19): siRNA sense strand
gaccaggagugucagaagu

SEQ ID NO: 185849 - RNA, 19 nt, Homo sapiens
  misc_RNA (1)...(19): siRNA sense strand
ccgcaagaaugacaugaug

SEQ ID NO: 185850 - RNA, 19 nt, Homo sapiens
  misc_RNA (1)...(19): siRNA sense strand
gugcaaacacccucuguga

SEQ ID NO: 185851 - RNA, 19 nt, Homo sapiens
  misc_RNA (1)...(19): siRNA sense strand
gcccagcgaugaaguagca

SEQ ID NO: 185852 - RNA, 19 nt, Homo sapiens
  misc_RNA (1)...(19): siRNA sense strand
gugggaacuucaaugauga

SEQ ID NO: 185853 - RNA, 19 nt, Homo sapiens
  misc_RNA (1)...(19): siRNA sense strand
cagaaaggccacaucuuga

SEQ ID NO: 185854 - RNA, 19 nt, Homo sapiens
  misc_RNA (1)...(19): siRNA sense strand
caacgcccaucccuucugu

SEQ ID NO: 185855 - RNA, 19 nt, Homo sapiens
  misc_RNA (1)...(19): siRNA sense strand
guaaggucaugcugaaugg

SEQ ID NO: 185856 - RNA, 19 nt, Homo sapiens
  misc_RNA (1)...(19): siRNA sense strand
gaugugcucuggaaacacu

SEQ ID NO: 185857 - RNA, 19 nt, Homo sapiens
  misc_RNA (1)...(19): siRNA sense strand
acaaugaccaccugaaguu

SEQ ID NO: 185858 - RNA, 19 nt, Homo sapiens
  misc_RNA (1)...(19): siRNA sense strand
gguuucaucuugaucaauc

SEQ ID NO: 185859 - RNA, 19 nt, Homo sapiens
  misc_RNA (1)...(19): siRNA sense strand
gggaguauccggaaacaca

SEQ ID NO: 185860 - RNA, 19 nt, Homo sapiens
  misc_RNA (1)...(19): siRNA sense strand
cagcuuugguggaaggaaa

SEQ ID NO: 185861 - RNA, 19 nt, Homo sapiens
  misc_RNA (1)...(19): siRNA sense strand
uagcaaauagugacaguga

SEQ ID NO: 185862 - RNA, 19 nt, Homo sapiens
  misc_RNA (1)...(19): siRNA sense strand
cugcaaacccaaccagaua

SEQ ID NO: 185863 - RNA, 19 nt, Homo sapiens
  misc_RNA (1)...(19): siRNA sense strand
gcgaagccaugcccugaca

SEQ ID NO: 185864 - RNA, 19 nt, Homo sapiens
  misc_RNA (1)...(19): siRNA sense strand
agacuaccaucuccacaga

SEQ ID NO: 185865 - RNA, 19 nt, Homo sapiens
  misc_RNA (1)...(19): siRNA sense strand
agacuaccaucuccacaga

SEQ ID NO: 185866 - RNA, 19 nt, Homo sapiens
  misc_RNA (1)...(19): siRNA sense strand
gaucaauccugggacuugu

SEQ ID NO: 185867 - RNA, 19 nt, Homo sapiens
  misc_RNA (1)...(19): siRNA sense strand
uaacggagagggcagcuau

SEQ ID NO: 185868 - RNA, 19 nt, Homo sapiens
  misc_RNA (1)...(19): siRNA sense strand
caggagaacccgaguggaa

SEQ ID NO: 185869 - RNA, 19 nt, Homo sapiens
  misc_RNA (1)...(19): siRNA sense strand
ugaggaagaggacgaacua

SEQ ID NO: 185870 - RNA, 19 nt, Homo sapiens
  misc_RNA (1)...(19): siRNA sense strand
cuacagcauuguuaacauc

SEQ ID NO: 185871 - RNA, 19 nt, Homo sapiens
  misc_RNA (1)...(19): siRNA sense strand
ccauaaggcucagcagcaa

SEQ ID NO: 185872 - RNA, 19 nt, Homo sapiens
  misc_RNA (1)...(19): siRNA sense strand
ugaaagcaacaacagaauu

SEQ ID NO: 185873 - RNA, 19 nt, Homo sapiens
  misc_RNA (1)...(19): siRNA sense strand
cuacaacaacgacuacuau

SEQ ID NO: 185874 - RNA, 19 nt, Homo sapiens
  misc_RNA (1)...(19): siRNA sense strand
ccaaaugcccgcuacgaau

SEQ ID NO: 185875 - RNA, 19 nt, Homo sapiens
  misc_RNA (1)...(19): siRNA sense strand
gaagcaacacggccucugu

SEQ ID NO: 185876 - RNA, 19 nt, Homo sapiens
  misc_RNA (1)...(19): siRNA sense strand
uucaugaggucuacauuga

SEQ ID NO: 185877 - RNA, 19 nt, Homo sapiens
  misc_RNA (1)...(19): siRNA sense strand
caacagcaacagcaauugu

SEQ ID NO: 185878 - RNA, 19 nt, Homo sapiens
  misc_RNA (1)...(19): siRNA sense strand
caugaggucuacauugaca

SEQ ID NO: 185879 - RNA, 19 nt, Homo sapiens
  misc_RNA (1)...(19): siRNA sense strand
ccacuggccucacagaaaa

SEQ ID NO: 185880 - RNA, 19 nt, Homo sapiens
  misc_RNA (1)...(19): siRNA sense strand
cgacaagaaccgcaagaau

SEQ ID NO: 185881 - RNA, 19 nt, Homo sapiens
  misc_RNA (1)...(19): siRNA sense strand
acugugcgaucuuaauaaa

SEQ ID NO: 185882 - RNA, 19 nt, Homo sapiens
  misc_RNA (1)...(19): siRNA sense strand
gcacucuuguccuggugaa

SEQ ID NO: 185883 - RNA, 19 nt, Homo sapiens
  misc_RNA (1)...(19): siRNA sense strand
gaugaaguagcaaauagug

SEQ ID NO: 185884 - RNA, 19 nt, Homo sapiens
  misc_RNA (1)...(19): siRNA sense strand
gaacuucaaugaugaggaa

SEQ ID NO: 185885 - RNA, 19 nt, Homo sapiens
  misc_RNA (1)...(19): siRNA sense strand
gaaacacacucucuucuca

SEQ ID NO: 185886 - RNA, 19 nt, Homo sapiens
  misc_RNA (1)...(19): siRNA sense strand
gugcagcccuccacauuua

SEQ ID NO: 185887 - RNA, 19 nt, Homo sapiens
  misc_RNA (1)...(19): siRNA sense strand
gaacugugcgaucuuaaua

SEQ ID NO: 185888 - RNA, 19 nt, Homo sapiens
  misc_RNA (1)...(19): siRNA sense strand
gaacaaugcucagucuaug

SEQ ID NO: 185889 - RNA, 19 nt, Homo sapiens
  misc_RNA (1)...(19): siRNA sense strand
gaucaagacuguggacgua

SEQ ID NO: 185890 - RNA, 19 nt, Homo sapiens
  misc_RNA (1)...(19): siRNA sense strand
ugacgggaaucaucucuua

SEQ ID NO: 185891 - RNA, 19 nt, Homo sapiens
  misc_RNA (1)...(19): siRNA sense strand
ggaaagauaaggacauuga

SEQ ID NO: 185892 - RNA, 19 nt, Homo sapiens
  misc_RNA (1)...(19): siRNA sense strand
caacagcaauugugucuca

SEQ ID NO: 185893 - RNA, 19 nt, Homo sapiens
  misc_RNA (1)...(19): siRNA sense strand
gugaacaguuggaaagaua

SEQ ID NO: 185894 - RNA, 19 nt, Homo sapiens
  misc_RNA (1)...(19): siRNA sense strand
caacagcccaugcagcuua

SEQ ID NO: 185895 - RNA, 19 nt, Homo sapiens
  misc_RNA (1)...(19): siRNA sense strand
gaagaggacgaacuaauga

SEQ ID NO: 185896 - RNA, 19 nt, Homo sapiens
  misc_RNA (1)...(19): siRNA sense strand
gcaauugcuucuacaacaa

SEQ ID NO: 185897 - RNA, 19 nt, Homo sapiens
  misc_RNA (1)...(19): siRNA sense strand
gcagacgccuggaacaaga

SEQ ID NO: 185898 - RNA, 19 nt, Homo sapiens
  misc_RNA (1)...(19): siRNA sense strand
ggaagaggacgaacuaaug

SEQ ID NO: 185899 - RNA, 19 nt, Homo sapiens
  misc_RNA (1)...(19): siRNA sense strand
ggaaaggucugcggcaugu

SEQ ID NO: 185900 - RNA, 19 nt, Homo sapiens
  misc_RNA (1)...(19): siRNA sense strand
gaaagcaacaacagaauuc

SEQ ID NO: 185901 - RNA, 19 nt, Homo sapiens
  misc_RNA (1)...(19): siRNA sense strand
caaguggacucagaagaaa

SEQ ID NO: 185902 - RNA, 19 nt, Homo sapiens
  misc_RNA (1)...(19): siRNA sense strand
ccaacaggaugguaucuau

SEQ ID NO: 185903 - RNA, 19 nt, Homo sapiens
  misc_RNA (1)...(19): siRNA sense strand
gacaagaaccgcaagaaug

SEQ ID NO: 185904 - RNA, 19 nt, Homo sapiens
  misc_RNA (1)...(19): siRNA sense strand
gcacacacauguccaccau

SEQ ID NO: 185905 - RNA, 19 nt, Homo sapiens
  misc_RNA (1)...(19): siRNA sense strand
gcgaugaaguagcaaauag

SEQ ID NO: 185906 - RNA, 19 nt, Homo sapiens
  misc_RNA (1)...(19): siRNA sense strand
gcuguaaggucaugcugaa

SEQ ID NO: 185907 - RNA, 19 nt, Homo sapiens
  misc_RNA (1)...(19): siRNA sense strand
gcaaacacccucugugagu

SEQ ID NO: 185908 - RNA, 19 nt, Homo sapiens
  misc_RNA (1)...(19): siRNA sense strand
ccacccggcugauguuuga

SEQ ID NO: 185909 - RNA, 19 nt, Homo sapiens
  misc_RNA (1)...(19): siRNA sense strand
caagacagcuauuuuguug

SEQ ID NO: 185910 - RNA, 19 nt, Homo sapiens
  misc_RNA (1)...(19): siRNA sense strand
gcuauggguuucaucuuga

SEQ ID NO: 185911 - RNA, 19 nt, Homo sapiens
  misc_RNA (1)...(19): siRNA sense strand
caacacggccucugugguu

SEQ ID NO: 185912 - RNA, 19 nt, Homo sapiens
  misc_RNA (1)...(19): siRNA sense strand
gaaaccaccaccucuguug

SEQ ID NO: 185913 - RNA, 19 nt, Homo sapiens
  misc_RNA (1)...(19): siRNA sense strand
ucagaaaggccacaucuug

SEQ ID NO: 185914 - RNA, 19 nt, Homo sapiens
  misc_RNA (1)...(19): siRNA sense strand
gcacuuugcccaccacaug

SEQ ID NO: 185915 - RNA, 19 nt, Homo sapiens
  misc_RNA (1)...(19): siRNA sense strand
acaagaaccgcaagaauga

SEQ ID NO: 185916 - RNA, 19 nt, Homo sapiens
  misc_RNA (1)...(19): siRNA sense strand
gcaaauagugacagugaau

SEQ ID NO: 185917 - RNA, 19 nt, Homo sapiens
  misc_RNA (1)...(19): siRNA sense strand
aagaaagggucaucaggaa

SEQ ID NO: 185918 - RNA, 19 nt, Homo sapiens
  misc_RNA (1)...(19): siRNA sense strand
ccaaguggacucagaagaa

SEQ ID NO: 185919 - RNA, 19 nt, Homo sapiens
  misc_RNA (1)...(19): siRNA sense strand
gcugagggcugcauuuguc

SEQ ID NO: 185920 - RNA, 19 nt, Homo sapiens
  misc_RNA (1)...(19): siRNA sense strand
gauacaguuugccguggua

SEQ ID NO: 185921 - RNA, 19 nt, Homo sapiens
  misc_RNA (1)...(19): siRNA sense strand
gaaagggucaucaggaaag

SEQ ID NO: 185922 - RNA, 19 nt, Homo sapiens
  misc_RNA (1)...(19): siRNA sense strand
gcugagagcugugaauguc

SEQ ID NO: 185923 - RNA, 19 nt, Homo sapiens
  misc_RNA (1)...(19): siRNA sense strand
ggaguucgcauaccacaug

SEQ ID NO: 185924 - RNA, 19 nt, Homo sapiens
  misc_RNA (1)...(19): siRNA sense strand
uacgugagcuuugauggua

SEQ ID NO: 185925 - RNA, 19 nt, Homo sapiens
  misc_RNA (1)...(19): siRNA sense strand
caaacacccucugugaguu

SEQ ID NO: 185926 - RNA, 19 nt, Homo sapiens
  misc_RNA (1)...(19): siRNA sense strand
gugaauuugugaacaguug

SEQ ID NO: 185927 - RNA, 19 nt, Homo sapiens
  misc_RNA (1)...(19): siRNA sense strand
ccuacaaucuccaccaaga

SEQ ID NO: 185928 - RNA, 19 nt, Homo sapiens
  misc_RNA (1)...(19): siRNA sense strand
gacaacagcaacagcaauu

SEQ ID NO: 185929 - RNA, 19 nt, Homo sapiens
  misc_RNA (1)...(19): siRNA sense strand
uguaaucgcgucuguauga

SEQ ID NO: 185930 - RNA, 19 nt, Homo sapiens
  misc_RNA (1)...(19): siRNA sense strand
ggaaggacgcaacaagaug

SEQ ID NO: 185931 - RNA, 19 nt, Homo sapiens
  misc_RNA (1)...(19): siRNA sense strand
gcuuaagaauggccaguau

SEQ ID NO: 185932 - RNA, 19 nt, Homo sapiens
  misc_RNA (1)...(19): siRNA sense strand
acuaucaucuccacagaaa

SEQ ID NO: 185933 - RNA, 19 nt, Homo sapiens
  misc_RNA (1)...(19): siRNA sense strand
cauuuaugcuucagucuug

SEQ ID NO: 185934 - RNA, 19 nt, Homo sapiens
  misc_RNA (1)...(19): siRNA sense strand
acagagcgcugcccuccaa

SEQ ID NO: 185935 - RNA, 19 nt, Homo sapiens
  misc_RNA (1)...(19): siRNA sense strand
ugaccuauguucugaucaa

SEQ ID NO: 185936 - RNA, 19 nt, Homo sapiens
  misc_RNA (1)...(19): siRNA sense strand
cccguuaccucacauuuga

SEQ ID NO: 185937 - RNA, 19 nt, Homo sapiens
  misc_RNA (1)...(19): siRNA sense strand
gcuaugugcugagugaaga

SEQ ID NO: 185938 - RNA, 19 nt, Homo sapiens
  misc_RNA (1)...(19): siRNA sense strand
caacaacgacuacuaugag

SEQ ID NO: 185939 - RNA, 19 nt, Homo sapiens
  misc_RNA (1)...(19): siRNA sense strand
ugaaaccacuggccucaca

SEQ ID NO: 185940 - RNA, 19 nt, Homo sapiens
  misc_RNA (1)...(19): siRNA sense strand
ggacauugacccaaguugu

SEQ ID NO: 185941 - RNA, 19 nt, Homo sapiens
  misc_RNA (1)...(19): siRNA sense strand
ugugggaacuucaaugaug

SEQ ID NO: 185942 - RNA, 19 nt, Homo sapiens
  misc_RNA (1)...(19): siRNA sense strand
gaagggccaccgugugcua

SEQ ID NO: 185943 - RNA, 19 nt, Homo sapiens
  misc_RNA (1)...(19): siRNA sense strand
caagaucagugccaagcau

SEQ ID NO: 185944 - RNA, 19 nt, Homo sapiens
  misc_RNA (1)...(19): siRNA sense strand
gaacuaugacggcaacagu

SEQ ID NO: 185945 - RNA, 19 nt, Homo sapiens
  misc_RNA (1)...(19): siRNA sense strand
caacucaacagacccauuc

SEQ ID NO: 185946 - RNA, 19 nt, Homo sapiens
  misc_RNA (1)...(19): siRNA sense strand
cuacggagacccucauuau

SEQ ID NO: 185947 - RNA, 19 nt, Homo sapiens
  misc_RNA (1)...(19): siRNA sense strand
agacuaccaucucuacaga

SEQ ID NO: 185948 - RNA, 19 nt, Homo sapiens
  misc_RNA (1)...(19): siRNA sense strand
gaccaggagugucagaagu

SEQ ID NO: 185949 - RNA, 19 nt, Homo sapiens
  misc_RNA (1)...(19): siRNA sense strand
ccgcaagaaugacaugaug

SEQ ID NO: 185950 - RNA, 19 nt, Homo sapiens
  misc_RNA (1)...(19): siRNA sense strand
gugcaaacacccucuguga

SEQ ID NO: 185951 - RNA, 19 nt, Homo sapiens
  misc_RNA (1)...(19): siRNA sense strand
gcccagcgaugaaguagca

SEQ ID NO: 185952 - RNA, 19 nt, Homo sapiens
  misc_RNA (1)...(19): siRNA sense strand
gugggaacuucaaugauga

SEQ ID NO: 185953 - RNA, 19 nt, Homo sapiens
  misc_RNA (1)...(19): siRNA sense strand
cagaaaggccacaucuuga

SEQ ID NO: 185954 - RNA, 19 nt, Homo sapiens
  misc_RNA (1)...(19): siRNA sense strand
caacgcccaucccuucugu

SEQ ID NO: 185955 - RNA, 19 nt, Homo sapiens
  misc_RNA (1)...(19): siRNA sense strand
guaaggucaugcugaaugg

SEQ ID NO: 185956 - RNA, 19 nt, Homo sapiens
  misc_RNA (1)...(19): siRNA sense strand
gaugugcucuggaaacacu

SEQ ID NO: 185957 - RNA, 19 nt, Homo sapiens
  misc_RNA (1)...(19): siRNA sense strand
acaaugaccaccugaaguu

SEQ ID NO: 185958 - RNA, 19 nt, Homo sapiens
  misc_RNA (1)...(19): siRNA sense strand
gguuucaucuugaucaauc

SEQ ID NO: 185959 - RNA, 19 nt, Homo sapiens
  misc_RNA (1)...(19): siRNA sense strand
gggaguauccggaaacaca

SEQ ID NO: 185960 - RNA, 19 nt, Homo sapiens
  misc_RNA (1)...(19): siRNA sense strand
cagcuuugguggaaggaaa

SEQ ID NO: 185961 - RNA, 19 nt, Homo sapiens
  misc_RNA (1)...(19): siRNA sense strand
uagcaaauagugacaguga

SEQ ID NO: 185962 - RNA, 19 nt, Homo sapiens
  misc_RNA (1)...(19): siRNA sense strand
cugcaaacccaaccagaua

SEQ ID NO: 185963 - RNA, 19 nt, Homo sapiens
  misc_RNA (1)...(19): siRNA sense strand
gcgaagccaugcccugaca

SEQ ID NO: 185964 - RNA, 19 nt, Homo sapiens
  misc_RNA (1)...(19): siRNA sense strand
agacuaccaucuccacaga

SEQ ID NO: 185965 - RNA, 19 nt, Homo sapiens
  misc_RNA (1)...(19): siRNA sense strand
agacuaccaucuccacaga

SEQ ID NO: 185966 - RNA, 19 nt, Homo sapiens
  misc_RNA (1)...(19): siRNA sense strand
gaucaauccugggacuugu

SEQ ID NO: 185967 - RNA, 19 nt, Homo sapiens
  misc_RNA (1)...(19): siRNA sense strand
uaacggagagggcagcuau

SEQ ID NO: 185968 - RNA, 19 nt, Homo sapiens
  misc_RNA (1)...(19): siRNA sense strand
caggagaacccgaguggaa

SEQ ID NO: 185969 - RNA, 19 nt, Homo sapiens
  misc_RNA (1)...(19): siRNA sense strand
ugaggaagaggacgaacua

SEQ ID NO: 185970 - RNA, 19 nt, Homo sapiens
  misc_RNA (1)...(19): siRNA sense strand
cuacagcauuguuaacauc

SEQ ID NO: 185971 - RNA, 19 nt, Homo sapiens
  misc_RNA (1)...(19): siRNA sense strand
ccauaaggcucagcagcaa

SEQ ID NO: 185972 - RNA, 19 nt, Homo sapiens
  misc_RNA (1)...(19): siRNA sense strand
ugaaagcaacaacagaauu

SEQ ID NO: 185973 - RNA, 19 nt, Homo sapiens
  misc_RNA (1)...(19): siRNA sense strand
cuacaacaacgacuacuau

SEQ ID NO: 185974 - RNA, 19 nt, Homo sapiens
  misc_RNA (1)...(19): siRNA sense strand
ccaaaugcccgcuacgaau

SEQ ID NO: 185975 - RNA, 19 nt, Homo sapiens
  misc_RNA (1)...(19): siRNA sense strand
gaagcaacacggccucugu

SEQ ID NO: 185976 - RNA, 19 nt, Homo sapiens
  misc_RNA (1)...(19): siRNA sense strand
uucaugaggucuacauuga

SEQ ID NO: 185977 - RNA, 19 nt, Homo sapiens
  misc_RNA (1)...(19): siRNA sense strand
caacagcaacagcaauugu

SEQ ID NO: 185978 - RNA, 19 nt, Homo sapiens
  misc_RNA (1)...(19): siRNA sense strand
caugaggucuacauugaca

SEQ ID NO: 185979 - RNA, 19 nt, Homo sapiens
  misc_RNA (1)...(19): siRNA sense strand
ccacuggccucacagaaaa

SEQ ID NO: 185980 - RNA, 19 nt, Homo sapiens
  misc_RNA (1)...(19): siRNA sense strand
cgacaagaaccgcaagaau

SEQ ID NO: 185981 - RNA, 19 nt, Homo sapiens
  misc_RNA (1)...(19): siRNA sense strand
acugugcgaucuuaauaaa

SEQ ID NO: 185982 - RNA, 19 nt, Homo sapiens
  misc_RNA (1)...(19): siRNA sense strand
gcacucuuguccuggugaa

SEQ ID NO: 185983 - RNA, 19 nt, Homo sapiens
  misc_RNA (1)...(19): siRNA sense strand
gaugaaguagcaaauagug

SEQ ID NO: 185984 - RNA, 19 nt, Homo sapiens
  misc_RNA (1)...(19): siRNA sense strand
gaacuucaaugaugaggaa

SEQ ID NO: 185985 - RNA, 19 nt, Homo sapiens
  misc_RNA (1)...(19): siRNA sense strand
gaaacacacucucuucuca

SEQ ID NO: 185986 - RNA, 19 nt, Homo sapiens
  misc_RNA (1)...(19): siRNA sense strand
gugcagcccuccacauuua

SEQ ID NO: 185987 - RNA, 19 nt, Homo sapiens
  misc_RNA (1)...(19): siRNA sense strand
gaacugugcgaucuuaaua

SEQ ID NO: 185988 - RNA, 19 nt, Homo sapiens
  misc_RNA (1)...(19): siRNA sense strand
gaacaaugcucagucuaug

SEQ ID NO: 185989 - RNA, 19 nt, Homo sapiens
  misc_RNA (1)...(19): siRNA sense strand
gaucaagacuguggacgua

SEQ ID NO: 185990 - RNA, 19 nt, Homo sapiens
  misc_RNA (1)...(19): siRNA sense strand
ugacgggaaucaucucuua

SEQ ID NO: 185991 - RNA, 19 nt, Homo sapiens
  misc_RNA (1)...(19): siRNA sense strand
ggaaagauaaggacauuga

SEQ ID NO: 185992 - RNA, 19 nt, Homo sapiens
  misc_RNA (1)...(19): siRNA sense strand
caacagcaauugugucuca

SEQ ID NO: 185993 - RNA, 19 nt, Homo sapiens
  misc_RNA (1)...(19): siRNA sense strand
gugaacaguuggaaagaua

SEQ ID NO: 185994 - RNA, 19 nt, Homo sapiens
  misc_RNA (1)...(19): siRNA sense strand
ccagaaagccagcaucuaa

SEQ ID NO: 185995 - RNA, 19 nt, Homo sapiens
  misc_RNA (1)...(19): siRNA sense strand
caacagcccaugcagcuua

SEQ ID NO: 185996 - RNA, 19 nt, Homo sapiens
  misc_RNA (1)...(19): siRNA sense strand
gaagaggacgaacuaauga

SEQ ID NO: 185997 - RNA, 19 nt, Homo sapiens
  misc_RNA (1)...(19): siRNA sense strand
gcaauugcuucuacaacaa

SEQ ID NO: 185998 - RNA, 19 nt, Homo sapiens
  misc_RNA (1)...(19): siRNA sense strand
gcagacgccuggaacaaga

SEQ ID NO: 185999 - RNA, 19 nt, Homo sapiens
  misc_RNA (1)...(19): siRNA sense strand
ggaagaggacgaacuaaug

SEQ ID NO: 186000 - RNA, 19 nt, Homo sapiens
  misc_RNA (1)...(19): siRNA sense strand
ggaaaggucugcggcaugu

SEQ ID NO: 186001 - RNA, 19 nt, Homo sapiens
  misc_RNA (1)...(19): siRNA sense strand
gaaagcaacaacagaauuc

SEQ ID NO: 186002 - RNA, 19 nt, Homo sapiens
  misc_RNA (1)...(19): siRNA sense strand
caaguggacucagaagaaa

SEQ ID NO: 186003 - RNA, 19 nt, Homo sapiens
  misc_RNA (1)...(19): siRNA sense strand
ccaacaggaugguaucuau

SEQ ID NO: 186004 - RNA, 19 nt, Homo sapiens
  misc_RNA (1)...(19): siRNA sense strand
gacaagaaccgcaagaaug

SEQ ID NO: 186005 - RNA, 19 nt, Homo sapiens
  misc_RNA (1)...(19): siRNA sense strand
gcacacacauguccaccau

SEQ ID NO: 186006 - RNA, 19 nt, Homo sapiens
  misc_RNA (1)...(19): siRNA sense strand
gaacgaggaggaagagaga

SEQ ID NO: 186007 - RNA, 19 nt, Homo sapiens
  misc_RNA (1)...(19): siRNA sense strand
gcgaugaaguagcaaauag

SEQ ID NO: 186008 - RNA, 19 nt, Homo sapiens
  misc_RNA (1)...(19): siRNA sense strand
gcuguaaggucaugcugaa

SEQ ID NO: 186009 - RNA, 19 nt, Homo sapiens
  misc_RNA (1)...(19): siRNA sense strand
gcaaacacccucugugagu

SEQ ID NO: 186010 - RNA, 19 nt, Homo sapiens
  misc_RNA (1)...(19): siRNA sense strand
ccacccggcugauguuuga

SEQ ID NO: 186011 - RNA, 19 nt, Homo sapiens
  misc_RNA (1)...(19): siRNA sense strand
caagacagcuauuuuguug

SEQ ID NO: 186012 - RNA, 19 nt, Homo sapiens
  misc_RNA (1)...(19): siRNA sense strand
gcuauggguuucaucuuga

SEQ ID NO: 186013 - RNA, 19 nt, Homo sapiens
  misc_RNA (1)...(19): siRNA sense strand
caacacggccucugugguu

SEQ ID NO: 186014 - RNA, 19 nt, Homo sapiens
  misc_RNA (1)...(19): siRNA sense strand
gaaaccaccaccucuguug

SEQ ID NO: 186015 - RNA, 19 nt, Homo sapiens
  misc_RNA (1)...(19): siRNA sense strand
ucagaaaggccacaucuug

SEQ ID NO: 186016 - RNA, 19 nt, Homo sapiens
  misc_RNA (1)...(19): siRNA sense strand
gcacuuugcccaccacaug

SEQ ID NO: 186017 - RNA, 19 nt, Homo sapiens
  misc_RNA (1)...(19): siRNA sense strand
acaagaaccgcaagaauga

SEQ ID NO: 186018 - RNA, 19 nt, Homo sapiens
  misc_RNA (1)...(19): siRNA sense strand
gcaaauagugacagugaau

SEQ ID NO: 186019 - RNA, 19 nt, Homo sapiens
  misc_RNA (1)...(19): siRNA sense strand
aagaaagggucaucaggaa

SEQ ID NO: 186020 - RNA, 19 nt, Homo sapiens
  misc_RNA (1)...(19): siRNA sense strand
ccaaguggacucagaagaa

SEQ ID NO: 186021 - RNA, 19 nt, Homo sapiens
  misc_RNA (1)...(19): siRNA sense strand
gcugagggcugcauuuguc

SEQ ID NO: 186022 - RNA, 19 nt, Homo sapiens
  misc_RNA (1)...(19): siRNA sense strand
gauacaguuugccguggua

SEQ ID NO: 186023 - RNA, 19 nt, Homo sapiens
  misc_RNA (1)...(19): siRNA sense strand
gaaagggucaucaggaaag

SEQ ID NO: 186024 - RNA, 19 nt, Homo sapiens
  misc_RNA (1)...(19): siRNA sense strand
gcugagagcugugaauguc

SEQ ID NO: 186025 - RNA, 19 nt, Homo sapiens
  misc_RNA (1)...(19): siRNA sense strand
ggaguucgcauaccacaug

SEQ ID NO: 186026 - RNA, 19 nt, Homo sapiens
  misc_RNA (1)...(19): siRNA sense strand
uacgugagcuuugauggua

SEQ ID NO: 186027 - RNA, 19 nt, Homo sapiens
  misc_RNA (1)...(19): siRNA sense strand
caaacacccucugugaguu

SEQ ID NO: 186028 - RNA, 19 nt, Homo sapiens
  misc_RNA (1)...(19): siRNA sense strand
gugaauuugugaacaguug

SEQ ID NO: 186029 - RNA, 19 nt, Homo sapiens
  misc_RNA (1)...(19): siRNA sense strand
ccuacaaucuccaccaaga

SEQ ID NO: 186030 - RNA, 19 nt, Homo sapiens
  misc_RNA (1)...(19): siRNA sense strand
gacaacagcaacagcaauu

SEQ ID NO: 186031 - RNA, 19 nt, Homo sapiens
  misc_RNA (1)...(19): siRNA sense strand
uguaaucgcgucuguauga

SEQ ID NO: 186032 - RNA, 19 nt, Homo sapiens
  misc_RNA (1)...(19): siRNA sense strand
ggaaggacgcaacaagaug

SEQ ID NO: 186033 - RNA, 19 nt, Homo sapiens
  misc_RNA (1)...(19): siRNA sense strand
gcuuaagaauggccaguau

SEQ ID NO: 186034 - RNA, 19 nt, Homo sapiens
  misc_RNA (1)...(19): siRNA sense strand
acuaucaucuccacagaaa

SEQ ID NO: 186035 - RNA, 19 nt, Homo sapiens
  misc_RNA (1)...(19): siRNA sense strand
cauuuaugcuucagucuug

SEQ ID NO: 186036 - RNA, 19 nt, Homo sapiens
  misc_RNA (1)...(19): siRNA sense strand
acagagcgcugcccuccaa

SEQ ID NO: 186037 - RNA, 19 nt, Homo sapiens
  misc_RNA (1)...(19): siRNA sense strand
ugaccuauguucugaucaa

SEQ ID NO: 186038 - RNA, 19 nt, Homo sapiens
  misc_RNA (1)...(19): siRNA sense strand
cccguuaccucacauuuga

SEQ ID NO: 186039 - RNA, 19 nt, Homo sapiens
  misc_RNA (1)...(19): siRNA sense strand
gcuaugugcugagugaaga

SEQ ID NO: 186040 - RNA, 19 nt, Homo sapiens
  misc_RNA (1)...(19): siRNA sense strand
caacaacgacuacuaugag

SEQ ID NO: 186041 - RNA, 19 nt, Homo sapiens
  misc_RNA (1)...(19): siRNA sense strand
ugaaaccacuggccucaca

SEQ ID NO: 186042 - RNA, 19 nt, Homo sapiens
  misc_RNA (1)...(19): siRNA sense strand
gagagugcauuuacagaac

SEQ ID NO: 186043 - RNA, 19 nt, Homo sapiens
  misc_RNA (1)...(19): siRNA sense strand
ggacauugacccaaguugu

SEQ ID NO: 186044 - RNA, 19 nt, Homo sapiens
  misc_RNA (1)...(19): siRNA sense strand
ugugggaacuucaaugaug

SEQ ID NO: 186045 - RNA, 19 nt, Homo sapiens
  misc_RNA (1)...(19): siRNA sense strand
gaagggccaccgugugcua

SEQ ID NO: 186046 - RNA, 19 nt, Homo sapiens
  misc_RNA (1)...(19): siRNA sense strand
caagaucagugccaagcau

SEQ ID NO: 186047 - RNA, 19 nt, Homo sapiens
  misc_RNA (1)...(19): siRNA sense strand
gaacuaugacggcaacagu

SEQ ID NO: 186048 - RNA, 19 nt, Homo sapiens
  misc_RNA (1)...(19): siRNA sense strand
caacucaacagacccauuc

SEQ ID NO: 186049 - RNA, 19 nt, Homo sapiens
  misc_RNA (1)...(19): siRNA sense strand
cuacggagacccucauuau

SEQ ID NO: 186050 - RNA, 19 nt, Homo sapiens
  misc_RNA (1)...(19): siRNA sense strand
agacuaccaucucuacaga

SEQ ID NO: 186051 - RNA, 19 nt, Homo sapiens
  misc_RNA (1)...(19): siRNA sense strand
gaccaggagugucagaagu

SEQ ID NO: 186052 - RNA, 19 nt, Homo sapiens
  misc_RNA (1)...(19): siRNA sense strand
ccgcaagaaugacaugaug

SEQ ID NO: 186053 - RNA, 19 nt, Homo sapiens
  misc_RNA (1)...(19): siRNA sense strand
gugcaaacacccucuguga

SEQ ID NO: 186054 - RNA, 19 nt, Homo sapiens
  misc_RNA (1)...(19): siRNA sense strand
gcccagcgaugaaguagca

SEQ ID NO: 186055 - RNA, 19 nt, Homo sapiens
  misc_RNA (1)...(19): siRNA sense strand
gugggaacuucaaugauga

SEQ ID NO: 186056 - RNA, 19 nt, Homo sapiens
  misc_RNA (1)...(19): siRNA sense strand
cagaaaggccacaucuuga

SEQ ID NO: 186057 - RNA, 19 nt, Homo sapiens
  misc_RNA (1)...(19): siRNA sense strand
caacgcccaucccuucugu

SEQ ID NO: 186058 - RNA, 19 nt, Homo sapiens
  misc_RNA (1)...(19): siRNA sense strand
gaugugcucuggaaacacu

SEQ ID NO: 186059 - RNA, 19 nt, Homo sapiens
  misc_RNA (1)...(19): siRNA sense strand
guaaggucaugcugaaugg

SEQ ID NO: 186060 - RNA, 19 nt, Homo sapiens
  misc_RNA (1)...(19): siRNA sense strand
acaaugaccaccugaaguu

SEQ ID NO: 186061 - RNA, 19 nt, Homo sapiens
  misc_RNA (1)...(19): siRNA sense strand
gguuucaucuugaucaauc

SEQ ID NO: 186062 - RNA, 19 nt, Homo sapiens
  misc_RNA (1)...(19): siRNA sense strand
gggaguauccggaaacaca

SEQ ID NO: 186063 - RNA, 19 nt, Homo sapiens
  misc_RNA (1)...(19): siRNA sense strand
cagcuuugguggaaggaaa

SEQ ID NO: 186064 - RNA, 19 nt, Homo sapiens
  misc_RNA (1)...(19): siRNA sense strand
uagcaaauagugacaguga

SEQ ID NO: 186065 - RNA, 19 nt, Homo sapiens
  misc_RNA (1)...(19): siRNA sense strand
cugcaaacccaaccagaua

SEQ ID NO: 186066 - RNA, 19 nt, Homo sapiens
  misc_RNA (1)...(19): siRNA sense strand
gcgaagccaugcccugaca

SEQ ID NO: 186067 - RNA, 19 nt, Homo sapiens
  misc_RNA (1)...(19): siRNA sense strand
agacuaccaucuccacaga

SEQ ID NO: 186068 - RNA, 19 nt, Homo sapiens
  misc_RNA (1)...(19): siRNA sense strand
agacuaccaucuccacaga

SEQ ID NO: 186069 - RNA, 19 nt, Homo sapiens
  misc_RNA (1)...(19): siRNA sense strand
gaucaauccugggacuugu

SEQ ID NO: 186070 - RNA, 19 nt, Homo sapiens
  misc_RNA (1)...(19): siRNA sense strand
gaagcaacacggccucugu

SEQ ID NO: 186071 - RNA, 19 nt, Homo sapiens
  misc_RNA (1)...(19): siRNA sense strand
uaacggagagggcagcuau

SEQ ID NO: 186072 - RNA, 19 nt, Homo sapiens
  misc_RNA (1)...(19): siRNA sense strand
caggagaacccgaguggaa

SEQ ID NO: 186073 - RNA, 19 nt, Homo sapiens
  misc_RNA (1)...(19): siRNA sense strand
ugaggaagaggacgaacua

SEQ ID NO: 186074 - RNA, 19 nt, Homo sapiens
  misc_RNA (1)...(19): siRNA sense strand
cuacagcauuguuaacauc

SEQ ID NO: 186075 - RNA, 19 nt, Homo sapiens
  misc_RNA (1)...(19): siRNA sense strand
ccauaaggcucagcagcaa

SEQ ID NO: 186076 - RNA, 19 nt, Homo sapiens
  misc_RNA (1)...(19): siRNA sense strand
ugaaagcaacaacagaauu

SEQ ID NO: 186077 - RNA, 19 nt, Homo sapiens
  misc_RNA (1)...(19): siRNA sense strand
cuacaacaacgacuacuau

SEQ ID NO: 186078 - RNA, 19 nt, Homo sapiens
  misc_RNA (1)...(19): siRNA sense strand
ccaaaugcccgcuacgaau

SEQ ID NO: 186079 - RNA, 19 nt, Homo sapiens
  misc_RNA (1)...(19): siRNA sense strand
uucaugaggucuacauuga

SEQ ID NO: 186080 - RNA, 19 nt, Homo sapiens
  misc_RNA (1)...(19): siRNA sense strand
caacagcaacagcaauugu

SEQ ID NO: 186081 - RNA, 19 nt, Homo sapiens
  misc_RNA (1)...(19): siRNA sense strand
caugaggucuacauugaca

SEQ ID NO: 186082 - RNA, 19 nt, Homo sapiens
  misc_RNA (1)...(19): siRNA sense strand
acugugcgaucuuaauaaa

SEQ ID NO: 186083 - RNA, 19 nt, Homo sapiens
  misc_RNA (1)...(19): siRNA sense strand
cgacaagaaccgcaagaau

SEQ ID NO: 186084 - RNA, 19 nt, Homo sapiens
  misc_RNA (1)...(19): siRNA sense strand
gaacauauggugcaugaua

SEQ ID NO: 186085 - RNA, 19 nt, Homo sapiens
  misc_RNA (1)...(19): siRNA sense strand
caaaggaucuuccauuuag

SEQ ID NO: 186086 - RNA, 19 nt, Homo sapiens
  misc_RNA (1)...(19): siRNA sense strand
guaaagagaugccauucaa

SEQ ID NO: 186087 - RNA, 19 nt, Homo sapiens
  misc_RNA (1)...(19): siRNA sense strand
ugacauaguuucagaagaa

SEQ ID NO: 186088 - RNA, 19 nt, Homo sapiens
  misc_RNA (1)...(19): siRNA sense strand
gaacuuuccucauauuugu

SEQ ID NO: 186089 - RNA, 19 nt, Homo sapiens
  misc_RNA (1)...(19): siRNA sense strand
ggaugaagaugaauuugaa

SEQ ID NO: 186090 - RNA, 19 nt, Homo sapiens
  misc_RNA (1)...(19): siRNA sense strand
gcaagaacuuuccucauau

SEQ ID NO: 186091 - RNA, 19 nt, Homo sapiens
  misc_RNA (1)...(19): siRNA sense strand
gaagaugacuuagguggaa

SEQ ID NO: 186092 - RNA, 19 nt, Homo sapiens
  misc_RNA (1)...(19): siRNA sense strand
ugaaauugcugaugaaguu

SEQ ID NO: 186093 - RNA, 19 nt, Homo sapiens
  misc_RNA (1)...(19): siRNA sense strand
ugacuuagguggaacugua

SEQ ID NO: 186094 - RNA, 19 nt, Homo sapiens
  misc_RNA (1)...(19): siRNA sense strand
gaaagacuauccucauaag

SEQ ID NO: 186095 - RNA, 19 nt, Homo sapiens
  misc_RNA (1)...(19): siRNA sense strand
gauguucagugcucagaua

SEQ ID NO: 186096 - RNA, 19 nt, Homo sapiens
  misc_RNA (1)...(19): siRNA sense strand
gaccaucgaugcagaauca

SEQ ID NO: 186097 - RNA, 19 nt, Homo sapiens
  misc_RNA (1)...(19): siRNA sense strand
gcacaaguguaaauucugu

SEQ ID NO: 186098 - RNA, 19 nt, Homo sapiens
  misc_RNA (1)...(19): siRNA sense strand
cacaaaggaucuuccauuu

SEQ ID NO: 186099 - RNA, 19 nt, Homo sapiens
  misc_RNA (1)...(19): siRNA sense strand
gaucagaacagcaguauuc

SEQ ID NO: 186100 - RNA, 19 nt, Homo sapiens
  misc_RNA (1)...(19): siRNA sense strand
gaucuuccauuuaggugua

SEQ ID NO: 186101 - RNA, 19 nt, Homo sapiens
  misc_RNA (1)...(19): siRNA sense strand
caaugacucucaacaagaa

SEQ ID NO: 186102 - RNA, 19 nt, Homo sapiens
  misc_RNA (1)...(19): siRNA sense strand
agaaauggauccuuguaaa

SEQ ID NO: 186103 - RNA, 19 nt, Homo sapiens
  misc_RNA (1)...(19): siRNA sense strand
gaaaagaaccagcacauaa

SEQ ID NO: 186104 - RNA, 19 nt, Homo sapiens
  misc_RNA (1)...(19): siRNA sense strand
caagaacuuuccucauauu

SEQ ID NO: 186105 - RNA, 19 nt, Homo sapiens
  misc_RNA (1)...(19): siRNA sense strand
aagcagaaaucauuacuga

SEQ ID NO: 186106 - RNA, 19 nt, Homo sapiens
  misc_RNA (1)...(19): siRNA sense strand
gcaaauugaugaggaugaa

SEQ ID NO: 186107 - RNA, 19 nt, Homo sapiens
  misc_RNA (1)...(19): siRNA sense strand
gggaaaagaugguuuauau

SEQ ID NO: 186108 - RNA, 19 nt, Homo sapiens
  misc_RNA (1)...(19): siRNA sense strand
ggaaauacaagaagcaguu

SEQ ID NO: 186109 - RNA, 19 nt, Homo sapiens
  misc_RNA (1)...(19): siRNA sense strand
ucacaggccuucagaacuu

SEQ ID NO: 186110 - RNA, 19 nt, Homo sapiens
  misc_RNA (1)...(19): siRNA sense strand
agcaagaacuuuccucaua

SEQ ID NO: 186111 - RNA, 19 nt, Homo sapiens
  misc_RNA (1)...(19): siRNA sense strand
ggauagcacuuguccugaa

SEQ ID NO: 186112 - RNA, 19 nt, Homo sapiens
  misc_RNA (1)...(19): siRNA sense strand
ccaaagaagugcagcaaca

SEQ ID NO: 186113 - RNA, 19 nt, Homo sapiens
  misc_RNA (1)...(19): siRNA sense strand
guaccaaacagcaauaauu

SEQ ID NO: 186114 - RNA, 19 nt, Homo sapiens
  misc_RNA (1)...(19): siRNA sense strand
gcagacccauuuguucuaa

SEQ ID NO: 186115 - RNA, 19 nt, Homo sapiens
  misc_RNA (1)...(19): siRNA sense strand
cuucagaacuuaagaaaca

SEQ ID NO: 186116 - RNA, 19 nt, Homo sapiens
  misc_RNA (1)...(19): siRNA sense strand
gugauuacacuaccaauaa

SEQ ID NO: 186117 - RNA, 19 nt, Homo sapiens
  misc_RNA (1)...(19): siRNA sense strand
gaacagggguuauugaauc

SEQ ID NO: 186118 - RNA, 19 nt, Homo sapiens
  misc_RNA (1)...(19): siRNA sense strand
ccagcaagauaaugacaaa

SEQ ID NO: 186119 - RNA, 19 nt, Homo sapiens
  misc_RNA (1)...(19): siRNA sense strand
uguugaagauguugucaua

SEQ ID NO: 186120 - RNA, 19 nt, Homo sapiens
  misc_RNA (1)...(19): siRNA sense strand
acauuugucuucugacuuu

SEQ ID NO: 186121 - RNA, 19 nt, Homo sapiens
  misc_RNA (1)...(19): siRNA sense strand
gguaauaauucugauggaa

SEQ ID NO: 186122 - RNA, 19 nt, Homo sapiens
  misc_RNA (1)...(19): siRNA sense strand
ggaugaugcuggcaaaaua

SEQ ID NO: 186123 - RNA, 19 nt, Homo sapiens
  misc_RNA (1)...(19): siRNA sense strand
cgaaagacuauccucauaa

SEQ ID NO: 186124 - RNA, 19 nt, Homo sapiens
  misc_RNA (1)...(19): siRNA sense strand
acgaaagacuauccucaua

SEQ ID NO: 186125 - RNA, 19 nt, Homo sapiens
  misc_RNA (1)...(19): siRNA sense strand
gauuugaaacgacauguaa

SEQ ID NO: 186126 - RNA, 19 nt, Homo sapiens
  misc_RNA (1)...(19): siRNA sense strand
uauuguggauucugacaua

SEQ ID NO: 186127 - RNA, 19 nt, Homo sapiens
  misc_RNA (1)...(19): siRNA sense strand
gaguauagcacuacagaug

SEQ ID NO: 186128 - RNA, 19 nt, Homo sapiens
  misc_RNA (1)...(19): siRNA sense strand
uaagauugcagacccauuu

SEQ ID NO: 186129 - RNA, 19 nt, Homo sapiens
  misc_RNA (1)...(19): siRNA sense strand
cagacuggcuaaacagaaa

SEQ ID NO: 186130 - RNA, 19 nt, Homo sapiens
  misc_RNA (1)...(19): siRNA sense strand
ugaugaggaugaaaugaaa

SEQ ID NO: 186131 - RNA, 19 nt, Homo sapiens
  misc_RNA (1)...(19): siRNA sense strand
cauugugacuuuaagauug

SEQ ID NO: 186132 - RNA, 19 nt, Homo sapiens
  misc_RNA (1)...(19): siRNA sense strand
cacguuauuuccauucaua

SEQ ID NO: 186133 - RNA, 19 nt, Homo sapiens
  misc_RNA (1)...(19): siRNA sense strand
acaaaggaucuuccauuua

SEQ ID NO: 186134 - RNA, 19 nt, Homo sapiens
  misc_RNA (1)...(19): siRNA sense strand
ucagauuguuguggaaaua

SEQ ID NO: 186135 - RNA, 19 nt, Homo sapiens
  misc_RNA (1)...(19): siRNA sense strand
ucagugcucagauaucuua

SEQ ID NO: 186136 - RNA, 19 nt, Homo sapiens
  misc_RNA (1)...(19): siRNA sense strand
uguaagagauguagaaagg

SEQ ID NO: 186137 - RNA, 19 nt, Homo sapiens
  misc_RNA (1)...(19): siRNA sense strand
cacaagagccaaacucauu

SEQ ID NO: 186138 - RNA, 19 nt, Homo sapiens
  misc_RNA (1)...(19): siRNA sense strand
gugcucagauaucuuagaa

SEQ ID NO: 186139 - RNA, 19 nt, Homo sapiens
  misc_RNA (1)...(19): siRNA sense strand
gugcuggacucagauguaa

SEQ ID NO: 186140 - RNA, 19 nt, Homo sapiens
  misc_RNA (1)...(19): siRNA sense strand
gagacaccauaaagaaguu

SEQ ID NO: 186141 - RNA, 19 nt, Homo sapiens
  misc_RNA (1)...(19): siRNA sense strand
ccauuuagguguaagagau

SEQ ID NO: 186142 - RNA, 19 nt, Homo sapiens
  misc_RNA (1)...(19): siRNA sense strand
gaaauggauccuuguaaag

SEQ ID NO: 186143 - RNA, 19 nt, Homo sapiens
  misc_RNA (1)...(19): siRNA sense strand
ugacauaacugugcauaac

SEQ ID NO: 186144 - RNA, 19 nt, Homo sapiens
  misc_RNA (1)...(19): siRNA sense strand
ggcagcagcuuaugguaau

SEQ ID NO: 186145 - RNA, 19 nt, Homo sapiens
  misc_RNA (1)...(19): siRNA sense strand
cgagugacauaguuucaga

SEQ ID NO: 186146 - RNA, 19 nt, Homo sapiens
  misc_RNA (1)...(19): siRNA sense strand
gacccagacucaguuguaa

SEQ ID NO: 186147 - RNA, 19 nt, Homo sapiens
  misc_RNA (1)...(19): siRNA sense strand
aauccaagauguuguugaa

SEQ ID NO: 186148 - RNA, 19 nt, Homo sapiens
  misc_RNA (1)...(19): siRNA sense strand
aauaggagcugaugcuaca

SEQ ID NO: 186149 - RNA, 19 nt, Homo sapiens
  misc_RNA (1)...(19): siRNA sense strand
gaaagggauuuaggcaaca

SEQ ID NO: 186150 - RNA, 19 nt, Homo sapiens
  misc_RNA (1)...(19): siRNA sense strand
gcgagaagccauaccaaug

SEQ ID NO: 186151 - RNA, 19 nt, Homo sapiens
  misc_RNA (1)...(19): siRNA sense strand
aagaagaaguaccacugua

SEQ ID NO: 186152 - RNA, 19 nt, Homo sapiens
  misc_RNA (1)...(19): siRNA sense strand
gaggacuaccuaaugauuu

SEQ ID NO: 186153 - RNA, 19 nt, Homo sapiens
  misc_RNA (1)...(19): siRNA sense strand
gaaauacaagaagcaguuu

SEQ ID NO: 186154 - RNA, 19 nt, Homo sapiens
  misc_RNA (1)...(19): siRNA sense strand
cuaauauuguggauucuga

SEQ ID NO: 186155 - RNA, 19 nt, Homo sapiens
  misc_RNA (1)...(19): siRNA sense strand
gcagagaaggccauugaau

SEQ ID NO: 186156 - RNA, 19 nt, Homo sapiens
  misc_RNA (1)...(19): siRNA sense strand
ggaggaugcugcuguugca

SEQ ID NO: 186157 - RNA, 19 nt, Homo sapiens
  misc_RNA (1)...(19): siRNA sense strand
ugugaggacuaccuaauga

SEQ ID NO: 186158 - RNA, 19 nt, Homo sapiens
  misc_RNA (1)...(19): siRNA sense strand
acacaaaggaucuuccauu

SEQ ID NO: 186159 - RNA, 19 nt, Homo sapiens
  misc_RNA (1)...(19): siRNA sense strand
uugaagauguugucauaga

SEQ ID NO: 186160 - RNA, 19 nt, Homo sapiens
  misc_RNA (1)...(19): siRNA sense strand
gggcagcagcuuaugguaa

SEQ ID NO: 186161 - RNA, 19 nt, Homo sapiens
  misc_RNA (1)...(19): siRNA sense strand
gcagcaaauugaugaggau

SEQ ID NO: 186162 - RNA, 19 nt, Homo sapiens
  misc_RNA (1)...(19): siRNA sense strand
uccaagauguuguugaaga

SEQ ID NO: 186163 - RNA, 19 nt, Homo sapiens
  misc_RNA (1)...(19): siRNA sense strand
guagacauugugacuuuaa

SEQ ID NO: 186164 - RNA, 19 nt, Homo sapiens
  misc_RNA (1)...(19): siRNA sense strand
gcagcagcuuaugguaaua

SEQ ID NO: 186165 - RNA, 19 nt, Homo sapiens
  misc_RNA (1)...(19): siRNA sense strand
ccaagauguuguugaagau

SEQ ID NO: 186166 - RNA, 19 nt, Homo sapiens
  misc_RNA (1)...(19): siRNA sense strand
gacauuacuucaaccucaa

SEQ ID NO: 186167 - RNA, 19 nt, Homo sapiens
  misc_RNA (1)...(19): siRNA sense strand
agacuauccucauaagugu

SEQ ID NO: 186168 - RNA, 19 nt, Homo sapiens
  misc_RNA (1)...(19): siRNA sense strand
aaagaagugcagcaacaua

SEQ ID NO: 186169 - RNA, 19 nt, Homo sapiens
  misc_RNA (1)...(19): siRNA sense strand
gcaguaccaaacagcaaua

SEQ ID NO: 186170 - RNA, 19 nt, Homo sapiens
  misc_RNA (1)...(19): siRNA sense strand
gcaugauaguguaguggaa

SEQ ID NO: 186171 - RNA, 19 nt, Homo sapiens
  misc_RNA (1)...(19): siRNA sense strand
uugcugaaauugcugauga

SEQ ID NO: 186172 - RNA, 19 nt, Homo sapiens
  misc_RNA (1)...(19): siRNA sense strand
gaaccagcacauaaugaga

SEQ ID NO: 186173 - RNA, 19 nt, Homo sapiens
  misc_RNA (1)...(19): siRNA sense strand
ggaaaguauaucaguguga

SEQ ID NO: 186174 - RNA, 19 nt, Homo sapiens
  misc_RNA (1)...(19): siRNA sense strand
gcagacucuucuaacuuga

SEQ ID NO: 186175 - RNA, 19 nt, Homo sapiens
  misc_RNA (1)...(19): siRNA sense strand
ugagaaagcacaugcgaau

SEQ ID NO: 186176 - RNA, 19 nt, Homo sapiens
  misc_RNA (1)...(19): siRNA sense strand
cauggauggugaucagauu

SEQ ID NO: 186177 - RNA, 19 nt, Homo sapiens
  misc_RNA (1)...(19): siRNA sense strand
cauaguuucagaagaagua

SEQ ID NO: 186178 - RNA, 19 nt, Homo sapiens
  misc_RNA (1)...(19): siRNA sense strand
ccauucaagugugacauuu

SEQ ID NO: 186179 - RNA, 19 nt, Homo sapiens
  misc_RNA (1)...(19): siRNA sense strand
gaaagcacaugcgaaucca

SEQ ID NO: 186180 - RNA, 19 nt, Homo sapiens
  misc_RNA (1)...(19): siRNA sense strand
ggagugugguaaagguuuc

SEQ ID NO: 186181 - RNA, 19 nt, Homo sapiens
  misc_RNA (1)...(19): siRNA sense strand
ggaauaggagcugaugcua

SEQ ID NO: 186182 - RNA, 19 nt, Homo sapiens
  misc_RNA (1)...(19): siRNA sense strand
uggagaagaugacuuaggu

SEQ ID NO: 186183 - RNA, 19 nt, Homo sapiens
  misc_RNA (1)...(19): siRNA sense strand
cagaaauggauccuuguaa

SEQ ID NO: 186184 - RNA, 19 nt, Homo sapiens
  misc_RNA (1)...(19): siRNA sense strand
gcacagcacagccucuuug

SEQ ID NO: 186185 - RNA, 19 nt, Homo sapiens
  misc_RNA (1)...(19): siRNA sense strand
cuucaaagccaaauacaaa

SEQ ID NO: 186186 - RNA, 19 nt, Homo sapiens
  misc_RNA (1)...(19): siRNA sense strand
ccaaauacaaacugguuaa

SEQ ID NO: 186187 - RNA, 19 nt, Homo sapiens
  misc_RNA (1)...(19): siRNA sense strand
gcgacaagcccuaucuuug

SEQ ID NO: 186188 - RNA, 19 nt, Homo sapiens
  misc_RNA (1)...(19): siRNA sense strand
agcaagagcucaucugcaa

SEQ ID NO: 186189 - RNA, 19 nt, Homo sapiens
  misc_RNA (1)...(19): siRNA sense strand
ccaguucgcugcgcaaaca

SEQ ID NO: 186190 - RNA, 19 nt, Homo sapiens
  misc_RNA (1)...(19): siRNA sense strand
acagugcgcucucuuccaa

SEQ ID NO: 186191 - RNA, 19 nt, Homo sapiens
  misc_RNA (1)...(19): siRNA sense strand
gacaagcccuaucuuugca

SEQ ID NO: 186192 - RNA, 19 nt, Homo sapiens
  misc_RNA (1)...(19): siRNA sense strand
gccaacccaucaagcaaga

SEQ ID NO: 186193 - RNA, 19 nt, Homo sapiens
  misc_RNA (1)...(19): siRNA sense strand
caagagcucaucugcaagu

SEQ ID NO: 186194 - RNA, 19 nt, Homo sapiens
  misc_RNA (1)...(19): siRNA sense strand
acaugaagguccacgaauc

SEQ ID NO: 186195 - RNA, 19 nt, Homo sapiens
  misc_RNA (1)...(19): siRNA sense strand
ggagcagaguaaucacauc

SEQ ID NO: 186196 - RNA, 19 nt, Homo sapiens
  misc_RNA (1)...(19): siRNA sense strand
cgacaagcccuaucuuugc

SEQ ID NO: 186197 - RNA, 19 nt, Homo sapiens
  misc_RNA (1)...(19): siRNA sense strand
gcuccgagaauuuaaagau

SEQ ID NO: 186198 - RNA, 19 nt, Homo sapiens
  misc_RNA (1)...(19): siRNA sense strand
gccaaauacaaacugguua

SEQ ID NO: 186199 - RNA, 19 nt, Homo sapiens
  misc_RNA (1)...(19): siRNA sense strand
guaaucacaucugcuucug

SEQ ID NO: 186200 - RNA, 19 nt, Homo sapiens
  misc_RNA (1)...(19): siRNA sense strand
gagcagaguaaucacaucu

SEQ ID NO: 186201 - RNA, 19 nt, Homo sapiens
  misc_RNA (1)...(19): siRNA sense strand
caacuccacgcgggacuuu

SEQ ID NO: 186202 - RNA, 19 nt, Homo sapiens
  misc_RNA (1)...(19): siRNA sense strand
gcccggagcagaguaauca

SEQ ID NO: 186203 - RNA, 19 nt, Homo sapiens
  misc_RNA (1)...(19): siRNA sense strand
gcagcgaccgcaagaagca

SEQ ID NO: 186204 - RNA, 19 nt, Homo sapiens
  misc_RNA (1)...(19): siRNA sense strand
agaguaaucacaucugcuu

SEQ ID NO: 186205 - RNA, 19 nt, Homo sapiens
  misc_RNA (1)...(19): siRNA sense strand
gcccuucaagugcgaguuu

SEQ ID NO: 186206 - RNA, 19 nt, Homo sapiens
  misc_RNA (1)...(19): siRNA sense strand
acagacaacccgaccacaa

SEQ ID NO: 186207 - RNA, 19 nt, Homo sapiens
  misc_RNA (1)...(19): siRNA sense strand
caaagccaaauacaaacug

SEQ ID NO: 186208 - RNA, 19 nt, Homo sapiens
  misc_RNA (1)...(19): siRNA sense strand
gaccacaagcuccuuaucg

SEQ ID NO: 186209 - RNA, 19 nt, Homo sapiens
  misc_RNA (1)...(19): siRNA sense strand
acacaugaagguccacgaa

SEQ ID NO: 186210 - RNA, 19 nt, Homo sapiens
  misc_RNA (1)...(19): siRNA sense strand
cagcagcgaccgcaagaag

SEQ ID NO: 186211 - RNA, 19 nt, Homo sapiens
  misc_RNA (1)...(19): siRNA sense strand
gaucggcgugaccaccuuu

SEQ ID NO: 186212 - RNA, 19 nt, Homo sapiens
  misc_RNA (1)...(19): siRNA sense strand
agugcgcucucuuccaauu

SEQ ID NO: 186213 - RNA, 19 nt, Homo sapiens
  misc_RNA (1)...(19): siRNA sense strand
gcgccaacccaucaagcaa

SEQ ID NO: 186214 - RNA, 19 nt, Homo sapiens
  misc_RNA (1)...(19): siRNA sense strand
gagcgacaagcccuaucuu

SEQ ID NO: 186215 - RNA, 19 nt, Homo sapiens
  misc_RNA (1)...(19): siRNA sense strand
gcaagaugugcgacaaguc

SEQ ID NO: 186216 - RNA, 19 nt, Homo sapiens
  misc_RNA (1)...(19): siRNA sense strand
cagacaacccgaccacaag

SEQ ID NO: 186217 - RNA, 19 nt, Homo sapiens
  misc_RNA (1)...(19): siRNA sense strand
guggucaacgggcagauga

SEQ ID NO: 186218 - RNA, 19 nt, Homo sapiens
  misc_RNA (1)...(19): siRNA sense strand
ggccagagcucggcuuuca

SEQ ID NO: 186219 - RNA, 19 nt, Homo sapiens
  misc_RNA (1)...(19): siRNA sense strand
caguaaagauaccacuaaa

SEQ ID NO: 186220 - RNA, 19 nt, Homo sapiens
  misc_RNA (1)...(19): siRNA sense strand
gaagguucaugaaucucaa

SEQ ID NO: 186221 - RNA, 19 nt, Homo sapiens
  misc_RNA (1)...(19): siRNA sense strand
gaagaucuuugcccguucu

SEQ ID NO: 186222 - RNA, 19 nt, Homo sapiens
  misc_RNA (1)...(19): siRNA sense strand
uaacgaaugguacgucuga

SEQ ID NO: 186223 - RNA, 19 nt, Homo sapiens
  misc_RNA (1)...(19): siRNA sense strand
gacagacgcuuugccaaca

SEQ ID NO: 186224 - RNA, 19 nt, Homo sapiens
  misc_RNA (1)...(19): siRNA sense strand
ggacuuccuccuaauuuua

SEQ ID NO: 186225 - RNA, 19 nt, Homo sapiens
  misc_RNA (1)...(19): siRNA sense strand
ugcaugagcuggugacaca

SEQ ID NO: 186226 - RNA, 19 nt, Homo sapiens
  misc_RNA (1)...(19): siRNA sense strand
acaguaaagauaccacuaa

SEQ ID NO: 186227 - RNA, 19 nt, Homo sapiens
  misc_RNA (1)...(19): siRNA sense strand
cccuauaucugcaaagugu

SEQ ID NO: 186228 - RNA, 19 nt, Homo sapiens
  misc_RNA (1)...(19): siRNA sense strand
uaaaaccccuucugcaguu

SEQ ID NO: 186229 - RNA, 19 nt, Homo sapiens
  misc_RNA (1)...(19): siRNA sense strand
ccacaacccuggacuuccu

SEQ ID NO: 186230 - RNA, 19 nt, Homo sapiens
  misc_RNA (1)...(19): siRNA sense strand
agcaggagcugucgugcaa

SEQ ID NO: 186231 - RNA, 19 nt, Homo sapiens
  misc_RNA (1)...(19): siRNA sense strand
gcagcgaccguaagaagca

SEQ ID NO: 186232 - RNA, 19 nt, Homo sapiens
  misc_RNA (1)...(19): siRNA sense strand
cagggcacguggacaacaa

SEQ ID NO: 186233 - RNA, 19 nt, Homo sapiens
  misc_RNA (1)...(19): siRNA sense strand
ucugcaaacaguaaagaua

SEQ ID NO: 186234 - RNA, 19 nt, Homo sapiens
  misc_RNA (1)...(19): siRNA sense strand
cgcuauagcuucugcaaac

SEQ ID NO: 186235 - RNA, 19 nt, Homo sapiens
  misc_RNA (1)...(19): siRNA sense strand
acccuggacuuccuccuaa

SEQ ID NO: 186236 - RNA, 19 nt, Homo sapiens
  misc_RNA (1)...(19): siRNA sense strand
gcuauagcuucugcaaaca

SEQ ID NO: 186237 - RNA, 19 nt, Homo sapiens
  misc_RNA (1)...(19): siRNA sense strand
caggagcugucgugcaagu

SEQ ID NO: 186238 - RNA, 19 nt, Homo sapiens
  misc_RNA (1)...(19): siRNA sense strand
uagcuucugcaaacaguaa

SEQ ID NO: 186239 - RNA, 19 nt, Homo sapiens
  misc_RNA (1)...(19): siRNA sense strand
gcaaagugugcgacaaguc

SEQ ID NO: 186240 - RNA, 19 nt, Homo sapiens
  misc_RNA (1)...(19): siRNA sense strand
caagcccuauaucugcaaa

SEQ ID NO: 186241 - RNA, 19 nt, Homo sapiens
  misc_RNA (1)...(19): siRNA sense strand
caacagcagcgaccguaag

SEQ ID NO: 186242 - RNA, 19 nt, Homo sapiens
  misc_RNA (1)...(19): siRNA sense strand
agaacaaccacgucugcua

SEQ ID NO: 186243 - RNA, 19 nt, Homo sapiens
  misc_RNA (1)...(19): siRNA sense strand
gaauuugaaggcugugaca

SEQ ID NO: 186244 - RNA, 19 nt, Homo sapiens
  misc_RNA (1)...(19): siRNA sense strand
gacccacacaggugagaaa

SEQ ID NO: 186245 - RNA, 19 nt, Homo sapiens
  misc_RNA (1)...(19): siRNA sense strand
gcgcaaacacaugaagguu

SEQ ID NO: 186246 - RNA, 19 nt, Homo sapiens
  misc_RNA (1)...(19): siRNA sense strand
cagcagcgaccguaagaag

SEQ ID NO: 186247 - RNA, 19 nt, Homo sapiens
  misc_RNA (1)...(19): siRNA sense strand
ggcgccuucuuccguuaua

SEQ ID NO: 186248 - RNA, 19 nt, Homo sapiens
  misc_RNA (1)...(19): siRNA sense strand
guaaagauaccacuaaaac

SEQ ID NO: 186249 - RNA, 19 nt, Homo sapiens
  misc_RNA (1)...(19): siRNA sense strand
ccucggacaagcccuauau

SEQ ID NO: 186250 - RNA, 19 nt, Homo sapiens
  misc_RNA (1)...(19): siRNA sense strand
ccaccaccaucaccaucau

SEQ ID NO: 186251 - RNA, 19 nt, Homo sapiens
  misc_RNA (1)...(19): siRNA sense strand
uauaugcggcagccuauca

SEQ ID NO: 186252 - RNA, 19 nt, Homo sapiens
  misc_RNA (1)...(19): siRNA sense strand
uauagcuucugcaaacagu

SEQ ID NO: 186253 - RNA, 19 nt, Homo sapiens
  misc_RNA (1)...(19): siRNA sense strand
cgagcucccugcgcaaaca

SEQ ID NO: 186254 - RNA, 19 nt, Homo sapiens
  misc_RNA (1)...(19): siRNA sense strand
ggagggcaagucuuucaag

SEQ ID NO: 186255 - RNA, 19 nt, Homo sapiens
  misc_RNA (1)...(19): siRNA sense strand
ggcgcacgaucuaucuuca

SEQ ID NO: 186256 - RNA, 19 nt, Homo sapiens
  misc_RNA (1)...(19): siRNA sense strand
gaaccucaagauccacaag

SEQ ID NO: 186257 - RNA, 19 nt, Homo sapiens
  misc_RNA (1)...(19): siRNA sense strand
cggacaagcccuauaucug

SEQ ID NO: 186258 - RNA, 19 nt, Homo sapiens
  misc_RNA (1)...(19): siRNA sense strand
gcccggagcagaacaacca

SEQ ID NO: 186259 - RNA, 19 nt, Homo sapiens
  misc_RNA (1)...(19): siRNA sense strand
ccaacagcagcgaccguaa

SEQ ID NO: 186260 - RNA, 19 nt, Homo sapiens
  misc_RNA (1)...(19): siRNA sense strand
guuauaugcggcagccuau

SEQ ID NO: 186261 - RNA, 19 nt, Homo sapiens
  misc_RNA (1)...(19): siRNA sense strand
ccuagcuacuugcuguuuc

SEQ ID NO: 186262 - RNA, 19 nt, Homo sapiens
  misc_RNA (1)...(19): siRNA sense strand
ucaaggcgaaguacaaacu

SEQ ID NO: 186263 - RNA, 19 nt, Homo sapiens
  misc_RNA (1)...(19): siRNA sense strand
ggagaaaccuuaugaaugu

SEQ ID NO: 186264 - RNA, 19 nt, Homo sapiens
  misc_RNA (1)...(19): siRNA sense strand
ggaaaugccuucuauguga

SEQ ID NO: 186265 - RNA, 19 nt, Homo sapiens
  misc_RNA (1)...(19): siRNA sense strand
gaagaaagccucucacuga

SEQ ID NO: 186266 - RNA, 19 nt, Homo sapiens
  misc_RNA (1)...(19): siRNA sense strand
gcaaagaaaucccuaaauc

SEQ ID NO: 186267 - RNA, 19 nt, Homo sapiens
  misc_RNA (1)...(19): siRNA sense strand
gaagaugacucucaauaau

SEQ ID NO: 186268 - RNA, 19 nt, Homo sapiens
  misc_RNA (1)...(19): siRNA sense strand
gagaagagcuguggauauu

SEQ ID NO: 186269 - RNA, 19 nt, Homo sapiens
  misc_RNA (1)...(19): siRNA sense strand
ggagaaacccuaugaaugu

SEQ ID NO: 186270 - RNA, 19 nt, Homo sapiens
  misc_RNA (1)...(19): siRNA sense strand
gaagagcuguggauauuag

SEQ ID NO: 186271 - RNA, 19 nt, Homo sapiens
  misc_RNA (1)...(19): siRNA sense strand
agagaaaccuuaugaaugu

SEQ ID NO: 186272 - RNA, 19 nt, Homo sapiens
  misc_RNA (1)...(19): siRNA sense strand
gagauucccugcccugauu

SEQ ID NO: 186273 - RNA, 19 nt, Homo sapiens
  misc_RNA (1)...(19): siRNA sense strand
gaagaaaucccuuugucaa

SEQ ID NO: 186274 - RNA, 19 nt, Homo sapiens
  misc_RNA (1)...(19): siRNA sense strand
gaaugaagaugacucucaa

SEQ ID NO: 186275 - RNA, 19 nt, Homo sapiens
  misc_RNA (1)...(19): siRNA sense strand
gaaaguacgccucauugaa

SEQ ID NO: 186276 - RNA, 19 nt, Homo sapiens
  misc_RNA (1)...(19): siRNA sense strand
agagaaaccuuacgaaugu

SEQ ID NO: 186277 - RNA, 19 nt, Homo sapiens
  misc_RNA (1)...(19): siRNA sense strand
gagaaacccuaugaaugua

SEQ ID NO: 186278 - RNA, 19 nt, Homo sapiens
  misc_RNA (1)...(19): siRNA sense strand
gggaaaaucuucaguauga

SEQ ID NO: 186279 - RNA, 19 nt, Homo sapiens
  misc_RNA (1)...(19): siRNA sense strand
gaaaugccuucuaugugaa

SEQ ID NO: 186280 - RNA, 19 nt, Homo sapiens
  misc_RNA (1)...(19): siRNA sense strand
gagaaacccuacgaaugua

SEQ ID NO: 186281 - RNA, 19 nt, Homo sapiens
  misc_RNA (1)...(19): siRNA sense strand
gagagaaaccuuaugaaug

SEQ ID NO: 186282 - RNA, 19 nt, Homo sapiens
  misc_RNA (1)...(19): siRNA sense strand
gagaggcccuuugaaugua

SEQ ID NO: 186283 - RNA, 19 nt, Homo sapiens
  misc_RNA (1)...(19): siRNA sense strand
ggagagagacccuaugaau

SEQ ID NO: 186284 - RNA, 19 nt, Homo sapiens
  misc_RNA (1)...(19): siRNA sense strand
ggagagagacccuaugaau

SEQ ID NO: 186285 - RNA, 19 nt, Homo sapiens
  misc_RNA (1)...(19): siRNA sense strand
gagagaaaccuuacgaaug

SEQ ID NO: 186286 - RNA, 19 nt, Homo sapiens
  misc_RNA (1)...(19): siRNA sense strand
gguaaugcuuucuauguga

SEQ ID NO: 186287 - RNA, 19 nt, Homo sapiens
  misc_RNA (1)...(19): siRNA sense strand
caacaccacagaacucaua

SEQ ID NO: 186288 - RNA, 19 nt, Homo sapiens
  misc_RNA (1)...(19): siRNA sense strand
gaaaagcccuaucagugua

SEQ ID NO: 186289 - RNA, 19 nt, Homo sapiens
  misc_RNA (1)...(19): siRNA sense strand
ccucauugcucaucagaaa

SEQ ID NO: 186290 - RNA, 19 nt, Homo sapiens
  misc_RNA (1)...(19): siRNA sense strand
ggagagaaaccuuaugaau

SEQ ID NO: 186291 - RNA, 19 nt, Homo sapiens
  misc_RNA (1)...(19): siRNA sense strand
aaacuuccgugcaaagaaa

SEQ ID NO: 186292 - RNA, 19 nt, Homo sapiens
  misc_RNA (1)...(19): siRNA sense strand
ggagaggcccuuugaaugu

SEQ ID NO: 186293 - RNA, 19 nt, Homo sapiens
  misc_RNA (1)...(19): siRNA sense strand
gaacaucagcgaauucaca

SEQ ID NO: 186294 - RNA, 19 nt, Homo sapiens
  misc_RNA (1)...(19): siRNA sense strand
gagagaaacccuacgaaug

SEQ ID NO: 186295 - RNA, 19 nt, Homo sapiens
  misc_RNA (1)...(19): siRNA sense strand
gaaagcacgccuaauugaa

SEQ ID NO: 186296 - RNA, 19 nt, Homo sapiens
  misc_RNA (1)...(19): siRNA sense strand
ucacaacucauccuacaua

SEQ ID NO: 186297 - RNA, 19 nt, Homo sapiens
  misc_RNA (1)...(19): siRNA sense strand
caacucauccuacauacaa

SEQ ID NO: 186298 - RNA, 19 nt, Homo sapiens
  misc_RNA (1)...(19): siRNA sense strand
gagagacccuaugaaugua

SEQ ID NO: 186299 - RNA, 19 nt, Homo sapiens
  misc_RNA (1)...(19): siRNA sense strand
gaaagcacaccucacagaa

SEQ ID NO: 186300 - RNA, 19 nt, Homo sapiens
  misc_RNA (1)...(19): siRNA sense strand
gaaggcaacccucacgauu

SEQ ID NO: 186301 - RNA, 19 nt, Homo sapiens
  misc_RNA (1)...(19): siRNA sense strand
ggaaagcacaccucacaga

SEQ ID NO: 186302 - RNA, 19 nt, Homo sapiens
  misc_RNA (1)...(19): siRNA sense strand
caaagaaaucccuaaauca

SEQ ID NO: 186303 - RNA, 19 nt, Homo sapiens
  misc_RNA (1)...(19): siRNA sense strand
gcaagaucauaccucauug

SEQ ID NO: 186304 - RNA, 19 nt, Homo sapiens
  misc_RNA (1)...(19): siRNA sense strand
gggagaaaccuuaugaaug

SEQ ID NO: 186305 - RNA, 19 nt, Homo sapiens
  misc_RNA (1)...(19): siRNA sense strand
ggagagagacccuuugagu

SEQ ID NO: 186306 - RNA, 19 nt, Homo sapiens
  misc_RNA (1)...(19): siRNA sense strand
gaacaucugagaauacaca

SEQ ID NO: 186307 - RNA, 19 nt, Homo sapiens
  misc_RNA (1)...(19): siRNA sense strand
ucagaagauucaaacauug

SEQ ID NO: 186308 - RNA, 19 nt, Homo sapiens
  misc_RNA (1)...(19): siRNA sense strand
ugaagaugacucucaauaa

SEQ ID NO: 186309 - RNA, 19 nt, Homo sapiens
  misc_RNA (1)...(19): siRNA sense strand
ggagaagagcuguggauau

SEQ ID NO: 186310 - RNA, 19 nt, Homo sapiens
  misc_RNA (1)...(19): siRNA sense strand
gagaaaccuuaugaaugua

SEQ ID NO: 186311 - RNA, 19 nt, Homo sapiens
  misc_RNA (1)...(19): siRNA sense strand
ggauguggcuguggauuuc

SEQ ID NO: 186312 - RNA, 19 nt, Homo sapiens
  misc_RNA (1)...(19): siRNA sense strand
ggagagaaaccuuacgaau

SEQ ID NO: 186313 - RNA, 19 nt, Homo sapiens
  misc_RNA (1)...(19): siRNA sense strand
gggagaaacccuaugaaug

SEQ ID NO: 186314 - RNA, 19 nt, Homo sapiens
  misc_RNA (1)...(19): siRNA sense strand
guaaugcuuucuaugugaa

SEQ ID NO: 186315 - RNA, 19 nt, Homo sapiens
  misc_RNA (1)...(19): siRNA sense strand
gaacaucagagaacucaca

SEQ ID NO: 186316 - RNA, 19 nt, Homo sapiens
  misc_RNA (1)...(19): siRNA sense strand
gagagagacccuaugaaug

SEQ ID NO: 186317 - RNA, 19 nt, Homo sapiens
  misc_RNA (1)...(19): siRNA sense strand
gagagagacccuaugaaug

SEQ ID NO: 186318 - RNA, 19 nt, Homo sapiens
  misc_RNA (1)...(19): siRNA sense strand
uauaauggaugcaggaaag

SEQ ID NO: 186319 - RNA, 19 nt, Homo sapiens
  misc_RNA (1)...(19): siRNA sense strand
ggagagaaacccuacgaau

SEQ ID NO: 186320 - RNA, 19 nt, Homo sapiens
  misc_RNA (1)...(19): siRNA sense strand
gagaaaccuuacgaaugua

SEQ ID NO: 186321 - RNA, 19 nt, Homo sapiens
  misc_RNA (1)...(19): siRNA sense strand
gaaagccuuccaugagaaa

SEQ ID NO: 186322 - RNA, 19 nt, Homo sapiens
  misc_RNA (1)...(19): siRNA sense strand
agagaaacccuacgaaugu

SEQ ID NO: 186323 - RNA, 19 nt, Homo sapiens
  misc_RNA (1)...(19): siRNA sense strand
ugaaagcacgccuaauuga

SEQ ID NO: 186324 - RNA, 19 nt, Homo sapiens
  misc_RNA (1)...(19): siRNA sense strand
ugagaaacccuaugagugu

SEQ ID NO: 186325 - RNA, 19 nt, Homo sapiens
  misc_RNA (1)...(19): siRNA sense strand
agagagacccuaugaaugu

SEQ ID NO: 186326 - RNA, 19 nt, Homo sapiens
  misc_RNA (1)...(19): siRNA sense strand
gaagucacaacucauccua

SEQ ID NO: 186327 - RNA, 19 nt, Homo sapiens
  misc_RNA (1)...(19): siRNA sense strand
agaugacucucaauaauca

SEQ ID NO: 186328 - RNA, 19 nt, Homo sapiens
  misc_RNA (1)...(19): siRNA sense strand
ggcaggaagucacaacuca

SEQ ID NO: 186329 - RNA, 19 nt, Homo sapiens
  misc_RNA (1)...(19): siRNA sense strand
gggagaggcccuuugaaug

SEQ ID NO: 186330 - RNA, 19 nt, Homo sapiens
  misc_RNA (1)...(19): siRNA sense strand
ugugaaagcacgccuaauu

SEQ ID NO: 186331 - RNA, 19 nt, Homo sapiens
  misc_RNA (1)...(19): siRNA sense strand
gaaacccuaugaauguagu

SEQ ID NO: 186332 - RNA, 19 nt, Homo sapiens
  misc_RNA (1)...(19): siRNA sense strand
agaaaucccuuugucaaca

SEQ ID NO: 186333 - RNA, 19 nt, Homo sapiens
  misc_RNA (1)...(19): siRNA sense strand
caucagagaacucacauag

SEQ ID NO: 186334 - RNA, 19 nt, Homo sapiens
  misc_RNA (1)...(19): siRNA sense strand
ggacaucaccccagagauu

SEQ ID NO: 186335 - RNA, 19 nt, Homo sapiens
  misc_RNA (1)...(19): siRNA sense strand
aagcacaccucacagaaca

SEQ ID NO: 186336 - RNA, 19 nt, Homo sapiens
  misc_RNA (1)...(19): siRNA sense strand
caggagagaaaccuuauga

SEQ ID NO: 186337 - RNA, 19 nt, Homo sapiens
  misc_RNA (1)...(19): siRNA sense strand
acacaggagagaaaccuua

SEQ ID NO: 186338 - RNA, 19 nt, Homo sapiens
  misc_RNA (1)...(19): siRNA sense strand
gugaaagcacgccuaauug

SEQ ID NO: 186339 - RNA, 19 nt, Homo sapiens
  misc_RNA (1)...(19): siRNA sense strand
acacaggagagaaaccuua

SEQ ID NO: 186340 - RNA, 19 nt, Homo sapiens
  misc_RNA (1)...(19): siRNA sense strand
gggaaagcuuacuguagga

SEQ ID NO: 186341 - RNA, 19 nt, Homo sapiens
  misc_RNA (1)...(19): siRNA sense strand
gaauguaaugaguguggua

SEQ ID NO: 186342 - RNA, 19 nt, Homo sapiens
  misc_RNA (1)...(19): siRNA sense strand
agagagacccuuugagugu

SEQ ID NO: 186343 - RNA, 19 nt, Homo sapiens
  misc_RNA (1)...(19): siRNA sense strand
gaauguagugaauguggaa

SEQ ID NO: 186344 - RNA, 19 nt, Homo sapiens
  misc_RNA (1)...(19): siRNA sense strand
gaacacccagaggagauaa

SEQ ID NO: 186345 - RNA, 19 nt, Homo sapiens
  misc_RNA (1)...(19): siRNA sense strand
cgaaugaagaugacucuca

SEQ ID NO: 186346 - RNA, 19 nt, Homo sapiens
  misc_RNA (1)...(19): siRNA sense strand
cuaaaucagcaucaaagaa

SEQ ID NO: 186347 - RNA, 19 nt, Homo sapiens
  misc_RNA (1)...(19): siRNA sense strand
gcaugauaaugaccuucuu

SEQ ID NO: 186348 - RNA, 19 nt, Homo sapiens
  misc_RNA (1)...(19): siRNA sense strand
ugaaaguacgccucauuga

SEQ ID NO: 186349 - RNA, 19 nt, Homo sapiens
  misc_RNA (1)...(19): siRNA sense strand
guggaaaugccuucuaugu

SEQ ID NO: 186350 - RNA, 19 nt, Homo sapiens
  misc_RNA (1)...(19): siRNA sense strand
gaaaccuuaugaauguagu

SEQ ID NO: 186351 - RNA, 19 nt, Homo sapiens
  misc_RNA (1)...(19): siRNA sense strand
gaaaucccuuugucaacac

SEQ ID NO: 186352 - RNA, 19 nt, Homo sapiens
  misc_RNA (1)...(19): siRNA sense strand
agauaucccuuacccaaca

SEQ ID NO: 186353 - RNA, 19 nt, Homo sapiens
  misc_RNA (1)...(19): siRNA sense strand
cuaugaauguagugaaugu

SEQ ID NO: 186354 - RNA, 19 nt, Homo sapiens
  misc_RNA (1)...(19): siRNA sense strand
aggcaacccucacgauuca

SEQ ID NO: 186355 - RNA, 19 nt, Homo sapiens
  misc_RNA (1)...(19): siRNA sense strand
cuaugaauguacugaaugu

SEQ ID NO: 186356 - RNA, 19 nt, Homo sapiens
  misc_RNA (1)...(19): siRNA sense strand
caggagagagacccuauga

SEQ ID NO: 186357 - RNA, 19 nt, Homo sapiens
  misc_RNA (1)...(19): siRNA sense strand
uaaugaaugugggaaaucu

SEQ ID NO: 186358 - RNA, 19 nt, Homo sapiens
  misc_RNA (1)...(19): siRNA sense strand
gugaaaguacgccucauug

SEQ ID NO: 186359 - RNA, 19 nt, Homo sapiens
  misc_RNA (1)...(19): siRNA sense strand
uaaugaaugugggaaaucu

SEQ ID NO: 186360 - RNA, 19 nt, Homo sapiens
  misc_RNA (1)...(19): siRNA sense strand
aaagaaaucccuaaaucag

SEQ ID NO: 186361 - RNA, 19 nt, Homo sapiens
  misc_RNA (1)...(19): siRNA sense strand
uguaaugagugugguaaug

SEQ ID NO: 186362 - RNA, 19 nt, Homo sapiens
  misc_RNA (1)...(19): siRNA sense strand
gaacucacacaggagagaa

SEQ ID NO: 186363 - RNA, 19 nt, Homo sapiens
  misc_RNA (1)...(19): siRNA sense strand
gcagagagcucagaucuua

SEQ ID NO: 186364 - RNA, 19 nt, Homo sapiens
  misc_RNA (1)...(19): siRNA sense strand
ggagagagaugcuaugaau

SEQ ID NO: 186365 - RNA, 19 nt, Homo sapiens
  misc_RNA (1)...(19): siRNA sense strand
gaagugaacuccuuaagca

SEQ ID NO: 186366 - RNA, 19 nt, Homo sapiens
  misc_RNA (1)...(19): siRNA sense strand
agucagaggugaaauaaua

SEQ ID NO: 186367 - RNA, 19 nt, Homo sapiens
  misc_RNA (1)...(19): siRNA sense strand
agucagagcucaaaccuua

SEQ ID NO: 186368 - RNA, 19 nt, Homo sapiens
  misc_RNA (1)...(19): siRNA sense strand
gaccagagcuucaaaugga

SEQ ID NO: 186369 - RNA, 19 nt, Homo sapiens
  misc_RNA (1)...(19): siRNA sense strand
gauagaagaggaagaauuu

SEQ ID NO: 186370 - RNA, 19 nt, Homo sapiens
  misc_RNA (1)...(19): siRNA sense strand
gaacucaaaugaauucaca

SEQ ID NO: 186371 - RNA, 19 nt, Homo sapiens
  misc_RNA (1)...(19): siRNA sense strand
gcucagaucuuacuagaca

SEQ ID NO: 186372 - RNA, 19 nt, Homo sapiens
  misc_RNA (1)...(19): siRNA sense strand
ccagaaaucuuguaaacau

SEQ ID NO: 186373 - RNA, 19 nt, Homo sapiens
  misc_RNA (1)...(19): siRNA sense strand
aaccugaacucacaucuua

SEQ ID NO: 186374 - RNA, 19 nt, Homo sapiens
  misc_RNA (1)...(19): siRNA sense strand
ggaagaaucucaggauaca

SEQ ID NO: 186375 - RNA, 19 nt, Homo sapiens
  misc_RNA (1)...(19): siRNA sense strand
gaacauggacaagaaauau

SEQ ID NO: 186376 - RNA, 19 nt, Homo sapiens
  misc_RNA (1)...(19): siRNA sense strand
gaagauagaagaggaagaa

SEQ ID NO: 186377 - RNA, 19 nt, Homo sapiens
  misc_RNA (1)...(19): siRNA sense strand
gacaagaaauauuccagaa

SEQ ID NO: 186378 - RNA, 19 nt, Homo sapiens
  misc_RNA (1)...(19): siRNA sense strand
gagcucagaucuuacuaga

SEQ ID NO: 186379 - RNA, 19 nt, Homo sapiens
  misc_RNA (1)...(19): siRNA sense strand
guaaagagacaaugggaaa

SEQ ID NO: 186380 - RNA, 19 nt, Homo sapiens
  misc_RNA (1)...(19): siRNA sense strand
gcucaaaccuuagucaaca

SEQ ID NO: 186381 - RNA, 19 nt, Homo sapiens
  misc_RNA (1)...(19): siRNA sense strand
gagaggcacugaugaagca

SEQ ID NO: 186382 - RNA, 19 nt, Homo sapiens
  misc_RNA (1)...(19): siRNA sense strand
gggaaaaccuauuaaugua

SEQ ID NO: 186383 - RNA, 19 nt, Homo sapiens
  misc_RNA (1)...(19): siRNA sense strand
gagagaugcuaugaaugua

SEQ ID NO: 186384 - RNA, 19 nt, Homo sapiens
  misc_RNA (1)...(19): siRNA sense strand
gaccagcacuuaaugucaa

SEQ ID NO: 186385 - RNA, 19 nt, Homo sapiens
  misc_RNA (1)...(19): siRNA sense strand
gagaaacccuacgagugua

SEQ ID NO: 186386 - RNA, 19 nt, Homo sapiens
  misc_RNA (1)...(19): siRNA sense strand
gagaugcuaugaauguaau

SEQ ID NO: 186387 - RNA, 19 nt, Homo sapiens
  misc_RNA (1)...(19): siRNA sense strand
ggagagaggcacugaugaa

SEQ ID NO: 186388 - RNA, 19 nt, Homo sapiens
  misc_RNA (1)...(19): siRNA sense strand
gcaggacacuugcuuacag

SEQ ID NO: 186389 - RNA, 19 nt, Homo sapiens
  misc_RNA (1)...(19): siRNA sense strand
caucuuauucgacacuuua

SEQ ID NO: 186390 - RNA, 19 nt, Homo sapiens
  misc_RNA (1)...(19): siRNA sense strand
gacacuugcuuacagagaa

SEQ ID NO: 186391 - RNA, 19 nt, Homo sapiens
  misc_RNA (1)...(19): siRNA sense strand
guaaacaugguaccuguga

SEQ ID NO: 186392 - RNA, 19 nt, Homo sapiens
  misc_RNA (1)...(19): siRNA sense strand
ggacugugauaaugagagu

SEQ ID NO: 186393 - RNA, 19 nt, Homo sapiens
  misc_RNA (1)...(19): siRNA sense strand
gagcucacaucuuauucga

SEQ ID NO: 186394 - RNA, 19 nt, Homo sapiens
  misc_RNA (1)...(19): siRNA sense strand
ugaccauacuagaagauuu

SEQ ID NO: 186395 - RNA, 19 nt, Homo sapiens
  misc_RNA (1)...(19): siRNA sense strand
ucacacaccagaaaucuug

SEQ ID NO: 186396 - RNA, 19 nt, Homo sapiens
  misc_RNA (1)...(19): siRNA sense strand
aagaaucucaggauacaua

SEQ ID NO: 186397 - RNA, 19 nt, Homo sapiens
  misc_RNA (1)...(19): siRNA sense strand
acagagaagugaacuccuu

SEQ ID NO: 186398 - RNA, 19 nt, Homo sapiens
  misc_RNA (1)...(19): siRNA sense strand
caccagaaaucuuguaaac

SEQ ID NO: 186399 - RNA, 19 nt, Homo sapiens
  misc_RNA (1)...(19): siRNA sense strand
ggaugaagguuuugguaaa

SEQ ID NO: 186400 - RNA, 19 nt, Homo sapiens
  misc_RNA (1)...(19): siRNA sense strand
gggaaaagcuuugcagaga

SEQ ID NO: 186401 - RNA, 19 nt, Homo sapiens
  misc_RNA (1)...(19): siRNA sense strand
ugccaaagcuggaaauuuu

SEQ ID NO: 186402 - RNA, 19 nt, Homo sapiens
  misc_RNA (1)...(19): siRNA sense strand
gcagugaccauacuagaag

SEQ ID NO: 186403 - RNA, 19 nt, Homo sapiens
  misc_RNA (1)...(19): siRNA sense strand
caccagagaauucacauga

SEQ ID NO: 186404 - RNA, 19 nt, Homo sapiens
  misc_RNA (1)...(19): siRNA sense strand
ugaauucacacaccagaaa

SEQ ID NO: 186405 - RNA, 19 nt, Homo sapiens
  misc_RNA (1)...(19): siRNA sense strand
uaucaggcaucagagaauu

SEQ ID NO: 186406 - RNA, 19 nt, Homo sapiens
  misc_RNA (1)...(19): siRNA sense strand
gaccauacuagaagauuug

SEQ ID NO: 186407 - RNA, 19 nt, Homo sapiens
  misc_RNA (1)...(19): siRNA sense strand
gaugugagaggagauuaaa

SEQ ID NO: 186408 - RNA, 19 nt, Homo sapiens
  misc_RNA (1)...(19): siRNA sense strand
caucuuaucaggcaucaga

SEQ ID NO: 186409 - RNA, 19 nt, Homo sapiens
  misc_RNA (1)...(19): siRNA sense strand
agagagaugcuaugaaugu

SEQ ID NO: 186410 - RNA, 19 nt, Homo sapiens
  misc_RNA (1)...(19): siRNA sense strand
gcccaaaacuugcuaaaca

SEQ ID NO: 186411 - RNA, 19 nt, Homo sapiens
  misc_RNA (1)...(19): siRNA sense strand
agaagcaucuggugagucu

SEQ ID NO: 186412 - RNA, 19 nt, Homo sapiens
  misc_RNA (1)...(19): siRNA sense strand
agagaaacccuacgagugu

SEQ ID NO: 186413 - RNA, 19 nt, Homo sapiens
  misc_RNA (1)...(19): siRNA sense strand
cagaaaucuuguaaacaug

SEQ ID NO: 186414 - RNA, 19 nt, Homo sapiens
  misc_RNA (1)...(19): siRNA sense strand
ggaccagcacuuaauguca

SEQ ID NO: 186415 - RNA, 19 nt, Homo sapiens
  misc_RNA (1)...(19): siRNA sense strand
ggaugugagaggagauuaa

SEQ ID NO: 186416 - RNA, 19 nt, Homo sapiens
  misc_RNA (1)...(19): siRNA sense strand
cuggaagaaucucaggaua

SEQ ID NO: 186417 - RNA, 19 nt, Homo sapiens
  misc_RNA (1)...(19): siRNA sense strand
guagauccaugccaaagcu

SEQ ID NO: 186418 - RNA, 19 nt, Homo sapiens
  misc_RNA (1)...(19): siRNA sense strand
ugaacauggacaagaaaua

SEQ ID NO: 186419 - RNA, 19 nt, Homo sapiens
  misc_RNA (1)...(19): siRNA sense strand
cagagaagugaacuccuua

SEQ ID NO: 186420 - RNA, 19 nt, Homo sapiens
  misc_RNA (1)...(19): siRNA sense strand
gaaaucuuguaaacauggu

SEQ ID NO: 186421 - RNA, 19 nt, Homo sapiens
  misc_RNA (1)...(19): siRNA sense strand
ggacacuugcuuacagaga

SEQ ID NO: 186422 - RNA, 19 nt, Homo sapiens
  misc_RNA (1)...(19): siRNA sense strand
caggacacuugcuuacaga

SEQ ID NO: 186423 - RNA, 19 nt, Homo sapiens
  misc_RNA (1)...(19): siRNA sense strand
agagauccauaccaaggaa

SEQ ID NO: 186424 - RNA, 19 nt, Homo sapiens
  misc_RNA (1)...(19): siRNA sense strand
acuagaagauuuggagaga

SEQ ID NO: 186425 - RNA, 19 nt, Homo sapiens
  misc_RNA (1)...(19): siRNA sense strand
agccagagauccauaccaa

SEQ ID NO: 186426 - RNA, 19 nt, Homo sapiens
  misc_RNA (1)...(19): siRNA sense strand
gcuaugaauguaaugaaug

SEQ ID NO: 186427 - RNA, 19 nt, Homo sapiens
  misc_RNA (1)...(19): siRNA sense strand
guaaaauccucacccacaa

SEQ ID NO: 186428 - RNA, 19 nt, Homo sapiens
  misc_RNA (1)...(19): siRNA sense strand
gaauucacacaccagaaau

SEQ ID NO: 186429 - RNA, 19 nt, Homo sapiens
  misc_RNA (1)...(19): siRNA sense strand
ggaggcagugaccauacua

SEQ ID NO: 186430 - RNA, 19 nt, Homo sapiens
  misc_RNA (1)...(19): siRNA sense strand
agaauucacaugagggaaa

SEQ ID NO: 186431 - RNA, 19 nt, Homo sapiens
  misc_RNA (1)...(19): siRNA sense strand
agacaucggcgaauucaca

SEQ ID NO: 186432 - RNA, 19 nt, Homo sapiens
  misc_RNA (1)...(19): siRNA sense strand
cuaugggacugugauaaug

SEQ ID NO: 186433 - RNA, 19 nt, Homo sapiens
  misc_RNA (1)...(19): siRNA sense strand
ggcagugaccauacuagaa

SEQ ID NO: 186434 - RNA, 19 nt, Homo sapiens
  misc_RNA (1)...(19): siRNA sense strand
gagcucaaaccuuagucaa

SEQ ID NO: 186435 - RNA, 19 nt, Homo sapiens
  misc_RNA (1)...(19): siRNA sense strand
gaauucacaccagagagaa

SEQ ID NO: 186436 - RNA, 19 nt, Homo sapiens
  misc_RNA (1)...(19): siRNA sense strand
aauaauaagccacgaugga

SEQ ID NO: 186437 - RNA, 19 nt, Homo sapiens
  misc_RNA (1)...(19): siRNA sense strand
aagcaguacuccagguuca

SEQ ID NO: 186438 - RNA, 19 nt, Homo sapiens
  misc_RNA (1)...(19): siRNA sense strand
caugaacauuacccagaga

SEQ ID NO: 186439 - RNA, 19 nt, Homo sapiens
  misc_RNA (1)...(19): siRNA sense strand
cuacagaaccaaagaaagc

SEQ ID NO: 186440 - RNA, 19 nt, Homo sapiens
  misc_RNA (1)...(19): siRNA sense strand
agauagaagaggaagaauu

SEQ ID NO: 186441 - RNA, 19 nt, Homo sapiens
  misc_RNA (1)...(19): siRNA sense strand
gaauucacaugagggaaaa

SEQ ID NO: 186442 - RNA, 19 nt, Homo sapiens
  misc_RNA (1)...(19): siRNA sense strand
agaauucacaccagagaga

SEQ ID NO: 186443 - RNA, 19 nt, Homo sapiens
  misc_RNA (1)...(19): siRNA sense strand
caaccugaacucacaucuu

SEQ ID NO: 186444 - RNA, 19 nt, Homo sapiens
  misc_RNA (1)...(19): siRNA sense strand
cgggagcucugcugucagu

SEQ ID NO: 186445 - RNA, 19 nt, Homo sapiens
  misc_RNA (1)...(19): siRNA sense strand
aggcacagcucaaaacuug

SEQ ID NO: 186446 - RNA, 19 nt, Homo sapiens
  misc_RNA (1)...(19): siRNA sense strand
agauaaaacucaucagugu

SEQ ID NO: 186447 - RNA, 19 nt, Homo sapiens
  misc_RNA (1)...(19): siRNA sense strand
gagaagugaacuccuuaag

SEQ ID NO: 186448 - RNA, 19 nt, Homo sapiens
  misc_RNA (1)...(19): siRNA sense strand
uacagucagaggugaaaua

SEQ ID NO: 186449 - RNA, 19 nt, Homo sapiens
  misc_RNA (1)...(19): siRNA sense strand
auacauaucagaagcaucu

SEQ ID NO: 186450 - RNA, 19 nt, Homo sapiens
  misc_RNA (1)...(19): siRNA sense strand
gagaauuauaucuggaaga

SEQ ID NO: 186451 - RNA, 19 nt, Homo sapiens
  misc_RNA (1)...(19): siRNA sense strand
acagucagaggugaaauaa

SEQ ID NO: 186452 - RNA, 19 nt, Homo sapiens
  misc_RNA (1)...(19): siRNA sense strand
caacaccagagaauucaca

SEQ ID NO: 186453 - RNA, 19 nt, Homo sapiens
  misc_RNA (1)...(19): siRNA sense strand
gaagaggaagaauuuaucc

SEQ ID NO: 186454 - RNA, 19 nt, Homo sapiens
  misc_RNA (1)...(19): siRNA sense strand
agagaugcuaugaauguaa

SEQ ID NO: 186455 - RNA, 19 nt, Homo sapiens
  misc_RNA (1)...(19): siRNA sense strand
ccuggguacaugaacauua

SEQ ID NO: 186456 - RNA, 19 nt, Homo sapiens
  misc_RNA (1)...(19): siRNA sense strand
ccagagagaaacccuacga

SEQ ID NO: 186457 - RNA, 19 nt, Homo sapiens
  misc_RNA (1)...(19): siRNA sense strand
gagaggaggcagugaccau

SEQ ID NO: 186458 - RNA, 19 nt, Homo sapiens
  misc_RNA (1)...(19): siRNA sense strand
gagagagaugcuaugaaug

SEQ ID NO: 186459 - RNA, 19 nt, Homo sapiens
  misc_RNA (1)...(19): siRNA sense strand
uggaacugcuggugcuaga

SEQ ID NO: 186460 - RNA, 19 nt, Homo sapiens
  misc_RNA (1)...(19): siRNA sense strand
ccuaugggacugugauaau

SEQ ID NO: 186461 - RNA, 19 nt, Homo sapiens
  misc_RNA (1)...(19): siRNA sense strand
gagggaaaaccuauuaaug

SEQ ID NO: 186462 - RNA, 19 nt, Homo sapiens
  misc_RNA (1)...(19): siRNA sense strand
gaaagcugcagcccagaac

SEQ ID NO: 186463 - RNA, 19 nt, Homo sapiens
  misc_RNA (1)...(19): siRNA sense strand
caacacaccuagucauauu

SEQ ID NO: 186464 - RNA, 19 nt, Homo sapiens
  misc_RNA (1)...(19): siRNA sense strand
gaacauccuuuacccaaga

SEQ ID NO: 186465 - RNA, 19 nt, Homo sapiens
  misc_RNA (1)...(19): siRNA sense strand
caaauaaccugccuaugca

SEQ ID NO: 186466 - RNA, 19 nt, Homo sapiens
  misc_RNA (1)...(19): siRNA sense strand
gcaaauaaccugccuaugc

SEQ ID NO: 186467 - RNA, 19 nt, Homo sapiens
  misc_RNA (1)...(19): siRNA sense strand
gcagaagauuguagagcua

SEQ ID NO: 186468 - RNA, 19 nt, Homo sapiens
  misc_RNA (1)...(19): siRNA sense strand
ccaagcgugucaucaauaa

SEQ ID NO: 186469 - RNA, 19 nt, Homo sapiens
  misc_RNA (1)...(19): siRNA sense strand
ggagaaagaguuugagaga

SEQ ID NO: 186470 - RNA, 19 nt, Homo sapiens
  misc_RNA (1)...(19): siRNA sense strand
caaaauagaucuaccugaa

SEQ ID NO: 186471 - RNA, 19 nt, Homo sapiens
  misc_RNA (1)...(19): siRNA sense strand
caacggaugugugaguaaa

SEQ ID NO: 186472 - RNA, 19 nt, Homo sapiens
  misc_RNA (1)...(19): siRNA sense strand
gagaaagaguuugagagaa

SEQ ID NO: 186473 - RNA, 19 nt, Homo sapiens
  misc_RNA (1)...(19): siRNA sense strand
gaagugaaccugauauguc

SEQ ID NO: 186474 - RNA, 19 nt, Homo sapiens
  misc_RNA (1)...(19): siRNA sense strand
ggcaaucggugguaguaaa

SEQ ID NO: 186475 - RNA, 19 nt, Homo sapiens
  misc_RNA (1)...(19): siRNA sense strand
aaccugauaugucucaaua

SEQ ID NO: 186476 - RNA, 19 nt, Homo sapiens
  misc_RNA (1)...(19): siRNA sense strand
ggagugcccguccaucuuu

SEQ ID NO: 186477 - RNA, 19 nt, Homo sapiens
  misc_RNA (1)...(19): siRNA sense strand
gagaauaccaacuccauca

SEQ ID NO: 186478 - RNA, 19 nt, Homo sapiens
  misc_RNA (1)...(19): siRNA sense strand
agacacacaugaacaguca

SEQ ID NO: 186479 - RNA, 19 nt, Homo sapiens
  misc_RNA (1)...(19): siRNA sense strand
gagaacccauuauccagau

SEQ ID NO: 186480 - RNA, 19 nt, Homo sapiens
  misc_RNA (1)...(19): siRNA sense strand
ucaauacuggccaagauua

SEQ ID NO: 186481 - RNA, 19 nt, Homo sapiens
  misc_RNA (1)...(19): siRNA sense strand
gauaaacuaaggauguuga

SEQ ID NO: 186482 - RNA, 19 nt, Homo sapiens
  misc_RNA (1)...(19): siRNA sense strand
uaacauaccaagcguguca

SEQ ID NO: 186483 - RNA, 19 nt, Homo sapiens
  misc_RNA (1)...(19): siRNA sense strand
ucagcucgguggugucuuu

SEQ ID NO: 186484 - RNA, 19 nt, Homo sapiens
  misc_RNA (1)...(19): siRNA sense strand
ccacaccgguuuccuccuu

SEQ ID NO: 186485 - RNA, 19 nt, Homo sapiens
  misc_RNA (1)...(19): siRNA sense strand
agaaagaguuugagagaac

SEQ ID NO: 186486 - RNA, 19 nt, Homo sapiens
  misc_RNA (1)...(19): siRNA sense strand
gaaauagaacauccuuuac

SEQ ID NO: 186487 - RNA, 19 nt, Homo sapiens
  misc_RNA (1)...(19): siRNA sense strand
gcuucaccauggcaaauaa

SEQ ID NO: 186488 - RNA, 19 nt, Homo sapiens
  misc_RNA (1)...(19): siRNA sense strand
gcaacacaccuagucauau

SEQ ID NO: 186489 - RNA, 19 nt, Homo sapiens
  misc_RNA (1)...(19): siRNA sense strand
gcaaaauagcccaguauaa

SEQ ID NO: 186490 - RNA, 19 nt, Homo sapiens
  misc_RNA (1)...(19): siRNA sense strand
ggaagugaaccugauaugu

SEQ ID NO: 186491 - RNA, 19 nt, Homo sapiens
  misc_RNA (1)...(19): siRNA sense strand
agcggaagcugcaaagaaa

SEQ ID NO: 186492 - RNA, 19 nt, Homo sapiens
  misc_RNA (1)...(19): siRNA sense strand
cggaagcugcaaagaaaua

SEQ ID NO: 186493 - RNA, 19 nt, Homo sapiens
  misc_RNA (1)...(19): siRNA sense strand
caucuuugcuugggaaauc

SEQ ID NO: 186494 - RNA, 19 nt, Homo sapiens
  misc_RNA (1)...(19): siRNA sense strand
ugaaugggcggaguuauga

SEQ ID NO: 186495 - RNA, 19 nt, Homo sapiens
  misc_RNA (1)...(19): siRNA sense strand
gguaguaaaccgagaguag

SEQ ID NO: 186496 - RNA, 19 nt, Homo sapiens
  misc_RNA (1)...(19): siRNA sense strand
agaucuaccugaagcaaga

SEQ ID NO: 186497 - RNA, 19 nt, Homo sapiens
  misc_RNA (1)...(19): siRNA sense strand
gggcagguauuacgagacu

SEQ ID NO: 186498 - RNA, 19 nt, Homo sapiens
  misc_RNA (1)...(19): siRNA sense strand
ccagccagaccuccucaua

SEQ ID NO: 186499 - RNA, 19 nt, Homo sapiens
  misc_RNA (1)...(19): siRNA sense strand
caaauggagaagagaagaa

SEQ ID NO: 186500 - RNA, 19 nt, Homo sapiens
  misc_RNA (1)...(19): siRNA sense strand
gugcgacauuucccgaauu

SEQ ID NO: 186501 - RNA, 19 nt, Homo sapiens
  misc_RNA (1)...(19): siRNA sense strand
uccagaaguuguaagcaaa

SEQ ID NO: 186502 - RNA, 19 nt, Homo sapiens
  misc_RNA (1)...(19): siRNA sense strand
gagagaauaccaacuccau

SEQ ID NO: 186503 - RNA, 19 nt, Homo sapiens
  misc_RNA (1)...(19): siRNA sense strand
ucaauaaacagaguucuuc

SEQ ID NO: 186504 - RNA, 19 nt, Homo sapiens
  misc_RNA (1)...(19): siRNA sense strand
ucucaauacuggccaagau

SEQ ID NO: 186505 - RNA, 19 nt, Homo sapiens
  misc_RNA (1)...(19): siRNA sense strand
ccacauaugcagacacaca

SEQ ID NO: 186506 - RNA, 19 nt, Homo sapiens
  misc_RNA (1)...(19): siRNA sense strand
guaaaauucugggcaggua

SEQ ID NO: 186507 - RNA, 19 nt, Homo sapiens
  misc_RNA (1)...(19): siRNA sense strand
uaccaagcgugucaucaau

SEQ ID NO: 186508 - RNA, 19 nt, Homo sapiens
  misc_RNA (1)...(19): siRNA sense strand
gugaaugggcggaguuaug

SEQ ID NO: 186509 - RNA, 19 nt, Homo sapiens
  misc_RNA (1)...(19): siRNA sense strand
uugaggcccuggagaaaga

SEQ ID NO: 186510 - RNA, 19 nt, Homo sapiens
  misc_RNA (1)...(19): siRNA sense strand
acacagcccucacaaacac

SEQ ID NO: 186511 - RNA, 19 nt, Homo sapiens
  misc_RNA (1)...(19): siRNA sense strand
cagcaccagugucuaccaa

SEQ ID NO: 186512 - RNA, 19 nt, Homo sapiens
  misc_RNA (1)...(19): siRNA sense strand
caaaauagcccaguauaag

SEQ ID NO: 186513 - RNA, 19 nt, Homo sapiens
  misc_RNA (1)...(19): siRNA sense strand
ccugauaugucucaauacu

SEQ ID NO: 186514 - RNA, 19 nt, Homo sapiens
  misc_RNA (1)...(19): siRNA sense strand
gaaccugauaugucucaau

SEQ ID NO: 186515 - RNA, 19 nt, Homo sapiens
  misc_RNA (1)...(19): siRNA sense strand
aaauugaggcccuggagaa

SEQ ID NO: 186516 - RNA, 19 nt, Homo sapiens
  misc_RNA (1)...(19): siRNA sense strand
gaauaccaacuccaucagu

SEQ ID NO: 186517 - RNA, 19 nt, Homo sapiens
  misc_RNA (1)...(19): siRNA sense strand
aguagcgacuccagaaguu

SEQ ID NO: 186518 - RNA, 19 nt, Homo sapiens
  misc_RNA (1)...(19): siRNA sense strand
caugaacagucagccaaug

SEQ ID NO: 186519 - RNA, 19 nt, Homo sapiens
  misc_RNA (1)...(19): siRNA sense strand
agacacagcccucacaaac

SEQ ID NO: 186520 - RNA, 19 nt, Homo sapiens
  misc_RNA (1)...(19): siRNA sense strand
gaacccauuauccagaugu

SEQ ID NO: 186521 - RNA, 19 nt, Homo sapiens
  misc_RNA (1)...(19): siRNA sense strand
ugagagaacccauuaucca

SEQ ID NO: 186522 - RNA, 19 nt, Homo sapiens
  misc_RNA (1)...(19): siRNA sense strand
cuccagaaguuguaagcaa

SEQ ID NO: 186523 - RNA, 19 nt, Homo sapiens
  misc_RNA (1)...(19): siRNA sense strand
aagcggaagcugcaaagaa

SEQ ID NO: 186524 - RNA, 19 nt, Homo sapiens
  misc_RNA (1)...(19): siRNA sense strand
ccuaucagcaguaguuuca

SEQ ID NO: 186525 - RNA, 19 nt, Homo sapiens
  misc_RNA (1)...(19): siRNA sense strand
gcucgguggugucuuuguc

SEQ ID NO: 186526 - RNA, 19 nt, Homo sapiens
  misc_RNA (1)...(19): siRNA sense strand
aagugaaccugauaugucu

SEQ ID NO: 186527 - RNA, 19 nt, Homo sapiens
  misc_RNA (1)...(19): siRNA sense strand
cgacauuucccgaauucug

SEQ ID NO: 186528 - RNA, 19 nt, Homo sapiens
  misc_RNA (1)...(19): siRNA sense strand
gaagcugcaaagaaauaga

SEQ ID NO: 186529 - RNA, 19 nt, Homo sapiens
  misc_RNA (1)...(19): siRNA sense strand
cauaugcagacacacauga

SEQ ID NO: 186530 - RNA, 19 nt, Homo sapiens
  misc_RNA (1)...(19): siRNA sense strand
gggagugcccguccaucuu

SEQ ID NO: 186531 - RNA, 19 nt, Homo sapiens
  misc_RNA (1)...(19): siRNA sense strand
gacacagcccucacaaaca

SEQ ID NO: 186532 - RNA, 19 nt, Homo sapiens
  misc_RNA (1)...(19): siRNA sense strand
ugaagcaagaauacaggua

SEQ ID NO: 186533 - RNA, 19 nt, Homo sapiens
  misc_RNA (1)...(19): siRNA sense strand
agaaagacuagcagccaaa

SEQ ID NO: 186534 - RNA, 19 nt, Homo sapiens
  misc_RNA (1)...(19): siRNA sense strand
ccauuauccagauguguuu

SEQ ID NO: 186535 - RNA, 19 nt, Homo sapiens
  misc_RNA (1)...(19): siRNA sense strand
ugucaucaauaaacagagu

SEQ ID NO: 186536 - RNA, 19 nt, Homo sapiens
  misc_RNA (1)...(19): siRNA sense strand
gagugcccguccaucuuug

SEQ ID NO: 186537 - RNA, 19 nt, Homo sapiens
  misc_RNA (1)...(19): siRNA sense strand
cgaagggccaaauggagaa

SEQ ID NO: 186538 - RNA, 19 nt, Homo sapiens
  misc_RNA (1)...(19): siRNA sense strand
gcauguaugauaaacuaag

SEQ ID NO: 186539 - RNA, 19 nt, Homo sapiens
  misc_RNA (1)...(19): siRNA sense strand
caaccuggcuagcgaaaag

SEQ ID NO: 186540 - RNA, 19 nt, Homo sapiens
  misc_RNA (1)...(19): siRNA sense strand
uaccaacgauaacauacca

SEQ ID NO: 186541 - RNA, 19 nt, Homo sapiens
  misc_RNA (1)...(19): siRNA sense strand
uaagcaaaauagcccagua

SEQ ID NO: 186542 - RNA, 19 nt, Homo sapiens
  misc_RNA (1)...(19): siRNA sense strand
aaugggcggaguuaugaua

SEQ ID NO: 186543 - RNA, 19 nt, Homo sapiens
  misc_RNA (1)...(19): siRNA sense strand
cauauuccuaucagcagua

SEQ ID NO: 186544 - RNA, 19 nt, Homo sapiens
  misc_RNA (1)...(19): siRNA sense strand
aaauggagaagagaagaaa

SEQ ID NO: 186545 - RNA, 19 nt, Homo sapiens
  misc_RNA (1)...(19): siRNA sense strand
ccaaauggagaagagaaga

SEQ ID NO: 186546 - RNA, 19 nt, Homo sapiens
  misc_RNA (1)...(19): siRNA sense strand
cagggcaaccuacgcaaga

SEQ ID NO: 186547 - RNA, 19 nt, Homo sapiens
  misc_RNA (1)...(19): siRNA sense strand
gaagacaggccagcaacac

SEQ ID NO: 186548 - RNA, 19 nt, Homo sapiens
  misc_RNA (1)...(19): siRNA sense strand
ggccaaauggagaagagaa

SEQ ID NO: 186549 - RNA, 19 nt, Homo sapiens
  misc_RNA (1)...(19): siRNA sense strand
gaaguuguaagcaaaauag

SEQ ID NO: 186550 - RNA, 19 nt, Homo sapiens
  misc_RNA (1)...(19): siRNA sense strand
uccaacggaugugugagua

SEQ ID NO: 186551 - RNA, 19 nt, Homo sapiens
  misc_RNA (1)...(19): siRNA sense strand
caucaguuccaacggagaa

SEQ ID NO: 186552 - RNA, 19 nt, Homo sapiens
  misc_RNA (1)...(19): siRNA sense strand
cauguaugauaaacuaagg

SEQ ID NO: 186553 - RNA, 19 nt, Homo sapiens
  misc_RNA (1)...(19): siRNA sense strand
ggaguuaugauaccuacac

SEQ ID NO: 186554 - RNA, 19 nt, Homo sapiens
  misc_RNA (1)...(19): siRNA sense strand
ccaacggaugugugaguaa

SEQ ID NO: 186555 - RNA, 19 nt, Homo sapiens
  misc_RNA (1)...(19): siRNA sense strand
acagcgcucugccgccuau

SEQ ID NO: 186556 - RNA, 19 nt, Homo sapiens
  misc_RNA (1)...(19): siRNA sense strand
acaccuagucauauuccua

SEQ ID NO: 186557 - RNA, 19 nt, Homo sapiens
  misc_RNA (1)...(19): siRNA sense strand
agcaacacaccuagucaua

SEQ ID NO: 186558 - RNA, 19 nt, Homo sapiens
  misc_RNA (1)...(19): siRNA sense strand
aagacuagcagccaaaaua

SEQ ID NO: 186559 - RNA, 19 nt, Homo sapiens
  misc_RNA (1)...(19): siRNA sense strand
gaagcggaagcugcaaaga

SEQ ID NO: 186560 - RNA, 19 nt, Homo sapiens
  misc_RNA (1)...(19): siRNA sense strand
ggaagcugcaaagaaauag

SEQ ID NO: 186561 - RNA, 19 nt, Homo sapiens
  misc_RNA (1)...(19): siRNA sense strand
gcaaucggugguaguaaac

SEQ ID NO: 186562 - RNA, 19 nt, Homo sapiens
  misc_RNA (1)...(19): siRNA sense strand
caccuagucauauuccuau

SEQ ID NO: 186563 - RNA, 19 nt, Homo sapiens
  misc_RNA (1)...(19): siRNA sense strand
caacacaccuagucauauu

SEQ ID NO: 186564 - RNA, 19 nt, Homo sapiens
  misc_RNA (1)...(19): siRNA sense strand
gaacauccuuuacccaaga

SEQ ID NO: 186565 - RNA, 19 nt, Homo sapiens
  misc_RNA (1)...(19): siRNA sense strand
caaauaaccugccuaugca

SEQ ID NO: 186566 - RNA, 19 nt, Homo sapiens
  misc_RNA (1)...(19): siRNA sense strand
gcaaauaaccugccuaugc

SEQ ID NO: 186567 - RNA, 19 nt, Homo sapiens
  misc_RNA (1)...(19): siRNA sense strand
gcagaagauuguagagcua

SEQ ID NO: 186568 - RNA, 19 nt, Homo sapiens
  misc_RNA (1)...(19): siRNA sense strand
ccaagcgugucaucaauaa

SEQ ID NO: 186569 - RNA, 19 nt, Homo sapiens
  misc_RNA (1)...(19): siRNA sense strand
ggagaaagaguuugagaga

SEQ ID NO: 186570 - RNA, 19 nt, Homo sapiens
  misc_RNA (1)...(19): siRNA sense strand
caaaauagaucuaccugaa

SEQ ID NO: 186571 - RNA, 19 nt, Homo sapiens
  misc_RNA (1)...(19): siRNA sense strand
caacggaugugugaguaaa

SEQ ID NO: 186572 - RNA, 19 nt, Homo sapiens
  misc_RNA (1)...(19): siRNA sense strand
gagaaagaguuugagagaa

SEQ ID NO: 186573 - RNA, 19 nt, Homo sapiens
  misc_RNA (1)...(19): siRNA sense strand
gaagugaaccugauauguc

SEQ ID NO: 186574 - RNA, 19 nt, Homo sapiens
  misc_RNA (1)...(19): siRNA sense strand
ggcaaucggugguaguaaa

SEQ ID NO: 186575 - RNA, 19 nt, Homo sapiens
  misc_RNA (1)...(19): siRNA sense strand
aaccugauaugucucaaua

SEQ ID NO: 186576 - RNA, 19 nt, Homo sapiens
  misc_RNA (1)...(19): siRNA sense strand
ggagugcccguccaucuuu

SEQ ID NO: 186577 - RNA, 19 nt, Homo sapiens
  misc_RNA (1)...(19): siRNA sense strand
gagaauaccaacuccauca

SEQ ID NO: 186578 - RNA, 19 nt, Homo sapiens
  misc_RNA (1)...(19): siRNA sense strand
agacacacaugaacaguca

SEQ ID NO: 186579 - RNA, 19 nt, Homo sapiens
  misc_RNA (1)...(19): siRNA sense strand
gagaacccauuauccagau

SEQ ID NO: 186580 - RNA, 19 nt, Homo sapiens
  misc_RNA (1)...(19): siRNA sense strand
ucaauacuggccaagauua

SEQ ID NO: 186581 - RNA, 19 nt, Homo sapiens
  misc_RNA (1)...(19): siRNA sense strand
gauaaacuaaggauguuga

SEQ ID NO: 186582 - RNA, 19 nt, Homo sapiens
  misc_RNA (1)...(19): siRNA sense strand
uaacauaccaagcguguca

SEQ ID NO: 186583 - RNA, 19 nt, Homo sapiens
  misc_RNA (1)...(19): siRNA sense strand
ucagcucgguggugucuuu

SEQ ID NO: 186584 - RNA, 19 nt, Homo sapiens
  misc_RNA (1)...(19): siRNA sense strand
ccacaccgguuuccuccuu

SEQ ID NO: 186585 - RNA, 19 nt, Homo sapiens
  misc_RNA (1)...(19): siRNA sense strand
agaaagaguuugagagaac

SEQ ID NO: 186586 - RNA, 19 nt, Homo sapiens
  misc_RNA (1)...(19): siRNA sense strand
gaaauagaacauccuuuac

SEQ ID NO: 186587 - RNA, 19 nt, Homo sapiens
  misc_RNA (1)...(19): siRNA sense strand
gcuucaccauggcaaauaa

SEQ ID NO: 186588 - RNA, 19 nt, Homo sapiens
  misc_RNA (1)...(19): siRNA sense strand
gcaacacaccuagucauau

SEQ ID NO: 186589 - RNA, 19 nt, Homo sapiens
  misc_RNA (1)...(19): siRNA sense strand
gcaaaauagcccaguauaa

SEQ ID NO: 186590 - RNA, 19 nt, Homo sapiens
  misc_RNA (1)...(19): siRNA sense strand
ggaagugaaccugauaugu

SEQ ID NO: 186591 - RNA, 19 nt, Homo sapiens
  misc_RNA (1)...(19): siRNA sense strand
agcggaagcugcaaagaaa

SEQ ID NO: 186592 - RNA, 19 nt, Homo sapiens
  misc_RNA (1)...(19): siRNA sense strand
cggaagcugcaaagaaaua

SEQ ID NO: 186593 - RNA, 19 nt, Homo sapiens
  misc_RNA (1)...(19): siRNA sense strand
caucuuugcuugggaaauc

SEQ ID NO: 186594 - RNA, 19 nt, Homo sapiens
  misc_RNA (1)...(19): siRNA sense strand
ugaaugggcggaguuauga

SEQ ID NO: 186595 - RNA, 19 nt, Homo sapiens
  misc_RNA (1)...(19): siRNA sense strand
gguaguaaaccgagaguag

SEQ ID NO: 186596 - RNA, 19 nt, Homo sapiens
  misc_RNA (1)...(19): siRNA sense strand
agaucuaccugaagcaaga

SEQ ID NO: 186597 - RNA, 19 nt, Homo sapiens
  misc_RNA (1)...(19): siRNA sense strand
gggcagguauuacgagacu

SEQ ID NO: 186598 - RNA, 19 nt, Homo sapiens
  misc_RNA (1)...(19): siRNA sense strand
ccagccagaccuccucaua

SEQ ID NO: 186599 - RNA, 19 nt, Homo sapiens
  misc_RNA (1)...(19): siRNA sense strand
caaauggagaagagaagaa

SEQ ID NO: 186600 - RNA, 19 nt, Homo sapiens
  misc_RNA (1)...(19): siRNA sense strand
gugcgacauuucccgaauu

SEQ ID NO: 186601 - RNA, 19 nt, Homo sapiens
  misc_RNA (1)...(19): siRNA sense strand
uccagaaguuguaagcaaa

SEQ ID NO: 186602 - RNA, 19 nt, Homo sapiens
  misc_RNA (1)...(19): siRNA sense strand
gagagaauaccaacuccau

SEQ ID NO: 186603 - RNA, 19 nt, Homo sapiens
  misc_RNA (1)...(19): siRNA sense strand
ucaauaaacagaguucuuc

SEQ ID NO: 186604 - RNA, 19 nt, Homo sapiens
  misc_RNA (1)...(19): siRNA sense strand
ucucaauacuggccaagau

SEQ ID NO: 186605 - RNA, 19 nt, Homo sapiens
  misc_RNA (1)...(19): siRNA sense strand
ccacauaugcagacacaca

SEQ ID NO: 186606 - RNA, 19 nt, Homo sapiens
  misc_RNA (1)...(19): siRNA sense strand
guaaaauucugggcaggua

SEQ ID NO: 186607 - RNA, 19 nt, Homo sapiens
  misc_RNA (1)...(19): siRNA sense strand
uaccaagcgugucaucaau

SEQ ID NO: 186608 - RNA, 19 nt, Homo sapiens
  misc_RNA (1)...(19): siRNA sense strand
gugaaugggcggaguuaug

SEQ ID NO: 186609 - RNA, 19 nt, Homo sapiens
  misc_RNA (1)...(19): siRNA sense strand
uugaggcccuggagaaaga

SEQ ID NO: 186610 - RNA, 19 nt, Homo sapiens
  misc_RNA (1)...(19): siRNA sense strand
acacagcccucacaaacac

SEQ ID NO: 186611 - RNA, 19 nt, Homo sapiens
  misc_RNA (1)...(19): siRNA sense strand
cagcaccagugucuaccaa

SEQ ID NO: 186612 - RNA, 19 nt, Homo sapiens
  misc_RNA (1)...(19): siRNA sense strand
caaaauagcccaguauaag

SEQ ID NO: 186613 - RNA, 19 nt, Homo sapiens
  misc_RNA (1)...(19): siRNA sense strand
ccugauaugucucaauacu

SEQ ID NO: 186614 - RNA, 19 nt, Homo sapiens
  misc_RNA (1)...(19): siRNA sense strand
gaaccugauaugucucaau

SEQ ID NO: 186615 - RNA, 19 nt, Homo sapiens
  misc_RNA (1)...(19): siRNA sense strand
aaauugaggcccuggagaa

SEQ ID NO: 186616 - RNA, 19 nt, Homo sapiens
  misc_RNA (1)...(19): siRNA sense strand
gaauaccaacuccaucagu

SEQ ID NO: 186617 - RNA, 19 nt, Homo sapiens
  misc_RNA (1)...(19): siRNA sense strand
aguagcgacuccagaaguu

SEQ ID NO: 186618 - RNA, 19 nt, Homo sapiens
  misc_RNA (1)...(19): siRNA sense strand
caugaacagucagccaaug

SEQ ID NO: 186619 - RNA, 19 nt, Homo sapiens
  misc_RNA (1)...(19): siRNA sense strand
agacacagcccucacaaac

SEQ ID NO: 186620 - RNA, 19 nt, Homo sapiens
  misc_RNA (1)...(19): siRNA sense strand
gaacccauuauccagaugu

SEQ ID NO: 186621 - RNA, 19 nt, Homo sapiens
  misc_RNA (1)...(19): siRNA sense strand
ugagagaacccauuaucca

SEQ ID NO: 186622 - RNA, 19 nt, Homo sapiens
  misc_RNA (1)...(19): siRNA sense strand
cuccagaaguuguaagcaa

SEQ ID NO: 186623 - RNA, 19 nt, Homo sapiens
  misc_RNA (1)...(19): siRNA sense strand
aagcggaagcugcaaagaa

SEQ ID NO: 186624 - RNA, 19 nt, Homo sapiens
  misc_RNA (1)...(19): siRNA sense strand
ccuaucagcaguaguuuca

SEQ ID NO: 186625 - RNA, 19 nt, Homo sapiens
  misc_RNA (1)...(19): siRNA sense strand
gcucgguggugucuuuguc

SEQ ID NO: 186626 - RNA, 19 nt, Homo sapiens
  misc_RNA (1)...(19): siRNA sense strand
aagugaaccugauaugucu

SEQ ID NO: 186627 - RNA, 19 nt, Homo sapiens
  misc_RNA (1)...(19): siRNA sense strand
cgacauuucccgaauucug

SEQ ID NO: 186628 - RNA, 19 nt, Homo sapiens
  misc_RNA (1)...(19): siRNA sense strand
gaagcugcaaagaaauaga

SEQ ID NO: 186629 - RNA, 19 nt, Homo sapiens
  misc_RNA (1)...(19): siRNA sense strand
cauaugcagacacacauga

SEQ ID NO: 186630 - RNA, 19 nt, Homo sapiens
  misc_RNA (1)...(19): siRNA sense strand
gggagugcccguccaucuu

SEQ ID NO: 186631 - RNA, 19 nt, Homo sapiens
  misc_RNA (1)...(19): siRNA sense strand
gacacagcccucacaaaca

SEQ ID NO: 186632 - RNA, 19 nt, Homo sapiens
  misc_RNA (1)...(19): siRNA sense strand
ugaagcaagaauacaggua

SEQ ID NO: 186633 - RNA, 19 nt, Homo sapiens
  misc_RNA (1)...(19): siRNA sense strand
agaaagacuagcagccaaa

SEQ ID NO: 186634 - RNA, 19 nt, Homo sapiens
  misc_RNA (1)...(19): siRNA sense strand
ccauuauccagauguguuu

SEQ ID NO: 186635 - RNA, 19 nt, Homo sapiens
  misc_RNA (1)...(19): siRNA sense strand
ugucaucaauaaacagagu

SEQ ID NO: 186636 - RNA, 19 nt, Homo sapiens
  misc_RNA (1)...(19): siRNA sense strand
gagugcccguccaucuuug

SEQ ID NO: 186637 - RNA, 19 nt, Homo sapiens
  misc_RNA (1)...(19): siRNA sense strand
cgaagggccaaauggagaa

SEQ ID NO: 186638 - RNA, 19 nt, Homo sapiens
  misc_RNA (1)...(19): siRNA sense strand
gcauguaugauaaacuaag

SEQ ID NO: 186639 - RNA, 19 nt, Homo sapiens
  misc_RNA (1)...(19): siRNA sense strand
caaccuggcuagcgaaaag

SEQ ID NO: 186640 - RNA, 19 nt, Homo sapiens
  misc_RNA (1)...(19): siRNA sense strand
uaccaacgauaacauacca

SEQ ID NO: 186641 - RNA, 19 nt, Homo sapiens
  misc_RNA (1)...(19): siRNA sense strand
uaagcaaaauagcccagua

SEQ ID NO: 186642 - RNA, 19 nt, Homo sapiens
  misc_RNA (1)...(19): siRNA sense strand
aaugggcggaguuaugaua

SEQ ID NO: 186643 - RNA, 19 nt, Homo sapiens
  misc_RNA (1)...(19): siRNA sense strand
cauauuccuaucagcagua

SEQ ID NO: 186644 - RNA, 19 nt, Homo sapiens
  misc_RNA (1)...(19): siRNA sense strand
aaauggagaagagaagaaa

SEQ ID NO: 186645 - RNA, 19 nt, Homo sapiens
  misc_RNA (1)...(19): siRNA sense strand
ccaaauggagaagagaaga

SEQ ID NO: 186646 - RNA, 19 nt, Homo sapiens
  misc_RNA (1)...(19): siRNA sense strand
cagggcaaccuacgcaaga

SEQ ID NO: 186647 - RNA, 19 nt, Homo sapiens
  misc_RNA (1)...(19): siRNA sense strand
gaagacaggccagcaacac

SEQ ID NO: 186648 - RNA, 19 nt, Homo sapiens
  misc_RNA (1)...(19): siRNA sense strand
ggccaaauggagaagagaa

SEQ ID NO: 186649 - RNA, 19 nt, Homo sapiens
  misc_RNA (1)...(19): siRNA sense strand
gaaguuguaagcaaaauag

SEQ ID NO: 186650 - RNA, 19 nt, Homo sapiens
  misc_RNA (1)...(19): siRNA sense strand
uccaacggaugugugagua

SEQ ID NO: 186651 - RNA, 19 nt, Homo sapiens
  misc_RNA (1)...(19): siRNA sense strand
caucaguuccaacggagaa

SEQ ID NO: 186652 - RNA, 19 nt, Homo sapiens
  misc_RNA (1)...(19): siRNA sense strand
cauguaugauaaacuaagg

SEQ ID NO: 186653 - RNA, 19 nt, Homo sapiens
  misc_RNA (1)...(19): siRNA sense strand
ggaguuaugauaccuacac

SEQ ID NO: 186654 - RNA, 19 nt, Homo sapiens
  misc_RNA (1)...(19): siRNA sense strand
ccaacggaugugugaguaa

SEQ ID NO: 186655 - RNA, 19 nt, Homo sapiens
  misc_RNA (1)...(19): siRNA sense strand
acagcgcucugccgccuau

SEQ ID NO: 186656 - RNA, 19 nt, Homo sapiens
  misc_RNA (1)...(19): siRNA sense strand
acaccuagucauauuccua

SEQ ID NO: 186657 - RNA, 19 nt, Homo sapiens
  misc_RNA (1)...(19): siRNA sense strand
agcaacacaccuagucaua

SEQ ID NO: 186658 - RNA, 19 nt, Homo sapiens
  misc_RNA (1)...(19): siRNA sense strand
aagacuagcagccaaaaua

SEQ ID NO: 186659 - RNA, 19 nt, Homo sapiens
  misc_RNA (1)...(19): siRNA sense strand
gaagcggaagcugcaaaga

SEQ ID NO: 186660 - RNA, 19 nt, Homo sapiens
  misc_RNA (1)...(19): siRNA sense strand
ggaagcugcaaagaaauag

SEQ ID NO: 186661 - RNA, 19 nt, Homo sapiens
  misc_RNA (1)...(19): siRNA sense strand
gcaaucggugguaguaaac

SEQ ID NO: 186662 - RNA, 19 nt, Homo sapiens
  misc_RNA (1)...(19): siRNA sense strand
caccuagucauauuccuau

SEQ ID NO: 186663 - RNA, 19 nt, Homo sapiens
  misc_RNA (1)...(19): siRNA sense strand
gcaauaaacuagugacuuu

SEQ ID NO: 186664 - RNA, 19 nt, Homo sapiens
  misc_RNA (1)...(19): siRNA sense strand
gcacagaaccugauaugua

SEQ ID NO: 186665 - RNA, 19 nt, Homo sapiens
  misc_RNA (1)...(19): siRNA sense strand
uaaacucucucaacagaua

SEQ ID NO: 186666 - RNA, 19 nt, Homo sapiens
  misc_RNA (1)...(19): siRNA sense strand
ggacaucacaggaaacuuu

SEQ ID NO: 186667 - RNA, 19 nt, Homo sapiens
  misc_RNA (1)...(19): siRNA sense strand
gaaguugaauuccuuaaag

SEQ ID NO: 186668 - RNA, 19 nt, Homo sapiens
  misc_RNA (1)...(19): siRNA sense strand
uaacagugcucucaucaug

SEQ ID NO: 186669 - RNA, 19 nt, Homo sapiens
  misc_RNA (1)...(19): siRNA sense strand
gaacuuagacuguauuucu

SEQ ID NO: 186670 - RNA, 19 nt, Homo sapiens
  misc_RNA (1)...(19): siRNA sense strand
guagaaagaucguuugucu

SEQ ID NO: 186671 - RNA, 19 nt, Homo sapiens
  misc_RNA (1)...(19): siRNA sense strand
gauguuggcugguuucuuc

SEQ ID NO: 186672 - RNA, 19 nt, Homo sapiens
  misc_RNA (1)...(19): siRNA sense strand
cauaaacucucucaacaga

SEQ ID NO: 186673 - RNA, 19 nt, Homo sapiens
  misc_RNA (1)...(19): siRNA sense strand
gauugcagaugaagcauuu

SEQ ID NO: 186674 - RNA, 19 nt, Homo sapiens
  misc_RNA (1)...(19): siRNA sense strand
cugcugagcuucaacuaua

SEQ ID NO: 186675 - RNA, 19 nt, Homo sapiens
  misc_RNA (1)...(19): siRNA sense strand
ucaaacaccuggacacuca

SEQ ID NO: 186676 - RNA, 19 nt, Homo sapiens
  misc_RNA (1)...(19): siRNA sense strand
gaacuuagcacuuuuauca

SEQ ID NO: 186677 - RNA, 19 nt, Homo sapiens
  misc_RNA (1)...(19): siRNA sense strand
caucaugggugccggguuu

SEQ ID NO: 186678 - RNA, 19 nt, Homo sapiens
  misc_RNA (1)...(19): siRNA sense strand
gcagacauauauugugugu

SEQ ID NO: 186679 - RNA, 19 nt, Homo sapiens
  misc_RNA (1)...(19): siRNA sense strand
ucaaagauccugaccagaa

SEQ ID NO: 186680 - RNA, 19 nt, Homo sapiens
  misc_RNA (1)...(19): siRNA sense strand
gcagacacuuccuuagaga

SEQ ID NO: 186681 - RNA, 19 nt, Homo sapiens
  misc_RNA (1)...(19): siRNA sense strand
acaggaaacuuuagcaaug

SEQ ID NO: 186682 - RNA, 19 nt, Homo sapiens
  misc_RNA (1)...(19): siRNA sense strand
caacagauacuaaagaaag

SEQ ID NO: 186683 - RNA, 19 nt, Homo sapiens
  misc_RNA (1)...(19): siRNA sense strand
agacauauauuguguguac

SEQ ID NO: 186684 - RNA, 19 nt, Homo sapiens
  misc_RNA (1)...(19): siRNA sense strand
gagcagacacuuccuuaga

SEQ ID NO: 186685 - RNA, 19 nt, Homo sapiens
  misc_RNA (1)...(19): siRNA sense strand
ggccagaaguucagugaga

SEQ ID NO: 186686 - RNA, 19 nt, Homo sapiens
  misc_RNA (1)...(19): siRNA sense strand
ccaaauauuccuuguaugu

SEQ ID NO: 186687 - RNA, 19 nt, Homo sapiens
  misc_RNA (1)...(19): siRNA sense strand
cagcgaaccucauccacuu

SEQ ID NO: 186688 - RNA, 19 nt, Homo sapiens
  misc_RNA (1)...(19): siRNA sense strand
gaaacauggugcuggagau

SEQ ID NO: 186689 - RNA, 19 nt, Homo sapiens
  misc_RNA (1)...(19): siRNA sense strand
ugacaguucuuucucacaa

SEQ ID NO: 186690 - RNA, 19 nt, Homo sapiens
  misc_RNA (1)...(19): siRNA sense strand
aaugugaacuuagcacuuu

SEQ ID NO: 186691 - RNA, 19 nt, Homo sapiens
  misc_RNA (1)...(19): siRNA sense strand
guacagaaacagcaguauu

SEQ ID NO: 186692 - RNA, 19 nt, Homo sapiens
  misc_RNA (1)...(19): siRNA sense strand
ggguuuggcuuccauaaca

SEQ ID NO: 186693 - RNA, 19 nt, Homo sapiens
  misc_RNA (1)...(19): siRNA sense strand
ucacaugggugcagaaugc

SEQ ID NO: 186694 - RNA, 19 nt, Homo sapiens
  misc_RNA (1)...(19): siRNA sense strand
cuuagugucuuggauauaa

SEQ ID NO: 186695 - RNA, 19 nt, Homo sapiens
  misc_RNA (1)...(19): siRNA sense strand
ugagacaccuggaucuuuc

SEQ ID NO: 186696 - RNA, 19 nt, Homo sapiens
  misc_RNA (1)...(19): siRNA sense strand
acaaugauuuaccugcuaa

SEQ ID NO: 186697 - RNA, 19 nt, Homo sapiens
  misc_RNA (1)...(19): siRNA sense strand
ccugggaaguaguaagaua

SEQ ID NO: 186698 - RNA, 19 nt, Homo sapiens
  misc_RNA (1)...(19): siRNA sense strand
uacagaaacagcaguauuu

SEQ ID NO: 186699 - RNA, 19 nt, Homo sapiens
  misc_RNA (1)...(19): siRNA sense strand
cacagaaccugauauguac

SEQ ID NO: 186700 - RNA, 19 nt, Homo sapiens
  misc_RNA (1)...(19): siRNA sense strand
gaugcuguauugaaagaug

SEQ ID NO: 186701 - RNA, 19 nt, Homo sapiens
  misc_RNA (1)...(19): siRNA sense strand
ggaagguugugaugaagag

SEQ ID NO: 186702 - RNA, 19 nt, Homo sapiens
  misc_RNA (1)...(19): siRNA sense strand
gaaccucauccacuuauca

SEQ ID NO: 186703 - RNA, 19 nt, Homo sapiens
  misc_RNA (1)...(19): siRNA sense strand
gaccaaacauucaaauucc

SEQ ID NO: 186704 - RNA, 19 nt, Homo sapiens
  misc_RNA (1)...(19): siRNA sense strand
caaguucuguauuugaauc

SEQ ID NO: 186705 - RNA, 19 nt, Homo sapiens
  misc_RNA (1)...(19): siRNA sense strand
gugcuuaucugaccuuaac

SEQ ID NO: 186706 - RNA, 19 nt, Homo sapiens
  misc_RNA (1)...(19): siRNA sense strand
gacaucacaggaaacuuua

SEQ ID NO: 186707 - RNA, 19 nt, Homo sapiens
  misc_RNA (1)...(19): siRNA sense strand
cagaggcuuuguacagaaa

SEQ ID NO: 186708 - RNA, 19 nt, Homo sapiens
  misc_RNA (1)...(19): siRNA sense strand
cacggaagguugugaugaa

SEQ ID NO: 186709 - RNA, 19 nt, Homo sapiens
  misc_RNA (1)...(19): siRNA sense strand
gcucuuacaaccauucauu

SEQ ID NO: 186710 - RNA, 19 nt, Homo sapiens
  misc_RNA (1)...(19): siRNA sense strand
ccuccaaguucucaauuug

SEQ ID NO: 186711 - RNA, 19 nt, Homo sapiens
  misc_RNA (1)...(19): siRNA sense strand
caaccaaauauuccuugua

SEQ ID NO: 186712 - RNA, 19 nt, Homo sapiens
  misc_RNA (1)...(19): siRNA sense strand
gacuaagccucaacuccaa

SEQ ID NO: 186713 - RNA, 19 nt, Homo sapiens
  misc_RNA (1)...(19): siRNA sense strand
gaauagccuuuuaucguuu

SEQ ID NO: 186714 - RNA, 19 nt, Homo sapiens
  misc_RNA (1)...(19): siRNA sense strand
aagcauacccgauaucuuc

SEQ ID NO: 186715 - RNA, 19 nt, Homo sapiens
  misc_RNA (1)...(19): siRNA sense strand
caaagauccugaccagaac

SEQ ID NO: 186716 - RNA, 19 nt, Homo sapiens
  misc_RNA (1)...(19): siRNA sense strand
cacaaugauuuaccugcua

SEQ ID NO: 186717 - RNA, 19 nt, Homo sapiens
  misc_RNA (1)...(19): siRNA sense strand
caaccugugcuuugaagaa

SEQ ID NO: 186718 - RNA, 19 nt, Homo sapiens
  misc_RNA (1)...(19): siRNA sense strand
gagggacuuucucaucuuc

SEQ ID NO: 186719 - RNA, 19 nt, Homo sapiens
  misc_RNA (1)...(19): siRNA sense strand
cauggccgguccuguguuu

SEQ ID NO: 186720 - RNA, 19 nt, Homo sapiens
  misc_RNA (1)...(19): siRNA sense strand
ucagaggcuuuguacagaa

SEQ ID NO: 186721 - RNA, 19 nt, Homo sapiens
  misc_RNA (1)...(19): siRNA sense strand
ccaacaggcugacaguucu

SEQ ID NO: 186722 - RNA, 19 nt, Homo sapiens
  misc_RNA (1)...(19): siRNA sense strand
uuaacucgcuuggaucuau

SEQ ID NO: 186723 - RNA, 19 nt, Homo sapiens
  misc_RNA (1)...(19): siRNA sense strand
uaaagucccuaaaguucuc

SEQ ID NO: 186724 - RNA, 19 nt, Homo sapiens
  misc_RNA (1)...(19): siRNA sense strand
cgaauagccuuuuaucguu

SEQ ID NO: 186725 - RNA, 19 nt, Homo sapiens
  misc_RNA (1)...(19): siRNA sense strand
acaaugcucuuacaaccau

SEQ ID NO: 186726 - RNA, 19 nt, Homo sapiens
  misc_RNA (1)...(19): siRNA sense strand
gaucaaaccccuucagaga

SEQ ID NO: 186727 - RNA, 19 nt, Homo sapiens
  misc_RNA (1)...(19): siRNA sense strand
cugaggaucuccaggaugu

SEQ ID NO: 186728 - RNA, 19 nt, Homo sapiens
  misc_RNA (1)...(19): siRNA sense strand
ggacuguuccaucuguuug

SEQ ID NO: 186729 - RNA, 19 nt, Homo sapiens
  misc_RNA (1)...(19): siRNA sense strand
guuggcugguuucuucaua

SEQ ID NO: 186730 - RNA, 19 nt, Homo sapiens
  misc_RNA (1)...(19): siRNA sense strand
ucagaaaccugcccaaccu

SEQ ID NO: 186731 - RNA, 19 nt, Homo sapiens
  misc_RNA (1)...(19): siRNA sense strand
gaaugugaacuuagcacuu

SEQ ID NO: 186732 - RNA, 19 nt, Homo sapiens
  misc_RNA (1)...(19): siRNA sense strand
agaccaaacauucaaauuc

SEQ ID NO: 186733 - RNA, 19 nt, Homo sapiens
  misc_RNA (1)...(19): siRNA sense strand
gaauuucuauggacuaccu

SEQ ID NO: 186734 - RNA, 19 nt, Homo sapiens
  misc_RNA (1)...(19): siRNA sense strand
ccuuaaaguccauagauuu

SEQ ID NO: 186735 - RNA, 19 nt, Homo sapiens
  misc_RNA (1)...(19): siRNA sense strand
agaaaccugcccaaccuua

SEQ ID NO: 186736 - RNA, 19 nt, Homo sapiens
  misc_RNA (1)...(19): siRNA sense strand
cucaacagauacuaaagaa

SEQ ID NO: 186737 - RNA, 19 nt, Homo sapiens
  misc_RNA (1)...(19): siRNA sense strand
gugagcagacacuuccuua

SEQ ID NO: 186738 - RNA, 19 nt, Homo sapiens
  misc_RNA (1)...(19): siRNA sense strand
caguggacaucacaggaaa

SEQ ID NO: 186739 - RNA, 19 nt, Homo sapiens
  misc_RNA (1)...(19): siRNA sense strand
cuucuugaguggcaauaaa

SEQ ID NO: 186740 - RNA, 19 nt, Homo sapiens
  misc_RNA (1)...(19): siRNA sense strand
gcaauaauucaagaccaaa

SEQ ID NO: 186741 - RNA, 19 nt, Homo sapiens
  misc_RNA (1)...(19): siRNA sense strand
gcccaaccuuagaaucuug

SEQ ID NO: 186742 - RNA, 19 nt, Homo sapiens
  misc_RNA (1)...(19): siRNA sense strand
gaccugggaaguaguaaga

SEQ ID NO: 186743 - RNA, 19 nt, Homo sapiens
  misc_RNA (1)...(19): siRNA sense strand
uuaccuucauccuucauuu

SEQ ID NO: 186744 - RNA, 19 nt, Homo sapiens
  misc_RNA (1)...(19): siRNA sense strand
cagaaacagcaguauuuga

SEQ ID NO: 186745 - RNA, 19 nt, Homo sapiens
  misc_RNA (1)...(19): siRNA sense strand
gggcacagaaccugauaug

SEQ ID NO: 186746 - RNA, 19 nt, Homo sapiens
  misc_RNA (1)...(19): siRNA sense strand
cugcagacauauauugugu

SEQ ID NO: 186747 - RNA, 19 nt, Homo sapiens
  misc_RNA (1)...(19): siRNA sense strand
uccuaauccugauguauuu

SEQ ID NO: 186748 - RNA, 19 nt, Homo sapiens
  misc_RNA (1)...(19): siRNA sense strand
gggacuuucucaucuucaa

SEQ ID NO: 186749 - RNA, 19 nt, Homo sapiens
  misc_RNA (1)...(19): siRNA sense strand
gagcucuguugggauguuu

SEQ ID NO: 186750 - RNA, 19 nt, Homo sapiens
  misc_RNA (1)...(19): siRNA sense strand
gaaaacaggcuagaaaauc

SEQ ID NO: 186751 - RNA, 19 nt, Homo sapiens
  misc_RNA (1)...(19): siRNA sense strand
gccuacaacaagauaaaua

SEQ ID NO: 186752 - RNA, 19 nt, Homo sapiens
  misc_RNA (1)...(19): siRNA sense strand
agccaggccuucucuuuga

SEQ ID NO: 186753 - RNA, 19 nt, Homo sapiens
  misc_RNA (1)...(19): siRNA sense strand
aaacauggugcuggagaua

SEQ ID NO: 186754 - RNA, 19 nt, Homo sapiens
  misc_RNA (1)...(19): siRNA sense strand
uuccaucuguuugaacuua

SEQ ID NO: 186755 - RNA, 19 nt, Homo sapiens
  misc_RNA (1)...(19): siRNA sense strand
caucagaggcuuuguacag

SEQ ID NO: 186756 - RNA, 19 nt, Homo sapiens
  misc_RNA (1)...(19): siRNA sense strand
gaaccugauauguacaaau

SEQ ID NO: 186757 - RNA, 19 nt, Homo sapiens
  misc_RNA (1)...(19): siRNA sense strand
gagaccaccuggaccuucu

SEQ ID NO: 186758 - RNA, 19 nt, Homo sapiens
  misc_RNA (1)...(19): siRNA sense strand
gcuccuagcuccuaauccu

SEQ ID NO: 186759 - RNA, 19 nt, Homo sapiens
  misc_RNA (1)...(19): siRNA sense strand
gggaaacugagcucuguug

SEQ ID NO: 186760 - RNA, 19 nt, Homo sapiens
  misc_RNA (1)...(19): siRNA sense strand
ggagauacuagauguuucu

SEQ ID NO: 186761 - RNA, 19 nt, Homo sapiens
  misc_RNA (1)...(19): siRNA sense strand
gaguggcaauaaacuagug

SEQ ID NO: 186762 - RNA, 19 nt, Homo sapiens
  misc_RNA (1)...(19): siRNA sense strand
gaaacaucaauccaucaga

SEQ ID NO: 186763 - RNA, 19 nt, Homo sapiens
  misc_RNA (1)...(19): siRNA sense strand
ggaaaggacucuauuacuu

SEQ ID NO: 186764 - RNA, 19 nt, Homo sapiens
  misc_RNA (1)...(19): siRNA sense strand
ggaaaggucuggccugauu

SEQ ID NO: 186765 - RNA, 19 nt, Homo sapiens
  misc_RNA (1)...(19): siRNA sense strand
gaaauucgccggaagagua

SEQ ID NO: 186766 - RNA, 19 nt, Homo sapiens
  misc_RNA (1)...(19): siRNA sense strand
gagaggagcuugaaguuug

SEQ ID NO: 186767 - RNA, 19 nt, Homo sapiens
  misc_RNA (1)...(19): siRNA sense strand
ggacuucacuuaugauuca

SEQ ID NO: 186768 - RNA, 19 nt, Homo sapiens
  misc_RNA (1)...(19): siRNA sense strand
gaauggagcauaaagauaa

SEQ ID NO: 186769 - RNA, 19 nt, Homo sapiens
  misc_RNA (1)...(19): siRNA sense strand
cagcacagcucccuuauga

SEQ ID NO: 186770 - RNA, 19 nt, Homo sapiens
  misc_RNA (1)...(19): siRNA sense strand
caacaaaggccacauguga

SEQ ID NO: 186771 - RNA, 19 nt, Homo sapiens
  misc_RNA (1)...(19): siRNA sense strand
ccagaaaugucacugcaua

SEQ ID NO: 186772 - RNA, 19 nt, Homo sapiens
  misc_RNA (1)...(19): siRNA sense strand
ucagugauguucaguauaa

SEQ ID NO: 186773 - RNA, 19 nt, Homo sapiens
  misc_RNA (1)...(19): siRNA sense strand
gaagcaauguugacaaugu

SEQ ID NO: 186774 - RNA, 19 nt, Homo sapiens
  misc_RNA (1)...(19): siRNA sense strand
ggaugaaggugcagagaaa

SEQ ID NO: 186775 - RNA, 19 nt, Homo sapiens
  misc_RNA (1)...(19): siRNA sense strand
gcaaugagacacagccuua

SEQ ID NO: 186776 - RNA, 19 nt, Homo sapiens
  misc_RNA (1)...(19): siRNA sense strand
gcaaguuguucaagaauau

SEQ ID NO: 186777 - RNA, 19 nt, Homo sapiens
  misc_RNA (1)...(19): siRNA sense strand
gaacagcaaugccauggau

SEQ ID NO: 186778 - RNA, 19 nt, Homo sapiens
  misc_RNA (1)...(19): siRNA sense strand
gaaaugcugcugcuucuuu

SEQ ID NO: 186779 - RNA, 19 nt, Homo sapiens
  misc_RNA (1)...(19): siRNA sense strand
caacaacucuuccucaagu

SEQ ID NO: 186780 - RNA, 19 nt, Homo sapiens
  misc_RNA (1)...(19): siRNA sense strand
caacacaaaugcaggauuc

SEQ ID NO: 186781 - RNA, 19 nt, Homo sapiens
  misc_RNA (1)...(19): siRNA sense strand
ccacaaacaaccuaaauaa

SEQ ID NO: 186782 - RNA, 19 nt, Homo sapiens
  misc_RNA (1)...(19): siRNA sense strand
uuacgaauauggaaccuua

SEQ ID NO: 186783 - RNA, 19 nt, Homo sapiens
  misc_RNA (1)...(19): siRNA sense strand
gaaaggacucuauuacuug

SEQ ID NO: 186784 - RNA, 19 nt, Homo sapiens
  misc_RNA (1)...(19): siRNA sense strand
aaacugggcuacauugaaa

SEQ ID NO: 186785 - RNA, 19 nt, Homo sapiens
  misc_RNA (1)...(19): siRNA sense strand
ggaggaaccuagcaauguu

SEQ ID NO: 186786 - RNA, 19 nt, Homo sapiens
  misc_RNA (1)...(19): siRNA sense strand
gcaaagcauugauaccuau

SEQ ID NO: 186787 - RNA, 19 nt, Homo sapiens
  misc_RNA (1)...(19): siRNA sense strand
gauggcauguggauugaua

SEQ ID NO: 186788 - RNA, 19 nt, Homo sapiens
  misc_RNA (1)...(19): siRNA sense strand
gaagaacuauacaacaauc

SEQ ID NO: 186789 - RNA, 19 nt, Homo sapiens
  misc_RNA (1)...(19): siRNA sense strand
gcacugaacacccacuuaa

SEQ ID NO: 186790 - RNA, 19 nt, Homo sapiens
  misc_RNA (1)...(19): siRNA sense strand
cagaauaucagacaucuaa

SEQ ID NO: 186791 - RNA, 19 nt, Homo sapiens
  misc_RNA (1)...(19): siRNA sense strand
gcauaaagauaagggauga

SEQ ID NO: 186792 - RNA, 19 nt, Homo sapiens
  misc_RNA (1)...(19): siRNA sense strand
gaaacggaacuaauuugua

SEQ ID NO: 186793 - RNA, 19 nt, Homo sapiens
  misc_RNA (1)...(19): siRNA sense strand
ggacauagacagucaguuc

SEQ ID NO: 186794 - RNA, 19 nt, Homo sapiens
  misc_RNA (1)...(19): siRNA sense strand
ccagggagcuguaaguguu

SEQ ID NO: 186795 - RNA, 19 nt, Homo sapiens
  misc_RNA (1)...(19): siRNA sense strand
gcauguggauugauaugaa

SEQ ID NO: 186796 - RNA, 19 nt, Homo sapiens
  misc_RNA (1)...(19): siRNA sense strand
ucaacgaguuacacaauaa

SEQ ID NO: 186797 - RNA, 19 nt, Homo sapiens
  misc_RNA (1)...(19): siRNA sense strand
gcacagcucccuuaugaug

SEQ ID NO: 186798 - RNA, 19 nt, Homo sapiens
  misc_RNA (1)...(19): siRNA sense strand
uaucagacaucuaaucguu

SEQ ID NO: 186799 - RNA, 19 nt, Homo sapiens
  misc_RNA (1)...(19): siRNA sense strand
ucuaaucguuuccacuuua

SEQ ID NO: 186800 - RNA, 19 nt, Homo sapiens
  misc_RNA (1)...(19): siRNA sense strand
cagcugacaucuccuuaaa

SEQ ID NO: 186801 - RNA, 19 nt, Homo sapiens
  misc_RNA (1)...(19): siRNA sense strand
ggaauggagcauaaagaua

SEQ ID NO: 186802 - RNA, 19 nt, Homo sapiens
  misc_RNA (1)...(19): siRNA sense strand
guaaaugaauuggaacgaa

SEQ ID NO: 186803 - RNA, 19 nt, Homo sapiens
  misc_RNA (1)...(19): siRNA sense strand
caacaagaaucgguaugaa

SEQ ID NO: 186804 - RNA, 19 nt, Homo sapiens
  misc_RNA (1)...(19): siRNA sense strand
ccaagacuguguucccuaa

SEQ ID NO: 186805 - RNA, 19 nt, Homo sapiens
  misc_RNA (1)...(19): siRNA sense strand
gggaaacacuccagagcaa

SEQ ID NO: 186806 - RNA, 19 nt, Homo sapiens
  misc_RNA (1)...(19): siRNA sense strand
gggaucagcugaagaaguc

SEQ ID NO: 186807 - RNA, 19 nt, Homo sapiens
  misc_RNA (1)...(19): siRNA sense strand
gaagagggaaauagaagaa

SEQ ID NO: 186808 - RNA, 19 nt, Homo sapiens
  misc_RNA (1)...(19): siRNA sense strand
gcugacaucuccuuaaagu

SEQ ID NO: 186809 - RNA, 19 nt, Homo sapiens
  misc_RNA (1)...(19): siRNA sense strand
gcuaguggauuguccuuug

SEQ ID NO: 186810 - RNA, 19 nt, Homo sapiens
  misc_RNA (1)...(19): siRNA sense strand
gaaacugggcuacauugaa

SEQ ID NO: 186811 - RNA, 19 nt, Homo sapiens
  misc_RNA (1)...(19): siRNA sense strand
uuacaucacugguacaaau

SEQ ID NO: 186812 - RNA, 19 nt, Homo sapiens
  misc_RNA (1)...(19): siRNA sense strand
gaugcacccuguugccaua

SEQ ID NO: 186813 - RNA, 19 nt, Homo sapiens
  misc_RNA (1)...(19): siRNA sense strand
gcaagacucucuguaugga

SEQ ID NO: 186814 - RNA, 19 nt, Homo sapiens
  misc_RNA (1)...(19): siRNA sense strand
ggauugauaugaaugaagu

SEQ ID NO: 186815 - RNA, 19 nt, Homo sapiens
  misc_RNA (1)...(19): siRNA sense strand
gaagaccuggcccauauuu

SEQ ID NO: 186816 - RNA, 19 nt, Homo sapiens
  misc_RNA (1)...(19): siRNA sense strand
gauuucaccucagucguua

SEQ ID NO: 186817 - RNA, 19 nt, Homo sapiens
  misc_RNA (1)...(19): siRNA sense strand
gcgcagacauucuucuugu

SEQ ID NO: 186818 - RNA, 19 nt, Homo sapiens
  misc_RNA (1)...(19): siRNA sense strand
ggcaugauaugaauuggaa

SEQ ID NO: 186819 - RNA, 19 nt, Homo sapiens
  misc_RNA (1)...(19): siRNA sense strand
uggaagaccuggcccauau

SEQ ID NO: 186820 - RNA, 19 nt, Homo sapiens
  misc_RNA (1)...(19): siRNA sense strand
caacagcacuugggaugug

SEQ ID NO: 186821 - RNA, 19 nt, Homo sapiens
  misc_RNA (1)...(19): siRNA sense strand
gcaagagccugcacugaac

SEQ ID NO: 186822 - RNA, 19 nt, Homo sapiens
  misc_RNA (1)...(19): siRNA sense strand
ugacugaccaaaccaauaa

SEQ ID NO: 186823 - RNA, 19 nt, Homo sapiens
  misc_RNA (1)...(19): siRNA sense strand
ggcaaagcauugauaccua

SEQ ID NO: 186824 - RNA, 19 nt, Homo sapiens
  misc_RNA (1)...(19): siRNA sense strand
cugaagaagucuaucauug

SEQ ID NO: 186825 - RNA, 19 nt, Homo sapiens
  misc_RNA (1)...(19): siRNA sense strand
gcaaugccauggagguugu

SEQ ID NO: 186826 - RNA, 19 nt, Homo sapiens
  misc_RNA (1)...(19): siRNA sense strand
ugaagaugcuaguggauug

SEQ ID NO: 186827 - RNA, 19 nt, Homo sapiens
  misc_RNA (1)...(19): siRNA sense strand
agaaacaucagccuacaua

SEQ ID NO: 186828 - RNA, 19 nt, Homo sapiens
  misc_RNA (1)...(19): siRNA sense strand
gaugguggcugcccagauc

SEQ ID NO: 186829 - RNA, 19 nt, Homo sapiens
  misc_RNA (1)...(19): siRNA sense strand
agacuguguucccuaauaa

SEQ ID NO: 186830 - RNA, 19 nt, Homo sapiens
  misc_RNA (1)...(19): siRNA sense strand
agacacaacucccaaugga

SEQ ID NO: 186831 - RNA, 19 nt, Homo sapiens
  misc_RNA (1)...(19): siRNA sense strand
gaaauucaugggcuucaaa

SEQ ID NO: 186832 - RNA, 19 nt, Homo sapiens
  misc_RNA (1)...(19): siRNA sense strand
agaaugaaaugccgcaguu

SEQ ID NO: 186833 - RNA, 19 nt, Homo sapiens
  misc_RNA (1)...(19): siRNA sense strand
gcuuggaggugaauauuuc

SEQ ID NO: 186834 - RNA, 19 nt, Homo sapiens
  misc_RNA (1)...(19): siRNA sense strand
caaacaaccuaaauaaucc

SEQ ID NO: 186835 - RNA, 19 nt, Homo sapiens
  misc_RNA (1)...(19): siRNA sense strand
gaugcaaagccauauaauu

SEQ ID NO: 186836 - RNA, 19 nt, Homo sapiens
  misc_RNA (1)...(19): siRNA sense strand
cuguauaccuugaugcaua

SEQ ID NO: 186837 - RNA, 19 nt, Homo sapiens
  misc_RNA (1)...(19): siRNA sense strand
ggccugugaugguaccuua

SEQ ID NO: 186838 - RNA, 19 nt, Homo sapiens
  misc_RNA (1)...(19): siRNA sense strand
gaacaaagaagcaaaagga

SEQ ID NO: 186839 - RNA, 19 nt, Homo sapiens
  misc_RNA (1)...(19): siRNA sense strand
ccauuuagcaucaaaguga

SEQ ID NO: 186840 - RNA, 19 nt, Homo sapiens
  misc_RNA (1)...(19): siRNA sense strand
gcacauugguuaggagaca

SEQ ID NO: 186841 - RNA, 19 nt, Homo sapiens
  misc_RNA (1)...(19): siRNA sense strand
uaaaggcuucccugaauuu

SEQ ID NO: 186842 - RNA, 19 nt, Homo sapiens
  misc_RNA (1)...(19): siRNA sense strand
agacagccauuuagcauca

SEQ ID NO: 186843 - RNA, 19 nt, Homo sapiens
  misc_RNA (1)...(19): siRNA sense strand
caagaagaauuccuauggu

SEQ ID NO: 186844 - RNA, 19 nt, Homo sapiens
  misc_RNA (1)...(19): siRNA sense strand
gucaacgaguuacacaaua

SEQ ID NO: 186845 - RNA, 19 nt, Homo sapiens
  misc_RNA (1)...(19): siRNA sense strand
gcgcagcacagcucccuua

SEQ ID NO: 186846 - RNA, 19 nt, Homo sapiens
  misc_RNA (1)...(19): siRNA sense strand
gggaagucguggagagaaa

SEQ ID NO: 186847 - RNA, 19 nt, Homo sapiens
  misc_RNA (1)...(19): siRNA sense strand
ggaaacggaacuaauuugu

SEQ ID NO: 186848 - RNA, 19 nt, Homo sapiens
  misc_RNA (1)...(19): siRNA sense strand
gaacaacugguaccacaca

SEQ ID NO: 186849 - RNA, 19 nt, Homo sapiens
  misc_RNA (1)...(19): siRNA sense strand
acaguggaauggagcauaa

SEQ ID NO: 186850 - RNA, 19 nt, Homo sapiens
  misc_RNA (1)...(19): siRNA sense strand
aagacuguguucccuaaua

SEQ ID NO: 186851 - RNA, 19 nt, Homo sapiens
  misc_RNA (1)...(19): siRNA sense strand
cgacuucuauguguucuug

SEQ ID NO: 186852 - RNA, 19 nt, Homo sapiens
  misc_RNA (1)...(19): siRNA sense strand
aaugguggguccugacaua

SEQ ID NO: 186853 - RNA, 19 nt, Homo sapiens
  misc_RNA (1)...(19): siRNA sense strand
ccacuuaagccgccagaaa

SEQ ID NO: 186854 - RNA, 19 nt, Homo sapiens
  misc_RNA (1)...(19): siRNA sense strand
gaaaugccgcaguucaaga

SEQ ID NO: 186855 - RNA, 19 nt, Homo sapiens
  misc_RNA (1)...(19): siRNA sense strand
gaggaaccuagcaauguua

SEQ ID NO: 186856 - RNA, 19 nt, Homo sapiens
  misc_RNA (1)...(19): siRNA sense strand
uuuaaaggcuucccugaau

SEQ ID NO: 186857 - RNA, 19 nt, Homo sapiens
  misc_RNA (1)...(19): siRNA sense strand
gaaacaucagccuacauaa

SEQ ID NO: 186858 - RNA, 19 nt, Homo sapiens
  misc_RNA (1)...(19): siRNA sense strand
ggcaagagccugcacugaa

SEQ ID NO: 186859 - RNA, 19 nt, Homo sapiens
  misc_RNA (1)...(19): siRNA sense strand
gugaauauuuccagaacug

SEQ ID NO: 186860 - RNA, 19 nt, Homo sapiens
  misc_RNA (1)...(19): siRNA sense strand
gccaaagagucacugaaau

SEQ ID NO: 186861 - RNA, 19 nt, Homo sapiens
  misc_RNA (1)...(19): siRNA sense strand
ucaacgaccuauacucugu

SEQ ID NO: 186862 - RNA, 19 nt, Homo sapiens
  misc_RNA (1)...(19): siRNA sense strand
aaagauaagggaugaagaa

SEQ ID NO: 186863 - RNA, 19 nt, Homo sapiens
  misc_RNA (1)...(19): siRNA sense strand
ggacagaccuggagaacga

SEQ ID NO: 186864 - RNA, 19 nt, Homo sapiens
  misc_RNA (1)...(19): siRNA sense strand
gcacugaccucaagauugg

SEQ ID NO: 186865 - RNA, 19 nt, Homo sapiens
  misc_RNA (1)...(19): siRNA sense strand
cgaggacgaugacugcuua

SEQ ID NO: 186866 - RNA, 19 nt, Homo sapiens
  misc_RNA (1)...(19): siRNA sense strand
gaagaugagcuccauauag

SEQ ID NO: 186867 - RNA, 19 nt, Homo sapiens
  misc_RNA (1)...(19): siRNA sense strand
gcaauaagaccaucucagu

SEQ ID NO: 186868 - RNA, 19 nt, Homo sapiens
  misc_RNA (1)...(19): siRNA sense strand
caacaacccacaugacauu

SEQ ID NO: 186869 - RNA, 19 nt, Homo sapiens
  misc_RNA (1)...(19): siRNA sense strand
cauuaagccuugaagauga

SEQ ID NO: 186870 - RNA, 19 nt, Homo sapiens
  misc_RNA (1)...(19): siRNA sense strand
ggacugacucgggcaauaa

SEQ ID NO: 186871 - RNA, 19 nt, Homo sapiens
  misc_RNA (1)...(19): siRNA sense strand
gaaaacaacagaagaagaa

SEQ ID NO: 186872 - RNA, 19 nt, Homo sapiens
  misc_RNA (1)...(19): siRNA sense strand
gcaaaugaagacaguaaga

SEQ ID NO: 186873 - RNA, 19 nt, Homo sapiens
  misc_RNA (1)...(19): siRNA sense strand
gcauuaagccuugaagaug

SEQ ID NO: 186874 - RNA, 19 nt, Homo sapiens
  misc_RNA (1)...(19): siRNA sense strand
gcucacacaucugcacuga

SEQ ID NO: 186875 - RNA, 19 nt, Homo sapiens
  misc_RNA (1)...(19): siRNA sense strand
agggagaacugcucagauu

SEQ ID NO: 186876 - RNA, 19 nt, Homo sapiens
  misc_RNA (1)...(19): siRNA sense strand
aagaugggcucaacaguca

SEQ ID NO: 186877 - RNA, 19 nt, Homo sapiens
  misc_RNA (1)...(19): siRNA sense strand
aagaugagcuccauauagg

SEQ ID NO: 186878 - RNA, 19 nt, Homo sapiens
  misc_RNA (1)...(19): siRNA sense strand
ccagaucugugucaauuac

SEQ ID NO: 186879 - RNA, 19 nt, Homo sapiens
  misc_RNA (1)...(19): siRNA sense strand
ccuugaagaugauggacua

SEQ ID NO: 186880 - RNA, 19 nt, Homo sapiens
  misc_RNA (1)...(19): siRNA sense strand
gaacgagugucugcacaac

SEQ ID NO: 186881 - RNA, 19 nt, Homo sapiens
  misc_RNA (1)...(19): siRNA sense strand
ucaauuacaagggcuauuu

SEQ ID NO: 186882 - RNA, 19 nt, Homo sapiens
  misc_RNA (1)...(19): siRNA sense strand
caucugcacugaccucaag

SEQ ID NO: 186883 - RNA, 19 nt, Homo sapiens
  misc_RNA (1)...(19): siRNA sense strand
ggcacuagauguggaaguu

SEQ ID NO: 186884 - RNA, 19 nt, Homo sapiens
  misc_RNA (1)...(19): siRNA sense strand
gaacuauucacgccucauc

SEQ ID NO: 186885 - RNA, 19 nt, Homo sapiens
  misc_RNA (1)...(19): siRNA sense strand
caaggccagugacccgaaa

SEQ ID NO: 186886 - RNA, 19 nt, Homo sapiens
  misc_RNA (1)...(19): siRNA sense strand
aagaagaccugugcagaca

SEQ ID NO: 186887 - RNA, 19 nt, Homo sapiens
  misc_RNA (1)...(19): siRNA sense strand
gagccacccuuuugggaua

SEQ ID NO: 186888 - RNA, 19 nt, Homo sapiens
  misc_RNA (1)...(19): siRNA sense strand
gagcccaucccuaaucuuc

SEQ ID NO: 186889 - RNA, 19 nt, Homo sapiens
  misc_RNA (1)...(19): siRNA sense strand
agccagaucugugucaauu

SEQ ID NO: 186890 - RNA, 19 nt, Homo sapiens
  misc_RNA (1)...(19): siRNA sense strand
ggagaacugcucagauugg

SEQ ID NO: 186891 - RNA, 19 nt, Homo sapiens
  misc_RNA (1)...(19): siRNA sense strand
gaucaucgugcccauagug

SEQ ID NO: 186892 - RNA, 19 nt, Homo sapiens
  misc_RNA (1)...(19): siRNA sense strand
ucaauggccuggaaaucuc

SEQ ID NO: 186893 - RNA, 19 nt, Homo sapiens
  misc_RNA (1)...(19): siRNA sense strand
uaauggaggcugugaauac

SEQ ID NO: 186894 - RNA, 19 nt, Homo sapiens
  misc_RNA (1)...(19): siRNA sense strand
caaaugaagacaguaagau

SEQ ID NO: 186895 - RNA, 19 nt, Homo sapiens
  misc_RNA (1)...(19): siRNA sense strand
acgagugucugcacaacaa

SEQ ID NO: 186896 - RNA, 19 nt, Homo sapiens
  misc_RNA (1)...(19): siRNA sense strand
caacccagucuacaggaaa

SEQ ID NO: 186897 - RNA, 19 nt, Homo sapiens
  misc_RNA (1)...(19): siRNA sense strand
caagauuggcuuugaaugc

SEQ ID NO: 186898 - RNA, 19 nt, Homo sapiens
  misc_RNA (1)...(19): siRNA sense strand
cugcgaggguucauguauu

SEQ ID NO: 186899 - RNA, 19 nt, Homo sapiens
  misc_RNA (1)...(19): siRNA sense strand
gaccucuccuaccguaaga

SEQ ID NO: 186900 - RNA, 19 nt, Homo sapiens
  misc_RNA (1)...(19): siRNA sense strand
gggaccaggccaagauuga

SEQ ID NO: 186901 - RNA, 19 nt, Homo sapiens
  misc_RNA (1)...(19): siRNA sense strand
ugcgaggguucauguauug

SEQ ID NO: 186902 - RNA, 19 nt, Homo sapiens
  misc_RNA (1)...(19): siRNA sense strand
ggaagcggaagaacaccaa

SEQ ID NO: 186903 - RNA, 19 nt, Homo sapiens
  misc_RNA (1)...(19): siRNA sense strand
ggcauuaagccuugaagau

SEQ ID NO: 186904 - RNA, 19 nt, Homo sapiens
  misc_RNA (1)...(19): siRNA sense strand
ucagauuggccaugucuau

SEQ ID NO: 186905 - RNA, 19 nt, Homo sapiens
  misc_RNA (1)...(19): siRNA sense strand
gcagccagaucugugucaa

SEQ ID NO: 186906 - RNA, 19 nt, Homo sapiens
  misc_RNA (1)...(19): siRNA sense strand
aaaugaagacaguaagaug

SEQ ID NO: 186907 - RNA, 19 nt, Homo sapiens
  misc_RNA (1)...(19): siRNA sense strand
uggacugacucgggcaaua

SEQ ID NO: 186908 - RNA, 19 nt, Homo sapiens
  misc_RNA (1)...(19): siRNA sense strand
gcacucucuucagccguaa

SEQ ID NO: 186909 - RNA, 19 nt, Homo sapiens
  misc_RNA (1)...(19): siRNA sense strand
gggagaacugcucagauug

SEQ ID NO: 186910 - RNA, 19 nt, Homo sapiens
  misc_RNA (1)...(19): siRNA sense strand
aaacaacagaagaagaaga

SEQ ID NO: 186911 - RNA, 19 nt, Homo sapiens
  misc_RNA (1)...(19): siRNA sense strand
cagccacucucccaaguac

SEQ ID NO: 186912 - RNA, 19 nt, Homo sapiens
  misc_RNA (1)...(19): siRNA sense strand
aagauuggcuuugaaugca

SEQ ID NO: 186913 - RNA, 19 nt, Homo sapiens
  misc_RNA (1)...(19): siRNA sense strand
ugauagcccuccugugcau

SEQ ID NO: 186914 - RNA, 19 nt, Homo sapiens
  misc_RNA (1)...(19): siRNA sense strand
ugggauagcuguguuugag

SEQ ID NO: 186915 - RNA, 19 nt, Homo sapiens
  misc_RNA (1)...(19): siRNA sense strand
gaucuccuccacugacuuc

SEQ ID NO: 186916 - RNA, 19 nt, Homo sapiens
  misc_RNA (1)...(19): siRNA sense strand
gaccaggccaagauugaga

SEQ ID NO: 186917 - RNA, 19 nt, Homo sapiens
  misc_RNA (1)...(19): siRNA sense strand
gaucuauagcgccuacaug

SEQ ID NO: 186918 - RNA, 19 nt, Homo sapiens
  misc_RNA (1)...(19): siRNA sense strand
ccaccaaucgcaucuacug

SEQ ID NO: 186919 - RNA, 19 nt, Homo sapiens
  misc_RNA (1)...(19): siRNA sense strand
agauggaccuacugaccaa

SEQ ID NO: 186920 - RNA, 19 nt, Homo sapiens
  misc_RNA (1)...(19): siRNA sense strand
caagggcuauuuuaagugu

SEQ ID NO: 186921 - RNA, 19 nt, Homo sapiens
  misc_RNA (1)...(19): siRNA sense strand
ggacgaugacugcuuagac

SEQ ID NO: 186922 - RNA, 19 nt, Homo sapiens
  misc_RNA (1)...(19): siRNA sense strand
gccagaucugugucaauua

SEQ ID NO: 186923 - RNA, 19 nt, Homo sapiens
  misc_RNA (1)...(19): siRNA sense strand
ccugauggcuccgaugagu

SEQ ID NO: 186924 - RNA, 19 nt, Homo sapiens
  misc_RNA (1)...(19): siRNA sense strand
gguguguccugcagagaag

SEQ ID NO: 186925 - RNA, 19 nt, Homo sapiens
  misc_RNA (1)...(19): siRNA sense strand
gggaucaucgugcccauag

SEQ ID NO: 186926 - RNA, 19 nt, Homo sapiens
  misc_RNA (1)...(19): siRNA sense strand
gcacuagauguggaaguug

SEQ ID NO: 186927 - RNA, 19 nt, Homo sapiens
  misc_RNA (1)...(19): siRNA sense strand
gaugcgacgaggacgauga

SEQ ID NO: 186928 - RNA, 19 nt, Homo sapiens
  misc_RNA (1)...(19): siRNA sense strand
ggaaaacaacagaagaaga

SEQ ID NO: 186929 - RNA, 19 nt, Homo sapiens
  misc_RNA (1)...(19): siRNA sense strand
ggacccaccagccacaagu

SEQ ID NO: 186930 - RNA, 19 nt, Homo sapiens
  misc_RNA (1)...(19): siRNA sense strand
gaagcggaagaacaccaaa

SEQ ID NO: 186931 - RNA, 19 nt, Homo sapiens
  misc_RNA (1)...(19): siRNA sense strand
gagcuccagaugccuguga

SEQ ID NO: 186932 - RNA, 19 nt, Homo sapiens
  misc_RNA (1)...(19): siRNA sense strand
gucagacaauauugaaugg

SEQ ID NO: 186933 - RNA, 19 nt, Homo sapiens
  misc_RNA (1)...(19): siRNA sense strand
agaucugugucaauuacaa

SEQ ID NO: 186934 - RNA, 19 nt, Homo sapiens
  misc_RNA (1)...(19): siRNA sense strand
acaacccagucuacaggaa

SEQ ID NO: 186935 - RNA, 19 nt, Homo sapiens
  misc_RNA (1)...(19): siRNA sense strand
gaggacgacugccccaaga

SEQ ID NO: 186936 - RNA, 19 nt, Homo sapiens
  misc_RNA (1)...(19): siRNA sense strand
cuaauggaggcugugaaua

SEQ ID NO: 186937 - RNA, 19 nt, Homo sapiens
  misc_RNA (1)...(19): siRNA sense strand
ccuaauggaggcugugaau

SEQ ID NO: 186938 - RNA, 19 nt, Homo sapiens
  misc_RNA (1)...(19): siRNA sense strand
uagcuguguuugaggacaa

SEQ ID NO: 186939 - RNA, 19 nt, Homo sapiens
  misc_RNA (1)...(19): siRNA sense strand
caacagaaagacgcugauc

SEQ ID NO: 186940 - RNA, 19 nt, Homo sapiens
  misc_RNA (1)...(19): siRNA sense strand
caacggaaucacccuggau

SEQ ID NO: 186941 - RNA, 19 nt, Homo sapiens
  misc_RNA (1)...(19): siRNA sense strand
acaguaagaugggcucaac

SEQ ID NO: 186942 - RNA, 19 nt, Homo sapiens
  misc_RNA (1)...(19): siRNA sense strand
gaaccucaacaacccacau

SEQ ID NO: 186943 - RNA, 19 nt, Homo sapiens
  misc_RNA (1)...(19): siRNA sense strand
uacaagggcuauuuuaagu

SEQ ID NO: 186944 - RNA, 19 nt, Homo sapiens
  misc_RNA (1)...(19): siRNA sense strand
cagccaagagcuccagaug

SEQ ID NO: 186945 - RNA, 19 nt, Homo sapiens
  misc_RNA (1)...(19): siRNA sense strand
acagaaagacgcugaucuc

SEQ ID NO: 186946 - RNA, 19 nt, Homo sapiens
  misc_RNA (1)...(19): siRNA sense strand
gaauggcccaacggaauca

SEQ ID NO: 186947 - RNA, 19 nt, Homo sapiens
  misc_RNA (1)...(19): siRNA sense strand
uggugaagcggaacuauuc

SEQ ID NO: 186948 - RNA, 19 nt, Homo sapiens
  misc_RNA (1)...(19): siRNA sense strand
gaggaucgaccuggugaag

SEQ ID NO: 186949 - RNA, 19 nt, Homo sapiens
  misc_RNA (1)...(19): siRNA sense strand
gagaugcgacgaggacgau

SEQ ID NO: 186950 - RNA, 19 nt, Homo sapiens
  misc_RNA (1)...(19): siRNA sense strand
aauggcggcugcucacaca

SEQ ID NO: 186951 - RNA, 19 nt, Homo sapiens
  misc_RNA (1)...(19): siRNA sense strand
ccagccacucucccaagua

SEQ ID NO: 186952 - RNA, 19 nt, Homo sapiens
  misc_RNA (1)...(19): siRNA sense strand
gcucaauggccuggaaauc

SEQ ID NO: 186953 - RNA, 19 nt, Homo sapiens
  misc_RNA (1)...(19): siRNA sense strand
ucaguggaggcaacagaaa

SEQ ID NO: 186954 - RNA, 19 nt, Homo sapiens
  misc_RNA (1)...(19): siRNA sense strand
ugaauggcccaacggaauc

SEQ ID NO: 186955 - RNA, 19 nt, Homo sapiens
  misc_RNA (1)...(19): siRNA sense strand
ucuccuaccguaagaucua

SEQ ID NO: 186956 - RNA, 19 nt, Homo sapiens
  misc_RNA (1)...(19): siRNA sense strand
cuggguagacuccaagcua

SEQ ID NO: 186957 - RNA, 19 nt, Homo sapiens
  misc_RNA (1)...(19): siRNA sense strand
gcucagauuggccaugucu

SEQ ID NO: 186958 - RNA, 19 nt, Homo sapiens
  misc_RNA (1)...(19): siRNA sense strand
guaagaugggcucaacagu

SEQ ID NO: 186959 - RNA, 19 nt, Homo sapiens
  misc_RNA (1)...(19): siRNA sense strand
ggacagaccuggagaacga

SEQ ID NO: 186960 - RNA, 19 nt, Homo sapiens
  misc_RNA (1)...(19): siRNA sense strand
gcacugaccucaagauugg

SEQ ID NO: 186961 - RNA, 19 nt, Homo sapiens
  misc_RNA (1)...(19): siRNA sense strand
cgaggacgaugacugcuua

SEQ ID NO: 186962 - RNA, 19 nt, Homo sapiens
  misc_RNA (1)...(19): siRNA sense strand
gaagaugagcuccauauag

SEQ ID NO: 186963 - RNA, 19 nt, Homo sapiens
  misc_RNA (1)...(19): siRNA sense strand
gcaauaagaccaucucagu

SEQ ID NO: 186964 - RNA, 19 nt, Homo sapiens
  misc_RNA (1)...(19): siRNA sense strand
caacaacccacaugacauu

SEQ ID NO: 186965 - RNA, 19 nt, Homo sapiens
  misc_RNA (1)...(19): siRNA sense strand
cauuaagccuugaagauga

SEQ ID NO: 186966 - RNA, 19 nt, Homo sapiens
  misc_RNA (1)...(19): siRNA sense strand
ggacugacucgggcaauaa

SEQ ID NO: 186967 - RNA, 19 nt, Homo sapiens
  misc_RNA (1)...(19): siRNA sense strand
gaaaacaacagaagaagaa

SEQ ID NO: 186968 - RNA, 19 nt, Homo sapiens
  misc_RNA (1)...(19): siRNA sense strand
gcaaaugaagacaguaaga

SEQ ID NO: 186969 - RNA, 19 nt, Homo sapiens
  misc_RNA (1)...(19): siRNA sense strand
gcauuaagccuugaagaug

SEQ ID NO: 186970 - RNA, 19 nt, Homo sapiens
  misc_RNA (1)...(19): siRNA sense strand
gcucacacaucugcacuga

SEQ ID NO: 186971 - RNA, 19 nt, Homo sapiens
  misc_RNA (1)...(19): siRNA sense strand
agggagaacugcucagauu

SEQ ID NO: 186972 - RNA, 19 nt, Homo sapiens
  misc_RNA (1)...(19): siRNA sense strand
aagaugggcucaacaguca

SEQ ID NO: 186973 - RNA, 19 nt, Homo sapiens
  misc_RNA (1)...(19): siRNA sense strand
aagaugagcuccauauagg

SEQ ID NO: 186974 - RNA, 19 nt, Homo sapiens
  misc_RNA (1)...(19): siRNA sense strand
ccagaucugugucaauuac

SEQ ID NO: 186975 - RNA, 19 nt, Homo sapiens
  misc_RNA (1)...(19): siRNA sense strand
ccuugaagaugauggacua

SEQ ID NO: 186976 - RNA, 19 nt, Homo sapiens
  misc_RNA (1)...(19): siRNA sense strand
gaacgagugucugcacaac

SEQ ID NO: 186977 - RNA, 19 nt, Homo sapiens
  misc_RNA (1)...(19): siRNA sense strand
ucaauuacaagggcuauuu

SEQ ID NO: 186978 - RNA, 19 nt, Homo sapiens
  misc_RNA (1)...(19): siRNA sense strand
caucugcacugaccucaag

SEQ ID NO: 186979 - RNA, 19 nt, Homo sapiens
  misc_RNA (1)...(19): siRNA sense strand
ggcacuagauguggaaguu

SEQ ID NO: 186980 - RNA, 19 nt, Homo sapiens
  misc_RNA (1)...(19): siRNA sense strand
gaacuauucacgccucauc

SEQ ID NO: 186981 - RNA, 19 nt, Homo sapiens
  misc_RNA (1)...(19): siRNA sense strand
caaggccagugacccgaaa

SEQ ID NO: 186982 - RNA, 19 nt, Homo sapiens
  misc_RNA (1)...(19): siRNA sense strand
aagaagaccugugcagaca

SEQ ID NO: 186983 - RNA, 19 nt, Homo sapiens
  misc_RNA (1)...(19): siRNA sense strand
gagccacccuuuugggaua

SEQ ID NO: 186984 - RNA, 19 nt, Homo sapiens
  misc_RNA (1)...(19): siRNA sense strand
gagcccaucccuaaucuuc

SEQ ID NO: 186985 - RNA, 19 nt, Homo sapiens
  misc_RNA (1)...(19): siRNA sense strand
agccagaucugugucaauu

SEQ ID NO: 186986 - RNA, 19 nt, Homo sapiens
  misc_RNA (1)...(19): siRNA sense strand
ggagaacugcucagauugg

SEQ ID NO: 186987 - RNA, 19 nt, Homo sapiens
  misc_RNA (1)...(19): siRNA sense strand
gaucaucgugcccauagug

SEQ ID NO: 186988 - RNA, 19 nt, Homo sapiens
  misc_RNA (1)...(19): siRNA sense strand
ucaauggccuggaaaucuc

SEQ ID NO: 186989 - RNA, 19 nt, Homo sapiens
  misc_RNA (1)...(19): siRNA sense strand
uaauggaggcugugaauac

SEQ ID NO: 186990 - RNA, 19 nt, Homo sapiens
  misc_RNA (1)...(19): siRNA sense strand
caaaugaagacaguaagau

SEQ ID NO: 186991 - RNA, 19 nt, Homo sapiens
  misc_RNA (1)...(19): siRNA sense strand
acgagugucugcacaacaa

SEQ ID NO: 186992 - RNA, 19 nt, Homo sapiens
  misc_RNA (1)...(19): siRNA sense strand
caacccagucuacaggaaa

SEQ ID NO: 186993 - RNA, 19 nt, Homo sapiens
  misc_RNA (1)...(19): siRNA sense strand
caagauuggcuuugaaugc

SEQ ID NO: 186994 - RNA, 19 nt, Homo sapiens
  misc_RNA (1)...(19): siRNA sense strand
cugcgaggguucauguauu

SEQ ID NO: 186995 - RNA, 19 nt, Homo sapiens
  misc_RNA (1)...(19): siRNA sense strand
gaccucuccuaccguaaga

SEQ ID NO: 186996 - RNA, 19 nt, Homo sapiens
  misc_RNA (1)...(19): siRNA sense strand
gggaccaggccaagauuga

SEQ ID NO: 186997 - RNA, 19 nt, Homo sapiens
  misc_RNA (1)...(19): siRNA sense strand
ugcgaggguucauguauug

SEQ ID NO: 186998 - RNA, 19 nt, Homo sapiens
  misc_RNA (1)...(19): siRNA sense strand
ggaagcggaagaacaccaa

SEQ ID NO: 186999 - RNA, 19 nt, Homo sapiens
  misc_RNA (1)...(19): siRNA sense strand
ggcauuaagccuugaagau

SEQ ID NO: 187000 - RNA, 19 nt, Homo sapiens
  misc_RNA (1)...(19): siRNA sense strand
ucagauuggccaugucuau

SEQ ID NO: 187001 - RNA, 19 nt, Homo sapiens
  misc_RNA (1)...(19): siRNA sense strand
gcagccagaucugugucaa

SEQ ID NO: 187002 - RNA, 19 nt, Homo sapiens
  misc_RNA (1)...(19): siRNA sense strand
aaaugaagacaguaagaug

SEQ ID NO: 187003 - RNA, 19 nt, Homo sapiens
  misc_RNA (1)...(19): siRNA sense strand
uggacugacucgggcaaua

SEQ ID NO: 187004 - RNA, 19 nt, Homo sapiens
  misc_RNA (1)...(19): siRNA sense strand
gcacucucuucagccguaa

SEQ ID NO: 187005 - RNA, 19 nt, Homo sapiens
  misc_RNA (1)...(19): siRNA sense strand
gggagaacugcucagauug

SEQ ID NO: 187006 - RNA, 19 nt, Homo sapiens
  misc_RNA (1)...(19): siRNA sense strand
aaacaacagaagaagaaga

SEQ ID NO: 187007 - RNA, 19 nt, Homo sapiens
  misc_RNA (1)...(19): siRNA sense strand
cagccacucucccaaguac

SEQ ID NO: 187008 - RNA, 19 nt, Homo sapiens
  misc_RNA (1)...(19): siRNA sense strand
aagauuggcuuugaaugca

SEQ ID NO: 187009 - RNA, 19 nt, Homo sapiens
  misc_RNA (1)...(19): siRNA sense strand
ugauagcccuccugugcau

SEQ ID NO: 187010 - RNA, 19 nt, Homo sapiens
  misc_RNA (1)...(19): siRNA sense strand
ugggauagcuguguuugag

SEQ ID NO: 187011 - RNA, 19 nt, Homo sapiens
  misc_RNA (1)...(19): siRNA sense strand
gaucuccuccacugacuuc

SEQ ID NO: 187012 - RNA, 19 nt, Homo sapiens
  misc_RNA (1)...(19): siRNA sense strand
gaccaggccaagauugaga

SEQ ID NO: 187013 - RNA, 19 nt, Homo sapiens
  misc_RNA (1)...(19): siRNA sense strand
gaucuauagcgccuacaug

SEQ ID NO: 187014 - RNA, 19 nt, Homo sapiens
  misc_RNA (1)...(19): siRNA sense strand
ccaccaaucgcaucuacug

SEQ ID NO: 187015 - RNA, 19 nt, Homo sapiens
  misc_RNA (1)...(19): siRNA sense strand
agauggaccuacugaccaa

SEQ ID NO: 187016 - RNA, 19 nt, Homo sapiens
  misc_RNA (1)...(19): siRNA sense strand
caagggcuauuuuaagugu

SEQ ID NO: 187017 - RNA, 19 nt, Homo sapiens
  misc_RNA (1)...(19): siRNA sense strand
ggacgaugacugcuuagac

SEQ ID NO: 187018 - RNA, 19 nt, Homo sapiens
  misc_RNA (1)...(19): siRNA sense strand
gccagaucugugucaauua

SEQ ID NO: 187019 - RNA, 19 nt, Homo sapiens
  misc_RNA (1)...(19): siRNA sense strand
ccugauggcuccgaugagu

SEQ ID NO: 187020 - RNA, 19 nt, Homo sapiens
  misc_RNA (1)...(19): siRNA sense strand
gguguguccugcagagaag

SEQ ID NO: 187021 - RNA, 19 nt, Homo sapiens
  misc_RNA (1)...(19): siRNA sense strand
gggaucaucgugcccauag

SEQ ID NO: 187022 - RNA, 19 nt, Homo sapiens
  misc_RNA (1)...(19): siRNA sense strand
gcacuagauguggaaguug

SEQ ID NO: 187023 - RNA, 19 nt, Homo sapiens
  misc_RNA (1)...(19): siRNA sense strand
gaugcgacgaggacgauga

SEQ ID NO: 187024 - RNA, 19 nt, Homo sapiens
  misc_RNA (1)...(19): siRNA sense strand
ggaaaacaacagaagaaga

SEQ ID NO: 187025 - RNA, 19 nt, Homo sapiens
  misc_RNA (1)...(19): siRNA sense strand
ggacccaccagccacaagu

SEQ ID NO: 187026 - RNA, 19 nt, Homo sapiens
  misc_RNA (1)...(19): siRNA sense strand
gaagcggaagaacaccaaa

SEQ ID NO: 187027 - RNA, 19 nt, Homo sapiens
  misc_RNA (1)...(19): siRNA sense strand
gagcuccagaugccuguga

SEQ ID NO: 187028 - RNA, 19 nt, Homo sapiens
  misc_RNA (1)...(19): siRNA sense strand
gucagacaauauugaaugg

SEQ ID NO: 187029 - RNA, 19 nt, Homo sapiens
  misc_RNA (1)...(19): siRNA sense strand
agaucugugucaauuacaa

SEQ ID NO: 187030 - RNA, 19 nt, Homo sapiens
  misc_RNA (1)...(19): siRNA sense strand
acaacccagucuacaggaa

SEQ ID NO: 187031 - RNA, 19 nt, Homo sapiens
  misc_RNA (1)...(19): siRNA sense strand
gaggacgacugccccaaga

SEQ ID NO: 187032 - RNA, 19 nt, Homo sapiens
  misc_RNA (1)...(19): siRNA sense strand
cuaauggaggcugugaaua

SEQ ID NO: 187033 - RNA, 19 nt, Homo sapiens
  misc_RNA (1)...(19): siRNA sense strand
ccuaauggaggcugugaau

SEQ ID NO: 187034 - RNA, 19 nt, Homo sapiens
  misc_RNA (1)...(19): siRNA sense strand
uagcuguguuugaggacaa

SEQ ID NO: 187035 - RNA, 19 nt, Homo sapiens
  misc_RNA (1)...(19): siRNA sense strand
caacagaaagacgcugauc

SEQ ID NO: 187036 - RNA, 19 nt, Homo sapiens
  misc_RNA (1)...(19): siRNA sense strand
caacggaaucacccuggau

SEQ ID NO: 187037 - RNA, 19 nt, Homo sapiens
  misc_RNA (1)...(19): siRNA sense strand
acaguaagaugggcucaac

SEQ ID NO: 187038 - RNA, 19 nt, Homo sapiens
  misc_RNA (1)...(19): siRNA sense strand
gaaccucaacaacccacau

SEQ ID NO: 187039 - RNA, 19 nt, Homo sapiens
  misc_RNA (1)...(19): siRNA sense strand
uacaagggcuauuuuaagu

SEQ ID NO: 187040 - RNA, 19 nt, Homo sapiens
  misc_RNA (1)...(19): siRNA sense strand
cagccaagagcuccagaug

SEQ ID NO: 187041 - RNA, 19 nt, Homo sapiens
  misc_RNA (1)...(19): siRNA sense strand
acagaaagacgcugaucuc

SEQ ID NO: 187042 - RNA, 19 nt, Homo sapiens
  misc_RNA (1)...(19): siRNA sense strand
gaauggcccaacggaauca

SEQ ID NO: 187043 - RNA, 19 nt, Homo sapiens
  misc_RNA (1)...(19): siRNA sense strand
uggugaagcggaacuauuc

SEQ ID NO: 187044 - RNA, 19 nt, Homo sapiens
  misc_RNA (1)...(19): siRNA sense strand
gaggaucgaccuggugaag

SEQ ID NO: 187045 - RNA, 19 nt, Homo sapiens
  misc_RNA (1)...(19): siRNA sense strand
gagaugcgacgaggacgau

SEQ ID NO: 187046 - RNA, 19 nt, Homo sapiens
  misc_RNA (1)...(19): siRNA sense strand
aauggcggcugcucacaca

SEQ ID NO: 187047 - RNA, 19 nt, Homo sapiens
  misc_RNA (1)...(19): siRNA sense strand
ccagccacucucccaagua

SEQ ID NO: 187048 - RNA, 19 nt, Homo sapiens
  misc_RNA (1)...(19): siRNA sense strand
gcucaauggccuggaaauc

SEQ ID NO: 187049 - RNA, 19 nt, Homo sapiens
  misc_RNA (1)...(19): siRNA sense strand
ucaguggaggcaacagaaa

SEQ ID NO: 187050 - RNA, 19 nt, Homo sapiens
  misc_RNA (1)...(19): siRNA sense strand
ugaauggcccaacggaauc

SEQ ID NO: 187051 - RNA, 19 nt, Homo sapiens
  misc_RNA (1)...(19): siRNA sense strand
ucuccuaccguaagaucua

SEQ ID NO: 187052 - RNA, 19 nt, Homo sapiens
  misc_RNA (1)...(19): siRNA sense strand
cuggguagacuccaagcua

SEQ ID NO: 187053 - RNA, 19 nt, Homo sapiens
  misc_RNA (1)...(19): siRNA sense strand
gcucagauuggccaugucu

SEQ ID NO: 187054 - RNA, 19 nt, Homo sapiens
  misc_RNA (1)...(19): siRNA sense strand
guaagaugggcucaacagu

SEQ ID NO: 187055 - RNA, 19 nt, Homo sapiens
  misc_RNA (1)...(19): siRNA sense strand
ggacagaccuggagaacga

SEQ ID NO: 187056 - RNA, 19 nt, Homo sapiens
  misc_RNA (1)...(19): siRNA sense strand
gcacugaccucaagauugg

SEQ ID NO: 187057 - RNA, 19 nt, Homo sapiens
  misc_RNA (1)...(19): siRNA sense strand
cgaggacgaugacugcuua

SEQ ID NO: 187058 - RNA, 19 nt, Homo sapiens
  misc_RNA (1)...(19): siRNA sense strand
gaagaugagcuccauauag

SEQ ID NO: 187059 - RNA, 19 nt, Homo sapiens
  misc_RNA (1)...(19): siRNA sense strand
gcaauaagaccaucucagu

SEQ ID NO: 187060 - RNA, 19 nt, Homo sapiens
  misc_RNA (1)...(19): siRNA sense strand
caacaacccacaugacauu

SEQ ID NO: 187061 - RNA, 19 nt, Homo sapiens
  misc_RNA (1)...(19): siRNA sense strand
cauuaagccuugaagauga

SEQ ID NO: 187062 - RNA, 19 nt, Homo sapiens
  misc_RNA (1)...(19): siRNA sense strand
ggacugacucgggcaauaa

SEQ ID NO: 187063 - RNA, 19 nt, Homo sapiens
  misc_RNA (1)...(19): siRNA sense strand
gaaaacaacagaagaagaa

SEQ ID NO: 187064 - RNA, 19 nt, Homo sapiens
  misc_RNA (1)...(19): siRNA sense strand
gcaaaugaagacaguaaga

SEQ ID NO: 187065 - RNA, 19 nt, Homo sapiens
  misc_RNA (1)...(19): siRNA sense strand
gcauuaagccuugaagaug

SEQ ID NO: 187066 - RNA, 19 nt, Homo sapiens
  misc_RNA (1)...(19): siRNA sense strand
gcucacacaucugcacuga

SEQ ID NO: 187067 - RNA, 19 nt, Homo sapiens
  misc_RNA (1)...(19): siRNA sense strand
agggagaacugcucagauu

SEQ ID NO: 187068 - RNA, 19 nt, Homo sapiens
  misc_RNA (1)...(19): siRNA sense strand
aagaugggcucaacaguca

SEQ ID NO: 187069 - RNA, 19 nt, Homo sapiens
  misc_RNA (1)...(19): siRNA sense strand
aagaugagcuccauauagg

SEQ ID NO: 187070 - RNA, 19 nt, Homo sapiens
  misc_RNA (1)...(19): siRNA sense strand
ccagaucugugucaauuac

SEQ ID NO: 187071 - RNA, 19 nt, Homo sapiens
  misc_RNA (1)...(19): siRNA sense strand
ccuugaagaugauggacua

SEQ ID NO: 187072 - RNA, 19 nt, Homo sapiens
  misc_RNA (1)...(19): siRNA sense strand
gaacgagugucugcacaac

SEQ ID NO: 187073 - RNA, 19 nt, Homo sapiens
  misc_RNA (1)...(19): siRNA sense strand
ucaauuacaagggcuauuu

SEQ ID NO: 187074 - RNA, 19 nt, Homo sapiens
  misc_RNA (1)...(19): siRNA sense strand
caucugcacugaccucaag

SEQ ID NO: 187075 - RNA, 19 nt, Homo sapiens
  misc_RNA (1)...(19): siRNA sense strand
ggcacuagauguggaaguu

SEQ ID NO: 187076 - RNA, 19 nt, Homo sapiens
  misc_RNA (1)...(19): siRNA sense strand
gaacuauucacgccucauc

SEQ ID NO: 187077 - RNA, 19 nt, Homo sapiens
  misc_RNA (1)...(19): siRNA sense strand
caaggccagugacccgaaa

SEQ ID NO: 187078 - RNA, 19 nt, Homo sapiens
  misc_RNA (1)...(19): siRNA sense strand
aagaagaccugugcagaca

SEQ ID NO: 187079 - RNA, 19 nt, Homo sapiens
  misc_RNA (1)...(19): siRNA sense strand
gagccacccuuuugggaua

SEQ ID NO: 187080 - RNA, 19 nt, Homo sapiens
  misc_RNA (1)...(19): siRNA sense strand
gagcccaucccuaaucuuc

SEQ ID NO: 187081 - RNA, 19 nt, Homo sapiens
  misc_RNA (1)...(19): siRNA sense strand
agccagaucugugucaauu

SEQ ID NO: 187082 - RNA, 19 nt, Homo sapiens
  misc_RNA (1)...(19): siRNA sense strand
ggagaacugcucagauugg

SEQ ID NO: 187083 - RNA, 19 nt, Homo sapiens
  misc_RNA (1)...(19): siRNA sense strand
gaucaucgugcccauagug

SEQ ID NO: 187084 - RNA, 19 nt, Homo sapiens
  misc_RNA (1)...(19): siRNA sense strand
ucaauggccuggaaaucuc

SEQ ID NO: 187085 - RNA, 19 nt, Homo sapiens
  misc_RNA (1)...(19): siRNA sense strand
uaauggaggcugugaauac

SEQ ID NO: 187086 - RNA, 19 nt, Homo sapiens
  misc_RNA (1)...(19): siRNA sense strand
caaaugaagacaguaagau

SEQ ID NO: 187087 - RNA, 19 nt, Homo sapiens
  misc_RNA (1)...(19): siRNA sense strand
acgagugucugcacaacaa

SEQ ID NO: 187088 - RNA, 19 nt, Homo sapiens
  misc_RNA (1)...(19): siRNA sense strand
caacccagucuacaggaaa

SEQ ID NO: 187089 - RNA, 19 nt, Homo sapiens
  misc_RNA (1)...(19): siRNA sense strand
caagauuggcuuugaaugc

SEQ ID NO: 187090 - RNA, 19 nt, Homo sapiens
  misc_RNA (1)...(19): siRNA sense strand
cugcgaggguucauguauu

SEQ ID NO: 187091 - RNA, 19 nt, Homo sapiens
  misc_RNA (1)...(19): siRNA sense strand
gaccucuccuaccguaaga

SEQ ID NO: 187092 - RNA, 19 nt, Homo sapiens
  misc_RNA (1)...(19): siRNA sense strand
gggaccaggccaagauuga

SEQ ID NO: 187093 - RNA, 19 nt, Homo sapiens
  misc_RNA (1)...(19): siRNA sense strand
ugcgaggguucauguauug

SEQ ID NO: 187094 - RNA, 19 nt, Homo sapiens
  misc_RNA (1)...(19): siRNA sense strand
ggaagcggaagaacaccaa

SEQ ID NO: 187095 - RNA, 19 nt, Homo sapiens
  misc_RNA (1)...(19): siRNA sense strand
ggcauuaagccuugaagau

SEQ ID NO: 187096 - RNA, 19 nt, Homo sapiens
  misc_RNA (1)...(19): siRNA sense strand
ucagauuggccaugucuau

SEQ ID NO: 187097 - RNA, 19 nt, Homo sapiens
  misc_RNA (1)...(19): siRNA sense strand
gcagccagaucugugucaa

SEQ ID NO: 187098 - RNA, 19 nt, Homo sapiens
  misc_RNA (1)...(19): siRNA sense strand
aaaugaagacaguaagaug

SEQ ID NO: 187099 - RNA, 19 nt, Homo sapiens
  misc_RNA (1)...(19): siRNA sense strand
uggacugacucgggcaaua

SEQ ID NO: 187100 - RNA, 19 nt, Homo sapiens
  misc_RNA (1)...(19): siRNA sense strand
gcacucucuucagccguaa

SEQ ID NO: 187101 - RNA, 19 nt, Homo sapiens
  misc_RNA (1)...(19): siRNA sense strand
gggagaacugcucagauug

SEQ ID NO: 187102 - RNA, 19 nt, Homo sapiens
  misc_RNA (1)...(19): siRNA sense strand
aaacaacagaagaagaaga

SEQ ID NO: 187103 - RNA, 19 nt, Homo sapiens
  misc_RNA (1)...(19): siRNA sense strand
cagccacucucccaaguac

SEQ ID NO: 187104 - RNA, 19 nt, Homo sapiens
  misc_RNA (1)...(19): siRNA sense strand
aagauuggcuuugaaugca

SEQ ID NO: 187105 - RNA, 19 nt, Homo sapiens
  misc_RNA (1)...(19): siRNA sense strand
ugauagcccuccugugcau

SEQ ID NO: 187106 - RNA, 19 nt, Homo sapiens
  misc_RNA (1)...(19): siRNA sense strand
ugggauagcuguguuugag

SEQ ID NO: 187107 - RNA, 19 nt, Homo sapiens
  misc_RNA (1)...(19): siRNA sense strand
gaucuccuccacugacuuc

SEQ ID NO: 187108 - RNA, 19 nt, Homo sapiens
  misc_RNA (1)...(19): siRNA sense strand
gaccaggccaagauugaga

SEQ ID NO: 187109 - RNA, 19 nt, Homo sapiens
  misc_RNA (1)...(19): siRNA sense strand
gaucuauagcgccuacaug

SEQ ID NO: 187110 - RNA, 19 nt, Homo sapiens
  misc_RNA (1)...(19): siRNA sense strand
ccaccaaucgcaucuacug

SEQ ID NO: 187111 - RNA, 19 nt, Homo sapiens
  misc_RNA (1)...(19): siRNA sense strand
agauggaccuacugaccaa

SEQ ID NO: 187112 - RNA, 19 nt, Homo sapiens
  misc_RNA (1)...(19): siRNA sense strand
caagggcuauuuuaagugu

SEQ ID NO: 187113 - RNA, 19 nt, Homo sapiens
  misc_RNA (1)...(19): siRNA sense strand
ggacgaugacugcuuagac

SEQ ID NO: 187114 - RNA, 19 nt, Homo sapiens
  misc_RNA (1)...(19): siRNA sense strand
gccagaucugugucaauua

SEQ ID NO: 187115 - RNA, 19 nt, Homo sapiens
  misc_RNA (1)...(19): siRNA sense strand
ccugauggcuccgaugagu

SEQ ID NO: 187116 - RNA, 19 nt, Homo sapiens
  misc_RNA (1)...(19): siRNA sense strand
gguguguccugcagagaag

SEQ ID NO: 187117 - RNA, 19 nt, Homo sapiens
  misc_RNA (1)...(19): siRNA sense strand
gggaucaucgugcccauag

SEQ ID NO: 187118 - RNA, 19 nt, Homo sapiens
  misc_RNA (1)...(19): siRNA sense strand
gcacuagauguggaaguug

SEQ ID NO: 187119 - RNA, 19 nt, Homo sapiens
  misc_RNA (1)...(19): siRNA sense strand
gaugcgacgaggacgauga

SEQ ID NO: 187120 - RNA, 19 nt, Homo sapiens
  misc_RNA (1)...(19): siRNA sense strand
ggaaaacaacagaagaaga

SEQ ID NO: 187121 - RNA, 19 nt, Homo sapiens
  misc_RNA (1)...(19): siRNA sense strand
ggacccaccagccacaagu

SEQ ID NO: 187122 - RNA, 19 nt, Homo sapiens
  misc_RNA (1)...(19): siRNA sense strand
gaagcggaagaacaccaaa

SEQ ID NO: 187123 - RNA, 19 nt, Homo sapiens
  misc_RNA (1)...(19): siRNA sense strand
gagcuccagaugccuguga

SEQ ID NO: 187124 - RNA, 19 nt, Homo sapiens
  misc_RNA (1)...(19): siRNA sense strand
gucagacaauauugaaugg

SEQ ID NO: 187125 - RNA, 19 nt, Homo sapiens
  misc_RNA (1)...(19): siRNA sense strand
agaucugugucaauuacaa

SEQ ID NO: 187126 - RNA, 19 nt, Homo sapiens
  misc_RNA (1)...(19): siRNA sense strand
acaacccagucuacaggaa

SEQ ID NO: 187127 - RNA, 19 nt, Homo sapiens
  misc_RNA (1)...(19): siRNA sense strand
gaggacgacugccccaaga

SEQ ID NO: 187128 - RNA, 19 nt, Homo sapiens
  misc_RNA (1)...(19): siRNA sense strand
cuaauggaggcugugaaua

SEQ ID NO: 187129 - RNA, 19 nt, Homo sapiens
  misc_RNA (1)...(19): siRNA sense strand
ccuaauggaggcugugaau

SEQ ID NO: 187130 - RNA, 19 nt, Homo sapiens
  misc_RNA (1)...(19): siRNA sense strand
uagcuguguuugaggacaa

SEQ ID NO: 187131 - RNA, 19 nt, Homo sapiens
  misc_RNA (1)...(19): siRNA sense strand
caacagaaagacgcugauc

SEQ ID NO: 187132 - RNA, 19 nt, Homo sapiens
  misc_RNA (1)...(19): siRNA sense strand
caacggaaucacccuggau

SEQ ID NO: 187133 - RNA, 19 nt, Homo sapiens
  misc_RNA (1)...(19): siRNA sense strand
acaguaagaugggcucaac

SEQ ID NO: 187134 - RNA, 19 nt, Homo sapiens
  misc_RNA (1)...(19): siRNA sense strand
gaaccucaacaacccacau

SEQ ID NO: 187135 - RNA, 19 nt, Homo sapiens
  misc_RNA (1)...(19): siRNA sense strand
uacaagggcuauuuuaagu

SEQ ID NO: 187136 - RNA, 19 nt, Homo sapiens
  misc_RNA (1)...(19): siRNA sense strand
cagccaagagcuccagaug

SEQ ID NO: 187137 - RNA, 19 nt, Homo sapiens
  misc_RNA (1)...(19): siRNA sense strand
acagaaagacgcugaucuc

SEQ ID NO: 187138 - RNA, 19 nt, Homo sapiens
  misc_RNA (1)...(19): siRNA sense strand
gaauggcccaacggaauca

SEQ ID NO: 187139 - RNA, 19 nt, Homo sapiens
  misc_RNA (1)...(19): siRNA sense strand
uggugaagcggaacuauuc

SEQ ID NO: 187140 - RNA, 19 nt, Homo sapiens
  misc_RNA (1)...(19): siRNA sense strand
gaggaucgaccuggugaag

SEQ ID NO: 187141 - RNA, 19 nt, Homo sapiens
  misc_RNA (1)...(19): siRNA sense strand
gagaugcgacgaggacgau

SEQ ID NO: 187142 - RNA, 19 nt, Homo sapiens
  misc_RNA (1)...(19): siRNA sense strand
aauggcggcugcucacaca

SEQ ID NO: 187143 - RNA, 19 nt, Homo sapiens
  misc_RNA (1)...(19): siRNA sense strand
ccagccacucucccaagua

SEQ ID NO: 187144 - RNA, 19 nt, Homo sapiens
  misc_RNA (1)...(19): siRNA sense strand
gcucaauggccuggaaauc

SEQ ID NO: 187145 - RNA, 19 nt, Homo sapiens
  misc_RNA (1)...(19): siRNA sense strand
ucaguggaggcaacagaaa

SEQ ID NO: 187146 - RNA, 19 nt, Homo sapiens
  misc_RNA (1)...(19): siRNA sense strand
ugaauggcccaacggaauc

SEQ ID NO: 187147 - RNA, 19 nt, Homo sapiens
  misc_RNA (1)...(19): siRNA sense strand
ucuccuaccguaagaucua

SEQ ID NO: 187148 - RNA, 19 nt, Homo sapiens
  misc_RNA (1)...(19): siRNA sense strand
cuggguagacuccaagcua

SEQ ID NO: 187149 - RNA, 19 nt, Homo sapiens
  misc_RNA (1)...(19): siRNA sense strand
gcucagauuggccaugucu

SEQ ID NO: 187150 - RNA, 19 nt, Homo sapiens
  misc_RNA (1)...(19): siRNA sense strand
guaagaugggcucaacagu

SEQ ID NO: 187151 - RNA, 19 nt, Homo sapiens
  misc_RNA (1)...(19): siRNA sense strand
uaaaggagcuacagaacga

SEQ ID NO: 187152 - RNA, 19 nt, Homo sapiens
  misc_RNA (1)...(19): siRNA sense strand
ggaacggccuggagucuga

SEQ ID NO: 187153 - RNA, 19 nt, Homo sapiens
  misc_RNA (1)...(19): siRNA sense strand
uuagaugagucccuauuua

SEQ ID NO: 187154 - RNA, 19 nt, Homo sapiens
  misc_RNA (1)...(19): siRNA sense strand
guagagaagcagaugaaua

SEQ ID NO: 187155 - RNA, 19 nt, Homo sapiens
  misc_RNA (1)...(19): siRNA sense strand
cauacugugugacaaauuu

SEQ ID NO: 187156 - RNA, 19 nt, Homo sapiens
  misc_RNA (1)...(19): siRNA sense strand
gagaagcagaugaauauga

SEQ ID NO: 187157 - RNA, 19 nt, Homo sapiens
  misc_RNA (1)...(19): siRNA sense strand
uagagaagcagaugaauau

SEQ ID NO: 187158 - RNA, 19 nt, Homo sapiens
  misc_RNA (1)...(19): siRNA sense strand
ggacuuccuuggccuuaga

SEQ ID NO: 187159 - RNA, 19 nt, Homo sapiens
  misc_RNA (1)...(19): siRNA sense strand
ucagggagauggaggaaga

SEQ ID NO: 187160 - RNA, 19 nt, Homo sapiens
  misc_RNA (1)...(19): siRNA sense strand
gcuggaagcucacuuucau

SEQ ID NO: 187161 - RNA, 19 nt, Homo sapiens
  misc_RNA (1)...(19): siRNA sense strand
agucaaccguguuaccaua

SEQ ID NO: 187162 - RNA, 19 nt, Homo sapiens
  misc_RNA (1)...(19): siRNA sense strand
ggaggaagaagcugagaag

SEQ ID NO: 187163 - RNA, 19 nt, Homo sapiens
  misc_RNA (1)...(19): siRNA sense strand
agaagcagaugaauaugag

SEQ ID NO: 187164 - RNA, 19 nt, Homo sapiens
  misc_RNA (1)...(19): siRNA sense strand
uauauagaguucucagaca

SEQ ID NO: 187165 - RNA, 19 nt, Homo sapiens
  misc_RNA (1)...(19): siRNA sense strand
agagcgacaucaugguauu

SEQ ID NO: 187166 - RNA, 19 nt, Homo sapiens
  misc_RNA (1)...(19): siRNA sense strand
cuagagcgacaucauggua

SEQ ID NO: 187167 - RNA, 19 nt, Homo sapiens
  misc_RNA (1)...(19): siRNA sense strand
ucauguccauugaggagaa

SEQ ID NO: 187168 - RNA, 19 nt, Homo sapiens
  misc_RNA (1)...(19): siRNA sense strand
auauagaguucucagacaa

SEQ ID NO: 187169 - RNA, 19 nt, Homo sapiens
  misc_RNA (1)...(19): siRNA sense strand
ggagcuacagaacgaggua

SEQ ID NO: 187170 - RNA, 19 nt, Homo sapiens
  misc_RNA (1)...(19): siRNA sense strand
gaugagucccuauuuagag

SEQ ID NO: 187171 - RNA, 19 nt, Homo sapiens
  misc_RNA (1)...(19): siRNA sense strand
agaacgagguagagaagca

SEQ ID NO: 187172 - RNA, 19 nt, Homo sapiens
  misc_RNA (1)...(19): siRNA sense strand
gaggaaggcaaaucaaggu

SEQ ID NO: 187173 - RNA, 19 nt, Homo sapiens
  misc_RNA (1)...(19): siRNA sense strand
uagaugagucccuauuuag

SEQ ID NO: 187174 - RNA, 19 nt, Homo sapiens
  misc_RNA (1)...(19): siRNA sense strand
ggagauggaggaagaagcu

SEQ ID NO: 187175 - RNA, 19 nt, Homo sapiens
  misc_RNA (1)...(19): siRNA sense strand
ccaucuauguuggcaaugu

SEQ ID NO: 187176 - RNA, 19 nt, Homo sapiens
  misc_RNA (1)...(19): siRNA sense strand
caucuauguuggcaaugug

SEQ ID NO: 187177 - RNA, 19 nt, Homo sapiens
  misc_RNA (1)...(19): siRNA sense strand
gaguccaccuccaggcaau

SEQ ID NO: 187178 - RNA, 19 nt, Homo sapiens
  misc_RNA (1)...(19): siRNA sense strand
gggcuagagcgacaucaug

SEQ ID NO: 187179 - RNA, 19 nt, Homo sapiens
  misc_RNA (1)...(19): siRNA sense strand
ccggugaucauguccauug

SEQ ID NO: 187180 - RNA, 19 nt, Homo sapiens
  misc_RNA (1)...(19): siRNA sense strand
gagucccuauuuagaggaa

SEQ ID NO: 187181 - RNA, 19 nt, Homo sapiens
  misc_RNA (1)...(19): siRNA sense strand
uauagaguucucagacaaa

SEQ ID NO: 187182 - RNA, 19 nt, Homo sapiens
  misc_RNA (1)...(19): siRNA sense strand
gcuaaaggagcuacagaac

SEQ ID NO: 187183 - RNA, 19 nt, Homo sapiens
  misc_RNA (1)...(19): siRNA sense strand
cuauuuagaggaaggcaaa

SEQ ID NO: 187184 - RNA, 19 nt, Homo sapiens
  misc_RNA (1)...(19): siRNA sense strand
gagaagauggaggcugaug

SEQ ID NO: 187185 - RNA, 19 nt, Homo sapiens
  misc_RNA (1)...(19): siRNA sense strand
gcuaucaaagcucgaguca

SEQ ID NO: 187186 - RNA, 19 nt, Homo sapiens
  misc_RNA (1)...(19): siRNA sense strand
guguuaccauacuguguga

SEQ ID NO: 187187 - RNA, 19 nt, Homo sapiens
  misc_RNA (1)...(19): siRNA sense strand
caaccguguuaccauacug

SEQ ID NO: 187188 - RNA, 19 nt, Homo sapiens
  misc_RNA (1)...(19): siRNA sense strand
uaccauacugugugacaaa

SEQ ID NO: 187189 - RNA, 19 nt, Homo sapiens
  misc_RNA (1)...(19): siRNA sense strand
guucucagacaaagaguca

SEQ ID NO: 187190 - RNA, 19 nt, Homo sapiens
  misc_RNA (1)...(19): siRNA sense strand
gagguagagaagcagauga

SEQ ID NO: 187191 - RNA, 19 nt, Homo sapiens
  misc_RNA (1)...(19): siRNA sense strand
ucucgauucuacagugguu

SEQ ID NO: 187192 - RNA, 19 nt, Homo sapiens
  misc_RNA (1)...(19): siRNA sense strand
agaugagucccuauuuaga

SEQ ID NO: 187193 - RNA, 19 nt, Homo sapiens
  misc_RNA (1)...(19): siRNA sense strand
ucagacaaagagucaguga

SEQ ID NO: 187194 - RNA, 19 nt, Homo sapiens
  misc_RNA (1)...(19): siRNA sense strand
cuuagaugagucccuauuu

SEQ ID NO: 187195 - RNA, 19 nt, Homo sapiens
  misc_RNA (1)...(19): siRNA sense strand
gaccaggcaucagcacaac

SEQ ID NO: 187196 - RNA, 19 nt, Homo sapiens
  misc_RNA (1)...(19): siRNA sense strand
gaaauuaaauccucgguau

SEQ ID NO: 187197 - RNA, 19 nt, Homo sapiens
  misc_RNA (1)...(19): siRNA sense strand
ucuaagagcucguauauug

SEQ ID NO: 187198 - RNA, 19 nt, Homo sapiens
  misc_RNA (1)...(19): siRNA sense strand
guagaaacgugcuguguaa

SEQ ID NO: 187199 - RNA, 19 nt, Homo sapiens
  misc_RNA (1)...(19): siRNA sense strand
ugaaacaguugauagcuua

SEQ ID NO: 187200 - RNA, 19 nt, Homo sapiens
  misc_RNA (1)...(19): siRNA sense strand
gcaguugccuaucacaaua

SEQ ID NO: 187201 - RNA, 19 nt, Homo sapiens
  misc_RNA (1)...(19): siRNA sense strand
gaaggacgaugaaacaguu

SEQ ID NO: 187202 - RNA, 19 nt, Homo sapiens
  misc_RNA (1)...(19): siRNA sense strand
ccagagagcccugaaauua

SEQ ID NO: 187203 - RNA, 19 nt, Homo sapiens
  misc_RNA (1)...(19): siRNA sense strand
acaaagagaugcugaaguu

SEQ ID NO: 187204 - RNA, 19 nt, Homo sapiens
  misc_RNA (1)...(19): siRNA sense strand
gaugugggcuucucuaaga

SEQ ID NO: 187205 - RNA, 19 nt, Homo sapiens
  misc_RNA (1)...(19): siRNA sense strand
gaaacgugcuguguaauug

SEQ ID NO: 187206 - RNA, 19 nt, Homo sapiens
  misc_RNA (1)...(19): siRNA sense strand
gaaacucaaucaacuagug

SEQ ID NO: 187207 - RNA, 19 nt, Homo sapiens
  misc_RNA (1)...(19): siRNA sense strand
ggaaauaguagaacacuug

SEQ ID NO: 187208 - RNA, 19 nt, Homo sapiens
  misc_RNA (1)...(19): siRNA sense strand
gaaaauggcucuggugaaa

SEQ ID NO: 187209 - RNA, 19 nt, Homo sapiens
  misc_RNA (1)...(19): siRNA sense strand
gaacacgucugcugcuauc

SEQ ID NO: 187210 - RNA, 19 nt, Homo sapiens
  misc_RNA (1)...(19): siRNA sense strand
ugacaaagcccucuccauu

SEQ ID NO: 187211 - RNA, 19 nt, Homo sapiens
  misc_RNA (1)...(19): siRNA sense strand
ugaaaucggaguugaguua

SEQ ID NO: 187212 - RNA, 19 nt, Homo sapiens
  misc_RNA (1)...(19): siRNA sense strand
gauuuggacuuuaucugua

SEQ ID NO: 187213 - RNA, 19 nt, Homo sapiens
  misc_RNA (1)...(19): siRNA sense strand
ugagaaagcagccuuauau

SEQ ID NO: 187214 - RNA, 19 nt, Homo sapiens
  misc_RNA (1)...(19): siRNA sense strand
agagagcccugaaauuaaa

SEQ ID NO: 187215 - RNA, 19 nt, Homo sapiens
  misc_RNA (1)...(19): siRNA sense strand
gacaaagcccucuccauuu

SEQ ID NO: 187216 - RNA, 19 nt, Homo sapiens
  misc_RNA (1)...(19): siRNA sense strand
uggcaaagcuucaugaaca

SEQ ID NO: 187217 - RNA, 19 nt, Homo sapiens
  misc_RNA (1)...(19): siRNA sense strand
aaacagcgauuucucagau

SEQ ID NO: 187218 - RNA, 19 nt, Homo sapiens
  misc_RNA (1)...(19): siRNA sense strand
acaccaagcucgagaacuu

SEQ ID NO: 187219 - RNA, 19 nt, Homo sapiens
  misc_RNA (1)...(19): siRNA sense strand
guagaacacuuggaggaaa

SEQ ID NO: 187220 - RNA, 19 nt, Homo sapiens
  misc_RNA (1)...(19): siRNA sense strand
agaaagcagccuuauauuu

SEQ ID NO: 187221 - RNA, 19 nt, Homo sapiens
  misc_RNA (1)...(19): siRNA sense strand
gcucauauauacacagagu

SEQ ID NO: 187222 - RNA, 19 nt, Homo sapiens
  misc_RNA (1)...(19): siRNA sense strand
cgaggugccugcucccuuu

SEQ ID NO: 187223 - RNA, 19 nt, Homo sapiens
  misc_RNA (1)...(19): siRNA sense strand
gcagaccuaugaaauccuu

SEQ ID NO: 187224 - RNA, 19 nt, Homo sapiens
  misc_RNA (1)...(19): siRNA sense strand
acaagacccuuacaggauu

SEQ ID NO: 187225 - RNA, 19 nt, Homo sapiens
  misc_RNA (1)...(19): siRNA sense strand
caacaaacgggacuacaga

SEQ ID NO: 187226 - RNA, 19 nt, Homo sapiens
  misc_RNA (1)...(19): siRNA sense strand
gcaaauggucggcggaguu

SEQ ID NO: 187227 - RNA, 19 nt, Homo sapiens
  misc_RNA (1)...(19): siRNA sense strand
gcugguugcuuuaggagaa

SEQ ID NO: 187228 - RNA, 19 nt, Homo sapiens
  misc_RNA (1)...(19): siRNA sense strand
cagagagcccugaaauuaa

SEQ ID NO: 187229 - RNA, 19 nt, Homo sapiens
  misc_RNA (1)...(19): siRNA sense strand
acacagaguugcaguugau

SEQ ID NO: 187230 - RNA, 19 nt, Homo sapiens
  misc_RNA (1)...(19): siRNA sense strand
ccacucaacuugucuucug

SEQ ID NO: 187231 - RNA, 19 nt, Homo sapiens
  misc_RNA (1)...(19): siRNA sense strand
ccuaugaaauccuuaagau

SEQ ID NO: 187232 - RNA, 19 nt, Homo sapiens
  misc_RNA (1)...(19): siRNA sense strand
gagaaagcagccuuauauu

SEQ ID NO: 187233 - RNA, 19 nt, Homo sapiens
  misc_RNA (1)...(19): siRNA sense strand
gaucacagacaaagagaug

SEQ ID NO: 187234 - RNA, 19 nt, Homo sapiens
  misc_RNA (1)...(19): siRNA sense strand
ucgagaacuugauggauuu

SEQ ID NO: 187235 - RNA, 19 nt, Homo sapiens
  misc_RNA (1)...(19): siRNA sense strand
ggacacuaaugggacauga

SEQ ID NO: 187236 - RNA, 19 nt, Homo sapiens
  misc_RNA (1)...(19): siRNA sense strand
cauaaccucugugagauug

SEQ ID NO: 187237 - RNA, 19 nt, Homo sapiens
  misc_RNA (1)...(19): siRNA sense strand
ucuccaaccuucuuuaugu

SEQ ID NO: 187238 - RNA, 19 nt, Homo sapiens
  misc_RNA (1)...(19): siRNA sense strand
uuaaugagcuaaggaaaca

SEQ ID NO: 187239 - RNA, 19 nt, Homo sapiens
  misc_RNA (1)...(19): siRNA sense strand
aaacuggacuugguuaaag

SEQ ID NO: 187240 - RNA, 19 nt, Homo sapiens
  misc_RNA (1)...(19): siRNA sense strand
caaccgccuccgccuauua

SEQ ID NO: 187241 - RNA, 19 nt, Homo sapiens
  misc_RNA (1)...(19): siRNA sense strand
uuaaagaggccauugaugu

SEQ ID NO: 187242 - RNA, 19 nt, Homo sapiens
  misc_RNA (1)...(19): siRNA sense strand
uaagagcucguauauuguu

SEQ ID NO: 187243 - RNA, 19 nt, Homo sapiens
  misc_RNA (1)...(19): siRNA sense strand
ucagagauauugacaaagc

SEQ ID NO: 187244 - RNA, 19 nt, Homo sapiens
  misc_RNA (1)...(19): siRNA sense strand
caaaaguguugugcauuua

SEQ ID NO: 187245 - RNA, 19 nt, Homo sapiens
  misc_RNA (1)...(19): siRNA sense strand
aggagaauguuacgagaaa

SEQ ID NO: 187246 - RNA, 19 nt, Homo sapiens
  misc_RNA (1)...(19): siRNA sense strand
acaaagcccucuccauuuu

SEQ ID NO: 187247 - RNA, 19 nt, Homo sapiens
  misc_RNA (1)...(19): siRNA sense strand
ggauuuggacuuuaucugu

SEQ ID NO: 187248 - RNA, 19 nt, Homo sapiens
  misc_RNA (1)...(19): siRNA sense strand
cugcuucacucucugcuaa

SEQ ID NO: 187249 - RNA, 19 nt, Homo sapiens
  misc_RNA (1)...(19): siRNA sense strand
aaagaaggacgaugaaaca

SEQ ID NO: 187250 - RNA, 19 nt, Homo sapiens
  misc_RNA (1)...(19): siRNA sense strand
gagaaacucaaucaacuag

SEQ ID NO: 187251 - RNA, 19 nt, Homo sapiens
  misc_RNA (1)...(19): siRNA sense strand
aaacgggacuacagagcuu

SEQ ID NO: 187252 - RNA, 19 nt, Homo sapiens
  misc_RNA (1)...(19): siRNA sense strand
acagcgauuucucagauuu

SEQ ID NO: 187253 - RNA, 19 nt, Homo sapiens
  misc_RNA (1)...(19): siRNA sense strand
acaccuggaugaaagaguu

SEQ ID NO: 187254 - RNA, 19 nt, Homo sapiens
  misc_RNA (1)...(19): siRNA sense strand
uguggaagcuacucauguu

SEQ ID NO: 187255 - RNA, 19 nt, Homo sapiens
  misc_RNA (1)...(19): siRNA sense strand
uaaagaggccauugaugug

SEQ ID NO: 187256 - RNA, 19 nt, Homo sapiens
  misc_RNA (1)...(19): siRNA sense strand
agaacaggcugcccagugu

SEQ ID NO: 187257 - RNA, 19 nt, Homo sapiens
  misc_RNA (1)...(19): siRNA sense strand
cgagaaacucaaucaacua

SEQ ID NO: 187258 - RNA, 19 nt, Homo sapiens
  misc_RNA (1)...(19): siRNA sense strand
ggacacauucuccaaccuu

SEQ ID NO: 187259 - RNA, 19 nt, Homo sapiens
  misc_RNA (1)...(19): siRNA sense strand
aaauugcaguugccuauca

SEQ ID NO: 187260 - RNA, 19 nt, Homo sapiens
  misc_RNA (1)...(19): siRNA sense strand
ccaaauugcaguugccuau

SEQ ID NO: 187261 - RNA, 19 nt, Homo sapiens
  misc_RNA (1)...(19): siRNA sense strand
ugauggauuuggacuuuau

SEQ ID NO: 187262 - RNA, 19 nt, Homo sapiens
  misc_RNA (1)...(19): siRNA sense strand
gcaugagaaagcagccuua

SEQ ID NO: 187263 - RNA, 19 nt, Homo sapiens
  misc_RNA (1)...(19): siRNA sense strand
gcgccuguccuguccauaa

SEQ ID NO: 187264 - RNA, 19 nt, Homo sapiens
  misc_RNA (1)...(19): siRNA sense strand
ggccuacuuugacguuaaa

SEQ ID NO: 187265 - RNA, 19 nt, Homo sapiens
  misc_RNA (1)...(19): siRNA sense strand
ggaagaugcccaggauaug

SEQ ID NO: 187266 - RNA, 19 nt, Homo sapiens
  misc_RNA (1)...(19): siRNA sense strand
ugucuucugucacgccaua

SEQ ID NO: 187267 - RNA, 19 nt, Homo sapiens
  misc_RNA (1)...(19): siRNA sense strand
cagcuucgacccaaugauu

SEQ ID NO: 187268 - RNA, 19 nt, Homo sapiens
  misc_RNA (1)...(19): siRNA sense strand
cugcugcuauccaggcuua

SEQ ID NO: 187269 - RNA, 19 nt, Homo sapiens
  misc_RNA (1)...(19): siRNA sense strand
caagacccuuacaggauug

SEQ ID NO: 187270 - RNA, 19 nt, Homo sapiens
  misc_RNA (1)...(19): siRNA sense strand
gagaguggagcucagcaaa

SEQ ID NO: 187271 - RNA, 19 nt, Homo sapiens
  misc_RNA (1)...(19): siRNA sense strand
cuuggugccuggacacuaa

SEQ ID NO: 187272 - RNA, 19 nt, Homo sapiens
  misc_RNA (1)...(19): siRNA sense strand
agaggaagaugcccaggau

SEQ ID NO: 187273 - RNA, 19 nt, Homo sapiens
  misc_RNA (1)...(19): siRNA sense strand
gaagaugcccaggauaugg

SEQ ID NO: 187274 - RNA, 19 nt, Homo sapiens
  misc_RNA (1)...(19): siRNA sense strand
cuugauggauuuggacuuu

SEQ ID NO: 187275 - RNA, 19 nt, Homo sapiens
  misc_RNA (1)...(19): siRNA sense strand
cucgagaacuugauggauu

SEQ ID NO: 187276 - RNA, 19 nt, Homo sapiens
  misc_RNA (1)...(19): siRNA sense strand
agaaacgugcuguguaauu

SEQ ID NO: 187277 - RNA, 19 nt, Homo sapiens
  misc_RNA (1)...(19): siRNA sense strand
cauaaacagcgauuucuca

SEQ ID NO: 187278 - RNA, 19 nt, Homo sapiens
  misc_RNA (1)...(19): siRNA sense strand
ggacuacagagcuugguau

SEQ ID NO: 187279 - RNA, 19 nt, Homo sapiens
  misc_RNA (1)...(19): siRNA sense strand
ggaagcuacucauguuuug

SEQ ID NO: 187280 - RNA, 19 nt, Homo sapiens
  misc_RNA (1)...(19): siRNA sense strand
gcacugccuuucgcuaucu

SEQ ID NO: 187281 - RNA, 19 nt, Homo sapiens
  misc_RNA (1)...(19): siRNA sense strand
cgugggagauguggagaaa

SEQ ID NO: 187282 - RNA, 19 nt, Homo sapiens
  misc_RNA (1)...(19): siRNA sense strand
gaaaucggaguugaguuau

SEQ ID NO: 187283 - RNA, 19 nt, Homo sapiens
  misc_RNA (1)...(19): siRNA sense strand
gcaaccgccuccgccuauu

SEQ ID NO: 187284 - RNA, 19 nt, Homo sapiens
  misc_RNA (1)...(19): siRNA sense strand
gggaaauaguagaacacuu

SEQ ID NO: 187285 - RNA, 19 nt, Homo sapiens
  misc_RNA (1)...(19): siRNA sense strand
uauccaggcuuauagacau

SEQ ID NO: 187286 - RNA, 19 nt, Homo sapiens
  misc_RNA (1)...(19): siRNA sense strand
ggauauggaugccuauacc

SEQ ID NO: 187287 - RNA, 19 nt, Homo sapiens
  misc_RNA (1)...(19): siRNA sense strand
ucauauauacacagaguug

SEQ ID NO: 187288 - RNA, 19 nt, Homo sapiens
  misc_RNA (1)...(19): siRNA sense strand
gggcagaccuaugaaaucc

SEQ ID NO: 187289 - RNA, 19 nt, Homo sapiens
  misc_RNA (1)...(19): siRNA sense strand
caaauggucggcggaguug

SEQ ID NO: 187290 - RNA, 19 nt, Homo sapiens
  misc_RNA (1)...(19): siRNA sense strand
guaaccugaucacagacaa

SEQ ID NO: 187291 - RNA, 19 nt, Homo sapiens
  misc_RNA (1)...(19): siRNA sense strand
aaagcuucaugaacaguug

SEQ ID NO: 187292 - RNA, 19 nt, Homo sapiens
  misc_RNA (1)...(19): siRNA sense strand
aaauggcucuggugaaacu

SEQ ID NO: 187293 - RNA, 19 nt, Homo sapiens
  misc_RNA (1)...(19): siRNA sense strand
gagcaugaaaucggaguug

SEQ ID NO: 187294 - RNA, 19 nt, Homo sapiens
  misc_RNA (1)...(19): siRNA sense strand
ggaaacaagacccuuacag

SEQ ID NO: 187295 - RNA, 19 nt, Homo sapiens
  misc_RNA (1)...(19): siRNA sense strand
acgagaaacucaaucaacu

SEQ ID NO: 187296 - RNA, 19 nt, Homo sapiens
  misc_RNA (1)...(19): siRNA sense strand
ggaccucgcugccaagaaa

SEQ ID NO: 187297 - RNA, 19 nt, Homo sapiens
  misc_RNA (1)...(19): siRNA sense strand
caaggugacugaagugaaa

SEQ ID NO: 187298 - RNA, 19 nt, Homo sapiens
  misc_RNA (1)...(19): siRNA sense strand
gaagagaaguuaggaagca

SEQ ID NO: 187299 - RNA, 19 nt, Homo sapiens
  misc_RNA (1)...(19): siRNA sense strand
gaagaacagagaagaguuu

SEQ ID NO: 187300 - RNA, 19 nt, Homo sapiens
  misc_RNA (1)...(19): siRNA sense strand
ggauacaccuucaacaauc

SEQ ID NO: 187301 - RNA, 19 nt, Homo sapiens
  misc_RNA (1)...(19): siRNA sense strand
ggaguuggauuuccugcuu

SEQ ID NO: 187302 - RNA, 19 nt, Homo sapiens
  misc_RNA (1)...(19): siRNA sense strand
aaaggucacuggguuauuu

SEQ ID NO: 187303 - RNA, 19 nt, Homo sapiens
  misc_RNA (1)...(19): siRNA sense strand
caagguacuuucaucaaug

SEQ ID NO: 187304 - RNA, 19 nt, Homo sapiens
  misc_RNA (1)...(19): siRNA sense strand
gcauaaccuucucugugua

SEQ ID NO: 187305 - RNA, 19 nt, Homo sapiens
  misc_RNA (1)...(19): siRNA sense strand
ggacuacaaugguuaucau

SEQ ID NO: 187306 - RNA, 19 nt, Homo sapiens
  misc_RNA (1)...(19): siRNA sense strand
caaagcagcagaauggauu

SEQ ID NO: 187307 - RNA, 19 nt, Homo sapiens
  misc_RNA (1)...(19): siRNA sense strand
gaguguggccggaugaaua

SEQ ID NO: 187308 - RNA, 19 nt, Homo sapiens
  misc_RNA (1)...(19): siRNA sense strand
caagauccauccaauguac

SEQ ID NO: 187309 - RNA, 19 nt, Homo sapiens
  misc_RNA (1)...(19): siRNA sense strand
cagcucaccuuucagauuc

SEQ ID NO: 187310 - RNA, 19 nt, Homo sapiens
  misc_RNA (1)...(19): siRNA sense strand
ucacaaagcagcagaaugg

SEQ ID NO: 187311 - RNA, 19 nt, Homo sapiens
  misc_RNA (1)...(19): siRNA sense strand
gcaagauccauccaaugua

SEQ ID NO: 187312 - RNA, 19 nt, Homo sapiens
  misc_RNA (1)...(19): siRNA sense strand
gaaguuaggaagcaaauac

SEQ ID NO: 187313 - RNA, 19 nt, Homo sapiens
  misc_RNA (1)...(19): siRNA sense strand
ugaaggauguagaaaguca

SEQ ID NO: 187314 - RNA, 19 nt, Homo sapiens
  misc_RNA (1)...(19): siRNA sense strand
gggaagagcccuagauuuu

SEQ ID NO: 187315 - RNA, 19 nt, Homo sapiens
  misc_RNA (1)...(19): siRNA sense strand
ucaagguacuuucaucaau

SEQ ID NO: 187316 - RNA, 19 nt, Homo sapiens
  misc_RNA (1)...(19): siRNA sense strand
gauuugcgcuaccuguuug

SEQ ID NO: 187317 - RNA, 19 nt, Homo sapiens
  misc_RNA (1)...(19): siRNA sense strand
ugaauguccucuacaacuu

SEQ ID NO: 187318 - RNA, 19 nt, Homo sapiens
  misc_RNA (1)...(19): siRNA sense strand
gcagaaagacgaaaauuug

SEQ ID NO: 187319 - RNA, 19 nt, Homo sapiens
  misc_RNA (1)...(19): siRNA sense strand
gauacaccuucaacaauca

SEQ ID NO: 187320 - RNA, 19 nt, Homo sapiens
  misc_RNA (1)...(19): siRNA sense strand
ucacugcucuacuucauca

SEQ ID NO: 187321 - RNA, 19 nt, Homo sapiens
  misc_RNA (1)...(19): siRNA sense strand
ugaauauccucaccagaga

SEQ ID NO: 187322 - RNA, 19 nt, Homo sapiens
  misc_RNA (1)...(19): siRNA sense strand
gaggccauaucacagauga

SEQ ID NO: 187323 - RNA, 19 nt, Homo sapiens
  misc_RNA (1)...(19): siRNA sense strand
aggcaaagcugaaggaucu

SEQ ID NO: 187324 - RNA, 19 nt, Homo sapiens
  misc_RNA (1)...(19): siRNA sense strand
ggucaaggcacuucuggaa

SEQ ID NO: 187325 - RNA, 19 nt, Homo sapiens
  misc_RNA (1)...(19): siRNA sense strand
acaaggcccuggacaacuu

SEQ ID NO: 187326 - RNA, 19 nt, Homo sapiens
  misc_RNA (1)...(19): siRNA sense strand
cuacauccauggccucuuc

SEQ ID NO: 187327 - RNA, 19 nt, Homo sapiens
  misc_RNA (1)...(19): siRNA sense strand
gaacagagaagaguuuagg

SEQ ID NO: 187328 - RNA, 19 nt, Homo sapiens
  misc_RNA (1)...(19): siRNA sense strand
guccgaauguccugagaaa

SEQ ID NO: 187329 - RNA, 19 nt, Homo sapiens
  misc_RNA (1)...(19): siRNA sense strand
uguagaaagucaaggaaga

SEQ ID NO: 187330 - RNA, 19 nt, Homo sapiens
  misc_RNA (1)...(19): siRNA sense strand
ccacggcucgcaagaauga

SEQ ID NO: 187331 - RNA, 19 nt, Homo sapiens
  misc_RNA (1)...(19): siRNA sense strand
caacauggacuacaauggu

SEQ ID NO: 187332 - RNA, 19 nt, Homo sapiens
  misc_RNA (1)...(19): siRNA sense strand
aaacuuggauacaccuuca

SEQ ID NO: 187333 - RNA, 19 nt, Homo sapiens
  misc_RNA (1)...(19): siRNA sense strand
gggccucacugcucuacuu

SEQ ID NO: 187334 - RNA, 19 nt, Homo sapiens
  misc_RNA (1)...(19): siRNA sense strand
aaacagugcugguggaaaa

SEQ ID NO: 187335 - RNA, 19 nt, Homo sapiens
  misc_RNA (1)...(19): siRNA sense strand
gugauaagcugaccuaccu

SEQ ID NO: 187336 - RNA, 19 nt, Homo sapiens
  misc_RNA (1)...(19): siRNA sense strand
ucagcacccuggagaagaa

SEQ ID NO: 187337 - RNA, 19 nt, Homo sapiens
  misc_RNA (1)...(19): siRNA sense strand
gaaccgagaagucaaugca

SEQ ID NO: 187338 - RNA, 19 nt, Homo sapiens
  misc_RNA (1)...(19): siRNA sense strand
ccgaauguccugagaaaga

SEQ ID NO: 187339 - RNA, 19 nt, Homo sapiens
  misc_RNA (1)...(19): siRNA sense strand
ggaagaauucucuaaucug

SEQ ID NO: 187340 - RNA, 19 nt, Homo sapiens
  misc_RNA (1)...(19): siRNA sense strand
caaccuaauagacagcaua

SEQ ID NO: 187341 - RNA, 19 nt, Homo sapiens
  misc_RNA (1)...(19): siRNA sense strand
ugacgaagaagaacagaga

SEQ ID NO: 187342 - RNA, 19 nt, Homo sapiens
  misc_RNA (1)...(19): siRNA sense strand
gagaacagccacccagagu

SEQ ID NO: 187343 - RNA, 19 nt, Homo sapiens
  misc_RNA (1)...(19): siRNA sense strand
caaccucauuugaagaauc

SEQ ID NO: 187344 - RNA, 19 nt, Homo sapiens
  misc_RNA (1)...(19): siRNA sense strand
uaaucuggaucgggacaua

SEQ ID NO: 187345 - RNA, 19 nt, Homo sapiens
  misc_RNA (1)...(19): siRNA sense strand
ucagcaagauccauccaau

SEQ ID NO: 187346 - RNA, 19 nt, Homo sapiens
  misc_RNA (1)...(19): siRNA sense strand
gaagaagaacagagaagag

SEQ ID NO: 187347 - RNA, 19 nt, Homo sapiens
  misc_RNA (1)...(19): siRNA sense strand
cuucaacaaucagaacuuu

SEQ ID NO: 187348 - RNA, 19 nt, Homo sapiens
  misc_RNA (1)...(19): siRNA sense strand
agaauucucuaaucuggau

SEQ ID NO: 187349 - RNA, 19 nt, Homo sapiens
  misc_RNA (1)...(19): siRNA sense strand
uggaagaauucucuaaucu

SEQ ID NO: 187350 - RNA, 19 nt, Homo sapiens
  misc_RNA (1)...(19): siRNA sense strand
ucaaugcaguggaguugga

SEQ ID NO: 187351 - RNA, 19 nt, Homo sapiens
  misc_RNA (1)...(19): siRNA sense strand
gagggcugcuccugacgaa

SEQ ID NO: 187352 - RNA, 19 nt, Homo sapiens
  misc_RNA (1)...(19): siRNA sense strand
ugaacgaccucagcaagau

SEQ ID NO: 187353 - RNA, 19 nt, Homo sapiens
  misc_RNA (1)...(19): siRNA sense strand
gaaggagaacugucuuugg

SEQ ID NO: 187354 - RNA, 19 nt, Homo sapiens
  misc_RNA (1)...(19): siRNA sense strand
caacuucacucaggacacu

SEQ ID NO: 187355 - RNA, 19 nt, Homo sapiens
  misc_RNA (1)...(19): siRNA sense strand
gaaaggucacuggguuauu

SEQ ID NO: 187356 - RNA, 19 nt, Homo sapiens
  misc_RNA (1)...(19): siRNA sense strand
gaacuuccugggagaaaca

SEQ ID NO: 187357 - RNA, 19 nt, Homo sapiens
  misc_RNA (1)...(19): siRNA sense strand
agauggcccugcaauguga

SEQ ID NO: 187358 - RNA, 19 nt, Homo sapiens
  misc_RNA (1)...(19): siRNA sense strand
agaaugcccuguacuucga

SEQ ID NO: 187359 - RNA, 19 nt, Homo sapiens
  misc_RNA (1)...(19): siRNA sense strand
auggagaacuuacagaaug

SEQ ID NO: 187360 - RNA, 19 nt, Homo sapiens
  misc_RNA (1)...(19): siRNA sense strand
acagaugacugggacagaa

SEQ ID NO: 187361 - RNA, 19 nt, Homo sapiens
  misc_RNA (1)...(19): siRNA sense strand
ggaccagccacuccuaugu

SEQ ID NO: 187362 - RNA, 19 nt, Homo sapiens
  misc_RNA (1)...(19): siRNA sense strand
caauggaagaauucucuaa

SEQ ID NO: 187363 - RNA, 19 nt, Homo sapiens
  misc_RNA (1)...(19): siRNA sense strand
guagaaagucaaggaagaa

SEQ ID NO: 187364 - RNA, 19 nt, Homo sapiens
  misc_RNA (1)...(19): siRNA sense strand
ccagauggcccugcaaugu

SEQ ID NO: 187365 - RNA, 19 nt, Homo sapiens
  misc_RNA (1)...(19): siRNA sense strand
guccacggcucgcaagaau

SEQ ID NO: 187366 - RNA, 19 nt, Homo sapiens
  misc_RNA (1)...(19): siRNA sense strand
guuccugacugccaucaug

SEQ ID NO: 187367 - RNA, 19 nt, Homo sapiens
  misc_RNA (1)...(19): siRNA sense strand
gggauggaaucgcucauac

SEQ ID NO: 187368 - RNA, 19 nt, Homo sapiens
  misc_RNA (1)...(19): siRNA sense strand
gcacaaggcccuggacaac

SEQ ID NO: 187369 - RNA, 19 nt, Homo sapiens
  misc_RNA (1)...(19): siRNA sense strand
guggggagcugucaaggua

SEQ ID NO: 187370 - RNA, 19 nt, Homo sapiens
  misc_RNA (1)...(19): siRNA sense strand
acacaggcugggaucauua

SEQ ID NO: 187371 - RNA, 19 nt, Homo sapiens
  misc_RNA (1)...(19): siRNA sense strand
ggacgggugacuuuacaau

SEQ ID NO: 187372 - RNA, 19 nt, Homo sapiens
  misc_RNA (1)...(19): siRNA sense strand
uuggagagaucauguaugg

SEQ ID NO: 187373 - RNA, 19 nt, Homo sapiens
  misc_RNA (1)...(19): siRNA sense strand
agacggaguuuaagagcau

SEQ ID NO: 187374 - RNA, 19 nt, Homo sapiens
  misc_RNA (1)...(19): siRNA sense strand
ucaacaaucagaacuuuca

SEQ ID NO: 187375 - RNA, 19 nt, Homo sapiens
  misc_RNA (1)...(19): siRNA sense strand
ggauguagaaagucaagga

SEQ ID NO: 187376 - RNA, 19 nt, Homo sapiens
  misc_RNA (1)...(19): siRNA sense strand
caggcaacauggacuacaa

SEQ ID NO: 187377 - RNA, 19 nt, Homo sapiens
  misc_RNA (1)...(19): siRNA sense strand
gcaaagguccccuaugaug

SEQ ID NO: 187378 - RNA, 19 nt, Homo sapiens
  misc_RNA (1)...(19): siRNA sense strand
gaagaaaacuuggauacac

SEQ ID NO: 187379 - RNA, 19 nt, Homo sapiens
  misc_RNA (1)...(19): siRNA sense strand
auagagggaucugcuaaga

SEQ ID NO: 187380 - RNA, 19 nt, Homo sapiens
  misc_RNA (1)...(19): siRNA sense strand
cgaagaagaacagagaaga

SEQ ID NO: 187381 - RNA, 19 nt, Homo sapiens
  misc_RNA (1)...(19): siRNA sense strand
caacagaaucaaggagcua

SEQ ID NO: 187382 - RNA, 19 nt, Homo sapiens
  misc_RNA (1)...(19): siRNA sense strand
cagaacugauggccaaagu

SEQ ID NO: 187383 - RNA, 19 nt, Homo sapiens
  misc_RNA (1)...(19): siRNA sense strand
gaaacagugcugguggaaa

SEQ ID NO: 187384 - RNA, 19 nt, Homo sapiens
  misc_RNA (1)...(19): siRNA sense strand
agcauaaccuucucugugu

SEQ ID NO: 187385 - RNA, 19 nt, Homo sapiens
  misc_RNA (1)...(19): siRNA sense strand
ggccauuccugcagauaag

SEQ ID NO: 187386 - RNA, 19 nt, Homo sapiens
  misc_RNA (1)...(19): siRNA sense strand
ccagaccuccucaacagaa

SEQ ID NO: 187387 - RNA, 19 nt, Homo sapiens
  misc_RNA (1)...(19): siRNA sense strand
gaauguccucuacaacuuc

SEQ ID NO: 187388 - RNA, 19 nt, Homo sapiens
  misc_RNA (1)...(19): siRNA sense strand
acugaaggauguagaaagu

SEQ ID NO: 187389 - RNA, 19 nt, Homo sapiens
  misc_RNA (1)...(19): siRNA sense strand
gaccagccacuccuauguu

SEQ ID NO: 187390 - RNA, 19 nt, Homo sapiens
  misc_RNA (1)...(19): siRNA sense strand
ccagcucaccuuucagauu

SEQ ID NO: 187391 - RNA, 19 nt, Homo sapiens
  misc_RNA (1)...(19): siRNA sense strand
gcgggugacagacgaguuu

SEQ ID NO: 187392 - RNA, 19 nt, Homo sapiens
  misc_RNA (1)...(19): siRNA sense strand
ccuugcuucuccagauuua

SEQ ID NO: 187393 - RNA, 19 nt, Homo sapiens
  misc_RNA (1)...(19): siRNA sense strand
gcaaagcugaaggaucuga

SEQ ID NO: 187394 - RNA, 19 nt, Homo sapiens
  misc_RNA (1)...(19): siRNA sense strand
aggcugggaucauuacaga

SEQ ID NO: 187395 - RNA, 19 nt, Homo sapiens
  misc_RNA (1)...(19): siRNA sense strand
cacacaggcugggaucauu

SEQ ID NO: 187396 - RNA, 19 nt, Homo sapiens
  misc_RNA (1)...(19): siRNA sense strand
ggaccucgcugccaagaaa

SEQ ID NO: 187397 - RNA, 19 nt, Homo sapiens
  misc_RNA (1)...(19): siRNA sense strand
gaagagaaguuaggaagca

SEQ ID NO: 187398 - RNA, 19 nt, Homo sapiens
  misc_RNA (1)...(19): siRNA sense strand
gaagaacagagaagaguuu

SEQ ID NO: 187399 - RNA, 19 nt, Homo sapiens
  misc_RNA (1)...(19): siRNA sense strand
ggauacaccuucaacaauc

SEQ ID NO: 187400 - RNA, 19 nt, Homo sapiens
  misc_RNA (1)...(19): siRNA sense strand
ggaguuggauuuccugcuu

SEQ ID NO: 187401 - RNA, 19 nt, Homo sapiens
  misc_RNA (1)...(19): siRNA sense strand
aaaggucacuggguuauuu

SEQ ID NO: 187402 - RNA, 19 nt, Homo sapiens
  misc_RNA (1)...(19): siRNA sense strand
caagguacuuucaucaaug

SEQ ID NO: 187403 - RNA, 19 nt, Homo sapiens
  misc_RNA (1)...(19): siRNA sense strand
gcauaaccuucucugugua

SEQ ID NO: 187404 - RNA, 19 nt, Homo sapiens
  misc_RNA (1)...(19): siRNA sense strand
ggacuacaaugguuaucau

SEQ ID NO: 187405 - RNA, 19 nt, Homo sapiens
  misc_RNA (1)...(19): siRNA sense strand
gaguguggccggaugaaua

SEQ ID NO: 187406 - RNA, 19 nt, Homo sapiens
  misc_RNA (1)...(19): siRNA sense strand
cagcucaccuuucagauuc

SEQ ID NO: 187407 - RNA, 19 nt, Homo sapiens
  misc_RNA (1)...(19): siRNA sense strand
caagauccauccaauguac

SEQ ID NO: 187408 - RNA, 19 nt, Homo sapiens
  misc_RNA (1)...(19): siRNA sense strand
gcaagauccauccaaugua

SEQ ID NO: 187409 - RNA, 19 nt, Homo sapiens
  misc_RNA (1)...(19): siRNA sense strand
gaaguuaggaagcaaauac

SEQ ID NO: 187410 - RNA, 19 nt, Homo sapiens
  misc_RNA (1)...(19): siRNA sense strand
ugaaggauguagaaaguca

SEQ ID NO: 187411 - RNA, 19 nt, Homo sapiens
  misc_RNA (1)...(19): siRNA sense strand
gggaagagcccuagauuuu

SEQ ID NO: 187412 - RNA, 19 nt, Homo sapiens
  misc_RNA (1)...(19): siRNA sense strand
ucaagguacuuucaucaau

SEQ ID NO: 187413 - RNA, 19 nt, Homo sapiens
  misc_RNA (1)...(19): siRNA sense strand
gauuugcgcuaccuguuug

SEQ ID NO: 187414 - RNA, 19 nt, Homo sapiens
  misc_RNA (1)...(19): siRNA sense strand
ugaauguccucuacaacuu

SEQ ID NO: 187415 - RNA, 19 nt, Homo sapiens
  misc_RNA (1)...(19): siRNA sense strand
gcagaaagacgaaaauuug

SEQ ID NO: 187416 - RNA, 19 nt, Homo sapiens
  misc_RNA (1)...(19): siRNA sense strand
gauacaccuucaacaauca

SEQ ID NO: 187417 - RNA, 19 nt, Homo sapiens
  misc_RNA (1)...(19): siRNA sense strand
ugaauauccucaccagaga

SEQ ID NO: 187418 - RNA, 19 nt, Homo sapiens
  misc_RNA (1)...(19): siRNA sense strand
gaggccauaucacagauga

SEQ ID NO: 187419 - RNA, 19 nt, Homo sapiens
  misc_RNA (1)...(19): siRNA sense strand
aggcaaagcugaaggaucu

SEQ ID NO: 187420 - RNA, 19 nt, Homo sapiens
  misc_RNA (1)...(19): siRNA sense strand
ggucaaggcacuucuggaa

SEQ ID NO: 187421 - RNA, 19 nt, Homo sapiens
  misc_RNA (1)...(19): siRNA sense strand
acaaggcccuggacaacuu

SEQ ID NO: 187422 - RNA, 19 nt, Homo sapiens
  misc_RNA (1)...(19): siRNA sense strand
cuacauccauggccucuuc

SEQ ID NO: 187423 - RNA, 19 nt, Homo sapiens
  misc_RNA (1)...(19): siRNA sense strand
gaacagagaagaguuuagg

SEQ ID NO: 187424 - RNA, 19 nt, Homo sapiens
  misc_RNA (1)...(19): siRNA sense strand
guccgaauguccugagaaa

SEQ ID NO: 187425 - RNA, 19 nt, Homo sapiens
  misc_RNA (1)...(19): siRNA sense strand
uguagaaagucaaggaaga

SEQ ID NO: 187426 - RNA, 19 nt, Homo sapiens
  misc_RNA (1)...(19): siRNA sense strand
ccacggcucgcaagaauga

SEQ ID NO: 187427 - RNA, 19 nt, Homo sapiens
  misc_RNA (1)...(19): siRNA sense strand
caacauggacuacaauggu

SEQ ID NO: 187428 - RNA, 19 nt, Homo sapiens
  misc_RNA (1)...(19): siRNA sense strand
aaacuuggauacaccuuca

SEQ ID NO: 187429 - RNA, 19 nt, Homo sapiens
  misc_RNA (1)...(19): siRNA sense strand
gugauaagcugaccuaccu

SEQ ID NO: 187430 - RNA, 19 nt, Homo sapiens
  misc_RNA (1)...(19): siRNA sense strand
ucagcacccuggagaagaa

SEQ ID NO: 187431 - RNA, 19 nt, Homo sapiens
  misc_RNA (1)...(19): siRNA sense strand
gaaccgagaagucaaugca

SEQ ID NO: 187432 - RNA, 19 nt, Homo sapiens
  misc_RNA (1)...(19): siRNA sense strand
ccgaauguccugagaaaga

SEQ ID NO: 187433 - RNA, 19 nt, Homo sapiens
  misc_RNA (1)...(19): siRNA sense strand
ggaagaauucucuaaucug

SEQ ID NO: 187434 - RNA, 19 nt, Homo sapiens
  misc_RNA (1)...(19): siRNA sense strand
caaccuaauagacagcaua

SEQ ID NO: 187435 - RNA, 19 nt, Homo sapiens
  misc_RNA (1)...(19): siRNA sense strand
ugacgaagaagaacagaga

SEQ ID NO: 187436 - RNA, 19 nt, Homo sapiens
  misc_RNA (1)...(19): siRNA sense strand
gagaacagccacccagagu

SEQ ID NO: 187437 - RNA, 19 nt, Homo sapiens
  misc_RNA (1)...(19): siRNA sense strand
caaccucauuugaagaauc

SEQ ID NO: 187438 - RNA, 19 nt, Homo sapiens
  misc_RNA (1)...(19): siRNA sense strand
uaaucuggaucgggacaua

SEQ ID NO: 187439 - RNA, 19 nt, Homo sapiens
  misc_RNA (1)...(19): siRNA sense strand
ucaaugcaguggaguugga

SEQ ID NO: 187440 - RNA, 19 nt, Homo sapiens
  misc_RNA (1)...(19): siRNA sense strand
gaagaagaacagagaagag

SEQ ID NO: 187441 - RNA, 19 nt, Homo sapiens
  misc_RNA (1)...(19): siRNA sense strand
gagggcugcuccugacgaa

SEQ ID NO: 187442 - RNA, 19 nt, Homo sapiens
  misc_RNA (1)...(19): siRNA sense strand
cuucaacaaucagaacuuu

SEQ ID NO: 187443 - RNA, 19 nt, Homo sapiens
  misc_RNA (1)...(19): siRNA sense strand
agaauucucuaaucuggau

SEQ ID NO: 187444 - RNA, 19 nt, Homo sapiens
  misc_RNA (1)...(19): siRNA sense strand
uggaagaauucucuaaucu

SEQ ID NO: 187445 - RNA, 19 nt, Homo sapiens
  misc_RNA (1)...(19): siRNA sense strand
ucagcaagauccauccaau

SEQ ID NO: 187446 - RNA, 19 nt, Homo sapiens
  misc_RNA (1)...(19): siRNA sense strand
gaaaggucacuggguuauu

SEQ ID NO: 187447 - RNA, 19 nt, Homo sapiens
  misc_RNA (1)...(19): siRNA sense strand
gaaggagaacugucuuugg

SEQ ID NO: 187448 - RNA, 19 nt, Homo sapiens
  misc_RNA (1)...(19): siRNA sense strand
caacuucacucaggacacu

SEQ ID NO: 187449 - RNA, 19 nt, Homo sapiens
  misc_RNA (1)...(19): siRNA sense strand
caauggaagaauucucuaa

SEQ ID NO: 187450 - RNA, 19 nt, Homo sapiens
  misc_RNA (1)...(19): siRNA sense strand
agauggcccugcaauguga

SEQ ID NO: 187451 - RNA, 19 nt, Homo sapiens
  misc_RNA (1)...(19): siRNA sense strand
agaaugcccuguacuucga

SEQ ID NO: 187452 - RNA, 19 nt, Homo sapiens
  misc_RNA (1)...(19): siRNA sense strand
auggagaacuuacagaaug

SEQ ID NO: 187453 - RNA, 19 nt, Homo sapiens
  misc_RNA (1)...(19): siRNA sense strand
acagaugacugggacagaa

SEQ ID NO: 187454 - RNA, 19 nt, Homo sapiens
  misc_RNA (1)...(19): siRNA sense strand
ggaccagccacuccuaugu

SEQ ID NO: 187455 - RNA, 19 nt, Homo sapiens
  misc_RNA (1)...(19): siRNA sense strand
guagaaagucaaggaagaa

SEQ ID NO: 187456 - RNA, 19 nt, Homo sapiens
  misc_RNA (1)...(19): siRNA sense strand
ccagauggcccugcaaugu

SEQ ID NO: 187457 - RNA, 19 nt, Homo sapiens
  misc_RNA (1)...(19): siRNA sense strand
guccacggcucgcaagaau

SEQ ID NO: 187458 - RNA, 19 nt, Homo sapiens
  misc_RNA (1)...(19): siRNA sense strand
guuccugacugccaucaug

SEQ ID NO: 187459 - RNA, 19 nt, Homo sapiens
  misc_RNA (1)...(19): siRNA sense strand
gggauggaaucgcucauac

SEQ ID NO: 187460 - RNA, 19 nt, Homo sapiens
  misc_RNA (1)...(19): siRNA sense strand
gcacaaggcccuggacaac

SEQ ID NO: 187461 - RNA, 19 nt, Homo sapiens
  misc_RNA (1)...(19): siRNA sense strand
guggggagcugucaaggua

SEQ ID NO: 187462 - RNA, 19 nt, Homo sapiens
  misc_RNA (1)...(19): siRNA sense strand
acacaggcugggaucauua

SEQ ID NO: 187463 - RNA, 19 nt, Homo sapiens
  misc_RNA (1)...(19): siRNA sense strand
ggacgggugacuuuacaau

SEQ ID NO: 187464 - RNA, 19 nt, Homo sapiens
  misc_RNA (1)...(19): siRNA sense strand
uuggagagaucauguaugg

SEQ ID NO: 187465 - RNA, 19 nt, Homo sapiens
  misc_RNA (1)...(19): siRNA sense strand
agacggaguuuaagagcau

SEQ ID NO: 187466 - RNA, 19 nt, Homo sapiens
  misc_RNA (1)...(19): siRNA sense strand
ucaacaaucagaacuuuca

SEQ ID NO: 187467 - RNA, 19 nt, Homo sapiens
  misc_RNA (1)...(19): siRNA sense strand
ggauguagaaagucaagga

SEQ ID NO: 187468 - RNA, 19 nt, Homo sapiens
  misc_RNA (1)...(19): siRNA sense strand
caggcaacauggacuacaa

SEQ ID NO: 187469 - RNA, 19 nt, Homo sapiens
  misc_RNA (1)...(19): siRNA sense strand
gcaaagguccccuaugaug

SEQ ID NO: 187470 - RNA, 19 nt, Homo sapiens
  misc_RNA (1)...(19): siRNA sense strand
gaagaaaacuuggauacac

SEQ ID NO: 187471 - RNA, 19 nt, Homo sapiens
  misc_RNA (1)...(19): siRNA sense strand
auagagggaucugcuaaga

SEQ ID NO: 187472 - RNA, 19 nt, Homo sapiens
  misc_RNA (1)...(19): siRNA sense strand
cgaagaagaacagagaaga

SEQ ID NO: 187473 - RNA, 19 nt, Homo sapiens
  misc_RNA (1)...(19): siRNA sense strand
caacagaaucaaggagcua

SEQ ID NO: 187474 - RNA, 19 nt, Homo sapiens
  misc_RNA (1)...(19): siRNA sense strand
cagaacugauggccaaagu

SEQ ID NO: 187475 - RNA, 19 nt, Homo sapiens
  misc_RNA (1)...(19): siRNA sense strand
gaccagccacuccuauguu

SEQ ID NO: 187476 - RNA, 19 nt, Homo sapiens
  misc_RNA (1)...(19): siRNA sense strand
ggccauuccugcagauaag

SEQ ID NO: 187477 - RNA, 19 nt, Homo sapiens
  misc_RNA (1)...(19): siRNA sense strand
ccagaccuccucaacagaa

SEQ ID NO: 187478 - RNA, 19 nt, Homo sapiens
  misc_RNA (1)...(19): siRNA sense strand
agcauaaccuucucugugu

SEQ ID NO: 187479 - RNA, 19 nt, Homo sapiens
  misc_RNA (1)...(19): siRNA sense strand
ccagcucaccuuucagauu

SEQ ID NO: 187480 - RNA, 19 nt, Homo sapiens
  misc_RNA (1)...(19): siRNA sense strand
gaauguccucuacaacuuc

SEQ ID NO: 187481 - RNA, 19 nt, Homo sapiens
  misc_RNA (1)...(19): siRNA sense strand
acugaaggauguagaaagu

SEQ ID NO: 187482 - RNA, 19 nt, Homo sapiens
  misc_RNA (1)...(19): siRNA sense strand
gaccuaugcuuugcgagau

SEQ ID NO: 187483 - RNA, 19 nt, Homo sapiens
  misc_RNA (1)...(19): siRNA sense strand
ccuugcuucuccagauuua

SEQ ID NO: 187484 - RNA, 19 nt, Homo sapiens
  misc_RNA (1)...(19): siRNA sense strand
gcaaagcugaaggaucuga

SEQ ID NO: 187485 - RNA, 19 nt, Homo sapiens
  misc_RNA (1)...(19): siRNA sense strand
aggcugggaucauuacaga

SEQ ID NO: 187486 - RNA, 19 nt, Homo sapiens
  misc_RNA (1)...(19): siRNA sense strand
cacacaggcugggaucauu

SEQ ID NO: 187487 - RNA, 19 nt, Homo sapiens
  misc_RNA (1)...(19): siRNA sense strand
gcgggugacagacgaguuu

SEQ ID NO: 187488 - RNA, 19 nt, Homo sapiens
  misc_RNA (1)...(19): siRNA sense strand
ucaggacacucuggagaug

SEQ ID NO: 187489 - RNA, 19 nt, Homo sapiens
  misc_RNA (1)...(19): siRNA sense strand
gagaacuccauuaagauca

SEQ ID NO: 187490 - RNA, 19 nt, Homo sapiens
  misc_RNA (1)...(19): siRNA sense strand
ugacagacgaguuuaacau

SEQ ID NO: 187491 - RNA, 19 nt, Homo sapiens
  misc_RNA (1)...(19): siRNA sense strand
ccagccacauggagaacuu

SEQ ID NO: 187492 - RNA, 19 nt, Homo sapiens
  misc_RNA (1)...(19): siRNA sense strand
aagaaaggucacuggguua

SEQ ID NO: 187493 - RNA, 19 nt, Homo sapiens
  misc_RNA (1)...(19): siRNA sense strand
uuacagaggcaaagcugaa

SEQ ID NO: 187494 - RNA, 19 nt, Homo sapiens
  misc_RNA (1)...(19): siRNA sense strand
acgcaaagguccccuauga

SEQ ID NO: 187495 - RNA, 19 nt, Homo sapiens
  misc_RNA (1)...(19): siRNA sense strand
gaguucagggucuucauga

SEQ ID NO: 187496 - RNA, 19 nt, Homo sapiens
  misc_RNA (1)...(19): siRNA sense strand
gaaaggagcugaaagauga

SEQ ID NO: 187497 - RNA, 19 nt, Homo sapiens
  misc_RNA (1)...(19): siRNA sense strand
gaagaugccuugauugaaa

SEQ ID NO: 187498 - RNA, 19 nt, Homo sapiens
  misc_RNA (1)...(19): siRNA sense strand
gaagacaaauucacugaga

SEQ ID NO: 187499 - RNA, 19 nt, Homo sapiens
  misc_RNA (1)...(19): siRNA sense strand
ucacugagauccuguguuu

SEQ ID NO: 187500 - RNA, 19 nt, Homo sapiens
  misc_RNA (1)...(19): siRNA sense strand
aaacgaagaugccuugauu

SEQ ID NO: 187501 - RNA, 19 nt, Homo sapiens
  misc_RNA (1)...(19): siRNA sense strand
caaacaagaugcccagauu

SEQ ID NO: 187502 - RNA, 19 nt, Homo sapiens
  misc_RNA (1)...(19): siRNA sense strand
caaagcagcuaaagaaauc

SEQ ID NO: 187503 - RNA, 19 nt, Homo sapiens
  misc_RNA (1)...(19): siRNA sense strand
cgaaacaucuggugacuuc

SEQ ID NO: 187504 - RNA, 19 nt, Homo sapiens
  misc_RNA (1)...(19): siRNA sense strand
gcaauuaaaucggauacuu

SEQ ID NO: 187505 - RNA, 19 nt, Homo sapiens
  misc_RNA (1)...(19): siRNA sense strand
ggauaucucucaagccuau

SEQ ID NO: 187506 - RNA, 19 nt, Homo sapiens
  misc_RNA (1)...(19): siRNA sense strand
gcaggcaaaugaaggauau

SEQ ID NO: 187507 - RNA, 19 nt, Homo sapiens
  misc_RNA (1)...(19): siRNA sense strand
gaggaacaguaagagauua

SEQ ID NO: 187508 - RNA, 19 nt, Homo sapiens
  misc_RNA (1)...(19): siRNA sense strand
caagaagcauuauggcuau

SEQ ID NO: 187509 - RNA, 19 nt, Homo sapiens
  misc_RNA (1)...(19): siRNA sense strand
gcugaaagaugacuugaag

SEQ ID NO: 187510 - RNA, 19 nt, Homo sapiens
  misc_RNA (1)...(19): siRNA sense strand
gggcacggaugaagacaaa

SEQ ID NO: 187511 - RNA, 19 nt, Homo sapiens
  misc_RNA (1)...(19): siRNA sense strand
gaucagaaauugaccuuuu

SEQ ID NO: 187512 - RNA, 19 nt, Homo sapiens
  misc_RNA (1)...(19): siRNA sense strand
gcaaagcagcuaaagaaau

SEQ ID NO: 187513 - RNA, 19 nt, Homo sapiens
  misc_RNA (1)...(19): siRNA sense strand
gaauaaugguguccagauc

SEQ ID NO: 187514 - RNA, 19 nt, Homo sapiens
  misc_RNA (1)...(19): siRNA sense strand
ggacaccgaggaacaguaa

SEQ ID NO: 187515 - RNA, 19 nt, Homo sapiens
  misc_RNA (1)...(19): siRNA sense strand
ggaaaggagcugaaagaug

SEQ ID NO: 187516 - RNA, 19 nt, Homo sapiens
  misc_RNA (1)...(19): siRNA sense strand
gcagauggcagaagagaug

SEQ ID NO: 187517 - RNA, 19 nt, Homo sapiens
  misc_RNA (1)...(19): siRNA sense strand
ucaagccuauuauacagua

SEQ ID NO: 187518 - RNA, 19 nt, Homo sapiens
  misc_RNA (1)...(19): siRNA sense strand
gcacggaugaagacaaauu

SEQ ID NO: 187519 - RNA, 19 nt, Homo sapiens
  misc_RNA (1)...(19): siRNA sense strand
ggauacuucuggagacuau

SEQ ID NO: 187520 - RNA, 19 nt, Homo sapiens
  misc_RNA (1)...(19): siRNA sense strand
gaaagcaaucagaggaauu

SEQ ID NO: 187521 - RNA, 19 nt, Homo sapiens
  misc_RNA (1)...(19): siRNA sense strand
aauuggaacugaugagaaa

SEQ ID NO: 187522 - RNA, 19 nt, Homo sapiens
  misc_RNA (1)...(19): siRNA sense strand
gagcuuuccucaauuaaaa

SEQ ID NO: 187523 - RNA, 19 nt, Homo sapiens
  misc_RNA (1)...(19): siRNA sense strand
ggacaagcaggcaaaugaa

SEQ ID NO: 187524 - RNA, 19 nt, Homo sapiens
  misc_RNA (1)...(19): siRNA sense strand
cuauaaagcuggugagaac

SEQ ID NO: 187525 - RNA, 19 nt, Homo sapiens
  misc_RNA (1)...(19): siRNA sense strand
ggacauuguggacagcaua

SEQ ID NO: 187526 - RNA, 19 nt, Homo sapiens
  misc_RNA (1)...(19): siRNA sense strand
gaauuggaacugaugagaa

SEQ ID NO: 187527 - RNA, 19 nt, Homo sapiens
  misc_RNA (1)...(19): siRNA sense strand
cauuauggcuauucccuau

SEQ ID NO: 187528 - RNA, 19 nt, Homo sapiens
  misc_RNA (1)...(19): siRNA sense strand
ugacauuaguuccgaaaca

SEQ ID NO: 187529 - RNA, 19 nt, Homo sapiens
  misc_RNA (1)...(19): siRNA sense strand
gcagcugauuguuaaggaa

SEQ ID NO: 187530 - RNA, 19 nt, Homo sapiens
  misc_RNA (1)...(19): siRNA sense strand
ggagaauuaucugggcauu

SEQ ID NO: 187531 - RNA, 19 nt, Homo sapiens
  misc_RNA (1)...(19): siRNA sense strand
gcaaaugaaggauaucucu

SEQ ID NO: 187532 - RNA, 19 nt, Homo sapiens
  misc_RNA (1)...(19): siRNA sense strand
ugaaggguauuggaacuga

SEQ ID NO: 187533 - RNA, 19 nt, Homo sapiens
  misc_RNA (1)...(19): siRNA sense strand
acugagauccuguguuuaa

SEQ ID NO: 187534 - RNA, 19 nt, Homo sapiens
  misc_RNA (1)...(19): siRNA sense strand
gagaugaaagucugaaagu

SEQ ID NO: 187535 - RNA, 19 nt, Homo sapiens
  misc_RNA (1)...(19): siRNA sense strand
ugaucucucuggccacuuu

SEQ ID NO: 187536 - RNA, 19 nt, Homo sapiens
  misc_RNA (1)...(19): siRNA sense strand
cagcauaaaaggagaauua

SEQ ID NO: 187537 - RNA, 19 nt, Homo sapiens
  misc_RNA (1)...(19): siRNA sense strand
ggagcuuuccucaauuaaa

SEQ ID NO: 187538 - RNA, 19 nt, Homo sapiens
  misc_RNA (1)...(19): siRNA sense strand
aagagauuauccagacuuu

SEQ ID NO: 187539 - RNA, 19 nt, Homo sapiens
  misc_RNA (1)...(19): siRNA sense strand
gacauuaguuccgaaacau

SEQ ID NO: 187540 - RNA, 19 nt, Homo sapiens
  misc_RNA (1)...(19): siRNA sense strand
ggaauuggaacugaugaga

SEQ ID NO: 187541 - RNA, 19 nt, Homo sapiens
  misc_RNA (1)...(19): siRNA sense strand
agaauuaucugggcauuuu

SEQ ID NO: 187542 - RNA, 19 nt, Homo sapiens
  misc_RNA (1)...(19): siRNA sense strand
cgaggaacaguaagagauu

SEQ ID NO: 187543 - RNA, 19 nt, Homo sapiens
  misc_RNA (1)...(19): siRNA sense strand
augcccagauucucuauaa

SEQ ID NO: 187544 - RNA, 19 nt, Homo sapiens
  misc_RNA (1)...(19): siRNA sense strand
uuauggcuauucccuauau

SEQ ID NO: 187545 - RNA, 19 nt, Homo sapiens
  misc_RNA (1)...(19): siRNA sense strand
augcaaagcagcuaaagaa

SEQ ID NO: 187546 - RNA, 19 nt, Homo sapiens
  misc_RNA (1)...(19): siRNA sense strand
caauuaaaucggauacuuc

SEQ ID NO: 187547 - RNA, 19 nt, Homo sapiens
  misc_RNA (1)...(19): siRNA sense strand
gaagagaugaaagucugaa

SEQ ID NO: 187548 - RNA, 19 nt, Homo sapiens
  misc_RNA (1)...(19): siRNA sense strand
gaaggguauuggaacugau

SEQ ID NO: 187549 - RNA, 19 nt, Homo sapiens
  misc_RNA (1)...(19): siRNA sense strand
gcugauuguuaaggaauau

SEQ ID NO: 187550 - RNA, 19 nt, Homo sapiens
  misc_RNA (1)...(19): siRNA sense strand
ucaagcagcauauggaaag

SEQ ID NO: 187551 - RNA, 19 nt, Homo sapiens
  misc_RNA (1)...(19): siRNA sense strand
agcggcagcugauuguuaa

SEQ ID NO: 187552 - RNA, 19 nt, Homo sapiens
  misc_RNA (1)...(19): siRNA sense strand
gagaauuaucugggcauuu

SEQ ID NO: 187553 - RNA, 19 nt, Homo sapiens
  misc_RNA (1)...(19): siRNA sense strand
uaaagcuggugagaacaga

SEQ ID NO: 187554 - RNA, 19 nt, Homo sapiens
  misc_RNA (1)...(19): siRNA sense strand
caagaugcccagauucucu

SEQ ID NO: 187555 - RNA, 19 nt, Homo sapiens
  misc_RNA (1)...(19): siRNA sense strand
gcagaagagaugaaagucu

SEQ ID NO: 187556 - RNA, 19 nt, Homo sapiens
  misc_RNA (1)...(19): siRNA sense strand
cgaagaugccuugauugaa

SEQ ID NO: 187557 - RNA, 19 nt, Homo sapiens
  misc_RNA (1)...(19): siRNA sense strand
acgaagaugccuugauuga

SEQ ID NO: 187558 - RNA, 19 nt, Homo sapiens
  misc_RNA (1)...(19): siRNA sense strand
gaugcaaagcagcuaaaga

SEQ ID NO: 187559 - RNA, 19 nt, Homo sapiens
  misc_RNA (1)...(19): siRNA sense strand
agaaagcaaucagaggaau

SEQ ID NO: 187560 - RNA, 19 nt, Homo sapiens
  misc_RNA (1)...(19): siRNA sense strand
gaagcuauucagaaagcaa

SEQ ID NO: 187561 - RNA, 19 nt, Homo sapiens
  misc_RNA (1)...(19): siRNA sense strand
cagaggaauuggaacugau

SEQ ID NO: 187562 - RNA, 19 nt, Homo sapiens
  misc_RNA (1)...(19): siRNA sense strand
aggaauaucaagcagcaua

SEQ ID NO: 187563 - RNA, 19 nt, Homo sapiens
  misc_RNA (1)...(19): siRNA sense strand
ggagcugaaagaugacuug

SEQ ID NO: 187564 - RNA, 19 nt, Homo sapiens
  misc_RNA (1)...(19): siRNA sense strand
cuaugaaaucacacucuua

SEQ ID NO: 187565 - RNA, 19 nt, Homo sapiens
  misc_RNA (1)...(19): siRNA sense strand
cgaauaaugguguccagau

SEQ ID NO: 187566 - RNA, 19 nt, Homo sapiens
  misc_RNA (1)...(19): siRNA sense strand
gcccagauucucuauaaag

SEQ ID NO: 187567 - RNA, 19 nt, Homo sapiens
  misc_RNA (1)...(19): siRNA sense strand
uaagagauuauccagacuu

SEQ ID NO: 187568 - RNA, 19 nt, Homo sapiens
  misc_RNA (1)...(19): siRNA sense strand
ccggaaagcucuguugacu

SEQ ID NO: 187569 - RNA, 19 nt, Homo sapiens
  misc_RNA (1)...(19): siRNA sense strand
aaaugaaggauaucucuca

SEQ ID NO: 187570 - RNA, 19 nt, Homo sapiens
  misc_RNA (1)...(19): siRNA sense strand
cagcuaaagaaauccauga

SEQ ID NO: 187571 - RNA, 19 nt, Homo sapiens
  misc_RNA (1)...(19): siRNA sense strand
aggacaagcaggcaaauga

SEQ ID NO: 187572 - RNA, 19 nt, Homo sapiens
  misc_RNA (1)...(19): siRNA sense strand
ggcagcugauuguuaagga

SEQ ID NO: 187573 - RNA, 19 nt, Homo sapiens
  misc_RNA (1)...(19): siRNA sense strand
gacauuguggacagcauaa

SEQ ID NO: 187574 - RNA, 19 nt, Homo sapiens
  misc_RNA (1)...(19): siRNA sense strand
gaugacauuaguuccgaaa

SEQ ID NO: 187575 - RNA, 19 nt, Homo sapiens
  misc_RNA (1)...(19): siRNA sense strand
cagaaagcaaucagaggaa

SEQ ID NO: 187576 - RNA, 19 nt, Homo sapiens
  misc_RNA (1)...(19): siRNA sense strand
acuaugaaaucacacucuu

SEQ ID NO: 187577 - RNA, 19 nt, Homo sapiens
  misc_RNA (1)...(19): siRNA sense strand
gauggcagaagagaugaaa

SEQ ID NO: 187578 - RNA, 19 nt, Homo sapiens
  misc_RNA (1)...(19): siRNA sense strand
ccagcagucuuugaugcaa

SEQ ID NO: 187579 - RNA, 19 nt, Homo sapiens
  misc_RNA (1)...(19): siRNA sense strand
uggagacuaugaaaucaca

SEQ ID NO: 187580 - RNA, 19 nt, Homo sapiens
  misc_RNA (1)...(19): siRNA sense strand
uuacuguuggccauaguua

SEQ ID NO: 187581 - RNA, 19 nt, Homo sapiens
  misc_RNA (1)...(19): siRNA sense strand
gagcaucuggccaaacaag

SEQ ID NO: 187582 - RNA, 19 nt, Homo sapiens
  misc_RNA (1)...(19): siRNA sense strand
ucucaagccuauuauacag

SEQ ID NO: 187583 - RNA, 19 nt, Homo sapiens
  misc_RNA (1)...(19): siRNA sense strand
caagcaggcaaaugaagga

SEQ ID NO: 187584 - RNA, 19 nt, Homo sapiens
  misc_RNA (1)...(19): siRNA sense strand
aagaugccuugauugaaau

SEQ ID NO: 187585 - RNA, 19 nt, Homo sapiens
  misc_RNA (1)...(19): siRNA sense strand
gcuaaagaaauccaugaag

SEQ ID NO: 187586 - RNA, 19 nt, Homo sapiens
  misc_RNA (1)...(19): siRNA sense strand
guaagagauuauccagacu

SEQ ID NO: 187587 - RNA, 19 nt, Homo sapiens
  misc_RNA (1)...(19): siRNA sense strand
aaugaaggauaucucucaa

SEQ ID NO: 187588 - RNA, 19 nt, Homo sapiens
  misc_RNA (1)...(19): siRNA sense strand
caaacgaagaugccuugau

SEQ ID NO: 187589 - RNA, 19 nt, Homo sapiens
  misc_RNA (1)...(19): siRNA sense strand
uaucaagcagcauauggaa

SEQ ID NO: 187590 - RNA, 19 nt, Homo sapiens
  misc_RNA (1)...(19): siRNA sense strand
aguggaugcugaagcuauu

SEQ ID NO: 187591 - RNA, 19 nt, Homo sapiens
  misc_RNA (1)...(19): siRNA sense strand
acucugaaccgaauaaugg

SEQ ID NO: 187592 - RNA, 19 nt, Homo sapiens
  misc_RNA (1)...(19): siRNA sense strand
agaugaaagucugaaagug

SEQ ID NO: 187593 - RNA, 19 nt, Homo sapiens
  misc_RNA (1)...(19): siRNA sense strand
ucuuggagaugacauuagu

SEQ ID NO: 187594 - RNA, 19 nt, Homo sapiens
  misc_RNA (1)...(19): siRNA sense strand
aaacaagaugcccagauuc

SEQ ID NO: 187595 - RNA, 19 nt, Homo sapiens
  misc_RNA (1)...(19): siRNA sense strand
gaagcauuauggcuauucc

SEQ ID NO: 187596 - RNA, 19 nt, Homo sapiens
  misc_RNA (1)...(19): siRNA sense strand
gcagaggacuggccauuug

SEQ ID NO: 187597 - RNA, 19 nt, Homo sapiens
  misc_RNA (1)...(19): siRNA sense strand
ucaaggagacuuucaaaua

SEQ ID NO: 187598 - RNA, 19 nt, Homo sapiens
  misc_RNA (1)...(19): siRNA sense strand
ucacugaauuccugcauua

SEQ ID NO: 187599 - RNA, 19 nt, Homo sapiens
  misc_RNA (1)...(19): siRNA sense strand
gcagauugcuuuaaaugau

SEQ ID NO: 187600 - RNA, 19 nt, Homo sapiens
  misc_RNA (1)...(19): siRNA sense strand
gaagcucacucuuuauaau

SEQ ID NO: 187601 - RNA, 19 nt, Homo sapiens
  misc_RNA (1)...(19): siRNA sense strand
gcaugcagauugcuuuaaa

SEQ ID NO: 187602 - RNA, 19 nt, Homo sapiens
  misc_RNA (1)...(19): siRNA sense strand
caaggagacuuucaaauac

SEQ ID NO: 187603 - RNA, 19 nt, Homo sapiens
  misc_RNA (1)...(19): siRNA sense strand
ggacagcaguagaaauugu

SEQ ID NO: 187604 - RNA, 19 nt, Homo sapiens
  misc_RNA (1)...(19): siRNA sense strand
gaaguuaucugcgaaucug

SEQ ID NO: 187605 - RNA, 19 nt, Homo sapiens
  misc_RNA (1)...(19): siRNA sense strand
guauuggacuauauuggua

SEQ ID NO: 187606 - RNA, 19 nt, Homo sapiens
  misc_RNA (1)...(19): siRNA sense strand
ggaguagaauuaaaggaau

SEQ ID NO: 187607 - RNA, 19 nt, Homo sapiens
  misc_RNA (1)...(19): siRNA sense strand
cuaaugaccugugaaaugu

SEQ ID NO: 187608 - RNA, 19 nt, Homo sapiens
  misc_RNA (1)...(19): siRNA sense strand
uguguaagcuggugccuuu

SEQ ID NO: 187609 - RNA, 19 nt, Homo sapiens
  misc_RNA (1)...(19): siRNA sense strand
cccaauagaugugaacuuu

SEQ ID NO: 187610 - RNA, 19 nt, Homo sapiens
  misc_RNA (1)...(19): siRNA sense strand
gcgaaacggucccaauauc

SEQ ID NO: 187611 - RNA, 19 nt, Homo sapiens
  misc_RNA (1)...(19): siRNA sense strand
ugugaaauguugagaaaga

SEQ ID NO: 187612 - RNA, 19 nt, Homo sapiens
  misc_RNA (1)...(19): siRNA sense strand
gaaacggucccaauaucuu

SEQ ID NO: 187613 - RNA, 19 nt, Homo sapiens
  misc_RNA (1)...(19): siRNA sense strand
gaucaaggagacuuucaaa

SEQ ID NO: 187614 - RNA, 19 nt, Homo sapiens
  misc_RNA (1)...(19): siRNA sense strand
gaacuccacacuucugaga

SEQ ID NO: 187615 - RNA, 19 nt, Homo sapiens
  misc_RNA (1)...(19): siRNA sense strand
gcaaaccgcagagauaaug

SEQ ID NO: 187616 - RNA, 19 nt, Homo sapiens
  misc_RNA (1)...(19): siRNA sense strand
ccugugaaauguugagaaa

SEQ ID NO: 187617 - RNA, 19 nt, Homo sapiens
  misc_RNA (1)...(19): siRNA sense strand
ucagaaugaucccaauaga

SEQ ID NO: 187618 - RNA, 19 nt, Homo sapiens
  misc_RNA (1)...(19): siRNA sense strand
uaaaugaucaccuaaagca

SEQ ID NO: 187619 - RNA, 19 nt, Homo sapiens
  misc_RNA (1)...(19): siRNA sense strand
agaaugaucccaauagaug

SEQ ID NO: 187620 - RNA, 19 nt, Homo sapiens
  misc_RNA (1)...(19): siRNA sense strand
caauagaugugaacuuuug

SEQ ID NO: 187621 - RNA, 19 nt, Homo sapiens
  misc_RNA (1)...(19): siRNA sense strand
gcuguugcuucuuggagua

SEQ ID NO: 187622 - RNA, 19 nt, Homo sapiens
  misc_RNA (1)...(19): siRNA sense strand
uaacccaauugcucuguau

SEQ ID NO: 187623 - RNA, 19 nt, Homo sapiens
  misc_RNA (1)...(19): siRNA sense strand
cgaaucugcuugcuucauc

SEQ ID NO: 187624 - RNA, 19 nt, Homo sapiens
  misc_RNA (1)...(19): siRNA sense strand
caauugcucuguauuuggu

SEQ ID NO: 187625 - RNA, 19 nt, Homo sapiens
  misc_RNA (1)...(19): siRNA sense strand
ggacuacaaaggaaguuau

SEQ ID NO: 187626 - RNA, 19 nt, Homo sapiens
  misc_RNA (1)...(19): siRNA sense strand
uucugaagcucacucuuua

SEQ ID NO: 187627 - RNA, 19 nt, Homo sapiens
  misc_RNA (1)...(19): siRNA sense strand
agacagcuuucaugcaguu

SEQ ID NO: 187628 - RNA, 19 nt, Homo sapiens
  misc_RNA (1)...(19): siRNA sense strand
uaaugacgccacccacuaa

SEQ ID NO: 187629 - RNA, 19 nt, Homo sapiens
  misc_RNA (1)...(19): siRNA sense strand
gaugugaacuuuugagcuu

SEQ ID NO: 187630 - RNA, 19 nt, Homo sapiens
  misc_RNA (1)...(19): siRNA sense strand
uaugugcucugaguauuga

SEQ ID NO: 187631 - RNA, 19 nt, Homo sapiens
  misc_RNA (1)...(19): siRNA sense strand
gugaaauguugagaaagaa

SEQ ID NO: 187632 - RNA, 19 nt, Homo sapiens
  misc_RNA (1)...(19): siRNA sense strand
cugaagcucacucuuuaua

SEQ ID NO: 187633 - RNA, 19 nt, Homo sapiens
  misc_RNA (1)...(19): siRNA sense strand
cagauugcuuuaaaugauc

SEQ ID NO: 187634 - RNA, 19 nt, Homo sapiens
  misc_RNA (1)...(19): siRNA sense strand
cccaauugcucuguauuug

SEQ ID NO: 187635 - RNA, 19 nt, Homo sapiens
  misc_RNA (1)...(19): siRNA sense strand
ggacuauauugguaucaac

SEQ ID NO: 187636 - RNA, 19 nt, Homo sapiens
  misc_RNA (1)...(19): siRNA sense strand
acacuaaugaccugugaaa

SEQ ID NO: 187637 - RNA, 19 nt, Homo sapiens
  misc_RNA (1)...(19): siRNA sense strand
ugauuuggguggucucugu

SEQ ID NO: 187638 - RNA, 19 nt, Homo sapiens
  misc_RNA (1)...(19): siRNA sense strand
ugaagcucacucuuuauaa

SEQ ID NO: 187639 - RNA, 19 nt, Homo sapiens
  misc_RNA (1)...(19): siRNA sense strand
acuaaugaccugugaaaug

SEQ ID NO: 187640 - RNA, 19 nt, Homo sapiens
  misc_RNA (1)...(19): siRNA sense strand
agccauagguuuugauaua

SEQ ID NO: 187641 - RNA, 19 nt, Homo sapiens
  misc_RNA (1)...(19): siRNA sense strand
gcuggugccuuucauacag

SEQ ID NO: 187642 - RNA, 19 nt, Homo sapiens
  misc_RNA (1)...(19): siRNA sense strand
aaugaccugugaaauguug

SEQ ID NO: 187643 - RNA, 19 nt, Homo sapiens
  misc_RNA (1)...(19): siRNA sense strand
ucagaagacagcuuucaug

SEQ ID NO: 187644 - RNA, 19 nt, Homo sapiens
  misc_RNA (1)...(19): siRNA sense strand
ugagcuuucuguugguauu

SEQ ID NO: 187645 - RNA, 19 nt, Homo sapiens
  misc_RNA (1)...(19): siRNA sense strand
ccaaggacccaucgagauc

SEQ ID NO: 187646 - RNA, 19 nt, Homo sapiens
  misc_RNA (1)...(19): siRNA sense strand
gaaugaucccaauagaugu

SEQ ID NO: 187647 - RNA, 19 nt, Homo sapiens
  misc_RNA (1)...(19): siRNA sense strand
aaggagacuuucaaauaca

SEQ ID NO: 187648 - RNA, 19 nt, Homo sapiens
  misc_RNA (1)...(19): siRNA sense strand
gagucuaugugcucugagu

SEQ ID NO: 187649 - RNA, 19 nt, Homo sapiens
  misc_RNA (1)...(19): siRNA sense strand
cagcuuucaugcaguuuua

SEQ ID NO: 187650 - RNA, 19 nt, Homo sapiens
  misc_RNA (1)...(19): siRNA sense strand
gguucuggcugucccugaa

SEQ ID NO: 187651 - RNA, 19 nt, Homo sapiens
  misc_RNA (1)...(19): siRNA sense strand
uaagcuggugccuuucaua

SEQ ID NO: 187652 - RNA, 19 nt, Homo sapiens
  misc_RNA (1)...(19): siRNA sense strand
gguauuggacuauauuggu

SEQ ID NO: 187653 - RNA, 19 nt, Homo sapiens
  misc_RNA (1)...(19): siRNA sense strand
gacagggccacuccgcuuu

SEQ ID NO: 187654 - RNA, 19 nt, Homo sapiens
  misc_RNA (1)...(19): siRNA sense strand
auacacuaaugaccuguga

SEQ ID NO: 187655 - RNA, 19 nt, Homo sapiens
  misc_RNA (1)...(19): siRNA sense strand
uggaguagaauuaaaggaa

SEQ ID NO: 187656 - RNA, 19 nt, Homo sapiens
  misc_RNA (1)...(19): siRNA sense strand
aaacggucccaauaucuug

SEQ ID NO: 187657 - RNA, 19 nt, Homo sapiens
  misc_RNA (1)...(19): siRNA sense strand
cuauauugguaucaacaug

SEQ ID NO: 187658 - RNA, 19 nt, Homo sapiens
  misc_RNA (1)...(19): siRNA sense strand
ucuaugugcucugaguauu

SEQ ID NO: 187659 - RNA, 19 nt, Homo sapiens
  misc_RNA (1)...(19): siRNA sense strand
caugcagauugcuuuaaau

SEQ ID NO: 187660 - RNA, 19 nt, Homo sapiens
  misc_RNA (1)...(19): siRNA sense strand
cgaaacggucccaauaucu

SEQ ID NO: 187661 - RNA, 19 nt, Homo sapiens
  misc_RNA (1)...(19): siRNA sense strand
guaagcuggugccuuucau

SEQ ID NO: 187662 - RNA, 19 nt, Homo sapiens
  misc_RNA (1)...(19): siRNA sense strand
ugggagaccugcugcacau

SEQ ID NO: 187663 - RNA, 19 nt, Homo sapiens
  misc_RNA (1)...(19): siRNA sense strand
gacagcaguagaaauuguu

SEQ ID NO: 187664 - RNA, 19 nt, Homo sapiens
  misc_RNA (1)...(19): siRNA sense strand
uuaacccaauugcucugua

SEQ ID NO: 187665 - RNA, 19 nt, Homo sapiens
  misc_RNA (1)...(19): siRNA sense strand
cagaaugaucccaauagau

SEQ ID NO: 187666 - RNA, 19 nt, Homo sapiens
  misc_RNA (1)...(19): siRNA sense strand
cauuggccaucacugcauu

SEQ ID NO: 187667 - RNA, 19 nt, Homo sapiens
  misc_RNA (1)...(19): siRNA sense strand
ggaaguuaucugcgaaucu

SEQ ID NO: 187668 - RNA, 19 nt, Homo sapiens
  misc_RNA (1)...(19): siRNA sense strand
gccauagguuuugauauaa

SEQ ID NO: 187669 - RNA, 19 nt, Homo sapiens
  misc_RNA (1)...(19): siRNA sense strand
gaagccauagguuuugaua

SEQ ID NO: 187670 - RNA, 19 nt, Homo sapiens
  misc_RNA (1)...(19): siRNA sense strand
cugcggaggugccuaaagg

SEQ ID NO: 187671 - RNA, 19 nt, Homo sapiens
  misc_RNA (1)...(19): siRNA sense strand
gggaacuccacacuucuga

SEQ ID NO: 187672 - RNA, 19 nt, Homo sapiens
  misc_RNA (1)...(19): siRNA sense strand
auaaugacgccacccacua

SEQ ID NO: 187673 - RNA, 19 nt, Homo sapiens
  misc_RNA (1)...(19): siRNA sense strand
gaacaagugcaugcgaaac

SEQ ID NO: 187674 - RNA, 19 nt, Homo sapiens
  misc_RNA (1)...(19): siRNA sense strand
gccaaggacccaucgagau

SEQ ID NO: 187675 - RNA, 19 nt, Homo sapiens
  misc_RNA (1)...(19): siRNA sense strand
ggcagaggacuggccauuu

SEQ ID NO: 187676 - RNA, 19 nt, Homo sapiens
  misc_RNA (1)...(19): siRNA sense strand
guaucaacauggcuucacu

SEQ ID NO: 187677 - RNA, 19 nt, Homo sapiens
  misc_RNA (1)...(19): siRNA sense strand
ugcuuuaaaugaucaccua

SEQ ID NO: 187678 - RNA, 19 nt, Homo sapiens
  misc_RNA (1)...(19): siRNA sense strand
cuacaaaggaaguuaucug

SEQ ID NO: 187679 - RNA, 19 nt, Homo sapiens
  misc_RNA (1)...(19): siRNA sense strand
uugcaaaccgcagagauaa

SEQ ID NO: 187680 - RNA, 19 nt, Homo sapiens
  misc_RNA (1)...(19): siRNA sense strand
augcgaaacggucccaaua

SEQ ID NO: 187681 - RNA, 19 nt, Homo sapiens
  misc_RNA (1)...(19): siRNA sense strand
gagaucaaggagacuuuca

SEQ ID NO: 187682 - RNA, 19 nt, Homo sapiens
  misc_RNA (1)...(19): siRNA sense strand
auggacagcaguagaaauu

SEQ ID NO: 187683 - RNA, 19 nt, Homo sapiens
  misc_RNA (1)...(19): siRNA sense strand
uuugcaaaccgcagagaua

SEQ ID NO: 187684 - RNA, 19 nt, Homo sapiens
  misc_RNA (1)...(19): siRNA sense strand
auucugaagcucacucuuu

SEQ ID NO: 187685 - RNA, 19 nt, Homo sapiens
  misc_RNA (1)...(19): siRNA sense strand
caaaccgcagagauaauga

SEQ ID NO: 187686 - RNA, 19 nt, Homo sapiens
  misc_RNA (1)...(19): siRNA sense strand
gguggucucugugguucug

SEQ ID NO: 187687 - RNA, 19 nt, Homo sapiens
  misc_RNA (1)...(19): siRNA sense strand
guugguauuggacuauauu

SEQ ID NO: 187688 - RNA, 19 nt, Homo sapiens
  misc_RNA (1)...(19): siRNA sense strand
uggcaugcagauugcuuua

SEQ ID NO: 187689 - RNA, 19 nt, Homo sapiens
  misc_RNA (1)...(19): siRNA sense strand
ucugagaauuaucuacaag

SEQ ID NO: 187690 - RNA, 19 nt, Homo sapiens
  misc_RNA (1)...(19): siRNA sense strand
caaggacccaucgagauca

SEQ ID NO: 187691 - RNA, 19 nt, Homo sapiens
  misc_RNA (1)...(19): siRNA sense strand
gagaauuaucuacaagaac

SEQ ID NO: 187692 - RNA, 19 nt, Homo sapiens
  misc_RNA (1)...(19): siRNA sense strand
cugagucuaugugcucuga

SEQ ID NO: 187693 - RNA, 19 nt, Homo sapiens
  misc_RNA (1)...(19): siRNA sense strand
agaacaagugcaugcgaaa

SEQ ID NO: 187694 - RNA, 19 nt, Homo sapiens
  misc_RNA (1)...(19): siRNA sense strand
gagacuuucaaauacauca

SEQ ID NO: 187695 - RNA, 19 nt, Homo sapiens
  misc_RNA (1)...(19): siRNA sense strand
gcagaggacuggccauuug

SEQ ID NO: 187696 - RNA, 19 nt, Homo sapiens
  misc_RNA (1)...(19): siRNA sense strand
ucaaggagacuuucaaaua

SEQ ID NO: 187697 - RNA, 19 nt, Homo sapiens
  misc_RNA (1)...(19): siRNA sense strand
ucacugaauuccugcauua

SEQ ID NO: 187698 - RNA, 19 nt, Homo sapiens
  misc_RNA (1)...(19): siRNA sense strand
gcagauugcuuuaaaugau

SEQ ID NO: 187699 - RNA, 19 nt, Homo sapiens
  misc_RNA (1)...(19): siRNA sense strand
gaagcucacucuuuauaau

SEQ ID NO: 187700 - RNA, 19 nt, Homo sapiens
  misc_RNA (1)...(19): siRNA sense strand
gcaugcagauugcuuuaaa

SEQ ID NO: 187701 - RNA, 19 nt, Homo sapiens
  misc_RNA (1)...(19): siRNA sense strand
caaggagacuuucaaauac

SEQ ID NO: 187702 - RNA, 19 nt, Homo sapiens
  misc_RNA (1)...(19): siRNA sense strand
ggacagcaguagaaauugu

SEQ ID NO: 187703 - RNA, 19 nt, Homo sapiens
  misc_RNA (1)...(19): siRNA sense strand
ggaaauaagcuaguaaugu

SEQ ID NO: 187704 - RNA, 19 nt, Homo sapiens
  misc_RNA (1)...(19): siRNA sense strand
gaaguuaucugcgaaucug

SEQ ID NO: 187705 - RNA, 19 nt, Homo sapiens
  misc_RNA (1)...(19): siRNA sense strand
guauuggacuauauuggua

SEQ ID NO: 187706 - RNA, 19 nt, Homo sapiens
  misc_RNA (1)...(19): siRNA sense strand
ccaacaauguggccagaaa

SEQ ID NO: 187707 - RNA, 19 nt, Homo sapiens
  misc_RNA (1)...(19): siRNA sense strand
ugaaugugaugguacagua

SEQ ID NO: 187708 - RNA, 19 nt, Homo sapiens
  misc_RNA (1)...(19): siRNA sense strand
ggaguagaauuaaaggaau

SEQ ID NO: 187709 - RNA, 19 nt, Homo sapiens
  misc_RNA (1)...(19): siRNA sense strand
cuaaugaccugugaaaugu

SEQ ID NO: 187710 - RNA, 19 nt, Homo sapiens
  misc_RNA (1)...(19): siRNA sense strand
uguguaagcuggugccuuu

SEQ ID NO: 187711 - RNA, 19 nt, Homo sapiens
  misc_RNA (1)...(19): siRNA sense strand
ccagaaagaaagagcaaua

SEQ ID NO: 187712 - RNA, 19 nt, Homo sapiens
  misc_RNA (1)...(19): siRNA sense strand
ggccacauguuggaaauaa

SEQ ID NO: 187713 - RNA, 19 nt, Homo sapiens
  misc_RNA (1)...(19): siRNA sense strand
cccaauagaugugaacuuu

SEQ ID NO: 187714 - RNA, 19 nt, Homo sapiens
  misc_RNA (1)...(19): siRNA sense strand
gcgaaacggucccaauauc

SEQ ID NO: 187715 - RNA, 19 nt, Homo sapiens
  misc_RNA (1)...(19): siRNA sense strand
ugugaaauguugagaaaga

SEQ ID NO: 187716 - RNA, 19 nt, Homo sapiens
  misc_RNA (1)...(19): siRNA sense strand
gaaacggucccaauaucuu

SEQ ID NO: 187717 - RNA, 19 nt, Homo sapiens
  misc_RNA (1)...(19): siRNA sense strand
gaucaaggagacuuucaaa

SEQ ID NO: 187718 - RNA, 19 nt, Homo sapiens
  misc_RNA (1)...(19): siRNA sense strand
gaacuccacacuucugaga

SEQ ID NO: 187719 - RNA, 19 nt, Homo sapiens
  misc_RNA (1)...(19): siRNA sense strand
gcaaaccgcagagauaaug

SEQ ID NO: 187720 - RNA, 19 nt, Homo sapiens
  misc_RNA (1)...(19): siRNA sense strand
ccugugaaauguugagaaa

SEQ ID NO: 187721 - RNA, 19 nt, Homo sapiens
  misc_RNA (1)...(19): siRNA sense strand
ucagaaugaucccaauaga

SEQ ID NO: 187722 - RNA, 19 nt, Homo sapiens
  misc_RNA (1)...(19): siRNA sense strand
uaaaugaucaccuaaagca

SEQ ID NO: 187723 - RNA, 19 nt, Homo sapiens
  misc_RNA (1)...(19): siRNA sense strand
agaaugaucccaauagaug

SEQ ID NO: 187724 - RNA, 19 nt, Homo sapiens
  misc_RNA (1)...(19): siRNA sense strand
caauagaugugaacuuuug

SEQ ID NO: 187725 - RNA, 19 nt, Homo sapiens
  misc_RNA (1)...(19): siRNA sense strand
gcuguugcuucuuggagua

SEQ ID NO: 187726 - RNA, 19 nt, Homo sapiens
  misc_RNA (1)...(19): siRNA sense strand
caauguggccagaaagaaa

SEQ ID NO: 187727 - RNA, 19 nt, Homo sapiens
  misc_RNA (1)...(19): siRNA sense strand
uaacccaauugcucuguau

SEQ ID NO: 187728 - RNA, 19 nt, Homo sapiens
  misc_RNA (1)...(19): siRNA sense strand
cgaaucugcuugcuucauc

SEQ ID NO: 187729 - RNA, 19 nt, Homo sapiens
  misc_RNA (1)...(19): siRNA sense strand
caauugcucuguauuuggu

SEQ ID NO: 187730 - RNA, 19 nt, Homo sapiens
  misc_RNA (1)...(19): siRNA sense strand
ggacuacaaaggaaguuau

SEQ ID NO: 187731 - RNA, 19 nt, Homo sapiens
  misc_RNA (1)...(19): siRNA sense strand
gaaugugaugguacaguaa

SEQ ID NO: 187732 - RNA, 19 nt, Homo sapiens
  misc_RNA (1)...(19): siRNA sense strand
uucugaagcucacucuuua

SEQ ID NO: 187733 - RNA, 19 nt, Homo sapiens
  misc_RNA (1)...(19): siRNA sense strand
agacagcuuucaugcaguu

SEQ ID NO: 187734 - RNA, 19 nt, Homo sapiens
  misc_RNA (1)...(19): siRNA sense strand
uaaugacgccacccacuaa

SEQ ID NO: 187735 - RNA, 19 nt, Homo sapiens
  misc_RNA (1)...(19): siRNA sense strand
gaugugaacuuuugagcuu

SEQ ID NO: 187736 - RNA, 19 nt, Homo sapiens
  misc_RNA (1)...(19): siRNA sense strand
uaugugcucugaguauuga

SEQ ID NO: 187737 - RNA, 19 nt, Homo sapiens
  misc_RNA (1)...(19): siRNA sense strand
cagaaagaaagagcaauaa

SEQ ID NO: 187738 - RNA, 19 nt, Homo sapiens
  misc_RNA (1)...(19): siRNA sense strand
gugaaauguugagaaagaa

SEQ ID NO: 187739 - RNA, 19 nt, Homo sapiens
  misc_RNA (1)...(19): siRNA sense strand
cugaagcucacucuuuaua

SEQ ID NO: 187740 - RNA, 19 nt, Homo sapiens
  misc_RNA (1)...(19): siRNA sense strand
cagauugcuuuaaaugauc

SEQ ID NO: 187741 - RNA, 19 nt, Homo sapiens
  misc_RNA (1)...(19): siRNA sense strand
cccaauugcucuguauuug

SEQ ID NO: 187742 - RNA, 19 nt, Homo sapiens
  misc_RNA (1)...(19): siRNA sense strand
ggacuauauugguaucaac

SEQ ID NO: 187743 - RNA, 19 nt, Homo sapiens
  misc_RNA (1)...(19): siRNA sense strand
acacuaaugaccugugaaa

SEQ ID NO: 187744 - RNA, 19 nt, Homo sapiens
  misc_RNA (1)...(19): siRNA sense strand
ugauuuggguggucucugu

SEQ ID NO: 187745 - RNA, 19 nt, Homo sapiens
  misc_RNA (1)...(19): siRNA sense strand
ugaagcucacucuuuauaa

SEQ ID NO: 187746 - RNA, 19 nt, Homo sapiens
  misc_RNA (1)...(19): siRNA sense strand
acuaaugaccugugaaaug

SEQ ID NO: 187747 - RNA, 19 nt, Homo sapiens
  misc_RNA (1)...(19): siRNA sense strand
agccauagguuuugauaua

SEQ ID NO: 187748 - RNA, 19 nt, Homo sapiens
  misc_RNA (1)...(19): siRNA sense strand
gcuggugccuuucauacag

SEQ ID NO: 187749 - RNA, 19 nt, Homo sapiens
  misc_RNA (1)...(19): siRNA sense strand
aaugaccugugaaauguug

SEQ ID NO: 187750 - RNA, 19 nt, Homo sapiens
  misc_RNA (1)...(19): siRNA sense strand
ccaaggacccaucgagauc

SEQ ID NO: 187751 - RNA, 19 nt, Homo sapiens
  misc_RNA (1)...(19): siRNA sense strand
ugagcuuucuguugguauu

SEQ ID NO: 187752 - RNA, 19 nt, Homo sapiens
  misc_RNA (1)...(19): siRNA sense strand
ucagaagacagcuuucaug

SEQ ID NO: 187753 - RNA, 19 nt, Homo sapiens
  misc_RNA (1)...(19): siRNA sense strand
aaggagacuuucaaauaca

SEQ ID NO: 187754 - RNA, 19 nt, Homo sapiens
  misc_RNA (1)...(19): siRNA sense strand
gaaugaucccaauagaugu

SEQ ID NO: 187755 - RNA, 19 nt, Homo sapiens
  misc_RNA (1)...(19): siRNA sense strand
gagucuaugugcucugagu

SEQ ID NO: 187756 - RNA, 19 nt, Homo sapiens
  misc_RNA (1)...(19): siRNA sense strand
cagcuuucaugcaguuuua

SEQ ID NO: 187757 - RNA, 19 nt, Homo sapiens
  misc_RNA (1)...(19): siRNA sense strand
gguucuggcugucccugaa

SEQ ID NO: 187758 - RNA, 19 nt, Homo sapiens
  misc_RNA (1)...(19): siRNA sense strand
uaagcuggugccuuucaua

SEQ ID NO: 187759 - RNA, 19 nt, Homo sapiens
  misc_RNA (1)...(19): siRNA sense strand
gacagggccacuccgcuuu

SEQ ID NO: 187760 - RNA, 19 nt, Homo sapiens
  misc_RNA (1)...(19): siRNA sense strand
gguauuggacuauauuggu

SEQ ID NO: 187761 - RNA, 19 nt, Homo sapiens
  misc_RNA (1)...(19): siRNA sense strand
auacacuaaugaccuguga

SEQ ID NO: 187762 - RNA, 19 nt, Homo sapiens
  misc_RNA (1)...(19): siRNA sense strand
uggaguagaauuaaaggaa

SEQ ID NO: 187763 - RNA, 19 nt, Homo sapiens
  misc_RNA (1)...(19): siRNA sense strand
aaacggucccaauaucuug

SEQ ID NO: 187764 - RNA, 19 nt, Homo sapiens
  misc_RNA (1)...(19): siRNA sense strand
cuauauugguaucaacaug

SEQ ID NO: 187765 - RNA, 19 nt, Homo sapiens
  misc_RNA (1)...(19): siRNA sense strand
ucuaugugcucugaguauu

SEQ ID NO: 187766 - RNA, 19 nt, Homo sapiens
  misc_RNA (1)...(19): siRNA sense strand
caugcagauugcuuuaaau

SEQ ID NO: 187767 - RNA, 19 nt, Homo sapiens
  misc_RNA (1)...(19): siRNA sense strand
cgaaacggucccaauaucu

SEQ ID NO: 187768 - RNA, 19 nt, Homo sapiens
  misc_RNA (1)...(19): siRNA sense strand
guaagcuggugccuuucau

SEQ ID NO: 187769 - RNA, 19 nt, Homo sapiens
  misc_RNA (1)...(19): siRNA sense strand
ugggagaccugcugcacau

SEQ ID NO: 187770 - RNA, 19 nt, Homo sapiens
  misc_RNA (1)...(19): siRNA sense strand
gacagcaguagaaauuguu

SEQ ID NO: 187771 - RNA, 19 nt, Homo sapiens
  misc_RNA (1)...(19): siRNA sense strand
uuaacccaauugcucugua

SEQ ID NO: 187772 - RNA, 19 nt, Homo sapiens
  misc_RNA (1)...(19): siRNA sense strand
cagaaugaucccaauagau

SEQ ID NO: 187773 - RNA, 19 nt, Homo sapiens
  misc_RNA (1)...(19): siRNA sense strand
cauuggccaucacugcauu

SEQ ID NO: 187774 - RNA, 19 nt, Homo sapiens
  misc_RNA (1)...(19): siRNA sense strand
ggaaguuaucugcgaaucu

SEQ ID NO: 187775 - RNA, 19 nt, Homo sapiens
  misc_RNA (1)...(19): siRNA sense strand
gccauagguuuugauauaa

SEQ ID NO: 187776 - RNA, 19 nt, Homo sapiens
  misc_RNA (1)...(19): siRNA sense strand
auaaugacgccacccacua

SEQ ID NO: 187777 - RNA, 19 nt, Homo sapiens
  misc_RNA (1)...(19): siRNA sense strand
cugcggaggugccuaaagg

SEQ ID NO: 187778 - RNA, 19 nt, Homo sapiens
  misc_RNA (1)...(19): siRNA sense strand
gccaaggacccaucgagau

SEQ ID NO: 187779 - RNA, 19 nt, Homo sapiens
  misc_RNA (1)...(19): siRNA sense strand
gaacaagugcaugcgaaac

SEQ ID NO: 187780 - RNA, 19 nt, Homo sapiens
  misc_RNA (1)...(19): siRNA sense strand
gaagccauagguuuugaua

SEQ ID NO: 187781 - RNA, 19 nt, Homo sapiens
  misc_RNA (1)...(19): siRNA sense strand
gggaacuccacacuucuga

SEQ ID NO: 187782 - RNA, 19 nt, Homo sapiens
  misc_RNA (1)...(19): siRNA sense strand
ggcagaggacuggccauuu

SEQ ID NO: 187783 - RNA, 19 nt, Homo sapiens
  misc_RNA (1)...(19): siRNA sense strand
guaauguuguuuucuguca

SEQ ID NO: 187784 - RNA, 19 nt, Homo sapiens
  misc_RNA (1)...(19): siRNA sense strand
guaucaacauggcuucacu

SEQ ID NO: 187785 - RNA, 19 nt, Homo sapiens
  misc_RNA (1)...(19): siRNA sense strand
ugcuuuaaaugaucaccua

SEQ ID NO: 187786 - RNA, 19 nt, Homo sapiens
  misc_RNA (1)...(19): siRNA sense strand
cuacaaaggaaguuaucug

SEQ ID NO: 187787 - RNA, 19 nt, Homo sapiens
  misc_RNA (1)...(19): siRNA sense strand
uugcaaaccgcagagauaa

SEQ ID NO: 187788 - RNA, 19 nt, Homo sapiens
  misc_RNA (1)...(19): siRNA sense strand
gagaucaaggagacuuuca

SEQ ID NO: 187789 - RNA, 19 nt, Homo sapiens
  misc_RNA (1)...(19): siRNA sense strand
uauugaaugugaugguaca

SEQ ID NO: 187790 - RNA, 19 nt, Homo sapiens
  misc_RNA (1)...(19): siRNA sense strand
uguuggaaauaagcuagua

SEQ ID NO: 187791 - RNA, 19 nt, Homo sapiens
  misc_RNA (1)...(19): siRNA sense strand
augcgaaacggucccaaua

SEQ ID NO: 187792 - RNA, 19 nt, Homo sapiens
  misc_RNA (1)...(19): siRNA sense strand
auucugaagcucacucuuu

SEQ ID NO: 187793 - RNA, 19 nt, Homo sapiens
  misc_RNA (1)...(19): siRNA sense strand
caaaccgcagagauaauga

SEQ ID NO: 187794 - RNA, 19 nt, Homo sapiens
  misc_RNA (1)...(19): siRNA sense strand
uuugcaaaccgcagagaua

SEQ ID NO: 187795 - RNA, 19 nt, Homo sapiens
  misc_RNA (1)...(19): siRNA sense strand
gagaaagaguucaaauaca

SEQ ID NO: 187796 - RNA, 19 nt, Homo sapiens
  misc_RNA (1)...(19): siRNA sense strand
ggagaaagaguucaaauac

SEQ ID NO: 187797 - RNA, 19 nt, Homo sapiens
  misc_RNA (1)...(19): siRNA sense strand
agaaagaguucaaauacac

SEQ ID NO: 187798 - RNA, 19 nt, Homo sapiens
  misc_RNA (1)...(19): siRNA sense strand
aggagaaagaguucaaaua

SEQ ID NO: 187799 - RNA, 19 nt, Homo sapiens
  misc_RNA (1)...(19): siRNA sense strand
cagacacgcugcagaucga

SEQ ID NO: 187800 - RNA, 19 nt, Homo sapiens
  misc_RNA (1)...(19): siRNA sense strand
ugacagcgacgccaagaca

SEQ ID NO: 187801 - RNA, 19 nt, Homo sapiens
  misc_RNA (1)...(19): siRNA sense strand
gcaggagaaagaguucaaa

SEQ ID NO: 187802 - RNA, 19 nt, Homo sapiens
  misc_RNA (1)...(19): siRNA sense strand
agacagacacgcugcagau

SEQ ID NO: 187803 - RNA, 19 nt, Homo sapiens
  misc_RNA (1)...(19): siRNA sense strand
ucuccgcguucaucaagaa

SEQ ID NO: 187804 - RNA, 19 nt, Homo sapiens
  misc_RNA (1)...(19): siRNA sense strand
caaguucuccgcguucauc

SEQ ID NO: 187805 - RNA, 19 nt, Homo sapiens
  misc_RNA (1)...(19): siRNA sense strand
cggacgugcugaaggacuu

SEQ ID NO: 187806 - RNA, 19 nt, Homo sapiens
  misc_RNA (1)...(19): siRNA sense strand
ugcccauccugcucuauga

SEQ ID NO: 187807 - RNA, 19 nt, Homo sapiens
  misc_RNA (1)...(19): siRNA sense strand
caggagaaagaguucaaau

SEQ ID NO: 187808 - RNA, 19 nt, Homo sapiens
  misc_RNA (1)...(19): siRNA sense strand
uaaagaagaugcagaaguu

SEQ ID NO: 187809 - RNA, 19 nt, Homo sapiens
  misc_RNA (1)...(19): siRNA sense strand
uacaacagcugcacugaua

SEQ ID NO: 187810 - RNA, 19 nt, Homo sapiens
  misc_RNA (1)...(19): siRNA sense strand
ggacagcccugcaaguuuc

SEQ ID NO: 187811 - RNA, 19 nt, Homo sapiens
  misc_RNA (1)...(19): siRNA sense strand
acaaugaggugaagaagaa

SEQ ID NO: 187812 - RNA, 19 nt, Homo sapiens
  misc_RNA (1)...(19): siRNA sense strand
ggugagaucuucuucuuca

SEQ ID NO: 187813 - RNA, 19 nt, Homo sapiens
  misc_RNA (1)...(19): siRNA sense strand
gacaguggaugaugccuuu

SEQ ID NO: 187814 - RNA, 19 nt, Homo sapiens
  misc_RNA (1)...(19): siRNA sense strand
gcaaacaggacauuguauu

SEQ ID NO: 187815 - RNA, 19 nt, Homo sapiens
  misc_RNA (1)...(19): siRNA sense strand
ggagacaaauucuggagau

SEQ ID NO: 187816 - RNA, 19 nt, Homo sapiens
  misc_RNA (1)...(19): siRNA sense strand
ggucacagcuacuucuuca

SEQ ID NO: 187817 - RNA, 19 nt, Homo sapiens
  misc_RNA (1)...(19): siRNA sense strand
caaacaggacauuguauuu

SEQ ID NO: 187818 - RNA, 19 nt, Homo sapiens
  misc_RNA (1)...(19): siRNA sense strand
gagacaaauucuggagaua

SEQ ID NO: 187819 - RNA, 19 nt, Homo sapiens
  misc_RNA (1)...(19): siRNA sense strand
caggugaucuugaccagaa

SEQ ID NO: 187820 - RNA, 19 nt, Homo sapiens
  misc_RNA (1)...(19): siRNA sense strand
gcgaguggaugccgccuuu

SEQ ID NO: 187821 - RNA, 19 nt, Homo sapiens
  misc_RNA (1)...(19): siRNA sense strand
acaagaaccagaucacaua

SEQ ID NO: 187822 - RNA, 19 nt, Homo sapiens
  misc_RNA (1)...(19): siRNA sense strand
gacaaauucuggagauaca

SEQ ID NO: 187823 - RNA, 19 nt, Homo sapiens
  misc_RNA (1)...(19): siRNA sense strand
ggagagcugcaaccuguuu

SEQ ID NO: 187824 - RNA, 19 nt, Homo sapiens
  misc_RNA (1)...(19): siRNA sense strand
ggaaugccauccccgauaa

SEQ ID NO: 187825 - RNA, 19 nt, Homo sapiens
  misc_RNA (1)...(19): siRNA sense strand
ggagauacaaugaggugaa

SEQ ID NO: 187826 - RNA, 19 nt, Homo sapiens
  misc_RNA (1)...(19): siRNA sense strand
aacaggacauuguauuuga

SEQ ID NO: 187827 - RNA, 19 nt, Homo sapiens
  misc_RNA (1)...(19): siRNA sense strand
ucaaggaccgguucauuug

SEQ ID NO: 187828 - RNA, 19 nt, Homo sapiens
  misc_RNA (1)...(19): siRNA sense strand
ugagaaggauggcaaguac

SEQ ID NO: 187829 - RNA, 19 nt, Homo sapiens
  misc_RNA (1)...(19): siRNA sense strand
guggugagaucuucuucuu

SEQ ID NO: 187830 - RNA, 19 nt, Homo sapiens
  misc_RNA (1)...(19): siRNA sense strand
gaaggacacacuaaagaag

SEQ ID NO: 187831 - RNA, 19 nt, Homo sapiens
  misc_RNA (1)...(19): siRNA sense strand
gcucgugccuuccaagucu

SEQ ID NO: 187832 - RNA, 19 nt, Homo sapiens
  misc_RNA (1)...(19): siRNA sense strand
gauacaaugaggugaagaa

SEQ ID NO: 187833 - RNA, 19 nt, Homo sapiens
  misc_RNA (1)...(19): siRNA sense strand
ugcaauaccugaacaccuu

SEQ ID NO: 187834 - RNA, 19 nt, Homo sapiens
  misc_RNA (1)...(19): siRNA sense strand
gcagugcaauaccugaaca

SEQ ID NO: 187835 - RNA, 19 nt, Homo sapiens
  misc_RNA (1)...(19): siRNA sense strand
gaguggaugccgccuuuaa

SEQ ID NO: 187836 - RNA, 19 nt, Homo sapiens
  misc_RNA (1)...(19): siRNA sense strand
ugaaggacacacuaaagaa

SEQ ID NO: 187837 - RNA, 19 nt, Homo sapiens
  misc_RNA (1)...(19): siRNA sense strand
aaacaggacauuguauuug

SEQ ID NO: 187838 - RNA, 19 nt, Homo sapiens
  misc_RNA (1)...(19): siRNA sense strand
ggacuacgaccgcgacaag

SEQ ID NO: 187839 - RNA, 19 nt, Homo sapiens
  misc_RNA (1)...(19): siRNA sense strand
gggaaugaauacuggaucu

SEQ ID NO: 187840 - RNA, 19 nt, Homo sapiens
  misc_RNA (1)...(19): siRNA sense strand
ccacagccaacuacgauga

SEQ ID NO: 187841 - RNA, 19 nt, Homo sapiens
  misc_RNA (1)...(19): siRNA sense strand
ggccugagcucccggaaaa

SEQ ID NO: 187842 - RNA, 19 nt, Homo sapiens
  misc_RNA (1)...(19): siRNA sense strand
accaagaacuuccgucugu

SEQ ID NO: 187843 - RNA, 19 nt, Homo sapiens
  misc_RNA (1)...(19): siRNA sense strand
acccagauguggccaacua

SEQ ID NO: 187844 - RNA, 19 nt, Homo sapiens
  misc_RNA (1)...(19): siRNA sense strand
gagauacaaugaggugaag

SEQ ID NO: 187845 - RNA, 19 nt, Homo sapiens
  misc_RNA (1)...(19): siRNA sense strand
ggagaggcagacaucauga

SEQ ID NO: 187846 - RNA, 19 nt, Homo sapiens
  misc_RNA (1)...(19): siRNA sense strand
ugaagagcgugaaguuugg

SEQ ID NO: 187847 - RNA, 19 nt, Homo sapiens
  misc_RNA (1)...(19): siRNA sense strand
ggaaugaauacuggaucua

SEQ ID NO: 187848 - RNA, 19 nt, Homo sapiens
  misc_RNA (1)...(19): siRNA sense strand
aggcagacaucaugaucaa

SEQ ID NO: 187849 - RNA, 19 nt, Homo sapiens
  misc_RNA (1)...(19): siRNA sense strand
ccagacaggugaucuugac

SEQ ID NO: 187850 - RNA, 19 nt, Homo sapiens
  misc_RNA (1)...(19): siRNA sense strand
cugaagagcgugaaguuug

SEQ ID NO: 187851 - RNA, 19 nt, Homo sapiens
  misc_RNA (1)...(19): siRNA sense strand
gcagacaucaugaucaacu

SEQ ID NO: 187852 - RNA, 19 nt, Homo sapiens
  misc_RNA (1)...(19): siRNA sense strand
ggacaagaaccagaucaca

SEQ ID NO: 187853 - RNA, 19 nt, Homo sapiens
  misc_RNA (1)...(19): siRNA sense strand
gacaagaaccagaucacau

SEQ ID NO: 187854 - RNA, 19 nt, Homo sapiens
  misc_RNA (1)...(19): siRNA sense strand
gaccacagccaacuacgau

SEQ ID NO: 187855 - RNA, 19 nt, Homo sapiens
  misc_RNA (1)...(19): siRNA sense strand
gaaggacagcccugcaagu

SEQ ID NO: 187856 - RNA, 19 nt, Homo sapiens
  misc_RNA (1)...(19): siRNA sense strand
aaagauugaugcgguauac

SEQ ID NO: 187857 - RNA, 19 nt, Homo sapiens
  misc_RNA (1)...(19): siRNA sense strand
gggccucuccugacauuga

SEQ ID NO: 187858 - RNA, 19 nt, Homo sapiens
  misc_RNA (1)...(19): siRNA sense strand
gagaaccaaagucugaaga

SEQ ID NO: 187859 - RNA, 19 nt, Homo sapiens
  misc_RNA (1)...(19): siRNA sense strand
ucacuuuccugggcaacaa

SEQ ID NO: 187860 - RNA, 19 nt, Homo sapiens
  misc_RNA (1)...(19): siRNA sense strand
gaaugaauacuggaucuac

SEQ ID NO: 187861 - RNA, 19 nt, Homo sapiens
  misc_RNA (1)...(19): siRNA sense strand
ucacauacaggaucauugg

SEQ ID NO: 187862 - RNA, 19 nt, Homo sapiens
  misc_RNA (1)...(19): siRNA sense strand
cuucaagggugccuauuac

SEQ ID NO: 187863 - RNA, 19 nt, Homo sapiens
  misc_RNA (1)...(19): siRNA sense strand
gcaaccuguuugugcugaa

SEQ ID NO: 187864 - RNA, 19 nt, Homo sapiens
  misc_RNA (1)...(19): siRNA sense strand
uggcacccauuuacaccua

SEQ ID NO: 187865 - RNA, 19 nt, Homo sapiens
  misc_RNA (1)...(19): siRNA sense strand
ccuacaacuuugagaagga

SEQ ID NO: 187866 - RNA, 19 nt, Homo sapiens
  misc_RNA (1)...(19): siRNA sense strand
ccacugcgguuuucucgaa

SEQ ID NO: 187867 - RNA, 19 nt, Homo sapiens
  misc_RNA (1)...(19): siRNA sense strand
guacaacagcugcacugau

SEQ ID NO: 187868 - RNA, 19 nt, Homo sapiens
  misc_RNA (1)...(19): siRNA sense strand
caaauucuggagauacaau

SEQ ID NO: 187869 - RNA, 19 nt, Homo sapiens
  misc_RNA (1)...(19): siRNA sense strand
ccaccuacaacuuugagaa

SEQ ID NO: 187870 - RNA, 19 nt, Homo sapiens
  misc_RNA (1)...(19): siRNA sense strand
gggagcauggcgauggaua

SEQ ID NO: 187871 - RNA, 19 nt, Homo sapiens
  misc_RNA (1)...(19): siRNA sense strand
ucacagcuacuucuucaag

SEQ ID NO: 187872 - RNA, 19 nt, Homo sapiens
  misc_RNA (1)...(19): siRNA sense strand
cgucgcccaucaucaaguu

SEQ ID NO: 187873 - RNA, 19 nt, Homo sapiens
  misc_RNA (1)...(19): siRNA sense strand
cugcaaacaggacauugua

SEQ ID NO: 187874 - RNA, 19 nt, Homo sapiens
  misc_RNA (1)...(19): siRNA sense strand
gaucuugaccagaauacca

SEQ ID NO: 187875 - RNA, 19 nt, Homo sapiens
  misc_RNA (1)...(19): siRNA sense strand
cuaaagaagaugcagaagu

SEQ ID NO: 187876 - RNA, 19 nt, Homo sapiens
  misc_RNA (1)...(19): siRNA sense strand
ggaggagaaggcuguguuc

SEQ ID NO: 187877 - RNA, 19 nt, Homo sapiens
  misc_RNA (1)...(19): siRNA sense strand
caggaucauuggcuacaca

SEQ ID NO: 187878 - RNA, 19 nt, Homo sapiens
  misc_RNA (1)...(19): siRNA sense strand
gaagcuggagaaccaaagu

SEQ ID NO: 187879 - RNA, 19 nt, Homo sapiens
  misc_RNA (1)...(19): siRNA sense strand
gcugaaggacacacuaaag

SEQ ID NO: 187880 - RNA, 19 nt, Homo sapiens
  misc_RNA (1)...(19): siRNA sense strand
gcuauggaccuugggagaa

SEQ ID NO: 187881 - RNA, 19 nt, Homo sapiens
  misc_RNA (1)...(19): siRNA sense strand
agaauaccaucgagaccau

SEQ ID NO: 187882 - RNA, 19 nt, Homo sapiens
  misc_RNA (1)...(19): siRNA sense strand
gugcugaaggacacacuaa

SEQ ID NO: 187883 - RNA, 19 nt, Homo sapiens
  misc_RNA (1)...(19): siRNA sense strand
gacaucaugaucaacuuug

SEQ ID NO: 187884 - RNA, 19 nt, Homo sapiens
  misc_RNA (1)...(19): siRNA sense strand
cagacaucaugaucaacuu

SEQ ID NO: 187885 - RNA, 19 nt, Homo sapiens
  misc_RNA (1)...(19): siRNA sense strand
agaaccagaucacauacag

SEQ ID NO: 187886 - RNA, 19 nt, Homo sapiens
  misc_RNA (1)...(19): siRNA sense strand
ucuucaagggugccuauua

SEQ ID NO: 187887 - RNA, 19 nt, Homo sapiens
  misc_RNA (1)...(19): siRNA sense strand
gaucugcaaacaggacauu

SEQ ID NO: 187888 - RNA, 19 nt, Homo sapiens
  misc_RNA (1)...(19): siRNA sense strand
gcauucaggagcucuaugg

SEQ ID NO: 187889 - RNA, 19 nt, Homo sapiens
  misc_RNA (1)...(19): siRNA sense strand
cugaaggacacacuaaaga

SEQ ID NO: 187890 - RNA, 19 nt, Homo sapiens
  misc_RNA (1)...(19): siRNA sense strand
agacaucaugaucaacuuu

SEQ ID NO: 187891 - RNA, 19 nt, Homo sapiens
  misc_RNA (1)...(19): siRNA sense strand
cuggagaaccaaagucuga

SEQ ID NO: 187892 - RNA, 19 nt, Homo sapiens
  misc_RNA (1)...(19): siRNA sense strand
gcacccauuuacaccuaca

SEQ ID NO: 187893 - RNA, 19 nt, Homo sapiens
  misc_RNA (1)...(19): siRNA sense strand
cagggcacauccuaugaca

SEQ ID NO: 187894 - RNA, 19 nt, Homo sapiens
  misc_RNA (1)...(19): siRNA sense strand
ggugaucuugaccagaaua

SEQ ID NO: 187895 - RNA, 19 nt, Homo sapiens
  misc_RNA (1)...(19): siRNA sense strand
cuacaacuuugagaaggau

SEQ ID NO: 187896 - RNA, 19 nt, Homo sapiens
  misc_RNA (1)...(19): siRNA sense strand
gccuuuaacuggagcaaaa

SEQ ID NO: 187897 - RNA, 19 nt, Homo sapiens
  misc_RNA (1)...(19): siRNA sense strand
uucaaggaccgguucauuu

SEQ ID NO: 187898 - RNA, 19 nt, Homo sapiens
  misc_RNA (1)...(19): siRNA sense strand
acaccuacaccaagaacuu

SEQ ID NO: 187899 - RNA, 19 nt, Homo sapiens
  misc_RNA (1)...(19): siRNA sense strand
ccauuuacaccuacaccaa

SEQ ID NO: 187900 - RNA, 19 nt, Homo sapiens
  misc_RNA (1)...(19): siRNA sense strand
gcagugacggaaagaugug

SEQ ID NO: 187901 - RNA, 19 nt, Homo sapiens
  misc_RNA (1)...(19): siRNA sense strand
gaggcagacaucaugauca

SEQ ID NO: 187902 - RNA, 19 nt, Homo sapiens
  misc_RNA (1)...(19): siRNA sense strand
acgaugagcuauggaccuu

SEQ ID NO: 187903 - RNA, 19 nt, Homo sapiens
  misc_RNA (1)...(19): siRNA sense strand
aaacaagaagacauacauc

SEQ ID NO: 187904 - RNA, 19 nt, Homo sapiens
  misc_RNA (1)...(19): siRNA sense strand
acaggacauuguauuugau

SEQ ID NO: 187905 - RNA, 19 nt, Homo sapiens
  misc_RNA (1)...(19): siRNA sense strand
cacuaaagaagaugcagaa

SEQ ID NO: 187906 - RNA, 19 nt, Homo sapiens
  misc_RNA (1)...(19): siRNA sense strand
agaccgccauguccacugu

SEQ ID NO: 187907 - RNA, 19 nt, Homo sapiens
  misc_RNA (1)...(19): siRNA sense strand
ucaauggcaaggaguacaa

SEQ ID NO: 187908 - RNA, 19 nt, Homo sapiens
  misc_RNA (1)...(19): siRNA sense strand
ggaaagacuucaaaucaug

SEQ ID NO: 187909 - RNA, 19 nt, Homo sapiens
  misc_RNA (1)...(19): siRNA sense strand
gcaguggucuuccaaauau

SEQ ID NO: 187910 - RNA, 19 nt, Homo sapiens
  misc_RNA (1)...(19): siRNA sense strand
gaaaugcuauggauuacau

SEQ ID NO: 187911 - RNA, 19 nt, Homo sapiens
  misc_RNA (1)...(19): siRNA sense strand
gggcauggcuauucucauu

SEQ ID NO: 187912 - RNA, 19 nt, Homo sapiens
  misc_RNA (1)...(19): siRNA sense strand
gaaccuaacuucuguugac

SEQ ID NO: 187913 - RNA, 19 nt, Homo sapiens
  misc_RNA (1)...(19): siRNA sense strand
gaaccagaaccacagauuu

SEQ ID NO: 187914 - RNA, 19 nt, Homo sapiens
  misc_RNA (1)...(19): siRNA sense strand
caaguaaaccagcguguaa

SEQ ID NO: 187915 - RNA, 19 nt, Homo sapiens
  misc_RNA (1)...(19): siRNA sense strand
caagcugucuuaaggaguu

SEQ ID NO: 187916 - RNA, 19 nt, Homo sapiens
  misc_RNA (1)...(19): siRNA sense strand
ugagguggcugucaggaaa

SEQ ID NO: 187917 - RNA, 19 nt, Homo sapiens
  misc_RNA (1)...(19): siRNA sense strand
gcucagaugcuguugcuuu

SEQ ID NO: 187918 - RNA, 19 nt, Homo sapiens
  misc_RNA (1)...(19): siRNA sense strand
gacuucaaaucaugcaaua

SEQ ID NO: 187919 - RNA, 19 nt, Homo sapiens
  misc_RNA (1)...(19): siRNA sense strand
ggagaccuaucaccggauu

SEQ ID NO: 187920 - RNA, 19 nt, Homo sapiens
  misc_RNA (1)...(19): siRNA sense strand
gcagccagauuaguagaaa

SEQ ID NO: 187921 - RNA, 19 nt, Homo sapiens
  misc_RNA (1)...(19): siRNA sense strand
ugaagaagaugagggaguu

SEQ ID NO: 187922 - RNA, 19 nt, Homo sapiens
  misc_RNA (1)...(19): siRNA sense strand
gcuaagaacuccccacuga

SEQ ID NO: 187923 - RNA, 19 nt, Homo sapiens
  misc_RNA (1)...(19): siRNA sense strand
ugacagagccucagauuac

SEQ ID NO: 187924 - RNA, 19 nt, Homo sapiens
  misc_RNA (1)...(19): siRNA sense strand
ugaaaccgcugaguaacaa

SEQ ID NO: 187925 - RNA, 19 nt, Homo sapiens
  misc_RNA (1)...(19): siRNA sense strand
gagaaaacaugcugaugaa

SEQ ID NO: 187926 - RNA, 19 nt, Homo sapiens
  misc_RNA (1)...(19): siRNA sense strand
guuuaugucugcuguauuc

SEQ ID NO: 187927 - RNA, 19 nt, Homo sapiens
  misc_RNA (1)...(19): siRNA sense strand
ugaagucacugcaguccaa

SEQ ID NO: 187928 - RNA, 19 nt, Homo sapiens
  misc_RNA (1)...(19): siRNA sense strand
caaauuugguuaugaugag

SEQ ID NO: 187929 - RNA, 19 nt, Homo sapiens
  misc_RNA (1)...(19): siRNA sense strand
uaacuucuguugaccuugu

SEQ ID NO: 187930 - RNA, 19 nt, Homo sapiens
  misc_RNA (1)...(19): siRNA sense strand
ugaacgaccugcccaguca

SEQ ID NO: 187931 - RNA, 19 nt, Homo sapiens
  misc_RNA (1)...(19): siRNA sense strand
ugaguaacaagcugacuua

SEQ ID NO: 187932 - RNA, 19 nt, Homo sapiens
  misc_RNA (1)...(19): siRNA sense strand
ggccaaccaugguggauau

SEQ ID NO: 187933 - RNA, 19 nt, Homo sapiens
  misc_RNA (1)...(19): siRNA sense strand
uaucguaccuauucgugaa

SEQ ID NO: 187934 - RNA, 19 nt, Homo sapiens
  misc_RNA (1)...(19): siRNA sense strand
aagcagagguccacgaauc

SEQ ID NO: 187935 - RNA, 19 nt, Homo sapiens
  misc_RNA (1)...(19): siRNA sense strand
ggcaugguguccuauuuga

SEQ ID NO: 187936 - RNA, 19 nt, Homo sapiens
  misc_RNA (1)...(19): siRNA sense strand
ccgcuggacugaaggcuuu

SEQ ID NO: 187937 - RNA, 19 nt, Homo sapiens
  misc_RNA (1)...(19): siRNA sense strand
gacaauggcuaccucaaaa

SEQ ID NO: 187938 - RNA, 19 nt, Homo sapiens
  misc_RNA (1)...(19): siRNA sense strand
gaguuuaugucugcuguau

SEQ ID NO: 187939 - RNA, 19 nt, Homo sapiens
  misc_RNA (1)...(19): siRNA sense strand
cgagagaucgagaacauga

SEQ ID NO: 187940 - RNA, 19 nt, Homo sapiens
  misc_RNA (1)...(19): siRNA sense strand
gccgagagaucgagaacau

SEQ ID NO: 187941 - RNA, 19 nt, Homo sapiens
  misc_RNA (1)...(19): siRNA sense strand
ggaguucauucucaacagu

SEQ ID NO: 187942 - RNA, 19 nt, Homo sapiens
  misc_RNA (1)...(19): siRNA sense strand
gaauguguaugaaaacuug

SEQ ID NO: 187943 - RNA, 19 nt, Homo sapiens
  misc_RNA (1)...(19): siRNA sense strand
caaccaugguggauaucaa

SEQ ID NO: 187944 - RNA, 19 nt, Homo sapiens
  misc_RNA (1)...(19): siRNA sense strand
ccagcaguauaaacucuuu

SEQ ID NO: 187945 - RNA, 19 nt, Homo sapiens
  misc_RNA (1)...(19): siRNA sense strand
cugaugaaauuaugugguu

SEQ ID NO: 187946 - RNA, 19 nt, Homo sapiens
  misc_RNA (1)...(19): siRNA sense strand
cauaagccuuugccaggaa

SEQ ID NO: 187947 - RNA, 19 nt, Homo sapiens
  misc_RNA (1)...(19): siRNA sense strand
acugugaccuccauuaaau

SEQ ID NO: 187948 - RNA, 19 nt, Homo sapiens
  misc_RNA (1)...(19): siRNA sense strand
ggaaaccacagccacguau

SEQ ID NO: 187949 - RNA, 19 nt, Homo sapiens
  misc_RNA (1)...(19): siRNA sense strand
aaaacaugcugaugaagua

SEQ ID NO: 187950 - RNA, 19 nt, Homo sapiens
  misc_RNA (1)...(19): siRNA sense strand
gagcaagugaggcacauug

SEQ ID NO: 187951 - RNA, 19 nt, Homo sapiens
  misc_RNA (1)...(19): siRNA sense strand
uugcccagcucaucacuaa

SEQ ID NO: 187952 - RNA, 19 nt, Homo sapiens
  misc_RNA (1)...(19): siRNA sense strand
caaagcagagguccacgaa

SEQ ID NO: 187953 - RNA, 19 nt, Homo sapiens
  misc_RNA (1)...(19): siRNA sense strand
uaaaccagcguguaaagga

SEQ ID NO: 187954 - RNA, 19 nt, Homo sapiens
  misc_RNA (1)...(19): siRNA sense strand
ggaauuaccguuggugaca

SEQ ID NO: 187955 - RNA, 19 nt, Homo sapiens
  misc_RNA (1)...(19): siRNA sense strand
gcuaugaugggaaugugua

SEQ ID NO: 187956 - RNA, 19 nt, Homo sapiens
  misc_RNA (1)...(19): siRNA sense strand
caagauaaagccauucaag

SEQ ID NO: 187957 - RNA, 19 nt, Homo sapiens
  misc_RNA (1)...(19): siRNA sense strand
ugcaaacacuggcauugaa

SEQ ID NO: 187958 - RNA, 19 nt, Homo sapiens
  misc_RNA (1)...(19): siRNA sense strand
ucuaaggcgugcaccauug

SEQ ID NO: 187959 - RNA, 19 nt, Homo sapiens
  misc_RNA (1)...(19): siRNA sense strand
uggaaagacuucaaaucau

SEQ ID NO: 187960 - RNA, 19 nt, Homo sapiens
  misc_RNA (1)...(19): siRNA sense strand
cagagguccacgaaucuua

SEQ ID NO: 187961 - RNA, 19 nt, Homo sapiens
  misc_RNA (1)...(19): siRNA sense strand
cauucaagcugucuuaagg

SEQ ID NO: 187962 - RNA, 19 nt, Homo sapiens
  misc_RNA (1)...(19): siRNA sense strand
gccuaugccuuccaguuug

SEQ ID NO: 187963 - RNA, 19 nt, Homo sapiens
  misc_RNA (1)...(19): siRNA sense strand
ggggaaaugcuauggauua

SEQ ID NO: 187964 - RNA, 19 nt, Homo sapiens
  misc_RNA (1)...(19): siRNA sense strand
cgugaaaucgggacccaua

SEQ ID NO: 187965 - RNA, 19 nt, Homo sapiens
  misc_RNA (1)...(19): siRNA sense strand
gaugggaauguguaugaaa

SEQ ID NO: 187966 - RNA, 19 nt, Homo sapiens
  misc_RNA (1)...(19): siRNA sense strand
guggcaugguguccuauuu

SEQ ID NO: 187967 - RNA, 19 nt, Homo sapiens
  misc_RNA (1)...(19): siRNA sense strand
cuacugugaccuccauuaa

SEQ ID NO: 187968 - RNA, 19 nt, Homo sapiens
  misc_RNA (1)...(19): siRNA sense strand
gacagagccucagauuaca

SEQ ID NO: 187969 - RNA, 19 nt, Homo sapiens
  misc_RNA (1)...(19): siRNA sense strand
agacaauggcuaccucaaa

SEQ ID NO: 187970 - RNA, 19 nt, Homo sapiens
  misc_RNA (1)...(19): siRNA sense strand
uggauuacaugccuuuauc

SEQ ID NO: 187971 - RNA, 19 nt, Homo sapiens
  misc_RNA (1)...(19): siRNA sense strand
caucguauucccagagaaa

SEQ ID NO: 187972 - RNA, 19 nt, Homo sapiens
  misc_RNA (1)...(19): siRNA sense strand
ucgagaacaugauccugaa

SEQ ID NO: 187973 - RNA, 19 nt, Homo sapiens
  misc_RNA (1)...(19): siRNA sense strand
gaucaggugcacucaggaa

SEQ ID NO: 187974 - RNA, 19 nt, Homo sapiens
  misc_RNA (1)...(19): siRNA sense strand
agaaaacacugucaugaug

SEQ ID NO: 187975 - RNA, 19 nt, Homo sapiens
  misc_RNA (1)...(19): siRNA sense strand
gcaccauugccauccgaua

SEQ ID NO: 187976 - RNA, 19 nt, Homo sapiens
  misc_RNA (1)...(19): siRNA sense strand
gggaaaugcuauggauuac

SEQ ID NO: 187977 - RNA, 19 nt, Homo sapiens
  misc_RNA (1)...(19): siRNA sense strand
gugcuuggccgcuaugaug

SEQ ID NO: 187978 - RNA, 19 nt, Homo sapiens
  misc_RNA (1)...(19): siRNA sense strand
ccucaccgcuggacugaag

SEQ ID NO: 187979 - RNA, 19 nt, Homo sapiens
  misc_RNA (1)...(19): siRNA sense strand
uaacgaaggcauuggucaa

SEQ ID NO: 187980 - RNA, 19 nt, Homo sapiens
  misc_RNA (1)...(19): siRNA sense strand
aaaccacagccacguauga

SEQ ID NO: 187981 - RNA, 19 nt, Homo sapiens
  misc_RNA (1)...(19): siRNA sense strand
uggcaucgcugacccugau

SEQ ID NO: 187982 - RNA, 19 nt, Homo sapiens
  misc_RNA (1)...(19): siRNA sense strand
gcauggcuauucucauugc

SEQ ID NO: 187983 - RNA, 19 nt, Homo sapiens
  misc_RNA (1)...(19): siRNA sense strand
uuucaaacccagcaguaua

SEQ ID NO: 187984 - RNA, 19 nt, Homo sapiens
  misc_RNA (1)...(19): siRNA sense strand
gaagccugauggcacauac

SEQ ID NO: 187985 - RNA, 19 nt, Homo sapiens
  misc_RNA (1)...(19): siRNA sense strand
acaagcaccugaagucacu

SEQ ID NO: 187986 - RNA, 19 nt, Homo sapiens
  misc_RNA (1)...(19): siRNA sense strand
gaagaagaugagggaguuu

SEQ ID NO: 187987 - RNA, 19 nt, Homo sapiens
  misc_RNA (1)...(19): siRNA sense strand
cggcuagguuccugaugaa

SEQ ID NO: 187988 - RNA, 19 nt, Homo sapiens
  misc_RNA (1)...(19): siRNA sense strand
uuggaaagacuucaaauca

SEQ ID NO: 187989 - RNA, 19 nt, Homo sapiens
  misc_RNA (1)...(19): siRNA sense strand
caugacagagccucagauu

SEQ ID NO: 187990 - RNA, 19 nt, Homo sapiens
  misc_RNA (1)...(19): siRNA sense strand
ugaaguaugcccaggugaa

SEQ ID NO: 187991 - RNA, 19 nt, Homo sapiens
  misc_RNA (1)...(19): siRNA sense strand
gaaaacaugcugaugaagu

SEQ ID NO: 187992 - RNA, 19 nt, Homo sapiens
  misc_RNA (1)...(19): siRNA sense strand
cgcugacccugaugaaauu

SEQ ID NO: 187993 - RNA, 19 nt, Homo sapiens
  misc_RNA (1)...(19): siRNA sense strand
ggacuugaacuuccucacu

SEQ ID NO: 187994 - RNA, 19 nt, Homo sapiens
  misc_RNA (1)...(19): siRNA sense strand
gcaaacacuggcauugaag

SEQ ID NO: 187995 - RNA, 19 nt, Homo sapiens
  misc_RNA (1)...(19): siRNA sense strand
gaaguaugcccaggugaag

SEQ ID NO: 187996 - RNA, 19 nt, Homo sapiens
  misc_RNA (1)...(19): siRNA sense strand
gaauuaccguuggugacau

SEQ ID NO: 187997 - RNA, 19 nt, Homo sapiens
  misc_RNA (1)...(19): siRNA sense strand
aaccacagauuuuggauuu

SEQ ID NO: 187998 - RNA, 19 nt, Homo sapiens
  misc_RNA (1)...(19): siRNA sense strand
gaaaccacagccacguaug

SEQ ID NO: 187999 - RNA, 19 nt, Homo sapiens
  misc_RNA (1)...(19): siRNA sense strand
guagcagucuggccaacca

SEQ ID NO: 188000 - RNA, 19 nt, Homo sapiens
  misc_RNA (1)...(19): siRNA sense strand
ggagaaaacacugucauga

SEQ ID NO: 188001 - RNA, 19 nt, Homo sapiens
  misc_RNA (1)...(19): siRNA sense strand
acccggagcugcuuacaca

SEQ ID NO: 188002 - RNA, 19 nt, Homo sapiens
  misc_RNA (1)...(19): siRNA sense strand
uaguuaagcucuuuucaga

SEQ ID NO: 188003 - RNA, 19 nt, Homo sapiens
  misc_RNA (1)...(19): siRNA sense strand
ccuaacuucuguugaccuu

SEQ ID NO: 188004 - RNA, 19 nt, Homo sapiens
  misc_RNA (1)...(19): siRNA sense strand
aagccuaaccgaagcauau

SEQ ID NO: 188005 - RNA, 19 nt, Homo sapiens
  misc_RNA (1)...(19): siRNA sense strand
acggcuagguuccugauga

SEQ ID NO: 188006 - RNA, 19 nt, Homo sapiens
  misc_RNA (1)...(19): siRNA sense strand
ugacccugaugaaauuaug

SEQ ID NO: 188007 - RNA, 19 nt, Homo sapiens
  misc_RNA (1)...(19): siRNA sense strand
cuuggaaccuaacuucugu

SEQ ID NO: 188008 - RNA, 19 nt, Homo sapiens
  misc_RNA (1)...(19): siRNA sense strand
ggaaagacuucaaaucaug

SEQ ID NO: 188009 - RNA, 19 nt, Homo sapiens
  misc_RNA (1)...(19): siRNA sense strand
gcaguggucuuccaaauau

SEQ ID NO: 188010 - RNA, 19 nt, Homo sapiens
  misc_RNA (1)...(19): siRNA sense strand
gaaaugcuauggauuacau

SEQ ID NO: 188011 - RNA, 19 nt, Homo sapiens
  misc_RNA (1)...(19): siRNA sense strand
gggcauggcuauucucauu

SEQ ID NO: 188012 - RNA, 19 nt, Homo sapiens
  misc_RNA (1)...(19): siRNA sense strand
gaaccuaacuucuguugac

SEQ ID NO: 188013 - RNA, 19 nt, Homo sapiens
  misc_RNA (1)...(19): siRNA sense strand
gaaccagaaccacagauuu

SEQ ID NO: 188014 - RNA, 19 nt, Homo sapiens
  misc_RNA (1)...(19): siRNA sense strand
caaguaaaccagcguguaa

SEQ ID NO: 188015 - RNA, 19 nt, Homo sapiens
  misc_RNA (1)...(19): siRNA sense strand
caagcugucuuaaggaguu

SEQ ID NO: 188016 - RNA, 19 nt, Homo sapiens
  misc_RNA (1)...(19): siRNA sense strand
ugagguggcugucaggaaa

SEQ ID NO: 188017 - RNA, 19 nt, Homo sapiens
  misc_RNA (1)...(19): siRNA sense strand
gcucagaugcuguugcuuu

SEQ ID NO: 188018 - RNA, 19 nt, Homo sapiens
  misc_RNA (1)...(19): siRNA sense strand
gacuucaaaucaugcaaua

SEQ ID NO: 188019 - RNA, 19 nt, Homo sapiens
  misc_RNA (1)...(19): siRNA sense strand
ggagaccuaucaccggauu

SEQ ID NO: 188020 - RNA, 19 nt, Homo sapiens
  misc_RNA (1)...(19): siRNA sense strand
gcagccagauuaguagaaa

SEQ ID NO: 188021 - RNA, 19 nt, Homo sapiens
  misc_RNA (1)...(19): siRNA sense strand
ugaagaagaugagggaguu

SEQ ID NO: 188022 - RNA, 19 nt, Homo sapiens
  misc_RNA (1)...(19): siRNA sense strand
gcuaagaacuccccacuga

SEQ ID NO: 188023 - RNA, 19 nt, Homo sapiens
  misc_RNA (1)...(19): siRNA sense strand
ugacagagccucagauuac

SEQ ID NO: 188024 - RNA, 19 nt, Homo sapiens
  misc_RNA (1)...(19): siRNA sense strand
ugaaaccgcugaguaacaa

SEQ ID NO: 188025 - RNA, 19 nt, Homo sapiens
  misc_RNA (1)...(19): siRNA sense strand
gagaaaacaugcugaugaa

SEQ ID NO: 188026 - RNA, 19 nt, Homo sapiens
  misc_RNA (1)...(19): siRNA sense strand
guuuaugucugcuguauuc

SEQ ID NO: 188027 - RNA, 19 nt, Homo sapiens
  misc_RNA (1)...(19): siRNA sense strand
ugaagucacugcaguccaa

SEQ ID NO: 188028 - RNA, 19 nt, Homo sapiens
  misc_RNA (1)...(19): siRNA sense strand
caaauuugguuaugaugag

SEQ ID NO: 188029 - RNA, 19 nt, Homo sapiens
  misc_RNA (1)...(19): siRNA sense strand
uaacuucuguugaccuugu

SEQ ID NO: 188030 - RNA, 19 nt, Homo sapiens
  misc_RNA (1)...(19): siRNA sense strand
ugaacgaccugcccaguca

SEQ ID NO: 188031 - RNA, 19 nt, Homo sapiens
  misc_RNA (1)...(19): siRNA sense strand
ugaguaacaagcugacuua

SEQ ID NO: 188032 - RNA, 19 nt, Homo sapiens
  misc_RNA (1)...(19): siRNA sense strand
ggccaaccaugguggauau

SEQ ID NO: 188033 - RNA, 19 nt, Homo sapiens
  misc_RNA (1)...(19): siRNA sense strand
uaucguaccuauucgugaa

SEQ ID NO: 188034 - RNA, 19 nt, Homo sapiens
  misc_RNA (1)...(19): siRNA sense strand
aagcagagguccacgaauc

SEQ ID NO: 188035 - RNA, 19 nt, Homo sapiens
  misc_RNA (1)...(19): siRNA sense strand
ggcaugguguccuauuuga

SEQ ID NO: 188036 - RNA, 19 nt, Homo sapiens
  misc_RNA (1)...(19): siRNA sense strand
ccgcuggacugaaggcuuu

SEQ ID NO: 188037 - RNA, 19 nt, Homo sapiens
  misc_RNA (1)...(19): siRNA sense strand
gacaauggcuaccucaaaa

SEQ ID NO: 188038 - RNA, 19 nt, Homo sapiens
  misc_RNA (1)...(19): siRNA sense strand
gaguuuaugucugcuguau

SEQ ID NO: 188039 - RNA, 19 nt, Homo sapiens
  misc_RNA (1)...(19): siRNA sense strand
cgagagaucgagaacauga

SEQ ID NO: 188040 - RNA, 19 nt, Homo sapiens
  misc_RNA (1)...(19): siRNA sense strand
gccgagagaucgagaacau

SEQ ID NO: 188041 - RNA, 19 nt, Homo sapiens
  misc_RNA (1)...(19): siRNA sense strand
ggaguucauucucaacagu

SEQ ID NO: 188042 - RNA, 19 nt, Homo sapiens
  misc_RNA (1)...(19): siRNA sense strand
gaauguguaugaaaacuug

SEQ ID NO: 188043 - RNA, 19 nt, Homo sapiens
  misc_RNA (1)...(19): siRNA sense strand
caaccaugguggauaucaa

SEQ ID NO: 188044 - RNA, 19 nt, Homo sapiens
  misc_RNA (1)...(19): siRNA sense strand
ccagcaguauaaacucuuu

SEQ ID NO: 188045 - RNA, 19 nt, Homo sapiens
  misc_RNA (1)...(19): siRNA sense strand
cugaugaaauuaugugguu

SEQ ID NO: 188046 - RNA, 19 nt, Homo sapiens
  misc_RNA (1)...(19): siRNA sense strand
cauaagccuuugccaggaa

SEQ ID NO: 188047 - RNA, 19 nt, Homo sapiens
  misc_RNA (1)...(19): siRNA sense strand
acugugaccuccauuaaau

SEQ ID NO: 188048 - RNA, 19 nt, Homo sapiens
  misc_RNA (1)...(19): siRNA sense strand
ggaaaccacagccacguau

SEQ ID NO: 188049 - RNA, 19 nt, Homo sapiens
  misc_RNA (1)...(19): siRNA sense strand
aaaacaugcugaugaagua

SEQ ID NO: 188050 - RNA, 19 nt, Homo sapiens
  misc_RNA (1)...(19): siRNA sense strand
gagcaagugaggcacauug

SEQ ID NO: 188051 - RNA, 19 nt, Homo sapiens
  misc_RNA (1)...(19): siRNA sense strand
uugcccagcucaucacuaa

SEQ ID NO: 188052 - RNA, 19 nt, Homo sapiens
  misc_RNA (1)...(19): siRNA sense strand
caaagcagagguccacgaa

SEQ ID NO: 188053 - RNA, 19 nt, Homo sapiens
  misc_RNA (1)...(19): siRNA sense strand
uaaaccagcguguaaagga

SEQ ID NO: 188054 - RNA, 19 nt, Homo sapiens
  misc_RNA (1)...(19): siRNA sense strand
ggaauuaccguuggugaca

SEQ ID NO: 188055 - RNA, 19 nt, Homo sapiens
  misc_RNA (1)...(19): siRNA sense strand
gcuaugaugggaaugugua

SEQ ID NO: 188056 - RNA, 19 nt, Homo sapiens
  misc_RNA (1)...(19): siRNA sense strand
caagauaaagccauucaag

SEQ ID NO: 188057 - RNA, 19 nt, Homo sapiens
  misc_RNA (1)...(19): siRNA sense strand
ugcaaacacuggcauugaa

SEQ ID NO: 188058 - RNA, 19 nt, Homo sapiens
  misc_RNA (1)...(19): siRNA sense strand
ucuaaggcgugcaccauug

SEQ ID NO: 188059 - RNA, 19 nt, Homo sapiens
  misc_RNA (1)...(19): siRNA sense strand
uggaaagacuucaaaucau

SEQ ID NO: 188060 - RNA, 19 nt, Homo sapiens
  misc_RNA (1)...(19): siRNA sense strand
cagagguccacgaaucuua

SEQ ID NO: 188061 - RNA, 19 nt, Homo sapiens
  misc_RNA (1)...(19): siRNA sense strand
cauucaagcugucuuaagg

SEQ ID NO: 188062 - RNA, 19 nt, Homo sapiens
  misc_RNA (1)...(19): siRNA sense strand
gccuaugccuuccaguuug

SEQ ID NO: 188063 - RNA, 19 nt, Homo sapiens
  misc_RNA (1)...(19): siRNA sense strand
ggggaaaugcuauggauua

SEQ ID NO: 188064 - RNA, 19 nt, Homo sapiens
  misc_RNA (1)...(19): siRNA sense strand
cgugaaaucgggacccaua

SEQ ID NO: 188065 - RNA, 19 nt, Homo sapiens
  misc_RNA (1)...(19): siRNA sense strand
gaugggaauguguaugaaa

SEQ ID NO: 188066 - RNA, 19 nt, Homo sapiens
  misc_RNA (1)...(19): siRNA sense strand
guggcaugguguccuauuu

SEQ ID NO: 188067 - RNA, 19 nt, Homo sapiens
  misc_RNA (1)...(19): siRNA sense strand
cuacugugaccuccauuaa

SEQ ID NO: 188068 - RNA, 19 nt, Homo sapiens
  misc_RNA (1)...(19): siRNA sense strand
gacagagccucagauuaca

SEQ ID NO: 188069 - RNA, 19 nt, Homo sapiens
  misc_RNA (1)...(19): siRNA sense strand
agacaauggcuaccucaaa

SEQ ID NO: 188070 - RNA, 19 nt, Homo sapiens
  misc_RNA (1)...(19): siRNA sense strand
uggauuacaugccuuuauc

SEQ ID NO: 188071 - RNA, 19 nt, Homo sapiens
  misc_RNA (1)...(19): siRNA sense strand
caucguauucccagagaaa

SEQ ID NO: 188072 - RNA, 19 nt, Homo sapiens
  misc_RNA (1)...(19): siRNA sense strand
ucgagaacaugauccugaa

SEQ ID NO: 188073 - RNA, 19 nt, Homo sapiens
  misc_RNA (1)...(19): siRNA sense strand
gaucaggugcacucaggaa

SEQ ID NO: 188074 - RNA, 19 nt, Homo sapiens
  misc_RNA (1)...(19): siRNA sense strand
agaaaacacugucaugaug

SEQ ID NO: 188075 - RNA, 19 nt, Homo sapiens
  misc_RNA (1)...(19): siRNA sense strand
gcaccauugccauccgaua

SEQ ID NO: 188076 - RNA, 19 nt, Homo sapiens
  misc_RNA (1)...(19): siRNA sense strand
gggaaaugcuauggauuac

SEQ ID NO: 188077 - RNA, 19 nt, Homo sapiens
  misc_RNA (1)...(19): siRNA sense strand
gugcuuggccgcuaugaug

SEQ ID NO: 188078 - RNA, 19 nt, Homo sapiens
  misc_RNA (1)...(19): siRNA sense strand
ccucaccgcuggacugaag

SEQ ID NO: 188079 - RNA, 19 nt, Homo sapiens
  misc_RNA (1)...(19): siRNA sense strand
uaacgaaggcauuggucaa

SEQ ID NO: 188080 - RNA, 19 nt, Homo sapiens
  misc_RNA (1)...(19): siRNA sense strand
aaaccacagccacguauga

SEQ ID NO: 188081 - RNA, 19 nt, Homo sapiens
  misc_RNA (1)...(19): siRNA sense strand
uggcaucgcugacccugau

SEQ ID NO: 188082 - RNA, 19 nt, Homo sapiens
  misc_RNA (1)...(19): siRNA sense strand
gcauggcuauucucauugc

SEQ ID NO: 188083 - RNA, 19 nt, Homo sapiens
  misc_RNA (1)...(19): siRNA sense strand
uuucaaacccagcaguaua

SEQ ID NO: 188084 - RNA, 19 nt, Homo sapiens
  misc_RNA (1)...(19): siRNA sense strand
gaagccugauggcacauac

SEQ ID NO: 188085 - RNA, 19 nt, Homo sapiens
  misc_RNA (1)...(19): siRNA sense strand
acaagcaccugaagucacu

SEQ ID NO: 188086 - RNA, 19 nt, Homo sapiens
  misc_RNA (1)...(19): siRNA sense strand
gaagaagaugagggaguuu

SEQ ID NO: 188087 - RNA, 19 nt, Homo sapiens
  misc_RNA (1)...(19): siRNA sense strand
cggcuagguuccugaugaa

SEQ ID NO: 188088 - RNA, 19 nt, Homo sapiens
  misc_RNA (1)...(19): siRNA sense strand
uuggaaagacuucaaauca

SEQ ID NO: 188089 - RNA, 19 nt, Homo sapiens
  misc_RNA (1)...(19): siRNA sense strand
caugacagagccucagauu

SEQ ID NO: 188090 - RNA, 19 nt, Homo sapiens
  misc_RNA (1)...(19): siRNA sense strand
ugaaguaugcccaggugaa

SEQ ID NO: 188091 - RNA, 19 nt, Homo sapiens
  misc_RNA (1)...(19): siRNA sense strand
gaaaacaugcugaugaagu

SEQ ID NO: 188092 - RNA, 19 nt, Homo sapiens
  misc_RNA (1)...(19): siRNA sense strand
cgcugacccugaugaaauu

SEQ ID NO: 188093 - RNA, 19 nt, Homo sapiens
  misc_RNA (1)...(19): siRNA sense strand
ggacuugaacuuccucacu

SEQ ID NO: 188094 - RNA, 19 nt, Homo sapiens
  misc_RNA (1)...(19): siRNA sense strand
gcaaacacuggcauugaag

SEQ ID NO: 188095 - RNA, 19 nt, Homo sapiens
  misc_RNA (1)...(19): siRNA sense strand
gaaguaugcccaggugaag

SEQ ID NO: 188096 - RNA, 19 nt, Homo sapiens
  misc_RNA (1)...(19): siRNA sense strand
gaauuaccguuggugacau

SEQ ID NO: 188097 - RNA, 19 nt, Homo sapiens
  misc_RNA (1)...(19): siRNA sense strand
aaccacagauuuuggauuu

SEQ ID NO: 188098 - RNA, 19 nt, Homo sapiens
  misc_RNA (1)...(19): siRNA sense strand
gaaaccacagccacguaug

SEQ ID NO: 188099 - RNA, 19 nt, Homo sapiens
  misc_RNA (1)...(19): siRNA sense strand
guagcagucuggccaacca

SEQ ID NO: 188100 - RNA, 19 nt, Homo sapiens
  misc_RNA (1)...(19): siRNA sense strand
ggagaaaacacugucauga

SEQ ID NO: 188101 - RNA, 19 nt, Homo sapiens
  misc_RNA (1)...(19): siRNA sense strand
acccggagcugcuuacaca

SEQ ID NO: 188102 - RNA, 19 nt, Homo sapiens
  misc_RNA (1)...(19): siRNA sense strand
uaguuaagcucuuuucaga

SEQ ID NO: 188103 - RNA, 19 nt, Homo sapiens
  misc_RNA (1)...(19): siRNA sense strand
ccuaacuucuguugaccuu

SEQ ID NO: 188104 - RNA, 19 nt, Homo sapiens
  misc_RNA (1)...(19): siRNA sense strand
aagccuaaccgaagcauau

SEQ ID NO: 188105 - RNA, 19 nt, Homo sapiens
  misc_RNA (1)...(19): siRNA sense strand
acggcuagguuccugauga

SEQ ID NO: 188106 - RNA, 19 nt, Homo sapiens
  misc_RNA (1)...(19): siRNA sense strand
ugacccugaugaaauuaug

SEQ ID NO: 188107 - RNA, 19 nt, Homo sapiens
  misc_RNA (1)...(19): siRNA sense strand
cuuggaaccuaacuucugu

SEQ ID NO: 188108 - RNA, 19 nt, Homo sapiens
  misc_RNA (1)...(19): siRNA sense strand
ugaaacaccuggauucuua

SEQ ID NO: 188109 - RNA, 19 nt, Homo sapiens
  misc_RNA (1)...(19): siRNA sense strand
gcaaagagguugagagcuu

SEQ ID NO: 188110 - RNA, 19 nt, Homo sapiens
  misc_RNA (1)...(19): siRNA sense strand
ggaaacccaugaccaacua

SEQ ID NO: 188111 - RNA, 19 nt, Homo sapiens
  misc_RNA (1)...(19): siRNA sense strand
caacaacuaugacaugaug

SEQ ID NO: 188112 - RNA, 19 nt, Homo sapiens
  misc_RNA (1)...(19): siRNA sense strand
caaaggagaucagggauga

SEQ ID NO: 188113 - RNA, 19 nt, Homo sapiens
  misc_RNA (1)...(19): siRNA sense strand
gaacugauccuggagauga

SEQ ID NO: 188114 - RNA, 19 nt, Homo sapiens
  misc_RNA (1)...(19): siRNA sense strand
gaucagggaugaauaugug

SEQ ID NO: 188115 - RNA, 19 nt, Homo sapiens
  misc_RNA (1)...(19): siRNA sense strand
gaaggaggcugaggcuuug

SEQ ID NO: 188116 - RNA, 19 nt, Homo sapiens
  misc_RNA (1)...(19): siRNA sense strand
gggcugagcucaucaacau

SEQ ID NO: 188117 - RNA, 19 nt, Homo sapiens
  misc_RNA (1)...(19): siRNA sense strand
agacggcccugcugaagua

SEQ ID NO: 188118 - RNA, 19 nt, Homo sapiens
  misc_RNA (1)...(19): siRNA sense strand
agauuuaccugucuuacua

SEQ ID NO: 188119 - RNA, 19 nt, Homo sapiens
  misc_RNA (1)...(19): siRNA sense strand
ggaaggagcagcuuguguu

SEQ ID NO: 188120 - RNA, 19 nt, Homo sapiens
  misc_RNA (1)...(19): siRNA sense strand
aggcaaaucuggaggauga

SEQ ID NO: 188121 - RNA, 19 nt, Homo sapiens
  misc_RNA (1)...(19): siRNA sense strand
ucaagagagugagaauaua

SEQ ID NO: 188122 - RNA, 19 nt, Homo sapiens
  misc_RNA (1)...(19): siRNA sense strand
ggacacaggaauucauuga

SEQ ID NO: 188123 - RNA, 19 nt, Homo sapiens
  misc_RNA (1)...(19): siRNA sense strand
gaaggagcagcuuguguuu

SEQ ID NO: 188124 - RNA, 19 nt, Homo sapiens
  misc_RNA (1)...(19): siRNA sense strand
ggagaucagggaugaauau

SEQ ID NO: 188125 - RNA, 19 nt, Homo sapiens
  misc_RNA (1)...(19): siRNA sense strand
gaucaacaacuaugacaug

SEQ ID NO: 188126 - RNA, 19 nt, Homo sapiens
  misc_RNA (1)...(19): siRNA sense strand
gagcagauguugggagcuu

SEQ ID NO: 188127 - RNA, 19 nt, Homo sapiens
  misc_RNA (1)...(19): siRNA sense strand
guagaucuccgucacuauu

SEQ ID NO: 188128 - RNA, 19 nt, Homo sapiens
  misc_RNA (1)...(19): siRNA sense strand
ugacgaagauccgagaguu

SEQ ID NO: 188129 - RNA, 19 nt, Homo sapiens
  misc_RNA (1)...(19): siRNA sense strand
gaauauagcaucucuacac

SEQ ID NO: 188130 - RNA, 19 nt, Homo sapiens
  misc_RNA (1)...(19): siRNA sense strand
ugaaggaggcugaggcuuu

SEQ ID NO: 188131 - RNA, 19 nt, Homo sapiens
  misc_RNA (1)...(19): siRNA sense strand
ccagacaauuccuaaugaa

SEQ ID NO: 188132 - RNA, 19 nt, Homo sapiens
  misc_RNA (1)...(19): siRNA sense strand
gagaguuuauccuccagaa

SEQ ID NO: 188133 - RNA, 19 nt, Homo sapiens
  misc_RNA (1)...(19): siRNA sense strand
gaacggaccaugcaauugc

SEQ ID NO: 188134 - RNA, 19 nt, Homo sapiens
  misc_RNA (1)...(19): siRNA sense strand
gagcaagauuuaccugucu

SEQ ID NO: 188135 - RNA, 19 nt, Homo sapiens
  misc_RNA (1)...(19): siRNA sense strand
gcauaagcccaacuucuga

SEQ ID NO: 188136 - RNA, 19 nt, Homo sapiens
  misc_RNA (1)...(19): siRNA sense strand
agaaauggcaccaguauca

SEQ ID NO: 188137 - RNA, 19 nt, Homo sapiens
  misc_RNA (1)...(19): siRNA sense strand
acaccuggauucuuaucua

SEQ ID NO: 188138 - RNA, 19 nt, Homo sapiens
  misc_RNA (1)...(19): siRNA sense strand
caaggcagccgcagucaga

SEQ ID NO: 188139 - RNA, 19 nt, Homo sapiens
  misc_RNA (1)...(19): siRNA sense strand
gaguuuauccuccagaaga

SEQ ID NO: 188140 - RNA, 19 nt, Homo sapiens
  misc_RNA (1)...(19): siRNA sense strand
cagcuuguguuucugauca

SEQ ID NO: 188141 - RNA, 19 nt, Homo sapiens
  misc_RNA (1)...(19): siRNA sense strand
gaaaucaucaguggaaucu

SEQ ID NO: 188142 - RNA, 19 nt, Homo sapiens
  misc_RNA (1)...(19): siRNA sense strand
caagagagugagaauauag

SEQ ID NO: 188143 - RNA, 19 nt, Homo sapiens
  misc_RNA (1)...(19): siRNA sense strand
gcacuacgcccuccuagac

SEQ ID NO: 188144 - RNA, 19 nt, Homo sapiens
  misc_RNA (1)...(19): siRNA sense strand
ggaguuggauaucacuucu

SEQ ID NO: 188145 - RNA, 19 nt, Homo sapiens
  misc_RNA (1)...(19): siRNA sense strand
uacagcagauugaacagaa

SEQ ID NO: 188146 - RNA, 19 nt, Homo sapiens
  misc_RNA (1)...(19): siRNA sense strand
gauguaaugcggaguuuca

SEQ ID NO: 188147 - RNA, 19 nt, Homo sapiens
  misc_RNA (1)...(19): siRNA sense strand
agguggagguggagaauuu

SEQ ID NO: 188148 - RNA, 19 nt, Homo sapiens
  misc_RNA (1)...(19): siRNA sense strand
ucaaggcagugacgaagau

SEQ ID NO: 188149 - RNA, 19 nt, Homo sapiens
  misc_RNA (1)...(19): siRNA sense strand
guguagaucuccgucacua

SEQ ID NO: 188150 - RNA, 19 nt, Homo sapiens
  misc_RNA (1)...(19): siRNA sense strand
caacauucaccaccuuaug

SEQ ID NO: 188151 - RNA, 19 nt, Homo sapiens
  misc_RNA (1)...(19): siRNA sense strand
gcugggaccucagauaugg

SEQ ID NO: 188152 - RNA, 19 nt, Homo sapiens
  misc_RNA (1)...(19): siRNA sense strand
ugacagagcccagguucuu

SEQ ID NO: 188153 - RNA, 19 nt, Homo sapiens
  misc_RNA (1)...(19): siRNA sense strand
uccagaagauuuauuccuu

SEQ ID NO: 188154 - RNA, 19 nt, Homo sapiens
  misc_RNA (1)...(19): siRNA sense strand
acgaagauccgagaguuua

SEQ ID NO: 188155 - RNA, 19 nt, Homo sapiens
  misc_RNA (1)...(19): siRNA sense strand
caucaacauucaccaccuu

SEQ ID NO: 188156 - RNA, 19 nt, Homo sapiens
  misc_RNA (1)...(19): siRNA sense strand
gagcagcuuguguuucuga

SEQ ID NO: 188157 - RNA, 19 nt, Homo sapiens
  misc_RNA (1)...(19): siRNA sense strand
gcgaauaccuuuucaucug

SEQ ID NO: 188158 - RNA, 19 nt, Homo sapiens
  misc_RNA (1)...(19): siRNA sense strand
gaggaugaguuaguaaagg

SEQ ID NO: 188159 - RNA, 19 nt, Homo sapiens
  misc_RNA (1)...(19): siRNA sense strand
gggcugggaccucagauau

SEQ ID NO: 188160 - RNA, 19 nt, Homo sapiens
  misc_RNA (1)...(19): siRNA sense strand
uauagcaucucuacacaac

SEQ ID NO: 188161 - RNA, 19 nt, Homo sapiens
  misc_RNA (1)...(19): siRNA sense strand
ccuccgcucuugucaguau

SEQ ID NO: 188162 - RNA, 19 nt, Homo sapiens
  misc_RNA (1)...(19): siRNA sense strand
guucagagcguccgaagca

SEQ ID NO: 188163 - RNA, 19 nt, Homo sapiens
  misc_RNA (1)...(19): siRNA sense strand
gaacagucaggagccauga

SEQ ID NO: 188164 - RNA, 19 nt, Homo sapiens
  misc_RNA (1)...(19): siRNA sense strand
ucuggaggaugaguuagua

SEQ ID NO: 188165 - RNA, 19 nt, Homo sapiens
  misc_RNA (1)...(19): siRNA sense strand
ucagaaauggcaccaguau

SEQ ID NO: 188166 - RNA, 19 nt, Homo sapiens
  misc_RNA (1)...(19): siRNA sense strand
ucaggaaacccaugaccaa

SEQ ID NO: 188167 - RNA, 19 nt, Homo sapiens
  misc_RNA (1)...(19): siRNA sense strand
ggaaaucaucaguggaauc

SEQ ID NO: 188168 - RNA, 19 nt, Homo sapiens
  misc_RNA (1)...(19): siRNA sense strand
uagcaucucuacacaacca

SEQ ID NO: 188169 - RNA, 19 nt, Homo sapiens
  misc_RNA (1)...(19): siRNA sense strand
gcugagcucaucaacauuc

SEQ ID NO: 188170 - RNA, 19 nt, Homo sapiens
  misc_RNA (1)...(19): siRNA sense strand
guucuccgguuccguaaca

SEQ ID NO: 188171 - RNA, 19 nt, Homo sapiens
  misc_RNA (1)...(19): siRNA sense strand
ggccguacacucagcauga

SEQ ID NO: 188172 - RNA, 19 nt, Homo sapiens
  misc_RNA (1)...(19): siRNA sense strand
gagacgcugagcaagauuu

SEQ ID NO: 188173 - RNA, 19 nt, Homo sapiens
  misc_RNA (1)...(19): siRNA sense strand
gacgaagauccgagaguuu

SEQ ID NO: 188174 - RNA, 19 nt, Homo sapiens
  misc_RNA (1)...(19): siRNA sense strand
gccaugaacauucgacuuc

SEQ ID NO: 188175 - RNA, 19 nt, Homo sapiens
  misc_RNA (1)...(19): siRNA sense strand
cgaaaucgccaggcaguuc

SEQ ID NO: 188176 - RNA, 19 nt, Homo sapiens
  misc_RNA (1)...(19): siRNA sense strand
aaucaucaguggaaucucu

SEQ ID NO: 188177 - RNA, 19 nt, Homo sapiens
  misc_RNA (1)...(19): siRNA sense strand
aaaucuggaggaugaguua

SEQ ID NO: 188178 - RNA, 19 nt, Homo sapiens
  misc_RNA (1)...(19): siRNA sense strand
accagacaauuccuaauga

SEQ ID NO: 188179 - RNA, 19 nt, Homo sapiens
  misc_RNA (1)...(19): siRNA sense strand
gaaacaccuggauucuuau

SEQ ID NO: 188180 - RNA, 19 nt, Homo sapiens
  misc_RNA (1)...(19): siRNA sense strand
aauauagcaucucuacaca

SEQ ID NO: 188181 - RNA, 19 nt, Homo sapiens
  misc_RNA (1)...(19): siRNA sense strand
gcgaauggagcagauguug

SEQ ID NO: 188182 - RNA, 19 nt, Homo sapiens
  misc_RNA (1)...(19): siRNA sense strand
ucaaccagacaauuccuaa

SEQ ID NO: 188183 - RNA, 19 nt, Homo sapiens
  misc_RNA (1)...(19): siRNA sense strand
guaaaggaagcucuuaaaa

SEQ ID NO: 188184 - RNA, 19 nt, Homo sapiens
  misc_RNA (1)...(19): siRNA sense strand
gcucugagauccggacacu

SEQ ID NO: 188185 - RNA, 19 nt, Homo sapiens
  misc_RNA (1)...(19): siRNA sense strand
ggaggaugaguuaguaaag

SEQ ID NO: 188186 - RNA, 19 nt, Homo sapiens
  misc_RNA (1)...(19): siRNA sense strand
ugguggagcucaagaagca

SEQ ID NO: 188187 - RNA, 19 nt, Homo sapiens
  misc_RNA (1)...(19): siRNA sense strand
aggaugaguuaguaaagga

SEQ ID NO: 188188 - RNA, 19 nt, Homo sapiens
  misc_RNA (1)...(19): siRNA sense strand
aggcugaggcuuugauuga

SEQ ID NO: 188189 - RNA, 19 nt, Homo sapiens
  misc_RNA (1)...(19): siRNA sense strand
gaugcugggugugcugaug

SEQ ID NO: 188190 - RNA, 19 nt, Homo sapiens
  misc_RNA (1)...(19): siRNA sense strand
aggagcagcuuguguuucu

SEQ ID NO: 188191 - RNA, 19 nt, Homo sapiens
  misc_RNA (1)...(19): siRNA sense strand
gaagauccgagaguuuauc

SEQ ID NO: 188192 - RNA, 19 nt, Homo sapiens
  misc_RNA (1)...(19): siRNA sense strand
ggauuauauucaagagagu

SEQ ID NO: 188193 - RNA, 19 nt, Homo sapiens
  misc_RNA (1)...(19): siRNA sense strand
gaaauggcaccaguaucau

SEQ ID NO: 188194 - RNA, 19 nt, Homo sapiens
  misc_RNA (1)...(19): siRNA sense strand
caggaaccacugcaacuug

SEQ ID NO: 188195 - RNA, 19 nt, Homo sapiens
  misc_RNA (1)...(19): siRNA sense strand
aguuggauaucacuucuga

SEQ ID NO: 188196 - RNA, 19 nt, Homo sapiens
  misc_RNA (1)...(19): siRNA sense strand
gagcaacagcaaaggagau

SEQ ID NO: 188197 - RNA, 19 nt, Homo sapiens
  misc_RNA (1)...(19): siRNA sense strand
gcugauccguggcuuuggu

SEQ ID NO: 188198 - RNA, 19 nt, Homo sapiens
  misc_RNA (1)...(19): siRNA sense strand
aaaggaagcucuuaaaacg

SEQ ID NO: 188199 - RNA, 19 nt, Homo sapiens
  misc_RNA (1)...(19): siRNA sense strand
ugacugcuacgaugccauu

SEQ ID NO: 188200 - RNA, 19 nt, Homo sapiens
  misc_RNA (1)...(19): siRNA sense strand
uggagacgcugagcaagau

SEQ ID NO: 188201 - RNA, 19 nt, Homo sapiens
  misc_RNA (1)...(19): siRNA sense strand
cagguucuucuaucaguuu

SEQ ID NO: 188202 - RNA, 19 nt, Homo sapiens
  misc_RNA (1)...(19): siRNA sense strand
aguaaaggaagcucuuaaa

SEQ ID NO: 188203 - RNA, 19 nt, Homo sapiens
  misc_RNA (1)...(19): siRNA sense strand
acagcagauugaacagaaa

SEQ ID NO: 188204 - RNA, 19 nt, Homo sapiens
  misc_RNA (1)...(19): siRNA sense strand
agacgcugagcaagauuua

SEQ ID NO: 188205 - RNA, 19 nt, Homo sapiens
  misc_RNA (1)...(19): siRNA sense strand
cauucgggauuauauucaa

SEQ ID NO: 188206 - RNA, 19 nt, Homo sapiens
  misc_RNA (1)...(19): siRNA sense strand
uucaagagagugagaauau

SEQ ID NO: 188207 - RNA, 19 nt, Homo sapiens
  misc_RNA (1)...(19): siRNA sense strand
cagcugauccguggcuuug

SEQ ID NO: 188208 - RNA, 19 nt, Homo sapiens
  misc_RNA (1)...(19): siRNA sense strand
ugaaacaccuggauucuua

SEQ ID NO: 188209 - RNA, 19 nt, Homo sapiens
  misc_RNA (1)...(19): siRNA sense strand
gcaaagagguugagagcuu

SEQ ID NO: 188210 - RNA, 19 nt, Homo sapiens
  misc_RNA (1)...(19): siRNA sense strand
ggaaacccaugaccaacua

SEQ ID NO: 188211 - RNA, 19 nt, Homo sapiens
  misc_RNA (1)...(19): siRNA sense strand
caacaacuaugacaugaug

SEQ ID NO: 188212 - RNA, 19 nt, Homo sapiens
  misc_RNA (1)...(19): siRNA sense strand
caaaggagaucagggauga

SEQ ID NO: 188213 - RNA, 19 nt, Homo sapiens
  misc_RNA (1)...(19): siRNA sense strand
gaacugauccuggagauga

SEQ ID NO: 188214 - RNA, 19 nt, Homo sapiens
  misc_RNA (1)...(19): siRNA sense strand
gaucagggaugaauaugug

SEQ ID NO: 188215 - RNA, 19 nt, Homo sapiens
  misc_RNA (1)...(19): siRNA sense strand
gaaggaggcugaggcuuug

SEQ ID NO: 188216 - RNA, 19 nt, Homo sapiens
  misc_RNA (1)...(19): siRNA sense strand
gggcugagcucaucaacau

SEQ ID NO: 188217 - RNA, 19 nt, Homo sapiens
  misc_RNA (1)...(19): siRNA sense strand
agacggcccugcugaagua

SEQ ID NO: 188218 - RNA, 19 nt, Homo sapiens
  misc_RNA (1)...(19): siRNA sense strand
agauuuaccugucuuacua

SEQ ID NO: 188219 - RNA, 19 nt, Homo sapiens
  misc_RNA (1)...(19): siRNA sense strand
ggaaggagcagcuuguguu

SEQ ID NO: 188220 - RNA, 19 nt, Homo sapiens
  misc_RNA (1)...(19): siRNA sense strand
aggcaaaucuggaggauga

SEQ ID NO: 188221 - RNA, 19 nt, Homo sapiens
  misc_RNA (1)...(19): siRNA sense strand
ucaagagagugagaauaua

SEQ ID NO: 188222 - RNA, 19 nt, Homo sapiens
  misc_RNA (1)...(19): siRNA sense strand
ggacacaggaauucauuga

SEQ ID NO: 188223 - RNA, 19 nt, Homo sapiens
  misc_RNA (1)...(19): siRNA sense strand
gaaggagcagcuuguguuu

SEQ ID NO: 188224 - RNA, 19 nt, Homo sapiens
  misc_RNA (1)...(19): siRNA sense strand
ggagaucagggaugaauau

SEQ ID NO: 188225 - RNA, 19 nt, Homo sapiens
  misc_RNA (1)...(19): siRNA sense strand
gaucaacaacuaugacaug

SEQ ID NO: 188226 - RNA, 19 nt, Homo sapiens
  misc_RNA (1)...(19): siRNA sense strand
gagcagauguugggagcuu

SEQ ID NO: 188227 - RNA, 19 nt, Homo sapiens
  misc_RNA (1)...(19): siRNA sense strand
guagaucuccgucacuauu

SEQ ID NO: 188228 - RNA, 19 nt, Homo sapiens
  misc_RNA (1)...(19): siRNA sense strand
ugacgaagauccgagaguu

SEQ ID NO: 188229 - RNA, 19 nt, Homo sapiens
  misc_RNA (1)...(19): siRNA sense strand
gaauauagcaucucuacac

SEQ ID NO: 188230 - RNA, 19 nt, Homo sapiens
  misc_RNA (1)...(19): siRNA sense strand
ugaaggaggcugaggcuuu

SEQ ID NO: 188231 - RNA, 19 nt, Homo sapiens
  misc_RNA (1)...(19): siRNA sense strand
ccagacaauuccuaaugaa

SEQ ID NO: 188232 - RNA, 19 nt, Homo sapiens
  misc_RNA (1)...(19): siRNA sense strand
gagaguuuauccuccagaa

SEQ ID NO: 188233 - RNA, 19 nt, Homo sapiens
  misc_RNA (1)...(19): siRNA sense strand
gaacggaccaugcaauugc

SEQ ID NO: 188234 - RNA, 19 nt, Homo sapiens
  misc_RNA (1)...(19): siRNA sense strand
gagcaagauuuaccugucu

SEQ ID NO: 188235 - RNA, 19 nt, Homo sapiens
  misc_RNA (1)...(19): siRNA sense strand
gcauaagcccaacuucuga

SEQ ID NO: 188236 - RNA, 19 nt, Homo sapiens
  misc_RNA (1)...(19): siRNA sense strand
agaaauggcaccaguauca

SEQ ID NO: 188237 - RNA, 19 nt, Homo sapiens
  misc_RNA (1)...(19): siRNA sense strand
acaccuggauucuuaucua

SEQ ID NO: 188238 - RNA, 19 nt, Homo sapiens
  misc_RNA (1)...(19): siRNA sense strand
caaggcagccgcagucaga

SEQ ID NO: 188239 - RNA, 19 nt, Homo sapiens
  misc_RNA (1)...(19): siRNA sense strand
gaguuuauccuccagaaga

SEQ ID NO: 188240 - RNA, 19 nt, Homo sapiens
  misc_RNA (1)...(19): siRNA sense strand
cagcuuguguuucugauca

SEQ ID NO: 188241 - RNA, 19 nt, Homo sapiens
  misc_RNA (1)...(19): siRNA sense strand
gaaaucaucaguggaaucu

SEQ ID NO: 188242 - RNA, 19 nt, Homo sapiens
  misc_RNA (1)...(19): siRNA sense strand
caagagagugagaauauag

SEQ ID NO: 188243 - RNA, 19 nt, Homo sapiens
  misc_RNA (1)...(19): siRNA sense strand
gcacuacgcccuccuagac

SEQ ID NO: 188244 - RNA, 19 nt, Homo sapiens
  misc_RNA (1)...(19): siRNA sense strand
ggaguuggauaucacuucu

SEQ ID NO: 188245 - RNA, 19 nt, Homo sapiens
  misc_RNA (1)...(19): siRNA sense strand
uacagcagauugaacagaa

SEQ ID NO: 188246 - RNA, 19 nt, Homo sapiens
  misc_RNA (1)...(19): siRNA sense strand
gauguaaugcggaguuuca

SEQ ID NO: 188247 - RNA, 19 nt, Homo sapiens
  misc_RNA (1)...(19): siRNA sense strand
agguggagguggagaauuu

SEQ ID NO: 188248 - RNA, 19 nt, Homo sapiens
  misc_RNA (1)...(19): siRNA sense strand
ucaaggcagugacgaagau

SEQ ID NO: 188249 - RNA, 19 nt, Homo sapiens
  misc_RNA (1)...(19): siRNA sense strand
guguagaucuccgucacua

SEQ ID NO: 188250 - RNA, 19 nt, Homo sapiens
  misc_RNA (1)...(19): siRNA sense strand
caacauucaccaccuuaug

SEQ ID NO: 188251 - RNA, 19 nt, Homo sapiens
  misc_RNA (1)...(19): siRNA sense strand
gcugggaccucagauaugg

SEQ ID NO: 188252 - RNA, 19 nt, Homo sapiens
  misc_RNA (1)...(19): siRNA sense strand
ugacagagcccagguucuu

SEQ ID NO: 188253 - RNA, 19 nt, Homo sapiens
  misc_RNA (1)...(19): siRNA sense strand
uccagaagauuuauuccuu

SEQ ID NO: 188254 - RNA, 19 nt, Homo sapiens
  misc_RNA (1)...(19): siRNA sense strand
acgaagauccgagaguuua

SEQ ID NO: 188255 - RNA, 19 nt, Homo sapiens
  misc_RNA (1)...(19): siRNA sense strand
caucaacauucaccaccuu

SEQ ID NO: 188256 - RNA, 19 nt, Homo sapiens
  misc_RNA (1)...(19): siRNA sense strand
gagcagcuuguguuucuga

SEQ ID NO: 188257 - RNA, 19 nt, Homo sapiens
  misc_RNA (1)...(19): siRNA sense strand
gcgaauaccuuuucaucug

SEQ ID NO: 188258 - RNA, 19 nt, Homo sapiens
  misc_RNA (1)...(19): siRNA sense strand
gaggaugaguuaguaaagg

SEQ ID NO: 188259 - RNA, 19 nt, Homo sapiens
  misc_RNA (1)...(19): siRNA sense strand
gggcugggaccucagauau

SEQ ID NO: 188260 - RNA, 19 nt, Homo sapiens
  misc_RNA (1)...(19): siRNA sense strand
uauagcaucucuacacaac

SEQ ID NO: 188261 - RNA, 19 nt, Homo sapiens
  misc_RNA (1)...(19): siRNA sense strand
ccuccgcucuugucaguau

SEQ ID NO: 188262 - RNA, 19 nt, Homo sapiens
  misc_RNA (1)...(19): siRNA sense strand
guucagagcguccgaagca

SEQ ID NO: 188263 - RNA, 19 nt, Homo sapiens
  misc_RNA (1)...(19): siRNA sense strand
gaacagucaggagccauga

SEQ ID NO: 188264 - RNA, 19 nt, Homo sapiens
  misc_RNA (1)...(19): siRNA sense strand
ucuggaggaugaguuagua

SEQ ID NO: 188265 - RNA, 19 nt, Homo sapiens
  misc_RNA (1)...(19): siRNA sense strand
ucagaaauggcaccaguau

SEQ ID NO: 188266 - RNA, 19 nt, Homo sapiens
  misc_RNA (1)...(19): siRNA sense strand
ucaggaaacccaugaccaa

SEQ ID NO: 188267 - RNA, 19 nt, Homo sapiens
  misc_RNA (1)...(19): siRNA sense strand
ggaaaucaucaguggaauc

SEQ ID NO: 188268 - RNA, 19 nt, Homo sapiens
  misc_RNA (1)...(19): siRNA sense strand
uagcaucucuacacaacca

SEQ ID NO: 188269 - RNA, 19 nt, Homo sapiens
  misc_RNA (1)...(19): siRNA sense strand
gcugagcucaucaacauuc

SEQ ID NO: 188270 - RNA, 19 nt, Homo sapiens
  misc_RNA (1)...(19): siRNA sense strand
guucuccgguuccguaaca

SEQ ID NO: 188271 - RNA, 19 nt, Homo sapiens
  misc_RNA (1)...(19): siRNA sense strand
ggccguacacucagcauga

SEQ ID NO: 188272 - RNA, 19 nt, Homo sapiens
  misc_RNA (1)...(19): siRNA sense strand
gagacgcugagcaagauuu

SEQ ID NO: 188273 - RNA, 19 nt, Homo sapiens
  misc_RNA (1)...(19): siRNA sense strand
gacgaagauccgagaguuu

SEQ ID NO: 188274 - RNA, 19 nt, Homo sapiens
  misc_RNA (1)...(19): siRNA sense strand
gccaugaacauucgacuuc

SEQ ID NO: 188275 - RNA, 19 nt, Homo sapiens
  misc_RNA (1)...(19): siRNA sense strand
cgaaaucgccaggcaguuc

SEQ ID NO: 188276 - RNA, 19 nt, Homo sapiens
  misc_RNA (1)...(19): siRNA sense strand
aaucaucaguggaaucucu

SEQ ID NO: 188277 - RNA, 19 nt, Homo sapiens
  misc_RNA (1)...(19): siRNA sense strand
aaaucuggaggaugaguua

SEQ ID NO: 188278 - RNA, 19 nt, Homo sapiens
  misc_RNA (1)...(19): siRNA sense strand
accagacaauuccuaauga

SEQ ID NO: 188279 - RNA, 19 nt, Homo sapiens
  misc_RNA (1)...(19): siRNA sense strand
gaaacaccuggauucuuau

SEQ ID NO: 188280 - RNA, 19 nt, Homo sapiens
  misc_RNA (1)...(19): siRNA sense strand
aauauagcaucucuacaca

SEQ ID NO: 188281 - RNA, 19 nt, Homo sapiens
  misc_RNA (1)...(19): siRNA sense strand
gcgaauggagcagauguug

SEQ ID NO: 188282 - RNA, 19 nt, Homo sapiens
  misc_RNA (1)...(19): siRNA sense strand
ucaaccagacaauuccuaa

SEQ ID NO: 188283 - RNA, 19 nt, Homo sapiens
  misc_RNA (1)...(19): siRNA sense strand
guaaaggaagcucuuaaaa

SEQ ID NO: 188284 - RNA, 19 nt, Homo sapiens
  misc_RNA (1)...(19): siRNA sense strand
gcucugagauccggacacu

SEQ ID NO: 188285 - RNA, 19 nt, Homo sapiens
  misc_RNA (1)...(19): siRNA sense strand
ggaggaugaguuaguaaag

SEQ ID NO: 188286 - RNA, 19 nt, Homo sapiens
  misc_RNA (1)...(19): siRNA sense strand
ugguggagcucaagaagca

SEQ ID NO: 188287 - RNA, 19 nt, Homo sapiens
  misc_RNA (1)...(19): siRNA sense strand
aggaugaguuaguaaagga

SEQ ID NO: 188288 - RNA, 19 nt, Homo sapiens
  misc_RNA (1)...(19): siRNA sense strand
aggcugaggcuuugauuga

SEQ ID NO: 188289 - RNA, 19 nt, Homo sapiens
  misc_RNA (1)...(19): siRNA sense strand
gaugcugggugugcugaug

SEQ ID NO: 188290 - RNA, 19 nt, Homo sapiens
  misc_RNA (1)...(19): siRNA sense strand
aggagcagcuuguguuucu

SEQ ID NO: 188291 - RNA, 19 nt, Homo sapiens
  misc_RNA (1)...(19): siRNA sense strand
gaagauccgagaguuuauc

SEQ ID NO: 188292 - RNA, 19 nt, Homo sapiens
  misc_RNA (1)...(19): siRNA sense strand
ggauuauauucaagagagu

SEQ ID NO: 188293 - RNA, 19 nt, Homo sapiens
  misc_RNA (1)...(19): siRNA sense strand
gaaauggcaccaguaucau

SEQ ID NO: 188294 - RNA, 19 nt, Homo sapiens
  misc_RNA (1)...(19): siRNA sense strand
caggaaccacugcaacuug

SEQ ID NO: 188295 - RNA, 19 nt, Homo sapiens
  misc_RNA (1)...(19): siRNA sense strand
aguuggauaucacuucuga

SEQ ID NO: 188296 - RNA, 19 nt, Homo sapiens
  misc_RNA (1)...(19): siRNA sense strand
gagcaacagcaaaggagau

SEQ ID NO: 188297 - RNA, 19 nt, Homo sapiens
  misc_RNA (1)...(19): siRNA sense strand
gcugauccguggcuuuggu

SEQ ID NO: 188298 - RNA, 19 nt, Homo sapiens
  misc_RNA (1)...(19): siRNA sense strand
aaaggaagcucuuaaaacg

SEQ ID NO: 188299 - RNA, 19 nt, Homo sapiens
  misc_RNA (1)...(19): siRNA sense strand
ugacugcuacgaugccauu

SEQ ID NO: 188300 - RNA, 19 nt, Homo sapiens
  misc_RNA (1)...(19): siRNA sense strand
uggagacgcugagcaagau

SEQ ID NO: 188301 - RNA, 19 nt, Homo sapiens
  misc_RNA (1)...(19): siRNA sense strand
cagguucuucuaucaguuu

SEQ ID NO: 188302 - RNA, 19 nt, Homo sapiens
  misc_RNA (1)...(19): siRNA sense strand
aguaaaggaagcucuuaaa

SEQ ID NO: 188303 - RNA, 19 nt, Homo sapiens
  misc_RNA (1)...(19): siRNA sense strand
acagcagauugaacagaaa

SEQ ID NO: 188304 - RNA, 19 nt, Homo sapiens
  misc_RNA (1)...(19): siRNA sense strand
agacgcugagcaagauuua

SEQ ID NO: 188305 - RNA, 19 nt, Homo sapiens
  misc_RNA (1)...(19): siRNA sense strand
cauucgggauuauauucaa

SEQ ID NO: 188306 - RNA, 19 nt, Homo sapiens
  misc_RNA (1)...(19): siRNA sense strand
uucaagagagugagaauau

SEQ ID NO: 188307 - RNA, 19 nt, Homo sapiens
  misc_RNA (1)...(19): siRNA sense strand
cagcugauccguggcuuug

SEQ ID NO: 188308 - RNA, 19 nt, Homo sapiens
  misc_RNA (1)...(19): siRNA sense strand
caaagacaacuuccuauuu

SEQ ID NO: 188309 - RNA, 19 nt, Homo sapiens
  misc_RNA (1)...(19): siRNA sense strand
gacgacaucuuuaucauca

SEQ ID NO: 188310 - RNA, 19 nt, Homo sapiens
  misc_RNA (1)...(19): siRNA sense strand
gcaaagacaacuuccuauu

SEQ ID NO: 188311 - RNA, 19 nt, Homo sapiens
  misc_RNA (1)...(19): siRNA sense strand
ccaacaccauguccaacua

SEQ ID NO: 188312 - RNA, 19 nt, Homo sapiens
  misc_RNA (1)...(19): siRNA sense strand
gggcaaagacaacuuccua

SEQ ID NO: 188313 - RNA, 19 nt, Homo sapiens
  misc_RNA (1)...(19): siRNA sense strand
ggagaacacccaagaugug

SEQ ID NO: 188314 - RNA, 19 nt, Homo sapiens
  misc_RNA (1)...(19): siRNA sense strand
gaaguugccaggugaauac

SEQ ID NO: 188315 - RNA, 19 nt, Homo sapiens
  misc_RNA (1)...(19): siRNA sense strand
cucaugagcucccaucuuc

SEQ ID NO: 188316 - RNA, 19 nt, Homo sapiens
  misc_RNA (1)...(19): siRNA sense strand
caaaggcgaagugcaguuu

SEQ ID NO: 188317 - RNA, 19 nt, Homo sapiens
  misc_RNA (1)...(19): siRNA sense strand
ggacgacgacaucuuuauc

SEQ ID NO: 188318 - RNA, 19 nt, Homo sapiens
  misc_RNA (1)...(19): siRNA sense strand
gacaacuuccuauuuauca

SEQ ID NO: 188319 - RNA, 19 nt, Homo sapiens
  misc_RNA (1)...(19): siRNA sense strand
gcgggacgacgacaucuuu

SEQ ID NO: 188320 - RNA, 19 nt, Homo sapiens
  misc_RNA (1)...(19): siRNA sense strand
cgaccuggaugaucgagau

SEQ ID NO: 188321 - RNA, 19 nt, Homo sapiens
  misc_RNA (1)...(19): siRNA sense strand
uggucucccucuaucauua

SEQ ID NO: 188322 - RNA, 19 nt, Homo sapiens
  misc_RNA (1)...(19): siRNA sense strand
gcacccacgacccucauaa

SEQ ID NO: 188323 - RNA, 19 nt, Homo sapiens
  misc_RNA (1)...(19): siRNA sense strand
gcggagaacacccaagaug

SEQ ID NO: 188324 - RNA, 19 nt, Homo sapiens
  misc_RNA (1)...(19): siRNA sense strand
gugaauacuuccgguacaa

SEQ ID NO: 188325 - RNA, 19 nt, Homo sapiens
  misc_RNA (1)...(19): siRNA sense strand
ggaugaagggcaaagacaa

SEQ ID NO: 188326 - RNA, 19 nt, Homo sapiens
  misc_RNA (1)...(19): siRNA sense strand
ggugaauacuuccgguaca

SEQ ID NO: 188327 - RNA, 19 nt, Homo sapiens
  misc_RNA (1)...(19): siRNA sense strand
guugccaggugaauacuuc

SEQ ID NO: 188328 - RNA, 19 nt, Homo sapiens
  misc_RNA (1)...(19): siRNA sense strand
gacgacgacaucuuuauca

SEQ ID NO: 188329 - RNA, 19 nt, Homo sapiens
  misc_RNA (1)...(19): siRNA sense strand
ccauccagaucuucaccaa

SEQ ID NO: 188330 - RNA, 19 nt, Homo sapiens
  misc_RNA (1)...(19): siRNA sense strand
gcaucagcuuggcggagaa

SEQ ID NO: 188331 - RNA, 19 nt, Homo sapiens
  misc_RNA (1)...(19): siRNA sense strand
ccaaggccaaggugaucua

SEQ ID NO: 188332 - RNA, 19 nt, Homo sapiens
  misc_RNA (1)...(19): siRNA sense strand
agaaguugccaggugaaua

SEQ ID NO: 188333 - RNA, 19 nt, Homo sapiens
  misc_RNA (1)...(19): siRNA sense strand
guuguggucucccucuauc

SEQ ID NO: 188334 - RNA, 19 nt, Homo sapiens
  misc_RNA (1)...(19): siRNA sense strand
gggacgacgacaucuuuau

SEQ ID NO: 188335 - RNA, 19 nt, Homo sapiens
  misc_RNA (1)...(19): siRNA sense strand
gcucccaucuucccaucca

SEQ ID NO: 188336 - RNA, 19 nt, Homo sapiens
  misc_RNA (1)...(19): siRNA sense strand
gaugaagggcaaagacaac

SEQ ID NO: 188337 - RNA, 19 nt, Homo sapiens
  misc_RNA (1)...(19): siRNA sense strand
guggcacacucaaccuuca

SEQ ID NO: 188338 - RNA, 19 nt, Homo sapiens
  misc_RNA (1)...(19): siRNA sense strand
agacaacuuccuauuuauc

SEQ ID NO: 188339 - RNA, 19 nt, Homo sapiens
  misc_RNA (1)...(19): siRNA sense strand
cgacgacaucuuuaucauc

SEQ ID NO: 188340 - RNA, 19 nt, Homo sapiens
  misc_RNA (1)...(19): siRNA sense strand
ggcaaagacaacuuccuau

SEQ ID NO: 188341 - RNA, 19 nt, Homo sapiens
  misc_RNA (1)...(19): siRNA sense strand
aggccaaggugaucuacau

SEQ ID NO: 188342 - RNA, 19 nt, Homo sapiens
  misc_RNA (1)...(19): siRNA sense strand
cggagaacacccaagaugu

SEQ ID NO: 188343 - RNA, 19 nt, Homo sapiens
  misc_RNA (1)...(19): siRNA sense strand
gcuccaaggccaaggugau

SEQ ID NO: 188344 - RNA, 19 nt, Homo sapiens
  misc_RNA (1)...(19): siRNA sense strand
caaagacaacuuccuauuu

SEQ ID NO: 188345 - RNA, 19 nt, Homo sapiens
  misc_RNA (1)...(19): siRNA sense strand
gacgacaucuuuaucauca

SEQ ID NO: 188346 - RNA, 19 nt, Homo sapiens
  misc_RNA (1)...(19): siRNA sense strand
gcaaagacaacuuccuauu

SEQ ID NO: 188347 - RNA, 19 nt, Homo sapiens
  misc_RNA (1)...(19): siRNA sense strand
ccaacaccauguccaacua

SEQ ID NO: 188348 - RNA, 19 nt, Homo sapiens
  misc_RNA (1)...(19): siRNA sense strand
gggcaaagacaacuuccua

SEQ ID NO: 188349 - RNA, 19 nt, Homo sapiens
  misc_RNA (1)...(19): siRNA sense strand
ggagaacacccaagaugug

SEQ ID NO: 188350 - RNA, 19 nt, Homo sapiens
  misc_RNA (1)...(19): siRNA sense strand
gaaguugccaggugaauac

SEQ ID NO: 188351 - RNA, 19 nt, Homo sapiens
  misc_RNA (1)...(19): siRNA sense strand
cucaugagcucccaucuuc

SEQ ID NO: 188352 - RNA, 19 nt, Homo sapiens
  misc_RNA (1)...(19): siRNA sense strand
caaaggcgaagugcaguuu

SEQ ID NO: 188353 - RNA, 19 nt, Homo sapiens
  misc_RNA (1)...(19): siRNA sense strand
ggacgacgacaucuuuauc

SEQ ID NO: 188354 - RNA, 19 nt, Homo sapiens
  misc_RNA (1)...(19): siRNA sense strand
gacaacuuccuauuuauca

SEQ ID NO: 188355 - RNA, 19 nt, Homo sapiens
  misc_RNA (1)...(19): siRNA sense strand
gcgggacgacgacaucuuu

SEQ ID NO: 188356 - RNA, 19 nt, Homo sapiens
  misc_RNA (1)...(19): siRNA sense strand
cgaccuggaugaucgagau

SEQ ID NO: 188357 - RNA, 19 nt, Homo sapiens
  misc_RNA (1)...(19): siRNA sense strand
uggucucccucuaucauua

SEQ ID NO: 188358 - RNA, 19 nt, Homo sapiens
  misc_RNA (1)...(19): siRNA sense strand
gcacccacgacccucauaa

SEQ ID NO: 188359 - RNA, 19 nt, Homo sapiens
  misc_RNA (1)...(19): siRNA sense strand
gcggagaacacccaagaug

SEQ ID NO: 188360 - RNA, 19 nt, Homo sapiens
  misc_RNA (1)...(19): siRNA sense strand
gugaauacuuccgguacaa

SEQ ID NO: 188361 - RNA, 19 nt, Homo sapiens
  misc_RNA (1)...(19): siRNA sense strand
ggaugaagggcaaagacaa

SEQ ID NO: 188362 - RNA, 19 nt, Homo sapiens
  misc_RNA (1)...(19): siRNA sense strand
ggugaauacuuccgguaca

SEQ ID NO: 188363 - RNA, 19 nt, Homo sapiens
  misc_RNA (1)...(19): siRNA sense strand
guugccaggugaauacuuc

SEQ ID NO: 188364 - RNA, 19 nt, Homo sapiens
  misc_RNA (1)...(19): siRNA sense strand
gacgacgacaucuuuauca

SEQ ID NO: 188365 - RNA, 19 nt, Homo sapiens
  misc_RNA (1)...(19): siRNA sense strand
ccauccagaucuucaccaa

SEQ ID NO: 188366 - RNA, 19 nt, Homo sapiens
  misc_RNA (1)...(19): siRNA sense strand
gcaucagcuuggcggagaa

SEQ ID NO: 188367 - RNA, 19 nt, Homo sapiens
  misc_RNA (1)...(19): siRNA sense strand
ccaaggccaaggugaucua

SEQ ID NO: 188368 - RNA, 19 nt, Homo sapiens
  misc_RNA (1)...(19): siRNA sense strand
agaaguugccaggugaaua

SEQ ID NO: 188369 - RNA, 19 nt, Homo sapiens
  misc_RNA (1)...(19): siRNA sense strand
guuguggucucccucuauc

SEQ ID NO: 188370 - RNA, 19 nt, Homo sapiens
  misc_RNA (1)...(19): siRNA sense strand
gggacgacgacaucuuuau

SEQ ID NO: 188371 - RNA, 19 nt, Homo sapiens
  misc_RNA (1)...(19): siRNA sense strand
gcucccaucuucccaucca

SEQ ID NO: 188372 - RNA, 19 nt, Homo sapiens
  misc_RNA (1)...(19): siRNA sense strand
gaugaagggcaaagacaac

SEQ ID NO: 188373 - RNA, 19 nt, Homo sapiens
  misc_RNA (1)...(19): siRNA sense strand
guggcacacucaaccuuca

SEQ ID NO: 188374 - RNA, 19 nt, Homo sapiens
  misc_RNA (1)...(19): siRNA sense strand
agacaacuuccuauuuauc

SEQ ID NO: 188375 - RNA, 19 nt, Homo sapiens
  misc_RNA (1)...(19): siRNA sense strand
cgacgacaucuuuaucauc

SEQ ID NO: 188376 - RNA, 19 nt, Homo sapiens
  misc_RNA (1)...(19): siRNA sense strand
ggcaaagacaacuuccuau

SEQ ID NO: 188377 - RNA, 19 nt, Homo sapiens
  misc_RNA (1)...(19): siRNA sense strand
aggccaaggugaucuacau

SEQ ID NO: 188378 - RNA, 19 nt, Homo sapiens
  misc_RNA (1)...(19): siRNA sense strand
cggagaacacccaagaugu

SEQ ID NO: 188379 - RNA, 19 nt, Homo sapiens
  misc_RNA (1)...(19): siRNA sense strand
gcuccaaggccaaggugau

SEQ ID NO: 188380 - RNA, 19 nt, Homo sapiens
  misc_RNA (1)...(19): siRNA sense strand
gaaacuaucuggaugugua

SEQ ID NO: 188381 - RNA, 19 nt, Homo sapiens
  misc_RNA (1)...(19): siRNA sense strand
ccacaaagaugguaucgua

SEQ ID NO: 188382 - RNA, 19 nt, Homo sapiens
  misc_RNA (1)...(19): siRNA sense strand
ccagaaaucuuccacagaa

SEQ ID NO: 188383 - RNA, 19 nt, Homo sapiens
  misc_RNA (1)...(19): siRNA sense strand
gaacaagucugaccaagcu

SEQ ID NO: 188384 - RNA, 19 nt, Homo sapiens
  misc_RNA (1)...(19): siRNA sense strand
caaauacaccaacaacuua

SEQ ID NO: 188385 - RNA, 19 nt, Homo sapiens
  misc_RNA (1)...(19): siRNA sense strand
gaaaucuuccacagaauua

SEQ ID NO: 188386 - RNA, 19 nt, Homo sapiens
  misc_RNA (1)...(19): siRNA sense strand
ccacacggcuugccuaguu

SEQ ID NO: 188387 - RNA, 19 nt, Homo sapiens
  misc_RNA (1)...(19): siRNA sense strand
gagaaggacuuucaaaauu

SEQ ID NO: 188388 - RNA, 19 nt, Homo sapiens
  misc_RNA (1)...(19): siRNA sense strand
ggagguagcugcaacuucu

SEQ ID NO: 188389 - RNA, 19 nt, Homo sapiens
  misc_RNA (1)...(19): siRNA sense strand
gagcaaggaucccacuuuc

SEQ ID NO: 188390 - RNA, 19 nt, Homo sapiens
  misc_RNA (1)...(19): siRNA sense strand
gaucuaagcccaagagcaa

SEQ ID NO: 188391 - RNA, 19 nt, Homo sapiens
  misc_RNA (1)...(19): siRNA sense strand
gaccaugccucuggaguuu

SEQ ID NO: 188392 - RNA, 19 nt, Homo sapiens
  misc_RNA (1)...(19): siRNA sense strand
ggcagcaagugcagaaaua

SEQ ID NO: 188393 - RNA, 19 nt, Homo sapiens
  misc_RNA (1)...(19): siRNA sense strand
gguaaugacuucaguuucu

SEQ ID NO: 188394 - RNA, 19 nt, Homo sapiens
  misc_RNA (1)...(19): siRNA sense strand
gcaauucugugaccugcaa

SEQ ID NO: 188395 - RNA, 19 nt, Homo sapiens
  misc_RNA (1)...(19): siRNA sense strand
caaagaugguaucguagaa

SEQ ID NO: 188396 - RNA, 19 nt, Homo sapiens
  misc_RNA (1)...(19): siRNA sense strand
gacauuuacuggcucauga

SEQ ID NO: 188397 - RNA, 19 nt, Homo sapiens
  misc_RNA (1)...(19): siRNA sense strand
gagaagcucuacacucaag

SEQ ID NO: 188398 - RNA, 19 nt, Homo sapiens
  misc_RNA (1)...(19): siRNA sense strand
ccaaauacaccaacaacuu

SEQ ID NO: 188399 - RNA, 19 nt, Homo sapiens
  misc_RNA (1)...(19): siRNA sense strand
gcaaugggaacaagucuga

SEQ ID NO: 188400 - RNA, 19 nt, Homo sapiens
  misc_RNA (1)...(19): siRNA sense strand
gcacaucgagaccaucaaa

SEQ ID NO: 188401 - RNA, 19 nt, Homo sapiens
  misc_RNA (1)...(19): siRNA sense strand
gaaaaguacugcccagaga

SEQ ID NO: 188402 - RNA, 19 nt, Homo sapiens
  misc_RNA (1)...(19): siRNA sense strand
aaagaaaccaugaggauug

SEQ ID NO: 188403 - RNA, 19 nt, Homo sapiens
  misc_RNA (1)...(19): siRNA sense strand
ggugaaagcaauucuguga

SEQ ID NO: 188404 - RNA, 19 nt, Homo sapiens
  misc_RNA (1)...(19): siRNA sense strand
gaucuggacugacugugau

SEQ ID NO: 188405 - RNA, 19 nt, Homo sapiens
  misc_RNA (1)...(19): siRNA sense strand
ggagagaaggacuuucaaa

SEQ ID NO: 188406 - RNA, 19 nt, Homo sapiens
  misc_RNA (1)...(19): siRNA sense strand
gcugaucugugauggcaaa

SEQ ID NO: 188407 - RNA, 19 nt, Homo sapiens
  misc_RNA (1)...(19): siRNA sense strand
gagcuggaccugaggauug

SEQ ID NO: 188408 - RNA, 19 nt, Homo sapiens
  misc_RNA (1)...(19): siRNA sense strand
gauuggagcugccuuuacu

SEQ ID NO: 188409 - RNA, 19 nt, Homo sapiens
  misc_RNA (1)...(19): siRNA sense strand
gagcugccuuuacuagguu

SEQ ID NO: 188410 - RNA, 19 nt, Homo sapiens
  misc_RNA (1)...(19): siRNA sense strand
ggagcugccuuuacuaggu

SEQ ID NO: 188411 - RNA, 19 nt, Homo sapiens
  misc_RNA (1)...(19): siRNA sense strand
ggagaagcauggcauuggu

SEQ ID NO: 188412 - RNA, 19 nt, Homo sapiens
  misc_RNA (1)...(19): siRNA sense strand
ccacagaauuaaaguaacu

SEQ ID NO: 188413 - RNA, 19 nt, Homo sapiens
  misc_RNA (1)...(19): siRNA sense strand
caacuuacagggagaugaa

SEQ ID NO: 188414 - RNA, 19 nt, Homo sapiens
  misc_RNA (1)...(19): siRNA sense strand
aagaugguaucguagaauu

SEQ ID NO: 188415 - RNA, 19 nt, Homo sapiens
  misc_RNA (1)...(19): siRNA sense strand
ccaugaggauugcugagaa

SEQ ID NO: 188416 - RNA, 19 nt, Homo sapiens
  misc_RNA (1)...(19): siRNA sense strand
ggacugacugugauagaga

SEQ ID NO: 188417 - RNA, 19 nt, Homo sapiens
  misc_RNA (1)...(19): siRNA sense strand
gaacuggaagcugaucuga

SEQ ID NO: 188418 - RNA, 19 nt, Homo sapiens
  misc_RNA (1)...(19): siRNA sense strand
gcaaggaucccacuuucag

SEQ ID NO: 188419 - RNA, 19 nt, Homo sapiens
  misc_RNA (1)...(19): siRNA sense strand
ggugagcgaugcuguggau

SEQ ID NO: 188420 - RNA, 19 nt, Homo sapiens
  misc_RNA (1)...(19): siRNA sense strand
gagauuauccacgugugua

SEQ ID NO: 188421 - RNA, 19 nt, Homo sapiens
  misc_RNA (1)...(19): siRNA sense strand
gcaacccucuuguccucuu

SEQ ID NO: 188422 - RNA, 19 nt, Homo sapiens
  misc_RNA (1)...(19): siRNA sense strand
uaaagaaaccaugaggauu

SEQ ID NO: 188423 - RNA, 19 nt, Homo sapiens
  misc_RNA (1)...(19): siRNA sense strand
gagaagcauggcauuggua

SEQ ID NO: 188424 - RNA, 19 nt, Homo sapiens
  misc_RNA (1)...(19): siRNA sense strand
ucauugcccucauggagaa

SEQ ID NO: 188425 - RNA, 19 nt, Homo sapiens
  misc_RNA (1)...(19): siRNA sense strand
ucgccgaccugcugucaaa

SEQ ID NO: 188426 - RNA, 19 nt, Homo sapiens
  misc_RNA (1)...(19): siRNA sense strand
gagcgaugcuguggaugug

SEQ ID NO: 188427 - RNA, 19 nt, Homo sapiens
  misc_RNA (1)...(19): siRNA sense strand
gauccucccugucuaugag

SEQ ID NO: 188428 - RNA, 19 nt, Homo sapiens
  misc_RNA (1)...(19): siRNA sense strand
uaacucaugaccacaaaga

SEQ ID NO: 188429 - RNA, 19 nt, Homo sapiens
  misc_RNA (1)...(19): siRNA sense strand
caagaaaacuuuggaacga

SEQ ID NO: 188430 - RNA, 19 nt, Homo sapiens
  misc_RNA (1)...(19): siRNA sense strand
ggaagugcccacagugcaa

SEQ ID NO: 188431 - RNA, 19 nt, Homo sapiens
  misc_RNA (1)...(19): siRNA sense strand
gcagaaauacaagcagguu

SEQ ID NO: 188432 - RNA, 19 nt, Homo sapiens
  misc_RNA (1)...(19): siRNA sense strand
gcccgaagaccgugccuuu

SEQ ID NO: 188433 - RNA, 19 nt, Homo sapiens
  misc_RNA (1)...(19): siRNA sense strand
uucaguuucuggacauuua

SEQ ID NO: 188434 - RNA, 19 nt, Homo sapiens
  misc_RNA (1)...(19): siRNA sense strand
cuaaagaaaccaugaggau

SEQ ID NO: 188435 - RNA, 19 nt, Homo sapiens
  misc_RNA (1)...(19): siRNA sense strand
gcuaaccagucccugaaca

SEQ ID NO: 188436 - RNA, 19 nt, Homo sapiens
  misc_RNA (1)...(19): siRNA sense strand
gauccuggaccugagauuu

SEQ ID NO: 188437 - RNA, 19 nt, Homo sapiens
  misc_RNA (1)...(19): siRNA sense strand
gagugucgcucagcugugu

SEQ ID NO: 188438 - RNA, 19 nt, Homo sapiens
  misc_RNA (1)...(19): siRNA sense strand
ccuccgggcugaacuggaa

SEQ ID NO: 188439 - RNA, 19 nt, Homo sapiens
  misc_RNA (1)...(19): siRNA sense strand
cgaacagaaacaaacauuu

SEQ ID NO: 188440 - RNA, 19 nt, Homo sapiens
  misc_RNA (1)...(19): siRNA sense strand
gcggagagaaggacuuuca

SEQ ID NO: 188441 - RNA, 19 nt, Homo sapiens
  misc_RNA (1)...(19): siRNA sense strand
gacaggagacagaggaaga

SEQ ID NO: 188442 - RNA, 19 nt, Homo sapiens
  misc_RNA (1)...(19): siRNA sense strand
gagcacaucgagaccauca

SEQ ID NO: 188443 - RNA, 19 nt, Homo sapiens
  misc_RNA (1)...(19): siRNA sense strand
caagauccucccugucuau

SEQ ID NO: 188444 - RNA, 19 nt, Homo sapiens
  misc_RNA (1)...(19): siRNA sense strand
acaagauccucccugucua

SEQ ID NO: 188445 - RNA, 19 nt, Homo sapiens
  misc_RNA (1)...(19): siRNA sense strand
cagcgacuguacgaguuua

SEQ ID NO: 188446 - RNA, 19 nt, Homo sapiens
  misc_RNA (1)...(19): siRNA sense strand
guaaugacuucaguuucug

SEQ ID NO: 188447 - RNA, 19 nt, Homo sapiens
  misc_RNA (1)...(19): siRNA sense strand
cgaaaguugagaauaaaug

SEQ ID NO: 188448 - RNA, 19 nt, Homo sapiens
  misc_RNA (1)...(19): siRNA sense strand
gaaggacuuucaaaauuca

SEQ ID NO: 188449 - RNA, 19 nt, Homo sapiens
  misc_RNA (1)...(19): siRNA sense strand
aacaucggguuugagauua

SEQ ID NO: 188450 - RNA, 19 nt, Homo sapiens
  misc_RNA (1)...(19): siRNA sense strand
gaaaguugagaauaaaugc

SEQ ID NO: 188451 - RNA, 19 nt, Homo sapiens
  misc_RNA (1)...(19): siRNA sense strand
gcuggcuucucgaaaguug

SEQ ID NO: 188452 - RNA, 19 nt, Homo sapiens
  misc_RNA (1)...(19): siRNA sense strand
agaaaucuuccacagaauu

SEQ ID NO: 188453 - RNA, 19 nt, Homo sapiens
  misc_RNA (1)...(19): siRNA sense strand
gacugacugugauagagaa

SEQ ID NO: 188454 - RNA, 19 nt, Homo sapiens
  misc_RNA (1)...(19): siRNA sense strand
acuggaagcugaucugaag

SEQ ID NO: 188455 - RNA, 19 nt, Homo sapiens
  misc_RNA (1)...(19): siRNA sense strand
gggcaugggacuuguggaa

SEQ ID NO: 188456 - RNA, 19 nt, Homo sapiens
  misc_RNA (1)...(19): siRNA sense strand
gauucuggcccgaaacuau

SEQ ID NO: 188457 - RNA, 19 nt, Homo sapiens
  misc_RNA (1)...(19): siRNA sense strand
gaugguaucguagaauuca

SEQ ID NO: 188458 - RNA, 19 nt, Homo sapiens
  misc_RNA (1)...(19): siRNA sense strand
caacccucuuguccucuuu

SEQ ID NO: 188459 - RNA, 19 nt, Homo sapiens
  misc_RNA (1)...(19): siRNA sense strand
gcaaagaaaccccggaaau

SEQ ID NO: 188460 - RNA, 19 nt, Homo sapiens
  misc_RNA (1)...(19): siRNA sense strand
gccagaauguuaccauggu

SEQ ID NO: 188461 - RNA, 19 nt, Homo sapiens
  misc_RNA (1)...(19): siRNA sense strand
cuguauggccagaauguua

SEQ ID NO: 188462 - RNA, 19 nt, Homo sapiens
  misc_RNA (1)...(19): siRNA sense strand
ugccagagcccaucaggaa

SEQ ID NO: 188463 - RNA, 19 nt, Homo sapiens
  misc_RNA (1)...(19): siRNA sense strand
acaagcagguuuucauuga

SEQ ID NO: 188464 - RNA, 19 nt, Homo sapiens
  misc_RNA (1)...(19): siRNA sense strand
gagagaaggacuuucaaaa

SEQ ID NO: 188465 - RNA, 19 nt, Homo sapiens
  misc_RNA (1)...(19): siRNA sense strand
uuuacuggcucaugauuuc

SEQ ID NO: 188466 - RNA, 19 nt, Homo sapiens
  misc_RNA (1)...(19): siRNA sense strand
ugagcaaggaucccacuuu

SEQ ID NO: 188467 - RNA, 19 nt, Homo sapiens
  misc_RNA (1)...(19): siRNA sense strand
gccuaguucucuaucaguu

SEQ ID NO: 188468 - RNA, 19 nt, Homo sapiens
  misc_RNA (1)...(19): siRNA sense strand
cagaaaucuuccacagaau

SEQ ID NO: 188469 - RNA, 19 nt, Homo sapiens
  misc_RNA (1)...(19): siRNA sense strand
gaggauuggagcugccuuu

SEQ ID NO: 188470 - RNA, 19 nt, Homo sapiens
  misc_RNA (1)...(19): siRNA sense strand
cgacuguacgaguuuauug

SEQ ID NO: 188471 - RNA, 19 nt, Homo sapiens
  misc_RNA (1)...(19): siRNA sense strand
cuaguucucuaucaguugu

SEQ ID NO: 188472 - RNA, 19 nt, Homo sapiens
  misc_RNA (1)...(19): siRNA sense strand
acaaagaugguaucguaga

SEQ ID NO: 188473 - RNA, 19 nt, Homo sapiens
  misc_RNA (1)...(19): siRNA sense strand
ggacauuuacuggcucaug

SEQ ID NO: 188474 - RNA, 19 nt, Homo sapiens
  misc_RNA (1)...(19): siRNA sense strand
ccacguguguaaggcugua

SEQ ID NO: 188475 - RNA, 19 nt, Homo sapiens
  misc_RNA (1)...(19): siRNA sense strand
uggcuaaagcaaagaaauu

SEQ ID NO: 188476 - RNA, 19 nt, Homo sapiens
  misc_RNA (1)...(19): siRNA sense strand
cggcuugccuaguucucua

SEQ ID NO: 188477 - RNA, 19 nt, Homo sapiens
  misc_RNA (1)...(19): siRNA sense strand
uaaggcagcaagugcagaa

SEQ ID NO: 188478 - RNA, 19 nt, Homo sapiens
  misc_RNA (1)...(19): siRNA sense strand
gccggcaguucuuuaagug

SEQ ID NO: 188479 - RNA, 19 nt, Homo sapiens
  misc_RNA (1)...(19): siRNA sense strand
ccaugccucuggaguuugu

SEQ ID NO: 188480 - RNA, 19 nt, Homo sapiens
  misc_RNA (1)...(19): siRNA sense strand
gaagauccuccacaagaaa

SEQ ID NO: 188481 - RNA, 19 nt, Homo sapiens
  misc_RNA (1)...(19): siRNA sense strand
cagaagauccuccacaaga

SEQ ID NO: 188482 - RNA, 19 nt, Homo sapiens
  misc_RNA (1)...(19): siRNA sense strand
gccagaagauccuccacaa

SEQ ID NO: 188483 - RNA, 19 nt, Homo sapiens
  misc_RNA (1)...(19): siRNA sense strand
agaagauccuccacaagaa

SEQ ID NO: 188484 - RNA, 19 nt, Homo sapiens
  misc_RNA (1)...(19): siRNA sense strand
aagggaaaguguacuggua

SEQ ID NO: 188485 - RNA, 19 nt, Homo sapiens
  misc_RNA (1)...(19): siRNA sense strand
cgacuucugcuacgaauuc

SEQ ID NO: 188486 - RNA, 19 nt, Homo sapiens
  misc_RNA (1)...(19): siRNA sense strand
caagaaagggaaaguguac

SEQ ID NO: 188487 - RNA, 19 nt, Homo sapiens
  misc_RNA (1)...(19): siRNA sense strand
acaagaaagggaaagugua

SEQ ID NO: 188488 - RNA, 19 nt, Homo sapiens
  misc_RNA (1)...(19): siRNA sense strand
cacaagaaagggaaagugu

SEQ ID NO: 188489 - RNA, 19 nt, Homo sapiens
  misc_RNA (1)...(19): siRNA sense strand
cgcuacagcuggaagaaag

SEQ ID NO: 188490 - RNA, 19 nt, Homo sapiens
  misc_RNA (1)...(19): siRNA sense strand
gaggcgcaccugagcauca

SEQ ID NO: 188491 - RNA, 19 nt, Homo sapiens
  misc_RNA (1)...(19): siRNA sense strand
gcgcuacagcuggaagaaa

SEQ ID NO: 188492 - RNA, 19 nt, Homo sapiens
  misc_RNA (1)...(19): siRNA sense strand
ccacaagaaagggaaagug

SEQ ID NO: 188493 - RNA, 19 nt, Homo sapiens
  misc_RNA (1)...(19): siRNA sense strand
ucgccaacgccgucaauga

SEQ ID NO: 188494 - RNA, 19 nt, Homo sapiens
  misc_RNA (1)...(19): siRNA sense strand
gaacauggcagauuuaaua

SEQ ID NO: 188495 - RNA, 19 nt, Homo sapiens
  misc_RNA (1)...(19): siRNA sense strand
caacaaaccuucuaagcuu

SEQ ID NO: 188496 - RNA, 19 nt, Homo sapiens
  misc_RNA (1)...(19): siRNA sense strand
guaaugagcugaagugugu

SEQ ID NO: 188497 - RNA, 19 nt, Homo sapiens
  misc_RNA (1)...(19): siRNA sense strand
gaaauggaguuugcaguaa

SEQ ID NO: 188498 - RNA, 19 nt, Homo sapiens
  misc_RNA (1)...(19): siRNA sense strand
uaucaugacuuccugaaua

SEQ ID NO: 188499 - RNA, 19 nt, Homo sapiens
  misc_RNA (1)...(19): siRNA sense strand
gaaaucacaucuacuuuag

SEQ ID NO: 188500 - RNA, 19 nt, Homo sapiens
  misc_RNA (1)...(19): siRNA sense strand
gcaagacuguggaaguuaa

SEQ ID NO: 188501 - RNA, 19 nt, Homo sapiens
  misc_RNA (1)...(19): siRNA sense strand
gaagaaaccaaauacauug

SEQ ID NO: 188502 - RNA, 19 nt, Homo sapiens
  misc_RNA (1)...(19): siRNA sense strand
gaaacgugcucaggaaauu

SEQ ID NO: 188503 - RNA, 19 nt, Homo sapiens
  misc_RNA (1)...(19): siRNA sense strand
ggaaauggaguuugcagua

SEQ ID NO: 188504 - RNA, 19 nt, Homo sapiens
  misc_RNA (1)...(19): siRNA sense strand
gagaagcaguaaaugauug

SEQ ID NO: 188505 - RNA, 19 nt, Homo sapiens
  misc_RNA (1)...(19): siRNA sense strand
gaggaaacccugacucauu

SEQ ID NO: 188506 - RNA, 19 nt, Homo sapiens
  misc_RNA (1)...(19): siRNA sense strand
ggaauuugcuuuggaggaa

SEQ ID NO: 188507 - RNA, 19 nt, Homo sapiens
  misc_RNA (1)...(19): siRNA sense strand
gaggaggcgugaaugaauu

SEQ ID NO: 188508 - RNA, 19 nt, Homo sapiens
  misc_RNA (1)...(19): siRNA sense strand
gcuguccucugaauacaua

SEQ ID NO: 188509 - RNA, 19 nt, Homo sapiens
  misc_RNA (1)...(19): siRNA sense strand
gggagacacuggcuauuau

SEQ ID NO: 188510 - RNA, 19 nt, Homo sapiens
  misc_RNA (1)...(19): siRNA sense strand
ccaaauacauugaacugau

SEQ ID NO: 188511 - RNA, 19 nt, Homo sapiens
  misc_RNA (1)...(19): siRNA sense strand
gggaugugcuuugugguua

SEQ ID NO: 188512 - RNA, 19 nt, Homo sapiens
  misc_RNA (1)...(19): siRNA sense strand
cauaauugcuggcaccauu

SEQ ID NO: 188513 - RNA, 19 nt, Homo sapiens
  misc_RNA (1)...(19): siRNA sense strand
gaaccacacauaucucauu

SEQ ID NO: 188514 - RNA, 19 nt, Homo sapiens
  misc_RNA (1)...(19): siRNA sense strand
caaauacauugaacugaug

SEQ ID NO: 188515 - RNA, 19 nt, Homo sapiens
  misc_RNA (1)...(19): siRNA sense strand
caacaaguuugccauaucu

SEQ ID NO: 188516 - RNA, 19 nt, Homo sapiens
  misc_RNA (1)...(19): siRNA sense strand
guaaagaaggcacuauuug

SEQ ID NO: 188517 - RNA, 19 nt, Homo sapiens
  misc_RNA (1)...(19): siRNA sense strand
caaaugaugugcuuagaac

SEQ ID NO: 188518 - RNA, 19 nt, Homo sapiens
  misc_RNA (1)...(19): siRNA sense strand
gaaaggaggaggcgugaau

SEQ ID NO: 188519 - RNA, 19 nt, Homo sapiens
  misc_RNA (1)...(19): siRNA sense strand
gcagaguguuguaagaaau

SEQ ID NO: 188520 - RNA, 19 nt, Homo sapiens
  misc_RNA (1)...(19): siRNA sense strand
gagcugaagugugugugua

SEQ ID NO: 188521 - RNA, 19 nt, Homo sapiens
  misc_RNA (1)...(19): siRNA sense strand
gcagcaaggaagaacauua

SEQ ID NO: 188522 - RNA, 19 nt, Homo sapiens
  misc_RNA (1)...(19): siRNA sense strand
gauagacaaugcaaauaca

SEQ ID NO: 188523 - RNA, 19 nt, Homo sapiens
  misc_RNA (1)...(19): siRNA sense strand
aggaaacccugacucauuu

SEQ ID NO: 188524 - RNA, 19 nt, Homo sapiens
  misc_RNA (1)...(19): siRNA sense strand
gcaccaauaucauaauagg

SEQ ID NO: 188525 - RNA, 19 nt, Homo sapiens
  misc_RNA (1)...(19): siRNA sense strand
ggagcagaguguuguaaga

SEQ ID NO: 188526 - RNA, 19 nt, Homo sapiens
  misc_RNA (1)...(19): siRNA sense strand
uuacaaauccagacuguuu

SEQ ID NO: 188527 - RNA, 19 nt, Homo sapiens
  misc_RNA (1)...(19): siRNA sense strand
gaggagagcacuguuacua

SEQ ID NO: 188528 - RNA, 19 nt, Homo sapiens
  misc_RNA (1)...(19): siRNA sense strand
agacaaagacacauggaua

SEQ ID NO: 188529 - RNA, 19 nt, Homo sapiens
  misc_RNA (1)...(19): siRNA sense strand
cgaaaucuguggugaacau

SEQ ID NO: 188530 - RNA, 19 nt, Homo sapiens
  misc_RNA (1)...(19): siRNA sense strand
uguaagaaaugcaccuuga

SEQ ID NO: 188531 - RNA, 19 nt, Homo sapiens
  misc_RNA (1)...(19): siRNA sense strand
gacaacaaguuugccauau

SEQ ID NO: 188532 - RNA, 19 nt, Homo sapiens
  misc_RNA (1)...(19): siRNA sense strand
cagcaaggaagaacauuaa

SEQ ID NO: 188533 - RNA, 19 nt, Homo sapiens
  misc_RNA (1)...(19): siRNA sense strand
ggaaagacaaagacacaug

SEQ ID NO: 188534 - RNA, 19 nt, Homo sapiens
  misc_RNA (1)...(19): siRNA sense strand
gacacuggcuauuaucuuc

SEQ ID NO: 188535 - RNA, 19 nt, Homo sapiens
  misc_RNA (1)...(19): siRNA sense strand
ugacucauuuguugcauug

SEQ ID NO: 188536 - RNA, 19 nt, Homo sapiens
  misc_RNA (1)...(19): siRNA sense strand
agacaaauauugcuaugag

SEQ ID NO: 188537 - RNA, 19 nt, Homo sapiens
  misc_RNA (1)...(19): siRNA sense strand
gcaguaaaugauugugaua

SEQ ID NO: 188538 - RNA, 19 nt, Homo sapiens
  misc_RNA (1)...(19): siRNA sense strand
gaacugaugauugugaaug

SEQ ID NO: 188539 - RNA, 19 nt, Homo sapiens
  misc_RNA (1)...(19): siRNA sense strand
gaucuuccaucugaauuuc

SEQ ID NO: 188540 - RNA, 19 nt, Homo sapiens
  misc_RNA (1)...(19): siRNA sense strand
gcuaugagaaacugaauau

SEQ ID NO: 188541 - RNA, 19 nt, Homo sapiens
  misc_RNA (1)...(19): siRNA sense strand
ggugacagcaucagacaaa

SEQ ID NO: 188542 - RNA, 19 nt, Homo sapiens
  misc_RNA (1)...(19): siRNA sense strand
gagauagacaaugcaaaua

SEQ ID NO: 188543 - RNA, 19 nt, Homo sapiens
  misc_RNA (1)...(19): siRNA sense strand
ggauggauauucaugugau

SEQ ID NO: 188544 - RNA, 19 nt, Homo sapiens
  misc_RNA (1)...(19): siRNA sense strand
gaaugaucaccuuauguuu

SEQ ID NO: 188545 - RNA, 19 nt, Homo sapiens
  misc_RNA (1)...(19): siRNA sense strand
gaagaagaaaccaaauaca

SEQ ID NO: 188546 - RNA, 19 nt, Homo sapiens
  misc_RNA (1)...(19): siRNA sense strand
uggcaccaauaucauaaua

SEQ ID NO: 188547 - RNA, 19 nt, Homo sapiens
  misc_RNA (1)...(19): siRNA sense strand
acauugaacugaugauugu

SEQ ID NO: 188548 - RNA, 19 nt, Homo sapiens
  misc_RNA (1)...(19): siRNA sense strand
gaaaccaaauacauugaac

SEQ ID NO: 188549 - RNA, 19 nt, Homo sapiens
  misc_RNA (1)...(19): siRNA sense strand
ugaaugaucaccuuauguu

SEQ ID NO: 188550 - RNA, 19 nt, Homo sapiens
  misc_RNA (1)...(19): siRNA sense strand
ucacaaugaugaugcaaag

SEQ ID NO: 188551 - RNA, 19 nt, Homo sapiens
  misc_RNA (1)...(19): siRNA sense strand
gaagaugggacaccuugug

SEQ ID NO: 188552 - RNA, 19 nt, Homo sapiens
  misc_RNA (1)...(19): siRNA sense strand
ggccgaauguguccuugaa

SEQ ID NO: 188553 - RNA, 19 nt, Homo sapiens
  misc_RNA (1)...(19): siRNA sense strand
uuuaauggcuguuacacuu

SEQ ID NO: 188554 - RNA, 19 nt, Homo sapiens
  misc_RNA (1)...(19): siRNA sense strand
cuacgugaguuuaugaaau

SEQ ID NO: 188555 - RNA, 19 nt, Homo sapiens
  misc_RNA (1)...(19): siRNA sense strand
gcaguugacucauguugac

SEQ ID NO: 188556 - RNA, 19 nt, Homo sapiens
  misc_RNA (1)...(19): siRNA sense strand
ucaagaggauuuccauuuu

SEQ ID NO: 188557 - RNA, 19 nt, Homo sapiens
  misc_RNA (1)...(19): siRNA sense strand
gacagcaucagacaaauau

SEQ ID NO: 188558 - RNA, 19 nt, Homo sapiens
  misc_RNA (1)...(19): siRNA sense strand
ggaggaggcgugaaugaau

SEQ ID NO: 188559 - RNA, 19 nt, Homo sapiens
  misc_RNA (1)...(19): siRNA sense strand
aauccagacuguuugaauu

SEQ ID NO: 188560 - RNA, 19 nt, Homo sapiens
  misc_RNA (1)...(19): siRNA sense strand
guuagcaaguggugaaugu

SEQ ID NO: 188561 - RNA, 19 nt, Homo sapiens
  misc_RNA (1)...(19): siRNA sense strand
caacaaacgggaugugcuu

SEQ ID NO: 188562 - RNA, 19 nt, Homo sapiens
  misc_RNA (1)...(19): siRNA sense strand
gacaaauauugcuaugaga

SEQ ID NO: 188563 - RNA, 19 nt, Homo sapiens
  misc_RNA (1)...(19): siRNA sense strand
ugacagcaucagacaaaua

SEQ ID NO: 188564 - RNA, 19 nt, Homo sapiens
  misc_RNA (1)...(19): siRNA sense strand
gcaggagacgccucauuga

SEQ ID NO: 188565 - RNA, 19 nt, Homo sapiens
  misc_RNA (1)...(19): siRNA sense strand
gagcagaguguuguaagaa

SEQ ID NO: 188566 - RNA, 19 nt, Homo sapiens
  misc_RNA (1)...(19): siRNA sense strand
ugacaacaaguuugccaua

SEQ ID NO: 188567 - RNA, 19 nt, Homo sapiens
  misc_RNA (1)...(19): siRNA sense strand
acacauggauacagugcaa

SEQ ID NO: 188568 - RNA, 19 nt, Homo sapiens
  misc_RNA (1)...(19): siRNA sense strand
aaagacacauggauacagu

SEQ ID NO: 188569 - RNA, 19 nt, Homo sapiens
  misc_RNA (1)...(19): siRNA sense strand
ggagaggagugugauugug

SEQ ID NO: 188570 - RNA, 19 nt, Homo sapiens
  misc_RNA (1)...(19): siRNA sense strand
ggagggauuuuaucaaaga

SEQ ID NO: 188571 - RNA, 19 nt, Homo sapiens
  misc_RNA (1)...(19): siRNA sense strand
ucgauauccucguaaugua

SEQ ID NO: 188572 - RNA, 19 nt, Homo sapiens
  misc_RNA (1)...(19): siRNA sense strand
guucugauugcaacacuua

SEQ ID NO: 188573 - RNA, 19 nt, Homo sapiens
  misc_RNA (1)...(19): siRNA sense strand
cgugaaacgugcucaggaa

SEQ ID NO: 188574 - RNA, 19 nt, Homo sapiens
  misc_RNA (1)...(19): siRNA sense strand
gguauuaucucagacaaaa

SEQ ID NO: 188575 - RNA, 19 nt, Homo sapiens
  misc_RNA (1)...(19): siRNA sense strand
caacuuaagaccaggauag

SEQ ID NO: 188576 - RNA, 19 nt, Homo sapiens
  misc_RNA (1)...(19): siRNA sense strand
cagcaucagacaaauauug

SEQ ID NO: 188577 - RNA, 19 nt, Homo sapiens
  misc_RNA (1)...(19): siRNA sense strand
gaaaaugggcgaccucgaa

SEQ ID NO: 188578 - RNA, 19 nt, Homo sapiens
  misc_RNA (1)...(19): siRNA sense strand
gcaguaaugagcugaagug

SEQ ID NO: 188579 - RNA, 19 nt, Homo sapiens
  misc_RNA (1)...(19): siRNA sense strand
gaaggagcagaguguugua

SEQ ID NO: 188580 - RNA, 19 nt, Homo sapiens
  misc_RNA (1)...(19): siRNA sense strand
gaaaggauuccagacacaa

SEQ ID NO: 188581 - RNA, 19 nt, Homo sapiens
  misc_RNA (1)...(19): siRNA sense strand
uuacuucccucacaaugau

SEQ ID NO: 188582 - RNA, 19 nt, Homo sapiens
  misc_RNA (1)...(19): siRNA sense strand
agaacucgauggugaaauc

SEQ ID NO: 188583 - RNA, 19 nt, Homo sapiens
  misc_RNA (1)...(19): siRNA sense strand
ggugaacauggcagauuua

SEQ ID NO: 188584 - RNA, 19 nt, Homo sapiens
  misc_RNA (1)...(19): siRNA sense strand
ugaaaggauuccagacaca

SEQ ID NO: 188585 - RNA, 19 nt, Homo sapiens
  misc_RNA (1)...(19): siRNA sense strand
caaggaagaacauuaaacu

SEQ ID NO: 188586 - RNA, 19 nt, Homo sapiens
  misc_RNA (1)...(19): siRNA sense strand
gugacggucuuugcuguaa

SEQ ID NO: 188587 - RNA, 19 nt, Homo sapiens
  misc_RNA (1)...(19): siRNA sense strand
gcaaguggugaauguaaau

SEQ ID NO: 188588 - RNA, 19 nt, Homo sapiens
  misc_RNA (1)...(19): siRNA sense strand
gaaaaucagaggcaaaaga

SEQ ID NO: 188589 - RNA, 19 nt, Homo sapiens
  misc_RNA (1)...(19): siRNA sense strand
gauuugcuguccucugaau

SEQ ID NO: 188590 - RNA, 19 nt, Homo sapiens
  misc_RNA (1)...(19): siRNA sense strand
ugauggagcuagagaagag

SEQ ID NO: 188591 - RNA, 19 nt, Homo sapiens
  misc_RNA (1)...(19): siRNA sense strand
acacuuacuucccucacaa

SEQ ID NO: 188592 - RNA, 19 nt, Homo sapiens
  misc_RNA (1)...(19): siRNA sense strand
aaauggaguuugcaguaau

SEQ ID NO: 188593 - RNA, 19 nt, Homo sapiens
  misc_RNA (1)...(19): siRNA sense strand
ccaaaugaugugcuuagaa

SEQ ID NO: 188594 - RNA, 19 nt, Homo sapiens
  misc_RNA (1)...(19): siRNA sense strand
gaacauggcagauuuaaua

SEQ ID NO: 188595 - RNA, 19 nt, Homo sapiens
  misc_RNA (1)...(19): siRNA sense strand
caacaaaccuucuaagcuu

SEQ ID NO: 188596 - RNA, 19 nt, Homo sapiens
  misc_RNA (1)...(19): siRNA sense strand
guaaugagcugaagugugu

SEQ ID NO: 188597 - RNA, 19 nt, Homo sapiens
  misc_RNA (1)...(19): siRNA sense strand
gaaauggaguuugcaguaa

SEQ ID NO: 188598 - RNA, 19 nt, Homo sapiens
  misc_RNA (1)...(19): siRNA sense strand
uaucaugacuuccugaaua

SEQ ID NO: 188599 - RNA, 19 nt, Homo sapiens
  misc_RNA (1)...(19): siRNA sense strand
gaaaucacaucuacuuuag

SEQ ID NO: 188600 - RNA, 19 nt, Homo sapiens
  misc_RNA (1)...(19): siRNA sense strand
gcaagacuguggaaguuaa

SEQ ID NO: 188601 - RNA, 19 nt, Homo sapiens
  misc_RNA (1)...(19): siRNA sense strand
gaagaaaccaaauacauug

SEQ ID NO: 188602 - RNA, 19 nt, Homo sapiens
  misc_RNA (1)...(19): siRNA sense strand
gaaacgugcucaggaaauu

SEQ ID NO: 188603 - RNA, 19 nt, Homo sapiens
  misc_RNA (1)...(19): siRNA sense strand
ggaaauggaguuugcagua

SEQ ID NO: 188604 - RNA, 19 nt, Homo sapiens
  misc_RNA (1)...(19): siRNA sense strand
gagaagcaguaaaugauug

SEQ ID NO: 188605 - RNA, 19 nt, Homo sapiens
  misc_RNA (1)...(19): siRNA sense strand
gaggaaacccugacucauu

SEQ ID NO: 188606 - RNA, 19 nt, Homo sapiens
  misc_RNA (1)...(19): siRNA sense strand
ggaauuugcuuuggaggaa

SEQ ID NO: 188607 - RNA, 19 nt, Homo sapiens
  misc_RNA (1)...(19): siRNA sense strand
gaggaggcgugaaugaauu

SEQ ID NO: 188608 - RNA, 19 nt, Homo sapiens
  misc_RNA (1)...(19): siRNA sense strand
gcuguccucugaauacaua

SEQ ID NO: 188609 - RNA, 19 nt, Homo sapiens
  misc_RNA (1)...(19): siRNA sense strand
gggagacacuggcuauuau

SEQ ID NO: 188610 - RNA, 19 nt, Homo sapiens
  misc_RNA (1)...(19): siRNA sense strand
ccaaauacauugaacugau

SEQ ID NO: 188611 - RNA, 19 nt, Homo sapiens
  misc_RNA (1)...(19): siRNA sense strand
gggaugugcuuugugguua

SEQ ID NO: 188612 - RNA, 19 nt, Homo sapiens
  misc_RNA (1)...(19): siRNA sense strand
cauaauugcuggcaccauu

SEQ ID NO: 188613 - RNA, 19 nt, Homo sapiens
  misc_RNA (1)...(19): siRNA sense strand
gaaccacacauaucucauu

SEQ ID NO: 188614 - RNA, 19 nt, Homo sapiens
  misc_RNA (1)...(19): siRNA sense strand
caaauacauugaacugaug

SEQ ID NO: 188615 - RNA, 19 nt, Homo sapiens
  misc_RNA (1)...(19): siRNA sense strand
caacaaguuugccauaucu

SEQ ID NO: 188616 - RNA, 19 nt, Homo sapiens
  misc_RNA (1)...(19): siRNA sense strand
guaaagaaggcacuauuug

SEQ ID NO: 188617 - RNA, 19 nt, Homo sapiens
  misc_RNA (1)...(19): siRNA sense strand
caaaugaugugcuuagaac

SEQ ID NO: 188618 - RNA, 19 nt, Homo sapiens
  misc_RNA (1)...(19): siRNA sense strand
gaaaggaggaggcgugaau

SEQ ID NO: 188619 - RNA, 19 nt, Homo sapiens
  misc_RNA (1)...(19): siRNA sense strand
gcagaguguuguaagaaau

SEQ ID NO: 188620 - RNA, 19 nt, Homo sapiens
  misc_RNA (1)...(19): siRNA sense strand
gagcugaagugugugugua

SEQ ID NO: 188621 - RNA, 19 nt, Homo sapiens
  misc_RNA (1)...(19): siRNA sense strand
gcagcaaggaagaacauua

SEQ ID NO: 188622 - RNA, 19 nt, Homo sapiens
  misc_RNA (1)...(19): siRNA sense strand
gauagacaaugcaaauaca

SEQ ID NO: 188623 - RNA, 19 nt, Homo sapiens
  misc_RNA (1)...(19): siRNA sense strand
aggaaacccugacucauuu

SEQ ID NO: 188624 - RNA, 19 nt, Homo sapiens
  misc_RNA (1)...(19): siRNA sense strand
gcaccaauaucauaauagg

SEQ ID NO: 188625 - RNA, 19 nt, Homo sapiens
  misc_RNA (1)...(19): siRNA sense strand
ggagcagaguguuguaaga

SEQ ID NO: 188626 - RNA, 19 nt, Homo sapiens
  misc_RNA (1)...(19): siRNA sense strand
uuacaaauccagacuguuu

SEQ ID NO: 188627 - RNA, 19 nt, Homo sapiens
  misc_RNA (1)...(19): siRNA sense strand
gaggagagcacuguuacua

SEQ ID NO: 188628 - RNA, 19 nt, Homo sapiens
  misc_RNA (1)...(19): siRNA sense strand
agacaaagacacauggaua

SEQ ID NO: 188629 - RNA, 19 nt, Homo sapiens
  misc_RNA (1)...(19): siRNA sense strand
cgaaaucuguggugaacau

SEQ ID NO: 188630 - RNA, 19 nt, Homo sapiens
  misc_RNA (1)...(19): siRNA sense strand
uguaagaaaugcaccuuga

SEQ ID NO: 188631 - RNA, 19 nt, Homo sapiens
  misc_RNA (1)...(19): siRNA sense strand
gacaacaaguuugccauau

SEQ ID NO: 188632 - RNA, 19 nt, Homo sapiens
  misc_RNA (1)...(19): siRNA sense strand
cagcaaggaagaacauuaa

SEQ ID NO: 188633 - RNA, 19 nt, Homo sapiens
  misc_RNA (1)...(19): siRNA sense strand
ggaaagacaaagacacaug

SEQ ID NO: 188634 - RNA, 19 nt, Homo sapiens
  misc_RNA (1)...(19): siRNA sense strand
gacacuggcuauuaucuuc

SEQ ID NO: 188635 - RNA, 19 nt, Homo sapiens
  misc_RNA (1)...(19): siRNA sense strand
ugacucauuuguugcauug

SEQ ID NO: 188636 - RNA, 19 nt, Homo sapiens
  misc_RNA (1)...(19): siRNA sense strand
agacaaauauugcuaugag

SEQ ID NO: 188637 - RNA, 19 nt, Homo sapiens
  misc_RNA (1)...(19): siRNA sense strand
gcaguaaaugauugugaua

SEQ ID NO: 188638 - RNA, 19 nt, Homo sapiens
  misc_RNA (1)...(19): siRNA sense strand
gaacugaugauugugaaug

SEQ ID NO: 188639 - RNA, 19 nt, Homo sapiens
  misc_RNA (1)...(19): siRNA sense strand
gaucuuccaucugaauuuc

SEQ ID NO: 188640 - RNA, 19 nt, Homo sapiens
  misc_RNA (1)...(19): siRNA sense strand
gcuaugagaaacugaauau

SEQ ID NO: 188641 - RNA, 19 nt, Homo sapiens
  misc_RNA (1)...(19): siRNA sense strand
ggugacagcaucagacaaa

SEQ ID NO: 188642 - RNA, 19 nt, Homo sapiens
  misc_RNA (1)...(19): siRNA sense strand
gagauagacaaugcaaaua

SEQ ID NO: 188643 - RNA, 19 nt, Homo sapiens
  misc_RNA (1)...(19): siRNA sense strand
ggauggauauucaugugau

SEQ ID NO: 188644 - RNA, 19 nt, Homo sapiens
  misc_RNA (1)...(19): siRNA sense strand
gaaugaucaccuuauguuu

SEQ ID NO: 188645 - RNA, 19 nt, Homo sapiens
  misc_RNA (1)...(19): siRNA sense strand
gaagaagaaaccaaauaca

SEQ ID NO: 188646 - RNA, 19 nt, Homo sapiens
  misc_RNA (1)...(19): siRNA sense strand
uggcaccaauaucauaaua

SEQ ID NO: 188647 - RNA, 19 nt, Homo sapiens
  misc_RNA (1)...(19): siRNA sense strand
acauugaacugaugauugu

SEQ ID NO: 188648 - RNA, 19 nt, Homo sapiens
  misc_RNA (1)...(19): siRNA sense strand
gaaaccaaauacauugaac

SEQ ID NO: 188649 - RNA, 19 nt, Homo sapiens
  misc_RNA (1)...(19): siRNA sense strand
ugaaugaucaccuuauguu

SEQ ID NO: 188650 - RNA, 19 nt, Homo sapiens
  misc_RNA (1)...(19): siRNA sense strand
ucacaaugaugaugcaaag

SEQ ID NO: 188651 - RNA, 19 nt, Homo sapiens
  misc_RNA (1)...(19): siRNA sense strand
gaagaugggacaccuugug

SEQ ID NO: 188652 - RNA, 19 nt, Homo sapiens
  misc_RNA (1)...(19): siRNA sense strand
ggccgaauguguccuugaa

SEQ ID NO: 188653 - RNA, 19 nt, Homo sapiens
  misc_RNA (1)...(19): siRNA sense strand
uuuaauggcuguuacacuu

SEQ ID NO: 188654 - RNA, 19 nt, Homo sapiens
  misc_RNA (1)...(19): siRNA sense strand
cuacgugaguuuaugaaau

SEQ ID NO: 188655 - RNA, 19 nt, Homo sapiens
  misc_RNA (1)...(19): siRNA sense strand
gcaguugacucauguugac

SEQ ID NO: 188656 - RNA, 19 nt, Homo sapiens
  misc_RNA (1)...(19): siRNA sense strand
ucaagaggauuuccauuuu

SEQ ID NO: 188657 - RNA, 19 nt, Homo sapiens
  misc_RNA (1)...(19): siRNA sense strand
gacagcaucagacaaauau

SEQ ID NO: 188658 - RNA, 19 nt, Homo sapiens
  misc_RNA (1)...(19): siRNA sense strand
ggaggaggcgugaaugaau

SEQ ID NO: 188659 - RNA, 19 nt, Homo sapiens
  misc_RNA (1)...(19): siRNA sense strand
aauccagacuguuugaauu

SEQ ID NO: 188660 - RNA, 19 nt, Homo sapiens
  misc_RNA (1)...(19): siRNA sense strand
guuagcaaguggugaaugu

SEQ ID NO: 188661 - RNA, 19 nt, Homo sapiens
  misc_RNA (1)...(19): siRNA sense strand
caacaaacgggaugugcuu

SEQ ID NO: 188662 - RNA, 19 nt, Homo sapiens
  misc_RNA (1)...(19): siRNA sense strand
gacaaauauugcuaugaga

SEQ ID NO: 188663 - RNA, 19 nt, Homo sapiens
  misc_RNA (1)...(19): siRNA sense strand
ugacagcaucagacaaaua

SEQ ID NO: 188664 - RNA, 19 nt, Homo sapiens
  misc_RNA (1)...(19): siRNA sense strand
gcaggagacgccucauuga

SEQ ID NO: 188665 - RNA, 19 nt, Homo sapiens
  misc_RNA (1)...(19): siRNA sense strand
gagcagaguguuguaagaa

SEQ ID NO: 188666 - RNA, 19 nt, Homo sapiens
  misc_RNA (1)...(19): siRNA sense strand
ugacaacaaguuugccaua

SEQ ID NO: 188667 - RNA, 19 nt, Homo sapiens
  misc_RNA (1)...(19): siRNA sense strand
acacauggauacagugcaa

SEQ ID NO: 188668 - RNA, 19 nt, Homo sapiens
  misc_RNA (1)...(19): siRNA sense strand
aaagacacauggauacagu

SEQ ID NO: 188669 - RNA, 19 nt, Homo sapiens
  misc_RNA (1)...(19): siRNA sense strand
ggagaggagugugauugug

SEQ ID NO: 188670 - RNA, 19 nt, Homo sapiens
  misc_RNA (1)...(19): siRNA sense strand
ggagggauuuuaucaaaga

SEQ ID NO: 188671 - RNA, 19 nt, Homo sapiens
  misc_RNA (1)...(19): siRNA sense strand
ucgauauccucguaaugua

SEQ ID NO: 188672 - RNA, 19 nt, Homo sapiens
  misc_RNA (1)...(19): siRNA sense strand
guucugauugcaacacuua

SEQ ID NO: 188673 - RNA, 19 nt, Homo sapiens
  misc_RNA (1)...(19): siRNA sense strand
cgugaaacgugcucaggaa

SEQ ID NO: 188674 - RNA, 19 nt, Homo sapiens
  misc_RNA (1)...(19): siRNA sense strand
gguauuaucucagacaaaa

SEQ ID NO: 188675 - RNA, 19 nt, Homo sapiens
  misc_RNA (1)...(19): siRNA sense strand
caacuuaagaccaggauag

SEQ ID NO: 188676 - RNA, 19 nt, Homo sapiens
  misc_RNA (1)...(19): siRNA sense strand
cagcaucagacaaauauug

SEQ ID NO: 188677 - RNA, 19 nt, Homo sapiens
  misc_RNA (1)...(19): siRNA sense strand
gaaaaugggcgaccucgaa

SEQ ID NO: 188678 - RNA, 19 nt, Homo sapiens
  misc_RNA (1)...(19): siRNA sense strand
gcaguaaugagcugaagug

SEQ ID NO: 188679 - RNA, 19 nt, Homo sapiens
  misc_RNA (1)...(19): siRNA sense strand
gaaggagcagaguguugua

SEQ ID NO: 188680 - RNA, 19 nt, Homo sapiens
  misc_RNA (1)...(19): siRNA sense strand
gaaaggauuccagacacaa

SEQ ID NO: 188681 - RNA, 19 nt, Homo sapiens
  misc_RNA (1)...(19): siRNA sense strand
uuacuucccucacaaugau

SEQ ID NO: 188682 - RNA, 19 nt, Homo sapiens
  misc_RNA (1)...(19): siRNA sense strand
agaacucgauggugaaauc

SEQ ID NO: 188683 - RNA, 19 nt, Homo sapiens
  misc_RNA (1)...(19): siRNA sense strand
ggugaacauggcagauuua

SEQ ID NO: 188684 - RNA, 19 nt, Homo sapiens
  misc_RNA (1)...(19): siRNA sense strand
ugaaaggauuccagacaca

SEQ ID NO: 188685 - RNA, 19 nt, Homo sapiens
  misc_RNA (1)...(19): siRNA sense strand
caaggaagaacauuaaacu

SEQ ID NO: 188686 - RNA, 19 nt, Homo sapiens
  misc_RNA (1)...(19): siRNA sense strand
gugacggucuuugcuguaa

SEQ ID NO: 188687 - RNA, 19 nt, Homo sapiens
  misc_RNA (1)...(19): siRNA sense strand
gcaaguggugaauguaaau

SEQ ID NO: 188688 - RNA, 19 nt, Homo sapiens
  misc_RNA (1)...(19): siRNA sense strand
gaaaaucagaggcaaaaga

SEQ ID NO: 188689 - RNA, 19 nt, Homo sapiens
  misc_RNA (1)...(19): siRNA sense strand
gauuugcuguccucugaau

SEQ ID NO: 188690 - RNA, 19 nt, Homo sapiens
  misc_RNA (1)...(19): siRNA sense strand
ugauggagcuagagaagag

SEQ ID NO: 188691 - RNA, 19 nt, Homo sapiens
  misc_RNA (1)...(19): siRNA sense strand
acacuuacuucccucacaa

SEQ ID NO: 188692 - RNA, 19 nt, Homo sapiens
  misc_RNA (1)...(19): siRNA sense strand
aaauggaguuugcaguaau

SEQ ID NO: 188693 - RNA, 19 nt, Homo sapiens
  misc_RNA (1)...(19): siRNA sense strand
ccaaaugaugugcuuagaa

SEQ ID NO: 188694 - RNA, 19 nt, Homo sapiens
  misc_RNA (1)...(19): siRNA sense strand
gaacauggcagauuuaaua

SEQ ID NO: 188695 - RNA, 19 nt, Homo sapiens
  misc_RNA (1)...(19): siRNA sense strand
caacaaaccuucuaagcuu

SEQ ID NO: 188696 - RNA, 19 nt, Homo sapiens
  misc_RNA (1)...(19): siRNA sense strand
guaaugagcugaagugugu

SEQ ID NO: 188697 - RNA, 19 nt, Homo sapiens
  misc_RNA (1)...(19): siRNA sense strand
gaaauggaguuugcaguaa

SEQ ID NO: 188698 - RNA, 19 nt, Homo sapiens
  misc_RNA (1)...(19): siRNA sense strand
uaucaugacuuccugaaua

SEQ ID NO: 188699 - RNA, 19 nt, Homo sapiens
  misc_RNA (1)...(19): siRNA sense strand
gaaaucacaucuacuuuag

SEQ ID NO: 188700 - RNA, 19 nt, Homo sapiens
  misc_RNA (1)...(19): siRNA sense strand
gcaagacuguggaaguuaa

SEQ ID NO: 188701 - RNA, 19 nt, Homo sapiens
  misc_RNA (1)...(19): siRNA sense strand
gaagaaaccaaauacauug

SEQ ID NO: 188702 - RNA, 19 nt, Homo sapiens
  misc_RNA (1)...(19): siRNA sense strand
gaaacgugcucaggaaauu

SEQ ID NO: 188703 - RNA, 19 nt, Homo sapiens
  misc_RNA (1)...(19): siRNA sense strand
ggaaauggaguuugcagua

SEQ ID NO: 188704 - RNA, 19 nt, Homo sapiens
  misc_RNA (1)...(19): siRNA sense strand
gagaagcaguaaaugauug

SEQ ID NO: 188705 - RNA, 19 nt, Homo sapiens
  misc_RNA (1)...(19): siRNA sense strand
gaggaaacccugacucauu

SEQ ID NO: 188706 - RNA, 19 nt, Homo sapiens
  misc_RNA (1)...(19): siRNA sense strand
ggaauuugcuuuggaggaa

SEQ ID NO: 188707 - RNA, 19 nt, Homo sapiens
  misc_RNA (1)...(19): siRNA sense strand
gaggaggcgugaaugaauu

SEQ ID NO: 188708 - RNA, 19 nt, Homo sapiens
  misc_RNA (1)...(19): siRNA sense strand
gcuguccucugaauacaua

SEQ ID NO: 188709 - RNA, 19 nt, Homo sapiens
  misc_RNA (1)...(19): siRNA sense strand
gggagacacuggcuauuau

SEQ ID NO: 188710 - RNA, 19 nt, Homo sapiens
  misc_RNA (1)...(19): siRNA sense strand
ccaaauacauugaacugau

SEQ ID NO: 188711 - RNA, 19 nt, Homo sapiens
  misc_RNA (1)...(19): siRNA sense strand
gggaugugcuuugugguua

SEQ ID NO: 188712 - RNA, 19 nt, Homo sapiens
  misc_RNA (1)...(19): siRNA sense strand
cauaauugcuggcaccauu

SEQ ID NO: 188713 - RNA, 19 nt, Homo sapiens
  misc_RNA (1)...(19): siRNA sense strand
gaaccacacauaucucauu

SEQ ID NO: 188714 - RNA, 19 nt, Homo sapiens
  misc_RNA (1)...(19): siRNA sense strand
caaauacauugaacugaug

SEQ ID NO: 188715 - RNA, 19 nt, Homo sapiens
  misc_RNA (1)...(19): siRNA sense strand
caacaaguuugccauaucu

SEQ ID NO: 188716 - RNA, 19 nt, Homo sapiens
  misc_RNA (1)...(19): siRNA sense strand
guaaagaaggcacuauuug

SEQ ID NO: 188717 - RNA, 19 nt, Homo sapiens
  misc_RNA (1)...(19): siRNA sense strand
caaaugaugugcuuagaac

SEQ ID NO: 188718 - RNA, 19 nt, Homo sapiens
  misc_RNA (1)...(19): siRNA sense strand
gaaaggaggaggcgugaau

SEQ ID NO: 188719 - RNA, 19 nt, Homo sapiens
  misc_RNA (1)...(19): siRNA sense strand
gcagaguguuguaagaaau

SEQ ID NO: 188720 - RNA, 19 nt, Homo sapiens
  misc_RNA (1)...(19): siRNA sense strand
gagcugaagugugugugua

SEQ ID NO: 188721 - RNA, 19 nt, Homo sapiens
  misc_RNA (1)...(19): siRNA sense strand
gcagcaaggaagaacauua

SEQ ID NO: 188722 - RNA, 19 nt, Homo sapiens
  misc_RNA (1)...(19): siRNA sense strand
gauagacaaugcaaauaca

SEQ ID NO: 188723 - RNA, 19 nt, Homo sapiens
  misc_RNA (1)...(19): siRNA sense strand
aggaaacccugacucauuu

SEQ ID NO: 188724 - RNA, 19 nt, Homo sapiens
  misc_RNA (1)...(19): siRNA sense strand
gcaccaauaucauaauagg

SEQ ID NO: 188725 - RNA, 19 nt, Homo sapiens
  misc_RNA (1)...(19): siRNA sense strand
ggagcagaguguuguaaga

SEQ ID NO: 188726 - RNA, 19 nt, Homo sapiens
  misc_RNA (1)...(19): siRNA sense strand
uuacaaauccagacuguuu

SEQ ID NO: 188727 - RNA, 19 nt, Homo sapiens
  misc_RNA (1)...(19): siRNA sense strand
gaggagagcacuguuacua

SEQ ID NO: 188728 - RNA, 19 nt, Homo sapiens
  misc_RNA (1)...(19): siRNA sense strand
agacaaagacacauggaua

SEQ ID NO: 188729 - RNA, 19 nt, Homo sapiens
  misc_RNA (1)...(19): siRNA sense strand
cgaaaucuguggugaacau

SEQ ID NO: 188730 - RNA, 19 nt, Homo sapiens
  misc_RNA (1)...(19): siRNA sense strand
uguaagaaaugcaccuuga

SEQ ID NO: 188731 - RNA, 19 nt, Homo sapiens
  misc_RNA (1)...(19): siRNA sense strand
gacaacaaguuugccauau

SEQ ID NO: 188732 - RNA, 19 nt, Homo sapiens
  misc_RNA (1)...(19): siRNA sense strand
cagcaaggaagaacauuaa

SEQ ID NO: 188733 - RNA, 19 nt, Homo sapiens
  misc_RNA (1)...(19): siRNA sense strand
ggaaagacaaagacacaug

SEQ ID NO: 188734 - RNA, 19 nt, Homo sapiens
  misc_RNA (1)...(19): siRNA sense strand
gacacuggcuauuaucuuc

SEQ ID NO: 188735 - RNA, 19 nt, Homo sapiens
  misc_RNA (1)...(19): siRNA sense strand
ugacucauuuguugcauug

SEQ ID NO: 188736 - RNA, 19 nt, Homo sapiens
  misc_RNA (1)...(19): siRNA sense strand
agacaaauauugcuaugag

SEQ ID NO: 188737 - RNA, 19 nt, Homo sapiens
  misc_RNA (1)...(19): siRNA sense strand
gcaguaaaugauugugaua

SEQ ID NO: 188738 - RNA, 19 nt, Homo sapiens
  misc_RNA (1)...(19): siRNA sense strand
gaacugaugauugugaaug

SEQ ID NO: 188739 - RNA, 19 nt, Homo sapiens
  misc_RNA (1)...(19): siRNA sense strand
gaucuuccaucugaauuuc

SEQ ID NO: 188740 - RNA, 19 nt, Homo sapiens
  misc_RNA (1)...(19): siRNA sense strand
gcuaugagaaacugaauau

SEQ ID NO: 188741 - RNA, 19 nt, Homo sapiens
  misc_RNA (1)...(19): siRNA sense strand
ggugacagcaucagacaaa

SEQ ID NO: 188742 - RNA, 19 nt, Homo sapiens
  misc_RNA (1)...(19): siRNA sense strand
gagauagacaaugcaaaua

SEQ ID NO: 188743 - RNA, 19 nt, Homo sapiens
  misc_RNA (1)...(19): siRNA sense strand
ggauggauauucaugugau

SEQ ID NO: 188744 - RNA, 19 nt, Homo sapiens
  misc_RNA (1)...(19): siRNA sense strand
gaaugaucaccuuauguuu

SEQ ID NO: 188745 - RNA, 19 nt, Homo sapiens
  misc_RNA (1)...(19): siRNA sense strand
gaagaagaaaccaaauaca

SEQ ID NO: 188746 - RNA, 19 nt, Homo sapiens
  misc_RNA (1)...(19): siRNA sense strand
uggcaccaauaucauaaua

SEQ ID NO: 188747 - RNA, 19 nt, Homo sapiens
  misc_RNA (1)...(19): siRNA sense strand
acauugaacugaugauugu

SEQ ID NO: 188748 - RNA, 19 nt, Homo sapiens
  misc_RNA (1)...(19): siRNA sense strand
gaaaccaaauacauugaac

SEQ ID NO: 188749 - RNA, 19 nt, Homo sapiens
  misc_RNA (1)...(19): siRNA sense strand
ugaaugaucaccuuauguu

SEQ ID NO: 188750 - RNA, 19 nt, Homo sapiens
  misc_RNA (1)...(19): siRNA sense strand
ucacaaugaugaugcaaag

SEQ ID NO: 188751 - RNA, 19 nt, Homo sapiens
  misc_RNA (1)...(19): siRNA sense strand
gaagaugggacaccuugug

SEQ ID NO: 188752 - RNA, 19 nt, Homo sapiens
  misc_RNA (1)...(19): siRNA sense strand
ggccgaauguguccuugaa

SEQ ID NO: 188753 - RNA, 19 nt, Homo sapiens
  misc_RNA (1)...(19): siRNA sense strand
uuuaauggcuguuacacuu

SEQ ID NO: 188754 - RNA, 19 nt, Homo sapiens
  misc_RNA (1)...(19): siRNA sense strand
cuacgugaguuuaugaaau

SEQ ID NO: 188755 - RNA, 19 nt, Homo sapiens
  misc_RNA (1)...(19): siRNA sense strand
gcaguugacucauguugac

SEQ ID NO: 188756 - RNA, 19 nt, Homo sapiens
  misc_RNA (1)...(19): siRNA sense strand
ucaagaggauuuccauuuu

SEQ ID NO: 188757 - RNA, 19 nt, Homo sapiens
  misc_RNA (1)...(19): siRNA sense strand
gacagcaucagacaaauau

SEQ ID NO: 188758 - RNA, 19 nt, Homo sapiens
  misc_RNA (1)...(19): siRNA sense strand
ggaggaggcgugaaugaau

SEQ ID NO: 188759 - RNA, 19 nt, Homo sapiens
  misc_RNA (1)...(19): siRNA sense strand
aauccagacuguuugaauu

SEQ ID NO: 188760 - RNA, 19 nt, Homo sapiens
  misc_RNA (1)...(19): siRNA sense strand
guuagcaaguggugaaugu

SEQ ID NO: 188761 - RNA, 19 nt, Homo sapiens
  misc_RNA (1)...(19): siRNA sense strand
caacaaacgggaugugcuu

SEQ ID NO: 188762 - RNA, 19 nt, Homo sapiens
  misc_RNA (1)...(19): siRNA sense strand
gacaaauauugcuaugaga

SEQ ID NO: 188763 - RNA, 19 nt, Homo sapiens
  misc_RNA (1)...(19): siRNA sense strand
ugacagcaucagacaaaua

SEQ ID NO: 188764 - RNA, 19 nt, Homo sapiens
  misc_RNA (1)...(19): siRNA sense strand
gcaggagacgccucauuga

SEQ ID NO: 188765 - RNA, 19 nt, Homo sapiens
  misc_RNA (1)...(19): siRNA sense strand
gagcagaguguuguaagaa

SEQ ID NO: 188766 - RNA, 19 nt, Homo sapiens
  misc_RNA (1)...(19): siRNA sense strand
ugacaacaaguuugccaua

SEQ ID NO: 188767 - RNA, 19 nt, Homo sapiens
  misc_RNA (1)...(19): siRNA sense strand
acacauggauacagugcaa

SEQ ID NO: 188768 - RNA, 19 nt, Homo sapiens
  misc_RNA (1)...(19): siRNA sense strand
aaagacacauggauacagu

SEQ ID NO: 188769 - RNA, 19 nt, Homo sapiens
  misc_RNA (1)...(19): siRNA sense strand
ggagaggagugugauugug

SEQ ID NO: 188770 - RNA, 19 nt, Homo sapiens
  misc_RNA (1)...(19): siRNA sense strand
ggagggauuuuaucaaaga

SEQ ID NO: 188771 - RNA, 19 nt, Homo sapiens
  misc_RNA (1)...(19): siRNA sense strand
ucgauauccucguaaugua

SEQ ID NO: 188772 - RNA, 19 nt, Homo sapiens
  misc_RNA (1)...(19): siRNA sense strand
guucugauugcaacacuua

SEQ ID NO: 188773 - RNA, 19 nt, Homo sapiens
  misc_RNA (1)...(19): siRNA sense strand
cgugaaacgugcucaggaa

SEQ ID NO: 188774 - RNA, 19 nt, Homo sapiens
  misc_RNA (1)...(19): siRNA sense strand
gguauuaucucagacaaaa

SEQ ID NO: 188775 - RNA, 19 nt, Homo sapiens
  misc_RNA (1)...(19): siRNA sense strand
caacuuaagaccaggauag

SEQ ID NO: 188776 - RNA, 19 nt, Homo sapiens
  misc_RNA (1)...(19): siRNA sense strand
cagcaucagacaaauauug

SEQ ID NO: 188777 - RNA, 19 nt, Homo sapiens
  misc_RNA (1)...(19): siRNA sense strand
gaaaaugggcgaccucgaa

SEQ ID NO: 188778 - RNA, 19 nt, Homo sapiens
  misc_RNA (1)...(19): siRNA sense strand
gcaguaaugagcugaagug

SEQ ID NO: 188779 - RNA, 19 nt, Homo sapiens
  misc_RNA (1)...(19): siRNA sense strand
gaaggagcagaguguugua

SEQ ID NO: 188780 - RNA, 19 nt, Homo sapiens
  misc_RNA (1)...(19): siRNA sense strand
gaaaggauuccagacacaa

SEQ ID NO: 188781 - RNA, 19 nt, Homo sapiens
  misc_RNA (1)...(19): siRNA sense strand
uuacuucccucacaaugau

SEQ ID NO: 188782 - RNA, 19 nt, Homo sapiens
  misc_RNA (1)...(19): siRNA sense strand
agaacucgauggugaaauc

SEQ ID NO: 188783 - RNA, 19 nt, Homo sapiens
  misc_RNA (1)...(19): siRNA sense strand
ggugaacauggcagauuua

SEQ ID NO: 188784 - RNA, 19 nt, Homo sapiens
  misc_RNA (1)...(19): siRNA sense strand
ugaaaggauuccagacaca

SEQ ID NO: 188785 - RNA, 19 nt, Homo sapiens
  misc_RNA (1)...(19): siRNA sense strand
caaggaagaacauuaaacu

SEQ ID NO: 188786 - RNA, 19 nt, Homo sapiens
  misc_RNA (1)...(19): siRNA sense strand
gugacggucuuugcuguaa

SEQ ID NO: 188787 - RNA, 19 nt, Homo sapiens
  misc_RNA (1)...(19): siRNA sense strand
gcaaguggugaauguaaau

SEQ ID NO: 188788 - RNA, 19 nt, Homo sapiens
  misc_RNA (1)...(19): siRNA sense strand
gaaaaucagaggcaaaaga

SEQ ID NO: 188789 - RNA, 19 nt, Homo sapiens
  misc_RNA (1)...(19): siRNA sense strand
gauuugcuguccucugaau

SEQ ID NO: 188790 - RNA, 19 nt, Homo sapiens
  misc_RNA (1)...(19): siRNA sense strand
ugauggagcuagagaagag

SEQ ID NO: 188791 - RNA, 19 nt, Homo sapiens
  misc_RNA (1)...(19): siRNA sense strand
acacuuacuucccucacaa

SEQ ID NO: 188792 - RNA, 19 nt, Homo sapiens
  misc_RNA (1)...(19): siRNA sense strand
aaauggaguuugcaguaau

SEQ ID NO: 188793 - RNA, 19 nt, Homo sapiens
  misc_RNA (1)...(19): siRNA sense strand
ccaaaugaugugcuuagaa

SEQ ID NO: 188794 - RNA, 19 nt, Homo sapiens
  misc_RNA (1)...(19): siRNA sense strand
gaacauggcagauuuaaua

SEQ ID NO: 188795 - RNA, 19 nt, Homo sapiens
  misc_RNA (1)...(19): siRNA sense strand
caacaaaccuucuaagcuu

SEQ ID NO: 188796 - RNA, 19 nt, Homo sapiens
  misc_RNA (1)...(19): siRNA sense strand
guaaugagcugaagugugu

SEQ ID NO: 188797 - RNA, 19 nt, Homo sapiens
  misc_RNA (1)...(19): siRNA sense strand
gaaauggaguuugcaguaa

SEQ ID NO: 188798 - RNA, 19 nt, Homo sapiens
  misc_RNA (1)...(19): siRNA sense strand
uaucaugacuuccugaaua

SEQ ID NO: 188799 - RNA, 19 nt, Homo sapiens
  misc_RNA (1)...(19): siRNA sense strand
gaaaucacaucuacuuuag

SEQ ID NO: 188800 - RNA, 19 nt, Homo sapiens
  misc_RNA (1)...(19): siRNA sense strand
gcaagacuguggaaguuaa

SEQ ID NO: 188801 - RNA, 19 nt, Homo sapiens
  misc_RNA (1)...(19): siRNA sense strand
gaagaaaccaaauacauug

SEQ ID NO: 188802 - RNA, 19 nt, Homo sapiens
  misc_RNA (1)...(19): siRNA sense strand
gaaacgugcucaggaaauu

SEQ ID NO: 188803 - RNA, 19 nt, Homo sapiens
  misc_RNA (1)...(19): siRNA sense strand
ggaaauggaguuugcagua

SEQ ID NO: 188804 - RNA, 19 nt, Homo sapiens
  misc_RNA (1)...(19): siRNA sense strand
gagaagcaguaaaugauug

SEQ ID NO: 188805 - RNA, 19 nt, Homo sapiens
  misc_RNA (1)...(19): siRNA sense strand
gaggaaacccugacucauu

SEQ ID NO: 188806 - RNA, 19 nt, Homo sapiens
  misc_RNA (1)...(19): siRNA sense strand
ggaauuugcuuuggaggaa

SEQ ID NO: 188807 - RNA, 19 nt, Homo sapiens
  misc_RNA (1)...(19): siRNA sense strand
gaggaggcgugaaugaauu

SEQ ID NO: 188808 - RNA, 19 nt, Homo sapiens
  misc_RNA (1)...(19): siRNA sense strand
gcuguccucugaauacaua

SEQ ID NO: 188809 - RNA, 19 nt, Homo sapiens
  misc_RNA (1)...(19): siRNA sense strand
gggagacacuggcuauuau

SEQ ID NO: 188810 - RNA, 19 nt, Homo sapiens
  misc_RNA (1)...(19): siRNA sense strand
ccaaauacauugaacugau

SEQ ID NO: 188811 - RNA, 19 nt, Homo sapiens
  misc_RNA (1)...(19): siRNA sense strand
gggaugugcuuugugguua

SEQ ID NO: 188812 - RNA, 19 nt, Homo sapiens
  misc_RNA (1)...(19): siRNA sense strand
cauaauugcuggcaccauu

SEQ ID NO: 188813 - RNA, 19 nt, Homo sapiens
  misc_RNA (1)...(19): siRNA sense strand
gaaccacacauaucucauu

SEQ ID NO: 188814 - RNA, 19 nt, Homo sapiens
  misc_RNA (1)...(19): siRNA sense strand
caaauacauugaacugaug

SEQ ID NO: 188815 - RNA, 19 nt, Homo sapiens
  misc_RNA (1)...(19): siRNA sense strand
caacaaguuugccauaucu

SEQ ID NO: 188816 - RNA, 19 nt, Homo sapiens
  misc_RNA (1)...(19): siRNA sense strand
guaaagaaggcacuauuug

SEQ ID NO: 188817 - RNA, 19 nt, Homo sapiens
  misc_RNA (1)...(19): siRNA sense strand
caaaugaugugcuuagaac

SEQ ID NO: 188818 - RNA, 19 nt, Homo sapiens
  misc_RNA (1)...(19): siRNA sense strand
gaaaggaggaggcgugaau

SEQ ID NO: 188819 - RNA, 19 nt, Homo sapiens
  misc_RNA (1)...(19): siRNA sense strand
gcagaguguuguaagaaau

SEQ ID NO: 188820 - RNA, 19 nt, Homo sapiens
  misc_RNA (1)...(19): siRNA sense strand
gagcugaagugugugugua

SEQ ID NO: 188821 - RNA, 19 nt, Homo sapiens
  misc_RNA (1)...(19): siRNA sense strand
gcagcaaggaagaacauua

SEQ ID NO: 188822 - RNA, 19 nt, Homo sapiens
  misc_RNA (1)...(19): siRNA sense strand
gauagacaaugcaaauaca

SEQ ID NO: 188823 - RNA, 19 nt, Homo sapiens
  misc_RNA (1)...(19): siRNA sense strand
aggaaacccugacucauuu

SEQ ID NO: 188824 - RNA, 19 nt, Homo sapiens
  misc_RNA (1)...(19): siRNA sense strand
gcaccaauaucauaauagg

SEQ ID NO: 188825 - RNA, 19 nt, Homo sapiens
  misc_RNA (1)...(19): siRNA sense strand
ggagcagaguguuguaaga

SEQ ID NO: 188826 - RNA, 19 nt, Homo sapiens
  misc_RNA (1)...(19): siRNA sense strand
uuacaaauccagacuguuu

SEQ ID NO: 188827 - RNA, 19 nt, Homo sapiens
  misc_RNA (1)...(19): siRNA sense strand
gaggagagcacuguuacua

SEQ ID NO: 188828 - RNA, 19 nt, Homo sapiens
  misc_RNA (1)...(19): siRNA sense strand
agacaaagacacauggaua

SEQ ID NO: 188829 - RNA, 19 nt, Homo sapiens
  misc_RNA (1)...(19): siRNA sense strand
cgaaaucuguggugaacau

SEQ ID NO: 188830 - RNA, 19 nt, Homo sapiens
  misc_RNA (1)...(19): siRNA sense strand
uguaagaaaugcaccuuga

SEQ ID NO: 188831 - RNA, 19 nt, Homo sapiens
  misc_RNA (1)...(19): siRNA sense strand
gacaacaaguuugccauau

SEQ ID NO: 188832 - RNA, 19 nt, Homo sapiens
  misc_RNA (1)...(19): siRNA sense strand
cagcaaggaagaacauuaa

SEQ ID NO: 188833 - RNA, 19 nt, Homo sapiens
  misc_RNA (1)...(19): siRNA sense strand
ggaaagacaaagacacaug

SEQ ID NO: 188834 - RNA, 19 nt, Homo sapiens
  misc_RNA (1)...(19): siRNA sense strand
gacacuggcuauuaucuuc

SEQ ID NO: 188835 - RNA, 19 nt, Homo sapiens
  misc_RNA (1)...(19): siRNA sense strand
ugacucauuuguugcauug

SEQ ID NO: 188836 - RNA, 19 nt, Homo sapiens
  misc_RNA (1)...(19): siRNA sense strand
agacaaauauugcuaugag

SEQ ID NO: 188837 - RNA, 19 nt, Homo sapiens
  misc_RNA (1)...(19): siRNA sense strand
gcaguaaaugauugugaua

SEQ ID NO: 188838 - RNA, 19 nt, Homo sapiens
  misc_RNA (1)...(19): siRNA sense strand
gaacugaugauugugaaug

SEQ ID NO: 188839 - RNA, 19 nt, Homo sapiens
  misc_RNA (1)...(19): siRNA sense strand
gaucuuccaucugaauuuc

SEQ ID NO: 188840 - RNA, 19 nt, Homo sapiens
  misc_RNA (1)...(19): siRNA sense strand
gcuaugagaaacugaauau

SEQ ID NO: 188841 - RNA, 19 nt, Homo sapiens
  misc_RNA (1)...(19): siRNA sense strand
ggugacagcaucagacaaa

SEQ ID NO: 188842 - RNA, 19 nt, Homo sapiens
  misc_RNA (1)...(19): siRNA sense strand
gagauagacaaugcaaaua

SEQ ID NO: 188843 - RNA, 19 nt, Homo sapiens
  misc_RNA (1)...(19): siRNA sense strand
ggauggauauucaugugau

SEQ ID NO: 188844 - RNA, 19 nt, Homo sapiens
  misc_RNA (1)...(19): siRNA sense strand
gaaugaucaccuuauguuu

SEQ ID NO: 188845 - RNA, 19 nt, Homo sapiens
  misc_RNA (1)...(19): siRNA sense strand
gaagaagaaaccaaauaca

SEQ ID NO: 188846 - RNA, 19 nt, Homo sapiens
  misc_RNA (1)...(19): siRNA sense strand
uggcaccaauaucauaaua

SEQ ID NO: 188847 - RNA, 19 nt, Homo sapiens
  misc_RNA (1)...(19): siRNA sense strand
acauugaacugaugauugu

SEQ ID NO: 188848 - RNA, 19 nt, Homo sapiens
  misc_RNA (1)...(19): siRNA sense strand
gaaaccaaauacauugaac

SEQ ID NO: 188849 - RNA, 19 nt, Homo sapiens
  misc_RNA (1)...(19): siRNA sense strand
ugaaugaucaccuuauguu

SEQ ID NO: 188850 - RNA, 19 nt, Homo sapiens
  misc_RNA (1)...(19): siRNA sense strand
ucacaaugaugaugcaaag

SEQ ID NO: 188851 - RNA, 19 nt, Homo sapiens
  misc_RNA (1)...(19): siRNA sense strand
gaagaugggacaccuugug

SEQ ID NO: 188852 - RNA, 19 nt, Homo sapiens
  misc_RNA (1)...(19): siRNA sense strand
ggccgaauguguccuugaa

SEQ ID NO: 188853 - RNA, 19 nt, Homo sapiens
  misc_RNA (1)...(19): siRNA sense strand
uuuaauggcuguuacacuu

SEQ ID NO: 188854 - RNA, 19 nt, Homo sapiens
  misc_RNA (1)...(19): siRNA sense strand
cuacgugaguuuaugaaau

SEQ ID NO: 188855 - RNA, 19 nt, Homo sapiens
  misc_RNA (1)...(19): siRNA sense strand
gcaguugacucauguugac

SEQ ID NO: 188856 - RNA, 19 nt, Homo sapiens
  misc_RNA (1)...(19): siRNA sense strand
ucaagaggauuuccauuuu

SEQ ID NO: 188857 - RNA, 19 nt, Homo sapiens
  misc_RNA (1)...(19): siRNA sense strand
gacagcaucagacaaauau

SEQ ID NO: 188858 - RNA, 19 nt, Homo sapiens
  misc_RNA (1)...(19): siRNA sense strand
ggaggaggcgugaaugaau

SEQ ID NO: 188859 - RNA, 19 nt, Homo sapiens
  misc_RNA (1)...(19): siRNA sense strand
aauccagacuguuugaauu

SEQ ID NO: 188860 - RNA, 19 nt, Homo sapiens
  misc_RNA (1)...(19): siRNA sense strand
guuagcaaguggugaaugu

SEQ ID NO: 188861 - RNA, 19 nt, Homo sapiens
  misc_RNA (1)...(19): siRNA sense strand
caacaaacgggaugugcuu

SEQ ID NO: 188862 - RNA, 19 nt, Homo sapiens
  misc_RNA (1)...(19): siRNA sense strand
gacaaauauugcuaugaga

SEQ ID NO: 188863 - RNA, 19 nt, Homo sapiens
  misc_RNA (1)...(19): siRNA sense strand
ugacagcaucagacaaaua

SEQ ID NO: 188864 - RNA, 19 nt, Homo sapiens
  misc_RNA (1)...(19): siRNA sense strand
gcaggagacgccucauuga

SEQ ID NO: 188865 - RNA, 19 nt, Homo sapiens
  misc_RNA (1)...(19): siRNA sense strand
gagcagaguguuguaagaa

SEQ ID NO: 188866 - RNA, 19 nt, Homo sapiens
  misc_RNA (1)...(19): siRNA sense strand
ugacaacaaguuugccaua

SEQ ID NO: 188867 - RNA, 19 nt, Homo sapiens
  misc_RNA (1)...(19): siRNA sense strand
acacauggauacagugcaa

SEQ ID NO: 188868 - RNA, 19 nt, Homo sapiens
  misc_RNA (1)...(19): siRNA sense strand
aaagacacauggauacagu

SEQ ID NO: 188869 - RNA, 19 nt, Homo sapiens
  misc_RNA (1)...(19): siRNA sense strand
ggagaggagugugauugug

SEQ ID NO: 188870 - RNA, 19 nt, Homo sapiens
  misc_RNA (1)...(19): siRNA sense strand
ggagggauuuuaucaaaga

SEQ ID NO: 188871 - RNA, 19 nt, Homo sapiens
  misc_RNA (1)...(19): siRNA sense strand
ucgauauccucguaaugua

SEQ ID NO: 188872 - RNA, 19 nt, Homo sapiens
  misc_RNA (1)...(19): siRNA sense strand
guucugauugcaacacuua

SEQ ID NO: 188873 - RNA, 19 nt, Homo sapiens
  misc_RNA (1)...(19): siRNA sense strand
cgugaaacgugcucaggaa

SEQ ID NO: 188874 - RNA, 19 nt, Homo sapiens
  misc_RNA (1)...(19): siRNA sense strand
gguauuaucucagacaaaa

SEQ ID NO: 188875 - RNA, 19 nt, Homo sapiens
  misc_RNA (1)...(19): siRNA sense strand
caacuuaagaccaggauag

SEQ ID NO: 188876 - RNA, 19 nt, Homo sapiens
  misc_RNA (1)...(19): siRNA sense strand
cagcaucagacaaauauug

SEQ ID NO: 188877 - RNA, 19 nt, Homo sapiens
  misc_RNA (1)...(19): siRNA sense strand
gaaaaugggcgaccucgaa

SEQ ID NO: 188878 - RNA, 19 nt, Homo sapiens
  misc_RNA (1)...(19): siRNA sense strand
gcaguaaugagcugaagug

SEQ ID NO: 188879 - RNA, 19 nt, Homo sapiens
  misc_RNA (1)...(19): siRNA sense strand
gaaggagcagaguguugua

SEQ ID NO: 188880 - RNA, 19 nt, Homo sapiens
  misc_RNA (1)...(19): siRNA sense strand
gaaaggauuccagacacaa

SEQ ID NO: 188881 - RNA, 19 nt, Homo sapiens
  misc_RNA (1)...(19): siRNA sense strand
uuacuucccucacaaugau

SEQ ID NO: 188882 - RNA, 19 nt, Homo sapiens
  misc_RNA (1)...(19): siRNA sense strand
agaacucgauggugaaauc

SEQ ID NO: 188883 - RNA, 19 nt, Homo sapiens
  misc_RNA (1)...(19): siRNA sense strand
ggugaacauggcagauuua

SEQ ID NO: 188884 - RNA, 19 nt, Homo sapiens
  misc_RNA (1)...(19): siRNA sense strand
ugaaaggauuccagacaca

SEQ ID NO: 188885 - RNA, 19 nt, Homo sapiens
  misc_RNA (1)...(19): siRNA sense strand
caaggaagaacauuaaacu

SEQ ID NO: 188886 - RNA, 19 nt, Homo sapiens
  misc_RNA (1)...(19): siRNA sense strand
gugacggucuuugcuguaa

SEQ ID NO: 188887 - RNA, 19 nt, Homo sapiens
  misc_RNA (1)...(19): siRNA sense strand
gcaaguggugaauguaaau

SEQ ID NO: 188888 - RNA, 19 nt, Homo sapiens
  misc_RNA (1)...(19): siRNA sense strand
gaaaaucagaggcaaaaga

SEQ ID NO: 188889 - RNA, 19 nt, Homo sapiens
  misc_RNA (1)...(19): siRNA sense strand
gauuugcuguccucugaau

SEQ ID NO: 188890 - RNA, 19 nt, Homo sapiens
  misc_RNA (1)...(19): siRNA sense strand
ugauggagcuagagaagag

SEQ ID NO: 188891 - RNA, 19 nt, Homo sapiens
  misc_RNA (1)...(19): siRNA sense strand
acacuuacuucccucacaa

SEQ ID NO: 188892 - RNA, 19 nt, Homo sapiens
  misc_RNA (1)...(19): siRNA sense strand
aaauggaguuugcaguaau

SEQ ID NO: 188893 - RNA, 19 nt, Homo sapiens
  misc_RNA (1)...(19): siRNA sense strand
ccaaaugaugugcuuagaa

SEQ ID NO: 188894 - RNA, 19 nt, Homo sapiens
  misc_RNA (1)...(19): siRNA sense strand
gaacauggcagauuuaaua

SEQ ID NO: 188895 - RNA, 19 nt, Homo sapiens
  misc_RNA (1)...(19): siRNA sense strand
caacaaaccuucuaagcuu

SEQ ID NO: 188896 - RNA, 19 nt, Homo sapiens
  misc_RNA (1)...(19): siRNA sense strand
guaaugagcugaagugugu

SEQ ID NO: 188897 - RNA, 19 nt, Homo sapiens
  misc_RNA (1)...(19): siRNA sense strand
gaaauggaguuugcaguaa

SEQ ID NO: 188898 - RNA, 19 nt, Homo sapiens
  misc_RNA (1)...(19): siRNA sense strand
uaucaugacuuccugaaua

SEQ ID NO: 188899 - RNA, 19 nt, Homo sapiens
  misc_RNA (1)...(19): siRNA sense strand
gaaaucacaucuacuuuag

SEQ ID NO: 188900 - RNA, 19 nt, Homo sapiens
  misc_RNA (1)...(19): siRNA sense strand
gcaagacuguggaaguuaa

SEQ ID NO: 188901 - RNA, 19 nt, Homo sapiens
  misc_RNA (1)...(19): siRNA sense strand
gaagaaaccaaauacauug

SEQ ID NO: 188902 - RNA, 19 nt, Homo sapiens
  misc_RNA (1)...(19): siRNA sense strand
gaaacgugcucaggaaauu

SEQ ID NO: 188903 - RNA, 19 nt, Homo sapiens
  misc_RNA (1)...(19): siRNA sense strand
ggaaauggaguuugcagua

SEQ ID NO: 188904 - RNA, 19 nt, Homo sapiens
  misc_RNA (1)...(19): siRNA sense strand
gagaagcaguaaaugauug

SEQ ID NO: 188905 - RNA, 19 nt, Homo sapiens
  misc_RNA (1)...(19): siRNA sense strand
gaggaaacccugacucauu

SEQ ID NO: 188906 - RNA, 19 nt, Homo sapiens
  misc_RNA (1)...(19): siRNA sense strand
ggaauuugcuuuggaggaa

SEQ ID NO: 188907 - RNA, 19 nt, Homo sapiens
  misc_RNA (1)...(19): siRNA sense strand
gaggaggcgugaaugaauu

SEQ ID NO: 188908 - RNA, 19 nt, Homo sapiens
  misc_RNA (1)...(19): siRNA sense strand
gcuguccucugaauacaua

SEQ ID NO: 188909 - RNA, 19 nt, Homo sapiens
  misc_RNA (1)...(19): siRNA sense strand
gggagacacuggcuauuau

SEQ ID NO: 188910 - RNA, 19 nt, Homo sapiens
  misc_RNA (1)...(19): siRNA sense strand
ccaaauacauugaacugau

SEQ ID NO: 188911 - RNA, 19 nt, Homo sapiens
  misc_RNA (1)...(19): siRNA sense strand
gggaugugcuuugugguua

SEQ ID NO: 188912 - RNA, 19 nt, Homo sapiens
  misc_RNA (1)...(19): siRNA sense strand
cauaauugcuggcaccauu

SEQ ID NO: 188913 - RNA, 19 nt, Homo sapiens
  misc_RNA (1)...(19): siRNA sense strand
gaaccacacauaucucauu

SEQ ID NO: 188914 - RNA, 19 nt, Homo sapiens
  misc_RNA (1)...(19): siRNA sense strand
caaauacauugaacugaug

SEQ ID NO: 188915 - RNA, 19 nt, Homo sapiens
  misc_RNA (1)...(19): siRNA sense strand
caacaaguuugccauaucu

SEQ ID NO: 188916 - RNA, 19 nt, Homo sapiens
  misc_RNA (1)...(19): siRNA sense strand
guaaagaaggcacuauuug

SEQ ID NO: 188917 - RNA, 19 nt, Homo sapiens
  misc_RNA (1)...(19): siRNA sense strand
caaaugaugugcuuagaac

SEQ ID NO: 188918 - RNA, 19 nt, Homo sapiens
  misc_RNA (1)...(19): siRNA sense strand
gaaaggaggaggcgugaau

SEQ ID NO: 188919 - RNA, 19 nt, Homo sapiens
  misc_RNA (1)...(19): siRNA sense strand
gcagaguguuguaagaaau

SEQ ID NO: 188920 - RNA, 19 nt, Homo sapiens
  misc_RNA (1)...(19): siRNA sense strand
gagcugaagugugugugua

SEQ ID NO: 188921 - RNA, 19 nt, Homo sapiens
  misc_RNA (1)...(19): siRNA sense strand
gcagcaaggaagaacauua

SEQ ID NO: 188922 - RNA, 19 nt, Homo sapiens
  misc_RNA (1)...(19): siRNA sense strand
gauagacaaugcaaauaca

SEQ ID NO: 188923 - RNA, 19 nt, Homo sapiens
  misc_RNA (1)...(19): siRNA sense strand
aggaaacccugacucauuu

SEQ ID NO: 188924 - RNA, 19 nt, Homo sapiens
  misc_RNA (1)...(19): siRNA sense strand
gcaccaauaucauaauagg

SEQ ID NO: 188925 - RNA, 19 nt, Homo sapiens
  misc_RNA (1)...(19): siRNA sense strand
ggagcagaguguuguaaga

SEQ ID NO: 188926 - RNA, 19 nt, Homo sapiens
  misc_RNA (1)...(19): siRNA sense strand
uuacaaauccagacuguuu

SEQ ID NO: 188927 - RNA, 19 nt, Homo sapiens
  misc_RNA (1)...(19): siRNA sense strand
gaggagagcacuguuacua

SEQ ID NO: 188928 - RNA, 19 nt, Homo sapiens
  misc_RNA (1)...(19): siRNA sense strand
agacaaagacacauggaua

SEQ ID NO: 188929 - RNA, 19 nt, Homo sapiens
  misc_RNA (1)...(19): siRNA sense strand
cgaaaucuguggugaacau

SEQ ID NO: 188930 - RNA, 19 nt, Homo sapiens
  misc_RNA (1)...(19): siRNA sense strand
uguaagaaaugcaccuuga

SEQ ID NO: 188931 - RNA, 19 nt, Homo sapiens
  misc_RNA (1)...(19): siRNA sense strand
gacaacaaguuugccauau

SEQ ID NO: 188932 - RNA, 19 nt, Homo sapiens
  misc_RNA (1)...(19): siRNA sense strand
cagcaaggaagaacauuaa

SEQ ID NO: 188933 - RNA, 19 nt, Homo sapiens
  misc_RNA (1)...(19): siRNA sense strand
ggaaagacaaagacacaug

SEQ ID NO: 188934 - RNA, 19 nt, Homo sapiens
  misc_RNA (1)...(19): siRNA sense strand
gacacuggcuauuaucuuc

SEQ ID NO: 188935 - RNA, 19 nt, Homo sapiens
  misc_RNA (1)...(19): siRNA sense strand
ugacucauuuguugcauug

SEQ ID NO: 188936 - RNA, 19 nt, Homo sapiens
  misc_RNA (1)...(19): siRNA sense strand
agacaaauauugcuaugag

SEQ ID NO: 188937 - RNA, 19 nt, Homo sapiens
  misc_RNA (1)...(19): siRNA sense strand
gcaguaaaugauugugaua

SEQ ID NO: 188938 - RNA, 19 nt, Homo sapiens
  misc_RNA (1)...(19): siRNA sense strand
gaacugaugauugugaaug

SEQ ID NO: 188939 - RNA, 19 nt, Homo sapiens
  misc_RNA (1)...(19): siRNA sense strand
gaucuuccaucugaauuuc

SEQ ID NO: 188940 - RNA, 19 nt, Homo sapiens
  misc_RNA (1)...(19): siRNA sense strand
gcuaugagaaacugaauau

SEQ ID NO: 188941 - RNA, 19 nt, Homo sapiens
  misc_RNA (1)...(19): siRNA sense strand
ggugacagcaucagacaaa

SEQ ID NO: 188942 - RNA, 19 nt, Homo sapiens
  misc_RNA (1)...(19): siRNA sense strand
gagauagacaaugcaaaua

SEQ ID NO: 188943 - RNA, 19 nt, Homo sapiens
  misc_RNA (1)...(19): siRNA sense strand
ggauggauauucaugugau

SEQ ID NO: 188944 - RNA, 19 nt, Homo sapiens
  misc_RNA (1)...(19): siRNA sense strand
gaaugaucaccuuauguuu

SEQ ID NO: 188945 - RNA, 19 nt, Homo sapiens
  misc_RNA (1)...(19): siRNA sense strand
gaagaagaaaccaaauaca

SEQ ID NO: 188946 - RNA, 19 nt, Homo sapiens
  misc_RNA (1)...(19): siRNA sense strand
uggcaccaauaucauaaua

SEQ ID NO: 188947 - RNA, 19 nt, Homo sapiens
  misc_RNA (1)...(19): siRNA sense strand
acauugaacugaugauugu

SEQ ID NO: 188948 - RNA, 19 nt, Homo sapiens
  misc_RNA (1)...(19): siRNA sense strand
gaaaccaaauacauugaac

SEQ ID NO: 188949 - RNA, 19 nt, Homo sapiens
  misc_RNA (1)...(19): siRNA sense strand
ugaaugaucaccuuauguu

SEQ ID NO: 188950 - RNA, 19 nt, Homo sapiens
  misc_RNA (1)...(19): siRNA sense strand
ucacaaugaugaugcaaag

SEQ ID NO: 188951 - RNA, 19 nt, Homo sapiens
  misc_RNA (1)...(19): siRNA sense strand
gaagaugggacaccuugug

SEQ ID NO: 188952 - RNA, 19 nt, Homo sapiens
  misc_RNA (1)...(19): siRNA sense strand
ggccgaauguguccuugaa

SEQ ID NO: 188953 - RNA, 19 nt, Homo sapiens
  misc_RNA (1)...(19): siRNA sense strand
uuuaauggcuguuacacuu

SEQ ID NO: 188954 - RNA, 19 nt, Homo sapiens
  misc_RNA (1)...(19): siRNA sense strand
cuacgugaguuuaugaaau

SEQ ID NO: 188955 - RNA, 19 nt, Homo sapiens
  misc_RNA (1)...(19): siRNA sense strand
gcaguugacucauguugac

SEQ ID NO: 188956 - RNA, 19 nt, Homo sapiens
  misc_RNA (1)...(19): siRNA sense strand
ucaagaggauuuccauuuu

SEQ ID NO: 188957 - RNA, 19 nt, Homo sapiens
  misc_RNA (1)...(19): siRNA sense strand
gacagcaucagacaaauau

SEQ ID NO: 188958 - RNA, 19 nt, Homo sapiens
  misc_RNA (1)...(19): siRNA sense strand
ggaggaggcgugaaugaau

SEQ ID NO: 188959 - RNA, 19 nt, Homo sapiens
  misc_RNA (1)...(19): siRNA sense strand
aauccagacuguuugaauu

SEQ ID NO: 188960 - RNA, 19 nt, Homo sapiens
  misc_RNA (1)...(19): siRNA sense strand
guuagcaaguggugaaugu

SEQ ID NO: 188961 - RNA, 19 nt, Homo sapiens
  misc_RNA (1)...(19): siRNA sense strand
caacaaacgggaugugcuu

SEQ ID NO: 188962 - RNA, 19 nt, Homo sapiens
  misc_RNA (1)...(19): siRNA sense strand
gacaaauauugcuaugaga

SEQ ID NO: 188963 - RNA, 19 nt, Homo sapiens
  misc_RNA (1)...(19): siRNA sense strand
ugacagcaucagacaaaua

SEQ ID NO: 188964 - RNA, 19 nt, Homo sapiens
  misc_RNA (1)...(19): siRNA sense strand
gcaggagacgccucauuga

SEQ ID NO: 188965 - RNA, 19 nt, Homo sapiens
  misc_RNA (1)...(19): siRNA sense strand
gagcagaguguuguaagaa

SEQ ID NO: 188966 - RNA, 19 nt, Homo sapiens
  misc_RNA (1)...(19): siRNA sense strand
ugacaacaaguuugccaua

SEQ ID NO: 188967 - RNA, 19 nt, Homo sapiens
  misc_RNA (1)...(19): siRNA sense strand
acacauggauacagugcaa

SEQ ID NO: 188968 - RNA, 19 nt, Homo sapiens
  misc_RNA (1)...(19): siRNA sense strand
aaagacacauggauacagu

SEQ ID NO: 188969 - RNA, 19 nt, Homo sapiens
  misc_RNA (1)...(19): siRNA sense strand
ggagaggagugugauugug

SEQ ID NO: 188970 - RNA, 19 nt, Homo sapiens
  misc_RNA (1)...(19): siRNA sense strand
ggagggauuuuaucaaaga

SEQ ID NO: 188971 - RNA, 19 nt, Homo sapiens
  misc_RNA (1)...(19): siRNA sense strand
ucgauauccucguaaugua

SEQ ID NO: 188972 - RNA, 19 nt, Homo sapiens
  misc_RNA (1)...(19): siRNA sense strand
guucugauugcaacacuua

SEQ ID NO: 188973 - RNA, 19 nt, Homo sapiens
  misc_RNA (1)...(19): siRNA sense strand
cgugaaacgugcucaggaa

SEQ ID NO: 188974 - RNA, 19 nt, Homo sapiens
  misc_RNA (1)...(19): siRNA sense strand
gguauuaucucagacaaaa

SEQ ID NO: 188975 - RNA, 19 nt, Homo sapiens
  misc_RNA (1)...(19): siRNA sense strand
caacuuaagaccaggauag

SEQ ID NO: 188976 - RNA, 19 nt, Homo sapiens
  misc_RNA (1)...(19): siRNA sense strand
cagcaucagacaaauauug

SEQ ID NO: 188977 - RNA, 19 nt, Homo sapiens
  misc_RNA (1)...(19): siRNA sense strand
gaaaaugggcgaccucgaa

SEQ ID NO: 188978 - RNA, 19 nt, Homo sapiens
  misc_RNA (1)...(19): siRNA sense strand
gcaguaaugagcugaagug

SEQ ID NO: 188979 - RNA, 19 nt, Homo sapiens
  misc_RNA (1)...(19): siRNA sense strand
gaaggagcagaguguugua

SEQ ID NO: 188980 - RNA, 19 nt, Homo sapiens
  misc_RNA (1)...(19): siRNA sense strand
gaaaggauuccagacacaa

SEQ ID NO: 188981 - RNA, 19 nt, Homo sapiens
  misc_RNA (1)...(19): siRNA sense strand
uuacuucccucacaaugau

SEQ ID NO: 188982 - RNA, 19 nt, Homo sapiens
  misc_RNA (1)...(19): siRNA sense strand
agaacucgauggugaaauc

SEQ ID NO: 188983 - RNA, 19 nt, Homo sapiens
  misc_RNA (1)...(19): siRNA sense strand
ggugaacauggcagauuua

SEQ ID NO: 188984 - RNA, 19 nt, Homo sapiens
  misc_RNA (1)...(19): siRNA sense strand
ugaaaggauuccagacaca

SEQ ID NO: 188985 - RNA, 19 nt, Homo sapiens
  misc_RNA (1)...(19): siRNA sense strand
caaggaagaacauuaaacu

SEQ ID NO: 188986 - RNA, 19 nt, Homo sapiens
  misc_RNA (1)...(19): siRNA sense strand
gugacggucuuugcuguaa

SEQ ID NO: 188987 - RNA, 19 nt, Homo sapiens
  misc_RNA (1)...(19): siRNA sense strand
gcaaguggugaauguaaau

SEQ ID NO: 188988 - RNA, 19 nt, Homo sapiens
  misc_RNA (1)...(19): siRNA sense strand
gaaaaucagaggcaaaaga

SEQ ID NO: 188989 - RNA, 19 nt, Homo sapiens
  misc_RNA (1)...(19): siRNA sense strand
gauuugcuguccucugaau

SEQ ID NO: 188990 - RNA, 19 nt, Homo sapiens
  misc_RNA (1)...(19): siRNA sense strand
ugauggagcuagagaagag

SEQ ID NO: 188991 - RNA, 19 nt, Homo sapiens
  misc_RNA (1)...(19): siRNA sense strand
acacuuacuucccucacaa

SEQ ID NO: 188992 - RNA, 19 nt, Homo sapiens
  misc_RNA (1)...(19): siRNA sense strand
aaauggaguuugcaguaau

SEQ ID NO: 188993 - RNA, 19 nt, Homo sapiens
  misc_RNA (1)...(19): siRNA sense strand
ccaaaugaugugcuuagaa

SEQ ID NO: 188994 - RNA, 19 nt, Homo sapiens
  misc_RNA (1)...(19): siRNA sense strand
cgaaggagguugacaccaa

SEQ ID NO: 188995 - RNA, 19 nt, Homo sapiens
  misc_RNA (1)...(19): siRNA sense strand
ccggagaccuuuggaguua

SEQ ID NO: 188996 - RNA, 19 nt, Homo sapiens
  misc_RNA (1)...(19): siRNA sense strand
ggagauucaucaaguacuu

SEQ ID NO: 188997 - RNA, 19 nt, Homo sapiens
  misc_RNA (1)...(19): siRNA sense strand
gggaacugcuccuaucaga

SEQ ID NO: 188998 - RNA, 19 nt, Homo sapiens
  misc_RNA (1)...(19): siRNA sense strand
gcugggagauucaucaagu

SEQ ID NO: 188999 - RNA, 19 nt, Homo sapiens
  misc_RNA (1)...(19): siRNA sense strand
cgacuuggaugcccaugga

SEQ ID NO: 189000 - RNA, 19 nt, Homo sapiens
  misc_RNA (1)...(19): siRNA sense strand
gaaauuucuagcuucagua

SEQ ID NO: 189001 - RNA, 19 nt, Homo sapiens
  misc_RNA (1)...(19): siRNA sense strand
acacagaccuuuggcuuca

SEQ ID NO: 189002 - RNA, 19 nt, Homo sapiens
  misc_RNA (1)...(19): siRNA sense strand
ucucuucccuccauuccua

SEQ ID NO: 189003 - RNA, 19 nt, Homo sapiens
  misc_RNA (1)...(19): siRNA sense strand
cuaguggacugcaucucua

SEQ ID NO: 189004 - RNA, 19 nt, Homo sapiens
  misc_RNA (1)...(19): siRNA sense strand
ccaaaugacacagaccuuu

SEQ ID NO: 189005 - RNA, 19 nt, Homo sapiens
  misc_RNA (1)...(19): siRNA sense strand
ggagaccuuuggaguuaag

SEQ ID NO: 189006 - RNA, 19 nt, Homo sapiens
  misc_RNA (1)...(19): siRNA sense strand
gacugcaucucuaccacuu

SEQ ID NO: 189007 - RNA, 19 nt, Homo sapiens
  misc_RNA (1)...(19): siRNA sense strand
ggaugcccauggaauuauc

SEQ ID NO: 189008 - RNA, 19 nt, Homo sapiens
  misc_RNA (1)...(19): siRNA sense strand
acucagaaaucacgcaucu

SEQ ID NO: 189009 - RNA, 19 nt, Homo sapiens
  misc_RNA (1)...(19): siRNA sense strand
gccuggagcugggagauuc

SEQ ID NO: 189010 - RNA, 19 nt, Homo sapiens
  misc_RNA (1)...(19): siRNA sense strand
gagauucaucaaguacuuu

SEQ ID NO: 189011 - RNA, 19 nt, Homo sapiens
  misc_RNA (1)...(19): siRNA sense strand
ggagcugggagauucauca

SEQ ID NO: 189012 - RNA, 19 nt, Homo sapiens
  misc_RNA (1)...(19): siRNA sense strand
cugggagauucaucaagua

SEQ ID NO: 189013 - RNA, 19 nt, Homo sapiens
  misc_RNA (1)...(19): siRNA sense strand
cagguucucuucccuccau

SEQ ID NO: 189014 - RNA, 19 nt, Homo sapiens
  misc_RNA (1)...(19): siRNA sense strand
uaucuucacugaggacuac

SEQ ID NO: 189015 - RNA, 19 nt, Homo sapiens
  misc_RNA (1)...(19): siRNA sense strand
gcuaguggacugcaucucu

SEQ ID NO: 189016 - RNA, 19 nt, Homo sapiens
  misc_RNA (1)...(19): siRNA sense strand
cugcaucucuaccacuuca

SEQ ID NO: 189017 - RNA, 19 nt, Homo sapiens
  misc_RNA (1)...(19): siRNA sense strand
gcccauggaauuaucuuca

SEQ ID NO: 189018 - RNA, 19 nt, Homo sapiens
  misc_RNA (1)...(19): siRNA sense strand
ccagcugggcuucgacuug

SEQ ID NO: 189019 - RNA, 19 nt, Homo sapiens
  misc_RNA (1)...(19): siRNA sense strand
gagcugggagauucaucaa

SEQ ID NO: 189020 - RNA, 19 nt, Homo sapiens
  misc_RNA (1)...(19): siRNA sense strand
gcggcugucucagaacuca

SEQ ID NO: 189021 - RNA, 19 nt, Homo sapiens
  misc_RNA (1)...(19): siRNA sense strand
cagaacucaugcagcuguu

SEQ ID NO: 189022 - RNA, 19 nt, Homo sapiens
  misc_RNA (1)...(19): siRNA sense strand
auuucuagcuucaguacuu

SEQ ID NO: 189023 - RNA, 19 nt, Homo sapiens
  misc_RNA (1)...(19): siRNA sense strand
cuucagggacucagaaauc

SEQ ID NO: 189024 - RNA, 19 nt, Homo sapiens
  misc_RNA (1)...(19): siRNA sense strand
gcaaucauucagcgacagu

SEQ ID NO: 189025 - RNA, 19 nt, Homo sapiens
  misc_RNA (1)...(19): siRNA sense strand
cggagaccuuuggaguuaa

SEQ ID NO: 189026 - RNA, 19 nt, Homo sapiens
  misc_RNA (1)...(19): siRNA sense strand
ccaugugcacgaccucauu

SEQ ID NO: 189027 - RNA, 19 nt, Homo sapiens
  misc_RNA (1)...(19): siRNA sense strand
uuggaugcccauggaauua

SEQ ID NO: 189028 - RNA, 19 nt, Homo sapiens
  misc_RNA (1)...(19): siRNA sense strand
gccaggcuguccuuagcau

SEQ ID NO: 189029 - RNA, 19 nt, Homo sapiens
  misc_RNA (1)...(19): siRNA sense strand
gcaugguccggaaggcaaa

SEQ ID NO: 189030 - RNA, 19 nt, Homo sapiens
  misc_RNA (1)...(19): siRNA sense strand
cgaaggagguugacaccaa

SEQ ID NO: 189031 - RNA, 19 nt, Homo sapiens
  misc_RNA (1)...(19): siRNA sense strand
ccggagaccuuuggaguua

SEQ ID NO: 189032 - RNA, 19 nt, Homo sapiens
  misc_RNA (1)...(19): siRNA sense strand
ggagauucaucaaguacuu

SEQ ID NO: 189033 - RNA, 19 nt, Homo sapiens
  misc_RNA (1)...(19): siRNA sense strand
gggaacugcuccuaucaga

SEQ ID NO: 189034 - RNA, 19 nt, Homo sapiens
  misc_RNA (1)...(19): siRNA sense strand
gcugggagauucaucaagu

SEQ ID NO: 189035 - RNA, 19 nt, Homo sapiens
  misc_RNA (1)...(19): siRNA sense strand
cgacuuggaugcccaugga

SEQ ID NO: 189036 - RNA, 19 nt, Homo sapiens
  misc_RNA (1)...(19): siRNA sense strand
gaaauuucuagcuucagua

SEQ ID NO: 189037 - RNA, 19 nt, Homo sapiens
  misc_RNA (1)...(19): siRNA sense strand
acacagaccuuuggcuuca

SEQ ID NO: 189038 - RNA, 19 nt, Homo sapiens
  misc_RNA (1)...(19): siRNA sense strand
ucucuucccuccauuccua

SEQ ID NO: 189039 - RNA, 19 nt, Homo sapiens
  misc_RNA (1)...(19): siRNA sense strand
cuaguggacugcaucucua

SEQ ID NO: 189040 - RNA, 19 nt, Homo sapiens
  misc_RNA (1)...(19): siRNA sense strand
ccaaaugacacagaccuuu

SEQ ID NO: 189041 - RNA, 19 nt, Homo sapiens
  misc_RNA (1)...(19): siRNA sense strand
ggagaccuuuggaguuaag

SEQ ID NO: 189042 - RNA, 19 nt, Homo sapiens
  misc_RNA (1)...(19): siRNA sense strand
gacugcaucucuaccacuu

SEQ ID NO: 189043 - RNA, 19 nt, Homo sapiens
  misc_RNA (1)...(19): siRNA sense strand
ggaugcccauggaauuauc

SEQ ID NO: 189044 - RNA, 19 nt, Homo sapiens
  misc_RNA (1)...(19): siRNA sense strand
acucagaaaucacgcaucu

SEQ ID NO: 189045 - RNA, 19 nt, Homo sapiens
  misc_RNA (1)...(19): siRNA sense strand
gccuggagcugggagauuc

SEQ ID NO: 189046 - RNA, 19 nt, Homo sapiens
  misc_RNA (1)...(19): siRNA sense strand
gagauucaucaaguacuuu

SEQ ID NO: 189047 - RNA, 19 nt, Homo sapiens
  misc_RNA (1)...(19): siRNA sense strand
ggagcugggagauucauca

SEQ ID NO: 189048 - RNA, 19 nt, Homo sapiens
  misc_RNA (1)...(19): siRNA sense strand
cugggagauucaucaagua

SEQ ID NO: 189049 - RNA, 19 nt, Homo sapiens
  misc_RNA (1)...(19): siRNA sense strand
cagguucucuucccuccau

SEQ ID NO: 189050 - RNA, 19 nt, Homo sapiens
  misc_RNA (1)...(19): siRNA sense strand
uaucuucacugaggacuac

SEQ ID NO: 189051 - RNA, 19 nt, Homo sapiens
  misc_RNA (1)...(19): siRNA sense strand
gcuaguggacugcaucucu

SEQ ID NO: 189052 - RNA, 19 nt, Homo sapiens
  misc_RNA (1)...(19): siRNA sense strand
cugcaucucuaccacuuca

SEQ ID NO: 189053 - RNA, 19 nt, Homo sapiens
  misc_RNA (1)...(19): siRNA sense strand
gcccauggaauuaucuuca

SEQ ID NO: 189054 - RNA, 19 nt, Homo sapiens
  misc_RNA (1)...(19): siRNA sense strand
ccagcugggcuucgacuug

SEQ ID NO: 189055 - RNA, 19 nt, Homo sapiens
  misc_RNA (1)...(19): siRNA sense strand
gagcugggagauucaucaa

SEQ ID NO: 189056 - RNA, 19 nt, Homo sapiens
  misc_RNA (1)...(19): siRNA sense strand
gcggcugucucagaacuca

SEQ ID NO: 189057 - RNA, 19 nt, Homo sapiens
  misc_RNA (1)...(19): siRNA sense strand
cagaacucaugcagcuguu

SEQ ID NO: 189058 - RNA, 19 nt, Homo sapiens
  misc_RNA (1)...(19): siRNA sense strand
auuucuagcuucaguacuu

SEQ ID NO: 189059 - RNA, 19 nt, Homo sapiens
  misc_RNA (1)...(19): siRNA sense strand
cuucagggacucagaaauc

SEQ ID NO: 189060 - RNA, 19 nt, Homo sapiens
  misc_RNA (1)...(19): siRNA sense strand
gcaaucauucagcgacagu

SEQ ID NO: 189061 - RNA, 19 nt, Homo sapiens
  misc_RNA (1)...(19): siRNA sense strand
cggagaccuuuggaguuaa

SEQ ID NO: 189062 - RNA, 19 nt, Homo sapiens
  misc_RNA (1)...(19): siRNA sense strand
ccaugugcacgaccucauu

SEQ ID NO: 189063 - RNA, 19 nt, Homo sapiens
  misc_RNA (1)...(19): siRNA sense strand
uuggaugcccauggaauua

SEQ ID NO: 189064 - RNA, 19 nt, Homo sapiens
  misc_RNA (1)...(19): siRNA sense strand
gccaggcuguccuuagcau

SEQ ID NO: 189065 - RNA, 19 nt, Homo sapiens
  misc_RNA (1)...(19): siRNA sense strand
gcaugguccggaaggcaaa

SEQ ID NO: 189066 - RNA, 19 nt, Homo sapiens
  misc_RNA (1)...(19): siRNA sense strand
gaaaguccaugucugucua

SEQ ID NO: 189067 - RNA, 19 nt, Homo sapiens
  misc_RNA (1)...(19): siRNA sense strand
gcaagauguuuaucauuga

SEQ ID NO: 189068 - RNA, 19 nt, Homo sapiens
  misc_RNA (1)...(19): siRNA sense strand
gaccaucacugccuuuguu

SEQ ID NO: 189069 - RNA, 19 nt, Homo sapiens
  misc_RNA (1)...(19): siRNA sense strand
ccaaaggugucuaugagaa

SEQ ID NO: 189070 - RNA, 19 nt, Homo sapiens
  misc_RNA (1)...(19): siRNA sense strand
ggaggccgcucaugcuaaa

SEQ ID NO: 189071 - RNA, 19 nt, Homo sapiens
  misc_RNA (1)...(19): siRNA sense strand
caaagucccugcagacauc

SEQ ID NO: 189072 - RNA, 19 nt, Homo sapiens
  misc_RNA (1)...(19): siRNA sense strand
gaucaaggcucgggacauc

SEQ ID NO: 189073 - RNA, 19 nt, Homo sapiens
  misc_RNA (1)...(19): siRNA sense strand
gcaagucagugcaaaggau

SEQ ID NO: 189074 - RNA, 19 nt, Homo sapiens
  misc_RNA (1)...(19): siRNA sense strand
gcaccgagauugggaagau

SEQ ID NO: 189075 - RNA, 19 nt, Homo sapiens
  misc_RNA (1)...(19): siRNA sense strand
gcacagccauugccaucug

SEQ ID NO: 189076 - RNA, 19 nt, Homo sapiens
  misc_RNA (1)...(19): siRNA sense strand
ggagaaauacggccucaau

SEQ ID NO: 189077 - RNA, 19 nt, Homo sapiens
  misc_RNA (1)...(19): siRNA sense strand
gcaccucugucaucuguuc

SEQ ID NO: 189078 - RNA, 19 nt, Homo sapiens
  misc_RNA (1)...(19): siRNA sense strand
gaagauccgagaccaaaug

SEQ ID NO: 189079 - RNA, 19 nt, Homo sapiens
  misc_RNA (1)...(19): siRNA sense strand
caacuucuccaccaucgua

SEQ ID NO: 189080 - RNA, 19 nt, Homo sapiens
  misc_RNA (1)...(19): siRNA sense strand
ggaggaauguuuggccuau

SEQ ID NO: 189081 - RNA, 19 nt, Homo sapiens
  misc_RNA (1)...(19): siRNA sense strand
ugcaagauguuuaucauug

SEQ ID NO: 189082 - RNA, 19 nt, Homo sapiens
  misc_RNA (1)...(19): siRNA sense strand
agcggaaucuggagaaaua

SEQ ID NO: 189083 - RNA, 19 nt, Homo sapiens
  misc_RNA (1)...(19): siRNA sense strand
ggacaucugccuccugaau

SEQ ID NO: 189084 - RNA, 19 nt, Homo sapiens
  misc_RNA (1)...(19): siRNA sense strand
uggaguaccugcaguccua

SEQ ID NO: 189085 - RNA, 19 nt, Homo sapiens
  misc_RNA (1)...(19): siRNA sense strand
agaaauacggccucaauga

SEQ ID NO: 189086 - RNA, 19 nt, Homo sapiens
  misc_RNA (1)...(19): siRNA sense strand
ggacaacacccacuuugag

SEQ ID NO: 189087 - RNA, 19 nt, Homo sapiens
  misc_RNA (1)...(19): siRNA sense strand
ugugggagcuggugauaga

SEQ ID NO: 189088 - RNA, 19 nt, Homo sapiens
  misc_RNA (1)...(19): siRNA sense strand
ggccaaaggugucuaugag

SEQ ID NO: 189089 - RNA, 19 nt, Homo sapiens
  misc_RNA (1)...(19): siRNA sense strand
uggagaagaugaauguguu

SEQ ID NO: 189090 - RNA, 19 nt, Homo sapiens
  misc_RNA (1)...(19): siRNA sense strand
acaacaacaugaagcaguu

SEQ ID NO: 189091 - RNA, 19 nt, Homo sapiens
  misc_RNA (1)...(19): siRNA sense strand
aggaauguuuggccuauuu

SEQ ID NO: 189092 - RNA, 19 nt, Homo sapiens
  misc_RNA (1)...(19): siRNA sense strand
caacaagggcacagccauu

SEQ ID NO: 189093 - RNA, 19 nt, Homo sapiens
  misc_RNA (1)...(19): siRNA sense strand
ugauagagcaguuugaaga

SEQ ID NO: 189094 - RNA, 19 nt, Homo sapiens
  misc_RNA (1)...(19): siRNA sense strand
gaugagaucacagccauga

SEQ ID NO: 189095 - RNA, 19 nt, Homo sapiens
  misc_RNA (1)...(19): siRNA sense strand
gcagaagcuggaugaguuu

SEQ ID NO: 189096 - RNA, 19 nt, Homo sapiens
  misc_RNA (1)...(19): siRNA sense strand
gucuguaucugucaucaaa

SEQ ID NO: 189097 - RNA, 19 nt, Homo sapiens
  misc_RNA (1)...(19): siRNA sense strand
ucgaggcccugaaggagua

SEQ ID NO: 189098 - RNA, 19 nt, Homo sapiens
  misc_RNA (1)...(19): siRNA sense strand
ucauugggcucgacgaaau

SEQ ID NO: 189099 - RNA, 19 nt, Homo sapiens
  misc_RNA (1)...(19): siRNA sense strand
ggucaucucccucaucugu

SEQ ID NO: 189100 - RNA, 19 nt, Homo sapiens
  misc_RNA (1)...(19): siRNA sense strand
gggaagauccgagaccaaa

SEQ ID NO: 189101 - RNA, 19 nt, Homo sapiens
  misc_RNA (1)...(19): siRNA sense strand
ggaauucacccuggaguuc

SEQ ID NO: 189102 - RNA, 19 nt, Homo sapiens
  misc_RNA (1)...(19): siRNA sense strand
ccagcugacucacuucaug

SEQ ID NO: 189103 - RNA, 19 nt, Homo sapiens
  misc_RNA (1)...(19): siRNA sense strand
ucgcacaaguccaagauug

SEQ ID NO: 189104 - RNA, 19 nt, Homo sapiens
  misc_RNA (1)...(19): siRNA sense strand
agcagaagcuggaugaguu

SEQ ID NO: 189105 - RNA, 19 nt, Homo sapiens
  misc_RNA (1)...(19): siRNA sense strand
gacaagaagaacaugcuuu

SEQ ID NO: 189106 - RNA, 19 nt, Homo sapiens
  misc_RNA (1)...(19): siRNA sense strand
gcaaugacuccuccuugga

SEQ ID NO: 189107 - RNA, 19 nt, Homo sapiens
  misc_RNA (1)...(19): siRNA sense strand
gagaaauacggccucaaug

SEQ ID NO: 189108 - RNA, 19 nt, Homo sapiens
  misc_RNA (1)...(19): siRNA sense strand
gaggacaacacccacuuug

SEQ ID NO: 189109 - RNA, 19 nt, Homo sapiens
  misc_RNA (1)...(19): siRNA sense strand
ggaugggccucaugucaac

SEQ ID NO: 189110 - RNA, 19 nt, Homo sapiens
  misc_RNA (1)...(19): siRNA sense strand
gacaggugauggcgucaau

SEQ ID NO: 189111 - RNA, 19 nt, Homo sapiens
  misc_RNA (1)...(19): siRNA sense strand
uaucaacauuggccacuuc

SEQ ID NO: 189112 - RNA, 19 nt, Homo sapiens
  misc_RNA (1)...(19): siRNA sense strand
acaucugccuccugaauga

SEQ ID NO: 189113 - RNA, 19 nt, Homo sapiens
  misc_RNA (1)...(19): siRNA sense strand
ucgacgaaauccucaaguu

SEQ ID NO: 189114 - RNA, 19 nt, Homo sapiens
  misc_RNA (1)...(19): siRNA sense strand
caagacugccucugagaug

SEQ ID NO: 189115 - RNA, 19 nt, Homo sapiens
  misc_RNA (1)...(19): siRNA sense strand
ugaagaaggcugagauugg

SEQ ID NO: 189116 - RNA, 19 nt, Homo sapiens
  misc_RNA (1)...(19): siRNA sense strand
ggacaagaagaacaugcuu

SEQ ID NO: 189117 - RNA, 19 nt, Homo sapiens
  misc_RNA (1)...(19): siRNA sense strand
cgacgaaauccucaaguuc

SEQ ID NO: 189118 - RNA, 19 nt, Homo sapiens
  misc_RNA (1)...(19): siRNA sense strand
gaaaugguccuggaugacu

SEQ ID NO: 189119 - RNA, 19 nt, Homo sapiens
  misc_RNA (1)...(19): siRNA sense strand
ucauggcggugaucaagga

SEQ ID NO: 189120 - RNA, 19 nt, Homo sapiens
  misc_RNA (1)...(19): siRNA sense strand
gaagcuugcccuccguaga

SEQ ID NO: 189121 - RNA, 19 nt, Homo sapiens
  misc_RNA (1)...(19): siRNA sense strand
ugagcucccugcugaggaa

SEQ ID NO: 189122 - RNA, 19 nt, Homo sapiens
  misc_RNA (1)...(19): siRNA sense strand
guucauccgcuaccucauu

SEQ ID NO: 189123 - RNA, 19 nt, Homo sapiens
  misc_RNA (1)...(19): siRNA sense strand
agacggaccugacauucgu

SEQ ID NO: 189124 - RNA, 19 nt, Homo sapiens
  misc_RNA (1)...(19): siRNA sense strand
ggaccaaguuaagcggaau

SEQ ID NO: 189125 - RNA, 19 nt, Homo sapiens
  misc_RNA (1)...(19): siRNA sense strand
cugaaugaguucuccauca

SEQ ID NO: 189126 - RNA, 19 nt, Homo sapiens
  misc_RNA (1)...(19): siRNA sense strand
guggcugucuggcuuauca

SEQ ID NO: 189127 - RNA, 19 nt, Homo sapiens
  misc_RNA (1)...(19): siRNA sense strand
ccacagaacaggacaagac

SEQ ID NO: 189128 - RNA, 19 nt, Homo sapiens
  misc_RNA (1)...(19): siRNA sense strand
gaggaauguuuggccuauu

SEQ ID NO: 189129 - RNA, 19 nt, Homo sapiens
  misc_RNA (1)...(19): siRNA sense strand
caucacugccuuuguugaa

SEQ ID NO: 189130 - RNA, 19 nt, Homo sapiens
  misc_RNA (1)...(19): siRNA sense strand
gcacuuccucauccucuau

SEQ ID NO: 189131 - RNA, 19 nt, Homo sapiens
  misc_RNA (1)...(19): siRNA sense strand
ggacuucaacgaggccaaa

SEQ ID NO: 189132 - RNA, 19 nt, Homo sapiens
  misc_RNA (1)...(19): siRNA sense strand
gaccgcaagucagugcaaa

SEQ ID NO: 189133 - RNA, 19 nt, Homo sapiens
  misc_RNA (1)...(19): siRNA sense strand
uaagcggaaucuggagaaa

SEQ ID NO: 189134 - RNA, 19 nt, Homo sapiens
  misc_RNA (1)...(19): siRNA sense strand
guucaacacggaugugaga

SEQ ID NO: 189135 - RNA, 19 nt, Homo sapiens
  misc_RNA (1)...(19): siRNA sense strand
gccaucuacuacuuuaaga

SEQ ID NO: 189136 - RNA, 19 nt, Homo sapiens
  misc_RNA (1)...(19): siRNA sense strand
gugauccgccagcuaauga

SEQ ID NO: 189137 - RNA, 19 nt, Homo sapiens
  misc_RNA (1)...(19): siRNA sense strand
guggagcccucgcacaagu

SEQ ID NO: 189138 - RNA, 19 nt, Homo sapiens
  misc_RNA (1)...(19): siRNA sense strand
ggugauagagcaguuugaa

SEQ ID NO: 189139 - RNA, 19 nt, Homo sapiens
  misc_RNA (1)...(19): siRNA sense strand
guccaugucugucuauugc

SEQ ID NO: 189140 - RNA, 19 nt, Homo sapiens
  misc_RNA (1)...(19): siRNA sense strand
gaaggugaagagaccauca

SEQ ID NO: 189141 - RNA, 19 nt, Homo sapiens
  misc_RNA (1)...(19): siRNA sense strand
caacauuggccacuucaac

SEQ ID NO: 189142 - RNA, 19 nt, Homo sapiens
  misc_RNA (1)...(19): siRNA sense strand
ggagcuggccaccaucugu

SEQ ID NO: 189143 - RNA, 19 nt, Homo sapiens
  misc_RNA (1)...(19): siRNA sense strand
gcucaugguccucaagauc

SEQ ID NO: 189144 - RNA, 19 nt, Homo sapiens
  misc_RNA (1)...(19): siRNA sense strand
caggugauggcgucaauga

SEQ ID NO: 189145 - RNA, 19 nt, Homo sapiens
  misc_RNA (1)...(19): siRNA sense strand
ugaaugaguucuccaucac

SEQ ID NO: 189146 - RNA, 19 nt, Homo sapiens
  misc_RNA (1)...(19): siRNA sense strand
ccggcgaauuggcaucuuu

SEQ ID NO: 189147 - RNA, 19 nt, Homo sapiens
  misc_RNA (1)...(19): siRNA sense strand
ucugugcccucugcaauga

SEQ ID NO: 189148 - RNA, 19 nt, Homo sapiens
  misc_RNA (1)...(19): siRNA sense strand
ggaguaugagccagagaug

SEQ ID NO: 189149 - RNA, 19 nt, Homo sapiens
  misc_RNA (1)...(19): siRNA sense strand
caucgaccgcuguaacuau

SEQ ID NO: 189150 - RNA, 19 nt, Homo sapiens
  misc_RNA (1)...(19): siRNA sense strand
gggcugcugugggcaacaa

SEQ ID NO: 189151 - RNA, 19 nt, Homo sapiens
  misc_RNA (1)...(19): siRNA sense strand
caagauguuuaucauugac

SEQ ID NO: 189152 - RNA, 19 nt, Homo sapiens
  misc_RNA (1)...(19): siRNA sense strand
cugcaccucugucaucugu

SEQ ID NO: 189153 - RNA, 19 nt, Homo sapiens
  misc_RNA (1)...(19): siRNA sense strand
ucaaccaggacaagaagaa

SEQ ID NO: 189154 - RNA, 19 nt, Homo sapiens
  misc_RNA (1)...(19): siRNA sense strand
ggaagauccgagaccaaau

SEQ ID NO: 189155 - RNA, 19 nt, Homo sapiens
  misc_RNA (1)...(19): siRNA sense strand
cgaggacaacacccacuuu

SEQ ID NO: 189156 - RNA, 19 nt, Homo sapiens
  misc_RNA (1)...(19): siRNA sense strand
ugggcgagguggucuguau

SEQ ID NO: 189157 - RNA, 19 nt, Homo sapiens
  misc_RNA (1)...(19): siRNA sense strand
ggugcuggcugacgacaac

SEQ ID NO: 189158 - RNA, 19 nt, Homo sapiens
  misc_RNA (1)...(19): siRNA sense strand
gggcugcaccucugucauc

SEQ ID NO: 189159 - RNA, 19 nt, Homo sapiens
  misc_RNA (1)...(19): siRNA sense strand
ucaucucccucaucugugu

SEQ ID NO: 189160 - RNA, 19 nt, Homo sapiens
  misc_RNA (1)...(19): siRNA sense strand
ggagaagaugaauguguuc

SEQ ID NO: 189161 - RNA, 19 nt, Homo sapiens
  misc_RNA (1)...(19): siRNA sense strand
gacaucugccuccugaaug

SEQ ID NO: 189162 - RNA, 19 nt, Homo sapiens
  misc_RNA (1)...(19): siRNA sense strand
gagcagcugccuggugguu

SEQ ID NO: 189163 - RNA, 19 nt, Homo sapiens
  misc_RNA (1)...(19): siRNA sense strand
ucggugauccgccagcuaa

SEQ ID NO: 189164 - RNA, 19 nt, Homo sapiens
  misc_RNA (1)...(19): siRNA sense strand
uucauccgcuaccucauuu

SEQ ID NO: 189165 - RNA, 19 nt, Homo sapiens
  misc_RNA (1)...(19): siRNA sense strand
cgagguggucuguaucuuc

SEQ ID NO: 189166 - RNA, 19 nt, Homo sapiens
  misc_RNA (1)...(19): siRNA sense strand
gaaaguccaugucugucua

SEQ ID NO: 189167 - RNA, 19 nt, Homo sapiens
  misc_RNA (1)...(19): siRNA sense strand
gcaagauguuuaucauuga

SEQ ID NO: 189168 - RNA, 19 nt, Homo sapiens
  misc_RNA (1)...(19): siRNA sense strand
gaccaucacugccuuuguu

SEQ ID NO: 189169 - RNA, 19 nt, Homo sapiens
  misc_RNA (1)...(19): siRNA sense strand
ccaaaggugucuaugagaa

SEQ ID NO: 189170 - RNA, 19 nt, Homo sapiens
  misc_RNA (1)...(19): siRNA sense strand
ggaggccgcucaugcuaaa

SEQ ID NO: 189171 - RNA, 19 nt, Homo sapiens
  misc_RNA (1)...(19): siRNA sense strand
caaagucccugcagacauc

SEQ ID NO: 189172 - RNA, 19 nt, Homo sapiens
  misc_RNA (1)...(19): siRNA sense strand
gaucaaggcucgggacauc

SEQ ID NO: 189173 - RNA, 19 nt, Homo sapiens
  misc_RNA (1)...(19): siRNA sense strand
gcaagucagugcaaaggau

SEQ ID NO: 189174 - RNA, 19 nt, Homo sapiens
  misc_RNA (1)...(19): siRNA sense strand
gcaccgagauugggaagau

SEQ ID NO: 189175 - RNA, 19 nt, Homo sapiens
  misc_RNA (1)...(19): siRNA sense strand
gcacagccauugccaucug

SEQ ID NO: 189176 - RNA, 19 nt, Homo sapiens
  misc_RNA (1)...(19): siRNA sense strand
ggagaaauacggccucaau

SEQ ID NO: 189177 - RNA, 19 nt, Homo sapiens
  misc_RNA (1)...(19): siRNA sense strand
gcaccucugucaucuguuc

SEQ ID NO: 189178 - RNA, 19 nt, Homo sapiens
  misc_RNA (1)...(19): siRNA sense strand
gaagauccgagaccaaaug

SEQ ID NO: 189179 - RNA, 19 nt, Homo sapiens
  misc_RNA (1)...(19): siRNA sense strand
caacuucuccaccaucgua

SEQ ID NO: 189180 - RNA, 19 nt, Homo sapiens
  misc_RNA (1)...(19): siRNA sense strand
ggaggaauguuuggccuau

SEQ ID NO: 189181 - RNA, 19 nt, Homo sapiens
  misc_RNA (1)...(19): siRNA sense strand
ugcaagauguuuaucauug

SEQ ID NO: 189182 - RNA, 19 nt, Homo sapiens
  misc_RNA (1)...(19): siRNA sense strand
agcggaaucuggagaaaua

SEQ ID NO: 189183 - RNA, 19 nt, Homo sapiens
  misc_RNA (1)...(19): siRNA sense strand
ggacaucugccuccugaau

SEQ ID NO: 189184 - RNA, 19 nt, Homo sapiens
  misc_RNA (1)...(19): siRNA sense strand
uggaguaccugcaguccua

SEQ ID NO: 189185 - RNA, 19 nt, Homo sapiens
  misc_RNA (1)...(19): siRNA sense strand
agaaauacggccucaauga

SEQ ID NO: 189186 - RNA, 19 nt, Homo sapiens
  misc_RNA (1)...(19): siRNA sense strand
ggacaacacccacuuugag

SEQ ID NO: 189187 - RNA, 19 nt, Homo sapiens
  misc_RNA (1)...(19): siRNA sense strand
ugugggagcuggugauaga

SEQ ID NO: 189188 - RNA, 19 nt, Homo sapiens
  misc_RNA (1)...(19): siRNA sense strand
ggccaaaggugucuaugag

SEQ ID NO: 189189 - RNA, 19 nt, Homo sapiens
  misc_RNA (1)...(19): siRNA sense strand
uggagaagaugaauguguu

SEQ ID NO: 189190 - RNA, 19 nt, Homo sapiens
  misc_RNA (1)...(19): siRNA sense strand
acaacaacaugaagcaguu

SEQ ID NO: 189191 - RNA, 19 nt, Homo sapiens
  misc_RNA (1)...(19): siRNA sense strand
aggaauguuuggccuauuu

SEQ ID NO: 189192 - RNA, 19 nt, Homo sapiens
  misc_RNA (1)...(19): siRNA sense strand
caacaagggcacagccauu

SEQ ID NO: 189193 - RNA, 19 nt, Homo sapiens
  misc_RNA (1)...(19): siRNA sense strand
ugauagagcaguuugaaga

SEQ ID NO: 189194 - RNA, 19 nt, Homo sapiens
  misc_RNA (1)...(19): siRNA sense strand
gaugagaucacagccauga

SEQ ID NO: 189195 - RNA, 19 nt, Homo sapiens
  misc_RNA (1)...(19): siRNA sense strand
gcagaagcuggaugaguuu

SEQ ID NO: 189196 - RNA, 19 nt, Homo sapiens
  misc_RNA (1)...(19): siRNA sense strand
gucuguaucugucaucaaa

SEQ ID NO: 189197 - RNA, 19 nt, Homo sapiens
  misc_RNA (1)...(19): siRNA sense strand
ucgaggcccugaaggagua

SEQ ID NO: 189198 - RNA, 19 nt, Homo sapiens
  misc_RNA (1)...(19): siRNA sense strand
gaagaugaaagaaggaagu

SEQ ID NO: 189199 - RNA, 19 nt, Homo sapiens
  misc_RNA (1)...(19): siRNA sense strand
ucauugggcucgacgaaau

SEQ ID NO: 189200 - RNA, 19 nt, Homo sapiens
  misc_RNA (1)...(19): siRNA sense strand
ggucaucucccucaucugu

SEQ ID NO: 189201 - RNA, 19 nt, Homo sapiens
  misc_RNA (1)...(19): siRNA sense strand
gggaagauccgagaccaaa

SEQ ID NO: 189202 - RNA, 19 nt, Homo sapiens
  misc_RNA (1)...(19): siRNA sense strand
ggaauucacccuggaguuc

SEQ ID NO: 189203 - RNA, 19 nt, Homo sapiens
  misc_RNA (1)...(19): siRNA sense strand
ccagcugacucacuucaug

SEQ ID NO: 189204 - RNA, 19 nt, Homo sapiens
  misc_RNA (1)...(19): siRNA sense strand
ucgcacaaguccaagauug

SEQ ID NO: 189205 - RNA, 19 nt, Homo sapiens
  misc_RNA (1)...(19): siRNA sense strand
agcagaagcuggaugaguu

SEQ ID NO: 189206 - RNA, 19 nt, Homo sapiens
  misc_RNA (1)...(19): siRNA sense strand
gacaagaagaacaugcuuu

SEQ ID NO: 189207 - RNA, 19 nt, Homo sapiens
  misc_RNA (1)...(19): siRNA sense strand
gcaaugacuccuccuugga

SEQ ID NO: 189208 - RNA, 19 nt, Homo sapiens
  misc_RNA (1)...(19): siRNA sense strand
uaucaacauuggccacuuc

SEQ ID NO: 189209 - RNA, 19 nt, Homo sapiens
  misc_RNA (1)...(19): siRNA sense strand
gaggacaacacccacuuug

SEQ ID NO: 189210 - RNA, 19 nt, Homo sapiens
  misc_RNA (1)...(19): siRNA sense strand
ggaugggccucaugucaac

SEQ ID NO: 189211 - RNA, 19 nt, Homo sapiens
  misc_RNA (1)...(19): siRNA sense strand
gacaggugauggcgucaau

SEQ ID NO: 189212 - RNA, 19 nt, Homo sapiens
  misc_RNA (1)...(19): siRNA sense strand
gagaaauacggccucaaug

SEQ ID NO: 189213 - RNA, 19 nt, Homo sapiens
  misc_RNA (1)...(19): siRNA sense strand
acaucugccuccugaauga

SEQ ID NO: 189214 - RNA, 19 nt, Homo sapiens
  misc_RNA (1)...(19): siRNA sense strand
ucgacgaaauccucaaguu

SEQ ID NO: 189215 - RNA, 19 nt, Homo sapiens
  misc_RNA (1)...(19): siRNA sense strand
caagacugccucugagaug

SEQ ID NO: 189216 - RNA, 19 nt, Homo sapiens
  misc_RNA (1)...(19): siRNA sense strand
ugaagaaggcugagauugg

SEQ ID NO: 189217 - RNA, 19 nt, Homo sapiens
  misc_RNA (1)...(19): siRNA sense strand
ggacaagaagaacaugcuu

SEQ ID NO: 189218 - RNA, 19 nt, Homo sapiens
  misc_RNA (1)...(19): siRNA sense strand
cgacgaaauccucaaguuc

SEQ ID NO: 189219 - RNA, 19 nt, Homo sapiens
  misc_RNA (1)...(19): siRNA sense strand
gaaaugguccuggaugacu

SEQ ID NO: 189220 - RNA, 19 nt, Homo sapiens
  misc_RNA (1)...(19): siRNA sense strand
ucauggcggugaucaagga

SEQ ID NO: 189221 - RNA, 19 nt, Homo sapiens
  misc_RNA (1)...(19): siRNA sense strand
gaagcuugcccuccguaga

SEQ ID NO: 189222 - RNA, 19 nt, Homo sapiens
  misc_RNA (1)...(19): siRNA sense strand
gaggaauguuuggccuauu

SEQ ID NO: 189223 - RNA, 19 nt, Homo sapiens
  misc_RNA (1)...(19): siRNA sense strand
guucauccgcuaccucauu

SEQ ID NO: 189224 - RNA, 19 nt, Homo sapiens
  misc_RNA (1)...(19): siRNA sense strand
agacggaccugacauucgu

SEQ ID NO: 189225 - RNA, 19 nt, Homo sapiens
  misc_RNA (1)...(19): siRNA sense strand
ggaccaaguuaagcggaau

SEQ ID NO: 189226 - RNA, 19 nt, Homo sapiens
  misc_RNA (1)...(19): siRNA sense strand
ugagcucccugcugaggaa

SEQ ID NO: 189227 - RNA, 19 nt, Homo sapiens
  misc_RNA (1)...(19): siRNA sense strand
cugaaugaguucuccauca

SEQ ID NO: 189228 - RNA, 19 nt, Homo sapiens
  misc_RNA (1)...(19): siRNA sense strand
guggcugucuggcuuauca

SEQ ID NO: 189229 - RNA, 19 nt, Homo sapiens
  misc_RNA (1)...(19): siRNA sense strand
ccacagaacaggacaagac

SEQ ID NO: 189230 - RNA, 19 nt, Homo sapiens
  misc_RNA (1)...(19): siRNA sense strand
caucacugccuuuguugaa

SEQ ID NO: 189231 - RNA, 19 nt, Homo sapiens
  misc_RNA (1)...(19): siRNA sense strand
gcacuuccucauccucuau

SEQ ID NO: 189232 - RNA, 19 nt, Homo sapiens
  misc_RNA (1)...(19): siRNA sense strand
ggacuucaacgaggccaaa

SEQ ID NO: 189233 - RNA, 19 nt, Homo sapiens
  misc_RNA (1)...(19): siRNA sense strand
gaccgcaagucagugcaaa

SEQ ID NO: 189234 - RNA, 19 nt, Homo sapiens
  misc_RNA (1)...(19): siRNA sense strand
uaagcggaaucuggagaaa

SEQ ID NO: 189235 - RNA, 19 nt, Homo sapiens
  misc_RNA (1)...(19): siRNA sense strand
guucaacacggaugugaga

SEQ ID NO: 189236 - RNA, 19 nt, Homo sapiens
  misc_RNA (1)...(19): siRNA sense strand
gccaucuacuacuuuaaga

SEQ ID NO: 189237 - RNA, 19 nt, Homo sapiens
  misc_RNA (1)...(19): siRNA sense strand
gugauccgccagcuaauga

SEQ ID NO: 189238 - RNA, 19 nt, Homo sapiens
  misc_RNA (1)...(19): siRNA sense strand
guggagcccucgcacaagu

SEQ ID NO: 189239 - RNA, 19 nt, Homo sapiens
  misc_RNA (1)...(19): siRNA sense strand
ggugauagagcaguuugaa

SEQ ID NO: 189240 - RNA, 19 nt, Homo sapiens
  misc_RNA (1)...(19): siRNA sense strand
guccaugucugucuauugc

SEQ ID NO: 189241 - RNA, 19 nt, Homo sapiens
  misc_RNA (1)...(19): siRNA sense strand
gaaggugaagagaccauca

SEQ ID NO: 189242 - RNA, 19 nt, Homo sapiens
  misc_RNA (1)...(19): siRNA sense strand
caacauuggccacuucaac

SEQ ID NO: 189243 - RNA, 19 nt, Homo sapiens
  misc_RNA (1)...(19): siRNA sense strand
ggagcuggccaccaucugu

SEQ ID NO: 189244 - RNA, 19 nt, Homo sapiens
  misc_RNA (1)...(19): siRNA sense strand
gcucaugguccucaagauc

SEQ ID NO: 189245 - RNA, 19 nt, Homo sapiens
  misc_RNA (1)...(19): siRNA sense strand
caggugauggcgucaauga

SEQ ID NO: 189246 - RNA, 19 nt, Homo sapiens
  misc_RNA (1)...(19): siRNA sense strand
ugaaugaguucuccaucac

SEQ ID NO: 189247 - RNA, 19 nt, Homo sapiens
  misc_RNA (1)...(19): siRNA sense strand
ccggcgaauuggcaucuuu

SEQ ID NO: 189248 - RNA, 19 nt, Homo sapiens
  misc_RNA (1)...(19): siRNA sense strand
ucugugcccucugcaauga

SEQ ID NO: 189249 - RNA, 19 nt, Homo sapiens
  misc_RNA (1)...(19): siRNA sense strand
ggaguaugagccagagaug

SEQ ID NO: 189250 - RNA, 19 nt, Homo sapiens
  misc_RNA (1)...(19): siRNA sense strand
caucgaccgcuguaacuau

SEQ ID NO: 189251 - RNA, 19 nt, Homo sapiens
  misc_RNA (1)...(19): siRNA sense strand
gggcugcugugggcaacaa

SEQ ID NO: 189252 - RNA, 19 nt, Homo sapiens
  misc_RNA (1)...(19): siRNA sense strand
caagauguuuaucauugac

SEQ ID NO: 189253 - RNA, 19 nt, Homo sapiens
  misc_RNA (1)...(19): siRNA sense strand
cugcaccucugucaucugu

SEQ ID NO: 189254 - RNA, 19 nt, Homo sapiens
  misc_RNA (1)...(19): siRNA sense strand
ucaaccaggacaagaagaa

SEQ ID NO: 189255 - RNA, 19 nt, Homo sapiens
  misc_RNA (1)...(19): siRNA sense strand
ggaagauccgagaccaaau

SEQ ID NO: 189256 - RNA, 19 nt, Homo sapiens
  misc_RNA (1)...(19): siRNA sense strand
cgaggacaacacccacuuu

SEQ ID NO: 189257 - RNA, 19 nt, Homo sapiens
  misc_RNA (1)...(19): siRNA sense strand
ugggcgagguggucuguau

SEQ ID NO: 189258 - RNA, 19 nt, Homo sapiens
  misc_RNA (1)...(19): siRNA sense strand
ggugcuggcugacgacaac

SEQ ID NO: 189259 - RNA, 19 nt, Homo sapiens
  misc_RNA (1)...(19): siRNA sense strand
gggcugcaccucugucauc

SEQ ID NO: 189260 - RNA, 19 nt, Homo sapiens
  misc_RNA (1)...(19): siRNA sense strand
ucaucucccucaucugugu

SEQ ID NO: 189261 - RNA, 19 nt, Homo sapiens
  misc_RNA (1)...(19): siRNA sense strand
ggagaagaugaauguguuc

SEQ ID NO: 189262 - RNA, 19 nt, Homo sapiens
  misc_RNA (1)...(19): siRNA sense strand
gacaucugccuccugaaug

SEQ ID NO: 189263 - RNA, 19 nt, Homo sapiens
  misc_RNA (1)...(19): siRNA sense strand
gagcagcugccuggugguu

SEQ ID NO: 189264 - RNA, 19 nt, Homo sapiens
  misc_RNA (1)...(19): siRNA sense strand
ucggugauccgccagcuaa

SEQ ID NO: 189265 - RNA, 19 nt, Homo sapiens
  misc_RNA (1)...(19): siRNA sense strand
cgagguggucuguaucuuc

SEQ ID NO: 189266 - RNA, 19 nt, Homo sapiens
  misc_RNA (1)...(19): siRNA sense strand
gaagauggcuugucagaug

SEQ ID NO: 189267 - RNA, 19 nt, Homo sapiens
  misc_RNA (1)...(19): siRNA sense strand
gaaguuaagucgcagaaug

SEQ ID NO: 189268 - RNA, 19 nt, Homo sapiens
  misc_RNA (1)...(19): siRNA sense strand
ggacaaagaacccaaagaa

SEQ ID NO: 189269 - RNA, 19 nt, Homo sapiens
  misc_RNA (1)...(19): siRNA sense strand
gaagggauuuacagaaguu

SEQ ID NO: 189270 - RNA, 19 nt, Homo sapiens
  misc_RNA (1)...(19): siRNA sense strand
ggaguucgacccaacaaua

SEQ ID NO: 189271 - RNA, 19 nt, Homo sapiens
  misc_RNA (1)...(19): siRNA sense strand
caaagaacccaaagaagaa

SEQ ID NO: 189272 - RNA, 19 nt, Homo sapiens
  misc_RNA (1)...(19): siRNA sense strand
ggagaaagggaauguguuu

SEQ ID NO: 189273 - RNA, 19 nt, Homo sapiens
  misc_RNA (1)...(19): siRNA sense strand
gaagagaagaggaggcuaa

SEQ ID NO: 189274 - RNA, 19 nt, Homo sapiens
  misc_RNA (1)...(19): siRNA sense strand
gaaagaagggauuuacaga

SEQ ID NO: 189275 - RNA, 19 nt, Homo sapiens
  misc_RNA (1)...(19): siRNA sense strand
gaaaagcaguggugucaaa

SEQ ID NO: 189276 - RNA, 19 nt, Homo sapiens
  misc_RNA (1)...(19): siRNA sense strand
ucgagaagcucaaacagaa

SEQ ID NO: 189277 - RNA, 19 nt, Homo sapiens
  misc_RNA (1)...(19): siRNA sense strand
caagucaccugcucccaaa

SEQ ID NO: 189278 - RNA, 19 nt, Homo sapiens
  misc_RNA (1)...(19): siRNA sense strand
gcagcaggcacaccaaaua

SEQ ID NO: 189279 - RNA, 19 nt, Homo sapiens
  misc_RNA (1)...(19): siRNA sense strand
ggaaacugcuggcuugaag

SEQ ID NO: 189280 - RNA, 19 nt, Homo sapiens
  misc_RNA (1)...(19): siRNA sense strand
gaaugacgaugaugaagag

SEQ ID NO: 189281 - RNA, 19 nt, Homo sapiens
  misc_RNA (1)...(19): siRNA sense strand
caagaaagauacgagauag

SEQ ID NO: 189282 - RNA, 19 nt, Homo sapiens
  misc_RNA (1)...(19): siRNA sense strand
caagaaagaagacaaggaa

SEQ ID NO: 189283 - RNA, 19 nt, Homo sapiens
  misc_RNA (1)...(19): siRNA sense strand
gcagaagaaugcaaaauga

SEQ ID NO: 189284 - RNA, 19 nt, Homo sapiens
  misc_RNA (1)...(19): siRNA sense strand
ccaagaaagauacgagaua

SEQ ID NO: 189285 - RNA, 19 nt, Homo sapiens
  misc_RNA (1)...(19): siRNA sense strand
acaaagaacccaaagaaga

SEQ ID NO: 189286 - RNA, 19 nt, Homo sapiens
  misc_RNA (1)...(19): siRNA sense strand
gaaaagcaaucuguggaua

SEQ ID NO: 189287 - RNA, 19 nt, Homo sapiens
  misc_RNA (1)...(19): siRNA sense strand
caagaaaccauucaagugu

SEQ ID NO: 189288 - RNA, 19 nt, Homo sapiens
  misc_RNA (1)...(19): siRNA sense strand
gccagaagaugccagaaga

SEQ ID NO: 189289 - RNA, 19 nt, Homo sapiens
  misc_RNA (1)...(19): siRNA sense strand
guacgcaacaucaagagua

SEQ ID NO: 189290 - RNA, 19 nt, Homo sapiens
  misc_RNA (1)...(19): siRNA sense strand
ucccaaaccuucugacuug

SEQ ID NO: 189291 - RNA, 19 nt, Homo sapiens
  misc_RNA (1)...(19): siRNA sense strand
ggaaugacgaugaugaaga

SEQ ID NO: 189292 - RNA, 19 nt, Homo sapiens
  misc_RNA (1)...(19): siRNA sense strand
gaaagucgccaagaaagau

SEQ ID NO: 189293 - RNA, 19 nt, Homo sapiens
  misc_RNA (1)...(19): siRNA sense strand
gagaauucaugacccacaa

SEQ ID NO: 189294 - RNA, 19 nt, Homo sapiens
  misc_RNA (1)...(19): siRNA sense strand
gauagaagagcgagcagaa

SEQ ID NO: 189295 - RNA, 19 nt, Homo sapiens
  misc_RNA (1)...(19): siRNA sense strand
aagaagaaguuaagagcuu

SEQ ID NO: 189296 - RNA, 19 nt, Homo sapiens
  misc_RNA (1)...(19): siRNA sense strand
gaagaggaggcuaaaggaa

SEQ ID NO: 189297 - RNA, 19 nt, Homo sapiens
  misc_RNA (1)...(19): siRNA sense strand
cgagauagaggaaacagaa

SEQ ID NO: 189298 - RNA, 19 nt, Homo sapiens
  misc_RNA (1)...(19): siRNA sense strand
gaagguguacgcaacauca

SEQ ID NO: 189299 - RNA, 19 nt, Homo sapiens
  misc_RNA (1)...(19): siRNA sense strand
uagaagagcgagcagaauu

SEQ ID NO: 189300 - RNA, 19 nt, Homo sapiens
  misc_RNA (1)...(19): siRNA sense strand
gaguucgacccaacaauaa

SEQ ID NO: 189301 - RNA, 19 nt, Homo sapiens
  misc_RNA (1)...(19): siRNA sense strand
ccuaaagguucaucucuca

SEQ ID NO: 189302 - RNA, 19 nt, Homo sapiens
  misc_RNA (1)...(19): siRNA sense strand
ggaggaagccgaucgaaaa

SEQ ID NO: 189303 - RNA, 19 nt, Homo sapiens
  misc_RNA (1)...(19): siRNA sense strand
gaucgaaagaagggauuua

SEQ ID NO: 189304 - RNA, 19 nt, Homo sapiens
  misc_RNA (1)...(19): siRNA sense strand
gaacccaaagaagaaguua

SEQ ID NO: 189305 - RNA, 19 nt, Homo sapiens
  misc_RNA (1)...(19): siRNA sense strand
cagaaacagucaccaaguc

SEQ ID NO: 189306 - RNA, 19 nt, Homo sapiens
  misc_RNA (1)...(19): siRNA sense strand
caaaccuucugacuugaga

SEQ ID NO: 189307 - RNA, 19 nt, Homo sapiens
  misc_RNA (1)...(19): siRNA sense strand
gagaagaggaggcuaaagg

SEQ ID NO: 189308 - RNA, 19 nt, Homo sapiens
  misc_RNA (1)...(19): siRNA sense strand
ccaaagcgagggagcauug

SEQ ID NO: 189309 - RNA, 19 nt, Homo sapiens
  misc_RNA (1)...(19): siRNA sense strand
gauacgagauagaggaaac

SEQ ID NO: 189310 - RNA, 19 nt, Homo sapiens
  misc_RNA (1)...(19): siRNA sense strand
ucaaugaauggcuaacuaa

SEQ ID NO: 189311 - RNA, 19 nt, Homo sapiens
  misc_RNA (1)...(19): siRNA sense strand
gacaagaaaccauucaagu

SEQ ID NO: 189312 - RNA, 19 nt, Homo sapiens
  misc_RNA (1)...(19): siRNA sense strand
agaggaggcuaaaggaaga

SEQ ID NO: 189313 - RNA, 19 nt, Homo sapiens
  misc_RNA (1)...(19): siRNA sense strand
aagaagggauuuacagaag

SEQ ID NO: 189314 - RNA, 19 nt, Homo sapiens
  misc_RNA (1)...(19): siRNA sense strand
ccagaggaaugacgaugau

SEQ ID NO: 189315 - RNA, 19 nt, Homo sapiens
  misc_RNA (1)...(19): siRNA sense strand
cagcaggcacaccaaauaa

SEQ ID NO: 189316 - RNA, 19 nt, Homo sapiens
  misc_RNA (1)...(19): siRNA sense strand
ccaagacaaccaccacaaa

SEQ ID NO: 189317 - RNA, 19 nt, Homo sapiens
  misc_RNA (1)...(19): siRNA sense strand
ccacaaacuuaaacauacu

SEQ ID NO: 189318 - RNA, 19 nt, Homo sapiens
  misc_RNA (1)...(19): siRNA sense strand
aagaaaccauucaaguguu

SEQ ID NO: 189319 - RNA, 19 nt, Homo sapiens
  misc_RNA (1)...(19): siRNA sense strand
aaagaagggauuuacagaa

SEQ ID NO: 189320 - RNA, 19 nt, Homo sapiens
  misc_RNA (1)...(19): siRNA sense strand
gcaguauaccagugcaauu

SEQ ID NO: 189321 - RNA, 19 nt, Homo sapiens
  misc_RNA (1)...(19): siRNA sense strand
gaggaaugacgaugaugaa

SEQ ID NO: 189322 - RNA, 19 nt, Homo sapiens
  misc_RNA (1)...(19): siRNA sense strand
gcugagaaacgccagaaga

SEQ ID NO: 189323 - RNA, 19 nt, Homo sapiens
  misc_RNA (1)...(19): siRNA sense strand
ccaagcagaagaaugcaaa

SEQ ID NO: 189324 - RNA, 19 nt, Homo sapiens
  misc_RNA (1)...(19): siRNA sense strand
cagcaauagucuccaagau

SEQ ID NO: 189325 - RNA, 19 nt, Homo sapiens
  misc_RNA (1)...(19): siRNA sense strand
acaagaaaccauucaagug

SEQ ID NO: 189326 - RNA, 19 nt, Homo sapiens
  misc_RNA (1)...(19): siRNA sense strand
ucagagaggaggaagagaa

SEQ ID NO: 189327 - RNA, 19 nt, Homo sapiens
  misc_RNA (1)...(19): siRNA sense strand
aaaugaaacuaccgagaag

SEQ ID NO: 189328 - RNA, 19 nt, Homo sapiens
  misc_RNA (1)...(19): siRNA sense strand
ggaggugaaugcccagaac

SEQ ID NO: 189329 - RNA, 19 nt, Homo sapiens
  misc_RNA (1)...(19): siRNA sense strand
ggcagaagcaggaggaaga

SEQ ID NO: 189330 - RNA, 19 nt, Homo sapiens
  misc_RNA (1)...(19): siRNA sense strand
cgagggagcauuggagaaa

SEQ ID NO: 189331 - RNA, 19 nt, Homo sapiens
  misc_RNA (1)...(19): siRNA sense strand
aaacagaaacagucaccaa

SEQ ID NO: 189332 - RNA, 19 nt, Homo sapiens
  misc_RNA (1)...(19): siRNA sense strand
ucaagaguaugugggagaa

SEQ ID NO: 189333 - RNA, 19 nt, Homo sapiens
  misc_RNA (1)...(19): siRNA sense strand
uaaaggaagagauugaaag

SEQ ID NO: 189334 - RNA, 19 nt, Homo sapiens
  misc_RNA (1)...(19): siRNA sense strand
caaugaauggcuaacuaaa

SEQ ID NO: 189335 - RNA, 19 nt, Homo sapiens
  misc_RNA (1)...(19): siRNA sense strand
caaaucgacccaucaagca

SEQ ID NO: 189336 - RNA, 19 nt, Homo sapiens
  misc_RNA (1)...(19): siRNA sense strand
aaagguucaucucucaaga

SEQ ID NO: 189337 - RNA, 19 nt, Homo sapiens
  misc_RNA (1)...(19): siRNA sense strand
cagaagauggcuugucaga

SEQ ID NO: 189338 - RNA, 19 nt, Homo sapiens
  misc_RNA (1)...(19): siRNA sense strand
gagauagaggaaacagaaa

SEQ ID NO: 189339 - RNA, 19 nt, Homo sapiens
  misc_RNA (1)...(19): siRNA sense strand
caggagacguauccagcaa

SEQ ID NO: 189340 - RNA, 19 nt, Homo sapiens
  misc_RNA (1)...(19): siRNA sense strand
gcagcaauagucuccaaga

SEQ ID NO: 189341 - RNA, 19 nt, Homo sapiens
  misc_RNA (1)...(19): siRNA sense strand
agaagagcgagcagaauuu

SEQ ID NO: 189342 - RNA, 19 nt, Homo sapiens
  misc_RNA (1)...(19): siRNA sense strand
ugaaagucgccaagaaaga

SEQ ID NO: 189343 - RNA, 19 nt, Homo sapiens
  misc_RNA (1)...(19): siRNA sense strand
uuggagggaugcugaagaa

SEQ ID NO: 189344 - RNA, 19 nt, Homo sapiens
  misc_RNA (1)...(19): siRNA sense strand
gaggaaacagaaacaguca

SEQ ID NO: 189345 - RNA, 19 nt, Homo sapiens
  misc_RNA (1)...(19): siRNA sense strand
gauagaggaaacagaaaca

SEQ ID NO: 189346 - RNA, 19 nt, Homo sapiens
  misc_RNA (1)...(19): siRNA sense strand
aagugaaagucgccaagaa

SEQ ID NO: 189347 - RNA, 19 nt, Homo sapiens
  misc_RNA (1)...(19): siRNA sense strand
aaagcaaucuguggauaag

SEQ ID NO: 189348 - RNA, 19 nt, Homo sapiens
  misc_RNA (1)...(19): siRNA sense strand
aagauggcuugucagauga

SEQ ID NO: 189349 - RNA, 19 nt, Homo sapiens
  misc_RNA (1)...(19): siRNA sense strand
gaggcuaaaggaagagauu

SEQ ID NO: 189350 - RNA, 19 nt, Homo sapiens
  misc_RNA (1)...(19): siRNA sense strand
cccacaaacuuaaacauac

SEQ ID NO: 189351 - RNA, 19 nt, Homo sapiens
  misc_RNA (1)...(19): siRNA sense strand
aaacagucaccaaguccua

SEQ ID NO: 189352 - RNA, 19 nt, Homo sapiens
  misc_RNA (1)...(19): siRNA sense strand
gcagaagcaggaggaagaa

SEQ ID NO: 189353 - RNA, 19 nt, Homo sapiens
  misc_RNA (1)...(19): siRNA sense strand
cagaugacaagaaaccauu

SEQ ID NO: 189354 - RNA, 19 nt, Homo sapiens
  misc_RNA (1)...(19): siRNA sense strand
gcuaaaggaagagauugaa

SEQ ID NO: 189355 - RNA, 19 nt, Homo sapiens
  misc_RNA (1)...(19): siRNA sense strand
gacaaagaacccaaagaag

SEQ ID NO: 189356 - RNA, 19 nt, Homo sapiens
  misc_RNA (1)...(19): siRNA sense strand
aagcggaaccucugggaaa

SEQ ID NO: 189357 - RNA, 19 nt, Homo sapiens
  misc_RNA (1)...(19): siRNA sense strand
gaaaggcgaagagcagaag

SEQ ID NO: 189358 - RNA, 19 nt, Homo sapiens
  misc_RNA (1)...(19): siRNA sense strand
gcuggaggaacucaagaaa

SEQ ID NO: 189359 - RNA, 19 nt, Homo sapiens
  misc_RNA (1)...(19): siRNA sense strand
cgaaagaagggauuuacag

SEQ ID NO: 189360 - RNA, 19 nt, Homo sapiens
  misc_RNA (1)...(19): siRNA sense strand
gaaggaguucgacccaaca

SEQ ID NO: 189361 - RNA, 19 nt, Homo sapiens
  misc_RNA (1)...(19): siRNA sense strand
gaagagcgagcagaauuuu

SEQ ID NO: 189362 - RNA, 19 nt, Homo sapiens
  misc_RNA (1)...(19): siRNA sense strand
cuaaaggaagagauugaaa

SEQ ID NO: 189363 - RNA, 19 nt, Homo sapiens
  misc_RNA (1)...(19): siRNA sense strand
uucaugacccacaaacuua

SEQ ID NO: 189364 - RNA, 19 nt, Homo sapiens
  misc_RNA (1)...(19): siRNA sense strand
ccaaagaagaaguuaagag

SEQ ID NO: 189365 - RNA, 19 nt, Homo sapiens
  misc_RNA (1)...(19): siRNA sense strand
aucaaugaauggcuaacua

SEQ ID NO: 189366 - RNA, 19 nt, Homo sapiens
  misc_RNA (1)...(19): siRNA sense strand
gaagauggcuugucagaug

SEQ ID NO: 189367 - RNA, 19 nt, Homo sapiens
  misc_RNA (1)...(19): siRNA sense strand
gaaguuaagucgcagaaug

SEQ ID NO: 189368 - RNA, 19 nt, Homo sapiens
  misc_RNA (1)...(19): siRNA sense strand
ggacaaagaacccaaagaa

SEQ ID NO: 189369 - RNA, 19 nt, Homo sapiens
  misc_RNA (1)...(19): siRNA sense strand
gaagggauuuacagaaguu

SEQ ID NO: 189370 - RNA, 19 nt, Homo sapiens
  misc_RNA (1)...(19): siRNA sense strand
ggaguucgacccaacaaua

SEQ ID NO: 189371 - RNA, 19 nt, Homo sapiens
  misc_RNA (1)...(19): siRNA sense strand
caaagaacccaaagaagaa

SEQ ID NO: 189372 - RNA, 19 nt, Homo sapiens
  misc_RNA (1)...(19): siRNA sense strand
ggagaaagggaauguguuu

SEQ ID NO: 189373 - RNA, 19 nt, Homo sapiens
  misc_RNA (1)...(19): siRNA sense strand
gaagagaagaggaggcuaa

SEQ ID NO: 189374 - RNA, 19 nt, Homo sapiens
  misc_RNA (1)...(19): siRNA sense strand
gaaagaagggauuuacaga

SEQ ID NO: 189375 - RNA, 19 nt, Homo sapiens
  misc_RNA (1)...(19): siRNA sense strand
gaaaagcaguggugucaaa

SEQ ID NO: 189376 - RNA, 19 nt, Homo sapiens
  misc_RNA (1)...(19): siRNA sense strand
ucgagaagcucaaacagaa

SEQ ID NO: 189377 - RNA, 19 nt, Homo sapiens
  misc_RNA (1)...(19): siRNA sense strand
caagucaccugcucccaaa

SEQ ID NO: 189378 - RNA, 19 nt, Homo sapiens
  misc_RNA (1)...(19): siRNA sense strand
gcagcaggcacaccaaaua

SEQ ID NO: 189379 - RNA, 19 nt, Homo sapiens
  misc_RNA (1)...(19): siRNA sense strand
ggaaacugcuggcuugaag

SEQ ID NO: 189380 - RNA, 19 nt, Homo sapiens
  misc_RNA (1)...(19): siRNA sense strand
gaaugacgaugaugaagag

SEQ ID NO: 189381 - RNA, 19 nt, Homo sapiens
  misc_RNA (1)...(19): siRNA sense strand
caagaaagauacgagauag

SEQ ID NO: 189382 - RNA, 19 nt, Homo sapiens
  misc_RNA (1)...(19): siRNA sense strand
caagaaagaagacaaggaa

SEQ ID NO: 189383 - RNA, 19 nt, Homo sapiens
  misc_RNA (1)...(19): siRNA sense strand
gcagaagaaugcaaaauga

SEQ ID NO: 189384 - RNA, 19 nt, Homo sapiens
  misc_RNA (1)...(19): siRNA sense strand
ccaagaaagauacgagaua

SEQ ID NO: 189385 - RNA, 19 nt, Homo sapiens
  misc_RNA (1)...(19): siRNA sense strand
acaaagaacccaaagaaga

SEQ ID NO: 189386 - RNA, 19 nt, Homo sapiens
  misc_RNA (1)...(19): siRNA sense strand
gaaaagcaaucuguggaua

SEQ ID NO: 189387 - RNA, 19 nt, Homo sapiens
  misc_RNA (1)...(19): siRNA sense strand
caagaaaccauucaagugu

SEQ ID NO: 189388 - RNA, 19 nt, Homo sapiens
  misc_RNA (1)...(19): siRNA sense strand
gccagaagaugccagaaga

SEQ ID NO: 189389 - RNA, 19 nt, Homo sapiens
  misc_RNA (1)...(19): siRNA sense strand
guacgcaacaucaagagua

SEQ ID NO: 189390 - RNA, 19 nt, Homo sapiens
  misc_RNA (1)...(19): siRNA sense strand
ucccaaaccuucugacuug

SEQ ID NO: 189391 - RNA, 19 nt, Homo sapiens
  misc_RNA (1)...(19): siRNA sense strand
ggaaugacgaugaugaaga

SEQ ID NO: 189392 - RNA, 19 nt, Homo sapiens
  misc_RNA (1)...(19): siRNA sense strand
gaaagucgccaagaaagau

SEQ ID NO: 189393 - RNA, 19 nt, Homo sapiens
  misc_RNA (1)...(19): siRNA sense strand
gagaauucaugacccacaa

SEQ ID NO: 189394 - RNA, 19 nt, Homo sapiens
  misc_RNA (1)...(19): siRNA sense strand
gauagaagagcgagcagaa

SEQ ID NO: 189395 - RNA, 19 nt, Homo sapiens
  misc_RNA (1)...(19): siRNA sense strand
aagaagaaguuaagagcuu

SEQ ID NO: 189396 - RNA, 19 nt, Homo sapiens
  misc_RNA (1)...(19): siRNA sense strand
gaagaggaggcuaaaggaa

SEQ ID NO: 189397 - RNA, 19 nt, Homo sapiens
  misc_RNA (1)...(19): siRNA sense strand
cgagauagaggaaacagaa

SEQ ID NO: 189398 - RNA, 19 nt, Homo sapiens
  misc_RNA (1)...(19): siRNA sense strand
gaagguguacgcaacauca

SEQ ID NO: 189399 - RNA, 19 nt, Homo sapiens
  misc_RNA (1)...(19): siRNA sense strand
uagaagagcgagcagaauu

SEQ ID NO: 189400 - RNA, 19 nt, Homo sapiens
  misc_RNA (1)...(19): siRNA sense strand
gaguucgacccaacaauaa

SEQ ID NO: 189401 - RNA, 19 nt, Homo sapiens
  misc_RNA (1)...(19): siRNA sense strand
ccuaaagguucaucucuca

SEQ ID NO: 189402 - RNA, 19 nt, Homo sapiens
  misc_RNA (1)...(19): siRNA sense strand
ggaggaagccgaucgaaaa

SEQ ID NO: 189403 - RNA, 19 nt, Homo sapiens
  misc_RNA (1)...(19): siRNA sense strand
gaucgaaagaagggauuua

SEQ ID NO: 189404 - RNA, 19 nt, Homo sapiens
  misc_RNA (1)...(19): siRNA sense strand
gaacccaaagaagaaguua

SEQ ID NO: 189405 - RNA, 19 nt, Homo sapiens
  misc_RNA (1)...(19): siRNA sense strand
cagaaacagucaccaaguc

SEQ ID NO: 189406 - RNA, 19 nt, Homo sapiens
  misc_RNA (1)...(19): siRNA sense strand
caaaccuucugacuugaga

SEQ ID NO: 189407 - RNA, 19 nt, Homo sapiens
  misc_RNA (1)...(19): siRNA sense strand
gagaagaggaggcuaaagg

SEQ ID NO: 189408 - RNA, 19 nt, Homo sapiens
  misc_RNA (1)...(19): siRNA sense strand
ccaaagcgagggagcauug

SEQ ID NO: 189409 - RNA, 19 nt, Homo sapiens
  misc_RNA (1)...(19): siRNA sense strand
gauacgagauagaggaaac

SEQ ID NO: 189410 - RNA, 19 nt, Homo sapiens
  misc_RNA (1)...(19): siRNA sense strand
ucaaugaauggcuaacuaa

SEQ ID NO: 189411 - RNA, 19 nt, Homo sapiens
  misc_RNA (1)...(19): siRNA sense strand
gacaagaaaccauucaagu

SEQ ID NO: 189412 - RNA, 19 nt, Homo sapiens
  misc_RNA (1)...(19): siRNA sense strand
agaggaggcuaaaggaaga

SEQ ID NO: 189413 - RNA, 19 nt, Homo sapiens
  misc_RNA (1)...(19): siRNA sense strand
aagaagggauuuacagaag

SEQ ID NO: 189414 - RNA, 19 nt, Homo sapiens
  misc_RNA (1)...(19): siRNA sense strand
ccagaggaaugacgaugau

SEQ ID NO: 189415 - RNA, 19 nt, Homo sapiens
  misc_RNA (1)...(19): siRNA sense strand
cagcaggcacaccaaauaa

SEQ ID NO: 189416 - RNA, 19 nt, Homo sapiens
  misc_RNA (1)...(19): siRNA sense strand
ccaagacaaccaccacaaa

SEQ ID NO: 189417 - RNA, 19 nt, Homo sapiens
  misc_RNA (1)...(19): siRNA sense strand
ccacaaacuuaaacauacu

SEQ ID NO: 189418 - RNA, 19 nt, Homo sapiens
  misc_RNA (1)...(19): siRNA sense strand
aagaaaccauucaaguguu

SEQ ID NO: 189419 - RNA, 19 nt, Homo sapiens
  misc_RNA (1)...(19): siRNA sense strand
aaagaagggauuuacagaa

SEQ ID NO: 189420 - RNA, 19 nt, Homo sapiens
  misc_RNA (1)...(19): siRNA sense strand
gcaguauaccagugcaauu

SEQ ID NO: 189421 - RNA, 19 nt, Homo sapiens
  misc_RNA (1)...(19): siRNA sense strand
gaggaaugacgaugaugaa

SEQ ID NO: 189422 - RNA, 19 nt, Homo sapiens
  misc_RNA (1)...(19): siRNA sense strand
gcugagaaacgccagaaga

SEQ ID NO: 189423 - RNA, 19 nt, Homo sapiens
  misc_RNA (1)...(19): siRNA sense strand
ccaagcagaagaaugcaaa

SEQ ID NO: 189424 - RNA, 19 nt, Homo sapiens
  misc_RNA (1)...(19): siRNA sense strand
cagcaauagucuccaagau

SEQ ID NO: 189425 - RNA, 19 nt, Homo sapiens
  misc_RNA (1)...(19): siRNA sense strand
acaagaaaccauucaagug

SEQ ID NO: 189426 - RNA, 19 nt, Homo sapiens
  misc_RNA (1)...(19): siRNA sense strand
ucagagaggaggaagagaa

SEQ ID NO: 189427 - RNA, 19 nt, Homo sapiens
  misc_RNA (1)...(19): siRNA sense strand
aaaugaaacuaccgagaag

SEQ ID NO: 189428 - RNA, 19 nt, Homo sapiens
  misc_RNA (1)...(19): siRNA sense strand
ggaggugaaugcccagaac

SEQ ID NO: 189429 - RNA, 19 nt, Homo sapiens
  misc_RNA (1)...(19): siRNA sense strand
ggcagaagcaggaggaaga

SEQ ID NO: 189430 - RNA, 19 nt, Homo sapiens
  misc_RNA (1)...(19): siRNA sense strand
cgagggagcauuggagaaa

SEQ ID NO: 189431 - RNA, 19 nt, Homo sapiens
  misc_RNA (1)...(19): siRNA sense strand
aaacagaaacagucaccaa

SEQ ID NO: 189432 - RNA, 19 nt, Homo sapiens
  misc_RNA (1)...(19): siRNA sense strand
ucaagaguaugugggagaa

SEQ ID NO: 189433 - RNA, 19 nt, Homo sapiens
  misc_RNA (1)...(19): siRNA sense strand
uaaaggaagagauugaaag

SEQ ID NO: 189434 - RNA, 19 nt, Homo sapiens
  misc_RNA (1)...(19): siRNA sense strand
caaugaauggcuaacuaaa

SEQ ID NO: 189435 - RNA, 19 nt, Homo sapiens
  misc_RNA (1)...(19): siRNA sense strand
caaaucgacccaucaagca

SEQ ID NO: 189436 - RNA, 19 nt, Homo sapiens
  misc_RNA (1)...(19): siRNA sense strand
aaagguucaucucucaaga

SEQ ID NO: 189437 - RNA, 19 nt, Homo sapiens
  misc_RNA (1)...(19): siRNA sense strand
cagaagauggcuugucaga

SEQ ID NO: 189438 - RNA, 19 nt, Homo sapiens
  misc_RNA (1)...(19): siRNA sense strand
gagauagaggaaacagaaa

SEQ ID NO: 189439 - RNA, 19 nt, Homo sapiens
  misc_RNA (1)...(19): siRNA sense strand
caggagacguauccagcaa

SEQ ID NO: 189440 - RNA, 19 nt, Homo sapiens
  misc_RNA (1)...(19): siRNA sense strand
gcagcaauagucuccaaga

SEQ ID NO: 189441 - RNA, 19 nt, Homo sapiens
  misc_RNA (1)...(19): siRNA sense strand
agaagagcgagcagaauuu

SEQ ID NO: 189442 - RNA, 19 nt, Homo sapiens
  misc_RNA (1)...(19): siRNA sense strand
ugaaagucgccaagaaaga

SEQ ID NO: 189443 - RNA, 19 nt, Homo sapiens
  misc_RNA (1)...(19): siRNA sense strand
uuggagggaugcugaagaa

SEQ ID NO: 189444 - RNA, 19 nt, Homo sapiens
  misc_RNA (1)...(19): siRNA sense strand
gaggaaacagaaacaguca

SEQ ID NO: 189445 - RNA, 19 nt, Homo sapiens
  misc_RNA (1)...(19): siRNA sense strand
gauagaggaaacagaaaca

SEQ ID NO: 189446 - RNA, 19 nt, Homo sapiens
  misc_RNA (1)...(19): siRNA sense strand
aagugaaagucgccaagaa

SEQ ID NO: 189447 - RNA, 19 nt, Homo sapiens
  misc_RNA (1)...(19): siRNA sense strand
aaagcaaucuguggauaag

SEQ ID NO: 189448 - RNA, 19 nt, Homo sapiens
  misc_RNA (1)...(19): siRNA sense strand
aagauggcuugucagauga

SEQ ID NO: 189449 - RNA, 19 nt, Homo sapiens
  misc_RNA (1)...(19): siRNA sense strand
gaggcuaaaggaagagauu

SEQ ID NO: 189450 - RNA, 19 nt, Homo sapiens
  misc_RNA (1)...(19): siRNA sense strand
cccacaaacuuaaacauac

SEQ ID NO: 189451 - RNA, 19 nt, Homo sapiens
  misc_RNA (1)...(19): siRNA sense strand
aaacagucaccaaguccua

SEQ ID NO: 189452 - RNA, 19 nt, Homo sapiens
  misc_RNA (1)...(19): siRNA sense strand
gcagaagcaggaggaagaa

SEQ ID NO: 189453 - RNA, 19 nt, Homo sapiens
  misc_RNA (1)...(19): siRNA sense strand
cagaugacaagaaaccauu

SEQ ID NO: 189454 - RNA, 19 nt, Homo sapiens
  misc_RNA (1)...(19): siRNA sense strand
gcuaaaggaagagauugaa

SEQ ID NO: 189455 - RNA, 19 nt, Homo sapiens
  misc_RNA (1)...(19): siRNA sense strand
gacaaagaacccaaagaag

SEQ ID NO: 189456 - RNA, 19 nt, Homo sapiens
  misc_RNA (1)...(19): siRNA sense strand
aagcggaaccucugggaaa

SEQ ID NO: 189457 - RNA, 19 nt, Homo sapiens
  misc_RNA (1)...(19): siRNA sense strand
gaaaggcgaagagcagaag

SEQ ID NO: 189458 - RNA, 19 nt, Homo sapiens
  misc_RNA (1)...(19): siRNA sense strand
gcuggaggaacucaagaaa

SEQ ID NO: 189459 - RNA, 19 nt, Homo sapiens
  misc_RNA (1)...(19): siRNA sense strand
cgaaagaagggauuuacag

SEQ ID NO: 189460 - RNA, 19 nt, Homo sapiens
  misc_RNA (1)...(19): siRNA sense strand
gaaggaguucgacccaaca

SEQ ID NO: 189461 - RNA, 19 nt, Homo sapiens
  misc_RNA (1)...(19): siRNA sense strand
gaagagcgagcagaauuuu

SEQ ID NO: 189462 - RNA, 19 nt, Homo sapiens
  misc_RNA (1)...(19): siRNA sense strand
cuaaaggaagagauugaaa

SEQ ID NO: 189463 - RNA, 19 nt, Homo sapiens
  misc_RNA (1)...(19): siRNA sense strand
uucaugacccacaaacuua

SEQ ID NO: 189464 - RNA, 19 nt, Homo sapiens
  misc_RNA (1)...(19): siRNA sense strand
ccaaagaagaaguuaagag

SEQ ID NO: 189465 - RNA, 19 nt, Homo sapiens
  misc_RNA (1)...(19): siRNA sense strand
aucaaugaauggcuaacua

SEQ ID NO: 189466 - RNA, 19 nt, Homo sapiens
  misc_RNA (1)...(19): siRNA sense strand
gaagauggcuugucagaug

SEQ ID NO: 189467 - RNA, 19 nt, Homo sapiens
  misc_RNA (1)...(19): siRNA sense strand
gaaguuaagucgcagaaug

SEQ ID NO: 189468 - RNA, 19 nt, Homo sapiens
  misc_RNA (1)...(19): siRNA sense strand
ggacaaagaacccaaagaa

SEQ ID NO: 189469 - RNA, 19 nt, Homo sapiens
  misc_RNA (1)...(19): siRNA sense strand
gaagggauuuacagaaguu

SEQ ID NO: 189470 - RNA, 19 nt, Homo sapiens
  misc_RNA (1)...(19): siRNA sense strand
ggaguucgacccaacaaua

SEQ ID NO: 189471 - RNA, 19 nt, Homo sapiens
  misc_RNA (1)...(19): siRNA sense strand
caaagaacccaaagaagaa

SEQ ID NO: 189472 - RNA, 19 nt, Homo sapiens
  misc_RNA (1)...(19): siRNA sense strand
ggagaaagggaauguguuu

SEQ ID NO: 189473 - RNA, 19 nt, Homo sapiens
  misc_RNA (1)...(19): siRNA sense strand
gaagagaagaggaggcuaa

SEQ ID NO: 189474 - RNA, 19 nt, Homo sapiens
  misc_RNA (1)...(19): siRNA sense strand
gaaagaagggauuuacaga

SEQ ID NO: 189475 - RNA, 19 nt, Homo sapiens
  misc_RNA (1)...(19): siRNA sense strand
gaaaagcaguggugucaaa

SEQ ID NO: 189476 - RNA, 19 nt, Homo sapiens
  misc_RNA (1)...(19): siRNA sense strand
ucgagaagcucaaacagaa

SEQ ID NO: 189477 - RNA, 19 nt, Homo sapiens
  misc_RNA (1)...(19): siRNA sense strand
caagucaccugcucccaaa

SEQ ID NO: 189478 - RNA, 19 nt, Homo sapiens
  misc_RNA (1)...(19): siRNA sense strand
gcagcaggcacaccaaaua

SEQ ID NO: 189479 - RNA, 19 nt, Homo sapiens
  misc_RNA (1)...(19): siRNA sense strand
ggaaacugcuggcuugaag

SEQ ID NO: 189480 - RNA, 19 nt, Homo sapiens
  misc_RNA (1)...(19): siRNA sense strand
gaaugacgaugaugaagag

SEQ ID NO: 189481 - RNA, 19 nt, Homo sapiens
  misc_RNA (1)...(19): siRNA sense strand
caagaaagauacgagauag

SEQ ID NO: 189482 - RNA, 19 nt, Homo sapiens
  misc_RNA (1)...(19): siRNA sense strand
caagaaagaagacaaggaa

SEQ ID NO: 189483 - RNA, 19 nt, Homo sapiens
  misc_RNA (1)...(19): siRNA sense strand
gcagaagaaugcaaaauga

SEQ ID NO: 189484 - RNA, 19 nt, Homo sapiens
  misc_RNA (1)...(19): siRNA sense strand
ccaagaaagauacgagaua

SEQ ID NO: 189485 - RNA, 19 nt, Homo sapiens
  misc_RNA (1)...(19): siRNA sense strand
acaaagaacccaaagaaga

SEQ ID NO: 189486 - RNA, 19 nt, Homo sapiens
  misc_RNA (1)...(19): siRNA sense strand
gaaaagcaaucuguggaua

SEQ ID NO: 189487 - RNA, 19 nt, Homo sapiens
  misc_RNA (1)...(19): siRNA sense strand
caagaaaccauucaagugu

SEQ ID NO: 189488 - RNA, 19 nt, Homo sapiens
  misc_RNA (1)...(19): siRNA sense strand
gccagaagaugccagaaga

SEQ ID NO: 189489 - RNA, 19 nt, Homo sapiens
  misc_RNA (1)...(19): siRNA sense strand
guacgcaacaucaagagua

SEQ ID NO: 189490 - RNA, 19 nt, Homo sapiens
  misc_RNA (1)...(19): siRNA sense strand
ucccaaaccuucugacuug

SEQ ID NO: 189491 - RNA, 19 nt, Homo sapiens
  misc_RNA (1)...(19): siRNA sense strand
ggaaugacgaugaugaaga

SEQ ID NO: 189492 - RNA, 19 nt, Homo sapiens
  misc_RNA (1)...(19): siRNA sense strand
gaaagucgccaagaaagau

SEQ ID NO: 189493 - RNA, 19 nt, Homo sapiens
  misc_RNA (1)...(19): siRNA sense strand
gagaauucaugacccacaa

SEQ ID NO: 189494 - RNA, 19 nt, Homo sapiens
  misc_RNA (1)...(19): siRNA sense strand
gauagaagagcgagcagaa

SEQ ID NO: 189495 - RNA, 19 nt, Homo sapiens
  misc_RNA (1)...(19): siRNA sense strand
aagaagaaguuaagagcuu

SEQ ID NO: 189496 - RNA, 19 nt, Homo sapiens
  misc_RNA (1)...(19): siRNA sense strand
gaagaggaggcuaaaggaa

SEQ ID NO: 189497 - RNA, 19 nt, Homo sapiens
  misc_RNA (1)...(19): siRNA sense strand
cgagauagaggaaacagaa

SEQ ID NO: 189498 - RNA, 19 nt, Homo sapiens
  misc_RNA (1)...(19): siRNA sense strand
gaagguguacgcaacauca

SEQ ID NO: 189499 - RNA, 19 nt, Homo sapiens
  misc_RNA (1)...(19): siRNA sense strand
uagaagagcgagcagaauu

SEQ ID NO: 189500 - RNA, 19 nt, Homo sapiens
  misc_RNA (1)...(19): siRNA sense strand
gaguucgacccaacaauaa

SEQ ID NO: 189501 - RNA, 19 nt, Homo sapiens
  misc_RNA (1)...(19): siRNA sense strand
ccuaaagguucaucucuca

SEQ ID NO: 189502 - RNA, 19 nt, Homo sapiens
  misc_RNA (1)...(19): siRNA sense strand
ggaggaagccgaucgaaaa

SEQ ID NO: 189503 - RNA, 19 nt, Homo sapiens
  misc_RNA (1)...(19): siRNA sense strand
gaucgaaagaagggauuua

SEQ ID NO: 189504 - RNA, 19 nt, Homo sapiens
  misc_RNA (1)...(19): siRNA sense strand
gaacccaaagaagaaguua

SEQ ID NO: 189505 - RNA, 19 nt, Homo sapiens
  misc_RNA (1)...(19): siRNA sense strand
cagaaacagucaccaaguc

SEQ ID NO: 189506 - RNA, 19 nt, Homo sapiens
  misc_RNA (1)...(19): siRNA sense strand
caaaccuucugacuugaga

SEQ ID NO: 189507 - RNA, 19 nt, Homo sapiens
  misc_RNA (1)...(19): siRNA sense strand
gagaagaggaggcuaaagg

SEQ ID NO: 189508 - RNA, 19 nt, Homo sapiens
  misc_RNA (1)...(19): siRNA sense strand
ccaaagcgagggagcauug

SEQ ID NO: 189509 - RNA, 19 nt, Homo sapiens
  misc_RNA (1)...(19): siRNA sense strand
gauacgagauagaggaaac

SEQ ID NO: 189510 - RNA, 19 nt, Homo sapiens
  misc_RNA (1)...(19): siRNA sense strand
ucaaugaauggcuaacuaa

SEQ ID NO: 189511 - RNA, 19 nt, Homo sapiens
  misc_RNA (1)...(19): siRNA sense strand
gacaagaaaccauucaagu

SEQ ID NO: 189512 - RNA, 19 nt, Homo sapiens
  misc_RNA (1)...(19): siRNA sense strand
agaggaggcuaaaggaaga

SEQ ID NO: 189513 - RNA, 19 nt, Homo sapiens
  misc_RNA (1)...(19): siRNA sense strand
aagaagggauuuacagaag

SEQ ID NO: 189514 - RNA, 19 nt, Homo sapiens
  misc_RNA (1)...(19): siRNA sense strand
ccagaggaaugacgaugau

SEQ ID NO: 189515 - RNA, 19 nt, Homo sapiens
  misc_RNA (1)...(19): siRNA sense strand
cagcaggcacaccaaauaa

SEQ ID NO: 189516 - RNA, 19 nt, Homo sapiens
  misc_RNA (1)...(19): siRNA sense strand
ccaagacaaccaccacaaa

SEQ ID NO: 189517 - RNA, 19 nt, Homo sapiens
  misc_RNA (1)...(19): siRNA sense strand
ccacaaacuuaaacauacu

SEQ ID NO: 189518 - RNA, 19 nt, Homo sapiens
  misc_RNA (1)...(19): siRNA sense strand
aagaaaccauucaaguguu

SEQ ID NO: 189519 - RNA, 19 nt, Homo sapiens
  misc_RNA (1)...(19): siRNA sense strand
aaagaagggauuuacagaa

SEQ ID NO: 189520 - RNA, 19 nt, Homo sapiens
  misc_RNA (1)...(19): siRNA sense strand
gcaguauaccagugcaauu

SEQ ID NO: 189521 - RNA, 19 nt, Homo sapiens
  misc_RNA (1)...(19): siRNA sense strand
gaggaaugacgaugaugaa

SEQ ID NO: 189522 - RNA, 19 nt, Homo sapiens
  misc_RNA (1)...(19): siRNA sense strand
gcugagaaacgccagaaga

SEQ ID NO: 189523 - RNA, 19 nt, Homo sapiens
  misc_RNA (1)...(19): siRNA sense strand
ccaagcagaagaaugcaaa

SEQ ID NO: 189524 - RNA, 19 nt, Homo sapiens
  misc_RNA (1)...(19): siRNA sense strand
cagcaauagucuccaagau

SEQ ID NO: 189525 - RNA, 19 nt, Homo sapiens
  misc_RNA (1)...(19): siRNA sense strand
acaagaaaccauucaagug

SEQ ID NO: 189526 - RNA, 19 nt, Homo sapiens
  misc_RNA (1)...(19): siRNA sense strand
ucagagaggaggaagagaa

SEQ ID NO: 189527 - RNA, 19 nt, Homo sapiens
  misc_RNA (1)...(19): siRNA sense strand
aaaugaaacuaccgagaag

SEQ ID NO: 189528 - RNA, 19 nt, Homo sapiens
  misc_RNA (1)...(19): siRNA sense strand
ggaggugaaugcccagaac

SEQ ID NO: 189529 - RNA, 19 nt, Homo sapiens
  misc_RNA (1)...(19): siRNA sense strand
ggcagaagcaggaggaaga

SEQ ID NO: 189530 - RNA, 19 nt, Homo sapiens
  misc_RNA (1)...(19): siRNA sense strand
cgagggagcauuggagaaa

SEQ ID NO: 189531 - RNA, 19 nt, Homo sapiens
  misc_RNA (1)...(19): siRNA sense strand
aaacagaaacagucaccaa

SEQ ID NO: 189532 - RNA, 19 nt, Homo sapiens
  misc_RNA (1)...(19): siRNA sense strand
ucaagaguaugugggagaa

SEQ ID NO: 189533 - RNA, 19 nt, Homo sapiens
  misc_RNA (1)...(19): siRNA sense strand
uaaaggaagagauugaaag

SEQ ID NO: 189534 - RNA, 19 nt, Homo sapiens
  misc_RNA (1)...(19): siRNA sense strand
caaugaauggcuaacuaaa

SEQ ID NO: 189535 - RNA, 19 nt, Homo sapiens
  misc_RNA (1)...(19): siRNA sense strand
caaaucgacccaucaagca

SEQ ID NO: 189536 - RNA, 19 nt, Homo sapiens
  misc_RNA (1)...(19): siRNA sense strand
aaagguucaucucucaaga

SEQ ID NO: 189537 - RNA, 19 nt, Homo sapiens
  misc_RNA (1)...(19): siRNA sense strand
cagaagauggcuugucaga

SEQ ID NO: 189538 - RNA, 19 nt, Homo sapiens
  misc_RNA (1)...(19): siRNA sense strand
gagauagaggaaacagaaa

SEQ ID NO: 189539 - RNA, 19 nt, Homo sapiens
  misc_RNA (1)...(19): siRNA sense strand
caggagacguauccagcaa

SEQ ID NO: 189540 - RNA, 19 nt, Homo sapiens
  misc_RNA (1)...(19): siRNA sense strand
gcagcaauagucuccaaga

SEQ ID NO: 189541 - RNA, 19 nt, Homo sapiens
  misc_RNA (1)...(19): siRNA sense strand
agaagagcgagcagaauuu

SEQ ID NO: 189542 - RNA, 19 nt, Homo sapiens
  misc_RNA (1)...(19): siRNA sense strand
ugaaagucgccaagaaaga

SEQ ID NO: 189543 - RNA, 19 nt, Homo sapiens
  misc_RNA (1)...(19): siRNA sense strand
uuggagggaugcugaagaa

SEQ ID NO: 189544 - RNA, 19 nt, Homo sapiens
  misc_RNA (1)...(19): siRNA sense strand
gaggaaacagaaacaguca

SEQ ID NO: 189545 - RNA, 19 nt, Homo sapiens
  misc_RNA (1)...(19): siRNA sense strand
gauagaggaaacagaaaca

SEQ ID NO: 189546 - RNA, 19 nt, Homo sapiens
  misc_RNA (1)...(19): siRNA sense strand
aagugaaagucgccaagaa

SEQ ID NO: 189547 - RNA, 19 nt, Homo sapiens
  misc_RNA (1)...(19): siRNA sense strand
aaagcaaucuguggauaag

SEQ ID NO: 189548 - RNA, 19 nt, Homo sapiens
  misc_RNA (1)...(19): siRNA sense strand
aagauggcuugucagauga

SEQ ID NO: 189549 - RNA, 19 nt, Homo sapiens
  misc_RNA (1)...(19): siRNA sense strand
gaggcuaaaggaagagauu

SEQ ID NO: 189550 - RNA, 19 nt, Homo sapiens
  misc_RNA (1)...(19): siRNA sense strand
cccacaaacuuaaacauac

SEQ ID NO: 189551 - RNA, 19 nt, Homo sapiens
  misc_RNA (1)...(19): siRNA sense strand
aaacagucaccaaguccua

SEQ ID NO: 189552 - RNA, 19 nt, Homo sapiens
  misc_RNA (1)...(19): siRNA sense strand
gcagaagcaggaggaagaa

SEQ ID NO: 189553 - RNA, 19 nt, Homo sapiens
  misc_RNA (1)...(19): siRNA sense strand
cagaugacaagaaaccauu

SEQ ID NO: 189554 - RNA, 19 nt, Homo sapiens
  misc_RNA (1)...(19): siRNA sense strand
gcuaaaggaagagauugaa

SEQ ID NO: 189555 - RNA, 19 nt, Homo sapiens
  misc_RNA (1)...(19): siRNA sense strand
gacaaagaacccaaagaag

SEQ ID NO: 189556 - RNA, 19 nt, Homo sapiens
  misc_RNA (1)...(19): siRNA sense strand
aagcggaaccucugggaaa

SEQ ID NO: 189557 - RNA, 19 nt, Homo sapiens
  misc_RNA (1)...(19): siRNA sense strand
gaaaggcgaagagcagaag

SEQ ID NO: 189558 - RNA, 19 nt, Homo sapiens
  misc_RNA (1)...(19): siRNA sense strand
gcuggaggaacucaagaaa

SEQ ID NO: 189559 - RNA, 19 nt, Homo sapiens
  misc_RNA (1)...(19): siRNA sense strand
cgaaagaagggauuuacag

SEQ ID NO: 189560 - RNA, 19 nt, Homo sapiens
  misc_RNA (1)...(19): siRNA sense strand
gaaggaguucgacccaaca

SEQ ID NO: 189561 - RNA, 19 nt, Homo sapiens
  misc_RNA (1)...(19): siRNA sense strand
gaagagcgagcagaauuuu

SEQ ID NO: 189562 - RNA, 19 nt, Homo sapiens
  misc_RNA (1)...(19): siRNA sense strand
cuaaaggaagagauugaaa

SEQ ID NO: 189563 - RNA, 19 nt, Homo sapiens
  misc_RNA (1)...(19): siRNA sense strand
uucaugacccacaaacuua

SEQ ID NO: 189564 - RNA, 19 nt, Homo sapiens
  misc_RNA (1)...(19): siRNA sense strand
ccaaagaagaaguuaagag

SEQ ID NO: 189565 - RNA, 19 nt, Homo sapiens
  misc_RNA (1)...(19): siRNA sense strand
aucaaugaauggcuaacua

SEQ ID NO: 189566 - RNA, 19 nt, Homo sapiens
  misc_RNA (1)...(19): siRNA sense strand
gaagauggcuugucagaug

SEQ ID NO: 189567 - RNA, 19 nt, Homo sapiens
  misc_RNA (1)...(19): siRNA sense strand
gaaguuaagucgcagaaug

SEQ ID NO: 189568 - RNA, 19 nt, Homo sapiens
  misc_RNA (1)...(19): siRNA sense strand
ggacaaagaacccaaagaa

SEQ ID NO: 189569 - RNA, 19 nt, Homo sapiens
  misc_RNA (1)...(19): siRNA sense strand
gaagggauuuacagaaguu

SEQ ID NO: 189570 - RNA, 19 nt, Homo sapiens
  misc_RNA (1)...(19): siRNA sense strand
ggaguucgacccaacaaua

SEQ ID NO: 189571 - RNA, 19 nt, Homo sapiens
  misc_RNA (1)...(19): siRNA sense strand
caaagaacccaaagaagaa

SEQ ID NO: 189572 - RNA, 19 nt, Homo sapiens
  misc_RNA (1)...(19): siRNA sense strand
ggagaaagggaauguguuu

SEQ ID NO: 189573 - RNA, 19 nt, Homo sapiens
  misc_RNA (1)...(19): siRNA sense strand
gaagagaagaggaggcuaa

SEQ ID NO: 189574 - RNA, 19 nt, Homo sapiens
  misc_RNA (1)...(19): siRNA sense strand
gaaagaagggauuuacaga

SEQ ID NO: 189575 - RNA, 19 nt, Homo sapiens
  misc_RNA (1)...(19): siRNA sense strand
gaaaagcaguggugucaaa

SEQ ID NO: 189576 - RNA, 19 nt, Homo sapiens
  misc_RNA (1)...(19): siRNA sense strand
ucgagaagcucaaacagaa

SEQ ID NO: 189577 - RNA, 19 nt, Homo sapiens
  misc_RNA (1)...(19): siRNA sense strand
caagucaccugcucccaaa

SEQ ID NO: 189578 - RNA, 19 nt, Homo sapiens
  misc_RNA (1)...(19): siRNA sense strand
gcagcaggcacaccaaaua

SEQ ID NO: 189579 - RNA, 19 nt, Homo sapiens
  misc_RNA (1)...(19): siRNA sense strand
ggaaacugcuggcuugaag

SEQ ID NO: 189580 - RNA, 19 nt, Homo sapiens
  misc_RNA (1)...(19): siRNA sense strand
gaaugacgaugaugaagag

SEQ ID NO: 189581 - RNA, 19 nt, Homo sapiens
  misc_RNA (1)...(19): siRNA sense strand
caagaaagauacgagauag

SEQ ID NO: 189582 - RNA, 19 nt, Homo sapiens
  misc_RNA (1)...(19): siRNA sense strand
caagaaagaagacaaggaa

SEQ ID NO: 189583 - RNA, 19 nt, Homo sapiens
  misc_RNA (1)...(19): siRNA sense strand
gcagaagaaugcaaaauga

SEQ ID NO: 189584 - RNA, 19 nt, Homo sapiens
  misc_RNA (1)...(19): siRNA sense strand
ccaagaaagauacgagaua

SEQ ID NO: 189585 - RNA, 19 nt, Homo sapiens
  misc_RNA (1)...(19): siRNA sense strand
acaaagaacccaaagaaga

SEQ ID NO: 189586 - RNA, 19 nt, Homo sapiens
  misc_RNA (1)...(19): siRNA sense strand
gaaaagcaaucuguggaua

SEQ ID NO: 189587 - RNA, 19 nt, Homo sapiens
  misc_RNA (1)...(19): siRNA sense strand
caagaaaccauucaagugu

SEQ ID NO: 189588 - RNA, 19 nt, Homo sapiens
  misc_RNA (1)...(19): siRNA sense strand
gccagaagaugccagaaga

SEQ ID NO: 189589 - RNA, 19 nt, Homo sapiens
  misc_RNA (1)...(19): siRNA sense strand
guacgcaacaucaagagua

SEQ ID NO: 189590 - RNA, 19 nt, Homo sapiens
  misc_RNA (1)...(19): siRNA sense strand
ucccaaaccuucugacuug

SEQ ID NO: 189591 - RNA, 19 nt, Homo sapiens
  misc_RNA (1)...(19): siRNA sense strand
ggaaugacgaugaugaaga

SEQ ID NO: 189592 - RNA, 19 nt, Homo sapiens
  misc_RNA (1)...(19): siRNA sense strand
gaaagucgccaagaaagau

SEQ ID NO: 189593 - RNA, 19 nt, Homo sapiens
  misc_RNA (1)...(19): siRNA sense strand
gagaauucaugacccacaa

SEQ ID NO: 189594 - RNA, 19 nt, Homo sapiens
  misc_RNA (1)...(19): siRNA sense strand
gauagaagagcgagcagaa

SEQ ID NO: 189595 - RNA, 19 nt, Homo sapiens
  misc_RNA (1)...(19): siRNA sense strand
aagaagaaguuaagagcuu

SEQ ID NO: 189596 - RNA, 19 nt, Homo sapiens
  misc_RNA (1)...(19): siRNA sense strand
gaagaggaggcuaaaggaa

SEQ ID NO: 189597 - RNA, 19 nt, Homo sapiens
  misc_RNA (1)...(19): siRNA sense strand
cgagauagaggaaacagaa

SEQ ID NO: 189598 - RNA, 19 nt, Homo sapiens
  misc_RNA (1)...(19): siRNA sense strand
gaagguguacgcaacauca

SEQ ID NO: 189599 - RNA, 19 nt, Homo sapiens
  misc_RNA (1)...(19): siRNA sense strand
uagaagagcgagcagaauu

SEQ ID NO: 189600 - RNA, 19 nt, Homo sapiens
  misc_RNA (1)...(19): siRNA sense strand
gaguucgacccaacaauaa

SEQ ID NO: 189601 - RNA, 19 nt, Homo sapiens
  misc_RNA (1)...(19): siRNA sense strand
ccuaaagguucaucucuca

SEQ ID NO: 189602 - RNA, 19 nt, Homo sapiens
  misc_RNA (1)...(19): siRNA sense strand
ggaggaagccgaucgaaaa

SEQ ID NO: 189603 - RNA, 19 nt, Homo sapiens
  misc_RNA (1)...(19): siRNA sense strand
gaucgaaagaagggauuua

SEQ ID NO: 189604 - RNA, 19 nt, Homo sapiens
  misc_RNA (1)...(19): siRNA sense strand
gaacccaaagaagaaguua

SEQ ID NO: 189605 - RNA, 19 nt, Homo sapiens
  misc_RNA (1)...(19): siRNA sense strand
cagaaacagucaccaaguc

SEQ ID NO: 189606 - RNA, 19 nt, Homo sapiens
  misc_RNA (1)...(19): siRNA sense strand
caaaccuucugacuugaga

SEQ ID NO: 189607 - RNA, 19 nt, Homo sapiens
  misc_RNA (1)...(19): siRNA sense strand
gagaagaggaggcuaaagg

SEQ ID NO: 189608 - RNA, 19 nt, Homo sapiens
  misc_RNA (1)...(19): siRNA sense strand
ccaaagcgagggagcauug

SEQ ID NO: 189609 - RNA, 19 nt, Homo sapiens
  misc_RNA (1)...(19): siRNA sense strand
gauacgagauagaggaaac

SEQ ID NO: 189610 - RNA, 19 nt, Homo sapiens
  misc_RNA (1)...(19): siRNA sense strand
ucaaugaauggcuaacuaa

SEQ ID NO: 189611 - RNA, 19 nt, Homo sapiens
  misc_RNA (1)...(19): siRNA sense strand
gacaagaaaccauucaagu

SEQ ID NO: 189612 - RNA, 19 nt, Homo sapiens
  misc_RNA (1)...(19): siRNA sense strand
agaggaggcuaaaggaaga

SEQ ID NO: 189613 - RNA, 19 nt, Homo sapiens
  misc_RNA (1)...(19): siRNA sense strand
aagaagggauuuacagaag

SEQ ID NO: 189614 - RNA, 19 nt, Homo sapiens
  misc_RNA (1)...(19): siRNA sense strand
ccagaggaaugacgaugau

SEQ ID NO: 189615 - RNA, 19 nt, Homo sapiens
  misc_RNA (1)...(19): siRNA sense strand
cagcaggcacaccaaauaa

SEQ ID NO: 189616 - RNA, 19 nt, Homo sapiens
  misc_RNA (1)...(19): siRNA sense strand
ccaagacaaccaccacaaa

SEQ ID NO: 189617 - RNA, 19 nt, Homo sapiens
  misc_RNA (1)...(19): siRNA sense strand
ccacaaacuuaaacauacu

SEQ ID NO: 189618 - RNA, 19 nt, Homo sapiens
  misc_RNA (1)...(19): siRNA sense strand
aagaaaccauucaaguguu

SEQ ID NO: 189619 - RNA, 19 nt, Homo sapiens
  misc_RNA (1)...(19): siRNA sense strand
aaagaagggauuuacagaa

SEQ ID NO: 189620 - RNA, 19 nt, Homo sapiens
  misc_RNA (1)...(19): siRNA sense strand
gcaguauaccagugcaauu

SEQ ID NO: 189621 - RNA, 19 nt, Homo sapiens
  misc_RNA (1)...(19): siRNA sense strand
gaggaaugacgaugaugaa

SEQ ID NO: 189622 - RNA, 19 nt, Homo sapiens
  misc_RNA (1)...(19): siRNA sense strand
gcugagaaacgccagaaga

SEQ ID NO: 189623 - RNA, 19 nt, Homo sapiens
  misc_RNA (1)...(19): siRNA sense strand
ccaagcagaagaaugcaaa

SEQ ID NO: 189624 - RNA, 19 nt, Homo sapiens
  misc_RNA (1)...(19): siRNA sense strand
cagcaauagucuccaagau

SEQ ID NO: 189625 - RNA, 19 nt, Homo sapiens
  misc_RNA (1)...(19): siRNA sense strand
acaagaaaccauucaagug

SEQ ID NO: 189626 - RNA, 19 nt, Homo sapiens
  misc_RNA (1)...(19): siRNA sense strand
ucagagaggaggaagagaa

SEQ ID NO: 189627 - RNA, 19 nt, Homo sapiens
  misc_RNA (1)...(19): siRNA sense strand
aaaugaaacuaccgagaag

SEQ ID NO: 189628 - RNA, 19 nt, Homo sapiens
  misc_RNA (1)...(19): siRNA sense strand
ggaggugaaugcccagaac

SEQ ID NO: 189629 - RNA, 19 nt, Homo sapiens
  misc_RNA (1)...(19): siRNA sense strand
ggcagaagcaggaggaaga

SEQ ID NO: 189630 - RNA, 19 nt, Homo sapiens
  misc_RNA (1)...(19): siRNA sense strand
cgagggagcauuggagaaa

SEQ ID NO: 189631 - RNA, 19 nt, Homo sapiens
  misc_RNA (1)...(19): siRNA sense strand
aaacagaaacagucaccaa

SEQ ID NO: 189632 - RNA, 19 nt, Homo sapiens
  misc_RNA (1)...(19): siRNA sense strand
ucaagaguaugugggagaa

SEQ ID NO: 189633 - RNA, 19 nt, Homo sapiens
  misc_RNA (1)...(19): siRNA sense strand
uaaaggaagagauugaaag

SEQ ID NO: 189634 - RNA, 19 nt, Homo sapiens
  misc_RNA (1)...(19): siRNA sense strand
caaugaauggcuaacuaaa

SEQ ID NO: 189635 - RNA, 19 nt, Homo sapiens
  misc_RNA (1)...(19): siRNA sense strand
caaaucgacccaucaagca

SEQ ID NO: 189636 - RNA, 19 nt, Homo sapiens
  misc_RNA (1)...(19): siRNA sense strand
aaagguucaucucucaaga

SEQ ID NO: 189637 - RNA, 19 nt, Homo sapiens
  misc_RNA (1)...(19): siRNA sense strand
cagaagauggcuugucaga

SEQ ID NO: 189638 - RNA, 19 nt, Homo sapiens
  misc_RNA (1)...(19): siRNA sense strand
gagauagaggaaacagaaa

SEQ ID NO: 189639 - RNA, 19 nt, Homo sapiens
  misc_RNA (1)...(19): siRNA sense strand
caggagacguauccagcaa

SEQ ID NO: 189640 - RNA, 19 nt, Homo sapiens
  misc_RNA (1)...(19): siRNA sense strand
gcagcaauagucuccaaga

SEQ ID NO: 189641 - RNA, 19 nt, Homo sapiens
  misc_RNA (1)...(19): siRNA sense strand
agaagagcgagcagaauuu

SEQ ID NO: 189642 - RNA, 19 nt, Homo sapiens
  misc_RNA (1)...(19): siRNA sense strand
ugaaagucgccaagaaaga

SEQ ID NO: 189643 - RNA, 19 nt, Homo sapiens
  misc_RNA (1)...(19): siRNA sense strand
uuggagggaugcugaagaa

SEQ ID NO: 189644 - RNA, 19 nt, Homo sapiens
  misc_RNA (1)...(19): siRNA sense strand
gaggaaacagaaacaguca

SEQ ID NO: 189645 - RNA, 19 nt, Homo sapiens
  misc_RNA (1)...(19): siRNA sense strand
gauagaggaaacagaaaca

SEQ ID NO: 189646 - RNA, 19 nt, Homo sapiens
  misc_RNA (1)...(19): siRNA sense strand
aagugaaagucgccaagaa

SEQ ID NO: 189647 - RNA, 19 nt, Homo sapiens
  misc_RNA (1)...(19): siRNA sense strand
aaagcaaucuguggauaag

SEQ ID NO: 189648 - RNA, 19 nt, Homo sapiens
  misc_RNA (1)...(19): siRNA sense strand
aagauggcuugucagauga

SEQ ID NO: 189649 - RNA, 19 nt, Homo sapiens
  misc_RNA (1)...(19): siRNA sense strand
gaggcuaaaggaagagauu

SEQ ID NO: 189650 - RNA, 19 nt, Homo sapiens
  misc_RNA (1)...(19): siRNA sense strand
cccacaaacuuaaacauac

SEQ ID NO: 189651 - RNA, 19 nt, Homo sapiens
  misc_RNA (1)...(19): siRNA sense strand
aaacagucaccaaguccua

SEQ ID NO: 189652 - RNA, 19 nt, Homo sapiens
  misc_RNA (1)...(19): siRNA sense strand
gcagaagcaggaggaagaa

SEQ ID NO: 189653 - RNA, 19 nt, Homo sapiens
  misc_RNA (1)...(19): siRNA sense strand
cagaugacaagaaaccauu

SEQ ID NO: 189654 - RNA, 19 nt, Homo sapiens
  misc_RNA (1)...(19): siRNA sense strand
gcuaaaggaagagauugaa

SEQ ID NO: 189655 - RNA, 19 nt, Homo sapiens
  misc_RNA (1)...(19): siRNA sense strand
gacaaagaacccaaagaag

SEQ ID NO: 189656 - RNA, 19 nt, Homo sapiens
  misc_RNA (1)...(19): siRNA sense strand
aagcggaaccucugggaaa

SEQ ID NO: 189657 - RNA, 19 nt, Homo sapiens
  misc_RNA (1)...(19): siRNA sense strand
gaaaggcgaagagcagaag

SEQ ID NO: 189658 - RNA, 19 nt, Homo sapiens
  misc_RNA (1)...(19): siRNA sense strand
gcuggaggaacucaagaaa

SEQ ID NO: 189659 - RNA, 19 nt, Homo sapiens
  misc_RNA (1)...(19): siRNA sense strand
cgaaagaagggauuuacag

SEQ ID NO: 189660 - RNA, 19 nt, Homo sapiens
  misc_RNA (1)...(19): siRNA sense strand
gaaggaguucgacccaaca

SEQ ID NO: 189661 - RNA, 19 nt, Homo sapiens
  misc_RNA (1)...(19): siRNA sense strand
gaagagcgagcagaauuuu

SEQ ID NO: 189662 - RNA, 19 nt, Homo sapiens
  misc_RNA (1)...(19): siRNA sense strand
cuaaaggaagagauugaaa

SEQ ID NO: 189663 - RNA, 19 nt, Homo sapiens
  misc_RNA (1)...(19): siRNA sense strand
uucaugacccacaaacuua

SEQ ID NO: 189664 - RNA, 19 nt, Homo sapiens
  misc_RNA (1)...(19): siRNA sense strand
ccaaagaagaaguuaagag

SEQ ID NO: 189665 - RNA, 19 nt, Homo sapiens
  misc_RNA (1)...(19): siRNA sense strand
aucaaugaauggcuaacua

SEQ ID NO: 189666 - RNA, 19 nt, Homo sapiens
  misc_RNA (1)...(19): siRNA sense strand
gaagauggcuugucagaug

SEQ ID NO: 189667 - RNA, 19 nt, Homo sapiens
  misc_RNA (1)...(19): siRNA sense strand
gaaguuaagucgcagaaug

SEQ ID NO: 189668 - RNA, 19 nt, Homo sapiens
  misc_RNA (1)...(19): siRNA sense strand
ggacaaagaacccaaagaa

SEQ ID NO: 189669 - RNA, 19 nt, Homo sapiens
  misc_RNA (1)...(19): siRNA sense strand
gaagggauuuacagaaguu

SEQ ID NO: 189670 - RNA, 19 nt, Homo sapiens
  misc_RNA (1)...(19): siRNA sense strand
ggaguucgacccaacaaua

SEQ ID NO: 189671 - RNA, 19 nt, Homo sapiens
  misc_RNA (1)...(19): siRNA sense strand
caaagaacccaaagaagaa

SEQ ID NO: 189672 - RNA, 19 nt, Homo sapiens
  misc_RNA (1)...(19): siRNA sense strand
ggagaaagggaauguguuu

SEQ ID NO: 189673 - RNA, 19 nt, Homo sapiens
  misc_RNA (1)...(19): siRNA sense strand
gaagagaagaggaggcuaa

SEQ ID NO: 189674 - RNA, 19 nt, Homo sapiens
  misc_RNA (1)...(19): siRNA sense strand
gaaagaagggauuuacaga

SEQ ID NO: 189675 - RNA, 19 nt, Homo sapiens
  misc_RNA (1)...(19): siRNA sense strand
gaaaagcaguggugucaaa

SEQ ID NO: 189676 - RNA, 19 nt, Homo sapiens
  misc_RNA (1)...(19): siRNA sense strand
ucgagaagcucaaacagaa

SEQ ID NO: 189677 - RNA, 19 nt, Homo sapiens
  misc_RNA (1)...(19): siRNA sense strand
caagucaccugcucccaaa

SEQ ID NO: 189678 - RNA, 19 nt, Homo sapiens
  misc_RNA (1)...(19): siRNA sense strand
gcagcaggcacaccaaaua

SEQ ID NO: 189679 - RNA, 19 nt, Homo sapiens
  misc_RNA (1)...(19): siRNA sense strand
ggaaacugcuggcuugaag

SEQ ID NO: 189680 - RNA, 19 nt, Homo sapiens
  misc_RNA (1)...(19): siRNA sense strand
gaaugacgaugaugaagag

SEQ ID NO: 189681 - RNA, 19 nt, Homo sapiens
  misc_RNA (1)...(19): siRNA sense strand
caagaaagauacgagauag

SEQ ID NO: 189682 - RNA, 19 nt, Homo sapiens
  misc_RNA (1)...(19): siRNA sense strand
caagaaagaagacaaggaa

SEQ ID NO: 189683 - RNA, 19 nt, Homo sapiens
  misc_RNA (1)...(19): siRNA sense strand
gcagaagaaugcaaaauga

SEQ ID NO: 189684 - RNA, 19 nt, Homo sapiens
  misc_RNA (1)...(19): siRNA sense strand
ccaagaaagauacgagaua

SEQ ID NO: 189685 - RNA, 19 nt, Homo sapiens
  misc_RNA (1)...(19): siRNA sense strand
acaaagaacccaaagaaga

SEQ ID NO: 189686 - RNA, 19 nt, Homo sapiens
  misc_RNA (1)...(19): siRNA sense strand
gaaaagcaaucuguggaua

SEQ ID NO: 189687 - RNA, 19 nt, Homo sapiens
  misc_RNA (1)...(19): siRNA sense strand
caagaaaccauucaagugu

SEQ ID NO: 189688 - RNA, 19 nt, Homo sapiens
  misc_RNA (1)...(19): siRNA sense strand
gccagaagaugccagaaga

SEQ ID NO: 189689 - RNA, 19 nt, Homo sapiens
  misc_RNA (1)...(19): siRNA sense strand
guacgcaacaucaagagua

SEQ ID NO: 189690 - RNA, 19 nt, Homo sapiens
  misc_RNA (1)...(19): siRNA sense strand
ucccaaaccuucugacuug

SEQ ID NO: 189691 - RNA, 19 nt, Homo sapiens
  misc_RNA (1)...(19): siRNA sense strand
ggaaugacgaugaugaaga

SEQ ID NO: 189692 - RNA, 19 nt, Homo sapiens
  misc_RNA (1)...(19): siRNA sense strand
gaaagucgccaagaaagau

SEQ ID NO: 189693 - RNA, 19 nt, Homo sapiens
  misc_RNA (1)...(19): siRNA sense strand
gagaauucaugacccacaa

SEQ ID NO: 189694 - RNA, 19 nt, Homo sapiens
  misc_RNA (1)...(19): siRNA sense strand
gauagaagagcgagcagaa

SEQ ID NO: 189695 - RNA, 19 nt, Homo sapiens
  misc_RNA (1)...(19): siRNA sense strand
aagaagaaguuaagagcuu

SEQ ID NO: 189696 - RNA, 19 nt, Homo sapiens
  misc_RNA (1)...(19): siRNA sense strand
gaagaggaggcuaaaggaa

SEQ ID NO: 189697 - RNA, 19 nt, Homo sapiens
  misc_RNA (1)...(19): siRNA sense strand
cgagauagaggaaacagaa

SEQ ID NO: 189698 - RNA, 19 nt, Homo sapiens
  misc_RNA (1)...(19): siRNA sense strand
gaagguguacgcaacauca

SEQ ID NO: 189699 - RNA, 19 nt, Homo sapiens
  misc_RNA (1)...(19): siRNA sense strand
uagaagagcgagcagaauu

SEQ ID NO: 189700 - RNA, 19 nt, Homo sapiens
  misc_RNA (1)...(19): siRNA sense strand
gaguucgacccaacaauaa

SEQ ID NO: 189701 - RNA, 19 nt, Homo sapiens
  misc_RNA (1)...(19): siRNA sense strand
ccuaaagguucaucucuca

SEQ ID NO: 189702 - RNA, 19 nt, Homo sapiens
  misc_RNA (1)...(19): siRNA sense strand
ggaggaagccgaucgaaaa

SEQ ID NO: 189703 - RNA, 19 nt, Homo sapiens
  misc_RNA (1)...(19): siRNA sense strand
gaucgaaagaagggauuua

SEQ ID NO: 189704 - RNA, 19 nt, Homo sapiens
  misc_RNA (1)...(19): siRNA sense strand
gaacccaaagaagaaguua

SEQ ID NO: 189705 - RNA, 19 nt, Homo sapiens
  misc_RNA (1)...(19): siRNA sense strand
cagaaacagucaccaaguc

SEQ ID NO: 189706 - RNA, 19 nt, Homo sapiens
  misc_RNA (1)...(19): siRNA sense strand
caaaccuucugacuugaga

SEQ ID NO: 189707 - RNA, 19 nt, Homo sapiens
  misc_RNA (1)...(19): siRNA sense strand
gagaagaggaggcuaaagg

SEQ ID NO: 189708 - RNA, 19 nt, Homo sapiens
  misc_RNA (1)...(19): siRNA sense strand
ccaaagcgagggagcauug

SEQ ID NO: 189709 - RNA, 19 nt, Homo sapiens
  misc_RNA (1)...(19): siRNA sense strand
gauacgagauagaggaaac

SEQ ID NO: 189710 - RNA, 19 nt, Homo sapiens
  misc_RNA (1)...(19): siRNA sense strand
ucaaugaauggcuaacuaa

SEQ ID NO: 189711 - RNA, 19 nt, Homo sapiens
  misc_RNA (1)...(19): siRNA sense strand
gacaagaaaccauucaagu

SEQ ID NO: 189712 - RNA, 19 nt, Homo sapiens
  misc_RNA (1)...(19): siRNA sense strand
agaggaggcuaaaggaaga

SEQ ID NO: 189713 - RNA, 19 nt, Homo sapiens
  misc_RNA (1)...(19): siRNA sense strand
aagaagggauuuacagaag

SEQ ID NO: 189714 - RNA, 19 nt, Homo sapiens
  misc_RNA (1)...(19): siRNA sense strand
ccagaggaaugacgaugau

SEQ ID NO: 189715 - RNA, 19 nt, Homo sapiens
  misc_RNA (1)...(19): siRNA sense strand
cagcaggcacaccaaauaa

SEQ ID NO: 189716 - RNA, 19 nt, Homo sapiens
  misc_RNA (1)...(19): siRNA sense strand
ccaagacaaccaccacaaa

SEQ ID NO: 189717 - RNA, 19 nt, Homo sapiens
  misc_RNA (1)...(19): siRNA sense strand
ccacaaacuuaaacauacu

SEQ ID NO: 189718 - RNA, 19 nt, Homo sapiens
  misc_RNA (1)...(19): siRNA sense strand
aagaaaccauucaaguguu

SEQ ID NO: 189719 - RNA, 19 nt, Homo sapiens
  misc_RNA (1)...(19): siRNA sense strand
aaagaagggauuuacagaa

SEQ ID NO: 189720 - RNA, 19 nt, Homo sapiens
  misc_RNA (1)...(19): siRNA sense strand
gcaguauaccagugcaauu

SEQ ID NO: 189721 - RNA, 19 nt, Homo sapiens
  misc_RNA (1)...(19): siRNA sense strand
gaggaaugacgaugaugaa

SEQ ID NO: 189722 - RNA, 19 nt, Homo sapiens
  misc_RNA (1)...(19): siRNA sense strand
gcugagaaacgccagaaga

SEQ ID NO: 189723 - RNA, 19 nt, Homo sapiens
  misc_RNA (1)...(19): siRNA sense strand
ccaagcagaagaaugcaaa

SEQ ID NO: 189724 - RNA, 19 nt, Homo sapiens
  misc_RNA (1)...(19): siRNA sense strand
cagcaauagucuccaagau

SEQ ID NO: 189725 - RNA, 19 nt, Homo sapiens
  misc_RNA (1)...(19): siRNA sense strand
acaagaaaccauucaagug

SEQ ID NO: 189726 - RNA, 19 nt, Homo sapiens
  misc_RNA (1)...(19): siRNA sense strand
ucagagaggaggaagagaa

SEQ ID NO: 189727 - RNA, 19 nt, Homo sapiens
  misc_RNA (1)...(19): siRNA sense strand
aaaugaaacuaccgagaag

SEQ ID NO: 189728 - RNA, 19 nt, Homo sapiens
  misc_RNA (1)...(19): siRNA sense strand
ggaggugaaugcccagaac

SEQ ID NO: 189729 - RNA, 19 nt, Homo sapiens
  misc_RNA (1)...(19): siRNA sense strand
ggcagaagcaggaggaaga

SEQ ID NO: 189730 - RNA, 19 nt, Homo sapiens
  misc_RNA (1)...(19): siRNA sense strand
cgagggagcauuggagaaa

SEQ ID NO: 189731 - RNA, 19 nt, Homo sapiens
  misc_RNA (1)...(19): siRNA sense strand
aaacagaaacagucaccaa

SEQ ID NO: 189732 - RNA, 19 nt, Homo sapiens
  misc_RNA (1)...(19): siRNA sense strand
ucaagaguaugugggagaa

SEQ ID NO: 189733 - RNA, 19 nt, Homo sapiens
  misc_RNA (1)...(19): siRNA sense strand
uaaaggaagagauugaaag

SEQ ID NO: 189734 - RNA, 19 nt, Homo sapiens
  misc_RNA (1)...(19): siRNA sense strand
caaugaauggcuaacuaaa

SEQ ID NO: 189735 - RNA, 19 nt, Homo sapiens
  misc_RNA (1)...(19): siRNA sense strand
caaaucgacccaucaagca

SEQ ID NO: 189736 - RNA, 19 nt, Homo sapiens
  misc_RNA (1)...(19): siRNA sense strand
aaagguucaucucucaaga

SEQ ID NO: 189737 - RNA, 19 nt, Homo sapiens
  misc_RNA (1)...(19): siRNA sense strand
cagaagauggcuugucaga

SEQ ID NO: 189738 - RNA, 19 nt, Homo sapiens
  misc_RNA (1)...(19): siRNA sense strand
gagauagaggaaacagaaa

SEQ ID NO: 189739 - RNA, 19 nt, Homo sapiens
  misc_RNA (1)...(19): siRNA sense strand
caggagacguauccagcaa

SEQ ID NO: 189740 - RNA, 19 nt, Homo sapiens
  misc_RNA (1)...(19): siRNA sense strand
gcagcaauagucuccaaga

SEQ ID NO: 189741 - RNA, 19 nt, Homo sapiens
  misc_RNA (1)...(19): siRNA sense strand
agaagagcgagcagaauuu

SEQ ID NO: 189742 - RNA, 19 nt, Homo sapiens
  misc_RNA (1)...(19): siRNA sense strand
ugaaagucgccaagaaaga

SEQ ID NO: 189743 - RNA, 19 nt, Homo sapiens
  misc_RNA (1)...(19): siRNA sense strand
uuggagggaugcugaagaa

SEQ ID NO: 189744 - RNA, 19 nt, Homo sapiens
  misc_RNA (1)...(19): siRNA sense strand
gaggaaacagaaacaguca

SEQ ID NO: 189745 - RNA, 19 nt, Homo sapiens
  misc_RNA (1)...(19): siRNA sense strand
gauagaggaaacagaaaca

SEQ ID NO: 189746 - RNA, 19 nt, Homo sapiens
  misc_RNA (1)...(19): siRNA sense strand
aagugaaagucgccaagaa

SEQ ID NO: 189747 - RNA, 19 nt, Homo sapiens
  misc_RNA (1)...(19): siRNA sense strand
aaagcaaucuguggauaag

SEQ ID NO: 189748 - RNA, 19 nt, Homo sapiens
  misc_RNA (1)...(19): siRNA sense strand
aagauggcuugucagauga

SEQ ID NO: 189749 - RNA, 19 nt, Homo sapiens
  misc_RNA (1)...(19): siRNA sense strand
gaggcuaaaggaagagauu

SEQ ID NO: 189750 - RNA, 19 nt, Homo sapiens
  misc_RNA (1)...(19): siRNA sense strand
cccacaaacuuaaacauac

SEQ ID NO: 189751 - RNA, 19 nt, Homo sapiens
  misc_RNA (1)...(19): siRNA sense strand
aaacagucaccaaguccua

SEQ ID NO: 189752 - RNA, 19 nt, Homo sapiens
  misc_RNA (1)...(19): siRNA sense strand
gcagaagcaggaggaagaa

SEQ ID NO: 189753 - RNA, 19 nt, Homo sapiens
  misc_RNA (1)...(19): siRNA sense strand
cagaugacaagaaaccauu

SEQ ID NO: 189754 - RNA, 19 nt, Homo sapiens
  misc_RNA (1)...(19): siRNA sense strand
gcuaaaggaagagauugaa

SEQ ID NO: 189755 - RNA, 19 nt, Homo sapiens
  misc_RNA (1)...(19): siRNA sense strand
gacaaagaacccaaagaag

SEQ ID NO: 189756 - RNA, 19 nt, Homo sapiens
  misc_RNA (1)...(19): siRNA sense strand
aagcggaaccucugggaaa

SEQ ID NO: 189757 - RNA, 19 nt, Homo sapiens
  misc_RNA (1)...(19): siRNA sense strand
gaaaggcgaagagcagaag

SEQ ID NO: 189758 - RNA, 19 nt, Homo sapiens
  misc_RNA (1)...(19): siRNA sense strand
gcuggaggaacucaagaaa

SEQ ID NO: 189759 - RNA, 19 nt, Homo sapiens
  misc_RNA (1)...(19): siRNA sense strand
cgaaagaagggauuuacag

SEQ ID NO: 189760 - RNA, 19 nt, Homo sapiens
  misc_RNA (1)...(19): siRNA sense strand
gaaggaguucgacccaaca

SEQ ID NO: 189761 - RNA, 19 nt, Homo sapiens
  misc_RNA (1)...(19): siRNA sense strand
gaagagcgagcagaauuuu

SEQ ID NO: 189762 - RNA, 19 nt, Homo sapiens
  misc_RNA (1)...(19): siRNA sense strand
cuaaaggaagagauugaaa

SEQ ID NO: 189763 - RNA, 19 nt, Homo sapiens
  misc_RNA (1)...(19): siRNA sense strand
uucaugacccacaaacuua

SEQ ID NO: 189764 - RNA, 19 nt, Homo sapiens
  misc_RNA (1)...(19): siRNA sense strand
ccaaagaagaaguuaagag

SEQ ID NO: 189765 - RNA, 19 nt, Homo sapiens
  misc_RNA (1)...(19): siRNA sense strand
aucaaugaauggcuaacua

SEQ ID NO: 189766 - RNA, 19 nt, Homo sapiens
  misc_RNA (1)...(19): siRNA sense strand
caaguggccuucaccauua

SEQ ID NO: 189767 - RNA, 19 nt, Homo sapiens
  misc_RNA (1)...(19): siRNA sense strand
gcaaguggccuucaccauu

SEQ ID NO: 189768 - RNA, 19 nt, Homo sapiens
  misc_RNA (1)...(19): siRNA sense strand
gaaggcagcccugggugua

SEQ ID NO: 189769 - RNA, 19 nt, Homo sapiens
  misc_RNA (1)...(19): siRNA sense strand
ggaagcggcugacggaacu

SEQ ID NO: 189770 - RNA, 19 nt, Homo sapiens
  misc_RNA (1)...(19): siRNA sense strand
acaacgggcuuccugagaa

SEQ ID NO: 189771 - RNA, 19 nt, Homo sapiens
  misc_RNA (1)...(19): siRNA sense strand
uuaaggagcuucgggagau

SEQ ID NO: 189772 - RNA, 19 nt, Homo sapiens
  misc_RNA (1)...(19): siRNA sense strand
gugcugcccucaccagaug

SEQ ID NO: 189773 - RNA, 19 nt, Homo sapiens
  misc_RNA (1)...(19): siRNA sense strand
ugaagaaugucaucaacac

SEQ ID NO: 189774 - RNA, 19 nt, Homo sapiens
  misc_RNA (1)...(19): siRNA sense strand
ucagcagcauuggguauaa

SEQ ID NO: 189775 - RNA, 19 nt, Homo sapiens
  misc_RNA (1)...(19): siRNA sense strand
ggugaagaaugucaucaac

SEQ ID NO: 189776 - RNA, 19 nt, Homo sapiens
  misc_RNA (1)...(19): siRNA sense strand
gagcuucugccaccauuuc

SEQ ID NO: 189777 - RNA, 19 nt, Homo sapiens
  misc_RNA (1)...(19): siRNA sense strand
gaagaaugucaucaacaca

SEQ ID NO: 189778 - RNA, 19 nt, Homo sapiens
  misc_RNA (1)...(19): siRNA sense strand
gaagacaguguggcuagug

SEQ ID NO: 189779 - RNA, 19 nt, Homo sapiens
  misc_RNA (1)...(19): siRNA sense strand
gacccaagcgugcccuuug

SEQ ID NO: 189780 - RNA, 19 nt, Homo sapiens
  misc_RNA (1)...(19): siRNA sense strand
caacgggcuuccugagaac

SEQ ID NO: 189781 - RNA, 19 nt, Homo sapiens
  misc_RNA (1)...(19): siRNA sense strand
agccagaccugagcuguga

SEQ ID NO: 189782 - RNA, 19 nt, Homo sapiens
  misc_RNA (1)...(19): siRNA sense strand
gagcuucgggagaugauuc

SEQ ID NO: 189783 - RNA, 19 nt, Homo sapiens
  misc_RNA (1)...(19): siRNA sense strand
ggacaucuacgagaaacag

SEQ ID NO: 189784 - RNA, 19 nt, Homo sapiens
  misc_RNA (1)...(19): siRNA sense strand
ugacacagccgugauucug

SEQ ID NO: 189785 - RNA, 19 nt, Homo sapiens
  misc_RNA (1)...(19): siRNA sense strand
gacuggagggugucgauga

SEQ ID NO: 189786 - RNA, 19 nt, Homo sapiens
  misc_RNA (1)...(19): siRNA sense strand
gaggcagagucgagugaag

SEQ ID NO: 189787 - RNA, 19 nt, Homo sapiens
  misc_RNA (1)...(19): siRNA sense strand
gcucagcagcauuggguau

SEQ ID NO: 189788 - RNA, 19 nt, Homo sapiens
  misc_RNA (1)...(19): siRNA sense strand
agagaacggacaucacgaa

SEQ ID NO: 189789 - RNA, 19 nt, Homo sapiens
  misc_RNA (1)...(19): siRNA sense strand
caaccaugacugacagcuu

SEQ ID NO: 189790 - RNA, 19 nt, Homo sapiens
  misc_RNA (1)...(19): siRNA sense strand
cauggaagaccucccuugu

SEQ ID NO: 189791 - RNA, 19 nt, Homo sapiens
  misc_RNA (1)...(19): siRNA sense strand
uucgggagaugauucaguu

SEQ ID NO: 189792 - RNA, 19 nt, Homo sapiens
  misc_RNA (1)...(19): siRNA sense strand
acccaagcgugcccuuuga

SEQ ID NO: 189793 - RNA, 19 nt, Homo sapiens
  misc_RNA (1)...(19): siRNA sense strand
uaaggagcuucgggagaug

SEQ ID NO: 189794 - RNA, 19 nt, Homo sapiens
  misc_RNA (1)...(19): siRNA sense strand
ccacgggagacauggaaga

SEQ ID NO: 189795 - RNA, 19 nt, Homo sapiens
  misc_RNA (1)...(19): siRNA sense strand
uggcccagcuggcuucuac

SEQ ID NO: 189796 - RNA, 19 nt, Homo sapiens
  misc_RNA (1)...(19): siRNA sense strand
gugaagagaggaccuacag

SEQ ID NO: 189797 - RNA, 19 nt, Homo sapiens
  misc_RNA (1)...(19): siRNA sense strand
aaguggccuucaccauuaa

SEQ ID NO: 189798 - RNA, 19 nt, Homo sapiens
  misc_RNA (1)...(19): siRNA sense strand
gugaagaaugucaucaaca

SEQ ID NO: 189799 - RNA, 19 nt, Homo sapiens
  misc_RNA (1)...(19): siRNA sense strand
ccgagcuucugccaccauu

SEQ ID NO: 189800 - RNA, 19 nt, Homo sapiens
  misc_RNA (1)...(19): siRNA sense strand
acgcuguggugcugagcua

SEQ ID NO: 189801 - RNA, 19 nt, Homo sapiens
  misc_RNA (1)...(19): siRNA sense strand
cagcagcauuggguauaag

SEQ ID NO: 189802 - RNA, 19 nt, Homo sapiens
  misc_RNA (1)...(19): siRNA sense strand
gcccaacaccugcuaaagc

SEQ ID NO: 189803 - RNA, 19 nt, Homo sapiens
  misc_RNA (1)...(19): siRNA sense strand
caaguggccuucaccauua

SEQ ID NO: 189804 - RNA, 19 nt, Homo sapiens
  misc_RNA (1)...(19): siRNA sense strand
gcaaguggccuucaccauu

SEQ ID NO: 189805 - RNA, 19 nt, Homo sapiens
  misc_RNA (1)...(19): siRNA sense strand
gaaggcagcccugggugua

SEQ ID NO: 189806 - RNA, 19 nt, Homo sapiens
  misc_RNA (1)...(19): siRNA sense strand
ggaagcggcugacggaacu

SEQ ID NO: 189807 - RNA, 19 nt, Homo sapiens
  misc_RNA (1)...(19): siRNA sense strand
acaacgggcuuccugagaa

SEQ ID NO: 189808 - RNA, 19 nt, Homo sapiens
  misc_RNA (1)...(19): siRNA sense strand
uuaaggagcuucgggagau

SEQ ID NO: 189809 - RNA, 19 nt, Homo sapiens
  misc_RNA (1)...(19): siRNA sense strand
gugcugcccucaccagaug

SEQ ID NO: 189810 - RNA, 19 nt, Homo sapiens
  misc_RNA (1)...(19): siRNA sense strand
ugaagaaugucaucaacac

SEQ ID NO: 189811 - RNA, 19 nt, Homo sapiens
  misc_RNA (1)...(19): siRNA sense strand
ucagcagcauuggguauaa

SEQ ID NO: 189812 - RNA, 19 nt, Homo sapiens
  misc_RNA (1)...(19): siRNA sense strand
ggugaagaaugucaucaac

SEQ ID NO: 189813 - RNA, 19 nt, Homo sapiens
  misc_RNA (1)...(19): siRNA sense strand
gagcuucugccaccauuuc

SEQ ID NO: 189814 - RNA, 19 nt, Homo sapiens
  misc_RNA (1)...(19): siRNA sense strand
gaagaaugucaucaacaca

SEQ ID NO: 189815 - RNA, 19 nt, Homo sapiens
  misc_RNA (1)...(19): siRNA sense strand
gaagacaguguggcuagug

SEQ ID NO: 189816 - RNA, 19 nt, Homo sapiens
  misc_RNA (1)...(19): siRNA sense strand
gacccaagcgugcccuuug

SEQ ID NO: 189817 - RNA, 19 nt, Homo sapiens
  misc_RNA (1)...(19): siRNA sense strand
caacgggcuuccugagaac

SEQ ID NO: 189818 - RNA, 19 nt, Homo sapiens
  misc_RNA (1)...(19): siRNA sense strand
agccagaccugagcuguga

SEQ ID NO: 189819 - RNA, 19 nt, Homo sapiens
  misc_RNA (1)...(19): siRNA sense strand
gagcuucgggagaugauuc

SEQ ID NO: 189820 - RNA, 19 nt, Homo sapiens
  misc_RNA (1)...(19): siRNA sense strand
ggacaucuacgagaaacag

SEQ ID NO: 189821 - RNA, 19 nt, Homo sapiens
  misc_RNA (1)...(19): siRNA sense strand
ugacacagccgugauucug

SEQ ID NO: 189822 - RNA, 19 nt, Homo sapiens
  misc_RNA (1)...(19): siRNA sense strand
gacuggagggugucgauga

SEQ ID NO: 189823 - RNA, 19 nt, Homo sapiens
  misc_RNA (1)...(19): siRNA sense strand
gaggcagagucgagugaag

SEQ ID NO: 189824 - RNA, 19 nt, Homo sapiens
  misc_RNA (1)...(19): siRNA sense strand
gcucagcagcauuggguau

SEQ ID NO: 189825 - RNA, 19 nt, Homo sapiens
  misc_RNA (1)...(19): siRNA sense strand
agagaacggacaucacgaa

SEQ ID NO: 189826 - RNA, 19 nt, Homo sapiens
  misc_RNA (1)...(19): siRNA sense strand
caaccaugacugacagcuu

SEQ ID NO: 189827 - RNA, 19 nt, Homo sapiens
  misc_RNA (1)...(19): siRNA sense strand
cauggaagaccucccuugu

SEQ ID NO: 189828 - RNA, 19 nt, Homo sapiens
  misc_RNA (1)...(19): siRNA sense strand
uucgggagaugauucaguu

SEQ ID NO: 189829 - RNA, 19 nt, Homo sapiens
  misc_RNA (1)...(19): siRNA sense strand
acccaagcgugcccuuuga

SEQ ID NO: 189830 - RNA, 19 nt, Homo sapiens
  misc_RNA (1)...(19): siRNA sense strand
uaaggagcuucgggagaug

SEQ ID NO: 189831 - RNA, 19 nt, Homo sapiens
  misc_RNA (1)...(19): siRNA sense strand
ccacgggagacauggaaga

SEQ ID NO: 189832 - RNA, 19 nt, Homo sapiens
  misc_RNA (1)...(19): siRNA sense strand
uggcccagcuggcuucuac

SEQ ID NO: 189833 - RNA, 19 nt, Homo sapiens
  misc_RNA (1)...(19): siRNA sense strand
gugaagagaggaccuacag

SEQ ID NO: 189834 - RNA, 19 nt, Homo sapiens
  misc_RNA (1)...(19): siRNA sense strand
aaguggccuucaccauuaa

SEQ ID NO: 189835 - RNA, 19 nt, Homo sapiens
  misc_RNA (1)...(19): siRNA sense strand
gugaagaaugucaucaaca

SEQ ID NO: 189836 - RNA, 19 nt, Homo sapiens
  misc_RNA (1)...(19): siRNA sense strand
ccgagcuucugccaccauu

SEQ ID NO: 189837 - RNA, 19 nt, Homo sapiens
  misc_RNA (1)...(19): siRNA sense strand
acgcuguggugcugagcua

SEQ ID NO: 189838 - RNA, 19 nt, Homo sapiens
  misc_RNA (1)...(19): siRNA sense strand
cagcagcauuggguauaag

SEQ ID NO: 189839 - RNA, 19 nt, Homo sapiens
  misc_RNA (1)...(19): siRNA sense strand
gcccaacaccugcuaaagc

SEQ ID NO: 189840 - RNA, 19 nt, Homo sapiens
  misc_RNA (1)...(19): siRNA sense strand
gagcggagcccauccuuug

SEQ ID NO: 189841 - RNA, 19 nt, Homo sapiens
  misc_RNA (1)...(19): siRNA sense strand
ggacuacuauggaccuuca

SEQ ID NO: 189842 - RNA, 19 nt, Homo sapiens
  misc_RNA (1)...(19): siRNA sense strand
gcaaggugguggagugcuu

SEQ ID NO: 189843 - RNA, 19 nt, Homo sapiens
  misc_RNA (1)...(19): siRNA sense strand
gaagaucucgguccagaag

SEQ ID NO: 189844 - RNA, 19 nt, Homo sapiens
  misc_RNA (1)...(19): siRNA sense strand
uaccugagcuaccgaugga

SEQ ID NO: 189845 - RNA, 19 nt, Homo sapiens
  misc_RNA (1)...(19): siRNA sense strand
gaagggagacugcgauacc

SEQ ID NO: 189846 - RNA, 19 nt, Homo sapiens
  misc_RNA (1)...(19): siRNA sense strand
gccgugacagcgauacaua

SEQ ID NO: 189847 - RNA, 19 nt, Homo sapiens
  misc_RNA (1)...(19): siRNA sense strand
cuauggaccuucacguucu

SEQ ID NO: 189848 - RNA, 19 nt, Homo sapiens
  misc_RNA (1)...(19): siRNA sense strand
gcccaccacugccacaaac

SEQ ID NO: 189849 - RNA, 19 nt, Homo sapiens
  misc_RNA (1)...(19): siRNA sense strand
auacauaccggugugaaga

SEQ ID NO: 189850 - RNA, 19 nt, Homo sapiens
  misc_RNA (1)...(19): siRNA sense strand
gauacauaccggugugaag

SEQ ID NO: 189851 - RNA, 19 nt, Homo sapiens
  misc_RNA (1)...(19): siRNA sense strand
gcggagcccauccuuugga

SEQ ID NO: 189852 - RNA, 19 nt, Homo sapiens
  misc_RNA (1)...(19): siRNA sense strand
ccaggaagcagaaauauuu

SEQ ID NO: 189853 - RNA, 19 nt, Homo sapiens
  misc_RNA (1)...(19): siRNA sense strand
agaauaacuuccagccuua

SEQ ID NO: 189854 - RNA, 19 nt, Homo sapiens
  misc_RNA (1)...(19): siRNA sense strand
gcaagaacaccuuugaguu

SEQ ID NO: 189855 - RNA, 19 nt, Homo sapiens
  misc_RNA (1)...(19): siRNA sense strand
gagcggagcccauccuuug

SEQ ID NO: 189856 - RNA, 19 nt, Homo sapiens
  misc_RNA (1)...(19): siRNA sense strand
ggacuacuauggaccuuca

SEQ ID NO: 189857 - RNA, 19 nt, Homo sapiens
  misc_RNA (1)...(19): siRNA sense strand
ugaggaggauguuagaauu

SEQ ID NO: 189858 - RNA, 19 nt, Homo sapiens
  misc_RNA (1)...(19): siRNA sense strand
gagaaucagcugacccaua

SEQ ID NO: 189859 - RNA, 19 nt, Homo sapiens
  misc_RNA (1)...(19): siRNA sense strand
uugaaacccucuacaauga

SEQ ID NO: 189860 - RNA, 19 nt, Homo sapiens
  misc_RNA (1)...(19): siRNA sense strand
gaggagaagucagugaaga

SEQ ID NO: 189861 - RNA, 19 nt, Homo sapiens
  misc_RNA (1)...(19): siRNA sense strand
guaccaggaagcagaaaua

SEQ ID NO: 189862 - RNA, 19 nt, Homo sapiens
  misc_RNA (1)...(19): siRNA sense strand
gcaaggugguggagugcuu

SEQ ID NO: 189863 - RNA, 19 nt, Homo sapiens
  misc_RNA (1)...(19): siRNA sense strand
ggaggauguuagaauuuga

SEQ ID NO: 189864 - RNA, 19 nt, Homo sapiens
  misc_RNA (1)...(19): siRNA sense strand
agaaucagcugacccauac

SEQ ID NO: 189865 - RNA, 19 nt, Homo sapiens
  misc_RNA (1)...(19): siRNA sense strand
gaagaucucgguccagaag

SEQ ID NO: 189866 - RNA, 19 nt, Homo sapiens
  misc_RNA (1)...(19): siRNA sense strand
gaggaggauguuagaauuu

SEQ ID NO: 189867 - RNA, 19 nt, Homo sapiens
  misc_RNA (1)...(19): siRNA sense strand
ucaaggagaaggacaaaga

SEQ ID NO: 189868 - RNA, 19 nt, Homo sapiens
  misc_RNA (1)...(19): siRNA sense strand
agaguuacaugcuccaaga

SEQ ID NO: 189869 - RNA, 19 nt, Homo sapiens
  misc_RNA (1)...(19): siRNA sense strand
gcugcauucucuuugagua

SEQ ID NO: 189870 - RNA, 19 nt, Homo sapiens
  misc_RNA (1)...(19): siRNA sense strand
gaaaucaacgugcucaaaa

SEQ ID NO: 189871 - RNA, 19 nt, Homo sapiens
  misc_RNA (1)...(19): siRNA sense strand
guuugugaauucugaguuu

SEQ ID NO: 189872 - RNA, 19 nt, Homo sapiens
  misc_RNA (1)...(19): siRNA sense strand
gagcaccacaccaccauug

SEQ ID NO: 189873 - RNA, 19 nt, Homo sapiens
  misc_RNA (1)...(19): siRNA sense strand
gccgguaugugaaggagaa

SEQ ID NO: 189874 - RNA, 19 nt, Homo sapiens
  misc_RNA (1)...(19): siRNA sense strand
caacuuccacggucacaug

SEQ ID NO: 189875 - RNA, 19 nt, Homo sapiens
  misc_RNA (1)...(19): siRNA sense strand
cgccugaggugauccuuga

SEQ ID NO: 189876 - RNA, 19 nt, Homo sapiens
  misc_RNA (1)...(19): siRNA sense strand
gaacugcaaaccucugaag

SEQ ID NO: 189877 - RNA, 19 nt, Homo sapiens
  misc_RNA (1)...(19): siRNA sense strand
gcagcuguuugaccugaug

SEQ ID NO: 189878 - RNA, 19 nt, Homo sapiens
  misc_RNA (1)...(19): siRNA sense strand
uaccugagcuaccgaugga

SEQ ID NO: 189879 - RNA, 19 nt, Homo sapiens
  misc_RNA (1)...(19): siRNA sense strand
caaggagaaggacaaagaa

SEQ ID NO: 189880 - RNA, 19 nt, Homo sapiens
  misc_RNA (1)...(19): siRNA sense strand
gcauucucuuugaguacua

SEQ ID NO: 189881 - RNA, 19 nt, Homo sapiens
  misc_RNA (1)...(19): siRNA sense strand
gcugacccauacagacuug

SEQ ID NO: 189882 - RNA, 19 nt, Homo sapiens
  misc_RNA (1)...(19): siRNA sense strand
gagaacugcaaaccucuga

SEQ ID NO: 189883 - RNA, 19 nt, Homo sapiens
  misc_RNA (1)...(19): siRNA sense strand
caagagcugugaggagaag

SEQ ID NO: 189884 - RNA, 19 nt, Homo sapiens
  misc_RNA (1)...(19): siRNA sense strand
ggacaaagaaaacaaguuc

SEQ ID NO: 189885 - RNA, 19 nt, Homo sapiens
  misc_RNA (1)...(19): siRNA sense strand
ugugacgucuggagcauug

SEQ ID NO: 189886 - RNA, 19 nt, Homo sapiens
  misc_RNA (1)...(19): siRNA sense strand
ucacaugugcaucgccuuu

SEQ ID NO: 189887 - RNA, 19 nt, Homo sapiens
  misc_RNA (1)...(19): siRNA sense strand
gggaugagaacagcucuga

SEQ ID NO: 189888 - RNA, 19 nt, Homo sapiens
  misc_RNA (1)...(19): siRNA sense strand
ggcaagaacaccuuugagu

SEQ ID NO: 189889 - RNA, 19 nt, Homo sapiens
  misc_RNA (1)...(19): siRNA sense strand
aggaggauguuagaauuug

SEQ ID NO: 189890 - RNA, 19 nt, Homo sapiens
  misc_RNA (1)...(19): siRNA sense strand
guuccugugugucuugaug

SEQ ID NO: 189891 - RNA, 19 nt, Homo sapiens
  misc_RNA (1)...(19): siRNA sense strand
gaagggagacugcgauacc

SEQ ID NO: 189892 - RNA, 19 nt, Homo sapiens
  misc_RNA (1)...(19): siRNA sense strand
gccgugacagcgauacaua

SEQ ID NO: 189893 - RNA, 19 nt, Homo sapiens
  misc_RNA (1)...(19): siRNA sense strand
acaugugcaucgccuuuga

SEQ ID NO: 189894 - RNA, 19 nt, Homo sapiens
  misc_RNA (1)...(19): siRNA sense strand
agaaaucaacgugcucaaa

SEQ ID NO: 189895 - RNA, 19 nt, Homo sapiens
  misc_RNA (1)...(19): siRNA sense strand
gugccacauuugaccauga

SEQ ID NO: 189896 - RNA, 19 nt, Homo sapiens
  misc_RNA (1)...(19): siRNA sense strand
cuauggaccuucacguucu

SEQ ID NO: 189897 - RNA, 19 nt, Homo sapiens
  misc_RNA (1)...(19): siRNA sense strand
cauccgaguggcugacuuu

SEQ ID NO: 189898 - RNA, 19 nt, Homo sapiens
  misc_RNA (1)...(19): siRNA sense strand
cugccacgcccuuagauuu

SEQ ID NO: 189899 - RNA, 19 nt, Homo sapiens
  misc_RNA (1)...(19): siRNA sense strand
gcccaucccaucacacaug

SEQ ID NO: 189900 - RNA, 19 nt, Homo sapiens
  misc_RNA (1)...(19): siRNA sense strand
uuugaaacccucuacaaug

SEQ ID NO: 189901 - RNA, 19 nt, Homo sapiens
  misc_RNA (1)...(19): siRNA sense strand
gugaggagaagucagugaa

SEQ ID NO: 189902 - RNA, 19 nt, Homo sapiens
  misc_RNA (1)...(19): siRNA sense strand
gaccugaugaggaggaugu

SEQ ID NO: 189903 - RNA, 19 nt, Homo sapiens
  misc_RNA (1)...(19): siRNA sense strand
gcccaccacugccacaaac

SEQ ID NO: 189904 - RNA, 19 nt, Homo sapiens
  misc_RNA (1)...(19): siRNA sense strand
gaaggagaacugcaaaccu

SEQ ID NO: 189905 - RNA, 19 nt, Homo sapiens
  misc_RNA (1)...(19): siRNA sense strand
gaugauggagaagauccua

SEQ ID NO: 189906 - RNA, 19 nt, Homo sapiens
  misc_RNA (1)...(19): siRNA sense strand
gcucugccacgcccuuaga

SEQ ID NO: 189907 - RNA, 19 nt, Homo sapiens
  misc_RNA (1)...(19): siRNA sense strand
gagaagucagugaagaaca

SEQ ID NO: 189908 - RNA, 19 nt, Homo sapiens
  misc_RNA (1)...(19): siRNA sense strand
ugugaauucugaguuugaa

SEQ ID NO: 189909 - RNA, 19 nt, Homo sapiens
  misc_RNA (1)...(19): siRNA sense strand
aaaacaaguuccugugugu

SEQ ID NO: 189910 - RNA, 19 nt, Homo sapiens
  misc_RNA (1)...(19): siRNA sense strand
gagcacgugcagcuguuug

SEQ ID NO: 189911 - RNA, 19 nt, Homo sapiens
  misc_RNA (1)...(19): siRNA sense strand
auacauaccggugugaaga

SEQ ID NO: 189912 - RNA, 19 nt, Homo sapiens
  misc_RNA (1)...(19): siRNA sense strand
gcugugaggagaagucagu

SEQ ID NO: 189913 - RNA, 19 nt, Homo sapiens
  misc_RNA (1)...(19): siRNA sense strand
cccaucccaucacacauga

SEQ ID NO: 189914 - RNA, 19 nt, Homo sapiens
  misc_RNA (1)...(19): siRNA sense strand
agcauuggcugcauucucu

SEQ ID NO: 189915 - RNA, 19 nt, Homo sapiens
  misc_RNA (1)...(19): siRNA sense strand
gagcauuggcugcauucuc

SEQ ID NO: 189916 - RNA, 19 nt, Homo sapiens
  misc_RNA (1)...(19): siRNA sense strand
ggagaagucagugaagaac

SEQ ID NO: 189917 - RNA, 19 nt, Homo sapiens
  misc_RNA (1)...(19): siRNA sense strand
gacccauacagacuugaaa

SEQ ID NO: 189918 - RNA, 19 nt, Homo sapiens
  misc_RNA (1)...(19): siRNA sense strand
agaagucagugaagaacac

SEQ ID NO: 189919 - RNA, 19 nt, Homo sapiens
  misc_RNA (1)...(19): siRNA sense strand
gcggagcccauccuuugga

SEQ ID NO: 189920 - RNA, 19 nt, Homo sapiens
  misc_RNA (1)...(19): siRNA sense strand
ccgcaacccaagcagauga

SEQ ID NO: 189921 - RNA, 19 nt, Homo sapiens
  misc_RNA (1)...(19): siRNA sense strand
gaagaguuacaugcuccaa

SEQ ID NO: 189922 - RNA, 19 nt, Homo sapiens
  misc_RNA (1)...(19): siRNA sense strand
gauacauaccggugugaag

SEQ ID NO: 189923 - RNA, 19 nt, Homo sapiens
  misc_RNA (1)...(19): siRNA sense strand
gcauccgaguggcugacuu

SEQ ID NO: 189924 - RNA, 19 nt, Homo sapiens
  misc_RNA (1)...(19): siRNA sense strand
gaugaggaggauguuagaa

SEQ ID NO: 189925 - RNA, 19 nt, Homo sapiens
  misc_RNA (1)...(19): siRNA sense strand
ugaaaucguuagcaccuua

SEQ ID NO: 189926 - RNA, 19 nt, Homo sapiens
  misc_RNA (1)...(19): siRNA sense strand
ggagaugccuacuaugaca

SEQ ID NO: 189927 - RNA, 19 nt, Homo sapiens
  misc_RNA (1)...(19): siRNA sense strand
gaagguaccacuccucaga

SEQ ID NO: 189928 - RNA, 19 nt, Homo sapiens
  misc_RNA (1)...(19): siRNA sense strand
ggaguuaccgugaacacua

SEQ ID NO: 189929 - RNA, 19 nt, Homo sapiens
  misc_RNA (1)...(19): siRNA sense strand
gcuacagacgcaacgauua

SEQ ID NO: 189930 - RNA, 19 nt, Homo sapiens
  misc_RNA (1)...(19): siRNA sense strand
gaguuaccgugaacacuau

SEQ ID NO: 189931 - RNA, 19 nt, Homo sapiens
  misc_RNA (1)...(19): siRNA sense strand
agaagucgcuccuggucaa

SEQ ID NO: 189932 - RNA, 19 nt, Homo sapiens
  misc_RNA (1)...(19): siRNA sense strand
aggcgcagccggacauuua

SEQ ID NO: 189933 - RNA, 19 nt, Homo sapiens
  misc_RNA (1)...(19): siRNA sense strand
aagcauaagcgacgaagaa

SEQ ID NO: 189934 - RNA, 19 nt, Homo sapiens
  misc_RNA (1)...(19): siRNA sense strand
gacacagacuaucggcauu

SEQ ID NO: 189935 - RNA, 19 nt, Homo sapiens
  misc_RNA (1)...(19): siRNA sense strand
cuacagacgcaacgauuau

SEQ ID NO: 189936 - RNA, 19 nt, Homo sapiens
  misc_RNA (1)...(19): siRNA sense strand
gagaggacagcuaccaugu

SEQ ID NO: 189937 - RNA, 19 nt, Homo sapiens
  misc_RNA (1)...(19): siRNA sense strand
cauaagcgacgaagaaguc

SEQ ID NO: 189938 - RNA, 19 nt, Homo sapiens
  misc_RNA (1)...(19): siRNA sense strand
ucucgaagcaguuaugaug

SEQ ID NO: 189939 - RNA, 19 nt, Homo sapiens
  misc_RNA (1)...(19): siRNA sense strand
ucgaagcaguuaugaugau

SEQ ID NO: 189940 - RNA, 19 nt, Homo sapiens
  misc_RNA (1)...(19): siRNA sense strand
cagacuaucggcauuccua

SEQ ID NO: 189941 - RNA, 19 nt, Homo sapiens
  misc_RNA (1)...(19): siRNA sense strand
acauuuagccgcucaucuu

SEQ ID NO: 189942 - RNA, 19 nt, Homo sapiens
  misc_RNA (1)...(19): siRNA sense strand
uaccauguccguucucgaa

SEQ ID NO: 189943 - RNA, 19 nt, Homo sapiens
  misc_RNA (1)...(19): siRNA sense strand
cgaagcaguuaugaugauc

SEQ ID NO: 189944 - RNA, 19 nt, Homo sapiens
  misc_RNA (1)...(19): siRNA sense strand
gaauaucagcgggagaaca

SEQ ID NO: 189945 - RNA, 19 nt, Homo sapiens
  misc_RNA (1)...(19): siRNA sense strand
agucgcuccuggucaagua

SEQ ID NO: 189946 - RNA, 19 nt, Homo sapiens
  misc_RNA (1)...(19): siRNA sense strand
ggggagaugccuacuauga

SEQ ID NO: 189947 - RNA, 19 nt, Homo sapiens
  misc_RNA (1)...(19): siRNA sense strand
gaaaucguuagcaccuuag

SEQ ID NO: 189948 - RNA, 19 nt, Homo sapiens
  misc_RNA (1)...(19): siRNA sense strand
cagcuaccauguccguucu

SEQ ID NO: 189949 - RNA, 19 nt, Homo sapiens
  misc_RNA (1)...(19): siRNA sense strand
acuaucggcauuccuauga

SEQ ID NO: 189950 - RNA, 19 nt, Homo sapiens
  misc_RNA (1)...(19): siRNA sense strand
gcauaagcgacgaagaagu

SEQ ID NO: 189951 - RNA, 19 nt, Homo sapiens
  misc_RNA (1)...(19): siRNA sense strand
cuacuaugacacagacuau

SEQ ID NO: 189952 - RNA, 19 nt, Homo sapiens
  misc_RNA (1)...(19): siRNA sense strand
cuaucggcauuccuaugaa

SEQ ID NO: 189953 - RNA, 19 nt, Homo sapiens
  misc_RNA (1)...(19): siRNA sense strand
gaaagacccugacaacaag

SEQ ID NO: 189954 - RNA, 19 nt, Homo sapiens
  misc_RNA (1)...(19): siRNA sense strand
uuaagaauguggagaagua

SEQ ID NO: 189955 - RNA, 19 nt, Homo sapiens
  misc_RNA (1)...(19): siRNA sense strand
gauaacaagcugacacaua

SEQ ID NO: 189956 - RNA, 19 nt, Homo sapiens
  misc_RNA (1)...(19): siRNA sense strand
ugaaaucguuagcaccuua

SEQ ID NO: 189957 - RNA, 19 nt, Homo sapiens
  misc_RNA (1)...(19): siRNA sense strand
ggaagcagcucgacuugag

SEQ ID NO: 189958 - RNA, 19 nt, Homo sapiens
  misc_RNA (1)...(19): siRNA sense strand
ucaaguuccuccaugauaa

SEQ ID NO: 189959 - RNA, 19 nt, Homo sapiens
  misc_RNA (1)...(19): siRNA sense strand
ggagaugccuacuaugaca

SEQ ID NO: 189960 - RNA, 19 nt, Homo sapiens
  misc_RNA (1)...(19): siRNA sense strand
ccacauguguaucuccuuu

SEQ ID NO: 189961 - RNA, 19 nt, Homo sapiens
  misc_RNA (1)...(19): siRNA sense strand
gaagguaccacuccucaga

SEQ ID NO: 189962 - RNA, 19 nt, Homo sapiens
  misc_RNA (1)...(19): siRNA sense strand
ggaguuaccgugaacacua

SEQ ID NO: 189963 - RNA, 19 nt, Homo sapiens
  misc_RNA (1)...(19): siRNA sense strand
acuaugagcucaccuacaa

SEQ ID NO: 189964 - RNA, 19 nt, Homo sapiens
  misc_RNA (1)...(19): siRNA sense strand
agaaagacccugacaacaa

SEQ ID NO: 189965 - RNA, 19 nt, Homo sapiens
  misc_RNA (1)...(19): siRNA sense strand
caccuucgauuuccucaaa

SEQ ID NO: 189966 - RNA, 19 nt, Homo sapiens
  misc_RNA (1)...(19): siRNA sense strand
agacaagaaagcagaaaua

SEQ ID NO: 189967 - RNA, 19 nt, Homo sapiens
  misc_RNA (1)...(19): siRNA sense strand
caccagaagucauccuuga

SEQ ID NO: 189968 - RNA, 19 nt, Homo sapiens
  misc_RNA (1)...(19): siRNA sense strand
gaucaacgugcuagagaaa

SEQ ID NO: 189969 - RNA, 19 nt, Homo sapiens
  misc_RNA (1)...(19): siRNA sense strand
gcuacagacgcaacgauua

SEQ ID NO: 189970 - RNA, 19 nt, Homo sapiens
  misc_RNA (1)...(19): siRNA sense strand
aaagcaugcuagaguauga

SEQ ID NO: 189971 - RNA, 19 nt, Homo sapiens
  misc_RNA (1)...(19): siRNA sense strand
gcucuucgaucugauugaa

SEQ ID NO: 189972 - RNA, 19 nt, Homo sapiens
  misc_RNA (1)...(19): siRNA sense strand
gagagcaucuagccaugau

SEQ ID NO: 189973 - RNA, 19 nt, Homo sapiens
  misc_RNA (1)...(19): siRNA sense strand
gaguuaccgugaacacuau

SEQ ID NO: 189974 - RNA, 19 nt, Homo sapiens
  misc_RNA (1)...(19): siRNA sense strand
gaaagacaagaaagcagaa

SEQ ID NO: 189975 - RNA, 19 nt, Homo sapiens
  misc_RNA (1)...(19): siRNA sense strand
ccuacaaccuagagaagaa

SEQ ID NO: 189976 - RNA, 19 nt, Homo sapiens
  misc_RNA (1)...(19): siRNA sense strand
caaggaagcagcucgacuu

SEQ ID NO: 189977 - RNA, 19 nt, Homo sapiens
  misc_RNA (1)...(19): siRNA sense strand
auaacaagcugacacauac

SEQ ID NO: 189978 - RNA, 19 nt, Homo sapiens
  misc_RNA (1)...(19): siRNA sense strand
agaagucgcuccuggucaa

SEQ ID NO: 189979 - RNA, 19 nt, Homo sapiens
  misc_RNA (1)...(19): siRNA sense strand
gagaucaacgugcuagaga

SEQ ID NO: 189980 - RNA, 19 nt, Homo sapiens
  misc_RNA (1)...(19): siRNA sense strand
caccagcucuucgaucuga

SEQ ID NO: 189981 - RNA, 19 nt, Homo sapiens
  misc_RNA (1)...(19): siRNA sense strand
gacaagaaagcagaaauau

SEQ ID NO: 189982 - RNA, 19 nt, Homo sapiens
  misc_RNA (1)...(19): siRNA sense strand
gcugcaucaucuuugaaua

SEQ ID NO: 189983 - RNA, 19 nt, Homo sapiens
  misc_RNA (1)...(19): siRNA sense strand
gugccaggcugucaaguuc

SEQ ID NO: 189984 - RNA, 19 nt, Homo sapiens
  misc_RNA (1)...(19): siRNA sense strand
gaccuucggccgaguugua

SEQ ID NO: 189985 - RNA, 19 nt, Homo sapiens
  misc_RNA (1)...(19): siRNA sense strand
uugaaagcaugcuagagua

SEQ ID NO: 189986 - RNA, 19 nt, Homo sapiens
  misc_RNA (1)...(19): siRNA sense strand
cagaagucauccuugaguu

SEQ ID NO: 189987 - RNA, 19 nt, Homo sapiens
  misc_RNA (1)...(19): siRNA sense strand
gaguauaggcugcaucauc

SEQ ID NO: 189988 - RNA, 19 nt, Homo sapiens
  misc_RNA (1)...(19): siRNA sense strand
ccagacccaugacaacaga

SEQ ID NO: 189989 - RNA, 19 nt, Homo sapiens
  misc_RNA (1)...(19): siRNA sense strand
aggcgcagccggacauuua

SEQ ID NO: 189990 - RNA, 19 nt, Homo sapiens
  misc_RNA (1)...(19): siRNA sense strand
gacacagacuaucggcauu

SEQ ID NO: 189991 - RNA, 19 nt, Homo sapiens
  misc_RNA (1)...(19): siRNA sense strand
gaaagcaugcuagaguaug

SEQ ID NO: 189992 - RNA, 19 nt, Homo sapiens
  misc_RNA (1)...(19): siRNA sense strand
ggccuuagcaccuucgauu

SEQ ID NO: 189993 - RNA, 19 nt, Homo sapiens
  misc_RNA (1)...(19): siRNA sense strand
aagcauaagcgacgaagaa

SEQ ID NO: 189994 - RNA, 19 nt, Homo sapiens
  misc_RNA (1)...(19): siRNA sense strand
cccugaagaucauuaagaa

SEQ ID NO: 189995 - RNA, 19 nt, Homo sapiens
  misc_RNA (1)...(19): siRNA sense strand
gagaugagcgcagugugaa

SEQ ID NO: 189996 - RNA, 19 nt, Homo sapiens
  misc_RNA (1)...(19): siRNA sense strand
gcaucaucuuugaauacua

SEQ ID NO: 189997 - RNA, 19 nt, Homo sapiens
  misc_RNA (1)...(19): siRNA sense strand
gucaaguuccuccaugaua

SEQ ID NO: 189998 - RNA, 19 nt, Homo sapiens
  misc_RNA (1)...(19): siRNA sense strand
ggauugggaugagaacaca

SEQ ID NO: 189999 - RNA, 19 nt, Homo sapiens
  misc_RNA (1)...(19): siRNA sense strand
cuacagacgcaacgauuau

SEQ ID NO: 190000 - RNA, 19 nt, Homo sapiens
  misc_RNA (1)...(19): siRNA sense strand
cgagaugagcgcaguguga

SEQ ID NO: 190001 - RNA, 19 nt, Homo sapiens
  misc_RNA (1)...(19): siRNA sense strand
gagaaagacccugacaaca

SEQ ID NO: 190002 - RNA, 19 nt, Homo sapiens
  misc_RNA (1)...(19): siRNA sense strand
cggccgaguuguacaaugu

SEQ ID NO: 190003 - RNA, 19 nt, Homo sapiens
  misc_RNA (1)...(19): siRNA sense strand
ccucaagccugaaaauauu

SEQ ID NO: 190004 - RNA, 19 nt, Homo sapiens
  misc_RNA (1)...(19): siRNA sense strand
gagaggacagcuaccaugu

SEQ ID NO: 190005 - RNA, 19 nt, Homo sapiens
  misc_RNA (1)...(19): siRNA sense strand
acauguguaucuccuuuga

SEQ ID NO: 190006 - RNA, 19 nt, Homo sapiens
  misc_RNA (1)...(19): siRNA sense strand
cauaagcgacgaagaaguc

SEQ ID NO: 190007 - RNA, 19 nt, Homo sapiens
  misc_RNA (1)...(19): siRNA sense strand
ugugauguguggaguauag

SEQ ID NO: 190008 - RNA, 19 nt, Homo sapiens
  misc_RNA (1)...(19): siRNA sense strand
gaugagcgcagugugaaga

SEQ ID NO: 190009 - RNA, 19 nt, Homo sapiens
  misc_RNA (1)...(19): siRNA sense strand
cgaguugcccugaagauca

SEQ ID NO: 190010 - RNA, 19 nt, Homo sapiens
  misc_RNA (1)...(19): siRNA sense strand
aguauaggcugcaucaucu

SEQ ID NO: 190011 - RNA, 19 nt, Homo sapiens
  misc_RNA (1)...(19): siRNA sense strand
guuugugaauucagacuau

SEQ ID NO: 190012 - RNA, 19 nt, Homo sapiens
  misc_RNA (1)...(19): siRNA sense strand
ucucgaagcaguuaugaug

SEQ ID NO: 190013 - RNA, 19 nt, Homo sapiens
  misc_RNA (1)...(19): siRNA sense strand
gaguugcccugaagaucau

SEQ ID NO: 190014 - RNA, 19 nt, Homo sapiens
  misc_RNA (1)...(19): siRNA sense strand
gcccugaagaucauuaaga

SEQ ID NO: 190015 - RNA, 19 nt, Homo sapiens
  misc_RNA (1)...(19): siRNA sense strand
gaaaaucaaugagaaagac

SEQ ID NO: 190016 - RNA, 19 nt, Homo sapiens
  misc_RNA (1)...(19): siRNA sense strand
cagacuaucggcauuccua

SEQ ID NO: 190017 - RNA, 19 nt, Homo sapiens
  misc_RNA (1)...(19): siRNA sense strand
ucgaagcaguuaugaugau

SEQ ID NO: 190018 - RNA, 19 nt, Homo sapiens
  misc_RNA (1)...(19): siRNA sense strand
caccauagcaccauugucu

SEQ ID NO: 190019 - RNA, 19 nt, Homo sapiens
  misc_RNA (1)...(19): siRNA sense strand
cacaucagcugggcgcuau

SEQ ID NO: 190020 - RNA, 19 nt, Homo sapiens
  misc_RNA (1)...(19): siRNA sense strand
ugagaaagacccugacaac

SEQ ID NO: 190021 - RNA, 19 nt, Homo sapiens
  misc_RNA (1)...(19): siRNA sense strand
acauuuagccgcucaucuu

SEQ ID NO: 190022 - RNA, 19 nt, Homo sapiens
  misc_RNA (1)...(19): siRNA sense strand
uaggcugcaucaucuuuga

SEQ ID NO: 190023 - RNA, 19 nt, Homo sapiens
  misc_RNA (1)...(19): siRNA sense strand
gaagcagcucgacuugaga

SEQ ID NO: 190024 - RNA, 19 nt, Homo sapiens
  misc_RNA (1)...(19): siRNA sense strand
ucgauuuccucaaagacaa

SEQ ID NO: 190025 - RNA, 19 nt, Homo sapiens
  misc_RNA (1)...(19): siRNA sense strand
ugaaagcaugcuagaguau

SEQ ID NO: 190026 - RNA, 19 nt, Homo sapiens
  misc_RNA (1)...(19): siRNA sense strand
uaccauguccguucucgaa

SEQ ID NO: 190027 - RNA, 19 nt, Homo sapiens
  misc_RNA (1)...(19): siRNA sense strand
cgaguuguacaauguguug

SEQ ID NO: 190028 - RNA, 19 nt, Homo sapiens
  misc_RNA (1)...(19): siRNA sense strand
uauaggcugcaucaucuuu

SEQ ID NO: 190029 - RNA, 19 nt, Homo sapiens
  misc_RNA (1)...(19): siRNA sense strand
ccagaagucauccuugagu

SEQ ID NO: 190030 - RNA, 19 nt, Homo sapiens
  misc_RNA (1)...(19): siRNA sense strand
ccucaaagacaacaacuac

SEQ ID NO: 190031 - RNA, 19 nt, Homo sapiens
  misc_RNA (1)...(19): siRNA sense strand
agaucaacgugcuagagaa

SEQ ID NO: 190032 - RNA, 19 nt, Homo sapiens
  misc_RNA (1)...(19): siRNA sense strand
gaauaucagcgggagaaca

SEQ ID NO: 190033 - RNA, 19 nt, Homo sapiens
  misc_RNA (1)...(19): siRNA sense strand
agucgcuccuggucaagua

SEQ ID NO: 190034 - RNA, 19 nt, Homo sapiens
  misc_RNA (1)...(19): siRNA sense strand
gacaacagagagcaucuag

SEQ ID NO: 190035 - RNA, 19 nt, Homo sapiens
  misc_RNA (1)...(19): siRNA sense strand
gugccaccuuugaccauga

SEQ ID NO: 190036 - RNA, 19 nt, Homo sapiens
  misc_RNA (1)...(19): siRNA sense strand
cgaagcaguuaugaugauc

SEQ ID NO: 190037 - RNA, 19 nt, Homo sapiens
  misc_RNA (1)...(19): siRNA sense strand
ugagcucaccuacaaccua

SEQ ID NO: 190038 - RNA, 19 nt, Homo sapiens
  misc_RNA (1)...(19): siRNA sense strand
uagagaagaagcgagauga

SEQ ID NO: 190039 - RNA, 19 nt, Homo sapiens
  misc_RNA (1)...(19): siRNA sense strand
gagcaccauagcaccauug

SEQ ID NO: 190040 - RNA, 19 nt, Homo sapiens
  misc_RNA (1)...(19): siRNA sense strand
cggcugaccuugggugaag

SEQ ID NO: 190041 - RNA, 19 nt, Homo sapiens
  misc_RNA (1)...(19): siRNA sense strand
gaaaucguuagcaccuuag

SEQ ID NO: 190042 - RNA, 19 nt, Homo sapiens
  misc_RNA (1)...(19): siRNA sense strand
ggggagaugccuacuauga

SEQ ID NO: 190043 - RNA, 19 nt, Homo sapiens
  misc_RNA (1)...(19): siRNA sense strand
agaagucauccuugaguug

SEQ ID NO: 190044 - RNA, 19 nt, Homo sapiens
  misc_RNA (1)...(19): siRNA sense strand
ucaccuacaaccuagagaa

SEQ ID NO: 190045 - RNA, 19 nt, Homo sapiens
  misc_RNA (1)...(19): siRNA sense strand
guuccuccaugauaacaag

SEQ ID NO: 190046 - RNA, 19 nt, Homo sapiens
  misc_RNA (1)...(19): siRNA sense strand
gcagcucgacuugagauca

SEQ ID NO: 190047 - RNA, 19 nt, Homo sapiens
  misc_RNA (1)...(19): siRNA sense strand
cagcuaccauguccguucu

SEQ ID NO: 190048 - RNA, 19 nt, Homo sapiens
  misc_RNA (1)...(19): siRNA sense strand
acuaucggcauuccuauga

SEQ ID NO: 190049 - RNA, 19 nt, Homo sapiens
  misc_RNA (1)...(19): siRNA sense strand
acaacaagaaccucugugu

SEQ ID NO: 190050 - RNA, 19 nt, Homo sapiens
  misc_RNA (1)...(19): siRNA sense strand
gcauaagcgacgaagaagu

SEQ ID NO: 190051 - RNA, 19 nt, Homo sapiens
  misc_RNA (1)...(19): siRNA sense strand
cuacuaugacacagacuau

SEQ ID NO: 190052 - RNA, 19 nt, Homo sapiens
  misc_RNA (1)...(19): siRNA sense strand
ggaacaccaccagcucuuc

SEQ ID NO: 190053 - RNA, 19 nt, Homo sapiens
  misc_RNA (1)...(19): siRNA sense strand
ggaaucgugugacuaauaa

SEQ ID NO: 190054 - RNA, 19 nt, Homo sapiens
  misc_RNA (1)...(19): siRNA sense strand
gaagggaucugcaggaauc

SEQ ID NO: 190055 - RNA, 19 nt, Homo sapiens
  misc_RNA (1)...(19): siRNA sense strand
ugaagaggauaaugagaua

SEQ ID NO: 190056 - RNA, 19 nt, Homo sapiens
  misc_RNA (1)...(19): siRNA sense strand
aaacuuggauucucacuug

SEQ ID NO: 190057 - RNA, 19 nt, Homo sapiens
  misc_RNA (1)...(19): siRNA sense strand
gcaggaaucgugugacuaa

SEQ ID NO: 190058 - RNA, 19 nt, Homo sapiens
  misc_RNA (1)...(19): siRNA sense strand
ucugaaggcuugaguaauu

SEQ ID NO: 190059 - RNA, 19 nt, Homo sapiens
  misc_RNA (1)...(19): siRNA sense strand
ugacugaucuucuggacaa

SEQ ID NO: 190060 - RNA, 19 nt, Homo sapiens
  misc_RNA (1)...(19): siRNA sense strand
caugauaacccucaaauau

SEQ ID NO: 190061 - RNA, 19 nt, Homo sapiens
  misc_RNA (1)...(19): siRNA sense strand
ugauaacccucaaauaugu

SEQ ID NO: 190062 - RNA, 19 nt, Homo sapiens
  misc_RNA (1)...(19): siRNA sense strand
gaauauagucgaugaccuu

SEQ ID NO: 190063 - RNA, 19 nt, Homo sapiens
  misc_RNA (1)...(19): siRNA sense strand
ccaaaagacuacaugauaa

SEQ ID NO: 190064 - RNA, 19 nt, Homo sapiens
  misc_RNA (1)...(19): siRNA sense strand
ucacuaaauugguggcaaa

SEQ ID NO: 190065 - RNA, 19 nt, Homo sapiens
  misc_RNA (1)...(19): siRNA sense strand
acacaaacuuggauucuca

SEQ ID NO: 190066 - RNA, 19 nt, Homo sapiens
  misc_RNA (1)...(19): siRNA sense strand
gauucucacuugcauuuau

SEQ ID NO: 190067 - RNA, 19 nt, Homo sapiens
  misc_RNA (1)...(19): siRNA sense strand
gagagaguuucaagaagug

SEQ ID NO: 190068 - RNA, 19 nt, Homo sapiens
  misc_RNA (1)...(19): siRNA sense strand
ugugguuucuucaacauua

SEQ ID NO: 190069 - RNA, 19 nt, Homo sapiens
  misc_RNA (1)...(19): siRNA sense strand
gagagagaguuucaagaag

SEQ ID NO: 190070 - RNA, 19 nt, Homo sapiens
  misc_RNA (1)...(19): siRNA sense strand
ccagaacccaggcucuuua

SEQ ID NO: 190071 - RNA, 19 nt, Homo sapiens
  misc_RNA (1)...(19): siRNA sense strand
auaaguauguugcaagaga

SEQ ID NO: 190072 - RNA, 19 nt, Homo sapiens
  misc_RNA (1)...(19): siRNA sense strand
gaggauaaugagauaagua

SEQ ID NO: 190073 - RNA, 19 nt, Homo sapiens
  misc_RNA (1)...(19): siRNA sense strand
cuaaauugguggcaaaucu

SEQ ID NO: 190074 - RNA, 19 nt, Homo sapiens
  misc_RNA (1)...(19): siRNA sense strand
aaacucaucuaaggaucua

SEQ ID NO: 190075 - RNA, 19 nt, Homo sapiens
  misc_RNA (1)...(19): siRNA sense strand
ucacuugcauuuaucuuca

SEQ ID NO: 190076 - RNA, 19 nt, Homo sapiens
  misc_RNA (1)...(19): siRNA sense strand
gcgagaugguaguacaauu

SEQ ID NO: 190077 - RNA, 19 nt, Homo sapiens
  misc_RNA (1)...(19): siRNA sense strand
agagagaguuucaagaagu

SEQ ID NO: 190078 - RNA, 19 nt, Homo sapiens
  misc_RNA (1)...(19): siRNA sense strand
aacauuaaguccugagaaa

SEQ ID NO: 190079 - RNA, 19 nt, Homo sapiens
  misc_RNA (1)...(19): siRNA sense strand
cugaaggcuugaguaauua

SEQ ID NO: 190080 - RNA, 19 nt, Homo sapiens
  misc_RNA (1)...(19): siRNA sense strand
agagagagaguuucaagaa

SEQ ID NO: 190081 - RNA, 19 nt, Homo sapiens
  misc_RNA (1)...(19): siRNA sense strand
gauaagcgagaugguagua

SEQ ID NO: 190082 - RNA, 19 nt, Homo sapiens
  misc_RNA (1)...(19): siRNA sense strand
uaaguauguugcaagagaa

SEQ ID NO: 190083 - RNA, 19 nt, Homo sapiens
  misc_RNA (1)...(19): siRNA sense strand
gaagacacaaacuuggauu

SEQ ID NO: 190084 - RNA, 19 nt, Homo sapiens
  misc_RNA (1)...(19): siRNA sense strand
uaagcgagaugguaguaca

SEQ ID NO: 190085 - RNA, 19 nt, Homo sapiens
  misc_RNA (1)...(19): siRNA sense strand
gugauugugugguuucuuc

SEQ ID NO: 190086 - RNA, 19 nt, Homo sapiens
  misc_RNA (1)...(19): siRNA sense strand
cgagaugguaguacaauug

SEQ ID NO: 190087 - RNA, 19 nt, Homo sapiens
  misc_RNA (1)...(19): siRNA sense strand
agagaaagagagagaguuu

SEQ ID NO: 190088 - RNA, 19 nt, Homo sapiens
  misc_RNA (1)...(19): siRNA sense strand
uauagucgaugaccuugug

SEQ ID NO: 190089 - RNA, 19 nt, Homo sapiens
  misc_RNA (1)...(19): siRNA sense strand
cagcuugacugaucuucug

SEQ ID NO: 190090 - RNA, 19 nt, Homo sapiens
  misc_RNA (1)...(19): siRNA sense strand
agauaaguauguugcaaga

SEQ ID NO: 190091 - RNA, 19 nt, Homo sapiens
  misc_RNA (1)...(19): siRNA sense strand
gaacccaggcucuuuacuc

SEQ ID NO: 190092 - RNA, 19 nt, Homo sapiens
  misc_RNA (1)...(19): siRNA sense strand
cuucagcugcuccuauuua

SEQ ID NO: 190093 - RNA, 19 nt, Homo sapiens
  misc_RNA (1)...(19): siRNA sense strand
aaagaaaacucaucuaagg

SEQ ID NO: 190094 - RNA, 19 nt, Homo sapiens
  misc_RNA (1)...(19): siRNA sense strand
gaagaggauaaugagauaa

SEQ ID NO: 190095 - RNA, 19 nt, Homo sapiens
  misc_RNA (1)...(19): siRNA sense strand
caagggcaguugaaaauau

SEQ ID NO: 190096 - RNA, 19 nt, Homo sapiens
  misc_RNA (1)...(19): siRNA sense strand
gaugguaguacaauuguca

SEQ ID NO: 190097 - RNA, 19 nt, Homo sapiens
  misc_RNA (1)...(19): siRNA sense strand
cagcugcuccuauuuaauc

SEQ ID NO: 190098 - RNA, 19 nt, Homo sapiens
  misc_RNA (1)...(19): siRNA sense strand
caacauuaaguccugagaa

SEQ ID NO: 190099 - RNA, 19 nt, Homo sapiens
  misc_RNA (1)...(19): siRNA sense strand
ugagauaaguauguugcaa

SEQ ID NO: 190100 - RNA, 19 nt, Homo sapiens
  misc_RNA (1)...(19): siRNA sense strand
gagaugguaguacaauugu

SEQ ID NO: 190101 - RNA, 19 nt, Homo sapiens
  misc_RNA (1)...(19): siRNA sense strand
caucugaaacuagugauug

SEQ ID NO: 190102 - RNA, 19 nt, Homo sapiens
  misc_RNA (1)...(19): siRNA sense strand
aggaaucgugugacuaaua

SEQ ID NO: 190103 - RNA, 19 nt, Homo sapiens
  misc_RNA (1)...(19): siRNA sense strand
gugguuucuucaacauuaa

SEQ ID NO: 190104 - RNA, 19 nt, Homo sapiens
  misc_RNA (1)...(19): siRNA sense strand
gaaggcuugaguaauuauu

SEQ ID NO: 190105 - RNA, 19 nt, Homo sapiens
  misc_RNA (1)...(19): siRNA sense strand
ucgugugacuaauaaugua

SEQ ID NO: 190106 - RNA, 19 nt, Homo sapiens
  misc_RNA (1)...(19): siRNA sense strand
uggauucucacuugcauuu

SEQ ID NO: 190107 - RNA, 19 nt, Homo sapiens
  misc_RNA (1)...(19): siRNA sense strand
guaaaagacgucacuaaau

SEQ ID NO: 190108 - RNA, 19 nt, Homo sapiens
  misc_RNA (1)...(19): siRNA sense strand
gagaguuucaagaagugua

SEQ ID NO: 190109 - RNA, 19 nt, Homo sapiens
  misc_RNA (1)...(19): siRNA sense strand
uaaauugguggcaaaucuu

SEQ ID NO: 190110 - RNA, 19 nt, Homo sapiens
  misc_RNA (1)...(19): siRNA sense strand
gacacaaacuuggauucuc

SEQ ID NO: 190111 - RNA, 19 nt, Homo sapiens
  misc_RNA (1)...(19): siRNA sense strand
caagagaaagagagagagu

SEQ ID NO: 190112 - RNA, 19 nt, Homo sapiens
  misc_RNA (1)...(19): siRNA sense strand
guggagugcgucaaagaaa

SEQ ID NO: 190113 - RNA, 19 nt, Homo sapiens
  misc_RNA (1)...(19): siRNA sense strand
cuggacaaguuuucaaaua

SEQ ID NO: 190114 - RNA, 19 nt, Homo sapiens
  misc_RNA (1)...(19): siRNA sense strand
aaagagagagaguuucaag

SEQ ID NO: 190115 - RNA, 19 nt, Homo sapiens
  misc_RNA (1)...(19): siRNA sense strand
cuucaaggacuuuguagug

SEQ ID NO: 190116 - RNA, 19 nt, Homo sapiens
  misc_RNA (1)...(19): siRNA sense strand
cugaagggaucugcaggaa

SEQ ID NO: 190117 - RNA, 19 nt, Homo sapiens
  misc_RNA (1)...(19): siRNA sense strand
gccuuauacuggaagaaga

SEQ ID NO: 190118 - RNA, 19 nt, Homo sapiens
  misc_RNA (1)...(19): siRNA sense strand
uucagcugcuccuauuuaa

SEQ ID NO: 190119 - RNA, 19 nt, Homo sapiens
  misc_RNA (1)...(19): siRNA sense strand
gaagaagagacagccaagu

SEQ ID NO: 190120 - RNA, 19 nt, Homo sapiens
  misc_RNA (1)...(19): siRNA sense strand
ggauucucacuugcauuua

SEQ ID NO: 190121 - RNA, 19 nt, Homo sapiens
  misc_RNA (1)...(19): siRNA sense strand
gcaucugaaacuagugauu

SEQ ID NO: 190122 - RNA, 19 nt, Homo sapiens
  misc_RNA (1)...(19): siRNA sense strand
acaugauaacccucaaaua

SEQ ID NO: 190123 - RNA, 19 nt, Homo sapiens
  misc_RNA (1)...(19): siRNA sense strand
ccagcauuguuuucucuua

SEQ ID NO: 190124 - RNA, 19 nt, Homo sapiens
  misc_RNA (1)...(19): siRNA sense strand
gguggcaaaucuuccaaaa

SEQ ID NO: 190125 - RNA, 19 nt, Homo sapiens
  misc_RNA (1)...(19): siRNA sense strand
guauguugcaagagaaaga

SEQ ID NO: 190126 - RNA, 19 nt, Homo sapiens
  misc_RNA (1)...(19): siRNA sense strand
cugaucuucuggacaaguu

SEQ ID NO: 190127 - RNA, 19 nt, Homo sapiens
  misc_RNA (1)...(19): siRNA sense strand
uccaaaagacuacaugaua

SEQ ID NO: 190128 - RNA, 19 nt, Homo sapiens
  misc_RNA (1)...(19): siRNA sense strand
augauaacccucaaauaug

SEQ ID NO: 190129 - RNA, 19 nt, Homo sapiens
  misc_RNA (1)...(19): siRNA sense strand
aagaagagacagccaaguc

SEQ ID NO: 190130 - RNA, 19 nt, Homo sapiens
  misc_RNA (1)...(19): siRNA sense strand
uuucugaaggcuugaguaa

SEQ ID NO: 190131 - RNA, 19 nt, Homo sapiens
  misc_RNA (1)...(19): siRNA sense strand
ggauaaugagauaaguaug

SEQ ID NO: 190132 - RNA, 19 nt, Homo sapiens
  misc_RNA (1)...(19): siRNA sense strand
uaaugaagaggauaaugag

SEQ ID NO: 190133 - RNA, 19 nt, Homo sapiens
  misc_RNA (1)...(19): siRNA sense strand
auaauuggcuuugcuuuug

SEQ ID NO: 190134 - RNA, 19 nt, Homo sapiens
  misc_RNA (1)...(19): siRNA sense strand
caaacuuggauucucacuu

SEQ ID NO: 190135 - RNA, 19 nt, Homo sapiens
  misc_RNA (1)...(19): siRNA sense strand
ggagccuuauacuggaaga

SEQ ID NO: 190136 - RNA, 19 nt, Homo sapiens
  misc_RNA (1)...(19): siRNA sense strand
aagaagacacaaacuugga

SEQ ID NO: 190137 - RNA, 19 nt, Homo sapiens
  misc_RNA (1)...(19): siRNA sense strand
aaucgugugacuaauaaug

SEQ ID NO: 190138 - RNA, 19 nt, Homo sapiens
  misc_RNA (1)...(19): siRNA sense strand
uaucuucagcugcuccuau

SEQ ID NO: 190139 - RNA, 19 nt, Homo sapiens
  misc_RNA (1)...(19): siRNA sense strand
aagggcaguugaaaauaua

SEQ ID NO: 190140 - RNA, 19 nt, Homo sapiens
  misc_RNA (1)...(19): siRNA sense strand
aaagacgucacuaaauugg

SEQ ID NO: 190141 - RNA, 19 nt, Homo sapiens
  misc_RNA (1)...(19): siRNA sense strand
ggaaucgugugacuaauaa

SEQ ID NO: 190142 - RNA, 19 nt, Homo sapiens
  misc_RNA (1)...(19): siRNA sense strand
gaagggaucugcaggaauc

SEQ ID NO: 190143 - RNA, 19 nt, Homo sapiens
  misc_RNA (1)...(19): siRNA sense strand
ugaagaggauaaugagaua

SEQ ID NO: 190144 - RNA, 19 nt, Homo sapiens
  misc_RNA (1)...(19): siRNA sense strand
aaacuuggauucucacuug

SEQ ID NO: 190145 - RNA, 19 nt, Homo sapiens
  misc_RNA (1)...(19): siRNA sense strand
gcaggaaucgugugacuaa

SEQ ID NO: 190146 - RNA, 19 nt, Homo sapiens
  misc_RNA (1)...(19): siRNA sense strand
ucugaaggcuugaguaauu

SEQ ID NO: 190147 - RNA, 19 nt, Homo sapiens
  misc_RNA (1)...(19): siRNA sense strand
ugacugaucuucuggacaa

SEQ ID NO: 190148 - RNA, 19 nt, Homo sapiens
  misc_RNA (1)...(19): siRNA sense strand
caugauaacccucaaauau

SEQ ID NO: 190149 - RNA, 19 nt, Homo sapiens
  misc_RNA (1)...(19): siRNA sense strand
ugauaacccucaaauaugu

SEQ ID NO: 190150 - RNA, 19 nt, Homo sapiens
  misc_RNA (1)...(19): siRNA sense strand
gaauauagucgaugaccuu

SEQ ID NO: 190151 - RNA, 19 nt, Homo sapiens
  misc_RNA (1)...(19): siRNA sense strand
ccaaaagacuacaugauaa

SEQ ID NO: 190152 - RNA, 19 nt, Homo sapiens
  misc_RNA (1)...(19): siRNA sense strand
ucacuaaauugguggcaaa

SEQ ID NO: 190153 - RNA, 19 nt, Homo sapiens
  misc_RNA (1)...(19): siRNA sense strand
acacaaacuuggauucuca

SEQ ID NO: 190154 - RNA, 19 nt, Homo sapiens
  misc_RNA (1)...(19): siRNA sense strand
gauucucacuugcauuuau

SEQ ID NO: 190155 - RNA, 19 nt, Homo sapiens
  misc_RNA (1)...(19): siRNA sense strand
gagagaguuucaagaagug

SEQ ID NO: 190156 - RNA, 19 nt, Homo sapiens
  misc_RNA (1)...(19): siRNA sense strand
ugugguuucuucaacauua

SEQ ID NO: 190157 - RNA, 19 nt, Homo sapiens
  misc_RNA (1)...(19): siRNA sense strand
gagagagaguuucaagaag

SEQ ID NO: 190158 - RNA, 19 nt, Homo sapiens
  misc_RNA (1)...(19): siRNA sense strand
ccagaacccaggcucuuua

SEQ ID NO: 190159 - RNA, 19 nt, Homo sapiens
  misc_RNA (1)...(19): siRNA sense strand
auaaguauguugcaagaga

SEQ ID NO: 190160 - RNA, 19 nt, Homo sapiens
  misc_RNA (1)...(19): siRNA sense strand
gaggauaaugagauaagua

SEQ ID NO: 190161 - RNA, 19 nt, Homo sapiens
  misc_RNA (1)...(19): siRNA sense strand
cuaaauugguggcaaaucu

SEQ ID NO: 190162 - RNA, 19 nt, Homo sapiens
  misc_RNA (1)...(19): siRNA sense strand
aaacucaucuaaggaucua

SEQ ID NO: 190163 - RNA, 19 nt, Homo sapiens
  misc_RNA (1)...(19): siRNA sense strand
ucacuugcauuuaucuuca

SEQ ID NO: 190164 - RNA, 19 nt, Homo sapiens
  misc_RNA (1)...(19): siRNA sense strand
gcgagaugguaguacaauu

SEQ ID NO: 190165 - RNA, 19 nt, Homo sapiens
  misc_RNA (1)...(19): siRNA sense strand
agagagaguuucaagaagu

SEQ ID NO: 190166 - RNA, 19 nt, Homo sapiens
  misc_RNA (1)...(19): siRNA sense strand
aacauuaaguccugagaaa

SEQ ID NO: 190167 - RNA, 19 nt, Homo sapiens
  misc_RNA (1)...(19): siRNA sense strand
cugaaggcuugaguaauua

SEQ ID NO: 190168 - RNA, 19 nt, Homo sapiens
  misc_RNA (1)...(19): siRNA sense strand
agagagagaguuucaagaa

SEQ ID NO: 190169 - RNA, 19 nt, Homo sapiens
  misc_RNA (1)...(19): siRNA sense strand
gauaagcgagaugguagua

SEQ ID NO: 190170 - RNA, 19 nt, Homo sapiens
  misc_RNA (1)...(19): siRNA sense strand
uaaguauguugcaagagaa

SEQ ID NO: 190171 - RNA, 19 nt, Homo sapiens
  misc_RNA (1)...(19): siRNA sense strand
gaagacacaaacuuggauu

SEQ ID NO: 190172 - RNA, 19 nt, Homo sapiens
  misc_RNA (1)...(19): siRNA sense strand
uaagcgagaugguaguaca

SEQ ID NO: 190173 - RNA, 19 nt, Homo sapiens
  misc_RNA (1)...(19): siRNA sense strand
gugauugugugguuucuuc

SEQ ID NO: 190174 - RNA, 19 nt, Homo sapiens
  misc_RNA (1)...(19): siRNA sense strand
cgagaugguaguacaauug

SEQ ID NO: 190175 - RNA, 19 nt, Homo sapiens
  misc_RNA (1)...(19): siRNA sense strand
agagaaagagagagaguuu

SEQ ID NO: 190176 - RNA, 19 nt, Homo sapiens
  misc_RNA (1)...(19): siRNA sense strand
uauagucgaugaccuugug

SEQ ID NO: 190177 - RNA, 19 nt, Homo sapiens
  misc_RNA (1)...(19): siRNA sense strand
cagcuugacugaucuucug

SEQ ID NO: 190178 - RNA, 19 nt, Homo sapiens
  misc_RNA (1)...(19): siRNA sense strand
agauaaguauguugcaaga

SEQ ID NO: 190179 - RNA, 19 nt, Homo sapiens
  misc_RNA (1)...(19): siRNA sense strand
gaacccaggcucuuuacuc

SEQ ID NO: 190180 - RNA, 19 nt, Homo sapiens
  misc_RNA (1)...(19): siRNA sense strand
cuucagcugcuccuauuua

SEQ ID NO: 190181 - RNA, 19 nt, Homo sapiens
  misc_RNA (1)...(19): siRNA sense strand
aaagaaaacucaucuaagg

SEQ ID NO: 190182 - RNA, 19 nt, Homo sapiens
  misc_RNA (1)...(19): siRNA sense strand
gaagaggauaaugagauaa

SEQ ID NO: 190183 - RNA, 19 nt, Homo sapiens
  misc_RNA (1)...(19): siRNA sense strand
caagggcaguugaaaauau

SEQ ID NO: 190184 - RNA, 19 nt, Homo sapiens
  misc_RNA (1)...(19): siRNA sense strand
gaugguaguacaauuguca

SEQ ID NO: 190185 - RNA, 19 nt, Homo sapiens
  misc_RNA (1)...(19): siRNA sense strand
cagcugcuccuauuuaauc

SEQ ID NO: 190186 - RNA, 19 nt, Homo sapiens
  misc_RNA (1)...(19): siRNA sense strand
caacauuaaguccugagaa

SEQ ID NO: 190187 - RNA, 19 nt, Homo sapiens
  misc_RNA (1)...(19): siRNA sense strand
ugagauaaguauguugcaa

SEQ ID NO: 190188 - RNA, 19 nt, Homo sapiens
  misc_RNA (1)...(19): siRNA sense strand
gagaugguaguacaauugu

SEQ ID NO: 190189 - RNA, 19 nt, Homo sapiens
  misc_RNA (1)...(19): siRNA sense strand
caucugaaacuagugauug

SEQ ID NO: 190190 - RNA, 19 nt, Homo sapiens
  misc_RNA (1)...(19): siRNA sense strand
aggaaucgugugacuaaua

SEQ ID NO: 190191 - RNA, 19 nt, Homo sapiens
  misc_RNA (1)...(19): siRNA sense strand
gugguuucuucaacauuaa

SEQ ID NO: 190192 - RNA, 19 nt, Homo sapiens
  misc_RNA (1)...(19): siRNA sense strand
gaaggcuugaguaauuauu

SEQ ID NO: 190193 - RNA, 19 nt, Homo sapiens
  misc_RNA (1)...(19): siRNA sense strand
ucgugugacuaauaaugua

SEQ ID NO: 190194 - RNA, 19 nt, Homo sapiens
  misc_RNA (1)...(19): siRNA sense strand
uggauucucacuugcauuu

SEQ ID NO: 190195 - RNA, 19 nt, Homo sapiens
  misc_RNA (1)...(19): siRNA sense strand
guaaaagacgucacuaaau

SEQ ID NO: 190196 - RNA, 19 nt, Homo sapiens
  misc_RNA (1)...(19): siRNA sense strand
gagaguuucaagaagugua

SEQ ID NO: 190197 - RNA, 19 nt, Homo sapiens
  misc_RNA (1)...(19): siRNA sense strand
uaaauugguggcaaaucuu

SEQ ID NO: 190198 - RNA, 19 nt, Homo sapiens
  misc_RNA (1)...(19): siRNA sense strand
gacacaaacuuggauucuc

SEQ ID NO: 190199 - RNA, 19 nt, Homo sapiens
  misc_RNA (1)...(19): siRNA sense strand
caagagaaagagagagagu

SEQ ID NO: 190200 - RNA, 19 nt, Homo sapiens
  misc_RNA (1)...(19): siRNA sense strand
guggagugcgucaaagaaa

SEQ ID NO: 190201 - RNA, 19 nt, Homo sapiens
  misc_RNA (1)...(19): siRNA sense strand
cuggacaaguuuucaaaua

SEQ ID NO: 190202 - RNA, 19 nt, Homo sapiens
  misc_RNA (1)...(19): siRNA sense strand
aaagagagagaguuucaag

SEQ ID NO: 190203 - RNA, 19 nt, Homo sapiens
  misc_RNA (1)...(19): siRNA sense strand
cuucaaggacuuuguagug

SEQ ID NO: 190204 - RNA, 19 nt, Homo sapiens
  misc_RNA (1)...(19): siRNA sense strand
cugaagggaucugcaggaa

SEQ ID NO: 190205 - RNA, 19 nt, Homo sapiens
  misc_RNA (1)...(19): siRNA sense strand
gccuuauacuggaagaaga

SEQ ID NO: 190206 - RNA, 19 nt, Homo sapiens
  misc_RNA (1)...(19): siRNA sense strand
uucagcugcuccuauuuaa

SEQ ID NO: 190207 - RNA, 19 nt, Homo sapiens
  misc_RNA (1)...(19): siRNA sense strand
gaagaagagacagccaagu

SEQ ID NO: 190208 - RNA, 19 nt, Homo sapiens
  misc_RNA (1)...(19): siRNA sense strand
ggauucucacuugcauuua

SEQ ID NO: 190209 - RNA, 19 nt, Homo sapiens
  misc_RNA (1)...(19): siRNA sense strand
gcaucugaaacuagugauu

SEQ ID NO: 190210 - RNA, 19 nt, Homo sapiens
  misc_RNA (1)...(19): siRNA sense strand
acaugauaacccucaaaua

SEQ ID NO: 190211 - RNA, 19 nt, Homo sapiens
  misc_RNA (1)...(19): siRNA sense strand
ccagcauuguuuucucuua

SEQ ID NO: 190212 - RNA, 19 nt, Homo sapiens
  misc_RNA (1)...(19): siRNA sense strand
gguggcaaaucuuccaaaa

SEQ ID NO: 190213 - RNA, 19 nt, Homo sapiens
  misc_RNA (1)...(19): siRNA sense strand
guauguugcaagagaaaga

SEQ ID NO: 190214 - RNA, 19 nt, Homo sapiens
  misc_RNA (1)...(19): siRNA sense strand
cugaucuucuggacaaguu

SEQ ID NO: 190215 - RNA, 19 nt, Homo sapiens
  misc_RNA (1)...(19): siRNA sense strand
uccaaaagacuacaugaua

SEQ ID NO: 190216 - RNA, 19 nt, Homo sapiens
  misc_RNA (1)...(19): siRNA sense strand
augauaacccucaaauaug

SEQ ID NO: 190217 - RNA, 19 nt, Homo sapiens
  misc_RNA (1)...(19): siRNA sense strand
aagaagagacagccaaguc

SEQ ID NO: 190218 - RNA, 19 nt, Homo sapiens
  misc_RNA (1)...(19): siRNA sense strand
uuucugaaggcuugaguaa

SEQ ID NO: 190219 - RNA, 19 nt, Homo sapiens
  misc_RNA (1)...(19): siRNA sense strand
ggauaaugagauaaguaug

SEQ ID NO: 190220 - RNA, 19 nt, Homo sapiens
  misc_RNA (1)...(19): siRNA sense strand
uaaugaagaggauaaugag

SEQ ID NO: 190221 - RNA, 19 nt, Homo sapiens
  misc_RNA (1)...(19): siRNA sense strand
auaauuggcuuugcuuuug

SEQ ID NO: 190222 - RNA, 19 nt, Homo sapiens
  misc_RNA (1)...(19): siRNA sense strand
caaacuuggauucucacuu

SEQ ID NO: 190223 - RNA, 19 nt, Homo sapiens
  misc_RNA (1)...(19): siRNA sense strand
ggagccuuauacuggaaga

SEQ ID NO: 190224 - RNA, 19 nt, Homo sapiens
  misc_RNA (1)...(19): siRNA sense strand
aagaagacacaaacuugga

SEQ ID NO: 190225 - RNA, 19 nt, Homo sapiens
  misc_RNA (1)...(19): siRNA sense strand
aaucgugugacuaauaaug

SEQ ID NO: 190226 - RNA, 19 nt, Homo sapiens
  misc_RNA (1)...(19): siRNA sense strand
uaucuucagcugcuccuau

SEQ ID NO: 190227 - RNA, 19 nt, Homo sapiens
  misc_RNA (1)...(19): siRNA sense strand
aagggcaguugaaaauaua

SEQ ID NO: 190228 - RNA, 19 nt, Homo sapiens
  misc_RNA (1)...(19): siRNA sense strand
aaagacgucacuaaauugg

SEQ ID NO: 190229 - RNA, 19 nt, Homo sapiens
  misc_RNA (1)...(19): siRNA sense strand
gcagaaggcugacgucuau

SEQ ID NO: 190230 - RNA, 19 nt, Homo sapiens
  misc_RNA (1)...(19): siRNA sense strand
ccaaagagauuguccagaa

SEQ ID NO: 190231 - RNA, 19 nt, Homo sapiens
  misc_RNA (1)...(19): siRNA sense strand
ggaaucaccuucaucaugu

SEQ ID NO: 190232 - RNA, 19 nt, Homo sapiens
  misc_RNA (1)...(19): siRNA sense strand
ggacccaacugaaugaaga

SEQ ID NO: 190233 - RNA, 19 nt, Homo sapiens
  misc_RNA (1)...(19): siRNA sense strand
gaacacaaccugagcuaug

SEQ ID NO: 190234 - RNA, 19 nt, Homo sapiens
  misc_RNA (1)...(19): siRNA sense strand
gggagaaucugaccaaugg

SEQ ID NO: 190235 - RNA, 19 nt, Homo sapiens
  misc_RNA (1)...(19): siRNA sense strand
gaaagcugaugcuggagaa

SEQ ID NO: 190236 - RNA, 19 nt, Homo sapiens
  misc_RNA (1)...(19): siRNA sense strand
gggauuaugucuucuuuua

SEQ ID NO: 190237 - RNA, 19 nt, Homo sapiens
  misc_RNA (1)...(19): siRNA sense strand
gaggauggacuucgaauug

SEQ ID NO: 190238 - RNA, 19 nt, Homo sapiens
  misc_RNA (1)...(19): siRNA sense strand
uaugagagauguucaguuc

SEQ ID NO: 190239 - RNA, 19 nt, Homo sapiens
  misc_RNA (1)...(19): siRNA sense strand
ggagcuggcuagcauguug

SEQ ID NO: 190240 - RNA, 19 nt, Homo sapiens
  misc_RNA (1)...(19): siRNA sense strand
gaaauguugucgccaucaa

SEQ ID NO: 190241 - RNA, 19 nt, Homo sapiens
  misc_RNA (1)...(19): siRNA sense strand
cauagacccucccaacauu

SEQ ID NO: 190242 - RNA, 19 nt, Homo sapiens
  misc_RNA (1)...(19): siRNA sense strand
gcacaggaaucaccuucau

SEQ ID NO: 190243 - RNA, 19 nt, Homo sapiens
  misc_RNA (1)...(19): siRNA sense strand
guuuccagcuuccuaauuu

SEQ ID NO: 190244 - RNA, 19 nt, Homo sapiens
  misc_RNA (1)...(19): siRNA sense strand
gagcugagaagcagauuug

SEQ ID NO: 190245 - RNA, 19 nt, Homo sapiens
  misc_RNA (1)...(19): siRNA sense strand
ugagagauguucaguucaa

SEQ ID NO: 190246 - RNA, 19 nt, Homo sapiens
  misc_RNA (1)...(19): siRNA sense strand
caacaccggucacuucaag

SEQ ID NO: 190247 - RNA, 19 nt, Homo sapiens
  misc_RNA (1)...(19): siRNA sense strand
ggaaauaccagaucuuugc

SEQ ID NO: 190248 - RNA, 19 nt, Homo sapiens
  misc_RNA (1)...(19): siRNA sense strand
ugacagccaugcccucuau

SEQ ID NO: 190249 - RNA, 19 nt, Homo sapiens
  misc_RNA (1)...(19): siRNA sense strand
caacuuggacuggauguuu

SEQ ID NO: 190250 - RNA, 19 nt, Homo sapiens
  misc_RNA (1)...(19): siRNA sense strand
gacgacccauccugugaua

SEQ ID NO: 190251 - RNA, 19 nt, Homo sapiens
  misc_RNA (1)...(19): siRNA sense strand
gaugggauccugcuauaug

SEQ ID NO: 190252 - RNA, 19 nt, Homo sapiens
  misc_RNA (1)...(19): siRNA sense strand
caccagaaauugcucguau

SEQ ID NO: 190253 - RNA, 19 nt, Homo sapiens
  misc_RNA (1)...(19): siRNA sense strand
gcagugguccuuucuacuu

SEQ ID NO: 190254 - RNA, 19 nt, Homo sapiens
  misc_RNA (1)...(19): siRNA sense strand
gacuggauguuucguuauu

SEQ ID NO: 190255 - RNA, 19 nt, Homo sapiens
  misc_RNA (1)...(19): siRNA sense strand
uaacugggcugguugucau

SEQ ID NO: 190256 - RNA, 19 nt, Homo sapiens
  misc_RNA (1)...(19): siRNA sense strand
ccaacugaaugaagagcua

SEQ ID NO: 190257 - RNA, 19 nt, Homo sapiens
  misc_RNA (1)...(19): siRNA sense strand
gaaggcgccugcucugagu

SEQ ID NO: 190258 - RNA, 19 nt, Homo sapiens
  misc_RNA (1)...(19): siRNA sense strand
agaaggagcuggcuagcau

SEQ ID NO: 190259 - RNA, 19 nt, Homo sapiens
  misc_RNA (1)...(19): siRNA sense strand
ugccauaauugacaacuuu

SEQ ID NO: 190260 - RNA, 19 nt, Homo sapiens
  misc_RNA (1)...(19): siRNA sense strand
cgugggaguuuacaggaua

SEQ ID NO: 190261 - RNA, 19 nt, Homo sapiens
  misc_RNA (1)...(19): siRNA sense strand
uggacuggauguuucguua

SEQ ID NO: 190262 - RNA, 19 nt, Homo sapiens
  misc_RNA (1)...(19): siRNA sense strand
acgaagauaucacggugua

SEQ ID NO: 190263 - RNA, 19 nt, Homo sapiens
  misc_RNA (1)...(19): siRNA sense strand
cuacuucagugacauuguu

SEQ ID NO: 190264 - RNA, 19 nt, Homo sapiens
  misc_RNA (1)...(19): siRNA sense strand
ccaucaaacaugugaauaa

SEQ ID NO: 190265 - RNA, 19 nt, Homo sapiens
  misc_RNA (1)...(19): siRNA sense strand
ugacagcccaugggaaaua

SEQ ID NO: 190266 - RNA, 19 nt, Homo sapiens
  misc_RNA (1)...(19): siRNA sense strand
gcauagacccucccaacau

SEQ ID NO: 190267 - RNA, 19 nt, Homo sapiens
  misc_RNA (1)...(19): siRNA sense strand
caucaaacaugugaauaag

SEQ ID NO: 190268 - RNA, 19 nt, Homo sapiens
  misc_RNA (1)...(19): siRNA sense strand
caaagagauuguccagaag

SEQ ID NO: 190269 - RNA, 19 nt, Homo sapiens
  misc_RNA (1)...(19): siRNA sense strand
ggauggacuucgaauugug

SEQ ID NO: 190270 - RNA, 19 nt, Homo sapiens
  misc_RNA (1)...(19): siRNA sense strand
gaaucaccuucaucauguu

SEQ ID NO: 190271 - RNA, 19 nt, Homo sapiens
  misc_RNA (1)...(19): siRNA sense strand
gagaggccuuucagacugu

SEQ ID NO: 190272 - RNA, 19 nt, Homo sapiens
  misc_RNA (1)...(19): siRNA sense strand
ucguauggcccuagcauua

SEQ ID NO: 190273 - RNA, 19 nt, Homo sapiens
  misc_RNA (1)...(19): siRNA sense strand
ggaacaguaugccaauaac

SEQ ID NO: 190274 - RNA, 19 nt, Homo sapiens
  misc_RNA (1)...(19): siRNA sense strand
gaacaaugaccgagagacu

SEQ ID NO: 190275 - RNA, 19 nt, Homo sapiens
  misc_RNA (1)...(19): siRNA sense strand
gcugaaguccugaaugaga

SEQ ID NO: 190276 - RNA, 19 nt, Homo sapiens
  misc_RNA (1)...(19): siRNA sense strand
ccaucucacucgcuucauu

SEQ ID NO: 190277 - RNA, 19 nt, Homo sapiens
  misc_RNA (1)...(19): siRNA sense strand
gcaccagcauauuggacaa

SEQ ID NO: 190278 - RNA, 19 nt, Homo sapiens
  misc_RNA (1)...(19): siRNA sense strand
ugaccggccucacuacuuc

SEQ ID NO: 190279 - RNA, 19 nt, Homo sapiens
  misc_RNA (1)...(19): siRNA sense strand
gcugacgucuauagcuuug

SEQ ID NO: 190280 - RNA, 19 nt, Homo sapiens
  misc_RNA (1)...(19): siRNA sense strand
cgacccauccugugauaaa

SEQ ID NO: 190281 - RNA, 19 nt, Homo sapiens
  misc_RNA (1)...(19): siRNA sense strand
gaagcucugcucuaccaaa

SEQ ID NO: 190282 - RNA, 19 nt, Homo sapiens
  misc_RNA (1)...(19): siRNA sense strand
ggacuucgaauuguggaaa

SEQ ID NO: 190283 - RNA, 19 nt, Homo sapiens
  misc_RNA (1)...(19): siRNA sense strand
cugcuuugaugccauaauu

SEQ ID NO: 190284 - RNA, 19 nt, Homo sapiens
  misc_RNA (1)...(19): siRNA sense strand
augcugaaguccugaauga

SEQ ID NO: 190285 - RNA, 19 nt, Homo sapiens
  misc_RNA (1)...(19): siRNA sense strand
cuguauaccugcuuugaug

SEQ ID NO: 190286 - RNA, 19 nt, Homo sapiens
  misc_RNA (1)...(19): siRNA sense strand
gaaugagacaauacaggaa

SEQ ID NO: 190287 - RNA, 19 nt, Homo sapiens
  misc_RNA (1)...(19): siRNA sense strand
gcuggcugcuucuaugaug

SEQ ID NO: 190288 - RNA, 19 nt, Homo sapiens
  misc_RNA (1)...(19): siRNA sense strand
ugacauuguuggcuucaca

SEQ ID NO: 190289 - RNA, 19 nt, Homo sapiens
  misc_RNA (1)...(19): siRNA sense strand
gccagacuuuggacagauu

SEQ ID NO: 190290 - RNA, 19 nt, Homo sapiens
  misc_RNA (1)...(19): siRNA sense strand
gucuauagcuuugggauca

SEQ ID NO: 190291 - RNA, 19 nt, Homo sapiens
  misc_RNA (1)...(19): siRNA sense strand
ccaacugugugguggauag

SEQ ID NO: 190292 - RNA, 19 nt, Homo sapiens
  misc_RNA (1)...(19): siRNA sense strand
uaccagaucuuugccaaca

SEQ ID NO: 190293 - RNA, 19 nt, Homo sapiens
  misc_RNA (1)...(19): siRNA sense strand
gcuuugaugccauaauuga

SEQ ID NO: 190294 - RNA, 19 nt, Homo sapiens
  misc_RNA (1)...(19): siRNA sense strand
ugaccuguauaccugcuuu

SEQ ID NO: 190295 - RNA, 19 nt, Homo sapiens
  misc_RNA (1)...(19): siRNA sense strand
ccacaacagcauuauuuca

SEQ ID NO: 190296 - RNA, 19 nt, Homo sapiens
  misc_RNA (1)...(19): siRNA sense strand
acauuugcauugucacuga

SEQ ID NO: 190297 - RNA, 19 nt, Homo sapiens
  misc_RNA (1)...(19): siRNA sense strand
ugaauaagaagcgcauuga

SEQ ID NO: 190298 - RNA, 19 nt, Homo sapiens
  misc_RNA (1)...(19): siRNA sense strand
ggaggauggacuucgaauu

SEQ ID NO: 190299 - RNA, 19 nt, Homo sapiens
  misc_RNA (1)...(19): siRNA sense strand
agaugcaguuucuuccuuu

SEQ ID NO: 190300 - RNA, 19 nt, Homo sapiens
  misc_RNA (1)...(19): siRNA sense strand
cagaugaccggccucacua

SEQ ID NO: 190301 - RNA, 19 nt, Homo sapiens
  misc_RNA (1)...(19): siRNA sense strand
uagaugcaguuucuuccuu

SEQ ID NO: 190302 - RNA, 19 nt, Homo sapiens
  misc_RNA (1)...(19): siRNA sense strand
gaguuuacaggauauucua

SEQ ID NO: 190303 - RNA, 19 nt, Homo sapiens
  misc_RNA (1)...(19): siRNA sense strand
uuucaacccuggcaauugu

SEQ ID NO: 190304 - RNA, 19 nt, Homo sapiens
  misc_RNA (1)...(19): siRNA sense strand
gaagauaucacgguguaac

SEQ ID NO: 190305 - RNA, 19 nt, Homo sapiens
  misc_RNA (1)...(19): siRNA sense strand
cagcugaggcuacgcauag

SEQ ID NO: 190306 - RNA, 19 nt, Homo sapiens
  misc_RNA (1)...(19): siRNA sense strand
ucaacgccaugcaccagaa

SEQ ID NO: 190307 - RNA, 19 nt, Homo sapiens
  misc_RNA (1)...(19): siRNA sense strand
uggaacaguaugccaauaa

SEQ ID NO: 190308 - RNA, 19 nt, Homo sapiens
  misc_RNA (1)...(19): siRNA sense strand
gaccggacccaacugaaug

SEQ ID NO: 190309 - RNA, 19 nt, Homo sapiens
  misc_RNA (1)...(19): siRNA sense strand
ugauaaaacuccacuuuca

SEQ ID NO: 190310 - RNA, 19 nt, Homo sapiens
  misc_RNA (1)...(19): siRNA sense strand
agaaucgucugcugauaag

SEQ ID NO: 190311 - RNA, 19 nt, Homo sapiens
  misc_RNA (1)...(19): siRNA sense strand
augaugggauccugcuaua

SEQ ID NO: 190312 - RNA, 19 nt, Homo sapiens
  misc_RNA (1)...(19): siRNA sense strand
ggugaucacguaccgagaa

SEQ ID NO: 190313 - RNA, 19 nt, Homo sapiens
  misc_RNA (1)...(19): siRNA sense strand
gaaugaagagcuaguuuug

SEQ ID NO: 190314 - RNA, 19 nt, Homo sapiens
  misc_RNA (1)...(19): siRNA sense strand
acaacagcauuauuucauc

SEQ ID NO: 190315 - RNA, 19 nt, Homo sapiens
  misc_RNA (1)...(19): siRNA sense strand
gcauggccuuucuccacaa

SEQ ID NO: 190316 - RNA, 19 nt, Homo sapiens
  misc_RNA (1)...(19): siRNA sense strand
gagcaggccacccacuuca

SEQ ID NO: 190317 - RNA, 19 nt, Homo sapiens
  misc_RNA (1)...(19): siRNA sense strand
acaaugaccgagagacuga

SEQ ID NO: 190318 - RNA, 19 nt, Homo sapiens
  misc_RNA (1)...(19): siRNA sense strand
ugaccgagagacugacuuu

SEQ ID NO: 190319 - RNA, 19 nt, Homo sapiens
  misc_RNA (1)...(19): siRNA sense strand
uaccugcuuugaugccaua

SEQ ID NO: 190320 - RNA, 19 nt, Homo sapiens
  misc_RNA (1)...(19): siRNA sense strand
cagugguccuuucuacuug

SEQ ID NO: 190321 - RNA, 19 nt, Homo sapiens
  misc_RNA (1)...(19): siRNA sense strand
caacugcugaaccugauga

SEQ ID NO: 190322 - RNA, 19 nt, Homo sapiens
  misc_RNA (1)...(19): siRNA sense strand
ggacuggauguuucguuau

SEQ ID NO: 190323 - RNA, 19 nt, Homo sapiens
  misc_RNA (1)...(19): siRNA sense strand
gcaucaacuuggacuggau

SEQ ID NO: 190324 - RNA, 19 nt, Homo sapiens
  misc_RNA (1)...(19): siRNA sense strand
gggaaauaccagaucuuug

SEQ ID NO: 190325 - RNA, 19 nt, Homo sapiens
  misc_RNA (1)...(19): siRNA sense strand
acucagagcguuaucacaa

SEQ ID NO: 190326 - RNA, 19 nt, Homo sapiens
  misc_RNA (1)...(19): siRNA sense strand
cagcugagcggccagacuu

SEQ ID NO: 190327 - RNA, 19 nt, Homo sapiens
  misc_RNA (1)...(19): siRNA sense strand
ugccaucacuucugcuguu

SEQ ID NO: 190328 - RNA, 19 nt, Homo sapiens
  misc_RNA (1)...(19): siRNA sense strand
cuccacaacagcauuauuu

SEQ ID NO: 190329 - RNA, 19 nt, Homo sapiens
  misc_RNA (1)...(19): siRNA sense strand
gcagaaggcugacgucuau

SEQ ID NO: 190330 - RNA, 19 nt, Homo sapiens
  misc_RNA (1)...(19): siRNA sense strand
ccaaagagauuguccagaa

SEQ ID NO: 190331 - RNA, 19 nt, Homo sapiens
  misc_RNA (1)...(19): siRNA sense strand
gaacacugcuucucgaaug

SEQ ID NO: 190332 - RNA, 19 nt, Homo sapiens
  misc_RNA (1)...(19): siRNA sense strand
ggaaucaccuucaucaugu

SEQ ID NO: 190333 - RNA, 19 nt, Homo sapiens
  misc_RNA (1)...(19): siRNA sense strand
ggacccaacugaaugaaga

SEQ ID NO: 190334 - RNA, 19 nt, Homo sapiens
  misc_RNA (1)...(19): siRNA sense strand
gaacacaaccugagcuaug

SEQ ID NO: 190335 - RNA, 19 nt, Homo sapiens
  misc_RNA (1)...(19): siRNA sense strand
gggagaaucugaccaaugg

SEQ ID NO: 190336 - RNA, 19 nt, Homo sapiens
  misc_RNA (1)...(19): siRNA sense strand
gaaagcugaugcuggagaa

SEQ ID NO: 190337 - RNA, 19 nt, Homo sapiens
  misc_RNA (1)...(19): siRNA sense strand
gggauuaugucuucuuuua

SEQ ID NO: 190338 - RNA, 19 nt, Homo sapiens
  misc_RNA (1)...(19): siRNA sense strand
gaggauggacuucgaauug

SEQ ID NO: 190339 - RNA, 19 nt, Homo sapiens
  misc_RNA (1)...(19): siRNA sense strand
uaugagagauguucaguuc

SEQ ID NO: 190340 - RNA, 19 nt, Homo sapiens
  misc_RNA (1)...(19): siRNA sense strand
ggagcuggcuagcauguug

SEQ ID NO: 190341 - RNA, 19 nt, Homo sapiens
  misc_RNA (1)...(19): siRNA sense strand
gaaauguugucgccaucaa

SEQ ID NO: 190342 - RNA, 19 nt, Homo sapiens
  misc_RNA (1)...(19): siRNA sense strand
cauagacccucccaacauu

SEQ ID NO: 190343 - RNA, 19 nt, Homo sapiens
  misc_RNA (1)...(19): siRNA sense strand
gcacaggaaucaccuucau

SEQ ID NO: 190344 - RNA, 19 nt, Homo sapiens
  misc_RNA (1)...(19): siRNA sense strand
aaggaaagaugcgaacaua

SEQ ID NO: 190345 - RNA, 19 nt, Homo sapiens
  misc_RNA (1)...(19): siRNA sense strand
guuuccagcuuccuaauuu

SEQ ID NO: 190346 - RNA, 19 nt, Homo sapiens
  misc_RNA (1)...(19): siRNA sense strand
gagcugagaagcagauuug

SEQ ID NO: 190347 - RNA, 19 nt, Homo sapiens
  misc_RNA (1)...(19): siRNA sense strand
ugagagauguucaguucaa

SEQ ID NO: 190348 - RNA, 19 nt, Homo sapiens
  misc_RNA (1)...(19): siRNA sense strand
caacaccggucacuucaag

SEQ ID NO: 190349 - RNA, 19 nt, Homo sapiens
  misc_RNA (1)...(19): siRNA sense strand
ggaaauaccagaucuuugc

SEQ ID NO: 190350 - RNA, 19 nt, Homo sapiens
  misc_RNA (1)...(19): siRNA sense strand
ugacagccaugcccucuau

SEQ ID NO: 190351 - RNA, 19 nt, Homo sapiens
  misc_RNA (1)...(19): siRNA sense strand
caacuuggacuggauguuu

SEQ ID NO: 190352 - RNA, 19 nt, Homo sapiens
  misc_RNA (1)...(19): siRNA sense strand
gacgacccauccugugaua

SEQ ID NO: 190353 - RNA, 19 nt, Homo sapiens
  misc_RNA (1)...(19): siRNA sense strand
gaugggauccugcuauaug

SEQ ID NO: 190354 - RNA, 19 nt, Homo sapiens
  misc_RNA (1)...(19): siRNA sense strand
caccagaaauugcucguau

SEQ ID NO: 190355 - RNA, 19 nt, Homo sapiens
  misc_RNA (1)...(19): siRNA sense strand
gcagugguccuuucuacuu

SEQ ID NO: 190356 - RNA, 19 nt, Homo sapiens
  misc_RNA (1)...(19): siRNA sense strand
gacuggauguuucguuauu

SEQ ID NO: 190357 - RNA, 19 nt, Homo sapiens
  misc_RNA (1)...(19): siRNA sense strand
uaacugggcugguugucau

SEQ ID NO: 190358 - RNA, 19 nt, Homo sapiens
  misc_RNA (1)...(19): siRNA sense strand
ggaaagaugcgaacauacu

SEQ ID NO: 190359 - RNA, 19 nt, Homo sapiens
  misc_RNA (1)...(19): siRNA sense strand
ccaacugaaugaagagcua

SEQ ID NO: 190360 - RNA, 19 nt, Homo sapiens
  misc_RNA (1)...(19): siRNA sense strand
gaaggcgccugcucugagu

SEQ ID NO: 190361 - RNA, 19 nt, Homo sapiens
  misc_RNA (1)...(19): siRNA sense strand
agaaggagcuggcuagcau

SEQ ID NO: 190362 - RNA, 19 nt, Homo sapiens
  misc_RNA (1)...(19): siRNA sense strand
ugccauaauugacaacuuu

SEQ ID NO: 190363 - RNA, 19 nt, Homo sapiens
  misc_RNA (1)...(19): siRNA sense strand
gcgaacauacuggcucuua

SEQ ID NO: 190364 - RNA, 19 nt, Homo sapiens
  misc_RNA (1)...(19): siRNA sense strand
ccaaggaugcccuagauga

SEQ ID NO: 190365 - RNA, 19 nt, Homo sapiens
  misc_RNA (1)...(19): siRNA sense strand
cgugggaguuuacaggaua

SEQ ID NO: 190366 - RNA, 19 nt, Homo sapiens
  misc_RNA (1)...(19): siRNA sense strand
uggacuggauguuucguua

SEQ ID NO: 190367 - RNA, 19 nt, Homo sapiens
  misc_RNA (1)...(19): siRNA sense strand
acgaagauaucacggugua

SEQ ID NO: 190368 - RNA, 19 nt, Homo sapiens
  misc_RNA (1)...(19): siRNA sense strand
cuacuucagugacauuguu

SEQ ID NO: 190369 - RNA, 19 nt, Homo sapiens
  misc_RNA (1)...(19): siRNA sense strand
ccaucaaacaugugaauaa

SEQ ID NO: 190370 - RNA, 19 nt, Homo sapiens
  misc_RNA (1)...(19): siRNA sense strand
ugacagcccaugggaaaua

SEQ ID NO: 190371 - RNA, 19 nt, Homo sapiens
  misc_RNA (1)...(19): siRNA sense strand
gcauagacccucccaacau

SEQ ID NO: 190372 - RNA, 19 nt, Homo sapiens
  misc_RNA (1)...(19): siRNA sense strand
caucaaacaugugaauaag

SEQ ID NO: 190373 - RNA, 19 nt, Homo sapiens
  misc_RNA (1)...(19): siRNA sense strand
caaagagauuguccagaag

SEQ ID NO: 190374 - RNA, 19 nt, Homo sapiens
  misc_RNA (1)...(19): siRNA sense strand
ggauggacuucgaauugug

SEQ ID NO: 190375 - RNA, 19 nt, Homo sapiens
  misc_RNA (1)...(19): siRNA sense strand
gaaucaccuucaucauguu

SEQ ID NO: 190376 - RNA, 19 nt, Homo sapiens
  misc_RNA (1)...(19): siRNA sense strand
gagaggccuuucagacugu

SEQ ID NO: 190377 - RNA, 19 nt, Homo sapiens
  misc_RNA (1)...(19): siRNA sense strand
gaaagaugcgaacauacug

SEQ ID NO: 190378 - RNA, 19 nt, Homo sapiens
  misc_RNA (1)...(19): siRNA sense strand
caccaaggaugcccuagau

SEQ ID NO: 190379 - RNA, 19 nt, Homo sapiens
  misc_RNA (1)...(19): siRNA sense strand
ucguauggcccuagcauua

SEQ ID NO: 190380 - RNA, 19 nt, Homo sapiens
  misc_RNA (1)...(19): siRNA sense strand
ggaacaguaugccaauaac

SEQ ID NO: 190381 - RNA, 19 nt, Homo sapiens
  misc_RNA (1)...(19): siRNA sense strand
gaacaaugaccgagagacu

SEQ ID NO: 190382 - RNA, 19 nt, Homo sapiens
  misc_RNA (1)...(19): siRNA sense strand
gcugaaguccugaaugaga

SEQ ID NO: 190383 - RNA, 19 nt, Homo sapiens
  misc_RNA (1)...(19): siRNA sense strand
ccaucucacucgcuucauu

SEQ ID NO: 190384 - RNA, 19 nt, Homo sapiens
  misc_RNA (1)...(19): siRNA sense strand
gcuaggaugcuuccagcua

SEQ ID NO: 190385 - RNA, 19 nt, Homo sapiens
  misc_RNA (1)...(19): siRNA sense strand
gcaccagcauauuggacaa

SEQ ID NO: 190386 - RNA, 19 nt, Homo sapiens
  misc_RNA (1)...(19): siRNA sense strand
ugaccggccucacuacuuc

SEQ ID NO: 190387 - RNA, 19 nt, Homo sapiens
  misc_RNA (1)...(19): siRNA sense strand
gaacauacuggcucuuagg

SEQ ID NO: 190388 - RNA, 19 nt, Homo sapiens
  misc_RNA (1)...(19): siRNA sense strand
gcugacgucuauagcuuug

SEQ ID NO: 190389 - RNA, 19 nt, Homo sapiens
  misc_RNA (1)...(19): siRNA sense strand
cgacccauccugugauaaa

SEQ ID NO: 190390 - RNA, 19 nt, Homo sapiens
  misc_RNA (1)...(19): siRNA sense strand
gaagcucugcucuaccaaa

SEQ ID NO: 190391 - RNA, 19 nt, Homo sapiens
  misc_RNA (1)...(19): siRNA sense strand
ggacuucgaauuguggaaa

SEQ ID NO: 190392 - RNA, 19 nt, Homo sapiens
  misc_RNA (1)...(19): siRNA sense strand
cugcuuugaugccauaauu

SEQ ID NO: 190393 - RNA, 19 nt, Homo sapiens
  misc_RNA (1)...(19): siRNA sense strand
augcugaaguccugaauga

SEQ ID NO: 190394 - RNA, 19 nt, Homo sapiens
  misc_RNA (1)...(19): siRNA sense strand
uagaugagcuaggaugcuu

SEQ ID NO: 190395 - RNA, 19 nt, Homo sapiens
  misc_RNA (1)...(19): siRNA sense strand
cuguauaccugcuuugaug

SEQ ID NO: 190396 - RNA, 19 nt, Homo sapiens
  misc_RNA (1)...(19): siRNA sense strand
gaaugagacaauacaggaa

SEQ ID NO: 190397 - RNA, 19 nt, Homo sapiens
  misc_RNA (1)...(19): siRNA sense strand
gcuggcugcuucuaugaug

SEQ ID NO: 190398 - RNA, 19 nt, Homo sapiens
  misc_RNA (1)...(19): siRNA sense strand
ugacauuguuggcuucaca

SEQ ID NO: 190399 - RNA, 19 nt, Homo sapiens
  misc_RNA (1)...(19): siRNA sense strand
gccagacuuuggacagauu

SEQ ID NO: 190400 - RNA, 19 nt, Homo sapiens
  misc_RNA (1)...(19): siRNA sense strand
gucuauagcuuugggauca

SEQ ID NO: 190401 - RNA, 19 nt, Homo sapiens
  misc_RNA (1)...(19): siRNA sense strand
ccaacugugugguggauag

SEQ ID NO: 190402 - RNA, 19 nt, Homo sapiens
  misc_RNA (1)...(19): siRNA sense strand
uaccagaucuuugccaaca

SEQ ID NO: 190403 - RNA, 19 nt, Homo sapiens
  misc_RNA (1)...(19): siRNA sense strand
gaaaugaagggaaaaggaa

SEQ ID NO: 190404 - RNA, 19 nt, Homo sapiens
  misc_RNA (1)...(19): siRNA sense strand
gcuuugaugccauaauuga

SEQ ID NO: 190405 - RNA, 19 nt, Homo sapiens
  misc_RNA (1)...(19): siRNA sense strand
ugaccuguauaccugcuuu

SEQ ID NO: 190406 - RNA, 19 nt, Homo sapiens
  misc_RNA (1)...(19): siRNA sense strand
ccacaacagcauuauuuca

SEQ ID NO: 190407 - RNA, 19 nt, Homo sapiens
  misc_RNA (1)...(19): siRNA sense strand
acauuugcauugucacuga

SEQ ID NO: 190408 - RNA, 19 nt, Homo sapiens
  misc_RNA (1)...(19): siRNA sense strand
ugaauaagaagcgcauuga

SEQ ID NO: 190409 - RNA, 19 nt, Homo sapiens
  misc_RNA (1)...(19): siRNA sense strand
ggaggauggacuucgaauu

SEQ ID NO: 190410 - RNA, 19 nt, Homo sapiens
  misc_RNA (1)...(19): siRNA sense strand
agaugcaguuucuuccuuu

SEQ ID NO: 190411 - RNA, 19 nt, Homo sapiens
  misc_RNA (1)...(19): siRNA sense strand
uagaugcaguuucuuccuu

SEQ ID NO: 190412 - RNA, 19 nt, Homo sapiens
  misc_RNA (1)...(19): siRNA sense strand
cagaugaccggccucacua

SEQ ID NO: 190413 - RNA, 19 nt, Homo sapiens
  misc_RNA (1)...(19): siRNA sense strand
gaguuuacaggauauucua

SEQ ID NO: 190414 - RNA, 19 nt, Homo sapiens
  misc_RNA (1)...(19): siRNA sense strand
uuucaacccuggcaauugu

SEQ ID NO: 190415 - RNA, 19 nt, Homo sapiens
  misc_RNA (1)...(19): siRNA sense strand
gaagauaucacgguguaac

SEQ ID NO: 190416 - RNA, 19 nt, Homo sapiens
  misc_RNA (1)...(19): siRNA sense strand
gaagaugccccguuauugu

SEQ ID NO: 190417 - RNA, 19 nt, Homo sapiens
  misc_RNA (1)...(19): siRNA sense strand
cagcugaggcuacgcauag

SEQ ID NO: 190418 - RNA, 19 nt, Homo sapiens
  misc_RNA (1)...(19): siRNA sense strand
ucaacgccaugcaccagaa

SEQ ID NO: 190419 - RNA, 19 nt, Homo sapiens
  misc_RNA (1)...(19): siRNA sense strand
uggaacaguaugccaauaa

SEQ ID NO: 190420 - RNA, 19 nt, Homo sapiens
  misc_RNA (1)...(19): siRNA sense strand
gaccggacccaacugaaug

SEQ ID NO: 190421 - RNA, 19 nt, Homo sapiens
  misc_RNA (1)...(19): siRNA sense strand
ugauaaaacuccacuuuca

SEQ ID NO: 190422 - RNA, 19 nt, Homo sapiens
  misc_RNA (1)...(19): siRNA sense strand
agaaucgucugcugauaag

SEQ ID NO: 190423 - RNA, 19 nt, Homo sapiens
  misc_RNA (1)...(19): siRNA sense strand
augaugggauccugcuaua

SEQ ID NO: 190424 - RNA, 19 nt, Homo sapiens
  misc_RNA (1)...(19): siRNA sense strand
gcauggccuuucuccacaa

SEQ ID NO: 190425 - RNA, 19 nt, Homo sapiens
  misc_RNA (1)...(19): siRNA sense strand
cgaacauacuggcucuuag

SEQ ID NO: 190426 - RNA, 19 nt, Homo sapiens
  misc_RNA (1)...(19): siRNA sense strand
gucaagcgcugaagaucca

SEQ ID NO: 190427 - RNA, 19 nt, Homo sapiens
  misc_RNA (1)...(19): siRNA sense strand
gaaugaagagcuaguuuug

SEQ ID NO: 190428 - RNA, 19 nt, Homo sapiens
  misc_RNA (1)...(19): siRNA sense strand
acaacagcauuauuucauc

SEQ ID NO: 190429 - RNA, 19 nt, Homo sapiens
  misc_RNA (1)...(19): siRNA sense strand
gaagauggauugccacaaa

SEQ ID NO: 190430 - RNA, 19 nt, Homo sapiens
  misc_RNA (1)...(19): siRNA sense strand
gaacagaaagucuucaguu

SEQ ID NO: 190431 - RNA, 19 nt, Homo sapiens
  misc_RNA (1)...(19): siRNA sense strand
guaccuaguuuccagcuuu

SEQ ID NO: 190432 - RNA, 19 nt, Homo sapiens
  misc_RNA (1)...(19): siRNA sense strand
ugacauccguuggaacuuu

SEQ ID NO: 190433 - RNA, 19 nt, Homo sapiens
  misc_RNA (1)...(19): siRNA sense strand
gaggauuuguaccuaguuu

SEQ ID NO: 190434 - RNA, 19 nt, Homo sapiens
  misc_RNA (1)...(19): siRNA sense strand
aacagaaagucuucaguuu

SEQ ID NO: 190435 - RNA, 19 nt, Homo sapiens
  misc_RNA (1)...(19): siRNA sense strand
gagaaaggcaccaucuaug

SEQ ID NO: 190436 - RNA, 19 nt, Homo sapiens
  misc_RNA (1)...(19): siRNA sense strand
gaggccaucgcacuuaaua

SEQ ID NO: 190437 - RNA, 19 nt, Homo sapiens
  misc_RNA (1)...(19): siRNA sense strand
cgagaaaggcaccaucuau

SEQ ID NO: 190438 - RNA, 19 nt, Homo sapiens
  misc_RNA (1)...(19): siRNA sense strand
agaaaggcaccaucuauga

SEQ ID NO: 190439 - RNA, 19 nt, Homo sapiens
  misc_RNA (1)...(19): siRNA sense strand
gagaagaugaagauggauu

SEQ ID NO: 190440 - RNA, 19 nt, Homo sapiens
  misc_RNA (1)...(19): siRNA sense strand
caacguggccaccuacugu

SEQ ID NO: 190441 - RNA, 19 nt, Homo sapiens
  misc_RNA (1)...(19): siRNA sense strand
gcaagcacauccucuucgu

SEQ ID NO: 190442 - RNA, 19 nt, Homo sapiens
  misc_RNA (1)...(19): siRNA sense strand
aggagaagaugaagaugga

SEQ ID NO: 190443 - RNA, 19 nt, Homo sapiens
  misc_RNA (1)...(19): siRNA sense strand
uggcguacuugaagcaauu

SEQ ID NO: 190444 - RNA, 19 nt, Homo sapiens
  misc_RNA (1)...(19): siRNA sense strand
gacauccguuggaacuuug

SEQ ID NO: 190445 - RNA, 19 nt, Homo sapiens
  misc_RNA (1)...(19): siRNA sense strand
gggcacauucaaaucuaua

SEQ ID NO: 190446 - RNA, 19 nt, Homo sapiens
  misc_RNA (1)...(19): siRNA sense strand
ccaagcaggagaagaugaa

SEQ ID NO: 190447 - RNA, 19 nt, Homo sapiens
  misc_RNA (1)...(19): siRNA sense strand
gggaggauuuguaccuagu

SEQ ID NO: 190448 - RNA, 19 nt, Homo sapiens
  misc_RNA (1)...(19): siRNA sense strand
gaaaggcaccaucuaugac

SEQ ID NO: 190449 - RNA, 19 nt, Homo sapiens
  misc_RNA (1)...(19): siRNA sense strand
ggucagcucagucaagaca

SEQ ID NO: 190450 - RNA, 19 nt, Homo sapiens
  misc_RNA (1)...(19): siRNA sense strand
uaugaggccaucgcacuua

SEQ ID NO: 190451 - RNA, 19 nt, Homo sapiens
  misc_RNA (1)...(19): siRNA sense strand
ucagcucagucaagacaga

SEQ ID NO: 190452 - RNA, 19 nt, Homo sapiens
  misc_RNA (1)...(19): siRNA sense strand
gcacauccucuucgucaac

SEQ ID NO: 190453 - RNA, 19 nt, Homo sapiens
  misc_RNA (1)...(19): siRNA sense strand
cagacauccuggcguacuu

SEQ ID NO: 190454 - RNA, 19 nt, Homo sapiens
  misc_RNA (1)...(19): siRNA sense strand
caccaucuaugacuaugag

SEQ ID NO: 190455 - RNA, 19 nt, Homo sapiens
  misc_RNA (1)...(19): siRNA sense strand
gcacauucaaaucuauauc

SEQ ID NO: 190456 - RNA, 19 nt, Homo sapiens
  misc_RNA (1)...(19): siRNA sense strand
gcaccaucuaugacuauga

SEQ ID NO: 190457 - RNA, 19 nt, Homo sapiens
  misc_RNA (1)...(19): siRNA sense strand
gggcuacggucagcucagu

SEQ ID NO: 190458 - RNA, 19 nt, Homo sapiens
  misc_RNA (1)...(19): siRNA sense strand
gaaaggggaugugaauggu

SEQ ID NO: 190459 - RNA, 19 nt, Homo sapiens
  misc_RNA (1)...(19): siRNA sense strand
gggcaagcacauccucuuc

SEQ ID NO: 190460 - RNA, 19 nt, Homo sapiens
  misc_RNA (1)...(19): siRNA sense strand
gaagcacuccuguccucau

SEQ ID NO: 190461 - RNA, 19 nt, Homo sapiens
  misc_RNA (1)...(19): siRNA sense strand
agaagaugaagauggauug

SEQ ID NO: 190462 - RNA, 19 nt, Homo sapiens
  misc_RNA (1)...(19): siRNA sense strand
ggucugacagcgcaauauc

SEQ ID NO: 190463 - RNA, 19 nt, Homo sapiens
  misc_RNA (1)...(19): siRNA sense strand
caccuacuguggucugaca

SEQ ID NO: 190464 - RNA, 19 nt, Homo sapiens
  misc_RNA (1)...(19): siRNA sense strand
ggaggauuuguaccuaguu

SEQ ID NO: 190465 - RNA, 19 nt, Homo sapiens
  misc_RNA (1)...(19): siRNA sense strand
aaggcaccaucuaugacua

SEQ ID NO: 190466 - RNA, 19 nt, Homo sapiens
  misc_RNA (1)...(19): siRNA sense strand
cuguaaagguccaugacau

SEQ ID NO: 190467 - RNA, 19 nt, Homo sapiens
  misc_RNA (1)...(19): siRNA sense strand
ucuccuagccugcuuugug

SEQ ID NO: 190468 - RNA, 19 nt, Homo sapiens
  misc_RNA (1)...(19): siRNA sense strand
augaggccaucgcacuuaa

SEQ ID NO: 190469 - RNA, 19 nt, Homo sapiens
  misc_RNA (1)...(19): siRNA sense strand
acggucagcucagucaaga

SEQ ID NO: 190470 - RNA, 19 nt, Homo sapiens
  misc_RNA (1)...(19): siRNA sense strand
uugggcacauucaaaucua

SEQ ID NO: 190471 - RNA, 19 nt, Homo sapiens
  misc_RNA (1)...(19): siRNA sense strand
aagcacuccuguccucauc

SEQ ID NO: 190472 - RNA, 19 nt, Homo sapiens
  misc_RNA (1)...(19): siRNA sense strand
gaagauggauugccacaaa

SEQ ID NO: 190473 - RNA, 19 nt, Homo sapiens
  misc_RNA (1)...(19): siRNA sense strand
guaccuaguuuccagcuuu

SEQ ID NO: 190474 - RNA, 19 nt, Homo sapiens
  misc_RNA (1)...(19): siRNA sense strand
gaggauuuguaccuaguuu

SEQ ID NO: 190475 - RNA, 19 nt, Homo sapiens
  misc_RNA (1)...(19): siRNA sense strand
gagaaaggcaccaucuaug

SEQ ID NO: 190476 - RNA, 19 nt, Homo sapiens
  misc_RNA (1)...(19): siRNA sense strand
gaggccaucgcacuuaaua

SEQ ID NO: 190477 - RNA, 19 nt, Homo sapiens
  misc_RNA (1)...(19): siRNA sense strand
cgagaaaggcaccaucuau

SEQ ID NO: 190478 - RNA, 19 nt, Homo sapiens
  misc_RNA (1)...(19): siRNA sense strand
agaaaggcaccaucuauga

SEQ ID NO: 190479 - RNA, 19 nt, Homo sapiens
  misc_RNA (1)...(19): siRNA sense strand
gagaagaugaagauggauu

SEQ ID NO: 190480 - RNA, 19 nt, Homo sapiens
  misc_RNA (1)...(19): siRNA sense strand
caacguggccaccuacugu

SEQ ID NO: 190481 - RNA, 19 nt, Homo sapiens
  misc_RNA (1)...(19): siRNA sense strand
gcaagcacauccucuucgu

SEQ ID NO: 190482 - RNA, 19 nt, Homo sapiens
  misc_RNA (1)...(19): siRNA sense strand
aggagaagaugaagaugga

SEQ ID NO: 190483 - RNA, 19 nt, Homo sapiens
  misc_RNA (1)...(19): siRNA sense strand
ccaagcaggagaagaugaa

SEQ ID NO: 190484 - RNA, 19 nt, Homo sapiens
  misc_RNA (1)...(19): siRNA sense strand
gggaggauuuguaccuagu

SEQ ID NO: 190485 - RNA, 19 nt, Homo sapiens
  misc_RNA (1)...(19): siRNA sense strand
gaaaggcaccaucuaugac

SEQ ID NO: 190486 - RNA, 19 nt, Homo sapiens
  misc_RNA (1)...(19): siRNA sense strand
uaugaggccaucgcacuua

SEQ ID NO: 190487 - RNA, 19 nt, Homo sapiens
  misc_RNA (1)...(19): siRNA sense strand
gcacauccucuucgucaac

SEQ ID NO: 190488 - RNA, 19 nt, Homo sapiens
  misc_RNA (1)...(19): siRNA sense strand
caccaucuaugacuaugag

SEQ ID NO: 190489 - RNA, 19 nt, Homo sapiens
  misc_RNA (1)...(19): siRNA sense strand
gcaccaucuaugacuauga

SEQ ID NO: 190490 - RNA, 19 nt, Homo sapiens
  misc_RNA (1)...(19): siRNA sense strand
gggcaagcacauccucuuc

SEQ ID NO: 190491 - RNA, 19 nt, Homo sapiens
  misc_RNA (1)...(19): siRNA sense strand
agaagaugaagauggauug

SEQ ID NO: 190492 - RNA, 19 nt, Homo sapiens
  misc_RNA (1)...(19): siRNA sense strand
ggucugacagcgcaauauc

SEQ ID NO: 190493 - RNA, 19 nt, Homo sapiens
  misc_RNA (1)...(19): siRNA sense strand
caccuacuguggucugaca

SEQ ID NO: 190494 - RNA, 19 nt, Homo sapiens
  misc_RNA (1)...(19): siRNA sense strand
ggaggauuuguaccuaguu

SEQ ID NO: 190495 - RNA, 19 nt, Homo sapiens
  misc_RNA (1)...(19): siRNA sense strand
aaggcaccaucuaugacua

SEQ ID NO: 190496 - RNA, 19 nt, Homo sapiens
  misc_RNA (1)...(19): siRNA sense strand
ucuccuagccugcuuugug

SEQ ID NO: 190497 - RNA, 19 nt, Homo sapiens
  misc_RNA (1)...(19): siRNA sense strand
augaggccaucgcacuuaa

SEQ ID NO: 190498 - RNA, 19 nt, Homo sapiens
  misc_RNA (1)...(19): siRNA sense strand
gaaccuggccgaugugaua

SEQ ID NO: 190499 - RNA, 19 nt, Homo sapiens
  misc_RNA (1)...(19): siRNA sense strand
ggacagaaccugggcauga

SEQ ID NO: 190500 - RNA, 19 nt, Homo sapiens
  misc_RNA (1)...(19): siRNA sense strand
gaugggaacuugacuuaca

SEQ ID NO: 190501 - RNA, 19 nt, Homo sapiens
  misc_RNA (1)...(19): siRNA sense strand
gcagcugccucuucaacaa

SEQ ID NO: 190502 - RNA, 19 nt, Homo sapiens
  misc_RNA (1)...(19): siRNA sense strand
cuacggaggucgcugcaaa

SEQ ID NO: 190503 - RNA, 19 nt, Homo sapiens
  misc_RNA (1)...(19): siRNA sense strand
ccaaguauguggagcuaau

SEQ ID NO: 190504 - RNA, 19 nt, Homo sapiens
  misc_RNA (1)...(19): siRNA sense strand
gaacgaguacggcaacaug

SEQ ID NO: 190505 - RNA, 19 nt, Homo sapiens
  misc_RNA (1)...(19): siRNA sense strand
ugcacaagcuggacgguua

SEQ ID NO: 190506 - RNA, 19 nt, Homo sapiens
  misc_RNA (1)...(19): siRNA sense strand
gguggcaacugcugcaaga

SEQ ID NO: 190507 - RNA, 19 nt, Homo sapiens
  misc_RNA (1)...(19): siRNA sense strand
gcuggacgguuacuacugu

SEQ ID NO: 190508 - RNA, 19 nt, Homo sapiens
  misc_RNA (1)...(19): siRNA sense strand
ucaguagugucaccuucua

SEQ ID NO: 190509 - RNA, 19 nt, Homo sapiens
  misc_RNA (1)...(19): siRNA sense strand
ggcaacugcugcaagaaau

SEQ ID NO: 190510 - RNA, 19 nt, Homo sapiens
  misc_RNA (1)...(19): siRNA sense strand
gcacagugaaaccaaguau

SEQ ID NO: 190511 - RNA, 19 nt, Homo sapiens
  misc_RNA (1)...(19): siRNA sense strand
ggaggacacuggguucuac

SEQ ID NO: 190512 - RNA, 19 nt, Homo sapiens
  misc_RNA (1)...(19): siRNA sense strand
gacagaaccugggcaugau

SEQ ID NO: 190513 - RNA, 19 nt, Homo sapiens
  misc_RNA (1)...(19): siRNA sense strand
ggagacggagagauauaaa

SEQ ID NO: 190514 - RNA, 19 nt, Homo sapiens
  misc_RNA (1)...(19): siRNA sense strand
ggccgaggcugagaaggaa

SEQ ID NO: 190515 - RNA, 19 nt, Homo sapiens
  misc_RNA (1)...(19): siRNA sense strand
gcugcagcaucgacgagua

SEQ ID NO: 190516 - RNA, 19 nt, Homo sapiens
  misc_RNA (1)...(19): siRNA sense strand
gggagacggagagauauaa

SEQ ID NO: 190517 - RNA, 19 nt, Homo sapiens
  misc_RNA (1)...(19): siRNA sense strand
ggcaaagacugcaguaucc

SEQ ID NO: 190518 - RNA, 19 nt, Homo sapiens
  misc_RNA (1)...(19): siRNA sense strand
cgacgaguacaaccaguuu

SEQ ID NO: 190519 - RNA, 19 nt, Homo sapiens
  misc_RNA (1)...(19): siRNA sense strand
aaagacugcaguauccaua

SEQ ID NO: 190520 - RNA, 19 nt, Homo sapiens
  misc_RNA (1)...(19): siRNA sense strand
gcuacgagaagcugaaugu

SEQ ID NO: 190521 - RNA, 19 nt, Homo sapiens
  misc_RNA (1)...(19): siRNA sense strand
gcaaugaagggaagugcau

SEQ ID NO: 190522 - RNA, 19 nt, Homo sapiens
  misc_RNA (1)...(19): siRNA sense strand
ggcaugauguggaacaaac

SEQ ID NO: 190523 - RNA, 19 nt, Homo sapiens
  misc_RNA (1)...(19): siRNA sense strand
acagugaaaccaaguaugu

SEQ ID NO: 190524 - RNA, 19 nt, Homo sapiens
  misc_RNA (1)...(19): siRNA sense strand
cugaugggaacuugacuua

SEQ ID NO: 190525 - RNA, 19 nt, Homo sapiens
  misc_RNA (1)...(19): siRNA sense strand
gguccucaccagcaacuuu

SEQ ID NO: 190526 - RNA, 19 nt, Homo sapiens
  misc_RNA (1)...(19): siRNA sense strand
uggccgaugugauauacaa

SEQ ID NO: 190527 - RNA, 19 nt, Homo sapiens
  misc_RNA (1)...(19): siRNA sense strand
ccagucggcuccuccaaac

SEQ ID NO: 190528 - RNA, 19 nt, Homo sapiens
  misc_RNA (1)...(19): siRNA sense strand
gcaacugcugcaagaaaug

SEQ ID NO: 190529 - RNA, 19 nt, Homo sapiens
  misc_RNA (1)...(19): siRNA sense strand
agaaaugcacccugacuca

SEQ ID NO: 190530 - RNA, 19 nt, Homo sapiens
  misc_RNA (1)...(19): siRNA sense strand
ccgaugugauauacaagga

SEQ ID NO: 190531 - RNA, 19 nt, Homo sapiens
  misc_RNA (1)...(19): siRNA sense strand
gcuucugccuucaacuuca

SEQ ID NO: 190532 - RNA, 19 nt, Homo sapiens
  misc_RNA (1)...(19): siRNA sense strand
uggcaacugcugcaagaaa

SEQ ID NO: 190533 - RNA, 19 nt, Homo sapiens
  misc_RNA (1)...(19): siRNA sense strand
uauguggagcuaauuguga

SEQ ID NO: 190534 - RNA, 19 nt, Homo sapiens
  misc_RNA (1)...(19): siRNA sense strand
cagcuucugccuucaacuu

SEQ ID NO: 190535 - RNA, 19 nt, Homo sapiens
  misc_RNA (1)...(19): siRNA sense strand
caagaaaugcacccugacu

SEQ ID NO: 190536 - RNA, 19 nt, Homo sapiens
  misc_RNA (1)...(19): siRNA sense strand
ggagcuaauugugaucaac

SEQ ID NO: 190537 - RNA, 19 nt, Homo sapiens
  misc_RNA (1)...(19): siRNA sense strand
caacgaccaccagcuguuc

SEQ ID NO: 190538 - RNA, 19 nt, Homo sapiens
  misc_RNA (1)...(19): siRNA sense strand
uggugaaccuggccgaugu

SEQ ID NO: 190539 - RNA, 19 nt, Homo sapiens
  misc_RNA (1)...(19): siRNA sense strand
aaccaaguauguggagcua

SEQ ID NO: 190540 - RNA, 19 nt, Homo sapiens
  misc_RNA (1)...(19): siRNA sense strand
ugggagacaucaguagugu

SEQ ID NO: 190541 - RNA, 19 nt, Homo sapiens
  misc_RNA (1)...(19): siRNA sense strand
uuacuacugugaccaugag

SEQ ID NO: 190542 - RNA, 19 nt, Homo sapiens
  misc_RNA (1)...(19): siRNA sense strand
cgccuaaccugcacaagcu

SEQ ID NO: 190543 - RNA, 19 nt, Homo sapiens
  misc_RNA (1)...(19): siRNA sense strand
ccaaguccguggugaaccu

SEQ ID NO: 190544 - RNA, 19 nt, Homo sapiens
  misc_RNA (1)...(19): siRNA sense strand
cguccugguugccauggaa

SEQ ID NO: 190545 - RNA, 19 nt, Homo sapiens
  misc_RNA (1)...(19): siRNA sense strand
ggcacgggcuggggauuua

SEQ ID NO: 190546 - RNA, 19 nt, Homo sapiens
  misc_RNA (1)...(19): siRNA sense strand
ggcaccaacaucaucauug

SEQ ID NO: 190547 - RNA, 19 nt, Homo sapiens
  misc_RNA (1)...(19): siRNA sense strand
caagcuggacgguuacuac

SEQ ID NO: 190548 - RNA, 19 nt, Homo sapiens
  misc_RNA (1)...(19): siRNA sense strand
ucaacgaccaccagcuguu

SEQ ID NO: 190549 - RNA, 19 nt, Homo sapiens
  misc_RNA (1)...(19): siRNA sense strand
gagacggagagauauaaag

SEQ ID NO: 190550 - RNA, 19 nt, Homo sapiens
  misc_RNA (1)...(19): siRNA sense strand
cugcugaucgcuucugcua

SEQ ID NO: 190551 - RNA, 19 nt, Homo sapiens
  misc_RNA (1)...(19): siRNA sense strand
caaguauguggagcuaauu

SEQ ID NO: 190552 - RNA, 19 nt, Homo sapiens
  misc_RNA (1)...(19): siRNA sense strand
caaagacugcaguauccau

SEQ ID NO: 190553 - RNA, 19 nt, Homo sapiens
  misc_RNA (1)...(19): siRNA sense strand
guauguggagcuaauugug

SEQ ID NO: 190554 - RNA, 19 nt, Homo sapiens
  misc_RNA (1)...(19): siRNA sense strand
gcagugccagguucuuugg

SEQ ID NO: 190555 - RNA, 19 nt, Homo sapiens
  misc_RNA (1)...(19): siRNA sense strand
gcacaagcuggacgguuac

SEQ ID NO: 190556 - RNA, 19 nt, Homo sapiens
  misc_RNA (1)...(19): siRNA sense strand
gggcuggagaccacugcua

SEQ ID NO: 190557 - RNA, 19 nt, Homo sapiens
  misc_RNA (1)...(19): siRNA sense strand
acccuacagugcacaguga

SEQ ID NO: 190558 - RNA, 19 nt, Homo sapiens
  misc_RNA (1)...(19): siRNA sense strand
gaaccuggccgaugugaua

SEQ ID NO: 190559 - RNA, 19 nt, Homo sapiens
  misc_RNA (1)...(19): siRNA sense strand
ggacagaaccugggcauga

SEQ ID NO: 190560 - RNA, 19 nt, Homo sapiens
  misc_RNA (1)...(19): siRNA sense strand
gaugggaacuugacuuaca

SEQ ID NO: 190561 - RNA, 19 nt, Homo sapiens
  misc_RNA (1)...(19): siRNA sense strand
gcagcugccucuucaacaa

SEQ ID NO: 190562 - RNA, 19 nt, Homo sapiens
  misc_RNA (1)...(19): siRNA sense strand
cuacggaggucgcugcaaa

SEQ ID NO: 190563 - RNA, 19 nt, Homo sapiens
  misc_RNA (1)...(19): siRNA sense strand
ccaaguauguggagcuaau

SEQ ID NO: 190564 - RNA, 19 nt, Homo sapiens
  misc_RNA (1)...(19): siRNA sense strand
gaacgaguacggcaacaug

SEQ ID NO: 190565 - RNA, 19 nt, Homo sapiens
  misc_RNA (1)...(19): siRNA sense strand
ugcacaagcuggacgguua

SEQ ID NO: 190566 - RNA, 19 nt, Homo sapiens
  misc_RNA (1)...(19): siRNA sense strand
gguggcaacugcugcaaga

SEQ ID NO: 190567 - RNA, 19 nt, Homo sapiens
  misc_RNA (1)...(19): siRNA sense strand
gcuggacgguuacuacugu

SEQ ID NO: 190568 - RNA, 19 nt, Homo sapiens
  misc_RNA (1)...(19): siRNA sense strand
ggcaacugcugcaagaaau

SEQ ID NO: 190569 - RNA, 19 nt, Homo sapiens
  misc_RNA (1)...(19): siRNA sense strand
gcacagugaaaccaaguau

SEQ ID NO: 190570 - RNA, 19 nt, Homo sapiens
  misc_RNA (1)...(19): siRNA sense strand
ggaggacacuggguucuac

SEQ ID NO: 190571 - RNA, 19 nt, Homo sapiens
  misc_RNA (1)...(19): siRNA sense strand
gacagaaccugggcaugau

SEQ ID NO: 190572 - RNA, 19 nt, Homo sapiens
  misc_RNA (1)...(19): siRNA sense strand
ggccgaggcugagaaggaa

SEQ ID NO: 190573 - RNA, 19 nt, Homo sapiens
  misc_RNA (1)...(19): siRNA sense strand
gcugcagcaucgacgagua

SEQ ID NO: 190574 - RNA, 19 nt, Homo sapiens
  misc_RNA (1)...(19): siRNA sense strand
cgacgaguacaaccaguuu

SEQ ID NO: 190575 - RNA, 19 nt, Homo sapiens
  misc_RNA (1)...(19): siRNA sense strand
gcuacgagaagcugaaugu

SEQ ID NO: 190576 - RNA, 19 nt, Homo sapiens
  misc_RNA (1)...(19): siRNA sense strand
ggcaugauguggaacaaac

SEQ ID NO: 190577 - RNA, 19 nt, Homo sapiens
  misc_RNA (1)...(19): siRNA sense strand
cugaugggaacuugacuua

SEQ ID NO: 190578 - RNA, 19 nt, Homo sapiens
  misc_RNA (1)...(19): siRNA sense strand
gguccucaccagcaacuuu

SEQ ID NO: 190579 - RNA, 19 nt, Homo sapiens
  misc_RNA (1)...(19): siRNA sense strand
acagugaaaccaaguaugu

SEQ ID NO: 190580 - RNA, 19 nt, Homo sapiens
  misc_RNA (1)...(19): siRNA sense strand
uggccgaugugauauacaa

SEQ ID NO: 190581 - RNA, 19 nt, Homo sapiens
  misc_RNA (1)...(19): siRNA sense strand
ccagucggcuccuccaaac

SEQ ID NO: 190582 - RNA, 19 nt, Homo sapiens
  misc_RNA (1)...(19): siRNA sense strand
gcaacugcugcaagaaaug

SEQ ID NO: 190583 - RNA, 19 nt, Homo sapiens
  misc_RNA (1)...(19): siRNA sense strand
agaaaugcacccugacuca

SEQ ID NO: 190584 - RNA, 19 nt, Homo sapiens
  misc_RNA (1)...(19): siRNA sense strand
ccgaugugauauacaagga

SEQ ID NO: 190585 - RNA, 19 nt, Homo sapiens
  misc_RNA (1)...(19): siRNA sense strand
uggcaacugcugcaagaaa

SEQ ID NO: 190586 - RNA, 19 nt, Homo sapiens
  misc_RNA (1)...(19): siRNA sense strand
uauguggagcuaauuguga

SEQ ID NO: 190587 - RNA, 19 nt, Homo sapiens
  misc_RNA (1)...(19): siRNA sense strand
caagaaaugcacccugacu

SEQ ID NO: 190588 - RNA, 19 nt, Homo sapiens
  misc_RNA (1)...(19): siRNA sense strand
ggagcuaauugugaucaac

SEQ ID NO: 190589 - RNA, 19 nt, Homo sapiens
  misc_RNA (1)...(19): siRNA sense strand
caacgaccaccagcuguuc

SEQ ID NO: 190590 - RNA, 19 nt, Homo sapiens
  misc_RNA (1)...(19): siRNA sense strand
uggugaaccuggccgaugu

SEQ ID NO: 190591 - RNA, 19 nt, Homo sapiens
  misc_RNA (1)...(19): siRNA sense strand
aaccaaguauguggagcua

SEQ ID NO: 190592 - RNA, 19 nt, Homo sapiens
  misc_RNA (1)...(19): siRNA sense strand
uuacuacugugaccaugag

SEQ ID NO: 190593 - RNA, 19 nt, Homo sapiens
  misc_RNA (1)...(19): siRNA sense strand
cgccuaaccugcacaagcu

SEQ ID NO: 190594 - RNA, 19 nt, Homo sapiens
  misc_RNA (1)...(19): siRNA sense strand
ccaaguccguggugaaccu

SEQ ID NO: 190595 - RNA, 19 nt, Homo sapiens
  misc_RNA (1)...(19): siRNA sense strand
cguccugguugccauggaa

SEQ ID NO: 190596 - RNA, 19 nt, Homo sapiens
  misc_RNA (1)...(19): siRNA sense strand
caagcuggacgguuacuac

SEQ ID NO: 190597 - RNA, 19 nt, Homo sapiens
  misc_RNA (1)...(19): siRNA sense strand
ucaacgaccaccagcuguu

SEQ ID NO: 190598 - RNA, 19 nt, Homo sapiens
  misc_RNA (1)...(19): siRNA sense strand
cugcugaucgcuucugcua

SEQ ID NO: 190599 - RNA, 19 nt, Homo sapiens
  misc_RNA (1)...(19): siRNA sense strand
caaguauguggagcuaauu

SEQ ID NO: 190600 - RNA, 19 nt, Homo sapiens
  misc_RNA (1)...(19): siRNA sense strand
acccuacagugcacaguga

SEQ ID NO: 190601 - RNA, 19 nt, Homo sapiens
  misc_RNA (1)...(19): siRNA sense strand
gcagugccagguucuuugg

SEQ ID NO: 190602 - RNA, 19 nt, Homo sapiens
  misc_RNA (1)...(19): siRNA sense strand
gcacaagcuggacgguuac

SEQ ID NO: 190603 - RNA, 19 nt, Homo sapiens
  misc_RNA (1)...(19): siRNA sense strand
gggcuggagaccacugcua

SEQ ID NO: 190604 - RNA, 19 nt, Homo sapiens
  misc_RNA (1)...(19): siRNA sense strand
guauguggagcuaauugug

SEQ ID NO: 190605 - RNA, 19 nt, Homo sapiens
  misc_RNA (1)...(19): siRNA sense strand
gaacaaaccuucccagcuu

SEQ ID NO: 190606 - RNA, 19 nt, Homo sapiens
  misc_RNA (1)...(19): siRNA sense strand
ccaaagcucugguggauuu

SEQ ID NO: 190607 - RNA, 19 nt, Homo sapiens
  misc_RNA (1)...(19): siRNA sense strand
gaagaaagaguguguugua

SEQ ID NO: 190608 - RNA, 19 nt, Homo sapiens
  misc_RNA (1)...(19): siRNA sense strand
ggagagaacccuauaggua

SEQ ID NO: 190609 - RNA, 19 nt, Homo sapiens
  misc_RNA (1)...(19): siRNA sense strand
gcgcugaccugcacaauga

SEQ ID NO: 190610 - RNA, 19 nt, Homo sapiens
  misc_RNA (1)...(19): siRNA sense strand
gaaagaguguguuguaaag

SEQ ID NO: 190611 - RNA, 19 nt, Homo sapiens
  misc_RNA (1)...(19): siRNA sense strand
ggaaucacacggacauuua

SEQ ID NO: 190612 - RNA, 19 nt, Homo sapiens
  misc_RNA (1)...(19): siRNA sense strand
ggacauuuaugccaacuau

SEQ ID NO: 190613 - RNA, 19 nt, Homo sapiens
  misc_RNA (1)...(19): siRNA sense strand
gaagaauugugaacuggaa

SEQ ID NO: 190614 - RNA, 19 nt, Homo sapiens
  misc_RNA (1)...(19): siRNA sense strand
ccaaagcaaucaccaaaga

SEQ ID NO: 190615 - RNA, 19 nt, Homo sapiens
  misc_RNA (1)...(19): siRNA sense strand
ccagagcccugaaagcuaa

SEQ ID NO: 190616 - RNA, 19 nt, Homo sapiens
  misc_RNA (1)...(19): siRNA sense strand
cacuaaaucucuucaauga

SEQ ID NO: 190617 - RNA, 19 nt, Homo sapiens
  misc_RNA (1)...(19): siRNA sense strand
caauaacccuggauggaaa

SEQ ID NO: 190618 - RNA, 19 nt, Homo sapiens
  misc_RNA (1)...(19): siRNA sense strand
gaaagcuaauggagaaguu

SEQ ID NO: 190619 - RNA, 19 nt, Homo sapiens
  misc_RNA (1)...(19): siRNA sense strand
caaugguacuugcaagaua

SEQ ID NO: 190620 - RNA, 19 nt, Homo sapiens
  misc_RNA (1)...(19): siRNA sense strand
gaccagaugugcaggagaa

SEQ ID NO: 190621 - RNA, 19 nt, Homo sapiens
  misc_RNA (1)...(19): siRNA sense strand
cuaaaucucuucaaugauc

SEQ ID NO: 190622 - RNA, 19 nt, Homo sapiens
  misc_RNA (1)...(19): siRNA sense strand
gcauacaauuccaaaguug

SEQ ID NO: 190623 - RNA, 19 nt, Homo sapiens
  misc_RNA (1)...(19): siRNA sense strand
gaagcaaacccaaaucuca

SEQ ID NO: 190624 - RNA, 19 nt, Homo sapiens
  misc_RNA (1)...(19): siRNA sense strand
gauaugggcugaacaacag

SEQ ID NO: 190625 - RNA, 19 nt, Homo sapiens
  misc_RNA (1)...(19): siRNA sense strand
uaaagacucugaagacagu

SEQ ID NO: 190626 - RNA, 19 nt, Homo sapiens
  misc_RNA (1)...(19): siRNA sense strand
gauggugaauagucgauuu

SEQ ID NO: 190627 - RNA, 19 nt, Homo sapiens
  misc_RNA (1)...(19): siRNA sense strand
ccugaaagcuaauggagaa

SEQ ID NO: 190628 - RNA, 19 nt, Homo sapiens
  misc_RNA (1)...(19): siRNA sense strand
gagcgugccugagaagaaa

SEQ ID NO: 190629 - RNA, 19 nt, Homo sapiens
  misc_RNA (1)...(19): siRNA sense strand
gagcugggcuaugaccuuu

SEQ ID NO: 190630 - RNA, 19 nt, Homo sapiens
  misc_RNA (1)...(19): siRNA sense strand
ccagaaggcuuuugaauau

SEQ ID NO: 190631 - RNA, 19 nt, Homo sapiens
  misc_RNA (1)...(19): siRNA sense strand
gaauggagcaggcuugaug

SEQ ID NO: 190632 - RNA, 19 nt, Homo sapiens
  misc_RNA (1)...(19): siRNA sense strand
ccgaggagcugggcuauga

SEQ ID NO: 190633 - RNA, 19 nt, Homo sapiens
  misc_RNA (1)...(19): siRNA sense strand
gcacuaaaucucuucaaug

SEQ ID NO: 190634 - RNA, 19 nt, Homo sapiens
  misc_RNA (1)...(19): siRNA sense strand
aaaggcaauuugucaauga

SEQ ID NO: 190635 - RNA, 19 nt, Homo sapiens
  misc_RNA (1)...(19): siRNA sense strand
cuaagggacucagcacuaa

SEQ ID NO: 190636 - RNA, 19 nt, Homo sapiens
  misc_RNA (1)...(19): siRNA sense strand
gaagcagccucguguguac

SEQ ID NO: 190637 - RNA, 19 nt, Homo sapiens
  misc_RNA (1)...(19): siRNA sense strand
ucaaugaucccauguggaa

SEQ ID NO: 190638 - RNA, 19 nt, Homo sapiens
  misc_RNA (1)...(19): siRNA sense strand
ggaggagcgugccugagaa

SEQ ID NO: 190639 - RNA, 19 nt, Homo sapiens
  misc_RNA (1)...(19): siRNA sense strand
ucaagucccuggagcaugu

SEQ ID NO: 190640 - RNA, 19 nt, Homo sapiens
  misc_RNA (1)...(19): siRNA sense strand
cgggauacaucuccuaaug

SEQ ID NO: 190641 - RNA, 19 nt, Homo sapiens
  misc_RNA (1)...(19): siRNA sense strand
gcuggaccuucaugugaua

SEQ ID NO: 190642 - RNA, 19 nt, Homo sapiens
  misc_RNA (1)...(19): siRNA sense strand
cuggacacguggauauuua

SEQ ID NO: 190643 - RNA, 19 nt, Homo sapiens
  misc_RNA (1)...(19): siRNA sense strand
agaaagaaguaaacguuca

SEQ ID NO: 190644 - RNA, 19 nt, Homo sapiens
  misc_RNA (1)...(19): siRNA sense strand
guacuuggacuuugagaau

SEQ ID NO: 190645 - RNA, 19 nt, Homo sapiens
  misc_RNA (1)...(19): siRNA sense strand
ccuggagcauguacaauuu

SEQ ID NO: 190646 - RNA, 19 nt, Homo sapiens
  misc_RNA (1)...(19): siRNA sense strand
gagaagaaagaguguguug

SEQ ID NO: 190647 - RNA, 19 nt, Homo sapiens
  misc_RNA (1)...(19): siRNA sense strand
ugaugaugaucgugugaua

SEQ ID NO: 190648 - RNA, 19 nt, Homo sapiens
  misc_RNA (1)...(19): siRNA sense strand
gaagagggguggagaagau

SEQ ID NO: 190649 - RNA, 19 nt, Homo sapiens
  misc_RNA (1)...(19): siRNA sense strand
gaauagucgauuuggauuu

SEQ ID NO: 190650 - RNA, 19 nt, Homo sapiens
  misc_RNA (1)...(19): siRNA sense strand
gagcaggcuugauggugaa

SEQ ID NO: 190651 - RNA, 19 nt, Homo sapiens
  misc_RNA (1)...(19): siRNA sense strand
gcaaaggaguuguuaucac

SEQ ID NO: 190652 - RNA, 19 nt, Homo sapiens
  misc_RNA (1)...(19): siRNA sense strand
gggcugaacaacaguauga

SEQ ID NO: 190653 - RNA, 19 nt, Homo sapiens
  misc_RNA (1)...(19): siRNA sense strand
gaaauuccaacaagagcuu

SEQ ID NO: 190654 - RNA, 19 nt, Homo sapiens
  misc_RNA (1)...(19): siRNA sense strand
ggagaaguuaucauugaaa

SEQ ID NO: 190655 - RNA, 19 nt, Homo sapiens
  misc_RNA (1)...(19): siRNA sense strand
aagaaagaguguguuguaa

SEQ ID NO: 190656 - RNA, 19 nt, Homo sapiens
  misc_RNA (1)...(19): siRNA sense strand
ccacacuggccaccucuua

SEQ ID NO: 190657 - RNA, 19 nt, Homo sapiens
  misc_RNA (1)...(19): siRNA sense strand
gagauaauugugacuguga

SEQ ID NO: 190658 - RNA, 19 nt, Homo sapiens
  misc_RNA (1)...(19): siRNA sense strand
gaggcuagcuaugauuuua

SEQ ID NO: 190659 - RNA, 19 nt, Homo sapiens
  misc_RNA (1)...(19): siRNA sense strand
caacaucccuuaugaaaac

SEQ ID NO: 190660 - RNA, 19 nt, Homo sapiens
  misc_RNA (1)...(19): siRNA sense strand
acuuggacuuugagaauua

SEQ ID NO: 190661 - RNA, 19 nt, Homo sapiens
  misc_RNA (1)...(19): siRNA sense strand
gagcagcccacacaagaga

SEQ ID NO: 190662 - RNA, 19 nt, Homo sapiens
  misc_RNA (1)...(19): siRNA sense strand
gcugaaagagaacgggaua

SEQ ID NO: 190663 - RNA, 19 nt, Homo sapiens
  misc_RNA (1)...(19): siRNA sense strand
gaacgggauacaucuccua

SEQ ID NO: 190664 - RNA, 19 nt, Homo sapiens
  misc_RNA (1)...(19): siRNA sense strand
ccaauaacccuggauggaa

SEQ ID NO: 190665 - RNA, 19 nt, Homo sapiens
  misc_RNA (1)...(19): siRNA sense strand
gcacugcuuucguccucuu

SEQ ID NO: 190666 - RNA, 19 nt, Homo sapiens
  misc_RNA (1)...(19): siRNA sense strand
ggcaauuugucaaugaaug

SEQ ID NO: 190667 - RNA, 19 nt, Homo sapiens
  misc_RNA (1)...(19): siRNA sense strand
aggagugccuuucauauca

SEQ ID NO: 190668 - RNA, 19 nt, Homo sapiens
  misc_RNA (1)...(19): siRNA sense strand
ccacacaagagaacccuaa

SEQ ID NO: 190669 - RNA, 19 nt, Homo sapiens
  misc_RNA (1)...(19): siRNA sense strand
gguuggaguugcauacaau

SEQ ID NO: 190670 - RNA, 19 nt, Homo sapiens
  misc_RNA (1)...(19): siRNA sense strand
gggcaaaggaguuguuauc

SEQ ID NO: 190671 - RNA, 19 nt, Homo sapiens
  misc_RNA (1)...(19): siRNA sense strand
gaaucacacggacauuuau

SEQ ID NO: 190672 - RNA, 19 nt, Homo sapiens
  misc_RNA (1)...(19): siRNA sense strand
acacuaaaccuuacaagca

SEQ ID NO: 190673 - RNA, 19 nt, Homo sapiens
  misc_RNA (1)...(19): siRNA sense strand
aacaaaccuucccagcuua

SEQ ID NO: 190674 - RNA, 19 nt, Homo sapiens
  misc_RNA (1)...(19): siRNA sense strand
agaaagaguguguuguaaa

SEQ ID NO: 190675 - RNA, 19 nt, Homo sapiens
  misc_RNA (1)...(19): siRNA sense strand
ggagcgugccugagaagaa

SEQ ID NO: 190676 - RNA, 19 nt, Homo sapiens
  misc_RNA (1)...(19): siRNA sense strand
aauagucgauuuggauuug

SEQ ID NO: 190677 - RNA, 19 nt, Homo sapiens
  misc_RNA (1)...(19): siRNA sense strand
caaaguuggaggcauaaga

SEQ ID NO: 190678 - RNA, 19 nt, Homo sapiens
  misc_RNA (1)...(19): siRNA sense strand
ggacucagcacuaaaucuc

SEQ ID NO: 190679 - RNA, 19 nt, Homo sapiens
  misc_RNA (1)...(19): siRNA sense strand
gaccuucaugucacacuua

SEQ ID NO: 190680 - RNA, 19 nt, Homo sapiens
  misc_RNA (1)...(19): siRNA sense strand
ggucagauugguucacuug

SEQ ID NO: 190681 - RNA, 19 nt, Homo sapiens
  misc_RNA (1)...(19): siRNA sense strand
ggaaucagcaaugguacuu

SEQ ID NO: 190682 - RNA, 19 nt, Homo sapiens
  misc_RNA (1)...(19): siRNA sense strand
cuucaugucuguucacaca

SEQ ID NO: 190683 - RNA, 19 nt, Homo sapiens
  misc_RNA (1)...(19): siRNA sense strand
aaagagaacgggauacauc

SEQ ID NO: 190684 - RNA, 19 nt, Homo sapiens
  misc_RNA (1)...(19): siRNA sense strand
gggagauaauugugacugu

SEQ ID NO: 190685 - RNA, 19 nt, Homo sapiens
  misc_RNA (1)...(19): siRNA sense strand
caggagaaauugccaugca

SEQ ID NO: 190686 - RNA, 19 nt, Homo sapiens
  misc_RNA (1)...(19): siRNA sense strand
cagaugugcaggagaaauu

SEQ ID NO: 190687 - RNA, 19 nt, Homo sapiens
  misc_RNA (1)...(19): siRNA sense strand
gacagcaucuacaccaucu

SEQ ID NO: 190688 - RNA, 19 nt, Homo sapiens
  misc_RNA (1)...(19): siRNA sense strand
ucauugaaauuccaacaag

SEQ ID NO: 190689 - RNA, 19 nt, Homo sapiens
  misc_RNA (1)...(19): siRNA sense strand
uggagaaguuaucauugaa

SEQ ID NO: 190690 - RNA, 19 nt, Homo sapiens
  misc_RNA (1)...(19): siRNA sense strand
auggagaaguuaucauuga

SEQ ID NO: 190691 - RNA, 19 nt, Homo sapiens
  misc_RNA (1)...(19): siRNA sense strand
aagaguguguuguaaagga

SEQ ID NO: 190692 - RNA, 19 nt, Homo sapiens
  misc_RNA (1)...(19): siRNA sense strand
acauuuaugccaacuauga

SEQ ID NO: 190693 - RNA, 19 nt, Homo sapiens
  misc_RNA (1)...(19): siRNA sense strand
caaagcaaucaccaaagaa

SEQ ID NO: 190694 - RNA, 19 nt, Homo sapiens
  misc_RNA (1)...(19): siRNA sense strand
aagagaacccuaaggagaa

SEQ ID NO: 190695 - RNA, 19 nt, Homo sapiens
  misc_RNA (1)...(19): siRNA sense strand
cauugaaauuccaacaaga

SEQ ID NO: 190696 - RNA, 19 nt, Homo sapiens
  misc_RNA (1)...(19): siRNA sense strand
aguaaacguucagcucuaa

SEQ ID NO: 190697 - RNA, 19 nt, Homo sapiens
  misc_RNA (1)...(19): siRNA sense strand
aaaguuggaggcauaagaa

SEQ ID NO: 190698 - RNA, 19 nt, Homo sapiens
  misc_RNA (1)...(19): siRNA sense strand
ggacuuugagaauuacaga

SEQ ID NO: 190699 - RNA, 19 nt, Homo sapiens
  misc_RNA (1)...(19): siRNA sense strand
auagguacuuggacuuuga

SEQ ID NO: 190700 - RNA, 19 nt, Homo sapiens
  misc_RNA (1)...(19): siRNA sense strand
gaaagagaacgggauacau

SEQ ID NO: 190701 - RNA, 19 nt, Homo sapiens
  misc_RNA (1)...(19): siRNA sense strand
ggugaauagucgauuugga

SEQ ID NO: 190702 - RNA, 19 nt, Homo sapiens
  misc_RNA (1)...(19): siRNA sense strand
acacguggauauuuacagu

SEQ ID NO: 190703 - RNA, 19 nt, Homo sapiens
  misc_RNA (1)...(19): siRNA sense strand
caaaaugaaggaagaauug

SEQ ID NO: 190704 - RNA, 19 nt, Homo sapiens
  misc_RNA (1)...(19): siRNA sense strand
ugaagcagccucgugugua

SEQ ID NO: 190705 - RNA, 19 nt, Homo sapiens
  misc_RNA (1)...(19): siRNA sense strand
caaagaguguccaaucauu

SEQ ID NO: 190706 - RNA, 19 nt, Homo sapiens
  misc_RNA (1)...(19): siRNA sense strand
uagcugaccugaauaaugu

SEQ ID NO: 190707 - RNA, 19 nt, Homo sapiens
  misc_RNA (1)...(19): siRNA sense strand
gcaugauucuauccaaauu

SEQ ID NO: 190708 - RNA, 19 nt, Homo sapiens
  misc_RNA (1)...(19): siRNA sense strand
ugaacuggcugcugaaugu

SEQ ID NO: 190709 - RNA, 19 nt, Homo sapiens
  misc_RNA (1)...(19): siRNA sense strand
gauauccugcagauuauua

SEQ ID NO: 190710 - RNA, 19 nt, Homo sapiens
  misc_RNA (1)...(19): siRNA sense strand
gagaagauguucgagacuu

SEQ ID NO: 190711 - RNA, 19 nt, Homo sapiens
  misc_RNA (1)...(19): siRNA sense strand
gcacuuuaauuaugacauc

SEQ ID NO: 190712 - RNA, 19 nt, Homo sapiens
  misc_RNA (1)...(19): siRNA sense strand
guaaagcacauuuggaaga

SEQ ID NO: 190713 - RNA, 19 nt, Homo sapiens
  misc_RNA (1)...(19): siRNA sense strand
gaauauugcacuccgacua

SEQ ID NO: 190714 - RNA, 19 nt, Homo sapiens
  misc_RNA (1)...(19): siRNA sense strand
uuauaggacugccaugaaa

SEQ ID NO: 190715 - RNA, 19 nt, Homo sapiens
  misc_RNA (1)...(19): siRNA sense strand
gggugaaguugcauccuuu

SEQ ID NO: 190716 - RNA, 19 nt, Homo sapiens
  misc_RNA (1)...(19): siRNA sense strand
gcaagagcacaacaauuug

SEQ ID NO: 190717 - RNA, 19 nt, Homo sapiens
  misc_RNA (1)...(19): siRNA sense strand
gcacaacaauuuggucaac

SEQ ID NO: 190718 - RNA, 19 nt, Homo sapiens
  misc_RNA (1)...(19): siRNA sense strand
agcaagagcacaacaauuu

SEQ ID NO: 190719 - RNA, 19 nt, Homo sapiens
  misc_RNA (1)...(19): siRNA sense strand
agaagauguucgagacuuu

SEQ ID NO: 190720 - RNA, 19 nt, Homo sapiens
  misc_RNA (1)...(19): siRNA sense strand
gagcaagagcacaacaauu

SEQ ID NO: 190721 - RNA, 19 nt, Homo sapiens
  misc_RNA (1)...(19): siRNA sense strand
ucaagcaaguggcaaguuc

SEQ ID NO: 190722 - RNA, 19 nt, Homo sapiens
  misc_RNA (1)...(19): siRNA sense strand
ccacgagacucaaacaacu

SEQ ID NO: 190723 - RNA, 19 nt, Homo sapiens
  misc_RNA (1)...(19): siRNA sense strand
cagcacaaccucaagcaaa

SEQ ID NO: 190724 - RNA, 19 nt, Homo sapiens
  misc_RNA (1)...(19): siRNA sense strand
gcaaagaguguccaaucau

SEQ ID NO: 190725 - RNA, 19 nt, Homo sapiens
  misc_RNA (1)...(19): siRNA sense strand
auggauauccugcagauua

SEQ ID NO: 190726 - RNA, 19 nt, Homo sapiens
  misc_RNA (1)...(19): siRNA sense strand
uguaacaucugcaaagagu

SEQ ID NO: 190727 - RNA, 19 nt, Homo sapiens
  misc_RNA (1)...(19): siRNA sense strand
guccggagcugcuuccaau

SEQ ID NO: 190728 - RNA, 19 nt, Homo sapiens
  misc_RNA (1)...(19): siRNA sense strand
gcaaguggcaaguucaaca

SEQ ID NO: 190729 - RNA, 19 nt, Homo sapiens
  misc_RNA (1)...(19): siRNA sense strand
gcuuccaauuugcuaauaa

SEQ ID NO: 190730 - RNA, 19 nt, Homo sapiens
  misc_RNA (1)...(19): siRNA sense strand
uggaagacaaguacagaua

SEQ ID NO: 190731 - RNA, 19 nt, Homo sapiens
  misc_RNA (1)...(19): siRNA sense strand
ggauccguguccugucuuu

SEQ ID NO: 190732 - RNA, 19 nt, Homo sapiens
  misc_RNA (1)...(19): siRNA sense strand
gucuuuagcugaccugaau

SEQ ID NO: 190733 - RNA, 19 nt, Homo sapiens
  misc_RNA (1)...(19): siRNA sense strand
gacaaguacagauaccuuu

SEQ ID NO: 190734 - RNA, 19 nt, Homo sapiens
  misc_RNA (1)...(19): siRNA sense strand
ccaagcaucaggccaaaug

SEQ ID NO: 190735 - RNA, 19 nt, Homo sapiens
  misc_RNA (1)...(19): siRNA sense strand
ggagcaagagcacaacaau

SEQ ID NO: 190736 - RNA, 19 nt, Homo sapiens
  misc_RNA (1)...(19): siRNA sense strand
guguaaagcacauuuggaa

SEQ ID NO: 190737 - RNA, 19 nt, Homo sapiens
  misc_RNA (1)...(19): siRNA sense strand
caagacaguugggugaagu

SEQ ID NO: 190738 - RNA, 19 nt, Homo sapiens
  misc_RNA (1)...(19): siRNA sense strand
gaagauguucgagacuuug

SEQ ID NO: 190739 - RNA, 19 nt, Homo sapiens
  misc_RNA (1)...(19): siRNA sense strand
gucagauucucagcuuaua

SEQ ID NO: 190740 - RNA, 19 nt, Homo sapiens
  misc_RNA (1)...(19): siRNA sense strand
uaacaucugcaaagagugu

SEQ ID NO: 190741 - RNA, 19 nt, Homo sapiens
  misc_RNA (1)...(19): siRNA sense strand
cggagcugcuuccaauuug

SEQ ID NO: 190742 - RNA, 19 nt, Homo sapiens
  misc_RNA (1)...(19): siRNA sense strand
gaagacaaguacagauacc

SEQ ID NO: 190743 - RNA, 19 nt, Homo sapiens
  misc_RNA (1)...(19): siRNA sense strand
ccauggauauccugcagau

SEQ ID NO: 190744 - RNA, 19 nt, Homo sapiens
  misc_RNA (1)...(19): siRNA sense strand
ggcaucauuucccugugua

SEQ ID NO: 190745 - RNA, 19 nt, Homo sapiens
  misc_RNA (1)...(19): siRNA sense strand
uggauauccugcagauuau

SEQ ID NO: 190746 - RNA, 19 nt, Homo sapiens
  misc_RNA (1)...(19): siRNA sense strand
ggaagacaaguacagauac

SEQ ID NO: 190747 - RNA, 19 nt, Homo sapiens
  misc_RNA (1)...(19): siRNA sense strand
ugcaaagaguguccaauca

SEQ ID NO: 190748 - RNA, 19 nt, Homo sapiens
  misc_RNA (1)...(19): siRNA sense strand
guggauaugugucugaacu

SEQ ID NO: 190749 - RNA, 19 nt, Homo sapiens
  misc_RNA (1)...(19): siRNA sense strand
acuggcugcugaauguuua

SEQ ID NO: 190750 - RNA, 19 nt, Homo sapiens
  misc_RNA (1)...(19): siRNA sense strand
acuaucccaugguggaaua

SEQ ID NO: 190751 - RNA, 19 nt, Homo sapiens
  misc_RNA (1)...(19): siRNA sense strand
ccggagcugcuuccaauuu

SEQ ID NO: 190752 - RNA, 19 nt, Homo sapiens
  misc_RNA (1)...(19): siRNA sense strand
ccaaauuccaagacaguug

SEQ ID NO: 190753 - RNA, 19 nt, Homo sapiens
  misc_RNA (1)...(19): siRNA sense strand
cagaaacugccaagcauca

SEQ ID NO: 190754 - RNA, 19 nt, Homo sapiens
  misc_RNA (1)...(19): siRNA sense strand
uaugacaucugccaaagcu

SEQ ID NO: 190755 - RNA, 19 nt, Homo sapiens
  misc_RNA (1)...(19): siRNA sense strand
aaugucagauucucagcuu

SEQ ID NO: 190756 - RNA, 19 nt, Homo sapiens
  misc_RNA (1)...(19): siRNA sense strand
ucgagacuuugccaaggua

SEQ ID NO: 190757 - RNA, 19 nt, Homo sapiens
  misc_RNA (1)...(19): siRNA sense strand
gcaaaaggccauaaaaugc

SEQ ID NO: 190758 - RNA, 19 nt, Homo sapiens
  misc_RNA (1)...(19): siRNA sense strand
cugcaugauucuauccaaa

SEQ ID NO: 190759 - RNA, 19 nt, Homo sapiens
  misc_RNA (1)...(19): siRNA sense strand
uaaagcacauuuggaagac

SEQ ID NO: 190760 - RNA, 19 nt, Homo sapiens
  misc_RNA (1)...(19): siRNA sense strand
acaggagucuaaagcacuu

SEQ ID NO: 190761 - RNA, 19 nt, Homo sapiens
  misc_RNA (1)...(19): siRNA sense strand
acagauaccuuuucaagca

SEQ ID NO: 190762 - RNA, 19 nt, Homo sapiens
  misc_RNA (1)...(19): siRNA sense strand
aagcacauuuggaagacaa

SEQ ID NO: 190763 - RNA, 19 nt, Homo sapiens
  misc_RNA (1)...(19): siRNA sense strand
gcuaauaauaagccagaga

SEQ ID NO: 190764 - RNA, 19 nt, Homo sapiens
  misc_RNA (1)...(19): siRNA sense strand
caagagcacaacaauuugg

SEQ ID NO: 190765 - RNA, 19 nt, Homo sapiens
  misc_RNA (1)...(19): siRNA sense strand
ccugucagcugcaugugau

SEQ ID NO: 190766 - RNA, 19 nt, Homo sapiens
  misc_RNA (1)...(19): siRNA sense strand
gcugcugaauguuuaugau

SEQ ID NO: 190767 - RNA, 19 nt, Homo sapiens
  misc_RNA (1)...(19): siRNA sense strand
acagagcucuaccagucuu

SEQ ID NO: 190768 - RNA, 19 nt, Homo sapiens
  misc_RNA (1)...(19): siRNA sense strand
acaguugggugaaguugca

SEQ ID NO: 190769 - RNA, 19 nt, Homo sapiens
  misc_RNA (1)...(19): siRNA sense strand
guuugaccacuauuuauga

SEQ ID NO: 190770 - RNA, 19 nt, Homo sapiens
  misc_RNA (1)...(19): siRNA sense strand
gcuuauaggacugccauga

SEQ ID NO: 190771 - RNA, 19 nt, Homo sapiens
  misc_RNA (1)...(19): siRNA sense strand
caucaggccaaauguaaca

SEQ ID NO: 190772 - RNA, 19 nt, Homo sapiens
  misc_RNA (1)...(19): siRNA sense strand
gauucuauccaaauuccaa

SEQ ID NO: 190773 - RNA, 19 nt, Homo sapiens
  misc_RNA (1)...(19): siRNA sense strand
ggcaaguucaacaggauuu

SEQ ID NO: 190774 - RNA, 19 nt, Homo sapiens
  misc_RNA (1)...(19): siRNA sense strand
gaacuggcugcugaauguu

SEQ ID NO: 190775 - RNA, 19 nt, Homo sapiens
  misc_RNA (1)...(19): siRNA sense strand
cugcugaauguuuaugaua

SEQ ID NO: 190776 - RNA, 19 nt, Homo sapiens
  misc_RNA (1)...(19): siRNA sense strand
aagcaucaggccaaaugua

SEQ ID NO: 190777 - RNA, 19 nt, Homo sapiens
  misc_RNA (1)...(19): siRNA sense strand
uggcaucauuucccugugu

SEQ ID NO: 190778 - RNA, 19 nt, Homo sapiens
  misc_RNA (1)...(19): siRNA sense strand
ccaugaaacuccgaagacu

SEQ ID NO: 190779 - RNA, 19 nt, Homo sapiens
  misc_RNA (1)...(19): siRNA sense strand
auaauaagccagagaucga

SEQ ID NO: 190780 - RNA, 19 nt, Homo sapiens
  misc_RNA (1)...(19): siRNA sense strand
cuaauaauaagccagagau

SEQ ID NO: 190781 - RNA, 19 nt, Homo sapiens
  misc_RNA (1)...(19): siRNA sense strand
ugggugaaguugcauccuu

SEQ ID NO: 190782 - RNA, 19 nt, Homo sapiens
  misc_RNA (1)...(19): siRNA sense strand
caucauuucccuguguaaa

SEQ ID NO: 190783 - RNA, 19 nt, Homo sapiens
  misc_RNA (1)...(19): siRNA sense strand
gcguggauaugugucugaa

SEQ ID NO: 190784 - RNA, 19 nt, Homo sapiens
  misc_RNA (1)...(19): siRNA sense strand
gcacuaucccaugguggaa

SEQ ID NO: 190785 - RNA, 19 nt, Homo sapiens
  misc_RNA (1)...(19): siRNA sense strand
gagccugucagcugcaugu

SEQ ID NO: 190786 - RNA, 19 nt, Homo sapiens
  misc_RNA (1)...(19): siRNA sense strand
guacagauaccuuuucaag

SEQ ID NO: 190787 - RNA, 19 nt, Homo sapiens
  misc_RNA (1)...(19): siRNA sense strand
gucccucucugcguggaua

SEQ ID NO: 190788 - RNA, 19 nt, Homo sapiens
  misc_RNA (1)...(19): siRNA sense strand
ggagcugcuuccaauuugc

SEQ ID NO: 190789 - RNA, 19 nt, Homo sapiens
  misc_RNA (1)...(19): siRNA sense strand
uuagcugaccugaauaaug

SEQ ID NO: 190790 - RNA, 19 nt, Homo sapiens
  misc_RNA (1)...(19): siRNA sense strand
guggcaaguucaacaggau

SEQ ID NO: 190791 - RNA, 19 nt, Homo sapiens
  misc_RNA (1)...(19): siRNA sense strand
acaacaauuuggucaacgu

SEQ ID NO: 190792 - RNA, 19 nt, Homo sapiens
  misc_RNA (1)...(19): siRNA sense strand
gacuacaucaggagaagau

SEQ ID NO: 190793 - RNA, 19 nt, Homo sapiens
  misc_RNA (1)...(19): siRNA sense strand
uaauaagccagagaucgaa

SEQ ID NO: 190794 - RNA, 19 nt, Homo sapiens
  misc_RNA (1)...(19): siRNA sense strand
ugucagauucucagcuuau

SEQ ID NO: 190795 - RNA, 19 nt, Homo sapiens
  misc_RNA (1)...(19): siRNA sense strand
ggauauccugcagauuauu

SEQ ID NO: 190796 - RNA, 19 nt, Homo sapiens
  misc_RNA (1)...(19): siRNA sense strand
agcaucaggccaaauguaa

SEQ ID NO: 190797 - RNA, 19 nt, Homo sapiens
  misc_RNA (1)...(19): siRNA sense strand
gcccuuugcuuggaucucu

SEQ ID NO: 190798 - RNA, 19 nt, Homo sapiens
  misc_RNA (1)...(19): siRNA sense strand
gcugaauguuuaugauacg

SEQ ID NO: 190799 - RNA, 19 nt, Homo sapiens
  misc_RNA (1)...(19): siRNA sense strand
agacuuugccaagguacua

SEQ ID NO: 190800 - RNA, 19 nt, Homo sapiens
  misc_RNA (1)...(19): siRNA sense strand
caagcaaguggcaaguuca

SEQ ID NO: 190801 - RNA, 19 nt, Homo sapiens
  misc_RNA (1)...(19): siRNA sense strand
agacaaguacagauaccuu

SEQ ID NO: 190802 - RNA, 19 nt, Homo sapiens
  misc_RNA (1)...(19): siRNA sense strand
gcaucauuucccuguguaa

SEQ ID NO: 190803 - RNA, 19 nt, Homo sapiens
  misc_RNA (1)...(19): siRNA sense strand
cugcaaagaguguccaauc

SEQ ID NO: 190804 - RNA, 19 nt, Homo sapiens
  misc_RNA (1)...(19): siRNA sense strand
cuuauaggacugccaugaa

SEQ ID NO: 190805 - RNA, 19 nt, Homo sapiens
  misc_RNA (1)...(19): siRNA sense strand
caaagaguguccaaucauu

SEQ ID NO: 190806 - RNA, 19 nt, Homo sapiens
  misc_RNA (1)...(19): siRNA sense strand
uagcugaccugaauaaugu

SEQ ID NO: 190807 - RNA, 19 nt, Homo sapiens
  misc_RNA (1)...(19): siRNA sense strand
gcaugauucuauccaaauu

SEQ ID NO: 190808 - RNA, 19 nt, Homo sapiens
  misc_RNA (1)...(19): siRNA sense strand
ugaacuggcugcugaaugu

SEQ ID NO: 190809 - RNA, 19 nt, Homo sapiens
  misc_RNA (1)...(19): siRNA sense strand
gauauccugcagauuauua

SEQ ID NO: 190810 - RNA, 19 nt, Homo sapiens
  misc_RNA (1)...(19): siRNA sense strand
gagaagauguucgagacuu

SEQ ID NO: 190811 - RNA, 19 nt, Homo sapiens
  misc_RNA (1)...(19): siRNA sense strand
gcacuuuaauuaugacauc

SEQ ID NO: 190812 - RNA, 19 nt, Homo sapiens
  misc_RNA (1)...(19): siRNA sense strand
guaaagcacauuuggaaga

SEQ ID NO: 190813 - RNA, 19 nt, Homo sapiens
  misc_RNA (1)...(19): siRNA sense strand
gaauauugcacuccgacua

SEQ ID NO: 190814 - RNA, 19 nt, Homo sapiens
  misc_RNA (1)...(19): siRNA sense strand
uuauaggacugccaugaaa

SEQ ID NO: 190815 - RNA, 19 nt, Homo sapiens
  misc_RNA (1)...(19): siRNA sense strand
gggugaaguugcauccuuu

SEQ ID NO: 190816 - RNA, 19 nt, Homo sapiens
  misc_RNA (1)...(19): siRNA sense strand
gcaagagcacaacaauuug

SEQ ID NO: 190817 - RNA, 19 nt, Homo sapiens
  misc_RNA (1)...(19): siRNA sense strand
gcacaacaauuuggucaac

SEQ ID NO: 190818 - RNA, 19 nt, Homo sapiens
  misc_RNA (1)...(19): siRNA sense strand
agcaagagcacaacaauuu

SEQ ID NO: 190819 - RNA, 19 nt, Homo sapiens
  misc_RNA (1)...(19): siRNA sense strand
agaagauguucgagacuuu

SEQ ID NO: 190820 - RNA, 19 nt, Homo sapiens
  misc_RNA (1)...(19): siRNA sense strand
gagcaagagcacaacaauu

SEQ ID NO: 190821 - RNA, 19 nt, Homo sapiens
  misc_RNA (1)...(19): siRNA sense strand
ucaagcaaguggcaaguuc

SEQ ID NO: 190822 - RNA, 19 nt, Homo sapiens
  misc_RNA (1)...(19): siRNA sense strand
ccacgagacucaaacaacu

SEQ ID NO: 190823 - RNA, 19 nt, Homo sapiens
  misc_RNA (1)...(19): siRNA sense strand
cagcacaaccucaagcaaa

SEQ ID NO: 190824 - RNA, 19 nt, Homo sapiens
  misc_RNA (1)...(19): siRNA sense strand
gcaaagaguguccaaucau

SEQ ID NO: 190825 - RNA, 19 nt, Homo sapiens
  misc_RNA (1)...(19): siRNA sense strand
auggauauccugcagauua

SEQ ID NO: 190826 - RNA, 19 nt, Homo sapiens
  misc_RNA (1)...(19): siRNA sense strand
uguaacaucugcaaagagu

SEQ ID NO: 190827 - RNA, 19 nt, Homo sapiens
  misc_RNA (1)...(19): siRNA sense strand
guccggagcugcuuccaau

SEQ ID NO: 190828 - RNA, 19 nt, Homo sapiens
  misc_RNA (1)...(19): siRNA sense strand
gcaaguggcaaguucaaca

SEQ ID NO: 190829 - RNA, 19 nt, Homo sapiens
  misc_RNA (1)...(19): siRNA sense strand
gcuuccaauuugcuaauaa

SEQ ID NO: 190830 - RNA, 19 nt, Homo sapiens
  misc_RNA (1)...(19): siRNA sense strand
uggaagacaaguacagaua

SEQ ID NO: 190831 - RNA, 19 nt, Homo sapiens
  misc_RNA (1)...(19): siRNA sense strand
ggauccguguccugucuuu

SEQ ID NO: 190832 - RNA, 19 nt, Homo sapiens
  misc_RNA (1)...(19): siRNA sense strand
gucuuuagcugaccugaau

SEQ ID NO: 190833 - RNA, 19 nt, Homo sapiens
  misc_RNA (1)...(19): siRNA sense strand
gacaaguacagauaccuuu

SEQ ID NO: 190834 - RNA, 19 nt, Homo sapiens
  misc_RNA (1)...(19): siRNA sense strand
ccaagcaucaggccaaaug

SEQ ID NO: 190835 - RNA, 19 nt, Homo sapiens
  misc_RNA (1)...(19): siRNA sense strand
ggagcaagagcacaacaau

SEQ ID NO: 190836 - RNA, 19 nt, Homo sapiens
  misc_RNA (1)...(19): siRNA sense strand
guguaaagcacauuuggaa

SEQ ID NO: 190837 - RNA, 19 nt, Homo sapiens
  misc_RNA (1)...(19): siRNA sense strand
caagacaguugggugaagu

SEQ ID NO: 190838 - RNA, 19 nt, Homo sapiens
  misc_RNA (1)...(19): siRNA sense strand
gaagauguucgagacuuug

SEQ ID NO: 190839 - RNA, 19 nt, Homo sapiens
  misc_RNA (1)...(19): siRNA sense strand
gucagauucucagcuuaua

SEQ ID NO: 190840 - RNA, 19 nt, Homo sapiens
  misc_RNA (1)...(19): siRNA sense strand
uaacaucugcaaagagugu

SEQ ID NO: 190841 - RNA, 19 nt, Homo sapiens
  misc_RNA (1)...(19): siRNA sense strand
cggagcugcuuccaauuug

SEQ ID NO: 190842 - RNA, 19 nt, Homo sapiens
  misc_RNA (1)...(19): siRNA sense strand
gaagacaaguacagauacc

SEQ ID NO: 190843 - RNA, 19 nt, Homo sapiens
  misc_RNA (1)...(19): siRNA sense strand
ccauggauauccugcagau

SEQ ID NO: 190844 - RNA, 19 nt, Homo sapiens
  misc_RNA (1)...(19): siRNA sense strand
ggcaucauuucccugugua

SEQ ID NO: 190845 - RNA, 19 nt, Homo sapiens
  misc_RNA (1)...(19): siRNA sense strand
uggauauccugcagauuau

SEQ ID NO: 190846 - RNA, 19 nt, Homo sapiens
  misc_RNA (1)...(19): siRNA sense strand
ggaagacaaguacagauac

SEQ ID NO: 190847 - RNA, 19 nt, Homo sapiens
  misc_RNA (1)...(19): siRNA sense strand
ugcaaagaguguccaauca

SEQ ID NO: 190848 - RNA, 19 nt, Homo sapiens
  misc_RNA (1)...(19): siRNA sense strand
guggauaugugucugaacu

SEQ ID NO: 190849 - RNA, 19 nt, Homo sapiens
  misc_RNA (1)...(19): siRNA sense strand
acuggcugcugaauguuua

SEQ ID NO: 190850 - RNA, 19 nt, Homo sapiens
  misc_RNA (1)...(19): siRNA sense strand
acuaucccaugguggaaua

SEQ ID NO: 190851 - RNA, 19 nt, Homo sapiens
  misc_RNA (1)...(19): siRNA sense strand
ccggagcugcuuccaauuu

SEQ ID NO: 190852 - RNA, 19 nt, Homo sapiens
  misc_RNA (1)...(19): siRNA sense strand
ccaaauuccaagacaguug

SEQ ID NO: 190853 - RNA, 19 nt, Homo sapiens
  misc_RNA (1)...(19): siRNA sense strand
cagaaacugccaagcauca

SEQ ID NO: 190854 - RNA, 19 nt, Homo sapiens
  misc_RNA (1)...(19): siRNA sense strand
uaugacaucugccaaagcu

SEQ ID NO: 190855 - RNA, 19 nt, Homo sapiens
  misc_RNA (1)...(19): siRNA sense strand
aaugucagauucucagcuu

SEQ ID NO: 190856 - RNA, 19 nt, Homo sapiens
  misc_RNA (1)...(19): siRNA sense strand
ucgagacuuugccaaggua

SEQ ID NO: 190857 - RNA, 19 nt, Homo sapiens
  misc_RNA (1)...(19): siRNA sense strand
gcaaaaggccauaaaaugc

SEQ ID NO: 190858 - RNA, 19 nt, Homo sapiens
  misc_RNA (1)...(19): siRNA sense strand
cugcaugauucuauccaaa

SEQ ID NO: 190859 - RNA, 19 nt, Homo sapiens
  misc_RNA (1)...(19): siRNA sense strand
uaaagcacauuuggaagac

SEQ ID NO: 190860 - RNA, 19 nt, Homo sapiens
  misc_RNA (1)...(19): siRNA sense strand
acaggagucuaaagcacuu

SEQ ID NO: 190861 - RNA, 19 nt, Homo sapiens
  misc_RNA (1)...(19): siRNA sense strand
acagauaccuuuucaagca

SEQ ID NO: 190862 - RNA, 19 nt, Homo sapiens
  misc_RNA (1)...(19): siRNA sense strand
aagcacauuuggaagacaa

SEQ ID NO: 190863 - RNA, 19 nt, Homo sapiens
  misc_RNA (1)...(19): siRNA sense strand
gcuaauaauaagccagaga

SEQ ID NO: 190864 - RNA, 19 nt, Homo sapiens
  misc_RNA (1)...(19): siRNA sense strand
caagagcacaacaauuugg

SEQ ID NO: 190865 - RNA, 19 nt, Homo sapiens
  misc_RNA (1)...(19): siRNA sense strand
ccugucagcugcaugugau

SEQ ID NO: 190866 - RNA, 19 nt, Homo sapiens
  misc_RNA (1)...(19): siRNA sense strand
gcugcugaauguuuaugau

SEQ ID NO: 190867 - RNA, 19 nt, Homo sapiens
  misc_RNA (1)...(19): siRNA sense strand
acagagcucuaccagucuu

SEQ ID NO: 190868 - RNA, 19 nt, Homo sapiens
  misc_RNA (1)...(19): siRNA sense strand
acaguugggugaaguugca

SEQ ID NO: 190869 - RNA, 19 nt, Homo sapiens
  misc_RNA (1)...(19): siRNA sense strand
guuugaccacuauuuauga

SEQ ID NO: 190870 - RNA, 19 nt, Homo sapiens
  misc_RNA (1)...(19): siRNA sense strand
gcuuauaggacugccauga

SEQ ID NO: 190871 - RNA, 19 nt, Homo sapiens
  misc_RNA (1)...(19): siRNA sense strand
caucaggccaaauguaaca

SEQ ID NO: 190872 - RNA, 19 nt, Homo sapiens
  misc_RNA (1)...(19): siRNA sense strand
gauucuauccaaauuccaa

SEQ ID NO: 190873 - RNA, 19 nt, Homo sapiens
  misc_RNA (1)...(19): siRNA sense strand
ggcaaguucaacaggauuu

SEQ ID NO: 190874 - RNA, 19 nt, Homo sapiens
  misc_RNA (1)...(19): siRNA sense strand
gaacuggcugcugaauguu

SEQ ID NO: 190875 - RNA, 19 nt, Homo sapiens
  misc_RNA (1)...(19): siRNA sense strand
cugcugaauguuuaugaua

SEQ ID NO: 190876 - RNA, 19 nt, Homo sapiens
  misc_RNA (1)...(19): siRNA sense strand
aagcaucaggccaaaugua

SEQ ID NO: 190877 - RNA, 19 nt, Homo sapiens
  misc_RNA (1)...(19): siRNA sense strand
uggcaucauuucccugugu

SEQ ID NO: 190878 - RNA, 19 nt, Homo sapiens
  misc_RNA (1)...(19): siRNA sense strand
ccaugaaacuccgaagacu

SEQ ID NO: 190879 - RNA, 19 nt, Homo sapiens
  misc_RNA (1)...(19): siRNA sense strand
auaauaagccagagaucga

SEQ ID NO: 190880 - RNA, 19 nt, Homo sapiens
  misc_RNA (1)...(19): siRNA sense strand
cuaauaauaagccagagau

SEQ ID NO: 190881 - RNA, 19 nt, Homo sapiens
  misc_RNA (1)...(19): siRNA sense strand
ugggugaaguugcauccuu

SEQ ID NO: 190882 - RNA, 19 nt, Homo sapiens
  misc_RNA (1)...(19): siRNA sense strand
caucauuucccuguguaaa

SEQ ID NO: 190883 - RNA, 19 nt, Homo sapiens
  misc_RNA (1)...(19): siRNA sense strand
gcguggauaugugucugaa

SEQ ID NO: 190884 - RNA, 19 nt, Homo sapiens
  misc_RNA (1)...(19): siRNA sense strand
gcacuaucccaugguggaa

SEQ ID NO: 190885 - RNA, 19 nt, Homo sapiens
  misc_RNA (1)...(19): siRNA sense strand
gagccugucagcugcaugu

SEQ ID NO: 190886 - RNA, 19 nt, Homo sapiens
  misc_RNA (1)...(19): siRNA sense strand
guacagauaccuuuucaag

SEQ ID NO: 190887 - RNA, 19 nt, Homo sapiens
  misc_RNA (1)...(19): siRNA sense strand
gucccucucugcguggaua

SEQ ID NO: 190888 - RNA, 19 nt, Homo sapiens
  misc_RNA (1)...(19): siRNA sense strand
ggagcugcuuccaauuugc

SEQ ID NO: 190889 - RNA, 19 nt, Homo sapiens
  misc_RNA (1)...(19): siRNA sense strand
uuagcugaccugaauaaug

SEQ ID NO: 190890 - RNA, 19 nt, Homo sapiens
  misc_RNA (1)...(19): siRNA sense strand
guggcaaguucaacaggau

SEQ ID NO: 190891 - RNA, 19 nt, Homo sapiens
  misc_RNA (1)...(19): siRNA sense strand
acaacaauuuggucaacgu

SEQ ID NO: 190892 - RNA, 19 nt, Homo sapiens
  misc_RNA (1)...(19): siRNA sense strand
gacuacaucaggagaagau

SEQ ID NO: 190893 - RNA, 19 nt, Homo sapiens
  misc_RNA (1)...(19): siRNA sense strand
uaauaagccagagaucgaa

SEQ ID NO: 190894 - RNA, 19 nt, Homo sapiens
  misc_RNA (1)...(19): siRNA sense strand
ugucagauucucagcuuau

SEQ ID NO: 190895 - RNA, 19 nt, Homo sapiens
  misc_RNA (1)...(19): siRNA sense strand
ggauauccugcagauuauu

SEQ ID NO: 190896 - RNA, 19 nt, Homo sapiens
  misc_RNA (1)...(19): siRNA sense strand
agcaucaggccaaauguaa

SEQ ID NO: 190897 - RNA, 19 nt, Homo sapiens
  misc_RNA (1)...(19): siRNA sense strand
gcccuuugcuuggaucucu

SEQ ID NO: 190898 - RNA, 19 nt, Homo sapiens
  misc_RNA (1)...(19): siRNA sense strand
gcugaauguuuaugauacg

SEQ ID NO: 190899 - RNA, 19 nt, Homo sapiens
  misc_RNA (1)...(19): siRNA sense strand
agacuuugccaagguacua

SEQ ID NO: 190900 - RNA, 19 nt, Homo sapiens
  misc_RNA (1)...(19): siRNA sense strand
caagcaaguggcaaguuca

SEQ ID NO: 190901 - RNA, 19 nt, Homo sapiens
  misc_RNA (1)...(19): siRNA sense strand
agacaaguacagauaccuu

SEQ ID NO: 190902 - RNA, 19 nt, Homo sapiens
  misc_RNA (1)...(19): siRNA sense strand
gcaucauuucccuguguaa

SEQ ID NO: 190903 - RNA, 19 nt, Homo sapiens
  misc_RNA (1)...(19): siRNA sense strand
cugcaaagaguguccaauc

SEQ ID NO: 190904 - RNA, 19 nt, Homo sapiens
  misc_RNA (1)...(19): siRNA sense strand
cuuauaggacugccaugaa

SEQ ID NO: 190905 - RNA, 19 nt, Homo sapiens
  misc_RNA (1)...(19): siRNA sense strand
caaagaguguccaaucauu

SEQ ID NO: 190906 - RNA, 19 nt, Homo sapiens
  misc_RNA (1)...(19): siRNA sense strand
uagcugaccugaauaaugu

SEQ ID NO: 190907 - RNA, 19 nt, Homo sapiens
  misc_RNA (1)...(19): siRNA sense strand
gcaugauucuauccaaauu

SEQ ID NO: 190908 - RNA, 19 nt, Homo sapiens
  misc_RNA (1)...(19): siRNA sense strand
ugaacuggcugcugaaugu

SEQ ID NO: 190909 - RNA, 19 nt, Homo sapiens
  misc_RNA (1)...(19): siRNA sense strand
gauauccugcagauuauua

SEQ ID NO: 190910 - RNA, 19 nt, Homo sapiens
  misc_RNA (1)...(19): siRNA sense strand
gagaagauguucgagacuu

SEQ ID NO: 190911 - RNA, 19 nt, Homo sapiens
  misc_RNA (1)...(19): siRNA sense strand
gcacuuuaauuaugacauc

SEQ ID NO: 190912 - RNA, 19 nt, Homo sapiens
  misc_RNA (1)...(19): siRNA sense strand
guaaagcacauuuggaaga

SEQ ID NO: 190913 - RNA, 19 nt, Homo sapiens
  misc_RNA (1)...(19): siRNA sense strand
gaauauugcacuccgacua

SEQ ID NO: 190914 - RNA, 19 nt, Homo sapiens
  misc_RNA (1)...(19): siRNA sense strand
uuauaggacugccaugaaa

SEQ ID NO: 190915 - RNA, 19 nt, Homo sapiens
  misc_RNA (1)...(19): siRNA sense strand
gggugaaguugcauccuuu

SEQ ID NO: 190916 - RNA, 19 nt, Homo sapiens
  misc_RNA (1)...(19): siRNA sense strand
gcaagagcacaacaauuug

SEQ ID NO: 190917 - RNA, 19 nt, Homo sapiens
  misc_RNA (1)...(19): siRNA sense strand
gcacaacaauuuggucaac

SEQ ID NO: 190918 - RNA, 19 nt, Homo sapiens
  misc_RNA (1)...(19): siRNA sense strand
agcaagagcacaacaauuu

SEQ ID NO: 190919 - RNA, 19 nt, Homo sapiens
  misc_RNA (1)...(19): siRNA sense strand
agaagauguucgagacuuu

SEQ ID NO: 190920 - RNA, 19 nt, Homo sapiens
  misc_RNA (1)...(19): siRNA sense strand
gagcaagagcacaacaauu

SEQ ID NO: 190921 - RNA, 19 nt, Homo sapiens
  misc_RNA (1)...(19): siRNA sense strand
ucaagcaaguggcaaguuc

SEQ ID NO: 190922 - RNA, 19 nt, Homo sapiens
  misc_RNA (1)...(19): siRNA sense strand
ccacgagacucaaacaacu

SEQ ID NO: 190923 - RNA, 19 nt, Homo sapiens
  misc_RNA (1)...(19): siRNA sense strand
cagcacaaccucaagcaaa

SEQ ID NO: 190924 - RNA, 19 nt, Homo sapiens
  misc_RNA (1)...(19): siRNA sense strand
gcaaagaguguccaaucau

SEQ ID NO: 190925 - RNA, 19 nt, Homo sapiens
  misc_RNA (1)...(19): siRNA sense strand
auggauauccugcagauua

SEQ ID NO: 190926 - RNA, 19 nt, Homo sapiens
  misc_RNA (1)...(19): siRNA sense strand
uguaacaucugcaaagagu

SEQ ID NO: 190927 - RNA, 19 nt, Homo sapiens
  misc_RNA (1)...(19): siRNA sense strand
guccggagcugcuuccaau

SEQ ID NO: 190928 - RNA, 19 nt, Homo sapiens
  misc_RNA (1)...(19): siRNA sense strand
gcaaguggcaaguucaaca

SEQ ID NO: 190929 - RNA, 19 nt, Homo sapiens
  misc_RNA (1)...(19): siRNA sense strand
gcuuccaauuugcuaauaa

SEQ ID NO: 190930 - RNA, 19 nt, Homo sapiens
  misc_RNA (1)...(19): siRNA sense strand
uggaagacaaguacagaua

SEQ ID NO: 190931 - RNA, 19 nt, Homo sapiens
  misc_RNA (1)...(19): siRNA sense strand
ggauccguguccugucuuu

SEQ ID NO: 190932 - RNA, 19 nt, Homo sapiens
  misc_RNA (1)...(19): siRNA sense strand
gucuuuagcugaccugaau

SEQ ID NO: 190933 - RNA, 19 nt, Homo sapiens
  misc_RNA (1)...(19): siRNA sense strand
gacaaguacagauaccuuu

SEQ ID NO: 190934 - RNA, 19 nt, Homo sapiens
  misc_RNA (1)...(19): siRNA sense strand
ccaagcaucaggccaaaug

SEQ ID NO: 190935 - RNA, 19 nt, Homo sapiens
  misc_RNA (1)...(19): siRNA sense strand
ggagcaagagcacaacaau

SEQ ID NO: 190936 - RNA, 19 nt, Homo sapiens
  misc_RNA (1)...(19): siRNA sense strand
guguaaagcacauuuggaa

SEQ ID NO: 190937 - RNA, 19 nt, Homo sapiens
  misc_RNA (1)...(19): siRNA sense strand
caagacaguugggugaagu

SEQ ID NO: 190938 - RNA, 19 nt, Homo sapiens
  misc_RNA (1)...(19): siRNA sense strand
gaagauguucgagacuuug

SEQ ID NO: 190939 - RNA, 19 nt, Homo sapiens
  misc_RNA (1)...(19): siRNA sense strand
gucagauucucagcuuaua

SEQ ID NO: 190940 - RNA, 19 nt, Homo sapiens
  misc_RNA (1)...(19): siRNA sense strand
uaacaucugcaaagagugu

SEQ ID NO: 190941 - RNA, 19 nt, Homo sapiens
  misc_RNA (1)...(19): siRNA sense strand
cggagcugcuuccaauuug

SEQ ID NO: 190942 - RNA, 19 nt, Homo sapiens
  misc_RNA (1)...(19): siRNA sense strand
gaagacaaguacagauacc

SEQ ID NO: 190943 - RNA, 19 nt, Homo sapiens
  misc_RNA (1)...(19): siRNA sense strand
ccauggauauccugcagau

SEQ ID NO: 190944 - RNA, 19 nt, Homo sapiens
  misc_RNA (1)...(19): siRNA sense strand
ggcaucauuucccugugua

SEQ ID NO: 190945 - RNA, 19 nt, Homo sapiens
  misc_RNA (1)...(19): siRNA sense strand
uggauauccugcagauuau

SEQ ID NO: 190946 - RNA, 19 nt, Homo sapiens
  misc_RNA (1)...(19): siRNA sense strand
ggaagacaaguacagauac

SEQ ID NO: 190947 - RNA, 19 nt, Homo sapiens
  misc_RNA (1)...(19): siRNA sense strand
ugcaaagaguguccaauca

SEQ ID NO: 190948 - RNA, 19 nt, Homo sapiens
  misc_RNA (1)...(19): siRNA sense strand
guggauaugugucugaacu

SEQ ID NO: 190949 - RNA, 19 nt, Homo sapiens
  misc_RNA (1)...(19): siRNA sense strand
acuggcugcugaauguuua

SEQ ID NO: 190950 - RNA, 19 nt, Homo sapiens
  misc_RNA (1)...(19): siRNA sense strand
acuaucccaugguggaaua

SEQ ID NO: 190951 - RNA, 19 nt, Homo sapiens
  misc_RNA (1)...(19): siRNA sense strand
ccggagcugcuuccaauuu

SEQ ID NO: 190952 - RNA, 19 nt, Homo sapiens
  misc_RNA (1)...(19): siRNA sense strand
ccaaauuccaagacaguug

SEQ ID NO: 190953 - RNA, 19 nt, Homo sapiens
  misc_RNA (1)...(19): siRNA sense strand
cagaaacugccaagcauca

SEQ ID NO: 190954 - RNA, 19 nt, Homo sapiens
  misc_RNA (1)...(19): siRNA sense strand
uaugacaucugccaaagcu

SEQ ID NO: 190955 - RNA, 19 nt, Homo sapiens
  misc_RNA (1)...(19): siRNA sense strand
aaugucagauucucagcuu

SEQ ID NO: 190956 - RNA, 19 nt, Homo sapiens
  misc_RNA (1)...(19): siRNA sense strand
ucgagacuuugccaaggua

SEQ ID NO: 190957 - RNA, 19 nt, Homo sapiens
  misc_RNA (1)...(19): siRNA sense strand
gcaaaaggccauaaaaugc

SEQ ID NO: 190958 - RNA, 19 nt, Homo sapiens
  misc_RNA (1)...(19): siRNA sense strand
cugcaugauucuauccaaa

SEQ ID NO: 190959 - RNA, 19 nt, Homo sapiens
  misc_RNA (1)...(19): siRNA sense strand
uaaagcacauuuggaagac

SEQ ID NO: 190960 - RNA, 19 nt, Homo sapiens
  misc_RNA (1)...(19): siRNA sense strand
acaggagucuaaagcacuu

SEQ ID NO: 190961 - RNA, 19 nt, Homo sapiens
  misc_RNA (1)...(19): siRNA sense strand
acagauaccuuuucaagca

SEQ ID NO: 190962 - RNA, 19 nt, Homo sapiens
  misc_RNA (1)...(19): siRNA sense strand
aagcacauuuggaagacaa

SEQ ID NO: 190963 - RNA, 19 nt, Homo sapiens
  misc_RNA (1)...(19): siRNA sense strand
gcuaauaauaagccagaga

SEQ ID NO: 190964 - RNA, 19 nt, Homo sapiens
  misc_RNA (1)...(19): siRNA sense strand
caagagcacaacaauuugg

SEQ ID NO: 190965 - RNA, 19 nt, Homo sapiens
  misc_RNA (1)...(19): siRNA sense strand
ccugucagcugcaugugau

SEQ ID NO: 190966 - RNA, 19 nt, Homo sapiens
  misc_RNA (1)...(19): siRNA sense strand
gcugcugaauguuuaugau

SEQ ID NO: 190967 - RNA, 19 nt, Homo sapiens
  misc_RNA (1)...(19): siRNA sense strand
acagagcucuaccagucuu

SEQ ID NO: 190968 - RNA, 19 nt, Homo sapiens
  misc_RNA (1)...(19): siRNA sense strand
acaguugggugaaguugca

SEQ ID NO: 190969 - RNA, 19 nt, Homo sapiens
  misc_RNA (1)...(19): siRNA sense strand
guuugaccacuauuuauga

SEQ ID NO: 190970 - RNA, 19 nt, Homo sapiens
  misc_RNA (1)...(19): siRNA sense strand
gcuuauaggacugccauga

SEQ ID NO: 190971 - RNA, 19 nt, Homo sapiens
  misc_RNA (1)...(19): siRNA sense strand
caucaggccaaauguaaca

SEQ ID NO: 190972 - RNA, 19 nt, Homo sapiens
  misc_RNA (1)...(19): siRNA sense strand
gauucuauccaaauuccaa

SEQ ID NO: 190973 - RNA, 19 nt, Homo sapiens
  misc_RNA (1)...(19): siRNA sense strand
ggcaaguucaacaggauuu

SEQ ID NO: 190974 - RNA, 19 nt, Homo sapiens
  misc_RNA (1)...(19): siRNA sense strand
gaacuggcugcugaauguu

SEQ ID NO: 190975 - RNA, 19 nt, Homo sapiens
  misc_RNA (1)...(19): siRNA sense strand
cugcugaauguuuaugaua

SEQ ID NO: 190976 - RNA, 19 nt, Homo sapiens
  misc_RNA (1)...(19): siRNA sense strand
aagcaucaggccaaaugua

SEQ ID NO: 190977 - RNA, 19 nt, Homo sapiens
  misc_RNA (1)...(19): siRNA sense strand
uggcaucauuucccugugu

SEQ ID NO: 190978 - RNA, 19 nt, Homo sapiens
  misc_RNA (1)...(19): siRNA sense strand
ccaugaaacuccgaagacu

SEQ ID NO: 190979 - RNA, 19 nt, Homo sapiens
  misc_RNA (1)...(19): siRNA sense strand
auaauaagccagagaucga

SEQ ID NO: 190980 - RNA, 19 nt, Homo sapiens
  misc_RNA (1)...(19): siRNA sense strand
cuaauaauaagccagagau

SEQ ID NO: 190981 - RNA, 19 nt, Homo sapiens
  misc_RNA (1)...(19): siRNA sense strand
ugggugaaguugcauccuu

SEQ ID NO: 190982 - RNA, 19 nt, Homo sapiens
  misc_RNA (1)...(19): siRNA sense strand
caucauuucccuguguaaa

SEQ ID NO: 190983 - RNA, 19 nt, Homo sapiens
  misc_RNA (1)...(19): siRNA sense strand
gcguggauaugugucugaa

SEQ ID NO: 190984 - RNA, 19 nt, Homo sapiens
  misc_RNA (1)...(19): siRNA sense strand
gcacuaucccaugguggaa

SEQ ID NO: 190985 - RNA, 19 nt, Homo sapiens
  misc_RNA (1)...(19): siRNA sense strand
gagccugucagcugcaugu

SEQ ID NO: 190986 - RNA, 19 nt, Homo sapiens
  misc_RNA (1)...(19): siRNA sense strand
guacagauaccuuuucaag

SEQ ID NO: 190987 - RNA, 19 nt, Homo sapiens
  misc_RNA (1)...(19): siRNA sense strand
gucccucucugcguggaua

SEQ ID NO: 190988 - RNA, 19 nt, Homo sapiens
  misc_RNA (1)...(19): siRNA sense strand
ggagcugcuuccaauuugc

SEQ ID NO: 190989 - RNA, 19 nt, Homo sapiens
  misc_RNA (1)...(19): siRNA sense strand
uuagcugaccugaauaaug

SEQ ID NO: 190990 - RNA, 19 nt, Homo sapiens
  misc_RNA (1)...(19): siRNA sense strand
guggcaaguucaacaggau

SEQ ID NO: 190991 - RNA, 19 nt, Homo sapiens
  misc_RNA (1)...(19): siRNA sense strand
acaacaauuuggucaacgu

SEQ ID NO: 190992 - RNA, 19 nt, Homo sapiens
  misc_RNA (1)...(19): siRNA sense strand
gacuacaucaggagaagau

SEQ ID NO: 190993 - RNA, 19 nt, Homo sapiens
  misc_RNA (1)...(19): siRNA sense strand
uaauaagccagagaucgaa

SEQ ID NO: 190994 - RNA, 19 nt, Homo sapiens
  misc_RNA (1)...(19): siRNA sense strand
ugucagauucucagcuuau

SEQ ID NO: 190995 - RNA, 19 nt, Homo sapiens
  misc_RNA (1)...(19): siRNA sense strand
ggauauccugcagauuauu

SEQ ID NO: 190996 - RNA, 19 nt, Homo sapiens
  misc_RNA (1)...(19): siRNA sense strand
agcaucaggccaaauguaa

SEQ ID NO: 190997 - RNA, 19 nt, Homo sapiens
  misc_RNA (1)...(19): siRNA sense strand
gcccuuugcuuggaucucu

SEQ ID NO: 190998 - RNA, 19 nt, Homo sapiens
  misc_RNA (1)...(19): siRNA sense strand
gcugaauguuuaugauacg

SEQ ID NO: 190999 - RNA, 19 nt, Homo sapiens
  misc_RNA (1)...(19): siRNA sense strand
agacuuugccaagguacua

SEQ ID NO: 191000 - RNA, 19 nt, Homo sapiens
  misc_RNA (1)...(19): siRNA sense strand
caagcaaguggcaaguuca

SEQ ID NO: 191001 - RNA, 19 nt, Homo sapiens
  misc_RNA (1)...(19): siRNA sense strand
agacaaguacagauaccuu

SEQ ID NO: 191002 - RNA, 19 nt, Homo sapiens
  misc_RNA (1)...(19): siRNA sense strand
gcaucauuucccuguguaa

SEQ ID NO: 191003 - RNA, 19 nt, Homo sapiens
  misc_RNA (1)...(19): siRNA sense strand
cugcaaagaguguccaauc

SEQ ID NO: 191004 - RNA, 19 nt, Homo sapiens
  misc_RNA (1)...(19): siRNA sense strand
cuuauaggacugccaugaa

SEQ ID NO: 191005 - RNA, 19 nt, Homo sapiens
  misc_RNA (1)...(19): siRNA sense strand
caaagaguguccaaucauu

SEQ ID NO: 191006 - RNA, 19 nt, Homo sapiens
  misc_RNA (1)...(19): siRNA sense strand
uagcugaccugaauaaugu

SEQ ID NO: 191007 - RNA, 19 nt, Homo sapiens
  misc_RNA (1)...(19): siRNA sense strand
gcaugauucuauccaaauu

SEQ ID NO: 191008 - RNA, 19 nt, Homo sapiens
  misc_RNA (1)...(19): siRNA sense strand
ugaacuggcugcugaaugu

SEQ ID NO: 191009 - RNA, 19 nt, Homo sapiens
  misc_RNA (1)...(19): siRNA sense strand
gauauccugcagauuauua

SEQ ID NO: 191010 - RNA, 19 nt, Homo sapiens
  misc_RNA (1)...(19): siRNA sense strand
gagaagauguucgagacuu

SEQ ID NO: 191011 - RNA, 19 nt, Homo sapiens
  misc_RNA (1)...(19): siRNA sense strand
gcacuuuaauuaugacauc

SEQ ID NO: 191012 - RNA, 19 nt, Homo sapiens
  misc_RNA (1)...(19): siRNA sense strand
guaaagcacauuuggaaga

SEQ ID NO: 191013 - RNA, 19 nt, Homo sapiens
  misc_RNA (1)...(19): siRNA sense strand
gaauauugcacuccgacua

SEQ ID NO: 191014 - RNA, 19 nt, Homo sapiens
  misc_RNA (1)...(19): siRNA sense strand
uuauaggacugccaugaaa

SEQ ID NO: 191015 - RNA, 19 nt, Homo sapiens
  misc_RNA (1)...(19): siRNA sense strand
gggugaaguugcauccuuu

SEQ ID NO: 191016 - RNA, 19 nt, Homo sapiens
  misc_RNA (1)...(19): siRNA sense strand
gcaagagcacaacaauuug

SEQ ID NO: 191017 - RNA, 19 nt, Homo sapiens
  misc_RNA (1)...(19): siRNA sense strand
gcacaacaauuuggucaac

SEQ ID NO: 191018 - RNA, 19 nt, Homo sapiens
  misc_RNA (1)...(19): siRNA sense strand
agcaagagcacaacaauuu

SEQ ID NO: 191019 - RNA, 19 nt, Homo sapiens
  misc_RNA (1)...(19): siRNA sense strand
agaagauguucgagacuuu

SEQ ID NO: 191020 - RNA, 19 nt, Homo sapiens
  misc_RNA (1)...(19): siRNA sense strand
gagcaagagcacaacaauu

SEQ ID NO: 191021 - RNA, 19 nt, Homo sapiens
  misc_RNA (1)...(19): siRNA sense strand
ucaagcaaguggcaaguuc

SEQ ID NO: 191022 - RNA, 19 nt, Homo sapiens
  misc_RNA (1)...(19): siRNA sense strand
ccacgagacucaaacaacu

SEQ ID NO: 191023 - RNA, 19 nt, Homo sapiens
  misc_RNA (1)...(19): siRNA sense strand
cagcacaaccucaagcaaa

SEQ ID NO: 191024 - RNA, 19 nt, Homo sapiens
  misc_RNA (1)...(19): siRNA sense strand
gcaaagaguguccaaucau

SEQ ID NO: 191025 - RNA, 19 nt, Homo sapiens
  misc_RNA (1)...(19): siRNA sense strand
auggauauccugcagauua

SEQ ID NO: 191026 - RNA, 19 nt, Homo sapiens
  misc_RNA (1)...(19): siRNA sense strand
uguaacaucugcaaagagu

SEQ ID NO: 191027 - RNA, 19 nt, Homo sapiens
  misc_RNA (1)...(19): siRNA sense strand
guccggagcugcuuccaau

SEQ ID NO: 191028 - RNA, 19 nt, Homo sapiens
  misc_RNA (1)...(19): siRNA sense strand
gcaaguggcaaguucaaca

SEQ ID NO: 191029 - RNA, 19 nt, Homo sapiens
  misc_RNA (1)...(19): siRNA sense strand
gcuuccaauuugcuaauaa

SEQ ID NO: 191030 - RNA, 19 nt, Homo sapiens
  misc_RNA (1)...(19): siRNA sense strand
uggaagacaaguacagaua

SEQ ID NO: 191031 - RNA, 19 nt, Homo sapiens
  misc_RNA (1)...(19): siRNA sense strand
ggauccguguccugucuuu

SEQ ID NO: 191032 - RNA, 19 nt, Homo sapiens
  misc_RNA (1)...(19): siRNA sense strand
gucuuuagcugaccugaau

SEQ ID NO: 191033 - RNA, 19 nt, Homo sapiens
  misc_RNA (1)...(19): siRNA sense strand
gacaaguacagauaccuuu

SEQ ID NO: 191034 - RNA, 19 nt, Homo sapiens
  misc_RNA (1)...(19): siRNA sense strand
ccaagcaucaggccaaaug

SEQ ID NO: 191035 - RNA, 19 nt, Homo sapiens
  misc_RNA (1)...(19): siRNA sense strand
ggagcaagagcacaacaau

SEQ ID NO: 191036 - RNA, 19 nt, Homo sapiens
  misc_RNA (1)...(19): siRNA sense strand
guguaaagcacauuuggaa

SEQ ID NO: 191037 - RNA, 19 nt, Homo sapiens
  misc_RNA (1)...(19): siRNA sense strand
caagacaguugggugaagu

SEQ ID NO: 191038 - RNA, 19 nt, Homo sapiens
  misc_RNA (1)...(19): siRNA sense strand
gaagauguucgagacuuug

SEQ ID NO: 191039 - RNA, 19 nt, Homo sapiens
  misc_RNA (1)...(19): siRNA sense strand
gucagauucucagcuuaua

SEQ ID NO: 191040 - RNA, 19 nt, Homo sapiens
  misc_RNA (1)...(19): siRNA sense strand
uaacaucugcaaagagugu

SEQ ID NO: 191041 - RNA, 19 nt, Homo sapiens
  misc_RNA (1)...(19): siRNA sense strand
cggagcugcuuccaauuug

SEQ ID NO: 191042 - RNA, 19 nt, Homo sapiens
  misc_RNA (1)...(19): siRNA sense strand
gaagacaaguacagauacc

SEQ ID NO: 191043 - RNA, 19 nt, Homo sapiens
  misc_RNA (1)...(19): siRNA sense strand
ccauggauauccugcagau

SEQ ID NO: 191044 - RNA, 19 nt, Homo sapiens
  misc_RNA (1)...(19): siRNA sense strand
ggcaucauuucccugugua

SEQ ID NO: 191045 - RNA, 19 nt, Homo sapiens
  misc_RNA (1)...(19): siRNA sense strand
uggauauccugcagauuau

SEQ ID NO: 191046 - RNA, 19 nt, Homo sapiens
  misc_RNA (1)...(19): siRNA sense strand
ggaagacaaguacagauac

SEQ ID NO: 191047 - RNA, 19 nt, Homo sapiens
  misc_RNA (1)...(19): siRNA sense strand
ugcaaagaguguccaauca

SEQ ID NO: 191048 - RNA, 19 nt, Homo sapiens
  misc_RNA (1)...(19): siRNA sense strand
guggauaugugucugaacu

SEQ ID NO: 191049 - RNA, 19 nt, Homo sapiens
  misc_RNA (1)...(19): siRNA sense strand
acuggcugcugaauguuua

SEQ ID NO: 191050 - RNA, 19 nt, Homo sapiens
  misc_RNA (1)...(19): siRNA sense strand
acuaucccaugguggaaua

SEQ ID NO: 191051 - RNA, 19 nt, Homo sapiens
  misc_RNA (1)...(19): siRNA sense strand
ccggagcugcuuccaauuu

SEQ ID NO: 191052 - RNA, 19 nt, Homo sapiens
  misc_RNA (1)...(19): siRNA sense strand
ccaaauuccaagacaguug

SEQ ID NO: 191053 - RNA, 19 nt, Homo sapiens
  misc_RNA (1)...(19): siRNA sense strand
cagaaacugccaagcauca

SEQ ID NO: 191054 - RNA, 19 nt, Homo sapiens
  misc_RNA (1)...(19): siRNA sense strand
uaugacaucugccaaagcu

SEQ ID NO: 191055 - RNA, 19 nt, Homo sapiens
  misc_RNA (1)...(19): siRNA sense strand
aaugucagauucucagcuu

SEQ ID NO: 191056 - RNA, 19 nt, Homo sapiens
  misc_RNA (1)...(19): siRNA sense strand
ucgagacuuugccaaggua

SEQ ID NO: 191057 - RNA, 19 nt, Homo sapiens
  misc_RNA (1)...(19): siRNA sense strand
gcaaaaggccauaaaaugc

SEQ ID NO: 191058 - RNA, 19 nt, Homo sapiens
  misc_RNA (1)...(19): siRNA sense strand
cugcaugauucuauccaaa

SEQ ID NO: 191059 - RNA, 19 nt, Homo sapiens
  misc_RNA (1)...(19): siRNA sense strand
uaaagcacauuuggaagac

SEQ ID NO: 191060 - RNA, 19 nt, Homo sapiens
  misc_RNA (1)...(19): siRNA sense strand
acaggagucuaaagcacuu

SEQ ID NO: 191061 - RNA, 19 nt, Homo sapiens
  misc_RNA (1)...(19): siRNA sense strand
acagauaccuuuucaagca

SEQ ID NO: 191062 - RNA, 19 nt, Homo sapiens
  misc_RNA (1)...(19): siRNA sense strand
aagcacauuuggaagacaa

SEQ ID NO: 191063 - RNA, 19 nt, Homo sapiens
  misc_RNA (1)...(19): siRNA sense strand
gcuaauaauaagccagaga

SEQ ID NO: 191064 - RNA, 19 nt, Homo sapiens
  misc_RNA (1)...(19): siRNA sense strand
caagagcacaacaauuugg

SEQ ID NO: 191065 - RNA, 19 nt, Homo sapiens
  misc_RNA (1)...(19): siRNA sense strand
ccugucagcugcaugugau

SEQ ID NO: 191066 - RNA, 19 nt, Homo sapiens
  misc_RNA (1)...(19): siRNA sense strand
gcugcugaauguuuaugau

SEQ ID NO: 191067 - RNA, 19 nt, Homo sapiens
  misc_RNA (1)...(19): siRNA sense strand
acagagcucuaccagucuu

SEQ ID NO: 191068 - RNA, 19 nt, Homo sapiens
  misc_RNA (1)...(19): siRNA sense strand
acaguugggugaaguugca

SEQ ID NO: 191069 - RNA, 19 nt, Homo sapiens
  misc_RNA (1)...(19): siRNA sense strand
guuugaccacuauuuauga

SEQ ID NO: 191070 - RNA, 19 nt, Homo sapiens
  misc_RNA (1)...(19): siRNA sense strand
gcuuauaggacugccauga

SEQ ID NO: 191071 - RNA, 19 nt, Homo sapiens
  misc_RNA (1)...(19): siRNA sense strand
caucaggccaaauguaaca

SEQ ID NO: 191072 - RNA, 19 nt, Homo sapiens
  misc_RNA (1)...(19): siRNA sense strand
gauucuauccaaauuccaa

SEQ ID NO: 191073 - RNA, 19 nt, Homo sapiens
  misc_RNA (1)...(19): siRNA sense strand
ggcaaguucaacaggauuu

SEQ ID NO: 191074 - RNA, 19 nt, Homo sapiens
  misc_RNA (1)...(19): siRNA sense strand
gaacuggcugcugaauguu

SEQ ID NO: 191075 - RNA, 19 nt, Homo sapiens
  misc_RNA (1)...(19): siRNA sense strand
cugcugaauguuuaugaua

SEQ ID NO: 191076 - RNA, 19 nt, Homo sapiens
  misc_RNA (1)...(19): siRNA sense strand
aagcaucaggccaaaugua

SEQ ID NO: 191077 - RNA, 19 nt, Homo sapiens
  misc_RNA (1)...(19): siRNA sense strand
uggcaucauuucccugugu

SEQ ID NO: 191078 - RNA, 19 nt, Homo sapiens
  misc_RNA (1)...(19): siRNA sense strand
ccaugaaacuccgaagacu

SEQ ID NO: 191079 - RNA, 19 nt, Homo sapiens
  misc_RNA (1)...(19): siRNA sense strand
auaauaagccagagaucga

SEQ ID NO: 191080 - RNA, 19 nt, Homo sapiens
  misc_RNA (1)...(19): siRNA sense strand
cuaauaauaagccagagau

SEQ ID NO: 191081 - RNA, 19 nt, Homo sapiens
  misc_RNA (1)...(19): siRNA sense strand
ugggugaaguugcauccuu

SEQ ID NO: 191082 - RNA, 19 nt, Homo sapiens
  misc_RNA (1)...(19): siRNA sense strand
caucauuucccuguguaaa

SEQ ID NO: 191083 - RNA, 19 nt, Homo sapiens
  misc_RNA (1)...(19): siRNA sense strand
gcguggauaugugucugaa

SEQ ID NO: 191084 - RNA, 19 nt, Homo sapiens
  misc_RNA (1)...(19): siRNA sense strand
gcacuaucccaugguggaa

SEQ ID NO: 191085 - RNA, 19 nt, Homo sapiens
  misc_RNA (1)...(19): siRNA sense strand
gagccugucagcugcaugu

SEQ ID NO: 191086 - RNA, 19 nt, Homo sapiens
  misc_RNA (1)...(19): siRNA sense strand
guacagauaccuuuucaag

SEQ ID NO: 191087 - RNA, 19 nt, Homo sapiens
  misc_RNA (1)...(19): siRNA sense strand
gucccucucugcguggaua

SEQ ID NO: 191088 - RNA, 19 nt, Homo sapiens
  misc_RNA (1)...(19): siRNA sense strand
ggagcugcuuccaauuugc

SEQ ID NO: 191089 - RNA, 19 nt, Homo sapiens
  misc_RNA (1)...(19): siRNA sense strand
uuagcugaccugaauaaug

SEQ ID NO: 191090 - RNA, 19 nt, Homo sapiens
  misc_RNA (1)...(19): siRNA sense strand
guggcaaguucaacaggau

SEQ ID NO: 191091 - RNA, 19 nt, Homo sapiens
  misc_RNA (1)...(19): siRNA sense strand
acaacaauuuggucaacgu

SEQ ID NO: 191092 - RNA, 19 nt, Homo sapiens
  misc_RNA (1)...(19): siRNA sense strand
gacuacaucaggagaagau

SEQ ID NO: 191093 - RNA, 19 nt, Homo sapiens
  misc_RNA (1)...(19): siRNA sense strand
uaauaagccagagaucgaa

SEQ ID NO: 191094 - RNA, 19 nt, Homo sapiens
  misc_RNA (1)...(19): siRNA sense strand
ugucagauucucagcuuau

SEQ ID NO: 191095 - RNA, 19 nt, Homo sapiens
  misc_RNA (1)...(19): siRNA sense strand
ggauauccugcagauuauu

SEQ ID NO: 191096 - RNA, 19 nt, Homo sapiens
  misc_RNA (1)...(19): siRNA sense strand
agcaucaggccaaauguaa

SEQ ID NO: 191097 - RNA, 19 nt, Homo sapiens
  misc_RNA (1)...(19): siRNA sense strand
gcccuuugcuuggaucucu

SEQ ID NO: 191098 - RNA, 19 nt, Homo sapiens
  misc_RNA (1)...(19): siRNA sense strand
gcugaauguuuaugauacg

SEQ ID NO: 191099 - RNA, 19 nt, Homo sapiens
  misc_RNA (1)...(19): siRNA sense strand
agacuuugccaagguacua

SEQ ID NO: 191100 - RNA, 19 nt, Homo sapiens
  misc_RNA (1)...(19): siRNA sense strand
caagcaaguggcaaguuca

SEQ ID NO: 191101 - RNA, 19 nt, Homo sapiens
  misc_RNA (1)...(19): siRNA sense strand
agacaaguacagauaccuu

SEQ ID NO: 191102 - RNA, 19 nt, Homo sapiens
  misc_RNA (1)...(19): siRNA sense strand
gcaucauuucccuguguaa

SEQ ID NO: 191103 - RNA, 19 nt, Homo sapiens
  misc_RNA (1)...(19): siRNA sense strand
cugcaaagaguguccaauc

SEQ ID NO: 191104 - RNA, 19 nt, Homo sapiens
  misc_RNA (1)...(19): siRNA sense strand
cuuauaggacugccaugaa

SEQ ID NO: 191105 - RNA, 19 nt, Homo sapiens
  misc_RNA (1)...(19): siRNA sense strand
caaagaguguccaaucauu

SEQ ID NO: 191106 - RNA, 19 nt, Homo sapiens
  misc_RNA (1)...(19): siRNA sense strand
uagcugaccugaauaaugu

SEQ ID NO: 191107 - RNA, 19 nt, Homo sapiens
  misc_RNA (1)...(19): siRNA sense strand
gcaugauucuauccaaauu

SEQ ID NO: 191108 - RNA, 19 nt, Homo sapiens
  misc_RNA (1)...(19): siRNA sense strand
ugaacuggcugcugaaugu

SEQ ID NO: 191109 - RNA, 19 nt, Homo sapiens
  misc_RNA (1)...(19): siRNA sense strand
gauauccugcagauuauua

SEQ ID NO: 191110 - RNA, 19 nt, Homo sapiens
  misc_RNA (1)...(19): siRNA sense strand
gagaagauguucgagacuu

SEQ ID NO: 191111 - RNA, 19 nt, Homo sapiens
  misc_RNA (1)...(19): siRNA sense strand
gcacuuuaauuaugacauc

SEQ ID NO: 191112 - RNA, 19 nt, Homo sapiens
  misc_RNA (1)...(19): siRNA sense strand
guaaagcacauuuggaaga

SEQ ID NO: 191113 - RNA, 19 nt, Homo sapiens
  misc_RNA (1)...(19): siRNA sense strand
gaauauugcacuccgacua

SEQ ID NO: 191114 - RNA, 19 nt, Homo sapiens
  misc_RNA (1)...(19): siRNA sense strand
uuauaggacugccaugaaa

SEQ ID NO: 191115 - RNA, 19 nt, Homo sapiens
  misc_RNA (1)...(19): siRNA sense strand
gggugaaguugcauccuuu

SEQ ID NO: 191116 - RNA, 19 nt, Homo sapiens
  misc_RNA (1)...(19): siRNA sense strand
gcaagagcacaacaauuug

SEQ ID NO: 191117 - RNA, 19 nt, Homo sapiens
  misc_RNA (1)...(19): siRNA sense strand
gcacaacaauuuggucaac

SEQ ID NO: 191118 - RNA, 19 nt, Homo sapiens
  misc_RNA (1)...(19): siRNA sense strand
agcaagagcacaacaauuu

SEQ ID NO: 191119 - RNA, 19 nt, Homo sapiens
  misc_RNA (1)...(19): siRNA sense strand
agaagauguucgagacuuu

SEQ ID NO: 191120 - RNA, 19 nt, Homo sapiens
  misc_RNA (1)...(19): siRNA sense strand
gagcaagagcacaacaauu

SEQ ID NO: 191121 - RNA, 19 nt, Homo sapiens
  misc_RNA (1)...(19): siRNA sense strand
ucaagcaaguggcaaguuc

SEQ ID NO: 191122 - RNA, 19 nt, Homo sapiens
  misc_RNA (1)...(19): siRNA sense strand
ccacgagacucaaacaacu

SEQ ID NO: 191123 - RNA, 19 nt, Homo sapiens
  misc_RNA (1)...(19): siRNA sense strand
cagcacaaccucaagcaaa

SEQ ID NO: 191124 - RNA, 19 nt, Homo sapiens
  misc_RNA (1)...(19): siRNA sense strand
gcaaagaguguccaaucau

SEQ ID NO: 191125 - RNA, 19 nt, Homo sapiens
  misc_RNA (1)...(19): siRNA sense strand
auggauauccugcagauua

SEQ ID NO: 191126 - RNA, 19 nt, Homo sapiens
  misc_RNA (1)...(19): siRNA sense strand
uguaacaucugcaaagagu

SEQ ID NO: 191127 - RNA, 19 nt, Homo sapiens
  misc_RNA (1)...(19): siRNA sense strand
guccggagcugcuuccaau

SEQ ID NO: 191128 - RNA, 19 nt, Homo sapiens
  misc_RNA (1)...(19): siRNA sense strand
gcaaguggcaaguucaaca

SEQ ID NO: 191129 - RNA, 19 nt, Homo sapiens
  misc_RNA (1)...(19): siRNA sense strand
gcuuccaauuugcuaauaa

SEQ ID NO: 191130 - RNA, 19 nt, Homo sapiens
  misc_RNA (1)...(19): siRNA sense strand
uggaagacaaguacagaua

SEQ ID NO: 191131 - RNA, 19 nt, Homo sapiens
  misc_RNA (1)...(19): siRNA sense strand
ggauccguguccugucuuu

SEQ ID NO: 191132 - RNA, 19 nt, Homo sapiens
  misc_RNA (1)...(19): siRNA sense strand
gucuuuagcugaccugaau

SEQ ID NO: 191133 - RNA, 19 nt, Homo sapiens
  misc_RNA (1)...(19): siRNA sense strand
gacaaguacagauaccuuu

SEQ ID NO: 191134 - RNA, 19 nt, Homo sapiens
  misc_RNA (1)...(19): siRNA sense strand
ccaagcaucaggccaaaug

SEQ ID NO: 191135 - RNA, 19 nt, Homo sapiens
  misc_RNA (1)...(19): siRNA sense strand
ggagcaagagcacaacaau

SEQ ID NO: 191136 - RNA, 19 nt, Homo sapiens
  misc_RNA (1)...(19): siRNA sense strand
guguaaagcacauuuggaa

SEQ ID NO: 191137 - RNA, 19 nt, Homo sapiens
  misc_RNA (1)...(19): siRNA sense strand
caagacaguugggugaagu

SEQ ID NO: 191138 - RNA, 19 nt, Homo sapiens
  misc_RNA (1)...(19): siRNA sense strand
gaagauguucgagacuuug

SEQ ID NO: 191139 - RNA, 19 nt, Homo sapiens
  misc_RNA (1)...(19): siRNA sense strand
gucagauucucagcuuaua

SEQ ID NO: 191140 - RNA, 19 nt, Homo sapiens
  misc_RNA (1)...(19): siRNA sense strand
uaacaucugcaaagagugu

SEQ ID NO: 191141 - RNA, 19 nt, Homo sapiens
  misc_RNA (1)...(19): siRNA sense strand
cggagcugcuuccaauuug

SEQ ID NO: 191142 - RNA, 19 nt, Homo sapiens
  misc_RNA (1)...(19): siRNA sense strand
gaagacaaguacagauacc

SEQ ID NO: 191143 - RNA, 19 nt, Homo sapiens
  misc_RNA (1)...(19): siRNA sense strand
ccauggauauccugcagau

SEQ ID NO: 191144 - RNA, 19 nt, Homo sapiens
  misc_RNA (1)...(19): siRNA sense strand
ggcaucauuucccugugua

SEQ ID NO: 191145 - RNA, 19 nt, Homo sapiens
  misc_RNA (1)...(19): siRNA sense strand
uggauauccugcagauuau

SEQ ID NO: 191146 - RNA, 19 nt, Homo sapiens
  misc_RNA (1)...(19): siRNA sense strand
ggaagacaaguacagauac

SEQ ID NO: 191147 - RNA, 19 nt, Homo sapiens
  misc_RNA (1)...(19): siRNA sense strand
ugcaaagaguguccaauca

SEQ ID NO: 191148 - RNA, 19 nt, Homo sapiens
  misc_RNA (1)...(19): siRNA sense strand
guggauaugugucugaacu

SEQ ID NO: 191149 - RNA, 19 nt, Homo sapiens
  misc_RNA (1)...(19): siRNA sense strand
acuggcugcugaauguuua

SEQ ID NO: 191150 - RNA, 19 nt, Homo sapiens
  misc_RNA (1)...(19): siRNA sense strand
acuaucccaugguggaaua

SEQ ID NO: 191151 - RNA, 19 nt, Homo sapiens
  misc_RNA (1)...(19): siRNA sense strand
ccggagcugcuuccaauuu

SEQ ID NO: 191152 - RNA, 19 nt, Homo sapiens
  misc_RNA (1)...(19): siRNA sense strand
ccaaauuccaagacaguug

SEQ ID NO: 191153 - RNA, 19 nt, Homo sapiens
  misc_RNA (1)...(19): siRNA sense strand
cagaaacugccaagcauca

SEQ ID NO: 191154 - RNA, 19 nt, Homo sapiens
  misc_RNA (1)...(19): siRNA sense strand
uaugacaucugccaaagcu

SEQ ID NO: 191155 - RNA, 19 nt, Homo sapiens
  misc_RNA (1)...(19): siRNA sense strand
aaugucagauucucagcuu

SEQ ID NO: 191156 - RNA, 19 nt, Homo sapiens
  misc_RNA (1)...(19): siRNA sense strand
ucgagacuuugccaaggua

SEQ ID NO: 191157 - RNA, 19 nt, Homo sapiens
  misc_RNA (1)...(19): siRNA sense strand
gcaaaaggccauaaaaugc

SEQ ID NO: 191158 - RNA, 19 nt, Homo sapiens
  misc_RNA (1)...(19): siRNA sense strand
cugcaugauucuauccaaa

SEQ ID NO: 191159 - RNA, 19 nt, Homo sapiens
  misc_RNA (1)...(19): siRNA sense strand
uaaagcacauuuggaagac

SEQ ID NO: 191160 - RNA, 19 nt, Homo sapiens
  misc_RNA (1)...(19): siRNA sense strand
acaggagucuaaagcacuu

SEQ ID NO: 191161 - RNA, 19 nt, Homo sapiens
  misc_RNA (1)...(19): siRNA sense strand
acagauaccuuuucaagca

SEQ ID NO: 191162 - RNA, 19 nt, Homo sapiens
  misc_RNA (1)...(19): siRNA sense strand
aagcacauuuggaagacaa

SEQ ID NO: 191163 - RNA, 19 nt, Homo sapiens
  misc_RNA (1)...(19): siRNA sense strand
gcuaauaauaagccagaga

SEQ ID NO: 191164 - RNA, 19 nt, Homo sapiens
  misc_RNA (1)...(19): siRNA sense strand
caagagcacaacaauuugg

SEQ ID NO: 191165 - RNA, 19 nt, Homo sapiens
  misc_RNA (1)...(19): siRNA sense strand
ccugucagcugcaugugau

SEQ ID NO: 191166 - RNA, 19 nt, Homo sapiens
  misc_RNA (1)...(19): siRNA sense strand
gcugcugaauguuuaugau

SEQ ID NO: 191167 - RNA, 19 nt, Homo sapiens
  misc_RNA (1)...(19): siRNA sense strand
acagagcucuaccagucuu

SEQ ID NO: 191168 - RNA, 19 nt, Homo sapiens
  misc_RNA (1)...(19): siRNA sense strand
acaguugggugaaguugca

SEQ ID NO: 191169 - RNA, 19 nt, Homo sapiens
  misc_RNA (1)...(19): siRNA sense strand
guuugaccacuauuuauga

SEQ ID NO: 191170 - RNA, 19 nt, Homo sapiens
  misc_RNA (1)...(19): siRNA sense strand
gcuuauaggacugccauga

SEQ ID NO: 191171 - RNA, 19 nt, Homo sapiens
  misc_RNA (1)...(19): siRNA sense strand
caucaggccaaauguaaca

SEQ ID NO: 191172 - RNA, 19 nt, Homo sapiens
  misc_RNA (1)...(19): siRNA sense strand
gauucuauccaaauuccaa

SEQ ID NO: 191173 - RNA, 19 nt, Homo sapiens
  misc_RNA (1)...(19): siRNA sense strand
ggcaaguucaacaggauuu

SEQ ID NO: 191174 - RNA, 19 nt, Homo sapiens
  misc_RNA (1)...(19): siRNA sense strand
gaacuggcugcugaauguu

SEQ ID NO: 191175 - RNA, 19 nt, Homo sapiens
  misc_RNA (1)...(19): siRNA sense strand
cugcugaauguuuaugaua

SEQ ID NO: 191176 - RNA, 19 nt, Homo sapiens
  misc_RNA (1)...(19): siRNA sense strand
aagcaucaggccaaaugua

SEQ ID NO: 191177 - RNA, 19 nt, Homo sapiens
  misc_RNA (1)...(19): siRNA sense strand
uggcaucauuucccugugu

SEQ ID NO: 191178 - RNA, 19 nt, Homo sapiens
  misc_RNA (1)...(19): siRNA sense strand
ccaugaaacuccgaagacu

SEQ ID NO: 191179 - RNA, 19 nt, Homo sapiens
  misc_RNA (1)...(19): siRNA sense strand
auaauaagccagagaucga

SEQ ID NO: 191180 - RNA, 19 nt, Homo sapiens
  misc_RNA (1)...(19): siRNA sense strand
cuaauaauaagccagagau

SEQ ID NO: 191181 - RNA, 19 nt, Homo sapiens
  misc_RNA (1)...(19): siRNA sense strand
ugggugaaguugcauccuu

SEQ ID NO: 191182 - RNA, 19 nt, Homo sapiens
  misc_RNA (1)...(19): siRNA sense strand
caucauuucccuguguaaa

SEQ ID NO: 191183 - RNA, 19 nt, Homo sapiens
  misc_RNA (1)...(19): siRNA sense strand
gcguggauaugugucugaa

SEQ ID NO: 191184 - RNA, 19 nt, Homo sapiens
  misc_RNA (1)...(19): siRNA sense strand
gcacuaucccaugguggaa

SEQ ID NO: 191185 - RNA, 19 nt, Homo sapiens
  misc_RNA (1)...(19): siRNA sense strand
gagccugucagcugcaugu

SEQ ID NO: 191186 - RNA, 19 nt, Homo sapiens
  misc_RNA (1)...(19): siRNA sense strand
guacagauaccuuuucaag

SEQ ID NO: 191187 - RNA, 19 nt, Homo sapiens
  misc_RNA (1)...(19): siRNA sense strand
gucccucucugcguggaua

SEQ ID NO: 191188 - RNA, 19 nt, Homo sapiens
  misc_RNA (1)...(19): siRNA sense strand
ggagcugcuuccaauuugc

SEQ ID NO: 191189 - RNA, 19 nt, Homo sapiens
  misc_RNA (1)...(19): siRNA sense strand
uuagcugaccugaauaaug

SEQ ID NO: 191190 - RNA, 19 nt, Homo sapiens
  misc_RNA (1)...(19): siRNA sense strand
guggcaaguucaacaggau

SEQ ID NO: 191191 - RNA, 19 nt, Homo sapiens
  misc_RNA (1)...(19): siRNA sense strand
acaacaauuuggucaacgu

SEQ ID NO: 191192 - RNA, 19 nt, Homo sapiens
  misc_RNA (1)...(19): siRNA sense strand
gacuacaucaggagaagau

SEQ ID NO: 191193 - RNA, 19 nt, Homo sapiens
  misc_RNA (1)...(19): siRNA sense strand
uaauaagccagagaucgaa

SEQ ID NO: 191194 - RNA, 19 nt, Homo sapiens
  misc_RNA (1)...(19): siRNA sense strand
ugucagauucucagcuuau

SEQ ID NO: 191195 - RNA, 19 nt, Homo sapiens
  misc_RNA (1)...(19): siRNA sense strand
ggauauccugcagauuauu

SEQ ID NO: 191196 - RNA, 19 nt, Homo sapiens
  misc_RNA (1)...(19): siRNA sense strand
agcaucaggccaaauguaa

SEQ ID NO: 191197 - RNA, 19 nt, Homo sapiens
  misc_RNA (1)...(19): siRNA sense strand
gcccuuugcuuggaucucu

SEQ ID NO: 191198 - RNA, 19 nt, Homo sapiens
  misc_RNA (1)...(19): siRNA sense strand
gcugaauguuuaugauacg

SEQ ID NO: 191199 - RNA, 19 nt, Homo sapiens
  misc_RNA (1)...(19): siRNA sense strand
agacuuugccaagguacua

SEQ ID NO: 191200 - RNA, 19 nt, Homo sapiens
  misc_RNA (1)...(19): siRNA sense strand
caagcaaguggcaaguuca

SEQ ID NO: 191201 - RNA, 19 nt, Homo sapiens
  misc_RNA (1)...(19): siRNA sense strand
agacaaguacagauaccuu

SEQ ID NO: 191202 - RNA, 19 nt, Homo sapiens
  misc_RNA (1)...(19): siRNA sense strand
gcaucauuucccuguguaa

SEQ ID NO: 191203 - RNA, 19 nt, Homo sapiens
  misc_RNA (1)...(19): siRNA sense strand
cugcaaagaguguccaauc

SEQ ID NO: 191204 - RNA, 19 nt, Homo sapiens
  misc_RNA (1)...(19): siRNA sense strand
cuuauaggacugccaugaa

SEQ ID NO: 191205 - RNA, 19 nt, Homo sapiens
  misc_RNA (1)...(19): siRNA sense strand
caaagaguguccaaucauu

SEQ ID NO: 191206 - RNA, 19 nt, Homo sapiens
  misc_RNA (1)...(19): siRNA sense strand
uagcugaccugaauaaugu

SEQ ID NO: 191207 - RNA, 19 nt, Homo sapiens
  misc_RNA (1)...(19): siRNA sense strand
gcaugauucuauccaaauu

SEQ ID NO: 191208 - RNA, 19 nt, Homo sapiens
  misc_RNA (1)...(19): siRNA sense strand
ugaacuggcugcugaaugu

SEQ ID NO: 191209 - RNA, 19 nt, Homo sapiens
  misc_RNA (1)...(19): siRNA sense strand
gauauccugcagauuauua

SEQ ID NO: 191210 - RNA, 19 nt, Homo sapiens
  misc_RNA (1)...(19): siRNA sense strand
gagaagauguucgagacuu

SEQ ID NO: 191211 - RNA, 19 nt, Homo sapiens
  misc_RNA (1)...(19): siRNA sense strand
gcacuuuaauuaugacauc

SEQ ID NO: 191212 - RNA, 19 nt, Homo sapiens
  misc_RNA (1)...(19): siRNA sense strand
guaaagcacauuuggaaga

SEQ ID NO: 191213 - RNA, 19 nt, Homo sapiens
  misc_RNA (1)...(19): siRNA sense strand
gaauauugcacuccgacua

SEQ ID NO: 191214 - RNA, 19 nt, Homo sapiens
  misc_RNA (1)...(19): siRNA sense strand
uuauaggacugccaugaaa

SEQ ID NO: 191215 - RNA, 19 nt, Homo sapiens
  misc_RNA (1)...(19): siRNA sense strand
gggugaaguugcauccuuu

SEQ ID NO: 191216 - RNA, 19 nt, Homo sapiens
  misc_RNA (1)...(19): siRNA sense strand
gcaagagcacaacaauuug

SEQ ID NO: 191217 - RNA, 19 nt, Homo sapiens
  misc_RNA (1)...(19): siRNA sense strand
gcacaacaauuuggucaac

SEQ ID NO: 191218 - RNA, 19 nt, Homo sapiens
  misc_RNA (1)...(19): siRNA sense strand
agcaagagcacaacaauuu

SEQ ID NO: 191219 - RNA, 19 nt, Homo sapiens
  misc_RNA (1)...(19): siRNA sense strand
agaagauguucgagacuuu

SEQ ID NO: 191220 - RNA, 19 nt, Homo sapiens
  misc_RNA (1)...(19): siRNA sense strand
gagcaagagcacaacaauu

SEQ ID NO: 191221 - RNA, 19 nt, Homo sapiens
  misc_RNA (1)...(19): siRNA sense strand
ucaagcaaguggcaaguuc

SEQ ID NO: 191222 - RNA, 19 nt, Homo sapiens
  misc_RNA (1)...(19): siRNA sense strand
ccacgagacucaaacaacu

SEQ ID NO: 191223 - RNA, 19 nt, Homo sapiens
  misc_RNA (1)...(19): siRNA sense strand
cagcacaaccucaagcaaa

SEQ ID NO: 191224 - RNA, 19 nt, Homo sapiens
  misc_RNA (1)...(19): siRNA sense strand
gcaaagaguguccaaucau

SEQ ID NO: 191225 - RNA, 19 nt, Homo sapiens
  misc_RNA (1)...(19): siRNA sense strand
auggauauccugcagauua

SEQ ID NO: 191226 - RNA, 19 nt, Homo sapiens
  misc_RNA (1)...(19): siRNA sense strand
uguaacaucugcaaagagu

SEQ ID NO: 191227 - RNA, 19 nt, Homo sapiens
  misc_RNA (1)...(19): siRNA sense strand
guccggagcugcuuccaau

SEQ ID NO: 191228 - RNA, 19 nt, Homo sapiens
  misc_RNA (1)...(19): siRNA sense strand
gcaaguggcaaguucaaca

SEQ ID NO: 191229 - RNA, 19 nt, Homo sapiens
  misc_RNA (1)...(19): siRNA sense strand
gcuuccaauuugcuaauaa

SEQ ID NO: 191230 - RNA, 19 nt, Homo sapiens
  misc_RNA (1)...(19): siRNA sense strand
uggaagacaaguacagaua

SEQ ID NO: 191231 - RNA, 19 nt, Homo sapiens
  misc_RNA (1)...(19): siRNA sense strand
ggauccguguccugucuuu

SEQ ID NO: 191232 - RNA, 19 nt, Homo sapiens
  misc_RNA (1)...(19): siRNA sense strand
gucuuuagcugaccugaau

SEQ ID NO: 191233 - RNA, 19 nt, Homo sapiens
  misc_RNA (1)...(19): siRNA sense strand
gacaaguacagauaccuuu

SEQ ID NO: 191234 - RNA, 19 nt, Homo sapiens
  misc_RNA (1)...(19): siRNA sense strand
ccaagcaucaggccaaaug

SEQ ID NO: 191235 - RNA, 19 nt, Homo sapiens
  misc_RNA (1)...(19): siRNA sense strand
ggagcaagagcacaacaau

SEQ ID NO: 191236 - RNA, 19 nt, Homo sapiens
  misc_RNA (1)...(19): siRNA sense strand
guguaaagcacauuuggaa

SEQ ID NO: 191237 - RNA, 19 nt, Homo sapiens
  misc_RNA (1)...(19): siRNA sense strand
caagacaguugggugaagu

SEQ ID NO: 191238 - RNA, 19 nt, Homo sapiens
  misc_RNA (1)...(19): siRNA sense strand
gaagauguucgagacuuug

SEQ ID NO: 191239 - RNA, 19 nt, Homo sapiens
  misc_RNA (1)...(19): siRNA sense strand
gucagauucucagcuuaua

SEQ ID NO: 191240 - RNA, 19 nt, Homo sapiens
  misc_RNA (1)...(19): siRNA sense strand
uaacaucugcaaagagugu

SEQ ID NO: 191241 - RNA, 19 nt, Homo sapiens
  misc_RNA (1)...(19): siRNA sense strand
cggagcugcuuccaauuug

SEQ ID NO: 191242 - RNA, 19 nt, Homo sapiens
  misc_RNA (1)...(19): siRNA sense strand
gaagacaaguacagauacc

SEQ ID NO: 191243 - RNA, 19 nt, Homo sapiens
  misc_RNA (1)...(19): siRNA sense strand
ccauggauauccugcagau

SEQ ID NO: 191244 - RNA, 19 nt, Homo sapiens
  misc_RNA (1)...(19): siRNA sense strand
ggcaucauuucccugugua

SEQ ID NO: 191245 - RNA, 19 nt, Homo sapiens
  misc_RNA (1)...(19): siRNA sense strand
uggauauccugcagauuau

SEQ ID NO: 191246 - RNA, 19 nt, Homo sapiens
  misc_RNA (1)...(19): siRNA sense strand
ggaagacaaguacagauac

SEQ ID NO: 191247 - RNA, 19 nt, Homo sapiens
  misc_RNA (1)...(19): siRNA sense strand
ugcaaagaguguccaauca

SEQ ID NO: 191248 - RNA, 19 nt, Homo sapiens
  misc_RNA (1)...(19): siRNA sense strand
guggauaugugucugaacu

SEQ ID NO: 191249 - RNA, 19 nt, Homo sapiens
  misc_RNA (1)...(19): siRNA sense strand
acuggcugcugaauguuua

SEQ ID NO: 191250 - RNA, 19 nt, Homo sapiens
  misc_RNA (1)...(19): siRNA sense strand
acuaucccaugguggaaua

SEQ ID NO: 191251 - RNA, 19 nt, Homo sapiens
  misc_RNA (1)...(19): siRNA sense strand
ccggagcugcuuccaauuu

SEQ ID NO: 191252 - RNA, 19 nt, Homo sapiens
  misc_RNA (1)...(19): siRNA sense strand
ccaaauuccaagacaguug

SEQ ID NO: 191253 - RNA, 19 nt, Homo sapiens
  misc_RNA (1)...(19): siRNA sense strand
cagaaacugccaagcauca

SEQ ID NO: 191254 - RNA, 19 nt, Homo sapiens
  misc_RNA (1)...(19): siRNA sense strand
uaugacaucugccaaagcu

SEQ ID NO: 191255 - RNA, 19 nt, Homo sapiens
  misc_RNA (1)...(19): siRNA sense strand
aaugucagauucucagcuu

SEQ ID NO: 191256 - RNA, 19 nt, Homo sapiens
  misc_RNA (1)...(19): siRNA sense strand
ucgagacuuugccaaggua

SEQ ID NO: 191257 - RNA, 19 nt, Homo sapiens
  misc_RNA (1)...(19): siRNA sense strand
gcaaaaggccauaaaaugc

SEQ ID NO: 191258 - RNA, 19 nt, Homo sapiens
  misc_RNA (1)...(19): siRNA sense strand
cugcaugauucuauccaaa

SEQ ID NO: 191259 - RNA, 19 nt, Homo sapiens
  misc_RNA (1)...(19): siRNA sense strand
uaaagcacauuuggaagac

SEQ ID NO: 191260 - RNA, 19 nt, Homo sapiens
  misc_RNA (1)...(19): siRNA sense strand
acaggagucuaaagcacuu

SEQ ID NO: 191261 - RNA, 19 nt, Homo sapiens
  misc_RNA (1)...(19): siRNA sense strand
acagauaccuuuucaagca

SEQ ID NO: 191262 - RNA, 19 nt, Homo sapiens
  misc_RNA (1)...(19): siRNA sense strand
aagcacauuuggaagacaa

SEQ ID NO: 191263 - RNA, 19 nt, Homo sapiens
  misc_RNA (1)...(19): siRNA sense strand
gcuaauaauaagccagaga

SEQ ID NO: 191264 - RNA, 19 nt, Homo sapiens
  misc_RNA (1)...(19): siRNA sense strand
caagagcacaacaauuugg

SEQ ID NO: 191265 - RNA, 19 nt, Homo sapiens
  misc_RNA (1)...(19): siRNA sense strand
ccugucagcugcaugugau

SEQ ID NO: 191266 - RNA, 19 nt, Homo sapiens
  misc_RNA (1)...(19): siRNA sense strand
gcugcugaauguuuaugau

SEQ ID NO: 191267 - RNA, 19 nt, Homo sapiens
  misc_RNA (1)...(19): siRNA sense strand
acagagcucuaccagucuu

SEQ ID NO: 191268 - RNA, 19 nt, Homo sapiens
  misc_RNA (1)...(19): siRNA sense strand
acaguugggugaaguugca

SEQ ID NO: 191269 - RNA, 19 nt, Homo sapiens
  misc_RNA (1)...(19): siRNA sense strand
guuugaccacuauuuauga

SEQ ID NO: 191270 - RNA, 19 nt, Homo sapiens
  misc_RNA (1)...(19): siRNA sense strand
gcuuauaggacugccauga

SEQ ID NO: 191271 - RNA, 19 nt, Homo sapiens
  misc_RNA (1)...(19): siRNA sense strand
caucaggccaaauguaaca

SEQ ID NO: 191272 - RNA, 19 nt, Homo sapiens
  misc_RNA (1)...(19): siRNA sense strand
gauucuauccaaauuccaa

SEQ ID NO: 191273 - RNA, 19 nt, Homo sapiens
  misc_RNA (1)...(19): siRNA sense strand
ggcaaguucaacaggauuu

SEQ ID NO: 191274 - RNA, 19 nt, Homo sapiens
  misc_RNA (1)...(19): siRNA sense strand
gaacuggcugcugaauguu

SEQ ID NO: 191275 - RNA, 19 nt, Homo sapiens
  misc_RNA (1)...(19): siRNA sense strand
cugcugaauguuuaugaua

SEQ ID NO: 191276 - RNA, 19 nt, Homo sapiens
  misc_RNA (1)...(19): siRNA sense strand
aagcaucaggccaaaugua

SEQ ID NO: 191277 - RNA, 19 nt, Homo sapiens
  misc_RNA (1)...(19): siRNA sense strand
uggcaucauuucccugugu

SEQ ID NO: 191278 - RNA, 19 nt, Homo sapiens
  misc_RNA (1)...(19): siRNA sense strand
ccaugaaacuccgaagacu

SEQ ID NO: 191279 - RNA, 19 nt, Homo sapiens
  misc_RNA (1)...(19): siRNA sense strand
auaauaagccagagaucga

SEQ ID NO: 191280 - RNA, 19 nt, Homo sapiens
  misc_RNA (1)...(19): siRNA sense strand
cuaauaauaagccagagau

SEQ ID NO: 191281 - RNA, 19 nt, Homo sapiens
  misc_RNA (1)...(19): siRNA sense strand
ugggugaaguugcauccuu

SEQ ID NO: 191282 - RNA, 19 nt, Homo sapiens
  misc_RNA (1)...(19): siRNA sense strand
caucauuucccuguguaaa

SEQ ID NO: 191283 - RNA, 19 nt, Homo sapiens
  misc_RNA (1)...(19): siRNA sense strand
gcguggauaugugucugaa

SEQ ID NO: 191284 - RNA, 19 nt, Homo sapiens
  misc_RNA (1)...(19): siRNA sense strand
gcacuaucccaugguggaa

SEQ ID NO: 191285 - RNA, 19 nt, Homo sapiens
  misc_RNA (1)...(19): siRNA sense strand
gagccugucagcugcaugu

SEQ ID NO: 191286 - RNA, 19 nt, Homo sapiens
  misc_RNA (1)...(19): siRNA sense strand
guacagauaccuuuucaag

SEQ ID NO: 191287 - RNA, 19 nt, Homo sapiens
  misc_RNA (1)...(19): siRNA sense strand
gucccucucugcguggaua

SEQ ID NO: 191288 - RNA, 19 nt, Homo sapiens
  misc_RNA (1)...(19): siRNA sense strand
ggagcugcuuccaauuugc

SEQ ID NO: 191289 - RNA, 19 nt, Homo sapiens
  misc_RNA (1)...(19): siRNA sense strand
uuagcugaccugaauaaug

SEQ ID NO: 191290 - RNA, 19 nt, Homo sapiens
  misc_RNA (1)...(19): siRNA sense strand
guggcaaguucaacaggau

SEQ ID NO: 191291 - RNA, 19 nt, Homo sapiens
  misc_RNA (1)...(19): siRNA sense strand
acaacaauuuggucaacgu

SEQ ID NO: 191292 - RNA, 19 nt, Homo sapiens
  misc_RNA (1)...(19): siRNA sense strand
gacuacaucaggagaagau

SEQ ID NO: 191293 - RNA, 19 nt, Homo sapiens
  misc_RNA (1)...(19): siRNA sense strand
uaauaagccagagaucgaa

SEQ ID NO: 191294 - RNA, 19 nt, Homo sapiens
  misc_RNA (1)...(19): siRNA sense strand
ugucagauucucagcuuau

SEQ ID NO: 191295 - RNA, 19 nt, Homo sapiens
  misc_RNA (1)...(19): siRNA sense strand
ggauauccugcagauuauu

SEQ ID NO: 191296 - RNA, 19 nt, Homo sapiens
  misc_RNA (1)...(19): siRNA sense strand
agcaucaggccaaauguaa

SEQ ID NO: 191297 - RNA, 19 nt, Homo sapiens
  misc_RNA (1)...(19): siRNA sense strand
gcccuuugcuuggaucucu

SEQ ID NO: 191298 - RNA, 19 nt, Homo sapiens
  misc_RNA (1)...(19): siRNA sense strand
gcugaauguuuaugauacg

SEQ ID NO: 191299 - RNA, 19 nt, Homo sapiens
  misc_RNA (1)...(19): siRNA sense strand
agacuuugccaagguacua

SEQ ID NO: 191300 - RNA, 19 nt, Homo sapiens
  misc_RNA (1)...(19): siRNA sense strand
caagcaaguggcaaguuca

SEQ ID NO: 191301 - RNA, 19 nt, Homo sapiens
  misc_RNA (1)...(19): siRNA sense strand
agacaaguacagauaccuu

SEQ ID NO: 191302 - RNA, 19 nt, Homo sapiens
  misc_RNA (1)...(19): siRNA sense strand
gcaucauuucccuguguaa

SEQ ID NO: 191303 - RNA, 19 nt, Homo sapiens
  misc_RNA (1)...(19): siRNA sense strand
cugcaaagaguguccaauc

SEQ ID NO: 191304 - RNA, 19 nt, Homo sapiens
  misc_RNA (1)...(19): siRNA sense strand
cuuauaggacugccaugaa

SEQ ID NO: 191305 - RNA, 19 nt, Homo sapiens
  misc_RNA (1)...(19): siRNA sense strand
caaagaguguccaaucauu

SEQ ID NO: 191306 - RNA, 19 nt, Homo sapiens
  misc_RNA (1)...(19): siRNA sense strand
uagcugaccugaauaaugu

SEQ ID NO: 191307 - RNA, 19 nt, Homo sapiens
  misc_RNA (1)...(19): siRNA sense strand
gcaugauucuauccaaauu

SEQ ID NO: 191308 - RNA, 19 nt, Homo sapiens
  misc_RNA (1)...(19): siRNA sense strand
ugaacuggcugcugaaugu

SEQ ID NO: 191309 - RNA, 19 nt, Homo sapiens
  misc_RNA (1)...(19): siRNA sense strand
gauauccugcagauuauua

SEQ ID NO: 191310 - RNA, 19 nt, Homo sapiens
  misc_RNA (1)...(19): siRNA sense strand
gagaagauguucgagacuu

SEQ ID NO: 191311 - RNA, 19 nt, Homo sapiens
  misc_RNA (1)...(19): siRNA sense strand
gcacuuuaauuaugacauc

SEQ ID NO: 191312 - RNA, 19 nt, Homo sapiens
  misc_RNA (1)...(19): siRNA sense strand
guaaagcacauuuggaaga

SEQ ID NO: 191313 - RNA, 19 nt, Homo sapiens
  misc_RNA (1)...(19): siRNA sense strand
gaauauugcacuccgacua

SEQ ID NO: 191314 - RNA, 19 nt, Homo sapiens
  misc_RNA (1)...(19): siRNA sense strand
uuauaggacugccaugaaa

SEQ ID NO: 191315 - RNA, 19 nt, Homo sapiens
  misc_RNA (1)...(19): siRNA sense strand
gggugaaguugcauccuuu

SEQ ID NO: 191316 - RNA, 19 nt, Homo sapiens
  misc_RNA (1)...(19): siRNA sense strand
gcaagagcacaacaauuug

SEQ ID NO: 191317 - RNA, 19 nt, Homo sapiens
  misc_RNA (1)...(19): siRNA sense strand
gcacaacaauuuggucaac

SEQ ID NO: 191318 - RNA, 19 nt, Homo sapiens
  misc_RNA (1)...(19): siRNA sense strand
agcaagagcacaacaauuu

SEQ ID NO: 191319 - RNA, 19 nt, Homo sapiens
  misc_RNA (1)...(19): siRNA sense strand
agaagauguucgagacuuu

SEQ ID NO: 191320 - RNA, 19 nt, Homo sapiens
  misc_RNA (1)...(19): siRNA sense strand
gagcaagagcacaacaauu

SEQ ID NO: 191321 - RNA, 19 nt, Homo sapiens
  misc_RNA (1)...(19): siRNA sense strand
ucaagcaaguggcaaguuc

SEQ ID NO: 191322 - RNA, 19 nt, Homo sapiens
  misc_RNA (1)...(19): siRNA sense strand
ccacgagacucaaacaacu

SEQ ID NO: 191323 - RNA, 19 nt, Homo sapiens
  misc_RNA (1)...(19): siRNA sense strand
cagcacaaccucaagcaaa

SEQ ID NO: 191324 - RNA, 19 nt, Homo sapiens
  misc_RNA (1)...(19): siRNA sense strand
gcaaagaguguccaaucau

SEQ ID NO: 191325 - RNA, 19 nt, Homo sapiens
  misc_RNA (1)...(19): siRNA sense strand
auggauauccugcagauua

SEQ ID NO: 191326 - RNA, 19 nt, Homo sapiens
  misc_RNA (1)...(19): siRNA sense strand
uguaacaucugcaaagagu

SEQ ID NO: 191327 - RNA, 19 nt, Homo sapiens
  misc_RNA (1)...(19): siRNA sense strand
guccggagcugcuuccaau

SEQ ID NO: 191328 - RNA, 19 nt, Homo sapiens
  misc_RNA (1)...(19): siRNA sense strand
gcaaguggcaaguucaaca

SEQ ID NO: 191329 - RNA, 19 nt, Homo sapiens
  misc_RNA (1)...(19): siRNA sense strand
gcuuccaauuugcuaauaa

SEQ ID NO: 191330 - RNA, 19 nt, Homo sapiens
  misc_RNA (1)...(19): siRNA sense strand
uggaagacaaguacagaua

SEQ ID NO: 191331 - RNA, 19 nt, Homo sapiens
  misc_RNA (1)...(19): siRNA sense strand
ggauccguguccugucuuu

SEQ ID NO: 191332 - RNA, 19 nt, Homo sapiens
  misc_RNA (1)...(19): siRNA sense strand
gucuuuagcugaccugaau

SEQ ID NO: 191333 - RNA, 19 nt, Homo sapiens
  misc_RNA (1)...(19): siRNA sense strand
gacaaguacagauaccuuu

SEQ ID NO: 191334 - RNA, 19 nt, Homo sapiens
  misc_RNA (1)...(19): siRNA sense strand
ccaagcaucaggccaaaug

SEQ ID NO: 191335 - RNA, 19 nt, Homo sapiens
  misc_RNA (1)...(19): siRNA sense strand
ggagcaagagcacaacaau

SEQ ID NO: 191336 - RNA, 19 nt, Homo sapiens
  misc_RNA (1)...(19): siRNA sense strand
guguaaagcacauuuggaa

SEQ ID NO: 191337 - RNA, 19 nt, Homo sapiens
  misc_RNA (1)...(19): siRNA sense strand
caagacaguugggugaagu

SEQ ID NO: 191338 - RNA, 19 nt, Homo sapiens
  misc_RNA (1)...(19): siRNA sense strand
gaagauguucgagacuuug

SEQ ID NO: 191339 - RNA, 19 nt, Homo sapiens
  misc_RNA (1)...(19): siRNA sense strand
gucagauucucagcuuaua

SEQ ID NO: 191340 - RNA, 19 nt, Homo sapiens
  misc_RNA (1)...(19): siRNA sense strand
uaacaucugcaaagagugu

SEQ ID NO: 191341 - RNA, 19 nt, Homo sapiens
  misc_RNA (1)...(19): siRNA sense strand
cggagcugcuuccaauuug

SEQ ID NO: 191342 - RNA, 19 nt, Homo sapiens
  misc_RNA (1)...(19): siRNA sense strand
gaagacaaguacagauacc

SEQ ID NO: 191343 - RNA, 19 nt, Homo sapiens
  misc_RNA (1)...(19): siRNA sense strand
ccauggauauccugcagau

SEQ ID NO: 191344 - RNA, 19 nt, Homo sapiens
  misc_RNA (1)...(19): siRNA sense strand
ggcaucauuucccugugua

SEQ ID NO: 191345 - RNA, 19 nt, Homo sapiens
  misc_RNA (1)...(19): siRNA sense strand
uggauauccugcagauuau

SEQ ID NO: 191346 - RNA, 19 nt, Homo sapiens
  misc_RNA (1)...(19): siRNA sense strand
ggaagacaaguacagauac

SEQ ID NO: 191347 - RNA, 19 nt, Homo sapiens
  misc_RNA (1)...(19): siRNA sense strand
ugcaaagaguguccaauca

SEQ ID NO: 191348 - RNA, 19 nt, Homo sapiens
  misc_RNA (1)...(19): siRNA sense strand
guggauaugugucugaacu

SEQ ID NO: 191349 - RNA, 19 nt, Homo sapiens
  misc_RNA (1)...(19): siRNA sense strand
acuggcugcugaauguuua

SEQ ID NO: 191350 - RNA, 19 nt, Homo sapiens
  misc_RNA (1)...(19): siRNA sense strand
acuaucccaugguggaaua

SEQ ID NO: 191351 - RNA, 19 nt, Homo sapiens
  misc_RNA (1)...(19): siRNA sense strand
ccggagcugcuuccaauuu

SEQ ID NO: 191352 - RNA, 19 nt, Homo sapiens
  misc_RNA (1)...(19): siRNA sense strand
ccaaauuccaagacaguug

SEQ ID NO: 191353 - RNA, 19 nt, Homo sapiens
  misc_RNA (1)...(19): siRNA sense strand
cagaaacugccaagcauca

SEQ ID NO: 191354 - RNA, 19 nt, Homo sapiens
  misc_RNA (1)...(19): siRNA sense strand
uaugacaucugccaaagcu

SEQ ID NO: 191355 - RNA, 19 nt, Homo sapiens
  misc_RNA (1)...(19): siRNA sense strand
aaugucagauucucagcuu

SEQ ID NO: 191356 - RNA, 19 nt, Homo sapiens
  misc_RNA (1)...(19): siRNA sense strand
ucgagacuuugccaaggua

SEQ ID NO: 191357 - RNA, 19 nt, Homo sapiens
  misc_RNA (1)...(19): siRNA sense strand
gcaaaaggccauaaaaugc

SEQ ID NO: 191358 - RNA, 19 nt, Homo sapiens
  misc_RNA (1)...(19): siRNA sense strand
cugcaugauucuauccaaa

SEQ ID NO: 191359 - RNA, 19 nt, Homo sapiens
  misc_RNA (1)...(19): siRNA sense strand
uaaagcacauuuggaagac

SEQ ID NO: 191360 - RNA, 19 nt, Homo sapiens
  misc_RNA (1)...(19): siRNA sense strand
acaggagucuaaagcacuu

SEQ ID NO: 191361 - RNA, 19 nt, Homo sapiens
  misc_RNA (1)...(19): siRNA sense strand
acagauaccuuuucaagca

SEQ ID NO: 191362 - RNA, 19 nt, Homo sapiens
  misc_RNA (1)...(19): siRNA sense strand
aagcacauuuggaagacaa

SEQ ID NO: 191363 - RNA, 19 nt, Homo sapiens
  misc_RNA (1)...(19): siRNA sense strand
gcuaauaauaagccagaga

SEQ ID NO: 191364 - RNA, 19 nt, Homo sapiens
  misc_RNA (1)...(19): siRNA sense strand
caagagcacaacaauuugg

SEQ ID NO: 191365 - RNA, 19 nt, Homo sapiens
  misc_RNA (1)...(19): siRNA sense strand
ccugucagcugcaugugau

SEQ ID NO: 191366 - RNA, 19 nt, Homo sapiens
  misc_RNA (1)...(19): siRNA sense strand
gcugcugaauguuuaugau

SEQ ID NO: 191367 - RNA, 19 nt, Homo sapiens
  misc_RNA (1)...(19): siRNA sense strand
acagagcucuaccagucuu

SEQ ID NO: 191368 - RNA, 19 nt, Homo sapiens
  misc_RNA (1)...(19): siRNA sense strand
acaguugggugaaguugca

SEQ ID NO: 191369 - RNA, 19 nt, Homo sapiens
  misc_RNA (1)...(19): siRNA sense strand
guuugaccacuauuuauga

SEQ ID NO: 191370 - RNA, 19 nt, Homo sapiens
  misc_RNA (1)...(19): siRNA sense strand
gcuuauaggacugccauga

SEQ ID NO: 191371 - RNA, 19 nt, Homo sapiens
  misc_RNA (1)...(19): siRNA sense strand
caucaggccaaauguaaca

SEQ ID NO: 191372 - RNA, 19 nt, Homo sapiens
  misc_RNA (1)...(19): siRNA sense strand
gauucuauccaaauuccaa

SEQ ID NO: 191373 - RNA, 19 nt, Homo sapiens
  misc_RNA (1)...(19): siRNA sense strand
ggcaaguucaacaggauuu

SEQ ID NO: 191374 - RNA, 19 nt, Homo sapiens
  misc_RNA (1)...(19): siRNA sense strand
gaacuggcugcugaauguu

SEQ ID NO: 191375 - RNA, 19 nt, Homo sapiens
  misc_RNA (1)...(19): siRNA sense strand
cugcugaauguuuaugaua

SEQ ID NO: 191376 - RNA, 19 nt, Homo sapiens
  misc_RNA (1)...(19): siRNA sense strand
aagcaucaggccaaaugua

SEQ ID NO: 191377 - RNA, 19 nt, Homo sapiens
  misc_RNA (1)...(19): siRNA sense strand
uggcaucauuucccugugu

SEQ ID NO: 191378 - RNA, 19 nt, Homo sapiens
  misc_RNA (1)...(19): siRNA sense strand
ccaugaaacuccgaagacu

SEQ ID NO: 191379 - RNA, 19 nt, Homo sapiens
  misc_RNA (1)...(19): siRNA sense strand
auaauaagccagagaucga

SEQ ID NO: 191380 - RNA, 19 nt, Homo sapiens
  misc_RNA (1)...(19): siRNA sense strand
cuaauaauaagccagagau

SEQ ID NO: 191381 - RNA, 19 nt, Homo sapiens
  misc_RNA (1)...(19): siRNA sense strand
ugggugaaguugcauccuu

SEQ ID NO: 191382 - RNA, 19 nt, Homo sapiens
  misc_RNA (1)...(19): siRNA sense strand
caucauuucccuguguaaa

SEQ ID NO: 191383 - RNA, 19 nt, Homo sapiens
  misc_RNA (1)...(19): siRNA sense strand
gcguggauaugugucugaa

SEQ ID NO: 191384 - RNA, 19 nt, Homo sapiens
  misc_RNA (1)...(19): siRNA sense strand
gcacuaucccaugguggaa

SEQ ID NO: 191385 - RNA, 19 nt, Homo sapiens
  misc_RNA (1)...(19): siRNA sense strand
gagccugucagcugcaugu

SEQ ID NO: 191386 - RNA, 19 nt, Homo sapiens
  misc_RNA (1)...(19): siRNA sense strand
guacagauaccuuuucaag

SEQ ID NO: 191387 - RNA, 19 nt, Homo sapiens
  misc_RNA (1)...(19): siRNA sense strand
gucccucucugcguggaua

SEQ ID NO: 191388 - RNA, 19 nt, Homo sapiens
  misc_RNA (1)...(19): siRNA sense strand
ggagcugcuuccaauuugc

SEQ ID NO: 191389 - RNA, 19 nt, Homo sapiens
  misc_RNA (1)...(19): siRNA sense strand
uuagcugaccugaauaaug

SEQ ID NO: 191390 - RNA, 19 nt, Homo sapiens
  misc_RNA (1)...(19): siRNA sense strand
guggcaaguucaacaggau

SEQ ID NO: 191391 - RNA, 19 nt, Homo sapiens
  misc_RNA (1)...(19): siRNA sense strand
acaacaauuuggucaacgu

SEQ ID NO: 191392 - RNA, 19 nt, Homo sapiens
  misc_RNA (1)...(19): siRNA sense strand
gacuacaucaggagaagau

SEQ ID NO: 191393 - RNA, 19 nt, Homo sapiens
  misc_RNA (1)...(19): siRNA sense strand
uaauaagccagagaucgaa

SEQ ID NO: 191394 - RNA, 19 nt, Homo sapiens
  misc_RNA (1)...(19): siRNA sense strand
ugucagauucucagcuuau

SEQ ID NO: 191395 - RNA, 19 nt, Homo sapiens
  misc_RNA (1)...(19): siRNA sense strand
ggauauccugcagauuauu

SEQ ID NO: 191396 - RNA, 19 nt, Homo sapiens
  misc_RNA (1)...(19): siRNA sense strand
agcaucaggccaaauguaa

SEQ ID NO: 191397 - RNA, 19 nt, Homo sapiens
  misc_RNA (1)...(19): siRNA sense strand
gcccuuugcuuggaucucu

SEQ ID NO: 191398 - RNA, 19 nt, Homo sapiens
  misc_RNA (1)...(19): siRNA sense strand
gcugaauguuuaugauacg

SEQ ID NO: 191399 - RNA, 19 nt, Homo sapiens
  misc_RNA (1)...(19): siRNA sense strand
agacuuugccaagguacua

SEQ ID NO: 191400 - RNA, 19 nt, Homo sapiens
  misc_RNA (1)...(19): siRNA sense strand
caagcaaguggcaaguuca

SEQ ID NO: 191401 - RNA, 19 nt, Homo sapiens
  misc_RNA (1)...(19): siRNA sense strand
agacaaguacagauaccuu

SEQ ID NO: 191402 - RNA, 19 nt, Homo sapiens
  misc_RNA (1)...(19): siRNA sense strand
gcaucauuucccuguguaa

SEQ ID NO: 191403 - RNA, 19 nt, Homo sapiens
  misc_RNA (1)...(19): siRNA sense strand
cugcaaagaguguccaauc

SEQ ID NO: 191404 - RNA, 19 nt, Homo sapiens
  misc_RNA (1)...(19): siRNA sense strand
cuuauaggacugccaugaa

SEQ ID NO: 191405 - RNA, 19 nt, Homo sapiens
  misc_RNA (1)...(19): siRNA sense strand
caaagaguguccaaucauu

SEQ ID NO: 191406 - RNA, 19 nt, Homo sapiens
  misc_RNA (1)...(19): siRNA sense strand
uagcugaccugaauaaugu

SEQ ID NO: 191407 - RNA, 19 nt, Homo sapiens
  misc_RNA (1)...(19): siRNA sense strand
gcaugauucuauccaaauu

SEQ ID NO: 191408 - RNA, 19 nt, Homo sapiens
  misc_RNA (1)...(19): siRNA sense strand
ugaacuggcugcugaaugu

SEQ ID NO: 191409 - RNA, 19 nt, Homo sapiens
  misc_RNA (1)...(19): siRNA sense strand
gauauccugcagauuauua

SEQ ID NO: 191410 - RNA, 19 nt, Homo sapiens
  misc_RNA (1)...(19): siRNA sense strand
gagaagauguucgagacuu

SEQ ID NO: 191411 - RNA, 19 nt, Homo sapiens
  misc_RNA (1)...(19): siRNA sense strand
gcacuuuaauuaugacauc

SEQ ID NO: 191412 - RNA, 19 nt, Homo sapiens
  misc_RNA (1)...(19): siRNA sense strand
guaaagcacauuuggaaga

SEQ ID NO: 191413 - RNA, 19 nt, Homo sapiens
  misc_RNA (1)...(19): siRNA sense strand
gaauauugcacuccgacua

SEQ ID NO: 191414 - RNA, 19 nt, Homo sapiens
  misc_RNA (1)...(19): siRNA sense strand
uuauaggacugccaugaaa

SEQ ID NO: 191415 - RNA, 19 nt, Homo sapiens
  misc_RNA (1)...(19): siRNA sense strand
gggugaaguugcauccuuu

SEQ ID NO: 191416 - RNA, 19 nt, Homo sapiens
  misc_RNA (1)...(19): siRNA sense strand
gcaagagcacaacaauuug

SEQ ID NO: 191417 - RNA, 19 nt, Homo sapiens
  misc_RNA (1)...(19): siRNA sense strand
gcacaacaauuuggucaac

SEQ ID NO: 191418 - RNA, 19 nt, Homo sapiens
  misc_RNA (1)...(19): siRNA sense strand
agcaagagcacaacaauuu

SEQ ID NO: 191419 - RNA, 19 nt, Homo sapiens
  misc_RNA (1)...(19): siRNA sense strand
agaagauguucgagacuuu

SEQ ID NO: 191420 - RNA, 19 nt, Homo sapiens
  misc_RNA (1)...(19): siRNA sense strand
gagcaagagcacaacaauu

SEQ ID NO: 191421 - RNA, 19 nt, Homo sapiens
  misc_RNA (1)...(19): siRNA sense strand
ucaagcaaguggcaaguuc

SEQ ID NO: 191422 - RNA, 19 nt, Homo sapiens
  misc_RNA (1)...(19): siRNA sense strand
ccacgagacucaaacaacu

SEQ ID NO: 191423 - RNA, 19 nt, Homo sapiens
  misc_RNA (1)...(19): siRNA sense strand
cagcacaaccucaagcaaa

SEQ ID NO: 191424 - RNA, 19 nt, Homo sapiens
  misc_RNA (1)...(19): siRNA sense strand
gcaaagaguguccaaucau

SEQ ID NO: 191425 - RNA, 19 nt, Homo sapiens
  misc_RNA (1)...(19): siRNA sense strand
auggauauccugcagauua

SEQ ID NO: 191426 - RNA, 19 nt, Homo sapiens
  misc_RNA (1)...(19): siRNA sense strand
uguaacaucugcaaagagu

SEQ ID NO: 191427 - RNA, 19 nt, Homo sapiens
  misc_RNA (1)...(19): siRNA sense strand
guccggagcugcuuccaau

SEQ ID NO: 191428 - RNA, 19 nt, Homo sapiens
  misc_RNA (1)...(19): siRNA sense strand
gcaaguggcaaguucaaca

SEQ ID NO: 191429 - RNA, 19 nt, Homo sapiens
  misc_RNA (1)...(19): siRNA sense strand
gcuuccaauuugcuaauaa

SEQ ID NO: 191430 - RNA, 19 nt, Homo sapiens
  misc_RNA (1)...(19): siRNA sense strand
uggaagacaaguacagaua

SEQ ID NO: 191431 - RNA, 19 nt, Homo sapiens
  misc_RNA (1)...(19): siRNA sense strand
ggauccguguccugucuuu

SEQ ID NO: 191432 - RNA, 19 nt, Homo sapiens
  misc_RNA (1)...(19): siRNA sense strand
gucuuuagcugaccugaau

SEQ ID NO: 191433 - RNA, 19 nt, Homo sapiens
  misc_RNA (1)...(19): siRNA sense strand
gacaaguacagauaccuuu

SEQ ID NO: 191434 - RNA, 19 nt, Homo sapiens
  misc_RNA (1)...(19): siRNA sense strand
ccaagcaucaggccaaaug

SEQ ID NO: 191435 - RNA, 19 nt, Homo sapiens
  misc_RNA (1)...(19): siRNA sense strand
ggagcaagagcacaacaau

SEQ ID NO: 191436 - RNA, 19 nt, Homo sapiens
  misc_RNA (1)...(19): siRNA sense strand
guguaaagcacauuuggaa

SEQ ID NO: 191437 - RNA, 19 nt, Homo sapiens
  misc_RNA (1)...(19): siRNA sense strand
caagacaguugggugaagu

SEQ ID NO: 191438 - RNA, 19 nt, Homo sapiens
  misc_RNA (1)...(19): siRNA sense strand
gaagauguucgagacuuug

SEQ ID NO: 191439 - RNA, 19 nt, Homo sapiens
  misc_RNA (1)...(19): siRNA sense strand
gucagauucucagcuuaua

SEQ ID NO: 191440 - RNA, 19 nt, Homo sapiens
  misc_RNA (1)...(19): siRNA sense strand
uaacaucugcaaagagugu

SEQ ID NO: 191441 - RNA, 19 nt, Homo sapiens
  misc_RNA (1)...(19): siRNA sense strand
cggagcugcuuccaauuug

SEQ ID NO: 191442 - RNA, 19 nt, Homo sapiens
  misc_RNA (1)...(19): siRNA sense strand
gaagacaaguacagauacc

SEQ ID NO: 191443 - RNA, 19 nt, Homo sapiens
  misc_RNA (1)...(19): siRNA sense strand
ccauggauauccugcagau

SEQ ID NO: 191444 - RNA, 19 nt, Homo sapiens
  misc_RNA (1)...(19): siRNA sense strand
ggcaucauuucccugugua

SEQ ID NO: 191445 - RNA, 19 nt, Homo sapiens
  misc_RNA (1)...(19): siRNA sense strand
uggauauccugcagauuau

SEQ ID NO: 191446 - RNA, 19 nt, Homo sapiens
  misc_RNA (1)...(19): siRNA sense strand
ggaagacaaguacagauac

SEQ ID NO: 191447 - RNA, 19 nt, Homo sapiens
  misc_RNA (1)...(19): siRNA sense strand
ugcaaagaguguccaauca

SEQ ID NO: 191448 - RNA, 19 nt, Homo sapiens
  misc_RNA (1)...(19): siRNA sense strand
guggauaugugucugaacu

SEQ ID NO: 191449 - RNA, 19 nt, Homo sapiens
  misc_RNA (1)...(19): siRNA sense strand
acuggcugcugaauguuua

SEQ ID NO: 191450 - RNA, 19 nt, Homo sapiens
  misc_RNA (1)...(19): siRNA sense strand
acuaucccaugguggaaua

SEQ ID NO: 191451 - RNA, 19 nt, Homo sapiens
  misc_RNA (1)...(19): siRNA sense strand
ccggagcugcuuccaauuu

SEQ ID NO: 191452 - RNA, 19 nt, Homo sapiens
  misc_RNA (1)...(19): siRNA sense strand
ccaaauuccaagacaguug

SEQ ID NO: 191453 - RNA, 19 nt, Homo sapiens
  misc_RNA (1)...(19): siRNA sense strand
cagaaacugccaagcauca

SEQ ID NO: 191454 - RNA, 19 nt, Homo sapiens
  misc_RNA (1)...(19): siRNA sense strand
uaugacaucugccaaagcu

SEQ ID NO: 191455 - RNA, 19 nt, Homo sapiens
  misc_RNA (1)...(19): siRNA sense strand
aaugucagauucucagcuu

SEQ ID NO: 191456 - RNA, 19 nt, Homo sapiens
  misc_RNA (1)...(19): siRNA sense strand
ucgagacuuugccaaggua

SEQ ID NO: 191457 - RNA, 19 nt, Homo sapiens
  misc_RNA (1)...(19): siRNA sense strand
gcaaaaggccauaaaaugc

SEQ ID NO: 191458 - RNA, 19 nt, Homo sapiens
  misc_RNA (1)...(19): siRNA sense strand
cugcaugauucuauccaaa

SEQ ID NO: 191459 - RNA, 19 nt, Homo sapiens
  misc_RNA (1)...(19): siRNA sense strand
uaaagcacauuuggaagac

SEQ ID NO: 191460 - RNA, 19 nt, Homo sapiens
  misc_RNA (1)...(19): siRNA sense strand
acaggagucuaaagcacuu

SEQ ID NO: 191461 - RNA, 19 nt, Homo sapiens
  misc_RNA (1)...(19): siRNA sense strand
acagauaccuuuucaagca

SEQ ID NO: 191462 - RNA, 19 nt, Homo sapiens
  misc_RNA (1)...(19): siRNA sense strand
aagcacauuuggaagacaa

SEQ ID NO: 191463 - RNA, 19 nt, Homo sapiens
  misc_RNA (1)...(19): siRNA sense strand
gcuaauaauaagccagaga

SEQ ID NO: 191464 - RNA, 19 nt, Homo sapiens
  misc_RNA (1)...(19): siRNA sense strand
caagagcacaacaauuugg

SEQ ID NO: 191465 - RNA, 19 nt, Homo sapiens
  misc_RNA (1)...(19): siRNA sense strand
ccugucagcugcaugugau

SEQ ID NO: 191466 - RNA, 19 nt, Homo sapiens
  misc_RNA (1)...(19): siRNA sense strand
gcugcugaauguuuaugau

SEQ ID NO: 191467 - RNA, 19 nt, Homo sapiens
  misc_RNA (1)...(19): siRNA sense strand
acagagcucuaccagucuu

SEQ ID NO: 191468 - RNA, 19 nt, Homo sapiens
  misc_RNA (1)...(19): siRNA sense strand
acaguugggugaaguugca

SEQ ID NO: 191469 - RNA, 19 nt, Homo sapiens
  misc_RNA (1)...(19): siRNA sense strand
guuugaccacuauuuauga

SEQ ID NO: 191470 - RNA, 19 nt, Homo sapiens
  misc_RNA (1)...(19): siRNA sense strand
gcuuauaggacugccauga

SEQ ID NO: 191471 - RNA, 19 nt, Homo sapiens
  misc_RNA (1)...(19): siRNA sense strand
caucaggccaaauguaaca

SEQ ID NO: 191472 - RNA, 19 nt, Homo sapiens
  misc_RNA (1)...(19): siRNA sense strand
gauucuauccaaauuccaa

SEQ ID NO: 191473 - RNA, 19 nt, Homo sapiens
  misc_RNA (1)...(19): siRNA sense strand
ggcaaguucaacaggauuu

SEQ ID NO: 191474 - RNA, 19 nt, Homo sapiens
  misc_RNA (1)...(19): siRNA sense strand
gaacuggcugcugaauguu

SEQ ID NO: 191475 - RNA, 19 nt, Homo sapiens
  misc_RNA (1)...(19): siRNA sense strand
cugcugaauguuuaugaua

SEQ ID NO: 191476 - RNA, 19 nt, Homo sapiens
  misc_RNA (1)...(19): siRNA sense strand
aagcaucaggccaaaugua

SEQ ID NO: 191477 - RNA, 19 nt, Homo sapiens
  misc_RNA (1)...(19): siRNA sense strand
uggcaucauuucccugugu

SEQ ID NO: 191478 - RNA, 19 nt, Homo sapiens
  misc_RNA (1)...(19): siRNA sense strand
ccaugaaacuccgaagacu

SEQ ID NO: 191479 - RNA, 19 nt, Homo sapiens
  misc_RNA (1)...(19): siRNA sense strand
auaauaagccagagaucga

SEQ ID NO: 191480 - RNA, 19 nt, Homo sapiens
  misc_RNA (1)...(19): siRNA sense strand
cuaauaauaagccagagau

SEQ ID NO: 191481 - RNA, 19 nt, Homo sapiens
  misc_RNA (1)...(19): siRNA sense strand
ugggugaaguugcauccuu

SEQ ID NO: 191482 - RNA, 19 nt, Homo sapiens
  misc_RNA (1)...(19): siRNA sense strand
caucauuucccuguguaaa

SEQ ID NO: 191483 - RNA, 19 nt, Homo sapiens
  misc_RNA (1)...(19): siRNA sense strand
gcguggauaugugucugaa

SEQ ID NO: 191484 - RNA, 19 nt, Homo sapiens
  misc_RNA (1)...(19): siRNA sense strand
gcacuaucccaugguggaa

SEQ ID NO: 191485 - RNA, 19 nt, Homo sapiens
  misc_RNA (1)...(19): siRNA sense strand
gagccugucagcugcaugu

SEQ ID NO: 191486 - RNA, 19 nt, Homo sapiens
  misc_RNA (1)...(19): siRNA sense strand
guacagauaccuuuucaag

SEQ ID NO: 191487 - RNA, 19 nt, Homo sapiens
  misc_RNA (1)...(19): siRNA sense strand
gucccucucugcguggaua

SEQ ID NO: 191488 - RNA, 19 nt, Homo sapiens
  misc_RNA (1)...(19): siRNA sense strand
ggagcugcuuccaauuugc

SEQ ID NO: 191489 - RNA, 19 nt, Homo sapiens
  misc_RNA (1)...(19): siRNA sense strand
uuagcugaccugaauaaug

SEQ ID NO: 191490 - RNA, 19 nt, Homo sapiens
  misc_RNA (1)...(19): siRNA sense strand
guggcaaguucaacaggau

SEQ ID NO: 191491 - RNA, 19 nt, Homo sapiens
  misc_RNA (1)...(19): siRNA sense strand
acaacaauuuggucaacgu

SEQ ID NO: 191492 - RNA, 19 nt, Homo sapiens
  misc_RNA (1)...(19): siRNA sense strand
gacuacaucaggagaagau

SEQ ID NO: 191493 - RNA, 19 nt, Homo sapiens
  misc_RNA (1)...(19): siRNA sense strand
uaauaagccagagaucgaa

SEQ ID NO: 191494 - RNA, 19 nt, Homo sapiens
  misc_RNA (1)...(19): siRNA sense strand
ugucagauucucagcuuau

SEQ ID NO: 191495 - RNA, 19 nt, Homo sapiens
  misc_RNA (1)...(19): siRNA sense strand
ggauauccugcagauuauu

SEQ ID NO: 191496 - RNA, 19 nt, Homo sapiens
  misc_RNA (1)...(19): siRNA sense strand
agcaucaggccaaauguaa

SEQ ID NO: 191497 - RNA, 19 nt, Homo sapiens
  misc_RNA (1)...(19): siRNA sense strand
gcccuuugcuuggaucucu

SEQ ID NO: 191498 - RNA, 19 nt, Homo sapiens
  misc_RNA (1)...(19): siRNA sense strand
gcugaauguuuaugauacg

SEQ ID NO: 191499 - RNA, 19 nt, Homo sapiens
  misc_RNA (1)...(19): siRNA sense strand
agacuuugccaagguacua

SEQ ID NO: 191500 - RNA, 19 nt, Homo sapiens
  misc_RNA (1)...(19): siRNA sense strand
caagcaaguggcaaguuca

SEQ ID NO: 191501 - RNA, 19 nt, Homo sapiens
  misc_RNA (1)...(19): siRNA sense strand
agacaaguacagauaccuu

SEQ ID NO: 191502 - RNA, 19 nt, Homo sapiens
  misc_RNA (1)...(19): siRNA sense strand
gcaucauuucccuguguaa

SEQ ID NO: 191503 - RNA, 19 nt, Homo sapiens
  misc_RNA (1)...(19): siRNA sense strand
cugcaaagaguguccaauc

SEQ ID NO: 191504 - RNA, 19 nt, Homo sapiens
  misc_RNA (1)...(19): siRNA sense strand
cuuauaggacugccaugaa

SEQ ID NO: 191505 - RNA, 19 nt, Homo sapiens
  misc_RNA (1)...(19): siRNA sense strand
caaagaguguccaaucauu

SEQ ID NO: 191506 - RNA, 19 nt, Homo sapiens
  misc_RNA (1)...(19): siRNA sense strand
uagcugaccugaauaaugu

SEQ ID NO: 191507 - RNA, 19 nt, Homo sapiens
  misc_RNA (1)...(19): siRNA sense strand
gcaugauucuauccaaauu

SEQ ID NO: 191508 - RNA, 19 nt, Homo sapiens
  misc_RNA (1)...(19): siRNA sense strand
ugaacuggcugcugaaugu

SEQ ID NO: 191509 - RNA, 19 nt, Homo sapiens
  misc_RNA (1)...(19): siRNA sense strand
gauauccugcagauuauua

SEQ ID NO: 191510 - RNA, 19 nt, Homo sapiens
  misc_RNA (1)...(19): siRNA sense strand
gagaagauguucgagacuu

SEQ ID NO: 191511 - RNA, 19 nt, Homo sapiens
  misc_RNA (1)...(19): siRNA sense strand
gcacuuuaauuaugacauc

SEQ ID NO: 191512 - RNA, 19 nt, Homo sapiens
  misc_RNA (1)...(19): siRNA sense strand
guaaagcacauuuggaaga

SEQ ID NO: 191513 - RNA, 19 nt, Homo sapiens
  misc_RNA (1)...(19): siRNA sense strand
gaauauugcacuccgacua

SEQ ID NO: 191514 - RNA, 19 nt, Homo sapiens
  misc_RNA (1)...(19): siRNA sense strand
uuauaggacugccaugaaa

SEQ ID NO: 191515 - RNA, 19 nt, Homo sapiens
  misc_RNA (1)...(19): siRNA sense strand
gggugaaguugcauccuuu

SEQ ID NO: 191516 - RNA, 19 nt, Homo sapiens
  misc_RNA (1)...(19): siRNA sense strand
gcaagagcacaacaauuug

SEQ ID NO: 191517 - RNA, 19 nt, Homo sapiens
  misc_RNA (1)...(19): siRNA sense strand
gcacaacaauuuggucaac

SEQ ID NO: 191518 - RNA, 19 nt, Homo sapiens
  misc_RNA (1)...(19): siRNA sense strand
agcaagagcacaacaauuu

SEQ ID NO: 191519 - RNA, 19 nt, Homo sapiens
  misc_RNA (1)...(19): siRNA sense strand
agaagauguucgagacuuu

SEQ ID NO: 191520 - RNA, 19 nt, Homo sapiens
  misc_RNA (1)...(19): siRNA sense strand
gagcaagagcacaacaauu

SEQ ID NO: 191521 - RNA, 19 nt, Homo sapiens
  misc_RNA (1)...(19): siRNA sense strand
ucaagcaaguggcaaguuc

SEQ ID NO: 191522 - RNA, 19 nt, Homo sapiens
  misc_RNA (1)...(19): siRNA sense strand
ccacgagacucaaacaacu

SEQ ID NO: 191523 - RNA, 19 nt, Homo sapiens
  misc_RNA (1)...(19): siRNA sense strand
cagcacaaccucaagcaaa

SEQ ID NO: 191524 - RNA, 19 nt, Homo sapiens
  misc_RNA (1)...(19): siRNA sense strand
gcaaagaguguccaaucau

SEQ ID NO: 191525 - RNA, 19 nt, Homo sapiens
  misc_RNA (1)...(19): siRNA sense strand
auggauauccugcagauua

SEQ ID NO: 191526 - RNA, 19 nt, Homo sapiens
  misc_RNA (1)...(19): siRNA sense strand
uguaacaucugcaaagagu

SEQ ID NO: 191527 - RNA, 19 nt, Homo sapiens
  misc_RNA (1)...(19): siRNA sense strand
guccggagcugcuuccaau

SEQ ID NO: 191528 - RNA, 19 nt, Homo sapiens
  misc_RNA (1)...(19): siRNA sense strand
gcaaguggcaaguucaaca

SEQ ID NO: 191529 - RNA, 19 nt, Homo sapiens
  misc_RNA (1)...(19): siRNA sense strand
gcuuccaauuugcuaauaa

SEQ ID NO: 191530 - RNA, 19 nt, Homo sapiens
  misc_RNA (1)...(19): siRNA sense strand
uggaagacaaguacagaua

SEQ ID NO: 191531 - RNA, 19 nt, Homo sapiens
  misc_RNA (1)...(19): siRNA sense strand
ggauccguguccugucuuu

SEQ ID NO: 191532 - RNA, 19 nt, Homo sapiens
  misc_RNA (1)...(19): siRNA sense strand
gucuuuagcugaccugaau

SEQ ID NO: 191533 - RNA, 19 nt, Homo sapiens
  misc_RNA (1)...(19): siRNA sense strand
gacaaguacagauaccuuu

SEQ ID NO: 191534 - RNA, 19 nt, Homo sapiens
  misc_RNA (1)...(19): siRNA sense strand
ccaagcaucaggccaaaug

SEQ ID NO: 191535 - RNA, 19 nt, Homo sapiens
  misc_RNA (1)...(19): siRNA sense strand
ggagcaagagcacaacaau

SEQ ID NO: 191536 - RNA, 19 nt, Homo sapiens
  misc_RNA (1)...(19): siRNA sense strand
guguaaagcacauuuggaa

SEQ ID NO: 191537 - RNA, 19 nt, Homo sapiens
  misc_RNA (1)...(19): siRNA sense strand
caagacaguugggugaagu

SEQ ID NO: 191538 - RNA, 19 nt, Homo sapiens
  misc_RNA (1)...(19): siRNA sense strand
gaagauguucgagacuuug

SEQ ID NO: 191539 - RNA, 19 nt, Homo sapiens
  misc_RNA (1)...(19): siRNA sense strand
gucagauucucagcuuaua

SEQ ID NO: 191540 - RNA, 19 nt, Homo sapiens
  misc_RNA (1)...(19): siRNA sense strand
uaacaucugcaaagagugu

SEQ ID NO: 191541 - RNA, 19 nt, Homo sapiens
  misc_RNA (1)...(19): siRNA sense strand
cggagcugcuuccaauuug

SEQ ID NO: 191542 - RNA, 19 nt, Homo sapiens
  misc_RNA (1)...(19): siRNA sense strand
gaagacaaguacagauacc

SEQ ID NO: 191543 - RNA, 19 nt, Homo sapiens
  misc_RNA (1)...(19): siRNA sense strand
ccauggauauccugcagau

SEQ ID NO: 191544 - RNA, 19 nt, Homo sapiens
  misc_RNA (1)...(19): siRNA sense strand
ggcaucauuucccugugua

SEQ ID NO: 191545 - RNA, 19 nt, Homo sapiens
  misc_RNA (1)...(19): siRNA sense strand
uggauauccugcagauuau

SEQ ID NO: 191546 - RNA, 19 nt, Homo sapiens
  misc_RNA (1)...(19): siRNA sense strand
ggaagacaaguacagauac

SEQ ID NO: 191547 - RNA, 19 nt, Homo sapiens
  misc_RNA (1)...(19): siRNA sense strand
ugcaaagaguguccaauca

SEQ ID NO: 191548 - RNA, 19 nt, Homo sapiens
  misc_RNA (1)...(19): siRNA sense strand
guggauaugugucugaacu

SEQ ID NO: 191549 - RNA, 19 nt, Homo sapiens
  misc_RNA (1)...(19): siRNA sense strand
acuggcugcugaauguuua

SEQ ID NO: 191550 - RNA, 19 nt, Homo sapiens
  misc_RNA (1)...(19): siRNA sense strand
acuaucccaugguggaaua

SEQ ID NO: 191551 - RNA, 19 nt, Homo sapiens
  misc_RNA (1)...(19): siRNA sense strand
ccggagcugcuuccaauuu

SEQ ID NO: 191552 - RNA, 19 nt, Homo sapiens
  misc_RNA (1)...(19): siRNA sense strand
ccaaauuccaagacaguug

SEQ ID NO: 191553 - RNA, 19 nt, Homo sapiens
  misc_RNA (1)...(19): siRNA sense strand
cagaaacugccaagcauca

SEQ ID NO: 191554 - RNA, 19 nt, Homo sapiens
  misc_RNA (1)...(19): siRNA sense strand
uaugacaucugccaaagcu

SEQ ID NO: 191555 - RNA, 19 nt, Homo sapiens
  misc_RNA (1)...(19): siRNA sense strand
aaugucagauucucagcuu

SEQ ID NO: 191556 - RNA, 19 nt, Homo sapiens
  misc_RNA (1)...(19): siRNA sense strand
ucgagacuuugccaaggua

SEQ ID NO: 191557 - RNA, 19 nt, Homo sapiens
  misc_RNA (1)...(19): siRNA sense strand
gcaaaaggccauaaaaugc

SEQ ID NO: 191558 - RNA, 19 nt, Homo sapiens
  misc_RNA (1)...(19): siRNA sense strand
cugcaugauucuauccaaa

SEQ ID NO: 191559 - RNA, 19 nt, Homo sapiens
  misc_RNA (1)...(19): siRNA sense strand
uaaagcacauuuggaagac

SEQ ID NO: 191560 - RNA, 19 nt, Homo sapiens
  misc_RNA (1)...(19): siRNA sense strand
acaggagucuaaagcacuu

SEQ ID NO: 191561 - RNA, 19 nt, Homo sapiens
  misc_RNA (1)...(19): siRNA sense strand
acagauaccuuuucaagca

SEQ ID NO: 191562 - RNA, 19 nt, Homo sapiens
  misc_RNA (1)...(19): siRNA sense strand
aagcacauuuggaagacaa

SEQ ID NO: 191563 - RNA, 19 nt, Homo sapiens
  misc_RNA (1)...(19): siRNA sense strand
gcuaauaauaagccagaga

SEQ ID NO: 191564 - RNA, 19 nt, Homo sapiens
  misc_RNA (1)...(19): siRNA sense strand
caagagcacaacaauuugg

SEQ ID NO: 191565 - RNA, 19 nt, Homo sapiens
  misc_RNA (1)...(19): siRNA sense strand
ccugucagcugcaugugau

SEQ ID NO: 191566 - RNA, 19 nt, Homo sapiens
  misc_RNA (1)...(19): siRNA sense strand
gcugcugaauguuuaugau

SEQ ID NO: 191567 - RNA, 19 nt, Homo sapiens
  misc_RNA (1)...(19): siRNA sense strand
acagagcucuaccagucuu

SEQ ID NO: 191568 - RNA, 19 nt, Homo sapiens
  misc_RNA (1)...(19): siRNA sense strand
acaguugggugaaguugca

SEQ ID NO: 191569 - RNA, 19 nt, Homo sapiens
  misc_RNA (1)...(19): siRNA sense strand
guuugaccacuauuuauga

SEQ ID NO: 191570 - RNA, 19 nt, Homo sapiens
  misc_RNA (1)...(19): siRNA sense strand
gcuuauaggacugccauga

SEQ ID NO: 191571 - RNA, 19 nt, Homo sapiens
  misc_RNA (1)...(19): siRNA sense strand
caucaggccaaauguaaca

SEQ ID NO: 191572 - RNA, 19 nt, Homo sapiens
  misc_RNA (1)...(19): siRNA sense strand
gauucuauccaaauuccaa

SEQ ID NO: 191573 - RNA, 19 nt, Homo sapiens
  misc_RNA (1)...(19): siRNA sense strand
ggcaaguucaacaggauuu

SEQ ID NO: 191574 - RNA, 19 nt, Homo sapiens
  misc_RNA (1)...(19): siRNA sense strand
gaacuggcugcugaauguu

SEQ ID NO: 191575 - RNA, 19 nt, Homo sapiens
  misc_RNA (1)...(19): siRNA sense strand
cugcugaauguuuaugaua

SEQ ID NO: 191576 - RNA, 19 nt, Homo sapiens
  misc_RNA (1)...(19): siRNA sense strand
aagcaucaggccaaaugua

SEQ ID NO: 191577 - RNA, 19 nt, Homo sapiens
  misc_RNA (1)...(19): siRNA sense strand
uggcaucauuucccugugu

SEQ ID NO: 191578 - RNA, 19 nt, Homo sapiens
  misc_RNA (1)...(19): siRNA sense strand
ccaugaaacuccgaagacu

SEQ ID NO: 191579 - RNA, 19 nt, Homo sapiens
  misc_RNA (1)...(19): siRNA sense strand
auaauaagccagagaucga

SEQ ID NO: 191580 - RNA, 19 nt, Homo sapiens
  misc_RNA (1)...(19): siRNA sense strand
cuaauaauaagccagagau

SEQ ID NO: 191581 - RNA, 19 nt, Homo sapiens
  misc_RNA (1)...(19): siRNA sense strand
ugggugaaguugcauccuu

SEQ ID NO: 191582 - RNA, 19 nt, Homo sapiens
  misc_RNA (1)...(19): siRNA sense strand
caucauuucccuguguaaa

SEQ ID NO: 191583 - RNA, 19 nt, Homo sapiens
  misc_RNA (1)...(19): siRNA sense strand
gcguggauaugugucugaa

SEQ ID NO: 191584 - RNA, 19 nt, Homo sapiens
  misc_RNA (1)...(19): siRNA sense strand
gcacuaucccaugguggaa

SEQ ID NO: 191585 - RNA, 19 nt, Homo sapiens
  misc_RNA (1)...(19): siRNA sense strand
gagccugucagcugcaugu

SEQ ID NO: 191586 - RNA, 19 nt, Homo sapiens
  misc_RNA (1)...(19): siRNA sense strand
guacagauaccuuuucaag

SEQ ID NO: 191587 - RNA, 19 nt, Homo sapiens
  misc_RNA (1)...(19): siRNA sense strand
gucccucucugcguggaua

SEQ ID NO: 191588 - RNA, 19 nt, Homo sapiens
  misc_RNA (1)...(19): siRNA sense strand
ggagcugcuuccaauuugc

SEQ ID NO: 191589 - RNA, 19 nt, Homo sapiens
  misc_RNA (1)...(19): siRNA sense strand
uuagcugaccugaauaaug

SEQ ID NO: 191590 - RNA, 19 nt, Homo sapiens
  misc_RNA (1)...(19): siRNA sense strand
guggcaaguucaacaggau

SEQ ID NO: 191591 - RNA, 19 nt, Homo sapiens
  misc_RNA (1)...(19): siRNA sense strand
acaacaauuuggucaacgu

SEQ ID NO: 191592 - RNA, 19 nt, Homo sapiens
  misc_RNA (1)...(19): siRNA sense strand
gacuacaucaggagaagau

SEQ ID NO: 191593 - RNA, 19 nt, Homo sapiens
  misc_RNA (1)...(19): siRNA sense strand
uaauaagccagagaucgaa

SEQ ID NO: 191594 - RNA, 19 nt, Homo sapiens
  misc_RNA (1)...(19): siRNA sense strand
ugucagauucucagcuuau

SEQ ID NO: 191595 - RNA, 19 nt, Homo sapiens
  misc_RNA (1)...(19): siRNA sense strand
ggauauccugcagauuauu

SEQ ID NO: 191596 - RNA, 19 nt, Homo sapiens
  misc_RNA (1)...(19): siRNA sense strand
agcaucaggccaaauguaa

SEQ ID NO: 191597 - RNA, 19 nt, Homo sapiens
  misc_RNA (1)...(19): siRNA sense strand
gcccuuugcuuggaucucu

SEQ ID NO: 191598 - RNA, 19 nt, Homo sapiens
  misc_RNA (1)...(19): siRNA sense strand
gcugaauguuuaugauacg

SEQ ID NO: 191599 - RNA, 19 nt, Homo sapiens
  misc_RNA (1)...(19): siRNA sense strand
agacuuugccaagguacua

SEQ ID NO: 191600 - RNA, 19 nt, Homo sapiens
  misc_RNA (1)...(19): siRNA sense strand
caagcaaguggcaaguuca

SEQ ID NO: 191601 - RNA, 19 nt, Homo sapiens
  misc_RNA (1)...(19): siRNA sense strand
agacaaguacagauaccuu

SEQ ID NO: 191602 - RNA, 19 nt, Homo sapiens
  misc_RNA (1)...(19): siRNA sense strand
gcaucauuucccuguguaa

SEQ ID NO: 191603 - RNA, 19 nt, Homo sapiens
  misc_RNA (1)...(19): siRNA sense strand
cugcaaagaguguccaauc

SEQ ID NO: 191604 - RNA, 19 nt, Homo sapiens
  misc_RNA (1)...(19): siRNA sense strand
cuuauaggacugccaugaa

SEQ ID NO: 191605 - RNA, 19 nt, Homo sapiens
  misc_RNA (1)...(19): siRNA sense strand
caaagaguguccaaucauu

SEQ ID NO: 191606 - RNA, 19 nt, Homo sapiens
  misc_RNA (1)...(19): siRNA sense strand
uagcugaccugaauaaugu

SEQ ID NO: 191607 - RNA, 19 nt, Homo sapiens
  misc_RNA (1)...(19): siRNA sense strand
gcaugauucuauccaaauu

SEQ ID NO: 191608 - RNA, 19 nt, Homo sapiens
  misc_RNA (1)...(19): siRNA sense strand
ugaacuggcugcugaaugu

SEQ ID NO: 191609 - RNA, 19 nt, Homo sapiens
  misc_RNA (1)...(19): siRNA sense strand
gauauccugcagauuauua

SEQ ID NO: 191610 - RNA, 19 nt, Homo sapiens
  misc_RNA (1)...(19): siRNA sense strand
gagaagauguucgagacuu

SEQ ID NO: 191611 - RNA, 19 nt, Homo sapiens
  misc_RNA (1)...(19): siRNA sense strand
gcacuuuaauuaugacauc

SEQ ID NO: 191612 - RNA, 19 nt, Homo sapiens
  misc_RNA (1)...(19): siRNA sense strand
guaaagcacauuuggaaga

SEQ ID NO: 191613 - RNA, 19 nt, Homo sapiens
  misc_RNA (1)...(19): siRNA sense strand
gaauauugcacuccgacua

SEQ ID NO: 191614 - RNA, 19 nt, Homo sapiens
  misc_RNA (1)...(19): siRNA sense strand
uuauaggacugccaugaaa

SEQ ID NO: 191615 - RNA, 19 nt, Homo sapiens
  misc_RNA (1)...(19): siRNA sense strand
gggugaaguugcauccuuu

SEQ ID NO: 191616 - RNA, 19 nt, Homo sapiens
  misc_RNA (1)...(19): siRNA sense strand
gcaagagcacaacaauuug

SEQ ID NO: 191617 - RNA, 19 nt, Homo sapiens
  misc_RNA (1)...(19): siRNA sense strand
gcacaacaauuuggucaac

SEQ ID NO: 191618 - RNA, 19 nt, Homo sapiens
  misc_RNA (1)...(19): siRNA sense strand
agcaagagcacaacaauuu

SEQ ID NO: 191619 - RNA, 19 nt, Homo sapiens
  misc_RNA (1)...(19): siRNA sense strand
agaagauguucgagacuuu

SEQ ID NO: 191620 - RNA, 19 nt, Homo sapiens
  misc_RNA (1)...(19): siRNA sense strand
gagcaagagcacaacaauu

SEQ ID NO: 191621 - RNA, 19 nt, Homo sapiens
  misc_RNA (1)...(19): siRNA sense strand
ucaagcaaguggcaaguuc

SEQ ID NO: 191622 - RNA, 19 nt, Homo sapiens
  misc_RNA (1)...(19): siRNA sense strand
ccacgagacucaaacaacu

SEQ ID NO: 191623 - RNA, 19 nt, Homo sapiens
  misc_RNA (1)...(19): siRNA sense strand
cagcacaaccucaagcaaa

SEQ ID NO: 191624 - RNA, 19 nt, Homo sapiens
  misc_RNA (1)...(19): siRNA sense strand
gcaaagaguguccaaucau

SEQ ID NO: 191625 - RNA, 19 nt, Homo sapiens
  misc_RNA (1)...(19): siRNA sense strand
auggauauccugcagauua

SEQ ID NO: 191626 - RNA, 19 nt, Homo sapiens
  misc_RNA (1)...(19): siRNA sense strand
uguaacaucugcaaagagu

SEQ ID NO: 191627 - RNA, 19 nt, Homo sapiens
  misc_RNA (1)...(19): siRNA sense strand
guccggagcugcuuccaau

SEQ ID NO: 191628 - RNA, 19 nt, Homo sapiens
  misc_RNA (1)...(19): siRNA sense strand
gcaaguggcaaguucaaca

SEQ ID NO: 191629 - RNA, 19 nt, Homo sapiens
  misc_RNA (1)...(19): siRNA sense strand
gcuuccaauuugcuaauaa

SEQ ID NO: 191630 - RNA, 19 nt, Homo sapiens
  misc_RNA (1)...(19): siRNA sense strand
uggaagacaaguacagaua

SEQ ID NO: 191631 - RNA, 19 nt, Homo sapiens
  misc_RNA (1)...(19): siRNA sense strand
ggauccguguccugucuuu

SEQ ID NO: 191632 - RNA, 19 nt, Homo sapiens
  misc_RNA (1)...(19): siRNA sense strand
gucuuuagcugaccugaau

SEQ ID NO: 191633 - RNA, 19 nt, Homo sapiens
  misc_RNA (1)...(19): siRNA sense strand
gacaaguacagauaccuuu

SEQ ID NO: 191634 - RNA, 19 nt, Homo sapiens
  misc_RNA (1)...(19): siRNA sense strand
ccaagcaucaggccaaaug

SEQ ID NO: 191635 - RNA, 19 nt, Homo sapiens
  misc_RNA (1)...(19): siRNA sense strand
ggagcaagagcacaacaau

SEQ ID NO: 191636 - RNA, 19 nt, Homo sapiens
  misc_RNA (1)...(19): siRNA sense strand
guguaaagcacauuuggaa

SEQ ID NO: 191637 - RNA, 19 nt, Homo sapiens
  misc_RNA (1)...(19): siRNA sense strand
caagacaguugggugaagu

SEQ ID NO: 191638 - RNA, 19 nt, Homo sapiens
  misc_RNA (1)...(19): siRNA sense strand
gaagauguucgagacuuug

SEQ ID NO: 191639 - RNA, 19 nt, Homo sapiens
  misc_RNA (1)...(19): siRNA sense strand
gucagauucucagcuuaua

SEQ ID NO: 191640 - RNA, 19 nt, Homo sapiens
  misc_RNA (1)...(19): siRNA sense strand
uaacaucugcaaagagugu

SEQ ID NO: 191641 - RNA, 19 nt, Homo sapiens
  misc_RNA (1)...(19): siRNA sense strand
cggagcugcuuccaauuug

SEQ ID NO: 191642 - RNA, 19 nt, Homo sapiens
  misc_RNA (1)...(19): siRNA sense strand
gaagacaaguacagauacc

SEQ ID NO: 191643 - RNA, 19 nt, Homo sapiens
  misc_RNA (1)...(19): siRNA sense strand
ccauggauauccugcagau

SEQ ID NO: 191644 - RNA, 19 nt, Homo sapiens
  misc_RNA (1)...(19): siRNA sense strand
ggcaucauuucccugugua

SEQ ID NO: 191645 - RNA, 19 nt, Homo sapiens
  misc_RNA (1)...(19): siRNA sense strand
uggauauccugcagauuau

SEQ ID NO: 191646 - RNA, 19 nt, Homo sapiens
  misc_RNA (1)...(19): siRNA sense strand
ggaagacaaguacagauac

SEQ ID NO: 191647 - RNA, 19 nt, Homo sapiens
  misc_RNA (1)...(19): siRNA sense strand
ugcaaagaguguccaauca

SEQ ID NO: 191648 - RNA, 19 nt, Homo sapiens
  misc_RNA (1)...(19): siRNA sense strand
guggauaugugucugaacu

SEQ ID NO: 191649 - RNA, 19 nt, Homo sapiens
  misc_RNA (1)...(19): siRNA sense strand
acuggcugcugaauguuua

SEQ ID NO: 191650 - RNA, 19 nt, Homo sapiens
  misc_RNA (1)...(19): siRNA sense strand
acuaucccaugguggaaua

SEQ ID NO: 191651 - RNA, 19 nt, Homo sapiens
  misc_RNA (1)...(19): siRNA sense strand
ccggagcugcuuccaauuu

SEQ ID NO: 191652 - RNA, 19 nt, Homo sapiens
  misc_RNA (1)...(19): siRNA sense strand
ccaaauuccaagacaguug

SEQ ID NO: 191653 - RNA, 19 nt, Homo sapiens
  misc_RNA (1)...(19): siRNA sense strand
cagaaacugccaagcauca

SEQ ID NO: 191654 - RNA, 19 nt, Homo sapiens
  misc_RNA (1)...(19): siRNA sense strand
uaugacaucugccaaagcu

SEQ ID NO: 191655 - RNA, 19 nt, Homo sapiens
  misc_RNA (1)...(19): siRNA sense strand
aaugucagauucucagcuu

SEQ ID NO: 191656 - RNA, 19 nt, Homo sapiens
  misc_RNA (1)...(19): siRNA sense strand
ucgagacuuugccaaggua

SEQ ID NO: 191657 - RNA, 19 nt, Homo sapiens
  misc_RNA (1)...(19): siRNA sense strand
gcaaaaggccauaaaaugc

SEQ ID NO: 191658 - RNA, 19 nt, Homo sapiens
  misc_RNA (1)...(19): siRNA sense strand
cugcaugauucuauccaaa

SEQ ID NO: 191659 - RNA, 19 nt, Homo sapiens
  misc_RNA (1)...(19): siRNA sense strand
uaaagcacauuuggaagac

SEQ ID NO: 191660 - RNA, 19 nt, Homo sapiens
  misc_RNA (1)...(19): siRNA sense strand
acaggagucuaaagcacuu

SEQ ID NO: 191661 - RNA, 19 nt, Homo sapiens
  misc_RNA (1)...(19): siRNA sense strand
acagauaccuuuucaagca

SEQ ID NO: 191662 - RNA, 19 nt, Homo sapiens
  misc_RNA (1)...(19): siRNA sense strand
aagcacauuuggaagacaa

SEQ ID NO: 191663 - RNA, 19 nt, Homo sapiens
  misc_RNA (1)...(19): siRNA sense strand
gcuaauaauaagccagaga

SEQ ID NO: 191664 - RNA, 19 nt, Homo sapiens
  misc_RNA (1)...(19): siRNA sense strand
caagagcacaacaauuugg

SEQ ID NO: 191665 - RNA, 19 nt, Homo sapiens
  misc_RNA (1)...(19): siRNA sense strand
ccugucagcugcaugugau

SEQ ID NO: 191666 - RNA, 19 nt, Homo sapiens
  misc_RNA (1)...(19): siRNA sense strand
gcugcugaauguuuaugau

SEQ ID NO: 191667 - RNA, 19 nt, Homo sapiens
  misc_RNA (1)...(19): siRNA sense strand
acagagcucuaccagucuu

SEQ ID NO: 191668 - RNA, 19 nt, Homo sapiens
  misc_RNA (1)...(19): siRNA sense strand
acaguugggugaaguugca

SEQ ID NO: 191669 - RNA, 19 nt, Homo sapiens
  misc_RNA (1)...(19): siRNA sense strand
guuugaccacuauuuauga

SEQ ID NO: 191670 - RNA, 19 nt, Homo sapiens
  misc_RNA (1)...(19): siRNA sense strand
gcuuauaggacugccauga

SEQ ID NO: 191671 - RNA, 19 nt, Homo sapiens
  misc_RNA (1)...(19): siRNA sense strand
caucaggccaaauguaaca

SEQ ID NO: 191672 - RNA, 19 nt, Homo sapiens
  misc_RNA (1)...(19): siRNA sense strand
gauucuauccaaauuccaa

SEQ ID NO: 191673 - RNA, 19 nt, Homo sapiens
  misc_RNA (1)...(19): siRNA sense strand
ggcaaguucaacaggauuu

SEQ ID NO: 191674 - RNA, 19 nt, Homo sapiens
  misc_RNA (1)...(19): siRNA sense strand
gaacuggcugcugaauguu

SEQ ID NO: 191675 - RNA, 19 nt, Homo sapiens
  misc_RNA (1)...(19): siRNA sense strand
cugcugaauguuuaugaua

SEQ ID NO: 191676 - RNA, 19 nt, Homo sapiens
  misc_RNA (1)...(19): siRNA sense strand
aagcaucaggccaaaugua

SEQ ID NO: 191677 - RNA, 19 nt, Homo sapiens
  misc_RNA (1)...(19): siRNA sense strand
uggcaucauuucccugugu

SEQ ID NO: 191678 - RNA, 19 nt, Homo sapiens
  misc_RNA (1)...(19): siRNA sense strand
ccaugaaacuccgaagacu

SEQ ID NO: 191679 - RNA, 19 nt, Homo sapiens
  misc_RNA (1)...(19): siRNA sense strand
auaauaagccagagaucga

SEQ ID NO: 191680 - RNA, 19 nt, Homo sapiens
  misc_RNA (1)...(19): siRNA sense strand
cuaauaauaagccagagau

SEQ ID NO: 191681 - RNA, 19 nt, Homo sapiens
  misc_RNA (1)...(19): siRNA sense strand
ugggugaaguugcauccuu

SEQ ID NO: 191682 - RNA, 19 nt, Homo sapiens
  misc_RNA (1)...(19): siRNA sense strand
caucauuucccuguguaaa

SEQ ID NO: 191683 - RNA, 19 nt, Homo sapiens
  misc_RNA (1)...(19): siRNA sense strand
gcguggauaugugucugaa

SEQ ID NO: 191684 - RNA, 19 nt, Homo sapiens
  misc_RNA (1)...(19): siRNA sense strand
gcacuaucccaugguggaa

SEQ ID NO: 191685 - RNA, 19 nt, Homo sapiens
  misc_RNA (1)...(19): siRNA sense strand
gagccugucagcugcaugu

SEQ ID NO: 191686 - RNA, 19 nt, Homo sapiens
  misc_RNA (1)...(19): siRNA sense strand
guacagauaccuuuucaag

SEQ ID NO: 191687 - RNA, 19 nt, Homo sapiens
  misc_RNA (1)...(19): siRNA sense strand
gucccucucugcguggaua

SEQ ID NO: 191688 - RNA, 19 nt, Homo sapiens
  misc_RNA (1)...(19): siRNA sense strand
ggagcugcuuccaauuugc

SEQ ID NO: 191689 - RNA, 19 nt, Homo sapiens
  misc_RNA (1)...(19): siRNA sense strand
uuagcugaccugaauaaug

SEQ ID NO: 191690 - RNA, 19 nt, Homo sapiens
  misc_RNA (1)...(19): siRNA sense strand
guggcaaguucaacaggau

SEQ ID NO: 191691 - RNA, 19 nt, Homo sapiens
  misc_RNA (1)...(19): siRNA sense strand
acaacaauuuggucaacgu

SEQ ID NO: 191692 - RNA, 19 nt, Homo sapiens
  misc_RNA (1)...(19): siRNA sense strand
gacuacaucaggagaagau

SEQ ID NO: 191693 - RNA, 19 nt, Homo sapiens
  misc_RNA (1)...(19): siRNA sense strand
uaauaagccagagaucgaa

SEQ ID NO: 191694 - RNA, 19 nt, Homo sapiens
  misc_RNA (1)...(19): siRNA sense strand
ugucagauucucagcuuau

SEQ ID NO: 191695 - RNA, 19 nt, Homo sapiens
  misc_RNA (1)...(19): siRNA sense strand
ggauauccugcagauuauu

SEQ ID NO: 191696 - RNA, 19 nt, Homo sapiens
  misc_RNA (1)...(19): siRNA sense strand
agcaucaggccaaauguaa

SEQ ID NO: 191697 - RNA, 19 nt, Homo sapiens
  misc_RNA (1)...(19): siRNA sense strand
gcccuuugcuuggaucucu

SEQ ID NO: 191698 - RNA, 19 nt, Homo sapiens
  misc_RNA (1)...(19): siRNA sense strand
gcugaauguuuaugauacg

SEQ ID NO: 191699 - RNA, 19 nt, Homo sapiens
  misc_RNA (1)...(19): siRNA sense strand
agacuuugccaagguacua

SEQ ID NO: 191700 - RNA, 19 nt, Homo sapiens
  misc_RNA (1)...(19): siRNA sense strand
caagcaaguggcaaguuca

SEQ ID NO: 191701 - RNA, 19 nt, Homo sapiens
  misc_RNA (1)...(19): siRNA sense strand
agacaaguacagauaccuu

SEQ ID NO: 191702 - RNA, 19 nt, Homo sapiens
  misc_RNA (1)...(19): siRNA sense strand
gcaucauuucccuguguaa

SEQ ID NO: 191703 - RNA, 19 nt, Homo sapiens
  misc_RNA (1)...(19): siRNA sense strand
cugcaaagaguguccaauc

SEQ ID NO: 191704 - RNA, 19 nt, Homo sapiens
  misc_RNA (1)...(19): siRNA sense strand
cuuauaggacugccaugaa

SEQ ID NO: 191705 - RNA, 19 nt, Homo sapiens
  misc_RNA (1)...(19): siRNA sense strand
caaagaguguccaaucauu

SEQ ID NO: 191706 - RNA, 19 nt, Homo sapiens
  misc_RNA (1)...(19): siRNA sense strand
uagcugaccugaauaaugu

SEQ ID NO: 191707 - RNA, 19 nt, Homo sapiens
  misc_RNA (1)...(19): siRNA sense strand
gcaugauucuauccaaauu

SEQ ID NO: 191708 - RNA, 19 nt, Homo sapiens
  misc_RNA (1)...(19): siRNA sense strand
ugaacuggcugcugaaugu

SEQ ID NO: 191709 - RNA, 19 nt, Homo sapiens
  misc_RNA (1)...(19): siRNA sense strand
gauauccugcagauuauua

SEQ ID NO: 191710 - RNA, 19 nt, Homo sapiens
  misc_RNA (1)...(19): siRNA sense strand
gagaagauguucgagacuu

SEQ ID NO: 191711 - RNA, 19 nt, Homo sapiens
  misc_RNA (1)...(19): siRNA sense strand
gcacuuuaauuaugacauc

SEQ ID NO: 191712 - RNA, 19 nt, Homo sapiens
  misc_RNA (1)...(19): siRNA sense strand
guaaagcacauuuggaaga

SEQ ID NO: 191713 - RNA, 19 nt, Homo sapiens
  misc_RNA (1)...(19): siRNA sense strand
gaauauugcacuccgacua

SEQ ID NO: 191714 - RNA, 19 nt, Homo sapiens
  misc_RNA (1)...(19): siRNA sense strand
uuauaggacugccaugaaa

SEQ ID NO: 191715 - RNA, 19 nt, Homo sapiens
  misc_RNA (1)...(19): siRNA sense strand
gggugaaguugcauccuuu

SEQ ID NO: 191716 - RNA, 19 nt, Homo sapiens
  misc_RNA (1)...(19): siRNA sense strand
gcaagagcacaacaauuug

SEQ ID NO: 191717 - RNA, 19 nt, Homo sapiens
  misc_RNA (1)...(19): siRNA sense strand
gcacaacaauuuggucaac

SEQ ID NO: 191718 - RNA, 19 nt, Homo sapiens
  misc_RNA (1)...(19): siRNA sense strand
agcaagagcacaacaauuu

SEQ ID NO: 191719 - RNA, 19 nt, Homo sapiens
  misc_RNA (1)...(19): siRNA sense strand
agaagauguucgagacuuu

SEQ ID NO: 191720 - RNA, 19 nt, Homo sapiens
  misc_RNA (1)...(19): siRNA sense strand
gagcaagagcacaacaauu

SEQ ID NO: 191721 - RNA, 19 nt, Homo sapiens
  misc_RNA (1)...(19): siRNA sense strand
ucaagcaaguggcaaguuc

SEQ ID NO: 191722 - RNA, 19 nt, Homo sapiens
  misc_RNA (1)...(19): siRNA sense strand
ccacgagacucaaacaacu

SEQ ID NO: 191723 - RNA, 19 nt, Homo sapiens
  misc_RNA (1)...(19): siRNA sense strand
cagcacaaccucaagcaaa

SEQ ID NO: 191724 - RNA, 19 nt, Homo sapiens
  misc_RNA (1)...(19): siRNA sense strand
gcaaagaguguccaaucau

SEQ ID NO: 191725 - RNA, 19 nt, Homo sapiens
  misc_RNA (1)...(19): siRNA sense strand
auggauauccugcagauua

SEQ ID NO: 191726 - RNA, 19 nt, Homo sapiens
  misc_RNA (1)...(19): siRNA sense strand
uguaacaucugcaaagagu

SEQ ID NO: 191727 - RNA, 19 nt, Homo sapiens
  misc_RNA (1)...(19): siRNA sense strand
guccggagcugcuuccaau

SEQ ID NO: 191728 - RNA, 19 nt, Homo sapiens
  misc_RNA (1)...(19): siRNA sense strand
gcaaguggcaaguucaaca

SEQ ID NO: 191729 - RNA, 19 nt, Homo sapiens
  misc_RNA (1)...(19): siRNA sense strand
gcuuccaauuugcuaauaa

SEQ ID NO: 191730 - RNA, 19 nt, Homo sapiens
  misc_RNA (1)...(19): siRNA sense strand
uggaagacaaguacagaua

SEQ ID NO: 191731 - RNA, 19 nt, Homo sapiens
  misc_RNA (1)...(19): siRNA sense strand
ggauccguguccugucuuu

SEQ ID NO: 191732 - RNA, 19 nt, Homo sapiens
  misc_RNA (1)...(19): siRNA sense strand
gucuuuagcugaccugaau

SEQ ID NO: 191733 - RNA, 19 nt, Homo sapiens
  misc_RNA (1)...(19): siRNA sense strand
gacaaguacagauaccuuu

SEQ ID NO: 191734 - RNA, 19 nt, Homo sapiens
  misc_RNA (1)...(19): siRNA sense strand
ccaagcaucaggccaaaug

SEQ ID NO: 191735 - RNA, 19 nt, Homo sapiens
  misc_RNA (1)...(19): siRNA sense strand
ggagcaagagcacaacaau

SEQ ID NO: 191736 - RNA, 19 nt, Homo sapiens
  misc_RNA (1)...(19): siRNA sense strand
guguaaagcacauuuggaa

SEQ ID NO: 191737 - RNA, 19 nt, Homo sapiens
  misc_RNA (1)...(19): siRNA sense strand
caagacaguugggugaagu

SEQ ID NO: 191738 - RNA, 19 nt, Homo sapiens
  misc_RNA (1)...(19): siRNA sense strand
gaagauguucgagacuuug

SEQ ID NO: 191739 - RNA, 19 nt, Homo sapiens
  misc_RNA (1)...(19): siRNA sense strand
gucagauucucagcuuaua

SEQ ID NO: 191740 - RNA, 19 nt, Homo sapiens
  misc_RNA (1)...(19): siRNA sense strand
uaacaucugcaaagagugu

SEQ ID NO: 191741 - RNA, 19 nt, Homo sapiens
  misc_RNA (1)...(19): siRNA sense strand
cggagcugcuuccaauuug

SEQ ID NO: 191742 - RNA, 19 nt, Homo sapiens
  misc_RNA (1)...(19): siRNA sense strand
gaagacaaguacagauacc

SEQ ID NO: 191743 - RNA, 19 nt, Homo sapiens
  misc_RNA (1)...(19): siRNA sense strand
ccauggauauccugcagau

SEQ ID NO: 191744 - RNA, 19 nt, Homo sapiens
  misc_RNA (1)...(19): siRNA sense strand
ggcaucauuucccugugua

SEQ ID NO: 191745 - RNA, 19 nt, Homo sapiens
  misc_RNA (1)...(19): siRNA sense strand
uggauauccugcagauuau

SEQ ID NO: 191746 - RNA, 19 nt, Homo sapiens
  misc_RNA (1)...(19): siRNA sense strand
ggaagacaaguacagauac

SEQ ID NO: 191747 - RNA, 19 nt, Homo sapiens
  misc_RNA (1)...(19): siRNA sense strand
ugcaaagaguguccaauca

SEQ ID NO: 191748 - RNA, 19 nt, Homo sapiens
  misc_RNA (1)...(19): siRNA sense strand
guggauaugugucugaacu

SEQ ID NO: 191749 - RNA, 19 nt, Homo sapiens
  misc_RNA (1)...(19): siRNA sense strand
acuggcugcugaauguuua

SEQ ID NO: 191750 - RNA, 19 nt, Homo sapiens
  misc_RNA (1)...(19): siRNA sense strand
acuaucccaugguggaaua

SEQ ID NO: 191751 - RNA, 19 nt, Homo sapiens
  misc_RNA (1)...(19): siRNA sense strand
ccggagcugcuuccaauuu

SEQ ID NO: 191752 - RNA, 19 nt, Homo sapiens
  misc_RNA (1)...(19): siRNA sense strand
ccaaauuccaagacaguug

SEQ ID NO: 191753 - RNA, 19 nt, Homo sapiens
  misc_RNA (1)...(19): siRNA sense strand
cagaaacugccaagcauca

SEQ ID NO: 191754 - RNA, 19 nt, Homo sapiens
  misc_RNA (1)...(19): siRNA sense strand
uaugacaucugccaaagcu

SEQ ID NO: 191755 - RNA, 19 nt, Homo sapiens
  misc_RNA (1)...(19): siRNA sense strand
aaugucagauucucagcuu

SEQ ID NO: 191756 - RNA, 19 nt, Homo sapiens
  misc_RNA (1)...(19): siRNA sense strand
ucgagacuuugccaaggua

SEQ ID NO: 191757 - RNA, 19 nt, Homo sapiens
  misc_RNA (1)...(19): siRNA sense strand
gcaaaaggccauaaaaugc

SEQ ID NO: 191758 - RNA, 19 nt, Homo sapiens
  misc_RNA (1)...(19): siRNA sense strand
cugcaugauucuauccaaa

SEQ ID NO: 191759 - RNA, 19 nt, Homo sapiens
  misc_RNA (1)...(19): siRNA sense strand
uaaagcacauuuggaagac

SEQ ID NO: 191760 - RNA, 19 nt, Homo sapiens
  misc_RNA (1)...(19): siRNA sense strand
acaggagucuaaagcacuu

SEQ ID NO: 191761 - RNA, 19 nt, Homo sapiens
  misc_RNA (1)...(19): siRNA sense strand
acagauaccuuuucaagca

SEQ ID NO: 191762 - RNA, 19 nt, Homo sapiens
  misc_RNA (1)...(19): siRNA sense strand
aagcacauuuggaagacaa

SEQ ID NO: 191763 - RNA, 19 nt, Homo sapiens
  misc_RNA (1)...(19): siRNA sense strand
gcuaauaauaagccagaga

SEQ ID NO: 191764 - RNA, 19 nt, Homo sapiens
  misc_RNA (1)...(19): siRNA sense strand
caagagcacaacaauuugg

SEQ ID NO: 191765 - RNA, 19 nt, Homo sapiens
  misc_RNA (1)...(19): siRNA sense strand
ccugucagcugcaugugau

SEQ ID NO: 191766 - RNA, 19 nt, Homo sapiens
  misc_RNA (1)...(19): siRNA sense strand
gcugcugaauguuuaugau

SEQ ID NO: 191767 - RNA, 19 nt, Homo sapiens
  misc_RNA (1)...(19): siRNA sense strand
acagagcucuaccagucuu

SEQ ID NO: 191768 - RNA, 19 nt, Homo sapiens
  misc_RNA (1)...(19): siRNA sense strand
acaguugggugaaguugca

SEQ ID NO: 191769 - RNA, 19 nt, Homo sapiens
  misc_RNA (1)...(19): siRNA sense strand
guuugaccacuauuuauga

SEQ ID NO: 191770 - RNA, 19 nt, Homo sapiens
  misc_RNA (1)...(19): siRNA sense strand
gcuuauaggacugccauga

SEQ ID NO: 191771 - RNA, 19 nt, Homo sapiens
  misc_RNA (1)...(19): siRNA sense strand
caucaggccaaauguaaca

SEQ ID NO: 191772 - RNA, 19 nt, Homo sapiens
  misc_RNA (1)...(19): siRNA sense strand
gauucuauccaaauuccaa

SEQ ID NO: 191773 - RNA, 19 nt, Homo sapiens
  misc_RNA (1)...(19): siRNA sense strand
ggcaaguucaacaggauuu

SEQ ID NO: 191774 - RNA, 19 nt, Homo sapiens
  misc_RNA (1)...(19): siRNA sense strand
gaacuggcugcugaauguu

SEQ ID NO: 191775 - RNA, 19 nt, Homo sapiens
  misc_RNA (1)...(19): siRNA sense strand
cugcugaauguuuaugaua

SEQ ID NO: 191776 - RNA, 19 nt, Homo sapiens
  misc_RNA (1)...(19): siRNA sense strand
aagcaucaggccaaaugua

SEQ ID NO: 191777 - RNA, 19 nt, Homo sapiens
  misc_RNA (1)...(19): siRNA sense strand
uggcaucauuucccugugu

SEQ ID NO: 191778 - RNA, 19 nt, Homo sapiens
  misc_RNA (1)...(19): siRNA sense strand
ccaugaaacuccgaagacu

SEQ ID NO: 191779 - RNA, 19 nt, Homo sapiens
  misc_RNA (1)...(19): siRNA sense strand
auaauaagccagagaucga

SEQ ID NO: 191780 - RNA, 19 nt, Homo sapiens
  misc_RNA (1)...(19): siRNA sense strand
cuaauaauaagccagagau

SEQ ID NO: 191781 - RNA, 19 nt, Homo sapiens
  misc_RNA (1)...(19): siRNA sense strand
ugggugaaguugcauccuu

SEQ ID NO: 191782 - RNA, 19 nt, Homo sapiens
  misc_RNA (1)...(19): siRNA sense strand
caucauuucccuguguaaa

SEQ ID NO: 191783 - RNA, 19 nt, Homo sapiens
  misc_RNA (1)...(19): siRNA sense strand
gcguggauaugugucugaa

SEQ ID NO: 191784 - RNA, 19 nt, Homo sapiens
  misc_RNA (1)...(19): siRNA sense strand
gcacuaucccaugguggaa

SEQ ID NO: 191785 - RNA, 19 nt, Homo sapiens
  misc_RNA (1)...(19): siRNA sense strand
gagccugucagcugcaugu

SEQ ID NO: 191786 - RNA, 19 nt, Homo sapiens
  misc_RNA (1)...(19): siRNA sense strand
guacagauaccuuuucaag

SEQ ID NO: 191787 - RNA, 19 nt, Homo sapiens
  misc_RNA (1)...(19): siRNA sense strand
gucccucucugcguggaua

SEQ ID NO: 191788 - RNA, 19 nt, Homo sapiens
  misc_RNA (1)...(19): siRNA sense strand
ggagcugcuuccaauuugc

SEQ ID NO: 191789 - RNA, 19 nt, Homo sapiens
  misc_RNA (1)...(19): siRNA sense strand
uuagcugaccugaauaaug

SEQ ID NO: 191790 - RNA, 19 nt, Homo sapiens
  misc_RNA (1)...(19): siRNA sense strand
guggcaaguucaacaggau

SEQ ID NO: 191791 - RNA, 19 nt, Homo sapiens
  misc_RNA (1)...(19): siRNA sense strand
acaacaauuuggucaacgu

SEQ ID NO: 191792 - RNA, 19 nt, Homo sapiens
  misc_RNA (1)...(19): siRNA sense strand
gacuacaucaggagaagau

SEQ ID NO: 191793 - RNA, 19 nt, Homo sapiens
  misc_RNA (1)...(19): siRNA sense strand
uaauaagccagagaucgaa

SEQ ID NO: 191794 - RNA, 19 nt, Homo sapiens
  misc_RNA (1)...(19): siRNA sense strand
ugucagauucucagcuuau

SEQ ID NO: 191795 - RNA, 19 nt, Homo sapiens
  misc_RNA (1)...(19): siRNA sense strand
ggauauccugcagauuauu

SEQ ID NO: 191796 - RNA, 19 nt, Homo sapiens
  misc_RNA (1)...(19): siRNA sense strand
agcaucaggccaaauguaa

SEQ ID NO: 191797 - RNA, 19 nt, Homo sapiens
  misc_RNA (1)...(19): siRNA sense strand
gcccuuugcuuggaucucu

SEQ ID NO: 191798 - RNA, 19 nt, Homo sapiens
  misc_RNA (1)...(19): siRNA sense strand
gcugaauguuuaugauacg

SEQ ID NO: 191799 - RNA, 19 nt, Homo sapiens
  misc_RNA (1)...(19): siRNA sense strand
agacuuugccaagguacua

SEQ ID NO: 191800 - RNA, 19 nt, Homo sapiens
  misc_RNA (1)...(19): siRNA sense strand
caagcaaguggcaaguuca

SEQ ID NO: 191801 - RNA, 19 nt, Homo sapiens
  misc_RNA (1)...(19): siRNA sense strand
agacaaguacagauaccuu

SEQ ID NO: 191802 - RNA, 19 nt, Homo sapiens
  misc_RNA (1)...(19): siRNA sense strand
gcaucauuucccuguguaa

SEQ ID NO: 191803 - RNA, 19 nt, Homo sapiens
  misc_RNA (1)...(19): siRNA sense strand
cugcaaagaguguccaauc

SEQ ID NO: 191804 - RNA, 19 nt, Homo sapiens
  misc_RNA (1)...(19): siRNA sense strand
cuuauaggacugccaugaa

SEQ ID NO: 191805 - RNA, 19 nt, Homo sapiens
  misc_RNA (1)...(19): siRNA sense strand
caaagaguguccaaucauu

SEQ ID NO: 191806 - RNA, 19 nt, Homo sapiens
  misc_RNA (1)...(19): siRNA sense strand
uagcugaccugaauaaugu

SEQ ID NO: 191807 - RNA, 19 nt, Homo sapiens
  misc_RNA (1)...(19): siRNA sense strand
gcaugauucuauccaaauu

SEQ ID NO: 191808 - RNA, 19 nt, Homo sapiens
  misc_RNA (1)...(19): siRNA sense strand
ugaacuggcugcugaaugu

SEQ ID NO: 191809 - RNA, 19 nt, Homo sapiens
  misc_RNA (1)...(19): siRNA sense strand
gauauccugcagauuauua

SEQ ID NO: 191810 - RNA, 19 nt, Homo sapiens
  misc_RNA (1)...(19): siRNA sense strand
gagaagauguucgagacuu

SEQ ID NO: 191811 - RNA, 19 nt, Homo sapiens
  misc_RNA (1)...(19): siRNA sense strand
gcacuuuaauuaugacauc

SEQ ID NO: 191812 - RNA, 19 nt, Homo sapiens
  misc_RNA (1)...(19): siRNA sense strand
guaaagcacauuuggaaga

SEQ ID NO: 191813 - RNA, 19 nt, Homo sapiens
  misc_RNA (1)...(19): siRNA sense strand
gaauauugcacuccgacua

SEQ ID NO: 191814 - RNA, 19 nt, Homo sapiens
  misc_RNA (1)...(19): siRNA sense strand
uuauaggacugccaugaaa

SEQ ID NO: 191815 - RNA, 19 nt, Homo sapiens
  misc_RNA (1)...(19): siRNA sense strand
gggugaaguugcauccuuu

SEQ ID NO: 191816 - RNA, 19 nt, Homo sapiens
  misc_RNA (1)...(19): siRNA sense strand
gcaagagcacaacaauuug

SEQ ID NO: 191817 - RNA, 19 nt, Homo sapiens
  misc_RNA (1)...(19): siRNA sense strand
gcacaacaauuuggucaac

SEQ ID NO: 191818 - RNA, 19 nt, Homo sapiens
  misc_RNA (1)...(19): siRNA sense strand
agcaagagcacaacaauuu

SEQ ID NO: 191819 - RNA, 19 nt, Homo sapiens
  misc_RNA (1)...(19): siRNA sense strand
agaagauguucgagacuuu

SEQ ID NO: 191820 - RNA, 19 nt, Homo sapiens
  misc_RNA (1)...(19): siRNA sense strand
gagcaagagcacaacaauu

SEQ ID NO: 191821 - RNA, 19 nt, Homo sapiens
  misc_RNA (1)...(19): siRNA sense strand
ucaagcaaguggcaaguuc

SEQ ID NO: 191822 - RNA, 19 nt, Homo sapiens
  misc_RNA (1)...(19): siRNA sense strand
ccacgagacucaaacaacu

SEQ ID NO: 191823 - RNA, 19 nt, Homo sapiens
  misc_RNA (1)...(19): siRNA sense strand
cagcacaaccucaagcaaa

SEQ ID NO: 191824 - RNA, 19 nt, Homo sapiens
  misc_RNA (1)...(19): siRNA sense strand
gcaaagaguguccaaucau

SEQ ID NO: 191825 - RNA, 19 nt, Homo sapiens
  misc_RNA (1)...(19): siRNA sense strand
auggauauccugcagauua

SEQ ID NO: 191826 - RNA, 19 nt, Homo sapiens
  misc_RNA (1)...(19): siRNA sense strand
uguaacaucugcaaagagu

SEQ ID NO: 191827 - RNA, 19 nt, Homo sapiens
  misc_RNA (1)...(19): siRNA sense strand
guccggagcugcuuccaau

SEQ ID NO: 191828 - RNA, 19 nt, Homo sapiens
  misc_RNA (1)...(19): siRNA sense strand
gcaaguggcaaguucaaca

SEQ ID NO: 191829 - RNA, 19 nt, Homo sapiens
  misc_RNA (1)...(19): siRNA sense strand
gcuuccaauuugcuaauaa

SEQ ID NO: 191830 - RNA, 19 nt, Homo sapiens
  misc_RNA (1)...(19): siRNA sense strand
uggaagacaaguacagaua

SEQ ID NO: 191831 - RNA, 19 nt, Homo sapiens
  misc_RNA (1)...(19): siRNA sense strand
ggauccguguccugucuuu

SEQ ID NO: 191832 - RNA, 19 nt, Homo sapiens
  misc_RNA (1)...(19): siRNA sense strand
gucuuuagcugaccugaau

SEQ ID NO: 191833 - RNA, 19 nt, Homo sapiens
  misc_RNA (1)...(19): siRNA sense strand
gacaaguacagauaccuuu

SEQ ID NO: 191834 - RNA, 19 nt, Homo sapiens
  misc_RNA (1)...(19): siRNA sense strand
ccaagcaucaggccaaaug

SEQ ID NO: 191835 - RNA, 19 nt, Homo sapiens
  misc_RNA (1)...(19): siRNA sense strand
ggagcaagagcacaacaau

SEQ ID NO: 191836 - RNA, 19 nt, Homo sapiens
  misc_RNA (1)...(19): siRNA sense strand
guguaaagcacauuuggaa

SEQ ID NO: 191837 - RNA, 19 nt, Homo sapiens
  misc_RNA (1)...(19): siRNA sense strand
caagacaguugggugaagu

SEQ ID NO: 191838 - RNA, 19 nt, Homo sapiens
  misc_RNA (1)...(19): siRNA sense strand
gaagauguucgagacuuug

SEQ ID NO: 191839 - RNA, 19 nt, Homo sapiens
  misc_RNA (1)...(19): siRNA sense strand
gucagauucucagcuuaua

SEQ ID NO: 191840 - RNA, 19 nt, Homo sapiens
  misc_RNA (1)...(19): siRNA sense strand
uaacaucugcaaagagugu

SEQ ID NO: 191841 - RNA, 19 nt, Homo sapiens
  misc_RNA (1)...(19): siRNA sense strand
cggagcugcuuccaauuug

SEQ ID NO: 191842 - RNA, 19 nt, Homo sapiens
  misc_RNA (1)...(19): siRNA sense strand
gaagacaaguacagauacc

SEQ ID NO: 191843 - RNA, 19 nt, Homo sapiens
  misc_RNA (1)...(19): siRNA sense strand
ccauggauauccugcagau

SEQ ID NO: 191844 - RNA, 19 nt, Homo sapiens
  misc_RNA (1)...(19): siRNA sense strand
ggcaucauuucccugugua

SEQ ID NO: 191845 - RNA, 19 nt, Homo sapiens
  misc_RNA (1)...(19): siRNA sense strand
uggauauccugcagauuau

SEQ ID NO: 191846 - RNA, 19 nt, Homo sapiens
  misc_RNA (1)...(19): siRNA sense strand
ggaagacaaguacagauac

SEQ ID NO: 191847 - RNA, 19 nt, Homo sapiens
  misc_RNA (1)...(19): siRNA sense strand
ugcaaagaguguccaauca

SEQ ID NO: 191848 - RNA, 19 nt, Homo sapiens
  misc_RNA (1)...(19): siRNA sense strand
guggauaugugucugaacu

SEQ ID NO: 191849 - RNA, 19 nt, Homo sapiens
  misc_RNA (1)...(19): siRNA sense strand
acuggcugcugaauguuua

SEQ ID NO: 191850 - RNA, 19 nt, Homo sapiens
  misc_RNA (1)...(19): siRNA sense strand
acuaucccaugguggaaua

SEQ ID NO: 191851 - RNA, 19 nt, Homo sapiens
  misc_RNA (1)...(19): siRNA sense strand
ccggagcugcuuccaauuu

SEQ ID NO: 191852 - RNA, 19 nt, Homo sapiens
  misc_RNA (1)...(19): siRNA sense strand
ccaaauuccaagacaguug

SEQ ID NO: 191853 - RNA, 19 nt, Homo sapiens
  misc_RNA (1)...(19): siRNA sense strand
cagaaacugccaagcauca

SEQ ID NO: 191854 - RNA, 19 nt, Homo sapiens
  misc_RNA (1)...(19): siRNA sense strand
uaugacaucugccaaagcu

SEQ ID NO: 191855 - RNA, 19 nt, Homo sapiens
  misc_RNA (1)...(19): siRNA sense strand
aaugucagauucucagcuu

SEQ ID NO: 191856 - RNA, 19 nt, Homo sapiens
  misc_RNA (1)...(19): siRNA sense strand
ucgagacuuugccaaggua

SEQ ID NO: 191857 - RNA, 19 nt, Homo sapiens
  misc_RNA (1)...(19): siRNA sense strand
gcaaaaggccauaaaaugc

SEQ ID NO: 191858 - RNA, 19 nt, Homo sapiens
  misc_RNA (1)...(19): siRNA sense strand
cugcaugauucuauccaaa

SEQ ID NO: 191859 - RNA, 19 nt, Homo sapiens
  misc_RNA (1)...(19): siRNA sense strand
uaaagcacauuuggaagac

SEQ ID NO: 191860 - RNA, 19 nt, Homo sapiens
  misc_RNA (1)...(19): siRNA sense strand
acaggagucuaaagcacuu

SEQ ID NO: 191861 - RNA, 19 nt, Homo sapiens
  misc_RNA (1)...(19): siRNA sense strand
acagauaccuuuucaagca

SEQ ID NO: 191862 - RNA, 19 nt, Homo sapiens
  misc_RNA (1)...(19): siRNA sense strand
aagcacauuuggaagacaa

SEQ ID NO: 191863 - RNA, 19 nt, Homo sapiens
  misc_RNA (1)...(19): siRNA sense strand
gcuaauaauaagccagaga

SEQ ID NO: 191864 - RNA, 19 nt, Homo sapiens
  misc_RNA (1)...(19): siRNA sense strand
caagagcacaacaauuugg

SEQ ID NO: 191865 - RNA, 19 nt, Homo sapiens
  misc_RNA (1)...(19): siRNA sense strand
ccugucagcugcaugugau

SEQ ID NO: 191866 - RNA, 19 nt, Homo sapiens
  misc_RNA (1)...(19): siRNA sense strand
gcugcugaauguuuaugau

SEQ ID NO: 191867 - RNA, 19 nt, Homo sapiens
  misc_RNA (1)...(19): siRNA sense strand
acagagcucuaccagucuu

SEQ ID NO: 191868 - RNA, 19 nt, Homo sapiens
  misc_RNA (1)...(19): siRNA sense strand
acaguugggugaaguugca

SEQ ID NO: 191869 - RNA, 19 nt, Homo sapiens
  misc_RNA (1)...(19): siRNA sense strand
guuugaccacuauuuauga

SEQ ID NO: 191870 - RNA, 19 nt, Homo sapiens
  misc_RNA (1)...(19): siRNA sense strand
gcuuauaggacugccauga

SEQ ID NO: 191871 - RNA, 19 nt, Homo sapiens
  misc_RNA (1)...(19): siRNA sense strand
caucaggccaaauguaaca

SEQ ID NO: 191872 - RNA, 19 nt, Homo sapiens
  misc_RNA (1)...(19): siRNA sense strand
gauucuauccaaauuccaa

SEQ ID NO: 191873 - RNA, 19 nt, Homo sapiens
  misc_RNA (1)...(19): siRNA sense strand
ggcaaguucaacaggauuu

SEQ ID NO: 191874 - RNA, 19 nt, Homo sapiens
  misc_RNA (1)...(19): siRNA sense strand
gaacuggcugcugaauguu

SEQ ID NO: 191875 - RNA, 19 nt, Homo sapiens
  misc_RNA (1)...(19): siRNA sense strand
cugcugaauguuuaugaua

SEQ ID NO: 191876 - RNA, 19 nt, Homo sapiens
  misc_RNA (1)...(19): siRNA sense strand
aagcaucaggccaaaugua

SEQ ID NO: 191877 - RNA, 19 nt, Homo sapiens
  misc_RNA (1)...(19): siRNA sense strand
uggcaucauuucccugugu

SEQ ID NO: 191878 - RNA, 19 nt, Homo sapiens
  misc_RNA (1)...(19): siRNA sense strand
ccaugaaacuccgaagacu

SEQ ID NO: 191879 - RNA, 19 nt, Homo sapiens
  misc_RNA (1)...(19): siRNA sense strand
auaauaagccagagaucga

SEQ ID NO: 191880 - RNA, 19 nt, Homo sapiens
  misc_RNA (1)...(19): siRNA sense strand
cuaauaauaagccagagau

SEQ ID NO: 191881 - RNA, 19 nt, Homo sapiens
  misc_RNA (1)...(19): siRNA sense strand
ugggugaaguugcauccuu

SEQ ID NO: 191882 - RNA, 19 nt, Homo sapiens
  misc_RNA (1)...(19): siRNA sense strand
caucauuucccuguguaaa

SEQ ID NO: 191883 - RNA, 19 nt, Homo sapiens
  misc_RNA (1)...(19): siRNA sense strand
gcguggauaugugucugaa

SEQ ID NO: 191884 - RNA, 19 nt, Homo sapiens
  misc_RNA (1)...(19): siRNA sense strand
gcacuaucccaugguggaa

SEQ ID NO: 191885 - RNA, 19 nt, Homo sapiens
  misc_RNA (1)...(19): siRNA sense strand
gagccugucagcugcaugu

SEQ ID NO: 191886 - RNA, 19 nt, Homo sapiens
  misc_RNA (1)...(19): siRNA sense strand
guacagauaccuuuucaag

SEQ ID NO: 191887 - RNA, 19 nt, Homo sapiens
  misc_RNA (1)...(19): siRNA sense strand
gucccucucugcguggaua

SEQ ID NO: 191888 - RNA, 19 nt, Homo sapiens
  misc_RNA (1)...(19): siRNA sense strand
ggagcugcuuccaauuugc

SEQ ID NO: 191889 - RNA, 19 nt, Homo sapiens
  misc_RNA (1)...(19): siRNA sense strand
uuagcugaccugaauaaug

SEQ ID NO: 191890 - RNA, 19 nt, Homo sapiens
  misc_RNA (1)...(19): siRNA sense strand
guggcaaguucaacaggau

SEQ ID NO: 191891 - RNA, 19 nt, Homo sapiens
  misc_RNA (1)...(19): siRNA sense strand
acaacaauuuggucaacgu

SEQ ID NO: 191892 - RNA, 19 nt, Homo sapiens
  misc_RNA (1)...(19): siRNA sense strand
gacuacaucaggagaagau

SEQ ID NO: 191893 - RNA, 19 nt, Homo sapiens
  misc_RNA (1)...(19): siRNA sense strand
uaauaagccagagaucgaa

SEQ ID NO: 191894 - RNA, 19 nt, Homo sapiens
  misc_RNA (1)...(19): siRNA sense strand
ugucagauucucagcuuau

SEQ ID NO: 191895 - RNA, 19 nt, Homo sapiens
  misc_RNA (1)...(19): siRNA sense strand
ggauauccugcagauuauu

SEQ ID NO: 191896 - RNA, 19 nt, Homo sapiens
  misc_RNA (1)...(19): siRNA sense strand
agcaucaggccaaauguaa

SEQ ID NO: 191897 - RNA, 19 nt, Homo sapiens
  misc_RNA (1)...(19): siRNA sense strand
gcccuuugcuuggaucucu

SEQ ID NO: 191898 - RNA, 19 nt, Homo sapiens
  misc_RNA (1)...(19): siRNA sense strand
gcugaauguuuaugauacg

SEQ ID NO: 191899 - RNA, 19 nt, Homo sapiens
  misc_RNA (1)...(19): siRNA sense strand
agacuuugccaagguacua

SEQ ID NO: 191900 - RNA, 19 nt, Homo sapiens
  misc_RNA (1)...(19): siRNA sense strand
caagcaaguggcaaguuca

SEQ ID NO: 191901 - RNA, 19 nt, Homo sapiens
  misc_RNA (1)...(19): siRNA sense strand
agacaaguacagauaccuu

SEQ ID NO: 191902 - RNA, 19 nt, Homo sapiens
  misc_RNA (1)...(19): siRNA sense strand
gcaucauuucccuguguaa

SEQ ID NO: 191903 - RNA, 19 nt, Homo sapiens
  misc_RNA (1)...(19): siRNA sense strand
cugcaaagaguguccaauc

SEQ ID NO: 191904 - RNA, 19 nt, Homo sapiens
  misc_RNA (1)...(19): siRNA sense strand
cuuauaggacugccaugaa

SEQ ID NO: 191905 - RNA, 19 nt, Homo sapiens
  misc_RNA (1)...(19): siRNA sense strand
caaagaguguccaaucauu

SEQ ID NO: 191906 - RNA, 19 nt, Homo sapiens
  misc_RNA (1)...(19): siRNA sense strand
uagcugaccugaauaaugu

SEQ ID NO: 191907 - RNA, 19 nt, Homo sapiens
  misc_RNA (1)...(19): siRNA sense strand
gcaugauucuauccaaauu

SEQ ID NO: 191908 - RNA, 19 nt, Homo sapiens
  misc_RNA (1)...(19): siRNA sense strand
ugaacuggcugcugaaugu

SEQ ID NO: 191909 - RNA, 19 nt, Homo sapiens
  misc_RNA (1)...(19): siRNA sense strand
gauauccugcagauuauua

SEQ ID NO: 191910 - RNA, 19 nt, Homo sapiens
  misc_RNA (1)...(19): siRNA sense strand
gagaagauguucgagacuu

SEQ ID NO: 191911 - RNA, 19 nt, Homo sapiens
  misc_RNA (1)...(19): siRNA sense strand
gcacuuuaauuaugacauc

SEQ ID NO: 191912 - RNA, 19 nt, Homo sapiens
  misc_RNA (1)...(19): siRNA sense strand
guaaagcacauuuggaaga

SEQ ID NO: 191913 - RNA, 19 nt, Homo sapiens
  misc_RNA (1)...(19): siRNA sense strand
gaauauugcacuccgacua

SEQ ID NO: 191914 - RNA, 19 nt, Homo sapiens
  misc_RNA (1)...(19): siRNA sense strand
uuauaggacugccaugaaa

SEQ ID NO: 191915 - RNA, 19 nt, Homo sapiens
  misc_RNA (1)...(19): siRNA sense strand
gggugaaguugcauccuuu

SEQ ID NO: 191916 - RNA, 19 nt, Homo sapiens
  misc_RNA (1)...(19): siRNA sense strand
gcaagagcacaacaauuug

SEQ ID NO: 191917 - RNA, 19 nt, Homo sapiens
  misc_RNA (1)...(19): siRNA sense strand
gcacaacaauuuggucaac

SEQ ID NO: 191918 - RNA, 19 nt, Homo sapiens
  misc_RNA (1)...(19): siRNA sense strand
agcaagagcacaacaauuu

SEQ ID NO: 191919 - RNA, 19 nt, Homo sapiens
  misc_RNA (1)...(19): siRNA sense strand
agaagauguucgagacuuu

SEQ ID NO: 191920 - RNA, 19 nt, Homo sapiens
  misc_RNA (1)...(19): siRNA sense strand
gagcaagagcacaacaauu

SEQ ID NO: 191921 - RNA, 19 nt, Homo sapiens
  misc_RNA (1)...(19): siRNA sense strand
ucaagcaaguggcaaguuc

SEQ ID NO: 191922 - RNA, 19 nt, Homo sapiens
  misc_RNA (1)...(19): siRNA sense strand
ccacgagacucaaacaacu

SEQ ID NO: 191923 - RNA, 19 nt, Homo sapiens
  misc_RNA (1)...(19): siRNA sense strand
cagcacaaccucaagcaaa

SEQ ID NO: 191924 - RNA, 19 nt, Homo sapiens
  misc_RNA (1)...(19): siRNA sense strand
gcaaagaguguccaaucau

SEQ ID NO: 191925 - RNA, 19 nt, Homo sapiens
  misc_RNA (1)...(19): siRNA sense strand
auggauauccugcagauua

SEQ ID NO: 191926 - RNA, 19 nt, Homo sapiens
  misc_RNA (1)...(19): siRNA sense strand
uguaacaucugcaaagagu

SEQ ID NO: 191927 - RNA, 19 nt, Homo sapiens
  misc_RNA (1)...(19): siRNA sense strand
guccggagcugcuuccaau

SEQ ID NO: 191928 - RNA, 19 nt, Homo sapiens
  misc_RNA (1)...(19): siRNA sense strand
gcaaguggcaaguucaaca

SEQ ID NO: 191929 - RNA, 19 nt, Homo sapiens
  misc_RNA (1)...(19): siRNA sense strand
gcuuccaauuugcuaauaa

SEQ ID NO: 191930 - RNA, 19 nt, Homo sapiens
  misc_RNA (1)...(19): siRNA sense strand
uggaagacaaguacagaua

SEQ ID NO: 191931 - RNA, 19 nt, Homo sapiens
  misc_RNA (1)...(19): siRNA sense strand
ggauccguguccugucuuu

SEQ ID NO: 191932 - RNA, 19 nt, Homo sapiens
  misc_RNA (1)...(19): siRNA sense strand
gucuuuagcugaccugaau

SEQ ID NO: 191933 - RNA, 19 nt, Homo sapiens
  misc_RNA (1)...(19): siRNA sense strand
gacaaguacagauaccuuu

SEQ ID NO: 191934 - RNA, 19 nt, Homo sapiens
  misc_RNA (1)...(19): siRNA sense strand
ccaagcaucaggccaaaug

SEQ ID NO: 191935 - RNA, 19 nt, Homo sapiens
  misc_RNA (1)...(19): siRNA sense strand
ggagcaagagcacaacaau

SEQ ID NO: 191936 - RNA, 19 nt, Homo sapiens
  misc_RNA (1)...(19): siRNA sense strand
guguaaagcacauuuggaa

SEQ ID NO: 191937 - RNA, 19 nt, Homo sapiens
  misc_RNA (1)...(19): siRNA sense strand
caagacaguugggugaagu

SEQ ID NO: 191938 - RNA, 19 nt, Homo sapiens
  misc_RNA (1)...(19): siRNA sense strand
gaagauguucgagacuuug

SEQ ID NO: 191939 - RNA, 19 nt, Homo sapiens
  misc_RNA (1)...(19): siRNA sense strand
gucagauucucagcuuaua

SEQ ID NO: 191940 - RNA, 19 nt, Homo sapiens
  misc_RNA (1)...(19): siRNA sense strand
uaacaucugcaaagagugu

SEQ ID NO: 191941 - RNA, 19 nt, Homo sapiens
  misc_RNA (1)...(19): siRNA sense strand
cggagcugcuuccaauuug

SEQ ID NO: 191942 - RNA, 19 nt, Homo sapiens
  misc_RNA (1)...(19): siRNA sense strand
gaagacaaguacagauacc

SEQ ID NO: 191943 - RNA, 19 nt, Homo sapiens
  misc_RNA (1)...(19): siRNA sense strand
ccauggauauccugcagau

SEQ ID NO: 191944 - RNA, 19 nt, Homo sapiens
  misc_RNA (1)...(19): siRNA sense strand
ggcaucauuucccugugua

SEQ ID NO: 191945 - RNA, 19 nt, Homo sapiens
  misc_RNA (1)...(19): siRNA sense strand
uggauauccugcagauuau

SEQ ID NO: 191946 - RNA, 19 nt, Homo sapiens
  misc_RNA (1)...(19): siRNA sense strand
ggaagacaaguacagauac

SEQ ID NO: 191947 - RNA, 19 nt, Homo sapiens
  misc_RNA (1)...(19): siRNA sense strand
ugcaaagaguguccaauca

SEQ ID NO: 191948 - RNA, 19 nt, Homo sapiens
  misc_RNA (1)...(19): siRNA sense strand
guggauaugugucugaacu

SEQ ID NO: 191949 - RNA, 19 nt, Homo sapiens
  misc_RNA (1)...(19): siRNA sense strand
acuggcugcugaauguuua

SEQ ID NO: 191950 - RNA, 19 nt, Homo sapiens
  misc_RNA (1)...(19): siRNA sense strand
acuaucccaugguggaaua

SEQ ID NO: 191951 - RNA, 19 nt, Homo sapiens
  misc_RNA (1)...(19): siRNA sense strand
ccggagcugcuuccaauuu

SEQ ID NO: 191952 - RNA, 19 nt, Homo sapiens
  misc_RNA (1)...(19): siRNA sense strand
ccaaauuccaagacaguug

SEQ ID NO: 191953 - RNA, 19 nt, Homo sapiens
  misc_RNA (1)...(19): siRNA sense strand
cagaaacugccaagcauca

SEQ ID NO: 191954 - RNA, 19 nt, Homo sapiens
  misc_RNA (1)...(19): siRNA sense strand
uaugacaucugccaaagcu

SEQ ID NO: 191955 - RNA, 19 nt, Homo sapiens
  misc_RNA (1)...(19): siRNA sense strand
aaugucagauucucagcuu

SEQ ID NO: 191956 - RNA, 19 nt, Homo sapiens
  misc_RNA (1)...(19): siRNA sense strand
ucgagacuuugccaaggua

SEQ ID NO: 191957 - RNA, 19 nt, Homo sapiens
  misc_RNA (1)...(19): siRNA sense strand
gcaaaaggccauaaaaugc

SEQ ID NO: 191958 - RNA, 19 nt, Homo sapiens
  misc_RNA (1)...(19): siRNA sense strand
cugcaugauucuauccaaa

SEQ ID NO: 191959 - RNA, 19 nt, Homo sapiens
  misc_RNA (1)...(19): siRNA sense strand
uaaagcacauuuggaagac

SEQ ID NO: 191960 - RNA, 19 nt, Homo sapiens
  misc_RNA (1)...(19): siRNA sense strand
acaggagucuaaagcacuu

SEQ ID NO: 191961 - RNA, 19 nt, Homo sapiens
  misc_RNA (1)...(19): siRNA sense strand
acagauaccuuuucaagca

SEQ ID NO: 191962 - RNA, 19 nt, Homo sapiens
  misc_RNA (1)...(19): siRNA sense strand
aagcacauuuggaagacaa

SEQ ID NO: 191963 - RNA, 19 nt, Homo sapiens
  misc_RNA (1)...(19): siRNA sense strand
gcuaauaauaagccagaga

SEQ ID NO: 191964 - RNA, 19 nt, Homo sapiens
  misc_RNA (1)...(19): siRNA sense strand
caagagcacaacaauuugg

SEQ ID NO: 191965 - RNA, 19 nt, Homo sapiens
  misc_RNA (1)...(19): siRNA sense strand
ccugucagcugcaugugau

SEQ ID NO: 191966 - RNA, 19 nt, Homo sapiens
  misc_RNA (1)...(19): siRNA sense strand
gcugcugaauguuuaugau

SEQ ID NO: 191967 - RNA, 19 nt, Homo sapiens
  misc_RNA (1)...(19): siRNA sense strand
acagagcucuaccagucuu

SEQ ID NO: 191968 - RNA, 19 nt, Homo sapiens
  misc_RNA (1)...(19): siRNA sense strand
acaguugggugaaguugca

SEQ ID NO: 191969 - RNA, 19 nt, Homo sapiens
  misc_RNA (1)...(19): siRNA sense strand
guuugaccacuauuuauga

SEQ ID NO: 191970 - RNA, 19 nt, Homo sapiens
  misc_RNA (1)...(19): siRNA sense strand
gcuuauaggacugccauga

SEQ ID NO: 191971 - RNA, 19 nt, Homo sapiens
  misc_RNA (1)...(19): siRNA sense strand
caucaggccaaauguaaca

SEQ ID NO: 191972 - RNA, 19 nt, Homo sapiens
  misc_RNA (1)...(19): siRNA sense strand
gauucuauccaaauuccaa

SEQ ID NO: 191973 - RNA, 19 nt, Homo sapiens
  misc_RNA (1)...(19): siRNA sense strand
ggcaaguucaacaggauuu

SEQ ID NO: 191974 - RNA, 19 nt, Homo sapiens
  misc_RNA (1)...(19): siRNA sense strand
gaacuggcugcugaauguu

SEQ ID NO: 191975 - RNA, 19 nt, Homo sapiens
  misc_RNA (1)...(19): siRNA sense strand
cugcugaauguuuaugaua

SEQ ID NO: 191976 - RNA, 19 nt, Homo sapiens
  misc_RNA (1)...(19): siRNA sense strand
aagcaucaggccaaaugua

SEQ ID NO: 191977 - RNA, 19 nt, Homo sapiens
  misc_RNA (1)...(19): siRNA sense strand
uggcaucauuucccugugu

SEQ ID NO: 191978 - RNA, 19 nt, Homo sapiens
  misc_RNA (1)...(19): siRNA sense strand
ccaugaaacuccgaagacu

SEQ ID NO: 191979 - RNA, 19 nt, Homo sapiens
  misc_RNA (1)...(19): siRNA sense strand
auaauaagccagagaucga

SEQ ID NO: 191980 - RNA, 19 nt, Homo sapiens
  misc_RNA (1)...(19): siRNA sense strand
cuaauaauaagccagagau

SEQ ID NO: 191981 - RNA, 19 nt, Homo sapiens
  misc_RNA (1)...(19): siRNA sense strand
ugggugaaguugcauccuu

SEQ ID NO: 191982 - RNA, 19 nt, Homo sapiens
  misc_RNA (1)...(19): siRNA sense strand
caucauuucccuguguaaa

SEQ ID NO: 191983 - RNA, 19 nt, Homo sapiens
  misc_RNA (1)...(19): siRNA sense strand
gcguggauaugugucugaa

SEQ ID NO: 191984 - RNA, 19 nt, Homo sapiens
  misc_RNA (1)...(19): siRNA sense strand
gcacuaucccaugguggaa

SEQ ID NO: 191985 - RNA, 19 nt, Homo sapiens
  misc_RNA (1)...(19): siRNA sense strand
gagccugucagcugcaugu

SEQ ID NO: 191986 - RNA, 19 nt, Homo sapiens
  misc_RNA (1)...(19): siRNA sense strand
guacagauaccuuuucaag

SEQ ID NO: 191987 - RNA, 19 nt, Homo sapiens
  misc_RNA (1)...(19): siRNA sense strand
gucccucucugcguggaua

SEQ ID NO: 191988 - RNA, 19 nt, Homo sapiens
  misc_RNA (1)...(19): siRNA sense strand
ggagcugcuuccaauuugc

SEQ ID NO: 191989 - RNA, 19 nt, Homo sapiens
  misc_RNA (1)...(19): siRNA sense strand
uuagcugaccugaauaaug

SEQ ID NO: 191990 - RNA, 19 nt, Homo sapiens
  misc_RNA (1)...(19): siRNA sense strand
guggcaaguucaacaggau

SEQ ID NO: 191991 - RNA, 19 nt, Homo sapiens
  misc_RNA (1)...(19): siRNA sense strand
acaacaauuuggucaacgu

SEQ ID NO: 191992 - RNA, 19 nt, Homo sapiens
  misc_RNA (1)...(19): siRNA sense strand
gacuacaucaggagaagau

SEQ ID NO: 191993 - RNA, 19 nt, Homo sapiens
  misc_RNA (1)...(19): siRNA sense strand
uaauaagccagagaucgaa

SEQ ID NO: 191994 - RNA, 19 nt, Homo sapiens
  misc_RNA (1)...(19): siRNA sense strand
ugucagauucucagcuuau

SEQ ID NO: 191995 - RNA, 19 nt, Homo sapiens
  misc_RNA (1)...(19): siRNA sense strand
ggauauccugcagauuauu

SEQ ID NO: 191996 - RNA, 19 nt, Homo sapiens
  misc_RNA (1)...(19): siRNA sense strand
agcaucaggccaaauguaa

SEQ ID NO: 191997 - RNA, 19 nt, Homo sapiens
  misc_RNA (1)...(19): siRNA sense strand
gcccuuugcuuggaucucu

SEQ ID NO: 191998 - RNA, 19 nt, Homo sapiens
  misc_RNA (1)...(19): siRNA sense strand
gcugaauguuuaugauacg

SEQ ID NO: 191999 - RNA, 19 nt, Homo sapiens
  misc_RNA (1)...(19): siRNA sense strand
agacuuugccaagguacua

SEQ ID NO: 192000 - RNA, 19 nt, Homo sapiens
  misc_RNA (1)...(19): siRNA sense strand
caagcaaguggcaaguuca

SEQ ID NO: 192001 - RNA, 19 nt, Homo sapiens
  misc_RNA (1)...(19): siRNA sense strand
agacaaguacagauaccuu

SEQ ID NO: 192002 - RNA, 19 nt, Homo sapiens
  misc_RNA (1)...(19): siRNA sense strand
gcaucauuucccuguguaa

SEQ ID NO: 192003 - RNA, 19 nt, Homo sapiens
  misc_RNA (1)...(19): siRNA sense strand
cugcaaagaguguccaauc

SEQ ID NO: 192004 - RNA, 19 nt, Homo sapiens
  misc_RNA (1)...(19): siRNA sense strand
cuuauaggacugccaugaa

SEQ ID NO: 192005 - RNA, 19 nt, Homo sapiens
  misc_RNA (1)...(19): siRNA sense strand
caaagaguguccaaucauu

SEQ ID NO: 192006 - RNA, 19 nt, Homo sapiens
  misc_RNA (1)...(19): siRNA sense strand
uagcugaccugaauaaugu

SEQ ID NO: 192007 - RNA, 19 nt, Homo sapiens
  misc_RNA (1)...(19): siRNA sense strand
gcaugauucuauccaaauu

SEQ ID NO: 192008 - RNA, 19 nt, Homo sapiens
  misc_RNA (1)...(19): siRNA sense strand
ugaacuggcugcugaaugu

SEQ ID NO: 192009 - RNA, 19 nt, Homo sapiens
  misc_RNA (1)...(19): siRNA sense strand
gauauccugcagauuauua

SEQ ID NO: 192010 - RNA, 19 nt, Homo sapiens
  misc_RNA (1)...(19): siRNA sense strand
gagaagauguucgagacuu

SEQ ID NO: 192011 - RNA, 19 nt, Homo sapiens
  misc_RNA (1)...(19): siRNA sense strand
gcacuuuaauuaugacauc

SEQ ID NO: 192012 - RNA, 19 nt, Homo sapiens
  misc_RNA (1)...(19): siRNA sense strand
guaaagcacauuuggaaga

SEQ ID NO: 192013 - RNA, 19 nt, Homo sapiens
  misc_RNA (1)...(19): siRNA sense strand
gaauauugcacuccgacua

SEQ ID NO: 192014 - RNA, 19 nt, Homo sapiens
  misc_RNA (1)...(19): siRNA sense strand
uuauaggacugccaugaaa

SEQ ID NO: 192015 - RNA, 19 nt, Homo sapiens
  misc_RNA (1)...(19): siRNA sense strand
gggugaaguugcauccuuu

SEQ ID NO: 192016 - RNA, 19 nt, Homo sapiens
  misc_RNA (1)...(19): siRNA sense strand
gcaagagcacaacaauuug

SEQ ID NO: 192017 - RNA, 19 nt, Homo sapiens
  misc_RNA (1)...(19): siRNA sense strand
gcacaacaauuuggucaac

SEQ ID NO: 192018 - RNA, 19 nt, Homo sapiens
  misc_RNA (1)...(19): siRNA sense strand
agcaagagcacaacaauuu

SEQ ID NO: 192019 - RNA, 19 nt, Homo sapiens
  misc_RNA (1)...(19): siRNA sense strand
agaagauguucgagacuuu

SEQ ID NO: 192020 - RNA, 19 nt, Homo sapiens
  misc_RNA (1)...(19): siRNA sense strand
gagcaagagcacaacaauu

SEQ ID NO: 192021 - RNA, 19 nt, Homo sapiens
  misc_RNA (1)...(19): siRNA sense strand
ucaagcaaguggcaaguuc

SEQ ID NO: 192022 - RNA, 19 nt, Homo sapiens
  misc_RNA (1)...(19): siRNA sense strand
ccacgagacucaaacaacu

SEQ ID NO: 192023 - RNA, 19 nt, Homo sapiens
  misc_RNA (1)...(19): siRNA sense strand
cagcacaaccucaagcaaa

SEQ ID NO: 192024 - RNA, 19 nt, Homo sapiens
  misc_RNA (1)...(19): siRNA sense strand
gcaaagaguguccaaucau

SEQ ID NO: 192025 - RNA, 19 nt, Homo sapiens
  misc_RNA (1)...(19): siRNA sense strand
auggauauccugcagauua

SEQ ID NO: 192026 - RNA, 19 nt, Homo sapiens
  misc_RNA (1)...(19): siRNA sense strand
uguaacaucugcaaagagu

SEQ ID NO: 192027 - RNA, 19 nt, Homo sapiens
  misc_RNA (1)...(19): siRNA sense strand
guccggagcugcuuccaau

SEQ ID NO: 192028 - RNA, 19 nt, Homo sapiens
  misc_RNA (1)...(19): siRNA sense strand
gcaaguggcaaguucaaca

SEQ ID NO: 192029 - RNA, 19 nt, Homo sapiens
  misc_RNA (1)...(19): siRNA sense strand
gcuuccaauuugcuaauaa

SEQ ID NO: 192030 - RNA, 19 nt, Homo sapiens
  misc_RNA (1)...(19): siRNA sense strand
uggaagacaaguacagaua

SEQ ID NO: 192031 - RNA, 19 nt, Homo sapiens
  misc_RNA (1)...(19): siRNA sense strand
ggauccguguccugucuuu

SEQ ID NO: 192032 - RNA, 19 nt, Homo sapiens
  misc_RNA (1)...(19): siRNA sense strand
gucuuuagcugaccugaau

SEQ ID NO: 192033 - RNA, 19 nt, Homo sapiens
  misc_RNA (1)...(19): siRNA sense strand
gacaaguacagauaccuuu

SEQ ID NO: 192034 - RNA, 19 nt, Homo sapiens
  misc_RNA (1)...(19): siRNA sense strand
ccaagcaucaggccaaaug

SEQ ID NO: 192035 - RNA, 19 nt, Homo sapiens
  misc_RNA (1)...(19): siRNA sense strand
ggagcaagagcacaacaau

SEQ ID NO: 192036 - RNA, 19 nt, Homo sapiens
  misc_RNA (1)...(19): siRNA sense strand
guguaaagcacauuuggaa

SEQ ID NO: 192037 - RNA, 19 nt, Homo sapiens
  misc_RNA (1)...(19): siRNA sense strand
caagacaguugggugaagu

SEQ ID NO: 192038 - RNA, 19 nt, Homo sapiens
  misc_RNA (1)...(19): siRNA sense strand
gaagauguucgagacuuug

SEQ ID NO: 192039 - RNA, 19 nt, Homo sapiens
  misc_RNA (1)...(19): siRNA sense strand
gucagauucucagcuuaua

SEQ ID NO: 192040 - RNA, 19 nt, Homo sapiens
  misc_RNA (1)...(19): siRNA sense strand
uaacaucugcaaagagugu

SEQ ID NO: 192041 - RNA, 19 nt, Homo sapiens
  misc_RNA (1)...(19): siRNA sense strand
cggagcugcuuccaauuug

SEQ ID NO: 192042 - RNA, 19 nt, Homo sapiens
  misc_RNA (1)...(19): siRNA sense strand
gaagacaaguacagauacc

SEQ ID NO: 192043 - RNA, 19 nt, Homo sapiens
  misc_RNA (1)...(19): siRNA sense strand
ccauggauauccugcagau

SEQ ID NO: 192044 - RNA, 19 nt, Homo sapiens
  misc_RNA (1)...(19): siRNA sense strand
ggcaucauuucccugugua

SEQ ID NO: 192045 - RNA, 19 nt, Homo sapiens
  misc_RNA (1)...(19): siRNA sense strand
uggauauccugcagauuau

SEQ ID NO: 192046 - RNA, 19 nt, Homo sapiens
  misc_RNA (1)...(19): siRNA sense strand
ggaagacaaguacagauac

SEQ ID NO: 192047 - RNA, 19 nt, Homo sapiens
  misc_RNA (1)...(19): siRNA sense strand
ugcaaagaguguccaauca

SEQ ID NO: 192048 - RNA, 19 nt, Homo sapiens
  misc_RNA (1)...(19): siRNA sense strand
guggauaugugucugaacu

SEQ ID NO: 192049 - RNA, 19 nt, Homo sapiens
  misc_RNA (1)...(19): siRNA sense strand
acuggcugcugaauguuua

SEQ ID NO: 192050 - RNA, 19 nt, Homo sapiens
  misc_RNA (1)...(19): siRNA sense strand
acuaucccaugguggaaua

SEQ ID NO: 192051 - RNA, 19 nt, Homo sapiens
  misc_RNA (1)...(19): siRNA sense strand
ccggagcugcuuccaauuu

SEQ ID NO: 192052 - RNA, 19 nt, Homo sapiens
  misc_RNA (1)...(19): siRNA sense strand
ccaaauuccaagacaguug

SEQ ID NO: 192053 - RNA, 19 nt, Homo sapiens
  misc_RNA (1)...(19): siRNA sense strand
cagaaacugccaagcauca

SEQ ID NO: 192054 - RNA, 19 nt, Homo sapiens
  misc_RNA (1)...(19): siRNA sense strand
uaugacaucugccaaagcu

SEQ ID NO: 192055 - RNA, 19 nt, Homo sapiens
  misc_RNA (1)...(19): siRNA sense strand
aaugucagauucucagcuu

SEQ ID NO: 192056 - RNA, 19 nt, Homo sapiens
  misc_RNA (1)...(19): siRNA sense strand
ucgagacuuugccaaggua

SEQ ID NO: 192057 - RNA, 19 nt, Homo sapiens
  misc_RNA (1)...(19): siRNA sense strand
gcaaaaggccauaaaaugc

SEQ ID NO: 192058 - RNA, 19 nt, Homo sapiens
  misc_RNA (1)...(19): siRNA sense strand
cugcaugauucuauccaaa

SEQ ID NO: 192059 - RNA, 19 nt, Homo sapiens
  misc_RNA (1)...(19): siRNA sense strand
uaaagcacauuuggaagac

SEQ ID NO: 192060 - RNA, 19 nt, Homo sapiens
  misc_RNA (1)...(19): siRNA sense strand
acaggagucuaaagcacuu

SEQ ID NO: 192061 - RNA, 19 nt, Homo sapiens
  misc_RNA (1)...(19): siRNA sense strand
acagauaccuuuucaagca

SEQ ID NO: 192062 - RNA, 19 nt, Homo sapiens
  misc_RNA (1)...(19): siRNA sense strand
aagcacauuuggaagacaa

SEQ ID NO: 192063 - RNA, 19 nt, Homo sapiens
  misc_RNA (1)...(19): siRNA sense strand
gcuaauaauaagccagaga

SEQ ID NO: 192064 - RNA, 19 nt, Homo sapiens
  misc_RNA (1)...(19): siRNA sense strand
caagagcacaacaauuugg

SEQ ID NO: 192065 - RNA, 19 nt, Homo sapiens
  misc_RNA (1)...(19): siRNA sense strand
ccugucagcugcaugugau

SEQ ID NO: 192066 - RNA, 19 nt, Homo sapiens
  misc_RNA (1)...(19): siRNA sense strand
gcugcugaauguuuaugau

SEQ ID NO: 192067 - RNA, 19 nt, Homo sapiens
  misc_RNA (1)...(19): siRNA sense strand
acagagcucuaccagucuu

SEQ ID NO: 192068 - RNA, 19 nt, Homo sapiens
  misc_RNA (1)...(19): siRNA sense strand
acaguugggugaaguugca

SEQ ID NO: 192069 - RNA, 19 nt, Homo sapiens
  misc_RNA (1)...(19): siRNA sense strand
guuugaccacuauuuauga

SEQ ID NO: 192070 - RNA, 19 nt, Homo sapiens
  misc_RNA (1)...(19): siRNA sense strand
gcuuauaggacugccauga

SEQ ID NO: 192071 - RNA, 19 nt, Homo sapiens
  misc_RNA (1)...(19): siRNA sense strand
caucaggccaaauguaaca

SEQ ID NO: 192072 - RNA, 19 nt, Homo sapiens
  misc_RNA (1)...(19): siRNA sense strand
gauucuauccaaauuccaa

SEQ ID NO: 192073 - RNA, 19 nt, Homo sapiens
  misc_RNA (1)...(19): siRNA sense strand
ggcaaguucaacaggauuu

SEQ ID NO: 192074 - RNA, 19 nt, Homo sapiens
  misc_RNA (1)...(19): siRNA sense strand
gaacuggcugcugaauguu

SEQ ID NO: 192075 - RNA, 19 nt, Homo sapiens
  misc_RNA (1)...(19): siRNA sense strand
cugcugaauguuuaugaua

SEQ ID NO: 192076 - RNA, 19 nt, Homo sapiens
  misc_RNA (1)...(19): siRNA sense strand
aagcaucaggccaaaugua

SEQ ID NO: 192077 - RNA, 19 nt, Homo sapiens
  misc_RNA (1)...(19): siRNA sense strand
uggcaucauuucccugugu

SEQ ID NO: 192078 - RNA, 19 nt, Homo sapiens
  misc_RNA (1)...(19): siRNA sense strand
ccaugaaacuccgaagacu

SEQ ID NO: 192079 - RNA, 19 nt, Homo sapiens
  misc_RNA (1)...(19): siRNA sense strand
auaauaagccagagaucga

SEQ ID NO: 192080 - RNA, 19 nt, Homo sapiens
  misc_RNA (1)...(19): siRNA sense strand
cuaauaauaagccagagau

SEQ ID NO: 192081 - RNA, 19 nt, Homo sapiens
  misc_RNA (1)...(19): siRNA sense strand
ugggugaaguugcauccuu

SEQ ID NO: 192082 - RNA, 19 nt, Homo sapiens
  misc_RNA (1)...(19): siRNA sense strand
caucauuucccuguguaaa

SEQ ID NO: 192083 - RNA, 19 nt, Homo sapiens
  misc_RNA (1)...(19): siRNA sense strand
gcguggauaugugucugaa

SEQ ID NO: 192084 - RNA, 19 nt, Homo sapiens
  misc_RNA (1)...(19): siRNA sense strand
gcacuaucccaugguggaa

SEQ ID NO: 192085 - RNA, 19 nt, Homo sapiens
  misc_RNA (1)...(19): siRNA sense strand
gagccugucagcugcaugu

SEQ ID NO: 192086 - RNA, 19 nt, Homo sapiens
  misc_RNA (1)...(19): siRNA sense strand
guacagauaccuuuucaag

SEQ ID NO: 192087 - RNA, 19 nt, Homo sapiens
  misc_RNA (1)...(19): siRNA sense strand
gucccucucugcguggaua

SEQ ID NO: 192088 - RNA, 19 nt, Homo sapiens
  misc_RNA (1)...(19): siRNA sense strand
ggagcugcuuccaauuugc

SEQ ID NO: 192089 - RNA, 19 nt, Homo sapiens
  misc_RNA (1)...(19): siRNA sense strand
uuagcugaccugaauaaug

SEQ ID NO: 192090 - RNA, 19 nt, Homo sapiens
  misc_RNA (1)...(19): siRNA sense strand
guggcaaguucaacaggau

SEQ ID NO: 192091 - RNA, 19 nt, Homo sapiens
  misc_RNA (1)...(19): siRNA sense strand
acaacaauuuggucaacgu

SEQ ID NO: 192092 - RNA, 19 nt, Homo sapiens
  misc_RNA (1)...(19): siRNA sense strand
gacuacaucaggagaagau

SEQ ID NO: 192093 - RNA, 19 nt, Homo sapiens
  misc_RNA (1)...(19): siRNA sense strand
uaauaagccagagaucgaa

SEQ ID NO: 192094 - RNA, 19 nt, Homo sapiens
  misc_RNA (1)...(19): siRNA sense strand
ugucagauucucagcuuau

SEQ ID NO: 192095 - RNA, 19 nt, Homo sapiens
  misc_RNA (1)...(19): siRNA sense strand
ggauauccugcagauuauu

SEQ ID NO: 192096 - RNA, 19 nt, Homo sapiens
  misc_RNA (1)...(19): siRNA sense strand
agcaucaggccaaauguaa

SEQ ID NO: 192097 - RNA, 19 nt, Homo sapiens
  misc_RNA (1)...(19): siRNA sense strand
gcccuuugcuuggaucucu

SEQ ID NO: 192098 - RNA, 19 nt, Homo sapiens
  misc_RNA (1)...(19): siRNA sense strand
gcugaauguuuaugauacg

SEQ ID NO: 192099 - RNA, 19 nt, Homo sapiens
  misc_RNA (1)...(19): siRNA sense strand
agacuuugccaagguacua

SEQ ID NO: 192100 - RNA, 19 nt, Homo sapiens
  misc_RNA (1)...(19): siRNA sense strand
caagcaaguggcaaguuca

SEQ ID NO: 192101 - RNA, 19 nt, Homo sapiens
  misc_RNA (1)...(19): siRNA sense strand
agacaaguacagauaccuu

SEQ ID NO: 192102 - RNA, 19 nt, Homo sapiens
  misc_RNA (1)...(19): siRNA sense strand
gcaucauuucccuguguaa

SEQ ID NO: 192103 - RNA, 19 nt, Homo sapiens
  misc_RNA (1)...(19): siRNA sense strand
cugcaaagaguguccaauc

SEQ ID NO: 192104 - RNA, 19 nt, Homo sapiens
  misc_RNA (1)...(19): siRNA sense strand
cuuauaggacugccaugaa

SEQ ID NO: 192105 - RNA, 19 nt, Homo sapiens
  misc_RNA (1)...(19): siRNA sense strand
caaagaguguccaaucauu

SEQ ID NO: 192106 - RNA, 19 nt, Homo sapiens
  misc_RNA (1)...(19): siRNA sense strand
uagcugaccugaauaaugu

SEQ ID NO: 192107 - RNA, 19 nt, Homo sapiens
  misc_RNA (1)...(19): siRNA sense strand
gcaugauucuauccaaauu

SEQ ID NO: 192108 - RNA, 19 nt, Homo sapiens
  misc_RNA (1)...(19): siRNA sense strand
ugaacuggcugcugaaugu

SEQ ID NO: 192109 - RNA, 19 nt, Homo sapiens
  misc_RNA (1)...(19): siRNA sense strand
gauauccugcagauuauua

SEQ ID NO: 192110 - RNA, 19 nt, Homo sapiens
  misc_RNA (1)...(19): siRNA sense strand
gagaagauguucgagacuu

SEQ ID NO: 192111 - RNA, 19 nt, Homo sapiens
  misc_RNA (1)...(19): siRNA sense strand
gcacuuuaauuaugacauc

SEQ ID NO: 192112 - RNA, 19 nt, Homo sapiens
  misc_RNA (1)...(19): siRNA sense strand
guaaagcacauuuggaaga

SEQ ID NO: 192113 - RNA, 19 nt, Homo sapiens
  misc_RNA (1)...(19): siRNA sense strand
gaauauugcacuccgacua

SEQ ID NO: 192114 - RNA, 19 nt, Homo sapiens
  misc_RNA (1)...(19): siRNA sense strand
uuauaggacugccaugaaa

SEQ ID NO: 192115 - RNA, 19 nt, Homo sapiens
  misc_RNA (1)...(19): siRNA sense strand
gggugaaguugcauccuuu

SEQ ID NO: 192116 - RNA, 19 nt, Homo sapiens
  misc_RNA (1)...(19): siRNA sense strand
gcaagagcacaacaauuug

SEQ ID NO: 192117 - RNA, 19 nt, Homo sapiens
  misc_RNA (1)...(19): siRNA sense strand
gcacaacaauuuggucaac

SEQ ID NO: 192118 - RNA, 19 nt, Homo sapiens
  misc_RNA (1)...(19): siRNA sense strand
agcaagagcacaacaauuu

SEQ ID NO: 192119 - RNA, 19 nt, Homo sapiens
  misc_RNA (1)...(19): siRNA sense strand
agaagauguucgagacuuu

SEQ ID NO: 192120 - RNA, 19 nt, Homo sapiens
  misc_RNA (1)...(19): siRNA sense strand
gagcaagagcacaacaauu

SEQ ID NO: 192121 - RNA, 19 nt, Homo sapiens
  misc_RNA (1)...(19): siRNA sense strand
ucaagcaaguggcaaguuc

SEQ ID NO: 192122 - RNA, 19 nt, Homo sapiens
  misc_RNA (1)...(19): siRNA sense strand
ccacgagacucaaacaacu

SEQ ID NO: 192123 - RNA, 19 nt, Homo sapiens
  misc_RNA (1)...(19): siRNA sense strand
cagcacaaccucaagcaaa

SEQ ID NO: 192124 - RNA, 19 nt, Homo sapiens
  misc_RNA (1)...(19): siRNA sense strand
gcaaagaguguccaaucau

SEQ ID NO: 192125 - RNA, 19 nt, Homo sapiens
  misc_RNA (1)...(19): siRNA sense strand
auggauauccugcagauua

SEQ ID NO: 192126 - RNA, 19 nt, Homo sapiens
  misc_RNA (1)...(19): siRNA sense strand
uguaacaucugcaaagagu

SEQ ID NO: 192127 - RNA, 19 nt, Homo sapiens
  misc_RNA (1)...(19): siRNA sense strand
guccggagcugcuuccaau

SEQ ID NO: 192128 - RNA, 19 nt, Homo sapiens
  misc_RNA (1)...(19): siRNA sense strand
gcaaguggcaaguucaaca

SEQ ID NO: 192129 - RNA, 19 nt, Homo sapiens
  misc_RNA (1)...(19): siRNA sense strand
gcuuccaauuugcuaauaa

SEQ ID NO: 192130 - RNA, 19 nt, Homo sapiens
  misc_RNA (1)...(19): siRNA sense strand
uggaagacaaguacagaua

SEQ ID NO: 192131 - RNA, 19 nt, Homo sapiens
  misc_RNA (1)...(19): siRNA sense strand
ggauccguguccugucuuu

SEQ ID NO: 192132 - RNA, 19 nt, Homo sapiens
  misc_RNA (1)...(19): siRNA sense strand
gucuuuagcugaccugaau

SEQ ID NO: 192133 - RNA, 19 nt, Homo sapiens
  misc_RNA (1)...(19): siRNA sense strand
gacaaguacagauaccuuu

SEQ ID NO: 192134 - RNA, 19 nt, Homo sapiens
  misc_RNA (1)...(19): siRNA sense strand
ccaagcaucaggccaaaug

SEQ ID NO: 192135 - RNA, 19 nt, Homo sapiens
  misc_RNA (1)...(19): siRNA sense strand
ggagcaagagcacaacaau

SEQ ID NO: 192136 - RNA, 19 nt, Homo sapiens
  misc_RNA (1)...(19): siRNA sense strand
guguaaagcacauuuggaa

SEQ ID NO: 192137 - RNA, 19 nt, Homo sapiens
  misc_RNA (1)...(19): siRNA sense strand
caagacaguugggugaagu

SEQ ID NO: 192138 - RNA, 19 nt, Homo sapiens
  misc_RNA (1)...(19): siRNA sense strand
gaagauguucgagacuuug

SEQ ID NO: 192139 - RNA, 19 nt, Homo sapiens
  misc_RNA (1)...(19): siRNA sense strand
gucagauucucagcuuaua

SEQ ID NO: 192140 - RNA, 19 nt, Homo sapiens
  misc_RNA (1)...(19): siRNA sense strand
uaacaucugcaaagagugu

SEQ ID NO: 192141 - RNA, 19 nt, Homo sapiens
  misc_RNA (1)...(19): siRNA sense strand
cggagcugcuuccaauuug

SEQ ID NO: 192142 - RNA, 19 nt, Homo sapiens
  misc_RNA (1)...(19): siRNA sense strand
gaagacaaguacagauacc

SEQ ID NO: 192143 - RNA, 19 nt, Homo sapiens
  misc_RNA (1)...(19): siRNA sense strand
ccauggauauccugcagau

SEQ ID NO: 192144 - RNA, 19 nt, Homo sapiens
  misc_RNA (1)...(19): siRNA sense strand
ggcaucauuucccugugua

SEQ ID NO: 192145 - RNA, 19 nt, Homo sapiens
  misc_RNA (1)...(19): siRNA sense strand
uggauauccugcagauuau

SEQ ID NO: 192146 - RNA, 19 nt, Homo sapiens
  misc_RNA (1)...(19): siRNA sense strand
ggaagacaaguacagauac

SEQ ID NO: 192147 - RNA, 19 nt, Homo sapiens
  misc_RNA (1)...(19): siRNA sense strand
ugcaaagaguguccaauca

SEQ ID NO: 192148 - RNA, 19 nt, Homo sapiens
  misc_RNA (1)...(19): siRNA sense strand
guggauaugugucugaacu

SEQ ID NO: 192149 - RNA, 19 nt, Homo sapiens
  misc_RNA (1)...(19): siRNA sense strand
acuggcugcugaauguuua

SEQ ID NO: 192150 - RNA, 19 nt, Homo sapiens
  misc_RNA (1)...(19): siRNA sense strand
acuaucccaugguggaaua

SEQ ID NO: 192151 - RNA, 19 nt, Homo sapiens
  misc_RNA (1)...(19): siRNA sense strand
ccggagcugcuuccaauuu

SEQ ID NO: 192152 - RNA, 19 nt, Homo sapiens
  misc_RNA (1)...(19): siRNA sense strand
ccaaauuccaagacaguug

SEQ ID NO: 192153 - RNA, 19 nt, Homo sapiens
  misc_RNA (1)...(19): siRNA sense strand
cagaaacugccaagcauca

SEQ ID NO: 192154 - RNA, 19 nt, Homo sapiens
  misc_RNA (1)...(19): siRNA sense strand
uaugacaucugccaaagcu

SEQ ID NO: 192155 - RNA, 19 nt, Homo sapiens
  misc_RNA (1)...(19): siRNA sense strand
aaugucagauucucagcuu

SEQ ID NO: 192156 - RNA, 19 nt, Homo sapiens
  misc_RNA (1)...(19): siRNA sense strand
ucgagacuuugccaaggua

SEQ ID NO: 192157 - RNA, 19 nt, Homo sapiens
  misc_RNA (1)...(19): siRNA sense strand
gcaaaaggccauaaaaugc

SEQ ID NO: 192158 - RNA, 19 nt, Homo sapiens
  misc_RNA (1)...(19): siRNA sense strand
cugcaugauucuauccaaa

SEQ ID NO: 192159 - RNA, 19 nt, Homo sapiens
  misc_RNA (1)...(19): siRNA sense strand
uaaagcacauuuggaagac

SEQ ID NO: 192160 - RNA, 19 nt, Homo sapiens
  misc_RNA (1)...(19): siRNA sense strand
acaggagucuaaagcacuu

SEQ ID NO: 192161 - RNA, 19 nt, Homo sapiens
  misc_RNA (1)...(19): siRNA sense strand
acagauaccuuuucaagca

SEQ ID NO: 192162 - RNA, 19 nt, Homo sapiens
  misc_RNA (1)...(19): siRNA sense strand
aagcacauuuggaagacaa

SEQ ID NO: 192163 - RNA, 19 nt, Homo sapiens
  misc_RNA (1)...(19): siRNA sense strand
gcuaauaauaagccagaga

SEQ ID NO: 192164 - RNA, 19 nt, Homo sapiens
  misc_RNA (1)...(19): siRNA sense strand
caagagcacaacaauuugg

SEQ ID NO: 192165 - RNA, 19 nt, Homo sapiens
  misc_RNA (1)...(19): siRNA sense strand
ccugucagcugcaugugau

SEQ ID NO: 192166 - RNA, 19 nt, Homo sapiens
  misc_RNA (1)...(19): siRNA sense strand
gcugcugaauguuuaugau

SEQ ID NO: 192167 - RNA, 19 nt, Homo sapiens
  misc_RNA (1)...(19): siRNA sense strand
acagagcucuaccagucuu

SEQ ID NO: 192168 - RNA, 19 nt, Homo sapiens
  misc_RNA (1)...(19): siRNA sense strand
acaguugggugaaguugca

SEQ ID NO: 192169 - RNA, 19 nt, Homo sapiens
  misc_RNA (1)...(19): siRNA sense strand
guuugaccacuauuuauga

SEQ ID NO: 192170 - RNA, 19 nt, Homo sapiens
  misc_RNA (1)...(19): siRNA sense strand
gcuuauaggacugccauga

SEQ ID NO: 192171 - RNA, 19 nt, Homo sapiens
  misc_RNA (1)...(19): siRNA sense strand
caucaggccaaauguaaca

SEQ ID NO: 192172 - RNA, 19 nt, Homo sapiens
  misc_RNA (1)...(19): siRNA sense strand
gauucuauccaaauuccaa

SEQ ID NO: 192173 - RNA, 19 nt, Homo sapiens
  misc_RNA (1)...(19): siRNA sense strand
ggcaaguucaacaggauuu

SEQ ID NO: 192174 - RNA, 19 nt, Homo sapiens
  misc_RNA (1)...(19): siRNA sense strand
gaacuggcugcugaauguu

SEQ ID NO: 192175 - RNA, 19 nt, Homo sapiens
  misc_RNA (1)...(19): siRNA sense strand
cugcugaauguuuaugaua

SEQ ID NO: 192176 - RNA, 19 nt, Homo sapiens
  misc_RNA (1)...(19): siRNA sense strand
aagcaucaggccaaaugua

SEQ ID NO: 192177 - RNA, 19 nt, Homo sapiens
  misc_RNA (1)...(19): siRNA sense strand
uggcaucauuucccugugu

SEQ ID NO: 192178 - RNA, 19 nt, Homo sapiens
  misc_RNA (1)...(19): siRNA sense strand
ccaugaaacuccgaagacu

SEQ ID NO: 192179 - RNA, 19 nt, Homo sapiens
  misc_RNA (1)...(19): siRNA sense strand
auaauaagccagagaucga

SEQ ID NO: 192180 - RNA, 19 nt, Homo sapiens
  misc_RNA (1)...(19): siRNA sense strand
cuaauaauaagccagagau

SEQ ID NO: 192181 - RNA, 19 nt, Homo sapiens
  misc_RNA (1)...(19): siRNA sense strand
ugggugaaguugcauccuu

SEQ ID NO: 192182 - RNA, 19 nt, Homo sapiens
  misc_RNA (1)...(19): siRNA sense strand
caucauuucccuguguaaa

SEQ ID NO: 192183 - RNA, 19 nt, Homo sapiens
  misc_RNA (1)...(19): siRNA sense strand
gcguggauaugugucugaa

SEQ ID NO: 192184 - RNA, 19 nt, Homo sapiens
  misc_RNA (1)...(19): siRNA sense strand
gcacuaucccaugguggaa

SEQ ID NO: 192185 - RNA, 19 nt, Homo sapiens
  misc_RNA (1)...(19): siRNA sense strand
gagccugucagcugcaugu

SEQ ID NO: 192186 - RNA, 19 nt, Homo sapiens
  misc_RNA (1)...(19): siRNA sense strand
guacagauaccuuuucaag

SEQ ID NO: 192187 - RNA, 19 nt, Homo sapiens
  misc_RNA (1)...(19): siRNA sense strand
gucccucucugcguggaua

SEQ ID NO: 192188 - RNA, 19 nt, Homo sapiens
  misc_RNA (1)...(19): siRNA sense strand
ggagcugcuuccaauuugc

SEQ ID NO: 192189 - RNA, 19 nt, Homo sapiens
  misc_RNA (1)...(19): siRNA sense strand
uuagcugaccugaauaaug

SEQ ID NO: 192190 - RNA, 19 nt, Homo sapiens
  misc_RNA (1)...(19): siRNA sense strand
guggcaaguucaacaggau

SEQ ID NO: 192191 - RNA, 19 nt, Homo sapiens
  misc_RNA (1)...(19): siRNA sense strand
acaacaauuuggucaacgu

SEQ ID NO: 192192 - RNA, 19 nt, Homo sapiens
  misc_RNA (1)...(19): siRNA sense strand
gacuacaucaggagaagau

SEQ ID NO: 192193 - RNA, 19 nt, Homo sapiens
  misc_RNA (1)...(19): siRNA sense strand
uaauaagccagagaucgaa

SEQ ID NO: 192194 - RNA, 19 nt, Homo sapiens
  misc_RNA (1)...(19): siRNA sense strand
ugucagauucucagcuuau

SEQ ID NO: 192195 - RNA, 19 nt, Homo sapiens
  misc_RNA (1)...(19): siRNA sense strand
ggauauccugcagauuauu

SEQ ID NO: 192196 - RNA, 19 nt, Homo sapiens
  misc_RNA (1)...(19): siRNA sense strand
agcaucaggccaaauguaa

SEQ ID NO: 192197 - RNA, 19 nt, Homo sapiens
  misc_RNA (1)...(19): siRNA sense strand
gcccuuugcuuggaucucu

SEQ ID NO: 192198 - RNA, 19 nt, Homo sapiens
  misc_RNA (1)...(19): siRNA sense strand
gcugaauguuuaugauacg

SEQ ID NO: 192199 - RNA, 19 nt, Homo sapiens
  misc_RNA (1)...(19): siRNA sense strand
agacuuugccaagguacua

SEQ ID NO: 192200 - RNA, 19 nt, Homo sapiens
  misc_RNA (1)...(19): siRNA sense strand
caagcaaguggcaaguuca

SEQ ID NO: 192201 - RNA, 19 nt, Homo sapiens
  misc_RNA (1)...(19): siRNA sense strand
agacaaguacagauaccuu

SEQ ID NO: 192202 - RNA, 19 nt, Homo sapiens
  misc_RNA (1)...(19): siRNA sense strand
gcaucauuucccuguguaa

SEQ ID NO: 192203 - RNA, 19 nt, Homo sapiens
  misc_RNA (1)...(19): siRNA sense strand
cugcaaagaguguccaauc

SEQ ID NO: 192204 - RNA, 19 nt, Homo sapiens
  misc_RNA (1)...(19): siRNA sense strand
cuuauaggacugccaugaa

SEQ ID NO: 192205 - RNA, 19 nt, Homo sapiens
  misc_RNA (1)...(19): siRNA sense strand
caaagaguguccaaucauu

SEQ ID NO: 192206 - RNA, 19 nt, Homo sapiens
  misc_RNA (1)...(19): siRNA sense strand
uagcugaccugaauaaugu

SEQ ID NO: 192207 - RNA, 19 nt, Homo sapiens
  misc_RNA (1)...(19): siRNA sense strand
gcaugauucuauccaaauu

SEQ ID NO: 192208 - RNA, 19 nt, Homo sapiens
  misc_RNA (1)...(19): siRNA sense strand
ugaacuggcugcugaaugu

SEQ ID NO: 192209 - RNA, 19 nt, Homo sapiens
  misc_RNA (1)...(19): siRNA sense strand
gauauccugcagauuauua

SEQ ID NO: 192210 - RNA, 19 nt, Homo sapiens
  misc_RNA (1)...(19): siRNA sense strand
gagaagauguucgagacuu

SEQ ID NO: 192211 - RNA, 19 nt, Homo sapiens
  misc_RNA (1)...(19): siRNA sense strand
gcacuuuaauuaugacauc

SEQ ID NO: 192212 - RNA, 19 nt, Homo sapiens
  misc_RNA (1)...(19): siRNA sense strand
guaaagcacauuuggaaga

SEQ ID NO: 192213 - RNA, 19 nt, Homo sapiens
  misc_RNA (1)...(19): siRNA sense strand
gaauauugcacuccgacua

SEQ ID NO: 192214 - RNA, 19 nt, Homo sapiens
  misc_RNA (1)...(19): siRNA sense strand
uuauaggacugccaugaaa

SEQ ID NO: 192215 - RNA, 19 nt, Homo sapiens
  misc_RNA (1)...(19): siRNA sense strand
gggugaaguugcauccuuu

SEQ ID NO: 192216 - RNA, 19 nt, Homo sapiens
  misc_RNA (1)...(19): siRNA sense strand
gcaagagcacaacaauuug

SEQ ID NO: 192217 - RNA, 19 nt, Homo sapiens
  misc_RNA (1)...(19): siRNA sense strand
gcacaacaauuuggucaac

SEQ ID NO: 192218 - RNA, 19 nt, Homo sapiens
  misc_RNA (1)...(19): siRNA sense strand
agcaagagcacaacaauuu

SEQ ID NO: 192219 - RNA, 19 nt, Homo sapiens
  misc_RNA (1)...(19): siRNA sense strand
agaagauguucgagacuuu

SEQ ID NO: 192220 - RNA, 19 nt, Homo sapiens
  misc_RNA (1)...(19): siRNA sense strand
gagcaagagcacaacaauu

SEQ ID NO: 192221 - RNA, 19 nt, Homo sapiens
  misc_RNA (1)...(19): siRNA sense strand
ucaagcaaguggcaaguuc

SEQ ID NO: 192222 - RNA, 19 nt, Homo sapiens
  misc_RNA (1)...(19): siRNA sense strand
ccacgagacucaaacaacu

SEQ ID NO: 192223 - RNA, 19 nt, Homo sapiens
  misc_RNA (1)...(19): siRNA sense strand
cagcacaaccucaagcaaa

SEQ ID NO: 192224 - RNA, 19 nt, Homo sapiens
  misc_RNA (1)...(19): siRNA sense strand
gcaaagaguguccaaucau

SEQ ID NO: 192225 - RNA, 19 nt, Homo sapiens
  misc_RNA (1)...(19): siRNA sense strand
auggauauccugcagauua

SEQ ID NO: 192226 - RNA, 19 nt, Homo sapiens
  misc_RNA (1)...(19): siRNA sense strand
uguaacaucugcaaagagu

SEQ ID NO: 192227 - RNA, 19 nt, Homo sapiens
  misc_RNA (1)...(19): siRNA sense strand
guccggagcugcuuccaau

SEQ ID NO: 192228 - RNA, 19 nt, Homo sapiens
  misc_RNA (1)...(19): siRNA sense strand
gcaaguggcaaguucaaca

SEQ ID NO: 192229 - RNA, 19 nt, Homo sapiens
  misc_RNA (1)...(19): siRNA sense strand
gcuuccaauuugcuaauaa

SEQ ID NO: 192230 - RNA, 19 nt, Homo sapiens
  misc_RNA (1)...(19): siRNA sense strand
uggaagacaaguacagaua

SEQ ID NO: 192231 - RNA, 19 nt, Homo sapiens
  misc_RNA (1)...(19): siRNA sense strand
ggauccguguccugucuuu

SEQ ID NO: 192232 - RNA, 19 nt, Homo sapiens
  misc_RNA (1)...(19): siRNA sense strand
gucuuuagcugaccugaau

SEQ ID NO: 192233 - RNA, 19 nt, Homo sapiens
  misc_RNA (1)...(19): siRNA sense strand
gacaaguacagauaccuuu

SEQ ID NO: 192234 - RNA, 19 nt, Homo sapiens
  misc_RNA (1)...(19): siRNA sense strand
ccaagcaucaggccaaaug

SEQ ID NO: 192235 - RNA, 19 nt, Homo sapiens
  misc_RNA (1)...(19): siRNA sense strand
ggagcaagagcacaacaau

SEQ ID NO: 192236 - RNA, 19 nt, Homo sapiens
  misc_RNA (1)...(19): siRNA sense strand
guguaaagcacauuuggaa

SEQ ID NO: 192237 - RNA, 19 nt, Homo sapiens
  misc_RNA (1)...(19): siRNA sense strand
caagacaguugggugaagu

SEQ ID NO: 192238 - RNA, 19 nt, Homo sapiens
  misc_RNA (1)...(19): siRNA sense strand
gaagauguucgagacuuug

SEQ ID NO: 192239 - RNA, 19 nt, Homo sapiens
  misc_RNA (1)...(19): siRNA sense strand
gucagauucucagcuuaua

SEQ ID NO: 192240 - RNA, 19 nt, Homo sapiens
  misc_RNA (1)...(19): siRNA sense strand
uaacaucugcaaagagugu

SEQ ID NO: 192241 - RNA, 19 nt, Homo sapiens
  misc_RNA (1)...(19): siRNA sense strand
cggagcugcuuccaauuug

SEQ ID NO: 192242 - RNA, 19 nt, Homo sapiens
  misc_RNA (1)...(19): siRNA sense strand
gaagacaaguacagauacc

SEQ ID NO: 192243 - RNA, 19 nt, Homo sapiens
  misc_RNA (1)...(19): siRNA sense strand
ccauggauauccugcagau

SEQ ID NO: 192244 - RNA, 19 nt, Homo sapiens
  misc_RNA (1)...(19): siRNA sense strand
ggcaucauuucccugugua

SEQ ID NO: 192245 - RNA, 19 nt, Homo sapiens
  misc_RNA (1)...(19): siRNA sense strand
uggauauccugcagauuau

SEQ ID NO: 192246 - RNA, 19 nt, Homo sapiens
  misc_RNA (1)...(19): siRNA sense strand
ggaagacaaguacagauac

SEQ ID NO: 192247 - RNA, 19 nt, Homo sapiens
  misc_RNA (1)...(19): siRNA sense strand
ugcaaagaguguccaauca

SEQ ID NO: 192248 - RNA, 19 nt, Homo sapiens
  misc_RNA (1)...(19): siRNA sense strand
guggauaugugucugaacu

SEQ ID NO: 192249 - RNA, 19 nt, Homo sapiens
  misc_RNA (1)...(19): siRNA sense strand
acuggcugcugaauguuua

SEQ ID NO: 192250 - RNA, 19 nt, Homo sapiens
  misc_RNA (1)...(19): siRNA sense strand
acuaucccaugguggaaua

SEQ ID NO: 192251 - RNA, 19 nt, Homo sapiens
  misc_RNA (1)...(19): siRNA sense strand
ccggagcugcuuccaauuu

SEQ ID NO: 192252 - RNA, 19 nt, Homo sapiens
  misc_RNA (1)...(19): siRNA sense strand
ccaaauuccaagacaguug

SEQ ID NO: 192253 - RNA, 19 nt, Homo sapiens
  misc_RNA (1)...(19): siRNA sense strand
cagaaacugccaagcauca

SEQ ID NO: 192254 - RNA, 19 nt, Homo sapiens
  misc_RNA (1)...(19): siRNA sense strand
uaugacaucugccaaagcu

SEQ ID NO: 192255 - RNA, 19 nt, Homo sapiens
  misc_RNA (1)...(19): siRNA sense strand
aaugucagauucucagcuu

SEQ ID NO: 192256 - RNA, 19 nt, Homo sapiens
  misc_RNA (1)...(19): siRNA sense strand
ucgagacuuugccaaggua

SEQ ID NO: 192257 - RNA, 19 nt, Homo sapiens
  misc_RNA (1)...(19): siRNA sense strand
gcaaaaggccauaaaaugc

SEQ ID NO: 192258 - RNA, 19 nt, Homo sapiens
  misc_RNA (1)...(19): siRNA sense strand
cugcaugauucuauccaaa

SEQ ID NO: 192259 - RNA, 19 nt, Homo sapiens
  misc_RNA (1)...(19): siRNA sense strand
uaaagcacauuuggaagac

SEQ ID NO: 192260 - RNA, 19 nt, Homo sapiens
  misc_RNA (1)...(19): siRNA sense strand
acaggagucuaaagcacuu

SEQ ID NO: 192261 - RNA, 19 nt, Homo sapiens
  misc_RNA (1)...(19): siRNA sense strand
acagauaccuuuucaagca

SEQ ID NO: 192262 - RNA, 19 nt, Homo sapiens
  misc_RNA (1)...(19): siRNA sense strand
aagcacauuuggaagacaa

SEQ ID NO: 192263 - RNA, 19 nt, Homo sapiens
  misc_RNA (1)...(19): siRNA sense strand
gcuaauaauaagccagaga

SEQ ID NO: 192264 - RNA, 19 nt, Homo sapiens
  misc_RNA (1)...(19): siRNA sense strand
caagagcacaacaauuugg

SEQ ID NO: 192265 - RNA, 19 nt, Homo sapiens
  misc_RNA (1)...(19): siRNA sense strand
ccugucagcugcaugugau

SEQ ID NO: 192266 - RNA, 19 nt, Homo sapiens
  misc_RNA (1)...(19): siRNA sense strand
gcugcugaauguuuaugau

SEQ ID NO: 192267 - RNA, 19 nt, Homo sapiens
  misc_RNA (1)...(19): siRNA sense strand
acagagcucuaccagucuu

SEQ ID NO: 192268 - RNA, 19 nt, Homo sapiens
  misc_RNA (1)...(19): siRNA sense strand
acaguugggugaaguugca

SEQ ID NO: 192269 - RNA, 19 nt, Homo sapiens
  misc_RNA (1)...(19): siRNA sense strand
guuugaccacuauuuauga

SEQ ID NO: 192270 - RNA, 19 nt, Homo sapiens
  misc_RNA (1)...(19): siRNA sense strand
gcuuauaggacugccauga

SEQ ID NO: 192271 - RNA, 19 nt, Homo sapiens
  misc_RNA (1)...(19): siRNA sense strand
caucaggccaaauguaaca

SEQ ID NO: 192272 - RNA, 19 nt, Homo sapiens
  misc_RNA (1)...(19): siRNA sense strand
gauucuauccaaauuccaa

SEQ ID NO: 192273 - RNA, 19 nt, Homo sapiens
  misc_RNA (1)...(19): siRNA sense strand
ggcaaguucaacaggauuu

SEQ ID NO: 192274 - RNA, 19 nt, Homo sapiens
  misc_RNA (1)...(19): siRNA sense strand
gaacuggcugcugaauguu

SEQ ID NO: 192275 - RNA, 19 nt, Homo sapiens
  misc_RNA (1)...(19): siRNA sense strand
cugcugaauguuuaugaua

SEQ ID NO: 192276 - RNA, 19 nt, Homo sapiens
  misc_RNA (1)...(19): siRNA sense strand
aagcaucaggccaaaugua

SEQ ID NO: 192277 - RNA, 19 nt, Homo sapiens
  misc_RNA (1)...(19): siRNA sense strand
uggcaucauuucccugugu

SEQ ID NO: 192278 - RNA, 19 nt, Homo sapiens
  misc_RNA (1)...(19): siRNA sense strand
ccaugaaacuccgaagacu

SEQ ID NO: 192279 - RNA, 19 nt, Homo sapiens
  misc_RNA (1)...(19): siRNA sense strand
auaauaagccagagaucga

SEQ ID NO: 192280 - RNA, 19 nt, Homo sapiens
  misc_RNA (1)...(19): siRNA sense strand
cuaauaauaagccagagau

SEQ ID NO: 192281 - RNA, 19 nt, Homo sapiens
  misc_RNA (1)...(19): siRNA sense strand
ugggugaaguugcauccuu

SEQ ID NO: 192282 - RNA, 19 nt, Homo sapiens
  misc_RNA (1)...(19): siRNA sense strand
caucauuucccuguguaaa

SEQ ID NO: 192283 - RNA, 19 nt, Homo sapiens
  misc_RNA (1)...(19): siRNA sense strand
gcguggauaugugucugaa

SEQ ID NO: 192284 - RNA, 19 nt, Homo sapiens
  misc_RNA (1)...(19): siRNA sense strand
gcacuaucccaugguggaa

SEQ ID NO: 192285 - RNA, 19 nt, Homo sapiens
  misc_RNA (1)...(19): siRNA sense strand
gagccugucagcugcaugu

SEQ ID NO: 192286 - RNA, 19 nt, Homo sapiens
  misc_RNA (1)...(19): siRNA sense strand
guacagauaccuuuucaag

SEQ ID NO: 192287 - RNA, 19 nt, Homo sapiens
  misc_RNA (1)...(19): siRNA sense strand
gucccucucugcguggaua

SEQ ID NO: 192288 - RNA, 19 nt, Homo sapiens
  misc_RNA (1)...(19): siRNA sense strand
ggagcugcuuccaauuugc

SEQ ID NO: 192289 - RNA, 19 nt, Homo sapiens
  misc_RNA (1)...(19): siRNA sense strand
uuagcugaccugaauaaug

SEQ ID NO: 192290 - RNA, 19 nt, Homo sapiens
  misc_RNA (1)...(19): siRNA sense strand
guggcaaguucaacaggau

SEQ ID NO: 192291 - RNA, 19 nt, Homo sapiens
  misc_RNA (1)...(19): siRNA sense strand
acaacaauuuggucaacgu

SEQ ID NO: 192292 - RNA, 19 nt, Homo sapiens
  misc_RNA (1)...(19): siRNA sense strand
gacuacaucaggagaagau

SEQ ID NO: 192293 - RNA, 19 nt, Homo sapiens
  misc_RNA (1)...(19): siRNA sense strand
uaauaagccagagaucgaa

SEQ ID NO: 192294 - RNA, 19 nt, Homo sapiens
  misc_RNA (1)...(19): siRNA sense strand
ugucagauucucagcuuau

SEQ ID NO: 192295 - RNA, 19 nt, Homo sapiens
  misc_RNA (1)...(19): siRNA sense strand
ggauauccugcagauuauu

SEQ ID NO: 192296 - RNA, 19 nt, Homo sapiens
  misc_RNA (1)...(19): siRNA sense strand
agcaucaggccaaauguaa

SEQ ID NO: 192297 - RNA, 19 nt, Homo sapiens
  misc_RNA (1)...(19): siRNA sense strand
gcccuuugcuuggaucucu

SEQ ID NO: 192298 - RNA, 19 nt, Homo sapiens
  misc_RNA (1)...(19): siRNA sense strand
gcugaauguuuaugauacg

SEQ ID NO: 192299 - RNA, 19 nt, Homo sapiens
  misc_RNA (1)...(19): siRNA sense strand
agacuuugccaagguacua

SEQ ID NO: 192300 - RNA, 19 nt, Homo sapiens
  misc_RNA (1)...(19): siRNA sense strand
caagcaaguggcaaguuca

SEQ ID NO: 192301 - RNA, 19 nt, Homo sapiens
  misc_RNA (1)...(19): siRNA sense strand
agacaaguacagauaccuu

SEQ ID NO: 192302 - RNA, 19 nt, Homo sapiens
  misc_RNA (1)...(19): siRNA sense strand
gcaucauuucccuguguaa

SEQ ID NO: 192303 - RNA, 19 nt, Homo sapiens
  misc_RNA (1)...(19): siRNA sense strand
cugcaaagaguguccaauc

SEQ ID NO: 192304 - RNA, 19 nt, Homo sapiens
  misc_RNA (1)...(19): siRNA sense strand
cuuauaggacugccaugaa

SEQ ID NO: 192305 - RNA, 19 nt, Homo sapiens
  misc_RNA (1)...(19): siRNA sense strand
caaagaguguccaaucauu

SEQ ID NO: 192306 - RNA, 19 nt, Homo sapiens
  misc_RNA (1)...(19): siRNA sense strand
uagcugaccugaauaaugu

SEQ ID NO: 192307 - RNA, 19 nt, Homo sapiens
  misc_RNA (1)...(19): siRNA sense strand
gcaugauucuauccaaauu

SEQ ID NO: 192308 - RNA, 19 nt, Homo sapiens
  misc_RNA (1)...(19): siRNA sense strand
ugaacuggcugcugaaugu

SEQ ID NO: 192309 - RNA, 19 nt, Homo sapiens
  misc_RNA (1)...(19): siRNA sense strand
gauauccugcagauuauua

SEQ ID NO: 192310 - RNA, 19 nt, Homo sapiens
  misc_RNA (1)...(19): siRNA sense strand
gagaagauguucgagacuu

SEQ ID NO: 192311 - RNA, 19 nt, Homo sapiens
  misc_RNA (1)...(19): siRNA sense strand
gcacuuuaauuaugacauc

SEQ ID NO: 192312 - RNA, 19 nt, Homo sapiens
  misc_RNA (1)...(19): siRNA sense strand
guaaagcacauuuggaaga

SEQ ID NO: 192313 - RNA, 19 nt, Homo sapiens
  misc_RNA (1)...(19): siRNA sense strand
gaauauugcacuccgacua

SEQ ID NO: 192314 - RNA, 19 nt, Homo sapiens
  misc_RNA (1)...(19): siRNA sense strand
uuauaggacugccaugaaa

SEQ ID NO: 192315 - RNA, 19 nt, Homo sapiens
  misc_RNA (1)...(19): siRNA sense strand
gggugaaguugcauccuuu

SEQ ID NO: 192316 - RNA, 19 nt, Homo sapiens
  misc_RNA (1)...(19): siRNA sense strand
gcaagagcacaacaauuug

SEQ ID NO: 192317 - RNA, 19 nt, Homo sapiens
  misc_RNA (1)...(19): siRNA sense strand
gcacaacaauuuggucaac

SEQ ID NO: 192318 - RNA, 19 nt, Homo sapiens
  misc_RNA (1)...(19): siRNA sense strand
agcaagagcacaacaauuu

SEQ ID NO: 192319 - RNA, 19 nt, Homo sapiens
  misc_RNA (1)...(19): siRNA sense strand
agaagauguucgagacuuu

SEQ ID NO: 192320 - RNA, 19 nt, Homo sapiens
  misc_RNA (1)...(19): siRNA sense strand
gagcaagagcacaacaauu

SEQ ID NO: 192321 - RNA, 19 nt, Homo sapiens
  misc_RNA (1)...(19): siRNA sense strand
ucaagcaaguggcaaguuc

SEQ ID NO: 192322 - RNA, 19 nt, Homo sapiens
  misc_RNA (1)...(19): siRNA sense strand
ccacgagacucaaacaacu

SEQ ID NO: 192323 - RNA, 19 nt, Homo sapiens
  misc_RNA (1)...(19): siRNA sense strand
cagcacaaccucaagcaaa

SEQ ID NO: 192324 - RNA, 19 nt, Homo sapiens
  misc_RNA (1)...(19): siRNA sense strand
gcaaagaguguccaaucau

SEQ ID NO: 192325 - RNA, 19 nt, Homo sapiens
  misc_RNA (1)...(19): siRNA sense strand
auggauauccugcagauua

SEQ ID NO: 192326 - RNA, 19 nt, Homo sapiens
  misc_RNA (1)...(19): siRNA sense strand
uguaacaucugcaaagagu

SEQ ID NO: 192327 - RNA, 19 nt, Homo sapiens
  misc_RNA (1)...(19): siRNA sense strand
guccggagcugcuuccaau

SEQ ID NO: 192328 - RNA, 19 nt, Homo sapiens
  misc_RNA (1)...(19): siRNA sense strand
gcaaguggcaaguucaaca

SEQ ID NO: 192329 - RNA, 19 nt, Homo sapiens
  misc_RNA (1)...(19): siRNA sense strand
gcuuccaauuugcuaauaa

SEQ ID NO: 192330 - RNA, 19 nt, Homo sapiens
  misc_RNA (1)...(19): siRNA sense strand
uggaagacaaguacagaua

SEQ ID NO: 192331 - RNA, 19 nt, Homo sapiens
  misc_RNA (1)...(19): siRNA sense strand
ggauccguguccugucuuu

SEQ ID NO: 192332 - RNA, 19 nt, Homo sapiens
  misc_RNA (1)...(19): siRNA sense strand
gucuuuagcugaccugaau

SEQ ID NO: 192333 - RNA, 19 nt, Homo sapiens
  misc_RNA (1)...(19): siRNA sense strand
gacaaguacagauaccuuu

SEQ ID NO: 192334 - RNA, 19 nt, Homo sapiens
  misc_RNA (1)...(19): siRNA sense strand
ccaagcaucaggccaaaug

SEQ ID NO: 192335 - RNA, 19 nt, Homo sapiens
  misc_RNA (1)...(19): siRNA sense strand
ggagcaagagcacaacaau

SEQ ID NO: 192336 - RNA, 19 nt, Homo sapiens
  misc_RNA (1)...(19): siRNA sense strand
guguaaagcacauuuggaa

SEQ ID NO: 192337 - RNA, 19 nt, Homo sapiens
  misc_RNA (1)...(19): siRNA sense strand
caagacaguugggugaagu

SEQ ID NO: 192338 - RNA, 19 nt, Homo sapiens
  misc_RNA (1)...(19): siRNA sense strand
gaagauguucgagacuuug

SEQ ID NO: 192339 - RNA, 19 nt, Homo sapiens
  misc_RNA (1)...(19): siRNA sense strand
gucagauucucagcuuaua

SEQ ID NO: 192340 - RNA, 19 nt, Homo sapiens
  misc_RNA (1)...(19): siRNA sense strand
uaacaucugcaaagagugu

SEQ ID NO: 192341 - RNA, 19 nt, Homo sapiens
  misc_RNA (1)...(19): siRNA sense strand
cggagcugcuuccaauuug

SEQ ID NO: 192342 - RNA, 19 nt, Homo sapiens
  misc_RNA (1)...(19): siRNA sense strand
gaagacaaguacagauacc

SEQ ID NO: 192343 - RNA, 19 nt, Homo sapiens
  misc_RNA (1)...(19): siRNA sense strand
ccauggauauccugcagau

SEQ ID NO: 192344 - RNA, 19 nt, Homo sapiens
  misc_RNA (1)...(19): siRNA sense strand
ggcaucauuucccugugua

SEQ ID NO: 192345 - RNA, 19 nt, Homo sapiens
  misc_RNA (1)...(19): siRNA sense strand
uggauauccugcagauuau

SEQ ID NO: 192346 - RNA, 19 nt, Homo sapiens
  misc_RNA (1)...(19): siRNA sense strand
ggaagacaaguacagauac

SEQ ID NO: 192347 - RNA, 19 nt, Homo sapiens
  misc_RNA (1)...(19): siRNA sense strand
ugcaaagaguguccaauca

SEQ ID NO: 192348 - RNA, 19 nt, Homo sapiens
  misc_RNA (1)...(19): siRNA sense strand
guggauaugugucugaacu

SEQ ID NO: 192349 - RNA, 19 nt, Homo sapiens
  misc_RNA (1)...(19): siRNA sense strand
acuggcugcugaauguuua

SEQ ID NO: 192350 - RNA, 19 nt, Homo sapiens
  misc_RNA (1)...(19): siRNA sense strand
acuaucccaugguggaaua

SEQ ID NO: 192351 - RNA, 19 nt, Homo sapiens
  misc_RNA (1)...(19): siRNA sense strand
ccggagcugcuuccaauuu

SEQ ID NO: 192352 - RNA, 19 nt, Homo sapiens
  misc_RNA (1)...(19): siRNA sense strand
ccaaauuccaagacaguug

SEQ ID NO: 192353 - RNA, 19 nt, Homo sapiens
  misc_RNA (1)...(19): siRNA sense strand
cagaaacugccaagcauca

SEQ ID NO: 192354 - RNA, 19 nt, Homo sapiens
  misc_RNA (1)...(19): siRNA sense strand
uaugacaucugccaaagcu

SEQ ID NO: 192355 - RNA, 19 nt, Homo sapiens
  misc_RNA (1)...(19): siRNA sense strand
aaugucagauucucagcuu

SEQ ID NO: 192356 - RNA, 19 nt, Homo sapiens
  misc_RNA (1)...(19): siRNA sense strand
ucgagacuuugccaaggua

SEQ ID NO: 192357 - RNA, 19 nt, Homo sapiens
  misc_RNA (1)...(19): siRNA sense strand
gcaaaaggccauaaaaugc

SEQ ID NO: 192358 - RNA, 19 nt, Homo sapiens
  misc_RNA (1)...(19): siRNA sense strand
cugcaugauucuauccaaa

SEQ ID NO: 192359 - RNA, 19 nt, Homo sapiens
  misc_RNA (1)...(19): siRNA sense strand
uaaagcacauuuggaagac

SEQ ID NO: 192360 - RNA, 19 nt, Homo sapiens
  misc_RNA (1)...(19): siRNA sense strand
acaggagucuaaagcacuu

SEQ ID NO: 192361 - RNA, 19 nt, Homo sapiens
  misc_RNA (1)...(19): siRNA sense strand
acagauaccuuuucaagca

SEQ ID NO: 192362 - RNA, 19 nt, Homo sapiens
  misc_RNA (1)...(19): siRNA sense strand
aagcacauuuggaagacaa

SEQ ID NO: 192363 - RNA, 19 nt, Homo sapiens
  misc_RNA (1)...(19): siRNA sense strand
gcuaauaauaagccagaga

SEQ ID NO: 192364 - RNA, 19 nt, Homo sapiens
  misc_RNA (1)...(19): siRNA sense strand
caagagcacaacaauuugg

SEQ ID NO: 192365 - RNA, 19 nt, Homo sapiens
  misc_RNA (1)...(19): siRNA sense strand
ccugucagcugcaugugau

SEQ ID NO: 192366 - RNA, 19 nt, Homo sapiens
  misc_RNA (1)...(19): siRNA sense strand
gcugcugaauguuuaugau

SEQ ID NO: 192367 - RNA, 19 nt, Homo sapiens
  misc_RNA (1)...(19): siRNA sense strand
acagagcucuaccagucuu

SEQ ID NO: 192368 - RNA, 19 nt, Homo sapiens
  misc_RNA (1)...(19): siRNA sense strand
acaguugggugaaguugca

SEQ ID NO: 192369 - RNA, 19 nt, Homo sapiens
  misc_RNA (1)...(19): siRNA sense strand
guuugaccacuauuuauga

SEQ ID NO: 192370 - RNA, 19 nt, Homo sapiens
  misc_RNA (1)...(19): siRNA sense strand
gcuuauaggacugccauga

SEQ ID NO: 192371 - RNA, 19 nt, Homo sapiens
  misc_RNA (1)...(19): siRNA sense strand
caucaggccaaauguaaca

SEQ ID NO: 192372 - RNA, 19 nt, Homo sapiens
  misc_RNA (1)...(19): siRNA sense strand
gauucuauccaaauuccaa

SEQ ID NO: 192373 - RNA, 19 nt, Homo sapiens
  misc_RNA (1)...(19): siRNA sense strand
ggcaaguucaacaggauuu

SEQ ID NO: 192374 - RNA, 19 nt, Homo sapiens
  misc_RNA (1)...(19): siRNA sense strand
gaacuggcugcugaauguu

SEQ ID NO: 192375 - RNA, 19 nt, Homo sapiens
  misc_RNA (1)...(19): siRNA sense strand
cugcugaauguuuaugaua

SEQ ID NO: 192376 - RNA, 19 nt, Homo sapiens
  misc_RNA (1)...(19): siRNA sense strand
aagcaucaggccaaaugua

SEQ ID NO: 192377 - RNA, 19 nt, Homo sapiens
  misc_RNA (1)...(19): siRNA sense strand
uggcaucauuucccugugu

SEQ ID NO: 192378 - RNA, 19 nt, Homo sapiens
  misc_RNA (1)...(19): siRNA sense strand
ccaugaaacuccgaagacu

SEQ ID NO: 192379 - RNA, 19 nt, Homo sapiens
  misc_RNA (1)...(19): siRNA sense strand
auaauaagccagagaucga

SEQ ID NO: 192380 - RNA, 19 nt, Homo sapiens
  misc_RNA (1)...(19): siRNA sense strand
cuaauaauaagccagagau

SEQ ID NO: 192381 - RNA, 19 nt, Homo sapiens
  misc_RNA (1)...(19): siRNA sense strand
ugggugaaguugcauccuu

SEQ ID NO: 192382 - RNA, 19 nt, Homo sapiens
  misc_RNA (1)...(19): siRNA sense strand
caucauuucccuguguaaa

SEQ ID NO: 192383 - RNA, 19 nt, Homo sapiens
  misc_RNA (1)...(19): siRNA sense strand
gcguggauaugugucugaa

SEQ ID NO: 192384 - RNA, 19 nt, Homo sapiens
  misc_RNA (1)...(19): siRNA sense strand
gcacuaucccaugguggaa

SEQ ID NO: 192385 - RNA, 19 nt, Homo sapiens
  misc_RNA (1)...(19): siRNA sense strand
gagccugucagcugcaugu

SEQ ID NO: 192386 - RNA, 19 nt, Homo sapiens
  misc_RNA (1)...(19): siRNA sense strand
guacagauaccuuuucaag

SEQ ID NO: 192387 - RNA, 19 nt, Homo sapiens
  misc_RNA (1)...(19): siRNA sense strand
gucccucucugcguggaua

SEQ ID NO: 192388 - RNA, 19 nt, Homo sapiens
  misc_RNA (1)...(19): siRNA sense strand
ggagcugcuuccaauuugc

SEQ ID NO: 192389 - RNA, 19 nt, Homo sapiens
  misc_RNA (1)...(19): siRNA sense strand
uuagcugaccugaauaaug

SEQ ID NO: 192390 - RNA, 19 nt, Homo sapiens
  misc_RNA (1)...(19): siRNA sense strand
guggcaaguucaacaggau

SEQ ID NO: 192391 - RNA, 19 nt, Homo sapiens
  misc_RNA (1)...(19): siRNA sense strand
acaacaauuuggucaacgu

SEQ ID NO: 192392 - RNA, 19 nt, Homo sapiens
  misc_RNA (1)...(19): siRNA sense strand
gacuacaucaggagaagau

SEQ ID NO: 192393 - RNA, 19 nt, Homo sapiens
  misc_RNA (1)...(19): siRNA sense strand
uaauaagccagagaucgaa

SEQ ID NO: 192394 - RNA, 19 nt, Homo sapiens
  misc_RNA (1)...(19): siRNA sense strand
ugucagauucucagcuuau

SEQ ID NO: 192395 - RNA, 19 nt, Homo sapiens
  misc_RNA (1)...(19): siRNA sense strand
ggauauccugcagauuauu

SEQ ID NO: 192396 - RNA, 19 nt, Homo sapiens
  misc_RNA (1)...(19): siRNA sense strand
agcaucaggccaaauguaa

SEQ ID NO: 192397 - RNA, 19 nt, Homo sapiens
  misc_RNA (1)...(19): siRNA sense strand
gcccuuugcuuggaucucu

SEQ ID NO: 192398 - RNA, 19 nt, Homo sapiens
  misc_RNA (1)...(19): siRNA sense strand
gcugaauguuuaugauacg

SEQ ID NO: 192399 - RNA, 19 nt, Homo sapiens
  misc_RNA (1)...(19): siRNA sense strand
agacuuugccaagguacua

SEQ ID NO: 192400 - RNA, 19 nt, Homo sapiens
  misc_RNA (1)...(19): siRNA sense strand
caagcaaguggcaaguuca

SEQ ID NO: 192401 - RNA, 19 nt, Homo sapiens
  misc_RNA (1)...(19): siRNA sense strand
agacaaguacagauaccuu

SEQ ID NO: 192402 - RNA, 19 nt, Homo sapiens
  misc_RNA (1)...(19): siRNA sense strand
gcaucauuucccuguguaa

SEQ ID NO: 192403 - RNA, 19 nt, Homo sapiens
  misc_RNA (1)...(19): siRNA sense strand
cugcaaagaguguccaauc

SEQ ID NO: 192404 - RNA, 19 nt, Homo sapiens
  misc_RNA (1)...(19): siRNA sense strand
cuuauaggacugccaugaa

SEQ ID NO: 192405 - RNA, 19 nt, Homo sapiens
  misc_RNA (1)...(19): siRNA sense strand
caaagaguguccaaucauu

SEQ ID NO: 192406 - RNA, 19 nt, Homo sapiens
  misc_RNA (1)...(19): siRNA sense strand
uagcugaccugaauaaugu

SEQ ID NO: 192407 - RNA, 19 nt, Homo sapiens
  misc_RNA (1)...(19): siRNA sense strand
gcaugauucuauccaaauu

SEQ ID NO: 192408 - RNA, 19 nt, Homo sapiens
  misc_RNA (1)...(19): siRNA sense strand
ugaacuggcugcugaaugu

SEQ ID NO: 192409 - RNA, 19 nt, Homo sapiens
  misc_RNA (1)...(19): siRNA sense strand
gauauccugcagauuauua

SEQ ID NO: 192410 - RNA, 19 nt, Homo sapiens
  misc_RNA (1)...(19): siRNA sense strand
gagaagauguucgagacuu

SEQ ID NO: 192411 - RNA, 19 nt, Homo sapiens
  misc_RNA (1)...(19): siRNA sense strand
gcacuuuaauuaugacauc

SEQ ID NO: 192412 - RNA, 19 nt, Homo sapiens
  misc_RNA (1)...(19): siRNA sense strand
guaaagcacauuuggaaga

SEQ ID NO: 192413 - RNA, 19 nt, Homo sapiens
  misc_RNA (1)...(19): siRNA sense strand
gaauauugcacuccgacua

SEQ ID NO: 192414 - RNA, 19 nt, Homo sapiens
  misc_RNA (1)...(19): siRNA sense strand
uuauaggacugccaugaaa

SEQ ID NO: 192415 - RNA, 19 nt, Homo sapiens
  misc_RNA (1)...(19): siRNA sense strand
gggugaaguugcauccuuu

SEQ ID NO: 192416 - RNA, 19 nt, Homo sapiens
  misc_RNA (1)...(19): siRNA sense strand
gcaagagcacaacaauuug

SEQ ID NO: 192417 - RNA, 19 nt, Homo sapiens
  misc_RNA (1)...(19): siRNA sense strand
gcacaacaauuuggucaac

SEQ ID NO: 192418 - RNA, 19 nt, Homo sapiens
  misc_RNA (1)...(19): siRNA sense strand
agcaagagcacaacaauuu

SEQ ID NO: 192419 - RNA, 19 nt, Homo sapiens
  misc_RNA (1)...(19): siRNA sense strand
agaagauguucgagacuuu

SEQ ID NO: 192420 - RNA, 19 nt, Homo sapiens
  misc_RNA (1)...(19): siRNA sense strand
gagcaagagcacaacaauu

SEQ ID NO: 192421 - RNA, 19 nt, Homo sapiens
  misc_RNA (1)...(19): siRNA sense strand
ucaagcaaguggcaaguuc

SEQ ID NO: 192422 - RNA, 19 nt, Homo sapiens
  misc_RNA (1)...(19): siRNA sense strand
ccacgagacucaaacaacu

SEQ ID NO: 192423 - RNA, 19 nt, Homo sapiens
  misc_RNA (1)...(19): siRNA sense strand
cagcacaaccucaagcaaa

SEQ ID NO: 192424 - RNA, 19 nt, Homo sapiens
  misc_RNA (1)...(19): siRNA sense strand
gcaaagaguguccaaucau

SEQ ID NO: 192425 - RNA, 19 nt, Homo sapiens
  misc_RNA (1)...(19): siRNA sense strand
auggauauccugcagauua

SEQ ID NO: 192426 - RNA, 19 nt, Homo sapiens
  misc_RNA (1)...(19): siRNA sense strand
uguaacaucugcaaagagu

SEQ ID NO: 192427 - RNA, 19 nt, Homo sapiens
  misc_RNA (1)...(19): siRNA sense strand
guccggagcugcuuccaau

SEQ ID NO: 192428 - RNA, 19 nt, Homo sapiens
  misc_RNA (1)...(19): siRNA sense strand
gcaaguggcaaguucaaca

SEQ ID NO: 192429 - RNA, 19 nt, Homo sapiens
  misc_RNA (1)...(19): siRNA sense strand
gcuuccaauuugcuaauaa

SEQ ID NO: 192430 - RNA, 19 nt, Homo sapiens
  misc_RNA (1)...(19): siRNA sense strand
uggaagacaaguacagaua

SEQ ID NO: 192431 - RNA, 19 nt, Homo sapiens
  misc_RNA (1)...(19): siRNA sense strand
ggauccguguccugucuuu

SEQ ID NO: 192432 - RNA, 19 nt, Homo sapiens
  misc_RNA (1)...(19): siRNA sense strand
gucuuuagcugaccugaau

SEQ ID NO: 192433 - RNA, 19 nt, Homo sapiens
  misc_RNA (1)...(19): siRNA sense strand
gacaaguacagauaccuuu

SEQ ID NO: 192434 - RNA, 19 nt, Homo sapiens
  misc_RNA (1)...(19): siRNA sense strand
ccaagcaucaggccaaaug

SEQ ID NO: 192435 - RNA, 19 nt, Homo sapiens
  misc_RNA (1)...(19): siRNA sense strand
ggagcaagagcacaacaau

SEQ ID NO: 192436 - RNA, 19 nt, Homo sapiens
  misc_RNA (1)...(19): siRNA sense strand
guguaaagcacauuuggaa

SEQ ID NO: 192437 - RNA, 19 nt, Homo sapiens
  misc_RNA (1)...(19): siRNA sense strand
caagacaguugggugaagu

SEQ ID NO: 192438 - RNA, 19 nt, Homo sapiens
  misc_RNA (1)...(19): siRNA sense strand
gaagauguucgagacuuug

SEQ ID NO: 192439 - RNA, 19 nt, Homo sapiens
  misc_RNA (1)...(19): siRNA sense strand
gucagauucucagcuuaua

SEQ ID NO: 192440 - RNA, 19 nt, Homo sapiens
  misc_RNA (1)...(19): siRNA sense strand
uaacaucugcaaagagugu

SEQ ID NO: 192441 - RNA, 19 nt, Homo sapiens
  misc_RNA (1)...(19): siRNA sense strand
cggagcugcuuccaauuug

SEQ ID NO: 192442 - RNA, 19 nt, Homo sapiens
  misc_RNA (1)...(19): siRNA sense strand
gaagacaaguacagauacc

SEQ ID NO: 192443 - RNA, 19 nt, Homo sapiens
  misc_RNA (1)...(19): siRNA sense strand
ccauggauauccugcagau

SEQ ID NO: 192444 - RNA, 19 nt, Homo sapiens
  misc_RNA (1)...(19): siRNA sense strand
ggcaucauuucccugugua

SEQ ID NO: 192445 - RNA, 19 nt, Homo sapiens
  misc_RNA (1)...(19): siRNA sense strand
uggauauccugcagauuau

SEQ ID NO: 192446 - RNA, 19 nt, Homo sapiens
  misc_RNA (1)...(19): siRNA sense strand
ggaagacaaguacagauac

SEQ ID NO: 192447 - RNA, 19 nt, Homo sapiens
  misc_RNA (1)...(19): siRNA sense strand
ugcaaagaguguccaauca

SEQ ID NO: 192448 - RNA, 19 nt, Homo sapiens
  misc_RNA (1)...(19): siRNA sense strand
guggauaugugucugaacu

SEQ ID NO: 192449 - RNA, 19 nt, Homo sapiens
  misc_RNA (1)...(19): siRNA sense strand
acuggcugcugaauguuua

SEQ ID NO: 192450 - RNA, 19 nt, Homo sapiens
  misc_RNA (1)...(19): siRNA sense strand
acuaucccaugguggaaua

SEQ ID NO: 192451 - RNA, 19 nt, Homo sapiens
  misc_RNA (1)...(19): siRNA sense strand
ccggagcugcuuccaauuu

SEQ ID NO: 192452 - RNA, 19 nt, Homo sapiens
  misc_RNA (1)...(19): siRNA sense strand
ccaaauuccaagacaguug

SEQ ID NO: 192453 - RNA, 19 nt, Homo sapiens
  misc_RNA (1)...(19): siRNA sense strand
cagaaacugccaagcauca

SEQ ID NO: 192454 - RNA, 19 nt, Homo sapiens
  misc_RNA (1)...(19): siRNA sense strand
uaugacaucugccaaagcu

SEQ ID NO: 192455 - RNA, 19 nt, Homo sapiens
  misc_RNA (1)...(19): siRNA sense strand
aaugucagauucucagcuu

SEQ ID NO: 192456 - RNA, 19 nt, Homo sapiens
  misc_RNA (1)...(19): siRNA sense strand
ucgagacuuugccaaggua

SEQ ID NO: 192457 - RNA, 19 nt, Homo sapiens
  misc_RNA (1)...(19): siRNA sense strand
gcaaaaggccauaaaaugc

SEQ ID NO: 192458 - RNA, 19 nt, Homo sapiens
  misc_RNA (1)...(19): siRNA sense strand
cugcaugauucuauccaaa

SEQ ID NO: 192459 - RNA, 19 nt, Homo sapiens
  misc_RNA (1)...(19): siRNA sense strand
uaaagcacauuuggaagac

SEQ ID NO: 192460 - RNA, 19 nt, Homo sapiens
  misc_RNA (1)...(19): siRNA sense strand
acaggagucuaaagcacuu

SEQ ID NO: 192461 - RNA, 19 nt, Homo sapiens
  misc_RNA (1)...(19): siRNA sense strand
acagauaccuuuucaagca

SEQ ID NO: 192462 - RNA, 19 nt, Homo sapiens
  misc_RNA (1)...(19): siRNA sense strand
aagcacauuuggaagacaa

SEQ ID NO: 192463 - RNA, 19 nt, Homo sapiens
  misc_RNA (1)...(19): siRNA sense strand
gcuaauaauaagccagaga

SEQ ID NO: 192464 - RNA, 19 nt, Homo sapiens
  misc_RNA (1)...(19): siRNA sense strand
caagagcacaacaauuugg

SEQ ID NO: 192465 - RNA, 19 nt, Homo sapiens
  misc_RNA (1)...(19): siRNA sense strand
ccugucagcugcaugugau

SEQ ID NO: 192466 - RNA, 19 nt, Homo sapiens
  misc_RNA (1)...(19): siRNA sense strand
gcugcugaauguuuaugau

SEQ ID NO: 192467 - RNA, 19 nt, Homo sapiens
  misc_RNA (1)...(19): siRNA sense strand
acagagcucuaccagucuu

SEQ ID NO: 192468 - RNA, 19 nt, Homo sapiens
  misc_RNA (1)...(19): siRNA sense strand
acaguugggugaaguugca

SEQ ID NO: 192469 - RNA, 19 nt, Homo sapiens
  misc_RNA (1)...(19): siRNA sense strand
guuugaccacuauuuauga

SEQ ID NO: 192470 - RNA, 19 nt, Homo sapiens
  misc_RNA (1)...(19): siRNA sense strand
gcuuauaggacugccauga

SEQ ID NO: 192471 - RNA, 19 nt, Homo sapiens
  misc_RNA (1)...(19): siRNA sense strand
caucaggccaaauguaaca

SEQ ID NO: 192472 - RNA, 19 nt, Homo sapiens
  misc_RNA (1)...(19): siRNA sense strand
gauucuauccaaauuccaa

SEQ ID NO: 192473 - RNA, 19 nt, Homo sapiens
  misc_RNA (1)...(19): siRNA sense strand
ggcaaguucaacaggauuu

SEQ ID NO: 192474 - RNA, 19 nt, Homo sapiens
  misc_RNA (1)...(19): siRNA sense strand
gaacuggcugcugaauguu

SEQ ID NO: 192475 - RNA, 19 nt, Homo sapiens
  misc_RNA (1)...(19): siRNA sense strand
cugcugaauguuuaugaua

SEQ ID NO: 192476 - RNA, 19 nt, Homo sapiens
  misc_RNA (1)...(19): siRNA sense strand
aagcaucaggccaaaugua

SEQ ID NO: 192477 - RNA, 19 nt, Homo sapiens
  misc_RNA (1)...(19): siRNA sense strand
uggcaucauuucccugugu

SEQ ID NO: 192478 - RNA, 19 nt, Homo sapiens
  misc_RNA (1)...(19): siRNA sense strand
ccaugaaacuccgaagacu

SEQ ID NO: 192479 - RNA, 19 nt, Homo sapiens
  misc_RNA (1)...(19): siRNA sense strand
auaauaagccagagaucga

SEQ ID NO: 192480 - RNA, 19 nt, Homo sapiens
  misc_RNA (1)...(19): siRNA sense strand
cuaauaauaagccagagau

SEQ ID NO: 192481 - RNA, 19 nt, Homo sapiens
  misc_RNA (1)...(19): siRNA sense strand
ugggugaaguugcauccuu

SEQ ID NO: 192482 - RNA, 19 nt, Homo sapiens
  misc_RNA (1)...(19): siRNA sense strand
caucauuucccuguguaaa

SEQ ID NO: 192483 - RNA, 19 nt, Homo sapiens
  misc_RNA (1)...(19): siRNA sense strand
gcguggauaugugucugaa

SEQ ID NO: 192484 - RNA, 19 nt, Homo sapiens
  misc_RNA (1)...(19): siRNA sense strand
gcacuaucccaugguggaa

SEQ ID NO: 192485 - RNA, 19 nt, Homo sapiens
  misc_RNA (1)...(19): siRNA sense strand
gagccugucagcugcaugu

SEQ ID NO: 192486 - RNA, 19 nt, Homo sapiens
  misc_RNA (1)...(19): siRNA sense strand
guacagauaccuuuucaag

SEQ ID NO: 192487 - RNA, 19 nt, Homo sapiens
  misc_RNA (1)...(19): siRNA sense strand
gucccucucugcguggaua

SEQ ID NO: 192488 - RNA, 19 nt, Homo sapiens
  misc_RNA (1)...(19): siRNA sense strand
ggagcugcuuccaauuugc

SEQ ID NO: 192489 - RNA, 19 nt, Homo sapiens
  misc_RNA (1)...(19): siRNA sense strand
uuagcugaccugaauaaug

SEQ ID NO: 192490 - RNA, 19 nt, Homo sapiens
  misc_RNA (1)...(19): siRNA sense strand
guggcaaguucaacaggau

SEQ ID NO: 192491 - RNA, 19 nt, Homo sapiens
  misc_RNA (1)...(19): siRNA sense strand
acaacaauuuggucaacgu

SEQ ID NO: 192492 - RNA, 19 nt, Homo sapiens
  misc_RNA (1)...(19): siRNA sense strand
gacuacaucaggagaagau

SEQ ID NO: 192493 - RNA, 19 nt, Homo sapiens
  misc_RNA (1)...(19): siRNA sense strand
uaauaagccagagaucgaa

SEQ ID NO: 192494 - RNA, 19 nt, Homo sapiens
  misc_RNA (1)...(19): siRNA sense strand
ugucagauucucagcuuau

SEQ ID NO: 192495 - RNA, 19 nt, Homo sapiens
  misc_RNA (1)...(19): siRNA sense strand
ggauauccugcagauuauu

SEQ ID NO: 192496 - RNA, 19 nt, Homo sapiens
  misc_RNA (1)...(19): siRNA sense strand
agcaucaggccaaauguaa

SEQ ID NO: 192497 - RNA, 19 nt, Homo sapiens
  misc_RNA (1)...(19): siRNA sense strand
gcccuuugcuuggaucucu

SEQ ID NO: 192498 - RNA, 19 nt, Homo sapiens
  misc_RNA (1)...(19): siRNA sense strand
gcugaauguuuaugauacg

SEQ ID NO: 192499 - RNA, 19 nt, Homo sapiens
  misc_RNA (1)...(19): siRNA sense strand
agacuuugccaagguacua

SEQ ID NO: 192500 - RNA, 19 nt, Homo sapiens
  misc_RNA (1)...(19): siRNA sense strand
caagcaaguggcaaguuca

SEQ ID NO: 192501 - RNA, 19 nt, Homo sapiens
  misc_RNA (1)...(19): siRNA sense strand
agacaaguacagauaccuu

SEQ ID NO: 192502 - RNA, 19 nt, Homo sapiens
  misc_RNA (1)...(19): siRNA sense strand
gcaucauuucccuguguaa

SEQ ID NO: 192503 - RNA, 19 nt, Homo sapiens
  misc_RNA (1)...(19): siRNA sense strand
cugcaaagaguguccaauc

SEQ ID NO: 192504 - RNA, 19 nt, Homo sapiens
  misc_RNA (1)...(19): siRNA sense strand
cuuauaggacugccaugaa

SEQ ID NO: 192505 - RNA, 19 nt, Homo sapiens
  misc_RNA (1)...(19): siRNA sense strand
caaagaguguccaaucauu

SEQ ID NO: 192506 - RNA, 19 nt, Homo sapiens
  misc_RNA (1)...(19): siRNA sense strand
uagcugaccugaauaaugu

SEQ ID NO: 192507 - RNA, 19 nt, Homo sapiens
  misc_RNA (1)...(19): siRNA sense strand
gcaugauucuauccaaauu

SEQ ID NO: 192508 - RNA, 19 nt, Homo sapiens
  misc_RNA (1)...(19): siRNA sense strand
ugaacuggcugcugaaugu

SEQ ID NO: 192509 - RNA, 19 nt, Homo sapiens
  misc_RNA (1)...(19): siRNA sense strand
gauauccugcagauuauua

SEQ ID NO: 192510 - RNA, 19 nt, Homo sapiens
  misc_RNA (1)...(19): siRNA sense strand
gagaagauguucgagacuu

SEQ ID NO: 192511 - RNA, 19 nt, Homo sapiens
  misc_RNA (1)...(19): siRNA sense strand
gcacuuuaauuaugacauc

SEQ ID NO: 192512 - RNA, 19 nt, Homo sapiens
  misc_RNA (1)...(19): siRNA sense strand
guaaagcacauuuggaaga

SEQ ID NO: 192513 - RNA, 19 nt, Homo sapiens
  misc_RNA (1)...(19): siRNA sense strand
gaauauugcacuccgacua

SEQ ID NO: 192514 - RNA, 19 nt, Homo sapiens
  misc_RNA (1)...(19): siRNA sense strand
uuauaggacugccaugaaa

SEQ ID NO: 192515 - RNA, 19 nt, Homo sapiens
  misc_RNA (1)...(19): siRNA sense strand
gggugaaguugcauccuuu

SEQ ID NO: 192516 - RNA, 19 nt, Homo sapiens
  misc_RNA (1)...(19): siRNA sense strand
gcaagagcacaacaauuug

SEQ ID NO: 192517 - RNA, 19 nt, Homo sapiens
  misc_RNA (1)...(19): siRNA sense strand
gcacaacaauuuggucaac

SEQ ID NO: 192518 - RNA, 19 nt, Homo sapiens
  misc_RNA (1)...(19): siRNA sense strand
agcaagagcacaacaauuu

SEQ ID NO: 192519 - RNA, 19 nt, Homo sapiens
  misc_RNA (1)...(19): siRNA sense strand
agaagauguucgagacuuu

SEQ ID NO: 192520 - RNA, 19 nt, Homo sapiens
  misc_RNA (1)...(19): siRNA sense strand
gagcaagagcacaacaauu

SEQ ID NO: 192521 - RNA, 19 nt, Homo sapiens
  misc_RNA (1)...(19): siRNA sense strand
ucaagcaaguggcaaguuc

SEQ ID NO: 192522 - RNA, 19 nt, Homo sapiens
  misc_RNA (1)...(19): siRNA sense strand
ccacgagacucaaacaacu

SEQ ID NO: 192523 - RNA, 19 nt, Homo sapiens
  misc_RNA (1)...(19): siRNA sense strand
cagcacaaccucaagcaaa

SEQ ID NO: 192524 - RNA, 19 nt, Homo sapiens
  misc_RNA (1)...(19): siRNA sense strand
gcaaagaguguccaaucau

SEQ ID NO: 192525 - RNA, 19 nt, Homo sapiens
  misc_RNA (1)...(19): siRNA sense strand
auggauauccugcagauua

SEQ ID NO: 192526 - RNA, 19 nt, Homo sapiens
  misc_RNA (1)...(19): siRNA sense strand
uguaacaucugcaaagagu

SEQ ID NO: 192527 - RNA, 19 nt, Homo sapiens
  misc_RNA (1)...(19): siRNA sense strand
guccggagcugcuuccaau

SEQ ID NO: 192528 - RNA, 19 nt, Homo sapiens
  misc_RNA (1)...(19): siRNA sense strand
gcaaguggcaaguucaaca

SEQ ID NO: 192529 - RNA, 19 nt, Homo sapiens
  misc_RNA (1)...(19): siRNA sense strand
gcuuccaauuugcuaauaa

SEQ ID NO: 192530 - RNA, 19 nt, Homo sapiens
  misc_RNA (1)...(19): siRNA sense strand
uggaagacaaguacagaua

SEQ ID NO: 192531 - RNA, 19 nt, Homo sapiens
  misc_RNA (1)...(19): siRNA sense strand
ggauccguguccugucuuu

SEQ ID NO: 192532 - RNA, 19 nt, Homo sapiens
  misc_RNA (1)...(19): siRNA sense strand
gucuuuagcugaccugaau

SEQ ID NO: 192533 - RNA, 19 nt, Homo sapiens
  misc_RNA (1)...(19): siRNA sense strand
gacaaguacagauaccuuu

SEQ ID NO: 192534 - RNA, 19 nt, Homo sapiens
  misc_RNA (1)...(19): siRNA sense strand
ccaagcaucaggccaaaug

SEQ ID NO: 192535 - RNA, 19 nt, Homo sapiens
  misc_RNA (1)...(19): siRNA sense strand
ggagcaagagcacaacaau

SEQ ID NO: 192536 - RNA, 19 nt, Homo sapiens
  misc_RNA (1)...(19): siRNA sense strand
guguaaagcacauuuggaa

SEQ ID NO: 192537 - RNA, 19 nt, Homo sapiens
  misc_RNA (1)...(19): siRNA sense strand
caagacaguugggugaagu

SEQ ID NO: 192538 - RNA, 19 nt, Homo sapiens
  misc_RNA (1)...(19): siRNA sense strand
gaagauguucgagacuuug

SEQ ID NO: 192539 - RNA, 19 nt, Homo sapiens
  misc_RNA (1)...(19): siRNA sense strand
gucagauucucagcuuaua

SEQ ID NO: 192540 - RNA, 19 nt, Homo sapiens
  misc_RNA (1)...(19): siRNA sense strand
uaacaucugcaaagagugu

SEQ ID NO: 192541 - RNA, 19 nt, Homo sapiens
  misc_RNA (1)...(19): siRNA sense strand
cggagcugcuuccaauuug

SEQ ID NO: 192542 - RNA, 19 nt, Homo sapiens
  misc_RNA (1)...(19): siRNA sense strand
gaagacaaguacagauacc

SEQ ID NO: 192543 - RNA, 19 nt, Homo sapiens
  misc_RNA (1)...(19): siRNA sense strand
ccauggauauccugcagau

SEQ ID NO: 192544 - RNA, 19 nt, Homo sapiens
  misc_RNA (1)...(19): siRNA sense strand
ggcaucauuucccugugua

SEQ ID NO: 192545 - RNA, 19 nt, Homo sapiens
  misc_RNA (1)...(19): siRNA sense strand
uggauauccugcagauuau

SEQ ID NO: 192546 - RNA, 19 nt, Homo sapiens
  misc_RNA (1)...(19): siRNA sense strand
ggaagacaaguacagauac

SEQ ID NO: 192547 - RNA, 19 nt, Homo sapiens
  misc_RNA (1)...(19): siRNA sense strand
ugcaaagaguguccaauca

SEQ ID NO: 192548 - RNA, 19 nt, Homo sapiens
  misc_RNA (1)...(19): siRNA sense strand
guggauaugugucugaacu

SEQ ID NO: 192549 - RNA, 19 nt, Homo sapiens
  misc_RNA (1)...(19): siRNA sense strand
acuggcugcugaauguuua

SEQ ID NO: 192550 - RNA, 19 nt, Homo sapiens
  misc_RNA (1)...(19): siRNA sense strand
acuaucccaugguggaaua

SEQ ID NO: 192551 - RNA, 19 nt, Homo sapiens
  misc_RNA (1)...(19): siRNA sense strand
ccggagcugcuuccaauuu

SEQ ID NO: 192552 - RNA, 19 nt, Homo sapiens
  misc_RNA (1)...(19): siRNA sense strand
ccaaauuccaagacaguug

SEQ ID NO: 192553 - RNA, 19 nt, Homo sapiens
  misc_RNA (1)...(19): siRNA sense strand
cagaaacugccaagcauca

SEQ ID NO: 192554 - RNA, 19 nt, Homo sapiens
  misc_RNA (1)...(19): siRNA sense strand
uaugacaucugccaaagcu

SEQ ID NO: 192555 - RNA, 19 nt, Homo sapiens
  misc_RNA (1)...(19): siRNA sense strand
aaugucagauucucagcuu

SEQ ID NO: 192556 - RNA, 19 nt, Homo sapiens
  misc_RNA (1)...(19): siRNA sense strand
ucgagacuuugccaaggua

SEQ ID NO: 192557 - RNA, 19 nt, Homo sapiens
  misc_RNA (1)...(19): siRNA sense strand
gcaaaaggccauaaaaugc

SEQ ID NO: 192558 - RNA, 19 nt, Homo sapiens
  misc_RNA (1)...(19): siRNA sense strand
cugcaugauucuauccaaa

SEQ ID NO: 192559 - RNA, 19 nt, Homo sapiens
  misc_RNA (1)...(19): siRNA sense strand
uaaagcacauuuggaagac

SEQ ID NO: 192560 - RNA, 19 nt, Homo sapiens
  misc_RNA (1)...(19): siRNA sense strand
acaggagucuaaagcacuu

SEQ ID NO: 192561 - RNA, 19 nt, Homo sapiens
  misc_RNA (1)...(19): siRNA sense strand
acagauaccuuuucaagca

SEQ ID NO: 192562 - RNA, 19 nt, Homo sapiens
  misc_RNA (1)...(19): siRNA sense strand
aagcacauuuggaagacaa

SEQ ID NO: 192563 - RNA, 19 nt, Homo sapiens
  misc_RNA (1)...(19): siRNA sense strand
gcuaauaauaagccagaga

SEQ ID NO: 192564 - RNA, 19 nt, Homo sapiens
  misc_RNA (1)...(19): siRNA sense strand
caagagcacaacaauuugg

SEQ ID NO: 192565 - RNA, 19 nt, Homo sapiens
  misc_RNA (1)...(19): siRNA sense strand
ccugucagcugcaugugau

SEQ ID NO: 192566 - RNA, 19 nt, Homo sapiens
  misc_RNA (1)...(19): siRNA sense strand
gcugcugaauguuuaugau

SEQ ID NO: 192567 - RNA, 19 nt, Homo sapiens
  misc_RNA (1)...(19): siRNA sense strand
acagagcucuaccagucuu

SEQ ID NO: 192568 - RNA, 19 nt, Homo sapiens
  misc_RNA (1)...(19): siRNA sense strand
acaguugggugaaguugca

SEQ ID NO: 192569 - RNA, 19 nt, Homo sapiens
  misc_RNA (1)...(19): siRNA sense strand
guuugaccacuauuuauga

SEQ ID NO: 192570 - RNA, 19 nt, Homo sapiens
  misc_RNA (1)...(19): siRNA sense strand
gcuuauaggacugccauga

SEQ ID NO: 192571 - RNA, 19 nt, Homo sapiens
  misc_RNA (1)...(19): siRNA sense strand
caucaggccaaauguaaca

SEQ ID NO: 192572 - RNA, 19 nt, Homo sapiens
  misc_RNA (1)...(19): siRNA sense strand
gauucuauccaaauuccaa

SEQ ID NO: 192573 - RNA, 19 nt, Homo sapiens
  misc_RNA (1)...(19): siRNA sense strand
ggcaaguucaacaggauuu

SEQ ID NO: 192574 - RNA, 19 nt, Homo sapiens
  misc_RNA (1)...(19): siRNA sense strand
gaacuggcugcugaauguu

SEQ ID NO: 192575 - RNA, 19 nt, Homo sapiens
  misc_RNA (1)...(19): siRNA sense strand
cugcugaauguuuaugaua

SEQ ID NO: 192576 - RNA, 19 nt, Homo sapiens
  misc_RNA (1)...(19): siRNA sense strand
aagcaucaggccaaaugua

SEQ ID NO: 192577 - RNA, 19 nt, Homo sapiens
  misc_RNA (1)...(19): siRNA sense strand
uggcaucauuucccugugu

SEQ ID NO: 192578 - RNA, 19 nt, Homo sapiens
  misc_RNA (1)...(19): siRNA sense strand
ccaugaaacuccgaagacu

SEQ ID NO: 192579 - RNA, 19 nt, Homo sapiens
  misc_RNA (1)...(19): siRNA sense strand
auaauaagccagagaucga

SEQ ID NO: 192580 - RNA, 19 nt, Homo sapiens
  misc_RNA (1)...(19): siRNA sense strand
cuaauaauaagccagagau

SEQ ID NO: 192581 - RNA, 19 nt, Homo sapiens
  misc_RNA (1)...(19): siRNA sense strand
ugggugaaguugcauccuu

SEQ ID NO: 192582 - RNA, 19 nt, Homo sapiens
  misc_RNA (1)...(19): siRNA sense strand
caucauuucccuguguaaa

SEQ ID NO: 192583 - RNA, 19 nt, Homo sapiens
  misc_RNA (1)...(19): siRNA sense strand
gcguggauaugugucugaa

SEQ ID NO: 192584 - RNA, 19 nt, Homo sapiens
  misc_RNA (1)...(19): siRNA sense strand
gcacuaucccaugguggaa

SEQ ID NO: 192585 - RNA, 19 nt, Homo sapiens
  misc_RNA (1)...(19): siRNA sense strand
gagccugucagcugcaugu

SEQ ID NO: 192586 - RNA, 19 nt, Homo sapiens
  misc_RNA (1)...(19): siRNA sense strand
guacagauaccuuuucaag

SEQ ID NO: 192587 - RNA, 19 nt, Homo sapiens
  misc_RNA (1)...(19): siRNA sense strand
gucccucucugcguggaua

SEQ ID NO: 192588 - RNA, 19 nt, Homo sapiens
  misc_RNA (1)...(19): siRNA sense strand
ggagcugcuuccaauuugc

SEQ ID NO: 192589 - RNA, 19 nt, Homo sapiens
  misc_RNA (1)...(19): siRNA sense strand
uuagcugaccugaauaaug

SEQ ID NO: 192590 - RNA, 19 nt, Homo sapiens
  misc_RNA (1)...(19): siRNA sense strand
guggcaaguucaacaggau

SEQ ID NO: 192591 - RNA, 19 nt, Homo sapiens
  misc_RNA (1)...(19): siRNA sense strand
acaacaauuuggucaacgu

SEQ ID NO: 192592 - RNA, 19 nt, Homo sapiens
  misc_RNA (1)...(19): siRNA sense strand
gacuacaucaggagaagau

SEQ ID NO: 192593 - RNA, 19 nt, Homo sapiens
  misc_RNA (1)...(19): siRNA sense strand
uaauaagccagagaucgaa

SEQ ID NO: 192594 - RNA, 19 nt, Homo sapiens
  misc_RNA (1)...(19): siRNA sense strand
ugucagauucucagcuuau

SEQ ID NO: 192595 - RNA, 19 nt, Homo sapiens
  misc_RNA (1)...(19): siRNA sense strand
ggauauccugcagauuauu

SEQ ID NO: 192596 - RNA, 19 nt, Homo sapiens
  misc_RNA (1)...(19): siRNA sense strand
agcaucaggccaaauguaa

SEQ ID NO: 192597 - RNA, 19 nt, Homo sapiens
  misc_RNA (1)...(19): siRNA sense strand
gcccuuugcuuggaucucu

SEQ ID NO: 192598 - RNA, 19 nt, Homo sapiens
  misc_RNA (1)...(19): siRNA sense strand
gcugaauguuuaugauacg

SEQ ID NO: 192599 - RNA, 19 nt, Homo sapiens
  misc_RNA (1)...(19): siRNA sense strand
agacuuugccaagguacua

SEQ ID NO: 192600 - RNA, 19 nt, Homo sapiens
  misc_RNA (1)...(19): siRNA sense strand
caagcaaguggcaaguuca

SEQ ID NO: 192601 - RNA, 19 nt, Homo sapiens
  misc_RNA (1)...(19): siRNA sense strand
agacaaguacagauaccuu

SEQ ID NO: 192602 - RNA, 19 nt, Homo sapiens
  misc_RNA (1)...(19): siRNA sense strand
gcaucauuucccuguguaa

SEQ ID NO: 192603 - RNA, 19 nt, Homo sapiens
  misc_RNA (1)...(19): siRNA sense strand
cugcaaagaguguccaauc

SEQ ID NO: 192604 - RNA, 19 nt, Homo sapiens
  misc_RNA (1)...(19): siRNA sense strand
cuuauaggacugccaugaa

SEQ ID NO: 192605 - RNA, 19 nt, Homo sapiens
  misc_RNA (1)...(19): siRNA sense strand
caaagaguguccaaucauu

SEQ ID NO: 192606 - RNA, 19 nt, Homo sapiens
  misc_RNA (1)...(19): siRNA sense strand
uagcugaccugaauaaugu

SEQ ID NO: 192607 - RNA, 19 nt, Homo sapiens
  misc_RNA (1)...(19): siRNA sense strand
gcaugauucuauccaaauu

SEQ ID NO: 192608 - RNA, 19 nt, Homo sapiens
  misc_RNA (1)...(19): siRNA sense strand
ugaacuggcugcugaaugu

SEQ ID NO: 192609 - RNA, 19 nt, Homo sapiens
  misc_RNA (1)...(19): siRNA sense strand
gauauccugcagauuauua

SEQ ID NO: 192610 - RNA, 19 nt, Homo sapiens
  misc_RNA (1)...(19): siRNA sense strand
gagaagauguucgagacuu

SEQ ID NO: 192611 - RNA, 19 nt, Homo sapiens
  misc_RNA (1)...(19): siRNA sense strand
gcacuuuaauuaugacauc

SEQ ID NO: 192612 - RNA, 19 nt, Homo sapiens
  misc_RNA (1)...(19): siRNA sense strand
guaaagcacauuuggaaga

SEQ ID NO: 192613 - RNA, 19 nt, Homo sapiens
  misc_RNA (1)...(19): siRNA sense strand
gaauauugcacuccgacua

SEQ ID NO: 192614 - RNA, 19 nt, Homo sapiens
  misc_RNA (1)...(19): siRNA sense strand
uuauaggacugccaugaaa

SEQ ID NO: 192615 - RNA, 19 nt, Homo sapiens
  misc_RNA (1)...(19): siRNA sense strand
gggugaaguugcauccuuu

SEQ ID NO: 192616 - RNA, 19 nt, Homo sapiens
  misc_RNA (1)...(19): siRNA sense strand
gcaagagcacaacaauuug

SEQ ID NO: 192617 - RNA, 19 nt, Homo sapiens
  misc_RNA (1)...(19): siRNA sense strand
gcacaacaauuuggucaac

SEQ ID NO: 192618 - RNA, 19 nt, Homo sapiens
  misc_RNA (1)...(19): siRNA sense strand
agcaagagcacaacaauuu

SEQ ID NO: 192619 - RNA, 19 nt, Homo sapiens
  misc_RNA (1)...(19): siRNA sense strand
agaagauguucgagacuuu

SEQ ID NO: 192620 - RNA, 19 nt, Homo sapiens
  misc_RNA (1)...(19): siRNA sense strand
gagcaagagcacaacaauu

SEQ ID NO: 192621 - RNA, 19 nt, Homo sapiens
  misc_RNA (1)...(19): siRNA sense strand
ucaagcaaguggcaaguuc

SEQ ID NO: 192622 - RNA, 19 nt, Homo sapiens
  misc_RNA (1)...(19): siRNA sense strand
ccacgagacucaaacaacu

SEQ ID NO: 192623 - RNA, 19 nt, Homo sapiens
  misc_RNA (1)...(19): siRNA sense strand
cagcacaaccucaagcaaa

SEQ ID NO: 192624 - RNA, 19 nt, Homo sapiens
  misc_RNA (1)...(19): siRNA sense strand
gcaaagaguguccaaucau

SEQ ID NO: 192625 - RNA, 19 nt, Homo sapiens
  misc_RNA (1)...(19): siRNA sense strand
auggauauccugcagauua

SEQ ID NO: 192626 - RNA, 19 nt, Homo sapiens
  misc_RNA (1)...(19): siRNA sense strand
uguaacaucugcaaagagu

SEQ ID NO: 192627 - RNA, 19 nt, Homo sapiens
  misc_RNA (1)...(19): siRNA sense strand
guccggagcugcuuccaau

SEQ ID NO: 192628 - RNA, 19 nt, Homo sapiens
  misc_RNA (1)...(19): siRNA sense strand
gcaaguggcaaguucaaca

SEQ ID NO: 192629 - RNA, 19 nt, Homo sapiens
  misc_RNA (1)...(19): siRNA sense strand
gcuuccaauuugcuaauaa

SEQ ID NO: 192630 - RNA, 19 nt, Homo sapiens
  misc_RNA (1)...(19): siRNA sense strand
uggaagacaaguacagaua

SEQ ID NO: 192631 - RNA, 19 nt, Homo sapiens
  misc_RNA (1)...(19): siRNA sense strand
ggauccguguccugucuuu

SEQ ID NO: 192632 - RNA, 19 nt, Homo sapiens
  misc_RNA (1)...(19): siRNA sense strand
gucuuuagcugaccugaau

SEQ ID NO: 192633 - RNA, 19 nt, Homo sapiens
  misc_RNA (1)...(19): siRNA sense strand
gacaaguacagauaccuuu

SEQ ID NO: 192634 - RNA, 19 nt, Homo sapiens
  misc_RNA (1)...(19): siRNA sense strand
ccaagcaucaggccaaaug

SEQ ID NO: 192635 - RNA, 19 nt, Homo sapiens
  misc_RNA (1)...(19): siRNA sense strand
ggagcaagagcacaacaau

SEQ ID NO: 192636 - RNA, 19 nt, Homo sapiens
  misc_RNA (1)...(19): siRNA sense strand
guguaaagcacauuuggaa

SEQ ID NO: 192637 - RNA, 19 nt, Homo sapiens
  misc_RNA (1)...(19): siRNA sense strand
caagacaguugggugaagu

SEQ ID NO: 192638 - RNA, 19 nt, Homo sapiens
  misc_RNA (1)...(19): siRNA sense strand
gaagauguucgagacuuug

SEQ ID NO: 192639 - RNA, 19 nt, Homo sapiens
  misc_RNA (1)...(19): siRNA sense strand
gucagauucucagcuuaua

SEQ ID NO: 192640 - RNA, 19 nt, Homo sapiens
  misc_RNA (1)...(19): siRNA sense strand
uaacaucugcaaagagugu

SEQ ID NO: 192641 - RNA, 19 nt, Homo sapiens
  misc_RNA (1)...(19): siRNA sense strand
cggagcugcuuccaauuug

SEQ ID NO: 192642 - RNA, 19 nt, Homo sapiens
  misc_RNA (1)...(19): siRNA sense strand
gaagacaaguacagauacc

SEQ ID NO: 192643 - RNA, 19 nt, Homo sapiens
  misc_RNA (1)...(19): siRNA sense strand
ccauggauauccugcagau

SEQ ID NO: 192644 - RNA, 19 nt, Homo sapiens
  misc_RNA (1)...(19): siRNA sense strand
ggcaucauuucccugugua

SEQ ID NO: 192645 - RNA, 19 nt, Homo sapiens
  misc_RNA (1)...(19): siRNA sense strand
uggauauccugcagauuau

SEQ ID NO: 192646 - RNA, 19 nt, Homo sapiens
  misc_RNA (1)...(19): siRNA sense strand
ggaagacaaguacagauac

SEQ ID NO: 192647 - RNA, 19 nt, Homo sapiens
  misc_RNA (1)...(19): siRNA sense strand
ugcaaagaguguccaauca

SEQ ID NO: 192648 - RNA, 19 nt, Homo sapiens
  misc_RNA (1)...(19): siRNA sense strand
guggauaugugucugaacu

SEQ ID NO: 192649 - RNA, 19 nt, Homo sapiens
  misc_RNA (1)...(19): siRNA sense strand
acuggcugcugaauguuua

SEQ ID NO: 192650 - RNA, 19 nt, Homo sapiens
  misc_RNA (1)...(19): siRNA sense strand
acuaucccaugguggaaua

SEQ ID NO: 192651 - RNA, 19 nt, Homo sapiens
  misc_RNA (1)...(19): siRNA sense strand
ccggagcugcuuccaauuu

SEQ ID NO: 192652 - RNA, 19 nt, Homo sapiens
  misc_RNA (1)...(19): siRNA sense strand
ccaaauuccaagacaguug

SEQ ID NO: 192653 - RNA, 19 nt, Homo sapiens
  misc_RNA (1)...(19): siRNA sense strand
cagaaacugccaagcauca

SEQ ID NO: 192654 - RNA, 19 nt, Homo sapiens
  misc_RNA (1)...(19): siRNA sense strand
uaugacaucugccaaagcu

SEQ ID NO: 192655 - RNA, 19 nt, Homo sapiens
  misc_RNA (1)...(19): siRNA sense strand
aaugucagauucucagcuu

SEQ ID NO: 192656 - RNA, 19 nt, Homo sapiens
  misc_RNA (1)...(19): siRNA sense strand
ucgagacuuugccaaggua

SEQ ID NO: 192657 - RNA, 19 nt, Homo sapiens
  misc_RNA (1)...(19): siRNA sense strand
gcaaaaggccauaaaaugc

SEQ ID NO: 192658 - RNA, 19 nt, Homo sapiens
  misc_RNA (1)...(19): siRNA sense strand
cugcaugauucuauccaaa

SEQ ID NO: 192659 - RNA, 19 nt, Homo sapiens
  misc_RNA (1)...(19): siRNA sense strand
uaaagcacauuuggaagac

SEQ ID NO: 192660 - RNA, 19 nt, Homo sapiens
  misc_RNA (1)...(19): siRNA sense strand
acaggagucuaaagcacuu

SEQ ID NO: 192661 - RNA, 19 nt, Homo sapiens
  misc_RNA (1)...(19): siRNA sense strand
acagauaccuuuucaagca

SEQ ID NO: 192662 - RNA, 19 nt, Homo sapiens
  misc_RNA (1)...(19): siRNA sense strand
aagcacauuuggaagacaa

SEQ ID NO: 192663 - RNA, 19 nt, Homo sapiens
  misc_RNA (1)...(19): siRNA sense strand
gcuaauaauaagccagaga

SEQ ID NO: 192664 - RNA, 19 nt, Homo sapiens
  misc_RNA (1)...(19): siRNA sense strand
caagagcacaacaauuugg

SEQ ID NO: 192665 - RNA, 19 nt, Homo sapiens
  misc_RNA (1)...(19): siRNA sense strand
ccugucagcugcaugugau

SEQ ID NO: 192666 - RNA, 19 nt, Homo sapiens
  misc_RNA (1)...(19): siRNA sense strand
gcugcugaauguuuaugau

SEQ ID NO: 192667 - RNA, 19 nt, Homo sapiens
  misc_RNA (1)...(19): siRNA sense strand
acagagcucuaccagucuu

SEQ ID NO: 192668 - RNA, 19 nt, Homo sapiens
  misc_RNA (1)...(19): siRNA sense strand
acaguugggugaaguugca

SEQ ID NO: 192669 - RNA, 19 nt, Homo sapiens
  misc_RNA (1)...(19): siRNA sense strand
guuugaccacuauuuauga

SEQ ID NO: 192670 - RNA, 19 nt, Homo sapiens
  misc_RNA (1)...(19): siRNA sense strand
gcuuauaggacugccauga

SEQ ID NO: 192671 - RNA, 19 nt, Homo sapiens
  misc_RNA (1)...(19): siRNA sense strand
caucaggccaaauguaaca

SEQ ID NO: 192672 - RNA, 19 nt, Homo sapiens
  misc_RNA (1)...(19): siRNA sense strand
gauucuauccaaauuccaa

SEQ ID NO: 192673 - RNA, 19 nt, Homo sapiens
  misc_RNA (1)...(19): siRNA sense strand
ggcaaguucaacaggauuu

SEQ ID NO: 192674 - RNA, 19 nt, Homo sapiens
  misc_RNA (1)...(19): siRNA sense strand
gaacuggcugcugaauguu

SEQ ID NO: 192675 - RNA, 19 nt, Homo sapiens
  misc_RNA (1)...(19): siRNA sense strand
cugcugaauguuuaugaua

SEQ ID NO: 192676 - RNA, 19 nt, Homo sapiens
  misc_RNA (1)...(19): siRNA sense strand
aagcaucaggccaaaugua

SEQ ID NO: 192677 - RNA, 19 nt, Homo sapiens
  misc_RNA (1)...(19): siRNA sense strand
uggcaucauuucccugugu

SEQ ID NO: 192678 - RNA, 19 nt, Homo sapiens
  misc_RNA (1)...(19): siRNA sense strand
ccaugaaacuccgaagacu

SEQ ID NO: 192679 - RNA, 19 nt, Homo sapiens
  misc_RNA (1)...(19): siRNA sense strand
auaauaagccagagaucga

SEQ ID NO: 192680 - RNA, 19 nt, Homo sapiens
  misc_RNA (1)...(19): siRNA sense strand
cuaauaauaagccagagau

SEQ ID NO: 192681 - RNA, 19 nt, Homo sapiens
  misc_RNA (1)...(19): siRNA sense strand
ugggugaaguugcauccuu

SEQ ID NO: 192682 - RNA, 19 nt, Homo sapiens
  misc_RNA (1)...(19): siRNA sense strand
caucauuucccuguguaaa

SEQ ID NO: 192683 - RNA, 19 nt, Homo sapiens
  misc_RNA (1)...(19): siRNA sense strand
gcguggauaugugucugaa

SEQ ID NO: 192684 - RNA, 19 nt, Homo sapiens
  misc_RNA (1)...(19): siRNA sense strand
gcacuaucccaugguggaa

SEQ ID NO: 192685 - RNA, 19 nt, Homo sapiens
  misc_RNA (1)...(19): siRNA sense strand
gagccugucagcugcaugu

SEQ ID NO: 192686 - RNA, 19 nt, Homo sapiens
  misc_RNA (1)...(19): siRNA sense strand
guacagauaccuuuucaag

SEQ ID NO: 192687 - RNA, 19 nt, Homo sapiens
  misc_RNA (1)...(19): siRNA sense strand
gucccucucugcguggaua

SEQ ID NO: 192688 - RNA, 19 nt, Homo sapiens
  misc_RNA (1)...(19): siRNA sense strand
ggagcugcuuccaauuugc

SEQ ID NO: 192689 - RNA, 19 nt, Homo sapiens
  misc_RNA (1)...(19): siRNA sense strand
uuagcugaccugaauaaug

SEQ ID NO: 192690 - RNA, 19 nt, Homo sapiens
  misc_RNA (1)...(19): siRNA sense strand
guggcaaguucaacaggau

SEQ ID NO: 192691 - RNA, 19 nt, Homo sapiens
  misc_RNA (1)...(19): siRNA sense strand
acaacaauuuggucaacgu

SEQ ID NO: 192692 - RNA, 19 nt, Homo sapiens
  misc_RNA (1)...(19): siRNA sense strand
gacuacaucaggagaagau

SEQ ID NO: 192693 - RNA, 19 nt, Homo sapiens
  misc_RNA (1)...(19): siRNA sense strand
uaauaagccagagaucgaa

SEQ ID NO: 192694 - RNA, 19 nt, Homo sapiens
  misc_RNA (1)...(19): siRNA sense strand
ugucagauucucagcuuau

SEQ ID NO: 192695 - RNA, 19 nt, Homo sapiens
  misc_RNA (1)...(19): siRNA sense strand
ggauauccugcagauuauu

SEQ ID NO: 192696 - RNA, 19 nt, Homo sapiens
  misc_RNA (1)...(19): siRNA sense strand
agcaucaggccaaauguaa

SEQ ID NO: 192697 - RNA, 19 nt, Homo sapiens
  misc_RNA (1)...(19): siRNA sense strand
gcccuuugcuuggaucucu

SEQ ID NO: 192698 - RNA, 19 nt, Homo sapiens
  misc_RNA (1)...(19): siRNA sense strand
gcugaauguuuaugauacg

SEQ ID NO: 192699 - RNA, 19 nt, Homo sapiens
  misc_RNA (1)...(19): siRNA sense strand
agacuuugccaagguacua

SEQ ID NO: 192700 - RNA, 19 nt, Homo sapiens
  misc_RNA (1)...(19): siRNA sense strand
caagcaaguggcaaguuca

SEQ ID NO: 192701 - RNA, 19 nt, Homo sapiens
  misc_RNA (1)...(19): siRNA sense strand
agacaaguacagauaccuu

SEQ ID NO: 192702 - RNA, 19 nt, Homo sapiens
  misc_RNA (1)...(19): siRNA sense strand
gcaucauuucccuguguaa

SEQ ID NO: 192703 - RNA, 19 nt, Homo sapiens
  misc_RNA (1)...(19): siRNA sense strand
cugcaaagaguguccaauc

SEQ ID NO: 192704 - RNA, 19 nt, Homo sapiens
  misc_RNA (1)...(19): siRNA sense strand
cuuauaggacugccaugaa

SEQ ID NO: 192705 - RNA, 19 nt, Homo sapiens
  misc_RNA (1)...(19): siRNA sense strand
caaagaguguccaaucauu

SEQ ID NO: 192706 - RNA, 19 nt, Homo sapiens
  misc_RNA (1)...(19): siRNA sense strand
uagcugaccugaauaaugu

SEQ ID NO: 192707 - RNA, 19 nt, Homo sapiens
  misc_RNA (1)...(19): siRNA sense strand
gcaugauucuauccaaauu

SEQ ID NO: 192708 - RNA, 19 nt, Homo sapiens
  misc_RNA (1)...(19): siRNA sense strand
ugaacuggcugcugaaugu

SEQ ID NO: 192709 - RNA, 19 nt, Homo sapiens
  misc_RNA (1)...(19): siRNA sense strand
gauauccugcagauuauua

SEQ ID NO: 192710 - RNA, 19 nt, Homo sapiens
  misc_RNA (1)...(19): siRNA sense strand
gagaagauguucgagacuu

SEQ ID NO: 192711 - RNA, 19 nt, Homo sapiens
  misc_RNA (1)...(19): siRNA sense strand
gcacuuuaauuaugacauc

SEQ ID NO: 192712 - RNA, 19 nt, Homo sapiens
  misc_RNA (1)...(19): siRNA sense strand
guaaagcacauuuggaaga

SEQ ID NO: 192713 - RNA, 19 nt, Homo sapiens
  misc_RNA (1)...(19): siRNA sense strand
gaauauugcacuccgacua

SEQ ID NO: 192714 - RNA, 19 nt, Homo sapiens
  misc_RNA (1)...(19): siRNA sense strand
uuauaggacugccaugaaa

SEQ ID NO: 192715 - RNA, 19 nt, Homo sapiens
  misc_RNA (1)...(19): siRNA sense strand
gggugaaguugcauccuuu

SEQ ID NO: 192716 - RNA, 19 nt, Homo sapiens
  misc_RNA (1)...(19): siRNA sense strand
gcaagagcacaacaauuug

SEQ ID NO: 192717 - RNA, 19 nt, Homo sapiens
  misc_RNA (1)...(19): siRNA sense strand
gcacaacaauuuggucaac

SEQ ID NO: 192718 - RNA, 19 nt, Homo sapiens
  misc_RNA (1)...(19): siRNA sense strand
agcaagagcacaacaauuu

SEQ ID NO: 192719 - RNA, 19 nt, Homo sapiens
  misc_RNA (1)...(19): siRNA sense strand
agaagauguucgagacuuu

SEQ ID NO: 192720 - RNA, 19 nt, Homo sapiens
  misc_RNA (1)...(19): siRNA sense strand
gagcaagagcacaacaauu

SEQ ID NO: 192721 - RNA, 19 nt, Homo sapiens
  misc_RNA (1)...(19): siRNA sense strand
ucaagcaaguggcaaguuc

SEQ ID NO: 192722 - RNA, 19 nt, Homo sapiens
  misc_RNA (1)...(19): siRNA sense strand
ccacgagacucaaacaacu

SEQ ID NO: 192723 - RNA, 19 nt, Homo sapiens
  misc_RNA (1)...(19): siRNA sense strand
cagcacaaccucaagcaaa

SEQ ID NO: 192724 - RNA, 19 nt, Homo sapiens
  misc_RNA (1)...(19): siRNA sense strand
gcaaagaguguccaaucau

SEQ ID NO: 192725 - RNA, 19 nt, Homo sapiens
  misc_RNA (1)...(19): siRNA sense strand
auggauauccugcagauua

SEQ ID NO: 192726 - RNA, 19 nt, Homo sapiens
  misc_RNA (1)...(19): siRNA sense strand
uguaacaucugcaaagagu

SEQ ID NO: 192727 - RNA, 19 nt, Homo sapiens
  misc_RNA (1)...(19): siRNA sense strand
guccggagcugcuuccaau

SEQ ID NO: 192728 - RNA, 19 nt, Homo sapiens
  misc_RNA (1)...(19): siRNA sense strand
gcaaguggcaaguucaaca

SEQ ID NO: 192729 - RNA, 19 nt, Homo sapiens
  misc_RNA (1)...(19): siRNA sense strand
gcuuccaauuugcuaauaa

SEQ ID NO: 192730 - RNA, 19 nt, Homo sapiens
  misc_RNA (1)...(19): siRNA sense strand
uggaagacaaguacagaua

SEQ ID NO: 192731 - RNA, 19 nt, Homo sapiens
  misc_RNA (1)...(19): siRNA sense strand
ggauccguguccugucuuu

SEQ ID NO: 192732 - RNA, 19 nt, Homo sapiens
  misc_RNA (1)...(19): siRNA sense strand
gucuuuagcugaccugaau

SEQ ID NO: 192733 - RNA, 19 nt, Homo sapiens
  misc_RNA (1)...(19): siRNA sense strand
gacaaguacagauaccuuu

SEQ ID NO: 192734 - RNA, 19 nt, Homo sapiens
  misc_RNA (1)...(19): siRNA sense strand
ccaagcaucaggccaaaug

SEQ ID NO: 192735 - RNA, 19 nt, Homo sapiens
  misc_RNA (1)...(19): siRNA sense strand
ggagcaagagcacaacaau

SEQ ID NO: 192736 - RNA, 19 nt, Homo sapiens
  misc_RNA (1)...(19): siRNA sense strand
guguaaagcacauuuggaa

SEQ ID NO: 192737 - RNA, 19 nt, Homo sapiens
  misc_RNA (1)...(19): siRNA sense strand
caagacaguugggugaagu

SEQ ID NO: 192738 - RNA, 19 nt, Homo sapiens
  misc_RNA (1)...(19): siRNA sense strand
gaagauguucgagacuuug

SEQ ID NO: 192739 - RNA, 19 nt, Homo sapiens
  misc_RNA (1)...(19): siRNA sense strand
gucagauucucagcuuaua

SEQ ID NO: 192740 - RNA, 19 nt, Homo sapiens
  misc_RNA (1)...(19): siRNA sense strand
uaacaucugcaaagagugu

SEQ ID NO: 192741 - RNA, 19 nt, Homo sapiens
  misc_RNA (1)...(19): siRNA sense strand
cggagcugcuuccaauuug

SEQ ID NO: 192742 - RNA, 19 nt, Homo sapiens
  misc_RNA (1)...(19): siRNA sense strand
gaagacaaguacagauacc

SEQ ID NO: 192743 - RNA, 19 nt, Homo sapiens
  misc_RNA (1)...(19): siRNA sense strand
ccauggauauccugcagau

SEQ ID NO: 192744 - RNA, 19 nt, Homo sapiens
  misc_RNA (1)...(19): siRNA sense strand
ggcaucauuucccugugua

SEQ ID NO: 192745 - RNA, 19 nt, Homo sapiens
  misc_RNA (1)...(19): siRNA sense strand
uggauauccugcagauuau

SEQ ID NO: 192746 - RNA, 19 nt, Homo sapiens
  misc_RNA (1)...(19): siRNA sense strand
ggaagacaaguacagauac

SEQ ID NO: 192747 - RNA, 19 nt, Homo sapiens
  misc_RNA (1)...(19): siRNA sense strand
ugcaaagaguguccaauca

SEQ ID NO: 192748 - RNA, 19 nt, Homo sapiens
  misc_RNA (1)...(19): siRNA sense strand
guggauaugugucugaacu

SEQ ID NO: 192749 - RNA, 19 nt, Homo sapiens
  misc_RNA (1)...(19): siRNA sense strand
acuggcugcugaauguuua

SEQ ID NO: 192750 - RNA, 19 nt, Homo sapiens
  misc_RNA (1)...(19): siRNA sense strand
acuaucccaugguggaaua

SEQ ID NO: 192751 - RNA, 19 nt, Homo sapiens
  misc_RNA (1)...(19): siRNA sense strand
ccggagcugcuuccaauuu

SEQ ID NO: 192752 - RNA, 19 nt, Homo sapiens
  misc_RNA (1)...(19): siRNA sense strand
ccaaauuccaagacaguug

SEQ ID NO: 192753 - RNA, 19 nt, Homo sapiens
  misc_RNA (1)...(19): siRNA sense strand
cagaaacugccaagcauca

SEQ ID NO: 192754 - RNA, 19 nt, Homo sapiens
  misc_RNA (1)...(19): siRNA sense strand
uaugacaucugccaaagcu

SEQ ID NO: 192755 - RNA, 19 nt, Homo sapiens
  misc_RNA (1)...(19): siRNA sense strand
aaugucagauucucagcuu

SEQ ID NO: 192756 - RNA, 19 nt, Homo sapiens
  misc_RNA (1)...(19): siRNA sense strand
ucgagacuuugccaaggua

SEQ ID NO: 192757 - RNA, 19 nt, Homo sapiens
  misc_RNA (1)...(19): siRNA sense strand
gcaaaaggccauaaaaugc

SEQ ID NO: 192758 - RNA, 19 nt, Homo sapiens
  misc_RNA (1)...(19): siRNA sense strand
cugcaugauucuauccaaa

SEQ ID NO: 192759 - RNA, 19 nt, Homo sapiens
  misc_RNA (1)...(19): siRNA sense strand
uaaagcacauuuggaagac

SEQ ID NO: 192760 - RNA, 19 nt, Homo sapiens
  misc_RNA (1)...(19): siRNA sense strand
acaggagucuaaagcacuu

SEQ ID NO: 192761 - RNA, 19 nt, Homo sapiens
  misc_RNA (1)...(19): siRNA sense strand
acagauaccuuuucaagca

SEQ ID NO: 192762 - RNA, 19 nt, Homo sapiens
  misc_RNA (1)...(19): siRNA sense strand
aagcacauuuggaagacaa

SEQ ID NO: 192763 - RNA, 19 nt, Homo sapiens
  misc_RNA (1)...(19): siRNA sense strand
gcuaauaauaagccagaga

SEQ ID NO: 192764 - RNA, 19 nt, Homo sapiens
  misc_RNA (1)...(19): siRNA sense strand
caagagcacaacaauuugg

SEQ ID NO: 192765 - RNA, 19 nt, Homo sapiens
  misc_RNA (1)...(19): siRNA sense strand
ccugucagcugcaugugau

SEQ ID NO: 192766 - RNA, 19 nt, Homo sapiens
  misc_RNA (1)...(19): siRNA sense strand
gcugcugaauguuuaugau

SEQ ID NO: 192767 - RNA, 19 nt, Homo sapiens
  misc_RNA (1)...(19): siRNA sense strand
acagagcucuaccagucuu

SEQ ID NO: 192768 - RNA, 19 nt, Homo sapiens
  misc_RNA (1)...(19): siRNA sense strand
acaguugggugaaguugca

SEQ ID NO: 192769 - RNA, 19 nt, Homo sapiens
  misc_RNA (1)...(19): siRNA sense strand
guuugaccacuauuuauga

SEQ ID NO: 192770 - RNA, 19 nt, Homo sapiens
  misc_RNA (1)...(19): siRNA sense strand
gcuuauaggacugccauga

SEQ ID NO: 192771 - RNA, 19 nt, Homo sapiens
  misc_RNA (1)...(19): siRNA sense strand
caucaggccaaauguaaca

SEQ ID NO: 192772 - RNA, 19 nt, Homo sapiens
  misc_RNA (1)...(19): siRNA sense strand
gauucuauccaaauuccaa

SEQ ID NO: 192773 - RNA, 19 nt, Homo sapiens
  misc_RNA (1)...(19): siRNA sense strand
ggcaaguucaacaggauuu

SEQ ID NO: 192774 - RNA, 19 nt, Homo sapiens
  misc_RNA (1)...(19): siRNA sense strand
gaacuggcugcugaauguu

SEQ ID NO: 192775 - RNA, 19 nt, Homo sapiens
  misc_RNA (1)...(19): siRNA sense strand
cugcugaauguuuaugaua

SEQ ID NO: 192776 - RNA, 19 nt, Homo sapiens
  misc_RNA (1)...(19): siRNA sense strand
aagcaucaggccaaaugua

SEQ ID NO: 192777 - RNA, 19 nt, Homo sapiens
  misc_RNA (1)...(19): siRNA sense strand
uggcaucauuucccugugu

SEQ ID NO: 192778 - RNA, 19 nt, Homo sapiens
  misc_RNA (1)...(19): siRNA sense strand
ccaugaaacuccgaagacu

SEQ ID NO: 192779 - RNA, 19 nt, Homo sapiens
  misc_RNA (1)...(19): siRNA sense strand
auaauaagccagagaucga

SEQ ID NO: 192780 - RNA, 19 nt, Homo sapiens
  misc_RNA (1)...(19): siRNA sense strand
cuaauaauaagccagagau

SEQ ID NO: 192781 - RNA, 19 nt, Homo sapiens
  misc_RNA (1)...(19): siRNA sense strand
ugggugaaguugcauccuu

SEQ ID NO: 192782 - RNA, 19 nt, Homo sapiens
  misc_RNA (1)...(19): siRNA sense strand
caucauuucccuguguaaa

SEQ ID NO: 192783 - RNA, 19 nt, Homo sapiens
  misc_RNA (1)...(19): siRNA sense strand
gcguggauaugugucugaa

SEQ ID NO: 192784 - RNA, 19 nt, Homo sapiens
  misc_RNA (1)...(19): siRNA sense strand
gcacuaucccaugguggaa

SEQ ID NO: 192785 - RNA, 19 nt, Homo sapiens
  misc_RNA (1)...(19): siRNA sense strand
gagccugucagcugcaugu

SEQ ID NO: 192786 - RNA, 19 nt, Homo sapiens
  misc_RNA (1)...(19): siRNA sense strand
guacagauaccuuuucaag

SEQ ID NO: 192787 - RNA, 19 nt, Homo sapiens
  misc_RNA (1)...(19): siRNA sense strand
gucccucucugcguggaua

SEQ ID NO: 192788 - RNA, 19 nt, Homo sapiens
  misc_RNA (1)...(19): siRNA sense strand
ggagcugcuuccaauuugc

SEQ ID NO: 192789 - RNA, 19 nt, Homo sapiens
  misc_RNA (1)...(19): siRNA sense strand
uuagcugaccugaauaaug

SEQ ID NO: 192790 - RNA, 19 nt, Homo sapiens
  misc_RNA (1)...(19): siRNA sense strand
guggcaaguucaacaggau

SEQ ID NO: 192791 - RNA, 19 nt, Homo sapiens
  misc_RNA (1)...(19): siRNA sense strand
acaacaauuuggucaacgu

SEQ ID NO: 192792 - RNA, 19 nt, Homo sapiens
  misc_RNA (1)...(19): siRNA sense strand
gacuacaucaggagaagau

SEQ ID NO: 192793 - RNA, 19 nt, Homo sapiens
  misc_RNA (1)...(19): siRNA sense strand
uaauaagccagagaucgaa

SEQ ID NO: 192794 - RNA, 19 nt, Homo sapiens
  misc_RNA (1)...(19): siRNA sense strand
ugucagauucucagcuuau

SEQ ID NO: 192795 - RNA, 19 nt, Homo sapiens
  misc_RNA (1)...(19): siRNA sense strand
ggauauccugcagauuauu

SEQ ID NO: 192796 - RNA, 19 nt, Homo sapiens
  misc_RNA (1)...(19): siRNA sense strand
agcaucaggccaaauguaa

SEQ ID NO: 192797 - RNA, 19 nt, Homo sapiens
  misc_RNA (1)...(19): siRNA sense strand
gcccuuugcuuggaucucu

SEQ ID NO: 192798 - RNA, 19 nt, Homo sapiens
  misc_RNA (1)...(19): siRNA sense strand
gcugaauguuuaugauacg

SEQ ID NO: 192799 - RNA, 19 nt, Homo sapiens
  misc_RNA (1)...(19): siRNA sense strand
agacuuugccaagguacua

SEQ ID NO: 192800 - RNA, 19 nt, Homo sapiens
  misc_RNA (1)...(19): siRNA sense strand
caagcaaguggcaaguuca

SEQ ID NO: 192801 - RNA, 19 nt, Homo sapiens
  misc_RNA (1)...(19): siRNA sense strand
agacaaguacagauaccuu

SEQ ID NO: 192802 - RNA, 19 nt, Homo sapiens
  misc_RNA (1)...(19): siRNA sense strand
gcaucauuucccuguguaa

SEQ ID NO: 192803 - RNA, 19 nt, Homo sapiens
  misc_RNA (1)...(19): siRNA sense strand
cugcaaagaguguccaauc

SEQ ID NO: 192804 - RNA, 19 nt, Homo sapiens
  misc_RNA (1)...(19): siRNA sense strand
cuuauaggacugccaugaa

SEQ ID NO: 192805 - RNA, 19 nt, Homo sapiens
  misc_RNA (1)...(19): siRNA sense strand
caaagaguguccaaucauu

SEQ ID NO: 192806 - RNA, 19 nt, Homo sapiens
  misc_RNA (1)...(19): siRNA sense strand
uagcugaccugaauaaugu

SEQ ID NO: 192807 - RNA, 19 nt, Homo sapiens
  misc_RNA (1)...(19): siRNA sense strand
gcaugauucuauccaaauu

SEQ ID NO: 192808 - RNA, 19 nt, Homo sapiens
  misc_RNA (1)...(19): siRNA sense strand
ugaacuggcugcugaaugu

SEQ ID NO: 192809 - RNA, 19 nt, Homo sapiens
  misc_RNA (1)...(19): siRNA sense strand
gauauccugcagauuauua

SEQ ID NO: 192810 - RNA, 19 nt, Homo sapiens
  misc_RNA (1)...(19): siRNA sense strand
gagaagauguucgagacuu

SEQ ID NO: 192811 - RNA, 19 nt, Homo sapiens
  misc_RNA (1)...(19): siRNA sense strand
gcacuuuaauuaugacauc

SEQ ID NO: 192812 - RNA, 19 nt, Homo sapiens
  misc_RNA (1)...(19): siRNA sense strand
guaaagcacauuuggaaga

SEQ ID NO: 192813 - RNA, 19 nt, Homo sapiens
  misc_RNA (1)...(19): siRNA sense strand
gaauauugcacuccgacua

SEQ ID NO: 192814 - RNA, 19 nt, Homo sapiens
  misc_RNA (1)...(19): siRNA sense strand
uuauaggacugccaugaaa

SEQ ID NO: 192815 - RNA, 19 nt, Homo sapiens
  misc_RNA (1)...(19): siRNA sense strand
gggugaaguugcauccuuu

SEQ ID NO: 192816 - RNA, 19 nt, Homo sapiens
  misc_RNA (1)...(19): siRNA sense strand
gcaagagcacaacaauuug

SEQ ID NO: 192817 - RNA, 19 nt, Homo sapiens
  misc_RNA (1)...(19): siRNA sense strand
gcacaacaauuuggucaac

SEQ ID NO: 192818 - RNA, 19 nt, Homo sapiens
  misc_RNA (1)...(19): siRNA sense strand
agcaagagcacaacaauuu

SEQ ID NO: 192819 - RNA, 19 nt, Homo sapiens
  misc_RNA (1)...(19): siRNA sense strand
agaagauguucgagacuuu

SEQ ID NO: 192820 - RNA, 19 nt, Homo sapiens
  misc_RNA (1)...(19): siRNA sense strand
gagcaagagcacaacaauu

SEQ ID NO: 192821 - RNA, 19 nt, Homo sapiens
  misc_RNA (1)...(19): siRNA sense strand
ucaagcaaguggcaaguuc

SEQ ID NO: 192822 - RNA, 19 nt, Homo sapiens
  misc_RNA (1)...(19): siRNA sense strand
ccacgagacucaaacaacu

SEQ ID NO: 192823 - RNA, 19 nt, Homo sapiens
  misc_RNA (1)...(19): siRNA sense strand
cagcacaaccucaagcaaa

SEQ ID NO: 192824 - RNA, 19 nt, Homo sapiens
  misc_RNA (1)...(19): siRNA sense strand
gcaaagaguguccaaucau

SEQ ID NO: 192825 - RNA, 19 nt, Homo sapiens
  misc_RNA (1)...(19): siRNA sense strand
auggauauccugcagauua

SEQ ID NO: 192826 - RNA, 19 nt, Homo sapiens
  misc_RNA (1)...(19): siRNA sense strand
uguaacaucugcaaagagu

SEQ ID NO: 192827 - RNA, 19 nt, Homo sapiens
  misc_RNA (1)...(19): siRNA sense strand
guccggagcugcuuccaau

SEQ ID NO: 192828 - RNA, 19 nt, Homo sapiens
  misc_RNA (1)...(19): siRNA sense strand
gcaaguggcaaguucaaca

SEQ ID NO: 192829 - RNA, 19 nt, Homo sapiens
  misc_RNA (1)...(19): siRNA sense strand
gcuuccaauuugcuaauaa

SEQ ID NO: 192830 - RNA, 19 nt, Homo sapiens
  misc_RNA (1)...(19): siRNA sense strand
uggaagacaaguacagaua

SEQ ID NO: 192831 - RNA, 19 nt, Homo sapiens
  misc_RNA (1)...(19): siRNA sense strand
ggauccguguccugucuuu

SEQ ID NO: 192832 - RNA, 19 nt, Homo sapiens
  misc_RNA (1)...(19): siRNA sense strand
gucuuuagcugaccugaau

SEQ ID NO: 192833 - RNA, 19 nt, Homo sapiens
  misc_RNA (1)...(19): siRNA sense strand
gacaaguacagauaccuuu

SEQ ID NO: 192834 - RNA, 19 nt, Homo sapiens
  misc_RNA (1)...(19): siRNA sense strand
ccaagcaucaggccaaaug

SEQ ID NO: 192835 - RNA, 19 nt, Homo sapiens
  misc_RNA (1)...(19): siRNA sense strand
ggagcaagagcacaacaau

SEQ ID NO: 192836 - RNA, 19 nt, Homo sapiens
  misc_RNA (1)...(19): siRNA sense strand
guguaaagcacauuuggaa

SEQ ID NO: 192837 - RNA, 19 nt, Homo sapiens
  misc_RNA (1)...(19): siRNA sense strand
caagacaguugggugaagu

SEQ ID NO: 192838 - RNA, 19 nt, Homo sapiens
  misc_RNA (1)...(19): siRNA sense strand
gaagauguucgagacuuug

SEQ ID NO: 192839 - RNA, 19 nt, Homo sapiens
  misc_RNA (1)...(19): siRNA sense strand
gucagauucucagcuuaua

SEQ ID NO: 192840 - RNA, 19 nt, Homo sapiens
  misc_RNA (1)...(19): siRNA sense strand
uaacaucugcaaagagugu

SEQ ID NO: 192841 - RNA, 19 nt, Homo sapiens
  misc_RNA (1)...(19): siRNA sense strand
cggagcugcuuccaauuug

SEQ ID NO: 192842 - RNA, 19 nt, Homo sapiens
  misc_RNA (1)...(19): siRNA sense strand
gaagacaaguacagauacc

SEQ ID NO: 192843 - RNA, 19 nt, Homo sapiens
  misc_RNA (1)...(19): siRNA sense strand
ccauggauauccugcagau

SEQ ID NO: 192844 - RNA, 19 nt, Homo sapiens
  misc_RNA (1)...(19): siRNA sense strand
ggcaucauuucccugugua

SEQ ID NO: 192845 - RNA, 19 nt, Homo sapiens
  misc_RNA (1)...(19): siRNA sense strand
uggauauccugcagauuau

SEQ ID NO: 192846 - RNA, 19 nt, Homo sapiens
  misc_RNA (1)...(19): siRNA sense strand
ggaagacaaguacagauac

SEQ ID NO: 192847 - RNA, 19 nt, Homo sapiens
  misc_RNA (1)...(19): siRNA sense strand
ugcaaagaguguccaauca

SEQ ID NO: 192848 - RNA, 19 nt, Homo sapiens
  misc_RNA (1)...(19): siRNA sense strand
guggauaugugucugaacu

SEQ ID NO: 192849 - RNA, 19 nt, Homo sapiens
  misc_RNA (1)...(19): siRNA sense strand
acuggcugcugaauguuua

SEQ ID NO: 192850 - RNA, 19 nt, Homo sapiens
  misc_RNA (1)...(19): siRNA sense strand
acuaucccaugguggaaua

SEQ ID NO: 192851 - RNA, 19 nt, Homo sapiens
  misc_RNA (1)...(19): siRNA sense strand
ccggagcugcuuccaauuu

SEQ ID NO: 192852 - RNA, 19 nt, Homo sapiens
  misc_RNA (1)...(19): siRNA sense strand
ccaaauuccaagacaguug

SEQ ID NO: 192853 - RNA, 19 nt, Homo sapiens
  misc_RNA (1)...(19): siRNA sense strand
cagaaacugccaagcauca

SEQ ID NO: 192854 - RNA, 19 nt, Homo sapiens
  misc_RNA (1)...(19): siRNA sense strand
uaugacaucugccaaagcu

SEQ ID NO: 192855 - RNA, 19 nt, Homo sapiens
  misc_RNA (1)...(19): siRNA sense strand
aaugucagauucucagcuu

SEQ ID NO: 192856 - RNA, 19 nt, Homo sapiens
  misc_RNA (1)...(19): siRNA sense strand
ucgagacuuugccaaggua

SEQ ID NO: 192857 - RNA, 19 nt, Homo sapiens
  misc_RNA (1)...(19): siRNA sense strand
gcaaaaggccauaaaaugc

SEQ ID NO: 192858 - RNA, 19 nt, Homo sapiens
  misc_RNA (1)...(19): siRNA sense strand
cugcaugauucuauccaaa

SEQ ID NO: 192859 - RNA, 19 nt, Homo sapiens
  misc_RNA (1)...(19): siRNA sense strand
uaaagcacauuuggaagac

SEQ ID NO: 192860 - RNA, 19 nt, Homo sapiens
  misc_RNA (1)...(19): siRNA sense strand
acaggagucuaaagcacuu

SEQ ID NO: 192861 - RNA, 19 nt, Homo sapiens
  misc_RNA (1)...(19): siRNA sense strand
acagauaccuuuucaagca

SEQ ID NO: 192862 - RNA, 19 nt, Homo sapiens
  misc_RNA (1)...(19): siRNA sense strand
aagcacauuuggaagacaa

SEQ ID NO: 192863 - RNA, 19 nt, Homo sapiens
  misc_RNA (1)...(19): siRNA sense strand
gcuaauaauaagccagaga

SEQ ID NO: 192864 - RNA, 19 nt, Homo sapiens
  misc_RNA (1)...(19): siRNA sense strand
caagagcacaacaauuugg

SEQ ID NO: 192865 - RNA, 19 nt, Homo sapiens
  misc_RNA (1)...(19): siRNA sense strand
ccugucagcugcaugugau

SEQ ID NO: 192866 - RNA, 19 nt, Homo sapiens
  misc_RNA (1)...(19): siRNA sense strand
gcugcugaauguuuaugau

SEQ ID NO: 192867 - RNA, 19 nt, Homo sapiens
  misc_RNA (1)...(19): siRNA sense strand
acagagcucuaccagucuu

SEQ ID NO: 192868 - RNA, 19 nt, Homo sapiens
  misc_RNA (1)...(19): siRNA sense strand
acaguugggugaaguugca

SEQ ID NO: 192869 - RNA, 19 nt, Homo sapiens
  misc_RNA (1)...(19): siRNA sense strand
guuugaccacuauuuauga

SEQ ID NO: 192870 - RNA, 19 nt, Homo sapiens
  misc_RNA (1)...(19): siRNA sense strand
gcuuauaggacugccauga

SEQ ID NO: 192871 - RNA, 19 nt, Homo sapiens
  misc_RNA (1)...(19): siRNA sense strand
caucaggccaaauguaaca

SEQ ID NO: 192872 - RNA, 19 nt, Homo sapiens
  misc_RNA (1)...(19): siRNA sense strand
gauucuauccaaauuccaa

SEQ ID NO: 192873 - RNA, 19 nt, Homo sapiens
  misc_RNA (1)...(19): siRNA sense strand
ggcaaguucaacaggauuu

SEQ ID NO: 192874 - RNA, 19 nt, Homo sapiens
  misc_RNA (1)...(19): siRNA sense strand
gaacuggcugcugaauguu

SEQ ID NO: 192875 - RNA, 19 nt, Homo sapiens
  misc_RNA (1)...(19): siRNA sense strand
cugcugaauguuuaugaua

SEQ ID NO: 192876 - RNA, 19 nt, Homo sapiens
  misc_RNA (1)...(19): siRNA sense strand
aagcaucaggccaaaugua

SEQ ID NO: 192877 - RNA, 19 nt, Homo sapiens
  misc_RNA (1)...(19): siRNA sense strand
uggcaucauuucccugugu

SEQ ID NO: 192878 - RNA, 19 nt, Homo sapiens
  misc_RNA (1)...(19): siRNA sense strand
ccaugaaacuccgaagacu

SEQ ID NO: 192879 - RNA, 19 nt, Homo sapiens
  misc_RNA (1)...(19): siRNA sense strand
auaauaagccagagaucga

SEQ ID NO: 192880 - RNA, 19 nt, Homo sapiens
  misc_RNA (1)...(19): siRNA sense strand
cuaauaauaagccagagau

SEQ ID NO: 192881 - RNA, 19 nt, Homo sapiens
  misc_RNA (1)...(19): siRNA sense strand
ugggugaaguugcauccuu

SEQ ID NO: 192882 - RNA, 19 nt, Homo sapiens
  misc_RNA (1)...(19): siRNA sense strand
caucauuucccuguguaaa

SEQ ID NO: 192883 - RNA, 19 nt, Homo sapiens
  misc_RNA (1)...(19): siRNA sense strand
gcguggauaugugucugaa

SEQ ID NO: 192884 - RNA, 19 nt, Homo sapiens
  misc_RNA (1)...(19): siRNA sense strand
gcacuaucccaugguggaa

SEQ ID NO: 192885 - RNA, 19 nt, Homo sapiens
  misc_RNA (1)...(19): siRNA sense strand
gagccugucagcugcaugu

SEQ ID NO: 192886 - RNA, 19 nt, Homo sapiens
  misc_RNA (1)...(19): siRNA sense strand
guacagauaccuuuucaag

SEQ ID NO: 192887 - RNA, 19 nt, Homo sapiens
  misc_RNA (1)...(19): siRNA sense strand
gucccucucugcguggaua

SEQ ID NO: 192888 - RNA, 19 nt, Homo sapiens
  misc_RNA (1)...(19): siRNA sense strand
ggagcugcuuccaauuugc

SEQ ID NO: 192889 - RNA, 19 nt, Homo sapiens
  misc_RNA (1)...(19): siRNA sense strand
uuagcugaccugaauaaug

SEQ ID NO: 192890 - RNA, 19 nt, Homo sapiens
  misc_RNA (1)...(19): siRNA sense strand
guggcaaguucaacaggau

SEQ ID NO: 192891 - RNA, 19 nt, Homo sapiens
  misc_RNA (1)...(19): siRNA sense strand
acaacaauuuggucaacgu

SEQ ID NO: 192892 - RNA, 19 nt, Homo sapiens
  misc_RNA (1)...(19): siRNA sense strand
gacuacaucaggagaagau

SEQ ID NO: 192893 - RNA, 19 nt, Homo sapiens
  misc_RNA (1)...(19): siRNA sense strand
uaauaagccagagaucgaa

SEQ ID NO: 192894 - RNA, 19 nt, Homo sapiens
  misc_RNA (1)...(19): siRNA sense strand
ugucagauucucagcuuau

SEQ ID NO: 192895 - RNA, 19 nt, Homo sapiens
  misc_RNA (1)...(19): siRNA sense strand
ggauauccugcagauuauu

SEQ ID NO: 192896 - RNA, 19 nt, Homo sapiens
  misc_RNA (1)...(19): siRNA sense strand
agcaucaggccaaauguaa

SEQ ID NO: 192897 - RNA, 19 nt, Homo sapiens
  misc_RNA (1)...(19): siRNA sense strand
gcccuuugcuuggaucucu

SEQ ID NO: 192898 - RNA, 19 nt, Homo sapiens
  misc_RNA (1)...(19): siRNA sense strand
gcugaauguuuaugauacg

SEQ ID NO: 192899 - RNA, 19 nt, Homo sapiens
  misc_RNA (1)...(19): siRNA sense strand
agacuuugccaagguacua

SEQ ID NO: 192900 - RNA, 19 nt, Homo sapiens
  misc_RNA (1)...(19): siRNA sense strand
caagcaaguggcaaguuca

SEQ ID NO: 192901 - RNA, 19 nt, Homo sapiens
  misc_RNA (1)...(19): siRNA sense strand
agacaaguacagauaccuu

SEQ ID NO: 192902 - RNA, 19 nt, Homo sapiens
  misc_RNA (1)...(19): siRNA sense strand
gcaucauuucccuguguaa

SEQ ID NO: 192903 - RNA, 19 nt, Homo sapiens
  misc_RNA (1)...(19): siRNA sense strand
cugcaaagaguguccaauc

SEQ ID NO: 192904 - RNA, 19 nt, Homo sapiens
  misc_RNA (1)...(19): siRNA sense strand
cuuauaggacugccaugaa

SEQ ID NO: 192905 - RNA, 19 nt, Homo sapiens
  misc_RNA (1)...(19): siRNA sense strand
caaagaguguccaaucauu

SEQ ID NO: 192906 - RNA, 19 nt, Homo sapiens
  misc_RNA (1)...(19): siRNA sense strand
uagcugaccugaauaaugu

SEQ ID NO: 192907 - RNA, 19 nt, Homo sapiens
  misc_RNA (1)...(19): siRNA sense strand
gcaugauucuauccaaauu

SEQ ID NO: 192908 - RNA, 19 nt, Homo sapiens
  misc_RNA (1)...(19): siRNA sense strand
ugaacuggcugcugaaugu

SEQ ID NO: 192909 - RNA, 19 nt, Homo sapiens
  misc_RNA (1)...(19): siRNA sense strand
gauauccugcagauuauua

SEQ ID NO: 192910 - RNA, 19 nt, Homo sapiens
  misc_RNA (1)...(19): siRNA sense strand
gagaagauguucgagacuu

SEQ ID NO: 192911 - RNA, 19 nt, Homo sapiens
  misc_RNA (1)...(19): siRNA sense strand
gcacuuuaauuaugacauc

SEQ ID NO: 192912 - RNA, 19 nt, Homo sapiens
  misc_RNA (1)...(19): siRNA sense strand
guaaagcacauuuggaaga

SEQ ID NO: 192913 - RNA, 19 nt, Homo sapiens
  misc_RNA (1)...(19): siRNA sense strand
gaauauugcacuccgacua

SEQ ID NO: 192914 - RNA, 19 nt, Homo sapiens
  misc_RNA (1)...(19): siRNA sense strand
uuauaggacugccaugaaa

SEQ ID NO: 192915 - RNA, 19 nt, Homo sapiens
  misc_RNA (1)...(19): siRNA sense strand
gggugaaguugcauccuuu

SEQ ID NO: 192916 - RNA, 19 nt, Homo sapiens
  misc_RNA (1)...(19): siRNA sense strand
gcaagagcacaacaauuug

SEQ ID NO: 192917 - RNA, 19 nt, Homo sapiens
  misc_RNA (1)...(19): siRNA sense strand
gcacaacaauuuggucaac

SEQ ID NO: 192918 - RNA, 19 nt, Homo sapiens
  misc_RNA (1)...(19): siRNA sense strand
agcaagagcacaacaauuu

SEQ ID NO: 192919 - RNA, 19 nt, Homo sapiens
  misc_RNA (1)...(19): siRNA sense strand
agaagauguucgagacuuu

SEQ ID NO: 192920 - RNA, 19 nt, Homo sapiens
  misc_RNA (1)...(19): siRNA sense strand
gagcaagagcacaacaauu

SEQ ID NO: 192921 - RNA, 19 nt, Homo sapiens
  misc_RNA (1)...(19): siRNA sense strand
ucaagcaaguggcaaguuc

SEQ ID NO: 192922 - RNA, 19 nt, Homo sapiens
  misc_RNA (1)...(19): siRNA sense strand
ccacgagacucaaacaacu

SEQ ID NO: 192923 - RNA, 19 nt, Homo sapiens
  misc_RNA (1)...(19): siRNA sense strand
cagcacaaccucaagcaaa

SEQ ID NO: 192924 - RNA, 19 nt, Homo sapiens
  misc_RNA (1)...(19): siRNA sense strand
gcaaagaguguccaaucau

SEQ ID NO: 192925 - RNA, 19 nt, Homo sapiens
  misc_RNA (1)...(19): siRNA sense strand
auggauauccugcagauua

SEQ ID NO: 192926 - RNA, 19 nt, Homo sapiens
  misc_RNA (1)...(19): siRNA sense strand
uguaacaucugcaaagagu

SEQ ID NO: 192927 - RNA, 19 nt, Homo sapiens
  misc_RNA (1)...(19): siRNA sense strand
guccggagcugcuuccaau

SEQ ID NO: 192928 - RNA, 19 nt, Homo sapiens
  misc_RNA (1)...(19): siRNA sense strand
gcaaguggcaaguucaaca

SEQ ID NO: 192929 - RNA, 19 nt, Homo sapiens
  misc_RNA (1)...(19): siRNA sense strand
gcuuccaauuugcuaauaa

SEQ ID NO: 192930 - RNA, 19 nt, Homo sapiens
  misc_RNA (1)...(19): siRNA sense strand
uggaagacaaguacagaua

SEQ ID NO: 192931 - RNA, 19 nt, Homo sapiens
  misc_RNA (1)...(19): siRNA sense strand
ggauccguguccugucuuu

SEQ ID NO: 192932 - RNA, 19 nt, Homo sapiens
  misc_RNA (1)...(19): siRNA sense strand
gucuuuagcugaccugaau

SEQ ID NO: 192933 - RNA, 19 nt, Homo sapiens
  misc_RNA (1)...(19): siRNA sense strand
gacaaguacagauaccuuu

SEQ ID NO: 192934 - RNA, 19 nt, Homo sapiens
  misc_RNA (1)...(19): siRNA sense strand
ccaagcaucaggccaaaug

SEQ ID NO: 192935 - RNA, 19 nt, Homo sapiens
  misc_RNA (1)...(19): siRNA sense strand
ggagcaagagcacaacaau

SEQ ID NO: 192936 - RNA, 19 nt, Homo sapiens
  misc_RNA (1)...(19): siRNA sense strand
guguaaagcacauuuggaa

SEQ ID NO: 192937 - RNA, 19 nt, Homo sapiens
  misc_RNA (1)...(19): siRNA sense strand
caagacaguugggugaagu

SEQ ID NO: 192938 - RNA, 19 nt, Homo sapiens
  misc_RNA (1)...(19): siRNA sense strand
gaagauguucgagacuuug

SEQ ID NO: 192939 - RNA, 19 nt, Homo sapiens
  misc_RNA (1)...(19): siRNA sense strand
gucagauucucagcuuaua

SEQ ID NO: 192940 - RNA, 19 nt, Homo sapiens
  misc_RNA (1)...(19): siRNA sense strand
uaacaucugcaaagagugu

SEQ ID NO: 192941 - RNA, 19 nt, Homo sapiens
  misc_RNA (1)...(19): siRNA sense strand
cggagcugcuuccaauuug

SEQ ID NO: 192942 - RNA, 19 nt, Homo sapiens
  misc_RNA (1)...(19): siRNA sense strand
gaagacaaguacagauacc

SEQ ID NO: 192943 - RNA, 19 nt, Homo sapiens
  misc_RNA (1)...(19): siRNA sense strand
ccauggauauccugcagau

SEQ ID NO: 192944 - RNA, 19 nt, Homo sapiens
  misc_RNA (1)...(19): siRNA sense strand
ggcaucauuucccugugua

SEQ ID NO: 192945 - RNA, 19 nt, Homo sapiens
  misc_RNA (1)...(19): siRNA sense strand
uggauauccugcagauuau

SEQ ID NO: 192946 - RNA, 19 nt, Homo sapiens
  misc_RNA (1)...(19): siRNA sense strand
ggaagacaaguacagauac

SEQ ID NO: 192947 - RNA, 19 nt, Homo sapiens
  misc_RNA (1)...(19): siRNA sense strand
ugcaaagaguguccaauca

SEQ ID NO: 192948 - RNA, 19 nt, Homo sapiens
  misc_RNA (1)...(19): siRNA sense strand
guggauaugugucugaacu

SEQ ID NO: 192949 - RNA, 19 nt, Homo sapiens
  misc_RNA (1)...(19): siRNA sense strand
acuggcugcugaauguuua

SEQ ID NO: 192950 - RNA, 19 nt, Homo sapiens
  misc_RNA (1)...(19): siRNA sense strand
acuaucccaugguggaaua

SEQ ID NO: 192951 - RNA, 19 nt, Homo sapiens
  misc_RNA (1)...(19): siRNA sense strand
ccggagcugcuuccaauuu

SEQ ID NO: 192952 - RNA, 19 nt, Homo sapiens
  misc_RNA (1)...(19): siRNA sense strand
ccaaauuccaagacaguug

SEQ ID NO: 192953 - RNA, 19 nt, Homo sapiens
  misc_RNA (1)...(19): siRNA sense strand
cagaaacugccaagcauca

SEQ ID NO: 192954 - RNA, 19 nt, Homo sapiens
  misc_RNA (1)...(19): siRNA sense strand
uaugacaucugccaaagcu

SEQ ID NO: 192955 - RNA, 19 nt, Homo sapiens
  misc_RNA (1)...(19): siRNA sense strand
aaugucagauucucagcuu

SEQ ID NO: 192956 - RNA, 19 nt, Homo sapiens
  misc_RNA (1)...(19): siRNA sense strand
ucgagacuuugccaaggua

SEQ ID NO: 192957 - RNA, 19 nt, Homo sapiens
  misc_RNA (1)...(19): siRNA sense strand
gcaaaaggccauaaaaugc

SEQ ID NO: 192958 - RNA, 19 nt, Homo sapiens
  misc_RNA (1)...(19): siRNA sense strand
cugcaugauucuauccaaa

SEQ ID NO: 192959 - RNA, 19 nt, Homo sapiens
  misc_RNA (1)...(19): siRNA sense strand
uaaagcacauuuggaagac

SEQ ID NO: 192960 - RNA, 19 nt, Homo sapiens
  misc_RNA (1)...(19): siRNA sense strand
acaggagucuaaagcacuu

SEQ ID NO: 192961 - RNA, 19 nt, Homo sapiens
  misc_RNA (1)...(19): siRNA sense strand
acagauaccuuuucaagca

SEQ ID NO: 192962 - RNA, 19 nt, Homo sapiens
  misc_RNA (1)...(19): siRNA sense strand
aagcacauuuggaagacaa

SEQ ID NO: 192963 - RNA, 19 nt, Homo sapiens
  misc_RNA (1)...(19): siRNA sense strand
gcuaauaauaagccagaga

SEQ ID NO: 192964 - RNA, 19 nt, Homo sapiens
  misc_RNA (1)...(19): siRNA sense strand
caagagcacaacaauuugg

SEQ ID NO: 192965 - RNA, 19 nt, Homo sapiens
  misc_RNA (1)...(19): siRNA sense strand
ccugucagcugcaugugau

SEQ ID NO: 192966 - RNA, 19 nt, Homo sapiens
  misc_RNA (1)...(19): siRNA sense strand
gcugcugaauguuuaugau

SEQ ID NO: 192967 - RNA, 19 nt, Homo sapiens
  misc_RNA (1)...(19): siRNA sense strand
acagagcucuaccagucuu

SEQ ID NO: 192968 - RNA, 19 nt, Homo sapiens
  misc_RNA (1)...(19): siRNA sense strand
acaguugggugaaguugca

SEQ ID NO: 192969 - RNA, 19 nt, Homo sapiens
  misc_RNA (1)...(19): siRNA sense strand
guuugaccacuauuuauga

SEQ ID NO: 192970 - RNA, 19 nt, Homo sapiens
  misc_RNA (1)...(19): siRNA sense strand
gcuuauaggacugccauga

SEQ ID NO: 192971 - RNA, 19 nt, Homo sapiens
  misc_RNA (1)...(19): siRNA sense strand
caucaggccaaauguaaca

SEQ ID NO: 192972 - RNA, 19 nt, Homo sapiens
  misc_RNA (1)...(19): siRNA sense strand
gauucuauccaaauuccaa

SEQ ID NO: 192973 - RNA, 19 nt, Homo sapiens
  misc_RNA (1)...(19): siRNA sense strand
ggcaaguucaacaggauuu

SEQ ID NO: 192974 - RNA, 19 nt, Homo sapiens
  misc_RNA (1)...(19): siRNA sense strand
gaacuggcugcugaauguu

SEQ ID NO: 192975 - RNA, 19 nt, Homo sapiens
  misc_RNA (1)...(19): siRNA sense strand
cugcugaauguuuaugaua

SEQ ID NO: 192976 - RNA, 19 nt, Homo sapiens
  misc_RNA (1)...(19): siRNA sense strand
aagcaucaggccaaaugua

SEQ ID NO: 192977 - RNA, 19 nt, Homo sapiens
  misc_RNA (1)...(19): siRNA sense strand
uggcaucauuucccugugu

SEQ ID NO: 192978 - RNA, 19 nt, Homo sapiens
  misc_RNA (1)...(19): siRNA sense strand
ccaugaaacuccgaagacu

SEQ ID NO: 192979 - RNA, 19 nt, Homo sapiens
  misc_RNA (1)...(19): siRNA sense strand
auaauaagccagagaucga

SEQ ID NO: 192980 - RNA, 19 nt, Homo sapiens
  misc_RNA (1)...(19): siRNA sense strand
cuaauaauaagccagagau

SEQ ID NO: 192981 - RNA, 19 nt, Homo sapiens
  misc_RNA (1)...(19): siRNA sense strand
ugggugaaguugcauccuu

SEQ ID NO: 192982 - RNA, 19 nt, Homo sapiens
  misc_RNA (1)...(19): siRNA sense strand
caucauuucccuguguaaa

SEQ ID NO: 192983 - RNA, 19 nt, Homo sapiens
  misc_RNA (1)...(19): siRNA sense strand
gcguggauaugugucugaa

SEQ ID NO: 192984 - RNA, 19 nt, Homo sapiens
  misc_RNA (1)...(19): siRNA sense strand
gcacuaucccaugguggaa

SEQ ID NO: 192985 - RNA, 19 nt, Homo sapiens
  misc_RNA (1)...(19): siRNA sense strand
gagccugucagcugcaugu

SEQ ID NO: 192986 - RNA, 19 nt, Homo sapiens
  misc_RNA (1)...(19): siRNA sense strand
guacagauaccuuuucaag

SEQ ID NO: 192987 - RNA, 19 nt, Homo sapiens
  misc_RNA (1)...(19): siRNA sense strand
gucccucucugcguggaua

SEQ ID NO: 192988 - RNA, 19 nt, Homo sapiens
  misc_RNA (1)...(19): siRNA sense strand
ggagcugcuuccaauuugc

SEQ ID NO: 192989 - RNA, 19 nt, Homo sapiens
  misc_RNA (1)...(19): siRNA sense strand
uuagcugaccugaauaaug

SEQ ID NO: 192990 - RNA, 19 nt, Homo sapiens
  misc_RNA (1)...(19): siRNA sense strand
guggcaaguucaacaggau

SEQ ID NO: 192991 - RNA, 19 nt, Homo sapiens
  misc_RNA (1)...(19): siRNA sense strand
acaacaauuuggucaacgu

SEQ ID NO: 192992 - RNA, 19 nt, Homo sapiens
  misc_RNA (1)...(19): siRNA sense strand
gacuacaucaggagaagau

SEQ ID NO: 192993 - RNA, 19 nt, Homo sapiens
  misc_RNA (1)...(19): siRNA sense strand
uaauaagccagagaucgaa

SEQ ID NO: 192994 - RNA, 19 nt, Homo sapiens
  misc_RNA (1)...(19): siRNA sense strand
ugucagauucucagcuuau

SEQ ID NO: 192995 - RNA, 19 nt, Homo sapiens
  misc_RNA (1)...(19): siRNA sense strand
ggauauccugcagauuauu

SEQ ID NO: 192996 - RNA, 19 nt, Homo sapiens
  misc_RNA (1)...(19): siRNA sense strand
agcaucaggccaaauguaa

SEQ ID NO: 192997 - RNA, 19 nt, Homo sapiens
  misc_RNA (1)...(19): siRNA sense strand
gcccuuugcuuggaucucu

SEQ ID NO: 192998 - RNA, 19 nt, Homo sapiens
  misc_RNA (1)...(19): siRNA sense strand
gcugaauguuuaugauacg

SEQ ID NO: 192999 - RNA, 19 nt, Homo sapiens
  misc_RNA (1)...(19): siRNA sense strand
agacuuugccaagguacua

SEQ ID NO: 193000 - RNA, 19 nt, Homo sapiens
  misc_RNA (1)...(19): siRNA sense strand
caagcaaguggcaaguuca

SEQ ID NO: 193001 - RNA, 19 nt, Homo sapiens
  misc_RNA (1)...(19): siRNA sense strand
agacaaguacagauaccuu

SEQ ID NO: 193002 - RNA, 19 nt, Homo sapiens
  misc_RNA (1)...(19): siRNA sense strand
gcaucauuucccuguguaa

SEQ ID NO: 193003 - RNA, 19 nt, Homo sapiens
  misc_RNA (1)...(19): siRNA sense strand
cugcaaagaguguccaauc

SEQ ID NO: 193004 - RNA, 19 nt, Homo sapiens
  misc_RNA (1)...(19): siRNA sense strand
cuuauaggacugccaugaa

SEQ ID NO: 193005 - RNA, 19 nt, Homo sapiens
  misc_RNA (1)...(19): siRNA sense strand
caaagaguguccaaucauu

SEQ ID NO: 193006 - RNA, 19 nt, Homo sapiens
  misc_RNA (1)...(19): siRNA sense strand
uagcugaccugaauaaugu

SEQ ID NO: 193007 - RNA, 19 nt, Homo sapiens
  misc_RNA (1)...(19): siRNA sense strand
gcaugauucuauccaaauu

SEQ ID NO: 193008 - RNA, 19 nt, Homo sapiens
  misc_RNA (1)...(19): siRNA sense strand
ugaacuggcugcugaaugu

SEQ ID NO: 193009 - RNA, 19 nt, Homo sapiens
  misc_RNA (1)...(19): siRNA sense strand
gauauccugcagauuauua

SEQ ID NO: 193010 - RNA, 19 nt, Homo sapiens
  misc_RNA (1)...(19): siRNA sense strand
gagaagauguucgagacuu

SEQ ID NO: 193011 - RNA, 19 nt, Homo sapiens
  misc_RNA (1)...(19): siRNA sense strand
gcacuuuaauuaugacauc

SEQ ID NO: 193012 - RNA, 19 nt, Homo sapiens
  misc_RNA (1)...(19): siRNA sense strand
guaaagcacauuuggaaga

SEQ ID NO: 193013 - RNA, 19 nt, Homo sapiens
  misc_RNA (1)...(19): siRNA sense strand
gaauauugcacuccgacua

SEQ ID NO: 193014 - RNA, 19 nt, Homo sapiens
  misc_RNA (1)...(19): siRNA sense strand
uuauaggacugccaugaaa

SEQ ID NO: 193015 - RNA, 19 nt, Homo sapiens
  misc_RNA (1)...(19): siRNA sense strand
gggugaaguugcauccuuu

SEQ ID NO: 193016 - RNA, 19 nt, Homo sapiens
  misc_RNA (1)...(19): siRNA sense strand
gcaagagcacaacaauuug

SEQ ID NO: 193017 - RNA, 19 nt, Homo sapiens
  misc_RNA (1)...(19): siRNA sense strand
gcacaacaauuuggucaac

SEQ ID NO: 193018 - RNA, 19 nt, Homo sapiens
  misc_RNA (1)...(19): siRNA sense strand
agcaagagcacaacaauuu

SEQ ID NO: 193019 - RNA, 19 nt, Homo sapiens
  misc_RNA (1)...(19): siRNA sense strand
agaagauguucgagacuuu

SEQ ID NO: 193020 - RNA, 19 nt, Homo sapiens
  misc_RNA (1)...(19): siRNA sense strand
gagcaagagcacaacaauu

SEQ ID NO: 193021 - RNA, 19 nt, Homo sapiens
  misc_RNA (1)...(19): siRNA sense strand
ucaagcaaguggcaaguuc

SEQ ID NO: 193022 - RNA, 19 nt, Homo sapiens
  misc_RNA (1)...(19): siRNA sense strand
ccacgagacucaaacaacu

SEQ ID NO: 193023 - RNA, 19 nt, Homo sapiens
  misc_RNA (1)...(19): siRNA sense strand
cagcacaaccucaagcaaa

SEQ ID NO: 193024 - RNA, 19 nt, Homo sapiens
  misc_RNA (1)...(19): siRNA sense strand
gcaaagaguguccaaucau

SEQ ID NO: 193025 - RNA, 19 nt, Homo sapiens
  misc_RNA (1)...(19): siRNA sense strand
auggauauccugcagauua

SEQ ID NO: 193026 - RNA, 19 nt, Homo sapiens
  misc_RNA (1)...(19): siRNA sense strand
uguaacaucugcaaagagu

SEQ ID NO: 193027 - RNA, 19 nt, Homo sapiens
  misc_RNA (1)...(19): siRNA sense strand
guccggagcugcuuccaau

SEQ ID NO: 193028 - RNA, 19 nt, Homo sapiens
  misc_RNA (1)...(19): siRNA sense strand
gcaaguggcaaguucaaca

SEQ ID NO: 193029 - RNA, 19 nt, Homo sapiens
  misc_RNA (1)...(19): siRNA sense strand
gcuuccaauuugcuaauaa

SEQ ID NO: 193030 - RNA, 19 nt, Homo sapiens
  misc_RNA (1)...(19): siRNA sense strand
uggaagacaaguacagaua

SEQ ID NO: 193031 - RNA, 19 nt, Homo sapiens
  misc_RNA (1)...(19): siRNA sense strand
ggauccguguccugucuuu

SEQ ID NO: 193032 - RNA, 19 nt, Homo sapiens
  misc_RNA (1)...(19): siRNA sense strand
gucuuuagcugaccugaau

SEQ ID NO: 193033 - RNA, 19 nt, Homo sapiens
  misc_RNA (1)...(19): siRNA sense strand
gacaaguacagauaccuuu

SEQ ID NO: 193034 - RNA, 19 nt, Homo sapiens
  misc_RNA (1)...(19): siRNA sense strand
ccaagcaucaggccaaaug

SEQ ID NO: 193035 - RNA, 19 nt, Homo sapiens
  misc_RNA (1)...(19): siRNA sense strand
ggagcaagagcacaacaau

SEQ ID NO: 193036 - RNA, 19 nt, Homo sapiens
  misc_RNA (1)...(19): siRNA sense strand
guguaaagcacauuuggaa

SEQ ID NO: 193037 - RNA, 19 nt, Homo sapiens
  misc_RNA (1)...(19): siRNA sense strand
caagacaguugggugaagu

SEQ ID NO: 193038 - RNA, 19 nt, Homo sapiens
  misc_RNA (1)...(19): siRNA sense strand
gaagauguucgagacuuug

SEQ ID NO: 193039 - RNA, 19 nt, Homo sapiens
  misc_RNA (1)...(19): siRNA sense strand
gucagauucucagcuuaua

SEQ ID NO: 193040 - RNA, 19 nt, Homo sapiens
  misc_RNA (1)...(19): siRNA sense strand
uaacaucugcaaagagugu

SEQ ID NO: 193041 - RNA, 19 nt, Homo sapiens
  misc_RNA (1)...(19): siRNA sense strand
cggagcugcuuccaauuug

SEQ ID NO: 193042 - RNA, 19 nt, Homo sapiens
  misc_RNA (1)...(19): siRNA sense strand
gaagacaaguacagauacc

SEQ ID NO: 193043 - RNA, 19 nt, Homo sapiens
  misc_RNA (1)...(19): siRNA sense strand
ccauggauauccugcagau

SEQ ID NO: 193044 - RNA, 19 nt, Homo sapiens
  misc_RNA (1)...(19): siRNA sense strand
ggcaucauuucccugugua

SEQ ID NO: 193045 - RNA, 19 nt, Homo sapiens
  misc_RNA (1)...(19): siRNA sense strand
uggauauccugcagauuau

SEQ ID NO: 193046 - RNA, 19 nt, Homo sapiens
  misc_RNA (1)...(19): siRNA sense strand
ggaagacaaguacagauac

SEQ ID NO: 193047 - RNA, 19 nt, Homo sapiens
  misc_RNA (1)...(19): siRNA sense strand
ugcaaagaguguccaauca

SEQ ID NO: 193048 - RNA, 19 nt, Homo sapiens
  misc_RNA (1)...(19): siRNA sense strand
guggauaugugucugaacu

SEQ ID NO: 193049 - RNA, 19 nt, Homo sapiens
  misc_RNA (1)...(19): siRNA sense strand
acuggcugcugaauguuua

SEQ ID NO: 193050 - RNA, 19 nt, Homo sapiens
  misc_RNA (1)...(19): siRNA sense strand
acuaucccaugguggaaua

SEQ ID NO: 193051 - RNA, 19 nt, Homo sapiens
  misc_RNA (1)...(19): siRNA sense strand
ccggagcugcuuccaauuu

SEQ ID NO: 193052 - RNA, 19 nt, Homo sapiens
  misc_RNA (1)...(19): siRNA sense strand
ccaaauuccaagacaguug

SEQ ID NO: 193053 - RNA, 19 nt, Homo sapiens
  misc_RNA (1)...(19): siRNA sense strand
cagaaacugccaagcauca

SEQ ID NO: 193054 - RNA, 19 nt, Homo sapiens
  misc_RNA (1)...(19): siRNA sense strand
uaugacaucugccaaagcu

SEQ ID NO: 193055 - RNA, 19 nt, Homo sapiens
  misc_RNA (1)...(19): siRNA sense strand
aaugucagauucucagcuu

SEQ ID NO: 193056 - RNA, 19 nt, Homo sapiens
  misc_RNA (1)...(19): siRNA sense strand
ucgagacuuugccaaggua

SEQ ID NO: 193057 - RNA, 19 nt, Homo sapiens
  misc_RNA (1)...(19): siRNA sense strand
gcaaaaggccauaaaaugc

SEQ ID NO: 193058 - RNA, 19 nt, Homo sapiens
  misc_RNA (1)...(19): siRNA sense strand
cugcaugauucuauccaaa

SEQ ID NO: 193059 - RNA, 19 nt, Homo sapiens
  misc_RNA (1)...(19): siRNA sense strand
uaaagcacauuuggaagac

SEQ ID NO: 193060 - RNA, 19 nt, Homo sapiens
  misc_RNA (1)...(19): siRNA sense strand
acaggagucuaaagcacuu

SEQ ID NO: 193061 - RNA, 19 nt, Homo sapiens
  misc_RNA (1)...(19): siRNA sense strand
acagauaccuuuucaagca

SEQ ID NO: 193062 - RNA, 19 nt, Homo sapiens
  misc_RNA (1)...(19): siRNA sense strand
aagcacauuuggaagacaa

SEQ ID NO: 193063 - RNA, 19 nt, Homo sapiens
  misc_RNA (1)...(19): siRNA sense strand
gcuaauaauaagccagaga

SEQ ID NO: 193064 - RNA, 19 nt, Homo sapiens
  misc_RNA (1)...(19): siRNA sense strand
caagagcacaacaauuugg

SEQ ID NO: 193065 - RNA, 19 nt, Homo sapiens
  misc_RNA (1)...(19): siRNA sense strand
ccugucagcugcaugugau

SEQ ID NO: 193066 - RNA, 19 nt, Homo sapiens
  misc_RNA (1)...(19): siRNA sense strand
gcugcugaauguuuaugau

SEQ ID NO: 193067 - RNA, 19 nt, Homo sapiens
  misc_RNA (1)...(19): siRNA sense strand
acagagcucuaccagucuu

SEQ ID NO: 193068 - RNA, 19 nt, Homo sapiens
  misc_RNA (1)...(19): siRNA sense strand
acaguugggugaaguugca

SEQ ID NO: 193069 - RNA, 19 nt, Homo sapiens
  misc_RNA (1)...(19): siRNA sense strand
guuugaccacuauuuauga

SEQ ID NO: 193070 - RNA, 19 nt, Homo sapiens
  misc_RNA (1)...(19): siRNA sense strand
gcuuauaggacugccauga

SEQ ID NO: 193071 - RNA, 19 nt, Homo sapiens
  misc_RNA (1)...(19): siRNA sense strand
caucaggccaaauguaaca

SEQ ID NO: 193072 - RNA, 19 nt, Homo sapiens
  misc_RNA (1)...(19): siRNA sense strand
gauucuauccaaauuccaa

SEQ ID NO: 193073 - RNA, 19 nt, Homo sapiens
  misc_RNA (1)...(19): siRNA sense strand
ggcaaguucaacaggauuu

SEQ ID NO: 193074 - RNA, 19 nt, Homo sapiens
  misc_RNA (1)...(19): siRNA sense strand
gaacuggcugcugaauguu

SEQ ID NO: 193075 - RNA, 19 nt, Homo sapiens
  misc_RNA (1)...(19): siRNA sense strand
cugcugaauguuuaugaua

SEQ ID NO: 193076 - RNA, 19 nt, Homo sapiens
  misc_RNA (1)...(19): siRNA sense strand
aagcaucaggccaaaugua

SEQ ID NO: 193077 - RNA, 19 nt, Homo sapiens
  misc_RNA (1)...(19): siRNA sense strand
uggcaucauuucccugugu

SEQ ID NO: 193078 - RNA, 19 nt, Homo sapiens
  misc_RNA (1)...(19): siRNA sense strand
ccaugaaacuccgaagacu

SEQ ID NO: 193079 - RNA, 19 nt, Homo sapiens
  misc_RNA (1)...(19): siRNA sense strand
auaauaagccagagaucga

SEQ ID NO: 193080 - RNA, 19 nt, Homo sapiens
  misc_RNA (1)...(19): siRNA sense strand
cuaauaauaagccagagau

SEQ ID NO: 193081 - RNA, 19 nt, Homo sapiens
  misc_RNA (1)...(19): siRNA sense strand
ugggugaaguugcauccuu

SEQ ID NO: 193082 - RNA, 19 nt, Homo sapiens
  misc_RNA (1)...(19): siRNA sense strand
caucauuucccuguguaaa

SEQ ID NO: 193083 - RNA, 19 nt, Homo sapiens
  misc_RNA (1)...(19): siRNA sense strand
gcguggauaugugucugaa

SEQ ID NO: 193084 - RNA, 19 nt, Homo sapiens
  misc_RNA (1)...(19): siRNA sense strand
gcacuaucccaugguggaa

SEQ ID NO: 193085 - RNA, 19 nt, Homo sapiens
  misc_RNA (1)...(19): siRNA sense strand
gagccugucagcugcaugu

SEQ ID NO: 193086 - RNA, 19 nt, Homo sapiens
  misc_RNA (1)...(19): siRNA sense strand
guacagauaccuuuucaag

SEQ ID NO: 193087 - RNA, 19 nt, Homo sapiens
  misc_RNA (1)...(19): siRNA sense strand
gucccucucugcguggaua

SEQ ID NO: 193088 - RNA, 19 nt, Homo sapiens
  misc_RNA (1)...(19): siRNA sense strand
ggagcugcuuccaauuugc

SEQ ID NO: 193089 - RNA, 19 nt, Homo sapiens
  misc_RNA (1)...(19): siRNA sense strand
uuagcugaccugaauaaug

SEQ ID NO: 193090 - RNA, 19 nt, Homo sapiens
  misc_RNA (1)...(19): siRNA sense strand
guggcaaguucaacaggau

SEQ ID NO: 193091 - RNA, 19 nt, Homo sapiens
  misc_RNA (1)...(19): siRNA sense strand
acaacaauuuggucaacgu

SEQ ID NO: 193092 - RNA, 19 nt, Homo sapiens
  misc_RNA (1)...(19): siRNA sense strand
gacuacaucaggagaagau

SEQ ID NO: 193093 - RNA, 19 nt, Homo sapiens
  misc_RNA (1)...(19): siRNA sense strand
uaauaagccagagaucgaa

SEQ ID NO: 193094 - RNA, 19 nt, Homo sapiens
  misc_RNA (1)...(19): siRNA sense strand
ugucagauucucagcuuau

SEQ ID NO: 193095 - RNA, 19 nt, Homo sapiens
  misc_RNA (1)...(19): siRNA sense strand
ggauauccugcagauuauu

SEQ ID NO: 193096 - RNA, 19 nt, Homo sapiens
  misc_RNA (1)...(19): siRNA sense strand
agcaucaggccaaauguaa

SEQ ID NO: 193097 - RNA, 19 nt, Homo sapiens
  misc_RNA (1)...(19): siRNA sense strand
gcccuuugcuuggaucucu

SEQ ID NO: 193098 - RNA, 19 nt, Homo sapiens
  misc_RNA (1)...(19): siRNA sense strand
gcugaauguuuaugauacg

SEQ ID NO: 193099 - RNA, 19 nt, Homo sapiens
  misc_RNA (1)...(19): siRNA sense strand
agacuuugccaagguacua

SEQ ID NO: 193100 - RNA, 19 nt, Homo sapiens
  misc_RNA (1)...(19): siRNA sense strand
caagcaaguggcaaguuca

SEQ ID NO: 193101 - RNA, 19 nt, Homo sapiens
  misc_RNA (1)...(19): siRNA sense strand
agacaaguacagauaccuu

SEQ ID NO: 193102 - RNA, 19 nt, Homo sapiens
  misc_RNA (1)...(19): siRNA sense strand
gcaucauuucccuguguaa

SEQ ID NO: 193103 - RNA, 19 nt, Homo sapiens
  misc_RNA (1)...(19): siRNA sense strand
cugcaaagaguguccaauc

SEQ ID NO: 193104 - RNA, 19 nt, Homo sapiens
  misc_RNA (1)...(19): siRNA sense strand
cuuauaggacugccaugaa

SEQ ID NO: 193105 - RNA, 19 nt, Homo sapiens
  misc_RNA (1)...(19): siRNA sense strand
caaagaguguccaaucauu

SEQ ID NO: 193106 - RNA, 19 nt, Homo sapiens
  misc_RNA (1)...(19): siRNA sense strand
uagcugaccugaauaaugu

SEQ ID NO: 193107 - RNA, 19 nt, Homo sapiens
  misc_RNA (1)...(19): siRNA sense strand
gcaugauucuauccaaauu

SEQ ID NO: 193108 - RNA, 19 nt, Homo sapiens
  misc_RNA (1)...(19): siRNA sense strand
ugaacuggcugcugaaugu

SEQ ID NO: 193109 - RNA, 19 nt, Homo sapiens
  misc_RNA (1)...(19): siRNA sense strand
gauauccugcagauuauua

SEQ ID NO: 193110 - RNA, 19 nt, Homo sapiens
  misc_RNA (1)...(19): siRNA sense strand
gagaagauguucgagacuu

SEQ ID NO: 193111 - RNA, 19 nt, Homo sapiens
  misc_RNA (1)...(19): siRNA sense strand
gcacuuuaauuaugacauc

SEQ ID NO: 193112 - RNA, 19 nt, Homo sapiens
  misc_RNA (1)...(19): siRNA sense strand
guaaagcacauuuggaaga

SEQ ID NO: 193113 - RNA, 19 nt, Homo sapiens
  misc_RNA (1)...(19): siRNA sense strand
gaauauugcacuccgacua

SEQ ID NO: 193114 - RNA, 19 nt, Homo sapiens
  misc_RNA (1)...(19): siRNA sense strand
uuauaggacugccaugaaa

SEQ ID NO: 193115 - RNA, 19 nt, Homo sapiens
  misc_RNA (1)...(19): siRNA sense strand
gggugaaguugcauccuuu

SEQ ID NO: 193116 - RNA, 19 nt, Homo sapiens
  misc_RNA (1)...(19): siRNA sense strand
gcaagagcacaacaauuug

SEQ ID NO: 193117 - RNA, 19 nt, Homo sapiens
  misc_RNA (1)...(19): siRNA sense strand
gcacaacaauuuggucaac

SEQ ID NO: 193118 - RNA, 19 nt, Homo sapiens
  misc_RNA (1)...(19): siRNA sense strand
agcaagagcacaacaauuu

SEQ ID NO: 193119 - RNA, 19 nt, Homo sapiens
  misc_RNA (1)...(19): siRNA sense strand
agaagauguucgagacuuu

SEQ ID NO: 193120 - RNA, 19 nt, Homo sapiens
  misc_RNA (1)...(19): siRNA sense strand
gagcaagagcacaacaauu

SEQ ID NO: 193121 - RNA, 19 nt, Homo sapiens
  misc_RNA (1)...(19): siRNA sense strand
ucaagcaaguggcaaguuc

SEQ ID NO: 193122 - RNA, 19 nt, Homo sapiens
  misc_RNA (1)...(19): siRNA sense strand
ccacgagacucaaacaacu

SEQ ID NO: 193123 - RNA, 19 nt, Homo sapiens
  misc_RNA (1)...(19): siRNA sense strand
cagcacaaccucaagcaaa

SEQ ID NO: 193124 - RNA, 19 nt, Homo sapiens
  misc_RNA (1)...(19): siRNA sense strand
gcaaagaguguccaaucau

SEQ ID NO: 193125 - RNA, 19 nt, Homo sapiens
  misc_RNA (1)...(19): siRNA sense strand
auggauauccugcagauua

SEQ ID NO: 193126 - RNA, 19 nt, Homo sapiens
  misc_RNA (1)...(19): siRNA sense strand
uguaacaucugcaaagagu

SEQ ID NO: 193127 - RNA, 19 nt, Homo sapiens
  misc_RNA (1)...(19): siRNA sense strand
guccggagcugcuuccaau

SEQ ID NO: 193128 - RNA, 19 nt, Homo sapiens
  misc_RNA (1)...(19): siRNA sense strand
gcaaguggcaaguucaaca

SEQ ID NO: 193129 - RNA, 19 nt, Homo sapiens
  misc_RNA (1)...(19): siRNA sense strand
gcuuccaauuugcuaauaa

SEQ ID NO: 193130 - RNA, 19 nt, Homo sapiens
  misc_RNA (1)...(19): siRNA sense strand
uggaagacaaguacagaua

SEQ ID NO: 193131 - RNA, 19 nt, Homo sapiens
  misc_RNA (1)...(19): siRNA sense strand
ggauccguguccugucuuu

SEQ ID NO: 193132 - RNA, 19 nt, Homo sapiens
  misc_RNA (1)...(19): siRNA sense strand
gucuuuagcugaccugaau

SEQ ID NO: 193133 - RNA, 19 nt, Homo sapiens
  misc_RNA (1)...(19): siRNA sense strand
gacaaguacagauaccuuu

SEQ ID NO: 193134 - RNA, 19 nt, Homo sapiens
  misc_RNA (1)...(19): siRNA sense strand
ccaagcaucaggccaaaug

SEQ ID NO: 193135 - RNA, 19 nt, Homo sapiens
  misc_RNA (1)...(19): siRNA sense strand
ggagcaagagcacaacaau

SEQ ID NO: 193136 - RNA, 19 nt, Homo sapiens
  misc_RNA (1)...(19): siRNA sense strand
guguaaagcacauuuggaa

SEQ ID NO: 193137 - RNA, 19 nt, Homo sapiens
  misc_RNA (1)...(19): siRNA sense strand
caagacaguugggugaagu

SEQ ID NO: 193138 - RNA, 19 nt, Homo sapiens
  misc_RNA (1)...(19): siRNA sense strand
gaagauguucgagacuuug

SEQ ID NO: 193139 - RNA, 19 nt, Homo sapiens
  misc_RNA (1)...(19): siRNA sense strand
gucagauucucagcuuaua

SEQ ID NO: 193140 - RNA, 19 nt, Homo sapiens
  misc_RNA (1)...(19): siRNA sense strand
uaacaucugcaaagagugu

SEQ ID NO: 193141 - RNA, 19 nt, Homo sapiens
  misc_RNA (1)...(19): siRNA sense strand
cggagcugcuuccaauuug

SEQ ID NO: 193142 - RNA, 19 nt, Homo sapiens
  misc_RNA (1)...(19): siRNA sense strand
gaagacaaguacagauacc

SEQ ID NO: 193143 - RNA, 19 nt, Homo sapiens
  misc_RNA (1)...(19): siRNA sense strand
ccauggauauccugcagau

SEQ ID NO: 193144 - RNA, 19 nt, Homo sapiens
  misc_RNA (1)...(19): siRNA sense strand
ggcaucauuucccugugua

SEQ ID NO: 193145 - RNA, 19 nt, Homo sapiens
  misc_RNA (1)...(19): siRNA sense strand
uggauauccugcagauuau

SEQ ID NO: 193146 - RNA, 19 nt, Homo sapiens
  misc_RNA (1)...(19): siRNA sense strand
ggaagacaaguacagauac

SEQ ID NO: 193147 - RNA, 19 nt, Homo sapiens
  misc_RNA (1)...(19): siRNA sense strand
ugcaaagaguguccaauca

SEQ ID NO: 193148 - RNA, 19 nt, Homo sapiens
  misc_RNA (1)...(19): siRNA sense strand
guggauaugugucugaacu

SEQ ID NO: 193149 - RNA, 19 nt, Homo sapiens
  misc_RNA (1)...(19): siRNA sense strand
acuggcugcugaauguuua

SEQ ID NO: 193150 - RNA, 19 nt, Homo sapiens
  misc_RNA (1)...(19): siRNA sense strand
acuaucccaugguggaaua

SEQ ID NO: 193151 - RNA, 19 nt, Homo sapiens
  misc_RNA (1)...(19): siRNA sense strand
ccggagcugcuuccaauuu

SEQ ID NO: 193152 - RNA, 19 nt, Homo sapiens
  misc_RNA (1)...(19): siRNA sense strand
ccaaauuccaagacaguug

SEQ ID NO: 193153 - RNA, 19 nt, Homo sapiens
  misc_RNA (1)...(19): siRNA sense strand
cagaaacugccaagcauca

SEQ ID NO: 193154 - RNA, 19 nt, Homo sapiens
  misc_RNA (1)...(19): siRNA sense strand
uaugacaucugccaaagcu

SEQ ID NO: 193155 - RNA, 19 nt, Homo sapiens
  misc_RNA (1)...(19): siRNA sense strand
aaugucagauucucagcuu

SEQ ID NO: 193156 - RNA, 19 nt, Homo sapiens
  misc_RNA (1)...(19): siRNA sense strand
ucgagacuuugccaaggua

SEQ ID NO: 193157 - RNA, 19 nt, Homo sapiens
  misc_RNA (1)...(19): siRNA sense strand
gcaaaaggccauaaaaugc

SEQ ID NO: 193158 - RNA, 19 nt, Homo sapiens
  misc_RNA (1)...(19): siRNA sense strand
cugcaugauucuauccaaa

SEQ ID NO: 193159 - RNA, 19 nt, Homo sapiens
  misc_RNA (1)...(19): siRNA sense strand
uaaagcacauuuggaagac

SEQ ID NO: 193160 - RNA, 19 nt, Homo sapiens
  misc_RNA (1)...(19): siRNA sense strand
acaggagucuaaagcacuu

SEQ ID NO: 193161 - RNA, 19 nt, Homo sapiens
  misc_RNA (1)...(19): siRNA sense strand
acagauaccuuuucaagca

SEQ ID NO: 193162 - RNA, 19 nt, Homo sapiens
  misc_RNA (1)...(19): siRNA sense strand
aagcacauuuggaagacaa

SEQ ID NO: 193163 - RNA, 19 nt, Homo sapiens
  misc_RNA (1)...(19): siRNA sense strand
gcuaauaauaagccagaga

SEQ ID NO: 193164 - RNA, 19 nt, Homo sapiens
  misc_RNA (1)...(19): siRNA sense strand
caagagcacaacaauuugg

SEQ ID NO: 193165 - RNA, 19 nt, Homo sapiens
  misc_RNA (1)...(19): siRNA sense strand
ccugucagcugcaugugau

SEQ ID NO: 193166 - RNA, 19 nt, Homo sapiens
  misc_RNA (1)...(19): siRNA sense strand
gcugcugaauguuuaugau

SEQ ID NO: 193167 - RNA, 19 nt, Homo sapiens
  misc_RNA (1)...(19): siRNA sense strand
acagagcucuaccagucuu

SEQ ID NO: 193168 - RNA, 19 nt, Homo sapiens
  misc_RNA (1)...(19): siRNA sense strand
acaguugggugaaguugca

SEQ ID NO: 193169 - RNA, 19 nt, Homo sapiens
  misc_RNA (1)...(19): siRNA sense strand
guuugaccacuauuuauga

SEQ ID NO: 193170 - RNA, 19 nt, Homo sapiens
  misc_RNA (1)...(19): siRNA sense strand
gcuuauaggacugccauga

SEQ ID NO: 193171 - RNA, 19 nt, Homo sapiens
  misc_RNA (1)...(19): siRNA sense strand
caucaggccaaauguaaca

SEQ ID NO: 193172 - RNA, 19 nt, Homo sapiens
  misc_RNA (1)...(19): siRNA sense strand
gauucuauccaaauuccaa

SEQ ID NO: 193173 - RNA, 19 nt, Homo sapiens
  misc_RNA (1)...(19): siRNA sense strand
ggcaaguucaacaggauuu

SEQ ID NO: 193174 - RNA, 19 nt, Homo sapiens
  misc_RNA (1)...(19): siRNA sense strand
gaacuggcugcugaauguu

SEQ ID NO: 193175 - RNA, 19 nt, Homo sapiens
  misc_RNA (1)...(19): siRNA sense strand
cugcugaauguuuaugaua

SEQ ID NO: 193176 - RNA, 19 nt, Homo sapiens
  misc_RNA (1)...(19): siRNA sense strand
aagcaucaggccaaaugua

SEQ ID NO: 193177 - RNA, 19 nt, Homo sapiens
  misc_RNA (1)...(19): siRNA sense strand
uggcaucauuucccugugu

SEQ ID NO: 193178 - RNA, 19 nt, Homo sapiens
  misc_RNA (1)...(19): siRNA sense strand
ccaugaaacuccgaagacu

SEQ ID NO: 193179 - RNA, 19 nt, Homo sapiens
  misc_RNA (1)...(19): siRNA sense strand
auaauaagccagagaucga

SEQ ID NO: 193180 - RNA, 19 nt, Homo sapiens
  misc_RNA (1)...(19): siRNA sense strand
cuaauaauaagccagagau

SEQ ID NO: 193181 - RNA, 19 nt, Homo sapiens
  misc_RNA (1)...(19): siRNA sense strand
ugggugaaguugcauccuu

SEQ ID NO: 193182 - RNA, 19 nt, Homo sapiens
  misc_RNA (1)...(19): siRNA sense strand
caucauuucccuguguaaa

SEQ ID NO: 193183 - RNA, 19 nt, Homo sapiens
  misc_RNA (1)...(19): siRNA sense strand
gcguggauaugugucugaa

SEQ ID NO: 193184 - RNA, 19 nt, Homo sapiens
  misc_RNA (1)...(19): siRNA sense strand
gcacuaucccaugguggaa

SEQ ID NO: 193185 - RNA, 19 nt, Homo sapiens
  misc_RNA (1)...(19): siRNA sense strand
gagccugucagcugcaugu

SEQ ID NO: 193186 - RNA, 19 nt, Homo sapiens
  misc_RNA (1)...(19): siRNA sense strand
guacagauaccuuuucaag

SEQ ID NO: 193187 - RNA, 19 nt, Homo sapiens
  misc_RNA (1)...(19): siRNA sense strand
gucccucucugcguggaua

SEQ ID NO: 193188 - RNA, 19 nt, Homo sapiens
  misc_RNA (1)...(19): siRNA sense strand
ggagcugcuuccaauuugc

SEQ ID NO: 193189 - RNA, 19 nt, Homo sapiens
  misc_RNA (1)...(19): siRNA sense strand
uuagcugaccugaauaaug

SEQ ID NO: 193190 - RNA, 19 nt, Homo sapiens
  misc_RNA (1)...(19): siRNA sense strand
guggcaaguucaacaggau

SEQ ID NO: 193191 - RNA, 19 nt, Homo sapiens
  misc_RNA (1)...(19): siRNA sense strand
acaacaauuuggucaacgu

SEQ ID NO: 193192 - RNA, 19 nt, Homo sapiens
  misc_RNA (1)...(19): siRNA sense strand
gacuacaucaggagaagau

SEQ ID NO: 193193 - RNA, 19 nt, Homo sapiens
  misc_RNA (1)...(19): siRNA sense strand
uaauaagccagagaucgaa

SEQ ID NO: 193194 - RNA, 19 nt, Homo sapiens
  misc_RNA (1)...(19): siRNA sense strand
ugucagauucucagcuuau

SEQ ID NO: 193195 - RNA, 19 nt, Homo sapiens
  misc_RNA (1)...(19): siRNA sense strand
ggauauccugcagauuauu

SEQ ID NO: 193196 - RNA, 19 nt, Homo sapiens
  misc_RNA (1)...(19): siRNA sense strand
agcaucaggccaaauguaa

SEQ ID NO: 193197 - RNA, 19 nt, Homo sapiens
  misc_RNA (1)...(19): siRNA sense strand
gcccuuugcuuggaucucu

SEQ ID NO: 193198 - RNA, 19 nt, Homo sapiens
  misc_RNA (1)...(19): siRNA sense strand
gcugaauguuuaugauacg

SEQ ID NO: 193199 - RNA, 19 nt, Homo sapiens
  misc_RNA (1)...(19): siRNA sense strand
agacuuugccaagguacua

SEQ ID NO: 193200 - RNA, 19 nt, Homo sapiens
  misc_RNA (1)...(19): siRNA sense strand
caagcaaguggcaaguuca

SEQ ID NO: 193201 - RNA, 19 nt, Homo sapiens
  misc_RNA (1)...(19): siRNA sense strand
agacaaguacagauaccuu

SEQ ID NO: 193202 - RNA, 19 nt, Homo sapiens
  misc_RNA (1)...(19): siRNA sense strand
gcaucauuucccuguguaa

SEQ ID NO: 193203 - RNA, 19 nt, Homo sapiens
  misc_RNA (1)...(19): siRNA sense strand
cugcaaagaguguccaauc

SEQ ID NO: 193204 - RNA, 19 nt, Homo sapiens
  misc_RNA (1)...(19): siRNA sense strand
cuuauaggacugccaugaa

SEQ ID NO: 193205 - RNA, 19 nt, Homo sapiens
  misc_RNA (1)...(19): siRNA sense strand
caaagaguguccaaucauu

SEQ ID NO: 193206 - RNA, 19 nt, Homo sapiens
  misc_RNA (1)...(19): siRNA sense strand
uagcugaccugaauaaugu

SEQ ID NO: 193207 - RNA, 19 nt, Homo sapiens
  misc_RNA (1)...(19): siRNA sense strand
gcaugauucuauccaaauu

SEQ ID NO: 193208 - RNA, 19 nt, Homo sapiens
  misc_RNA (1)...(19): siRNA sense strand
ugaacuggcugcugaaugu

SEQ ID NO: 193209 - RNA, 19 nt, Homo sapiens
  misc_RNA (1)...(19): siRNA sense strand
gauauccugcagauuauua

SEQ ID NO: 193210 - RNA, 19 nt, Homo sapiens
  misc_RNA (1)...(19): siRNA sense strand
gagaagauguucgagacuu

SEQ ID NO: 193211 - RNA, 19 nt, Homo sapiens
  misc_RNA (1)...(19): siRNA sense strand
gcacuuuaauuaugacauc

SEQ ID NO: 193212 - RNA, 19 nt, Homo sapiens
  misc_RNA (1)...(19): siRNA sense strand
guaaagcacauuuggaaga

SEQ ID NO: 193213 - RNA, 19 nt, Homo sapiens
  misc_RNA (1)...(19): siRNA sense strand
gaauauugcacuccgacua

SEQ ID NO: 193214 - RNA, 19 nt, Homo sapiens
  misc_RNA (1)...(19): siRNA sense strand
uuauaggacugccaugaaa

SEQ ID NO: 193215 - RNA, 19 nt, Homo sapiens
  misc_RNA (1)...(19): siRNA sense strand
gggugaaguugcauccuuu

SEQ ID NO: 193216 - RNA, 19 nt, Homo sapiens
  misc_RNA (1)...(19): siRNA sense strand
gcaagagcacaacaauuug

SEQ ID NO: 193217 - RNA, 19 nt, Homo sapiens
  misc_RNA (1)...(19): siRNA sense strand
gcacaacaauuuggucaac

SEQ ID NO: 193218 - RNA, 19 nt, Homo sapiens
  misc_RNA (1)...(19): siRNA sense strand
agcaagagcacaacaauuu

SEQ ID NO: 193219 - RNA, 19 nt, Homo sapiens
  misc_RNA (1)...(19): siRNA sense strand
agaagauguucgagacuuu

SEQ ID NO: 193220 - RNA, 19 nt, Homo sapiens
  misc_RNA (1)...(19): siRNA sense strand
gagcaagagcacaacaauu

SEQ ID NO: 193221 - RNA, 19 nt, Homo sapiens
  misc_RNA (1)...(19): siRNA sense strand
ucaagcaaguggcaaguuc

SEQ ID NO: 193222 - RNA, 19 nt, Homo sapiens
  misc_RNA (1)...(19): siRNA sense strand
ccacgagacucaaacaacu

SEQ ID NO: 193223 - RNA, 19 nt, Homo sapiens
  misc_RNA (1)...(19): siRNA sense strand
cagcacaaccucaagcaaa

SEQ ID NO: 193224 - RNA, 19 nt, Homo sapiens
  misc_RNA (1)...(19): siRNA sense strand
gcaaagaguguccaaucau

SEQ ID NO: 193225 - RNA, 19 nt, Homo sapiens
  misc_RNA (1)...(19): siRNA sense strand
auggauauccugcagauua

SEQ ID NO: 193226 - RNA, 19 nt, Homo sapiens
  misc_RNA (1)...(19): siRNA sense strand
uguaacaucugcaaagagu

SEQ ID NO: 193227 - RNA, 19 nt, Homo sapiens
  misc_RNA (1)...(19): siRNA sense strand
guccggagcugcuuccaau

SEQ ID NO: 193228 - RNA, 19 nt, Homo sapiens
  misc_RNA (1)...(19): siRNA sense strand
gcaaguggcaaguucaaca

SEQ ID NO: 193229 - RNA, 19 nt, Homo sapiens
  misc_RNA (1)...(19): siRNA sense strand
gcuuccaauuugcuaauaa

SEQ ID NO: 193230 - RNA, 19 nt, Homo sapiens
  misc_RNA (1)...(19): siRNA sense strand
uggaagacaaguacagaua

SEQ ID NO: 193231 - RNA, 19 nt, Homo sapiens
  misc_RNA (1)...(19): siRNA sense strand
ggauccguguccugucuuu

SEQ ID NO: 193232 - RNA, 19 nt, Homo sapiens
  misc_RNA (1)...(19): siRNA sense strand
gucuuuagcugaccugaau

SEQ ID NO: 193233 - RNA, 19 nt, Homo sapiens
  misc_RNA (1)...(19): siRNA sense strand
gacaaguacagauaccuuu

SEQ ID NO: 193234 - RNA, 19 nt, Homo sapiens
  misc_RNA (1)...(19): siRNA sense strand
ccaagcaucaggccaaaug

SEQ ID NO: 193235 - RNA, 19 nt, Homo sapiens
  misc_RNA (1)...(19): siRNA sense strand
ggagcaagagcacaacaau

SEQ ID NO: 193236 - RNA, 19 nt, Homo sapiens
  misc_RNA (1)...(19): siRNA sense strand
guguaaagcacauuuggaa

SEQ ID NO: 193237 - RNA, 19 nt, Homo sapiens
  misc_RNA (1)...(19): siRNA sense strand
caagacaguugggugaagu

SEQ ID NO: 193238 - RNA, 19 nt, Homo sapiens
  misc_RNA (1)...(19): siRNA sense strand
gaagauguucgagacuuug

SEQ ID NO: 193239 - RNA, 19 nt, Homo sapiens
  misc_RNA (1)...(19): siRNA sense strand
gucagauucucagcuuaua

SEQ ID NO: 193240 - RNA, 19 nt, Homo sapiens
  misc_RNA (1)...(19): siRNA sense strand
uaacaucugcaaagagugu

SEQ ID NO: 193241 - RNA, 19 nt, Homo sapiens
  misc_RNA (1)...(19): siRNA sense strand
cggagcugcuuccaauuug

SEQ ID NO: 193242 - RNA, 19 nt, Homo sapiens
  misc_RNA (1)...(19): siRNA sense strand
gaagacaaguacagauacc

SEQ ID NO: 193243 - RNA, 19 nt, Homo sapiens
  misc_RNA (1)...(19): siRNA sense strand
ccauggauauccugcagau

SEQ ID NO: 193244 - RNA, 19 nt, Homo sapiens
  misc_RNA (1)...(19): siRNA sense strand
ggcaucauuucccugugua

SEQ ID NO: 193245 - RNA, 19 nt, Homo sapiens
  misc_RNA (1)...(19): siRNA sense strand
uggauauccugcagauuau

SEQ ID NO: 193246 - RNA, 19 nt, Homo sapiens
  misc_RNA (1)...(19): siRNA sense strand
ggaagacaaguacagauac

SEQ ID NO: 193247 - RNA, 19 nt, Homo sapiens
  misc_RNA (1)...(19): siRNA sense strand
ugcaaagaguguccaauca

SEQ ID NO: 193248 - RNA, 19 nt, Homo sapiens
  misc_RNA (1)...(19): siRNA sense strand
guggauaugugucugaacu

SEQ ID NO: 193249 - RNA, 19 nt, Homo sapiens
  misc_RNA (1)...(19): siRNA sense strand
acuggcugcugaauguuua

SEQ ID NO: 193250 - RNA, 19 nt, Homo sapiens
  misc_RNA (1)...(19): siRNA sense strand
acuaucccaugguggaaua

SEQ ID NO: 193251 - RNA, 19 nt, Homo sapiens
  misc_RNA (1)...(19): siRNA sense strand
ccggagcugcuuccaauuu

SEQ ID NO: 193252 - RNA, 19 nt, Homo sapiens
  misc_RNA (1)...(19): siRNA sense strand
ccaaauuccaagacaguug

SEQ ID NO: 193253 - RNA, 19 nt, Homo sapiens
  misc_RNA (1)...(19): siRNA sense strand
cagaaacugccaagcauca

SEQ ID NO: 193254 - RNA, 19 nt, Homo sapiens
  misc_RNA (1)...(19): siRNA sense strand
uaugacaucugccaaagcu

SEQ ID NO: 193255 - RNA, 19 nt, Homo sapiens
  misc_RNA (1)...(19): siRNA sense strand
aaugucagauucucagcuu

SEQ ID NO: 193256 - RNA, 19 nt, Homo sapiens
  misc_RNA (1)...(19): siRNA sense strand
ucgagacuuugccaaggua

SEQ ID NO: 193257 - RNA, 19 nt, Homo sapiens
  misc_RNA (1)...(19): siRNA sense strand
gcaaaaggccauaaaaugc

SEQ ID NO: 193258 - RNA, 19 nt, Homo sapiens
  misc_RNA (1)...(19): siRNA sense strand
cugcaugauucuauccaaa

SEQ ID NO: 193259 - RNA, 19 nt, Homo sapiens
  misc_RNA (1)...(19): siRNA sense strand
uaaagcacauuuggaagac

SEQ ID NO: 193260 - RNA, 19 nt, Homo sapiens
  misc_RNA (1)...(19): siRNA sense strand
acaggagucuaaagcacuu

SEQ ID NO: 193261 - RNA, 19 nt, Homo sapiens
  misc_RNA (1)...(19): siRNA sense strand
acagauaccuuuucaagca

SEQ ID NO: 193262 - RNA, 19 nt, Homo sapiens
  misc_RNA (1)...(19): siRNA sense strand
aagcacauuuggaagacaa

SEQ ID NO: 193263 - RNA, 19 nt, Homo sapiens
  misc_RNA (1)...(19): siRNA sense strand
gcuaauaauaagccagaga

SEQ ID NO: 193264 - RNA, 19 nt, Homo sapiens
  misc_RNA (1)...(19): siRNA sense strand
caagagcacaacaauuugg

SEQ ID NO: 193265 - RNA, 19 nt, Homo sapiens
  misc_RNA (1)...(19): siRNA sense strand
ccugucagcugcaugugau

SEQ ID NO: 193266 - RNA, 19 nt, Homo sapiens
  misc_RNA (1)...(19): siRNA sense strand
gcugcugaauguuuaugau

SEQ ID NO: 193267 - RNA, 19 nt, Homo sapiens
  misc_RNA (1)...(19): siRNA sense strand
acagagcucuaccagucuu

SEQ ID NO: 193268 - RNA, 19 nt, Homo sapiens
  misc_RNA (1)...(19): siRNA sense strand
acaguugggugaaguugca

SEQ ID NO: 193269 - RNA, 19 nt, Homo sapiens
  misc_RNA (1)...(19): siRNA sense strand
guuugaccacuauuuauga

SEQ ID NO: 193270 - RNA, 19 nt, Homo sapiens
  misc_RNA (1)...(19): siRNA sense strand
gcuuauaggacugccauga

SEQ ID NO: 193271 - RNA, 19 nt, Homo sapiens
  misc_RNA (1)...(19): siRNA sense strand
caucaggccaaauguaaca

SEQ ID NO: 193272 - RNA, 19 nt, Homo sapiens
  misc_RNA (1)...(19): siRNA sense strand
gauucuauccaaauuccaa

SEQ ID NO: 193273 - RNA, 19 nt, Homo sapiens
  misc_RNA (1)...(19): siRNA sense strand
ggcaaguucaacaggauuu

SEQ ID NO: 193274 - RNA, 19 nt, Homo sapiens
  misc_RNA (1)...(19): siRNA sense strand
gaacuggcugcugaauguu

SEQ ID NO: 193275 - RNA, 19 nt, Homo sapiens
  misc_RNA (1)...(19): siRNA sense strand
cugcugaauguuuaugaua

SEQ ID NO: 193276 - RNA, 19 nt, Homo sapiens
  misc_RNA (1)...(19): siRNA sense strand
aagcaucaggccaaaugua

SEQ ID NO: 193277 - RNA, 19 nt, Homo sapiens
  misc_RNA (1)...(19): siRNA sense strand
uggcaucauuucccugugu

SEQ ID NO: 193278 - RNA, 19 nt, Homo sapiens
  misc_RNA (1)...(19): siRNA sense strand
ccaugaaacuccgaagacu

SEQ ID NO: 193279 - RNA, 19 nt, Homo sapiens
  misc_RNA (1)...(19): siRNA sense strand
auaauaagccagagaucga

SEQ ID NO: 193280 - RNA, 19 nt, Homo sapiens
  misc_RNA (1)...(19): siRNA sense strand
cuaauaauaagccagagau

SEQ ID NO: 193281 - RNA, 19 nt, Homo sapiens
  misc_RNA (1)...(19): siRNA sense strand
ugggugaaguugcauccuu

SEQ ID NO: 193282 - RNA, 19 nt, Homo sapiens
  misc_RNA (1)...(19): siRNA sense strand
caucauuucccuguguaaa

SEQ ID NO: 193283 - RNA, 19 nt, Homo sapiens
  misc_RNA (1)...(19): siRNA sense strand
gcguggauaugugucugaa

SEQ ID NO: 193284 - RNA, 19 nt, Homo sapiens
  misc_RNA (1)...(19): siRNA sense strand
gcacuaucccaugguggaa

SEQ ID NO: 193285 - RNA, 19 nt, Homo sapiens
  misc_RNA (1)...(19): siRNA sense strand
gagccugucagcugcaugu

SEQ ID NO: 193286 - RNA, 19 nt, Homo sapiens
  misc_RNA (1)...(19): siRNA sense strand
guacagauaccuuuucaag

SEQ ID NO: 193287 - RNA, 19 nt, Homo sapiens
  misc_RNA (1)...(19): siRNA sense strand
gucccucucugcguggaua

SEQ ID NO: 193288 - RNA, 19 nt, Homo sapiens
  misc_RNA (1)...(19): siRNA sense strand
ggagcugcuuccaauuugc

SEQ ID NO: 193289 - RNA, 19 nt, Homo sapiens
  misc_RNA (1)...(19): siRNA sense strand
uuagcugaccugaauaaug

SEQ ID NO: 193290 - RNA, 19 nt, Homo sapiens
  misc_RNA (1)...(19): siRNA sense strand
guggcaaguucaacaggau

SEQ ID NO: 193291 - RNA, 19 nt, Homo sapiens
  misc_RNA (1)...(19): siRNA sense strand
acaacaauuuggucaacgu

SEQ ID NO: 193292 - RNA, 19 nt, Homo sapiens
  misc_RNA (1)...(19): siRNA sense strand
gacuacaucaggagaagau

SEQ ID NO: 193293 - RNA, 19 nt, Homo sapiens
  misc_RNA (1)...(19): siRNA sense strand
uaauaagccagagaucgaa

SEQ ID NO: 193294 - RNA, 19 nt, Homo sapiens
  misc_RNA (1)...(19): siRNA sense strand
ugucagauucucagcuuau

SEQ ID NO: 193295 - RNA, 19 nt, Homo sapiens
  misc_RNA (1)...(19): siRNA sense strand
ggauauccugcagauuauu

SEQ ID NO: 193296 - RNA, 19 nt, Homo sapiens
  misc_RNA (1)...(19): siRNA sense strand
agcaucaggccaaauguaa

SEQ ID NO: 193297 - RNA, 19 nt, Homo sapiens
  misc_RNA (1)...(19): siRNA sense strand
gcccuuugcuuggaucucu

SEQ ID NO: 193298 - RNA, 19 nt, Homo sapiens
  misc_RNA (1)...(19): siRNA sense strand
gcugaauguuuaugauacg

SEQ ID NO: 193299 - RNA, 19 nt, Homo sapiens
  misc_RNA (1)...(19): siRNA sense strand
agacuuugccaagguacua

SEQ ID NO: 193300 - RNA, 19 nt, Homo sapiens
  misc_RNA (1)...(19): siRNA sense strand
caagcaaguggcaaguuca

SEQ ID NO: 193301 - RNA, 19 nt, Homo sapiens
  misc_RNA (1)...(19): siRNA sense strand
agacaaguacagauaccuu

SEQ ID NO: 193302 - RNA, 19 nt, Homo sapiens
  misc_RNA (1)...(19): siRNA sense strand
gcaucauuucccuguguaa

SEQ ID NO: 193303 - RNA, 19 nt, Homo sapiens
  misc_RNA (1)...(19): siRNA sense strand
cugcaaagaguguccaauc

SEQ ID NO: 193304 - RNA, 19 nt, Homo sapiens
  misc_RNA (1)...(19): siRNA sense strand
cuuauaggacugccaugaa

SEQ ID NO: 193305 - RNA, 19 nt, Homo sapiens
  misc_RNA (1)...(19): siRNA sense strand
caaagaguguccaaucauu

SEQ ID NO: 193306 - RNA, 19 nt, Homo sapiens
  misc_RNA (1)...(19): siRNA sense strand
uagcugaccugaauaaugu

SEQ ID NO: 193307 - RNA, 19 nt, Homo sapiens
  misc_RNA (1)...(19): siRNA sense strand
gcaugauucuauccaaauu

SEQ ID NO: 193308 - RNA, 19 nt, Homo sapiens
  misc_RNA (1)...(19): siRNA sense strand
ugaacuggcugcugaaugu

SEQ ID NO: 193309 - RNA, 19 nt, Homo sapiens
  misc_RNA (1)...(19): siRNA sense strand
gauauccugcagauuauua

SEQ ID NO: 193310 - RNA, 19 nt, Homo sapiens
  misc_RNA (1)...(19): siRNA sense strand
gagaagauguucgagacuu

SEQ ID NO: 193311 - RNA, 19 nt, Homo sapiens
  misc_RNA (1)...(19): siRNA sense strand
gcacuuuaauuaugacauc

SEQ ID NO: 193312 - RNA, 19 nt, Homo sapiens
  misc_RNA (1)...(19): siRNA sense strand
guaaagcacauuuggaaga

SEQ ID NO: 193313 - RNA, 19 nt, Homo sapiens
  misc_RNA (1)...(19): siRNA sense strand
gaauauugcacuccgacua

SEQ ID NO: 193314 - RNA, 19 nt, Homo sapiens
  misc_RNA (1)...(19): siRNA sense strand
uuauaggacugccaugaaa

SEQ ID NO: 193315 - RNA, 19 nt, Homo sapiens
  misc_RNA (1)...(19): siRNA sense strand
gggugaaguugcauccuuu

SEQ ID NO: 193316 - RNA, 19 nt, Homo sapiens
  misc_RNA (1)...(19): siRNA sense strand
gcaagagcacaacaauuug

SEQ ID NO: 193317 - RNA, 19 nt, Homo sapiens
  misc_RNA (1)...(19): siRNA sense strand
gcacaacaauuuggucaac

SEQ ID NO: 193318 - RNA, 19 nt, Homo sapiens
  misc_RNA (1)...(19): siRNA sense strand
agcaagagcacaacaauuu

SEQ ID NO: 193319 - RNA, 19 nt, Homo sapiens
  misc_RNA (1)...(19): siRNA sense strand
agaagauguucgagacuuu

SEQ ID NO: 193320 - RNA, 19 nt, Homo sapiens
  misc_RNA (1)...(19): siRNA sense strand
gagcaagagcacaacaauu

SEQ ID NO: 193321 - RNA, 19 nt, Homo sapiens
  misc_RNA (1)...(19): siRNA sense strand
ucaagcaaguggcaaguuc

SEQ ID NO: 193322 - RNA, 19 nt, Homo sapiens
  misc_RNA (1)...(19): siRNA sense strand
ccacgagacucaaacaacu

SEQ ID NO: 193323 - RNA, 19 nt, Homo sapiens
  misc_RNA (1)...(19): siRNA sense strand
cagcacaaccucaagcaaa

SEQ ID NO: 193324 - RNA, 19 nt, Homo sapiens
  misc_RNA (1)...(19): siRNA sense strand
gcaaagaguguccaaucau

SEQ ID NO: 193325 - RNA, 19 nt, Homo sapiens
  misc_RNA (1)...(19): siRNA sense strand
auggauauccugcagauua

SEQ ID NO: 193326 - RNA, 19 nt, Homo sapiens
  misc_RNA (1)...(19): siRNA sense strand
uguaacaucugcaaagagu

SEQ ID NO: 193327 - RNA, 19 nt, Homo sapiens
  misc_RNA (1)...(19): siRNA sense strand
guccggagcugcuuccaau

SEQ ID NO: 193328 - RNA, 19 nt, Homo sapiens
  misc_RNA (1)...(19): siRNA sense strand
gcaaguggcaaguucaaca

SEQ ID NO: 193329 - RNA, 19 nt, Homo sapiens
  misc_RNA (1)...(19): siRNA sense strand
gcuuccaauuugcuaauaa

SEQ ID NO: 193330 - RNA, 19 nt, Homo sapiens
  misc_RNA (1)...(19): siRNA sense strand
uggaagacaaguacagaua

SEQ ID NO: 193331 - RNA, 19 nt, Homo sapiens
  misc_RNA (1)...(19): siRNA sense strand
ggauccguguccugucuuu

SEQ ID NO: 193332 - RNA, 19 nt, Homo sapiens
  misc_RNA (1)...(19): siRNA sense strand
gucuuuagcugaccugaau

SEQ ID NO: 193333 - RNA, 19 nt, Homo sapiens
  misc_RNA (1)...(19): siRNA sense strand
gacaaguacagauaccuuu

SEQ ID NO: 193334 - RNA, 19 nt, Homo sapiens
  misc_RNA (1)...(19): siRNA sense strand
ccaagcaucaggccaaaug

SEQ ID NO: 193335 - RNA, 19 nt, Homo sapiens
  misc_RNA (1)...(19): siRNA sense strand
ggagcaagagcacaacaau

SEQ ID NO: 193336 - RNA, 19 nt, Homo sapiens
  misc_RNA (1)...(19): siRNA sense strand
guguaaagcacauuuggaa

SEQ ID NO: 193337 - RNA, 19 nt, Homo sapiens
  misc_RNA (1)...(19): siRNA sense strand
caagacaguugggugaagu

SEQ ID NO: 193338 - RNA, 19 nt, Homo sapiens
  misc_RNA (1)...(19): siRNA sense strand
gaagauguucgagacuuug

SEQ ID NO: 193339 - RNA, 19 nt, Homo sapiens
  misc_RNA (1)...(19): siRNA sense strand
gucagauucucagcuuaua

SEQ ID NO: 193340 - RNA, 19 nt, Homo sapiens
  misc_RNA (1)...(19): siRNA sense strand
uaacaucugcaaagagugu

SEQ ID NO: 193341 - RNA, 19 nt, Homo sapiens
  misc_RNA (1)...(19): siRNA sense strand
cggagcugcuuccaauuug

SEQ ID NO: 193342 - RNA, 19 nt, Homo sapiens
  misc_RNA (1)...(19): siRNA sense strand
gaagacaaguacagauacc

SEQ ID NO: 193343 - RNA, 19 nt, Homo sapiens
  misc_RNA (1)...(19): siRNA sense strand
ccauggauauccugcagau

SEQ ID NO: 193344 - RNA, 19 nt, Homo sapiens
  misc_RNA (1)...(19): siRNA sense strand
ggcaucauuucccugugua

SEQ ID NO: 193345 - RNA, 19 nt, Homo sapiens
  misc_RNA (1)...(19): siRNA sense strand
uggauauccugcagauuau

SEQ ID NO: 193346 - RNA, 19 nt, Homo sapiens
  misc_RNA (1)...(19): siRNA sense strand
ggaagacaaguacagauac

SEQ ID NO: 193347 - RNA, 19 nt, Homo sapiens
  misc_RNA (1)...(19): siRNA sense strand
ugcaaagaguguccaauca

SEQ ID NO: 193348 - RNA, 19 nt, Homo sapiens
  misc_RNA (1)...(19): siRNA sense strand
guggauaugugucugaacu

SEQ ID NO: 193349 - RNA, 19 nt, Homo sapiens
  misc_RNA (1)...(19): siRNA sense strand
acuggcugcugaauguuua

SEQ ID NO: 193350 - RNA, 19 nt, Homo sapiens
  misc_RNA (1)...(19): siRNA sense strand
acuaucccaugguggaaua

SEQ ID NO: 193351 - RNA, 19 nt, Homo sapiens
  misc_RNA (1)...(19): siRNA sense strand
ccggagcugcuuccaauuu

SEQ ID NO: 193352 - RNA, 19 nt, Homo sapiens
  misc_RNA (1)...(19): siRNA sense strand
ccaaauuccaagacaguug

SEQ ID NO: 193353 - RNA, 19 nt, Homo sapiens
  misc_RNA (1)...(19): siRNA sense strand
cagaaacugccaagcauca

SEQ ID NO: 193354 - RNA, 19 nt, Homo sapiens
  misc_RNA (1)...(19): siRNA sense strand
uaugacaucugccaaagcu

SEQ ID NO: 193355 - RNA, 19 nt, Homo sapiens
  misc_RNA (1)...(19): siRNA sense strand
aaugucagauucucagcuu

SEQ ID NO: 193356 - RNA, 19 nt, Homo sapiens
  misc_RNA (1)...(19): siRNA sense strand
ucgagacuuugccaaggua

SEQ ID NO: 193357 - RNA, 19 nt, Homo sapiens
  misc_RNA (1)...(19): siRNA sense strand
gcaaaaggccauaaaaugc

SEQ ID NO: 193358 - RNA, 19 nt, Homo sapiens
  misc_RNA (1)...(19): siRNA sense strand
cugcaugauucuauccaaa

SEQ ID NO: 193359 - RNA, 19 nt, Homo sapiens
  misc_RNA (1)...(19): siRNA sense strand
uaaagcacauuuggaagac

SEQ ID NO: 193360 - RNA, 19 nt, Homo sapiens
  misc_RNA (1)...(19): siRNA sense strand
acaggagucuaaagcacuu

SEQ ID NO: 193361 - RNA, 19 nt, Homo sapiens
  misc_RNA (1)...(19): siRNA sense strand
acagauaccuuuucaagca

SEQ ID NO: 193362 - RNA, 19 nt, Homo sapiens
  misc_RNA (1)...(19): siRNA sense strand
aagcacauuuggaagacaa

SEQ ID NO: 193363 - RNA, 19 nt, Homo sapiens
  misc_RNA (1)...(19): siRNA sense strand
gcuaauaauaagccagaga

SEQ ID NO: 193364 - RNA, 19 nt, Homo sapiens
  misc_RNA (1)...(19): siRNA sense strand
caagagcacaacaauuugg

SEQ ID NO: 193365 - RNA, 19 nt, Homo sapiens
  misc_RNA (1)...(19): siRNA sense strand
ccugucagcugcaugugau

SEQ ID NO: 193366 - RNA, 19 nt, Homo sapiens
  misc_RNA (1)...(19): siRNA sense strand
gcugcugaauguuuaugau

SEQ ID NO: 193367 - RNA, 19 nt, Homo sapiens
  misc_RNA (1)...(19): siRNA sense strand
acagagcucuaccagucuu

SEQ ID NO: 193368 - RNA, 19 nt, Homo sapiens
  misc_RNA (1)...(19): siRNA sense strand
acaguugggugaaguugca

SEQ ID NO: 193369 - RNA, 19 nt, Homo sapiens
  misc_RNA (1)...(19): siRNA sense strand
guuugaccacuauuuauga

SEQ ID NO: 193370 - RNA, 19 nt, Homo sapiens
  misc_RNA (1)...(19): siRNA sense strand
gcuuauaggacugccauga

SEQ ID NO: 193371 - RNA, 19 nt, Homo sapiens
  misc_RNA (1)...(19): siRNA sense strand
caucaggccaaauguaaca

SEQ ID NO: 193372 - RNA, 19 nt, Homo sapiens
  misc_RNA (1)...(19): siRNA sense strand
gauucuauccaaauuccaa

SEQ ID NO: 193373 - RNA, 19 nt, Homo sapiens
  misc_RNA (1)...(19): siRNA sense strand
ggcaaguucaacaggauuu

SEQ ID NO: 193374 - RNA, 19 nt, Homo sapiens
  misc_RNA (1)...(19): siRNA sense strand
gaacuggcugcugaauguu

SEQ ID NO: 193375 - RNA, 19 nt, Homo sapiens
  misc_RNA (1)...(19): siRNA sense strand
cugcugaauguuuaugaua

SEQ ID NO: 193376 - RNA, 19 nt, Homo sapiens
  misc_RNA (1)...(19): siRNA sense strand
aagcaucaggccaaaugua

SEQ ID NO: 193377 - RNA, 19 nt, Homo sapiens
  misc_RNA (1)...(19): siRNA sense strand
uggcaucauuucccugugu

SEQ ID NO: 193378 - RNA, 19 nt, Homo sapiens
  misc_RNA (1)...(19): siRNA sense strand
ccaugaaacuccgaagacu

SEQ ID NO: 193379 - RNA, 19 nt, Homo sapiens
  misc_RNA (1)...(19): siRNA sense strand
auaauaagccagagaucga

SEQ ID NO: 193380 - RNA, 19 nt, Homo sapiens
  misc_RNA (1)...(19): siRNA sense strand
cuaauaauaagccagagau

SEQ ID NO: 193381 - RNA, 19 nt, Homo sapiens
  misc_RNA (1)...(19): siRNA sense strand
ugggugaaguugcauccuu

SEQ ID NO: 193382 - RNA, 19 nt, Homo sapiens
  misc_RNA (1)...(19): siRNA sense strand
caucauuucccuguguaaa

SEQ ID NO: 193383 - RNA, 19 nt, Homo sapiens
  misc_RNA (1)...(19): siRNA sense strand
gcguggauaugugucugaa

SEQ ID NO: 193384 - RNA, 19 nt, Homo sapiens
  misc_RNA (1)...(19): siRNA sense strand
gcacuaucccaugguggaa

SEQ ID NO: 193385 - RNA, 19 nt, Homo sapiens
  misc_RNA (1)...(19): siRNA sense strand
gagccugucagcugcaugu

SEQ ID NO: 193386 - RNA, 19 nt, Homo sapiens
  misc_RNA (1)...(19): siRNA sense strand
guacagauaccuuuucaag

SEQ ID NO: 193387 - RNA, 19 nt, Homo sapiens
  misc_RNA (1)...(19): siRNA sense strand
gucccucucugcguggaua

SEQ ID NO: 193388 - RNA, 19 nt, Homo sapiens
  misc_RNA (1)...(19): siRNA sense strand
ggagcugcuuccaauuugc

SEQ ID NO: 193389 - RNA, 19 nt, Homo sapiens
  misc_RNA (1)...(19): siRNA sense strand
uuagcugaccugaauaaug

SEQ ID NO: 193390 - RNA, 19 nt, Homo sapiens
  misc_RNA (1)...(19): siRNA sense strand
guggcaaguucaacaggau

SEQ ID NO: 193391 - RNA, 19 nt, Homo sapiens
  misc_RNA (1)...(19): siRNA sense strand
acaacaauuuggucaacgu

SEQ ID NO: 193392 - RNA, 19 nt, Homo sapiens
  misc_RNA (1)...(19): siRNA sense strand
gacuacaucaggagaagau

SEQ ID NO: 193393 - RNA, 19 nt, Homo sapiens
  misc_RNA (1)...(19): siRNA sense strand
uaauaagccagagaucgaa

SEQ ID NO: 193394 - RNA, 19 nt, Homo sapiens
  misc_RNA (1)...(19): siRNA sense strand
ugucagauucucagcuuau

SEQ ID NO: 193395 - RNA, 19 nt, Homo sapiens
  misc_RNA (1)...(19): siRNA sense strand
ggauauccugcagauuauu

SEQ ID NO: 193396 - RNA, 19 nt, Homo sapiens
  misc_RNA (1)...(19): siRNA sense strand
agcaucaggccaaauguaa

SEQ ID NO: 193397 - RNA, 19 nt, Homo sapiens
  misc_RNA (1)...(19): siRNA sense strand
gcccuuugcuuggaucucu

SEQ ID NO: 193398 - RNA, 19 nt, Homo sapiens
  misc_RNA (1)...(19): siRNA sense strand
gcugaauguuuaugauacg

SEQ ID NO: 193399 - RNA, 19 nt, Homo sapiens
  misc_RNA (1)...(19): siRNA sense strand
agacuuugccaagguacua

SEQ ID NO: 193400 - RNA, 19 nt, Homo sapiens
  misc_RNA (1)...(19): siRNA sense strand
caagcaaguggcaaguuca

SEQ ID NO: 193401 - RNA, 19 nt, Homo sapiens
  misc_RNA (1)...(19): siRNA sense strand
agacaaguacagauaccuu

SEQ ID NO: 193402 - RNA, 19 nt, Homo sapiens
  misc_RNA (1)...(19): siRNA sense strand
gcaucauuucccuguguaa

SEQ ID NO: 193403 - RNA, 19 nt, Homo sapiens
  misc_RNA (1)...(19): siRNA sense strand
cugcaaagaguguccaauc

SEQ ID NO: 193404 - RNA, 19 nt, Homo sapiens
  misc_RNA (1)...(19): siRNA sense strand
cuuauaggacugccaugaa

SEQ ID NO: 193405 - RNA, 19 nt, Homo sapiens
  misc_RNA (1)...(19): siRNA sense strand
caaagaguguccaaucauu

SEQ ID NO: 193406 - RNA, 19 nt, Homo sapiens
  misc_RNA (1)...(19): siRNA sense strand
uagcugaccugaauaaugu

SEQ ID NO: 193407 - RNA, 19 nt, Homo sapiens
  misc_RNA (1)...(19): siRNA sense strand
gcaugauucuauccaaauu

SEQ ID NO: 193408 - RNA, 19 nt, Homo sapiens
  misc_RNA (1)...(19): siRNA sense strand
ugaacuggcugcugaaugu

SEQ ID NO: 193409 - RNA, 19 nt, Homo sapiens
  misc_RNA (1)...(19): siRNA sense strand
gauauccugcagauuauua

SEQ ID NO: 193410 - RNA, 19 nt, Homo sapiens
  misc_RNA (1)...(19): siRNA sense strand
gagaagauguucgagacuu

SEQ ID NO: 193411 - RNA, 19 nt, Homo sapiens
  misc_RNA (1)...(19): siRNA sense strand
gcacuuuaauuaugacauc

SEQ ID NO: 193412 - RNA, 19 nt, Homo sapiens
  misc_RNA (1)...(19): siRNA sense strand
guaaagcacauuuggaaga

SEQ ID NO: 193413 - RNA, 19 nt, Homo sapiens
  misc_RNA (1)...(19): siRNA sense strand
gaauauugcacuccgacua

SEQ ID NO: 193414 - RNA, 19 nt, Homo sapiens
  misc_RNA (1)...(19): siRNA sense strand
uuauaggacugccaugaaa

SEQ ID NO: 193415 - RNA, 19 nt, Homo sapiens
  misc_RNA (1)...(19): siRNA sense strand
gggugaaguugcauccuuu

SEQ ID NO: 193416 - RNA, 19 nt, Homo sapiens
  misc_RNA (1)...(19): siRNA sense strand
gcaagagcacaacaauuug

SEQ ID NO: 193417 - RNA, 19 nt, Homo sapiens
  misc_RNA (1)...(19): siRNA sense strand
gcacaacaauuuggucaac

SEQ ID NO: 193418 - RNA, 19 nt, Homo sapiens
  misc_RNA (1)...(19): siRNA sense strand
agcaagagcacaacaauuu

SEQ ID NO: 193419 - RNA, 19 nt, Homo sapiens
  misc_RNA (1)...(19): siRNA sense strand
agaagauguucgagacuuu

SEQ ID NO: 193420 - RNA, 19 nt, Homo sapiens
  misc_RNA (1)...(19): siRNA sense strand
gagcaagagcacaacaauu

SEQ ID NO: 193421 - RNA, 19 nt, Homo sapiens
  misc_RNA (1)...(19): siRNA sense strand
ucaagcaaguggcaaguuc

SEQ ID NO: 193422 - RNA, 19 nt, Homo sapiens
  misc_RNA (1)...(19): siRNA sense strand
ccacgagacucaaacaacu

SEQ ID NO: 193423 - RNA, 19 nt, Homo sapiens
  misc_RNA (1)...(19): siRNA sense strand
cagcacaaccucaagcaaa

SEQ ID NO: 193424 - RNA, 19 nt, Homo sapiens
  misc_RNA (1)...(19): siRNA sense strand
gcaaagaguguccaaucau

SEQ ID NO: 193425 - RNA, 19 nt, Homo sapiens
  misc_RNA (1)...(19): siRNA sense strand
auggauauccugcagauua

SEQ ID NO: 193426 - RNA, 19 nt, Homo sapiens
  misc_RNA (1)...(19): siRNA sense strand
uguaacaucugcaaagagu

SEQ ID NO: 193427 - RNA, 19 nt, Homo sapiens
  misc_RNA (1)...(19): siRNA sense strand
guccggagcugcuuccaau

SEQ ID NO: 193428 - RNA, 19 nt, Homo sapiens
  misc_RNA (1)...(19): siRNA sense strand
gcaaguggcaaguucaaca

SEQ ID NO: 193429 - RNA, 19 nt, Homo sapiens
  misc_RNA (1)...(19): siRNA sense strand
gcuuccaauuugcuaauaa

SEQ ID NO: 193430 - RNA, 19 nt, Homo sapiens
  misc_RNA (1)...(19): siRNA sense strand
uggaagacaaguacagaua

SEQ ID NO: 193431 - RNA, 19 nt, Homo sapiens
  misc_RNA (1)...(19): siRNA sense strand
ggauccguguccugucuuu

SEQ ID NO: 193432 - RNA, 19 nt, Homo sapiens
  misc_RNA (1)...(19): siRNA sense strand
gucuuuagcugaccugaau

SEQ ID NO: 193433 - RNA, 19 nt, Homo sapiens
  misc_RNA (1)...(19): siRNA sense strand
gacaaguacagauaccuuu

SEQ ID NO: 193434 - RNA, 19 nt, Homo sapiens
  misc_RNA (1)...(19): siRNA sense strand
ccaagcaucaggccaaaug

SEQ ID NO: 193435 - RNA, 19 nt, Homo sapiens
  misc_RNA (1)...(19): siRNA sense strand
ggagcaagagcacaacaau

SEQ ID NO: 193436 - RNA, 19 nt, Homo sapiens
  misc_RNA (1)...(19): siRNA sense strand
guguaaagcacauuuggaa

SEQ ID NO: 193437 - RNA, 19 nt, Homo sapiens
  misc_RNA (1)...(19): siRNA sense strand
caagacaguugggugaagu

SEQ ID NO: 193438 - RNA, 19 nt, Homo sapiens
  misc_RNA (1)...(19): siRNA sense strand
gaagauguucgagacuuug

SEQ ID NO: 193439 - RNA, 19 nt, Homo sapiens
  misc_RNA (1)...(19): siRNA sense strand
gucagauucucagcuuaua

SEQ ID NO: 193440 - RNA, 19 nt, Homo sapiens
  misc_RNA (1)...(19): siRNA sense strand
uaacaucugcaaagagugu

SEQ ID NO: 193441 - RNA, 19 nt, Homo sapiens
  misc_RNA (1)...(19): siRNA sense strand
cggagcugcuuccaauuug

SEQ ID NO: 193442 - RNA, 19 nt, Homo sapiens
  misc_RNA (1)...(19): siRNA sense strand
gaagacaaguacagauacc

SEQ ID NO: 193443 - RNA, 19 nt, Homo sapiens
  misc_RNA (1)...(19): siRNA sense strand
ccauggauauccugcagau

SEQ ID NO: 193444 - RNA, 19 nt, Homo sapiens
  misc_RNA (1)...(19): siRNA sense strand
ggcaucauuucccugugua

SEQ ID NO: 193445 - RNA, 19 nt, Homo sapiens
  misc_RNA (1)...(19): siRNA sense strand
uggauauccugcagauuau

SEQ ID NO: 193446 - RNA, 19 nt, Homo sapiens
  misc_RNA (1)...(19): siRNA sense strand
ggaagacaaguacagauac

SEQ ID NO: 193447 - RNA, 19 nt, Homo sapiens
  misc_RNA (1)...(19): siRNA sense strand
ugcaaagaguguccaauca

SEQ ID NO: 193448 - RNA, 19 nt, Homo sapiens
  misc_RNA (1)...(19): siRNA sense strand
guggauaugugucugaacu

SEQ ID NO: 193449 - RNA, 19 nt, Homo sapiens
  misc_RNA (1)...(19): siRNA sense strand
acuggcugcugaauguuua

SEQ ID NO: 193450 - RNA, 19 nt, Homo sapiens
  misc_RNA (1)...(19): siRNA sense strand
acuaucccaugguggaaua

SEQ ID NO: 193451 - RNA, 19 nt, Homo sapiens
  misc_RNA (1)...(19): siRNA sense strand
ccggagcugcuuccaauuu

SEQ ID NO: 193452 - RNA, 19 nt, Homo sapiens
  misc_RNA (1)...(19): siRNA sense strand
ccaaauuccaagacaguug

SEQ ID NO: 193453 - RNA, 19 nt, Homo sapiens
  misc_RNA (1)...(19): siRNA sense strand
cagaaacugccaagcauca

SEQ ID NO: 193454 - RNA, 19 nt, Homo sapiens
  misc_RNA (1)...(19): siRNA sense strand
uaugacaucugccaaagcu

SEQ ID NO: 193455 - RNA, 19 nt, Homo sapiens
  misc_RNA (1)...(19): siRNA sense strand
aaugucagauucucagcuu

SEQ ID NO: 193456 - RNA, 19 nt, Homo sapiens
  misc_RNA (1)...(19): siRNA sense strand
ucgagacuuugccaaggua

SEQ ID NO: 193457 - RNA, 19 nt, Homo sapiens
  misc_RNA (1)...(19): siRNA sense strand
gcaaaaggccauaaaaugc

SEQ ID NO: 193458 - RNA, 19 nt, Homo sapiens
  misc_RNA (1)...(19): siRNA sense strand
cugcaugauucuauccaaa

SEQ ID NO: 193459 - RNA, 19 nt, Homo sapiens
  misc_RNA (1)...(19): siRNA sense strand
uaaagcacauuuggaagac

SEQ ID NO: 193460 - RNA, 19 nt, Homo sapiens
  misc_RNA (1)...(19): siRNA sense strand
acaggagucuaaagcacuu

SEQ ID NO: 193461 - RNA, 19 nt, Homo sapiens
  misc_RNA (1)...(19): siRNA sense strand
acagauaccuuuucaagca

SEQ ID NO: 193462 - RNA, 19 nt, Homo sapiens
  misc_RNA (1)...(19): siRNA sense strand
aagcacauuuggaagacaa

SEQ ID NO: 193463 - RNA, 19 nt, Homo sapiens
  misc_RNA (1)...(19): siRNA sense strand
gcuaauaauaagccagaga

SEQ ID NO: 193464 - RNA, 19 nt, Homo sapiens
  misc_RNA (1)...(19): siRNA sense strand
caagagcacaacaauuugg

SEQ ID NO: 193465 - RNA, 19 nt, Homo sapiens
  misc_RNA (1)...(19): siRNA sense strand
ccugucagcugcaugugau

SEQ ID NO: 193466 - RNA, 19 nt, Homo sapiens
  misc_RNA (1)...(19): siRNA sense strand
gcugcugaauguuuaugau

SEQ ID NO: 193467 - RNA, 19 nt, Homo sapiens
  misc_RNA (1)...(19): siRNA sense strand
acagagcucuaccagucuu

SEQ ID NO: 193468 - RNA, 19 nt, Homo sapiens
  misc_RNA (1)...(19): siRNA sense strand
acaguugggugaaguugca

SEQ ID NO: 193469 - RNA, 19 nt, Homo sapiens
  misc_RNA (1)...(19): siRNA sense strand
guuugaccacuauuuauga

SEQ ID NO: 193470 - RNA, 19 nt, Homo sapiens
  misc_RNA (1)...(19): siRNA sense strand
gcuuauaggacugccauga

SEQ ID NO: 193471 - RNA, 19 nt, Homo sapiens
  misc_RNA (1)...(19): siRNA sense strand
caucaggccaaauguaaca

SEQ ID NO: 193472 - RNA, 19 nt, Homo sapiens
  misc_RNA (1)...(19): siRNA sense strand
gauucuauccaaauuccaa

SEQ ID NO: 193473 - RNA, 19 nt, Homo sapiens
  misc_RNA (1)...(19): siRNA sense strand
ggcaaguucaacaggauuu

SEQ ID NO: 193474 - RNA, 19 nt, Homo sapiens
  misc_RNA (1)...(19): siRNA sense strand
gaacuggcugcugaauguu

SEQ ID NO: 193475 - RNA, 19 nt, Homo sapiens
  misc_RNA (1)...(19): siRNA sense strand
cugcugaauguuuaugaua

SEQ ID NO: 193476 - RNA, 19 nt, Homo sapiens
  misc_RNA (1)...(19): siRNA sense strand
aagcaucaggccaaaugua

SEQ ID NO: 193477 - RNA, 19 nt, Homo sapiens
  misc_RNA (1)...(19): siRNA sense strand
uggcaucauuucccugugu

SEQ ID NO: 193478 - RNA, 19 nt, Homo sapiens
  misc_RNA (1)...(19): siRNA sense strand
ccaugaaacuccgaagacu

SEQ ID NO: 193479 - RNA, 19 nt, Homo sapiens
  misc_RNA (1)...(19): siRNA sense strand
auaauaagccagagaucga

SEQ ID NO: 193480 - RNA, 19 nt, Homo sapiens
  misc_RNA (1)...(19): siRNA sense strand
cuaauaauaagccagagau

SEQ ID NO: 193481 - RNA, 19 nt, Homo sapiens
  misc_RNA (1)...(19): siRNA sense strand
ugggugaaguugcauccuu

SEQ ID NO: 193482 - RNA, 19 nt, Homo sapiens
  misc_RNA (1)...(19): siRNA sense strand
caucauuucccuguguaaa

SEQ ID NO: 193483 - RNA, 19 nt, Homo sapiens
  misc_RNA (1)...(19): siRNA sense strand
gcguggauaugugucugaa

SEQ ID NO: 193484 - RNA, 19 nt, Homo sapiens
  misc_RNA (1)...(19): siRNA sense strand
gcacuaucccaugguggaa

SEQ ID NO: 193485 - RNA, 19 nt, Homo sapiens
  misc_RNA (1)...(19): siRNA sense strand
gagccugucagcugcaugu

SEQ ID NO: 193486 - RNA, 19 nt, Homo sapiens
  misc_RNA (1)...(19): siRNA sense strand
guacagauaccuuuucaag

SEQ ID NO: 193487 - RNA, 19 nt, Homo sapiens
  misc_RNA (1)...(19): siRNA sense strand
gucccucucugcguggaua

SEQ ID NO: 193488 - RNA, 19 nt, Homo sapiens
  misc_RNA (1)...(19): siRNA sense strand
ggagcugcuuccaauuugc

SEQ ID NO: 193489 - RNA, 19 nt, Homo sapiens
  misc_RNA (1)...(19): siRNA sense strand
uuagcugaccugaauaaug

SEQ ID NO: 193490 - RNA, 19 nt, Homo sapiens
  misc_RNA (1)...(19): siRNA sense strand
guggcaaguucaacaggau

SEQ ID NO: 193491 - RNA, 19 nt, Homo sapiens
  misc_RNA (1)...(19): siRNA sense strand
acaacaauuuggucaacgu

SEQ ID NO: 193492 - RNA, 19 nt, Homo sapiens
  misc_RNA (1)...(19): siRNA sense strand
gacuacaucaggagaagau

SEQ ID NO: 193493 - RNA, 19 nt, Homo sapiens
  misc_RNA (1)...(19): siRNA sense strand
uaauaagccagagaucgaa

SEQ ID NO: 193494 - RNA, 19 nt, Homo sapiens
  misc_RNA (1)...(19): siRNA sense strand
ugucagauucucagcuuau

SEQ ID NO: 193495 - RNA, 19 nt, Homo sapiens
  misc_RNA (1)...(19): siRNA sense strand
ggauauccugcagauuauu

SEQ ID NO: 193496 - RNA, 19 nt, Homo sapiens
  misc_RNA (1)...(19): siRNA sense strand
agcaucaggccaaauguaa

SEQ ID NO: 193497 - RNA, 19 nt, Homo sapiens
  misc_RNA (1)...(19): siRNA sense strand
gcccuuugcuuggaucucu

SEQ ID NO: 193498 - RNA, 19 nt, Homo sapiens
  misc_RNA (1)...(19): siRNA sense strand
gcugaauguuuaugauacg

SEQ ID NO: 193499 - RNA, 19 nt, Homo sapiens
  misc_RNA (1)...(19): siRNA sense strand
agacuuugccaagguacua

SEQ ID NO: 193500 - RNA, 19 nt, Homo sapiens
  misc_RNA (1)...(19): siRNA sense strand
caagcaaguggcaaguuca

SEQ ID NO: 193501 - RNA, 19 nt, Homo sapiens
  misc_RNA (1)...(19): siRNA sense strand
agacaaguacagauaccuu

SEQ ID NO: 193502 - RNA, 19 nt, Homo sapiens
  misc_RNA (1)...(19): siRNA sense strand
gcaucauuucccuguguaa

SEQ ID NO: 193503 - RNA, 19 nt, Homo sapiens
  misc_RNA (1)...(19): siRNA sense strand
cugcaaagaguguccaauc

SEQ ID NO: 193504 - RNA, 19 nt, Homo sapiens
  misc_RNA (1)...(19): siRNA sense strand
cuuauaggacugccaugaa

SEQ ID NO: 193505 - RNA, 19 nt, Homo sapiens
  misc_RNA (1)...(19): siRNA sense strand
caaagaguguccaaucauu

SEQ ID NO: 193506 - RNA, 19 nt, Homo sapiens
  misc_RNA (1)...(19): siRNA sense strand
uagcugaccugaauaaugu

SEQ ID NO: 193507 - RNA, 19 nt, Homo sapiens
  misc_RNA (1)...(19): siRNA sense strand
gcaugauucuauccaaauu

SEQ ID NO: 193508 - RNA, 19 nt, Homo sapiens
  misc_RNA (1)...(19): siRNA sense strand
ugaacuggcugcugaaugu

SEQ ID NO: 193509 - RNA, 19 nt, Homo sapiens
  misc_RNA (1)...(19): siRNA sense strand
gauauccugcagauuauua

SEQ ID NO: 193510 - RNA, 19 nt, Homo sapiens
  misc_RNA (1)...(19): siRNA sense strand
gagaagauguucgagacuu

SEQ ID NO: 193511 - RNA, 19 nt, Homo sapiens
  misc_RNA (1)...(19): siRNA sense strand
gcacuuuaauuaugacauc

SEQ ID NO: 193512 - RNA, 19 nt, Homo sapiens
  misc_RNA (1)...(19): siRNA sense strand
guaaagcacauuuggaaga

SEQ ID NO: 193513 - RNA, 19 nt, Homo sapiens
  misc_RNA (1)...(19): siRNA sense strand
gaauauugcacuccgacua

SEQ ID NO: 193514 - RNA, 19 nt, Homo sapiens
  misc_RNA (1)...(19): siRNA sense strand
uuauaggacugccaugaaa

SEQ ID NO: 193515 - RNA, 19 nt, Homo sapiens
  misc_RNA (1)...(19): siRNA sense strand
gggugaaguugcauccuuu

SEQ ID NO: 193516 - RNA, 19 nt, Homo sapiens
  misc_RNA (1)...(19): siRNA sense strand
gcaagagcacaacaauuug

SEQ ID NO: 193517 - RNA, 19 nt, Homo sapiens
  misc_RNA (1)...(19): siRNA sense strand
gcacaacaauuuggucaac

SEQ ID NO: 193518 - RNA, 19 nt, Homo sapiens
  misc_RNA (1)...(19): siRNA sense strand
agcaagagcacaacaauuu

SEQ ID NO: 193519 - RNA, 19 nt, Homo sapiens
  misc_RNA (1)...(19): siRNA sense strand
agaagauguucgagacuuu

SEQ ID NO: 193520 - RNA, 19 nt, Homo sapiens
  misc_RNA (1)...(19): siRNA sense strand
gagcaagagcacaacaauu

SEQ ID NO: 193521 - RNA, 19 nt, Homo sapiens
  misc_RNA (1)...(19): siRNA sense strand
ucaagcaaguggcaaguuc

SEQ ID NO: 193522 - RNA, 19 nt, Homo sapiens
  misc_RNA (1)...(19): siRNA sense strand
ccacgagacucaaacaacu

SEQ ID NO: 193523 - RNA, 19 nt, Homo sapiens
  misc_RNA (1)...(19): siRNA sense strand
cagcacaaccucaagcaaa

SEQ ID NO: 193524 - RNA, 19 nt, Homo sapiens
  misc_RNA (1)...(19): siRNA sense strand
gcaaagaguguccaaucau

SEQ ID NO: 193525 - RNA, 19 nt, Homo sapiens
  misc_RNA (1)...(19): siRNA sense strand
auggauauccugcagauua

SEQ ID NO: 193526 - RNA, 19 nt, Homo sapiens
  misc_RNA (1)...(19): siRNA sense strand
uguaacaucugcaaagagu

SEQ ID NO: 193527 - RNA, 19 nt, Homo sapiens
  misc_RNA (1)...(19): siRNA sense strand
guccggagcugcuuccaau

SEQ ID NO: 193528 - RNA, 19 nt, Homo sapiens
  misc_RNA (1)...(19): siRNA sense strand
gcaaguggcaaguucaaca

SEQ ID NO: 193529 - RNA, 19 nt, Homo sapiens
  misc_RNA (1)...(19): siRNA sense strand
gcuuccaauuugcuaauaa

SEQ ID NO: 193530 - RNA, 19 nt, Homo sapiens
  misc_RNA (1)...(19): siRNA sense strand
uggaagacaaguacagaua

SEQ ID NO: 193531 - RNA, 19 nt, Homo sapiens
  misc_RNA (1)...(19): siRNA sense strand
ggauccguguccugucuuu

SEQ ID NO: 193532 - RNA, 19 nt, Homo sapiens
  misc_RNA (1)...(19): siRNA sense strand
gucuuuagcugaccugaau

SEQ ID NO: 193533 - RNA, 19 nt, Homo sapiens
  misc_RNA (1)...(19): siRNA sense strand
gacaaguacagauaccuuu

SEQ ID NO: 193534 - RNA, 19 nt, Homo sapiens
  misc_RNA (1)...(19): siRNA sense strand
ccaagcaucaggccaaaug

SEQ ID NO: 193535 - RNA, 19 nt, Homo sapiens
  misc_RNA (1)...(19): siRNA sense strand
ggagcaagagcacaacaau

SEQ ID NO: 193536 - RNA, 19 nt, Homo sapiens
  misc_RNA (1)...(19): siRNA sense strand
guguaaagcacauuuggaa

SEQ ID NO: 193537 - RNA, 19 nt, Homo sapiens
  misc_RNA (1)...(19): siRNA sense strand
caagacaguugggugaagu

SEQ ID NO: 193538 - RNA, 19 nt, Homo sapiens
  misc_RNA (1)...(19): siRNA sense strand
gaagauguucgagacuuug

SEQ ID NO: 193539 - RNA, 19 nt, Homo sapiens
  misc_RNA (1)...(19): siRNA sense strand
gucagauucucagcuuaua

SEQ ID NO: 193540 - RNA, 19 nt, Homo sapiens
  misc_RNA (1)...(19): siRNA sense strand
uaacaucugcaaagagugu

SEQ ID NO: 193541 - RNA, 19 nt, Homo sapiens
  misc_RNA (1)...(19): siRNA sense strand
cggagcugcuuccaauuug

SEQ ID NO: 193542 - RNA, 19 nt, Homo sapiens
  misc_RNA (1)...(19): siRNA sense strand
gaagacaaguacagauacc

SEQ ID NO: 193543 - RNA, 19 nt, Homo sapiens
  misc_RNA (1)...(19): siRNA sense strand
ccauggauauccugcagau

SEQ ID NO: 193544 - RNA, 19 nt, Homo sapiens
  misc_RNA (1)...(19): siRNA sense strand
ggcaucauuucccugugua

SEQ ID NO: 193545 - RNA, 19 nt, Homo sapiens
  misc_RNA (1)...(19): siRNA sense strand
uggauauccugcagauuau

SEQ ID NO: 193546 - RNA, 19 nt, Homo sapiens
  misc_RNA (1)...(19): siRNA sense strand
ggaagacaaguacagauac

SEQ ID NO: 193547 - RNA, 19 nt, Homo sapiens
  misc_RNA (1)...(19): siRNA sense strand
ugcaaagaguguccaauca

SEQ ID NO: 193548 - RNA, 19 nt, Homo sapiens
  misc_RNA (1)...(19): siRNA sense strand
guggauaugugucugaacu

SEQ ID NO: 193549 - RNA, 19 nt, Homo sapiens
  misc_RNA (1)...(19): siRNA sense strand
acuggcugcugaauguuua

SEQ ID NO: 193550 - RNA, 19 nt, Homo sapiens
  misc_RNA (1)...(19): siRNA sense strand
acuaucccaugguggaaua

SEQ ID NO: 193551 - RNA, 19 nt, Homo sapiens
  misc_RNA (1)...(19): siRNA sense strand
ccggagcugcuuccaauuu

SEQ ID NO: 193552 - RNA, 19 nt, Homo sapiens
  misc_RNA (1)...(19): siRNA sense strand
ccaaauuccaagacaguug

SEQ ID NO: 193553 - RNA, 19 nt, Homo sapiens
  misc_RNA (1)...(19): siRNA sense strand
cagaaacugccaagcauca

SEQ ID NO: 193554 - RNA, 19 nt, Homo sapiens
  misc_RNA (1)...(19): siRNA sense strand
uaugacaucugccaaagcu

SEQ ID NO: 193555 - RNA, 19 nt, Homo sapiens
  misc_RNA (1)...(19): siRNA sense strand
aaugucagauucucagcuu

SEQ ID NO: 193556 - RNA, 19 nt, Homo sapiens
  misc_RNA (1)...(19): siRNA sense strand
ucgagacuuugccaaggua

SEQ ID NO: 193557 - RNA, 19 nt, Homo sapiens
  misc_RNA (1)...(19): siRNA sense strand
gcaaaaggccauaaaaugc

SEQ ID NO: 193558 - RNA, 19 nt, Homo sapiens
  misc_RNA (1)...(19): siRNA sense strand
cugcaugauucuauccaaa

SEQ ID NO: 193559 - RNA, 19 nt, Homo sapiens
  misc_RNA (1)...(19): siRNA sense strand
uaaagcacauuuggaagac

SEQ ID NO: 193560 - RNA, 19 nt, Homo sapiens
  misc_RNA (1)...(19): siRNA sense strand
acaggagucuaaagcacuu

SEQ ID NO: 193561 - RNA, 19 nt, Homo sapiens
  misc_RNA (1)...(19): siRNA sense strand
acagauaccuuuucaagca

SEQ ID NO: 193562 - RNA, 19 nt, Homo sapiens
  misc_RNA (1)...(19): siRNA sense strand
aagcacauuuggaagacaa

SEQ ID NO: 193563 - RNA, 19 nt, Homo sapiens
  misc_RNA (1)...(19): siRNA sense strand
gcuaauaauaagccagaga

SEQ ID NO: 193564 - RNA, 19 nt, Homo sapiens
  misc_RNA (1)...(19): siRNA sense strand
caagagcacaacaauuugg

SEQ ID NO: 193565 - RNA, 19 nt, Homo sapiens
  misc_RNA (1)...(19): siRNA sense strand
ccugucagcugcaugugau

SEQ ID NO: 193566 - RNA, 19 nt, Homo sapiens
  misc_RNA (1)...(19): siRNA sense strand
gcugcugaauguuuaugau

SEQ ID NO: 193567 - RNA, 19 nt, Homo sapiens
  misc_RNA (1)...(19): siRNA sense strand
acagagcucuaccagucuu

SEQ ID NO: 193568 - RNA, 19 nt, Homo sapiens
  misc_RNA (1)...(19): siRNA sense strand
acaguugggugaaguugca

SEQ ID NO: 193569 - RNA, 19 nt, Homo sapiens
  misc_RNA (1)...(19): siRNA sense strand
guuugaccacuauuuauga

SEQ ID NO: 193570 - RNA, 19 nt, Homo sapiens
  misc_RNA (1)...(19): siRNA sense strand
gcuuauaggacugccauga

SEQ ID NO: 193571 - RNA, 19 nt, Homo sapiens
  misc_RNA (1)...(19): siRNA sense strand
caucaggccaaauguaaca

SEQ ID NO: 193572 - RNA, 19 nt, Homo sapiens
  misc_RNA (1)...(19): siRNA sense strand
gauucuauccaaauuccaa

SEQ ID NO: 193573 - RNA, 19 nt, Homo sapiens
  misc_RNA (1)...(19): siRNA sense strand
ggcaaguucaacaggauuu

SEQ ID NO: 193574 - RNA, 19 nt, Homo sapiens
  misc_RNA (1)...(19): siRNA sense strand
gaacuggcugcugaauguu

SEQ ID NO: 193575 - RNA, 19 nt, Homo sapiens
  misc_RNA (1)...(19): siRNA sense strand
cugcugaauguuuaugaua

SEQ ID NO: 193576 - RNA, 19 nt, Homo sapiens
  misc_RNA (1)...(19): siRNA sense strand
aagcaucaggccaaaugua

SEQ ID NO: 193577 - RNA, 19 nt, Homo sapiens
  misc_RNA (1)...(19): siRNA sense strand
uggcaucauuucccugugu

SEQ ID NO: 193578 - RNA, 19 nt, Homo sapiens
  misc_RNA (1)...(19): siRNA sense strand
ccaugaaacuccgaagacu

SEQ ID NO: 193579 - RNA, 19 nt, Homo sapiens
  misc_RNA (1)...(19): siRNA sense strand
auaauaagccagagaucga

SEQ ID NO: 193580 - RNA, 19 nt, Homo sapiens
  misc_RNA (1)...(19): siRNA sense strand
cuaauaauaagccagagau

SEQ ID NO: 193581 - RNA, 19 nt, Homo sapiens
  misc_RNA (1)...(19): siRNA sense strand
ugggugaaguugcauccuu

SEQ ID NO: 193582 - RNA, 19 nt, Homo sapiens
  misc_RNA (1)...(19): siRNA sense strand
caucauuucccuguguaaa

SEQ ID NO: 193583 - RNA, 19 nt, Homo sapiens
  misc_RNA (1)...(19): siRNA sense strand
gcguggauaugugucugaa

SEQ ID NO: 193584 - RNA, 19 nt, Homo sapiens
  misc_RNA (1)...(19): siRNA sense strand
gcacuaucccaugguggaa

SEQ ID NO: 193585 - RNA, 19 nt, Homo sapiens
  misc_RNA (1)...(19): siRNA sense strand
gagccugucagcugcaugu

SEQ ID NO: 193586 - RNA, 19 nt, Homo sapiens
  misc_RNA (1)...(19): siRNA sense strand
guacagauaccuuuucaag

SEQ ID NO: 193587 - RNA, 19 nt, Homo sapiens
  misc_RNA (1)...(19): siRNA sense strand
gucccucucugcguggaua

SEQ ID NO: 193588 - RNA, 19 nt, Homo sapiens
  misc_RNA (1)...(19): siRNA sense strand
ggagcugcuuccaauuugc

SEQ ID NO: 193589 - RNA, 19 nt, Homo sapiens
  misc_RNA (1)...(19): siRNA sense strand
uuagcugaccugaauaaug

SEQ ID NO: 193590 - RNA, 19 nt, Homo sapiens
  misc_RNA (1)...(19): siRNA sense strand
guggcaaguucaacaggau

SEQ ID NO: 193591 - RNA, 19 nt, Homo sapiens
  misc_RNA (1)...(19): siRNA sense strand
acaacaauuuggucaacgu

SEQ ID NO: 193592 - RNA, 19 nt, Homo sapiens
  misc_RNA (1)...(19): siRNA sense strand
gacuacaucaggagaagau

SEQ ID NO: 193593 - RNA, 19 nt, Homo sapiens
  misc_RNA (1)...(19): siRNA sense strand
uaauaagccagagaucgaa

SEQ ID NO: 193594 - RNA, 19 nt, Homo sapiens
  misc_RNA (1)...(19): siRNA sense strand
ugucagauucucagcuuau

SEQ ID NO: 193595 - RNA, 19 nt, Homo sapiens
  misc_RNA (1)...(19): siRNA sense strand
ggauauccugcagauuauu

SEQ ID NO: 193596 - RNA, 19 nt, Homo sapiens
  misc_RNA (1)...(19): siRNA sense strand
agcaucaggccaaauguaa

SEQ ID NO: 193597 - RNA, 19 nt, Homo sapiens
  misc_RNA (1)...(19): siRNA sense strand
gcccuuugcuuggaucucu

SEQ ID NO: 193598 - RNA, 19 nt, Homo sapiens
  misc_RNA (1)...(19): siRNA sense strand
gcugaauguuuaugauacg

SEQ ID NO: 193599 - RNA, 19 nt, Homo sapiens
  misc_RNA (1)...(19): siRNA sense strand
agacuuugccaagguacua

SEQ ID NO: 193600 - RNA, 19 nt, Homo sapiens
  misc_RNA (1)...(19): siRNA sense strand
caagcaaguggcaaguuca

SEQ ID NO: 193601 - RNA, 19 nt, Homo sapiens
  misc_RNA (1)...(19): siRNA sense strand
agacaaguacagauaccuu

SEQ ID NO: 193602 - RNA, 19 nt, Homo sapiens
  misc_RNA (1)...(19): siRNA sense strand
gcaucauuucccuguguaa

SEQ ID NO: 193603 - RNA, 19 nt, Homo sapiens
  misc_RNA (1)...(19): siRNA sense strand
cugcaaagaguguccaauc

SEQ ID NO: 193604 - RNA, 19 nt, Homo sapiens
  misc_RNA (1)...(19): siRNA sense strand
cuuauaggacugccaugaa

SEQ ID NO: 193605 - RNA, 19 nt, Homo sapiens
  misc_RNA (1)...(19): siRNA sense strand
caaagaguguccaaucauu

SEQ ID NO: 193606 - RNA, 19 nt, Homo sapiens
  misc_RNA (1)...(19): siRNA sense strand
uagcugaccugaauaaugu

SEQ ID NO: 193607 - RNA, 19 nt, Homo sapiens
  misc_RNA (1)...(19): siRNA sense strand
gcaugauucuauccaaauu

SEQ ID NO: 193608 - RNA, 19 nt, Homo sapiens
  misc_RNA (1)...(19): siRNA sense strand
ugaacuggcugcugaaugu

SEQ ID NO: 193609 - RNA, 19 nt, Homo sapiens
  misc_RNA (1)...(19): siRNA sense strand
gauauccugcagauuauua

SEQ ID NO: 193610 - RNA, 19 nt, Homo sapiens
  misc_RNA (1)...(19): siRNA sense strand
gagaagauguucgagacuu

SEQ ID NO: 193611 - RNA, 19 nt, Homo sapiens
  misc_RNA (1)...(19): siRNA sense strand
gcacuuuaauuaugacauc

SEQ ID NO: 193612 - RNA, 19 nt, Homo sapiens
  misc_RNA (1)...(19): siRNA sense strand
guaaagcacauuuggaaga

SEQ ID NO: 193613 - RNA, 19 nt, Homo sapiens
  misc_RNA (1)...(19): siRNA sense strand
gaauauugcacuccgacua

SEQ ID NO: 193614 - RNA, 19 nt, Homo sapiens
  misc_RNA (1)...(19): siRNA sense strand
uuauaggacugccaugaaa

SEQ ID NO: 193615 - RNA, 19 nt, Homo sapiens
  misc_RNA (1)...(19): siRNA sense strand
gggugaaguugcauccuuu

SEQ ID NO: 193616 - RNA, 19 nt, Homo sapiens
  misc_RNA (1)...(19): siRNA sense strand
gcaagagcacaacaauuug

SEQ ID NO: 193617 - RNA, 19 nt, Homo sapiens
  misc_RNA (1)...(19): siRNA sense strand
gcacaacaauuuggucaac

SEQ ID NO: 193618 - RNA, 19 nt, Homo sapiens
  misc_RNA (1)...(19): siRNA sense strand
agcaagagcacaacaauuu

SEQ ID NO: 193619 - RNA, 19 nt, Homo sapiens
  misc_RNA (1)...(19): siRNA sense strand
agaagauguucgagacuuu

SEQ ID NO: 193620 - RNA, 19 nt, Homo sapiens
  misc_RNA (1)...(19): siRNA sense strand
gagcaagagcacaacaauu

SEQ ID NO: 193621 - RNA, 19 nt, Homo sapiens
  misc_RNA (1)...(19): siRNA sense strand
ucaagcaaguggcaaguuc

SEQ ID NO: 193622 - RNA, 19 nt, Homo sapiens
  misc_RNA (1)...(19): siRNA sense strand
ccacgagacucaaacaacu

SEQ ID NO: 193623 - RNA, 19 nt, Homo sapiens
  misc_RNA (1)...(19): siRNA sense strand
cagcacaaccucaagcaaa

SEQ ID NO: 193624 - RNA, 19 nt, Homo sapiens
  misc_RNA (1)...(19): siRNA sense strand
gcaaagaguguccaaucau

SEQ ID NO: 193625 - RNA, 19 nt, Homo sapiens
  misc_RNA (1)...(19): siRNA sense strand
auggauauccugcagauua

SEQ ID NO: 193626 - RNA, 19 nt, Homo sapiens
  misc_RNA (1)...(19): siRNA sense strand
uguaacaucugcaaagagu

SEQ ID NO: 193627 - RNA, 19 nt, Homo sapiens
  misc_RNA (1)...(19): siRNA sense strand
guccggagcugcuuccaau

SEQ ID NO: 193628 - RNA, 19 nt, Homo sapiens
  misc_RNA (1)...(19): siRNA sense strand
gcaaguggcaaguucaaca

SEQ ID NO: 193629 - RNA, 19 nt, Homo sapiens
  misc_RNA (1)...(19): siRNA sense strand
gcuuccaauuugcuaauaa

SEQ ID NO: 193630 - RNA, 19 nt, Homo sapiens
  misc_RNA (1)...(19): siRNA sense strand
uggaagacaaguacagaua

SEQ ID NO: 193631 - RNA, 19 nt, Homo sapiens
  misc_RNA (1)...(19): siRNA sense strand
ggauccguguccugucuuu

SEQ ID NO: 193632 - RNA, 19 nt, Homo sapiens
  misc_RNA (1)...(19): siRNA sense strand
gucuuuagcugaccugaau

SEQ ID NO: 193633 - RNA, 19 nt, Homo sapiens
  misc_RNA (1)...(19): siRNA sense strand
gacaaguacagauaccuuu

SEQ ID NO: 193634 - RNA, 19 nt, Homo sapiens
  misc_RNA (1)...(19): siRNA sense strand
ccaagcaucaggccaaaug

SEQ ID NO: 193635 - RNA, 19 nt, Homo sapiens
  misc_RNA (1)...(19): siRNA sense strand
ggagcaagagcacaacaau

SEQ ID NO: 193636 - RNA, 19 nt, Homo sapiens
  misc_RNA (1)...(19): siRNA sense strand
guguaaagcacauuuggaa

SEQ ID NO: 193637 - RNA, 19 nt, Homo sapiens
  misc_RNA (1)...(19): siRNA sense strand
caagacaguugggugaagu

SEQ ID NO: 193638 - RNA, 19 nt, Homo sapiens
  misc_RNA (1)...(19): siRNA sense strand
gaagauguucgagacuuug

SEQ ID NO: 193639 - RNA, 19 nt, Homo sapiens
  misc_RNA (1)...(19): siRNA sense strand
gucagauucucagcuuaua

SEQ ID NO: 193640 - RNA, 19 nt, Homo sapiens
  misc_RNA (1)...(19): siRNA sense strand
uaacaucugcaaagagugu

SEQ ID NO: 193641 - RNA, 19 nt, Homo sapiens
  misc_RNA (1)...(19): siRNA sense strand
cggagcugcuuccaauuug

SEQ ID NO: 193642 - RNA, 19 nt, Homo sapiens
  misc_RNA (1)...(19): siRNA sense strand
gaagacaaguacagauacc

SEQ ID NO: 193643 - RNA, 19 nt, Homo sapiens
  misc_RNA (1)...(19): siRNA sense strand
ccauggauauccugcagau

SEQ ID NO: 193644 - RNA, 19 nt, Homo sapiens
  misc_RNA (1)...(19): siRNA sense strand
ggcaucauuucccugugua

SEQ ID NO: 193645 - RNA, 19 nt, Homo sapiens
  misc_RNA (1)...(19): siRNA sense strand
uggauauccugcagauuau

SEQ ID NO: 193646 - RNA, 19 nt, Homo sapiens
  misc_RNA (1)...(19): siRNA sense strand
ggaagacaaguacagauac

SEQ ID NO: 193647 - RNA, 19 nt, Homo sapiens
  misc_RNA (1)...(19): siRNA sense strand
ugcaaagaguguccaauca

SEQ ID NO: 193648 - RNA, 19 nt, Homo sapiens
  misc_RNA (1)...(19): siRNA sense strand
guggauaugugucugaacu

SEQ ID NO: 193649 - RNA, 19 nt, Homo sapiens
  misc_RNA (1)...(19): siRNA sense strand
acuggcugcugaauguuua

SEQ ID NO: 193650 - RNA, 19 nt, Homo sapiens
  misc_RNA (1)...(19): siRNA sense strand
acuaucccaugguggaaua

SEQ ID NO: 193651 - RNA, 19 nt, Homo sapiens
  misc_RNA (1)...(19): siRNA sense strand
ccggagcugcuuccaauuu

SEQ ID NO: 193652 - RNA, 19 nt, Homo sapiens
  misc_RNA (1)...(19): siRNA sense strand
ccaaauuccaagacaguug

SEQ ID NO: 193653 - RNA, 19 nt, Homo sapiens
  misc_RNA (1)...(19): siRNA sense strand
cagaaacugccaagcauca

SEQ ID NO: 193654 - RNA, 19 nt, Homo sapiens
  misc_RNA (1)...(19): siRNA sense strand
uaugacaucugccaaagcu

SEQ ID NO: 193655 - RNA, 19 nt, Homo sapiens
  misc_RNA (1)...(19): siRNA sense strand
aaugucagauucucagcuu

SEQ ID NO: 193656 - RNA, 19 nt, Homo sapiens
  misc_RNA (1)...(19): siRNA sense strand
ucgagacuuugccaaggua

SEQ ID NO: 193657 - RNA, 19 nt, Homo sapiens
  misc_RNA (1)...(19): siRNA sense strand
gcaaaaggccauaaaaugc

SEQ ID NO: 193658 - RNA, 19 nt, Homo sapiens
  misc_RNA (1)...(19): siRNA sense strand
cugcaugauucuauccaaa

SEQ ID NO: 193659 - RNA, 19 nt, Homo sapiens
  misc_RNA (1)...(19): siRNA sense strand
uaaagcacauuuggaagac

SEQ ID NO: 193660 - RNA, 19 nt, Homo sapiens
  misc_RNA (1)...(19): siRNA sense strand
acaggagucuaaagcacuu

SEQ ID NO: 193661 - RNA, 19 nt, Homo sapiens
  misc_RNA (1)...(19): siRNA sense strand
acagauaccuuuucaagca

SEQ ID NO: 193662 - RNA, 19 nt, Homo sapiens
  misc_RNA (1)...(19): siRNA sense strand
aagcacauuuggaagacaa

SEQ ID NO: 193663 - RNA, 19 nt, Homo sapiens
  misc_RNA (1)...(19): siRNA sense strand
gcuaauaauaagccagaga

SEQ ID NO: 193664 - RNA, 19 nt, Homo sapiens
  misc_RNA (1)...(19): siRNA sense strand
caagagcacaacaauuugg

SEQ ID NO: 193665 - RNA, 19 nt, Homo sapiens
  misc_RNA (1)...(19): siRNA sense strand
ccugucagcugcaugugau

SEQ ID NO: 193666 - RNA, 19 nt, Homo sapiens
  misc_RNA (1)...(19): siRNA sense strand
gcugcugaauguuuaugau

SEQ ID NO: 193667 - RNA, 19 nt, Homo sapiens
  misc_RNA (1)...(19): siRNA sense strand
acagagcucuaccagucuu

SEQ ID NO: 193668 - RNA, 19 nt, Homo sapiens
  misc_RNA (1)...(19): siRNA sense strand
acaguugggugaaguugca

SEQ ID NO: 193669 - RNA, 19 nt, Homo sapiens
  misc_RNA (1)...(19): siRNA sense strand
guuugaccacuauuuauga

SEQ ID NO: 193670 - RNA, 19 nt, Homo sapiens
  misc_RNA (1)...(19): siRNA sense strand
gcuuauaggacugccauga

SEQ ID NO: 193671 - RNA, 19 nt, Homo sapiens
  misc_RNA (1)...(19): siRNA sense strand
caucaggccaaauguaaca

SEQ ID NO: 193672 - RNA, 19 nt, Homo sapiens
  misc_RNA (1)...(19): siRNA sense strand
gauucuauccaaauuccaa

SEQ ID NO: 193673 - RNA, 19 nt, Homo sapiens
  misc_RNA (1)...(19): siRNA sense strand
ggcaaguucaacaggauuu

SEQ ID NO: 193674 - RNA, 19 nt, Homo sapiens
  misc_RNA (1)...(19): siRNA sense strand
gaacuggcugcugaauguu

SEQ ID NO: 193675 - RNA, 19 nt, Homo sapiens
  misc_RNA (1)...(19): siRNA sense strand
cugcugaauguuuaugaua

SEQ ID NO: 193676 - RNA, 19 nt, Homo sapiens
  misc_RNA (1)...(19): siRNA sense strand
aagcaucaggccaaaugua

SEQ ID NO: 193677 - RNA, 19 nt, Homo sapiens
  misc_RNA (1)...(19): siRNA sense strand
uggcaucauuucccugugu

SEQ ID NO: 193678 - RNA, 19 nt, Homo sapiens
  misc_RNA (1)...(19): siRNA sense strand
ccaugaaacuccgaagacu

SEQ ID NO: 193679 - RNA, 19 nt, Homo sapiens
  misc_RNA (1)...(19): siRNA sense strand
auaauaagccagagaucga

SEQ ID NO: 193680 - RNA, 19 nt, Homo sapiens
  misc_RNA (1)...(19): siRNA sense strand
cuaauaauaagccagagau

SEQ ID NO: 193681 - RNA, 19 nt, Homo sapiens
  misc_RNA (1)...(19): siRNA sense strand
ugggugaaguugcauccuu

SEQ ID NO: 193682 - RNA, 19 nt, Homo sapiens
  misc_RNA (1)...(19): siRNA sense strand
caucauuucccuguguaaa

SEQ ID NO: 193683 - RNA, 19 nt, Homo sapiens
  misc_RNA (1)...(19): siRNA sense strand
gcguggauaugugucugaa

SEQ ID NO: 193684 - RNA, 19 nt, Homo sapiens
  misc_RNA (1)...(19): siRNA sense strand
gcacuaucccaugguggaa

SEQ ID NO: 193685 - RNA, 19 nt, Homo sapiens
  misc_RNA (1)...(19): siRNA sense strand
gagccugucagcugcaugu

SEQ ID NO: 193686 - RNA, 19 nt, Homo sapiens
  misc_RNA (1)...(19): siRNA sense strand
guacagauaccuuuucaag

SEQ ID NO: 193687 - RNA, 19 nt, Homo sapiens
  misc_RNA (1)...(19): siRNA sense strand
gucccucucugcguggaua

SEQ ID NO: 193688 - RNA, 19 nt, Homo sapiens
  misc_RNA (1)...(19): siRNA sense strand
ggagcugcuuccaauuugc

SEQ ID NO: 193689 - RNA, 19 nt, Homo sapiens
  misc_RNA (1)...(19): siRNA sense strand
uuagcugaccugaauaaug

SEQ ID NO: 193690 - RNA, 19 nt, Homo sapiens
  misc_RNA (1)...(19): siRNA sense strand
guggcaaguucaacaggau

SEQ ID NO: 193691 - RNA, 19 nt, Homo sapiens
  misc_RNA (1)...(19): siRNA sense strand
acaacaauuuggucaacgu

SEQ ID NO: 193692 - RNA, 19 nt, Homo sapiens
  misc_RNA (1)...(19): siRNA sense strand
gacuacaucaggagaagau

SEQ ID NO: 193693 - RNA, 19 nt, Homo sapiens
  misc_RNA (1)...(19): siRNA sense strand
uaauaagccagagaucgaa

SEQ ID NO: 193694 - RNA, 19 nt, Homo sapiens
  misc_RNA (1)...(19): siRNA sense strand
ugucagauucucagcuuau

SEQ ID NO: 193695 - RNA, 19 nt, Homo sapiens
  misc_RNA (1)...(19): siRNA sense strand
ggauauccugcagauuauu

SEQ ID NO: 193696 - RNA, 19 nt, Homo sapiens
  misc_RNA (1)...(19): siRNA sense strand
agcaucaggccaaauguaa

SEQ ID NO: 193697 - RNA, 19 nt, Homo sapiens
  misc_RNA (1)...(19): siRNA sense strand
gcccuuugcuuggaucucu

SEQ ID NO: 193698 - RNA, 19 nt, Homo sapiens
  misc_RNA (1)...(19): siRNA sense strand
gcugaauguuuaugauacg

SEQ ID NO: 193699 - RNA, 19 nt, Homo sapiens
  misc_RNA (1)...(19): siRNA sense strand
agacuuugccaagguacua

SEQ ID NO: 193700 - RNA, 19 nt, Homo sapiens
  misc_RNA (1)...(19): siRNA sense strand
caagcaaguggcaaguuca

SEQ ID NO: 193701 - RNA, 19 nt, Homo sapiens
  misc_RNA (1)...(19): siRNA sense strand
agacaaguacagauaccuu

SEQ ID NO: 193702 - RNA, 19 nt, Homo sapiens
  misc_RNA (1)...(19): siRNA sense strand
gcaucauuucccuguguaa

SEQ ID NO: 193703 - RNA, 19 nt, Homo sapiens
  misc_RNA (1)...(19): siRNA sense strand
cugcaaagaguguccaauc

SEQ ID NO: 193704 - RNA, 19 nt, Homo sapiens
  misc_RNA (1)...(19): siRNA sense strand
cuuauaggacugccaugaa

SEQ ID NO: 193705 - RNA, 19 nt, Homo sapiens
  misc_RNA (1)...(19): siRNA sense strand
caaagaguguccaaucauu

SEQ ID NO: 193706 - RNA, 19 nt, Homo sapiens
  misc_RNA (1)...(19): siRNA sense strand
uagcugaccugaauaaugu

SEQ ID NO: 193707 - RNA, 19 nt, Homo sapiens
  misc_RNA (1)...(19): siRNA sense strand
gcaugauucuauccaaauu

SEQ ID NO: 193708 - RNA, 19 nt, Homo sapiens
  misc_RNA (1)...(19): siRNA sense strand
ugaacuggcugcugaaugu

SEQ ID NO: 193709 - RNA, 19 nt, Homo sapiens
  misc_RNA (1)...(19): siRNA sense strand
gauauccugcagauuauua

SEQ ID NO: 193710 - RNA, 19 nt, Homo sapiens
  misc_RNA (1)...(19): siRNA sense strand
gagaagauguucgagacuu

SEQ ID NO: 193711 - RNA, 19 nt, Homo sapiens
  misc_RNA (1)...(19): siRNA sense strand
gcacuuuaauuaugacauc

SEQ ID NO: 193712 - RNA, 19 nt, Homo sapiens
  misc_RNA (1)...(19): siRNA sense strand
guaaagcacauuuggaaga

SEQ ID NO: 193713 - RNA, 19 nt, Homo sapiens
  misc_RNA (1)...(19): siRNA sense strand
gaauauugcacuccgacua

SEQ ID NO: 193714 - RNA, 19 nt, Homo sapiens
  misc_RNA (1)...(19): siRNA sense strand
uuauaggacugccaugaaa

SEQ ID NO: 193715 - RNA, 19 nt, Homo sapiens
  misc_RNA (1)...(19): siRNA sense strand
gggugaaguugcauccuuu

SEQ ID NO: 193716 - RNA, 19 nt, Homo sapiens
  misc_RNA (1)...(19): siRNA sense strand
gcaagagcacaacaauuug

SEQ ID NO: 193717 - RNA, 19 nt, Homo sapiens
  misc_RNA (1)...(19): siRNA sense strand
gcacaacaauuuggucaac

SEQ ID NO: 193718 - RNA, 19 nt, Homo sapiens
  misc_RNA (1)...(19): siRNA sense strand
agcaagagcacaacaauuu

SEQ ID NO: 193719 - RNA, 19 nt, Homo sapiens
  misc_RNA (1)...(19): siRNA sense strand
agaagauguucgagacuuu

SEQ ID NO: 193720 - RNA, 19 nt, Homo sapiens
  misc_RNA (1)...(19): siRNA sense strand
gagcaagagcacaacaauu

SEQ ID NO: 193721 - RNA, 19 nt, Homo sapiens
  misc_RNA (1)...(19): siRNA sense strand
ucaagcaaguggcaaguuc

SEQ ID NO: 193722 - RNA, 19 nt, Homo sapiens
  misc_RNA (1)...(19): siRNA sense strand
ccacgagacucaaacaacu

SEQ ID NO: 193723 - RNA, 19 nt, Homo sapiens
  misc_RNA (1)...(19): siRNA sense strand
cagcacaaccucaagcaaa

SEQ ID NO: 193724 - RNA, 19 nt, Homo sapiens
  misc_RNA (1)...(19): siRNA sense strand
gcaaagaguguccaaucau

SEQ ID NO: 193725 - RNA, 19 nt, Homo sapiens
  misc_RNA (1)...(19): siRNA sense strand
auggauauccugcagauua

SEQ ID NO: 193726 - RNA, 19 nt, Homo sapiens
  misc_RNA (1)...(19): siRNA sense strand
uguaacaucugcaaagagu

SEQ ID NO: 193727 - RNA, 19 nt, Homo sapiens
  misc_RNA (1)...(19): siRNA sense strand
guccggagcugcuuccaau

SEQ ID NO: 193728 - RNA, 19 nt, Homo sapiens
  misc_RNA (1)...(19): siRNA sense strand
gcaaguggcaaguucaaca

SEQ ID NO: 193729 - RNA, 19 nt, Homo sapiens
  misc_RNA (1)...(19): siRNA sense strand
gcuuccaauuugcuaauaa

SEQ ID NO: 193730 - RNA, 19 nt, Homo sapiens
  misc_RNA (1)...(19): siRNA sense strand
uggaagacaaguacagaua

SEQ ID NO: 193731 - RNA, 19 nt, Homo sapiens
  misc_RNA (1)...(19): siRNA sense strand
ggauccguguccugucuuu

SEQ ID NO: 193732 - RNA, 19 nt, Homo sapiens
  misc_RNA (1)...(19): siRNA sense strand
gucuuuagcugaccugaau

SEQ ID NO: 193733 - RNA, 19 nt, Homo sapiens
  misc_RNA (1)...(19): siRNA sense strand
gacaaguacagauaccuuu

SEQ ID NO: 193734 - RNA, 19 nt, Homo sapiens
  misc_RNA (1)...(19): siRNA sense strand
ccaagcaucaggccaaaug

SEQ ID NO: 193735 - RNA, 19 nt, Homo sapiens
  misc_RNA (1)...(19): siRNA sense strand
ggagcaagagcacaacaau

SEQ ID NO: 193736 - RNA, 19 nt, Homo sapiens
  misc_RNA (1)...(19): siRNA sense strand
guguaaagcacauuuggaa

SEQ ID NO: 193737 - RNA, 19 nt, Homo sapiens
  misc_RNA (1)...(19): siRNA sense strand
caagacaguugggugaagu

SEQ ID NO: 193738 - RNA, 19 nt, Homo sapiens
  misc_RNA (1)...(19): siRNA sense strand
gaagauguucgagacuuug

SEQ ID NO: 193739 - RNA, 19 nt, Homo sapiens
  misc_RNA (1)...(19): siRNA sense strand
gucagauucucagcuuaua

SEQ ID NO: 193740 - RNA, 19 nt, Homo sapiens
  misc_RNA (1)...(19): siRNA sense strand
uaacaucugcaaagagugu

SEQ ID NO: 193741 - RNA, 19 nt, Homo sapiens
  misc_RNA (1)...(19): siRNA sense strand
cggagcugcuuccaauuug

SEQ ID NO: 193742 - RNA, 19 nt, Homo sapiens
  misc_RNA (1)...(19): siRNA sense strand
gaagacaaguacagauacc

SEQ ID NO: 193743 - RNA, 19 nt, Homo sapiens
  misc_RNA (1)...(19): siRNA sense strand
ccauggauauccugcagau

SEQ ID NO: 193744 - RNA, 19 nt, Homo sapiens
  misc_RNA (1)...(19): siRNA sense strand
ggcaucauuucccugugua

SEQ ID NO: 193745 - RNA, 19 nt, Homo sapiens
  misc_RNA (1)...(19): siRNA sense strand
uggauauccugcagauuau

SEQ ID NO: 193746 - RNA, 19 nt, Homo sapiens
  misc_RNA (1)...(19): siRNA sense strand
ggaagacaaguacagauac

SEQ ID NO: 193747 - RNA, 19 nt, Homo sapiens
  misc_RNA (1)...(19): siRNA sense strand
ugcaaagaguguccaauca

SEQ ID NO: 193748 - RNA, 19 nt, Homo sapiens
  misc_RNA (1)...(19): siRNA sense strand
guggauaugugucugaacu

SEQ ID NO: 193749 - RNA, 19 nt, Homo sapiens
  misc_RNA (1)...(19): siRNA sense strand
acuggcugcugaauguuua

SEQ ID NO: 193750 - RNA, 19 nt, Homo sapiens
  misc_RNA (1)...(19): siRNA sense strand
acuaucccaugguggaaua

SEQ ID NO: 193751 - RNA, 19 nt, Homo sapiens
  misc_RNA (1)...(19): siRNA sense strand
ccggagcugcuuccaauuu

SEQ ID NO: 193752 - RNA, 19 nt, Homo sapiens
  misc_RNA (1)...(19): siRNA sense strand
ccaaauuccaagacaguug

SEQ ID NO: 193753 - RNA, 19 nt, Homo sapiens
  misc_RNA (1)...(19): siRNA sense strand
cagaaacugccaagcauca

SEQ ID NO: 193754 - RNA, 19 nt, Homo sapiens
  misc_RNA (1)...(19): siRNA sense strand
uaugacaucugccaaagcu

SEQ ID NO: 193755 - RNA, 19 nt, Homo sapiens
  misc_RNA (1)...(19): siRNA sense strand
aaugucagauucucagcuu

SEQ ID NO: 193756 - RNA, 19 nt, Homo sapiens
  misc_RNA (1)...(19): siRNA sense strand
ucgagacuuugccaaggua

SEQ ID NO: 193757 - RNA, 19 nt, Homo sapiens
  misc_RNA (1)...(19): siRNA sense strand
gcaaaaggccauaaaaugc

SEQ ID NO: 193758 - RNA, 19 nt, Homo sapiens
  misc_RNA (1)...(19): siRNA sense strand
cugcaugauucuauccaaa

SEQ ID NO: 193759 - RNA, 19 nt, Homo sapiens
  misc_RNA (1)...(19): siRNA sense strand
uaaagcacauuuggaagac

SEQ ID NO: 193760 - RNA, 19 nt, Homo sapiens
  misc_RNA (1)...(19): siRNA sense strand
acaggagucuaaagcacuu

SEQ ID NO: 193761 - RNA, 19 nt, Homo sapiens
  misc_RNA (1)...(19): siRNA sense strand
acagauaccuuuucaagca

SEQ ID NO: 193762 - RNA, 19 nt, Homo sapiens
  misc_RNA (1)...(19): siRNA sense strand
aagcacauuuggaagacaa

SEQ ID NO: 193763 - RNA, 19 nt, Homo sapiens
  misc_RNA (1)...(19): siRNA sense strand
gcuaauaauaagccagaga

SEQ ID NO: 193764 - RNA, 19 nt, Homo sapiens
  misc_RNA (1)...(19): siRNA sense strand
caagagcacaacaauuugg

SEQ ID NO: 193765 - RNA, 19 nt, Homo sapiens
  misc_RNA (1)...(19): siRNA sense strand
ccugucagcugcaugugau

SEQ ID NO: 193766 - RNA, 19 nt, Homo sapiens
  misc_RNA (1)...(19): siRNA sense strand
gcugcugaauguuuaugau

SEQ ID NO: 193767 - RNA, 19 nt, Homo sapiens
  misc_RNA (1)...(19): siRNA sense strand
acagagcucuaccagucuu

SEQ ID NO: 193768 - RNA, 19 nt, Homo sapiens
  misc_RNA (1)...(19): siRNA sense strand
acaguugggugaaguugca

SEQ ID NO: 193769 - RNA, 19 nt, Homo sapiens
  misc_RNA (1)...(19): siRNA sense strand
guuugaccacuauuuauga

SEQ ID NO: 193770 - RNA, 19 nt, Homo sapiens
  misc_RNA (1)...(19): siRNA sense strand
gcuuauaggacugccauga

SEQ ID NO: 193771 - RNA, 19 nt, Homo sapiens
  misc_RNA (1)...(19): siRNA sense strand
caucaggccaaauguaaca

SEQ ID NO: 193772 - RNA, 19 nt, Homo sapiens
  misc_RNA (1)...(19): siRNA sense strand
gauucuauccaaauuccaa

SEQ ID NO: 193773 - RNA, 19 nt, Homo sapiens
  misc_RNA (1)...(19): siRNA sense strand
ggcaaguucaacaggauuu

SEQ ID NO: 193774 - RNA, 19 nt, Homo sapiens
  misc_RNA (1)...(19): siRNA sense strand
gaacuggcugcugaauguu

SEQ ID NO: 193775 - RNA, 19 nt, Homo sapiens
  misc_RNA (1)...(19): siRNA sense strand
cugcugaauguuuaugaua

SEQ ID NO: 193776 - RNA, 19 nt, Homo sapiens
  misc_RNA (1)...(19): siRNA sense strand
aagcaucaggccaaaugua

SEQ ID NO: 193777 - RNA, 19 nt, Homo sapiens
  misc_RNA (1)...(19): siRNA sense strand
uggcaucauuucccugugu

SEQ ID NO: 193778 - RNA, 19 nt, Homo sapiens
  misc_RNA (1)...(19): siRNA sense strand
ccaugaaacuccgaagacu

SEQ ID NO: 193779 - RNA, 19 nt, Homo sapiens
  misc_RNA (1)...(19): siRNA sense strand
auaauaagccagagaucga

SEQ ID NO: 193780 - RNA, 19 nt, Homo sapiens
  misc_RNA (1)...(19): siRNA sense strand
cuaauaauaagccagagau

SEQ ID NO: 193781 - RNA, 19 nt, Homo sapiens
  misc_RNA (1)...(19): siRNA sense strand
ugggugaaguugcauccuu

SEQ ID NO: 193782 - RNA, 19 nt, Homo sapiens
  misc_RNA (1)...(19): siRNA sense strand
caucauuucccuguguaaa

SEQ ID NO: 193783 - RNA, 19 nt, Homo sapiens
  misc_RNA (1)...(19): siRNA sense strand
gcguggauaugugucugaa

SEQ ID NO: 193784 - RNA, 19 nt, Homo sapiens
  misc_RNA (1)...(19): siRNA sense strand
gcacuaucccaugguggaa

SEQ ID NO: 193785 - RNA, 19 nt, Homo sapiens
  misc_RNA (1)...(19): siRNA sense strand
gagccugucagcugcaugu

SEQ ID NO: 193786 - RNA, 19 nt, Homo sapiens
  misc_RNA (1)...(19): siRNA sense strand
guacagauaccuuuucaag

SEQ ID NO: 193787 - RNA, 19 nt, Homo sapiens
  misc_RNA (1)...(19): siRNA sense strand
gucccucucugcguggaua

SEQ ID NO: 193788 - RNA, 19 nt, Homo sapiens
  misc_RNA (1)...(19): siRNA sense strand
ggagcugcuuccaauuugc

SEQ ID NO: 193789 - RNA, 19 nt, Homo sapiens
  misc_RNA (1)...(19): siRNA sense strand
uuagcugaccugaauaaug

SEQ ID NO: 193790 - RNA, 19 nt, Homo sapiens
  misc_RNA (1)...(19): siRNA sense strand
guggcaaguucaacaggau

SEQ ID NO: 193791 - RNA, 19 nt, Homo sapiens
  misc_RNA (1)...(19): siRNA sense strand
acaacaauuuggucaacgu

SEQ ID NO: 193792 - RNA, 19 nt, Homo sapiens
  misc_RNA (1)...(19): siRNA sense strand
gacuacaucaggagaagau

SEQ ID NO: 193793 - RNA, 19 nt, Homo sapiens
  misc_RNA (1)...(19): siRNA sense strand
uaauaagccagagaucgaa

SEQ ID NO: 193794 - RNA, 19 nt, Homo sapiens
  misc_RNA (1)...(19): siRNA sense strand
ugucagauucucagcuuau

SEQ ID NO: 193795 - RNA, 19 nt, Homo sapiens
  misc_RNA (1)...(19): siRNA sense strand
ggauauccugcagauuauu

SEQ ID NO: 193796 - RNA, 19 nt, Homo sapiens
  misc_RNA (1)...(19): siRNA sense strand
agcaucaggccaaauguaa

SEQ ID NO: 193797 - RNA, 19 nt, Homo sapiens
  misc_RNA (1)...(19): siRNA sense strand
gcccuuugcuuggaucucu

SEQ ID NO: 193798 - RNA, 19 nt, Homo sapiens
  misc_RNA (1)...(19): siRNA sense strand
gcugaauguuuaugauacg

SEQ ID NO: 193799 - RNA, 19 nt, Homo sapiens
  misc_RNA (1)...(19): siRNA sense strand
agacuuugccaagguacua

SEQ ID NO: 193800 - RNA, 19 nt, Homo sapiens
  misc_RNA (1)...(19): siRNA sense strand
caagcaaguggcaaguuca

SEQ ID NO: 193801 - RNA, 19 nt, Homo sapiens
  misc_RNA (1)...(19): siRNA sense strand
agacaaguacagauaccuu

SEQ ID NO: 193802 - RNA, 19 nt, Homo sapiens
  misc_RNA (1)...(19): siRNA sense strand
gcaucauuucccuguguaa

SEQ ID NO: 193803 - RNA, 19 nt, Homo sapiens
  misc_RNA (1)...(19): siRNA sense strand
cugcaaagaguguccaauc

SEQ ID NO: 193804 - RNA, 19 nt, Homo sapiens
  misc_RNA (1)...(19): siRNA sense strand
cuuauaggacugccaugaa

SEQ ID NO: 193805 - RNA, 19 nt, Homo sapiens
  misc_RNA (1)...(19): siRNA sense strand
caaagaguguccaaucauu

SEQ ID NO: 193806 - RNA, 19 nt, Homo sapiens
  misc_RNA (1)...(19): siRNA sense strand
uagcugaccugaauaaugu

SEQ ID NO: 193807 - RNA, 19 nt, Homo sapiens
  misc_RNA (1)...(19): siRNA sense strand
gcaugauucuauccaaauu

SEQ ID NO: 193808 - RNA, 19 nt, Homo sapiens
  misc_RNA (1)...(19): siRNA sense strand
ugaacuggcugcugaaugu

SEQ ID NO: 193809 - RNA, 19 nt, Homo sapiens
  misc_RNA (1)...(19): siRNA sense strand
gauauccugcagauuauua

SEQ ID NO: 193810 - RNA, 19 nt, Homo sapiens
  misc_RNA (1)...(19): siRNA sense strand
gagaagauguucgagacuu

SEQ ID NO: 193811 - RNA, 19 nt, Homo sapiens
  misc_RNA (1)...(19): siRNA sense strand
gcacuuuaauuaugacauc

SEQ ID NO: 193812 - RNA, 19 nt, Homo sapiens
  misc_RNA (1)...(19): siRNA sense strand
guaaagcacauuuggaaga

SEQ ID NO: 193813 - RNA, 19 nt, Homo sapiens
  misc_RNA (1)...(19): siRNA sense strand
gaauauugcacuccgacua

SEQ ID NO: 193814 - RNA, 19 nt, Homo sapiens
  misc_RNA (1)...(19): siRNA sense strand
uuauaggacugccaugaaa

SEQ ID NO: 193815 - RNA, 19 nt, Homo sapiens
  misc_RNA (1)...(19): siRNA sense strand
gggugaaguugcauccuuu

SEQ ID NO: 193816 - RNA, 19 nt, Homo sapiens
  misc_RNA (1)...(19): siRNA sense strand
gcaagagcacaacaauuug

SEQ ID NO: 193817 - RNA, 19 nt, Homo sapiens
  misc_RNA (1)...(19): siRNA sense strand
gcacaacaauuuggucaac

SEQ ID NO: 193818 - RNA, 19 nt, Homo sapiens
  misc_RNA (1)...(19): siRNA sense strand
agcaagagcacaacaauuu

SEQ ID NO: 193819 - RNA, 19 nt, Homo sapiens
  misc_RNA (1)...(19): siRNA sense strand
agaagauguucgagacuuu

SEQ ID NO: 193820 - RNA, 19 nt, Homo sapiens
  misc_RNA (1)...(19): siRNA sense strand
gagcaagagcacaacaauu

SEQ ID NO: 193821 - RNA, 19 nt, Homo sapiens
  misc_RNA (1)...(19): siRNA sense strand
ucaagcaaguggcaaguuc

SEQ ID NO: 193822 - RNA, 19 nt, Homo sapiens
  misc_RNA (1)...(19): siRNA sense strand
ccacgagacucaaacaacu

SEQ ID NO: 193823 - RNA, 19 nt, Homo sapiens
  misc_RNA (1)...(19): siRNA sense strand
cagcacaaccucaagcaaa

SEQ ID NO: 193824 - RNA, 19 nt, Homo sapiens
  misc_RNA (1)...(19): siRNA sense strand
gcaaagaguguccaaucau

SEQ ID NO: 193825 - RNA, 19 nt, Homo sapiens
  misc_RNA (1)...(19): siRNA sense strand
auggauauccugcagauua

SEQ ID NO: 193826 - RNA, 19 nt, Homo sapiens
  misc_RNA (1)...(19): siRNA sense strand
uguaacaucugcaaagagu

SEQ ID NO: 193827 - RNA, 19 nt, Homo sapiens
  misc_RNA (1)...(19): siRNA sense strand
guccggagcugcuuccaau

SEQ ID NO: 193828 - RNA, 19 nt, Homo sapiens
  misc_RNA (1)...(19): siRNA sense strand
gcaaguggcaaguucaaca

SEQ ID NO: 193829 - RNA, 19 nt, Homo sapiens
  misc_RNA (1)...(19): siRNA sense strand
gcuuccaauuugcuaauaa

SEQ ID NO: 193830 - RNA, 19 nt, Homo sapiens
  misc_RNA (1)...(19): siRNA sense strand
uggaagacaaguacagaua

SEQ ID NO: 193831 - RNA, 19 nt, Homo sapiens
  misc_RNA (1)...(19): siRNA sense strand
ggauccguguccugucuuu

SEQ ID NO: 193832 - RNA, 19 nt, Homo sapiens
  misc_RNA (1)...(19): siRNA sense strand
gucuuuagcugaccugaau

SEQ ID NO: 193833 - RNA, 19 nt, Homo sapiens
  misc_RNA (1)...(19): siRNA sense strand
gacaaguacagauaccuuu

SEQ ID NO: 193834 - RNA, 19 nt, Homo sapiens
  misc_RNA (1)...(19): siRNA sense strand
ccaagcaucaggccaaaug

SEQ ID NO: 193835 - RNA, 19 nt, Homo sapiens
  misc_RNA (1)...(19): siRNA sense strand
ggagcaagagcacaacaau

SEQ ID NO: 193836 - RNA, 19 nt, Homo sapiens
  misc_RNA (1)...(19): siRNA sense strand
guguaaagcacauuuggaa

SEQ ID NO: 193837 - RNA, 19 nt, Homo sapiens
  misc_RNA (1)...(19): siRNA sense strand
caagacaguugggugaagu

SEQ ID NO: 193838 - RNA, 19 nt, Homo sapiens
  misc_RNA (1)...(19): siRNA sense strand
gaagauguucgagacuuug

SEQ ID NO: 193839 - RNA, 19 nt, Homo sapiens
  misc_RNA (1)...(19): siRNA sense strand
gucagauucucagcuuaua

SEQ ID NO: 193840 - RNA, 19 nt, Homo sapiens
  misc_RNA (1)...(19): siRNA sense strand
uaacaucugcaaagagugu

SEQ ID NO: 193841 - RNA, 19 nt, Homo sapiens
  misc_RNA (1)...(19): siRNA sense strand
cggagcugcuuccaauuug

SEQ ID NO: 193842 - RNA, 19 nt, Homo sapiens
  misc_RNA (1)...(19): siRNA sense strand
gaagacaaguacagauacc

SEQ ID NO: 193843 - RNA, 19 nt, Homo sapiens
  misc_RNA (1)...(19): siRNA sense strand
ccauggauauccugcagau

SEQ ID NO: 193844 - RNA, 19 nt, Homo sapiens
  misc_RNA (1)...(19): siRNA sense strand
ggcaucauuucccugugua

SEQ ID NO: 193845 - RNA, 19 nt, Homo sapiens
  misc_RNA (1)...(19): siRNA sense strand
uggauauccugcagauuau

SEQ ID NO: 193846 - RNA, 19 nt, Homo sapiens
  misc_RNA (1)...(19): siRNA sense strand
ggaagacaaguacagauac

SEQ ID NO: 193847 - RNA, 19 nt, Homo sapiens
  misc_RNA (1)...(19): siRNA sense strand
ugcaaagaguguccaauca

SEQ ID NO: 193848 - RNA, 19 nt, Homo sapiens
  misc_RNA (1)...(19): siRNA sense strand
guggauaugugucugaacu

SEQ ID NO: 193849 - RNA, 19 nt, Homo sapiens
  misc_RNA (1)...(19): siRNA sense strand
acuggcugcugaauguuua

SEQ ID NO: 193850 - RNA, 19 nt, Homo sapiens
  misc_RNA (1)...(19): siRNA sense strand
acuaucccaugguggaaua

SEQ ID NO: 193851 - RNA, 19 nt, Homo sapiens
  misc_RNA (1)...(19): siRNA sense strand
ccggagcugcuuccaauuu

SEQ ID NO: 193852 - RNA, 19 nt, Homo sapiens
  misc_RNA (1)...(19): siRNA sense strand
ccaaauuccaagacaguug

SEQ ID NO: 193853 - RNA, 19 nt, Homo sapiens
  misc_RNA (1)...(19): siRNA sense strand
cagaaacugccaagcauca

SEQ ID NO: 193854 - RNA, 19 nt, Homo sapiens
  misc_RNA (1)...(19): siRNA sense strand
uaugacaucugccaaagcu

SEQ ID NO: 193855 - RNA, 19 nt, Homo sapiens
  misc_RNA (1)...(19): siRNA sense strand
aaugucagauucucagcuu

SEQ ID NO: 193856 - RNA, 19 nt, Homo sapiens
  misc_RNA (1)...(19): siRNA sense strand
ucgagacuuugccaaggua

SEQ ID NO: 193857 - RNA, 19 nt, Homo sapiens
  misc_RNA (1)...(19): siRNA sense strand
gcaaaaggccauaaaaugc

SEQ ID NO: 193858 - RNA, 19 nt, Homo sapiens
  misc_RNA (1)...(19): siRNA sense strand
cugcaugauucuauccaaa

SEQ ID NO: 193859 - RNA, 19 nt, Homo sapiens
  misc_RNA (1)...(19): siRNA sense strand
uaaagcacauuuggaagac

SEQ ID NO: 193860 - RNA, 19 nt, Homo sapiens
  misc_RNA (1)...(19): siRNA sense strand
acaggagucuaaagcacuu

SEQ ID NO: 193861 - RNA, 19 nt, Homo sapiens
  misc_RNA (1)...(19): siRNA sense strand
acagauaccuuuucaagca

SEQ ID NO: 193862 - RNA, 19 nt, Homo sapiens
  misc_RNA (1)...(19): siRNA sense strand
aagcacauuuggaagacaa

SEQ ID NO: 193863 - RNA, 19 nt, Homo sapiens
  misc_RNA (1)...(19): siRNA sense strand
gcuaauaauaagccagaga

SEQ ID NO: 193864 - RNA, 19 nt, Homo sapiens
  misc_RNA (1)...(19): siRNA sense strand
caagagcacaacaauuugg

SEQ ID NO: 193865 - RNA, 19 nt, Homo sapiens
  misc_RNA (1)...(19): siRNA sense strand
ccugucagcugcaugugau

SEQ ID NO: 193866 - RNA, 19 nt, Homo sapiens
  misc_RNA (1)...(19): siRNA sense strand
gcugcugaauguuuaugau

SEQ ID NO: 193867 - RNA, 19 nt, Homo sapiens
  misc_RNA (1)...(19): siRNA sense strand
acagagcucuaccagucuu

SEQ ID NO: 193868 - RNA, 19 nt, Homo sapiens
  misc_RNA (1)...(19): siRNA sense strand
acaguugggugaaguugca

SEQ ID NO: 193869 - RNA, 19 nt, Homo sapiens
  misc_RNA (1)...(19): siRNA sense strand
guuugaccacuauuuauga

SEQ ID NO: 193870 - RNA, 19 nt, Homo sapiens
  misc_RNA (1)...(19): siRNA sense strand
gcuuauaggacugccauga

SEQ ID NO: 193871 - RNA, 19 nt, Homo sapiens
  misc_RNA (1)...(19): siRNA sense strand
caucaggccaaauguaaca

SEQ ID NO: 193872 - RNA, 19 nt, Homo sapiens
  misc_RNA (1)...(19): siRNA sense strand
gauucuauccaaauuccaa

SEQ ID NO: 193873 - RNA, 19 nt, Homo sapiens
  misc_RNA (1)...(19): siRNA sense strand
ggcaaguucaacaggauuu

SEQ ID NO: 193874 - RNA, 19 nt, Homo sapiens
  misc_RNA (1)...(19): siRNA sense strand
gaacuggcugcugaauguu

SEQ ID NO: 193875 - RNA, 19 nt, Homo sapiens
  misc_RNA (1)...(19): siRNA sense strand
cugcugaauguuuaugaua

SEQ ID NO: 193876 - RNA, 19 nt, Homo sapiens
  misc_RNA (1)...(19): siRNA sense strand
aagcaucaggccaaaugua

SEQ ID NO: 193877 - RNA, 19 nt, Homo sapiens
  misc_RNA (1)...(19): siRNA sense strand
uggcaucauuucccugugu

SEQ ID NO: 193878 - RNA, 19 nt, Homo sapiens
  misc_RNA (1)...(19): siRNA sense strand
ccaugaaacuccgaagacu

SEQ ID NO: 193879 - RNA, 19 nt, Homo sapiens
  misc_RNA (1)...(19): siRNA sense strand
auaauaagccagagaucga

SEQ ID NO: 193880 - RNA, 19 nt, Homo sapiens
  misc_RNA (1)...(19): siRNA sense strand
cuaauaauaagccagagau

SEQ ID NO: 193881 - RNA, 19 nt, Homo sapiens
  misc_RNA (1)...(19): siRNA sense strand
ugggugaaguugcauccuu

SEQ ID NO: 193882 - RNA, 19 nt, Homo sapiens
  misc_RNA (1)...(19): siRNA sense strand
caucauuucccuguguaaa

SEQ ID NO: 193883 - RNA, 19 nt, Homo sapiens
  misc_RNA (1)...(19): siRNA sense strand
gcguggauaugugucugaa

SEQ ID NO: 193884 - RNA, 19 nt, Homo sapiens
  misc_RNA (1)...(19): siRNA sense strand
gcacuaucccaugguggaa

SEQ ID NO: 193885 - RNA, 19 nt, Homo sapiens
  misc_RNA (1)...(19): siRNA sense strand
gagccugucagcugcaugu

SEQ ID NO: 193886 - RNA, 19 nt, Homo sapiens
  misc_RNA (1)...(19): siRNA sense strand
guacagauaccuuuucaag

SEQ ID NO: 193887 - RNA, 19 nt, Homo sapiens
  misc_RNA (1)...(19): siRNA sense strand
gucccucucugcguggaua

SEQ ID NO: 193888 - RNA, 19 nt, Homo sapiens
  misc_RNA (1)...(19): siRNA sense strand
ggagcugcuuccaauuugc

SEQ ID NO: 193889 - RNA, 19 nt, Homo sapiens
  misc_RNA (1)...(19): siRNA sense strand
uuagcugaccugaauaaug

SEQ ID NO: 193890 - RNA, 19 nt, Homo sapiens
  misc_RNA (1)...(19): siRNA sense strand
guggcaaguucaacaggau

SEQ ID NO: 193891 - RNA, 19 nt, Homo sapiens
  misc_RNA (1)...(19): siRNA sense strand
acaacaauuuggucaacgu

SEQ ID NO: 193892 - RNA, 19 nt, Homo sapiens
  misc_RNA (1)...(19): siRNA sense strand
gacuacaucaggagaagau

SEQ ID NO: 193893 - RNA, 19 nt, Homo sapiens
  misc_RNA (1)...(19): siRNA sense strand
uaauaagccagagaucgaa

SEQ ID NO: 193894 - RNA, 19 nt, Homo sapiens
  misc_RNA (1)...(19): siRNA sense strand
ugucagauucucagcuuau

SEQ ID NO: 193895 - RNA, 19 nt, Homo sapiens
  misc_RNA (1)...(19): siRNA sense strand
ggauauccugcagauuauu

SEQ ID NO: 193896 - RNA, 19 nt, Homo sapiens
  misc_RNA (1)...(19): siRNA sense strand
agcaucaggccaaauguaa

SEQ ID NO: 193897 - RNA, 19 nt, Homo sapiens
  misc_RNA (1)...(19): siRNA sense strand
gcccuuugcuuggaucucu

SEQ ID NO: 193898 - RNA, 19 nt, Homo sapiens
  misc_RNA (1)...(19): siRNA sense strand
gcugaauguuuaugauacg

SEQ ID NO: 193899 - RNA, 19 nt, Homo sapiens
  misc_RNA (1)...(19): siRNA sense strand
agacuuugccaagguacua

SEQ ID NO: 193900 - RNA, 19 nt, Homo sapiens
  misc_RNA (1)...(19): siRNA sense strand
caagcaaguggcaaguuca

SEQ ID NO: 193901 - RNA, 19 nt, Homo sapiens
  misc_RNA (1)...(19): siRNA sense strand
agacaaguacagauaccuu

SEQ ID NO: 193902 - RNA, 19 nt, Homo sapiens
  misc_RNA (1)...(19): siRNA sense strand
gcaucauuucccuguguaa

SEQ ID NO: 193903 - RNA, 19 nt, Homo sapiens
  misc_RNA (1)...(19): siRNA sense strand
cugcaaagaguguccaauc

SEQ ID NO: 193904 - RNA, 19 nt, Homo sapiens
  misc_RNA (1)...(19): siRNA sense strand
cuuauaggacugccaugaa

SEQ ID NO: 193905 - RNA, 19 nt, Homo sapiens
  misc_RNA (1)...(19): siRNA sense strand
caaagaguguccaaucauu

SEQ ID NO: 193906 - RNA, 19 nt, Homo sapiens
  misc_RNA (1)...(19): siRNA sense strand
uagcugaccugaauaaugu

SEQ ID NO: 193907 - RNA, 19 nt, Homo sapiens
  misc_RNA (1)...(19): siRNA sense strand
gcaugauucuauccaaauu

SEQ ID NO: 193908 - RNA, 19 nt, Homo sapiens
  misc_RNA (1)...(19): siRNA sense strand
ugaacuggcugcugaaugu

SEQ ID NO: 193909 - RNA, 19 nt, Homo sapiens
  misc_RNA (1)...(19): siRNA sense strand
gauauccugcagauuauua

SEQ ID NO: 193910 - RNA, 19 nt, Homo sapiens
  misc_RNA (1)...(19): siRNA sense strand
gagaagauguucgagacuu

SEQ ID NO: 193911 - RNA, 19 nt, Homo sapiens
  misc_RNA (1)...(19): siRNA sense strand
gcacuuuaauuaugacauc

SEQ ID NO: 193912 - RNA, 19 nt, Homo sapiens
  misc_RNA (1)...(19): siRNA sense strand
guaaagcacauuuggaaga

SEQ ID NO: 193913 - RNA, 19 nt, Homo sapiens
  misc_RNA (1)...(19): siRNA sense strand
gaauauugcacuccgacua

SEQ ID NO: 193914 - RNA, 19 nt, Homo sapiens
  misc_RNA (1)...(19): siRNA sense strand
uuauaggacugccaugaaa

SEQ ID NO: 193915 - RNA, 19 nt, Homo sapiens
  misc_RNA (1)...(19): siRNA sense strand
gggugaaguugcauccuuu

SEQ ID NO: 193916 - RNA, 19 nt, Homo sapiens
  misc_RNA (1)...(19): siRNA sense strand
gcaagagcacaacaauuug

SEQ ID NO: 193917 - RNA, 19 nt, Homo sapiens
  misc_RNA (1)...(19): siRNA sense strand
gcacaacaauuuggucaac

SEQ ID NO: 193918 - RNA, 19 nt, Homo sapiens
  misc_RNA (1)...(19): siRNA sense strand
agcaagagcacaacaauuu

SEQ ID NO: 193919 - RNA, 19 nt, Homo sapiens
  misc_RNA (1)...(19): siRNA sense strand
agaagauguucgagacuuu

SEQ ID NO: 193920 - RNA, 19 nt, Homo sapiens
  misc_RNA (1)...(19): siRNA sense strand
gagcaagagcacaacaauu

SEQ ID NO: 193921 - RNA, 19 nt, Homo sapiens
  misc_RNA (1)...(19): siRNA sense strand
ucaagcaaguggcaaguuc

SEQ ID NO: 193922 - RNA, 19 nt, Homo sapiens
  misc_RNA (1)...(19): siRNA sense strand
ccacgagacucaaacaacu

SEQ ID NO: 193923 - RNA, 19 nt, Homo sapiens
  misc_RNA (1)...(19): siRNA sense strand
cagcacaaccucaagcaaa

SEQ ID NO: 193924 - RNA, 19 nt, Homo sapiens
  misc_RNA (1)...(19): siRNA sense strand
gcaaagaguguccaaucau

SEQ ID NO: 193925 - RNA, 19 nt, Homo sapiens
  misc_RNA (1)...(19): siRNA sense strand
auggauauccugcagauua

SEQ ID NO: 193926 - RNA, 19 nt, Homo sapiens
  misc_RNA (1)...(19): siRNA sense strand
uguaacaucugcaaagagu

SEQ ID NO: 193927 - RNA, 19 nt, Homo sapiens
  misc_RNA (1)...(19): siRNA sense strand
guccggagcugcuuccaau

SEQ ID NO: 193928 - RNA, 19 nt, Homo sapiens
  misc_RNA (1)...(19): siRNA sense strand
gcaaguggcaaguucaaca

SEQ ID NO: 193929 - RNA, 19 nt, Homo sapiens
  misc_RNA (1)...(19): siRNA sense strand
gcuuccaauuugcuaauaa

SEQ ID NO: 193930 - RNA, 19 nt, Homo sapiens
  misc_RNA (1)...(19): siRNA sense strand
uggaagacaaguacagaua

SEQ ID NO: 193931 - RNA, 19 nt, Homo sapiens
  misc_RNA (1)...(19): siRNA sense strand
ggauccguguccugucuuu

SEQ ID NO: 193932 - RNA, 19 nt, Homo sapiens
  misc_RNA (1)...(19): siRNA sense strand
gucuuuagcugaccugaau

SEQ ID NO: 193933 - RNA, 19 nt, Homo sapiens
  misc_RNA (1)...(19): siRNA sense strand
gacaaguacagauaccuuu

SEQ ID NO: 193934 - RNA, 19 nt, Homo sapiens
  misc_RNA (1)...(19): siRNA sense strand
ccaagcaucaggccaaaug

SEQ ID NO: 193935 - RNA, 19 nt, Homo sapiens
  misc_RNA (1)...(19): siRNA sense strand
ggagcaagagcacaacaau

SEQ ID NO: 193936 - RNA, 19 nt, Homo sapiens
  misc_RNA (1)...(19): siRNA sense strand
guguaaagcacauuuggaa

SEQ ID NO: 193937 - RNA, 19 nt, Homo sapiens
  misc_RNA (1)...(19): siRNA sense strand
caagacaguugggugaagu

SEQ ID NO: 193938 - RNA, 19 nt, Homo sapiens
  misc_RNA (1)...(19): siRNA sense strand
gaagauguucgagacuuug

SEQ ID NO: 193939 - RNA, 19 nt, Homo sapiens
  misc_RNA (1)...(19): siRNA sense strand
gucagauucucagcuuaua

SEQ ID NO: 193940 - RNA, 19 nt, Homo sapiens
  misc_RNA (1)...(19): siRNA sense strand
uaacaucugcaaagagugu

SEQ ID NO: 193941 - RNA, 19 nt, Homo sapiens
  misc_RNA (1)...(19): siRNA sense strand
cggagcugcuuccaauuug

SEQ ID NO: 193942 - RNA, 19 nt, Homo sapiens
  misc_RNA (1)...(19): siRNA sense strand
gaagacaaguacagauacc

SEQ ID NO: 193943 - RNA, 19 nt, Homo sapiens
  misc_RNA (1)...(19): siRNA sense strand
ccauggauauccugcagau

SEQ ID NO: 193944 - RNA, 19 nt, Homo sapiens
  misc_RNA (1)...(19): siRNA sense strand
ggcaucauuucccugugua

SEQ ID NO: 193945 - RNA, 19 nt, Homo sapiens
  misc_RNA (1)...(19): siRNA sense strand
uggauauccugcagauuau

SEQ ID NO: 193946 - RNA, 19 nt, Homo sapiens
  misc_RNA (1)...(19): siRNA sense strand
ggaagacaaguacagauac

SEQ ID NO: 193947 - RNA, 19 nt, Homo sapiens
  misc_RNA (1)...(19): siRNA sense strand
ugcaaagaguguccaauca

SEQ ID NO: 193948 - RNA, 19 nt, Homo sapiens
  misc_RNA (1)...(19): siRNA sense strand
guggauaugugucugaacu

SEQ ID NO: 193949 - RNA, 19 nt, Homo sapiens
  misc_RNA (1)...(19): siRNA sense strand
acuggcugcugaauguuua

SEQ ID NO: 193950 - RNA, 19 nt, Homo sapiens
  misc_RNA (1)...(19): siRNA sense strand
acuaucccaugguggaaua

SEQ ID NO: 193951 - RNA, 19 nt, Homo sapiens
  misc_RNA (1)...(19): siRNA sense strand
ccggagcugcuuccaauuu

SEQ ID NO: 193952 - RNA, 19 nt, Homo sapiens
  misc_RNA (1)...(19): siRNA sense strand
ccaaauuccaagacaguug

SEQ ID NO: 193953 - RNA, 19 nt, Homo sapiens
  misc_RNA (1)...(19): siRNA sense strand
cagaaacugccaagcauca

SEQ ID NO: 193954 - RNA, 19 nt, Homo sapiens
  misc_RNA (1)...(19): siRNA sense strand
uaugacaucugccaaagcu

SEQ ID NO: 193955 - RNA, 19 nt, Homo sapiens
  misc_RNA (1)...(19): siRNA sense strand
aaugucagauucucagcuu

SEQ ID NO: 193956 - RNA, 19 nt, Homo sapiens
  misc_RNA (1)...(19): siRNA sense strand
ucgagacuuugccaaggua

SEQ ID NO: 193957 - RNA, 19 nt, Homo sapiens
  misc_RNA (1)...(19): siRNA sense strand
gcaaaaggccauaaaaugc

SEQ ID NO: 193958 - RNA, 19 nt, Homo sapiens
  misc_RNA (1)...(19): siRNA sense strand
cugcaugauucuauccaaa

SEQ ID NO: 193959 - RNA, 19 nt, Homo sapiens
  misc_RNA (1)...(19): siRNA sense strand
uaaagcacauuuggaagac

SEQ ID NO: 193960 - RNA, 19 nt, Homo sapiens
  misc_RNA (1)...(19): siRNA sense strand
acaggagucuaaagcacuu

SEQ ID NO: 193961 - RNA, 19 nt, Homo sapiens
  misc_RNA (1)...(19): siRNA sense strand
acagauaccuuuucaagca

SEQ ID NO: 193962 - RNA, 19 nt, Homo sapiens
  misc_RNA (1)...(19): siRNA sense strand
aagcacauuuggaagacaa

SEQ ID NO: 193963 - RNA, 19 nt, Homo sapiens
  misc_RNA (1)...(19): siRNA sense strand
gcuaauaauaagccagaga

SEQ ID NO: 193964 - RNA, 19 nt, Homo sapiens
  misc_RNA (1)...(19): siRNA sense strand
caagagcacaacaauuugg

SEQ ID NO: 193965 - RNA, 19 nt, Homo sapiens
  misc_RNA (1)...(19): siRNA sense strand
ccugucagcugcaugugau

SEQ ID NO: 193966 - RNA, 19 nt, Homo sapiens
  misc_RNA (1)...(19): siRNA sense strand
gcugcugaauguuuaugau

SEQ ID NO: 193967 - RNA, 19 nt, Homo sapiens
  misc_RNA (1)...(19): siRNA sense strand
acagagcucuaccagucuu

SEQ ID NO: 193968 - RNA, 19 nt, Homo sapiens
  misc_RNA (1)...(19): siRNA sense strand
acaguugggugaaguugca

SEQ ID NO: 193969 - RNA, 19 nt, Homo sapiens
  misc_RNA (1)...(19): siRNA sense strand
guuugaccacuauuuauga

SEQ ID NO: 193970 - RNA, 19 nt, Homo sapiens
  misc_RNA (1)...(19): siRNA sense strand
gcuuauaggacugccauga

SEQ ID NO: 193971 - RNA, 19 nt, Homo sapiens
  misc_RNA (1)...(19): siRNA sense strand
caucaggccaaauguaaca

SEQ ID NO: 193972 - RNA, 19 nt, Homo sapiens
  misc_RNA (1)...(19): siRNA sense strand
gauucuauccaaauuccaa

SEQ ID NO: 193973 - RNA, 19 nt, Homo sapiens
  misc_RNA (1)...(19): siRNA sense strand
ggcaaguucaacaggauuu

SEQ ID NO: 193974 - RNA, 19 nt, Homo sapiens
  misc_RNA (1)...(19): siRNA sense strand
gaacuggcugcugaauguu

SEQ ID NO: 193975 - RNA, 19 nt, Homo sapiens
  misc_RNA (1)...(19): siRNA sense strand
cugcugaauguuuaugaua

SEQ ID NO: 193976 - RNA, 19 nt, Homo sapiens
  misc_RNA (1)...(19): siRNA sense strand
aagcaucaggccaaaugua

SEQ ID NO: 193977 - RNA, 19 nt, Homo sapiens
  misc_RNA (1)...(19): siRNA sense strand
uggcaucauuucccugugu

SEQ ID NO: 193978 - RNA, 19 nt, Homo sapiens
  misc_RNA (1)...(19): siRNA sense strand
ccaugaaacuccgaagacu

SEQ ID NO: 193979 - RNA, 19 nt, Homo sapiens
  misc_RNA (1)...(19): siRNA sense strand
auaauaagccagagaucga

SEQ ID NO: 193980 - RNA, 19 nt, Homo sapiens
  misc_RNA (1)...(19): siRNA sense strand
cuaauaauaagccagagau

SEQ ID NO: 193981 - RNA, 19 nt, Homo sapiens
  misc_RNA (1)...(19): siRNA sense strand
ugggugaaguugcauccuu

SEQ ID NO: 193982 - RNA, 19 nt, Homo sapiens
  misc_RNA (1)...(19): siRNA sense strand
caucauuucccuguguaaa

SEQ ID NO: 193983 - RNA, 19 nt, Homo sapiens
  misc_RNA (1)...(19): siRNA sense strand
gcguggauaugugucugaa

SEQ ID NO: 193984 - RNA, 19 nt, Homo sapiens
  misc_RNA (1)...(19): siRNA sense strand
gcacuaucccaugguggaa

SEQ ID NO: 193985 - RNA, 19 nt, Homo sapiens
  misc_RNA (1)...(19): siRNA sense strand
gagccugucagcugcaugu

SEQ ID NO: 193986 - RNA, 19 nt, Homo sapiens
  misc_RNA (1)...(19): siRNA sense strand
guacagauaccuuuucaag

SEQ ID NO: 193987 - RNA, 19 nt, Homo sapiens
  misc_RNA (1)...(19): siRNA sense strand
gucccucucugcguggaua

SEQ ID NO: 193988 - RNA, 19 nt, Homo sapiens
  misc_RNA (1)...(19): siRNA sense strand
ggagcugcuuccaauuugc

SEQ ID NO: 193989 - RNA, 19 nt, Homo sapiens
  misc_RNA (1)...(19): siRNA sense strand
uuagcugaccugaauaaug

SEQ ID NO: 193990 - RNA, 19 nt, Homo sapiens
  misc_RNA (1)...(19): siRNA sense strand
guggcaaguucaacaggau

SEQ ID NO: 193991 - RNA, 19 nt, Homo sapiens
  misc_RNA (1)...(19): siRNA sense strand
acaacaauuuggucaacgu

SEQ ID NO: 193992 - RNA, 19 nt, Homo sapiens
  misc_RNA (1)...(19): siRNA sense strand
gacuacaucaggagaagau

SEQ ID NO: 193993 - RNA, 19 nt, Homo sapiens
  misc_RNA (1)...(19): siRNA sense strand
uaauaagccagagaucgaa

SEQ ID NO: 193994 - RNA, 19 nt, Homo sapiens
  misc_RNA (1)...(19): siRNA sense strand
ugucagauucucagcuuau

SEQ ID NO: 193995 - RNA, 19 nt, Homo sapiens
  misc_RNA (1)...(19): siRNA sense strand
ggauauccugcagauuauu

SEQ ID NO: 193996 - RNA, 19 nt, Homo sapiens
  misc_RNA (1)...(19): siRNA sense strand
agcaucaggccaaauguaa

SEQ ID NO: 193997 - RNA, 19 nt, Homo sapiens
  misc_RNA (1)...(19): siRNA sense strand
gcccuuugcuuggaucucu

SEQ ID NO: 193998 - RNA, 19 nt, Homo sapiens
  misc_RNA (1)...(19): siRNA sense strand
gcugaauguuuaugauacg

SEQ ID NO: 193999 - RNA, 19 nt, Homo sapiens
  misc_RNA (1)...(19): siRNA sense strand
agacuuugccaagguacua

SEQ ID NO: 194000 - RNA, 19 nt, Homo sapiens
  misc_RNA (1)...(19): siRNA sense strand
caagcaaguggcaaguuca

SEQ ID NO: 194001 - RNA, 19 nt, Homo sapiens
  misc_RNA (1)...(19): siRNA sense strand
agacaaguacagauaccuu

SEQ ID NO: 194002 - RNA, 19 nt, Homo sapiens
  misc_RNA (1)...(19): siRNA sense strand
gcaucauuucccuguguaa

SEQ ID NO: 194003 - RNA, 19 nt, Homo sapiens
  misc_RNA (1)...(19): siRNA sense strand
cugcaaagaguguccaauc

SEQ ID NO: 194004 - RNA, 19 nt, Homo sapiens
  misc_RNA (1)...(19): siRNA sense strand
cuuauaggacugccaugaa

SEQ ID NO: 194005 - RNA, 19 nt, Homo sapiens
  misc_RNA (1)...(19): siRNA sense strand
caaagaguguccaaucauu

SEQ ID NO: 194006 - RNA, 19 nt, Homo sapiens
  misc_RNA (1)...(19): siRNA sense strand
uagcugaccugaauaaugu

SEQ ID NO: 194007 - RNA, 19 nt, Homo sapiens
  misc_RNA (1)...(19): siRNA sense strand
gcaugauucuauccaaauu

SEQ ID NO: 194008 - RNA, 19 nt, Homo sapiens
  misc_RNA (1)...(19): siRNA sense strand
ugaacuggcugcugaaugu

SEQ ID NO: 194009 - RNA, 19 nt, Homo sapiens
  misc_RNA (1)...(19): siRNA sense strand
gauauccugcagauuauua

SEQ ID NO: 194010 - RNA, 19 nt, Homo sapiens
  misc_RNA (1)...(19): siRNA sense strand
gagaagauguucgagacuu

SEQ ID NO: 194011 - RNA, 19 nt, Homo sapiens
  misc_RNA (1)...(19): siRNA sense strand
gcacuuuaauuaugacauc

SEQ ID NO: 194012 - RNA, 19 nt, Homo sapiens
  misc_RNA (1)...(19): siRNA sense strand
guaaagcacauuuggaaga

SEQ ID NO: 194013 - RNA, 19 nt, Homo sapiens
  misc_RNA (1)...(19): siRNA sense strand
gaauauugcacuccgacua

SEQ ID NO: 194014 - RNA, 19 nt, Homo sapiens
  misc_RNA (1)...(19): siRNA sense strand
uuauaggacugccaugaaa

SEQ ID NO: 194015 - RNA, 19 nt, Homo sapiens
  misc_RNA (1)...(19): siRNA sense strand
gggugaaguugcauccuuu

SEQ ID NO: 194016 - RNA, 19 nt, Homo sapiens
  misc_RNA (1)...(19): siRNA sense strand
gcaagagcacaacaauuug

SEQ ID NO: 194017 - RNA, 19 nt, Homo sapiens
  misc_RNA (1)...(19): siRNA sense strand
gcacaacaauuuggucaac

SEQ ID NO: 194018 - RNA, 19 nt, Homo sapiens
  misc_RNA (1)...(19): siRNA sense strand
agcaagagcacaacaauuu

SEQ ID NO: 194019 - RNA, 19 nt, Homo sapiens
  misc_RNA (1)...(19): siRNA sense strand
agaagauguucgagacuuu

SEQ ID NO: 194020 - RNA, 19 nt, Homo sapiens
  misc_RNA (1)...(19): siRNA sense strand
gagcaagagcacaacaauu

SEQ ID NO: 194021 - RNA, 19 nt, Homo sapiens
  misc_RNA (1)...(19): siRNA sense strand
ucaagcaaguggcaaguuc

SEQ ID NO: 194022 - RNA, 19 nt, Homo sapiens
  misc_RNA (1)...(19): siRNA sense strand
ccacgagacucaaacaacu

SEQ ID NO: 194023 - RNA, 19 nt, Homo sapiens
  misc_RNA (1)...(19): siRNA sense strand
cagcacaaccucaagcaaa

SEQ ID NO: 194024 - RNA, 19 nt, Homo sapiens
  misc_RNA (1)...(19): siRNA sense strand
gcaaagaguguccaaucau

SEQ ID NO: 194025 - RNA, 19 nt, Homo sapiens
  misc_RNA (1)...(19): siRNA sense strand
auggauauccugcagauua

SEQ ID NO: 194026 - RNA, 19 nt, Homo sapiens
  misc_RNA (1)...(19): siRNA sense strand
uguaacaucugcaaagagu

SEQ ID NO: 194027 - RNA, 19 nt, Homo sapiens
  misc_RNA (1)...(19): siRNA sense strand
guccggagcugcuuccaau

SEQ ID NO: 194028 - RNA, 19 nt, Homo sapiens
  misc_RNA (1)...(19): siRNA sense strand
gcaaguggcaaguucaaca

SEQ ID NO: 194029 - RNA, 19 nt, Homo sapiens
  misc_RNA (1)...(19): siRNA sense strand
gcuuccaauuugcuaauaa

SEQ ID NO: 194030 - RNA, 19 nt, Homo sapiens
  misc_RNA (1)...(19): siRNA sense strand
uggaagacaaguacagaua

SEQ ID NO: 194031 - RNA, 19 nt, Homo sapiens
  misc_RNA (1)...(19): siRNA sense strand
ggauccguguccugucuuu

SEQ ID NO: 194032 - RNA, 19 nt, Homo sapiens
  misc_RNA (1)...(19): siRNA sense strand
gucuuuagcugaccugaau

SEQ ID NO: 194033 - RNA, 19 nt, Homo sapiens
  misc_RNA (1)...(19): siRNA sense strand
gacaaguacagauaccuuu

SEQ ID NO: 194034 - RNA, 19 nt, Homo sapiens
  misc_RNA (1)...(19): siRNA sense strand
ccaagcaucaggccaaaug

SEQ ID NO: 194035 - RNA, 19 nt, Homo sapiens
  misc_RNA (1)...(19): siRNA sense strand
ggagcaagagcacaacaau

SEQ ID NO: 194036 - RNA, 19 nt, Homo sapiens
  misc_RNA (1)...(19): siRNA sense strand
guguaaagcacauuuggaa

SEQ ID NO: 194037 - RNA, 19 nt, Homo sapiens
  misc_RNA (1)...(19): siRNA sense strand
caagacaguugggugaagu

SEQ ID NO: 194038 - RNA, 19 nt, Homo sapiens
  misc_RNA (1)...(19): siRNA sense strand
gaagauguucgagacuuug

SEQ ID NO: 194039 - RNA, 19 nt, Homo sapiens
  misc_RNA (1)...(19): siRNA sense strand
gucagauucucagcuuaua

SEQ ID NO: 194040 - RNA, 19 nt, Homo sapiens
  misc_RNA (1)...(19): siRNA sense strand
uaacaucugcaaagagugu

SEQ ID NO: 194041 - RNA, 19 nt, Homo sapiens
  misc_RNA (1)...(19): siRNA sense strand
cggagcugcuuccaauuug

SEQ ID NO: 194042 - RNA, 19 nt, Homo sapiens
  misc_RNA (1)...(19): siRNA sense strand
gaagacaaguacagauacc

SEQ ID NO: 194043 - RNA, 19 nt, Homo sapiens
  misc_RNA (1)...(19): siRNA sense strand
ccauggauauccugcagau

SEQ ID NO: 194044 - RNA, 19 nt, Homo sapiens
  misc_RNA (1)...(19): siRNA sense strand
ggcaucauuucccugugua

SEQ ID NO: 194045 - RNA, 19 nt, Homo sapiens
  misc_RNA (1)...(19): siRNA sense strand
uggauauccugcagauuau

SEQ ID NO: 194046 - RNA, 19 nt, Homo sapiens
  misc_RNA (1)...(19): siRNA sense strand
ggaagacaaguacagauac

SEQ ID NO: 194047 - RNA, 19 nt, Homo sapiens
  misc_RNA (1)...(19): siRNA sense strand
ugcaaagaguguccaauca

SEQ ID NO: 194048 - RNA, 19 nt, Homo sapiens
  misc_RNA (1)...(19): siRNA sense strand
guggauaugugucugaacu

SEQ ID NO: 194049 - RNA, 19 nt, Homo sapiens
  misc_RNA (1)...(19): siRNA sense strand
acuggcugcugaauguuua

SEQ ID NO: 194050 - RNA, 19 nt, Homo sapiens
  misc_RNA (1)...(19): siRNA sense strand
acuaucccaugguggaaua

SEQ ID NO: 194051 - RNA, 19 nt, Homo sapiens
  misc_RNA (1)...(19): siRNA sense strand
ccggagcugcuuccaauuu

SEQ ID NO: 194052 - RNA, 19 nt, Homo sapiens
  misc_RNA (1)...(19): siRNA sense strand
ccaaauuccaagacaguug

SEQ ID NO: 194053 - RNA, 19 nt, Homo sapiens
  misc_RNA (1)...(19): siRNA sense strand
cagaaacugccaagcauca

SEQ ID NO: 194054 - RNA, 19 nt, Homo sapiens
  misc_RNA (1)...(19): siRNA sense strand
uaugacaucugccaaagcu

SEQ ID NO: 194055 - RNA, 19 nt, Homo sapiens
  misc_RNA (1)...(19): siRNA sense strand
aaugucagauucucagcuu

SEQ ID NO: 194056 - RNA, 19 nt, Homo sapiens
  misc_RNA (1)...(19): siRNA sense strand
ucgagacuuugccaaggua

SEQ ID NO: 194057 - RNA, 19 nt, Homo sapiens
  misc_RNA (1)...(19): siRNA sense strand
gcaaaaggccauaaaaugc

SEQ ID NO: 194058 - RNA, 19 nt, Homo sapiens
  misc_RNA (1)...(19): siRNA sense strand
cugcaugauucuauccaaa

SEQ ID NO: 194059 - RNA, 19 nt, Homo sapiens
  misc_RNA (1)...(19): siRNA sense strand
uaaagcacauuuggaagac

SEQ ID NO: 194060 - RNA, 19 nt, Homo sapiens
  misc_RNA (1)...(19): siRNA sense strand
acaggagucuaaagcacuu

SEQ ID NO: 194061 - RNA, 19 nt, Homo sapiens
  misc_RNA (1)...(19): siRNA sense strand
acagauaccuuuucaagca

SEQ ID NO: 194062 - RNA, 19 nt, Homo sapiens
  misc_RNA (1)...(19): siRNA sense strand
aagcacauuuggaagacaa

SEQ ID NO: 194063 - RNA, 19 nt, Homo sapiens
  misc_RNA (1)...(19): siRNA sense strand
gcuaauaauaagccagaga

SEQ ID NO: 194064 - RNA, 19 nt, Homo sapiens
  misc_RNA (1)...(19): siRNA sense strand
caagagcacaacaauuugg

SEQ ID NO: 194065 - RNA, 19 nt, Homo sapiens
  misc_RNA (1)...(19): siRNA sense strand
ccugucagcugcaugugau

SEQ ID NO: 194066 - RNA, 19 nt, Homo sapiens
  misc_RNA (1)...(19): siRNA sense strand
gcugcugaauguuuaugau

SEQ ID NO: 194067 - RNA, 19 nt, Homo sapiens
  misc_RNA (1)...(19): siRNA sense strand
acagagcucuaccagucuu

SEQ ID NO: 194068 - RNA, 19 nt, Homo sapiens
  misc_RNA (1)...(19): siRNA sense strand
acaguugggugaaguugca

SEQ ID NO: 194069 - RNA, 19 nt, Homo sapiens
  misc_RNA (1)...(19): siRNA sense strand
guuugaccacuauuuauga

SEQ ID NO: 194070 - RNA, 19 nt, Homo sapiens
  misc_RNA (1)...(19): siRNA sense strand
gcuuauaggacugccauga

SEQ ID NO: 194071 - RNA, 19 nt, Homo sapiens
  misc_RNA (1)...(19): siRNA sense strand
caucaggccaaauguaaca

SEQ ID NO: 194072 - RNA, 19 nt, Homo sapiens
  misc_RNA (1)...(19): siRNA sense strand
gauucuauccaaauuccaa

SEQ ID NO: 194073 - RNA, 19 nt, Homo sapiens
  misc_RNA (1)...(19): siRNA sense strand
ggcaaguucaacaggauuu

SEQ ID NO: 194074 - RNA, 19 nt, Homo sapiens
  misc_RNA (1)...(19): siRNA sense strand
gaacuggcugcugaauguu

SEQ ID NO: 194075 - RNA, 19 nt, Homo sapiens
  misc_RNA (1)...(19): siRNA sense strand
cugcugaauguuuaugaua

SEQ ID NO: 194076 - RNA, 19 nt, Homo sapiens
  misc_RNA (1)...(19): siRNA sense strand
aagcaucaggccaaaugua

SEQ ID NO: 194077 - RNA, 19 nt, Homo sapiens
  misc_RNA (1)...(19): siRNA sense strand
uggcaucauuucccugugu

SEQ ID NO: 194078 - RNA, 19 nt, Homo sapiens
  misc_RNA (1)...(19): siRNA sense strand
ccaugaaacuccgaagacu

SEQ ID NO: 194079 - RNA, 19 nt, Homo sapiens
  misc_RNA (1)...(19): siRNA sense strand
auaauaagccagagaucga

SEQ ID NO: 194080 - RNA, 19 nt, Homo sapiens
  misc_RNA (1)...(19): siRNA sense strand
cuaauaauaagccagagau

SEQ ID NO: 194081 - RNA, 19 nt, Homo sapiens
  misc_RNA (1)...(19): siRNA sense strand
ugggugaaguugcauccuu

SEQ ID NO: 194082 - RNA, 19 nt, Homo sapiens
  misc_RNA (1)...(19): siRNA sense strand
caucauuucccuguguaaa

SEQ ID NO: 194083 - RNA, 19 nt, Homo sapiens
  misc_RNA (1)...(19): siRNA sense strand
gcguggauaugugucugaa

SEQ ID NO: 194084 - RNA, 19 nt, Homo sapiens
  misc_RNA (1)...(19): siRNA sense strand
gcacuaucccaugguggaa

SEQ ID NO: 194085 - RNA, 19 nt, Homo sapiens
  misc_RNA (1)...(19): siRNA sense strand
gagccugucagcugcaugu

SEQ ID NO: 194086 - RNA, 19 nt, Homo sapiens
  misc_RNA (1)...(19): siRNA sense strand
guacagauaccuuuucaag

SEQ ID NO: 194087 - RNA, 19 nt, Homo sapiens
  misc_RNA (1)...(19): siRNA sense strand
gucccucucugcguggaua

SEQ ID NO: 194088 - RNA, 19 nt, Homo sapiens
  misc_RNA (1)...(19): siRNA sense strand
ggagcugcuuccaauuugc

SEQ ID NO: 194089 - RNA, 19 nt, Homo sapiens
  misc_RNA (1)...(19): siRNA sense strand
uuagcugaccugaauaaug

SEQ ID NO: 194090 - RNA, 19 nt, Homo sapiens
  misc_RNA (1)...(19): siRNA sense strand
guggcaaguucaacaggau

SEQ ID NO: 194091 - RNA, 19 nt, Homo sapiens
  misc_RNA (1)...(19): siRNA sense strand
acaacaauuuggucaacgu

SEQ ID NO: 194092 - RNA, 19 nt, Homo sapiens
  misc_RNA (1)...(19): siRNA sense strand
gacuacaucaggagaagau

SEQ ID NO: 194093 - RNA, 19 nt, Homo sapiens
  misc_RNA (1)...(19): siRNA sense strand
uaauaagccagagaucgaa

SEQ ID NO: 194094 - RNA, 19 nt, Homo sapiens
  misc_RNA (1)...(19): siRNA sense strand
ugucagauucucagcuuau

SEQ ID NO: 194095 - RNA, 19 nt, Homo sapiens
  misc_RNA (1)...(19): siRNA sense strand
ggauauccugcagauuauu

SEQ ID NO: 194096 - RNA, 19 nt, Homo sapiens
  misc_RNA (1)...(19): siRNA sense strand
agcaucaggccaaauguaa

SEQ ID NO: 194097 - RNA, 19 nt, Homo sapiens
  misc_RNA (1)...(19): siRNA sense strand
gcccuuugcuuggaucucu

SEQ ID NO: 194098 - RNA, 19 nt, Homo sapiens
  misc_RNA (1)...(19): siRNA sense strand
gcugaauguuuaugauacg

SEQ ID NO: 194099 - RNA, 19 nt, Homo sapiens
  misc_RNA (1)...(19): siRNA sense strand
agacuuugccaagguacua

SEQ ID NO: 194100 - RNA, 19 nt, Homo sapiens
  misc_RNA (1)...(19): siRNA sense strand
caagcaaguggcaaguuca

SEQ ID NO: 194101 - RNA, 19 nt, Homo sapiens
  misc_RNA (1)...(19): siRNA sense strand
agacaaguacagauaccuu

SEQ ID NO: 194102 - RNA, 19 nt, Homo sapiens
  misc_RNA (1)...(19): siRNA sense strand
gcaucauuucccuguguaa

SEQ ID NO: 194103 - RNA, 19 nt, Homo sapiens
  misc_RNA (1)...(19): siRNA sense strand
cugcaaagaguguccaauc

SEQ ID NO: 194104 - RNA, 19 nt, Homo sapiens
  misc_RNA (1)...(19): siRNA sense strand
cuuauaggacugccaugaa

SEQ ID NO: 194105 - RNA, 19 nt, Homo sapiens
  misc_RNA (1)...(19): siRNA sense strand
caaagaguguccaaucauu

SEQ ID NO: 194106 - RNA, 19 nt, Homo sapiens
  misc_RNA (1)...(19): siRNA sense strand
uagcugaccugaauaaugu

SEQ ID NO: 194107 - RNA, 19 nt, Homo sapiens
  misc_RNA (1)...(19): siRNA sense strand
gcaugauucuauccaaauu

SEQ ID NO: 194108 - RNA, 19 nt, Homo sapiens
  misc_RNA (1)...(19): siRNA sense strand
ugaacuggcugcugaaugu

SEQ ID NO: 194109 - RNA, 19 nt, Homo sapiens
  misc_RNA (1)...(19): siRNA sense strand
gauauccugcagauuauua

SEQ ID NO: 194110 - RNA, 19 nt, Homo sapiens
  misc_RNA (1)...(19): siRNA sense strand
gagaagauguucgagacuu

SEQ ID NO: 194111 - RNA, 19 nt, Homo sapiens
  misc_RNA (1)...(19): siRNA sense strand
gcacuuuaauuaugacauc

SEQ ID NO: 194112 - RNA, 19 nt, Homo sapiens
  misc_RNA (1)...(19): siRNA sense strand
guaaagcacauuuggaaga

SEQ ID NO: 194113 - RNA, 19 nt, Homo sapiens
  misc_RNA (1)...(19): siRNA sense strand
gaauauugcacuccgacua

SEQ ID NO: 194114 - RNA, 19 nt, Homo sapiens
  misc_RNA (1)...(19): siRNA sense strand
uuauaggacugccaugaaa

SEQ ID NO: 194115 - RNA, 19 nt, Homo sapiens
  misc_RNA (1)...(19): siRNA sense strand
gggugaaguugcauccuuu

SEQ ID NO: 194116 - RNA, 19 nt, Homo sapiens
  misc_RNA (1)...(19): siRNA sense strand
gcaagagcacaacaauuug

SEQ ID NO: 194117 - RNA, 19 nt, Homo sapiens
  misc_RNA (1)...(19): siRNA sense strand
gcacaacaauuuggucaac

SEQ ID NO: 194118 - RNA, 19 nt, Homo sapiens
  misc_RNA (1)...(19): siRNA sense strand
agcaagagcacaacaauuu

SEQ ID NO: 194119 - RNA, 19 nt, Homo sapiens
  misc_RNA (1)...(19): siRNA sense strand
agaagauguucgagacuuu

SEQ ID NO: 194120 - RNA, 19 nt, Homo sapiens
  misc_RNA (1)...(19): siRNA sense strand
gagcaagagcacaacaauu

SEQ ID NO: 194121 - RNA, 19 nt, Homo sapiens
  misc_RNA (1)...(19): siRNA sense strand
ucaagcaaguggcaaguuc

SEQ ID NO: 194122 - RNA, 19 nt, Homo sapiens
  misc_RNA (1)...(19): siRNA sense strand
ccacgagacucaaacaacu

SEQ ID NO: 194123 - RNA, 19 nt, Homo sapiens
  misc_RNA (1)...(19): siRNA sense strand
cagcacaaccucaagcaaa

SEQ ID NO: 194124 - RNA, 19 nt, Homo sapiens
  misc_RNA (1)...(19): siRNA sense strand
gcaaagaguguccaaucau

SEQ ID NO: 194125 - RNA, 19 nt, Homo sapiens
  misc_RNA (1)...(19): siRNA sense strand
auggauauccugcagauua

SEQ ID NO: 194126 - RNA, 19 nt, Homo sapiens
  misc_RNA (1)...(19): siRNA sense strand
uguaacaucugcaaagagu

SEQ ID NO: 194127 - RNA, 19 nt, Homo sapiens
  misc_RNA (1)...(19): siRNA sense strand
guccggagcugcuuccaau

SEQ ID NO: 194128 - RNA, 19 nt, Homo sapiens
  misc_RNA (1)...(19): siRNA sense strand
gcaaguggcaaguucaaca

SEQ ID NO: 194129 - RNA, 19 nt, Homo sapiens
  misc_RNA (1)...(19): siRNA sense strand
gcuuccaauuugcuaauaa

SEQ ID NO: 194130 - RNA, 19 nt, Homo sapiens
  misc_RNA (1)...(19): siRNA sense strand
uggaagacaaguacagaua

SEQ ID NO: 194131 - RNA, 19 nt, Homo sapiens
  misc_RNA (1)...(19): siRNA sense strand
ggauccguguccugucuuu

SEQ ID NO: 194132 - RNA, 19 nt, Homo sapiens
  misc_RNA (1)...(19): siRNA sense strand
gucuuuagcugaccugaau

SEQ ID NO: 194133 - RNA, 19 nt, Homo sapiens
  misc_RNA (1)...(19): siRNA sense strand
gacaaguacagauaccuuu

SEQ ID NO: 194134 - RNA, 19 nt, Homo sapiens
  misc_RNA (1)...(19): siRNA sense strand
ccaagcaucaggccaaaug

SEQ ID NO: 194135 - RNA, 19 nt, Homo sapiens
  misc_RNA (1)...(19): siRNA sense strand
ggagcaagagcacaacaau

SEQ ID NO: 194136 - RNA, 19 nt, Homo sapiens
  misc_RNA (1)...(19): siRNA sense strand
guguaaagcacauuuggaa

SEQ ID NO: 194137 - RNA, 19 nt, Homo sapiens
  misc_RNA (1)...(19): siRNA sense strand
caagacaguugggugaagu

SEQ ID NO: 194138 - RNA, 19 nt, Homo sapiens
  misc_RNA (1)...(19): siRNA sense strand
gaagauguucgagacuuug

SEQ ID NO: 194139 - RNA, 19 nt, Homo sapiens
  misc_RNA (1)...(19): siRNA sense strand
gucagauucucagcuuaua

SEQ ID NO: 194140 - RNA, 19 nt, Homo sapiens
  misc_RNA (1)...(19): siRNA sense strand
uaacaucugcaaagagugu

SEQ ID NO: 194141 - RNA, 19 nt, Homo sapiens
  misc_RNA (1)...(19): siRNA sense strand
cggagcugcuuccaauuug

SEQ ID NO: 194142 - RNA, 19 nt, Homo sapiens
  misc_RNA (1)...(19): siRNA sense strand
gaagacaaguacagauacc

SEQ ID NO: 194143 - RNA, 19 nt, Homo sapiens
  misc_RNA (1)...(19): siRNA sense strand
ccauggauauccugcagau

SEQ ID NO: 194144 - RNA, 19 nt, Homo sapiens
  misc_RNA (1)...(19): siRNA sense strand
ggcaucauuucccugugua

SEQ ID NO: 194145 - RNA, 19 nt, Homo sapiens
  misc_RNA (1)...(19): siRNA sense strand
uggauauccugcagauuau

SEQ ID NO: 194146 - RNA, 19 nt, Homo sapiens
  misc_RNA (1)...(19): siRNA sense strand
ggaagacaaguacagauac

SEQ ID NO: 194147 - RNA, 19 nt, Homo sapiens
  misc_RNA (1)...(19): siRNA sense strand
ugcaaagaguguccaauca

SEQ ID NO: 194148 - RNA, 19 nt, Homo sapiens
  misc_RNA (1)...(19): siRNA sense strand
guggauaugugucugaacu

SEQ ID NO: 194149 - RNA, 19 nt, Homo sapiens
  misc_RNA (1)...(19): siRNA sense strand
acuggcugcugaauguuua

SEQ ID NO: 194150 - RNA, 19 nt, Homo sapiens
  misc_RNA (1)...(19): siRNA sense strand
acuaucccaugguggaaua

SEQ ID NO: 194151 - RNA, 19 nt, Homo sapiens
  misc_RNA (1)...(19): siRNA sense strand
ccggagcugcuuccaauuu

SEQ ID NO: 194152 - RNA, 19 nt, Homo sapiens
  misc_RNA (1)...(19): siRNA sense strand
ccaaauuccaagacaguug

SEQ ID NO: 194153 - RNA, 19 nt, Homo sapiens
  misc_RNA (1)...(19): siRNA sense strand
cagaaacugccaagcauca

SEQ ID NO: 194154 - RNA, 19 nt, Homo sapiens
  misc_RNA (1)...(19): siRNA sense strand
uaugacaucugccaaagcu

SEQ ID NO: 194155 - RNA, 19 nt, Homo sapiens
  misc_RNA (1)...(19): siRNA sense strand
aaugucagauucucagcuu

SEQ ID NO: 194156 - RNA, 19 nt, Homo sapiens
  misc_RNA (1)...(19): siRNA sense strand
ucgagacuuugccaaggua

SEQ ID NO: 194157 - RNA, 19 nt, Homo sapiens
  misc_RNA (1)...(19): siRNA sense strand
gcaaaaggccauaaaaugc

SEQ ID NO: 194158 - RNA, 19 nt, Homo sapiens
  misc_RNA (1)...(19): siRNA sense strand
cugcaugauucuauccaaa

SEQ ID NO: 194159 - RNA, 19 nt, Homo sapiens
  misc_RNA (1)...(19): siRNA sense strand
uaaagcacauuuggaagac

SEQ ID NO: 194160 - RNA, 19 nt, Homo sapiens
  misc_RNA (1)...(19): siRNA sense strand
acaggagucuaaagcacuu

SEQ ID NO: 194161 - RNA, 19 nt, Homo sapiens
  misc_RNA (1)...(19): siRNA sense strand
acagauaccuuuucaagca

SEQ ID NO: 194162 - RNA, 19 nt, Homo sapiens
  misc_RNA (1)...(19): siRNA sense strand
aagcacauuuggaagacaa

SEQ ID NO: 194163 - RNA, 19 nt, Homo sapiens
  misc_RNA (1)...(19): siRNA sense strand
gcuaauaauaagccagaga

SEQ ID NO: 194164 - RNA, 19 nt, Homo sapiens
  misc_RNA (1)...(19): siRNA sense strand
caagagcacaacaauuugg

SEQ ID NO: 194165 - RNA, 19 nt, Homo sapiens
  misc_RNA (1)...(19): siRNA sense strand
ccugucagcugcaugugau

SEQ ID NO: 194166 - RNA, 19 nt, Homo sapiens
  misc_RNA (1)...(19): siRNA sense strand
gcugcugaauguuuaugau

SEQ ID NO: 194167 - RNA, 19 nt, Homo sapiens
  misc_RNA (1)...(19): siRNA sense strand
acagagcucuaccagucuu

SEQ ID NO: 194168 - RNA, 19 nt, Homo sapiens
  misc_RNA (1)...(19): siRNA sense strand
acaguugggugaaguugca

SEQ ID NO: 194169 - RNA, 19 nt, Homo sapiens
  misc_RNA (1)...(19): siRNA sense strand
guuugaccacuauuuauga

SEQ ID NO: 194170 - RNA, 19 nt, Homo sapiens
  misc_RNA (1)...(19): siRNA sense strand
gcuuauaggacugccauga

SEQ ID NO: 194171 - RNA, 19 nt, Homo sapiens
  misc_RNA (1)...(19): siRNA sense strand
caucaggccaaauguaaca

SEQ ID NO: 194172 - RNA, 19 nt, Homo sapiens
  misc_RNA (1)...(19): siRNA sense strand
gauucuauccaaauuccaa

SEQ ID NO: 194173 - RNA, 19 nt, Homo sapiens
  misc_RNA (1)...(19): siRNA sense strand
ggcaaguucaacaggauuu

SEQ ID NO: 194174 - RNA, 19 nt, Homo sapiens
  misc_RNA (1)...(19): siRNA sense strand
gaacuggcugcugaauguu

SEQ ID NO: 194175 - RNA, 19 nt, Homo sapiens
  misc_RNA (1)...(19): siRNA sense strand
cugcugaauguuuaugaua

SEQ ID NO: 194176 - RNA, 19 nt, Homo sapiens
  misc_RNA (1)...(19): siRNA sense strand
aagcaucaggccaaaugua

SEQ ID NO: 194177 - RNA, 19 nt, Homo sapiens
  misc_RNA (1)...(19): siRNA sense strand
uggcaucauuucccugugu

SEQ ID NO: 194178 - RNA, 19 nt, Homo sapiens
  misc_RNA (1)...(19): siRNA sense strand
ccaugaaacuccgaagacu

SEQ ID NO: 194179 - RNA, 19 nt, Homo sapiens
  misc_RNA (1)...(19): siRNA sense strand
auaauaagccagagaucga

SEQ ID NO: 194180 - RNA, 19 nt, Homo sapiens
  misc_RNA (1)...(19): siRNA sense strand
cuaauaauaagccagagau

SEQ ID NO: 194181 - RNA, 19 nt, Homo sapiens
  misc_RNA (1)...(19): siRNA sense strand
ugggugaaguugcauccuu

SEQ ID NO: 194182 - RNA, 19 nt, Homo sapiens
  misc_RNA (1)...(19): siRNA sense strand
caucauuucccuguguaaa

SEQ ID NO: 194183 - RNA, 19 nt, Homo sapiens
  misc_RNA (1)...(19): siRNA sense strand
gcguggauaugugucugaa

SEQ ID NO: 194184 - RNA, 19 nt, Homo sapiens
  misc_RNA (1)...(19): siRNA sense strand
gcacuaucccaugguggaa

SEQ ID NO: 194185 - RNA, 19 nt, Homo sapiens
  misc_RNA (1)...(19): siRNA sense strand
gagccugucagcugcaugu

SEQ ID NO: 194186 - RNA, 19 nt, Homo sapiens
  misc_RNA (1)...(19): siRNA sense strand
guacagauaccuuuucaag

SEQ ID NO: 194187 - RNA, 19 nt, Homo sapiens
  misc_RNA (1)...(19): siRNA sense strand
gucccucucugcguggaua

SEQ ID NO: 194188 - RNA, 19 nt, Homo sapiens
  misc_RNA (1)...(19): siRNA sense strand
ggagcugcuuccaauuugc

SEQ ID NO: 194189 - RNA, 19 nt, Homo sapiens
  misc_RNA (1)...(19): siRNA sense strand
uuagcugaccugaauaaug

SEQ ID NO: 194190 - RNA, 19 nt, Homo sapiens
  misc_RNA (1)...(19): siRNA sense strand
guggcaaguucaacaggau

SEQ ID NO: 194191 - RNA, 19 nt, Homo sapiens
  misc_RNA (1)...(19): siRNA sense strand
acaacaauuuggucaacgu

SEQ ID NO: 194192 - RNA, 19 nt, Homo sapiens
  misc_RNA (1)...(19): siRNA sense strand
gacuacaucaggagaagau

SEQ ID NO: 194193 - RNA, 19 nt, Homo sapiens
  misc_RNA (1)...(19): siRNA sense strand
uaauaagccagagaucgaa

SEQ ID NO: 194194 - RNA, 19 nt, Homo sapiens
  misc_RNA (1)...(19): siRNA sense strand
ugucagauucucagcuuau

SEQ ID NO: 194195 - RNA, 19 nt, Homo sapiens
  misc_RNA (1)...(19): siRNA sense strand
ggauauccugcagauuauu

SEQ ID NO: 194196 - RNA, 19 nt, Homo sapiens
  misc_RNA (1)...(19): siRNA sense strand
agcaucaggccaaauguaa

SEQ ID NO: 194197 - RNA, 19 nt, Homo sapiens
  misc_RNA (1)...(19): siRNA sense strand
gcccuuugcuuggaucucu

SEQ ID NO: 194198 - RNA, 19 nt, Homo sapiens
  misc_RNA (1)...(19): siRNA sense strand
gcugaauguuuaugauacg

SEQ ID NO: 194199 - RNA, 19 nt, Homo sapiens
  misc_RNA (1)...(19): siRNA sense strand
agacuuugccaagguacua

SEQ ID NO: 194200 - RNA, 19 nt, Homo sapiens
  misc_RNA (1)...(19): siRNA sense strand
caagcaaguggcaaguuca

SEQ ID NO: 194201 - RNA, 19 nt, Homo sapiens
  misc_RNA (1)...(19): siRNA sense strand
agacaaguacagauaccuu

SEQ ID NO: 194202 - RNA, 19 nt, Homo sapiens
  misc_RNA (1)...(19): siRNA sense strand
gcaucauuucccuguguaa

SEQ ID NO: 194203 - RNA, 19 nt, Homo sapiens
  misc_RNA (1)...(19): siRNA sense strand
cugcaaagaguguccaauc

SEQ ID NO: 194204 - RNA, 19 nt, Homo sapiens
  misc_RNA (1)...(19): siRNA sense strand
cuuauaggacugccaugaa

SEQ ID NO: 194205 - RNA, 19 nt, Homo sapiens
  misc_RNA (1)...(19): siRNA sense strand
caaagaguguccaaucauu

SEQ ID NO: 194206 - RNA, 19 nt, Homo sapiens
  misc_RNA (1)...(19): siRNA sense strand
uagcugaccugaauaaugu

SEQ ID NO: 194207 - RNA, 19 nt, Homo sapiens
  misc_RNA (1)...(19): siRNA sense strand
gcaugauucuauccaaauu

SEQ ID NO: 194208 - RNA, 19 nt, Homo sapiens
  misc_RNA (1)...(19): siRNA sense strand
ugaacuggcugcugaaugu

SEQ ID NO: 194209 - RNA, 19 nt, Homo sapiens
  misc_RNA (1)...(19): siRNA sense strand
gauauccugcagauuauua

SEQ ID NO: 194210 - RNA, 19 nt, Homo sapiens
  misc_RNA (1)...(19): siRNA sense strand
gagaagauguucgagacuu

SEQ ID NO: 194211 - RNA, 19 nt, Homo sapiens
  misc_RNA (1)...(19): siRNA sense strand
gcacuuuaauuaugacauc

SEQ ID NO: 194212 - RNA, 19 nt, Homo sapiens
  misc_RNA (1)...(19): siRNA sense strand
guaaagcacauuuggaaga

SEQ ID NO: 194213 - RNA, 19 nt, Homo sapiens
  misc_RNA (1)...(19): siRNA sense strand
gaauauugcacuccgacua

SEQ ID NO: 194214 - RNA, 19 nt, Homo sapiens
  misc_RNA (1)...(19): siRNA sense strand
uuauaggacugccaugaaa

SEQ ID NO: 194215 - RNA, 19 nt, Homo sapiens
  misc_RNA (1)...(19): siRNA sense strand
gggugaaguugcauccuuu

SEQ ID NO: 194216 - RNA, 19 nt, Homo sapiens
  misc_RNA (1)...(19): siRNA sense strand
gcaagagcacaacaauuug

SEQ ID NO: 194217 - RNA, 19 nt, Homo sapiens
  misc_RNA (1)...(19): siRNA sense strand
gcacaacaauuuggucaac

SEQ ID NO: 194218 - RNA, 19 nt, Homo sapiens
  misc_RNA (1)...(19): siRNA sense strand
agcaagagcacaacaauuu

SEQ ID NO: 194219 - RNA, 19 nt, Homo sapiens
  misc_RNA (1)...(19): siRNA sense strand
agaagauguucgagacuuu

SEQ ID NO: 194220 - RNA, 19 nt, Homo sapiens
  misc_RNA (1)...(19): siRNA sense strand
gagcaagagcacaacaauu

SEQ ID NO: 194221 - RNA, 19 nt, Homo sapiens
  misc_RNA (1)...(19): siRNA sense strand
ucaagcaaguggcaaguuc

SEQ ID NO: 194222 - RNA, 19 nt, Homo sapiens
  misc_RNA (1)...(19): siRNA sense strand
ccacgagacucaaacaacu

SEQ ID NO: 194223 - RNA, 19 nt, Homo sapiens
  misc_RNA (1)...(19): siRNA sense strand
cagcacaaccucaagcaaa

SEQ ID NO: 194224 - RNA, 19 nt, Homo sapiens
  misc_RNA (1)...(19): siRNA sense strand
gcaaagaguguccaaucau

SEQ ID NO: 194225 - RNA, 19 nt, Homo sapiens
  misc_RNA (1)...(19): siRNA sense strand
auggauauccugcagauua

SEQ ID NO: 194226 - RNA, 19 nt, Homo sapiens
  misc_RNA (1)...(19): siRNA sense strand
uguaacaucugcaaagagu

SEQ ID NO: 194227 - RNA, 19 nt, Homo sapiens
  misc_RNA (1)...(19): siRNA sense strand
guccggagcugcuuccaau

SEQ ID NO: 194228 - RNA, 19 nt, Homo sapiens
  misc_RNA (1)...(19): siRNA sense strand
gcaaguggcaaguucaaca

SEQ ID NO: 194229 - RNA, 19 nt, Homo sapiens
  misc_RNA (1)...(19): siRNA sense strand
gcuuccaauuugcuaauaa

SEQ ID NO: 194230 - RNA, 19 nt, Homo sapiens
  misc_RNA (1)...(19): siRNA sense strand
uggaagacaaguacagaua

SEQ ID NO: 194231 - RNA, 19 nt, Homo sapiens
  misc_RNA (1)...(19): siRNA sense strand
ggauccguguccugucuuu

SEQ ID NO: 194232 - RNA, 19 nt, Homo sapiens
  misc_RNA (1)...(19): siRNA sense strand
gucuuuagcugaccugaau

SEQ ID NO: 194233 - RNA, 19 nt, Homo sapiens
  misc_RNA (1)...(19): siRNA sense strand
gacaaguacagauaccuuu

SEQ ID NO: 194234 - RNA, 19 nt, Homo sapiens
  misc_RNA (1)...(19): siRNA sense strand
ccaagcaucaggccaaaug

SEQ ID NO: 194235 - RNA, 19 nt, Homo sapiens
  misc_RNA (1)...(19): siRNA sense strand
ggagcaagagcacaacaau

SEQ ID NO: 194236 - RNA, 19 nt, Homo sapiens
  misc_RNA (1)...(19): siRNA sense strand
guguaaagcacauuuggaa

SEQ ID NO: 194237 - RNA, 19 nt, Homo sapiens
  misc_RNA (1)...(19): siRNA sense strand
caagacaguugggugaagu

SEQ ID NO: 194238 - RNA, 19 nt, Homo sapiens
  misc_RNA (1)...(19): siRNA sense strand
gaagauguucgagacuuug

SEQ ID NO: 194239 - RNA, 19 nt, Homo sapiens
  misc_RNA (1)...(19): siRNA sense strand
gucagauucucagcuuaua

SEQ ID NO: 194240 - RNA, 19 nt, Homo sapiens
  misc_RNA (1)...(19): siRNA sense strand
uaacaucugcaaagagugu

SEQ ID NO: 194241 - RNA, 19 nt, Homo sapiens
  misc_RNA (1)...(19): siRNA sense strand
cggagcugcuuccaauuug

SEQ ID NO: 194242 - RNA, 19 nt, Homo sapiens
  misc_RNA (1)...(19): siRNA sense strand
gaagacaaguacagauacc

SEQ ID NO: 194243 - RNA, 19 nt, Homo sapiens
  misc_RNA (1)...(19): siRNA sense strand
ccauggauauccugcagau

SEQ ID NO: 194244 - RNA, 19 nt, Homo sapiens
  misc_RNA (1)...(19): siRNA sense strand
ggcaucauuucccugugua

SEQ ID NO: 194245 - RNA, 19 nt, Homo sapiens
  misc_RNA (1)...(19): siRNA sense strand
uggauauccugcagauuau

SEQ ID NO: 194246 - RNA, 19 nt, Homo sapiens
  misc_RNA (1)...(19): siRNA sense strand
ggaagacaaguacagauac

SEQ ID NO: 194247 - RNA, 19 nt, Homo sapiens
  misc_RNA (1)...(19): siRNA sense strand
ugcaaagaguguccaauca

SEQ ID NO: 194248 - RNA, 19 nt, Homo sapiens
  misc_RNA (1)...(19): siRNA sense strand
guggauaugugucugaacu

SEQ ID NO: 194249 - RNA, 19 nt, Homo sapiens
  misc_RNA (1)...(19): siRNA sense strand
acuggcugcugaauguuua

SEQ ID NO: 194250 - RNA, 19 nt, Homo sapiens
  misc_RNA (1)...(19): siRNA sense strand
acuaucccaugguggaaua

SEQ ID NO: 194251 - RNA, 19 nt, Homo sapiens
  misc_RNA (1)...(19): siRNA sense strand
ccggagcugcuuccaauuu

SEQ ID NO: 194252 - RNA, 19 nt, Homo sapiens
  misc_RNA (1)...(19): siRNA sense strand
ccaaauuccaagacaguug

SEQ ID NO: 194253 - RNA, 19 nt, Homo sapiens
  misc_RNA (1)...(19): siRNA sense strand
cagaaacugccaagcauca

SEQ ID NO: 194254 - RNA, 19 nt, Homo sapiens
  misc_RNA (1)...(19): siRNA sense strand
uaugacaucugccaaagcu

SEQ ID NO: 194255 - RNA, 19 nt, Homo sapiens
  misc_RNA (1)...(19): siRNA sense strand
aaugucagauucucagcuu

SEQ ID NO: 194256 - RNA, 19 nt, Homo sapiens
  misc_RNA (1)...(19): siRNA sense strand
ucgagacuuugccaaggua

SEQ ID NO: 194257 - RNA, 19 nt, Homo sapiens
  misc_RNA (1)...(19): siRNA sense strand
gcaaaaggccauaaaaugc

SEQ ID NO: 194258 - RNA, 19 nt, Homo sapiens
  misc_RNA (1)...(19): siRNA sense strand
cugcaugauucuauccaaa

SEQ ID NO: 194259 - RNA, 19 nt, Homo sapiens
  misc_RNA (1)...(19): siRNA sense strand
uaaagcacauuuggaagac

SEQ ID NO: 194260 - RNA, 19 nt, Homo sapiens
  misc_RNA (1)...(19): siRNA sense strand
acaggagucuaaagcacuu

SEQ ID NO: 194261 - RNA, 19 nt, Homo sapiens
  misc_RNA (1)...(19): siRNA sense strand
acagauaccuuuucaagca

SEQ ID NO: 194262 - RNA, 19 nt, Homo sapiens
  misc_RNA (1)...(19): siRNA sense strand
aagcacauuuggaagacaa

SEQ ID NO: 194263 - RNA, 19 nt, Homo sapiens
  misc_RNA (1)...(19): siRNA sense strand
gcuaauaauaagccagaga

SEQ ID NO: 194264 - RNA, 19 nt, Homo sapiens
  misc_RNA (1)...(19): siRNA sense strand
caagagcacaacaauuugg

SEQ ID NO: 194265 - RNA, 19 nt, Homo sapiens
  misc_RNA (1)...(19): siRNA sense strand
ccugucagcugcaugugau

SEQ ID NO: 194266 - RNA, 19 nt, Homo sapiens
  misc_RNA (1)...(19): siRNA sense strand
gcugcugaauguuuaugau

SEQ ID NO: 194267 - RNA, 19 nt, Homo sapiens
  misc_RNA (1)...(19): siRNA sense strand
acagagcucuaccagucuu

SEQ ID NO: 194268 - RNA, 19 nt, Homo sapiens
  misc_RNA (1)...(19): siRNA sense strand
acaguugggugaaguugca

SEQ ID NO: 194269 - RNA, 19 nt, Homo sapiens
  misc_RNA (1)...(19): siRNA sense strand
guuugaccacuauuuauga

SEQ ID NO: 194270 - RNA, 19 nt, Homo sapiens
  misc_RNA (1)...(19): siRNA sense strand
gcuuauaggacugccauga

SEQ ID NO: 194271 - RNA, 19 nt, Homo sapiens
  misc_RNA (1)...(19): siRNA sense strand
caucaggccaaauguaaca

SEQ ID NO: 194272 - RNA, 19 nt, Homo sapiens
  misc_RNA (1)...(19): siRNA sense strand
gauucuauccaaauuccaa

SEQ ID NO: 194273 - RNA, 19 nt, Homo sapiens
  misc_RNA (1)...(19): siRNA sense strand
ggcaaguucaacaggauuu

SEQ ID NO: 194274 - RNA, 19 nt, Homo sapiens
  misc_RNA (1)...(19): siRNA sense strand
gaacuggcugcugaauguu

SEQ ID NO: 194275 - RNA, 19 nt, Homo sapiens
  misc_RNA (1)...(19): siRNA sense strand
cugcugaauguuuaugaua

SEQ ID NO: 194276 - RNA, 19 nt, Homo sapiens
  misc_RNA (1)...(19): siRNA sense strand
aagcaucaggccaaaugua

SEQ ID NO: 194277 - RNA, 19 nt, Homo sapiens
  misc_RNA (1)...(19): siRNA sense strand
uggcaucauuucccugugu

SEQ ID NO: 194278 - RNA, 19 nt, Homo sapiens
  misc_RNA (1)...(19): siRNA sense strand
ccaugaaacuccgaagacu

SEQ ID NO: 194279 - RNA, 19 nt, Homo sapiens
  misc_RNA (1)...(19): siRNA sense strand
auaauaagccagagaucga

SEQ ID NO: 194280 - RNA, 19 nt, Homo sapiens
  misc_RNA (1)...(19): siRNA sense strand
cuaauaauaagccagagau
